United States Patent Application Publication US 2007/0277258 A1 - sequence listing, part 3

SEQ ID NO: 14167 - DNA, 431 bp, Zea mays
  Clone ID: LIB3150-066-P2-K1-H2
catcaaataaaattactcttatttgtttcaaaaaacaaattgcactatacagtgtggcaaggttccatagctagaggattatcctagggcaaaacataatttcaggaaactgtcccaacagaaacccttcatcaagacagtttgaacaagaacaaacactagtacatctgagatttgtcgatagatatgtagcttatcgctttttggagacaccaacagtttttccacgcctgccagtgttcttggtgtgctggccacggacacggaggccccagtagtgacgcggaccacgttggttcctgatctttttgagcctctcgaggtcgtcctttagctttatgccgagggcgttggtaaccacctgttagaacctttcgtccttgttattttcttttctgttgtagaacctctttctgctccctttatttttc

SEQ ID NO: 14168 - DNA, 328 bp, Zea mays
  Clone ID: LIB3150-066-P2-K1-H4
actccggaatgggcatcactgtataacgtggaaactttttaagggcggaacaaacagcatcaggcacctttttttcctgctccaggggcttgcagatcaatatcaatccctgcctgccttgccaccaccaccaccaaccagtagcaggggcatcagacatggactgtcttcggttcaaaaaaaacgcagagatgccattgacacatcaaaaatgccggggacatgtggtttctttctaccggaaagaattccaacaccacccacaaaaaaatcaggcgttattcgcccgtgacagaacctttagggacagggggcccccactttagtt

SEQ ID NO: 14169 - DNA, 353 bp, Zea mays
  Clone ID: LIB3150-066-P2-K1-H7
aataaataactaaataattatagagaaggcctaaatggcaaaagtcgggacccctgggtaacagggggggatatatctattaatatattatttcataaacaccctattggtaaaacgctaaccacaatcatgatcaaaacacagataatgattatcaacatttcataatggctacgttttaattcaaacggcactcgtacttccacttttgttccattttcgaagctcttgcaatactctgttttaccgccttccattttcttttccgtcttttgggattagaaccttctttcatggagttcaccttgtttaggtatatatttcctatttttaatacacttatatattttttt

SEQ ID NO: 14170 - DNA, 430 bp, Zea mays
  unsure at all n locations
  Clone ID: LIB3150-066-P2-K1-H8
ggaccgngaatggttcggcaattggacaaatgacgtcataaacgtgaacatgttccttccggtggtccgggtttgcagtttgcattgtcactgacggctcgatgcgacacaggaacatcattaggggaagcatgccgcgttcacttctatacagaggacatccacatacacacacataacccaaaaagggcgcctaacacagtaacgcaagtgggtgcagaattcaatggaatgaatggaatacatagctatttctctgaaatcatacatggtgctgtgtacttgtatctaaaaaccagcaaggacgtctttcatttcgttgactgacatgatcggctcattcccatatatccgtgttaccatctgaacaaagctcttcgatttgtccaaaaactccttcttgcacttgtcccacagcgaaagaaacaac

SEQ ID NO: 14171 - DNA, 109 bp, Zea mays
  Clone ID: LIB3150-067-P1-N1-C6
tctacatatgaccactgatttcacaatgaaaagggagacaatgccttcatggctagaactgctgcttgcaacacaaatctttacgacttgtgcttaccatcttcttgct

SEQ ID NO: 14172 - DNA, 308 bp, Zea mays
  Clone ID: LIB3150-067-P1-N1-F3
acttgttttttttgaccaaccgtactagcgacgggggaactttcgaaagaacaaggtatcataatgccaagtttcttgatacactgccaagatgcccatccattgtaagtgatccatggctttgttggctaccttctgtgaatgaagccattgttgtcccaactcaagtaaattatgttgtaaaagctggaaacctttaccaaagtggataccagctcaatgggggcgcctattttatttcaaatcacataagtaatacatggttatgggatcgattatgtgttagcggtggttctatattgaggatt

SEQ ID NO: 14173 - DNA, 107 bp, Zea mays
  Clone ID: LIB3150-067-P1-N1-F7
tttttccttgttctttgacaccctcttcctgggagtgggagagttagagtgaggcagcttgcttcatacaagggtaaatgttgtaggtagcgcatggtagctaaact

SEQ ID NO: 14174 - DNA, 131 bp, Zea mays
  Clone ID: LIB3150-067-P1-N1-H6
tttctcctactacggcactaccccatccccggagcttgtccaccttcccgggttccgcgttccaacctaccccctctcgtcacttatggtgcccagccgctcgctgcgcaactactagcgcaccgtcccct

SEQ ID NO: 14175 - DNA, 407 bp, Zea mays
  Clone ID: LIB3150-067-P2-K1-A10
ggggaatcacaacaaattcttcccatagaatggcattattcacgctaatcaacatgagcatacaaaaataggaagcttttcagttaaaatttcagcttgtaaacaagtccactgaaaagaattgtatagcttagcactacgggccaatagctaaacactacacccccacttgtttgcttttggtcttcgtggcttgatacttctatgcaagatttttgtctttggccatccctgttggtttcttctttacatgggtggatttggagctcactgcactgttgggggatccatttcgagatcggcctctcacgaacaataatttgcttcaaacaattcaaggatcccagctcgcagtttttggtgctgttggtaaaaacaagtaacgttttgggcacacttctagaggc

SEQ ID NO: 14176 - DNA, 404 bp, Zea mays
  Clone ID: LIB3150-067-P2-K1-A8
gcttcaaaaaaatatgcttgcttcaaaaggcatgatcatcagatcttcaggtgtggcaagaattcaagacatcaatacaaaataatcagatgcaaaaacattccatgatcaacacttcttcctcaaggacctcaatgtgttcacgatttggtcagttacatgtgcagaatactggaaattaatgtctccacaactgacttgcagagaattagaaaaaaaaaaacccaattctgtatcaacatgacttcaataacagaggtcgaaggcaataagtccgggtatgcgatcttattgatgttcctagaaattccaattcatatgaggtgatatcagatggagccacccagcataatagcctcaatctcttcttcagtcagaggtttacgcttaggaaggagtgaagc

SEQ ID NO: 14177 - DNA, 331 bp, Zea mays
  Clone ID: LIB3150-067-P2-K1-A9
agcagaacaaaagatgagtactttcatgcataacggggttcagcacgagataagcaggttcacacaaggcactgtaataccccatacacttaaaattcatgttgcacaaagcaaaataagataggctaaaccaaaacgtctggattcgcattccaactgtagattggacttaagcaacggcctcgaggaaagccttcccaggagcacgcttttcaagtcttccatggttaccgagcagctttgcgttgacaccatcaggaacaattctaccctcactcttgtacttcaggtagtcggcacggctgaacttggtgaagccccactttctgct

SEQ ID NO: 14178 - DNA, 287 bp, Zea mays
  Clone ID: LIB3150-067-P2-K1-B1
ccctttatttttacgctatgctgaacaaagtactacaggagacagttttgccaaagggtggcgccattgataaattgcaatctcgtctggcattttcacttaacatccaagatgttatgagaaatgcgatccaaagagcccaggatgaacttatttgcattacccccaaagctaagctgttgctgcttcatgtatcatgtagcccctgcatattttatatcctactatcctaaccacactgccgcatattctttttatctaatcaaacttgatttggggcccttttc

SEQ ID NO: 14179 - DNA, 444 bp, Zea mays
  Clone ID: LIB3150-067-P2-K1-B10
gtaaaaaaaacttttaaataaatattaaatagccatgtgtctggagccttatttgactgatgaatcagcacatgatgatcagaacactgtaaccatcaatgacgatgaactctaaccctgaatacttgtcagccgcatgcagttcgcccgacgccgaggaaatcaaagaacgacacgtccttcttcttcagtggctcatcggcgatgtcgctggcgtgatactccttttggtggtgctcatggcggccatggtggccgatatccatgcctagcgcttctcttggagaggagaagatgatggagagaggtgtcgtcggctgcttgccgctgtagctgtaccgtcctgatgcctcaaaactcggccccatcaagcccttactcatagtggctgtgccaaagttcttgaacagtgaagtaggaggggcaagcaccggcgacctgaac

SEQ ID NO: 14180 - DNA, 385 bp, Zea mays
  Clone ID: LIB3150-067-P2-K1-B12
acccaaaaaagcaaccaccggggctgaaaacacatgggacgaaacaactggttgcaaaaaaattgagtcaagggtgacaaaaaattcggccatccattgttttaaacaaaatcctaacaaaaagaaaaggggctcccatagccaggaaagcctttgtttttatactaatgaacccccacaacagcccggggcctagggagttacaaaatttcccaaaacatggcataaaaaaaaatcggattttgcccgaaacccccactttaacataaaaaccccaccgcccttattactcctcccccacaatatttgggaaaaaccaagccttaccaaatcacccccaccaccggttttttagttctgttttttttaaaaatgatcacaaaag

SEQ ID NO: 14181 - DNA, 405 bp, Zea mays
  Clone ID: LIB3150-067-P2-K1-B5
acccacgctgattaacgcatatgaacattttacccaatgtgaggttataataaactgaaggcggttgagatggaactcaaaacccacaaacaactctgaaagaaaatgcacaaattaaccgtggaactgcaaagggggcgttggtgcatcaggggggtctatggagagccaatagcacggcaacggaccgcctctcaagcagttgcacagcttgaaaggcgaatgacacacttcgtggcccggggaaccatgcgcgaccggtgccgtggtttcgcccttctggaacttggccatcgcaagctttttagccctcttttcatcctgggtttttttgagccgctccttgatcttacgtaaagcatcttctttaccaataattcggcccttcgttttttcaaccctttt

SEQ ID NO: 14182 - DNA, 442 bp, Zea mays
  Clone ID: LIB3150-067-P2-K1-C10
gccgctattgatagcagacaaaggcacacccgcaagtggcgctcgacgttgacgctacccaaacaacagggcacgccgcagcagagcttaacagtacacaataacagtaacaaccgcatacaaaacttcgggatggagtgacaagtcaggtattgcaaaagcagatacaggattaacgacaggttgcatcatttctttttggcagctgccttggtaaccttggcgccggtcgggtccttcttctccacactcttgatgactccaacagcaactgtctgcctcatgtcgcggacagcaaacctaccaaggggaggatactgcgagaatgtctccaccaccatgggcttggtgggaatcattttcaccataccagcatcgccgttcttcaagaacttgggctctttctcaagctccttgccagaacgcctgtcgatcttggtaa

SEQ ID NO: 14183 - DNA, 472 bp, Zea mays
  unsure at all n locations
  Clone ID: LIB3150-067-P2-K1-D1
accagacactagcatagttctagtaaaaacacagcctaacacaacaacggaggcataaggaacaaaacagaaagaaagaaaaacgactgaagaacacgtcgacgacacgtatgtccggaactaccaaaagaatccctaggatctctactaccccactagtacagagcaccaaaccacatggcacatggcagccaccaccactagcacggggaaggacaagagggtcagttgaataacagtaaaccccgtgctgctactaaaccacgacggctgatcgatcaaaacccagcgcaggcgcaggcacgcacgcacgccagacagcgggatccactgcgcgtgtcgtgcccgccccctccctcccacttacacctcctagcggaggagaggtgcggcggcggcggcgaggccgaggccgagggcggccaccacgtgcagcctggagacgcgcggcgccgcagcgtcgntgtagtcg

SEQ ID NO: 14184 - DNA, 75 bp, Zea mays
  Clone ID: LIB3150-067-P2-K1-D10
ccactctattgtttttttatctttttatactacaccaggtggtctttttttaaacagagggggggtaaataaaat

SEQ ID NO: 14185 - DNA, 415 bp, Zea mays
  Clone ID: LIB3150-067-P2-K1-D12
aaacgaacaaagccttactgatagattttaattggggaaaaaaaatagagaagtcagttcgcctccacgtgaacatttcggttttttcaatgatccaaagctgaacgctcatagagtacacaacaacgtttacaggtttacatgttctctttctttaaaacaagtactgcatgatgttgaactgacgacgcgccttacagccatgactatgcgttgaaaaattcacatttttgttgccagctatccaggttctcaatagactttttttttttatccggggaaatcaacatgtcatcattttttagccttcctaccttttttcgcaggtggggttttcctcgtgccctttttagggccctttcctgcaaccttcgcctttttcggggccttccccggtgtttctctgctttccttt

SEQ ID NO: 14186 - DNA, 400 bp, Zea mays
  Clone ID: LIB3150-067-P2-K1-D9
gcagcaacagctaattgattgatggatagattcttttttgagcaggtgacacaagagaaacacagaataagatactatactggagttgttgacgttgatcgctacggtggactgattccaagctgctcaaaatatcctgagccattgccctagattgtaggcaaatagatttggtgttgggttcatttcagtaattaatgctaatccagggaagaaaattgttttagtaatgaaaaaaaatcacactaatcgctcgttccacttagcaatggcactactgtaattcaagctcaattcaatctttccaggctttaactgcacaagaacactgcaaactacaacagtccagagaaaatttaccatcaccgctagttgatcagaactatgctgtcgccgtcgt

SEQ ID NO: 14187 - DNA, 443 bp, Zea mays
  Clone ID: LIB3150-067-P2-K1-E1
gaagctgcattgacgttaacttgcaaagaaaagaaacagaaaatggttggaaagacatgctaacaatgtagttcaaacctgacagactaaaggagtacaaaaggtggacaacactagaatgcttcaaaaggaagcctctactgctacccaaatcaagcaaccataatttaaaatatctaaacgagtgtactggcaccagaacattcagtttcatggatattgtaaccaatctcacaagctttgagtggcagccaacccttctatcttggtccccactccccagtacctagtgaacaacagatccataaaagacggtctctgcaggaccagtcatgtaaacatgattgtcatcctccctccactcaatttccaatggcccgccaggcaaatcaactacacatttccgctcagctcgaccctcaagaacagctgcaacaaccacc

SEQ ID NO: 14188 - DNA, 453 bp, Zea mays
  Clone ID: LIB3150-067-P2-K1-E10
cagatcaacgaatggatttcattacttgcaaggtacgtccgttacaacagatctggggggcctctgatttcagaatgatggacagtgctcttggcatgctgagataaataagaactgtcacttgagtggcttggggggtccctctttcgtgccccccacccccgtgccacgtgaggcactagtagctgttaatacgcgcacaggtgaagaccagatcaccgtgctacggttgaaagccgccccgcagtttcagctttcagctcgaccacacatggacaaggccgtgccggttgccagtgtagatctcgtcgcgatcctcgtcgtagtacagagccgtgatgtcctcaagggcctccgagactgtgttccggaacttccacaccttctttctttccttgcaagcattggagtttccagtgtttatttttgccaggcatttcccggacagtatgc

SEQ ID NO: 14189 - DNA, 445 bp, Zea mays
  unsure at all n locations
  Clone ID: LIB3150-067-P2-K1-E3
aaagtatcatacttgttctttgtcaaacacagttttgcagtcttaacaacgtgatctggaacaatgcccatcaaacacaacgtgacgtggaacaatgttcatcagtcttaacagctcaaatagacgcagatcatatcatccatcactacccctaccagataaattgagccacgtntaccaacaccacccagcctagtactatgagcctaagaagaagtgaacttggtgacggccttggtgccctcggagacggcgtgcttggcaagctcaccggggaggacgaggcgcaccgaggtctggatctcgcgggaggtgacggtgggcttattgttatagcgcgccagcttggcggactcggccgcgagcttctcgaagatgtcgctgatgaaggagttcatgatggacatggccttggacgagatgcccatgtcggggtgcacctgct

SEQ ID NO: 14190 - DNA, 342 bp, Zea mays
  Clone ID: LIB3150-067-P2-K1-E6
ggagggcaaatgaaattcattaatcacgctgcaaagattatgtcaaattacagtgcaacactaaccagaagagctgctgatttaactgaacaacaatacaatggcatggatcgacaaccagaccgctagaatcagggggaaaaaaagaggggaaacaacacaacagatttactggaaacgatcgggaatcgcgagggaaactgcgctatgcagggggctatcaactttgctgaagctctataaggaatccactatgcaacctagctaccgtctcctgctaaactacgctgtaccccctcatggcgctcgtgcagtctccgatggcttgtcctccaggggcgt

SEQ ID NO: 14191 - DNA, 207 bp, Zea mays
  Clone ID: LIB3150-067-P2-K1-F1
agagtagaagcaggatagaaattttttcacagtcagacaataaccatgtatggaacataggtttacatagcatggggacaaataccactatctgtgtgattcggcggctgacaacgcacgcgggtgcgggggacggctaggcgtgttagctgaccctaaaggaggagtaccgagcgctcatctactacagctgggcgaacaaggcca

SEQ ID NO: 14192 - DNA, 459 bp, Zea mays
  Clone ID: LIB3150-067-P2-K1-F10
aaaagctcaaggcattacgaacaactagggtccatccatgtgttattcagacctatcacgaacaattaagtacacgccctgccacagcgaatgcagagtttcagtctttcagacaccatttgcaaatctagaaacacaagttgttgcctaagagtaactctccgatcagtcagctaaaaggtgtggaggctgcctacacatcatgtcttttagcatacacaatcagggggtgaggttctcaagttggtggctgaaatcaacaaaggatgcctgtacatgcgacacatacgcactaagtacaggataattaacagcggctactacagctacggggttccgcggatcctcatgcctcgatctcctgcgcctgaggctgctgctgtttcttcccggtgtcttcgtctccctctccttcatcctcctctgataactgggttaactcgtcttggatcataactt

SEQ ID NO: 14193 - DNA, 452 bp, Zea mays
  unsure at all n locations
  Clone ID: LIB3150-067-P2-K1-F12
ggaggtcaacatacctctctgtaaaaatgcaggggtaaaacttgttatttcttttcttgaaaaccttgtctgtcatataactaattcaaaattaggaaaacaaaaaagagaggaaggaatgctaccggctcaaacctcgatagacaaacagcaactagaattactacagagctgtatcagtacacgctaaacgctggtgaaacccgacatgggcatttgcttcttcaagatgaagccacacattctggggggtgcaattctctcttcttacaagcaattctgtcgcaccttttttctctcatcatcatggngaactgaggagctcaaatccacatgtcaattcggtgccatgtaagattcctcacggccgggagctttactggagccaccatcaatgttaaaatggtgaattttgcagcacgaatgaagaatcagcaccctggaagcgactg

SEQ ID NO: 14194 - DNA, 432 bp, Zea mays
  Clone ID: LIB3150-067-P2-K1-F2
aaagaagaccacagcaatccttagtgtcgaacaattcaatgtctcgttacaagcgagcatgctcacacataggcgcggaactttcgtcatagaagacacatcactgaacaagcaaacaacccagaacagacttggcttattccattcaccgattgacagggcaaccgtttcaagcagatggcttcatcagggcagcgaccttctggacagacggcctctccatcagaccagaccaccaggccttcacatgcgggtaggcgtcgagcacagatgcgtagggcgtagcgaacaggcagagagtgacagacacatggttcaggtcggcgaggctgaggaagtctccagcaaggtacttgcacttggtcaggcttgctttgttcaccttttagcaccttctttaagctttttaaggttcttatccacaactttctt

SEQ ID NO: 14195 - DNA, 454 bp, Zea mays
  Clone ID: LIB3150-067-P2-K1-F9
cgtaaacaatgtactacctccattatcgaatatttgttgtctagttttaaactaaaactcgacacataaaaaagaacagaggaagaacttcgctaccaaatggtacatcatgagaatctagaaaaaaaaaaacctacggttggttgtttcaacgaaataacaattactaggttcttaggagccaaaaacacttgaaatgtgaccaacttgaacgccccagaaccaccatcaaaactagggtaacaagcatcccaactacaccgagaaacagcgtgtctaatcacatcctatcctctcttctgcgcggggcacagcttatgatctcatcgaccctgaggatcatctccgcggcctccgtcgcagacaggagtatggcctgcttcaccttgaacgactcttgaatccccagcttttgcatgtccccaacggtgccagtgatgacatcgattccagc

SEQ ID NO: 14196 - DNA, 177 bp, Zea mays
  Clone ID: LIB3150-067-P2-K1-G1
ccttgcaaccgattgcctatccgggtgccaaccaaagaccgagggcgcccaaggccgagaagaagcccgcggcgaagaagccggtggaggaggagcccgcggtcgataagacgaccgccgggaagaagcccaaggcggtgaagcgggtccccgctggcaagttcgtctggaaggagg

SEQ ID NO: 14197 - DNA, 320 bp, Zea mays
  Clone ID: LIB3150-067-P2-K1-G4
gaatagttgccgactccaacttttcatatagaattgcttttgccgatacataggcggcattacagcatagttggtggaacaaaaaaagggggctgctccattctccatcggcaggaccaacttacacgaaatttaacagcaaagagactaattaacatacaaatataaagataaccatcatcccacataggaagcatgttttttggatgttcgaaaataagctctaacgagcaaaccacacttcgcaacctaactcgtaggcaggagttccaaaacggtcacgcaaagagaagcaactcattacttgtagtccttgacgt

SEQ ID NO: 14198 - DNA, 450 bp, Zea mays
  Clone ID: LIB3150-067-P2-K1-G7
gacagggacgcccacagcgcgccaaatgttccagtatcatatatgcatagacaggtacagtgtctagcagccacaaaggtggtcagcagcagggccaacaaatgaaaaaataaactacaacattgcaggatcatctgcgtcgacatattttattactgcagaattgatcccagcagcactaccggtagttacggtagacaggagtgtacatgcagctctgtgcatatttcaccaggtcccttgggggaggcagacgggtcgccaaaccgagttcataagcttttgcagccacggctgcggcaatgcgcgcagagatctttctaatgttggtgaagggcgggaagattgatcccttgtcgaagttctcctgtgtggcctgagcagctagtgcttccgaggcggcaagaagcatgtcctcgtggacacggatggctccagagataacaagac

SEQ ID NO: 14199 - DNA, 448 bp, Zea mays
  Clone ID: LIB3150-067-P2-K1-G8
ggcgcaccacaatacagggaatcacatttctatgtgcaccacaatacagtgttacaacagaattccatggacatctgtaacagagctaacaggcaacactcctctcttcccctattcaggaaaactggcaacacagcagttaaggaaaacaaaaaattgagtcaagacagacctctaaccctcccttcccaaagaaaaaaaaaaagggtcatcccaactaggtggcctccttcccaggaaaatggccaagggaacttgcgcatttctgcatgcttggttcctgagttatcaaggttttacaacacacaggagccaaggtggcctgtttggcctttaatcccttccaagctgtatgcccacaaatctcctctgcttctgccttcagaactttgccagcttaacactcacctgtgattaaacccaggaaatctctgcacagaaccattac

SEQ ID NO: 14200 - DNA, 388 bp, Zea mays
  Clone ID: LIB3150-067-P2-K1-G9
ggaatcattcattcagaaggaaaaagggaatgagacctcatacatagttggttcaaagtcccgacataagacatgatcagaaatttataatgcagcagcctatgaccaggccctttttttgggtaaggcacccccactttcttgcgcaagcggggtgacaaatgttggaacactacccacacaggggctgggtgtttaacccaaacaccactcgaaagttcaaaaaaccccgatgcattgcaccctgccttttttatttggggatcgccccaccccgcaaaatttttattaggggccccgctaggagtttctttcgttcgttcaccaaggggggattttccagcgctggttgtgcccctcgcaccaatttcagagcacgatttcggta

SEQ ID NO: 14201 - DNA, 324 bp, Zea mays
  Clone ID: LIB3150-067-P2-K1-H11
gttcggggggtcctcctttttttttttttttttttttttttttgaggaacgaaaacttttttatttttgaaaagttaaacaccggccgtaggtattgggcccccttcgtaagatcacttattttacaaacaacctttaaaggttaggcccttgtcacctaaccaaaccgaacctggaacacttaccaatttaatccacctccctgaatttgggaccagaaccggttcccctcttaaggggcattcttattcttttcagaaggaaatccgttttcgaggcccttggcttggtaaatttttgcgatgatgggggtgcaaatcccct

SEQ ID NO: 14202 - DNA, 78 bp, Zea mays
  Clone ID: LIB3150-067-P2-K1-H2
ttgtgttcccaaaacccaaaccctagcacacgcgcggtgtgtgcgcaacagaagggggggcggggggagctggaagag

SEQ ID NO: 14203 - DNA, 453 bp, Zea mays
  Clone ID: LIB3150-067-P2-K1-H5
catggcagggaatacatcatatgcattcatatcggcatagaatattacacagcggacccaaaatatcatatgaatttgttcaacacaaatatttcatttagaagagaataatataactttaaaacatatatctgcaaatcctttaacttaaaatccaaaacaaatccaataacttcaactcaaagttttaaaaattaagcagaattgaaaaatgatcttataacttcaaatttagagctactataactagccactataacagccataaggctgcatgtcctataggggtcaaccagacttatgatggaggcacttggcctcgattgaagcttaatagttgacgaaggaggtggttatttttttccatcgaccttttaatactatcaacggtctcctgggatgcttgcgcttgaaccttaaaggtttccacttttttccgaaggccattttttt

SEQ ID NO: 14204 - DNA, 150 bp, Zea mays
  Clone ID: LIB3150-068-P1-N1-A10
tcttcttacggaaccctacccgagcatcagccatggctttcgcggcgcgcgccctgcgccgcctcccgcttcacctctccccctcgatctcccgctccttctgcgcggttttccctgccgccgtcttggctatcctttgccccccttctt

SEQ ID NO: 14205 - DNA, 152 bp, Zea mays
  Clone ID: LIB3150-068-P1-N1-A3
attaagatcgaatccgcacaggtggagttcttttacgcctggggcgacgtggccaatctccccgcgtcaaccgcctggctgatgcataacaatctgtatcagggaatctgcttcatcatctaggactgtaccaatttctgtcgtaaacataa

SEQ ID NO: 14206 - DNA, 97 bp, Zea mays
  Clone ID: LIB3150-068-P1-N1-A4
ctctagccaacacacacataatacctctcattccattccattccatctcaaaggataaaataatgggcggtctctcaccaagcttttgggcctctct

SEQ ID NO: 14207 - DNA, 266 bp, Zea mays
  Clone ID: LIB3150-068-P1-N1-D7
tctttttgtagcacattgatcttggaatcaaggatgacccgtctactggtatgtagggcatggacttttacgtcgttctggaacgagctggatatcgtgttgcacgccggcgcaggtgcaagtcccgcgttggcatccagcacagggtgaccatagaagactccatgaagtggttccaggtgaagtacgatggtagcttccttaacatggccctaaacacctcgtatttattgtatgtcattaaacgacttgcccattatcacttc

SEQ ID NO: 14208 - DNA, 191 bp, Zea mays
  unsure at all n locations
  Clone ID: LIB3150-068-P1-N1-E1
tcgttttctccgcctccgacatcgnttcttcgtccgcacgagcaaccgataatccgccggcgctgagatgttggtttatcaagacctcctatctggcgacgagctcctgtcggattcattcacctacaaggagctcgagaacggcgtcctgtgggaggtcgagggatagtgggtcacccaaggtcctgttg

SEQ ID NO: 14209 - DNA, 97 bp, Zea mays
  unsure at all n locations
  Clone ID: LIB3150-068-P1-N1-E3
tctcgttctctctctactagcctcgagtggccgncaggagacagatcgttacgccaagcgagcggggcccccaaatgtcccccaagcgaggttgcag

SEQ ID NO: 14210 - DNA, 269 bp, Zea mays
  Clone ID: LIB3150-068-P1-N1-E7
tcgtcttgtcgcggcgacctcctccgccggcagaagagactgtctcaggggagccgagttgccgggcgtgccgaatggcgggagtgcgctcgtgaaggtagcgctgcttggctgttcgaatttgtattttattttattatttttttctttgattatgttattaattatttctatattttttttttttcttttatgatttaatttattgttttttttttccattattttcttttactttttttttatttatttatcttattgtatttatt

SEQ ID NO: 14211 - DNA, 189 bp, Zea mays
  Clone ID: LIB3150-068-P1-N1-G4
tggtcttcacaagactatgcaagatcctaagcggctttctttaactggtaagacattttttccaccttttcccttcatccgccacatatcttactctgattcctaccatgacaatcccttttgcttttaacctatttacctctttatttatttatcaaacaattcctatatttattatttagcataata

SEQ ID NO: 14212 - DNA, 107 bp, Zea mays
  Clone ID: LIB3150-068-P1-N1-G7
ttcttttcttccagcctccaacacttttgacaaaagaaattgttaaaggggagtaagtgctgttgcacaaaaccctatcacagtcgcattcatcatggctatgtcca

SEQ ID NO: 14213 - DNA, 144 bp, Zea mays
  Clone ID: LIB3150-068-P1-N1-H10
tttgttagatttttatatttataaataattttatcattactttgctttactttttgtcttttttttatttttttctattatttttattataatttattcgttttttcttttttaattgattttatttgtttttatttttttttt

SEQ ID NO: 14214 - DNA, 243 bp, Zea mays
  unsure at all n locations
  Clone ID: LIB3150-068-P2-K1-B1
attctaccattttttcctttttttttgtcnccattacngctacttctggtgggccttttctcattgtggggggataaaaacctccaccccttttttcaactttatttccctttcaaccatcttttgactccaaatcaccagggaaaagttcgggaaacactcccctttttaaccccatactaaatagcctccgagaaaaatcccaccccaaaaaaggaactttttgctccccttttttttttc

SEQ ID NO: 14215 - DNA, 489 bp, Zea mays
  Clone ID: LIB3150-068-P2-K1-B10
ccggtcctgaattgccggtgccgctcgcccttatttgtttttttttttttagtttttaaactcactttttatcaattcccatcgtttccattacaaaaaaaatcaatgtcccaaatgcaataagttcaaaagaactgaaggtaaaaatctgtataaaatatggtccaattccattcaatggcattactaggtagtatccccctctcctcatggctacatcccagccaacaaatgcatgtccacccacccaccccccaaaaaaaatcccccagcaacaattaattcgattattgcgacacaataattggaaagctaaggtaaaaaaattgtaacagacttgtctttaccaaaaccaactaccatggtgcgaaagcagctggaatgttattacagagtccagcagtaatagcatagaacggtcaaccctgtatccgtccgatgggaatcctatatgccgatctttttctaaacttctggatctgattcaag

SEQ ID NO: 14216 - DNA, 327 bp, Zea mays
  Clone ID: LIB3150-068-P2-K1-B11
gggccgtcaactttttaagggatgaaaaaaaggttcacattcagtctcccaaaattgcaactcaaaccacattcattttcatttcctggcatttcggctaccctgtccctcactgctccttttcgatgacccccttgtccctcacattaatcccccccaaaaactttgggatttccttttttttcacatggcattttttgtttattagggccgccgaaccagataccagctccaccttttttccctcaaggatgaactcatccttgacccttttggacccgaggattgtcaccccatcaaacatttccaccttccttaccttttttt

SEQ ID NO: 14217 - DNA, 403 bp, Zea mays
  Clone ID: LIB3150-068-P2-K1-B2
gacaaaatagccttctcatctcacattttgctacagccaatccgggtaggttcacatccaggaattacaaaacttcacttactgctgagtgcggaacaaaacctaacacgaccataattatgacattgcaactagacgaccacccagagttcaggacagtaatacagaaatataaatgactgtttacttcttcttggcgtcaccagccttggtcttcttgacaccacggatcttcttggccctgttcttccgctctttcatttgcttgcgggacttctcaaccttagtagcaagaccattcctgatgaggcggtatttgggctcgaacttcttggcagactcgaggttatcgtagatgaggccgaagccagtggacttgcctccaccgaagtgggtgcggaac

SEQ ID NO: 14218 - DNA, 380 bp, Zea mays
  Clone ID: LIB3150-068-P2-K1-B7
gacacaaagtttgcagtctcagattcattatatagctaagtaaagatagccatcaaactgctaaaagccagaagaggcgattgtcaacggtataaatagagcatctaaatgcaagtcaaaaggcgtttctcaatgttttggtgagtttgagcaccgtgcttgcaaacagaaattattgaatggcatggccatatcccttctcaaaactatagaaccaaaattggacatagctggccagtatttagttgtcagccacttcaattagggtttgctcgtagtcagcaggggcctcaaatccatggaggttcatcacagttgcggctacattggcgagcccagggatttgaatgtcgttccggaatttcactccggggtgaaga

SEQ ID NO: 14219 - DNA, 460 bp, Zea mays
  unsure at all n locations
  Clone ID: LIB3150-068-P2-K1-C1
attatgtacacatgtacctgttgtattataataaatggcaacctcgcggcagtatacactgtatatgatatcacagtacctgagttccaccttccacttgtatccatggcaatactatatctaaannnacatttcagttgataaaggcgtctatacgtcancttgcatatagtggaaggcttacacgaaaggaaacaataattctcggtaatggccntgaaagtgaaaagagcacagnnnggatatattcttttaccatggggcgtanncctcttgtgtaataaggtgtccccgcaacctcatgaagtcttcatggctcgggaaaattggtagtttggtcaccggaaccacagggattagcttcaatcatgcttcttcagnctcagcaaagcattatattgtctttgcagattttgtatcaccataccttcgagaagctgctcattttccctaaaaattc

SEQ ID NO: 14220 - DNA, 160 bp, Zea mays
  Clone ID: LIB3150-068-P2-K1-C11
attcatgatttgtcatagttctgggtagtacgcacacacaacacaaccggtccattattaaaccaacactgacacgactcatgacacgaacagcagatactttgacaacctccatatggagagggcaccagacgacgcaggcacatcggcagcttaaacg

SEQ ID NO: 14221 - DNA, 381 bp, Zea mays
  Clone ID: LIB3150-068-P2-K1-C12
gacgaaaaaaagataacatcaagatattctatgatactctcctcaaccaatgtcaacgaaaagaactatgcaagaatccatggaccatggtcagtggtcaccactcaccagtaatccccgcaagagcaggaaccaccattgaagtggtggaatcgcacggcatctcggatcacgaattctcggccagtcactgtggatatcagcttgatcacagtgtgacagtcgccgcaaatgcgcagattcttcatgatgtggatcggcatccaggtgggcaaggtcatgagcccgaatgctacagctagcttctcgctgtggtgaatctcggagcgcggggagtctgtcctcacgtaccctatgcgcgcgatcttctccatgagctca

SEQ ID NO: 14222 - DNA, 382 bp, Zea mays
  Clone ID: LIB3150-068-P2-K1-D1
aagaacaaggaaatcctagcctctgtttctttctttcataaatatacagaacgtacgggttggacgtgaaatcgtcgccttgctccacggcaaacatcaaaatgacacgtaccacaggcacagggcgcaggcgggccatccgctgcagaccatgcacaccacaagcaaccactctttgcacactacaaatacccgcaggaaaggaaaaggaaacaaagagccagagcttctttgcatgggatatcacgacaaactcttgtggtatgccgccaatccgtgacagattgcgttctgcactaagagcatcccaaacatttacttagtgggcctaagaagaattcaagaaagcctgacggttgcggtgggcttcggtcctcggttt

SEQ ID NO: 14223 - DNA, 271 bp, Zea mays
  unsure at all n locations
  Clone ID: LIB3150-068-P2-K1-D11
gcacctaaaatgggaatttttttaacaggaacacacaacaggttcatactactgctcatagtgagcaaaggggcgacgcactanagtaacacagatgtagaactgggtactgcaggtagatggaccaaacaacctagtatccacccttgagatcattgaccacatcatatgggatgggagttacggtctcaatggtggtgccctctaccatgaagccgtgctggggacccataggctgccttttgttgctgataacctcgccgattatttt

SEQ ID NO: 14224 - DNA, 345 bp, Zea mays
  Clone ID: LIB3150-068-P2-K1-D12
aaagaatacttctacagaaaaggagaacatctcaacttatgcatgtccaatcccaagacaagcatgggcacgcatgatctctcaccccatatcgttcagacttcagcctaaaactaaagatggcacaactcacaactagggcagagctaaaaaacctccaacacgaagaacacccaggaaaaaaaaacaaaggttgcatttgcaaacagtaaaatctattgttacatccagcttcgatttcctcactcctggattttctcctcagatgtgtgcttggtggtggttacccaatgtacgtaccatcagccggcgccccttgtgtccagctcccctgttcgatgggct

SEQ ID NO: 14225 - DNA, 72 bp, Zea mays
  Clone ID: LIB3150-068-P2-K1-D8
ctacacttcaaaaatattttttttttatgaacataatacctttttcacgggggcaactaaataacatggagg

SEQ ID NO: 14226 - DNA, 244 bp, Zea mays
  Clone ID: LIB3150-068-P2-K1-E10
ctcgataacagcagcaactccatggtttagattcctgggtgccaagccaactgccaagacttacagtcatgagtggaaaccatggatacaatcaaagagaagcgctcggaaatgagcaagtggaaagcttgttcaccattccctcacggctcaactaatggtggttcaacacaaaaaaaggcaccggtgtttgcaaacatgttctggtacacgttttctttgttccgctgggttttattattta

SEQ ID NO: 14227 - DNA, 400 bp, Zea mays
  Clone ID: LIB3150-068-P2-K1-E11
cttgaaaccataccataccccttgatcgttcaaagtgtctaggcaactttggtggcaccggcattacagacagttttggttccacttcctagcgctaacagatacgcatcccttgctcgtcgcaaccaatgcatttttgacatcacatcagttatatccagggcagacgccggaactcattgcgggcaccggcttacatgatcgcgacgctcaggtaatcgccaatctggaacccaagctctgcaagagttttggcatcatcacctcttccatggccataagcgaagggtgaacccacctgtctgacaacaaaacgaccatttttgtttgggtattcaaatgcaaaagaaagcctcgcgttccttttccttgctggaagagcaaccttctttacaagatc

SEQ ID NO: 14228 - DNA, 307 bp, Zea mays
  Clone ID: LIB3150-068-P2-K1-E12
gggtcaaatagcaatggcaagccttattattttttgcaatacggggtttgatacatcagtttgttacaaaaagatgacacaaatgtaaaactacaaaattgttacaccatgagatggggctgttttggtagctacaaatgtttaccaagtggactccttgctgtgtaacaaactaacagctacagcaaaattttaagcctagagtaatataaccatggctggtgttaaaaatgctccaatgcctagtcattccatgtttgagaaccatttccattttaatgcccgccttcaaaaaaatattaacttt

SEQ ID NO: 14229 - DNA, 135 bp, Zea mays
  Clone ID: LIB3150-068-P2-K1-E8
aaattcagacttttctattactactataccaattaaactactgagaatcatttaaaaaagcaggaagactccactctcctcttataatcatcatcaatttcctttttgttcttcataatttactattctacacac

SEQ ID NO: 14230 - DNA, 290 bp, Zea mays
  Clone ID: LIB3150-068-P2-K1-E9
ctattatagattggactaaaaaattaagggtgcacctccattacaatgatgggagatcatacttaaagtttatataaatttactttaaaacattatcatgtaaaattactatcataaatgattctattttaaaaacccaaccatattattaatatctattctcacatttttcatgtactaatcctattatatttttctttaatcccaacatatctacttttactttatctttactattttctattatatattaaatctaattaacagttacctttatttttaatcttttt

SEQ ID NO: 14231 - DNA, 257 bp, Zea mays
  Clone ID: LIB3150-068-P2-K1-F10
aggaatatataggatgacagattttttttatccaaagggggggatggaaatacaaaggttcataaaaaggtttgctgcaacttttagggcagcttataacagttcatacttgcagcacaaatggtcaaggaacagcatgccaaacaacgcattttgcgcccgaacgctcgactttctgtcaagcgggttttaccataccaaggttacacgatccattgatgcaataccatttgaggttcttgttttgtagacccaaa

SEQ ID NO: 14232 - DNA, 329 bp, Zea mays
  Clone ID: LIB3150-068-P2-K1-G10
ggggggtggctcttaatggaaacagtccacaaaacaagtccaactccctgacaacacttttttgcccaagggtcttaccaaaaacaaggcttaaagggggagggttgttctaggcatcgctccaaaagtttatgttcttggacaccagtttcaatacctaacccttgtactggtttacaaaaggggacttgacccatatttcaaggcttgagcgatttggccacccccatccttgaaggcgcacttaccacctttggatcatactcagctgaaagaggcacgagggactttggcctccactcatgccgacagagaaaaccgacctttcc

SEQ ID NO: 14233 - DNA, 446 bp, Zea mays
  Clone ID: LIB3150-068-P2-K1-G11
acttcaaagcttcatggttcatgaactaatacaacaccacaacagggcacagatatacagtgcatacggcaggtaatggtccatagtgacagcatctatccatacgccgctcttattgggcgcgtatttacacaagcggaagtgtccaagcagacattaagggtactacaacagctaggcgccataattggttccaagcagacattaagtgtactataacagctaggtgccgcaataatcggctactcgcagtaggcttttatcaaagacaaaaaaagaagaggtgagcccccgctgatgtcctgggggctgtggaatctctcatgacatgcttattgctgtggcaacttcagggtggtagtgaagcatctcctgccacatcatttcccggatcatctctgagctgatggtttcgtctatgtccagatcgatgggcacttgggcct

SEQ ID NO: 14234 - DNA, 400 bp, Zea mays
  Clone ID: LIB3150-068-P2-K1-G2
aaagacaatgaggccagtttccaaacagaaataaaaccaaagataatcgtcatagttttacaacctcataaggacatatttctaaccatcgaagttttatacctcataaatactaatctagattcctccctctatggtagaagttgagctcataatagtccaaaagatcttcagtcccttctgaggtagattgcttcaatgatttgcaaagactgtatcatttcgccttggaggtcgatcaggaatcgagcctggcttaaattttgatgcctcatgccttgcaagttcaggtggcacaggactgttgctctgtataagcatctgtttcagatcaaagaaaatatcagtgttctctaaaggtaaaaatgaagttgccacccccttcttttcagcacgacct

SEQ ID NO: 14235 - DNA, 344 bp, Zea mays
  Clone ID: LIB3150-068-P2-K1-G8
ggggaaacaaaatatccggggggcgaattgcaaactttttttggacagatgcacatacccccaccctaacctgaaacacacccacattttgttacattattgtggccccaagaaggcaacctaaacaaaactctttaagttacaactggctaagcactacagggccttacaagaaaattcaactttagccaatttaaggttccacagttccttatcaaaaaccaaagaaaccaagcttagtccccctttccttttaaaaggtttcaaaaatttgtgttatttttgccacagggagcaattttccagttcctgaaccaatctcccccataaaatttgccaggacg

SEQ ID NO: 14236 - DNA, 246 bp, Zea mays
  Clone ID: LIB3150-068-P2-K1-H10
ggcaagaccagcaagattacctgttccatcaaaatcagtttaggcaaacgacattacaacgagtgcagaccaccactcgtcagaatctagagagattgaaaaaaaaacagttcttttctgcttttggtgctcccacgacaaaatcacctgagtagctctcgagcaaacacgaccatacatttattgcgaccgtacaaacattgttacaaaaggcagcagcgagctagtatagctccacaagaaaac

SEQ ID NO: 14237 - DNA, 312 bp, Zea mays
  Clone ID: LIB3150-068-P2-K1-H11
atagcaggaaaaatacactcttactgcatttcaaacacataaacacattgtgacaaagacactgacagctagcgacatgatctgagcacatatcacagtcagcaacaagtgcctaaacaacggcttccctatcaaagatccagctgaacttgaccgtcctgggctcgtccttcttggccctgtcctcggcgcgctccgcggtccggcgcatactcggcgcgagcccgcagacgaagtccctggccctgcggccctcgccggagagcccgctctccagtgtctccagcttccaccgcttgacaaggaactcga

SEQ ID NO: 14238 - DNA, 317 bp, Zea mays
  Clone ID: LIB3150-068-P2-K1-H12
cctcaccaagattaaaatttggatggcaacatggtcttaaatgttataaaaacatgatcttaaaatagtacaataatctcaaaaatattcaacattcaacacaacagtaagattgatcgagccacgattaaattaaacttgatataatagcaacatcaagtcgtctagactagataacgtccacaagacgcaaaacacccctcatgtgttggttgccctggtgtatatctgctggctagaatgaacagagaccatccttatgagcccctttgccatcagatccttgatggccctccgtgccaaggatccattaaccc

SEQ ID NO: 14239 - DNA, 288 bp, Zea mays
  Clone ID: LIB3150-068-P2-K1-H3
aaaccatgagcggggtttgtttaatttttacagtctacgagttctttttcaggcagatcactttggggttgggcctactgttgggcgctgccagcttgacctttttggtagctgcccctgcccgcaggggtaaacacagccagcttatgcttcctaccgtttttgagctttgaagcttcctccatggagatgggatacaagctggcgatgacgggggccggaaattctcttaagacggattttttcccggggacatgggttaccattgtgtcagggttcctctctaag

SEQ ID NO: 14240 - DNA, 363 bp, Zea mays
  Clone ID: LIB3150-068-P2-K1-H6
accggtccggaatgtgcgccgggcggcctgtcttttttttttttttttttgctgtaaaaatcttgcattttaaacatagcttcgattattcatacagtagtgttacaaacaccttatggtccatatgttttgacaaacagcttaagcatagtagttcaagcttgactttttcttcgcctggacctgtacgatcccttcattgaaatcctcgtgagttacctctgtagcatcccgccgtagggcaagcataccagcttctacacaaactgcctttagctgtgctccgttgaagtcatcagttgagcgagccaattcttcaaaagtgacatcaagatttacattcattttccttgaatggatttg

SEQ ID NO: 14241 - DNA, 422 bp, Zea mays
  Clone ID: LIB3150-068-P2-K1-H9
aaaacaataacgcctatcttaataacccagtagcaaagcggggggataaagtcttacaacgtaaggggtaaaccacacaacgacagatagataagaaccgacagaaacataacacgataggagccactcagggcagatcacaggatagcagtggcacacaagcccgacgacgccgcgccagtagagcgtctagtactcgtcaccctcgtcgccgtcctcaccctcgtcaaactcagcaccgacctcctcgtagtccttctcgagcgcagccagatcctcacgagcctcggagaactcgccctcctccatacccttaccgacgtaccagtgcacgaaggcgcgcttggcgtacatgaggtcgaacttgtggtcaatgcgggagaagacctccacaacactggtggagttggagatcatgcaca

SEQ ID NO: 14242 - DNA, 209 bp, Zea mays
  unsure at all n locations
  Clone ID: LIB3150-069-P1-N1-A2
tggactcgggggaccagcgaacacacacgaggcaccaggtgcatacgtgcgcggggtcgctctacactgaggtgctcctcctcctnntnctgctcccggggcgggcggcctacttttacacctcctgctggtgccagggccgggaggacgtatcggaggtggctcccattaagctcgccctacacggtacggcagacaccgtccaccta

SEQ ID NO: 14243 - DNA, 140 bp, Zea mays
  unsure at all n locations
  Clone ID: LIB3150-069-P1-N1-A7
tggccgaggtggtggaggatacaaccgtggcagtggtgattatggttctggaggtggtggtttcnaccgagatggtggagactataattctggtgggcgtggtggtggaagcagaggtggaggangctacaatttaagtg

SEQ ID NO: 14244 - DNA, 400 bp, Zea mays
  Clone ID: LIB3150-069-P1-N1-B8
tttgactctaagctcgccggctctcccagggggcaccggacaccgggcgcggtggacaccaccaagccaatacgataccaggtcccatggctcaagaaccgcacgacaaacggcgagagcggggacatagacactaaccccaggccccgtttccccaaccccgtgcgacctaaacaagcccaggtcacctccttgcagtactccttacaccgggcgcaaccgacggcgccggcctgggcgcgcatcaacagggcagccgacaccgacggggcccgacctacctcggagatcgaggagcggctcgccggggtgcccgaggacgcgctcgccaacgccggccaagagtacgtgcaagggaaggcacacacgggggagagcaagggggcgaagagcggaggac

SEQ ID NO: 14245 - DNA, 140 bp, Zea mays
  Clone ID: LIB3150-069-P1-N1-C10
tctttcttacgcgcgcgcgttcacgcagcatgtgccggagtacgcgctggcggggggcgtgagcggatggaacgcggcggtgctggaggcggccatggcgttcgggctcatgtacgcctactttgctacggtgttgtaca

SEQ ID NO: 14246 - DNA, 119 bp, Zea mays
  Clone ID: LIB3150-069-P1-N1-C2
ctgtgatgcttttattaagattctgatgagtggtgacgttaagagaaaattggcagtactgtgttgtaccccaagattccttgcagcattgctatgctaagtaacgaaccctttatctt

SEQ ID NO: 14247 - DNA, 143 bp, Zea mays
  unsure at all n locations
  Clone ID: LIB3150-069-P1-N1-D8
ttctttcgtttgactccattactaangatgggagttaaggtcttcgtcgcggggccgtcgaaacctggcgcttagtttcctaatgccgcccgttggtacgagaccgtcttttcggcttgagcctcaaaattccctggtaaggc

SEQ ID NO: 14248 - DNA, 61 bp, Zea mays
  Clone ID: LIB3150-069-P1-N1-F12
ctatcgtcatggtgtacgccgccggcggcaagcttttcgacaggatctgtagcgccgggag

SEQ ID NO: 14249 - DNA, 168 bp, Zea mays
  Clone ID: LIB3150-069-P1-N1-H11
cttcttttttttttcgccccgcacttctttactgggttacctccttccccgggggggcccaatccttcccttggctttttttacaaaccattatacccggtgccggagattaacgttccaaagctatttctcaacatttccttcagctagagcagagattgtcttatc

SEQ ID NO: 14250 - DNA, 355 bp, Zea mays
  Clone ID: LIB3150-069-P1-N1-H6
gcggtcagccctcgcccggcgctgctgtactaggttacctacttcgccgaggtgtaccaaatcataccatggcgttggagaagaagcagtcatacccgatgcgggagacgaacgttcagaacctcgtgctcaacatctctggcagctagagcgcagatcgcctgacccgagccgccaaggtactggagcagatgagcggccaggcatcctctttgtcacaaggcaaggtacactgagaggacgttcgcgatccgaaccactgagaacatcgcatgctatgtgacggctcggcgtgagtacgcaatgcagatgctagagagtggctcgaatgtaaaggattactacctgatgatga

SEQ ID NO: 14251 - DNA, 322 bp, Zea mays
  Clone ID: LIB3150-069-P2-K1-A10
gggtcctcagagcaaaggaagtgcttattaaaattctgccagttgcttatatggtacattttacaggagacgggcgaataattaagctgctaaggtcatagctaggtagtcaccacacaactcatacagcagatgaaccttcctgggttaagctaatcaaaggcggcaggcagctttgcacatggatgcctgcctgtgcctctcaaacccatatggaagaacgtctgatcgaacacaatttgcaggttgccggccagagttcacatcgatctggggccggaagctgatctgagattgggtaatgtatgtagatctgggtggg

SEQ ID NO: 14252 - DNA, 273 bp, Zea mays
  Clone ID: LIB3150-069-P2-K1-A11
ccaatcacaacacaaaatatttcttccaataaaaacaggtgctaaaaagcatcatcttcctgctcaacagggaccagttaacaatgctctaaaatccctaaatatctttcaaaacccatgccacagcaacaaaacgctcttctactcagtagaaaaatagctctattctatttgcccccttctttcctatacctttatcccaaatttcatttcttctatctctagcccttacaaactttcttactttcctgcccacatataccttgatctgtt

SEQ ID NO: 14253 - DNA, 382 bp, Zea mays
  Clone ID: LIB3150-069-P2-K1-A12
gtctcatcacatttcatttattgccaattaaaaacaaacatctctacatttatgcagtcgtcgttacagttggacttgggatatataccactatgtttatactgttgttgttggtgcagtataatgccagcaaccacccagaaattagccccgaatggaacaaggacagacgaatcaatgaaacattgatcacaattcaagggtacaaactcaacccattccacaccacaaactggtatcggtattcattcatacatactggtagccagaattgacatgtggctttcataaaatgaccacattgaggatttacgtatcatgtgcatcagcattggccggcaattttgcttttcaagcggtaataaaatggaagtaaagaagc

SEQ ID NO: 14254 - DNA, 321 bp, Zea mays
  unsure at all n locations
  Clone ID: LIB3150-069-P2-K1-A9
agaggagacggttttttgaacagggcgactttaaaattgcagtttgattaatggagaacggggagggtacacagagagaaagttgacggtggaaggaataaggaaaaaaaaagactggtctacattgatttttttgtacagaactttccacaccaagggaaggatttttttttgacaaacattctaacataacatatttcaaccaaccaacaaaattcaatgttaatgtgagattttgtatggcccccaatttagccccaccccccgaaaaggagaaagaattagnanggccttttttttttttgtttttggattatnaaa

SEQ ID NO: 14255 - DNA, 349 bp, Zea mays
  Clone ID: LIB3150-069-P2-K1-B1
aagaaaaatatatttttttgatatctgagaatagtacagtacagagatatcaaggttcctatgaggggggatccatctatgagcttcaactgaagaagcatacaatgctgtaccacgatgatataccatgggcaaagcacacgcaccaatgttaagagccgctggtaacacatccaggcaagcacagctgctgaatacccaacagcggttccaggaacctcccctgcggcaaaactgactagtccattcccagtctacaaccacaaatcttggaatcagcatcatgtggaggtaaccaaaaataaaattacagtatccacctttcaccaccctggaagaaaacttgcac

SEQ ID NO: 14256 - DNA, 449 bp, Zea mays
  Clone ID: LIB3150-069-P2-K1-C10
taccggtcctgtattccctctgcgccgcccttttttttttttttttttttttagccagacccgtgttcttatctcatctagtagtaaccatgagagagaaattgttcgctggaacggaggcacgaggcaatatagactatggacatcagaattctcaaaagtcaggttcggtcgcaaatatcctgggattaagtgctcgaagcatcactgttaactgtgaattgccattctaaagtctctggaacattgcaagattgacttttgaattttctacagtgcatcccaaggatatcaacaaatgcagtgcatatgagatgtgatggttgcaaagaggattctattgcgtgctgctgatctttgtaaatgtgccggtcttggaaaaattagttcttttagttcctccttctataaagtttccttgtaccttgggttttttcatctctttctcc

SEQ ID NO: 14257 - DNA, 435 bp, Zea mays
  Clone ID: LIB3150-069-P2-K1-E11
agcagaggaatgtatctttatcttatggaataaaatcgtaacttggggccagactagaaatcaagaggggggcatgcagaaatcctaatctggtggagcgcaatctattcacgcattcccgtttcagtttaatactactcaagtgatgagcccagtaaaatcaaaacttcgaaatgtctccacggcccacagccatagcagctaaacgaataactgggagacaaataaatgcaaagataaagtagaatcgttttaatccctgtcgactaatgccaaccactaattgtacatgtgtctagaatttgctcaaatcgtcttactctccgagagccataccaaacccaaatttgtaatctttcttccagtggtccagctctgcagacaactggaaagtgacacctggagtcaatcgctccttcaaaagagaagaaatta

SEQ ID NO: 14258 - DNA, 436 bp, Zea mays
  Clone ID: LIB3150-069-P2-K1-F10
ccagtaaatcatgcacgacatttatacgtttatcagaatgtacatgactaagatagtattaagcatacaaatctgtgattatgtcagttctgaaatctctagcccttggtttctatcacctattggtggttcctaaaacagcatcagcatcacgtgccaaacattcaaccatcacatcttgcaagtatctcccaccaacacaagattgttacaagacccggtgcttcaggccacctgcacttcaaacaaaagaaccttgcagcaggggcactccagcttcatcaaaatgtagttcatgccgaacccagatattcaactgggaaactccgaggccactgcttcccataacagcctcggaacttacccggagtacagtggctcctgtgccacattgaggtcaccagaatcatagtgggaaaatggatggggttttagt

SEQ ID NO: 14259 - DNA, 372 bp, Zea mays
  Clone ID: LIB3150-069-P2-K1-F11
actcaggcaaatgcacaaattttacagaagcaaacgggtccggattcacgggtacaagcagctcagcctgacggcgacgactgctggtccaaggaaaagcaaacgatgcgagcggcgccggcgcagcggcggcctgagacagtcgacgatgcatgcacgtgcacgagagaaactaaacgatcgacggcgagcggggagagagagctggatgctagctgcgcacccctgggtcggtcggcttcggcttttagtagtcggtggaggggagctgctcgtgggtgtgggagatgaagagcagctcgtagatgacgccggcgaggccgacgccgatgaggggcccgacccagtacacccactggttgccccactccc

SEQ ID NO: 14260 - DNA, 429 bp, Zea mays
  Clone ID: LIB3150-069-P2-K1-F9
gagagaaagtctttcgcgtgaccagttcttactatgcaatcaaatgttagcagctataaagggaaaaccaaacattggataggatctcatttctaacaatcatcttcaaggtaaacttaaactgctttagacaagaagtttcaataaatagcaaacctaaatatcacaattacaaccaccgcatgtgaaaattatcaattcttagaatcgagagttgattcacttatgaagtgttcatcaggtccgcaaatgatatgcataaagactaacaacaaaatcccccaagtagaagatattttgcagttctagctaaaagaatgctctaagatgcaacacccttgcccttcttcctctggagcttcttcatgtagaactcgagctctttaccctcaaggatgtagccaccagctcggccacactgcccaggac

SEQ ID NO: 14261 - DNA, 343 bp, Zea mays
  Clone ID: LIB3150-069-P2-K1-G12
tccgacctgacgggcccgagctccctccttccggttggctggctggctggttgcctggttcactttgtgcggagccccccgcaggccggcgccgcgcctcgcctcacatcaccgagcacccgttggggttctcgtcgctgaacatgctgtcgtgcgggtggcgctgcggcatcgggtagtagtacgccggcggcggcgggtactgcggcatcgccgggcgcccgtacccgtacccgccgtggccatggtggccgtggccgtggccgtgcccgttcatcatcatcatctgttgctgctgctgctgcatgatcgcagccatgtgctgctgctgctgctgcattac

SEQ ID NO: 14262 - DNA, 323 bp, Zea mays
  Clone ID: LIB3150-069-P2-K1-G3
gtcgcgatctaggggaacaggcatggatgtgtaccagtaccatttcaaaccagtggcaggcagcggtgtcggcggcaaaaaatttcgaaacgaaagatgtctgcctatcacttgcgaagaaatcgcgaggggaagcgtgacacctgacgagctgagcaggcaggcggtagtggccgagcgaaagcatcctcgatctcgtcgtatcgtagctgccgccgctcagagcaatggagagagcggtgccagttcggaagtcgcacaccaacacggccgaccttctctcctggtcggccacgggcccttacgcatctgcctcgccggcc

SEQ ID NO: 14263 - DNA, 337 bp, Zea mays
  Clone ID: LIB3150-069-P2-K1-G7
ctaaccatctttaaagattattttttttattcaagtggggaaactttttcagtacaaggaaaatcccacccttaaaaacagttaccacgttacttaacagtacgcttactgaacagttcgcttaattaagctcttatatttgccctaaagccaaaactgcctcaatccctaagcaaattcaagaaaagttaaacactggtgtgcaataggagagttattcaccgattaacatgaatcatgatggctttctgagcgtgcattcttttctcagcctgtggtaacacgatagattttggagccctgttgtcaccttctttcaccttcacatccttttttt

SEQ ID NO: 14264 - DNA, 133 bp, Zea mays
  Clone ID: LIB3150-070-P1-N1-B7
tctatctttaaaacaatcatgccacctgctttaattaataatcctccacccctctagtggcgtttttttttattattctccacacctttctttttttttcaccaacttatctttctatatatttattaacctt

SEQ ID NO: 14265 - DNA, 131 bp, Zea mays
  Clone ID: LIB3150-070-P1-N1-B8
tcctttctgctctgctcccatcccagggagcccgactccgcccaaaagcctagccccatccccttccccccgcccatcttcgcctactaccagacgcgcgccgaacaccacaccgttgtaactagcgaact

SEQ ID NO: 14266 - DNA, 220 bp, Zea mays
  unsure at all n locations
  Clone ID: LIB3150-070-P1-N1-C2
tcgtctcgtccggtctctcctctgcatcaatccgtcgtctcgtcgcttgtcatccatccatccgttcaaatcgaggangtgatggggggaccggtagacccacgtgatcatggatgaggattctcaatcggcatgcagcatgtccgtcttcctctcgccacccagtcgccgttcctccttcctcgtccctccgttcttccgcggacaccctgtcctcgtc

SEQ ID NO: 14267 - DNA, 146 bp, Zea mays
  Clone ID: LIB3150-070-P1-N1-D10
cctcggtaaaaatatccccaaaccctatctgggggtctttatggcgaacccgggggtcttcttctacatgaccgttggcggcgcccctgcggtccggatcgtgattgagcttttctccaacgtggtgcccaattccgtggagaact

SEQ ID NO: 14268 - DNA, 286 bp, Zea mays
  unsure at all n locations
  Clone ID: LIB3150-070-P1-N1-E10
tcttttttattaaacacactcctacncaatacgtgcggctgaattaaaagacgtgggggggtccacagagtctaactacctctgcatctacttcgacgaccgtaccatacgcatatgggacaatcagcccgtactcaccgttggcgcccaggcagtcgtcgttttcaacgcaaactgttacattcgcgtgctcaaggggctcaccaacttcgactatagcgctaacttcaaccctcataccatctcgcagatcgctttcggaggattttattgttccgtgcgcata

SEQ ID NO: 14269 - DNA, 76 bp, Zea mays
  Clone ID: LIB3150-070-P1-N1-F6
ctaattttacaaaaaaaaaaaaaaaaaaaaacgaaaatttttttaaaataataagagccccccaaacacacacttt

SEQ ID NO: 14270 - DNA, 272 bp, Zea mays
  Clone ID: LIB3150-070-P1-N1-H2
tctctcttcctctctgcctctctctctcaggggcgactagggacagccgctgcctccctactcctggtgcccaggtatcctttgccggcgacgagcacccggtaggggtatgggaatggaggtcgttggtgctgaatcaacaccagcagaggtaaaaatatccaacggagaattgaatctattgcaagagaaggaaagcacagcaactgctaaagaacgtgaggaggcatctgtatatggttcagaaacaactgcgaatgcaactgatctga

SEQ ID NO: 14271 - DNA, 269 bp, Zea mays
  unsure at all n locations
  Clone ID: LIB3150-071-P1-N1-A10
tttttcttttctctctcccaattcccctcaagggcgagttttttacccaagataggaagcgcccttccccctctccattctcattcttattctcnttttctttctttcctctcccccaatcttcagatatagtctcctttctttttctatctccatatctctcttttccttttctctttcctttctcctcttctcttttctcctctcgctcagccacgccactgcaaccaacatttttctttatcttttctctctttttatttttcctt

SEQ ID NO: 14272 - DNA, 383 bp, Zea mays
  unsure at all n locations
  Clone ID: LIB3150-071-P1-N1-A6
tctgtgtctcgcgaaccccgacaatggccggaaccgctgtgtcggtcgaggagaagctcgacaagcttcgcgccgaggtcgccaaactcagccagatcagcgagaacgagaaggccgggttcatcagcctcgtgtcacgctacctcagtggggtggcggagcagatcgagtggagcaagatccagaccccgaccgatgaggtagtggtgccgtacgataccctcacgtcgcctcctgaagatctcgaggagacgaanaatctgctggacaagctcgttgtgctcaagctcaacggagggctcgggacgaccatgggctgcaccggacccaagtctgtcattgaagtccgcaatgggttcacattccttgaccttattgtgatt

SEQ ID NO: 14273 - DNA, 263 bp, Zea mays
  Clone ID: LIB3150-071-P1-N1-A7
ttcgttctgcaagggcaagatctagggcaagaagaacatgaaggagctgcggggcggcaagggctcgaacctggcggagatggcgagcatcgggctgtcggtgccgccggggttcacggtgtcgacggaggcgtgccagcagtaccaggaggccgggcgcgccctcccgccggggctctgggcggaggtcctcgacggcctgcggtgggtggaggagtacatgggcgccgccctcggcgaccctgggcgcccgcttcttctct

SEQ ID NO: 14274 - DNA, 373 bp, Zea mays
  Clone ID: LIB3150-071-P1-N1-A9
tgtggagtgcaaggagtgtgcccactgcaagtcggcagagagcaggatgtgtgatctgctcaggatcaacaccgaccgcggtgtgatgattgccgatggcaagtcgcggttttcaatcaatgggaagcctatctaccactttgttgggacttccaccttcagcgagtacaccgtcatgcatgtgggttgtgttgcaaagatcaaccctcaggctccccttgataaagtttgcgtccttagctgtggtatttctaccggtcttggtgcatcaattaatgttgcaaaacctccgaagggttcgacagtggctgttttcggtttaggagccgttggtcttgccgctgcagaaggtgcaaggatttgctggagcgtc

SEQ ID NO: 14275 - DNA, 388 bp, Zea mays
  Clone ID: LIB3150-071-P1-N1-B10
aaatcgcaaacaagtcaagatcctgtataagtttttggtaaggtcagcaaatccacatgggatagagaataatcgaacaagaccgtaggtggattcgactatttggtaatcttggtcgtttggagtctaggaagagaggaaaatgctatgtattttagcgatgtgcattgtagccaactaaaacctcgccaaagcattggatgtgcatgagacacgtaccattgcttctacataaaaaaataaaatatataaaataatggggggggggggggggaaaatttttattttaaaataaaattaaaataattattaagaataattataaaatatatttttttattttaattatttatgatttgttttttttattattagttattttttttat

SEQ ID NO: 14276 - DNA, 390 bp, Zea mays
  unsure at all n locations
  Clone ID: LIB3150-071-P1-N1-B2
cggtgcgtgggcggacgcgtgggttgctttgagacgtgaaaagattggggcagcagcccntttctggcgattttctgctgcttcttatccagaccttatagaggcattaccaaaaaaaccgcttacatctgtaaataagacagtgaatggcagttttgttcgaccatccaatgctgggggcgatgtttatcctgtggaatcttacgagagctcagctaaccaagtacttgatgctcactggggtgttctggatgatgatgatgcaactggactttgctcgcataccctctccatccttgtgaatgattgtcctggtgttctcaacattgtaacaggagtctttgctcgcaggggctacaatatacagagccttgctgttggctcagctga

SEQ ID NO: 14277 - DNA, 240 bp, Zea mays
  Clone ID: LIB3150-071-P1-N1-B8
tcttcttattacactctatatttccctgagaaagggccttacctccaagagatactgcactcttatcgatcccccttaacaccctgacttcatcaaaaatattttcactcacactaacctaactaactattcttttcttattatttcctcatccactcatttttttcaaacttgcatctccaacaataaccatacccgtttacatactcttcttgctttcacacttcatacacatccaaa

SEQ ID NO: 14278 - DNA, 374 bp, Zea mays
  unsure at all n locations
  Clone ID: LIB3150-071-P1-N1-C10
ttagcagatccttggcaggctgccgaggaagcctttgaaggctgggggtaggcggnaagctgctgctgcggggaatggaactgagccgtcgaattcctacagtgttgcgaggagcatggacccaggtaacaaaagggctggaaatggagattacccagttccatctggtgtaattccgaatccagtgatgaatggggctgtggtgtatcactccaatgaacccttaccggcattcaaggacgtgcccatgtcagaaaaacagaatttgtttgtcaagaaggtgagcctatgttgcgctgtgtatgactttgtggatccaactaagaacctcaaggagaaggaagtgaagcgccagacacttatggagcttgttg

SEQ ID NO: 14279 - DNA, 257 bp, Zea mays
  Clone ID: LIB3150-071-P1-N1-C12
ttcttctttctttaccactccctgcccccaagagaaagagtcctataaaaaaagtaaagcttatctctctccctctctcttatcttcttccaccaactcattctttcttcctacttccttttctaatacttttttattctatctttttcatccttacccttcattcaccatcccttttcacttacttatttatcctttcataccatatacccctcttctttattccttctatcttctaacttacttctcttttctct

SEQ ID NO: 14280 - DNA, 396 bp, Zea mays
  Clone ID: LIB3150-071-P1-N1-C5
tacctgtaacgcgctcttcaccaataccggcaccaatggcgacgtcttcgtgttgcctcgcggcctcttccacttccagcagaacagggggcacggtccctgcggcgtcgtcgccgacttcaacagacagcttcagtgctcgcaagccatcgccatgacgctcttcggcgccgtgccgcccgtgccctccgacatactaggcaaggccttccgcatcagccgcggcgaggtggaccacatgaagggcaacttctcgcccaaatagagatccaacgtctgcattcccttgattttctcaataataaatccccgcggagtgcatttcgatttgttcgtcttcagttggtttgcttcgagacattgctgaccacgcttgtcactgctaatttgtgcgga

SEQ ID NO: 14281 - DNA, 360 bp, Zea mays
  unsure at all n locations
  Clone ID: LIB3150-071-P1-N1-C8
tctcacctcgaccgcgtgcccaccggcacggctcattgctagcgcgcgctgatggcntctcttggccagctcctcctcgtcgccggcctggccttcctggtgctgctgctgggtgcccaggatcacgggcgtggagagcaagcgaccggcggcggcccgtccgttggagcagcagccgccgccgctgctcctcccgcgcgggaggctgtaatcatcagccggcaccagcattcgcagccgtctgccgctgctatagccgagagcaagcggctccccatcccttcgtacggtccgtccactaagtggaactacaatgcgaatcacgagaagccgtcgtcaccagagtccggctcgagcccc

SEQ ID NO: 14282 - DNA, 406 bp, Zea mays
  unsure at all n locations
  Clone ID: LIB3150-071-P1-N1-D1
tnaaataaaaaaaaaaaaaaaaaaaaaaagaaaaatatccaaaaaaaagaaagaaagcataaccancccactacaaaaaatacaaaaatacaaataatcaacaatactccactacattcacacccttattcaattataccccttctccttaaaattccactatcaccaattaccaccccctttccaacttcttatcttttcaacttttattataacctttccttccctttctttaacatcctatactaactttcctttttctctcctctacatttttctcctcttattcatcttttaattaccccccttttccaacattacccacaccattttctttcctttttatcttaatttttcttctaatattacagactatctttcctttcttttttatttctttctttat

SEQ ID NO: 14283 - DNA, 427 bp, Zea mays
  Clone ID: LIB3150-071-P1-N1-D12
ttcttctgttttacccacctctcctctttcaggccagttcctatttaaaaaaaatggaacccttccctctttccctttattatctatctcactcatcatttactaactcataccttcttttttttttccacaccctcacttttttctacttctcaatctttccttccattttcctttcattttctccaatctttttctttcttcctctccattcttattttattatttaaatttttacatcttctctccttttattcatcccttttttccttctcttacttaagatataaactctcattttacttctctctttttctaattacctacaacttttgcttttttttttcatttctttcactttctcttcttatcttttttttttctttttattttactattttccttcattttattctattttatcttt

SEQ ID NO: 14284 - DNA, 348 bp, Zea mays
  Clone ID: LIB3150-071-P1-N1-D8
ttcgtctgtctcgttccatttccccatctccgagatgcaattctcgagggctgggtgggctgccgccatggcgctctctgtggagaagacctcgtctggacgggagtacaaggtcaaggatctctcgcaggcggacttcggtcgcctcgagattgagctggccgaggtcgaaatgcccggcctcatggcgtgccgcgccgagttcggcccgtccaagcccttcgccggcgctaggatctcggggtctcttcacatgaccatccagaccgccgtcctcatcgagaccctcaccgcgctcggcgccgaggtccgctggtgctcctgcaacatcttctccacgcaagacca

SEQ ID NO: 14285 - DNA, 225 bp, Zea mays
  unsure at all n locations
  Clone ID: LIB3150-071-P1-N1-D9
ttcttctggtctcctgtatctgtcctcttggcgagggtttttatagcaggtagatatgacatgctcnccctaccttcccatggctctgaagtcttcattggtggcctgccccgcgacatcactgatgatgacctcctttagctgtttctgccgttgtgagaaatatatttggtgatgttttcctttgttatattctcatatgttaacatggttttctttttttca

SEQ ID NO: 14286 - DNA, 57 bp, Zea mays
  Clone ID: LIB3150-071-P1-N1-E1
aactcactcttgcctgagctcgctccgtgaatctctggacgatgccttactgcaaag

SEQ ID NO: 14287 - DNA, 225 bp, Zea mays
  Clone ID: LIB3150-071-P1-N1-E12
tcttttttcctcgctagcctcgcggagccggcgcgcccatcgaccctgcgaagtctaaccctagatccggaccggccatggcgtcccgccgggtcgtctcctcgctccttcgttccgtcttccgcctccgtgccgtctcttccgccgatccgtgccttctcggtgctccgttccgtccgtcctcggttcgttacttattcaattatgccttcgccaactcttcac

SEQ ID NO: 14288 - DNA, 408 bp, Zea mays
  Clone ID: LIB3150-071-P1-N1-E6
cggccgcccttttttttttttttttttagagatcacacacattgtgtactataataatgaaaagggacttgtataaaacaatttgtaaaggtaccatttctacaaaaaaagaacttcacacatgagctggagtgccaatagcaacaagacccccaaaaattagctccacgcgatgcacacagcttccgatctatgtctgacagaggatcatatactgatctgtcatattggtacagaaatagaagctctataaacttatgctgtcagctttcctgtctctggccttcgctgtaccaaatgatcacacgtttgctccacttccctgttcgatgctttggaaacattcagaggtattgcctctctatggtttccatgctgatggcggctgcgggggcgttgggaacatcg

SEQ ID NO: 14289 - DNA, 305 bp, Zea mays
  Clone ID: LIB3150-071-P1-N1-E9
tctcaagcgcgcacccatcttctggccttttctgccgtcatgccttgtagaagcttcaagagctcgattcgatcggaaccctcgccatggccgacgaggcgaaggctaagggtaacgcggcgttctcggccggccgcttcgaggaggcggctcgggacttgacggacgctatcgcgcttgccccagacatccacgtcctctactccaaccggtcggaggcgctcgactcgttccaccgatacttcgatgctctacgcgacgcgcaaaatatcgtcgggctgaagcccgactgggccaaggactac

SEQ ID NO: 14290 - DNA, 393 bp, Zea mays
  Clone ID: LIB3150-071-P1-N1-F10
ttcgtcctgcacgcacccctcactttccttggcaatcgactcgcgatcgagggcgccccgagtcgattccgccgcggaccgcccggttcacttcccttttctcccgagatctcgactctcgagcaagtatgggtgaggcgaaggacaacgaggtgtacgaggaggacctagtcgactatgaggaggaggtggagaatgtcattgatggcgcccccaccaacggctcctcagatgtcgtcaagaaggggtacgtagggatccacagctcggggttcagagacttcctgctcaagccagagcttcttcgcgccattcaagattgcgggtttgagcatccttctgaagtgcaacatgagtgcatccctcaagctattctttggatggatgtcatct

SEQ ID NO: 14291 - DNA, 398 bp, Zea mays
  unsure at all n locations
  Clone ID: LIB3150-071-P1-N1-F11
tgctgccacatccacagccgccgggctcctcgcccccggtctaagggtctgcgcgtncngcgcccgcgcgcgcgtctcctgtccctcccgctcccgcctcccactccaccgcatcgccgccatggcctccgcccccaacccctccttccgcccggaggaggcacgctcccctcccgccctcgagctcccgaccccgccgctctccaagttcaaggtggcgctgtgccagctctcggtgacggcggacaagaatcgcaacatcgcgcacgcgcgcgcggccatcgagaaggcggccttcgagggcgccaagctcgtccttctcccagagatatggaatggtccgtattcaaatgacagcttcccagagttcgcggaggacattgaagctggcggagatg

SEQ ID NO: 14292 - DNA, 382 bp, Zea mays
  Clone ID: LIB3150-071-P1-N1-F7
tctgccttctgcgcctccatttcgggctctgtcccttgcacgtgcaaggtgagctccaaccatgggtaaagagaagccccacatcaacattgaggttattaggccacgttgactctggcaagtcgaccaccacaggacacctgatctacaagctcggaggcatcgacaagcgtgtgatcgagaggtttgaagaagacgctgctgaaatgaacaagcggcccttcaagtacgcatggttgctcgacaagctcaaggcttaccgtgagagacgtatcaccattgatatcgctctgcggaagtttgcgaccaccaaagactactgcacggtcattgatgcccctagacaccgagtcttcatcaagaacatgatcactggtacctt

SEQ ID NO: 14293 - DNA, 241 bp, Zea mays
  Clone ID: LIB3150-071-P1-N1-F8
ttggtttttgtgtactaacatgttgggcggagtgttagaatgagaggaagggcaattgaaaaagagtggctcgtagcaaccaagactctgctcagtctgggtgcaccggactgtccggtggtgcaccgtactgcgtccggtgcgcccacctgtaaacgcttacctagctattctacggactttctcccaatcttacgtattacattcaccttgctgtccgttagatcaccgcactttccat

SEQ ID NO: 14294 - DNA, 318 bp, Zea mays
  Clone ID: LIB3150-071-P1-N1-G10
tcttctttttagagtggctaatcataaagaagagcttcttacttgagttaagagaagtcctggtcatcttgttaactacttcctctttattagccgaagaggatcgagctgcatcaacccagctgggttatgagaaatttaatcacatcattggacgaacagatttgcttaaaccaaaacacatctcatcagtgaaaacgcatcacattcatcttatatacctactatcaaatgctatatttcctgaatggatcagatcccaaattaggagccaggaccgtcacactaattaccctcttctttatatagacaatactt

SEQ ID NO: 14295 - DNA, 313 bp, Zea mays
  Clone ID: LIB3150-071-P1-N1-G7
ttcgtcttttttctccctactttgtgactgacagtggataaatgacaggagagtggagagaactgcatgcttctccttgttgacaagaaaattaacaatgccagagatcttatcactatcctggagaatgctattagaagtggatatccaattctaatagtggcagtggacattgagcaggaaactcttgcaacccttataattaatacgctcagaggctcattgaagattgctactattaatgcccctggttttagaaagcgcataagtcattatcttgatgacattgcttctctcactggaagcactgtca

SEQ ID NO: 14296 - DNA, 439 bp, Zea mays
  unsure at all n locations
  Clone ID: LIB3150-071-P1-N1-H11
tctgcttttccccttccctcncctccctggtcccgcgggggctcgccaagaggcgaggttgtgcgcccctcttattcgacccccagannttcgtcccgccccgtcgatccagggtattccctccagccaaagcgcaggatctagaacagctgcagctccagagttcgtcgctcagaatcccgccatgaagaggggcccaaatccaagggcagccgccaaggccgatgccaagctggcggtgaagagcaagggggcggagaagcccgccaagggcaggaaggggaaggccggcaaggaccccaacaagcctaagagggctcccagcgctttcttcgtgttcatggaggaatttcgcaaggagttcaaggagaagaaccctaagaacaagtctgtcgctgcggtgggaaaagctgctggcgacaggtggaaatccctgagc

SEQ ID NO: 14297 - DNA, 264 bp, Zea mays
  Clone ID: LIB3150-071-P1-N1-H7
tcttcctggccgccctttttttttttttttgggtttttttttttatatgaagcaaacccttttgatttcaattcatccaggacaacttttgttttggatattataatagtacatagatagtacccaacatgggtaactaatttcgccgcacgcctagcacttgatctccttaagaccattagagaaatttagttatgtcttattagaggcaccatccttttaatatgcgaataccacaaacacaattatctttttggtctttcc

SEQ ID NO: 14298 - DNA, 181 bp, Zea mays
  Clone ID: LIB3150-071-P1-N1-H8
tcttcttttcacttatcatacctcacctacggtcggtttccattactggtaaggaggcatcctcatatcctataagactccaacctgcatatatcatgtttgaattaatcaacatattctcctaataactcaccccttattctgcctacatttgatcccctgacaaaagtttacctactac

SEQ ID NO: 14299 - DNA, 362 bp, Zea mays
  Clone ID: LIB3150-071-P1-N1-H9
tttttctctttctctctcgcacgagccgagccggggccttttccacgcgcgcgggagacatataccacagccgcagccaccgactggcggaataggaatggtggcgccggggggaggagcaggaggaggtccgttgctgtggccggcggcggaggagcttgacactgtacggaagaaggtggtggagattagtggaagggatgaacaagaggttatggttgctgcttgcccctacagaatttgccctttgggggctcatattgatcatcagggtggagtagtcacagctatgaccataaattatggagtactccttggtttcgttccctctaatggttctgaggttttacttcattctggtc

SEQ ID NO: 14300 - DNA, 442 bp, Zea mays
  Clone ID: LIB3150-072-P2-K1-A11
gatggaataaatacatatgtttttttataccaagctaaaaggacaaataggtggaaataactatagagatgattattaatatgagtatcacaatctaaaactgaactgttgttatacctatcctttcagaattcagaggtcccgactggtcaatatgaaactaaattctccaatggactccaacaccccatcgtgacggacagaagagggctcaccgtcaccgcctagaagtccatctgcagccacttcttgtagtaaacgcaggtgctgggtgagatgatcccctccggcgagcactcatgaatcctggggcaaaccccacaagggattccctccatcatccctccctgcggagccccagtgaccagccggtagcacattgtgccggccctgacggcgctaaaatcccccgcgccggtgctcttgacctcctcgagcacct

SEQ ID NO: 14301 - DNA, 373 bp, Zea mays
  Clone ID: LIB3150-072-P2-K1-A3
aaattaaggctagagtatgtatttgattaacggaaatacaaggaaatgttcacggtgacaacaatacaggactgattcgtctcatagtctggtccatctaaaattacacgaccatcctggatagatgagctaacaacagaagaagacacagtttggactgttccttaatacggtaggaacagtcccacaggcgaagcacaaaattttttatccatttcttctggacccaacgtgacacgtcaggccaagaactatgtgtgcctcagctttcagtcacacccgctgaaaggccacagtgcagacttgagagccctcaattcctccaaacattatggtaggatatgttcggacatggtctatgtaccggaagatc

SEQ ID NO: 14302 - DNA, 318 bp, Zea mays
  Clone ID: LIB3150-072-P2-K1-A9
ccaaaaccaccaaatagtttttatggcgagaaagactgagtacatgagaggtccatagatcacaatgaaccaggttaaaagcctgttcagcccgagatgaggaagtggtgaatgggagacgagtttgccggcctagttgtcaagcatgacagaggccctaaaaatgtcccctactacatgaaggatctaggctactggtaatcttggacatgacgtcaggtcctgtatgtccgatacgattatgccaagtggtggaggagaccagggcaggaggcggagacgcgccgtaggttgatggccttagcgttttaaggggcc

SEQ ID NO: 14303 - DNA, 229 bp, Zea mays
  unsure at all n locations
  Clone ID: LIB3150-072-P2-K1-B11
ccggggccgggcggttaaaacaatctcgtattattaccgacacggtgtaatagcatcttgttgtnngcggagaaaatcacaangtcttcagacggatagtaaatcctaggagtgggtgaagacaanctgatagannagagatgcggcnnctatgccttcactagcaacccaagcttgtcatatgagttgtcagctggcgcggacgccgtgggntcgacttcttagtagt

SEQ ID NO: 14304 - DNA, 411 bp, Zea mays
  Clone ID: LIB3150-072-P2-K1-B3
caacggcgcccaaaagggacagaaggctcgagagctttcaatttttgcccctactgatagcagacaaaggcacacccgcaagtggcgctcgacgttgacgctacccaaacaacagggcacgccgcagcagagcttaacagtacacaataacagtaacaaccgcatacaaaacttcgggatggagtgacaagtcaggtattgcaaaagcagatacaggattaacgacaggttgcatcatttctttttggcagctgccttggtaaccttggcgccggtcgggtccttcttctccacactcttgatgactccaacagcaactgtctgcctcatgtcgcggacagcaaacctaccaaggggaggatactgcgagaatgtctccaccaccatgggcttggtgggaatcatcttcac

SEQ ID NO: 14305 - DNA, 436 bp, Zea mays
  Clone ID: LIB3150-072-P2-K1-B9
atggcaagaccagcattatttctctgttccatcaaaatcagtttaggcagacgacattacaacgagtgcagaccaccactcgtcagaatctagagagattgaaaaaaaaacagttcttttctgcttttggtgctcccacgacaaaatcacctgagtagctctcgagcaaacacgaccatacatttattgcgaccgtacaaacattgtaacaaaaggcagcagcgagctagtatagctccacaagaaaacatccccatcctcttcctttcttagtagggctccactggtgccctgaactttgctccggcgtagaccgcggcatcaccgagctcttcctcgatcctgagcagctggttgtatttggccaggcgctcagaccggcaaggagctcccgtcttgatttggcccgtagacaggccaactgagaggtcagcaa

SEQ ID NO: 14306 - DNA, 432 bp, Zea mays
  Clone ID: LIB3150-072-P2-K1-F11
acataaatcgctattctttttattaacttaaaccaaagaagcggacggtgatgttccacaatataatatatgatgggcaaagtacacgcaccaatgttagcaaagtacaccgagcacaagagccgctgctaacacatccaggcaaccacagctgctgagagacccccagcagcagtcatgcggcaaaactgactgtctactaccacaaatcttggaatcagcatcatgtggaggtaaccaaaaataaaattacagcaggcaccttctttcaccaccctgcaagaaaacttggacgtcgagggctccagaggtattccgatgccggaccaacaaacaggaagctacattagagagctgaatcaacaaggaacactacgaatctaccatctcgtcttgcaactcgctaggggcaatgagccccggaatggcaag

SEQ ID NO: 14307 - DNA, 430 bp, Zea mays
  Clone ID: LIB3150-072-P2-K1-F7
aacaaacattcatcgaactcgttgtctttcacagaatctgggcgatctgggttacacgttacatggtgtgcaggcactttaacaatcatcgacgcttttattgcgatggtggcaccattaacattaaggcgaaccacatgatttcctgagagggtctctcacctcggcatctcgctgctcaattcaataatgctgtacattgcaacgcacatagattacatgatgacacatctaagagacacccctttctgctctactctttggtcttcattgccttcatgaggttggtacagcctgcgattctgtggagttgacatctccctttttaagctggtcagaatgtcctccatcgtatgttccctttcccactttccaagcataggaaatagacttggttcaaccaatccagtttcttggttcacacatgtca

SEQ ID NO: 14308 - DNA, 392 bp, Zea mays
  Clone ID: LIB3150-072-P2-K1-G1
agagtggatgatccgcattgattattttttttgcttacatctttaatcttccttacgtggttgcatggcatgacagtggaacacaggacagtgagtaaactaatataaataacaaagaaagcaatggatttctttcgtcggaggagggccctcaatcacggcgcgggggcgaaatatatttgatgcgcgcctagccgaagccgagccgaaaccggatgcatggaacaataataccaggcggtgcataaaaagagaagaacgaagagggaaaaaccatggcccctacctgtgacgccttgttgatcaggaggtgttgacctggcggcactgctctctgatctggccgttggcgccggtgagcacgtcgacgcggcccatcttcttcatggaca

SEQ ID NO: 14309 - DNA, 473 bp, Zea mays
  unsure at all n locations
  Clone ID: LIB3150-072-P2-K1-G10
gtccggaanacccggggcgggcggcgtggcccgcgccaagaggaagagatttgtgttcccgttacttagctcggccgccttgtcaaggagagcaggatcacctagatcgaggagatctacctccactcgctccccgtcaaggagcaccagatcgtcgagaccctcgtcccggggctcaaggacgaggtcatgaagatcacgcccgtccagaagcagacccgtgccgggcagcgcactcgcttcaaggccttcgtcgttgtcggcgatggcgacggccacgtcggcctgggagtcaagtgcgccaaggaggtggccaccgccatccgcggcgccatcatcctagccaagctctccgtcgtccccgtcaggagagggtactgggggaacaagatcggacagccccacaccgtgccctgcaaggtcaccggcaagtgtggctccgtcactgtgcgcatggtgcccgctcccagggg

SEQ ID NO: 14310 - DNA, 281 bp, Zea mays
  unsure at all n locations
  Clone ID: LIB3150-073-P1-N1-A11
ttttgtgtttaccgacaccaagcctgcctccacgcncttcttatgccgttccgggcgcgattacaacaacaggtatgaggacgatatcaccgacctctcctgcgctccttacccgcccgtcacgcactccgatagagcactcttggaccttctgcttctacaacctgtatagcaagttcaaacaagccgtctttgggagctctattccccccatacacacctatatcaccgtataggaattcttgggactttacaataacatcaatcacccctaccaaatc

SEQ ID NO: 14311 - DNA, 191 bp, Zea mays
  Clone ID: LIB3150-073-P1-N1-B9
ttgtttctctcccaccaaccaacgaccttggcctggccattttcgatgagggcggcctttcccttcctccccacatacccatgcccgatttacactattgactccgccccaattctgataacaaacccctccgcctaagcatgtctcctcccagtctaccccatccagcacagagagggagaattactcac

SEQ ID NO: 14312 - DNA, 462 bp, Zea mays
  unsure at all n locations
  Clone ID: LIB3150-073-P1-N1-C11
tcaacgcgtctcgtctcaagctccggcaagggctcgttatctctcctggcagggctccgcttcgctcggctaggaggaggcagttatctgtgccgctgtgttctgaggagggcactccgcgacccgctctcctatggttncactgctctcgtcgcaggccctcgcctaagtactccataagaaggtgatctcgcaaggacctccgccaagnaagactcgtngtaagaagtcgcgcgtcaaggtgcttcatcanagctcgtcnaacttcacttcacctcatgnncccacccgctacanccctcgancgtcgatttcaaggatgtcgccaccggtgggcccgacgcactctctacccacgacaagaaggtcgccgcctgcaagacggccaaagcgcgccttgaggagaggttcaagaccggcaagaacaggtggttctttaccaagctccgcttctagatgctc

SEQ ID NO: 14313 - DNA, 301 bp, Zea mays
  unsure at all n locations
  Clone ID: LIB3150-073-P1-N1-D12
tttcttttttagccaacacacacataatacgcgccgcctccttttcattccatctcagccgatataataatacccnttctctccaccaagcttttcgtgatccttctcctgctcttttgttacaccgccacgcaacgccctccttttactatggtgtcacctaagaagaacaagtcccacagcttccacttcaacgcacctagctctagttacgccaactgctcaaacttctgcctgacctaatatttcacactctgcttcttcaaagtcctacaccaccgcttcttctgcaccaattact

SEQ ID NO: 14314 - DNA, 485 bp, Zea mays
  unsure at all n locations
  Clone ID: LIB3150-073-P1-N1-D3
tgtgcttacctctgacgatgcaggatgcacgcgggcgcgacccttctgcatgccaggtgtgccgaccaggtctcgcctccattcgtctccacgctcccatgagagccgcgcgcggtcgggagatctcacgccatacactaccgtccaaccccacgtgtctttaccgcaacacaccatttgctccgacagcagctgctcgccacgtggcagtctgccagtcccagcggcgagataccatttgccaaagagagggagcgcgcctctacctggcgctcatgcaggggcaccatattcgaatcgcggatcactccctgcactatgacgagagtaggattttcgaatctgcagttaggctctatcactctatccagaatctacgacgctgacattgttgcatgtctttggcgatgccataccgaaactctggaccaatgcacaagntttaccctttgaggctctcagtttcgtttgaagggtcacactaa

SEQ ID NO: 14315 - DNA, 175 bp, Zea mays
  Clone ID: LIB3150-073-P1-N1-E12
tttttctgttgcagcgagccaccgccccgccgggggttgtaggtagacaccaatgcagcgtcatggggcgtatgcacagtcgcgggaagggtatctttttatcggcgctgccgtacaagaggactccttcgatctggcttatgacagctaccaccgaggtggaggagatgattac

SEQ ID NO: 14316 - DNA, 243 bp, Zea mays
  Clone ID: LIB3150-073-P1-N1-E8
ttttatctcgccttccgaggaaactcagcggggtaccacagacccgagcggaggaagccatgtccggtcgcggtaagggtggcatggggctcggcaagggcggcgcgaagcgttatcggaaggtgctgcgcgacaacatttatggctttatcaagccgtctattcttcttttgtctatgaggtgtggtgttaagcgcatttcggtgctcatttacgaggagacccgtggcgtgctcaagatct

SEQ ID NO: 14317 - DNA, 271 bp, Zea mays
  Clone ID: LIB3150-073-P1-N1-F7
ttgttttcctttgatccaccaactatttcggggcgtttttaaaaggcaaaggtggccaaccaactacaatacaaattagaaatatacccagttccaccaacttgttcatccattccagataattgacatcacaatgtttcacatacgttcactaggccatgccaatgcattaataccatcacatgattgcgtaataatatgctcctgtttgatagtgacacggagaagtatagcaccctttgaagacattctttcgagcatcttcacgaat

SEQ ID NO: 14318 - DNA, 261 bp, Zea mays
  Clone ID: LIB3150-073-P1-N1-G5
tttattcttttacactccccccacccaaagcccgccattttataaaaggcgggggggacaacacacttcaataataaccttattaagcgcggccacgtgtccgccggtcactgccgtatcttcttgcacaggaagcaccctgtaggtctcggtaacacctgtggcattcaccaccaccgtattctcttttacaagtaccatccattctacttcatcaaggttggtatgcgttacttccataagctccgcaacaagtactac

SEQ ID NO: 14319 - DNA, 244 bp, Zea mays
  Clone ID: LIB3150-073-P1-N1-H12
ttttctattttcctcgcgccgccaccaacgcggccgtggcagtctcaatccctgacgggaaccatggctgtctcgcaggagtccctctctttggtgggcacgatgcgcggccacaacggcgaggtgactggttaacgcgaccccgatcgacaacttgccgttcattgtctcctcctctcgcgacaagtacctgctggtgtgggacctgactaacttggtccactccacctcggaaatacggcgc

SEQ ID NO: 14320 - DNA, 246 bp, Zea mays
  Clone ID: LIB3150-073-P2-K1-A1
acaagggtattacaaaactcataaccatgtatgccttacagtcgatgttccataaaaaaagtgtagtcttaataacatcacgggttcaaccaaagtaataattccttaatgcccagccaaacattgccttattaaattacttgttcacccaccacctgcagggttgtcaacaagacaagattttttaagcttccacaaggtacccaccaagcaagcccagacccagccaaatggatcttttttttt

SEQ ID NO: 14321 - DNA, 312 bp, Zea mays
  Clone ID: LIB3150-073-P2-K1-A12
ggggggggaaaaccaaaacttaaaataaaaatggcagtcaaaaaaacccaacccaaccagttcataataaataccgccccaaaaaacaccttttttttttttgttttaaccaccctatttacatttaattacccaccacggccccaataaaaaaaaccaattttttctttttttatttaaaaaatttttcacgaaaaaaattttaattaaaaacctttggcccttccaaaacccaaacaaaaaaaaaggtgttttttaaaaaattctaataaaaaccccccctttaaacaaataaaaaaaaggggacaaatt

SEQ ID NO: 14322 - DNA, 123 bp, Zea mays
  Clone ID: LIB3150-073-P2-K1-A4
tcgactctccctttaactgctcattaatcgtctcccatttggtagttacactcaacattacctttacaactttccaccaccctaaccccctctccttttactttttttcctttcctttcttaa

SEQ ID NO: 14323 - DNA, 431 bp, Zea mays
  Clone ID: LIB3150-073-P2-K1-A9
gcataataaaaaactatgtatataggttttatttttattttttacattttagaatgggcggtgtatcacccgcctggggggggatcctagttattcgctagaaggtcggcagccggcagccatagcacatagttccacggcatgaagtggcagatctcctcgccgcgcgtcgcgttcaacatctggaagtagcggtcgtcccagctcatggtgttggcgtggcacatggcgatcgcgatggtcgcgccgtcgtctccgagcccagtcagctcaacgcggagcgcctccacgtccgtcggccggtggcagtaatggaccatgtacgggtacggcatcgggtggcacggcaccgcggtcgcggcccccgccgccttgccgatgcgtgtgacgccgtccggcgccaccacgtacctagtggcgttcttcccccc

SEQ ID NO: 14324 - DNA, 385 bp, Zea mays
  Clone ID: LIB3150-073-P2-K1-B10
aaagaagaacaactcatataatgaccaaatgtatagagataaatgtgacaaaaattattacattggggggatgtcttacatgaataaatgataacaataaagcgaactaataattattcctttgcgccataacgctgactgggagacgccacctagattagctcgtactcgttgtagacctcctcctgggctacctgctcttcaccttcaacgagctcctactcagtattatccatctgctgagtactgggtccgcagttgcttgctcgtcagggattgtgcaacgagtgggcctggccgtggccgctggattccacaaaggcgagagcaagtcccgcgagcgaatccccatgctttaaccacccttcatgctaggcttttgttt

SEQ ID NO: 14325 - DNA, 346 bp, Zea mays
  Clone ID: LIB3150-073-P2-K1-B12
gttggcaaaataacaaaaaggggtgggttaccctaaaaacactttaaattcattttccaccaaacaaattaagattccctaaaacaaaaccttaggattctcattaacacttaaacaaccccattaaagaaaaccttcccaaaaacacccttttaaaatcttccctggtttcccaacaacttttcctttccaccattaaaaacaattttaccctctcttttttacttaaagtaacaaccccggtttaacttttttaaaccccacttttctctctcaataatctttttgccgccatggaactttaacttaaccccacccaaatttttttttttcttggcaaaatttt

SEQ ID NO: 14326 - DNA, 95 bp, Zea mays
  unsure at all n locations
  Clone ID: LIB3150-073-P2-K1-B2
attatttttttttaaaaaaaaaaaaaaaaaaaatttaattttaaanagaaaaaaaaaaaaaaatggggggggggaaaaaaaaaaagggggggggg

SEQ ID NO: 14327 - DNA, 422 bp, Zea mays
  Clone ID: LIB3150-073-P2-K1-B4
agctagcacagttccattaggcgtccacatggcagtatgtacattttcttttccaatggataaataccatttatggacgcaaggtgaggtcacagggtacagttagttcatgtacaacggccgggatgtacagcacaaatacaagtcacggtgctgatccatatcgactgcgcagctgcatcccattccataaaccaagcaccgtcaccaggccccatagagttggcttcgactcgaaattgctgctgctgaagcacaaaagtacggcatactttctttctgcaggttaaccaccattgttgcagccagagctcataacatcaacacatgtagtggcacacttattattggaagagggtgacagttgcaatatatcccttttttatcaccttgaaagcgattttttgattaccatttacaaa

SEQ ID NO: 14328 - DNA, 376 bp, Zea mays
  unsure at all n locations
  Clone ID: LIB3150-073-P2-K1-B5
atagaaactttatttggtataccaaaggatggttattttgcaactccccgcttgcgtaatnaaaagcataaaccttgacaaggtaatgactaatgagttatgcaaatgagtaatgacatattccctcaattttgtggtgatcgtgggttccaacaatgtgcaatgcaactgtatttttttttgaaacaaagggaaaagttttcataccaacacaggcttcatatcatggtgagtggtggaaacaaattatatttttaaaattcttcccttactatccattacattctctctccaatctattatttctttttaaacacattctttttaatcatattaactactctatgaaccctttatttaaaatcctataatttcg

SEQ ID NO: 14329 - DNA, 335 bp, Zea mays
  Clone ID: LIB3150-073-P2-K1-B8
gcagcttaattgagtcaaggatgacaaataggtcgggcatacatagggtgggggggggggctaacaaaaagaaaaaggactcccatagccagcaaagccttcgtcttcatactaatgaaccaccacaacagcacgaggcctaggcagctacaaaatttcccaaaacatggcataaagaaaaatcgcatattgcccgagaccacgactttaacatagaaaccccaccgaccttatcactcctcccccacaatatttcggcaaaaccaagccttaccagatcacccccaccaccggtcttttagttctgtttttctttaaaatgatcacagaaggtc

SEQ ID NO: 14330 - DNA, 209 bp, Zea mays
  unsure at all n locations
  Clone ID: LIB3150-073-P2-K1-B9
aaaaaaacccaaaaacccccggatccattaaatatggcgtgcggggccnttcactttattaccaactaatcactccctaaataattctctctctcctccctcaaaaaaagaccggttaaccactccttcctttgtgcttaaaaaccttttggccccaaccccacccccttacctttccctctcaacaccactcataaccccttcttctt

SEQ ID NO: 14331 - DNA, 305 bp, Zea mays
  unsure at all n locations
  Clone ID: LIB3150-073-P2-K1-C1
aacacaaaaaatctccattagtaatcttaattttaaacttgtgtcaggacaaaatcttagggccggggggaaacacctanccaaaacaactcaataagttcacgtcataagcaacctcatgtccaaactcgcctagatacaaaagtagcaaacaaactactcggcagcagcaacctccttcccagcctaatctccctcgacaggcctctcaagcttcacaccaacatcctctttgtagtcgccatgaacctccatgagtttcccaagatcgaacttgggggccttgagtatcttcaccttgcgga

SEQ ID NO: 14332 - DNA, 427 bp, Zea mays
  unsure at all n locations
  Clone ID: LIB3150-073-P2-K1-C10
aacaacatcagaggagctagcttgcggtcaaaaacacaaatgggcagcggcggcaacgaacacgaaacggggcgtacggacacnagacgaccacagacgaagataaaccccctctagactagggtgaacacggtagcagaagcgaacaagataactaggcctcagcggaccccaccgctcaattcctccagttcccgtcgttgttgccgtagccgccgccgcggtttgcaccaccgtatcccccaccggcgccgtagcctccacgaccaccgccgtagcctccaccgccaccgtcgtagccgcctccatcacggcgcccgccaccgtatccgccaccgccgccttcacggccgccgcgggactgggcctcgttaacggtgatgttgcggccggcgagcttcttgccgttcatgccctcgatggcgct

SEQ ID NO: 14333 - DNA, 152 bp, Zea mays
  unsure at all n locations
  Clone ID: LIB3150-073-P2-K1-C11
ctatcatataatgatttcttttgcaaacaacacccctaattccttgtaccgacaaaaacaaagattgttttccatnnaaacaaatattacatataacattaaaaaaacattcctcattattttctcaaactaacatataccatttaattatt

SEQ ID NO: 14334 - DNA, 350 bp, Zea mays
  Clone ID: LIB3150-073-P2-K1-D3
ggggaaaaaaaaaaaaaccatttcttttttttcataaggccccccaactttttcaaattatcaaacaaaaatgcccccttttcctttcttttaaaaaccctccaaaacctttaaaacttcaccctttttaacccttacaaaaagggacttactttttttttaaaaaaaaaattacttaggcctttttaaaatttatttccaaattttttcgcccacaataaaaaccatttttggcaaaacctcacacacccatttcttttttacccccaacccttttaaagggggtaccccaattaaaccattcccaatcccctctccccattttcaaataaccatcctcttcttttttt

SEQ ID NO: 14335 - DNA, 378 bp, Zea mays
  unsure at all n locations
  Clone ID: LIB3150-073-P2-K1-D9
gactccacataccaaacatccattattagttaaaaatggtttccatctggttcattatttttgtggggggggtcacttnccaaattaccggacattgacatttttttaggcaccatgaaacatctactttgcacatatataaaaaaaaacttgcagcgctactgcactttataacttcaccctgaaatgtgcaccactaactaaacattactacatctttacttacggaaatttacattaccactgtaactatggtcaaggagaagcacatctggacagacagtttttatactcacaatttcttatctacacagtgaactcttctatgacacaacacttactggacctaatccttctttcttcgattcatttcgacaa

SEQ ID NO: 14336 - DNA, 382 bp, Zea mays
  unsure at all n locations
  Clone ID: LIB3150-073-P2-K1-F11
aatcaacaacttaaacattttttattattttcaataaccctttatcggtgcggttaaattaacaactcggccggcatcannnnttctaaaccacacaatacttcaaaacaaacacacataacacnataccaaaaccaactctcggcaaatcaccttataatttcancacactccccttattcttcttcatcancaaacttttctattactcttcaccctcttcaccatcctctccctcatcnaactcaacaccaacctcctcttattccttctcaacctccaccacttcctcacnttcctcaaaaaactcaccttcctccatacccttaccnacttaccaattcacttaagcactctttncntacattaagtctaacttttt

SEQ ID NO: 14337 - DNA, 320 bp, Zea mays
  unsure at all n locations
  Clone ID: LIB3150-073-P2-K1-G1
aaagacaaacaaataattagtcgcagcaactcatccgatacttaaacgaaggcattgtatgcaggaggggttgcccnactgacaaacgaagggcagactctatgaccataaatgtttttggggaccgatgtcaccacctagtaggatagttaccagtgtttggagatctaagtctccatccaaaacaaattgttggaagaatcctccctctacatgaattattaatttcttcgatatgaaaggcaaaaactttaccaaatcctgattggaaaggaccgggaacacacactgttcttggtcggcattatatttttccattt

SEQ ID NO: 14338 - DNA, 331 bp, Zea mays
  Clone ID: LIB3150-073-P2-K1-G2
aaaacaaaaactactgctgcatttgtggggcaacctcaaacagggcgaggggatattcaaatcgagtaaccaacaggtgaatgcttgataggtaggcgggtgaaacaaaacggcgcatgggattaccccttctgattgtaaacctaagtgaggccgcacttgccgcaatagtggcggtcgaagtggttggccatgaaaacacccgcaccgcactcggtgttggggcactccttgcggaggcgggtcaccttgccggtggcgtcgtccaccttgtagaactgcagcacaacgagctttaccttcttgtgcttgggcttgatctttttgggct

SEQ ID NO: 14339 - DNA, 412 bp, Zea mays
  Clone ID: LIB3150-073-P2-K1-H7
aaaattaaattaaaattatatatataagcgaaaccagagcacaacattattggtggtagtaacaacaccagggggtggacacacacccggtagtcataaacaaactggcagcgtcaagcactcacagataaatacacctagtagccaaagctggtcctcctcatcatcctgatgaactcgtcaaagtctatctcaccgtcaccatttctatcagcctcttgcaccatgtcttggatctcatcgagggtgagatttacacccagctctttggcaatcctctggatatcaatgttagaaatctttccatttccatcttgatcaataatgcggaatgcttttgaaagctcctctttactatccctctctccgattttggcagtcatcatgtgctcaaactcctcgtagtcgatcg

SEQ ID NO: 14340 - DNA, 420 bp, Zea mays
  Clone ID: LIB3150-073-P2-K1-H8
gagctcaagttcaaacgggcttggcttggctaccgatgcgttaaatgggggctggtgcatcagatttggtggagaatccaacagcctcataaccacccttcctgacacttccataaaccaccacatatacgtagcttattttgattgaaattattgctgatactaacaaaattatgttcagtgcaacacctaacaagctgatcttggggagaactaagccaccactagtgcggccggtattgtgttatcaaatgtatctcgtagttcaggcctcattgaacttgaagacgcaatcataaagtcttcctcctaaaaattgggcgacctcaggatgcttaaccattccaatcttgatcgagtcacatttcatctgcgcatataggttagtttcaattgctcttcccatgccttcgagcacca

SEQ ID NO: 14341 - DNA, 399 bp, Zea mays
  Clone ID: LIB3150-073-P2-K1-H9
gcaaccaacaagattttctttttgcgggtcggggggcctacacccatgctgggtggggctacaaaacgaacccgtaatttcccatgctgaatacgaaaatggcctcacacagcataaggaacgagaaagtcactcgcacgcatatggcaagaccagcaagattacctgttccatcaaaatcagtttaggcaaacgacattacaacgagtgcagaccaccactcgtcagaatctagagagattgaaaaaaaaacagttcttttctgcttttggtgctcccacgacaaaatcacctgagtagctctcgggcaaacacgaccatacatttattgcgaccgtacaaacattgtaacaaaaggcagcagcgagctagtatagctccacaagaaaacatccccat

SEQ ID NO: 14342 - DNA, 293 bp, Zea mays
  Clone ID: LIB3150-074-P1-N1-A1
ttaaattatcacccctgtggagctgatcaagaagggtgaaaaggtgggctcgtccgagtctgccctgctcgccaagctgggtatccgccccttctcgtatggcctccaggtcaccagtgtctacgaggatgggtccgtgttcagccctgaggtgctcgacctttccgaggaggacctgattgagaagtttgccactggtgtctccatggttgcctccctgtcactggcgatctcatacccgacccttgctgctgtgccccacatgttcatcaatgggtacaagaatgtgcttt

SEQ ID NO: 14343 - DNA, 197 bp, Zea mays
  Clone ID: LIB3150-074-P1-N1-A5
ttttagaccattagctttatctactccagagggcagaagaacccgatcgacaggatgagggtgttgctcgttgccctcgctctcctggctctcgctgcgagcgccaccttcacgcatacaagcggcggctgcggctgccagccaccgccgccggttcatctaccgccgccggtgcatctgccaccttcggttcacct

SEQ ID NO: 14344 - DNA, 318 bp, Zea mays
  Clone ID: LIB3150-074-P1-N1-B6
ttttgagctacttcgtctctctcagtggccgacgacgtgggtgtactgccagtgcgccccaggctctgatgcctccatcttacgggccacttcacgtggctacgagcacacacctgaggattatggattgtgctggggccagaagcgcgccggagatgctgatgcaagtgctgctggtggcgtctgctgtggcggcgttcctggggggctacgtgcgcgcggacttccagctcatgctgctcgtctacgccggcggcgatgtgctcacagcgctcgtaaccgtccccaactggcccttcttcaaccgtaacccgttta

SEQ ID NO: 14345 - DNA, 157 bp, Zea mays
  Clone ID: LIB3150-074-P1-N1-F12
tttcttttaatcctccgcaactcgcctccggcgggagtcctttaccgaccgacgccgtgcctatcgatcgatgatgtcttacgcctacctcttcaagtacatcatcatcttcgacacaagcgttgtgaagtcgtgcctgcttctgtatttcacaaac

SEQ ID NO: 14346 - DNA, 329 bp, Zea mays
  Clone ID: LIB3150-074-P1-N1-G6
gtagttatcttgtggagaaaggctcatagaacgttgttgttagaaacaagggggacgtttttttaaggatgagatccgctgtcgcgagcaagcagtttggtcaggaggatataatgtgccctcttgtggctgatgcctgcattcaagtttgccccaaaaatccagcaaacttcaatgtctacaatgttagagtggctaagctgcttggaggtggtttgcacaattcttctgtggtccgtgggatggttctaaaaaatgatgcttttggttgcatcaaaagggtggagaatgcaaatattgcagtatttgctggtggtgtctatacctca

SEQ ID NO: 14347 - DNA, 396 bp, Zea mays
  Clone ID: LIB3150-074-P1-N1-H4
ctccctttcccagctcgtgttccacttcttagtcgcgtcttctcgaagcgggggagagaacttccgtcaacattgggaagacacgtggtatgggagccgggcgcaagctcaagacccaccgcatgaaccagcggtgggctgacaaggcatacaagaagagccatttgggcaatgagtggaagaaacccttcgctgggtcattccatgccaagggcattgtcctggagaagattggtattgaggccaagcagcccaactccgctatccgtaagtgtgctcgggttcagcttgttaagaatggcaagaagattgctgtctttgtgccaaatgacggttgtttgaactacattttggaaaatgatgaggtcttgattgctggatttgttcttaggggca

SEQ ID NO: 14348 - DNA, 397 bp, Zea mays
  Clone ID: LIB3150-074-P2-K1-A12
gggcgctgacctcgaaggcctcctccacgtcccgctgcgagaagccgaagcggtgggtgatgagcggcttgacgtccaccttgccgctgcgcaggaagtcgatgcacagcggccaggtgtccttgtaccggaacacgcccaccacgtccacctcccgcgccgccgccgccgtcagcggcagcgtcatctcgttgtggcccatcccgaccaggcacaccttcccgccgggccgcgtcgcctccagcgccgtcgacatggtcttgctgaacccggcgcagtccaggctgacgtcgatgtccgagcccatggccgcgcggatgcgctccacctcgtccgccaggtcctccgcgcggggcgacacccgcacggccgcgttcgcgcccagcgacctggccac

SEQ ID NO: 14349 - DNA, 467 bp, Zea mays
  unsure at all n locations
  Clone ID: LIB3150-074-P2-K1-B11
acccgaacttattttatttcattcctcaacatagttcgcatattgttgagagcaacaagatgctaggagtggacanattccagcccttaatccgagtccagactccagccacacatatgaaaagctcttatgccagagttgtatgatcttgcgcaccatataaggaaccacaactgttcatcatgatgctgaagaagtcaccatcccaatggtctggtcaaatatttcgatccagtaaccgtcaggatctttgatgaaagcgatgcctttgatttttccatcatcaggtttcttcacaaactcaaccccaagacgttcaaagcgttcacatgccttgtggacatcatccacagttactcctatatgaccaaaaccacgagggtctgagttcccatatggtaacctttgaattcagggtcattttccgtccccaggtgtgggtgagctcaagagtgctttttcctaaa

SEQ ID NO: 14350 - DNA, 260 bp, Zea mays
  Clone ID: LIB3150-074-P2-K1-B12
accaacccaaaatttattttcatccaaataaaattacttataaggggtcaaaaaaacacaacccgggggcacaatatattaaggttcaataaccgcaagattgtcctaaagcaaaacaccatttcaggaaactgcctaaacagaaacccttcatcaggactgtttggacacaaaccaacacggtagtgcggccaagatttctcagggtgatatagagctcatctcttcttggaaacaccaacggtctttccacgcctacc

SEQ ID NO: 14351 - DNA, 409 bp, Zea mays
  Clone ID: LIB3150-074-P2-K1-B4
cattctgaatggcgaccttttatttcaaacgtatcaaataatcaggtaaatgagttcccataatcgcgggagtgtacggcaatctccaattggtaatggcaacggtaatgataatgatttggcatactgctgcggcctgcagatgttcgcctagctcaggccttcttcattcagggtggtggcacagggaaagaaaatggcgacataataaaaacggttcgaaagcgtcgcgcaggaaagcaccacaacttcggcaaggatttcaaaggttcgagttggccgccagccttgatctgagctcgtcagcaacagcgtcaatgaactcctccgtgttcaggtaatggctcctcgtgatatttgaagatccgtgaacgagaaaggcaaggtccttggtcatcttcccagactc

SEQ ID NO: 14352 - DNA, 390 bp, Zea mays
  Clone ID: LIB3150-074-P2-K1-B5
aaaaaaaagggggctgctcgattctccatcggcaggaccaacttgcacgaaatttaacagcggggggactaattaacatacaaatataaagataaccatcatcccacataggaagcatgttttttggatgtccgaaaataagctctaacgagcaaaccacactccgcaacctagctcgtaggcaggagttccaaaacgggcacgcaaagagaagcaactcagtacttgtagtccttgacgtggaggctctcggtgtcggcggcagcatcacccttgtaggtgccgagggtagcctcagagttggccttgcacctggcgaggaaggcagctctagcccttttcaaattcttcaccttgccagcccaagcctttgaggtgctctccttggag

SEQ ID NO: 14353 - DNA, 289 bp, Zea mays
  Clone ID: LIB3150-074-P2-K1-B6
aaaaaacatttttttttctacaatttactattttaacccggcgggattaaaaaaaatgcttgccgcgcttaaaataaaaccccatttcatatctttatttttacttttaccacactaatcctaaatccaaacctaacttatttttcttaaatctattcattcctttatttcttattacctatccaaacattattcttctcatcccttatcccatctatcaaacactatcatctattattcacacctttacatctttttctttcatattatcattatttatttccttttt

SEQ ID NO: 14354 - DNA, 378 bp, Zea mays
  unsure at all n locations
  Clone ID: LIB3150-074-P2-K1-B8
aaatccaatcaacattcaacgtaaattagagagcattgcagccggggacagataggcgaacgagagtgttattnaaccattttaaacgcaaaagttcgcttgcaacaagaagcaggcaattatgatgtttcatcacaaaatctatgacatcacgacagttcagagttctttctcagggattttgatcccagaatctgatactacgcatctcacactagaagtctagaaccaacgactagtgacaggcttgctgatgctctgaatcagtccacaagtgtgcccaaaatgtcgtgctctctgaagaggaggtactctttatcagctgcaagcttaacttcagttccaccatactctggcaggagaacagtgtcacctttc

SEQ ID NO: 14355 - DNA, 213 bp, Zea mays
  unsure at all n locations
  Clone ID: LIB3150-074-P2-K1-B9
ccataaaaaaaatctgtgggggccaaataaaaaataaggcggcggcccaaactaacccaaactctattaaacgtttcaaccaccttataaactcatctaacatancattagcaaactcttcacatatatggcaactgttctaaagaacactacctcctacatataaggcaaacaattcaatcccataacttaaatattctctcccctcttttt

SEQ ID NO: 14356 - DNA, 89 bp, Zea mays
  Clone ID: LIB3150-074-P2-K1-C1
gggggcccccacttggggggggaaaaaaaccaacaaaaagggccttgcaatttttttttcctttttccccccagatttattccccattt

SEQ ID NO: 14357 - DNA, 332 bp, Zea mays
  Clone ID: LIB3150-074-P2-K1-C3
aaaagaaatttaataacttatattaatctctaatctaaaaaatgctggatgtggtacacaagatggcagcaatgattcaatgtagcaaacaatcagcacgacttgaaaccatgtaagttcatataaaagcattgagccaaccttttaagatagcctttcccaagcacattatactactgaaatggatctaaagatcactcatgatagtaactagtaaggaacttataaagataacgaagctaagaacacgatgatgcttcagccggctcttgctttttgtgctcatcgccttcattctgttctccagaaacatcgctggtggcactcttgga

SEQ ID NO: 14358 - DNA, 329 bp, Zea mays
  Clone ID: LIB3150-074-P2-K1-C7
gggcttccaaatttcccccaaagcatttttgggggaaggggttcatacaactgcagggtgacataaatcatcaatgatgttcatgatcaccataactactggatcttgatctatgtgcaacctatatgcatcagagcattttcagagagtatagctaactttactcccttgatctcatcccaaagacgaccaactcatgggtcaatcctgtcctctctgttcacttttccaagaattcttggcagcttttgcagatgaaccactagaatctccacctttatctttaggcttcgagaagaatggatcccatttgtgagggccaattgcct

SEQ ID NO: 14359 - DNA, 433 bp, Zea mays
  Clone ID: LIB3150-074-P2-K1-D1
ggtatcaatattcttctatccttgagcaacggaatcaaattgtcaacgtacaaacagacacaggacaggcagcgcttgcgcgactagcaacagagcggcgactgcctttgttatggcatacacgggatataactcaaccgtaaacccaaatcaattcaaacgctgcacctaattatcttcgactagcagtttatactaacataaaaccatcggttggacgcaatgcaacaaacaataacagcttgtttcttttttctgctcgagcttgctaggaaaaaagaaaaaaggggggaaaataaaaggaaagcagttcccacatcctcctaacttgcatcaaacacgctgctgtgctcggacacaacaatggcctacgcccttccttcagaaggggctcatcacctctctgaactggctgacaccctttgatgatcat

SEQ ID NO: 14360 - DNA, 306 bp, Zea mays
  Clone ID: LIB3150-074-P2-K1-D2
gaatgaaattacattgcatggggccatcactttaacagcgatggtttctacactttatgggttggggttatttacatacatcatagaaagtaaaaccaaaaaaaaactcaaatgggagatggctcaaggtgactaaacgcagacactgcctccgcataagaaaacatttctttacagtataatgagttccttctctctctttttcttcaacatttctgttgaaggtatttttacatcacgatgcatctttttttcttccattcacttttggacagaagtggggcgttggacctccttgaaccaaca

SEQ ID NO: 14361 - DNA, 317 bp, Zea mays
  Clone ID: LIB3150-074-P2-K1-D6
ggggggggaaaatttttatatgggcgggggaacctccttatttacagacatggaaatgaacagtgtgaaatacccaaatatacagttttatgctcccacgtttgaaacgaaacatacattttccaataaacaaggcaaagcatttcagcttgacatactttaaatacctaaattttcattttaaacctttaccctttccatccttgcctggaatcctaaaatgatgatttgaaatccccggaaagcccatcattcttaatggtgtgcaggcgagcctttttttgtacaatatttgttttaaaagaaagtttggcaat

SEQ ID NO: 14362 - DNA, 393 bp, Zea mays
  Clone ID: LIB3150-074-P2-K1-D7
cgccaagaattcattaacccattaaatagctgagtgcgggaacaaatacaaggtatgagggggtaggacaccaaaatatttgactggtctctatttccagcacccaaaaaaaacttggaacaagcacttgatggaagtagcatctcgctatgactgaacagaacaaaacaggctacaaagtttggctgcttcacttcttgtcttccttctctgcctcagctgccttcttctggcgggcaccgaggggcttcttgttcatccgctcaaggcggagcttgccataggccgcaaacgccttcatttcatttgtgaccttcacaacctttacagagcgcttttcaccgcgagtaattggcatgtagtcaccctgtacctgggtagcagtggtaagct

SEQ ID NO: 14363 - DNA, 315 bp, Zea mays
  Clone ID: LIB3150-074-P2-K1-D8
accaaagggtatgatagatcaaaactgcaaatctctcaacaggttcgggacagactcgaaaaggggggagaaaaataagataccggacgagaccaaactagtagtaaagataaaagaccagcgcattaatcctggctgctgccacaccaaattataccaatcactaaggcggtcggtggcgccgacatggcttgctgcggtaattgccaattgccgcaaccttcttcaccatttgtctctcttcaatcgttttctatggagcagagttgactgtcactgatcatacacacattctggggcagcagaaatattaat

SEQ ID NO: 14364 - DNA, 238 bp, Zea mays
  Clone ID: LIB3150-074-P2-K1-D9
ggaatgcaaactgttattacaaaacataccataccagataccgcgagggaaagatgggacgcaggggtgggaacaaaacatatcatacaaatccacggggggttttgttagttccaaatttccgaattccagtcacttcacccacagcatcgaggaagtaaaagcttattccacgactcatctagcaaaacacggtggcaagcctattcccaaaagtccatgtgcggaggagtaaacc

SEQ ID NO: 14365 - DNA, 359 bp, Zea mays
  unsure at all n locations
  Clone ID: LIB3150-074-P2-K1-E10
gggnnnnnatttggaagcgcaaaacaatttattactattattcactatggagatccgcaagaatatgcggcgaagaaaagagagtatagacatccacacccaaaggtacgggctccaaaccttcggtgggactccggagagctgagtttaacctatgtcatacatgaatgaggtagaaactaactctgggtaacaatgacgcagatttctaggtggaccaatacctatgttagtgttgagattcacgaaagatcaaatgacccttggccttcgttgatcgcataaagcagtttctttagcatgatagccttggtggagtaatggtggagnttaagatagttggcgcaagtcatgacact

SEQ ID NO: 14366 - DNA, 229 bp, Zea mays
  unsure at all n locations
  Clone ID: LIB3150-074-P2-K1-E4
gaaatcgctagacttttttaacatgtagttatttatgaaggacgggggaaatttttccgatgggtcgggtaaactatcnaatcaccatccacttctccatattgatggatggcttttgtccccatcattcatctactgaaataacataggtctaagtagatagagatgtcaatcaaccatctcaaaagggttcaatcagggattacaattcttctgattcataaagcaa

SEQ ID NO: 14367 - DNA, 298 bp, Zea mays
  Clone ID: LIB3150-074-P2-K1-E5
gggcaagaccatttttattacctgttccatcaaaatcaatttagggaaactacattacaacggggggggaccaccactcgtcataatctagagagattgaaaaaaaaacagttcttttctgcttttggtgctcccacgacaaaatcacctgagtagctctcgagcaaacacgaccatacatttattgcgaccgtacaaacattgtaacaaaaggcaacatccagctattatagctccacaagaaaacatccccatcctcttcctttcttagtagggctccacttgtgccctgaacttt

SEQ ID NO: 14368 - DNA, 237 bp, Zea mays
  unsure at all n locations
  Clone ID: LIB3150-074-P2-K1-E6
attaaaggagagccctccatttttatttntcaaacacaattccatcttttcaaattccttcccacaacaacataaaaccccactaattccccccactttacaaaccacacccattataattgtcatgtttctacactaacactacacactaactatactaattaaacttatcctatcaaaattaatattattttccaacaacatacaaatctctatattaaaaaaataaaccccata

SEQ ID NO: 14369 - DNA, 293 bp, Zea mays
  Clone ID: LIB3150-074-P2-K1-F10
gattgctcaccgtttggatttatatagctagctttgcagcagcagaggcgaactcgctgtgattaacgtgagagcagacaatagtttcgaactggtggacaaaaatgagggagagagatagaggaggggacactgatcgaagataaccagcgtgggactgctacgcgaggagccagaagtccctgcgatgcttgctggagacgaggtagccgccggagctcctgcggcgcacggccagcgccacgcacggcgcgtgctcgatgcagtgctccaccacgccgccgtcagccctg

SEQ ID NO: 14370 - DNA, 297 bp, Zea mays
  Clone ID: LIB3150-074-P2-K1-F2
gggtaattgttttttaaccaaaaagcgtttattcaaacatgttcggataaaaaagcaagccatggttgttggatggaccctggaacaccagggttcgacccgacggtaacaagcatacacccaggggggggcctatttgtgtaataggaggaacgcgcaggcggcgtattaggcctgcttgaagtccacacccagatggatttgctcaacctcagattttatttttaataagctggccctgcttgcagggttggtttgttatggacccggcggttgttaaaaaaccatgaattttga

SEQ ID NO: 14371 - DNA, 394 bp, Zea mays
  Clone ID: LIB3150-074-P2-K1-F4
gaaatcgctagacttttgtaacatgtagttatttatgaaggacgagtgaaatgtttccgatgtgtcggctaaactatcgaatcaccatccggttcgccatatggatggatggcttttgtcgccatcattcatctactgaaataagataggtctaaggagagagagatgtcaatcagccagctgaaaagggttcaagcagggattacaattctcctggtccagagagcaatgacatgataccgaacagcaggaagagcactccgcttgacagttcgaccattttcttcggatatctgggaggctaggctctttccaccaagaacagcagcagtagtgcagagtgcttgcgctatgattccacccaggacaacacccaaatgggttttcatcagca

SEQ ID NO: 14372 - DNA, 402 bp, Zea mays
  Clone ID: LIB3150-074-P2-K1-F5
aaataaaccattatggtgttattgcaacctaattaacatataaacctgtcacatgtcgaacaatttggtgctcgatacatagaaaccatgaccaataaccaccgggacatcaaaacccaccctttcgctttgcttcaagaagagtggtgcaatcctgaccgtttcacttggagatcttagcagtgagctcccgaaccagcttcgcggcgaccatggctgtcatcccatctaccgtgtcacgctgtgggttgaactccaccacatcagcggcgacaacgtcaccctgcaaattctggaggatgttgaggacattgcggaaggagaggcctccaggttcgatgtgagagacccccaggagcaaacgctgggtcaaggcagtccacaataactgagacatacaca

SEQ ID NO: 14373 - DNA, 374 bp, Zea mays
  Clone ID: LIB3150-074-P2-K1-F6
atcttaacatagagcacgatgaacactttctcgaaattcgaatgcagtctagtgatacaagcctaacacaaatcaggtcctgccttgacaactacaagcgcccaaagtcatttagtcaatacttaaaacagaaacgttgtgctcctgcctccacaattgtatcagcagcgatgtgtcaagggaaacccaaaacactggaacaaaatctcagactcgatcctacagaattacagttgtgccgaccggacaggcaaaacatgctgggggcccctagcattttccagcatcttggggcagctaagagaatctcaggcgtcattggcatatggggactcgtcgcgttgtggctgctgtcctggggatccactatagct

SEQ ID NO: 14374 - DNA, 281 bp, Zea mays
  Clone ID: LIB3150-074-P2-K1-G10
aatggatgggcaaactcaacacgaacggggcttttgcaatgcggggggcaatcaattaacaaatggaagaaacaatgcttacggcaatcgccttcctacatactgcaatcaacacagctaaacagaatcaatgttcaagctgcccctaatgtacaggctactgagccaactgagggctcctaacaacagtgcggtgtacaaagacacggtgtcagcaacaagcctagtcttattaggccggtaccccatgaaacctaaattacttccttcagcccgactcc

SEQ ID NO: 14375 - DNA, 426 bp, Zea mays
  Clone ID: LIB3150-074-P2-K1-G11
gagtcgattcagatactggattcactttcagaaatctctccacatacaaacagagagcatacaacttgaggcatgtacggtaaggttcgcttattatccttgtaacaacatcctacagccaagcaaggccaacatcaaagctttatttctctcaagttttgctcattatgcattggactgtatatatcctctaaccggaagacatgactacagctccaaccctatcgcgagggatgagacgcagctccgaaccatgtttcagaaacacgttgcctgcactttgctgggggttgatgccaattccatcgttggtgatgatggcgctggtctggggcgggaccttgaactcctccgcggcgtacttgagcaccgcgggaaaaggcgccgccttgggcacgcttgacacctttgaagggagcttggggt

SEQ ID NO: 14376 - DNA, 383 bp, Zea mays
  Clone ID: LIB3150-074-P2-K1-G6
aaactcaggacaggagaagtgttattcagatcatccaaccgaccgagagctaaatcccctttggcagaatattatacttattagaccaaccaaccaacccagctaaagaccctttcacaagatatcatggctattatggccacatatgggtaactaaaatttaataagagaacataagaattttaacttgacaccatatgagaaaacgaccatacattcaaatatgcagatatggatagatacatagctaatgttttacgcacagacgacaggaacagctgtagccaaaccaaatacattgctcgcacactacatcgacatatcacttgaaagaaagcagcatcctgaatcacgaagcagggcatccgaaaggcatgcgctta

SEQ ID NO: 14377 - DNA, 277 bp, Zea mays
  Clone ID: LIB3150-074-P2-K1-G7
gggccgaaatcaaaaacaaataggggggggtaaacaaccatccataacaacttttttaataacccattggaaaagcggggcggacataaccaaaaagttttacaacataatgggtttaaaaccacatcgggtacaaaagtagtacataacccttactattacctaattatttttcttttagattttataaccattataatttttttcatcttaataaaatatatcaccaaccttctttttttttttttaagcgcttccatatcttaaaggatttaaa

SEQ ID NO: 14378 - DNA, 332 bp, Zea mays
  Clone ID: LIB3150-074-P2-K1-G8
aattaaatgcaatccttaacttaattcactgcacttctcaatagggtattctgactacaaagaacgggagcgcatagacacaaccttattaagttgagagaaaaagaaacaatgcatctttaaccttataacttgcgatgtaaaaacggaatatcaaaagtgctaaaacagagaaagtttcgcctgtaaaaacggaatatcaaaagtgatttcgcctcgctaagttcccttcttctaaccgaatataaatacggtacccctcagtaagtcctcatctataactcccggcagagtccaacatttgtggttgtccaaaactttcatagcatgcc

SEQ ID NO: 14379 - DNA, 373 bp, Zea mays
  Clone ID: LIB3150-074-P2-K1-H1
agcgtaaatggttggttcaaatagatgaatgatataatgcctactgatgccataggtacaaaaaccacacgggccagtttcagattgcatagtgaaaatccggggtgcgaggtccatttcctttaccagtcactcgaaagcgagagagctcatcggtaagctaacctatccacctgaatagctgatcgttctgccacgtggtctcgagggcaacatctggcagcatcgcgcgtggcagtggtgtcagtccaccagcagtacatccctctgaagttcttccccaacaaaccgtgctgtgccctattcggcctctgcacctgcaggtgcatatacgacggctgttctgctgggggcatagaccgagaaaagaaca

SEQ ID NO: 14380 - DNA, 323 bp, Zea mays
  unsure at all n locations
  Clone ID: LIB3150-074-P2-K1-H3
cccttacattgttaaggggcaacaacttgttaacagacgccgccgccgcccgttaggggccggccccctggtctccatctggggcgcttcncccaccagatatgaccagctggcaattcgattttgaggccattatttgataacccgggacaagtgcactggttacctgaccattttagctttttgagatggctacacagtttgccatgcttcacacagctcagtccaccgtctngtagttggataaaagatgtcgggaactgcaaggctacgcctgataggttagccaagaattgcccgaacctttgggccaattgtcactt

SEQ ID NO: 14381 - DNA, 185 bp, Zea mays
  Clone ID: LIB3150-074-P2-K1-H7
cagagatcaagaaaacattacccccaaatttaataacccagtaccaaagggggggaataaagttttacaacgtaggttgtaaaccacacaccgccagttagttaaaacccgacagaaacataacacgttgggagccattcagggcaaatcacaggatagcaggggcacaaaagcccgacaacccc

SEQ ID NO: 14382 - DNA, 329 bp, Zea mays
  Clone ID: LIB3150-074-P2-K1-H9
acattgttaagtgccaacaactggttatgagaaccatgagggtctccgattccagctcaccatcaagctctgggggggcgtcacatggctttgctttcatcacccgcccgcgcaacgtgctacaagaacccacgtcgaccatcaatcatatcacaaccaccaacactatgcacacaggagcaaccatgttcgctatacttaccaccagacacaatacaaaataacggagcatgtatggcgacgattaccagttcacacataccgtcgaataactagcgaacactgcatgaaacttcactttttctacaccggggtttaaacccccacaa

SEQ ID NO: 14383 - DNA, 196 bp, Zea mays
  Clone ID: LIB3150-075-P1-N1-A1
gccgcagcagcagccagagccaagggacaccaccgttaatctgtgtgtgaggcattgtgcatgctgctgctgctgctgcttcttggatttcccctcctttctccgatatgatcctctctgccaagtgtattttgttttccttcgtttcttgtactaccttcccttgtgttcgtttatgcgattgcgattggacttc

SEQ ID NO: 14384 - DNA, 345 bp, Zea mays
  Clone ID: LIB3150-075-P1-N1-A12
ttctttcgccgctcgtctccctgagaggtggggggtcctaagattgggccggagcctaagtacataatcggttttacttgtctcagcccggggtctgctgcgtctggtggtggtgaaggggagaaattcgtgagatctgttccggatcaagcgtgcgagctcgggaatcaggggtttcacacatagcttcgtcgatttgaatttgatgtactaatggagtctaatggtggcaaaaagtctaacaatagtcgttctatgatgtatgaagctccccttggctacagcattgaatacgttcgacctgccggaggcgttaagaagttccagtctgctgcttactccaac

SEQ ID NO: 14385 - DNA, 399 bp, Zea mays
  Clone ID: LIB3150-075-P1-N1-A5
tcattctgcccgagcaagccgaattgtcgggcgaattcgctcgcggggagcgcgggctacctcgcgcccgccttctgtcgcgcggattcgttgctgcgcctggagatggacccgatggacatcgtcggcaagtccaaggaggacgtctccctccccaaatcaacaatgtttaagataattaaggagatgcttcctcctgatgtacgagtggcaagagatgcacaggatcttcttgttgaatgctgtgtagagttcatcaatctcctttcgtctgaatcgaatgaagtgtgcagcagagaagagaaaaaaacgattgctcctgagcatgttatcaaggctctaagtgatcttggcttcagagagtacattgaggaggtttatgctgcatatgaacagcac

SEQ ID NO: 14386 - DNA, 366 bp, Zea mays
  Clone ID: LIB3150-075-P1-N1-A7
tagaacttgtacgagggacccctggatgatgtgtatgcaactgctgtcagagactgtgatccagagggtcctcttatgctgtatgtttcaaagatgattcctgcatctgacaagggcaggttctttgccttcggtcgtgtcttctcagggaaggttgctactggtatgaaggttcggatcatgggtcccaactatgtccccgggcagaagaaggatctgtatgtcaagagtgtccagcgtactgttatctggatgggaaagaagcaagagtcgggtgaggatgttccgtgtggtaacactgttgctattgttggtctggatcagttcatcacgaagaatgctacactcactaatgagaaggagact

SEQ ID NO: 14387 - DNA, 180 bp, Zea mays
  unsure at all n locations
  Clone ID: LIB3150-075-P1-N1-B10
ttctctccccagtccccgatcccaanctntgcgtcgaaccatttttatccaataaagaacgacctttaatctttccaccggcattaatcgctcttctctttcttactccttccatttcccttggctttgttccatcataaccaattaccgcgttgcctttccctatacccacaaatttct

SEQ ID NO: 14388 - DNA, 409 bp, Zea mays
  Clone ID: LIB3150-075-P1-N1-B7
tcttccttctcaccctcatggccattatcaagatcagaatcaattgtttcggggggagcggatatctggtggccagattggcccttcatagcgacgacttctagctcgtcaccgtgaacgaccccttcatcagcaccgattacatgacctacatgttcaagtatgacactgtgcacggacagtggaagcaccatgaggtcaaggtgaaggactccaagacccttctctttggtgagaaagaagttgctgtgtttggctgcaggaacccttatgatatcccatggggttctcttagctctgaatatgtagtagagtctactgatgttttcactgaccaatagaaggctgcagctcacttgaagggtggtgccaagaaagttgtcatttctgttcctaacaaggattcccc

SEQ ID NO: 14389 - DNA, 66 bp, Zea mays
  Clone ID: LIB3150-075-P1-N1-D6
attcataatcaatatcttttggggggaagaggttttctcacacgggaaaggcccaacccacaaaaa

SEQ ID NO: 14390 - DNA, 368 bp, Zea mays
  Clone ID: LIB3150-075-P1-N1-E10
tcttttctttctctcacagcatccatttctggggcagaggagtccctctctggggagggcacgattcccgtccacaactgccaggttactgcattcgcgaccccgatcgacaactcgccgatcatcgtctcctcctcccgcgacatgttcctgctggtgtgggacctgaccaacccgttccactccacctcggtatcctacgccaccagtcgactacttgatacccttccgccgtctaaccgttcactccctacttattcaatacttctttctatagtccgtcagtctttttacccttttcagcttctaatatttatagctatttctttattacttatttattttattaactattttacttttttttt

SEQ ID NO: 14391 - DNA, 358 bp, Zea mays
  Clone ID: LIB3150-075-P1-N1-E11
ttctttctttttttcttaaagctcgaaattcggggggggcttaatatctggaagggagcctgtgcattcagaacataacccatatgaccagatcatatcccatagcctcttcccctcatgcttcaactcagctctgttctactctgctcactcactcactccagtacccgtcattttccttctcacatttctcaacctcatcctcatcatcctcctcgccgatctccatcactgcctctcggaaccgtttgacatcatccaatgccgccttccgaaacatagcaatgtccactgcgccagctaccatatggttacccttcaatttgagctgctccgtcggttcattctgcattgtata

SEQ ID NO: 14392 - DNA, 339 bp, Zea mays
  unsure at all n locations
  Clone ID: LIB3150-075-P1-N1-E8
cccttctgggccgngctaatgatattgacgactggtcacgcgacaagaagccgttcccgtcgcgctaccccagccttggttctgcaggtggcttccgtgactcgccgggctttcgcgactcatcagcttcttctgacgctgaccgttgagtccgtggagccacccctatgccacacaacggccagggggcggaggagaggccacgcatcgtccttaatccacctaaacgtgacccgtcaactgcctctaccccacctgctgaggtggctcgcaacccgccaagcccttttggggctgcaaggccccgggaggatgtgctggctgagaagggggtggttt

SEQ ID NO: 14393 - DNA, 240 bp, Zea mays
  Clone ID: LIB3150-075-P1-N1-F1
tggatgttaccgggagtaggaaggctgttgtcattcacgtcccataccgcctgcgcaaggccttcaggaagatccatgtcagactcgtcagggagctggagaagaaattcagcggcaaggatgtggtaattgttgctacacggaggattgtgaggccacccaagaagggttcagctgttctgcgccctcgcaccaggactctgactgctgttcacgatggcatcttggaggatgttgtct

SEQ ID NO: 14394 - DNA, 215 bp, Zea mays
  Clone ID: LIB3150-075-P1-N1-F2
cacggtttcgcctctactaccacagtaccactactacttcattgtaatataatccttggcattctaaaaaatgccatgcctggtctaattcttctgttcttgcggaacatacacttctcgcttccgttcggtcgacaacggttatgtaaatatagcgaatgctagcgggcagctcgaatcatcccaagtggtagggtcacgatggaattgtttgg

SEQ ID NO: 14395 - DNA, 147 bp, Zea mays
  Clone ID: LIB3150-075-P1-N1-F6
tctttgttgcatcggcagcaagaaaccttgggacagcgtagcatagatcgcggcggtgatgtcttccaaggtgaggacggatctggacgtgggcgccgacggcgtgtccgttatcaccatctacaattcgcccgtcatcttcctctc

SEQ ID NO: 14396 - DNA, 295 bp, Zea mays
  Clone ID: LIB3150-075-P1-N1-F7
tcttcctttcgccctcaaattcgttccgtccaggcggggttgatatcgagcagggaaggagaggtgaagatggctcgtacgaagcataccgcccgcaagtccaccggaggcaaggccccgcgcaagcagctcgccaccaaggcggtgaggaagtcggcgccgactaccggcggcgtgaagaatccccacaggtacaggccctgcaccgtggcgctgttcgagatccgcaagttccagaagagcacggtgctgctcattcggaagttgcccttttcagtgcctggttcgtgagatc

SEQ ID NO: 14397 - DNA, 322 bp, Zea mays
  unsure at all n locations
  Clone ID: LIB3150-075-P1-N1-G2
tttatctttattatcacatttcctannacatttcgagaatcttttcaacatgaagagggtcatccttctcttcttttccctctctctgtcatctaccatctcctctccaatccatattcccttcccctactcagatcttcactccttatacctcacttactccttccttactactatgatgttccccttttatctttacccctactcttagttcctctatctaccactcttcctccctcttacatcctcttccctctcctccttttttaccctttctaccgccattttcccttctcttccactacttttactttctcctttc

SEQ ID NO: 14398 - DNA, 412 bp, Zea mays
  Clone ID: LIB3150-075-P1-N1-G3
atggaatcttctgcgatacaacaattcgtatctacagaagggaacgatgtttccacaatgcagattgggccgcgagtttctacatcctcgctactggctcacatggtttgggcttggtgtactctggctttgggtacagcttccttatcctgttctctgctttctcggcacgcgtattggcgcaatggcgcgaccattcctgaaacgtcgtgaatctatcgcccgtaaaaacctggaactttgtttcccgcagcattctgcggaagaacgcgagaagatgattgccgaaaactttcgttcactcggcatggcgctggtagaaaccggcatggcatggttctggcccgacagtcgcgtacgtaaatggtttgatgttgaagggttggataaccttaaacgcgcacaaatgcaa

SEQ ID NO: 14399 - DNA, 365 bp, Zea mays
  Clone ID: LIB3150-075-P1-N1-G4
actttcttttttttacagctcacagctatcaccaaagagcgggtatcctgaccgctcggaaacgccccctagcttatccctaagccctccaacctcagatcaatccgcagtatctatggcgcccatggcggagaaaaagccttctgctaatatgcccgtggaggaggagcccgctacggacaatgcggcgaaggctcctgcagggaagaagccgtatgcggacaagcgcctccccgccgtcaagtccggcaccagcctgggcaagaacggcaagaagaatagccaaaaaaaagcgtttttaccttcaagatctacatctttaaggagctcaagcaattgctccctcgacattctgcttttttttc

SEQ ID NO: 14400 - DNA, 343 bp, Zea mays
  unsure at all n locations
  Clone ID: LIB3150-075-P1-N1-G7
tcttcctttctccctagcaatctctatcatcagataggagttctttgcaaagcggtagacttcctactctcccnatgtcccgcacgaagcatactgcgaggaagtccactggcgacaaggcgcctatgaagcatctgtccacgaaggcagttcgcaagtctgccccggctaccgtcggagtgaataagccccaccgtttccgccccgtcaccgtcgcgctccgttagatccgcaagttccatgaatagcacggagctgcttatccacatgcttccgttccagcgcctggtgcttgagatctgcccatgattttcaagaccgaccttctcttccagagctcctt

SEQ ID NO: 14401 - DNA, 358 bp, Zea mays
  Clone ID: LIB3150-075-P1-N1-G8
tttttagtaacctttcaataggcgtcccggagaactagtaaacatggcaggactgttgagcctgttcttagccctctcctttgtagcagctatgtttgccataggctctcatgctgatggagactgtgagaatgacctccaaagcctgataagtgactgcaagacatacgtgatgttcccagctaatccaaaggtccctccttcggatgcttgctgtggtgtcatcaagaaagcaaacgtttcttgcttgtgctccaaggtcaccaaagaaactgagaaggttgtgtgcatggaaaaaagtgtgtatgttgctgagcaatgtaagatgccatttgagcatggctttcagtgcggaagc

SEQ ID NO: 14402 - DNA, 260 bp, Zea mays
  unsure at all n locations
  Clone ID: LIB3150-075-P1-N1-H4
tctgattttttagcccgcacccaccnnctacgaatggttctaacgccgaaagagcggtgtccccccttctcccttaaccctccaacatccttctcttcaatgcgtacgctctcgacaatagcgtccacctccttttctccttctcttccacgcaagatagatcaaactccctttctactaaagccattattctttctaccttcttacgtatctttctttccttcaaaggaccattcccaactttcaacatcttctactgc

SEQ ID NO: 14403 - DNA, 276 bp, Zea mays
  Clone ID: LIB3150-075-P2-N2-A1
aaccttggtttccgggcccgcgcccgcgccactgacatcgtgatcgagacgacccgcgtcctccgcggtccgcgcccgtgcaccatctcgcctcgcattcccgaaagtatctgtattccttgatcaacatgtcgcgggaggagaatgtttatatggccaagctggctgagcaagcagaacggtacgaggaaatggttgaatacatggagaaggtggctaagaccacagatgtgcaagagctcacttgtgaggggcgtaaccttctatttgttgtct

SEQ ID NO: 14404 - DNA, 110 bp, Zea mays
  Clone ID: LIB3150-075-P2-N2-A10
cggtcgcccttttcaataatttttcattaacacccacttttaactgcctaattttaaaagtagtttgtctcaaaaaaaaaatatatttttattctaccaaattatttata

SEQ ID NO: 14405 - DNA, 176 bp, Zea mays
  Clone ID: LIB3150-075-P2-N2-A2
gcgggggtttaacgcaacgtgatgccttcaaccataggggcggtaactggggaacggcggttgtttaattacgcctggggcccaggattttttgccggcgacgagcacctgccagctgcaggggtatgggaatggaggtcgttgggactattccaccaccagctgaggtgaaagta

SEQ ID NO: 14406 - DNA, 132 bp, Zea mays
  Clone ID: LIB3150-075-P2-N2-A4
ttttccccaagtccccgatccgaagctgggcgtggtaccattacgatccagtggcgccgacgtcaaagctgtcgacgggcatcaagcgcgcttcgcggtcgtacgcgtaccatcgtcgattgctgtggtcca

SEQ ID NO: 14407 - DNA, 253 bp, Zea mays
  Clone ID: LIB3150-075-P2-N2-A7
gcgtttgctgcaacaagatggatgcaacgactgccaaatactccaaggcgcgttatgatgagattgtgaaggaagtctcatcctacctcaagaaagttgggtacaaccctgataagattgcctttgtccccatctctggttttgagggcgacaacatgattgagaggtccaccaaccttgactggtacaaaggcccgaccctgcttgaggctcttgaccagatcaccgagcccaagagaccttttgacaagcc

SEQ ID NO: 14408 - DNA, 124 bp, Zea mays
  Clone ID: LIB3150-075-P2-N2-A9
tagaaataagatgttatgcgctcatatatatgatttatcatactattagatagcataataatcttcatcatgttatagataataagaaattattatttataataaaagctattttattattttt

SEQ ID NO: 14409 - DNA, 442 bp, Zea mays
  Clone ID: LIB3150-075-P2-N2-B1
tctaccgtcaagaagggtaagcccgacctcaggaagaaggtcatgcccgccgtcatcgtccgccagcgcaagctgtggcgccgcaaggacggagtctacatgtacttcgaagataatgctggagtcattgtgaaccccaagggcgagatgaaaggatctgctatcactggacctattggcaaggagtgcgctgacctttggcctaggattgctagtgcagcaaatgctattgtctgataccaccggttgggaggctagttgaaaggatctgctatcactggacctattggcaaggagtgcgctgacctttggcctaggattgctagtgcagcaaatgctattgtctgataccaccggttgggaggctagttgagatagttttcttgtgatccattttaaccttttctgtacttaaacatctgtggaaatttacttgattaat

SEQ ID NO: 14410 - DNA, 450 bp, Zea mays
  Clone ID: LIB3150-075-P2-N2-B2
cgtcgactatcatggggggggtcttcccttggccgggagcccggcccaatgacccaacccacatgcccccgttccgcccccgtaactgacgcctgctccttcagcaccccgttgtccaccccccccctccccgccctcgacacccgggactcgctcgcccgaccgtgatgctcggtctacaacacccgccatcccccgctgtcgtcgctcgcgccatgcgtgtgatgccccgaccacgatagtcgtcgtgcctggtaccgcccgtcgagacaaccccctcctcgctcaccgaccgcggatgcccctcctcgatgcgtgcgatacctgggtcacgacagtcgtcgtgcctagtaacgcccgccgggacggccgtgagcggggcggtgggcacacagaccagccctctagggctactaggtcattctctctccttttttgcgttgggtatgc

SEQ ID NO: 14411 - DNA, 373 bp, Zea mays
  Clone ID: LIB3150-075-P2-N2-B5
ttgacctccaattccctcgaagcagcagcaccagcagagtctccttcctctccggcggcgatgtctgggcgcggcaagggcggcaaggggctgggcaagggtggcgccaagcggcaccgcaaggtgctccgcgacaacatccaagggatcacgaagccggcgatccggaggcttgcgaggaggggcggcgtgaagcgcatctccgggctcatctacgaggagacccgcggcgtgctcaagatcttcctcgagaacgtcatccgcgacgccgtcacctacactgagcacgcccgtcgaaaaaccgtcaccgccatggacgtcgtctacgccctcaagcgccagggtcgcaccctgtacgggttcggcggctaag

SEQ ID NO: 14412 - DNA, 444 bp, Zea mays
  Clone ID: LIB3150-075-P2-N2-C1
ctcgctctcgccatcgcatcgcgcacagtagacactcaaaatccgattgccgagggggagaaggcggagaccgttgcaacggctagttgcggcggcccgatggacccgtcgtacgatggcagcgcccccgccgccggtggaagcgccgacgaccatggccaaactctctgggattggacagtagagcattgtgaacccaacgattcaagtcatgcagatgctactaaattcgtgtgggattgcctcaatcaagatgacgatgagctaatgggattgcttggaaatcaaaccccgttgagagactgccgtgatttctttgctgaccttggtgatttcacatgcaaggagaccttggacctggaggaatctcgggaatcaaagcggcggcgcacattagagtacccttcagagtctagtcagtcagaagttgtgacttatgatgct

SEQ ID NO: 14413 - DNA, 428 bp, Zea mays
  Clone ID: LIB3150-075-P2-N2-C2
cttccgttatttcaagaaaacctgaggccttaaatcggccaaaggataaatgggccctgcaaagccttcgtgaacctcctgaaaaggcaaaggtggaactttcgtcgacttctcagacagaaatcaatctgccattcataacagctgatgcttcaggggcaaaacatttgaacatcacactgacaaggtcaaaatttgaatctcttgtacacgatctgattgagagaactagagatccatgcaagaactgtttgaaggatgccggaatatctactaaagaggtggatgaagtacttcttgttggtggaatgactagggttccaaaggtgcaggaggtagtctctgaaatctttgggaagaacccaagcaaaggagtcaatccagatgaagctgtggccatgggtgctgcacttcagggtggcattctc

SEQ ID NO: 14414 - DNA, 445 bp, Zea mays
  Clone ID: LIB3150-075-P2-N2-C5
tttcgagaggcgacccgagggcaagaagtgggggcggtgctgcggtggcttgccatggttataaaaagtaacggatcgcgactaggatagaaagcacaaggcctgccgctttcactcttttattcccattccacacacactaactccgtcgttgcgtttggctaccgtacgtcgttgttcgtgcgcgctgcctgccttagcaggctgctccgtctctgcgcctactactttgtcttcgagttcgtgccttcttgtgtctatcgtcgatctctcgagacgtctttgtgcctacctttctactatttctactcgcgctccattcttctttacatgtatcggatttgcgccattcgactttcatgatgtttcattttttttatttttttgttattaacttgttcatattatctttcttattttttattttattttttttataatttta

SEQ ID NO: 14415 - DNA, 205 bp, Zea mays
  Clone ID: LIB3150-075-P2-N2-C6
cgatcagagaggggctccttcttctggaccttagggacgccccttcgcggccgcggacgacccgaactgcgccgtggtggccgtgcactccaaggccacctacgacgagcagggggcgaacaacaagagcagcagcaagctgatggagatcgacatgtaggggatcagcggcgggccctgccgttgcatcgagacgaacatcaag

SEQ ID NO: 14416 - DNA, 102 bp, Zea mays
  Clone ID: LIB3150-075-P2-N2-D7
ttgtcttttacgcgttaagaacctttaaaatttcccccactcgccagtcgcagcagcacctgtagccatggacgccagcggagccggtagcaagggaaagaa

SEQ ID NO: 14417 - DNA, 453 bp, Zea mays
  unsure at all n locations
  Clone ID: LIB3150-075-P2-N2-E1
agccttccgtccaacgtcgcctggcggccgtttgcagctccgcgcctttgctcggaagttggtgaaggtttcttgaagctgaaaagatggtgctgaagacagaactctgccgcttcagcggccagaagatttatcctgggaaaggcatccgatttatccgtgctgattctcaggttttcctttntgccaactcaaaatgcaagcgctacttccacaaccgcctgaagcctgcaaagcttacctggacagcaatgtacaggaagcagcacaagaaggatatccatgctgaggctgtcaagaagaggcgccgcgccaccaagaagccatactcgaggtccattgtgggtgcttccctagaggtgatccagaagaagagggctgagaagcccgaggtccgcgatgctgctagagaagctgctcttcgtgagatcaaggagcgcatcaagaagacca

SEQ ID NO: 14418 - DNA, 445 bp, Zea mays
  Clone ID: LIB3150-075-P2-N2-G2
agccttcgcattgatggcgaagaatttggaggtaaaggagggttattcaattaacctaaccttttttgagaacccgacctttgaagacacaaagctaacaaagacctattcctttgttgatgatggaccacccacaataaaagcttttaaaattaagtggaaggatggaatgggacctgcaaatggaaatggtattaacaagaagggaaacaagcggccattagtagtggaaagttttttcttctggttagtgatacagagctcaagagtcttgctgatggtgtgcaagatgaggtgtctgatttcataaatgaagacttgtggtctattcatttgatgtactttaacattgatgttgtatattatattatatagagttatattatttctatattatttataattatgatatatattgtttttttatttatatattcttttttta

SEQ ID NO: 14419 - DNA, 400 bp, Zea mays
  Clone ID: LIB3150-075-P2-N2-G3
ttttaatcgatctcgtttcaaatccatccatgctcgtttcctccgtcccgcagcatctcaaccccatggccaagatcaagatcgggatcaatgggttcggcaggatcggaaggctggtggccagggtggccctgcagagtgacgatgtcgagctcgtcgccgtgaacgaccccttcatcagcaccgactacatgacctacatgttcaagtacgacactgtgcacggacagtggaagcaccatgaagtcaaggtgaaggactccaaaacccttctctttggtgagaaggaggttgctgtgtttggctgcaggaaccctgaggagatcccgtggggttcggttgttgctgaatatttttttgtgactatctgtttttgcattgaccttgatatatgcttttg

SEQ ID NO: 14420 - DNA, 459 bp, Zea mays
  Clone ID: LIB3150-075-P2-N2-H2
agccttccggaaatctggcattatactttctaccaccaggtttcgggtggcccaaaaggagcaccttgggtggttaaccgaggctcctttgaacccaaaggccaacagggagaagatgacccaaattatgttggagactttaaatgttcctgccatgtatgttgcaatccaagcggtgctctcactctatgctagtgggcgtactactggtattgtcctcgactctggtgatggtgtgagccacactgtgcccatttacgaaggatatgcccttcctcatgccattcttcgtttggatcttgctggtcgggacctcacagactccctcatgaaaattctcactgagaggggttactccttcacaacctcagccgagcgagaaattgtaagggacatcaaggagaagctagcatatatagcccttgactatgagcaagagttggaaactgccaagaacag

SEQ ID NO: 14421 - DNA, 349 bp, Zea mays
  unsure at all n locations
  Clone ID: LIB3150-075-P2-N2-H6
tttcattgttgaacactgaactccttccgggcggcgtcccggttgggggctgtcggcacgaccgccggtagcccgggacgcacgtcgcacggccccatccctcctagcggccggtgacggcaccggcggccctttgctcggctgtgcccaagctgcgagggcgagatctacccccgcgtccgtgcatcttcgtcaggcccttctccggacgagcactcacaggatgtgttctgaagttcatgttgagggagatgcaagtgtcggacagaagggttgcaaggatataaggccgtacaaatgtgaattttgcacagtngtcaggtcaaagtaatgcctaattcaagctcac

SEQ ID NO: 14422 - DNA, 479 bp, Zea mays
  Clone ID: LIB3150-076-P1-N1-A11
tggtgcaaggatagcaggtcggccatccatgtgtgaatgggatcgcatcgaggacatgcgcagtcatggcttctatcgtccagggagcatccattcctcgagatacaatgagagtccaatgtcgaatcctgtaccgagacccatcgtcgctcagttcatgatcgagggaggtgaacatccaagagagagacgtctgcgtaggtaccgctggcaaagcgccatgtgcgtacattctacaagagctaaagaccaatgagcatgcgagatcccgctacaaggttgcatctggggcaagaggtcatcccgcccgcacgagcaatctcgggtcgtcgtcccgcgccaaagttcaaagtccaatccttccgccttgagtccatgggagcgcaaggtcagaggtgttcatgtacccgagcagcatctaaagtttttgttgaagtaaaggtggactccaaatggccatgcttatttcttctctctga

SEQ ID NO: 14423 - DNA, 190 bp, Zea mays
  Clone ID: LIB3150-076-P1-N1-A9
ttcttccttttttttcaacactccctcctacagcaaacgattccattctagacctaatcaggtacccctacttcctcactatacctcattccattccattcaatatccattcattctttcatacatccatacatccatccatccactatacaaaaagttgaatcccacccaccaatcactcactagatca

SEQ ID NO: 14424 - DNA, 398 bp, Zea mays
  Clone ID: LIB3150-076-P1-N1-C11
tctgttttccattcctcccaacaccacctcggctgggatctccgtagcctccgtcgagtggagcatcgatcatgtcggcctactgcggaaagtacaaggatgagctcatcaagaatgctgcctacattggcacccctggcaagggtatccttgctgctgatgagtccactggcaccattggcaagcgccttttcagcatcaatgtcgagaacgttgaggagaaccgccgtgccctccgtgagctcctattttgctgccctggagctctccaatacatcagcggtgtgatcctcttcgaggagaccctgtaccagaagaccaaagatggcaagccttttgttgatgttctcaaagagggaggcgtcctccctggcatcaatgttgacaagggcaccatt

SEQ ID NO: 14425 - DNA, 241 bp, Zea mays
  Clone ID: LIB3150-076-P1-N1-C9
tcttcctcgtttaacatccaacctccctcaagaagaggcctttttataaccggtaaagacgatctccaccctctccttcctacacaccatcttctccctaaactcccatgaatatcaccactgcgtcaatacccatcaacccctctacaacatactaataattacatctatgtcttcacctaatccaaagcacaatctcttctcatgctttatctaatgccatccattaattcttacacct

SEQ ID NO: 14426 - DNA, 158 bp, Zea mays
  unsure at all n locations
  Clone ID: LIB3150-076-P1-N1-D10
ttcttttctttctcttctacttcctcacttcctgtagggttctttataaataagaagaagagtncatcttccttcatctttccttacataaatagttattcaacctcccttgcttacaaccattatattatccttattaccatgttccaacttttaca

SEQ ID NO: 14427 - DNA, 149 bp, Zea mays
  Clone ID: LIB3150-076-P1-N1-D11
ttcttcctctcttattaacttccttacttccgggaagagttcttaaaaaaaaggagaacattcaatctacattcatcatccttaacttcatccatttcttcatcctccctttctaccaaccattatatcatctatatctccttttttca

SEQ ID NO: 14428 - DNA, 305 bp, Zea mays
  unsure at all n locations
  Clone ID: LIB3150-076-P1-N1-D7
tctttgtggtcggcctcctcttctcttgacccacactcttttcatagagggggcggctgcacaggccaatgctgcagctgtcccgcagtctgtgctgcggaagcacaagcgggaggagcattggccagcggacacgaaagagtaagcgctcgcggacaggaagaatgcgcttgagagccgatagaacatatttgcccgcgccaagcattacgcccaggagctccacgcccacgatannntttgtcaattcgttgcgcgggccatcgccccgacggcacctgggtacatcagctacaggacgggac

SEQ ID NO: 14429 - DNA, 410 bp, Zea mays
  Clone ID: LIB3150-076-P1-N1-D8
ttcgatttctaattctcctcgcgaggccaggccctaaacctaaaccgtggagccgccgccgccgccaccaccagcactgccactccgccaccaccgtcccgaagccccctcccagcgccatcgacttcatctcggattgaagcaatgtcgtcggacgatgaggtcagggaggagaaggagctcgacctctcctccaacgacgttgtcaccaagtacaaggctgccgccgaaatcctcaacaacgctctgaagattgttgtgtctcagtgcaagccaaaagtcaagattgttgacctttgcgagaagggcgactctttcataagagagcaaactgggaatgtttacaagaacgcaaagaggaagattgaaaggggtattgctttcccaacctgtgtatccgtcaatgacac

SEQ ID NO: 14430 - DNA, 350 bp, Zea mays
  Clone ID: LIB3150-076-P1-N1-E5
aatattcctcgctctcgtcgcctcgttcggttgggctcctccccgccccgggcggagccgagcagagcgcagccctatccggagctgggatggcggacgcgaagcagcagcagcagcagccacagcaggcggcagcggcagccaccggcgtgtggaagacggtcaagcccttcgttaacggcggggcctctgggatgctcgcgacctgcgtcatccagcctatcgacatggtcaaggtgaggatccaattgggtgagggctccgctggtcaagtcacaaggaacatgcttgcaaatgagggtgtccgctctttctacaagggtttgtctgccggattgctgaggcaagcg

SEQ ID NO: 14431 - DNA, 314 bp, Zea mays
  Clone ID: LIB3150-076-P1-N1-E7
tctttctatcgacccctcttcctatcgaccggggggctttcatttacatgatacccaggcattttttctccgtttctctacttttccagttttataccaacacacccactttatcaatcctctcatgtgacctgaaacttgattctgaagacctgcccaacacctaaaataatatacctaaagttttacttaatccatctaatgctattattcttatatatacacatttacatgtaagacataaatataactctgactttctatttgttcatatattagcacgtcattctccttatccaaaactaatacattta

SEQ ID NO: 14432 - DNA, 182 bp, Zea mays
  Clone ID: LIB3150-076-P1-N1-E9
tttcttgacgaattggaatacggaaagcgagaggtgatggatctcgccgaggcccggcagcatcagcggctcatcgtcggcgcggcgctgctgctggcaaccgcggccttcctcaggctcctcctgggctcccgctcccggggcggcatgcgcctgccgtccaccattcctgtggcgcctgt

SEQ ID NO: 14433 - DNA, 277 bp, Zea mays
  Clone ID: LIB3150-076-P1-N1-G10
atcgcgtcacttgcagagaaggagggagctcgcacggggctacgcacacacatcagaggggggtcgtcgatgtcgcggtgggctgcggtgctggcgctggccgcgggcaccgccatcgccgtggcgtccgtggccccaagatacatgtacacggtcttgacatgaagagcaggcctgctgatgagcctggctcctggcctgaagtacgtgcaggggcagggccgcgcgccgccgcacgactgttgtagtggcctgcgcccggtgccagggaagagac

SEQ ID NO: 14434 - DNA, 332 bp, Zea mays
  unsure at all n locations
  Clone ID: LIB3150-076-P1-N1-H11
tttctttttcacaatccctccccatcaaagagctgggttttctcgaagccactgtggtgcatcnatcactgcaagattcctcgagcctaccccaggcgagccgacaaataaaccttgctacatgcgcaccgctcacaaagctattcctgcagctgataactcaaattccacctataaaaaaagcctttcccgcatcaatatctatatcgtcgaaatttacagcagatccatccaagagctactgttctgacatcctttatccctccaatacaataaaaatgtgaacctgttattaaataccctgtaccagcataccatatacttacatattc

SEQ ID NO: 14435 - DNA, 399 bp, Zea mays
  unsure at all n locations
  Clone ID: LIB3150-076-P1-N1-H12
tcttctattcaactaccagcctcccancgtcgtccagttcggtttcctaaccaaggtgcagcgtgccctntgcatgatctccaactccaccagtgttgtggaggtcttctcccgcattgaccacaagttcgacctcatgtactccaagcgcgccttcgtgcactggtacgtcgttgagggtatggaggaaggcgagttctccgatgctcgtgaggatctggctgcgctcgagaaggactactaggaaggtcgtgctgagtttgactagggtgtagacggcgacgagggtgacgagtactatactctttactgtcacggcgtcttcagacttgtgtgccactgctatcctgtgatctgccctgagtggctcctatcgagttatgtttctgtcggttctta

SEQ ID NO: 14436 - DNA, 390 bp, Zea mays
  unsure at all n locations
  Clone ID: LIB3150-076-P1-N1-H9
tttctgtagaccgagacctctnagggggagctgttttcaaaagggggaggggcgattcgctttgctcgcatggtggatcatgtcgctgtcgatgttggggagctcgttttcgtcccgagtctgttaggcatcagtgctattgtccggcggcaatgatgaaaccatcgcgctttctgggatggtggattgccgcatttgccaatacttggtcctcgttattaacctctatagcccctgtgctttcttctactgtcccatatattcctcatggattgttttcaactctccttcattttgaaatgatatataatttctttatatttttcatttacttcttccaatcctggttactctgtcctaaccccatttacatccatcattattctttcc

SEQ ID NO: 14437 - DNA, 201 bp, Zea mays
  Clone ID: LIB3150-076-P2-N2-B11
tcatttgatacttccatcaaccctccaattccacacggggacctcctagcttgccagcggtccctatatacagtcttattatactcaagctcaaacattgacataactccttcctatgtaaaatgattatcctgtcacaaattaacacatcattctaaccgaaaataaaaagttttaagactgatccaactaatacgacct

SEQ ID NO: 14438 - DNA, 332 bp, Zea mays
  Clone ID: LIB3150-076-P2-N2-B5
gttttcttttcttttgccccgttccactagggttttgccgcaaacctttcggtggcttccggttccgcgaggcaaccgtccgaccggtcggaatggtggatgtggaggagaccgggaacaagttgcaatcgcagatgcgcctccacgcggagccggaggacgccgtcgtcgacctccccctcccggccctcttcgatagggcgtcgcggctccacgccctggcctccagctccgccctcgaccaggatgggatccgcacgggggttgaccttgtgcggcgctgcgacgacattggtcagcaagctcggtctttttctttcccaacgagacca

SEQ ID NO: 14439 - DNA, 408 bp, Zea mays
  Clone ID: LIB3150-076-P2-N2-B6
ttgttttttttaaggatggccagacccgggggcatgctttccttgctttaaccctgggggtcaagcagatgatttgctgctgcaacaagatggatgcgaccactcccaagtattccaaggcccgttacgatgagattgtgaaggaagtttcatcctacctcaagaaggttggatacaaccctgacaagattgcctttgtccctatctctggttttgagggtgacaacatgattgagaggtccaccaaccttgactggtacaagggtccaaccctgcttgaggctcttgaccagatcaccgagcccaagaggccttcagacaagcccctgcgtctgcccctccaggatgtgtacaagattggtggtattggaactgttccggttggtcgtgtggagactggtgtcatca

SEQ ID NO: 14440 - DNA, 407 bp, Zea mays
  unsure at all n locations
  Clone ID: LIB3150-076-P2-N2-C1
agtccattagctttatctactccagagcgcagaagaacccgaccgacaccatgggggtgttgttcgttgccttggctctcctggttttggctggaggcgcaacctcaacccatacaagcggcggctggcggctgccagccaccgccgccggttcatctaccgccgccggtgcatctgccacctncggttcacctgccacctccggtgcatctnccaccgccggtccacctgccgccgccggtccacctgccaccgccggtccatgtgccgccgccggttcatctgccgccgccaccatgccactaccctactcaaccgccccggcctcagcctcatccccagccacacccatgcccgtgccaacagccgcatccaagcccgtgccagctgcagggaacctgcggcgt

SEQ ID NO: 14441 - DNA, 358 bp, Zea mays
  Clone ID: LIB3150-076-P2-N2-C4
gtttcgctgttctcaagattggcccaaatggggcatcacagtttgccatcgagcggaacgctcagggtctggctcgctatgccatcatctgccaggagaatggtctggtgccaattgttgagcctgagatccttgttgatggccctcatgacattgatcgctgcgcttacgtcactgagaccgtccttgctgcctgctacaaggcgctcaacgagcaccatgtcctcctggagggtaccctcctgaagcccaacatggtgactccaggctccgactccaagaaggtgactcctgaggtgattgctgagtacaccgttccgtacccttcagaggaccgtccctgctgctgtgcctgctg

SEQ ID NO: 14442 - DNA, 261 bp, Zea mays
  Clone ID: LIB3150-076-P2-N2-C5
ttgtgcccaccggcaccgttcagtgctagcgcgcgctcatggcgtcgtttggccggctcctcctcgtcgccggcctggccttcctggtgctgctgctgggtgcccaggatcacgggcgtggagagcaagcgaccggcggcggcccggccgttggagcagcatccgccgtcgctgctcctcccgcgcgggaggctgtaatcatcagccggcaccagcattcgcagccgtctgtcgcggcgttggctgaaagcaagcggttcc

SEQ ID NO: 14443 - DNA, 377 bp, Zea mays
  Clone ID: LIB3150-076-P2-N2-C6
tttcattgtccctttacttttgatgaactctgggaacacccatgatgacacacagaagattgttgagaagtattccaactccaacatcgaaattcatactttcaatcagagccagtatcctcgcattgttaccgaggacttcttgccacttcccagcaaagggaaatctgggaaggatggctggtatcctcctggtcatggtgatgtgtttccctctttgaataacagcggaaaacttgacatcttattggctcagggcaaggagtatgtctttgttgcaaactcagacaacttgggtgctatagtcgacatcaagatcctaaaccatctgatcaataaccagaacgagttctgcatggaggttactccaaagacgc

SEQ ID NO: 14444 - DNA, 407 bp, Zea mays
  unsure at all n locations
  Clone ID: LIB3150-076-P2-N2-D1
gttaaacttgagctcgcaacttctctaattgggaaggcgaaggcaaagggggtttctcttttgcttccaactgatatggaagaaccggccaagtttgcagctgatgctgaaagcaagatggtccctgccactgctatccttgatgactgaatgggtctggatgttggccctgatgccaccaaaacattcaacgaagcatgggacaccaccaagactgttatttggaacggncccatgggagtgtttgagttcgagaagtttgcagctggcactgaggcgattgccaagaagctagctgagcttacaaccacgaagggtgtcactaccatcatcggcggcggcgactctgttgctgctgtcgagaaggctgngctggccgacaagatgagccacatttcgaccggcgg

SEQ ID NO: 14445 - DNA, 162 bp, Zea mays
  Clone ID: LIB3150-076-P2-N2-D4
ttttgttcccccgttgtagttcgagtgttcgacccggcggccggcggcgacgcgctcgtggtttccagcgatgtcggcgcaagcgggtccagggacgtacttcccggcggctgccgcaagagacaagcggcgggagaggaaggaggagctgcggcgccacct

SEQ ID NO: 14446 - DNA, 407 bp, Zea mays
  Clone ID: LIB3150-076-P2-N2-F1
cttcggtttgatcgggccccgcttccagaacttcaaggaggttgtggtaccatggggctgaccttaacaaactttttaagccggttcttttccaagaaggagataaggtccctaatggtgggtctcgatgcacttgtaaaaaccacaatcctttacaagctcaagctccggagaaatcgtgaccacccatccttacaatcggggttaaatggggagactgttgaatacaagaacattaacttcactgtctgggatgttggaggtcaggacaagatcaggccattgtggaggcactattttcagaacacccaaggccttatctttgttgttgatagcaatgacagagatcgtgttgttgaagcaaaggatgagcttcacaggttgctggacgaggatgaattgaggga

SEQ ID NO: 14447 - DNA, 379 bp, Zea mays
  Clone ID: LIB3150-076-P2-N2-F3
ggggaaccacaaaaataattcagaggtacttaacttaatggtaataacaacttcagcaaaatgctgaataaggtttagcaccaaccagttaagctacctaacaatatggtaatgacaacttggacaaccataatacaaaaggaaatgcagttttgtcacagcaacatcgtattcataagtaatacccccatttagtacctaacatcaccacgagcacctcaatcgactcagtgctgactagcagcgatacaagggacattatatctttaccaagcacttgggatgatggcttaagcagcaggatctttcttttttttctccttgtactcctccttattcttagctgtggcgtcttggtactgttggtactcggccacca

SEQ ID NO: 14448 - DNA, 404 bp, Zea mays
  Clone ID: LIB3150-076-P2-N2-F4
ttttaccaggtaagcagcagcaggaaccctggcaccgccgcatccgcagccatgggtatcgacctcgttgccggtgggaggaacaagaagaccaagcgcacagcgccgaagtccgacgatgtttatctcaagctccttgtcaagctctaccgtttcttggtcaggaggaccaagagcaacttcaatgctgtcattctcaagaggctcttcatgagcaaaaccaatcgcccaccaatctccatgcgccgccttgtcaagttcatggaaggaaaggagaagaacattgctgtgattgttggcacagtcacagatgacaagaggatccaagaggttccagcaatgaaggttactgccctgaggttcaccgagacggcaagggccaggattgtcaatgctggtgggga

SEQ ID NO: 14449 - DNA, 370 bp, Zea mays
  Clone ID: LIB3150-076-P2-N2-F5
ttttcgcgtccgcgcctccgccgccgacaacagcgtagtgtagtgtagttccggagagggttggggagagtagtagtgatccgcaatgtcgacggaggaggctgttgtggctgaggtcccggtgaccgaggtgccagcggaggtcccggcggcccaggtggccgaggcgcccaaggcgaagaaggcgcccaaggagaagaaggcgcctaaggagaagaagctttccgcggcgaagaagccggcggcgcaccctccctacgctgagatgattgtagaggcgatcgctgtcctcaaggagaggaaggggtcgagctcggtggccatcagcaagtacgtcgaggggaagcatggcggcatgcttcccaccaac

SEQ ID NO: 14450 - DNA, 338 bp, Zea mays
  Clone ID: LIB3150-076-P2-N2-G4
tctttttcctccccttttaaccaagacctcttggggttagggttacttaggggggtgtggagggtccattgcaacaattgatgtggagtaccgttgcttctcggcaggcttgtctgggccaccagcaacgagtcgctggagaatgcctttgcctaatacggcgagatcctcgacttcatggtcattaccaaccgggggacggggaggtttggttgctaccgcttcttgaccttgtccaacaagacttcatgctttaaggttctctgagcttaaactgctaggagctcgcctgtcgtgacatcacctgtatccaatgcacttagccatgcatttatcac

SEQ ID NO: 14451 - DNA, 345 bp, Zea mays
  Clone ID: LIB3150-077-P1-N1-B8
tcttttgttatggtcacactattatcatgctggattggcatcttaatcacgcggggggaaagcaaacaaagtcatgcattttaactaagaatcatctttgatgcatataacataatttaacaactgtatctgcaaaaaacgccaataattttcttcccttcttgcatcggaacagaaagcattctgtcatcgttgaatatgtttttagtggccatcggttcaaactaacaattcccaatgagacttcgtagtatcgccttctcattatctgttgtccttagtcctggttaaggctaaccatacttatacgaagcttttgctttgatgaggataatgatacttcaa

SEQ ID NO: 14452 - DNA, 225 bp, Zea mays
  Clone ID: LIB3150-077-P1-N1-C7
ttttctttcctctcctggtgctaccctttttggcgcgctagtttagagtccgcgccggcggccaaaaacaaagatggaggtcgtctaaggcacaaagctgaagggaacgaaacacatacaggttttctactgttaagaatgcgaggagctcggcctcaagattcccaagctctacaacgccgttcagctctaatgcattaactgccggagcttcaaagatggatt

SEQ ID NO: 14453 - DNA, 107 bp, Zea mays
  Clone ID: LIB3150-077-P1-N1-D3
tttttctttttatctaacaaaccgaatcacaggggtggaatcctatatgaggggggttatctattccaacactaagttgattcaattgatagactaaatgaaccttc

SEQ ID NO: 14454 - DNA, 331 bp, Zea mays
  Clone ID: LIB3150-077-P1-N1-E2
cggacgcccttactttttttttttttcgtcctgggaatttcttacgggtaccttcatgcgtaccaggggggccaaaaacaaacacattatagcttgccataataatgacaacagctgtaaccgggaaaaaacattatccactgacaatattacatatcatactagacggatgaataaagtgtaaaattttgggtgcccaaagcgataaaaaacggaggtggggtgaaaaaaagaaaaatgggcaattttcaaaaaacaaaacgtgtttggaactatttattctctaataaaacaacgcgcgaaaaagagaacatttatatttattacctaa

SEQ ID NO: 14455 - DNA, 360 bp, Zea mays
  Clone ID: LIB3150-077-P1-N1-E7
tttttctttgaatccctcgcatctcattcgggggcttggttttataacaccagggcgagacctcaccattcttattcattgcgcccaaggcgtataatattccctctgctaataacccatcggaggatgagccccctgtcgctattgccccggctgtgaagaagcccaattcctaaaagctccttccttttgtctattctttctgtaaagaatgactcgacaatatgggctataataaggctaataagtaactgttgaccttcatgatctacatatttaaggtgcttatatatttccactccttcatttccttattttccaaggtcatgtccatcatgaactacttcattaactacatct

SEQ ID NO: 14456 - DNA, 273 bp, Zea mays
  Clone ID: LIB3150-077-P1-N1-E8
tttttctttttaaggggttgccacttattcaggggggggacatcatccaagaggggcgccctataatacaaaaacatgatcgaggccatgatcttgtagcatcatcttatgcacttggtgagattccattttttgacgtgacctaatcacattacttcgccagctttgtcacctaacttgagattttttggattttttagatcctgagacaccttaagtagcaaagatcataattcatatgcgcttttatattctttggatgtaaaaaagaat

SEQ ID NO: 14457 - DNA, 271 bp, Zea mays
  Clone ID: LIB3150-077-P1-N1-F12
tctttcttcttttcgggcggagaggttccgggtttggggggtgttttttgggagaggcgtccccttaagaagtccaagaatgggaagcggaaatccaaggatggcatgctcaatattgtcatggcgctggtcgctccctcaactctttcttcttagctcctttccctctataccgtttgttgtttctcttccctgaacaatctaatcttgctatttcattttttgcctccagattattgttaatctatttaatttttttttatattattta

SEQ ID NO: 14458 - DNA, 360 bp, Zea mays
  Clone ID: LIB3150-077-P1-N1-F8
tcttccttttgtcagtggtcacaacactacacgaggggctttatcagaagcgaggtacccaaaactccctttaaagtccgagctctatccaacccatgaacgggatcccgatgcccacggcggcctcggttctcgccgcagcggcggcctctccccctctgacgtggcagatattgacttctcttcttcccgcgttacattcactggcgaacccacctcccgcactgctcccacggtcgcccgctcctcctctccgtgcctcctccgatccccgcgatatctgtgctggagcctccttccggaggacaccattttcttcggcggctgcattatgttgaggtgtggaagcatagtccactg

SEQ ID NO: 14459 - DNA, 396 bp, Zea mays
  Clone ID: LIB3150-077-P1-N1-G8
tttttgtacttatgcgccgccgccgccccaacgcggggtgcgttactgaaaggtggtgggcttccctccacgcgagaagcgagagcatgtacacccatgtgaagcttgctgttgtggtgaaggtgatgggcaggaccggcttcaggggtcatgtgacccaggtcagagtgaagttcttggatgaccagaaccggctcatcatgaggaatgtcaaggtgcccgttcgtgagggtgacatccttaccctgctcgagtccgagagggaggtcattaggctgcgctgaaaccctagcgttctttgttggctcttgtatggactttggtgtcttcgaatttgtgctatggttgtaatttctgtgaccctgtcttgagagtagtaagcctggcgataagatt

SEQ ID NO: 14460 - DNA, 103 bp, Zea mays
  Clone ID: LIB3150-077-P1-N1-H4
gtttggtttcgttcccctgcaatgtaatcatgtcgtgactctcaagggattattccgctctgctcttatggtctctgttttctatttaatgattgttattacc

SEQ ID NO: 14461 - DNA, 331 bp, Zea mays
  Clone ID: LIB3150-077-P1-N1-H7
tttcgtgcatcttaccgctcatcgcccccgtcgggggcttctttatacttctcggggggtcccacaactactccaaccaaactatacacaaggagctcaactaatggaacaaatgctggaatatgctcacggacagacttgatgagaagaattcaggattcctccacatactgacgtccggtttctgcacaagagaccgacgcattccaccacaaggctgtgccaaatataccgagtacactgacggaaacatccgaattgcgctcaaatccaatatattttagcacccagaagattattgcttatttttttttcacaagcattatccccc

SEQ ID NO: 14462 - DNA, 375 bp, Zea mays
  unsure at all n locations
  Clone ID: LIB3150-077-P1-N1-H8
ttctgtttaaaagcatngcgaccacatacaggggtgtctacttttgcctttggggtggggataacaatgacgatagtatgagatggcggtcacgatcacgtgggtgaaggcgaggcatatcttctacagccgttgcaaccccaccgtcttggtggacgtgtgccttatctacggcagctactctaggggggtcttacccattggcgcattcactggaatatatgatgccttgcagttgagggattgaggatctgattatcttggcacgggtgttcttaaggctgtcagcaatgtaaattacatttttggaccatcaattgttgtaaaggacctcactgagcaggttgagatttacaacttcatggtccatcatct

SEQ ID NO: 14463 - DNA, 197 bp, Zea mays
  unsure at all n locations
  Clone ID: LIB3150-077-P2-N2-B10
ttttctttctaggtcgtcgccaaccccnacatggtagagcttattatgcaggtgggcggcgtctgctaggctcctttccaggctgccctctccggggagctgctgtcgcgcggtacaacatccggtgtccctcgcgaggtcttcttctttgtggtcgacggtcaaagttacaagtttcttgtcgcagcctctcttgt

SEQ ID NO: 14464 - DNA, 107 bp, Zea mays
  unsure at all n locations
  Clone ID: LIB3150-077-P2-N2-B5
gacatttcaccacctgtagcccacctcgctgtcgagtctcaacccagcgacggaatggcctcatttntatcttaccccaaggacgcccaagaaggcctacttcttct

SEQ ID NO: 14465 - DNA, 380 bp, Zea mays
  unsure at all n locations
  Clone ID: LIB3150-077-P2-N2-E12
tctcttcgcagcacaataacctacagtcgggagtaagtgatgctccgttagttagtgcagcactccccatcatggagaatcatggctatattacggttgtaatctttaggantttttttttgtatgtacaccgtaggcacttttagactcttgtacataagcttctagttttagttcggttatacggcccatcctgtagttttgatgtagcagctctcatctctgccactgctacaccaacttatggcatgtataagtgtgctaattcactggtcatcttcatgatacattctttagatgcttggtcaattttttagaagcttggtggttggttgtgccagtagtcattatggtagataattgttggttgtctaattttt

SEQ ID NO: 14466 - DNA, 225 bp, Zea mays
  Clone ID: LIB3150-077-P2-N2-E7
tttcgtctttttcctacacccaatcttatctgaccaagccctctgaacaccagggtccatcctcctcctcctccgtcgccgtcgcccaagatgggcttcgacgtgggcctcgtcccctacaaccccgacgggtggtgtccacctgtagttgccgtctcgccgccttccctcggtggtggctcctcgtctgacccctttgctcccttttcccgttccgacaagctg

SEQ ID NO: 14467 - DNA, 371 bp, Zea mays
  Clone ID: LIB3150-077-P2-N2-F10
ttctctttcatgttgacctcattgagaagttggtcaactacaacacactggaggggactgagacaagttaagtgagcaagcatatcatgctctgaaagcactactgtttcgcagtatcatatatatctgaggcggtatgttgcttcttctctatcatgagaggattgtttgaagtgtgaactagtttttgtatttatcattcgtgtactttcatgttttttatgttttttttttattttttttattaatttttcttttatttttattttatttaattgtaagtttttttttatattttttttattatatattttttttaattttaattttaaatttttttgtctttattatttttttatttaactaattta

SEQ ID NO: 14468 - DNA, 271 bp, Zea mays
  unsure at all n locations
  Clone ID: LIB3150-077-P2-N2-G9
tcgtccacgcgttcgcccacgcntccggttagctgtggtatttctaccggggttggtgcatcaattaatgttgcaaaacctccgaagggttcgacagtggctgttttcggtttaggagccgttggtcttgccgcttcataaggagcaaggattgctgtatcgtcaaggatcattgttgttgaccttgaaccttaacagatattatatagtttggaagtattaattttttatttattgtttttacattatttttacattcttattctttttt

SEQ ID NO: 14469 - DNA, 61 bp, Zea mays
  Clone ID: LIB3150-078-P1-N1-B3
attcgtttgagttgtcctcccgctacttttcgacgggggcttccagaggttctacggggtt

SEQ ID NO: 14470 - DNA, 121 bp, Zea mays
  Clone ID: LIB3150-078-P1-N1-B4
ttaaaatatgtattaactttaaaaaaaaaggggaagttttaaaattaaaagggggatatataaaataataatatatttaatttatattattatttgataatattttatattttatattttt

SEQ ID NO: 14471 - DNA, 293 bp, Zea mays
  Clone ID: LIB3150-078-P1-N1-B7
tcgacgacgaagacgacgcctgcggctgatgatgatcccggcaggtcggcgctggccaccagtcaaccggcgttcgcaatcgcgttattgtgttcctggtggtttatgcgagcgttttgcgttcgcgtaatttttcattctttccttttttttccttctccgatttcgaagtctctttggaaggtggatcgatgcgttgcgtacgttactgctctgctctgttcatctgtgtaacgcgcgatcagcatgccggcatggttttagttgaactctgtgaactattcttttgcctc

SEQ ID NO: 14472 - DNA, 337 bp, Zea mays
  Clone ID: LIB3150-078-P1-N1-D7
tcttctttcgagccggaaggaattaggggcagggtggaattctgtagaggcggcgccctctttatgcacgcatggaggacctgatcgtggaggagctcgtctccaacctttttacctacaaagagcagctactcgaggtcaagaagcttatcaaggagaaaaaggatgatgcttgaatttctgaatatattgatatggagaaggagctttcaagaggtcataacgttaaccgaagagattttggtatctgcaaagcatactgagagtgcccataatgttgcatgtctatcaccgactagcttttcatcttgtagtgcagtctgagggactggatgac

SEQ ID NO: 14473 - DNA, 307 bp, Zea mays
  Clone ID: LIB3150-078-P1-N1-E7
tttgtcctttaattccccggcgacaacgacggcgcgggggtatactcggcccgcgacggagaggtggaccgccgtgacgtgggcaagatgaagcacgggtgcgagcattaccggtggaggtgcaagatcgaggcaccgtgctgcaaccaggtgtatccctgtcgccactgtcacaactaggctacggctttctgagattggcatacaatatgtcgtcaggatgttgaaaaagtagtttgcctactctgtgtaacaaaccagtcagtgtcacatgtgtgcttaatctgttgtgttatatattgtagag

SEQ ID NO: 14474 - DNA, 386 bp, Zea mays
  Clone ID: LIB3150-078-P1-N1-F8
tcttcctttccttctgccttctgcgcctccagttcgtcctctgtctccttgcgggttcaggctcccctccaaccatgggtaaagagaagtcccacatcaacattttggttattggccatgtcgactctggcaagtccaccaccacaggacaccttatctacaagcttggaggcattgacatgcgtttgatcgagaggtttgagaaggatgctgctgaaatgaacaagcggtccttcaagtacgcctgggtgctcgacaagctcaaggctgagctttagagaggtatcaccattgatattgctttgtggtagtttgagaccaccaagtactactgcacgtgctttgatgcccctggacaccgggaacttatcaagaacatgatcact

SEQ ID NO: 14475 - DNA, 278 bp, Zea mays
  Clone ID: LIB3150-078-P1-N1-H7
tcttccttcttcactgcctcgtgtggccgtcgtctcgcgttcttaacaccaagcccgggctcctactaaatggcccccaagcgaggtggcagggcgccggtgccggccaataagaatactgataatgtgactaaccctttattttagaagaggccgtagcatttcggctatctgcggcgcgttgccgtccaagaaggacctgcaccggttttgtcaagtggtccaaggtcttgcgtattcagcggtagtttcttattctttagcaatgccttatggta

SEQ ID NO: 14476 - DNA, 249 bp, Zea mays
  Clone ID: LIB3150-078-P1-N1-H8
tttttctttcctcccgcatccccaaatccgcgggtgcggcgtcatttgttcaggggctggggatcgtcttataccttaactaaaatgatagagatcttgcacatccagggagggcaatgtggcaaccagatcgttgccaagtacttttaggtcgtgtgtgactaacacggtattgacactacaggttgcttcactggcactcttgaccttaagttgttgcgcgatcaatgttcactacaatgaggcctc

SEQ ID NO: 14477 - DNA, 78 bp, Zea mays
  Clone ID: LIB3150-078-P2-N2-A10
atttataactcaataaaaaacatttaacaaaatccatcaaaatccattaaccctaaaaagcctcatttcttcattttt

SEQ ID NO: 14478 - DNA, 136 bp, Zea mays
  Clone ID: LIB3150-078-P2-N2-A8
tgatacccaaccaacataacccccctgacgtctatttatacaacctggtgtgctctacaccacccccattccttacaccctctacactcctccaacataagaaccctaatcttccctccctccgactcccccacct

SEQ ID NO: 14479 - DNA, 165 bp, Zea mays
  Clone ID: LIB3150-078-P2-N2-D9
tttctttttcaataaaactaaaaaattctcctgggtgacctcatcactccgtgaggggggtcgacccctactttcctaactccaatagcttttcaattttcttataatattccatctatttattaaattctcatctgtccctatattatttcatttatatactat

SEQ ID NO: 14480 - DNA, 115 bp, Zea mays
  Clone ID: LIB3150-078-P2-N2-F3
attcgttttttttgaccggcccaggaatagcctaacgtgggctttatgcatactagcgggggctataataattattataagatcttcggggattgattttcataactttttcatg

SEQ ID NO: 14481 - DNA, 120 bp, Zea mays
  Clone ID: LIB3150-079-P1-N1-A10
ttctttttgtctcccgcaagcaccgatttagtgtactgggctctccgacgcgcggggggggaactccctactacatctgaaccatgttcggcggctcgatccttgacaaccttctcgagc

SEQ ID NO: 14482 - DNA, 369 bp, Zea mays
  Clone ID: LIB3150-079-P1-N1-A11
tgatttctacccaaaacacattctgcgatcctagaatcctccgccgagcatggatcatgtccgcctatctgccaaagaactcggttaagctcataaagaatgctgactacataaccgcccctggcatgggtatacttgctgctgatgagtcaaccggcacgataagcatgcgcctttacagaacaaacgttttgtactcaaaggagaaccgcactgctctgcttaagctgcagtattgatcatctggggcgctacatttcaccaagctcggggtcactataaaagtgattccttagcatgtgtctcgtaaagaggatgttttttcatttgagaaattacaagggtgcgacattctttttgttccagaga

SEQ ID NO: 14483 - DNA, 261 bp, Zea mays
  Clone ID: LIB3150-079-P1-N1-A2
cgtcttattatatccggtcagcctttcaggcgctcaccccgcgtgggaccccgacccgcccccgctgtctgttggtcccctttgccgcgtgtgcgttggccggtggttccgatgagggggttgctgcgtggagccgtgccggcgtctctcgctcgccttggctaacggggccgggactggtgccgcataacagttctccttggcaggaccgatttcacacctccctgctttactgattttccccgtgcgctgtcaattatc

SEQ ID NO: 14484 - DNA, 215 bp, Zea mays
  Clone ID: LIB3150-079-P1-N1-D2
tgtttactttaaggccaaaatccaggacagggggggcattcccccagaccaggagtggtttatttttgttggaaaacagtttgtggacggtcgcacgcttgctgacttcaacatccagaaggggagcaccctccaccttgttctccgcctaaggggaggcatgcaaatcttggggaaaacccttaccggcaaaactataaccctggaggtggagt

SEQ ID NO: 14485 - DNA, 431 bp, Zea mays
  Clone ID: LIB3150-079-P1-N1-E2
tgtcattcgatctcgttctcaaatccatcccatcgctcgtgttccttcccgtcccgcgaggatcgtcataccccatgtgccaagtatcatagatctgggatcacatggtgttcggctaggatccggaagggctggtggccacgggtggtccctgcagtagtgaccgatgttcgagactcgtctgccgtgaacggaccccttcatcagcatccgactacatgacctacatgttcaagtacgacactgtgcacggacagtggaagcaccatgaagtcaaggtgaaggactccaaaacccttctctttggtgagaaggaggttgctgtgtttggctgcaggaaccctgaggagatcccgtggggttcggttggtgctgaatatgttgttgagtctactggtgttttcactgaccaggagaaggctgcagctcac

SEQ ID NO: 14486 - DNA, 394 bp, Zea mays
  Clone ID: LIB3150-079-P1-N1-E7
tctttttttttcacgcttgataggagaggaagagcgcgcttatagtgagagcgggggggaagcatcttctgtgggcaagattgtgcagcggctcacctaccggaagcggcatagctactccaccaaatcgtacctgacccgcttcgtcaagacacctgttgggaaacttgtgtaccagttcaccaagaatcgcgcgagcggtccgaagtgcccagacaccgggaagaatatccaaggaattccactcctgatacctgcttgtttacaataggtccatgttggctaggaaccatatgactgtgtatcgtccatatggtggtgttttgtctggtactgtagttaggtataggatattccgtgcctttttggtcgagtaacataattatagtgaatt

SEQ ID NO: 14487 - DNA, 312 bp, Zea mays
  Clone ID: LIB3150-079-P2-N2-A10
atccttgagcaacggaatcaaattgtcaacgtacaaacagacacaggacaggcagcgcttgccactagcaacagagcggcgactgcctttgttatggcatacacgggatataactcaaccgtaaacccaaatcaattcaaacgctgcacctaattatcttcgactagcagtttatactaacataaaaccatcggttggacgcaatgcaacaaacaataacagcttgttttttttttctgctcgagcttgcttggaaaaaagaaaaatggggggaaaataaatagtaagcagtttccaccattctcctaactt

SEQ ID NO: 14488 - DNA, 249 bp, Zea mays
  Clone ID: LIB3150-079-P2-N2-A12
accaaaagcaaggttccatagcacaagaaaaatacatacgtcaacagcgacggaatgggccacgagggtgggtacgctagcagtagaaagatggcaacaacacgaaagggaacaccgaactcatcgaggtccgcttgccctagggaccacaaggcttcacacgataacagccctccccttacatgtcatcggcctgcaccttctcctcgtacttgtacttcctctcgtcggcagtcgcgtcctggtact

SEQ ID NO: 14489 - DNA, 274 bp, Zea mays
  Clone ID: LIB3150-079-P2-N2-A2
actaaaatcctgccttcgtattagatggataattggcataaatagtacgaattctctgcttccattaaagaaatctgaaatattgtcagcttctccctgccaacacccccattgcgcgcctgaaattcagccactagaagcataaaaacaccagttcatcgcatgacgcagtccttaaccaatgtctgtcctcctgtgaagcactctagatgaatattcagaaaacgtgggttctcctcgctttgggacactgttacagaaccttctataattt

SEQ ID NO: 14490 - DNA, 360 bp, Zea mays
  Clone ID: LIB3150-079-P2-N2-A3
aaatgaagtgatcctggaattcagataaactttagggagttcaataggcgttacagatttttcaaggaataacactgccaccaccccacgctttgtccaggatattacagatgcagtaatgccaggctaggaatcaaaggtcacaacattttactgcctggtgacacaaatactaccaatctgtagaagatgaagctcattatctgaactgaaattacttataacctgaaatcactgataaaggtgcaagtgcaacagtattggacacatggacactgcagctattttggtcagcactcattttacaaacaaacaattacttgcgactgtattttcaagtgaaagaaatttcgaaaatag

SEQ ID NO: 14491 - DNA, 170 bp, Zea mays
  Clone ID: LIB3150-079-P2-N2-A4
agaaaaaacaacgaaaacatccatatattttttcaattaccccttaacaattcatgggaataaacaacccttaaaccaataggtgttgaaacccctccccaattttacttacactaccctttatacgtacataaaaccattttttggacgcaatgggattaagggcaaca

SEQ ID NO: 14492 - DNA, 71 bp, Zea mays
  Clone ID: LIB3150-079-P2-N2-A6
attacatgtaatttcatcagtggcaatttctgtttgtatacttatacaaaggggaactttttaattaagac

SEQ ID NO: 14493 - DNA, 314 bp, Zea mays
  Clone ID: LIB3150-079-P2-N2-A7
cagagaaccagccaactgggcaatggttttccccgtctcgagtccgatctgagaactgagatccaccagctttagctacacataccgacatgcgcatgtaaactaccgacaacagagcaaccccaacattttccagtttccactgcatgctacagcctagagaacaaccgctatagtatactctattgtatctgcttctttcagacatcagggcgcaatacaaggatgatggaggagtagctgagcataggatagagattggagttgaggaaatgagagaactggtagacggtgacagcacgaatctggcaggc

SEQ ID NO: 14494 - DNA, 298 bp, Zea mays
  Clone ID: LIB3150-079-P2-N2-B1
ggatcatcacaaataacacactgactagcaatttcggatttaaagatcgcatgcagatgtgtgaacaaaactatggcaaactcacctgctggttcatatcaacatgaggcctgctatggcttgtgtgagcgctacaggtgtacgaagcaccaccaggcacatagctccaaaacccatgcagcgatgtaagaactcacctactgtttattctccttgaagagggcgaggagggaaacgccagagaccttgaccaccttgaaacggacaccaggcatatctttgacatggaggcccttac

SEQ ID NO: 14495 - DNA, 336 bp, Zea mays
  Clone ID: LIB3150-079-P2-N2-B10
aaagaaaacaaataactgaaatttaaccatagtccacagatgacacaatatcacaaatattgccgtgaccgcgagtcatctacgaaaaacttgcgctcatcaacagaaaagaattggacctgtctacacataaattcagggaaaaggccatgaagccaatctgttcaatttattcaacacttgccaaactattggaacactgatcaacgatcagtgattcagtgggaggcatctctgctatagtactggtccaaggtcttcgccgggttacggtggagaagttcgcgagggatgattcgatgcaatgtccatgcaagatcttgtgactggaagatg

SEQ ID NO: 14496 - DNA, 286 bp, Zea mays
  Clone ID: LIB3150-079-P2-N2-B2
ccaggagcagagccagccctttttttttttttttttttttttttttttttttttttttttttttttttattttttttttataaaataattttttttatattttataattattttatattttatatatttatatattttatataattttaaaaaaaaaaaataaaaaaataataataataaatataaataaaaaaatttaataaatataaataaataaataattaaatataaaatttttaataaaaatataaaaaaataaaaaaaaattaattttttataaaaataa

SEQ ID NO: 14497 - DNA, 190 bp, Zea mays
  Clone ID: LIB3150-079-P2-N2-B3
aacgcatataatttagatagatgcaaggaaatagtggaatctgccacattttagtagctactgattgcaaaaaggtaggagtgactctggttttcagtactaacaagacacaagcaaagtagtttcctacagaaaggaatggcaacatccagttcgttgtttagacaagaaaccagactactcgctcttc

SEQ ID NO: 14498 - DNA, 77 bp, Zea mays
  Clone ID: LIB3150-079-P2-N2-B4
ggaaactaaactaaacggatgaaagtgtttgtgtacctaggtaaccttttttataagagaaaaaatgtgagaaatat

SEQ ID NO: 14499 - DNA, 117 bp, Zea mays
  Clone ID: LIB3150-079-P2-N2-B5
gattagaaagtagcgtatactcgaaactcagtgccacaaacatgaattatccaatgtcaatgcacttacaatccaaatgtgataagatttgcccccgaacaggttcattcttaagcc

SEQ ID NO: 14500 - DNA, 326 bp, Zea mays
  Clone ID: LIB3150-079-P2-N2-B8
acacggtgtaacgcttgatattgaattaatatgtacttagaaagcattccgaacaaatatatatggaaataaaagatagtcagcagcatagcataagaacgacactcgctgttctgcaactgcctcggtttcctccatccaccccacgtctattgctgctgctcgtcaaactcatggccatgatccagaaggtagttggctgtaagctcttcgtccttgttgcatgcaaagaaaacttctagcacaagctcacggttgaaccccattccctcgagccgttggataagcctccgttcctttggggtaactgtcagcgtttggggcac

SEQ ID NO: 14501 - DNA, 310 bp, Zea mays
  Clone ID: LIB3150-079-P2-N2-B9
agccaataatgattcattcattcagtaggagaaaggagatgagatctcatacatagttgattcagagtacagacataagacatgatcagaaatttataatgcaacatcctatgaccaggccctttttttgagtcagtcacccccaatttcttgcgctagcaggctgacaaatgttggtacactagccacacatgggctagttgtttaacgctaacaccactcttgaagtttgatgaccgaaattcatttttaccctgccttctttttatttttgggttcggcctaaatccatcagtaattttttatttat

SEQ ID NO: 14502 - DNA, 92 bp, Zea mays
  Clone ID: LIB3150-079-P2-N2-C1
ggaaacacaaaaaaaattttacaaatctttgtaatttatttaaaaacaacaccttttgattaaaaaatcccaccctcttacctgctattaaa

SEQ ID NO: 14503 - DNA, 340 bp, Zea mays
  unsure at all n locations
  Clone ID: LIB3150-079-P2-N2-C10
acaaacaaaaaactcattatgtaaattatattttattacaggcataatttatgaaatcatacgacaacataacggctccctctgctgatcaaaacatatcagcgatctacctcaaaaacaagctctattcttaggtacatccttctattcttagatacatgctcgagggtgaaatacagtgaataacatagcacagagctatacatccggtatncccgctggcttcgtctccacttgatcatgtagcgagagtgaagggcatatcgacagaaacacgtctaaagaaacgcaaggcatccttaagcttcttctcatcagtgcagttgtagcccatacataa

SEQ ID NO: 14504 - DNA, 141 bp, Zea mays
  Clone ID: LIB3150-079-P2-N2-C2
ggactagagcttaatttttttactaacaaaaggtggttatgccgtctgcatatatctgatacccatgtgaacctggtaaacattcacgcaacggtgtgctcattaggatacaaaaacatttgccgggcaattcattaatat

SEQ ID NO: 14505 - DNA, 285 bp, Zea mays
  Clone ID: LIB3150-079-P2-N2-C3
aactatacgacttcctaaaatcaaattaacaatgccaaaaggttaacatataggctcttacagcattcttgtattgcagaaggtgaaaatagcaggaaggttccaataaaattgataaaagggcacaggctaacagagctcaacagtttacacattaacagctacgaccacaaacaaaacttgtaattgatgaaacctaggttttgctaaagcaggcccctattcgcttcatttttttttggcagaatcctttgttacccttggccccctgttgtgctccttttt

SEQ ID NO: 14506 - DNA, 232 bp, Zea mays
  Clone ID: LIB3150-079-P2-N2-C4
atagtggaccctaatattttttcattattgaaaggttgtttatagattctaattgtacactttacaggttcaaaatttcctgcattgtttaagctgtagggtctattctaccagaataagataatttttagtttatcctatttattcaagggtgtctctatatataattagttttctgtaactgaaacgaatatttaacttaatcaggactattatattttattcattatta

SEQ ID NO: 14507 - DNA, 103 bp, Zea mays
  Clone ID: LIB3150-079-P2-N2-C5
aattgtaaataaataaaagggatcttgacctctgaattcaacattaggcgtttaacacggtaaaacaagctcaaaggttggcctggagcctattctaaattcc

SEQ ID NO: 14508 - DNA, 59 bp, Zea mays
  Clone ID: LIB3150-079-P2-N2-C9
agacccagttaaacaaattttataacccaaaaagggcttttgtaacgaaacaaattttt

SEQ ID NO: 14509 - DNA, 272 bp, Zea mays
  Clone ID: LIB3150-079-P2-N2-D10
aaacacaaatcaagaataaactcggctcttcatgatttgcattaaaaccagacgacagcaccataaacaaaaaaaattcagatgtccaaattgttcatacatatccttttcggttcttctagtaaaaggttttaatctcctaggcaagccccagttgcaaaagcattattttaagcccaggtccaaatcaagagtattactgaaacatgttacacatttagtgggacttgtcatacttctggtctttgttaaggcccttaaatctttcaccg

SEQ ID NO: 14510 - DNA, 348 bp, Zea mays
  Clone ID: LIB3150-079-P2-N2-D12
cagacacgatgcatttcatgtttcgggattcttgtttttacagactttgtatgctacatttggattccaactgaagttcaagtttgtcttccaaatatccattaattatttcacaatttctataaccagttcaaatgccaaagctgagttcaggcaactatggactcactcaaattattcatgttgtccacttctagcaatgctgcaccaagaaggtgattcagtaaaacgaatggacgtctgatcaccaatcaggttgatgctttaaatttgctagactctgtaataccacggagaaatgatgcacacctgtttgccagtacgaaaattttgcaactactttttttg

SEQ ID NO: 14511 - DNA, 241 bp, Zea mays
  Clone ID: LIB3150-079-P2-N2-D5
aataaaatattatttaattttaattattttatttttttttttattattctaattttatttttaattttttatatatatttttttattattttttttttatatataaattttaattttttatatattattaataaatttttttatttatttttttttaatattaattttttttttatttttttatttatttttatttttttttttttattttttatataatattattttttttattttatta

SEQ ID NO: 14512 - DNA, 209 bp, Zea mays
  Clone ID: LIB3150-079-P2-N2-E4
attcacaaaaacatcacaagtataatatcactcacatctatatcatttacagatagcttgcttgattattcacaaaagctccagagatgatcagccacaataagttctagtttacaatgaacaatttaaaattaaacatcattctaatagtattgtctcagcaattcattgtactccccagtttgctggcttgtgctcaaatttccatc

SEQ ID NO: 14513 - DNA, 180 bp, Zea mays
  Clone ID: LIB3150-079-P2-N2-E5
cttccatagtaagattaaaatggttgggcgaccggaaagtatcgaagagacattatagttcacgacatcaaaaacttgacgaacattacaatgttttccccctaaagactgccttgaccaagctgaattcaacatctagcctgcgttgccgaacccggagtattttataatcccttttag

SEQ ID NO: 14514 - DNA, 320 bp, Zea mays
  Clone ID: LIB3150-079-P2-N2-F1
cccccagccaaaaaactttttccatgcaaaatcttttaggtgggggtacctgaaaacggccttccactttgggcaaatttaaagctggtttggccaaacacagaaaacagcacccccccccaggggggccttgtttaatgcccccaaaacgccgaaagaccccccagaaatccctacagcttctttccctttctaccgccttttttgtaagtgttttccggggggcccggggaaacaccctaaagggcgccgttttttatcccaaaacaggcaagccccctgggggtaaattgggccccatgtccgggggttttgttttt

SEQ ID NO: 14515 - DNA, 340 bp, Zea mays
  Clone ID: LIB3150-079-P2-N2-F10
aagtacacaatagttctgaattgcggattcctctttggggcacattgcaaaattgttcttgttccattaacggggcgaaaagagtacactgaggctgaagtaggtgccagcacaatactacagtggatagacgaagatcttgccatcaacgtggtgtctttcgcatagtttcttcaatgtacccacagagtgctgcattgcgttcagcttggtatccatgaacatggccttgtagtcatcaccgtacttctctattaatctgccaatgcaaacacgttgaactttagttagtggttgcaacggtgcagatttgccatccttccttttcttcccaagagca

SEQ ID NO: 14516 - DNA, 381 bp, Zea mays
  Clone ID: LIB3150-079-P2-N2-F11
cagttctcatagcattatcatgaatctcagaacataacaggtgaaacacgaatcaagcagaggcgccatggggttcacagatccacacctaaaccgctaaattaaactgcgagcgatacatgataaactaagaccaccactcagatcaccaccatcttattcagatccaaaggaacggacgcagggggagtcgacgatgacggagggagggcggccgaacagaccagatcagagagatctaggagagctgtccgcagtcagcgaccttgaccaccttggaggtggagccgttgcgggtgcccaccttctcgatggccttgacgacgtccatgccctcgacgacctggccgaagacgacgtgcttgccgtcgagccaagggg

SEQ ID NO: 14517 - DNA, 290 bp, Zea mays
  Clone ID: LIB3150-079-P2-N2-F12
atcatgaatctcataacataacatgtgaaacacgaatcaagcataggcgccatggggttcacagatccacacctaaaccgttaaattaaactgcgagcgattcatgaaaaactaagaccaaccactcagatctccaccatgggataaaaatccaaaggaacggacgctgggggagtcgacgataacagatggaggtcggcccgacagaccagatcagagagatctaggagagctctccgcagccagtgtccttgtccaccttagtggtggagccgtggcgggtgcccacc

SEQ ID NO: 14518 - DNA, 370 bp, Zea mays
  Clone ID: LIB3150-079-P2-N2-F2
gccacgagtaatcttaattttaaacttgtttcaagacaaaatcttagggccagatgaaaacacgtagccaagacaactcaataagttcacgtcataagcaacctcatgtccagactcgcctagatacagaagtagcaaacaaactactcggcagcagcaacctcctgcccagcctcatctccctcgacaggcctctcaagcttcacaccaacatcctctttgtagtcgccatgaacctccatgagtttcccaagatcgaacttgggggccttgagtatcttcaccttgcggatgaagacgttttgaagtgggaagatgctggaggtagacttctcaatctctttaccaataacttctggaatgaacttcg

SEQ ID NO: 14519 - DNA, 370 bp, Zea mays
  Clone ID: LIB3150-079-P2-N2-F3
gcagcattctcttgggtgggagattaattacctgccaatcctttgtgtgcacactcggagaaagtgccgtccttgggctgggactcccaacccttggcgttggggaacacggtctcgcctccctcgcggacggtggacaggtacatgagcacggtggcgtagcggtggccgccccgggcctggttgaccctgtcgtggaagtagtcgaagtgcggctcgtacttctgccccggctcgtagcgcagcacctgcatgttttcggcgttctcttgaggaagaaacgtccatgccgcgaccctctcctcgatccgactcaccaccgggtcctggcgcttgtcgaggaacatgccggagctggtgcgcacctcgc

SEQ ID NO: 14520 - DNA, 314 bp, Zea mays
  Clone ID: LIB3150-079-P2-N2-F4
ggaacaatacttttttcttttcatttcaattgttcattcaggtcattgctcacactgacactgccacccatggtgatgcgtgacacattattactcaatcatcgccgcttaatgactcaacttgcttgcttgccagcggctattctacagcacatagtttcttcagtgggggacaccgccggctgcagcgttagggcatggagtttgctgttgcatgccgcacattgccgtcagtttcttcgctatttgcgccggctacagcccctcgacctgtcctttttgcggcttttgctttatgatttgactggtagacc

SEQ ID NO: 14521 - DNA, 172 bp, Zea mays
  Clone ID: LIB3150-079-P2-N2-F6
gccccaagggactcaatgaaaacactgaaatgaaggcataacaattcccctcccaaacaaaccacacttgcaatgttcaaaaccccaactggtccaaggtaaaaaaaaaataaaataaaataaaaaaaagggttagatgccaccacccatgccaacatttttttggacccct

SEQ ID NO: 14522 - DNA, 87 bp, Zea mays
  Clone ID: LIB3150-079-P2-N2-F7
atgacagtggtatttttaattataacttaataaataataactaatttaataatatatatgataaaattatttaaaataatttattaa

SEQ ID NO: 14523 - DNA, 263 bp, Zea mays
  Clone ID: LIB3150-079-P2-N2-F8
ggaacataataaaaggataacatcagttgctccaatggaacacacatgactgttcaaagcttggaaagggcaaaaaatttttagggaatggaaatttttctagacagaccatgtggagggataaaaacttgggatgtgtaatgggcgggttttttgaccaaatacatggaaataccatgccttgtttcggtatcttagtaaataaaccttttcaggttgttttatacaaaaaaaaagtcgctctttttatttcccacgttttt

SEQ ID NO: 14524 - DNA, 324 bp, Zea mays
  Clone ID: LIB3150-079-P2-N2-G12
aattaaataaaaattaagaaaaatattaaattatattataaataaatttatattattatatattaattattaatatataatataaaatataattatatttaaaaaaaaaaataatttatattataataaaaaataaaataataataattttattatttatataaaattattaataaatatatattaaattataataaatatttattattaataaaaataatattaaattaaaaaaaataattaaatattaaataatatttaaataataaattattaaattattttttataatatataaaattttatatttataactttaataaa

SEQ ID NO: 14525 - DNA, 121 bp, Zea mays
  Clone ID: LIB3150-079-P2-N2-G4
attggagaatttttttacaaagggagggtgttaagctttactgattaaacagagcttcgtgaaaacggtttgacttgcatcatggtatcacctccctaaaaatcaattaaatatttatgtt

SEQ ID NO: 14526 - DNA, 377 bp, Zea mays
  Clone ID: LIB3150-079-P2-N2-G8
acggctaaacatttaaatgatgaagacttgaggtatcacaagatgcacaaaaaatcccaaaccagcacaaactttaaccagttcatagcaaggtataccagatcaacatcgacactagtaaaagggcaaactcttccatagacaaattcaagggctaaacagttctgtctccaggcaagcacactcacttgaagcatttcgcgtcaagcaaggcctcgccctcaaagggctcctggtcctcaatcatcgcattgacacgctccttctgggcctcatcagagatgtccaccttggtccactcgtagagctccatgtcatagacctcattcattacaaacttgggaacatcctggccacggaagagccaaaggcccttt

SEQ ID NO: 14527 - DNA, 293 bp, Zea mays
  Clone ID: LIB3150-079-P2-N2-H1
aaaaaaaaaaaaaaaaaaatcttattttttaaccccttttgtatatttaacacccaaagaagtttaaattttttttccaaaaaaagattatatttttttttatttgataaaaaaaataaaatgttttcttattaaaaaataaacttacccttaacaacaacctttttttttttttttttaatccaatttgtaataaactttattaaattttaatgataaaatttattttttttttaattatatttttttattttcattactattatttagaattttttttttttattaattat

SEQ ID NO: 14528 - DNA, 140 bp, Zea mays
  Clone ID: LIB3150-079-P2-N2-H10
aacaaaaaaaatgggccatgggcacagggtattagtttattgtctaaaaaacaaggttggtattaaaactcctaacgcttaaaagaggaatctatggtttaaaaaacatttgtggcctcctttattagggatatgaaaaa

SEQ ID NO: 14529 - DNA, 306 bp, Zea mays
  Clone ID: LIB3150-079-P2-N2-H12
aacacaacagtccaaacctacacaatgaacccatgaaaattattcttttgttaactactactagcaccacccaacaaaatactttcgccagcaaagaaaccaggaaccatggattacatgcagaatcatcatcatttcttcttggcagccgccttggtcaccttggctcccgttgggttcttttttttcacgctctttattacgccgaaccgaaccgtttgtcttatgtcgggaaccgcgaagcgccccaatggaggattctcggagaaaggcttcaccaccatgggcttttggggggatcatttt

SEQ ID NO: 14530 - DNA, 363 bp, Zea mays
  Clone ID: LIB3150-079-P2-N2-H2
agagctcaatcgcttttagaaaacagtgtactaatcaggtctgaaaacatggcataacgctctgaacttgagacgattaaccaaaaaaagtgtactcatcaggacacacatttcggtgcaagacaatccatgagaatgctctaagctacagcgctcttgcccttcttcctctgtagcttcttcatgtagaactcaagctctttaccctcaaggatgtacccatcagctcggccacactgtccagggcgggaagaaatgcatgccagcaaccgtccactgccaaattgctcctcaatgtgtgggtcaagggtacgtccctccttgcgcttctcaaggcttctcgtgacatggttgctctttttc

SEQ ID NO: 14531 - DNA, 258 bp, Zea mays
  Clone ID: LIB3150-079-P2-N2-H3
aggacccgggggttaactttaaaagatcaaaacttacgaacgcgggcatgcaaaaaaaaaattttttaatagggccaccaaaaacaaaataaagggccggggtttaaaaacggcgtaacgggaaaaaccctggggttaccaaaataaaacgccttgaaaaaaaaccccttttcgccaggtggattaaaaaaaaaaaggccccaaccaatcgcccttacaaaaagatggccaaccttaatggtaaatgggaccccccct

SEQ ID NO: 14532 - DNA, 314 bp, Zea mays
  Clone ID: LIB3150-079-P2-N2-H4
aaaaaaaaaaggccattccaagctggttgtttagaaaactacaggcgttacataaaaagaaaaatgtcccaacgttttttttcaaacagcaatgcaacaaactttgcccccaaatgggctttttaccgttgctttccaaaaactttaaagtccccctatttttggaaaccatcatttttgcaaatccccaaacagaatttaaaaggtccccatttttgcctgggtagaattttttttgttgcaacaaaaaaggaaactttccccgtttaaaaggtggtttaaatttcttttttcccagtttggggaaagaaaaa

SEQ ID NO: 14533 - DNA, 249 bp, Zea mays
  Clone ID: LIB3150-079-P2-N2-H5
acaacagaaactactgcgaatgagcttgtattattcaaaattcaggtacaatcactgtgtctaccagaaattcaatcacccacagtcacaacattcgttgcatgctttcgagcgctttattgcataagcgatggattacacggctattgctgctatttttccactgattgtctttctcagagtcatgtcccctaaccagtccccgacttttaagaggcgcctagcctagccttcgaagccgtaaagggt

SEQ ID NO: 14534 - DNA, 374 bp, Zea mays
  Clone ID: LIB3150-079-P2-N2-H7
cgaaaagaaaactcctacagaaaaggagaacatctcaacttatgcatgtccaatcccaagacaaccatgggcacgcatgatctctcaccccatatcgttcagactttagcctaaaactaaagatggcacaactcacaactagggcagagctaaaaaacctccaacacgaagaacacccaggaaaaaaaaacaaaggttgcatttgcaaacagtaaaatctattgttacatccagcttcgatttccttactcctggattttctccctagatggtgggctgggggggggttacccaatgtacgtacctttagccggcgccccttgttgtcagttcccctgttcgatgtggcttatttcctgtttcttttgctgctt

SEQ ID NO: 14535 - DNA, 260 bp, Zea mays
  Clone ID: LIB3150-079-P2-N2-H9
ctcagaggtcaaagaagttgcatgtttattgggtttcaccaagagaaacaaatctgaaagagttggattggccatagacactttacccaacctgcccaacaacaatgcggtagtagccactcactctagtctcaaggtgtgtgcgctagtacttgccagcggggtgcatgagcacgaacaggttgatctcgttgacgtccgtctccggcgtttgcttgcttatcattttgaaaagcatgtacccgcgcgccagcctgaac

SEQ ID NO: 14536 - DNA, 301 bp, Zea mays
  Clone ID: LIB3150-080-P2-N2-A1
aatgaatccaacttcgaaagagaaatccgggctcagggaccacgacagcagattctccgacccttacacaacatttttcctgtttctagttacaatgcagttctattacatggcagacgcaaacttcaaatctaacaaatcatcaaccacacaaacccatgtgagttgggtgtttaaagcacgccgttctcgttcattgagccatctttggtagtagcatctttgtgcatgttgagcttgatcaaggcagcattaaccagagacttgcagctctgttcagttgttttgacccctttatttg

SEQ ID NO: 14537 - DNA, 336 bp, Zea mays
  Clone ID: LIB3150-080-P2-N2-A10
aaactgaaacctcattgtttattctttaacaaagcacaaaagaactaaaacttgcgaattcgttacaggacggcagcagataagttaaacacaaaaagacagcgtgtccaaaaccagcatggatccagcgtccaggggcaccgttcacatttattctcagcatagacaagcagcaaagatggtctgcgaccaaaggccattggggacgacccacgatagggaggcagaaatctatctctctactagcctactgggtcttgaacatgtggcggatcaggtcgacgacgcggttgctgtatccccacttgttgtcgtaccacgagacgagcttgatga

SEQ ID NO: 14538 - DNA, 318 bp, Zea mays
  Clone ID: LIB3150-080-P2-N2-A12
acacaaacattaagtccacctttaaattaaaatcgtcactctagcaaattttacaagcaaaagttttaaggtagccagctttgcctgggtagcattttccagttgcagcaaaaaaaggttacattcccccgcttgcatagccaggggcgcattatcttcctacttcgtagcttagcgaccggaaaaccatataaccatacagtccacaggcgcactcgcataattgaagagcaaccaaagtgccctgaatcccattttgggagtctgcttactggtgagcgccctgcactctttgggcttcaccaggcattttattgt

SEQ ID NO: 14539 - DNA, 375 bp, Zea mays
  Clone ID: LIB3150-080-P2-N2-A4
aagacaccatacgtgctcttcggagtatcatttcagtaaaaatatacgtcctggcgcacaaaaacagaagtacagacgcagcaaagaagattacaattattctctagcgggctcacatgaccctcacagcggaatcggaatgcacatgaaaattacaaaatatagagctcagtaggagtgattaggcttggcagttcctgtgacatgtccttgggaaaactggtgatgataaacattgcttaaagatcctcagggccattgacatccttgttctcaagtacgtctccatctggaatctccaacttcactccaggcttggcgataattgtcaccttgcccttgagtgtaattccagagccaaaccagacattacca

SEQ ID NO: 14540 - DNA, 348 bp, Zea mays
  unsure at all n locations
  Clone ID: LIB3150-080-P2-N2-A9
agaagcaaaacccaatatatatagtgtggtacgcaatcacgaacacaacagtccaaacctacacaatgaacccatgaaaattattcttttgttaactactactagcaccacccaacaaaatactccgaccagcaaagaaaccaggaaccatggattacatgcagaatcatnntcatttcttcttgtgagccgccttggtcaccttggctcccgttgggtccttcttctccacgctctttattacgccgaccgcaaccgtctgcctcatgtcgcgaaccgcgaagcgccccagtggaggatactcggagaaagtcttcaccaccatgggcttcgtggggatcattttga

SEQ ID NO: 14541 - DNA, 383 bp, Zea mays
  Clone ID: LIB3150-080-P2-N2-B11
aaaatatgagaattccgatacaattgattgcaagaagtaacataacattacagctgggaaaactaaacgcgaggcatttttaacttaactcggttatcgatattccggcaattctagctaaccatatagtacagcaccgccaccctgaaacataaacaacttaatggcctagaatgtgagtgagaaaattgatagaaaaaaggccattaaaatcctggtatcaacattacaccaaaacattgaacgcgtgctcggcattatctgcaatcaaattcgcctgcgcttatcgacccctggtttcctggatgctgctgaggtactggaattatcaccaccagattgtatcttatcaagcttccctctgactagctttacagtagcat

SEQ ID NO: 14542 - DNA, 374 bp, Zea mays
  unsure at all n locations
  Clone ID: LIB3150-080-P2-N2-B12
atatcaagataaatctcaatcaatatattgattatttctaggaaacacatgccggtatgagggcaccattgttgagtacatctcatatgtaatctaaaagatggcacctccaacgatgggttgctgcaaggcagggttcatcaaagagaactggttgtatggcagcaattgttgctgctgcaggaagttagcgaccaatgggttagccactgctagtggattaagtaactgttgtcgctgttgtaggtacacagcagagttcgacacagccagctggttgaatggaagcaactgttgcaagtaggcagtagggtttgccacagctagctgagtcagagctggtacaatctgnttgcagaactgttgttgtaagt

SEQ ID NO: 14543 - DNA, 321 bp, Zea mays
  Clone ID: LIB3150-080-P2-N2-B4
ggagcataaacaaaataaaataggtttgagagatcaccgaaggaaagcgactcctggaaaagccaacgcgacaccaatccattcttccctcttccacaggctgaggaccgaacaccgaagccaggcagccagccgaggaagccaggcgacaggcgacgccaagtcgagaacaccctaggtggtcgctcgcaggctgcgagtgagagccgtggcggagtcgccgtccttgcccacggaggaggacacagccgccggcgcagtgggatggcgacgccgacgcccatgcccggaagcgaggggacgctcgtggcggtgatgccg

SEQ ID NO: 14544 - DNA, 347 bp, Zea mays
  Clone ID: LIB3150-080-P2-N2-B6
aaaatatgagaattccggggcaattgattggaagagttacataacattacagctgggaaaactaaacgcgaggcatttttaacaaaaaaaaggtttcgtttttctgcgattctaggttaccatattggacaaaaccggggcgcggaacattaaccaaaaaaggggctttaatgtgatttccaaaaccccttaaaaaccggttattaaaaccccttgttccaattttcaccggtttattttaccggggaaaaagggctttggaggttttgtttttttttccccgcccccttgggggcttgggttaaaagtaaaaccctaagttttttccccctaaaggttgggcggaa

SEQ ID NO: 14545 - DNA, 309 bp, Zea mays
  Clone ID: LIB3150-080-P2-N2-B8
ggaaacaaaaccatcccagccgggttccattttaccattttattgaccaaacaaaaaggggttggcaagggaaagggttacattggcctttaaacaagcttttggggccattaaaatgcttcatgggaattaaaacaggccctgcccttaataacaaaaggggacagaaaaaaaaaaccctacccctttttcattttgtcaactgcctgcactttattggcattttcaacgaccggggaagcctcagcacctttcataactgtgtccgaacttgaattgcgggtttctgcaattgctgacggtacgggg

SEQ ID NO: 14546 - DNA, 355 bp, Zea mays
  unsure at all n locations
  Clone ID: LIB3150-080-P2-N2-B9
ctactgtcacttgtgataattaactaaaaaacacccaccgaccgcggtgtaattgtgtacataacctcaatgggatacacagacatgccgccgcagagcaaaacacgtcgcagatcccctctctctctaactccgtccctctctctctctccctctggtcccgcaaaaactaggcgttggaggcacgttagcgccaggttttcctcccatgcttacgcagccacagccgtccacaccttggatgctcacagctcgtccttgacgggctcggcggcggctgccttctcggatgccggtggcgcctgggtggtggtggtggtggcnngccctgcggtctccttgctcttcttgatga

SEQ ID NO: 14547 - DNA, 383 bp, Zea mays
  Clone ID: LIB3150-080-P2-N2-C1
gaagatacagttaccaaacccgaaggaccaaccatgataaatgataatatagactgatatcaagccaataccaataacaagatagcacaggcatgctatgctaggtaggaagcaagcactctgacacgccagcaccccacttccagttccacgacaacagttactgtttctcagttcagcaccgattaagacacatcttatgacattgtccttaataggcaatagccatgggcattaggtaccatgattccacgaatttcttttatttcagctgcagacctcaagtctagaaggtggagccgttccaaccgaagtccgagcgcttcgagtcatagaacttgaggtagaagcgcgacttgtgaacagacagctttgactccagg

SEQ ID NO: 14548 - DNA, 386 bp, Zea mays
  Clone ID: LIB3150-080-P2-N2-C10
acaataaggaaccacactttcatccggtacatatagcttgtctcggcaaaacttaattttaaacagaagtgacacggaacgaactgtcttagcactgcccttatcataagatacaaacctagctaggaccagatcaaactgccatttcgaggacgctgttgggaccttagaccttagctgccaagacaggagggcgcagctcgtcctcctccttcggggtatggatggtcaccaggtccggaagaggggtgatcgggccaaccttgcccttcgggtcccagtcaagcatgatcttcaccttgatacccagaacaccctgtctgaggaggacgtgtctcacagctgagtcgatgtactcattcactggctgaccagatgagatcatg

SEQ ID NO: 14549 - DNA, 412 bp, Zea mays
  Clone ID: LIB3150-080-P2-N2-C11
gtggctgcggcgccagcggcggtgcccaaggggaagaaacgggaggcggaggaagagatcgagaaggccgtgagcgcgaagaagcagaaggcggcgccaccggcgaaggccgtgccgacgtccaagaaggacgccaagaagtccaagaagcagcctccccccaagaaggctgagagcagcagcagtgactctgaagaggactccgagtccgaagaggaggttaagaaggtacagccaaagaaggcgcctgctcccaagattgctaaacaagagtccagtgatgatgacaccagcgatgagacctctgaatctgatgaggaacctgcaaagaagcctgctgctaaacccttggctgcagttgcgaaaaatggttcgaagacagtcaagcaagagagcagcaacgatgaggaca

SEQ ID NO: 14550 - DNA, 373 bp, Zea mays
  Clone ID: LIB3150-080-P2-N2-C2
caattgttcattcaggtcattgctcacactgacactgccacccatggtgatgcgtgacacattattactcaatcatcgccgctaaatgactcaactagctagctagccagcggctatactacagcacatagtttcttcagtgggggacaccgccggcagcagcgtaggggcatggagtcggctgctgcaggccgcacatcgccgtcagttgctgcgctatctgcgccgccaacagccccgcgacctggccgctttgcggctgctgctgcaggatggactggaggaccaagccgaagatcgcctggtaccggtgctgcggctccacctgcctgagctgctggcaacactgctgccgcaacgactggcactgagg

SEQ ID NO: 14551 - DNA, 403 bp, Zea mays
  Clone ID: LIB3150-080-P2-N2-C3
gaaggtgttggggtcgtcaaggctgaagcccgaggtgagcagcgccgtctcgaacagaagcatgacaaggtccttgacagacttgtcgttcttgtcggcctccgcgcgcttgcgcagctcctccatgatggcgttgtccgggttgatctccatggtcttcttggaggacatgtacccagacatgctcgagtccctgagcgcctgtgccttcatgatcctctccatgttggccgtccagccgtactcgcccgtcaccaggcagcagggggagtccaccacgcggtcagagaccacaaccttctccaccttgtcgcccagcaccttcttgatcaccttgcacaggccctcgaacttctccttaagctccttctttccgttcttctcatcctcactctcatcgagc

SEQ ID NO: 14552 - DNA, 218 bp, Zea mays
  Clone ID: LIB3150-080-P2-N2-C7
ataattgaggataaatgaaaatatatattgatttttttttttttcctattaaaaaaaaaaaaagcaccctaatttaggatggaaataagttctgaaaggggacaaaaatctaaagcaaaaaccatgctaattactttaaaaggaaaaaaaccgagattaaacatacatataatgacaaccatttttttaaaaacttttagggtttgtgaggtaataaa

SEQ ID NO: 14553 - DNA, 373 bp, Zea mays
  Clone ID: LIB3150-080-P2-N2-C9
ggaacaatacttttttcttttcatttcaattgttcattcaggtcattgctcacactgacactgccacccatggtgatgcgtgacacattattactcaatcatcgccgctaaatgactcaactagctagctagccagcggctatactacagcacatagtttcttcagtgggggacaccgccggcagcagcgtaggggcatggagtcggctgctgcaggccgcacatcgccgtcagttgctgcgctatctgcgccgccaacagccccgcgacctggccgctttgcggctgctgctgcatgatggactggaggaccaagccggagatcgcctggtaccggtgctgctgcttcacctgcctgagctgctggaacact

SEQ ID NO: 14554 - DNA, 263 bp, Zea mays
  Clone ID: LIB3150-080-P2-N2-D1
tatcgagaggaaaatcaacaagggcaacgttcatttacaagaagaagatgaaaaaaaaaaggcccacagagcatgagagcaaccgttttacatacacccgaggaaaaagggggtacaactccccctaatccattgtataactcgctcacgaataaagacagacacccttcatttgatctcccctggtccttttataaacaactaggcccttgttctgttgttgaatcgccagcgtgatataaatcaatattttgtggttccca

SEQ ID NO: 14555 - DNA, 233 bp, Zea mays
  Clone ID: LIB3150-080-P2-N2-D10
accagcaacaagacagcagcagacgattatatatggtaaatgtgaaacccagcaagcccttttgtgctgtcttttgttttgtttcgtttcgttatattagtaggatatgcagagaatgcaacggagcatcgtccccttggggagatcggaatcggaacaacaagcattctgtgggcggctgggcgcttcgacgacgcttttgatgtggcttttgcttgctggtctattcgacg

SEQ ID NO: 14556 - DNA, 119 bp, Zea mays
  Clone ID: LIB3150-080-P2-N2-D12
ggaaaaaaaaacgtcttgactgaaaaaaaaactggcgttaccaactgtgtttaaacaaaaaaaatttttaatttttataaaccgtttttaatttatttgaataaaaatcccagttaaaa

SEQ ID NO: 14557 - DNA, 391 bp, Zea mays
  Clone ID: LIB3150-080-P2-N2-D2
acccagtggcaccgggtcaagtggaccagcggcatggtcaagctgctcgtgtcggccgtgtcctacatcgacgaggacgtcgacgcggactacgggaccagcagcgggaggaggaagcacgccatgctcaagaggatgggcaagtggaagctggtctcctcggccatgactgagagggggctcgctgtgtcgccgcagcagtgcgaggacaagttcaacgacctcaacaagaggtacaagaggctgaccgagatcctcggccggggaagggcttgccagatcgtcgagaagccagagcttcttgaacaggtgagcctatctgcgaagcttagggaggaggccaagaagcatctcaacttcaagcatctgcactatgaggagatgtgctcct

SEQ ID NO: 14558 - DNA, 311 bp, Zea mays
  Clone ID: LIB3150-080-P2-N2-D3
ggcagaaattatcaatacattggactagagctcaatcgcttttagaaaacagtgtactaatcaggactgaaaacatggcataacgctctgaacttgagacgactaaccaaaaaaagtgttctcatcaggacacacatttcggtgcaagacaatccatgagaatgctctaagctacagcgctcttgcccttcttcctctgtagctttttcatgtagaactcaagctctttacccttaaggatgtacccatcagcttggccacactgtccagggcgggaagaattgcatgccagtaaccgtccactgccaaat

SEQ ID NO: 14559 - DNA, 367 bp, Zea mays
  Clone ID: LIB3150-080-P2-N2-D5
aacagccagtttgagttgcccattgcaatatacttttgcaaaaaataacacaaacgttgccttggcaggcaattctgaatgactacagatgcatcacagcgaatcaaaatccctccgcttttgggggccagtgcaacacaagttcaacttgtttccgctatggtcctaactgctatatgccgaaaactgcggttacccaagctttccgagctccatttttttcttgatggcgcggtgaccatggtacacgaaagaatctatgatgccagcaaccgtgaatataccttcaacattagcacatatgtttcgtcaggaagtgaaggagcgacgtatttttcttattaaaattaaccttgattggtgaaaa

SEQ ID NO: 14560 - DNA, 304 bp, Zea mays
  Clone ID: LIB3150-080-P2-N2-D9
gaaggaatagcctaagggatggcattaacatgtttgcactgaagcagaaagcgaggaaaaggcggacgagttaatacaacacaaaaccataaagcatgaactttagtttacacttcctcttattttggccaattgtattcacaaggtatgacgctactgatgaaactgcacaaagtccaccgaattgacaggcgcccttgggtacatagcagtgagactggaaaggtaacaaatggaatacggatactttaataaccacggagacccagcaatgctaaggtattgtttggtcactgcataaccc

SEQ ID NO: 14561 - DNA, 378 bp, Zea mays
  Clone ID: LIB3150-080-P2-N2-E1
agggcagcagacgaagtgctttcatggtaataagttaataaccgaccattgaccacataagtcttacgcgagacattcgcaagcaaagtgactcccaaaatacttacaaccattaggacaacataaagtagacatagtagtagacaccaccaaacttaggcatcaatagatccagcacctccttactcgaaggcccactggttctccctgcggatctcctcttcctcctcaggggtgaagtcattcttgatattgaaggtcttgcgaatctcttctggtgtcttgcccttgatcatgtcagcaacagtctgacaggtcaggtcgagcagacccttgatgttcagatagtttgcagccaagatgaggtcgaaaagcgtg

SEQ ID NO: 14562 - DNA, 357 bp, Zea mays
  Clone ID: LIB3150-080-P2-N2-E10
ggaccaaaattgtaacggcgaaacacttaaatgatgacaaggtaaacaaaaattttcaaaccagcacaaactttaaccagttcatagcaggatataccagatcaacatagacatccaattagagggctaaacagctttggatacagcacactcacttgaagcatttcgcgttaagcaaggccttgcccttgaagggttcctggttctcgatcatggcattgacacgctctttttgggcctcattaaagatggccaccttggtccacttcgtagagctccatgttatagaccctattcattacaaaattgggaaccttcttgccacggaagaaccaaaggcccttaactttgaggggg

SEQ ID NO: 14563 - DNA, 89 bp, Zea mays
  Clone ID: LIB3150-080-P2-N2-E11
aaaaaagaaaggttgccattatgatttaaaacatgcttattttttaacccaaataatatgttcattttttaattccactcccattttta

SEQ ID NO: 14564 - DNA, 180 bp, Zea mays
  Clone ID: LIB3150-080-P2-N2-E12
ggaatcaaagtatttttggttacaccgaaaactgctgttcaaattcatgaaatttttgggttctttttccaggaaagggcttctttagattgaacacttgtagaaaacaccaagttgggcttcaagcaaggctttcaaccatagtcttttaccaatattttaaaaacttacacgccttat

SEQ ID NO: 14565 - DNA, 361 bp, Zea mays
  Clone ID: LIB3150-080-P2-N2-E2
aatataatattataacttttatttttattatattaatatataattttaaaataaatttaaatatataagaaataaagaaaataaaataaattattaaaaacttattaaaataatataattatgaaaaaacattacaatattaataaaaataaaatgtaattataaaaataaattaataaaaatataattataatatttataaaataaataattaaattaaaatttaaaaatttataataatatttaaaataataaaaataattttaaaaattctaatatataataataaaataaatacataaaaataaaaaaaaaataaaaaaatatttaatttaaaaaaattataataataattataaat

SEQ ID NO: 14566 - DNA, 214 bp, Zea mays
  Clone ID: LIB3150-080-P2-N2-E5
ggctatataaattcaaaacattaaggcagaatcgtgcgtcgccaagaattcattaacccattagatagctgtgttcgcaaacaaatacaaggtatcaaacagttggacaccaaaatatttgactggtctctatttccagcacccaaaaaaaacttggaacaaagcacttgatggaagttgcatttcgcttttgctgaacagaacaataacaggc

SEQ ID NO: 14567 - DNA, 221 bp, Zea mays
  Clone ID: LIB3150-080-P2-N2-F1
atatattaaatttttttaaaatttataatttttaaaaattttataatatttttattaatatatattattattataagaacatttttaaaaaaaaaaaaaattacaaataaaaaaaaataacttttaataaaaagtaaaatatcaataaaaaaaaaaaaaataaaaatttttctattaaaacaaaaaaaaaatataaaacatctaaaatagataaatttaat

SEQ ID NO: 14568 - DNA, 186 bp, Zea mays
  Clone ID: LIB3150-080-P2-N2-F10
gggggggcccaccgaattttggaacaaaaaaggggtccttaaaccccatttttgttccctccagtgggaaaaatttttagcaagctcaagctaaaaggtgggggggggtaaaaaaatttttttttttgcgcaaaaatttttttcttaatttgaacatttgtgcaaaaaaaaagtttttgtcttttt

SEQ ID NO: 14569 - DNA, 115 bp, Zea mays
  Clone ID: LIB3150-080-P2-N2-F11
agcagccaaaagcattgacttttaaaaaaaaaaaaccttccaaaattcaccagagcataacagggggggatttgcaaaacctcgggtacgggttccaaatttaatgggttgaaaa

SEQ ID NO: 14570 - DNA, 384 bp, Zea mays
  Clone ID: LIB3150-080-P2-N2-F2
gtagacaaccatccataacgacgttcttaataacccagtggcaaagcggggcggacataaccagaaagtcttacaacatcaggtgttgcaaaccacaacggggacaagagcagcacacaagcctgacgatgaccgcatcaggatacttctagtactcatcaccatcatcacctttctcaccctcattaaactcagcaccaacctcctcgtagtccttctcgagcgctgccagatcctcacgggcctcagagaactcgccctcctccatactcttaccgtcattaccagtgcacgaaggcacgcttggcgtacatgaggtcgaactggtggtcgatgcgggagaacaccttcacaacactggttgaggtggagatcatgcccaca

SEQ ID NO: 14571 - DNA, 324 bp, Zea mays
  Clone ID: LIB3150-080-P2-N2-F3
aactcaactgaactcttttagctgtttggttcagaaacatctcaaggcccaaattacataaaacaatttaactgtgagaatcttaagcagagctcaaaaactgccgagctcaggggcatacatcttacatacggaaataccaacccaaccctaaatatccagcaccatcattatcatccaaaagctcctagatgatccaaaccttgcttgacaatttaggacttggttgcaatgttgctggacagccagtccaggccttcatacaattccttacccgttgtagcacaagtgctttgaatgtaccaatgacgcttgcgaagtgaa

SEQ ID NO: 14572 - DNA, 379 bp, Zea mays
  Clone ID: LIB3150-080-P2-N2-F5
ggctatataaattcaaaacattaaggcagaatcgtgcgtcgccaagaattcattaacccattagatagctgagttcgcaaacaaatacaaggtatcaaacagtaggacaccaaaatatttgactggtctctatttccagcacccaaaaaaaacttggaacaagcacttgatggaagtagcatctcgctatgactgaacagaacaaaacaggcttcaaagtttggctgcttcacttcttgtcttccttctttgcctcagctggcttcttctggggggcaccgaggtgctttttgttcattcgctcaaggcggggcttgccatatgccgctaacgcctttatttttatttgggtccctttacaaccttttcagaggggttt

SEQ ID NO: 14573 - DNA, 203 bp, Zea mays
  Clone ID: LIB3150-080-P2-N2-F8
gagattggaacagggccttattcaggatgtgttacaatttacgctctgttagggtacacaaggcagcctgatcgaaaattaacaatttttcggggggtaaacaacaggaattgttttcgatgggggtacaaaactgattcaagctccagtttcatgtttacaacactgtcagtttttttgtctttgttttgcacttaaggcac

SEQ ID NO: 14574 - DNA, 243 bp, Zea mays
  Clone ID: LIB3150-080-P2-N2-F9
attattaatttatcataaaatttatattttttttttttatatatatatatatttaatttattatttttttatttattattttatatttaatttattattatttaatatatttaatttttttttatttttttttttattttaatttatatttttttttatttttaaatttattttttttttatctttttatttattttaatttattatattttttttatttattatatttatttttatttttaa

SEQ ID NO: 14575 - DNA, 371 bp, Zea mays
  Clone ID: LIB3150-080-P2-N2-G1
accagcaactggcatcactaataaaatctcgacttgcaccctacagtttggtggactcgaattgcaggacttaagcacagccttttaaagcacacaacctgtgaaccgaaccaacggagaccagataaaagtgacaagaacatgctgcagccacaagatcatagatctactagtttcagctggatacagcaccagaaattaagaatctaggcaaacggaaaatgggttccgattcaaccattgacaaagtaccaagaacagataaatttattacaaagaagacactagacaatctgatggttcaccctgaatcgcacgagtccatacaggctgcagtttgtgtcccgctccaagatatggaccatttaagc

SEQ ID NO: 14576 - DNA, 221 bp, Zea mays
  Clone ID: LIB3150-080-P2-N2-G10
tcgcgatctagagcggaacggcgactacgccccgtcgcggttccaggcgcaggccgatgccgtcaacctcatatgcggtgccaagacccagtcgaacccggagaacacagtaggcgtgatgacgatggccgggaagggcgtccgcgtgcttgtcactcccaccagcgacctcgggaagattcttgcctgtatgcacgggttggaagttggtgctgaggcaa

SEQ ID NO: 14577 - DNA, 215 bp, Zea mays
  Clone ID: LIB3150-080-P2-N2-G12
ggcatgaaaaaaagaaatgccgcctaactttggtgcatgctttgcattacacaatccaccgagagatgtggatttcgcggggcacgggttttgcagcgttttccagctgttcattactggccattccaggaaggccccaaatttgtttgggatgacaaatttttacgttctgttcaacctgacacgttttaaccatctggaaagttttcttcaca

SEQ ID NO: 14578 - DNA, 275 bp, Zea mays
  Clone ID: LIB3150-080-P2-N2-G2
aaaaccaaacggttttgttgggtaaacagaataaacccgggggacacaacacaggttcttaaaatttaaggggatattattggcgattacacacgataatttgtctgctaaaaaatataggaaacagcccttgttgatgataaaaaagccaaaacttgcagcattttgacgaaaacaggaactttagtcttcaaaaagggtgaagcccattttcctcgtccgatttttttttagggtccttatccttttttttttttttgggagcaagtttaagc

SEQ ID NO: 14579 - DNA, 318 bp, Zea mays
  Clone ID: LIB3150-080-P2-N2-G4
caaatgggaaagctttcccacctgattttttatcattaaacacacgaacttctgaaaacagagcaaatgtgcagtcttggaaggccgagcttctcttcttgaggagaaagaaaccaattcggcaggcagacttggttaatattttataaatgatactctcattcggagtaagacttataagcaactgcatgcttattggacaaatagtaagtttggctgtccagacatatggttgttgtacattcaactgtatttttcatccatgttcgtggtgttcctccctttacgcgttgtaaatttaagcttggacttttattt

SEQ ID NO: 14580 - DNA, 283 bp, Zea mays
  Clone ID: LIB3150-080-P2-N2-G5
gaagaaaccgcacttgtgaaatgatatatttcatttcatatgaatggcaaactggcatcgttcatatgcaggagataacaaagctttgccaccagatggctcttcggttatgtccagaaagaagtttacataaccaaattatcataatctaattaatcataactggtttgctgtacaacgaatgtttagctgcagcgtcacatacagcgagttcatccacacagcaaaagacatcatgtgccatcgctgcagcttccaggtataccttgaccgtcttcaatta

SEQ ID NO: 14581 - DNA, 274 bp, Zea mays
  Clone ID: LIB3150-080-P2-N2-G8
gaataaaaaaccttatgcgctcctttcgactttatatagcattcagctaattgttgagtcaatcacaggagatgttcgcgaaaaactatctctatcaactccatgctagatagcctatagttacaatcccaacacaaaaaaggaacaatttgttcactccttaacgccaaccttgctcaacacatggccatgcatcaatcacccctcaattgctatctgcgaagtctgcgtcaatgacatccccatcattcttcgttggtccggtaccaggcgt

SEQ ID NO: 14582 - DNA, 229 bp, Zea mays
  Clone ID: LIB3150-080-P2-N2-G9
aaaaccaactggtacattacgattgatagaaaaaagggtttcaacagcacttggatagaccagtatgaccaatgttgtttaaaaacctgcactttacaactaaaaggaaacaagtcataaattggtcccaaactctgagggacaattaaatccatatactggagcaaaaaccaaaagatgtgagtttgttcccaatccccaaaagaggagtcattttttcttttatacc

SEQ ID NO: 14583 - DNA, 192 bp, Zea mays
  Clone ID: LIB3150-080-P2-N2-H1
aaataccctgggggaacaaaaaagccccggcctcttttgggataaacatctcataataaatttaatttttacccccgttttaaaaaaaaaaaaacgcttatgatactttggcatttgttgtttggttggtacccttctcaccaacaatgggcctccctctgtggctcctcactcatattggtcttccaccca

SEQ ID NO: 14584 - DNA, 339 bp, Zea mays
  Clone ID: LIB3150-080-P2-N2-H10
aacatatagctcttacagcattcttgtattgcagaaggtgaaatagcaagaaggtaccaaataaacagataaaagtgcacaggctaacagagctcaacagttcacacaataacagcaacgaccacaaacaaaacttgtaatgatgaaaactaggtattgctaaagcaggcgcaggatcgcatcatttcttcttggcagcagccttggtcaccttggcgccggttgggtccttcttcttcacactcttgataacttcaacagcaaccgtttgccttatgttacggacagcaaacctaccaaggggaggattcgcttatgatgtcttcaccaccatgggct

SEQ ID NO: 14585 - DNA, 302 bp, Zea mays
  Clone ID: LIB3150-080-P2-N2-H11
attgataattaatactagaaagtatagagacatgaaagcatagaaaatacagggtccagaatgtaaccacagataatgattagtcaggtaggtacgacacccagcaaccccttgcacgctatagcaaaagccagctcaagccaggtgaatgtctcggtagcaatcctttggtgatacacttctttttcgatttaagttgagatacagtagggttccgtctccaaagccaaggaagttacttgttgtcatcattctttaacgtgcagatttgttcttcccccattgtaaacttgacagttaca

SEQ ID NO: 14586 - DNA, 348 bp, Zea mays
  Clone ID: LIB3150-080-P2-N2-H2
ataaaacagcagaagagagcttcatgtttatatcaccacaatgtttttgtacaacaatctggcagaggatacatagcctgtccttattaacaccaaacatttgacgtgcaacgctgccagcagatagggcacaccagttacaaagcacacattaacgtccaaatcaagcccagtgtttttaagtcttacaagccagtatacaatcatacaacaacggttttatgtcgcaaagaaccgcttgggctgatatagtagggttccttatctgaagcgcttcccatttttcaggcttgaactggctcgcgcaatttgttgttgccctttgatggcaccaagctgtcattgttt

SEQ ID NO: 14587 - DNA, 199 bp, Zea mays
  unsure at all n locations
  Clone ID: LIB3150-080-P2-N2-H3
catctaatctttaggggtttttttaatataatttagtgacctctgaaaaaagtatgtgaataaacaactcttacaccatcagaagagngaaagcagacaaattctttataactgacacacataacacgatagcatgagcaactctcggcagatcacgggataaggggagcacactggcctgatgctgtgtcatcaacaa

SEQ ID NO: 14588 - DNA, 337 bp, Zea mays
  Clone ID: LIB3150-080-P2-N2-H4
agggtagtacaaaactcataaccatgtatgccttacattcgatgttccataaaaaaaattaagtcttaatagcatcacggtttcaacgaaagtaataatacttcatgaccaggcaaacattgccatcatagattacttgttcacgcgacaactgcaaggatgtcaacaagacgagatattttaagctttcacgggggttaccaacaagcaagcacaggaccagccagatagatcatttttttttggcagcagccttcgtcaccagccagatagatcattttttcttggcagcagccttcgtcaccttggctccagttggggccttcttcttcacact

SEQ ID NO: 14589 - DNA, 92 bp, Zea mays
  Clone ID: LIB3150-080-P2-N2-H5
aacttgcacagtggtagaaatattgattggttggatttcatgcacatgattttcccagtagctttcgacaacttttttgtttatacacaagc

SEQ ID NO: 14590 - DNA, 263 bp, Zea mays
  Clone ID: LIB3150-080-P2-N2-H6
agactcagaaccattgcaaactcattaactttagacaaaaaaacatcagtaccgctgtttttaagataaatgtatattgaaaaaaactggcaccactcaacaataaactcagaccaagatgtttataatagacttagcttcgaacaacatttctgtaatagactagaagggataaactggtattctagcacaaacttgacgagctgagccgctgtcgttgtccaatctcagaaactgatctttagatcttgttgaaagccaca

SEQ ID NO: 14591 - DNA, 192 bp, Zea mays
  Clone ID: LIB3150-080-P2-N2-H8
agaggcacatgatgaattaaatattaaagcactaataagtttattggtccaaccataaaactcattacccatacttatataagttagaataacacatatttaactcattgtacattgtcagattacccaacacattataacaggtgttgttgaatcaaaattatatttagtggtattaaatcttttccgtag

SEQ ID NO: 14592 - DNA, 72 bp, Zea mays
  Clone ID: LIB3150-080-P2-N2-H9
gaagcaacaacgtaaacagccataattattctcaataacccggtagcattgcagggaaataacaacctttac

SEQ ID NO: 14593 - DNA, 60 bp, Zea mays
  Clone ID: LIB3150-081-P1-N1-A12
tcttccttagaccacaaaggcatccaaacaccgggggcttcataactttctcgaggctcc

SEQ ID NO: 14594 - DNA, 488 bp, Zea mays
  unsure at all n locations
  Clone ID: LIB3150-081-P1-N1-A8
tgtgaagccgccgccgctgcagtgtccatagccaccgcaggagactgagatggggggttttttctcaatatatattttttctttttttttttcttttttcttttcaatatatatttatttctttctcattgccaacgnnaggcgttgctttttctttactataatatttatttctcattctaccttttttttctttcatataccttttgtttttctattccatttattattttttgtgtttagttccctttctttttacttttttctctatttttcttatattttttgctttattcatatttattttaatttctcttattaatttgtatttttttattttgtttatttttatatttctatttattctttttcttttaattctttttagtttattttatatttttttttattgctatacatttttttttttacttttttatttttttttttatttatttttcttacttctttttttttttttattataa

SEQ ID NO: 14595 - DNA, 251 bp, Zea mays
  Clone ID: LIB3150-081-P1-N1-A9
ttctagaaacacagggagaaaggaggagaggaacggtgagctggaaaaggcaggaaagacccggcttttgaccccaagtaccctgttgagggcaatggcggccacctccgaggaggcaatcaagcagttctcggcgctcatggagcagctagaggagccgctaaagagcacattccataatgtgcatcaaggaaatctgagagggacttttatgcgttttcttaatgcttgagaatggtgtgtgcctaaag

SEQ ID NO: 14596 - DNA, 150 bp, Zea mays
  Clone ID: LIB3150-081-P1-N1-B11
ttcttttatacccgaagacgtacaaccaaaggcggaccctactttttctcagcggggcgcccactgctgaccatccatctcaattcccaactatggttacgcatctcacacaaactcatcattagtattttccgacaataccataattca

SEQ ID NO: 14597 - DNA, 231 bp, Zea mays
  Clone ID: LIB3150-081-P1-N1-B7
ttcgtttctgtatagacagaggataacccacccggggctgtggtggactacagagtgctgccatccaaagaacttctatttctacatgtgtgcgcatgctggaatgatcgggactactaggtcaactcactaccacatcctgcatgatgtgattggcttcattcctgatgatctgcaagagctggtgcattcgctctcttatgtgtaccatatgagcacatcatccatatt

SEQ ID NO: 14598 - DNA, 472 bp, Zea mays
  Clone ID: LIB3150-081-P1-N1-B9
tcttctgttatactcgaagacgaacaaccagattgggattctattaattcagagcggccatccctctcctgttcttcttctttattcccttcattgtttattcatctcttacatcctcacttttatattttataactattccaatcactcttttattttcatttacttcatttttaatgtctttatttatttctaattctttcctttattttcaattttatttctatatttcctaaatttatcccctttattttaatttatttatattccttcactcactttaattttccttcaattattctaattacccttactatcctatttctctcccttttaatctctttctttttcttttaactctttattccaattacttctatttcatttttaatctctttcttttcattatacatctttttctatatttctatttttctcattatttatttactttctacttaatatttctatt

SEQ ID NO: 14599 - DNA, 292 bp, Zea mays
  Clone ID: LIB3150-081-P1-N1-D5
tccattctccgcttcccgctccgatcgacgtgcgccctccccaccaccgagcccatggcggaccagctcaccgacgaccagatcgccgagttcaaggaggccttcagcctcttcgacaaggacggggatggttgcatcacgaccaaggagctgggcactgtcatgcgctcgctggggcaaaatcctacagaggctgagctccaggacatgatcaacgaggtcgatgctgatggcaacggcaccatcgatttcccagagattctcaaccttatggctcggatgatgaatgact

SEQ ID NO: 14600 - DNA, 345 bp, Zea mays
  Clone ID: LIB3150-081-P1-N1-D6
ttctgtcctaccgagtctcctagggtagggtcgaaggcggcctcaacaagctggtggcctttaaggcacaggcttgtgagcggatactaggggctctttcctgcagtgttcaatgctgcacggctcatgtctaccaagctatttattggtggcttgactgggtgttgatgacggaactaagaaacattaccagctttggagaggttctgttcgagggtgctcacatactggggactgggaggtctgaggctttgcttttaacactccacaggatctggcaaggaagctatttgcatggatggccggaaatgatggcgtgtggacgtgtaacatggctttgagaga

SEQ ID NO: 14601 - DNA, 289 bp, Zea mays
  Clone ID: LIB3150-081-P1-N1-E4
ttgttttatccaatcaagagcatcaatataagaaaagctcatggtaaaagcggcaaggatagttatctgttgaatggctattcactaaacacaggccgtgcagctcaaggaatgcctacgagagtaactcctgctagaattgcttgtcttgattttaaccttcagaagacaaaaatgctacttggtgtccaagttcttgtatctgatccaagggaactttagaagattcgtcagatagaatctgtcataacaaataatcgatttgtgataatgttcaaggctggatcta

SEQ ID NO: 14602 - DNA, 313 bp, Zea mays
  Clone ID: LIB3150-081-P1-N1-F2
ttattcagcttccgagatagttgagctacaagaagtaataaggaatacacaagcagaattagaaaaggtcacaaaggagaaagaagtgctcaaagaacacgctaacgaatttgagcaacttttaaagggccttgaggtctcaggtacagaggttgcaaagctaccagaaactatcaagaacctggaagcccagctagaaagatccttcgaagagaaatcagtactccaagaccagatcaagcagctggagcaggttatgtctgaatcttcggagaaacattcacatgagcagttctctcttactgcggatctt

SEQ ID NO: 14603 - DNA, 172 bp, Zea mays
  Clone ID: LIB3150-081-P1-N1-F3
ttctctatgtattttcgaactggtaatcccaagatgtctacttatacacacgcagactttgaatccatacataggatatagatttgctcaaagtacactctaactaatttgttctacttttaaaggtccttgaggtcttaagtacattattcacaaagctaccataaactat

SEQ ID NO: 14604 - DNA, 390 bp, Zea mays
  unsure at all n locations
  Clone ID: LIB3150-081-P1-N1-G4
gngtctacctcctccctcccgatcccgctccgtgtccccccaccgccaccgctgccgctgccgcctcccccaccgaggtcttgtcttcggcgatccagccggagcccgcggcggcgacgatgtacgggtgggagatgctgtcgttcaacatacacgatgggttcctggaggccatcgtgcggggcaaccgctcgggcctcctcaccgccgccgactacaacaacctctgccagtgcgagaccctcgacgacatcaagatgcacctcaccgccaccgagtacgggccctacctccagaacgaaccttcacccttgcacacaacgacaattgtggagaagtgcactcttaaactagtcgatgagtacaagcacatgctgtgccaggccactg

SEQ ID NO: 14605 - DNA, 258 bp, Zea mays
  Clone ID: LIB3150-081-P1-N1-H6
tctagatcgcgagcgaccgccctttttttttttttttttttttttttttttttttttttttttttttttttttttttttttttttttttttttttttttttttttttttttttttttttggacttgaaaaaccaaaaatcgtttaaaaaaaggggcccaaaacaaaagcaaaaaaggtcaatgtccaaattttttaaaaacaacggaaaacggcccatttatggaactataaaatttttttttttggctttttttttc

SEQ ID NO: 14606 - DNA, 136 bp, Zea mays
  Clone ID: LIB3150-081-P2-N2-A1
aggatatgaactggcattaaaaactgtataagcactgcccaacaggcgggaaccacattttttaaaactacaggtttttttaacacaaattgtttagtcaggaaaacactttcatgttaaattttgtttttaaaac

SEQ ID NO: 14607 - DNA, 341 bp, Zea mays
  Clone ID: LIB3150-081-P2-N2-A11
agaaaaacgaagttccatcataaaaacctaaaaaaatacatattacagacttacacacaaatcattaatggactgaagtagctaaaacgctaaccacagtgcagtgaactgcttgctacacgaagggatggaaccaggcccagatttacatacagaattttacaagccatagaaccatgccaacacgaaggaatgacaccacacaagagaaccgggcaaggaggctcccagattaacttgctaaatagcaaggaataaccacaaaaatgaactgataaacacatttcccccaggcaaggagctcatggcacctactgacagtacaccaccgtgcattacac

SEQ ID NO: 14608 - DNA, 258 bp, Zea mays
  Clone ID: LIB3150-081-P2-N2-A12
gaacaaaatgaaggttatgacgagagcagctaccagctaccatataactggcggtacacatggatcgattatctctttacaaacaggttcgatcagccatatctttttacaccaggtattatcagctaaagagaaatgctaatccatatccatgactgaacttttggccctatatctcctcttgaaaacatcttccctgaatagcttggtttcagccatcaagtccatggccggtttctgctgtatggtttccttctc

SEQ ID NO: 14609 - DNA, 296 bp, Zea mays
  Clone ID: LIB3150-081-P2-N2-A2
agcaaaacctgacaacgcttaacataaaacgtcataccaagtcctaaagttcattatttcaaatatcttggttgataatgcacctaataggatcctgccccccttaagcatcatagctttggctgccaccaccatagccaccaccttcgtagccgccgtcaccttcgtagccaccacctccataggcgccggcgccatagccaccaccaccacggtttccagcaggtctcttattagccatgttgacacgtaccttgcccgccattaatttcctggccattcattgcagaaatagc

SEQ ID NO: 14610 - DNA, 439 bp, Zea mays
  Clone ID: LIB3150-081-P2-N2-A4
atggtggtggtcacggtggccgaggacgtggactgggccggcgtcagtatggttttcgatctttatccttgtttggatgatgctttttaaatttttgttattttatttattttttatttttttattttgtttttttaattttttttttttatttaatatttatttcattattatattttttattttattatattatttttttcttttttatatttctttttatttttttattttttattttataatatttctattttattattttttttatttttttttttttattttttttttcttttttatatatttttttaatttttatattattttttttattattttttattttattttttatttatttttttttttttttaattttttctatttttttttatttatttttatttttttatctttttattttttaatttttttt

SEQ ID NO: 14611 - DNA, 183 bp, Zea mays
  Clone ID: LIB3150-081-P2-N2-A5
aaaatccagggaataataccagcccacacggacttaatgccaattaggggaaacacaaagcaatggggaactaattcgaacacttccagccttctaatttaaaaaaagaagtgggggaacaggaaattagcttcaatatttgcacggtacaattttagcttttgacagctttgagcatttaaa

SEQ ID NO: 14612 - DNA, 390 bp, Zea mays
  Clone ID: LIB3150-081-P2-N2-A6
atataataaataatatgtggtggttttatatattaatatttaaaaaaatttaaaaatattaaaaaaaaaaaataaaattattattattaaacaaattatatttttaattttaaataaattagtatattaataaataataataaaaaatatatttgtattaaaataatatatataaataaattattataatatattaaatataatatattatatataataatatatatatatgtttataaatattatatataatatttaaataaaaattatttatatataaatttaaatattatttatatttaatattttattttatatataaaatatttaaatattatttatttaaattaattatattaattgataatatatttaatttatattataata

SEQ ID NO: 14613 - DNA, 387 bp, Zea mays
  Clone ID: LIB3150-081-P2-N2-A9
aacatcatcctcgccatctagagctcgtcgtgctgcttctcatcatcagaatccttgctatcctcggcatcagagtcggccttgtcctcgtctgccttctcatcgtcttcctcatcctctaggtcatcatcctcatcatccccacccttggcggcatcctcttcttccttctttttctcggcctcatcaaaagcagccttttctgcctccttgtgcttgccccaagtctcctctgcaaaagtcttggccaacgcagggtcatcagtgatgatgatgttgtcaaacagagtgcccgatttaacctgccacagctcaatgccaatgtacttcaagctgtcgaaggcgtaaatgtatggatcatccctaaaatctgggttgtcaatcata

SEQ ID NO: 14614 - DNA, 316 bp, Zea mays
  Clone ID: LIB3150-081-P2-N2-B10
aaaagcgcgacttcttttttcacataaaattcgaatccgaatcctgaacaaccaaggaagtagaagaaaaaaaattacaaacaaacagtttctacgctcagcacggctattggcagagcagcaccaagattagtaataagtattgtccgccgctaaacaccgttacaaaatttggctcggctcccggcactccacgtcaccaccaccatcgtccatctacaaccatctacagctcgtcgtggtcgtcgtcaacaccgccgtcagcgtcaccgccaggggccgccgccgaccgctggtacacgggcgacacgatggg

SEQ ID NO: 14615 - DNA, 319 bp, Zea mays
  Clone ID: LIB3150-081-P2-N2-B2
gagagtagagattattattacacgacctaaactgcacaatataattgccagatcgagatgaaacgaaattcctaataaactgaattcaggtgacgggaagggaaacatccgcactgagtagatgtgcaattaccgcaccatcgcaaatgcaaggatgagacgcccgcccacaacacataaatctttgcaaataacaagtatgaagttcgatcaagatgttcatttgctgtggactgccccgaatatgcatagccccattcggtgtttacacgggtaaacaccacaactggtgattgtccggaaatttcttcttgatggc

SEQ ID NO: 14616 - DNA, 282 bp, Zea mays
  Clone ID: LIB3150-081-P2-N2-B3
ctctaaaattcaatctgtgataattcgggtgataaacggacaagggctaacataaccatataccaaaatgacagacctgagctccgacataacatattcatataaccaaaataaccaattcaaggcaattaaatccaccccctagttcagctaattatagagcagcacctaaaattccaataaagtaaacaaagtaattgcattctagagataggtatcaagcaaaaattgccagcaatttctgaatcatcagaaacattcagctggagaggacgccatcat

SEQ ID NO: 14617 - DNA, 379 bp, Zea mays
  Clone ID: LIB3150-081-P2-N2-B8
gccctccaaattcatttgtatgctatttaactagaaggtccagatgtgcatctacaagactccttttccattacatgaaaaacagtacaatcaattacaaatgattcaaaggaatgttgtacagccgcgctcaatctaagtgaacatggagtcatctaaaacgcaatgtatctcatttttagttcatttttaacgttgctggttcaaatctgacattacttcaccctgaagagaacacatgaaaattgatcgcagaaatcatatttctctgtttttgccaagatttggggggaaggaacaccttatggcttaaatgggcaaatactcacactgaattgtgtccttcaaattcaagtggatttgatatccaacattactt

SEQ ID NO: 14618 - DNA, 312 bp, Zea mays
  unsure at all n locations
  Clone ID: LIB3150-081-P2-N2-B9
tntntngggcaagaccagcaagattacctgttccatcaaaattagtttaggcaaacgacattacaacgagtgcagaccaccacttgtcagaatttagagagattgaaaaaaaaacagttcttttctgcttttggtgctcccacgacaaaatcacctgagttgctattgagtaaacacgaccatacttttattgcgaccggacaaacatttgaacaaaaggtagctgcttgctttgttagcttcacaagaaaacatgctctatcttttcctttcttagaagggattcactttttgcctttgacatttgttccg

SEQ ID NO: 14619 - DNA, 315 bp, Zea mays
  unsure at all n locations
  Clone ID: LIB3150-081-P2-N2-C1
acggacggcggcggaaggggaccccacaccgcgcgcccttctggtcctgacccaccaccggcaatggcgatcggtcgagttactccactagcgagcatcgaggcaatcaagagatcgataggggaataatggagggaggggacgatcgccgtntnttctccgcgccgtcccgccccgccgcgcgcttnttcggttcggttgtccttatatatacgtaattagaaacagaatagcaaaggagagagaaaaagatactgtccgcccaactagagaaaggagggaagatatagattaacaggttgaaaagcgagctga

SEQ ID NO: 14620 - DNA, 259 bp, Zea mays
  Clone ID: LIB3150-081-P2-N2-C12
gatgacaaaagatgaacaaggtggtaaatgtaaagcatctccgagatgaagcaacaacgtaaacagccataattattctcaataacccggtagcaatgcaggggaattaacaactcttacaacatcaggtgttgtaaaccacacaatacttcagaacagacacacataacacgatagcaggagcaactctcggcagatcacgggataagggcagcacactggcctgatgctgcgtcatcagcaaacttctctagtactc

SEQ ID NO: 14621 - DNA, 254 bp, Zea mays
  Clone ID: LIB3150-081-P2-N2-C3
agctccaatcaggattatccttaattgatgtgaataataagccacagtatacaaggaccagcaatcatgtctacattgacaaatcattcaggggatcacaatttggaatgaaactttattacgtgtcagccagaatatagccaacatgggaaactttgttgttttcagagaggtagcattaacagtgctaactttaacctttttagaagagaaattccaagttcttttaagcatctgcttccacaagaacaaaa

SEQ ID NO: 14622 - DNA, 408 bp, Zea mays
  Clone ID: LIB3150-081-P2-N2-C4
gtaaaagcacataaatcacggcagcggcagcatgcataatgctatccaactacaaacaaaaccacaattagggtgttataagtgcactgagtttacatccgttttattccacgggcatgtggtagagcacccaaaatttttaaatatgtttcatcatgctgcgtgccgccgtaggtatatattttgttccataatatccacccttcacttttcttctacaaagagtaggtaaaaccaaaactacagcactgccaaactggctctgtgataacttccaaaatgaagaaagacttatgctcaaccttgccaagtcagaaactagcaattggcatgtcaaaaacaactgagtaattacaccttcggcagcacgggtgtatcataccgggtggatggcttggccagcagata

SEQ ID NO: 14623 - DNA, 436 bp, Zea mays
  Clone ID: LIB3150-081-P2-N2-C7
accgggcgaacaccttttttttttttaaaaaaaataaaaaatatatttatattataaaaaaataatataaaataaaaaaataataaaaaataattaaaaaattaaaaatatttttattatataaattaatatataaaaattaaaaaaataaatataaatattaaaatattataaattttatataaattaataataaattaaaaaaaataaaaaattttaatatataaaaatataataaaataaatttaaatataaaataaatatttatatataaatttatattatatattattataatatatataatttaattttaatttatttaaattaacatattataatatatatttattatataaataatatatttctaattaaaatataattatatataaaattttataaaattattataaaataaaatctaaaatataat

SEQ ID NO: 14624 - DNA, 298 bp, Zea mays
  Clone ID: LIB3150-081-P2-N2-C8
atggcaagaccagcaagattacctgttccatcaaaatcagtttaggcaaacgacattacaacgagtgcagaccaccactcgtcagaatctagagagattgaaaaaaaaacagttcttttctgcttttggtgctcccacgacaaaatcacctgagtagctctcgagcaaacacgaccatacatttattgcgaccgtacaaacattgtaacaaaaggcagcagcgagctagtatagctccacaagaaaacatccccatcctcttcctttcttagtagggctccactggtgccctgaactt

SEQ ID NO: 14625 - DNA, 318 bp, Zea mays
  Clone ID: LIB3150-081-P2-N2-C9
attggaacacatggaactttattgtctgaccttagaacatcacgaatgcttatgtacacaagagtatgaatcaaattacaaactgtaaagctagtaaaatgtagcaccccatcatattttgagtggatcacattgcgttcaccctagcagcttgagtgcaaaacaaagccgctcagttttcaatgtacacccttttcgcgaacaacaccgctcagtttttaatgtacacccaatcccattcacgaaaaactttcacctttccatttttttgcacaacagaagtgtttactaacaactttcacctccatttttttttac

SEQ ID NO: 14626 - DNA, 272 bp, Zea mays
  Clone ID: LIB3150-081-P2-N2-D11
aaaacacaacgaaaagagcttgaaaattgaaataggcaaatttagtaattacatggaacatgcaacctaacaaattgagctccggataggcaaatggaacattgattaacttggactcaaaatattggatttttttcatttgagacaaacacacgatccggaaacaccacattaaactccaaattttcttgtccatccgtttccaggtcacgtacgcttcacgacatttgtacctttttggccaaaaacattgatctattaacctttttttt

SEQ ID NO: 14627 - DNA, 162 bp, Zea mays
  Clone ID: LIB3150-081-P2-N2-D12
ggcgttataacttctttcgcaaatgatacttttttattacacatacagcacttccatacagtaactacaaggactgcctttatcttgtgtcaataatgtgaattacgacaaatccaaaatcacaacatgaaacaaattgatagattccacgcgtaaggtacc

SEQ ID NO: 14628 - DNA, 293 bp, Zea mays
  Clone ID: LIB3150-081-P2-N2-D3
gtcgaaatgatctcactaacatattcaaggatatcaaattgttccacgcagattgattgtattacgaaactgaccttacactcgagcacagtacaaaacatagcaaatccagatccacggtatcggtaccagcctgaaaaggtacataaaagagctacggctataatgcttcgaaaggatgccattattagcaggctaacatacttcactgcttacttgccgcgacaatgttgcagcctctttcttacaggctcttccttttcttgcaaaatcagcttaatgtggcaagggga

SEQ ID NO: 14629 - DNA, 226 bp, Zea mays
  Clone ID: LIB3150-081-P2-N2-D4
agttcaaattcaaaattagctgaaataagtaccatagtttagtacagcaacctggctggtcatgaaataatcacccaagcaaatcattctcgttttcccggaggaaatttcatataagataagatgttgccacagtgctagagataattaagtttgtatttcagatacagcacaggaaggttaaatgttcatagagaagcagttgtcttgacacatggcaacgaaa

SEQ ID NO: 14630 - DNA, 135 bp, Zea mays
  Clone ID: LIB3150-081-P2-N2-D8
gttaacaatgccaaaaggttaacatattcttcattatttttgtattgcaaaaggtgaaatagcaagatggtaccaaattaattgattaaagtgcacatgcttacagatttcaacagtttacacgatttcagtaac

SEQ ID NO: 14631 - DNA, 294 bp, Zea mays
  Clone ID: LIB3150-081-P2-N2-D9
ggagtgcaaaatgcaaaacttttgaaatagaatgaccgttaaaagtttaacgataacaaccactacgatacacccgttataggttttagacaatcagataagaaaaatttattctcggaagcactttcggggaagaaacacaactctctttgcatgctttcatcactctttgcatgcttttattatcatcgattatttaactttgttgcttgcctatgtattctgattcatgatttctcacttctaattctataattttcatattttgttgtcgatataatgctaattattttt

SEQ ID NO: 14632 - DNA, 195 bp, Zea mays
  unsure at all n locations
  Clone ID: LIB3150-081-P2-N2-E1
ataacacnnnaaaaannnaggaaaaagataaagcttgctggactgatcaaactcggaaaaagaaatattctagtgttatttcctcaccccgaggctgggaaaaataaatacatcgaattatttgaaaaggaatacaggggcacagacagatctttgtttgacagatcttaattaaccgctggcagcttttggggc

SEQ ID NO: 14633 - DNA, 273 bp, Zea mays
  Clone ID: LIB3150-081-P2-N2-E11
taaataactcgcaacgttatcagggcaaaggtttaatttaaatgctcaaaacttaacattgttcacgtccactgccacttcaccgtaccaaattcctaggcaactttagcatcaaaactatgttttttgaagtacatagggagacccaacataacattcagaatcaacgaaatagagtggagatatccagagggcatcatatttatgcattttcggtcatagggtactcaaagaccacatttttcccacacagcctgcggtagaccgcagtgc

SEQ ID NO: 14634 - DNA, 323 bp, Zea mays
  Clone ID: LIB3150-081-P2-N2-E12
agtcaaatgtgccacaacaaagtttatcattaaacagaggtacaaagcaatgtgtaaagaaaccagcaaattcatggcgcggagtaccatccatttgcacactcaaaagatgcaacacatccaaggagaaaaagatgatccagacaatgagaactcaggagttcaccctaaaacatcttaaaacacgcatggcacaactcctgctcaaggttaagactgatgatcctttctactcaatcaaatcatcatcttcattatgaagaggttgtgcatttgctgtaacaagcttagctttattcttttgctgcattgccatgtcgatg

SEQ ID NO: 14635 - DNA, 98 bp, Zea mays
  unsure at all n locations
  Clone ID: LIB3150-081-P2-N2-E2
taaaanaaaaattattggggcagnnaagggattccacaaaaccattaaattcaacaatatgacgaattgctgaattagaactagaaacataacatggg

SEQ ID NO: 14636 - DNA, 426 bp, Zea mays
  unsure at all n locations
  Clone ID: LIB3150-081-P2-N2-E8
attatatatataaaaaatatatatattgtttaatataataattatcattaaaaattttttaattataaaatttaattattataatatttttataataatatttattttataattaaatattttatattattttatttatttttttaatactatttaataaaatttaatattaatataaattaataaattataatattattacttataataattattaancctnncntacttaattattataataacattatttatacaataatattactatatttcatatattataaaatcattatttaaatatatccataataatcttcattataatttaaatataataaaatttatatatctattattattacaatatatatattactaacgaaatatcaaattctactatatgcatatatacatagtattata

SEQ ID NO: 14637 - DNA, 73 bp, Zea mays
  Clone ID: LIB3150-081-P2-N2-F1
ggcattaaaaaatgctttaacatgtcttgcttttttggaggggctgggcttgagcattcattagtcaaaattt

SEQ ID NO: 14638 - DNA, 233 bp, Zea mays
  Clone ID: LIB3150-081-P2-N2-F10
ggaattaagaaacagtttatttctcttgcacgcgtatcatagccaatttagaagtttggaggaactaataagttaaataataaaattcgcaaacattggaatgattggtttatttcggtgcctgactacgccacaccaatacattacagaggaacattacaacgcatgcattgccggtagatggatactctagggtctaggcaaagctgcttgaaatgcagatgtactaacta

SEQ ID NO: 14639 - DNA, 302 bp, Zea mays
  Clone ID: LIB3150-081-P2-N2-F12
gcaaacatatatcttagattcgagaattgagtcttgatatcacattaggtactcggggaacatagtgtggcgccatagctagatgcaataaaccttaaagtcctctgaactcgaaaatcctaacccaaaagagcaaatagagcgcagtcttctcaaccatcaaacatgacaccattgaaaccaaagatgacactgctcacgcttcaacagcgacccttccagccacttggtccagatcacgccttccctggttggtgatgaggcggccacccttgggatcgacatcgatgatgcccataatc

SEQ ID NO: 14640 - DNA, 326 bp, Zea mays
  unsure at all n locations
  Clone ID: LIB3150-081-P2-N2-F2
aaaagaaaantgggggaacccccccaattttattttatttaaaaaaaaaaagtttttttaaaataaaaaggccctttaaaaatttgcccctttttttgggttgtattaaaaaaaaattttcttttcctccaaactttaaataagtctccccccccgaataaggttttttttttacccttttaatctttttaaaaataatattttttacaaaaacaaaaaaaaaaaatatttttttcaaaaaaaatttaccctttaaaaagtatttttttgtttttaaaaaaaaattattttaccataactttatttacatttaactctattttata

SEQ ID NO: 14641 - DNA, 239 bp, Zea mays
  Clone ID: LIB3150-081-P2-N2-F3
acaaggaaccataattgcatggggaacatatataagtatcttgtctccgcaaaacttagcttaaacaaaagtgccacagaagcaacacatagcatctgtccataaagattaaggtaaccaactgccttagcattggccttatcgtaagatagaaacctatctaggacccgatcaaactgccatttcaaggacacagttgggaccttacacctcatgaggtgccaagaccggagggcgcg

SEQ ID NO: 14642 - DNA, 350 bp, Zea mays
  Clone ID: LIB3150-081-P2-N2-F6
aacagaattccaaccggaacggtgttttgaattaaagcaaattaactttggtactggtacattcgactcgaataggatccaaaaatacttacggtattatcactggcctcacaaagctgtcatataactatcgaaaaattaggcttgtgcattgtccatccaccaaaattgtcagtaccccatgggaaggacttgtcgaaaggtatccctagaattttgtagaaatgtaacaattgtcgtaaatcttggactgtcttgttaaattgcttattggctagaaagttctttattataattttctaatttacctgtttctatgtctattgtaattttgttttgtaatctttttt

SEQ ID NO: 14643 - DNA, 367 bp, Zea mays
  Clone ID: LIB3150-081-P2-N2-F7
agcacaacgacttgtcacgagatttcatattgttgctccaaaaatttaatgagatctatataatcgagggtcaaatatactcgatggcaaaacgacggtacaacattttgcttaaaaacctctcccttcacaataccattttaacgccgatccttttcttcatataggtcaagccaaaaagggaaaaaaaaacagtatcaacacagcatgctctgctttataagttataaccggcgcactctactcctgcaaccaagtctcatgccatgtagtggtagcttcacagtagcttctcgtttccgcaccctgtgcgccctccaaagactattgcccatatggctctccaagaagaatctgtgcttcctca

SEQ ID NO: 14644 - DNA, 289 bp, Zea mays
  Clone ID: LIB3150-081-P2-N2-F8
ggattcaactcaactctcgcctttatcctgcagatgtgcctttttcaccatgtcattcaatgtgatacacgggttcgttctgtatagcatcgagatatatttattctaccgaaacagacaaattttcgtcttgccagtttacagcttggagggggattggtaccatccccacggctcatcagagatgtactccgtgacttgcttgacgctcaggtagttatcaatgcccccttctccaagctcacgtccaaatccactgcgcttgttcccgccccagggagcttggcag

SEQ ID NO: 14645 - DNA, 144 bp, Zea mays
  Clone ID: LIB3150-081-P2-N2-F9
aaacccataacttttttattaaaaacaccaaggggggaaaattttcacattgtttgggcacaaagttttggaaaaggtatacaggcgccaagtttcccactaaatgttgatctttttgttaaggtgtcttaatggaaactaacc

SEQ ID NO: 14646 - DNA, 164 bp, Zea mays
  unsure at all n locations
  Clone ID: LIB3150-081-P2-N2-G1
tnnnaaaaggttcaaataaaataataataatgggtaaacgccgagacatgataatttggaacaattccatttcagacattaacttggaagacagccctttccattgggcacaggcgcaaagctgttaattggttattatttccttgaaagttaaacataaggcc

SEQ ID NO: 14647 - DNA, 150 bp, Zea mays
  Clone ID: LIB3150-081-P2-N2-G11
caactgggactggaacattatattagcactaaaaggtttgccacaacttcatcttaaaacaaggtttatgaacaaagacatgtattaagtaccccgcaaattcatggtgactattccaatccatttccacacttaaaagtcgcaacaagc

SEQ ID NO: 14648 - DNA, 184 bp, Zea mays
  Clone ID: LIB3150-081-P2-N2-G3
tggaacacaaacctaaggctgattgtttcaaccaaataacaagtaccagttgcttaggggccaaaaacattcgaaatttgaccaacttgagcgcccctaaaccataataccccttaaaactagggtaatgagcatcccgttacatcgagaaacagcgtgtaatataacatcctattcttttttt

SEQ ID NO: 14649 - DNA, 62 bp, Zea mays
  Clone ID: LIB3150-081-P2-N2-G4
aaaaataataaattttttttgtatttgttttttttataattttatatatattttttaaattt

SEQ ID NO: 14650 - DNA, 282 bp, Zea mays
  unsure at all n locations
  Clone ID: LIB3150-081-P2-N2-G5
aataaaannaaaataaaaggggcgngtatgtaaaaatactgatataatatgattcaaatccatttaatgacattacatagtttattatcccttcttttctaatggttacattcttattaacatttgcatgtacacctactcaccatacaataaaaattccctcagtaacatttattttttattattgtgacacaataatagtaaagctaatgtaaaaaaattttaacatacttgtctctaccaaaaccaattaccatgtttcgaaagcatttgttatgttat

SEQ ID NO: 14651 - DNA, 260 bp, Zea mays
  Clone ID: LIB3150-081-P2-N2-G6
cagctgacaatagaacattatattagcactaagaggattgccacaacttcatcttaaaacaaggtttatgaacaaagacatgtataaagtagccagcaaattcatggcgactattccaatccatttccacactcaaaagttgcaacaagtccaaggagaaaaagatgatccagacaatgataactcaagagagggtccaccctaaaacaacttaaattgggcaaggaaaaactcctgctcaagtccaagactcatgatcc

SEQ ID NO: 14652 - DNA, 347 bp, Zea mays
  Clone ID: LIB3150-081-P2-N2-G7
atatcacaagaacaaatccggatcccctttaattattgttccggatgaacgatccgagaaatgcattcatcttcttgctgtgcttattattcagacatatgagctagctacaagctcattcctcatgcactatgctcttcgcagttacttggagggcatcgttccgccgccgagaatccaggggcattcggcgacgccgctgatggtggccaggttgcactcggcctccgtgacgagggtggcggcgaatcccctttgcaccttccgcgggcagtccggcaggtcctttaggcggcccttcagctgcgcgttcgggcccggggggatcgggcccttcatgatgattc

SEQ ID NO: 14653 - DNA, 270 bp, Zea mays
  unsure at all n locations
  Clone ID: LIB3150-081-P2-N2-G8
aatanaaataattatattgatgggttattttttatttattttaatattttttttttaaatttagtttttattatttattttgttattttttttttttttttataattttttatttttttttatttttgttttatatttttattttttttgtttatttttggttgtgatttttttgtattgtttatttttattttttttttaattagttttttttaatttattttttttttttttttttttttttttttttttttttttttttatttattt

SEQ ID NO: 14654 - DNA, 275 bp, Zea mays
  Clone ID: LIB3150-081-P2-N2-H11
gggctggggccaaaacttgggaggtcacaaaatttcagaaaggggatttgtattagacaggaacaattacagtgcaccccaattgaaaataaattgagagatcaaattagaggcaactctacgctggagaaaagtctaacatgccaacattcctactttaccgtccaattcaatcccatcgaaccagcggttcttacagacccaaaaaagcacgacttcaggacgacaaagcaacccagctaccacaacttgtttcaatatcgaacaccaagaag

SEQ ID NO: 14655 - DNA, 192 bp, Zea mays
  Clone ID: LIB3150-081-P2-N2-H12
ggggccaaaacttgggaggtcacaaaatttcataaaggggatttgtattagacaggaagaattacagtgtactccaattgaaaataaattgagagatcaaattataggcatcgctacgtttgaaaaaatgttaacattccaacatttttacttcaccgtccaatccaattccatcgaaccagtggttcttac

SEQ ID NO: 14656 - DNA, 133 bp, Zea mays
  Clone ID: LIB3150-081-P2-N2-H3
aagccaaaaaaaaaattttttgtttaaaaaaaattttttatttttttcctggcaaaataattggggttttaaaaattttaaaatttttttttttaaaaatttaataaaaccccttttaaccttttgcaagttt

SEQ ID NO: 14657 - DNA, 172 bp, Zea mays
  Clone ID: LIB3150-081-P2-N2-H4
attataaaaatggggtttgtttttttaggaaaactaaatattttagtataaacaatacatattcttttctttcacaaaaaagggcattccatggaatacctaaaaatacccctgtcgtcgcccctgttctttttttacaaatattcccacgagcatggagggtttaatactc

SEQ ID NO: 14658 - DNA, 398 bp, Zea mays
  Clone ID: LIB3150-081-P2-N2-H7
ggtggcaggactggcccgaggcgagattttggcgatgctgatgctcacggctttgagggggggtatggtggcggcggcggcggttttggggactgttgagttgtttgctttgtaaatgttgaggtttttattttctattgttgttttatttatttttattcttatttatatttgttatttttatattggtgtcttttttttattttttatctcttttttttattttattttattttcttccatgtgggcgtactttttatatttactttttttttctggtctttttatttcttaattattttttactactttgttttgttttttttttcatgtttaatatattcttattttctttttgtactattctcttatatttttaattattttatttttttatt

SEQ ID NO: 14659 - DNA, 168 bp, Zea mays
  Clone ID: LIB3150-081-P2-N2-H9
tcgcgatctagatggctatctctgatgatccggtcatggcagcttttccatctgtttcggatgttcacttagagcagaaaagttcagatgtatattgtggactaggcatctattatggtggatatgagggattaagctttgatagatggtacagggaatctagtgatg

SEQ ID NO: 14660 - DNA, 132 bp, Zea mays
  Clone ID: LIB3150-082-P1-N1-A7
tcttctctttccgcctcatcccgccgcaaggagaggggtgttcatgagacatctgcggagaacctaaatttcctcctaaagctgctcctgccaagaagggtgttgccaagacccatgccttgaaggttgcca

SEQ ID NO: 14661 - DNA, 137 bp, Zea mays
  Clone ID: LIB3150-082-P1-N1-A8
tcttccttggaccaaccatgacttggaacgtgcggcgtcttaattcgccagcagagaggatcataaaaggaagggaaccaaacaaatatgggcttcttcatcttgatgctctactcgctctacgacgcgaacacttt

SEQ ID NO: 14662 - DNA, 211 bp, Zea mays
  Clone ID: LIB3150-082-P1-N1-B6
tgtatctttttccagagtttagtttccagagccagaagctttataaagacaggagagctacaatcattcatcttaaggcaaccttctgatgcccttccatctaacagcgaacgctttgcaacaaattctgtcaaaatgacttatggaactagaaagacactaatattgcgagagattcctgaaagtgatgtgatatctatacttttcttac

SEQ ID NO: 14663 - DNA, 169 bp, Zea mays
  unsure at all n locations
  Clone ID: LIB3150-082-P1-N1-C1
tcgggatcacccaccacaaaacggcctattggtttttatcccaatccatatatagattggatgagattaagagagtttaaattcttaacaaaaaaaaaaaaaaaaaaaaaaaaaaaaaaaaaaaaaaaaaaaaaaaaaaaaaaaaaaaaaaaaaaaaaaaannnttttt

SEQ ID NO: 14664 - DNA, 240 bp, Zea mays
  Clone ID: LIB3150-082-P1-N1-C5
tgttttttctagtggctgagccattttacaggcgctcctcctccagcacagaggccccttcactcgcactcccattcctgctgaggccgacgcctccatcccctcccatcttcttcgagacaccaagtcccatggctgctgtcctccagccccaagctgtgactcaccccgtatgtgttcaatggaatatgctgttaaatgctactgtttgcttccccgtcccgcatcattatttgcctt

SEQ ID NO: 14665 - DNA, 117 bp, Zea mays
  Clone ID: LIB3150-082-P1-N1-E3
tcgcttacgaaattcaatagcacagcgaagaccgtttttgaagaagatgcgggcgcatctccatgtcggcgttctacagcgtgggccactgccggttctacgtgatcactgtggtct

SEQ ID NO: 14666 - DNA, 84 bp, Zea mays
  Clone ID: LIB3150-082-P1-N1-H7
tcttctcgtcaggagcgacagggagctgcagaggggatttagtcgcaaggatggggcaattgcttccactaggcagttcgtgag

SEQ ID NO: 14667 - DNA, 193 bp, Zea mays
  Clone ID: LIB3150-082-P2-N2-A1
attcagaacaatcatttttcatcgttattatgcttcattttccgattgtaagttaattcaacaagatgatgaattgcaaaatcagaacaaggaacacatcacggcaaacatgccagtgaacatattaggagccacaaggcaaagaggaaattaggctggaacacataagttccacagatctaaacacgaacat

SEQ ID NO: 14668 - DNA, 309 bp, Zea mays
  Clone ID: LIB3150-082-P2-N2-A12
cgcattgcaagcatcgccgaagctaacagaataatgatggcaaaccatgcctcgtacagaacagaggcgacgtcgtccatagttgctgaacaaatatcacggcgacaaaaaattggccggaccggaaaggatacaggggagtgtacacgccgaaccgctcgtaacgtgcctcggtgcctgagtattgcactagttgaagtcaggcttctctgggtaggtacagcctgggcgctggatgataacattggcagcgtagcaaccagccgtcacgcagtcctcgatgctcttgccttggaccagcccagagag

SEQ ID NO: 14669 - DNA, 267 bp, Zea mays
  Clone ID: LIB3150-082-P2-N2-A2
attataataagcaagcggagagatacatctatatttcacaactgggaattcaaatctaagaggtccattacattctcgtcgctccggttttatatgagtatgcaagctagctactagtcgggttgggtgggagaccgttctaattttttttatttaattttctatatgatttcttttttatttatcctatctatttattcttatctttattttatttttatattttttattattatatattatctttattttttattattttttttt

SEQ ID NO: 14670 - DNA, 136 bp, Zea mays
  Clone ID: LIB3150-082-P2-N2-A8
ataaaatattgatattgacaaggaaaatggagactcaaagctttcttgtcactacagattattacagtactccatccctgcaagcatccgcttgatacccggtctggtcttaggtttccatgtaagttgaacaaac

SEQ ID NO: 14671 - DNA, 325 bp, Zea mays
  Clone ID: LIB3150-082-P2-N2-A9
aaggaatagcctaagggatggcattaacatgtttgcactgaagcataaagcgaggtaaaggcgtgcgagttaatacaatacaaaaccataaagcatgaactttagtttacacttcttcttattttggccaattgtatttacaaggtatgacgcttctgttgataactgcacaaagtccacctaattgacaggcgccctttggtacatatcattttgactggaaagttaacaaatggaatacggattcgtttatatccacgttttcccttcaatgcttaggttttttttgttcaatgtataaccgactttgatgatcacatcttct

SEQ ID NO: 14672 - DNA, 181 bp, Zea mays
  Clone ID: LIB3150-082-P2-N2-B1
atataataataatatttattgtgcagtagtaactctatgactgtattaacattctctataataagcaagttcaatactactcttaacccttgtacactaaatcttgtataatttcttttttacgtgttattacattctatctttttactaacaattttgttttcattatttaacctttttc

SEQ ID NO: 14673 - DNA, 53 bp, Zea mays
  Clone ID: LIB3150-082-P2-N2-B11
gaaaaaacaatgggaagacatgttagaaaaaaagggaattgttattttacgaa

SEQ ID NO: 14674 - DNA, 93 bp, Zea mays
  Clone ID: LIB3150-082-P2-N2-B12
ataattaaatttaaaggtgaggcaaatacgtccataatatatttttctttatacaactattcaacaatatggttacatctttacatacaaata

SEQ ID NO: 14675 - DNA, 117 bp, Zea mays
  Clone ID: LIB3150-082-P2-N2-B4
ataaaaaacaagcagaggctccatggtgttcacagatccacacctaaaccgttaaattaaactgttagcgattcttaataaattaatatccacctcttaaattatccaccatcttat

SEQ ID NO: 14676 - DNA, 287 bp, Zea mays
  Clone ID: LIB3150-082-P2-N2-B6
gacagaaaaagcaagcatgataaaattatctaagcaagcatgttgtccacagatatccgctcaagctgcatggcatacgatacatgcttaaaagaaaggggtggttgacaaaaataacactaagtagtcagctccataatggcggtgacgatgtctccattagaagctttgagggccttgaccgccctgggcctcgaaacagatgcctgtgttatcaccagctcgacatccttggccttgacaccagtttcgtcaacctccttcttctcgttgtcctccaggccctg

SEQ ID NO: 14677 - DNA, 98 bp, Zea mays
  Clone ID: LIB3150-082-P2-N2-B8
gacagaaaaagcaagcatgagaaatttatctaagcaagcatgttgtctacagtaatccgttcatgctgcatggcatactattcattcttaaaagaaag

SEQ ID NO: 14678 - DNA, 422 bp, Zea mays
  Clone ID: LIB3150-082-P2-N2-C1
aagatcaattattgtaattattttgcagctggtgtaacatttgccatgacaaaatggaaaaaaacaaaattgtttttgattaaatgaaacaggatcacagctctcaaaacttgagtgtctacatgtgagtctgtgtccatgtatatggtagcagcaggctaaacttatttctgtcaggaacagagggggggaaacgccgctttacagtctcattccatcagcttccatcgaccaaagaaggtagcaccctaactcaatttggtttggtaacctcatgaattgcatttgcttggtaaccaacatttcctgtcgttacaccagccatgcttattcttccattgcgggtcatgtaaatgtggtattcatttgttaaacggtcaacttgttcatgttttattccactgtatcagtacatttcaatt

SEQ ID NO: 14679 - DNA, 294 bp, Zea mays
  Clone ID: LIB3150-082-P2-N2-C10
aaaaaggaaaagcggggtactatgaatattatcatcatcaatgatgtgagcgaggaagcgaggaagcttcacatacaacaaatcgaccgggaattaatgttttagctacaattgctaaataatatatgagctgaacgatcatcagcgccacaaaatggaactcagttcagcaatctgaacactccaatcatcttttccctcaacttcaattgatccccgcaagttccggccaccccttcttggcctaacaaacatggtcgtggttgggctcagggattcagcttcagagaggcc

SEQ ID NO: 14680 - DNA, 394 bp, Zea mays
  Clone ID: LIB3150-082-P2-N2-C11
aacaaaactagtaaccatgtatggctcaccagatgttcggataagtcttaaataacactctggttttaacgaaaataaccattctaaatcgaccaggcaaacgttgcgagcatagttcagacaatgacgtgaacaagacgagatattttatgtttccactaggtttccctcaagcaaacacagaaccagccagacacatcatttcttctttgcggcagccttggtcaccttggctccagttggatccttcttcttcacactcttgatgactccgacagccaccgtttgccttatgtcacggacagcaaagcgaccaagaggaggatattcagaaaaggtctccactaccatgggcttagtgggaaccatttttaccataccagcatcaccattc

SEQ ID NO: 14681 - DNA, 440 bp, Zea mays
  Clone ID: LIB3150-082-P2-N2-C12
gcgcctccccaacgtcgcgccgctctccaagtgccgactccgcctcctcaagctcgagcgggtcaaggactacctcctcatggaggaggagttcgtcgccgcgcaggaacgcctccgtccccaggaagacaaggccgaggaggaccgatccaaggtcgacgacctccgcggcacccccatgagcgtcggatccctcgaggagattatcgacgagagccacgccatcgtctcctcctctgtcggacccgagtactatgtcagcatcctctcctttgtcgacaaggaccagctcgagccgggatgctccatcctcatgcacaataaggttctttctgtagttggtatattgcaagatgaagttgatcctatggtatctgtgatgaaagttgagaaagcacctttggaatcttatgctgacattggtggactagattcccaga

SEQ ID NO: 14682 - DNA, 263 bp, Zea mays
  Clone ID: LIB3150-082-P2-N2-C2
agataacacatgacgcatagcttaaccgatagaacaaacataacggagcacaagacaagcgaataaatctaacgagtctcgtctccagaactctagattaggactgtagctaatgaaagttcgtcaaggctacccactgttccaacaacagcaccagtggcagtgctcaggacatcatgtcataacgtaacattcttaagaaggcaatgacagaaaagatctctcaacttcttcctggactttacaaaaaacgagtaagcgtg

SEQ ID NO: 14683 - DNA, 405 bp, Zea mays
  Clone ID: LIB3150-082-P2-N2-C3
aaaagcaaaactgcctgaggcgcaaatgatatacttcgatataagacattgcacaaacactgtagaactgtcttccaaagtttctaaacacggtctgatggacagaaacatatgaaagtagattcaaaaaaacacaatacgagtgcacaatgctcatcggttcttccacgtcaaactacaggggcaaactcaacagtggataatctacgtcatccgctgggcggcctccttggccagcaacttttccctggccttggtcttggcctgcgacttggagcccatgatgccacctccccacttcttcctgacttcatcaaacttgtcattgaagttcgccttaatagcctccaagatcttgctgaactcaagcttgtccttgttcttgacagtggtcagacacaagac

SEQ ID NO: 14684 - DNA, 403 bp, Zea mays
  Clone ID: LIB3150-082-P2-N2-C5
aaccattaaaatacagagtccgtgagcacggtatttatagacaacttcgatcaaaacagctgttcacatcccttttgcaatcccctactaccttgtgagttcctagcagttatttttttctctggaacgagcagaagaactgcacatcattctattaaggaggaaaaaaaggtccaaaatgaaatatctcattctcaatctcaaatttagtgctttggagaaaaacttaaagcatggtgctccggaagggcggaaactagccttggtgatagcagcaggacaaatgccaagattgagccaaacagcatcttggtgaggtaatgcgtcaggtccatgctgggaatcgatgtcgtcaggctttctggtcgcgagcgcttaagcagagggcagggcttttacgaca

SEQ ID NO: 14685 - DNA, 405 bp, Zea mays
  unsure at all n locations
  Clone ID: LIB3150-082-P2-N2-C7
tngatcngagggtggtattttttttgttnattttattttaattgttcattaaatatatttatttatattttagatttttgtatagtatatatttttttttttttttttattttttatattatttttattttattttattttatatttttttttattttattttttttttttttttttatttatttttaatttttattaattttttttttttttttatttaatttttcttttttttttatttttttatatttttttttttatatttatatttttttatttttttatttttttttttttttttaaatttttaataatttttttttttttttttatgtttttttttttttatttttatttaatttttattttaaatttatttagaattttttaatttttattttaatt

SEQ ID NO: 14686 - DNA, 266 bp, Zea mays
  Clone ID: LIB3150-082-P2-N2-D10
agcaaaagtaaatgggtcctttagcacactagacaacaagagtgacaacacttggagtccatcgatacatgttgatacagatagttaatatcattcaatctcgtactgcaataagacactgatggtactagaacagtggacaaatgttaagaaaagaagagctcctgacttcatttgcaattctttaacagcatagcaattttattcaggctttgcattatggagagcgtgagctagatgggttcctgattgggctatgttttttg

SEQ ID NO: 14687 - DNA, 226 bp, Zea mays
  Clone ID: LIB3150-082-P2-N2-D11
gatgcaaatagctcactactggctttgagaggtaaaacattaccaaatccaatggttcataggtacggaaaattcaaatctctaggcatgagcagtagcccgtatacaaatgaatacatgacaggcattctctgaatgaactagttaagaccccacattagagcctcacgccattttaacttcatacaacatctgtctccacatgctacttaagaccctaggacta

SEQ ID NO: 14688 - DNA, 575 bp, Zea mays
  unsure at all n locations
  Clone ID: LIB3150-082-P2-N2-D4
ataaaattaaagccgatacttcaatataccgtagcttctatctctcttnatattattaattaaacaataaatatataataaaaatttataaatataattctattattattaaaattcttaaacttaatttacttttcatatattaatatatatataatataatataatatatattttatatatcatattaaaaattttttaaatatatttaataattattatatctatatatatattataattcatattattatatatatatatacatatttattatattaataaaatatatattattatcatttaatattaataatatatacttataatataataaaattatatatttattatattatatttatttataatcaaataataattattcataaaaataatatatataatttatatatacaatattaaatttattataaatatatattacttattttatatatatattttaattaatatattatattattatttaaataatattatttattatatattatatatataatattaaatcaatattcttatattatattacaaatacatatatatattta

SEQ ID NO: 14689 - DNA, 207 bp, Zea mays
  Clone ID: LIB3150-082-P2-N2-D9
gaaaagacacagcgcattcaaaaggaactgtcggctgagataggcgcgcctgggaaggagccctcctttgcctagtcacacctttttaaatttaccctacttatgcgactacgcaggctgtaggatcttgtttattgtggtgtttagtctgttttattaactttattagatttatttttgtttttattttggtatttttttatatat

SEQ ID NO: 14690 - DNA, 92 bp, Zea mays
  Clone ID: LIB3150-082-P2-N2-E11
ggagcgaaaaaaagggctaggggcaaaacttttgaaatagtatgtccgataaaagtttaacgattaacaaccactactatactctcctttat

SEQ ID NO: 14691 - DNA, 178 bp, Zea mays
  Clone ID: LIB3150-082-P2-N2-E12
acatagaactggggccattcattcattcttttatttatttcattcattcatttcacccatgacaaatattatctcttcttatttcccacaacatttactggacattgtcatgatgttcagattagaagaatggcgcacgttggggaattcccttgcgtctgtgacgagcaaccctttt

SEQ ID NO: 14692 - DNA, 68 bp, Zea mays
  Clone ID: LIB3150-082-P2-N2-E5
gaaagctggcacgcccgcaggtacccgatccggaactcccggttcggaccgacctctttttttttaca

SEQ ID NO: 14693 - DNA, 112 bp, Zea mays
  Clone ID: LIB3150-082-P2-N2-E8
attattatcaggaggatactcctacaggctgaactaactatcaagtttccacttacattctatatcatcttcaattaagctaaatgtgcttgatcaaataataatatcattt

SEQ ID NO: 14694 - DNA, 133 bp, Zea mays
  Clone ID: LIB3150-082-P2-N2-E9
aattattatcattagggcaggaccagcaagaattcctgatccattaaaatcagtctaggcaaacgatcatttcaatgagtgtttaccactactagtcagaatttagagagattgaaaaaaaaacatttctttt

SEQ ID NO: 14695 - DNA, 70 bp, Zea mays
  Clone ID: LIB3150-082-P2-N2-F1
atgaacgcatgaatctgtggattaatattcactcatcctgcttttagtttaacggataagaaccaatcat

SEQ ID NO: 14696 - DNA, 290 bp, Zea mays
  Clone ID: LIB3150-082-P2-N2-F11
aatgaataacataagggtgtttttgtcttccggcagaagtcaattctctatcaatctgcatttaattacattcggatgtatcaggattccattgaacataatttattatcctttgttgttatcctttatttaaactttgttgaccttttatggtattataaagttcaaattctttgttttcttgttaaattgggttgttattcttgataatcaaaaatttttatgtttggtaaagttttatattattttatatcacttacttttattttttttaaatcgagttttttttt

SEQ ID NO: 14697 - DNA, 319 bp, Zea mays
  Clone ID: LIB3150-082-P2-N2-F12
atgttattatttttttttattttttttattttttttaaaatttatttattttttatttttttaatttttattttttttttttttttttttttttttttatttttttttttttttttattatattttttttttattttttttttttttttttttttttttttatttttttttttttttttttttttttttttttttttttataatatttttatttttattttatttttttttttatttaattatttttttttttttttatattttatttttttattttttttttttatatattttttttatttttttaattatattttat

SEQ ID NO: 14698 - DNA, 331 bp, Zea mays
  Clone ID: LIB3150-082-P2-N2-F2
ataaaataatatattatttttatttgtgtgtttttttaaaatactcggtttgtttttcttaaatttttgattagttcatttatttattttttaatttttttattaattttattttattttttttttatttttatattttttattttttatttttaattatttttttttttattaattttttatattttttttttttttttttaattttttttaatttaatttgtatatttaattatttatatattatttttttaattttttttttattttttatattattttattatttttattttttttttttttattttttttatttttttttaattta

SEQ ID NO: 14699 - DNA, 185 bp, Zea mays
  Clone ID: LIB3150-082-P2-N2-G1
gcaaaatcgactctatttagtaagaatcaatgtgttctcttttgagatacttttattttgcaaattgcaatggacaacgacacctcagcgatcgttcgctggaaaagaatagagaatcaatttctggaaacaaggagttgatcccgccgactaggaagatacgctaggtctggactgcacgctcg

SEQ ID NO: 14700 - DNA, 242 bp, Zea mays
  Clone ID: LIB3150-082-P2-N2-G10
gtcgaacaaaacatatcatacaaatccacggggggttttgttagttccaaatttccgaataccagtcactttacccacagcagtttggatgttaaagcttattccacgtcttatctagctaaacacggttgctagcctttcctcaatagtccatttgctgatttgataactttatcctttctagtgttacaccaaggttttaaacttgttgacatgcaattgcttgctgattttttttttgt

SEQ ID NO: 14701 - DNA, 216 bp, Zea mays
  Clone ID: LIB3150-082-P2-N2-G11
gtaaaactaaaatttttatttctccttgatggagacaagacaactgttgctcctgtgaagaaggacctaagcctttctaacactgcctctttctgcgctgtcactgagcttttttacagttctactgaactctcaacttaacttacacacagtgtaacatttttgtcttgtttcttggtctagtacgccttattgtaagccctttagtggttgatc

SEQ ID NO: 14702 - DNA, 467 bp, Zea mays
  Clone ID: LIB3150-082-P2-N2-G2
aaagcagcataaaagtctagatcgaacttttatatttacaatttttttatatttattacttaatctataaaaagtaattttcttttaagttctgttttttgttaaaatcttactactttttattacattaaatcttcaatatttaatatttgtaaaattttcttttattatttatatattcacattttaatactctattttatttagtactttcttattgtataaacttatatatgaatttattattttataatttatatttatattttatattaatatatagcatcttaattatttttttaaatattttaaatatatttactatcatttttcttttttatcaatttatttaatttacaaatttaataaattaatataatttattatattacttatatttttttatttattatttgattaattatattatttttcatatattttctatacatatattaatttttttt

SEQ ID NO: 14703 - DNA, 82 bp, Zea mays
  Clone ID: LIB3150-082-P2-N2-G5
acacggaaattttggttaggatatctgattcaacttctactaatccattacatcatgaaacttatataagtaaaattaattt

SEQ ID NO: 14704 - DNA, 291 bp, Zea mays
  Clone ID: LIB3150-082-P2-N2-G6
tcggctcgcccttttttttcttatattaaattaatagaaaaactttaatttgttttttttttttttaattaatatttttttcttctttttttttttttttttattttttattaattattttttttttttttatttttatgtttattttttttttttttttttttttttttttatttaattattttatatttttttttttttttttattttttttttttttttatttttttttattatttttattttattttttttttttttttcttttttttttattttttattaattttt

SEQ ID NO: 14705 - DNA, 188 bp, Zea mays
  Clone ID: LIB3150-082-P2-N2-G8
aatcaaatgataagagcacaatcaacactttggtaacacttctgcccatgcagtgacactttattgtttggcatttacattacgaacatgtgataaggtaatgaggagcagattgggagcactttattttgaaaggttgctacacatttgacatgtgataattttctataaaccttctttgttacatt

SEQ ID NO: 14706 - DNA, 412 bp, Zea mays
  Clone ID: LIB3150-082-P2-N2-H10
ggggtaactggtgagaacataaattaaacgtacacattctggatctagcaccaacaccactttacagcgctgtgttgagcgcgcagctagcctcgtagtagtagtagttatactagcagatcgatgttcagcagcctcgcaattacagtagtttattcaggcatgcatcggcggtgggcatttggtgcttgcattggcaaactgaaaaaagaggtaggtagctagctctggacggaggtctggtctcacggcctgaagaaggccgggtggggacggccggtgccctggaaggaggtgttcttgaggtgctcaggggcttgctcgaacgagtggcgcctcgccagcgacaggatcttcttgttggcggcgatgaagtaggccattccagccaccgtggagacgattagcgcct

SEQ ID NO: 14707 - DNA, 411 bp, Zea mays
  Clone ID: LIB3150-082-P2-N2-H11
gggaatacaaatatatcactcacaccaaaaacggaggttacaaacacaacagtttaagcacgaagctaagcttctaaaaaaacaagacgactatagttttagcaaaagcatggttttcaaaactacaaggttgtgacgtccaaacaccttagcattcgaaaaccaaaatatttaaaaaatcatggtatatactatgcatccgaatagggccataaacattggtctctttttctattgtataacccctttcatgaaactatattgcaaggtgatttaccaatgtcgcaacttactcttcatcaaatcttcttgtgtaacctgtgttaattttgtgaatcgaagcaacaagaaaattgtttcacagccatattctatcactttagttaattttccctgacaaagcttgccatg

SEQ ID NO: 14708 - DNA, 272 bp, Zea mays
  Clone ID: LIB3150-082-P2-N2-H12
atattattatttttaatataatatattttttatttttaaaaataattattttatattatgtttataaaaataatttttttttttttatattttatttttaattatttttattttaaaaatttattattatatgtatttttattattttaaattattatttttttatatttatttataaatattatgatttatttttataatatttttttatataaaattttttttttttgtatttttatttttatttataatttattatatattattttttt

SEQ ID NO: 14709 - DNA, 220 bp, Zea mays
  unsure at all n locations
  Clone ID: LIB3150-082-P2-N2-H2
agctccgacataacatattcataggaccaaaataaccaatncaaggcaattaaatccaccccctagttcagctaattatagatcaacacctaaaattccaataaagtaaacaaagtaattgcattcttatagataggtattaagcaaaaattgccagcaatttcctgtatcattataaacatacatcttgagaggactccatcatacatttgatagatta

SEQ ID NO: 14710 - DNA, 209 bp, Zea mays
  Clone ID: LIB3150-082-P2-N2-H7
attaaaaaattttttttttattttttttttattttttttaaaattatttttttatttataattttattttaaaaatattttttttaatgtaaatttttaaatttttaaatggggaataaaaaaattgtataaatttttaatagtttttattttattatattaaagagtgtttattattatttaaattaatattatttaattaattttat

SEQ ID NO: 14711 - DNA, 310 bp, Zea mays
  Clone ID: LIB3150-082-P2-N2-H8
cagccatacagactttccagcatttaggaacacaaaatcaacgctgcgagatggagtttttccaaacttacaacggtttgtttcatgcggtactgcagagtcgaaacaattatttcaccaaatggctgcacagataaaatttaaggcatgttctctctatattggtattatatcaaattcaaaaggtccccaattccaagaatctacaggggcctcgtttttttcagaaagggtagttgagggggtcgcgctgcagcgcctttttcaccagcttcgtttgttcctgcacgtgctccgagttgaagccctg

SEQ ID NO: 14712 - DNA, 281 bp, Zea mays
  Clone ID: LIB3150-083-P1-N1-A2
acctcttcaacatcaacgccggcatcgttaaggggctctgcactgccatcgccagagcactgccccaacgctcttgtcaatatgatcagcaaccctgttaactccactgtcccgattgcggcggaggttttcaagaaggctggtacttatgatgcgaagaagctgtttggtgtgactactcttgatgttgttcgtgctaaaactttttatgcttgaaaagcgggtgtgccagttactgaagtgaacgtatctgttgttggaggccatgccggtattactat

SEQ ID NO: 14713 - DNA, 154 bp, Zea mays
  unsure at all n locations
  Clone ID: LIB3150-083-P1-N1-B11
tgtttctggccatatacaactgctgggtccgtgtgaaactgaatggggtgcgtgtnctcctccattggttgtagcatctggagtggatgagcgtacacttaagtgagaaggttgtttgtgtttccatttttttcttctcttttaaatttttttt

SEQ ID NO: 14714 - DNA, 208 bp, Zea mays
  Clone ID: LIB3150-083-P1-N1-B8
tctttctttacacataaatccaccaatacgggggcgtatattacccatacgagagtttaccatccattcaccatattcaagaactcactttattttcctatccatctcaaccattaatccttccttaacatatgtcccctatttcccaaatcaattttatcttaaactctttatctaattttttaatcaatctttctatcccatattt

SEQ ID NO: 14715 - DNA, 111 bp, Zea mays
  Clone ID: LIB3150-083-P1-N1-C7
tctgtacacatccatgcaggtgttcgggggcgtgttttacccatacgggagagttctttccactcactattttttcgcattcactgatgtcgctgtcctgctcaacatttt

SEQ ID NO: 14716 - DNA, 90 bp, Zea mays
  Clone ID: LIB3150-083-P1-N1-D8
tttacatatcaatccacgtgtactggggcgtttattactcataaaagggagtttcctcccaatcaaaattttttatgtactcaccttatt

SEQ ID NO: 14717 - DNA, 152 bp, Zea mays
  unsure at all n locations
  Clone ID: LIB3150-083-P1-N1-E3
tttcatcatcaaaccacctgtacacattctgacggtgcttctttaaaaaagggttttccatacaatatcattcttnttcacatttattattattatttcccttcttccctttccactttttctatcattttttaatattatttttttttttt

SEQ ID NO: 14718 - DNA, 133 bp, Zea mays
  Clone ID: LIB3150-083-P1-N1-E7
tcttcctggttatttcactccaacaaaactggggcgttttttactaataagggggggttcaaaccaatcaaaattttttcataacttactaatttcattttcttttttaattatttaacccttctaaatatta

SEQ ID NO: 14719 - DNA, 91 bp, Zea mays
  Clone ID: LIB3150-083-P1-N1-F7
tctttctgtttatattaccccaaaatctccgggtctttttatttaaataaagggggggacaattaaacaaaatttatattttactcactta

SEQ ID NO: 14720 - DNA, 123 bp, Zea mays
  Clone ID: LIB3150-083-P1-N1-F8
tctttcttttatatctcaccatcaaatccccggggcggttattttataaagatgggggggctacctaacaaaattctataaattactcttctatatcaattccaatctttacctcaattttat

SEQ ID NO: 14721 - DNA, 388 bp, Zea mays
  Clone ID: LIB3150-083-P1-N1-G11
tttttctcctaatcccaccagcaaatccccaggtgcgcctatttcgagcgagcgtgtggctacctttcaaggtccttaagattctggtcaaaggcggtgccaatctttactccaaggtttttcgtgacaacatccatttcattactaatctctctatcacttttctttcttataggtgtttcttaaatctcatatcttttcatatctactaatttactattttttatcttttagattttttattatttctttattttttactatttttacatattcgaggttggtgtattttatatatttttttttaattttatatttttttttatatttattaaaaattttttttatatattttttaatttttttataatattctttatatttattt

SEQ ID NO: 14722 - DNA, 340 bp, Zea mays
  Clone ID: LIB3150-083-P2-N2-A10
gatcatcgggaggaatcatgttaaccaacgcatgcaaccgattttatagctcatcttttacagcgaatgccaaaaagttttggttccccagtcttacatccaagcattcaaccaaccttcatagaatcacacttcggtgcaatatcaatcaagcggctctctatgaatagcacgggcgtcctattatgaagagactaaacagtatttgcaactggagcgtcatgattggcgccccattcggtccacgatccggcataaattgcgacatctgttttgccaattcaatgaaggcccaaggctaatacacatgctgtcacaccagtgtcacaagaggtaacaa

SEQ ID NO: 14723 - DNA, 357 bp, Zea mays
  unsure at all n locations
  Clone ID: LIB3150-083-P2-N2-A12
gggcgctgacctcgaaggcctcctccacgtcccgctgcgagaagccgaagcggtgggtgatgagcggcttgacgtccaccttgccgctgcgcaggaagtcgatgcacagcggccaggtgtccttgtaccggaacacgcccaccacgtncacctnccgcgccgccgccgacgtcagcggcagcgtcatctcgttgtggcccattcccgaccaggcacacctttccgccgggccgggttggcttcaacgccgtctacattgtcttgcttaacccggcgcaatccaagctgacgttgatgttcgagcccatggccccgcggatgcgctccaacctgtttcggcaggtttcttctttgcgg

SEQ ID NO: 14724 - DNA, 164 bp, Zea mays
  Clone ID: LIB3150-083-P2-N2-A2
cactaccaacatcagaggcgcgggcttgcggtcaaaaacccagttgggcacccccccccccgaacccgaacccaactttttggccccgggacgcccccagccaaaaataaccccccttttacctggggggaccccccggcccaaagccaacaaaattactaggc

SEQ ID NO: 14725 - DNA, 286 bp, Zea mays
  Clone ID: LIB3150-083-P2-N2-A3
aaggatagaacacgaaaacaaaattaagctcaggagccaggaccacatcaactcagtaacagaggtaccaatataataagacagaaactactgctgcatttatgttccaacctcaaacagatctaaatgatattcaaatcgagtaaccaacaggtgaatgcttgataggtaggcgggtgaagcaaagcggcgcatgggattacgccttctgattgtagacgtaggtgaggccgcacttgccgcagtagtggcggtcgaagtggttggccatgaagacacccgcacc

SEQ ID NO: 14726 - DNA, 377 bp, Zea mays
  Clone ID: LIB3150-083-P2-N2-A4
aggtcatacaatcataagcactgcagatcacataaccaagacatttttgatccgatgtatagaagacatccgccactacaaaattattaaaccaaatccttcaaattcgcccagaaagcatgatccaccttcttcaactcgatctcggacatatgtaagcaaatgaagtaccagctacaaactactacggaccgacctcatccgggccctgtcatgatccgatcagacgggggagaggagctggaagacggagggcttgggctcggagttcatgccgatgacgatgacgagggggatgaagccgtagtgcgccaccaccttcgccttcttcatcgtccacgtgggccactccttcatgagcctcaccgtggtcgccg

SEQ ID NO: 14727 - DNA, 322 bp, Zea mays
  unsure at all n locations
  Clone ID: LIB3150-083-P2-N2-A6
aaactgagaattaaaaagcaaatattatttccattaagacagcagacaaccattacagaggcaggaatgcaagataaacaatcaggttacccagcaactgaacaactttttatccctaaaattctaagaacaagcacaatggtaccaagatgccactgccaccagaaaggaaaccaagagaagcacaagtcctacaagcaggcccgaagcaacaacgacgccgcctgtggtgagaggagcttgccttgctcaggcccttnttccctgatgcggcgcgcgagctggatgtccttgggcatgatggtgacacgcttggcgtgga

SEQ ID NO: 14728 - DNA, 372 bp, Zea mays
  Clone ID: LIB3150-083-P2-N2-A8
gggaacagaatacattaaatacacacggccacatcatcattgtcctagtttacctcgtttttattatagattcagcgcaaccaatctactaacacaaccctaagtccatgacaactctgaatagcctgaccatgcaaaagcccaaacacagcagattcgatcccagggcactggaacacgcattattacaaggcaggatgcaattgcagagtttatttcagattcttgttgaaccagtcgagcatgtccggaaaggctttcttagcactcttcacggcagctgcgttgtcgtggttggattttaagcttcattcatgccccacaacaagggagatcttggccaaatgggccacccctggagttaaaagaagg

SEQ ID NO: 14729 - DNA, 153 bp, Zea mays
  Clone ID: LIB3150-083-P2-N2-B10
aacaatatcgtcatcatcatcgtcaccgttcattcatcagataaacaaatggtggtggtggtagtactgtgatacaggagagaagcagcagcagcagcaaactatgggcggatgctcctagatgactagcatatatggatgcggtgcgcggca

SEQ ID NO: 14730 - DNA, 236 bp, Zea mays
  Clone ID: LIB3150-083-P2-N2-B11
gagaaggtacatgcttcatatttaccaatataagaacatggtagtctgttgtctcggtgtattaaattatgttacatgaaaattgacaaacagaagcaaattcttaagccaaaactgcatacattccactggatcctttagatccgcaacaacccaattatttacatgcaacttttttttccactagctttcatatgtgaagagcggtcatacggagttttccgcttgtatggacc

SEQ ID NO: 14731 - DNA, 370 bp, Zea mays
  Clone ID: LIB3150-083-P2-N2-B12
ggagataagagtgacacgctgacaagcaaaggtgaaccaggttttacagattgatcaagaaaagcaacagacgtagtaagtaccattcttagcgaacttatctgatcaatatcaaggtgagtaacttctttcatcgaattattaaatccatcatcggttccctttgatgactgatttctttccaaaacattaataacttcctgctgaatattatctctcctggaaatggtaggggaacctgcaggcccactcttaattttgttttacttgatttccttttcactactagaaaatattggtaatgcatccattttttagggaataactggtaataatctttggggaattaagttttatttgttactttttt

SEQ ID NO: 14732 - DNA, 402 bp, Zea mays
  Clone ID: LIB3150-083-P2-N2-B2
aaagagagagaaaaggattttattacaggatcgaagagtgttgttacacccaggctcgcctttaactatacacatacttttcttataagcttttacagccagtaaacgtcatacttatatgttgtattgacgtatctactattgcatcagcagaagattattcacagtcgcgtttatgttgtttgtcctcatcaaatcctctataattagctcgtcaggaatatgaggtagaacttcccgcaccctatctaccatagtgagtacctctgaaagacttccattgcctgtgcctgcactaccacggagccgcaatccggaagcaaatgcactaccaggcaccatcgaggaagtgggtggaacaagagaggaccctgccatgggcttgggccataggtttcaggt

SEQ ID NO: 14733 - DNA, 351 bp, Zea mays
  Clone ID: LIB3150-083-P2-N2-B4
ggcttaaaaaggcgatacatgcgtattaagtgtttaaaagtccagcctcgccataaaaaatgtatttggcaaactatccaatctacgcacatgcaacatcgcaccacgtacgtcaacgtgagtttttatacttcatgcagggttgtttggacttcagatgtacactaaatatctataccttaccagtggagactaccatctaaaacctgtttattctgggatgctttatctatagagcttctttgttgtcaagcttttttcatgttgacgtaattgatatttggattgctatttaaagactgatttgacaacatacaacccggttagttggaccctattttttttttcttg

SEQ ID NO: 14734 - DNA, 214 bp, Zea mays
  Clone ID: LIB3150-083-P2-N2-B5
agtgaaaagttcgattatgcataggcaataaactaattacctggcatctcaaaatatttaggttatagagtattaaacactttaactaccaattgtgacacatactaacctggaaaaaaactatcattggtgctcagttcttttattagagtacactgcatatatcagatgtttaaaactaaacatggttcacgtttaattattcaataaaata

SEQ ID NO: 14735 - DNA, 400 bp, Zea mays
  Clone ID: LIB3150-083-P2-N2-B6
agtgaaaagttcgattatgcatagccaataaactaattccctggcgtcgccagctgtttagttttatagagtatcaaacactacaacgaccaattgggacacaactaacctggaaaaaaactatcatcggagttcagttcttttactagtgtacactgcaaataacagaagttaaaaacaaacaattgtacacgttttatgtagctaaactctctaacaaaagccctggatgcgttgctgtaacttttatcttccgataaccatctaaaactttgctccaggagaagtggaagacggatgagatttactgacgtgattcaacaatgcttcagagctcaattttgcttttgctggatttggcaggcttctttggccctttccaacatttctttaccatacc

SEQ ID NO: 14736 - DNA, 310 bp, Zea mays
  Clone ID: LIB3150-083-P2-N2-B7
ggacatcaatttacctctgttcattctgccagaattctcatgcatggatctcaagagaggatatgtagcatcagcatacaattaaaactggaaatcatacgctggacatattggtcaagtacaacgcgatgaaaatggctgaaggattacataaatctaactgttgtaaaactaggcagaacagcatcatattcccaagggagcagcacagagagcatgcagagctccaggcgtagaaccgtgcccaaacaagtctagcacccggggagtttgacggtccaacttcgaattcccttctttcacaccacca

SEQ ID NO: 14737 - DNA, 335 bp, Zea mays
  Clone ID: LIB3150-083-P2-N2-B8
gacataagaaattatagattcaaggtgtactgacaggtatgcacaaaaccatcgaatgaacatgtgctacaagtagccacaagtaactccaaattttctcaacaaacgtaactctccatcatgactggcttcacttgttccctctgaagtacatgtacactttctgaagaaccccaatgctcagcagtgtctccagacaaaacagtgcaaaccccacaaagtaaaagatcccaattatcacatgttcagagaaagtgtcaatcgcagccagaataccagttaatgatttcccatggaatacaattggtggagcaatggcagcaattatgcaaaaa

SEQ ID NO: 14738 - DNA, 294 bp, Zea mays
  Clone ID: LIB3150-083-P2-N2-B9
agaacaaaccttgagaggtgaggtctcaatgcaagatctcatatcataccgcggcagacatttcagaactcaacagcattattacgcagaattgtctataactcatcgagcgagtaagttgcttccatacaatacaagaacaagggtagatttgcccaaaacacatgtccatattattacatcaactaggccaacaacacaacgattacgttaagttttcgaaaattaccttcgacacttccccgggtctttctttaaacccaactctaattccaggccactccgaaactacac

SEQ ID NO: 14739 - DNA, 321 bp, Zea mays
  Clone ID: LIB3150-083-P2-N2-C1
gaacatccatcaattcagtaggactccaagaccaaacattcgaagtacacacgaacaatatacctgagagccccaggactagacacgaagaagtattcatggcaatacgaaaagagacatggcttggagtgtgtccatacaagaaaccgacgggcaccattcgggacgccgaccatctagaagcggagcttggtaaagaaccacctgttcttgccggtcttgaacctctcctcgaggcgcgccttggcggccttgcaggcggcgaccttcttgtcgcgggtggagagcgcgttgggcccgccggtggccaacgtcttgaag

SEQ ID NO: 14740 - DNA, 306 bp, Zea mays
  Clone ID: LIB3150-083-P2-N2-C10
ctacaggcaaatggttaagcaattccgattcgtcatctggaacattttttccagagaacattgatatgaactaatctgaattattaccaaatgtctctaaacaacaaagaaaagaaaagagtcccacagaatagaatagacaatagaatgaaaaaacaaacaaatccgacgaagaaaactatagtggcaactgggttcaggcgcgagtggcccatgaagcttcaacggtgggcccaactgggtctgtgaatgtaggtggtacatttcattgcactgcgtcgcttatttggaatgaactttattgat

SEQ ID NO: 14741 - DNA, 352 bp, Zea mays
  Clone ID: LIB3150-083-P2-N2-C11
aaagactcccttgcggagggtggcgcacgacaccaggtcgtgcttcgtgtagtagcctagatacttggtgtgctttgcgttcctcaccgatcctcctatgaggcaggcttctgcgatgagaaacgttgcccaggagaggacgaatgcggtgacggcgcagccgcgggaggagagcacggggccgaagcaaaggcaacgcgtggcggcggtgacaatggcctgctggagcagcagcacgaagaaagcggaaacgccgtagactgtggaggcgtcggtgtcgtagaggcagtaggaccgctcgtcgtactcgtccggcaccaccttcccggtgctgcgggggcgctcggcgccg

SEQ ID NO: 14742 - DNA, 289 bp, Zea mays
  unsure at all n locations
  Clone ID: LIB3150-083-P2-N2-C12
aaaagcgcgacttcttttttcacataaaattcgaatccgaatcctgaacaaccaaggaagtagaagaaaaaaaattacaaacaaacagtttctacgctcagcacggctattggcagagcagcaccaagattagtaataagtattgtccgccgctaaacaccgttacaaaatttggctcggctcccggcactccacgtnaccaccaccatcgtccatctacaaccatctacagctcgtcgtggtcgtcgtcaacaccgccgtcagcgtcaccgccaggggccgccgccga

SEQ ID NO: 14743 - DNA, 56 bp, Zea mays
  Clone ID: LIB3150-083-P2-N2-C2
aatggtgggtttttttagtggtttttttttttttatttttttttttgtgttttttt

SEQ ID NO: 14744 - DNA, 303 bp, Zea mays
  Clone ID: LIB3150-083-P2-N2-C3
aaattaaaaaatttttttaaaaattaaaaaaactttttaaaaaaaaaaaattgttttaaaaagtttgaaataaaggggataaaaaaaaaattttttttaaaaaaaggttttttttaaaaaaattaaaccccgaaattaatttaaaaatttatgtaccaggagaaaaaactattttaattttaaaattttaaacctttgggggcggggggcctttaaaaagctttgggcatatatttcgagtttttaaaatttttgggggtttatatttttttttttttttaaaaaaagtgaaacagaaaattt

SEQ ID NO: 14745 - DNA, 340 bp, Zea mays
  Clone ID: LIB3150-083-P2-N2-C4
attggaaaattgaggagcattactgtattaccgatctcgtgatttacgtatcgaaacggcagcgacaattcccaagaagaagaggaggagaaagataacaggggcaagaaagagccaaaaaaaaaagccggtggataattaatgctgcgggtcgtctattatgattggaatgaggatgcggccggcggcgccgtcggtggcggtggtggggcaggccaggccagggcatgttttcacttgacgcggcggcagagggtgacgccgtcgccgacggggagctggcagatctcgacgcggtcgtcggcggcgagcgccttgttgaggacgagcacgaagtctc

SEQ ID NO: 14746 - DNA, 342 bp, Zea mays
  Clone ID: LIB3150-083-P2-N2-C5
aactggggagcatttcaagtagctccaggcaaagcaataagacaaaaaaaaaaagtacaaggaaaaaaggtactaaaatagtttctttggctacatgcaagtatggatcctctaaaacgcaaaatgagcaccatcacacttttaccaaccttctgtttaatttcaaatggacctgcaggtctccattccgacgttaggtagatccagttattctccgcccccgcctcagaggtcactcgcagtcccgcaccagacaatacatcaacggaggtggtgcccccatcgcatagcagccgccaccaacgctgccaccgcctttaggacgtgcttgggctattgatc

SEQ ID NO: 14747 - DNA, 345 bp, Zea mays
  Clone ID: LIB3150-083-P2-N2-C6
aagataaatagtcacattacagctagctgcaaaaatcgttcatgaattataagcatcaggcagacttaaaaacatggtagtcttagaacattgttctatatccttgcagagcaactagaaaaaactctcaacacagcacattcagaggatttatgcgttggcagcagcctgggcagcggcatcccgcttcctttgctcttctatgatgctcagcttgattcccttgcccttgggcaggctcacccacggcttattacccttgccgatggtgaacacgttgcccatacgggtggcgaactggtggcccagggagtcctccacgtgaatggtctcaaagctgccctt

SEQ ID NO: 14748 - DNA, 329 bp, Zea mays
  Clone ID: LIB3150-083-P2-N2-C7
cctaaaatcaaattaacaatgccaaaaggttaacatatagctcttacagcattcttgtattgcagaaggtgaaatagcaagaaggtaccaaataaatagataaaagtgcacaggctaacagagctcaacagttcacacaataacagcaacgaccacaaacaaaacttgtaatgatgaaaactaggtattgctaaagcaggcgcaggatcgcatcatttcttcttggcagcagccttggtcaccttggcgccggttgggtccttcttctccacactctggataactccaacaagaaccgtctggctcatgtcacggacagcaaacctacc

SEQ ID NO: 14749 - DNA, 357 bp, Zea mays
  Clone ID: LIB3150-083-P2-N2-D10
aaattattattttttttttaatattaataatttttatatattttattttttatttagggggaaaaaaaaaaaactaaatttttaaaaaaaatttagagggaaaattataaatttaaaacaacactctgagaaaaacaatttatttaaaaacaaaataactgacaaaaaaaaagtctaaatataaaaaaggaaaaaagtcaaaaaaacaaaaaaattatattaaaaaatcatttcttaattaataaatttaacaaaaagtaaatataaataaaataatatttctaaaaaaataaataataattattataaaaaaaacattgatttaaattttaaaaaatttaaaaaacttattatttt

SEQ ID NO: 14750 - DNA, 243 bp, Zea mays
  Clone ID: LIB3150-083-P2-N2-D11
gatcaacaacaaagtgttgatgattcacaaataaacaagtccttgctgggttacatgacgcagttcctacagaagcagagcagcgccgacagagaaaccagcaacatttaactacaacacaaggcgaacatcaacacaagagaagcctacaaagggcgagcgtgcaagcctaggaggaggtgaacttggtgacggccttggtgccctcagagactgcgtgcttggcgagctcgccggggagca

SEQ ID NO: 14751 - DNA, 299 bp, Zea mays
  Clone ID: LIB3150-083-P2-N2-D12
ccagaacccaagcaatttgtttaaacagaaaaaaaactcactgaatcctggtacataccggacattacatatgcaagtaaacacaagtgttcctatgaagcaacagctttagacataaatcaccagactgggaaaaaaagttcaaagcaaatgacagttgcagcacaactgaagggttggcttaatcctttctcaggtcgatatactcgcgcatagtaccggccttgttaatgactacaatttccaacttgtctccagggtagatgtttttttaagttgcagatgcgaacacgttctta

SEQ ID NO: 14752 - DNA, 257 bp, Zea mays
  Clone ID: LIB3150-083-P2-N2-D2
gaagtcgtaaaatgaaggccctgcacaagcagcaggtccgcgtgtgaaaaacagtagcgccctaatgtgaagcatgctcgaagctcaaagccaaaaaaaaaaaagataagagcttccgaacaaatgttttgacccatacattatctacgcaagaaacccatggcttggtaaacattgatcagggtgatgtctgctatttaaacagctgttactggtccttttaaaaggacattacccaagtaggctggatcaaacat

SEQ ID NO: 14753 - DNA, 315 bp, Zea mays
  Clone ID: LIB3150-083-P2-N2-D3
agccttaaataaggaataaaaaacagttattcatgtgccttagccttaaacatgaacaaacgaaaaacagttatgccctgaaacttattttgtgcttttgttgggggttttaactccactgtagctttagaactaagctgacttaattgttgctgctaaagcagatgagaacgacaatatacagcggagtcaaatatatttgactggcacaacccgattctaatttcagcatgttcggtgcatcagaacctacaaggaatgctctccaacttcaccattagtttacagctggagaattgtacaagagtccagatt

SEQ ID NO: 14754 - DNA, 316 bp, Zea mays
  Clone ID: LIB3150-083-P2-N2-D4
gtggaaaaaacaaccacataaaattgcaacagaattgaacatatccaaacatagcagttatgtaaaggctgataataccacaagataaaaggggccatccatgacacagagtcagcacaggggactttgggtgagataacacagctaagcactcattatttgaacaagttcaagaaaactagataattttattatttgggggtaacactacttggccatcctaactccttatcctgattaccagcatccccgcgaccggtgggcttcttatgataatttcttttaacccttcctgcgggggcctcaccgaatgggc

SEQ ID NO: 14755 - DNA, 356 bp, Zea mays
  Clone ID: LIB3150-083-P2-N2-D5
aagaagcatgaaacgggaatttcagttctcatagcattatcatgaatctcagaacataacaggtgaaacacgaatcaagcagaggcgccatggggttcacagatccacacctaaaccgctaaattaaactgcgagcgatacatgataaactaagaccaccactcagatcaccaccatcttattcagatccaaaggaacggacgcagggggagtcgacgatgacggagggagggcggccgaacagaccagatcagagagatctaggagagctgtccgcagtcagcgaccttgaccaccttggaggtggagcccttgcgggtgcccaccttcttgatgggcttgacgacgttcatgcc

SEQ ID NO: 14756 - DNA, 141 bp, Zea mays
  Clone ID: LIB3150-083-P2-N2-D7
attggggggttgtttaaaacatattctgagggtggaaatgaaaacaacaaacatttatgaccatatcggacaaacctatgttataattaatcttggtcattaggtgttaccaccaatattctgtggcctattttaccattt

SEQ ID NO: 14757 - DNA, 306 bp, Zea mays
  Clone ID: LIB3150-083-P2-N2-D9
gcagcaccaagaagcaccatttttttccttaggatttaacttagaataaagcctgacgggggtaacagcacccatcgatccgcagtccatgctggttgatgcatgggtctgctggagccgaggatgaacacagcactaacaactgacacagagcgaccttcaatcaaaaacacagatgggcaacaacaaacacgagacgaacgaagataaacactttggactaggggaaacaacacgggagcgaacagggatacttgggcgcgcgggccccaccgttcagtttcttcagtttccgtcggagttgcc

SEQ ID NO: 14758 - DNA, 217 bp, Zea mays
  Clone ID: LIB3150-083-P2-N2-E1
gttgaggccggaggcgaacactaccgcgctgaacagaatcattacaacggaaccgaaagacgatatgatagagcatggccatgcgatctagagaagttacagcataatgggggacagcccatagatctacatgattttgtggcaggaaatgtaataaggcatatgtgagtcgttgatacaatgtgagtccatgaacttttgcaacttggcatgacta

SEQ ID NO: 14759 - DNA, 361 bp, Zea mays
  Clone ID: LIB3150-083-P2-N2-E10
accaaagaatatggctcgcttacgttcacagcataaaccaacatagtaaacctctggtactccgacaagccattaccatgttcatacaaaaaagcaacaattactcataaatctaagtagagaggcactttcgctgtaacgagatagaccttacaaagatcccaaaacactgaatattcttaagcagaggtggcagcagaagccttgacggcggcagaaagcttggaccttctcttggccaagctcttgctccggcggtccctctgttccttcagcctctgggcaagaagcttctggtactcagcagcctcagacttcttcttaggtatcctcttcttcttggcagcgattctagcacgct

SEQ ID NO: 14760 - DNA, 354 bp, Zea mays
  Clone ID: LIB3150-083-P2-N2-E11
atccatcacatcggattacttgataataacattgttataaacattgcttcttcatgttccatgcagcaagtttggtggcactaacttcgggaaggcaacctcgtctctctagaggctttgtttcctcataggaggatgttaaaaccatcgataaaactaaaatcccatgttaaaatggaagcacgcagtaatcccaaaaaaaaaaagcgaatgcgacctgcttcgtgaaatgggaccaactcaagtcaaacgtatcattcagatcactactagggacaaaacccaaacaaaagggtgaacaaataaatcttgggttggtggcgacaaaaatttaaggccggtttctcaagttgc

SEQ ID NO: 14761 - DNA, 350 bp, Zea mays
  Clone ID: LIB3150-083-P2-N2-E12
ggctcaaggaaacacattttattgccaaatagaaaagctaggggagcccccgagccagggattatacagcatgcagtaaagctaaccaagtcaaatcaaaagggcgaaatgatgtatgtacatgctactatctagttagaccacacatgcaccagcccatgggtgttgccggggtagatctcattcctggcctcatcataaaacagtgcagggacgtcctccaaagcttttggaacggtgctccagtccgaggaccgtttgctgtaaccatttttgtcgccgggtacacttagggaaggatcattggcagaaattttggcgatacacctgccttggataatctcacttat

SEQ ID NO: 14762 - DNA, 404 bp, Zea mays
  Clone ID: LIB3150-083-P2-N2-E2
gaaggtgttggggtcgtcaaggctgaagcccgaggtgagcagcgccgtctcgaacagaagcatgacaaggtccttgacagacttgtcgttcttgtcggcctccgcgcgcttgcgcagctcctccatgatggcgttgtccgggttgatctccatggtcttcttggaggacatgtacccagacatgctcgagtccctgagcgcctgtgccttcatgatcctctccatgttggccgtccagccgtactcgcccgtcaccaggcagcagggggagtccaccacgcggtcagagaccacaaccttctccaccttgtcgcccagcacctccttgatcaccttgcacaggccctcgaacttctccttaagcttctccttccgcttcttctcatactcactctcatcgagct

SEQ ID NO: 14763 - DNA, 286 bp, Zea mays
  Clone ID: LIB3150-083-P2-N2-E3
gggtcgctgacacacgctagcgcgctggtggatttattttcactcaagcccagttcgctattacagaccatggccatttcaagcacagagctcacagcagtgtcagcgacagcccacagctctgctgcatttcgaggcggataaccggatacggatcaggcgacgcggcggcacagcgtgagcccgtcggcgatggcgacctggcagacgtgaacgcggggatcggcggccacggccgcgttgaactccctggtggccgcagcgagcgcgcggtcccgcttggaga

SEQ ID NO: 14764 - DNA, 364 bp, Zea mays
  Clone ID: LIB3150-083-P2-N2-E5
aggaacgaaaacttatttatttctgagaagttcaacacaggccgcagctattgcgaccacttcgtaagatcacttatctcacaaacaaccttcagagttcaggcacttgacacctcaccaaaccaaacctcgaacactaaccaatttaatccacctcctcgatcttgggaccagcaccgctcccaccagacggggcatcctcatccatgccagcagcagcgcccatgcccgcgccctcgccctggtacatcttcgcgatgatggggttgcagatcccctcaagctccttcatcttgtcttcgaacttcttcacctaaccagcttgttgcttgtcagccagcttgtggggcctgtaactgcattt

SEQ ID NO: 14765 - DNA, 74 bp, Zea mays
  Clone ID: LIB3150-083-P2-N2-E7
acataaaaggggaaccctggggctttatactttcaaacacttttacatggttctaaacattacgggtaaatgaa

SEQ ID NO: 14766 - DNA, 274 bp, Zea mays
  Clone ID: LIB3150-083-P2-N2-E8
aaccggcgagacgaacacttccatacttttgggtcaacgaattatggattctcgggcatcagggaaacttacaaacatttgaaaaataaagggaagacatttggccaacatgcacctattggcatccaaaattggaaaaagcttgaacattgcataaaaattgccaccccaatgatttcatgtctggaataaagggctgtgaaggcaggcattgctaaatatgatagccttcgatgcacaaatgctctttcaagtggttcgcttaacctaattt

SEQ ID NO: 14767 - DNA, 340 bp, Zea mays
  Clone ID: LIB3150-083-P2-N2-E9
ggcaagaaaaatagcatatcactattgaaaaatggaccaataataatgcaaaagaaagatgttacaattggagaaaagagagaagaggaaaagcacaaactagttacaaatgagattataactgctgtatctagctccatgggtcgtcccagcctttgggcccctcccttttgacaaaatctacaatggccacaactgcttcttgcactctgttggacagagcatggtttccccattttatctcgactttctctgcacctcccagcgccctacataaacttgttaggtgagcccctttattaacatatatagggacatattcattctccattgaataaat

SEQ ID NO: 14768 - DNA, 286 bp, Zea mays
  Clone ID: LIB3150-083-P2-N2-F10
gactaaaaagttttttttactggacatgttgccggaatggccattccacgaaatgtaattacaagcaggattagctttatcactattgcaacaagaggcatcttattccttactcgaaaactcgaaagtaaacgaagctagcgcacaagagcacgaaatacttcatggtagcacagctgcactgcacaggtgcatgcgcgtccttccctaaacgcctcagtgccccgagagcacgcttggaatcgcatcacatactggcgtcgtcgtccgcgtcggcggcgtcgaa

SEQ ID NO: 14769 - DNA, 260 bp, Zea mays
  Clone ID: LIB3150-083-P2-N2-F11
aagaccattcaatggccgaaggcacatgctggaatttaaaacatctaaaattgatttgcaatcctccacaggaaccaactattgagataatagtgtttgcagtgcttcgaatgtgagtaaatatatcgacatctcaaatttgctgcacatctggtgcgcgagaccacaacacgttagttaacttggttcacggcttggtgacgagctcctttacaaacgccaccaacttgggcacatctgccggtcatgcgaccgaaatt

SEQ ID NO: 14770 - DNA, 327 bp, Zea mays
  Clone ID: LIB3150-083-P2-N2-F12
ggagagcgcgagcgtgagctcgcgggcgttcgccgcgaccagcaggcgccggccctcggcggggtcccgccgcacgccgtagccgtcctggaggaagtgcccgagctcgcggagcgcgtcgacgtggcccagcgaggccgcgcgcgcgcacagcgcagcccccgcgcgcaggtcgcggtccgacttggccccgccgctgccgttgaactggatgaccgccagcgagtagagcgccgacgcgtgcccgccgacggccgaccgagccagcagcgccgcgccgacgttgtgggtgcccaggcagtataagcggatcattgccaggtttgt

SEQ ID NO: 14771 - DNA, 194 bp, Zea mays
  Clone ID: LIB3150-083-P2-N2-F3
ccaccaaacgatttttagctttttaacaacacacaatctacaaaagtttttttcacagtttacaacccacagcaactttttccacagtcacagcccacagtaactttttttacagccaaagcccaaccaaacagaccctaagttggtcgccatcccctctaaatgcctataaggacacacaaaatttgagcacc

SEQ ID NO: 14772 - DNA, 395 bp, Zea mays
  Clone ID: LIB3150-083-P2-N2-F4
aataacattataattaatataacatagacaagtgtcattcaatatctcataaataagcattgtcaaataactcatacataagtgtactatacatccaaactaaaatactaattaaaaaacttggtcatcaactgtttgcactaacattgagtctaactaagtgtatacatgaattcaagtctccacaccagtgtaaccaccaaaatttgagttccattctatcttttactgaaatatagtgctatctttcaatgcttctagattatggggaactaaatgagcttcaaagataatatgtcctaggtgaacggatttgcgccaaccataagtgtatagattacttgagtcacaaacagtaatcgtataacggcatccacatgccagaagcaccattt

SEQ ID NO: 14773 - DNA, 352 bp, Zea mays
  Clone ID: LIB3150-083-P2-N2-F5
agtaacactgattaattgattcaaatgtgaaatccaagttttgaacctatgaattctacaaattgggcaataataatgcaccagacatcaagaggaaactaaataactcaagtagaatgttataccacaataatccagaaaggtttagtccactaagctgagcagcaaattaagaacctccttctttacgtcgccttgacggacctccgccttcgcctctgctactctttgcttcttgatcttggattccagaccttctgccttttcatcagcaatgaactcaaatgctcttttcaaagtcttcccacatggatgaagggcctcaatcttcttcacataaaaaggcagggtg

SEQ ID NO: 14774 - DNA, 61 bp, Zea mays
  Clone ID: LIB3150-083-P2-N2-F7
aaggttgatccatatggtggtctaaactaactataattttaattgacattaattataaatt

SEQ ID NO: 14775 - DNA, 328 bp, Zea mays
  Clone ID: LIB3150-083-P2-N2-F8
gacaatattattattatttattattattataaccacgaaagaacatcaatctcgatacaaaaaaaaggttaatctaacccgttagatacaaagaaacacgcccacgacgatgcccaaaacaccaaacgcctctcctatagacatttgtatacgggaagagttcacatgcaccacaaaattaaaacgtcttagcaaccgcgttgcacccttacaagcctggcaccagaaccacattgggaggatgatcttgaaaagcatcagtgcgtttcattgacagcatcaccttgtttagggttgtaccgggtcctgcacaagaccagcgattatt

SEQ ID NO: 14776 - DNA, 352 bp, Zea mays
  Clone ID: LIB3150-083-P2-N2-F9
ccctccaatattgatttttatttatatatcatataaaaccccatgctgttcaaaataggaacggaagcgtaggattgcttatgattgcatacgaatgcaaaaccttaggatattcattttcgagcattaaagcaaccagatacacacaagagtgcaacaggatattcagaactctacaggtagttagcgtcaaatgcctttgcagacaaaaggcggcgtcgttttcccgtcgctgcgcatgtcacacgatctaaccactaaaggtaaacttaaaactataaattagatacgcactaacattacaaattttcacattacagaacaaaggttcatataatggacataggaatac

SEQ ID NO: 14777 - DNA, 307 bp, Zea mays
  Clone ID: LIB3150-083-P2-N2-G11
ccgaactattccgaaggacccattttattccggaaacagatgcccaggctttctccgggtcctctgatagaagcaaacataggttcacagttcaaacttgacttacaaacagtcgcacaaaacatacagcactctgttctaactcgggacacgaaatcctctctttctctctccctctccctctccgctcactgcctaaatctaggaagactgccggagctccgggcgcacaaagtcggcgttggcaggcacagaaatgtcgacggggggccttagctcggcgcaaacctcaatggcaccatggaca

SEQ ID NO: 14778 - DNA, 179 bp, Zea mays
  Clone ID: LIB3150-083-P2-N2-G12
ggactacacaacaccattgcatacaagggaatttgaacatttaacccattttgggggtccggaataaatttttggggcaaaggaccggggaggaaaatttgaactgttccacaaccaggggaaaaaaaactgtcccatttgaatttgccccggttcccttgtttggaaatttatttttt

SEQ ID NO: 14779 - DNA, 353 bp, Zea mays
  Clone ID: LIB3150-083-P2-N2-G2
gggaccggaccgtacagtttgatgacatgttattttcacgaaatccaaccaggccattttatggtacaatgcgcagagcattttatgctatgtcctttggacccaaaaatttaagcacatgaacgtcccaaaaccaaaagaaaaacacttcagatacaacaaatttttttgaggttggtgcgagggaacaccaatacaattattgaccttttcaaggactcccctgatccccttttttacaatctgttgcttttcatgagctttataaactcgccgaaggctgtgtcggagtcatgcggaccaggggaagactcgggatggtactggagagacataagctttattttggagta

SEQ ID NO: 14780 - DNA, 356 bp, Zea mays
  Clone ID: LIB3150-083-P2-N2-G3
cgtgaaactatatatttaaatagcacaatcactagtacatcgaggacgattagcacgcgcgcgcgacggctagcttatattagagcgcgtcatcagcctagcagtttattttttataaatgcatacatgcagacatggatggcatcatctctggtgcttgtgcttgtgctgactgactgactggctggctgggctctatgactgatgaggtcgacggatgtgtcatatatatatctgatctcatcatggcctgaagaaagccgggtgggggcgtccggtgccctggaaggaggtgttcttgaggtgctccggagctttcttgaacgaagggccgcttgccagcgacaggatctttt

SEQ ID NO: 14781 - DNA, 348 bp, Zea mays
  Clone ID: LIB3150-083-P2-N2-G4
aaattataattttattttttatttttaattttttggggaaaaaaaaaaaatttaaatgtaaaaaaaaaacaaatctaaaataataattaaaaagataaaaaaaaattaaaaaaattattcgacaaaaaaaaaacaatttttaaaaatagtttaaaaaatcacaataataattgtataaaaaagggaaaaaaaaataaaataaaatttttttattatgaaaaaatataaattatttttttataatttgaaataatataaaatttaatattatataatttctatataaaatgatatatacatatttttaataaaatattattagtttaaatgatatatatatattataaa

SEQ ID NO: 14782 - DNA, 288 bp, Zea mays
  Clone ID: LIB3150-083-P2-N2-G5
aaaaccaaaactttattatgatgcatatattattggtcataccacacatgataatgtgtgtcgtcttactgcattattacatatatagatagagagggatggatagaggagatttcccaaatatcatgaatcagtagtagggcggaatggcagcggagacgccacaggggttggtgcggtagctgggcagctggtactggtactggtagagtccacccatggccggcatgttctgcgccattatcatggccatggggttgagaccatgggctgccaacagctgcttgt

SEQ ID NO: 14783 - DNA, 70 bp, Zea mays
  Clone ID: LIB3150-083-P2-N2-G6
aaaaacgactgttattggagatgtaataaaggcagaagccagttgttacagacacggtttaagtttttta

SEQ ID NO: 14784 - DNA, 277 bp, Zea mays
  unsure at all n locations
  Clone ID: LIB3150-083-P2-N2-G7
atcatcaaacagagnnacaaagcaatgtataaagtagccagcaaattcatggcgaggagtaccatccatttccacactcaaaagatgcaacacatncaaggagaaaaagatgatccagacaatgagaactcaagagttcaccctagaacaacttaaaacacgcaaggcacaactcctgctcaagttcaagactcatgatcctttctacttaatcagatcatcattgtcatcaggaagaggttgtgcatatgttgcataatagctaattgaatgctgt

SEQ ID NO: 14785 - DNA, 161 bp, Zea mays
  Clone ID: LIB3150-083-P2-N2-G8
gagggtaaccaatttaacgaatccctgactattattaacaagaattcggggtcttgctatatatacaccttgctatacagtggcggagccggcctgaaatcgacaccgttgcctgacccatccaaacgttcgggtgctaggccgttcgatgagcccaccca

SEQ ID NO: 14786 - DNA, 200 bp, Zea mays
  Clone ID: LIB3150-083-P2-N2-G9
caagaatgcacatgcaatgcaaataatggtatggtactctgctggagatgctatgtgatgccttggctagcattattacaaactcattagcaccaatcaaaactatttgttcataaatcatgatggtgattatgcaatttgataatctggtatttttacataatatattaatattatatatctttgtttgactgtatttt

SEQ ID NO: 14787 - DNA, 254 bp, Zea mays
  unsure at all n locations
  Clone ID: LIB3150-083-P2-N2-H1
atntaaataaaaaagtgggccaatgtaacgcgcctgatcttattggtcattccaaacaacccacactaacagcaaccatattaagaatgcatcgctgttattacccagacgcaaacatgccaacccaacgtacgctgggcaatgtgtgcggtgtacacgactcgccgtccgtcacccccaaccaatttgaaagccaaagcctaacgcccgcccacgaatacacagattactcacaggccacactttccataagt

SEQ ID NO: 14788 - DNA, 275 bp, Zea mays
  Clone ID: LIB3150-083-P2-N2-H10
agtgaccaaatattggaattaaacttcctgaaccatacgcatgtcatacaagcaaatgcagagttccagttatgttcagaacaaacgttcacaagggttttgatttcagcagcacagattgctctcccctaagttcatggcatgatacgcggcatgcagagcataaatctaccatgatcccacagcgccctgggctgggttttcgaagtgagtgaagccccagtaggtcttcaaggaatatggtgggtagatgggtgatccttcacttgtgatct

SEQ ID NO: 14789 - DNA, 201 bp, Zea mays
  Clone ID: LIB3150-083-P2-N2-H11
ggggcattaccgacactgtaagccgttcttttaccaaaatttactttactgatggaaggagttcaacagttcgttgcaattgatgaatggtgatacagattagcacacgcctatttgtagtacaagcttacgctacacaggtgcaaatggtactccggtctttttggccagttccacgactctgtaaaaagtgcataaaac

SEQ ID NO: 14790 - DNA, 197 bp, Zea mays
  Clone ID: LIB3150-083-P2-N2-H12
ggggggactgaccaagatttggacacgaaatgcaaattgggataccaggattgataaacaggtcgtccaaaggatgcactctttatagcaacatatacagaactaatccttggcagtggtacagggagacacattccggactacaacgcaacacctaaggcatttgtagagcgtactacacaggcacaagttgttac

SEQ ID NO: 14791 - DNA, 163 bp, Zea mays
  Clone ID: LIB3150-083-P2-N2-H3
ggaagcaacaatttaaaccgccaatatttttctaaataacccggttggaaggcaggggaaaaaacacacttaaaaaaaacagggggggaaaaccaaacaattctttaaaacagacccacataacacaaaagcgggagcaactttgggaaatacacctgaaaaa

SEQ ID NO: 14792 - DNA, 205 bp, Zea mays
  unsure at all n locations
  Clone ID: LIB3150-083-P2-N2-H4
taaanaaatggggggggttgttttgcaaagaaacatgacacgtgatattttagaaatagttaaattaaccatgctgtgtgatcaggcatgtacaatggatttggactaacagatttacaatttgttcttccctaagttctatggcatgttacacgagttttgcatatggttaatctaccatgattcccaaagcgtccctgggttg

SEQ ID NO: 14793 - DNA, 341 bp, Zea mays
  Clone ID: LIB3150-083-P2-N2-H5
cagaaaaatgcacttttttccataaagcagcagagggcacaagtcccattaccagggaaatgtacattactcagggaaacagcagctgagttcgagatatgaggagatggcaagcataaaccccaattaaaatccgttcccaacattggcaccaacccaacgcgaagataaattattcactggatgcaatacgccaagcacatgcacaagcccacatattacagaaccaaatgaggggcaaacttaagggcccaatgaccaaaattggattttgacaaacttaaaacccctgtttgatcaggtaattgccgagccttttcaccaccatattgcattgccct

SEQ ID NO: 14794 - DNA, 238 bp, Zea mays
  Clone ID: LIB3150-083-P2-N2-H6
ggcattgcaagcatcaccgaagcaacagaatgatggcaaatcatgccttatacagcaacaaaggagacgtccatagttgcagaacacaaatttcacggcaaaaatattggccggatcagaagagaagcctcggaagaatacagggtgtgtagacaccgaaccacgcactggttaacaattaagtgtgcctataacagtcccttttaatgacgtgccttagttttgcactagttgaagt

SEQ ID NO: 14795 - DNA, 402 bp, Zea mays
  Clone ID: LIB3150-083-P2-N2-H7
aggtcacatcgatggccgttgaggtgtaggtcacatcgatcatcgatgattctcctggtgcataggcgcacggctgattttgtgacagataaaagtaccaacctgcaagtccttaggttgggttcaattgtcactcgcggtacacccatcagcttattcgactccaggagaaacattaccttccccacgagctcacccagcaaagcctacgccctacagaaaccaaaatttgcagttttgcactttgcagaaagctaaacatcagggcagctccacaagctgcagccttcgaagcttgttttttttttccccgtaactccctaagctaagatgaccagccatggggcatgacgggtaatgcttgaaatgcctgacgccggtgaggacgagcgacacaccata

SEQ ID NO: 14796 - DNA, 184 bp, Zea mays
  Clone ID: LIB3150-083-P2-N2-H9
gaagcaaagcaagccaataatgattcattcattcagtaggagaaaggagatgagatctcatacatagttgattcagagtacagacataatacatgatcagaaattcataatgcatcaacctatgaccaggcccttcttttgagtcaatcaacccccattttcttgcgccagcaggctgacaaat

SEQ ID NO: 14797 - DNA, 246 bp, Zea mays
  Clone ID: LIB3150-084-P2-N2-A10
ccattaaccgttttcattcatacattaggagaaatcatttgaaacaggatacatccataccgcgaaccctcgataagacttttaaactttgatatgaaatacttggattcctctgttacacaagttctcactaggaattgaaaatatcctgttcactagaagccttttgaaatgataaggctaccatattaagcgtcactgatagtcacctcaacctcgacacctggttcaatggtgattgaggtg

SEQ ID NO: 14798 - DNA, 239 bp, Zea mays
  unsure at all n locations
  Clone ID: LIB3150-084-P2-N2-A11
ttantaacaaaaaagatttagataaaaaatattacagaaaagacataaaagtctataacattgttttagaggacgcaagggagcacaatattggtcatgtgtttttcaaataacacatttgtgcctatttaaaatagcaaaacagtgcctgcatatgaccaatcttattttctaagtgcatgctacttctttcttttttttattaatatttttttcgtaattttgatatttttttattt

SEQ ID NO: 14799 - DNA, 400 bp, Zea mays
  Clone ID: LIB3150-084-P2-N2-A12
cgccaaaaaacactataagtaaacagattataaactcagacaaacaccccctttcacaaggtaaaaccaaacaagcaaatttaataaacttcattaacaaagctaagcttagatagttgggcgaccataaagtaccaagcagacgatgtaactcacataaaaaaaactatgttccgcattgcaatgtttcgcagaacaagacctcctagaccctcgactggatttcgacatctagcctgcgtagccatatccagagatcttccagaccctgatagacccatcggtgtagccagtgtagagggtgcttccatcggcgctccagctcaagcttgtgcagtacaggatctggttcttggagatctggatgtcaggcttgaggtcctgcacgacgtgctttgac

SEQ ID NO: 14800 - DNA, 380 bp, Zea mays
  unsure at all n locations
  Clone ID: LIB3150-084-P2-N2-A2
annnnttggggtattgttttttttttatatttatattttttttttattaatttttttttaatgaaaggaaagggggggaatgttaattaaccaacttggttaaaaaaattcaaatgggatacaatttctaattaattattcaaattttaattcaaccaatttgaaaatcgttttggccaaaaatcaaagcaatttctgatttaatttattccgccccacccttgaaaaaaaaagtttttttttttgttaattttaacgggccttttaattcttaaaaaaaattgttttttttaaaaaatttttttattgttgaaaaaatctttttgttcctttttaaaatttttgttggaatcttttttggtttttaaaaaatatttttt

SEQ ID NO: 14801 - DNA, 366 bp, Zea mays
  Clone ID: LIB3150-084-P2-N2-A3
agataagggtatagctgatgagttcgcaaccacaagtaccaggtatcaaacaggtgggcaccaaaactgtggtctctattttgagcaccaaaacagaacttagaacacacacttgacaggaaaattccactagtggctgcatcggaataaagaaagaaaaaaacacggtatacctgcttcacttctttatatacttcttcgactaagccgtcttcttatggcgggcaccaaggtgtttcttgttcatacgctcaagacggaacttgccgtaagccagaaacgacctcatctcatcagtaaccttgacaacctcgactgagcgcttctcaccacgagtaataggcatgtagtcaccctggacctggg

SEQ ID NO: 14802 - DNA, 309 bp, Zea mays
  Clone ID: LIB3150-084-P2-N2-A4
gactggtagccctggagaataatataaaattctgcctgtctgccaactacaaatacctggtatgtcaacagaaactaagataaagaatacacggtgtcacttgccactcttcaagctcctggtgctgagactaattctaatacataataccagccagcagtttactgcagaaatagcaaaatgtgataaaaggaagctggggcacaactccctcctttcataggagtcggcttgataggttcctatgcagtaagtccaggttcgtcaggtgtaatttgagcgcggatcggctctcgatcaagacccttc

SEQ ID NO: 14803 - DNA, 415 bp, Zea mays
  Clone ID: LIB3150-084-P2-N2-A7
aacacaactttgagatcctagagcataaaccaaatataaggggcattgttttggcaaaacagccagtacagggattccacatttccactagataaggcccccacaacatgcctgacaagagcaactacaggaaaccccaataatataaagagctatatcatgcttcagtctgctcccttaggcggcggatcgtgctcctgacggtgaccgcactagcagtgttcatggtgtaagcaccaccagccttcacctttccacagtccttgcacccccaaattccaactgcttttctttttacagcaaactttccacagaactcgcaaaagtacttggaatgctgagatacctccatctttttgatttgcttacgcaagctagcaccatacctggttccatttttgccaacaatttctgc

SEQ ID NO: 14804 - DNA, 388 bp, Zea mays
  Clone ID: LIB3150-084-P2-N2-A8
aaactccaattcagtgacatccaaataatagaattagaattacatctcatttcaattcaatatcgacatccaaacggagcataaggttcttttcgcccactatgtccagtgtccactgaccccttgttgaactgtacatgactacagatactacagatacaaagaatccttcagcaattggatccaaaaacattgctttaactggccactaaaatgttaagaacagcaagtagatacagggcagaacgccagaacttattagctctgtttacaggaggaaagctaggcaggggcccactttgagaccgagtggctcatacagtattgtatctagtcttctcgcttcaccgtccacacatttgcagcatggtttggggaaaaaatatgc

SEQ ID NO: 14805 - DNA, 303 bp, Zea mays
  Clone ID: LIB3150-084-P2-N2-B10
ccgaccaaaatggaatggttcattattggctgagcatcagcacactcaggaagggagatgatctaccaggtagctggccacacaaatcatatatgcatgcatcttattggtggatggagacatttgcacacgacatccttaatatcactcgttatgcatggtttcctccgaagttgaccacggagcggtaggttttgccgggctgccatccggcggggatgactttgctggcgacaaggaccctgccggagcccgaggtgaggcggacaaacaggggggcctgcaaattggtggagccggact

SEQ ID NO: 14806 - DNA, 355 bp, Zea mays
  Clone ID: LIB3150-084-P2-N2-B11
ggaccagattaaaacagctgcataaatttaagaaccggaaatacactttactttttttttaaacctttacgcttctcaaattagacacgagatcactgtttgcacatgcttgggctaaaaattgaacctaatagcttacatttgcatgatgcgatgaacactaagaggggtaaccttttacacactgggaatgtacaaagcgtttgtcatttacgatcagtttattttcggccacacctgcaacttaaccgagatcagggttttcccaacaacttctgcaccgtttgagcgagcctgggcttgcttttgatgccctggatccaccttgcgctgatccggacgttttaaaggcttt

SEQ ID NO: 14807 - DNA, 362 bp, Zea mays
  Clone ID: LIB3150-084-P2-N2-B12
gattataaaaggcagcagaaagctcataaacgactggttcagtacaaaacttgacataagttatgtgcctgcctgctggaataaatccctcatgtaagctttgcccatcaggttttttattgtaataccttccactccctcacaaaaagggacagaaaagggtagaatgaaatcagaagatcccgcaactaaaggtttcaattgctactaaaggtttcaattgttgctataatctgcaaaatggccttatctagttatcatttgcaaacttgatacccttctcaatcgaagacttgagctcgctcttgagcttctccaacccttctttctcaaagtccgacagctcacctaatccaagcact

SEQ ID NO: 14808 - DNA, 239 bp, Zea mays
  unsure at all n locations
  Clone ID: LIB3150-084-P2-N2-B2
cgnnctataaaacattgttaagctactcattttcctttacatgctaagggttcacaaaactacagcctcaaaggtctgtcagctatcctttgagagcaaacgaaagtttggtaggggatcccaaaagaaatccagcttgtaaattgtacccccggttttttaaaaacccgctggagggctttttggttccacccaaccatgctttaaaaaaaaggccgaacggggaatcaaattttttt

SEQ ID NO: 14809 - DNA, 295 bp, Zea mays
  unsure at all n locations
  Clone ID: LIB3150-084-P2-N2-B3
aaattaaaaaaaaatttttattttaaaaaaaaaaatattaaaaatttttttnnnaacccacccccaagaagaaaaaaaccaaaatatctaaggtcaaaaaaaaaaaaaactccccccaaccttcccaaaaaaaaacccaaaaaaaaaaatacccccctcaaatatctctcccccccacctaaaaaaaaaagggcccccccaatttccccgggaaaaaaaaaatacccccccaaagggtcccccccacccaaaaaaatgtttagagggcaccccgcgctggggcccaatattattt

SEQ ID NO: 14810 - DNA, 293 bp, Zea mays
  unsure at all n locations
  Clone ID: LIB3150-084-P2-N2-B4
ccaggccacagcagcaggcagcatttgatcactaaccattcattgtctgataatacaaccgaattgcaaatagttcatgacatatgctccataattgacttctaacattaaaagtgctaagaacacaaatagcaaaactttgaaaatgcaaccagagacaggcacgcttgttgtcttgattgggaatgatcggacagtggcagtatccaagcacccgacgagctgttcancggtagcggcggagggagagggtctggttgcgcttccaggtggttcttcttgagggcctgttt

SEQ ID NO: 14811 - DNA, 394 bp, Zea mays
  unsure at all n locations
  Clone ID: LIB3150-084-P2-N2-B6
ggaacaatacttttttcttttcatttcaattgttcattcaggtcattgctcacactgacactgccacccatggtgatgcgtgacacattattactcaatcatcgccgctaaatgactcaactagctagctagccagcggctatactacagcacatagtttcttcagtgggggacaccgccggcagcagcgtaggggcatggagtcggctgctgcaggccgcacatcgccgtcagttgctgcgctatctgcgccgccaacagccccgcgacctggccgctttgcggctgctgctgcaggatggactggaggaccaagccgaagatcgcctggtaccggtgctgcggctccacctgcctgagctgctggcaacactgctgncgcaacgactggcac

SEQ ID NO: 14812 - DNA, 252 bp, Zea mays
  Clone ID: LIB3150-084-P2-N2-B7
aaaaacgaacaccgtaaaagcaagatgtttaacaactgagaaaaaggtgatttgcactaggcactaccagataacaaagattttcccttacggccttacgggtcacaataatcagttccaacattagcaacattcgacgacgaccaaaactgggccagcaggacctgttctaacctgacatttcccatgttcttaaccaggcataccgggtatgttccaaactagacaatttccaagttcaaagaaaaatta

SEQ ID NO: 14813 - DNA, 340 bp, Zea mays
  Clone ID: LIB3150-084-P2-N2-B8
aaacttcaatttagtgacatttaaataatataattatatttacattttattttaaaccaaaatgttttttaaacgaaaaataactttcttagtaccaggttctccagtttaaaatgttcccaggtaaaccggaaataaatacccacccaaatttcctggcccattttttaaaaaatggttcttttttgggagttttaggggggggggaaaaattaaaaattaaagttttttcttgtttaaatccccaaagtttttcgggttaaaaccccccgcttctctattatgtgcccctaaaaaaaaaagataacaacttttttttttttcttttttgagggttttt

SEQ ID NO: 14814 - DNA, 389 bp, Zea mays
  Clone ID: LIB3150-084-P2-N2-B9
ggaacaatacttttttcttttcatttcaattgttcattcaggtcattgctcacactgacactgccacccatggtgatgcgtgacacattattactcaatcatcgccgctaaatgactcaactagctagctagccagcggctatactacagcacatagtttcttcagtgggggacaccgccggcagcagcgtaggggcatggagtcggctgctgcaggccgcacatcgccgtcagttgctgcgctatctgcgccgccaacagccccgcgacctggccgctttgcggctgctgctgcaggatggactggaggaccaagccgaagatcgcctggtaccggtgctgcggcttcacctgcctgagctgctggcaacactgctgccgcaacgact

SEQ ID NO: 14815 - DNA, 383 bp, Zea mays
  Clone ID: LIB3150-084-P2-N2-C1
gcaactggaattaactgaagtctggtgaaatgtcaaaggactacaacagatgatatgattgctaaaagaccaaaacaattgatttttcatctccaattttatgaatccaacttcgcaatcccatactatgataaactgcaaaattacaaacgtcacgccatttattgaacaaaacctctgacaaactatgaatcggccacgtcatccaacagcagattgaagatgaaggttgcatcaaagtttgactctgaccctaaaccgacagagggcatttcgaagcggaaaacggactcacaaatcagctctagccgagcttccaacggctaagggccctggcgacgggcggcgtgagcgcgatagtgatggggatcctcacgggcaac

SEQ ID NO: 14816 - DNA, 267 bp, Zea mays
  Clone ID: LIB3150-084-P2-N2-C10
aacaatgtaccaaaggcatgttttaaggatgaagcaagtcgataaaatacagaagacgaaattctcattggtaaaaatagggccgtaaaatcccacgacttcaagcccaaggacccattgctatgctactggacattagcaggcagccaaaactaaaaactctgccacagaacatggaattacaagttacaatcccagagtttctttctgcaatcacgagttgatataaagcttctacattccttttgcatactgatcgatcagata

SEQ ID NO: 14817 - DNA, 323 bp, Zea mays
  unsure at all n locations
  Clone ID: LIB3150-084-P2-N2-C11
ggcgaacaaaacatatcatacaaatccacggggggttttgttagttccaaatttccgaattccagtcacttcacccacagcagcgaggaagtaaaagcttattccacgactcatctagcaaaacacgggggcaagcctattcccaaaagtgcatgtgcggaggagtaaaccttaaccttgcagtgcttcaccaaggtccgaaacaagatgacactcaaagcttggagaacctgagntgcatcagcagcagcggatttctgggctattttgggcgacggcacccccgttagtgttttcttcttaaaagatttataaatttatct

SEQ ID NO: 14818 - DNA, 427 bp, Zea mays
  unsure at all n locations
  Clone ID: LIB3150-084-P2-N2-C12
ctgacagattccatatgcatcatcattcatcatcaaaagttcctcacttgacaaaataaatatgcttctgtattagccagtgcacccttgacaagctgcaaaaatgtggcttccatttgaaccatcaactgtaaacctgagcccgagcgtacaggcacataactgagcttttttgcaaacaagaaaaatatggggtcagcttcggtacaagcaaggcctcttcgaaacagaggtcaaactcagttcgcgtctaatttcttctcagcttcactgatgacctctagttgctccaacaaagcggngagcttcctcatgtcctcctcctgtacgctctgtggagccttctcgcgatagccagaggcgtccattttctgcgccagtgcattctgtagcttttgaatctcatcttttttcttctttagctttt

SEQ ID NO: 14819 - DNA, 366 bp, Zea mays
  Clone ID: LIB3150-084-P2-N2-C2
attggggccggatgaacgatccgagaaatgcattcatcttcttgctgggcttattattcagacatatgagctagctacaagctcattcctcatgcactatgctcttcgcagttacttggagggcatcgttccgccgccgagaatccaggggcattcggcgacgccgctgatggtggccaggttgcactcggcctccgtgacgagggtggcggcgaatcccctttgcacctcccgcgggcagcccggcaggtcctctaggcggcccttcagctgcgcgttcgggcccggcgggatcgcgccgtccatgaggatgctcagcgccgggcaccggcagtacgccgggatgtccgccagcttcccgcagca

SEQ ID NO: 14820 - DNA, 363 bp, Zea mays
  Clone ID: LIB3150-084-P2-N2-C3
ataagccttgcaagcttttcaatgccatggaattcatgatccaccaaccagaccatttgttgcctagcactacatttcacagcagcaataatgtccaaaacttgtccagaaacttgctttctgtgtgccataagcccaaaatactatgagctagcgttctacccaaaacaacaacacaagacttgtcacgtatgaattcaaacacctagtacacggatatcaacttttgtccatgttataattttcactgcctcggttgacctttggattcttgtcttcagctttagaagcacctttttcaaccgagtcttacaatgccttcaggaacgacaccaccgtgaacttatttttgtcaggggcaac

SEQ ID NO: 14821 - DNA, 383 bp, Zea mays
  Clone ID: LIB3150-084-P2-N2-C4
aaattcaaacaacatttattcatgattaagccatatgcggtcgcacgatagttttgggtaacgagaacacaactggtccatgaaaccagctcagtcacgactcacgacacaaaccatacaaatactttgaaagacagcaccatccatgggcaatggcagagacactagataacccagatacagcagcagcttcaacgactgatggcttaataaccaccgcgaagacggagcaccaggtggagggtgctctccttctggatattgtagtctgcaagggtgcgaccatcctccagctgcttgccggcgaagatcagacgctgctggtttgggggaattcccttcttgtcctggatcttagccttcacgttgtcgatggtgtcaga

SEQ ID NO: 14822 - DNA, 375 bp, Zea mays
  Clone ID: LIB3150-084-P2-N2-C5
ggatacaaacaaataataccatattctcaggttccccttgtataacataaaacaggcatgccccatattgttctccagagttgtaaccacatgaatactctgcaaaccagagtaagaaaactcgctaacagtacatgcaatttcagttcaagaaaacagcttgttctataaataacagcaaagcacaactaatttggagcggcgttactcttcaacttccttcttgatttcttccatgagttcatccttgtaatcctcaaacgtgccgtcatatttatccacactcccgtccttcacaacccatatctcgctcctttgctcatcatcgcagacacgggatattaaccgcgagtcgtggctgaccaagacgacacc

SEQ ID NO: 14823 - DNA, 420 bp, Zea mays
  Clone ID: LIB3150-084-P2-N2-C7
gacataagatatcaggtacgtaagcaactgcgaagtgtttataactcatagcagatacaacaagagcacaagattcatgtcgttggccctgatggccacatacattcactccaccagaaaagttgcgtagagcccaaagaactgcttattctagaacaagtcatgactatcatcatagcaactaatctctactctccatctctcccttgttaccaacgtagctgtgaactagtctatttcctccatctgcacagaggcactgcaatgtgcaatctcaaatacctgaacatggcaacaaaaatatgaaacaaaaaaaggcatgctgtctagatgatcatctatcattcactccatcacagaaacaccggcagctgccttatttttgtatgatcgcttccgtttccttcttgggagcgattg

SEQ ID NO: 14824 - DNA, 307 bp, Zea mays
  Clone ID: LIB3150-084-P2-N2-C8
aaaaaaaattttaaaaaaaaaaaaaaaatttttttaaaaaaaaaaaaattttaaaattccttttccctaaaccttttttttataaaaattttaaaaaaaaaaaattttttaatttttttattaaatctatatttttttttaatattctaaaattttttttttttttattaaaaaaaaaaaaaattattttttttttttttaaaaaaaaaaaaaaaatttaaaaaaaaaattttttttttttaaataaaaattttttttttaaaaaaaaataataaaatttttttttttaaaaaaaaaaaattttttt

SEQ ID NO: 14825 - DNA, 434 bp, Zea mays
  Clone ID: LIB3150-084-P2-N2-D10
agtataaatccaaaatacttccattattataaaaaatattggctacatgttgtaaggaattcctagcgtaacaatcctagcaactaagtggaaatggaggatcagcaaatggcccatttaacaccccttccataatgatgttgtatgccttctctgtcatgtgcatgccatcccaattggcaaagtggtgtgggtcaccccaaagctttgctgtgccattgcactccatgctggtgtggtatggtccattgccgccacaacatgctactagaggatcaccaataccaaatctgctaggcttcttgatgaattccatggtggcgttggagtagtcagcatagattaccttcacattcgggtaagagtatttgatttgtttcgttggcagaataaagttgctcattatgcttttggagaactttattgacgtctta

SEQ ID NO: 14826 - DNA, 397 bp, Zea mays
  Clone ID: LIB3150-084-P2-N2-D11
aacttctcaagatcagatataatgcaaatagtttttttagtacactatcccaagaagaacagacactacttttatttgttattattgatcagatggggtcgcctcctccaggtcagatgggcagagttgccaccgccttcagctttggcttgttctcttccttgacctccagcagcagcatcaccacggaccttattgacgggcgtttggttggaaggtttgagacacagagcagcccgattttcagaaccatgcacatctcgtccttgaactgctcgtcgaggttctggtcaagcacagactctagcccgtactgctcaactttggcagtcacccacgccaccaggttcattttgccaatttctgttgccagcggctttttttcggttacgagctt

SEQ ID NO: 14827 - DNA, 406 bp, Zea mays
  Clone ID: LIB3150-084-P2-N2-D12
agttggaatttgtatcttacgttcataccatgtagagccaaaaggtgatggttcataccatataattaccgacacgggaagctaccctactgcttggcaaaagccaaactgaacgcgacacacaagcgcggtccatcgccagcgtgtatgtacctcctcatcgaaagggcaggctagcattgcctcttttattaaccccaagcccaggccagatcacaaactagacagcgaaatctagttctccatgcggatgatgcagcggatgccctcccccttggccatcaggtcgaacgccttgttgatctcggcgaacgggacgctgtgcgtgatgaacttctccacctccagctcctttttcatgtacagctccaccacatttggcagatcagtgcgtggcttatagttg

SEQ ID NO: 14828 - DNA, 214 bp, Zea mays
  Clone ID: LIB3150-084-P2-N2-D4
aaacagaaagcatcatcctgttgaatggtaccaaaggagtctgttcagattcatgaacagaatagaactacaaactggcttcaactgcaatcagtgtccagaacacgcaaagccgtacagattcacacagcaggtgaagcaaggagtttctttgtcacaaatggacataatggtcgcattatgtgtacttatatctttagcaaattcagctttg

SEQ ID NO: 14829 - DNA, 330 bp, Zea mays
  Clone ID: LIB3150-084-P2-N2-D5
acagggcaaaatatcagtactagcattcaggaaagcaaatgctacatttgtttcttggattggcaaagcccagcacatggtctgatgatgaccaaaagttattcatgaattgaacacaagtttattatgatgattttcaacatccacactgttttgtgcagctcatttgattcagcgcctaccacccctttttttacttttcctccggctgttcttgtcatccgaattactgtttgacgcaaacttagattcagaagattatgatgatgtgctgcccctcctgggccttttttttttttgcttccttttgtgttgccgctttttgttttt

SEQ ID NO: 14830 - DNA, 381 bp, Zea mays
  Clone ID: LIB3150-084-P2-N2-D6
cagcaaaaaaaatccaatgaatttatctacccacagttgcacagatcagtacagccacatgcttaattgaggaaccatcgagccagacttagaagatcaatccaagtacgatatgggtcagttatgtgaagccattcccaccttaatatgagggcataccctaccaagctcagtagggtgacagatcaatctgttcaatggcccataccgacaaacaggtgttaatggagaagaatatcggaattgcagagtgtgtgacctttaccaaggtagcccgcccagcttaaattaacatgttgcccatccaagtgggaattttattcacaattatttacaagtattcaaccggctggttcttaatccttactggttttaagcttt

SEQ ID NO: 14831 - DNA, 260 bp, Zea mays
  Clone ID: LIB3150-084-P2-N2-D8
agaacaaaaaagcggcgttcgattttcccatttggggggggcaaatttcacggaaattaacaacagagacttgttgttaatattccaatattaagattaccattattcacataggaagcatgttttttttatgtccgaatataaaagcttttacaagcaaacaacacttaggaaccttcttgtaaggaggagtttcaaaactacgggatcgcaaagagaagcaacttaattcttgttgtccttgacgtgaaggctttttg

SEQ ID NO: 14832 - DNA, 340 bp, Zea mays
  Clone ID: LIB3150-084-P2-N2-D9
ggggcagatacgaatcgtatgcgaatagacaatcgatccaaatcctaaggaatcttcaatctaccgagtgggtacatcaccagaaaatagcaagcaaaggctgcaattatagaagggtacgcttaaaaagttatcaggtcatccttctttggatctggcttcttcggcccttcctgggagctgctacctcccttcttgccgaatatcatctcgtccagatcatcaaggatatcatcatccccacctgaccttgttctcgcggcagctggttttctgacaagggcgtcttcattgacggcagcagtcagatcttcatgttctggggcaaccggtatgacaa

SEQ ID NO: 14833 - DNA, 324 bp, Zea mays
  Clone ID: LIB3150-084-P2-N2-E10
aaaccttaaaaaaaaaaaaattttttaaaaaaaattttttttgggaaaaaattttaaaaattaaaaaaaattttgggggggggtttaaaaagggtttaaaaaaaaaaagggcttttgggaaaaattgttttccaaaaaaaccttttgggtttttaattaaccccctctttttttttccactagaaaaagtttaaaaataaggggggtattttttgggccttcccacttcggaaaaaaaaaatgttttctttttaaaaaatttaaaacccaaacttttttacaaaaaaatgtttttgtgggtaaacaaaaatttttttttaaaaa

SEQ ID NO: 14834 - DNA, 248 bp, Zea mays
  Clone ID: LIB3150-084-P2-N2-E12
agaaaaacacgtaaaaatttagtaatatataggatgacagatatagttgatccaaagcaggtaatggaaatacaaaggttcataaaaaggtttgctgcaacttctagggcagcttataacagtacatactagcagcacaaatggtcaaggaacagcatgccagacaacgcatcttgcgcccgaacgctcgacttcctgtcaagcggctcttaccataccaaggttacaagaacctacaatggtattgc

SEQ ID NO: 14835 - DNA, 103 bp, Zea mays
  unsure at all n locations
  Clone ID: LIB3150-084-P2-N2-E3
antnnttantttnnnaaacggggnggctttaaccatttcattattacaacacttttaacttaacaatcctcgccctctttacaaaaatcaccacccttttaat

SEQ ID NO: 14836 - DNA, 334 bp, Zea mays
  Clone ID: LIB3150-084-P2-N2-E4
ccctaaggattaaacttaaaataaagcctgacgggggtaacagcacccatcgttccgcagtccatgctggttgatgcatgggtctgttggagccggggatgaacacagcattaacaactgacacagagcgaccttaaataaaaaacacagttgggcaacaccaaacacgagacgaacgaagataaacattttggactagggtaaacaacacggtagcgaacaggataacttggccgggcggccccaaccgtttagttcttccagttcccgtcggagttgccgtagccgccgccacggttgccaccgtcgtaacccgccgccacaaccaccgtag

SEQ ID NO: 14837 - DNA, 275 bp, Zea mays
  Clone ID: LIB3150-084-P2-N2-E7
ggggcaaggggaaagtttttccatttctttacgggtaaactactgggggttcaacacaaaaaaaaaccgctgtttgtaaactgctcctggggcacattttttacactccgctgggttttattatggaccacaaagccttgttgcgccaaccataacggggcgggggggaaaaggcagtcaaaaaaaaaattttgcaagggattttaactgttaaaagccgggcgagttgccttacttccgggggcgaacttgatacccttgtaaatggaagactt

SEQ ID NO: 14838 - DNA, 292 bp, Zea mays
  Clone ID: LIB3150-084-P2-N2-E8
aaaaaaaaaactttttttttttttttaaaaaaaaaaaaggggttaaaaaaaaaattttaaaaaaattttttttaaaaaattttaaaaaaaaatttggaaattttaatttttttaaaggggctgttttttttttaaaaaatttttaaaaaaaaaaaaaaggcccttttttttttccccaaacccgtttttaaaataaaaaatttgtttggaattttttttttaaggccctttaaattggtttggccaaattttttttttttttttttttgggccccttttaaaacacattttt

SEQ ID NO: 14839 - DNA, 322 bp, Zea mays
  Clone ID: LIB3150-084-P2-N2-F1
aaaccaacaaaaaaatccaaattggaatgtccaatttaaaaaaacactaatgttttaaaaaaaaaaaaatttggggccctcaaaaattttactaggtcttaaaaaaaaaagggccttcctggaaaaaaaaattaaactttttattaaaaattttacttttttttttttttggggcccccaaaaatttgaattttgaaaaaaaaaagtggtattatttttttggaacatgtggaaaaattttttttatttttaaaaaattttttttaaaaattttctcttttttttacccctctttctataaaaataaaaaaaaatttttttt

SEQ ID NO: 14840 - DNA, 454 bp, Zea mays
  Clone ID: LIB3150-084-P2-N2-F10
gtcgaacaaaacatatcatacaaatccacggggggttttgttagttccaaatttccgaattccagtcacttcacccacagcagcgaggaagtaaaagcttattccacgactcatctagcaaaacacggtggcaagcctatccccaaaagtccatgtgcggaggagtaaaccttagccttgcagtgctacaccaaggtccgaaacaagatgacacgcaaagctggcagaacctgagtagcagcagcagcagcggatctaggcgtcatcgagggcaaggacaccaggtagagtcttgccttccaagagttccaagctcgcaccgccgccggtcgaaatgtggctcatcttgtcggccagcccagccttctcgacagcagcaacagagtcgccgtcgccgatgatggtagtgacacccttcgtggttgtaagcttagctagctttttggcaatcgcc

SEQ ID NO: 14841 - DNA, 380 bp, Zea mays
  Clone ID: LIB3150-084-P2-N2-F11
agagcagttctaatttataatcagattgcccaagtcacaagatagctggttctggtttttcataacaaaaaccggcttcaaaaccaaagatcaacagcattgtagataactcagttattaagaccctgcgacaggcttatttttcgataccaactcgggcaattattctgctcaacctttacactttggaggtttgaattcagctcgtccttattatcctcaacctttttatcggcatcatcaggctttccattaggctcattctcatttagggggcccagcactttcaggggttttttaccagccttcaagatttccttcaccttattgatccctttaccagaaatgaaattttcattgatgttcagcagcttaaaagc

SEQ ID NO: 14842 - DNA, 361 bp, Zea mays
  Clone ID: LIB3150-084-P2-N2-F12
ccatcagatttgagcttttatcatgttcaaccacgataataaacaaagcttgcaatttttagctgtcacataacaataaagattggtgaacgaaaaagaaaaagagagggggcaggagagtggaaactagaacaaccatgtcccccatataacaaaatgctctgaccttgttgatagccaaagcaagtttgcaattgccaaaccaccaactttaatttgaactttcaggaaattgtagatattttggccttcatatttaagttctccacatcattaattggtctagttgtctgatccctgaatcttttgatcttggggctttccagccccttgggtgagaaaccatatagcccaagcacct

SEQ ID NO: 14843 - DNA, 219 bp, Zea mays
  Clone ID: LIB3150-084-P2-N2-F6
aaccgaaaagaaaaattaccgttttacttaaggtttgccagtagccgcgataacatggaacccaccgatttttacggggttcaaaaaaaatatccaccacaaaagtgcccgcccaccataaataaagttttaggtggcacatctgactgaccgatatcaattattcttgggagggactgggcccaccctaaattgtagtacgcttaaaaatgataaaaa

SEQ ID NO: 14844 - DNA, 331 bp, Zea mays
  Clone ID: LIB3150-084-P2-N2-F7
ccatcgggaacatatataagttttttgtctccgcaaaacttagcttaaacaaaagggccacagaagcaacacatagcatttgtccataaagattaaggtaaccaactgccttagcattgtccttatcgaaagatagaaacctatttaggacccgatcaaactgccatttaagggacacagttgggaccttacacctaagggggggccaagaccggggggcgcggtttgtccttgtccttgggggtgtggatggtcaccaggtccggaagaggagtgatcgggccaaccttgcctcttgggtcccagaaaagcatgatctttaccttgatgc

SEQ ID NO: 14845 - DNA, 357 bp, Zea mays
  Clone ID: LIB3150-084-P2-N2-F8
aggacaaaactcataaccatgtatgccttacattcgatgttccataaaaaaaattaagttttaatagcatcacggtttcaacgaaagtaataatactttatgaccaggcaaacattgccatcatagattacttgttcacgcgacaactgcaaggatgtcaacaagacgagatattttaagcttccacgaggtaaccaacaagcaagcacagcaccagccagatagatcatttttttttggcagcagcctttgtcaccagccagattgatcatttttttttgggaggagcctttggtaccttgggtttcagtgggttcttttttttcacacttttgatgacttcgacaggcaacgttt

SEQ ID NO: 14846 - DNA, 386 bp, Zea mays
  Clone ID: LIB3150-084-P2-N2-F9
aacacaagagaccaactttgatgatagagcattagcaaaccagtcacagggtccacgggtacagagttatgtgctcaaaagtcaagctaaaagtctagcagctgggaattatctatttatcttattgatcgacgaagcgaggttcaaatttgcttttaggcaacgcagtacccagcttccgcttctttagctctgctggggatccatacccaacttgtatgatgtttactccacatgcgagaaaccttcttcagtctcagattttgttttgtgatcagaaggattgggcatgactttatatacaattgttgcaactacatcccttttgttctgagggggtttaccacgtagtccaatggaataaattttatgtgtgtttacccccc

SEQ ID NO: 14847 - DNA, 283 bp, Zea mays
  Clone ID: LIB3150-084-P2-N2-G1
aatgtaatggatcaatagaaactctgcagagcatattttgttacaaacttttgagttgcttctattttcaaacagggagatggattatagtctgttaactgcctcaactaggttacaaggccaaaactgcaaccatgatgaatgggtttctacgtaaagcgatgttgaatgtataaatcaaacttcaaacatgcagccgatcacagcttgtagactggggtgatccctagcagattgaagcactgtcgcatgacaacagcagtcgcttggcaaagcaacagtc

SEQ ID NO: 14848 - DNA, 328 bp, Zea mays
  Clone ID: LIB3150-084-P2-N2-G10
tcgcgatcttgaaagggtgccaaagaactcaacaagtgcctggggctcaatggcatgagtatttacaatgacacgcttgatatcaggcaactctgaataatgctggagggcacgcaagtataatccagccttttcacagagctgagcaatacgaggacgatcataatgactgaacatgccatttgcaagaatggtatttgcaacatttgggtaagtcactaagttgatctccaaaactctggtttgtatataatcatgatcctttcttgtattgtcttcttaacttcttgctgtaattgtattttttctctccattatatttattatt

SEQ ID NO: 14849 - DNA, 331 bp, Zea mays
  Clone ID: LIB3150-084-P2-N2-G11
cccccccaagaaaactaaaataaaaactgggtaaaaaaaaaaaattaagggccaaaaaaaaaaacgtgcccaaaaaaacaaaaaaagttaacggaaaaaaaaacccaatgccaaaacccccctaaaaaaaaaagtacaaaaaaaacttctgggggaaaaaaacctccgcccaaactaaaattccctgaaaaggccttaaaagataaaaaaaaaaattctttttggagcgcccaaaaaacccaaaaaaagttccaaaaaaaaaacatggggcccctaaaataattaacctgcgaaaaaaaaacctttttaaagaggaaaaaaaccggaggaa

SEQ ID NO: 14850 - DNA, 342 bp, Zea mays
  Clone ID: LIB3150-084-P2-N2-G2
gggccctaaaaaaaaaaaataaaaaaggggttgtattaattaaaaaactttgttgggggggtatttttaaaaaaaaaaattttaaaaaaggggggcaaattttataaaaaaaaaattggtcccgggttttaaaagatttatttttttataaaaaattcctccggggggttataaataattctttttggtggagagaaaaaataatttttcaaaaatattttgaaccacgttaaaaatataaaagggataacccctttttattaaaaaaaaatcttataatctaaatattaaaaacggctaaaaaatattagtgactaataataaaaaaaatatttttttttt

SEQ ID NO: 14851 - DNA, 99 bp, Zea mays
  unsure at all n locations
  Clone ID: LIB3150-084-P2-N2-G4
aaaaattgaaaacccaaaaaggattcctttaaaaaaaccacaaacccttgggcgaacccctgggcggacccttggcccgacccttgggtcnactttaaa

SEQ ID NO: 14852 - DNA, 252 bp, Zea mays
  Clone ID: LIB3150-084-P2-N2-G6
ggggcaaaaatagtacatttttgcaatccatcaacaataaaaagcgtttcaacacttgcttttagcgcagattccattcaacacccaaacgggagttacaaatgagttttttgtatttacacgggggtcgacaataaacacccggatggggactttcaaactattcagggtccacaaaaagcagttttggaaacttaattcatttttgaaaggtgacgggcctcccaaacaaaaagcctttggaaattagac

SEQ ID NO: 14853 - DNA, 203 bp, Zea mays
  Clone ID: LIB3150-084-P2-N2-G7
aaaaaaactgaatatttccttttttgaactaaaccctattcccttttacaaacaaaaataaaattttgcaaaaacatttgacaatttataatataccgggcccaaaatttgtggaaaaaaaaggggcagcaacccccttccctataaatccctttgtccccacccccccgccccttgggggtgggggtatctttactgttcaa

SEQ ID NO: 14854 - DNA, 305 bp, Zea mays
  Clone ID: LIB3150-084-P2-N2-G8
gagcatattgtttcctaaaaaaatatttaacagagcacatcatcgaagtgccacactgccacatgtatcccacagttccatttgcctttgaaagattgtttacagtacagtgcgggcatcagcagcaacatcggagttcggaggtgtgaggtgtcgggcgtgctgcatctgcatcaacgtgaaccgcaacttcaaccggttggtcaccagccatgtatctcttcatgtaaacaagccttttatgctctggcttactggttcacaactgtaccaattgcgccaacacattttgatttttgaattat

SEQ ID NO: 14855 - DNA, 298 bp, Zea mays
  Clone ID: LIB3150-084-P2-N2-G9
tcgcgatcttgaaagggtgccaaagaactcaacaagtgcctggggctcaatggcatgagtatttacaatgacacgcttgatatcaggcaactctgaataatgctggagggcacgcaagtataatccagccttttcacagagctgagcaatacgaggacgatcataatgactgaacatgccattcgcaagaatggcatctgcaacatttgggtaagtcactaagttgatctccaaaaccttggtttgaagaaaagcatgatccggcaagtttggctttagaacatccagcagaaaagct

SEQ ID NO: 14856 - DNA, 114 bp, Zea mays
  Clone ID: LIB3150-084-P2-N2-H1
aaggaatgatacctttttgacatgtaaaatttataaaaaagggccttttaaaaacttaaagcatttaccattttagggcacctgtcaatttattggtagactacataatacata

SEQ ID NO: 14857 - DNA, 295 bp, Zea mays
  Clone ID: LIB3150-084-P2-N2-H10
aacagcaaagagactaattaacatacaaatataaagataaccatcatcccacataggaagcatgttttttggatgtccgaaaataagctctaacgagcaaaccacactccgcaacctagctcgtaggcaggagttccaaaacgggcacgcaaagagaagcaactcagtacttgtagtccttgacgtggaggctctcggtgtcggcggcagcatcacccttgtaggtgccgagggtagtctcagagttggccttgcacctggcgaggaaggcagctctagcctttttcaagttctt

SEQ ID NO: 14858 - DNA, 364 bp, Zea mays
  Clone ID: LIB3150-084-P2-N2-H2
atgggaatgaatcctttatgaaaggtaaaatgtataaaaaagggcttaataaaaatataaagttttaatcatttaagggtatctgttaatttataggatgacttaactaatactactacttttaaaaattcctctataaaacaaattattctatggcatattttcactcaacccttataaccctattaaatttattaatggttgaaaacccttttttatttaaattcttcacaaacttttattttcttgaattttttttataaacacctttctttttatttctaacattttactttcaaaaaaatatttttttttacatacctatattaaattttttttctactctcttaaaatttttctccta

SEQ ID NO: 14859 - DNA, 335 bp, Zea mays
  Clone ID: LIB3150-084-P2-N2-H3
aaacacatgggcaaaacacaggcacttcagttaacagagcaactcggcaaccgtttcattccgtcaaagactaaaaagaattctctatagcgacgccaatgttcagccttgctggcatcgcaattatcttccttgatcaaccggagtttacaggtactgatccagacaacgaaccatgcatgactcaaatcaaaccttacccttctggtcttcgattttctggaacgaagtgaaccaccgcttccaggaggcgtcaccctgctgctcaattcacgacaggaagcagctgtccaggaggcagaacaagttcacatacaggagctggtaccgcacgg

SEQ ID NO: 14860 - DNA, 407 bp, Zea mays
  Clone ID: LIB3150-084-P2-N2-H4
gggttgaacaagcagataagataaatagtcacattacagctagctgcaaaaatcgttcatgaattataagcatcaggcagacttaaaaacatggtagtcttagaacattgttctatatccttgcagagcaactagaaaaaactctcaacacagcacattcagaggatttatgcgttggcagcagcctgggcagcggcatcccgcttactttgctcttctatgatgctcagcttgattcccttgcccttgggcaggctcacccacggcttattacccttgccgatggtgaacacgttgcccatacgggtggcgaactggcggcccaaggagtcctacacgtgaatggtcttaaagctgcccttgggctttctcctgtacttgataacacccacacgggcagtgtttct

SEQ ID NO: 14861 - DNA, 314 bp, Zea mays
  Clone ID: LIB3150-084-P2-N2-H5
gcccaaacacaagcatgtttgctcttattttattcatataaataattaacttacaaagatcaatagacaagttcctgcaggaaatctcattaccgactggagtagtcaacaccgggcatgccatccgttgagcagctcatcagttgttggagatgttgcgcgcaatcttgaaccactcggtgtggaaagagccaggcatgtcgaccctctcgtaggtgtgagccccgaagtagtccctctgggcctgcaccaggttggcaggcagcctgtccctgcggtaggagtcgaagtaggccaggctagcggacattccc

SEQ ID NO: 14862 - DNA, 337 bp, Zea mays
  unsure at all n locations
  Clone ID: LIB3150-085-P1-N1-B3
ttcctacgcgtccgctcagctcccatatcgtgtggcctacctctccagcaggggcggtctccgtcgtctcgnctccgctcctcacctcgccagccatgggcaagatcaagatcggaatcaacggtttcggaaggatcggcaggctcgtggccagggtcgccctgcagagcgaggatgtcgagctcgtcgccgtcaacgaccccttcatcaccacggattacatgacctacatgttcaagtacgacaccgttgcacggccaattgaagcacagcgacatcaccctcaaggacttcaagacgcttctcttcggcgagaagcctgtcaccgtctttggca

SEQ ID NO: 14863 - DNA, 82 bp, Zea mays
  Clone ID: LIB3150-085-P1-N1-D3
gtttttttattttacaagtaatctgaatggctttggagtgcataatcaataatcaaataaatacaaagcttttggccttatt

SEQ ID NO: 14864 - DNA, 255 bp, Zea mays
  Clone ID: LIB3150-085-P1-N1-F1
tttattgttttttgctgctctccgaccccgagctggcgaatcctcatcatcaggcgaggccctccttgcgagtgaccgagatggcgctgccgtatcaggggaccgttgatgaccccagcttcaagctcgtcatcgacggtgatggtggaactggtaaaactacatttgcgaagaggcatctcactggagagtttgagaagaaatatgaaccaaccattgttgtggaagttcattcgttggatttcaccactaact

SEQ ID NO: 14865 - DNA, 432 bp, Zea mays
  unsure at all n locations
  Clone ID: LIB3150-085-P1-N1-F12
gtaaccttgaatcctttataatcaatcatcccattctttttttttatcatatccaaaatctacaaggtaggctcctaataatcattgtggcaccaaaaaaaccntatacacatacatttatttccttcatccttatcattcaaattatttcttccttttatctaattcttttatctattcttcattctcttatatattcttaacaaatcttttttcattatttatcttttcaattttctctttttatattatttatatattatacattttatattttttcattatatatattatataataatttaaatatataattctttatatacttatacacttttatcttttaactttttttttatatttattttatttttatctttatttattatttttatattctttcttaacattttttttatttataaaatttta

SEQ ID NO: 14866 - DNA, 259 bp, Zea mays
  unsure at all n locations
  Clone ID: LIB3150-085-P1-N1-F8
ttcttcaaacacacaccatcccagctccgagatgtcatcctgcggccggcgggagtagccgcgtcacgttctctttttatgaccgttacatcaccattttctcttctgagggactcctgtaccaagacgatgtcttctttcatggctttttaattcatgcatttattttattttattctttttttttcttcttttattttattttttttttattctttcttattttattaatnntttttttatttttattctttttttt

SEQ ID NO: 14867 - DNA, 200 bp, Zea mays
  unsure at all n locations
  Clone ID: LIB3150-085-P1-N1-G1
ccaaagctcgccccgctcccagctaggggggcctctttccatccacaggggccgtgtcgcctccnactaggacagcgccgacacgatgttggagatgagtttggtgcaagggagccttcttaagaaggtcttggaggcgattctcgtgagctgtacacggacaccttctttttactgttccgggaccggtattcttgttg

SEQ ID NO: 14868 - DNA, 317 bp, Zea mays
  unsure at all n locations
  Clone ID: LIB3150-085-P1-N1-G10
gcaccactcgcatcgtgtgctcaggcagatccccgtcccgcatgggctaaggccaggttagnngtcattgaagacgatgactgcttctgcagctgctggtgtgcagatggaggctgcacgcccttgcattttggcctcgccaggaattcttaccgcacgtttagcagtttctaggactgattgcatgctcagtaccactgctatcattcctcaaaatcagctgctccaggcctttaatgtttaagtctcattgattttgttgattgttctatttttttatattttcttccaccatttttttttttcctttatttttt

SEQ ID NO: 14869 - DNA, 68 bp, Zea mays
  Clone ID: LIB3150-086-P1-N1-A1
tgagaggtccaccaaccttgactggtccaggggcccaaccctacttgaggctttggacttgatcaatg

SEQ ID NO: 14870 - DNA, 277 bp, Zea mays
  unsure at all n locations
  Clone ID: LIB3150-086-P1-N1-A7
tcttcctccacaacacacaaagacagctcagggcaggtcacacacaggctcggtgtggccnttncgcaacncgctttcccccacttcacccgcctcggcgccatggctaagctcgcgctggcgctcctcctcctgctggccgtggcggcgtccgcgtcggccagcagcgggagccacctggatctcgacctgggcttcctctcctctggggaccgccggagggagtgccgcggtacgtgtgccgagtgcctctcctaggagtctgattaggagggcc

SEQ ID NO: 14871 - DNA, 262 bp, Zea mays
  unsure at all n locations
  Clone ID: LIB3150-086-P1-N1-B3
ttttactgaagttttgtcgatctcgaatgatattatttgaaaagactttgtngacaaaaaaaaaaaaaaaaaaaaaaaaaaaaatnntaaataaaaaaaagaaatgaaaattaaatattaaaagaacaaaaaagaaataaggacctatttataacttaatattgaaccttggtgtctttatatgtttaaatctttgtgccatatgccttatttcttgcttccataatttttttcttataaatnggcaatttggttttatatt

SEQ ID NO: 14872 - DNA, 176 bp, Zea mays
  unsure at all n locations
  Clone ID: LIB3150-086-P1-N1-C1
aacatttcttctctttctgctcctccgggtccggctgatccatccaagagggggatcgccatgtcggactcggaggagcaccacttcgaatcgaaggccgacgctggggcttccnnnanttagccgcaacaggctggcacccgccgtaagaacggcttcatcgtcatgaagaaccg

SEQ ID NO: 14873 - DNA, 127 bp, Zea mays
  unsure at all n locations
  Clone ID: LIB3150-086-P1-N1-D7
ttgtcttcttacgcctgggcnnacncnaagggcgggctctttttttaacagcgtttgccacacaacctaacttcctactctctcttttttttttactcaaatttttttacacctatcattaaacttt

SEQ ID NO: 14874 - DNA, 225 bp, Zea mays
  unsure at all n locations
  Clone ID: LIB3150-086-P1-N1-E3
tcctacttttgttttccccctcttatctaattaacaaaagcgttttttttccaattagcatgcctacacactaacnccaactttttccatccattacaatatttacattnttnctcctactccacatatgacattcacatactatcatctatttttaatatctctttatttcttactatacttactattaattatctattcttccatacattatatatttttttt

SEQ ID NO: 14875 - DNA, 272 bp, Zea mays
  unsure at all n locations
  Clone ID: LIB3150-086-P1-N1-G2
tcggaccacaccttcttggtttcacttcggttggctggcattttggcccggccggtcggttcgaaaccttgcgaggcccgaccatgggcaccggcccggggtccgtccaccaggaactcgacaaggcttgcgcccagggtggcaaggttgacccgaacaagnngaaccagaaagtccggttcattaaccttgtgtcacgcttccttaatggggaaggcggaccaaatcggttgagccaggttcagaccccttccggttagggtgggggggcc

SEQ ID NO: 14876 - DNA, 111 bp, Zea mays
  unsure at all n locations
  Clone ID: LIB3150-086-P1-N1-G9
tctttctcacttctccagataaagaaatagggggtgctcatatattccaacgcagccggactataaccactcctnttacattaacaaattccattacctcaccaaacacta

SEQ ID NO: 14877 - DNA, 189 bp, Zea mays
  Clone ID: LIB3150-086-P2-N2-A1
aacgggaactcatgacatccatacatagattcagagttgacaccaccagtggacccaacatacccaaagtttgtgaccacattccaccattctacgacattacgatcattttgacaaacgccataattctttgaacccaattttatttcacaaaacgaccgaggcgaactgccgttccttaaaccacgc

SEQ ID NO: 14878 - DNA, 313 bp, Zea mays
  Clone ID: LIB3150-086-P2-N2-A10
gcaacggctaaattaaccttctgataaagaatctcaaaaatccttgggcgggatactgaagatctttcacccatcagagaggtattatcaggacattctagttttacaccgttcatgcacaaagcatatcaaatgatgggacaatgttccaaaatcctaggcatatgccatctttcaaccccagaacctgctcagaagacccttcttttcttttttcatacggttctcaaggtttgggaactcaactgagttgtaagccatatcaagcacaataggattgcatggaactgcttggaaaggaggtgggaattga

SEQ ID NO: 14879 - DNA, 304 bp, Zea mays
  Clone ID: LIB3150-086-P2-N2-A11
ggcgagtaccatgacaatacattactacgcttcagatccaaggctatttacagcgctccgcaaggaaaaggattggccaagcaggcgcaccagcggtttcttgcctgctttctcctgctctgctacaacttacccccaggcgggtcagcacacagagcagggcacacaccccccaaaaaaatccagcttacgacgggaaactagcaccaggagaagcaccatctacaaactgggtaccgcggggcttttacccggaggcatacacacaaaattacctacctactacacaccactgaaacacacc

SEQ ID NO: 14880 - DNA, 268 bp, Zea mays
  Clone ID: LIB3150-086-P2-N2-A12
cccagggcgcatttttgcaccaaaacaactgcatttcacagtaattttcattgttcactgaaaaccaaaaccttaaatttaggtttcaaaggctaaacatgggtaaaaacacaagaaaaaaatacgtctgccaaaaacgttgttctagggcaggggccccaggatacaagctccactcaacggtgggccttggcaacacgcctaattccgtcctttttttgatggcgttccttgtggaagagcccttggcagcttttattaacttatt

SEQ ID NO: 14881 - DNA, 241 bp, Zea mays
  Clone ID: LIB3150-086-P2-N2-A2
aaaccatgtatgccttacattcgatgttccataaaaaaaattaaggtttaatagcttcacggtttcaacgaatggaattattctttatgaccaggcaaacattgccattatatattacttggttacgcgacatctgcaagggtgtcaacatgacgagattttttaagctttcacgaggttaccaacaagcaatctcagtaccagccacatagtttttttttttttggtagatgcctttgtt

SEQ ID NO: 14882 - DNA, 287 bp, Zea mays
  Clone ID: LIB3150-086-P2-N2-A3
ggcaagaccagcaagattacctgttccatcaaaatcagtttaggcaaacgacattacaacgagtgcagaccaccactcgtcagaatctagagagattgaaaaaaaaacagttcttttctgcttttggtgctcccacgacaaaatcacctgagtagctctcgagcaaacacgaccatacatttattgcgaccgttcaaacattgtaacaaatggcagcatcgagctagtatagctccacaagaaaacattcccatccctctttcttttttaatagggcttcactggtg

SEQ ID NO: 14883 - DNA, 296 bp, Zea mays
  Clone ID: LIB3150-086-P2-N2-A4
ggcaaagaaagaaatttggtccattgaaataaggttccaagatacagatcataatcttttcgaaaacattgctaaagcacaaatggtgacatgcttcctctggctctcaaggtttgatgtgaaactttccatgtttacttctcgtagatccaggggtgctggctgctctgccaatcagcagggccctcggggtaccacagggcaatctccttattagcactctcaatgctgtcacttccatgaatgacattcctgccaatgtcgacagcaaagtcgccacggatggtgccgggctc

SEQ ID NO: 14884 - DNA, 196 bp, Zea mays
  Clone ID: LIB3150-086-P2-N2-A5
agcaacaaaacgcaaaaaaacaaccacataaaattgcaacagaattgaacatatccaaacatagcagttatgtaaaggctgataataccacaagataaaatggaccatccatgacacagagtcagcacaggggactctgcgtcagatcacacagctaagcactcatcattcgaacaagttcaagaaaacctgataa

SEQ ID NO: 14885 - DNA, 146 bp, Zea mays
  Clone ID: LIB3150-086-P2-N2-A6
aataaggcttttataatatataagtaaaataatttaaaatttttaaacatatatttatttaaatttttatttatccatatgttataataataataaataatacaaaattgaacaacttatatttttattatattatacttttatta

SEQ ID NO: 14886 - DNA, 240 bp, Zea mays
  Clone ID: LIB3150-086-P2-N2-A8
gggggggataacattccaaaacaaggacaacgttttacacacaaggactgttgtacacctgctttgtcgatgacaacccgagaaacatcctgtgctaccaaaatagtctcgggtgtttcttaaaaacaccaacttgccctcgtaggaggaacatccaatgtggttggccttttgaaaatatgggccaacattttaagtttgtgtttaggggcggtggacaggaggcaacagcaaagccaa

SEQ ID NO: 14887 - DNA, 233 bp, Zea mays
  Clone ID: LIB3150-086-P2-N2-A9
ggatatattgtcgaccagacttaccataacatggtggcattccaggcaattttacatcaaatgattaatgagggtgcattcatgctactccgtttgacaaatgtatatgtccaactacaaataggagcatacatcattttcgttacaccctatcctttgtacgcacaacacatgtacaacacgggttacatagtagccgagcaacggacatttacattaaccagactgctggt

SEQ ID NO: 14888 - DNA, 358 bp, Zea mays
  Clone ID: LIB3150-086-P2-N2-B1
ccagagagcagagccagccctttttttttttattttttttttttttttttttaaggttaattttttttttttttttatttttttttatttttttttttataaattttaatttaaatatatttaaatttattttttaaaaaaatttattaatttttaaattataaatattattaatagtgtaataatataaaaatttatttttatataggtaaaaaaatattaaaaaattgaatgttgtataaaaataattaaaaaataaataagtgtaattaaacacaataaaataaatttaataaaataaattctataataattatttatatataaaaaaaaaaattttaaaattaataattatttt

SEQ ID NO: 14889 - DNA, 258 bp, Zea mays
  Clone ID: LIB3150-086-P2-N2-B10
accacggaaagataatattaacacagatcacgcactggcaagcggttacggatatagaattcaattcagaatcttctaaacaaaactatggcaaaacaatcgctaggttctcaacatgaggtcccagaactccaaaagcattacatgattcatttgtggcgagggggatagggtttttaagatctcggcttctccttcttctccttgaagagggcgagcagggaaacgcccgagaccttcacaaccttgaaacggaca

SEQ ID NO: 14890 - DNA, 66 bp, Zea mays
  Clone ID: LIB3150-086-P2-N2-B12
aaagccaaaactgatatatgatcatgcaccagtgcttcaccttatttgcgcacaaagaaacaaaaa

SEQ ID NO: 14891 - DNA, 422 bp, Zea mays
  Clone ID: LIB3150-086-P2-N2-B3
ataaaatgactagctgaaagacaatgacaactaagcaataacacgtcaataacaatatttagctttaacaagcaatccaatcttggacagttttttcttaaaaaaaacctgagttcagttcaggcagggcagctatagttgtggctataacaatagaacatatatagtacccaacatgggtaactaatctagcacttgatctccttaagaccatgagagaaatagaggaatgtcggattagtggcaccatccttgtaataggcgaataccacggacgcttcgttcttcatgctctcaccaacaaaaaattgaaggtcctttaacttgctaaggagaaacttggttgcaccctcgacaccctttttgaactcattcgttttctttgggtcaacacagaagggagaatctggatgaatttttta

SEQ ID NO: 14892 - DNA, 274 bp, Zea mays
  Clone ID: LIB3150-086-P2-N2-B5
aaacgggtccaatgttttaaaacgagcgagagccggtcactgcacttacttgcacttgcacaggaaacaagcgccacatgtggttcgcgagtgctcatgcaagagctcacactcggggggaattacccgaacatgttgcgtccaggtgaactggaaggcatcgatgtgtatgtttttttgatgcaagttgttcatgcaatcaagaaatatcaactgtctaaagccaaagccaaagattgaaggttttttttgacctgcccaacgggccattgtt

SEQ ID NO: 14893 - DNA, 286 bp, Zea mays
  Clone ID: LIB3150-086-P2-N2-B6
agttgaaagactaatcaacacgcagtttaaccatgagcaagctttgtttaattattacagtctacgagtacttattcaggcagatcactctgaggttgtgcctactgttgggcgctgccagcttgaccttgttggtagctgccactgccagcaggagtaagcacagccagctcatgcttcctaccgttcttgagctctgcagcttcctccatggagatggcatacgagctggcgatgacggcggccggcaagtcgctcatgacggagttcttcccggcgacgtggc

SEQ ID NO: 14894 - DNA, 402 bp, Zea mays
  Clone ID: LIB3150-086-P2-N2-B8
gatataggaccactcacaataaacagcgatggaaaaggtaaaatgcaagtgacaacagtttaaagggcttcccaacccaaccagaccgggctccagcgccccccgccacaaacgaggtgggacaccgaggccttgcccggcagcatcttatacggggagcccccaaattttactgacgacagtcataacaagcgtcgcacccaagaaaccaggttccagatcacattgcatagtgtcattcgacagcagcaaacactagctactagtttctaggcacataaagccggttttactgcccctaacttcaagtcggcttgggtgcctccctattctctttagcagggtccttcgagatgtcagaagttcatagggtcatgttttactaaggacttgatgttcaaa

SEQ ID NO: 14895 - DNA, 217 bp, Zea mays
  unsure at all n locations
  Clone ID: LIB3150-086-P2-N2-B9
ggnctagcagaatgagagtcactggtaaaataaggaagttgtatttgttttccaagatgacaacccttacaatggaaacttcattcagatcacgtatgacctaaacaacctgattttattatggtggacagacgcgagccatacaaatgacctagacggtgatgccattgggcaaaagaggcggctcgaactgaggctgcagaaagcacacgggtcg

SEQ ID NO: 14896 - DNA, 154 bp, Zea mays
  Clone ID: LIB3150-086-P2-N2-C10
gaacacagcatatccggcttgcagtttcacgggatactgggggaaccagttcattgtccattcagtcattgcaaattggtccactgatcatggcccaccagatttccaggaacccctttcaagggaaccttgtttccccacaaaaaacacgttt

SEQ ID NO: 14897 - DNA, 322 bp, Zea mays
  Clone ID: LIB3150-086-P2-N2-C11
gtcgaacaaaacatatcatacaaatccacggggggttttgttagttccaaatttccgaattccagtcacttcacccacagcagcgaggaagtaaaagcttattccacgactcatctagcaaaacacggtggcatgcctatccccaaaagtccatgtgcggaggagtataccttagccttgcagtgctacaccaaggtccgaaacatgatgacacgcaaagctggcataacctgagttgcagcttcatcatgccgatctaggcgtcttctgaggcatggacaccatgtagagtcttgcctttcaagagttcctagctcgctcc

SEQ ID NO: 14898 - DNA, 231 bp, Zea mays
  Clone ID: LIB3150-086-P2-N2-C12
gcagtcacagaatttggtttattaaagatggcatcatccggctgtttcaaaagctattcgagctcaaactcatcaacaagccttcataaactaccgaattcaaaaccgatagaactctccaaaaggctccaaaaagaataccccgtttgatcccagggtggctgtccctaaactcgttaatcgccaccactgaaaaaagtggggattttgatccataccatgaaatggacc

SEQ ID NO: 14899 - DNA, 262 bp, Zea mays
  unsure at all n locations
  Clone ID: LIB3150-086-P2-N2-C3
ggtggaggatcaaagcacgctttgtcacggagagattttccaaattcanggntttcatgttacaaccaaccggtaagttccagctcccgttttcctggttttaaaagttcagaaacacaagtgattggttctgactcttatcccatacccttcagnctttataaaaaggcgcagatgttacaaagagaacatttgatttctaagaaaacgcgcatttgccaatacagatgagactgcagaaacctggccaaacagttctact

SEQ ID NO: 14900 - DNA, 261 bp, Zea mays
  Clone ID: LIB3150-086-P2-N2-C6
agagggaactgatttgattaaaaggttcacggggacacatttacctgacaaaatttgagccattaatgctcaaccaaccacttggattcacccaacattgtttcagacattccgatggaaaaaaatttattctcgggagcacttttcttcgggggggaagaagacaactcggttgtattaccagaccttgagttcttcatcttatatggagctggtcatgtggcggatcaagtcgaccacgcgggtgctgtattcccactt

SEQ ID NO: 14901 - DNA, 136 bp, Zea mays
  Clone ID: LIB3150-086-P2-N2-C7
ggggggggttagggccaacttaatatactaccttgtctccatgtcgaacataatgtttaagaggatccatagttattgcagagttcccataaggctcatacatggattaaataggatgttgttccaggcattatgg

SEQ ID NO: 14902 - DNA, 305 bp, Zea mays
  Clone ID: LIB3150-086-P2-N2-C8
attgaaacattttttaacaaaaaaaatgcatatgttgcagttgtttacagcaaagatgctcagtgcagcattctaactggtaacagcctgagcctcaatagatatatatcaaaacaaggatcaaaacactggctatcccaatcctatccaatggcaatgcctatactagactacaattagtacttaaaacacatcaggttcaccatttgtatggcatatattcatgctttgacctattcagcgttcacccttgtgtcaaggtatcatcgcagtcacaggggggatgccaacttcctggaattgaa

SEQ ID NO: 14903 - DNA, 338 bp, Zea mays
  Clone ID: LIB3150-086-P2-N2-D1
gcaagaaaacatcacatgtgcttttgatgcattacattacataattcttaagcgtatacaatgagatgctcagctattcatgccaaattcacggcataaaggactgttgtttatttcagcttcatgagttccacagggaaaatttagaactgtaaaacgcgcactccaaacaactattagatgctctgtaggaaacatgcaaactcccaaactatgcattctgagcaccatgcacttttcagagattgttccatttcaccatggcatcggctgctttggtgaaaattgcattcttaggtcctagcttttcacggacaacttcagcaagcttcttaaca

SEQ ID NO: 14904 - DNA, 369 bp, Zea mays
  Clone ID: LIB3150-086-P2-N2-D4
acaacggtcaaaacaggctttgttccatgacatattattaaatattttaattcattaactggctggtcctgccaaatttttggtaacgcatgcatgcttgttttactgatccgctgcggttttttatgcacacgcaggacacgaggcgaggcagttctagcagtccctggtgcaaaagcagcggtggcgtaggcccttgcacacgccgccggtgaaaccttcggtcaggcatacgtttgcgcagttggcgtccctcgagcatggccctttgaagcggaagctttgtgactcgaactttcttgccgacaccattattaccggcccgctttgcgtcccggtgtaacaaacgatcaggagcggccccttggg

SEQ ID NO: 14905 - DNA, 364 bp, Zea mays
  Clone ID: LIB3150-086-P2-N2-D5
aaaaaaaaacaaaggttgcatttgcaaacagtaaaatctattgttacatccagcttcgatttcctcactcctggattttctcctcagatgtgtgcttggtggtggttacccaatgtacgtaccatcagccggcgccccttgtgtccagctcccctgttcgatgggcttcatttcctgtttcttctgctgcttccgttctacttgtcgaggcatcacctccaagatgaagctgccaccgttccatgtcgaggcgcacaccttgagtatcaagaacaccacgtgcatccggttggacaggaatatagggaccgtcagggccattgtagccactgggaacagcgcctggagcagtttgtacatgacc

SEQ ID NO: 14906 - DNA, 306 bp, Zea mays
  Clone ID: LIB3150-086-P2-N2-D7
gaccaaaaggtgggtgggtgggattagatctttttgcacagaagagcaatgttcacacaatggcgagcacagcactacaatcagctacacaatcaataataagaggaaatgcaaacgatccttcctagtaagcgcatcaacaatccttcctagtaagcgcatcaaccgatgcacattcatttgtcagcgagcatctatgagcaccagcgcatatcagaggcccaatggggccacgaagcggtcgcgcgaacctcatatgcctctgagatctgtttgaacttggcctccgcttcttttttgtagctg

SEQ ID NO: 14907 - DNA, 211 bp, Zea mays
  Clone ID: LIB3150-086-P2-N2-D8
aaagccaaaaaggggtgggttataccctttaattacccacccgggaaagttccctccttgttgggaaaaaccaaaccttaccccgcccaaattgccgggtctatttgagaagtgttttaccttcctttataaaagggatgggaaaatttccctttttttttaaccccaagctcgggccttttaattaatttttgggggttatttttttttt

SEQ ID NO: 14908 - DNA, 224 bp, Zea mays
  Clone ID: LIB3150-086-P2-N2-E1
gcctcagccaaaaaactttttccttgcaaattttttttggtgggggtacctgtaaacggccttccacatagagcaaatttaaagctcgttttgacaaacacaaaaaactgcacccccccccaaagagggcttgttttatgccgccaagagccgtctagagccgccagaatttcctacagctttttttccctttttaccgcctttttttggagtttcttccgggg

SEQ ID NO: 14909 - DNA, 346 bp, Zea mays
  Clone ID: LIB3150-086-P2-N2-E10
atcaacaaactggtaacttattcccactcatggtcctacatgcagctgaggtaaaggtaagataatggtgatctgtgtagcacaacgcaagttcacaacacaacacagcagaccccagatccagatcactacaaatgcgaagcatggggttaaaagacagaaaaagttgtaacgccttcggatcgtcacttattttttcgcttctttccgggcttcagcttgataacctcgtcaatgtacaggatccccttccccttgtacacctctggagccttagagctccggatggcgccggcgaactggtgcaccctgtccttatcgatgccggtgcaacaaattatgttgg

SEQ ID NO: 14910 - DNA, 390 bp, Zea mays
  Clone ID: LIB3150-086-P2-N2-E12
attccaacactttaaattcctttttttgtttcgaaaaaagaagatgaaatggacagctcggtcgatttggcaacaaagcactcctcggctcctcctcacaaacattgtagtcatcactatccatgggtcactaggctgatatttgtagttaaaccctacgattacaaagccgatcgagccagctagaggcgcgcggcggccaaaggctagcttatcttcaactggaacccggcgtcgctgcgggccgcggtcgccagcagctgcacgtgcacatcgtcgaacgcgtcgacgtcatcatcttcctcctcctgtcgtggctccatcacgggcctgctcgtcttcatctgctcctcgaacatcttttgcagcttcttcccctgcacctctatc

SEQ ID NO: 14911 - DNA, 351 bp, Zea mays
  Clone ID: LIB3150-086-P2-N2-E2
aactaagcttcatcagaatgagaacatatggtggatgtcaacaacaacaacaacaaaagatccaagtacacttcagatctgcctcatttctatgtagctacaagtcaaaatggtcgacacagacatatgcaaagcctcttttcatttacccctgctactatctaaagtcgatatagggtacattcatgctagcgtactgtatttaatacacacacaaaaaaaatatgaaacagtgagcaagataaattaaacatcattcttgggatacatgaaccaaaagagtcgagcttacagcagcaaaaaggaaaccaaggttacttacttgctcattctccccgaactgtgattaca

SEQ ID NO: 14912 - DNA, 397 bp, Zea mays
  Clone ID: LIB3150-086-P2-N2-E3
agctagaaatctagccagaacccagaaactgttccagctcatcaaatgtcatataaattagtcaaacaattgttccaagcatggttcctgaggaaccgagtatgccttatgcgaaaatagtaagtttcaaatggacataagcatgctttgtcggtcattctgattgtttctgattatctttagtggaaaaaagtgatgatgagcagtttttttgtcacttatcacataaccaggtataaggatggtggtatatacaaaccagaccaagacctgtgtaatgacgacatgatcaatgttgcattagaaaccaaattactccggttgtgcatggatgctacagccttcggtgcgtctgaaaaaagatgtctgtatgtggagatttacatcgatgtcaccc

SEQ ID NO: 14913 - DNA, 430 bp, Zea mays
  Clone ID: LIB3150-086-P2-N2-E4
accaactgttacatcacgagtgagagtaaaaagtgtctcaacagcacttggatagtacagtatgaccaatgatgttcagaaacatgcacttgacaactaaaaggaaacaagatataaatagttcccagactccgagtgacaattaaaaccagtaacagtagcaaaaacgaaaagattagagcttgtcctcaaactcagaaagaggagtcatctgttctttcagacccttcctcttgcggatatccagcaccagctgggcagcctgtgagccagcctccaaaggatccgagcccatcatgtcccagtggtcaaacacacactgggggaacgcctgaccagaggttgcagccctcagctggcttgagaacccaaaggactcgttgacagggaggaaagccttgatgttgtatagcggagtaccaggcctttg

SEQ ID NO: 14914 - DNA, 279 bp, Zea mays
  Clone ID: LIB3150-086-P2-N2-E6
ccacccggaaaaagcagtcccaggtcaatggcggatgacagacaacctttacctctcgctctaccctgacttcgacgacgctaacttaagacgacgacgcgacgctaacttaagacgacgacactaacttatttattaataaccatgaccttgacgacattcgagaacgatctcctctcccccgtcttggagagcatgcgcttcatttggagctgggaggcccgaataagatctccgagtctagccttttggaacggaacagtttgtccatctccggag

SEQ ID NO: 14915 - DNA, 77 bp, Zea mays
  Clone ID: LIB3150-086-P2-N2-E7
gtaggaaattaacttctatatcaaatcacattatattttttctaacaacccttttaaaaaaactttgtttaatctta

SEQ ID NO: 14916 - DNA, 367 bp, Zea mays
  Clone ID: LIB3150-086-P2-N2-E8
agcagaacaaaagataagtacttccatgcataacgatgttcagcacgagataagcaggttcacacaaggcactgtaataccccatacacttaaaattcatgttgcacaaagcaaaataagataggctaaaccaaaacgtctggattcgcattccaactgtagattggacttaagcaacggcctcgaggaaagccttcccaggagcacgcttctcaagtcttccatggttaccgagcagctttgcgttgacaccatcaggaacaattctaccctcactcttgtacttcaggtagtcggcacggctgaacttggtgaagccccactttctgctttcaataatcttttggcgggcaaggaacttgaactt

SEQ ID NO: 14917 - DNA, 218 bp, Zea mays
  Clone ID: LIB3150-086-P2-N2-E9
agcatcatgggacatcattgattatcaatatcacgagattccagttgctatttcagttgatctaagaaaagaagacgggttaaagctcaaacagcaagaaatgacgtctactgaacctaacagctggagcatttccaaaccgcagttcaagtatacagtaatcagtgttaaaaccaggctgggaaaaaacagccttaactcaccagctgccaaccccc

SEQ ID NO: 14918 - DNA, 260 bp, Zea mays
  Clone ID: LIB3150-086-P2-N2-F1
agacaagaagtttcaataaatagcaaacctaaatatcacatttacaaccaccgcatgtgaaaattatcaattcttagaatcgagagttgattcacttatgaagtgttcatcaggtccgcaaatgatatgcattaagactaacaacaaaatcccccaagtagaagatattttgcagttctagctaaaagaatgctctaagatgcaacacccttgcccttcttcctctggagcttctttcatgtagaactcgagctctttac

SEQ ID NO: 14919 - DNA, 146 bp, Zea mays
  Clone ID: LIB3150-086-P2-N2-F10
aattgaggggagattttatattatatatattttttaaatttaatataatatataatttataaaatttatcaaataaaaaattaataaaatatcaaatttattatatttatcttaaaaataaaaatgatataaaaaaaaaataataa

SEQ ID NO: 14920 - DNA, 450 bp, Zea mays
  Clone ID: LIB3150-086-P2-N2-F11
ccagagagcgagccagcccttttttttttttttttttatttttttatattttatgtttttttttaattttatttttttttttttttttttttttttattttttttaaattttttatatattattttttttttttttttttaaaaaaaaaaatttaaaaaaaggagcccgtaaaataaacaaaaccacaaaaagtgggttgatacaataacaaaaaccggcaaaaaaaaaaaaaaaaaatgtccccttataattttaaaaaaaaaaataatcgatagaggggctccccttattattaaaaaaataaaggattaaaattttattaaaaaaaaattcccaaaaatataaaaataccaaaattcgctctaaacaattagatatttgaaaaaaaaatatttaaccacatatgtagagtaatattatttattataaaacacaatattaaaattata

SEQ ID NO: 14921 - DNA, 291 bp, Zea mays
  Clone ID: LIB3150-086-P2-N2-F12
caacaagaggaacgtccagttttttcccgtttttttttccacaaaaaatgcccccttaaccaaagtccttattacttaaaaaggaaaaccaaaattccaggcgggaaaggggaatctggggttgccataatgtttgcccttacaagaaaaatatctaaaatgtttgaagctagaatgctgatcctaaccctcgaaacatgggcagcttagggaaacataacttcaaagttgggctgcccccccgaaagaaaaaatcaaaacagttctggctctaagaactttttgctaaaa

SEQ ID NO: 14922 - DNA, 314 bp, Zea mays
  Clone ID: LIB3150-086-P2-N2-F3
ggcaattcaaccggcctaaacaaatttattgataattaatactaaacagtagggggcataaaaccatagaaaatacagggtccagaatgtaaccacagataatgcagacacggtgcaacacccagcgatccctgcacttgtgtttgccatagcaaaagccagctcaagccagatggatgtctctgtagcaatccttgatacacttcttttttcgatttaggttttgagatacagtattccaaggcagggaagttacttggggccaacatccttcagcgcgcaaaatctgctcctcccccatagcagactggaca

SEQ ID NO: 14923 - DNA, 349 bp, Zea mays
  Clone ID: LIB3150-086-P2-N2-F4
ggtaggggtttttttgttgggggggggggttaggccccccaattgaaaataaattgggtgaccaaattaggggcaacgcttctttggaaaaaagtgtaacatgccaactttccttctttacggtgcaatccaatcccatagaaccagtggtttttacagacccaaagatgcacgtcttcaggtcgacaatataaccagtttccacatcttgttcaatacgaacacatgttggctgccaaactttttccacagattcgagtaactctgacagggtttttccctcaccttatctaaccgtctaaatcatatagagtgcgtcccttgcgtttgatgggtttcttcgactttt

SEQ ID NO: 14924 - DNA, 318 bp, Zea mays
  Clone ID: LIB3150-086-P2-N2-F8
catacggaaagtttactattattgtgtttaagttggttttgtgatgaggtaaaaatgagactatgctaagggtccctttggcaacgctcgggcttgccacaaacagccctattacgatatctggactgtattacagtactaatcacaacatgattaaactgcaaagatgctgcaaatgcattctgcatatacatacatctcaatgccacgttattgccagttcccatactgctgctgattgcgggaaccaccacccttggaggtagtttgatcctcggcctggaccggacgcgccatatggaccaccctgttggtagt

SEQ ID NO: 14925 - DNA, 234 bp, Zea mays
  Clone ID: LIB3150-086-P2-N2-F9
aataatagtttattttttatttattattttataatttttatataataattgatatttatttatttttgatggttttttattttatattttttttttattttttattttttgtatttttttttattttatttattttatttttattatatattatttattttttttatttattttttattttttattttttttatatatttaatatttatattaaatatatattttttttttttt

SEQ ID NO: 14926 - DNA, 363 bp, Zea mays
  Clone ID: LIB3150-087-P2-K1-A12
cagcaaccacagccgtccatatatgtgatgctggaaaccaaacaattattgcggcgcctaaatttgatccctcaagggaaagtaataaggttctgtcaggattcaaaaatctctgttatgcatcgcggacctagtacaagaaacttccagaaagctggactcctacttttgcatgagctacccgccccggcttgaagaactgaaaactggagcagttgaaggggagcaaccgaacaatagaatgaaaaaactgtcagaagggttacaacaacaactactacagatggtaggaaaggagcagactggattcacgagcggcatctcttctttctgaagaaccccgttaggttcccagcttctttt

SEQ ID NO: 14927 - DNA, 411 bp, Zea mays
  unsure at all n locations
  Clone ID: LIB3150-087-P2-K1-A5
aaataataanataaaacaaaaaattttttataagaaannaaaaanaaacaaaggagaatttataaaaaaataaaaacacacaaataataatattatattaataaaaaaattaaaattaaaaaaaaaataaaaattaaaaataaaaatatatataataataattaaaaataaaaataaaataaaaaaaattaaaaaaataaataaaaaaaaaaaataataaaaataaaaaaaaaaaaaaaaaaaaaataaaaaataaataaaaaaaaaaaataaaaaaaaaaaaaaataataaaaattaaaaaaaaaaaaaaaaaaaataaaaaaaaaaaatatatatataaataataaaaaataaataaataataaaaaaataatataaaaataaaaaatataaaaaaatataaaataata

SEQ ID NO: 14928 - DNA, 374 bp, Zea mays
  Clone ID: LIB3150-087-P2-K1-A8
ttggtcaccttggcgccggttgggtccttcttctccacactcttgatgactccaacagcaaccgtgtgcctgatgtcgcggacggcaaacctacccaggggaggatacgcggagaatgtctccaccaccataggcttggtgggaatcatcttcaccataccagcatcaccgttcttcaggaacttgggctccttctcgagctccttgccagatcgcctgtcgatcttggtaatgagctcagcaaacttgacggcgatgtgggaggtgtggcagtccagcactggggcatagcccgtgccaatctgcccagggtggttcatgatgaatgaccttgaggtgaagctggcagtcttcttggcagggtcattcttgga

SEQ ID NO: 14929 - DNA, 226 bp, Zea mays
  Clone ID: LIB3150-087-P2-K1-B10
tttcggtcgctgacctcgaatgcctcctccacgtcccgctgcgagattctttttcggtgggtgatgagcggcttgacgtccaccttgccgctgcgcaggaagtcgatgcacagcggccaggtgtccttgtaccggaactcgcccaccacgtccacctcccgcgccgtcgtcgtcgtcagcggcagcgacatctagttgtggcccattcctgaccagtcacaccatt

SEQ ID NO: 14930 - DNA, 424 bp, Zea mays
  Clone ID: LIB3150-087-P2-K1-B12
gacaagaggcaaaagagtgaactgttttttttaaaagtttcacggcgacacatagacctgacaaaatatgagccattaatgctcaaccaaccactaggatacacccaacatagtttcagacattccgatggaaaaaaatttattctcggaagcacttttctccgggggggaagaagacaactcgctcgtatcaccagaccttgagttcttcatcttagttggtgctgttcatgtggcggatcaggtcgaccacgcgggtgctgtatccccactcgatgtcgtaccaggacacgagctttacgaagttgccgttcaaggcaatgccagccttagcatcaaagattctagacctgctgtcaccctggaaatcggggggaacaaggtcctccttaacgtaacccaagatggccttgaggcttccttt

SEQ ID NO: 14931 - DNA, 330 bp, Zea mays
  Clone ID: LIB3150-087-P2-K1-B8
attcaaactgtgaaatcttttctgttcataaaatcattaaccatatgtgggtcatgtcaattgtacatcaagaccaaaattcaaccactaaggtaaaaaaacggtatctctgagtggaaacatctgtccacaataatgtgcagtttcaatcctctgctgtgtaacttggttccatcaagagttcttcagatcctatacgtataagccccgttgttctcaatgctaggtcctttgctgatcctcttgagaatacctgctaatacctcttcagggcctagttcataacctttctcaagccccttgcccattagaattctatacagtggtttc

SEQ ID NO: 14932 - DNA, 318 bp, Zea mays
  Clone ID: LIB3150-087-P2-K1-C1
gaaattggcaaatatagtaattacatggaacatgcaacctaacaaattgagctccggataggcaaatggaacattgattaacttggactcaaaatattgtatttttttcatctgagacaaacacacgatccggaaacaccacatcaaactccaaatttacttgtccatccgtttccagttcacgtacgctttacgacattgttaccttcttggccaaaaactttgatcattcaacctttttcttgtcatcctttccgccgccggctttgtcctcctcctcctaatcctccttgtcgacgaggatctttttgcacgcct

SEQ ID NO: 14933 - DNA, 51 bp, Zea mays
  Clone ID: LIB3150-087-P2-K1-C12
gaaaagtctaattgtattttattttcgactataaattgtgtttggacgcta

SEQ ID NO: 14934 - DNA, 267 bp, Zea mays
  Clone ID: LIB3150-087-P2-K1-C2
acgcgaatgaaaaatggattttgtgtttgtattaatttacatttccagaggtgggaaatgaaaacaacaaacatttatgaccatactggtcaaacctatggcataatcaaacatggccacttggtgtgaccaccaaaatcctgtggcctatcttaccattcttacagaatagtaataatgcttagaaactcctctcccttaaaaatattattgatcgagtccctaccaatatcattcattcaactcattcatctgaggatctcccaa

SEQ ID NO: 14935 - DNA, 154 bp, Zea mays
  Clone ID: LIB3150-087-P2-K1-C4
aaaaacggggggcccccaatttttactggcgaggtgtataacaggcttcgcacccaaaaaaccagtttccagatcactttttatagggtaatcggacagctgcaaactctttctcctatttttaaggcacataaagccggtttaactgcccctt

SEQ ID NO: 14936 - DNA, 231 bp, Zea mays
  Clone ID: LIB3150-087-P2-K1-C6
gagctgcttatctttgcattgcatatatgggtccaacgcattctcgtcgcattgcaagcatcgccgaagctaacagaataatgatggcaaaccatgccttgtacagaacagaggcgacgtcgtccatagttgctgaacaaaaatcacggcgacaaaaaattggccggaccggaaaggatacaggggagtgtacacgcccaaccgtttgttacgtgcctaggtgcctgagta

SEQ ID NO: 14937 - DNA, 423 bp, Zea mays
  Clone ID: LIB3150-087-P2-K1-D1
gttaagtataaatagatgcatgctttgcatgttacagtcttatcatcttcccgtagagatctacgacgttgacacggcgtacgtagacgactacgtacgtaccgcgcgcgtacgtacattacatacaccagatcgaccaagaccatcacaccaccataattattagcatgcatgcattgtcagatccaatgcaaacaacagctactactacttgattcgacactgaactgaactgagacaaggctacgacgcacacgagagagacacgcattaataatccaacaattaaccaactaaacgaccaactatagcagacgacgatgcctgcatctgcatgcttgagctgccagccacttgccaccaaactgtcgtacgtcatccgagctagctaataagaagctagcagggtgtgtacggtgcatg

SEQ ID NO: 14938 - DNA, 308 bp, Zea mays
  Clone ID: LIB3150-087-P2-K1-D10
acaaaactctccatttttcaaagaacaaaggtgtggtgaggggcttaaatcttttcatccaacatagacaaagatacgggggtaacattgaggtctctcacaagatttcactaacatagctagacaaaaaaaatagatggctcgcgttgcttgaaaaaggtacattgttagcatgcagaacaacaacacttcagcagcaccaatggaagtccccttggatggctagtcttcaagcggacgggatcttgacctcttcggcattaatctcctgctgcagggacttggggtccttgcccgtgtcggtgcac

SEQ ID NO: 14939 - DNA, 198 bp, Zea mays
  Clone ID: LIB3150-087-P2-K1-D2
gcccaccacacaacagaaaattggcataaattttctactaattggtgccccagaatgtttgaatttattccaattgataagttttggttggttaaaacaaaaatatgtcactatgaatgcatatcaaaggtgctcttactagccctctgtgttcattgtcatctatttatacttcattgttatccacttatagctctc

SEQ ID NO: 14940 - DNA, 336 bp, Zea mays
  Clone ID: LIB3150-087-P2-K1-D3
atattataaggttctttaaaaatcaaattctaaaattacatggtgccggcaatcgtgtgcaagcaccaccaaacaagaaactaatgagacattagcatcagcgacacccatgcatagcatcgctattgtgttgcttctgatttattccaacaatgttacacggatccagacacagaatctatgcggtctgcatatctttggccacactggattcaccgaggttcaccttaacactgctaggagagccgtagctgccttctgctataagtgctctgtcgttagcagccatgtgctggattattttgtagatcattctaatatcttcagggcaatggc

SEQ ID NO: 14941 - DNA, 294 bp, Zea mays
  Clone ID: LIB3150-087-P2-K1-D8
caaacaataaacttattcttcttacgaacatcaatttcatctgatccatgtctcaaacttaacgggggctgaatgcatctcctggtcttgagctcagagttataaatgtccacctgttcttaaagaattccatctcatgattcatgtaacatgaaacatttgtccattttttagatggagtatattttatttaagatcattccctatatcccatgcccttagttttcatactatatctttcatttaaactgtatatgttaattacattactatttataatgtcatctattcacc

SEQ ID NO: 14942 - DNA, 161 bp, Zea mays
  Clone ID: LIB3150-087-P2-K1-E7
agaaacagctcattagctattttatctttctaacaccaacaagggtagtaacaaggcttgtatccatatatggcggaccagatgttcggataagttttaaattacactctggttgtaacgtaaattactcatctatattgaccatgcatactttgcgagca

SEQ ID NO: 14943 - DNA, 376 bp, Zea mays
  Clone ID: LIB3150-087-P2-K1-E8
aggaacgaaaacttttttttttctgagaagttcaacacaggccgtaggtattgctaccacttcgtaggagcacttatttcacaaacaaccttcagagttcaggcacttgacacctaaccaaaccaaacctcgaacactaaccaatttaatccacctcctctatcttgggaccagcacctttcccaccagacggtgcatccttattcatgccagcagcagcgcccatgcccgcgccctcgccctggtacatcttcgcgatgatggggttgcagatcccctcaagctccttcattttgtcttcgaactccttcaccttagccagctggttgctgtccagccagctgatggccccgtcaccggcattttcgatcttttt

SEQ ID NO: 14944 - DNA, 360 bp, Zea mays
  Clone ID: LIB3150-087-P2-K1-F11
cttattgggttaacatatagcttttatctgcattcttgtatggcagaaggtggaacggcatgaatgttccaaattaagtggatataagttcacatgctaacatagtcttaacagtttacacaattacagctacgaccactaacaaaacttgtaatgatgaaaactaggttttgcttaagcatgcgcaggatcgcatcatttcttcttggtagcagccttgttcaccttggctccggttggttactttcttttcacactcttgttatcttcaacatgctacctgttgcctcatgtcacggtcagcaaacctaccaaggggaggatactgctgagaatgtttgcactaccttgggcttggtt

SEQ ID NO: 14945 - DNA, 150 bp, Zea mays
  Clone ID: LIB3150-087-P2-K1-F12
aattccgaggtttaacaattcatggagattggaactcaagttttgaatttggggaataacccctttcaacataacattacaatgtttgcatgacctacgtaactagaggctggatttaaccaggccatccaacaagtccacaattgctag

SEQ ID NO: 14946 - DNA, 237 bp, Zea mays
  Clone ID: LIB3150-087-P2-K1-F7
aactacaaacaatcattttcattgtttgataaccacaaatatagttcgcgacacttgctccacggtactctgacaacacagttcaagggtctcggaaggaacacgggatgcaaaatttaacaatgcaacataattaccaaattctattagagcctgcatgtggcggtttccacggtagcagaatatcaagaattcaagatgtgtgtgcttatcggtagctggcagagggacaggatt

SEQ ID NO: 14947 - DNA, 143 bp, Zea mays
  Clone ID: LIB3150-087-P2-K1-F9
aggaaatggcacttttttttggtaatttttcaacaggaacacacaagaggtttatactactgggcagagtgagcaaagttgttcgctctataataacacataggtatatcgtggatctgcatgatatatgtccaaacaaccat

SEQ ID NO: 14948 - DNA, 355 bp, Zea mays
  Clone ID: LIB3150-087-P2-K1-G1
ggctaaccctttccatcaggtctgtcatttagcaataataataatggggacaaaaatgcttttttgttaccaatcacacttaccccaagcattacagattgcatcaagccatccacgttcaaaccagatgccacaccgccaaacctacaggacttgagcatcagtgttcaacttctctgcgatgctgattttgagcccctgtgattgcttgacaggttttcccacgcaagggttttctgaatttttgcatttaaaagcttaatcaaagcaacccgttacaattttggcaccgtatcaataaaatcaagtatgaaccttccaaatctgttgtggtgtgccacgcttttctttcaca

SEQ ID NO: 14949 - DNA, 322 bp, Zea mays
  Clone ID: LIB3150-087-P2-K1-G10
aaaaatatgagatattgaatggttttttttattgcaatgcatgtgacacacgagaatggggataatccgagcatgtaacgcattatgcaatgtccacatcgtgagctagcaatgtattagtaccgtaatctagctgatctgataaagccaatcatctttgcaacaacacactacagacgttataaggataactttaaaacataaacatgcacgtgtcaacttgagataacattgtcctgagcttgccgttacgccattccactacttagtgaaaagatattgtttttaatgcaccatcacttgcttttggaagggtgtgaat

SEQ ID NO: 14950 - DNA, 256 bp, Zea mays
  Clone ID: LIB3150-087-P2-K1-G12
atcaaaacaaaaaaaaggctttttcttatcccttaatacagagatactagtgcttcaagttcaattcgccgtacttgtggtagcctgtaagaaaatgttactagcaaaccattacaaaagttacacaaagggctcttggaaactttagattgttgttggtccggttcttgtaaccatggatcattctccggatcaagggttgacagaatctgggtcattgacattccaccatatcacaacgtttttttttgccttc

SEQ ID NO: 14951 - DNA, 243 bp, Zea mays
  Clone ID: LIB3150-087-P2-K1-G2
accacacaagcgatcttgtgttatttggaatttgtatcttacgtgcataccatgtagagccaaaaggggatggttcataccatataattaccgacacgggaagctaccctactgcttggcaaaagccaaactgatcgcgacacacaagcgcggtccatcgccagcgtgtatgtaccttctcatcgaaagggcaggctagctttgccttttttattaaccccaagcccaggccagattacaaac

SEQ ID NO: 14952 - DNA, 244 bp, Zea mays
  Clone ID: LIB3150-087-P2-K1-G3
attcatatatttaattatttatttttttattggttatcggaatcaaaaacataaacaaccattttgcaggcagtgtgttgcgaccgattccacggaaagctgatctttcatacagtcgtctaacacacgcctagcttcgacctggttgactcgatcggaatcacatcacaccataacaggtaatttattacccaacatctagatgttttaccaactgggaaacattgctgaccaaaggaaactt

SEQ ID NO: 14953 - DNA, 406 bp, Zea mays
  Clone ID: LIB3150-087-P2-K1-G4
aaaagctcaataaaactcttgtgcgagcacggacacgcttgccaaataaatgcaggggaacaataccagtgggatggactagcggcaacacaaagcaatggggtactaattcgaccactaccagcctactaacaagaaaaaagaagtgaatggagacgaaatcagctacaataatagcacgggacagcttcgacagcacagagcatctaaaacattggggctcgaacaactttgcaccccccttcgaagattactgtcccttgcctgcatcgcctttcggggcatttttgccctcatcagcaccattctccgtgaggtcggatgtccaaagggtcaagttatccctcaagagttgcatgatcagagtgctatccttggatgacttctcaccaaggctgtctaactc

SEQ ID NO: 14954 - DNA, 363 bp, Zea mays
  Clone ID: LIB3150-087-P2-K1-G5
gaaggtgttggggtcgtcaaggctgaagcccgaggtttgtcttttccgtctcgaacagaagcatgacaaggtccttgacagacttgtcgttcttgtcggcctccgcgcgcttgcgcagctcctccatgatggcgttgtccgggttgatctccatggtcttcttggaggacatgtacccagacatgctctagttcctgagcgcctgtgccttcatgatcctctccatgttggccgtccagccgttctcgtccgtcaccaggctgtagggggttgtcatcactctgtctgagaccacaacctttttcaccttgttgccctattcctacttgatcatcttgctcatgcccttgatactttttctta

SEQ ID NO: 14955 - DNA, 419 bp, Zea mays
  Clone ID: LIB3150-087-P2-K1-G8
atccaaagaaaacattttttgtcttattgcaaaatcctgacagcgaccagaaaaactgagacattgtgtgaccatagtacgaggcatcaacacatccgttctgaaacacatgtcctttaacaatctaaagcacagttgacagataaacaacgtcaataactttaggtggccttgtcagccttggaggctgtggcagcagcttgacccctgagccttccagtccttcttgcggcaattgagaccaaccttttggccagggggagcgtttcggcggtcatgttatgcgtgaccgtttgtttggtggttaccatcctcgaggggatgcgttcactggggttaatggccacactctggccctttggccagtttttctttttaaaaggtgcttgtggtcctgttaccagccttaggtttggttt

SEQ ID NO: 14956 - DNA, 342 bp, Zea mays
  Clone ID: LIB3150-087-P2-K1-H1
gcagaaatcctaatctggtgtgtgcgcaatctattcacgcattcccgtttcagtttaatactactcaagtgatgagcccagtaaaatcaaaacttcgaaatgtctccacggcccacagccatagcagctaaacgaataactgggagacaaataaatgcaaagataaagtagaatcgttttaatccctgtcgactaatgccaaccactaattgtacatgtgtctagaatttggtgacatagtaatactctgctagagccttaccagtcccaaatttgtcggacactggcatccgctacacggggtccgacgctacgttcgcctgcagacgacccaagatttct

SEQ ID NO: 14957 - DNA, 364 bp, Zea mays
  Clone ID: LIB3150-087-P2-K1-H12
gaattccaaccggaacggtgtttcgaattaaagcaaattaactctggtactggtacattcgactcgaataggatccaaaaatactcacggcaatatcactggccacacaaagcagacatatagctatggaaaaattaggctggtgcattgcccagccaccaccatcgccagcaccccaggggaaggactgatcgaaagtcacgcctagatcttgttgaaggcaacgatgtcgcagctctggacgtactcgttaactggctcagcgcacagatagtcctcaatgagagtgtcgacagagacaagatcgtcgactatggtcatcatgatttgcagcttcttgataccatatccgactgggacaagc

SEQ ID NO: 14958 - DNA, 286 bp, Zea mays
  Clone ID: LIB3150-087-P2-K1-H3
acatcaaaaccgccagataactttttttttttgcactataaaaccacaggcgaggaatgttccaaagaacaaggggtgacttaacaacaagatgcaattacaaatataacttggtgacagcccatttggcagagcctccctataggctaggcacttgctaccttaagataaagcgtaagaaaagttatcttcttaatacatatttttttctaggacttccttcggtctcgaaatttttgtatttatgcctagtacattttttaaactaataccgtcggtttatata

SEQ ID NO: 14959 - DNA, 129 bp, Zea mays
  Clone ID: LIB3150-087-P2-K1-H6
acaattaattttttttgtttttttttaatgaaaatattaaattggtttttttatattttattggggggttatttaaaaaaaaaaaattatctacttaagaaagatatcttgtaggaaaccaaataattt

SEQ ID NO: 14960 - DNA, 167 bp, Zea mays
  Clone ID: LIB3150-087-P2-K1-H7
ccatggcatgcatccttcaggttcttagtgcatgcttgttgggaagaaatgaagatatgaacataaattgttcagtaggcatttgtggcccatgagacatttaaaacatgtgccctattacttgctagaggtaacatttaattcaaatggacagttttaatttgcat

SEQ ID NO: 14961 - DNA, 381 bp, Zea mays
  Clone ID: LIB3150-088-P2-K1-A10
gagaagatatatttagtcgcagaacactttaatttttagcagaacaaaagataagtacttccatgcataacgatgttcagcacgagataagcaggttcacacaaggcactgtaataccccatacactaaaaattcatgtggcacaaagcaaattaagataggctaaaccaaaacgtttggattcgcattccaactgtagatgggacttaagcaacggcctcgaggaaagccttccaaggagcacgcttttaaagtcttccatggttaccgagcagctttgcgttgacaccatcaggaacaattctaccctcactcttgtacttcaggtagtcggcacggctgaacttggtgaagccccactttctgctctcaataatcttt

SEQ ID NO: 14962 - DNA, 418 bp, Zea mays
  Clone ID: LIB3150-088-P2-K1-A3
agcatgattaatgacattgtaagggggatattgttttggtacaagagaaaaggaaataaaaataggagaaggggaatggagcaaattaagatgcaaatcacgcccctttataagctagctacaaataacatccttataggttctatcactagaaaaactatacttgatccaacaaagattatccaactacaaaggaagggaaaaccaacaagaaggagaccagaatgaacaccaacccccgccatgcacgagcaaatgggtgatcacatgcgtccaactcgcactctagcttactgctccattagtcagagaagacgcctctctttcacccaaagtcccttcggatgatgaaagctagcaagctagctttatcccatgcatgaactcactcatgcgactcaatttctaactttatgac

SEQ ID NO: 14963 - DNA, 345 bp, Zea mays
  Clone ID: LIB3150-088-P2-K1-A4
aagggcaagaccaggaagtttccccgttccattaaaatcagtttaggcaaacgacttttcaacgggggcggaccacccctcggcagaatctagagagatggaaaaaaaaacaggtcttttctgcttttggagctcccacaacaaaatcacctgggttgcttttgggcaaacacgaccattcattttttgggaccggtcaaacattggaacaaaaggggggagggagcttgttttgctccacaagaaaacattcccatccttttccttttttaataaggcttcaatggtgccctgaactttgcttcggggtaaaccggggtattaccgagctttttcttgaacctg

SEQ ID NO: 14964 - DNA, 412 bp, Zea mays
  Clone ID: LIB3150-088-P2-K1-A5
agacggaaactgaaacgatctaccactctgctcatggactcattagctcaagtacgagcctccatgtttgattcatgtacagaagtaggtcaaacgaacccaggtgcaccctgtgatttaacaaaaggttctgttcacttcccaaatttcgaaacaatatatacatttttatttggttttattgactaccacgcgattcccaggaaaaaaaattgtattttggaatacatgtatgcaaaaaacccacataaatttaccagctgatagcccccgtctctctacctctccattctttcacaaggaagttgatgcagtcatcgtcctctgtgcatttccaaggatgataacaatgacagtcacatcatcgtggtactttctcctactcccaacaagtatcctcatcaattcttcg

SEQ ID NO: 14965 - DNA, 290 bp, Zea mays
  Clone ID: LIB3150-088-P2-K1-A7
aaatccctaaacatagatgaactgcaaaaagaagtttcagagttcagtacaccaagctccggatacagagtacagactatgatggatgatggctgtccccctcttcttaagttttaaaatcatcatggacgatgatagctactactgacctgccctgcataacctcccttctaattagcaaaccaacaaattcccctttcatttgcttaaaagcactctccatgctttcttctaattgattgattgactgactgacttgctgcaaagtttcctttctagatctgtctccc

SEQ ID NO: 14966 - DNA, 389 bp, Zea mays
  Clone ID: LIB3150-088-P2-K1-B10
ggcatcaaatctttttacagtctagcataatgcagcaaggtttataccacaacaagtcccgattgcccatctcgccctaatgagctgatcaaatgcactgaatcactaatcatctagttctaaaccatgccagagctaagcagcgcaagcaaatccaccacctttattattggcaggcactctcaataagcgaatttccaggccctcctactttgcagccttcccaccggcggcctccttctggctgaccttgtatttgtcaagggctgcgccggcgagccggcatatgcgccactgcggaagcacatctgcgcccattccctcgtataagtcgatggcgttcttgttccattcgagcacgcaccatttcacccggcccattccgagct

SEQ ID NO: 14967 - DNA, 247 bp, Zea mays
  Clone ID: LIB3150-088-P2-K1-B2
cggaattcccgagcggccgcgggcgctgacctcgaagagcctcctccacgtcccgctgcgagtagccgaagcggtgggtgatgagcggcttgacgtccaccttgccgctgcgcaggaagtcgatgcacagcggccaggtgtccttgtaccggaacacgcccaccacgtttcacctcctgtgccgccttcgtcgttagcggcagcagtatcttgatgtgtcccattcctaccaggctcaatttttctt

SEQ ID NO: 14968 - DNA, 372 bp, Zea mays
  Clone ID: LIB3150-088-P2-K1-C1
agcggagaacagatctatccatttgagataacgaaaatgtgcaagggtcactcgctcacagcagagtcaataacacaaaattgtttttttacctcatctaacacgaaaaaaagaagttcgaagcaactactccagcaagggcctaccaacaagctccgctgatgacttgtataaaccatccaccatgctcatttactctttattaattactcccaggtaggggtcgacgccgcaacgggggccgcgccttgttcccatccgggggctgctgctggaggtggagccacagctgcgtcccagacaccgtcagcaggaggagctggagcagcaacccattctgcgccagcagctggaatgctagcagctggagct

SEQ ID NO: 14969 - DNA, 123 bp, Zea mays
  Clone ID: LIB3150-088-P2-K1-C10
ctgcaagatttcaataaacataaatgtcgtgcaaatcacaggcaaaaaaagaagctgggcgaagccagcaacaggcctgcactgcgacgtgcagcagttctgagtgagaatctatgaatcgag

SEQ ID NO: 14970 - DNA, 425 bp, Zea mays
  Clone ID: LIB3150-088-P2-K1-C2
agctggctccaactcagcatatatgaatttttgccgactccaactcagcatatagaattgtttttgccgatacatagccagcattacagcatagttgatagaacaaaaaaagggggctgctcgattctccatcggcaggaccaacttacacgaaatttaacagcaaagagactaattaacatacaaatataaagataaccatcatcccacataggaagcatgttttttggatgtccgaaaataagctctaacgagcaaaccacactccgcaacctagctcgtaggcaggagttccaaaacgggcacgcaaagagaagcaactcagtacttgtagtccttgacgtggaggctctcggtgtcggcggcagcatcacccttgtaggtgccgagggtagcctcagagttggccttgcacctggcgagga

SEQ ID NO: 14971 - DNA, 425 bp, Zea mays
  unsure at all n locations
  Clone ID: LIB3150-088-P2-K1-C3
ttnttgggccccaactcagcatatatgaatttttgccgactccaactcagcatatagaattgtttttgccgatacatagccagcattacagcatagttgatagaacaaaaaaagggggctgctcgattctccatcggcaggaccaacttacacgaaatttaacagcaaagagactaattaacatacaaatataaagataaccatcatcccacataggaagcatgttttttggatgtccgaaaataagctctaacgagcaaaccacactccgcaacctatctcgtaggcaggagttccaaaacgggcacgcaaagagaagcaactcagtacttgtagtccttgacgtggaggctctcggtgtcggcggcagcatcacccttgtaggtgccgagggtagcctcagagttggccttgcacctggcgag

SEQ ID NO: 14972 - DNA, 422 bp, Zea mays
  Clone ID: LIB3150-088-P2-K1-C9
gagaaccaaccataaacgttctctgcttgagctcattatttgtatcaagaaagtccacggtctcattattttcggtgtgttgccatgaaaaaaacaacttattccttcaatatacatggttccagttccaatgacgtaaaaattaccaacgtgatgaaaccagagtatttgtccggtgtaacatttccccagaataccaatttcttgcttacaagttcgtctttggcttggatgtcgggctcaagcgcctcgtcacggtgcgcatggtcacgaactcttcagcagcggaagggtggattccgacagtgctgtcgaagtctgctttggtggctccacatttaaccgcaatagcgatgccctggataatttcaagtgcgtctggtccacacatggatgcaccaagtactttgtcagtttcagca

SEQ ID NO: 14973 - DNA, 403 bp, Zea mays
  Clone ID: LIB3150-088-P2-K1-D1
aaacatcaaacttcacaaggattcaagccatactgctgcagaagagttttgggtgcaacacagaggacacaacaggtccatttaaccaacgaagccacaaccacgattcatgacacacaaaccacagatgtttattagacgacgacgacgcagatacccaggtacagcagcagcttaaatgaaccatggcttactgaccaccacggaggcggagcaccaggtggagagggctctccttctggatgttgtagtctgctagggtgcgaccatcctccagctgcttgccagcgaagatcaaacgctgctggtctggggggatgccctctttgtcctggatctttgccttcacgttgtcgatggtgtcggagctctcaacctccagggttatggtcttgccagtcaa

SEQ ID NO: 14974 - DNA, 417 bp, Zea mays
  Clone ID: LIB3150-088-P2-K1-D10
aacaagagcagagaatcaatgatcgatagacaaatttgtcagaacatacagactgcaacatggtgccactttgttcattcccgcgcacgcgcattctgtaacagataaaaccatcgcctgaaactactctcatccacgatggcctggggacgaccgcttcacttcttttgcttggcccccacgttcagctgctgaagaccaagcagaaggtccctggaatcaaggaacaccttgttgctggaggccgccatggtgtgggagatctccctggcagcttcaatctgtctcagagccaggaaggcggggttgttggcaatggcttggccaatcaactcagcgctcttagcctcaccctgtgccctgataactgcactgcgcttgtcctgctcagccttctcaacaatgaacttggcacgc

SEQ ID NO: 14975 - DNA, 430 bp, Zea mays
  Clone ID: LIB3150-088-P2-K1-D11
atcattatctgtttattattttttttttgtcatatttttcattatcttcagactgtttcatgttgccatttggggggatttcctgtcacgctcattctgttacagataaaaccattcgtctgaaactactctcattcactatggcctggggacgaccgataaactttttttgcttggcccccacgttcagctgctgaagaccaagcagaagggccctggaatcaaggaacaccctgttgctggaggccgccatggtgtgggagatctccctggcagattcaatctgtctcagagccaggaaggcggggttgctgtctatgactttgccaatcaacctatttgcccttagaccaaccccccgccctgttatctgtacaggggtaggcccgctctgtctttttaacaatgaacttagcacgctcagtttttt

SEQ ID NO: 14976 - DNA, 236 bp, Zea mays
  Clone ID: LIB3150-088-P2-K1-D12
ggggcaaaacatgtactacatttttaccattacgaataataacgacaaactgttaaaaagggtaaactttacagattaaccagactttttgcctggccagtaggacaaccgttaacgtgccaaaaacctcgaacaatagtgaaaattaagctatcacaggtagcttagctagggataaaattaacggcaagcattcgatgcgacacttattcgacctcctccatttttcttttaac

SEQ ID NO: 14977 - DNA, 406 bp, Zea mays
  Clone ID: LIB3150-088-P2-K1-D2
aacttctgttctcaactttcattgtcgaaatgatctcactaacatattcaaggatatcaaattgttccacgcagattgattgtattacgaactgaccttacactcgagcacagtacaaaacatagcaaatccagatccacggtatcggtaccagcctgaaaaggtacataaaagagctacggctataatgcttcgaaaggatgccattatcagcaggctaacatacttcactgcttccttgccgcgacaatgttgtcagcctctttcttcacaggctcttccttctctgacagaatcagctcaatgtggcaaggggaggacatgtaagggttaatgcgtccgtgagcacggtaggtgcggcgcctctgcttctgggcttggttcacctggatgtgtgaaacataga

SEQ ID NO: 14978 - DNA, 399 bp, Zea mays
  Clone ID: LIB3150-088-P2-K1-D4
ggaaccaaatgaatcggcgcattcagctttcaaagtatagagatcataagctcctctgtccaaacagtcttggcaaataatatcatccgagatcgacaaaacttcagtagaggtgaaaactctgttgctactggtaaacatgtctaacggctgggctgtaacatgtgcgtctctaagaagtgttgccctgagccttgttgaggatgacaccctcgtacttgacctggaaccatttcatagcatcctccttggtcaccctgtgctggatcccaacacgggacttgcaccttcggcgtcgggcgacacggtacccaacgcgctcaaggacgacgtaaaaatccattccgtagataccgggtgaaggatcatacttgatgccaaaatcaatgggctcctgga

SEQ ID NO: 14979 - DNA, 428 bp, Zea mays
  Clone ID: LIB3150-088-P2-K1-D6
aaaaacacagatatatatattattgttgttgttcacaaacgcagttatatataacagcattgctactatctcacgatgcatgctttattccacatactactatagtactatgcatcacacgctctaacatgcgctagcagctttgccaacattattattgttcgcttcctggccctgcatgggctattgggctggctgcctccttgacgcgcacatgcatctagcacactggaaaacttgcacctatctacaacggccggcgctgctcatggatgatatatactacgcttgctgcatagccatcttgcgccgccgggcatgcatgcatgcggcacgacgtacggcgatacctagacgcgccatctaaatggccggcccgccggccggccggggcacttgccggtggtaaaggtaaggtcgtcgtcgtc

SEQ ID NO: 14980 - DNA, 426 bp, Zea mays
  Clone ID: LIB3150-088-P2-K1-D7
aagacaaacaaataattagtcgcagcaactcatccgatacttaaacgaaggcattgtatgcaagaaaaattgcccgactgacaaacgaagggcagactctatgaccataaatgtttttggggaccgatgtcaccacctagtaggatagttacgagtgtttggagatctaagtctccatccaaaacaaattgttggaagaatcctccctctacatgaattattaatttcttcgatatgaaaggcaaaaacttcaccagatcctgattggaaaggaccgggaacacacactgctcttgttcgtcatcatatttctccatttaagcaccgccggagccgtacttctttccgaagaagaggatctggagctggtcatagccagaaagcacaccagcaccagctatggcacgaagaatgttagcaccagca

SEQ ID NO: 14981 - DNA, 363 bp, Zea mays
  Clone ID: LIB3150-088-P2-K1-D8
acggaacgcttctctctaaacaagagtaccaaatgcaagaagatagtatgtacagtacatactttgtctgaacaccttattccagcagaaagctagttgttgaactagggaagggaagacactgccatgcaatgggatgtgaagtgtgtacatatatgcctatatggtcgcccatgaaacattattggctaagctgcagcgtacatgcgaggagcctttctactccttgggcctcttgacaatgaggaccgggcatttgcagttctgcgcgcagtggttgctgacgctgcccaagaacgccctctggatgaagccgtaaccatggctgtccatgacgagcaggtccgcggccatcttgttggc

SEQ ID NO: 14982 - DNA, 425 bp, Zea mays
  Clone ID: LIB3150-088-P2-K1-E1
agtaaaactttgatcgagagctcattccatctcaagaacaaaaatcatcgaatactgcacaaaacaatcaaaaataggaaaattttctacggttttacatagaatcttttgtaacagatcaacatggattctaagtgttgactttccttttggcatctaaagcctttttctggaaagttctcatgactaatacgattagatcgcgtaacctaacatcgtaatcctcattgtttggctctgatattccctgtgtgttaaatgggagagttgcacccgcagttactaaaacaaattgagttgtgcgcccatttggaattttcatctgtagactttgtgagtacttctcatcaattatagcttcaccggtctttttgaacttaatctgatagttaggtcgtgttagcaccaatgtagccaattcccac

SEQ ID NO: 14983 - DNA, 390 bp, Zea mays
  Clone ID: LIB3150-088-P2-K1-E10
aaaacagaaataggagctcctatatttccaatgaccaggacttcaatagtgaccaagtgctgggcacatcagtatcccatgtatctgagacactgaaacttcaacccgacaacaactacaccaggacaagggctgcacttaattagtaacacgctgcagcctgcagaacacctacaccagcatacaaccttattatcccacgtacactggcaataaccaccttatttatcaccccgtacatcgggcaatacaaccttattataccttgccgccaaaattgactccctacgaaaatacgcaagcagcacaggcactgggtgccttctctataccaagcacacgaacgcaagacgagatggcgatgctacgcgctcgtttttgctattggaa

SEQ ID NO: 14984 - DNA, 293 bp, Zea mays
  Clone ID: LIB3150-088-P2-K1-E11
attcatatattttttttttttttttttttatttcttttatttttttgggtttatatattgagaaaaggaggattccaatcaatttagccacactcctataaccctacaacgttccacactaaaacaaggcaacagctaattaatgacgccagcaaaccagcggaacacccacaccaagacaaacccccatgatgaaacaaaaaaaaacaccccccaccacatatacccccccacaaatcaggcaactacacgtaagaacacgtagccagcaaaatctacaaccgagcaaaaac

SEQ ID NO: 14985 - DNA, 420 bp, Zea mays
  Clone ID: LIB3150-088-P2-K1-E12
gccgaaaaagattacttattcttgctagcccaaactcagtacttgtacatccggtgctgctgaaacaacaaatcaaagaatgcgacacgactggagctacatttacatgacaccattctttcatcgcccactgcaaaataagtagctactactaagaccgtcgacgacgatcgaatcgatgcctggtttctactttccacgactagggatcgtgcttggttttgatgccccacggacgtcccaacaaacctcgctccctcaccggagcttgcactcggcgggcacgccctgcgggaagcgcttggcgtcggcgcagtagttgtagatcatgaacttgcgctgcacccagcgcatgcggcggtagctcatgtcgctgagctgctggttccaccagccgcgggcggagccggcacccgcgac

SEQ ID NO: 14986 - DNA, 430 bp, Zea mays
  Clone ID: LIB3150-088-P2-K1-E2
acatgccgaatcactcaaagattcccacattccagtcttaacaaaggcacataacacattccagtcttaacaagcagacactctattcaattcagaccaaaaacaaaaacaaaaactcggttgacccaccatttagtagaagaaactcggacgaccctttaataaaagaaaccaaggactttgcctccgacgttcttgcgtcgggcctcctcgtgatccataattcccgcagaagttgtaagcacgatatagccaaactggcgagacggaagcagcctggcagtccagccttcgatttcctttaccccaacatcaaaccgggggctaattacaccacatttgtttagtctgccgttcagttccaccacaatcttcccagctctgtggtcatccacgtactcgaactcgccaatgtatccatgacgctgca

SEQ ID NO: 14987 - DNA, 394 bp, Zea mays
  Clone ID: LIB3150-088-P2-K1-E4
ctcagagaaccgcaagcatcatttccagttttaagattaaccaaaaatttcaacgtcagcaatattggacaacgggttcagctagaaagccctaaaacacaagtgttcaaagcaaagcaaagcatagctttagaagatgccaccggaatttggacattcagaccacagaaaaatactgaacttcagccgcagaagacaggtctcagagtggacaacgcctactcccagccttgggcagtcggtggcggggctgcttggtcccaaccagttggagcaaccagaggaggttcagtgccgtccaccacaggtgcaggggccccagcttgatcccagccatcaccggtaggaaccggagctggagcagcaccccaatcagcaccagtaggagcaacag

SEQ ID NO: 14988 - DNA, 426 bp, Zea mays
  Clone ID: LIB3150-088-P2-K1-E5
cgtgctcaaccagtaacgtgttgataataaggagacgacatcaaatatcttccaaaattcaaaccaggacaacaaattgtgctactaatctcggtacagagtgatgactaattactgtcgactgatcaaacacaacggttgcactatgctgatggcaacacggagggccacaatttgttttaaaccttgaatccacggctgttcctcctgccacgagccttctcgaacttccttcccttggagcgcacatacggcttggtgtggctgtgcggcactccaggagccttgccaaagtgcctcactgcctcacgggcattcttggggcccctcaagaggaccgtgttctcgccaagtggagcacgaagagcaagctggtcaaatgtgaggcactcgccaccagcattgacaatcctggcccttgctgtc

SEQ ID NO: 14989 - DNA, 426 bp, Zea mays
  Clone ID: LIB3150-088-P2-K1-E6
gacaggtgaacgagcaggcatttttattcgaagcaaaaggtgcagccaattctcaccatactaggaaccaggccagcgctgcccaaaaacgctcaaacaagaaagaaaaaaaaacaaggaaccaaagttcttggaaaccaagtacacataactccaatacacgactaacaatgcgaattgcggtgaaacagatcgaaatgcaggcgatggttctccggcctgggcttcttcttcttcttctttccccgtactaatcgaaggacagcggaacctggcttgccaggctacggtacttcagggcgtagaacatttcgatgtagcggcgggtctcgcgcctctccaggttgctcacgtacttccagaacccgtacacgccggtcagggtcatcagcctctcggagtagagcttccaggtgtacttctcat

SEQ ID NO: 14990 - DNA, 220 bp, Zea mays
  Clone ID: LIB3150-088-P2-K1-E7
aaaagagggaaaggcctaagccaatacatttaacacttcggaacccccccaaatgcttttaaaaaaaccccctccttttggcatctaaagcctttttctggaaagttctcatgactaatacgattagatcgcgttacctaacatcgtaatcctcattgtttggctctgatattccctgtgtgttaaatgggaagattgcacccgcagttactaaaacaaa

SEQ ID NO: 14991 - DNA, 391 bp, Zea mays
  Clone ID: LIB3150-088-P2-K1-E8
ggcaggtagtatgcttgccagcatctcttcattgcagaaaaaaaaatggattacatccaggaacgcagcaacacttcgacccacagggacagagacgtttcaccctaagcattccccagctacaaagaggcgcctagcctccgaagccgtaaagggtgcggccctggcgcttgagcgcgtaaaccacatccatggcggtgacggtcttgcggcgcgcgtgctcggtgtaggtgacggcgtcgcgtatgacgttctcgaggaagatcttgagcacgccgcgggtctcctcgtagatgagccccgagatgcgctttacgccgccccttcgagccaaccttcggatcgccggcttggttgatgccctggatgttgtcgcggaacaccttccggt

SEQ ID NO: 14992 - DNA, 405 bp, Zea mays
  Clone ID: LIB3150-088-P2-K1-E9
ccataaaacccggggagaaggctttattattagctcagaatacttttgatgcatcaataggcctctcccacctcacattagtctcaacattgacttcatattatacaaccctaagaaggttgatcggctgcaacaattgaaatctaaagactacgccaaacgcttccctcttatggtatcatcagtttgctggaaccttgtagcttccgcactgaaagccatgctcaaatggcctcttacactgctcagcaacatacacaaccttttccatgcacacaaccttttaagtttttttggtgaccttggagcacaagcaagaaacgtttgccttcttgatgacaccacaacaagcatccgaaggagggacctttggattagctgggaacatcacgtatgttttgcagt

SEQ ID NO: 14993 - DNA, 340 bp, Zea mays
  Clone ID: LIB3150-088-P2-K1-F11
gcaaccataatacatgattcaaaacaactggaaaaaacaagtccagcaatttcttgtaataacagttaatcagccaacagaggagatacaaaggagatgagagtagcggcgacagtcggtattcatcgtctcaacatgaagcccttaacaaattcgttcatcacaagagttttcggctgtcttttagccatagttcaggcggaacatgtcattctgcacgaagaaggacccagctgccggcagcaaatggaatgcctgagagaacttgatggggtgctcctcggggccggtgcggatggaaccggagacgaaaacgagcatgcctcccttgggccccgac

SEQ ID NO: 14994 - DNA, 238 bp, Zea mays
  Clone ID: LIB3150-088-P2-K1-F12
agaaggtaaactgtacttattgcaaatgcttgaaaccaacagagttattaacttaactgatatgcagttagcgaagatgaaactatgtaacatatcctaatttgtaaggtactacaatagataaaatggttaccagaaactctaaaagttccctagctctaccacttgcatcctgcaatctctaaatcctctttggtttgatgcctatctaaatttccttaagcttaagttcaagttc

SEQ ID NO: 14995 - DNA, 437 bp, Zea mays
  Clone ID: LIB3150-088-P2-K1-F2
gaacaacaactcacatccagcatttttatttagtcagataacatatataattgtagccaaaaacatgttgcatacagccaaatactcgcaaggagactatcctctatttacagaggggttaacctcaagatagggaacctcatttttccaagggattttcattttcccaaactagctctaaaaaacattatgtccaccttaaagtccatagatgtttgttatagcacaaggaaatagatagatactcaccagccatgcccaccctaagtattgctgggcccagatcgacatttagcatggacaataggtcccaaccgtgacctttccagaccatcaatattaccgtctggtgcattcatgtagaccgcacctctatacatccactcatcagtctcatcactgtagaaatcttcaaatggctcttgacataatgcaca

SEQ ID NO: 14996 - DNA, 366 bp, Zea mays
  Clone ID: LIB3150-088-P2-K1-F3
gaggaccaggggtccactttaaaaacttgtacaacagggggggccatgttcaaccaaaaaacaagggtttgccccacattttttttagggcatttttacacaagagaccgcctgacggttccgattcatgttgggataccccgactcggggccgtaatcgcagttaagctcgtaagaagggcgaacatttttttatcctggggcaacaaacctttgtccacattttttattggtgcctggttgggcacataaaatactcacatgctgatttttggggggacctcggggggggaggggatcatttcctgccacataattttcctgatcatgtcgaccccgaggtttttgtctttgtcgaggtccatc

SEQ ID NO: 14997 - DNA, 389 bp, Zea mays
  Clone ID: LIB3150-088-P2-K1-F4
ggaaatgacagtctagcgacaactgcaaaaaaaaatcctgtagagttgcataaaaatggcaaaaaggatttcactagataatggctgctcagcaaattgggatgcctgactagatcaccaaatatggcaattgcagtttgtgccaaagctgttcttgtacattaggttgaatatttattcaccttacggaaacagtttcctctcttgaattctcagcgaagtttctccttcacagagagcttcttggccgcttcccgcactttttcaatatatccttcaattggaggggtgagtgtcgccatgtaccggtttgcagggaacggtgtcatgtcaggtaccatatcagcagctcgtagcttctcagggagagcatcaacggcctccttttt

SEQ ID NO: 14998 - DNA, 359 bp, Zea mays
  Clone ID: LIB3150-088-P2-K1-F5
agggagcagtttcagagtcaaaatttaaattgcaaaaaatctggctctagtaccaggactcggtgcgactccttcaattgcattgcatctagtctagtatatcacaccaaaaaaaagacaggcttccttcgattcaagagtaaacaaaccaaggggaattcattcatttagattcatccgatgcttcgccttggcttccagctcctgtacattgtctttgccatgctttgcttccttatcaactctctctgtacatcacaatagcgagcggacccccaccccccaaaagacagacgaaatcacccatatctcttctatcccatcaattatgacactggaacagccttgacatgtatgac

SEQ ID NO: 14999 - DNA, 379 bp, Zea mays
  Clone ID: LIB3150-088-P2-K1-F6
acaacaatctaacaaaaatcatgttatgcatgacatttttcatctgattccttgggcaatgcagtgagcatatttaggtaacaaggagtataagcacaaggtatttaggtgtgcgattgcaaaagcatacatattcaaattccactcaacagtacatttagaacagtgcctcataaactactgacagaaaaatgttgccatggaatggcaccatttattatttcattattatccacaacaagttgatgcaaagcttgatgattttgcaatggaaataagcatggtctcgcaagggatgagagaacttgatgcacattggcgatcaccatatgatgcaacccaaccttatatacatggggttggctgactttatatgatt

SEQ ID NO: 15000 - DNA, 425 bp, Zea mays
  Clone ID: LIB3150-088-P2-K1-F7
aaagaagaaaaaatatcatcaatagcttgcaacaaaaactggaaggtccatagtatcatcagttcatcgctatcagaatgatacaaaattaagatccatgcaggaaaaatatttttaatctatataagatggctaatgctgcgtaacgcaaatttaggccttgtcagccttggcagcagtagcagcagcttggcccctaagacgaccagttctccttgcggcaataagaccaaccttctggccaggaggagcatcacggcggacagtggaggcatgaccaatgtgctggtggttacctcctccatgaggatgctcaacagggttcatggccacaccacgcaccttaagccagctgttcctcttgacgcggcacttgtggtaggcattgccagccttcacattggcttatgagtcctgccaccacc

SEQ ID NO: 15001 - DNA, 272 bp, Zea mays
  Clone ID: LIB3150-088-P2-K1-F9
aggggccaatcgggaaaccacgagaacctgttgttactgtccaaaacacaaatatttcccatcccccttttttaaaaccaaccctttcccttcaatgaaaaacaatttttttgaaataaaaaaaagcccacccaatataaattgtcttaggccctattattgaaaaaaaaactaagtaaacctttttcaaggaaacatgcaacaggcgggggttatactatccccccgtaaaaaaaattgactttccttataaataacccctattgggaaaa

SEQ ID NO: 15002 - DNA, 423 bp, Zea mays
  unsure at all n locations
  Clone ID: LIB3150-088-P2-K1-G2
gggnccatatgaaagcattatagaattatataatccaatgagatcactaaccacctgattctaagaccaccacgacagtcacaggaagctagtactcggagattgggcatcaagaaacggcgcagctatgaagtctcaatgacaaactatgttttaagagaacccttgcagcaattttgtcatacatagtcattacttgcaacatcatcagctaaaagaaggctcccaggttgggcactagagcataactgttattcagagtatctcttctgcacttcttacaccacccctgagggaagccgtagcaccagttgcccaccaacaagactcttcacatagtagtagcagaaatctgcaaggatgaatgtctgcacgatttctgataaaagcaccatagacggccacataccatagccaagagct

SEQ ID NO: 15003 - DNA, 428 bp, Zea mays
  Clone ID: LIB3150-088-P2-K1-G3
acgaacaacggggtactaaacatttcagaataattctgcatgccaaaccaaaaaaaggactgcggatattcaaacaagatttcagaaaacgctttaactgtttgataactgaccgatgctaaactcgccataagttaaagaaaagacctcttaataataagactcatacttcagatgtttgctgaaacagcaaaacattatcttctttgctgcaagaagactatacactagatatcctatgaaccatgatattttaacaatatcttctgaagaccaggagcagacaacagccaccttaaaacacaatagatctactcttccttgaggcgcttctcggtctcttccaaagccttaatatccttgttcaattttacaatacgataaatgcaccaataaaggagacatgctgtaacacaaagaatgacatt

SEQ ID NO: 15004 - DNA, 121 bp, Zea mays
  Clone ID: LIB3150-088-P2-K1-G5
agcaactcagcttagatatgattaactcaaatacttccaacaaaacagcataattgtgcaatgcttagctttgaattcttgagctggaatggaacaacacaaatgtcttcccacgcgtccg

SEQ ID NO: 15005 - DNA, 341 bp, Zea mays
  Clone ID: LIB3150-088-P2-K1-G6
gatccgatggattgataccactatatataagtataacatgggcaaaaccctcggcccgcaaccgcaatcatatactacacgtaaccttccttatcaagtaacatcattacaatgaatggctaacaaaaactgtcatctcctaggagaattcgatggctatggtaatctggcatatcttacaacgtacctctatactgattattcgaactattcatcacaaaatggctccacagtccccacccagttcattggttcgagcgcatagaaatcgggtccgcagatgatccgagaagaaagaattgcctatgttgttggcagaaaaagcatatcgacaccaaaag

SEQ ID NO: 15006 - DNA, 114 bp, Zea mays
  Clone ID: LIB3150-088-P2-K1-G7
ggggccccccccgaacaacggccaaaaaaaaaaggccccttttggcgaacccccccccttcagttaaaaccaaatgcgctttaccacactttttttttccccccccaaaagcaa

SEQ ID NO: 15007 - DNA, 363 bp, Zea mays
  Clone ID: LIB3150-088-P2-K1-G8
ggaaaaaatcaatcctacatagaacgggggccattcattcattcttttatttatttcattcattcatttcacccatgacaaattttatctttttttatttcccacaacatttactggacattgtcatgatgttcaaattaaaaaaatggcccccgttggggaattcccttgcgtttgtgacaagcaaccctttttggggggggttcttcgtagttcttgtcattgcagctgttttggccatttgtagtacttgaaccaacattgtcaatcctagccacatgatccataccattggaccgagggttgttgccaaccatagcttgcataccagcttccatttttaagcccttaagattgcatcca

SEQ ID NO: 15008 - DNA, 64 bp, Zea mays
  Clone ID: LIB3150-089-P1-N1-B12
tttcttttttttcttaggaacaagtacatgcgggggttttttattaactatggggcccactcca

SEQ ID NO: 15009 - DNA, 393 bp, Zea mays
  Clone ID: LIB3150-089-P1-N1-D11
tttcttttaaccatcggaggcaaaaggataggaggggatggtaaaaacaatggcggggctactccaccgcgccgcggcgctccttgtcgtcgctgctgtctgcgcggacggcgcctccacgttctactcctccgaccccaaccttggatccgcgcgcgtcgtcttccagacgaattttggtgatattgagtatggtttctttcctcatgttgcacctaagactgtctagcacatctttcaaacttgtgcggcttgtatgctacaacacaaattactttttccgggttgacaagggtttcgttgtacaagttgcttatgttatgttatgttcaaccgcctccatgtatgtagagcacataaaagaatcctagaaaacaatttgttggtgaattt

SEQ ID NO: 15010 - DNA, 364 bp, Zea mays
  Clone ID: LIB3150-089-P1-N1-F12
tttcttaactctacgcgctgctccacctctggccggacgcctccagcgagggagtgcgcatggcgtaccgccagtttgcgcaaatctaccaccccgataaataccaggacccgcagatgaaggatgtagcaactgaaaactttcaacgaatatgtgaagcttatgagatactatcagatgagaacaaaagacaggtgtatgacatctatggtatggaaggtttaaattctggcctggaacatggtcccaagctaactaaaccagaagaaatcaatgtacagttagaacgactgcggctgcgcaaggaggaagaaaaactttttaaagctgctctacccaatggcttaattattgcttattttta

SEQ ID NO: 15011 - DNA, 87 bp, Zea mays
  Clone ID: LIB3150-089-P1-N1-F2
gcggaagccgcgaggtgaacaaccgccctgatttggaaaagccccgtgaggggaagccaaaaagtcctgggcttaacttgtcccagg

SEQ ID NO: 15012 - DNA, 357 bp, Zea mays
  Clone ID: LIB3150-089-P1-N1-G6
acctttttcttttcccgccgcaaggagaggtaagtgcaggttacatattatagaagcgggagacgcctcctaaagctactcctgccaagaaaggtgatgccaatacccatgccttgaaggatgccaaggttttgaagtctgttgctttctagattaagaccaagaagatccgcatcgttgtgacatattaccttcccactaccctgtataatgcttgtgaccccaagtaccctccaattaactctaccgtgaggaacaagcttgatcagtaccaaatttctaagaacccctttaccacagaatcaatcgatgaagaagattgttgttaacaacactctgggctttattgttgacctt

SEQ ID NO: 15013 - DNA, 297 bp, Zea mays
  Clone ID: LIB3150-089-P1-N1-G7
atgtagtagcgaccaactaacaacgggggcgctttcatactctccgggggggcgtccaccatacccaggctccgcttagcgttaggcccgcggttgaggcggccgtcggcataggacgcactggccgcggtcactctcttccttcagccacgtaacgcccgtggcggctgcgggggctggggagctggagccgccggacctcacccgcttagacaacgccgcgcgcatctcgctattcccgcaagtagccgatgacttcgagcccaagattcgtcaggttgtggattgttttgggca

SEQ ID NO: 15014 - DNA, 254 bp, Zea mays
  Clone ID: LIB3150-089-P1-N1-G8
ttttctttctcacacctgctcgctttcactccggtcgtgtgactatatagtcccgggctgtcgttacaaatcctttctagccccgacgatggccaccgtcgctgtgtccttcgacgagaagctctacatgcttcgcgccaaaattttcaagctctaccagatcagctagaactttaagtccggttcatcaacctcgtgtcacgctacctcatttgtgaagcggatcacttcgagtggagcaagatccataccct

SEQ ID NO: 15015 - DNA, 276 bp, Zea mays
  Clone ID: LIB3150-089-P1-N1-H4
tccttcgtttttttttcagctgacccggcaggtgctgatgtggtcaaccatgcattccgtcagacctatgggcagcctattgctcattttctcaggaagacagctgttgtccctgatgctaaggtcatatctgaacaccaggctgtcagggttggcattgtcttctgtggcagacaatcaccaggaggccacaatgttgtttgggggctctatgaggctattaaggcccacaaccaaaacagcaaactcattgggttccttggtggatcagatggt

SEQ ID NO: 15016 - DNA, 238 bp, Zea mays
  Clone ID: LIB3150-089-P2-K1-A10
atagattattttatttttttttttttttttggacaaaaaggtatacgacttgtgtttaaagaataaaaccgggggtgattctagtacagggaaccctcggttctacactcatggaaaaccctattcatggtctactttacgattgtcgaaagaggcactgcatacattctagtgaccattaccactgtcacgcctgcctctggattttggagtacatggggccccttacccttgtagg

SEQ ID NO: 15017 - DNA, 287 bp, Zea mays
  Clone ID: LIB3150-089-P2-K1-B11
gcaagaaatccggctcgttacacttctgtccacaacatagctttttgcagagattcagtacataaggatgcttcaaattaaccataccacaccataacatgggacatttgcgaaactacgggtacaggtatcaaaatgcaacgagttcaatactaaaatataagcgtagtgcaatctaatcttcttcctcgccctcgttctcagcaatgttgaagtagcggagctcatagacgtttcggtccttgttggcagcaaccacgcgtagccaattccgcacgttgggcttt

SEQ ID NO: 15018 - DNA, 299 bp, Zea mays
  Clone ID: LIB3150-089-P2-K1-B6
aaatccgaggagatttctttattattagctcaaaatacttttgatgcggcaataggcctctcccaccgggcattattctcaacattgactctatattatacaaccctaataaggttgatcggctgcaacaattgaaatctaatgactacgccaaacgcttccctcttatggaatcatcagtttgctggaaccttgtagctttcgcactgtaagccatgctcaaatggcctcttacactgctcagcatcatacacaaccttttccatgcacacaacccttttagtttttttggtgacctt

SEQ ID NO: 15019 - DNA, 260 bp, Zea mays
  Clone ID: LIB3150-089-P2-K1-C10
aagacaccatacgtgctcttcggagtagcatttcagtaaaaatatacggcggggcgcacaaaaacagaattacagacgcagctatagaagattacatttattctttagcgggctcacatgaccctaacagcggaatcggaatgcacatgaaaattacaaaatatagagctcagttggagtgattaggcttggcagttcctgtgacatttccttgtgaaaacaggcgatgataaaaattgtttaaagatcctttatgtcca

SEQ ID NO: 15020 - DNA, 252 bp, Zea mays
  Clone ID: LIB3150-089-P2-K1-C11
agttgcgttaaagcagttttttttccttaaaattggcaccttcaccatccggacatagtacatggatgaaggggacgctcctgcccaatgttgttcgcatgcacacatcgcattttcttctgtaccattttaattgaaccaagctaatttcttttcttattcaacctaaaaggattcataattccctaattcctgcacaactaatctagcatattcacaggaaaagaatgtacaaggcaatattacaaaatc

SEQ ID NO: 15021 - DNA, 422 bp, Zea mays
  Clone ID: LIB3150-089-P2-K1-C5
ggctgaagattctttattcatttcttctgtactaatgaagtattctgtcagcaatggcaatacgagtacattgcttgtgttatatgtttgtctgctactctcccggtttctaaacattccttcataaccaagccagacagagggttcagaacttcagattacaagcaaagcatagcacttaataacatgttcccacaacataccagcaccaatatacaacactttatcacctaaactgacagtacaacgaacaggtacaactcttctactcatcttccttcaaagcacagactgttcaccagcttcttttccaggcacaatgataattggggctgctttacagttgttgaagcaatactcactgacactttcctgcaacacactttgaatatagcctttaccacgtgtcccaagaatgacag

SEQ ID NO: 15022 - DNA, 253 bp, Zea mays
  unsure at all n locations
  Clone ID: LIB3150-089-P2-K1-D10
atggcaagaccagcaagattttcttttccatcaaaatcagtttaggcaaacgacggttcatctagtgcagaccagggagtctcataatttataaagttngaaaaaaaaacagttcttttcttcttttgttgctcccacgacaaaatcacctgaattgttgtcgagcaaacacgaccatacttttattgcgaccgtacaaacattgtaacaaaaggcagcatcgagctataatatctccacaagaaaacattcc

SEQ ID NO: 15023 - DNA, 350 bp, Zea mays
  Clone ID: LIB3150-089-P2-K1-D11
aggatccacccatctcatatttctttgtcttcccccacgcataatctcatctcaagtaactcaaacattgatgcgggggggtatttaaatcatttgcatatatgtcaatcaagtactttattgcctctcctattcctcatatcatcatcatattatctaatgcatgacaagattgtctattttaacggccaatttacattttcttgcattccttgctgtgtaattacccatatacactcatattattcatatctttcctctaattttgtaaatatttttcttatcctattccttttttgtttttgtctttacatttattttttcacctttctaaattctcttttgtttat

SEQ ID NO: 15024 - DNA, 111 bp, Zea mays
  Clone ID: LIB3150-089-P2-K1-D4
acccaaattcaattaataagacgaaatttcttttgaaccgcagggacacttgccatcaactatttaaggaattagaaaaaggttcacattaagtctagcaaattagcacac

SEQ ID NO: 15025 - DNA, 182 bp, Zea mays
  unsure at all n locations
  Clone ID: LIB3150-089-P2-K1-D5
ccttattttttttttttttttttgtttgttcatntatttttttttttttttccaaagnagttattnncttacctgggttctacttttggngacgagggggtttaacaatctaaagtgattgaaaaaaaaacagttctttcttgcttttggtgctcccacgccaaattcaccttatttgtttt

SEQ ID NO: 15026 - DNA, 246 bp, Zea mays
  Clone ID: LIB3150-089-P2-K1-D6
aatccaaccgatcttttttatttgccgcaatttatttaaaatgagggggcggacgaaaaattaacatacttgctttccttatatctcctccaactcataaaaaacagctcttttacaccataacatctttccccaaccaaattttaaaatgtggctcatactgttagcttctattgatccttatgcctgtatgtttcattattccattcatccaaaccattattctctgatttctttatgcataat

SEQ ID NO: 15027 - DNA, 398 bp, Zea mays
  Clone ID: LIB3150-089-P2-K1-E10
gacacaacacaggtacttaaaatttaaggggatatcattgtcgattacacacgataatttgtctgctaaaaaatataggaaacagtacttgtagatgataaaaaagccaaaacttgcagcagtttgacgaaaacagcagctctagtcgtcgaagaggctgaagcccatttcctcgtccgactccttttcaggctccgcagccttcttttcttccttgggagcagctgcagcgccagagtcaccagcagcaaccggggcggcaacagcaaacttgcttgggtccttgaggtactccttgatcttgtcagcatgtgggtatgagtagtctgtctcgacagcaacagcaaggcacattcttgtacccattgatgaacatgtggggcacagcagcaagggtc

SEQ ID NO: 15028 - DNA, 301 bp, Zea mays
  Clone ID: LIB3150-089-P2-K1-E12
aaaaaagaaaaataaaaatttaaaggagaagtattataaaaaggaaggacatattaaaaaaaaaaaaaaaagaaatataaaaaaagagaaaagaaaaaaaaaaaaataaaaagataaaaaaaaataaagaaaaataaaaaaaaaaaaaaaaaaaaaaaaaaaaaaaaaaaaaaaaaaaaaaaaagtaaaaaaaaaaaaaaaaaaaaaaaaataaaatataaaaaaaagaaaaaaaaaaaaaaaaaaaaaaaaaaaaaaaaaaaaaaaaaaaaaaaaaaaaaaaaaaaaaaaaaaaaagaaa

SEQ ID NO: 15029 - DNA, 407 bp, Zea mays
  Clone ID: LIB3150-089-P2-K1-E2
ataaaataaaaaaaaaaatttaattttttttttaaaaaataaaaaaaaaattaatgagagggaaataaaaaaatggggaagataaaaaaaaaaaatttaataaaaaaaaaaaaaaaaaaaaataaaataataaaataataaaaaaaaaaaaaataaaaaaataaaaaaaattaaaagaaatataaaaaaaaaaaaaaaaaaataaaaaaaaaaaaaaaaaaaaaaaaaaaatataataaaaaaaattaaataataaaaaaaaaaaaaataaaaaaaaatgaaaaataaaaaaaaaaaataattataataaataaaaataaaaaattaaataaaaaaaataaaaaaataataatattaataataaaaattaattaataaaaaaaaaaattacaatttaaaaatataaa

SEQ ID NO: 15030 - DNA, 169 bp, Zea mays
  Clone ID: LIB3150-089-P2-K1-E4
ccaacaacaccaattttatttatcaaagttccgaacagagttacacaaggcttctactacagtctgggtggtaccatacataattaacacccagtttccaggttccttaccagttaaaatagaaaggcagttgtctaagatgagacttgctttactcatcacacaatcc

SEQ ID NO: 15031 - DNA, 313 bp, Zea mays
  Clone ID: LIB3150-089-P2-K1-E5
aatatcacaatggcaaactaaaactttggcgaaacactaataaaacaggggcagtgtttttcttcttctaaacatagttcttcaagaaattcaaaaacctttcctttcatcctatgtttcaaccttttttgtcttctcccactgcccatattacccttcttttaaaaagtttattttgttctctccatcatctattcataatatttttccagtctaataccactacacccttcaaacatggataccaaaataactcatgtacttttcctcccacttttcttcatcctttccttttttccaaatattcaacctt

SEQ ID NO: 15032 - DNA, 340 bp, Zea mays
  Clone ID: LIB3150-089-P2-K1-E7
tgatggtgcccgggcaccacgtccactggatgtgccagtgttttttacccgcttatagccaacatcacctccgtgtaatgagccacccttgccgccacctctgccttcataatcggatcggtaactgaactcgccccttccgtaccctctgccttcattgtatgtaccacggcctctaatgccttcacctaggaaattaccacctctacctggtggaaacctttcttccctgctaccaccgtcacgagaaccagtagtccttttctcttctacaaagcattgccggtcaccaatagtttacaggagaagcctctattgctgcttgaactgcactgtcatc

SEQ ID NO: 15033 - DNA, 147 bp, Zea mays
  Clone ID: LIB3150-089-P2-K1-E8
gggaccaaccacttttatttgggtcacatgttcaacatcttagggggtaccacaacaaaatggatattttaatgttttcctaatgtctccctaaagcattgttctcaaatggaactaatacaattcgttttacaaagcttacttaaa

SEQ ID NO: 15034 - DNA, 169 bp, Zea mays
  Clone ID: LIB3150-089-P2-K1-E9
ctgaatggggggaaaaaaccacttcatacaaatttttttttttggtcactcctaaaaaaaacctattataaattttgcctaccataacttctaatcttaattacaatacttcttcaaaatcaattacccattttttcttcatcattatataatcttactatctcccccc

SEQ ID NO: 15035 - DNA, 274 bp, Zea mays
  Clone ID: LIB3150-089-P2-K1-F10
ggggggggggggagataccataccagatcccacagtgaaaggggggccccaaactggcgaacaaaacattttatacaaatccacggggggttttgtttgttccaaatttccgaattccagtcactttacccacagcaggggggaagtaaaagcttattccacgactcatttagcaaaacacgggggcaagcctatccccaaaaggccatgggcgggggagtaaaccttagccttgcagtgctatcaccaagggccgaaacaagatgacccccaa

SEQ ID NO: 15036 - DNA, 391 bp, Zea mays
  Clone ID: LIB3150-089-P2-K1-F11
gacaacaaccaaacatcaacttattgcatcccgcgatacaagcaccagcaaatacaagcaaacaaacacatgggcaaacaaacacatgaatactgatacagataccacacaagcgagctagaggtagttggaatttgtatcttacgttcataccatgtagagccaaaaggtgatggttcataccatataattaccgacacgggaagctaccctactgcttggcaaaagccaaactgaacgcgacacacaagcgcggtccatcgccagcgtgtatgtacctcctcatcgaaagggcaggctagcattgcctcttttattaaccccaagcccaggccagatcacaaactagacagcgaaatctagttcttcatgcggatgatgcaacggatgc

SEQ ID NO: 15037 - DNA, 401 bp, Zea mays
  Clone ID: LIB3150-089-P2-K1-F12
caaataaaattaatgcgattaaacatactcggaggatagattccgatgttcagcacaagataggcaagttcacatagggcactgtaataccctcaaaacacttgaaattcatgttccacgaaacaaagtaagatacgctaaagcaaaacgtcaggattcgcatcagcacttaagcaacggcatcgaggaaagccttcccaggagcacgcttttcaagtctgccgtggttgccgagcagctttgcgttgacaccatcaggaacaattctaccctcgctcttgtacttcaagtagtcagcgcggctgaacttggtgaagccccactttctgctctcaatgatcttttggcggccagtgaacttgaacttagcgcgacgcatagcttcgttggcatgggcagca

SEQ ID NO: 15038 - DNA, 269 bp, Zea mays
  Clone ID: LIB3150-089-P2-K1-F3
acttaataggtaggtcgatattttttttttataaagctccatcataatatgtggacagaactactgactgatttgtgggagcacaaaactctggatatagctagaaaccacgatagatggcctactgaagtgcaggtttccaagacgagccattgtacccattgcaaacggtgactactaactaggatgtgacattttttcatgaactcacgcatctaataaaacgtaacacaactattccgtcaccaccattcactaatccccatcag

SEQ ID NO: 15039 - DNA, 97 bp, Zea mays
  Clone ID: LIB3150-089-P2-K1-F6
caaatcattacgaaaatcttatttttttcttaaaatgggagattcgagtgttacataatattttattgaaacaggggcgatctaaccccatctatcc

SEQ ID NO: 15040 - DNA, 205 bp, Zea mays
  Clone ID: LIB3150-089-P2-K1-F7
cttgcttctttacacaccatacgttcgaggagcagggtcatcacatccatcgggcgggcttgccaatctattatcaatctactgtacagtttagtgccatgcctcaattattctaatccataatgtagttttctttctaaatatgtaaggatatcccaccaatatgtcttgcttagacatattctacaaattttcaattaataat

SEQ ID NO: 15041 - DNA, 192 bp, Zea mays
  Clone ID: LIB3150-089-P2-K1-F8
ggcccaaccagtaacgagtagataatagggggaccacatcaaattttttccaaaattcaaaccaggacaacaaattgtgctactaaactcgggacaaagtgatgactaaatactgtcgactgaacaaacacaacggttgcacttttctgatggcaacacgtagggccacaatttttgttaaaccttgaatcc

SEQ ID NO: 15042 - DNA, 264 bp, Zea mays
  unsure at all n locations
  Clone ID: LIB3150-089-P2-K1-G11
aggcctacgaaaagatatcagctttttcgaggcttaatttgaggggggcgctcaataggctcaatgtgcaacaattgccctaacaactacatgcacatttcaaaccaaataaaccctcagttttaagcattaacagcttgtaaggtttacatttnttagaaaatatatagaacttctacctttatgagcgctgcttctaatactcttcacagagcatattgctctgtcacattagctttattaattaccttattcaccaacagc

SEQ ID NO: 15043 - DNA, 90 bp, Zea mays
  Clone ID: LIB3150-089-P2-K1-G4
gcccaaatctaaattgcatggtatttctgcaattgagcggaggacaagaacccccacagttcgccaaattttccaataccatatatgcat

SEQ ID NO: 15044 - DNA, 324 bp, Zea mays
  unsure at all n locations
  Clone ID: LIB3150-089-P2-K1-G5
gctaacccaaggagattcttttactgtatatggagnttatgctatacagagcgtgtctcgtaatagatatgccgatacatcatcctcacggtcttcccctaagaaacacttattaggacatattgtttgttatgcctcatgtgcagaatgcattatttttgtgtattctatcattccttcaggtatttttactgtcgttatgacaggcagcatccatttatttaagattttctccttttaaggaatgtcttttcattcattatttattatcttttttattttttgataatgcaactgtaagtgtatagtgtctcttattttttc

SEQ ID NO: 15045 - DNA, 333 bp, Zea mays
  Clone ID: LIB3150-089-P2-K1-G8
gcctccactactttgacataaaaaggctatgtaataattaattaaggggacatgctttgcataagcctatagcctatataccccctcaggcatggtatacggccgggatacgtcgtactgttgttttgcaagctacatgaggtttttacacaaaacacatgcatgaaacgtacgacgagtagcattttttaactatacacggtgtgtgttgtatccttagacggcggtcatgctcaaggccagtctgtactcttttttttcctgtgcacaaatgaatttgcacaatgcctgtggcttattatcttctaacctgtgcaaaacaagccctatttc

SEQ ID NO: 15046 - DNA, 72 bp, Zea mays
  Clone ID: LIB3150-089-P2-K1-H5
tgtctcttttttactcgtcaactatgtcacaaataatcttacttacgcgtgcatgcatcagtttaaacaagg

SEQ ID NO: 15047 - DNA, 310 bp, Zea mays
  Clone ID: LIB3150-089-P2-K1-H7
aattaaactacatactataattaacatatatataatatataggttcacgataatatggggccaaactcaaatctgctttttacaaccatcagtcatcagcacaaccaagcatattactaacaccaaacgagacatataccacacatgcaatgatacggtgcatgtactagctagtacatccatacacacacatagctttccaactactggttattacggaatatacaaaccatgcatgcatcatattttacaaaatgcaatgcagatatagatattacatgcatatttaatttatgcgaattcatgtctt

SEQ ID NO: 15048 - DNA, 251 bp, Zea mays
  Clone ID: LIB3150-090-P2-K1-A12
acgcaaaaacgtactttttgagaccggccggccggagactcttgtctttattacacacatgcgctgtgtgtcgttcaacggtgtgacttgggacaaaaaaaagaatttatttgacacgcaggttataacgacgcagcataagcagcacgcgctggcgttttacacacacacacacacacacacacgagttcacgtcacgagcacggacggacacgaacacactttcgttagcatcgcatgttatctatgac

SEQ ID NO: 15049 - DNA, 408 bp, Zea mays
  Clone ID: LIB3150-090-P2-K1-A5
ctccattaacgaatatgcaatacggtgaacaggctgaacagagcacataatacagtgtagataactaccatttgagaacataaagctcatcaccggctccgcaaaacaagacaagagagcccagaccccagcataactgcataagcatctgcaaggcagcttctacctacgagaagagtactctacatggtgttcacgaatcacgacataaacatctcacaagcaaaccaacaaagacttcgatgatctaggactccaatatgaaactcaaacgcgaagcagcctctgatcatgacacgcagttgttatacagaagcgaagataaacagccagtcccttctttcagatacacagaatcgcctcactagtcactacaggccccatgtggccatgttttccttagtactt

SEQ ID NO: 15050 - DNA, 201 bp, Zea mays
  unsure at all n locations
  Clone ID: LIB3150-090-P2-K1-B10
cttataaaaagggggtcgntcggacgatctgggattccgccaaagacaccggaaaacatcttcttgttttacaacaacacacggggagcacgaatagacgacgccaacgcgactactgacgcacacttcaagcgctgtcacgcacgcacaggcttggccacngatgccaaccactcaaacgacttgtcgttctgaaagcct

SEQ ID NO: 15051 - DNA, 234 bp, Zea mays
  unsure at all n locations
  Clone ID: LIB3150-090-P2-K1-B6
cnaggccatgcagattaagggcccagatatcttaagagctattgtattacgagctgaacttacagtccaacacagattttcagtacagaacatagattatccagatttaaaacattggtgccggaaacgttttgagaggcaaggctttctgaaaaggtactaaaaagagctacggcttttatacttcgacaaaatggccctgatcagtatgcttttatacttcactgttttctt

SEQ ID NO: 15052 - DNA, 231 bp, Zea mays
  Clone ID: LIB3150-090-P2-K1-B9
gcaacagttctgttttttttattattttattcgcttatatgtctcaatgaccgaaaggctgttacacctgaccgaaagatgcactctaaagctttgacaacactcctatgtcaaaaccctcaccatccaagcactgaatcggtgtgcatgtggcagggaaaaatccatatgtaaaccttatacaaggatcgactaatcttcttttttgctgtctgaatctacaagagcttg

SEQ ID NO: 15053 - DNA, 216 bp, Zea mays
  Clone ID: LIB3150-090-P2-K1-C12
cataggatagcaaaatacttttatatcttagcttgttcatagagactggaggagcatgacggctgatcacacgcgatcaactatcccaagtttttacaggcacagaactaccaccgactctcatgctggagctaccgacgaatctagagctactgacaatattacgattggatcaaaatccatgaaagaggggaatctataggcggaattgagggg

SEQ ID NO: 15054 - DNA, 139 bp, Zea mays
  Clone ID: LIB3150-090-P2-K1-C7
ctctaacaatttttcaatgggtggaacgaatccactagacgggggcagttacaaaacaaaggggccccccctacaaagctctggaactcccaccggatagagcaaaaattggggccaacggtcggaaaaacgatcggat

SEQ ID NO: 15055 - DNA, 367 bp, Zea mays
  Clone ID: LIB3150-090-P2-K1-C9
gcaaagaaagaaatttggtccattgaaataaggttccaagatacagatcataatcttttcgaaaacattgctaaagcacaaatggtgacatgcttcctctggctctcaaggtttgatgtgaaactttccatgtttacttctcgtagatccaggggtgctggctgctctgccaatcagcagggccctcggggaaccacagggcaatctccttattagcactctcaatgctgtcacttccatgaatgacattcctgccaatgtcgacagcaaagtctcctcggttggtgccgggctcagaagccagggggttggtggcgccaatgattcttgcggccaggtgtgacgacgcttttgcccttccaaacca

SEQ ID NO: 15056 - DNA, 209 bp, Zea mays
  Clone ID: LIB3150-090-P2-K1-D1
cgggaacaagattcactgttactaccatttctaaggagaacaatcacccaggcgcaacatatgcaggtagtatgcttgccagcatcttttcattgcagaaaaaaaaatggattacatccaggaacgcagcaacactacgacccacagcgacagagacgtatcaccctaagcattccccagctacgaagaggcgcctagccttcgaagcc

SEQ ID NO: 15057 - DNA, 297 bp, Zea mays
  unsure at all n locations
  Clone ID: LIB3150-090-P2-K1-D3
ataaaggctatgattaaaactgggtgcttccggtataacaattacatgctttgagagaacaatcgctagatgctctagnaattttttttgaaaggctcgcattgtgaagaaatcaattctacatagaactggggccattcattcattcttttatttatttcattcattcatttcacccatgacaaatattattttgttttatttcccacaacatttactggacattgtcatgatgttcaaattagaagaatggctcacgttagggaatgcctttgtgtttgtgtcgtgcaacccttt

SEQ ID NO: 15058 - DNA, 401 bp, Zea mays
  unsure at all n locations
  Clone ID: LIB3150-090-P2-K1-D4
gaacaaaagcctgagttctctgcatggggtaatggtatctagcatgtcagaacaagtatgtttataccgactactgcatatattatacggccagtgcccaactcaaaccatgttaagtcacactacaaaacattattgagcgcggaaacatgacatggtgccaggtcacaaggaattcttatgcttctgtgcctgcttctgcactgtcatcctgcaggctctccacctcgtactgggccttcggctccaaatcgatnaactgttttgagntgttggccatatgtgatatgctcactctaccttgctttctgatgtactctgcaactgacttaattttnttagtggagatgtagaataactaactacggttattcattacaccagataacctatctatgctt

SEQ ID NO: 15059 - DNA, 211 bp, Zea mays
  Clone ID: LIB3150-090-P2-K1-D8
aaccaaaaaagcgccgggatataaattattatgttcattacacccctaaccaaacactttagaatttataccataacagggaaggtcaaaacttaaccgccacaaattccaccaaagattttaaagaagtttatctttttaggaccacaactaccaattgctgtgcgtactagaggcatcccccgggaagtttaaacccggtctcgggggg

SEQ ID NO: 15060 - DNA, 327 bp, Zea mays
  unsure at all n locations
  Clone ID: LIB3150-090-P2-K1-E10
aactaacggagacaaacttttttttagaccancanggccgcccagtggtgacattattgcactctgttaaaaaaaaggactactagtacaataaggtaagaacttgattaacttccttctatgctgccacaaaacacaatttgacattcccaaaggcagacagacttctatttgtgcgggggcaanggatgttacattgtccaaggtataccagtgtcatctatgattaataaaaacttgccttgatttatgtaaaaaaggacaagccctgaacatgtntttaatgtactataaaaacanagttaaattaaggagaaggtactttgg

SEQ ID NO: 15061 - DNA, 319 bp, Zea mays
  Clone ID: LIB3150-090-P2-K1-E2
ggaaactaactacgtttccaccttcgatttctgattctcaagcgagcaggagcaaccgagcgagccttcactatggcacaagtctgctgaatccgttatcgaatatttgtcgcccgctaactcatttttaaaacaagaacggagagagtactatgtgtctgggttagctagaacatctactttgctccacacttcactaggtcccaagtcgtctggttacacaaaatcaggacccaaatgctgtcttctcgcccgcttctgcccgtcaaggcgaccccaactagatagggaacctgcaggatccatgacttgggtcttt

SEQ ID NO: 15062 - DNA, 401 bp, Zea mays
  Clone ID: LIB3150-090-P2-K1-F11
cccgatcagaatgcaacgctgcaaagtctggataacagcagcaactccagtgattagattcctgggtgccaagccaactgccaagacgtacagtcatgagtccaaaccatggttacaatcaaagagaagcgctcggaaatgagcaaggggaaagcttgttcaccattccctcacggctcaactaatgggggttcaacacaaaaaaaggccccggtgtttgcaaacagtttctggtccacgttttctttataccgctggattttatttcgaccacttactccttattgcccaaactattctgggggcgggaaaaattggctttcatacataaatgcatggggcatcaagggtaataagtcggatatggtgcctttttcccgggtccatattttattttcttt

SEQ ID NO: 15063 - DNA, 320 bp, Zea mays
  Clone ID: LIB3150-090-P2-K1-F3
cagtacgataaagttgcagcactttttcaaattaattagctatagcagttgataaactgtttaaatcgctaatatctaaacgacaaattcccacaaccttgtaacaccaaggtgtaccagaacgcaaagtctgtatctttggcaacagaaaagctgtggatacgctgatgtgcgtaagcagcctcacaaaaattcaccaagcaaaatggtgttcctcccccttggacccctacttaacagtcaggagcttgatgacggatgaaattccgatgcggtgcaaggccacaacggattgaccggtgtagcataaccccatcgtc

SEQ ID NO: 15064 - DNA, 459 bp, Zea mays
  unsure at all n locations
  Clone ID: LIB3150-090-P2-K1-F5
agcatcaaatatttcgtcaattttttttataacgtcaaaacaaacgatgttcagggcatcgagtatttcatgggcaacaagtttactgtgccgaatcactaagttcaaattcacactttgatggtactcaccagaaatttattctgctcagagcaagcgcattgctggcaaatgacacaagaaaccagtccctacccaccgcggcaaaatgtgaaatgacgttagccaggaacagccatccttacgccttcacttgaggaggagcatcgccttgaagagcaggatcagatttgacagcatctagtgccttgaagaactcctcaggaagagcaacaggccggtgctgaggaacatgcttaggaattggggtgncgtcttcaatcacctcacattcgtagtcatcgggaacaccccatggatcccattcaatcattttagcgatgagcttgagctcgttct

SEQ ID NO: 15065 - DNA, 286 bp, Zea mays
  Clone ID: LIB3150-090-P2-K1-F9
aatatgccaacaagatatccaacacacatgtagtactccggcggtaggaatagcatctttacaattggtggcgctacgcgcgccgaatttcgcgttttgccaaaaaagacgccacagaaaaggaacaggaaaatgcatttggaccacatgcacatttcgatacattccatccgataaatttacagagctactaatggtgaaattcaagcttttgttggcctatgtgcttgagatgacatattgttgcccacaatgacaccgaacagttctagagcgctggctgaag

SEQ ID NO: 15066 - DNA, 256 bp, Zea mays
  Clone ID: LIB3150-090-P2-K1-G1
ggcacggggaaagataagctctgtttatagcataacattgggacaactgttcagccgttcgacaagaaattttggtagaacttcaacaggttcagtacatgaacaatctaagttgccaacacatggctttttaagctcagagagaagaaataagcttggccatttggagtccacctttactttaacaaaaacctaaccttagttgctgctcgggtacatgaacactttgaccttgccccccttggacttaggcggg

SEQ ID NO: 15067 - DNA, 94 bp, Zea mays
  unsure at all n locations
  Clone ID: LIB3150-090-P2-K1-G12
cnttatactttattaattttttttttttttcatttttttcccactaggaggttatttaacacgaaaagcggcccccaacccctaatcaaattat

SEQ ID NO: 15068 - DNA, 447 bp, Zea mays
  Clone ID: LIB3150-090-P2-K1-G4
ccaatacaaacaatttcccttcgtatattatttcagaccgtttgcagtaatgtatgcgggtacatccatcagaataccatatcaacagaatcaagaaatgcgagaactccaaaatatacattctccatagagggagtgcactgcaaactgagacaagaaagcacaaactgatggcggtgttatcgcactgtacatttcttcaggtcacatcttccaagaaacatagatgatcaggtgtttatccaatgggcacaaatacttcgcatgcttagagggtgtttgatttctaggaacttatttttagtctatccattttattccattcaagtctctgaattaccaaatactaaaactaaaataaagttttgatttccgtggttgggtatttagggacttaaatagaataaaatggaagaactaaaatttaatccctataaaacctaacac

SEQ ID NO: 15069 - DNA, 231 bp, Zea mays
  Clone ID: LIB3150-090-P2-K1-H11
attcgaaaataagacatgttgggccctgattacatgggcggcaatatgtgctggggctgttacagtgcagtgccttacacatgatatactgaaacaatccttagtagccaaacacacactgagctgcctaattttacaacaggggtaacgcgatgaaacctatatgatcagcagtgggtcctgccacgataactctcaagtaagtttgctagcattaagcggcccttttgg

SEQ ID NO: 15070 - DNA, 341 bp, Zea mays
  Clone ID: LIB3150-090-P2-K1-H4
ggattcataagtccatatttcaactaccaaaaataaaacgatgaagttcaagctgcacgttccctatgtattttagttaaaacagggacttgtaacattacgataacctatactggcagtttagtcacagtcagcaaccaaggaagaaacatatgccagcctctgtttgttggcacaacctatccaccggaagtatgcgattgggactttggactatcatcacaaaaataccatttaaaatgcggctctcattgcaccccttgtcgcatcacgctttatctttgcaggctttgcacttgcacggaagtacatgtacccttgttggatgacccaaatgctta

SEQ ID NO: 15071 - DNA, 413 bp, Zea mays
  Clone ID: LIB3150-090-P2-K1-H7
cacaccacgaaaacctttatttttaagcatgaacagtttggaagttttacatagctgagaaaatagatggaactgtagcttttatgagcgctgctactaatactcttcacagagcatatggctctgtcatagtagtattattaatcaccagatgcaccaacagcaggctgccaacgaggaggcaccctcagacaagcacctgagctgcagctagcctcgcgatcgggaccctgaaaggggagcaagaaacgtaatccagcccagtcttggcgaagaaagcaaccgatgaaggctctccaccatgttctccacaaatgcccaccttcaagttaggcctagctttgcggccccttttttgagcaagcttaaccagctcgcctacttctttttggtcgagaacctcgaaggggtca

SEQ ID NO: 15072 - DNA, 310 bp, Zea mays
  Clone ID: LIB3150-091-P1-N1-A2
tgggcttcggctataaaacacgccaccggcgtggctcctgcttccccagtgttctgctcgagcaccgcagaaaaagaaaaagaaaaggcaaaggcaaaggaatcccaatcaggcaagcaaaaggaagaaccagctgctgcggagtgcggagatgtcgtcgcagctgatcgaggagcaccggtcgggcgcggaggtgcacgtcgggcacgagctgtgcgagcgcaagtcgcgcgagttcatggtggagctgggcctccccgacgggctcctcccgctgcccagcctggacgaggtgggctacaaccggtcg

SEQ ID NO: 15073 - DNA, 352 bp, Zea mays
  unsure at all n locations
  Clone ID: LIB3150-091-P1-N1-C11
actttagaagccggacacactaaagggcctggggaaaatactagaggggagcgggaanggcnacaccnnnngcggaagcggcgcaagcgggcgggcgccgacggacggtgctcgacggacgcgcgtcgcgccctacccgcagccgcagcgtgcgcgcaggtgaccggcgagccggtgtacgagcgacgtacgcttcccttttggcgaaagggaccggaccccagcaacggacgggaggctctggaaaagaagaataaaaaatttcaccttgctttggaggtgtaggccatcttcggatggtaatctacgcctccttttctgtaacaatggtcgattgtgtaagctggggttt

SEQ ID NO: 15074 - DNA, 394 bp, Zea mays
  unsure at all n locations
  Clone ID: LIB3150-091-P1-N1-D6
aaaaggcccaacaaccccccgacccgncaccngacccagccgancgagaagacccggaaggccggaacccacctgcngcgcaccngcaagccncgagnggagcnctnccacggccgcggnggagaaggcggcgaancnggaggacgngccgncactggancngangcacgagctgctccgccgcaagaagngcagctccaagcccgacaagcgcctcatcctcatcggtccacctggctctggaaagggaactcagtctcctattatcaaggatgaatattgcttgtgccatttagccactggtgacatgctgagggctgctgtggcggccaagacacctttaggtatcaaagctaaagaagctatgaataagggagagcttgtttcagatgat

SEQ ID NO: 15075 - DNA, 259 bp, Zea mays
  unsure at all n locations
  Clone ID: LIB3150-091-P1-N1-D7
gccgccgcaaagacaaacanacgcggggggggcgcgccggaggaggggaggcgcanggccaagaacaagaccggggacaacgcggngaacaggaccggcaagacgggggccaagaacgcccacaacagcgacgacgaggagagcaagggccggaacaaccgccncacgagcaccggcgacaggaacaacaggangaagaacgacacggaggacaagcaggggcagaacaagaaagngaaggcgaacgacancaaaagcc

SEQ ID NO: 15076 - DNA, 279 bp, Zea mays
  Clone ID: LIB3150-091-P1-N1-E7
ttttcgtgccgagcgggggaggcggaccacagtagaactagaacgctgggtacggctctactacgctacgccccatcccgcccggaccggaccggacccaccttcctccacctctctgcccgccgccggccgacccgaatgggggcgggaaccaataatggcctgagcaacggcgccgccgcagggcagcgcgcggacgacgggaccacggagttccggtgcacggcgtactcgccgctacggaccacggaggcgctcgcgctgaggctcggggccatc

SEQ ID NO: 15077 - DNA, 400 bp, Zea mays
  Clone ID: LIB3150-091-P1-N1-G3
tttcagtgacagcgcagaaagaggcagtgttagaaaggcttaggtccttcttcacaggagcaacagttgtcttgtctccatcaaggaaatccgactgggcaggttcttgctgaagacaaccaatatgatatagtgaaattctgcaaaaatgagggccttgttcttctagctgatgaggtatatcaagagaacatctatgtggacaacaagaaatttaactctttcaagaagattgtaagatccatggggtatggcgaggatgatctccctctagtatcgttacagtctgtttccaaaggatactatggagagtgtggtaaaagaggagggtacatggagattactggcttcagtgctccagtaagagagcagatctacaagatagcttcagtgaacttgt

SEQ ID NO: 15078 - DNA, 343 bp, Zea mays
  Clone ID: LIB3150-091-P1-N1-G4
ttttcggttcagctatcaaggaaaggaaggggggcgtgctcatggcaccgggcgccactaacatcagcctcgttgtgggcctcaacaagcgcattgtgagcaccaagctccagctggctccccggccgggccaccgcaaggtgaaactaacgaagagcgtgtatatggacaccggcctggacatagactctgttgggaccgctgcttataacaagcgaatcagtgtgcttgtgatgggtgccaaggacaagcatgacctgaagcttgtttagataaagcctgatactcacaaaatggcaaataataatagagaggagatggcgggcgttctcacgaagatgat

SEQ ID NO: 15079 - DNA, 393 bp, Zea mays
  Clone ID: LIB3150-091-P1-N1-H3
ttttgttttcaaaatcgcacgcgagccccaggagatgcccaaaccctacacctgcccgccggcgcactcggggaccgtcgaatcgagcaggttgacggaggagagggagcctcgaagatgttccggaaccagtacgacaccgacgtgacgacatggagcccccaggggcggctgttccaggtggagtacgccatggaggccgtcaagcagggctccgcctgcgtcgggctccggtcgagcacccacgccgtcttagccgccgtcaacaagcccgcctccgagctctcctcctaccagcggaaggtgttccgcgtcgctgaccacgccggggtcgctctcgccggcctcaccgccgacggccgcgttctctcgcgtttcctccgcaacgagtgc

SEQ ID NO: 15080 - DNA, 395 bp, Zea mays
  Clone ID: LIB3150-091-P1-N1-H4
ttgtacggtttgacaaaccaagaacacttggggatattgggctaattggtgagctactcaagcaaaaaatggttcctgagaagatagttcatcacattgttatggagctattggggtctgggactgataaaaaaccatgccctgaagaggaagatgttgaggctatctgtcatttcttcaatacgattggtaaacagcttgacgagaacacaaagtctcggcggatcaatgacacatacttcatccagatgaaggagctaacaatgaatccccagcttgcaccacgtttgaggtttatggttcgtgatgtgattgatctccggtcaaataactgggtgcctcgacgtgaggagattaaggccaagacaatcagtgaaattcactctgaggcagaa

SEQ ID NO: 15081 - DNA, 412 bp, Zea mays
  unsure at all n locations
  Clone ID: LIB3150-092-P1-N1-A12
tctcaacacagcacaggcagttctagagagagatatttagagagagagataaatatttccttcttctttcaccaccaccacatccagccttctcccccttcgtctttccccaaccaggtgttcaagatcttctgccgtgccaacgagaacttcttcctttccgtccttgactgctccgtcttgctttccccgttcatccctaatgactaccaccatctactttacatgttcatgcgctttatcacccttttcatttactaataattcatgccggcggtggggctctttaacaattccacatagtctcgtcatcatatcacttttcttttctcattctctaccctnttcaagcttctttccttattatttcctcatctaataatactcttatcttttcttatttaaattatct

SEQ ID NO: 15082 - DNA, 99 bp, Zea mays
  Clone ID: LIB3150-092-P1-N1-A9
tctctttttacaactatcttccacctaattccggtctctttcctataggggggccacctctccccaacacaacttttataaaattttttcataatcata

SEQ ID NO: 15083 - DNA, 125 bp, Zea mays
  Clone ID: LIB3150-092-P1-N1-B8
tcgctctaatcaaccaccccacccccccccacgcttctttctaaactgagaagcgtcattttatattttcttacacccaccccatcccccttatccctatctaacttctactacaaccaacctct

SEQ ID NO: 15084 - DNA, 286 bp, Zea mays
  Clone ID: LIB3150-092-P1-N1-C7
tttctggtttctggtaggattgctggactggaaggtatgattattatgaggggggccactgcttcatctttgtcctatgtaatgaacaacaaggagggccttattgcagtgtttgacctgtgtggtggcacatttgatgtgtcaatccttgagatatcaaatggggttttcgaggtcaaggcaaccaatggtgatacttttcttggtggtcaggattttgatggtgcactgcttgaatatctggttagccagttcaaaaactcagacatcattgatctgttgcttg

SEQ ID NO: 15085 - DNA, 126 bp, Zea mays
  Clone ID: LIB3150-092-P1-N1-D3
ttctcatcggcgccgccaagctctctctcacgtgcttcttcctctccctgcccagctactcctactcctccaaggtctcctactttctacaaggcgcgggcaccttctgcctcttcctgcccgagg

SEQ ID NO: 15086 - DNA, 359 bp, Zea mays
  Clone ID: LIB3150-092-P1-N1-D8
tacatattcaccaatcgacgttcctcgtgcggtgtgttatagaaggaggcgggcccgaaaagtaatacaaccttctactctgggtgaacatggggaaaacgccgatgcggatgaaggcggtcgtgtactctctgtatctcttccagcaaaaggtaatgccgagtctgaggaaggacatcaccaccaagatccatcacatggtcaccaagaactggatctccgttcacgctcctcctcacctacgtcgttcgcacctaccaatactccatttagtacaaggagcaggagaagcttttcaacagatattaaatgcgctgcccttgacagacaacactctgagtttttatgatggctttcat

SEQ ID NO: 15087 - DNA, 176 bp, Zea mays
  Clone ID: LIB3150-092-P1-N1-E1
ggtaaaggtctctctatccccataccggttcctcaccgccggcgagaggtacgtattcgtgcgccacctacacttccgcccgacatggccgatacctgcacgtatcagattctggtgcgtctcctacacgggcgcaccacatgcctgcgcttatcaacgcccaccgattccggcgc

SEQ ID NO: 15088 - DNA, 243 bp, Zea mays
  unsure at all n locations
  Clone ID: LIB3150-092-P1-N1-E8
aaactnngatcctctaaaaacnacccacncttcncttcttatccacactcctctnctccaccaaagctttcttttaaaagaagaaagatccccctcattcttttacttaccatctttctctcctcccttacaaaaaaaaatccctcctacattacgcatatctattcctttctcaccctcaacatatacatattttactatacctactccaaacacccctttatattcatatatttatacacc

SEQ ID NO: 15089 - DNA, 93 bp, Zea mays
  Clone ID: LIB3150-092-P1-N1-G7
tcttttttccttccgcatcaaatcacatatcgccggattcttactccgagccgggaactaattcattattaccctctccttcttacactaact

SEQ ID NO: 15090 - DNA, 276 bp, Zea mays
  unsure at all n locations
  Clone ID: LIB3150-092-P2-K1-A4
gggattggccatgcatatttatgtctggnaggaatttataacgtccgagctcgcaacttcatggtgttcaacaatggcgccaacagatcactccatttttcttagacaggcaccgatagctcattgacaaccatcaacgcacaggatgaaaccaaaaaaacaaattagaacaaagcagacctaggacatggcgagaacatagcctaaacatctacagtagtgacaatcaaccgtaaacgcctaagcgcgctccccgcggatgcggcgggcgagctg

SEQ ID NO: 15091 - DNA, 327 bp, Zea mays
  Clone ID: LIB3150-092-P2-K1-A5
aaactccgcttgagtgggctacgggcatggttcactaaccatagccacacgcccacatccattgggttatttgctcaaccatctacgagatgggccatacaacgcttttacaaacgaagcgacagatcaagattgcggcggcgatcacggccgatcaccaaagagaaaacttatacagcatttttttccctttataggagtatagctagatctttgttaggcttctggaacgaggagtatgtcttcattctagcttacttagtagcttactggctggcagcactacttggatctgcactggcctggggctgcgacggagttacttaa

SEQ ID NO: 15092 - DNA, 221 bp, Zea mays
  Clone ID: LIB3150-092-P2-K1-A6
caaagcctatttttcgaggcaaaagtccttaacattgacaaatggaacgaactgtattacaacaacaaggctacagtgttccaaagctacagttaaaaccaagcggtaattggattggcctttttacaccgtaaggaaaacagctctagtgctctattttatgtaaaagaattacaactcttgttttagtccaactatttttccaataccatgtacttact

SEQ ID NO: 15093 - DNA, 344 bp, Zea mays
  Clone ID: LIB3150-092-P2-K1-A8
cacagaaaaacgctgatacaccatctgggataagcgttaggataggtacacacatagccacttataaggttgtccatatatgtatagtacaaactttttgtagttctgtaagtactagataaggtgcctactggcatatcggtcagccactacgttattccaagccatggctgactatgggctatggcattcgagaataccagcacattacattacgattgtaggtaacagtttcatcgcatggggcaagctcacgcatcatcgtcgccttcaacagtgttgacacgctcacactcatcaatccattcactatatatatcaataggctcagtgagtgcattaac

SEQ ID NO: 15094 - DNA, 303 bp, Zea mays
  Clone ID: LIB3150-092-P2-K1-A9
acagaaaaacgtttttacactttttgggataagcgtttggataggtacacacgtttcctcttttgaagaaaaacgtctgtgttgagtcattctttccgtatcagggttgggtttacaaaaggtacctcctgccctattggggaggctctgcctggttctcctaaatccctgagaatggaaaaacgggggttatttttgggggccccacaatttcaaaggcttttaaaattttcctttgttaacaaaaaggttttttcaagattggcccgttgtacttagccaacattttttgggatggggcct

SEQ ID NO: 15095 - DNA, 346 bp, Zea mays
  Clone ID: LIB3150-092-P2-K1-B1
aattcccttctttgcttgtacgtccttgtttcactctacagtcggcagaagacaaatcactctagaacatgtctagcgtccaggagttcagaccgcacagacaatttgaacgtgtccaatatgcaatctatcagacaccaaaggtccacccgagtgtccagactcaccgccctcctttctgcatcttgaaccttgacacgggccttgaagaagcacaagtaccaggttttgccaacggactagccacagaaggttcaatggtggaaacattgtcgtcgtgctcaatgatagatcctgtaaaggcctttcgtccacttgatattatctttctggcacgagatagagc

SEQ ID NO: 15096 - DNA, 371 bp, Zea mays
  Clone ID: LIB3150-092-P2-K1-C1
acacgacacgaaccctcgtgattcctgctcgtcgaccgactatggcggtctccggcctcatcgacgtccagaagctgctcaccgacgtcgtcgacaagctgacatcgctcgagaccaagatgacgacggtcgagcgcgagctctgcaccgtcaagctcgatcaacggcgcctccaagatgccgtcgaggctgggaagcaggccgtgttccccggagtactcgagctgcgtttaccggagtacgacggcacggacgaccccgtcatatggcttcaccgcttcgagctgttcttcagcctgcagcggaccgaggacgacgactaggtgtgcctcgcggccttccacatgaccggcgcggcgcagatctggtac

SEQ ID NO: 15097 - DNA, 337 bp, Zea mays
  Clone ID: LIB3150-092-P2-K1-C11
aaaagatatataaacttgtgtcttgaaaactgttgggttgtttccaaacaggaccttaaacaaatggtacaaatatttccgctctcattcctagaaagcattttttgcagaagaaggtaactagttcaccgttattacgcgggaagcacagcacagcacagtacagggcgtcaggtcctggtcacattacactgaactctccgcagctatagatcgggcataccgatcccagccttttcatcgtaggtcttctcctgcgccagctcgattggtgtgtccttcgggccaggtgacttgggcctcggttttcttctctccttaaaatttctggccgggg

SEQ ID NO: 15098 - DNA, 157 bp, Zea mays
  Clone ID: LIB3150-092-P2-K1-D1
agcggcgcagcgccgtggccgcggcaaccctggccccttgttcctgatggacgtgaggccccgaaccctcgcgtacttcgtggttgcttccttcgccctcgtgtcagtcacattcgtggtgtatactggtgggtggtgggaggaggtggaaggagag

SEQ ID NO: 15099 - DNA, 231 bp, Zea mays
  Clone ID: LIB3150-092-P2-K1-D11
ggggggcataacaaaatttggtccttattgaaaactggctcagcctggagtcacgtttaaacaaaacctggcagcttgcttgcctttgagcaaatactcgcaagttccacattacaggaagattggcgaaactacattcaaaaccgggcgttccttacaatgtctggttcaaaggcattcactactgactgcaaactcagaagaaaggggataaccgttgggacatcattt

SEQ ID NO: 15100 - DNA, 241 bp, Zea mays
  Clone ID: LIB3150-092-P2-K1-D2
gaccaaataataacagtttgcttttcattttcgttcctgaagtgcacatagctgcagcccagtgggtacaattaacagggtgttcaggatgctgtctacctaacacatgaaggaaatttaccagttgtgtaaaactcggaatacaacatttcacacatcaggttaacattgctcgggagcttataacttctttgcatatgtgatgaccatctggttttcttttggaattttggagctttga

SEQ ID NO: 15101 - DNA, 338 bp, Zea mays
  Clone ID: LIB3150-092-P2-K1-D4
gacagaaagcttctaattgagtcgattcagatactggattcactttcagaaatctttccacatacaaacagagagcatacaacttgagacatgtacggtaaggttcgcttattatccttgtaacaacatcctacagccaagcaaggccaacatcaaagctttatttctctcaagttttgctcattatgcattggactgtatatatcctctaaccggaagacatgactacagcttcaaccctattgcgagggatgagacgcagctccgaaccatgtttcagaaacacgttgcctgcactttgctgggggttgatgccaattccatcgttggtgatgatg

SEQ ID NO: 15102 - DNA, 348 bp, Zea mays
  Clone ID: LIB3150-092-P2-K1-E2
cgatgaacagatagaactacttactggattcaactgcaatcagtgtccagaacacgcaaagccgtacagattcacacagcaggggaagcaaggagtttcgatgacacaaatggagataagggtggcagcagggggactcaaacgttcagcagctacagctagtacggtttcttcatggggaagacgaaggaaacaagacctgcactgcctttctaatatgcgatgcacggtttggtttcctccttcaattcccgcggggtactataccgttaccgcaggctttactcacttggccattatgaccttgacgaactcctcgtagttgatctggccattgccatcgacgtt

SEQ ID NO: 15103 - DNA, 349 bp, Zea mays
  Clone ID: LIB3150-092-P2-K1-F10
ggaacaatacttttttcttttcatttcaattgttcattcaggtcattgctcacactgacactgccacccatggtgatgcgtgacacattattactcaatcatcgccgctaaatgactcaactagctagctagccagcggctatactacagcacatagtttcttcagtgggggacaccgtcggcagcagcgtatgggcatggagtcggctgctgcaggatggactggaggaccaagccgaagatcgcctggtaccggtgctgcggctccacctgcctgagctgctggcaacactgctgccgcaacgactggcactgaggcgagcagtagggcgtcgccgtcgggctgcac

SEQ ID NO: 15104 - DNA, 347 bp, Zea mays
  Clone ID: LIB3150-092-P2-K1-F11
cagcataccgttaatgattaatatttcagatgacctctagtgcttgcgttcaccttacatcacctaaaactaactagcctcgaagacaacaaacgtcacttgaaaagagtttcgagtattcattggccaacatggcaaggcaccaggctgttgtacacaaggaacccattggcaacaataaggctcggaaagcataatattggttgttcatatttcgtccccggtttaaagggcactttctctgaatataggaaaccccatgctctttatactctgttttggagaaccacatttgcttggtacgacccaagagatgctagaatgctccctccaattcaaacactgat

SEQ ID NO: 15105 - DNA, 346 bp, Zea mays
  Clone ID: LIB3150-092-P2-K1-F12
attccaatgcgataatttataattttgcacgcgcctaaaacctttcccgagtgccttaccatgaccaggggtttcaacacatcacagaaaataaccccagatcaaaactaacattcatagctgttttagaattagacccaaatacctaaacaactcttttctgagcagtacttcaaagagatgaggctcacttgaagcattttgcatttagcaaggccttgcccttaaaaggcttctggtccttgatcatggcattgacccgctccttctgggccttatcagagaggtcgaccttggtccactcatagagctccatgtcttagaccttattcatgacaaacttggg

SEQ ID NO: 15106 - DNA, 334 bp, Zea mays
  unsure at all n locations
  Clone ID: LIB3150-092-P2-K1-G1
atactcatnnttttttcttttttttttttttttttatggggggaattatcggacgctttttcaggagaatgcagaaccaaaagcaggcgtaagaaacacggcatnttctattccattaggaatgacataaagcaacttgggcgaagcagatacacagccaatcacattgcccgtttacaacctacacatgacaacattggatccgccttcaaaccctatgcctttttgggggacttggcggcctctttgggcgacttggccttcttgtttccgccgttggacgcctttttcgccgtctttttgggcagcatgaccgggttgattttgggcaaca

SEQ ID NO: 15107 - DNA, 258 bp, Zea mays
  Clone ID: LIB3150-092-P2-K1-G2
gggggccccaaaatcttttttggggtatttttaaaatccttaccgggcccccaaaatctggcacaagttttcaccatagtcccatccatcccggaacccgttttttttaccctttaattaatccccgcggggggttttttaaaacaacaaccattctttggggggccttgtaaaccttggggggtggggaatatatctgttttttgagcctttcaaattccttagcccaatataaacccccctttttgtcgggggggg

SEQ ID NO: 15108 - DNA, 386 bp, Zea mays
  unsure at all n locations
  Clone ID: LIB3150-092-P2-K1-G7
ccggnccgaattcccgggcggccgccttggtcaccttggcgccggttgggtccttcttctccacactcttgatgactccaacagcaaccgtctgcctcatgtcgcggacggcaaacctacccaggggaggatacgcggagaatgtctccaccaccataggcttggtgggaatcatcttcaccataccagcatcaccgttcttcaggaacttgggctccttctcgagctccttgccagatcgcctgtcgatcttggtaatgagctcagcaaacttgacggcgatgtgggaggtgtggcagtccagcactggggcatagccgttgccaatctgcccagggtggttcatgatgatgacctgggaggtgaagctggcagcctccttggca

SEQ ID NO: 15109 - DNA, 344 bp, Zea mays
  Clone ID: LIB3150-092-P2-K1-G8
caccaagcatatttgatttagcattcatgatttaccgccatgatgatctcagcagtttaacatttcaatggtcagctcacgatgagtctatggccccagcagtcccttcttaagcgtgtacatagcagctaatatgttccagcaagttaacattacagtagggctaatgaaattgtaatttacttagatactgactcgtctccagtctgcgttgcaggaacaacctcagagttgatgctgttgtcaccttgttgagatggtgaatcaagtgcaggtttcttagcagcaggttcagcagagatcggtttgatgctagcttgattgacgcctctgcctacaacccc

SEQ ID NO: 15110 - DNA, 279 bp, Zea mays
  Clone ID: LIB3150-092-P2-K1-G9
aatcacctctatttttggttttttttttttttaatcggggggaataataatttttatttcttcctcaggttggtgggacaaatccccaaaaaataaaagaaaagtgttttggtttttcccttgtgtaacccagggccaatttttttttttaaaccttaacctcttccacatacgttgggtgtcctccaagcccaccccttgtttacttaattttatttgggagtttttttaccaacctacacgaattttgataaccggggatgggattctttttctaaa

SEQ ID NO: 15111 - DNA, 339 bp, Zea mays
  Clone ID: LIB3150-092-P2-K1-H8
aaattaattaatgtttgacaactctaggttagtgcttctgtaactcgtccttccttgagttatataccttctctttgagttactataacattgacttgtaatattacagacccaactagaagaagagaggagggaacgtcacgagatggaggcgaggatgatggcggagcgggaggcggagcgccgggcagatcatcagaggatggcggagatgttccagtacatgcagagccttggcgccgcacagggcatcgctccaccacctccattgttccctccagttgaccctgctctctttcacactcttagcttccagtagagcattttcagctgttccag

SEQ ID NO: 15112 - DNA, 144 bp, Zea mays
  unsure at all n locations
  Clone ID: LIB3150-093-P1-N1-A1
gggtccaagagcacggtgggcgagatcccgctgctgtctacccgcgcgggtccgcggtacggctaggcgtggcggcagcggctcaaggaggagtaccgcgcgctcatcgnctacacctcggtgaacaaggccaaggacaacgac

SEQ ID NO: 15113 - DNA, 363 bp, Zea mays
  unsure at all n locations
  Clone ID: LIB3150-093-P1-N1-A7
tcttcttatttcttctctctctcctcctccgactaaggacttatccatccaagacaaagctccccatcccctactctcaaaatcaccacttcgaatcgaataccaacgcttctacattcaaaacctaccctcaacatacttccaccattcctaataacccctttatctacatcaaaaaccattcctcaatagttttaaataattttaccctcaatacttttaatcattaccatcccatattccactttttcttcatttacattttcaatggcaaaaagcttgaagatttntctccttcattacacaaattttacattccccattttaaccctactcaatattatcctgacttatattttttac

SEQ ID NO: 15114 - DNA, 253 bp, Zea mays
  Clone ID: LIB3150-093-P1-N1-A8
tcttttcttctcaggagatacggagtatggcgagcgcgtatttgagcaagcggtgggcgctcctaatcataagtggacgtctgaagaggaggatgcgctccgccgtggcgttcgcaagcacggcgccggcaaatggcggaccatccagaaagacccccagttcagcccgatcctcttcttccgctccaatatcgaccttaaggacaaatggaggaatttaagtttcaatgcaagtggactgggatcgagttaa

SEQ ID NO: 15115 - DNA, 272 bp, Zea mays
  Clone ID: LIB3150-093-P1-N1-B12
ttcttcttgaagagtatccgtagatatacaggaggttttttcatcggggcacagaaggcacttagttgcttcttatccttccctgtaatactatggtgatatcatttttatgtcgtcatagttggcaatatttgtctaattttcgctttatgtgcatgttcatgtttttttattcatattcttataaaagcttaatctgacttgtacttctattttttttcttcatatttattcttttttacatttttattcttttcactttattttttttt

SEQ ID NO: 15116 - DNA, 323 bp, Zea mays
  Clone ID: LIB3150-093-P1-N1-B5
tcgtgtggttttagagagctggtattctccataggatgggcgcagatcccgtgatacatagcgtgtggcgttgcgttcatcccttgtgagtggaagcatgatgtatttgcgtgctcgcaacaaagatgtgatgcaatccatctcccaaatacctccaaggcgacgttatgaagagattgtgaagagaagtctcatcctacctcaagaaagttgggtacaaccctgataagattgcctttgttcccatttctggttttgagggcgacaacatgattgagaggtccaccaaccttgactgggacaaaggcccaaccctgcttgag

SEQ ID NO: 15117 - DNA, 112 bp, Zea mays
  unsure at all n locations
  Clone ID: LIB3150-093-P1-N1-B8
ttcttcatcatttcnccccctccnccaacgccgacttcctacctgagatagaaaccccatttncaaaattcctgctatattctatctccagatcaaaaacaaaccgcaccct

SEQ ID NO: 15118 - DNA, 341 bp, Zea mays
  unsure at all n locations
  Clone ID: LIB3150-093-P1-N1-C12
ttcttcttctctcggcatacggcctctagagacggggttctttctagagacgagggggcgtgccncccatccnccctctgccctctccccacccatctactatctccatcctccctcctccctcgtcccacccgtcgactacctcgtctccttcgtgcgcggtcctcggctagctccttcttggcgctgggtaacgtgctcttctgtgctgtgcatatccacccgctcccctccttgttctgtgcttccacttgtcccttcgtcactgaccaagggcgtgcctgccttccctcctactgtcaataccacattttgcattacccttgctgctttcttttatc

SEQ ID NO: 15119 - DNA, 146 bp, Zea mays
  Clone ID: LIB3150-093-P1-N1-C5
ccaaacaccttaccttctccagaagaagacttttctttcaagaagaaaagacctccctacactgagcacccttaaatcctccccaaatcatcactatatttctcaactctttaaacatcccaacaattcacccctctacaaatcat

SEQ ID NO: 15120 - DNA, 244 bp, Zea mays
  Clone ID: LIB3150-093-P1-N1-C7
ttttcttctctacagaagggtgtgtccctcagtgcagggctttctatcaaagctggtaggcccaccttattcatatctcttcttcttttcttcttgaaccgtttacttttgtactcgattaccttaagatctctcttttcttattcacacagcttctaccgtccttcgctttccttatctctttcagattctcgactatttctcgtctatctcttctcttatattctttttattcttctatttt

SEQ ID NO: 15121 - DNA, 233 bp, Zea mays
  Clone ID: LIB3150-093-P1-N1-E1
gattcatctgacccattatgacgctggcaggaacttgtggagaagcggttttttaagaccatcgctagagctttgagacctgaaggtactctttgtaatcaagcttagagcatgtgcttgcatacacattttgactcaggacatgctttcaatttgccgcgagactttcaaaggtcctgtccgctattcatgggctagtgtcccaacatacccgagtggggagattgggtttc

SEQ ID NO: 15122 - DNA, 155 bp, Zea mays
  unsure at all n locations
  Clone ID: LIB3150-093-P1-N1-E7
tcttcttgtcctaagcctnctccnntctctacaaagatccccttcacaaataaaagaaacgcgccctcccttcacctttcttctctctctcacacctactcactcttaccttcccccttccccttccataatttacccctcttatttcccttttt

SEQ ID NO: 15123 - DNA, 388 bp, Zea mays
  unsure at all n locations
  Clone ID: LIB3150-093-P1-N1-F1
accattcctccccaaaacacatccggggatcctcgaagcctccgcggggcttcattcttgtcggcctactgcggcaagtccccggatgacctcatcaagaatgctgcctacatcggcacccctggcaagggtatccttgctgctgatgagtcaactggcaccattggcaagcgccctttccagcatcaatgtcgagaacgtggaggagaaccggcggggctctccgtgagctcctgttctgctgncctggtgccctccagtacatcagcggtgtgatcctcttcgaggagaccctctaccagaagaccaaggatggcaagccttttgtcgatgtcctcaaggagggaggcgtcctcccttgcatcaaggtcgacaagggcaccattga

SEQ ID NO: 15124 - DNA, 159 bp, Zea mays
  Clone ID: LIB3150-093-P1-N1-F7
tctcttaaacctttcctaccatcttcatttttgattcgtgctacccccaccaacactccctttatctttttcttctccttattgttttttctcttctccatttttatctttctacttatttttttatctctttacccaactattccctttatattattt

SEQ ID NO: 15125 - DNA, 339 bp, Zea mays
  unsure at all n locations
  Clone ID: LIB3150-093-P1-N1-G5
ccgnaccncaccntatctaagataagactccaatccaggataagaaggccattccccacccncctttctcatttccatctccttcctctccctcctactctcaccttattcttcctcttccatcatcttttctttcttctttcctcccactccctcttcctttcttctttttcaccctcaccttctctctcttcctctttcttcttctcttcacctcccccacctccttttaccttacctctttccccccttactccttcttttatcttcttgtccttccctccccttcttctttcttactctcctctccattttccctattcttcattttttttcttt

SEQ ID NO: 15126 - DNA, 231 bp, Zea mays
  unsure at all n locations
  Clone ID: LIB3150-093-P1-N1-H5
gagattactggcttccntgggcaagtgtgttttcaggtgtagaagggggctccactnaacctttgctccaatatcactggtcaaatccttgcgagcctcgtcatgaatccaccaaaggttggggacgaatcatatgctttctacaaggctgagaaagatggaatcctttagtctttagctcgccgtgcaaaggcactggaagatgcattcaacacgcttgagggactttta

SEQ ID NO: 15127 - DNA, 168 bp, Zea mays
  unsure at all n locations
  Clone ID: LIB3150-093-P1-N1-H7
tcttcctgtctaaccaaccccccccctctccaaacaccttctctctaaaacaaagaaaggccccccacnnccnctncaccataccataacatacctctattccataccactcctctactttcatccccaccccaattccttccttttcccattccatatcttcttttt

SEQ ID NO: 15128 - DNA, 301 bp, Zea mays
  unsure at all n locations
  Clone ID: LIB3150-093-P1-N1-H8
tcttcctactcaacgcccacccaaatccnccaagaagcttcctttataaaaagaagaggaccacctctanccnncctctctttccccaatcctcctctactctatttcactttcacaatctcaatgcaacaaccccttctttccttccaccctcattgctctccttcctcataactcaaatccaccccattcctacccttccccaacattctatcttccccttctctcaacttttctataccccttttccacctaatttctcaccaccctattttctcaccatcttatcttattttatcct

SEQ ID NO: 15129 - DNA, 342 bp, Zea mays
  Clone ID: LIB3150-093-P2-K1-A6
caaacacgcaaccgcaagatggtcaccattgcatcagacacgcctttgtgtacggagaatacatccagaaccagaattattcttgcgccacgttaaaacagacgggcgttgtctcaggtctcggaaagcatcactaaacatgtagtagcatatatacacacatcgccggtcgcataaacacacaaattacgcgtttgcctctggacgggttgctgccaaaccatatccctaggccgactctgcgaagccaaccctcagcttgccatagtcgaagacggtgtggtagactcccatgaaaacatcacccaagatccagagagggccacggggtggtgggatatc

SEQ ID NO: 15130 - DNA, 212 bp, Zea mays
  Clone ID: LIB3150-093-P2-K1-A7
gcgccgctactagccttcttttcttcttttgtggttgagagcaaccgtttgaacgattcatccatctatatatatcgctgcagctaatctgcatagagatcgtatcttctctagcagggctgcagatttaggtgtgttgacgaggagctctgatgctaggggatgacgcatccgcagtagacccgcgtgttggaactggagtcgaagccccc

SEQ ID NO: 15131 - DNA, 265 bp, Zea mays
  Clone ID: LIB3150-093-P2-K1-C1
ataattcgattacaatgacagatttattcagaaaaggcagtggcgtgcaacaactaatcgtttgtgccactgttctggattatttaccggaacccaacaacaaaacagcccattcaggcaagagtgcagcacagtttaaaaaaagaaaggcccgtagcacctattatcacattgtacactggttttgtgaacagcacaagcatacgtttttaccatttgaaatccatcccataaatacacaaggccaagtttgaaccccaagagt

SEQ ID NO: 15132 - DNA, 333 bp, Zea mays
  Clone ID: LIB3150-093-P2-K1-C11
aactacaacttcagtcacattactttgacaatgtcaaaccgggtttcgtgaactctgcaaaacatccctagttggacaacagcgtagaataataaagcctagagtctatgcatttcctctctctctctctctctctctctctctctctctctctctctctctctctctctctctctctctctctctacacaaacaaggatatctctggtggttggacaaaggagaagatggcttccccgaagacctcgttcagagaccccaagagatgaccggtgtcctggtcctccttccaggcttgcctaagcactgcagaaactctctgcgcgagatcac

SEQ ID NO: 15133 - DNA, 298 bp, Zea mays
  Clone ID: LIB3150-093-P2-K1-C2
agcaggcagtgtactccgaccgattccacggaaagggatacgtacatacaggcgacgaacacacgcctagctacgacctgctcgactcgatcggaatcacaacacaccagaacagcttaattatcacccaacatccagatgattaaccaactgggaaacatgactgacgaaaggaaactaatacggggtaattattattagacgggatgatgaccctcctgatgcagatccaggccttcctctccttgtgcgggtgggctgctgctgctcttgattattacttgtcttccactgaaac

SEQ ID NO: 15134 - DNA, 213 bp, Zea mays
  Clone ID: LIB3150-093-P2-K1-C3
actggaatcgattctcatttactgggaaacgcaaaaacgctagaacacaatctttattatatatagatgcgatcaaatcttaaatattcagcgagaacacttcttagatttattacaaacttccaggccacccagcaacgcgttacaaacttccaagagcaataaacgcttctcagggaagcacgtactacaatggttccgagttgattcagt

SEQ ID NO: 15135 - DNA, 230 bp, Zea mays
  Clone ID: LIB3150-093-P2-K1-C5
ggcagtaacggagaaatatgtcaattaccaagagtgtgcgagctttttaagtccgtaagcagtttttactgcaaatcatatcatggcacgtttgatgactacacaaacaaacaacattaccaaaagtggatattaatccgatattttgctttatttttctttctaaaactagcactacccatgttatacccctcgcctttatttttgcgcggtactcagcacagtgatga

SEQ ID NO: 15136 - DNA, 254 bp, Zea mays
  Clone ID: LIB3150-093-P2-K1-C7
aaataatataattaataatatatatataataaataaataatttattaaaatatttattattattaataaaaaaaaaaaaaataaatttaaaaatattatttttgggttatttattaattataaaaaaacccattaaaaaattagtaaattatatataataaaaaaaatataattattttatataaataaaattaattataaaaataaaataaattaacaaacttaacaagtatataataatttaaataaaatta

SEQ ID NO: 15137 - DNA, 267 bp, Zea mays
  Clone ID: LIB3150-093-P2-K1-C8
gggacccataatttggggacgggctgttcagagaaatttacaaacatcctgaaaaacatgtgctttttctatgcggggcataaaaaaaccactttgaataaacagttttttccagcccccatgcttttccttaatttctaaaaagggatgggtaaataccttcttacagaaaacaatgcctatacaatttacattcatgttaaaccgtacaaaccaaactttaaccaattacacaattccggattttaccattgcctacagttgcaa

SEQ ID NO: 15138 - DNA, 362 bp, Zea mays
  Clone ID: LIB3150-093-P2-K1-C9
ggaggtaacaatttcatagtgggatagaaaaactctggttcaccagtaaaccccaaccagcacagcaacctacgcctagaattaccacaggaaaagtctttcaagtactttccaacataaaacaaagttaaagtccaaacatgactaagatttttatcccctctgcttccgcgactcaaaaacaatattcttgactattgcacaagcttagtcgaagaggctgaagcccatgtcgtcatcactttcttccttctcctccaccttctcttctttcttcgcctcagctgcaggagcgccgccagcagcaagggcagctgccgtgacagtcacaccgtcaccgtcacatgggactgaaacaaact

SEQ ID NO: 15139 - DNA, 256 bp, Zea mays
  Clone ID: LIB3150-093-P2-K1-D11
aaattatattttattttttatttttaatttttattttttttttttttttttttttttattttttattaaatttttttttttttattttaaatttttataaatttaaataaaaattataaaaatatttcttttttttttgtaggaaaacaaaaaataaaataattatataaaaatcataaattttttttattgagctcgaaaaaatagttaaataaaaaaatttttatttaatataaataaaaaaagaatataaata

SEQ ID NO: 15140 - DNA, 426 bp, Zea mays
  Clone ID: LIB3150-093-P2-K1-D12
caaccgtcccaaacaaatttattgataattaatactaaacagtagggggcataaaaccatagaaaatacagggtccagaatgtaaccacagataatgcatacacggtgcaacacccagcgatccctgcacttgtgtttgccatagcaaaagccagctcaagccagatggatgtctctgtagcaatccttgatacacttcttttttcgatttaggttttgagatacagtattccaaggcagggaagttacttggggccaacatccttcagcgcgcagatctgctcctcccccatagcagactggacagtcacaacaagatccttgccgctttcgaacccttccttgatctgggccacaagagtctcatcagttgggagtctaagatcatccttagtgttgccatctgaagtaagaaggctcacaaat

SEQ ID NO: 15141 - DNA, 394 bp, Zea mays
  Clone ID: LIB3150-093-P2-K1-D3
gggaacgaagtacctgataaatgttcctcaaattttgctggcgagctcacattaacacaatcaaaacagttatttgttcctaactgctagtctgatcaagatggaattatgggcacagacccaaaactggcagtgcatttggtttccaacaaacacagaattcattgttcacagattttacttgaactggagtgctaaagggcaagtcgtttgatgactatcaatgattaccaggtgttttgggccttgttgaggatgacaccctcgtactttacctggaaccactttatggcgttttttttggtcaccctgtgctggatgccaacgcgggacttgcaccttcgccggcgtgcaacacgattaccagcttgttccagaacgaccttaaagtcca

SEQ ID NO: 15142 - DNA, 418 bp, Zea mays
  Clone ID: LIB3150-093-P2-K1-D4
aaggataaactcaaatacttccaacaaaacagcataattgtgcaatgcttagctttgaattcttgagctggaatggaacaacacaaatgtcttgggatactaaagaagtagaaaaatctgaatgaacattgccaacggactcttgggatactaaagagccgagtaacagctcatttcagaggaataaaccgcgaggagtgggtggcaccgataccgggcctgccgtgcttgaccggcttgtatgagatggagaactcagcaaggtagtggccgatcatctcaagcttgatctcaacctgggtgaaggtcttgccgttgtagaccccaacaatgcttccaatcatctcagggacaatgatcatgttacggagatgtgtcttgactggctcgggcttcttaccagcaggagcattctttt

SEQ ID NO: 15143 - DNA, 417 bp, Zea mays
  Clone ID: LIB3150-093-P2-K1-D5
cacgcagaacaaaatgcattaaaatcgggatttataaaggatagctccagcacgtatacttatgttcgtactagggagggaggcacaacaaatgggagggagaaaatcgaggaccctggtgcacttggctatgtcaagaacaccaaaacaaaaagaatgatgaacagaacaaccaggaacacgatcagcatgatctgacccttgatgccggccttcttcattaccatggccactcttttctgcacgaaatcaagtctgttggaagtagtctccatctccaagcttaagtcgtttaggatcctttcctgtccagacagctcttcgtgtatggttagtcctacgccaccaatcctttgaacactttcactgagctcggtaaagttttcatcctgctgccctatgagtagaaactgccta

SEQ ID NO: 15144 - DNA, 164 bp, Zea mays
  Clone ID: LIB3150-093-P2-K1-D7
ctatctactctttctttttttcttctaaaaaaaagggccagcccgttaacaggtgggcccccaccctccttaaaccatatggttttgcccttggggttttcccaacattcccgtaaacccaccttatttttcaaccacctaaaacatttttatccttcccaaaa

SEQ ID NO: 15145 - DNA, 424 bp, Zea mays
  Clone ID: LIB3150-093-P2-K1-D9
gaagataactatacgacttcctaaaatcaaattaacaatgccaaaaggttaacatatagctcttacagcattcttgtattgcagaaggtgaaatagcaagaaggtaccaaataaatagataaaagtgcacaggctaacagagctcaacagttcacacaataacagcaacgaccacaaacaaaacttgtaatgatgaaaactaggtattgctaaagcaggcgcaggatcgcatcatttcttcttggcagcagccttggtcaccttggcgccggttgggtccttcttctccacactcttgataactccaacagcaaccgtctgcctcatgtcacggacagcaaacctaccaaggggaggatacgctgagaatgtctccaccaccatgggcttggtgggtatcatcttcaccataccagcatcaccg

SEQ ID NO: 15146 - DNA, 274 bp, Zea mays
  Clone ID: LIB3150-093-P2-K1-E10
agctagcaccatctctttgatttattatttctttggcaacggatggtctggttccaaatcttgaatacacacgtactcgtacgtcgttttgttgcaaatcggcatggaaatgggctaacacaggcacaactcacaaatggtccttttattacgggtggccagatccagaaccacccgcgccctttacaaccttattgaccggcgaaaaattctggttttccagccccaggcttcttgccttttttaacgccttattggcagcttcttagaccgg

SEQ ID NO: 15147 - DNA, 389 bp, Zea mays
  Clone ID: LIB3150-093-P2-K1-E12
ggaaacaaagcaaaccatcatccaagctgaggaaagcatatgaacatttcacccaatataaagataaataaactcaactctcttgagatggaactcaaaacccacaaacaactctgaaagaaaatgcaaaattaaccgaggtactacaaaagtggcgttggtgcaacaaggtgggctatggaggagcaattgcaaggtcaaggaacgacacttaggttctttcagcgcttgccaccgccaccacccaacttggggcccttggaacccttctggaccgctcccttcgtctgtgccttctgggacttggtcacctcagcctttttcgccttcttctcatccttggtcttcttgatgcgctccttgatctcacgaagagcagcttttttagc

SEQ ID NO: 15148 - DNA, 399 bp, Zea mays
  Clone ID: LIB3150-093-P2-K1-E2
agcaaatctctgaaacggagtctcatcttcgttcttcgttcccataatccctcccattcacttgtttctacaagagacaccaccgccggttcacccacgcatgggtcgccaacaatgcgaccttcaataagcggaaacagagctacagacagacagacaccattgctgcagacgcacgaacacaaacccccacggtccagcgagagaaacaagcagttccattttcaccccgcccgacgagatccattgccatgccatgcacggatcgacgtatgtcggtcaggagctcagcggccggcgcactcgggcggctgcacggggaagcggtcggtgtcgacgcagtattcgtagacgaggtggtgcgcgcgcgcccacacgagctggtggcttttgtgcacg

SEQ ID NO: 15149 - DNA, 415 bp, Zea mays
  Clone ID: LIB3150-093-P2-K1-E5
accaaaggtttagtggtaaattttgactctcaaccacacatcgtctgtatgcaaacaatgtgtagaatacagcacttgtccacaagtacaaagaattgcacaacaattaccaaacgtgcgttcatcctgcagtgatgcacatcattgactgcccaatttacaaacatggttccgatggaccaaactatgggaattcattgtacatcacaatctgatggatgaaatgaatactccattccaaattataagttggtctggtttttctaaatatataacttttactatgcatctggaggatacattgtaaaagctatgcatttagaaaaaactaaaacatcttacgatttagggtaaaagggagtaccaggttaagcttctacagctacaggggacaaaactgatcttgtttttcaca

SEQ ID NO: 15150 - DNA, 318 bp, Zea mays
  Clone ID: LIB3150-093-P2-K1-E8
ctatgcacaatagagttaccagatagatcatccagatacagttcaagtttctgaaacgcaactatccacggagcacctggatacggccccagggagagagacagagcaagggaaaaggaaaaaccaacttatgcgcaatagataccaaaaagctgattctgaaaagcaaattagtagatgaggtcatgaacactggtcagactaacttcctaccctgtactctatacgggctttgctgcattcttcagccatcttgagttttctgtcttctgcagttgtttcctcgtactcatgggagcagcagcatgtctttatttc

SEQ ID NO: 15151 - DNA, 347 bp, Zea mays
  Clone ID: LIB3150-093-P2-K1-E9
ggatctagtcatcaagatcgattaaccatacaaaagattagaatcgacaccactgggtatcaagtcttgtactagatggcacgtaccacgaaccgaacaacctaaaacaaccatgtgcaaacaaccaagacaaaggaagtgacactgagacccactaatgtatcaaagccacgcgacacatgcgagtccagtctaggtatctcgggtcagtgaactcacaagctgctccgctgtgttgtacactcctagaaaggctgcatataacaagacgacagaaaccacccgggaatgtctcggtttacggttgttagcctttggcactcgctcgctgtcttaaagacgcggtg

SEQ ID NO: 15152 - DNA, 426 bp, Zea mays
  Clone ID: LIB3150-093-P2-K1-F10
gcaaggaacttagtacagctgtactcgaactcagaagatcaccacgagtaatcttaaacacttgttgcgaataatcttaattttaaacttgtttccagacaaaatcttaggggcagatgaaaacaagtagacaactctaagttcacgtcataagcaacctaatgtccagactcgcctagatatagaagtagcaaacaaactactcggcagcagcaacctcctgcacagcctcatctccctcgacaggcctctcaagcttcacaccaacatcctctttgtagtcgccatgaacctccatgagcttcccaagatcgaacttgggggccttgagtatcttcaccttgcggatgaagacgttttgaagtgggaagatgctggaggtagacttctcaatctccttaccaaatacttctggaatgaacttcg

SEQ ID NO: 15153 - DNA, 291 bp, Zea mays
  Clone ID: LIB3150-093-P2-K1-F11
caatcttctcaggaaagccatgagacaaaacatttattttacgccccaaataggaaagggccccgaatcctttccctggggatcctccagggctgttttgggaagttaattttataaacaggtccattattctattcttttctaaagaaaactccaaccacgagccgagacggtttactgttctacagtttaaacgcctgttaaacccctgacgagtttccgttcagccatgtcttttggatgggggttagcacaaagccctttggggattcagccttcaaaatcaaagca

SEQ ID NO: 15154 - DNA, 390 bp, Zea mays
  Clone ID: LIB3150-093-P2-K1-F12
agatcaaactagcatgttttcaagcaacagcacacagagtgcgacaagggcacggaaataattcacatggtggtgatcttgcgacaacagcacccacagagtgctagcagactaaacatcagggctgagaacacaaattaaaccaaaaaaaaccctggcgaggtgggtggtcttgcgttgacacggaggaggatacgtgaccagagagctgttttgcccacgggtgaggtttacaacgtgttggcctgagccttgttgaggatgacgccttcgtacttgacctggaaccacttcatggagtcctccttggtcaccctgtgctgaatcccgacgcggtacttgcaccttctgcggcgcgccacacggtatccgtcacgcttcaatacgact

SEQ ID NO: 15155 - DNA, 415 bp, Zea mays
  Clone ID: LIB3150-093-P2-K1-F4
cacattagaatctggaattgtaacttcttatttctggttggccacatacatcatccaaaaaactttattattgaattacaactaataagcaatctaaaagagggcaccaccaatgatgtgttgttggtaggaggctgctgggtttgtcaaagcaagttggacaaagggcaacaattgttgtagttgtaagagggttgcggggttagccgcaaactgctggtagaaaggcagcaactgttgctgtgtcaagaaggaagcacggcttgctgcagctagctggctaaatggtagtagtatttgctgctgcaaataagcagcggggtttagtgcggccaattggtttaatggaagaaagtgttgttgcttaaagtatgcaataactagctggctgaatggaattagttgttgctgcaaa

SEQ ID NO: 15156 - DNA, 405 bp, Zea mays
  Clone ID: LIB3150-093-P2-K1-F6
aaaaaagaacgactcagtttgacacttctaacacggaattgtcatggcatagagatccaattaattaaccctatgaattatggcgaacaatgatgcagttactggctctcttcttcataatcttcctcgtcagactgctcaccgtcacttgcagccgctgcccccgcgttattgttgtcatggtactgctggtaatgtgggcgtggagcatggcggtgcctgtcaacatggctgatccggtaacggctatggtgattgctgctgccaccggcgtcggtaaccagtgacatcctcggaatcctcctcgacgagccaacagctgggacggcggccgtggcaggagacgcgtgattcttggcctgcgtgagctccatctgcgtgtcgaggaagaaccgcacgcgctgt

SEQ ID NO: 15157 - DNA, 395 bp, Zea mays
  Clone ID: LIB3150-093-P2-K1-F7
aaactaattccctggcgtcgccagctgtttagttttatagagtatcaaacactacaacgaccaattgggacacaactaacctggaaaaaaactatcatcggagttcagttcttttactagtgtacactgcaaataacagaagttaaaaacaaacaattgtacacgttttatgtagctaaactctctaacaaaagccctggatgcgttgctgtaacttttatcttccgataaccatctaaaactttgctccaggagaagtggaagacggatgagatttactgacgtgattcaacaatgcttcagagctcaattttgcttttgctggatttggcaggcttttttgcccctttccaccatttttttaccataccggtcaccttgtttacatgcccttt

SEQ ID NO: 15158 - DNA, 438 bp, Zea mays
  Clone ID: LIB3150-093-P2-K1-F9
catcacaatcaaataaactttatatacagcaatatttaagggcacaatgtaccttcctatcagacactacaattgtcaaacactaacaacgtaccagatctttggcagcgaatgtttgttcacactgttatgcaagtgaatccatacatccatttgagggagaaaacaatacaaactgaacaggtgtattgatcaacaaacaaggaaagctacagccaaatatacgagcaaaaaataatccctactacaaacagggcatggagggaagaacagagatcccagactacaatggaaataagaaacacagaaaattgtctgatctgccctgccccaccctctgttgaagtacaaagtttcagatacttgtgtcacaatatatgcgctttatgatcatgcatgatgccacagattgatctctgtggatagctgctcaatgga

SEQ ID NO: 15159 - DNA, 309 bp, Zea mays
  Clone ID: LIB3150-093-P2-K1-G1
ggggataccaaccggtacattacggttggttgaaaaaagggtctcaacagcacttggattgtccagtttgaccaattttttttataaacatgccctttgcaactaaaagggaacaaggttttaattgttcccagactgcggggggcatttttaacccgctccagttgctaaaaccaaaagattagagcttgtcctcaaactcaaaaaggggtgttattttttctttcaaacccttccttttggggaatttcagcaccaggggggccccctgggggccacccttctaaagatccctgcccatactttttc

SEQ ID NO: 15160 - DNA, 262 bp, Zea mays
  Clone ID: LIB3150-093-P2-K1-G10
aaaaaaccgaagtcttttcctttttttttaaattgggcaaaaaaaaaaaaagctttgcctccccttgcctttggtgaaccccccgtttttttttgggagccaattctttttttcgggggggtatttaaatattcccgggggaataaaaaaacctccccctgggggggggctagctaccccttgggttcccccttttggggccccaactgggttagggtgggggccctccccccccccgggggttttgtgtccttagccattt

SEQ ID NO: 15161 - DNA, 412 bp, Zea mays
  Clone ID: LIB3150-093-P2-K1-G12
caggagaataaagtaacagaattacgttttttctacttatattaagtatcacaacaccgggtctccaccttctaagggtgttatagtagctagttataaataatacatttagaaatggtaaaattcctggtccaaactggcttcaacaaaaactggaagacgcgacgcgagtgttgcttcccagaagcccaaccgttcgagtcatttcttcagcaactgtttcaacacatcttctgcgtgccgctccatcttaggtagagcccagtcatgctgcatgatatccaggctgtctttctctgctcccaaactcattgttgggttaaatccaaatccaccacccatttgcatcatcttctgtgcatcatcagttgcgttttcttcaccaaggatcagactgaaaagaccccttaag

SEQ ID NO: 15162 - DNA, 211 bp, Zea mays
  Clone ID: LIB3150-093-P2-K1-G3
ccccagggacaagaatttttttttttgggggggggtttaacctttaattaaacccttcgggggtaatataacccattgattccaaattcatgctggttgtagcaagggtcttctggggccgagggtgaaaacagcaccaacaactggcacagaggggcccacaaaaaaaacacagaggggcaacaacaaaaaccgggcgaacgaagtaaac

SEQ ID NO: 15163 - DNA, 243 bp, Zea mays
  Clone ID: LIB3150-093-P2-K1-G4
ccaaccccaattgggatttttttaaaaattcccccccccctttgtccccgggcaaccctttttccccggcccaaaaagtccggggaaaaaaaaaaaacccctttttccggggggggggaatttaaaaggaaaaaaatttgtaaccggcctttttccccttaaaaaccgtttttttggaaacccccccagaaaggacagggccccccattttttgttctccccggggggttttgggggcctttt

SEQ ID NO: 15164 - DNA, 287 bp, Zea mays
  Clone ID: LIB3150-093-P2-K1-G7
aaaaaaaaaaccggcccctaaaatttgggggccactttcccccaaaaccaattttccatggacctccaaaataaaaacaagtgggggtttaaaggaaaagccccccttttgcccccctttttgccccaaataaattggcccggggttccaaaaagaggtgaaaaacctttccaacggtttttaaaaaatgtatccccccccccccccccccccttaaaaaacccccctgtgtaatcccaaacatcttggttccacaaccggggggatctcggggggttttttttttt

SEQ ID NO: 15165 - DNA, 324 bp, Zea mays
  Clone ID: LIB3150-093-P2-K1-G9
ggcagcaccaagaagcaccatttttttccttaggatttaacttaaaataaagcctgacgggggtaacagcacccatcgatccccaacccatgctggttgatgcatgggtctgctggagccgaggttgaacacagcactaacaactgacacagagcgacctttaataaaaaacacagatgggcaacaacaaacacgggacgaacgaagataaacactctggactagggtaaacaacacggttgcaaacaggataacttggccgcgcgggccccaccgttcagttcctccagttcccgtcggagttgccgtagcccccgccacggt

SEQ ID NO: 15166 - DNA, 346 bp, Zea mays
  Clone ID: LIB3150-093-P2-K1-H10
aaaagaaggaagcatattactccatacatattattctcaatagtctctcacatgttacaaatctcaaattaaagttctaggagagagtaccacatgtcccaaccactccttttacatactaagaggaactgtataactcccgcacttgtagccaggttgaaacggcctcttacaatagttggcgacgtacacaaccttttccatgcaccataccttctctacttccttgttaacatatttgcataggcatggaacatctgccctcttccacacagcacaacatgctgccgacggtggcaactttgggttcgctgggaatagctcaaactgcttgcactctcgtttc

SEQ ID NO: 15167 - DNA, 70 bp, Zea mays
  Clone ID: LIB3150-093-P2-K1-H3
cggattccctgtcggccgccctttttgtttatcttgtctattttagaggatccaaagctaccttccgttt

SEQ ID NO: 15168 - DNA, 327 bp, Zea mays
  Clone ID: LIB3150-093-P2-K1-H8
aatataaaattctgcctgtctgtcaactacaaatacctggtatgtcaacagaaactaagataaagaatacacggtgtcacttgccactcttcaagctcctggtgctgagactaattctaatacataataccagccagcagtttactgcagaaatagcaaaatgtgataaaaggaagctggggcacaactccctcctttcataggagtcggcttgataggttcctatgcagtaagtccaggttcgtcaggtgtaatttgggcgcggatcggctttcgatcaagacccttcgtcggcgacttgttttctaggtcttctgcaaaatgaac

SEQ ID NO: 15169 - DNA, 402 bp, Zea mays
  Clone ID: LIB3150-094-P1-N1-A4
tatattttgttcttcaaatgttcatccaccggttgtgacactccgactgcgtgaactattcacatatctcgcttcagctagtccttctgctgtggatcttttgatctattccaatccttcagctagtccaaactgtttgacattacaccacaataaagagacatctcaagaaagttcaatgcacaatatgatgccaccatattcaaaggcttatacacctattatattgcttcttaagcttctaaataaacccttatttctgctgagtcgagtataccttgagaaggtctcgtatttgcttgaagtagttattaacaatgctgcattccacgttgattgtccaccttactctgtacagataactaacaattcagatattgaattccttgatgggacaccata

SEQ ID NO: 15170 - DNA, 298 bp, Zea mays
  Clone ID: LIB3150-094-P1-N1-A5
tttacttttagttctaggaacgtcatccccaggtggggatccttcttaatgtgggggtggaacctattgacctgcttgccacagcatgttattttccaaaaaatatttaggaacaccatactgctatgcttccattatttattccaatgctttttaaacaatatcttactttgcttctagccttaatgaaggttccaccaacatcccatcatcagctgaccttgatttttctgcaaactacattaatctcaaattttataccatgcctcctgggaggagcttttaaaaaaatttgatt

SEQ ID NO: 15171 - DNA, 351 bp, Zea mays
  Clone ID: LIB3150-094-P1-N1-B11
tctttctttcaaaccctatccccctcctccacgttggagatctcaggagtgtgcgccggggcgactgacacagacaccttcccatttcacgctgacatcaaccaactgctctcactcatcatcaacaccttctactccaacaaggagatcttcctccgccagcttatctccaactcttcctatgcgctgtacaagatcaggttccagagtctcactgacaagagcactctcgatgcgcatcctgagcttttcatccaccttgtcccagacaaggccacgagacacgctctccatcatctacagcgtcatctgcatgaccaaatcctaccttgtcaacaacctcagtaccat

SEQ ID NO: 15172 - DNA, 392 bp, Zea mays
  Clone ID: LIB3150-094-P1-N1-C12
tgtctcaaggttggtgaccccaagcgggaggaaattgacatgggtcaggagggcacaaaacaaatctaagggcatactatctgtgcgcttggggatgctgcggcatggcctgtgcaggggcttatcaggcactttatgccatagttggagcggaggatccgcgagcgagctgaaagggagctgttgtcggcttctgcataatgtgccatccatgttgcccctgtactagtttcctgatctcttcctaccgaaataatacaaactgatggaggtgcgggctgtgtaatgaaatgtatcctttcttatttctttaaaccattatatattttatgcactcaaacaacttgttaatttttatggactagataaactttttaaagtttaaacaaact

SEQ ID NO: 15173 - DNA, 209 bp, Zea mays
  unsure at all n locations
  Clone ID: LIB3150-094-P1-N1-C5
tatatattatggggatcttttcttgtnnagcgatacgatttaataatattgcctgttgggacaataaatatactntctcaataaatgtatggtcttttttcctcgagagctactcatgtgattttgtcgtgtgatcaccaaaatcataaaataactttttttttttaaaaaattaaatttttcttaataactattatttttatatttta

SEQ ID NO: 15174 - DNA, 400 bp, Zea mays
  unsure at all n locations
  Clone ID: LIB3150-094-P1-N1-C6
taagagaagggaagacatggccttaacgggggaagcgtctgcagagatggggtgggagcnncggncgtacgcgcgggtggggctcctcggcaaccccagcgacgtgtacggcggcagggccctgtccttcgccatcgccgacttttccgccaccgtccacctccgcccttcgcccgagctgctcatccagccgcatccgcaccacgacctcgtcgccttcccctctctccctcaactcgtgagccgtttgcaaagtgaaggatattatggaggcgtccggctgctgatggctatctgtaaagttttctacaactattgtgttcaaaataacatcagtttaaaagctgaaaatttcaccttatcatacgatactaatattcctcggcagtctgggctgtct

SEQ ID NO: 15175 - DNA, 340 bp, Zea mays
  unsure at all n locations
  Clone ID: LIB3150-094-P1-N1-C8
tctttctgtttcggcgcgggcgnacaaatagcangggtaaaattaatagtgcgaagcgacaataaatatctcacntnactccattcacaaactcctagccaccctttgaaagcataatgcctgtaggaagaagctaaagtattatctttgtctccagccaaccaacaccaatttttcaatcaataagacagttatgattgtccgtgtttctgtaggtaattttaaatgtaagtcttttcatcttgatactggtaactactcattnngaattgatgcttttacccgcaagacctcttttctctactttttctacaatgtatcaaacaattatctttttatg

SEQ ID NO: 15176 - DNA, 298 bp, Zea mays
  unsure at all n locations
  Clone ID: LIB3150-094-P1-N1-D12
tcttcctttcaacccaaagttcccnctgatccacatggcctacatcggcggcggagggggccactcctaacccaatcccgtccattaactcaacacatcttctctacctcaataacaccttcaaaaaagacaaacattcctacttctctaaccaccacatattatatatgttccctgctctcacaaaatgcatacactacacaagtcttcttacacttcaaacaagcaccaccatcttcttctccatactcatacttaacaaaaacaaaaatgttatgtagctggagcacattctcta

SEQ ID NO: 15177 - DNA, 289 bp, Zea mays
  unsure at all n locations
  Clone ID: LIB3150-094-P1-N1-D5
tctacttttccgccaccccctacanctaagggagaggatgtcataatatgggggcgggacatcaaccaccccaagcacttctccctcctttttcttcccatgaagcactcctcccttcacctctacaaggtgaactcatttcctatttatgaccccaaaaaaccttgccatttcacttccttccttgctacaatgctgtcatcactcacattgttccttagcttgaaaagccaatatccaaactccataataaggaaacctgttgatgctgttaccatgattgaaaccc

SEQ ID NO: 15178 - DNA, 243 bp, Zea mays
  unsure at all n locations
  Clone ID: LIB3150-094-P1-N1-D7
tcttcctttcggctgccgcaaactgctantagccggggcgccttcaccgtagggtgggatcaccntcnagcaaataccacaccactctactgacgcccgacgagcagtgtaacattttccttcagccatgggtaaggagaagactcacatcaacattgtggtcattggccatgtcgactctggcaagtcgaccaccactggccacctgatctacaagcttggaggtattgacaagcgagtgat

SEQ ID NO: 15179 - DNA, 229 bp, Zea mays
  Clone ID: LIB3150-094-P1-N1-E11
cgtacataaacttgtatcctctattatctacccacttttttttttacatcctccaacacaactacaggtgcgttatactacagggtcgtgcgggataccacaaatttattataacctttataattcacacattctttctaatttttttatccatacaatttactataattaattttctcatcacttaccataattcaattatcttccctttatttttataaattattta

SEQ ID NO: 15180 - DNA, 340 bp, Zea mays
  unsure at all n locations
  Clone ID: LIB3150-094-P1-N1-F10
aactgctccctgnncccccccggctggcttccccatgtgggccgaccggctcccaaccccactttctgcgcgcgcccgagcccagttcggccgtgacctctctgtccgaatcgcggcaaggaggcctgctcgcggctgagccctcctgtgcgcgcgagccctatagcttggctgaccggggcccccttgctgcgcgcgcgccctaccgagccgtggccatggcgtccagccaggaaccgcccctgcccatgctttcctgcggtgaagtgcccggttgcctacagccatgcttcttccccactctccatggccacctgctactctgcgtcctacctttctg

SEQ ID NO: 15181 - DNA, 394 bp, Zea mays
  unsure at all n locations
  Clone ID: LIB3150-094-P1-N1-F7
taaatatcttctaccccaaccccggccgggaacccttggggggggacgggacactancnaccaacccccaaccccagaccttcctctccggcggcggccggcgcgcgcgcgagggagatggaccgcccttccggcacatcgtaccagcgcttcccccgcgttcggatccgcgagctcaaggacgactacgccaagttcgaactccgcgacaccgacgccagcatggccaacgccctccgccgcgtcatgatcgccgaagtcccaactgtcggcatcgatctcgtagagatcgaggttaactcctccgtcctcaacgacgagttcatcgcccaccgtatggggctcatgccgctcacctacgccgtcggcatgcaaatgcgcttctcttgggact

SEQ ID NO: 15182 - DNA, 342 bp, Zea mays
  Clone ID: LIB3150-094-P1-N1-F9
tttctatccccttaaccctcgttcctctaggcgggtctcacagccaggggcgccagttctcctccaacagcggagctgctagctcaaccatggcggactccaaggccacctcggcggtcaccctccgcactcgcaagttcatgaccaaccgcctgctggcccgcaaacaatttgtgcttgaggttatccaccccggccgcgccaacgtcttcaaggcggagttgaaggagaggcttgccaagatgtactaggtgaatgaccccaacaccatcttcgtcttgaagttccgcacccacttctgttgaagcaagtccactggctttggccttatttaccataacc

SEQ ID NO: 15183 - DNA, 401 bp, Zea mays
  Clone ID: LIB3150-094-P1-N1-G12
tcttatcaccctagacgtgcactcttgcgacaccattcataatgtcagggctgcgatccataacaaggagggcatccctcctgaccagcaacgacttatcttctccggcaagcagctataggacgtacgcacacttgctgactacaacatccagaaggagttcaccatccactttgtactgctccttaagtgaggcatgcaaatctttgtcatgaccttgactgtcaagacaatcacccttggggtggactcctcatacaccattgacaatgtgaaggcacagatccaggacaaggaggacataccacctgaccagcaacgtctcatcttttccggcaagcatttaaaggatgcgaggacccttgctgactacaacaatccagaggagagcaccctccact

SEQ ID NO: 15184 - DNA, 262 bp, Zea mays
  unsure at all n locations
  Clone ID: LIB3150-094-P1-N1-G7
tttcttgcattccgctgccgcaaactnntggtaggctttattccaaagaccgggtggtcanatcaacaacaatcatataccacaccactctacttactcccgacaagcagtctaacattttccttcaaccattgataattataatactcacattaacattgcgatcatttcccatgtctactctttcaaagtttaccaccaacttccacctttatctacaacctttttaatttatttaccaaacctattttatttcattata

SEQ ID NO: 15185 - DNA, 246 bp, Zea mays
  Clone ID: LIB3150-094-P1-N1-H5
tcttctatactctacccacacctcacttcttctttttttgatttcgcgccaacattggtgattgtgttcttttcaggtgcgatgtgacctaaaaccatgtctaaaaacaagatccacatcaacattttcgttattatccacattctctctgccaagttgaccatcacaagacaccttatctacaacctcgcaggcattgacacgtttattatcacacactatatgaactacactcttaaaatcaac

SEQ ID NO: 15186 - DNA, 395 bp, Zea mays
  unsure at all n locations
  Clone ID: LIB3150-094-P1-N1-H8
tcttctttttcagaagcttgttncnatnagtgggtgagcatatcaagcagggagtggggttatacaaaatgagggttgcgttgaggagtctgttacctggctctgcaactttgatggcagtgaggaagctaagcaacaacttgcatctgatcaacagtccggtgttaacttgaagattgatatagctgatgagctttcaaagattgtgagctttgatgtaaaatataagtgtacaaagcaagaagttgaaagagcagttgtttcctgttaaggtgatctagaaaggtcttatcattcctttaatacacacaatcaagtatcaacttctagtcccaccaaattctgaaggatctagtgactcaagttcctttcttaacaagcatcaagttgttctt

SEQ ID NO: 15187 - DNA, 411 bp, Zea mays
  Clone ID: LIB3150-094-P2-K1-A12
aaagctcataaaaattgataatcttgcaagagttttacatgcatacatagtcctgcaattcttggctatatgtaggtatagagtgtttcatgcacagacaaaacagcattactaacaaacagggacaataatcatggattgtagagtattactacaaaagtacaaaacagcaataatatgcatgtagtgcagtgcctggaaaggtacgattagacattgtgcacggaggtcgacacatggctagaaaaaagtcctgcagcataggatcagttccgtgaacggctccaggttgatgaagaggacgttgagttagaggaaaatcttgatccacgccagcgatcagtatcttggcgtgatgagggtgcatccagtcgtgcaggaggaccatcttgcctgagcggaccacgtgaa

SEQ ID NO: 15188 - DNA, 360 bp, Zea mays
  Clone ID: LIB3150-094-P2-K1-A3
gtcttcaactcagcatatatgaatttttgccgactccaactcagcatatagaaggggttttgccgatacatagccagcattacagcatagttgatagaacaaaaaaagggggctgctcgattctccatcggcaggaccaacttacacgaaatttaacagcaaagagactaattaacatacaaatataaagataaccatcatcccacataggaagcatgttttttggatgtccgaaaataagctctaacgagcaaaccacactccgcaacctagctcgtaggcaggagttccaaaacgggcacgcaaagagaagcaactcagtacttgtagtccttgacgtggaggctctcggtgtcggcg

SEQ ID NO: 15189 - DNA, 395 bp, Zea mays
  Clone ID: LIB3150-094-P2-K1-A4
aataaaactcactctcttattaaattcttaccatattatcatatgggcttatgtggcaacacatttgggcgagattgaaactcggacgaaatccccgctggaaatagcctagcaatgtccatgttcccagaaaacgtattactgctacttgtacatccacaatctttagcgagttattataaaactcatacaacatcctgaactctggaggaccaaaccatttatccgagtgtgacacgtcctatagtccatccataaacggatggcgctccacacacacaacctggtacagggagcctcctccagccgcaatcagtagtcatcgcctctggaaatgacctctttgcaagttggccggagtaagattgtgtgctcaaactgcgagacatagcttc

SEQ ID NO: 15190 - DNA, 225 bp, Zea mays
  Clone ID: LIB3150-094-P2-K1-A7
aactaacccagcaacaacttttttaaattttaactgaccaactgatcaacagtttctaagtaacccaattatgaccaagagaaagggcgaagaagaagatgaaacaatattaataataataccggactcccctataacggacactaccggactcccttataacggacactggactagtaacttattgaacgcacctttcgacgcccaaaacggtatgaatgaatg

SEQ ID NO: 15191 - DNA, 320 bp, Zea mays
  Clone ID: LIB3150-094-P2-K1-B4
cttgtcgacaagtgtcactggttaattgcctacaacatttctacaagagtttgacggcatagggctgggtcctgcataagagctgacgctctccaagatatacaagaaaccagggataccatgccatagcttaatgggcaacaggtgcccgcatctaataacattacaaacaaatcctattccacttgtgtatactaacgcgttgctatccaaacaaacattttctacagtacaactgtcaaattgcaaagggttaattaatgcgatattccacattttcgaacgtttgtctgcctgtgaaatttgcatattctactatg

SEQ ID NO: 15192 - DNA, 384 bp, Zea mays
  Clone ID: LIB3150-094-P2-K1-B5
ggggggacaatgatttaatgcaaagagaggaaggatccagactcctgaaacgaaagacccagtaacgctttagaccaagtagcacaatggtttaatgcaaaaaaaaaagatccagactcctgtgcggaaacaagtttaagatacttggggttcaattaagtacatgagccagatgtcacatggcagataattctgttttgggtacaaataacaagccagggggcccaccaggcatgttaagcagatccactggaagcattgccgtagggtttttttatttttttctcaaaccaacacttggtttgagtcaggggttaaaaggctttacctgccggatacacaatggaacgggtttcttttacctgcccacgtttaggggaaggg

SEQ ID NO: 15193 - DNA, 410 bp, Zea mays
  Clone ID: LIB3150-094-P2-K1-B7
gaaaatcataatagagggtctagccaaaatagtcttcataatctctcacattaatttcacattgcaaacaagggttcaggctaggcattaaagtctaaacattatggtaaagcagcagctagatatagaaccagataagcagatccattgataggaaataaagcgaagaacacccacaacgatctgaaaaatcgagatggagcaggcagccgctcaacggtacgacttctggaacctggcgcgggcaccacgtccgccgaacttcttcggctcgcagcgccgggggtcagcgacgaggagggtgcgatcgtagcgggtaaagatgtccttgatctccttcttggcggcctcgtcgacgtacttctggtagtaggcgacgagccccttggcgacggcctggcggatggcgt

SEQ ID NO: 15194 - DNA, 427 bp, Zea mays
  Clone ID: LIB3150-094-P2-K1-C6
gggctcagaattgattttaaattacataaacctcgtcgcggcatatacaccattacaaatcaacgattccattcaggcacaacttggtctgtacattacttcaacctaacgtcatgacaacccagtccccggtttcttacaaatcaaaatggaaccatggccacgagttccgagcatacaggcaagaagtaaccatgcgaaaaggaaaacaccagggacacacgcctctaggcgagtggttagcttgagcgccataagatagctgctgtgtaaggtccttagtccggcaagccagtaccttacctctttttccatgctgttcttgataccgagctgctgtgtacagttttagtccggcaaggcagtacctttttcgaggttgttcttgatctcgagcgggtacttggcgaacgcgcgcttaaacctt

SEQ ID NO: 15195 - DNA, 431 bp, Zea mays
  Clone ID: LIB3150-094-P2-K1-D1
aaaaaagcttattccaatttttttttctgtgcttcaataatagactcatcggacacgcacaacacgtctaggcgaggcaaccaaacacaaccttaaatactaaaatagaataaaatacagggactaaacagtagtccataaaaaccaaacacttgttagctgcagcgacctaacatcatcaatcagtactcataatcttttcctatttgctcaaagttgcagatacacggaattggaactgcaattttgcaaggcttatcatagcatctgttccttgacaccaaggtaatctagcatctacatataccttacagaagtgctaaaacccagtgagagcaacacacagaacagtaatcaagttactggagctcaaaagaaaaactgcgagggagacatcgggggccagtccttcaagaaccaccagaaagact

SEQ ID NO: 15196 - DNA, 358 bp, Zea mays
  unsure at all n locations
  Clone ID: LIB3150-094-P2-K1-D6
ggacaacattggtttctgattagtttgagtatttagtttctgatccaccaaatggtcagctaccgactactcctgggcgtaggattttacatgattcctgacgcttactagccacaggaaagcagacaaatttcatgctgcagcgtacgccagggattaaattcagactaaactacttgcatcttgggtgcaagactaatcttcagttacttntgctgccgctgcggatatcagtgatgctgactggatctttccggcatgctccagcctcatcagaatcactcccctcgagcgtcgagactggacggatatatctttaactttgattctgtttgcagtgccactctggctaaccaaa

SEQ ID NO: 15197 - DNA, 377 bp, Zea mays
  Clone ID: LIB3150-094-P2-K1-D9
gcagaaaaaaaattttatagtttaccgttacagtaaaaaacacgaaaattttggaatagccatttaccttggggttacggaccatcatcaataaagatatcgagcgtgtggggcacaaaaacgtgagaaagtgtaccccactgctcttatccttcaaacacccaaccacctcccttgtcaaggacaagaaacagaataccttgaatgtcccaacacacatcctcaaatcaaatgtggcgaacctctcgcttagttcactcccccctaccgactataacagcaggtgaacagggtcaatcacacaaatgtttgatcactggcaaagctaagccgagggatctgtggctccctcaggtttgtctgtctccatctgctcg

SEQ ID NO: 15198 - DNA, 425 bp, Zea mays
  Clone ID: LIB3150-094-P2-K1-F11
actcagaaaaaagactttaaaagactgtcacaaagacgaactggggcaaaattttatctactcttggtagcacttgactcaagttaacgctgcaaccacatgggagaagcacgtacccttcagttcacacaaactactcaaactgagacatgatgtggggcgtccgtgttcaccaaggcctacccaaatggatgaactcgacatgtccaccagttaccacagcaagcccacccaatactgacagaccgcggctcacagagattacaggatgctataagttccgccagacttttatgtacatttagaattcatggtcacacgagaatcctcgaggaagcttgtaatttgaagaacgtgaccttcacatcacatgtcatcattgctgaatttttctaaactctgacagtacaggatagatgttttcg

SEQ ID NO: 15199 - DNA, 276 bp, Zea mays
  Clone ID: LIB3150-094-P2-K1-F2
aaaaccaaaactttattatgaggcatatattattggtcataccacacatgataatgtgtgtcgtcttactgcattattacatatatagatagagagggatggatagaggagatttcccaaatatcatgaatcagtagtagggcggaatggcagcggagaccccacaggggttggtgcggtagctgggcaactggtactggtactggtagagtccacccatggccggcatgttctgcgccatcatcatggccatggggttgagaccctgggctgcca

SEQ ID NO: 15200 - DNA, 316 bp, Zea mays
  Clone ID: LIB3150-094-P2-K1-F6
actagcaaacataattaatataaatagttacgttgatgatcaaacaccaaaacacttgcaatgtcgctgcagttctgaagcgtagaacaatccacagaagaccagaacatgctcccaaatcatcctgctacaaaacttggtacagcaaggtaacaaacaaaagtttcacagtttgatgattttgacaaatgggacttgtcgctgcaccgcagcaccttacgccttgagcttaccaaagaacctctgcttctcatcggtagtctggaagcgaccatgcccaaatttggacgatgtgtcgatgaacttgagcttgatc

SEQ ID NO: 15201 - DNA, 395 bp, Zea mays
  Clone ID: LIB3150-094-P2-K1-F9
gcacaaagggaaatacatatttttaatactacaaagtgtaatgtccatgacaaacgccaaatgcacatctagaagactaggatggccttcacaagctacaaagataatgtaaaaaaaagtaacaccagcatgttttggtgacaatgcaatgtcagccagatgatgatcatgcccctgaaactccacctaataaagatgatagatgatgatcatgtcccagatactccaccaaatgaagatgatgatgccacatgagagagcgtgcattcagcagaagtatgcagatcataaataagatgtggtagtatgaaatccatgatggcatgctaaagttcaagatacatcccctcaggctgcaatcaatttgcaggagctccatttagaacgctcgcaag

SEQ ID NO: 15202 - DNA, 361 bp, Zea mays
  Clone ID: LIB3150-094-P2-K1-G11
aatcaccaccaaaagggtgcttgcaattctcttaatagttctcacatacagagtacaactcaaatacatggtgagcctgggaatgccttaaacatgtggcagatccccaagacattgacaatggctactacttggtagcacccaatcgcacggtataccatgcagactgttctaccatgcagactgttctggtaataagctcttaaaacatcaagaaaatttgtaccaacatgactgatgccctaaataaatagctttgaatcaccaccattcaacctaccaatggtacacaaattttgaagaaatcagttgcagagtcgactagtttccatagacagcgccatttgagttcaaagaggct

SEQ ID NO: 15203 - DNA, 455 bp, Zea mays
  unsure at all n locations
  Clone ID: LIB3150-094-P2-K1-G3
agtatgtgcgcgatatcgcagttgtctttctgaacaaatatagatctttacacacccacaaccaatatgaggcgatcatcgtgatggtaattacaaggaaaattgctactgtctgcaagcaataacatcaagattgatgaatgacaccgcccagctgcgcgaatcaatcaaacgatgcggacataggtgggcaagatgggcccggctgccaccagcccgtccccggcggcctcctgctccgtgaggaagaggtcgtcggtggtcctgagcgcggcgtgcgcgccgaccagcgcgcccccgaccatgacggatcccacgacgttccanncnactcttgtgaagagcaaggcgacgacggtgaccccgcaaagcgcggcgagcacggtcccgtcgtctaactccgttcccaggaccctgagcgggtggtttccccgcgcgaagtataaggaagaacc

SEQ ID NO: 15204 - DNA, 405 bp, Zea mays
  Clone ID: LIB3150-094-P2-K1-G8
aaagagaagcaccaggcttttgaattatgatgactacctagtgagtgtttcttaacttctgttgcactttcacaatttgctgagcaaaatgagcccgatgaatcaaggaatggatttagaattctgatacacaccgtcaggagataccacaaagacacagaatagacagtcatcttgcgctacttgagctgccattccgaccaagtgaacccttgccattgctgctggtacgcagtttgtgcttttcagccagctcaggatggtagtattcaagataccaccgcacaaacttcttgagccctgtttgcagatctgtggatggccggtaaccaagctcccgctgcgcaaggcttacattggcatgcgtgtatggcacatcttcattccttggcatcttaacaacct

SEQ ID NO: 15205 - DNA, 484 bp, Zea mays
  unsure at all n locations
  Clone ID: LIB3150-094-P2-K1-H2
cagatgacggatccaccgtaattcggcacaaaaaaggggtacataagcaccattattgatacgtccagaggtaaacattattagcaagctcaagctaaaagttgggggcaggcaaaacagtctctgctcctgcgcaaaagctactagcttacatagcacagttgagcaaaaaaaaagtatgttcgtcttcagcgtaacatcttaagcggacttcacggtggccgcgttgatgatgtcgatgaactcaggcttcaaagaagctccaccgacaagaaacccatcgacatcaggctgtgctgctagctctttgcagttcgcggcagttacagagcctccgtaaatgatcctagtagattcagcaacctcaaggctgacgttggtctttagccaatccctcagggaggcgtgcacttnctgagcctgagctggggtggcaactttaccagttccaatagcccaaactggttcataggcaacaactacg

SEQ ID NO: 15206 - DNA, 289 bp, Zea mays
  Clone ID: LIB3150-094-P2-K1-H5
gggggtgaactcgccacaaaccaaataatcagcaaaagggatttccatggcatctcagcaggcacaaccttaggtaaaagcttgagatggagaaactaaaagtttccaacagcgaacacaaagagtggctggggctggcctaggaggggaggaagaagagtgccatcacacgaaaaccatgacctcacagcattggtgcagtaacatttcactatttagagcctatgatcaggcttttgtctcctgagctacttcttcaaaagtctcttcaggaacaagctctggaaca

SEQ ID NO: 15207 - DNA, 132 bp, Zea mays
  Clone ID: LIB3150-095-P1-N1-A6
cccttctcctccgatcggacggaccaccgggccagcagcggggcggatcgcgtcagcagccatggtgaaggcctaccccacggtgaacgaggactacctcaaggcggtcgacatggccaaagcgtaagctcg

SEQ ID NO: 15208 - DNA, 326 bp, Zea mays
  Clone ID: LIB3150-095-P1-N1-A7
aacccttcctccaatctgcccttgccgccgccgcccgatccaggtctgtagactgctcactcctctccgctccggtccgaatggcccgcacgaagcagacggcgcgcaagtcgaccggcggcaaggcgccgcggaagcagctggccaccaaggcggcgcgcaagtcggtcccggccacggggggcgtgaagaagccgcaccgcttccgccccggcaccgtcgcgctccgcgagatccgcaagtaccagaagagcacggagctgctcatccgcaagctccccttccagcgcctggttcgcgagatcgcgcaggacttcaagacggac

SEQ ID NO: 15209 - DNA, 396 bp, Zea mays
  Clone ID: LIB3150-095-P1-N1-A8
ttctttccttgcccagttgcccccaaacccgagccaccagctaccaatggcggcggcccctatggaccatgacagcggagacgacgtggtcactccaggggagcttctcggaaactcattaaccctcgcggccggacgtggcgcctacgccgacggtcgctctgtgcgcgcgtcggtcaccgggcgccgccgcatcgtgccgtccgcacctggctccgacgaccagagatccacggtggaggtggtggggcacaaggcccatggagctgtgccgcagccgggaagcgtcgtcatcgcccgagtaacaaaggttatggctagaatggcctctgcggatatcatgtgtgttgactcaaaggctatcagagaaaagttcactggcatgataaggcagca

SEQ ID NO: 15210 - DNA, 396 bp, Zea mays
  Clone ID: LIB3150-095-P1-N1-B1
ctgttactgaggcgattgccaagaagctagctgagcttacaaccacgaagggtgtcactaccatcatcggcggcggcgactctgttgctgctgtcgagaaggctgggctggccgacaagatgagccacatttcgaccggcggcggtgcgagcttggaactcttggaaggcaagactctacctggtgtccttgccctcgatgacgcctagatccgctgctgctgctgctactcaggttctgccagctttgcgtgtcatcttgtttcggaccttggtgtagcactgcaaggctaaggtttactcctccgcacatggacttttggggataggcttgccaccgtgttttgctagatgagtcgtggaataagcttttacttcctcgctgctgtgggtgaag

SEQ ID NO: 15211 - DNA, 84 bp, Zea mays
  Clone ID: LIB3150-095-P1-N1-C3
tccctcgatctcaaacgatcaccaacaattaaagagctcttactaccacctaagaaagccctcccaccttcctccttctttact

SEQ ID NO: 15212 - DNA, 222 bp, Zea mays
  Clone ID: LIB3150-095-P1-N1-D5
tcctactcttttgcttttaacggtcattctatggcattttataaaaaaaataaagaaccccaccacacccctaattaaataaaaaaaaaataaaaaaaaaccaaaaaaacaactacaacaaaaaaaaaaataaacccaaaaaaatataattcccccccccctttaattcctttccttttctctttttttctccccacctttccccataattctcccttttaa

SEQ ID NO: 15213 - DNA, 267 bp, Zea mays
  unsure at all n locations
  Clone ID: LIB3150-095-P1-N1-E10
tcttcctgnttctaattacagagatctattgagaggagattttttcaaatctaggatggatcttcatttcctcaaccaacctatagttacatttcatttttttttttgctctcgttccctgtcttttctacctcatcttccttcctattccattcttcttcccatgctactctttatacccttcttctttcttcacctacccttttctctaatgatctctctattcgcacttttccatattctttattagctttaatcaccttctct

SEQ ID NO: 15214 - DNA, 349 bp, Zea mays
  unsure at all n locations
  Clone ID: LIB3150-095-P1-N1-E5
tcttctctgttcattcactaccttcccaacaanttgagaaggtttttttttcacaaaggcggccacctttatctccttctttatcacaacatcacttacttttctattatttcccacaacttatccaccctcattctcaataattatttctatctatcttttcaaatatacattatttttactaacaaactttccattctcctcatccaataataccatttaaatcttacttaattttaattattctcttctttttttttacatattactataattgatattcttttataccatttctattctttatttaaacttttcatattaacataaattattctattattaaaaa

SEQ ID NO: 15215 - DNA, 318 bp, Zea mays
  Clone ID: LIB3150-095-P1-N1-F10
ttctttttcgcaattacagagatctatagagagagatagagggcagatctgggctggagcgacagatccacaaccaaccgagagggacagtccagtatggtggtggcgctcgggcccggccggttctacggtagcggtctgccgaggccgcgcttcttcccgttcgaccgcgtggacccgccggcgttcgttaccgacccgctgttctagtgggctcgcgaagcgcactggtccatgggcggcatcagcgtgaagcgcctccgtctgcatggccgtatctagggttccgtttacatgcttcttctgtcttgcgcacct

SEQ ID NO: 15216 - DNA, 107 bp, Zea mays
  Clone ID: LIB3150-095-P1-N1-F5
tttttaatacccttctctctttttataaggaggggactcttattaattaaaagaaccctcatactatcccattcttatcctttatctctaaatatattatttactct

SEQ ID NO: 15217 - DNA, 156 bp, Zea mays
  Clone ID: LIB3150-095-P1-N1-F6
tttctgctattcttcatttcgtacattagggcgggcaaccttacagggtggggagggtcatcattctcttcaatctcactactatatcaacttccatcgcctctgtaatgcatattcccttcccacttctctaccctcataacttgtacaactctt

SEQ ID NO: 15218 - DNA, 248 bp, Zea mays
  Clone ID: LIB3150-095-P1-N1-G5
tttctcttttcttatcctcattttaacaccgagcggctcacattataaccaaaacggtactctacctaaacaataaattatttcaattaaataaacacaatactctcaacaatttcttccattcaaagacaacaactacttcttcataatccattccccaactcatctttgctactctaccctacactcaaatactcattcctacttttaaacaaaactaaatttaccatatattattaatatcatca

SEQ ID NO: 15219 - DNA, 340 bp, Zea mays
  Clone ID: LIB3150-095-P1-N1-H7
ttctctttcctctgctcacctgccgattctgcggtgcattattttccagcatagcgggctcacctacttctcaatttagaagacttcaatttctggatctgagcatcaaatcaagaccataccactttagtcagtcctgtctgatggcactggctgcagctccagccagtgttgattcacagagtggtcctcataggaactatcaggttgttgtggctgccactcgtgacatgtgcattggcaaggctggtgtcatgccatgtaagcttcttggtgatcttaaattcttcaaagaacttacactaactacaactgatcctgccaaaatgaatgcagttat

SEQ ID NO: 15220 - DNA, 379 bp, Zea mays
  Clone ID: LIB3150-095-P2-K1-A1
tgccgctccgctcgaaagtttttagtgaagattttttgaagccgagaagatggtgctgaagacggaactctgccgcttcagtggccagaagatctatcctgggaaaggcatccggtttattcgtgctgattctcaggttttcctttttgccaactcgaaatgcaagcgctacttccacaaccgcctgaagcctgcaaagcttacctggacagcaatgtacaggaagcagcacaagaaggacatccatgctgaagctgtcaagaagaggcgccgcgccaccaagaagccatactcgaggtccattgtgggtgcttccttggaagtgatccagaagaagagagctgagaagcctgaagtccgtgatgctgctagagaagct

SEQ ID NO: 15221 - DNA, 143 bp, Zea mays
  Clone ID: LIB3150-095-P2-K1-C1
ccggtccggattcccgggcggccgctcgcgatgtggcggcagacggcgacgttaggaagtccggagactccttcgggggcctcgggaagagttatcttttctgcttaacggcccgtcaaccctggaatcggttagccggaggt

SEQ ID NO: 15222 - DNA, 356 bp, Zea mays
  Clone ID: LIB3150-095-P2-K1-D12
ccacttcatgacaccaatttattattattcgatagcagtcaaaagtagccacaacgcacagtaagcaagcaacggtacagcaatacgcaactccgatgccgagaacatcaaccacgagtccttattgattggcgatgatgattaggttcaacaacacagcaaaccaacaatactcctaagcaatggcggttttcactccgtcacggtcaccagctcaaactcaattaaggacaggttgttgtcctccttgactgtccactcagctgagctttcagcagctttcacaattccccacttgtccactgcaagccgcatcgaacccttgaacatgtcgatctttgcgttcctcagttcaa

SEQ ID NO: 15223 - DNA, 368 bp, Zea mays
  Clone ID: LIB3150-095-P2-K1-D8
agcagaacatatgataagtacttccatgcataacgatgttcagcacgagataagcaggttcacacaaggcactgtaataccccatacacttaaaattcatgttgcacaaagcaaaataagataggctaaaccaaaacgtctggattcgcattccaactgtagattggacttaagcaacggcctcgaggaaagccttcccaggagcacgcttctcaagtcttccatggttaccgagcagttttgcgttgacaccattaggaacaattctaccctcactcttgtacttcaggttagttggcacggtttaactttgtgaagccccactttctggctttaataattttttggcgggcaaggtaacttgaact

SEQ ID NO: 15224 - DNA, 324 bp, Zea mays
  Clone ID: LIB3150-095-P2-K1-E5
gataaggtggcgaacggcgtcgtggcgcttaagctatcagaccgtacctgcaccggggtcctcgcatctcaccccctttcccgggatatccacatagagtctctttctttaacattccatggacacgaccttattgtggattctgatttggagctgaactacggaaggcgatacggtttgcttgggttgaatggctgtggaaaatctactcttctcacagcaataggctgcagagaacttcctatccctgaacacatggacatataccatctaagccatgagattgaagcttctgacatgtctgcactgcatgccattgttagt

SEQ ID NO: 15225 - DNA, 291 bp, Zea mays
  Clone ID: LIB3150-095-P2-K1-H11
agacagaaaggaacaatcttgcactgaagcgtactgcctgacaatacctctgtatgatcaaggacaggttcaccaaaaaccccaagtcaacaacagccaacaggataatgatgtcattaacttccttctcaactcttcgaatacatcaagagaacattcaggtactgcctaactctaacaaggattgaaccaccacagatttttaacaagagtcatcaacaagggccatgtataacatatctattcgatcaggtcatcatcgtcatcggggaggggctgcgcagcggcagc

SEQ ID NO: 15226 - DNA, 395 bp, Zea mays
  unsure at all n locations
  Clone ID: LIB3150-095-P2-K1-H2
ggaacaatacttttttcttttcatttcaatggntcattcaggtcattgctcacactgacactgccacccatggtgatgcgtgacacattattactcaatcatcgccgctaaatgactcaactagctagctagccagcggctatactacagcacatagtttcttcagtgggggacaccgccggcagcagcgtaggggcatggagtcggctgctgcaggccgcacatcgccgtcagttgctgcgctatctgcgccgccaacagccccgcgacctggccgctttgcggctgctgctgcaggatggactggaggaccaagccgaagatcgcctggtaccggtgctgcggctccacctgcctgagctgctggcaacactgctgccgcaacgactggcact

SEQ ID NO: 15227 - DNA, 371 bp, Zea mays
  unsure at all n locations
  Clone ID: LIB3150-096-P1-N1-A3
ctctttccgtttttgatcgccnagtntcannccgggcgtggggtcattctgagcggggcctgcgnaccgcaccccacgctggagcggctcagttcgttctggcttcccgagctccggcgactccagctgaaggccccagttatcgtggtggggtgcaagctggacctgagggacgaacaacatgttagccttgagcaggttatggcgcccatcatgcagtcctttcgcgagattgagacctgcattgagtgctccgctcttccccagatacaggtgcctgaggtggggtagctatcccaaaaagcagtacttcaccctactgccccccctttttgatcaagattacaatctctgaagcctcaatgtgtgag

SEQ ID NO: 15228 - DNA, 308 bp, Zea mays
  unsure at all n locations
  Clone ID: LIB3150-096-P1-N1-C8
atcctctaaaatcttcccactcnttctactaaccctaccnccnaccnccggccctgttattattttaaaaatgcgtctgccacacnacacaaantaancncaattaccttcccttcaaccattatctcttcaattccactattcatatataccttacttcctactctttcatnaaccacactttccccctctaatacctcaattctcttcanttcatctatctcatccttcaattcaccaccaatttctttcttacctctactacttccaccaccaacttttacctcacctattaattcattcccact

SEQ ID NO: 15229 - DNA, 402 bp, Zea mays
  unsure at all n locations
  Clone ID: LIB3150-096-P1-N1-D10
tttcttcctcccgcagcagccaaaacctacctagccggggtccattcaaaccggcgtgggctccaaaatncatatctttgttaagactctgactgtgaataccatcactttggatgttgagtcctcctacaccattgacaatgttaattccaagatccattacaaggattgcatcccccctgaccatcatcttctcatcttctccgtcaagcatctctaggactgtcgcaccctctccgactacaacattcagaagtagtccaccctccacctgttgctccgcctccccggtttctccaataaacttaataagaatacttacaccaagcccaagaatatcaagcacaatcacaaaaaggttaatctcttccttctgcatttctatattttggaccactccac

SEQ ID NO: 15230 - DNA, 159 bp, Zea mays
  Clone ID: LIB3150-096-P1-N1-E3
ttcgtttccaagaccatcctcaaccggaggacgcggaggtcccgcgggtgggggtgggccaccttctccacggaggaggcgatgcggaacgccatcgagggcatgaacggcaaggagctggacggtcgcaacatcaccgtcaacgaggcccagtcccgc

SEQ ID NO: 15231 - DNA, 277 bp, Zea mays
  unsure at all n locations
  Clone ID: LIB3150-096-P1-N1-E4
ntctgtaattttcgaccganctgnccnatctcgctccctgttccactccaaggggggtcggcttttcctccgccttctcgcgatggcgccgccgcgccgcgctctactcgtcctcgccgctctcctcctctccctctcccttggggccgcctccttccattccgacgagctcctcctcaacgatgacgaagagttcgagggcgtcgtcgcccgcccctccgccccctccccgccggcggccccggtggtctcctccttccgcctcatatcatcggac

SEQ ID NO: 15232 - DNA, 60 bp, Zea mays
  Clone ID: LIB3150-096-P1-N1-E5
tttcacctcactttttactttttccgccccgaaaattccccacgcgcatcgtttcatatt

SEQ ID NO: 15233 - DNA, 393 bp, Zea mays
  unsure at all n locations
  Clone ID: LIB3150-096-P1-N1-E7
tctgtttggnaatagaaaaaaacatagacagggtacaaaagcaaacatggctggatacctgcaagcatctaaaatagttgcattgtatgttgtagctcacatggtgttttctgcccaggcattctgggattattcagaaaaaaaattggtagcgaaaacaaaggcagaatgttctgtcacaagtgaatggtcccctgatggtcgtcattttatgactgctacaacagctccgaggctncaaatagacaattgtataaaaatatttgaccacaacggatctctgcagtttaagaagatgtttgaaaggctgtatcaagctgattggaaacctgaagcacctgaaaagatcactgacattgctgacccgacaacattcttgagtaccctaaaaga

SEQ ID NO: 15234 - DNA, 417 bp, Zea mays
  Clone ID: LIB3150-096-P1-N1-F10
ttttccgttcactctctctagtctcgcccttgccttctccacgcctcgggccgcactcgtgagactctacctagccctagcgccagcaccacccgcccaacctcccggagagagagagagagaggaggaggccttcgccgccgccgttgccgtcggccgagacgccaggatgttcgggtaccagaagggcctcgatgtcgaggcggggacatcgggcgccgccgccacgggcggcgcgcgccagctctacccggtgatgcaggagagccccgagctgcgctgggcgctcatccgcaagatctacgtcattctctccctccagctgctcctcaccgccgtcgtcgccgcagtcgtctgtcaaggtccgcgccatcccgtacttttttaccaccaccagctccggcctttgtctttaca

SEQ ID NO: 15235 - DNA, 411 bp, Zea mays
  Clone ID: LIB3150-096-P1-N1-F11
tatccaatctagaagcgcccctcgccctcgctctctctctcgtgggcgtcggaagctccgcaccccaatctaatcgacacctcgccgagatgggccgcaagttcttcgtcggtggcaactggaaatgcaatggaaccacagatcaggtcgagaagattgtcaaaaccctgaatgaaggacaggttcccccttcagatgttgtggaggtcgttgtcagccctccttatgtcttccttcctgtggtcaagagccagctgcgccaagagttccatgttgcggctcaaaactgctgggttaagaagggaggtgctttcaccggtgaagtcagtgctgagatgctcgtcaaccttggtgttccctgggtcattcttggacactctgaaaggagagctctgctgggagaatcaaatg

SEQ ID NO: 15236 - DNA, 222 bp, Zea mays
  unsure at all n locations
  Clone ID: LIB3150-096-P1-N1-G1
ttttctgtatttgtcttctcgaaaaacatttgtgttgggagattcaattgacggtaggagaaataaataccaacanangcttaaagtttaatgccccaataatattgatgatgtgcacatagatgcagctcaataaatacattctcattcatataagctaggacatggtccatcttttatttctgtttcaagaatagtagcaccttctattgattattgctc

SEQ ID NO: 15237 - DNA, 371 bp, Zea mays
  unsure at all n locations
  Clone ID: LIB3150-096-P1-N1-G8
tcttcttaccgctccaggctccacctctctgccatgtgacaccaacactcaggggagggttcctccaaactannnaacnactgatagctatccacctcgtctcaagcaccctctggcgtccccctccccccgccgcgtgcctgctagccgctgagatccggggttctgacctcgcctccttctgctgtatttgctggttttcagagttgatgctaaacatgcttatttaactaaactagaaatttgttaccgagactttttaaccaggcagcatcatagttcaatttgaaaacatgtcatccaagaagatatattttgatcacaaagacatggtccatgattctgccatcgactactatggcaagcccctt

SEQ ID NO: 15238 - DNA, 220 bp, Zea mays
  unsure at all n locations
  Clone ID: LIB3150-096-P1-N1-H12
tctttcgacctgatccaatatacgncgatccagtttccatggggggtgtggaagagagataacnaatatgatgtcaagtgtccaggccgctgtctatggtagcaaggactgctagcttaccccaggactgttccttgagtttttgtactacaaggtcactgttcacaatcatctgtgaatttttgctcttgaggatccaaatcacgatgcctatttttcc

SEQ ID NO: 15239 - DNA, 106 bp, Zea mays
  Clone ID: LIB3150-096-P1-N1-H2
aaccatttttggttccaattaaaccgaacctttgtgaatatgaaaggggggtgggcctccactttgatggccatccttatgaaggcctctccggtttccagatata

SEQ ID NO: 15240 - DNA, 81 bp, Zea mays
  Clone ID: LIB3150-097-P1-N1-A4
ttattttattggaaaaaaaaaataaaaaaaggggggtattaaaaaaaaaaagggtaggggctaacaccccgttattttctt

SEQ ID NO: 15241 - DNA, 139 bp, Zea mays
  Clone ID: LIB3150-097-P1-N1-B5
attctgttcttttttacatatcaagaacattccagacagcgataaagaatgcgcgggtgtggatatacacctcaaggcactctatttacatactgatgtatgtttactctaccaaggaactagagaggtcatatctcat

SEQ ID NO: 15242 - DNA, 399 bp, Zea mays
  Clone ID: LIB3150-097-P1-N1-B9
ctactttagctaatctcagatcccccccgccctagacgcaggcccatgccaggagtgggtgggttcttttatcgatattatccatatggcgagggaggagaatgtctacatggccaagctggctgagcaggccgaaaggtatgaagagatggttgagtatattgagaacgtggctaagactgtatatgttgaagagcttacttgtgaggagcgtaactctattgtcaggcgcatacaaatattttattggagctagctttgttttatgttgcattgtcatttctatttgaactaatgaggattcccttttagaactaatagcctgttaaccctatcaagggatacccgtccgaatattcaggcttaactttgctcttttttgtaatggcatatccttaa

SEQ ID NO: 15243 - DNA, 238 bp, Zea mays
  Clone ID: LIB3150-097-P1-N1-C7
tttcatcctgtaccgccccgacatggagatgctattccgcgcaggctgctaggtggcccgtcgaccgatactatcgacatctagggttatgacaatgaggtacgatggccaagtagctcgtcgggcacgtaaggttgaagccgcaaggacgctatcctcggagggaccgatgaaatcatagtcgagaaaaagcacgataaagtgaacgttgacatgaaatcctaccggaacaacaacg

SEQ ID NO: 15244 - DNA, 236 bp, Zea mays
  Clone ID: LIB3150-097-P1-N1-C8
tagctcacgcgatcgcccacccatccgtatcccggtagactaggtgaggcgaggacaggttgcccaccagcttctggtattggtgcccttcaaattccattatcaccaaatcatggggcgcgctatcccaactcccagctactagcaccccaagatctaccgactgaagaaaccacccaccaacaaaggccatcccaagagcaagttcggatgctttctgaggccaccataggagg

SEQ ID NO: 15245 - DNA, 53 bp, Zea mays
  Clone ID: LIB3150-097-P1-N1-D5
tctctctagttttttttcgcgccacgaattcacgacgctggcttgaaatccaa

SEQ ID NO: 15246 - DNA, 167 bp, Zea mays
  Clone ID: LIB3150-097-P1-N1-G10
aatattattatagtgacattcaaatgggatgggtacacataacaagggggggggcgcatacacttaatctattccctctatatgaattttacacacacattacatctacatcacactatactatatcttcagacacctattaccatataataaattactcacatcca

SEQ ID NO: 15247 - DNA, 237 bp, Zea mays
  Clone ID: LIB3150-097-P1-N1-H10
ctattttctattctcagcttgccctccactagggggctgttgcatacctgggtggcctgtgtaaagacaccaacctgttcgccatccatgctaagcgtgtgtccattattccaaaggacattcagctggcaaggttgatctcttctcttgagggccctaatcgccacctcattcatttttactaaaacattaagtcctgcttttattgttaatctgttgccattgtaaggacatatt

SEQ ID NO: 15248 - DNA, 396 bp, Zea mays
  Clone ID: LIB3150-097-P1-N1-H7
acacaatagaccactgatttcacaatggggagttatacaatgccgggagggctagaactgttgcttgcaacacaattctttacgacttgtgctaaccatcttcttgctagtcgcaatgaatgtaacctattttgcacccagtgtgagaccaaaccagctgctttctgtaactattgtcgatcaagtgatcattccacccaccgtgtaatccagataaggcgttcatcgtaccatgacgttgtgagggtgttcgagattgaggatatccttgatgtcagcgatgtgcaaacttatgtaatcaatagtgcaaggattgtattcctgaatgagcggtcacaactgcgtgcttctagtgttcccatttgtaaggcacccacatcatcaacacatagctgt

SEQ ID NO: 15249 - DNA, 391 bp, Zea mays
  Clone ID: LIB3150-098-P1-N1-E12
ttctgttgagaagccgccgccgcagcaatcacaggagcccttagaaagcccaggggcgacaagatgcagatcttcgtgaagacgctgacagggaagaccatcaccctcgaggtcgagagcagcgacaccatcgacaatgtcaaggccaagatccaggacaaggaagggatcccgccggaccagcagcggctgatctttgccgggaagcagctggaggatggccgcacccttgcggactataacatccaaaaggagtctacgcttcacctcgtgcttaggctccgcggtggcatcattgagccctcgctgcaggcgctcgctcgcaagtacaaccaggacaagatgatctgccgcaaatgctatgcacgactgcaccctatggctgtcaact

SEQ ID NO: 15250 - DNA, 222 bp, Zea mays
  Clone ID: LIB3150-098-P1-N1-E5
ctaggaggcgctgcacctgagggggggcatgtcaggcctggggagggagcacgtcaaggtgtgttcttatcataacatcctggtgatcaagggcgagggctagaaggatgatagcgaggactaggccgtcctgtctcctagatacagcgttctcatctagctcgcgccagaggtttacaggatggacaagatcaaggcgtatattaagaacggtgttcttca

SEQ ID NO: 15251 - DNA, 337 bp, Zea mays
  Clone ID: LIB3150-098-P1-N1-E9
ctcctggcggccgtcttcaactgggggcctcttctaggaggggggggaaggtttctttaatctgataatatcgtgctgaatacagaactctgccgcttcagcggccataatatttatcctgggaaaggcattctatttatccgtgctgattctcacgtttttctttttgccaactcaaaatgcaatcgctacttccacaaccgtctgaagcctgcaaagcttaccttgacagcaatgtacatgaagcaccacatgaaggattttcatgctgaggctttcaataatagcccccgcgccaccaataatccattctctatgtccattgttgttgcttccc

SEQ ID NO: 15252 - DNA, 335 bp, Zea mays
  unsure at all n locations
  Clone ID: LIB3150-098-P1-N1-G4
ttttggactcaaggtatgtgctgtcaaagggtggtggatttggtgaaaataggaggcacaatctagatgacatggctgtgatgactggaggagaggttattagcgaggaacgcggtcttgatcttggcaaagttcaattacaaatgcttggcactgctaaaaaggtaactgtatccctngangatactatcatcctagatggtggaggtgacaaacagcagatagatgagaggtgccaacagcttagagaatcaattgacacaagcactgcttnagtcgacaaagaaaaggcccaagagcgtttatcttaagttatctggaggtgttggttgtac

SEQ ID NO: 15253 - DNA, 86 bp, Zea mays
  Clone ID: LIB3150-098-P1-N1-H9
aactcccggactcgaggagatcggggcgattattaaagggcgcgcggggctactactcctggtctcgacactactcgttcattatt

SEQ ID NO: 15254 - DNA, 373 bp, Zea mays
  Clone ID: LIB3150-099-P1-N1-A11
tttctttaaggacgacgcccagtccgcccacgcgggcatcttttctcccgggggcaggctgaatatctattccagtctaaatggagtcctaccgattgcagctgacaagtcacagaaggcttcatcaactaacgttagtactgactctagtggatctagagctggcctgtttagaacacccatatcatgtggtgtgcatagtgcaactttcgcccacggtctacccccgccggctttggctgttcgcaatttgatggaacaggcgcggtttgcccacctgtgctctgtcatgtctggcatgcaccaccgccgtactggatatccgtttggttcacttgtcgactttgctaactattcaatgtgccacccaatt

SEQ ID NO: 15255 - DNA, 517 bp, Zea mays
  unsure at all n locations
  Clone ID: LIB3150-099-P1-N1-A6
ccgtccgtctcgtctcgtctgcnncttctnngcgcctcnncattgtcggcggcgtctgtcnnccttagcataggtgtgcagtgcgtcgcnnctccaacncnnatgggtataaggagatnnagtcccaccatcatacattntngtggttattggggcccatgtcngtnactctggcaatggtcgacccaccacatggtacatccttatctaccatagcttgtgagtgcattgacaatgcgtgtgtatccgagaaggtttgagataggagagctgctgataatgtacaatgcggtctcttcaatgtaccgcctgggtgcttcgacaaggctcaagagctgagcgttgagagaggttatcaccattgatatttgctctgtggaagttttgagaccaccaagtactactgcacggtcattgatgcccctggacaccctgacttcatcaagaacatgatcactggtaccttccaagctggctgtgctgtccttatcattgactccaccactggtgggtttga

SEQ ID NO: 15256 - DNA, 438 bp, Zea mays
  Clone ID: LIB3150-099-P1-N1-A7
tttttctttcacccggttctccctctctccagatctggcgcttctttatccggccaggggccccttcacatctcgttaaattgctgatcatgaagccccagttgcagttgaggcaccaaccccagttctttgtgagccaatggacttgatgactgctctgcagctggtgatgaagaagtcaagtgctcatgatggacttgtgaagggtcttctctaggcttccatagccattgagaagcatgctgctcatctttgcgttcttgctgaggactgttaccagccagattatgtcaagctgttgaatgccctctttgctgaacacaatgttcaacctgttactgttcctgctgcttagactcttggcgaagtggcttggctttcaagattgacttcttgggcatagcaaggtaaggtgtaagctgctcctttttcgtttca

SEQ ID NO: 15257 - DNA, 211 bp, Zea mays
  Clone ID: LIB3150-099-P1-N1-A8
ttattatactaccaaccatctcgtggtgcggctattctattcgggtgggggggcccaccctcagacctcgataccaataggtgcgtggccacccttcgtgacctacctctgatcatgatgtaaaggctgacgcgctccctgctgtacattccggttctcgatgcttactttatttctgcctggacctccatcctcacctctgttcctacca

SEQ ID NO: 15258 - DNA, 377 bp, Zea mays
  unsure at all n locations
  Clone ID: LIB3150-099-P1-N1-A9
tcttctctttctctctctgctcctccgcctccggctggtccattcaagacagggagggccatgtcttactcttaggagcaccacttcgaatcgaaggccgactctggtgcgtccaagacctacccgcagcaggctgtcaccgttcgtaagaacggcttcatcgtcatcaagaaccgtccctgcaaggttgtagaggnttctacctacaagactggtaagcatggccacgccaaatgccactttgtcgccatagacatattcaatgggaaaatgcttgaagattttgttccttcatcacacaactgtgacatttcccatgtgaaccgtactgaatatcagctgattgatattatctgaggatggattttttagccttc

SEQ ID NO: 15259 - DNA, 367 bp, Zea mays
  Clone ID: LIB3150-099-P1-N1-E12
tcttcttttctagtccgattcaaaccctcccggtggggtttttctagccacgcggggggagctcaatccccagaggccagagccagctgctcggcgctccacgcgatggcgcataaggagaccaatggcagtaacggcgagcacatcttcacccgcccgccgccgaccccgtcgcccctccgcttctccaagttcttccaggctaacctgcggatcctggtcactggtggggcgggcttcatcggctcgcacctcgtggacaggctcatggagaacgagaagcacgaggtcattgttgctgataactttttcaccggttcaaaagataacctgatgaagtggttcggtcacccaaaatttgagctca

SEQ ID NO: 15260 - DNA, 359 bp, Zea mays
  Clone ID: LIB3150-099-P1-N1-F11
tcttctgtctcacgcgtccgaaaccaccccctgagcggcgctcttttttgtcagggacagcagagaccacccccttccggcacactgtctctaccacctgactccatcaccgtgcctgtctgtgttctaggtacaataagagcatagagatccagtatctatcataagctggtagaataggatgagcaccacatctgcttcttctttgaaccccaacgcgccgctctttattccggcggcttatcctcaggtgagaggactactaccccgatttgttttagctcgtcaacaccaccgccttttctcttgacctctttttcatctgctccagctccacaaggccttctgctaatactttt

SEQ ID NO: 15261 - DNA, 262 bp, Zea mays
  Clone ID: LIB3150-099-P1-N1-F12
tcttccttctcttcacctcaacccaggaacagagcgaggcgtctccttggcacgtgtggtcgtctaatggtaatggctaccgttccaggggatctgatctggcaggttgtgaggaagaacaactcctttcttgtgaagcattttgtcaacggcaatgccaaggtgcatttcaccaaggatccgaacatcctttacatcatccactccttcaaacactcgtgttttgcgaacaagaagactttgactatccagtcagctgcaa

SEQ ID NO: 15262 - DNA, 364 bp, Zea mays
  Clone ID: LIB3150-099-P1-N1-H4
tctattctctccctcgccatcatcgtctgcggcggcgtcgctccccctcggtcccctccccacctcccgttctctccctccttggatagggttagagactgagctcccccgcacgcgcgcgagccatggtctccttcacctgttcccaggtcggcgcgacggcagcgggcggagcctcgcccttcctcggctaccggtggcggagcggccccgggggagccaccccgtcgagctccctcttcgttggccggcggctggcagcggtgcagatgcgcgcgccatctcgcggggcccgcggtggctccgcgctgcgggtcacgtgcgagaaggtgggggggattcacctgggcaccaccaacctcgc

SEQ ID NO: 15263 - DNA, 365 bp, Zea mays
  Clone ID: LIB3150-099-P1-N1-H8
tcgttttgcctctgataattcacaacaggagccgttttatccaaacagggccgccactcccttctcttcttaaacttatcccatcttccgttggataccatccaacccttgccactgatcttggacgactgcaattccttttcactacatcaaatatactttcttttacctttctccagcctatattatatccttctgatcactttacacatccttctcacactacctaccttagcccaacttgatactacaactttatctatccccttccaactcctaaacttgttatatatccagatgttcatccacctcattccacataaactaattctttccccccacatacctccttattatcatttaca

SEQ ID NO: 15264 - DNA, 372 bp, Zea mays
  Clone ID: LIB3150-100-P1-N1-A11
cgtttcttttctccaacacctcgtcgcttcttttctggcaactctaagatgtggggggcggcggccgccctagcttcatcgaggcaccaagactccgatttctgtttttgataaagaaaccaaacaacaacctagcagtcttccttcacttctctgcttccgacctcgtagcgaatcatatcggtgggctagggttccggtgcgcctctacaactggactcgaggctaggctgggcatggagggaatcttcacggcctgaaagatgtccctgccggagactactaacggtgtttcattctccgtaaagtcctacaaaatggtggacgcctttctggccggttgcataatcgacaagggtggtgtcaacacta

SEQ ID NO: 15265 - DNA, 225 bp, Zea mays
  Clone ID: LIB3150-100-P1-N1-A7
caaaaaccatcccggattatctggtaaacatggcagaactttggaacctcatcttatccctctcctttttatcatctatgtttgccataggctctcatgctgatggagactgcgagaatgacctccaaagcctgataattgactgctagacatacatgatgttcccagctaatccaaaggttcctccttcagatgcttgctgtggtgtcattaataaagcaaact

SEQ ID NO: 15266 - DNA, 234 bp, Zea mays
  Clone ID: LIB3150-100-P1-N1-B6
ttctaatgtctgccagacataaccacacggggatcacgggaattttttcagggttgagcgggataaaactacttatgtaaagcatgatcttggcattaaatgcctgtcaatgaaagttactgtccatcgcttcaaggtaaacaaaactttgtctgttgataaatgttgatgataattcactccattccgttctatatttacaaatcgaacagaatgtccaagatgaaaaacata

SEQ ID NO: 15267 - DNA, 186 bp, Zea mays
  Clone ID: LIB3150-100-P1-N1-C3
tcttaaaaatttactaaccaaaaaaaaacatagcctaactggaaaaatataccggatttacggatattaaaaaaatattaaaaaaattactttatcatgatcataaaatatatactgtttaaaatttgttatttctctaacaatatcacacaatattacttcccataatcattcattaaaattcct

SEQ ID NO: 15268 - DNA, 224 bp, Zea mays
  Clone ID: LIB3150-100-P1-N1-E12
tattcgtctgttcctgcagctcatgccacggggacccgtggatctagcacaggtggctggtcctacctaacttactgttagaccatctgtatgtcttcaacacagcgacagatccaagtgcaccatccttgcataaggtgtctaaatctgaggacattacttaaattactgttctagccttttcttacacgaattatttccattacctttacaacataatgatt

SEQ ID NO: 15269 - DNA, 407 bp, Zea mays
  unsure at all n locations
  Clone ID: LIB3150-100-P1-N1-E4
tttttcttctttcgcgccgccaccnccnccggcgctaggccccgcacctggcggcattgggtgtcgccaagatgacgaagcgcactaagaaggcaggaattgttggcaaatatggaaccaggtatggtgctagcttgcgtaagcaaatcaagaagatggaggtatctcagcattccaagtacttttgcgagttctgtgggaagtttgctgtgaagaggaaagcagttggaatttgggggtgcaaggactgtgggaaggtgaaggctggtggtgcttacaccatgaacactgctagtgcggtcaccgtcaggagcacgatccgccgcctgagggaacagaccgaaacatgatatagcctctttatattaattggggttttctggagttgcttttgtcaggcatgtttt

SEQ ID NO: 15270 - DNA, 405 bp, Zea mays
  unsure at all n locations
  Clone ID: LIB3150-100-P1-N1-F11
tttgcgttttggcagagattgctntcaaaggggaacttgcggatgcagattgggagaggaatgatcttaacttggatctaattaaagtataaggcatggttggtgggaagctggaggacactgaacttgtatatggaattattgttgacaaagatatgagccatccacaaatgccaaagagaattgaggatgctaagattgccatcttgacatgcccatttgagcctccgaagccaaagacaaagcatatggttgacattgacactgtcgagaaattccagacactgcgtgagcaagatcattaatactttgatgaaatggttcataagtgcaaggatgctggtgcaaccctggttatttgccagtggggtttttgatgatgaagccaattatttattgatgcac

SEQ ID NO: 15271 - DNA, 235 bp, Zea mays
  Clone ID: LIB3150-100-P1-N1-F4
ttcttcacttttacgcccacacttaccctgggatcggggacttctgacggggctccgagaccatcatacatgccatccaaactcgaaccgtcacagactgtagaggtcttccgtcctactgaccagctgacaggtcagaacatcctcttcaatgtcccccaagatccctccgccttgtcttttctcaaaaatgatcttaaagaacattatcaagtacacatgcatggactgaaca

SEQ ID NO: 15272 - DNA, 241 bp, Zea mays
  Clone ID: LIB3150-100-P1-N1-G2
tttagattttctagtcccttatctaaatccgcaatggggaacttttaggtgttgcgccttacaaactaaattttctatctaaatgtttagtccaatgctgtttgttcaatcaatcttaccaaaaatgattttattatattctctatttctatttcttaaagactactatctttcatattttactattttcattcttccactgttattcttttattttttaaaatttttataatgtatttct

SEQ ID NO: 15273 - DNA, 362 bp, Zea mays
  unsure at all n locations
  Clone ID: LIB3150-100-P1-N1-H3
ttttggtctttagaccattagctttatctacgccanagggcaaaataacccgggcgacacgatnagggtgttgctcgttgccctcgctctcctggctctcgctgcgagcgccacctccacgcatacaagcggcggctgcggctgccagccaccgccgccggttcatctaccgccgccggtgcatctgccacctccggttcacctgccacctccggtgcatctcccaccgccggtccacctgccgccgccggtccacctgccaccgccggtccatgtgccgtcgccggttcatcttcctgcgccaccattccactaccctactcaaccgccccggccttagtcttattcccagccacacccat

SEQ ID NO: 15274 - DNA, 232 bp, Zea mays
  unsure at all n locations
  Clone ID: LIB3150-100-P1-N1-H5
ttcttgcttattgtagangaagaaaannacaaagaancttgtgactcttcatatgaagtctgacacactccaggaatcattaatgagatccatcagataattgatgatgactctgctgaagtcaattcatcatcagaagatttctttattttagtagctgctttaaaggagtttattttcaatgagggtaatggtgagctacctctggagggaacaataccttatatgactt

SEQ ID NO: 15275 - DNA, 360 bp, Zea mays
  unsure at all n locations
  Clone ID: LIB3150-100-P1-N1-H9
ttttaacagctnacacagcttgggccnccagggccgtatcgagagagacagagacagtctaacaagggaatggagaggatgctggccaggctgatgcggcggcggagctccgtccccctgtccggcctcctccaccactgaggagcgcccgccccgctgcaggccgtcggcgccactggggcctccccgctgatcttgtcgcaccagcagcagcagcagcacacggtcgtctccgccgtcctgccggggctcaagatcagggactccgcgttccagctgatcggtaggaccccgatggtgtacctgaacaaggtgaccgaagggtgctgcgccccgttggcttccaaactcgagtttctg

SEQ ID NO: 15276 - DNA, 323 bp, Zea mays
  Clone ID: LIB3150-100-P2-K1-A1
aacaacatctcaacaagcagactttgagatctacactacaacatccagcaaaatgacgtttagctttggaaaactaggtcattttaatgttcattttttttgcagaaatcagtttatttgagacgtttattttgcatagagttgtcatgtcttctttgatgagtaatataaaaatctgacagcaaattccgagcctatattatatatacaaaactctagcacaaaattaagaactgggatactctttttttggctttcaagtgagttaaacataatttaagcacttaccaatcaagacaatagttttatgcagaatatacata

SEQ ID NO: 15277 - DNA, 322 bp, Zea mays
  unsure at all n locations
  Clone ID: LIB3150-100-P2-K1-A11
anaaaaaaaaaaaaaacaaaaaatattttttttttataaaaaaaaaaaaaaaaaaaaaaaaggtgggaaaaaaaaaaaaaaaaagagggggggtnaaaaaaataaataaaaaatantaaatataaataataaaaaaaatataataaaaataaataaataaaaatataattaataataaaaaaaaaaaaaaaaaaaaataaaaaaatataattaataaaataataaaaaataaaatataaaaaaaaaattaaaaataaaattattaaaaaaaatataaaaaaaaaaaataaaaaaaaaaataaaataaaataaaaataaatat

SEQ ID NO: 15278 - DNA, 323 bp, Zea mays
  Clone ID: LIB3150-100-P2-K1-B11
gggatagaaccgagggctttccattgataatagcagtgaaaatattacaccaaatgggctagaaactggaacacctcgaaacgaagatacagaacaaactacagtagaccggccaactagacacacaaccgaccacggccgtcacatcaaagcatcagaaggggaggcggcctagccgccgaagccgtagagcgtgcggccctggcgcttgagcgcgtagacgacatccatggcggtgacggtcttgcggcgggcgtgctcggtgtaggtgacggcgtcgcggatgacgttctctaggaagaacttgagcacgccgcgggttt

SEQ ID NO: 15279 - DNA, 305 bp, Zea mays
  Clone ID: LIB3150-100-P2-K1-C2
actaaaataagatgatggctccttgttatgaaagcttcgaatactgatctgaaatccaatacatgagattgctaaccggcacaccctctcagtggcagcccaagatgaaggcaactcataattacatgatgattcagtactcaaaatataacttgttttgcaccttctgaatcagatagcataacacaaatatccaatgtcccctttcgctggaactcaggcttcaaccataggctcaggacctgatgaatctggtggagcacttgtgcttgccttttcaactctgttcacccgtcaagcaaggc

SEQ ID NO: 15280 - DNA, 400 bp, Zea mays
  Clone ID: LIB3150-100-P2-K1-C4
gagcaaatgacaactgcatgacaaaatggattggcttgcaaatgacacaactgcatgacaaaatagccttctcatctcacaacatgctacagccaatccgggtaggttcacatccaggaattacaaaacttcacttactgctgagtgcggaacaaaacctaacacgaccataattatgacattgcaactagacgaccacccagagttcaggacagtaatacagaaatataaatgactgtttacttcttcttggcgtcaccagccttggtcttcttgacaccacggatcttcttggccctgttcttccgctctttcatttgcttgcgggacttctcaaccttagtagcaagaccattcctgatgaggcggtatttgggctcgaacttcttggcagactcga

SEQ ID NO: 15281 - DNA, 352 bp, Zea mays
  Clone ID: LIB3150-100-P2-K1-C8
gggagccgctgcaagagtagcttagagaatgaattcacccaggccacagggaaggatagtcgtcttacatgtcatgtgtccctgaacccaaactgaatgagaaaggatgttattctatagcggttggtacagacaatgtctatgcagtgatatttcttcattttgttccttcgtatctttacttgaagcccatagcttggctgaatacactatcacattgaaacctaggggacagatgaccaaaaagcaagccaagaactatggacggagctgctggagggctgtaccacctaaaggtacaatgttatcagctctgaagtatttgcagcgcctcctacttgtgtggctttga

SEQ ID NO: 15282 - DNA, 422 bp, Zea mays
  unsure at all n locations
  Clone ID: LIB3150-100-P2-K1-C9
gcagaaacaaataccgaaaagaagaattaccgtatcacttaaggtttgccagtagccgcgataacatggaaccgaccgactatcacgaggtccaaaaaaaataaccaccacaaaagtaccagcccaccacaaataaagtttaagcggacacaccgcaccgaccgacgacgataactcgcggcagcgactgggccagccagcaactgcagcacgctcaagactgacaacaaaccgcttagtccacctcctcgatcttggggccagggccgccgctgccagcgggggcgtnctcgtccatgccgccagcgccgcccatgtcttcacccgcgccctggtacatcttggcgatgatggggttgcagaagctctccagctccttcatcttgtcctcgaactcgtccgcctcggcgagctggttggcg

SEQ ID NO: 15283 - DNA, 383 bp, Zea mays
  Clone ID: LIB3150-100-P2-K1-D1
ggatctagaatagcgcagttcaattatgcagttccaaagggtacacaaggatgattcaggtaaatgactactctgtgcacatacgcaggagatgatgatatacaaacgatgcactggagctagaataccaaaacgagatggtaaaatggcaatagctttaaaagatcaacagcattcagtacgacaagcatccaggtgcattgaaagtcaaaacactaggcagatgaagacttgacagtggcagacttgatgatgtccacgaattcaggcttcaatgaggctccaccaacaaggaatccatcaacatctggttgagctgcaagttctttgcagttagctccatttacagaccctccataaattatccttgtcaattcagcaac

SEQ ID NO: 15284 - DNA, 436 bp, Zea mays
  Clone ID: LIB3150-100-P2-K1-D11
aaattcaaacatctccagtttcagtaattgaaaagacgagtcattacaccttattcatttggatcaggcacaataattcagcattccaaattgcttcatcagattcagactaaaacaataccgatacaaactgaatagaaactcccctcctcgcagccccggtcgaggaatcgacgtattctgcagccctggacgccgcttacaggaacttcctgtatggccgacctgcatcctcgtcctgcatatggaattcgcggacgatgcccttgtagacgaggatggggacagcgaggccgaagaggccgacgacggcgaggctgcggcgggtccagcggaagttgaactcgaggttctcccggccggcgttccactcttcgatccaccggtttttgtgcaccttcatgccgccacccatcttctccttccctccttcgat

SEQ ID NO: 15285 - DNA, 260 bp, Zea mays
  Clone ID: LIB3150-100-P2-K1-D12
aaaatatattttattacaccttattcatttggatcgggcgcaataattcatcattccaaattgcttcatcaaattcatactaaaacaatacccatacaaactgaatagaaactcccctcctcacaacccctgacgaggaatccacatattctgcatccctggacgcctcttacaggaacttcctgtattaccgacctgcatcctcgtccttcatatggaattcacgtacaatccccttgtacaccaatatggcgacaccc

SEQ ID NO: 15286 - DNA, 394 bp, Zea mays
  Clone ID: LIB3150-100-P2-K1-D2
aagaaaaaaagtagcataaaggcttcaatctatcatcctcatcaacccctcaaagggcaaccaggtttatttcaagctggtaatggccgacgcaggtacactgaagaatgttataatcccagggggaatagattctatgtaattgtgcgttattgctgacatggtctcgacgctatgaaccgctcgagcagcgcacagcctcgggttcaagaaagtactagattctgagatctaaaccggggcactggaccggagtgagcttcttgcaatctctaatgcatcttcaacagaagtcgcggcctggagcttggacttgtcaacgacaggctgagatttggcgagctgcggaagaagcgagaattcctctgaggttccactctcgaggaaaacaccc

SEQ ID NO: 15287 - DNA, 400 bp, Zea mays
  Clone ID: LIB3150-100-P2-K1-D4
ggtctaaactttgatgtctgactgtacttaactgagctgaaacttctctatacacccagatatatgatatatccgggggcctacaatacaatcccctcctctgctgtccctctcaaactcttctttattcacagccaattttaaccaccaatcccaagcctaaaacgctccgaagagacccagcagaccaccccgtcacattcaattcaatccctttcagcaccaacgaccgacaccgacagaccatgatttcacaaaattctgtggagattaccacgcgctctcgaggcatgcagccatcaaccaacagtatttgctaagcatgacaatgaccacgtacactggtgaatctggcaagtggttgccatggccggaggggcaagagcagaaccaactattc

SEQ ID NO: 15288 - DNA, 200 bp, Zea mays
  unsure at all n locations
  Clone ID: LIB3150-100-P2-K1-D5
atattaaaatataatttttttttnnnnntnaggaaagccataccacgcactttattgattatcaaacgtggtacatcatttaccaatctgaaaaataacaccagagggttcattgaccccaaatacagtttcctttcaagagaaagctactcttttagttcatgtgccacctgtgcgtttgtaaattggacacaaaattt

SEQ ID NO: 15289 - DNA, 442 bp, Zea mays
  Clone ID: LIB3150-100-P2-K1-E11
aatatacgaatataaagataaccatcatccacataggaagcatgtttttttcatgtccgaatataaaagctctaacaagcaaacaacactcagcaacctactcgcaggcaggagttccaaaacaacgggatcgcaaagagaagcaactcagtacttgtagtccttgacgtgaaggctctcggtgtcggcggcagcatcacccttgtaggtgccgagggtagcctcggagttggccttgcacctggcgaggaaggccgctctagccttctccacgttctccaccttgccagcccaggccttgagggtgctcgcctggagggcacggccgaaggagaaggacagggcccatggcttcttggtgctgagcttgttcatggcattgagattcaaggtggcctcctcctcgctctgtccaccggagaggaagacaacagcaggcaca

SEQ ID NO: 15290 - DNA, 445 bp, Zea mays
  Clone ID: LIB3150-100-P2-K1-E12
attcataagaagttactagcaaaatcgagttgatggtacaaagacgaaaatttgtaaggcgattgatgcctaacaagtaacagtgaacaatattgcaacaatgcctaatcaaaggctgggctgattggcctaattctctaacctcaagtaggtacaatctccggagaaggcggcaggaagcgaacgaggatggtcccgatggctatgcatagcagtataaactggaccgagcagaacaaggaggctctgctagctctggcctgcagcttcagaacttctgaaatctcagacagctccttgcattgcgagtctagtttatccaccatatcctccagcatcatcgccctgttctcggcatgccgcaatttggtttctaaggatttgtgatccgtcagaagggatttctgtgcctcgttaagagcaaattgattcttggccaggagtt

SEQ ID NO: 15291 - DNA, 438 bp, Zea mays
  Clone ID: LIB3150-100-P2-K1-E2
ggcgcaaatgcagcacgatcaaagctgatatggatcagaggtgagcaaatgacaactgcatgacaaaatggattggcttgcaaatgacacaactgcatgacaaaatagccttctcatctcacaacatgctacagccaatccgggtaggttcacatccaggaattacaaaacttcacttactgttgagtgcggaacaaaacctaacacgaccttaattttgacattgcaactggccgcccccccaaggttcaggccagtattcagaaatataaatgactgtttacttcttcttggcgtcaccagccttgggcttcttgacaccacagatcttcttggccctgttcttccgctctttcatttgcttgcgggacttcttaaccttagtagcaagaccattcctgatgaggcggtatttgggctcgaacttttttgcagact

SEQ ID NO: 15292 - DNA, 404 bp, Zea mays
  Clone ID: LIB3150-100-P2-K1-E6
gcacccgcctccaccgccggaagtcgcggctgcggtacacgtacgccacgccgcggggcgacgaccccgccgcgctgccgacgagcagccggcactgctcggggccggggccgcgccaggccgtggtcgggtcgcggaactgcgtcgcgttgatgccgccctcggggacgatgacggggttgtgcgagggcttcacccactcccggagcagcgggtccgacacgttcttcgggtacgccacgttctggacctggtagttgatgtccgggtggtccacgcccgtgtacatgatcaccgggccgccgtcgacgggcagcaccgttgtcgacccggaccagcatccgtacctgtcgcccgggatgcttggtctgagcgccggctctagcgccacccaatttatgagg

SEQ ID NO: 15293 - DNA, 416 bp, Zea mays
  Clone ID: LIB3150-100-P2-K1-E9
ccttgaacgaggcaaattggtatttctccaaaaattcaagatccacaaatccaacactgacatgtctaatggcttaaggtccaaaactacataaacagcatgctctgctaatgataaagatgccctagaggttcgacccgacgttgccatgtatccaatcaaacctcctggacgctcaagcctggggggagagattgcttcaacttgtttgccttctcagcgtcgaatacgcgaagggtgtacaagtacttggaacagcggaccttgaacttgacaacatccttgctcctcttgatcttcactgatcgggcatccttcctcctcgcggggagaaaggaatccttgatctcgtggatctgcttcggcatcttctcgcgacacctggaagtccccgagctcttctttttgcggcggcg

SEQ ID NO: 15294 - DNA, 395 bp, Zea mays
  Clone ID: LIB3150-100-P2-K1-F10
gggggcatcaattcaggggcacagtgtattaattaggccccggaacctggatcaaaggggggtatagggggtcttaacaacaaaacaaaatggaaactgcagcagcaaaagatgaatacaaggggcaatttcccaagagctaaacgtataaaccaatgctggcagggtgagccatatttttttaacacacacaaaaaaatttttattttttatccatcaacgccataaaacaaaatgcctcccatatgccaagggagttattggacttttatccttgatgtccaattgctgggggcaaatatggcataagattggttgggggcgccaccggatggatttctcaacaaaaattaagtttaggggcttacaggacaaaaaaatgacttcccatattt

SEQ ID NO: 15295 - DNA, 339 bp, Zea mays
  Clone ID: LIB3150-100-P2-K1-F11
acaaatactaaaatttgtttttctatttttgcctcacgggcaacaattaacaattttgtaacattttctcaccaaaaaaggcctgattggccgaattctctaacctgaacccataccttctacgccgaaagcaaaaggaagcgaactatgatggacccgaacgctatgaatagatcataaactggacccagcccacaaagaagcccccctgcctctggccagaagcttcaccaacttctgaaacctgagacacaaacaacccttgcgagtctaattgatgcaccatatcctacaacatcatcgcacattttcttttattcctcaagtccggtgctaagg

SEQ ID NO: 15296 - DNA, 438 bp, Zea mays
  Clone ID: LIB3150-100-P2-K1-F12
ggttggctgggagatcaagtgaatccacatttcatcatatttagaggttcagaacaaagaaatgcagtacaagtcgtatgctactactggaccaaggcactagagtctagagtgataagcctacgaaactaagcccatgggcaagaatactctcgaatcactccatttcgtgaccgcgacccaagacttctgccacgaccagcagcagctggcggacacccctgacccctcagccgccaaatccgtagagggtgcggccctgccgcttgagcgcgtagacgacgtccatggcggtgacggtcttacggcgggcgtgctccgtgtaggtgacagcgtcgcgaatgacattctcgaggaagatcttgagcacgccgcgggtctcctcgtagatgagccccgagatgcgctttacgccgccccttcttgccagcctccgga

SEQ ID NO: 15297 - DNA, 478 bp, Zea mays
  unsure at all n locations
  Clone ID: LIB3150-100-P2-K1-F4
ttggtcaccttggcgccggttgggtccttcttctccacactcttgatgactccaacagcaaccgtctgcctcatgtcgcggacggcaaacctacccaggggaggatacgcggagaatgtctccaccaccataggcttggtgggaatcatcttcaccataccagcatcaccgttcttcaggaacttgggctccttctcgagctccttgccagatcgcctgtcgatcttggtaatgagctcagcaaacttgacggcgatgtgggaggtgtggcagtccagcactggggcatagccgttgccaatctgcccagggtggttcatgatgatgacctgggaggtgaagctggcagcctccttggcagggtcatccttggagttggaggccacgaacccacgcttgagatccttgacagcaacgttcttcacgttgaaaccaacattgtcgcccggaagagcctnctgaagcgcctcatggtgca

SEQ ID NO: 15298 - DNA, 411 bp, Zea mays
  Clone ID: LIB3150-100-P2-K1-F5
agaatacatttaaggccttggcatggcttcagaagttcagattaacaaatgatggagcaagagcaactatttctggtgtttcaacacaaagaatggggatatggggatatctatctcctacacgttacacactgggctccaaaatgacacctctaggtcgctgttgccactaccgagaataaataatggattatgggtgccctgctaaggtagctacatgtaaaatctggggcgattgaccccgtaatgcttcatcttggagatctgactgaaatacaccttccgcacaaggcgagccttgataaaactcgtgatctttgcgtcctgatctttaaaggaaaccggtttcgtgtaaaggtgcttgaagcttgctaacaaaccaaactggatctaggccttcaattcaaatta

SEQ ID NO: 15299 - DNA, 459 bp, Zea mays
  Clone ID: LIB3150-100-P2-K1-F8
aaattgcaacagaattgaacatattcaaacatagcagttatgtaaaggctgataataccacaagataaaatgggcgcatccatgacacagagtcagcacaggggactctgcgtcagatcacacagctaagcactcatcattcgaacaagttcaagaaaactagataatattattatattggtgtaacactacttgtccatcctcactcctcatcctcatcaccagcatccccgccaccgcttgccttcttctgattctttctcttcacccttcctgcggggcctccaccgaatgggcttgacagtgaaaagtcaatgtgcttctcagactccaccctcaccatgaatgatgggacgttgacaatttgcctgccaaccctgatgtgacgctgcttgatcaagacacgagcatggtgaatggacttggccatgccagccttgaagacaagtgtttgaagcc

SEQ ID NO: 15300 - DNA, 205 bp, Zea mays
  Clone ID: LIB3150-100-P2-K1-G10
gccacagaaatttctcatcatttatacaagtagaggtctaaaggacctgaaccacatgtacagctcaaattgagcggagcccaaaaagaaaaggataggaaaacaaataaattggaaccaagaataaacataatttcgaagggcatttatacaaacggcatcaatagtccacgagagcagcaaagtgtaacgggctaacggttcc

SEQ ID NO: 15301 - DNA, 450 bp, Zea mays
  Clone ID: LIB3150-100-P2-K1-G2
aatcagtaggacctcttagatctgcttcagtattttctgaactgagagactcatatagtgccgcatgggtcgtgaagcaaaccccagcggcagttcaatacagaattacaaaatactctcaatcaaaatactttatcttcagatctgcctactctgtctgaagttcaggttttgcctaaccatcttgtctgatgtttcgactcagcaacagctctaggtaagtttcattcttcttgcctaaattgtttcaaaacaaagaaaactacacatatatctagaacataccctaatctgaggagcatttcctctcccaactataaaagccaaaacgtctacagcatcctgcatctgcttaccctttccgtggcgataattctgtagatggctggacactggttgctgtttgcagctataattctcatctcgaattttctgggacaggtcactcaa

SEQ ID NO: 15302 - DNA, 445 bp, Zea mays
  Clone ID: LIB3150-100-P2-K1-G3
aacatcatcctcgccatctagagctcgtcgtgctgcttctcatcatcagaatccttgctatcctcggcatcagagtcggccttgtcctcgtctgcgcttctcatcgtcttcctcatcctctaggtcatcatcctcatcatccccacccttggcggcatcctcttcttccttctttttctcggcctcatcaaaagcagccttttctgcctccttgtgcttgccccaagtctcctctgcaaaagtcttggccaacgcagggtcatcagtgatgatgatgttgtcaaacagagtgcccgatttaacctgccacagctcaatgccaatgtacttcaagctgtcgaaggcgtaaatgtatggatcatccttaaaatctgggttgtcaatcataggtgccttccatttaccctggtagttcgggttcttgattttcttttggttccattgg

SEQ ID NO: 15303 - DNA, 310 bp, Zea mays
  Clone ID: LIB3150-100-P2-K1-G5
ggttactgacagaaatgtgaatgcagtcacagaatttggtttattaaagatgggatcatccggctgtttcaaaagctattcgagctcaaactcatcaacaagccttcataaactaccgaatccaaaaccgatagaactctccaaaaggctacaaaaagaataacccgtatgataccagggttgctgttcctaaactcgttaatcgccaccactgaaaaaagtggggattatgatccataccatgaaatggtccctaatgactcattggagtctggccggtagaagatgaagtcattatgttcagtgtttc

SEQ ID NO: 15304 - DNA, 433 bp, Zea mays
  Clone ID: LIB3150-100-P2-K1-G7
ggataaaagttaatttacaaagctgaaatacaaagcacccggcagttgctccgcaaaaattttgtgcggcaaagcagagatcacgtgggtcactggatgcgccactgtgatgcaagcttgggacaaacccatggtcagattctccgcccatggacgggcaaaactagatgcaggcggggtcaacgagtgtagtgtagaggaactataacgacaacatcaacgaattaaataggtcatactccaggatccacaacaggtctcaccgcttggtaaatatgacgagtcgactgaattctttcttttcgccagaagggttttttttccttttcacccgagcatgcccgaaggaaatattctgggggacccttttcgctccggtctcccaaaggtttttaaacaacaaccttgtattatttaacatttcttggggttg

SEQ ID NO: 15305 - DNA, 345 bp, Zea mays
  Clone ID: LIB3150-100-P2-K1-G8
atatattattttttttttttttttttttttttttttttttgttttttttttttttatttttggtggggtttttttttcgaggagcggggtttttaaaaaattggatacccaaaaggaaagggtttttttcaaagttttaattttttttctcggaaaaattacatggggtttttaaaactccttttttttaggagggggggggtttttcaaatttctaacaaaaaaaaaatgtttttttttttcccccaaaatttttttaacttaaattcaaagggataccgggtttttttttttttttttactcttaaaaaacacaccttcctctttttttttttacccagaaaa

SEQ ID NO: 15306 - DNA, 97 bp, Zea mays
  unsure at all n locations
  Clone ID: LIB3150-100-P2-K1-G9
atnnaaaaaaaaaaaattgaggaacattttttgatggacactaaaaaagacaacaagaaggggcggggaaaaaaaaaaaaaaagggggggggacaaa

SEQ ID NO: 15307 - DNA, 463 bp, Zea mays
  Clone ID: LIB3150-100-P2-K1-H11
gagagctccaaacaacaattgaatgtgagcagagcgacttcgttccaccatactgagcaaccaaacaacaccttagataccgagaacaatacctagcattatgaaatttgccacatttagtttaacagcagtagcatcatgtgtttactgatgggcatcacccagtgcttatttacaaatttggccagatgcaaaggatttagcacgttgtaaccgagcattcatttaccaatgctaattctcaacagggagaacatcagtgaccggcatcctattcaggcataggcagtgatggcagggagtttcttgagcgcatgtcattgttaattatccttggcatgggaaaggtctttctggtcaggcctgttctcttctagctttccatttgttgcttcttctagtgccttattctgtttcaacaccttttccaatttcttcctgagccttcgattttctttgacat

SEQ ID NO: 15308 - DNA, 400 bp, Zea mays
  Clone ID: LIB3150-100-P2-K1-H12
aaagccaaaattctttcttcattgcatttattaaacaggaaagcagctgtgactatcattcttattcttgggaaacagattgttacaccaaccaacacacgcttttcgagtcagctcacatccttgcaacacaggccgtacagcaacgagaagtgagatgaacgtagctactcgactatcccccgctttgccccatccaccgtgttcttcagcagcattgccaccgtcattgggccaacgcctccgggaaccggagtcaggtacccagcaaccttgctcgccgctgcgaaatccacatcgccgacgagccggtacccggacttccgggtagggtcgtcgacggagttcgtcccgacatcgatgaccgcagcacctggcttgatccagtcacctttgatca

SEQ ID NO: 15309 - DNA, 186 bp, Zea mays
  Clone ID: LIB3150-100-P2-K1-H3
gcgggtggtgatggcggcgtagcaggggcagacgtcgtggttcccggcggtgcccggcggcacgcagttgcagcgggcgcagcaggacccgcacgccctccggcacaggttccaccgcgacgacagcgcgcaccgtgccccgcacgcgctcccgcaatctatgaaactaacgggggaacgtgcggg

SEQ ID NO: 15310 - DNA, 466 bp, Zea mays
  Clone ID: LIB3150-100-P2-K1-H4
cttaaacagatacgataatattgtaggataagataatggtccacaacacatcctaaccgattacaaagttcaccttgagaaaattgcaaaccaaacaataattccaactcaaacgataacaactaattgtccctcactgctcctcttcgatcacacccttgtcgctcacatagataccatccaaaaacttcctgatatccttcttcttgacatggcatttctggttgatgagggcggcggagcgagagactaactcgacgtcgttgccatcgagaataagctcgtccttgaccttctcggagcggaggatggtcacgccgtcaagcatgtccacctttctgaccttcttctcgccgaggaagttccttatctcgatggcggtgttggagttggtgatggacgcgttgatggggaaatgggcgtagacaaacctcatcttgtagcggtagcccttggtgaccccctt

SEQ ID NO: 15311 - DNA, 359 bp, Zea mays
  Clone ID: LIB3150-100-P2-K1-H5
gcccttaaagcaacgattacaaaccagaccgcgcgtgaatgaaatgcaaagacaggggggggggtcaaagggaaaaaactgctaggcaatttacaacctacccgacgaagcggggtggatttgtcttacataaatggacttgtgcaccctggtttattcaaaaataaacacgtgacaacgtcattcgagccggctttttattactggagcatgaggaagaaactgcgccttttgtcccacgtgggcatttgcccaaactataatgcatggcatggccaccggggagcgaatgatgggcaccccatcaagcatatccaccgtactggcaattgtgaggtcgaggtgggtttttataacca

SEQ ID NO: 15312 - DNA, 376 bp, Zea mays
  unsure at all n locations
  Clone ID: LIB3150-101-P1-N1-A3
cgnncgtacctttttgtcttttgttgtcgacttccgcggggnggagagtagatccggagagggtcggggagagtaccagtgatccttattgtcgacggaggaggctgttgtggctgaggacccggagaccgaggngccagtggaggtntaggaggtttatgttggntgaggtgntcaatgtgaagaaggtgcccaaggtgaagaaggcgcctaaggagaagaagcttttcgcggtgaaaaaccggcggcgcacccttcctacgctgagatgattgtagaggcgatcgctgcccttcaggagaggaagggttctagctctgtggccttaaactagttctttcaggggaagcatggtggtaagctccctaccaacttt

SEQ ID NO: 15313 - DNA, 404 bp, Zea mays
  unsure at all n locations
  Clone ID: LIB3150-101-P1-N1-C4
gtttcagctgaagctgctgcaaaggcatataaagagaagcaatcaaaggagctgcatggtcgtgaagtaagacttgacttcgctaaaggaagaagtacacanactcctcgcagcggcaatgatggatctttccagaaagcttgctcgggtaacagcagctcaatatttatccggggctttgataaaaatctttcagaggatgagatccggagctctctcgaacaacattttagtgattgtggtgagatgacaagggtctctatcccgactgatcatgaatctggtgcaataaaaggaatggcttacatagacttcaaggatcaggactctgtgtctaaagcccttgagctcagtggctctgacattggtggtggctatgagctttatgttgatgaagccaaacc

SEQ ID NO: 15314 - DNA, 415 bp, Zea mays
  Clone ID: LIB3150-101-P1-N1-E3
ttccttctcgtcgcggcgctcttcgacctctggggcgttcttcaagcacccgggggcgaaggaggccaaacgccaggcgctcctcgagctcgtagattacgtgcaggctccagctcaggccgcgggcgccaacgcgcccacgcgcctcccggaccacgtccaggaggcgctagtccttgccatctctgccaacatcttccgcccgctgccacccgcgctgcacgagtccgccgccgcgatcgacccctgcgccgcgcccgacgacgacgaggagccatacctggaccccttctggccacaccttcagctcgtctatgagctccttcttccgatacgttgtttcgcctgacacggacaccaatgtcgccaagcggtatgtggaccatgctttcgttctccgcattcttgacctttt

SEQ ID NO: 15315 - DNA, 90 bp, Zea mays
  unsure at all n locations
  Clone ID: LIB3150-101-P1-N1-F10
cgacgaagcgggatccncagattttttagcttttagtgcatcggccgccccggaattcggcgggttttttatgcgtccggctgccctaaa

SEQ ID NO: 15316 - DNA, 431 bp, Zea mays
  unsure at all n locations
  Clone ID: LIB3150-101-P1-N1-F7
gtcatatacgaccacnctctaccgacttgtccatcggcgaactttatctaggccacacgcgtgctcccgaccaattgagaacaatccaccgggaagccttcgcatgaaggggcatcaagcagcgtcaaagaatcggcaccaccgctcgccattggacgccgctcgccgacggcgcctttcccgcgcccaccgtctgccgccgcgttccgcgccgacatcgccgagacagtcgtgcgcccgctgctgcacttcttgaacgggaccaactcgtactacttcgtcgacgcgtacccctacttcgtctgggccgacaacaacctcaccgtctcgctcgactacgcgctcttccaaggcggacgcacccgctacgtcgacccgggcaccgggctcacgtacaccaacctgctcgacgaaatgctcgacgcggtggt

SEQ ID NO: 15317 - DNA, 408 bp, Zea mays
  Clone ID: LIB3150-101-P1-N1-F8
tttctttcagatcatatctcccggtaacacgtgcggatcatacctcttccggtgtgtttttcagaggaaaggttggccaacggcgttccggtggttggatttgtatttggtggcggtggactccggttatgtccactgattgcttgctgttgggttcgcttaagtggtaaagctgatgtctttaggttagaagaataactaagattgggtaggaaggaaggaaggatggtggattgggtagctagctgctggctgcttggttcaggagttggggttaaattagcgtctgaaatacttgtttggtttaggtattcctaagtagacgacctgattatgattcatggtggtttatcgtagcagcaatcttaagtttggtgtggtttttgatctgtgtgtcttgtgttaggt

SEQ ID NO: 15318 - DNA, 412 bp, Zea mays
  Clone ID: LIB3150-101-P1-N1-H2
tttgttttctttccgcctctctcgctctcggcttggcggcgcatcgcagtactacgagctagcagcaccaggaacctcttcccacacttccgcgctcctccctctgtctcgagactcgagaatggttgtgtaggcgggcgcaggagggagggaggcgagagggggagctagggtttttcgccgccgccttctgttatcctcaggctctgaaccccctcctgtccggtgcgcggcggattagactccgatggggaagtctccggcgaagtggatcaagtccgtgctcttcgggaagaagtcgtcgtccaggtccggctccaccaaggccaaagatttatcgaaaggtgcgagtaacaaaggagctgctgctgcggggaaggagcccgtgttctctgagagctccccagtgatc

SEQ ID NO: 15319 - DNA, 405 bp, Zea mays
  Clone ID: LIB3150-101-P1-N1-H4
cttactcgtcctttttttggccgccaaatcaaagttatcaaagggtggttcttttgacgaggaaggtaatgaaggacaacacaagggtcgccgtaacaaatcttcaaaaaggagaaggaagaagagatatttttattcggagtcagatagctcttctgagtcagagactgaatcatctgattctgagagcgattctgatacttactcaagtgactcatctgatgtcagcagttcaagtgatgacaggcgaaggcgcagaaagagacattcgaagaaaaataaacgcaagcgttcaagaagaaagcgtgaccaaaggcgtgaaagaaggcgtaggaagcgtgataggaaatcaaaacagaagtcaaaaagggtgacagtgaagctgaaagttcgagtgatagcagc

SEQ ID NO: 15320 - DNA, 421 bp, Zea mays
  unsure at all n locations
  Clone ID: LIB3150-101-P1-N1-H6
tttcactcgtcctttcgttttcactacancatcagtagccagctgaggggtttttcctggtcagggtagccaagcccatcccggtcctctcccggcgtcttctccctccgcaccgcggctccggcgatggcgggcgtcggctccgcgctgcgtcggctctacctctccgtctacaactgggtcgtcttcttcggatgggcgcaggtgctgtactacgcggtcctgacgctgcgtttgagcgggcacaaggccgtctatgccgccgtcgagaggccgctgcagttcgcgcagacagccgccatcatggagatcgttcatgggctcgtagggttggtgaggtctccggtctctgcaactcttccacagattggatccaggttgttccttacgtggggtgtcttgtggagtttttctgagaccc

SEQ ID NO: 15321 - DNA, 339 bp, Zea mays
  Clone ID: LIB3150-102-P2-K1-A2
aaaaaaaggcgccagcctgcttgttttactttctccccgcgtcgaacacggccaaaagttttctgcattcattcatgtttctcaaactctaaacagaaacggcattcaatcctccttgactacaccacggctaactttagtccctcgctgatttctcctccggcttctctgcctattcagttgcatgcgcacctccctccgtggcagagacgccgacttcggcagggcggaggacgcgtacgtgtaacatgtatcccacctttacaacagaagcaacggtccccggtggttttgaaggatcatgattttgaaaaactgcacaatgcctgtttggtatca

SEQ ID NO: 15322 - DNA, 391 bp, Zea mays
  Clone ID: LIB3150-102-P2-K1-A6
ggcgcataacagttttccaatatcgatatttaataatgtagtgtagacaaccatccataacgacgttcttaataacccagtggcaaagcggggcggacataaccagaaagtcttacaacatcaggtgttgcaaaccacaacggggacaagagcagcacacatgcctgacgatgaccgcatcaggatacttctagtactcatcaccatcatcaccttcctcaccctcatcaaactcagcaccaacctcctcgtagtccttctcgagcgctgccagatctctacgggccttaaagaactcgcccttctccataccctcaccgacataccagtgcacgaaggcccgcttggtgtacatgatgtcgaacttggggtcgatgcgggagaacacctt

SEQ ID NO: 15323 - DNA, 438 bp, Zea mays
  Clone ID: LIB3150-102-P2-K1-B1
gacaagaggcaaatgtgtttactgatttgattaaaagtttcacggcgacacatagacctgacaaaatatgagccattaatgctcaaccaaccactaggatacacccaacatagtttcagacattccgatggaaaaaaatttattctcggaagcacttttctccgggggggaagaagacaactcgctcgtatcaccagaccttgagttcttcatcttagttggtgctgttcatgtggcggatcaggtcgaccacgcgggtgctgtatccccacttcgtgtcgtaccaggacacgagcttcacgaagttgccgttcaaggcaatgccagccttagcatcaaagatgctagacctggtgtcaccctggaaattggtggaaacaaggtccttcttaacgtaacccaagatgcccttgaggctaccttctgccttgggcttga

SEQ ID NO: 15324 - DNA, 227 bp, Zea mays
  unsure at all n locations
  Clone ID: LIB3150-102-P2-K1-B11
cttatgaggatccaagcagaggaagactggccccatatgggattcgttttttttagaacaaaatgaaggaaaccggggtcatggatttagccaaaaaaggactgaaacccccatcccgattcaatgttggatttngacaaaatttaaaaaacaatgaggggggcgtttatattgtatacaacccaaataacggcgggcttctcaaaatcacatcatttattgtagcc

SEQ ID NO: 15325 - DNA, 71 bp, Zea mays
  Clone ID: LIB3150-102-P2-K1-B12
ggatatgaataaatattatttttagaacgctcttttccacaaacacgataagtgggggatagagactcatc

SEQ ID NO: 15326 - DNA, 270 bp, Zea mays
  Clone ID: LIB3150-102-P2-K1-B4
agaattggttttgccttttcttttccagcattacagcatagttgatagaacaaaaaaagggggctgctcgattctccatcggcaggaccaacttacacgaaatttaacagcaaagagacttattaacattcaaatttaaagataaccatcatcccacataggaagcatgttttttggatgtcctaaaattagctctaacgagcaaaccacactccgtaacctagctcgtaggcaggagttccaaaacgggcactcaaagagaagcaactc

SEQ ID NO: 15327 - DNA, 390 bp, Zea mays
  unsure at all n locations
  Clone ID: LIB3150-102-P2-K1-B5
ggacatggaacaaccgacgttcataataatcttttctgntnaccaatccacgttcaaaacgccacgcaagatttacccccgcagaacacaatcaatctagccttgcaagcttctcaatgccatggaatccatgatccaccaaccagaccatctgttgcctagcactacatctcacagcagcaattatgtccaaaacttgttcagaaacttgctttctgtgtgccataagcccaaaatactatgagctagcgttctacccaaaacatcaacacaagacttgttacgtttgaattcagacacctagtacacggatatcaactttcgtccatgtcatcatttccactgtcttgctcgacctctggattcttgtcttcagctttagaagcacct

SEQ ID NO: 15328 - DNA, 264 bp, Zea mays
  Clone ID: LIB3150-102-P2-K1-B7
gagtgaattccaatttcttaataatgaagggatccaaacgccccggtgcagagaatgattgaaatgagcgttacctgtaaaagaaccgtactggacaactgtttccacacgcggttttgttaggatagaaagggattagatcacattcctagatcagtccaacccgttaccttgaaaactattgttccacggattcagttagcagctactggttgttagctatggcctactcttagtcagcttcttacaccatgtaagaagcat

SEQ ID NO: 15329 - DNA, 443 bp, Zea mays
  Clone ID: LIB3150-102-P2-K1-C10
ggatgggcagtgagatattttattacacaaatgaagatcttttcgtttccatgtgagaatagacagaagagactaaatcgccagcacatataggtagtcttcgattatggacatagctgatgaacggtagccagagccaaagagattgtagtgattcaggtagtggtagaggagatagaggtccctccttttctcaaaccctggctgtttcggcatcacctgaaaataggcgttgttgaagtccccaccaaatccagcacaccatgacatcccaaactctgcctcgttgtgtccatagttgcaagcaggatccaatattacaggatcctcattgctatcagagcttattgttccggtccacagatcaccattgaatcaagcacggcttaataaccgctctcattataaagtgggcggattattttgatcaacctttgcctttt

SEQ ID NO: 15330 - DNA, 216 bp, Zea mays
  Clone ID: LIB3150-102-P2-K1-C4
aaagagggaactgattaggtggaaagttttacggggacacatagacctgacaaaaaatgagccattaatgctcaaccaaccactaggatacacccaacatagtttcagacattccgatggaaaaaaatttatttttgggagcactttttttccgggggggaagaagacaacttgctcgtttaaccagaccttgagttcttaattttagttggggct

SEQ ID NO: 15331 - DNA, 368 bp, Zea mays
  Clone ID: LIB3150-102-P2-K1-C5
gggcgctgacctcgaaggcctcctccacgtcccgctgcgagttgtcgaagcggtgggtgatgagcggcttgacgtccaccttgccgctgcgcaggaagtcgatgcacagcggccaggtgtccttgtaccggaacacgcccaccacgtccacctcccgcgccgccgccgccgtcagcggcagcgtcatctcgttgtggcccatcccgaccaggcacaccttcccgccgggccgcgtcgcctccagcgccgtcgacatggtcttgctgaacccggcgcagtccaggctgacgtcgatgtccgagcccatggccgcgcggatgcgctccacctcgttcgccaggtcctccgtgcggggcgacacccgcacg

SEQ ID NO: 15332 - DNA, 59 bp, Zea mays
  Clone ID: LIB3150-102-P2-K1-C7
ccggccggaattcccgggcggccgccgtcagagcgaggagacctctccaccgcggccag

SEQ ID NO: 15333 - DNA, 191 bp, Zea mays
  Clone ID: LIB3150-102-P2-K1-C8
ccagccaatatgttaaattaacactgaaccatgcatattctgaggttacttcagaaaagaacattaacttagttacctggtaaaaattttcatttagtggccgagaagcatgggaacagaaaaaaaaggcatacgaaaccaaggaaaaatgtttatgcctatttgattagttaaacaaggagaaaagttgt

SEQ ID NO: 15334 - DNA, 251 bp, Zea mays
  Clone ID: LIB3150-102-P2-K1-D11
ccaagaagcaccatttttttccttaggatttaacttagaataaagcctgacgggggtaacagcacccatcgatccgcagtccatgctggttgatgcatgggtctgctggagccggggatgaacacagctctaacaactgacacagagcgacctttaatcaaaaacacagatgggcaacaacaaacacgagacgaacgaagataaacactctggtctagggtaaacaacacggttgcgaacaggataacttg

SEQ ID NO: 15335 - DNA, 212 bp, Zea mays
  Clone ID: LIB3150-102-P2-K1-D12
ggcacaaatccataccataatccagataattggttcgaacatgcaaatactatgctcccacggcaatggagaaataaaacgaacatgcaggcttaaaggccacagataggcaacttgttgtgaagacccaggattagacagattgataaaaatacttttttgtttcaatacaaggtcaggggcacaacttcttaaaacttaattgggcctaa

SEQ ID NO: 15336 - DNA, 382 bp, Zea mays
  Clone ID: LIB3150-102-P2-K1-D4
aaaaaacaaaaatataaaatgactagttgaaagacaatgacaactaagcaataacacgtcaataacaatatttagctttaacaagcaatccaatcttggacagttttttcttaaaaaaaacctgagttcagttcaggcagggcagctatagttgtggctataacaatagaacatatatagtacccaacatgggtaactaatctagcacttgatctccttaagaccatgagagaaatagaggaatgtcggattagcggcaccatccttgtaataggcgaataccacggacgctttgttctttattgctctcatcaaccaataatttgatggtccttcagtttgctaaggagaaatttggttgcacccttcgacaccccttttt

SEQ ID NO: 15337 - DNA, 366 bp, Zea mays
  Clone ID: LIB3150-102-P2-K1-D7
agaaagaactaaatttttgattggagaacgtataataacacgagggccctgaactgaacagtacccggaaattcacattgaatctctttgttcgagattcttcttcagtctttcacgctcaacatctcatctcttctcatctatctattttatagacagggtaccagggaacgctttctcgacttcgctccacttgctaccgatcgtctttgcctcgagtccgtcaatctcgtagcgcacctcctccatgtgttcgattatgctgcttacggcaacctgcacgccctgtatggcctccttgagggccgggtcatactccgcattcgtctcggcgtcctctgtgccggcggccttcgtgatctcctt

SEQ ID NO: 15338 - DNA, 279 bp, Zea mays
  Clone ID: LIB3150-102-P2-K1-D8
atacttcatagtctttttcatagcatcaattttaaaaacggggcaggggcaccggttcaactggaatgccctaaaaacataagtgcacaaagcatatcaaatttgctccaaaatatgttgtctggcattgggcttacatactttggaaaaaacccgcacaagacgtttcaaagtgatgtctcaacgcctatttccagtctttggtagtgggcttggcttcttattttcaaccatgttgtgcgtcctatgggggtacagtgtctctctcaggaacagggg

SEQ ID NO: 15339 - DNA, 56 bp, Zea mays
  unsure at all n locations
  Clone ID: LIB3150-102-P2-K1-E12
ccgtcggaatccgggtcgacccagcgtncgtccgtgcccctcactgtttaaggcga

SEQ ID NO: 15340 - DNA, 218 bp, Zea mays
  unsure at all n locations
  Clone ID: LIB3150-102-P2-K1-E2
acntacttcttttttttttttttttactaaacatttcaaaataatggtgcatgccaaaccaaaaaaggggctgctgatatttaaacaagatttcagaaaactctttaactgtttgataactgaccgatgctaaacttgccataagttaaagaaaagacctcttaataataagactctctcttcaattggttgttgaaacagtaaaacatttttttttt

SEQ ID NO: 15341 - DNA, 372 bp, Zea mays
  Clone ID: LIB3150-102-P2-K1-F10
acccaaaaaaaacagcaccctttttaatagccaggctcaccaccttgatgaatcgtgtgagggtcaccggataaaaccaacaacgtaaatggaaaaaggcattgtttattacaggcctagaaatactaccacgcacgctccaacaaatggcaggcatccttccgctccctccatcatcattattccaagctccgaggcataggactgtcctctaggtacagtgttcctttggcatcaacgacgacaataaaaaaactcagaccgttgttagcttttaaaagctcttggcagctgcaatgatgctctccacggtgatgccgtactccttgtagatcgtcccggcaggagcactcgcgccgaacttgtcgatgc

SEQ ID NO: 15342 - DNA, 250 bp, Zea mays
  Clone ID: LIB3150-102-P2-K1-F11
agagggccaaaataaatactttgagaccatatataaagatcaccaaccagagagaggctcttgtttctataacacaatttgcagcattcataccaattgttatgtataaaaattacaagattcttaatttagaaaatatttaaaatcattattatcacttgggaatacttatgcttaataaaaaacgaagctgtcgaactgtaggaggctgccaaagtcgctggattgtgccttgatgagcctctcctgg

SEQ ID NO: 15343 - DNA, 62 bp, Zea mays
  Clone ID: LIB3150-102-P2-K1-F2
cccattaaagaaaactcggcgccacttttagcaaggtgatgaacataacagacagacggtgc

SEQ ID NO: 15344 - DNA, 153 bp, Zea mays
  Clone ID: LIB3150-102-P2-K1-F7
aaattccaatagtaacgattcctggttatttaacttatacggccacagtgggaccataaatatcaactgacgctagtatagactgtattatctatatatcttatcttaaagtaaaattaccgactaattttacaattgtttgttatacattat

SEQ ID NO: 15345 - DNA, 97 bp, Zea mays
  Clone ID: LIB3150-102-P2-K1-F8
attctcctaattttcatattgggtttattataataaaattggggttttccccaccaaaactttaccaaaacttcccacaatcgcccataaaggcccc

SEQ ID NO: 15346 - DNA, 382 bp, Zea mays
  Clone ID: LIB3150-102-P2-K1-G10
gaacaagccgtttttataaatagccacattacagctagctgcaaaaatcgttcatgaatttttagccttaaggcgacctaaaaacctgggagggctaggaccatggtcatatttcttggcagagcaactagaaaaaactttaccccaccacattcaagggtttaatgcgtggccagaagcctggccggggcattccgcttccactgtgctttataagacgctcagttggatccccttgcccttgggcaggctcacccacggcttattacccttgccgatggtgaacacgttgcccatactggtggcgaactggttgcccagggagtcctccacgtgaatgggctcaaagctgcccttgtgctccttcctgttcttgataaca

SEQ ID NO: 15347 - DNA, 365 bp, Zea mays
  Clone ID: LIB3150-102-P2-K1-G11
ccagcaacaaatgaggcatgctccagcgtcaaactcagaatttggaacataagtgatcaacaacaaagtgttgatgattcacaaataaacaagtccttgctgggttacatgacgcagttcctacagaagcagagcagcgccgacagagaaaccagcaacatttaactacaacacagggcgaacatcaacacaagagaagcctacaaagggcgagcgtgcaagcctaggaggaggtgaacttggtgacggccttggtgccctcagagacggcgtgcttggcgagctcgccggggagcacaaggcgcacgggggtctggatctcgcgggaggtgatggtgggcttctttgttgtacgcgcgagcttg

SEQ ID NO: 15348 - DNA, 313 bp, Zea mays
  Clone ID: LIB3150-102-P2-K1-G12
gggggaaaaaaaaaaattttgggggttaaacagggcccggtttaaaaacctgccaaaacttggggggggggggtggccaacccccccctggggttttgaaacttacaggtaccgccaccatttgggggtcttcctcctacacggtgcccccaaaacaaaaaaatttttggctgtaaaatttaaaagccctttacggccctgggccctttattgcctggggggcaaccatttcaatcgttttccttggggcccttgctcggtttctcttgagcttgtgggaccgggccaatctcctttttaaaggtttcctttt

SEQ ID NO: 15349 - DNA, 423 bp, Zea mays
  Clone ID: LIB3150-102-P2-K1-G2
agcatataacaacctttcatttaagctggccacgaggaatcaatctcacaatatacacttccacaagaaagtaacccatgatgcagttgagtaccaatggaagtaagaaagtaatccaactttgctaacatagaccatagaagtaagaaaattcagttatcaaagctggaaataccacaagccacaacagatgataccacaacaatccagacacatcttgtcttctactaacactctttaactcatagaagaatcgggcttgaaccaactaacttgacggcgtcagcctagttagtttgacttccattcaagataagcagtgattccccaagcattttttgcgcttcctccctcctctgctttatatcttcaattgcttccctgcggtgccgaaattggcatttaagcatgtgaattaaatgt

SEQ ID NO: 15350 - DNA, 363 bp, Zea mays
  Clone ID: LIB3150-102-P2-K1-G3
aacaataaagaataagtaataatatttatagactagagtcatttacataatatgaatcaaagtacatagaatcaaaaggtagccaacgtaaattaacccaccacaggcagctgactgggggaggtcgctagcctaatactcgaacttgtcgaggtcctaaaactcctggagatctacctcgacgccttcttctttacctgagcatagattacaccaaaggcaaccttcaccaaacagatgctcaaggtcttcaatctcgtagaactcgaagaaccagatcacttggtcgccaacttttgatcttcgattccttgaagagcggaaacaaaatgcgatctcggaaggaagcttgacgaagatgat

SEQ ID NO: 15351 - DNA, 429 bp, Zea mays
  Clone ID: LIB3150-102-P2-K1-G7
gaacaaaaaagcggcgttcgattctcccatctgggaggagcaaattacacggaaattaacaacagagactagtagttaatatacgaatataaagataaccatcatccacataggaagcatgtttttttcatgtccgaatataaaagctctaacaagcaaacaacactcagcaacctactcgcaggcaggagttccaaaacaacgggatcgcaaagagaagcaactcagtacttgtagtccttgacgtgaaggctctcggtgtcggcggcagcatcacccttgtaggtgccgagggtagcctcggagttggccttgcacctggcgaggaaggccgctctagccttttccacgttctccaccttgccagcccaggccttgagggtgctcgcctggagggcacggccgaaggagaaggacagggcccatggc

SEQ ID NO: 15352 - DNA, 244 bp, Zea mays
  Clone ID: LIB3150-102-P2-K1-G9
gcactactaaacaatcatttttattgactcgtacgcgtcacttgctccatggtacagacaacggagttcaaggggctcaaaagtaacacatgtagcaaaatttaacaatgaaacaaatataccaaatactatcagagagcctgcatggggcgggttccacagtagcagaacatcaagatgtgtgtgctcaacggtagcggcggaaggaaagggtctggttgcgctttcaggtgggccttctgga

SEQ ID NO: 15353 - DNA, 341 bp, Zea mays
  Clone ID: LIB3150-102-P2-K1-H1
aacctcaattcaacatattaaatgaataccagcagtaacaaaaacctagatgatgcgttgcaaaaaagacaacaaggcacatcagtcgacgaccgaaactagaactacatctgaataggtgtctaatctacaattactcaattagtaaccatttttgctgcctgcaaaaataatgatcaaggacaggaaccctcataatttgtatccaggcttctcttgtaatcccgcactgaaccaattgatgagcctctatgccaacttcaaaataatcttagagccaccgaacaacactcccaaaagacgcgcaacagctatggtgcccctcattttgaaagtgcgcc

SEQ ID NO: 15354 - DNA, 320 bp, Zea mays
  Clone ID: LIB3150-102-P2-K1-H12
gtcgaacaaaacatatcatacaaatccacggggggttttgttagttccaaatttccgaattccagtcacttcacccacagcagcgaggaagtaaaagcttattccacgactcatctagcaaaacacggtggcaagcctatccccaaaagtccatgtgcggaggagtaaaccttagccttgcagtgctacaccaaggtccgaaacaagatgacacgcaaagctggcagaacctgagtagcagcagcagcagcggatctaggcgtcatcgagggcaaggacaccaggtagagtcttgccttccaagagttccaagctcgcac

SEQ ID NO: 15355 - DNA, 401 bp, Zea mays
  Clone ID: LIB3150-102-P2-K1-H4
aacaaatctttgtttgaagaaaagttccatgtgaagtacacaaggtcgaaaatggtgtcaacaaagatgttcgaccacgaaactacatttttcagcacctccttaggcatctatctttctgcagaagtcacttgtgaagggctaccctcaaatgcctcattctagatcctccaaggattaactagtctggagagctagcttcaggtctgcttcttcttggatttgcttctctgcacaaacgaagtgccctccagccactcatcgatgttggcatcagttgttccagttccgagctccaccttgggggccttcttcgttttcttcgagagctgctgaacctggccatatgcccataatccaaagagaccaagaagagcgattccaagggtgatgaggaacac

SEQ ID NO: 15356 - DNA, 458 bp, Zea mays
  Clone ID: LIB3150-102-P2-K1-H9
caagaaacttggaactctatatataaacaagtttcactctaatacgatggtttaggattcttcatcacattgtcatagccacatctcaaaaactcaaaacttgagtacttgtaataacaaaagcctacagacataacgtaagataagtcttggacagcataagcgaatttgctaatggctgggtagcgagggtctcagactctcagtcgaacaggctgaagcccatgtcgtcatcagactcctccttgggctcttccttcttctcctctgcagcaggggcagcagcagctgcagcacccccagctggggcggaagcagcaactggagcagcgccaccaccagatccaacggagaggattagatcctcaacgctgcgcttctccaggagcttagcgaaaagcgccggccagtaggactcgagcttgatgttggccgccttcacgatggtggcgatcttc

SEQ ID NO: 15357 - DNA, 386 bp, Zea mays
  Clone ID: LIB3150-103-P2-K1-A10
attaaatcctaattttttttaaaaatttggttttttttaaaatttttttttttttttaaatttttttttttttttttttttttttttttttaaaaaaaaaaaaaaaaaaaaaatccccaaaaaaatttaaaaaaaaaaaaattaaaaaaaaaaaaaaaaagggtaaaactggtcctggttaaaaaagggaaaaaaaaaaaaaaaaaaaaaaccccccgaaaaaaaaattggaatggggaagcccaaaaaaaaaacaaaaaaaaaaattttaaaaaaaaaaaaaaaaaaaacccctaaaacccttttttaaaaaaaaaaccgaaaaaatccttatttttgaaggcccaaaaaaacaataattaaaaaaaaaaaaagattgggggatt

SEQ ID NO: 15358 - DNA, 411 bp, Zea mays
  Clone ID: LIB3150-103-P2-K1-A11
gaccaagggggggcacaaggctaccggggcccaaagggccaaaatttttagtctcaccctaggcatggggggacgcaattacatacaccaaacccatggttcagatgacggatccaccgtaattcggcacaaaaaaggggtccataagcaccattattgatacgtccagaggtaaacattattagcaggctcaagctaaaagttgggggcaggcaaaacagtctctgctcctgcgcaaaagctactagcttacatagcacagttgagcaaaaaaaaagtatgttcgttttcagcgtaacattttaagcggacttcacggtggccgcgttgattatgtcgatgaactcaggctttaaagaagctccaccgacaagaaacccattgacattaggctgtgctgctagctttttg

SEQ ID NO: 15359 - DNA, 434 bp, Zea mays
  Clone ID: LIB3150-103-P2-K1-A12
agccagtgcacccttgacatgttgtaaaaatgtggcttccatttgaaccatcaactgtaaacctgagcccgagcgtacaggcacataactgagcttttttgcaaacaagaaaaatatggggtcagcttcggtacaagcaaggcctcttcgaaacagaggtcaaactcagttcgcgtctaatttcttctcagcttcactgatgacctctagttgctccaacaaagcggtgagcttcctcatgtcctcctcctgtacgctctgtggagccttctcgcgatagccagaggcgtccattttctgcgccagtgcattctgtagcttttgaatctcatcttttttcttctttagcttttcacgttcagcgtctgcatttaaagctccttggagctgaaggtacacagacaagtctttgttgacaacagcagttgcacaat

SEQ ID NO: 15360 - DNA, 349 bp, Zea mays
  Clone ID: LIB3150-103-P2-K1-A2
agtcaacgatgaatcgtgtgaactaaaacatggtctggttcggaatatacaaccagttggttcatgaaatgtttccacggacaagtaaaacgggagaagagggttccagattaagaaacacaggcgttttagcttttttaacacaaacaagcactccgtcaactaatgtaattgacatcaacgcagagaagtacgggtcatttagcctccagaacaggtcacagcactactggggggctgccaatgccttgggcttcggcttcacctcgacttcattcactgtccggataaatatagcgtcaggttcatgcgttttttcttccttttcataagtgtagctggatgccac

SEQ ID NO: 15361 - DNA, 256 bp, Zea mays
  Clone ID: LIB3150-103-P2-K1-A8
aaaaggggtttcacatactaaacaaggcgggccagggtgcccccatgccgcaaccaggcacacgggtcctggttgaacccaccccctgaattacctttgggactaccagcaatggaagggttgttacacccacagagcaagcctccaggaagggaattgcaagaacagattcattattcggggcttacaagagccgggaattaaagatctgttgccaaatttgtcaaaacatacaaactgcaacatggggcccctt

SEQ ID NO: 15362 - DNA, 420 bp, Zea mays
  Clone ID: LIB3150-103-P2-K1-B10
gatcaaaatatcgccccatccatccatagtttatattggttaattaactacaggccgttatccatctccacagaaacaaaagaatgaaagaaagaaatttattgatcattcatttggttacaatcggacacagcgaggccctcagtcgtcggcaagctggccgcagtcctcgatgcgtacgctctcggccgtggcacctgactgagaaccgacagcctccattttgtccacgacggcgtagccatcgacgaccttgccgaagacgacgtgcttgccgtcaagccagggcgtctgcgcggtgcagatgaagaactgggagccgttggtgtcgggccccgcgttggccatggagagcacgccgggtcccgtgtggcgcagcttgaagttttcgtcggcgaacctggcgccgtagatggactc

SEQ ID NO: 15363 - DNA, 402 bp, Zea mays
  Clone ID: LIB3150-103-P2-K1-B11
atatcaagcaggcatccaatcaccatactgggctcccttttgcccgcacatgttcagaaaaagaaaaaggctcccttttttttgcagagagtacttgaacctggatgaaccagggcgagacggcgtgaccctaaacggggcattcacgtacattcccaccacccctaacacgcgctttataacgacgactagtagcagtaatcacggtataatagtacggcggaacagggccttgagagctctggctttttttcgccgcgccactcgcggcctgagctcacagtcagaccctgaagtttttgccctcgaaggtttggccgaagcgccagtcccgcggggcggcgttccaggaggtggaggggcggcggtcgctgccgttgacgcggaaggagagcgcctggc

SEQ ID NO: 15364 - DNA, 437 bp, Zea mays
  Clone ID: LIB3150-103-P2-K1-B12
gttcaatacttctgttgctttatttttatcgatcaactaaaatttgaataaaaaccttgtgcccttctttgaactttatatagcattcagccaattgttgagtcaaaatcacgagagaaaagttcgcgaaacactaccgctatcaactccatactagatagcctacagtaaaaatcccaacacaaaaaaggaactatttgctcactctcctttatgccaaccatgctcaacacatggtcatgcatcgatcacccctcaattgctatctgtgaagttcgcatcaatgacatccccatcattctgcgctggtccggtaccaggggtaggcccagccttagcaccaggagttgacccagcagcactggcaccagactggttatacattgcctggccaatctgcattacctcctggttcaaagcagacatggcattcttta

SEQ ID NO: 15365 - DNA, 198 bp, Zea mays
  unsure at all n locations
  Clone ID: LIB3150-103-P2-K1-B2
cctacacctttatatatttttttacaaagaanaccccgggggggcaagcacaaaagctttattataacaatatcgcggggtccacaatgacagtcatgacagaaacatttttccaggcccaggggagaaaagaaaatctagttgggaagggggcttaaaacaacaagggaggccctgggacagcccccaacgcaatcc

SEQ ID NO: 15366 - DNA, 386 bp, Zea mays
  unsure at all n locations
  Clone ID: LIB3150-103-P2-K1-B4
caattgttctttttggtcatngctcacactgacactgccacgcatggtgatgcgtgacacattattactcaatcatcgccgctaaatgactcaactagctagctagccagcggctatactacagcacatagtttcttcagtgggggacaccgccggcagcagcgtaggggcatggagtcggctgctgcaggccgcacatcgtcgtcagttgctgcgctatctgcgccgccaacagccccgcgacctggccgctttgcggctgctgctgcaggatggactggaggaccaagccgaagatcgcctggtaccggtgctgcggctccacctgcctgagctgttggcaacactgcttgccgaacgactggcactgaggcgagcagtatggc

SEQ ID NO: 15367 - DNA, 436 bp, Zea mays
  Clone ID: LIB3150-103-P2-K1-B6
gtgccccaatcgtcaaccacaattttttttgacctgcctgcggcacgcagagacaataccgcacatttacatttgtgattttcacttactgcagaatttcacctatatctacaatctgtaaagggaatgaatccacactgcattacacacgtatgaatcattataccaccccaaaccacaacataattccaatgtttattgacatctcaagtaatagtttcagcaccagcacacctgcttatctatccaggtgtgtctacactctattcgtagcaaggccttgcgatttcactacttcaaacataggctgcttgtagcttggatgatatcattcttccaactattacccttttcctgaagaagctaaacaaaaggtgtaattgtgtttagctcaccatagcaaaccgatttctttcatcctttggatgccctgaaa

SEQ ID NO: 15368 - DNA, 308 bp, Zea mays
  Clone ID: LIB3150-103-P2-K1-B8
gacaaaaaaatggaaggtgaattgatatgtggtattcatttttatgcatcacggtaccttgatttggtctaaaggggggcctttaccattaacaagacttttaccacacaaaagcaagggagatttggatgaaaaaaaaagaggcatacttcatgtaaaatcccaccagcacgccctaccaaattcttgatcatgacataaccagtcccacaggcacaaataagggtggttagagtttttaacaggtcccttttaatggcatggtttaacaacagcaggcatgtatcaaaatcatgaggactcctttt

SEQ ID NO: 15369 - DNA, 409 bp, Zea mays
  Clone ID: LIB3150-103-P2-K1-B9
gtcatatgctaccatagatattccatatcattcatggcaaaagtatcctgagcacgcccgtgcttgataaagtttgaaatgggtttacagggaacatattggtaattctggctttgacaacgctcaatcgaattgctgatccaactcataaccaaaaactctaacatgacattcacggaaagagactccttaagccgtggacgccttcttcagcttggcgagctcttgcctgatagcaccgcccctcttaatctttgccagcatgactttgaacctatcaaagtcattgagcgatgctctcctcttctggacaatcagcttcttgccccatgagctgttctcccacttggtcttcacatcagctttctccatcgccttgatcagggctgtcttcttggggacacgtttg

SEQ ID NO: 15370 - DNA, 396 bp, Zea mays
  Clone ID: LIB3150-103-P2-K1-C10
aaaaaaccgataacaatacattacatcaagtgtttttccaacatggaagatgcacagttctacatttgctttgcccttccaaggcccaagcaggtttccgcgaaaatgcatatgcctgttagttgcagccgctgtaagatgtaccccctgtcgaacgcagcgtgcccaccatcaggccgttgtcaccatcccctgaatgacttgaagccagatttgttattagttgaaccacccatcatttttcttgcaggcttcaatatttggaacgggcacatcaatgtatcatttacactcatcatggcaccagcgttgtcgaatttttcacagtagttaggggctgaaaatattgttacgagttgacgggttgcgaaaaactcgattcatttttgacaacct

SEQ ID NO: 15371 - DNA, 367 bp, Zea mays
  Clone ID: LIB3150-103-P2-K1-C2
atggatggactgtaacttggacagggtaaagtttgcaataccaactgtaacgtacccatctccatgcaacttcgttgcgcctacatgctggatgtctactgccaaccacgtacaggttttgtctacgctactttacaggggggggaggttattacaagcaatcgtggcgactcaaaaaatcgctcgtcacgtgcctgctaggcgaagttttcatgcgtagggtactgcccagggaggggtggttctgctgcctgcacgggaggcccgaattttaaggggtggttgaacattcaagctggtccatacttgcagaagccatattgttcatagtaagtgcacacacgattgtcaagttttgttagggaag

SEQ ID NO: 15372 - DNA, 393 bp, Zea mays
  Clone ID: LIB3150-103-P2-K1-C3
ccacgcagattgattgtattatgaatttaccttacactcgagcacagtacaaaacatagcaaatccagatctattgtttcggtaccagcctgaaaaggtacataaaagagctacggctataatgcttcgaaaggatgccattatcagcaggctaacatacttcactgcttccttgccgcgacaatgttgtcagcctctttcttcacaggctcttccttctctgacagaatcagctcaatgtggcaaggggaggacatgtaagggttaatgcgtccgtgagcacggtaggtgcggcgcctctgcttttgggctttggtcaactggatgtgtgaaacatataggttggccacgtccaagcctttcacataagcgttactctcaacattctttagc

SEQ ID NO: 15373 - DNA, 263 bp, Zea mays
  Clone ID: LIB3150-103-P2-K1-D10
aaacgaaaacttcttgtttaattgacaccttgaaggtcttatatatatagagaggacaacgcatcgagatgcatgggctttccagcatcgattaaagtatcagaaccttattgtagcatgcatgcatgcatctgccggttttggaagaaggtttttcctcacattgacagccccacacatgccgcgcagcaacgagtaccccgctatcactccactggagcatagacgacacatgttctgcttggtgtataaaccgagaatga

SEQ ID NO: 15374 - DNA, 437 bp, Zea mays
  Clone ID: LIB3150-103-P2-K1-D3
gcagtgaatattattcaacttttttactgcatcccaatggatgaacaacgttgcttgctgtttacatcataaagtttgccaaggcctcgcttgttatccagatgtcataatacgcggtcaagacgctcttacaacgcatacgccttcactacatatgaggccttctgcacctattataacactagtataattatcagggctgcacaggttgcattctccattcctgctccacttgcaaggatttttgaaacttcttcagctgggaaataaaccccccattaggagccacttgaggtcgtttacttctaactagtgacaaggcactttcgaggctcatttgatgcttcttcatgagatatgcaacaacgattgtcacactgaacattttgacaaagataattcagcaggaaaaaataataatgctatgcaatgacttc

SEQ ID NO: 15375 - DNA, 442 bp, Zea mays
  Clone ID: LIB3150-103-P2-K1-D5
gcaagaacattacttatttcttttgtgtcaatacattagaacaacatttgtgcaatatgctataacaatgagaagcgcatagtaaagaaattttccaaacacaaaataatctcccgtgccatggcttgcataagtccacggcaataacatctgctattggagcattcaagtggaccaacactcgcggtacaagcgttaaacaacttggtagttagcagtgagcaaacgagcccgctgagaaaacttgggagggttgccttccttcagaggaagaattccagtaaccttcagatcactgaaagtactcgatgcagaaaatccaacggagatggggaaaaacgatgatgggtcagctgggggaacaacaaattccatggaaccactgcgattcgactgatcgataaggagaatagaccattccaacacagagtttcttgagtcg

SEQ ID NO: 15376 - DNA, 411 bp, Zea mays
  unsure at all n locations
  Clone ID: LIB3150-103-P2-K1-D7
ggagcaaactgtttagtgttgattactgattgnggatgggatgagcacgctctttggacagatttcgctacatgattgnggccacaaggcaacctaacagaactctcttaagttacaactggctaagcactacagtgacttaggccctgtttggaaacacccagtttttaagaaactggtttatagaaattgaggtggttccaaacatactagtttatgactaagtttatagaaattagattctcagattcttaaaaaccaagaagctggcctctcctagctaaaatataaaaactggtttctaaaaaaccgggttgtttccaaacagggccttacaagaaaattcagttttcggtttaagggtccacagcttcttatttaaaacccaagaaaccaagcttcgtggccctt

SEQ ID NO: 15377 - DNA, 434 bp, Zea mays
  Clone ID: LIB3150-103-P2-K1-E10
cattaacccattagatagttgtgtttgcaaacaaatacaaggtatcaaacagtaggacaccaaaatatttgactggtctctatttccagcacccaaaaaaaacttggaacaagcacttgatggaagtagcatctcgctatgactgaacagaacaaaacaggctacaaagtttggctgcttcacttcttgtcttccttctctgcctcagctgccttcttctggcgggcaccgaggtgcttcttgttcatccgctcaaggcggagcttgccataggccgcaaacgccttcatctcatctgtgaccttcacaacctctacagagcgcttctcaccgcgagtaattggcatgtagtcaccctgtacctgggtagcagtggtaagctcctccagagtagagtcaccagccttgaccttgcgagcacgccttgggaagat

SEQ ID NO: 15378 - DNA, 427 bp, Zea mays
  Clone ID: LIB3150-103-P2-K1-E12
ccgattatataggaaggatccgagtacagaacagagttgctacactccgggtatgaaaactttcctcatgacaagtacagtgttcaccgaagagcgaagtacccctttcactcaaacataactgacttcctcacagacgactggaactaaacacaaacacacagatggggacactcatcaccacagatcgatcgatcgccaccaactttattctaacaacacggcagcagctgctgaccacaggtggctatgccttcaaagctccagatcatggtgatgaccagtgcagccacagaacagcacatttaccaggggacgatcttccagcgctggttgtcgccctcgcaccacttccagagcacgatgttggtgccgtcgcgcacgccgccgtggtccttgtcgccgtggaaggcgtctaatttgaggt

SEQ ID NO: 15379 - DNA, 425 bp, Zea mays
  Clone ID: LIB3150-103-P2-K1-E3
cgccacgagtaatcttatttattttcttggttcaagacaaaatcttagggccagatgaaaacacgttttctagacaactcaataagttcacgtcataagcaacctcatgtccagactcgcctagatacagaagtagcaaacaaactactcggcagcagcaacctcctgcccagcctcatcttcctcgacaggcctctcaagcttcacaccaacatcctttttgtagtcgccatgaacctccatgagtttcccaagatcgaacttgggggccttgagtatcttcaccttgcggatgaagacgttttgaagtgggaagatgctggaggtagacttctcaatctttttaccaataacttttggaatgaacttcgaaacaagttctttcaggtcacatgtagaagcccggttgatcataatctcaacca

SEQ ID NO: 15380 - DNA, 422 bp, Zea mays
  Clone ID: LIB3150-103-P2-K1-E4
acacaatccatattcaatttcattgttcagttaaaaaacgattcacagcagcgggtggatcatcttttatttgcttttaaacttaataaacaatgctacatccgtaacaaaaggaactcaagtaattgtggctgacacaaagtcggccatataaaatttgaagttctccgcactttggagataggcatccaatgttacatctcttagtttgtatttttgctgcaactctcccattggagcaatgaagttccatagcccacattggcacataattgcttgacctcaggtatgcctcagctggtgttgaaagcagtcttagagctgttgtgcttagatgcctgagtttagtttcgatcatttggtggtcccgtgtttctttacacaaagccacttttggaccatattctttctatagttgggca

SEQ ID NO: 15381 - DNA, 398 bp, Zea mays
  unsure at all n locations
  Clone ID: LIB3150-103-P2-K1-E6
actcactacaaannnattaatataaacaatataatgtctcactaaatggttttacaaatcataacttttgctatcgcaaccataaacctctatcacaagcataaatatctgtgcctcgtgaacctgcacgtctgcactattaacatattgaacaccataggtttcacaccatgtttggcctttggggtagtagaaggttgtagaacttgtctttcaagaagaagcttcggcctttgctgtcgacagactttttccatccgcaccatccgccatttacaatctttttgagatcgtcagtaccagtgtagtgcggatcaaggatatgaaatgcacaatcttcactggcttcgttttaattcaacttcctaaagggtgttagccatgacttcaccaccaat

SEQ ID NO: 15382 - DNA, 427 bp, Zea mays
  Clone ID: LIB3150-103-P2-K1-E9
agctaaacatgaatttattaatgtgcgataacaacaattcgtaaattactctggtctgacatagttcagggagaaataatcaagaacaagtcagatacagtgaaaagttcacaaagtaagtggagggcgagttcactgcaccatgggatcagggttcccagcagcaagaatatcaagcaacgagttctggggttccagctcgtcgtgccacaggggtagcttgtcgccagggtaaaagttcctcttcacgccatccgcatttattgtaactgtacggacaacccctccactagcaccatcacgggccatagcaagggaaactaccttcaccacaaatttctctgcctcttcctgactcattccctctttccattcatgatcaagaagagcatataggtaactggaacctgaacctccaattgcaaat

SEQ ID NO: 15383 - DNA, 402 bp, Zea mays
  unsure at all n locations
  Clone ID: LIB3150-103-P2-K1-F1
ttnnnnnnnnttaacacttatctttttttgcaagaatcatgtagcacagggcgccataaacataccacttaagtttaggtaacaccaaaccaccagtacggatacaacataattgggccctacaaatttcatgtttatagatctgggaatgctgcccacaagtttttagtatgtaactcgcataacctttttttacagctgttcccccaccgatggcaaactatgacgttcaccttttggctcgggagatcgttttaagtcaggtcatccttgtccaaggattcctcgccatcgtcagctttcttgatggcctgcagaacacctgttggtagctttcgtgcaagcctaattaccacatggtcaaggtgattgaaggcacttgattgagcaatgcgtttgatt

SEQ ID NO: 15384 - DNA, 434 bp, Zea mays
  Clone ID: LIB3150-103-P2-K1-F10
attcatgaattttgttttatttttcaacttcatggcactcagcatgatgaggactggcattatcctgaagaacataaacccaagcatgagggctagtccttgtaattttccaactagctattttctatagtactgaaccatgccatttctagagaatctttactgaattgcaatcagaaagtctcactacaataacagaaactaagggaaattgcataaggtaaaaggaataatgatgcatcatcaaaatcccagcaaaacaacaagctaacttagctcagttgcagagaaacttggaagcttcacagtgttggagatgtgcttgaatgttttctctcatcactttgccattaggatccacctgctcgcagttttctcgattatagccagtatcatgatgttcgggaagttgaacacttggaagcaatttatta

SEQ ID NO: 15385 - DNA, 332 bp, Zea mays
  Clone ID: LIB3150-103-P2-K1-F11
gggcccccaactagaaaaataaaaaagggggtaaggggggccaaaaggttaaaaaaatttattccagtttttgaaaggggagaaaaaacccccaaaaaagggttagggggtaaaaaaacaccttaaaaaatgggggggcctaattggggggtttttttttggggccaggcccacccctatggggcccccccggggggggggggccaaacccaaagggggtttttaatttgttttgaaccacgagggcccaaggatttaaacttgttaacagggttttaaacccccagttttttaaaagcgctctcctaaaaaacagggtgggaaagtttttg

SEQ ID NO: 15386 - DNA, 437 bp, Zea mays
  Clone ID: LIB3150-103-P2-K1-F12
atgattaaaactggttttcttcacagcaacaaatacatactttgggagaacatatgaccaataatttatgtattgtgttacaaaagatatataatatgaataaataaatatatcatataacagatatctatgatcgaggttttaaacagttgatgcatttatacaaaccatgacaaatatgatatttaatgatagataacaaaatagactggacacagtcatgaatcacattattacataaaatgggtgacgcgcgacaaaattccacgcctctttgaagggtaatatttttctgaaaaggctttccgacctgtaattatttaagaaaatggacccattgtttgaaccatatgccagtatttttccgccaagggaaaaggttcacttcacatggaaaccccacactccatgtctcttaaaccgcgtgtacttgttca

SEQ ID NO: 15387 - DNA, 445 bp, Zea mays
  Clone ID: LIB3150-103-P2-K1-F5
aatcatgacaaaggtaaatttaatatttctaatacttaacattgttcacgtccggtaccagattcccgagtaccaaattcctaggcaacaactttggcatcaaaactatggtttttgaagtacatacggagcagtctagttgagaccccaaagaaacatccagattcaacaaaataaaatggggatatccgggcgtcatatttatgcattttcggccatagggtactcaaagaccacatttttcccacacagcctgcggtagaccgtagtgtaggtgtccagcttgtattcggtgttgttcctctcctttgggtccaagaagatcttgatgatcttggcaccatccagacggtacctgacacgctttcccacaatctcagctgggaagacaacatccttcaggatgccatcatggacagcagtcagagtcctggtgcgagggcgc

SEQ ID NO: 15388 - DNA, 343 bp, Zea mays
  Clone ID: LIB3150-103-P2-K1-G11
aaaacctccggagggaaaaagggggggggggcctttggttttaagtcttaaaaaaccccaaccaaggtgttttcttccaaaagggaagggaacctcccagtttgtttttaaaacaaaaaaccaaactacttttcccctgggttgggggccctacaaggtttgttcggacccccaatgtgaagctggcaaaaaccctcaaaaatttctttggccttttaaggggccccctggggggcaatttaaccccaaagggtccggttggccataaggggcacccccacctaaaaaacctgggggccccaaaactttttaaacttttggggggggtaggcccgggccaatt

SEQ ID NO: 15389 - DNA, 440 bp, Zea mays
  Clone ID: LIB3150-103-P2-K1-G12
aacacaactagaatgcaattttttttgatatggcactacgtttttcagtcatctgataagttcagtatgatccctgttttccatgtaggcgtgatatttctcatacaacaatatgagcttaatcaattctaaggatttaaatggggcctagtaaagttccaagattgcgatcaaaagctgcatctgcaagtgctgtaggacaaagtattaacccgactagaatgttcacttcttgatatggcactcaacgtttttcagccatctgatcagttcagtgtgctccttgttttccatgtaggcgtgcaaaaatgcagcaaggtcatcattcactccaattttctccaggtagtcttgtacggcactttgcatttcctcatccaactcactgaattggcggccgacgtactgctgcactggggcaggcccgccgcggcggacgg

SEQ ID NO: 15390 - DNA, 404 bp, Zea mays
  unsure at all n locations
  Clone ID: LIB3150-103-P2-K1-G2
aatgatgacgnngcnggagacagcctaagaaggcacacaatggcaacacttccagcactggagcatatacttaattacaagctaccatgaattctgcaaacattacccatctttttacaaacacactctttcgccctatgggctatgacaagcattactacttgttagcttgcattggtcagcttctgggaactgcttgtcctgttcctttcttgctcaagcttaactgcttcagttcactcagtgccacctattggaagctccaaattctagtctagggcttcttcgaggctcagaatttggattttgggaattcgcttgagtgctcgggaaaaatgaaggccgattctggttctgtagatgcgcatagctgccatggacaattgacagaccatttgaattaa

SEQ ID NO: 15391 - DNA, 442 bp, Zea mays
  Clone ID: LIB3150-103-P2-K1-H11
gaaactaataattattaattaaataactaagagagagaaagagagaggggggggtgtgaattggagctgcactgcaggagaaaagggtggagcagtgcggagtggatggatctacgcatccaccagatccaatgcaggtagccatccctgtcctcctcataatttgtgcctcacctaccaataatactgcaccacctcacgctcactgacacctcctcttctctctcctctgtttccttgctcgtctcatcgggatccatggatggtcacaggaccggggccggccgtacgacggggctcgtgtctcatcagctagcaggagtagtgtagtaagtaggtaggtggctttgctactgaccttgctctgcctcccaatcggccggccggctggagggaacctcgtacacgtactacgcacgcctcccgtcgtgcgccttcactt

SEQ ID NO: 15392 - DNA, 384 bp, Zea mays
  Clone ID: LIB3150-103-P2-K1-H6
aataccaaaactaaaattcccatttatttttaatagcattacctaccattacaatgtatataataacagcgatcttaatttttgtttagaagcaggcatgtctacactcagccatcgtagagtagcgagcatgagttcgccccccaatgcagcagtagcacttgttatctttgcatggaggaaaccctacaacgcatcgtgctccgtttccttgcataattccttctttagctggagtagaaacactgacatcatctgtgacatgacccttcccatgtgcatgagcagcaaagtatccgaggagaagtaacgagaaaaacactagcgcatccaccctctttctgtactccatgtcgcaagacaatttaattaactcctcacgat

SEQ ID NO: 15393 - DNA, 148 bp, Zea mays
  Clone ID: LIB3150-104-P2-K1-B10
ggcccaagccatccattattctttcagccctacacaggcacaagccggggaacaattcaaggcaggttttcaaaacacatgacgcaccacaggtgacaacacacacagcgctctcacacagggccacaccacacacaaaggggggggg

SEQ ID NO: 15394 - DNA, 383 bp, Zea mays
  Clone ID: LIB3150-104-P2-K1-B11
ctacatgcggccgaaagtttctctcacttgataacatcaagacaggcacgggtaaaaaaacatgacttcagaaaatgggaccacagcacaatacaagctcacttatgaagatccacataccattgataaaatgggcctactatcctctcaatggatcgtccaaatacagtcccaggtgtacgtactgctagctagttataattgacgggtgatagatgcaagcatcgaaagcagtaagagatggagctgtttggcagacaaaaacacttgagtggcagcaaagtcccaacaccacatgacggtgcccaggaactagtggccatatttctggaactcccactcactgttatctaatgggcacacttggcgagtcttaagccacc

SEQ ID NO: 15395 - DNA, 419 bp, Zea mays
  Clone ID: LIB3150-104-P2-K1-C12
agccaataatgattctttcattcagtaggagaaaggagatgagatcgcatacataggtgattcagagtacagacataagacatgatcagaaattcataatgcagcagcctatgaccaggcccttctcttgagtcagtcacccccacttcctcgcgcaagcaggctgacaaatgttggaacactagccacacagtggctggctgtctaacgcaaacaccactcgagagtcgagaagaccgcgatgcatcgcaccctgcctcttttatttggggatcgccgcagccagcagaattattattagggtaccagctagtagtttctttcgttcgttcaccaagggaggatctttcagcgctggttgtcgccctcgcaccacttccagagcacgatctcggtaccgtcatggacgccgccgtgag

SEQ ID NO: 15396 - DNA, 393 bp, Zea mays
  Clone ID: LIB3150-104-P2-K1-C3
cgtaaagcaataatttgcaaccggctggaaattcatacaacctcttacgaccttgtggcaatatgacagttttgcactacatcaatctcatatcagcaggccagtttaatctactccctacttttgctagattccaaagaatctaatatttgatgcatagtacatgaacaataaaaatagcacaatttctgtcaaacaagatactcgttaaacaaaatttaatgagctttgaagcaactcttgtttgttccattgtcaccgcatcttgtagaactgtgttcttgatacctgacacctatgcccatttatggagtacttgagcttaatgtcgatatctcgagggttactcttattgggtgtgactgtcatggaaccactcaagcttttcccctg

SEQ ID NO: 15397 - DNA, 420 bp, Zea mays
  Clone ID: LIB3150-104-P2-K1-C8
agtcgcagaacactttaatttttttttgaacaaaagataagtacttccatgcataacgatgttcagcacgtgataagcaggttcacacaaggcactgtaataccccatacacttaaaattcatgttgcacaaagcaaaataagataggctaaaccaaaacgtctggattcgcattccaactgtagattggacttaagcaacggcctcgaggaaagccttcccaggagcacgcttctcaagtcttccatggttaccgagcagctttgcgttgacaccatcaggaacaattctaccctcactcttgtacttcaggtagtcggcacggctgaacttggtgaagccccactttctgctctcaataatcttttggcggccagggaacttgaacttggcgcgacgcagagcttcactggcatgtgc

SEQ ID NO: 15398 - DNA, 393 bp, Zea mays
  Clone ID: LIB3150-104-P2-K1-D12
ataaaaacagtacaagtgattctgttcgattaattcagaaatcaaaacgcgcataacatctcagtatttgactctcaagtttcaataaccccactttattttttttcctttattacaaggtaaaaacaccacttcgaggaatactaactactttcgaaaagaagcgagtaagctcacaatgagtccaattgtttctgcatcaacaccgacgcatttaccatagggcaaataagtaacagattatctagtggccctccagggggcttctcacttggaatccatctcagcctgggtcccaccgatagtactcccgtgcttcgaagggtttctcagataaggcgagtctttgtacttggcatacattggcaggtccagtgtcttctctgctactct

SEQ ID NO: 15399 - DNA, 412 bp, Zea mays
  Clone ID: LIB3150-104-P2-K1-D4
caaactggtccttctcccacggaccagtaatctgttggggacacgaaaataatcgttttgaaaccaaccaggttttaacagcagacagtagtttcactagaaggggacaccacatcactttcttatgtaggttaacataggacaggacgcatgactgacgggaagataacacggaatgaacaccctcaacacaaggaacgccccctggccaaaccagcactggttgctaagttcaggcctttcacttcttcagatgggggaagcactggtacacgtctgtcttgggatgcttggcctcggcgtgctccctgcacttcacttcagtcggggtacacatgaatgtttgcatgcacactttgcactggatgctcatggccttcttgttggtctcgagctggctccccttggcccc

SEQ ID NO: 15400 - DNA, 362 bp, Zea mays
  Clone ID: LIB3150-104-P2-K1-D5
gggatacaatggtcaatcagccatccacactctaatggagccaatttgcaaatcgttctggcccaaaatccatgcaattcctgactcaatttattccggcccacgcatgacaaaaatagttttttctcctcgtcactctaacgtgcctgttccatgcctagtaaaattgtttttcactagaaagtattattacatggtgaaagaaccctatggtgccgctgcagcagctgctgctggagccttcttgggcttctccacaacgattgcctgggtaggcagcaccattccagccacggaggcggcgttctgcagggcgcaccttgtcactttggcaggggcgatcacaccaaccttcaccaggt

SEQ ID NO: 15401 - DNA, 338 bp, Zea mays
  Clone ID: LIB3150-104-P2-K1-D9
agcaaaataatgggcaacatttattaattagtcatctaaccgggataactgtgagcaaatgaacagattggatcatactcaagatatcaaccaaacagttttggggaacagcaacaagcctggctaccgccgcatcctcggtgtctagatcacaggaaccattctggtttgtgcccccatacaaccagccaactcggttcattcatggtgtcctaagcaatctatgcaacacaattacaggcctcaaaaagcggcattctcccttgtgtcgaccagcttcagccacgaccacggcccccacctttgttaccacctttgggaccaacttcaaccctttc

SEQ ID NO: 15402 - DNA, 383 bp, Zea mays
  Clone ID: LIB3150-104-P2-K1-E10
acatggaacgtcgggaaccgtttttattcatgtaggagtatcacaaaacaatgttcgtgctcaaccagtaacgagtagataataaggagacgacatcaaatatcttccaaaattcaaaccaggacaacaaattgtgctactaatctcggtacagagtgatgactaattactgtcgactgatcaaacacaacggttgcactatgctgatggcaacacggagggccacaatttgttttaaaccttgaatccacggctgttcctcctgccacgagccttctcgaacttccttcccttggagcgcacatacggcttggtgtggctgtgcggcactccaggagccttgccaaagtgcctcactgtctcacgggcattcttggggcccc

SEQ ID NO: 15403 - DNA, 399 bp, Zea mays
  Clone ID: LIB3150-104-P2-K1-E11
ggaacgaaaacttatttattttttgtaagttcaacacaggccgcagctattgggaccacttcgtaagatcacttatctcacaaacaaccttcagagttcaggcacttgacacctcaccaaaccaaacctcgaacactaaccaatttaatccacctcctcgatcttgggaccagcaccgctcccaccagacggggcatcctcatccatgccagcagcagcgcccatgcccgcgccctcgccctggtacatcttcgcgatgatggggttgcagatcccctcaagctccttcatcttgtcttcgaactcctccacctcagccagctggttgctgtccagccagctgatggcgccgtcaacggcatcttcgatcttcttcttgtcctcagccgggagcttgga

SEQ ID NO: 15404 - DNA, 424 bp, Zea mays
  Clone ID: LIB3150-104-P2-K1-E4
gggaatgattggtgatgctcctggctccttattactacctccattcttaaatatttgtcatccactagtttaattttgaactaaaatacaacagcttcaacttatgctggcaatggcctcccagaatctgggaggcaatgcgaactattcccaatcggtaggaagctagtcgggtcaaccaagaatgttttgtttcatgcactcaagctatggtttcctggctccgtgtagttcacctctagctgctcaatcttctccaacttaaatccgcggatcctgatctcttccttctccgaggcgtccttgtagtcgacatgctggatagtccagcctttattctgtatatgaccggtaaggttaacctctgcttcatccgcggcgttgacaacaagagtgccgtccaacgagaggccttcaaggaagg

SEQ ID NO: 15405 - DNA, 407 bp, Zea mays
  Clone ID: LIB3150-104-P2-K1-G4
gggcacccaaattgctatattagatttctgaaatcagggaatcacgtttcaaccacaatgcacagatctactaaccagttccaataacaacgacgacactacagaagtaaagatctactgaacacgagcattcaacatcacagcggtaaaggcgcccctctatgccttcttgggggacttagcggccttcttgggcgacttggcctccttggccgccgccttctcagcggtcttcttgggcaggagcaccgggttgatgttggggaggacgccgccgtgggcgatggtgacgccggacagcagcttgccgagctcctcgtcgttgcggatggccaggagcacgtggcgcgggatgatgcgggtcttcttgttgtccttggcagcgttgccggccagctccagcacct

SEQ ID NO: 15406 - DNA, 425 bp, Zea mays
  Clone ID: LIB3150-104-P2-K1-G8
aaccaaagatagccacttgctatacaccattatttgttccgtttaaaccggggcacagaaatgtaacgtcggacaaaatttaaatatgacaacagcagacaacacaacgctcggtgacagcagcagctgggcgcccttcacttcccaccaaggcttgggaactgagcttgatcttcaatggatggagcagcagcagctgggccacgactgtatccccctccgtatccgcctctaaaaccaccacgatccccacggcccccccttccacggccacggccgccgtagtacctttctccttcagcaggtttcaggaactcgttgatgctcaccgacttcttggcacgctcatcacgctcagcattttccttcttcttatccttgtcagaacccaacttaatgaaaacttcatcattttctttcttggt

SEQ ID NO: 15407 - DNA, 411 bp, Zea mays
  unsure at all n locations
  Clone ID: LIB3150-104-P2-K1-H10
aaaacagaacaaaatttttatcagacctatcacgaaaacatgtaacacagcaacggcatatcttagcaaatttatctctgagagccccaggactaaacacgaaatattcatggtaatacgaaaacagagatggagtgtgtccgatacaacaaatcgacagctaaagcaggactattcgggaggccgagcatctagaagcggagcttggtaaagaaccacctgttcttgccggtcttgaacctctcctcaaggcgcgctttggccgtcttgcaggcggcgaccttcttgtcgtgggtagagagtgcgtcgggcccaccggtggcgacatccttgaaatcgacgtcnagggtgtagcgggtgggcatgaagtgagtgaagttgacgagcttgatgaagcacttgacgcgcgac

SEQ ID NO: 15408 - DNA, 338 bp, Zea mays
  Clone ID: LIB3150-104-P2-K1-H12
atagacctcgccaaccctgtgattgaacgacgaagcgttaacagcgattgcacaggtctgaccctgcgaaatccatgtgttgctgtatgcattgctataatgagacatcttgcaggtgttacccctggagtgggaccaactctccctgtacccaccaaaccagctctaatcagaaagtcatcttctgcctcatccatttcgtcgcggaccatttctctcctttcagaacagggcacccgctgtggatactgtttgggtctgtgttaccatccaatcccatgctccaaaagagaacagcgtcccctttgtttggcttaacacacaatcctttgaccacg

SEQ ID NO: 15409 - DNA, 371 bp, Zea mays
  Clone ID: LIB3150-104-P2-K1-H4
ccttaggatttaacttagaatatagctggtcgggggtaacagcacccatcgagccggagtccatgctggttgatgcatgggtctgctggagccgaggatgaacacagcactaacaactgacacagagcgaccttcaatcaaaaacacagatgggcaacaacaaacacgagacgaacgaagataaacactctggactagggtaaacaacacggtagcgaacaggataacttggccgcgcgggccccaccgctcagttcctccagttcccgtcggagttgccgtagccgccgccacggttgccaccgccgtagccgccgccaccaccaccgtagccgtcggcgccaccaccgtagccgccgtcaccgccgtag

SEQ ID NO: 15410 - DNA, 320 bp, Zea mays
  unsure at all n locations
  Clone ID: LIB3150-104-P2-K1-H6
ggacgttcgcgtgcatgcgaccaacaccatctatgggagagggtcacctaaaaacaatttatctcaccgccgaaccacaacannnncaactgggaaaacactcacggctcccaagagacataccgcaggtgatacccctggagtgggaccaactctccctgtacccaccaaaccagctctaatcagaaagtcatcttctgcctcatccatttcgtcgcggaccatttctctcctttcagaacagggcacccgctgtggatactgtttgggtctgtgttaccatccaatcccatgctccagaagagaacagcgtccccttt

SEQ ID NO: 15411 - DNA, 248 bp, Zea mays
  Clone ID: LIB3150-105-P2-K1-A11
aacgacggtttttttcttcttagaaacagaaataaaaacatgattttatttatcacagattttcaacggtcaacgcacaacagaaagggcgcaccacgcacgggcctgcactacaacattagaaacagaaacaaaaacatgatttcatttatcacagattttcaatctgcgtcctgcgctgcgctgcgctgcctgcatcaatgccaaaccaaaatgcatgctgttcctcgagactccaagtctgttcc

SEQ ID NO: 15412 - DNA, 258 bp, Zea mays
  unsure at all n locations
  Clone ID: LIB3150-105-P2-K1-B2
gggggggtttttttggggtttttttgtttnttttttttnngnnttgnngggggggaggggttgggggggccgcccggtttggttaaggtgggaagggggttcccggggcccttttggggttttgggggttnggcgcggttcaagggagggggggggcaaataaaaaaaaaaaaattttaaggggaatttaagggaggggggcttttaaagggggggagggtttttaaagttgggggggttttgggagagaagaacccc

SEQ ID NO: 15413 - DNA, 303 bp, Zea mays
  Clone ID: LIB3150-105-P2-K1-B6
ctgattcacagtccaaactttattctacgctggacaagacgcattaccgcaatgtcaatgttccaaaccctaaaacgaaatcgcttgggagaatatgctgttgccttaactcatccacctaccagacaaacagaaaattttgatcgatcataagacagatgacaaccacaaccacaattatgccgcaacatccgcagaatcatcgggcctgtccatgtccatttgctcaccggaggcctgctgcacaccttcctcactacccggttcaccagctgcaccaagcccgctttgatgttgatctgg

SEQ ID NO: 15414 - DNA, 279 bp, Zea mays
  unsure at all n locations
  Clone ID: LIB3150-105-P2-K1-B7
aaaagcannagagnccacaagggccattaccagggaaatgtacattactcagcgaaacagcagctgagtttcgatacgacgcgaggccaagcataaaccccaatccaaatccggccccaacactgcccccaacaaacaaacccaagctaaattattcactggatgcaatacgccaaggacatgcacgagctcacggattacagaaccaaatgaggcgcaaactttggtgcccaaatgaccaaaacagaacatgacgaacttttagaagccctgctcgat

SEQ ID NO: 15415 - DNA, 299 bp, Zea mays
  unsure at all n locations
  Clone ID: LIB3150-105-P2-K1-C12
gtcacttgtatgatgatttttttttggcaacaagcttatngagtangctgtgcttctcatacacagcacggaaatgtactgatcaggttttgctgctctgaagaaaatctagaggcagtccaaattatacaccaaaacctcccaagaaaacaagcaacggtggcgaaactcgtagcaagtaaaaaaaagggagggaactaagaagttgtttgctgaagattagctcgaagggtgcaaatctcacttcttcagcaatgtcgcactgcattgggccataatcttcgaagctcgagggattg

SEQ ID NO: 15416 - DNA, 270 bp, Zea mays
  unsure at all n locations
  Clone ID: LIB3150-105-P2-K1-C2
atagcaagcattatatgctatttaggcgttcttaaaatatactggatctcaaaacttagtttacaggtgctgcgatctcatgagtgctgaatagatggggcccaaggnacaaaannnaaaaaaaaaaggcttcaattttttaagggggagaaactagctaacatattcgaccttgaatttgctagctccacaatcaagtcaagtgctgtttcaaatgaaagttgggcggttcttagttttggggataccaatcccccaaagactgataat

SEQ ID NO: 15417 - DNA, 201 bp, Zea mays
  unsure at all n locations
  Clone ID: LIB3150-105-P2-K1-D10
aaaagctaanggattacgagcggaacttatagtccaaaaaaatatttcaatacaaaacataaataatccaaatttaaaacattggtgccggaaacgttttgagaggcaaggctgcctgaaaagggacataaaaaagctacggctataatacttcgacaaaaaggcctcgatcaacatgctgatataattcaatggttcctt

SEQ ID NO: 15418 - DNA, 471 bp, Zea mays
  unsure at all n locations
  Clone ID: LIB3150-105-P2-K1-D12
gggaagttaatttgttttttttaacaacttcagagacaaaagggacatatntagcaagcctcaaaataagtttgccagacacggataccatatatgcatatggaacgatgaaaaggcgttgaactgaaattgatcaaacaaatgttaaatcatcatgggaggattatgaaacccatcatgaaaactccgagtgctgtctgtcaagggcagcgcatttaatatctgtgggaaagcttatcctgctccttgtaccacatggcgtatctgcatagaagcattgaaacgaatcagaatcatcgctgccaatcatatgaattctgcaaccccctaatctaacgaggaagatcagttgttcacgattttggcctacaacaaaaggaaattcaatgaatcaagctgcatttttagaattgagtataatttatttgggcaaccaaatagaacaggataaacacagatatggtcaaccat

SEQ ID NO: 15419 - DNA, 393 bp, Zea mays
  unsure at all n locations
  Clone ID: LIB3150-105-P2-K1-D2
gcattgtaatcacttaccatatttttctttaccgntaataattngatgtagtagttgtaatgtaatcatgttaatagaaaaaaaancggattcttactagctactatcgctttcacacctctgctgtaacatcttcagtttatcgttatctgacagtggtactccctcaaaccttctataatggggaagcttagacagtctgctctttgataaacccctcaaaaaacatttaattcatgtaacacagaaacattggggtttcttttgctcccggaccaggtagaatgctgcgctaatcaattcaaccgaaaaagtggaccaagctgttggcccacctgatggcccagggctgcatcatgcttccacctctcactactaggcggctaggcccta

SEQ ID NO: 15420 - DNA, 410 bp, Zea mays
  unsure at all n locations
  Clone ID: LIB3150-105-P2-K1-D3
aagagtcaaggatgactttatttaataccaccatncggncatacatagggngaaacaaaanactaataaagagaaagactcagcgccagcagcgtcttcctcttcatactaatgaacccccacagcagcacattaccacaaggcctaggcagctacaaaaattccaaaacatggcataaaggagaaaaaatcacaaattggccatgaccacgacttcaacatagaaaccccaccgtccttatcaccccctctcccacggtatttcgacaaaaccaagccttaccaggttcctcaccacccttttttgttttgttttttcttgaaattgatcacagaaggtcagcaacattggcaggcagatcctcaatcaacacgttgtagaacttctgaatgtcaaaaaacatacgttc

SEQ ID NO: 15421 - DNA, 398 bp, Zea mays
  Clone ID: LIB3150-105-P2-K1-E10
aaccaaacaaaaaagccagattatttgctgcgctagggagatcaaactagcatgttttcaagcaacagcacacagagtgcgacaagggcacggaaataattcacatggtggtgatcttgcgacaacagcacccacagagtgctagcagactaaacatcagggctgagaacacaaattaaaccaaaaaaaaccctggcgaggtgggtggtcttgcgttgacacggaggaggatacgagaccagagagctgttttgcccacgggtgaggtttacaacgtgttggcctgagccttgttgaggatgaccccttcgtacttgacctggaaccacttaatggaagactacttggtcaccctgggctgaatcccgacgcgggacttgcaacttctggggcgcgcc

SEQ ID NO: 15422 - DNA, 250 bp, Zea mays
  unsure at all n locations
  Clone ID: LIB3150-105-P2-K1-E11
gggcttaatacaagaattttttttctatnatataaaacataacatagctagggtctaccaagctggttaaacacagacacaggagacaaccatgacaaccaggaaaagcacgagttccggaaaatcatcttattacataaaatgtatgccagatgggccaatattttcagagttacaactacatgagataagttctgaacaaatcccgacaactttaaccagcaggagccctagatcaggacttgacgct

SEQ ID NO: 15423 - DNA, 371 bp, Zea mays
  unsure at all n locations
  Clone ID: LIB3150-105-P2-K1-E4
catggcgactattccaatccattttctttctcaaaagnngcaacaagtccaaggagaaaaagatgatccagacaatgataactcaagagagagtccaccctagaacaacttaaatcgtgcaaggcacaactcctgctcaagtccaagactcatgatcctttctactcaatcagatcatcatcgtcatcaggaagaggttgtgcagctgctgcagcaagctcggcttcatgctgctgctgcatagccatgtcgatgggaacttccggaggcttaagagcaacagcttcaacaaagtgaaggttcggatcaccaaccagcttccttgcaaggtacaggaaaggtttctcaaagttgtagttgctcttggcaga

SEQ ID NO: 15424 - DNA, 233 bp, Zea mays
  unsure at all n locations
  Clone ID: LIB3150-105-P2-K1-E7
anacccaacnaaaccancanngggagcgagataacacaggattaccacaaacatagnncgcnncaannncnccaggggacaccgaaaacagagnncaaggagccnngaacaaagggagcaaaannaaacgaggcaacaaaaaaaccaaanaccancagagcangcangaggnaggnnccacagaagcagaacaacaagnnngaagngcccaacgggagcggcggagggaaagg

SEQ ID NO: 15425 - DNA, 284 bp, Zea mays
  unsure at all n locations
  Clone ID: LIB3150-105-P2-K1-E9
aaannnccncaanngccattaaaggcgccaacagagnacattgtttttccattcagagatcagnncacacacacgcacagagacagagaggggggagctttattttgtttcggtctacacaatggtactcagccactgtaacagttcagtcacggtactcagccatgaacgcctcatggaaagccttgaagcgggtgatcaccgcggggattttgtcttcctgcggcaggaacgagcatctgacgtgccatgttccaggaacttgggcaaatccagatccagga

SEQ ID NO: 15426 - DNA, 176 bp, Zea mays
  unsure at all n locations
  Clone ID: LIB3150-105-P2-K1-F10
gcaaccannnagcagaacagaacaggagatattagacatataatgagttcttcatancccaganacactccacattaagttcaactcccatcgaagctcaaagcagtttataagtaacaaaaaactcctagcacataaacattgatagcaaaaactagagcgataaggagtaatag

SEQ ID NO: 15427 - DNA, 356 bp, Zea mays
  unsure at all n locations
  Clone ID: LIB3150-105-P2-K1-F12
gggcggactagcgatttatttatttattcaacctcatcacaatctgntccttgctactgtcacttgtgataattaactaaaaaacacccaccgaccgcggtgtaattgtgtacataacctcaatgggatacacagacatgccgccgcagagcaaaacacgtcgcagatcccctctctctctaactccgtccctctctctctctccctctggtcccgcaaaaactaggcgttggaggcacgttagcgccaggttttcctcccatgcttacgcagccacagccgtccacaccttggatgctcacagctcgtccttgacgggctcggcggcggctgccttctcggatgccggtggcgcc

SEQ ID NO: 15428 - DNA, 203 bp, Zea mays
  unsure at all n locations
  Clone ID: LIB3150-105-P2-K1-F4
ggtagtgtctttcacttccactgtaagtggaaagagagancanaancacccacgacgggggaaacacaaaaggaagcacaaggaagggagcacagacggcngggaagcncaaaagaaangacagncaacaaaaccaagacgcacgaccccaanacacnggaagaccagaagagaacgccacacaggagggcgagagagagaca

SEQ ID NO: 15429 - DNA, 435 bp, Zea mays
  Clone ID: LIB3150-105-P2-K1-F9
agtaccaagttatagtcatcaactgttatttaagcaccattaaacacttgccatgtaattaggagtaaagactgagcagtgacggtcatccatatataattggccatgctgataacaggatggaccacaacatcgattaagcataggatttgacattgagtattacacaacatacccgaaaacacacggaattattcaacaacataaaacattattaagctttccaaagcatcgattgttccatctagaacgcggtcatccttgtagtagccacaaagtgctttattaatttgcactgaaatttcacttcattgtggccagacgattgatgaacacattgaaggcttggtctgtgtcaaccatactaactctgacagcccttgcatccactccaaaccttgtgccaccttgagtgataatctttttctcgagtag

SEQ ID NO: 15430 - DNA, 219 bp, Zea mays
  unsure at all n locations
  Clone ID: LIB3150-105-P2-K1-G1
aaacgtcaagcatggattattttaactaaaacnggancacgnnnggggacatgnnccgaacaagttacatgncggatannacngcnaaaancaacccagggcactccaagagnaaaancngcaggacgcagaaaacaganncacaggacnngagcagacaaaaaagcacangcancccgcccggaaaggagggcaccacaggngcacggaaaanggcac

SEQ ID NO: 15431 - DNA, 383 bp, Zea mays
  unsure at all n locations
  Clone ID: LIB3150-105-P2-K1-G11
ggatgngncatgngatcttacaactaaagcagctcttctcataattcaatagtcaatacactagtcataacacaaattacacgatacttatgcctccaaatacaaatacatgtaaccaaatggcagccaaaagaccaatcgttaaggtatctcaatatacatacagtagcggcgctaaccaacaatcgttcccaggaaaagcgatttactcctaccaagcggcctcatcagttcttgcagataaaaattgacctacccagggtgattggttactctttaatggtcaccgcaaggtgtcttacttagtaaataactgcgaccaaaaacccgcctcggggaagagcagctgttgcagaaaaggtccatgtcttcattagttcgag

SEQ ID NO: 15432 - DNA, 212 bp, Zea mays
  unsure at all n locations
  Clone ID: LIB3150-105-P2-K1-G12
cttgagaattatttttattnncgagnnncagaccaaaagtggggtaaatcagaaagggtgtgctaagaaaaaaaaagatgcagaaaaaaaaggatacaagcgttcgaccgttcaagagaaacaaacgtaaccaaatattggggtaaacagcaacagcaaatacaatgtaaaataaaaaaaatcaagctatttaaaaaacagggccaagaata

SEQ ID NO: 15433 - DNA, 368 bp, Zea mays
  unsure at all n locations
  Clone ID: LIB3150-105-P2-K1-G3
agaccagcacgcacaaatgtattatttaatgaagaacctttaacaagataccagaggaacccgatccgatgatttggaaatagaacagccaaataaactaagcgactgactcgactcgactcaaacatacgatgaatcacactttgcctcgactcgactcggattcgcatgacgaattacacttcgccatctcactggcggcaacaaacaatcctgattaattgaaaaaacagacaaaccaatgcaatgcatttttattgttgcgcggtgcctcgacaccaagaaacgccccccttctctcgtccacgcatggatcacaccttgatgccgaagctgaggaggaactttgtcaagccagccttncagcc

SEQ ID NO: 15434 - DNA, 243 bp, Zea mays
  unsure at all n locations
  Clone ID: LIB3150-105-P2-K1-G8
agaaccaagagtgcttaaagcgactttactttaatnacaaangcaaanactagagcgagggagcaagngaggatggtaggaaacacccaaacattacccaggacacaaacaaaggtttttcaacaccacaacctggctcgacagccaaacagattcatgcaagcagatcaggattcctcctcctcgttgccgacatcactgccgccctctgcggcgacctcctgngagaccttcaacagggcg

SEQ ID NO: 15435 - DNA, 433 bp, Zea mays
  Clone ID: LIB3150-105-P2-K1-H10
aaacgggaatttcagttttttttgcattatcatgaatctcagaacataacaggtgaaacacgaatcaagcagaggcgccatggggttcacagatccacacctaaaccgctaaattaaactgcgagcgatacatgataaactaagaccaccactcagatcaccaccatcttattcagatccaaaggaacggacgcagggggagtcgacgatgacggagggagggcggccgaacagaccagatcagagagatctaggagagctgtccgcagtcagcgaccttgaccaccttggaggtggagccgttgcgggtgcccaccttctcgatggccttgacgacgtccatgccctcgacgacctggccgaagacgacgtgcttgccgtcgagccaaggggtcgcgacggtgcagatgaagaactgggagcccgtggtgtt

SEQ ID NO: 15436 - DNA, 372 bp, Zea mays
  unsure at all n locations
  Clone ID: LIB3150-105-P2-K1-H9
gcgataataggatgcttcatttcttttattctagaaatagtactcaatttttccacaactgaatgtaatataacaccatcagatgcagcgaagaaacaagaaaaaagctggtggcagtaattccaaaaatcagaattattcttggcttgtagcaccgtttgtcgcctcctccatgggatctgcttctgctgcatctactttcttgcctttcttcttcttcccaccacccttcttctttgatttcgtccccaaagcaagccatgcctttatctctgcattgtcttcaatggatttggtgggctttaactcctgtagaggatgtgatgttatcttatctgatccattgggcatcagcagcacagngaactttat

SEQ ID NO: 15437 - DNA, 393 bp, Zea mays
  Clone ID: LIB3150-106-P2-K1-A9
aaccttccgacaaggtatttattttattgcacaagctaaaactgtaccatctttacatataacgagccacatcaaattatttgccaaagtaaaaaccttccaacaaaagatggaacggtaagggtcatgactcattgtaagaaaaataacataggctgaccacccaagtaagccacgtcagtcgaacctgcctatcattattggcagatttgtggattctgagcaagaaaagaaataaaacaaattctgaagaagaaaaaaacctctgtcgcagcaagcgatgtgcagtgctgaggccttgatatacagacgccgaaagaggcaaattttatctttgtccttgcacaccgtaaacatggtacaccggcagattgatcttagtaacggagcatg

SEQ ID NO: 15438 - DNA, 312 bp, Zea mays
  unsure at all n locations
  Clone ID: LIB3150-106-P2-K1-B12
ggccgctgacctggaaggcctcttcaacgtcccgttgcaatattctattcgttgagaggacaagcgcctggaggaccaccttgccgatgtgcaggaagtctacgcacaacaggccaggggtcctagcacggatgcaaagcaactcnttccacttccggggccgccgccgccttaaggggaagcgtaatctggtggtggccattcccgaccaggtcaactgttctaccgggcggatacacattgaaacgggttgcttctacctggcacaactaggggaaggagaactggtgcttaggctgtcactagagatgc

SEQ ID NO: 15439 - DNA, 193 bp, Zea mays
  Clone ID: LIB3150-106-P2-K1-C3
agcacgaggggcacataccccttcccaacactatggaaatagttcaacatcacctctgaaacaccacctttttacaatgccccacttgcatacaggcgagtccactccttcgctgtctcaaaagcttcagcttcatttgatttccagagtttcgcaatgttgtctgagagaggatcaatctgaatttggggca

SEQ ID NO: 15440 - DNA, 408 bp, Zea mays
  Clone ID: LIB3150-106-P2-K1-C4
gaaacaagttcaagatacttgttttacaatcaagtacatgagccagatgtcacatggcagataattctgtctcgggtacaaatcacaagccagtgagcccaccaggcatgttaagcagatccactggaagcattgccgtagggttcttttatcttctcctcaaaccaacacttgatctgagtcaggggataaaaggctttacctgccggatacacaatgcaacgggttccttctacctgccacgtctaggggaaggagaactgctgcttcggctgtcactagagatgcttcttcctctgggaggccttctagggctgcgactccttgatacccttcttggcccctttcttgggcggtggagtaggtgatcgagaatatgatgagcctgacctaccacgcctcaagaga

SEQ ID NO: 15441 - DNA, 376 bp, Zea mays
  Clone ID: LIB3150-106-P2-K1-D12
agtagctcaccatgaacatgatacctttttcacgggtacaacaaaataacatggagcagagcttaactaacaccaatcacgcattgcagttcaaacaaggaacatgccattccgggctctcattttttccctgacactaggatggaactaacagtttaaagtttataaaacgattatatttttgccaaaaagaatcgagatgatcagatggataaaaaatcctgctgaaacttttggagaacagttccaacgaacacggattttactgctgggcacattgcacccttggttgagcatcctcctcctcgtcttcatcgtaggcttcctgcttcttctgctgctgcctgcgcctcatctcctcttcaatgttgacatc

SEQ ID NO: 15442 - DNA, 336 bp, Zea mays
  Clone ID: LIB3150-106-P2-K1-D2
gagttcattcatacttactttaatcatggaagcaatgaataaaaacccaggcggtaggtacacacactgctgagctcctctgcaaaacaacaaggaagcagcgaccaaagcatgctatgctgctgtcaaggccttccatggtacaaaatctcatacgaactgaaccagcagcagtcaagcgaccattcattcatcatctaaatatataagtcagcccagccagtcgtatatccagatacaacaaccccggcaacggcagggcgctcctccacgcatgcatgcattcgcgagcgacgtcggtgcgcctcaagccatggcgatgcagacagcaacaca

SEQ ID NO: 15443 - DNA, 418 bp, Zea mays
  Clone ID: LIB3150-106-P2-K1-D3
cttcttcttcttctcactcttctccctttcttctgcttcaggggcttcctcaacggggagcttcttcgcaggatctgttgcatcagtatcctcagcatcatccttctgcctcttttttttcttctccttgacctcttcagtcacagctgtgtccggctccaccttcaccttctctggctcaggagcagctgcaatgctggcaattgaaacatcaccaccagtgggaagcaccacattccgaagccactcagttggtgtcttctcatttggcttcccatgcttgtcaagttgacccttagcaaccagttttttcttcttgagtgccaccggtccaagtccccatttccttgggtatgtattctctgtccatcacttaccctcttgatctttgaaacctgcacctgagttacagtgtcgc

SEQ ID NO: 15444 - DNA, 69 bp, Zea mays
  unsure at all n locations
  Clone ID: LIB3150-106-P2-K1-E10
gccgcccttttttttttcttagaggaccaagcntctacttgttcatgcgacgcaagcncggggaagggt

SEQ ID NO: 15445 - DNA, 385 bp, Zea mays
  Clone ID: LIB3150-106-P2-K1-F3
aaggagacgacatcatttatcttccaaaattcaaaccaggacaacaaattgtgctactaatctcggtacagagtgatgactaattactgtcgactgatcaaacacaacggttgcactatgctgatggcaacacggagggccacaatttgttttaaaccttgaatccacgggtgttcctcctgccacgagccttctcgaacttccttcccttggagcgcacatacggcttggtgtggctgtgcggcactccaggagccttgccaaagtgcctcactgcctcacgggcattcttggggcccctcaagaggaccgtgttctcgccaagtggagcacgaagagcaagctggtcaaatgtgaggcactcgccaccagcattgacaatcct

SEQ ID NO: 15446 - DNA, 432 bp, Zea mays
  Clone ID: LIB3150-106-P2-K1-G2
acaagtactaagacaacagcatttctctgttggcctttatttatacctacacaatgttcagttctctcaagtctcaacccaacatcagaaaccacctaccaggaattcaactgctacacttgttctgaacaagataatcttgtgaatagctgttatgtcgctgaataacaaaaacagacttcaacatggtaaacaaaaggatagtgaaacccacacgacccttgtctgtttgggcttcacatgcgttggagtgatgcaatctcctcttatagactgcatccagcctgacggatatatatccgcaaaggaatacactgtttacattgatgtgatggtgtgcaaaagcttgatagtgtgcaaaagcttgatcgtgtgcaaaagctctcacaatcgaagtgcattcaggcccttcattagtgcatcagtgtgctc

SEQ ID NO: 15447 - DNA, 355 bp, Zea mays
  unsure at all n locations
  Clone ID: LIB3150-106-P2-K1-H1
aaataaaaaacctgctcggatggattttattgttggataaaaaaaanagaaaaataaaccatgacaacatacacactacattttaaggtgagttaataacattttcgttcaagagaaaagcagacaacaaaaacacaaggccggccggggacagccaccacacttttttggttcgttacgcctaagaaaatcccaattttgaaagcttaaggggggccttggcgtagccagaaaaaaaagcgtcctcgtccgctgcgttttttgaaacaagggggcggaaggatggatcaaaaaggagggctttgccacttggtagctgaaaaaggccttccttttttccgctcaaaagcttctt

SEQ ID NO: 15448 - DNA, 334 bp, Zea mays
  Clone ID: LIB3150-106-P2-K1-H10
gaggatccatgctatttgtattgatcggggcattaaacaaccaaaataggagaaaacatagacacttcagttgtgaagcatggaacgatccatagaagaccggaccatgctcctaaaccatacggatacaaaacttggtacagcaaggttacaaacaaaagtatcacagtttgatgattttgagaaatgggacttcgctgcaccggagcaccttacgccttgagcttgacaaagaacctatggttctcataagtagtctggaagcgaccgtgcccaaatttggacgatgtgtcgatgaacttgagcttgatctccttcagcgccagccgggaag

SEQ ID NO: 15449 - DNA, 445 bp, Zea mays
  Clone ID: LIB3150-106-P2-K1-H7
aattcaacgtagcaactcagcttagatatgattaactcaaatacttccaacaaaacagcataagtgtgcaatgcttagctttgaattcttgagctggaatggaacagaacaaaatgtcttgggcatttaacttgttcaaaacaagtagaaaagctgaatgaacatcgccaccgaactcttgggagactacaaagccgggtaacagctcatttcagaggaataaaacgagaggagtgggtggcaccgataccgggcctgccgtgcttgaccggcttgtaggagatggaaaactcagcaaggtagtggccgatcatctcaggcttgatctcaacctggttgaaggtcttgccgttgtagaccccaacaatgcttccaatcatctcagggacaatgatcatgttacggagatgtgtcttgactggctcgggcttctcaccagcaggag

SEQ ID NO: 15450 - DNA, 299 bp, Zea mays
  Clone ID: LIB3150-107-P1-N1-A10
ttctttttataaccatccttacaaaattacacacggtgtttatataaataactggggcggcttataaaactttcaaatctttaaactacaatatcaatccatcatacttattcaaatattataattttatccctcaatattattctctttaattaccaattcttataccaattataatttttccattaacttaattaaacctttttcaaaattatacaatatatatatcatacactctcccttttatcaatatattaacatttataattccatctataaatttattacaattcacccaa

SEQ ID NO: 15451 - DNA, 59 bp, Zea mays
  Clone ID: LIB3150-107-P1-N1-A6
aaaataaaaaaaaaaaaaaaaaaaaaaaaaaaagggaaaaataaaaaaaaagggggggt

SEQ ID NO: 15452 - DNA, 348 bp, Zea mays
  unsure at all n locations
  Clone ID: LIB3150-107-P1-N1-C5
tcactcttaatacttcccccaccttgaattcattccggctgtctttattcatacgagggtcgcctatatacaaccactttacttcttcncctcatcacataactacttgtttcccaagttcaattcctataccctcacaatcactcttaacatactatccaacctcctaaagccctaagtcatttttgcacattcttagcgcaaacttactattaattgaatccagctaacttcctgcttatcaattttcatatccactcactcaacttcttaaattaatctctcacacttcttagaccctttattatagaaatgcacgaacaacaatttatttttttcactaacaaa

SEQ ID NO: 15453 - DNA, 396 bp, Zea mays
  unsure at all n locations
  Clone ID: LIB3150-107-P1-N1-E12
tttctcattgactagcatactacaccgttgcactaacataaagggggagtgccacaaaacaaanaatttttctttcaatacctttattctacttatgcttatcatatgccttaaaaaatcattgcctagcaaataatgttcttgtactttctttctgaattcaaatcatttatattctgtcattgttatcatataaaaccttatccattctctttgatttactttttgtttatgacattttcttgttgttcttcactccaattatggtcagtgttgctaaatcttttcattctcctataaaacttctttttcctactgcttatgatacactaccattctccatgcttttcctttcttacattttaaaaccttacattnttttttcactttcctttc

SEQ ID NO: 15454 - DNA, 396 bp, Zea mays
  unsure at all n locations
  Clone ID: LIB3150-107-P1-N1-F12
tttcgcgaactccatttctatcccatggggagatcaacccatccgggtggcctgcgtctagcancctctcaccctcatggccaagatcaagatcgggatcaatgggttcggcaggatcggaaggctggtggccagggtggccctgcatagcgacgacgtcgagctcgtcgccgtgaacgaccccttcatcagcaccgattacatgacctacatgttcaagtatgacactgtgcacggacagtggaagcaccatgaggtcaaggtgaaggactccaagacccttctctttggtgagaaggaggttgctttgtttggctgcaggaaccctgatgagatcccatggggttccgttggcgctgaatatgttgttgagtctactggtgttttcactgacca

SEQ ID NO: 15455 - DNA, 353 bp, Zea mays
  Clone ID: LIB3150-107-P1-N1-G4
ctgacaaatagcttggcactgtttctgaaggaggcctaggtgcttacgtgagatggtctcttgttgaatccggctttaattcatgactagagactttagagtattatcagtccttgttgaggttcagcctttgctgacaccaatgtaattaacatctaaaaatattctttgaatcagcttgtgattcatcagcatgacgttagttgtcatgtacaatgtacaaaatcttgctaacaggacaggtctgtttcctcctctacgttttgtcattacatggatgaaaattaattggtgtgccaattggaggaaagaattgttctagtaaatgttgatggtagacgtgactttcactc

SEQ ID NO: 15456 - DNA, 324 bp, Zea mays
  Clone ID: LIB3150-107-P2-K1-A11
ggaacaagaaaacggccatacattcaaatttgcagatttgggtagatacattgctaatgctttacgcacaggcgacaggtacaggtggagccaaaccaaatacattgctcgcacacttcattgacatatcacttggaagaaagctgcatctgcatcacgaagcagggcatccggaaggcatgcgcttagttgggtatactcttcccccctcatgcagaaagtatgtgatactccatagagacacttaacttaacaacgcggatcttaacaagttggccccctttttaagggcccggaggtagcttgcttaaaaaccttttttgg

SEQ ID NO: 15457 - DNA, 264 bp, Zea mays
  Clone ID: LIB3150-107-P2-K1-A12
ggaacaataagcaaggctaactgtatcaattgaagtgtcaagaattcaagctgttactacaactcgtaactgctctatcttttcggtgaactaaacgccacaaatatctagtacgccttactactacgcagtgaagtcttatacttcacaagcagaaagacgtgaacaacagtggttcgtttctggtgaagccaactgaagtcgtattgcagtaagcataccatggcaagttgtaccaacagatagccatgctctcaagcagag

SEQ ID NO: 15458 - DNA, 370 bp, Zea mays
  Clone ID: LIB3150-107-P2-K1-A4
ggcaaatggttaaagcatctctgaccgagaaatgtttatgccggaatccatatgaagcaactaaatgggcatcagttttatcattgtccatcaaaatcctccacacaccttgttcaaagaaactaagctacaacacttgacatggaacaccaacagaatcatctgattgattgggcaaacacatttcagatgaaaagtgcagcctacacgatcaatcaatcaccctgataatgtgtgcaaaacactgagcagaattacatagccgtataacacatggaaatgcaacatggggaaaccacaagcccactggacagaatcacgtagcacggcattgaagcaacaggtctcacgcattacatacaagacaaca

SEQ ID NO: 15459 - DNA, 302 bp, Zea mays
  Clone ID: LIB3150-107-P2-K1-A5
agccaataatgattcattcattcagtaggagaaaggagatgagatctcatacatagttgattcagagtgcagagataagacatgatcagaaattcataatgcagcagcctatgaccaggcccttctcttgagtcagtcacccccacttcctcgcgcaagcaggctgacaaatgttggaacactagccacacagtggctggctgtctaacgcaaacaccactcgagagtcgagaagaccgcgatgcatcgcaccctgcctcttttatttggggatcgccgcagccagcagaattattattagg

SEQ ID NO: 15460 - DNA, 310 bp, Zea mays
  Clone ID: LIB3150-107-P2-K1-A6
gcgaattctactattgttttgcattttcttctgaagatggaaaggaaaagaccaatcaactattgatcagagtacaaaacttaaaaccatgaaacattgaactgcggtaattgcaacgggattccacattacagcatccattacactccacattcaaaagaacaaaagttaaccaatggcaggtttttcccatcaaactattattcttcatcaaatccgtaacataaaagggtatggcagaggcgcacaagcttgaccgagccaggggaatgaaggaaggctcacagcgtcgaaagccgcaccttgccat

SEQ ID NO: 15461 - DNA, 319 bp, Zea mays
  Clone ID: LIB3150-107-P2-K1-A8
ggacacaacacaggtacttaaaatttaaggagatatcattggcgattacacacgataatttgtctgctaaaaaatataggaaacagtacttgtagatgataaaaaagccaaaacttgcagcagtttgacgaaaacagcagctttagtcgtcgaaaaggctgaagcccatttcctcgtccgactccttttaaggctccgcagccttttttttttccttgggagcagctgcagcgccagagtcaccagcagcaaccggggcgggaacagcaaacttgcttgggtccttgagggactccttgatcttgtcagcatgggggta

SEQ ID NO: 15462 - DNA, 292 bp, Zea mays
  Clone ID: LIB3150-107-P2-K1-B11
aacatatactccagcatttttgtattgcaaaaggtgaaatagcaagatggtaccaaataaatagatggaagggcacatgctaacagatctcaacagttcacacgataacagcaacgatcacaaacaaaacttgtgatgatgaaaactaggtattgctaaagcaggcgcaggatcgcatcatttcttcttggcagccgccttggtcaccttggcgccggtcgggtcctttttcttcacactcttgataactccaacagcaaccgtttgcctcatgttacggacagcaaaccta

SEQ ID NO: 15463 - DNA, 308 bp, Zea mays
  Clone ID: LIB3150-107-P2-K1-B12
aatcaacacaaagacatccatcgttttgcattttagttaaaacaacttgggtgaaacaaggtccacattacatggcatagatttatcttgcaaaagaaaccaaaggcaataattaaactgcaaagctactaccatcaggttctatcctggcttccaacggtgtacaagaagccattgcctacagtaacttgtacagcggctggggccgatttgagtgcttgcatctggatgatcaatatgctggtgggccagcaaaggaataacgggtggacacaagcacacttgggccactaacccttgtcaaaggt

SEQ ID NO: 15464 - DNA, 302 bp, Zea mays
  unsure at all n locations
  Clone ID: LIB3150-107-P2-K1-B6
gatagaccggcagaaaactttgttcatgctaatgaagaaacatcatcaaaaggagaaagaaacggggcgggaggctggcgataatggctcctctcggctttgcatctcttgggcccaaagaattagaagcatttcctgtgcacgatggacgggccagactcgtcgtactcagccttggcaatccacatctgctggaaggtgctgagcgatgccaggatggatcctccaatccagacactgtacttnctttctggaggagcaaccaccttgatcttcatgctgctaggagccagggcggtgat

SEQ ID NO: 15465 - DNA, 334 bp, Zea mays
  Clone ID: LIB3150-107-P2-K1-B8
ggccatcaataaaagagacgttgattcttgaatgacgcaaccacatcagtaaacgggctggtaagacacttacaacagcagcactgtaatctgcgataaatctcagttttaccacgcaaattggccaatttaccattgccattcagtgtgcttccagacaccgaggtatcacggctggtgatttgggtaagagtagccacgccccctacccgtatatccatatcctctaataccataatagccacgaccacgagcgccgccacggggggccctacctcggatgcccattggtcgatgccttgctgagtcaccaaaggtctcggtgtctattttc

SEQ ID NO: 15466 - DNA, 354 bp, Zea mays
  Clone ID: LIB3150-107-P2-K1-B9
aggccaaccaaaaacgcacatctgtcaacgaaagggtatcgacccaattcacacagggacattagctttcttttagcaattatatcacttaaaatatccaacatcgttgcatagggggcaacaagcactgtcgcatgaaaaggccttgaatgctcatgagcaaaagcatgttcacactcacaacccatttctactgatagagaagagacaacatactacctaagctctatgatactgcgaaacagtagtgtttttggagcatgatgtgctcgcttaacttggctcgggcttctctaggggggtggggttgagcaacttctcaatgagggcaacatgtgtcatgagcattcgcct

SEQ ID NO: 15467 - DNA, 352 bp, Zea mays
  Clone ID: LIB3150-107-P2-K1-C1
gcagtaaaatgcactcgttcccataaaagcatcagagtccacaagtaccattaccagggaaatgtacattactcagcgaaacagcagctgagtttcgatacgacgcgatgccaagcataaaccccaatccaaattcgtccccaacactgtccccaacaaacaaacccaagctaaattattcactgcatgcaatacgccaagtacatgcacgagctcacggattacagaaccaaatgaggcgcaaactttggtgcccaaatgaccaaaacagaacatgacgaacttttagaagccctgctcgatcaggtaatcgccgagcctctccaccaccatgttgcattgccctggagtc

SEQ ID NO: 15468 - DNA, 291 bp, Zea mays
  Clone ID: LIB3150-107-P2-K1-C10
cccagaagctactgccaacataaacagcgacacagttcctagtgaagtctggctgggttagagccaatgaacaccaaaaaaaattgcatatccatcattatccgtcaacttactagagcaaaaacaaccacgctgacacagaaaagcattctcacaggatacaagagagaacctagttcatcctcttgatgagctcgttgatgtagttctcacggtttccggcgtcaccgccctttacgtagtggttccttttcttcttgaggccgccgaggggtgccttcagcttgaacg

SEQ ID NO: 15469 - DNA, 347 bp, Zea mays
  Clone ID: LIB3150-107-P2-K1-C11
gggtgggggggccgcccaaacagttttttccccagttaaaaaaggggttcaaatgggggggggaaaaaaataacccggtttaccaaatttttctggaaaaaactgttcccgaacccttaaaaaaaagccttgttgttccccaaaactggtgacaaagcccagttccttagttcttggtgggggcaagaatttccaattgggaccccaacttttcctggggtgccttttgggccttgacacccagtttggccaattgttttttttttttgggggaaacctggggctttttcttccttttttcccaaaaggccccggggggtggaggggtgttccccccccccttttta

SEQ ID NO: 15470 - DNA, 246 bp, Zea mays
  Clone ID: LIB3150-107-P2-K1-C12
ttaacaaagcattgtataaagtagccagcaaattcatggcgaggagtaccatccatttgcacagtcaaaagatgcaacacatccaaggagaaaaagatgatccagacaatgagaactcaagagttcaccctagaacaacttaaaacacgcaaagcacaactcctgctcaagttcaagactcatgaacctttctacataatcaaatcatcatcgtcatcaagaaaaggttttgcaacttcttcaaca

SEQ ID NO: 15471 - DNA, 303 bp, Zea mays
  Clone ID: LIB3150-107-P2-K1-C4
actgaaaatttgaatacttgccacaggcttaactacagcagtagcacgcttaccagtaaccattaactcaaaacgccaatcacccagctaaacatgaatttattaaggtgcgataacaacaattcgtaaattactctggtctgacatagttcagggagaaataatcaagaacaagtcagatacagtgaaaagttcacaaagtaagtggagggcgagttcactgcaccatgggatcagggttcccagcagcaagaatatcaagcaacgagttctggggttccagctcgtcgtgccacaggggta

SEQ ID NO: 15472 - DNA, 423 bp, Zea mays
  Clone ID: LIB3150-107-P2-K1-C7
ggtgtcgacaacacggttcaacaatatatagaaagtcgaattaaagcattacagctagctgcaaacgctgttcaagaaccaaaagcaacaaaacatgatgataaaacgtcttgggaaggtagctctatatccttgcagataaaaataaaactagacatagcaaaaagctccaagcagcacattcagagaacttatgccttggcagcagcctgggcagcaaagtcgcgcctcctctgctcctcgatgatgctgagcttgatacccttgcccttgggcaggctcacccacggcttgttgcccttgccaatggtgaacacgttgcccatgcgggtggcgaactggtggcccatggagtccctgacgtggatggtatcgaaagccgccttgtgcttctccctgttcttgatcacacctacacgcccg

SEQ ID NO: 15473 - DNA, 240 bp, Zea mays
  Clone ID: LIB3150-107-P2-K1-C8
aggaaagggaacacaggtcattttttattgattcggatgggtcccgaaagcccagagaaatcaagaaaaattagacttgggggctcccccgggcttaaatgaacaaaagctttcatggggatcaaacctttattcggggatgcaaaaatatttttgggtccaacccttccacaattcataccctgtgagcctttttagatctttgagggaggaaacaggtccccctggacgtaatctttt

SEQ ID NO: 15474 - DNA, 418 bp, Zea mays
  Clone ID: LIB3150-107-P2-K1-C9
gaggcaacatagccggacatcctatactgatgaattattggcaaaaaaaaaaggaattgttaaccatcggaaaccagcgggagggagggagctgcctgcagctgtgacggcgaacgaagacgaaggtatatagtcattcggggaaggaaaaggcctacatagctacctttacagagctgtcgctatgtatgtatggagagcttcagaagttctgtatctggtactggtatactactctcggcagacaaagctatctacaagtctcacgagctcgacaggctcgcagcaggcgttgtcgttgctgccggcacggcgctgttccgcgtcgtcgtcgagttgctcttgctcttctcgccccagtgccacagcatgctctcccagaaacagaacttctcgaagcaggtcttcagccttgggt

SEQ ID NO: 15475 - DNA, 337 bp, Zea mays
  unsure at all n locations
  Clone ID: LIB3150-107-P2-K1-D1
accttaaattacacttcatatttgttttttttatgttatannnccccggaatcagaagcccgacgtaaattggaacataaacctctcaggtagtttaagatatggtaacaaacaacaaattgagtttatgggatgggcaccaaagttgacaagtttagtccaagcttgtttaccggacttcaggtgctgttaaaaaaaaaaataaacctaacatcccaaaaaccaaagctggggacctcagggcttggggaccagggagagcccaaccttagagctcttcttgatgggcttggtgtccacctccggggagatggtgaccaatgacttgggcctccac

SEQ ID NO: 15476 - DNA, 433 bp, Zea mays
  Clone ID: LIB3150-107-P2-K1-D10
aaaaaacaaccacataaaattgcttcagaattgaacatatccaaacatagcagggatgtaaaggctgataataccacaagataaaatggaccatccatgacacagagtcagcacaggggactctgcgtcagatcacacagctaagcactcatcattcgaacaagttcaagaaaactagataatattattatattggtgtaacactacttgtccatcctcactcctcatcctcatcaccagcatccccgccaccgcttgccttcttctgattctttctcttcacccttcctgcggggcctccaccgaatgggcttgacagtgaaaagtcaatgtgcttctcagactccaccctcaccatgaatgatgggacgttgacaatttgcctgccaaccctgatgtgacgctgcttgatcaagacacgagcatggtgaat

SEQ ID NO: 15477 - DNA, 356 bp, Zea mays
  Clone ID: LIB3150-107-P2-K1-D2
aagaaaaaactcggctcttcatgatgggcattaaaaccagacgacagcgccgtaaacaaaaaaaattcagatgtccaaattgttcatacatatcctcttcggctcttctagtaaaatgttctaatctcctaggcaagccccagatgcaaaagcataattttaagcccaggtccaaatcaagagtatcactgaaacatgtcacacatttagtgcgacttgacatactcctgcactatgttaaggccctcagattcttcaccgtagtccttgacgacgacacaggagcagcctacaacctttcttgccttgccctcagagtcaatcttgcaaagcccggcccactcgccaagagtttt

SEQ ID NO: 15478 - DNA, 287 bp, Zea mays
  Clone ID: LIB3150-107-P2-K1-D3
gagcgtcaaagagtgcaaaatgcaaaacttttgaaatagaatgaccgttaaaagtttaacgataacaaccactacgatacacccgttataggttttagacaatcagataagaaaaatttattctcggaagcacttccggggaagaaacacaactctctttgcatgctttcatcactctttgcatgctttcatcagtttgttcatttacttggtgctgttcatgtggcggatcaggtcgaccactcgggtgctgtatccccactcgttgtcgtaccaagacacaagct

SEQ ID NO: 15479 - DNA, 230 bp, Zea mays
  unsure at all n locations
  Clone ID: LIB3150-107-P2-K1-D4
tnnnnaaacttaagagctattttattacgagctgaacttacagtcgaacacagttgttcagtacagggcatggataatccagatttaaaacatcggtgccggaaacgtctcgagaggcaaggctgcctgaaaaggtacataaaagagctacggctataatacttcgacaaaatggcctcgatcagcatgctgatatacttcactgcttccttgctgcgacaatgttgtca

SEQ ID NO: 15480 - DNA, 349 bp, Zea mays
  Clone ID: LIB3150-107-P2-K1-D6
gttcaagctttaacgtcctttcatttcttttcaaacgatcaaatcaactggcgtgcgtcccatagttgcataggcgagaaaccttatccgtattcacatctgaatcaacgatcttagggaaccaagaaaggagctattgtcattcccaaacacatcgagctctcaaagacatgctgactaactgcgtgctaaacctatgaaacaagacggtagcgaatgcctcttctccagtgggcagcttcagttgtcatcgtcatcgacggtggaagccttggacgagccagccttttttggggaagaggtgctggtggatgttgggcataacgccgtcgttcgcgatggtggcacc

SEQ ID NO: 15481 - DNA, 369 bp, Zea mays
  Clone ID: LIB3150-107-P2-K1-D8
atcatgagatcattatgtagcattcatagataaaaagggacatggcaaaatccaaaacttgacaggacagaacagcatccaggacaaaacagaacccaaaatttgactcccgcagttcttagctataatatagatatcgcatttagacatgcacccgacgagtagagctctccactcaaaccatcctaagcctctactgtctcagttggggcctcgagcacaagacccttggtgggctttgccagcaggtcggtgtactgctggaacggggccatggagaacttggtctggctccagaattcaggagtgaggaagccgtaggtcttcatcaggcagtcgaaggttgccttgacgaagttgccaagggtc

SEQ ID NO: 15482 - DNA, 316 bp, Zea mays
  Clone ID: LIB3150-107-P2-K1-D9
gctggggacaaggggcccctttataatcagagctgttaaagctggcggcaactcaagacgttaggtgttcaatcacctccaaaatcattttgcgtcgactaggaaaacatggggaaaaaatatcgcagagggaaacttctgcactaatacaaacctttgtttgcaatcatcggggtggggttggctcttaatggaaacattccacaaaacaagtccaactccctgacaacacttttttgcccaaggatcttaccaaaaacaaggctaaaagggagagggttgttctaggcatcgctccaaaagtttatgttcttgg

SEQ ID NO: 15483 - DNA, 294 bp, Zea mays
  Clone ID: LIB3150-107-P2-K1-E10
ggaaaaaaactttttttttttcatttcaaatggtcattcaggggattggttaaactggcccttgcccccatgggggtgggggacacatttttacccaaacatcgccccttaaagacccaacttggttggttgcccggggtttttctacaacacaatttttttttaaggggggacaccccccgcaacaacctaagggccttgagttggtttttgtaagccccaaatttcccgaagttggttggcttttttggccgccaaaaaaccccggaactggcccctttttgggtttttttt

SEQ ID NO: 15484 - DNA, 350 bp, Zea mays
  Clone ID: LIB3150-107-P2-K1-E12
gcaaattagatttctgaaatcagggaatcacgtttcaaccacaatgcacagatctactaaccaggtgcaataacaacgacgacactacagaagtaaagatctactgaacacgagcattcaacatcacagcggtaaaggcgcccctctatgccttcttgggggacttagcggccttcttgggcgacttggcctccttggccgccgccttctcagcggtcttcttgggcaggagcaccgggttgatgttggggaggacgccgccgtgggcgatggtgacgccggacagcagcttgccgagctcctcgtcgttgcggatggccaggagcacgtggcgcggaatgatgcgggtc

SEQ ID NO: 15485 - DNA, 240 bp, Zea mays
  Clone ID: LIB3150-107-P2-K1-E3
aacgtacgtgttgtgtcctgctcaattatacaacattaataacacaacgaacaatggatcaggaccgtccatttatgagcatgggcagcgtcgatctgtccaccgaggctagacggaaaactcttcaatctaaaaggcccaacaaattacaggtaatccaaaattggactatgaggcatcgaactctaagtactcgggcacacggctagttagctcgacaccatcatttgatcgcacgcc

SEQ ID NO: 15486 - DNA, 439 bp, Zea mays
  unsure at all n locations
  Clone ID: LIB3150-107-P2-K1-E5
aattnannntnngaggacacaaatttgcttactacacactcgaaacaacatactagttggtacagtacagagtacacatatgtttaaacgacacaggagctctacggcccagccccaccgatgtgctgtaaaggcaggccacatcagcaccgacagtgggcccactaacccgacacgggatcggcacacagacacattatttattcgaccacaacacaaaacgacgctcctacgctcctttactaggcggggcccgccgcgccacgtaggacacgacgtgaacccgaacacaaaagcaggtttttcctagcgacctatgccggcgccatgccgtgctgttgccgtggcagtggcaccagagcggcgcacgccaagtgacaggctgacgcatcgagctagatcggccgccgtccggcgctggactcactcgacggacttt

SEQ ID NO: 15487 - DNA, 462 bp, Zea mays
  Clone ID: LIB3150-107-P2-K1-E6
atccaggcaataaaaaaaaacaatgattcttcccaggcttgattagcctgcagagatatgtaacacgatcatgcaccactgcctagaagatgtagcaagggtttgccacaattttactctcgcatttgccgatgcagccgaagagggagttgttgacctagagtctgcctcatggagatggaacgagactagttagatgttcaccggagaaatgacaagccgccagggttgccctaggctacgctacgctatgcatgtatgacccagctatatatatgtacagagttccagcttcagtccacatgtatgtatcacgacagtatcgggtccggttggtacttgaattcaggcacatggtcgagcctttgcctgactttgagaataccggtaccgagctgcatgggaatgcccatgataatgcattcactaactccctctatctgatcctgacgaccactgttt

SEQ ID NO: 15488 - DNA, 303 bp, Zea mays
  Clone ID: LIB3150-107-P2-K1-E8
gaagaaaactaactatacgacttcctaaaatcaatttaacaatgccaaaaggttaacatatactccagcattcttgtattgcaaaaggtgaaatagcaagatggtaccaaataaatagataaaagtgcacatgctaacagatctcaacagttcacacgataacagcaacgatcacaaacaaaacttgtgatgatgaaaactaggtattgctaaagcaggcgcaggatcgcatcatttcttcttggcagccgccttggtcaccttggcgccggtcgggtccttcttctccacactcttgataac

SEQ ID NO: 15489 - DNA, 332 bp, Zea mays
  Clone ID: LIB3150-107-P2-K1-F10
cgaggcggagaaagtggcaccccacctgcaaattaattagctttggcgggggaaaaacggttaaaatcgctaatttttaaacgacaaattcccccacccttggaaccccaaggggtcccaaaacccaaagtttgtttttttggcaacaaaaaagctggggatcccctgatgggcgaaagcccccccccaaaaattccccaagcaaaagggggtccctccccctgggccccctacttaacaggggggggcttggtgccggtggaaatcccgaggcggggcaaggccccaacggtttgcccggggttgcatacccccattgttttcgaatttta

SEQ ID NO: 15490 - DNA, 315 bp, Zea mays
  Clone ID: LIB3150-107-P2-K1-F12
aggggggcacaaataaattccaccattggggggtacatagttttaaacaaaattcttattaagagaaagactcaacgccagcagcgtcttcctttttatactaatgaacccccacaggagcacattaccacaagggctaggcaggtacaaaaattccaaaacatgggataaaggggaaaaaatcacaaattgtccatgaccacgactttaacataaaaaccccaccgttcttattacccccttttccacgggattttgacaaaaccaaaccttaccaggttccttaccacccttttttggtttggtttttcttga

SEQ ID NO: 15491 - DNA, 190 bp, Zea mays
  Clone ID: LIB3150-107-P2-K1-F2
ggagcgtcaaagagtgcaaaatgcaaaacttttgaaatagaatgaccgttgaaagtttaacgataacaaccactacgatacacccgttataggttttagacaatcagataagaaaaatttattctcggaagcacttccggggaagaaacacaactctctttgcatgctttcatcactctttgcatgcttt

SEQ ID NO: 15492 - DNA, 343 bp, Zea mays
  unsure at all n locations
  Clone ID: LIB3150-107-P2-K1-F3
ggagcgtgccacgcagcaattttcgtttcattactacgtacttgacaacggctacaacagcaactggtcacagcncggaaaaactcttctcccctcccctgcgtcgcacgcatcgcatcgcatcggagtggaggaagagaggccatcaccatgttattcgtacgtggttctgccctactaccactagcagcaccggtagtctgtctctgacccatcctattcctatgcatgctcccgtgcggcacctcagggatcagcctgtcgtcgtcgtcagggctgggccggtttgcacgcccccgccgtgacggccttcgatacgctgaagaaaaggggggcccgaccc

SEQ ID NO: 15493 - DNA, 211 bp, Zea mays
  Clone ID: LIB3150-107-P2-K1-F4
aagcaggtgcaacgggcaaaatgaattatatttctctttttttaggcatatatgtacgctgtgctcaaacaggttcggcaagacatcaaagcagctggctgtcgtctgatgaggccaggaggaattcaacaatggaaacgagggctggtgcactaacaaacaatgcaatctaagactacgatccggtgatagaaaacaccctacaccccta

SEQ ID NO: 15494 - DNA, 360 bp, Zea mays
  Clone ID: LIB3150-107-P2-K1-F6
aaaccagattattacggctaaacatttaaatgatgaagacttgaggtatcacaagatgcacaaaaaatgccaaaccagcacaaactttaaccagttcatagcaaggtataccagatcaacatcgacactagtaaaagggcaaactcttccatagacaaattcaagggctaaacagttctgtctccaggcaagcacactcacttgaagcatttcgcgtcaagcaaggcctcgccctcaaagggctcctggtcctcaatcatcgcattgacacgctccttctgggcctcatcagagatgtccaccttggtccactcgtagagctccatgtcatagacctcatccattacaaacttgggaaca

SEQ ID NO: 15495 - DNA, 255 bp, Zea mays
  Clone ID: LIB3150-107-P2-K1-G1
agccaacatgcaaatcatttttgaactgaccagatgcagaggcgggagaattctcggaggcgggctacacaagtgtgcaccgtgcactgcaatgcccaacaacaagattgtagcagcaaacatggaagagaaaggcgcggggggcaaggcagcatttccgcatgacgagttaccgcggtttacaatctttctgacaccaaccgtagggaaccccccctagatcttgtcgagcttgtctgccttcaccaccggatt

SEQ ID NO: 15496 - DNA, 313 bp, Zea mays
  Clone ID: LIB3150-107-P2-K1-G10
aaagggggccattagcattgactattatggaatattaatttgggccggggccacattaatccaacatgcagatcatcaaaacgcaccaccacccatggtcacagtacacacctgaacctatcccagcagcttcaaccgaagcgcagcaacattaccgcactctgcaagccgggacaacaggcgtgcacttggggttggggatggccctgaagtggacgacgctgttgccggtcagcctgcggcggcctctgcagtcaggaaggccggaggacgcgttgtttccgccgccgccgccctgctgcaacggggcgag

SEQ ID NO: 15497 - DNA, 244 bp, Zea mays
  Clone ID: LIB3150-107-P2-K1-G12
attctcaataacccggtagcaatgcaggggaattaacaactcttacaacatcaggtgttgtaaaccacacaatacttcagaacagacacacataacacgatagcaggagcaactctcggcagatcacgggataagggcagcacactggcctgatgctgcgtcatcagcaaacttctctagtactcgtcaccctcgtcgccatcctcgccctcatcgaactcagcaccgacctcctcgtagtcct

SEQ ID NO: 15498 - DNA, 237 bp, Zea mays
  Clone ID: LIB3150-107-P2-K1-G2
aaaacttgaaaataggctgtatagccgacaaattaagacaggggacaactggttacacttgcagacaaacaaccgtgcaaaaaatcaaacaacaaaagtgtgaagcatatcgggatgggatgggatgcgatgcgatgcaatgcaatgcaatgcaagggccccttgtgatttggatttggcgccccatatttactcccggatcacatgacgatctcgggcttgaggatgctggatttg

SEQ ID NO: 15499 - DNA, 404 bp, Zea mays
  Clone ID: LIB3150-107-P2-K1-G3
ggctgcaaaacgttgcccaggaatcatttcaattatcgaacgataagattggattacattcgaaacaactgtaagaatactactaacaatagtccaacacgtcacagacaaggaactaaacgaaataaccctaacaacaaacaggcatccacgacagcaaggagaagaggcatccagcctagcctccgaagccgtagagggttcggccctggcgcttgagcgcgtagacgacgtccatggcggtaacagtcttgcggcgtgcgtgctcggtgtaggtgacggcgtcgcggatgacgttctcgaggaagatcttgaggacgccgcgggtctcctcgtagataagccccgaaatgcgcttaacagccgcccttcgagccagcctacggatcgcgggcttggtgatg

SEQ ID NO: 15500 - DNA, 415 bp, Zea mays
  Clone ID: LIB3150-107-P2-K1-G7
tcgacgccacgcgtccgctcccgtgcccctcactgtttagtggcgactactgttcgacagtcgccgccgccgcccgctaggggccgtgcccctggtctggatgggcggcgcttcgcccaccagatatgagcagctggcaattcgattttgaggccattatttgataacccgggacaagtgcactggttacctgaccattttagctttttgagatggctacacagttgccatgcttcacacagctcagtccaccgtcttgtagttggataaaagatgtcgggaactgcaaggctacgcctgatagggtagccagaagtgcccgagctttgtgccactgtcacttccggtgctgtgcatgcccccgtagtgcatactcttttaagaagaaaagactttctcgagaagaaagactctt

SEQ ID NO: 15501 - DNA, 368 bp, Zea mays
  Clone ID: LIB3150-107-P2-K1-G8
agaaacaagtttcactctaatacgatggtttaggattcttcatcacattgtcatagccacatctcaaaaactcaaaacttgagtacttgtaataacaaaagcctacagacataacgtaagataagtcttggacagcataagcgaatttgctaatggctgggtagcgagggtctcagactctcagtcgaacaggctgaagcccatgtcgtcatcagactcctccttgggctcttccttcttctcctctgcagcaggggcagcagcagctgcagcacccccagctggggcggaagcagcaactggagcagcgccaccaccagatccaacggagaggattagatcctcaacgctgcgcttcttcaggagct

SEQ ID NO: 15502 - DNA, 100 bp, Zea mays
  Clone ID: LIB3150-107-P2-K1-H12
gggaggaaacctcattatccatcctgtaaccatatttcttcagtaagcacaatagcattttccatcaaccaaaggcaggaacgaaaacaaatatcgtaag

SEQ ID NO: 15503 - DNA, 264 bp, Zea mays
  Clone ID: LIB3150-107-P2-K1-H2
ctcaaacttcgaaatgcacattcagagttttcacatgcacacaaacattacgagataaaggtggccaacaacaaagagaggggttccacaaataagcaacttgctggattcaataagcattgttactgttccatcaaataacagttgctaccgggggagaccagacacaggagcacctaactacagcaagacacgcgaacatacgagggaagcctgcaagcggaggccacccaccctatgacgaggtgaacttggtgaccgcct

SEQ ID NO: 15504 - DNA, 380 bp, Zea mays
  Clone ID: LIB3150-107-P2-K1-H4
aaaacataataccacaaatttattaagtatcaatagtgattacattatcgaagtttcaaaaataataatcataaatggtaatgcagcggaaataactaacggagaaaaccgagtaacatggcgaagcctggccacgctactcctcctggtcctctcctgcggaagcagtaacccaatcgaccgtctatcccggtggcagggatggaggccaagtcacaccatcaaccaattcaacctaaggagtacctttaatttaacacttagagagtgtttgctggggaggtactcgcttggcgagcatccactggttaagtccatccttccttgggtcgtccaccgactgcatcttgtggttggcaccacatcactagctcgatcat

SEQ ID NO: 15505 - DNA, 357 bp, Zea mays
  Clone ID: LIB3150-107-P2-K1-H5
gagaatgtgagatagaaagactaatgttataggctaaagctgctcatcggtattttttttcctgtttcaagctactgttgtcattacaaatttgttgaggcttataagttggattaaataatgcactttcaccaagttgctatcagtatacgctgctacaagctaactctgcgagaagatgcatcaaatcagccaaaaataaaaaagaaagaatatcaacgttcttgcatgctcgttgaacagctagctatatgagagctttgatgccagcttgttgcatctcacgcagccgccagactgggtaataggattcttcttctggcaccttgtcgctgtccatgagttgcatagcccacg

SEQ ID NO: 15506 - DNA, 388 bp, Zea mays
  Clone ID: LIB3150-107-P2-K1-H7
gaagtatccccgcaaatggcatatcatataaaagcacaaaaatctagtaactatgtttgtagaggaaaggtatgaaacaggcataaatataaacaagaaatatactgaaaggtgcatccttgaacgaggtaaattggtatttctccaaaaatgcaagatccacacatccaacactgacaggtctaatagcttaggttccaaaagtacatagagtagcatactctgctactgataaagaagctttggtagttcaacccgacgttgccatgtatccaatcagacctcctcgacggtcaaacctgggggaagagattgcttcaacttgtttgccttctcagcatcgaagacgcagagcgtgtacaagtacttggagcaacgcaccttgaac

SEQ ID NO: 15507 - DNA, 230 bp, Zea mays
  Clone ID: LIB3150-107-P2-K1-H8
actcagaaaatctataatttttctcaataagaaaaacaactctttgagggggtcttaaacttagcgggggtgaatgcgttgtgtgggataaggactactatatgagagcacctgtataatctaatctcaatacattctcggttaaacaatagcgttacccaatcctgtgccttccagaagtacaaaaatgtaatgaacaccattgtggtgaacattttaaaagagttaag

SEQ ID NO: 15508 - DNA, 265 bp, Zea mays
  unsure at all n locations
  Clone ID: LIB3150-108-P1-N1-A1
ccttccttcctttttgtccgtaacctgggggccatggtggggcgtgaccaatcctaccggcaggctctgcccttgtactccaatctcctcccgcgaccgttccaaattcctgctcacgttcgtattccacgcggcgacgtctacgtcgcggacgtcgttcccatccaccttacttcgcctatacgtaggtagccgttgctgccgcctacccaaaccctaagcctttccctcccacacgcgcttcaccccgcacatngacggcgat

SEQ ID NO: 15509 - DNA, 363 bp, Zea mays
  Clone ID: LIB3150-108-P1-N1-A12
tttatcacacacgacacaaccccactcaaccggcagggaggccctcttcgtcggcggaggccatggtttccctcaagccgcagaagaggctcgccgcgggagtcctaaaatgtggcaaggggaaggtgtggctcgaccccaacgaggtctacgagatctcgatggccaactcgcgtcagaacattcgtaagctggtgaaggatggattcataattaagaagccacagaaaatccactcaaggtcccgggcaaggagggcccatgaggccaagcagaaggggaggcactcgggttacggtaagcgcaggggtaccagggaggctaggctccccaccaaaatcctttggatgcgcaggatgcgtg

SEQ ID NO: 15510 - DNA, 306 bp, Zea mays
  unsure at all n locations
  Clone ID: LIB3150-108-P1-N1-A2
tccttcttttttggccctcacccccacccccagggcggcgtattcgcaccaccgaggcgtggttcnccttcacgcccgatcgccctgaccacggcgatggccgccgccgcccttcgttctttcgcgcgccggcttctgcgcctcgccccggcagcctcgtcggctctgtccgctggttcccggcccagcgccggggctgcgccgatcacgcgccccatcgccgcgttctcaggtggcaacaatcctatctcatggaaactgaggcggttctacagttcaattgaaaaacacttgcccgcaatatct

SEQ ID NO: 15511 - DNA, 395 bp, Zea mays
  Clone ID: LIB3150-108-P1-N1-B2
aagccacctgggtcgtccaaaaggtgtcaccccaaagtacagctggaagcctcttgttccacgcttgtctgagctccttggagttgaagtcgtgatggccaatgattgcattggtgaagaagttgagaagttggctgccgctttgccagaaggtggagttctgctcctagagaatgttagattctacaaggaggaagagaagaacgaacctgagtttgctaagaagctagcatctgttgctgacctttatgtcaatgatgcttttggcacggcacacagagctcatgcttcaaccgaaggagttaccaagtatttgaagcctgctgttgccggcttcctcatgcagaaggaacttgactaccttgttggagctgttgccaacccaaagaagccat

SEQ ID NO: 15512 - DNA, 153 bp, Zea mays
  unsure at all n locations
  Clone ID: LIB3150-108-P1-N1-B5
attcgctaatatctgcgaccaacaaaatatncacgggcgttttttataatccgcagcgcccacaacactcaacttaactttaactccttccacacatacaaataccatccgacctctgcacataaattaacaccccgcaacacacatctccac

SEQ ID NO: 15513 - DNA, 498 bp, Zea mays
  unsure at all n locations
  Clone ID: LIB3150-108-P1-N1-B6
tttaacacnnaacaccgcactcacaactactccagcggggaatctcgtnccagcccgcgagcccgggagcagtaggtagatatttgtcgcnnaggggaacgggacggacgcccgtcgacggatagcgagcgacggtcgcgtcacccagcnnggagtaccaccctatcanatctctccnatcaagcgccnnntccacggcttgcaccaaattctaagaagaagcgcacctcnnaacgcctattaagcgagtatcacgcgaacgtttgcaccagannaggccatgggcacccaacggacccgtcaggaattcgatgtgaagcttcaaccaagcacatnnctggagcagcgggatcacggaagcgtgctcgcggagggttcgtgtgaaggatctgcccgcaagaaggaaccgatgaggaggatgcccaaggaggaacctctactcccttgtcaaccgtcgccggagatctcctgccgaggggcttgaaaagggctggggac

SEQ ID NO: 15514 - DNA, 412 bp, Zea mays
  Clone ID: LIB3150-108-P1-N1-C4
ttgcaaagcggcagtgcgtagagaggatcggcgaacagaacagcatgaagatggtcatcgttctcgtcgtgtgcctggctctgtcagctgccagcgcctctgcaatgcagatgccctgcccctgcgcggggctgcagggcttgtacggcgctggcgccggcctgacgacgatgatgggcgccggcgggctgtacccctacgcggagtacctgaggcagccgcagtgcagcccgctggcggcggcgccctactacgccgggtgtgggcagacgagcgccatgtaccagccgctccggcaacagtgctgccagcagcagatgaggatgatggacgtgcagtccgtcgcgcagcagctgcagatgatgatgcagcttgagcgtgccgctgccgccagcagcagcctgtacgagcc

SEQ ID NO: 15515 - DNA, 303 bp, Zea mays
  unsure at all n locations
  Clone ID: LIB3150-108-P1-N1-C5
tcttttctatccgcagngcataaacaggatcggcgcgcatatcaacatgaagaggcggcacccttctcatcttatgcctgnctctgtcaactgccagcgcctctgcaatgcagatgccctgcccctgcgcggggctgcagggcttgtacggcgctggcgcccgcctgactacgatgatgggcgccggcgggctgtacccctacgcggagtacctgaggcaaccgcaatgcaacccgctgtcggcagcgccctactactcctattgtgggcagacgagcgccaggtaccagccgtttctgcaac

SEQ ID NO: 15516 - DNA, 362 bp, Zea mays
  unsure at all n locations
  Clone ID: LIB3150-108-P1-N1-C7
tnctgaatggatagaataatgggcggtctctccggcgagcttttcgtggtcctcctgctgctcgtttgttacaccgggacgcaaggcgggccggtgactatggtgtcggcgaggaagtgcgagtcgcagagcttccgcttcaagggaccttgctcgagggacgccaactgcgcaaacgtctgcctgaccgaaggtttcaccggcggcgtgtgcaagggcctacgccaccgctgcttctgcaccagggactgctagtactgcctcgcctcgtgtcctgcgtgtgcatatatagccgcagcggatcagtaaaacatgcatgcatgcgttaccaaatatttggcagtaccagcagttaatgaatt

SEQ ID NO: 15517 - DNA, 384 bp, Zea mays
  Clone ID: LIB3150-108-P1-N1-E1
tgtttaggcccagctgcagcttcaagatttgtggcaactttaagggattccggtgatgctcttcctgtagccattggtgctatgaatttattacctgacctgcgttcaaagcagcttcttgtgcatttcttcctcaagcgtacagttgggaatctatcagatgctgagattgcacggcttaatttgtgggcattaggtctccgtgttctttccttattgccattgccatcacaacagcgttgttcttctctgcacgaacaccctcagttgatcgtagaagtactgttgatgatgaaacaactccagtctgcttctttgattttgaaagaattttcttccttgagggatgataagttaattattgcgtatgctaaaaaagcaatc

SEQ ID NO: 15518 - DNA, 241 bp, Zea mays
  unsure at all n locations
  Clone ID: LIB3150-108-P1-N1-E10
tcttctcctctaaaaactctnctccaacgcgcgcttttttctacctggggggcggccctaaaaccctaaaacccccccccttcctaaccacaaccaacaccttcgtcttctttcccaccactcaacatccatacctcatcttccacttcaaaaaccacctccgcaccatcgcttctaaagtcttgtctccgtcgctcatctccacccccatgccgaaactccacttttatacctacacctt

SEQ ID NO: 15519 - DNA, 363 bp, Zea mays
  unsure at all n locations
  Clone ID: LIB3150-108-P1-N1-E5
tctttttactcaacacagcacanncanttccgcgcgcgttttttatatcgcgccgcgcgaacatttcatttttccnncaccaccaccacaaccagccgnctccccccgcgtctgtccccaaccaggtgttcaaaatcttctgccgtgccaactagaactactgcctggccgtccgcgacggcaccgtcttgctgtccccgctcaaccccaacgaccaccaccatcacttttacaacgacattcgcttcatcacccgggtcaaggactaggaaggcatgccggcggtcgcgcttgtcaacaaagccacgtntcttgccatcaagcacttcctcttccagtcccacccgatcaaactcccgcctt

SEQ ID NO: 15520 - DNA, 440 bp, Zea mays
  unsure at all n locations
  Clone ID: LIB3150-108-P1-N1-F2
ccgtcatcgatctncgtttcaaataccatccgtggcttcgtttcctcgcggcgccggaggcgatctcaactccctatggcccaagatctaagattcgggatcctaatgggttcggcacggatccggaagggctggtggccacgggtggcctctgcagagtgaccgatgtcgagctcgtcgcccgtgaaccgacctccttcatctagcaccgactacatgancctacantgttcaagtaccgacactttgtgcacggaccagtggaaagcacccattgaagtcaaggggtgaaggacttccaaaacctctttctcttttggtgaagaaaggagcggttgcttttgtgtttggcttgcaaggaaccccctgaggaagatctccgtgnngggttcggttgggtgcctgaaatatgttgttgaagtctaccctggtgttttcac

SEQ ID NO: 15521 - DNA, 227 bp, Zea mays
  unsure at all n locations
  Clone ID: LIB3150-108-P1-N1-F4
ctgtggcctctgcatttgctttggcttgctggtccgcttcttccanccgaccaagggcgatcccgcgccatggattcgcgccgaccccgcgcggggcccgccttgccgtgctctcctcccaacctccgtggtgcaggggctcgaggaggctggcggggcttggagagggtctgccggtatctcgcgccggcgcctcgggccctcgcgcacggctgcgcttgctcgtg

SEQ ID NO: 15522 - DNA, 183 bp, Zea mays
  Clone ID: LIB3150-108-P1-N1-F5
tcattcgttaattctttccatctaattatttcatgcccccttttattatatacccacccgcgcctatacaaaaaaatcataccaaccttccacaataacaactataccatctatctttcaaaaattttttttcatacacaatataatataatatacaattacacaccttaatatcaaaaccct

SEQ ID NO: 15523 - DNA, 99 bp, Zea mays
  unsure at all n locations
  Clone ID: LIB3150-108-P1-N1-F7
tgatcccctgatcataatattcanccggcgctattttataaacgccgccgcggccccatccnnataaatactaatccctctccaacagcaaatatctac

SEQ ID NO: 15524 - DNA, 176 bp, Zea mays
  unsure at all n locations
  Clone ID: LIB3150-108-P1-N1-H10
ttccacctttgatgttaaaggacccgggaccacccccggctgggttcttatcggcgggggaggcgctttctctaattangacatccatggcgccgcagccggaggatgatattatgaacgagaagaatccccccccgctcgacgaggatgacatctcgctcctcaaaacctataga

SEQ ID NO: 15525 - DNA, 420 bp, Zea mays
  unsure at all n locations
  Clone ID: LIB3150-108-P1-N1-H2
ttgtgcaattcggcagaggctgactgtgactcggggacgcggagtagtagaaggaagcgctagcactagcnagaaatnagtaggcagtagcagggnttgactcggaggggctagtggtgaacccaacnaacctccctcatncccctccccttctttcttattgccaccactccacgtctccaccaaacaaggcaacaagggagaagtagatctgcatctgcgagaggaggcagcgggggtggtgatgatggagagccagccgctgcaggccccgacggccacggctccgccccccggatctgcggagccagccggagccccgccggccgtcaccctcggcaaggagttcacgcgcacctgcaagggcctcgtcgtcgtgctcatcggaggatacgtgctgctccagctcctcccttcgtc

SEQ ID NO: 15526 - DNA, 286 bp, Zea mays
  Clone ID: LIB3150-108-P1-N1-H6
tttcttctgcgcctccatttcggcctctgggcctggcaagttcaatctcacctccaaccatgggtaaagagaagtcccacatcaacattgtggttattggccacgttgactctggcaagtcgaccaccacaggacacctgatctacaagcttggaggcattgacaagcgtgtgatcgagaggtttgagaaggaggctgctgaaatgaacaagcggtccttcaagtacgcatgggtgctcgacaagctcaaagctgagcgtgagaagaggatcaccattgatatcgc

SEQ ID NO: 15527 - DNA, 391 bp, Zea mays
  Clone ID: LIB3150-108-P1-N1-H7
tgtccttctgcgcctccatttcggcctcggcgccttttatagaacaagcggggctccaaccattggtaaagagaagtcccacatcaacattgtggttattggccacgttgactctggcaagtcgaccaccacaggacacctgatctacaagcttggatgtatttacaagcgtgcgatccagaggtttgagaaggatgctgctgaaatgaacaagcggtccttcaagtacgcatgggtgctcgacaagctcaaggctgatcgttagagaggtatcaccattgatatcgctctgttgaattttgacaccaccaagtactactgcacgagtattgatgcccctggacaccgtgacttcatcaagaacatgatcactggtaccttccatcctgac

SEQ ID NO: 15528 - DNA, 285 bp, Zea mays
  Clone ID: LIB3150-108-P2-K1-A1
aaaaacaaacatcatttgacatctacttgctaatgaaatcatcgatggaactgggcagcgttattataatagtgaaggcggacgtgctgctacttccctcattcccaacatgaatcaaataccttcatcgaagaagaaaaatgtactaggcatgatccgaagtgtagccaccaattcttggagaggaacgacgattatgggcgacggtatgccctcatctcccctctcttctgttctttttttcttcctctcttctcttggggcaaggcacaaaagggtgacggc

SEQ ID NO: 15529 - DNA, 367 bp, Zea mays
  Clone ID: LIB3150-108-P2-K1-A11
cagaacaaacaaaatcgaacccggaatatccccgcggggaatttaaaaaacttgttacaaaaaatcttaatttaaaaagtggtcaaaaaaaaaaatttgggggcagagaaaaaccaattgaccagaaaactttttagggtgacgtaaaaaacaaccccatgtccaaactctcctaaaaaaaaaacttggaaaaaaactttttgggagaaagaaccttctgccaaaactaaattcccttgacggggctttaaaggttaaaacaaacattttttttggggtggccgggaacctccaggggtttcccaagaacgaacttgggggccctaagtattttcaccttggggaagaaaacactttgaagggggaa

SEQ ID NO: 15530 - DNA, 455 bp, Zea mays
  Clone ID: LIB3150-108-P2-K1-A2
cagtccattcggattcaaatttccttgggtccagtctatcgaattattggaccgcgacgcaaaattcaaaacataaccaggcagccacgcaatccatttgaatacgcaaattcagttaataagactaaatttcgtttgaacccacgaacactggcagtcaactatttaaggaatgagaaaaaggttcacattcagtctcgcaaaattgcaactcaaacgacattcatattcatctcctggcatttcggctacactgtcgctcactgctcctcttcgatgacgcccttgtcgctcacatagataccgtccaaaaactttcggatatccttcttcttcacatggcatttctggttgatgagggcggcggagcgagatacgagctcgacgtcggttccgtcaaggatgagctcatccttgaccttctcggaccggaggatggtcacgccatcaagcat

SEQ ID NO: 15531 - DNA, 445 bp, Zea mays
  Clone ID: LIB3150-108-P2-K1-A4
agaaaaatggtaaacagttgttctgattcattgttcaagggaatacaacaaagggaaggatatgccaatatagctcacaaccaattgtagcttcgcttgtgatattatagtgcactaaaaatagaaccaaataggaaatactcagtccggacctgctgtgcaacaacaacatcgtgaagatcaccaggtgcgggagaagaaagcggggctttaagggaaaggagcgccgtcttcaaagcaagggctgggcttcactgatctcttgaaccgatacttcgtcattacccccttcagtgtctggtgctggtgggacagggcctacaactccaccatctccattcccgctgtccacgtccatctgatcctcggtggttcctttgcttcctgcaggttcttcatcggtagccgtacttgtctgctgtggtttctcttcagagctgagaga

SEQ ID NO: 15532 - DNA, 399 bp, Zea mays
  Clone ID: LIB3150-108-P2-K1-A5
gaaagaagatcagatttcttccatacacatctagttcgaaacatcaaaactgcatgcatattcatcgacgatccaactttctaatataaaataaggacagcacaagaagtcacttagagcacagggtactatcaatgagcttgatcgtgaacctaattcatccttttgatgagctcattgatgtagttctcgcggttaccggcatcgccgccctccacatagtggttcctcttcttcttcaggcctcccagcggcgccttcaacttgaatggccagaggaagttgttggcctccttgaagtgtgggccaacagtcatgatctcgtgaacaagatcctcaatgcatatgatgttgtgcttgcccaagccctcctcgatgacttggttgttggacagaggg

SEQ ID NO: 15533 - DNA, 361 bp, Zea mays
  Clone ID: LIB3150-108-P2-K1-A6
attaattatttaattttttttttttttttggtttggttatttaaatattaaaaatatattttattaatttttttttttattaacaacatataattattttttttaaaaaacaacaaaaaaacatgattttttttccccccacacaaaaaaaagaaaaaacttttttttgaccaaaaaaaaaagtaaaaaaaaaaaacctccaagacttcctaaaaaaaaaaaaaaagcgagagaccccacatcctttcccctaaaaaaagccagaacaaaaggttccaatacaaaaaaattatgtccttaatataatgtcaaaattccccctctaaaaaaacaaaaaaaaataaaaacccggcattccttt

SEQ ID NO: 15534 - DNA, 390 bp, Zea mays
  Clone ID: LIB3150-108-P2-K1-A9
aaacatgcactcgtgcattatactaatcttgtttatcggatattgtttacagaaccaatcaaaaatgcgataacaagtgctagtcacgacaagcaagtttacaaacaaagcacaatcaagcgacaaacgatttgtcatagaatgacacacagcaacgagacagtaatcacaaagtgcaaggcaatttttttaaggaatgacacacagcagcatcttaacatggtttgctcagttctaacaagtctcaacttgttggaacatagataaatataagctgggactacgagcaccaacatgccccctgacagaacacaaacttagcgcttaagactgcctgttcttcttcttgacaccggacttggcaacctggaggctgcggtacaccgagct

SEQ ID NO: 15535 - DNA, 466 bp, Zea mays
  Clone ID: LIB3150-108-P2-K1-B12
ggccatgtcgtcgtcagcggcggcgcaggggacggagcacgaggctgacgcgtggtacgcggtaccgggcctcagcctccgcgaccaccggttcgccgtcccgcttgaccactccagtcccgagcgcggggacaccatcaccgtcttcgcgcgcgaggtcgtcgccgctgggaaagaatacatatctctgccttatttattgtacctacaaggagggcctggatttgagagtccccgtcccacggaagcaggtgggtggttaaagaaagcttgtgaagaccaccgcgttgtcctgctagatcagcggggaacaggattatccacaccgttgactccatcatctctttcgcaaattaaatctcctgcaaatcaggtggagtacctgaagcatttcagggcagataatatagttaaggatgcagaatttattcgtgtacgtcttgtaccagatgctaagccttggaca

SEQ ID NO: 15536 - DNA, 457 bp, Zea mays
  Clone ID: LIB3150-108-P2-K1-B4
attcagcttcgcaatgggaagtctagcagtgctttattcttattcctcggagcgaacgaagtacaaacagtcggtgctcggcgacagtaatgaacaaataaggtagtttgtacattggggatgaataccgtaaacgatcaatttggcaaaaaccactaggtagaagcgagccataccatcatctgcggattgagtcaattaggctgcagtctggccaaaaagaagcttccggatctctggcaatttcttgcggaaaacaacttccagtctggcgtcaagtgtactctcaaacacaatctttccatctcgagaagccaagacaatacctccagagcaaaactggccgtgagcatcatgatggcttggggcaggtggtaggtacacatcatggtcaacaaatatctctggttcatggacatctgcttttgatgcatactcgtgctttgctgaatgcagt

SEQ ID NO: 15537 - DNA, 315 bp, Zea mays
  Clone ID: LIB3150-108-P2-K1-B5
gggattatattatcggtggtgggtaggcaaaaacttaaaagccattgttacctgtggcttttttgaaatcccatacccacaatcaaactttgggggcttttaactgctgaaaggttaatatctttgaaaaatgaaaccttgtttgaatgcccttgccccaaaaagcaattttttaacatttttgaagcatagggccaaatataaaactcaaggtgcaatagccctccaaaacaaaaggggcccggccagaaatattcccctagggtgtaaaaaccatgttgggggggacaatgtccccattataagccttggggg

SEQ ID NO: 15538 - DNA, 377 bp, Zea mays
  Clone ID: LIB3150-108-P2-K1-B6
acagtatgtattatcacatttttccattcaactattcatgcactgtgtcatatcgtgaaaagagaggtggtggtggggaaacacaacaccaccgttacatcaggcatgtacagaaaaggccagatggtgcaattccagcactcacgtccaggtttttcaacgaatgaatcgtacatcaacaataccatgccatgccataccggagcagagcattcatcttcagactggtgggccaatgccaagctaactagtattgtgcagcgtgccaatgccagagagagaccccaacttcaccgtgcacctagcaactcaaacctttaactcaggggaaaaagagcttggagtagagcagctcgttccacgtgtcctggagcccc

SEQ ID NO: 15539 - DNA, 375 bp, Zea mays
  Clone ID: LIB3150-108-P2-K1-B7
gggaacaatacttttgtcttttcatttcaattggggggtgagggcattgctcacactgacactgccacccatggggatgcgtgacacattattactcaatcatcgccgctaaatgactcaactagctagctagccagcggctatactacagcacatagttttttcagtgggggacaccgccggcagcagcgtaggggcatggagtcggctgctgcaggccgcacatcgccgtcagttgctgcgctatttgcgccgccaacagccccgcgacctggccgctttgcggctgctgctgcaggatggactggaggaccaagccgaagatcgcctggtaccggtgctgcggttccacctgcctgagctgctggcaacact

SEQ ID NO: 15540 - DNA, 278 bp, Zea mays
  Clone ID: LIB3150-108-P2-K1-B8
agagcaaccactgacatgcttctcaaatccagtgaataataccagtccacacggacttaatgccaactagcggcaacacaaagcaatggggaactaattcgaacactaccagcctactaatataaaaaaagaagtgagggaacaggaaatcagctacaataatagcacggcacagcttcagcttcgacagcatagagcatctaaaacaatgggctcgaacaatatgcgctcttccaagattactggccgtcaccaggcttacctttcggggcttcttt

SEQ ID NO: 15541 - DNA, 394 bp, Zea mays
  Clone ID: LIB3150-108-P2-K1-B9
aaaacccgggcaaccgggggagttgaaaaaaaaaaatttcaaacaaacagtttttacccttagcacggtttttgggagggcagccccaaaatttgtaataagttttggccgccgttaaacaccgttacaaaatttggtttggtttccgggacttcacgttaccaccaccattgtccatttacaaccatttacaggttgtggggggcgtggtaaacaccgccgttagggttaccgccaggggccccccccgaccgtttggacacggccgacacgatggggttgcacacggcctccaccttcttgggctttttcttgaaggcctccttttgggccgactggttgtcgcccagccactccagcgccttcttgggggccttctccacctttttttttt

SEQ ID NO: 15542 - DNA, 352 bp, Zea mays
  unsure at all n locations
  Clone ID: LIB3150-108-P2-K1-C1
anaaaaagaaccccaggctttttttccggttttaagattaaccaaaattttcaccgtcggcatttttggccaagggttttatttaaaaagccctaaaacaaaggttttaaaagaaaaaaaaactttttttttaaaaaatccccccggattttggcctttccccccacaaaaaaatttttttttttaccccaaaaaaacagtttttagaggggcaacccccttctcccacccttgggcagtcgggggggggttttttttgccccaccctggggggccacccagggggggtccggtgcccccccccaaaggggcgggggccccagtttgtccccaccctttcccggagggaacc

SEQ ID NO: 15543 - DNA, 183 bp, Zea mays
  Clone ID: LIB3150-108-P2-K1-C12
aaaaaacaagtgacacaacacggacactttcaacatttaaggggataacattgccaattccaccaacatggtttttttactaaaacatattgccttaaaatattacccggattaaaactttgggggggttggccaaaaaaagcggtttattcttcaaccaggttgaacccattttcttaatcc

SEQ ID NO: 15544 - DNA, 385 bp, Zea mays
  Clone ID: LIB3150-108-P2-K1-C2
gccgtgcaaaatattgttttgcagcttactgaagataaccaactaatccattgtgtcggcgcaatacatctgagttttgaaacatgaattatttcaaactagctgagctagcctcggcacttcatcttacagggcaaccaacaacaaatatgcaaataacgaagccaacaaaaacccaccccaccgtaaaaaaaaagacccttttaacaatctggacccaaaaaagaaacatttgtgtgcttgtattcactgatgaatttcttcctcaaatttgtaacctacagcaactgcctacaacaacacccttcccgttaccgttgtcaatctcgttttggggaagaaaacagggtcgtgacgaagctgaggaccttcaggagtggttggg

SEQ ID NO: 15545 - DNA, 335 bp, Zea mays
  Clone ID: LIB3150-108-P2-K1-C4
ggggggggaaaaagacactttttctggtttttaaacacataaacccattgggacaaaaacccttacaggttgggacatggtttgggcccattttacaggcaggaacaggggcctaaacaacgggtttccttttaaagatccaactgaacttggccggccgggggttgtcctttttggccctgtcctcggggcgcttcggggcccggggcattcttggggcggggccccaaacaaagtccctggccctggggcccttggcggagaggccggtttccagggttttcaggtttcaccgtttgacaagggactctgcgatttccgcgttgtcccggggg

SEQ ID NO: 15546 - DNA, 292 bp, Zea mays
  Clone ID: LIB3150-108-P2-K1-C5
ggggtggggggactccactggggggttgcatttatgggaacaaattagggggtggtttggtgggttttacaccgggtaaaaccttatttttgggggcttacttatacttttaccgatttttaaacttttcttttcacaggccatttttcataaaaaacggtttttttgggaaccatattgatgaactaccctaggtttgactcatatgggcaaccaaaacactgtttccccgttttgtatgggacatttcactgtttttaaaggataatttgaatatattttgtgggaaccc

SEQ ID NO: 15547 - DNA, 437 bp, Zea mays
  Clone ID: LIB3150-108-P2-K1-C6
gaaggcaatacgtcatctttaggcaaccgaccgaagcaaaaactgaatcacaaacaggacactgaggtcaaattgcgttgctagatataccgagattatgatataagcagtctcctttcaagttggttgacttcataaggcattaaacagttccctacgttgagttccagctaagtcaaacaacaacaacaaaaaatctcccaaaagggtcacagttccgcccagccacatcatccacggacaacattctgaaccaagcgcaagggctcagttctccaaatcatcgccttcatcgtcatcatcaccatccaaatcatcatcatcttcatctccttcaaattcatcgtcaacctcattgttgaagtacttcaaaggattaggccacaaatcttccttgatgatctccgccacctcatcttgcacaccatcagcaagac

SEQ ID NO: 15548 - DNA, 295 bp, Zea mays
  Clone ID: LIB3150-108-P2-K1-C7
ggaacggggggttatttaattgagttttttaacagtctaataaggctaaaaaagcttccgcctttttacaaaaagtggcctgggggattagacatttaaatcagagccttaacaagggtgcaactattgtttttatgtttcggccactagccttctttggtttgccttttaacaggagcaaaatgtttttggatttttcccctccctgcactcaaattcattggggggggaaccagttgccattttaaaaaccatcccgtgcaggcggtggaaggttgacctccccttgggtggg

SEQ ID NO: 15549 - DNA, 387 bp, Zea mays
  Clone ID: LIB3150-108-P2-K1-C8
ggctggctccaactcagcatatatgaatttttgccgactccaactcagcatatagaattgtttttgccgatacatagccagcattacagcatagttgatagaacaaaaaaagggggctgctcgattctccatcggcaggaccaacttacacgaaatttaacagcaaagagactaattaacatacaaatataaagataaccatcatcccacataggaagcatgttttttggatgtccgaaaataagctctaacgagcaaaccacactccgcaacctagctcgtaggcaggagttccaaaacgggcacgcaaagagaagcaactcagtacttgtagtccttgacgtggaggctctcggtgtcggcggcagcatcacccttgtaggtgcc

SEQ ID NO: 15550 - DNA, 298 bp, Zea mays
  Clone ID: LIB3150-108-P2-K1-D1
tgttctgacgagaaatggcgttccattttccattcagtgaaccaacacgtccgaaataaccaaataggcacggtatagaaagcaccccccaccatttactttaaacattacaacgacgaacagcagtatcgcgacagttaaagccctctttcccctgatacggcgggcgagctggattgccttgggcatgatggagacccttttggctgggatggcccaaaggttggtttccttgaagagccccaccaggtacgccttcgcggccttctgcagggccgcctcggccgtggactggaac

SEQ ID NO: 15551 - DNA, 314 bp, Zea mays
  Clone ID: LIB3150-108-P2-K1-D11
aaaaagaaaaccggcccaaatttttttttttccccggaaaaaaaaaagggcccaaaaattggcgaaaaaaaaaaaacggggttgggtaaggccccccaaacccaaacctggtaaaaaacaaaaccccctaaaattgtccagggttttccccaccaaaagggggaccaaacccccccgggggggcaaatgttttgacaggactagttccccttcccaaaaaaaaaaaaaaagttgttttaaaaccccgggtggtttttaccccaattgggcaaaccccccttttgtgcctcccgggggggggcggggccccccca

SEQ ID NO: 15552 - DNA, 442 bp, Zea mays
  Clone ID: LIB3150-108-P2-K1-D12
acgccacaatggatttctttcagattccattactattaaaaatgactaagtttaacgttgactcgccaagtctaacacaaccatcctctttaccaaggtttaacctcatccactttcttcttttcaatatatataaaaaatcagtagttcgtttaaacaacagcaacaataatgacaactcaaaccagtttcatccgttggtatcctttttgcagagcttctgacctggctttttataatgagcgtcgtcataatgccatatcctgagaactacgagatagaatcatagaagggcgagcagttcagcatacagcacaacatgccaatgttcattcttccctcctcaaccccaaattctccttttctgagccttaacctcaagcaacctcccataagttagcatgctacgaccaattagagacgcagaggatatcaggatcac

SEQ ID NO: 15553 - DNA, 454 bp, Zea mays
  Clone ID: LIB3150-108-P2-K1-D2
cagacagcaatgcaacagacattgcacccaaatgtgcgttataccgtagcattccacagacattcaagtccgcctatatatcgaaaccatcactctagcaaatccccaaacagaagttaaaaggtacccagctatgcctgggtagcattttttatgttgcagcaaaaaaggatacattccccgcttaagaggtcgattcagcttcctatttcccagctcggcgacagcaaaaccagagatcactcccacgctttaagggcaccacccctcccaattgccttgatgatagtctgcttactgttgcgcgcactgcactctctgggctccgcccggcatctcgtcgtcctcctcgtacgcctcctgggcagcgtgagcttgcttcctgcgcatctcttccctgatgttgttcacatcatgcatagtcgtctcctcgcattcatctatctccatgtct

SEQ ID NO: 15554 - DNA, 449 bp, Zea mays
  Clone ID: LIB3150-108-P2-K1-D3
gacttcttaagcgcataccggccagttggccattaatatccggtaatgtcattgttttttttccattcaagtgtttacaagtctgtagccacgcgctgaccttacagttacaggtaaaaaagcacacgagttttagttcagcgacaaaatttttatttatccaagttacaccagatggagcacaacggaagagctgtatagctggaaggacccaaaaatcccagcctagcgtccacggaactaaacatcaatagcttgaccctcaactatcgtacctcagcctagttcacattatggaaggaatcgatgatggcgtcggcaagataatcacacttagccagggacagcccagctaacgagatccgcccatccttggtcatgtaaatatgccatttatccgtcatgttgtcactctgcgctttgttcaagccggtgtaggagaacatgcc

SEQ ID NO: 15555 - DNA, 319 bp, Zea mays
  Clone ID: LIB3150-108-P2-K1-D4
aaaaccaaaactttattatgatgcatatattattggtcataccacacatgataatgtgtgtcgtcttactgcattattacatatatagatagagagggatggatagaggagatttcccaaatatcatgaatcagtagtagggcggaatggcagcggagacgccacaggggttggtgcggtagctgggcagctggtactggtactggtagagtccacccatggccggcatgttctgcgccatcatcatggccatggggttgagaccctgggctgccagcagctgctgctgctgctgcatcagagctggctcgtacaggct

SEQ ID NO: 15556 - DNA, 454 bp, Zea mays
  Clone ID: LIB3150-108-P2-K1-D5
acactaaccactgcaatctgcaaatcacataaaccaccacaggaattggtcacagtgacgaatatttacaaaactgagtcttttcagtccataaaaattaaacagtactgctcagtgaaaaccccaaacacgatgctgccaagcatgaagcacaagcatgtctccattgcttgattgatggaactaaaaacatgatcggaaggaaactgaaacaagcaatggagaacctttgctgtttcaagcattgctgggtgataaacataaggttagacagctgtggctgaagcaacgggtgtccctaggctttcgccaatagctggacgaaggcccttgtctgagacaggatcagcagaggcaggagtttcccctgcagtgtcttcatacgcagcatcgtgaacacccaaagcagcacgcccagaaggatcaaggttctttgaccaggatgcatcccatt

SEQ ID NO: 15557 - DNA, 416 bp, Zea mays
  Clone ID: LIB3150-108-P2-K1-D7
gaacaagcagaacagtttacagtgatacgaaattgttcacagattcacataggtaacaaagttacaactctgattattgtcatacatgttcaactcgaatatgtggaaaactgtttcaaagcgaaaatgatactaacgaaaactgagacgacaggactcattacgcagacacaactcacatactcaacaaatacggctgaaggtgtccgatgacaaacacaaccaacgataatagtaaacatgtacgactcagttgtccgacgtccacctgctagttgctctttttagtttctaactcgtaagcattgcgaagccaagcgattcttccttcctttgtctccaagtttgcaaaaacatttctatacttcttatgaatcagaagatgcgtggcaaacaaatgtatttcgctcccttca

SEQ ID NO: 15558 - DNA, 453 bp, Zea mays
  Clone ID: LIB3150-108-P2-K1-D8
aaacataccaaaaataaaattccagagcatacaataaggaaccacactttcatccggtacatatagcttgtctgggcaaaacttaattttaaacagaagtgacacggaacgaactgtcttagcactgcccttatcataagatacaaacctagctaggaccagatcaaactgccatttcgaggacgctgttgggaccttagacctcagctgccaagacaggagggcgcagctcgtcctcctccttcggggtatggatggtcaccaggtccggaagaggggtgatcgggccaaccttgcccttcgggtcccagtcaagcatgatcttcaccttgatacccagaacaccctgtctgaggaggacgtgtctcacagctgagtcgatgtactcattcactggctgaccagatgagatcatgtagccatccttgaacttcatggacttggctctttgag

SEQ ID NO: 15559 - DNA, 430 bp, Zea mays
  unsure at all n locations
  Clone ID: LIB3150-108-P2-K1-E1
accaaatagcgtttattcaaacatgttctgataaagaagcaagccatcgatgttcgatggagcctcgtagtacaaggttcgacacgacggtaacaagcatacacgcagggaggggcctatatgtgtaataggaggaacgcgcaggcggcgtactaggcctgcttgcagtacacagccagatagatatgctccacctcagatattatatataataagctggccctgcatgcagggttggtttgctatggaccncgcggttgctcagaaaccatgaatcttgatgtgctccttcttcacaatgccggcctggacgaggaaattcgagacgttcttcctctgatcaccctggagctgaatgacctgtccaagttctgggtcctggaccactgtaccattgcagcagaactctttcttgagatctttgaggatc

SEQ ID NO: 15560 - DNA, 355 bp, Zea mays
  Clone ID: LIB3150-108-P2-K1-E10
aaacaacttaggaaaccaaatgctttaaaaaataatcccaaacctccggaaagaaaaacaaattttttccatacccatttaggtggaaacataaaaactggttgcttttttatgggcgatccaactttttaatttaaaaaaggggccgcccaagaaggtattttaagcacagggttcttttaatgggcttggtcgggaacctaattcatccttttgaggagctcattgggggagttctcgggggtaccgggattgcccccctccaaaaagggggtccttttttttttaaggcctcccaggggggccttaaaatttaatggccaaaggaagttgttggccctcttgaggggggggc

SEQ ID NO: 15561 - DNA, 407 bp, Zea mays
  Clone ID: LIB3150-108-P2-K1-E11
ggaacaatacttttttcttttcatttcaattgttcattcaggtcattgctcacactgacactgccacccatggtgatgcgtgacacattattactcaatcatcgccgctaaatgactcaactagctagctagccagcggctatactacagcacatagtttcttcagtgggggacaccgccggcagcagcgtaggggcatggagtcggctgctgcaggccgcacatcgccgtcagttgctgcgctatctgcgccgccaacagccccgcgacctggccgctttgcggctgctgctgcaggatggactggaggaccaagccgaagatcgcctggtaccggtgctgcggctccacctgcctgagctgctggcaacactgctgccgcaacgactggcactgaggcgagcagt

SEQ ID NO: 15562 - DNA, 330 bp, Zea mays
  Clone ID: LIB3150-108-P2-K1-E12
cattggtcacactttcactgcggcccgggggattctttacacattattactcaatcatcgccgctaaatgactcaactagctagctagccagcggctatactacagcacatagattcttcagtgggggacacctccggtagcagcgtaagggcatggagtccgctgctgcaggccgcacatcgccgtcagatgctgcgctatctgcgccgccaacagcccctcgacctgcccgctttgcggctgctgctgcaggatggactggaagaccaagccgaaaaacgcctggtaccggtgctgcagatacacctgtcaaaactgcctgacaacac

SEQ ID NO: 15563 - DNA, 441 bp, Zea mays
  Clone ID: LIB3150-108-P2-K1-E2
cgcacaataaatttaatttacttgtcgagcaagattcgaaacaccaagaagtagattctcacaaagccatagtatcatctacgataaatttcttcatgtttgaacagtatcaggcgcacatttcaatttgtaatatggcgctcgaaaactacacttaacctgtccaaaaacattgggttaatcctcatctttcctgggagacttgaaattagcaacaagacgacgacgaccggcatcatgagctcacggtcgtatccatcttggaggcgttttcgatgcccttgaaggccacacggagcttcctcaacgaggacacttttttcccgttgttctctgccatgcccgtggcatggacagtggtgtatgggacctctttgagaagctcaaacatggggatgctcaggtttggccgagttatctgctccagcaccttcggtgact

SEQ ID NO: 15564 - DNA, 433 bp, Zea mays
  unsure at all n locations
  Clone ID: LIB3150-108-P2-K1-E4
gggaaataatggatttcttcatttccttataatttaatttcttttgcatcaaaagaaacgacagggaaatatctttctgcttttgcatctgaattattgggccccagattgcgattggaccagctacccgaatcagctatcagccaatctacaaatgtctgtctgcctctacatcttccttttcttggctcagtcattaagttgacacgagatacaaatcaactagttgatacaagatataaatgtttccataaaccaaccatgcatttcatgacacaacatgacattttcagactttggtttagtacaagtgatacttantcctntgccattttcagcaggctggccttcaaatcggttaagttgccttgtaggggaattcatcaattgttgagtaaagacgccccgagtccatattgtaatcaatagcatc

SEQ ID NO: 15565 - DNA, 397 bp, Zea mays
  Clone ID: LIB3150-108-P2-K1-E5
acaccggaacacgggattttattcctaatgataagggtgacatccaaactagacatatggggcttgctgtacatccgcctttccgatcaaagggggacgcatccagaatatagtactgcactgaactgcatgcccccagacacaggcttgcccacacaaagcacaacacataaccgcctggctggggctatcggggggaccgaaactttacggaagggtacgtagcaacagccaccgcctttaagggccatatgccgccgccccggcaggggttaaaggaggacccccgcgcggtccgctcgggtgttttttttttaaagacccctgcgcctggtaaatgcggggctgggcatgatccttgatgtcgggggccttggacgccagccttgccttgggg

SEQ ID NO: 15566 - DNA, 425 bp, Zea mays
  Clone ID: LIB3150-108-P2-K1-E6
atgaaaagcacaagcagggcaacatattaagtcaggagttaatactacatacgaagaagtgccaccaaagggggcactctctgatacgaattaccatcacagaagcactagttttctcagagttgaggcgaggcgtcctcttatttaggcgaatactacattacggcatcactgatctacgaggccatgtgtagttcaagcttccttgctagctcttcctttgctgcgccaacgaccctgtccttgacgtcgccctccctcatgaacaggaatgttggcatggcctctacgctgaattgctcagcaatggtcttcatttgatccacatcaactttcaggaaaacaacatttggggacttcttggccatatcagcaaaaattggagccatggcgcggcacggaggacaccatgttgcagtgaagtc

SEQ ID NO: 15567 - DNA, 416 bp, Zea mays
  Clone ID: LIB3150-108-P2-K1-E7
gaaaccaatagttgcatgaaattgtagaagcaatggtacgtgtctcatgcacatccaatgctttggcgaggttttagttggctacaatgcacatcgctaaaatacatagcattttcctctcttcctagactccaaacgaccaagattaccaaatagtcgaatccacctacggtcttgttcgattattctctatcccatgtggatttgatgagattagaaaaacttataaaggattttgacttgtttgcgatttaaacacatccaatccacatggatttagagcaaaacaaaccaagcctagctttgtaacccgtttgcgtgaatcgacaccgagagaggatcaagtatttgtgccagggaaggcatgttcgctcctcggatgtgcaaagcagtgaatgcaggttctgcatacataa

SEQ ID NO: 15568 - DNA, 334 bp, Zea mays
  Clone ID: LIB3150-108-P2-K1-E9
ggggaccgaaaaaaatgtgtttgtttacggcccccgtttacacttgtttttttaaaagtttttgcagcattgttaaatttttaaaaaccgggaattttttgtaatacctgccaaatgcaaaacccaatttcaatggattactttaacagggaaattgtttctggaaaaagtttttgtttgaaaaaaaaattttgggcccaacctaacaaaaggtaacacgttttttttattagggacgcattttttaaacggtggggccaaaaggttggtgttctttcaaagagcttcacagggggacttgtttgggggggggggccattttctccgttttttt

SEQ ID NO: 15569 - DNA, 448 bp, Zea mays
  Clone ID: LIB3150-108-P2-K1-F10
gccgaaaaaagctattgcaaaacgttttcatagctgcaccaggcagccgagacatacgactggtcaggaccatgtagactgataactccgataactgttgcatctcatctcctgtgcttatactattcatcaaagggggagaaaagggagggaggcatccgcttttcacactacaacaaattctgtgttgcgcacctaaggtacttagcccttggagataccttcacgtctagttcgcttttgactcgattaccctctttgcaaaagaaggcaaacagaatgatgccgtgtggatctccgagttgtagaacttaaggggtccttttgatttcataggatgttcatcctcctcgatgttgaaaacagggtgctggaaatcaacagcaggcccttcggtggagcaaagcatgaacccaataactccgctagggtatgtaggcaccgttgt

SEQ ID NO: 15570 - DNA, 431 bp, Zea mays
  Clone ID: LIB3150-108-P2-K1-F12
aataataaactcatgcaatgcatatgacaaattgagtttaagttccatagtttaatcatgcgagagtcctgagctgctcatgaccgtgagctcggctagtataccagttttacactctgcagaggttgtaccctgtactcacaagtcgtgtatcccatgtcgccagggtttgcaaggcccttagacactaccgaggtgaatggttagggatccactatgaggcctttacaaagttctactagcttccgaaaacccgctacagtttatgggaagagcacttgcaagaatcccccgtctgaccgccatcgcagcaaaatcatcccgagaaccttcttgcatgcaactcccctactgccctggccccttttgggtaaggtagtcttccactagcttttctaattagtcagtcaagggcgtcccattccaccctt

SEQ ID NO: 15571 - DNA, 429 bp, Zea mays
  unsure at all n locations
  Clone ID: LIB3150-108-P2-K1-F3
acaaaaaaaaagagaatatttgtacttaattgctgaaaacgattttaatcacagtgcatgcactccttagtgttgagggtacttatgacacgacgcgaggaacaagacaataatctggacagctaattgctgtctgttgacaaaaacaacgactaaagtagcatgacttctagcgcttagctccagaccaaaacggacttcctaacacctgaatagactgaatgaagaaagccacgccccctgtctcgccgcattaaacgcggcagctgatctagttattcccaccgttactgttacacttgtcagggtgctagagcccggtcctttctctttcttcctttactttttcggcacgttcgtcgtctttccctcgtaagctctaaattgggtgctccctttatgngtccaatttatgtctttactgcacct

SEQ ID NO: 15572 - DNA, 456 bp, Zea mays
  unsure at all n locations
  Clone ID: LIB3150-108-P2-K1-F4
acattcaattgatatactatttcagttaatatcatatggggaagaactcatcaggcacacaaattttggactccagtggtacataaacaggaacattctctctctctctctccctccctcttcagttaggaaattcatgcattgcgaggaggtttgatatagtgattttcttaaactctatcagaagtacatagaactgagctcagggaaaggaagacagaatagacttggcgctcctagtgcatgccccacgcgcccatcccagctgcgatttctcggtgtcatagatcaccatctgatcctgcatcgngatgtctccaattacgttgaaactcagcttggcagccgttccatcaagaatgcccaggcacacatttccattttttgtgacaatgaggtagttttcaggtgggatctccatggcggcattcttggcactggcaaagctcagaaaca

SEQ ID NO: 15573 - DNA, 388 bp, Zea mays
  Clone ID: LIB3150-108-P2-K1-F7
gggaaaactggggaacgggttttgttttttttaacatgcccggaaaggtgggtccttattggggtacaaacaaacaaggcaaagagcaggggccccccaagggaatttggtcctggtgctccaacaggcgaaacggggacgggtggccaaaacaatgcagccaaatgatcataggaatctacagttttttcggggggggtacgagggtccctacatttccgagctcctaatttttttgctcacgggcgagccgaacgacggccccccctttttgtaagacaccaggtactccaccgggtacccctttagcttctgaggcatgatgcttaggtctttaaaagtgaaagcatttttcgattcgaggttgtccacagcaaatgcgttgatt

SEQ ID NO: 15574 - DNA, 283 bp, Zea mays
  Clone ID: LIB3150-108-P2-K1-F9
aaaaaccaaaactttattatgatgcatatattattgggcataccacacatgataatgtgtgtcgtcttactgcattattacatatatagatagagagggatggatagaggagatttcccaaattttatgaatcagtagtagggcggaatggcagcggagaccccacaggggttggtgcggtagctgggcatatggtactggtactggaagagtccacccatggccggcatgttctgcgccattattatggccatgggtgttagaccctgggctgccagcagtt

SEQ ID NO: 15575 - DNA, 375 bp, Zea mays
  Clone ID: LIB3150-108-P2-K1-G1
aattagcattattaccacaagggggcaaatgcaagattttaaaagcgcgacttcttttttcacataaaattcgaatccgaatcctgaacaaccaaggaagtagaagaaaaaaaattacaaacaaacagtttctacgctcagcacggctattggcagagcagcaccaagattagtaataagtattgtccgccgctaaacaccgttacaaaatttggctcggctcccggcactccacgtcaccaccaccatcgtccatctacaaccatctacagctcgtcgtggtcgtcgtcaacaccgccgtcagcgtcaccgccaggggcgccgcccgaccgctggtacacggccgacacgatggggttgcacacgggcttcaac

SEQ ID NO: 15576 - DNA, 390 bp, Zea mays
  Clone ID: LIB3150-108-P2-K1-G10
aaaattcggagcattaccaactccaaaaatatacatgatccattgaattatgtcaacacaccaacatgaaaaattgagtatagaaatacattaattattatccggttacatggaataagcaaataaaaaataaagaagctacaggcaagtaaacaaactgaacactattttaggaaacaggctacacgaggcagttcctcagccttctctacaagattttgcttcgccttgaaatcaagctctgactcccaagactacaagcaataaactcaatttccactaaggtgcttggtggtcctcactatgtcgccgagaagttcagcgatgcaatcattcttccatgtcatgtccaagatctgctcgtgctcttgctcgagtctgataaacttt

SEQ ID NO: 15577 - DNA, 265 bp, Zea mays
  Clone ID: LIB3150-108-P2-K1-G11
ggtccaaccaatttttttttttttccaatttcatctacggagatcctggttaaaagcgaacgaagactacaaactagatgtgctcaccgcattgcaccctgctatgcagggtaggagcacactgcatttgttatgaaaaacaagctgttttacatccacaagcaaaaagccggtggagagacccttttcttacgagaaagagctattctatatgggggaccggaggacaccaaaacatgccttatcctagctccatctggatggg

SEQ ID NO: 15578 - DNA, 451 bp, Zea mays
  Clone ID: LIB3150-108-P2-K1-G12
gtacaggtatggtatatcattcacagcacaccgtagagaaacaactcaacttcatccacatacatttcgacgatagtattaataccgcacagaggccaataagattccatctcactcagggcccagaaacacccttgtcaaggccgtaatccgtcatgcccacaccaacctcattttggtgcttcatgaacccacccgtcgcagcttttgagtaactccagtagtacaccagggacgccaggaggttgatgatcatcattgcagcagctgctgcaaagactcccttgcgaagggcggcgcacgacaccaagtcatgcttcatgtagtagcctaaatacttggtgtgctttgcattcctcaccgatcctcctatgagacaagcttctgcgacgaggaatgttatccaggagaggacgaatgccgttacggcacagccgcgggaggagagcac

SEQ ID NO: 15579 - DNA, 394 bp, Zea mays
  Clone ID: LIB3150-108-P2-K1-G2
aattaaggaacggttcagtttcaaacccttggtttcaattgagagtgcgagttccacaaacaaagggaattgctaccctaaacatatacagccacaggagcatgagaaataaaatattggacaaacatggtttctatactcagaacagattattgttagagctcaaaccaacaattagtaatcaagtattgacctccaaatcaacaaccgttacaaaatctgtggtcgttttgccggcactccactgttcgtaccaccatcattcatttacaaccatctacaggttgttgtggtagttgttaacaccggcgtaagagttataggtagtgtttgcgaccgacccttgttacacggacgacacgattgtgatgcacacggtctttagcttcttgag

SEQ ID NO: 15580 - DNA, 447 bp, Zea mays
  Clone ID: LIB3150-108-P2-K1-G6
ggcgatgcgttccaattcccagtcaaacatttttttagtcccacaggtgaatgttttctaccactgatgcgatgagaaactgaccacgcaaaacaacaacaaaattaactagaagacagcagagacaatagtagcactagcataccaacaacagattgcataatagcataagtggtaagacccacagaacagacccgatgttctctctctttcctccataagaataaacccagcttagtcgacctcctccatcttgctctcgccagcgtcatcctccagagggggcatgtcggtgtcagcctccggagcctcctcgtcctcgtcgatgctcaggcccagcttgagcatgcggtggatgcggctgccaaaggtgttgggatcgtcgaggctaaagccagaagtgagcagcgccgtctcgaacagcagcatgacaaggtccttaacgga

SEQ ID NO: 15581 - DNA, 411 bp, Zea mays
  Clone ID: LIB3150-108-P2-K1-G7
ggcgcaagctaacttaagtatttcatatgattccggacaaaatatccagagcacacccattcttgatgaagtttgaaaagggtacacatgaaacatattactaattctggctttgacaacactcaaaacaaaatgctgatgcaacatgaaaccaaaaactaacatgccatccaccaaaagggacttaagccgtggacgcctttttcagcttggcgagcttttgcctgatagcaccaccccttttgatccttgccagcatgaccttgaacctgttaaagtcactgagcgcagccctcctcttttggacaatcagctttttggcccatgagctgttttcccacttcgtttttacataagcttcctccatagccttgatcagggttgacttcttgggaacgcgtttgatgtcaa

SEQ ID NO: 15582 - DNA, 453 bp, Zea mays
  Clone ID: LIB3150-108-P2-K1-H10
agtataaatagttatattgatcatcaaacaccaaaacaattagaatctatatgcaatgattgggccattaaacaaccaaaatagcacaaaacatagacagtgcagttctgaagcatggaacaatccatagacgaccggaccatggctacaaaacttggtacagcaaggttacaaacaaaagtatcacagtttgatgattttgagaaatgggacttcgctgcaccgcagcaccttacgccttgagcttgccaaagaacctctgcttctcatcggtagtctggaagcgaccgtgcccaaatttggacgatgtgtcgatgaacttgagcttgatctcctccagcgccagccgagaagtctgcttcaagagggactggcggagggtcaccaccctcttctttggacccacacagcagcccttgatcatcaagtagtcacccttcacgataccataat

SEQ ID NO: 15583 - DNA, 253 bp, Zea mays
  Clone ID: LIB3150-108-P2-K1-H8
gggctacacctccgggttcattattcaccaagggtaaaaattaaatccacttagcccaggagcatccatccaattttaacccggattccttcaaccttaacccaataaataacctttggttaacaccgccaaaaccaacatgggtggaaggggcacctttcttcagctacaaattggttcattaatacatggtaacaagaataaactagacaagggcatagggtttcaatttttttagaatagcataataaac

SEQ ID NO: 15584 - DNA, 362 bp, Zea mays
  Clone ID: LIB3150-109-P2-K1-A1
caaacagagttacaaagcaatgtataaagtagccagcaaattcatggcgaggagtaccatccatttccacactcaaaagatgcaacacatccaaggagaaaaagatgatccagacaatgagaactcaagagttcaccctagaacaacttaaaacacgcaaggcacaactcctgctcaagttcaagactcatgatcctttctactcaatcagatcatcatcgtcatcaggaagaggttgtgcagctgctgcagcaagctcagcttcatgctgctgctgcatagccatgtcgatggtaacttccggaggcttaagagcaacagcttcaacaaagtgagggttgggatcaccacccagttttttt

SEQ ID NO: 15585 - DNA, 280 bp, Zea mays
  Clone ID: LIB3150-109-P2-K1-A10
aaaaaaaacattttttatttgatttagccaagaacaggttacatgtaagcggggacggaaacaagggatacatacacggccaattagaagaaactggaaatagcagatgccaccctgggggggtcatgcaaggggggggacattactggcctttccggactaacattgggtttaaaacattgaaacacccccgggaatagaagttttaccctaaggggtaacctaacttcttttaatccagacagaacagagcaattcgaccaaaccaccgactttatgc

SEQ ID NO: 15586 - DNA, 312 bp, Zea mays
  Clone ID: LIB3150-109-P2-K1-A12
accacagacagaataaaacccccatccttatgttcaaacacaaaatgttttgtgtcaaaaaaaaaactgggacaaaaaaagttcatacccgggggagtttttcaaacacacgtggaaaaaaaaaaggttttttgaaggctggagctgggctacaaaaaaggaaagcgggatcactgttcccccacatttgccagtttggttccaccataaattttttcccccttccaccctaatccaggatgcgacgggcccctttttttgcccttaaaaccacgggcattccggagggggggcttaaaatcgggggaataa

SEQ ID NO: 15587 - DNA, 56 bp, Zea mays
  Clone ID: LIB3150-109-P2-K1-A5
gaagcaaactacactggtatatttaaggcatactcacacaacaaacttcggagaat

SEQ ID NO: 15588 - DNA, 414 bp, Zea mays
  Clone ID: LIB3150-109-P2-K1-A6
aatctagttgtttcaccattacattgcaaccatcagtatcatgcagacttcgatatatgccacgatttgtatggtctcatcattggagagcatgttccacacatgccggaaaaaattccctcatacatcgttagtcatcagacacacaccatcatacgctcttgcttaaaaaaggtaagtgtgtgtttgcgaagagaattaaaggcaggccggcataaaagctaccctgacggtggtgaggatgacgaactggtcactgttgtcgatcctcctctgcgtcacctccagcgccaagatgacaccacaatcctcgatatagtagtcgtcgaacgcgcgcgacatgacgagtaccgatgactcttggttggactgccaaacgaagtgcaccacgggctcattaacgaggtagtaccc

SEQ ID NO: 15589 - DNA, 354 bp, Zea mays
  Clone ID: LIB3150-109-P2-K1-A8
gggaaaataaatttttgaaaataggggattaccttttaaccccaatgcccaaattttctaacccggttcaaaaacaacccccccccttccaaagtaaaaattttcttgaccccagcttttaaaattacagggggaaagggcccccttttttcctttttgggggaattaacggcctttttgggggaattggccttcttgggccccccctttttaaggggttttttgggcaagaacccccggtttatttttggggggacccccccctgggccaaggggacccccgacaaaaattttcccagctctcttttttttgggatgggccaaaaccccttgcgcgggaataaaccggttttt

SEQ ID NO: 15590 - DNA, 412 bp, Zea mays
  Clone ID: LIB3150-109-P2-K1-A9
gacacatcgcaggtacttaaaatttttaggaaaacaaaagtctgatactacaatgattttttaaaaagaaaaaacaattagcaacacttctaaaggttcacaaaactggcccagcttgcacctcggtccacaaaacagggcttatagctacagaagaccaaaaattccaaaccctggctggactagggtttaagcttataaaaccattatcgtagattggcagcaagacatgaaactgatttaacattggctacatgggtaaccaccgcacccttagttgtgacggtgccgaaagcaccgatgaggtcgggcatatgaaattacattgaggtctggttagtaagatcctgcaccaacttaatcatactcattgaggggcctcccagctgcattttgttcgcaattaggatac

SEQ ID NO: 15591 - DNA, 380 bp, Zea mays
  Clone ID: LIB3150-109-P2-K1-B11
ggaagtacaaacatggcggcatgtattagggatagataaacgagtgatgacagaacaaagtaccaaaccataccactaaataaaggctaaggatgtccctcagcaatggcacaaggagccagagcatcacaagttccttaaaaagactttttcccttttgtttagtactacgcagggcggagagcaaaacgaggctccgcagctgctgcttttaggtggtgctaggaacgctgcctccggtctggtgaagcatggcgtcgatctcgtcgccgtcctccatctccagctcatcaggggtctgctcgccgcgaagcctgcggccatcaaacaggaatgcaatggcattcatgtccacagactggcggtcgcaataggcgttc

SEQ ID NO: 15592 - DNA, 379 bp, Zea mays
  Clone ID: LIB3150-109-P2-K1-B12
gtcgaacaaaacatatcatacaaatccacggggggttttgttagttccaaatttccgaattccagtcacttcacccacagcagcgaggaagtaaaagcttattccacgactcatctagcaaaacacggtggcaagcctatccccaaaagtccatgtgcggaggagtaaaccttagccttgcagtgctacaccaaggtccgaaacaagatgacacgcaaagctggcagaacctgagtagcagcagcagcagcggatctaggcgtcatcgagggcaaggacaccaggtagagtcttgccttccaagagttccaagctcgcaccgccgccggtcgaaatgtggctcatcttgtcggccagcccagccttctcgacagcagca

SEQ ID NO: 15593 - DNA, 470 bp, Zea mays
  Clone ID: LIB3150-109-P2-K1-B3
acgttcataccatgtagagccaaaaggtgatggttcataccatataattaccgacacgggaagctaccctactgcttggcaaaagccaaactgaacgcgacacacaagcgcggtccatcgccagcgtgtatgtacctcctcatcgaaagggcaggctagcattgcctcttttattaaccccaagcccaggccagatcacaaactagacagcgaaatctagttctccatgcggatgatgcagcggatgccctcccccttggccatcaggtcgaacgccttgttgatctcggcgaacgggacgctgtgcgtgatgaacttctccacctccagctcctttttcatgtacagctccaccacatttggcagatcagtgcgtggcttatagttgccaaagaaggtccccttcagggtcctttcgttcaggaagttcatcgggtgggtcttgaactcagcgtccttatgtggcacac

SEQ ID NO: 15594 - DNA, 411 bp, Zea mays
  Clone ID: LIB3150-109-P2-K1-B4
gaaatataatgaccgttaaaagttttttttttacaaccactactatacacccgtgataggttttagacaaggggggtcgaaaaaaaattataaaaagcacttccgggggcgtatcccaatggtgattgaatgtttccataaaactgcgcgcgctttcaaaagggagcttattaactcgttgctgaaaatgtgaggaaccaccacggctaaaaccgatgttttaaaaagctttatttgtaccgccaggacaaaaaagccaccaagccacagatacattcatttgggaaaagccaacttaaagagggccaaaactccaacacccttttttagggtggaaaccccgttctttgtgagataagactaaaacaccttgccgttcctttacaaaaacgttttagttccccatttttt

SEQ ID NO: 15595 - DNA, 384 bp, Zea mays
  unsure at all n locations
  Clone ID: LIB3150-109-P2-K1-B5
ggtcaggagcagcatcgacagcgccagctccttcttgtatatccggttgtgcttctccttcttcttcttcacggtggtggcggcggcggcggcgtccttcctcgacgccnncnncaggtgcttctncttggcgacggcgtccaaggtcggcgcggaacccgtcctcgtcgcgtgaagcttcacgggctccttgggcggtgccagcgcgatgaggtcgccctccgacgagcggcccgacatattggtcaccacccactcgtacgcgctccccagatggaacagcccggaaatcatcgcgttgaacttggtcacggacatggtgttttcgaatagcaagtactggatgatgaaagagaacgacttgggggactgcatgatggtcag

SEQ ID NO: 15596 - DNA, 458 bp, Zea mays
  Clone ID: LIB3150-109-P2-K1-B6
gagacaacaggagccaattactaactgataaaaaagaggatgcggaaagggcactctctgtgtttttctaaatcatggttgctttgcggtatttgaacaaatggaaataccaaaattttcgaaaataaagaatcaggaacaatagctttcagcgaaaccagacagactggctccgctggctgcagttcggtgatgtggtggtactagcgaatctctccgttcgctattgtcttcaccctgcagactccagccgaggtagtgaagggcacatctctgtagcacgccaccagctcaccgttgctgtgcaactcggcggccagcttctcccacgtcttgctcttgccactgagggaagcctcgggctcacccgcgtacccagcaaaggtaacacgctcccccacagcagcagactctggaggttccaccaactcaaccttcgtgtggtcctcattcgatgc

SEQ ID NO: 15597 - DNA, 274 bp, Zea mays
  Clone ID: LIB3150-109-P2-K1-B7
ccgcccccccaattggtttggaccggttcaaatcacaacccaccaaaaaaaggggcccctgccccccttatacctgtgttaaaacaactgggaaaaaaacggccaccaatttttttttataacacgtaatccccccccacagggggttcacaagggatttgagattcccggccaaagtgttttttatttgttaaaataaaaacccttaaaaaaatttttttttaaaaagattttgggggttttttttccccattttaaggggggaatttttttt

SEQ ID NO: 15598 - DNA, 446 bp, Zea mays
  Clone ID: LIB3150-109-P2-K1-B8
gcgaacaaaaaccttgctcattcttctctcgtctcgtttcatagcgggagcaaccaaagggaacaacaggggtaccaacacctaatccaaaggtagaacggacactaacacggtgacagaagcgaacggtaacacgatactatagatagataagataactcggccgaagccaggatgggcccacacatcagtcccttcagccgccgccgccgccgccgtagccgccaccaccaccctcgcgccgaccgccgtagccgccaccgccttcgtagccgccgccaccaccctcgcgccgaccgccgtagccgccaccgtcgccataaccgccgtcacggcgcccgccaccatagccgccgccgccgcgaccgccgtcgtagccaccgtcgtcaccgtcaccgtcacgggactgggcctggttaacggtgatgttacggccgtcgagcttc

SEQ ID NO: 15599 - DNA, 391 bp, Zea mays
  unsure at all n locations
  Clone ID: LIB3150-109-P2-K1-C1
agatctatnattttcatgcaaaaattaacagaattggcaggtttcagccacatgaaacgtccttattacagacacagacgggagtattttcatacttaaatgcacagctgtttgatggtctcattgttattgccatggtagctacaaaggggaaaggaaaatgtggaacggcatattctgatctacagacttgctcaggttattcataattnccatggttctgatctgcagggttgccattatgcccttagctcaacataggagcctgagatccccgaggtgccaattagggagatcttttcccactcggaacctatgccactgcatttcattttgaggaggatcatttttgggcccaactcagtctgcaacttttttcttaaataatttt

SEQ ID NO: 15600 - DNA, 395 bp, Zea mays
  Clone ID: LIB3150-109-P2-K1-C10
ggagtatattcatgctcgatagaaaacttccaatacattgacactcgatgcaacagatatatgttcccttgcacaggccgatagaagctaaactaaagcaaatgtgtgcgctattcatctatacctgtgccccacctgttcaacatctgatccaccacaacaatcatcgaggcatggccaaagcttccgtgaaagacctgacgaattcgcagtacttatctacgcccggtcgccctttgcaagtcataggcaccccaagaaccatgcgttgcaccagttccatactgagaaccagaatcagtggcagcagatgcttgattaatgccatatccagagttataagggtttgcagcataaatggccctggggttcccatagcttccattataaccttg

SEQ ID NO: 15601 - DNA, 400 bp, Zea mays
  Clone ID: LIB3150-109-P2-K1-C12
ggggaacaaaatgaataataattcagggggaacagtttcctcccataacacaaatcgctgtttgatgctttaaccccccacaccactggggccccccaccgggccaaaagcaccaaccagtttgagaaaaggtgagaacacaatccagtcctttcagctttagcaggctgtaggtatacacttgaatcaccacccggcaaaacggccgtttagcccgggcaaaaataattagaattgcccacgggggggtcccagccaaaacattttttaatttttttttttgcgaccaggaaactgggcctatttattaaacctttgttttggatgaaccgcattacttttgcgtcacaagaaatagtcaggtgtcctacgagttacatatggctttcccctttttggg

SEQ ID NO: 15602 - DNA, 372 bp, Zea mays
  Clone ID: LIB3150-109-P2-K1-C2
gggaacggcgaaacacttaaatgatgacaaggggaacaaaaatttttaaaccagcacaaactttaaccagttcatagcagggttttccagatcaacatagacatccaattagggggctaaacagctttggatacagcacacttacttgaagcattttgcgtgaagcaagggcttgccctcgaagggttcctgggcctcgatcatgggattgacacgctccttttgggccttattagagatgtccaccttggtccacttgtagagctccatgttatagacctcattcattacaaacttgggaaccttctggccacggaagagccaaaggcccttcaacttgaagggtgggttaaaacctaccacgagcatttt

SEQ ID NO: 15603 - DNA, 407 bp, Zea mays
  Clone ID: LIB3150-109-P2-K1-C3
aatagtaccgtaccattttgatttcatctataataactaaacagtcatttacaaatcttacggggttatatagcttatagcatattagtatgaggaatgagtcatctcttacatccaacttatgcacaatccctactcagaacttgccctcaatgaaaccgcccaagccattgatttttaagaatttcttgatcacaagtgccataatagcaagagtcagcccaaatgcggccaaggtcaacagcctgtcatgctttggcttctggatcgcaacagcaggattctggtgagacgaactaactcttggaatgttctctctgtggcttgcttcaggcacatgatggttggcaacctcaactgctgaggtttcaccagtgttttctgtaacccccgattcagattcaggc

SEQ ID NO: 15604 - DNA, 381 bp, Zea mays
  Clone ID: LIB3150-109-P2-K1-C4
aaccatgagcaagctttgtttaattattacagtctacgagtacttattcaggcagatcactctgaggttgtgcctactgttgggcgctgccagcttgaccttgttggtagctgccactgccagcaggagtaagcacagccagctcatgcttcctaccgttcttgagctctgcagcttcctccatggagatggcatacgagctggcgatgacggcggccggcaagtcgctcaggacggagttcttcccggcgacgtggctgaccatggtgtcagggttcgtctcgaaggcgatgtactggaagccttctccctgcgccttggtggcgacgaaggtagccctggggtacgatgagcagctgccccgcacggagcacgtcgtcg

SEQ ID NO: 15605 - DNA, 423 bp, Zea mays
  Clone ID: LIB3150-109-P2-K1-C5
gcctaatatatatattaaataaaaggtttaagccgtgttaaaatgaattaaatgtcagttaaatttcaggagagatatcttcataatatatctattcactaggatgcccatgacaaacgattccgatgcgataatgcagaaggtttcacgagcacgacctcccgttaacatggccaaaactccacaacataatcataaccagcacgccatatcaaaaactatcatccatggctggtttagaattggacccaaaaactctttcctcacttgaagcattttgcatccagcaaggcctcgccctcgaatggctcctggtcctcaatcatggcattgacccgctccttctgtgcctcatcagagaggtcaaccttggtccactcataaagctccatgtcatagacttcgtccatgacaaacttggga

SEQ ID NO: 15606 - DNA, 379 bp, Zea mays
  Clone ID: LIB3150-109-P2-K1-C7
ggtataaagcgtttgccactaaacatgagctcgaaaacatcttattctctatcaatttaccggttatctgatagggcaggataaaagttagagaagcttttttgacgaaacacaagaaagcttcagaatacaaataacacagcctccgctgtgtgcagtttgcacaccttacagtacgagccaagttatgcgcgtgctcgtaatgctccgaagcaaacctagcaggcatccagatccctgcatggaggaggtttcggctctccgtgcaagggggtgttccccccggcagggccacagttttttcgctctgggtgctgtgtacctcgagggggtgtttcacctcttttaagcattttaacaatttcaacaactcgttttg

SEQ ID NO: 15607 - DNA, 395 bp, Zea mays
  Clone ID: LIB3150-109-P2-K1-C8
aaacaaattcatcaacaaataatcataccctgctcagtgctcaaataggaactattgcagctagcgaacagggcaaataaacatcaccgcaataggacaacagcagaaattatcaatacattggactagagctcaatcgcttttagaaaacagtgtactaatcaggactgaaaacatggcataacgctctgaacttgagacgactaaccaaaaaaagtgtactcatcaggacacacatttcggtgcaagacaatccatgagaatgctctaagctacagcgctcttgcccttcttcctctgtagcttcttcatgtagaactcaagctctttaccctcaaggatgtacccatcagctcggccacactgtccagggcgggaagaaatgcatgccagca

SEQ ID NO: 15608 - DNA, 426 bp, Zea mays
  Clone ID: LIB3150-109-P2-K1-C9
aaaccaatcaagccaagcaagtttaacaactcatctcataaaccaggttataggacacagcatgctcacacatggagccacgaaataccaaaacgatgcaaatctgccacacatatctcagcaaatgaagggggcataacttaagactaggtagcgatgatgaacatggcaaaccctaaaagcacttgacgaacttggcagaaacctagaagcacttcctgtgaacaattgccgggccagactcatcgtactcctcctttgatatccacatctgttggaaagtgctgagcgaggctaggatcgaccctcctatccagacactgtacttcctctcaggtggcgcgacgaccttgatcttcatgctgcttggtgcaagggaagtgatctccttgctcatccgatcagcgataccggggaacatagtcg

SEQ ID NO: 15609 - DNA, 444 bp, Zea mays
  Clone ID: LIB3150-109-P2-K1-D1
tcgcgatctagaactcaaaacccacaaacaactctgaaagaaaatgcaaaattaaccgaggtactacaaaagtggcgttggtgcaacaaggtgggctatggaggagcaattgcaaggtcaaggaacgacacttaggttctttcagcgcttgccaccgccaccacccaacttggggcccttggaacccttctggaccgctcccttcgtctgtgccttctgggacttggtcacctcagcctttttcgccttcttctcatccttggtcttcttgatgcgctccttgatctcacgaagagcagcttctctagcagcatcgcggacctcgggcttctcagccctcttcttctggatcacctctagggaagcacccacaatggacctcgagtatggcttcttggtggcgcggcgcctcttcttgacagcctcagcatggatatccttctt

SEQ ID NO: 15610 - DNA, 416 bp, Zea mays
  Clone ID: LIB3150-109-P2-K1-D10
actcaaaaacatagcaatcagccatcacaatgatgtggtcggatccagaacagaaaccagccaccacgatacagaggcattttgaggatacatgacaatcacaaatataaagtgaagcacaattcaaatatgattgacttagcagtgttcaaatatagtttggaaagcgtaatgtaaacaagacaccattaccagtccaagcctttgaaaaatgtgtcgccgaggcccatcacactgaaagatcttaggtaaatcagatgagaagcttctcaatcgagtccttgagaccctgtatctgttgtttcagctggctacccttattgctggtcactgagcaagcaatgacgggtcttgtcacaccacaagcacggccaaaagcttgtttcgatggaacaaatacatatgggacgttctta

SEQ ID NO: 15611 - DNA, 359 bp, Zea mays
  Clone ID: LIB3150-109-P2-K1-D12
acccggtccatcaaaaacaggttaggcaaacgacattacaacgggggcagaccaccacttgttagaatttagaggggttgaaaaaaaaaaaacagtttttttttgtttttggggctcccacgacaaaatcacctgggtagcttttgggcaaacaccaccattcatttattgggacccgccaaacattgtaacaaaagggagcagcgggctttttttgctccacaagaaaacatccccatccttttccttttttaggagggctccactggggccctgaactttgttccggggtaaaccgggggattaccgagcttttccttgatcctgagcagttggttttttttggcccggcccttaaa

SEQ ID NO: 15612 - DNA, 391 bp, Zea mays
  Clone ID: LIB3150-109-P2-K1-D2
gggcgctgacctcgaaggcctcctccacgtcccgctgcgagaagccgaagcggtgggtgatgagcggcttgacgtccaccttgccgctgcgcaggaagtcgatgcacagcggccaggtgtccttgtaccggaacacgcccaccacgtccacctcccgcgccgccgccgccgtcagcggcagcgtcatctcgttgtggcccatcccgaccaggcacaccttcccgccgggccgcgtcgcctccagcgccgtcgacatggtcttgctgaacccggcgcagtccaggctgacgtcgatgtccgagcccatggccgcgcggatgcgctccacctcgtccgccaggttcttcgcgcggggcgacacccgcacggccgcgttcgcgcccagcgacct

SEQ ID NO: 15613 - DNA, 425 bp, Zea mays
  Clone ID: LIB3150-109-P2-K1-D3
agaaaagcaatgacgctctaaaattcaatctgtgataattcgggtgataaacggacaagggctaacataaccatataccaaaatgacagacctgagctccgacataacatattcatataaccaaaataaccaattcaaggcaattaaatccaccccctagttcagctaattatagagcagcacctaaaattccaataaagtaaacaaagtaattgcattctagagataggtatcaagcaaaaattgccagcaatttctgaatcatcagaaacattcagctggagaggacgccatcattcagtgatagattagccagctgctgctcggtggaggcattgctctgctggagatgctgggctgagcggagaacctccatggcttcagcaaccttagccttgagagcatctggcgactccagcaggtga

SEQ ID NO: 15614 - DNA, 385 bp, Zea mays
  Clone ID: LIB3150-109-P2-K1-D4
ggcaaccactcaaccgaacagggaggaaccataatttgccacaaccagaagccataactttggcgttctgatggattcgcgttacacaggccacaagtttcttcagtcatgtagtttgggtgcagccgaaaccaacgtcactgcagttgcttatttgggtgtaaggtggaggaagcaaagaagggtaaaacaaacatctttcagcaggagatggactctccagctcgtcatgcctaactgggaaaagcataaataaacgcttaaaatccaaaaatggaacttgtacagggttgaacaagcaagaagcctccttatgaagcagactccttggcaattttctcagccttagcaatgacttcctcaatgccaccaaccatgttaaatg

SEQ ID NO: 15615 - DNA, 422 bp, Zea mays
  Clone ID: LIB3150-109-P2-K1-D6
ggccgaaaaagattacttattcttgctagcccaaactcagtacttgtacatccggtgctgctgaaacaacaaatcaaagaatgcgacacgactggagctacatttacatgacaccattctttcatcgcccactgcaaaataagtagctactactaagaccgtcgacgacgatcgaatcgatgcctggtttctactttccacgactagggatcgtgcttggttttgatgccccacggacgtcccaacaaacctcgctccctcaccggagcttgcactcggcgggcacgccctgcgggaagcgcttggcgtcggcgcagtagttgtagatcatgaacttgcgctgcacccagcgcatgcggcggtagctcatgtcgctgagctgctggttccaccagccgcggccggagccggcacccgcgacg

SEQ ID NO: 15616 - DNA, 427 bp, Zea mays
  Clone ID: LIB3150-109-P2-K1-D7
gaaaaaaaaacaggccatagcaaatgtgcatggggggcagccattcattctttgatccttacacaacattttcccgtttttagttacagtccagttttattttacatggcaaatccaaactccaaatttaacaaattagtaaacctcacaggcagacatgactacatgacagctggcagccccctttgggggttcaaaccacgccgttctaatacatggagccatttttggtagtagcattttcggccatgtaaagctcggccatggcagcgtaaacaagagactgcagcctatgttcagctgttttgaccctatcgttgtagtcttggagttgaagaaaatgtttgtacaggtctgtaacagctaattgtcgttctgaagagactttccgtgcagcagccagttcatcctctaatttctgagcttt

SEQ ID NO: 15617 - DNA, 443 bp, Zea mays
  unsure at all n locations
  Clone ID: LIB3150-109-P2-K1-D8
actatataataggagttttgtacaaaataaataattacattataaggagacaacggtccagcacccaaagttgactgggagacgacgacctagacctctcacgaacacatcgcagcatcctccacgcgcctcatcctgtggtacctgttcttgacctgtggggggtgtgagacagcaagtgtgagctcacatacgttcatcgctcaacaagttgtggggaataatgtgcatgaactcgccaaaggtgggagctcacgtgaagtgtaaggcttaccaaagaggatggttagagctgagcattgcttttaaagttggtcaaaattttattagcaattactaagtataagtaaataccaacccaattaagtagtagaacaaaagtaacaacctcatctgcgatgcaatgcatatgancaaatgagtttagttccataatttaatca

SEQ ID NO: 15618 - DNA, 384 bp, Zea mays
  Clone ID: LIB3150-109-P2-K1-D9
ggaggaaaattggggaacctgcattgccaatagcctcggttcaaaattacaatgcttaaggcatggaagctctccgttctaaaggctgagagatcacatttcagcaaattctagatggagcctcaattctcataaaatgatcaatgctaccaaatgctggaacttaacttacaaaaccagcaaaataatgatggcggcgaagatgaaaactgcgacaattgacattattgatcagctaccctggtttgccagattcagggtagtggacgtcaactggtgcagccaccacaaccatttcagccatgactacttcatcgttgaaggaagatgatgagccagccgagctgaaggacacagctggaatgttgtcttcctgctcagcaa

SEQ ID NO: 15619 - DNA, 461 bp, Zea mays
  Clone ID: LIB3150-109-P2-K1-E10
ggtacaattcatatcttgttagcagcaatcacattcagcaccaaaaaacaccaattcttgcgatatactccagaatgttatctctactgtatataaacacgctagaacaaactatctgctgggagcacttgaagcattaggcattttcatgtctatatttgcaatcgattgttgcgcttgccacctgaatatgtacagttaatggtgactactaatggatctacaactcaactgtacacagagctgcagtcctgaaatcaatgggtgcatcaacaggtggatacgtggtgagcactctccatttctttgccccagggttgtacacctgaaactccatagccagcttcttcttcagctgcctccacggaccagaggattcaacacgaacttttgcagatctgagcacgtacagttccccgttcattggtacgaagccgcaagattcagtgtttgggatcttt

SEQ ID NO: 15620 - DNA, 432 bp, Zea mays
  Clone ID: LIB3150-109-P2-K1-E11
aaccatgatttccattgaccactgaattcaggcccaacaatggtttcaccgaacgcaacaaaatctccatcgctgcaagttcacggggatgatgtttagaggaaaaactgctacattgcagtggtagttcttaaatcataatcatgctcttgcaattatgtgacattcctttgggcactcatgacgaggcataatctttgaaatgctaactacgtggttctccgtcgtgtatctccccctcttcaaacagatcatcatatgcaacaggagcgcgaattctgtccgccagtggtttgcgttgagctttattgtctgatacgtgtacctccacatcatccaattgctcagggtcatccaatgtttccttttggtctcgcgcttcaatttcatcatcaattaaagcactgccctgtgaacttgcatcttcgtttc

SEQ ID NO: 15621 - DNA, 371 bp, Zea mays
  Clone ID: LIB3150-109-P2-K1-E2
aaagagagagaaaaggattttattacaggatcgaagagtgttgttacacccaggctcgcctgtaactatacacatacttttcttaatagcttttacagccagtgaacggcatacttatatgttgtattgacgtatctactattgcatcagcagaagattattcacagtcgcgtttatgttgattgggctcatcaaatcctctataattagctcggcaggaatatgagggagaactgtacgcaccctatctaccatagtgaagacctctgaaaagattgcattggctgtgcctgcactaccacggagccagaatccggaagcagatgcactaccaggcaccatcgaggaagtggatggaacaagagaggacc

SEQ ID NO: 15622 - DNA, 432 bp, Zea mays
  Clone ID: LIB3150-109-P2-K1-E4
aagcaaacaaacacatgaatactgatacagataccacacaagcgagctagaggtagttggaatttgtatcttacgttcataccatgtagagccaaaaggtgatggttcataccatataattaccgacacgggaagctaccctactgcttggcaaaagccaaactgaacgcgacacacaagcgcggtccatcgccagcgtgtatgtacctcctcatcgaaagggcaggctagcattgcctcttttattaaccccaaagccaggccagatcacaaactagacaggggaatcttagtcttcattccgattaatcaacggatggccttccccttgggcaataagtcgaacgccttgttgatcttggcgaacgggacgctgggcgtgatgaactttttcaccttcaggttcttttttatgtacaggttcaacacatt

SEQ ID NO: 15623 - DNA, 418 bp, Zea mays
  Clone ID: LIB3150-109-P2-K1-E5
aattgtatcaatcatattttttttttttttttttttttttttttatatcttttttatttttttttttttttttttttattttttttttaaactattttttttgttttttttttttttttttaaaaaggtgcccccaaatcctttttcccccccaaaatttcaaaaaattggtaatttgggccccaatcctttggccccaaaaaggaaaaaaaaaaggcgggcgggaaaccttggggtatttgggcaaggacacctcccttctttctgagcacccccgggggggttcccccccgggggccccggtgaaactccaaagccagattttccctcacctgcctccccggaacaggggcttaaatattttaacccgcccaaaaaaaaaagggggatattccaaccggccccgccgaaaattttc

SEQ ID NO: 15624 - DNA, 204 bp, Zea mays
  Clone ID: LIB3150-109-P2-K1-E6
gcaggtaaaaagtcatcgttaatttctgacgagaaatggcattccattttccattcagtgaaccaacacgtccgaaatagccaaataggcacggcatagaaagcacccaccaccatctacttcagacattacaacgacgaacagcagcagcgcgacagctcaagccctctcgcccctgatgcggcgggcgagctggatgtcctt

SEQ ID NO: 15625 - DNA, 398 bp, Zea mays
  Clone ID: LIB3150-109-P2-K1-E7
gccgccgcggggtccggcgacgccaggtgcagcggccccactgcgaagaccgggcggccggacagctcgcgccggatcttggccagcgccgcgccctcgatgccctcgaacgtgttcagcaccacgcccgacgacgaggcctgcacggcctcggcgttgcgggtgatgaaacggagcaccgtctcgtcgtcgctgccgtccacgcggatcaggtcccgcacgcgcaggggctccaggcccggcaccacctcgtccagccgctcttctttgatggggaggtagccgtcggcgcggaggcgcggggtggcgagcatgctgagaaacgtggcggcgccgttggcgcgcatcacgagcgcggggacagcgacacgcgtggccgcgcccagcattttgtacca

SEQ ID NO: 15626 - DNA, 413 bp, Zea mays
  Clone ID: LIB3150-109-P2-K1-E8
aaagtgtactccgattccatagcattaacaaacagctatagattacaaaacagagtcaggacctgatacttatgtggaagcagcccttggtaacttggtacacgttccaaccgcctgacttgcaaaaggttggaacaaacataagcatccagacgaaacatacaatacagaaggcgagaggatggagctacaaaacgaacaaaaaagtaccagggctgccccttttttttttatttcagctgcctatcttaaaagctcattttgctatcactactgcataggtacagttggtctagggagcaacgagttgacgagctcctcgtttatcttcacaggtagagggggcatctgcttcatgatatctggagcatcgtttatctctttcaagaccctgagtatattatcgcgagttt

SEQ ID NO: 15627 - DNA, 355 bp, Zea mays
  unsure at all n locations
  Clone ID: LIB3150-109-P2-K1-F1
agtacacaacgagnctctgattgctgaagaatcttctcgatgaagacgaacatacaataagacacaaggacgaaactagagcaggacacatcccatccacagatctagacacgagcatgctacagcacacagtgcaaatgaagtccctactttctaagccttcttgggggacttggcgcccttcttgggggacttgggctccttgctgccggcgctggccgccttctccgccgccttcttgggcaggagcacggagtggatggttgggaggacgccgccgtgcgcgatggtgacgcctgccagcagctttccgagcttctcgtcgttgcggatcgccaggagcacgtggcgcggg

SEQ ID NO: 15628 - DNA, 438 bp, Zea mays
  Clone ID: LIB3150-109-P2-K1-F10
ccggatgatgactatgtcttcaattgctcgcagataataagatgtatcaagaaaaaaaaaaccgcaaaaaattgggataactcgtggtaacaaggatgaaagcatgactggtcatgatctagttcttttatttcttctactgggcagtacacatactttaggctttactgaaactctgaagtctgtatttctcatggagacctgaatgcctcccctgcatagcgcacgttgccaagctcctcttcaatccgcagaagctgattgtatttggccagcctctcgctgcggcatggagccccggttttaatctgcccacttgctaagccaacagccaaatctgcgatgaagttgtcttcggtttcaccacttctgtggctgaccatcacaccccaaccagcagtttttgaatcgagagcagcttgaattgattcagtgaca

SEQ ID NO: 15629 - DNA, 462 bp, Zea mays
  Clone ID: LIB3150-109-P2-K1-F12
cagaaaagctgttaaaaaaaaccgaaccaaacaagccctgtatactcaggggtacaaataagagacgtttgcgtggtttccaatttccacattgttacacgctccggtgaagaaactccggctgcagagcccaagcgctacttctgatccaaacagccaccgcatatccagccaataactgattgcaatcaaataagaatgcgatgactttaaaagctcaataaaacgctagagcgagcacggacacgcttgccaaataaatccaggggaacaataccagtccacatggactagcggcaacacaaagcaatggggtactaattcgaccactaccagcctactaacaagaaaaaagaagtgaatggagacgaaatcagctacaataatagcacggcacagcttcgacagcacagagcatctaaaacattggggctcgaacaactttgcacccccctccgaaga

SEQ ID NO: 15630 - DNA, 352 bp, Zea mays
  Clone ID: LIB3150-109-P2-K1-F3
ctcgcatagcaggtgttaatggaggcaagcaatcaactgccttcgccaagtagcaaaagtttaacagcagggcagttctatgtaaacaaaaagggtccatggcatcctccagaggagggacattcaccatctctagttcactccaaactcttaaaacggtacataaaaatgatttccaacaatgccctcggcttcaagcgcccgacgctgagctcctcgcttaggccaccagagtgcttgcagtggttgactcgtacttccacgtgggtggaagcttctttgtgcgcttgtagtagcgggcaaggcggtggatcctgctctcgacaagaatgagcctgaatttaaagtcttt

SEQ ID NO: 15631 - DNA, 466 bp, Zea mays
  Clone ID: LIB3150-109-P2-K1-F4
catgaaaccctgctccagacagtgggattacgatggccatggacagagatccaggtgccatccatcagcgttaaaaaagaaatcatgtgcatggttacaaagctagggtcaatacaacacccgtgggcacacagattctggacatcgattagcgagggggtgaaaacacacccggcaattcctgcacggctgggccaatcttaatcggtgttaacggtgcgtgaacaagcaatatgccggaatcaagtcttcgctggaggctaacaaaaaacaggcactacaaaattcaaacagttttcctcccccgcagaaacgtgctctctccaagacttgtagactacgagatactgaagcagatcgacgcactttgcagaatgcatttctcttcgaggcttttccttccacagcaggagacgcaagtctaggtgatgtatctttcttggtgctcctggagcaggcgagccga

SEQ ID NO: 15632 - DNA, 439 bp, Zea mays
  Clone ID: LIB3150-109-P2-K1-F5
acaatataagacacattatatatataagttatcatgatattgggtgtttccggtgcaacgcacggggcactcatctagttataatattatgttatcaaatatgcaatacaagcctcaagtttttcctaagtttcttttccagagcagacgataattttatgcgaaagaagcaaactgagcagcagtcaccagatcaagcgtgaatcgctaagcaagagtcttggcttgcttagctatgcttcgacaaaatgggctccgcaacactttgagctattgggggggagaactcttgagcctccgagaatattctttgggccagcattttctcctcgctggagcacttggccagcgagctgtaaagcgggcggaggtactttatccttcccacctgctttaagcatttctcaacctcgttgaagtagcacttgcacccggtggg

SEQ ID NO: 15633 - DNA, 442 bp, Zea mays
  Clone ID: LIB3150-109-P2-K1-F7
aaccaactaagctagataaccttgttcccaattcatctggcgccacaggtagcaggaacgaatagcaacggcaacacaggaatgcaaactgtcagaacaaaacataccataccagataccacagtgaaagatgggacgcaaactgtcgaacaaaacatatcatacaaatccacggggggttttgttagttccaaatttccgaattccagtcacttcacccacagcagcgaggaagtaaaagcttattccacgactcatctagcaaaacacggtggcaagcctatccccaaaagtccatgtgcggaggagtaaaccttagccttgcagtgctacaccaaggtccgaaacaagatgacacgcaaagctggcagaacctgagtagcagcagcagcagcggatctaggcgtcatcgagggcaaggacaccaggtagagtcttgcct

SEQ ID NO: 15634 - DNA, 440 bp, Zea mays
  Clone ID: LIB3150-109-P2-K1-F8
caagggaaacaaaccatcttcattggtttaaacatagcctcgtcaataatacaacatgcaaacagaacgtctgagaagactgagccccaacaaacacaacaagagtttacacctgttatctacagactttaatgcctagtttgagaacccattttacaagggatttccattttcctaagaaaaaatagtttatttttacttgagaaaataaaaatcactttggaaaatgaagttcccaaactagccctaacagggaaaaaaatcttctgcatgaccatgtacttccctgcaattgaaccatatcatttgaacaggcattacaacttccttgctcccagacaggcagtaaccgaccatcataaaaaaatacagcaacagaagatcaccattgttttgctatgcactgattcctcagcttccttctccctgatcgtcggccc

SEQ ID NO: 15635 - DNA, 410 bp, Zea mays
  Clone ID: LIB3150-109-P2-K1-F9
ccatcaaaatcagtttaggcaaacgacattacaacgagtgcagaccaccactcgtcagaatctagagagattgaaaaaaaaacagttcttttctgcttttggtgctcccacgacaaaatcacctgagtagctctcgagcaaacacgaccatacatttattgcgaccgtacaaacattgtaacaaaaggcagcagcgagctagtatagctccacaagaaaacatccccatcctcttcctttcttagtagggctccactggtgccctgaactttgctccggcgtagaccgcggcatcaccgagctcttcctcgatcctgagcagctggttgtatttggccaggcgctcagaccggcaaggagctcccgtcttgatttggcccgtaaacaggccaactgagaggtcagcaatg

SEQ ID NO: 15636 - DNA, 314 bp, Zea mays
  Clone ID: LIB3150-109-P2-K1-G1
ggggaaggaaattttttttaaaaaaggggcttttttttaattaacttcaaaaaaaaaaccctccttttttctttccaaacaccgccctttttttttaaaaaaaaatttttttttttttttaagaccccccccccccccaaaaaaaaaaaagggtttttttttttttttgcccaccccttgggggggggcccccctctccccccaaaaaaaaaatgggtttttttttggttttatcccccccaaaaaagaaacccccctttttttttaaaaagaaaaaaaaggggcgggccccccccaaaaaatatttttaaaaa

SEQ ID NO: 15637 - DNA, 445 bp, Zea mays
  Clone ID: LIB3150-109-P2-K1-G11
acatagaactggggccattcattcattcttttatttatttcattcattcatttcacccatgacaaatattatctcttcttatttcccacaacatttactggacattgtcatgatgttcagattagaagaatggcgcacgttggggaattcccttgcgtctgtgacgagcaaccctttttggtggtggttcttcgtagttcttgtcattgcagctgttttggtcatttgtagtacttgaaccaacattgtcaatcctagccacatgatccataccattggaccgagggttgttgccaaccatagcttgcataccagcttccatatttaagcctctaagattgcatccaagagagcagaagcgaaatgcatcaagtagcacacggctacatgtctcacagctatgtgttgatgatgtgggtgccttacaaatggggacactagaagc

SEQ ID NO: 15638 - DNA, 443 bp, Zea mays
  Clone ID: LIB3150-109-P2-K1-G12
caaaacaggctttgttccatgacatattatttaatattttaattcattaacttgctggtactgccaaatatttggtaacgcatgcatgcatgttttactgatccgctgcggctatatatgcacacgcaggacacgaggcgaggcagtactagcagtccctggtgcagaagcagcggtggcgtaggcccttgcacacgccgccggtgaaaccttcggtcaggcagacgtttgcgcagttggcgtccctcgagcaaggtcccttgaagcggaagctctgcgactcgcacttcctcgccgacaccatagtcaccggcccgccttgcgtcccggtgtaacaaacgagcaggaggaggaccacgaaaagcttggtggagagaccgcccattattctatcctttgagatggaatggaatggaatggagagtatcggacgcctgggtcga

SEQ ID NO: 15639 - DNA, 380 bp, Zea mays
  Clone ID: LIB3150-109-P2-K1-G2
ggaagtaaccatgagaggacagatctagaatagcgcagttcaattatgcagttccaaagggtacacaagggtgattcaggtaaatgactactttgtgcacatacccaggagatgatgatttacaaacgatgcactggagctagaataccaaaacgggatggtaaaatggcaatagctttaaaagatcaacagctttcagtacgacaagcattcaggtgcattgaaagtcaaaacacttggcagatgaagacttgacaggggcagacttgatgatgtccacgaattcaggcttaaatgaggctccaccaacaaggaatccatcaacatttggttgagctgcaagttttttgcagttagctccatttacagaccctccataa

SEQ ID NO: 15640 - DNA, 469 bp, Zea mays
  unsure at all n locations
  Clone ID: LIB3150-109-P2-K1-G3
aaacaaaaataatcttaaagcacttgttacgaataacctttgggtttagagtttagggcagggacagaagaaaacatgtcgccagacaattttatgaagttcgcgtcataagggacctcctgtccagattcgtctagataaagaagtagcaaataaactactcggcagcagcaacctcctgcatagcctcatcaccctcgacaggcctctcaagcttcacaccaacgtcctctttgtagtcgccatgaacctccatcaacttcccgagatcaaacttgggggccttgagtatcttcaccttgcggatgaagacgttttgaagtgggaagatgctggaggtagacttctcaatctctntgccaataacttccggaatgaacttagaaacaagttctttaaggtcacatgtagaagcctggttgatcataatcttaaccatcttgcggcgaatctgccgaatctgggatgc

SEQ ID NO: 15641 - DNA, 433 bp, Zea mays
  Clone ID: LIB3150-109-P2-K1-G4
ggatatagaattcaattcagaatcttctaaacaaaactatggcaaaacaatcgctaggttctcaacatgaggtcccagaactccaaaagcattacatgattcatttgtggcgagggggatagggtttttaagatctcggcttctccttcttctccttgaagagggcgagcagggaaacgcccgagaccttcacaaccttgaaacggacaccgggaatatctcccacagcgtggcccttacgaccgaaccccgcgatcagcacctcatcgttttcctcgatgtagttcaagcagccatcgttcggcacaaaggcggcaatctttttaccgttcttcaccagctgtacacgagcacacttacggatagcagagttaggctgcttggcctcgatgccaatcttttccaggacgattccctttgcgtgggatgatcc

SEQ ID NO: 15642 - DNA, 342 bp, Zea mays
  Clone ID: LIB3150-109-P2-K1-G7
ggagtgcaaattttttaacttttgaaatagaatgaccgttgggggtttaacgataacaaccagggagggatacacccgttttaggttttagacaatcagataagaaaaatttattctcggaagcacttccggggaagaaacacaactctctttgcatgctttcatcactctttgcatgctttcataaatttgttcatttacttggtgctgtttatgtggcggatcaggtcgaccactctggtgctgtatcccctctcgttggcttaccaggacacatgctttacaaatttgccgttaaaggtatatgtctcctttttattaaatattcttgacctgctttca

SEQ ID NO: 15643 - DNA, 397 bp, Zea mays
  Clone ID: LIB3150-109-P2-K1-G8
gaaaccaagtcgataattagcacgtatattcaatgtcagcacaagcagtaaaacttcatacaagtcagcgcaccactgtacctagatcataataagtagacagcgtaagattctaacagcaagatcagcgtaaaacatcagttctctagtactactgtgcatggcataatgtaccgaccaaaaggtagaaacgctgaacaactgctgacttctctgcatggaatctggcttcattagcttatgatccatccatctccacaacgacaggagcaaactgcgctaacatggaaacaaaagtttcactaaggtgtgtgtaagagagaaatgctaattaatgctatagatcatttgatctcgatccagatttacctcgtcatcttcatcaataaggttcact

SEQ ID NO: 15644 - DNA, 325 bp, Zea mays
  Clone ID: LIB3150-109-P2-K1-H1
gaaaaccacaccccccgggggttttatttttctttaaaataagccctttttttttcccttttcaaaaatttttcttggaatttgaaaaacccgttttttattggggttaccgttccaagaacttaaagttttttaaaatttccaaagccgggggggggccccaattttaaccctttttttttggcccttaaaattttaattttttgtgggatcccagggggggccaagggaaattttttttaaaaaatttttttttttggggggtgaattaattttggtttttgggggggagcctttttttttttggggggggggaggttttttt

SEQ ID NO: 15645 - DNA, 347 bp, Zea mays
  Clone ID: LIB3150-109-P2-K1-H10
gatataggacccctcacaataaacaggggtggaaaggggaaaatgcaagtgacaaccgtttaaagggcttcccaacccaaccagaccgggcttcagcgccccccgacacaaaagaggtgggacacccgggccttgcccgggagaatttaatacggggggcccccaaattttactgtcgacagtcataacaagggtcgcccccaagaaaccaggttccaaaacacattgcataggggcatttcacagggggaaacactagctactagttttttgggacataaagccggttttactgcccctcactcgagtcgggcttgggggcctccctaatctttttaacagggttc

SEQ ID NO: 15646 - DNA, 286 bp, Zea mays
  Clone ID: LIB3150-109-P2-K1-H11
agcaataaaagtacggttcaaatggtataaactataataaaacattcagttacatatcttttatcagagtcacacaaaaaatcccttggtaactcaaaacaagagactgtttggactgttcgcttcggattaaaatcagctatttagactgttgtagctgtaatccatagagacaaaaacaatatagaagtagtagaagccgggacggattgaaaccaaacgaacaggctgaccgatgtagcatgtcactcaaaggtcgtccttgactccgatgtttagaagtcta

SEQ ID NO: 15647 - DNA, 214 bp, Zea mays
  Clone ID: LIB3150-109-P2-K1-H2
aacaaaccattgatgcattggaagttggggcaaaataccacgaggtggttcaatacattactaacaaacaatgtttcggtcaaaaatactttgccatgtctagtttctagaggtagggaaaaaacacaggtgataatctctggctgccacattcatgaacttgaaatgctttatttcttcttgtcagggtgcgtaccagccgatctcatttttc

SEQ ID NO: 15648 - DNA, 219 bp, Zea mays
  Clone ID: LIB3150-109-P2-K1-H3
atgacgacgcttattttacaggcatattccagtgattaacatgacccaaataaacataacgaatctctcgaacctttatccacgccacgcatacatataattaacgaattaagagagtttgaagaacaagaacactgacaactcatgatttggacttaaaactgaagtggcggagaggattgtgttgtcgggcatgcatgcgaatgcaccttctagttg

SEQ ID NO: 15649 - DNA, 439 bp, Zea mays
  Clone ID: LIB3150-110-P2-K1-A10
agatatgcaatacacacttttagagataacaatacagagtaaaagagagaacaatatataagacaagtctggaaggaaactacgaagcatgcctcaacatagcaatcacagttgagcaccacttgttcatagacataacatagtgcatatatatatgatataactcgaagaaaacatgccatggggccatcaaaatcaggagattttcgaaaccacctctattttcaagaaatcaatatatgaatgcctagaaataatactaattgatcccatctcagacaacccaatgacctacccgagcaaagaggcctcactgttgttgctgtggctgctgtgcagctggttgctgttggtaattgggataaccaacataagcgccataaccatacatgttagggtcctggggttgtgcatacccactgccataagcctcataacc

SEQ ID NO: 15650 - DNA, 399 bp, Zea mays
  Clone ID: LIB3150-110-P2-K1-A11
gatataggaccactcacaataaacagcgatggaaaaggtaaaatgcaagtgacaacagtttaaagggcttgccaacccaaccagaccgggctccagcgccccccgccacaaacgaggtgggacaccgaggccttgcccggcagcatctcatacggggagcccccaaattttactgacgacagtcataacaagcgtcgcacccaagaaaccaggttccagatcacattgcatagtgtcattcgacagcagcaaacactagctactagtttctaggcacataaagccggctttactgcccctcactcgagtcgcgcttgggtgcctccctaatctcttcagcagggtcctccgagatgtcagaagtccatagggtcaagttatcacgaaagagctgcatga

SEQ ID NO: 15651 - DNA, 408 bp, Zea mays
  Clone ID: LIB3150-110-P2-K1-A12
atattgggtcacgataatatactgtaccgaacttcaatctgctttttacaaattgcaacacaacatcagcacgaccaagcagatgtaaatccaggtatgggtaccatcatgccccggattactaagaccaaacgacacacacatataccacacatgcaatgatacaatgcatgtatatactagcacatgcatgcacacatattttaccgactagttattgcagaaatataggaaccatgcaaattttcacaaaatgcaatgcagatatagttgatataacatgcatattcatgcatttggctccaaactccatatccactttttcagtacttggacttccatatgccatccatctctatggtggtgggcggggaccctgggccggtcacagacatcattgacgagatc

SEQ ID NO: 15652 - DNA, 377 bp, Zea mays
  Clone ID: LIB3150-110-P2-K1-A5
cagacggaacagactgtaatcctatttctcaatatctatggacctgtcaaaattttacagaacctaacgagcacgcccagttataggcaaattgagagacatttagcattttttttgtttatacagaatagttattaagatacataaatatgcctcccaaaaaggcgaaggaatagcacagagcaacaatgtcaactagatacaaaatgcacagctctagaagggtactcttctacagaggactggacagagtcatggagagtctgtacatagtgagagtggtactgtgaagcgttcatttgcaggtttatgacagatcaaccagatggtctctggtagatatgctttgttcttgggtcaacgattatgcccttttc

SEQ ID NO: 15653 - DNA, 340 bp, Zea mays
  Clone ID: LIB3150-110-P2-K1-A6
cggggggtctcttttttttttttcttttttttttttttttttgggggaaaaaaccttttttttctattggccccaacccaactttttttttgcacacaccccccccgtggtgcaccccctttttcacccactttttttttccccctttattccccccctttttttttgcccgggcctggaactttttgataggcccccccctctctccctaaaagggggagggtttccctccccgcaaaccctctttttttttcaccaaaaccgggggggggaaggggttcttttccccccccacctttgtggggcccccccaatataaaaaaccccccaaaacttttcc

SEQ ID NO: 15654 - DNA, 149 bp, Zea mays
  Clone ID: LIB3150-110-P2-K1-A8
gaaaacaaaaaaaaacttatttcagggcccattttagcgggggggttttccacaatgggggccggggggggaaaaaaaagggaaaaacattgcccaccctaaaattaaccttgggcccccaaagggccccccccccaaaattattttgg

SEQ ID NO: 15655 - DNA, 365 bp, Zea mays
  Clone ID: LIB3150-110-P2-K1-B1
ggggggacaaaaaaaaccaattggccccaaaaaaatccggggcccgttaaaaaaaaaatttgaacccccccccccaaattttgggggccccaacccccccccttgttttggtacataaaacccatagcccgtttttaaaaaaaaaaggggggggccttcttcccccccccctttttgaaaaattttgtttacccccctttccaatgtttggcatttgggggggcctttttgggaccggggaataatttgcccccatgttttgcttttgggggggcctgaagggccccctcactgataaaagacttggtgccccatttgcaagggaccccaaattttgggcccaattttgggaacctgccccattt

SEQ ID NO: 15656 - DNA, 259 bp, Zea mays
  Clone ID: LIB3150-110-P2-K1-B10
gggggggaaaaacccacgcccagccgggctccaaaagttaacttgaatcggcacatacataaaaatggggcactcagcctaaacgggagcagcagcaaaaggaaacccttaaaaaaggtaccaccattttttggcgagcaggggagcccccacggaagccaacagggggggcgccgtaattggaggaaaactcccccccccccgggaggcgagggccattatggctccagtgggaggagcggaatggaatggggtgggc

SEQ ID NO: 15657 - DNA, 438 bp, Zea mays
  Clone ID: LIB3150-110-P2-K1-B11
attccgaaggacccattttattttggaaacagatgcccaggctttctccgggtcctctgatagaagcaaacatgggttcacagttcagacttgacttacaaacagtcgcacaaaacatacagcactctgttctaactcgggacacgaaatcctctctttctctctccctctccctctccgctcactgcctcaatctaggaagactgccggagctccgggcgcacaaagtcggcgttggcaggcacagagatgtcgacggtgggcctcagctcggcgcagacctcaatggcaccatggacagggtccgacaagaagttgctgatgaggtcctggttgatcggggcgtccttgtccaccgccacaaaggcctgctgcgtcaggatgtagtcgaagcgaggcgcccacttcctggatcccaggcgagccgttgtggagcag

SEQ ID NO: 15658 - DNA, 231 bp, Zea mays
  Clone ID: LIB3150-110-P2-K1-B12
gggcgctgacctcgaaggcctcctccacgtcccgctgttataagccgaagcggtgggtgatgagcggcttgacgtccaccttgccgctgcgcaggaagtcgatgcacaccggccaggtgtccttgtaccggaacacgcccaccacgttcaccttccgtgccgccgccgacgtcagcggcagcgtcatctcgttgtggcccatcccgaccaggcacacctttccgccgggcc

SEQ ID NO: 15659 - DNA, 362 bp, Zea mays
  unsure at all n locations
  Clone ID: LIB3150-110-P2-K1-B2
gnnaaaaaaaaaaaaaaacctttgttttttccccccggaaaggccccaaaaaaaggttccttttttgcaccttttaccccccgggtggataacgggtttttttccaatatacaaacgttgggggggaaacaacccctttcccaaggttgtttttttttccccctttttttaaaggcccctttccttccaaaatttttttaaaaccccggaactggaatcttaggtgtttaaaaaactcccgccccagccttgaaaggcccattattgggggcgccctcttttttaaaaaaaacctccccccccttttttttttttaaacccccaaaaggtttgaaaattgcccccctttacaaaaatttgcc

SEQ ID NO: 15660 - DNA, 205 bp, Zea mays
  unsure at all n locations
  Clone ID: LIB3150-110-P2-K1-B5
ggaacaatacttttttgtttcaatttaaattgggcattcaggtcattgctcacactgacactgccacccatggggatgcgtgacacattattactcaatcatcgccgctaaatgactcaactagctagctagccagcggatttactacagcacatagtttcttcagtgggggacaccgncggcagcaacgtaggggcatggagtc

SEQ ID NO: 15661 - DNA, 248 bp, Zea mays
  Clone ID: LIB3150-110-P2-K1-B6
aaaaaggcaacaaaaaaccaggtttttttggttgggacttaaaaaatttggggggaaccggccccttgctcccaaaaaaaagtaattgtctctttttacgaggctgaaaaaattaccgaatttttttaattttttttgctgggggggttaaccccagggggggaacaaacatgggacgggtccccttttttgccccggaggggccccccctcggatgttattgaggggggaggaaaaagccagcccaa

SEQ ID NO: 15662 - DNA, 422 bp, Zea mays
  Clone ID: LIB3150-110-P2-K1-B8
aggacaaacatggcggcatgtattagggatagataaacgagtgatgacagaacaaagtaccaaaccataccactaaataaaggctaaggatgtccctcagcaatggcacaaggagccagagcatcacaagttccttaaaaagactttttcccttttgtttagtactacgcagggcggagagcaaaacgaggctccgcagctgctgcttttaggtggtgctaggaacgctgcctccggtctggtgaagcatggcgtcgatctcgtcgccgtcctccatctccagctcatcaggggtctgctcgccgcgaagcctgcggccatcaaacaggaatgcaatggcattcatgtccacagactggcggtcgcaataggcgttcatcaacttcttcagctgggtggacctctttatgcgaaagaacacc

SEQ ID NO: 15663 - DNA, 454 bp, Zea mays
  Clone ID: LIB3150-110-P2-K1-B9
ggaataaaatcgtaacttatttccagactagaaatcaagagtttggcatgcagaaatcctaatctggtggagcgcaatctattcacgcattcccgtttcagtttaatactactcaagtgatgagcccagtaaaatcaaaacttcgaaatgtctccacggcccacagccatagcagctaaacgaataactgggagacaaataaatgcaaagataaagtagaatcgttttaatccctgtcgactaatgccaaccactaattgtacatgtgtctagaatttgctcaaatcgtcttactctccgagagccataccaaacccaaatttgtaatctttcttccagtggtccagctctgcagacaactggaaagtgacacctggagtcaatcgctcctccaaaagagaagaaattacgccattggtatccaagttccctctcaatcgacactgtctcagca

SEQ ID NO: 15664 - DNA, 427 bp, Zea mays
  Clone ID: LIB3150-110-P2-K1-C1
cccaattcgaccttctatttgttggatcaaaagtactgaactaatttcacacgattcaacatcatgctctacaagttacattcttgaccagcagcaagaccttttctcaccaaaaggaaccatcgatgcaattccagaaaggcacccagggatgttaatcctataacatcaaggaaaaaggaagagaaagtgtagatgaaacagtaggcaaaccgagctgcatcggtagtgatttacaacaaaataaatcacatgatgctctcgaggaacatgtctctgtttctaatgtccattattttcatggctctcctgttcctcctctgcatcctcaaaacgttggtcgttgatttgaagctcaaatactgaacgactaaggtcatatccaccattttgacctatcggattggcattgaaaaactgggggaca

SEQ ID NO: 15665 - DNA, 347 bp, Zea mays
  Clone ID: LIB3150-110-P2-K1-C11
aaacgaaaatttggcccccctcctgtaaaacaacttttaaaacaatggacccccattttttacaaccaacctttttgggggaaaaaaaaaattgtccaaaccaaccggggaattattgaaataattcgaattaccccccggtttaccgggacagattaacacccctttttttcaaataaactttggggggaacccccttgggcccgggaatataggtgggtggcaaaaaaaaacaaagccccgattggacgggcgccgggataaagatgttctggcgcaaattttttttgcccctgttaccaaaaggggccgggatggggtgcacccctttcaaattttttattggc

SEQ ID NO: 15666 - DNA, 433 bp, Zea mays
  Clone ID: LIB3150-110-P2-K1-C12
ccgaaccattgattcaggaccttcagatacataatcaggacagtacaccattagactgccccaaaaaaagaaacttcagcctcgaaacaaaatcctcagccaaaccaaacagacgaatcctccacaaagctaatgttgttttccttatgggctggtttggtgaccaggaatcacaagggaatccatggcgaggaatccccttgctattcaatttgaatagcaatggattcatctcccatggattcctcgtgatctctgatcaccaaatcaaccctacatgttttggcatccaagggtcccacggcacaaccaacatcctgccactaaataaataaggattacaccagaaaatcttgacagacagacaactccaagagactcatctttcgaccagacccatttgacaacaagcaaatgccttcccaatgcaatt

SEQ ID NO: 15667 - DNA, 240 bp, Zea mays
  Clone ID: LIB3150-110-P2-K1-C2
ggcacaattaatcacaaaactcacttgtacatgttcgtacaaatgaagaatgatgacattaaaacatttcagctggatgggaaacaaactaccaaaaattttgctggcaccaaagcaatttaaaccatttaagcctttcattggaaaaggggggcaaaccaattatgggcttccttggatttttaaaccccttgggtttcccaaattttgtttcctacaaaatggggggaccaaacttaa

SEQ ID NO: 15668 - DNA, 432 bp, Zea mays
  Clone ID: LIB3150-110-P2-K1-C3
aaactcataaccatgtatgccttacattcgatggtccataaaaaaaattaagtgttaatagcatcacggtttcaacgaaagtaataatacttcatgaccaggcaaacattgccatcatagattacttgttcacgcgacaactgcaaggatgtcaacaagacgagatattttaagcttccacgaggtaaccaacaagcaagcacagcaccagccagatagatcattttttcttggcagcagccttcgtcaccagccagatagatcatttttttttggcagcagccttcgtcaccttggctccagttgggtccttcttctccacactcttgatgactccgacagccaccgtttgcctcatgtcacggacagcaaatcgaccaagaggaggatactgagaaaaggtctccaccaccatgggcttagtgggaacca

SEQ ID NO: 15669 - DNA, 408 bp, Zea mays
  Clone ID: LIB3150-110-P2-K1-C6
gccgtcacaactatgtaaggtagaagggcaacgatgtaaccacagcagcacaaaacgtcaagcatggagcacattaactaaaactggatcacgtttgggtacatgtccgtaacatgttacatgttggatattattgctaaaatctactcagggcactccaagagtaaaatctgcaggtcgcagtaaacagtttcacaggacttgtgcagacataaaagcacttgcatcccgcccgtttagtagggctccacaggtgcacggaatttggcacctgcgtagacagcaatagcgccaagctcttcttcaatcctaagaagctggttgtatttggcaagacgctctgatctgcagggtgctccagtcttaatctgacccgtggacaaaccaactgccagatcagcaatgaaa

SEQ ID NO: 15670 - DNA, 429 bp, Zea mays
  Clone ID: LIB3150-110-P2-K1-C8
aaactcttccgattgtcaggctaagcaacagtttatcgatatggggaggatgccatcgaagctaacaggaaacggtccagcagcacaaacatcatccgggaaaacatctttagggccatcaaaagctcgtctaactaaaaactctcttcccaattcgcaacacaaacaaatgttatttgaagtaaatttcgatcaactgattccactagacaatcgcatttgccgcgctggcaatcctaggccacagatcagcacactcctttccgatgggtccagtgatggcagagcctttcatctctccctttgggttcacaatcactccagcattgtcttcaaagtacatgtagacaccatcctttcggcgccatggcttgcgctgcctcacaatgacagctggcatcaccttcttcctaaagtcaagctttccct

SEQ ID NO: 15671 - DNA, 439 bp, Zea mays
  Clone ID: LIB3150-110-P2-K1-C9
ggcgccaatctgttaatctgactcagttttttttgcttcttttttttttcctttggcataacagagcttatacaaaatggaaactgcatagtcgtcagaaacagtagacagaaaacgtcattacacatgtggctgctaagacgtcgacgccacgtcttccattcagcacaccataaccccttttcccggtagacttccgctcctacagatcttagacccactccgttccatcacccgttcagatgtacatgctacaaccctacaagtgaggcaggcctccaatcagtcgcgaccgacggctgatgctaaaccatgttggcagaaataatacacagcagcctgggcaaagagtgaccacgcacatacaacaaaccacaccttcaggtcctttgtacggagtgaagcatccaggcatccatcatctgtatctcaacttcgc

SEQ ID NO: 15672 - DNA, 450 bp, Zea mays
  unsure at all n locations
  Clone ID: LIB3150-110-P2-K1-D1
ctgaaaaattggtaggattacacgtcctcatctccgtctcaagcctcgaaataacaaatgaataaacaaataaataggatccgaaaaaagaggaggaaaacacccaacacacacagcagagaaagagtgcagctctagctcctccacggatccaccgacatatcagatgtcccaaggtcggtcccggtctagaacgcgacggcggctgccacggcggcaacgatggccacgaggctggcggcggcggcggaggctgagacggcggcgctcttctccgtgacgggcgcggcagccggagtcagagccgccgcggctccggcgggggccatcgcgtcgtcaccagctcccgcgccgacggggctcgtggccggcacgccggcggagggcgcgggcaccggcgccatcgcgggaagcgaaggcggggaggccatangcgccctggcccgcggc

SEQ ID NO: 15673 - DNA, 452 bp, Zea mays
  Clone ID: LIB3150-110-P2-K1-D10
ccatcaaaatcagtttaggcaaacgacattacaacgagtgcagaccaccactcgtcagaatctagagagattgaaaaaaaaacagttcttttctgcttttggtgctcccacgacaaaatcacctgagtagctctcgagcaaacacgaccatacatttattgcgaccgtacaaacattgtaacaaaaggcagcagcgagctagtatagctccacaagaaaacatccccatcctcttcctttcttagtagggctccactggtgccctgaactttgctccggcgtagaccgcggcatcaccgagctcttcctcgatcctgagcagctggttgtatttggccaggcgctcagaccggcaaggagctcccgtcttgatttggcccgtagacaggccaactgagaggtcagcaatgaaggtgtcctctgtctcgccactcctgtggcttgccatcact

SEQ ID NO: 15674 - DNA, 384 bp, Zea mays
  Clone ID: LIB3150-110-P2-K1-D11
gaacccgaaaaaacaaattttgttgataaacaaaaggggttcacaaatttttttccatacccccctgctcattgggggaaaccccactgcccccctaaagctggattcttacttatttaaactgatcccacatggggcaacgtcggaagttcacatgcttaccaaccacaaatttttataacaatagcttggcttgggtggttcccagaattacccaacgcccccccccaaattgggaccattttaaataaacaacttaaaagcaaattgcccccaaaagcccggtttacttataaagcactcccgcctttttctccatgggatccggtttctcctcccaacataaaaaaatagcccggttggagtcctttttcataggagggg

SEQ ID NO: 15675 - DNA, 383 bp, Zea mays
  Clone ID: LIB3150-110-P2-K1-D12
gcttgaatgcttgatcaatgttcattgctccggtccattttagggcttgttcggttattcccaaaacacatggattgatgaaattggaaaaaattgagaagacgtttgacttgtttgggattcaaacacatccaatcccactcaatccacatggattgagagctaaccgaacaagcccttactactcctgtgcatcgacaagatcgactaatcgactgacaacggcattactgtgagagttgagaattgagatgcatggagctagtaggtctcctggttttgcagcagggagatgatgtcgagggcgatggtgcacaggcgccgcagcgccttctccctcttggccagctccgccgggtacgcagtcctactcgccccacgct

SEQ ID NO: 15676 - DNA, 320 bp, Zea mays
  Clone ID: LIB3150-110-P2-K1-D2
gggggaaaaaacaaaaccggggcccccccgtttaaatttgtaaaaccaaaatcccccccccaaaacccatttttgggccccggctttcctttaaattttgggcggggaggggccccccccaaagggtgggggtccccaaaagggggaaaaattttttttaacccttcccccccccctttggggtttctaaaagccccgttacccctttttttgaggggaaaacccccggggggggggggggccccattcccggcccccccggttttacccggttttggggaaatggaaacccccccggggggggggccgcccttttaggg

SEQ ID NO: 15677 - DNA, 362 bp, Zea mays
  Clone ID: LIB3150-110-P2-K1-D3
gccgactccaactcagcatatagaattgtttttgccgatacatagccagcattacagcatagttgatagaacaaaaaaagggggctgctcgattctccatcggcaggaccaacttacacgaaatttaacagcaaagagactaattaacatacaaatataaagataaccatcatcccacataggaagcatgttttttggatgtccgaaaataagctctaacgagcaaaccacactccgcaacctagctcgtaggcaggagttccaaaacgggcacgcaaagagaagcaactcagtacttgtagtccttgacgtggaggctctcggtgtcggcggcagcatcacccttgtaggtgccgagggta

SEQ ID NO: 15678 - DNA, 396 bp, Zea mays
  Clone ID: LIB3150-110-P2-K1-D4
agaccagcaagattacctgttccatcaaaatcagtttaggcaaacgacattacaacgagtgcagaccaccactcgtcagaatctagagagattgaaaaaaaaaacagttcttttctgcttttggtgctcccacgacaaaatcacctgagtagctctcgagcaaacacgaccatacatttattgcgaccgtacaaacattgtaacaaaaggcagcagcgagctagtatagctccacaagaaaacatccccatcctcttcctttcttagtagggctccactggtgccctgaactttgctccggcgtagaccgcggcatcaccgagctcttcctcgatcctgagcagctggttgtatttggccaggcgctcagaccggcaaggagctcccgtcttgatt

SEQ ID NO: 15679 - DNA, 452 bp, Zea mays
  Clone ID: LIB3150-110-P2-K1-D5
ggtatgaaaagcacaagcagggcaacatattaagacaggagttaatactacatacgaagaagtaccaccaaagggggcactctctcatacgaattaccatcacagaagcactagttttctcagagttgaggcgaggcgtcctcttatttaggcgaatactacattacggcatcactgatctacgaggccatgtgtagttcaagcttccttgctagctcttcctttgctgcgccaacgaccctgtccttgacgtcgccctccctcatgaacaggaatgttggcatggcctctacgctgaattgctcagcaatggtcttcatttcatcgacatcaactttcaggaaaacaacatttggggacttcttggccatatcagcaaaaattggagccatggcgcggcacggaggacacccatgtgcagtgaagtcaatcaccaccagcttcttggcgct

SEQ ID NO: 15680 - DNA, 433 bp, Zea mays
  Clone ID: LIB3150-110-P2-K1-D6
atcaaacacgtccagcaattaaataaaaactcgcaacatgttatcatgacaaaggtaaatttaaatgctcaaaacttaacattgttcacgtccgctaccaattcccgagtaccaaattcctaggcaacaactttggcatcaaaactatggtttttgaagtacatacggagcagtctagttgagaccccaaagaaacatccagattcaacaaaataaaatggggatatccgggcgtcatatttatgcattttcggccatagggtactcaaagaccacatctttcccacacagcctgcggtagaccgtagtgtaggtgtccagcttgtattcggtgttgttcctctcctttgggtccaagaagatcttgatgatcttggcaccatccagacggtacctgacacgcttccccacaatctcagctgggaagacaaca

SEQ ID NO: 15681 - DNA, 347 bp, Zea mays
  Clone ID: LIB3150-110-P2-K1-D7
ggggggaaaaccccaaaaatttttaaaaccaaaagggtttaaagggaccgactttaattacaaatgcaaattcttgagcggtttaaaagggggtgggggggggaaacccccaaacttttcccgggacacaaaaaaaggtttttaaaaaccaaaacctggtttgacgggcaaacaaatttttgcaagcagatcagtttttcttcttcttgggggcggaattattgccgccctttggggggaccttcttgtagtcctttttcagggggggcaggtccttgggtgccttggaaaaattccctttcttaatgcccttgccgacgtaccaatggaaaaacgcgcgcttgggg

SEQ ID NO: 15682 - DNA, 459 bp, Zea mays
  Clone ID: LIB3150-110-P2-K1-D8
agtacaaaactcataaccatgtatgccttacattcgatgttccataaaaaaaattaagtcttaatagcatcacggtttcaacgaaagtaataatacttcatgaccaggcaaacattgccatcatagattacttgttcacgcgacaactgcaaggatgtcaacaagacgagatattttaagcttccacgaggtaaccaacaagcaagcacagcaccagccagatagatcatttcttcttggcagcagccttcgtcaccagccagatagatcatttcttcttggcagcagccttcgtcaccttggctccagttgggtccttcttctccacactcttgatgactccgacagccaccgtttgcctcatgtcacggacagcaaatcgaccaagaggaggatactgagaaaaggtctccaccaccatgggcttagtgggaaccatcttcaccataccagcatcac

SEQ ID NO: 15683 - DNA, 365 bp, Zea mays
  Clone ID: LIB3150-110-P2-K1-D9
aaatcgaaaaattgtgaatctcatgtagattaggccaaagaatcaagcatgatcaggccaagtgcgcttctgccccaagtctgttataagcttaagctaccatccgccattcaggatccatgcttcctgagatgtttctgtgtacaccaggtcgaacctgtgctcccatatctgggatcttgcatttctcaagtattgtccagtcactaaaaaccaagaaaatctgttgtcatctggcctcatttgcatacgagctctgaactttcagtgcatcatgttcagatgactcaacccagaagggtgacaaggataccactttcccaataattattagagttggagaaactagatcggctgacttgact

SEQ ID NO: 15684 - DNA, 384 bp, Zea mays
  Clone ID: LIB3150-110-P2-K1-E1
ggagggcccgacataatgctctcgagaaagagatcgttgtacaggtcattgattcttctttgccgagtgttacattaggtttgcaagctttcccgagtgctaattgcaagctttcccgagtgctttgcgccacccagtagtgatgtacaatacccatagtaaattgacgtcacattataaaccagttcagtaatgataacagaagtttcaacaccttaacagcaacatactgcagccgagagccaagtgcctaaacagcataacataaatctatcgccagtaacaaactcggcaataactagcagcaaccataactcctcaacctttcatagctttcgaaataagaaaaggtaatattttcgagaaccataattcgtcacattc

SEQ ID NO: 15685 - DNA, 330 bp, Zea mays
  Clone ID: LIB3150-110-P2-K1-E10
ggcataagtatccgctattctattaacggcattccaggatttcctggacaagaaaagagaatgcaatttgaatcaaaataagggtcttgcaagactagggggctagatttagctgactacagagcatgtgttggtccagttcagtgccaggccatttctcatttcttcgccttggagaaacggaggcacctgtacttttcaccactgacagggatctcaagggctccatcttggttgtcttggctcgatgctgttcccatgaggacgcttttttccttctctaaaatctccttttccatcttcagcctggctttttgccgtgcgatctcg

SEQ ID NO: 15686 - DNA, 422 bp, Zea mays
  Clone ID: LIB3150-110-P2-K1-E11
gagaaatagaagattatatcagcactaagaggattgccacaacaaagtttatcatcaaacagagttacaaagcaatgtgtaaagtagccagcaaattcatggcgaggagtaccatccatttccacactcaaaagatgcaacacatgcaaggagaaaaagatgatccagacaatgagaactcaagagttcaccctagaacaacttaaaacacgcaaggcacaactcctgctcaagttcaagactcatgatcctttctactcaatcagatcatcatcgtcatcacgaagaggttgtgcagctgctgcagcaagctcaccttcatgctgctgctgcatagccatgtcgatggtaacttgcggaggcttaagagcaacagcttcaacaaagtgaaggttcggatcaccagccagcttccttgcgag

SEQ ID NO: 15687 - DNA, 413 bp, Zea mays
  Clone ID: LIB3150-110-P2-K1-E2
ataaagtagccagcaaattcatggcgactattccaatccatttccacactcaaaagttgcaacaagtccaaggagaaaaagatgatccagacaatgataactcaagagagagtccaccctagaacaacttaaatcgtgcaaggcacaactcctgctcaagtccaagactcatgatcctttctactcaatcagatcatcatcgtcatcaggaagaggttgtgcagctgctgcagcaagctcggcttcatgctgctgctgcatagccatgtcgatggtaacttccggaggcttaagagcaacagcttcaacaaagtgaaggttcggatcaccagccagcttccttgcaaggtacaagaaaggtttctcaaagttgtagttgctcttggcagaaatttcatagtactgcaaattct

SEQ ID NO: 15688 - DNA, 433 bp, Zea mays
  Clone ID: LIB3150-110-P2-K1-E3
gccgccgcggggtccggcgacgccaggtgcagcggccccacggcgaagaccgggcggccggacagctcgcgccggatcttggccagcgccgcgccctcgatgccctcgaacgtgttcagcaccacgcccgacgacgaggcctgcacggcctcggcgttgcgggtgatgaaacggagcaccgtctcgtcgtcgctgccgtccacgcggatcaggtcccgcacgcgcaggggctccaggcccggcaccacctcgtccagccgctcttctttgatggggaggtagccgtcggcgcggaggcgcggggtggcgagcatgctgagaaacgtggcggcgccgtcggcgcgcagcacgagcgcggggacagcgacacgcgtggccgcgcccagcatcttgtaccactgcccgtcgaccaccacgcaagcgacctcgcgcg

SEQ ID NO: 15689 - DNA, 438 bp, Zea mays
  Clone ID: LIB3150-110-P2-K1-E4
gttcgactcggtccaattttaatattataaaagtaaatattcagaactccagctccaaactaacagaaacaactttgttcgcatcgacaaacttaaacaaaaatgcatgttgcacgactacaggtagcgataaatgccatagcacaaatactgatcgccgcataagatagcactacttcgatgggaccaaactttactcgtcatcctcatcgtcgtcatctgcgccgcccgaggagttgagttggttgagcctttcaatgagactggccttcctctgctcgtatgtcagtttcttggggttgtacctcttgtgctcctttggtggctgcttggttgacttgaccacagaaggatcagcacggatggcagcatggaccttcttgtacagagcttccatgtcatcagcctcaattcccttcttaatgtactcactgaagt

SEQ ID NO: 15690 - DNA, 442 bp, Zea mays
  Clone ID: LIB3150-110-P2-K1-E6
aacataccaaaaataaaattccagagcatacaataaggaaccacactttcatccggtacatatagcttgtctcggcaaaacttaattttaaacagaagtgacacggaacgaactgtcttagcactgcccttatcataagatacaaacctagctaggaccagatcaaactgccatttcgaggacgctgttgggaccttagacctcagctgccaagacaggagggcgcagctcgtcctcctccttcggggtatggatggtcaccaggtccggaagaggggtgatcgggccaaccttgcccttcgggtcccagtcaagcatgatcttcaccttgatacccagaacaccctgtctgaggaggacgtgtctcacagctgagtcgatgtactcattcactggctgaccagatgagatcatgtagccatccttgaacttcatggacttg

SEQ ID NO: 15691 - DNA, 406 bp, Zea mays
  Clone ID: LIB3150-110-P2-K1-E8
gaattccaaccggaacggtgtttcgaattaaagcaaattaactctggtactggtacattcgactcgaataggatccaaaaatactcacggcaatatcactggccacacaaagcagacatatagctatggaaaaattaggctggtgcattgcccagccaccaccatcgccagcaccccaggggaaggactgatcgaaagtcacgcctagatcttgttgaaggcaacgatgtcgcagctctggacgtactcgttaactggctcagcgcacagatagtcctcaatgagagtgtcgacagagacaagatcgtcgactatggtcatcatgatttgcagcttcttgataccatatccgactgggacaagcttggatgcgccccagagcagcccttccatctggacactccta

SEQ ID NO: 15692 - DNA, 347 bp, Zea mays
  Clone ID: LIB3150-110-P2-K1-E9
aaaaaaaacttttttagaccttaaaaaattggggggggaaacttaaaacacaaagaaacgtttgtttcggggccaaaacttaaaagtcccaaaccccagacaaaaccgttttctcccaaccccaaaactggaagcttaaaaaccccttttgggggggttggccccccccctgaaaaaaaacccgcccccaaaaaaggtttttagctccgggcccccctcaatggccttgatcaaaacaaaatccacaacctttggggcatcctttttaaaaacaagcaaggacttggaaccccccttttttggcaaaaaaagctcgccccggggctttttaaccctttggttttttc

SEQ ID NO: 15693 - DNA, 411 bp, Zea mays
  Clone ID: LIB3150-110-P2-K1-F1
agagtgaactgatttgattaaaagttttacggtgacacatatacctgacaaaataggggccattaatgctcaaccaaccactaggatacacccaacatagtttcagacattccgatggaaaaaaatttattctcggaagcacttttctccgggggggaagaagacaactcgctcgtatcaccagaccttgagttcttcatcttagttggtgctgttcatgtggcggatcaggtcgaccacgcgggtgctgtatccccactcgttggcgtaccaggacacgagcttcacgaagttgccgttcaaggcaatgccagccttagcatcaaagatgctagacctgctgtcaccctggaaatcggtggaaacaagggcctcctcaacgtaacccaggatgcccttgaggctaccttc

SEQ ID NO: 15694 - DNA, 328 bp, Zea mays
  Clone ID: LIB3150-110-P2-K1-F10
ggcaaaaaacacaacccccaattttttgggggggttataaaaaaaaaatttgggttttcggggggaaacaaaaacttggtaaacaaaaaattttcttgctcaaggcccaagggggggggggccccccttaaacattggtttttggtttttttacaaaaaccaacccccgaacaggccctccagggggttttcccaaatacatttttacctgggcggggccccattttatgggggttacccgggccgggaaaagtgtttacaaaaaggcccctttcaatggacaaaatggggaacctttgcttttgctaccccttttagcccggggggg

SEQ ID NO: 15695 - DNA, 397 bp, Zea mays
  Clone ID: LIB3150-110-P2-K1-F11
attatgatgcatatattattggtcataccacacatgataatgtgtgtcgtcttactgcattattacatatatagatagagagggatggatagaggagatttcccaaatatcatgaatcagtagtagggcggaatggcagcggagacgccacaggggttggtgcggtagctgggcagctggtactggtactggtagagtccacccatggccggcatgttctgcgccatcatcatggccatggggttgagaccctgggctgccagcagctgctgctgctgctgcatcagagctggctcgtacaggctgctgctggcggcagcggcacgctcaagctgcatcatcatctgcagctgctgcgcgacggactgcacgtccatcatcctcatctgctgctggc

SEQ ID NO: 15696 - DNA, 450 bp, Zea mays
  Clone ID: LIB3150-110-P2-K1-F2
aattgcataacagttttttttcttacattcaccagtaaaagtggtattaagaatgcatttcaccgaatgaatatgacaggcccccacaaataagagctgacagaacagagaaaataaaaggttacactccgtgtgggcggacaccatttacagctgaaggtcatcaagtgtcaattcttctactgacatcaactttaattttgtgatgaactggggaggatcatcaaggctagatgaaccaaggatgatgtctcgcttcagcttggatgaaagcttgtgtgcagcacgtaactctgatcgagtagcaccgcctattacaaaaacaaatatacgctgaccaagtttcctgaagtcactggaggcatgcttcaacacagaatcacttgaatatccatcatcagagccacgaggtcttgcccatgtgccacctgttcgtctggatcgcattga

SEQ ID NO: 15697 - DNA, 357 bp, Zea mays
  Clone ID: LIB3150-110-P2-K1-F3
atagcgaaaaagcgtcaggtagccattgatgtatctccagcatgttcacagcaccagcatttgttacaacgaaaagaatgcagtgtgttcaatgcgatctgattatgagtcctatagaatatccttgcctgtcctggactgtcattcccagtctaaaaagactcagaaaggatcgagagaccttagcaactcaaaaacaatggggtgtcacatccaatatcgattcccgtggcgctacagattctaataccgatgatcactagcatctactctgccttcctcttccctgattgttttcgggcacgagctgtcaggcaccgcccaacaaatttgagaacctcatcgatcagcaccact

SEQ ID NO: 15698 - DNA, 443 bp, Zea mays
  Clone ID: LIB3150-110-P2-K1-F4
gcaaaaatcgttcatgaattataagcatcaggcagacttaaaaacatggtagtcttagaacattgttctatatccttgcagagcaactagaaaaaactctcaacacagcacattcagaggatttatgcgttggcagcagcctgggcagcggcatcccgcttcctttgctcttctatgatgctcagcttgattcccttgcccttgggcaggctcacccacggcttattacccttgccgatggtgaacacgttgcccatacgggtggcgaactggtggcccagggagtcctccacgtgaatggtctcaaagctgcccttgtgcttctccctgttcttgataacacccacacggccagtgttccttccgccagtcaccatgacaacgttgccaacatcaaacttgatgaagtccacaattttgttggtctccagatcgatcttgat

SEQ ID NO: 15699 - DNA, 428 bp, Zea mays
  Clone ID: LIB3150-110-P2-K1-F5
gagataatgaaattgaaaggcattgttattccagatgtcaatatacgcatcacttcaaaagtacacgggatatcagtcgcagtatatagagagacatttagcaaagtcgcaaccaaaaacaactgtattttcggctccaactaacaacatcgaaagcgaacatcctccggtccttcaggtctcaagcagaccttgcactctttcttctcacctgcaaaattggtctccacgtcataaatgaatgcctggccgcgagtgcaccgacctcgcccactcagttggtggcattcgctgggaggtagtactggtagtatcccagcaccgcgaggagggcaaccagcacgggagccaccatggcagctgggccagcccatgaccagtaggactgcgccttctttctttttaggatcgccttgggtggcaaggcc

SEQ ID NO: 15700 - DNA, 456 bp, Zea mays
  Clone ID: LIB3150-110-P2-K1-F6
caagtctcaacccaacatcagaaaccacctaccaggaattcaactgctacacttgttctgaacaagataatcttgtgaatagctgttatgtcgctgaataacaaaaacagacttcaacatggtaaacaaaaggatagtgaaacccacacgacccttgtctgtttgggcttcacatgcgttggagtgatgcaatctcctcttatagactgcatccagcctgacggatatatatccgcaaaggaatacactgtttacattgatgtgatggtgtgcaaaagcttgatagtgtgcaaaagcttgatcgtgtgcaaaagctctcacaatcgaagtgcattcaggcccttcattagtgcatcagtgtgctcgggtttcccaaccgagatacgaatatagcctttcagttccttcttgtcatagtggcggatcatcactcccatcttcgcaaggtcttccttt

SEQ ID NO: 15701 - DNA, 353 bp, Zea mays
  Clone ID: LIB3150-110-P2-K1-F9
aaaaggaatgtatgtcttctcatccttgcaacatcaaaactcggaagtaatgtccactggaatcaatggctttttttcagctgtgatgacatcagaactgcaagtcgatgtaaaaacaatgtaaatggattttccgatttgtatccaaaatctcgaagttacatggttcactactgaatccaaaaggactcccagcaaaggcaatcagtagctgcggccccaaaacgaccacttttttgctggctttccagatgcaaagcacagggtaccttctggaagttctggctgctcaaatggagtacacaatgttttcgcagctccgagttccccttttgtccgagctttcacatttt

SEQ ID NO: 15702 - DNA, 326 bp, Zea mays
  Clone ID: LIB3150-110-P2-K1-G10
gagacattaaccacataatgagatcttcaaagctcaggtcacagacacacaggttcacattatgttccaaaactctcatccaggcacagagcagttttcaaataacataagacctctatcacataacaattggtagcaaaaactaaagagatgaggaaaaggcggtgcgacaaccatcagatgaccgtgaagagtctagtcgatctcctggagagaggcgccggtggcggcgccaccagcggcggcggcagcgacgtcatcggcagtaaacttgcccttagccttgtcggcggcgcggtcccgggccttgcggtcgaagagcgcct

SEQ ID NO: 15703 - DNA, 408 bp, Zea mays
  Clone ID: LIB3150-110-P2-K1-G12
ggtgttcgcctctttgaaatggactttcgcttcaccggattctttacagttacctttctggcacgggcaggaaccagttcctcttcctcctcgtcttgatactcatcctcctcgtcaccatcgacatcgggatcaaaatcaatatcctcatctatctcgacctcctcgtcatccaactctgggtcaaaatccatgtcctcatcatcttcctgcttccgctgatgagatcgcttcgctgccagagacagcttcacattccggccacgggcaccgcatttcacaatgctcttcggccgttgtggtgccacttcttcctcctcatcggcctcctcaaggtcatcatggtactcctcctccacctcgtcgtcttcgtcaacctactcctcgtagtcctcgtcctcctcatac

SEQ ID NO: 15704 - DNA, 453 bp, Zea mays
  Clone ID: LIB3150-110-P2-K1-G4
gaaatctagagtactattaacgagtgaaaacgaagtacggtaacgcataacaggccacacatacatgggctagctgcttcctgggtttatgggccgcgacgaacaggatcaggcgccacgtcatgtatcattgattggcaaacaggcatgcaattattattattgctactagtactaattaatctatttattgtccctcttccttccttctctctgatctgatgtatgcatctgaaggcggaagtcactggctcactggtcactcactgctagtctgccctgccactaccagctccagcgctcgttctcgttgccctcggcgtcggtggccggcggcagctgggatttgaagccgtagtccaggtcctcctgcctctgcctcctctcgctgctgcccgaatagcggtgcgcgagcgcggctccccgagcacggcgagcgtgagcgccttggcg

SEQ ID NO: 15705 - DNA, 444 bp, Zea mays
  Clone ID: LIB3150-110-P2-K1-G8
cttgaacaaaaaaagggggctgctcgattctccatcggcaggaccaacttacacgaaatttaacagcaaagagactaattaacatacaaatataaagataaccatcatcccacataggaagcatgttttttggatgtccgaaaataagctctaacgagcaaaccacactccgcaacctagctcgtaggcaggagttccaaaacgggcacgcaaagagaagcaactcagtacttgtagtccttgacgtggaggctctcggtgtcggcggcagcatcacccttgtaggtgccgagggtagcctcagagttggccttgcacctggcgaggaaggcagctctagccttctccaagttctccaccttgccagcccaggccttgagggtgctcgcctggagggcacggccgaaggagaaagacagggaccacggctttttggtgctgagc

SEQ ID NO: 15706 - DNA, 309 bp, Zea mays
  Clone ID: LIB3150-110-P2-K1-H1
ataaatcttataggtttaataaaacttgaggggctttgactctttgaagaaattaaaatagattacagtttaaaatggaggtaataactgcacgcgcatgggcatggataacaataatcgacaccagcctcaactattactttcttccttgcattggggagaaaaaaactgttgctatcgaacatatatagcaactcactcggtgcatagcaactgcatgcacaaattacggaaagacacgaagcatattagactacctagatatcgcggtgctcactcaaatcagcacggaagaaagcccgttgacca

SEQ ID NO: 15707 - DNA, 249 bp, Zea mays
  unsure at all n locations
  Clone ID: LIB3150-110-P2-K1-H10
gatcccaaccgatcattaccaaagcatggagataccaggatatgtacagccgctgaataaacttggcgaagaaattattgctcaatctaattccatcaacacagggacagggacgcaaacatcatgtactatctacagctcatcatgggtttctgccttatcagcggtggcggcagcaagctgctgacgctcgagtaggtagcgagctgccagcgccgnctgcccggccgagccgtatggaagggcgtc

SEQ ID NO: 15708 - DNA, 375 bp, Zea mays
  Clone ID: LIB3150-110-P2-K1-H11
gaacaattcatctatattatactctacaccaatgagaaaccgagccgacgaattgagtatactgatgcgatatatgaagacgctaagcagccttcatattcattcctttggtcttattatggtatggcttgtttttgccagcatgcatgcatatgcgccagcccagcttcacgtacatggtggacagtactagtggtccttgctgcagcatcgacgatcgatcgagaggagccattgcagtcggcggtgtcgctagctgccgagctcatcatcatcggcggcagggtagtgcagcagggtctgcgtgcacaacagccttggcgccgccaaggaacctctccatggcgtcgatgacgtgccgtccatgcgcgtacc

SEQ ID NO: 15709 - DNA, 388 bp, Zea mays
  Clone ID: LIB3150-110-P2-K1-H3
aacaaaccattgatgcattggaagttggggcaaaataccacgaggtggttcaatacattactaacaaacaatgtttcggtcaaaaatactttgccatgtctagtttctagaggtagggaaaaaacacagttgataatctctggctgccacattcatgaacttgaaatgctttatttcttcttgtcagtgtgcgtaccagccgatctcatcttcctgaggacgcccatcatctcctctctcttcttctttgccctcttgtgagttccaagctttctcttggcaagcttcagagcgcgcttgtccttgccaaccttcagaagctcggtgatacgcttctcataaggagcaaagccagcaacctctctgataaggcccctgaccatggaca

SEQ ID NO: 15710 - DNA, 336 bp, Zea mays
  Clone ID: LIB3150-110-P2-K1-H4
acagaacacacatcatcattgaggaacttgaatatttgtaatggcaactatccataaactcagctgatggtaaaagataatcaattgataaacaagaaacgagttcaacactctgggttgactcatttgcagaaagaaacgagttcaacactctgggttgactcatttgtagaaatcaaagtctgtctcgggcttcttcacgttggttcggtagcccttttcaaagtccttggggaggatgacatatcggtttttgcggacagcatgcatgccagcctcttggcagatagcagcaatatcagcagcactgatcttatccggtctggaaacataatc

SEQ ID NO: 15711 - DNA, 430 bp, Zea mays
  Clone ID: LIB3150-110-P2-K1-H8
actgaatcattcgagcgctcttgaaacagtagtgctacagggtatccagtgagcgttacttaaacaagcatcctccccccaaaatcacaagatacacatttgcagctgcaaactatacaaaatgttgattctagattccggggcatgttagcagttctgccatgcaccatcgaccgacagcatgagatatttattcacaccggaatagttattcccttgcttgacatgctgtcaaggatgtcattcagggcttggcacagtccagcaatctgctgatcccattgctgcagctcttccgtgtcatcatcaaaatgtatcacagcctcaacctgatcaattgagccccgcattctatcctcataaatcatccgagatgctatcttctcagccttccttggatcaatccccagtaatgtcccaagctcatcaa

SEQ ID NO: 15712 - DNA, 401 bp, Zea mays
  unsure at all n locations
  Clone ID: LIB3150-111-P2-K1-A12
aaaataaagcaagcctntttgtattcattcattcagtaggagaaaggagatgagatctcatacatagttgattcagagtacagacataagacatgatcagaaattcataatgcagcagcctatgaccaggcccttctcttgagtcagtcacccccacttcctcgcgcaagcaggctgacaaatgttggaacactagccacacagtggctggctgtctaacgcaaacaccactcgagagtcgagaagaccgcgatgcatcgcaccctgcctcttttatttggggatcgccgcagccagcagaattattattagggtaccagctagtagtttctttcgttcgttcaccaaaggaggatcttccagcgctggttgtcgccctcgcaccactttcagagcacgat

SEQ ID NO: 15713 - DNA, 390 bp, Zea mays
  unsure at all n locations
  Clone ID: LIB3150-111-P2-K1-A7
aacgaaaactctatgtttaattgnctccttgaaggtcttatatatatagagaggacaacgcagcgagatgcatgggctttccagcatcgattaaagtatcagaaccttattgtagcatgcatgcatgcatctgccggttttggaagaaggtttttcctcacatcgacagccccacacatgccgcgcagcaacgagtaccccgctatcactccactggagcatagacgacacatgttctgcttggtgtataaaccgagaatgaatatggcctattatcatgcgaacagtcggcggtgaagtgctcggctgcgtgatggatcctgctaaatccaccaaatagtccagcgtcggagtccaagaccaccttatacaccccaggctttcgacaac

SEQ ID NO: 15714 - DNA, 367 bp, Zea mays
  unsure at all n locations
  Clone ID: LIB3150-111-P2-K1-C5
aataaaattnnnannaaaaaatttttgggggtttttttggggaaaatggaaaatttttgaaaaaaaaggaccggtaaaaggttaacggtaacaaccacttcgatacacccgtttttggttttaaacaatcaaataaaaaaaatttttttttggaagcactttcggggaaaaaaaaaaactttttttggatggtttaaaaaatttttggagggtttaaaaaagttgtgaatttacttgggggtggtaatgggggggataaaggggaacactcggggggtgtatccccacttgggggggtaccaagaaaaaagttttaaaaaattggcgtttaagggaaagccaacctttataataaaaatgttaaaac

SEQ ID NO: 15715 - DNA, 69 bp, Zea mays
  Clone ID: LIB3150-111-P2-K1-F12
acaatgggacgcactctgtaacggaacaataagcgcggccggtggaaaggacatataccaaaaataatt

SEQ ID NO: 15716 - DNA, 58 bp, Zea mays
  unsure at all n locations
  Clone ID: LIB3150-111-P2-K1-G12
acccggtccgtgaattcccgggtgcggcgcgcgccttttnntttttttttttctctaa

SEQ ID NO: 15717 - DNA, 346 bp, Zea mays
  Clone ID: LIB3150-112-P2-K1-A1
aaaccgtaaagttcaagctgtcatgttaacgcaaacacacacagcaacgcgttgtgtcctgctcaattacaacattaattaacacaaacgaacaaggggatcaggaccgtccgtttttatctgttaccgaggctagacacaaacaactcttcaaatctaaaggccaaattacaggtaatccaaaattggactatggagcatcgatcgaactctctaaatacttgacacaaaggctagttagcttgacaccatcatctggtcgcacgcctgcagtgcctggtttgcgtagtaccttacgtcgacgtcagggtcctcgctgagctcaacgaggcacggtttcacggtc

SEQ ID NO: 15718 - DNA, 316 bp, Zea mays
  Clone ID: LIB3150-112-P2-K1-A3
aaggacaccaaaatttttgtttgggctctatttccattaccgcaaaaaaacatagaacaagcactttaagtagtagcattcactaatgactgaatagaacaaaacagggtactatcttcaaccgcttcacttcttatcttccttctctgcctcagctgccttcttctggcgggcaccaagatgtttcttggtcatccgctcaaggcggagcttgccataggcagcaaatgacttcatctcatctgtgaccttcacaacctcaactgaacgtttctcaccacgagtaaatggcatgtagtcaccctggacctgggta

SEQ ID NO: 15719 - DNA, 384 bp, Zea mays
  Clone ID: LIB3150-112-P2-K1-B12
aggttgtgtctgcaactcaatgacaccatagcaccgatctcttatagtaggatggtcatggaaagatccaacgtcctgtgtgtaattccaacacctctcacattttgcaccatccgcacgagtcacaccaatccatatgactccagtgcgtgggttactgaactttcctgtgtatggtacagatgatgtaatctcttcatttaggattggaagaatatcgacctgagatgtgataaacaggcgatgcagagcgtctgcatcattggatgcagaagatagctcctttagctttaataccgtatctgaactttcggtatggagataaacctttgcatctaagctagaaccaatcaactttccagtgcgagcattctccaaaatttt

SEQ ID NO: 15720 - DNA, 462 bp, Zea mays
  unsure at all n locations
  Clone ID: LIB3150-112-P2-K1-B6
aggttgtgtctgcaactcaatgacaccatagcaccgaactcgnttagtaggatggtcatggaaagatccaacgtcctgtgtgtaattccaacacctctcacattttgcaccatccgcacgagtcacaccaatccatatgactccagtgcgtgggttactgaactttcctgtgtatggtacagatgatgtaatctcttcatttaggattggaagaatatcgacctgagatgtgataaacaggcgatgcagagcgtctgcatcattggatgcagaagatagctcctttagctttaataccgcatctgaactttcggtatggagataaacctttgcatctaagcttgaaccaatcaactttccagtgcgagcattctccaaaattttgttgacctcttgacctcaacttcaggattacacccaggatatcaacatcattctttggagccgagagccattctttat

SEQ ID NO: 15721 - DNA, 435 bp, Zea mays
  Clone ID: LIB3150-112-P2-K1-B8
ctcatgcacttggctttttcattagaagaattgcattggctcaaactgtcaaaacctgacatacaatcgtgtcgtaacggtccctgagaaattacaacccttgcggacgacggtacaaggatcgtcctgctgtggcaaaactcgttccttattcgcaagttacgtgttgctgcagcgtttacacaccgcaggaatcaaatccgccagaaataactacacctccagcctactccacaatgctgttgtgatccagaattctacatctacatttggtcccaggcaatagaattgttgttctcaaaattataagaaggttgctgcagacggttgcggcccaatctgctcattgtggcgaggccttcgatcactttgtaaagtgaagaccaccatcgatcagctgggacctgatactgagttagagattcatcgatttca

SEQ ID NO: 15722 - DNA, 226 bp, Zea mays
  Clone ID: LIB3150-112-P2-K1-C11
attgggggggttttttaagaagttttttgggttaaaaaaaaaaagaggtttttaaaattatttaatttataattggggggggaaaaaacggggtgggttttggggggatgaaaaaaaaaaaaaaaaaaatgggggggggggggtaaaaaaaaaaaaaaaaaaaaggggggaaaaaaattttgagttggggggaaaaaaggggtaaaaaaaaaaaaggggggtaaaa

SEQ ID NO: 15723 - DNA, 327 bp, Zea mays
  Clone ID: LIB3150-112-P2-K1-C12
ggaatgcagtttttgtatttggtttattaaagatggcatcatccggctgtttcaaaagctattcgagctcaaactcatcaacaagccttcataaactaccgaatccaaaaccgatagaactctccaaaaggctacaaaaagaataacccgtatgataccagggttgctgttcctaaactcgttaatcgccaccactgaaaaaagtggggattatgatccataccatgaaatggtacctaatgactcagtggagtctggccggtagaagatgaagtcatgatgttcagtgtttccgtcacagaagacatggcactcagcgccgcttta

SEQ ID NO: 15724 - DNA, 326 bp, Zea mays
  Clone ID: LIB3150-112-P2-K1-C2
gggggagggggcagatcacatccattgcattttttcagaaccgctaatcataatcctccggtaacatcagcccatagcaagaagccttcttttgaaaacaacccacaccttttacacaaccatgacgggcttaactaaacacctccagcagtagggagcaggccccgaaaccgaacccccttaggcccctccccccggattccgcccccaagctggatttccttgggcattatggtgacccccttggcgtggatggcacaaaggttggggtcctcgaaaaggcccaccaggtaggccttgggggccttctgcaacgcggttaccgg

SEQ ID NO: 15725 - DNA, 443 bp, Zea mays
  Clone ID: LIB3150-112-P2-K1-C5
agagaacaaaattctgatattttttttttttaaaaaaaatctacaactagcaatacttagaaagttacacaaatctggaccagtttagacctcggaccacaagttagggctaagtgctacagttgaccaaatcttcggaaccttgtctgttcgagggtttgagcttatagaagcatcaccgcagatggccgtcaagacatcaaactctcctcacgttgtctccatggataaccaccgcgccttcagtcatcagggtgccaagagcaccgcggagttcgtgcatatgaatttccattgagctctgcttcctcagttcctccagcaactcaatcatgcgcatcgaggggcctccaagctgcattttctccgcaatcaggttacgggttgcggcaacgaggttcttccgcctttggctttcgcttgcggatatccccggcatgatc

SEQ ID NO: 15726 - DNA, 423 bp, Zea mays
  Clone ID: LIB3150-112-P2-K1-C7
actaaatcttcagatttatgtgtccagctgaaatcacaacattgcatatagtgacatgaattcaaaacatagctaaggcagtgtccaattcttggtaaactagatgtaaaatctactgcttgatatcagccttcttcttctgccacagcctgtccaaggagctgtctgcatcgccctgagcacggacaaacccagagagagcaaatgttgtgaagtgaccatcatacaggccattcgcatccaagtggccaatgttgatctggacagaggcatggtccttggcagtgatgatcctgtttgtggccgagcacttcctgggaacatagaggtccacagtcttaccctcctcgttctgcatggtgacagttgggggaactaccgcaagagcaacttgcaagaaacagaccaaactggaggcggagt

SEQ ID NO: 15727 - DNA, 424 bp, Zea mays
  Clone ID: LIB3150-112-P2-K1-C9
acataaaaatatttcgtagtattccctaaaacataatccgcattttgtaactgagtttttcgcatcaaacaacacatcgcatatttttcctatcaagatataaaaacatccgagttcttttctacttctttttctttcgccacaaacttcaatccataccaatacaatttttaaacatgcaccacatcgaccaaaacataactagacaactaccaatcgcatacatcacataaccttttgttctccaatcgcaaacacgatcctaccaatgtgtatagccaaaacatattacacacatccacatatatacatgcactgcccgacatcaaccaaagcatatgtattataaactataaatcaatcaacatgaacgagtcgtgactagacgcatgggctgtccacatggcttggcgtttcgtcgaac

SEQ ID NO: 15728 - DNA, 442 bp, Zea mays
  unsure at all n locations
  Clone ID: LIB3150-112-P2-K1-D1
cgactcggnccaattttaatattatataagtaaatattcagaactccagctccaaactaacagaaacaactttgttcgcatcgacaaacttaaacaaaaatgcatgttgcacgactacaggtagcgataaatgccatagcacaaatactgatcgccgcataagatagcactacttcgatgggaccaaactttactcgtcatcctcatcgtcgtcatctgcgccgcccgaggagttgagttggttgagcctttcaatgagactggccttcctctgctcgtatgtcagtttcttggggttgtacctcttgtgctcctttggtggctgcttggttgacttgaccacagaaggatcagcacggatggcagcatggaccttcttgtacagagcttccatgtcatcagcctcaattcccttcttaatgtactcactgaagtgagactg

SEQ ID NO: 15729 - DNA, 406 bp, Zea mays
  Clone ID: LIB3150-112-P2-K1-D2
aaaggcaatgatgaagtgaacattagtttaaatgacaaaaaaatttacaactccatatgataagttcaagttcccaaggaataatacacgaatcatattccatcagtacaggtatcttgtttcctctgtagcagtcgtagtattaaatattttccatctgtgataactgcgtctttgccagaaaagatatggaaaaggaacacttcagagccactcattaacaacataaatggagttgaactaaaatagaaacatgcactgctgacaattaacgaagtccatcatacatttcactgaattttgtgcttttgtgttttcttggaattttggacatttgctgaacttccagttacttcttgctttctcttcttctcatgtttcttggaatgatcaccacctgaatcat

SEQ ID NO: 15730 - DNA, 448 bp, Zea mays
  Clone ID: LIB3150-112-P2-K1-D3
ccaaaaaggcaacatattttttccataaacaaataaacatgacgctgatgtttgaatacatggacattgtacttattcaactacaagcatgcccatcgcttattacaatgctagcaataaagggtacgtcgaaataaatagggtgcccatccagcactgatgactaaaatagtggtggcaaagagatgagtagcggtggggaaaattctcatacatggtctcaatctacaacttccgtaccttataaaacatttggcagccattattgtcttacacaaaatctacagcagttcaccgtgcctcatcttctaggttgcggaacccagtggtaaggtcgtcatacagtttcttaaacttgccgaccaaagcttcttcgccttctgcaggatcctcaaacttttgggatactaggcggataaatagatcccccaccgatgctttatgacac

SEQ ID NO: 15731 - DNA, 359 bp, Zea mays
  Clone ID: LIB3150-112-P2-K1-D9
agcttgaagcgagcaacttttgttttatgattccaaatggcccaagccacctttctaggtgatgcagtaagtacatccagcagataacacaacacagttccaatcacagcgcaaaatatgccgaccaataaaaagaggtgcaaaagaacattgtcttcttgctcaaccagtaaccagtagacaaggcacgaaaatccttaaatatctttcaaaatccaagccaaggcaacaaaatgtgctactactcggtaggaagtgattactatgctgatggcccacaactttcttaaaccttgaacccacggctgttccttctgccacgagccttctcgaacttccttcccttggagcgcacatat

SEQ ID NO: 15732 - DNA, 402 bp, Zea mays
  Clone ID: LIB3150-112-P2-K1-E2
agccatataatgagttcttcatattttttatacactccacattaagttcaactcccatcgaggctcaaagcagtttataagtaacataaaactcctagcacataatcattgatagcaaaaactagagcgataaggagtaataggcggtaggaccaccatcagatccccgcgaagcgcctagtcgatctcctggagagacgcgccagtggcggcggcgccaccagcagcggcggcgacgtcgtcggcagtaaacttgcccttagccttgtcggcggcgcggccccgggccttgcggtcgaggagcgccttgcggtccttgtcaagcttcagctttgtaaccatgaccttggaagggtggatgcccacgttcacggtggagccgttcaccttctcgcgggtgat

SEQ ID NO: 15733 - DNA, 378 bp, Zea mays
  Clone ID: LIB3150-112-P2-K1-F1
gttccttattgatttctttctcagcctgtagtcacgtttaaacaaaacctgtcagcttgcttgcctttgagcaaatactcgcaagttccacatcacaggaagattggcgaaactacatccaaaaccgagcgttcctcacaatgtctggtacaaaggcatccactactgactgcaaactcagaagaaaggggataacgttgtgacatcatttcttctgcttgctcgatacattcagctgctggaggttgagcagcaggtcgttggagtccaggaacaccttgttggctgaggccgaaatggtgtgggagatctcccttgcagcttcaatctgcctcagggcaaggaaggcagggttgttcgctatggcttgaccaatca

SEQ ID NO: 15734 - DNA, 338 bp, Zea mays
  Clone ID: LIB3150-112-P2-K1-F10
gaactatgaagtgaaatttagcttcaaagagtgcaaaatgcaaaacttttgaaatagaatgaccgttaaaagtttaacgataacaaccactacgatacacccgttataggttttagacaatcagataagaaaaatttattctcggaagcacttccggggaagaaacacaactctctttgcatgctttcatcactctttgcatgctttcatcagtttgttcatttacttggtgctgttcatgtggcggatcaagtcgaccactcgggtgctgtatccccactcgttgtcgtaccaagacacaagccttacaaagttgccgttcaaggcaatgccagcct

SEQ ID NO: 15735 - DNA, 291 bp, Zea mays
  Clone ID: LIB3150-112-P2-K1-F11
actggaattagttcattatttagtgcaaaggccaaagtagttacacaaacatgacgaatcaaccaggagcacactgcccaaagattacggtaccagcatactaataactcatggactgaacaataaaacaaactgcaactgctggatagcacggaattgaaggatcaacctggcaaatgtaaatactagtgcatagctgaaatacacagatatctctgttctgcctcaaggaaacattcctcagtaacgatcatcataagcacgagctgccccttccctgctgggacgatc

SEQ ID NO: 15736 - DNA, 352 bp, Zea mays
  Clone ID: LIB3150-112-P2-K1-F2
gagccgcgaacaataactcttctcattcttctctcgtctcgtttcatagcgggagcaaccaatgggtacaacaggggttccaacacctaatccaaaggtagaacggacactaacacggtgacagaagcgaacggttacacgatactatagatagataagataactcggccgaagccaggatgggcccacacattagtcccttcagccgccgccgccgccggcgtagccgacaccaccaccctcgggccgaccgccgtagccggcaccgccttcgtagccgtcggcaccaccctcgggccgaccggcgtagccgccaccgccgccataaccggcgtcacggcgcccgtcacca

SEQ ID NO: 15737 - DNA, 358 bp, Zea mays
  Clone ID: LIB3150-112-P2-K1-F8
gtgcaaaatgaaactgtgtttctaagaacatccaacagtatagtagggtagaataaacgttgaaccgtaacatcattacatattccaaacaaaaaatatattgtgccggtagaagacacctaacaggttgtagaggcgattctgtcctaagtttccatgatacatccggagctcctagtcagttcgcatttgatattcaagccttgctcgcaatgttgctggacagccagtccaggccctcgtacagaccctcgccagttgtggcacaagtgctctggatgtaccagtgtcgctgccgcagggagtgtaatccaagcttgtcagtgatctcagcagcattcatggcattaggaagatc

SEQ ID NO: 15738 - DNA, 335 bp, Zea mays
  Clone ID: LIB3150-112-P2-K1-G1
tgggagcctcaatgtcacattgatttttgacaagtttgcaacagccttaattttaattttaagagggttacagggagtttgaacagatgccctcacctgcctcatttacaactctgcaaaactggacatcaaaagggatttagagctgcctgaaacagatgaaaatggcactactctctcgtccaataagctttacgcttggtggtggtcacttgctaatcaggtgctgggacagtttgtccctcaccctgactccattctcatcagctagctggcacacttgctgcctgtacttagcgtcatgatcgctcggccacgcctgtgcctcgtccact

SEQ ID NO: 15739 - DNA, 380 bp, Zea mays
  Clone ID: LIB3150-112-P2-K1-G3
gggcatctgcattgttgttattgcgcccatcgttattgatcacattattacacttatgaaatattggtctgattgatctcacgtgaaataatacatccgcaaggctgccattgcaacacgaaactacattctcctgacggtagtcgcacccattcatcattacaagatttttttcttcatggcaaatataaatctcatgttggatattcagcatttatttcaacatatttgtagctcagatcacagccccatgcctttccatttccttcttcactcccaactgatatatcaatgtttactgtaccatgggcatctccagcatctttgagatacttgctagcggccaatctgtcaaaggggagggggtggccattttttat

SEQ ID NO: 15740 - DNA, 319 bp, Zea mays
  Clone ID: LIB3150-112-P2-K1-G4
aaaatacacgctgcatccatatattttcaagatcacaagttaggaacaaccgaacaacatgaacgccaagaaccacaatggacatgccgaaatttagaaccgcggcatgtaagcattcagaaccgggcaagtccttggctctacgacactacctggtaaaggagtcttgctaacaaaccaagctccttagcttagcctctgctaagtagctgagtctgcagaatctggttgtcttccagcaaccggtcgtactccaagagcagctcctccgactgcttctgcagcgcgtcgacatgggcctctgccaccgacgccttcc

SEQ ID NO: 15741 - DNA, 354 bp, Zea mays
  Clone ID: LIB3150-112-P2-K1-H10
agaaagtaaaaatttcagttgtgttaaagatctagacgatcaagcatcaaataaattcatcaataatctgctacatatgacaagcaacctgggtctactcggtcgcattgtgtaacatcgagtttattcccggcatgcgcatgccccagccgcccgcccaccaaacaatccatcagttcagccgcggtgtcgccacggcctgctgcgatgccccatctgcctcagcctcggcggcggcgaggcattgcttggtgcacatgcaggtggcgacgtcgcataaaccgccggtgtagcgcatcgcgatgcatatggggatgcagatcgcgtttttgccccagcaggggaccttgatca

SEQ ID NO: 15742 - DNA, 311 bp, Zea mays
  Clone ID: LIB3150-112-P2-K1-H8
ggcatcatatcatatatttattatccatgagagggtaagagtcatatctcaaagcaagcaaaataaagtcattgtttcagagaagaaaatgatgtagctattgtgtctttgatatggtagcaaaaaatagcaatacgattgcccattgcattgagaagcaccaccacaatctgggaccgccagcgctcaaggtgacttgcttccagtgggggagccaccgcgggcagcagcatcagcatcgacatcagcagcagcatcattgttaccattgccattggggcttgggctacggtcaccttcaggactcgggc

SEQ ID NO: 15743 - DNA, 205 bp, Zea mays
  unsure at all n locations
  Clone ID: LIB3150-113-P2-K1-A9
gggcgatgttttccaattcccagncaaacatttttttaggcccagaggggaatgttttctaccattgatgcgacgagaaactgaccacgcaaaacaacaacaaaattaactagaagacagctgagacaatagtagcactagcataccaacaacagattgcataatagcataagtggtaagacccacagaacagacccaatgttct

SEQ ID NO: 15744 - DNA, 344 bp, Zea mays
  unsure at all n locations
  Clone ID: LIB3150-113-P2-K1-B12
ataaaaaattataaatttttttttttttttaaaattaaaatttttttttttttttaaaaaaaaaaaaaaaaaaaaataaaaaaaaataatttttatttaaaaaaaaaaaaaaaaattaaaaaatttttntaattaaaaaaaaaaaaaaaaatttataaaaaaaaaaaaaatttttaaaattataaaaaaaaaaaaaattataaaaaaaaaaaaaattttttnaaaaaaaaaaaaaaaaaaaattttttaaaaaaaaataattttaaaaaattttaaaaaattaataattttaaaaaaaaaaaaaaaaaaaaatttttaaaaaaaaaaatnttttattattaaaa

SEQ ID NO: 15745 - DNA, 315 bp, Zea mays
  unsure at all n locations
  Clone ID: LIB3150-113-P2-K1-B4
tnnntnnaaacaaacgaattttcatttttgctgattggatctgctattctgcatcgttagcatacgaagtcactagagttcactagcatatccaaccaaaaaataaaaatacaagctaaagacgataggaaaacttcgtactttgagttgggtttgcatcaaacgcctcatgaactacaagctagttgagctaggcaggcgttcatctctgtttttcaacaaatactttcggattcataccccatacaacaaataacttggctactcatcattctcggccttagccttctttttctttttcttaccatctggggc

SEQ ID NO: 15746 - DNA, 94 bp, Zea mays
  unsure at all n locations
  Clone ID: LIB3150-113-P2-K1-B8
cgtgacctnngggaaaactcnnctggcgttacccccaacttnnaatcgccttggcagnnnacatcccnncctttcgcccaggctgnngcgtaat

SEQ ID NO: 15747 - DNA, 420 bp, Zea mays
  Clone ID: LIB3150-113-P2-K1-B9
actacatcgaacttcgtttaatagcattgcaaatcaaaacaggatgatatgaacaacaatcatggccaatagggggctacgaacaatttatcacaaaatacaaaatggaaacacacagcagcagcacgcaatggagtggacccatacagagtatactcaaaataactcaaccattaagcaccagcgaactaattattaaccggctactcaatagtcatcgccctcgtcaccctcgtcatctgcaccctctgcgccgacttcctcatagtccttctcaagagcagccaagtcctcacgggcctcggagaactcaccctcttccataccctcaccgacgtaccagtgaacgaacgcccgcttggcgtacataaggtcgaacttgtgatcgatgcgcgagaacacctcagcaacggcagtgtt

SEQ ID NO: 15748 - DNA, 345 bp, Zea mays
  Clone ID: LIB3150-113-P2-K1-C12
ggaaacaagccaccacaatacagaggctttttcagattacatgacaatcacaaacataagatgcagtacaattcaagtttgatcgacttaacagggttcaaatatagtttgaaaagcgcaaagtaaacaagacaccatcaccagtccaagcctttgaaaaaagggtcgatgaggcccatcacactgaaaggtcttcggcagatcaaatgaaaagcttttcaatggagtccttgagaccctgtatttgtagtttcagctggctaccctcattactggtcactgagcaagcaataaccggttttgtcacaccacaagcacggccaaaagcttgtttcgatggaacaa

SEQ ID NO: 15749 - DNA, 433 bp, Zea mays
  Clone ID: LIB3150-113-P2-K1-C3
aggcgcataacagttttccatttttgttttgcaataatgtaggggagacaaccatccataacgacgttcttaataacccagtggcaaagcggggcggacataaccagaaagtcttacaacatcaggtgttgcaaaccacaacggggacaagagcagcacacaagcctgacgatgaccgcatcaggatacttctagtactcatcaccatcatcacctttctcaccctcatcaaactcagcaccaacctcctcgtagtccttctcgagcgctgccagatcctcacgggcctcagagaactcgcccttcttcataccctcaccgacataccagtgcacgaaggcacgcttggcgtacatgaggtcgaacttgtggtcgatgcgggagaacaccttcacaacactggtggagttggagatcatgcacacagcgcgct

SEQ ID NO: 15750 - DNA, 382 bp, Zea mays
  Clone ID: LIB3150-113-P2-K1-C7
gttcgagcctcatacactttgcttctttacacatcgggatacgaaggcagagtcctgttcactagacagaatgaatcgaaacgccagagctcctgctgcaggacactataggtccaacaccaaatcacgaatcacccacacaaaaaactgcacacatattacacagacaggaaaaaaggcgccaccacgctaggtgccctacttccatggctggatgactgcgacgacaatgaccacgactatcaccagcagtatgacgatggcgtagcacattcactttctcgaattcctctgcagattcttcgtgttctggagcgcgctcacaccacgctgtatgtggctggcggcgtccccgacatgggtatggaaggtgcagcacatt

SEQ ID NO: 15751 - DNA, 427 bp, Zea mays
  Clone ID: LIB3150-113-P2-K1-D1
ctataaatacggcaaccgttgaattgattttgataaaaaaccaacggagcattgagggagaacaggaccatcaaggcgcgcacacgttttactaggacttgccaaatggagtatctgctttagttcgtcttacatagaccacatagctgtcatcagcatcctacgacgtttttgcatgcctgcgccatacagtcccaaagtctcactccgccctacacgactgctggcaaccagtttgcacctcccacagcatccagtggttagtcttcgtcttcttcgaagtccctgaccttcacgtctgcatcttccccatactggatacatgtgtcgatagaagatagcacatattgtatgctgctttcctttctcaaatcaagtggaatgaaattaaccatgctgtaatcatcaaccagttcagctaaacact

SEQ ID NO: 15752 - DNA, 437 bp, Zea mays
  Clone ID: LIB3150-113-P2-K1-D2
ggagaacaagataaaaacatatatatatgtgtgatatatagttggaacaaagtaagcatttgaaaagaaataaccatttcaagaatgaagttgcaataacattagttatgctgagtccaaggcaataagaaactagttcagcaaccgaaaatacaaactgaaactcagcagcatgcgatatatgtcgaagaattattccctgctggctatatatatgaaaccaaattattatgatgcatgctgcaacaacagtttagctagcaccggccggcccgcggagaggatcggactagtagagataacggagggtggtgacataggaagctacacgctgcggaagcttaccccacactgaagctatatagcacgtgtgacggcgacgaacatggaacgcaccgaaatgcctttgggagcttccgaagcggaagaacaccgta

SEQ ID NO: 15753 - DNA, 412 bp, Zea mays
  unsure at all n locations
  Clone ID: LIB3150-113-P2-K1-D6
atgattccaaacaacatatcaatttcttttataaactggaacaggtcgcttgtaacaattaccaagagttcttcaggttcacagacaggacagcaaaattaactacggcaacaggaccaaaccaccacttctgagatccagatgacacacacaactctagtcgaacagggagaatcccatgtcgtcgtcgctctcttccttctcctcttccttcttctcctccttgggagcctcggcagcagcaccaccagatgcagcagcaccgncgncgncaccttcgttcaccatcattgcaccaccaccgacagcaccgacgatcacctggaacacggcggagctgggggtgaccaatggagaaggacgactggacgccgtaagcagagtcggccgcggaggctgcagcgaccaggcg

SEQ ID NO: 15754 - DNA, 393 bp, Zea mays
  Clone ID: LIB3150-113-P2-K1-F1
agtgtagacaaccatccataacgactttctttttaacccagtggcaaagcggggcggacataaccagaaagtcttacaacatcaggtgttgcaaaccacaacggggacaagagcagcacacaagcctgacgatgaccgcatcaggatacttctagtactcatcaccatcatcaccttcctcaccctcatcaaactcagcaccaacctcctcgtagtccttctcgagcgctgccagatcctcacgggcctcagagaactcgcccttctccataccctcaccgacataccagtgcacgaaggcacgcttggcgtacatgaggtcgaacttgtggtcgatgcgggagaacaccttcacaacactggtggagttggagatcatgcacacagcgcgct

SEQ ID NO: 15755 - DNA, 419 bp, Zea mays
  Clone ID: LIB3150-113-P2-K1-F10
ggattgataacccgctgcttgatttcaataatttcatctaaacaaaaacgatcacaaaaccatgtcaacccacggcaacagctcggtaaaacaaaacaaaatctcattgttctcatagttcaaagacgaatgttatgctagctcatgttgacacatcactccatggaagatccaccagcaccgaaagcaccgccgccaccgcggccaaagccaggtctgctacccctaaaagatggttggaaatctgcaggagcaccacccttatcaccaccaaagtcacctggagcgccacgtggacctcctctgtaaccatccctatcaccaaacctaggcctgtcaccttcataacgaggagggcccctggggcggtcaccaggtgggccagagccgaaggggcgagacgggggcttggaagactt

SEQ ID NO: 15756 - DNA, 427 bp, Zea mays
  Clone ID: LIB3150-113-P2-K1-G10
aaacagtatcaactttagtgacacaacacaggtacttaaaatttaaggagatatcattgtcgattacacacgataatttgtctgctaaaaaatataggaaacagtacttgtagatgataaaaaagccaaaacttgcagcagtttgacgaaaacagcagctctagtcgtcgaagaggctgaagcccatttcctcgtccgactcctcttcaggctccgcagccttctcttcttccttgggagcagctgcagcgccagagtcaccagcagcaaccggggcggcaacagcaaacttgcttgggtccttgaggtactccttgatcttgtcagcatgtgggtatgagtagtctgtctcgacagcaacagcaagcacattcttgtacccattgatgaacatgtggggcacagcagcaagggtcgggtatgagat

SEQ ID NO: 15757 - DNA, 438 bp, Zea mays
  unsure at all n locations
  Clone ID: LIB3150-113-P2-K1-G12
catccaaaaaaaagggtcattgctttatattcgtttttttatcttatacagcatttttttccatacaaacaactaaatagtagtttttttctcagactggtcgagtagacataggcaagcaaacataatatccatagagaagagaagaaaattgacagagagtagtgtccgtgtttaacggcaccaggcataaccgatttcacaggcctntagagtgtcaaaattatccataccacaagcagcaaaattacgacgaccagcggagctgggagcaggaaagagcctacaagcaaccttgcaatcacactgaacatgcaaagtagtagaaggccaagcatcacgagcaactttttaacaagggcggtgatctnctntttcttcgggaccacaggctcgcttttgaagtgatctaataggtttgctctgggaagggaatcc

SEQ ID NO: 15758 - DNA, 383 bp, Zea mays
  unsure at all n locations
  Clone ID: LIB3150-113-P2-K1-G3
aacagggcacctttcctttcttggttcctgttgcagtgatactgnagctgaatttaccatgctctaccaagtcagtaggagtaacccagttaaagacttaataaaactacaccttgtatttacgcaaatttgagaggggcgtaatcaaatgataagagcataatcaacactttggtgacattctagtatgggcatttacatcacaaacatgtgaaaagaaacgagcagcaggagaaggggacaacatcagcctggacgacaccgacaccacatgggatattttgcttaatctcctctgatacatttcataacggaactatgtatgaggttgaaacacagcttcatgagcagcacgaggaagtgctgaccatccctttatctgg

SEQ ID NO: 15759 - DNA, 203 bp, Zea mays
  unsure at all n locations
  Clone ID: LIB3150-113-P2-K1-G8
ataataatnatttntttatcgaataacaaacgnnnaannnancnggaaaaggggcaaatttacaaaggacaaagaggccccgacaaaaagcaaaggaaagagagaagagtaaaaggaacccgacggaatcaagagaaaaaagaacgctaacaaaaaaacgaccccctaaaggaacgacgaacccacttcaaaactaacaaaat

SEQ ID NO: 15760 - DNA, 348 bp, Zea mays
  Clone ID: LIB3150-113-P2-K1-G9
aaactaaaacactcttatagatttaacttgctaagcacataacacaccgcctgagacactttgggcacacacttagtttgtacagtacctaactgacaccaaccacaatcagagcttagacctaaagcaacccatctcatgcggaggccttccgtgccttcttggaggcaggggacttcacggtcttcggcttggccttggccttggcggcgggggacttcttcggcttcgccacgaccttcttctcgggcactttgcgcttggtcccagcagcagcggccttctttggcttggcagccgctgccttctttgacttggcggcggcggccttggccggcttgggggcgg

SEQ ID NO: 15761 - DNA, 278 bp, Zea mays
  unsure at all n locations
  Clone ID: LIB3150-113-P2-K1-H5
ggtcgttctttttttttttttttttttttaatgcaaatttttattatttttgttagngagcaaagtgtcccgaggccgcggggcaattgtggacactttctgacacaaccatcgacggaacgggagtcaaatagaaagactgcccaaaaaattcctacagcacatacgattaaacacggggggcaccgtggagaccaccgactggactaggaggcacatgttgcaggctagacagggcaagaaggtgacgaaaacaacctgcacgcaccaagaaccgc

SEQ ID NO: 15762 - DNA, 418 bp, Zea mays
  Clone ID: LIB3150-113-P2-K1-H6
gcgggatacaacaagcaacatttcgccatttattaaggctatgcgtcactgctgccagatgggaagaaatcaaaccgcgcagcaaccacactcaaaacctggatcccaaaaccctcgtaccactcatcaaactatataaaacaaggtgcatctttaagctaaggctaaccaccaaaatgaactctgctcgaagtgctaccttgacactagtaaataactttgccagtgcaggttcgccacagcctttactctggaatcatctgctcattgtcagcatcgccctcagtttcaatttggggttgctttggagctgaagctccaggagcctgcttcttcttgataccgctgacaatgttattgattctcaaaagcatgcaagcagcctcaattgctggtttgaaacgttgtgctttaacac

SEQ ID NO: 15763 - DNA, 362 bp, Zea mays
  Clone ID: LIB3150-113-P2-K1-H9
tagtgagaggcaagatgattaccgacggcaggctgcgtcataattgttctatagtggcgccaaaaaaaaataaactggtggccgttgtacaacatcgtgactgctgaaacaacggtggcaccacacaaaataatcttgtagcacatcatccttttgtcagctggtggcataataacgaggagggcagcgatggtcgttcttaacagcagctgagcatgcatggtggatgatgcgacccgtgctgcagcgcatcattcaccgcggctgttgtggtgactaccagcaggacgactgctatagtcagcagcgtagtagcggctgctcctgtttgtttctcttccttttttgtcgcgatggtcggc

SEQ ID NO: 15764 - DNA, 365 bp, Zea mays
  unsure at all n locations
  Clone ID: LIB3150-114-P2-K1-A12
aatcaccaccattaatcagcacccacaaanggcaccaanaccaggggattttatcaagcagagtggtgaccctcaaaccaaccacccacncannncattccgagcaaaccaaccaccggacttagccccacatacacaaacaatccacggaggaaaatcaaaacagagcctagcagcagatataacaagagtctgacaaaccgccccaatcatggggccaacagttccatcgccgccacattcatcagtcgctgataacaggcgacgccgaccttgaccgtgacccaggaggtgacatggacgctggccggggtgacctatgatgaccgcgccgaggctccccaatctccccgcctgctggggac

SEQ ID NO: 15765 - DNA, 122 bp, Zea mays
  Clone ID: LIB3150-114-P2-K1-A4
gaggccgtattaacctcccttaataagtcaattcctccaggggccatagggcaaaaggcaatccaggtccttcacagtttcaagtcacatgcactgcatgataaaaataagtcaccgaaaaa

SEQ ID NO: 15766 - DNA, 324 bp, Zea mays
  Clone ID: LIB3150-114-P2-K1-B1
ggacaaccgcatgacaaaatggattggcttgcaaatgacccaactgcttgaaaaaatagccttttcatctcacaaacatgctacagccaatccgggtaggttcacatccaggaattacaaaacttcacttactgctgagtgcggaacaaaacctaacacgaccataattatgacattgcaactagacgaccacccagagttcaggacagtaatacagaaatataaatgactgtttacttcttcttggcgtcaccagccttggtcttcttgacaccacggatcttcttggccctgttcttccgctctttcatttgcttgcgggac

SEQ ID NO: 15767 - DNA, 431 bp, Zea mays
  Clone ID: LIB3150-114-P2-K1-C11
gataggtcaatgcgacagtttttacttttatacgcaatttttctgcctggcatcaacagattcacattcgagcaataccgaaagtctagtgtagcttgaaatagcagtgacaagcagcaagcagacagtagacaaactccagcagaatattcgtacttgaaggcacacgggcacccagtgatttgctttttttccccagacatctaaaactcaagacggccaaagcactctacggtctggaatttctcgtagattgcagcgtgaggtacctgcaagtgtagaacccagcagcataccatgaatttaagagagcagcaagatcactatcaagattcaggtttgtgcccatatcagtgctttcctccttcccagtatcagattcatttctttgggcaccaggctgtccagatatcgtacttctcataaaattg

SEQ ID NO: 15768 - DNA, 394 bp, Zea mays
  Clone ID: LIB3150-114-P2-K1-C3
aaccaagaatttttttctttttgataggaaacagcagtaaaaatctcgctctctgaataaagctgcagtgttgctgctagtgaagcttgtacatttgatcctaaagatgtgttgaggaaaaccaacttcagaagctccaaggcatttgcaacagccaatgatttccatatgcctctttcaataatcttatttcggtgatccttaatgattttttcttgaggtttgcagaagacttccatgttttcactttctgcatttgaatgtctgcatgatttttcaggatcacagaacccgctttctgaaactgcactcgttttggtttcacctagtatagcctgattattctaaaatgaaaaaaaacattattgacaaatatatgtctgtgtatcgggct

SEQ ID NO: 15769 - DNA, 458 bp, Zea mays
  Clone ID: LIB3150-114-P2-K1-C4
atggtagtattaatttcagcaaaatatatttccctggcgcacaaaaacagaagggcagacgcaccaaagaagattacagtcatattctctagcgggctcacaggaccctaacagcgggagcggaatggcacgagaattacaaaaggtagagctcagtgggagtgatttgggttggctgctcctattgacaaatccttgggaaaaactggtgacggcaagcatagcttaaagatcctcagggccattgacatccttgttttcaaatacagctccatctggaacctccaacttcactccagacttggcggtgattgtcaccttgcccttgagcgtaattccagaaccaaaccagacatcaccagaaaccttcaagctgtcaagctcgacgatgctggggatggacttgaaccgagcaaggaaattggcaaccttcttgaactcaggtccaagctcaatcg

SEQ ID NO: 15770 - DNA, 309 bp, Zea mays
  Clone ID: LIB3150-114-P2-K1-C8
gggccagagatacaaatttattaaaatacaaccagaaaattacatgatttttgacaaccgtaccagttccacaatttataattaaaatgggcaaattaggaagtggaaacttaacggtgaaaacatatcaaaatcacttgtcgggtgttgaattcaactcgcatttgtttaaccaatgtctccaaagatcacagaacagcccttcctgggtaccttgggaagggtataacatctctgatgttctccattccggttgcaaatagaatcattcttttaaaacccaacccaaaaccactgtgctttacagat

SEQ ID NO: 15771 - DNA, 306 bp, Zea mays
  Clone ID: LIB3150-114-P2-K1-C9
ggaaaataattgtctcaaatgcaattaacaatttcacagggaaagagtggccatctgttaatactgcaggcatgaacattggacaacatgctcagcactcaacgatcactgggaaaacctctggcagcagaaacattgaaggatgccgtacatgataaaacttgaaacgttgaaggatgacgtacaagataaaactttgcaaatgcattatgctcacaaccaaacctcgcgctcaggggaaaaaataacagaccttagtcacatggcttcaaacataaaatgctcagataacttgtcgtttcccct

SEQ ID NO: 15772 - DNA, 368 bp, Zea mays
  Clone ID: LIB3150-114-P2-K1-D10
ttgtagaggcaccatgattacctcctccttcctgcgacatattttttctattatggcgcctactaaaaataaactgctcgccgttgtacaacaacgtgactgctgaaacaaccctgtcaccacacatattaatcttgtagcacatcatccttttttcagctggtgtcataataacgaggagggcaccaatcgtcgttcttaacaacagttgagcatgcttgatggatgatgcgacccgtgctgcagcgcatcattcaccgcggctgttgtggttactacccgcatgaccactactatagttagcagcgtactagcggctgcttctgctgctttccttcccttctttgtcacgacggtcggctgttttc

SEQ ID NO: 15773 - DNA, 160 bp, Zea mays
  unsure at all n locations
  Clone ID: LIB3150-114-P2-K1-D12
gncnggccgcccnnttttttttnntttttttnnttttcttgatacatatatatggcggtatgtantctcttctnnttgttcacccctttnnttgatgtaggggtgccctggagnaanttttgcnttttgatggcntnntttgcnnttgagccccttttgc

SEQ ID NO: 15774 - DNA, 306 bp, Zea mays
  Clone ID: LIB3150-114-P2-K1-D2
ataagggccagaaataaatactggagtagatggggcgagacgtgcatgaaattcactctcatgatacatcagcgacttagggaagatattcgttttactcatccttcatggattttggcaacccgtacacagaatttctaacctatgtggtgacccaaaaagaaaggtccgattgatcaaaacataccatggcctttgtgagtaaggcattccctggaaagtttaaagtgtttcaggatgatcaacatctagtatgatcggctaatcctgtcaacttctgaatccacattccctttttggttgttt

SEQ ID NO: 15775 - DNA, 438 bp, Zea mays
  Clone ID: LIB3150-114-P2-K1-D8
gtgtgaacagtgcggggtactgttcatctatttatacgcaatcgtaaggctttgtgcattattacattcatgtcctcaataattacatacagggtttacaaatgtcacatggacaataacgccatttgtatttaataacttgagcaacaccttctccttacatcgtctccctatttcgccgtgatgaagcctgcttgatgaagcgtgcttcatcgcacttctcttgtgatatgccgaagcttttctggtgacaaagctcctatagtattcagtaatatgctaaaagcaaatggttagccatctttttgaggaccttcggaagaggaaggcccccaacatcgccctgtaacacctaaggtgttagctctagggtttcgctcaacacactcacaaacctatcatcacatgtgtttttctttgggacataaatcaccacac

SEQ ID NO: 15776 - DNA, 309 bp, Zea mays
  Clone ID: LIB3150-114-P2-K1-E1
gaagaaatcaatcctacatagaacgggggccattcattcattcttttatttatttcattcattcatttcacccatgacaaaatttatttttttttattttccaccaccattaactggacattgccatgatgttcaaattaaaagaatggcccacgttggggaattcctttgcgtttgtgacgagcaaccctttttggggggggttcttcgaagtttttgtcattgcagctgttttggccatttgaagtacttgaaccaacattgtcaatcctagccacatgatccataccattggaccgagggttgttg

SEQ ID NO: 15777 - DNA, 464 bp, Zea mays
  Clone ID: LIB3150-114-P2-K1-E10
gcaatgaaactgaagtatataatttatgagcagttgctttacagcatacaacgatggggatacagttggctgcatatacttggtaccaaccggccagtttagctgatcaggggctacaacaaaaaggccaaactaacagtagccttaggagctaactgtgggattgctagagctagacccattcagtcctcccacaagccttctctttgctgttttgctgcgatagcaccacacctcgaatgcctcggtgagatcaggatacctgaactgctctgcgttcttcatccactccgacaggatatcggcctggtcatcagacggcagcgctagcaccatcgagactattgcgctctccacattctgccacatgtctgaatccatctgcagagacatttcgcccttgctatttccatccagcgaacgttttgtcgtttggatataaggaagccatgtcttcaggagat

SEQ ID NO: 15778 - DNA, 335 bp, Zea mays
  Clone ID: LIB3150-114-P2-K1-F12
cgttaataattttcctttttttttttttttttttgggaaacgggggagctaaattcatgctcgggattggcccattgtaaacattactaacaacattaggggggcgggcttggggtcaaaaacacaaatgggcaacaacaacaacgaacacgaaacgaaacatacggacacgggacgaccacagacgaagataaaccccctttaaactagggggaacacgggtgcaaaagcgaacaagataactaggccttaagggaccccaccgctcaattcctccagttcccgtcgttgttgccaaaaccccccccccggtttgcaccaccgtatcccccacc

SEQ ID NO: 15779 - DNA, 385 bp, Zea mays
  Clone ID: LIB3150-114-P2-K1-F6
cacagggtaaaaccaaacaagcaatttaaataaacttcattaacaaagctaagcttagatagttgggcgaccataaagtaccaagcagacgatgtaactcacataaaaaaaactatgttccgcattgcaatgtttcgcagaacaagacctcctagaccctcgactggatttcgacatctagcctgcgtagccatatccagagatcttccagaccctgatagacccatcggtgtagccagtgtagagggtgcttccatcggcgctccagctcaagcttgtgcagtacaggatctggttcttggagatctggatgtcaggcttgaggtcctgcacgacgtgcttcgactcaaggtcccagatcttaacagagtcctgggtcgcagcg

SEQ ID NO: 15780 - DNA, 304 bp, Zea mays
  Clone ID: LIB3150-114-P2-K1-G11
gtattaacagtagtttagaacacttgcaagacaagaggcgagatattcaaatcgttcacatggatcctaggctcacttgaaaactgttctaatctcctagcaaagcccaagaaccaagcacatattttaactcaggtgcaaaatgtagtgttgaacacaacttccagatactgacagactgtatctagtgcgatttgacgtactcctgcactatgttaaggccttcagattcttcgccgtagtccttgacaacaacacaggagcagcctacaacctttctcgccttgccctcagagtcgatctt

SEQ ID NO: 15781 - DNA, 457 bp, Zea mays
  unsure at all n locations
  Clone ID: LIB3150-114-P2-K1-G12
gtcgtatgcagtgttctgacgtattctcatcgncatcagcgttacacacaaccgcttgacagtacaaggttgtccagatggaacattcgtatcttaagctacaacaaaattcccattctttaaccaaagaattttacaactttaggagcttgtttcgcttttgtcttggcactggcgctcttcacgtcatttcccgtccctgtggctggtcttgaacctgattgctttgccttctttgatttggcgggttttggttcttcttcattaacgaaatcatcttctaggtcatctccaccatggtgaaccgcaggacattcctgactgtgctcttccatgttgacatcatcatctctggaggatatcaaatcttgtctccctttattcggacaatgtctggccaagtgggtaacttcgccacataccttacaacaaccaccctttggatagatgccatgtt

SEQ ID NO: 15782 - DNA, 440 bp, Zea mays
  Clone ID: LIB3150-116-P2-K1-A10
atctcccattttattattttttttttttttttttttttttttggttttttaaaaaaagctgggggggattcacatcccccgcaaaaaaatggtcaaaaaaaacctttccgggaaaaaggggggccctttttttttcccgattattccccaaaaaaattttgggccggccttaaacccaaaaatttggggttcccggttttcccctccctcccttaatttttttatggactctaaacccccaaaaaaattttttctgaaacaaccaaaaaaaaaatttggtttctcccacccaaaaaaatattttttttcccctcccccccctgaaagcaaaaattggccctcttttttttttcctcgggggccttttctgacatttttttaaaccaaaaaaacttttttttcccccctgggggaaaatttttgggggaaaaaaatttttt

SEQ ID NO: 15783 - DNA, 387 bp, Zea mays
  Clone ID: LIB3150-116-P2-K1-A11
caaaacctcccctttaattatttttttcatcaccccactcttttggggtttttttaacaagggggggggcacccccaacccccccaaagaatttaaacctctaaatcaccccccccaaaacccaataccccaagggcccataaatcaactaccaaaaaaatcaatgtccgaaaaaaaccacccaaaaacccccgcccaaaaaaaaaaacccccccctcatcatatccaaagctctcttctttcccagcaacttcaaaaatacacccccaataaaaacccctagttccctccaaaaaattctcccaactctacgaattatttccctgcccccccaaagtttaccaaaaaaaaacctcctcttcccttccaaccttaaaaaattaaaac

SEQ ID NO: 15784 - DNA, 275 bp, Zea mays
  Clone ID: LIB3150-116-P2-K1-A3
cgagaaatacgaccatacattcaaatatgcagatatggatagatacatagctaatgttttacgcacagacgacaggaacagctgtagccaaaccaaatacattgctcgcacactacatcgacatatcacttgaaagaaagcagcatctgaattacgaagcagggcatccgaaaggcatgcgcttagttgggtatactcttcccccctcatgcagaaagtatgtgatactccatagagacactcaactcaacaacgcagatcttaacagcttgaca

SEQ ID NO: 15785 - DNA, 327 bp, Zea mays
  Clone ID: LIB3150-116-P2-K1-A4
gcaattaacgcccaattacttgtatatttaggttctaaagtcttagtttacatctcacaacatgctgtcatgctgacagggcgtttcttattggtgcgccacaacctttggcagtcatacccacatcatgtcaccaggaagtaccccaaacaaagcatcacactcaaacctcactcatacaccgcatatcaccacgttcaggatatcgtttacaaccaaacaatcaaaccagggacacagcaactgcagctccatcagccctcattcagacagggccttcacagcttcacgccaggaacatgaacccctccagctgcaccacaatta

SEQ ID NO: 15786 - DNA, 367 bp, Zea mays
  unsure at all n locations
  Clone ID: LIB3150-116-P2-K1-A5
gcaattaacgcccatacatcngtttttttaggacctaaagccttagttggcatcttacaacatgctagggggctgacagggcctctcttattggtgcgccacaacctttggcagtcatacccacatcatgtcaccaggaagtaccccaaacaaagcatcacactcaaacctcactcatacaccgtatatcaccacgttcaggatatcgtttacaaccaaacaatcaaaccagggacacagcaactgtaggtacatcagccctcattcatacagggcctttacaggttcacgccaggaacatgaaccccttcaggtgcaccacaatcaggccactttcgaccttgctcagcttcagaatcaagttctg

SEQ ID NO: 15787 - DNA, 395 bp, Zea mays
  Clone ID: LIB3150-116-P2-K1-A6
ataacattcaacccccttaataatttttttttaagacctaaaccattgggggtattttacaacaggtaggggcccccacaaatcttacactatttctctctcacaacctttttctttaataaaaacaaaaaattcctggggccccccccatcacaaaaaataagggaaccccactaaaacaccaaaaaaaccaacccccaaatattgtttaaaacccaccacttataccgccccccccccccggagggggcaaaaacccaaaaacacccaccccctgggaaaaaaaaaaaaaaaaaaaagaagtgaaaaaaaaaaaacacactttggccatattaaaaaaaaaaaaaccccaaaataaaagcctggtccaaaaaattcaaaaaaaaaaacccctt

SEQ ID NO: 15788 - DNA, 353 bp, Zea mays
  unsure at all n locations
  Clone ID: LIB3150-116-P2-K1-A8
ggcccggcccaaacaaacaccgaaacatggagagaaaattttttatagactgttattcctaacctaacctacgacgcttccaactacggtggtaggttacgttgggccggcggcccgcccgcgtagccgccgggaaaaccgcgtattgggccgccatcttctcacgggcacttgggccctcctttcttggtcttccagttgttgtagcaggggcaggtctccttgttgccgtaggtgccaggcggcacgcacaggcacttggcgcagcacttgttgcagaagaagaggcacggcttcttgtggtgcgtcttggagcaccgncgncggcatccccgccgcactgagagggcttc

SEQ ID NO: 15789 - DNA, 319 bp, Zea mays
  Clone ID: LIB3150-116-P2-K1-A9
ataatgatcttccatcccatgacttgcaaaagttcatgccagtagcataccatgtcacaaaaatatgctattcgaatatatttaagtggatcaacactcggacaacggtacaaccattaaacaacttgatagttagctgtgagcaaacgagcccgctgggaaaacttcggagggttgccttccttcagaggaaggattccagtaaccttcagatcactgaaagtactcgatgcagaaaatccaacagagatggggaaaaatgatgacggatcagctgggggaacaacaattccatggaaccactgcgattcgactgatc

SEQ ID NO: 15790 - DNA, 284 bp, Zea mays
  Clone ID: LIB3150-116-P2-K1-B1
agacattaaccacataatgagatcttcattgctcaggtcacagacacacaggttcacattatgttccaaaactctcatccaggcacagagcagttttcaaataacataagacctctatcacataacaattggtagcaaaaactaaagagatgaggaaaaggcggtacgacaaccatcagatgaccgtgaagagtctagtcgatctcctggagagaggcgccggtggcggcgccaccagcggcggcggcagcgacgtcatcggcagtaaacttgcccttagcctt

SEQ ID NO: 15791 - DNA, 245 bp, Zea mays
  Clone ID: LIB3150-116-P2-K1-B10
ccaggataattgtccgctgttcttcaccattgcagcgtagatgaaagaacactttatatgcagtggtcgacaacggatgatgtatttgaaaacatgctcttatgtgaggtttggaaatctagtatactgcttcagtaagagaacataatcaacttacaataaaagcagacaaaaggtctccccgttaggaaagaattccccaccatcctcacctgagggtgacataacaaaaacgaaacaacaaa

SEQ ID NO: 15792 - DNA, 266 bp, Zea mays
  Clone ID: LIB3150-116-P2-K1-B11
acttcagcaaagcaatagccactgggaattgaggcaacatagccggacatcctatactgatgaattattggcaaaaaaaaaggaattgttaaccatcggaaaccaacgggagggagggagctgcctgcagctgtgacggcgaacgaagaccaaggtatatagtcattcggggaaggaaaaggcctacatagctacctttacagagctgtcgctatgtatgtatggagagcttcaaaagttctgtatctgggactgggatactactc

SEQ ID NO: 15793 - DNA, 328 bp, Zea mays
  Clone ID: LIB3150-116-P2-K1-B12
ggatgtggaggcattggcatctttaatcagtgttccgcttcatatcaaaccttctccgatagatattatagatagataaataaaatagaaaaataaaccatgacaacatacacactacatcttcagctgagttcatcacatcttcgttcaagagaaaagcagacaacaaaaacacaaggccggccggcgacagccaccacactcttctggttcgttacgcctcagcaaatcccaatttttgaaagcttcaggtgggcctcggcgtagtcagcaaagaaagcgtcctcgtccgctgcgtatttgtcaacaatggggcgaaggatggatc

SEQ ID NO: 15794 - DNA, 140 bp, Zea mays
  Clone ID: LIB3150-116-P2-K1-B3
ccataaaaaaaattaagtcttaatagcgtcacggtttcaacgaaggtgatgattcttcatgaccaggcaaacattgccatcatagattacttgttcacgcgacaactgcaaggatgtcaacaagacgagatattttaagc

SEQ ID NO: 15795 - DNA, 318 bp, Zea mays
  unsure at all n locations
  Clone ID: LIB3150-116-P2-K1-B4
ggccatcatcttgccgccgtcctcttcccctcgcaggaacatggagaacccggcgtacccgccgccctgcggcgggggcggctgctggtggtggtggtgcatgaactccggccctccgatgccgcccttcttggcgcgccggatgccgacgcagaggtccccgttctccgtccgcatgaacacgatggagtcccccgcgacgagcttcttctggttcacgaaggtgctccagccggtggtgagcaagtggcgccngggcgtgccgcggtagatgtggcggaactttcagaccacgccgtgcacgtncttggcgagcac

SEQ ID NO: 15796 - DNA, 359 bp, Zea mays
  Clone ID: LIB3150-116-P2-K1-B5
aaggagaataatgcattgcatgaggagcttatacgtttcaatgactttcaaaaactttccatggcatgcatccttcatgttcttagtgcatgcttctttttaagaaaagaagaaatgaacataaattgttcagcaggcatctgtggcccacgagacaataaaaacagtgcccttcacttgttagaggaaacattttattcaaaaggacagattaaaattgcagacacaggaaaaccttcaacaggacagcctctgcattccgatgatgcttttatccaaaaggctgctagaagtcaagtggttgcctcaagaacgcctcatttgcttcgccctgttcctgattgagatatcaagcacct

SEQ ID NO: 15797 - DNA, 297 bp, Zea mays
  Clone ID: LIB3150-116-P2-K1-B6
gaaaatccaaacgttttgcaaagacttctatactggaaccaatgtataaatatggaacatttttttttgcatgtcagcactagccgatccggaaaacattactagtacataataaccgtccttcaaaattaaacgcctcacgggaggggaaacatcatgtccaaactaagggcagcttcactgttcactccatggaagaagaggtcgggccagcgccaaagccgctgccaccaccacggccaaagccagacctcgcgccagaactcctgaaagatggctggaactcaacaaggagct

SEQ ID NO: 15798 - DNA, 399 bp, Zea mays
  Clone ID: LIB3150-116-P2-K1-B7
aggaaaatgtttcttcgaaagcgtcctgaaaaggtagacaaatatctcaacatagcccacgattaacacttcgtccgaattcaaaagcaatctagtgatataaatctaacaagaaccaggtcatgtcttgacagctataagtgcccaaagtcaatactcgaaacggaaacgttatgctcctccctctacaatggtatcagcagcggtgtgtccaagggaaacccaaaacacgagcaaaatctcagactggatcctataagttgtaccgacgcgcatgggcaaaacatgctgggccccttagcattttccagcattttgagcagctaaatattctcaggcgtcattggcatatggggactcgtgctggggctgctgttctggggatctgctatagcttct

SEQ ID NO: 15799 - DNA, 415 bp, Zea mays
  Clone ID: LIB3150-116-P2-K1-B8
gtcgaacgcggcgcgcgcggcctggatggccccgcggtagacgtggaggttggacgcgccgctgccgacgtggaaggagacgccggccacgccgacccccgcgcgctgggcggcgcgcaggagcggcacgacctcgtcggggtgcgcgccgtacttggtccccaggtcgacccggacgtcgccgccgtcggggcccttgaggcggagcaggagctcgcagccggggtggcagcgcctgaccttggccacctcctcctcggagtcgtaggggggggaagtgcgcccacctccgcgggtactcgggtgcgcctcgggcttgcaggggtgcgtagacgatgtccccgggccggcgccgagcgcgagcacggcctcatctcggcgcggtggcgcgtcaagcccgcccagcgcgggagcg

SEQ ID NO: 15800 - DNA, 337 bp, Zea mays
  Clone ID: LIB3150-116-P2-K1-C11
ggggataagccgctggactaaaaagcttttgcagaaactgtttgaatttttaaagctttgaaatgaaatgtggcacacatggcctttgagtttggcaacaagcagacaaaaggcttcaagaaaacaccccgaaagtgaaacgggcgaactccccccaaaagttgtgaattgccgggttgggtttaaaaattgcccttttaaattcaatggccgtttcctgaataaactaaaaccgggccaaaacccaatttgttttttttttttttcaagaaaaaaaaagtttttttttcccccattttttttctttttttttaaaagaaaaaattttggttttttt

SEQ ID NO: 15801 - DNA, 300 bp, Zea mays
  unsure at all n locations
  Clone ID: LIB3150-116-P2-K1-C12
ccatgacatattatttaatattttaattcattaacttgctggtactgccaaatatttggtaacgcatgcatgcatgttttactgatccgctgcggctatatatgcacacgcaggacacgaggcgaggcagtactagcagtccctggtgcagaagcagcggtggcgtaggcccttgcacacgccgccggtgaaaccttcggtcaggcagacgtttgcgcagttggcgtccctcgagcaaggtcccttgaagcggaagctctgcgactcgcacttnctcgccgacaccatagtcaccgggcc

SEQ ID NO: 15802 - DNA, 306 bp, Zea mays
  Clone ID: LIB3150-116-P2-K1-C4
gaaaaaacaagattatttttctttttgagacagtggaagcaactattagacaagtcaagtttaacagtacagtacacgtgaatacttcgccctcaagtcctcaacccacacaaccaacaaatacgtgtagtactcatcagatctatacaacgataaacactcacctgaaaaaggacagaaggtgagcacagataccctgctcaactaacagttgatgcagtctatctcttcaacactgctgtgcatgaagtaacccacacaaactgcaaccaatactattaccgggatcaatagcctcagcacaag

SEQ ID NO: 15803 - DNA, 230 bp, Zea mays
  Clone ID: LIB3150-116-P2-K1-C5
aagatcaaaaatttttttttcaaagctcttcagattatcttcaggccttgcttaattttgtttgaaaatattttgtacacttcatttgtgtcctgtgaggttacccacctaaagctggagcatgaacactcgtaataacctccgacctgttggtattcaggctggttattgtcgccggctattctaccacggcccctgaaactgcgacctcttccacgggcatatccatt

SEQ ID NO: 15804 - DNA, 337 bp, Zea mays
  Clone ID: LIB3150-116-P2-K1-C6
agtacaccaatcttattttcaaccatgtaaacccaaagccatgcaccagcaaggtatacagttgagatccatagcacaaagtctcacaattagtacaaaatatatggaccacctaacaattggtggtcaaacatggtgcaaatgactcatccttcccttattcgccttagctgatgtctcagcggctgtattagaacaaggttctgattattgagcaacatcactccacgagtcagtgacttcaccgtatcaaaagctaccacgccaagaaaatgcaaatgcttccgagtcccggccagggttcggccaaccaaagaccaaataaaggtggttttac

SEQ ID NO: 15805 - DNA, 296 bp, Zea mays
  Clone ID: LIB3150-116-P2-K1-C7
ggaaaaaaaaaaacccactttgatgaaaaagggagggtccgggtacagtacaaagttcctaccctccgggtttgaaaacttttcttatgacaaggacagggttcaccgaaaagggaagtaccccttttactaaaacataactgattttcttacagacgactgggactaaacacaaaccccccgttgggggcccttattaccacaaattggtcgatcgccaccaatttttttttaacaacacgggacagtttttgaccacagggggtttttcctttaaaggttccaaatattgggga

SEQ ID NO: 15806 - DNA, 226 bp, Zea mays
  Clone ID: LIB3150-116-P2-K1-D1
gcaaactcattaactttagacaaaaaaacatcagtaccgctgtttttaagataaatgtatattgaaaaaaactggcaccactcaacaataaactcagaccaagatgtttataatagactcagctccgaacaacatttctgtaatagactagaagggataaactggcatcccagcacaaacttgacaagctgagccgttgccgttgcccaatctcagaaactgaact

SEQ ID NO: 15807 - DNA, 57 bp, Zea mays
  Clone ID: LIB3150-116-P2-K1-D10
aaaacatctttaggcataatgcaaaatcctgacagcgaccacaaaaactgagacaat

SEQ ID NO: 15808 - DNA, 400 bp, Zea mays
  Clone ID: LIB3150-116-P2-K1-D12
aaacagccataattattctcaataacccggtagcaatgcaggggaattaacaactcttacaacatcaggtgttgtaaaccacacaatacttcagaacagacacacataacacgatagcaggagcaactctcggcagatcacgggataagggcagcacactggcctgatgctgcgtcatcagcaaacttctctagtactcgtcaccctcgtcgccatcctcgccctcatcgaactcagcaccgacctcctcgtagtccttctcgagcgccgccaggtcctcacgggcctcagagaactcacctttcttcataccctaccgacgtaccaatgcacgaaagcacgcttggcgtacatgaggtcgaacttgtggtcgatgcgggagaacaccttcacaacactg

SEQ ID NO: 15809 - DNA, 234 bp, Zea mays
  Clone ID: LIB3150-116-P2-K1-D2
tccaaacgtcacttatttccaatctctgacataaaaagaggggcggtcacagccacgctacaaacttaccagcctttgggagagcgaacttaaaatggtgtccagggtccccccctttgtttacttaaagggggcccctaaaacatcatgtttgttgttcggcggcatcatcattatacatccttagcccccaccagacccgtactttttgccgaagacaaccacctggagctt

SEQ ID NO: 15810 - DNA, 327 bp, Zea mays
  Clone ID: LIB3150-116-P2-K1-D5
accttgcagagcaaagatgcagtggaaaagtgaaaacaaaagcaccgtctggataagcggtatttgaagaacaaggcagacaacgagtttcaatctgacgatttgctcaattacacagctcgacgacaacatgtacgctcacagaatgttttcttggacaagattttatttgaagtctatcagcagcttaagatgtaaaagacgaactaccacagttccaggctacttcattcaactcaatggaagggtcagatcacctctccaatccaggaacagcagcacgagaagcaaggcagcagcgcgctactccgccttgacggttttttt

SEQ ID NO: 15811 - DNA, 289 bp, Zea mays
  Clone ID: LIB3150-116-P2-K1-D6
caccaaatcgacaggattagatgcgatcccacaacattcaggccacacatcgatatttttcaatcagaagttgattgttgttggttcaatccatttgcctcttattacattacaaatggaacatagagtgcaagcatttcgattaaggaaacgagaaagaagggtctaaatttttcattcaaaagcataacagaactggctggccaaacatgcgtttctgacaactccttcacctggttcgtcagtgcttcttcttgtgttcctggacgaacttagagttcttgagatc

SEQ ID NO: 15812 - DNA, 339 bp, Zea mays
  Clone ID: LIB3150-116-P2-K1-D7
gcccaccactaaacattactggaaatctacttgctactgttttgccagctgatacagatacattgaagcagatacaatgctcccccttttttgttttttggggagtgtggccaattcggtgtagtcgtagtgttcctgtaaggctgtaacacatgctaaggctaggctaaccaaacaatgctgccgaatcacgacgctgttcctcactgcgccacgaaatccttcagcttagtcatccaccggatgtactcctgagcctgcttagtcaccatgtaatcgtgcatatagttggtagccgacacgttacccctctttgctccaagtacttgaacaggcctt

SEQ ID NO: 15813 - DNA, 339 bp, Zea mays
  Clone ID: LIB3150-116-P2-K1-D8
ggaccacatataagggactttatttgcgctgattcgccatcacaaaagttaatcggtgggaacgatccaattcttaaaaacatagcaatcagccatcacaatgatgtggtcggatccagaacaaaaaccagccaccacgatacaaaggctttttggggattcatggcaatcacaaattttaagggaagcccaattcaaatttgattgacttagcagtgttcaaatatagtttggaaagcgttatgtaaacaagacaccttaccagtccaagccttttaaaaatgtgtcgccgaggcccatcacactgaaagatcttaggtaaatcaaatgaaaagcttt

SEQ ID NO: 15814 - DNA, 327 bp, Zea mays
  Clone ID: LIB3150-116-P2-K1-D9
acaagaacttttattttttatttttcccacaagaaccgtgttcggcattaactatgagtgcacatgaacgggacaggacaggaacccaacgggaaattcaggggaacgatccaattccaaaaaacattcaacttcgccatgagaaggatgggggtggttccataatataaaccagccccaacgatacaaaggcattttggggtttcatggcgataacaaatataaaggggagcccaatcaaaaggtgttagtcctggcagcgttcaaatttagtttggaaaggcgtttgtaaacaagacaacatactaggccaagtctttgaaaaat

SEQ ID NO: 15815 - DNA, 341 bp, Zea mays
  unsure at all n locations
  Clone ID: LIB3150-116-P2-K1-E10
ccgcacccgaatttgtcagttcttgtttatcagcactggaccctggagagctattaagaaaacatggaggctacggcgctgatgtgctgagcgagatggaaggagaagcggcgaatctatgtgcattgctaggccgatgtcatattctgtggtcgtcttcttgatcgaagccaccgcccgggtactggtcgaacggatcgacgcccaagtcgaagccgccgcagccagcgccagtgtcggggaagaggctgccccagtcggcgtccatgatgccatccatgccgagcaggtacatgggctccggccactcacgccggacaccgncgaggaggagcaggacg

SEQ ID NO: 15816 - DNA, 332 bp, Zea mays
  Clone ID: LIB3150-116-P2-K1-E11
agtgaaagtttttgttactgagacctggtccctggtgaggtattcagaaaacctgcgggtttccaggctatttggttgggcacgtatcaaggaggaaaaccccgtttatgagggccgctcggcccaaagaacgatgcgggggacaagccgggtttacaacccacgcgtgggtgcgctctagagggttcaaacccccgtcgaatgcgtgccacccgtacctctttttggggggggctaaattaaatttcctggacgacgcggttcatccctgggaggggcaaaatcttgggggccccaacccaaacaccttgcatgaaaagcaggtcccccaa

SEQ ID NO: 15817 - DNA, 412 bp, Zea mays
  Clone ID: LIB3150-116-P2-K1-E12
tcgcgatctacccgaggcacggctccctcggcttccttcccatgaagcgctcctcccgtcaccgcggcaaggtgaagtcattccctagggatgaccccaagaagccttgccatctcactgccttccttggctacaaggctggcatgactcacattgtccgtgaggttgagaagccaggatccaaactccataagaaggaaacttgtgaggctgttaccatcattgaaacccctcctcttgtcattgttgggctcgtggcatatgtgaagactccccgtggcctccgcacactcaactctgtttgggcccaacatcttagcgaagaagtgagggaaggttctacaagaactggtgcaagagcaagaagaaagctttcacaaagtatgctctcaaatatgaaaatgatgctggc

SEQ ID NO: 15818 - DNA, 292 bp, Zea mays
  Clone ID: LIB3150-116-P2-K1-E4
aatataatctgggatctcgattagtagcatcaggaagtcacaccaaacaaagcgtatatacgtgctggggacacattctactcatggtttcagagtcagacaacttccagaattcaaacgatactctagaaatggaatcgcctaaaaaacactatgctctagtctattacaagcgcgggaaaaaatactctgaaagcatacaaataattatcagtgcacaagaacgttttcgaagttcaggaaaatactatttcccctcaccggtttacttgtatccattggcatcatcctc

SEQ ID NO: 15819 - DNA, 408 bp, Zea mays
  Clone ID: LIB3150-116-P2-K1-E7
ggggcagccaaaattaatgtcactgcagttgcttatttgggtgtaaagggtttgaacaacaaagagaaaaacaagcctctcagcaggagatggacctccaactcgtgctgcctaactgcgaaaagcataaacaatcgcttaaatccaaaaatggaacttgattgtacaggattcaacaagcaagaagccgccttatgaagcagactccttggcgattttctcggccttagcaatgacttcctcaatgcctccaaccatgttaaaatgactgctcaggaggtcattatacttgccatccaaaacaccctggaaactttttacacttttctttagcttcacatactttcctggagcacctgtgaaaactttaacgaccttgaaaggctggcttaagaaacccttaatttt

SEQ ID NO: 15820 - DNA, 378 bp, Zea mays
  Clone ID: LIB3150-116-P2-K1-E8
ggtgcatccaaaattaatggcacttcatttgcttattggggggtaaagtgtttgaacaacaaatagaaaaacaagctttttagcaggagatggaccttcaactggggcagcccaaccccaaaagcataaacaaggggttaaatgcaaaaaaggaacctgattgttcaggattcaacaaacaagaagccgccttataaaaaaaaggggttggctattttgtttgtcttaacaaagacaaccggaaaaactccaaccatgtaaaatgacaggggaggggggcaacacccttgtcaaacaaaacacccccgaaactttttacacaaaaaaaaagctgcaaatattttcctggagcaactgagaaaattttttttacattaa

SEQ ID NO: 15821 - DNA, 320 bp, Zea mays
  Clone ID: LIB3150-116-P2-K1-E9
gggcgctgacctcgaaggcctcctccacgtcccgctgcgagaagccgaagcggtgggtgatgagcggcttgacgtccaccttgccgctgcgcaggaagtcgatgcacagcggccaggtgtccttgtaccggaacacgcccaccacgttcaccttccgcgccgccgccgtcgtcagcggcagcgtcatctcgttgtggcccatcccgaccaggcacaccttcccgccgggccgcgtcgcctccagcgccgtcgacatggtcttgctgaacccggcgcagtccaggctgacgtcgatgtccgagcccatggccgcgcggatg

SEQ ID NO: 15822 - DNA, 302 bp, Zea mays
  Clone ID: LIB3150-116-P2-K1-F10
aacgatggcaattttttttttttttacttgtttttttctccttgggcggataaccccctccttgagttccataatttcctttaaacaaaaacggtctcaaaaacctttttccccacgggaccaacttggtataaaaaaaaaaaattttttttttttttttttttcaaaaccaaaggttttgtcgttcctgttgtcccatcactctcggggaggaccccccgcccccaaaggcccctcgcctccctggccaaaacccgggtttttctcccttaaaaatgttttgtatttttgcggggcccccc

SEQ ID NO: 15823 - DNA, 317 bp, Zea mays
  Clone ID: LIB3150-116-P2-K1-F11
accagcaaacgaaacaattatttagcaagggtcctatcatattgtagtttgacataggtagacgatactagaatgagaacaaaaattgtatgtttctttcccaaaaaaacacaaatatgttcgggacatgagagcgcaacagcatatgacatcttcagcttggccttcagatggtcgcctgtccactaaatgaaagggaagacatgatggtcaacatctccgtcacagaagccatggcgcttaccgctgctttaaggacatcctgcgagcacccgggcttcacaatgcttttcaccttctcaaatactcctgcaact

SEQ ID NO: 15824 - DNA, 346 bp, Zea mays
  Clone ID: LIB3150-116-P2-K1-F12
acagaaacctttgcatggtagtgaaattctataattcagtatcagacagattagacagaaattggttgggtgtgtgtgtgtgtgtttttccgccacaaagtttactgggccttaattaaaagggaataagcagttcgacgaataatacaaggctcacgatacccccctgaagtgattgctgctgacacacaaatgtccggttcagcgacaaaaaagggagatgtccccatcctttgaggcatatgggatcggggacagatcaggtggataggtatccaatcaatcgctgtcgagatcaaaatgctggcaaaaaaatttttttataacttttggcccaaaaaccttt

SEQ ID NO: 15825 - DNA, 284 bp, Zea mays
  Clone ID: LIB3150-116-P2-K1-F4
actgtcgccagaaaaactaggcattcaggagctcaacgcatcatcattaatgcagtttaagcataaatgctgttgcaaacgtgtcgtcacacatgatttatctttgcacggaatggaactcaggctcccagcaggaatacaaatacaggttctaacagaacgccataagcactaactgaaagcctgagaggacagtgtgatcccctcctcaggcagtccgcaggatgatgtgaaccccactgtcagtgtccacgatgtcgctgagctcaccaaccttgagggca

SEQ ID NO: 15826 - DNA, 283 bp, Zea mays
  Clone ID: LIB3150-116-P2-K1-F5
gggagcaagaaagttattatcgtcaccggaatgtcccgacaggtctcaggtttacgaatcaaaacacttgaacagtgccgcgacagcacaattcaccgtgccaaagtgaaaagcaaatgaagacaggttcacttcagattacatggcgtgaaaagaagaaaaaaaaaaggcatctgattctgtcctcctctcgagtgagaatgcacaaggcgataaagggcctgggtggccatatgaccagacactggaagaggggagcagttggtacagagatgatgatgaa

SEQ ID NO: 15827 - DNA, 315 bp, Zea mays
  Clone ID: LIB3150-116-P2-K1-F6
ggaaacaatccacgaacaatttttttgaccagggaattgcctgccccgttcggacagggttataacacttgcaaacatattctttggttaacaggttgggacaacaaattattggccaaaacttgtgctttgccaatcacagaagatggagccccttttttaagccttcctgggtgggatctgagaatcggccttttttttaactggtttttccttttccaacaagaatagctttatttggcctggggggtgatttaagggttgattcgttctttaccccggtttttcctggggtgctttttttgggcctggtta

SEQ ID NO: 15828 - DNA, 367 bp, Zea mays
  Clone ID: LIB3150-116-P2-K1-F7
cacagatccacacctaaaccgttaaattaaactgcgagcgatacatgataaactaagaccaccactcagatcaccaccatcttattcagatccaaaggaacggacgcagggggagtcgacgatgacggagggagggcggccgaacagaccagatcagagagatctaggagagctgtccgcagtcagcgaccttgaccaccttggaggtggagccgttgcgggtgcccaccttctcgatggccttgacgacgtccatgccctcgacgacctggccgaagacgacgtgcttgccgtcgagccaaggggcgcgacggtgcagatgaagaactgggagccgttggtgttgggcccggcgttggccatggag

SEQ ID NO: 15829 - DNA, 74 bp, Zea mays
  Clone ID: LIB3150-116-P2-K1-F9
ctacctaacactacgcatgtacaaaaataaatttagctcgccccaaaggtgagcactagggagctctacacact

SEQ ID NO: 15830 - DNA, 243 bp, Zea mays
  Clone ID: LIB3150-116-P2-K1-G10
agctgcgaacaaaaaccttgctcattcttctttcgtctcgtttcatagcgggagcaaccaaagggaacaacaggggtaccaacacctaatgcacaggtagaacggacactaacactgtgacagaggcgaacggcaacacgatactattgatagattacataactcggacacagacatgatgggcccacacatcatgccctccaaccaccgacgtctacgacgttgtcgacacacaacacacct

SEQ ID NO: 15831 - DNA, 360 bp, Zea mays
  Clone ID: LIB3150-116-P2-K1-G12
gaaaaaaacttgccacgtatataatcgataattgatgatgtattgaagaacagagttttgaaccatggagcagtttggaagttttacatgactggggaaaaaaaggacatgggattgtagcttttatgagcactgctactagtaatgttcacatagcatggctctgtaataatactgttgatcaccacatccaccagcagcaggcaatccggttgccaatgaggaggcagcctcagacaagcacctgagctgcagctagcctagcaatcggaaccctgaaaggggagcaagaaacgtaatccagcccagccttgcgaagaaggccacagaggaaggctcttcaccgtgttcttcacaaat

SEQ ID NO: 15832 - DNA, 317 bp, Zea mays
  Clone ID: LIB3150-116-P2-K1-G4
ggacgagcaaattatgagcaatttagaaacagcacatttgctaaagaagcacacaacaccaacaagggtagtaacaaaactagtgaccatatatggctcaccagatgttcggataagtcttaaaaaacactctggttttaacgaaaataaccattctaaatcgaccaggcaaacgttgcgagcatagttcagacaatgacgtgaacaagacgagatattttatgtttccactaggtttccctcaagcaaacacagaaccagccagacacatcatttcttctttgcggcagccttggtcacttggctccaattggatc

SEQ ID NO: 15833 - DNA, 287 bp, Zea mays
  Clone ID: LIB3150-116-P2-K1-G6
aaccaaaatttccaatatattgcgggaataggcaagtgtgttacaagatcattctccccacaagggcatcggcagcagaaacaataatatgcagctcactatggcagacgcagcaagccatccagagtacttattgaacaggaaaaatattaagcaaacaaattgccggtagcccagctaactgcttaactgaaaccaaaagaacagagagacagaggtctcagacttcttcgtaacttaggtgaagaaccacctaagttatccaaatctttaagcattcaaatctt

SEQ ID NO: 15834 - DNA, 401 bp, Zea mays
  unsure at all n locations
  Clone ID: LIB3150-116-P2-K1-G7
aacatatactccagcatttnctgattgcaaaaggtgaaatatcaagatggggccaaataaatagataaaaggggacatgctaacatatctcaacagttcacacaatatcagcaacgatcacaaacaaaacttgtgatgatgaaaactaggtattgctaaagcaagcgcatgatcgcatcatttcttcttggcagcctccttgttctaccttgactcctgtcaagtcctttttatccacactctttatttctccaacaccaaccttttgactcatgtaatgtacattaaacctacctaggtgaggatacgcttaaatgtcttcaccaccataagcttggtttttatccatcttactataccatctttaccgttttttaagaactttgtctccttcttaaact

SEQ ID NO: 15835 - DNA, 287 bp, Zea mays
  Clone ID: LIB3150-116-P2-K1-G8
atgattcattcattcagtaggagaaaggagatgagatctcatacatagttgattcagagtacagacataagacatgatcagaaattcataatgcagcagcctatgaccaggcccttctcttgagtcagtcacccccactttctcgcgcaagcaggctgacaaatgttggaacactagccacacagtggctggctgtctaacgcaaacaccactcgagagtcgagaagaccgcgatgcatcgcaccctgcctcttttattttgggatcgccgcagccagcagaattat

SEQ ID NO: 15836 - DNA, 262 bp, Zea mays
  Clone ID: LIB3150-116-P2-K1-G9
gcttcaaagtcgttcttcgattcgaagaaacgaagaagtatcacttgggaatacgttaatgtttaaaatacagcaaatcgtttattagagtgactgaccatacaaaatctggaagaggatagtttctcaggtgccatacatgaagaaagtattctcagcctacgatgctagaatatgaatgttttattactttcattattgaccaccatcgatccatatttagaactacatgcatcaatccttcttggcatttcccattggg

SEQ ID NO: 15837 - DNA, 275 bp, Zea mays
  Clone ID: LIB3150-116-P2-K1-H10
aaaacataatgagcacaggctttaatttcaaacaacaaacttattcatgatttgtcatagttctgggtagtacgcacacacaacacaaccggtccattattaaaccaacactgacacgactcatgacacgaacagcagatactttgacaacctccatatggagagggcaccagacgacgcaggcacatcggcagcttaaacgacccatgacttactgaccaccacggagaccgagcacaaggtggagggtgctctccttttggatgttgtagtct

SEQ ID NO: 15838 - DNA, 324 bp, Zea mays
  Clone ID: LIB3150-116-P2-K1-H11
ataaacgatggcaaaatttttagcattaactagcaatagccacataggtttataacaccagaacaaaaagaaccagagaggccgacccagtgcacgaggctctcaagacgatactcaagaagggacaaaccgcccctagaaatgtggagtctggttcgaatgcctgagacaaatatcaccaatgtaccatgcctgcccttctagaacaaaagaactagacagttgtcaaaaagattcagataggtatttatgccagctcgcttgaactgctcaagatacataattctctctagtaaccccccttgagaattttaccacattata

SEQ ID NO: 15839 - DNA, 282 bp, Zea mays
  Clone ID: LIB3150-116-P2-K1-H12
aattcccaaaacacatggattgaatgggtttggaaaaaattattaaaaagtttgacttgcgtgggatttaaacccattcaatcccacttaatccacatgggttgaaggcttaccgaacaagccctaagcagatccttctgacaacggatctctacataggttcatttgccaacaaaagaattccagcaatgtttgaggcctttttcatcaatgtttatttctcctggatatcatatcatattgaggactggcatttttccaaccttggaagagtagttttta

SEQ ID NO: 15840 - DNA, 296 bp, Zea mays
  Clone ID: LIB3150-116-P2-K1-H8
gagcgaagacacagatttcagggaatttatatacacacggcatggtgtaaactgccaacgaatttgtgtttacaaacgcttgaaacggcaaaccagctagaccaaaatcagctacatttactcgtatacgcaattcaattctctgaagtctgaataccaagccacattgtgcagccaaaaagcatgcgaccagaggtacgatataactaacagtagaggtcgaagcagcacgaatggcagacggctgacacaggcgctttagcggttggtgagtgggtccgacgagttgggcacac

SEQ ID NO: 15841 - DNA, 380 bp, Zea mays
  Clone ID: LIB3150-116-P2-K1-H9
acaggacagccaaacaagcaagcatgctaagacaacaaaatggtaaaagctggcctacaaaaattgggggttaattctgataaacaacaactccggttttcaacgtcaaggtccacataacttaagatagccacatgccacatcattatttgttccgtttaaaccggggcacagaaatttaacgtcggtcaaaatttaaatatgacaacagcagacaacacaacgctcggtgacagcagcaactgggcgccctttacttcccaccgagggtttgggaactgagcttgatcttcaatgatggagcaacaacagctgggccaccactgtattcccctccgtatccgcctctaaaaccaccacgatccccacgggccctttca

SEQ ID NO: 15842 - DNA, 425 bp, Zea mays
  Clone ID: LIB3150-117-P2-K1-A10
gaagtaaaagtttacctttggcttcaaaacatatgcatgttacgtttaacagaattcaaaaacccaaaatggtttacgggattctcaaggtaaaacataaaaaaaagatgaggtccgttgtccatttaaccggctcgagacataataagcattacataaattcagatctagaacaagctgtcggaggataccacacttaggccaccagagtgctggctgtggttgactcatacttccaggtgggtggaagcttctttgtgcgcttgtagtagcgggcaaggcggtggatcctgctctccacaagaatgagcctgaatttagagtctttgtccttcctgttcctctcaaggtgcttccttatcgccaccgccttcttgatgaggaagtacaggtcctcggggatttctggtgccagcccatgggcc

SEQ ID NO: 15843 - DNA, 422 bp, Zea mays
  Clone ID: LIB3150-117-P2-K1-A11
gagaaaacatatctctataacggataggatttgctgtttacaccagattgaccatggatgaacataacccatgacggagatgaaaaatgcattgtccagttggcttcctcaaccaattccacacttattagagaaaactaggaaagaaaaactaagaactcggcatgagagacgtcaatgttttgttgtcacgctggtgtgctcagtagaataggcatcactcgatgtggttcagctcttctggcctgagaccttgtcctcccaccagtagatgaacctgaggttggccccctgcttgtccatctcgtagagctggtaccagtggtccgccacctcggatcccagcacggcgccggtgatcgcgccgaagccggtcgccagcaggacgccgtgcggcgccttggagtacttgagcgcgacgc

SEQ ID NO: 15844 - DNA, 244 bp, Zea mays
  unsure at all n locations
  Clone ID: LIB3150-117-P2-K1-A12
aaaaaaaaaattttttatttttaaancaagaactttacttgccattaggggaaaatgtaaacaagcattatatttatgccattgttcaaggagacccgatcacaataacagtactagcagtcatcgtcgccggcaccacagagcagcaacacatactcaaacatgctaaagctgccggcgacgagattgatatatagttgacacatcttatacacgacacatgttccaacagtataacaacgga

SEQ ID NO: 15845 - DNA, 379 bp, Zea mays
  Clone ID: LIB3150-117-P2-K1-A4
aatcctgggaagatttcataggccaaaacgatgtaaatcccatgaaacaaacaaatcgaggttattaatgtacaaaacgaacaaggtagacaagactcagaaacgaagaagagaaaaaaaaaacctttcgcacagactaggggagagcactcctactagaaccatggttgatgactactatcaagttaccgaactacatacagcacagctaagggacgatgaaggggatcaccattgacaagaaaccatcgtatgtaagagtagccgagccggtgtagcgcgtatccttctccttgaatttctcggttaaacccttcacaatcatcccacattccacaaagttgtcaaagtttaacgcgccattgctgggcacaccatt

SEQ ID NO: 15846 - DNA, 383 bp, Zea mays
  Clone ID: LIB3150-117-P2-K1-A5
gggacctcgattttaacatttcattactgcaaagaaagatacattttgatctcgatttcccagcactgctgggacacatgattccacccaataacgaagcacatcagagatattttaatctgataactttttacatcaagccaagcaaggcagagggaactgaggaaacgccaccggcagccgttgcaaacgagggaagagatgcgctcaaccaccgaacccgtacagagggcggccctggcgcttgagggcgtacacaacatccatggcggtgacggtcttgcggcgagcgtgctcggtgtaggtgaccgcgtcgcggatgacattctcgaggaagatcttgagcacgccgcgggtttcctcgtagataagcccggagatac

SEQ ID NO: 15847 - DNA, 326 bp, Zea mays
  Clone ID: LIB3150-117-P2-K1-A9
atggaaaggcttataatatcacaagataaaatggaccatccatgacacagagtcagcacaggggactctgcgtcagatcacacagctaagcactcatcattcgaacaagttcaagaaaactagataatattattatattggtgtaacactacttgtccatcctcactcctcatcctcatcaccagcatccccgccaccgcttgccttcttctgattctttctcttcacccttcctgcggggcctccaccgaatgggcttgacagtgaaaagtcaatgtgcttctcagactccaccctcaccatgaatgatgggacggtgacaattt

SEQ ID NO: 15848 - DNA, 404 bp, Zea mays
  Clone ID: LIB3150-117-P2-K1-B12
cctggttgaattttcagcgaaaatgtttgattatagcagctccttaaaatgacagatttggaattatatgcctagttttggttcagaagatgcatgatgtgtaaactggtcatctctgtttcgaaggcactgttcgtgtcacggtggacacaccatcaacaaattttgttcgaaatatcacattggcgttgttgaacataccctcttttaaagagacaactatgaactgagagtgcggaaaatgagccttgatcattctaccaatgttttgagtgtggctcagatcaagagcagcatcaacctcgtccaatatgtaaagtggtgcaggtttaaaaagaagcagagccaggataagactaagagcaagaagggatcgttgtcctccactaagttcaaacagagac

SEQ ID NO: 15849 - DNA, 409 bp, Zea mays
  unsure at all n locations
  Clone ID: LIB3150-117-P2-K1-B2
cgggtaactctcaattttgctatttctgatgacaaaaattgtgaagggagaataatcataactactcgtaaatgggaacttgccaaagatgctagctgccagcactttttcctgatagctcaaggaaattattctatacaagaatatatggtgataaaaacttcagtcttggagaaatttgaagtgtccaacggtccaaggcgagtgacaggcagggcgactcgggcggcctttcattcgccggaccggcgccggcgggtttcaacctcgccgtcaccggagtggccgcagatggaagcttggcaacaacttcaagcttgcttgaagggcggatagtggatagccgncaggcgcttaccggcgccgggttccggcttcccgagccggacgccggcagatcccaccctta

SEQ ID NO: 15850 - DNA, 414 bp, Zea mays
  Clone ID: LIB3150-117-P2-K1-C11
agatcgaccaaacagtttattttttctctagaaaatgtgttcaaataggagtggcagaaaaataacacggtttaccagattatactgtcacaaactgttaccgaacacttaaaacaaagactagatgttccccaaaactgatgacaaagcacagctcctcagtacttgataggggcaagaatctccaactgagaccccaacttctcctcggctgccttctcggccttgacacgcagcttggccaattgcttcttcctctcgtaggcaaccttggccttctccttcctcttctcctcaagttccctgatggtgtcatggtagttccacccgacctccttagagagctcgccgaggaggcagtacttgtgtccaggctgtagcctcaaaaccttaagagcgttagggatgaccata

SEQ ID NO: 15851 - DNA, 218 bp, Zea mays
  Clone ID: LIB3150-117-P2-K1-C12
acaagggctaacataaccatataccaaaatgacagacctgagctccgacataacatattcatataaccaaaataaccaattcaaggcaattaaatccaccccctagttcagctaattatagagcagcacctaaaattccaataaagtaaacaaagtaattgcattctagagataggtatcaagcaaaaattgccagcaatttctgaatcatcagaaac

SEQ ID NO: 15852 - DNA, 418 bp, Zea mays
  unsure at all n locations
  Clone ID: LIB3150-117-P2-K1-C4
acataaaacatattccttatagattatgggatgctacttaaaacatgcatggtaaggtactgcagacacaatacagttactttcttacataaaacacatcaaccgagcccagcccagaaagcaaacacagcggcaactaccaccacggcaacacacctaaccgtactactattgcactactgcaagaagaggagacgagtgcacgtcgcatcgctcgcctaggagctagtgaacttggtgacggctttggtgccctcggagacggcgtgcttggcgagctcgccggggaggacgaggcggacggaggtctggatctcgcgggacgtaatggtaggcttcttgttgtaccgcgccagcttggccgncttcgccgccagcttctcgaagatgtcgttgatgaaggagttcatgatggaca

SEQ ID NO: 15853 - DNA, 430 bp, Zea mays
  Clone ID: LIB3150-117-P2-K1-D11
aaggaagtaattagatcattttatttgaaggaagcatattactccatacatattattctcaatagtctctcacatgttacaaatctcaaattaaagttctaggagagagtaccacatgtcccaaccactccttttacatactaagaggaactgtataactcccgcacttgtagccaggttgaaacggcctcttacaatagttggcgacgtacacaaccttctccatgcaccataccttctctacttccttgttaacatatttgcataggcatggaacatctgccctcttccacacagcacaacatgctgccgacggtggcaactttgggttcgctgggaatagctcaaactgcttgcactctcgtttcatgtcttccgcgtcttgtacacaaccagcagccgatgttgtccctagaatagcaagggcaag

SEQ ID NO: 15854 - DNA, 427 bp, Zea mays
  Clone ID: LIB3150-117-P2-K1-D12
ggtaactcttccatttcacatttttaggctcttacagaaggtctcaaaactcgcaataacatgtgcacttgtcaaatagatacgtctcagctttcttctctacaaggagtcaaaaggaaaaacgattggaaatgaggccaaaaaaaagtccaccgtgctggacgctgctagaaaaatgtctgtcctaacaattactttattattggtaccggatccaacctctgtctcaatccatttatgcaaggggtggtgatttccagttcccaggtatcatcatccttcgatgctgaggggttggagacttggaggacatacatcatcaagccttgtttacgccttggcgcctatcggatagcttgtggagatggagtttaacagatacatttgttacacaaaagaaccagcctgccttgtatttacgagagct

SEQ ID NO: 15855 - DNA, 224 bp, Zea mays
  Clone ID: LIB3150-117-P2-K1-D9
accattcattggctgataatacaaccgaattgcaaatagttcatgacatatgctccataattgacttctaacattaaaagtgctaagaacacaaatagcaaaactttgaaaatgcaaccagagacaggcacgcttgttgtcttgattgggaatgatcggacagtggcagtatccaagcacccgacgagctgctcaacggtagcggcggagggagagggtctggt

SEQ ID NO: 15856 - DNA, 338 bp, Zea mays
  Clone ID: LIB3150-117-P2-K1-E10
aaaaaaaaaatttttttggtattgtttttttttttttttttttttaacaaaacccaacccaaaaaaagcattaaacatggcccctgttttttgcaaccaccccttaaaaaaaaaagggtaaaaccccccaccaaacctgatggggagatgacaaaaagtttccaaccctgggccaacacccagtggaaaagctcataaacggaaaaaaaatttacctaccatccacgggcgactggaaatactaattttttaaccccccaacaccgcaaaaaaaaaaataaccaaacttgttgaaaaaaaattttctaataaaaaaaaacctcgcacccaacccaatt

SEQ ID NO: 15857 - DNA, 429 bp, Zea mays
  Clone ID: LIB3150-117-P2-K1-E11
agaaccaagagtgtttaaagttacagacttcaattacaaatgcaaatactagagcagttcagcaagtgatgatggaaggaaacacccaaacattacccaggacacaaacaaaggtttttcaacaccacaacctggctcgacagccaaacagattcatgcaagcagatcagtattcctcctcctcgtcgccgtcatcactgccgccctctgcggcgacctcctcgtagtccttctccagggcggccaggtcctcgcgtgcctcggagaactccccctcctccatgccctcgccgacgtaccagtgcacgaacgcgcgcttggcgtacatgaggtcgaacttgctgttgatgcgggagaacacctcgacgacgctggtggagttggagatcatgcacacggcacgctgcaccttggcgaggtcggcacccg

SEQ ID NO: 15858 - DNA, 439 bp, Zea mays
  Clone ID: LIB3150-117-P2-K1-E12
ccaccatagaacaaaataaataatttaagcatctcagacagcaaacttgaggcaaccagaaatttctgttcactacagaattgagtgaccaaacataaaaggagccatcaagtccaatagcacccttacaacacctgcaacacacaattgagatgatcatactcaagtctaaacacattccaacaagctctcaaacgatggcatttgctgcactggcgatcctaggccaaaggtcagcacactccttgccgataggtccagtgattgcagaacctttcatctcacccttgggattcacaatcactccagcattatcttcgaagtacatgtagacaccgtccttgcgacgccacggcttgcgctggcggacgatgacggcgggcatcactttcttcctgaggtcgggctttcccttctttacggtggccatgaccatgtc

SEQ ID NO: 15859 - DNA, 339 bp, Zea mays
  Clone ID: LIB3150-117-P2-K1-E4
acagaagtgcacagttcggtttatttttattgtgcgcctaagcgtcttttcccttagtacattaatcaagtaaatttccacagatgtttaagtacagaaaaggttaaaatggatcacaagaaaactatctcaactagcctcccaaccggtggtatcagacaatagcatttgctgcactagcaatcctaggccaaaggtcagcgcactccttgccaataggtccagtgatagcagatcctttcatctcgcccttggggttcacaatgactccagcattatcttcgaagtacatgtagactccgtccttgcggcgccacagcttgcgctggcggacgatga

SEQ ID NO: 15860 - DNA, 373 bp, Zea mays
  unsure at all n locations
  Clone ID: LIB3150-117-P2-K1-E6
acanaattaacgaaatacattcattgtctttgngcgcaaaaaaatcaacgcagttgaacaatttacaattccaaactttcgaacaaacataaggcaatgcgcgacaatcctaccataggcataacaaaaaggattggctttacagcataaagcattccaaacttaattttgcacaaattgtacagcctggacaaaggagacatctctctttggctatatagtcagtgcggggaaatcattaagtgatccagctgggaagaaatatccctctagacttatgtcagcaatatatggaaccgacggcccactgttgccacatttggctttggtcataatacacagaaggcgtcgcctttttctttaggtagcactt

SEQ ID NO: 15861 - DNA, 365 bp, Zea mays
  Clone ID: LIB3150-117-P2-K1-E9
accggaattcccggggcgaccgtagtggatcaaccatgacgacctccgccagcctgtgtcatattttttctatagtggcgccaactaaaaataatctactcgccgttgtacaacaacgtgacggctgaaacaacggcggcaccacacataataatcgtgtagcacatcatccttttttcagctggtgtcataataaagaggagggcaccgatggtcgttcttaacaacagttgagcatgcatgatgaatgatgcgacccgcgctgcagcgcatcattcaccgcggctggtgtggtgtctacccgcatgaccactactatagttagcagcctagtagccgctcctttttttgttttccctcctttt

SEQ ID NO: 15862 - DNA, 382 bp, Zea mays
  Clone ID: LIB3150-117-P2-K1-F10
acctaaagcgaaagtgttttattccagatgtcaatatatgcttcacgtcaaaattacatgggatatatcaatcgcagtatatatagagagagcgagatctagcaaagtcgcaaccaaaaccaactgtatcttaggctccacgaaatatatataaactaacatcgaaagtgaacagggctttcctcctatccttcacgtctcaaaagcagaccatgcactctttcttctcacctgcaaaattggtctccacatcatcaaatggcctggcgggggggagtacacgggcctcatccactcaattgctggtattcgctgggaggtagtactggtagtatcccagcaccgggaggagggcaactagcacagcagccaccatggcagc

SEQ ID NO: 15863 - DNA, 350 bp, Zea mays
  Clone ID: LIB3150-117-P2-K1-F7
gaagcagaataatattattttggttaatgcatgcccataaacattgtcttcagtgtacactggtattggcggcgagatgacggatcccaatcggcgtcaatctatctaagcttaaagccttaaacccttcacgacaagaggcacacgatcgccagcgccgcgccgatagtccaagatgccgtgtcccttgctgcgttgttcttctgatctgcaggcggttggccgtccgcgtctggcgaaggagctggggtagtgtgctctggcgaaggcgctgggcgacgcctgggcgcaagtgcagtcaccggagcaagggcaagcgggggtgtgggtgcatgtgcaggcgacggcga

SEQ ID NO: 15864 - DNA, 321 bp, Zea mays
  Clone ID: LIB3150-117-P2-K1-F9
gagaaaaatagcaagcggttagagtctactatattccacaacagggacatcaaatctaagaggaccattacaatccggcgcgccggatttatagagcaggcaagctagctactaggcgggtagggtgggggactggggaaaggacacagcaaagaacccttctaacagatccgcggatcccgcagcgcgctcagttgctggtgaacttggtgacggccttggttccctcggagacggcgtgcttggcgagctctccggggaggactaggcgcacggaggtctggatctcgcgggacgtgatggggggcttcttggtgtacc

SEQ ID NO: 15865 - DNA, 360 bp, Zea mays
  unsure at all n locations
  Clone ID: LIB3150-117-P2-K1-G10
ctgttggtaacttcattaccattttagatgatcggtctttcaggacagtcacataataaacgccttggtgtccacggccaccacccaccagtgtcttattaaccgggcaaaattgcagggcctgttaagaattaagatcctaccctcccctcctgccccggccacggccaccacgccagccgcctcgtccgcagcctcctcccctacccccacggccgncgncgccaccaccaccaccacccttgtggtggccaccagacttcttgccattgccaaccttcatgtcctcaaggagaggcagtatgttgtccacacacttgcggaagctgaagtcatccgaggatccgtcgatcctgcgga

SEQ ID NO: 15866 - DNA, 389 bp, Zea mays
  Clone ID: LIB3150-117-P2-K1-G11
atgtataataattacatttaaagtttctggggcgggcacattgatacactatcctctattaaaataggtaagatctgtaggggaatgctaccgacactagataaagagatcacaactcaatgcccacctctatctctatgaatgtggatgctacggaaagcactagaaactagatctatttgaaaaggaacagaaagatgcgctgcctagatcctaaaatatgtcaccagcaaacgaggaaacatagcaatatggagtctgcaaagaggcatgctttctaccaaagccttcaagattgaccaaggctcttttactagcttcttttctcctcattttcttgaattaatttgtccatctccttctgcccaggagctatcagtggcttcacc

SEQ ID NO: 15867 - DNA, 398 bp, Zea mays
  Clone ID: LIB3150-117-P2-K1-G12
aataccaaaactaaaattcccatatattattaatagcattacctaccattacaatgtatataataacagcgatcttaatttttgtttagaagcaggcatgtctacactcaaccatcgtagagtagcgagcatgagttcgccccccaatgcagcagtagcacttgttatctttgcatggaggaaaccctacaacacatcgtgctccgtttccttgcataattccttctttagctggagtagaaacaccgacatcatctgtgacatgacccttcccatgtgcatgagcagcaaagtatccggggagaagtaacgagaaaaacactagcgcatccaccctctttctgtactccatgtcgcaagacaatttaaggaactcctcacgattgatcctagaagag

SEQ ID NO: 15868 - DNA, 289 bp, Zea mays
  unsure at all n locations
  Clone ID: LIB3150-117-P2-K1-G2
ataaaaaaattccgaacagaattctggttagctnataaanattccgacttggacactttgtagtaagggaatatgtttgcacccacaaactggcatgaaatcccccccaaaacaaatagcaaaactttttaaggaaaaaaacctcgggacaataaaagggccccttgaactttaaacgcaaaatcccaaaagaagggcaccaatagacccggcaaaaaaccccggggagacccgaaccttgtccgggaccggggggaacggggaataaaccgggaaactggatttcaaa

SEQ ID NO: 15869 - DNA, 318 bp, Zea mays
  Clone ID: LIB3150-117-P2-K1-G7
ggtcgctgacctctgaagcctgctccacgttccgttttttgttgccgaagcgatgggtgaagagcggcattgacttccaccttgacgttaaacacgaagtctaagcacaacatacacttgtccttgttccataacatgaacaccatgtgcactctaacgctccaacgtcgtcttcagctgtatggtcatctcgcttgaccctatcccacaccaagcacacatttcatctgactcgtgtgaaattcatcgccgttgacattgttttgctgaacccagtgtactgcaggcttacttatattttcgaaccaatgggacctc

SEQ ID NO: 15870 - DNA, 348 bp, Zea mays
  Clone ID: LIB3150-117-P2-K1-G8
cctaaaatcatattatttttgccaaaaggttaacatatagctcttacagcattcttgtattgcagaaggtgaaatagcaagaaggtaccaaataaatagataaaagtgcacaggctaacagagctcaacagttcacacaataacagcaacgaccacaaacaaaacttgtaatgatgaaaactaggtattgctaaagcaggcgcaggatcgcatcatttcttcttggcagcagccttggtcaccttggcgccggttgggtccttcttctccacactcttgataactccaacagcaaccgtctgcctcatgtcacggacagcaaacctaccaaggggaggatacgctgag

SEQ ID NO: 15871 - DNA, 425 bp, Zea mays
  Clone ID: LIB3150-117-P2-K1-G9
agttgagatgatttttttttgtttggtgaaaattatattacacccaattacaactctttattttatgttttacctgaaatatggcagctacaaactcactggttcaaaaaaaataacgagcatgtgaccaatccctcggatattcaactaggctctgtcacagcagcactttgggatgaataacgactacaaagacccttaacattcagtagcccaacctttaacacacatatatgtcatacatattgctggttgttcatttcagtaaagatcttgcaaggtgctccctagctgtggctagtgcctgagatatcgtctgctcagaaaagggcacagaaccatcaacagcattggttgcaaccttaccagcaatggtgtttgcatctgtttccaggatgattcccccatctacaatttcatcaatg

SEQ ID NO: 15872 - DNA, 388 bp, Zea mays
  Clone ID: LIB3150-117-P2-K1-H10
ctaaccacgagtatttcatcaagccctacatgtcatctgccatccgaattggactttctactcactaaaaatttcctagtactcagatttgggatttttataatgaattgtgcaaaagaacacttacagctccacctccaccaaacagcgtcatcatgtttcaggtacaggatgttcgaagctatttgtgggagcgagtggtacgtcgagtaacacagagacagctaaggttcaagcacagcttattataatattatatatatatttataaatatatatataaaataaaggaagaaattgcacgaattttaagggaagccgttcgcaagtacaacttcatttgattccaaatgccgttaataaatgcttaacactccatgcgaattta

SEQ ID NO: 15873 - DNA, 188 bp, Zea mays
  Clone ID: LIB3150-117-P2-K1-H11
ggaaaaaaagggacacccgaaaggggggcttgaagttaacttttccaaaaaaacagggcacgccgtaaaaaaagttaacagtccacaattacaggaacaaccccattcaaaatttggggatggagggacaagtcacgttttgcaaaaacccattccgggttaacggccggttgcatcatttttttttg

SEQ ID NO: 15874 - DNA, 342 bp, Zea mays
  Clone ID: LIB3150-117-P2-K1-H12
caaggttaacgtttcatatttccaagcagaaaaaatccagcagttcaacatatggtgcagactgcagacaaaagaacaaggctagctgacgttcacagaataaaacaacatatcaaacctctggtactcaaaaaatcccgacaagccagtaccatgtccatacaaaattgcaacaattactcataagtctaagtagggagggtcgactgatgcaacacagccagggcagcataaggtacttataagctgtaacaaaataggccttgaaaacatctcaaagcactgatcattcttaggcagaggtggcagcagaagccttggcggcggcagaaagcttagacc

SEQ ID NO: 15875 - DNA, 378 bp, Zea mays
  Clone ID: LIB3150-117-P2-K1-H3
aaacacgggtaacaaaattccaaccggaacggggttttaaattaaaaaaaattaactttgggactggtacattcgactcgaatgggatccaaaaattctcacgggaattttactggccacacaaaggaaacattttgttttggaaaaattagggtggggcattgcccaaccaccaccattgccagcaccccaggggaagggctgatcgaaagtcacccctaaattttgttgaaggcaacaatttcccaattttggacgtacttgttaactggcttaacgcacaaattgtccttaatgagaggggcgacagaaacaaaaacggcgactttgggcattatgatttgcagctttttgaaaccattttcgactgggacaagg

SEQ ID NO: 15876 - DNA, 319 bp, Zea mays
  Clone ID: LIB3150-117-P2-K1-H7
aagggaaaaaaattttaaaaaaaatatttgaaaatttttagtttggaaaaaaaagaaaaaaaattttgggggttattcaaaaaaaaaagggttttttaataaaaaaattttaaaccttccgaagaaataaaaaaacttccaaaaaaaaattttaatttttgggtgaaaaaaaaataaaaagggggggggaaaaaaaaaaaaaattgccaactaaaaaaatccccctttttttttttttttgaaaaaaaaaaaattaaaatttttaacctttttatttttttttgaaaaaaaaaaataattaaatcccaaagaccttttt

SEQ ID NO: 15877 - DNA, 249 bp, Zea mays
  unsure at all n locations
  Clone ID: LIB3150-117-P2-K1-H9
aaaaaaattattattttnttttttaaaaaaaaaaataatggggntttttttttttttaacgtataattcccaaaaaaaaccggccccgtaaaaaaacttatatagaggggttccaaaaccctggcccaagaataaaacccccccccaaacccaaattttctaccaaccaaacattatctaacaagggtttttggtcaaaacaaccccggtttaaaacccaaattttataaagggcccccctcacaaaaa

SEQ ID NO: 15878 - DNA, 152 bp, Zea mays
  Clone ID: LIB3150-118-P2-K1-A5
gtgctcaggacaacaatttttgtgctaaaagtaacaaaaaacgagtaccagacctaacaagcattgtagttactaagatgccaacagggaacgggctaaaggaagggagagctggctgacagaggaggagagttcgcgttacgcaaaaactg

SEQ ID NO: 15879 - DNA, 347 bp, Zea mays
  unsure at all n locations
  Clone ID: LIB3150-118-P2-K1-B6
ggacaaaaatagctgcgttcatttaccttgctcattcttctctcgtctcggttcatagcgggagcaaccaaagggaacaacaggggtaccaacacctaatccaaaggtagaacggacactaacacggtgacagaagcgaacggtaacacgatactatagatagataagataactcggccgaagccaggatgggcccacacattagttccttcagacgccgncgtcgtcgncgtagccggcaccaccaccctcgcgccgaccgccgtagacgtcaccgacttcgtagccgncggcaccaccctcgcgccgaccggcgtagacggcaccggcgacataaccgccgtcac

SEQ ID NO: 15880 - DNA, 474 bp, Zea mays
  Clone ID: LIB3150-118-P2-K1-C4
actagcaggatagttccgttccaaaagcaaggttccatagcacaagaaaaatacatacgtcaacagcgacggaatgggccacgagggtgggtacgctagcagtagaaagatggcaacaacacgaaagggaacaccgaactcatcgaggtccgcttgccctagggaccacaaggcttcacacgataacagccctcccctcacatgtcatcggcctgcacctcctcctcgtcctcgtactcctcctcgtcggcagtcgcgtcctggtactgctggtactccgacacgaggtcgttcatgttgctctcggcctcggtgaactccatctcgtccatgccctcgcccgtgtaccagtgcaagaaagcctttcttctgaacatggcagtgaactgctcgctcacccttcggaacatcttctggatggaggtcgagttgccgatgaaggtggacgccatggacaggcccctgggcgggatg

SEQ ID NO: 15881 - DNA, 396 bp, Zea mays
  Clone ID: LIB3150-118-P2-K1-C9
gttacaaataatcttaattttatttttgtttcaagacaaaatcttagggccagacgaaaacacatagccaagacaactctataagttcacgtcataagcaacctcatgtccagactcgcctagaaatagaactagcaaacaaactactcggcagcagcaacctcctgcccagcctcatctccctcgacaggcctctcaagcttcacaccaacatcctctttgtagtcgccgtgaacctccatgagcttcccaagatcgaacttgggggccttaagtatcttcaccttgcggatgaagacgttttgaagtgggaagatgctggaagtagacttctcaatctccttaccaataacttctggaatgaacttcgaaacaaggttcttcaggtcacatgta

SEQ ID NO: 15882 - DNA, 401 bp, Zea mays
  Clone ID: LIB3150-118-P2-K1-D9
agttcaaaaggtcacttgtatgttatcaaattcagaagtgtgcataacacatggtaatggaacgattgagagccatagctacaaaactctggtttcacatagaactaggacacaacagatgaactaggatgcctaatgcagcacttagatgatgccgattttgttggccacatcaagagcatcatagtcgggagtcagcttcacgtaagccttcttcttcccatcaggcctgatcaaggtgttgaccttctttgcctggatgtcatacatcttcttgacggcagccttgatcttcttcttgtctgccttgaggtcaacaatgaagaccagagtgttgttatcttcaatcttcttcatcgctgattctgtggtaagggggtacttgagaatttggtactgat

SEQ ID NO: 15883 - DNA, 211 bp, Zea mays
  Clone ID: LIB3150-001-Q1-N1-F6
tcgaccggcgccaaggtgaccaaggcggctgccaagaagaaatgatgcgatcctgcgcctgctttagcaatacctagttttcatcatcacaagttttgtttgtgatcgatgctgttatcgtgtgaactgttgagatctgttagcatgtgcacttttatctatttatttggtacccaactacagatcacctgccacctacagagcatataaa

SEQ ID NO: 15884 - DNA, 94 bp, Zea mays
  Clone ID: LIB3150-010-Q1-N1-F7
aaaaaaaaaaaaaaaaaaaaaaaaaaaaagaaaaaaaaaaaaaaaaaaaaaaaaaaaaaaaaaaaaaaaaaaaaaaaaaaaaaaaaaaaaaaaa

SEQ ID NO: 15885 - DNA, 356 bp, Zea mays
  Clone ID: LIB3150-016-Q1-N1-A6
acctggtgcccagtctgccctcatggcgcttgctcgttccgggatgaaaatcggacgcattgaggacgttaccccggtccccacggacagcactcgcagaaagggcggtaggaggggaaggaggctgtatgcgtctctgctgcgtgccatttgctggctcttggcgggtggccatcatgaagctagtcctctctgggtggtgatgctgatttctgtgtttgtcaagacgagctttaattttgctctatgtggatgaccgcttaccgttaagtgaacctgtatgatgttgcaatggataatgttttttggctgagggaatttaaaaaaaaactttgtaggtagcaatgatttaaaaa

SEQ ID NO: 15886 - DNA, 347 bp, Zea mays
  Clone ID: LIB3150-016-Q1-N1-G6
aattaaaaacatctaaaatataaccaacaaaattcaggtgcaggagtgaattcaacgtcatgccgacagcaacacggcgctgctacaaagtacaaaagaatgctgaaacctgataataatagtgtacgagtatggcatccaactttgcacaatgaacaaataggccacccacaaacggcatccagtacgagtatggcttctgcgttgcaaaatacaaaaacatgtcttgtctaaggcacggtgacagtcgcgatgcgacagataaacaaaaccacggtaatctgactccacagatcaggtactcaacaaagccatgatatcactgatcattggcagatctgctcgac

SEQ ID NO: 15887 - DNA, 248 bp, Zea mays
  Clone ID: LIB3150-021-Q1-N1-C3
catgatgatggcgcagaacatgccggccatgggtggactctaccagtaccagtaccagctgcccagctaccgcaccaacccctgtggcgtctccgctgccattccgccctactactgattcatgatatttgggaaatctcctctatccatccctctctatctatatatgtaataatgcagtaagacgacacacattatcatgtgtggtatgaccaataatatatgcatcataataaagttttggtttt

SEQ ID NO: 15888 - DNA, 303 bp, Zea mays
  Clone ID: LIB3150-023-Q1-N1-B7
gccgccggtctggactcgcggaggtctgagatcagaaaggaacgccggccggcggcgcgtcctgtgttgctgctcttgttcctctgcagttcgatcgattcgacgaagtgcttgtaactgcctaagcttcctccttgctatgctagttactctctatctatcatgtaaaggccgccatggtcgtccatctgtagctgggcttgcagcaacaggaactagtgcgtgccctttaattaatcgaatctgttggttggttgcttaaaaaaaaaatttaataataaataaaaaatataaaaaattaat

SEQ ID NO: 15889 - DNA, 309 bp, Zea mays
  Clone ID: LIB3150-026-Q1-N1-A2
ctttttgtcatccaaatttcggggaaactgagttatcctgctggagtgacgcctagttatctactctggaacgtgtccttgtaaatgcgtcaatggtcaatctgagtttttttttccttgtttattcttcgccaatgtatgtttccaaattccaaggtagtgttttggtagtgttgatgattctaccttgacatatccaacacaaggcgagcagcttgtcctttgttcaaaaaaaaaaaaaaaaaaaaaagtacaaaaaaaaacaaaaaataaaaaaaagaaaaaaaaaaaagatcataaaggattaat

SEQ ID NO: 15890 - DNA, 207 bp, Zea mays
  Clone ID: LIB3150-027-Q1-N1-A8
cccacgcgtccgcctaaagatgttttcccggatgatgtttgtgctgctggaccgtttcctgttagcttcgatggcatcctccccatatcgataaactgttgcttagcctgacaatcggaagagtttaaatgttaaagatttgatatctctaaaaaaaaaaaaaaaaaaaaaaaaaaaaaaaaataaaaaataaaaaaaaaaaacaaa

SEQ ID NO: 15891 - DNA, 197 bp, Zea mays
  unsure at all n locations
  Clone ID: LIB3150-030-Q1-N1-C5
cacaatgtgacttgcacttgacagccccactntatccacatgagcacatttcagcagaatgcggcgcagttaggtttgaattacgtgcaggcctgagcacggcagtctggttttttgaattaatctgtacgatgctagattttgcaggagatttcgttttttgttttcaataacttggactatcagttgcctgttag

SEQ ID NO: 15892 - DNA, 132 bp, Zea mays
  unsure at all n locations
  Clone ID: LIB3150-032-Q1-N1-G5
agagcttgacgnccatgcccgccgtccgtagcctgggttcctttaaagccgcacccacccgtccgttgggttttaaaaaaaaaaaacctttattgtaatgcatatattattgggcntcccncacatgatggg

SEQ ID NO: 15893 - DNA, 80 bp, Zea mays
  unsure at all n locations
  Clone ID: LIB3150-042-Q1-N1-D10
gggacgaagnggggatccttagagtctactcacacgnacgtccacacccccgaaaaaaaaaaaataagaaattttataaa

SEQ ID NO: 15894 - DNA, 310 bp, Zea mays
  Clone ID: LIB3150-046-Q1-N1-E3
tttatattgacctctgctaaaggtacttgatgtgcattcttcagtacaggggggattgctaccaatatctctattgctgaaaccagaaaatgcagacagcctttgatcaaaagaactactgataggtatgttctcaaggattgcgccacagtttgctgcatttcaattttattatagattcatctatcagaagggcagctctggtgtagaggtgagagttgacatacttaatacctaagtccaaggatttgaatcaacctctctttattttgagggggaaagtctcgcctcgattaaaaaaaaaaataaa

SEQ ID NO: 15895 - DNA, 246 bp, Zea mays
  Clone ID: LIB3150-048-Q1-N1-G6
tgttaagccttgaatcaatagggggaaggcatgttcattactacatttaacggtcaggcttgcgagtctttagattatctacttggatcaaatgattcttgtaccatttgccatttgtaaccaactgtgttctggaatccttttatcatattacgtagaatatttagacaattctatcttctcattggtcaaaaaaaaaaaaaaaattaaatataattaattaaaatataaaatttttaaattaaa

SEQ ID NO: 15896 - DNA, 247 bp, Zea mays
  Clone ID: LIB3150-053-Q1-N1-F5
aaataaccaacggccggcgcactatgctttttctgtaccatcatggacgggccacaagattttacagttcaaagctttggcacttgccatatttgatgtcgccttgtgcttttgctcatccatgtaagtcagaaatctcagttcatatcagtgcttttgctcatccatgtaagtcagaaatctctgttcatatcagtttttttattaaaaaaagtttccgctgcataaaataccaacaaaataaaaa

SEQ ID NO: 15897 - DNA, 79 bp, Zea mays
  Clone ID: LIB3150-056-Q1-N1-B4
caggcgagcgaactgacactatctggaggaggataagatctaggcgaagtcatgggcatagatgttactgggaacaggg

SEQ ID NO: 15898 - DNA, 51 bp, Zea mays; identical to SEQ ID NO: 1793
  Clone ID: LIB3150-060-Q1-N1-B2

SEQ ID NO: 15899 - DNA, 305 bp, Zea mays
  Clone ID: LIB3150-060-Q1-N1-D11
ggcggcgaccgtggttacggcgccaccgtcgcgtcggatccggcggagtcccatgtcgcctctcgccgcttccctacccctccaaaggtatcgctcggctgactcttgcgtgaagtcgtcggagcaaactatctatcagtagtactagcagtgtcgtttcgttttggtctgtcgtggcgtggtagtaagaaatgcaagtgagcagcaccagtatctttccgtttgaatcagttgtaaggcagtcatggtcatggttggctctgccggatctatctgtcatgaactatctatattatatcattatc

SEQ ID NO: 15900 - DNA, 282 bp, Zea mays
  Clone ID: LIB3150-063-P2-K1-A10
attcttaaattttttaaacaacccaacacttcactccattggggagactttataaaaaggtggggctatcatacacaccataaatacaactcttaaccaaaacaatatccaccttagttttcaccaaattcaaatacattccaatttaatctcttttcttatttattaaaaaaaaaataatttattacctatcactacattatcaccacataattttttaccttctaatattcaaatattttttacctagattcctcctttaacataaacaatattcttttt

SEQ ID NO: 15901 - DNA, 390 bp, Zea mays
  Clone ID: LIB3150-063-P2-K1-A3
gaaactgaaatgagctaggagtcatacctctagccaatttagctctgagtctctgatagattctacaatacaaacgggcgccacaattcaggctcttgaattttcaaattgtacaaaatttcgacctcgtgacaagtgtttacaatacgctggcttaagataaaccgcctgctccctgaaaaggggtatagttattgcactagaaaccttccccagtttgtatcaagcagcaagcctcccattatttgcccagggacatccaatgattgccaagctcagagtttagcagcagcaactgataccttttcctttgtatgcgtgacttcacccgcttggtcatcaccagcactacttgcttctagctgcctttgctttgccaaaagctcgttt

SEQ ID NO: 15902 - DNA, 285 bp, Zea mays
  Clone ID: LIB3150-063-P2-K1-A4
gagtgcaaaatgcaaaactttttaattaaaatgaccgttaaaagtttaacggtggcgaccactacgatacaccgggggtaggttttaaacaatcagataagaaaaatttattctcggaagcacttccggcgaagaaacacaactctctttgcatgctttcatcactctttgcatgctttcatcagattgttcatttacttggtgctgttcatgtggcggatcaggacgaccactccgatgctgtatccccactcgttgtcggaccaggacacaagctttacaaaa

SEQ ID NO: 15903 - DNA, 268 bp, Zea mays
  Clone ID: LIB3150-063-P2-K1-A5
gctccaagacacccaaatgtcaattttatacctgaagggctacaccataatcaagttgtctaaacaaaagtaacagggcaggaagcatttacaccatgctctacacatctgtgaaacagatatttcatgtaaccaaacacaagcaaaactgttccctcaatcagcaggttcctgcctccacctgcggcttttatttcacactttatttatgggctgaatcgacaaagagacccctagatccatcacaaattgtactacattgagaacc

SEQ ID NO: 15904 - DNA, 261 bp, Zea mays
  Clone ID: LIB3150-063-P2-K1-C1
aaactccactctcaattttttttccatacaacaatacagaaaaaaaaggggtattttcaacgcccacgggggcaacaattccaaaaatttatttataaaatcaacaaaaataaattctcactccaacacacgaaactttcaccttatataacaaaatttatacatctctaccctaaacaatacttatttccaaaaaaaaatatactcttctcccttttttttttaaccaaccacctaaatttttcattcatttctttaaac

SEQ ID NO: 15905 - DNA, 108 bp, Zea mays
  Clone ID: LIB3150-063-P2-K1-C8
aaacctcaaaacccaacactttttatcaaccgcacaacatacaaactatgggtgggacaaatcaaaccaaggggcggccctctataaaaactaaacatttaaccacaa

SEQ ID NO: 15906 - DNA, 345 bp, Zea mays
  Clone ID: LIB3150-063-P2-K1-D7
gaactcatgaacgtttaaatttattctcaatataacacaagcaaacaaaggcgggcgtaaattcaaaggggggaggagtgaacacaaattcctaaaccctaaaccttaaacaaacagggccttagtacaggctttaatgcaggcaccacactctaatgatgcttaagtagcactgacacgacaaatatcatccttctaggactactgacgctgcaaatatcatcattctaggacttatatcctttaaacgactttctgtaccatccaactttaagccttctataaacctcctctcccgtgtaaagctttgtgtggcctactatcttccacttccctttctttcta

SEQ ID NO: 15907 - DNA, 91 bp, Zea mays
  unsure at all n locations
  Clone ID: LIB3150-063-P2-K1-E7
atttttttttatattataattataacatnagtttttttaataagaaggggagaaaaaaaaagggggggggaaaaaaaaaaataaggggggg

SEQ ID NO: 15908 - DNA, 297 bp, Zea mays
  Clone ID: LIB3150-063-P2-K1-G10
accataaccaaacaccacctttttttactttattacaaagatcacccacagcggcataccattgaaacgcgggtaggcgcatcaccatatcatcccattctatatctcaagtgctaacacacacaaactctctaccacaccctcaacccaaaaaaacaatatttcaacaaagaacccccttccttcccaatctaatctaaaaaattctataaacatcacgttttattactaaaacttcattcatcttcttcctcaacttattctatcttattttaaatcaaaattcttcactccttt

SEQ ID NO: 15909 - DNA, 347 bp, Zea mays
  Clone ID: LIB3150-063-P2-K1-H7
gcgtcgcgaatgccaaatctatgtcggcttctacggagtcactggctcctccgccgaggcggaggactggccgacgccgatgtccggcaggtccgtattgacggcgaaccggagcaaccccttcgtctcaacaaacctcagggccggctgcagcacgagcccgatggccactgcgccgaggctcaccagcgccaccttgagcgtcgacagcgccagtaccacgacgatcagcgccgtgggcggcaccagcatcgccacgcaccccgcggtacctagcgggacacggtacggcccgggcgcgttgggccggcgcacgcgcagcaagacgaaagcaatgaactctagca

SEQ ID NO: 15910 - DNA, 392 bp, Zea mays
  Clone ID: LIB3150-064-P2-K1-B2
accggtccgtgattccctggtcagcgcgccctttttttttttttttttttttgacaagaggcaaaatagtgaactgatttgattaaaagtttcacggggaggcatatacctgacaaagtaggagccattaatgctcaaccaaccactaggatacacccaacatagtttcagacattccgatggaaaaaaatttattctcggaagcacttttctccgggggggaagaagacaactcgctcgtatcaccagaccttgagttcttcatcttagttggtgctgttcatgtggcggatcaggtcgaccacgcgggtgctgtatccccactctttgtcttaccatgacacgagcttcacgaattgcccttcaaggcaatcccatccttatcattaaat

SEQ ID NO: 15911 - DNA, 362 bp, Zea mays
  unsure at all n locations
  Clone ID: LIB3150-064-P2-K1-D6
aaaagccattgataactttgacattagggaaacaccagaaccacggagggacattttantctataaactactgccaggtttcaagccatcaaatataaaaccttttttgaattaccttgacccaaaaagcaattatgttacatcatctaatcattagcccacatataacactcaagttgcaatatcactccaaaacaaaagtggcacctacagaaatatcaccctaggttttcagatccatgatgtcacttacaatttccccattaaaaacctttaagtactttacaatcttgttcctttaaacacattcctggtttattacctacttaatgtccttgttcttaacactaattttgttaacc

SEQ ID NO: 15912 - DNA, 311 bp, Zea mays
  Clone ID: LIB3150-064-P2-K1-F10
gcaaataagttctttgccttaactttatgtcaccgtagggcgcaaataaaacctaacgtccattttggaaacaacggtggcaagtccaaccatattatcgaaggaacaatactgtcatgtgccagacaacctttggaaacacccgcactgagttggaaactgaagatagtttgttatggccttcaagttaggacataatgccttcggtcagtgataatgcggcaagctgactggtcgggaggtttggtgtttgctgttgggccacattgcggagaacatccattgcctcagcaacctttgacttgagagca

SEQ ID NO: 15913 - DNA, 154 bp, Zea mays
  Clone ID: LIB3150-064-P2-K1-G8
ttttttttttttttttttttctttattttttttttttttttttttgttttttttatactaccaagaaagacacttttctggttttgtgtgacaatcttcccccatatacaaaaatacaacgagtgtcaaaacactttttaaacatcacatgttt

SEQ ID NO: 15914 - DNA, 291 bp, Zea mays
  Clone ID: LIB3150-064-P2-K1-H1
gggggccattcattcattcttttatttatttcattcattcattggacccatgacaaatatgggcgcttcttatttcccacaacatttactggacattgtcatgatgttcagattagaagaatggcgcacgttggggaattcccttgcgtctgtgacgagcaaccctttttggtggtggttcttcgtagttcttgtcattgcagctgttttggtcatttgtaacacttgaaccaactttggcaattctagcctcatgatccataccattggacccagggtttttgccaacca

SEQ ID NO: 15915 - DNA, 91 bp, Zea mays
  Clone ID: LIB3150-065-P2-K1-A6
tttttattttttaaactataaaggatacaagcttatttattataaaaaataattttattaaataggggagggtaataaaaaataagggggg

SEQ ID NO: 15916 - DNA, 318 bp, Zea mays
  Clone ID: LIB3150-065-P2-K1-B1
acgcactccaaacgcgccatatagttcatatatgcgaataaactcgagcgctgctcgcactcagcaggtcgacgttcaaaacaggctttgttccatgacatattatttaatattttaattcattaacttgctggtactgccaaatatttggtaacgcatgcatgcatgttttactgatccgctgcggctatatatgcacacgcaggacacgaggcgaggcagtactagcagtccctggtgcagaagcagcggtggcgtaggcccttgcacacgccgccggtgaaaccttcggtcaggcagacgtttgcgcagttggcg

SEQ ID NO: 15917 - DNA, 330 bp, Zea mays
  Clone ID: LIB3150-065-P2-K1-B12
aactaaaaactcgacaccagatagataacaaaatcaagggtcacctaccatgcttgagtggggcatacaacatttgctggtaatcgatcatcagtgcacttaaataccataaaatagaattcttagatgatactcagctcagtccactgcatcactcagccaggtccatgagcgtcctggtcactttcttggtcagggcgtggcgaccaagatgtaggttcatcagtgcacgcctctgcttcttgatcctctcgtccagtgtacgggccttgctgttttcgatcatcccaaacttccgcttgaacaagcctgggtgtgccctttgaagcg

SEQ ID NO: 15918 - DNA, 203 bp, Zea mays
  Clone ID: LIB3150-065-P2-K1-B6
agctgcgaacaaaaaccttgctcattcttctctcgtctcgtttcatagggggagcaaccaaagggaacaacaggggtaccaacacctaatccaaaggtagaacggacactaacacggtgacagaagcgaacggtaacacgatactatagatagataagataactcggccgaagccaggatgggcccacacattagttccttca

SEQ ID NO: 15919 - DNA, 298 bp, Zea mays
  Clone ID: LIB3150-065-P2-K1-B8
attgaccaaatttgggaaaacccatatatggaaaacccatatatggtcggacaaaatggttcagtttccaagatgccaaacaatgatcaagttcacagtattttcagcacaggtcccagatctgtaccctgacattccagccagccgctactttatctgaactatccctgtccttgcgagcatctggatcttgtgcatgacttcggggttcttgaggtgccccttggcattcacggggtttttctgcaaaaccgtcaaaacctgctttatgatctgatcaatcaggatgttctggatc

SEQ ID NO: 15920 - DNA, 299 bp, Zea mays
  Clone ID: LIB3150-065-P2-K1-D3
cctaaaatcaaattaacaatgccaaaagggtagcatatagctcttacagcattctggtattgcaaaaggtgaaatagcaagaaggtcccaaataaatagataaaagtgcacaggctaacagagctcaacagttcacacaataacagcaacgaccacaaacaaaacttgtaatgatgaaaactaggtattgctaaagcaggcgcaggatcgcatcattttttcttggcagcagccttggtcaccttggcgccggttgggtcctttttttccacactcttgataactccaacagcaaccgt

SEQ ID NO: 15921 - DNA, 313 bp, Zea mays
  Clone ID: LIB3150-065-P2-K1-D7
aaactgataacatagttcattggcatttcatatgcatcatgataataagttacagcagtgaacaaccaactactcgatgattcgacagtaacccaaactacagaacccagcacatgtttacattttctgatcgggcactgatgacagaatatacgatgcttaggccctctccccacggatgcggcgggcaagctggatgtccttgggcatgatggggacccgcttggcgtggatggcgcaaaggttggtgtcctttaagagaccgacaaggtaggccttaaccgccttctgcaaggcggagacaggggagctt

SEQ ID NO: 15922 - DNA, 395 bp, Zea mays
  Clone ID: LIB3150-065-P2-K1-D8
actacagtagatggcgatgatcttgcatacggttcacatcatcaatggatgtccggtatagtatcattctatatgcgagaataaattagttttactctacataagagacacatgcagccgaaagaaactgcatattaatgaccgaacatcggtgctgccttcctttttttttctttcagcatcgcctcatacagtgtgcgaatcgatgcctggtccggcgacaagaaggctccgttctggtgggtggtctcctagagcaaatactcgagactagagattaacaaaacaaacttcctatctggaacgaagtatatccatcaaaagggtttgaatcgtggggaccccagagtaaacaactgctggaagaagcctgttatttgtactgctgagagaac

SEQ ID NO: 15923 - DNA, 271 bp, Zea mays
  Clone ID: LIB3150-065-P2-K1-E7
catcaaaatcttatggaccacatcaatcctcaaaaaccaaacacccaagagattacaaacatacatgttatctactcataattcactaggggtatgggaacctatagcttactcgaatatttgtcaccggctaattatttttgaactaaaacacgacaaaataaaaaaaaatatttgtcaccggctagttcatttttgaactaaaacacgacaaataaaaaaagaacggagagtaccatggtatatcataaattgggatttttcaccttta

SEQ ID NO: 15924 - DNA, 383 bp, Zea mays
  Clone ID: LIB3150-065-P2-K1-E8
gttcaatcatgattgttcaccagatactaagccttactacagagttagaactaaacgtgtgtccctcaagtaacaccctactactgatgccatataaatcatggtgacaggcacaactcataatgattgccgaatgaagattaggctatccacgaacaaaacctaacagaaagcacgttcatctactagggtccccaggcacaggatggtacagatacccagcaccaaaagccaccattcatcattcctagtgagtccgtgccgaggtagccttaatcgctctcctctcccttcgctccctcatccttctcaggaaccacgtcagcgtcgtcgtcgtcctcctccgcggcagccttctccggagtgacgaggtacgccccggg

SEQ ID NO: 15925 - DNA, 421 bp, Zea mays
  Clone ID: LIB3150-065-P2-K1-E9
gttgtaatcatatcagtttgttactgaaaaacagttccatcattagacacagaagttattcagacaattgccgagcttgtgaaaggtgtgataacaaaaaatggtgcatccgcacaataaggatactgaaaataaaaaacatcatgatgttggcctagtgcaaattttgaagaaacccaaacaaaggggttttggtagatgtcatgtttaacctcaagagtggacatttcatcacgagagggctttctgcacctcagcagtcacttccttcggtggtttctctgcaggcaggttcaccactaagcccttcttggagtaataatcaatcacaggttcggtttgtctgtggaaagcttcaagccttgacttcaagacctcagcggtgtcatctctcctttgaatcaatggctctccagttaca

SEQ ID NO: 15926 - DNA, 353 bp, Zea mays
  Clone ID: LIB3150-065-P2-K1-F12
accgaaaagaagaattaccgtatcacttaaggtttgccagtagccgcgatagcatggaaccgaccgactatcaggaggtccaaaaaaataaccaccacaaaagtaccagcccaccacaaataaagtttaagcggacacaccgcaccgaccgacgacgataactcgcggcagcgactgggccagccagcaactgcagcacgctcaagactgacaacaaaccgcttagtccacctcctcgatcttggggccagggccgccgctgccagcgggggcgttcttgtccatgccgccagcgccggccatgtcttcacccgcgccctggtacattttggcgatgatggggttgcagaggc

SEQ ID NO: 15927 - DNA, 370 bp, Zea mays
  Clone ID: LIB3150-065-P2-K1-F3
aaaggtaaacaggaacacactgtaacaagggtagtacaaaactcatagccatggatgccttacattcgagggtgcataaaaaaaattaagtcttaatagcatcacggtttcaacgaaagtaataatacttcatgaccaggcaaacattgccatcatagattacttgttcacgcgacaactgcaaggatgtcaacaagacgagatattttaagcttccacgaggtaaccaacaagcaagcacagcaccagccagatagatcatttctttttggcagcagccttcgtcaccagccagatagatcatttctttttggcagcagccttcgtaaccttggctccagttgggtcctttttctccacacttttgatg

SEQ ID NO: 15928 - DNA, 216 bp, Zea mays
  Clone ID: LIB3150-065-P2-K1-G7
aaacataacaagaaaacacatacttacaaaaagcaatcaacaatacatcacaagggaatatacatttgcttgggcggggttacacgaacaacatttatcattacacacgcaaactgtatacaacaatttcataacactcttcaagcgccaccaatttacaccacattaacctcaaccatcctaacaaatacacctccaaaaaaaaactggatccat

SEQ ID NO: 15929 - DNA, 97 bp, Zea mays
  Clone ID: LIB3150-065-P2-K1-G9
aggacgttcacttaataaaacaacatatcaaacctctggggcttaaaaaatcccgacgggggggttccatttccatacaaaattgcaacaattactc

SEQ ID NO: 15930 - DNA, 238 bp, Zea mays
  Clone ID: LIB3150-065-P2-K1-H11
catcaaacagagttacaaagcaatggataaagtagccagcaaattcatggggaggagtaccatccattgccagcactcaaaagatgcaacacatccaaggagaaaaagatgatccagacaatgagaactcaagagttcaccctagaacaacttaaaacacgcaaggcacaactcctgctcaagttcaagactcatgatcctttctactcaatcagatcatcatcgtcatcaggaagag

SEQ ID NO: 15931 - DNA, 139 bp, Zea mays
  Clone ID: LIB3150-065-P2-K1-H6
attaaacatagttgcaaaaacaaggcgaacgggatcttaaaatggggtgggtgtcaaccataatatgggtacggctcaaaacataccacacattccataattaaataacgtttcagcacattgggattgtagaagaaat

SEQ ID NO: 15932 - DNA, 347 bp, Zea mays
  Clone ID: LIB3150-065-P2-K1-H7
caattgttcattcaggtcattgctcacactgacactgccacccatggggatgcgtgacacattattactgaatcatcgccgctaaatgactcaactagctagctagccagcggctatactacagcacatagtttcttcagtgggggacaccgccggcagcagcgtaggggcatggagtcggctgctgcaggccgcacatcgccgtcagttgctgcgctatctgcgccgccaacagccccgcgacctggccgctttgcggctgctgctgcaggaaggactggaggaccaagccgaagatcgcctggtaccggtgctgcggctccacctgcctgagctgctgcaacact

SEQ ID NO: 15933 - DNA, 97 bp, Zea mays
  Clone ID: LIB3150-065-P2-K1-H8
caatactacattcattttttttataacactgtcacttccaccaatggggagtcataacacagtatgactgattcatcaacactaaattactcaacta

SEQ ID NO: 15934 - DNA, 305 bp, Zea mays
  Clone ID: LIB3150-065-P2-K1-H9
ccgaaagccttcaccgtgaaaaaagtattgagatgattatgtagggttcactgattaaaaaagagtgctgttatatccaaaacttgacaacaaagaacatcatccagggcaaaacaaaacccaaagttgacaacagttcttaactataacatagaaagtgcatttagacagcacaaaccatcctaagcctctactgtctcggttggggcctcaagcacaagacccttgggggggcttgccagcaggtccgtgtattgctggaacggagtcatggagaacttggtctgactccagaattcaggcgt

SEQ ID NO: 15935 - DNA, 444 bp, Zea mays
  Clone ID: LIB3150-066-P2-K1-A2
actcataaagttcacaatactggttttctacctggtaatgttcacaggagtcataatgcaaacggcctccaaaattgaacgaaacaaaataaaattagagtgacccaggactttggatctgcagtaacgcagggacaggactaacaacaaactcttttttctcttttgcactcaacttcagctcacgtctgagtatgacgctttacaccgggcacgctggtacttcaagtgttgtacctgcctggatctggccccatccgatgaggcgccaatgcttctcaacgcgacggctcagagcaaccttctctcctcggctcgtgcagacaggcgcggtgagctgtagcttggcaagatcgttcttaacagcgaccacacgggcgcctgtggacatggaccctatgttaagcatgaggatctcacccttggtgagcttcgacaccttct

SEQ ID NO: 15936 - DNA, 353 bp, Zea mays
  Clone ID: LIB3150-066-P2-K1-A6
ccagcaaaacaaacgggaggcacaagattggtttaggcatatttgacaaacaggcagcaacgtagcacatgagttatgagttgatatccggtttttaagaactttgtttaacagcctgagcctttgcgggggccatgggatctttttttttctcgccttccctttaaggggccagtttctccctgggcagtttttttgctgcctgcatcgttgcacggggctctgcctgcagccgctgaatctccttttcctgctgttgcctttaaaaccaagtgtccgaatcggcccagattggttgggcagcccatccttgctcccctcctttgttgcgctcggggaaggcgtttttgacg

SEQ ID NO: 15937 - DNA, 295 bp, Zea mays
  unsure at all n locations
  Clone ID: LIB3150-066-P2-K1-B3
cccctacacatttttttttttccacttccacctcttccctagagagtttttttattaaagaaagaaagacancccaataacaatattccctttttttacctcttataaaaaacccccatctaaatatttccctctttttctttcccattaaaaaaactttaaaaattatccccttttttaaaacccttaaaaaaaatacactttttctatttcttctcccttctatatttttcccccttatttcttttcaataattcttacttattattcccccatttttaaaccctacttttaa

SEQ ID NO: 15938 - DNA, 166 bp, Zea mays
  Clone ID: LIB3150-066-P2-K1-B4
aattcgtaaaaaaagcagtcttaaatatttcccaatccaacaattttacaatttttaaaatttaacaattttccaaattcacaaaaatcacttaattccctttttaattatcattctccaaaacacttaatccctaacttttttatttttttttacaaaataattt

SEQ ID NO: 15939 - DNA, 404 bp, Zea mays
  Clone ID: LIB3150-066-P2-K1-C10
aatctaacattacccaaactgacattatgacaatgttagccgatgacggcgacaatggaaacaggggtgggggtacaagcaggcgcctctgctagctggcaagtgtgaccacacacaaacacaccataccagaggcagaaccacccgccagtggcgccaacgaggagcgctatccgttatagcacgacaaaagtaaaaataaaacatcacgatgtggagtgaaactgaataattctagtacatggatataggctccttttttttgatcgccacggggccttgtgtagccgctccattgttggatgaagcaccgtccattgtctcgagcgagctctccatcactcgttatcatatttatccttctcgctaccctcttcgtcattctcgtcattgacctccgactt

SEQ ID NO: 15940 - DNA, 381 bp, Zea mays
  Clone ID: LIB3150-066-P2-K1-C3
aaagatggtttttttttttttttgggggaaaaaaaaaaaattcccttttcccttcctctcgggtcaaaaaaaaaaaacatccccctttaaccttctttttccccctctaaactttcccaaacctttccttacttgcttaaggtccccccctttttttttttccccaaaaaaaatttttttcaatccccccctttttttaaacagggaccccctcacccccacctctttcttggggcttttttttccccctctttattttttttcccttcacccttttaacccccccagttttcttttttttaaactttttcccaaacattatttttttttctttgtcctacccctttttttcttttttttttcttttttttctcccttttc

SEQ ID NO: 15941 - DNA, 431 bp, Zea mays
  Clone ID: LIB3150-066-P2-K1-C5
agaaatatgacgagccaattccttatccaaaaaacattatccattcaacagcatgcattttctactaacggggaacggtcatccacatagagcaaaattaaagctcgtcttgacaaacacagaaaacagcaacaccacccagagaggactagcttcatgatggccacccgccaagagccagcaaatggcactcagcatagactcctacagcctccttcccctcctaccgccctttctgctagtgctgtccgtggggaccggggtaacgtcctcaatgcgttcgatttttatcccggaacgagcaagcgccctgagggcatactgggcaccaagtcctggggtcttggtcttgttgcctccggtggcacgaagcttaatgtgcagtgcagtaatgccaagctccttgcagcgctgtgcgacgtcttgagcaa

SEQ ID NO: 15942 - DNA, 331 bp, Zea mays
  Clone ID: LIB3150-066-P2-K1-D5
ggaagttaatttgctttatttaacaacttcagagacaaaaggtacatatttaggggggctcaatttaagtgggggggagacggataccatatatgcatatggaacgatgaaaaggcgttgaactgaaattgatcaaacaaatgttaaatcatcatgggaggattatgaaacccatcatgaaaactccgagtgctgtctgtcaagggcagcgcatttaatatctgtgggaaagcttctcctgctccttgtaccacatggtgtattggtaggtgccgactactggtgtgaggaggagcattgcggagattcatttttatgtcacctttatatt

SEQ ID NO: 15943 - DNA, 393 bp, Zea mays
  Clone ID: LIB3150-066-P2-K1-D7
cagccaaccaccaaacccatgacgaggaggggtttatcagtgaaaaagtgggaacttgaaaacccaagatttttgcgaagacattatttctggaaccaatgtataacgacagaacatttttttgcatatgttagcactggccgatccgagtaatattactagtacataataactggccttcaaaactaaaggccacatgcgaagggaaacaccatgtccaaaccaagggcaacttcactccatggaagaagaggttgggcccgctcctaatccgttggcgccaccacgcccaaagccaggccttctgaatgatggctggaactcatgaggagctccacttttttcgccaccaaatgcaccatgagcaccacgaggaccaccactttacccatt

SEQ ID NO: 15944 - DNA, 438 bp, Zea mays
  Clone ID: LIB3150-066-P2-K1-E9
atcacaagaacaaatccggatcccctttaattattgttccggatgaacgagccgagaaatgcattgaggtggttgctgtgcttattattcagacatatgagctagctacaagctcattcctcatgcactatgctcttcgcagttacttggagggcatcgttccgccgccgagaatccaggggcattcggcgacgccgctgatggtggccaggttgcactcggcctccgtgacgagggtggcggcgaatcccctctgcacctcccgcgggcagcccggcaggtcctttaggcggccctccagctgcgcgtccggtcccggcgggatcgcgccgtccatgaggatgctcagcgccgcgcaccggctgtacgccgggatgtccggcagctcccggcagcatcttctcttcagatccggccacgggaggcgcggtccgatgc

SEQ ID NO: 15945 - DNA, 370 bp, Zea mays
  Clone ID: LIB3150-066-P2-K1-F7
acgaaaccgaaccataataccgtattacttaaaacgcggggcgggatattattggggaccggcgaaaaggttctaacgcggatacaccgcgacgacgacgataaatcgagcagcgactgggccagccagccactgcagcagacacacgagactgacacaatccgcttagtccacctcctcgatcttggggccagggccaccgcttccagccggagcgtgctcgtccatgccgccggcgccacccatgtcggcacccgcgccctggcacatctaggcgatgatggggttgcaaaggctctccagctccttcattttgtcatcaaactcgtccgcctcggcgagctggttggtgaccagccagctgatggcc

SEQ ID NO: 15946 - DNA, 325 bp, Zea mays
  Clone ID: LIB3150-066-P2-K1-G10
aagggggggccaaaactcagaacggggggtgccttacattccattttccataaaaaaaattaaatcttaatagcatcaccgtttcaaccaaagttattattctttattacccggcaaacattgccatcataaattacttgttcaccccacaacttctaggttttcaacaagaccagatattttaagcttccacgaggtaaccaacaagcaatcccatctccacccatattgatcatttttttttggtagtagtctttgttaccaaccaaatatatcattttttttttacagcaacctttttcaccttggctccaattgggtcctt

SEQ ID NO: 15947 - DNA, 374 bp, Zea mays
  Clone ID: LIB3150-066-P2-K1-H3
aacaaacgaatttctgctttactaacctctttagtttagttggcacgacagaacaacgggggggaggtttacatagttggacgtatcttactgttcacaacatgaaccacgttaagttttcaggtttgggtgggaataaatgttgcttcaagagccgtgtgtcgttcaatacacagcatttagacaactcttatcacacaattactgatcacagatatttggaaggaacctacctgtaggcaagctttatgagcgagcttgaagtatagtattaaaaggattgccagtgtgagagccctaataatttccccaatgatccacttgttcctatccattctttttgacatttgagtcagaatcttttttgcttttgc

SEQ ID NO: 15948 - DNA, 429 bp, Zea mays
  Clone ID: LIB3150-067-P2-K1-A11
cattcttcttctgatgtataaaatccaagtgggcagcctcccataattacaaaagcatgtaagttgcattttgtagctcaacagcagacaatctagataagaactcaccaatccaatactaatgagaaatcagagtggaagacttgttaagcctacaaagtagaccgcatgtcttaaaaatactccatatcctagctgacggaccaacaagttacaagcaagtctgcttaacataaaagagaagttacaaatcactacacacagttctccgatcctatccatgatgtgctctttctctgttaaattggacctcaacatgtaacggtgtgcctccaaaacagcaaagttataatggcacagatctaattaaccctttgaaatgccactatgagcatctgcatcacatgacatcagcactatttgtagggc

SEQ ID NO: 15949 - DNA, 323 bp, Zea mays
  unsure at all n locations
  Clone ID: LIB3150-067-P2-K1-A2
tntnnttctaaccaaaaacttctaaaaacattttcatgctttcaaaaggcatgagcctataaagccgcgggggtctacttctgatctacgcgcgttcaatacaaacactatacaaattcccaaacatttcttcggccattccttcttcctaaaagacctcaatgtgttccccaatttgccagtttcatcatcggaaaactggaaattaaatcttccacaacttactttgcagacaattataaaaaaaaaaacccaattccgtatcaacatgactttaattacagaggtctaaggcaataatgccccggtatgcgatctttatt

SEQ ID NO: 15950 - DNA, 271 bp, Zea mays
  Clone ID: LIB3150-067-P2-K1-A5
aataaatataaaaaaagaaaaaacaattttatttataacaaaaacaagcggtaaaagaaagggaaacaaaaaaagacgggagggggctaataaaactaaaagcagtaacagactacaaactaaataaatgatatttaactaaatgcataaaattatactaaaagaactaggagaggaagtctaataaagaaaaaataagaaaaaaaaaaaatcaaaaattaaatatataaaataaaatatgaaaaaataacaatttaaaatataaataaaa

SEQ ID NO: 15951 - DNA, 413 bp, Zea mays
  Clone ID: LIB3150-067-P2-K1-B3
ggaggcattccaggcaattttacattttatgattaatgagggtgcattcatgctactccgtttgacaaatgtatatgggcaaatacaaataggagcatacataattttcggtacaccctatactttgtacgcacaacacatgtacaacacgggtgacaaagtacccgagcaacggacatttacattaaccagactgttggtaattgaaggcataatgctcaccacacctccgatccttttgtggcgccaagcagcacagcaattgcagcaagcgaagcagcaatagtgcaagcaacatatcctggtttctccctgtaatcacgtactcggacacaaatcagcacaaaagctccaagataccatggaatggcagtaaagaagaacccaattataaacagaaactaccctatgcc

SEQ ID NO: 15952 - DNA, 250 bp, Zea mays
  unsure at all n locations
  Clone ID: LIB3150-067-P2-K1-C8
aaatttttggtttngcaaccaaattatattattctttgacatnaaaccaaacaaacanctnggcggagccactttaacagaagaccaggcaaatctaaatcattctaaacaacaacgctgcaacaagggcaggtctttttttcccaggaagaagcagcaggcttggaacacgaaaaccagcatccatccatcattaaacaactagagaatcgaaacatatcatgcgggcataacatctagagtatgtgct

SEQ ID NO: 15953 - DNA, 388 bp, Zea mays
  Clone ID: LIB3150-067-P2-K1-C9
ggggggcttcaaataggcacatgcatgctttgtatttgggaaaagaagggttattaggcaggcatacatgaaatgggaaccgtaagacaatttcacaaaagttacaggtgcaatgcttaaccaatttgccaagaacaagccggaacgacaaaagagaaacccagggcgtccctttgtacaagaatttaatttacgagggcttgtagtacttggggggcacaaacgggattttggtgaccacggcgtcgtaggacttcccgggaacgaccacctttaacttcgtcccagccttgggcattcccgactttacgtagcccatagcgatgttctttttaaggcacgggctgaaccctccgctggtcaccttgccgatcctttcccccgagcc

SEQ ID NO: 15954 - DNA, 243 bp, Zea mays
  unsure at all n locations
  Clone ID: LIB3150-067-P2-K1-E8
ancaacaatccacactttttttaataaaacaccacacaggccccccaaaagagcaaatttaaaacgcatccgggggcccacaaaaaacccctgcacataattcaatagaccaaacccaacaaaaaaaaacaactcattccttacatctcctccttttaccaaaaaaatgagccaaatttaccaacaccatccagcctaaaccctataaaccccaaataaaacaaacttactaaccaccttcat

SEQ ID NO: 15955 - DNA, 351 bp, Zea mays
  unsure at all n locations
  Clone ID: LIB3150-067-P2-K1-E9
agtagcagaacaaatttaatgntctttcatgcataacgatgttcagcacgagataagcaggttcacacagggcactgtaataccccatacacttaaaattcatgttgcacaaagcaaaataagataggctaaaccaaaacgtttggattcgcattccaactgtagattggacttaagcaacggcctcgaggaaagccttcccaggagcacgcttcttaagtcttccatggttaccgagcagctttgcgttgacaccattaggaacaattctaccctcactcttgtacttcaggtagtcggcacggctgaacttggtgaaaccccacttttttgttttcaataaattttttg

SEQ ID NO: 15956 - DNA, 374 bp, Zea mays
  Clone ID: LIB3150-067-P2-K1-F6
aatattataaaagtaaatatttagaactccagctccaaactaacagaaacaactttgttcgcatcgacaaacttaaacaaaaatgcatgttgcacgactacaggtagcgataaatgccatagcacaaatactgatcgccgcataagatagcactacttcgatgggaccaaactttactcgtcatcctcatcgtcgtcatctgcgccgcccgaggagttgagttggttgagcctttcaatgagactggccttcctctgctcgtatgtcagtttcttggggttgtacctcatgagctcctttgggggctgtttggttgacttggccacaagagggatcagcacggatggcagcatggtcctttttggacagagctt

SEQ ID NO: 15957 - DNA, 254 bp, Zea mays
  Clone ID: LIB3150-067-P2-K1-G3
caatggaaagagtaaacattgtgtgctcaagctcgaaactaacagaaacagttgtgggcacctcgcaaaactttaaaacaaaaatgcctattgcagtactacaggtccccgcataagacagtgcacaattgctgatcgctggattgagatagcactacttcgatggcaattaactttactcgtcgccctcatcgtcgtcattagtaccaccggaggagttgagttggttgagcatttcacagacgctatccttt

SEQ ID NO: 15958 - DNA, 54 bp, Zea mays
  Clone ID: LIB3150-067-P2-K1-G6
atactccacccacgcgtccttttttttttcgctaactgccaggggcattggcgg

SEQ ID NO: 15959 - DNA, 416 bp, Zea mays
  Clone ID: LIB3150-067-P2-K1-H7
aggatcaaacaaaggtggacatactatattaattattaatataatactactacaccgtggtatactcccggctcgtcgtgggacatgcgcatgacgatatacatgcccatccattcgttattattgtttgttcattcattcgtgcatccgagcttcgagtggcccgacgacagatccgatggggatcaggcgtcgtccttgtcggcgaagatgtcgaggagggcgagggcctcggtgacggagagctcgagccggaacttgggcccgtcgtagtggtgcaggatggggcggaaggcgtcctcctccagcgggtcgtagatcttccgcgttgccacccgcacctgcgcaggaaagcgcgactcgccggggcactttttgtcctcccacgccgtcgggtcgatgttggtcccgccgaa

SEQ ID NO: 15960 - DNA, 385 bp, Zea mays
  Clone ID: LIB3150-067-P2-K1-H8
atattacctacacttttttttttttttttataaggagggccacaacaacccttttctttagttttagtggggcgtcaaaatttccaagacaaaagaaggtttttattgtttactacaagctcttttatgttttgctatagcagcacaagcctgcaggtagcattatcaacacatacccttctcggctttttcgcccatttgtttggcccgccttaatatctcattggagctactatcttaccggaccaaaaacttggtttcctccctcctatcccggggaggtaactttgcaaatatccttcccacattaacttacatgcttctggtttccattattccgataggcttcttaagccctgctattaatttttgtgtcgggctacct

SEQ ID NO: 15961 - DNA, 315 bp, Zea mays
  unsure at all n locations
  Clone ID: LIB3150-068-P2-K1-A10
caacccttccctttttacccttggcgggtttttttaaaagaccgtgcgcctcctacaaacaaaaaaaaagaagatgagctactacggacaccaaaccaaatcggcttcccccctaacaaacctacccaaaaaaggactgctacccgccatcaaaaacccaacaaccggctaccccccgccggcgcagggctaaccaaacacaaggctacccggaacagggttacccacatcatgtctaccccccgcattacgcgcagccccctncacagcagcagcagaagcaacggccttccttcatggaaagatgcttggctg

SEQ ID NO: 15962 - DNA, 216 bp, Zea mays
  Clone ID: LIB3150-068-P2-K1-A8
ggaaaaaaaacgttttttttttcaagtagacaaggatccaaattgcaataaatcacattctctcaaaaaaaaacaaggattttctacccgttcacagctttacactctaattaaaactaaacaacccctcttgctattcacacaacttttttccccattgcacttccccattgccattaaatgaacacaagcttctacaaatcctttttggatgat

SEQ ID NO: 15963 - DNA, 362 bp, Zea mays
  Clone ID: LIB3150-068-P2-K1-A9
gaaaattgaaataggcaaatatagtaattacatggaacatgcaacctagcaaattgagctccggataggcaaatggaacattgattaacttggactcaaaatattgtatttttttcatctgagacaaacacacgatccggaaacaccacatcaaactccaaatatacttgtccatccgtttccagttcacgtacgcttcacgacattgctaccttcttggccaagaactttgatcattcaacctttttcttgtcatcctctccgccgccggcttcgtcctcctcctcctcatcctccttgtcgacgaggatcttcttgcacgcctcgtagcacatgaaggcgatgccggcggcgggcatgag

SEQ ID NO: 15964 - DNA, 314 bp, Zea mays
  Clone ID: LIB3150-068-P2-K1-B12
ggaaaaaacatgtccagttttttcttgttataacagtttattcttcagccaatttgacgcaagcgcaaacaacacaactaacgggaaaaaattgggcgacatctcgtgatttccatttctttttgagccccaacctgtgaaagaacatgtcttacatccttcattaaaaaaaaccattttaacactagctatgactgtcccccaaaaaatacctttattttttcgcctgagctccagtgccggttgaatcctatcacacgccacaggctttgctaaacacagtgcctaaaatgcctgccttccacaggggcaga

SEQ ID NO: 15965 - DNA, 396 bp, Zea mays
  Clone ID: LIB3150-068-P2-K1-B4
gtaagcactaggatgctgctcttattggaggaaaagggctccaaggccgctaccattattattcaaggagcaacatcccatccaggaaacaaagggagcaccacgcctgactgcacacacaccaccaccaccaacgttccctctcaaccgacgcaacgcaaactactaacagtccatcagactactaaaaaagcgacacccggatcaatgatggaacaagaccttgacaaggtaggtaaatttaactcttgaagcaaagagcagcaacgaacgcccgccgcctagcaaaagcagactctttttttcgcctccgggaagggaaaaaaagaaagaaatggcgagggaaaagacacgacactccgagtgctccctctcgctcatcgatcgatcaggtct

SEQ ID NO: 15966 - DNA, 429 bp, Zea mays
  Clone ID: LIB3150-068-P2-K1-B9
actcattcaaaatgcagatagtgcattattagagcaagacggcacacgttgacgcaagcacacaagttttgttgcaactccgacagttacaaatacacgacgacgtccaacatgaggatgacaaaggtcactggggatacaatagataacagactttgggcagactgcacttcaacacgggggtgcactcacttcaggagggtcttcacaatggatttcacgttcagcttcttcaggtccgtgtaggactgaccacagccaacgaacatgactggagctccagatatgtagaccatggaaagcgctgctccaaccttgtcgtcgatggtgtcaaacttggtgagcaggataccatcgatcaatctagcagggggaacagcagataggtctgctaatttctggttaaatttagtgagctgatccacagca

SEQ ID NO: 15967 - DNA, 276 bp, Zea mays
  Clone ID: LIB3150-068-P2-K1-C7
ggattgtacaaaaaaagggggctgctcgattcggcatcggcaggaccaacttacacggaatttaacagcaaagagactaattaacatacaaatttaaagataaccatcatcccacataggaagcatgttttttggatgtccgaaaataagctctaacgagcaaaccacactccgcaacctagctcgtaggcaggagttccaaaacgggcacgcaaagagaagcaactcagtacttgtagtccttgacgtggaggctctcggtgtcggcggcagcat

SEQ ID NO: 15968 - DNA, 284 bp, Zea mays
  Clone ID: LIB3150-068-P2-K1-F11
ggaacaagcggataaaataaatggtggcatggcagcttgctgcaaaaatcgttcatgaattataagcatcaggcagacttaaaaacatggggggcttaaaacattgttctatttccttgcagagcaactagaaaaaactctcaacacagcacattcagaggatttatgcgttggcagcaacctgggcaggggcatcccgcttcctttgcttttttatgaagctcaacttggttcccttgcccttgggcgggctcacccacgggttattacccttgccgatgggg

SEQ ID NO: 15969 - DNA, 325 bp, Zea mays
  Clone ID: LIB3150-068-P2-K1-F12
ggaatacccaaattcagttaataagactaaatttcgtttgaacccacgaacactggcagtcaactttttaaggaatgagaaaaaggttcacattcagtctcgcaaaattgcaactcaaacgacattcatattcatttcctggcatttcggctacactgtcgctcactgctccttttcgatgacccccttgtcgctcacatagataccgcccaaaaactttcggatatccttctttttcacatggcatttttggttgatgagggcggcggagcgagatacgagctcgacgtcgtttccgtcaaggatgagctcatccttgaccttt

SEQ ID NO: 15970 - DNA, 435 bp, Zea mays
  Clone ID: LIB3150-068-P2-K1-G12
ttttttttttttttttttttttttttttttttttttttttttttttttttttttttttttgttggtttttttttttttttggggggttttttttttttttttttttttttttttttttttttttttttttttttttttaaaaaaaaaacggggggtaaaccccccccccaaaaatttttggtttttttccccccaaaaaaaaaaaacggggaaaaaaaaaaattttatacccaaaaattggccccggggcccttcctcacccattgttaaaaaaaaaaaaatctttttaatttgtggaagaaaaaaaaggaatctctattatttttaaaaaaaaatttgtttttttaaaaccaccaaaaaaaaaaatgtttgtttttaaaaaaatctcccccccccccttttttataaataataataataaaaatgcctttctat

SEQ ID NO: 15971 - DNA, 440 bp, Zea mays
  Clone ID: LIB3150-068-P2-K1-H8
ggcgtcgcgaacgaattttattgtttcgggaaaaaatgttgcaaaaatttgtaacagaactcaattggaagcaagtgaaattgcagacattatcatcgtaggataaagattggcagcttccctcagcagggatgtagttctgctcgacgaagacggacaaactgagtaactgactgaaaacgagtaaacgacccgaaaaaatttcagggcagacagacgcagacgcaggcgccattgcaggaacgctcgagaccgatcgacgggctcatcactgggggttgggcggcctgctgttggcggcggagaccctggacccccactcgaggagctccttgctcgtgtcgtccttgtgcacgattacctcgatgaagcagaggcagtctttcttgtcgcccgtcgccatggcgatcgcctccttgagctgctccttcgttcgaacc

SEQ ID NO: 15972 - DNA, 423 bp, Zea mays
  Clone ID: LIB3150-069-P2-K1-C7
agaagaaaaatcgagaggttcttattggcaaattcgaggcctcacatcagagcaagcctcctgatccgggtgcaaaaaatattctggtaactcaaaccttattctcaagtaaagatcagcctcaacagttcgcacgcatattcttactttgatagctggtataaacacacacaagaatcatctcaacactggaatctcccttgtccttccagactaacaagcctgtgcaagtaataaactggtttatttctgtacgatactcgtgccacacatgtagaacatgttcgaccggagcgaacacggcaccatgcgaagcttatcacattatgatgccaatgtccgtcccttatattcactggtgcacgaatttgttcagtgccgtcacattcagcgctggaaatttcattctctatgatcaagaac

SEQ ID NO: 15973 - DNA, 184 bp, Zea mays
  unsure at all n locations
  Clone ID: LIB3150-069-P2-K1-G8
attnantagagagttttttttgacaaaaaaaaggcccatcatttttcccattcatatgttaaataacccataccccaattccctctttaatttacctaacccctaaattaaaagtttatttaatcatttaaattttaccccaatactatcattatttcttaagttatttattcaaaccttttta

SEQ ID NO: 15974 - DNA, 386 bp, Zea mays
  Clone ID: LIB3150-072-P2-K1-A1
gatgagcacaacttgttacttggatgatatcaaattcgtaagggtgcataagacatggtcatggagccactgagccatagctacaaaaactctggtttcacatggaaatagagcacagcagatgcctgacgcagtaactttagatgatgccgattttgttggccacatcaagagcatcatagtcaggcgtaagcttcacgtaagccttcttctttccatcaggtctgatcagggtgttgaccttcttggcctgaatgtcatacatcttcttgacaagagccttgatcttcttcttgtctgccttgaggtcgacaatgaagaccaaagtgttgttatcttcaatcttcttcatcgccgattcttgggtgaggggatacttgagaatt

SEQ ID NO: 15975 - DNA, 228 bp, Zea mays
  Clone ID: LIB3150-072-P2-K1-A7
attccttcccctcttctttaggtggctttcttttaaaatccatctaccccactaaacccaccatatattatcaaccaccaatttcaataaaaaaaccccctataaaacccaaaacacgctcactaattcaaaaaccacttaaccccccaaaaaaaaaacacactttcttaaaaaaacacacctcaaatcaccctcctgtatttagacaaaacaaatcatcaactccaa

SEQ ID NO: 15976 - DNA, 366 bp, Zea mays
  Clone ID: LIB3150-072-P2-K1-B1
aaacccgaaaaaacaaagggtggtcataaacaaaagggggtcacagatatttctccatacctacatgctcattggggtagacccagctgaccacctagagctgcatacttacttattcagactgatccagcatgtggcaacgtcggaagttcacatgcttacagacgacaaattttcataacaatagcttggcttggctgcttcacagaataaccaaacgacaaccacgaaattgcgacgatttaaaataaacaactcaaaagcaaatcgaccccagaagcccgttttactcattaagcactcccgccttctcctccatgggatccgcttcctcctcccagcataaaagattagccagtttgtagt

SEQ ID NO: 15977 - DNA, 346 bp, Zea mays
  Clone ID: LIB3150-072-P2-K1-B10
cattcattaccccacataacccatcttcgggtgggtttttttataaaatgggtacccccaacaataccctttataatttttttttttgacccaaaaaaaaccccaaccccaccaaactttaaccctcttctaaaatgttttcccacaaacacaaccccccctttaaaaagtcccacttccccttaaacaaattaaaagcttaaaacttttttccccccacaaaaaccccccccataaaacatactctataaaaaaaaccccccccccaaaaaaaccccggcgcccaaaaataccatctacccccccccctctcttccccaaaaaaaaatacccccctcctccccct

SEQ ID NO: 15978 - DNA, 371 bp, Zea mays
  unsure at all n locations
  Clone ID: LIB3150-072-P2-K1-B5
ttttttttttttttttttttttttttattttaaatntttatttccacccnaaantataatttttagaaagttttttaaaaaatttaagccaccccaacaaaacccttctaatttaaattataaacttaaacattttttttttttaaaaaccaaaataatcaaaataaaaaactactttaataacaaccataaaaaaaaatttccccaaaatgaaaaaatcctccccccctttaaaaaaaaaaaaccatacaaaaaaaaaaactaaaaataatatttttcaaaaaaaccaaataataaactcaaaaacaaggaggatccttacaaacaaacttttaaaacaacaaaaaacacacccctttatatttatttat

SEQ ID NO: 15979 - DNA, 429 bp, Zea mays
  Clone ID: LIB3150-072-P2-K1-D3
agcatcaaaaggctagtaatatgttttattttagagagcggactgctacatacaggggttggtttagaaagatactggcttaaattgtcaaatcccaatttcaaaattgcgaccctgaagcacgaacagacacatttcatccttgaacgctcaaattctgaccatccatgactcataggtgggataatctaccaaccacaaccgatcatgcgggaacccatgtatattactctgaaaccctgtgatgaatctattatgtataacgacacgctctcgccttatctgcttgacccagctattattgtcgaaatataggccttcctttggctattcacactgaggcaggaggtaaacatcaacctgtccggacgtattgcacaaagcccatgtgaatgccggctgatgatttcactatatttgctttgacca

SEQ ID NO: 15980 - DNA, 443 bp, Zea mays
  Clone ID: LIB3150-072-P2-K1-D7
ccgccagttagtaccgtttctatatccaagcaatttgtttcaacaggagggaaaacaagctgactgaaccctggtacaggacatatgcaagtaataacatatgtttctatgaaagcaacggctttagacataaatccccagactaggaaacatgtccgaagcaaatgacagctgcagcacaactgaagcgttggcttagtccttcctcaggtcgatgtactcgcgcttagtcccgactttgttgatgactacaatttccaacttgtctccagtgtagatgtctctctcagttgcagatgcaaacacatccttaactagatcgatggcctctgactccgacaatggtgtgacagcatccctggcagggagcaatagaggacttggtgattttagttgattgtccaggactggcataatcaaagtagatcccgttccctgagcac

SEQ ID NO: 15981 - DNA, 230 bp, Zea mays
  unsure at all n locations
  Clone ID: LIB3150-072-P2-K1-D8
caatnncttcntacaaccncataacatttttatagggaaggttttttttaaaaaaaaagcgccccacaaaaaaaaacccaatatcaaccttcttatccttcaacaccaccaaacaaattcattcccgacctcacaaacactaccaatccatgacaaacaacttagcacaaccaccaaccacaacccaacatccctcaacccacttcacctactctaaaacccctccacca

SEQ ID NO: 15982 - DNA, 418 bp, Zea mays
  unsure at all n locations
  Clone ID: LIB3150-072-P2-K1-E1
gtnttttttttttttttttttttttttttttttttttttttttttttttttttttttttttttttagggagagaattttcatgggctcatgacaatttttacccataaacatgcccaccagtggtctcgcgattcaaagggggttgtacagggggggcccccgtttaaaattagaccaccggcaaacaaaattagggaaaaccaccccttaaaaaaaccggggaaaacaaaccctgaaaaaaaaatttgaaccttcgcatgtttcagggatgaccattacacgggtatttggggggtacgaccggtggccaacaaggacaccttacccgggcaacgaaaggagcacattacttatctttaaacacggttatgacaatgggaagtcttctgcctgtaccaagctaagtaaaggggggga

SEQ ID NO: 15983 - DNA, 342 bp, Zea mays
  Clone ID: LIB3150-072-P2-K1-E12
gggggaggttttatttggcatctcccctctccaattatcttgggcacgggttgcaatagttcccgcttgcaaaccaaactagcaatcaaattttacacaatcgatccacgagggacaagcaacaaataccacgggagctcaagctctcaactcccggatgtagctggggctcatctggttgaccttgggcgacaccccaccggcgaggtgcgcgtccttcacaaccctgttcaatttgctttccaacgggctgaaaggcacctggtccccaaaccgctttttggccccccccaggcaccccaagtaactttcccgctggtttttccaatgaggcatcctgct

SEQ ID NO: 15984 - DNA, 417 bp, Zea mays
  Clone ID: LIB3150-072-P2-K1-E3
ggcaagaagaattaaattcaactcaactcaacggttgactgggtgggtgtacctcggtgcagttttttttattacaaaaaaaaaggaaggagcagcattcataggtgtagcttacagcaccgatcaacttgaaaccaaaaccaaaagaaaaaaaatcacaggtgggctgggtgatttgcaatgcctcaaaggttatcgtcgatcaggcctacaggaagtttcggatgtccagtttcctgacatcaggcatctcctcatcttggaactcctccctcttgagttgagtctccattgcctcaacacattccttcttaagttcagtcagctcacttttggcaatctccaattcaagttctttctcgatcttaggaagatcctccttccgaatgccaagctttgtgttaatcttgtcaaact

SEQ ID NO: 15985 - DNA, 362 bp, Zea mays
  Clone ID: LIB3150-072-P2-K1-E9
gggtgtggtttaacaagaaaaaccccggtcccctttatatttttctataaacagtttatcttaaacccaacgacctgataacacaatttttacccaatcacccgttacttcattcactacaccacaatttttataaacccatcttggcccatttccccagcaaaaatacataaattttcattaatcccaatcagcacgttttgttttttcccggtccttgtaacaaccccttttgttttcccccgttcccaaagttgggaccttacttacctcccccttttaaaaacgcccacttgtacctctaatatttttagacccttattgacttttttttccttcaacaacaggaccattttaagggg

SEQ ID NO: 15986 - DNA, 367 bp, Zea mays
  Clone ID: LIB3150-072-P2-K1-F10
ggagggggggccctcttacccccaaaaaaaaccccctcaaaaaagggtcacaaaacccccgactgatttgtcttaacccaaaaccctggattttgcttgaaacccccatagatggcccaccgaaaggccgggttccaaaaccagcccttggccccctgggaaaccgggaccaccaaccaagatgggacatttttccatgaacccaccccttgaaaaaacctaacacaactatgccggcccccccatccacaatccccattaacccacttggatctctgccccaatttttggggcctccctttaaacccccccaagcccttttttttccacttggcccctaaaagccccctcttgcgggccctccttg

SEQ ID NO: 15987 - DNA, 262 bp, Zea mays
  unsure at all n locations
  Clone ID: LIB3150-072-P2-K1-F8
aacccccggnnttttttattatataaagtttttttaaaaaaaaatcagccccccaaaaaaccttaacaaataatttttaaaaaaaaacaaacaaacaccaataacatcattttaaacccaaaaaaaaaaaaaaaaaaaccccccccctcttataaaaaaccaaaaaaaaaaaaaaaaaccccccccccaccccaaaaaaaaaaaaactaaatatatacacacccccctctaaaaaaaaaaaaaaccataatttacccaaaaa

SEQ ID NO: 15988 - DNA, 250 bp, Zea mays
  unsure at all n locations
  Clone ID: LIB3150-072-P2-K1-F9
accacccnananantttttttgggagggtttttttaaaaagaaggcgcccccaaaaaacccctcatcaaccactaaaccaaaaataaataattctttccctacacaaaaacagacccaaaataacataataaaaataaaaaacaaaaaacccacaccacaacaaataacactaaaataccacacccaaaacaataacaccaagcagtgcataaaaagagaacaaccaaaaaggaaaaaccaatgccccac

SEQ ID NO: 15989 - DNA, 430 bp, Zea mays
  Clone ID: LIB3150-072-P2-K1-G5
gagatacaaggcatttttttttccattctaaatagcaaaggacaggtggcatcttgacacatacacatacaagcacattcgtcccatctgcagcctacgcatcaccgcatactggtaacaaggtactgctaaacatcagatcactccggacagtcagtctatgccttcttaggggacttggcggccttcttgggcgactttgcctccttgctcccgccactggacgccttctccgccgtcttcttgggcagcagaacagggttgatattggggagcacaccgccgtgagcgatggtcacgccgcccaacagcttcccaagctcctcgtcgttccggatcgccagaagcacgtggcgcggaataatgcgagtcttcttgttgtccctggcagcattaccggcgagctccagaacctcagcggcgaggtatt

SEQ ID NO: 15990 - DNA, 435 bp, Zea mays
  Clone ID: LIB3150-072-P2-K1-G7
attccaacattacaggttttttttaatatttatgatcaagagacaaaagggggctccatcagcataggataacaaaatgtattaatcccaggaagtttagcttcaagctgtggagacaaaagtttcacggtatcttattaatgagatagcatcaccgaaagaaaatccacgaataaccccagaagcagcttaggcagacacaccaccacggcggcactcgttcagcatgtctaggtagaactggcacttgctgatctcgctgccatagttgttgagacaatcttggaaagccttagaatggatgctgcaagcgtcagcattcatcactggaggggcaggggcagcagcagcagcttctgaggcaacagtctcatgctgaatggtccggggacctaatacagcatcaacagccctgtgtgccatggcactacccgt

SEQ ID NO: 15991 - DNA, 440 bp, Zea mays
  Clone ID: LIB3150-072-P2-K1-G8
caaccaagattcaaactcttttttatacataattttaacttatttggtagagtaactctcatattatagtagtataaaagaaattataagagtgaggttgattctaaaaaaatgtaagaggtcttttgaaaaatattgacgcgggactaccgttgaaactggtgctttaatatagtaaagaaacagatttaggtgatgtttaagctgaaaacgcgaaattcggtggcggacctaattttataaaaccaaaattcaaaactcagctatctatcaatgcatggcctgccctacagttcgtccttgacaccatccgtctggatgctctcccttcttgactcctggcgcttcaacttgaaagggatgctagcatgtttcttgatgaacctgtacatatctaccactgtccgctccccctcaaaagtgacaggctcaaagctttt

SEQ ID NO: 15992 - DNA, 214 bp, Zea mays
  Clone ID: LIB3150-073-P2-K1-A3
cccgctcaattacaacattaattaacacggactaacaaggggatcgggggcgtccctttttatcttttacccaggcttgacacaaacaactcttcaaatttaaaggccaaattacaggtaatccaaaattggactattgaacatcgatcgaactctttaaatactttacacaaaagctatttagctttacaccatcatcttgtcacacaccttc

SEQ ID NO: 15993 - DNA, 354 bp, Zea mays
  Clone ID: LIB3150-073-P2-K1-B3
cccaggaatgatttaaattatcgaacggggggattggattacattcaaaacaacttaaaaaatactactaacaatagtccaacacgtcacaaacaaggaactaaacaaaataaccctaacaacaaacaggcttccacaacagcaaggaaaaaaggcatccaccctaccctccaaacccgaaaagggttcggccctggcccttgaacccgtaaacaacctccatggcggaaacaattttgcggggtgcgttctcggtgtaggtaacggcctcccggataactttttcaaagaaaatcttgaggacccccggggtttccttgtaaataaaccccgaaatgctcttaaacccccccc

SEQ ID NO: 15994 - DNA, 256 bp, Zea mays
  unsure at all n locations
  Clone ID: LIB3150-073-P2-K1-C9
atcaggctggaaaaaaaaaattgggggttgtcacatncacacaaacataacaaaataaaggtgcccaacaacaaaaaaagaggatccacaaataaccaactacctggattcaataaacatttttacttttccatcaaataacaatttctaccggaggaaaccaaacacaacaacacctaactacaacaagacacccaaacatactagtgaaccctccaagcggagcccacccatcctaaaacaaagtaaacttttt

SEQ ID NO: 15995 - DNA, 364 bp, Zea mays
  unsure at all n locations
  Clone ID: LIB3150-073-P2-K1-E11
aaatcaaatactattttttaataaagtgaatattagataagtaattgggacgggagtttaacaatctggggagggctgatcnatagtgcatcgctcttgtgtatttatatctagggtagatatgcttagcggggaaaaaatactaacgtccagtgtccagaggggccctctgtttttgggggcccggtgcgaccgcacccgccgcaccccctcatggccggccgtggcccagaatagaattttacataaacagcactaacaacacttgatacatcctcacgtgctctccttgctacttgatgcctcaagccccttctccgcgccacctaccgccgtcgccctgggggttgcaggtgggggctta

SEQ ID NO: 15996 - DNA, 358 bp, Zea mays
  Clone ID: LIB3150-073-P2-K1-E3
aaaagggaaaaaccaaaaattgagtgggggttaaaaaaaattacattttccgaatttaaaaaaaaataaccataatttttaattcacccaaaataactaaccgaaaaaaacccttttaaattggaaaaccttgccacctttttttttttttgccttttctgtaaaaaaaaaaacccaattaaccctttttccccgtggcaagaccaaatcccaaatccaacctttaaattattcacgggggtccctttattttaaaacttaaacccttttttcttggaggtacaccttttttttcaaaaatacaaattttaaaaatacaccttttttttaaatgctctaaacaaaattattttttttt

SEQ ID NO: 15997 - DNA, 372 bp, Zea mays
  Clone ID: LIB3150-073-P2-K1-F12
aataggtgctaaactttatcactgctctttcaatatacttgtttgatgtcatgttctaaactttgggtgggggttttaacactgtaaaaatacaaggcctaaatatccaacgactgttgcagattgttgtcgcctctgtttcacattatgagggactcctatgttcatcctctataagagattcaggaagagccactctattgggattatggcttgtagcgcacaagattgagaagcaaaagggagcaggatacccgatcttttaacaaagaattacttcagacatcccgcaacattgtagaaatgataaggttggtacataataaaaatttcttaatagttacagtaagctcaacctataaagcaacgttc

SEQ ID NO: 15998 - DNA, 412 bp, Zea mays
  unsure at all n locations
  Clone ID: LIB3150-073-P2-K1-F8
gacagcattaaatatgtcaagtgctaaatggtgatatggtttaaaataaaacggctggggggtgatnttacaaaaaaggcctaatgaggtggattggtagtgatttaaaaaggtaaaaattgttccgccaatacaacattgttggaacaccaatcagctagttacatccaagatgaacaaagaatcatggcccccatgctcaagtagctgaaaaaacactgaaatacaaaaccctgtaaagcaacaacggcctgtgtttttccacggcgcaatggcaaaaccttatcagtcaaaactgaaacctgaaatatctttaacaagtcaacatacgcgcgaaaccgactgcataagtatctcatgtgcgctcacaacaattgttttggcaaaattactcttctaccggcattccaaa

SEQ ID NO: 15999 - DNA, 119 bp, Zea mays
  Clone ID: LIB3150-073-P2-K1-F9
gttaataataaataaatttgtttaaaaacaaacattctaaatatacaattttttttctatcttttctcaaataaattttttttatatatccctatcaattcattttacctttttttttt

SEQ ID NO: 16000 - DNA, 366 bp, Zea mays
  Clone ID: LIB3150-073-P2-K1-G10
aatattataaaagtaaatattcagaactccagctccaaactaacgggaacaactttggtcggggggggaaacttaaacaaaaatgcatgttgcacgactacaggtagcgataaatgccatagcacaaatactgatcgccgcataagatagcactacttcgatgggaccaaactttactcgtcatcctcatcgtcgtcatctgcgccgcccgaggagttgagttggttgagcctttcaatgagactggccttcctctgctcgtatgtcaagttcttggggttgtacctcttgtgctcctttggtggctgcttggttgacttgaccacaaaaagatcagcacggatggcagcatggacctttttgtac

SEQ ID NO: 16001 - DNA, 273 bp, Zea mays
  Clone ID: LIB3150-073-P2-K1-G12
gatcaatcaaaaaccaacaggataaatttgcattagacataaccacatttcgtggggccatctaaaccaaataaacatttttgagccgatccttttccaaaaaaacttttcgtaaacatctttaacaatccacgtaccgtagtttttgtaaaataaaagacactaacctttataacaccaaaattgatcagggccctccaaaattacaaagtacttgactaaaaagctgcaactttgttgcaatacttaacttctttgctttcttcggtgccc

SEQ ID NO: 16002 - DNA, 404 bp, Zea mays
  Clone ID: LIB3150-073-P2-K1-G4
cagtcctatacgagtcaagaattattctcttcgtatagagaggttcaaataagtgagtaaaaccaaattagggttgtggaagataaatacttgggtgcccaagctttaaagcaccagtatacatactcgtagatacagaagcatagcagcagctcagctagcttgcaaagcatcaaagcgaatttgtacagaagctcgtcccaaacgttgaagtcagttctgtgcatggtgacggctgcacgtcgagagcgccaccgctgacagcctctcacttccacggccagacaggtgcgccaccagtgaacttgacgttcgacaggcagatccttgagaaggccgagttggggatgcccttgatcagcccaaccttcctgaactttttgccctggacattttttaccgta

SEQ ID NO: 16003 - DNA, 372 bp, Zea mays
  Clone ID: LIB3150-073-P2-K1-G6
aactcgaaaaaacaaattttattcataaacaaaatgggttcacagatggttctccatacgtacatgctcgttgtggtaaacccaactgaccacctaaagctgcatacttacttattcagactgatccaacatgtggcaacgtcggaagttcacatgcttacagacgacaaattttcataacaatagcttggcttggctgcttcacagaataaccaaacgacaaccacgaaattgcgacgatataaaataaacaactcagaagcaaatcgaccccagaagcccgtcttactcatcaagcactcccgccttctcctccatggcatccgcttcctcctcccaacatagaagattaaccagtttgtagtccttctt

SEQ ID NO: 16004 - DNA, 272 bp, Zea mays
  unsure at all n locations
  Clone ID: LIB3150-073-P2-K1-H2
aaaaaaaacgcgggcccaaacanncaaaaaaataaaacacccttttttttttttcaaaccccacaaaaaaaacaacgggggccttgcaacaaacaaaatcaaatcgacccatccccaccaaggcgataacataacatattttcccccgcggcccccccaggaattacttaatttaaaccggccctggcccccacccaagggtggttccaaaaaaaacaccttgcccgaaaagccccaccccttaattgcctaaaaaaacattttttaaaacc

SEQ ID NO: 16005 - DNA, 233 bp, Zea mays
  Clone ID: LIB3150-074-P2-K1-A10
ggacaagaccaatctcatatctgagcagttctttttagtaataagaatggccatatttttcaaaaaccaactcctgcataaaaaggactggtataccgagataatctcaatagggtacactacaaactgaaaatgcaattactaaaaaaagcttcactcgctgagttttgtataaatctcttagcacgccttaatcatccaaggacagggaatattctttttacttgttcaaa

SEQ ID NO: 16006 - DNA, 241 bp, Zea mays
  Clone ID: LIB3150-074-P2-K1-A6
ttttttttttttttttttttttttaagggcgactttttgccttcaaataacaccgattcgaggcggtctataaccagatgccgaaggtcaaaaaaaaaaaaaactttttgttactatatattgagaggatcataaaacccttcttttaattttgagctgctaaagcattatattcacttggggtaacttcggtttgacctaaaacttcaagtgggtaaatggggattctaattattcttcc

SEQ ID NO: 16007 - DNA, 229 bp, Zea mays
  Clone ID: LIB3150-074-P2-K1-A8
caggaaaaaataaaaagtggaattcccccctcaacgagggggtagtttttacccttcattcaccacacttttcgtatcctttggattaaaaataatgttaagctcgacagaatccaaacattaaatccatccaaatttaccctgttaaattacacaaatgcttatcctgcgtattattttgttgtaaatacctttctaatttcaaagtattattttatcctgtcccccc

SEQ ID NO: 16008 - DNA, 352 bp, Zea mays
  Clone ID: LIB3150-074-P2-K1-B2
aatctataaacagattgcacaactcacgagagagctggttctgggttttgatggcaaaaaccgactacaaaaccaaagatcaacagcattgtagataactcagttatcaagaccctgcgacaggcttatatttcgataccaactcggtcaataatcctgctcaaccttcacactctgcagcttcgaattcagctcgtcctcattatcctcaacctcttcatcgtcatcatcaggctctccatcaggctcattctcatctagtgggcccagcactttcaggggtttcttaccagccttcaaaattttctccaccttatcgatcccttcaccagaaatgaaaatttcattgatg

SEQ ID NO: 16009 - DNA, 367 bp, Zea mays
  unsure at all n locations
  Clone ID: LIB3150-074-P2-K1-C4
atttttttttttttttttttttttttttttttttttttttttttttttttttttttttttggtttttttttaaaaaattttggtggttttttttttttttttttttttttttttttttttttttttttttttttttttttttaaaaaaaaaaccctttttttaaaaatctcaccattttttaaaaaccccccatattnttcccccccccttttccaaaaccctaaaccaaaaaaactttttcccccaaaaataaataatcccccaaatcctccccctcataaaaaatatttccaaaaaaaaaaaaacaaacccccctaaaaaaaaaaacaaacttctatattatataaaaacttcacttctccttat

SEQ ID NO: 16010 - DNA, 290 bp, Zea mays
  Clone ID: LIB3150-074-P2-K1-C9
ggagaaagaaaggggtattttcatcgacggggtggaatggaaaatcccccacaggcctaaggggaggcatatgatgagctaaaccccttttcaaatcacaacagctggcatgatgtgccgtccctgctactgctgctagctactagggccctaggcacagccaagggccaacgaatgatttatcaccgaagccaatgggtcaaactgctggtgttaccaaccggccgccgtttcattttcagatgaaacatcgtgcttggatgacagcttctgtttccggccgttcctcc

SEQ ID NO: 16011 - DNA, 244 bp, Zea mays
  unsure at all n locations
  Clone ID: LIB3150-074-P2-K1-D11
ataaataannaaaaacacaaaacacggggttatacatacacaaggggggcatccaaaataacacnacacaacccctcttccaatttaccccccgtttcacccaaatatttccctaccaacccaacaataattaacaccctcatcaagaataacttttaacttgttaccaccaaaaatttttttctcatgaccatttaacatcacctctaaaaaaccaaaaaaaaaaaaaccccacattttattt

SEQ ID NO: 16012 - DNA, 416 bp, Zea mays
  Clone ID: LIB3150-074-P2-K1-D5
attgtggttatataaaaaaataagggctggttttaaataatttatatataatataatttatattatatataattatattaactaatataataatttattaaatattaaaaaaattataaatttaaatataaatatttataaatttataaatattctataaacttatattattatttttatttataaattattaatatatatataatattataataaatctattattttatatcttataaaatacattattatataaataaatattaaatataatatttattataatacaaaataataataaatataacatataattatatatataaataaataatacaataataatatattttactatataaatttaacataattattaattatttattaatatatattatctaattactatatat

SEQ ID NO: 16013 - DNA, 482 bp, Zea mays
  unsure at all n locations
  Clone ID: LIB3150-074-P2-K1-E7
tttttttttttttttttttttttttttttttttttttttttatttttatttttttatttttttggtttttataaaaaaattggaggttattataaataatatttattatttttttttatatttttttttaaaaaaaaaaaaaaaaatacttttttttaaaaaaaaaaaaaaataaaaaaaaaaaaaaaaattaaaaaaaatttttaaaacccccccaaaaataaaaaaaaaaatnatcaataaaaaaacaaattttttcaaattataattaaaataaaaaccttttattaaaaaaaaaaaaatttctccccccaaaaaaaaaaaaaaaaaaatttatccaaaaataattttttttttttttataaaaaaaatttataaaaaaaaaaaaactatctatttataataaatcaaaaaatctaaaaaaaatttttccctaaaataaaaaaaaattattaaaataaaaaattaattttatatatttt

SEQ ID NO: 16014 - DNA, 336 bp, Zea mays
  Clone ID: LIB3150-074-P2-K1-G3
ggaatggaacttattgaacattattttgattctgcatgtcacattcgggggtattattaataaaaccaatgctattactgcaaatgatgctatggctaacagctagcagcctagcactaacacctcaccaccaaaccatgtactactacaatctttgtcctctcagtgcagcagttctttgccaaataacccaacaatggctcgtccagggcactcttgcttcaccagggattccccaaccaaatcagcaaaaacgccagcattttgaacataagcaacatcatcccgggtaaacagaccttattcaccaacaaccaaaattcccttctccctgat

SEQ ID NO: 16015 - DNA, 192 bp, Zea mays
  Clone ID: LIB3150-074-P2-K1-G5
acacaaatattggggggttataaacaaatattactaactctttcatacaaaccaaaatctcttcaaaaaaaaaccaaaacaaaattcacctaccactcaatacaaaaaattaacaaaaaaaaccctcacaattcacaaacctaacaacataaaaataaaaccccaaataaaaaaaatcactaaaattcaaaa

SEQ ID NO: 16016 - DNA, 352 bp, Zea mays
  Clone ID: LIB3150-074-P2-K1-G9
agcaagaggggctggatacatgggatgcatggttgcaaacttttatacaaaacagttttaaacagagcagtagcatggaacacaccaaattccccatgctttggtctgcatactttccgcttagctatgctgtgaactacccatctggatttgctcctctcctatggaaaccgttggagtttaatgaaacaagcaacagcaacatggtcttatgccggatgtagcatacaactcattacaaaagattgcatggaacccattaacctcttcctaatgaatgaaagacccgttcttttacgaaattattttcccagcttgttttaaatttaaacgaaaaacttttttttaaccc

SEQ ID NO: 16017 - DNA, 441 bp, Zea mays
  Clone ID: LIB3150-074-P2-K1-H10
atataatagtcacatcttgtgttgtcattaatccatgaaaaactcaaacggtaggctagatgctattaggggtagggatgccgttggccaaccttggcgtacaacgctgacatcaggaagaacagccgaacccgacgtgctggtcagctcacccaccagctgaacactggttagctcacctaccagccaaacagcatagcacagtcctgtctcaagtctacacaactcggcttattttccttataattcgcaccagattacagttcaaaagccttcaacaattccaaacaagagcaaataaaagataaggctctgcctcaacatcaaaactttctatcgcacacctggcgctgtatggtttggtgatcaggaaagaacagtcattccgtcagatcctctgagcacgattgactcaccgtcctcgcccttgaacttactttc

SEQ ID NO: 16018 - DNA, 334 bp, Zea mays
  unsure at all n locations
  Clone ID: LIB3150-074-P2-K1-H2
tttttcgccgttctcatggacctcgagcccggcaccatgtactccgtgcgctcggggcccttcgggcagagcatccgccccgacagctggggcttcngccaatccggcgccggcaacaactgggccaagggccactacaccgagggcgccgagctcatcgactccgtgctggacgttatgcgcaaggaggccgagaattgcgactgcctccaagggttccaggtctgccactcgctgggaggaggtactggttcaggaatgggcacccttgctcatctctaagatcagggaggagtacccggatcggatgatgctaacattctatgtttttccg

SEQ ID NO: 16019 - DNA, 302 bp, Zea mays
  Clone ID: LIB3150-074-P2-K1-H8
ggaacgatccgagaaatgcattcatcttcttgctgtgcttagtattcagacatatgagctaggtacaagctcattcctcatgcactatgctcttcgcagttacttggagggcatcgttccgccgccgagaatccaggggcattcggcgacgccgctgatggtggccaggttgcactcggcctccgtgacgagggtggcggcgaatcccctctgcacctcccgcgggcagcccggcaggtcctctaggcggccctccagctgcgcgtccgggcccggcgggatcgcgccgtccatgaggatgc

SEQ ID NO: 16020 - DNA, 82 bp, Zea mays
  Clone ID: LIB3150-076-P2-N2-A5
taaaagtcaaccaacccttccgtttactccttggccgaacccttggcctaaaatgggtcatttcgtttgtaagtaccattgg

SEQ ID NO: 16021 - DNA, 344 bp, Zea mays
  Clone ID: LIB3150-077-P1-N1-F4
caagcctaccaggtgttcactctccaaaattccatgtgtccagaacaaggctaatcatctacattttgcctaagactatgaccattaatgacgtaaagaagctttcagagaagcagtcatttttcgtgctacaaaacaaaatcctgtcatccggaaggtgaatatcctgaagaatgaaaagaaaggcatacataagcattcacgcggtgtagcctttgttgattttcaagaacatgaacactctcttgttgctctaagggttctaaacaacaaccctgaaacttttgtttcataacgtcgcccaattgtagagtttgcgcttgaggatgttgaaaaggtgaggc

SEQ ID NO: 16022 - DNA, 66 bp, Zea mays
  unsure at all n locations
  Clone ID: LIB3150-079-P2-N2-A1
tttttttttttttttttttttnnaaatttatttttttttatttttttttttttttttatttttttt

SEQ ID NO: 16023 - DNA, 271 bp, Zea mays
  Clone ID: LIB3150-079-P2-N2-A11
ttttttttttttttttttttttttttttttttttttttttttttttttttttataaaccgaggggcactttttaataaagaccataatgggaaatgaaacttaaagcattcctcggtacagggggtaaacaaaacctgctctttaaagcgtggccttcctacaaattattttgcataaagggtaaacttttcccaaggaaaaaaaagacctatttcgcctttttaaagagttcctttcatcaaaagggtgacggttcaaaattttccggtt

SEQ ID NO: 16024 - DNA, 207 bp, Zea mays
  Clone ID: LIB3150-079-P2-N2-D4
tttttttttttttttttttattttattttttattttttttttttttattttttttaatttttattttaattttatataaatttatttattaagaaaggaaagcccggttttttatattaaatgataaaaaaaggttacaaaaatgagggtcaggggaataaaacatgcctgtaaggggggataataaaagtaaacaagatgttttcc

SEQ ID NO: 16025 - DNA, 239 bp, Zea mays
  Clone ID: LIB3150-079-P2-N2-D6
atttaaaaaaaaaaaacaaaaaaaacaaagaaaagaaaaaaaagaagaaaagagaaaaaaaaagaacaaaaaaaaaaaaaaaacaaaaaaaaaaaaaaaaaaaaggaaacaaaaaaaaaaaaacaaaaaaaaaaaaagaaaaaaaaaaaaaaaaagaggaaaaaaaaaaaaaagcaaaaaaaaaaaaaaaaaaaaaaaaacaaagaaagaaaaaacaaaaaaaaaaaaaaaaaacaaaa

SEQ ID NO: 16026 - DNA, 183 bp, Zea mays
  Clone ID: LIB3150-079-P2-N2-E2
cgagcaaacacgaccatacatttattgcgaccgtacaaacattgtaacaaaaggcactagcgagttaaaattattatacaagaaaacattcccattctattcctttcttagtaggggttcactgaagacctgaactttgcttcggaaaaaacagatgcataaacttgtttataaaaagatcct

SEQ ID NO: 16027 - DNA, 76 bp, Zea mays
  Clone ID: LIB3150-079-P2-N2-H11
tttttttttttttttttttttttttttttttttttttttttttttttttttttttttatttattttttttttattt

SEQ ID NO: 16028 - DNA, 202 bp, Zea mays
  Clone ID: LIB3150-079-P2-N2-H8
ttttttttttttttttttttttaaaattgttgtttttttaataattttgtttaattttttaaaaagaaaaaaaaccttggaccccattttgaactttatatatcaatcaaacaatttttggactaaaatttctagaaaaatattctaaaataacttcccgtattaaactcttaattaaataccttcaggaaaaattcaactt

SEQ ID NO: 16029 - DNA, 383 bp, Zea mays
  Clone ID: LIB3150-080-P2-N2-C12
gcggaaaaatggttcaggctcataaatggatcttatacatagatagtttaaatcgggaacaggtcgattacctaagaggctcataatgcgacttcttcatctgagctagacacgatcatatgctaccccaaggtgccaagcaggtgctttccaatcttccagtttttattccctagtccctatgttcatagtcctatggccaagcgttaaaattcttaaaagaaattctccagctattggcttgtcatcgaatgtccagaggtccatattggttccaatatcctgtgatccattcaaggttcagaaggctataaattggatctcttgcacctgtctttcataagaaaccttatttggtatccaatatttgtcatcccatcatt

SEQ ID NO: 16030 - DNA, 380 bp, Zea mays
  Clone ID: LIB3150-080-P2-N2-C5
gttgaaaaaaaacaaccacataaaatggcaacagaattgaacatatccaaacatagcagttatgtaaaggctgataataccacaagataaaatggaccatccatgacacagagtcagcacaggggactctgcgtcagatcacacagctaagcactcatcattcgaacaagttcaagaaaactagataatattattatattggtgtaacactacttgtccatcctcactcctcatcctcatcaccagcatccccgccaccgcttgccttcttctgattctttctcttcacccttcctgcggggcctccaccgaatgggcttgacagtgaaaagtcaatgtgcttctcagactccaccctcaccatgaatgatgggacgttg

SEQ ID NO: 16031 - DNA, 105 bp, Zea mays
  Clone ID: LIB3150-080-P2-N2-D4
agccgagcaacgcgtcatgaataagagttaacatcgctcccatttcacattttgagatcaggaacatccaagttgcgctattattcttagaattgggcattttcc

SEQ ID NO: 16032 - DNA, 118 bp, Zea mays
  Clone ID: LIB3150-080-P2-N2-G11
ttttttttttttcttttactacttctttttttatttttattctttatcttattcattttattaattctcttttcattactctctatccaaaaaaaaaatatcatttccctttatttct

SEQ ID NO: 16033 - DNA, 88 bp, Zea mays
  Clone ID: LIB3150-080-P2-N2-H7
tttttttttttttttttttttattttaagtgggttttttttttttttttgtaggttttaaaaaatttatttttttttatttaaggggg

SEQ ID NO: 16034 - DNA, 139 bp, Zea mays
  unsure at all n locations
  Clone ID: LIB3150-081-P2-N2-C11
tttttttttttttttattgnaaactttccaagattggcttctttcatatttatttccatcaattattcctgaggacaaacccaaaaatgacccccaataatgcatgtatacgctgatcctacttaacaatggcaatatc

SEQ ID NO: 16035 - DNA, 205 bp, Zea mays
  unsure at all n locations
  Clone ID: LIB3150-081-P2-N2-C5
atnataatgcaaacctgccaaggggnnaanntttaacaaattanccgggggtaaaaagccaagggaacaacaatggcctacattttaagtttgcggtgcatgtgttatttgcggaatccctttaggatgccctagatgactcatgtgagactggttttaccccatggtgaactcaataattgttgcaaggaatttttcttttacc

SEQ ID NO: 16036 - DNA, 226 bp, Zea mays
  Clone ID: LIB3150-081-P2-N2-F11
tttttttttttttttttttttttttttttttttttttttttttttttttttttttttttttttttttttttttagaaagcaacaaagactcgatggattttatattcacattgctttaagcgattttttcacaaacacacttagaaacacattggattaaatatgcagcataaaagggttgatcgaactttgatttttacaatggcttgttttccataccttaacg

SEQ ID NO: 16037 - DNA, 103 bp, Zea mays
  Clone ID: LIB3150-082-P1-N1-C9
gcgctcacttttgacagcgggcgtcccgttaatgggggaccggttcctgcaggcggggacggcccccatatagcgagtattattagaccttgaccataatcat

SEQ ID NO: 16038 - DNA, 61 bp, Zea mays
  Clone ID: LIB3150-082-P2-N2-A10
tttttaaaattttattacttaaattcaaaaaaaacgataaaaaaaaaaactacaatttaat

SEQ ID NO: 16039 - DNA, 64 bp, Zea mays
  Clone ID: LIB3150-082-P2-N2-B10
attaattttttttttttataattataatagggggttttaaggggtatttgaccacataagcata

SEQ ID NO: 16040 - DNA, 480 bp, Zea mays
  Clone ID: LIB3150-082-P2-N2-D3
attattaattaattattaaattatatatggataaaataataaaattataaattattaataaaaataaataataataaatatataattataattatatattaataataattatttaaaatttattttattttaaaatattaaattaatttaaatattatattaaatatatataatcaataaaattatatattataattaaataaattatgttaataatttaataattataatatattattaatataagttaattaataaataatattataaaaatataatataataaatattaaagaatattaaaaatataataaatattgtaataattatttaaaatatattatataaataaattacattgataaatatattataataaaaatatatatctataatataaaatatatatagatatatattatgagaaatattataattaataaaatattttatataatataaatataatattaatataat

SEQ ID NO: 16041 - DNA, 103 bp, Zea mays
  Clone ID: LIB3150-082-P2-N2-E10
ttttatttgattttattattttattatttttgttttttataaaatttagtattatttgttataatgtttttaaattttttttttttatttttttttttttttt

SEQ ID NO: 16042 - DNA, 226 bp, Zea mays
  Clone ID: LIB3150-082-P2-N2-E3
atattttttttttttttttttttttgacaccaaagatgaagttccactggaatgacgggaccaattatgatttcttttcccgttaataatttggtgtagttataatgaaatcatgtaaagaaaaatcatactcagctttttactagtcactattgtatttacgatgactctgcatgtaacaacttcagtttattgatatctgtcattgtcagttctttatatcttt

SEQ ID NO: 16043 - DNA, 78 bp, Zea mays
  Clone ID: LIB3150-082-P2-N2-F10
ttttatattatttcttatatatcaagaaaaaaagtaagattttaatgtatagacaaatgactaataatttcaaaccca

SEQ ID NO: 16044 - DNA, 62 bp, Zea mays
  Clone ID: LIB3150-082-P2-N2-G9
ttttattatttaataaaaaatattaatgggggtatattaaataataaagagttaaataatta

SEQ ID NO: 16045 - DNA, 56 bp, Zea mays
  Clone ID: LIB3150-083-P2-N2-E6
gccacacaaccggggcgatgtgtttactggtataagaactatagttataaacattg

SEQ ID NO: 16046 - DNA, 385 bp, Zea mays
  unsure at all n locations
  Clone ID: LIB3150-083-P2-N2-F2
aaattatattttaaaaatttttaaaaaaatttaaataanaataaaaaaaaaaataataaaaaatatatatataaaatttatatataatttatattataaaaatataaaataaaatatttttttaaaaaaaataatatttaaaatataaaataattattaataaattaatttaataaaaataaaaaattattatatttatatattttaaatatattaattaatataaataataattaaaataatttttatataatttaaaataaattataaataatataattataaaattatatattatattataatatattttaataataatttataataaaaaataaaaatattatattataatatataatatattatataaatttataatatt

SEQ ID NO: 16047 - DNA, 161 bp, Zea mays
  unsure at all n locations
  Clone ID: LIB3150-083-P2-N2-G1
tttttanttttttggaaactaatttattaaaatagggaaaatacttataatttgaagaccattaacaatctccctcaaattgcttacttaaataaaaacgccttatcaatctaacaatataatttttattaattcaatcattcaaacaatgtaggcaaaaa

SEQ ID NO: 16048 - DNA, 334 bp, Zea mays
  Clone ID: LIB3150-083-P2-N2-H8
ttttttttttttttttttataatttatttttgttttttttttttttttatttattatttattatatttttttttctatttttattaattatttttttatttataaaatttttatttttaatatcttattttttttttatttttaacaagggaacaaaaaaaattttttaaggtttattataaacattaaaaaaacaatgttctaccttaataaagggtaaaagttagaaaaaaaaaaatttgcagactttaattttgataattaaaaacggcgggacaaataaataaaattaattcttcaaaaaaataatatttaataaaacgttatttacttt

SEQ ID NO: 16049 - DNA, 189 bp, Zea mays
  Clone ID: LIB3150-084-P2-N2-A6
tttttttttttttttttttttttttttttgggagggggttgtatttaaaatttttttttttttataattatttttttttttggggaaaaaggttataaaaaaaaaaaaaaagtgaagatttaaaaaaattaatgtaataaattaaaaaactaattatttaaaaaaaaacaagcctggttaatttttttg

SEQ ID NO: 16050 - DNA, 340 bp, Zea mays
  unsure at all n locations
  Clone ID: LIB3150-084-P2-N2-B1
tttttttttttttttttttttttttttttttggttttttttttttttttttttttttttttttttttttttttttntaaaggccaaagcccaacttgaatttagtaagatttagggctttttttttttcgtcggattggacccgaaattgttcccgcttatcaaaggtttttttaatttgataaacaatccgggcaggaattgtttcgacccaccaattcgggagaaaagaaaaagggcttacaaggaaaaaaattctttgtttttcagtttaaaggccttaaaaaaggggggctttagggattttgaacttggttttcttgcatgaattttagctgtcc

SEQ ID NO: 16051 - DNA, 280 bp, Zea mays
  Clone ID: LIB3150-084-P2-N2-D7
ttttttttttttttttttattttttttttttttttttttttttttttttttttttttttttttatttataattatttattttttattttatataaaaaaaaatttaattaataataaaaaaaaaaaaataaaaaaaaaaaaaaaaaattattataatattaaaaaaaaattttaaaaaaaaataaaaaataattattaaaataaaaaaaataaaatataatatataaattaaataaatatataatattaaattaaattataaaaaaaataatatattaat

SEQ ID NO: 16052 - DNA, 151 bp, Zea mays
  Clone ID: LIB3150-084-P2-N2-E1
ttttttttttttttttttttttttttttttttttttttttttttttttttttttttttttttttttttttttttttttttttttttaaaaaaaaaaatttaattaaaaaaaaaataaaaatgaataaaaaaaaaaaaatatttggttttat

SEQ ID NO: 16053 - DNA, 409 bp, Zea mays
  unsure at all n locations
  Clone ID: LIB3150-084-P2-N2-E11
ttttttttttttttttttttttttttttttggtttttttttttttttttttttttttttttttttttttttttttttttttttttttttttttttttttttttttaannnnnntttaaaatttaaaaaattaaattaaaagttnnggccaaattaaaaaaaaaaaacaaaaatggcccattcccaaaaatttaaaaaaattcaaaaaaaattttttaaaccagaaaatttcttccacatttcggaaagtaaaaaaaaattttaaaaaaatttttaggaaaaaagttttaaaaaaaaaaaaattagccaaaattttttttaacccaataaaaaaaaataaacccctttttttaaactttcttggttagaaataaaaaattgcccttttttttaaagggtttttctttttc

SEQ ID NO: 16054 - DNA, 193 bp, Zea mays
  Clone ID: LIB3150-084-P2-N2-E5
ttttttttttttttttttttttttttttttttttggttttttttttatttttttttttccaaaccaaattttttaatattaaatcttaaaaattaaaaaaacttaaaattttaaaaattacagggccaaaattttaaccccaaataatgttaagtaaggtgggaacaacacccagaaaccctttgcacttttt

SEQ ID NO: 16055 - DNA, 58 bp, Zea mays
  Clone ID: LIB3150-084-P2-N2-E6
ttttttttttttttttttttttttttttttgtttgcgttttttttttttttttttttt

SEQ ID NO: 16056 - DNA, 159 bp, Zea mays
  Clone ID: LIB3150-084-P2-N2-E9
ttttttttttttttttttttttttttttttggtttttttttttttttttttttttttttttttttttttttttttttttttttttttttttttttttttttttttttttatattgtttttttttttttttttttttttttttttttttttttttttttt

SEQ ID NO: 16057 - DNA, 60 bp, Zea mays
  unsure at all n locations
  Clone ID: LIB3150-084-P2-N2-F2
ggatctcaacgcgttacgtaccgcnngtgcatnngcgacgtnncatagcttcnnttctat

SEQ ID NO: 16058 - DNA, 223 bp, Zea mays
  Clone ID: LIB3150-084-P2-N2-F3
ttttttttttgggttttttttttttttttttttttgttttttttttttttttttttttttttttttttttttttttttttatttattttttttttgtttgtttttattgttttttttgttaatattaatgggattaaaaattaaatgtggggggggaaaaaaaaaaaaaatattttgtccccccgggaaaaaacccccacaaaaaacaccccccccccggttt

SEQ ID NO: 16059 - DNA, 139 bp, Zea mays
  Clone ID: LIB3150-084-P2-N2-G3
tttttttttttttttttttttttttttttttgttttttttttttttttttttttttttttttttttttagcccgcttgggatgtgaagcaaagattcatttcaacaagggttgccgtctgcgttgtattagcccggggg

SEQ ID NO: 16060 - DNA, 336 bp, Zea mays
  Clone ID: LIB3150-084-P2-N2-H6
gcgagtggcgggcgcccgtcgtctttttttttttttttttttggtagatagcagagattttattggtgcgatttacaggttgcgctcataatttttacattattacacacggaatcgcgactcggaggtcgagtcaccactgccggccccggcgcggcggctacctaatcctactacattcctacgtcgccatgactcactagcctcgcgtccttatgatggttatggagccgcgcccgggggtgtgcaagcgcgtgaagcccgcgacggccttgcccgagatgcccggctggtccgcggacacgcgccgggcgcacgcgaacttgctcacggggt

SEQ ID NO: 16061 - DNA, 146 bp, Zea mays
  Clone ID: LIB3150-084-P2-N2-H9
tttttttttttttttttttttttttttttttttttttttttttttttttttttttttttttttttttttttttttttttttttttttttttttttttttttttttttttttttttttttttttttttttttttttttttttttttt

SEQ ID NO: 16062 - DNA, 221 bp, Zea mays
  unsure at all n locations
  Clone ID: LIB3150-086-P2-N2-A7
tttttttttttttttttttttttggggttttttgtgtataatataaaanattattaataaatttaatagttaggagaggaaaaaaatatagttaagcctattattgcttaatttgttgaatatttggggaggccaaaaaaaacccggggaaagtcgtaaagggattttgacaacccttctgtttctcaaaatttttctattagggatttcccccagggggc

SEQ ID NO: 16063 - DNA, 304 bp, Zea mays
  Clone ID: LIB3150-086-P2-N2-B11
cccgagagcagagccagcccttttttttttttttttttttttttttttttgttttactttttaaatattttgtaaatacatatttttcttttttaaatttatttatttttttaattaatttattatttttttaaaaaaaaaaaaaaactcaaaaaattagtacttttccagaaacaaaaaaataccaatgtcttaaaaaaaaaaaaaaaggtgggcccacaaaaaaaaaaaaaattcaaaaattaaaacaaaaaaaaaaatggggggaaagggtccccccctcattccccaaaattatcaaaaa

SEQ ID NO: 16064 - DNA, 137 bp, Zea mays
  Clone ID: LIB3150-086-P2-N2-B2
ataaacgaaaaatgaaaaaaaaatataattttttaaaaaaaaaaaaagttaacaaatttttaaattatttaaaaaaaaatatggtttattaaaaatttcttcaaataaaaataaaaaaattcatgtgccaaattttt

SEQ ID NO: 16065 - DNA, 227 bp, Zea mays
  Clone ID: LIB3150-086-P2-N2-C1
gcaaaaaaaattaatgtgttaatttatatatttattttatttttttaaaaaaaaatattatcatttttttattttaattttaaataaaaagcatctattttttttttttatctaattaaaaaatatatttgaccttaaaaaatatgtttattattaaaaataataaattatcttttttttttttttataaaattttggattaataaataaaatggatttatattttt

SEQ ID NO: 16066 - DNA, 252 bp, Zea mays
  Clone ID: LIB3150-086-P2-N2-C2
cttataaaaaaggaaaaatgtttaaattgaaaaaatttttttttttttaatataaaatggtaatattatagattgtaaaaaaaaaaaataacaacatagggggaatggggaaatattttatttaatattatcgtcataaaagaataaaataatgttttatgatagggtttaattataaaaaatatttttttttaatgtataaactcattttatttaaaatttagttatatagttgtattttattttaaatat

SEQ ID NO: 16067 - DNA, 85 bp, Zea mays
  Clone ID: LIB3150-086-P2-N2-C4
ttttttttttttttttttttttttttttttttgggggatttaatgtaattttttttaaatttttaactttaaaattttatttttt

SEQ ID NO: 16068 - DNA, 129 bp, Zea mays
  Clone ID: LIB3150-086-P2-N2-C9
ttttttttttttttttttttttttgggatgggtgttttttgggggggggaagagtaataggtttgagatatttaatatggaagggtaggaaatgaacggagaaaagggtgagaagaaaggggggaagag

SEQ ID NO: 16069 - DNA, 178 bp, Zea mays
  Clone ID: LIB3150-086-P2-N2-D3
aggttcactttcttgcaatccttcattttttttatttctatctcttaaattcaattaattttctttttttttgaaaaaataatctcaccaccccccaaaaaaattatctctcccactaaaaaacccaaactcctttttttctttcccaaatcttctaatttttttttggcacctcttt

SEQ ID NO: 16070 - DNA, 205 bp, Zea mays
  Clone ID: LIB3150-086-P2-N2-D6
ttttttttttattttatattttttttttagggatatatttttattgttgtaaatattttatatatttaatattataatttatataataattttttatattattaatttttttttaaaaaatcgaaaaaaagtacctttataataaaaaaaaaggtgggcgaaaaaaaaattggggagaaaaaaaaaaaacacttgtgagaagggg

SEQ ID NO: 16071 - DNA, 363 bp, Zea mays
  Clone ID: LIB3150-087-P2-K1-A1
ctcaccatagcggcggaaacaaccaatttgcaccacaacaatccgtgacacgttcaaaaaaaaattcgaaacacacaacccaaattttgaagtacacaaaccacagccttgttttgctacatcgaacgcatagcccgtctctaaacaaaataaggttaggcctacttccaccgacacttttttgagactttcgtttaccctcctttcccatgtttcgcatttgttgttgactctattggacctgcgactcacttgcccccttgctttgccttttgagtgagcctgaagtgccgtcttactgatgaatgacttgctggacgattggcaagggaccccagattttggcgcagttttttgagactt

SEQ ID NO: 16072 - DNA, 297 bp, Zea mays
  unsure at all n locations
  Clone ID: LIB3150-087-P2-K1-A10
gttgggggtttntttttagagattacttccacttgatttaagtaaaatagagggaagtgtatctgtagtagacagcacagataagcatcccgatacaaccaggtacctagcaaaactcttttcttgccctattacaaagattcaggtacgatagttacaaaaagtgcaactcaacatgatccttttttttctggcacgccagtgatattgtcaaatagctacacaacacctggggctgacaaatttaatagccctgacatattaactttaataattcacatttgtacccaaagatca

SEQ ID NO: 16073 - DNA, 293 bp, Zea mays
  Clone ID: LIB3150-087-P2-K1-A11
cactattccaattctatattgggtagttttttaaacacctaaaaccgcccccttattcccttaccattaccaaaattttcaacacattacataaaataaccccatatcaaaactaacattcatagcttttaaaaaattatacccaaaaacctaaacaacccttacctaaacaaaattcaaaatatataagtctcactaaaatcatttttttatctatcaaagcccttccctaaaaaaaatcacaatcttttatcatgccaaaaacacagctcgatttgggcctaaataaaaat

SEQ ID NO: 16074 - DNA, 96 bp, Zea mays
  Clone ID: LIB3150-087-P2-K1-A6
ttttttaataaagaaggaaattaaaaaaaaaaatttttttataaaataaaaaatataaataatagggggggggtttaaaaaaaaaaaagggggggg

SEQ ID NO: 16075 - DNA, 196 bp, Zea mays
  Clone ID: LIB3150-087-P2-K1-A9
aaaccaaaaatgggttatgggattctccaagtaaacatagaaagagttttgtgttcctagtccatctaaccagctccagacataacaagaattacataaattcatatctagaacaagctcataggtgctaaagaccaatccatcagaggatatcacttaggccaccatagtgctcgccttggttgactcttacttt

SEQ ID NO: 16076 - DNA, 125 bp, Zea mays
  Clone ID: LIB3150-087-P2-K1-B5
ttttattattttaagttttgttttgaaaggtctttttttttttttctggaatggtgttattaaccaaggttggaacattgctgatgttgagggttaaggcattttatttcctcatatacattaca

SEQ ID NO: 16077 - DNA, 292 bp, Zea mays
  unsure at all n locations
  Clone ID: LIB3150-087-P2-K1-C10
aatatggggtcggtatctattacaaaacatcaagtacaagaccaagtttggaactagataatccatagaggctcaaaaaaatggatgtgtgggaaaatggcaagtgtccaagcactcgtgtctcctggaaattctaagcctaattggaaaatttagaacagccggtacacctttcccatagtgctctttaggtacaagcattttacattctgccaattctattttcaagagcgactcgaggaagntgacactcatttggcacattctggaagatctgttatttatccatgcc

SEQ ID NO: 16078 - DNA, 169 bp, Zea mays
  Clone ID: LIB3150-087-P2-K1-D12
ctttttatatcaattctttataaattgataaaccgtttttttttttttttttcttttttcactatagttggagtttttttttatattttagggcgatccatacccatctatacccaatagtaattaaaacaaaaaaagggggctattaaaaatctatctgtttggccct

SEQ ID NO: 16079 - DNA, 73 bp, Zea mays
  Clone ID: LIB3150-087-P2-K1-E10
acttttatatatataaatatatctatattattgaaaaaattttttttttttttctttatttagtttatcattt

SEQ ID NO: 16080 - DNA, 309 bp, Zea mays
  Clone ID: LIB3150-087-P2-K1-E3
aaaatagcattttttgataactaattgcagacaagtcattgttttacacagcatcattcatatgcttaactggtatcaaacaaagtgctcaacgaacagggcaccaaaaacttgctcaggaagaatccttatcttttgggcgcttaagacacagaacacgggtaccatatacctctcacatgaaaaggttgggcctggaagccttgaaagtggtccggagctttctggtaggcggtctgaccttgcgagtcacaagcgggaacttgatctcggagttgtggaaccgctttggtgttgtccctatttgca

SEQ ID NO: 16081 - DNA, 104 bp, Zea mays
  Clone ID: LIB3150-087-P2-K1-E5
acttaattatattttttttttttttttattatttttattttttgtttttttttttctggggaaaagggtctgcaaaaaacctcttattcaagtttaaagatgct

SEQ ID NO: 16082 - DNA, 269 bp, Zea mays
  Clone ID: LIB3150-087-P2-K1-F1
accggccggaattcccgggcggcgccttttttttttttttttttgttttaataatttttttttttttttttggaacaatacttttttcttttcatttaaaatggtcattcagggcattggtcacactgacactgccacccatggtgatgcgggacacattattactcaattattgccgtttaatgacctaactagcttgctagccaggggcttttctacagcacatagttttttcagtgggggacaaccccggcagcaacgtatgggca

SEQ ID NO: 16083 - DNA, 123 bp, Zea mays
  Clone ID: LIB3150-087-P2-K1-H10
tatttttttaatttttatcatttatctttatcttttttttttttttaaagagaaccataacagtagtcctaaatccaccatacacaagtcaaatgggtgggcaggtgttcttataccaataac

SEQ ID NO: 16084 - DNA, 125 bp, Zea mays
  Clone ID: LIB3150-087-P2-K1-H2
tttttattttatttttccgcatataattccatcacattttttttataaaaaaattacatagcttgcgtgcggtatatgcctaaagagaggcgggaccgtctaacaaagcgcaattatatttaggc

SEQ ID NO: 16085 - DNA, 338 bp, Zea mays
  Clone ID: LIB3150-087-P2-K1-H4
caaccataacatttttttttttttttttttttttatttttttattgttctttttattttttttgtttgaaaaaagaccgccctacaaatttcaatgaaggggggttttctcaaaccgaaaagtttgaccttttttttcccaagaaaatttccaaatcgggggggcgcccatcaaaccactttttttttggttggaattgggttaaaatttggctctttcccttcattttccccggggccgtttttcatccttacccccatcagggcctgtccaatattttggggtggcatctcttaattgtggagaggaatggcctttccccgtgtttttttttatgt

SEQ ID NO: 16086 - DNA, 143 bp, Zea mays
  Clone ID: LIB3150-087-P2-K1-H5
tttttatttaatttttaattatatctatttttttttttttttttttttttattcttttttttttttttggaaagcgggccctccatgtcaggtggtaccttctccgcgctactcgcgttgtttcttttatttcatactttttt

SEQ ID NO: 16087 - DNA, 330 bp, Zea mays
  Clone ID: LIB3150-088-P2-K1-A1
ccccggaggatgggattcacttaacctttccgatttggcaactgaatcaaggcgtttagccgtcttaccctcgaaaaagaggattgattcatcgttcatagcaataaaaaggtctggctcaaggacaaacatacaatccatccaacatttgggtccatgttaatccaggggggggggggggccttggcttactttttccagtggcccaaaattaaaggggttctgcataggtaataactttgttttttaccatttcattcattccattttttccggttgggagacatgaaacgccggaaatgcaacccaaggcaaatggttggttggatg

SEQ ID NO: 16088 - DNA, 357 bp, Zea mays
  Clone ID: LIB3150-088-P2-K1-A8
ttttttttttttttttttttttttttttttttttttttttttttttttttttttttttttttttttttttttttttttttttttttttttttttttttttttttttttttttttttttttttttttttttttttttttttttttttttttttggaaaaaaacttttttgaaaaaaaaaagggggaaaaaaggttaaaagggaaaaaaaaaaaaaaaagggttaatttttaaaaggttaaaatatttttatttttaaaaaaaaaagtttttaaaccccccaaaaaaaagaaactttattaataaataaattaaaatgaggggaatattttataaaaaaaaaaaaaaagagctagagtt

SEQ ID NO: 16089 - DNA, 376 bp, Zea mays
  Clone ID: LIB3150-088-P2-K1-B12
agaggatccaatttttagaggaaactcatataacatttaaattggaccgagtaatcatgtacttgtttcatacacacggtcctcaacacaagggcatcctcaaatcctgtgaacagacagaacctaattagggtaacagcctttctagattgaacgaacaactcaaggattgcgaaatacagaccggtcagcgttgatgacaacgctcaaggacgccaaccaaacacggacgagccacgtgggtcaacacttatcctggtcgaagtggtggctacaagaatcctgaccgttacacttatcagcgccctttaccccatttcttttcttttctttggtttcgttctttgcatgtacgatgatttcccccgagatggtc

SEQ ID NO: 16090 - DNA, 203 bp, Zea mays
  Clone ID: LIB3150-088-P2-K1-D9
aaacccaaaagcccccggttccattaattttgactaaaagggggggtcacttgattcccaactaaaaaccgggtaataaatactcctcccccccgccgagaagagggggggttaaccactccggccggggggctaaaaagccttggggggcaaaccccacgcgctgggcggtggtttattaaaaccaaggggaactgaggggg

SEQ ID NO: 16091 - DNA, 383 bp, Zea mays
  Clone ID: LIB3150-088-P2-K1-F1
agtaaaataaaagtggtgttagctaaatagagagtgataggcgcgaatgaatccaaacatcttctcaacttaaaggccagccatattctaaaaaattaaaaaaataaaaaatataatttgtagcctttaaacggttaaaaactagctaacatgatatatgtatatagattagaatatgtcatgtcgctaaagtcagcaactatcgacctaaccgaccgtctaacacgttggctccaacaattaccagcgatcggtatctaattatatgtcatacagtcattctgtttgctgcggtatggttacgcatctttgaaaaaacttgacccttccagtttatgccattacccacataaaattcacctttttacaccacctctttgttc

SEQ ID NO: 16092 - DNA, 314 bp, Zea mays
  Clone ID: LIB3150-088-P2-K1-F10
cttagcaaatttatctctgagagccccaggactaaacacgaaatattcatggtaatacgaaaacagagatggagtgtgtccgatacaacaaatcgacagctaaagcaggactattcgggaggccgagcatctagaagcggagcttggtaaagaaccacctgttcttgccggtcttgaacctctcctcaaggcgcgctttggccgtcttgcaagcggcgaccttcttgtcgtgggtagagagtgcgtcgggcccaccggtggcgacatcctttaaatcaacctccagggtgttacgggtgggcatgaagtgagtg

SEQ ID NO: 16093 - DNA, 357 bp, Zea mays
  Clone ID: LIB3150-088-P2-K1-F8
tttttttttttttttttttttttttttttttttttttttttttttttttttttttttttttttttttttttttttttttttttggagtattattataaaaataaaaatttatttaaataagtaaatatttaaaatatgaaaaataaattttttaagttaaaaaaaggaaaaaaaaaaaaaaaaaaaaaaaacggccccccaaaaaaataaaaaaaaaaaaaaagggggggagaaaaaaaaaaaaagttaaaataaataaaaaaaaaaaataaaaaaaaacaaaattgctaataaaaaaaaaaataacccattattcaaaaaaaaaaaaaaaaaaaatacccagtttattaagtgaag

SEQ ID NO: 16094 - DNA, 433 bp, Zea mays
  Clone ID: LIB3150-088-P2-K1-G1
aaagctataatgtcacaatggtgttatcattatcatacgattacttcgtacatataaagagtggcaattcaactgtaatatcaccaaggtaacaacagaaaagttggaattacagagacgggagctcccctagttcaatgagctgccgatccaatatattgacctcacttcttcctggcaacagcagctgcaattccaccaaccagaagtccgaccgcagttgtcgcaattcctattccaatcagaccatctttggcaattttatcttctattgccttcttcagcgatatggcctgccgccaatccgcttgaatctccaaacaacgatctgcaagttgcctgctttttgagtagtcgccaatcctgtagaatccaacagccaacaagtacagcttttccctagtctgcaaaggactggcagaattatccaaag

SEQ ID NO: 16095 - DNA, 336 bp, Zea mays
  Clone ID: LIB3150-089-P2-K1-B5
tttttattttgttttctttagtatattcaatctttcttgtttttgggggcagccaaaattaatgggactgcatttgcttatttggggggagagtgtttgaacaacaaagtgaaaaacaagcatttcatcaggagatggaccttcaacttgtgctgcctaactgcgaaaaagcataaacaatcgcttaaatccaaaaatggaacttgattcgtacaggactcaacaagcaagaagccgccttatgaatcatacttcttgtcgattttctcggtcttagcaaagactttcttaatgcctccaaccatgtataatgtctgctcatggaggtattcatac

SEQ ID NO: 16096 - DNA, 334 bp, Zea mays
  unsure at all n locations
  Clone ID: LIB3150-089-P2-K1-F5
gaacataaactgtngctatgctttatttttgtataaacgaaacaatcatcaaatagccttttctttaaaagggggggaggcaaacctatctaattacgcattttttccacatatatcctttcaagctttatttcattctatacattctttaaataaagtttttttttcaaaaataacacttaataatcatctccataatagctttaacatatatctcatttttaattctatgtccttaaccttacctagtccttaaacatattccttattcattactcaatttaacattcttatcctctacaccaattttttctaacccccttcttcttttttt

SEQ ID NO: 16097 - DNA, 307 bp, Zea mays
  Clone ID: LIB3150-089-P2-K1-F9
atttttttaataaataattaaaaaaaattaaaaattttttttataatagaataaaattaaataaggggggggataaataataaaagggggggtataaataataaaatagaaaaaaatagaaaaaaaaatggaaaagaaaatataaggaaaaaaaaaaaaaagtaaaaaaaaatcaaaaaaaaaaaaaaataaaaaaaaaaaaaaaaaaaaaaaagaaaaaaaaaaaaaaaaaaaaaaaaaaaaaaaaaaaaaaagtaaaaaaaacaaaagaaaaaaaaaagaaaagaaaaaaaaagaacagtggaat

SEQ ID NO: 16098 - DNA, 362 bp, Zea mays
  Clone ID: LIB3150-089-P2-K1-G10
ggaagactcgatttttagactcagaaccattgcaaactcattaactttagacaaaaaaacatgagtaccgctgtttttaagataaatgtatattgaaaaaaactggcaccactcaacaataaactcagaccaagatgtttataatagactcagctccgaacaacatttctgtaatagactagaagggataaactggcatcccagcacaaacttgacgagctgagccgctgccgttgcccaatctcagaaactgaactctagatcttgttgaaagccacaatgtcgcaactctggacgtactcattgatgggctcttgcgtaaggtggtcctcaattagagtgtcgatggacacaagatcgtc

SEQ ID NO: 16099 - DNA, 199 bp, Zea mays
  Clone ID: LIB3150-089-P2-K1-G12
gaaaaaaaatacaaatccaggtattcatgcagtttagccataacaaacatgttttgcttacaacaatctgctcatttttttcctggcaaatcactcggtgtatcaaaaactttagagctatgtagttgaaagactaatcaacacgcagtttaaccatgagcaagctttgtttaattattacagtctacgagtacttatt

SEQ ID NO: 16100 - DNA, 57 bp, Zea mays
  Clone ID: LIB3150-089-P2-K1-G3
ttttattatttcattttttaatataatagatagattttttttttaaatgtaagaaaa

SEQ ID NO: 16101 - DNA, 287 bp, Zea mays
  Clone ID: LIB3150-090-P2-K1-A8
aatgaaaagtcactttttttaaacaatttgtaaaggtaccatttctacaaaaaaagaacttcacacatgagctggtagtgccaatagcaacaagacccccaaaaattagctccacgcgatgcacacagctttcgatctatgtctgacagaggatcatatactgatctgtcatattggtacagaaattgaagctctataaacttatgctgtcaggtttcctgtctatggccttcattgatccaaatgtttacacgtttgcttcatttatctgttttatgcatttggaa

SEQ ID NO: 16102 - DNA, 147 bp, Zea mays
  Clone ID: LIB3150-090-P2-K1-C11
aaaaacgccaagcggggggcacattaactaaaactggatcacgtttgggtccatgtccgaaacatgttacatgttggatattattgctaaaatctacccagggccctccaagggtaaaatctccaggttgcattaaacagttttaca

SEQ ID NO: 16103 - DNA, 71 bp, Zea mays
  unsure at all n locations
  Clone ID: LIB3150-090-P2-K1-D12
accgaaacacattttttttgttacagnacacagaacacatatatggaaacgacacaggagctctagggccc

SEQ ID NO: 16104 - DNA, 187 bp, Zea mays
  unsure at all n locations
  Clone ID: LIB3150-090-P2-K1-D5
atttttatcttgaaccataatgcttacgggggggggttttttttatttgacgntatgaggcaagacgagggagattacctggtccatgggaaacagtttaggcaaacttcattacaaccggagcagaccaccacacggctaaatctagagagatgggaaaaaaaacaggattgcactagcttaaaaa

SEQ ID NO: 16105 - DNA, 62 bp, Zea mays
  Clone ID: LIB3150-090-P2-K1-E11
ggggtgtaaatttaataaatagtgggaatattattatttaaattaaatattaaaatagggtt

SEQ ID NO: 16106 - DNA, 198 bp, Zea mays
  Clone ID: LIB3150-090-P2-K1-E4
tcttattttttagtgcatttgtacgcgggggcgccttttttcaatccgacggagcacatacccagggggggttcactaaacaaggggccgcccccaaaacggcgaattagtccccatcgtccgactttagttgcaagccgaattcgggtggacagtggcctaaaaaaggatggtactcggtatttcgttagggaccgg

SEQ ID NO: 16107 - DNA, 215 bp, Zea mays
  Clone ID: LIB3150-090-P2-K1-E6
ctaaacgaagttttttgtaactttcttttcttccttctcttaggagcttatacgccgagcaaaagatatatatatcatacgtatgacattattattcactatgatgcctgtgtttgtccaaactgggcggtgacaacggtggaacagcatttacattagtatcgttgtaagcaagttcaacggcttgcagttattttctgcctgaagccattgaa

SEQ ID NO: 16108 - DNA, 155 bp, Zea mays
  Clone ID: LIB3150-090-P2-K1-E8
aatcaatactaatgtcaaactctatattatgatctcgagagaagaggtacaacgggataatttaacccataagggggctaactacactagctaataacttgagatgtatcaacctgaaatttatttcatgattaaccacacaaattggataaagc

SEQ ID NO: 16109 - DNA, 153 bp, Zea mays
  Clone ID: LIB3150-090-P2-K1-H2
aaaaaaatgacaaatccgggcgacgcggggctggatctcaggggatcgtggcaacaaggccactctgccacttacaatgccccggcgggtttaaagtcgtttgcaaaggattcaactcccctgcccgttgggaagggagctttaaggcggccc

SEQ ID NO: 16110 - DNA, 148 bp, Zea mays
  Clone ID: LIB3150-092-P2-K1-A1
tttataattttttaaacagatttgaacaacggaatttacattccgaaacacaccgccagcgacagacaaaggccggcaaggtcgctcccattttcacgccccaattaagcggccacaggtggccatcaaagctaaaaataaaataaaa

SEQ ID NO: 16111 - DNA, 331 bp, Zea mays
  Clone ID: LIB3150-092-P2-K1-A10
aagaagcatgaaatttgaattttagttctcatagcattatcatgaatctcagaacataacaggtgaaacacgaatcaagcagaggcgccatggggttcacagatccacacctaaaccgctaaattaaactgcgagcgattcatgataaactaagaccaccactcagatcaccaccttcttattcagatccaaaggaacggacgcagggggagtcgacgatgacggagggagggcggccgaacagaccagatcagagagatctatgagagctgttcgcagtcagcgaccttgaccaccttggaggtggagcccgttggggtggccacctttt

SEQ ID NO: 16112 - DNA, 100 bp, Zea mays
  unsure at all n locations
  Clone ID: LIB3150-092-P2-K1-A7
ananaanttatttatagataaaaatgaaaaaaaaaaaaagtaataaaaattaaaaaataataaaaaaaaaaaaaataaaaaaaaaaatttaaaaaataaa

SEQ ID NO: 16113 - DNA, 139 bp, Zea mays
  Clone ID: LIB3150-092-P2-K1-B10
ctttttctttttttttttagcatcaaatattttgtctatcttcgattataacgtcaaaacaaacgttgtgcaaggcattgaggatttcatgggcaacattgtttacttgtgtccgaatctatctaatgttcataatttc

SEQ ID NO: 16114 - DNA, 265 bp, Zea mays
  Clone ID: LIB3150-092-P2-K1-B5
tttattttattttgttgacctcggtgcagttttttttattattaaaaaaggaaggagcagcattcataggtgtagcttacagtatcgatcatcttgaaaccaaaaccaaaagaaaaaaaattacaggtgggctgggggatttgcaatgccttaaaggttattgttttttcatgtctacaggaagttttctgatgtatcaatttcctgtcataagtcatttacttattttggaactccatccttttgagttgagtcttcattgtct

SEQ ID NO: 16115 - DNA, 310 bp, Zea mays
  Clone ID: LIB3150-092-P2-K1-C2
aattgacaccttgaaggtcttatatatatttagaggacaacgcaacgagatgcatgggctttccagcatcgattaaagtatcagaaccttattgtagcatgcatgcatgcatctgccggttttggaagaaggtttattcttacattgacagccccacacatgccgcgcagtaacgagtaccccgctatcacttcactggagcatagacgacacatgttctgcttggtgtttaaaccgagaatgaatttggcctattttcatgcgaacagtcggtggtgaaatgctctgttgcgtgatggatcctgctaaa

SEQ ID NO: 16116 - DNA, 363 bp, Zea mays
  Clone ID: LIB3150-092-P2-K1-C3
tttttatttttgatcaagaagaccctgccctcttgttgattattcaagctcgttcttgcacatggcattatacatcagcatttctcattcatcaccactcctcctcacgctcaattaccgcggtcgactgtcgcctccgcaggcggtggcggcgacggctcgtcgtcggggctccagaagtcgctgggcccagagggcgggatgatcttgcgcggcagcagatccccaaccacgccatgtgacgtcgtcgacggaggcagcacgccgtccaagcaaggccgtgcattcaccaccgttgccaggagcgtcgccgctactagtaccaacaccgccaccgtcgccgtcgccccggcagtgttcttg

SEQ ID NO: 16117 - DNA, 343 bp, Zea mays
  Clone ID: LIB3150-092-P2-K1-C9
tttttattttttattttaatataaaattttttttttttttttttttttttttttttggaagataattgttcgtatttttttctgtgggaaaactttaggagttttggccgagctttctgcaaaactggatgggctcatcgaaaacctctagggttaaatgggaaagaacccccccgctttggttttggaaaatagacttaaaaggtttaccctttcgccggattttttcccaatagttgagggccaaatccaggctttgtaaaaggatccactaattcgttcattgggtcagggatgtttggcgaacccctctttcaaagttttcagccaatttacatactgg

SEQ ID NO: 16118 - DNA, 342 bp, Zea mays
  unsure at all n locations
  Clone ID: LIB3150-092-P2-K1-D10
tntnttattttttttttttagtaaatactaagcattcaaatatgtgagaagaataagttgacaaaatgatattcatggtgccacagattgctgcgacccaagcatggccagacaaactaaaacctggtcatccaacaaacgaacagccaaacatcagaatcatccccccctagctaaagcatagctagagcagtatccctcgagagtgcattactggtggaactacgtgcaagatctactgcttgatctcagccttctttttttgccacagcctgtccaacgagctgtcagcatcaccctgagcacggacaaacccagagagggcaaacgtggtgaagtgac

SEQ ID NO: 16119 - DNA, 339 bp, Zea mays
  Clone ID: LIB3150-092-P2-K1-D12
gaacctatccaactttaactagataaacgcacagtaacacaagaacatactgcagcctgaagatcatagatttactcgtttcagttgcatacagcatcagagtctaggaaaacgaacaaagggttccacaattcaagcctaagggctcaacattgacaaatttattacgagaaagacaattcgacaatctgcttggtcacattgactccagatgcaaaagaccacatgcagcagaatgtatcactccaggatagggtctatttaagcattagcaaaccccagttcggagagcttgaggtgggcctttttgtagtcattaaagaaagccttcttatccgc

SEQ ID NO: 16120 - DNA, 268 bp, Zea mays
  Clone ID: LIB3150-092-P2-K1-D3
gaaaagaacatttctgttatgattaaaaatgaaacaatcaattacagtagggagaagaaaaagaatcagctcgccattgtttctttaaccgagaggaggggcaaatgaaaagagacaccagacttccaaccgtgaagacttttcactgctgccaactgcatgccattggtacaccaacgtacattccaccgttgctacttgccccaaaattgattaccatggcaccagtgtgctgctgtgaagccattgagtaggagagagaattcac

SEQ ID NO: 16121 - DNA, 216 bp, Zea mays
  Clone ID: LIB3150-092-P2-K1-D9
tattttttttttaatataaaacactattttttgatttttttatactcatttttaattagagatttttggtgtttttttttaatgggtattttgtattattttattaattttattgggcccaaaaaaaaaaaagggcccgggctaatttttttctgggcaaaatttattcaaaaccggcccttgtgggctcttttaataggattaatatttattttc

SEQ ID NO: 16122 - DNA, 344 bp, Zea mays
  unsure at all n locations
  Clone ID: LIB3150-092-P2-K1-E1
tttntntttttttttttttntttttttttttttttttttggtttttnttttttttttttttttttttttttggcaagaaattcaacacctaaatttaaaagggaaaggcatgatcattgtaccaagataacacaaatgttaattcaaccattaacaaatttgaacgaaatttcccacatgggaaaaacccttgggagaaaacaaacgggtttttccattgattcaacgaggggaacaagggggaccaaatgcagtcaggcttcaacacttgacttgcttcttccattaagagggggacttggtttaaaacaggcacattattttaattggccaatattaccttt

SEQ ID NO: 16123 - DNA, 362 bp, Zea mays
  Clone ID: LIB3150-092-P2-K1-E4
aatttttattttatttattttatataatttttttatatgtttcacgttaatatactgtaccgaacttcaatctgctttttacaaattacaacacaacattagcacgaccaaacagatttaaattcaggtatgggtaccattatgccccggattactaagaccaaacgacacacacatttaccacacatgcaatgattcaatgcatgtttatactagcacatgcttgcacacatattttaccgactagttattgcagaaatattggaaccatgcaaattttacaaaatgcaatgcatatatagtagtttaacatgcatattattcatttgtcttcaaactcatatcacttttagtacttgtct

SEQ ID NO: 16124 - DNA, 168 bp, Zea mays
  Clone ID: LIB3150-092-P2-K1-F2
atttaatattataaatatatgttaaacgctcatattttattttttttaagaaattcaaattctggagaatatggatatttaataggggggtagggcccacaagaagaacctcaaccccaaaacccttaaaagggagttccacacctacaaaaaaataaaaaaaagaaa

SEQ ID NO: 16125 - DNA, 348 bp, Zea mays
  Clone ID: LIB3150-092-P2-K1-F4
gggcacaatttgcattatttttatttaacagtacaagatcaaccaaacattttacatttacatcgtccaacgaacgaacccaaaagaataatataaagaaagaacgagcatgtagtataacacttgttcacctctacaggggcactagatctacacagatcacagaacggtaatcctacattccatttcattcatcatcaattcaacgacatcttcaccgtcgatctcacgcacctgtaacctggatcttcttcttcttcttcttttcgcgcctttcagcgctctccatccctggatctggaggagaccggccgcagacggtaccggcaaccgcgagacgctgtctag

SEQ ID NO: 16126 - DNA, 188 bp, Zea mays
  Clone ID: LIB3150-092-P2-K1-F5
ttattaatttaaattttatttttttttattttttttttgacttgggaacaacatatcaatatcattggacaaaaatagctgctaacaaaaaccttgctcattcttctctcgtcttgtttaatagcgggagcaaccaaagggaacaacaggggtaccaacacctaaccaaaggtgaacggaccgacctg

SEQ ID NO: 16127 - DNA, 346 bp, Zea mays
  unsure at all n locations
  Clone ID: LIB3150-092-P2-K1-F7
tttnttttnttttgacgaatattttcattataaattatgatgacatggcagngatgtgccaaagcatttgtgatagatacaatagtcattagaaggaacacatcataagcattcatatcgtcaaggaatattacacattacaaccaaaatatcgcatgaatttgttcactgcaaatattttttgcttcttgatctcaagttcatcttaaagttgttgaacctttgcagaaattgacgctatggagcttttcttggatgcagaccgaagaccaacattgcataggaacacactggagcccggtacgatattagaaacaacttttgtaggatatattggttgttatcc

SEQ ID NO: 16128 - DNA, 324 bp, Zea mays
  unsure at all n locations
  Clone ID: LIB3150-092-P2-K1-F8
tttttattttttattattaataatgatattatccactttatcaaataatacccngcacaagggcttgttttcttgtatgcggatcaggttattagaaacacattagtcaaatttatccatgatagacagacagactgacaccaggaagtctaggcattattggactagctcaggaataagcctcagaaggaacgagatcttgcgctgcgtgaaatttggatgttgtggctcctctagcaaccgccttgcttgttaagctgaccacttacaggtcgggcttgggtagggcgtttagttcggagactgtacttgggattttatggt

SEQ ID NO: 16129 - DNA, 352 bp, Zea mays
  unsure at all n locations
  Clone ID: LIB3150-092-P2-K1-G10
ntttatattatttattttttaataattttttttttttttttttttttttttatttttttttttttttttttttgggcaaaacatgtgctacatttttaccatttccaataataacccccaactgttaaaaagggtaaactttacagattaaccagtctttatgcctggccaggatggcaaccgttttcgtgccaaaaaccttgaacaatattgaaaattaatctttctcagagtgcttatcttgggataaaataaaccgtaagcattccttgccacacttatacgaccccctccattttgttttcaccaacgtttgcctaaagctgaggctttttaatctttttcttaaaaa

SEQ ID NO: 16130 - DNA, 286 bp, Zea mays
  Clone ID: LIB3150-092-P2-K1-G3
aaaacaaacgtctattgtgatttgagatttaaaacaggcaccatatatgcttggggcaagtacagactgcaggctaaacattccaatccaacaacggtcgagtgcctgtgaagcgaataaactacaaactaaactgtcttactccagggacgggacgacacttgcaaggaaactactcagaagacggcactaatctactgcatctagaaagtccttcgagaaaacccggttaggccgacaacgacatgatttttccctgactgcaaacacttggacagagtttcat

SEQ ID NO: 16131 - DNA, 347 bp, Zea mays
  Clone ID: LIB3150-092-P2-K1-G4
atgttgaaattcataatttttttttttttttttttttttaacagggctcaatggatgtaactccatccgttccaaactaccataagaaaacatcatattgttttgctacaggttcttattggctgaaccagtaacgatgtccaaacagtttattgtattagggcctgtccacgttacacttcacataaaaagctcacaccccacagtgtccggcattacttaagtcattttctgtacaaagcgacaactcaattggggcttcgattattaatccgcgacgccaagtctgttaacgctggattcccttctaaagccccatatttaggcgctttccagagcttaaatgc

SEQ ID NO: 16132 - DNA, 113 bp, Zea mays
  unsure at all n locations
  Clone ID: LIB3150-092-P2-K1-G5
atatttnttttntttttaaaatacatcacttgcattttttatttttttattcttttcaattttttttgtaaatgatttttttttattattttttgggccccgggggccccctt

SEQ ID NO: 16133 - DNA, 294 bp, Zea mays
  Clone ID: LIB3150-092-P2-K1-H1
gctccagcgtcaaacttagaatttggaacataagtgatcaacaacaaagtgttgatgattcacaaataaacaagtccttgctgggttacatgacgcagttcctacagaagcagagcagcgccgacagagaaaccagcaacatctaactacaacacaaggcgaacatcaacacaagagaagcctacaaagggcgagcgtgcaagcctaggaggaggtgaacttggtgacggccttggtgccctcagagacggcgtgcttggcgagctcgccggggagcacgagcccacgcgtccg

SEQ ID NO: 16134 - DNA, 325 bp, Zea mays
  Clone ID: LIB3150-092-P2-K1-H10
atttgtgagctcgttttctttagtggtttgacaagaggcaaaagagggaactgatttgattaaaagtttaacggggacacatagacctgacaaaatatgagccattaatgctcaaccaaccactaggatacacccaacatagttttagacattccgatggaaaaaaatttattctcggaagcactttttttcgggggggaagaagacaactcgctcgtatcaccagaccttgagtttttaatcttagttggtgctgttcatgtggcggatcaggtcgaccacgcgggtgctgtatccccactcgttgtcgtaccaggacacgagc

SEQ ID NO: 16135 - DNA, 246 bp, Zea mays
  Clone ID: LIB3150-092-P2-K1-H11
tatttttttatttattattttttttttgtttccttgcatgacttcagagccaaaaacaaaaaaagttgcacaaataaatgtgaggtcacatctgctatggctcccgagaagtcgctgcttattctagtgcagcttatttcttaacgaaggacatgcctagacaaaagttcagcacgaataacatcattacaaccactctgtttcatcatgaaatctgttgttggttcaagacggttacatgaggaa

SEQ ID NO: 16136 - DNA, 273 bp, Zea mays
  unsure at all n locations
  Clone ID: LIB3150-092-P2-K1-H12
atttagtttgcttgtgtttttttgttgtttttacatggttacgccgggaaccgtcttaaatcatgtagggttattacaaaacaatgttggggctcaaccagttacgtgaagataatagggagacgacatcaaatatcttccaaaatttaaacctggtcaacaaatattgctactaatcccgatacagagtgtttacttatttctgttcactgattaaacaccattgttttactattcttaattnntcacggggggccactttttgttttaaac

SEQ ID NO: 16137 - DNA, 280 bp, Zea mays
  Clone ID: LIB3150-092-P2-K1-H2
gggttaaaaggcgggctttgtttcgaagaaaccaaaaagtttctcttgggaaacccttaatgtttaaaaaaccacaaatctgttttttggggggctgcccctccaaaacctgggagggggttgtttttcaggggccattcatgaaaaagggtttttctgccccccatgcttgaataagaatggtttattacttttatttttgcccccccctggtcccattttagaactccatgcctcaatctcttttggctttttccattggggtggccttaaagccccc

SEQ ID NO: 16138 - DNA, 98 bp, Zea mays
  Clone ID: LIB3150-092-P2-K1-H7
tgaacttatgtgagcttcgtgtttttaattgtcattaaaggcgccaacagagtacattggggttccattcacagatcaatgggcacacactcacagag

SEQ ID NO: 16139 - DNA, 317 bp, Zea mays
  Clone ID: LIB3150-093-P2-K1-A12
cgactcggtccaattttaatattataaaagtaaatattcagaactccagctccaaactaacagaaacaactttgttcgcatcgacaaacttaaacaaaaatgcatgttgcacgactacaggtagcgataaatgccatagcacaaatactgatcgccgcataagatagcactacttcgatgggaccaaactttactcgtcatcctcatcgtcgtcatctgcgccgcccgaggagttgagttggttgagcctttcaatgagactggccttcctctgctcgtatgtcagtttcttgaggttgtacctcttgtgctccttt

SEQ ID NO: 16140 - DNA, 148 bp, Zea mays
  Clone ID: LIB3150-093-P2-K1-A4
aggaaaaaccaatttttttttttttgggaaatcacaacaagcccacaccgccaagagtttaattttggggcccttaagcacgggcattccatgcacattctaagagttcaaaagcccacccatattaagttcttacaaactagccatt

SEQ ID NO: 16141 - DNA, 335 bp, Zea mays
  Clone ID: LIB3150-093-P2-K1-C10
ggggaaagcatatgaacatttcacccaatataaagataaataaactcaactctcttgagatggaactcaaaacccacaaacaactctgaaagaaaatgcaaaattaaccgaggtactacaaaagtggcgttggtgcaacaaggtgggctatggaggagcaattgcaaggtcaaggaacgacacttaggttctttcagcgcttgccaccgccaccacccaacttggggcccttggaacccttttggaccgctcccttcgtctgtgccttctgggacttggtcaccttagcctttttcgcctttttttcatccttggtcttcttgatgcgctccttg

SEQ ID NO: 16142 - DNA, 360 bp, Zea mays
  Clone ID: LIB3150-093-P2-K1-C12
acacagaaaggagctccatcagtttgtattatttcggtagaaagaaatcagaaaactagtacatgcggctggcacatcatgcagaagccgccaacagctccctttcagctcgctcgcggatcctcctctccaactccggcctgaagtgcctgataagtccctgcacaggccacgccgtatcgtccccgagggcacagatagtatgcccttcgatttgcttcgggacctcctgaagcatgttgatttcctctagcttcgcgttaccaaccttgagccttttcatgatcatccagagccagggcgtgccccttttgcagggcgtgcactgtccacaggtattggtgtttgtaaaagtggaca

SEQ ID NO: 16143 - DNA, 171 bp, Zea mays
  Clone ID: LIB3150-093-P2-K1-D1
ggccgccctttttttttttttttttttttttttttttttttggggggttggtggtttgacatgcatttgttggctgggatgtagccatgaggagagggggattctacctaattatgccattgaatggaattggaccatattttatacagatttttaccttcagttcttttg

SEQ ID NO: 16144 - DNA, 209 bp, Zea mays
  unsure at all n locations
  Clone ID: LIB3150-093-P2-K1-D2
ttttttttttagatttttttttttatttttatttttttttttttttttttnttatttttttaataatttatgtttttttttatacttggtgggtttttttaaatattatttatttaattatatnatttttttgaaccaggagccaaaaaaaaaggggggtaaaaaaaatatctagtttttggcctaatattaaaattattccccctaac

SEQ ID NO: 16145 - DNA, 226 bp, Zea mays
  Clone ID: LIB3150-093-P2-K1-D8
gatcactataccattttttgtctgataatacaaccgaattgcaaatagttcatgacatatgctccataattgacttctaacattaaaagtgctaagaacacaaatagcaaaactttgaaaatgcaaccagagacaggcacgcttgttgtcttgattgggaatgatcggacagtggcagtatccaagctcccgacgagctgttcagcggttgcggcggatggagtgg

SEQ ID NO: 16146 - DNA, 369 bp, Zea mays
  Clone ID: LIB3150-093-P2-K1-E11
ttttttttttttttttttttttttttttttttttttttttttttttttttttttttttttttttttttttttttttttttttttttgaaccaaaaaattgacccttttagggggatcaacgaaaccaaacccatttttcataaacaataattataataatggtgttaaaccagaaaacactgttttaaaccctaacaggtgtggttgttaaaccagcctttactggaaaagggtaaaaaactttgactaaaccttaaaagttttttaataaaccacaattcaacggtgctttttttgtaggcaagacaagcacggttttcttcccaaaaagggggcctttttttttttgggcaccctgttcccacccac

SEQ ID NO: 16147 - DNA, 342 bp, Zea mays
  Clone ID: LIB3150-093-P2-K1-E3
gggcaaggggaaagtttttccattccttcacgggtcaactactggtggttcagcacaaaaaagaaccgctgtttgtaaactgctcctggtgcacattttctacactccgctgtgttttattatggaccacaaagccttgttgcgccaaccataacggggcgggggggaaaaggcagtcaaaaaaaaaattttgcaggggatatcaactgttagaagccgggcgagttgcctagctcccgtgggcgaacttgttacccttgtcaatggaagacttgagctcgaccttgaggctttccagcccctttttttcgaagtcgttgagctcacccagaccaagcactt

SEQ ID NO: 16148 - DNA, 341 bp, Zea mays
  Clone ID: LIB3150-093-P2-K1-F1
ccgtccttttttttttttttttttttttttttggaaactttaaatttaaagcacgtttaaacaagcaaaaagtactcgtttttcatcatgcagttgatcagctacatagtacttggatggagatagatttgtctcaaattcaagtaacttctgagcaaaacttgacaggataaatgttctttcactgatctaggccttgatagcgtacttcctcatggggaaatacttctcacgcttcttttccctctcggtcttcaaggagagctggtgcttggtgaggcgcctgctgatggcgcgggtctttttggggcggaggtcaagcgggagcatcttcttttttt

SEQ ID NO: 16149 - DNA, 301 bp, Zea mays
  Clone ID: LIB3150-093-P2-K1-F2
gggataacgcgttcggagaaacttaggtttgcacctaaaatgggaaatctttcaacaggaacacacaacaggttcatactactgctcagagtgagcaaagttgcacgcactagagtaacacagatgtagaactgggtactgcaggtagatggaccaaacaacctagtatccacccttgagatcattgaccacatcatatgggatgggagttacggtctcaatggtggtgccctcgaccatgaagccgggcttgggacccaatggctgcctcttggtgctgataacctcgccgcactttttg

SEQ ID NO: 16150 - DNA, 317 bp, Zea mays
  Clone ID: LIB3150-093-P2-K1-F8
gtgccgggcaaaatttaatttttttttaaaaccaccctacgaaattggggcaattgggaaaaagtgggtttaaaacaacattttgcaaattttgttaattgttggaacccgaatggggggggtggtcttaaaaaccaaataaaccgttggggcaccccttgtagtgcttttaaattccggggattaatcccttcccccacggccttaaggccaattgggggcaaaaaaaagaattggggaactaattttgaacccttccggccttctaattaaaaaaaagatgggggggaacgggaaatctttacataaattgcggg

SEQ ID NO: 16151 - DNA, 100 bp, Zea mays
  Clone ID: LIB3150-093-P2-K1-G5
gatgctaccgccggagattccttccttctgctgttgtgtgcaatctcgaatgggtttttttctctactcccaatgcatcaaggtatctttttccttgtcc

SEQ ID NO: 16152 - DNA, 378 bp, Zea mays
  Clone ID: LIB3150-093-P2-K1-G6
ggccggagaaacgcagtttattgcatgtcacaaacattgtccactggtacaaaacggacagacagctacagctccaagaaatgtcacaaatcggcaccgatacatggctgagtacattccaaagggcaacaatacatcacaaaattgtggtacaagggccgccagccgtgagcagagaaatggaggagatcatttatgacgaaagaacacttttatttagctagcttcctccacacggtacggccacggttgatctcgtgtccgttggctgcaaatctcaagcaatgcaggaactgctgccgctcttctttgtgaggcgctgctgcagaaacagaagccgtcatgcttttcttcctttcctttctctttgcaagttag

SEQ ID NO: 16153 - DNA, 307 bp, Zea mays
  Clone ID: LIB3150-093-P2-K1-H11
caaaacttcaaaaaagtcatccagtcatcggtaatacgacaattatctttccttattccatcatcaaattgaaacctgaagatacccatcagggagggagagagagagagagagagaggggggaagggaaaaagaaggcaacagttaactttatgccaaattcaaacgcgtatctctgttcacacaacaaacattgaggatccttgcacggcgcaacgcctctggacgctgctatagccaacaaacagacctaaatcaagcggatcgggctgggacccgtatcaggcgagcttggcggtggccggga

SEQ ID NO: 16154 - DNA, 262 bp, Zea mays
  unsure at all n locations
  Clone ID: LIB3150-094-P2-K1-A8
antntagaagatccagatttttttttttttcttgtcacgttttaccttttggttgggttacccttattttagggggggaaaacccaaaggggtttaaggggccggctttaatttccaatgccaaattttggggcgtttaacaaggtgttgttggggggaatcccccaaaatttccccgggcccaaacaaagggtttttaaaaacaaaaactgggtttgaaggccaaaaggattatgccaggaggttaagttttcttcttctt

SEQ ID NO: 16155 - DNA, 228 bp, Zea mays
  Clone ID: LIB3150-094-P2-K1-B1
aggcaagcgaatcctatgtagatctgggtacagaaggaaacggcatgcttacaaggcattggcgaaccctacactaaaagaaaaaagaacaaaatatgattgggaaaccaaaccactgaatctttaaacaggctccatggtagggtaggtagtactgacaccaacccattcttttgtacaagcactccccattgttcatcctcatactttcttcatatatttcacttt

SEQ ID NO: 16156 - DNA, 433 bp, Zea mays
  Clone ID: LIB3150-094-P2-K1-B12
acagttcggcatagaagcctgagtacagccgtttcttataaacgacaggtggatgacagaaccaaactacagatgtatcgcaacaacaaaacggtgtattgcagcataggcaacacagggaaaatccagaaaccactacagtaaatagtagacaaaaaataccaaattccagttacggtcccacaacaggaccaaaaaaacacaatttcattggatccttttgccgcatcctccgcgttcatcatcaatcatcaccaaaagtagtcttctttcctgcactgggagtgccagcgctgtgcttgttaccaaagccacggtcaccacgtcctcggcccgcattcctaccaccacgttggccaccgaatctgccgccaccatccctgcccccagatctttcaccaaatttaccaccaccacgccggtcaccagaaac

SEQ ID NO: 16157 - DNA, 351 bp, Zea mays
  Clone ID: LIB3150-094-P2-K1-B3
aaaggaatgtgcctgcctgggggaataaatccctcatggaagctttgcccatcaggttttttattgtaataccttccactccctcacaaaaagggacagaaaagggttgaatgaaatcagaagatcccgcaactaaaggtttcaattgctactaaaggtttcaattgttgctataatctgcaaaatggccttatctagttatcatttgcaaacttgatacccttttcaatcgaagacttgagctctctcttgagctttttcaaccctcttttctcaaagtccgacagcttacctaatccaagcactttcttaactccattctttccaagccttaccttaaatgcaaagaat

SEQ ID NO: 16158 - DNA, 52 bp, Zea mays
  Clone ID: LIB3150-094-P2-K1-B6
tttttttttttttttttttttttttttaacattttttttttttttttttttt

SEQ ID NO: 16159 - DNA, 402 bp, Zea mays
  Clone ID: LIB3150-094-P2-K1-B9
aagcaaaatgtcaagtttcgctttcaagaaaatatatggaactagatgtcaactccgcagttctaccgggcaaaaaggctgctgatacgcctaactgcttttagccaggcaacaacttcctaagttgcataacacatagcatcagcttcaaagtaaagaatcgagcttccagcagggcttcctccagccatatcttcaatccatcgagaaaggacctcctgttcatccttttagcatccagcacagcttcagaagatacccgtccaataatcataaacgactccaaggaactgcccccaaccagggcatgactgactgcacgtaaacagtcatttgttttaagcatcaacaatataacccttggtaatctcctcagtagctcggagatctcagtaaaatata

SEQ ID NO: 16160 - DNA, 410 bp, Zea mays
  Clone ID: LIB3150-094-P2-K1-C12
agatctatcatcacactcattacttattcgtatgaaggacatgggtttttattggtgattactcgacaaactttggtggagtggaaacactagtttgaatgaacatagataaggtcggtacagacccacaaaacgaaactattaacagcccatataccagctattgcttggaattctcctgctcttcctggctgccttcgctgctcgttccaacaaacccccgcctctcattggcagacgctgttatgaccggcatacagatatcagatgtgctgctcagaagagacttcacctctggatctgaggccatggcagatgatattatattgtcgacgttatcaagccttgatgacagctttgttcaactctgtaggaatttactagctctgtcgggatggattagcgggctg

SEQ ID NO: 16161 - DNA, 180 bp, Zea mays
  unsure at all n locations
  Clone ID: LIB3150-094-P2-K1-C2
ggaacaatacttttttttttttatttcaatagancattcaagggaggggctcacacttacactgccagccatgtttatacttgacacattattactcaatcattgtctcttaattactcaactagctagctagccagcgactattctacagcacataattttttttagtggttgacaccc

SEQ ID NO: 16162 - DNA, 470 bp, Zea mays
  Clone ID: LIB3150-094-P2-K1-C4
ctagataacaccaatttgcatagcgaatccagcaggctaattcaaagccgcaactcaggaaagaggatgtatgatttctacaatacacaagcaaaacagacgcagctttcctcctatgatatcaggttatagcagaactacggaccatcgacgaaaacgatgtcaaaatccaaacaagcaatcttgcactaaaatagaactagtcatcatccttgtaggggtattcctccgggacttgcttgataagcttcacccgcatctcataggcatcgtccccgcgaagcatgtcacgcacccatgtcacctccgccttcatagacaccatttccaatgcccccctaataactccacttaacaaattgcaatactgaaggccttggcaagtgtcagggagctcaacgaaatcaacaagagggtttgtttccaggacaaggctgcaacttgtaccctcagcatcccaattggtcacg

SEQ ID NO: 16163 - DNA, 429 bp, Zea mays
  unsure at all n locations
  Clone ID: LIB3150-094-P2-K1-C8
gagaagttgtaaaactaaaatttttatttctccttgatggagacaagacaactgttgctcctgtgaagaaggacctaagcctttctaacactgcctctttctgcgctgtcactgagctcttctacagttctactgaacctccaacttaactcacacacagcgtaacagtttagtcgcggtactcggccaagaacgcctcatggaaagccctgaagcggctgatcaccgcggggatcttgtcttcctgcggcaggatcgtgcatctgatgtgccatgttccaggaacttgaccaaatccagatccagggaccacgacgattccagttgattcaaggagacggagagcgtanaaagcgtcaggcgctttcttagcagctttagcagcctcgattgccttctgtggcagatgaatctgaaggaaaagataca

SEQ ID NO: 16164 - DNA, 344 bp, Zea mays
  Clone ID: LIB3150-094-P2-K1-C9
ggggtggggttttttttttttttttttttttttaaaaaaacccttttttcattgggaggtggggtaaaaacccccggggggggtaaatatttttttaacaaaaattgttttggtaaaaaaatctttccccttttttgtttttagagggggggaaaaaacacaggtgataattttgggctgccccattataaaacattaaaagtttttattttttttgttaaggggtgcccccaccctttctttttttttggggccccccaaataatccttttttttttttttttccctttttgtgggtctcaagttatttttttgtgagacttaaaaacgggcttttctttttt

SEQ ID NO: 16165 - DNA, 351 bp, Zea mays
  Clone ID: LIB3150-094-P2-K1-D7
ggggggggggcccaaactagtttaaaaaatttgggtaaaccctgtaaacttgtgtaaaaaaagggggttgggcgaaaacggttccttttttttttacacccccaaaaaaaggggtccccaaaccccctttttgttttttccgggggcaaactttttttgcagggtgaattaagctgtaggggtcccttacaaaaagctggggggggggaaattatcttccccccccccccaaagttgggtgctttctttgccctgcccggttaaacaaaaaaaaagtttgttttgtttttagaacaattccgcaacaggggggagggttggaatttttttgggggtttttacacggggggg

SEQ ID NO: 16166 - DNA, 446 bp, Zea mays
  Clone ID: LIB3150-094-P2-K1-D8
cgacaacacggttcaacaatatatagaaagtcgaattaaagcattacagctagctgcaaacgctgttcaagaaccaaaagcaacaaaacatgatgataaaacgtcttgggaaggtagctctatatccttgcagataaaaataaaactagacatagcaaaaagctccaagcagcacattcagagaacttatgccttggcagcagcctgggcagcaaagtcgcgcctcctctgctcctcgatgatgctgagcttgatacccttgcccttgggcaggctcacccacggcttgttgcccttgccaatggtgaacacgttgcccatgcgggtggcgaactggtggcccatggagtcctcgacgtggatggtatcgaagccgcccttgggcttctccctgttcttgatcacacctacacgcccggtgttcctcccgccggtcaccatgacca

SEQ ID NO: 16167 - DNA, 282 bp, Zea mays
  Clone ID: LIB3150-094-P2-K1-E6
cccaaccggaacgggggttggaattaaagcaaattaactttggtcctggtccattcgactcgaatgggatccaaaaattctcacggcatttttattggccacacaaagcaaactttttgttttggaaaaattaggctggtgctttgcccagccaccaccattgccagcaccccaggggaaggactgatcgaaagtcacccctagattttgttgaaggcaacgatgtcccaattttggacgtacttgttaactggctcagcccacaaattgtccttaatgaga

SEQ ID NO: 16168 - DNA, 275 bp, Zea mays
  unsure at all n locations
  Clone ID: LIB3150-094-P2-K1-E8
aaaatctattttacggggggggaaaaaaacattggggggggaaataaaaactttttctctccccataaaaaacccagggcccctttttccccgtctcttcattacggaaatcaaaatgtttnttcccaggggcatattaactttggccccaattttttccagattttttttaaaacccacccaacaaaaaaaattcttccggaaatgagcctttatataaaaactcttccttttaggaaaaaaacattacttggtaacaatgccccaaattgggg

SEQ ID NO: 16169 - DNA, 295 bp, Zea mays
  Clone ID: LIB3150-094-P2-K1-E9
agccataacctcaattgcgcatatttcttcgggtctctagggagacagtcttattgcttttctccacccactaatgacatctttttttaacggaaagggggtaaaagaaacatgaacaagaactaaacgataaccatagcacactattctttgtctacaaaagctgactctgcaagatcgatggcccgagctagtgcaacagccttattctcgcattcacgttggtcgttatttgggctactgtcggcaacaatgcctgcaccagcctgaagatgagcgacccactcccgacgcc

SEQ ID NO: 16170 - DNA, 486 bp, Zea mays
  Clone ID: LIB3150-094-P2-K1-F3
aacacaagagaccatctttgatgatagagcattagcaaaccagtcgcagcgtccacgggtacagaggtatgtgctcaaaagtcaagctaaaagtctagcagctgggaattatctatttatcttattgatcgacgaagcgaggttcaaatttgctttcaggcaacgcagtacccagcttccgcttctctagctcttgtatgatgtctactccacatgcgagaaacctcctccagtctcagattttgttttgtgatcagaaggattgggcatgacttcatatacaattgttgcaactacatcccttttgttctgagtggctttaccacgtagtccaatgtaataaattttagttgtatcaccaccaaagttgtcagagaaatgcagagttaggttagccacaccttggaaccttgaatattttgtttggtactcaagagcttcttgcaggttctttgctatttccattcctgactggctggatgtttt

SEQ ID NO: 16171 - DNA, 335 bp, Zea mays
  Clone ID: LIB3150-094-P2-K1-F7
acaaggaaccataatttcatcgggaacatatataagtatcttgtctccggaaaacttagcttaaacaaaagtgccacagaagcaacacatagcatctgtccataaagattaagggaaccaactgccttagcattgtccttatcgtaagatagaaacctatttaggacccgatcaaactgccatttcaaggacacagttgggaccttacacctcaggaggtgccaagaccggagggcgcggctcgtcctcgtccttcggggtgtggatggtcaccaggtccggaagaggagtgatcgggccaaccttgcccttcgggtcccagtcaagcatgatct

SEQ ID NO: 16172 - DNA, 98 bp, Zea mays
  Clone ID: LIB3150-094-P2-K1-F8
ttaaacatttctataattattctcaaataacccggtagcaatgctgaggggaattaaacaactggggacgaacatcaggtgttgtaaaaaccacacaa

SEQ ID NO: 16173 - DNA, 424 bp, Zea mays
  Clone ID: LIB3150-094-P2-K1-G1
gatcggaacatggcacgctgcattattgttgtatcccaacccaatcataatgaaccagcaacgcacgagcgactgcgactgatcagatgagccagcaaggcacgacgaggttgggcggcttgggcaccttcgccgcccatcccgcgatcaagtgctccttggtgggcttagtcttgatgaaagattcgcggctgaacatagcctgggtgtaggcgtggacgctggacatgctttttggcaccttccagcccttgaaatgctccagcgccaccaccaggtggaagagcttcggcgccaggctgaggtcggcggctgttactctcttcccgcttatgtagggacgcccgtgggctttgagatgcttcttcagcgcctgcagttcacgcacaagtgctcttttcgaaccgtcgtcggtggcattctt

SEQ ID NO: 16174 - DNA, 313 bp, Zea mays
  Clone ID: LIB3150-094-P2-K1-G5
gtccgcaatcgcgcaaatttttggattttaaagtacaataagacaggggggttttcatcgagtcacaggaagcccacatggcaatgccaacacacgccttcaagcatataacagtagtatttacgaatctaccaaacatgagtagcagtccacaggacaatgggtcattgcggctcaacagcataagcctgaatcgcatctgataaagcctgaaacaacctctcagccgcgggccttaagctcggcgaggcggcgagaaaggtcatcctcgtcgactttcttcttattcttggcggcagggatggcgtgggcg

SEQ ID NO: 16175 - DNA, 100 bp, Zea mays
  Clone ID: LIB3150-094-P2-K1-G9
atttttttttaaaatttttattttaaatatattaatttatttttttaataatttttaaaaaaaaaggggggggaaaaaaaaaaaagggggggggaatatt

SEQ ID NO: 16176 - DNA, 262 bp, Zea mays
  Clone ID: LIB3150-094-P2-K1-H6
agagcagagacagattggtattcctcaagatgaatatttggatagcaacatgagcttaaacagtacagtaatctaaaaacattccaacattcgacacaacagtaaggctggctgagccatgatcgaaataaacatgaaataatagcaacattaagccgtctagagacccgccgacaagatgcaaaacagcccttatgtgttggttgccctggggtatatttgctggctggaatgaacagagatcatccttatgagtcccctt

SEQ ID NO: 16177 - DNA, 417 bp, Zea mays
  Clone ID: LIB3150-094-P2-K1-H9
aatagctaattcttttatatgtctcaatgaccgaaaggctgttacggcctgaccgaaagatgcacgctggagctttgacaacactcctatgtcaaaaccctcaccatccaagcactgaatcggtgtgcatgtggcagggaaaaatccatatgtaaacctcatacaaggatcgactaatcttcttttttgctgtctgaatcttcaagagcttgcagcctctcgacgagtggtgggtgggagtagtgatatgccgaataccaaggatcggtgttcatcgcaaacaagttctcctcctgtagtttaacaagggctgctcggagctgaggggcatattcaaggttcttggcaaaggcattagcctgaaatttaaatgctctgctgacaaggtttaggcaaaagctcaaaaagtgttggatg

SEQ ID NO: 16178 - DNA, 313 bp, Zea mays
  Clone ID: LIB3150-095-P2-K1-A11
gagaatatgtttaaagttttttttaattgactgcaaacatctggatgccagatatttcttcaggatcaggcaggcaaaattgttacaaggtattgtcatataatcccgcatattgcaccatattctacattttattaccctatcttattttttaaaaatattcctttatttttatatttttcaatattttacatattttataattttttacatttttttttgttattcgattattatatcaattatatactttcttttcttatttttttataataatttttcttaattattatttaaatcttttactttttat

SEQ ID NO: 16179 - DNA, 304 bp, Zea mays
  Clone ID: LIB3150-095-P2-K1-A2
attttacttgaaagagcttagtgaatacgtttggaatttttttatgaggcccggaacacgaaacggggaggggtagtaggcagaagacgagcgcgtaaaaagaaaccgatcacccgtgctgatctgaagttaacatttgccaacccgaaagcagcgcacttccacaaccgctgaagcctgcaaagctacctgacagaatgacatgaagcatcacatgaaggacatccatgctaagctgtcaagataggtgcccgccaccaaaagccatattcagttcatagtatagcaatctggaaggatccat

SEQ ID NO: 16180 - DNA, 172 bp, Zea mays
  Clone ID: LIB3150-095-P2-K1-C10
attatataaaatttttggatataaaaaaaaaaggtgtggttatatataaataaatttccactatatcaccatcttttaaaaatgagttttttacatcaaccaacaaaattttcccaatgagctaaaaataaacaatggtgttatataatactaaaaatttataaatttttgt

SEQ ID NO: 16181 - DNA, 440 bp, Zea mays
  Clone ID: LIB3150-095-P2-K1-C11
gacagaacagagtatctcaaccatctggcatacttcactatccaatagcaaacataatttttcaaagcagtacatatcgcatgcaggggcctcctgcaaactaacatataacaaaaattccttgtttgaaacaaaagcaccttttcatctggttgcaagtgcaagcattggtgaaatcatcccttgaatgccctgcagcatgtgctgtatctgaatctcctctgcaaccattctcttaagattcctcatatgcaccttcagcttctcatctgatcggatatcaagcttgcgcattttcacaacctttgttgccaaacacaacaacaacttatcattcccttggcaaaagttgcattccggtgaagggatcctcaaaaggaaaccacagtttctcatttttccaaattcctgaggcaattaataggctttttttttgaaaa

SEQ ID NO: 16182 - DNA, 139 bp, Zea mays
  Clone ID: LIB3150-095-P2-K1-D2
actttttagctttctttcactagatgatccaagcctttttttttttttcatgccacgccatacctaagggggtgtgtgtcaccttaaaacaattgactcccccggctttttcataatccttatgcaccttaaaaactat

SEQ ID NO: 16183 - DNA, 183 bp, Zea mays
  Clone ID: LIB3150-095-P2-K1-D3
aatgttcacggcgccctttttttttgaccaaagacaacctatttaatgcatttaggtttcatatagaagatggcccccaaactgcccattttaacgctgtcagattcttaactaaaatactccaggattttgtaattaacgaaaccacatgtatttttccaagtataccttccctttcttaaa

SEQ ID NO: 16184 - DNA, 393 bp, Zea mays
  Clone ID: LIB3150-095-P2-K1-E6
aagggcaaatgttaattccaacttcatactgtcacacacacacacacacacacacacaatgcagtttggtcatctacagattttgacaatgctgtgaaagagcacgcaaaactttattgttgtgtgacccagacttggaaccacaggattgattaccttgtccgtcatcactccatgatctcaaccacagctcgtcctacgatcttgccctgattgagatcctcataggcgccattcgcctcctcaaatttgcatttccttgatatggtgttttggagattgaaggcaccactctccgcgagcttcactatctgtggaaggtcttgcctagcccttgcgccatatgagccaatgattttcacctgtcgtcggacaagacgggttatattaacc

SEQ ID NO: 16185 - DNA, 291 bp, Zea mays
  Clone ID: LIB3150-095-P2-K1-F10
gacagggtcaatttttttcatgaaacactgaaacaagcggtacaacatctgttctacattattcacacactggttattcaatgaaacaactgcaaattgaggggcgatatctgttctacaattcacacgctggttattatccaataaaacaacaacgatcaattcgaggtacaacatctgttctatttctctacattatttgctacaccggttacgcacgtttgttcagagggttataggataaatcaattggcagctttttcagctatagattccacttttgctccaccg

SEQ ID NO: 16186 - DNA, 122 bp, Zea mays
  unsure at all n locations
  Clone ID: LIB3150-095-P2-K1-F5
tttttataanaaangggctaattttaatcagcaatgtagttgtacgcaccagcaaaaagaaataggggggatccatctacataaaggggggacgccctaaaaataacataaccacagcgacc

SEQ ID NO: 16187 - DNA, 360 bp, Zea mays
  unsure at all n locations
  Clone ID: LIB3150-095-P2-K1-G1
ttnggcagttcaagtatgattttttttgccacacggcacaaaacagattggcataagccaatgggatatgggtatagaaacatgagtaaaaaggtaaacacaaatcatgaataaactcggctctttatgatttgctttaaaaccatatgacagtattttaattaataaaaattttgatgtcctttttgttcatacatatatctcttaatgtttattataatattttttgatattatgtacttcttttattataccattatgatgatataatatcattatttttttattattctaattttttccataaaatttttttttgattattctattttgtgtatttttttattgttattttataat

SEQ ID NO: 16188 - DNA, 331 bp, Zea mays
  Clone ID: LIB3150-095-P2-K1-G11
ataaaaaaaaaaatataaaaaaattttttttttataaaaaaaaaaaaataaaaaaaaagggggaaaaaataaaaagaaaaagaatgaaaataataaaaaaaaaatgaaaaaaaataaaaaaaaataataaataaaaataaaaaaattaataaaatataaaaaatataaaaaaagttaaaaaaatttataatataaaaaattataaaattaaaaaaaatttaaaaaatataaaaataaaaaaaataaaaaaaaataaaaataaaaaaataattaaaaaaaaaaaaaaatataataataaaaaaaaaaaaaataaaaatatataaaaaaaata

SEQ ID NO: 16189 - DNA, 398 bp, Zea mays
  Clone ID: LIB3150-095-P2-K1-G4
tttttttttaaaaaacaataaaaaaaacacataattttttattttaaaaaataaaaaaaaacataggggggaaaataaataaatacataggagaggctaaaaaataaaacaaaaaaaaaaataaaataaataaaaaaaatataaaaaaacgaaaaaaaaatacaaaaataataaaaaatgtacaacaaaaacaaaaaaaaacagaaaaaatgttaaaaaaaaaaaccaaaaaaaaaagaaatacaaaaaaaaattaaacacaaaaaaaaaaagtgaaataaaaaaaagaaaaagaaataaaaaaaaaaatcaaacaaacaaaaaaaaaaaaaaaatagtaaaaaaaacaacacaaaaaaataaaaaaaaaaaaacgagtataaaaaaataagacacac

SEQ ID NO: 16190 - DNA, 338 bp, Zea mays
  Clone ID: LIB3150-095-P2-K1-H12
ccgggttgcagtagaataagagtcaaggatgacacaaatgaataccaccattcggtcatacatagttttaaacaaaatactaataaagagaaagactcagcgccagcagcgtcttcctcttcatactaatgaacccccacagcagcacattaccacaaggcctaggcagctacaaaaatttcaaaacatggcttaaaggagaaaaaatcacaaattgtccatgaccacgactttaacatagaaaccccaccgtccttattacccccttttccacgggattttgacaaaaccaagccttaccaggtttctcaccacccttttttgttttggtttttttt

SEQ ID NO: 16191 - DNA, 274 bp, Zea mays
  Clone ID: LIB3150-100-P2-K1-A12
attcgaaatttttaattatttttgggaatgggacattgggggggggcggaatttttgggggaaacagaaaataagctgctctatttttcgccgtctgtctccgcagcactatgagggctccgaagtatcatgaattcaggaggaggggggacaactggccacgcaaggcaccaagctttttatagcgcgtattagggtttctgcaaacgtactcagtaagaccgcgatctagatagcatggcccgccgcattacgggtaacaagaatgtggccc

SEQ ID NO: 16192 - DNA, 309 bp, Zea mays
  Clone ID: LIB3150-100-P2-K1-A2
ggggggcaacttaaaaaatttttttaaaaaaaaaaatgttttttaccaaaaagggttttttattttttttacacaaaaaaagtttgtaaatgattaaaattttgaccggataaacaactttttaggattatttaaacctgcctttcttttaacaagaatatcctactgttaataaaaagtttttatatgcgcttaaaaactttttagcaatattcaaatttatattttttgtaaacaaacttttaatgaattttttaaaaatttctagaaaaaaaaaatttgtttattttggatcaaaaattttttttt

SEQ ID NO: 16193 - DNA, 362 bp, Zea mays
  Clone ID: LIB3150-100-P2-K1-A5
ggccaagcaagctgttaacctttcaccacaagctcacaaaccaggcacaactcataagaacgaaccgtgaagaatctccactcgactctcacattcacatcactaccgcatatacacaaacaaccagaaagctatgggctcgcaagcaataaacaacaagagtcccgctacaaacctgaggctactactcaccaatgcaatagggaaagaatgggcggacgtaaactacaagcacaaaagaattgcgaagccatgtatcgtggctcataagagaactctgacccgctgcgtttgcgctgtgctgcgggaggcatccattcacaaccctcatagtccttgatcgttgatggacaacaactttc

SEQ ID NO: 16194 - DNA, 354 bp, Zea mays
  Clone ID: LIB3150-100-P2-K1-B10
caataatcacatttaaaccatggttcagtaccgtcaatccattaagaccaacacaacatctcacgagagcaccatgcttcggtgttaatcactgacctatcattgaatgggcagccaaaacacatactgagaattcttttcctgataagcacatactaataatcctatcaaactagtaacaaatttacaacaaaactgaggtggtcacttgacgtgtcccaggctcactttttttttcctggaagccaaccgaattacaaggtagctgcatgtaaaaccctaacgaagtgcacttgtacggcttgacgtcccttcatttctcctccagtcttatcaagacagattcggcaaata

SEQ ID NO: 16195 - DNA, 100 bp, Zea mays
  unsure at all n locations
  Clone ID: LIB3150-100-P2-K1-B2
tttttnaaaaaaaaaaaaaaaaaaaaaaaaaaaaaaatttatttttnnaaaaaaaaaaaaaaaaaaaggggggggggtaaaaaaaaaaaagggggggggg

SEQ ID NO: 16196 - DNA, 316 bp, Zea mays
  Clone ID: LIB3150-100-P2-K1-C1
gggggttaaatattttttttgggggggaaactttataaaatggaaaaaaatttaaaaaaaggaaaaattatttaaaaaattacaaacaataatattttggcgattacaaaaaaaattcaaaaactttaaatttagggaaaaatattgaaaatttgggaaaaaggatacaaatttgaaaaatcaaagtttaattataggggaataaaaattaatatcatttgtattaggaaaaaaaaaattaaattaagtgatacgatagttaaaactaatgtaatggaaaaaaaagataatgtaatataaaaaatggagtgtaaaa

SEQ ID NO: 16197 - DNA, 451 bp, Zea mays
  Clone ID: LIB3150-100-P2-K1-C10
gaaattctacaatccaattcacttatttctgaaattctacaatccaattcacttatttcagacacaaccgacggcaagtcacctaagattggtactcttgccgttcgcttatttctaaaactacatgaaactagaaagagtctccaggtccaaggatgctcggttgagcgcttggttgcattctcgataaccaaaacggcgccacagcatgactagcaaaagtacatcattctgctacacttagctccctttcaatctcttcaagtgatctccccttggtctcgaccacattcccagctatgtacagaactgcaagggcacatactgatgcaaatcccagatacacgttgctgatcccaaacttgctcacgacactcaggaagtacaggccaatgaaaaagttagatacccagtgcatgcctagagataatgcgacagccttggcccttat

SEQ ID NO: 16198 - DNA, 418 bp, Zea mays
  Clone ID: LIB3150-100-P2-K1-C12
aaacttccaaccaaatatagactttccgccagtgggtaccgcttcaatatccaagggatttgtttcaacaaaaaaaaaacaagctgactgaaccctggtacaggacatatgcaagtaataacatatgtttctatgaaagcaacggctttagacataaatccccagactaggaaacatgtccgaagcaaatgacagctgcagcacaactgaagcgttggcttagtccttcctcaggtcgatgtactcgcgcttagtcccgactttgttgatgactacaatttccaacttgtctccagtgtagatgtctctttcagttgcagatgcaaacacattcttaacttgatcgatggcctctgacttcgacaatggtgtgacagcattcctggcagggagcaatagatgacttgggtgttttatg

SEQ ID NO: 16199 - DNA, 280 bp, Zea mays
  Clone ID: LIB3150-100-P2-K1-C3
gacacaacacaggtacttaaaatttaaggagatatcattgtcgattacacacgataatttgtctgctaaaaaatataggaaacagtacttgtagatgataaaaaagccaaaacttgcagcagtttgacgaaaacagcagctctagtcgtcgaagaggctgaagcccatttcctcgtccgactcctcttcaggctccgcagccttctcttcttccttgggagcagctgcagcgccagagtcaccagcagtaaccggggcggtaacagcaaacttgtttggg

SEQ ID NO: 16200 - DNA, 317 bp, Zea mays
  Clone ID: LIB3150-100-P2-K1-C7
ggcatgttgagaattctctcaattggggtaattcctggtggcatggcggaatttgttccttattgaaaacttcctcagcctgtagtcacgtttaaacaaaacctgtcaacttgcttgcctttgagcaaatactcgcaagttccacatcacaggaagattggcgaaactacatccaaaaccgagcgttccttacaatgtcttgtacaaaggcattcactactgactgcaaactcagaagaaaggggataacgttgtgacatcattttttttgcttgctcgatacattcagcttctggaggttgaacaagcatgtcttt

SEQ ID NO: 16201 - DNA, 314 bp, Zea mays
  Clone ID: LIB3150-100-P2-K1-E7
acttttctacaccgacggaagtcgagaatgaagtttttttactccacaccgcagagcaacaaccgcggcgaactttcaacgagcagggcgggactcaataatacaaaaccacaccataacaaaatcgaatttatcaactacaacaatcattaatccaccctctatagactaaaaacaattaatacaaaaatttaattaaattttagtgccgaacaaaacctaacaccaccataattattaggttttctactagtcaaatacctcaaattttatacagttatacaaaaaaataaatgactgtttacttcttcttg

SEQ ID NO: 16202 - DNA, 289 bp, Zea mays
  Clone ID: LIB3150-100-P2-K1-E8
aaaaaacaaaaaaatttttaaaaccaaaagtgttaaaagggacagattttaattaaaaatgcaaatactagagcatttaaaaaagggtttttggaaggaaacacccaaatttttcccgggaaaaaaaaaaaggtttttaaaaaaaaaaacctggttttaatggaaaaaaaattaatgcaagtaaatttgttttttttttttttttgacagaaataatttgcaccttttgggggaaccttatataattttttttacaggggggcaaattctttgggtgttttgaaaaata

SEQ ID NO: 16203 - DNA, 266 bp, Zea mays
  Clone ID: LIB3150-100-P2-K1-F2
aaaaaaaaaaaaaaaattttttttccaaaacatcagttcacaaaatccaggcgcattttaaacaacgggggcggatttaaaaatactatgttctcccggaaatgcacaaacaacacgaacatgcaaaacttgtaacaacttgttatgattattcaagataaaacatattgattgattctcttttctttcaacataaactgttcattcttaaaacttaactaccttttcctctctatttttcactcctactcatttatataacttct

SEQ ID NO: 16204 - DNA, 73 bp, Zea mays
  Clone ID: LIB3150-100-P2-K1-G6
ttttttttttttttttcatatttactactttaattttttttattataaaaataataaaaaaaatttctgttat

SEQ ID NO: 16205 - DNA, 288 bp, Zea mays
  Clone ID: LIB3150-100-P2-K1-H1
ggggaaaaaaaaaaaacccggagggggaaaaaaatggggggggattttaaaaaaaccaaccgggaagattgggggccccccccaataaaacccctttacccccggttttttacccaaaaaaaaaaaaaatttttttaaccccccaaaaaaatatcccgggggttaatttgggcgaatctcttttttggggggtaggccccaaaaaaccaaaccggttttttttttttttaccccccatggttttccccctgtgtttataaaaaaataagattcttgttcgggggggtt

SEQ ID NO: 16206 - DNA, 411 bp, Zea mays
  Clone ID: LIB3150-100-P2-K1-H6
cggtcaactcatcatttattttcaaagctagtgctataggtacacactattaaaggcgtacaaggatttggtttcgaaccatgcattcaacatctgggcgaaaaggccactgaagcttattctggctattagacactgaagcacctacaacggttgcttggtagcaggcaaggcaactgaaattcacttgtaaaacagtcgtaaagttaccatggcagcactttcagaccacaattttactcgctttcactctcttcctcgctttcttcgacttcttcgaggttcaggtggttcatattcttttcgagagggggcaagtcatcgtctgaatcaccttcagatccctcctccttggtttgccgtgattcctctgccccgtttacaggtggctttggagataaatgatgaggt

SEQ ID NO: 16207 - DNA, 214 bp, Zea mays
  Clone ID: LIB3150-100-P2-K1-H9
aaaaacaaaatgttatgttcttattagggtaggggaaaaaaacaccataattatattttcttttaatttcactaggaaaaaattgctccctaaaaaagtaaaaaaacttattttttccgtcgcaaattaaattaggttaatccttaattcccattttctgattaataaaaaaattttaatgattgattttttttttataaaaaaaaatttaaaa

SEQ ID NO: 16208 - DNA, 113 bp, Zea mays
  Clone ID: LIB3150-101-P1-N1-H1
ttaacttatagagttgtcttggctatgtgttgtcgtctggccctaagattttgtcttgaaacaagtttaaaattaagattatttgtaacaagtgtttaagattactcgtggtg

SEQ ID NO: 16209 - DNA, 453 bp, Zea mays
  Clone ID: LIB3150-102-P2-K1-A1
aaaacaacatatcaaacctctggtttttaaaaaatcccgacaagccagtaccatgtgcatacaaaattgcaacaattactcataagtctaagtagggagggtcgactgatgcaacacagccagggcagcataaggtacttataagctgtaacaaaataggccttgaaaacatctcaaagcactgatcattcttaggcagaggtggcagcagaagccttggcggcggcagaaagcttagacctcctcttggccaagctctcactgcggcgggccctctgttctttcagtctttgggcaagaagcttttggtactcagcagcctcagacttcttcttagcgatcctcttcttcttgtcagcaattttagcacgcttcctctggagggtcaagggggtcacaagccgttggatcttaggtgccttgctcaccttcttgtcattcttggtagagaat

SEQ ID NO: 16210 - DNA, 333 bp, Zea mays
  Clone ID: LIB3150-102-P2-K1-A4
gggagaacgataaagttctttattatcaaacacctagattcttataaaccaacttctctccacagctagtttctccctatagtcagtttatcaccgaaaaaagctgatccaaacaggccagtaacacaagcccgcccagtgtgatatggcgcaaaacatggccgtccagtaccaccagccttgatgagaccagtccgtcattcggaacgagcgtcaaaacatacatgcttcaccaacgttaagttttgcatcaatataccatgtcttcacttcttcacacagaaagggcaaaagcttgcagaccatggcttcttaaaacaacctctacttaca

SEQ ID NO: 16211 - DNA, 179 bp, Zea mays
  Clone ID: LIB3150-102-P2-K1-A5
cttctcactttcttttataattttaaaaagcacacctccgtaaaaaaattcctgggcccagctttggtattgccccaacattgccacaaagatggggataatgcctattcaaatgatccatatgtcgatgtaaacagctaaaaaaatctttttttttagaacaatgcttggctacatgg

SEQ ID NO: 16212 - DNA, 237 bp, Zea mays
  Clone ID: LIB3150-102-P2-K1-A8
tattgtgtttttttaatttagagcttccaattaataatttttttttccgggcaaattccattggggagctcaccacagaacgtgcggtacttgggtctattaagcgccaggttcaaaaaaaaaaaaataaaccccgacatactggtggaggcaccgccgtgaaaaaaaatcccggctcatatcaaaactcactaactgtgaagttgcgatatttaacatacgagctgtcaaatgaac

SEQ ID NO: 16213 - DNA, 105 bp, Zea mays
  Clone ID: LIB3150-102-P2-K1-B9
tattatataaaataaataaaaaaatacaaattttttaaggaaaccacaccgaggtacaaaactagaaacagaaagacaagcaaagccagaaaaccgacaaaccaa

SEQ ID NO: 16214 - DNA, 213 bp, Zea mays
  Clone ID: LIB3150-102-P2-K1-C12
gggctaaatgctcatacggccacagggacagtcacacagacacagtacgagctttcacaatttacaaaggcgccgtcccctggccagcactacacgatcctgatcaagtgatcatgccagcacggccgcggccagggagagcagggacgtggcgacagccttggctactgagcttgcggagagggccttttgttcggcgttagggttcggtaa

SEQ ID NO: 16215 - DNA, 389 bp, Zea mays
  Clone ID: LIB3150-102-P2-K1-C9
ggggaggaaaaccggacaggaatatttgttcggaattgcctacatgagagtacaaattacacaattgttactttaaacttctttgatataaacagagtaagtttgtcaacgataaacagagaaaatatttattgggattctgctagtgttggaagctgcattccaggcctttgtgtccagcttttgataaattagaaattcttaattgcctttttcctaattattttttgagaagcttttaaagcacttttcacctttgggaaatgacaattattgtttgtgtcacatcaatctcttactaaattttataattttctctttccctctaacaaaaatatagttataagtatttttttctttatttgtcacttgcgactattttttaattt

SEQ ID NO: 16216 - DNA, 333 bp, Zea mays
  Clone ID: LIB3150-102-P2-K1-D5
ggtgttcgcctctttgaaattttctttcgcttcaccggattctttacagttacctttctggcacgggcaggaaccagttcctcttcctcctcgtcttgatactcatcctcctcgtcaccatcgacatcgggatcaaaatcaatatcctcatctatctcgaccttctcgtcatacaactctgggtcaaaatccatgtccttatcatcttcctgcttccgctgatgagatcgcttcgctgccagagacagcttcacattccggccacgggcaccgtatttaacaatgctcttcggccgttgtggggccacttctttcttctcatctggctcctca

SEQ ID NO: 16217 - DNA, 203 bp, Zea mays
  Clone ID: LIB3150-102-P2-K1-D6
attatattatctttaattattttattaactacccctatcaaatgggggcaagcggaaagatacaattattttccacaaccgggactataaaattaagagggcctatacaaatcgccgcgccggattcaaagagaaggccctctagcatctaggcggggagggggggggacttgggaaaggacccaataaataactccttttaa

SEQ ID NO: 16218 - DNA, 179 bp, Zea mays
  Clone ID: LIB3150-102-P2-K1-E1
cacgaatcactcttttatactttaaaaaaaaacccccctgatgcaggggttaatcaaagggaaaaaagttcaacaaacgatgtgacatcgcaacattgttttgtataagcctacacaatatcccgtttccatacaaaacacttttcatggggggggaacaagacatcttgttggtataa

SEQ ID NO: 16219 - DNA, 318 bp, Zea mays
  unsure at all n locations
  Clone ID: LIB3150-102-P2-K1-E11
ttatttaatataaaaaaaaaaattaattaataaaaaagaaaaaaaanaaaaaaagaagggggaaataaaaaaaagaggggggaaaaaataaaaataaaaaacaataagatattataaaaaaaaaaaaaatatataataaaaaaaaagaaaaaaaataaaaaaaaaaaaaaaaagataaaaaaatataaaaaaataaaatgaaaaaattaaaaaataataaaaaaaaagaataatataataaatatatattaaaataataaacaaatataaaaagaattaatataaaagtaaaaataaaaaaataaatataaatgaaaa

SEQ ID NO: 16220 - DNA, 187 bp, Zea mays
  Clone ID: LIB3150-102-P2-K1-E7
aatagcgtaaatgggtgggtcagatagatggaggatataatgcctactgatgccatatgtacaaaaaccacacggtacatttttagattgcatagtgaaaatgcggagtgcgaggtccattttcttcaccagtcattataaagctggagagctcattggttagctaacctatctcacctgaatagct

SEQ ID NO: 16221 - DNA, 125 bp, Zea mays
  Clone ID: LIB3150-102-P2-K1-F12
ttttgtgtttgttaaggaaagatgacactcgcttttatatgcaagtaaccaaagtctggaagaagctatgatgaaaggtacgaatataggacatgaaaggaaggaatataggagatgatggagag

SEQ ID NO: 16222 - DNA, 240 bp, Zea mays
  Clone ID: LIB3150-102-P2-K1-F4
gaataaaacattgagtcaggcaaaaatgataaccagcgacactttattgttcagggcgatactagtcaagaattatgcgcttcgtatagagaggttcaaataaaatagtaaaaccaaagctattaacggcaacataaattcttgggcgcccaagctttaaagtaccagtatacatactctttgatacagaagcatagcagaagatcatctagctgtcatagcatcaaagcttaatattgt

SEQ ID NO: 16223 - DNA, 422 bp, Zea mays
  Clone ID: LIB3150-102-P2-K1-F5
ccgctaaattttttttgatccaaaatatccgtgattttttgttaaagaaattaaaaagaaaaatcaaaaaaaatatcacaggatcctcatcctttcgccgccctttacctaggatatttctacgcagcagcttcttattttttggccgcacattgtcttcttccacacacggcagactccagctccctctgccgaccggaactccctgctcggcgttcctctgcttgtccatcttccctgtgcctagacatggcgcctccttttccttgctcctgctcggttccatccatggccggaaccctttcctaacgagctccccatggcgcccccgctcctggattgccccagttcgcggtgcccccttattccttgctccagatcgatggtccttgtttcccctggccaacgttcttcccagccat

SEQ ID NO: 16224 - DNA, 355 bp, Zea mays
  Clone ID: LIB3150-102-P2-K1-F6
gcacaagagtctttccacagtttttacaaccatgcgttgcctgaacaaacaccaagagcagctacaaacattgcaacctgacctacctttgagaccatatataaagatcaccaaccagagagaggcaactgactcacaacacaatttgcagctacaaaaccattgtatatgtacggaggtgctattccttgacgtcttcaaagagttcatcttcgtcttcgtcctcgtcgttttctttggcttcatcagaatcgtagctgtcgtactgtaggaggctgccaaagtcgctggattgtgccttgatgagcctttcctggatcctttccttgatggctgtccccattgagtggcaccc

SEQ ID NO: 16225 - DNA, 284 bp, Zea mays
  Clone ID: LIB3150-102-P2-K1-G5
caatggttcattcaggtcattgctcacactgacactgccacccatggggatgcgtgacacattattactcaatcattgccgttaaatgactcaactagctagctagccagcggctatactacagcacatagtttttttagggggggacaccgccggcagtagcgtaggggcatggagtcggttgttgcaggccgcacatcgccgtcagttgctttgttatttggtccgtcaacagccccgagacctgtccgttttgcggttgttgtttcatgatggcctggagg

SEQ ID NO: 16226 - DNA, 334 bp, Zea mays
  Clone ID: LIB3150-102-P2-K1-G6
agaaattctaaagcaggccaatgaaatttccagattccaatacaacctatgacccaaacaaaagtagcactagatcagcatgaatacataagccagtgcagatcatagcagagattcgttaccaggcaagccaaaatcagtgacaaaggaggcagacccacactttacattacaggtagctaagcaaaagcaccatcagccagatctactaataattaatcgttgattggttgataatcacacagcaaccattattcggtttattcgagcagtcttgggacgaaaagggggcccgattggaattaaaagggccaggcctagaaggggaaccaaa

SEQ ID NO: 16227 - DNA, 320 bp, Zea mays
  Clone ID: LIB3150-102-P2-K1-H10
ataaattaatataaaaataaaaaaaattaataaaaaaataaaaaaaattataaaaataaaaataaaaaaaatatgtaataagaataattataaataaaaataaaaaaaaaaaaaaaatttaaaaaaaaaaaaaacaaataaaattatataaaataaaaataaaataaaaatataaaataaaataataatataaagatattataaaaaaaaaaaaaattataaaaatataaaaaaaaatataaaatgtaaaaaaattaaaaataatataaaaaaataatatataaaatattaaaataaaaaaaaaaaaatatataatataa

SEQ ID NO: 16228 - DNA, 261 bp, Zea mays
  Clone ID: LIB3150-102-P2-K1-H2
ggcagcaccaagtatgctccatttttttccttaggatttaacttagaataaagcctgacgggggtaacagcacccatcgatccgcagtccatgctggttgatgcatgggtctgctggagccgaggatgaacacagcactaacaactgacacagagcgacctttaattaaaaacacagatgggcaacaacaaacacgagacgaacgaagataaacactctggactagggtaaacaacacggtagcgaacaggataacttggc

SEQ ID NO: 16229 - DNA, 108 bp, Zea mays
  Clone ID: LIB3150-102-P2-K1-H5
aaaaacggaataatacttttctctaagcattacaataggtcattcatgtcattgatcacactgacacattttcccaatgatgatacttgacatattattacctaatta

SEQ ID NO: 16230 - DNA, 416 bp, Zea mays
  unsure at all n locations
  Clone ID: LIB3150-103-P2-K1-A5
caaaataaaataacagtttttttataanccacagagactttaacgggggggtatattgcgagtttttttgtcccaaaacaaaccaaccacaaacaagaagataaaacccaaaagcacttaaaaaaaacaaaaaccagcagcggggacacaaaaatagtccgaaacaacaaccaaacgagaacttaaaaataacctcaaagaaccacaacgggaaaaaaccaaaaaaaaaacctgaaaaaaacaccaccctccagaaagggggaagggggaggacaaaagggcccaaccacaagataaacacgcgggggaaaaaaacaccgggaaaaaaaaaaaaaagtggggggagacccccacgatgaaaaagaaataagaaaggggggaatcaacatacaaatggtaaccacaaaaaaaataaa

SEQ ID NO: 16231 - DNA, 335 bp, Zea mays
  Clone ID: LIB3150-103-P2-K1-A6
aaataaattatatctttatattaaaaataggggaggatttttaagaaattttttttaaaaaaaacccaacacaacaactacaaaaaaaaaaacaccaatcccaaaaataaaaaaaccgggcccccaaaaaaaaaaaataaaaggtccccacaataaaaaaaccccaaaaaaaagaacccccccctatttttttataaaaaaaaaaacaacaaaccccttttcccaactatgagcccgggaaaaaaaaaaaaaacttccaaagaacaacataaaaaaaaaaaaagttacaatatttaacaaacccctccccccacgacaaaaaaaaaaaaaaatac

SEQ ID NO: 16232 - DNA, 328 bp, Zea mays
  unsure at all n locations
  Clone ID: LIB3150-103-P2-K1-C4
aactncaattaacgttttgttgtctcaaccgccgcagcgaaagggaaggagggcttgtccaaaagttttttatcattagcaaacgccaaaaccgaattaacagaactacaatacagcatgcgcatacatacctaacgtaggaaacaaaaaaacttaaactacgtcatctgatgcataaacatacacaacaaagtcaccagccctagaggcattcaactcacgtgcacaagaaacaaagcacagaaaggacgggcttaaagaaatagtatagactgcaaacacctgagagcaccaaaaactggatgtcaaacaatacaaaaccctaatc

SEQ ID NO: 16233 - DNA, 264 bp, Zea mays
  unsure at all n locations
  Clone ID: LIB3150-103-P2-K1-C6
aattagggtcaacaaaccaaaaacccattaggggggtttgttcgcaaactttttcaaggcatcaaacagnaggacaccaaaatgtttgtctgggctctatttccattaccgcaaaaaaacatacaacacgcaccttaagtggcagcatgcactaatgaccggagggaacaaaacggggggctttcttaaaccggctcagttcttatagttcttttgtgccccaactgccttctttttggcgggcaccaagatggtttttgttca

SEQ ID NO: 16234 - DNA, 359 bp, Zea mays
  Clone ID: LIB3150-103-P2-K1-D12
ggaacaaattttacataaatcgcatcatcaccctttccgaaaggggcacaaattttaaagagttgagctgcccaggggttgtttgtaaaattgatttttgaagcatgatggttacaggttaccccccccctcccgggttttagcccatcccaaatacaattccaattttttgggggggcataccgtctccatcaatgaactcaaatggcggtttgaagatccaccctcattgactgctttgggagaagcctccttaaactaaagagcacgttccctaagcgcctttggcccagtttcataaaaagacataagttttttcacagcccgggcaatatccttttttccgaacaaaccaccct

SEQ ID NO: 16235 - DNA, 249 bp, Zea mays
  Clone ID: LIB3150-103-P2-K1-D6
ccacgcaaacccaaccatatggattgcattcattacacactttttgggggggagagtttttccaacggaccccaatgcaagagtgcaatagctcccaacaattgcaatagctacgtcaacagcaagaggtggttgttttaaagaaaggaagtaacctcttgtccatccacatttgtttttataaaggggcttttataaatctctttttaaacattcaagcggtaataaaattttttcaaaattccaatg

SEQ ID NO: 16236 - DNA, 353 bp, Zea mays
  Clone ID: LIB3150-103-P2-K1-D8
ggaggggcaaaaggctcattttgattttacttgattgatgaaatgggtaacaacaaaataagaacaaattgcacacagttgccaatttccatgactcacgagttcagcaatctttatgacttacaagcgaaccagtccaaatgcaaagacactagtagttcattacaagacttggacacattattatcccgccgtattttttagcagaatgcaaaaaaaaaaaggcagcacatgcgttgcacggaaacatgatggatctcacacttctcaataacctaatcgagcaaggcagatattgtttttttttttgcaaacggatcagtagcggcaatcaaagttgacacaacactgtt

SEQ ID NO: 16237 - DNA, 416 bp, Zea mays
  unsure at all n locations
  Clone ID: LIB3150-103-P2-K1-E11
cagaaccgaacaagggggcattgncagtgttgttattgcgcccatcgggggggatcacattattacacttatgaaatattggcctgattgatctcacgtgaaataatacatccgcaaggctgccattgcaacacgaaactacattctcctgacggtagtcgcacccattcatcattacaagatttttttcttcatggcaaatataaatctcatgttgtatattcagcatttatttcaacatatttgtagctcagatcacagccccatgcctttccatttcctcctccactcccaactgatatatcaaagtttactgcaccatgggcatctccagtatctttgagatacttgctagcggccaatttgacaaaggggagtggttgtccattattctatagcggaattactcccagaga

SEQ ID NO: 16238 - DNA, 348 bp, Zea mays
  unsure at all n locations
  Clone ID: LIB3150-103-P2-K1-E2
aaananaanaaaaaaagggggggtttttttaaacaaaaattttttgggggcccgcaaccaccaaagcccccaaaacaactttttccgggtggcttatccaaccaaacgggggggatcccagcccccaaattttgggccccccaacctttgaaccgccaaatacctttggggccccaaaggcttgcctttttagtccccaaaagccccccccttggttcccacccccacctttttgcgttttttggccccccaaaaaaaggagccggggcctccaccggggctcttggtttttttgggccccgggccagccttttctccctctaggaaaattccctctacggggtggcc

SEQ ID NO: 16239 - DNA, 253 bp, Zea mays
  unsure at all n locations
  Clone ID: LIB3150-103-P2-K1-E5
tttttttttatatatataaaatnatntactacaataanattaattatacaaagaaaaaaaaaaaggggggggtttataaaaaaaatttaatattcgaaaaaaaaacaggaataaataaaaaaaatgaaaaaaaaaaaacaccgctagcaaaaaaaaaaaagagaaaaatgtaaaaagtgaataaaagaaaagaaaaaacaaaaaaaaagggaaaaaaaagtaaaaaaaaaacaaaaaataaaaattaataatg

SEQ ID NO: 16240 - DNA, 371 bp, Zea mays
  Clone ID: LIB3150-103-P2-K1-E8
ctactgtcacttgtgatttttaatttaaaaacacccaccgaccgcggtgtaagggtgtacataacctcaatgggatacacagacatgccgccgcagagcaaaacacgtcgcagatcccctctctctctaactccgtccctctctctctctccctctggtcccgcaaaaactaggcgttggaggcacgttagcgccaggttttcctcccatgcttacgcagccacagccgtccacaccttggatgctcacagctcgtccttgacgggctcggcggcggctgccttctcggatgccggtggcgcctgggtggtggtggtggtggcgaatccttctgtcttcttgctctttttgatgaagttgacgattttatt

SEQ ID NO: 16241 - DNA, 425 bp, Zea mays
  Clone ID: LIB3150-103-P2-K1-F2
ttgatagagcattttgttttaaaagggcacacgaatgacagaagctctctagaaaagagaagagataaatcaagacaggtgctccgcttcaacccagctgcgacctgataacttaataagacagcaacctaataactaataacttaatgagacagcatcactgcacctgaagcaaaatttcatgtgcttattattataagttccgaacgcaccataatcagagtccttatgaatccaccagtacaaaactgccccacgaagagtaaaaaaacatatctattccgacgcaaactacagtaggtcaaccagtaaataccactggctgagtacttagaacattgtttggggtgattcaggttttattcacgaaagctgcgatactatcctcatttcagttgagtaactgcagcgtgtattggatttgc

SEQ ID NO: 16242 - DNA, 233 bp, Zea mays
  Clone ID: LIB3150-103-P2-K1-F6
ggcatcacccagaagcaccatttttgggctggggatttaacttataatttagcctgacgggggtaacagcacccatcgatccgtattccatgctggttgatgcatgggtcttctggagccgaggatgaacacattacttactactgacacagtgtgaccttcatttaaaaacacatatgggtaacaacaaacacgtgtcgatcgtttttaaacactttggacttgggtaaaca

SEQ ID NO: 16243 - DNA, 262 bp, Zea mays
  Clone ID: LIB3150-103-P2-K1-F7
tgcgggaaaagccaaaggcaagaggcatccctcgatgttttggggagtttgagcaacgcgcttgcaaacataaattattgaatggccattctcagaactacatataaccaaaattggacacaggtggccagtgtttagttgtcagccacttcaaagagggtttgctcgtagtcagcaggagcctcaaaaccgtggggggtcattacgggtgcggctacactggctagcccaggggttttgatttccatccggaattttactc

SEQ ID NO: 16244 - DNA, 356 bp, Zea mays
  Clone ID: LIB3150-103-P2-K1-F9
ggggaagaccagcaagattacctgttccaaaaaaaaaaggttagggaaacgacattacaacggggggggacccccccttgttagaatttaggggggtggaaaaaaaaacaggttttttttggtttgggggcccccaccaaaaaaaaacctgggggggttttgggcaaacaccaccatacatttattggggccggccaaacattgtaacaaaagggagctgggggctttttttgctccacaagaaaaaatccccaatcttttttttttttaaggggggttcactggggccctgaacttttttccggggtaaaccgggggattaccgggctttttcttgtttctgagcaggtgggtga

SEQ ID NO: 16245 - DNA, 189 bp, Zea mays
  Clone ID: LIB3150-103-P2-K1-G6
ccctaaataaattttttaccacaaaaaaaccacagggaggggtgtttttaacaaatttatatttctccatcattcaaaaccagtggccaaacctttaaaaaaatctaatattgtttcactttttaaacaacaaataaacaaatatttttctttaacaaaccatatttatagaatactaatggacctata

SEQ ID NO: 16246 - DNA, 307 bp, Zea mays
  Clone ID: LIB3150-103-P2-K1-G8
ttttttttttttttttttttttttttttttttttaataattattcctttatattttaaaaaaaagggtttttttaaaaattatttttatcctaaacaacccaacacaatatattattaaatttataactaattaaataataacaaataacaaaatacctactcaatcttacacaaaaaaaaaaatccccacaccaacaaaaaaaccaacacactcaccaaaacaaaaaaaaattacccaattcccccaaattacaaatttccaccacatcaaaaacaacaccaattaaaaaaaaaaccaaccaccac

SEQ ID NO: 16247 - DNA, 165 bp, Zea mays
  unsure at all n locations
  Clone ID: LIB3150-103-P2-K1-G9
ttttttttttttttttatttttttttttcttttttatanttttttttattaaaaaaaaattagggggttttttaaaaaattttttcttccccaaacacacaaaacaacaatcaccaactaaaaaaataccactaacttagaaaaaaaaaaaaaacaccaataagc

SEQ ID NO: 16248 - DNA, 429 bp, Zea mays
  unsure at all n locations
  Clone ID: LIB3150-103-P2-K1-H10
tttttttttttttttttttgatttattcaataaaattaatttttcaaaaataaataaaatattatggtgttttattaatnaaattatttattatcccttcactccaacatacccaccaaaattttataataataacatcaatacaaaacataaacaattaataaataaaaaatataaacaaaataataaacaaaaaataaaaaaccaaaaccaataaaaaaaaaaaaataacaaaaaaaaaacaaaaaaatcaaaaaaaaaaaaaaaaaataaaaaatcataccaaaaaaaaaaaaaaaaaaaaaaattaaaaaaaaacaacaaatctcaaaaaaattaaaacaaaaaaataatataaaaaaatttataaacccttcaccaactaaaaaaaaaaaagaaaaccatacaaaaaaataaaaacaccccccc

SEQ ID NO: 16249 - DNA, 397 bp, Zea mays
  unsure at all n locations
  Clone ID: LIB3150-103-P2-K1-H5
ttttttttttttctactcaataatatccaaaccttcaaatanattcttacaacacaacacccccggggggggtcattaaaattttttttctttccaaccccccacaccgaccaaacagctaaaactacacacccaccaacacaataaaaagccccaaattaacaaccccccacctggcaaaacaatgcctatacccaaaccaaacaacatcaaaacaactccccaacctaaaaaccaaagtaactaaaaaaacccccccgaaccccacacaaaacacctggaaaaaaaacaccctctaaccagccccccataaatcaaaaaaacaaccccaccaacccctttccaaaacaatacacaaaaaccaaataaaatgtgaacccccaccaaacattatcat

SEQ ID NO: 16250 - DNA, 311 bp, Zea mays
  Clone ID: LIB3150-103-P2-K1-H8
ggacggaaagggaactatttttgggtttaaaccggctccgggaggagggaaaaaagagactatgctaaggggccctttggcaacgctcgggcttgccacaaacagccctattacgatatctggactgtattacaggactaatcacaacatgtttaaactgcaaagatgctgcaaaagcattctgcatatacatacatttaaatgccccgttattgccagttcccaaactggtgctgtttgggggaaccaccaccccggggggttgttgatcctttgcctgtaccgggccccccatatggaccaccccggtg

SEQ ID NO: 16251 - DNA, 298 bp, Zea mays
  Clone ID: LIB3150-103-P2-K1-H9
gcagcaccatgaatcactatttttttccttaggatttaacttaggataaagctctgacggtgttttacatcactcatcgatccgcagtccatgctggttgatgcatgggtctgctggagccgtggatgaacacagcactaacaactgacacagagcgacctttaatcaaaaacacagatgggcaacaacaaacacgtgacgaacgtagataaacactttggactagggtaaacaacacggttgcgaacaggattacttgtccgctcgggccccaccgattattttcttcagttcccgt

SEQ ID NO: 16252 - DNA, 107 bp, Zea mays
  unsure at all n locations
  Clone ID: LIB3150-104-P2-K1-A1
tttttttttaaaataaaaaaaaattaattaaaaaaattttnttaaaaaaaaaaaaaaaaaaaggggaggtttaaaaaaaatttttatcacacaaaacccccaancag

SEQ ID NO: 16253 - DNA, 362 bp, Zea mays
  unsure at all n locations
  Clone ID: LIB3150-104-P2-K1-A5
cttgcggcaacccagngcaacaaacaaagggggagttcataatcgggctttttagtcgcctaacccaccccggtcacacctttgttcgggccgcaaaatggaatctgatgataaacatgtaaaagcgcagctcgatggcattcgctgcatcgcgctgagcctgcttcgaaatagacctgtctcctgatacaccccacctgaggcgtgcagctatctaagcagccctagttcgtcttcgccttgggggccttctttttgccgccctgccgcttcgggatggagttcttcatgcccagaaagaagagcagagcttcgatcagcgccaaatcctgggtgaactttgcaaagaggcctgcaaattc

SEQ ID NO: 16254 - DNA, 333 bp, Zea mays
  Clone ID: LIB3150-104-P2-K1-B12
aacagaattccaaccggaacgggggggcgaattaaagcaaatttactttggtactggtacattcgactcgaataggatccaaaaatactcacggcaatatcactggccacacaaagcagacatatagctatggaaaaattaggctggtgcattgcccagccaccaccattgccagcaccccaggggaaggactgatcgaaagtcacgcctagatcttgttgaaggcaacgatgtcgcagctctggacgtactcgttaactggctcagcgcacagatagtcctcaatgagagtgtcgacagagacaagatcggcgactatgggcaacatgattt

SEQ ID NO: 16255 - DNA, 379 bp, Zea mays
  Clone ID: LIB3150-104-P2-K1-C1
aattaaagtttgtataattttttgaaacaatccggtcaggaatcgttccgggccaccaatccagcagaaacgaacaaggcctaaaggtttacccactccggacaacctgcaacgcagaccattcccgaggaactccggacaacggccttgcacatgattggacccaggctttacagtagccagatataattaaacgacgcacaacctagagtagtgttctcaagaacccacgctctaatgttcgacgattatataatcctggtacagaccctgcgatattgatactgatagccatggttcacttgggaataatgctcagcccatctcccttcgaaatcttgagtttattggactcaccacaaaccattatatcccacgt

SEQ ID NO: 16256 - DNA, 417 bp, Zea mays
  Clone ID: LIB3150-104-P2-K1-C2
cttatcaagccttttggcccttcgtcctactcccacgagggccctcaccagcaggggcttatcgaaatacctttcacacaacaaaaaccaaccgaatgtccggaacaaaaacaaaatatgttgggatgatcaccaacatggggtgacaaccaccacaaaacgatcggttcaaaccacacgacaactattggctgaaaactacaataacgagccggaaaccaaacgcccaaaacaggacaaccctcacattctcacctctaaacacaatgaaagccgggcccaccacaccctaaaactaaccacctgcaaacttggaatacaaaactaaaccgccccccgacactgacaagggatagctcatgccctactcgtccaaaagaacccagccaaacattacaacccatcccaaggaccgcc

SEQ ID NO: 16257 - DNA, 320 bp, Zea mays
  unsure at all n locations
  Clone ID: LIB3150-104-P2-K1-C6
aaattcncttttttttccncnnnnnnnntnnnccaggggggtttttgcaaaacttttttctcaacccaagggtttatacatgctataaaatagtcccgcccaataccaccaatgactgtttggaatgtctgaccaacaaaaagggaaaatttctacttctagctgataaataaaaaagcggggctggcaacaatgaacccaattgtctcaacccagttccatctaattatcttgggggctacttctgcatgaccaaattttttatcgccgaccaagcgacccagtcacaatcttttggccatttccactaatatccaaac

SEQ ID NO: 16258 - DNA, 404 bp, Zea mays
  Clone ID: LIB3150-104-P2-K1-D11
ggtccaaagaacattcatctttatagtagggtaataagcgttgaacaggaacattattacacattaaacaaaaaaaaatatatagtgccggtagaagacatctaacagattgcaactgcgattctgtcctgagtttccatgatacatccggagctcctagtcagttcgcagttgatattcaaggtaggcctcaagccttgctcgcaatgttgctggacagccagtccaggccctcatacagaccctcgccagttgtggcacaagtgctctggatgtaccagtgtcgctggcgcaaggagggtaatccaagcttgtcagtaatctcagcagcattcatggcattgggaagatcttgcttgttggcaaaaacaagcagcacagcatcacgtagctcattctcgttc

SEQ ID NO: 16259 - DNA, 412 bp, Zea mays
  Clone ID: LIB3150-104-P2-K1-E1
aatgtgagtcagccgctccttataaacgacaggggggtggcaaaaccaaacttcttttgtatcgcaacaacaaaacggtgtattgcagcataggcaacacaaggaaaatccagaaaccactacagtaaatagtagacaaaaaataccaaattccagttacggtaccacaacaagaccaaaaaaacacaatttcattggatccttttgccgcatcctccgcgttcatcatcaatcatcaccaaaagtagtcttctttcctgcactgggagtgccagcgctgtgcttgttaccaaagccacggccaccacgttcttggccgtcatccctaccaccacgttggccaccgaatttggcgccaccattcctgcccccagatcttttaccaaatttaccaccaccacgccggtcacca

SEQ ID NO: 16260 - DNA, 181 bp, Zea mays
  Clone ID: LIB3150-104-P2-K1-E5
acacaggtaagtcctttttttacattcttctgttgaataagaaaattcagagggcgacatgaaaaaagttttttagtccaggaaagggtgaagaaacataaataagtgaatcttgaccacccctaaatgtaatcaccatcacaaaggctaggacttggccctaacgcaacctgcaacacag

SEQ ID NO: 16261 - DNA, 413 bp, Zea mays
  Clone ID: LIB3150-104-P2-K1-F1
ccccaatgtttatcattgttttttcctcttcatacccctgcatgatactgtcatgatatgatgatcatcgttcacgtgacgaaataccaaccagaacaaataacaaggcaaaaaaatcgctgggctgagcaagcgccccggcaagggccctacttgatgtattgggagacccacttgaaaccatcgccgtagcccatcttgcgaacaacactgcacatgaaaacctcaagtggccggacattggagtcgccaaggttgaccttgcccttcccggttgtgaagttgctaaggcctaggtgataccgcagctcctcttcagaggcagcatacgggatatcaatcttgttgccaaggatgagaaatggaacatttgccaaggaatcatctgacaagagagcgtccagctccttttt

SEQ ID NO: 16262 - DNA, 393 bp, Zea mays
  Clone ID: LIB3150-104-P2-K1-F12
gggaaaaaatgattttccggttagttcgtaaacattctttttttcatacattaggccgatcggatccagaccagatacacagcacactccagcagacagtacacgtacaaagctgtcatttcgtacacgcttaacttctcaaagatcaaccgcgcgtggctaagcatattagcaccgccaccacgcggccggaccttttttttttttggctatagctaaaccagccaccgtaccgtccgtcgtccttccagattgggacacgaaaagaacgccggcgagggagagcatagcagagtttagaaaaccatgggcaccggctcactcactccaggtcctggcatcccacgagcggggtccctttgctgcactggttgggcgcgtacgggttgcacc

SEQ ID NO: 16263 - DNA, 396 bp, Zea mays
  unsure at all n locations
  Clone ID: LIB3150-104-P2-K1-F4
agaaaatcggttantatcgtacaattggacaacttcaaaaggttctctgaaaaaagtattgtagctgaccaaaaagggatgtctactgtctgcacacaacacaagtttgtcaatgatcaaaatctcgacagcatcaacaactttctaggatcattgacacctgcctatccttgagcagcatctacctactgttcatcatcagctctcatatgcgctcagaaacttcttagcagcatccaaattcagctctttgtaaacaagcttctcatgagtttcttcaaatgccttgcagaagaactctgcttttgttggtccaatctttttctctgcagccatcttcaacttctgcataaataaatcttgggcgtcggatgagtccttgtcattgcccttcgc

SEQ ID NO: 16264 - DNA, 243 bp, Zea mays
  unsure at all n locations
  Clone ID: LIB3150-104-P2-K1-F8
tttttttttttttttttttttttttttttttaattttttttttttnnnnnnnnnaaccaaaaacggggggcaaatttattggccttttttaaacctccccaccaaaggtggggccggttgggtcaatacctggtggaaaaaaacattgggtggccaacccaatcaacccccttagtccaaccttcctttaatttttgacaaatttgggggttttgggccccccaaggaataaaaccaattttt

SEQ ID NO: 16265 - DNA, 384 bp, Zea mays
  Clone ID: LIB3150-104-P2-K1-G3
gaaaataatactgacagatcatgagtcctctgcgacaagtcacacaacaaaccaggatggttttgcaatactattcatcacatagcatgttttcatccaagcggcttcatcttaattttttttataaatattcctgtatccaaacatccgggcaatcatctaagaggtgaatcataagacatgctctggaacaagaggcgcaatctaagcttgtgcggaatcagttcccctttggtgcacccttctttgcagcctcggcagcggctttctctgcttcaatttcggcaacatactcatcaatcttagccccttctagttcatgaaggccggcctcgtgtgtcatcacttgaatttttatgttcttgccaccactcttaacaacct

SEQ ID NO: 16266 - DNA, 308 bp, Zea mays
  Clone ID: LIB3150-104-P2-K1-G5
ggggaccgggggcaaatataaaacctcggaagggcccacactggatgggggccgggaaaaaataaagggccccccccaaaacctttttaactaaaaaaaaaattttggccatttaaaaaggctttcataaccataaaaaggggccaaaaaaacaataatttgagaaacatttttaacaccagggggggcaaaaaaaaaccccccaacatttcacccccccccttgggtggggaacccggaaaactttttggtaaccacaatttccatttggccaaaaccctcaaaaattttcttggccttgggggggg

SEQ ID NO: 16267 - DNA, 164 bp, Zea mays
  unsure at all n locations
  Clone ID: LIB3150-105-P2-K1-C4
aacggtagagntcagacagcgagaattcttgtcnggagacaagcaaccngggcgggcgggaactaaaagaaggtgaagcaagcacaacangaggaaccggagcaaccgacagaaagaagaggagggagcaagggggagagacaagcaggcaagcccccaaacag

SEQ ID NO: 16268 - DNA, 293 bp, Zea mays
  unsure at all n locations
  Clone ID: LIB3150-105-P2-K1-E5
ntttnaaannnnanannncggcacaaaaaagggggattttttttccatnatnganacgnccagagggaaacattattagcaagcttattctaaaagttgggggcaggcaaaacagtctctgctcctgcgcaaaagctactagcttacatagcacagttgagcaaaaaaaaagtatgttcgtcttcagcgtaacatcttaagcggacttcacggtggccgcgttgatgatgtcnatgaactcaggcgttaaagaagctccaccgacaagaaacctatcgacatcaggctgtgct

SEQ ID NO: 16269 - DNA, 192 bp, Zea mays
  unsure at all n locations
  Clone ID: LIB3150-105-P2-K1-E6
cgctgtggtgactcgatccttcgncatgtctcaaccgtatgattgctccaccnggngcacgnncnaagggaacgcaagnngagaggaactttatgaagagaaacaaaaacagncagaagagcacaaaggcgangaaganggnngcagcaccaaagcnacgggcngnncagacgaggaccgaaaagacacgcg

SEQ ID NO: 16270 - DNA, 217 bp, Zea mays
  unsure at all n locations
  Clone ID: LIB3150-105-P2-K1-F6
ttttttttttttttttttttatattttattaaagtttttttttttnaaaaaaaaacacggnnnggagggcaaaaaaaaaaaagggaaaaaagaaaagggnacaggacncnnggaaagaaaaaagaaaaaaggggaaagaaaataaaagaaccnaccaaccccaaaaccaagaagcccaaaaaggggagaacnaaaaaaaagggagaaaanncnccag

SEQ ID NO: 16271 - DNA, 364 bp, Zea mays
  unsure at all n locations
  Clone ID: LIB3150-105-P2-K1-F7
ggctnccattttttttaaacacggnctganggacagaaacatatgaaagtagattcaaaaaaacacaatacgagtgcacaatgctcataggttcttccacgtcaaactacaggggcaaacttaacagtggataatctacgtcatccgctgggcggccttcttggccagcaactttttcctggccttggtcttggcctgcgacttggagcccatgatgccaccttcccacttctttctgacttcatcaaacttgtcattgaagttcgccttaatagcctccaagatcctgctgaactcaagcttgtccttgttcttgacagtggtcagacacaagactgatgcagtcttcttgtgaacgatcgat

SEQ ID NO: 16272 - DNA, 254 bp, Zea mays
  unsure at all n locations
  Clone ID: LIB3150-105-P2-K1-F8
gaagacngcgnactccatttntggtgatttttccaaagtttttattccccaacaaaaaagagaaacacacacttcaaacttagaacacggacacgtaacgccgtaccccaccaacaccaatggggctaacctaacgccatggaacaggagtaaggacccaaattattcgaaacaaatgaccctgctggcttttgtgttcaacaaaccatggatctaccaaatttgactcatttcgcgctgccgagctgggtgcg

SEQ ID NO: 16273 - DNA, 319 bp, Zea mays
  unsure at all n locations
  Clone ID: LIB3150-105-P2-K1-G9
aatttaannnnnnnnnnnnnaaaacaagaaganaatctttctttcaacgttcgncataaaatggtactggtgaaagaagaacagccatgaaacataaccagtctccagatccctatattttctgtaggctaataagcaactactcgtagaagtcgcatacctcccagttcagtaatagcagcatcacgacgaaaactctctttactgctacgcaaccgagcaccagaacacctacctcttaaggcggagataaaccaacatgatggcagccgtgccggcggcgccggcagccgcagccaccgccatccccagccacgcg

SEQ ID NO: 16274 - DNA, 287 bp, Zea mays
  unsure at all n locations
  Clone ID: LIB3150-105-P2-K1-H12
atcggnttttacaggnggngngnganccagnnccntctgtattatcttgttccacgttataaccaagttccgtaatgatggacgaccatgggcttgagcatgtaaaacagcctcagccaacattcctgtgtcctgccatgctttctccattagagcattatctcccaaaactgcagcagcaaaggctgcttcgcgtccatggccagctgggatcaaattgcttaccaaacccgacaatctagtaagcttcccatggtttgcaagacggagtgcctggcctcgcagca

SEQ ID NO: 16275 - DNA, 393 bp, Zea mays
  unsure at all n locations
  Clone ID: LIB3150-105-P2-K1-H2
ntttnnnnnnnnannnnaaacnncactnnataattattttcacgtcctctattttacacacgatccaccaaagacaccataacaattcaacaccacaaagcctagcaatccaacaccacaaaacacggtgtgggaagacttacttaacgacctcaaactgcttttgctcagttgaatggtgtgttcaaagttccaactttagaaatcacacatttgtatgtatagaaaaatatgctgcacagacatgaccattacttgagaaacactccttgccgttctggtaaactcgcaccagaatcattattcatccgacaagatcatttttgttaaacagttcgtaaaaaggtttggaatgcaaacgaagaagcatggtcacagcatacaaaacgacat

SEQ ID NO: 16276 - DNA, 212 bp, Zea mays
  unsure at all n locations
  Clone ID: LIB3150-105-P2-K1-H7
ntttnnttttttaaatgcaatccttaacttaattcactttttttctcaatattatattctgactacaaagaaccgcagcgcatagacacaaccttattaagttgagagaaaaagaaacaatgcatctttaaccttaatacttgcgaagtaaaaacggaatatcaaaagtgctaaaacagaagaaggttcggctggaaaaacggaatatcaaa

SEQ ID NO: 16277 - DNA, 373 bp, Zea mays
  unsure at all n locations
  Clone ID: LIB3150-106-P2-K1-A6
attannttgtgctttctcacgggncaacaanatatagaaaggggatttaaagcattacagttagctgcaaacgctgttcaagaaccaaaagcaacaaaacatgatgataaaacgtcttgggaaggtagctctatatccttgcagataaaaataaaactagacatagcaaaaagctccaagcagcacattcagagaacttatgccttggcagcagcctgggcagcaaagtcgcgcctcctctgctcctcgatgatgctgggctgggaacccttgcccttgggcaggctcacccacggcttgttgcccttgccaatggtgaacacgttgcccatgcgggtggcgaactggtggcccatggagtcctcgacgggga

SEQ ID NO: 16278 - DNA, 461 bp, Zea mays
  Clone ID: LIB3150-106-P2-K1-B5
caaaactctcgaacttgtgtgctttggtttaaatataaatggccacattttactgttcatgtaaaagctactagcagagggtacaatacaaaatttggaaaatatgtattgccagtttatcgctcttgtaccatttagaaactagtgagaaaaaaacattgagtttaatctttctgcaacttggctggcgctgtcctctccttatgggatgctgcatatctccttttcttgttagctcttcttctcttgcgctcagcctgtgtaagttccccctcttccttaacatcaccttttccttcaaatatctcttcaggggcaagcattgcagcatccgaaacagctacaggtgcaatctcttccatggctaaagcaggcacatttgcttgcacagacatatcctcaatgactggttttggagcaaagtggaaatgtgatagcgcatccaatttcaaacatatcct

SEQ ID NO: 16279 - DNA, 379 bp, Zea mays
  Clone ID: LIB3150-106-P2-K1-C11
cagagaaacaaggcatttcgggtgcctttttaaatagtattggacaacttgcagcaggacacatacacatacaagcacattcgtcccatttgcagcctacgcataaccgaatactggtaacaaggtactgctaaacatcagatcactccggacagtcagtctatgccttcttaggggacttggcggccttcttgggcgactttgcctccttgctcccgccactggacgccttttccgccgtcttcttgggcagcagaacagggttgatattggggagcacaccgccgggagcgatggtcacgccgcccaacagtttccaaagctccttgtcgatccggatcgccagaagcacgtggcgcggaataaagcgagttttttt

SEQ ID NO: 16280 - DNA, 181 bp, Zea mays
  Clone ID: LIB3150-106-P2-K1-C7
gtcgaacaaaacaaatcatacaaaaccacggggggtttttttaaatttaattttcccaattacaaccacttaacccacagcagctaggaaataaaaacctatttcacaactcatataacaaaacaccagaacaagcctattcccaaaagaccactatcggaagatttaaccttaacctttc

SEQ ID NO: 16281 - DNA, 384 bp, Zea mays
  Clone ID: LIB3150-106-P2-K1-E12
ataaaagggggaaccgattttattccacaacagagtttcagtttcctatgcgaaaacaacccccgttgttcagttacatagcatcttgctagattgttgagtgtttggactcgagaactgatgtaaagacgtgttggctcagggaagtgccggcaggaccttcccagtgcaagttccaaaaccaatgttgtagccttcacccttgcagcatcctgtcaagatgacctcatctccatcttctagaaacttgcgggtcaaattgcccactggtatctccttctgcccgttccatgttagctccaatagacatccgagggagtccggttcaggtccactgagtgtgccagttgcaaatatatcccccggcctcatgttgcatccatt

SEQ ID NO: 16282 - DNA, 339 bp, Zea mays
  Clone ID: LIB3150-106-P2-K1-F1
ggaggcggagattttttttcctcttcctcttctatctttactgttacagaaataacggacaaagtaaaagtgatgaattacctatactacttgtctgtgtgataattacatgttacagttggttgatctcccagtcctcacatacactaacgtctatggtcatcgtcttgttgccgtccttccctgtcccgggagacgacagcaccctgcagcaattccgtctcggagacttgtcccacaatgcgggatcgggcttcttaaccacgagcacgctgtccagcagggagtcggggtccgggatcttccaccggcaaaccgggcgtgcctcgccccgccgcc

SEQ ID NO: 16283 - DNA, 189 bp, Zea mays
  Clone ID: LIB3150-106-P2-K1-F10
atcctgctggtactgccaaatatttgggaacgcatgcatgcatgttttactgatccgctgcggctatatatgcacacgcaggacacgaggcgaggcagtactagcagtccctggtgcagaagcagcggtggcgtatgcccttgcacacgccgcctgtgaaaccttaggtcaggctgacgtttgctcaga

SEQ ID NO: 16284 - DNA, 333 bp, Zea mays
  unsure at all n locations
  Clone ID: LIB3150-106-P2-K1-F12
ttttttttttttttttttattttcttattttttnctcttttnnannaannnananaaagggaagggtttgctacaaaaacatatttttccaacccaaaactaaaagaaccacccaattgctaaccaacacaccaattatacacccaaaaaaaacagcgccactgggattacaccttaaaaatacagtgaaacaacattctgccttaaccacagcaaaaccaaaacaagttaaataattgctctacccaaccttaacacggaatggataaaccctaggacatacaccctgcctaacgcccacacccaaatttatcaaccataccaccacgcccc

SEQ ID NO: 16285 - DNA, 425 bp, Zea mays
  Clone ID: LIB3150-106-P2-K1-G10
gttgtatccattaatttcaaataacttgagcaaatcgcttacaaaggataatcagataagtagagtcaacaagacaaaactgtatctggcaacgcacatggcctcaccccagccgactacaccattattcttcagcaaaagcaaacagctccttccctcccccctcagctcaagcgataaccataagaaaacctgctacgcgactgcgtatatgataatgcatatgcatgcaaaagataactgacaggccagtgtagcgaacttcatagcacacaacggcccgagtgagctgcaagccgtgtgcctagtaccggtagtgggcaggcttgtagggaccctcgatcggcacgctgatgtagtcggcctgagacttggtgagcttggtcagcttggcaccaagcttgcccaagtggagagcagcaacc

SEQ ID NO: 16286 - DNA, 301 bp, Zea mays
  unsure at all n locations
  Clone ID: LIB3150-106-P2-K1-G11
aacttaaaatgtcagctacaataaaacaggccaccaacaagggggggtatcttgaaacttattttaacaccaagacaaaacgggntacagcgagcgcacatgagcaaaccctggccagacacaacataatcgcccagcaacacataccactttcgtcccttggcgctaaagccaaagaggacccaacagaaagcccgttccaacaatggctaaatcagaatgcataatcatacaaacgatgactgaccgccctaaagcacggaacttaatttgacacaacggcccgtgacagctgcaagcc

SEQ ID NO: 16287 - DNA, 390 bp, Zea mays
  unsure at all n locations
  Clone ID: LIB3150-106-P2-K1-H12
ataaaaanttattatttttggtggggtttatttaaatttttttttttgtaaaaaaaaaacaaaaaaagtaaaggtaaaaaaatttggcaaaaataaaaaaaaaaagcttataaaaaaaaatgttaaaaaatggggaaattgtctgaatagagggaattttgggccaaaaaaaaaaatttccaggttaaacaaaattttatgaaaccacataaaaatttttaaaaaaagggctaaaagttttaaaagataataaagttttggggaagggttaatataatctaaaaaaaaaaacgtttgaaaaattttttaaaatttttgcctacaaaggtttaaaatgtgccaaaaaacaaaattcaccttattttaaaaaaaaaaaaatcttttcttaaa

SEQ ID NO: 16288 - DNA, 335 bp, Zea mays
  Clone ID: LIB3150-106-P2-K1-H2
gggccattgataactgggacattgctgaaacaccagaaccacagacaaacattctgggctataaactactgccaggtttcaagccagcaaagatgaaaccttgtttgaatgaccttgacccaagaagcaatcatgtaacatcatcgaagcataggtccacatataacactcaagttgcaatagcactccaaaacaaaagtggcacggacagaaatatcaccctaggttgtcagatccatgatggcagtgacaatgtccccattagaagccttgagggccttgacagccttgggccttgaaacaaaagcctgggtcattaccagcttaatgtcctt

SEQ ID NO: 16289 - DNA, 351 bp, Zea mays
  unsure at all n locations
  Clone ID: LIB3150-106-P2-K1-H3
ttttattcaaacaaggggctgnctccaactcagcagatttgaatttttgccgactccaactcagcatatagaattgtttttgccgatacatagccagcattacagcatagttgatagaacaaaaaaagggggctgctcgattctccatcggcaggaccaacttacacgaaatttaacagcaaagagactaattaacatacaaatataaagattaccatcatcccacataggaagcatgttttttggatgtccgaaaataagctttaacgagcaaaccacactccgcaacctagcttgtaggcaggagttccaaaacgggcacgcaaagagaagcaactcagtacttgtagt

SEQ ID NO: 16290 - DNA, 398 bp, Zea mays
  Clone ID: LIB3150-106-P2-K1-H5
aaatatggctgctgctgatagatagatggatctccaccgattgaaaataaatttagatcccaacctcgacctccccggaacaatccgtccaccaaaaaacaaaaattaaaactcaaaagctacgaacagggaaaaagagtaaacggagagaagcatcggtcctagtagtatcttcttctctaatagatcaatttgtaacttcttgaagtcgccgagtagcctgctcttcttacctatgctggtgctgcttgcatcttcttcctccctccccatctcccccattttctcccccttgcggtgtgcgagtagtaactgattggtggcggtgtgtgtagtcttaaactagttggcctcctcggtggaggcggcggcgggcttgcggaggagcaccatgtgca

SEQ ID NO: 16291 - DNA, 334 bp, Zea mays
  Clone ID: LIB3150-106-P2-K1-H8
aaccacaaacatttgtctcttcaatttctccatggtacactgataacagagttcaaggagcttgtaacatgggtagcaaaatttaacgatgcaacaaaaataccaaatactatcagagcatgcatgaggtaggttccacagtagcagaacatcaagttgtatgtgctcaacggtagcggcggagggaaagggtctggttgcgcttccaggtggccctcctcgacggcctattcttgtggtgagtgtggcccttgccacgcaggccacggaacttcttgcctgcggaggtgagaccacggagctcccggtgcttgtgcacaagattggatagcca

SEQ ID NO: 16292 - DNA, 271 bp, Zea mays
  Clone ID: LIB3150-107-P2-K1-A10
aaaccgaaccagaataccgtattacttaaaacgcgtgccacgataatattggtcacgcaacaaaaggttctaacgcggatacaccgcgacgacgacgataaatcgagcagcgactgggccagccagccactgcagcagacacacgagactgacacaatccgcttagtccacctcctcgatcttggggccagggccaccgctttcagccggagcgttctcgttcatgccgccggcgccacccatgtggggacccgcgccctggtacattttg

SEQ ID NO: 16293 - DNA, 319 bp, Zea mays
  Clone ID: LIB3150-107-P2-K1-A7
gggagtcgtcaacactgttcaacaatatatagaaagtcggattaaagcattacaggtagctgcggacgctgttcaagaaccaaaagcaacaaaacatgatgataaaacgtcttgggaaggtagctctatatccttgcagattaaaataaaactagacatagcaaaaagctccaagcagcacattcagagaacttatgccttggcagcagcctgggcagcaaagtcgcgcctcctctgctcctcgatgatgctgagcttgatacccttgcccttgggcaggctcacccacggcttgttgcccttgccaatggtgaacacg

SEQ ID NO: 16294 - DNA, 311 bp, Zea mays
  Clone ID: LIB3150-107-P2-K1-B10
ggtggggaaaaacattgttttggtaaaaacatgcggtccaggtcacaaatcactcggcttccaatttgctaaacaaacaacaacctttgcatagagaatctcatgatgatcccccccttaaaaagatccagagttttttgaaacaacagatcccattaagaccccccgtctagttgtcccccatttacttaggtgttgccctgaacttttggtagcccttgatgacctttttgacagcatccaaaaaatccttttgtgtccccgttttcctgtgggcccaaatggggtacattccggcttttgggcaaacc

SEQ ID NO: 16295 - DNA, 283 bp, Zea mays
  Clone ID: LIB3150-107-P2-K1-E1
ggtgggacgacatccaacttcgatgaatagccttgcaaataaaaacagggtgtttttaacaacatttttggcccattggggggttccaacatttttttacaaaattcaaaatgggaacccccaggttctgcccccaatggggtggccccctccagggttttctcaaaataactcaaccctttagcccccgcggactttttttttaccggcttcttaattttttttgcccttgttacccttttatttttgacccttttggccgatttttttattatccttttta

SEQ ID NO: 16296 - DNA, 444 bp, Zea mays
  unsure at all n locations
  Clone ID: LIB3150-107-P2-K1-E7
ttttttttttttttttttttttttttttttttttttttttttatttttttttttttttttgttttggttttttttaaaaaataggaggagaaannaannttttaaaggggaaaaaaaaaaaattaaaaaaaaaaaataaaaattttataatataaaaaattggaaaaaaaattttttgggtaaatttaaaaaaaattaaaaaaattataaaaaaaaaaaaaaaaaatttttttaaaaaaaaggggaaaaaaaaaagagtataaccatgtaattaattattaacaccctacccaaaaaaaaattccctcttcaccacctaaaataaaacacctttcccctccttcttaaaaaaacattttaaaaaaaaccaaatccaaaaatggcttgaaaaaaaacaccttttaaaacaaaaacaattaacaaataacaaaaccccctttttct

SEQ ID NO: 16297 - DNA, 346 bp, Zea mays
  Clone ID: LIB3150-107-P2-K1-F9
aacagaacaaagaatttcccagactgctgtcgaggtagaacagggataacatcaatgtattggacgcacaaaaacatggatccaactaactccagtaggaccagtacaggcaaaaatgataatgcatccggttttcttctaatacaaatcccaccgccagatatactccattaactcgaagcactagaagagaccaagagggtctaatatcttatggtgacgcttaggcttaggaggtgttggcttgggccttgttgaggatcacaccctcgtacttgacctggaaccacttcatggcgtcttccttagtgaccctgtgctggatcccaacacggggacttgcacc

SEQ ID NO: 16298 - DNA, 305 bp, Zea mays
  Clone ID: LIB3150-107-P2-K1-H11
aatcttaaatcattttattcgggcatataatttcataggagggggcatcaccaatttacacattgaataatgtaagttctatttctcatacaacacaaatcttgcataaccaaaaattcttataaattgcgaggggccaccgataattttgtcacacattcaataaaaacccaaacgccactcaggatttttttctcccggatcctctttgcttattttcacaggatttgaatataaaagagtctagcagacactgaactatatgctaattaacacatgaaacccccccgaggattctttttttc

SEQ ID NO: 16299 - DNA, 198 bp, Zea mays
  Clone ID: LIB3150-108-P2-K1-A3
agactcattaatgagaaccactttggtttttggctttgatgagcttgttgaatctgggttccagggatacaggcgtggacaatattctagggtggaaaatatattcgggacactagcacatcacaaaccctgtttactgacaggccgtacaaaaacacatactacgggatttgcaattggttgcaagatttctaaatt

SEQ ID NO: 16300 - DNA, 180 bp, Zea mays
  unsure at all n locations
  Clone ID: LIB3150-108-P2-K1-B1
tttttccatttttttcttataaatgattcataaatttttttttttttgcnnttatgttttttttatggtgtttcctttatcaaaaggggtgtggggacaaaaaagcctgcaacttcccccgagggcatcccaacattgtgggcgcaccaaaagattcttttaaaagttccccccccatag

SEQ ID NO: 16301 - DNA, 466 bp, Zea mays
  unsure at all n locations
  Clone ID: LIB3150-108-P2-K1-B3
gtgttttttttttttttttttttttttttnnnnnntttttttttttttttttttttttttttttttttgttttggggcataaacaatgggggcttggtttttcgttttgtggggggcttcaaacaaaaaaaaaaaaaattttttttggccgggtaactggaaaatgaatttttttagtttcttccccctgaatttaaaccattcaggggggccggctaaaacaaaccccccaacagggagtttttaacaaaatttcagatcttcttttttttttttgaggtggccaggtttaaccacccccatttttccaccccggggattttcttcatggtttcccggaagactttaaaaacttgggcgaatttttttttaagcccacccttccgtttttttatgtagccggaggggaaccaaccagtttttcccctgtttttacctttgggccattcattttttgacacctttt

SEQ ID NO: 16302 - DNA, 347 bp, Zea mays
  Clone ID: LIB3150-108-P2-K1-D10
tttttttttttttttttttttttttttttttttttttttttttttatttttttttttttttttttgtttttttttttttttatatgggatttaattttaattaatatttaattataaattatattttttttaaaaaaaaaaaaaattaaaataaaaggaaaaaaaaaaaaaaaaaaaaaaataaaaaaaaaaaaataaaaaaaaaaaaaaacttaaaaaaaaaaccaaaatataaaaaaaaaaaaaaaaaaaaaggcctaaacataaaacctaaaaaaaaaatgtaaaaaaaaaaaaaaaaaaagaaacccgacaatataaagaaaaaaaaaatatatatatatagt

SEQ ID NO: 16303 - DNA, 408 bp, Zea mays
  unsure at all n locations
  Clone ID: LIB3150-108-P2-K1-D9
ancgagaactgataacatagttgattgccatttcatatgcatgatgataataagttacagcagtgaacaaccaactactcgatgattcgacagtaacccaaactacagaacccagcacatttttacattttttgatcgggcactgatgacagaatatacgatgcttaggccctttccccacggatgcggcgggcaagctggatgtccttgggcatgatggtgacccgcttggcgtggatggcgcagaggttggtgtcctcgaaaagaccgacaaggtaggcctaaaccgccttctgcagcgcggagacagcggagctctggaagcgtaagtcgttcttgaagttcttgcgcgatctcccgcaccaggcgcttgaacgggagtttggggatcaaaaatttcgggctttt

SEQ ID NO: 16304 - DNA, 318 bp, Zea mays
  Clone ID: LIB3150-108-P2-K1-F5
aggaacctaacgcaaagtttattttcaggagggggccaggaatgctcatttccgaacaattcaatgtcttgttacaagcaagcatgctcacacataggcactcaactttctgtatagaagacacattactgaacaagcaaacaacccagaacagacttggtttattccattcaccgattgacagggcaaccttttaaagcagatggctttataagggcagcgacctttgtggaagactgcctttctttctgaccagaccaccgggcctttacatgcgggtaggctttaagcccaaatgcttttggcgtatcgaacagg

SEQ ID NO: 16305 - DNA, 262 bp, Zea mays
  unsure at all n locations
  Clone ID: LIB3150-108-P2-K1-F6
ttttttttttttttttttttttttttttttttttttttttttttttttttttttttttttttttggtttgggtttttttttttagggggtgggttttttattttttttttttttttnntggagggggnaaattaccaaataaaaaaaaacccccccccaaaatgggaagttttttttttcattgcccaaaaaaaaaaatttaaaaaggaaaaaaaatttagttacttttttggggggagggtattcaaaaaaaccgtatatt

SEQ ID NO: 16306 - DNA, 457 bp, Zea mays
  Clone ID: LIB3150-108-P2-K1-G5
gcatacacattaccatgccatcttcttcaattgcttctctttccaaaccgtcatttccccataaaatgtacagaaaattatcatcacgcaagagaatacagtaattacaagttgcacaagtgacgactgcaggcacagctaacagctctctacatgctagctaatatgctactattctctacctctaatatttgctaccaagcacctgcagcttaatccgcttgtgctaccaccagtatcttgcagcttaagaccaccaaatccataggcaagtccgcatctgcaacgtcgcggccaaatggtccggccctgtcactgcttcatgaatagttccatgttgtaggcatccttgtggactgaattggaggcgcattccgaacattcacatcaagtggcagcatccgatacttcaatctgaggtccttcaggactttgatcatctcctggagcactagct

SEQ ID NO: 16307 - DNA, 276 bp, Zea mays
  Clone ID: LIB3150-108-P2-K1-G9
acttgtgtgctcgttttcttttgaggatccattttttttttctcgtgcttgctttttaagccggcaatttggtggtatatacacaaagggggacttccgggggggcccccgcctttaaatgggcaccggccagaggggttcacatacaaaccagcattgtttggtggtttgctcgcggttagcaaatgatcaaacaaaggcgtcaaaaattcccccctcaacggttgcccatttttaaaggtacaataataaaacggtgcttcaacttcccaccca

SEQ ID NO: 16308 - DNA, 308 bp, Zea mays
  Clone ID: LIB3150-108-P2-K1-H1
aaaccggtaatttttttttaataaaaaggggggggtatttccaaaaattacccggttttaattgggggccccttgggaattttattttcaaaaaaaccttttttactgttttggtgtccaaaccgaatgttcaaacaagtgtttaaagaattctttcattaaaaggttacaattcttaaaggtacaattaaaaaaccgtgctccaaataaccaacaaatttacattttaactacaattcacattaaaatttgcaacacgaccgagctctaaaaccttctattataactgtcttgaaaaccttttttta

SEQ ID NO: 16309 - DNA, 449 bp, Zea mays
  Clone ID: LIB3150-108-P2-K1-H2
ctccagaattgactgatatattaatataacctttgcccgaccacatgtagcggtaaagcgatttaattagcatacacaattctgttgcttttctcttcagcacaaacagaaaagaaaaaaaaaccaggcagaattgattgtatatattacacaagcatctcaagctctacttgtaatccaatctagtctgcgaaggcatcactctttcgatgctggcatcaaccggagcctttcctcggaagctttacccgaaccattctcttccgatagaagcgcctgcaggtcactcccatttgccaggctgttgaactccactgattttgagggcagtgcagggtaacgccgctggcaaagcgtcatgagcctcttgattgactgaaggtacttgcgagtggtctcgtcattcatgatgtgggcgacgcttgttgtgtagatcttctctcgggcag

SEQ ID NO: 16310 - DNA, 315 bp, Zea mays
  Clone ID: LIB3150-108-P2-K1-H7
tttttttttttttttttttttttttttttttttttttttttttttttttttttttttttttattttttttttttttttatattattaaattttatttatttttttatttaaaataaaaatttttttaaatttaattaaaaaaaaaataaattgttaaaaaaaaaaaaaaattaaataaaaaaaaaattaaattaaaaaaataaaaatctttgtaaaaaaaaacttattgaaaatttgattaaaaaaaaaaaaaccataactaatctacttttaaaaaaattgttcattttaaataaaaaattggaccccctcttt

SEQ ID NO: 16311 - DNA, 360 bp, Zea mays
  Clone ID: LIB3150-109-P2-K1-A11
gtgttacattctatatttatttttttattattgcttactaattgtttaaaaaaaattattgataatgcttcaaaattatagatcatttcagttgccagcttttttaaaaaaaaaaaaatggaagtcgataaaaaaacaaagttttaaggagaaaataaaaattttaacattaaaaagaatatgtaagcagcataaataatacatagttttacacccaaattggttggcttgataacctaatactggacgcaactttcccgcgttaaaatatgcgcaaaagtattgaaactattacttttaaatgaaaatcctaaaaaaaattactctcggtattaaaaaagaatgttctataaaaatatt

SEQ ID NO: 16312 - DNA, 355 bp, Zea mays
  Clone ID: LIB3150-109-P2-K1-A3
gttgggaaaaaaaaacattttgttccaccccatttttttttttttccacccccccccccgccccctaaagggggaaaaaaaagcccccccccccccccagggggggggctttttttccggccccaaataaaaagggtaaaaaaggggccgcccccaaagaacccccccgggggggggggggggaaaaaaccccggacccagggggggaaacacaaaagggggtctaaaacaggccaatgtttcggggcccgaggaaacaccccccctagggggggcccatgggggcaaaaaaaaccccccccccccgagaaaagagatcccctaaaaccccccccccctacccccctttaaaccc

SEQ ID NO: 16313 - DNA, 453 bp, Zea mays
  Clone ID: LIB3150-109-P2-K1-A4
cacgcgcaggatgacttcttttactgcaccggagggagtatatatatatatatatatttagacgacgatttccaacatcggaacttatcttcctactaatatccttcctagaatctcgatttccaacatcggaacttatcttcctactaatatcctttctagaatcttgccaagtgcctggaatcgtaacggccgctccttccgtagggggtcgaaggaccaattccatgcctatttgcaccgtccgctttcctcatctttcgatgtttcgatgagctactgtccaggtccagattcactttaggagggttcttgaaacagaaggatgcagcaactttcttgagatcaagttggtggacatcaaaaatgtctttcatagaatgcgagttgtacgacaaaaggtaggacctgtaggcttccttcgctgactggtttaagaagtagttcccaccg

SEQ ID NO: 16314 - DNA, 317 bp, Zea mays
  Clone ID: LIB3150-109-P2-K1-B10
tttttttttttttttttttttttttttttttttttttttttttttttttttatttttttttttttgttttttttattttttttttttttttttttttttttttataatttttttatttttttttttaaaaaaaaaaaaaaaaacttatttttaaaaaaaaaaaagttggaaattttaaaaaattgaaaaaaaaaaaggaacgtgtttttttaaaaagggtttttaaaaattttttaaaaaaaaaaattggtttttgtaataggatttaaaaaaaaaaaaaagtccaaaaaaaggggtgttaaagagggggggccttt

SEQ ID NO: 16315 - DNA, 303 bp, Zea mays
  Clone ID: LIB3150-109-P2-K1-B2
ggaacaatactttttttttttcatttcaattgttcattcaggtcattggtcacactgacactgccacccagggggatgcgtgacacattattactgaatcatcgtcgctaaatgactcaactagctagctcgccagtggctatactacagcacatagtttcttcagtgggggaacaccccggcagcaccgtacgggcatggagtcggctgctgcaggccgcacattgccgttagttgctgaggtattttgtcccacaacaggggggcgacctggctcttttgcagtttgttttgccggatgga

SEQ ID NO: 16316 - DNA, 419 bp, Zea mays
  Clone ID: LIB3150-109-P2-K1-C11
aaagccaaacgaaaatgctgtaaatgccaaagtcaaaaggcatccctcgatgttttggtgagtttgagcaacgtgcttgcaaacataaattattgaatgtccattctcagaactacatataaccaaaattggacacaggtggccagtgtttagttgtcagccacttcaatgagggtttgctcgtagtcagcaggagcctcaaatccgtggaggttcatcacggttgcggctacgttggcgagcccaggggtttggatgtcgttccggaatttcactccagggtgaaggccagggcctccaatggcaaccgggaccggctgaagggtatgcgaggtaagaatctggatacggtcattcttgtcgagcaacggcttgccagacttgttccttttcaccatatcctcagcattgccatgatc

SEQ ID NO: 16317 - DNA, 309 bp, Zea mays
  Clone ID: LIB3150-109-P2-K1-C6
acatagaactgttttcttttattcattcttttatttatttcggtcaggtcatttacccattggcggagagaaaccacttataaattcccactacattaaaaaagacactcgccagcatgtttcccattaccataaaaagcgcacaccagggttacctaattttcatctgggacgggcaacctttttcaacccaaccttttctaatttagtgactttgaagctttaactaacatttcctgtaaaatatctcaacattttgttttctttttacatgatttatactataataccttggggtgctgaaaaaca

SEQ ID NO: 16318 - DNA, 344 bp, Zea mays
  Clone ID: LIB3150-109-P2-K1-D11
aaaaaaaaaaaaggggtacaaagaaaggtttaaaggggcccgaaaatttagggggggggggcccatctttttccaccctcaaaaggtgcaccaaatccagggggaaaaaggtgttccaaaaaaggggaactcaagggtttaccctaaaaaaattaaaaaaacgcgggggacaatttttggtaagggtaaagacttatgatcctttttcacttaaagaaagctcttggggtaaaaggaagggggggggaaaatgtataaaaaaggtaaacttaatgggggtggtgaaaaaaccattgttatgggaactttgggggggttaagaggaacaatttaaaaaagggggg

SEQ ID NO: 16319 - DNA, 52 bp, Zea mays
  Clone ID: LIB3150-109-P2-K1-E9
gggggaggattcaattttatgggggggtgcatgctactttaaatttttttaa

SEQ ID NO: 16320 - DNA, 432 bp, Zea mays
  Clone ID: LIB3150-109-P2-K1-F6
cgcttcatctcatgcattttttttaccttttcctttcatcatttctacatgatcagatcccataagatacagagcctagctggctccttcaatttatacaaggaattacagtttttagttcaagcaaaaacctcaaaattggtttgacaaagttgacaacctgtggggagggtgaaaaaatagccccacaggtgggggaaaagccaacatcatgggcaatgatgcaaccaaagaaaaaaaaagagtattacccatgccctccacacaaattgatcagcccatattcatttttagtcggggattgtacaaacaatatctggggaagagaaagatatcctagcagtctcagcgatcctgagagccatgatggatttgtatgctgcgagctctgcgatagtcatgagagactgggctctgttgcgcagttgaata

SEQ ID NO: 16321 - DNA, 308 bp, Zea mays
  Clone ID: LIB3150-109-P2-K1-G10
acaaacatgccacatttggggttttttttttaaacaattcttttccaaaaggctggccccccctgggggcccctcctcgttttgaagaccgaaaccattttgttaacaaaaagccccgagaggcaaggataaaccattttttttgattgttgacccttggtgggaaaaaccaagttgcccaagcttttgcaccccttgggaaaacttggcctttttgacggttcaggggaccaacaccggtttattggtgacctccaatggggatcacaggaagtttgccccgggggctaggactgttatttcaaaaa

SEQ ID NO: 16322 - DNA, 467 bp, Zea mays
  unsure at all n locations
  Clone ID: LIB3150-109-P2-K1-G6
gagtcaaatctaaagcatacttccgcatcctgaaacaggccagaaacgagagtgtataaccagatggcgagtagttgagacaggaagcgcaacactgacataggccaagttgaaatcatttatactttcttcacatgattcacggatgggcaagagatccacggcaccgcatactccttttgtgtatttcccccttttttgcgttcaaaagatataaagcagtcgaaacatggggcgcaaagggtaacatctctagaactccagcattcggcctctgaagatggcctcggctttcctgacttcattcactgctccaatgatgaaaaccctatctggaggccccttagcaccaccaatatggatttcaacattgcaagattctttcacaaccattatcgttgacccctttctgccaataactcgtcccattntcccatgaggaacatctaagactgataggatatcaa

SEQ ID NO: 16323 - DNA, 342 bp, Zea mays
  Clone ID: LIB3150-109-P2-K1-G9
catacataaaacttctttcttttaattagcaagtgtacagtatattgatagtagcttatactagaacagatcaatttagccattcatcggcacgcaccagaaccaaatcttacagatagattcctcgttcctctctacgggaggcggccacggttgagcagcccaagcgtgtgtcgcgcagcctcgacgaggtcacggatgttgtggagcgacctctcctcggcgccgaagatgaagatggcccggcactcggccttcttggccagccgcgccgcgtgcccaagcggcagctccggcgagttgagggcccgcagaatctgcctgtacagcgacagcaccacc

SEQ ID NO: 16324 - DNA, 401 bp, Zea mays
  Clone ID: LIB3150-109-P2-K1-H12
agtagagaaacagtacggctagaaattattccatgcctccattcagtaataaccgaaggggccctaagatgatttgcatttgacagtgttcggttacagcttacaccagtctatgaaggaaaagcagagaaaaaaaatcggagcgaagtccaatgtaaggcaaaaactacgaactgggcaacgaccgaaaaaagctaaaaaaaaggtaatgaatattatgaacacaaaatagtcgctctctctcatcagtacctctcccacggagattcttctatgttctccccggccatcaaacacgtggagttcagaatgtggtaaggatcagcacacacgtgctgctcgcccattgcaatgctcagtatctgtacagactctcacggacaaacgagcatgactgatta

SEQ ID NO: 16325 - DNA, 126 bp, Zea mays
  Clone ID: LIB3150-109-P2-K1-H8
gggaaagccaaccggaccgggttttttatttaaagcaaattaactttggtcgggggcccttccccttggatggggtccaaaaattttcccgggatttttttgggcccccaaagggggacttttttt

SEQ ID NO: 16326 - DNA, 388 bp, Zea mays
  Clone ID: LIB3150-110-P2-K1-A1
acaacactcactgtagcctgtttctgactttatgttcagttcggtgtcggcaacaattgccacaggtacagtgaaccaccaagcggataaccttgtcttaaaaacatgtggtacaggatgcaatccctggggatccagatttctaaacaaacaacaatccttgcatagaacctcacgatgacacaatcaccgaaaagatcccggagttataaaatcaacatattccatgaagacactctagttgtacaccatatacttgggtgttgcactgaatttctggtagcccttgatgaccttattgacagcattgagaaaatccttctctgtcaccgttttcctgcgggcacgaatggcatacatcccggcttttgtgcacacgctttttata

SEQ ID NO: 16327 - DNA, 351 bp, Zea mays
  Clone ID: LIB3150-110-P2-K1-B3
aggacaaacatggctgtttgtattagggatagataaacgagtggtggccgaacaaagtacccaagcggtccacttaataaaggcttcaggtgcgccttagattaatactactgaagcgatgagcccaaaggtccttaaaaagactttttgccttttggttaaaactacccaggggggaaaggaaaaactgggttccaaactgctgcttttatggggtggtagggacgctatctccgggctcgagaaacatggactaaatgtacatgtcggtctaaatttctcaattattatgagtctgcttgagccatacccttccgacatttaaaatgtatgttacagtggtccagttct

SEQ ID NO: 16328 - DNA, 323 bp, Zea mays
  Clone ID: LIB3150-110-P2-K1-B7
aaaaaaaaaattttttttttttttttttttttttttttttttttttaaatttttaatttttttggcccctttcttttattttttccaatttttttaaaattttttaacctttttaaaaaactccacaaactccaccaaatatacagacccccttgtggacataacacaaaaacccaaaaataaacaaatgcaaccccccccccaaaataaccacggtaaccaaaaaacccaacaaattacaaaaaaaccaaaaacccacaaacatgaccacaacccctccttaaaaacaaatcccttaaccacaacccaaaaaaccctggacc

SEQ ID NO: 16329 - DNA, 286 bp, Zea mays
  Clone ID: LIB3150-110-P2-K1-C4
gaccagtaagattacctgtttcatcaaaatcaatttaggccaaggaggttacaacgagggctgaccaccactcataaaaatttagagagtttgaaaaaaaaacaattattttctgatttaggtgcttccacgacaaaatcacctgagttgctcttgagcaaacacctccatacatttattgggaccggacaaacattggtacaaaaggcagcagcccgcttgtgttgtttcacaagaaaacattcccatcctttttcttttttagtagggcttcactggtgccctg

SEQ ID NO: 16330 - DNA, 313 bp, Zea mays
  unsure at all n locations
  Clone ID: LIB3150-110-P2-K1-E12
gaaaaaccggtaggggttaaagccaaacaaaaatggtggaaatgccaaaaaaaaaaggggtcccttgtttttttgggggggttgaccaaccggcttgcaaaaaaaaatttttgaagggcccttttcaaaactccctttaaccaaaattggccccaggggggccgggtttaagtggaacccccttaaaaggggggttgtttgtaancagaaggggcccaaaatccggggggggtaataacggggggggtttcctggggaagcccagggggttggattttcttccggaatttaactccggggggaagggccgggc

SEQ ID NO: 16331 - DNA, 390 bp, Zea mays
  Clone ID: LIB3150-110-P2-K1-G6
tttacttgtgtgtctttttttcttcttttgatccaatttttttttctctttcttgctttgttttttttgaccgggcaatgattctcaaaacaggccatacaattttttttcgaaatggtggaataattaactttagcatttcgcagggggttattcacctgttcaaaaactggttgtgggaggcttgcaaaaacatgaacttcatcctttggttccaaaaatgggcttggttttttcacaaacaaggtcaaacctttagaaaacatgcttgccccacatttttactcccatttcataaaaaggcctccctccggttttttttatttggcacgttttatttcaaaaatgaactagcgggcgataaattttcgagaacggatggggaatttt

SEQ ID NO: 16332 - DNA, 377 bp, Zea mays
  Clone ID: LIB3150-110-P2-K1-H2
aacatgccaaagaaccagattttcaatagcattgtcacagcacagggatactgaatagtccacaaatatttcatcccaacaaatcgtctttgccatcaaacaaccattgttttgtttggcaagatgtttttgattggtgggtgaggtgatggtggggataggatgtcatcatcatatcatataaaggatgtacaccccagcagaacataaatacatctagtcttcgaggctcctaactagcctacctagtcatctgcagtgcgtccacgagcaagatggcgtcattactagtttggcctgttctccaaaccctgaagtcgccggggaagaagccattgctccaccaaatgctcagatgctgcattgtaaatggccct

SEQ ID NO: 16333 - DNA, 266 bp, Zea mays
  Clone ID: LIB3150-110-P2-K1-H5
aaaaccaaaactttattatgatgcatatattattggtcataccacacatgataatgtgtgtcgtcttactgcataagtacatatatagatagagagggatggatagaggaaatttcccaaacatcatgaatcagtagtacggcggaatggctgtggagacaccacatgggttgaaacggaagctgggcaggtggtactggtactggtagagttcacctatggcccgcatgttctgcgccatcatcatgggcatggggatgagaccc

SEQ ID NO: 16334 - DNA, 369 bp, Zea mays
  Clone ID: LIB3150-110-P2-K1-H9
aacggatcaaggatgctcaacacaaaaatggaacacataattggcgaatgtttaagttcacacaacagaagcataactgcttaaaccatgtctaagagcagtagaaggcattacatgccacagcaaaccagtacattatgcctcgggtgttggctgtgtcaggccggactttgcaagcagcttccccagcgcctcaggagagcacacctggtactgtacctcgccggtgtcgggctgcagaaatacctcggccagctccagcttctcggcagtcaagctggtggagtccatggtcttgctgaggaccttgagcgcgagaccgacggcctccttgcgggtcaaggcgtccttgtagtcctgcttgagcat

SEQ ID NO: 16335 - DNA, 345 bp, Zea mays
  unsure at all n locations
  Clone ID: LIB3150-111-P2-K1-C9
acggcatgngtttttttgaanacccggnccatcaaaatcgggttatgcaaacgacatttcaaccagtgcaaaccaccactcgtgagaatctagagagattgaaaaaaaaacaggtcttttctgcttttggggctcccaccacaaaatcacctgagtagctctcgagcaaacacgaccatacatttattgggaccgtacaaacattgtaacaaaaggcagcaacgagctagtatagcttcacaagaaaacatccccatcctttttctttcttaatagggctccactggtgccctgaactttgcttcggcggagaccgcgggattaccgagcttttcctcgatcctg

SEQ ID NO: 16336 - DNA, 412 bp, Zea mays
  unsure at all n locations
  Clone ID: LIB3150-111-P2-K1-F4
ggcacctgaagcaaaaantcngtggcttattatnataaggnccgaacgcagcggaatcagaggccttatgaattcaccagtacaaaactggcccacgaagaggaaaaaaacatatctattccgacgcaaactacagtaggtcaaccagtaaataccactggctgagtacttagaacattgttgtgggtgattcaggttttattcacgaaagctgcgatactatnctnatttcagttgagtaactgcagcgtgtatggcatctgcaagatggggcacagtcctcatgctcaaaccggccatgctgatcctcccatcagatgtcatataaatgtggtattcccgcctcaagaatgcgacttggtcgctattcagcctagggaaaagaaacaatcccatttggcttaatgatatg

SEQ ID NO: 16337 - DNA, 224 bp, Zea mays
  unsure at all n locations
  Clone ID: LIB3150-111-P2-K1-F7
ggcaaaagagttaactgatntggttttaagtttcacggcgacacatagaccgggcaaattatgagccattattgctcaaccaaccactaggatacacccaacatagtttcagacattccgatggaaaaaaatttattctcggaagcacttttctccgggggggaagaagacaactcgcttggatcaccagaccttgagttctttatcttatttggggctgctca

SEQ ID NO: 16338 - DNA, 379 bp, Zea mays
  Clone ID: LIB3150-111-P2-K1-G9
cataacagatgagtgatattttttgtcacatataaaagacattcatataacatatggtaatttatccagagtaccagtaacaaagacaagtaaccaagttcagccaggaaaggcaagatggatgttcttgacaaaccacataacaaattgatgttcttgaccattatccgcagtgattaaggaaggcaagactccattgccaactccaaggccccgactcaactaagttctcaaggggaagaaacttgtaacggcgactactgacacagatgtaccccacattcagactgaaccttgacgacgacgctggaccttcttgaccctcattactgttctaggactcactgattgtcctgatcttccgctgattcatttgcat

SEQ ID NO: 16339 - DNA, 352 bp, Zea mays
  Clone ID: LIB3150-111-P2-K1-H5
gaaaacccaatttttggcattaaaaaaaaaatcggccccaaaattgcccccaggggccaacaacccacaaaaaactgtttggccacactggccccccatagttaacctaaggcttcccccctaccaaaaaccccaggaaagggggccccccccggggcaaaaaaaaaacttgggatccaaaaaacaaaccctctttatttgtccttacaagggccccaaataaacaataacccccggactttatttttttgccacaaattttgggggggggaataggccccttccccggggatcccccttgccaagtaaatttcctttgggatagaggcaccccccttaaaagggggggccc

SEQ ID NO: 16340 - DNA, 452 bp, Zea mays
  Clone ID: LIB3150-111-P2-K1-H7
atgggacagagaagctgtttattttcacccatttctatacccaaaatctgatgttctaatgttaaaatatcataaaaacaagtgaaacccagtgtgatagtgtacaatgtcccctcttttttttgcatcccatgaaaaaagcagtttataactgtcttcgatagcccttcaacgtgttctggaagctaccatccaggcatccagcaattttaaagaagtcaaaaaattgcagattgttcagcaaatgcaaaagatcaacactaatttctaatagtacctgattcaagggtatacggatgggaacgcagacacttaagacacataactcttgactatttcttctgttggtcttgttcatcatgcttttgccatggattgagagcttctttcatagcttgggcctctagactgcttttccaagctccgttttcttaccccaagacagttacctt

SEQ ID NO: 16341 - DNA, 249 bp, Zea mays
  unsure at all n locations
  Clone ID: LIB3150-111-P2-K1-H8
aaaagcaaaaccaaaactttgntatattccatncatacccggaacggggccaatttcaaagggttttttctcactccaaaccagaccatatggagagctagttcagtcttgcccaaacatacaaacaaccagaaacagacaactacaccccgtggtctaaacaacaaaaaatgacaatgagaaacaaatctccatattattaattaaatttaaataaaataataaaactcaatattatacaacaaaagc

SEQ ID NO: 16342 - DNA, 428 bp, Zea mays
  Clone ID: LIB3150-112-P2-K1-A5
gaaagaaatttggtccattgaaattttgttccaagatacagatcataatcttttcgaaaacattgctaaagcacaaatggtgacatgcttcctctggctctcaaggtttgatgtgaaactttccatgtttacttctcgtagatccaggggtgctggctgctctgccaatcagcagggccctcggggaaccacagggcaatctccttattagcactctcaatgctgtcacttccatgaatgacattcctgccaatgtcgacagcaaagtcgccacggatggtgccgggctcagaagccagggggttggtggcgccaatgatcttgcggccagttgtgacgacgctcttgccctcccagaccatggccaccacagggccagagatgatgtagtccacgaggccctggaagaagggcttggaggcgagatc

SEQ ID NO: 16343 - DNA, 423 bp, Zea mays
  unsure at all n locations
  Clone ID: LIB3150-112-P2-K1-B1
gagaattctgttatggttattccaacaaagacttcaacaaagtaatatgagaactctgccatggcccatggatggctgttaataaacctttagaacccataatagcaactgttattcatgatattacttattacacatggcacggcaattcaagatattacattaagagccctgtgattttatgaaattacgcgagggtgcatgctctggcatgttacgaagcagctccttattctgtaacttagttttgcgcttcaggcagcaaattgcacagggagacgacagatccttatgcgctagcaccctcttcaacaggcttgaattcctgcagctgcttgaagttctcccatggcttctcccagaccttagcttcataaagcttnttgactacgccatccttcacttcaaatgtgagatagtaca

SEQ ID NO: 16344 - DNA, 274 bp, Zea mays
  unsure at all n locations
  Clone ID: LIB3150-112-P2-K1-B11
aggaaanattttcttacctttattttnanaanannannnaaaaaaggggaggttttggtggcaaaggttacagaacatacacccggacaaaacatagaaagctgggattccgaaacccacatagatacatttgagcaaccctttggacgcgcaaaacaaaaaacggagtataaaaaactgaggcagcaagacagcaattcctaacgtcacttatttccaatctctgacaaaaaaagaggggcgggcacaggcacgctacaaacttaccagcctt

SEQ ID NO: 16345 - DNA, 301 bp, Zea mays
  Clone ID: LIB3150-112-P2-K1-B3
gcagcaccaagatgtaccttttttttccttaggatttaacttagaataaagcctgacgggggttacagcacccatcgatccgcagtccatgctggttgatgcatgggtctgctggagccgaggatgaacacagcacttacaactgacacagagcgaccttcaatcaaaaacacagatgggcaacaacaaacacgagacgaacgaagataaacactctggactagggtaaacaacacggtagcgaacaggattacttggccgcgcgggccccaccgctcagttcctccagttcccgtcggag

SEQ ID NO: 16346 - DNA, 322 bp, Zea mays
  unsure at all n locations
  Clone ID: LIB3150-112-P2-K1-B5
gaaagaaatttggtccattgaaanaagtggntcaagatacagatcataatcttttcgaaaacattgctaaagcacaaatggtgacatgcttcctctggctctcaaggtttgatgtgaaactttccatgtttacttctcgtagatccaggggtgctggctgctctgccaatcagcagggccctcggggaaccacagggcaatctccttattagcactctcaatgctgtcacttccatgaatgacattcctgccaatgtcgacagcaaagtcgccacggatggtgccgggctcaaaagccagggggttggtggcgccaatgatc

SEQ ID NO: 16347 - DNA, 357 bp, Zea mays
  Clone ID: LIB3150-112-P2-K1-C10
ctatcaatagccacataggtttataacaccagaacaaaaagaaccagtgaggccgacccagtgcacgaggctctcaagacgatactcaagaagggacaaaccgcccctagaaatgtggagtctggttcgaatgcctgagacaaatatcaccaatgtaccatgcctgcccttctagaacaaaagaactagacagttgtcaaaaagattcagataggtatttatgccagctcgcttgaactgctcaagatacataattctctctagtaaccccccttgagatcatttaccacatcatagggaataggagtaacggtctcaagtgtagcaccctcaaccatgaaaccaggtttgggtccc

SEQ ID NO: 16348 - DNA, 195 bp, Zea mays
  unsure at all n locations
  Clone ID: LIB3150-112-P2-K1-C3
cgnnacaaaacaatttttaaaggattcttcaaaaattttttagacaatccaccccatatctctcccatcagatgccacacatccaccgaggaaaaaaagggccccccaacgaggacccaagaggtgaacctccaaaaacctactaaaaacaaggcgcaaccccccgcggggctcgacttgtgaagagccaacctt

SEQ ID NO: 16349 - DNA, 315 bp, Zea mays
  unsure at all n locations
  Clone ID: LIB3150-112-P2-K1-C4
gacctaagtataaatagtttctttgatcatcaaacaacaaaacaattgaaatctatatgtaatgttttgcgctacctctcacagttngcaccccccgcacgagtcacaccaatccatatgactccagtgcgtgggttactgaactttcctgtgtatggtacagatgatgtaatctcttcatttaggattggaagaatatcgacctgagatgtgataaacaggcgatgcagagcgtctgcatcattggatgcagaagatagctcctttagctttaataccggatctgaactttcgggatggagataaacctttgca

SEQ ID NO: 16350 - DNA, 376 bp, Zea mays
  Clone ID: LIB3150-112-P2-K1-D10
gaacaacaaaacatttttttatttatccagtaaactgtcctaagcaaacagcatgggtaaaaactgccttgatttagtgttaaatcacttcaagaattgcaaatgcagcaacacctctactctatgcacactgccccactgttcatgtaagtgaacttgcaaatctcctcaaagaaatcatctccagcagcatggcaattcttcatctgcgagatcctaatgatcatccttcttagcctcacgctgtacctgacaacggacttgagggtgttcagcttctgcttagcattgagagatgaccgcacggtgaccacgacctgctccaagaaaggtatcacgaagcttgaatccaaattcttcaggctgttttcctgac

SEQ ID NO: 16351 - DNA, 393 bp, Zea mays
  Clone ID: LIB3150-112-P2-K1-D11
ccaaaacattggttttttttttatagactatatgtcaacagattcgtcctaataatgcgagcggcatcatataacaacgcaattatcttattggggtttcttctgaacctacacacacgcgtcaacgcctccgtttcttccccggatgcccagaacccagctgttctggacgagaacgaacgacgcactccgaacagtctttaccaatactcgagacagccagccacctatagtactacaatgaacggctacgggctacggctaaaatatctctcagtgtatctgcctatctatacataagttttgcataaaagcgcactttctaacagctggagggagggcgcaaggccagcgtcattggtcctcatgtacgtctgtcttcgcgtatatctc

SEQ ID NO: 16352 - DNA, 307 bp, Zea mays
  unsure at all n locations
  Clone ID: LIB3150-112-P2-K1-D4
gaatgcaggctcattatttggcnnatnaaagaaggcatcggccggctgtttcaaaagctattttagctcaaactcatcaacaagccttcataaactaccgaatccaaaaccgatagaactctccaaaaggctacaaaaagaataacccgtatgataccagggttgctgttcctaaactcgttaatcgccaccactgaaaaaaggggggattatgatccataccatgaaatggtacctaatgactcagtggagtctggccggtagaagaagaagccatgatgttcagagtttcccgtacaaaaaacat

SEQ ID NO: 16353 - DNA, 257 bp, Zea mays
  unsure at all n locations
  Clone ID: LIB3150-112-P2-K1-D8
aaaaaannnnaannnngaggggaggatcaaaggttttttttaataaattccagaaaagaaaagggnnttgagtaaatttgtgggatggaaataaaaggngnnagattaaatattttaaatttgtgattactggggtatttgttaaaaaaagatttgatataggaacaatttttagttttttttttaagataaaaatggagttgaactaaaatagaaacatgcactgctgacaattaacgaagtccatcatacatttc

SEQ ID NO: 16354 - DNA, 258 bp, Zea mays
  Clone ID: LIB3150-112-P2-K1-E12
ggaaaaaaaaccatggaagggtcccattatattagttcttaaaagggccccaaatggccaatccataaaaggcataaaactagcatggcactctccccaaatttttgccaggacccaaatttcttatttctttggaccccaaaaggcctttggttcattaagaaacccttttatgttcatgccccttgaccctttggtaaatgggtcctaatcctttgaggacattgcccctattaccggccggaataagagggtttt

SEQ ID NO: 16355 - DNA, 354 bp, Zea mays
  Clone ID: LIB3150-112-P2-K1-F3
ggggctaaagggggggcgtttccattaacaagacttttaccacacaaaagccagggagatttggatgaaaaaaaagaggcctacttcatgtaaaatcccaccagcacgccctaccaaattctcgatcatgacataaccagtcccacaggcacaaataagggaggtcagagttctcaacagggcccttctaatggcatggtttaacaacagcaggcatgttgcaaaatcatgaggactcctttttctcttccgcggcctccttaaatgtctctccagggacaagctcaagaacgtcatcatcatcgtcctgaacagccccagcgcttgcaccagcctttggaccaaaaacaccaa

SEQ ID NO: 16356 - DNA, 299 bp, Zea mays
  Clone ID: LIB3150-112-P2-K1-G10
ctattgtgctggcaccatcatacaactatcccggaagaatttaaacatctcccttacaaaacaactcctagatgattcaacttctcttgtttcttgcagatctcatattgtaccccagccaaccacataataggcctaccctaaacactcaaacaaacacaaccccaaactaccctggactttccatttccaccaccaaatgcagtagaatccgcaattcagcaagacatagcgaagcccaagccttaggaccacaccccactggccatttgtacaaggcaagagctttcgaacccgca

SEQ ID NO: 16357 - DNA, 257 bp, Zea mays
  Clone ID: LIB3150-112-P2-K1-G2
gcatatatgcgaattaactcgagcgctgctcgcactcagcagttcaacgttcaaaacaggctttgttccatgacatattatttaatattttaattcattaacttgcgggggcccgccaaatttttggtacgccttccttcctttttttctggtcccgttggggttttttttccccccccgggccccgggggggggcattccttccatcccttgtgccaaaaccacggggggctttgccccttgcccccccccccggg

SEQ ID NO: 16358 - DNA, 188 bp, Zea mays
  Clone ID: LIB3150-112-P2-K1-G9
cccagcaagcaagcccattcattgacaaattatgggtggggccccaaccaacccccccaggcacacttcatcatcgaacttgtccgtacacacaattgcaaaccagccctctccgttgtcgcacccattcatcattacaagatcttctactgtcatggcaaatataaatctcatgtcggagattcagc

SEQ ID NO: 16359 - DNA, 139 bp, Zea mays
  unsure at all n locations
  Clone ID: LIB3150-112-P2-K1-H12
aaannaannnnnnnnnnnnancgggcgaattgcaagaatgcttgtttccatataaacccacacatgggcctaaaaaagaataaacaacaccctggtcaaagttcaaaagagcctatccaaacaaaaaactgggggccct

SEQ ID NO: 16360 - DNA, 353 bp, Zea mays
  Clone ID: LIB3150-112-P2-K1-H2
gtccaaataaatagataaaagggcacaggctaacagagctcaacagttcacacaataacagcaacgaccacaaacaaaacttgtaatgatgaaaactaggtattgctaaagcaggcgcaggatcgcatcatttcttcttggcagcagccttggtcaccttggcgccggttgggtccttcttctccacactcttgataactccaacagcaaccgtctgcctcatgtcacggacagcaaacctaccaaggggaggatacgctgagaatgtctccaccaccatgggcttggtgggtatcatcttcaccataccagcatcaccggtcttcaggaactttggctcctttttaagcttc

SEQ ID NO: 16361 - DNA, 311 bp, Zea mays
  Clone ID: LIB3150-112-P2-K1-H5
gaagtacacaaaccatttcctttgtttgctacatcgaacgcatagcccgtctctaaacaaaatatggtttggcctacttccaccgacactctttggagactctcgcttaccctcctatcccatgtttagcattggtagttgactctattggacctgcgactcacttgcccccatgcttcgccttcgagtgagcctgaagtgccgtctcactgatgaatgacttgctgcacgatttgcaagggacaccagatttttgcgcaaattttggagacttgaccgattcgccattgtttacaatggccttgcctttt

SEQ ID NO: 16362 - DNA, 427 bp, Zea mays
  Clone ID: LIB3150-113-P2-K1-A3
aaatccggggagattgctttattattagctcagaatacttttgatgcatcaataggcctctcccacctcacattagtctcaacattgacttcatattatacaaccctaagaaggttgatcggctgcaacaattgaaatctaaagactacgccaaacgcttccctcttatggtatcatcagtttgctggaaccttgtagcttccgcactgaaagccatgctcaaatggcctcttacactgctcagcaacatacacaaccttctccatgcacacaaccttctcagtttctttggtgaccttggagcacaagcaagaaacgtttgccttcttgatgacaccacagcaagcatccgaaggagggacctttggattagctgggaacatcacgtatgtcttgcagtcacttatcaggctttggaggtcattct

SEQ ID NO: 16363 - DNA, 442 bp, Zea mays
  unsure at all n locations
  Clone ID: LIB3150-113-P2-K1-B7
attnattaatttttcaatataacgaacgccaaanntacaaacacaactggccaccttggttgaggtttaagcacacatcacatactagacgagaaaatacaaacagagtttttctgactgatggattattnaacagtcatacaatgttgtagtgtaattttatttttttaaagttgtaaatttatggaatctttatttttatattgttattatactttttcaaaaaataagtgtattaataattttattttcttttttttaacaaatatatttttatgtttttttaaatattcttgtttatagttctcatatttttttgttattatatatatattttattttaattttattgtaattttatgtgctatttattatagatttatatttttttatttattaaatcatttttctctgattatatatatatttatataaaattttt

SEQ ID NO: 16364 - DNA, 275 bp, Zea mays
  unsure at all n locations
  Clone ID: LIB3150-113-P2-K1-C10
ttttttttttttttttttttttttttttttttttattattttttttattttaanaatttttattggttatttttttttttttttttttaaaccaaaaaaaaaaaatacnttataaattaaaatttttaaaaatttntaaaaaaaaaaaatttaantaatttaaattggttaaaaaaaaaaaattattaaaaaatattntatttaaaaaaaaaaaaaattaaatgtaaaaattaaaattattaataaaaaatattttttataatttaattatatat

SEQ ID NO: 16365 - DNA, 264 bp, Zea mays
  unsure at all n locations
  Clone ID: LIB3150-113-P2-K1-C5
caacaatatatagaaagtcgatttaaatcattacagctagctgcaaacgcggntcaggaaccaaaagcaacaaaacatgatgataaaacgncttgggaaggaagctctatatccttgcagataaaaataaaactagacatagcaaaaagctccaagcagcacattcagagaacttatgccttggcagcagcctgggcagcaaagacgcgcctccactgatcctagaagaagccgagcttgataccctagccctaggggcaggct

SEQ ID NO: 16366 - DNA, 227 bp, Zea mays
  unsure at all n locations
  Clone ID: LIB3150-113-P2-K1-C6
ttnnnnnnnaattttatgttttgccagcggctaatttgcgggcaggaggggcaaaaaaacgagacaagtctgatacaaacactttatccaacggggagaggtaacaagcaaaaaaaactatggaacaagaggccgaaaagaaagtttgtaaaggccccttaacacattctaaaacactcttcaaaagtctatgaaaaaacggtggggggggcccatccaactgaaag

SEQ ID NO: 16367 - DNA, 231 bp, Zea mays
  unsure at all n locations
  Clone ID: LIB3150-113-P2-K1-D11
gtaaaactaaaatttntttatctttttgatggagacaagacaactggggctcctgtgaagaaggacctaagcctttctaacactgcctctttctgcgctgtcactgagctcttctacagttctactgaacctccaacttaactcacacacagcgtaacagtttagtcgcggtactcggccaagaacgcctcatggaaagccctgaagcggctgatcaccgcggggatcttg

SEQ ID NO: 16368 - DNA, 393 bp, Zea mays
  unsure at all n locations
  Clone ID: LIB3150-113-P2-K1-D3
aaacaaatataaaaatattaccaaananaaaaacacagggcaaggggcaaaataataatgtatacatctaacaaaaccgaacaagatnaaaggacaagctaacaaccaagacaacactattgaaacaactacgaaaacactggaataaacacccaaatccaatgcaaaacaaagccaacaacgaaaaagaaagagctaactttacaaaaaattacaagcatggaaaaaaaagaacatagcataggataccaaaaaaactccagggtaaaaagaactcaaaaaaaacaccaaaaaagggaatgatcaaatctaggcggaaaagctcaaaaaaaaatctgataaaacaataaaaaatgcgatcaaagaacaaaaaaatagaaaaaaatagacaaa

SEQ ID NO: 16369 - DNA, 338 bp, Zea mays
  Clone ID: LIB3150-113-P2-K1-D4
aacctattaaaagggtaaaacgtttaatttggaacaatacttttttcttttcatttcaattgttcattcaggtcattgctcacactgacactgccacccatggtgatgcgtgacacattattactcaatcatcgccgctaaatgactcaactagctagctagccagcggctatactacagcacatagtttcttcagtgggggacaccgccggcagcagcgtaggggcatggagtcggctgctgcaggccgcacatcgccgtcagttgctgcgctatctgcgccgccaacagccccgtgacctggccgctttgcggctgctgctgcaggatggactgga

SEQ ID NO: 16370 - DNA, 174 bp, Zea mays
  Clone ID: LIB3150-113-P2-K1-D8
ttgttagtttgttgactttagaggatcgtttcaaaatcacgcggacaggccaggaagagcaatggggtagagaaacatgcacttaacaaccaaaccgaagcaagacaaaaataggaccgagaaaacgcgtgacaataccaaaccaaaacgcctggcagaacaaaaagattacgg

SEQ ID NO: 16371 - DNA, 170 bp, Zea mays
  unsure at all n locations
  Clone ID: LIB3150-113-P2-K1-D9
ttttttttttttttttattttaattgttttttttattattgaaaaaaanaaaatttaagaaaagggggaaaattaaatgtattttttaaaaatgaaaaatatgaaaaagagaatattaatagaaaaagaaaatgtagaaaggaaatattataaaaaaaaaagaattggag

SEQ ID NO: 16372 - DNA, 64 bp, Zea mays
  unsure at all n locations
  Clone ID: LIB3150-113-P2-K1-E1
gaggatctatttttattttttttnnattctattttttgggtttggtttgtgttatttttttttt

SEQ ID NO: 16373 - DNA, 308 bp, Zea mays
  unsure at all n locations
  Clone ID: LIB3150-113-P2-K1-F11
ctgcaatacaatcatgtttatanttaaagnctnggcagncgacaaacaccaaggtgtatagaaaccggaaaatccagcccatataaaagggccattcatactttgcacggatgctcagattacaacgctttcagaattcagatacatacaagcggcacagtccaagccaaatatataactatcagctcttccagccacgcacaacaaaccaatcaagtttgacaacccatctcacgaaccaggtgtcacgacagacacagcgtgctcgcacatggattgtagccacaacatacaatggggggagcctt

SEQ ID NO: 16374 - DNA, 381 bp, Zea mays
  Clone ID: LIB3150-113-P2-K1-F12
cccataaactatcttaaagattgctcacagcatgatgataggaataaaggttcttaacacaaagggttcacaacatgacaaatgatgctcaacacaaataaaatttaactgaaacatgcttaaaccagtccagtccctgcaccactttttcaaccaagccattctccctgcatttgtagtcattttgatgaagacataacggttgtatctttctgcaaagatcctagtggctacatagaactcctctgtctcctcagttgctccacattctttggccagttcgaaacatttatctatctccttattctctttttcctgtcctaacttcttatttttagctatgtggtcttctttatatatgtttggccacatccaagtctt

SEQ ID NO: 16375 - DNA, 379 bp, Zea mays
  unsure at all n locations
  Clone ID: LIB3150-113-P2-K1-F9
aaannnnggncatgaaaccattaccattttgaaattcaaaagatagatgactgtacagnttacactggagcagtttaatatggcctagcagttagcttgaataaggcgctaaatatttctggtgcctacatgcttggtgaaaaaaaaacccatggagattccagaataaatattgatgcaaatgaataagaactagaggcttgcaagtacatacgattgtgtgttttcaaacttacacttatccttaacctgggcttgtggtttatagaaatagattttatcttcttactttaagtttagattattgtattttcatagaatcttaaatttttttatattccacctttaaaaattgactattacattactatttttttta

SEQ ID NO: 16376 - DNA, 347 bp, Zea mays
  Clone ID: LIB3150-113-P2-K1-G11
ggggaagaaaacaggaggtttttgatgttgatgccatggtactttttgtttaaagggggaaaaattcaagtaacaaaccacgcaacaatttttctactagatgcactgttaatttacacacacacacacacacattatttattcgggacacaaaggtttgttacccgaagttttaaaacacttaactggtacagggacctttaccacaaattcctgggtgcttattgatgatttaatgaggggttggatgatctgattagagagcagcgatgcactcaattttaatccgggcatttaatggcagcgcccccacttggtaggttgatcgtgcaggggcttgcccccgg

SEQ ID NO: 16377 - DNA, 428 bp, Zea mays
  Clone ID: LIB3150-113-P2-K1-H12
gtgaagcaaagatacaattcaacattgtctgccgtctgcgtagtagtagccagtaggaaagaagaaaaacgacccgagtccagatatccatgctagtagaattttgccacaaacgtccacgatgacttgtgcacaatcccagacacaggagacccacgttgcgcaactacgatccatgtatggccagaggggaaaaaaaaccccggtaaaatcagcataagcatacatacatatccaatcaaacacatctggagatgactgtcacaatgcagcaactcgagctttgcatttctcctagcaggcacatcgaagcgttcggtcttccaagtcgccagcaacattcagtaactggagtcaacgaggacgaagtatcagcggatacgtacagcaccagccactgctccaacacacggaaagcaatggccctt

SEQ ID NO: 16378 - DNA, 352 bp, Zea mays
  unsure at all n locations
  Clone ID: LIB3150-113-P2-K1-H2
agaactgtggcatattctaaccacaactgagatattttttaaatagccgactgatgtccgncaacttcctgccgttcatacttagaaatcactggtatggttactttcttactccagagttcgattgctcccagcagcacaaatcacataaaggttccgatttccagaagtagctggcatagaaggatcatttgtaaactggagaaataatacttcagctcttctgggcgttgcttccctccagttctttccttagctgcagcgagaaatcattattcacattattgtcattccaattatcctcccactgctggacaggttcattggctttttccttttcataccatatttt

SEQ ID NO: 16379 - DNA, 239 bp, Zea mays
  unsure at all n locations
  Clone ID: LIB3150-113-P2-K1-H4
tttttttttttttttttttttttttttttttttttataattttttatttaaaaatttttttttttgtttttgggaaaatttttaaagatttttaaaacacnaaaggggggattttttttgggttaatttttatttattttttatttgatgttatttatatattttaattaattggaaatatgggggggggcgcaataaaaaaacaccaaacttaccgttttcacagggcggnnnnnggg

SEQ ID NO: 16380 - DNA, 350 bp, Zea mays
  Clone ID: LIB3150-113-P2-K1-H7
ttttttttttttttttttttatataatttttttttatatttataaaaaaaattttttaatgggttttggttttaaaaattattttttttttataaaaaataaaaagggaaaaaaaaaaattaaaaaagaaaaagggaataaaaaagttttaaaaaaaaataaagggaataaaagtaaaaaaaaaaatggaatgaaaggaaaaaaaaataatttgaaaaaaaaaaaaaattaaaaagggggagaaaaaataaataataaaaatatataaaaataaaggaaaataaaaaataaaaaaaaaaataatttatgagttaaataatagaaggagaatttataaaaaataattgatg

SEQ ID NO: 16381 - DNA, 389 bp, Zea mays
  Clone ID: LIB3150-113-P2-K1-H8
aacaatagcatttgatttttggcacagtatgatttcattgggccatctgcccatttaggtttcacataatccagccctaaatcgctaagcaagtcctatgatgtggcaccatagggaaaaactgctcatttgtaaagaaagctataggaatatacatagagccaacaaattccggcctcggcaaaatatgccctaaacgtccagctcaatgatcttcacaaccgatgaatctcccaccttctggcaaacgacaacacggtcatgggacttgatcacaccacatgccttgccatggtctagagcaaccttcagaactgactcatttgtattactggttgattcggctggatgccgaggatctgcaagcatcggaaagaggcctttaacta

SEQ ID NO: 16382 - DNA, 157 bp, Zea mays
  unsure at all n locations
  Clone ID: LIB3150-114-P2-K1-B11
caaaaattaataaacttaataattttaaactgtaantatataaaggggggtatttttaaacagattcaaaacattttaaagngaaaaaccacacaattatcaaaaacaaaaacccggacccctctaatccccctgggaaaaacaccaaggcccaaca

SEQ ID NO: 16383 - DNA, 60 bp, Zea mays
  Clone ID: LIB3150-114-P2-K1-B2
cgacaaaccccaaacacccagcacaaaataaaaaacccgacacacaacgcaaacgggggg

SEQ ID NO: 16384 - DNA, 283 bp, Zea mays
  Clone ID: LIB3150-114-P2-K1-B4
gtaaaaaaaccagaatatatcaaaatcgggtcacaatctcagcctacaatacaacctacagttaactacattcaaaggtaccacagaatggtaaaagggattttggtttgctttcaacaaggcagggcaatgcccacaacaaacctacaatccttgagccttaccaatgcaaaactcggtgcctcggtggaggtggtgaatactggagccagtctttcgcgcaaacaagtgctttcacaatctcaggccgcagagagcttctgtagtcatcgagcatgtgact

SEQ ID NO: 16385 - DNA, 414 bp, Zea mays
  unsure at all n locations
  Clone ID: LIB3150-114-P2-K1-C10
ccagcatcatagtattcatgctccagcgncaaactcagagtttggaacataagtgatcaacaacaaagtgttgatgattcacaaataaacaagtccttgctgggttacatgacgcagttcctacagaagcagagcagcgccgacagagaaaccagcaacatctaactacaacacagggcgaacatcaacacaagagaagcctacaaagggcgagcgtgcaagcctaggaggaggtgaacttggtgacggccttggtgccctcagagacggcgtgcttggcgagctcgccggggagcacgaggcgcacggaggtctggatctcgcgggaggtgatggtgggctttttgttgtagcgcgcgagcttggcggcctccccggccagttttttgaagatgttgttgataaatgagttta

SEQ ID NO: 16386 - DNA, 429 bp, Zea mays
  Clone ID: LIB3150-114-P2-K1-C12
atatggcaaagaatgaaatttggtccattgaaataaggttccaagatacagatcataatcttttcgaaaacattgctaaagcacaaatggtgacatgcttcctctggctctcaaggtttgatgtgaaactttccatgtttacttctcgtagatccaggggtgctggctgctctgccaatcagcagggccctcggggaaccacagggcaatctccttattagcactctcaatgctgtcacttccatgaatgacattcctgccaatgtcgacagcaaagtcgccacggatggtgccgggctcagaagccagggggttggtggcgccaatgatcttgcggccagttgtgacgacgctcttgccctcccagaccatggccaccacagggccagagatgatgtagtccacgaggccctggaagaagggcttgga

SEQ ID NO: 16387 - DNA, 325 bp, Zea mays
  unsure at all n locations
  Clone ID: LIB3150-114-P2-K1-C7
ggacgcaaactgtcgaacaaaatanattatacaaatccacggggggttttggtggttccaaatttccgaattccagtcacttcacccacagcagcgaggaagtaaaagcttattccacgactcatctagcaaaacacggtggcaagcctatccccaaaagtccatgtgcggaggagtaaaccttagccttgcagtgctacaccaaggtccgaaacaagatgacacgcaaagctggcagaacctgagtagcagcagcagcagcggatctaggcgtcatcgagggcaaggacaccaggtagagtcttgccttccaagagttccaagc

SEQ ID NO: 16388 - DNA, 418 bp, Zea mays
  Clone ID: LIB3150-114-P2-K1-D11
tttttttttttttttttttttttttttcttctttactatttttttttttttcttttttttttttttgtttttttttttttttttttttttttttttaaacttttttttaaaaaaaaaggggccccccccccccaaaaaaccaatttcaacaggcggcccctttttggttttgaaaacaaggaacccccccccaacacccccttattcccaaaaaataaaaaaattctttttggggctaataaaaaacccccccattggtgtcctccccccccttttttttttccccacattctctttaaaaaaggggaaatttttttttgatttcccccccccacaaaaaaagattaaactttttaaaaaggttttttactcattttttacaaattttacggaaaaaacaatatttgttggggaacac

SEQ ID NO: 16389 - DNA, 459 bp, Zea mays
  unsure at all n locations
  Clone ID: LIB3150-114-P2-K1-E11
gcaatgaaactgaagnatatattattttttcagatgctnnacagcatacaacgggggggatacagatggctgtatatacttggtaccaaccggccagtttagctgatcaggggctacaacaaaaaggccaaactaacagtagccttaggagctaactgtgggattgctagagctagacccattcagtcctcccacaagccttctctttgctgttttgctgcgatagcaccacacctcgaatgcctcggtgagatcaggatacctgaactgctctgcgttcttcatccactccgacaggatatcggcctggtcatcagacggcagcgctagcaccatcgagactattgcgctcttcacattctgccacatgtctgaatccatctgcagagacatttcgcccttgctattttcatccagcgaacgttttgtcgtttggatataaagaaaccatgtttttag

SEQ ID NO: 16390 - DNA, 425 bp, Zea mays
  Clone ID: LIB3150-114-P2-K1-E2
gaacattcatattttaaaaatctgcggaaaccaaacacggcatagagaacgtgtgtccaggtaggaaatacaaagaaaataaaataaacataggcgactccaccggccttgacacgaaaactgaagcgacgttgcttaattcatactgatagaagatagacgagaaaaatgaaagaagagaaatctgattccagaatccagatcagattgagagagaggaatcctagtttggcagtgcccctccaatcctccatcccgtaccggcacttgcttctatttggaaacatctactcgacgttgacttggaacacgtccttgcgctgctgcttctttaccttcggcacgaccaccttgagcacgccgttcttcatcttcgccttgatcttgtccattctggaaacctctggcgcgagctcgatgcgacc

SEQ ID NO: 16391 - DNA, 356 bp, Zea mays
  unsure at all n locations
  Clone ID: LIB3150-114-P2-K1-E5
ccagggggaaaggcacgaattggaatanatcggatgggaaaacccatatatggaaaacccatatatggtcgcacaaaagggttcagtttccaaaatgcgaaacaatgatcaagttcacagcatttccagcacaggtcccagatctgaacccggacattccagccaccgtctacttcatctgaactatccctgcgctgacgagcttctggatcttctgcatcactccggggttcttgaggtgcgcctgcgcagcccgagggttctcctgcagatccgtcaaaacctgctgcatgatcggatcagtcaggatgttctggatctcaaggtcttgcatggctttggtctggctttttttc

SEQ ID NO: 16392 - DNA, 461 bp, Zea mays
  Clone ID: LIB3150-114-P2-K1-F10
gaagtcatctttcatgctttaggttttattaaatttttgccgcgcaaacacggtatttcacgacgaagcattttaacaatcaaataatacatccgcgacaaatccctacgacgtacaaaataactatcgcagccacatctgtatccgatctaacacaaaataacgcatcggctcaccatatcaaactttggtcggggttgctgcacgtgtggcgcgaaggcgaatgcgtcgtcgcgcatgggagaccaaagcgaagccggagggcgtggctcgctgctgcgattcgtcgagcacccacgcgcgaggcgaaggagcaggctgctgtggcgtgcagcttgctgcgcaggtaggcggtggagctcgctgctggaattttatgggcgccctggacagtgagctgggcggcattggcctttcgccatgggtggagcttgcatgggaaaaaatgctgccatgggaga

SEQ ID NO: 16393 - DNA, 261 bp, Zea mays
  Clone ID: LIB3150-114-P2-K1-F11
ggagggggaacaaattcctcagtttaattcctttggatcataagtatcaacaatcgaacaattcctaaatcctaacatatgaaaatttaaatgttaaagggtggagaggggagaacccccccgcaaataagcaaacaaacaggaacttactagcaaaggtgcaatttcctattttccccgaaccctcgaccacgtttttttttagcgcaaacccaatagtttacagatgccacaacccccgatgagagcgcgttatttttt

SEQ ID NO: 16394 - DNA, 357 bp, Zea mays
  Clone ID: LIB3150-114-P2-K1-H11
aaagatgggggcattaaacaaccaaaatggcccaaaacatagcccctccagttttgaagcatggaacgatccaaaaaaaaccggaccatgctcctaaacaatccggttaaaaaactgggtacagaaggggtacaaacaaaagtttcacagtttgatgattttgaaaaaggggactttgttgcaccgaagaaccttaccccttgggcttgccaaaaaacctttgtttttaatgggaaggttggaagcgaccgcccccaaatttggacgatgggtcgaaaaacttgaacttgatctccctcaaccccagcccgggaagttttttttaggagggaccgggggggggaaaccacctttttt

SEQ ID NO: 16395 - DNA, 338 bp, Zea mays
  Clone ID: LIB3150-114-P2-K1-H12
atgacatggatccaataataaaaacggccaaacctatttggagcacacattgcggcactataatcaagaccatcattaatctgttaaccgaaactttacaggatcatttacattctgtacatgaaaaccaaaagaaagggggtgcagttttccagtacgctggccagaaaacagagagcgagcacacacgcacggttataaactcgatctctgaagagagcgaagattactgccgtaaaaactttttgagcagtccacttaaatccagtgtgaagccaaagagagggaattccataagctggcatcaaccaaacctggatcacggccatattatctac

SEQ ID NO: 16396 - DNA, 366 bp, Zea mays
  unsure at all n locations
  Clone ID: LIB3150-114-P2-K1-H8
atgataattggagtcccgatttnttaatatcaatggcaactcgcgaatgcagcaggacatggcacacagaatatggcagcggtactatttgaacgcaatgcatagctacatccaaagcccaaagtaaacacaacgctaaccaggccacacaaaaacacagccaaagcacacgatgaaaggcagctaaccctcggtatgcacacatgctagggctgctcttgctgtacttgtacctggtatttgctaagtgtcaaagccagagtacacgccgctgcccctcaggagccgcttctcctcctcgacgtagttcttccccctgctggcttggccccggtccctcttccgcttctctttctgcgagaagga

SEQ ID NO: 16397 - DNA, 311 bp, Zea mays
  unsure at all n locations
  Clone ID: LIB3150-116-P2-K1-C10
tttttttttttattttttttttttttttttttttttttttttttttttttttttttgggcaacaacgattttttttttctcatcatttttaattgggtgcctngcccaaacaaaaacattgacaacccactgttacacaacgcaaccagccagttaagttagccagtcagcccgcccgcccaacaagctttagcttgcagcctttgcacacactttggtggactggacctccatgggttttcatccgggtatgcatgcttttctccggcgggtccatgcatttttttttggcccccccaccggggaagagg

SEQ ID NO: 16398 - DNA, 230 bp, Zea mays
  unsure at all n locations
  Clone ID: LIB3150-116-P2-K1-D11
ttttttttttttttttttttttttttttttttattttttttttttaattttttaattaatattaaatttttttaaaaaatttttttttttaaaaaaaaaaataaaaaaaataaataaaaaaaaaattaatattataaaaataaaataattaaaactaaaattaatttaattttttttaattaaaaaaaaaattantannaaaaaaaaaannttactaaaattaattttat

SEQ ID NO: 16399 - DNA, 272 bp, Zea mays
  unsure at all n locations
  Clone ID: LIB3150-116-P2-K1-E3
tttttttttttttaccnttttaaaaattttttctttttttttgggaagatttttctgtacaacttttgaaactattgatcagatgttggggatattatttctttttctgtttttgaaaaaacagcaaagcttttttttaaacccccctttcgcaaaatttttaaaaaaaaaattcccccccaaaaattttcccaaaaaatgaccccccccccttttttaaaaaaaaccttaaaaaacgggggggcccccttgtaaaattttttttttttccc

SEQ ID NO: 16400 - DNA, 246 bp, Zea mays
  Clone ID: LIB3150-116-P2-K1-E5
ttttttttttttttttttttttttattttttttttttttttttttttttttttttttacacctatgagagtttttttcttgcggggggcaaattctaaaaaagcataaaaatcagaaaatgcccaaaatccaaacaaaactaagaaatggaatccacaacaaaaacccttctcttaaaaaataaaacccccggggaaattacttcgcgaacaaacaaattagaaccgttgcacaaaaacgctcccg

SEQ ID NO: 16401 - DNA, 157 bp, Zea mays
  unsure at all n locations
  Clone ID: LIB3150-116-P2-K1-F8
ttttttttttttttttttttttttttttttttttttttttttttttttttttttttttttttttatgtttttttttttttttttttttttttaccaaaaaaaaagaaaaaaatgaattaaaaaaaagggtggaaactttnaaaaagcggggtatttt

SEQ ID NO: 16402 - DNA, 68 bp, Zea mays
  Clone ID: LIB3150-116-P2-K1-G3
aatagcaagcggagagatacaactatatttccacaacagggacatcaaatctaagaggaccattacaa

SEQ ID NO: 16403 - DNA, 186 bp, Zea mays
  unsure at all n locations
  Clone ID: LIB3150-116-P2-K1-H1
annnannnntttttttttttttggggtgggaacaaaaaccttggtcattttttttttggctcggttcatagcgggggccacccaaggggacaaccggggttcccacccctttttcaaaggtgggacgggcccttaccccgtgaccgaagcgaacggttaccccattcttttgtttggttagataac

SEQ ID NO: 16404 - DNA, 369 bp, Zea mays
  Clone ID: LIB3150-116-P2-K1-H2
gggaaaacaaaaggcgtccagaatttaacggggactttatgaaggtttccttcctggggtctacgagaaaaaaaccctcacctttatctgattgaacaagggattattcccgtcgggcccacacacaaatggccaacaagaacttaattcttcggctcgtgaagggtcctggtctaaccatgtaaaaacaaataacccgcagggaagccccaggggtgacacaagttcctattatacactcagaaattttaagagtcctcaaaataagcggcgcccgaacattcaaacacattaaaaatagggctttttgtcttcctttgggttctcccacgggggcccggttggtcccccctttcggcccctttttta

SEQ ID NO: 16405 - DNA, 328 bp, Zea mays
  Clone ID: LIB3150-116-P2-K1-H7
aataataaacaaatggttctgatcaaacgcctacatgagcatctggtatagaataactcatttcaggcgtgtgtttctgctctacagctcacaagttacaacagatgttctaagtaaaatgttctgtaaccgaacgccaagaagaagagttgtagctcaaagttcaaaggatcttcctaattcttctgacgtactcaggagcttcaaattgcacgtaaaattggcagtggtatggatgtcttgttacatcggtctctgacaagccgagaacagctgccagctgatgaaagccataacaagggaggaaagagctcgaagccaaccacct

SEQ ID NO: 16406 - DNA, 350 bp, Zea mays
  unsure at all n locations
  Clone ID: LIB3150-117-P2-K1-B10
attcaagataaatttattgttgntgctcaatctacatctgaccgtgaagggtcacttttacgaagggccgtacctcaaggaacgagctggccggtcacacaagtcctaacccaaaatattgacagttaggggcggaactaggattacaatataaatggggcgacaaaaaaatggctactaacgatcaacagtgcaaagaatactggacctggcttaacatacgaaacgtgaattccgcttacgcacaaaccgacacgattgaccgtccgaacgcacgcggatccagcgcacttacccgcggattcgcccacctggcttctgtgcacgcagggcacgtcatgccgggtacg

SEQ ID NO: 16407 - DNA, 332 bp, Zea mays
  Clone ID: LIB3150-117-P2-K1-B11
ggaaaatatcttttttttatcaagtgaacacttatgaaggttcatagtccgaaatgatatcataaagactaacacaaaatccccagtgaagatatttgcagttctagctaaaagaatgctctaagatgcaacacccttgcccttcttctctggagcttttcattaaactcggctctttaccctaagatgtaccccagctcggccactgccagactggagaaatcaggcacaatctcccactgcaattgctcttaatatagtgtcagtcacggcctgcttcgctttcaacttctctgacatggtactctttttgttcctactatgcctcaccc

SEQ ID NO: 16408 - DNA, 328 bp, Zea mays
  Clone ID: LIB3150-117-P2-K1-B7
cgaacaaaacattttatactctaaaacgaacaaataggattgaagttttcacgggcattcttttacgtttgcgacacgcagcagatgattccacagtctaattaagcgcgcctggacacggacacgcctaggcgtcttgccaatgggtctagtcggagccggagccggagccggagcgctggccgcaggaccagtccggaaacgcggcgctcaagtggttggacacgacgcgggagtccaggagctcgattatgggcgggaacgtaacgcacggcaccaccttgaactggttgatccacgcgccgcaagagatggcctactccatgag

SEQ ID NO: 16409 - DNA, 323 bp, Zea mays
  unsure at all n locations
  Clone ID: LIB3150-117-P2-K1-B8
aggagtccctctgccttttagcntttggctaaaagcttctcgcatagcaggngggaatggaggcaagcaatcaactgccttcgccaagcagcaaaagtttaacagcagggcagttctatgtaaacaaaaagggtacatggcatcctacagaggagggacattcaccatctctagttcactccaaactcttaaaacggtacataaaaatgattgtcaacaatgccctaggcttcaagcgcccgacgctgagtttcttgattaggccaccaaagtgcttgcagtatctgacaatacttttacgaaggtggaagtattttgggaac

SEQ ID NO: 16410 - DNA, 330 bp, Zea mays
  Clone ID: LIB3150-117-P2-K1-C1
aataaattgaggaaagattttaaaatttataataaagaaaaaaaaaggggtattgggaaaagtttttgtgttctgtttattctaaaaattcggatacttggtggtccgaacgtagatagtttatcatcctcgtagtggcacggaaggaaaaaaaaaaagaaaaaaagagcgcgggggggcagaccccccaacctataaaaaaaaaaaaaaaaagggggggaaaaaaagaactaaaaacaaaaatagggggggggggggggaaaaaaaaaaaaaaacggcggggggggggggggggaggccccaccacaaaacaaagaaaaaaattttcta

SEQ ID NO: 16411 - DNA, 406 bp, Zea mays
  unsure at all n locations
  Clone ID: LIB3150-117-P2-K1-C10
ctaaaaacaacttttatttattttttannacaaacaaatttattggggattttgggatactttttttggttaaaaaaacatccgaaagaacaacacatacaccggtgagcggaacaacaggaaacggggcggctccctttattgtatccacccaaacgggggggcaattcccctgggacctgtggccaataacaaacggggcgagcataaaagtgcccccccacccgacaaaataccaaatgcaggacccatcccaatactgcaggaaagggactagagaaaccctaggggacccggcccacccccccggtgtgccgatggaccaccaccaatattgcccctgcagcggacccgaaagtatttaccacattccgagacaaggtaaccattgtttccatggacgggg

SEQ ID NO: 16412 - DNA, 283 bp, Zea mays
  Clone ID: LIB3150-117-P2-K1-C5
aacataaaacattttccacatagatttacactttgctacacaaaacaagcaaagaggaggactgcaaacacaatttagcttcttttccacataaaacacataaaccgagcccagcccagaaagcaaacacagcggcaactaccaccacggcaacacacctaaccgtactactattgcactactgcaagaagaggagacgagtgcacgtcgcattgctcgcctaggaactagtgaacttggtgacggctttggtgccctcagagacggtgtgcttggcgagctc

SEQ ID NO: 16413 - DNA, 272 bp, Zea mays
  unsure at all n locations
  Clone ID: LIB3150-117-P2-K1-C7
aataaaaaaccttttttaattaatataacaaanaaaaacaatgcgacattggcaattttttttttttttttttctcccccaccccccaaaaagcacaatttttttctttagaatcaaaccaaaaaaaaatcttacagggtagaaaatacactatactcccacagcataaactcgaataaagactgctgtagctaagcccgcactaaatacccatcaacactcactgaaaaactaaccctgaaccaaaaaccaacactgacttctaaaaaccc

SEQ ID NO: 16414 - DNA, 372 bp, Zea mays
  Clone ID: LIB3150-117-P2-K1-C9
cgtacaattccaacagtttattatttattcctacaaacaacggatccttattataggatacctccactggtggagcattcgtttgatagtgacaaaacatacagctgcgacctgaacaacggtataagctaaagctctatttaagtgtcaaaacaccggagcaaaaattcaattcaagacatgttccgaataactcggtttcctagcaggtaaatgctgtttaacaagacaaaagaacaaatgcagtaagatccccctactgcagtgcaggggcttcttctttactgctcacccggtgtagtcttgatgatatcagaatcaccaggatcaataatgctgaggcagcagacccgaaagtatttaccacaagca

SEQ ID NO: 16415 - DNA, 369 bp, Zea mays
  unsure at all n locations
  Clone ID: LIB3150-117-P2-K1-D10
agaatagaaaacattgtattttttttcaaatcgacatccaaacggagcataagggncttttcgcccactatgtccagtgtccactgaccccttgttgaactgtacatgactacagatactacagatacaaagaatccttcagcaattggatccaaaaacattgctttaactggccactaaaatgttaagaacagcatgtagatacaggggcagacgccagaacttattaactcttgttacaggaggaaagctaggcagggcccacttgagaccggtgctcatacagattgatctagctttcgtaccgccaacattgcagatggctgggaaaaaatgcggtgcagggaccgcaatgcggcgagaaaagag

SEQ ID NO: 16416 - DNA, 360 bp, Zea mays
  unsure at all n locations
  Clone ID: LIB3150-117-P2-K1-D7
tttttttttaaaaaaataaaaaattatnttttaanttaaaaaaaaaaaaaaaaaaaatgggattgggtaaatttaatttaattttttttattttttaaaaattatgttattttttttttttattaatatattatttttttttttttttttaatttaatttaaaaaaagaaaaaaaggtaaaatatggggggaggaaaaaaggaaaaaaaaaaaaaaaaaaaaagtattaggataaaaaaaaaaaaaaaaaagggaaattaaaaaaagggggggggaggagtaaaaaaaattaaaaaaaaaaaaaaaatgtataaataaaaaaatatgggaaaaaaaaaaaaaaaaaaaatttaatttttt

SEQ ID NO: 16417 - DNA, 232 bp, Zea mays
  unsure at all n locations
  Clone ID: LIB3150-117-P2-K1-D8
aaaaattaattaataaatttttnncccaaaaaaaaaaatgggaaaggttaaaataaaattaattttttccccccccacaaaaagggtaaattaaggaaccaaaaacaaaaataaacaatgctgttaaacaaaaaacaaacccacacggaaaaattaaaaacaaaataaaacaaaaaaaaaaattttccattaacaaaaaaaaaggacacaatacacaaataataaaataact

SEQ ID NO: 16418 - DNA, 357 bp, Zea mays
  Clone ID: LIB3150-117-P2-K1-E3
aaaactacaggttgggctgaactcaaattgtttagacaggaaaacactatcaggtcagatatagatttcaaaaccaggaggcgaacaaggactgaaacctaggcggtgagcacgacggcgccgcctgctgccttgatcttcttctcggcgaccttggagatgagcttggccttgacgacaatgggcttgggcggcagcacccccttcccgagcaccttgaagtagccgaactgcgtgacgtcgatctgcggggccttgtcgccgccggcctacgccgccttgtcggcgggcaccatcgaccagaggcgctcgatgttgaccgcggggcaatagaacttggtgcggagcttatggaag

SEQ ID NO: 16419 - DNA, 226 bp, Zea mays
  unsure at all n locations
  Clone ID: LIB3150-117-P2-K1-E8
aaaaattacatttttttttttgcagaaggngaaatagcaagaagggaccaatttaattgatatatgtgcacaggctaacagagctgaacagtaaacacaataacagctacgaccacaaacaaaacttggaatgatgaaaactagggattgctaaagcaggcgcaggatcgtattatttattataggaagcatctttgttgaccttagcgccgagtggatacatatt

SEQ ID NO: 16420 - DNA, 290 bp, Zea mays
  unsure at all n locations
  Clone ID: LIB3150-117-P2-K1-F11
acaagaatatgatatctgtcaactttttaactaangctgatacgatattcaaatgggcttacacctttcaacatttgagtaaatatggggcagaatgaagaaatacactagcatttttttcctgcagattggatatttctaacttccaatacttcctggtacatggtcacacgcacagttaccaaaagctgtcccagcaaagacagaaagtgagccctttgtgtttacaggaaacaaaagcttaagaggatttattagcatggacgggcatcaagcattttttgtaaact

SEQ ID NO: 16421 - DNA, 295 bp, Zea mays
  Clone ID: LIB3150-117-P2-K1-F2
aaaaccgaaccagaattccggtttacttaaaacgcgggccacgataatattggtcaccaacaaaaggttttaacgcggatacaccgggacgacgacgataaatcgagcagggactgggccagccagccactggagcaaacacacgagactgacacaatccggttagtccacctcctcgatcttggggccagggccaccgttttcagccggggcgttcttgttcatgccggcggggccacccatgtgggaacccgcgccctggtacattttggcgatgatggggttgcaaaggctt

SEQ ID NO: 16422 - DNA, 306 bp, Zea mays
  Clone ID: LIB3150-117-P2-K1-F4
gggggagaatcaactacatggttttgtttttgctaggacacatacccgagcggcacattgcatagcatgtgaactccaggccacctaatgcgagattacttggtactagcaaatattccgaactgtatgcagcagcacgcctatcactctatcctaactcctacacatgggacatgtagaaatcttttacagaacttagctcttgcaagacacatatatggccctcggtaagggacagaaataggcctttttatttggtacaaggcaaaaaagaggctcctaaaccaggtctgtctgaatctttaa

SEQ ID NO: 16423 - DNA, 193 bp, Zea mays
  Clone ID: LIB3150-117-P2-K1-F5
ttttttttttttttttaaaaaaattaaaaagaatattatatttttaaaaacaaaaaaaaacaaaggggcatgggactaccaaattttaatttttaccccccaaaaacaaggggaaacaaaacggaaaaatcggacacgaaaccacccctaaagaaaacaaacccctcataaacttcggggaacaccggtgaag

SEQ ID NO: 16424 - DNA, 221 bp, Zea mays
  unsure at all n locations
  Clone ID: LIB3150-117-P2-K1-F8
agaaacttacaaataatattataattantaagacaanaaacaaaaggggaggggcaatttaaatgtggttttgaccacccaacaccaagggaaaaaaacaatcgaagcataaagccgtaaacaatgcacgacaagaggcacacgatcgccagcgccgcgccaatagcccaagacacaacgtaccgtgctgcataaaaggtttcaaataaaagcacctggtc

SEQ ID NO: 16425 - DNA, 402 bp, Zea mays
  unsure at all n locations
  Clone ID: LIB3150-117-P2-K1-H8
gacaactacaacttatataagggggctaaggcactgtattaaatgaaacatctnnccaaatgggatgcaaaatcaatatataaagtactgcaagaagcccatcagcgtattaaaaaatatgtatgatctttaaggcctccaaattttatcccaacaattgtcaaccaccttttgaactcttttagtctgacaaactcctgtcactatggtataccaaatgacagcctccggcacaatatatttagccagcatgaccataacaacatctcctgctgccctatatttatttttatagcatagtctcatgaccaggccctttaagaattcccttcctttcccctttaaaactccaattttccgaaaaaaatttggattttattgggtctggataaacatttgatc

SEQ ID NO: 16426 - DNA, 479 bp, Zea mays
  unsure at all n locations
  Clone ID: LIB3150-118-P2-K1-A11
aaatggaaaatttatcttgaatacacacatggagtttcagcgcatcacgacataagtagctcaatacgcaaagcgcaaagcactttcaagtaagataacctaaaagattctccaaatttacaccttaacaaaaattggacccaatccacagcttctcggtaacgttacaacctgtgttactatgcacccaatccactgcttctcggtaatgttacaaaatgacaagtatccatgcttcaaggtcacggatcattcctcccaagatgcaccaagaatggcaacacaactacagaacaccatgctgatgagaaagcagaacctgaaagctacatgccatgatcttagttgtgtgatggaattggtagcctgcgcttccaagatttaacaaagaaatagcagccaaacattaacagttcagccccaaaatttgcgcacaattgaataacagatatcccnctaggatcaatcagaacacaaat

SEQ ID NO: 16427 - DNA, 226 bp, Zea mays
  Clone ID: LIB3150-118-P2-K1-A7
acggtaagctcattatattttgaaaataaccaccaaattaacaatctgcagcagtacatttttagtacctaatctactagcaggacaaataaatctaggcaatgggcaagtgagatagtagtaaggcatggctgcctttctgtagaacaaagtgtctaaaataacaaagcaaagctctccaccaagcaggtgcatatttcctaaaacggtaataccctttgatttt

SEQ ID NO: 16428 - DNA, 83 bp, Zea mays
  unsure at all n locations
  Clone ID: LIB3150-118-P2-K1-B2
tttttnnnnnnnnnggagcttacataacacttattatttatataactgataacattacaagacagaaagtacaactagacaca

SEQ ID NO: 16429 - DNA, 465 bp, Zea mays
  unsure at all n locations
  Clone ID: LIB3150-118-P2-K1-B4
tttttnttttttttttttattatcaatacattggtctagagctcaatcgcttttagaaaacagtgtactaatcaggtctgaaaacatggcataacgctctgaacttgagacgattaaccaaaaaaagtgtactcatcaggacacacatttcggtgcaagacaatccatgagaatgctctaagctacagcgctcttgcccttcttcctctgtagcttcttcatgtagaactcaagctctttaccctcaaggatgtacccatcagctcggccacactgtccagggcgggaagaaatgcatgccagcaaccgtccactgccaaattgctcctcaatgtgtgggtcaagggtacgtcccttcttgcgcttctcaagcttactcgtgacatgggtgctctttttcgtttcctcagctgctgcctcaacctcttgtgcctcagcattatccttttttgcagcaggggtttt

SEQ ID NO: 16430 - DNA, 366 bp, Zea mays
  unsure at all n locations
  Clone ID: LIB3150-118-P2-K1-C1
ttaagaatagcgctgttttattatgcagntccaaagggtacacaaggatgattcaggtaaatgactactctgtgcacatacgcaggagatgatgatatacaaacgatgcactggagctagaataccaaaacgagatggtaaaatggcaatagctttaaaagatcaacagcattcagtacgacaagcattcaggtgcattgaaaggcaaaacactaggcagatgaagacttgacaggggcagacttgatgatgtccacgaattcaggcttcaatgaggcttcaccaacaaggaattcatcaacatctggttgagctgcaagttctttgcagttagctccatttacagacccttcataaattattctt

SEQ ID NO: 16431 - DNA, 222 bp, Zea mays
  Clone ID: LIB3150-118-P2-K1-C11
gttagcatcatatattaattctttagcgtgacagaaacacccttacagaaggtgtagagctgataccaaaggttccctaatctgctcatggattcaaacttgcatcgctagcatatggccctttttaagctgttgattgatgcaacctactctgggtcctgaccgtatgaactagaagaacgttgacggttttcaagttggtgtgcgataccgatacgcacg

SEQ ID NO: 16432 - DNA, 378 bp, Zea mays
  Clone ID: LIB3150-118-P2-K1-C3
ttaaaaaagcaagtttttaataagataatttgctactgaagttcaaaatgactggtagccaaccaaaaacagtacttatttttaaaaaaggaaccagctaaaagcaaactctgaggcaacacgttacaccagtgcggcgcggtgacgaatatacgagtgggatccatttcatacagcagggcgcaccagactcatcttcaggaattggagccagggctactggtatttctgcttataaccttatcatggcagttcatgtattggttcacaatgagccggtaacgcctgacgtaccatgtcgaacttccccagaaacttctttttttttttggaaaaattttccaaaaaaacttagaagcactctatgtggacaatgcc

SEQ ID NO: 16433 - DNA, 293 bp, Zea mays
  Clone ID: LIB3150-118-P2-K1-C8
aatgttaatttttatcttttggaactcgattttaacatttcattactgcaaagaaagatacattttgatctcgatttcccagcactggtgggacacatgattccacccaataacgaagcacattagagatattttaatctgataactctttacatcaagccaagcaaggcagagggaactgaggaaacgccaccggcagccgttgcaaacgagggaagagatgcgcttaaccaccgaacccgtacagagtgcggccctggcgcttgagggcgtacacaacatccatggcggtg

SEQ ID NO: 16434 - DNA, 164 bp, Zea mays
  Clone ID: LIB3150-118-P2-K1-D11
cgctgcagtttattgccccttctttattcggcattcacggatatagatacaaccagttgcgttcgagcttccagctccagaatactcttgctaacagttctggcagctgaaacaaaacaactgaaatttaacgatacatgacataatattacaaatattcccat

SEQ ID NO: 16435 - DNA, 334 bp, Zea mays
  Clone ID: LIB3150-118-P2-K1-D3
ggtggggaacaacaaaatacgaaacttcctttccgagattggctgatccatcaaggattcaaaggtttactcaaaatccggtttccaaaaggtttactcagtacaacgtttccattaaaaacacacccgaacgaaaaatttcattaacaattcttttcgaaagaccaggatcctcgttatttattgctcccaaaagttttgcactactcccatgctagtcgccctgtactcctgtaagcctagccggaaccgacaattatttttttgatggggatgaaaataaccttaacaaaaaaccccacaaagcccatgacgaccaacccgatcgccgtcc

SEQ ID NO: 16436 - DNA, 350 bp, Zea mays
  unsure at all n locations
  Clone ID: LIB3150-118-P2-K1-D5
aaatgtcacttttttgtatttttanncanaattgtncatagggcagggttttttttnggagaccaccaaaattacctggcccaaaaaaaacaggttagggaaaccacatttcaaccgggggcgcccaccacttgtgtaaatttatggggattgaaaaaaaaaaaccaggttttttttgttttggggctcccacaaaaaaaacacctgggtagcttttgagccaaaaccacccttaatttattggggcccggccaacattggaacaaaaaggcggccggggttttttttttttcccaaaaaaaaaatcccactctttttttttttttaaaggggttctcttgggcccctaa

SEQ ID NO: 16437 - DNA, 435 bp, Zea mays
  Clone ID: LIB3150-118-P2-K1-D8
gttaatatccaacatgcatatagttcccaaatgaggcttagatgtttacaaagcgcagtactggaagttgaatgctgtgccacacaatattccatcattgtcaccatgtagattcagtaaccaagcagacattgttgtttttgccaaagctcggtctactcatcctggactaaaacaaaggccatcttagtaagaaaatacaaatgatgagaactgtttagatgcctcaagctgtccaggagaaactgtgtgatattcagccacagctcagggtcaagggctttcagaacatgcagcgcggccatttttgggcttgctaggtattccttcatgaggggccctacgaggcgaacgacttttgctatgactggggcgtttaagtacaggagagccactgtgtctgttacggttcctgtcataatcaggactgatact

SEQ ID NO: 16438 - DNA, 391 bp, Zea mays
  Clone ID: LIB3150-118-P2-K1-E1
ttatagcttgcctttactacatctttctttgagccgtgaaacagcacaccttgggggagtggtggcagatgaaacgatgcagatgtcccactcggtttttacgatacaagtacacgggcaacttgccttagaaaccaccaaacagagagtagtaaaacaggtaccgcgtgggggcgagatcaagaaaactactaacctaaccacagacggagtacaacagaacggcgggcacagccctgtttattggaaacaaattggcatcgacgacgccctcctcggaaacgaaaaaggcaaaaaaaaggtgctcacttggcgcttgcgagctgggtgcggatgagcttaacggcggagaccattttggtcagggcgggcttgaccttcgtgtacttgc

SEQ ID NO: 16439 - DNA, 155 bp, Zea mays
  Clone ID: LIB3150-118-P2-K1-E11
gttagcatcatatattatttctttagcgtgacagaaacacccttacagaaggtgtagagctgataccaaaggttccctaatctgctcatggattcaaacttgcatcgctagcatatggccctttttaagctgttgattgatgcaacctacttttg

SEQ ID NO: 16440 - DNA, 231 bp, Zea mays
  unsure at all n locations
  Clone ID: LIB3150-118-P2-K1-E12
acaggaaagtagtggttctttattaattaatatgcaatacggngaacaggctgaacagagcacataatacagtgtagataactaccatttgagaacataaagctcatcaccggctccgcaaaacaagacaagagagcccagaccccagcataactgcataagcatttgcaaggcagcttctacctacgagaagagtactctacatggtgttcacgaatcacgacataaaca

SEQ ID NO: 16441 - DNA, 166 bp, Zea mays
  Clone ID: LIB3150-118-P2-K1-E2
gttagcttgttacagcaaggaaaaatgattactactgcatgcaaaacacataaacacattgcgacaaagacactgacatgctagccacatgacctgagcacatatcacaggcagcaacaagtgcctaaacaaccgcttccctatcaaagatgcagctgaacttgac

SEQ ID NO: 16442 - DNA, 420 bp, Zea mays
  Clone ID: LIB3150-118-P2-K1-E9
aacaataacgccaaactttttattccagtagcaaagcgggggaataaagtcttacaacgtaagttgtaaaccacacaacgacagatagataagaaccgacagaaacataacacgataggagccactcagggcagatcacaggatagcagtggcacacaagcccgacgacgccgcgccagtagagcgtctagtactcgtcaccctcgtcgccgtcctcaccctcgtcaaactcagcaccgacctcctcgtagtccttctcgagcgcagccagatcctcacgagcctcggagaactcgccctcctccataccctcaccgacgtaccagtgcacgaaggcgcgcttggcgtacatgaagtcgaacttgtggtcaatgcgggagaagacctccacaacactggtggagttggagatcatgcaca

SEQ ID NO: 16443 - DNA, 381 bp, Zea mays
  Clone ID: LIB3150-118-P2-K1-F1
ggcaattatcacttcttctgctttcattctattcagaaccagtgtaacagggaaaacacattctccacggactacattacatatagcgctagagagctcacaacagctacacattattgatgaccataaccataagaatcggtggcggggaaaagaaaagaaaaaaggaaaactagaaagaacaaaccgcgctagagacgatcgatgcctagagaagactcagtgccacacaagagcatctaattctgacctaagggtgggtggaccatatcatacaggtgcaggtgcaggtgcaggacaggacagtcaaactcgtgggaagcgagaaggtcctctacgtcgcaggaactctgggatctccaccgtgctgctgccctctgc

SEQ ID NO: 16444 - DNA, 347 bp, Zea mays
  Clone ID: LIB3150-118-P2-K1-F7
gacaaaaatagttttttctcctcgtcactctaacgtgcctggtccatgcctagtaaaattgtttttcactagaaagtattattacatggtgaaagaaccctatggtgccgctgcagcagctgctgctggagccttcttgggcttctccacaacgattgcctgggtagtcagcaccattccagccacggaggcggcgttctgcagggcgcaccttgtcactttggcagggtcgatcacaccagcctccaccaggttctcgtgcttgtccgccatggcgttgtaaccgaactcccactcgctttcccggattttatccacaatcacctgaccttccaccccagcattat

SEQ ID NO: 16445 - DNA, 358 bp, Zea mays
  Clone ID: LIB3150-118-P2-K1-G1
ccccgagtagatatttattagttaatgaagctcgtgttcccaaaccaacgattaggatttaatgtgaatttgtaaaaacataacaaattactaagcgacggatcataataattgaatattcatcgaagtaaaccataatgtttatgaaaaggattctataatgaatgtaccttgatgaagcaatttttccctgaccagatatgtagaagttaatgaagcccttccttttttccaaagcaaagataaagatttacttgatgaagcaggtttttttcccttgaccagatatgtagaagttaatgaagcccttcctttttccaaaacaaagataaggattttatgaaggacgcggcgcgga

SEQ ID NO: 16446 - DNA, 205 bp, Zea mays
  Clone ID: LIB3150-118-P2-K1-G12
acgacttcctaaaatttaattttcaatgccaaaaggttaacatatagctcttacagcattcttgtattgcagaaggtgaaatagcaagaaggtaccaaataaatagataaaagtgcacaggctaacagagctcaacagttcacacaataacagcaacgaccacaaacaaaacttgtaatgatgaaaactaggtattgctaaagca

SEQ ID NO: 16447 - DNA, 254 bp, Zea mays
  Clone ID: LIB3150-118-P2-K1-G7
agcagaacaaaagataaggacttccatgcataacgatgttcagcacgagataagcaggttcacacaaggcactgtaataccccatacacttaaaattcatgttgcacaaagcaaaataagataggctaaaccaaaacgtttggattcgcattccaactgtagattggacttaagcaacggcctcgaggaaagcctttccaggagcacgcttctaaagtcttccatggttaccgagcagctttgcgttgacacca

SEQ ID NO: 16448 - DNA, 310 bp, Zea mays
  Clone ID: LIB3150-118-P2-K1-G8
acgagcaggcatttttattcgaagcaaaaggtgcagccaattctcaccatactaggaaccaggccagcgctgcccaaaaacgctcaaacaagaaagaaaaaaaaaacaaggaaccaaagttcttggaaaccaagtacacataactccaatacacgactaacaatgcgaattgcggtgaaacagatcgaaatgcaggcgatggttctccggcctgggcttcttcttcttcttctttccccggactaatcgaaggacagcggaacctggcttgccaggctacggtacttcagggcgtagaacatttcgatgt

SEQ ID NO: 16449 - DNA, 371 bp, Zea mays
  Clone ID: LIB3150-118-P2-K1-H8
agtactgttgaaacatttattagcagacttcccttacacgttgacaccttcaggaatcagatgacagccccggatacagagttccggaggtggaaatgtccggccagtactctcaaaagagcgagctcctgactggccggaaagcgttcgacaggtgagcaagtacagcgctgcgacacttgaccctgcaacaaacaaagacgatgactgttgcagctctcaagcaaggtcccagctatcgttggtccagtgggcgtcgccccagctgcacgacatcgaccagatgacgctggaggggctgtgccacgcgaagtcctctgcgtccaggtaaagctgtgacggggttaagtgctgttcccgtttcagccatt

SEQ ID NO: 16450 - DNA, 335 bp, Zea mays
  Clone ID: LIB3150-118-P2-K1-H9
attcatactcgttctatttataattttgcgttcaaacgaactgcgaagaaacgtgatcgcgatctattatcagtcaccccctatccctgctcccctcccactcattttttccccctttgctcaggcgccgacccgggcgacacgacggcgacaccaagtgcgcggacgcaataatcctgtccgtccttacgcccaggcccggccgtcgtacaatcatctcgtccccagcgcgcgcgccttgggctgtcgggcaccatcagccgggcgacgcgcaatggggtcagctagccccgctccgatccggtgaccacaggatcccaagccaccgtacccgc

SEQ ID NO: 16451 - DNA, 96 bp, Zea mays
  Clone ID: LIB3150-007-B6-F5A
tgattaaacatagggaattgtgtccatagggaccctctatagtctatctgatggcatgctttattgagtattctctagagacacctaaatagcgta

SEQ ID NO: 16452 - DNA, 568 bp, Zea mays
  unsure at all n locations
  Clone ID: LIB3150-108-P2-K1-B6-M1
acagtatgtattatcacattaccccatacaactattcatgcactgtgtcatcatcgtgaaaagagaggtggtggtggggaaacacaacaccaccgttacatcaggcatgtacagaaaaggccagatggtgcaattccagcactcacgtccaggttttccaacgaatgaatcgtacatcaacaataccatgccatgccataccgcagcagagcatccatcttcagactgctgggccaatgccaagctaactagtattgtgcagcgtgccaatgccagagagagaccccaacttcaccgtgcacctcgcaactcaaacctttaactcaggggaaaaagagcttggagtagagcagctcgttccacgtgtcctggagccccggcaggcaccagtgcgtgcagtccgcgtagctcttagggtccgcgacctgctccggggtcagcgggttccactgcttcttgtatatctgggtgtgcgcgtccttcctgtactcggagagctgggtgatgttcacaacccccacggngatcctggacttagacgcgctgaacacttntccgatcacgcgca

SEQ ID NO: 16453 - DNA, 548 bp, Zea mays
  unsure at all n locations
  Clone ID: LIB3150-108-P2-K1-B6-N1
caagcttcggcctcacctccagcggcaggtggtgctgcggagcttctcctcgccctagatcccgcgcacccaacgccagatcagagatcagggcgcgccggccgtctccattgccgggcggatcctgcgatgcgagctggaccgagagggaggagcgagggagcgcgcgggtagagaaggcggggcggggggaggaaggaaggaaggaaggagcgccggccggagcagacgtcccctcggggccctcggtcggatgagatcgacgatgaaggcgcagcacgccaacgggcgggggagcaggagccccttcctgacgtcctacgcgctcacgctcgccttcatcaccttcgtctccgtgctctactttaaggacttctcctccacgctgcaccgccccttnctccaccgcccccgccgncacgccgncccagacaaaagccaggcggngcgccgcgcggcggcggagcggctgccgttcgcggtgggcgcggcgccggcggngtgtgacgtccggcgaggggagtgggtgtacgacgacgcggcgcggc

SEQ ID NO: 16454 - DNA, 690 bp, Zea mays
  Clone ID: LIB3150-007-B6-F3A
taccttgagagacagaaactccctgatgagatcttaaggcacaatgtggatgagaagcgccagttccttatagaaataaacatggattctgagaagaatgatgctgaggttcaggcagagggagtattaaattcaagattacagcaaatagtgcatacacttgacaaggtgagatatgttatgagatgcatatttggagacccaaagaatgctcctcctcctcttgtaaggttgtctgggaaaagtctggtatctgccatctggaaaggggacagttcaatagttgctgaactcattcagtcgatggaacctcatgttgaagaagaggtacttagtgatctgaaggccaaaatccgtgctcatgatccgtcagagtctgaagatattgagggaggcacccggaattctctcttgtggctgcgtgatgaattgcgaactctttcatgcacttacaagtgccgtcatgatgctgctgcagatttgattcatttgtatgcttatacaaagtgcttcttccgagtccgggattataagacagtaaaatctccaccagttcatatcagtccgcttgacttaggccccaaatatgctgataaactgggaccaggctttcaggagtactgcaagacatacccagaaaattattgcttagcccagcttatctattggtatagccagaattcagaacct

SEQ ID NO: 16455 - DNA, 641 bp, Zea mays
  Clone ID: LIB3150-054-G6-F3A
cacgggagagcgtggccatcagtctctcgcccaccgttggtggtgggggatacaatgctgcctccgccaacggagtgatggtgcagaagccgtccaactggaagacaaggatctgtaacaagtgggagatgactggatactgcccatttgggagcaaatgccactttgctcatggttctaccgaacttcacaagtacggagggggcctcgtggacatcgacggcagggacatcttgtccactcctgattcgaagcaagccggtggctctgctaaagctcctctagagtctgctgctgcgtccactgcgttgccccctcatgcagacgtgtaccatctcggcatccagtcgcagcgctcggccatcgccagccagaggtctggacagctgcaaaggcccatccagaaatggaagggccctgacaagatcagcaggatctatggagactggatagatgagaacgaatagaagaaggatcttctacggtgggccgaagggaagctgttacttggtatccgtccgactccacatcagctggtggaagctttacctggcttagaagatctcgttagcgctgcaaaaccagagtcaagatcatctttgcaagacctgtattggggagataaactgctggaacatagt

SEQ ID NO: 16456 - DNA, 603 bp, Zea mays
  Clone ID: LIB3150-054-G6-R3A
cagctacccttcggctccaccgtataagatccttcttctattcgttctcatatatccagtctccatagatcctgctgatcttgtcagggcccttccatttctggatgggcctttgcagctgtccagacctctggctgccgatggccgagcagctgcgactggatgccgagatggtacacgtctgcatgagggggcaacgcagtggacgcagcaccagactctagaggagctttagcacagccaccggcttgcttcgaatcaggagtgtacaagatgtccctgccagtcgatgtgcacgaggccccctccgtacttgtgaagctcgctagaaccatgagcaaagtggcatttgctgccaaatggtcagcatccagacatctgccacttggtacagatccttgccttccagttggacggctgatgcgccatcactccgctgtcggaagcagcattgtatcccccaccaccaacggtgggcgagagactgatggccacgctctcccgtgccttagactgctcatcatgcacgaaggtgcatgtgtgaccatacgggcagacctcttcagtgtagaacttcttgcacagacggaccttgaatgccct

SEQ ID NO: 16457 - DNA, 542 bp, Zea mays
  unsure at all n locations
  Clone ID: LIB3150-013-Q1-N1-B10.F2
aaggctcctcccgaccgcaacgcccgtgatctcacctcgaccccgacatccccgaacccgatggcgccccaaggcggcgcaaaaagccagcggagaagaagccggcggccgaagagaaggcggaaaagacgaccgcaggngaaaaagcccagggccgagaagcggctgcccgagtccaagtcctccggcaaggagggcggcgagaagaaggggaagaagaaggccaacaagagcgtggagacctacaagatctacatcttcaaggtgctgaagcaggtgcaccccgacatcggaatatgctccaaggccatgtccatcatgaactccttcatcaacgacatctttgagaagctggccggtgaggccggcaagctggcgcggtacaacaagaagcccaccatcacgtgccgcgagatccagacctccgtgcgcctagtcctccccggagagctcgccaagaacgccgtctccgagggaatccaaggcgtcaccaagttcaccaccaactgaccgcgctgcgggatccgcggatctgttagaag

SEQ ID NO: 16458 - DNA, 495 bp, Zea mays
  unsure at all n locations
  Clone ID: LIB3150-013-Q1-N1-B10.R2
tcccgggggcggnnccgccctttttttttttttttttgttttttttgtttttttttttttttttgtataaggttttttttattttttcttttttgttggaggggggagacatacaaaatgatcagaaaacagggaatgcaaaatccatagggccagtcccttttctgggggccggcatttataaatgcctcgagcatagcttctaggcgggggtggggagcagtaccgccacaagagggctgactgaataacccttaacaccagatccggagtatcccaagaccggcatgcatcggtaggctagccttgttttattggggggatctccctcagccaacaggaattattagtaggcgtaccagggtaagggctttgtttcacgggaggcaccgaagtaggagcacccaacggtgggtttcttgctggcaccacccacataggaggatctcggggccgtcttgtacaaaatcgtgagccttgagggcgtcataaggc

SEQ ID NO: 16459 - DNA, 604 bp, Zea mays
  Clone ID: LIB3150-016-Q1-N1-G3.F2
gccaaccgcatccagtccaccccatccccctcgaccccgacaaccccgagtcccgacccgatggcgcccaaggccgagaagaagccagcggagaagaagccggcggccgaggagaaggcggagaagacgaccgcaggtaagaagcccaagtccgagaagcgcctgcccgcctcgaagtcctccggcaaggagggcggcgagaagaaggggaagaagaaggccaagaagagcgtggagacctacaaaatctacatcttcaaggtcctgaagcaggtgcaccccgacatcggcatctcctccaaggccatgtccatcatgaactccttcatcaacgacatcttcgagaagctcgccggcgaggccgctaagctcgcccggtacaacaagaagcccaccatcacctcccgcgagatccagacctccgtgcgcctcgtcctcccaggagagctcgccaaacacgccgtctccgagggaaccaaggccgtcaccaagttcaccagcaattgagcagcctccagcgtccacggatttgttaggtctccccttcttacaagggttcttcgtcgtgtcctctacccctcccctccccgcctatgtatgtgct

SEQ ID NO: 16460 - DNA, 480 bp, Zea mays
  Clone ID: LIB3150-016-Q1-N1-G3.R2
aggcacgggtacaactatattccaaaacaggggcgccaaatctaagaggcccattacaatccggcacgatttatgaagcaggcaagctagctactggcctttgttcacccgacgagaacatcaacgatttcacagcacatacataggcggggaggggaggggtagaggacacgacgaagaacccttgtaagaaggggagacctaacaaatccgtggacgctggaggctgctcaattgctggtgaacttggtgacggccttggttccctcggagacggcgtgtttggcgagctctcctgggaggacgaggcgcacggaggtctggatctcgcgggaggtgatggtgggcttcttgttgtaccgggcgagcttagcggcctcgccggcgagcttctcgaagatgtcgttgatgaaggagttcatgatggacatggccttggaggagatgccgatgtcggggtgcacctgcttcaggaccttg

SEQ ID NO: 16461 - DNA, 550 bp, Zea mays
  unsure at all n locations
  Clone ID: LIB3150-029-Q1-N1-H11.F2
ccaccagaaaaatcccagttctttggtccgcgtcagagaggcggcggcgatgtctgggcgcggcaagggcggcaagggtctgggcaagggcggcgcgaagcgccaccggaaggtgctccgcgacaacatccagggcatcaccaagccggcgatccggaggctggctaggaggggtggcgtgaagcgcatctcggggctcatctacgaggagacccgcggcgtgctcaagatctttctcgagaacgtcatccgcgacgccgtcacctacaccgagcacgcgcgccgcaagaccgtgaccgccatggacgtcgtctacgcgctcaagcgccagggacgcaccctctacggcttcggaggctaggctaggcgcctcttcatagtcggggactggttaggggacatgtctctgtgtgatgctttctgtggtattattgctgcaatagccgtgtaatccatcgcttntgcaattaatcgctcggaagcatgctacgtatgttgtgtctgtgggtgattgtatttctggtagtaacagtgattgttcctgaatttt

SEQ ID NO: 16462 - DNA, 368 bp, Zea mays
  unsure at all n locations
  Clone ID: LIB3150-029-Q1-N1-H11.R2
aaaagaaaaaaagggggggataaaaaaaaaaaaaaaaaaaaaaaaggttcccacggaaaaaggaaacccccaaaaaaaaaaaaaaagggggggcccccgaggggcttaaagaaaaaagggggggaaaaacagggggggggagaaaaaaccccaaaaaaggaaaaaaaaaaaaaccgggccccaaaacccccccaaaaaaaaaaagggggccaaccaaacccccaaaaccaaaaaggggggggcccgggggcgggggaggaaaaaaaaaaaaaaagggggaaaaggcctggggggcccccgtcaaggagaaaaaaaagggnccaaggaaaaccctcaaaaaaaaaatacgaaaccccgggggggctccc

SEQ ID NO: 16463 - DNA, 466 bp, Zea mays
  Clone ID: LIB3150-034-F5-R2B
ccacagcaacaagccaacaacaaccttgttttgttcgggtcgaaaaatgtcaacagatccttatttattacacatgaatagttcataaggtttaacaaataattttataaactgttggggctccagcaccagcagcatatgtccccaaatcattagttgcttgaatcaaaaagagagaggttacaggcttttaacattagcatcgatcgaccgaccggtcataaaattggcatgatcaaggagcaggggatggataccattaacagggagggggtcgactatcgtctaagcctttcaggcgcgcccggtctcctcggcggcggttggggtgtggagggcgggaacacccccgccgaagcctgacccctttttgcgcttcccggagccggacataaaagcccacaccggaaggggcacaaaccggggttccgacggggaggagatgacccactgtttttcgtttcca

SEQ ID NO: 16464 - DNA, 615 bp, Zea mays
  Clone ID: LIB3150-040-Q1-N1-A10.F2
cggacgcgtgggcggacgcgtgggcggacgcgtgggcggcggcgaagaagcctgcagaggaggagcccgcgacagagaaggcggagaaggctccggcggggaagaagcccaaggccgagaagcgcctcccggcgggcaagtccgccggtaaggagggcggcgagggcaagaaggggaaaaagaaagcgaagaagtccgtggagacctacaagatctacatcttcaaggtgctgaagcaggtgcaccccgacatcggcatctcgtccaaggccatgtccatcatgaactccttcatcaacgacatcttcgagaagctcgcggtcgagtccgccaagctggcgcgctataacaagaagcccaccgtcacctcccgcgagatccagacctcggtgcgcctcgtcctccccggtgagcttgccaagcacgccgtctccgagggcaccaaggccgtcaccaagttcacttcttcttaggctcatagtactaggctgggtggtgttggtagacgtggctcaatttatctggtaggggtagtgatggatgatatgatctgcgtctatttgagctgttaagactgatgaacattgttccacgtcacgttgtgtttgatgggca

SEQ ID NO: 16465 - DNA, 511 bp, Zea mays
  Clone ID: LIB3150-040-Q1-N1-A10.R2
gaaagaaaaaaattaaacattttgatattggccgggttttacattaaaaatataaaaaccaaatcggcctaagggggggaaacaaaaggggcctgcccccggaacggggtcaagaacccccagtggaatttaaaatttttttttggggggggggagatttcacgtttaaaggcccccacaaaaatttcagggttcaaactgggtccagggaaaacacagttggggggtcttaacaacgggatcgggaacaaggcccaaaaaacacaaggggggggggaaaaagggtcataagtgttaacgggtaaaaagggcgggaaggatttcatccctccctccccctaccagaaaaaggggggccgggttaccaaaaccacccggggctaattttatgagtcctaaaaaaaagggaactggggggcggccttggggccccaggaaacggggggcttggcaagctcaccgggggggaccagggccccccgggtttggatcttgggggggggggcggggg

SEQ ID NO: 16466 - DNA, 508 bp, Zea mays
  Clone ID: LIB3150-043-Q1-N1-C10.F2
gcaggaggcggacaaggtaagcagcaatcgcaggaaccctagcgccgccgcacccgcaggaatgggtatcgacctcgtcgccggtgggaggaataagaagaccaagcgcactgcgcccaagtctgacgatgtctacctcaagctcctcgtcaagctctaccgtttcttggtcaggaggaccaagagcaatttcaacgctgtcattctcaagaggcttttcatgagtaaaaccaaccgaccaccaatctccatgcgccgccttgtcaagtttatggaaggaaaggagaagaacattgctgtcattgttggcacagtcacagatgacaaaaggatccaggaggttccagcaatgaaggttactgccctgaggttcacggagacagcaagggccaggattgtcaatgctggtggcgagtgcctcacatttgaccagcttgctcttcgtgctccacttggcgagaacacggtcctcttgaggggccccaaaatgcccgtgaggcagtgaggc

SEQ ID NO: 16467 - DNA, 570 bp, Zea mays
  Clone ID: LIB3150-043-Q1-N1-C10.R2
acacaaaacaatcttcgggctcaaccagtaacgagtagataatagggagacgacttcaaattttttccaaaattcaaaccaggacaacaaattgggctactaatctcggtccagagggatgactaattactggcgactgatcaaacacaacggttgcactatgctgatggcaacacggagggccacaatttgtttaaaaccttgaatccacggttgttcctcctgccacgagccttttcgaacttccttcccttggagcgcacatacggtttggggtggctgggcggcactccaggagccttgccaaagggcctcactgcctaacgggcattcttggggcccctaaagaggaccgtgttctcgccaaggggagcacaaaaagcaagctggtcaaatgtgaggcactcgccaccagcattgacaatcctggcccttgctgtctccgggaacctcagggcagtaaccttcattgctggaacctcctggatccttttgtcatctgggactgggccaacaatgacagcaatgttcttctcctttccttccataaacttgaaaggcggcgcatgg

SEQ ID NO: 16468 - DNA, 537 bp, Zea mays
  Clone ID: LIB3150-052-Q1-N1-G11.F2
gctcggcgtcttcacaaacgccggcgcaaactctcgcccgagcccgacagatcttcaattccccattccgcccaccgatcgaccttcacgccagtctcggtctcttccgaaggcgtcgcgcgcggttgtttgagaggagaggaggaagatgagggagtgcatctccgtccacatcgggcaggccggcatccaagtcggcaacgcgtgctgggaactttactgcctcgagcacggcatccagcctgatggccaagtgcctggagataagaccgcgggacatcacgatgatgccttcagcaccttcttcagccagactggtgctgggaagcacgttccccgtgcaatcttcgttgatctagaacccactgtgatcgatgaggtgcgcactggcacgtaccgccagctcttccaccctgagcagctcatcagtggcaaggaggatgccgctaacaatttcgcccgtggccactacacaattggcaaggagattgttgatctgtgccttgaccgtatccgcaagcttgctgacaactgcac

SEQ ID NO: 16469 - DNA, 570 bp, Zea mays
  Clone ID: LIB3150-054-Q1-N1-G11.F2
atatctcctcgcattttccttgggaccgattgcctatccccctcccaaccaaagaccgatggcgcccaaggccgagatgaagcccgtggcgaagaatccggtggaggaggagcccgcggccgagaagaccaccgccggtaagaagcccctgcggacaagctgatccccattatcaagtccgccggcatggacggctacgagggcaaccgtggcaagaagaagggcaagaagagcgtggagacgtacaaaatctacatcgttgaaggtcgctacaagcaggtgcacccggacatctgcatctcctccaatgccatgtccatcataaactcattgatcaacgacatcttcgagaagctgtccggagaagccggcaagctggcgcgctacaacaagaagcccaccatcacctcccgcgagatccagacctacgtgcgcctcgtgctccccggagagctcgccaagcacgccgtctctgagggcaccaaggccgacaccaagttcacctcctgctaggcttgcacgctcgacctttgtaggactttcttgagtagatgttcgccttgtgtcgta

SEQ ID NO: 16470 - DNA, 577 bp, Zea mays
  Clone ID: LIB3150-054-Q1-N1-G11.R2
ggtcataccacacatgataatgtgtgtcgtcttactgcattattacatatatagatagagagggatggatagtaggaatttcccaaatatcatgaatcagtagtagggcggaatggcagcggaaacgccacaggggttggtgcggtagctgggcagctggtactggtactggtagagtccacccatggccggcatgttctgcgccatcatcatggccatggggttgagaccctgggctgccagcagctgctgctgctgctgcatcagagctggctcgtacaggctgctgctggcggcagcggcacgctcaagctgcatcatcatctgcagctgctgcgcgacggactgcacgtccatcatcctcatctgctgctggcagcactgttgccggagcggctggtacatggcgctcgtctgcccacacccggcgtagtagggcgccgccgacagcgggctgcactgcggctgcctcaggtactccgcgtaggggtacagcccgccggcgcccatcatcttcgtcaggccggcgccagcgccgtacaagccctgcagccccgcgcaggggcagggcatctgc

SEQ ID NO: 16471 - DNA, 589 bp, Zea mays
  Clone ID: LIB3150-064-P1-N1-A5.F2
cccctgctccattctcagccgccgccaatcccttcccgtgctccgcaaccgctgagtgagaagaagagatggccggcaagggcgatggcccggctatcggcatcgatctcggcacgacgtactcttgcgtcggcgtgtggcagggcgaccgcgtcgagatcattgccaacgaccagggtaaccgcaccacgccctcgtacgtcgccttcaccgactccgagcgcctcatcggagatgcggccaagaaccaggtcgccatgaaccccatcaacaccgtctttgatgccaagcgtctcatcggcaggaggttcagtgatgcgtctgtccagagtgatatcaagctgtggcccttcaaggtcatttctgggcctggtgagaagccaatgattgttgtccagcacaagggtgaggagaagcagtttgcagctgaagagatctcctctatggttcttatcaagatgcgtgagattgctgaagcttaccttggtagcacgatcaagaatgctgtggtcacagaccctgcctacttcaatgactcacagaggcaggccacaaaggatgctggggtgattgctggccttaatgtgct

SEQ ID NO: 16472 - DNA, 576 bp, Zea mays
  unsure at all n locations
  Clone ID: LIB3150-064-P1-N1-A5.R2
cccgggggcggggccgccctnntttttttttttntttttttntatttttctttttttgttttttggggtttttttnntttttttttttttttgtttttttttttagccggaaacaaatacccgaaaagaaaaattaccggtttactttaagggttggccggagcccggataacatgggaacccgccggcttttacgggggcccaaaaaaaaacccccccaaaagggccccccccccccaaataaaggttaagggggcacaccggaccggccggagaagataacttgggggagggaatggggccacccacaactggaggacgcttaaaaatggcaacaaaacggttaatccaccttcttcattttgggggccggggcccccctttcaacgggggggttctttttcattgcggcagggccgcccatttttttacccccgccccgggacattttggcgaaaaagggggtggaaaaggttttcaacttctttattttggtcttgaaatcgtcccccttggggaggtgggtgggggccaacccacttatgggcgcgtcgatgggggccccgaacttttttt

SEQ ID NO: 16473 - DNA, 379 bp, Zea mays
  unsure at all n locations
  Clone ID: LIB3150-071-P1-N1-H11.F2
ttnnnntttntttttcttttntnnnttttttttntntnnttttttttnttnnttttntnnntttttntttttctttttttttntttttntttttttttttttttttttttttttttnttttnttttttnttnnttttttttttttttttttttttttttttttttttttttttttttttttttttttttttnttttttttttttttnnttttttttttttttttttttttttttttttttttttttttttggggtttttttttnttttttttttttnntttttccttttttttttttttttttttttntttttttttgggttttttttttttttttttttttttttttttgtttgttgtttttttgttttttttttttt

SEQ ID NO: 16474 - DNA, 635 bp, Zea mays
  Clone ID: LIB3150-078-P2-N2-D8.F2
gaagcaagaaactagaaaggctcctcccgaccgcaacgcccctcatctccctcgaccccgacatccccgacccgatggcgcccaagcggagaagaagccagcggagaagaagccggcggccgaggagaaggcggagaagacgaccgcagggaagaagcccaaggccgagaagcggctgcccgcgtccaagtcctccggcaaggagggcggcgagaagaaggggaagaagaaggccaagaagagcgtggagacctacaagatctacatcttcaaggtgctgaagcaggtgcaccccgacatcggcatatcctccaaggccatgtccatcatgaactccttcatcaacgacatctttgagaagctggccggcgaggccgccaagctggcgcggtacaacaagaagcccaccatcacgtcccgcgagatccagacctccgtgcgcctagtcctccccggagagctcgccaagcacgccgtctccgagggaaccaaggccgtcaccaagttcaccagcaactgagcgcgctgcgggatccgcggatctgttagaaaggttctttgctgtgtcctttccccagtcccccaccctacccgcctagtagctagcttgcctgctctataaaatccgcgcgccg

SEQ ID NO: 16475 - DNA, 499 bp, Zea mays
  Clone ID: LIB3150-078-P2-N2-D8.R2
agcagggggggaaatacaacttttttccacaaacagggccctaaaattaaaagaggaaccattacaaccccgccccccggatttaaaaaacaggcaacctagctactaggcgggtagggggggggactgggaaaaggacccaaaaaaaaacccttttaaaaaaacccgggaccccccagcccccccaatggcggggaaactgggggacggccttggttcccccgaaaacggggggcttggcaacccctccggggaggaccaggcccccgggggtctggatcccccgggacgggagggggggctttttgttgaccccccccaccttgggggccccccccgcccccttttaaaaaatgcccttgaaaaaggagttcaaaagggacacggccctggagaaaatccccatgggggggggcccctgcttaacaccttaaaaaaaaaaacttggaggccccacccttttttgggccttttttttcccctttttttccccgccccc

SEQ ID NO: 16476 - DNA, 587 bp, Zea mays
  Clone ID: LIB3150-081-P1-N1-G2.F2
gcggcgtgaaccacccttgggaaagggggccgccgccacgccacgccacgccaccctcgtggcctttccgtggcgacgtgtcggttgctacacgcaaggtaggaagtgtcttagaccgtctgatctgagactggcggtccgggttgggggggggggggatcacattttcctgctgccgttccacatgcgaggagctaatccgacggtcgggttgctgtcagtgtgaggctttcagattccttcggtttggttgaatggataatatacttgcgttgacgcgtgagtaccaatgagataagatggtgttcgagcatccaccgtagttgttacaacttgaaattgggatatttgcaatgctctctctctctttctttggttggacctttttttatcttaacaatggttcacgcgccatttgtgattttgaacagcttggctgccctttgttgtttttttctcctggacgcctgcttctgagagtgagaggggccgaccgacggattcgaaacggtgacaagtgaaactactagctttctatgcgagggagagagagagagagctggaactggattgagcctggaatgcta

SEQ ID NO: 16477 - DNA, 606 bp, Zea mays
  Clone ID: LIB3150-081-P1-N1-G2.R2
agggggcacaataaatcccaggattgaattccaccaggaaacacggaacatccacaggcagaatacacacacaccgtctgatcccgtcaacattgacagagagaaataaaaaactagggcgacatattatgctctgacaaaggtggggggggacgatagcattccaggctcaatccagttccagctttttttttctctccctcgcatagaaagctagtagtttcacttgtcgccgtgtcgaatccgtcggtcggcccctttcacttttaaaagcaggcgtccaggaggcagcagcagcagagggcagccaagctgttcaaaatcacaaatggcgcgtgaaccattgttaagataaaaaaaggtccaaccaaagaaagagagagagagcattgcaaatatcccaatttcaagttgtaacaactacgggggatgctcgaacaccatcttatctcattggtactcacgcgtcaacgcaagtatattatccattcaaccaaaccgaaggaatctgaaagcctcacactgacagcaacccgaccgtcggattagctcctcgcatgtggaacggcagcaggaaaaagtgatcgccgaggctagcaatccggc

SEQ ID NO: 16478 - DNA, 647 bp, Zea mays
  unsure at all n locations
  Clone ID: LIB3150-107-P1-N1-B4.F2
tcgcatgccgcgtcgttaagctggtcctctagatcgcccagcgtccggttcggagcgggcagcagcaccaggccctcccaacctatcgtcttcttcccctcctcaggaagaaaagagctgaaccatggggaagagaagtcagctgctaagccacctcctaagaagcggatggacaagcttgacactgggttttcctgcccattctgcaaccacgggagtagtgttgagtgccgaattgacatgaagaatctgattggcgaagcatcttgtagaatctgtcaggaaaacttcagcacaactgttaatgcactcactgagcctattgatatatatagtgaatggattgatgagtgtgagcgtgtcaacactgttgaaggcgacgatgatgcgtgagcttgccccatgcgatgaaactgttacctacaatcgtaatgtaatgtgctggtattctcgaatgccatagcccatagtcagccatggcttggaataacgtantggctgaccgatatgccagtatgcaccttatctagtacttacagaactacaaaaagtttgtactatacatatatggacaaccttataagtggctatgtgtgtacctatcctaacgcttaaaaaaaaaaaaaaaaaaagggcgggcggcccgg

SEQ ID NO: 16479 - DNA, 574 bp, Zea mays
  Clone ID: LIB3150-107-P1-N1-B4.R2
aagcgttaggataggtacacacatagccacttataaggttgtccatatatgtatagtacaaactttttgtagttctgtaagtactagataaggtgcctactggcatatcggtcagccactacgttattccaagccatggctgactatgggctatggcattcgagaataccagcacattacattacgattgtaggtaacagtttcatcgcatggggcaagctcacgcatcatcgtcgccttcaacagtgttgacacgctcacactcatcaatccattcactatatatatcaataggctcagtgagtgcattaacagttgtgctgaagttttcctgacagattctacaagatgcttcgccaatcagattcttcatgtcaattcggcactcaacactactcccgtggttgcagaatgggcaggaaaagacagtgtcaagcttgtccatccgcttcttaggaggtggcttagcagctgactttctcttccccatggttcagcttcttttcttccttgaggaggggaagaagatcgactaggattgggatggggctgtgtgctgctgcccgctccgaac

SEQ ID NO: 16480 - DNA, 333 bp, Zea mays
  Clone ID: LIB3150-014-Q1-N1-B11-F2B
cttcgctctgaactatatcgggctacaactaatatggcgaggaagcgcaaggccggcgactcctccaagggtatcgacggcgcccactctctgccaccaccgctggctatggatcaacagtacgcgtgtgcatgggcatctgaccgacggaactagcatggccgcggcggctgaagcggcggcggcgcagcatcagcggcggagaaggaagcggttcgtgggtgtgcagaagcagccgtcggggcggtgggtggcggagataaaggacaccatccacaagatccgcgcgtggataagcacctttgacacggtcgaagaagccggccgcgccta

SEQ ID NO: 16481 - DNA, 311 bp, Zea mays
  Clone ID: LIB3150-014-Q1-N1-B11-R2B
attaattctccagaagaacaataatgggggaggatttccttagagaaaagggacgcggaaacacgttaacaccagggctttctgacttaaagaactgccatgaacgtaacgaagtacacaaataacaaactcaaccaatctctaaacggatcaaccatgtctaattcaacagaggggacccaagcccggggagctccacagcaccatgtcgccggcactgtcaccagggctcgcctcaaacaacaagcttgacccctccggggcgccgtaaccgggtgaaccctcctcacaaggcggatcgacaacccctg

SEQ ID NO: 16482 - DNA, 629 bp, Zea mays
  Clone ID: LIB3150-007-B6-F4A
gcttatctattggtatagccagaattcagaacctgaatctagattaacaagagctagaaaaggttgcatgtcgttgccagatgtctcatccttctatgtgaagtctgcaaagccatcacaagagcgagcttatggaaacagaactgtgagattcatgttatcgcgcatggaaaaacaggcacaaagaccatggccaaaggataggatatgggtgttcaagagtgatccgagattctttggtagtccaatgatggacaccgtgttgaataattccccgcttgacaaggagatggtgcactggctcaagactagaccaaatgttttcctaggctagtaaaaaaggtttgtaggcagataaggtggtatttggttctttctcctttttggagattttagtctacatgattctttttccgactcacaccttggctacctgatcatggggagtttagcttttagatagcagggtagtctcaccacccccatctgtacattcctctctccctactttccttgtagagatgtatctggttaataactgatagattcgtcattgatttgatgtagtgaattttccccataggaacgctccctcttctgtttcatgtaaatgcagaacaatttcaatc

SEQ ID NO: 16483 - DNA, 523 bp, Zea mays
  Clone ID: LIB3150-007-B6-R4A
ctcctgaaagcctggtcccagtttatcagcatatttggggcctaagtcaagcggactgatatgaactggtggagattttactgtcttataatcccggactcggaagaagcactttgtataagcatacaaatgaatcaaatctgcagcagcatcatgacggcacttgtaagtgcatgaaagagttcgcaattcatcacgcagccacaagagagaattccgggtgcctccctcaatatcttcagactctgacggatcatgagcacggattttggccttcagatcactaagtacctcttcttcaacatgaggttccatcgactgaatgagttcagcaactattgaactgtcccctttccagatggcagataccagacttttcccagacaaccttacaagaggaggaggagcattctttgggtctccaaatatgcatctcataacatatctcaccttgtcaagtgtatgcactatttgctggaatcttgaatttaatactccctctgcctgaacctcagcatcattc

SEQ ID NO: 16484 - DNA, 516 bp, Zea mays
  Clone ID: LIB3150-035-Q1-N1-B12.F1
cacacaccgcacattctgcaggcgctccgacttgcaatgggcatttatgaggatgctctcgtcctcatcgtgaactttcgataccaagatgcgtttcaatcgactttctgtcacttgaagccttgattacatggatacattggttataattccagtctcgtcagatggtacatcaattttaggactcaaacttgcaatcgcagtttgatcataatagaattaacggattccatacagagctggaccttttaacattcaagggactctatcatacttggatcaagtatactatatagctttagaaaacattcatgtagagatcctataaaagaatgttaagcgcatagaagactattcattaataaacataattttacttaatagtgattctcaacaaaacagttagatgttagatcactgggagcatgagaaaggggtaaaattctcaaactataaggtaataaaatacaatacttatgtaaaagatctgattaatatctgtaaaaggtatatcaa

SEQ ID NO: 16485 - DNA, 568 bp, Zea mays
  Clone ID: LIB3150-035-Q1-N1-B12.F2
cacacaccgaacattgcggaagagcataaacttgcactggacacaccatgaccatgcggctgctcctagtgtggaacttgaagaccaagaggactttgaactgcgcatgtctcgccaccttgaagcccttattacatcggatccatcgctgtattaaggtcccactcctcgctcacgaagcagacacactcgagattgtttacaacgtcacatcaatggtgaaggcctgactggtcacactaatatcaatggcaacaattccacactgagctggagctgttacatgtcaagggaatccagcatgattgcataaccgcatgctgaagagcttgagcaatacatgatggagggtacctacaaccacaaggtaatcgctatagacgatgagccacatgagaccaacatttacttgatgaaccatgtcgacaaaacacataaacaggagatcgactggtacatcgaaaaggggcataaatctctatatgacagtgaagcaaaacacatgattatggccaaatatcgaccaagagcctgacaaaggcctcactgaagagcaccagtgaaggaa

SEQ ID NO: 16486 - DNA, 521 bp, Zea mays
  Clone ID: LIB3150-035-Q1-N1-B12.R1
tttattttttttttttttttggcaacaacaaggcacagcagctttgtcttatttgatctcagttcaatcaagaagaagaaaaacaatatacgaagctagaatctcataaataccctgggtgagatgagctctctccgcagcgcataggtaggaacagaatcatgctggaggcacatttaatctgaaatagatctaatcaatggctcatcgtcatatcagatcattcgctggccttcttcagcttagcttcctctccgtggatctcctcaagcgctgcacagggcttagggggttcgaagtcccttgaggggcaagggtcaacctgcttccaacaaggacttctccgggttcctcgtcgccacagcgacgaaaggcataggtggcgggacgccagcccggataccgcacgcgaatcctcggagaagaagctgctgctcttgcggaaacctcgaagccggggagggccctgagataagggtatggagagggctttgggagctggcaataggctccgacgatga

SEQ ID NO: 16487 - DNA, 543 bp, Zea mays
  Clone ID: LIB3150-035-Q1-N1-B12.R2
ggctcacattcatggcacagtatcttttgtcttatttgatcttagtttatttttttattatgaaaaacaatatacgaagctagaatctcataaataccctgatgagatgagctctctccgcagcgcataactaggaacagaatcatgctggaggcagatttaatatgcagtaactctaatcgatggctcatcgtcatatcagatcattcgctggccttcttaagcttagcttactctacggcgatctcctcaagcgctgcccagagcttaggatattagtaacccttgacgagcaacgcggatcctgcttccaccaaggacttctgcgggttcctcgtcgccacaccgacaacaggcatgcctggcgctacgccagcccggataccggcaggcgaatcctagaaaaaaagctgtgctctgaggacacctggagctccttgagggccctgagataagggtacggcgcgggctttggctgctcgcactcgtctccgacgatgacggcctggaagaagttcgagaggcctttgagcgagatcatca

SEQ ID NO: 16488 - DNA, 555 bp, Zea mays
  unsure at all n locations
  Clone ID: LIB3150-035-Q1-N1-F10.F1
ggtactangtnntnntgtggttcattgccagttgctcttgctgctcgtggtcaccgtgtataggttgtaatgcccagatatttaaatggtacctccgataagaattatgcaaatgcattttacacagaaaaacacattcggattccatgctttggcggtgaacatgaagttaccttcttccatgagtatagagattcagttgactgggtgtttgttgatcatccctcatatcacagacctggaaatttatatggagataagtttggtgcttttggtgataatcagttcagatacacactcctttgctatgctgcatgtgaggctcctttgatccttgaattgggaggatatatttatggacagaattgcatgtttgttgtcaatgattggcatgccagtctagtgccagtccttcttgctgcaaaatatagaccatatggtgtttataaagactcccgcagcattcttgtaatacataatttagcacatcagggtgtagagcctgcaagcacatatcctgaccttgggttgccacctgaatggtatggagctctg

SEQ ID NO: 16489 - DNA, 558 bp, Zea mays
  Clone ID: LIB3150-035-Q1-N1-F10.F2
cggacgcgtggggagatgtttgtggttcattgccagttgctcttgctgctcgtggtcaccgtgtgatggttgtaatgcccagatatttaaatggtacctccgataagaattatgcaaatgcattttacacagaaaaacacattcggattccatgctttggcggtgaacatgaagttaccttcttccatgagtatagagattcagttgactgggtgtttgttgatcatccctcatatcacagacctggaaatttatatggagataagtttggtgcttttggtgataatcagttcagatacacactcctttgctatgctgcatgtgaggctcctttgatccttgaattgggaggatatatttatggacagaattgcatgtttgttgtcaatgattggcatgccagtctagtgccagtccttcttgctgcaaaatatagaccatatggtgtttataaagactcccgcagcattcttgtaatacataatttagcacatcagggtgtagagcctgcaagcacatatcctgaccttgggttgccacctgaatggtatggagctc

SEQ ID NO: 16490 - DNA, 557 bp, Zea mays
  Clone ID: LIB3150-035-Q1-N1-F10.R1
tatttttttttttttttaataaaaacgaggcatgattttctaatgagtcattatgttatcagccctaacgagcaaaggacaacaacacaggtaataatcttaaggtaaacagtgagtggcatagcagaaactgactccagcttgttccatatgaatcacggcgaggctgcctgcgtgactgcttccagctccccttcctatccttcaaaactgtcgttcgatggattcctcactgcatccggtgcatcgaggcaagccagccaaagcagacgttggagcaatggagccaatagccggtctgccttccatgtaatgtacaggggttttctttcatcatttagcttactataggatgatgaactgatgatcttcaaggaaccaccactttggtcctttttttacatgacatagggtcgatcgatgaaggcccactggaagatttgttcgtattgttcagcggcatggtcccacgtgaagtcttttgacatgcctcgcttcattagcccttcccaggaggacttgtgttccctgtatgtagatattgcagttcgcaatgt

SEQ ID NO: 16491 - DNA, 550 bp, Zea mays
  Clone ID: LIB3150-035-Q1-N1-F10.R2
aataaaaacgaggcatgattttctaatgagtcattatgttatcagccctaacgagcaaaggacaacaacacaggtaataatcttaaggtaaacagtgagtggcatagcagaaactgactccagcttgttccatatgaatcacggcgaggctgcctgcgtgactgcttccagctccccttcctatccttcaaaactgtcgttcgactggattcctcactgcatccggtgcatcgaggcaagccagccaaagcagacgttggagcaatggagccaatagccggtctgccttccatgtaatgtacaggggttttctttcatcatttagcttactataggatgatgaactgatgatcttcaaggaaccaccactttggtcctttttttacatgacatagggtcgatcgatgaaggcccactggaagatttgttcgtattgttcagcggcatggtcccacgtgaagtcttttgacatgcctcgcttcattagcccttcccaggaggacttgtgttccctgtatgtagatattgcagttcgcaatgtccacaacat

SEQ ID NO: 16492 - DNA, 546 bp, Zea mays
  Clone ID: LIB3150-036-Q1-N1-E6.F1
gccatctcgagatcattacacatgcatggttgacttgcttggtcgtgccggtcatctcaaagaagctgaggagctcataaaggacatgccaacggaacctgactctgtgctctgggcttctctgctaggtgcttgcaggctgcataagaatgttgagttgggggaacggacggctggaagattgtttgagcttgatcctgagaactctggaccctatgtccttctctcgaatatgtacgctgagatggggaaatgggcagatgtttttagagtcaggagatccatgaaggacaggggtgtcagtaagcaacccggttgtagttggattgagataggaagtaaaatgaatgtgtttctggcacgagataatcgacatccatgcaggaatgagatatacagtactttaagaataattcagatggagatgggcagaacgagtatagatgaaattgatgatgacttgatgaattactgctctgaagcctgtggatagaagtagaaagtcagatgacttcagaagtaggtgttgacagcttgcttgatatc

SEQ ID NO: 16493 - DNA, 496 bp, Zea mays
  unsure at all n locations
  Clone ID: LIB3150-036-Q1-N1-E6.F2
gtcatattgagaccattacacctatgcttggactgactagcttgggcaagccgggcatgtaaaataagcttacgacatcacataggacatgccaacggtacctgactatcagctcagaactccacatgcttatgtgcttgaaggctggataatatgttcagtggtaactaacacaccgttggaacaatgttcgacctcgatactctgaactctgtaccctatgaccttatttaaaacttgttcgctgatactgcgaaatcatcagatgatgttaaaggcaggacattcatgaatgtacaagggagacagtaagcaacccgagagtgcccggattcatatagaacgtaaaatgaatgtgtaaatggcacgagaaattaaacattcatgcactaacgacatatacagtgatcctaaaatctttcaaaagactaatgggcagctacgagcactttatngaaatagatgatgactaagatgaattactgctgctgaagcc

SEQ ID NO: 16494 - DNA, 264 bp, Zea mays
  Clone ID: LIB3150-036-Q1-N1-E6.R1
atttttttttttttttattttttttttttttttttttttttttttttttttttttattattttattttatatttttaaataatattatattaataaaaaaaaagataaaaaaaaataaagaaaaaaaaaaaaaatgaaaaaaaaaaaaagaagggggagatcaaaaagagagaaatgaaaagaagccgaaaaaaaaaaaagatgaaaaaaaaaggaaaaaaaaaaaaaaaaaaaagaaaaaaaaaggaaaaaaacaaccctaat

SEQ ID NO: 16495 - DNA, 229 bp, Zea mays
  Clone ID: LIB3150-036-Q1-N1-E6.R2
cacattatcattatgtcatactctccaaataatattacagtcttattctttatcgtttttacaggaccctaacaacatcagcggaatggcactagaattacagaaggtacagctcactgggagtgatttaggttagctgctcctattgacaaatccttgggaaaaactggtgacgggaatcatagcttaaagatcctcaaggccatccacatccttattttcaaataca

SEQ ID NO: 16496 - DNA, 452 bp, Zea mays
  Clone ID: LIB3150-037-Q1-N1-B5.F1
ctgagacctgacgttgtcactacaatactataatatcagcatgctgcaacaagggcgatactgataaagcattggagcttctccaagaaatgaacaagtatggcatcagacctacactgagaacgtaccatacacttgttagtgcattggctagtgcagggagagttcatgatatggaatgcctatatcagcaaatgttgcacaagaatgttgaaccgagcagtagcatatatggcatcatggttgatgcctatgtgagatgtgaaaatgattcaaaggtagcatctctgaaaaaagtaatgtcagagaaaggaatagcctttgatgacacgaagagaagtaaccatgagctagataggataatagcaagtccaatttgattggattgccttgaaatgaaaaggctggaaggttgccagttatgttaatatcaaaaacaaaatttcagattt

SEQ ID NO: 16497 - DNA, 303 bp, Zea mays
  Clone ID: LIB3150-037-Q1-N1-B5.F2
ttcgcattggtaccgaggactgcttggcacttccaagcaaaggaaatctgggaaggatggctggtatcctccaggccatggtgatgtgttcccctctttgaataacagtggaaaactctacatatcattggctcagggcaaggagtatgtcttcgatgctaactcagacaacttgggtgctatagtcgagatcaagatgcttagccatctgagcaagaaccagaatgaatactacatcgaggtgactccagaaacattggctggatgttaatggcgggactctcatctgttacgaagctagca

SEQ ID NO: 16498 - DNA, 484 bp, Zea mays
  Clone ID: LIB3150-037-Q1-N1-B5.R1
tattatttttttttttttttttttttttttttaaatctgaaattttgtttttgatattaacataactggcaaccttccagccttttcatttcaaggcaatccaatcaaattggacttgctattatcctatctagctcatggttacttctcttcgtgtcatcaaaggctattcctttctctgacattacttttttcagagatgctacctttgaatcattttcacatctcacataggcatcaaccatgatgccatatatgctactgctcggttcaacattcttgtgcaaaatttgctgatataggcattccatatcatgaactctccctgcactagccaatgcactaacaagtgtatggtacgttctcagtgtaggtctgatgccatacttgttcatttcttggagaagctccaatgctttatcagtatcgcccttgttgcagcatgctgatattatagtattgtagctgacaacgggggtctcag

SEQ ID NO: 16499 - DNA, 453 bp, Zea mays
  Clone ID: LIB3150-037-Q1-N1-B5.R2
aaatctgaaattttgtttttgatattaacataactggcaaccttccagccttttcatttcaaggcaatccaatcaaattggacttgctattatcctatctagctcatggttacttctcttcgtgtcatcaaaggctattcctttctctgacattacttttttcaaagatgctacctttgaatcattttcacatctcacataggcatcaaccatgatgccatatatgctactgctcggttcaacattcttgtgcaacatttgctgatataggcattccatatcatgaactctccctgcactagccaatgcactaacaagtgtatggtacgttctcagtgtaggtctgatgccatacttgttcatttcttggagaagctccaatgctttatcagtatcgcccttgttgcagcatgctgatattatagtattgtagctgacaacgtcaggtctcag

SEQ ID NO: 16500 - DNA, 528 bp, Zea mays
  Clone ID: LIB3150-039-Q1-N1-C5.F1
ctcgcattgttaccgaggacttcttgccacttccaagcaaagggaaatctgggaaggatggctggtatcctccaggccatggtgatgtgttcccctctttgaataacagtggaaaactcgacatcttattggctcagggcaaggagtatgtcttcgttgctaactcagacaacttgggtgctatagtcgacatcaagatcctgaaccatctgatcaataaccagaatgaatactgcatggaggttactcaaaaacattggctgatgttaaaggcggtactctcatctcttacgaagaagagttcagcttttggagattgcccaagtacctgatgagcatgtgaatgagtttaaatcaatcgagaagtttaagatattcaacactaacaacttgtgggtgaaccttaaagctgtcaagagactagtagaggctgaggcacttaagatggaaattattccaaaccccaaggaagttgatggtgtgaaagtccttcaacttgaaactgcagctggtgcagctattcgtttc

SEQ ID NO: 16501 - DNA, 558 bp, Zea mays
  unsure at all n locations
  Clone ID: LIB3150-039-Q1-N1-C5.F2
ctcgcattgttaccgaggacttcttgccacttccaagcaaagggaaatctgggaaggatggctggtatcctccaggccatggtgatgtgttcccctctttgaataacagtggaaaactcgacatcttattggctcagggcaaggagtatgtcttcgttgctaactcagacaacttgggtgctatagtcgacatcaagatcctgaaccatctgatcaataaccagaatgaatactngcatggaggttactccaaaaacattggctgatgttaaaggcggtactctcatctcttacgaaggaagagttcagcttttggagattgcccaagtacctgatgagcatgtgaatgagtttaaatcaatcgagaagtttaagatattcaacactaacaacttgtgggtgaaccttaaagctgtcaagagactagtagaggctgaggcacttaagatggaaattattccaaaccccaaggaagttgatggtgtgaaaagtccttcaacttgaaactgcagctggtgcangctattcgtttctttgacaaagcgattggaatttaat

SEQ ID NO: 16502 - DNA, 514 bp, Zea mays
  unsure at all n locations
  Clone ID: LIB3150-039-Q1-N1-C5.R1
atggtagtatcatttcagcaaaatatacgtccctggcgcacaaaaacagaagggcagacgcaccaaagaagattacagtcatattctctagcgggctcacaggaccctcacagcgggaggnnaatggcacgagaattacaaaaggtagagctcagtgggagtgatttgggttggctgctcctattgacaaatccttgggaaaaactggtgacggcaagcatagcttaaagatcctcagggccattgacatccttgttttcaaatacagctccatctggaacctccaacttcactccagacttggcggtgattgtcaccttgcccttgagcgtaattccagaaccaaaccagacatcaccagaaaccttcaagctgtcaagtcgacgatgctggggatggacttgaaccgagcaaggaaattggcaaccttcttgaactcaggtccaagctcaatcgaagggttagctggattcgctctggatggattgcggatgacaaagccatcaaccaaggt

SEQ ID NO: 16503 - DNA, 546 bp, Zea mays
  Clone ID: LIB3150-039-Q1-N1-C5.R2
atggtagtatcatttcagcaaaatatacgtccctggcgcacaaaaacagaagggcagacgcaccaaagaagattacagtcatattctctagcgggctcacaggaccctcacagcgggagcggaatggcacgagaattacaaaaggtagagctcagtgggagtgatttgggttggctgctcctattgacaaatccttgggaaaaactggtgacggcaagcatagcttaaagatcctcagggccattgacatccttgttttcaaatacagctccatctggaacctccaacttcactccagacttggcggtgattgtcaccttgcccttgagcgtaattccagaaccaaaccagacatcaccagaaaccttcaagctgtcaagctcgacgatgctggggatggacttgaaccgagcaaggaaattggcaaccttcttgaactcaggtccaagctcaatcgaagggttagctggattcgctctggatggattgcggatgacaaagccatcaaccaaggtgtaaagatcagactgcacaagcaataaatca

SEQ ID NO: 16504 - DNA, 532 bp, Zea mays
  Clone ID: LIB3150-041-Q1-N1-E7.F1
gccgccgctgagatctggcctagcgagcctcggtgctctgaatcccgattcggttcggctcccttgctctgccgtcgcttccgaggcgtgctcggatctcgtcggagtagagggcctcgcggctcgcttcgggggcgagatggatcatgtggtcgggggcaagttcaagctcggcaagaagatcgggagtggatcgttcggggagctcttcctcgccgtgaatgtgcagaccggggaggaggtcgccgtcaagctggaaaatgtcaagacaaagcacccgcagcttcattacgagtccaagctatacatgcttctccaaggaggaactggcattccgcacctcaagtggttcggcgtcgagggggactacaatgtgatggtgatcgaccttcttggccctagccttgaggacttgttcaactactgcagcagaaagttctctctgaagactgtgctcatgctcgctgaccaaatgattaaccgggttgagtacatgcatcaaaaggggtttcttcaccgtgatataaagcct

SEQ ID NO: 16505 - DNA, 542 bp, Zea mays
  Clone ID: LIB3150-041-Q1-N1-E7.R1
tttatttttttttttttttttttttttttttttttttttttttttttttttttttttttttttttttttttttttttttttttaagaaaacccggcatcgatttacacaggaggccccttcttttattatcattatcaacttccgttgaataagcaaattcagagttcaacaagaaacccccgggcacttgccccggggggggggaaaaaaaagagtccccaagtccaggagagggttaagaaacataaatatgggaatcttgaccaccccccaaatctaatccccccaaaggctaggacttggccctaacgcgactgcaacacagcacgcacattcaacaacgaattattgctatctacgggcccatggtaaaaggccggggcgggcccatgaaattacgggatcccccaggggaaaaactgctggcgaaaacaggggacatgccccgtcatttacagagtccccaacagggattcttttcccttccgctaacagatcggcttccttcccggtatttccccttgccgctgccaagggaaag

SEQ ID NO: 16506 - DNA, 464 bp, Zea mays
  Clone ID: LIB3150-041-Q1-N1-E7.R2
aaaaaaaaggggggcttgtttaacccagggggcccttttttttattaaaattaaaaacttcgggggaaaaagcaaattcagagttcaaaaaaaaacccccgggcccttgtttggggggggggaaaaaaaaaaagccccccaccccaggaggggggtaaaaaacaaaaattggggaattttgccccccccctaaatttaatccccccaaggggtggggctgggccctaacgcgaggggaacacagcccccccatttaaaaaaaaatttttgttttttacgggccccgggaaaaaggccggggggggccccaaaaaattacgggatcccccaggggaaaaactggggggaaaaaacaggggacaccccccctttttaaaagaggccccaacggggatttttttcccttccggtaaaaaaaggggttccttcccggtttttccttttgcccgtgccagagggaaaag

SEQ ID NO: 16507 - DNA, 555 bp, Zea mays
  unsure at all n locations
  Clone ID: LIB3150-051-Q1-N1-H12.F1
ggacacggtgctcaacctggggctcaacgaccaagtggccgccgggctagggaagacggggacgttcgtcctacgactccttccgccgcttcctcgacatgttcggcaacgtcgtgaatggacatcccccacgcgctgttcgaaagaagcttgaagccatgaagaaagccaagggggtgaagaacgacaccgacctcaccgccaccggcctcaaagagctggtgagccagtacaaggacgtctacgtggaggctaagggagagccattcccctcagaccccaagaggcagctggagttggcagtgctggccgtgttcgactcctgtgagagcccgagggcaaagaagtacaggagcatcaaccagatcaccggcctcagaggcaccgcgggtaacgtgcagtacatgngtgttcggcaacatggggaacacctctggcaccggcgtctgcttcactaggaaccccaacaccggagagaagaagctgtacggcgagttcctggtgaatgccagggcgaggatgtgggttgctggaatcagaaccccgggaagatct

SEQ ID NO: 16508 - DNA, 564 bp, Zea mays
  Clone ID: LIB3150-051-Q1-N1-H12.F2
ggacacggtgctcaacctggggctcaacgaccaagtggccgccgggctggcggccaagagcggggaccgcttcgcctacgactccttccgccgcttcctcgacatgcttcggcaacgtcgtgatggacatcccccacgcgctgttcgaagagaagcttgaagccatgaagaaagccaagggggtgaagaacgacaccgacctcaccgccaccggcctcaaagagctggtgagccagtacaaggacgtctacgtggaggctaagggagagccattcccctcagaccccaagaggcagctggagttggcagtgctggccgagttcgactcctgggagagcccgagggcaaagaagtacaggagcatcaaccagatcaccggcctcagatgcaccgccgtgaacgtgcagtgcatggtgttcggcaccatggggaacacctctggcaccggcgtgctcttcactaggaaccccaacaccggagagaagaagctgtacggcgagttcctggtgaatgcccacagcgaggatgtggttgctggaatcagaaccccggaggatcttgatg

SEQ ID NO: 16509 - DNA, 510 bp, Zea mays
  Clone ID: LIB3150-051-Q1-N1-H12.R1
ctacgaaaagatatcagctttttcgaggcttaatttgaggagggcctcaataggtggaatgtgcacaatggcctcaacaacgacatgcacatctcacaccacgaaaaccctcagttttaagcatgaacagtttggaagttttacatagctgagaaaatagatggaactgtagcttttatgagcgctgctactaatactcttcacagagcatatggctcttcaatagtagtattattaatcaccagatgcaccaacagcaggctgccaacgaggaggcaccctcagacaagcacctgagctgcagctagcctcgcgttggggaccctgaaggaggccaagaaacgtaatccagcccagtctttgcgaagaaagcaaccgatgaaggctctccaccatgttctccacaaatgcccaccttcaagttaggcctagctttggggcccctcttctgtaacaagtttaaccaagtcgcctactcctctcttggtcgaaacctcgaaggggtcatgc

SEQ ID NO: 16510 - DNA, 549 bp, Zea mays
  unsure at all n locations
  Clone ID: LIB3150-075-P2-N2-A3.F2
cctcgcctgcgatctccgtagcctccgtcgcgtcgagcatcgatcatgtcggcctactgcgngaaagtacaaggatgagctcatcaagaatgctgcctacattggcacccctggcaagggtatccttgctgctgatgagtccactggcaccattggcaagcgcctttccagcatcaatgtcgagaacgttgaggagaaccgccgtgccctccgtgagctcctattctgctgccctggtgctctccagtacatcagcggtgtgatcctcttcgaggagaccctgtaccagaagaccaaggatggcaagccttttgttgatgtcctcaaggagggaggcgtcctccctggcatcaaggttgacaagggcaccattgaggttgttggcactgataaggagaccaccacccaaggccatgacgaccttggcaagcgctgcgccaagtactacgagngccggtgcccgctttgccaagtggcgccgctgttctcaagattggccccaatgagccatcacagcttgccatcgacctgaacgctcagggtctggct

SEQ ID NO: 16511 - DNA, 498 bp, Zea mays
  Clone ID: LIB3150-075-P2-N2-A3.R2
ggctccaactcagcatatatgaatttttgccgactccaactcagcatatagaattgtttttgccgatacatagccagcattacagcatagttgatagaacaaaaaaagggggctgctcgattctccatcggcaggaccaacttacacgaaatttaacagcaaagagactaattaacatacaaatataaagataaccatcatcccacataggaagcatgttttttggatgtccgaaaataagctctaacgagcaaaccacactccgcaacctaactcgtaggcaggagttccaaaacgggcacgcaaagagaagcaactcagtacttgtagtccttgacgtggaggctctcggtgtcggcggcagcatcacccttgtaggtgccgagggtagcctcaaagttggccttgcacctggcgaggaaggcagctctagccttctccaagttctccaccttgccagcccaggccttggagggtgctcgcctggagggcacggcc

SEQ ID NO: 16512 - DNA, 189 bp, Zea mays
  Clone ID: LIB3150-075-P2-N2-H10.F1
tacagccctccgcctcgtgaaggcaaagcacgcgcaaaccaccacagcgtcgtcctcgttcctctccagtccaagcgagcgaagagcacccctcggagatctctccctccccgcgccgccagtgggcggtgtgagctcggtagtcggcgcggtccggcagttcgcgcaaggacaggatccagcctcggt

SEQ ID NO: 16513 - DNA, 482 bp, Zea mays
  Clone ID: LIB3150-075-P2-N2-H10.F2
tacagccctccgcctcgtgaaggcaaagcacgcgcaaagccaccacagcgtcgtcctcttcgtctccagtccaagcaagcgaagagcacccctcgagatctctccctccccgcgccgacatggacgcagttgactcggtagtcgacccgctccgggagttcgccaaggacagcatccgccttgtcaagcgctgccacaagccggaccgcaaggagttcaccaaggtcgccgcgcggactgcgatcggcttcgtcgtcatgggattcgtcggcttactttgtcaagctcatcttcatccctatcaacaacatcatcgtcggctccggctgatccgttcacctcatgctagtggctgccggagtggacaatggcgtcactaccttgaaggcagcaccgttttcagctgtgatttccggaaagcaatgtcctttgagacttgtgttggtaaagggcaactcccttatcttttcctctgttgaggt

SEQ ID NO: 16514 - DNA, 316 bp, Zea mays
  Clone ID: LIB3150-075-P2-N2-H10.R2
gagtgcttattgcaaaactctcgaaatagaccgaccgacaagggtttacctttaatttccactacgattcacccgcaataggtttttgaccatcagatacaaaaaatttcttcttctacccccttcccgggaagaaacaaaacattctttgcatgcttttttacctcctcatgcctgcaataggatatagtttggcgagtaactggggcgcagaacgtggcttcctccaaggtaaccactccgttgctcactccggcatccctggcgtggggggaacgggtcttgcaaagccgacgatcaaggtgatgccaggctt

SEQ ID NO: 16515 - DNA, 478 bp, Zea mays
  unsure at all n locations
  Clone ID: LIB3150-076-P1-N1-A8.F1
agaacgagttcatgttgcttgcaggaaataattacattggaaaaacagaccaagctacttgaggaagaagagaaagaaaaacgtgaagaagaagagcgcagggataggaggagaacaaaagaaagagaaaagaagaatagaagaaaagagaggctgaaaggaaaagacaaagataaagaaaaaatattggttcggtcaaaaaaaccaggtctttcaacattttctccgagcagccaagcagcaccaagtagtaatgagtctcaggatgttctagacttgagatattcagatagcgagaggaagacaatgttgtggtcagggaacactatcctgattcttcagctgatcaatcttcaagcaaggatactgatgaacgaagcaatgagcatgaatgcagtgcacagcagnaatttgttccctcagattgtgatggctcattcttatgtgatgagtctaattcatcaagaaacttgagatt

SEQ ID NO: 16516 - DNA, 543 bp, Zea mays
  unsure at all n locations
  Clone ID: LIB3150-076-P1-N1-A8.F2
agaacgagttcatgttgcttgcaaggaaataattacattgngaaaaacagaccaagctacttgaggaagaagagaaagaaaaacgtgaagaagaagagcgcagggataggaggagaacaaaagaaagagaaaagaagaatagaagaaaagagaggctgaaaggaaaagacaaagataaagaaaaaatattggttcggtcaaaaaaaccaggtctttcaacattttctccgagcagccaagcagcaccaagtagtaatgagtctcaggatgttctagacttgagatattcagatagcgaagaggaagacaatgttgtggtcagggaacactatcctgattcttcagctgatcaatcttcaagcaaggatactgatgaacgaagcaatgagcatgaatgcagtgcaacagcagaatttgttccctcagattgtgatggctcattcttatgtgatgagtctaattcatcaagaaacttgagatttagatgggacttcccagaaaaagatgtcagttattggtatgaagattggtcgtgtgattctg

SEQ ID NO: 16517 - DNA, 479 bp, Zea mays
  Clone ID: LIB3150-076-P1-N1-A8.R1
agggtaaaaagtgacactagactcgtgtcaaaactgcagaatctataccactcactgtcttttcagttttccatacacacaaaaaaacagggaggggaagcacaacaaatcaaaattaaaaaagaaataaatattcgagggcaacacagtaaaaacctcgacctactttattctgttttactagaatacaaatcgttcaccatgtatgtatattgaatagctgctcacttttcttcgcctctagttgagctgaaacatcactccgttacacccagagaaaaggttgtactccttgacattggtctcctccctggagcacagctgggctcgagttatctgagctggtggcagtgccattgacggcatcgctccactttgctcttctttggatgttgccagggtgggaggggcaataggcaggttgaactggaacaaggagaagggtgtgctgtctgtgtcatcacctttctgtttgaagg

SEQ ID NO: 16518 - DNA, 514 bp, Zea mays
  Clone ID: LIB3150-076-P1-N1-A8.R2
gggtaaaaagtgacactagactcgtgtcaaaactgcagaatctataccactcactgtcttttcagttttccatacacacaaaaaaacagggaggggaagcacaacaaatcaaaattaaaaaagaaataaatattcgagggcaacacagtaaaaacctcgacctactttattctgttttactagaatacaaatcgttcaccatgtatgtatattgaatagctgctcacttttcttcgcctctagttgagctgaaacatcactccgttacacccagagaaaaggttgtactccttgacattggtctcctccctggagcacagctgggctcgagttatctgagctggtggcagtgccattgacggcatcgctccactttgctcttctttggatgttgccagggtgggaggggcaataggcaggttgaactggaacaaggagaagggtgtgctgtctgtgtcatcacctttctgtttgaagggggttgtcttctgctgaacagccgttctcagggacc

SEQ ID NO: 16519 - DNA, 534 bp, Zea mays
  Clone ID: LIB3150-077-P1-N1-G4.F1
tacagccctccgcctcgtgaaggcaaagcacgcgcaaaccaccacagcgtcgtcctcttcgtctccagtccaagcaagcgagagcacccctcgagatctctccctccccgcgccgccatggacgcattgactcggtagtcgacccgctccgggagttcgccaaggacagcatccgcctcgtcaagcgctgccacaagccggaccgcaaggagttcaccaaggtcgccgcgggactgcgatcggcttcgtcgtcatgggattcgtcggcttctttgtcaagctcatcttcatccctatcaacaacatcatcgtcggctccggctgatccgttcacctcaggctagtggctgccggagtggacaatggcgtcactaccttggaggcagcaccgttttcagctctgatttccgcaaagcaattcctttaagacttgtgttgttaaagggcaactcccttatcttttcctctcttgaggtcgtgtggtagatctggaactcttttgtacctggtgccgaatagtcttttgtggatcag

SEQ ID NO: 16520 - DNA, 536 bp, Zea mays
  Clone ID: LIB3150-077-P1-N1-G4.F2
tacagccctccgcctcgtgaaggcaaagcacgcgcaaagccaccacagcgtcgtcctcttcgtctccagtccaagcaagcgaagagcacccctcgagatctctccctccccgcgccgccatggacgcagttgactcggtagtcgacccgctccgggagttcgccaaggacagcatccgcctcgtcaagcgctgccacaagccggaccgcaaggagttcaccaaggtcgccgcgcggactgcgatcggcttcgtcgtcatgggattcgtcggcttctttgtcaagctcatcttcatccctatcaacaacatcatcgtcggctccggctgatccgttcacctcaggctagtggctgccggagtggacaatggcgtcactaccttggaggcagcaccgttttcagctctgatttccgcaaagcaattcctttaggacttgtgttgttaaagggcaactcccttatcttttcctctcttgaggtcgtgtggtagatctggaactcttttgtacctggtgccgaatagtcttttgtggatc

SEQ ID NO: 16521 - DNA, 503 bp, Zea mays
  Clone ID: LIB3150-077-P1-N1-G4.R1
aacgcacaaagcaatccccaagacaacggtaaccatttaattttgtcacccgctgatccacaaaagactattcggcaccaggtacaaaagagttccagatctaccacacgacctcaagagaggaaaagataagggagttgccctttaacaacacaagtcctaaaggaattgctttgcggaaatcagagctgaaaacggtgctgcctccaaggtagtgacgccattgtccactccggcagccactagcctgaggtgaacggatcagccggagccgacgatgatgttgttgatagggatgaagatgagcttgacaaagaagccgacgaatcccatgacgacgaaccgatcgcagtccgcgcggcgacctttggtgaactccttgcggtccggcttgtggcagcgcttgacgaggcggatgctgtccttggcgaactcccggagcgggtcgactaccgagtcaactgcgtccatggcggcgcggggagggagagatctcgaggggt

SEQ ID NO: 16522 - DNA, 515 bp, Zea mays
  Clone ID: LIB3150-077-P1-N1-G4.R2
aacgcacaaagcaatccccaagacaacggtaaccatttaattttgtcacccgctgatccacaaaagactattcggcaccaggtacaaaagagttccagatctaccacacgacctcaagagaggaaaagataagggagttgccctttaacaacacaagtcctaaaggaattgctttgcggaaatcaaagctgaaaacggggctgcctccaaggtagtgacgccattgtccactccggcagccactagcctgaggggaacggatcagccggagccgacgatgatgttgttgatagggatgaaaatgagcttgacaaaaaagccgacgaatcccatgacgacgaagccgatcgcagtccgcgcggggaccttggtgaactccttgcggtccggcttgtggcagcgcttgacgaggcggatgctgtccttggcgaactcccggagcgggtcgactaccgagtcaactgcgtccatggcggcgcggggagggaagagatctcgaggggtgctcttcgctt

SEQ ID NO: 16523 - DNA, 314 bp, Zea mays
  Clone ID: LIB3150-079-P2-N2-A11.F1
ctcggccgccgccgccgtgcccagcgctcgagctcctcgcctgccgcgagctcgctcgcaacgccaccactgaagttcaacatcgcgaacccgtctaccgggtgccagaagaagctgggaatcgatgacgaccagaaactacgtgcgctttcatgaccgaagatctcccaggaggtcagtggtgatgctctgggtgaggagtttaggggttatgtcttcaagatgatcggtggatgtgacaaacaaggcttcccaatgaagcaaggagttctggctctctcgtcgtgtcccgccttctgctccacacaggcact

SEQ ID NO: 16524 - DNA, 503 bp, Zea mays
  Clone ID: LIB3150-079-P2-N2-A11.F2
ctcgcgccgccgccgccgtgcccagcgctcgagctcctcgcctgccgcgagctcgcgccgcatcgccaccatgaagttcaacatcgcgaacccgtctaccgggtgccagaagaagctggaaatcgatgacgaccagaaactacgtgccttttatgaccgaaggatctcccaagaggtcagtggtgatgctctgggtgaggagtttaagggttatgtcttcaagatcatgggtggatgggacaaacaaggcttcccaatgaagcaaggagttctgacttctgggcgtgtccgccttctgctccacagaggcactccctgcttacggggctatggcaggcgtaatggtgagcgcaagaggaactctggccgggggtgtcttgggagccaagacctatctgggatcaacttgggaatcgttaaaaagggtgagaacgatctgcctgggttaactgacactgtgaagccaatgatgaggggtcccaaaagggcctccaaaatcaggg

SEQ ID NO: 16525 - DNA, 361 bp, Zea mays
  Clone ID: LIB3150-079-P2-N2-A11.R2
gtccaaactataaaaacgtgtcaaacctgtggctctcaaaaagtgcgaagaagctcgtacaatgtgcatacaaaattgcagcagttactcataagtctaaataccgaggagccgactgatgcctgacacgcgacgcagcctaaaggacttataagcggtagcaaaataggccttgaaaacatctcacagcactgagcattcttaggcccaggtggcggaataagccttgtggacggcagaaagcttatacctcctcttggccaccatctgactgtggcggggcctctgttctttaagactctggacaggaagcttgtggtactcagcactctaaaactccttgttagcgaacctattgttg

SEQ ID NO: 16526 - DNA, 205 bp, Zea mays
  unsure at all n locations
  Clone ID: LIB3150-081-P2-N2-D9.F1
cannacgatccatttcgatcccatttgaaatcaacccatcctcgtttcctccgtctagcagcctctcaccctcatggccaagatcaagatcgggatcaatgggttcggcaggatcggaaggctggtggcagggtggcctgcagagcgacgacgtcagctcgtcgcgtgaacgacccttcatcagcacgattacatgacctacatg

SEQ ID NO: 16527 - DNA, 540 bp, Zea mays
  unsure at all n locations
  Clone ID: LIB3150-081-P2-N2-D9.F2
cgcgaactccatttcgatcccatttgaaatcaacccatcctcgtttcctccgtctagcagcctctcaccctcatggccaagatcaagatcgggatcaatgggttcggcaggatcggaaggctggtggccagggtggccctgcagagcgacgacgtcgagctcgtcgccgtgaacgaccccttcatcagcaccgattacatgacctacatgttcaagtatgacactgtgcacggacagtggaagcaccatgaggtcaaggtgaaggactccaagacccttctctttggtgagaaggaggttgctgtgtttggctgcaggaaccctgaggagatcccatggggttccgttggcgctgaatatgttgttgagtctactggtgttttcactgaccaagagaaggctgcagctcacttgaagggtggtgccaagaaggttgtcatttctgctcctagcaaggatgccccncatgttcgttgtttggtgtcaacgagaaggagtacaagtctgacatcaacattgtctctaatgctagctgcacaa

SEQ ID NO: 16528 - DNA, 526 bp, Zea mays
  Clone ID: LIB3150-082-P1-N1-A5.F1
ctcggccgccgccgccgtgcccagcgctcgagctcctcgcctgccgcgactcggccgcaacgcaccatgaagttcaacatcgcgaacccgtctaccgggtgccagaagaagctggaaatcgatgacgaccagaaactacgtgccttttatgaccgaagatctcccaggaggtcagtggtgatgctctgggtgaggagtttaagggttatgtcttcaagatcatgggtggatgtgacaaacaaggcttcccaatgaagcaaggagttctgacttctggtcgtgtccgccttctgctccacagaggcactcccatgcttccgcggttatggcaggcgtaatggtgagcgcagaggaagtctgtccgtggttgtattgtgagccaagacctatctgttatcaacttggtaattgttaagaagggtgagaacgatctgcctggtttaactgacactgagaagccaaggatgaggggtccaaaagggcctccaagatcaggaagctgttcaatcttgcaaaggatgacgac

SEQ ID NO: 16529 - DNA, 546 bp, Zea mays
  Clone ID: LIB3150-082-P1-N1-A5.F2
ctcgcgccgccgccgccgtgcccagcgctcgagctcctcgcctgccgcgagctcgcgccgcaacgccaccatgaagttcaacatcgcgaacccgtctaccgggtgccagaagaagctggaaatcgatgacgaccagaaactacgtgccttttatgaccgaaggatctcccaggaggtcagtggtgatgctctgggtgaggagtttaagggttatgtcttcaagatcatgggtggatgtgacaaacaaggcttcccaatgaagcaaggagttctgacttctggtcgtgtccgccttctgctccacagaggcactccctgcttccgcggttatggcaggcgtaatggtgagcgcaggaggaagtctgtccgtggttgtattgtgagccaagacctatctgttatcaacttggtaattgttaagaagggtgagaacgatctgcctggtttaactgacactgagaagccaaggatgaggggtcccaaaagggcctccaagatcaggaagctgttcaatcttgcaaaggatgacgacgtgcgcaagtacgt

SEQ ID NO: 16530 - DNA, 514 bp, Zea mays
  Clone ID: LIB3150-082-P1-N1-A5.R1
cacagaataaaacaacatatcaaacctctggtactcaaaaaatcccgacaagccagtaccatgtccatacaaaattgcaacaattactcataagtctaagtagggagggtcgactgatgcaacacagccagggcagcataaggtacttataagctgtaacaaaataggccttgaaaacatctcaaagcactgatcattcttaggcagaggtggcagcagaagccttggcggcggcagaaagcttagacctcctcttggccaagctctcactgcggcggtccctctgttctttcagcctctgggcaagaagcttctggtactcagcagcctcagacttcttcttagcgatcctcttcttcttgtcagcaattctagcacgcttcctctggagggtcaagggggtcacaagccgctggatcttaggtgccttgctcaccttcttgccattcttggtagtgaatgtcctgcggtacgtgttcacgcattgcgcacgtcgtcatcctttgcaagattg

SEQ ID NO: 16531 - DNA, 532 bp, Zea mays
  Clone ID: LIB3150-082-P1-N1-A5.R2
cacagaataaaacaacatatcaaacctctggtactcaaaaaatcccgacaagccagtaccatgtccatacaaaattgcaacaattactcataagtctaagtagggagggtcgactgatgcaacacagccagggcagcataaggtacttataagctgtaacaaaataggccttgaaaacatctcaaagcactgatcattcttaggcagaggtggcagcagaagccttggcggcggcagaaagcttaaacctcctcttggccaagctctcactgcggcggtccctctgttctttcagcctctgggcaagaagcttctggtactcagcagcctcagacttcttcttagcgatcctcttcttcttgtcagcaattctagcacgcttcctctggagggtcaagggggtcacaagccgctggatcttaggtgccttgctcaccttcttgccattcttggtagtgaatgtcctgcggtacgtgttcacgtacttgcgcacgtcgtcatcctttgcaagattgaacagcttcctgatctt

SEQ ID NO: 16532 - DNA, 248 bp, Zea mays
  Clone ID: LIB3150-084-P2-N2-E12.F1
gcaataccattgtaggttcttgtaaccttggtatggtaagagccgcttgacaggaagtcgagcgttcgggcgcaagatgcgttgtctggcatgctgttccttgaccatttgtgctgctagtatgtactgttataagctgccctagaagttgcagcaaacctttttatgaacctttgtatttccattacctgctttggatcaactatatctgtcatcctatatattactaaatttttacgtgtttttct

SEQ ID NO: 16533 - DNA, 248 bp, Zea mays; identical to SEQ ID NO: 16532
  Clone ID: LIB3150-084-P2-N2-E12.F2

SEQ ID NO: 16534 - DNA, 263 bp, Zea mays
  Clone ID: LIB3150-084-P2-N2-E12.R1
tattttttttttttttagaaaaacacgtaaaaatttagtaatatataggatgacagatatagttgatccaaagcaggtaatggaaatacaaaggttcataaaaaggtttgctgcaacttctagggcagcttataacagtacatactagcagcacaaatggtcaaggaacagcatgccagacaacgcatcttggcccgaacgctcgacttcctgtcaagcggctcttaccataccaaggttacaagaacctacaatggtattgc

SEQ ID NO: 16535 - DNA, 96 bp, Zea mays
  Clone ID: LIB3150-007-B6-F5B
tatactgatgattcgtattgatttgatgtaatgaatttttcccatatgaaagcttcctttttttttttatgttaattttttaaaattttaattttt

SEQ ID NO: 16536 - DNA, 183 bp, Zea mays
  Clone ID: LIB3151-001-P1-K1-A1
cctaaacccagcaccagcgcccccaatcctttatacttccactcgagtagggttctgccggccggttccttgtcgtcgcaatggagttctggggtgaagaagtgaagccaggagccacggtttcttgcaaagttggtgatggtttgtttatccacctttcacaggctgccctaggggaaccaa

SEQ ID NO: 16537 - DNA, 155 bp, Zea mays
  Clone ID: LIB3151-001-P1-K1-A10
tcgtatataaaaataatttacaaaaattttaaaaaaacataaaaaacacaaataagggggtggtttataatatatatcatctgactttttttaaaatcttttattttaaatctttcatactgttgtttttgttgttatttaccaccttcatttta

SEQ ID NO: 16538 - DNA, 305 bp, Zea mays
  Clone ID: LIB3151-001-P1-K1-A11
tcgtcagaaacacaccaagcgaagcacattagcaacaacctaacaacaatggctaccaagagattaggccttcttgcgcttcttgcgctttttgcgagcgcaacaaatgcgttcattattccacaatgctcacttgctacaagtttcattattacacagggacttccaccagtttctttaatgggctttgaacacccagttgtgcaagcctataagcttcaacaagcaattgcggcgagccgtttaaaacaaccaattttccagttgcaacaacaaaccttgggacatttaacaaatcaaaccat

SEQ ID NO: 16539 - DNA, 293 bp, Zea mays
  Clone ID: LIB3151-001-P1-K1-A12
caacagcaacaacagttcctaccagcactgagccacctagccatggtgaaccctgccgcctacgtgcaagagcagctgcttgcatccaacccacttgctctggcgaacgtagttgcaaaccagcaacaacaacagctacaacagtttctgccaacgctcagtcaactagccatggtgaaccctgccgcctacgtacaacaacaacaactgctttcatctagcccgctcgctgtgggcaatgcacctacatacctgcaacaacaattgttgcaacagattgtaccagctctgac

SEQ ID NO: 16540 - DNA, 447 bp, Zea mays
  Clone ID: LIB3151-001-P1-K1-A2
ggtcagtcgcctacgaaattcaatagcacagcgagagccaaggaagaagaagaagcaagcggagcgccatggcggcgtccaacggcgagggccacggccggttcgacgtgatcgtggtgggcgcgggcatcatgggcagctgcgccgcctacgcggcgtcctctcgtggcgcgcgcgtgctgctcctggagcggttcgacctgctccaccaccggggctcctcgcacggcgagtcgcgcaccatccgcgccacctacccgcaggcgcactacccgcccatggtgcgcctgtcccggcgcctctgggacgaggcccaggccgacgccgggtacaccgtgctcacgcccaccccgcaccttgacctgggcccgcgggacgactcggcgctcgtcgcctccatgaggaacggcggtgccaccgaagtcgtcgccggggatgagtcgtcgt

SEQ ID NO: 16541 - DNA, 438 bp, Zea mays
  Clone ID: LIB3151-001-P1-K1-A8
tcgacctcgagcgcacaatattgtaccaacaatggcagccaaaatatagggcctccttatgctccgtgggctttctgcaagtgctgctactgcgaccattttcccaaaatgctcgcaagctcctatagcttcccttcttcccccgtacctctcaccagcggtgtcttcggtatgtgaaaacccaattcttcaaccttacaggatccaacaggcaatcacagctggcatcttacctttatcacccttgttcctccaacaatcatcagtcctattacatcagttacctttggtgcatttattggcacaaaacatcatgggacaacaactacaacaacttgtgctagtcaaccttgctgcctactcttaacaacagcatgttctttcaatcaaccaactagcttcattgaactctgcttctaattgctacaacaacacttc

SEQ ID NO: 16542 - DNA, 145 bp, Zea mays
  Clone ID: LIB3151-001-P1-K1-B1
gaccaactactaactatataaagaacagtactggtccaagaatggcatccaaaacatgaggcctgatgatgctccttggtccttctgcatgccctggttccgctagcattctcgcctgatgcatcacacgactcacatagttaac

SEQ ID NO: 16543 - DNA, 279 bp, Zea mays
  Clone ID: LIB3151-001-P1-K1-B10
atcagcaaagcggcagtgcgtagagtggatcgtcgaacagaacagcatgaagatggtgcatcggctcgtcgtgtgcctggctctgtcagctgccagcgcctttgcaatgcagatgccctgcccctgcgcggggctgcagggcttgtacggcgctggcgccggcctgacgacgatgatgggcgccggcgggctgtacccctacgcggagtacctgaggcagccgcagtgcagtccgctggcggcggcgccctactacacccggttgtgggcagacgagcg

SEQ ID NO: 16544 - DNA, 420 bp, Zea mays
  unsure at all n locations
  Clone ID: LIB3151-001-P1-K1-B11
cagaaacacaccaagcgaagcacattagcaacaacctaacaacaatggctaccaagatattatccctccttgcgcttcttgcgctttttgcgagcgcaacaaatgcgttcattattccacaatgctcacttgctccaagttccattattacacagttcctcccaccagttacttcaatgggcttcgaacacccagctgtgcaagcctataggctacaacaagcaattgcggcgagcgtcttacaacaaccaatttcccagttgcaacaacaatccttggcacatctaacaatacaaaccatcgcaacgcaacaagaacaacaattcctaccagcactgagccacctagccatggtgaaccctgccgcctacttgcaacagcagttgcttgcatcaaacccacttgctctggcanacgtag

SEQ ID NO: 16545 - DNA, 359 bp, Zea mays
  Clone ID: LIB3151-001-P1-K1-B12
ccaacaagcaacatagaaagtggaatccagtagcaacaatagagcaacaatggagaccaagatgttttccctccttatgctccttgctctttctacatgtgttgctaacgcgacaattttccctcaatgctcacaagctcctatagcttccctttttcccccataccttccatcaattatagcttcagtatgtgaaaacccagctcttcaaccatataggcttcaacaagcaatcgcagcaagcaacatacctttatcgcccttgttgtgtcaacaatcgccagccctatctttggtgcagtcattggtacaaaccatcagggcacaacagctgcagcaactcgtgctacctgtgatca

SEQ ID NO: 16546 - DNA, 453 bp, Zea mays
  Clone ID: LIB3151-001-P1-K1-B2
attgagaccaactagcaacatagaaagcacaatagtgtaccaacaatggcagccaaaatattttgcctccttatgctccttggtctttctgcaagtgctgctacggcgaccattttcccgaaatgctcgcaagctcctatagcttcccttcttcccccgtacctctcaccagcggtgtcttcggtatgtgaaaacccaattcttcaaccctacaggatccaacaggcaatcacagctggcatcttacctttatcacccttgttcctccaacaatcatcagccctattacatcagttacctttggtgcatttattggcacaaaacatcaaggcacaacaactacaacaacttgtgctagcaaaccttgctgcctactctcagcaacagcaagttcttccattcaaccaactagctgcattgaactctgcttcttatttgcaacaacaacaacta

SEQ ID NO: 16547 - DNA, 430 bp, Zea mays
  Clone ID: LIB3151-001-P1-K1-B3
gtcgagcgcaacatccccgaggacgaccctcgcaaccccgcggtgatcgccgacaacgtgggggacaacgtcggcgacatcgccgggatggggtcggacctgttcgggtcgtacgcggagtcgtcctgcgcggcgctcttcgtggcttccatctcctccttcggggcggagcacaacctcacggcgatgatgtacccgctgctcatcagcgccgtgggcctgctcgtgtgcgcgatcaccactgtcgtcgccaccgacgtcaccgaggtgaagggttccgacgaggttgggccggcgctcaagcggcagatcctcatcttcaccgtgcttatgaccgccggcatcgacgccgttaccttcctcggactgccagccagctttaccctcttcgacttcggcaacgacaagcacgtcaagaactggcacctat

SEQ ID NO: 16548 - DNA, 358 bp, Zea mays
  Clone ID: LIB3151-001-P1-K1-B7
agaccattagctttatctacttcagagcgcattagaaccccatcgacaccatgagggtgttgggggttgccctcgctgtgctggctctcgctgcgagcgccacctccacgcatacaagcggcggctgcggctgccagccaccgccgccggtttatctaccgccgccggtgcatctgccacctccggttcacctgccaccttcggtgcatcttccaccgccggtccacctgccgtcgccggttcacctgtcaccgccggtccatgtgccgtcgtccgttcatctgacggcgtcaccatgccactaccctactttaacggcccgggcttagtcttatcctcagtcacacctatgtccgtg

SEQ ID NO: 16549 - DNA, 438 bp, Zea mays
  Clone ID: LIB3151-001-P1-K1-B9
caacaagcaacatagaaagtggaatccagtagcaacaatagagcaacaatggcgaccaagatattttccctccttatgctccttgctctttctgcatgtgttgctaacgcgacaattttccctcaatgctcacaagctcctatagcttcccttcttcccccataccttccatcaatgatagcttcagtatgtgaaaacccagctcttcaaccctataggctccaacaagcaatcgcagcaagcaacatacctttatcacccttgtttcaacaatcgccagccctatctttggtgcagtcattggtacaaaccatcagggcacagcagctgcagcaactcgtgctacctgtgatcaaccaagtagctctggcaaacctttctccctactctcagcaacaacaatttcttccattcaaccaactgtctacattgaaccgt

SEQ ID NO: 16550 - DNA, 441 bp, Zea mays
  Clone ID: LIB3151-001-P1-K1-C1
cgcagctggcatcttacctttatcacccttgttcctccaacaatcatcagccctattacagcagttacctttggtgcatttattggcacaaaacatcagggcacaacaactacaacaacttgtgctagcaaaccttgctgcctactctcagcaacaacagtttcttccattcaaccaactagctgcattgaactctgcttcttatttgcaacaacaacaactaccattcagccagctatctgctgcctacccccagcaatttcttccattcaaccaactgacagctttgaactctcctgcttatttacagcagcaacaactactaccattcagccagctagctggtgtgagccctgctaccttcttgacacaaccacaattgttgccgttctaccagcacgctgcgcctaacgctggcaccctcttacaactgcaacaatt

SEQ ID NO: 16551 - DNA, 422 bp, Zea mays
  Clone ID: LIB3151-001-P1-K1-C10
ctccattcttccctcaaaatcacagatctctctcggccccgtgcccagcgctccgaaaccctagcgccgccgcgggtgccaggccgcgagcgtcgccatgggcatcgtgtttacgcggctcttctcgtcggtcttcggcaaccgcgaggctcgcatcctcgtcctcggcctggacaatgctggcaagaccaccatactctatagactgcaaatgggagaggtcgtctccacgatcccgacaattggattcaacgtcgagacggtgcagtacaacaacatcaagttccaagtatgggatcttggtggtcaaacaagcatcaggccatactggcggtgctactttccaaacactcaggctatcatatatgttgttgattcaagcgatacagataggcttgtaacagcaaaagaagaattccatg

SEQ ID NO: 16552 - DNA, 434 bp, Zea mays
  Clone ID: LIB3151-001-P1-K1-C11
caacaagcaacatagaaagtggaattcaggagcaacaatagagcaacaatggcggccaagatagttttccatccttatgctccttgctctttctgcatgtgttgctaacgcgaccatttttcctcaatactcacaagctcctatagctgcccttcttcccccataccttccatcaatgaccgcttcagtatgtgaaaacccagcctcttaaccctacaggctccaacaagcaatcgcaacatgcaacttacctttatcacccctgttctttcaacaatcgccagccctatctttggtgcagtcatttggacaaaccatcaaggcacaacagctgcagcaactcgtgctaccagtgatcagccaagtagctctggcaaacctttcttcctactctcagcaacaacaatttctttcattcaaccaactgtctacac

SEQ ID NO: 16553 - DNA, 226 bp, Zea mays
  Clone ID: LIB3151-001-P1-K1-C12
tagcaacatacaaagcacaatagtgtaccaacaatggcagccaaaatattttgcctccttatgctccttgttctttttgtacgtgctgctactgcaaccatttttccgaaatgcttgcaagctcatatagcatcccttcttatagcataccttttaccagcattgccttcattattgaacgattcaatttttgaacacttaacgcttcaacactacatgatacaac

SEQ ID NO: 16554 - DNA, 458 bp, Zea mays
  Clone ID: LIB3151-001-P1-K1-C2
agaccaacaagcaacatagaaagtggaatccagtagcaacaatagagcaacaatggcgaccaagatattttccctccttatgctccttgctctttctgcatgtgttgctaacgcgacaattttccctcaatgctcacaagctcctatagcttcccttcttcccccataccttccatcaatgatagcttcagtatgtgaaaacccagctcttcaaccctataggctccaacaagcaatcgcagcaagcaacatacctttatcacccttgtttcaacaatcgccagccctatctttggtgcagtcattggtacaaaccatcaaggcacagcagctgcagcaactcgtgctacctgtgatcaaccaagtagctctggcaaacctttctccctactctcagcaacaacaatttcttccattcaaccaactgtctacattgaaccgtgctgcttatttgcagc

SEQ ID NO: 16555 - DNA, 224 bp, Zea mays
  Clone ID: LIB3151-001-P1-K1-C3
gggccttcagaccatataactttgtgtactccagagcgcagaagaacccaaccgacaccatgagggtgttgctcgtcggcctcgctctgctggctctcgatgcgagcgccaccttcacgcatacaagcggtggctgcgggtgccagccaccgccgccggttcatctaccgtcgccggagcatttgccacctccggttcacctgccacctcttgagcattatcca

SEQ ID NO: 16556 - DNA, 431 bp, Zea mays
  unsure at all n locations
  Clone ID: LIB3151-001-P1-K1-C9
gggtcttcagaccattagctttatctactccagagcgcagaagaacccgatcgacaccatgagggtgttgctcgttgccctcgctctcctggctctcgctgcgagcgccacctccacgcatacaagcggcggctgcggctgccagccaccgccgccggttcatctaccgccgccggtgcatctgccacctccggttcacctgccacctccggtgcatctnccaccgccggtccacctgccgccgccggtccacctgccaccgncggtccatgtgccgccgccggttcatctgccgccgtcaccatgccactaccctactcaaccgccccggcctcagcctcatcctcagccacacccatgcccgtgccaacagccgcatccaagcccgtgccagctgcagggaacctgcggcgttggcagcaccccgatcc

SEQ ID NO: 16557 - DNA, 356 bp, Zea mays
  Clone ID: LIB3151-001-P1-K1-D1
caacaagcaacatagaaagtggaatccagtagcaacaatagagcaacaatggagaccaagatattttccctccttatgctccttgctctttctacatgtgttgctaacgcgacaattttccctcaatgctcacaagctcctatagcttccctttttcccccataccttccatcaattatagcttcagtatgtgaaaacccagctcttcaaccatataggcttcaacaagcaatcgcagcaagcaacatacctttatcgcccttgttgtgtcaacaatcgccagccctatctttggtgcagtcattggtacaaaccatcagggcacaacagctgcagcaactcgtgctacctgtgat

SEQ ID NO: 16558 - DNA, 353 bp, Zea mays
  Clone ID: LIB3151-001-P1-K1-D10
cgtcagcctagcaagtagctcatagactccagattggagaactcgacaccatgaaggtgctgagcgttgccctcgctctgctggcgctcgctgcgagcgccgactccagtacaagcggcagctgtggctggcagacaccaccgttttaatctaccgtcttcgcactatatgccgccttcggtctatctgacgccgcatgagcagccgtagccatggcactaccccactcaaccacgcgagttaagcccgcgccagcagatcggatcctgcagcgtctgcagcatctgacgaccgatactgggccagcgcgtcaagttcctgaggcaccagtgcagctcggcggcgacgcccta

SEQ ID NO: 16559 - DNA, 355 bp, Zea mays
  Clone ID: LIB3151-001-P1-K1-D12
agaccattagctttatctactccagagcgcagaagaacccgatcgacaccatgagggtgttggtcgttgccctcgctctcctggctctcgctgcgagcgccacctacacgcatacaagcggcggctgcggctgccagccaccgtcgccggttcatctaccgccgccggtgcatctgccaccttcggttcacctgccacctccggtgcatctcccaccgccggtccacctgccgtcgacggtccacctgacaccgacggtccatgtgccgtcagcggttcatctgccgacggcaccatgccactaccctactcaaccgacacggccttagccttatacccagtcacacccatgccc

SEQ ID NO: 16560 - DNA, 457 bp, Zea mays
  Clone ID: LIB3151-001-P1-K1-D2
cttcgctctcaccccacgccgcgtaccgctattaataccaccaccaccacctctgccagttcgccaccatcgtgctccgtacacgctccgctccggccatggccgccgccgcggcctccttttcggcccttccgttccttctacttttgctgctggtgccgtcgctcgacgccgcctccaatgtgacgtacgaccaccgctccctcatcatctccggccgccgccgcctcgtcatctccacctccatccactacccccgcagcgtccccgagatgtggcccaagctggtggctgaagccaaggacggcggcgccgactgcatcgagacctacgtcttctggaacggccatgagatcgccccaggccagtactacttcgaggaccggttttgacctgtgcggttcgtgaaggtcgttagagacgcttggctgctcttgatcctgcgcatcgggcccta

SEQ ID NO: 16561 - DNA, 222 bp, Zea mays
  Clone ID: LIB3151-001-P1-K1-D3
gggtcttcagaccattagctttatctactccagagcgcataagaacccgatcgacaccatgagggtgttgctcgctgcggtcgctctcctggctctcgctgcgagcgccaccttcacgcatacaagcggtggctgcggctgacagccaccgccggcggctcatctaccgccgccggtgcatctgccacctccggttcacctgccacctcaggtgcattttcc

SEQ ID NO: 16562 - DNA, 213 bp, Zea mays
  Clone ID: LIB3151-001-P1-K1-D7
gcgcttgagaagagaaacgcaacacagaacgtggaattcagtagcaacagtggagcaacaatggagaccaagatatttttcctccttatgctccttgctctttatacatgtcgttgctagacgcgagcaatttttccttaatgctcacaagctcctatagcttccctttttcccccatacctttcatcaattatagcttcagtatgtgaaaac

SEQ ID NO: 16563 - DNA, 340 bp, Zea mays
  Clone ID: LIB3151-001-P1-K1-D8
accagctccctgatgaccattgagagcgcagaacttttcttgtcggcaccacaagcgggctgctcgtcgcactcttcgcgaacgccttggtgccaccttctcctcccatcccaatcaactgagagcactcttttgcaggtctccgcacccgggcaagggaatgcttcagcgccatcagctgcttgcggagtatgatgccctgtttgatcgtgacacggagacgtatgcaccctttgaagacattcttcgtgctgctcaggaagcaattgtgctccccccatgggttgcacttgctatcaggccaaggcctggtgtatgggattacattcaggtgaatgta

SEQ ID NO: 16564 - DNA, 287 bp, Zea mays
  Clone ID: LIB3151-001-P1-K1-E1
atcagcaaagcggcagtgcgtagagaggatcgtcgaacagaacagcatgaagatggtcatcggtctcgtcgtgtgcctggctctgtcagctgccagcgcctctgcaatgcagatgccctgcccctgcgcggggctgcagggcttgtacggcgctggcgccggcctgacgacgatgatgggcgccggcgggctgtacccctacgcggagtacctgaggcagccgcagtgcagcccgctggcggcggcgccctactacgccgggtgtgggcagacgagcgccatgtacc

SEQ ID NO: 16565 - DNA, 205 bp, Zea mays
  Clone ID: LIB3151-001-P1-K1-E11
gctttatctactccagagcgcagaagaacccgatcgacaccatgagggtgttgctcgttgccgtcgctctcctggctctcgctgcgagcgccaccttcacgcatacaagcggcggctgcggctgccagccaccgccgccggttcatctaccgtcgccggtgcatctgccaccttcggttcacctgccaccttcggtgcatcttcc

SEQ ID NO: 16566 - DNA, 289 bp, Zea mays
  Clone ID: LIB3151-001-P1-K1-E12
tttcaggattcataaacagaccaagcgaagcgcactagcgacaacctaacaacaatggctacgaagatattaggccttcttgcgctgcttgcccttttagagagcgcaacaaatgcgttcattagttcacagagctcacttgcttctagcgccattattacacaggtcctcccaccagttacttcaatgggctttgaacatccagacgagcaagcctacaggctacaactagcgcttgcggcgagcgtcttacaacaaccaattgtccaattgcaacaacaatccttgg

SEQ ID NO: 16567 - DNA, 362 bp, Zea mays
  unsure at all n locations
  Clone ID: LIB3151-001-P1-K1-E2
ctgggtcttcagaccattagctttatctactccagagcgcagaagattccgatcgacaccatgagggtgttgctcgttgccctcgctctcctggctctcgctgcgagcgccacctccacgcatacaagcggcggctgcggctgccagccaccgccgccggttcatctaccgccgccggtgcatctgccacctccggttcacctgccacctccggtgcatctcccaccgccggtccacctgccgccgccggtccacctgccaccgtcggtccatgtgccgncgccggttcatctgccgtcgccaccatgccactaccctactcaaccgccccggcctcagcctcattcccaggcacacccatg

SEQ ID NO: 16568 - DNA, 115 bp, Zea mays
  Clone ID: LIB3151-001-P1-K1-E3
aaatctcctctatccatccctctctatctatatatgtaataatgcagtaagacgacacacattatcatgtgtggtatgaccaataatatatgcatcataataaagttttggtttt

SEQ ID NO: 16569 - DNA, 343 bp, Zea mays
  unsure at all n locations
  Clone ID: LIB3151-001-P1-K1-E7
cacgcgtacggttntagatcgcgagcggtcgctctatatgatttaatcttacatactcttgcatgcgacctggggggtattttatagtgggacctaaaaacaaatcattggtcgcctgctttcaatgccatcacattaaaatcattcattatttcccatcgttcacttcttccatgcaacattattacacacagttttcgatcaattactttaataaccatctaacacccaactttgcaatcctataggctacaacaagcaattgctgccagcgtgttacaacaaccaagtccctacttgcagcaacaattcttggcacatctatcagtacaaaccattgtaa

SEQ ID NO: 16570 - DNA, 232 bp, Zea mays
  unsure at all n locations
  Clone ID: LIB3151-001-P1-K1-E8
tctaccctactcatccccatgtatagggccttttttctctcggggggacccaaagaacaaacccacaaccccctctttcttcaatattaatttaaactttatttcaaactctaccccttctttttcaggttgttctacagcaacaccaataccatcattattaataggggntttttatataaaaaatacaatgcatatacaaaattctttccacttttttttaactttttta

SEQ ID NO: 16571 - DNA, 440 bp, Zea mays
  Clone ID: LIB3151-001-P1-K1-E9
ctagcaacatagaaagcacaatagtgtaccaacaatggcagccaaaatattttgcttccttatgctccttggtctttctgcaagtgctgctaccgcaaccattttcccacaatgctcacaagctcctatagcttcctttcttcccccatacctctcaccagcggtgtcttcagtatgtgaaaacccaattcttcaaccctacaggatccaacaggcaatcgcagcaggcatcttacctttatcacccttgttcctccaacaaccgtcagccctattacagcagttacctttggtgcatttgttggcacaaaacatcaaggcacaacaactacaacaacttgtgctaggaaaccttgctggcctactctcagcaacagcagtttcttccattcaaccaactggctgcattgaactctgctgcttatttgcaacaacaacta

SEQ ID NO: 16572 - DNA, 413 bp, Zea mays
  Clone ID: LIB3151-001-P1-K1-F10
gagaccaacaagcaacatagaaagtggaatccagtagcaacaatagagcaacaatggcgaccaagatattttccctccttatgctccttgctctttctgcatgtgttgctaacgcgacaattttccctcaatgctcacaagctcctatagcttaccttcttcccccataccttccatcaatgatagcttcagtatgtgaaaacccagctcttcaaccctataggctccaacaagcaatcgcagcaagcaacatacctttatcacccttgtttcaacaatcgccagccctatctttggtgcagtcattggtacaaaccatcagggcacagcagctgcaagaactcgtgctacctgtgatcaaccaaagtagctctgcaaacctttcttcctactctcagcaacaacaatttctt

SEQ ID NO: 16573 - DNA, 303 bp, Zea mays
  Clone ID: LIB3151-001-P1-K1-F11
cctcccaacaccacctcgcctgcgatctccgtagcctccgtcgcgtcgagcatcgatcatgtcggcctactgcggaaagtacaaggatgagctcatcaagaatgctgcctacattggcacccctggcaagggtatccttgctgctgatgagtccactggcaccattggcaagcgcctttccagcatcaatgtcgagaacgttgaggagaaccgccgtgcccttcggggagctcctattctgctgccctggtgctctccagtacatcagcggtgtgatcctcttcgaggagaccctgtaccaaa

SEQ ID NO: 16574 - DNA, 346 bp, Zea mays
  Clone ID: LIB3151-001-P1-K1-F12
caactagcaacatagaaagcacaatagtgtaccaacaatggcagccaaaatattttgcctgcgtatgctccttggtctttctgcaagtgctgctacggggaccattttcccgcaatgctcgcaagctcctatagcttcccttcttcccccgtacctctcaccagcggtgtcttcggtatgtgaaaacccaaattcttcaaccctacaggatccaacaggcaatcgcagctggcatcttacctttatcacccttgttccttcaacaatcatcagccctattacaacagttacctttggtgcatttattggcacaaaacaataaggcacaacaacttccacaacttgg

SEQ ID NO: 16575 - DNA, 345 bp, Zea mays
  Clone ID: LIB3151-001-P1-K1-F2
gggtcttcagaccattagctttatctactccagagcgcagaagaacccgatcgacaccatgagggtgttgctcgttgccctcgctctcctggctctcgctgcgagcgccacctccacgcatacaagcggcggctgcggctgccagccaccgccgccggttcatctaccgccgccggtgcatctgccaccttcggttcacctgccacctccggtgcattttccaccgccggtccacctgccgtcgtcggttcaccttgccaccgtctgtccatgtgccgtctgcggtttatttgtctgcctcaccatgccacttcccttattaaccgtcccggtcttagtctttat

SEQ ID NO: 16576 - DNA, 455 bp, Zea mays
  Clone ID: LIB3151-001-P1-K1-F7
cacggaccgggccagacctacgggtggacccaatactactctcacgggcgtatgccatgtccgatcaacaaccacatctcctattgggggagcatttctcagtgcagctacctttgccgagaatcgtaccacaccacctccatcagcatttgctcggaacatgtaattaagtcgtcacaccaatcctttattcttacgtacaggaacaacaatttatctcattcaaacaactagccgtggtgaaccttgctgcttactttcaagcacatccccttctaccattcaaccaacttgttaggagccctgctgccttgttactggagcaacagttgctggcatttcatgtacaagacgtggcaaacattgcttgttttttgtaacaacaacaattggtgccactttatccacaggattgtggaaacagttacgccttcttgcaacaacaacaggttgct

SEQ ID NO: 16577 - DNA, 362 bp, Zea mays
  Clone ID: LIB3151-001-P1-K1-F9
gaaacacaccaagcgaagcacattagcaacaacctaacaacaatggctaccaagatattatccgtccttgcgcttcttgcgctttttgcgagcgcaacaaatgcgttcattattccacaatgctcacttgctccaagttccattattacacagttcctcccaccagttacttcaatgggcttcgaacacccagctgtgcaagcctataggctacaacaaagcaattgcgggggagcgtcttacaacaaccaatttcccagttgcaacaacaatccttggcacatctaacaatacaaaccatcgcaacgcaacagcaacaacaattcctaccagcactgagccacctagccatggtgaaccct

SEQ ID NO: 16578 - DNA, 214 bp, Zea mays
  unsure at all n locations
  Clone ID: LIB3151-001-P1-K1-G10
ggaaggnccggaacgaccgaggcgacccacgcgtcccgacacaaacaagtactttactctactgcgcagcgcagaacaacccgctcgacaccgggagggcgctgctcgttgcccttgctctcctggctttcagatagcaacgccaactcataccatacaagcatggggttgcgatgcacagcaaccgcgtcatctactgtaaccggggcatgtg

SEQ ID NO: 16579 - DNA, 273 bp, Zea mays
  Clone ID: LIB3151-001-P1-K1-G11
gggcgaccacgcgtccggctttggatcgattgttttcgtaactcgtgagggactgagggtctcctattgacaggggttgtgggattctgttcgaagattttcgcacggtatcaatggcgaccgccgggaatgtgatcaagtgcaaagcttctgtggcatgcgaggccggcaagccaccgtcgatcgaggaggttgaggtagcgccttcttaagccatggaggtgcgcgtcaagatcctcttcacctcgctctgccacaccgacttttactttt

SEQ ID NO: 16580 - DNA, 335 bp, Zea mays
  Clone ID: LIB3151-001-P1-K1-G12
cattcaaccaactagcagcattgaactctgctgcttatttatagcagcaacaactactaccatgtcagccagctagctgatgtgagccctgctgccttcttgacacaacaacagttgttgccgttctacctgcacgctatgcctaacgctggcaccctcttacaactgcaacaattgctgccattcaaccaacttgctttgacaaactcaacagtgttctaccaacaacccatcattggtggtgccctcttttagattgcttatgagttaataggtcaataatgaagttttttggatgatgtttgtgggtccaaaaaaaaagaaggtcatttctt

SEQ ID NO: 16581 - DNA, 379 bp, Zea mays
  Clone ID: LIB3151-001-P1-K1-G9
cttgtttaccattcctccccaaaacacatcctgcgatcctcgaagcctccgccgagcatcgatcatgtcggcctactgcggcaagtacgcggatgagctcatcaagaatgctgcctacatcggcacccctggcaagggtatccttgctgctgatgagtcaactggcaccattggcaagcgcctttccagcatcaatgtcgagaacgtggaggagaaccggcgggctctccgtgagctcctgttctgctgccctggtgccctccagtacatcagcggtgtgatcctcttcgaggagaccctctaccagaagaccaaggatggcaaggcctttgtcgatgtcctcaaggagggaggcgtcctccctggcatcaaggtcgac

SEQ ID NO: 16582 - DNA, 192 bp, Zea mays
  Clone ID: LIB3151-001-P1-K1-H10
ctcatatgcgtacacggactccctcttcctgtcactaaccaagttagacaaaggcggggcgtgggaaacaagggggaatgggactggcaacccaagggatcaatacgctaactgtcgtcatctagagggcagacaacatttccgcgatgctcttatgcaagaacaccctcaagatcatgcccttcaagctcc

SEQ ID NO: 16583 - DNA, 237 bp, Zea mays
  Clone ID: LIB3151-001-P1-K1-H11
ccattagctttatctactccagagcgcattagaacccgatcgacaccattacggggttggtcgttgccctggctctcctggctcttccttccagcgccacctacacgcatacaagcggcggctgcggctgccacccaccgtcgccggttcatttaccgttcccggtgcatctgccaccttcttttcacctgccaccttccgggcattttctaccgtccgttccaccttgccgcctcc

SEQ ID NO: 16584 - DNA, 252 bp, Zea mays
  Clone ID: LIB3151-001-P1-K1-H8
agcctagcaattagctcatcgactccagattggagaactcgacaccatgaaggtgctgatcgttgcccttgctgtcctggcgctcgctgcgagcgccgcctccagtacaagcggcggctgtggctgccagacaccaccgtttcatctaccgcctccgttctatatgccgactacgttctatctgtcgacgcagcagctgccgtagacacggcaataccctactcaaccaccgcagttaagcccgtgccagca

SEQ ID NO: 16585 - DNA, 437 bp, Zea mays
  Clone ID: LIB3151-001-P1-K1-H9
tgtgccgccgccggttcatctgccgccgccaccatgccactaccctactcaaccgccccgggctcagcctcatccccagccacacccatgcccgtgccaacagccgcatccaagcccgtgccagctgcagggaacctgcggcgttggcagcaccccgatcctgggccagtgcgtcgagtttctgaggcatcagtggcagcccgacggcgacgccctactgctcgcctcagtgccagtcgttgcggcagcagtgttgccagcagctcatgcaggtggagcccgagcaccggtaccaggcgatcttcggcttggtcctccagtccatcctgcagcagcagccgcaaagcggccaggtcgcggggctgttggcggcgcatatagcgcagcaactgacggcgatgtgcggcctgcagcagccgactccatgcccctacgct

SEQ ID NO: 16586 - DNA, 422 bp, Zea mays
  unsure at all n locations
  Clone ID: LIB3151-002-P1-K1-A1
aagcagccgccgttgctgctgccgcgtccacagaatggggggtttcgtgaagactcataagaccaatgcgtatttcaaacgtttccaagtgaaattcaagagaaggcgggctggcaagacagactacagggccaggataaggctgattaaccaagacaaaaacaagtacaacacacccaaatacagatttgttgtgcgatttaccaacaaggacatcactgcccaaatcatatctgctagtatagcgggtgatatggttcttgcttctgcctactcgcatgagttgccacgatatggtcttgaagttggtctgaccaactatgcagctgcctactgcactggccttctgttggctcgccgtgtgctcaagatccgtggtttggatcangagtacgagggcaatgttgaggccactggtgagg

SEQ ID NO: 16587 - DNA, 389 bp, Zea mays
  unsure at all n locations
  Clone ID: LIB3151-002-P1-K1-A2
attggtacaaaccatcagggcacaacagctgcagcaactcgtgctacctgtgatcaaccaaggagctctggcaaacctttctccctactctccgcaacaacaattgcttgcattcaaccaactgtctacactgaaccctgctgcttatttgcagcaacaactattaccatttagccagctagctactgcctactctcaacaacaacaacttcttccatttaaccaattggccgcactgaaccccgctgcttatttgcagcagcaaatactactaccatttagccagctagctacagcaagccgtgcttccttcttgacacaacaacagttgctgncgntctaccagcagtttgcggctaaccccgcaaccctcttacaactacaacaat

SEQ ID NO: 16588 - DNA, 348 bp, Zea mays
  Clone ID: LIB3151-002-P1-K1-A3
atgcgtcttcagaccattagctctatctactccagagcgcaaaagaacccgatcgacaccaggaaggtggggttgcgtgccctggctctcctggctctcgctacgatgcgccacatacacgcatacaagcgacttgctgcggatgccatccaccgacgaagggtcatctaccgtcgccggagcatctgtcaactacggatctacggacaccttcagggcatatcacaacgtcggggcatctgtcgacgaacgaccaactgacaacgtgggaccatgtgccgtcgcccgtttatctgtagacgccatcatgacactacagtactaaaccgggccggccgcagtgtcata

SEQ ID NO: 16589 - DNA, 435 bp, Zea mays
  Clone ID: LIB3151-002-P1-K1-A4
caacatgcaacatagaatgtggaatccagttgcaacaatagagcaacaatggagaccaagagattttccgtgcttatgctccttgctctttctacatgtgttgctaacgcgacaattttccctcaatgctcacaagctcctatagcttccctttttcccccataccttccatcaattatagcttcagtatgtgaaaacccagctcttcaaccatataggcttcaacaagcaatcgcagcaagcaacatacctttatcgcccttgttgtgtcaacaatcgccagccctatctttggtgcagtcattggtacaaaccatcagggcacaacagctgcagcaactcgtgctacctgtgatcaaccaagtagctctggcaaacctttctacctactgtgcgcaacaacaatgtcttgcattcaaccaactgtctacactg

SEQ ID NO: 16590 - DNA, 383 bp, Zea mays
  Clone ID: LIB3151-002-P1-K1-A5
cgctcactgactgactactgtaataccagagatcgaacaacttggtcctgcagctcaagaagagagttttgtgcatttgggggccgggggcaagagagagagagagagagccatggcggcggaccagcagccgcagctgcaggaggagatgaacgacgctgccggcggcggcctcaggctgcctccagggttccgcttccacccgagcgacttcgagattgtcagcttctacctcaccaacaaggtgctcaacacgcgcttcacctgcaccgccatcacggaggccgacctaaacaagattgagccatgggacctcccgagcaaggcgaagatgggcgagaaagagtggtacttcttctaccagaaggaccgcaagtacccga

SEQ ID NO: 16591 - DNA, 381 bp, Zea mays
  Clone ID: LIB3151-002-P1-K1-A6
acctgaggcagtcgcagtgcagcccgctggcggcggcgccctactacgccgggtgtgggcagacgagcgccatgtaccagccgctccggcaacagtgctgccagcagcagatgaggatgatggacgtgcagtccgtcgcgcagcagctgcagatgatgatgcagcttgagcgtgccgctgccgtcagcagcagcctgtacgagccagctctgatgcagcagcagcagcagctgctggcagcccagggtctcaaccccatggccatgatgatggcgcagaacatgccggccatgggtggactgtaccatgaccagtaccagctgcccaagctaccgcaccaacccctgtggcgtctccgctgccataccgccctactactga

SEQ ID NO: 16592 - DNA, 326 bp, Zea mays
  Clone ID: LIB3151-002-P1-K1-A7
atagctctagatcgatagcgtccaccctgttttttaacccgttcgacacaatgtagaaatggactgtcttatttgttctacggcacatacatgagagcaaaaactttatgcttacactatgactcataagatatctaacagaggggaccaccaatgtagcggctgcgggcgaatgctcattgctttgtaaaagcaagctgcgtgaaagtgaccacctgctgcacatgtaagagggtgccagcatttggcacagcgtgctgatataacggcaacaactgatgtggcgtcaagaacatggcactactctaatcaactagctgggtgta

SEQ ID NO: 16593 - DNA, 321 bp, Zea mays
  Clone ID: LIB3151-002-P1-K1-A8
ataggtctagatcgctagcgatcgagctagtttattcacgctactacacacggggaagggggactattgcattgtttcagcggctcctaaatcaatgctgccagcagtagatttggatgatggacattcagtacatctcgcagaagctaaacattatgatgcatgattgagcgttccgctgtcgtcagtagcatcatttacgagccagctatgatacaatagcaacatcagatgttgccaacccagtatttaaaacgcactgccattatgatatcataaaacatgccggccatagcttgactgtaccattaccagttccat

SEQ ID NO: 16594 - DNA, 278 bp, Zea mays
  Clone ID: LIB3151-002-P1-K1-B1
accacgcgtcgaagcgaccaactgcatcatagaaagcactttacgcttttacaatcgctccaaaatagtgtagctttcgtatgctccttgggctcactgcaacgactgttaccgcaaccattttaccacaacactcacaagctcctatagcttacttacttcccccatacctatcaccacgggtgtcttcagcatgtgaaaacccaaatcttcaaccctacatgatccaacatgccatcgcaacaagcatcttacctttatcaccctcgggccttcaa

SEQ ID NO: 16595 - DNA, 375 bp, Zea mays
  Clone ID: LIB3151-002-P1-K1-B3
ggaaccggggagcggcagctgcagcggccgagggcggagcacgcgaggcatggatagatacgaaagggtggagaagcctcggaatgacacgccaatcagccagaatgagatcagaatcactactcaggggaggatgaggaactatatcagctatgggatgtcgctgcttgaggaaaatggacatgatgagattagtatcaaggccatgggacgggccataaataagacagttatggttgttgaattgatcaagagaagggttggaggtcttcatcagaacactgctactgaatctgttgatatcacagacacatgggaacctttggaagaaggccttctcccactagagacaactcgccatgtgtcgatgatcac

SEQ ID NO: 16596 - DNA, 450 bp, Zea mays
  Clone ID: LIB3151-002-P1-K1-B4
attcagaaacacaccaagcgaagctacctatcttcgacttaacaacaatggctaccaagatgttagcccggcttgcgcttcttgccctttttgtgagcgcaacaaatgcgttcattattccacaatgctcacttgctcctagtgccattataccacagttcctccgaccagttacttcaatgggcttcgaacacctagctgtgcaagcctacaggctacaacaagcgcttgcggcgagcgtcttacaacaaccaattaaccaattgcaacaacaatccttggcacatctaaccatacaaaccatcgcaacacaacagcaacaacagttcctaccagcactgagccaactagatgtggtgaaccctgtcgcctacttgcaacagcaggtgcttgcatccaacccacttgctctggcaaacgtagctgcataccaacaacaacaacaattgg

SEQ ID NO: 16597 - DNA, 362 bp, Zea mays
  unsure at all n locations
  Clone ID: LIB3151-002-P1-K1-B5
agcaaccaaaatcaaaccaagcaaagcgcaccgcatgcggcgccagccagcggcagtagcgtgcttacctggtccccgcccccacacctcttcccttcccttctccctcccatcacacaactccatctccaccccgtgaccgacccacccatccatggcggcggcgcccaagtccatcgagcggctgccggcgcgccgggtggtcccggccgagcccacgccagccggcccgctccgcctctcctggctggaccggtaccccacgcagatggcgctgatcgagtcgctccacgtcttcaaggcggcccctgaccagccggccgncgncggagccagcccggccgggaccatngagcgcgccc

SEQ ID NO: 16598 - DNA, 404 bp, Zea mays
  Clone ID: LIB3151-002-P1-K1-B6
attttcagcattcagaaacacaccaagcgaagcgcactagcaacaacctaacaacaatgggtgccaagatattagccctccttgcgcttcttgcccttttagtgagcgcaacaaatgcgttcattattccacagtgctcacttgctcctagtgccattattccacagttcctcccaccaggtacttcaatgggcttcgaacatccagccgtgcaagcctacaggctacaactagcgcttgcggcgagcgtcttacaacaaccaattgcccaattgcaacaacaatccttggcacatctaaacctacaaaccatcgcaacgcaacagcaacaacagtttctgccatcactgagccacctagccgtggtgaaccctgtcgcctacttgcaacagcagctacttgca

SEQ ID NO: 16599 - DNA, 176 bp, Zea mays
  Clone ID: LIB3151-002-P1-K1-B7
atgtgctgtattatagccgatggctagctatctagttgagtcatttagcggcgatgattgggtaataatgtgtcacgcatcaccatgggtggcagtgtcagtgtgagcaatgacctgaatgaacaattgaaatgaaaagaaaaatgtattggtccaaattaaacaaaaaactacat

SEQ ID NO: 16600 - DNA, 425 bp, Zea mays
  Clone ID: LIB3151-002-P1-K1-B8
gccgaactgaggaacacgcctggcgacgggatacagcagcagcgcgcccctctatccccgacgcgacggcgccctgcagctgcagataaacctgttccaatgggcaaacaaaaagagggtgtggacaaaagaactgctaggaagatgatccgatctacggaaggctgtgcaaagagcattactttcgagaggaacaacaaatcagacgatgtgcagcttcacgatctgccgaatgacatgctaggtagcatactatcacggttgacattcagagaatcctcacagatgggccttgtttctcatacctggcggcggctggggagaagctgttgccggaaactggtcttcaccagtgccaccatgttccaacccggaaataggagcatcaaacatacaaggaccaactttgccatgagagtcaacag

SEQ ID NO: 16601 - DNA, 317 bp, Zea mays
  Clone ID: LIB3151-002-P1-K1-C1
cagccaagtgtaaagagtgcgaagaagcagtagcaaaatgttttacattctcgtgttcttggagtggtccatcgatcgagctccgcgaaagagagagtgagagagcaagcaatggcgacagcagggaaggtgatcaagtgcagagccgacgtggcgtgggaggccgacataccgctgtccattgatgtggtggaggtagcgccgccgtacgctatggaagtgcgtatgaagatcctttacaccgagctatgccacaccgacgtctacttgtgggatgccaaggcgcaaaccctggtgttcacgaggatcttaggaca

SEQ ID NO: 16602 - DNA, 374 bp, Zea mays
  Clone ID: LIB3151-002-P1-K1-C2
agaccattagctttatctactccagagcgcagaaaaacccgatcgacaccatgagggcgtggctcgctggcctcgctctcctggctctcggtgagagcgccaccttcacgcatacaagcggcggctgcggatgccagccaccgtcgccggttcatctaccgacggcggtgcatctgccaccgtacgattcacctgccaactccgaagcatctaccaccgccggtgcacctggcgtctgaggtccatctgccaccgtcggtccatatgccgccgccggatcatatgacgacgccaccatgccactaccgtactaaaacgtcacggcctaagacttataacaagtcacactcatgcacgtgccaacagacgcatac

SEQ ID NO: 16603 - DNA, 294 bp, Zea mays
  Clone ID: LIB3151-002-P1-K1-C3
cccacacgtgcgaaacgcccgcgcaaactctcgaccgagcccgacagatcttgaattccccattccgccgcaccgatcgaccttcacgccagtctcggcctcttccgaacgcatacagcgcggttgtttgagtggagaggacgaagatgcgggactgcatctgcggccacatatgtgacgccggcatccaagttggcaacgcgtgctgagaactttactgcctcgaacacggcatccaacctgaaggtcacatgcctggagattagaccgcgggacattacgatgatgccttca

SEQ ID NO: 16604 - DNA, 449 bp, Zea mays
  Clone ID: LIB3151-002-P1-K1-C4
ttttgagcattcagaaacacaccaagcgaagctacctagcaacgacttaacaacaatggctaccaagatgttagccctccttgcgcttcttgccctttttgtgagcgcaacaaatgcgttcattattccacaatgctcacttgctcctagtgccattataccacagttcctccgaccagttacttcaatgggcttcgaacacctagctgtgcaagcctacaggctacaacaagcgcttgcggcgagcgtcttacaacaaccaattaaccaattgcaacaacaatccttggcacatctaaccatacaaaccatcgcaacacaacagcaacaacagttcctaccagcactgagccaactagatgtggtgaaccctgtcgcctacttgcaacagcaggtgcttgcatgcaacccacttgctctggcaaacgtagctgcataccaacaacaac

SEQ ID NO: 16605 - DNA, 418 bp, Zea mays
  Clone ID: LIB3151-002-P1-K1-C5
ctgcgcatgacatgttcggtgcgggcactgtcacgtcatccttggtcctagagctcgccatggccgagctgatgcgcaacccaaagcagatggccaagctacaagctcaagttcggaggcacacaccggaggggcaggaaacggtggaggaagagaacctatccgacatgccctacctgtgagagccgtggtgaaggagacgctgaggctgcacccacctgccccgctcctcgtccctcacctgtctctggcggactgcgtcgtcgatggctaccacgtcccctctggcacccgggtcatcgtcaacgcctgggctcttggcagagacccgggctcgtgggagaagccagaggagttcctgccggagaggttcatggacagcggcagcgctgctggcgtcgacatcaaagggaaccac

SEQ ID NO: 16606 - DNA, 390 bp, Zea mays
  Clone ID: LIB3151-002-P1-K1-C6
ctgggtcttaaaaccattagctttatctactccagagcgcagaagaacccgagcgacaccatgagggtgttgctcgctgccctcactatactggctctcgctgcgagcgccacctgcacgcatacaagcgggggctgcagatgccagccaccgacaacggatcatataccgccgacgtggcatatgccacctgcaggtcacctgccacctgcagtgcatttcccacctcctggccacttacctgcgtctggccaactgccaccgccatggcatgtaccgccgctgtgtcatctgccgcatccaccatgccagtactctactcaaacaccccggcctgaggctgatagccagacacacccatgcccgtgacaacagtcgcatgcaagcccg

SEQ ID NO: 16607 - DNA, 336 bp, Zea mays
  Clone ID: LIB3151-002-P1-K1-C7
aaggaatcgggttatgccggacagagcacatgttcttcgcttcggatgagaggattaaggctgtgaggcagatgattatggctcccacagttgagctgaggcagcaggcgctggatcgccttctgccttaccagaggtctgacttcgaaggcatcttccgtgctatggatggactttcagtgactattcgacttctggaccctcccctccacgagttccttccagaagggaacgtcgaggaaatcgtgcgtgaactgtgttctgagacgggagccaaccaggaggatgccctcgcacggatcgaaaagctttcggaaagaaacccgatgcttggct

SEQ ID NO: 16608 - DNA, 442 bp, Zea mays
  Clone ID: LIB3151-002-P1-K1-C8
caattcttctaccctacaggatccaacaggcaatcgcagcaggcatcttacctttatcacggttgttcctccaacaatcatcagccctattacagcagttacctttggtgcatttattggcacaaaacatcagggcacaacaactacaacaactcgtgctagcaaaccttgctgcctactctcagcaacagcagttacctttggtgcatttgttggcacaaaacatcagggcacaacaactacaacaactcgtgctagcaaaccttgctgcctactctcagcaacaacagtttctgccattcaaccaactagctgcattgaactctgctgcttatttgcagcaacaacaactactaccattcagccagctagctgctgcctacccccggcaatttcttccattcaaccaactggcagcattgaactctcatgcttatgtaca

SEQ ID NO: 16609 - DNA, 430 bp, Zea mays
  Clone ID: LIB3151-002-P1-K1-D1
cgcgtgacggatcagtactacagaaaatggcactactgattataaaacttatcacctcttctaaatagatgattcatggggcgtgcctaacgactataaactcccacactcatactgaatgcaaacgcgctgcatcaccttctgacttaccaaaaagatcacttcttaagcctcttccatgctatcgatggactatcagcgactatttgactcctggaccctctcctacacaaattcctttcaaaaaggaacatctaggaaatcttgcctcaactgtgttcttagacacgtagccaaccacgacgatgccctctcacggatcgaaaaacttttggaagtaaaccccatgctttgcttccatagctgcaggcgtgtcaaccaactgtctacattgaaccgagctgcttatttgcagcaacatctattacca

SEQ ID NO: 16610 - DNA, 67 bp, Zea mays
  Clone ID: LIB3151-002-P1-K1-D3
gccgacccacgcgtacgctagctacttcctactctcagttacaacaacttcttccatttaaccaata

SEQ ID NO: 16611 - DNA, 447 bp, Zea mays
  Clone ID: LIB3151-002-P1-K1-D4
ggtcttcagaccattagctttatctactccagagcgcagaagaacccgatcgacaccatgagggtgttggtcgttgccctcgctctcctggctctcgctgcgagcgccacctccacgcatacaagcggcggctgcggctgccagccaccgccgccggttcatctaccgccgccggtgcatctgccacctccggttcacctgccacctccggtgcatctcccaccgccggtccacctgccgccgccggtccacctgccaccgccggtccatgtgccgccgccggttcatctgccgccgccaccatgccactaccctactcaaccgccccggcctcagcctcatccccagccacacccatgcccgtgccaacagccgcatccaagcccgtgccagctgcagggaacctgcggcgttggcagcaccccgatcctgtgccagtgcgtcgag

SEQ ID NO: 16612 - DNA, 428 bp, Zea mays
  Clone ID: LIB3151-002-P1-K1-D5
agatattttccctccttatgctccttgctctttctgcatgtgttgctaacgcgacaattggccctcaatgctcacaagctcctatagcttcccttcttcccccataccttccatcaatgatagcttcagtatgtgaaaacccagctcttcaaccctataggctccaacaagcaatcgcagcaagcaacatacctttatcacccttgtttcaacaatcgccagccctatctttggtgcagtcattggtacaaaccatcagggcacagcagctgcagcaactcgtgctacctgtgatcaaccaagtagctctggcaaacctttctccctactctcagcaacaacaatttcttgcattcaaccaactgtctacattgaaccgtgctgcttatttgcagcaacaactattaccattcatgcagctagctact

SEQ ID NO: 16613 - DNA, 391 bp, Zea mays
  Clone ID: LIB3151-002-P1-K1-D6
caacaagcaacatagaaagtggaatccagttgcaacaatagagcaacaatggcgaccaagatgattttccctccttatgctccttgctctttctgcatgtgttgctaacgcgacaattttccctcaatgctcacaagctcctatagcttaccttcttcccccataccttccatcaatgatagcttcagtatgcgaaaacccagctcttcaaccctataggctgcaacatgcaatcgcagcatgcaacatacctttatcacccttgtttcaacaatcgccagccctatctttggtgcagacattggtacaaaccatcagggcacagcagctgcagcaactcgtgctacctgtgatcaaccaagtagctctggcaaacctttctccctactct

SEQ ID NO: 16614 - DNA, 52 bp, Zea mays
  Clone ID: LIB3151-002-P1-K1-D7
ctagctactgcctactctcagttacaacaacttcttccatttaaccaataag

SEQ ID NO: 16615 - DNA, 115 bp, Zea mays
  Clone ID: LIB3151-002-P1-K1-D8
caacaacccatcattggtggtgccctcttttagatttcttatgagttataggtcaataatggagttttttatctgatgtttgtggcttcccagaaataagaaagtacatttctag

SEQ ID NO: 16616 - DNA, 119 bp, Zea mays
  unsure at all n locations
  Clone ID: LIB3151-002-P1-K1-E1
gggaaaaccacgcggacgccacacgtacgatagctactgcctactctcattaacaacaacttcttccatttaaccaataaggagccctgtgcggtgcctncacaataccaaatactcaa

SEQ ID NO: 16617 - DNA, 445 bp, Zea mays
  Clone ID: LIB3151-002-P1-K1-E2
ctgattcatgatatttggtggaaaaaccttttttcgacttaacaacaatggctaccaagatggtaaccggtggttgcgcttcttgccctttttgtgagcgcaacaaatgcgttcattattccacaatgctcacttgctcctagtgccattataccacaggtcctccgaccagttacttcaatgggcttagaacacctagctgtgcaagcctacatgctacaacaagcgcttgcggcgagcgtcttacaacaaccaattaaccaattgcaacaacaatccttggcacatctaaccatacaaaccatcgcaacacaacagcaacaacagttcctaccagcactgagccaactagatgtggtgaaccctgtcgcctacttgcaacagcaggtgcttgcatacaaccgacttgctctggcaaacgtagcttgataccaacaacaacatc

SEQ ID NO: 16618 - DNA, 381 bp, Zea mays
  unsure at all n locations
  Clone ID: LIB3151-002-P1-K1-E3
catgagctagatctacagcagagcgcagaagtaccggagcgacaccatgagggcgctggtgggcgacgtgcgctcttctggctttggctgagagcaccaccttcacgcatacaagcggcgaatgcgggtgacagccaccaccgtggggtcatctaccgccgacggcgcatatgacacctccggttcacctgccaccttcggagcatataggaccgccgggacacctgtcgccgacggttcacctgccaccaccggtacatgtgccggcgccggatcatctgacgacgccacgatgccactacgctactgaaccgcgccggccgcacactnatccgcagccacacccatgcccgtgccaacagccgcattcaagcccgtgcc

SEQ ID NO: 16619 - DNA, 429 bp, Zea mays
  Clone ID: LIB3151-002-P1-K1-E4
attgagaccaactagcaacatagaaagcactttattgtaccaacaatggcagccaaaatatgttgcttcggtatgctccttggtctttctgcaagtgttgctaccgcaaccattttcccacaatgctcacaagctcctatagcttcccttcttcccccatacctctcaccagcggtgtcttcaatgtgtgaaaacccaattgttcaaccctacaggatccaacaggcaatcgcaacaggcatcttaccattatcacccttgttcctccaacaaccgacagccctattacagcagttacctttggtccatttggtggcgcaaaacatcagggcacaacaactacaacaacttgtgctagcaaaccttgctgcatactctcagcaacatcaatgtcttgcattcaaccaactggctgcattgaactctgct

SEQ ID NO: 16620 - DNA, 427 bp, Zea mays
  Clone ID: LIB3151-002-P1-K1-E5
actagatcccgagcgcaccaccttttttttttttttgtaccaacacttgcaggcaaaatgggtagtttccttaatctactagggctcacaccaaacatgctaccgcaaccattttcccaccatgctcacaaactcctatagcttcccttcttcccccatacctctcaccatcggtgacttcaatgtgtgaaaacccaattgatcaaccctacagcatccaacaggcaatcacaacaagcatcttaccattatgacccttgctgctccaacaaccgtcagccctattacatgccgtacctttgcgccatttggtggcacaaaacatcagggcacaacaactacaacaactagtgctatcaaaccttgctgcatactctcaaaaacatcagtttctgccattcaaccaactggctgcattgaactctgc

SEQ ID NO: 16621 - DNA, 254 bp, Zea mays
  Clone ID: LIB3151-002-P1-K1-E6
agaagcttggcatcaaggataagaacgaagcagcgaggatcgttgcgctcgttaagaatcaaactactgccgctgccgctactgctgccagtgctgacaacgacgacgacgaggcctgatcaatgcaacgacacatcatgatctgctgctgcacttaattactatgttcgtatacaaataaatacacccggcgtacgcggtgttccttatatggtctaaaatgtagccagtaaattttaaactactttatttct

SEQ ID NO: 16622 - DNA, 418 bp, Zea mays
  Clone ID: LIB3151-002-P1-K1-E8
gaccaactagcaacatagaaagcacaatagtgtaccaacaatggcagccaaaatattttgcttccttatgctccttggtctttctgcaagtgttgctaccgcaaccattttcccacaatgctcacaagctcctatagcttcccttcttcccccatacctctcaccagcggtgtcttcaatgtgtgaaaacccaattgttcaaccctacaggatccaacaggcaatcgcaacaggcatcttaccattatcacccttgttcctccaacaaccgtcagccctattacagcagttacctttggtccatttggtggcacaaaacatcagggcacaacaactacaacaacttgtgctagcaaaccttgctgcatactctcagcaacatcagtttcttccattcaaccaactggctgcattgaac

SEQ ID NO: 16623 - DNA, 231 bp, Zea mays
  Clone ID: LIB3151-002-P1-K1-F1
cgcgaaaccaactaagaacatcaaaaggacgccggcgaccgaacaatgaatggcaacatagggtagttgctgatactgcttgctcattctgcaagtcttcgtactgctatcagtgctcgacaatgccaacacgagcgtatcgatctcctgcttgccccatacctcctaccagcacatcctgctatgggtgaatacccaattggtgaacagtacagcatccaacaggcattc

SEQ ID NO: 16624 - DNA, 276 bp, Zea mays
  Clone ID: LIB3151-002-P1-K1-F2
gcgcacaaaatcaaccaaaattataaaaaacaggtcatacacctaacaaacaaaggcaacctctggtaatttgtgacactaccacgtcatactataacacgaaaaactacaaccactactcaacaactctaacaacaaactctcattaccctacttccctcataaaacataccagaaaaagtgtttgaatgtattaacccaccatttgaaccttatcacattcaacacacaacttgcttctcacattttttaatcataacatctattaataataac

SEQ ID NO: 16625 - DNA, 133 bp, Zea mays
  Clone ID: LIB3151-002-P1-K1-F3
acgctgcccctccccgcgccgttctttttggttttccactcctcagtccccgccgacgccaaaacccgcatgatggggtcgtcgtcgccgcgaaacatatggctatgaatcacatacacctgttctactggtc

SEQ ID NO: 16626 - DNA, 313 bp, Zea mays
  Clone ID: LIB3151-002-P1-K1-F4
gcgaatgaggcgcattagcaacctaaaaaggacaatcgcgctcgaaccatggtagccacaatgggtagcttgggtatgctccttggtgtgcttgcaagcgctgctaccagaaccacatatgcacaaagtttacaagatcgtatagttgcttttattgccacatacctataaccagtggcgtctgtaacttgagaaaactcaaaacatcaaccttgcagggtccaactggcaaaacaagcacgcgtggtacgtgtattacaacagctaattgaacaaccgtaagacctattacagccgcaacttacggtgcatg

SEQ ID NO: 16627 - DNA, 427 bp, Zea mays
  Clone ID: LIB3151-002-P1-K1-F5
ctcggagtgaccgttgcctacaacaaggatcccagccccgtgaaggtcaacctcggggtcggcgcctaccggaccgaggaagggaagcccctagtgctgaacgtggtcaggcgcgccgagcaaatgttgatcaataatccgtcacgtgtcaaggagtacctaccaatcaccggtctggctgaattcaataagctgagcgctaagcttatctttggcgctgacagccctgctattcaggagaatagggttgctaccgcgcagtgcctatcgggtactggttctttaagagtcggaggtgaatttcttgcaaggcactatcacgagcgcactatctacatccgacaaccaacctggggaaatcacccaaaagtcttcaccctatctggcttgaacgttaggagctaccgctattatgatcctgcaacat

SEQ ID NO: 16628 - DNA, 371 bp, Zea mays
  Clone ID: LIB3151-002-P1-K1-F7
ggtcttcagaccattagctttatctactccagagcgcagaagaacccgatcgacaccatgagggtgttgctcgttgccctcgctttccttgctcttgattgaagcgccacctccacgcatacaagcggcggctgcggctgccatccaccgccgccggttcatctaccgacgccggtgcatctgccacctacggttcacctgccacctacggtgcatctcccaccgccggtccacctgccgccgccggtccacctgccaccggcggtccatgtgccggcgccggttcatctgccgccgccaccatgccactaccctactgaaccggcccggcctgagcctgatccccagccacacccatgcccgtgccaaca

SEQ ID NO: 16629 - DNA, 364 bp, Zea mays
  Clone ID: LIB3151-002-P1-K1-G1
ggaagaaccaagcggacgcaagcattcagaaacacacacaagctaatctcattaccaacaacctaacaacaacggctacgaagacattaggggggtttgcgctgcttgcgcttttttcgagctcaacaaaagcggccattattccacaaagctcactggctggaagtgtcataattacacagcgggctatcaacaaatacttgaatggtgcttcaacacccaggtgttcacacctatagggtacaacaaaccaaaggggcaagcgtcttacaacaaccaactttccacgtgcaacaacaatcctgggcacatttaactatacaaaccatcgcaacgcaacaacaacaacaatgcctaccagcac

SEQ ID NO: 16630 - DNA, 351 bp, Zea mays
  Clone ID: LIB3151-002-P1-K1-G3
attttcagcattcagaaacacaccaagcgaagcgcactagcaacaacctaacaacaatggctaccaagatattagccctccttgcgcttcttgcccttttagtgagcgcaacaaatgcgttcattattccacagtgctcacttgctcctagtgccattattccacagttcctcccaccagttacttcaatgggcttcgaacatccagccgtgcaagcctacaggctacaactagcgcttgcggcgagcgtcttacaacaaccaattgcccaattgcaacaacaatccttggcacatctaaacctacaaaccatcgcaacgcaacagcaacaacagtttctgccatcactga

SEQ ID NO: 16631 - DNA, 445 bp, Zea mays
  Clone ID: LIB3151-002-P1-K1-G4
cggatgactggaactcctgtcagtttgcactgagcaatggttcatccattctcaataaccacattgctccacaggatagcctcacttatggagataatgatctaaactacattgattggcctggcattgacaattttgaggatgttgacacattattcaggagatctgatttcacatatgatccgcagcagctggagaatacagatgggttatcttggcttccttcttcagatgctgtttactcttctgatgttgctttgcagcaagggtttgactcgtcttattccgattatgatattctggatgatctctcagcattccaatgtgcagaagataaatcactaccctcagttggtccttcatcggatttatgtgataatcaattcaatgatacctatctgttcagtgagcagaagaatgcgaatgcatatggtgaacagatata

SEQ ID NO: 16632 - DNA, 428 bp, Zea mays
  Clone ID: LIB3151-002-P1-K1-G5
ggcagtcccacaagatcacagcacatacgcttactccattccactcggccgcgaccgcgaccgcgacggcgagcgaggggccgtggtgggacgccgcgccgcttctgcagaaagaaaaaggccaggactcttgatttgctcctcgcgggggttcggtcccatggcggcagctgcgctggcaatggcagatcaggtggtggccgagctccgagtgaggtgtgagacgccgccgtcgatgctgcgcgaggtggccgtggagatggcccgcgagatgggcgcggcgctggagaaggacggcgggagcagggtcaagatgctactctactacgtcgataagctccccacagggagagaggaaggattattctatggattggacctaggaggaacgaatttccgcgtcttgaaagtgcaactaggtgggaatg

SEQ ID NO: 16633 - DNA, 351 bp, Zea mays
  Clone ID: LIB3151-002-P1-K1-G6
gtaatagttgaatggaagaaattgatccaaatactactaccatttagccagctagctacagcaagccgtgcttccttcttgacacaacaacagttgctgccgttctaccagcagtttgcggctaaccctgcaaccctcttacaactacaacaattgttgccctttgtccaacttgctttgacaaacccagcagcctgctaccaacaacacatcattggtggtgccctcttttagattgcttattagatggaattcaataataaagttttttggatgatgtatgtggccaaccagcaataaaaagttacatttgcagattctatactacgtcgataagctccccacatggag

SEQ ID NO: 16634 - DNA, 374 bp, Zea mays
  Clone ID: LIB3151-002-P1-K1-G7
tattttgagcattcagaaacacaccaagcgaagcgcactagcaacgacctaacaacaatggctaccaagatattagccctccttgcgcttcttgccctttttgtgagcgcaacaaatgcgttcattattccacaatgctcacttgctcctagtgccattattccacagttcctcccaccagttacttcaatgggcttcgaacacctagctgtgcaagccaacatgcaacaacaagcgcttgcggcgagcgtcttacaacaaccaattgcccaattgcaacaacaatgcttgccacatctaacaatacaagccatcacaacgcaacagcaacaacagttcctaccagcactgagccacctagccatggtgaaccc

SEQ ID NO: 16635 - DNA, 415 bp, Zea mays
  Clone ID: LIB3151-002-P1-K1-G8
caactagcaacatagaaagcacaatagtgtaccaacaatggcagccaaaatattttgcttgcttatgctccttggtctttctgcaagtgttgctaccgcaaccattttcccacaatgctcacaagctcctatagcttcccttcttcccccatacctctcaccagcggtgtcttcaatgtgtgaaaacccaattgttcaaccctacaggatccaacaggcaatcgcaacaggcatcttaccattatcacccttgttcctccaacaaccgtcagccctattacagcagttacctttggtccatttggtggcacaaaacatcagggcacaacaactacaacaacttgtgctagcaaaccttgctgcatactctcagcaacatcagtttcttacattcaaccaactggctgcattgaac

SEQ ID NO: 16636 - DNA, 409 bp, Zea mays
  unsure at all n locations
  Clone ID: LIB3151-002-P1-K1-H1
caagcaacatagaaagtggaatccagtagcatcaatagagcaacaatggagaccaagataggggccctccgtatgctccttgctctttctacatgtgttgctaacgcgacaattttccctcaatgctcacaagctcctatagcttccctttttcccccataccttccatcaattatagctncaggatgtgaaaacccagctcttcaaccatataggcttcaacaagcaatcgcagcaagcaacatacctttatcgcccttgttgtgtcaacaatcgccagccctatctttggtgcagtcattggtacaaaccatcagggcacaacagctgcagcaactcgtgctacctgtgatcaaccaagaagctctgacaaacctttctggctacttctttgcaacaacaatttctt

SEQ ID NO: 16637 - DNA, 358 bp, Zea mays
  Clone ID: LIB3151-002-P1-K1-H2
gggaaaaccacgcgtggccccacctagcaacatagaacgtggaatgcagtatcaacaatcgaccaacaatggcggacaagatattttgcatccttatgctgcttgctctttatgcatgtgttgctaacgcgaccatttttactcaatactgacaagctactatagctgctcttcttgccccataccttacatcaatgaccgcttcagtatgtgaaaacccagcacttcaaccctacaggctagaacaagcaatcgcaacaagcaacttacctttatcacccctgttattataacaatcgccagtcctatctttggcgcaggcattggtacaaaccatcaaggcacaagagctgcaaca

SEQ ID NO: 16638 - DNA, 177 bp, Zea mays
  Clone ID: LIB3151-002-P1-K1-H3
aaaagcgggagacaaacaaaaatataaaaagcgaaatactttttcaactttataacaacaattacaacctgtttattttgcataacttaactacttgctctttcaacacataatactaactcaaccatatttcctcaatactcacaaacttctataattacccttcttccaccatac

SEQ ID NO: 16639 - DNA, 425 bp, Zea mays
  unsure at all n locations
  Clone ID: LIB3151-002-P1-K1-H4
caattcccacttagacaatacgagtgggctcatagtcatagatagcgctagcagcagtagaaaccgccgccactaggctaggagtggaagcctcgggcccgcggcagcagccatggcggcgttcctggcgcctccctgcacttccttctatcgctcgtccgcattccttaccccctgttcctcgaatcgccggagtacagcgctaagggcggcggccgttcgtgggtcggcggtgacgcgggcccagcggacggtctccgctaggtgggtcccatccaggttagcggtggcgaggccggcggccaggaaggcgtgcctagaggagcttgatacaaccaacatgctccttcgccagcgcatcggcttcctgggttccccggnggatgatacaagtgctgatctcattatcaggcaactcctactat

SEQ ID NO: 16640 - DNA, 441 bp, Zea mays
  Clone ID: LIB3151-002-P1-K1-H6
caactagcaacatagaaagcacaatagtgtaccaacaatggcagccaaaatattttgcctccttatgctccttggtctttctgcaagtgctgctacggcgaccattttcccgcaatgctcgcaagctcctatagcttcccttcttcccccgtacctctcaccagcggtgtcttcggtatgtgaaaacccaattcttcaaccctacaggatccaacaggcaatcgcagctggcatcttacctttatcacccttgttcctccaacaatcatcagccctattacaacagttacctttggtgcatttattggcacaaaacatcagggcacaacaactacaacaacttgtgctagcaaaccttgctgcctactctcagcaacagcagtttcttccattcaaccaactaggttcattgaactctgcttcttatttgcaacaacaaca

SEQ ID NO: 16641 - DNA, 349 bp, Zea mays
  Clone ID: LIB3151-002-P1-K1-H7
gttctagatcgcggcggccgcccttttctttttttttgtgccttttattctctggtgttctgggggcatggatcgatgttgctcggttttgtctgtaccatggcggcgacgggggctgtgtcgacgctggtgacgaggagcatggagagctggtcgtcattgcaggtcccggcggtggcattcccttggaagccacgaggtggcacgaccggcggcctcgagttccctcgccgggcgatggtcgccagcgtcggcctcaacgtgtgcccgggcgtcccagcggggcgcggcccgcgggagcccgatcccaacgtccggcgggcgggccgcaaactgcgacatcgccgcg

SEQ ID NO: 16642 - DNA, 261 bp, Zea mays
  Clone ID: LIB3151-002-P1-K1-H8
aagctcacatctagggtacatcgctcctgggttcgccactcgtgggatgggctatgctactgtcatctgatgacagggtacaaaccaactgtgggacgacaagcacgaatatcacgactgatgatggcggaactactatgtagatatacaaataaatatacccataataagcgtccgtatgtggatataatgtaccagaaattttggactaccgattgtaaatacaaaaataaaaggctgcctgtgtagaaaacctgttta

SEQ ID NO: 16643 - DNA, 366 bp, Zea mays
  Clone ID: LIB3151-003-Q1-K1-A10
tcagaaacacaccaagccaagcgcactttctacgacctaagctcgaacggctaccaataggtgtacccgtccttgcgctggttgcccttcttgagagcgcaacaaatgcgttcattattccacaatgctcacttgctcctagtgccattattccacagttcctcccaccagttacttcaatgggcttcgaacacctagctgtgcaagccaacatgcaacaacaagcgcttgcggcgagcgtcttacaacaaccaattgcccaattgcaacaacaatccttgccacatctaacaatacaagccatcacaacgcaacagcaacaacagttcctaccagcactgagccacctagccatggtgaaccctg

SEQ ID NO: 16644 - DNA, 294 bp, Zea mays
  Clone ID: LIB3151-003-Q1-K1-A11
gcgcactacctgaaggcgatgtgccgcctgtagctgtagtagacaccttcctgcccttgcggcgcagctgtccgcggggtgtactactgagaaaactatgtcctcgaacactaatgtaatggaggcagtgactagctacctatcttgctcgtggactcatgtatcggagatcagtaacgtatcgtgacccatcaccatcggtggcaatgtgagcaatcaccagtctgaacccttgaagtgggccggatttttatttacgaaaaaaagatgattccaggttaaatctcccatggc

SEQ ID NO: 16645 - DNA, 368 bp, Zea mays
  unsure at all n locations
  Clone ID: LIB3151-003-Q1-K1-A12
cccacgcntccgtccactcatccgcccacttgtacctttacacatcctgtacttctcgcgggcctactgttatgctgcgggctacctacaggcatctgtatctcttcgtccaccgctttccatgggaaaaacatggctgaatgacttatctacaagaacaccctcaagatcatgcccttcaatctccgcccgttcgaccttaatatgaccccgtgcgcatcatcgtatctttcattggccgttccactagaacctacctatcttagatccccttacagcgcttcttcattaactagccttgttttcaagcttccttccgatgctaatagttgtgctgaatgtcgacttgctaactatatcagtcccat

SEQ ID NO: 16646 - DNA, 391 bp, Zea mays
  Clone ID: LIB3151-003-Q1-K1-A2
caccaacgcaaattgcaccaagaaatccatcgagaggccgtcgacaggggaattaatggcgtcgtcgtctagcagcagccaccgccgcctcatcctcgcagccgccgtcctgctctccgtgctcgcggctgccagcgccagcgccgggacctcccgcgtgccggggtgggccatcccgcacaacccgctcccgagctgccgatggtacgtgaccagccggacctgcggcatcgggccgcgcctcccgtggccggagctgaagaggagatgctgccgggagctggcggacatcccggcgtactgccggtgcacggcgctgaacatcctcatggacggcgcgatcccgccgggcccggacgcgcagctggaggggccgcctagaggacctgcc

SEQ ID NO: 16647 - DNA, 420 bp, Zea mays
  Clone ID: LIB3151-003-Q1-K1-A3
attagctatatctactccagagcgcagaagaacccgatcgacaccatgagggtgttgctcgttgccctcgctctcctggctctcgctgcgagcgccacctccacgcatacaagcggcggctgcggctgccagccaccgccgccggttcatctaccgccgccggtgcatctgccacctccggttcacctgccacctccggtgcatctaccaccgccggtccacctgccgccgccggtccacctgccaccgccggtccatgtgccgccgccggttcatctgccgccgccaccatgccactaccctactcaaccgccccggcctcagcctcatcctcagccacacccatgcccgtgccaacagccgcatccaagcccgtgccagctgcagggaacctgccgcgttggcagcaccccgatcctg

SEQ ID NO: 16648 - DNA, 314 bp, Zea mays
  Clone ID: LIB3151-003-Q1-K1-A4
acaaataaacacatcaagcgaagcgcactatcggcaacctaccagcaatggctacgaagagtttgtataatacttgcgctccttgcgcttattgtgagcgcaacaaatgcgatcattattccacaatgttcaattgctccttactacattatcccacagtttctattatccgttactcaaaaggcgttcgaacacagacctgtgtaagcctataggctacaataagcgattgcggcgagcgtctgaaacctccaattgcacaatagtaacaacattccttggcacatttaacaatacatatcatctgcacgcag

SEQ ID NO: 16649 - DNA, 131 bp, Zea mays
  Clone ID: LIB3151-003-Q1-K1-A8
aaacacatcaagcgaagcgcactagcagcaacctaacaacaatggctaccaagaggttgaaaactacttgcgcttcttgcgctttttgcgagcgcaacaaaagcattcattattccacaatgctcacttgc

SEQ ID NO: 16650 - DNA, 397 bp, Zea mays
  Clone ID: LIB3151-003-Q1-K1-A9
gacttcataccattaactttatctactttagagcgcataagaacccgatcgacaccatgggggtgttgctcgttgccctcgctctcctggatctcgctgttagcgccacctacacgcatacaagcggcggctgcggctgccagccaccgccgccggttcatctaccgccgtcggtgcatctgccacctccagatcacctgccaccttcggtgcatctcccaccgtcggtacacctgccgacggctgtccacctgccaccgacgatccatgtgccgccgtcggttcatctgtcgccgccaccatgccactaccctactcaaccgccccggcctcaggctcattcccagccacacccatgcccgtgccaacagtcttatacaagcccgtgccaactgca

SEQ ID NO: 16651 - DNA, 390 bp, Zea mays
  Clone ID: LIB3151-003-Q1-K1-B10
attttgagcattcagaaacacaccaagcgaagcgcactatcaacgacctaacaacaatggctaccaagatattagccctccttgcgcttcttgccctttttgtgagcgcaacaaatgcgttcattattccacaatgctcacttgctcctagtgccattattccacagttcctcccaccagttacttcaatgggcttcgaacacctagctgtgcaagccaacatgcaacaacaagcgcttgcggcgagcgtcttacaacaaccaattgcccaattgcaacaacaatccttgccacatctaacaatacaagccatcacaacgcaacagcaacaacagttcctaccagcactgagccacctagccatggtgaaccctgccgcctacttgcaag

SEQ ID NO: 16652 - DNA, 346 bp, Zea mays
  Clone ID: LIB3151-003-Q1-K1-B11
cttccgaagacatcactctcgatgatcaaagctatgacacaaaccacaacgcgaaagccaagagtgacgacaaggtaggtatcctgtcacaccatcaaagtttcatcttcagcacaaagcaactctattactgacagacaccacccgatactaaccgcatacggaatatattcctcctccgtttctatctcttccacgtgggaagcacatctcattgaagactcctactgatacaaccattattatacaagtccagaactcggtatccagtgataacgggaaagccaacattccggaccttagaacaatttgcaccagatcagcaacagctgattattgctgggaa

SEQ ID NO: 16653 - DNA, 432 bp, Zea mays
  Clone ID: LIB3151-003-Q1-K1-B12
gcagcagcagcctctcttttcttcatctggggattggaccttcgggtttgtggttgggttaagcaattcgccaaaatccaaaacgaaaagggtcaaaacatggatctttatatccccagaaaatgttcggccactaataggctgatcacctcgaaggatcatgcttctgtccagattaatgttgggcatttggatgagcttggcagatacactggaactttctccacttttgctctttgtggctttgtccgtgcccagggtgatgctgacagtgcacttgacaggctttggcagaagaagaaagctgaagtccgacagcagtagtgggaggtggattgctttttactaattgcttggtctctgaattttggagggaaaatggtgtttttttttaatcaatgacccttaaggtctagctttggtttttaaaat

SEQ ID NO: 16654 - DNA, 375 bp, Zea mays
  unsure at all n locations
  Clone ID: LIB3151-003-Q1-K1-B2
cctagattgggcaagatgctcggcggcctgtacggcgacctcccgccgccgtcgtcggccggcgatgaagacaaggcctccacggcttccgtttggtccagcgccaccaagatggcgcctcccaccctccggaagccgtccaccaccttcgccccacccccatctattctccggaaccagcacctgcgcccgcccaaagccacctccatccccgctccccccgtcgttgccgccgaacccgccccggccacctccttccagcccgcgttcgtcgctgtccagtccaccgtgctggaggagtacgaccctgccaggcccaacgactacgaggactanccgtaggacaagctcncgcgcgccaaggaggctgagctg

SEQ ID NO: 16655 - DNA, 400 bp, Zea mays
  Clone ID: LIB3151-003-Q1-K1-B3
tcgcgccacagccaacaccacccgccgaggcgacgcgacagccgccaggaggaaggaataaactcactgtctgccagtgaagggggagaagtgtactgctccgtcgaccagtgcgcgcaccgtccggcagggctgctcatctcgtcgacgaccagtggattaatcggcatggcggctctggccacgttgcagctagtcgcaacgcccgccggcctgggcgtcccggacgcgtccacgttccgccgaggcgccacgcacggcctgaggggggcccgggcgtcggcggcggtggacacgcttaacatgcggaccagcgcgcgcgctgcgcccaggcaccagcagcaggcgcgccgtggtgtcaggttcccgtcgctcgacgtgtgcgccatcgccggcatga

SEQ ID NO: 16656 - DNA, 396 bp, Zea mays
  unsure at all n locations
  Clone ID: LIB3151-003-Q1-K1-B4
acgcataaatacaccaagcgaagctacctagcaacgacttaacaacaatggctaccaagatattagccgtccttgcgcttcttgccctttttgtgagcgcaacaaatgcgttcattattccacaatgctcacttgctcctagtgccattataccacagttcctccgaccagttactttaatgggcttcgaacacctagctgtgcaagcctacaggctacaacaagcgcttgcggtgagcgtcttacaacaaccaattaaccaattgcaacaacaatccttggcacatctaaccatacaaaccatcgtaacacaacagcaacaacagttcctaccagcactgagccaactggatgtggtgaaccctgtcgcctactngcaacagcaggtgcttgcat

SEQ ID NO: 16657 - DNA, 285 bp, Zea mays
  Clone ID: LIB3151-003-Q1-K1-B6
acgtctagatcgagagcgggcgcccttgtactgttaccttccgccgtcgtcttttgtcggaaggcaactccacttatctatatagaaaatgaaactcgccaccacccatgactcatatgaaagcctctgtgaggcattatcacggttaagccttatcacaactacctagcttaatggatcccttaataagggaaagtgcgagtgcaaactcattccacattccattccagatcagacgtacccagaatatgcatggcatccatgtaagcagacaacacttctgaa

SEQ ID NO: 16658 - DNA, 408 bp, Zea mays
  Clone ID: LIB3151-003-Q1-K1-B7
attggagaactcgacaccatgaaggtgctgatcgttgcccttgctctcctggcgctcgctgcgagcgccgcctccagtacaagcggcggctgtggctgccagacaccaccgtttcatctaccgcctccgttctatatgccgcctccgttctatctgccgccgcagcagcagccgcagccatggcaataccccactcaaccaccgcagctaagcccgtgccagcagttcggatcctgcggcgtcggcagcgtcggcagcccgttcctgggccagtgcgtcgagttcctgaggcaccagtgcagcccggcggcgacgccctacggctcgccacagtgccaggcgctgcagcagcagtgctgccaccagatcaggcaggtggagccgctgcacccggaccaggcgacatac

SEQ ID NO: 16659 - DNA, 455 bp, Zea mays
  Clone ID: LIB3151-003-Q1-K1-B8
tattttcagcattcagaaacacaccaagcgaagcgcactagcaacaacctaacaacaatggctaccaagatattagccctccttgcgcttcttgcccttttagtgagcgcaacaaatgcgttcattattccacagtgctcacttgctcctagtgccattattccacagttcctcccaccagttacttcaatgggcttcgaacatccagccgtgcaagcctacaggctacaactagcgcttgcggcgagcgtcttacaacaaccaattgcccaattgcaacaacaatccttggcacatctaaacctacaaaccatcgcaacgcaacagcaacaacagtttctgccatcactgagccacctagccgtggtgaaccctgtcgcctacttgcaacagcagctacttgcatccaacccacttgctctggcgaacgtagctgcataccagcaacaacaacg

SEQ ID NO: 16660 - DNA, 410 bp, Zea mays
  Clone ID: LIB3151-003-Q1-K1-B9
cagcctagcaattagctcatcgactccagattggagaactcgacaccatgaaggtgctgagcgttgcccttgctctcctggcgctcgctgcaagcgccgcctccagtacaagcggcggatgtggctgccagacaccaccgtttcatctaccgcctccgttctatatgccgcctccgttctatctgccgccgcagcagcagccgcagccatggcaataccccactcaaccaccgcagctgatcccgtgccagcagttcggatcctgcggcgtcggcagcgtcggcagcccgttcctgggccagtgcgtctagttcctgaggcaccagtgcagaccggcggcgactccctacgggtcgccacagtgccaggcgctgcagcagcagtgctgacaccagatcaggcaggtggag

SEQ ID NO: 16661 - DNA, 253 bp, Zea mays
  Clone ID: LIB3151-003-Q1-K1-C1
gaccattagctttatctactccagagcgcaaaaaaacccgatcgacaccatgaggggggggctcggtggccttgctcttctgggttttggttggagcgccaacttcacccataccaacggggggtggcggttgcaaccaaccgccgccggttaattttaccgccgccggggcattggcaacttcgggttaaccggcaacttcggggcattttccaccggcggtgcaactggcggcggcgggtcaactggcaac

SEQ ID NO: 16662 - DNA, 292 bp, Zea mays
  Clone ID: LIB3151-003-Q1-K1-C10
agccttccgacacaattacatctatgcattctacaaattataacaacaagctcgacacccaaaaggtggggctctttggcctccccatacatgatatcataataaacgcattctacaagcatacaatcagacagatgacccttacaaccacccacaaccagatatctatagacaacagatcatctaccagctacgaagacctaacacctacttttcatctgaaaccaccagtccaattgtcggcgacaaccaatctttcactgaactatcatgaacgcaacaatgttcatat

SEQ ID NO: 16663 - DNA, 351 bp, Zea mays
  Clone ID: LIB3151-003-Q1-K1-C11
aaacccgggtcgacccgcgccttccgattgatagcagatatgacaacactgaacttggctctgaagcaacacaccccctccaatgggggcctaaatactctgcgttatgggcaatgctcagtattttatccaccaaagttactccggcctgaccaagccccttgagaaacctataacatcactcgccatggaaagaagggataagaaactcttctagaacctctcttccttccattggaaccatctatgctacattacgcaaaaatggacacctgtgtacaataaccaaattgccggtctcatctacgatctatgatacttaaaacaatatatgctcttttctacccacag

SEQ ID NO: 16664 - DNA, 355 bp, Zea mays
  Clone ID: LIB3151-003-Q1-K1-C12
cccacacatacactccacaggggtctggtttatgaacttcaggccccaatctgcttcgcagtccttattaagccacctgcgtatcaaatcattcttatgaccactacatcaactctgtttatcaccagccctctactaagccttactctgaccttaattccacctatcctgcatcttcagaacattataaccaagtagcatattctcatctcaatctatcctacccattaaagaggatacactatgacactgcaggctttgaggatgtcgaatattcgatggatatggaaattgattttgtccaatctaggaacctgtaatacaaatgtttgcagcacctgttttatttgaataa

SEQ ID NO: 16665 - DNA, 412 bp, Zea mays
  Clone ID: LIB3151-003-Q1-K1-C2
attgagaccaacaagcaacatagaaagtggaatccagtagcaacaatagagcaacaatggcgaccaagatattttccctccttatgctccttgctctttctgcatgtgttgctaacgcgacaattttccctcaatgctcacaagctcctatagcttcccttcttcccccataccttccatcaatgatagcttcagtatgtgaaaacccagctcttcaaccctataggctccaacaagcaatcgcagcaagcaacatacctttatcacccttgtttcaacaatcgccagccctatctttggtgcagtcattggtacaaaccatcagggcacagcagctgcagcaactcgtgctacctgtgatcaaccaagtagctctggcaaacctttcttcctactctcagcaacaacaatt

SEQ ID NO: 16666 - DNA, 117 bp, Zea mays
  Clone ID: LIB3151-003-Q1-K1-C3
gaccattagctttatgtactctacagcgcttaacatctcgatcgacaccatgaggatgcggggtaggagccctagctctcctggcttttgcttgcaacgccaattacacgcatacaa

SEQ ID NO: 16667 - DNA, 341 bp, Zea mays
  Clone ID: LIB3151-003-Q1-K1-C4
cggcttgcgacaacccaagtatacaaccgtacaggctccggcaggtaatagaagctggcatcttacgtttatcgcccttgctgctagagctgttatggggactattacagcacatagcttaggagcatctattggtacaatacatcaggggacaatatcaacaacagcgtgtgctagctgagatagctgactactttaagcatccgcgattcattacattcaaccaactagctgcatagaactatgattcttatttgtaacaccatcatctaccatacagccagctatatgttggctacattcagcgattcataacattcaggcacatgacagactagaac

SEQ ID NO: 16668 - DNA, 396 bp, Zea mays
  unsure at all n locations
  Clone ID: LIB3151-003-Q1-K1-C5
gaccattagctttatctactccagagcgcagaagaacccgatcgacaccatgagggtgttgctcgttgccctcgctctcctggctctcgctgcgagcgccacctccacgcatacaagcggcggctgcggctgccagccaccgccgccggttcatctaccgccgccggtgcatctgccacctccggttcacctgccacctccggtgcatctcccaccgccggtccacctgccgccgccggtccacctgccaccgccggtccatgtgccgccgccggttcatctgccgccgccaccatgccactaccctactcaaccgccccggcctcagcctcatccccagccacacccatgcccgtgccaacagccgcatncaagcccgtgcagctgcaggaacct

SEQ ID NO: 16669 - DNA, 440 bp, Zea mays
  Clone ID: LIB3151-003-Q1-K1-C6
ccggaacggaaggcccggcgccgaccgacgcgttcggacgggggaggcacatcgaaagccgattgccatgctgctcatgcgagaagcggtcgggaagagcaccttgtccgtgcttctggtccttcactgggccctattgaatcataacacgacagttttgcatcaatgctcacaagctcctatagctgaccttgttcctgcataccttccatcaatgatagctgcagtatgtgagaacccagctattcaaccctataggctccaacaagcaatcgcagcaagcaacatgcctttatcacccttggttgaacaatcgccagccctatctttggagcagtcattggtacaaaccatcacggcacagcagctgcaacaactcgtgctacctgtgatcaaccaagaagctctggcaaacctttctccctactctcagcaacaac

SEQ ID NO: 16670 - DNA, 407 bp, Zea mays
  Clone ID: LIB3151-003-Q1-K1-C7
aggcaatcgcagcaggcatcttacctttatcacccttgttcctccaacaaccgtcagccgtattacagcagttacctttggtgcatttgttggcacaaaacatcaaggcacaacaactacaacaacttgtgctaggaaaccttgctgcctactctcagcaacagcagtttcttccattcaaccaactggctgcattgaactctgctgcttatttgcaacaacaactaccattcagtcagctagctgctgcctacccccagcaatttcttccattcaaccaactggcagcattgaactctgctgcttatttacaacagcaacagctaccaccattcagccagctagctgatgtgagccctgttgcctttcttgacacaaacaacagttgttgccgttctacctgcacg

SEQ ID NO: 16671 - DNA, 169 bp, Zea mays
  Clone ID: LIB3151-003-Q1-K1-C8
cgtgcgtgtgaaatcacaagcacaccacgcgtagcgcactagcagcgtcctagcaactgtgggtagcaagatattagccttgcttgcgcttctagccctagcactgatgcgcaccaaatgctttcatgcttctatagtgctcactcgatcctagtgccatatattccac

SEQ ID NO: 16672 - DNA, 441 bp, Zea mays
  Clone ID: LIB3151-003-Q1-K1-C9
cttgagaccattagctttatctactccatagcgcagaagaacccgatcgacaccatgagggggttgctcgttgccctcgctctcctggctctcgctgcgagcgccacctccacgcatacaagcggcggctgcggctgccagccaccgccgccggttcatctaccgccgccggtgcatctgccacctccggttcacctgccacctccggtgcatctcccaccgccggtccacctgccgccgccggtccacctgccaccgccggtccatgtgccgccgccggttcatctgccgccgccaccatgccactaccctactcaaccgccccggcctcagcctcatccccagccacacccatgcccgtgccaacagccgcatccaagcccgtgccagctgcagggaacctgcggcgttggcagcaccccgatcctgggccagtgcgtc

SEQ ID NO: 16673 - DNA, 312 bp, Zea mays
  Clone ID: LIB3151-003-Q1-K1-D1
ggggctctataccattaactttatctactccagagcgcaaaacaacccgatcgacaccatgagggtgttgctcgttgccctagctctcctggctctcgctgcgagcgccacctccactcatacaagcggaggctgacgatgacagccaccgccggctggtgatataccggcgacggtgcatatgccacctccggttcagctgccatatccggagcatgtgccaccggcggtccacctgtcaccgccggtacacctgccaccgtcggaccatgtgccgtcgacggatcatgtgacgtcgtaaccatgccacta

SEQ ID NO: 16674 - DNA, 233 bp, Zea mays
  Clone ID: LIB3151-003-Q1-K1-D10
acaaaattttaagcaagaattccttatttctccgatgtccatcttcgaatgcgagcggagtgccctaatagccatggaagccaaaacctgcttcgccattgccagcgaccgaaacctcggggttcaactccaaacaatcgccaccgatttccaaaggatttataaagtccacgatggctttttcctgggtctttccggcttggcaaccgatgctaaaaccttggttcaaaggc

SEQ ID NO: 16675 - DNA, 270 bp, Zea mays
  Clone ID: LIB3151-003-Q1-K1-D11
acgcccacgcttaccaccacgcgtacccccacttttaccgccacgcctcccggcctttcaattcgggttaatttaaaacactaaaaagcctttatttgctatcttccaacttgatttcttgttcattgtatccaatttacagaattccctcctgacccacatttaaaaaattaaaatccttgctttctgacttaacaattggtcttctacacccataagaagttgaaaaaatgcttaagccccttttattacttggcccaatgaccttga

SEQ ID NO: 16676 - DNA, 435 bp, Zea mays
  Clone ID: LIB3151-003-Q1-K1-D12
cccacgcgtccgaaattttatagcaagacttcttatttctccgatgtcgatcttcgaatgggacgggagtgccctaataaccctgggagggaaagaactggtctaaacattgtcagcgatcggagactcctagatcagctgcaaactattgccagaaaagcattgggttaggctttaagacacccagagaggccattgaaggaacatatattgataagaaatgcccatttactggcactgttgctattagaggccgtatccttgccggtacttgccatagtgcagaaatggtaaggactattatcgctcgaaggaactaccttcactacatcaagaaatacgcaagattcgagaaatggcacagcagtatcccagctcatatatccccctgctttcgtgtaaaagagggagatcatgttataatcgggcaatgca

SEQ ID NO: 16677 - DNA, 382 bp, Zea mays
  Clone ID: LIB3151-003-Q1-K1-D2
gccaccatttcaaaacgaggacgagcccgctgctggtgctgtcccttcccgcgcgccgccggcgcctggccacctgctccgcgtcggatctagagcgagcgagcgtcacccgcggctctcgtcgccgtcagcgtcacccacccgtcgtcttcttgcctccgaagtcaaatcttccaccccatatcaccacagagaattccaacccatccacttccgcggcctgctgccgtccgctttatttaaaccgtccgccacggcgaccccgacgactccccccgcggcctctcccgccagctccccctcacccccgaccatccacgcctccaagcgccgccgccgcgagaccgaagccacggtgaacacgccgctgaggggtggcagg

SEQ ID NO: 16678 - DNA, 342 bp, Zea mays
  Clone ID: LIB3151-003-Q1-K1-D3
gcataccaacaacaacaacaattgcaacagtttctgccagcgctcagtcaactagccatggtgaaccctgccgcctacctacaacagcaacaactgctttcatctagccctctcgttgtgggtaatgcacctacatacctgcaacaacaattgctgcaacagattgtaccagctctgactcagctagctgtggcaaaccctgctgcctacttgcaacagctgcttccattcaaccaactgactgtgtcgaactctgctgcgtacctacaacagcgacaacagttacttaatccactagcagtgcctaacccattggtcactgccttcctacagcagcaacaa

SEQ ID NO: 16679 - DNA, 389 bp, Zea mays
  Clone ID: LIB3151-003-Q1-K1-D4
gaaaaactagaaaaggctcctcccgaccgcaacgcccctcatctccctcgaccccgacatggccgacccgatggcgcccaaggcggagaagaagccagcggagaagaagccggcggccgaggagaaggcggagaagacgaccgcagggaagaagcccaaggccgagaagcggctgcccgcgtccaagtcctccggcaaggagggcggcgagaagaaggggaagaagaaggccaagaagagcgtggagacctacaagatctacatcttcaaggtgctgaagcaggtgcaccccgacatcggcatatcctccaaggccatgtccatcatgaactccttcatcaacgacatctttgagaagctggccggcgaggccgccaagctggcgcggt

SEQ ID NO: 16680 - DNA, 65 bp, Zea mays
  Clone ID: LIB3151-003-Q1-K1-D5
ggggctttataccattaactttatctactcccgagcgcaaaagaacccgatccacaccgtgaggg

SEQ ID NO: 16681 - DNA, 357 bp, Zea mays
  Clone ID: LIB3151-003-Q1-K1-D6
acacacacttgagccccacccgtgccgctcccgccccgcatcccttagcctgacgctggcgccgcctgatggccatgtacgccgccccagaacgccgcgtggacatatgcggcggccgcgtggagggcgcgtgcaccgactacttgctcgacacccacgccgcgtaacccaccgtcccgacgctagtccagaggtgcgccccggcgtgcgccgactgggggaaagacggccgcttactggcgctggactggtgcgactccacccctgagctgtccaggctcgcgcgggcctcatttgcgcttcaccgccgacgggctgccggtcatagaggagataccaggcgacaaagggtgctat

SEQ ID NO: 16682 - DNA, 296 bp, Zea mays
  Clone ID: LIB3151-003-Q1-K1-D7
caagtagcgacagctcgacaaagatttgtgagagtgatccggcgctgagaagagatggctgagatcgccgcatccgccgcggcggcggcggcgctgtgcttcgcggtcctggtggccgtggccgtctgccaaggctaggtcaagcggtagaggctcagggacctgcagtgctggcaggaggtgcaggagagcacgctggacgcgtgccgccagagcctcgaccgttagataaccggaggtggtgtcagctgtcctgtccggtggggcaccgggctccggatgctgtgctgccagca

SEQ ID NO: 16683 - DNA, 356 bp, Zea mays
  Clone ID: LIB3151-003-Q1-K1-D8
ccaggcgacccgtacaaaccatatataccaacaccacctcgcctgccatctcagtagccttcgccacgaagagcatggatcatgttagcctactggggaaagtacaatgatgagctcatcaagaatgctgcctacattggcaccactggcaagggtattcttgctgctgatgagtccactggcaccattggcaagcgcctttccagcatcaatgtcgagaacgttgaggagaaccaccatgccctccgtgagctcctattctgctgacctggtgctctccagtacatcagcggtgtgatcctgttcgaggagaccctgtaccagaagaccaaggatggcaagccttttgttgatgt

SEQ ID NO: 16684 - DNA, 436 bp, Zea mays
  Clone ID: LIB3151-003-Q1-K1-D9
gggtcttcagaccattagctttatctactccagagcgcagaagaacccgatcgacaccatgagggtgttgctcgttgccctcgctctcctggctctcgctgcgagcgccacctccacgcatacaagcggcggctgcggctgccagccaccgccgccggttcatctaccgccgccggtgcatctgccacctccggttcacctgccacctccggtgcatctcccaccgccggtccacctgccgccgccggtccacctgccaccgccggtccatgtgccgccgccggttcatctgccgccgccaccatgccactaccctactcaaccgccccggcctcagcctcatccccagccacacccatgcccgtgccaacagccgcatccaagcccgtgccagctgcagggaacctgcggcgttggcagcaccccgatcctgggc

SEQ ID NO: 16685 - DNA, 409 bp, Zea mays
  Clone ID: LIB3151-003-Q1-K1-E1
catcaagcaacatataaagcggaatacagtatcaacaatagagccacactggcggccaagatattgggcatccttatgctccttgctctgtctgcatgtgttgctaacgcgaccatttttcctcaatgcttccaagcttcttatgcctgccttcttcccccaatcctttccatcatggccccttcaagatggggaaaaccaatccttttaccctataagctccaacaagcaatcgcaacaagcaacttacctttatcacccttggtttttcaacaatcaccacccttatttttgggcaatcattggtacaaaccataagggagcaacatttgaaaaaacttatgttcccagtgaataaacaaattgttttggaaaacctttttccctacttttcaacaacaaccatttt

SEQ ID NO: 16686 - DNA, 388 bp, Zea mays
  Clone ID: LIB3151-003-Q1-K1-E10
gctgtgtctttgcagagtatcgggtagtcctttcaatcctcagccatggcggaacagacggagaaagcatttctcaaacaacccaaggtgtttttaagctctaaaaaaaatgggaaaggaaagagacctggaaagggcgggaatcgcttctggaaaagcattgggttaggctttaagacacccagagaggccattgaaggaacatatattgataagaaatgcccatttactggcactgtttctattagaggccgtatccttgccggtacttgccatagtgcaaaaatggtaaggactattatcgtccgaaggaactaccttcactacatcaagaaataccaaagatacgagaaaaggcacagcaatatcccagctcatatatccccct

SEQ ID NO: 16687 - DNA, 260 bp, Zea mays
  Clone ID: LIB3151-003-Q1-K1-E11
tcgatccaagtcacatactaagagtgccaagctatccgcgaaattccaagctggaaagaaatgggagaaagcttcccaggatccaaacaagccaaaaagaccccctagagccttctttgctttcatagaagagttccgtgagcaatacaagaaggatcaccctaaaaacaaatcccctgcgggtgtcggaaaagcttgtggagattaattgaagagcttgtcttaaactaaaaaagcaccttatgtatctaaagcataaa

SEQ ID NO: 16688 - DNA, 382 bp, Zea mays
  unsure at all n locations
  Clone ID: LIB3151-003-Q1-K1-E12
ctaaatcatgtggagctcaaaaggggatcggttcatccaagaccgtcgatctgccactacgccccggagtggggacttgcaccatccagctattatgttcctttcttccccatcatcggtatcccttgatgactatctcagtggattagagacagtgtaatagcagtaattaatgtcataagtatttgtgagaaagacgtgtgatatatatatttatatagttcttcgctgctatatatataataatatagtttgtgagtgcagactcgtaagattttatgtaatttctattaattatgtgtattaattaaaagtggagagtttgatgtaatatctttgtttcttgtttaatactagcatatagcagtttatagtaaanaaa

SEQ ID NO: 16689 - DNA, 435 bp, Zea mays
  Clone ID: LIB3151-003-Q1-K1-E2
caacaagcaacatagaaagtggaatccagtagcaacaatagagcaacaatggcgaccaagatattgtccctccttatgctccttgctctttctgcatgtgttgctaacgcgacaattttccctcaatgctcacaagctcctatagcttcccttcttcccccataccttccatcaatgatagcttcagtatgtgaaaacccagctcttcaaccctataggctccaacaagcaatcgcagcaagcaacatacctttatcacccttgtttcaacaatcgccagccctatctttggtgcagtcattggtacaaaccatcagggcacagcagctgcagcaactcgtgctacctgtgatcaaccaagtagctctggcaaacctttctccctactctcagcaacaacaatttcttccattcaaccaactgtctacattgaac

SEQ ID NO: 16690 - DNA, 460 bp, Zea mays
  Clone ID: LIB3151-003-Q1-K1-E4
gggtcttcagaccattagctttatctactccagagcgcagaagaacccgatcgacaccatgagggtgttgctcgttgccctcgctctcctggctctcgctgcgagcgccacctccacgcatacaagcggcggctgcggctgccagccaccgccgccggttcatctaccgccgccggtgcatctgccacctccggttcacctgccacctccggtgcatctcccaccgccggtccacctgccgccgccggtccacctgccaccgccggtccatgtgccgccgccggttcatctgccgccgtcaccatgccactaccctactcaaccgtcccggcctcagcctcatccccagccacacccatgcccgtgccaacagccgcatccaagcccgtgccacctgcaaggaacctgcggcgttggcagcaccccgatcctggccagtgcgtcgagtttctgaggcatc

SEQ ID NO: 16691 - DNA, 310 bp, Zea mays
  Clone ID: LIB3151-003-Q1-K1-E5
cccacgcgtccgtaatgctaccagcccacaaaaccaaccttccttccctccgttccatctcgcggcgtctgtataggtatagccaaccgtccaacccattgctactccacaccgatgcgatgctcccatcgccgccggcgacctcgccggcgcggctgcacaagctggtgacctcgcagcaggacccgctcctcgcgctggagctcgtcaacgtcacctccccgactaccacgccgcaccctgccacgctccactctctcctgctccgcctcgcccgccgccgcgaccacctaccccacgcgctcgcgct

SEQ ID NO: 16692 - DNA, 336 bp, Zea mays
  Clone ID: LIB3151-003-Q1-K1-E6
gcggagaccaacatgcatcatagaaagtggaatccagtagcaacaatagagcaacaatggagaccaagatattttccctccttatgctccttgctctttctacatgtgctgctaacgcgacaattttccctcaatgctcacaagctcctatagcttccctatttcccccataccttacatcaattatagctgcagtatgtgaaaacccagctcttaagccatataggcttcaacaagcaatcgcagcacgcatcatacctttatcgcacttgttgcgacaacatatcttagccctatctttggtgcagacattggtgcaaaccatcatggcacaac

SEQ ID NO: 16693 - DNA, 305 bp, Zea mays
  Clone ID: LIB3151-003-Q1-K1-E7
caattagctcatcgactccagattggagaactcgacaccatgaaggtgctgatcgttgcgcttgctctcctggcgctcgctgcgagcgccgcctccagtacaagcggcggctgtggctgccagacaccaccgtttcatctaccgccttcgttctatatgccgcctccgttctatctgccgccgcagcagcagccgcagtcatggcaataccccactcaaccaccgcagctaagcccgtgccaacagttcggatcctgcggcgtccgcagcgtctgcagcccgttcctggggcagcgcgttgagtt

SEQ ID NO: 16694 - DNA, 451 bp, Zea mays
  Clone ID: LIB3151-003-Q1-K1-E8
tctatatagaaacacaccaagtctaaacgcactagcaacaacctaacaacaatggctaccaagatattagccctccttgcgcttcttgcccttttagtgagcgcaacaaatgcgttcattattccacagtgctcacttgctcctagtgccattattccacagttcctcccaccagttacttcaatgggcttcgaacatccagccgtgcaagcctacaggctacaactagcgcttgcggcgagcgtcttacaacaaccaattgcccaattgcaacaacaatccttggcacatctaaacctacaaaccatcgcaacgcaacagcaacaacagtttctgccatcactgagccacctagccgtggtgaaccctgtcgcctacttgcaacagcagctacttgcatccaacccacttgctctggcgaacgtagctgcataccagcaacaacaacgtc

SEQ ID NO: 16695 - DNA, 370 bp, Zea mays
  Clone ID: LIB3151-003-Q1-K1-F1
atttagaccaactagcaacatagaaagcacaatagtgtaccaacaatggcagccaaaatattttgcctccttatgctccttggtatttctgcaagtgctgctacggcgaccattttcccgcaatgctcacaagctcctatagcttcccttcttcccccgtacctctcaccagcggtgtcttcggtatgtgaaaacccaattcttcaaccctacaggatccaacaggcaatcgcagctggcatcttacctttatcacccttgttcctccaacaatcatcagccctattacagcagttacctttggtgcatttattggcacaaaacatcagggcacaacaactacaacaacttgtgctagcaaaccttgctg

SEQ ID NO: 16696 - DNA, 432 bp, Zea mays
  unsure at all n locations
  Clone ID: LIB3151-003-Q1-K1-F10
aattttcacctccggtggtttggtaaaggtcaaggttctcttttgcagcacagaaaatgggcgtacatcttttgttcggcaactagaaccagattggcatattgacacaaatcctgaaatagtttctcagttagctaggttcatcaaatatcaacttcacgtttctcctaccaggcctgaaaggactgcgcctaatgtcttcagttgtccatccttggaacacttctttggatgcgtttgacgcgtgatccggtaaaaagatgcaaatatgtttaaaagttgttctttactaccctttggtcattatgtgcgaccctttacattttctttctttaggcacccttgtgctgatatgtcagntttttaggataatggagaagttatttgtttgaaatctgtgtagggttcacatttgaacttttttgaaaccgg

SEQ ID NO: 16697 - DNA, 245 bp, Zea mays
  Clone ID: LIB3151-003-Q1-K1-F11
atcatagtttgctttatacaaaatctggcaactactcatctacatttgtttacatggacgcgggtattcagctctgccgagggtttccgataattgtgggcacttaagcgttatcgggtcgaagaaaaaagctagcatgccgtgcatattattaagagggcttgggtgctggggttcaagagttgcaatccactccattcaatgaactgcccaaataaaaggtaaaagaattttttctggtctta

SEQ ID NO: 16698 - DNA, 402 bp, Zea mays
  Clone ID: LIB3151-003-Q1-K1-F12
ataagatgtatctccagttctacataaatgagaatggtgacaaagtttacaccactaagggggaatcaccacatgggctgcctactcagtctgctcatccagctcgtttctcccccgatgacaaatactcaagacaaagagttcttttgaagaagcgtttcggattattgcctacccagcagtcgccactaaaatactgaaacatttcatgtaatgcatgctgtacttttatatagcatacttggtgtctttgtatgtgtaatgaagttcctcttcggctcatatctgagtccctttatgatgacgatggtgatttaaaattacaaacagctaagtaactttagtattttgtttgttccaaaaaaaaaaaaaataaaattaaatttttatttataatttatt

SEQ ID NO: 16699 - DNA, 377 bp, Zea mays
  Clone ID: LIB3151-003-Q1-K1-F5
gagtcttcagaccattagcttgatctactccagagcgccgaagaaccccatcgacaccatgaggctgatgctcgttgccctcgctctcctggctctcgctgcgagcgccacctccacgcatacaagcggcggctgcggttgccatccaccgccgtcggttcatctaccgccgtcggtgcatctgccacctcccggttcacctgccacctccggtgcatctcccaccgccggtccacctgccgacgccggtccacctgccaccgccggtacatgtgccgccgtcggttcatctgccatgtgccaccatgccactaccctactcaaccgccccggcctcagcctcatcctgagtcacacccatgcccgtgccaacagac

SEQ ID NO: 16700 - DNA, 441 bp, Zea mays
  unsure at all n locations
  Clone ID: LIB3151-003-Q1-K1-F6
acggcaagggctttgcagcactggcagcagccaatcccatgtccagcatagttgcggagctccaggcttcactgcgggactcggaagccgtggcgattctagccgcgcacgccagggacgcgatcctcgaggtcggcccacgccaagccgcgcttctgaacggcgctgccttcggcagggccgtggagggtgcaggtgcagagagccagtggttccagctgggccccgaggaagtgttcttcctttgccatgccctgaagtgcctcagggttgagtcgaataacaagacgcggattggtgcgccggagctgtggggtctcttggcctccggctcagagcaattcccggagatgtacagggcgtatcaacacctcaggctgaagaactgggttgtaaggtcgggactgcagtacggggcagactntgttgttaccgtcatca

SEQ ID NO: 16701 - DNA, 442 bp, Zea mays
  Clone ID: LIB3151-003-Q1-K1-F7
gacgaaatctgacccgggccacactccgctgctccgccatggcgatccgctccaaggcctggatctcgctgctgctcgcgctgaccgtcgctctctccgcccgggcggaggaggagcccgccgccgcggcggagggcgaggccgtgctcaccctcgacgtcgacagcttcgacgaggccgtcgccaagcaccccttcatggtcgtcgagttctacgccccctggtgtgggcactgcaagaaacttgctccagagtatgagaatgcggccaaggcacttagcaagcatgacccaccgattgctctcgctaaggttgatgctaacgaggagaagaacaggccgcttgctaccaagtacgagatccaagggttcccaaccatcaagatcttcagggaccagtggaagaacattcaggaatacaagggcccctagggaggctgatg

SEQ ID NO: 16702 - DNA, 458 bp, Zea mays
  Clone ID: LIB3151-003-Q1-K1-F8
gagcattcagaaacacaccaagcgaagctacctagcaacgacttaacaacaatggctaccaagatattagccctccttgcgcttcttgccctttttgtgagcgcaacaaatgcgttcattattccacaatgctcacttgctcctagtgccattataccacagttcctccgaccagttacttcaatgggcttcgaacacctagctgtgcaagcctacaggctacaacaagcgcttgcggcgagcgtcttacaacaaccaattaaccaattgcaacaacaatccttggcacatctaaccatacaaaccatcgcaacacaacagcaacaacagttcctaccagcactgagccaactagatgtggtgaaccctgtcgcctacttgcaacagcaggtgcttgcatccaacccacttgctctggcaaacgtagctgcataccaacaacaacaacaattgaacag

SEQ ID NO: 16703 - DNA, 357 bp, Zea mays
  Clone ID: LIB3151-003-Q1-K1-F9
ggaaaccggccgcgcccgccgtccgactgcatattcttattcatacttagtttcttctgtcccatttggccctctgcggagtgtttactctgctgcggggtccagatacttgagctcactccgccgccattgagtcgaagaagaaagcaggcaaacataaccgataagatgagttttcgaaggctttgaccggcagaaacaccggttaccgatcaaatgtcatgttgatggaagggtttttctcattgtgagcttcttctgcatcttgtgtgccaattcacctctgttcttttggttgcctaaattgctgctttatgttttgtggcatcgttggattaagatttgtttgaacattta

SEQ ID NO: 16704 - DNA, 427 bp, Zea mays
  unsure at all n locations
  Clone ID: LIB3151-003-Q1-K1-G10
aaaaaaaatacatgcatttcaatactaggacatccttccactttgaaaaacgattgtctgggatcttattggattaaattcagtttctagtagtaaaagtattatggaggccattgtactaggagttagattgcattttgctctcgaaaaacagaaaaattaatctctgtatgttagatcaaaaagcaaataggtcttttttgttaaaaatttcatctatttctactattaaaaattagtatgccttgtaaaataacacaacaattacacgtggctgtcatgtgttaatataaagagattagttcttaattgtagaaattgatgaattttttaacagaatcatcaatttgcgttttaatttaacgtacaagagttaatntgtttttgttcatttttctaataaaggggagtaaatgtaacttaactc

SEQ ID NO: 16705 - DNA, 205 bp, Zea mays
  Clone ID: LIB3151-003-Q1-K1-G11
aaaaaccggccgacccacacctcggatcaataagctcaatgaaagtcgaagtctttacccacaaatcttcaacgatgacgatcatgaatatttgcatgctgatactcatctatcttactacgggtcctgaaatactacgaccatatttttgattaatggctcgacaagctgcatattagcaacgccttcttatctcatataccta

SEQ ID NO: 16706 - DNA, 356 bp, Zea mays
  Clone ID: LIB3151-003-Q1-K1-G2
cagaccattagctttatctactccagagcgcagaagaacccgatcgacaccatgagggtgttgctcgttgccctcgctctcctggctctcgctgcgagcgccacctccacgcatacaagcggcggctgcggctgccagccaccgccgccggttcatctaccgccgccggtgcatctgccacctccggttcacctgccacctccggtgcatctcccaccgccggtccacctgccgccgccggtccacctgccaccgccggtccatgtgccgccgccggttcatctgccgccgccaccatgccactaccctactcaaccgcccccgcctcagcctcatccccagccacacccatgccc

SEQ ID NO: 16707 - DNA, 345 bp, Zea mays
  unsure at all n locations
  Clone ID: LIB3151-003-Q1-K1-G3
gcaacatagaaagcacaatagtgtaccaacaatggcagccaaaatattttgcctccttatgctccttggtctttctgcaagtgctgctacggcgaccattttcccacaatgctcacaagctcctatagcttcccttcttcccccgtacctctcaccagcggtgtcttcggtatgtgaaaacccaattcttcaaccctataggatccaacaggcaatcgcagctggcatcttacctttatcacccttgttcctccaacaatcatcagccctattacagcagttacctttggtgcatttattggcacanaacatcagggcacaacaactacaacaacttgtgctagc

SEQ ID NO: 16708 - DNA, 340 bp, Zea mays
  unsure at all n locations
  Clone ID: LIB3151-003-Q1-K1-G4
aaccaacacaaattggacgcaagaaatccgatcagaggcccaccaccggggaattaatggcggcctggagtagcacgagtccatcgccgtattatgctggcaggcgtcgccctgctttaagagattatgggtggcagcatcagcgccgggaccttctgtgtgccggggagggacatgccacacaagccgcttaatagctgcacgcttgaccatgccagccggacctgcnggatgcgccacccctacgagcgacggagctgaaagaagatgctgtcgggcgctggcggacatcccggcgtactgacggggcgcggggcttagaatactcatggacagggcg

SEQ ID NO: 16709 - DNA, 313 bp, Zea mays
  Clone ID: LIB3151-003-Q1-K1-G5
attatatatagcgactgccgatcgcaaagaaacccgcttaacaccacgagggtgcggctggatgccttttttatagtggctcttaaaatgaacgtaaccgccaggcatacaaaaaggtgttgatggtgaaagccagggccgccgccacataaaccggcggcggtacatatgccatatcccgttgagctgacacatcaagagcggctgccacggtcggtcctacagacggcgccgatgcacctagggccgaagggacctgtgccggcgccggttcataagccgcgggggcgatgtcactaccctaattaatagc

SEQ ID NO: 16710 - DNA, 423 bp, Zea mays
  Clone ID: LIB3151-003-Q1-K1-G6
gtaggccgcaccggacataacaccggagcgcacgcggggagcccgcgtagagtgccggggcgaccaggccaactaacgccattaaggatgaaggtggcggaggggactcggggttagtgctggcggaccagattgacctgaacagcctggaccagcagttggagcgccatctcacccgcgcctggaccatggagaagcgcaaggtggaggtctacgacggcgctggcgccggcgccaggcacgaccagcatgtcccggagcacgccgagggaggactgggagatcgaccccgacaagcttgtcgtcaaggacgtcatcgaccagggcaccttttgtaacgtccaccgtggcatctactacgctgacgacgtcgcagagaaactacttgattgctgagaggatgggcatagatcagaacatgac

SEQ ID NO: 16711 - DNA, 250 bp, Zea mays
  Clone ID: LIB3151-003-Q1-K1-G7
tgctgcttatttgcagcaacaactattaccatttagccagctagctactgcctactctgggcacaacaacttcttccatttaacccattgggcgcactggacccttggtggttatttgcagcaacaactattaccatttagccaggtagctactggctactctcaacaacaacaacttctttcatttaaccaattggccggactggaccccggtggttatttgcaggagccaatactactaccatttaag

SEQ ID NO: 16712 - DNA, 373 bp, Zea mays
  Clone ID: LIB3151-003-Q1-K1-G8
gggtcttcagaccattagctttatctactccagagcgcagaagaacccgatcgacaccatgagggtgttgctcgttgccctcgctctcctggctctcgctgcgagcgccacctccacgcatacaagcggcggctgcggctgccagccaccgccgccggttcatctaccgccgccggtgcatctgccaccttcggttcacctgccacctccggtgcatctgccaccgccggtccacctgccgtcgccggtccacctgccaccgacggtccatgtgccgccgccggttcatctgccgccgacaccatgccactaccctactcaaccgccccggcctcagacttatccccagccacacccatgcccgtgccaacag

SEQ ID NO: 16713 - DNA, 439 bp, Zea mays
  Clone ID: LIB3151-003-Q1-K1-G9
ccaaatccataatctctgagtcctgtgtttcagttggaaaataccatgtgaaagaaagcatctcctcaactctacagtcaattttcgataaatatggagacatagcagctaactgtcagttggaatcgtcttccatgcgtgcatattatttagagtgcttgtgtgctgtggttcaagagttgcaatccactccattcaatgaactgaccaaatcaaaagtaaaagaaattttttctgttcttaaggatgtagaatctgcaaacattgatgttagttggctgcgtgctctgctcaatgaaatctcagaagccatcaatcttgctagtcaacgacaaacttttgaagccaaaaaagttaagtatgaaggtccgttagagtctgtaaagaacgaactggaatctcgaatggaaaatctatctcagaaagaaaaggaggctgg

SEQ ID NO: 16714 - DNA, 388 bp, Zea mays
  Clone ID: LIB3151-003-Q1-K1-H1
tgctgcttatttgcagcaacaactattaccatttagccagctagctactgcctactctcaacaacaacaacttcttccatttaaccaattggccgcactgaaccctgctgcttatttgcagcaacaactattaccatttagccagctaactactgcctactctcaacaacaacaacttcttccatttaaccaattggccgcactgaaccccgctgcttatttgcagcagcaaatactactaccatttagccagctagctacagcaagccgtgcttcctttttgacacaaccacaggtgctgccgttctaccagcagtttgcggctaaccccgcaaccctcttacaactacaacaatttgtgccctttgtccaacttgctttgacaaac

SEQ ID NO: 16715 - DNA, 329 bp, Zea mays
  Clone ID: LIB3151-003-Q1-K1-H10
ataatataaatattaataaaaaaatttaaatatttttttttttttttttattaatataagaaaaaaaaaagaaattaaaaaaaaataaaaaaataaatataaatattaaaaaaataaataaaaataatatttattaataattaattataataaataaaataaatatattaattaaattaatattataaagaattataataattaaaatatattaaaatatataaattatatataattatataaaaaaataatttataatatttaataatataaatatatatttataaatatatatataaaatataaaatatttaatttaaataattata

SEQ ID NO: 16716 - DNA, 314 bp, Zea mays
  Clone ID: LIB3151-003-Q1-K1-H11
tcgattgttactgaattccttcaacgtgggagtttgttccgattgctccagaggaatcctgcggaattagagaggaaacggcgtgttcatatggctctggatattgcacgaggcatgaattatcttcaccattgcaatccgactattcgtcatggggacctgaagtcttcaaatttcctagttgataaaaatgggactgggaaggttggcgattttggtttgccacgtttaaagcatgcaacgtttttaactactaaaactgggaaaggaacccctaaatggatgggcccggaagttttttccaatgaaccctc

SEQ ID NO: 16717 - DNA, 283 bp, Zea mays
  Clone ID: LIB3151-003-Q1-K1-H12
gcagcattgtcaatggtttacatatcgggagcaccggttatgttcgttgggtgtgggcaggcatatacagacctgaagaaacttaacgtcaaatcaatcgtcaagacactgctgaaatgagtgaatgctttatcaaaaaaccaccccacattttatttgcaatgctcaaccaactcttttgttaatgactttggcctgtgattgcatgtttactttaatggaggtgcattggtcccttgtaactgttaagtttgttttatgtgagatcttaaaattattccta

SEQ ID NO: 16718 - DNA, 425 bp, Zea mays
  Clone ID: LIB3151-003-Q1-K1-H3
aagcaacatagaaagtggaatccagtagcaacaatagagcaacaatggcgaccaagatatgttccctccttatgctccttgctctttctgcatgtgttgctaacgcgacaattttccctcaatgctcacaagctctctattcttcccttcttcccccataccttccatcaatgatagcttcagtatgtgaaaacccagctcttcaaccctataggctccaacaagcaatcgcagcaagcaacatacctttatcacccttgtttcaacaatcgccagccctatctttggtgcagtcattggtacaaaccatcagggcacagcagctgcagcaactcgtgctacctgtgatcaaccaagtagctctggcaaacctttctccctactcttagcaacaacattttctttcattcacccaactgtctaca

SEQ ID NO: 16719 - DNA, 389 bp, Zea mays
  Clone ID: LIB3151-003-Q1-K1-H4
atccagatcagcaaagcggcagtgcgtagagaggatcgtcgaacagaacagcatgaagatggtcatcgttctcgtcgtgtgcctggctctgtcagctgccagcgcctctgcaatgcagatgccctgcccctgcgcggggctgcagggcttgtacggcgctggcgccggcctgacgacgatgatgggcgccggcgggctgtacccctacgcggagtacctgaggcagccgcagtgcagcccgctggcggcggcgccctactacgccgggtgtgggcagacgagcgccatgtaccagccgctccggcaacagtgctgccagcagcagatgaggatgatggacgtgcagtccgtcgcgcagcagctgcagatgatgatgcagcttgagcgtg

SEQ ID NO: 16720 - DNA, 350 bp, Zea mays
  Clone ID: LIB3151-003-Q1-K1-H5
acccaagcaacatataaagtggaatccaggctcaacaatagaccaacaatggcgaccgagattggggccgtccttatgcttgttggtctttccgcatgtgatggtaacgccacaattttgccatcaatgctgacaagctcactataggattccctcttaccccatacctttcattaaagatagcttcagtatgtgaaaacccagctcttcaacgctataggcttcaacaaggcattcgagtaaggcacatagctttatgacccttggttcaacaattgccaagcctatctttggtgcagtcattggtacaaaccatcagggcacagcagcttgagcaactcgtgctacct

SEQ ID NO: 16721 - DNA, 381 bp, Zea mays
  unsure at all n locations
  Clone ID: LIB3151-003-Q1-K1-H6
gccaccatttcaaaacgaggacgagcccgctgctggtgctgtcccttcccgcgcgccggcggggcctggccacctgctccgcgttggatctagagcgagcgagcgtcacccgcggctctcgtcgccgtcagcgtcacccacccgtcgtcttcttgcctccgaagtcaaatcttccaccccatatcaccacagagaattccaacccatccacttccgcggcctgctgccgtccgctttatttaaaccgtccgccacggcgaccccgacgactccccccgcggcctctcccgccagctccccctcacccccgaccatccacgcctncaagcgccgncgtcgcgagaccgaagccacggggaacacgccgctgaggggtggcag

SEQ ID NO: 16722 - DNA, 451 bp, Zea mays
  Clone ID: LIB3151-003-Q1-K1-H7
gcaacatacatagtgaagtacactagcaacatcttagcaccaatgggagccaagatttttgccctccttgccctccttgctctttcagcaagcgctgctacctcgacttttattccacaatgctcacaacaatacctctctccgcgacagccgtgggatttcaatacccaactatacaatcctacatggtacaagaggccatccaagcaagcatcttacggtcattagcattaaccctccaacaaccatatgctctattgcaacagccatccttagtgcatctgtatctccaaagaatcgcggcacaacaactacaacaacagttgctaccaacaatcaatcaagtagttgcagcgaaccttgcttgctaccttcaagaacaacaggttcttccattcatcaactagatggggtgaaccctgctatctacttgcaggcacaacagctacta

SEQ ID NO: 16723 - DNA, 286 bp, Zea mays
  Clone ID: LIB3151-003-Q1-K1-H9
gggagtttgttccgattgctacagaagaatgctgccggagttaaaaagaaaccgggtgttcatattgctcttgaaattgcacgacgcatgaaatatctttcacatttgcatcccaactatggctcattgtaaactgaaatttttaaatcttctatttgattaaaatctgactgcaaaggttgccaattttggtttgtaacggttcaaccatgccacgtttctcactactaagactgggaaaggaaccccttattggatggccccaaaaatttttcccaatgaaccc

SEQ ID NO: 16724 - DNA, 205 bp, Zea mays
  Clone ID: LIB3151-004-Q1-K1-A1
caagtagcgacagctcgacaaagatttgtgagagtgatccggcgctgagtagagatggctaagatcgccgcagccgccgcggcggcggcggcgctgtgcttcgcggccctggtggccgtggccgtctgccaaggcgaggtcgagcggcagaggctcatggacctgcagtgctggcaggaggtccaagagagcccgctcgacgcgt

SEQ ID NO: 16725 - DNA, 329 bp, Zea mays
  unsure at all n locations
  Clone ID: LIB3151-004-Q1-K1-A11
cagcanncagaaacacaccaagcgaagcgcactagcaacaaccgaacaacaagggcnaccaagagaggagcccccccggcgcccacagccacgacagagagcgcaacaaaggcgagcaacangccacagagcacactagcncccagagccaagaaaccacagaagcacccaccagacacancaaggggcagggaacaaccagccgggcaagccnacaggccacaacaagcgcaggcggcgagcgacaaacaacaaccaanggcccaagggcaacaacaanccggggcacaagaaaaccgacaaaccancggaacgcaacagcaacaaca

SEQ ID NO: 16726 - DNA, 433 bp, Zea mays
  Clone ID: LIB3151-004-Q1-K1-A12
gcctcgcgtcgtcgccccacagccacgcgagccttcgccgatccgcgagcgcagatcgccgaagccaggcggcggagagggagctcgaggcggcggaggaaggcgttcgccacagtcgctgatttccctggggaagagatgggtctctcctttgggaagctgttcagccgcctcttcgccaagaaggagatgaggattctcatggtcgggctcgatgccgccggtaagaccaccatcctctacaagctcaagctcggcgagatcgtcaccaccatccccactatcggattcaatgttgaaactgttgagtataagaacattagcttcactgtttgggatgttggtggccaggacaagatcaggcccctgtggaggcactactttcagaacacacagggacttatttttgttgtagacagcaacgacaggggac

SEQ ID NO: 16727 - DNA, 422 bp, Zea mays
  Clone ID: LIB3151-004-Q1-K1-A2
tagcaacatacaaagcacaatactgcaccaacaatggcagccaaaatatttcgcttccttatgctccttggtctttctgcaagtgctgctaccgcaaccattttcccacaatgctcacaagctcctatagcttcctttcttcccccatacctctcaccagcggtgtattcagtatgagaaaacccaattcttcaaccctacaggatccaacaggcaatcgcagcaggcatcttacctttatcacccttgttcctccaacaaccgtcagccctattacagcagttacctttggtgcatttgttggcacaaaacatcaaggcacaacaactacaacaacttgtgctaggaaaccttgctgcctactctcagcaacagcagtttcttccattcaaccaactggctgcattgaactctgctgctta

SEQ ID NO: 16728 - DNA, 149 bp, Zea mays
  Clone ID: LIB3151-004-Q1-K1-A3
ctcctccagcacactgatgtggctatactgctggacaatgaggccatctacgacatctgccgccgatcccttgacattgagcgcccaacctacaccaaccttaacaggcttgtgtcccaagttcatatatcccttattggctcccttaa

SEQ ID NO: 16729 - DNA, 318 bp, Zea mays
  Clone ID: LIB3151-004-Q1-K1-A5
gggtcttcataccattagctttatctactccagagcgcacaagaacccgatcgacaccatgagggtgttgctcgttgccgtcgctctcctggctctcgctgcgagcgccaccttcacgcatacaagcaggggctgcggctgccatccacctccggcagttcatctaccggcgtcagtgcatctaccacctgctgttcacctgccacctgcggtgcatctggcacctacggtccacctgccgtcgccggtccatctgccaccgtcggtccatgtgccgtcgccggttcatatgccgtcgacaccatgccactaccctac

SEQ ID NO: 16730 - DNA, 427 bp, Zea mays
  Clone ID: LIB3151-004-Q1-K1-A6
tagcaacatagaaagcacaatagtgtaccaacaatggcagccaaaatattttgcttccttatgctccttggtctttctgcaagtgttgctaccgcaaccattttcccacaatgctcacaagctcctatagcttcccttcttcccccatacctctcaccagcggtgtcttcaatgtgtgaaaacccaattgttcaaccctacaggatccaacaggcaatcgcaacaggcatcttaccattatcacccttgttcctccaacaaccgtcagccctattacagcagttacctttggtccatttggtggcacaaaacatcagggcacaacaactacaacaacttgtgctagcaaaccttgctgcatactctcagcaacatcagtttcttccattcaaccaactggctgcattgaactctgctgcttatttgc

SEQ ID NO: 16731 - DNA, 411 bp, Zea mays
  Clone ID: LIB3151-004-Q1-K1-A7
acgctcctcgagcacactgatgtggctatactgctgttcaatgaggccatctacgacatctgccgccgatcccttgacattgagcgcccaacctacaccaacctcaacaggcttgtgtcccaggtcatctcatcccttactgcctccctgaggttcgatggtgctctgaacgaggatgttaacgagttccagaccaacctggtaccctacccgaggatccacttcatgctttcttagtacgctccagtcatctctgctgagaacgcctaccacgagcagatctctgtggctgagatcaccaacagtgccttcgagccatcttccatgatggccaagtgcgacccacgccatggcaagtacatggcctgctgcctcatgtaccgtggtgatgtggcccccaaggatgtgaat

SEQ ID NO: 16732 - DNA, 226 bp, Zea mays
  Clone ID: LIB3151-004-Q1-K1-A8
gcgaattgccaggcaggcacgcttgagcggagggtttgacgaccgaataccgacccgcgcggtggcttggtacgggatcggcacaggaccccaaaatgtaagatccttgctggccgcgcaccagagaacgtatacacttatttgttgacagtagcgcgccaactgggccctgtgattctagagtggatcaggataccgaaagactggacgatggtgcgtgggagct

SEQ ID NO: 16733 - DNA, 355 bp, Zea mays
  Clone ID: LIB3151-004-Q1-K1-B1
cagcaaacaagagttcgcactacctctttttccatctgggctactactgatcgggcggcgctgctgttgtaatcgaacgtccaacattatgttagcctaactcgcgtttatggcactaccttttataagaaaaaagatcactggaggccgcacatggcattttaacatgacagcacacaaatttctataatttgtgttgcaatgcatgagggcctacctcaaaccatcaataatagcctcgatgatctctcgataaaaggctaccatcagctacttgataatgactacatgcagccaaatgaacattaatctatattgctagatgtgcatcaacagcatcattacatggaaagaa

SEQ ID NO: 16734 - DNA, 383 bp, Zea mays
  Clone ID: LIB3151-004-Q1-K1-B12
cattagctttatctacatgagagcgcagaaaaacccgatcgacaccaggcgggagggggtaggtgccctcgctctcctggctgtcgctgcgagcgcgacctacacgcatacaagcggagggtgcggctgacagccaccggcgtcagatcatataccgccgcccgtgcatataccacctacggttcacctgccacctacggtgcatgtatcaccgacggtccacctgccgacgacggtccaactgccaccgacggtccatgtgccggcggcaggtcatatgtcggcggcaccatgccactaccctacttaaccgacccggcctcagcctcattcacagccacacacatgcccgtgccaacagacgcattcaatcccgtgccagc

SEQ ID NO: 16735 - DNA, 423 bp, Zea mays
  Clone ID: LIB3151-004-Q1-K1-B2
atccagatcagcaaagcggcagtgcgtagagaggatcgtcgaacagaacagcatgaagatggtcatcgttctcgtcgtgtgcctggctctgtcagctgccagcgcctctgcaatgcagatgccctgcccctgcgcggggctgcagggcttgtacggcgctggcgccggcctgacgacgatgatgggcgccggcgggctgtacccctacgcggagtacctgaggcagccgcagtgcagcccgctggcggcggcgccctactacgccgggtgtgggcagacgagcgccatgtaccagccgctccggcaacagtgctgccagcagcagatgaggatgatggacgtgcagtccgtcgcgcagcagctgcagatgatgatgcagcttgagcgtgccgctgccgccagcagcagcctgtacgagccagc

SEQ ID NO: 16736 - DNA, 422 bp, Zea mays
  Clone ID: LIB3151-004-Q1-K1-B3
ccaacaacaacaacaacaacagcaccaacaacaacatcaatgtgaaggccaacaacaacatcaccaacaatcacaaggccatgtgcaacaacacgaacagagccatgagcaacaccaaggacagagccatgagcaacaacatcaacaacaattccagggtcatgacaagcagcaacaaccacaacagcctcagcaatatcagcagggccaggaaaaatcacaacagcaacaatgtcattgccaggagcagcaacagactacaaggtgcagctataactactatagcagtagctcaaatctaaaaaattgtcatgaattcctaaggcagcagtgcagccctttggtaatgccttttctccaatcacgtttgatacaaccaagtagctgccaggtattgcagcaacaatgttgtcatgatctta

SEQ ID NO: 16737 - DNA, 199 bp, Zea mays
  Clone ID: LIB3151-004-Q1-K1-B4
gctggctagctagctagttgagtcatttagcggcgatgattgagtaataatgtgtcacgcatcaccatgggtggcagtgtcagtgtgagcaatgacctgaatgaacaattgaaatgaaaagaaaaaagtattgttccaaaataaaaaaaaaaaaaaatataaaaaaaaaaatataaaaaatgtaaaaaaaacaattatt

SEQ ID NO: 16738 - DNA, 414 bp, Zea mays
  Clone ID: LIB3151-004-Q1-K1-B5
cccacgcgtccgcccacgcgtccgcccacgcgttcggtcgttttggtaccccagaagatttgaagtctttgattgatagagcacatgagcttggtttgctagttctcatggatgtggttcatagtcatgcgtcaagtaatactctggatgggttgaatggttttgatggtacagatacacattactttcacagtggtccacgtggccatcactggatgtgggattctcgcctatttaactatgggaactgggaagttttaagatttcttctctccaatgctagatggtggctcgaggaatataagtttgatggtttccgttttgatggtgtgacctccatgatgtacactcaccacggattacaagtaacatttacggtgaacttcaatgagtattttggctttgccaccgatg

SEQ ID NO: 16739 - DNA, 429 bp, Zea mays
  Clone ID: LIB3151-004-Q1-K1-B6
acttcaatgggcttcgaacatccagccgtgcaagcctacaggctacaactagcgcttgcggcgagcgtcttacaacaaccaattgcccaattgcaacaacaatccttggcacatctaaacctacaaaccatcgcaacgcaacagcaacaacagtttctgccatcactgagccacctagccgtggtgaaccctgtcgcctacttgcaacagcagctacttgcatccaacccacttgctctggctaacgtatctgcataccagcaacaacaacgtctgcaacagtttatgccagcgctcagtcaactagccatggtgaaccctgtcgcctacctacaacagcaacaattgctttcatctagcccgctcgctgtgggcaatgcacctacgtacctacaacaacagttgctgcaacagattgtaccagctctg

SEQ ID NO: 16740 - DNA, 393 bp, Zea mays
  Clone ID: LIB3151-004-Q1-K1-B7
cccgcggcagccgcatacgccttcgccgtcgcgtcccgctcctccgcccgcccgacgcgaccccgggacctggagagagaggtcggcatggctgccgcggtggtcgacgacgctgggatggacgccgtccagaagcgcctcatgttcgaagacgaatgcattttggtggacgagcaggacaatgttgttggccatgagtcatagtacaactgccatttgatggaaaagactgattctgagaatctgctacatagggcatttagtgtgttccttttcaactcaaaatatcagctgcttacttatcaaatgttcgcgacaaatgttacctttcctttagtttggaccaatacctgctgcagtcaccctctgtaccgtgagtctgagcttattcag

SEQ ID NO: 16741 - DNA, 352 bp, Zea mays
  Clone ID: LIB3151-004-Q1-K1-B8
gcgatgcggcggcggcgggcgtcgaggtggaggtttcatggcggcgtggctggttgccatgaaggcccttatgatcatgcccttgaagctcccgcccgtaggcccttattatgtccgcgtgcgcatgaaggcagtggggatttgcggcagcgatgtgcactacctaagggagatgcgcatcgcgcacttcgtggtgaaggagccgatggtgatcgggcacgagtgcgcggtcgtgtgttaggaggttgggctcctgcgtgacgcacctgttcgtgggcgaccgcttggcgcttgagccgggcgttagctgctggcgctgtcgtcactgctagggcggtcagcacaacctgtg

SEQ ID NO: 16742 - DNA, 58 bp, Zea mays
  Clone ID: LIB3151-004-Q1-K1-C1
cgcaaattgcaccaataaatccatcgagaggccgtcgacaggggaattaatggcgtcg

SEQ ID NO: 16743 - DNA, 337 bp, Zea mays
  unsure at all n locations
  Clone ID: LIB3151-004-Q1-K1-C10
cgcgagnnggagcatncagaaacacaccaagcgaagccaccgagcaacgacggaacagcgagggcgagcaaganaanagcccngcgagcgcaaanggcccanggagggagcgcaacaaaggcgagcacnagggcacaaggcncacaggcgcccagagccaacanaccacaggagcnccgaccagggacnacaaggggcgncgaacaccgagcagggcaagccnacaggcaacaacaagcgcnggcggcngagcgacaacaacaaccaangaaccaacggcaacaacaaggcggggcacaacnaaccanacaaaccancgcaacacaacagcgacaac

SEQ ID NO: 16744 - DNA, 382 bp, Zea mays
  unsure at all n locations
  Clone ID: LIB3151-004-Q1-K1-C11
acgcgtnggcccacgcgtgncgggcaccaacaagcgacatagaatgtggaatgcagaagcaacaatagagcaacagtggataccaagatattttgcctccttatgctccttgctctttctacatgtgtggctaacgcgacaattttccctcaatgctgacaagctcctatagcttccctttttcccccataccttacatcaattatagcttcagtatgtgaaaacccagctcttcaaccatataggcttcaacaagcaatcgcagcaagcaacatacctttatcgcccttgttgtgtcaacaatcgccagccctatctttggtgcagtcattggtacaaaccatcatggcacaacagctgcagcaactcgtgctacctgtga

SEQ ID NO: 16745 - DNA, 122 bp, Zea mays
  unsure at all n locations
  Clone ID: LIB3151-004-Q1-K1-C12
cccacgcgnccgcccacgcgnccgcccacgcgnccgggnagaccaagncncnnnncaggacagggggggngggagaccagangcggangagnnncnaganncacnanggacnaacaacaggc

SEQ ID NO: 16746 - DNA, 422 bp, Zea mays
  Clone ID: LIB3151-004-Q1-K1-C2
cagaccattagctttatctactccagagcgcagaagaacccgatcgacaccatgagggtgttgctcgttgccctcgctctcctggctctcgctgcgagcgccacctccacgcatacaagcggcggctgcggctgccagccaccgccgccggttcatctaccgccgccggtgcatctgccacctccggttcacctgccacctccggtgcatctcccaccgccggtccacctgccgccgccggtccacctgccaccgccggtccatgtgccgccgccggttcatctgccgccgccaccatgccactaccctactcaaccgccccggcctcagcctcatccccagccacacccatgcccgtgccaacagccgcatccaagcccgtgccagctgcagggaaccttgcggcgtggcagcaccccgat

SEQ ID NO: 16747 - DNA, 166 bp, Zea mays
  Clone ID: LIB3151-004-Q1-K1-C3
gagagagcccgaacagacgatcttccaacaaaccagcataaggacggccttcatgttcggggcgttgcttgttgtattagctgccactactcaagaagagacagatgtgctactgctggtggatgctaaagttctacggcgtttctgtctgcatgctgacaacgat

SEQ ID NO: 16748 - DNA, 266 bp, Zea mays
  Clone ID: LIB3151-004-Q1-K1-C4
gcgagctcacggccggcggcgtgccttggcgcaagcacaacagcagctccctccgcggggcgccctccctgctcggaagaccaacaccaccatcaacagcagcagcaccgcgccaacgaggcttccctccggtgtgtgagtgcacgcgcgctcgtgatggcagcagccccggcggagtagtcctccacgtaggggtctccggccgtcagcagaccgaggtcgcggttcggcgacacgaccctgacgaaagtcgtcgtgggcgggct

SEQ ID NO: 16749 - DNA, 362 bp, Zea mays
  Clone ID: LIB3151-004-Q1-K1-C5
gccacgcgttcatcctacgtccagccactcgtatgctcgttctggcacccgaatacatgcgaagtctttgtttgataaacctcatgagcttgctttgctagttctcatggatgtggcttatagtcattcatgcattaatactgtggatgggttgaatggtattgatggtacaaatacacattactgtcacagaggtgcaccagcacatcactcgatgtgagactctcgactatttacatatggaatctggctagtttctagatttcatctttcaaatgctacatggtagctggcggattataagtctgatggctgcgcatatagtgctgtgactgacatgattttgcctcatgaaggattac

SEQ ID NO: 16750 - DNA, 212 bp, Zea mays
  Clone ID: LIB3151-004-Q1-K1-C6
gaccaacatgcaacatagaaagtggaataccgtatctacaattgagcaacaatggcggccaagagggtttccatccttatgctcctggctcttcctgcatgtgttgctaactcgaccatttttcctctatactcacaagctcctatagctgccctgcttcccccataccttccatcaatgaccgcttcagtatgtgaaatcccagcccttca

SEQ ID NO: 16751 - DNA, 349 bp, Zea mays
  Clone ID: LIB3151-004-Q1-K1-C7
agcggcagtgcgtagagaggatcgtcgaacagaacagcatgaagatggtcatcgttctcgtcgtgtgcctggctctgtcagctgccagcgcctctgcaatgcagatgccctgcccctgcgcggggctgcagggcttgtacggcgctggcgccggcctgacgacgatgatgggcgccggcgggctgtacccctacgcggagtacctgaggcagccgtagtgcagcccgctggcggcggcgccctactacgccgggtgtgggcagacgagcgccatgtaccatccgctccagcaacagtgctgccagcatcagatgaggatgatggacgtgcagtccgtcgcgcagcagct

SEQ ID NO: 16752 - DNA, 242 bp, Zea mays
  Clone ID: LIB3151-004-Q1-K1-C8
tgcgtcctggccttatgtgcactcccggataatatctagcctacacatctatcatgcaactctgggggggttgtggagcacattggaggctctctactatacctctctgctcatcttcctgtctgttctgacgatctggttgcacaaatactgcatgagccagattgaaccacctctaagatagtttcccactgaggaagcaactgcgtatgacaccatggagcacgcttagatgcctaacc

SEQ ID NO: 16753 - DNA, 134 bp, Zea mays
  Clone ID: LIB3151-004-Q1-K1-C9
tgcctgcgcacgtgtccatattaacactgggtaatcaaagccacagggctgagatactccagagcgcggaagaacccgatcgacaccatgagggagttgctcgaagacctcgctctactggctctggatgggag

SEQ ID NO: 16754 - DNA, 386 bp, Zea mays
  unsure at all n locations
  Clone ID: LIB3151-004-Q1-K1-D11
gaaagaggaanccagcagcaccaaaagagcaacaacggcgaccaagaaagggggccaagcgggcgccaagcggcggcggcaggggaagcgaacgcgacagagaccccncaaggcccacaagcggcaanagccggccancgaccgccagaccgcccagcaaggacagcnacagnaggagaaaacccagcccagcaacccaaaaggcnccaacaagcaagcgcagcaagcaacaaaccnnaagcacccnggcnncaacaancgccagccccaacnggggggcagncanggggacaaaccaacagggcacagcagcngcagcaacncgcgcgaccggggaacaaccaagnagcgccggcaaaccangcgcccaacacncagcaacaaca

SEQ ID NO: 16755 - DNA, 433 bp, Zea mays
  unsure at all n locations
  Clone ID: LIB3151-004-Q1-K1-D12
caacaagcaacatagaaagtggaatccagtttcaacaatagagcaacaatggcgaccaagatattttccctccttatgctccttgctctttctgcatgtgttgctaacgcgacaattttccctcaatgctcacaagctcctatagcttcccttcttcccccataccttccatcaatgatagcttcagtatgtgaaaacccagctcttcaaccctataggctccaacaagcaatcgcagcaagcaacatacctttatcacccttgtttcaacaatcgccagccctatctttggtgcagtcattggtacaaaccatcagggcacagcagctgcagcaactcgtgctacctgtgatcaaccaagtagctctggcaaacctttctccctactctcagcaacaacaatntcttccattcaaccaactgtctacattga

SEQ ID NO: 16756 - DNA, 376 bp, Zea mays
  Clone ID: LIB3151-004-Q1-K1-D2
cccgttccagcacagagccagcccatttattatcaacttgaccttcccgaagtgcgtccgttcggccgaccgcccggccgctttttgagtcaaggtcggccgcgcgccactctgaatccccaaggcaccacaccggcggacaaccttgagaagaagcaccggcaacgacgacgagctatcactagcagtcagtcacagccgggcaagattgattctgacgaacagccgatgatgatgcacgggaacgggcacgggcacggtcactgtcgtgtgcacccggcgttctccagctccgacttctccggcgagatgaaccagtcggccgtgtgcgaccccttctccagcccgctctacagatttcactttgagaagaccg

SEQ ID NO: 16757 - DNA, 413 bp, Zea mays
  Clone ID: LIB3151-004-Q1-K1-D3
taccggattggatgtcgaggtagacccacgcgtgcgcccaacgaccatgagcttgatgtactcgattacgcagacacttatttgacacgatggggacggtcccgtgcccttcttatcatgatcgtggtacaagcgcggaatcacgcttgagatcgggcgttagcgctgcaaactcatgccaaatcgggtcatatacagccggcgggacatctgaacacatcggttaacctgccagttcgggtgaatctagcaccaccggtcgaccttggacctcgggtcaagcgaccacggggggcccatggcggcggagctggtccgcgtctcggcgtagatcccgagcacagttctcagcaccttcgggctgatcaccatctgcatcgacatccatgtctgcttcgacgtgctcgcgcact

SEQ ID NO: 16758 - DNA, 424 bp, Zea mays
  Clone ID: LIB3151-004-Q1-K1-D4
ccggcccaaaccccccgcacccaacccccagccccggcaaccgatggcggggtccgcggccgacgcggagcaggagcaaaagcgggcagcggcggcggcgtacgactacgagggcgacgcgcgctgggccgagtactggtccaacgtactcgtcccgccgaacctcgcctcccgccccgacgtcgtcgaccacttgaagcgcaagttctaccagcgctacatcgaccatgatctggtcgttgagccaaggtcattcaccagttccactcaggccagcaggccagatgtaaggtcttcgtcttcgtcatccaccgagaacgtcagggagcgtaattcaggatctactgcaaggtcagcgccttcaccaccgtcaccaacacatacagacagtgccgtcaaccctttacggttcgacgcacgcact

SEQ ID NO: 16759 - DNA, 394 bp, Zea mays
  Clone ID: LIB3151-004-Q1-K1-D5
ctgggtcttcagaccattagctttatctactccagagcgcagaagaacccgatcgacaccatgagggtgttgctcgttgccctcgctctcctggctctcgctgcgagcgccacctccacgcatacaagcggcggctgcggctgccagccaccgccgccggttcatctaccgccgccggtgcatctgccacctccggttcacctgccacctccggtgcatctcccaccgccggtccacctgccgccgccggtccacctgccaccgccggtccatgtgccgccgccggttcatctgccgccgccaccatgccactaccctactcaaccgccccggcctcagcctcatccccagccacacccatgcccgtgccaacagccgcatccaagcccgtgcc

SEQ ID NO: 16760 - DNA, 335 bp, Zea mays
  Clone ID: LIB3151-004-Q1-K1-D6
gccccgctgtcagcctaaaacgcagactcaccaatgcccgtgccaacagccctatccgagcccgtgcttgctgtatgtaacctgctgggtctgcctgaccccgttgctgggcctgcgcttttagcttacgactcattagcgcagctagacggcctagccctactggtcgcctcatcaccagccgctgctgcatgagaattgccagcacttcatgcccatggggtcggaccagcagttgcaggcgatatctggcctgtaccaccactgcatcctgcagaatcggcagcgcagcatccggtgcggggttttgttcgcagcacctatagaccactgac

SEQ ID NO: 16761 - DNA, 408 bp, Zea mays
  Clone ID: LIB3151-004-Q1-K1-D7
aaccattaccttatctactccaagctcagaatacccgatcgacaccatgagggtgttgctcgtgccctcgctctcctggctctcgctgcagcgccacctcacgcatacaagcggcggctgcggctgccagccaccgccgcggttcatctaccgccgcggtgcatctgccacctccggttcacctgccacctcgggcatctcccaccgcggccacctgccgccgccggtccacctgccaccgcggtccatgtgccgccgccgttcatctgccgccgccaccatgccactaccctactcaaccgccccggcctcagcctcatccccagccacacccatgcccgtgccaacagccgcatccaaacccgtgccagctgcatggaacctgcggcgttggcagcaccccgatcc

SEQ ID NO: 16762 - DNA, 433 bp, Zea mays
  Clone ID: LIB3151-004-Q1-K1-D9
gtcagcctagcaattagctcatcgactccagattggagaactcgacaccatgaaggtgctgatcgttgcccttgctcttctggcgctcgctgcgagcggcccgctcagtacagccgggggtggggcttgcaaacaccaccggttcatctaccgcctccgttctatatgccgcctccgttctatctgccgccgcagcagcagccgcagccatggcaataccccactcaaccaccgcagctaagcccgtgccagcagttcggatcctgcggcgtcggcagcgtcggcagcccgttcctgggccagtgcgtcgagttcctgaggcaccagtgcagcccggcggcgacgccctacggctcgccacagtgccaggcgctgcagcagcagtgctgccaccagatcaggcaggtggagccgctgcaccggtaccaggcga

SEQ ID NO: 16763 - DNA, 243 bp, Zea mays
  Clone ID: LIB3151-004-Q1-K1-E1
cacaagaacgcttagttgaaggtacttcttgaaatggatatggatctaataccataggaccttagaccagtctatgtcgccaagagaacaggtcttgtggagtacttaatcaacaattcagtgtgaggtcttgtatcttttcaaaagctattgtccagctgttgaggtcgtttgcatttgtattaccgaacaagtagagatgttggggttttctagacaaggtcaaatggaatttttgttaat

SEQ ID NO: 16764 - DNA, 368 bp, Zea mays
  Clone ID: LIB3151-004-Q1-K1-E10
agctcatcgactccagattggagaactcgacaccatgaaggtgctgatcgttgcccttgctctcctggcgctcgctgcgagcgccgcctccagtacaagcggcggctgtggctgccagacaccaccgtttcatctaccgcctccgttctatatgccgcctccgttctatctgccgccgcagcagcagccgcagccatggcaataccccactcaaccaccgcagctaagcccgtgccagcagttcggatcctgcggcgtcggcagcgtcggcagcccgttcctgggccagtgcgtcgagttcctgaggcaccagtgcagcccggcggcgacgccctacggctcgccacagtgccaggcgctgcatcagc

SEQ ID NO: 16765 - DNA, 394 bp, Zea mays
  Clone ID: LIB3151-004-Q1-K1-E11
gcggcggcttttcttgctcatgtccgccccaaaacatcatgtggagaccgtgtcatacaccgaagaccggtgggctggggtgctcggtggaaaaaaagaaagagctcctaccgagactatctgggaacaatgctcacaagccattattgcttgtgtccctggaggtaaatattaccgccggggtctttggcctgtgaaaagcaactccatcaacggtactggatccaacaggctaaaacaggtgtcgtgttacctccatcacctttgttactccaacaatcattatggcctattacagcagctacctgaggtgcattgatcggcacaaaacataacggcacttcaactacaacaacttgtgctagcaaacggttgctgcctactctcagcaaca

SEQ ID NO: 16766 - DNA, 424 bp, Zea mays
  unsure at all n locations
  Clone ID: LIB3151-004-Q1-K1-E12
cgcccgcaggccngngcacnncnccancaccaccacggggncnncagaccaggagccnnagggacnccagagcgcagaagaacccgancgacaccaggagggngnngcncgnagcccncgcncnccaggcncncgcngcgagcgccaccnccacgcanacaagcggcggcggcggcggccagccaccgccggcggaacaacaaccgccgccggagcancngccaccnccggancaccggccaccnccggagcancncccaccggcggnccaccagccgacgacgggccaccggccaccgccggnccaagagccgccgccggnncaanngccgccgncaccangccacnacccnacncaaccgccccggccncagccccaaccccagccacacccangcccgngccaacagccgcagccaagccc

SEQ ID NO: 16767 - DNA, 397 bp, Zea mays
  Clone ID: LIB3151-004-Q1-K1-E2
gtgcacccgacgcgacgccctactgatcgcctcatgccagtcgttgcggcagcagtgttgccagcagctcagcggtggagccgcacaccggtaccaggcgatcttcggcttggtcctccatccatcctgcatcacagccgcaaagcggccaggtcgcggtgctgttggcggcgcagatagcgcagcatctgacggctatgtgcggcctgcagcaccgactcagcccctactctgctgcggggtggcccaatgaagaaactatgtgctgtagtaagccgctggctagctagctagtgatcatttagcggcgatgattgagtaataatgtgtcacgcacaccatgggtggcagtgtcaggtgagcaatgacctgaatgacattgaatgaaagaaaaagt

SEQ ID NO: 16768 - DNA, 408 bp, Zea mays
  Clone ID: LIB3151-004-Q1-K1-E3
gctccgaactagcacatacaaagcacagtgtgtccaaccatggcaggcaacatattttgttgcctagctagtggctgtctgtttgtgctggtccgtaaccattctctacaatgctacaagctcgtatgctacctttcttcctcatacctgtaccagcggagtcttagtatgtgaaaacccaattcttaatccctacatgatccaacaagcaatcgcagccggcatcttacctttatcacactagctccttcaacaaccgacagtcctattacagtagacacctttggtgcattggttgtgcacaaaacataaaagctcatcaactaccacaacttgcgctaggaaaccttgctgcctactctcatcaacaacaatttcttgcattcaaccaactggctgcattgaact

SEQ ID NO: 16769 - DNA, 356 bp, Zea mays
  Clone ID: LIB3151-004-Q1-K1-E4
gcagtattcatcaacaaatcgctgaatcgaagtatgtattatttgtagagcgccactacaactcggcagatacctgctgcctacgccgagcatatttaatcaaccaactgtggcattgaactgtctgattattacagcagcatcaactactatcattcaccagtagctaggtgagcaagtgctacgtttagatcaaccacagatgatgacgttctaccatgacgctgcgccttacgctggcacactcttacaactgctacaattgctgcgattcaaccaacttgctttgacgaacccagcagcgttctaccaacaacctatcattggtggtgccctgctttagatttctaatgagt

SEQ ID NO: 16770 - DNA, 424 bp, Zea mays
  Clone ID: LIB3151-004-Q1-K1-E5
aagcaacatagaaagtggaatccagtagcaacaatagagcaacaatggagaccaagatattttccctccttatgctccttgctctttctacatgtgttgctaacgcgacaattttccctcaatgctcacaagctcctatagcttccctttttcccccataccttccatcaattatagcttcagtatgtgaaaacccagctcttcaaccatataggcttcaacaagcaatcgcagcaagcaacatacctttatcgcccttgttgtgtcaacaatcgccagccctatctttggtgcagtcattggtacaaaccatcagggcacaacagctgcagcaactcgtgctacctgtgatcaaccaagtagctctggcaaacctttctccctactctccgcaacaacaatttcttccattcaaccaactgtc

SEQ ID NO: 16771 - DNA, 355 bp, Zea mays
  Clone ID: LIB3151-004-Q1-K1-E6
agaccactagctttgtctactccagagcgcacaataacccgaccgacaccacgagggtgttgctcgttgccatgcctctcctggctctagctgcgagcgccacctccacgcatacaagcggtggctgcaggtgtcatacaccttcgctcgtttcatctacacgccgccatgagcatattgccaccttcgtgtcacctgccacctcttgtacattttacacctccagtacaactgccatcatgcgtcctactgccatcgccgttgcatgttccaccatcggttcatctatcttcggcaccatgcctgtaccatactataccggcccagcctcatcctcatccccatgcacactgat

SEQ ID NO: 16772 - DNA, 427 bp, Zea mays
  Clone ID: LIB3151-004-Q1-K1-E7
attgagaccaactagcaacatagaaagcacaatagtgtaccaacaatggcagccaaaatattttgcgctccttatgctccttggtctttctgcaagtgctgctacggcgaccattttcccgcaatgctcgcaagctcctatagcttcccttcttcccccgtacctctcaccagcggtgtcttcggtatgtgaaaacccaattcttcaaccctacaggatccaacaggcaatcgcagctggcatcttacctttatcacccttgttcctccaacaatcatcagccctattacaacagttacctttggtgcatttattggcacaaaacatcagggcacaacaactacaacaacttgtgctagcaaaccttgctgcctactctcaacaacagcagtttcttccattcaaccaactaggttcattgaactct

SEQ ID NO: 16773 - DNA, 408 bp, Zea mays
  Clone ID: LIB3151-004-Q1-K1-E8
gctttatctactccagagcgcataagaacccgatcgacaccatgagggtgttgctcgttgcccgggctctcctggctcgcgctgcgagcgccacctccacgcatacaagcggcagctgcggctgccagccaccgccgccggttcatctaccgccgccggtgcatctgccaccttcgggtcacctgccacctacggtgcatctcccaccgccggtccacctgccgccgccggtccacctgccaccgtcggtccatgtgccgccgtcggttcatctgccgccgtcaccatgccactaccctactcaaccgccccggcgctcatcctcatccccagccacacccatgcccgtgccatcagccgcattcaagcccgtgccaactgcagggaacctgctgcgttggcagcacc

SEQ ID NO: 16774 - DNA, 346 bp, Zea mays
  Clone ID: LIB3151-004-Q1-K1-E9
accggcggggagtcccacgcgcgagccacaccttcgcgacactgccatgtgcgacaggacaaacagagacacgagcagcaacagacggagccatgagcggcaacctcatccacacttccagggctaggacgagctccatcaaccacaacagacctaagcgaacatgaagcatggccagtagataacacaacggcaacaatgtcatagcccggagcggcaccagactacaaggcgcatctgtggcttctatagcagtagctcaaatctaaaaaattgtcatgaattcctaatgcagcagtgcagccctttgacaatggcttttctccaatcacgtttgatacaacca

SEQ ID NO: 16775 - DNA, 390 bp, Zea mays
  Clone ID: LIB3151-004-Q1-K1-F10
gcgcgtgcgactatgcacactatagaaataaaaaaaggaaagaaagagcaaatgcgctagtaaagaaacacgctggtctaccaaccagccagctaactaaagactacaaaaaaaaattggcttcattcaaacagcaggcagcaaaaaacgcttttgattatccacagccgcaacaactactaccattcagccagctagctggtgtgagccctgggaccttcttgatacaaccacaattgttgccgctctaccatcacgctgcgcataacgctggcaccctcttacaactgcaacaattggtgccattcaaccaacttgctgtgacaaaaaaagcagggttgtaccaacaaaacatcattggtggagccctcttttagatcccttatgagt

SEQ ID NO: 16776 - DNA, 338 bp, Zea mays
  Clone ID: LIB3151-004-Q1-K1-F11
acggaccaactagcaacatagaaagcacactattgtaccaatactggcacgcaacgtgttggggacgactatgctgctcggtctttctgcaagtgctgctacagcgagcattttcccgcaatgctcacaagctgctatagcttgcatctttcccgcatacctatcaccagcgatgtcttcagtatgtgacaatccaactcttctacactacacgatccaacaggcactcacagcaggcatcttacctttatcaccctggatcctacaacaatcatcatccctattacagcagttacctttggtgcatttatcgccacaaaacatcatggcgcaacaac

SEQ ID NO: 16777 - DNA, 323 bp, Zea mays
  Clone ID: LIB3151-004-Q1-K1-F12
accggggcgggacccacggcgcgagccacgcgagcggccaagcgaacgcacgcgggcatgcgacggcacacccctcctatagagggacctaaatggagcccactggccgccggcgcacaacgcgagcgccggaggagcacgagcgggccccggagaagtctgactacagcccataggctaccggcgaggtaggatatgctcggagcgggcaataccgcatcctccttccaaccactgcccaggcttaccgccaatgcacactcctctaccggtgcctaaagctgggatgctgtggcgaggaacgccaaagcagccctgtccat

SEQ ID NO: 16778 - DNA, 424 bp, Zea mays
  Clone ID: LIB3151-004-Q1-K1-F2
acgccattagctttatctactccagagcgcagaagaacccgatcgacaccatgagggtgttgctcgttgccctcgctctcctggctctcgctgcgagcgccacctccacgcatacaagcggcggctgcggctgccagccaccgccgccggttcatctaccgccgccggtgcatctgccacctccggttcacctgccacctccggtgcatctcccaccgccggtccacctgccgccgccggtccacctgccaccgccggtccatgtgccgccgccggttcatctgccgccgccaccatgccactaccctactcaaccggcccggcctgagcctcatccccagccacacccatgcccgtgccaacagccgaatccaagcccgtgccatctgcagggaacctgcggcgttggcagcaccccgatcct

SEQ ID NO: 16779 - DNA, 351 bp, Zea mays
  Clone ID: LIB3151-004-Q1-K1-F3
cacaccattatctttatgtactccagagcgcacaagaacccgatcgacaccatgagggtgttgctcgttgccctcgctcttctggctctcgctgcgagcgccacctccacacatacaacaagcggttgttgctgtcagccaccgccgccgtctcatataccagccgcggtgcatctaccacctactgctcatctgccacctccgttgcatctaccaccaacggtccacctgctgtcgcctgtataactaccaccgccggtccatgtgccggccccagtacatctgtcgccgtcaccatgcctgtaccctacttaaccgaccgggcctcagcctcatccacagccacaccca

SEQ ID NO: 16780 - DNA, 423 bp, Zea mays
  Clone ID: LIB3151-004-Q1-K1-F4
gaccaacaagcaacatagaaagtggaatacagtagcaacaatagagcaacaatggcggcgaagatattttccatccttatgctccttgctctttctgcatgtgttgctaacgcgaccatttttcctcaatactcacaagctcctatagctgcccttcttcccccataccttccatcaatgaccgcttcagtatgtgaaaacccagcccttcaaccctacaggctccaacaagcaatcgcaacaagcaacttacctttatcacccctgttctttcaacaatcgccagccctatctttggtgcagtcattggtacaaaccatcatggcacaacatctgcagcaactcgtgctaccagtgatcagccaagtagctctgtcaaacctttctccctactctcagcaacaacaatttcttccattcaac

SEQ ID NO: 16781 - DNA, 427 bp, Zea mays
  Clone ID: LIB3151-004-Q1-K1-F5
caaagcggcagtgcgtagagaggatcgtcgaacagaacagcatgaagatggtcatcgttctcgtcgtgtgcctggctctgtcagctgccagcgcctctgcaatgcagatgccctgcccctgcgcggggctgcagggcttgtacggcgctggcgccggcctgacgacgatgatgggcgccggcgggctgtacccctacgcggagtacctgaggcagccgcagtgcagcccgctggcggcggcgccctactacgccgggtgtgggcagacgagcgccatgtaccagccgctccggcaacagtgctgccagcagcagatgaggatgatggacgtgcagtccgtcgcgcagcagctgcagatgatgatgcagcttgagcgtgccgctgccgccagcagcagcctgtacgagccagctctgatgcagcagca

SEQ ID NO: 16782 - DNA, 427 bp, Zea mays
  Clone ID: LIB3151-004-Q1-K1-F6
cacaaccggacccgacccgacgccccgaggcgagggcgagggcgagcggtcagccggccggggcggggaccaggggggatcccctcggcggcgtcggcgtcggcggccatgggcgcggcctccgcggcgatgtgggccgggctggtcctggtggtgttattggccgcatcgggcccggcggcggcggggctgccgaggttcgccgaggcgcccgagtacaggaacggggacgggtgcccggccccggtgacgggcgcgggggtctgcgacccgggcctggtgcacatcgccatgacgctcgacgcgcactacctcaggggctccatggcggccatctactcgctgctcaagcacgcctcctgcccggagtccatcttcttccacttcctcgccgcggagggcggcggcgcgccggccgtggccgagc

SEQ ID NO: 16783 - DNA, 429 bp, Zea mays
  Clone ID: LIB3151-004-Q1-K1-F7
gggtcttcagaccattagctttatctactccagagcgcagaagaacccgatcgacaccatgagggtgttgctcgttgccctcgctctcctggctctcgctgcgagcgccacctccacgcatacaagcggcggctgcggctgccagccaccgccgccggttcatctaccgccgccggtgcatctgccacctccggttcacctgccacctccggtgcatctcccaccgccggtccacctgccgccgccggtccacctgccaccgccggtccatgtgccgccgccggttcatctgccgccgccaccatgccactaccctactcaaccgccccggcctcagcctcatccccagccacacccatgcccgtgccaacagccgcatccaagcccgtgccagctgcagggaacctgcggcgttggcagcaccccgat

SEQ ID NO: 16784 - DNA, 438 bp, Zea mays
  Clone ID: LIB3151-004-Q1-K1-F9
cgcgcgaatgcagatgcaacacacaatcgccaatggcaacgaccatataatccactggtacgctcgttgctctttcaggacgagttgctaacgcgacaattacacctcaatgctcacaagctcctatagctcaccttctggccccatacctcccatcaatgatagcttcagtatgtgaaaacccagctattcaaccctataggctccaacaagcaatcgcagcaagcaacatacctatatcacccttgtttgaacaatcgccagccatatctttggtgcagacattggtacaaaccatcagggcacagcagctgcagcaactcgtgctacctgtgatcaaccaagtagctctggcaaacctgtctccctactctcagccacaacaatttcttccattcaaccaactgtctacattgaaccgtgctgcttatttgcagc

SEQ ID NO: 16785 - DNA, 423 bp, Zea mays
  Clone ID: LIB3151-004-Q1-K1-G1
attgataccaactagcaacatacatagtgaagtacagtagcaacatcttagcaccaatggcagccaagatttttgccctccttgccctccttgctctttcagcaagtgttgctaccgcgactattattccacaatgctcacaacaatacctctctccggtgacagccgcgagatttgaatacccaactatacaatcctacaggctacaagaggccatcacagcaagcatcttacggtcgttagcattgactgtccaacaaccatatgccctattgcaacaaccatccttagtgaatctatatctccaaagaatcgcagcacaacaactacaacagcagttgcttccaacaatcaatcaagtagttgcagcgaaccttgctgcttacctccagcaacaacaatttcttccattcaatcaactag

SEQ ID NO: 16786 - DNA, 410 bp, Zea mays
  Clone ID: LIB3151-004-Q1-K1-G10
agaccaacaagcaacatagaaagtggaatccagtagcaacaatagagcaacaatggcgaccaagatattttccctccttatgctccttgctctttctgcatgtgttgctaacgcgacaattttccctcaatgctcacaagctcctatagcttcccttcttcccccataccttccatcaatgatagcttcagtatgtgaaaacccagctcttcaaccctataggctccaacaagcaatcgcagcaagcaacatacctttatcacccttgtttcaacaatcgccagccctatctttggtgcagtcattggtacaaaccatcagggcacagcagctgcagcaactcgtgctacctgtgatcaaccaagtagctctggcaaacctttcttcctactctcagcaacaacaatttc

SEQ ID NO: 16787 - DNA, 250 bp, Zea mays
  unsure at all n locations
  Clone ID: LIB3151-004-Q1-K1-G12
gagaccaacaagcaacagagaaaggggaanccaggagcaacaanagagcagcgagggcgacgaagaganggncccngcgcaagccccaggcnncgncagcaagagaagcnaacgcgacaaggnncccgcaaagcgcacaagcnccnanagcancccnncnncccccaaaccncccaacaaaganagcnncagnangcgaaaacccagcncnncaacccnanaggcgccaacaagcaancgcagcaagcaa

SEQ ID NO: 16788 - DNA, 417 bp, Zea mays
  Clone ID: LIB3151-004-Q1-K1-G2
caactagcaacatagaaagcacactagtgtaccaacagtggctgccaaaatattttgcctgcttatgctccttggtctttctgcaagtgctgctacggcgaccattttcccgcaatgctcgcaagctcctatagcttcacttcttcccccgtacctgtcaccagcggtgtcttcggtatgtgaaaacccaattcttcaaccctacaggatccaacaggcaatctcagctggcatcttacctttatcacccttgttcctgcaacaatcatcagccctattacaacagttacctttggtgcatttattggcacaaaacatcatggcacatctactactacaacttgtgctagcaaaccttgctgtctactctcagcaacagcagtttcttccattcaaccaactaggttcattgaactc

SEQ ID NO: 16789 - DNA, 345 bp, Zea mays
  Clone ID: LIB3151-004-Q1-K1-G3
cgaagccattccctctttaagaggggaacatcagattgggcttattattccttagtacggcaggcaaggatcggagttgctctgaattgactgaaccatggcggtgacaatgtgcgtgacgacgatggtgacgagaaccaaggaaagctggtcgtcattgcaggtcccggcggtggcattcccttggaagccaccaggtggcaagaccggtggactcgagttccatccaccggcgatgttccccagcgtacggctcaacttgtgcccgggcgtcccagctgtgcgcgacccgctggagccctatcctaatgtcgtgcgggcggccgacaactgcgacattgcacg

SEQ ID NO: 16790 - DNA, 429 bp, Zea mays
  unsure at all n locations
  Clone ID: LIB3151-004-Q1-K1-G4
cccgcctagggagccccaccgagggaggccgcacgcagccatggatttcctgcaggggcaaagcgtcgagaccacagtggccgtcgccgtcgctgtcgccgctgtcgccgcaggcggcgccttcctcctccttcgatccaggaagcccaagggctgcttggatcctgagaacttcaggaagttcaaacttgttgaaaagaagcaaataagtcataatgttgccaggttcaagttcgctcttccaactccaacttctgtattgggccttccaatcggtcaacatatcagctgcagaggacaagacgctacaggtgaagaagtaatcaagccttatacccctactacattggattctgatcttggatattttgagcttgtcatanagatgtatccccaagggaagatgtcccatcatttccgcgagatgaa

SEQ ID NO: 16791 - DNA, 369 bp, Zea mays
  Clone ID: LIB3151-004-Q1-K1-G5
gcaatcgcgaaagcgagcgcgaggcgagtcggccggcgaagggggcggatggcgcgcgggctgcgcggcgtccgcgacgacctatccgagctggggcgccacctgctcgacatcgcctgcttcctgcacccgctcctcaacccggcccacaccgactccccgccacccacccccacgggccgccgccgcccgcgccgctccccgtccccgcaccccgccgcgccgccgtcaccgtcgttcctcgcgggcatcctctccgacctcgccgagatcggcggctccttccgcggcggcttcttccgctcctcgccggcgcccgaccaccccgcccccgacgcgctcgagtcacagcatgccgcctcgtccccg

SEQ ID NO: 16792 - DNA, 326 bp, Zea mays
  Clone ID: LIB3151-004-Q1-K1-G6
cccgcctagggattcctaccgagggaggccgcacgcacccacggatgccctgcaagggtcaaagcgtccttaaccacagtggccgtcgtccacgctctgctccctgtaccattatgccgcacctctctcatgcttctatacatgaagcccaatgggctgctcgtatcaccagaactgtatgaagtttgtacttgccgaatagaagcaccttactggttccgtcaggcagttgaagttggctttttacacttatcactctggatcgtgcaacactcatcagccacatatcaactgttaccgtcggtgcacttattgtgacaaaacat

SEQ ID NO: 16793 - DNA, 423 bp, Zea mays
  Clone ID: LIB3151-004-Q1-K1-G7
cgtcagcctagcaattagctcatcgactccagattggagaactcgacaccatgaaggtgctgatcgttgcccttgctctcctggcgctcgctgcgagcgccgcctccagtacaagcggcggctgtggctgccagacaccaccgtttcatctaccgcctccgttctatatgccgcctccgttctatctgccgccgcagcagcagccgcagccatggcaataccccactcaaccaccgcagctaagcccgtgccagcagttcggatcctgcggcgtcggcagcgtcggcagcccgttcctgggccagtgcgtcgagttcctgaggcaccagtgcagcccggcggcgacgccctacggctcgccacagtgccaggcgctgcagcagcagtgctgccaccagatcaggcaggtggagccgctgcacc

SEQ ID NO: 16794 - DNA, 420 bp, Zea mays
  Clone ID: LIB3151-004-Q1-K1-G8
aacaagcaacatataaagtggaatccagtttcaactattgatctacaatggagaccaaggtatttttcctccttatgctccttgctctttctacatgtgttgctaacgcgacaatttttcctcaatgctcacaagctcctatagcttcccttttttccccataccttccatcaattatagcttcagtatgtgaaaacccagctcttcaaccatatatgcttcaacaagcaatcgcagcatgcaacatacctttatcgcccttgttgtgtcaacaatcgccagccctatctttggtgcagtcattggtacaaaccatcatggcacaacagctgcagcaactcgtgctacctgtgatcaaccaaatagctctggcaaacctttctccctactctccgcaacaacaatttctttcattcaacc

SEQ ID NO: 16795 - DNA, 76 bp, Zea mays
  Clone ID: LIB3151-004-Q1-K1-H1
ctcggcctacctcaacttccagccacacaagtgcagcatcaacatgggagcagaggacccaggtagatcggttagc

SEQ ID NO: 16796 - DNA, 322 bp, Zea mays
  unsure at all n locations
  Clone ID: LIB3151-004-Q1-K1-H10
cagaaacacaccaagcgaagcacannagcaacaacccaacaacaanggcnaccaaganangagcccnccgggcgcgncnagcgccccnngcgagcgcaacaaaagcgnncaaaannccacaaggcncacnngcnccaagnnccaaaannacacagnnccncccaccagnnacnncaaagggcnncgaacacccagcngngcaagccnanaggcnacaacaagcaanngcggcgagcgncnaacaacaaccaannncccagnngcaacaacaanccnnggcacaacnaacaanacaaaccancgcaacgcaacagcaacaaca

SEQ ID NO: 16797 - DNA, 404 bp, Zea mays
  Clone ID: LIB3151-004-Q1-K1-H11
attttcagcattcagaaacacaccaagcgaagcgcactagcaacaacctaacaacaatggctagcaagatattagccctccttgcgcttcttgcccttttagtgagcgcaacaaatgcgttcattattccacagtgctcacttgctcctagtgccattattccacagttcctgccaccagttacttcaatgggcttggaacatgcagccgtgcaagcctacaggctacaactagcgcttgcggcgagcgtcttacaacaaccaattgcccaattgcaacaacaatccttggcacatctaaacctacaaaccatcgcaacgcaacagcaacaacagtttctgccatcactgagccacctagccggggtgaaccctgtcgcctacttgcaacagcagctacttgca

SEQ ID NO: 16798 - DNA, 348 bp, Zea mays
  Clone ID: LIB3151-004-Q1-K1-H2
ctcataaagttcttctattaacatttcatattttttacttacatctttattctgcctttacctatttgcttaaacaaaaactaaccctcactttatcaatagttcctcaacaatagacacttacttcctgacatctatgaattttacttggagcctagccattctaagatttttttgcggagcaacttcctcctcataaatgttttgcgaatagtcactatacaagcttttccgtgaaaaaacttgcctcgaggaataaaggaaagatatcacaccttatacatcctgccttgcaagtttgctgcaaagattttccaatacctccactataaaacacaataaactatt

SEQ ID NO: 16799 - DNA, 421 bp, Zea mays
  Clone ID: LIB3151-004-Q1-K1-H3
cacacacactcgcgaactccatttcgatcccatttgaaatcaacccatcctcgtttcctgcgtctagcagcctctcaccctcatggccaagatcaagatcgggatcaatgggttcggcaggatcggaaggctggtggccagggtggccctgcagagcgacgacgtcgagctcgtcgccgtgaacgaccccttcatcagcaccgattacatgacctacatgttcaagtatgacactgtgcacggacagtggaagcaccatgaggtcaaggtgaaggactccaagacccttctctttggtgagaaggaggttgctgtgtttggctgcaggaaccctgaggagatcccatggggttccgttggcgctgaatatgttgttgagtctactggtgttttcactgaccaagagaaggctgcagctcac

SEQ ID NO: 16800 - DNA, 239 bp, Zea mays
  Clone ID: LIB3151-004-Q1-K1-H5
cacaagaacgcttagttgaaggtacttcttgaaatggatatggatctaataccataggagcttaggccattctatgtcgccaagagaacaggtcttgcggagtacttaatcaacaattcagtgtgaggtcttgtatcttttcaaaagctattgtccagctgctgaggtcgttagcttttgtattacctaacacgtatagatgttggcgttttctagacaaggtcaaatggaatttttgt

SEQ ID NO: 16801 - DNA, 388 bp, Zea mays
  Clone ID: LIB3151-004-Q1-K1-H6
cggattcccgcccgacgcacgcgtccgcaactatcaacataatatgctcaacagtgtaccaatcatggcttccaaaatattgcgccggcctatgctccaaggtctttctgcactattctacctactgcttccattttcccgaaatgcccgctagctcatatagcttccattatttccccctacctatcacaaactgtgtcttcagtgtgagtaaacccaattctacaaccctacatgatccaacactcaatcgcaactagcatattacgattatcaccctcgatgattcaacatgtcattagccctattacaacagctacctctggagaacatattgccacaaaacatcacgacgctacaaccacctcatcttgtgctaactaacctt

SEQ ID NO: 16802 - DNA, 351 bp, Zea mays
  Clone ID: LIB3151-004-Q1-K1-H7
cccacgcgtccgcttagcttcgcttcagtgtcttcacgggccgccggcggagatgcggttcacggggtctccggtggtggagcttccggtcagcggcgcggtgttgactttcgagcaggacaacgactccttcgaggtgggcacctctgtgtggccctcgtccctggtcctcgtcaagttcgtcgagcgttgcatccgcgacccggccctcccctttgccgacgtgctccgcttcccgggaacccgggccgtggagctcgggtccgggtgcggaccggcatgacttggcctctcccggctcggcctcaccgatctcgtcctcaccgacatcgccgccgtggtcccggcgct

SEQ ID NO: 16803 - DNA, 410 bp, Zea mays
  Clone ID: LIB3151-004-Q1-K1-H8
cgcaaattgcaccaagaaatccatcgagaggccgtcgacaggggaattaatggcgtcggggtctagcagcagccaccgccgcctcatcctcgcagccgccgtcctgctctccgtgctcgcggctgccagcgccagcgccgggacctcctgcgtgccggggtgggccatcccgcacaacccgctcccgagctgccgctggtacgtgaccagccggacctgcggcatcgggccgcgcctcccgtggccggagctgaagaggagatgctgccgggagctggcggacatcccggcgtactgccggtgcacggcgctgagcatcctcatggacggcgcgatcccgccgggccctgacgcgcagctggagggccgcctagaggacctgccgggctgcccgcgggaggtgcagaggg

SEQ ID NO: 16804 - DNA, 295 bp, Zea mays
  Clone ID: LIB3151-004-Q1-K1-H9
ccggggggggactccacgcgtgagggaaaatgccggaggtcaagcgttcactggaaagcaacgggcacttgacttggttccaactaagatacatgataggtcaccaatatttcttggcagctatgatgatattgaagaaattaaagcactctatgctgctgaagggaaaaaggaatgagtgtacaattctcattcttctcccactctatctttactggattcaggtttcaatcatcaaagtatataattcatttcaaagcttattctgtgatgcgatactatatctatattgaac

SEQ ID NO: 16805 - DNA, 317 bp, Zea mays
  Clone ID: LIB3151-005-Q1-K1-A1
ggtcttcagaccattagctttatctactccagagcgcagaagaacccgatcgacaccatgagggtgttgctcgttgccctcgctctcctggctctcgctgcgagcgccacctccacgcatacaagcggcggctgcggctgccagccaccgccgccggttcatctaccgccgccggtgcatctgccacctccggttcacctgccacctccggtgcatctcccaccgccggtccacctgccgccgccggtccacctgccaccgccggtccatgtgccgccgccggttcatctgccgccgccaccatgccactaccctac

SEQ ID NO: 16806 - DNA, 437 bp, Zea mays
  Clone ID: LIB3151-005-Q1-K1-A10
cagaccattagctttatctactccagagcgcagaagaacccgatcgacaccatgagggtggtgctcgttgccctcgctctcctggctctcgctgcgagcgccacctccacgcatacaagcggcggctgcggctgccagccaccgccgccggttcatctaccgccgccggtgcatctgccacctccggttcacctgccacctccggtgcatctcccaccgccggtccacctgccgccgccggtccacctgccaccgccggtccatgtgccgccgccggttcatctgccgccgtcaccatgccactaccctactcaaccgccccggcctcagcctcattcccagccacacccatgcccgtgccaacagccgcatccaaacccgtgccagctgcagggaacctgcggcgttggcagcacccccgacctgggccagtgcgt

SEQ ID NO: 16807 - DNA, 91 bp, Zea mays
  Clone ID: LIB3151-005-Q1-K1-A11
ttaacaaaaaacttaacttatccgtctagtctaaaaaccccaaccaaaccattcggggggtggttctttgcctggcttttctgcgcttttt

SEQ ID NO: 16808 - DNA, 88 bp, Zea mays
  Clone ID: LIB3151-005-Q1-K1-A2
gtgaagacactcactggccagacactcaccctagtggcggagtctgcgcctacgattaacaatgtgcaggccgagatccatgacatgg

SEQ ID NO: 16809 - DNA, 310 bp, Zea mays
  Clone ID: LIB3151-005-Q1-K1-A3
cacaggggtcacgtcagtctcctactaatttcaatagcacagcgagagcctcggaagaagaagaagcttgctgagcgccatggcgtgttccaactgcgagtgccaccgccggttcgacctgatcgtggtgggcgcgggcatgatgggcagctgcgccgtctactctacgtcctctcgtggctcgcgcagtgctggttctggtgcggttctacctgcttcaccaccggggcttctagcacggcgagtcgcgcaccatgcgagccacctaccctgaggcgcactaccctcacatggtgcgcctgtcctggcg

SEQ ID NO: 16810 - DNA, 385 bp, Zea mays
  Clone ID: LIB3151-005-Q1-K1-A4
gggtcttcagaccattagctttatctactccagagcgcagaagaacccgatcgacaccatgagggtgttgctcgttgccctcgctctcctggctctcgctgcgagcgccacctccacgcatacaagcggcggctgcggctgccagccaccgccgccggttcatctaccgccgccggtgcatctgccacctccggttcacctgccacctccggtgcatcttccaccgccggtccacctgccgccgccggtccacctgcaaccgccggtccatgtgccgccgccggttaatttgcggccgcaacattgcaattaccctaataaaccgcccgggcttaagcttattcccaagcacaaccattgccgtggcaacaagcggattcaaacc

SEQ ID NO: 16811 - DNA, 269 bp, Zea mays
  Clone ID: LIB3151-005-Q1-K1-A6
ctctgctctctcctctcccccacctctgcgtccgtgcgttgtgtttgtttaggcggcaaccgcgaggcgcaatggcggccgggcgagagctggtggtgagtttcggcgagatgttgatagacttcgtgcccaccgtggcgggggtctcgctggcggaggcgccggcctttctcaaggcgcccgggggcgcgcccgccaacgtcgccatcgcggtctcgcgcctcggcggcggggccgcctttgtcggcaagctcggcgacgacgagttc

SEQ ID NO: 16812 - DNA, 390 bp, Zea mays
  Clone ID: LIB3151-005-Q1-K1-A7
ctgggtcttcagaccattagctttatctactccagagcgcagaagaacccgagcgacaccatgagggtgttgctcgttgccctcgctctcctggctctcgctgcgagcgccacctccacgcatacaagcggcggctgcggctgccagccaccgccgccggttcatctaccgccgacggtgcatctgccacctccggttcacctgccacctccggtgcatctcccaccgacggtccacctgcctgcgccggtccacctgccaccgacggtccatgtgccgccggcggttcatctggcggcgtcaccatgccactaccctactcaaccgtcccggtctcaggctcatacccagccacacccatgcccgtgccaacagccgcatgcaagcccg

SEQ ID NO: 16813 - DNA, 370 bp, Zea mays
  unsure at all n locations
  Clone ID: LIB3151-005-Q1-K1-B1
gcaaagcggcagtgcgtaaagaggatcgtcgaacagaacagcatgaagatggtcatcgttctcgtcgtgtgcctggctctgtcagctgccagcgcctctgcaatgcatatgccctgcccctgcgcggggctgcagggcttgtacggcgctggcgccggcctgactacgatgatgggcgccggcgggctgtacccctacgcggagtacctgaggcagtcgcagtgcatcccgctggcggcggcgccctactacgccgggtgtgggcagactagcgccatgtaccagccgcttcggcaacagtgctgccagcagcagatgaggatgatggacgtgcagtncgtcgcgcagcagctgcagatgatgatgcagc

SEQ ID NO: 16814 - DNA, 333 bp, Zea mays
  Clone ID: LIB3151-005-Q1-K1-B10
tgaagaaagaaacgatcagacatatgtaacaactacccctgaattaccttatgtagaggaggcaattaccaatgctggtgactggtttattggcggtgacttggaggtcatagtaccaatctactacaatgatgggctggatcaatatagcctgtctccagcacagatgcgtgaagagtttgccaggcgcaatgctgatgcagtatttgcctttcatcttcgcaatccagtacacaatgggcatgctctacttatgaccgacacacgcaaacgcctccttgagatgtggtataaaaaccctgtacttctgctccatccactgggatgattcac

SEQ ID NO: 16815 - DNA, 81 bp, Zea mays
  Clone ID: LIB3151-005-Q1-K1-B11
atccatatcagcaaacggcaggcttataaggatcgccgaacataacacatgggaaggtattttctcgcgtgccctgtctct

SEQ ID NO: 16816 - DNA, 403 bp, Zea mays
  Clone ID: LIB3151-005-Q1-K1-B12
ggttgctcaggcactgatttttcaccatcttggaagatcttggagaaagccatcagagaagccatacgacccagattatatacgggtcttacacctatttggtgactctgaagcttgtgctttctctattcacaatttacttcaagctggaaggaattatggtctggctgctggatcatgggtgggtccatatgctatgtgccgggcatggcagacccttatccgcacaaatagagagcaagctgatgctgtcgatgggaaggaaaatttccctatggcgctatatgtcgtttcgggtgatgaagatggtgaaagaggtggagctccagttttttgtattgatgttgctgctcagctttgctccaatttcaataaaggacaatgtacatggtcacctattctt

SEQ ID NO: 16817 - DNA, 239 bp, Zea mays
  Clone ID: LIB3151-005-Q1-K1-B2
cccacgcgtccgaccagaagagcggcggcgcgggcggacaaggagcaggcggaggaggagttgtgccaagccacaatgggtatctcgcgtgactcgatgcacaagcgccgagccaccggtggaaagcagaaggcctggaggaagaagcgaaagtatgagcttggtcgccagccagccaacaccaagttgtcaagcaataagacagtgaggagggtccgtgttcgtggaggtaatgtgaa

SEQ ID NO: 16818 - DNA, 392 bp, Zea mays
  Clone ID: LIB3151-005-Q1-K1-B3
ctccagagcgcagaagaacccgatcgacaccatgagggtgttgctcgttgccctcgctctcctggctctcgctgcgagcgccacctccacgcatacaagcggcggctgcggctgccagccaccgccgccggttcatctaccgccgccggtgcatctgccacctccggttcacctgccacctccggtgcatctcccaccgccggtccacctgccgccgccggtccacctgccaccgccggtccatgtgccgccgccggttcatctgccgccgccaccatgccactaccctactcaaccgccccggcctcagcctcatccccagccacacccatgcccgtgccaacagccgcatccaagcccgtgccagctgcagggaacctgcggcgttggca

SEQ ID NO: 16819 - DNA, 245 bp, Zea mays
  Clone ID: LIB3151-005-Q1-K1-B4
ctttcagcaagtgttgctaccgcgactattattccacaatgctcacaacaatacctctctgcggtgacagccgcgagatttgaatacccaactatacaatcctacaggctacaagaggccatcacagcaagcatcttacggtcgttagcattgactgtccaacaaccatatgccctattgcaacaaccatccttagtgaatctatatctccaaagaatcgcagcacaacaactacaacagcagtt

SEQ ID NO: 16820 - DNA, 377 bp, Zea mays
  Clone ID: LIB3151-005-Q1-K1-B5
caactagcaacatagaaagcacaatagtgtaccaacaatggcagccaaaatattttgcttccttatgctccttggtctttctgcaagtgctgctaccgcaaccattttcccacaatgctcacaagctcctatagcttcctttcttcccccatacctctcaccagcggtgtcttcagtatgtgaaaacccaattcttcaaccctacaggatccaacaggcaatcgcagcaggcatcttacctttatcacccttgttcctccaacaaccgtcagccctattacagcagttacctttggtgcatttgttggcacaaaacatcaaggcacaacaactacaacaacttgtgctaggaaaccttgctgcctactctcagcaac

SEQ ID NO: 16821 - DNA, 317 bp, Zea mays
  Clone ID: LIB3151-005-Q1-K1-B6
agcgctctcactagcctcgcattccgtccctgcagtgcaggggcaggccggtgaggtctgggagaggaggaggaggaggagatggccggtagggagagcggcgggatggcggcggcgctgcgctgcgctggaaggatcgggatcctggccaccgtcgcagtgaacctcgcgtggatcgcgacgtacatccgccggcgctacttcggcggcgggaaccgatccgacaacaacagtggcggcggtgaggtggagccgtcaagagggaagccgccggtcacttcggactccatcgtcaacctcgatcatggcgacccgac

SEQ ID NO: 16822 - DNA, 346 bp, Zea mays
  Clone ID: LIB3151-005-Q1-K1-B7
ctccagagcgcagaagaacccgatcgacaccatgagggtgttgctcgttgccctcgctctgctggctctcgctgcgagcgccacctccacgcatacaagcggcggctgcggctgccagccaccgccgccggttcatctaccgccgccggtgcatctgccacctccggttcacctgccacctccggtgcatctcccaccgccggtccacctgccgccgccggtccacctgccaccgccggtccatgtgccgccgccggttcatctgccgccgccaccatgccactaccctactcaaccgccccggcctcagcctcatccccagccacacccatgcccgtgccaacag

SEQ ID NO: 16823 - DNA, 333 bp, Zea mays
  Clone ID: LIB3151-005-Q1-K1-B8
attttgagcattcagaaacacaccaagcgaagctacctagcaacgacttaacaacaatggctaccaagatattagccctccttgcgcttcttgccctttttgtgagcgcaacaaatgcgttcattattccacaatgctcacttgctcctagtgccattataccacagttcctccgaccagttacttcaatgggcttcgaacacctagctgtgcaagcctacaggctacaacaagcgcttgcggcgagcgtcttacaacaaccaattaaccaattgcaacaacaatccttggcacatctaaccatacaaaccatcggaacacaacagcaacaac

SEQ ID NO: 16824 - DNA, 389 bp, Zea mays
  Clone ID: LIB3151-005-Q1-K1-B9
ggaagaaagaatagcacggacatgggggacaactgcacctggattaccttatgttgaggaggcaattaccaatgctggtgactggttgattggtggggacttggaggttatagaaccaatcaagtacaatgatggtctggatcagtatcgcctgtctccagcacagctgcgtgaagagtttgccaggcgcaatgctgatgcagtatttgcctttcagcttcgcaatccagtacacaatgggcatgctctacttatgaccgacacacgcaaacgcctccttgagatgggttataaaaaccctgttcttctgctccatccactgggaggattcacaaaagcagatgatgtgcctcttagttggagaatgaagcaacatgagaaggttcttg

SEQ ID NO: 16825 - DNA, 437 bp, Zea mays
  Clone ID: LIB3151-005-Q1-K1-C1
gaccaacaagcaacatagaaagtggaatacagtagcaacaatagagcaacaatggcggccaagatattttccatccttatgctccttgctctttctgcatgtgttgctaacgcgaccatttttcctcaatactcacaagctcctatagctgcccttcttcccccataccttccatcaatgaccgcttcagtatgtgaaaacccagcccttcaaccctacaggctccaacaagcaatcgcaacaagcaacttacctttatcacccctgttctttcaacaatcgccagccctatctttggtgcagtcattggtacaaaccatcagggcacaacagctgcagcaactcgtgctaccagtgatcagccaagtagctctggcaaacctttctccctactctcagcaacaacaatttctttcattcaaccaactgtctacact

SEQ ID NO: 16826 - DNA, 447 bp, Zea mays
  Clone ID: LIB3151-005-Q1-K1-C10
gagaccaacaagcaacatagaaagtggaatccagtagcaacaatagagcaacaatggagaccaagatattttccctccttatgctccttgctctttctacatgtgttgctaacgcgacaattttccctcaatgctcacaagctcctatagcttccctttttcccccataccttccatcaattatagcttcagtatgtgaaaacccagctcttcaaccatataggcttcaacaagcaatcgcagcaagcaacatacctttatcgcccttgttgtgtcaacaatcgccagccctatctttggtgcagtcattggtacaaaccatcatggcacaacagctgcagcaactcgtgctacctgtgatcaaccaagtagctctggcaaacctttcttcctactctccgcaacaacaatttcttccattcaaccaactgtctacactgaaccctg

SEQ ID NO: 16827 - DNA, 406 bp, Zea mays
  Clone ID: LIB3151-005-Q1-K1-C11
ctactccagagcgcagaagaacccgatcgacaccatgagggtgttgctcgttgccgcgcgcgctcctggctctcgctgcgagcgccacctccactcatacaagcggcggctgcggctgccagccaccgccgccggttcatctaccgccgccggtgcatctgccacctccggttcacctgccacctccggtgcatctcccaccgccggtccacctgccgccgccggtccacctgccaccgtcggtccatgtgccgccgccggttcatctgccgccgccaccatgccactaccctactcaaccgccccggcctcagcctcatccccagccacacccatgctcgtgccaacagccgtatccaagcccgtgccagctgcatggaacctgctgcgtttggagcacccctat

SEQ ID NO: 16828 - DNA, 297 bp, Zea mays
  Clone ID: LIB3151-005-Q1-K1-C12
tcgttggagccctatcccaatgtcgttcgggctttcaacaactgctacatctctcgcgagctgagcgctttctttcccgggcatcatgcctcctgttatgctgttgaatatgcatctaacatgagtattcttaatggcttgtggcttcaagaagcatcatcttcttggctatctgatcctgaggaatgtcatggtcaattatctccaaccctttcctgctgctcctggttagctgcgccatctccttcgccttgttcattacttttgtggcgccgtttgatacgattcttactcact

SEQ ID NO: 16829 - DNA, 317 bp, Zea mays; identical to SEQ ID NO: 16805
  Clone ID: LIB3151-005-Q1-K1-C3

SEQ ID NO: 16830 - DNA, 265 bp, Zea mays
  Clone ID: LIB3151-005-Q1-K1-C4
ccccgctctcctccctccgctcgcctccgcttccgttccgcgccctgcccccggaaggcaagcaaagccctcgctacttgcggagcgtcgttggtcaaaccctagcacacgtacgagcaggccagccccgcccgctcccattcccaggccctcatccatggcggcgctctccgtgccccttcacgccgtcgccggatcccgcgccgtcgcgggcgaccccgtcaaggttccgtgcgtgaggagcactggttcagcccattttggg

SEQ ID NO: 16831 - DNA, 460 bp, Zea mays
  Clone ID: LIB3151-005-Q1-K1-C5
tagcaacatacatagtgaagtacactagcaacatcttagcaccaatgggagcgaagatttttgccctccttgccctccttgctctttcagcaagcgctgctacctcgacttttattccacaatgctcacaacaatacctctctccggcgacagccgtgggatttcaatacccaactatacaatcctacatggtacaagaggccatccaagcaagcatcttacggtcattagcattaaccctccaacaaccatatgctctattgcaacagccatccttagtgcatctgtatctccaaagaatcgcggcacaacaactacaacaacagttgctaccaacaatcaatcaagtagttgcagcgaaccttgctgcttacctccagcaacaacagtttcttccattcaatcaactagatggggtgaaccctgctatctacttgcatgcacaacagctactaccatt

SEQ ID NO: 16832 - DNA, 153 bp, Zea mays
  Clone ID: LIB3151-005-Q1-K1-C6
actagttctagatcgcgagctgccgccctttttttttcatcttttttattgggagctttctggtcctttttgcggctctttcacctacaaacacctctgcaaacacaaactctgccccttcactcgacatcattacttgtaccgatccatagc

SEQ ID NO: 16833 - DNA, 376 bp, Zea mays
  Clone ID: LIB3151-005-Q1-K1-C7
atcgcatcaagcatctcacctttatcacccttgttcctccaacatcccgtcggggtattagagcattttccttcggcgcattctttttcacaaaacatcaaggcccaacacctactacaacttgtgctaggaaaccttgctgcctactctcagcaacagcagtttcttccattcaaccaactggctgcattgaactcaccttcttattcttcaacaacaactaccatctcagccatctagctgctgactacactcaacaatttttttcattcaaccaactgacattattgaactctgatgattatttacaacagtacacagctaccaccattcatccagctaggttatgtgagacctgctgccttcttgacacaac

SEQ ID NO: 16834 - DNA, 379 bp, Zea mays
  unsure at all n locations
  Clone ID: LIB3151-005-Q1-K1-C8
cagtttgatgctaagcactatgattctaatatgcaggagctgctgagcactggggagactgaggagttcttcacttcatatgatgaantttttgaaagttttgatgacatgggccttcaagagaatcttctgagaggcatttatgcatatggttttgagaaaccatctgcatttcagcagagaggaattgttcccttctgcaaggggcttgatgtcattcagcaagcacaatctggtacaggaaagacagcaaccttctgttctgggatcttgcagcagcttgactatggcctggttgaatgccaggccctggtttttgctcccacccgtgagctcgcacaacaaattgagaaagttatgcgcgcacctggtgactacc

SEQ ID NO: 16835 - DNA, 83 bp, Zea mays
  Clone ID: LIB3151-005-Q1-K1-C9
aaaaaaaaataaaaaaaaataaataaaaaaataaaaaaaaaaaatataaaaaaaatgggaagggataattaataaaataaatt

SEQ ID NO: 16836 - DNA, 442 bp, Zea mays
  Clone ID: LIB3151-005-Q1-K1-D1
atagaaagcacaatagtgtaccaacaatggcagccaaaatattttgcctccttatgctccttggtctttctgcaagtgctgctacggcgaccattttcccgcaatgctcgcaagctcctatagcttcccttcttcccccgtacctctcaccagcggtgtcttcggtatgtgaaaacccaattcttcaaccctacaggatccaacaggcaatcgcagctggcatcttacctttatcacccttgttcctccaacaatcatcagccctattacaacagttacctttggtgcatttattggcacaaaacatcagggcacaacaactacaacaacttgtgctagcaaaccttgctgcctactctcagcaacagcagtttcttccattcaaccaactaagttcattgaactctgcttcttatttgcaacaacaacaactaccattcag

SEQ ID NO: 16837 - DNA, 446 bp, Zea mays
  Clone ID: LIB3151-005-Q1-K1-D10
ctagcggtttagttccaccaaataattctgtgatgagatcacttgttacttctgaatgtggaaagtcaaaagtgtcagaggatgacaatgatggtaccatccaacctcgtcagccagactgggcggcggtattggatgcagctactaaaagaaggtcagaggttcttgcccctgagaatcttgagaacatgtgggcaattggaagaaattatcaaaagaaaatggttaaattagaccactcatcaagacagaaaggctctgaaggctcagataatagtacaagtgcatgggcagttggtaaagagctatcctctaacttcaacgagagaattgcatctgtcgatgataaatacatggtcaatctgatgcacagtaaaaataggaatgctcaatctaccttcgtcacaggtagtcatccacttgctctacataatatgaatgaagtg

SEQ ID NO: 16838 - DNA, 436 bp, Zea mays
  Clone ID: LIB3151-005-Q1-K1-D11
attttgagcattcagaaacacaccaagcgtttcgcactagccacgacctaacaacaatggcggccaagatattagccctccttgcgcttcttgccctttttgtgagcgcaacaaaagcgttcattattccacaatgctcacttgctcctagtgccattattccacagttcctcccaccagttacttcaatgggcttcgaacacctagctgtgcaagccaacatgcaacaacaagcgcttgcggcgagcgtcttacaacaaccaattgcccaattgcaacaacaatccttgccacatctaacaatacaagccatcacaacgcaacagcaacaacagttcctaccagcactgagccacctagtcatggtgaaccctgccgcctacttgcaagagcagctgctcgcattcaacccacttgctctggcgaacgtagttgc

SEQ ID NO: 16839 - DNA, 449 bp, Zea mays
  Clone ID: LIB3151-005-Q1-K1-D12
attgagaccaacaagcaacatagaaagtggaatccagtagcaacaatagagcaacaatggggaccaagatattttccctccttatgctccttgctctttctacatgtgttgctaacgcgacaattttccctcaatgctcacaagctcctatagcttccctttttcccccataccttccatcaattatagcttcagtatgtgaaaacccagctcttcaaccatataggcttcaacaagcaatcgcagcaagcaacatacctttatcgcccttgttgtgtcaacaatcgccagccctatctttggtgcagtcattggtacaaaccatcagggcacaacagctgcagcaactcgtgctacctgtgatcaaccaagtagctctggcaaacctttctccctactctccgcaacaacaatttcttccattcaaccaactgtctacactgaaccct

SEQ ID NO: 16840 - DNA, 297 bp, Zea mays
  Clone ID: LIB3151-005-Q1-K1-D2
gaccaactagcaacatagaaagcacaatagtgtaccaacaatggcagccaaaatattttgcttccttatgctccttggtctttctgcaagtgttgctaccgcaaccattttcccacaatgctcacaagctcctatagcttcccttcttcccccatacctctcaccagcggtgtcttcaatgtgtgaaaacccaattgttcaaccctacaggatccaacaggcaatcgcaacaggcatcttaccattatcacccttgttcctccaacaaccgtcagccctattacagcagttaccttt

SEQ ID NO: 16841 - DNA, 431 bp, Zea mays
  Clone ID: LIB3151-005-Q1-K1-D3
gctcgacaagagttcttcttggttaagcaattgccaaattatgagcaaaaaggtttcgttggcgattgcgagctcgtggacgcttgctgaccaccctaagctccccatggggaagccggtggctgtcgtcgtgctggacggatggggcgaggccaaccccgaccagtacaactgcatccatgtcgctcacactcctgtcatggactcgttaaagaatggtgctcctgagaaatggagactagtgaaggctcatggaacagctgtgggtctcccatctgatgatgacatgggcaacagtgaagttggtcacaatgcactaggtgctggtcggattttcgcccaacgtgctaagcttgttgatcaagctcttgcctcatgaaagatttatgatggagatggggtcaactacatcaaagaatcttttgaaaatg

SEQ ID NO: 16842 - DNA, 420 bp, Zea mays
  Clone ID: LIB3151-005-Q1-K1-D4
gaaacacaccaagcgaagcgcactagcaacaacctaacaacaatggctaccaagatattatgcctccttgcgcttcttgcgctttttgcgagcgcaacaaatgcgtccattattccacaatgctcacttgctcctagttccattattccacagttcctcccaccagttacttcaatggccttcgaacacccagctgtgcaagcctataggctacaacaagcgattgcggcgagcgtcttacaacaaccaattgcccaattgcaacaacaatccttggcacatctaacaatacaaaccatcgcaacgcaacagcaacaacagttcctaccagcactgagcacctagccatgtgaccctgtcgctactgcacagcagtgttgatcaccacttgttacaacgagtgaacacacacacactgac

SEQ ID NO: 16843 - DNA, 406 bp, Zea mays
  Clone ID: LIB3151-005-Q1-K1-D5
cctcgcctggccttggtgttcacgccatctctagcgcctgccgcggagaagctgctgccctgcccggcgccaggctcgggtggtcataagccaggcaggtgctacgcgtgaacacggtcacaccagtacggcagtgccacgcgacgtgaacggtgaactcgtgaagaacagagccgacactgaggaaaccctatagacggcggcgtgctaccggtgacattgtgccactcgggcccttcatccatgacgcaaaggcgccagactgcaggaagccagcccctattcgagacaaggtcgatctttgctgcctcggcgagcttcacccgaatcaaggacgagcatggcggcatgccagtaaatagagcaacacacaacccttcaaattaatggagacctatgcagcaac

SEQ ID NO: 16844 - DNA, 331 bp, Zea mays
  Clone ID: LIB3151-005-Q1-K1-D6
cgttacattaggtgatctggttgtgaaggttctggaatttattgaagctacaaaggagccagggcttaccttcatggttgcaaaatttgatggcattcttgggctaggctttcaagaaatctctgttgggaatgcaacaccagtgtggtataacatggtgaaacaaggtctcatcagcgaccctgttttctctttctggtttaaccgacatgctgatgaaggagaaggtggtgaaattgtgtttggtggaatggattctagccactacaagggtgatcacacgtttgtcccagtcactcggaaaggatactggcagttcaacatgggtgat

SEQ ID NO: 16845 - DNA, 409 bp, Zea mays
  Clone ID: LIB3151-005-Q1-K1-D7
gtttcgcgtccgcctcatcccgccgcaaggttaggtaagttcaggagacatcttcgagaagctgaaatggctcctaaagctgctcctgccaagaagggtgatgccaagacccaggccttgaaggttgccaaggctgtgaagtctggggcagccaagaagaagaccaagaagatccgcacgtctgtgacatttcaccgccccacgaccctgaagaaggctagggaccccaagtacccacgaatcagcactaccggaaggaacaagcttgatcagtaccaaattctcaagtacccccttaccacagaatcagcgatgaagaagattgaagataacaacactctggtcttcattgttgacctcaaggcagacaagaagaagatcaaggctgccgtcaagaagatgtatgaca

SEQ ID NO: 16846 - DNA, 445 bp, Zea mays
  Clone ID: LIB3151-005-Q1-K1-D8
cgcaaattgcaccaagaaatccatcgagaggccgtcgacaggggaattaatggcgtcgtcggctagcagcagccaccgccgcctcatcctcgcagccgccgtcctgctctccgtgctcgcggctgccagcgccagcgccgggacctcctgcgtgccggggtgggccatcccgcacaacccgctcccgagctgccgctggtacgtgaccagccggacctgcggcatcgggccgcgcctcccgtggccggagctgaagaggagatgctgccgggagctggcggacatcccggcgtactgccggtgcacggcgctgagcatcctcatggacggcgcgatcccgccgggcccggacgcgcagctggagggccgcctagaggacctgccgggctgcccgcgggaggtgcagaggggattcgccgccaccctcgtcacggaggccgagtgc

SEQ ID NO: 16847 - DNA, 452 bp, Zea mays
  Clone ID: LIB3151-005-Q1-K1-D9
caaatactgatctcactgatccagtatggctatggcaaaggcaggcgcgccgagggtctcggcggcccagctggtgactctcgggctatcactcctctgcgctgtcgccggcccggccgccgcgcagaactgcggctgccagccaaacgtatgctgcagcaagtttggctactgcggcacgaccgacgagtactgcggcgacgggtgccagtcgggcccgtgccgctcgggcggcggcggcagcagtggcggcggtggtgcgaacgtggctagcgtcgtcaccggctccttcttcaacggcatcaagagccaggccgggagcgggtgcgagggcaagaacttctacacccggagcgcgttcctgagcgccgtcaaggcgtacccaggcttcgcccatggcgggtcgcatgtgcagggcaagcgcgagatcgccgccttcttcgcgcacgcct

SEQ ID NO: 16848 - DNA, 413 bp, Zea mays
  Clone ID: LIB3151-005-Q1-K1-E1
cccgtgcatatttcagtcgtcgctcgcggagccgtggcgcatcgcgactcaagcactcaccgaccgcggatatggccccgtcgccatggcctctccttgcgacttccctcctcctcatcctattccaccactcgcctcgcgccgcggcggcgtttccgccgtctcttggcgacggcctcctgggcgccgcccgcgcgccgggtttcgcggcgtggctgcgcggcttgcggcgccgcatccacgagcgccccgagctcgccttccaggagcaccgcaccagcgagctcgtccgcgacgagctcgacgcgatcggtgtgccgtacgcgtggcccgtcgcgcagacgggcgtcgtggcgaccatcgccggcggcagcgatggccccgtcgtcgcgctccgagccgacatggacgcg

SEQ ID NO: 16849 - DNA, 447 bp, Zea mays
  Clone ID: LIB3151-005-Q1-K1-E10
agaccaacaagcaacatataaagtggaatccagtagcaacaatagagcaacaatggagacggagatattttccctccttatgctccttgctctttctacatgtgttgctaacgcgacaattttccctcaatgctcacaagctcctatagcttccctttttcccccataccttccatcaattatagcttcagtatgtgaaaacccagctcttcaaccatataggcttcaacaagcaatcgcagcaagcaacatacctttatcgcccttgttgtgtcaacaatcgccagccctatctttggtgcagtcattggtacaaaccatcatggcacaacagctgcagcaactcgtgctacctgtgatcaaccaagtagctctggcaaacctttctccctactcttcgcaacaacaattttttccattcaaccaactgtctacactgaaccctgc

SEQ ID NO: 16850 - DNA, 245 bp, Zea mays
  Clone ID: LIB3151-005-Q1-K1-E11
gttctcgcctcgtcgtccccaatcgtcgtctagagtttaccgatccttcttccacgacctggaccgttggtgccagggccggctcgcatactgtgcttgtactgcccccgccccgtcatggattcgtgccgagctcaccatcgaacatgttctgtttagagatatttcatgggttcatttcatgtttactaagctctttttattgaacagttccttttacttttacggtgacattaccactaaca

SEQ ID NO: 16851 - DNA, 336 bp, Zea mays
  Clone ID: LIB3151-005-Q1-K1-E12
tcaaattgcacctagaaatccatctagaggccgtcgacaggggaattaatggcggggtgggttagcagcagtcaccgccgcctcatcctcgcagccgccgtcctgctctccgtgctcgcggctgccatcgccagcgccgggacctcctgcgtgccggggtgggccatcccgcacatcccgctccctagctgccgttggtacgtgaccagcctgacctgcggtatttggcctcgcctcccgtggccggtgctgaagaggagatgctgccggtagctggcggacatcccggtgtactgccggtgcacggtgctgtgcatcctcatggactgcgcgatc

SEQ ID NO: 16852 - DNA, 444 bp, Zea mays
  Clone ID: LIB3151-005-Q1-K1-E2
accgcaaccattttcccacaatgctcacattctcctatagcttcctttcttcccccatacctctcaccagcggtgtcttcagtatgtgaaaacccaattcttcaaccctacaggatccaacaggcaatcgcagcaggcatcttacctttatcacccttgttcctccaacaaccgtcagccctattacagcagttacctttggtgcatttgttggcacaaaacatcaaggcacaacaactacaacaacttgtgctaggaaaccttgctgcctactctcagcaacagcagtttcttccattcaaccaactggctgcattgaactctgctgcttatttgcaacaacaactaccattcagtcagctagctgctgcctacccccagcaatttttttcattcaaccaaactgcaagatttgactctgctgttatttacaacagcaacagc

SEQ ID NO: 16853 - DNA, 351 bp, Zea mays
  Clone ID: LIB3151-005-Q1-K1-E3
cagaccattagctttatctactccagagcgcagaagaacccgatcgacaccatgagggtggtgctcgttgccctcgctctcctggctctcgctgcgagcgccacctccacgcatacaagcggcggctgcggctgccagccaccgccgccggttcatctaccgccgccggtgcatctgccacctccggttcacctgccacctgcggtgcatctgccaccgccggtccacctgccgccgccggtccacctgccaccgccggtccatgtgccgccgccggttcatctgccgtcgccaccatgccactaccctactcaaccgccccgggctcagcctcatccccagccacaccca

SEQ ID NO: 16854 - DNA, 357 bp, Zea mays
  Clone ID: LIB3151-005-Q1-K1-E4
tttcaacattcataaacacaccaagcgaagcgcactatcaacaacctaacaacaatggctacgcaagatattagccctccttgcgcttcttgcccttttagtgagcgcaacaaatgcgttcattattccacagtgctcacttgctcctagtgccattattccacagttcctcccaccagttacttgaatgggcttagaacatccagccgtgcaagcctacaggctacaactagcgcttgcggcgagcgtcttacaacaaccaattgcccaattgcaacaacaatccttggcacatctaaacctacaaaccatcgcaacgcaacatcaacaacagtttctgccatcactgagccacct

SEQ ID NO: 16855 - DNA, 385 bp, Zea mays
  Clone ID: LIB3151-005-Q1-K1-E5
gcaacatataaagcacattagtgtaccaactatggcagccaaaatattttgcggccttatgctccttggtctttctgcatgtgctgctactgcgaccattttcccgcaatgctcgcaagctcctatagcttcccttcttcccgcgtacctctcaccagcggtgtcttccgtttgtgaaaacccaattcttcaaccctacaggatccaacatgcaatctcagctggcatcttacctttatcacccttgttcctcctacaatcatcagccctattacaacagttacctttgttgcatttatcggcacaaaacatcatggcacaacaactacaacaacttgtgctagcaaaccttgcttgctactcttatcaacagcagtttcttcca

SEQ ID NO: 16856 - DNA, 394 bp, Zea mays
  Clone ID: LIB3151-005-Q1-K1-E7
gcgaatgcgacccttccttctttgctccttccgcgccgcctcccggccgtcggcgccatggggaagtactcgcaggagccgggcaaccctaccaagtcggctaaggccatgggcagggatctgagggtccacttcaagaacacaagggagacagcctttgcgcttcgcaagttgtctttgaccaaggctaagcgataccttgaggatgttattgctcacaagcaggcaattcccttccggagatactgtgggggtgttggtcgcaccgcgcaagctaagtcgcgccacttcaatgggcagggccgctggcccgttaaatcaaccaggttcattctggattttctgaagaatgctgatagtaacgctgatgtgaaaagctgggatgtggacaacc

SEQ ID NO: 16857 - DNA, 279 bp, Zea mays
  Clone ID: LIB3151-005-Q1-K1-E9
gggaagtgagatgtggagaagtaaaacgaacgattacaagcctgccaagtctagacgtctggctcacaaagaagagaagcttcgcaagtctaatgatgaacagacaaccaaacctgggacagccacggaatttcataacatccagaccggcgcgggtgagctccttgttacatacgagggatccaggctagctattaaagacctaaggaggcttatggatacatgccacaaagaagacatgactggtgcatcggaggccacttttctgtatagtgaaaa

SEQ ID NO: 16858 - DNA, 445 bp, Zea mays
  Clone ID: LIB3151-005-Q1-K1-F1
ctgggtcttcagaccattagctttatgtactccagagcgcagaagaacccgatcgacaccatgagggtgttgctcgttgccctcgctctcctggctctcgctgcgagcgccacctgcacgcatacaagcggcgggtgcagctgccagccaccgccgccggttcatctaccgccgtcggtgcatgtgccacctccggttcacctgccacctccggtgcatcttccaccgtcggtccagctgccgccgccggtccaactgccaccgccggttcatgtgccgacgccggttcatctgccgtcgtcaacatgccactaccctacataaccgcccaggacttagactcattcccagccacacccatgcccgtgccaacagccgcatacaatcccgtgccagctgcagggaacctgcggcgttggcagcaccccgatcctgggccagtgcg

SEQ ID NO: 16859 - DNA, 405 bp, Zea mays
  Clone ID: LIB3151-005-Q1-K1-F10
cttccattcaaccaactgtctacattgaaccgtgctgcttatttgcagcaacaacgattagcattcagccagctagctactggctactctcagcaacaacaacttcttccatttaaccaattggccgcactgaaccccgctgcttatttgcagcagctaatactactaccatttatccagctagctgcagcaagccgtgcttccttcttgacacagcaacagttgctgcctttctaccagcagtttgcggctaaccccgcaaccctctttacatctacaacaattgttgccctttgtccaacttgcttagacaaacccagcagtctcctaccaacaacacatcattggtggcgcccttctttagattgcttattaattgtaattcaattataaaagtttttggat

SEQ ID NO: 16860 - DNA, 425 bp, Zea mays
  Clone ID: LIB3151-005-Q1-K1-F11
gccagctgcagggaacctgcggcgttggcagcaccccgatcctgggccagtgcgtcgagtttctgaggcatcagtgcagcccgacggcgacgccctactgctcgcctcagtgccagtcgttgcggcagcagtgttgccagcagctcatgcaggtggagccgcagcaccggtaccaggcgatcttcggcttggtcctccagtccatcctgcagcagcagccgcaaagcggccaggtcgcggggctgttggcggcgcatatagcgcatcaactgacggcgatgtgcggcctgcatcagccgacttcatgcccctacgctgctgtcggcggtgtcccccactgaagaaactatgtgctgtagtatagccgctggctagctagctagttgagtcatttagcggcgatgattgagtaataatgggtcacg

SEQ ID NO: 16861 - DNA, 450 bp, Zea mays
  Clone ID: LIB3151-005-Q1-K1-F12
attgataccaacaagcaacatataaagtggaatccagtatcaacaatatagcaacaatggggaccaatatattttccctccttatgctccttgctctttctacatgtgttgctaacgcgacaattttccctcaatgctcacaagctcctatagcttccctttttcccccataccttccatcaattatagcttcagtatgtgaaaacccagctcttcaaccatataggcttcaacaagcaatcgcagcaagcaacatacctttatcgcccttgttgtgtcaacaatcgccagccctatctttggtgcaatcattggtacaaaccatcagggcacaacagctgctacaactcgtgctacctgtgatcaaccaagtagctttttcaaacctttctccctacttcttcgcaacaacaatttttttcatttaaccaactgtcttcactgaaccct

SEQ ID NO: 16862 - DNA, 336 bp, Zea mays
  Clone ID: LIB3151-005-Q1-K1-F2
attgagaccaacatgcaacatagaaagtgcaatccagtgccaacaatagagcaacaatggcgaccaagatattttccctccttatgctccttgctctttctgcacgtgttgctaacgcgacaattttccctcaatgctcacaagctactatagcttacctgcttcccccataccttccatcaatgatagcttcactatgtgaaaacccacctcttccaccctataggctccaacaagcaatcgcagctagcaacatacctttatcacccttgtttgaacaatcgccagccctatctttggtgcagtcattggtacaaaccatcacggcacagcacc

SEQ ID NO: 16863 - DNA, 424 bp, Zea mays
  unsure at all n locations
  Clone ID: LIB3151-005-Q1-K1-F3
gccagctgcagggaacctgcggcgttggcttcaccccgatcctgggccagtgcgtcaagtggctgaggcatcagtgcatcccgacggcgactccctactgctcgcctcagtgccagtcgttgcggcagcagtgttgccagcagctcacgcaggtggagcctcaacaccggtaccaggcgatcttcggcttggtcctccagtccatcctgcagcatcagccgcaaagcggccaggtcgcggggctgttggcggcgcatatagcgcatcatctgacggcgatgtgcggtctgcagcagccgacttcatgcccctacgctgatgccggcggtgntccccactgaagaaactatgtgctgtaatatagccgcttgctagctagctaagtgagtcatttaacggcgatgattgagtaataatgtgtcac

SEQ ID NO: 16864 - DNA, 358 bp, Zea mays
  Clone ID: LIB3151-005-Q1-K1-F4
gtcttcagaccattagctttatctactccagagcgcagaagaacccgatcgacaccatgagggtgttgctcgttgccctcgctctcctggctctcgctgcgagcgccacctccacgcatacaagcggcggctgcggctgccagccaccgccgccggttcatctaccgccgccggtgcatctgccacctccggttcacctgccacctccggtgcatcttccaccgccggtccacctgccgccgccggtccacctgccaccgccggtccatgtgccgccgccggttcatctgccgccgccaccatgccactaccctactcaaccgccccggcctcagcctcattcccagccacacccatg

SEQ ID NO: 16865 - DNA, 421 bp, Zea mays
  Clone ID: LIB3151-005-Q1-K1-F5
attttcagcattcagaaacactataagcgaatcgcactagcatcaacctaacggcaatggctaccaagatattagccctccttgcgcttcttgcccttttagtgagcgcaacaaatgcgttcattattccacagtgctcacttgctcctagtgccattattccacagttcctcccaccagttacttcaatgggcttcgaacatccagtcgtgcaagcctacaggctacaactagcgcttgcggcgagcgtcttacaacaaccaattgcccaattgcaacaacaatccttggcacatctaaacctacaaaccatctgaacgcaacagcaacaacagtttttgtcatcactgagccacctatccgtggtgaaccctgtctcctacttgcaacagcagctacttgcattcaacccacttgctct

SEQ ID NO: 16866 - DNA, 378 bp, Zea mays
  Clone ID: LIB3151-005-Q1-K1-F6
cccacgcgtccgagaccattagctttatctactccagagcgcacaacaacccgatcgacagcatgagggtgttgctcgttgccctcgctctcctggctctcgctgcgagcgccacctccacgcatacaagcggcggctgcggctgccagccaccgtcgccggttcatctaccgccgccggtgcatctgccacctacggttcacctgccacctccatgtgcatctcccaccgccggtccacctgccgccgccggtccacctgccaccggcggtccatgtgccgccgcctgttcatctggcggcgacaccatgccactaccctactcaaccggcccggcctaagcctgatccccagccacacccatgcccgtgccaacag

SEQ ID NO: 16867 - DNA, 325 bp, Zea mays
  Clone ID: LIB3151-005-Q1-K1-F7
tctgatcttcataccattatctgtttctactccagagcgcacaagaacccgatcagcaccattagggtgtggctcgtggccctcgctctcctggctctcgctgcgagcgccacctccacgcatacaagcggcggttgttgctgccagccaccgccgccggttcatctaccgtcgtcggtgcatctggcacctccggttcacctgccaccttcggtgcatattccaccgccggtccacctgctcgcgccggttcaactgccaccgtcggtccatgtgccggcggctgttcatatgtcggcgccaccatgccactaccctactcaac

SEQ ID NO: 16868 - DNA, 378 bp, Zea mays
  Clone ID: LIB3151-005-Q1-K1-F8
cagaaacacaccaagcgaagcgcactagcaacaacctaacaacaatggctacgaggatattatcccttcttgcgcttcttgcgctttttgcgagcgcaacaaatgcgtccattattccacaatgctcacttgctcctagttccattattccacagttcctcccaccagttacttcaatggccttcgaacacccagctgtgcaagcctataggctacaacaagcgattgctgcgagcgtcttacaacaaccaattgcccaattgcaacaacaatccttggcacatctaacaatacaaaccatcgtaacgcatcagcaacaacagtttctaccagcactgagccacctagccatggtgaaccctgtcgcctacttgcaac

SEQ ID NO: 16869 - DNA, 444 bp, Zea mays
  Clone ID: LIB3151-005-Q1-K1-F9
cagaaacacaccaagcgaagcgcactagcaacaacctaacaacattggctaccaagatattgtccctccttgcgcttcttgcgctttttgctagcgcaacaaatgcgtccattattccacaatgctcacttgctcctagttccattattccacagttcctcccaccagttacttcaatggccttcgaacacccagctgtgcaagcctataggctacaacaagcgattgcggcgagcgtcttacaacaaccaattgcccaattgcaacaacaatccttggcacatctaacaatacaaaccatcgcaacgcaacagcaacaacatgttcctaccaacactgagccacctatccatggtgaaccctgtcgcctacttgaacagcagctgtttgcatccaaaccacttgctctagcaaacgtagttgcaaaccatcaacaacaactac

SEQ ID NO: 16870 - DNA, 442 bp, Zea mays
  Clone ID: LIB3151-005-Q1-K1-G1
cgcaaattgcaccaagaaatccatcgagaggccgtcgacaggggaattaatggcgtcgtcgtctagcagcagccaccgccgcctcatcctcgcagccgccgtcctgctctccgtgctcgcggctgccagcgccagcgccgggacctcctgcgtgccggggtgggccatcccgcacaacccgctcccgagctgccgctggtacgtgaccagccggacctgcggcatcgggccgcgcctcccgtggccggagctgaagaggagatgctgccgggagctggcggacatcccggcgtactgccggtgcacggcgctgagcatcctcatggacggcgcgatcccgccgggcccggacgcgcagctggagggccgcctagaggacctgccgggcttgccgcgggaggtgcaaaggggattcgccgccaccctcgtcacggaggccgag

SEQ ID NO: 16871 - DNA, 221 bp, Zea mays
  Clone ID: LIB3151-005-Q1-K1-G11
atctcattgacttcatattggagaactcgtctccataaatgtgctgatcgttgccggtggtgtcctggcgctcgctgtgtgcgccttcttcattacatgccgctgctgaggctgacaaacaccttcgttatatctaccgcctccgctctatatgccgtcctccgtctatctgtcgtcgcatcatcagtcctattcatggcaataccgcactcatccacctc

SEQ ID NO: 16872 - DNA, 433 bp, Zea mays
  Clone ID: LIB3151-005-Q1-K1-G2
gcaacatagaaagcacaatagtgtaccaacaatggcagccaaaatattttgcttccttatgctccttggtctttctgcaagtgctgctaccgcaaccattttcccacaatgctcacaagctcctatagcttcctttcttcccccatacctctcaccagcggtgtcttcagtatgtgaaaacccaattcttcaaccctacaggatccaacaggcaatcgcagcaggcatcttacctttatcacccttgttcctccaacaaccgtcagccctattacagcagttacctttggtgcatttgttggcacaaaacatcaaggcacaacaactacaacaacttgtgctaggaaaacctgctgcctactctcagcaacagcagtttcttccattcaaccaactggctgcattgaactctgctgcttatttgcacaacaac

SEQ ID NO: 16873 - DNA, 379 bp, Zea mays
  Clone ID: LIB3151-005-Q1-K1-G3
gcaacatacaaagcacaatattgtaccaacaatggcagccaaaatattttgcttccttatgcgccttggtctttctgcaagtgctgctaccgcaaccattttcccacaatgctcacaagctcctatagcttcctttcttcccccatacctctcaccagcggtgtcttcagtatgtgaaaacccaattctttaaccctacaggatccaacaggcaatcgcagcatgcatcttacctttatcacccttgttccttcaacaaccgtcagacctattacagcagttacctttggtgcatttgttggcacaaaacatcaaagctcatcaactacaacaacttgtgctaggaaaccgtgctgcctactctcagcaacagcagttt

SEQ ID NO: 16874 - DNA, 292 bp, Zea mays
  Clone ID: LIB3151-005-Q1-K1-G4
ggttgctaccgtgcagcgcctatcacttcctggttctttaagagtcggtcgtgaatttctggcatggcactatcacgagcgcactatttacattccataaccaacctggggtaatcaccccaaagtgttgaccctatctggctcgaacgttaggagctaccgttattatgatcctgcatcatgcagccttcacttagaaggaatcctggaagaccttggttctgctccttcaagttcaattgtactgctacatgccattgctcacaaccctactggagtagatcataccatc

SEQ ID NO: 16875 - DNA, 370 bp, Zea mays
  Clone ID: LIB3151-005-Q1-K1-G5
gcgaatcgcactatcatcaacctaacaacaatggctaccaagatattatccctacttgcgcgtcttgcactctttgcgagcgcaacaaatgcgctcattattccacaatgctcactcgctgctaattccattatttcacagttcctcccaccagatacttcaatggccttggaacaccaatctgtgcaagcctatatgctacaacatgcgattgccgccagcgtcttacaacaaccaattgaccaatttcaacatcaatccttggcacatctaacaatacataacatcatatcgcatcagcaactacagttgctaccaacactgagccacctaaccatggtgaaccctgtctcctactcgcaacagcata

SEQ ID NO: 16876 - DNA, 339 bp, Zea mays
  Clone ID: LIB3151-005-Q1-K1-G6
agaccaactagcaacatagaaagcacaatagtgtaccaacaatggcagccaaaatattttgcttccttatgctccttggtctttctgcaagtgctgctaccgcaaccattttcccacaatgctcacaagctcctatagcttcctttcttcccccatacctctcaccagcggtgtcttcagtatgtgaaaacccaattcttcaaccctacaggatccaacaggcaatcgcagcaggcatcttacctttatcacccttgttcctccaacaaccgtcagccctattacagcatttacctttggtgcatttgttggcacaaaacatcaaggcacatcatcttc

SEQ ID NO: 16877 - DNA, 397 bp, Zea mays
  Clone ID: LIB3151-005-Q1-K1-G7
ccagagcgcataataacccgatcgacaccatgagggtgttgctcgttgccctggctctcctggctctcgctgcgagcgccacctccacacatacaagcggcggctgcggctgccagccaccgccgccggttcatctaccgccgccggtgcatctgccacctccggttcacctgccaccttcggtgcatcttccaccgccggtccacctgccgtcgccggtccacctgccaccgtcggtccatgtgccgtcgccggttcatctggcgccgccaccatgccactaccctactcaaccgccccggtctcagtcttatacccagccacacccatggccgtgccaacagacgcattcaagcccgtgccagctgcagggaaacctgcggcgttggcagcaccc

SEQ ID NO: 16878 - DNA, 317 bp, Zea mays
  Clone ID: LIB3151-005-Q1-K1-G8
gccagctgcagggaacctgcgtcgttggcagcaccccgatcctgggccagtgcgtctagggtctgaggcatcagtgcagcccgacggcgacgccctactgctcgcctcagtgccagtcgttgcggcagcagtgttgccagcagctcaggcaggtggagccgcagcaccggtaccaggcgatcttcggcttggtcctccagtccatcctgcagcagcagccgcaaagcggccaggtcgcggtgctgttggcggcgcagatagcgcaacaactgacggcgatgtgcggcctgcagcagccgacttcatgcccctacgct

SEQ ID NO: 16879 - DNA, 370 bp, Zea mays
  Clone ID: LIB3151-005-Q1-K1-H1
aacaaatgcgttcattattccacagtgctcacttgctcctagtgccattattccacagttcctcccaccagttacttcaatgggcttcgaacatccagccgtgcaagcctacaagctacaactagcgcttgcggcgagcgtcttacaacaaccaattgcccaattgcaacaacaatccttggcacatctaaacctacaaaccatcgcaacgcaacagcaacaacagtttctgccatcactgagccacctagccgtggtgaaccctgtcgcctacttgcaacagcagctacttgcattcaacccacttgctctggcgaacgtagctgcataccagcaacaacaacgtctgcaacagtttatgccagcgctc

SEQ ID NO: 16880 - DNA, 414 bp, Zea mays
  Clone ID: LIB3151-005-Q1-K1-H10
gccgccggtgcatctgccacctccggttcttctgccacctccggtgcatctcccaccgccggtccacctgccgccgccggtccacctgccaccgccggtccatgtgccgccgccggttcatctgccgccgccaccatgccactaccctactcaaccgccccggcctcagcctcatccccagccacacccatgcccgtgccaacagccgcatccaagcccgtgccagctgcagggaacctgcggcgttggcagcaccccgatcctgggccagtgcgtcgagtttctgaggcatcagtgcagcccgacggcgacgccctactgctcgcctcagtgccagtcgttgcggcagcagtgttgccagcagctcatgcaggtggagccggcagaccggtaccaggcgatcttcggcttggt

SEQ ID NO: 16881 - DNA, 453 bp, Zea mays
  Clone ID: LIB3151-005-Q1-K1-H11
acgtccacgcgttcgattgacaccaactagcaacatataaagcacaatagtgtaccaacgatggcagccaaaatattttgcctccttatgctccttggtctttctgcaagcgctgctacggcgaccattttcccgcaatgctcgcaagctcctatagcttcccttcttcccccgtacctctcaccagcggtgtgttctgtatgtagaaaacccaattcttcaaccctacaggatccaacaggcaatcgcagctggcatcttacctttatcacccttgttcctccaacaatcatcagccctattacaacagataccttcggtgcatttattggcacaaaacatcatggcacatctactacaacaacttgtgctaaccatccctgctgtctactcttagcaacagcagtttcttccattcaaccatctaagttcattgaactctgcttcttattt

SEQ ID NO: 16882 - DNA, 423 bp, Zea mays
  Clone ID: LIB3151-005-Q1-K1-H12
gtctcttctccgttttcactctcttgctagctcctctttgtccttcagatcagatctctgagaagagtagagtgcctgccagtgccatgtcgctgccagtcacacagcccattgcatgagcagaagggcaaggaagcttgggagggtgtaagctgaggatcggtgacgtgcaaatgcggccacggggaacctctctgcaacaaagctccgcatctgctctcggcgacggcgatgcggcgctaccgaagaagaagaggaaccggccaggcaatccgaaggcagccagggccctctgctccatggcaaggcgcccttgcatggcgtgatgacgcatctccccgagcagcagtatcagccaaacagcggcaacgccaacgttaacctcctggacattgggttcttctctggcacagtggtggcacg

SEQ ID NO: 16883 - DNA, 263 bp, Zea mays
  Clone ID: LIB3151-005-Q1-K1-H2
caagctcctatagcttccctttttcccccataccttccatcaattatagcttcagtatgtgaaaacccagctcttcaaccatataggcttcaacaagcaatcgcagcaagcaacatacctttatcgcccttgttgtgtcaacaatcgccagccctatctttggtgcagtcattggtacaaaccatcagggcacaacagctgcagcaactcgtgctacctgtgatcaaccaagtagctctggcaaacctttctccctactttcc

SEQ ID NO: 16884 - DNA, 282 bp, Zea mays
  Clone ID: LIB3151-005-Q1-K1-H3
attttgagcattcagaaacacaccaagcgaagcgcactatcaacaacctaacaacaatggctaccaagatattatccctccttgcgcttcttgcgctttttgcgagcgcaacaaatgcgtccattattccacaatgctcacttgctcctagttccattattccacagttcctcccaccagttacttcaatggccttcgaacacccagctgtgcaagcctataggctacaacaagcgattgcggcgagcgtcttacaacaaccaattgcccaattgccacaac

SEQ ID NO: 16885 - DNA, 334 bp, Zea mays
  Clone ID: LIB3151-005-Q1-K1-H4
cgccggcgctaggctcggggatcttgtcgggtcccgtcccgtcctaccacttcgccggcgctgcgtcgccgtcactcgtcagtcaggactcaggatccccaagatggcttcttcaaacggtgaggctgagcaacaatggatagagaatatcaagtcaggaggaacagttccctgtctagcacctgaaaactgtcctaatggctgggctactcctcccggtgattcatttatggtcagaggcccagaatatcttacaaacaaggtaaaaataccaggtggagagtatcttctgaagcctctcggctttgattggatcaaaagaccagccaaaatc

SEQ ID NO: 16886 - DNA, 445 bp, Zea mays
  Clone ID: LIB3151-005-Q1-K1-H5
gcgagctgcccttcttccaccataccttccatcaatgaccgcttcagtatgtgaaaacccagcccttcaaccctacaggctccaacaagcaatcgcaacaagcaacttacctttatcacccctgttctttcaacaatcgccagccctatctttggtgcagtcattggtacaaaccatcagggcacaacagctgcagcaactcgtgctaccagtgatcatccaagtagctctggcaaacctttctccctactctcagcaacaacaatttcttccattcaaccaactgtctacactgaaccctgctgcttatttgcagcaacaacaactactaccattcaaccagctagctactggctactctcagcaacaacaatttctttcatttaaccaatttgccgcactgaacccctctgcttatttgcagcagcaaatactactaccattt

SEQ ID NO: 16887 - DNA, 310 bp, Zea mays
  Clone ID: LIB3151-005-Q1-K1-H6
atcgcagcaggcatcttacctttatcacccttgttcctccaacaaccgtcaggggtattacagcagttacctttggtgcatttgttggcacaaaacatcaaggcacaacaactacaacaacttgtgctaggaaaccttgctgcctactctcagcaacagcagtttctttcattcaaccaactggctgcattgaactctgctgcttatttgcaacaacaactaccattcagtcagctaactgctgcctacccccagcaatttctttcattcaaccaactgggagcattgaactctgctgcttatttacaac

SEQ ID NO: 16888 - DNA, 350 bp, Zea mays
  Clone ID: LIB3151-005-Q1-K1-H7
agaccattagctttatctactccagagcgcagaagaacccgatcgacaccatgagggtgtggctcgttgccctcgctctcctggctctcgctgcgagcgccacctccacgcatacaagcggcggctgcggctgccagccaccgccgccggttcatctaccgccgccggtgcatctgccaccttcggttcacctgccacctccggtgcatctcccaccgccggtccacctgtcggcgccggtccacctgccaccgccggtccatgtgccgccgccggttcatctgtcgtcgtcaccatgccactaccctactcaaaccgcccggccttaagcttattcccagccacaccca

SEQ ID NO: 16889 - DNA, 268 bp, Zea mays
  Clone ID: LIB3151-005-Q1-K1-H8
accgtatcgtctcgcctgttcagtttccttctcttcccgcagcccggtttggcgaccaggggccaccgttccagagtagcctagcgaatcccgtgtctggttcgtgcgatggcggaggagcagtccaacccccagcaccatctagcggaggagagggaggttatggtggagcaccagcagactaggagggcccctaagctgatgtacctggacttcgttcatgtggcggatgcccaggcacgtgtgtgcctcgctgggctctaccgcc

SEQ ID NO: 16890 - DNA, 454 bp, Zea mays
  Clone ID: LIB3151-005-Q1-K1-H9
gagcattcagaaacacaccaagcgaagcgcactatcatcaacctaacaacaatggctaccaagatattatccctccttgcgcttcttgcgctttttgcgagcgcaacaaatgcgtccattattccacaatgctcacttgctcctagttccattattccacagttcctaccaccagttacttcaatggccttcgaacacccagctgtgcaagcctataggctacaacaagcgattgcggcgagcgtcttacaacaaccaattgcccaattgcaacaacaatcctgggcacatctaacaatacaaaccatcgcaacgcaacagcgacaacagttcctaccagcactgagccacctagccatgatgaaccctgtcgcctacttgcaacagcagctgcttgcatccaacccacttgctctagcgaacgtagttgcaaaccagcagcaacaacaactgg

SEQ ID NO: 16891 - DNA, 413 bp, Zea mays
  Clone ID: LIB3151-006-Q1-K1-A1
aatagtgtccaacaatggcagccaaaatattttgcctccttatgctccttggtctttctgcaagtgctgctaccgcgaccattttcccgaaatgctcgcaagctcctatagcttcccttcttcccccgtacctctcaccagcggtgtcttcggtatgtgaaaacccaattcttcaaccctacaggatccaacaggcaatcacagctggcatcttacctttatcacccttgttcctccaacaatcatcagccctattacatcagttacctttggtgcatttattggcacaaaacatcagggcacaacaactacaacaacttgtgctagcaaaccttgctgcctactctcagcaacagcagtttcttccattcaaccaactagctgcattgaactctgcttcttatttgcaacaa

SEQ ID NO: 16892 - DNA, 448 bp, Zea mays
  Clone ID: LIB3151-006-Q1-K1-A10
ctagcaacatagaaagcacaatagtgtaccaacaatggcagctaaaatattttgcctccttatgctccttggtctttctgcaagtgctgctacggcgaccattttcccacaatgctcacaagctcctatagcttcccttcttcccccgtacctctcaccaacggtgtcttcggtatgtgaaaacccaattcttcaaccctacaggatccaacaggcaatcgcagctggcatcttacctttatcacccttgttcctccaacaatcatcagccctattacagcagttacctttggtgcatttattggcacaaaacatcagggcacaacaactacaacaacttgtgctagcaaaccttgctgcctactctcagcaacagcagtttcttccattcaaccaactagctgcattgaactctgcttcttatttgcaacaacaacaactaccattc

SEQ ID NO: 16893 - DNA, 404 bp, Zea mays
  Clone ID: LIB3151-006-Q1-K1-A11
attttcagcattcagaaacacaccaagcgaagctcactagcaacaacctaacaacaatggctacgaagatattagccctccttgcgcttcttgcccttttagtgagcgcaacaaatgcgttcattattccacagtgctcacttgctcctagtgccattattccacagttcctcccaccagttacttcaatgggcttcgaacatccagccgtgcaagcctacaggctacaactagcgcttgcggcgagcgtcttacaacaaccaattgcccaattgcaacaacaatccttggcacatctaaacctacaaaccatcgcaacgcaacagcaacaacagtttctgccatcactgagccacctagccgtggtgaaccctgtcgcctacttgcaacagcagctacttgca

SEQ ID NO: 16894 - DNA, 156 bp, Zea mays
  Clone ID: LIB3151-006-Q1-K1-A12
ccatggattggtttttctgattctactttctatattttctatcgccacatacacacatactatcactacctgcatatggcaaccaccaacacagttaatgtaccacatcctgtacatgtggcacttatctataacctcccacctaacttttatctc

SEQ ID NO: 16895 - DNA, 410 bp, Zea mays
  Clone ID: LIB3151-006-Q1-K1-A4
gtaggaagcaagggaatcacatcgccatggcagccaaaatgttggcattgcatgccctcgctagcggtttgtgcaaccgccgctagtgctacccatatcccagggcacttaggaccactactgatgccattggctaccatgaacccatggatgcagtactgcatgaagcaacagggggttgccaacttgctagcgtggacgaccctgatgctgcagcaactgttggccttaccgcttcagccgtgccagatgccaatgatgatgccaggtatgatgccaccgatgacaatgatgccgatgccgaatatgatgccaacgatgatggtgccgactatgatgtaaccaataacgatagctagaatgatgccaccgatgatgatgcccaacatgggttcaccaatgatgatgcc

SEQ ID NO: 16896 - DNA, 328 bp, Zea mays
  Clone ID: LIB3151-006-Q1-K1-A5
ctgcaggtcttttacaaacaggtcacaagctgggcaagacgttctgtgcccttttatcaatttattctggggagggggactattaaacttcaccataacaccaacataccacccggggagcatgcccattaaatcatctggctttcagtttcatttcaggccatgcatcttgcgggtgccggaagcgttgtttccacgcatacacattgtcaactcagagcatgttcctgtagagccttgacattgcgtagtccatggagtccaccaagaaatctgcattggccttcgaaaagcacatacgtgggtttattctgaagacgttaccatg

SEQ ID NO: 16897 - DNA, 429 bp, Zea mays
  Clone ID: LIB3151-006-Q1-K1-A6
aggcaccttcgctccgcccccggcgccacacatgtccgcgacagcgctcctgcagaaggcaacagaggctggagcgacgcaatcgagctcatcgttcttgaaggagtttgggctcgcttcttcgtcatcatcacctcgaccaaagcagcagcaaccccatggaagggttgctgaaaccagcacggacccatggcagtacaggaacagtaatcagcaaatggagatggagcgccaccagagccatcaacggagggagatggagtccagttcgcaaccgtggcagcacccccgcattacccagcagatggagatggagcgccaccaccagcggagtcatcaacagagggagatggagtccagttcgcaaccgtggcagcacccccgcagtacccagcagatggagatggagcgccaccaccagcggagtca

SEQ ID NO: 16898 - DNA, 422 bp, Zea mays
  Clone ID: LIB3151-006-Q1-K1-A8
ggcaatcgcagcaggcatcttacctttatcacccttgttcctccaacaaccgtcagccctattacagcagttacctttggtgcatttgttggcacaaaacatcaaggcacaacaactacaacaacttgtgctaggaaaccttgctgcctactctcagcaacagcagtttcttccattcaaccaactggctgcattgaactctgctgcttatttgcaacaacaactaccattcagtcagctagctgctgcctacccccagcaatttcttccattcaaccaactggcagcattgaactctgctgcttatttacaacagcaacagctaccaccattcagccagctagctgatgtgagccctgttgccttcttgacacaacaacagttgttgccgttctacctgcacgctgcgcctaacgctggca

SEQ ID NO: 16899 - DNA, 379 bp, Zea mays
  unsure at all n locations
  Clone ID: LIB3151-006-Q1-K1-A9
tccgggtcgacgcngcgttcgtgtnnccaagcccggcgcagcggcggcggcttccatggcacccgctaacaacaagaggatcggcaatgttaagaagggtggtaccaaaaagaccgtctatcccttctataaaaaggactggtatgacatcaaggccccatcggtcttcagtgtgcgcaacattgggaagactctcctgtacattacacagggtaccaagattgcctctgatggtctgaagcacaaaatctttgaggtttgtctagcttgtcattacgacgactaggatcaggcttacacgaataataggctccgtgatgaatatgtgcattgcatgaatgtgctcacaaactttctggtgcatgaattttaccaccta

SEQ ID NO: 16900 - DNA, 398 bp, Zea mays
  unsure at all n locations
  Clone ID: LIB3151-006-Q1-K1-B1
cgcgtnncgttgagaccaactagcaacatagaaagcacaatagtgtaccaacaatggcagccaaaatattttgcttccttatgctccttggtctttctgcaagtgttgctaccgcaaccattttcccacaatgctcacaagctcctatagcttcccttctttccccatacctctcaccagcggtgtcttcaatgtgtgaaaacccaattgttcaaccctacaagatccaacaggcaatcgcaacaggcatcttaccattatcacccttgttcctacaacaaccgtcagccctattacagcagttacctttggtccatttggtggcacaaaacatcagggcacaacaactacaacaacttgtgctagcaaaccttgctgcatactctcagcaacatcag

SEQ ID NO: 16901 - DNA, 283 bp, Zea mays
  Clone ID: LIB3151-006-Q1-K1-B10
ccaatcaaacacctagcgacttttcgacaaatatttgtgacagtgatccgggggtgagaatagatggctaagatcgccgcaccctccgcggcagtggcggcgctctgcttcgcggcccttgtggccgtggccctctgccaaggcgaggtctagctgcaaaagctcacggacctgcagtgctggcaggaggtccaggagagcccgctcgacgcgtgccgacaggtcctcgaccggcagctaaccggcggcggcgtctgcggcccgttccgtttgggcaccgggc

SEQ ID NO: 16902 - DNA, 325 bp, Zea mays
  Clone ID: LIB3151-006-Q1-K1-B12
cacgcgtccgcgctctcaaagagctcgtctactaccgctccactttcttgaccactcgcaattgcatccgggaggagctgaatgcagagatcgacaccagatcccagccgtctgaagagggaagaatagacggtatgactgctgcgacgccgtcgctctgcaccgccgcgcgcgtgctgtgcccatgcacgtttctcgcgctgctgctctgcttacagctcctgcacacatcgcatgcttacaagctgcgcggcgtcgttggtggctacgacgacaagaaggtcccgctggccgttatcgcgccggctgacccctctcatgagct

SEQ ID NO: 16903 - DNA, 429 bp, Zea mays
  Clone ID: LIB3151-006-Q1-K1-B2
atctataccaactagcaacatacatagcacattattgtaccaacacctaaaaacaacggggacggcgttcttatacctggcgatatcacttaacatgtgcctaccgataccattttcataccttgctcacaagctgctataatgcactgatcgccgaacctctcaccacaatatcttccaatctgaaaacccaattgtcaaccatacgattccaacaacaactcgaacacggctattacaatgttcaccgcagaacgtacagcatccttttaacataaacaggcgctgccatttaaacaactaactgcattgaactctgctgcttatttgcagcaacaacaactactaccattcatgcagctagctgctgcctacccccggcaatttctttcattcaaccaactggcagcattgaactctcatgcttat

SEQ ID NO: 16904 - DNA, 418 bp, Zea mays
  unsure at all n locations
  Clone ID: LIB3151-006-Q1-K1-B3
gggtcttcagaccattagctttatctactccagagcgcacaagaacccgatcgacaccatgagggtgttgctcggtgccctcgctctcctggctctcgctgcgagcgccacctccacgcatacaagcggcggctgcggctgccaaccaccgccgccggttcatataccgccgccggtgcatctgccaccttcggttcacctgccacctccggtgcatcttccaccgccggtccacctggcgacgccggtgcacctgccaccgtcggtccatgtgccagcgccggttcatctgccgncgccaccatgccactaccctacttaaccgacccggtctcagcctcatccccagccacacccatgcccgtgccaacagccgcatacaagcccgtgccagctgcagggaacctgcggcgttggc

SEQ ID NO: 16905 - DNA, 432 bp, Zea mays
  unsure at all n locations
  Clone ID: LIB3151-006-Q1-K1-B4
caacagcaacatagaaagtggaatccagtagcaacaatagagcaacaatggcgaccaagatatgttccctccttatgctccttgctctttctgcatgtgttgctaacgcgacaattttccctcaatgctcacaagctcctatagcttcccttcttcccccataccttccatcaatgatagcttcagtatgtgaaaacccagctcttcaaccctataggctccaacaagcaatcgcagnaagcaacatacctttatcacccttgtttcaacaatcgccagccctatctttggtgcagtcattggtacaaaccatcagggcacagcagctgcagcaactcgtgctacctgtgatcaaccaagtagctctggcaaacctttctacctactctcagcaacaacaatttcttccattcaaccaactgtctacattga

SEQ ID NO: 16906 - DNA, 431 bp, Zea mays
  unsure at all n locations
  Clone ID: LIB3151-006-Q1-K1-B5
acgcgtncgcagaccattaactttatctactccagagcgcagaaaaacccgatcgacaccatgagggggttgctcgttgccctcgctctcctggctctcgctgcgagcgccacctccacgcatacaagcggcggctgcggctgccagccaccgccgccggttcatctaccgccgccggtgcatctgccacctccggttcacctgccacctccggtgcatctcccaccgccggtccacctgccgccgccggtccacctgccaccgccggtccatgtgccgccgccggttcatctgccgccgccaccatgccactaccctactcaaccgccccggcctcagactcattcccagccacacccatgcccgtgccaacagccgcatncaagcccgtgccagctgcagggaacctgcggcgttggcagcaccccgat

SEQ ID NO: 16907 - DNA, 432 bp, Zea mays
  Clone ID: LIB3151-006-Q1-K1-B6
cttctaccctacaggatccaacaggcgatcgcagcaggcatcttacctttatcaccctggttcctccaacaatcatcagccctattacagcagttacctttggtgcatttattggcacaaaacatcagggcacaacaactacaacaactcgtgctagcaaaccttgctgcctactctcagcaacagcagttacctttggtgcatttgttggcacaaaacatcagggcacaacaactacaacaactcgtgctagcaaaccttgctgcctactctcagcaacaacagtttctgccattcaaccaactagctgcattgaactctgctgcttatttgcagcaacaacaactactaccattcagccagctagctgctgcctacccgcggcaatttcttccattcaaccaacttgcagcattgaactctcatgcttat

SEQ ID NO: 16908 - DNA, 140 bp, Zea mays
  unsure at all n locations
  Clone ID: LIB3151-006-Q1-K1-B7
aaaaaaacacgccacgacggacgcgttcnatactatactatactttatgattcaaggtctccaccatcatttcaaccaaaaggcgtgggtttatttatatatctatctcttttttcaaactccacttatgcctaaccata

SEQ ID NO: 16909 - DNA, 374 bp, Zea mays
  Clone ID: LIB3151-006-Q1-K1-B8
ggtcttcagaccattagctttatctactccagagcgcagaagaacccgatcgacaccatgagggtgttgctcgttgccctcgctctcctggctctcgctgcgagcgccacctccacgcatacaagcggcggctgcggctgccagccaccgccgccggttcatctaccgccgccggtgcatctgccacctccggttcacctgccacctccggtgcatctcccaccgccggtccacctgccgtcgccggtccacctgccaccgacggtccatgtgccgccgccggttcatctgccgccgccaccatgccactaccctactcaaccgccccggcctcagcctcattctcagccacacccatgcccgtgccaacagcc

SEQ ID NO: 16910 - DNA, 445 bp, Zea mays
  Clone ID: LIB3151-006-Q1-K1-B9
ggagcatgagctcgactacctgctgttcatcgtccgggacgtgaaggtgcagccgaacccagatgaagtcgctgatgtgaagtacgtgaaccgcgaggagctcaaggagctcatccggaaggctgacgctggcgaggatggggtgaagatctccccctggttcaggctggtggtggacaacttcctcatgggctggtgggaccatgtcgagaaaggcaccctcggcgaggccgtggacatggagaccatccataagctgaaggagtgaggggacgccggccggccgtctccgatgacctcaccgcctgctgctgctgctgcactgcatgtttatcaaaagttatcgctcctgctcgcggaaagtgagcttgactgttgccggggtggaagtatcgttttggactgatgcatgagtgctgcggaggggtttggtgtttgtttggtt

SEQ ID NO: 16911 - DNA, 435 bp, Zea mays
  Clone ID: LIB3151-006-Q1-K1-C1
gagaccaacaagcaacatagaaagtggaatacagtagcaacaatagagcaacaatggcggccaagatattttccatccttatgctccttgctctttctgcatgtgttgctaacgcgaccatttttcctcaatactcacaagctcctatagctgcccttcttcccccataccttccatcaatgaccgcttcagtatgtgaaaacccagcccttcaaccctacaggctccaacaagcaatcgcaacaagcaacttacctttatcacccctgttctttcaacaatcgccagccctatctttggtgcagtcattggtacaaaccatcagggcacaacagctgcagcaactcgtgctaccagtgatcagccaagtagctctggcaaacctttctccctactctcagcaacaacaatttcttccattcaaccaactgtcta

SEQ ID NO: 16912 - DNA, 434 bp, Zea mays
  Clone ID: LIB3151-006-Q1-K1-C10
aacttcccagccccgacaccttggccgccgctccgtgcgcacccagttgctgaggttgcggacgctgcagccggcgaggatcggatgaaccaccaacccctcctataaatcctaaccgagtcctctgcttctgctctcatccatctgtagagtgcaacatgcagtgccccatggacactgctgctagtggaacctcgccagtgatgcaattccatagcaatgctgatgagtctatcgcccattcatctccattggcaacattaatacaacgttcacagcgccattgctatggggatggatccccaggcgaatttccccttgctgtgagcccctccattgttctccatgtgctctcatcttgtgatctaagtccgaaagatctcgccaatctggaggctacatgcgtatttttcggcaaacctgcaagttttgca

SEQ ID NO: 16913 - DNA, 420 bp, Zea mays
  Clone ID: LIB3151-006-Q1-K1-C11
caacacccggagtgagcggcggcgagggatctgttcgtcggcggcgatggaggacgaggggcagagggcatcggtgagcagttggaacgagcttgactatgaggcggaagcgcgtttggtggcggaggcgagggcgtcgtgggataggaaggcaaggggggaggaggaggatgaagaagaacatgatcctgagatgaccttggactactacgcctaccaggctaaaaagtttcgcaacacctggaacatcctctatttcggctacttcggtcgcttcgaggacaccacatggatccctcctatgcgctttacagagaagccgcctgactccccggcgtacccgcgcactacactgcaggtcttttcgatcaaagttgcagggatagaggtgggtttacagtggccactccatgtgtttgg

SEQ ID NO: 16914 - DNA, 153 bp, Zea mays
  Clone ID: LIB3151-006-Q1-K1-C12
tgctgtagtatagccgctggctagctagctagtttagtcatttagcggcgatgattgagtgatagatgtgtcacgcatcaccatgggtggcattgtcattgtgagcaatgacctgaatgtacaattgaaatgaaaagaaaaaagtattgttcc

SEQ ID NO: 16915 - DNA, 326 bp, Zea mays
  Clone ID: LIB3151-006-Q1-K1-C3
gcatagcggcaacacttagagaggatcgttgcacttaacagtatgaagatggtcatcgggctcggcgagtgtctggctctgtcagctgccatcttctatgtaatgctgatgccttgcccctgcgcggtgatgcatggattggacggatctgtaaccggtctgaccactataatgggcgccggcgggctgaacccctacacggagaacctgatggagacgtaaagcaacccgatggaggaggaaacctactacgccgggtgtgggcggacgagctccatgtacgagccgctccagtaactgtgttgccatcagcagatcaggatgat

SEQ ID NO: 16916 - DNA, 434 bp, Zea mays
  Clone ID: LIB3151-006-Q1-K1-C4
gcaagtgcgatttcgatctcgcagccaccttttttttgttctgttgtgtatctagtagttggaggagatatgcagtttgcacttgcattggacacgaactcaggtcctcaccagataagatcttgtgagggtgatgggattgacaggttggaaaaattaagtattgggggcagaaagcaggagaaagctttgagaaataggtgctttggtggtagagttgctgcaactacacaatgtattcttacctcagatgcttgtcctgaaactcttcattctcaaacacagtcctctaggaaaaattatgctgatgcaaaccgtgtatctgctatcattttgggcggaagcactggatctcagctctttcctctgacaagcacaagagctacgcctgctgtacctgttggaggatgttacaagcttattgatatccctat

SEQ ID NO: 16917 - DNA, 420 bp, Zea mays
  Clone ID: LIB3151-006-Q1-K1-C5
gccaaaatattttgcttccttatgctccttggtctttctgcaagtgttgctaccgcaaccattttcccacaatgctcacaagctcctatagcttcccttcttcccccatacctctcaccagcggtgtcttcaatgtgtgaaaacccaattgttcaaccctacaggatccaacaggcaatcgcaacaggcatcttaccattatcacccttgttcctccaacaaccgtcagccctattacagcagttacctttggtccatttggtggcacaaaacatcagggcacaacaactacaacaacttgtgctagcaaaccttgctgcatactctcagcaacatcagtttcttccattcaaccaactggctgcattgaactctgctgcttatttgcaacaacaattaccattcagccagctagttgct

SEQ ID NO: 16918 - DNA, 453 bp, Zea mays
  unsure at all n locations
  Clone ID: LIB3151-006-Q1-K1-C6
cgnntccgctcaantcgactcctagattggggagaactnnncgactaccatgaagggtgccctgatcgttgccgcttgcggcgtcctggcgcctacgctgcgagcccgccgcctccagtacaagnncggcggctgtggcttgccagacanccaccgtttcatctaccgcctccgttctatatgccgcctccgttctatctgccgccgcagcagcagccgcagccatggcaataccccactcaaccaccgcagctaagcccgtgccagcagttcggatcctgcggcgtcggcagcgtcggcagcccgttcctgggccagtgcgtcgagttcctgaggcaccagtgcagcccggcggcgacgccctacggctcgccacagtgccaggcgctgcagcagcagtgctgccaccagatcangcaggtggagccgctgcaccggtaccaggcgacatac

SEQ ID NO: 16919 - DNA, 406 bp, Zea mays
  Clone ID: LIB3151-006-Q1-K1-C7
tattattgagaccaactagcaacatagaaagcacaatagtgtaccaacaatggcagccaaaatattttgcttccttatgctccttggtctttctgcaagtgttgctaccgcaaccattttcccacaatgctcacaagctcctatagcttcccttcttcccccatacctctcaccagcggtgtcttcaatgtgtgaaaacccaattgttcaaccctacaggatccaacaggcaatcgcaacaggcatcttaccattatcacccttgttcctccaacaaccgtcagccctattacagcagttacctttggtccatttggtggcacaaaacatcatggcacaacaactacaacaacttgtgctagcaaaccttgctgcatactctcagcaacatcagtttcttccattc

SEQ ID NO: 16920 - DNA, 429 bp, Zea mays
  Clone ID: LIB3151-006-Q1-K1-C8
ctgggtcttcagaccattagctttatctactccagagcgcagaagaacccgagcgacaccatgagggtgttgctcgttgccctcgctctcctggctctcgctgcgagcgccacctccacgcatacaagcggcggctgcggctgccagccaccgccgccggttcatctaccgccgccggtgcatctgccacctccggttcacctgccacctccggtgcatctcccaccgccggtccacctgccgccgccggtccacctgccaccgccggtccatgtgccgccgccggttcatctgccgccgccaccatgccactaccctactcaaccgccccggcctcagcctcatccccagccacacccatgcccgtgccaacagccgcatccaagcccgtgccagctgcaaggaacctgcggcgttggcagcaccccg

SEQ ID NO: 16921 - DNA, 437 bp, Zea mays
  Clone ID: LIB3151-006-Q1-K1-C9
gcagcagctgccctgcgtctcgtcgccgcgccctctgctcgccgtgcccgcgggccgggggcgcgccggcgtgcggggccggcccaatgtggcgggactggggcgggggcggctgtctctccacgccgccgccgcgcggcccgtggccgaggcggtgcaggcggaggaggacgacgacgacgacgacgaggaggtggccgaggagaggttcgcgctgggcggcgcgtgccgggtgctcgcgggaatgcccgcgccgttcggcgccaccgcgctccgcggcggtgtcaacttcgccgtctactccagcggtgcctccgccgcgtcgctgtgcctcttcgctcccggcgacctcaatgcggatagggtgaccgaggaggtgcccctcgatcccctgctcaaccgaacgggaaacgtgtggcacgtgttcattcacgggg

SEQ ID NO: 16922 - DNA, 391 bp, Zea mays
  Clone ID: LIB3151-006-Q1-K1-D10
attgagaccaacaagcaacatagaaagtggaatccagtagcaacaatagagcaacaatggagaccgagatattttccctccttatgctccttgctctttctacatgtgttgctaacgcgacaattttccctcaatgctcacaagctcctatagcttccctttttcccccataccttccatcaattatagcttcagtatgtgaaaacccagctcttcaaccatataggcttcaacaagcaatcgcagcaagcaacatacctttatcgcccttgttgtgtcaacaatcgccagccctatctttggtgcagtcattggtacaaaccatcagggcacaacagctgcagcaactcgtgctacctgtgatcaaccaaatagctctggcaaacctttc

SEQ ID NO: 16923 - DNA, 338 bp, Zea mays
  Clone ID: LIB3151-006-Q1-K1-D11
gacaaacacaccaagcgaaacgcgctatccacattctaccatcaatggccaccaacatagtaggcgttcttgcgctttatgccctttgattgttctcaacatatgcgttaatcatcacacagtgctcactggctactagcgccaatatttcacattttctcccaacacctactataatgggctgcgaacatacatgcaagcaagcctacaggatactactagctctagcaagcagcgtcttacagcaacaaaccgccataacgctagaacaatcattggcacatcctatcctacataccatcattgctccacaccatcaagagacagtggcatcactg

SEQ ID NO: 16924 - DNA, 409 bp, Zea mays
  Clone ID: LIB3151-006-Q1-K1-D12
gcattgcagatgccctgcccctgcgcggggctgcttggcttgtacggcgctggcgccgggctgaggacgatgatgggcgccggcgggctgtacccctacgcggagtacctgaggcagccgcagtgcagcccgctggcggcggcgccctactacgccgggtgtgggcagactagcgccatgtaccagccgctccggcaacagtgctgccagcagcagatgaggatgatggacgtgcagtccgtcgcgcagcagctgcagatgatgatgcagcttgagcgtgccgctgccgtcagcagcagcctgtacgagccagctctgatgcagcagcagcagcatgtgctggcagcccaaggtctcaaccccatggtcatgatgatggcgcataacatgccgggcatgggtggactct

SEQ ID NO: 16925 - DNA, 416 bp, Zea mays
  unsure at all n locations
  Clone ID: LIB3151-006-Q1-K1-D2
cggacgcgtgggcccaactcgccgtctgccttctgcgcctccatttcggcctctgtcccttgcaagttcaatctcacctccaaccatgggtaaagagaagtcccacatcaacattgtggttattggccacgttgactctggcaagtcgaccaccacaggacacctgatctacaagcttggaggcattgacaagcgtgtgatcgagaggtttgagaaggaggctgctgaaatgaacaagcggtccttcaagtacgcatgggtgctcgacaagctcaaggctgagcgtgagagaggtatcaccattgatatcgctctgtggaagtttgagaccaccaagtactactgcacggtcattgatgcccctggacaccgtgacttcatcaagaacatgatcactggtacctnccangctgact

SEQ ID NO: 16926 - DNA, 402 bp, Zea mays
  Clone ID: LIB3151-006-Q1-K1-D4
atcctgtcactgctcgaaaatcgaaatcgatccgatctccgcttgcgctgaagcctgatctccaccgggttcgcagcaggggcgcaggacctcgatcacgaggaggcaggggagcagcatccacaaccacaagccatggcggggagggccaacatccccactaacaactccgccctcatcgcaatcatcgccgacgaggacaccgtcactggcttcttgatggccggcgttggcaatgttgatctgcgcaagaaaaccaactacctcctcgtcgacaacaagacgacagttaaacaaatcgaggatgcgttcaaagaatttactacgagggaggatattgctattgtgctcatcagtcagtatattgccaacatgataaggtttctggtggatagctacaac

SEQ ID NO: 16927 - DNA, 364 bp, Zea mays
  Clone ID: LIB3151-006-Q1-K1-D5
taacaacatagaacgcacagtagtgtgccaacaatggccgtcaaaatattttggtttcttatgctccttggacttactgcaagtgctgttaccgcaaccattatccaacaatgatcacaagctcctatagctatcttttttgccccatacctctcaccagcggagtattgagtatgtgaaaacccaattgttcaaccctacaggatccaacacgcaatcgtagcacgcatgttacctttatcacccttgatcctgcaacaagccgaagccctattacagcagttacctttggtgcatatcgttgcacaaaacatcaatgtagaacaactacgacaacttgtgctaggaaaccttgatgactact

SEQ ID NO: 16928 - DNA, 187 bp, Zea mays
  Clone ID: LIB3151-006-Q1-K1-D6
ctcttacaactgcaacaattgctgccattcaaccaacttgctttgacaaacctagcagggttctaccaacaacccatcattggtggtgccctcttttagatttcttatgagttatagttcaataataaagttttttgtctgatgtttgtggcttcccagaaataagaaagtacatttctagattctt

SEQ ID NO: 16929 - DNA, 425 bp, Zea mays
  Clone ID: LIB3151-006-Q1-K1-D7
gcaacatagaaagcacaatagtgtaccaacaatggcagccaaaatattttgcctccttatgctccttggtctttctgcaagtgctgctacggcgaccattttcccgaaatgctcgcaagctcctatagcttcccttcttcccccgtacctctcaccagcggtgtcttcggtatgtgaaaacccaattcttcaaccctacaggatccaacaggcaatcacagctggcatcttacctttatcacccttgttcctccaacaatcatcagccctattacatcagttacctttggtgcatttattggcacaaaacatcagggcacaacaactacaacaacttgtgctagcaaaccttgctgcctactcttaacaacagcagtttcttacattcaaccaactaactgcattgaactctgcttcttatttgc

SEQ ID NO: 16930 - DNA, 410 bp, Zea mays
  Clone ID: LIB3151-006-Q1-K1-D8
atcagcaaagcggcagtgcgtagagaggatcgtcgaacagaacagcatgaagatggtcatcgttctcgtcgtgtgcctggctctgtcagctgccagcgcctctgcaatgcagatgccctgcccctgcgcggggctgcagggcttgtacggcgctggcgccggcctgacgacgatgatgggcgccggcgggctgtacccctacgcggagtacctgaggcagccgcagtgcagcccgctggcggcggcgccctactacgccgggtgtgggcagacgagcgccatgtaccagccgctccggcaacagtgctgccagcagcagatgaggatgatggacgtgcagtccgtcgcgcagcagctgcagatgatgatgcagcttgagcgtgccgctgccgccagcagcagcctgtacg

SEQ ID NO: 16931 - DNA, 312 bp, Zea mays
  Clone ID: LIB3151-006-Q1-K1-D9
ggcacggcaaaccatgacctctacctactacagatcgcacagcaaccatatcgacaccatgatgggggcgatggacgtacttactttcctgaatatttgtgggagcacacagctcaagcattcaatcagctagtggtggtgacacccaccgcctacttgtaatatacggtcgcattgaaatatgtgactttgggttaatctgccacctacctagcatatccaacagacggaccaaatgcattcgtcggggcaaatgcaatcgtcggtgcatgtgctacacgacggataatctggtggcatacaacaagccac

SEQ ID NO: 16932 - DNA, 399 bp, Zea mays
  Clone ID: LIB3151-006-Q1-K1-E1
attttgagcattcagaaacacaccaagcgaagctacctagcaacgacttaacaacaatggctaccaagatattagccctccttgcgcttcttgccctttttgtgagcgcaacaaatgcgttcattattccacaatgctcacttgctcctagtgccattataccacagttcctccgaccagttacttcaatgggcttcgaacacctagctgtgcaagcctacaggctacaacaagcgcttgcggcgagcgtcttacaacaaccaattaaccaattgcaacaacaatccttggcacatctaaccatacaaaccatcgcaacacaacagcaacaacagttcctaccagcactgagccaactagatgtggtgaaccctgtcgcctacttgcaacagcaggtgc

SEQ ID NO: 16933 - DNA, 410 bp, Zea mays
  Clone ID: LIB3151-006-Q1-K1-E2
tagcaacatacatagtgaagtacactagcaacatcttagcaccaatgggagccaagatttttgccctccttgccctccttgctctttcagcaagcgctgctacctcgacttttattccacaatgctcacaacaatacctctctccggcgacagccgtgggatttcaatacccaactatacaatcctacatggtacaagaggccatccaagcaagcatcttacggtcattagcattaaccctccaacaaccatatgctctattgcaacagtcatccttagtgcatctgtatctccaaagaatcgcggcacaacaactacaacaacagttgctaccaacaatcaatcaagtagttgcagcgaaccttgctgcttacctccagcaacaacagtttcttgcattcaatcaacta

SEQ ID NO: 16934 - DNA, 369 bp, Zea mays
  Clone ID: LIB3151-006-Q1-K1-E3
gtgtggtgcgtgctcgcatgtgttgccgatgcgcgtgcaggcggagttcatcgaggcgctggggcccgatttgggcctcggcatgacaccgagcaggctcgacgacggcgggcctggtctaagccgaggaggaagctgagtttgacggcccaccgatggtccacctgtcttcagacatccttcgtacggagcttaatttgctcaaggacgacgcgctccctgccggtggcgactagtctgttggcattatctggcttgaagaccaagacagcgaggatggccgtctcttgggaggaagagataccggtgtttacccagctgacatgaacgcgttgtacgctgactgccttggtggaaacgtgaccgagc

SEQ ID NO: 16935 - DNA, 358 bp, Zea mays
  Clone ID: LIB3151-006-Q1-K1-E4
gcattcagaaacacaccaagcgaagcgcactagcaacgacctaacaacaatggctaccaagatattagccctccttgcgcttcttgccctttttgtgagcgcaacaaatgcgttcattattccacaatgctcacttgctcctagtgccattattccacagttcctcccaccagttacttcaatgggcttcgaacacctagctgtgcaagccaacatgcaacaacaagcgcttgcggcgagcgtcttacaacaaccaattgcccaattgcaacaacaatccttgccacatctaacaatacaagccatcacaacgcaacagcaacaacagttcctaccagcactgagccacctagccatg

SEQ ID NO: 16936 - DNA, 199 bp, Zea mays
  unsure at all n locations
  Clone ID: LIB3151-006-Q1-K1-E5
acgggannggaagaccgggccgacgcacgcgttcgagcattattcaaaaacacacgaagcggttcgcactaacagcatcaataacaactgggtagtgaaaatatatgaccgtccttttgctcttttccctttttgagagcgcaccacatacgtgtatattattacacagctctcactgtgcttatagcgccaataccac

SEQ ID NO: 16937 - DNA, 372 bp, Zea mays
  unsure at all n locations
  Clone ID: LIB3151-006-Q1-K1-E6
cggaatcccaagacgacgccacgcgtacgtatcaacatacatagtncaaccacacttacagtatttataccattagtgttaatccactaggtgtggcgtaattaccctcgttactctatcaggaagctcttctatctcctcttttatttgactatggttacaacaatacctttctcccatgacagccgtgggattttattacccacatatacaatgctacatgtaccaacaggccatcataatgaacatcttactcacattacaattaacccgtatacaacaatatccttttatgtaacagtcatgcttaatgtatctgtatctgcaaataatccggggacagtaaatataacaacatttgctttcaactat

SEQ ID NO: 16938 - DNA, 257 bp, Zea mays
  Clone ID: LIB3151-006-Q1-K1-E8
cgttcaaaaagatactactactccagggctatgtggacgctgaagacaaagccggagggggatagtatgactagaaaaaggatgaatgatcaaaattcttggtcttgaccgttgcacctgacgtgaaacgtacgtgaactggggacggatggacaagtatatccagagttagatgcgctgttatccgatcgcgtatttgttttatatgaaaaacatacactattttgattgcaagttaattaaaattacatttgtgt

SEQ ID NO: 16939 - DNA, 402 bp, Zea mays
  Clone ID: LIB3151-006-Q1-K1-E9
tgatctctcacggagttcccctgtatggcgacgcttcgctcaccgagccccagcgccggggcgcgggtcgattctgcgccgctgctgggcggcgcctccggcggcgggtcccgtcgccgaggtggagcgcttcgccggccctccctccgcggcgcggcgcggctgctgcgtcgcggcgggcggcgggccatgcgggagccctcggtgctggtgcgggaggccgccgcagagcacctcgaggagcggcaggctgactgggcctactcccgccccgtcgtggcgctcgacctgctgtggaacctcgctttcatcaccgtcgctgcggtcgtgctcgtgctcagccgcgacgaggactcgcccatgccgctccggacttgggtcgccggctacgcccttcagtgc

SEQ ID NO: 16940 - DNA, 313 bp, Zea mays
  Clone ID: LIB3151-006-Q1-K1-F1
atagctcatggactccagattggagaactcgacaccatgaacgtgctgatcgatgcccttgctctcctggcgctcgctgagagcgccggcttcagaacaagcgagagctgtggctgccacacaccacacgattcatgtaccgcctacgctctatgccgactccgatctatctgccgccgcagcatcaaaccgagtcatggcaataccccactcaaccaccgcagataagcccgtgccaccagttaggatcctgcggggtgggcagcgtcagcagcccgttcctgggccaaagcgtcagtttctgacgcaccag

SEQ ID NO: 16941 - DNA, 405 bp, Zea mays
  Clone ID: LIB3151-006-Q1-K1-F10
cccaccccaaaccctcgcgccgcctccgagacagtctccgcaaccatggccaccaccggggcctgttctaccgcgctcactggcgccactaccgctgcgcccaaggcgaggcgccgggcgcaccttctggccacccgccgcgccctcgccgcgcccatcaggtgctcagcggcgtcacccgccatgccgatggctcccccggccaccccgctccggccgtggggccccaccgagccccgcaagggtgctgacatcctcgtcgagtccctcgagcgctgcagcgtccgcgacgtcttcgcctaccccggcggcgcgttcatggagatccaccaggcactcacccgctcccccgtcatcgacaaccacctttttcgccacgagcaaggggaggcctttgccgtcttc

SEQ ID NO: 16942 - DNA, 391 bp, Zea mays
  Clone ID: LIB3151-006-Q1-K1-F11
accgtcgtccgagttggcatctttggcctaaccttgtatcattgcccaatcacagatctgctccgccttctctttctaatccctctttcttcccctctctctctctctctttctctctctctctctctcacgcattacccactacctgctcctgctgcttgcttgcttgtgcggtggacgctgcggtgcggagcggagaggtgaagaaggggatgaaggaggagatggtggtcgggctgtcggcgccggtgccggtggtgaggtggtgcgcctcgccgccgcaagcgatgctggagaggatgaaggactactgccaggatggcgccttcgcgctctgggacgatctctcgcccaatgaccgagagctcctcgtccgggacatcgagagtct

SEQ ID NO: 16943 - DNA, 402 bp, Zea mays
  Clone ID: LIB3151-006-Q1-K1-F2
attgagaccaactagcaacatagaaagcacaatagtgtaccaacaatggcagccaaaatattttgcttccttatgctccttggtctttctgcaagtgttgctaccgcaaccattttcccacaatgctcacaagctcctatagcttcccttcttcccccatacctctcaccagcggtgtcttcaatgtgtgaaaacccaattgttcaaccctacaggatccaacaggcaatcgcaacaggcatcttaccattatcacccttgttcctccaacaaccgtcagccctattacagcagttacctttggtccatttggtggcacaaaacatcagggcacaacaactacaacaacttgtgctagcaaaccttgctgcatactctcagcaacatcagtttcttccattc

SEQ ID NO: 16944 - DNA, 388 bp, Zea mays
  Clone ID: LIB3151-006-Q1-K1-F4
ctcacgcgtccgactgtggcggagcacggatgcaaaggacgaggaacagcaacagacggcggggcggaggagcgggatgccactcattgcttgcaaccatggttaggggattgaagaagcactagaagaggctgaatgcgctcaagaattggatgctcgacaagatttgacggagcttttgctatccaagccattttctggacctcacaagctcagggagtgccttactgtgatcctcatcatcaggaacaggctcaagtatgctctgaactaccgtgaggtcatttgtatactgatgcaacgccatgtacttgttgattgctaagtcaggactgacaaaacctactctgctgggatcatggatgtcatttccatacctaatacaatg

SEQ ID NO: 16945 - DNA, 386 bp, Zea mays
  Clone ID: LIB3151-006-Q1-K1-F5
ggaaaccttgctgcctactctcagcaacagcagtttcttccattcaaccaactggctgcattgaactctgctgcttatttgcaacaacaactaccattcagtcagctagctgctgcctacccccagcaatttcttccattcaaccaactggcagcattgaactctgctgcttatttacaacagcaacagctaccaccattcagccagctagctgatgtgagccctgttgccttcttgacacaacaacagttgttgccattctacctgcacgctgcgcctaacactggcaccctcttacaactgcaacaattgctgccattcaaacaacttgctttgacaaacccaacagcgttctaccaacaacccatcattggtggagccctctt

SEQ ID NO: 16946 - DNA, 394 bp, Zea mays
  Clone ID: LIB3151-006-Q1-K1-F6
ctggacgtcagcctagcaattagctcatcgactccagattggagaactcgacaccatgggggtgctgatcgttgcccttgctctcctggcgctcgctgcgagcgccgcctccagtacaagcggcggctgtggctgccagacaccaccgtttcatctaccgcctccgttctatatgccgcctccgttctatctgccgccgcagcagcagccgcagccatggcaataccccactcaaccaccgcagctaagcccgtgccagcagttcggatcctgcggcgtcggcagcgtcggcagcccgttcctgggccagtgcgtagagtttctgaggcaccagtgcagcccggaggcgacgccctacggctcgccacagtgccaggcgctgcagcagcagtgc

SEQ ID NO: 16947 - DNA, 420 bp, Zea mays
  Clone ID: LIB3151-006-Q1-K1-F7
tggacgtcagcctagcaattagctcatcgactccagattggagaactcgacaccatgaaggtgctgatcgttgcccttgctctcctggcgctcgctgcgagcgccgcctccagtacaagcggcggctgtggctgccagacaccaccgtttcatctaccgcctccgttctatatgccgcctccgttctatctgccgccgcagcagcagccgcagccatggcaataccccactcaaccaccgcagctaagcccgtgccagcagttcggatcctgcggcgtcggcagcgtcggcagcccgttcctgggccagtgcgtcgagttcctgaggcaccaatgcagcccggcggcgacgccctacggctcgccacagtgccaggcgctgcagcaacagtgctgccaccaaatcaagcacgtggagccg

SEQ ID NO: 16948 - DNA, 393 bp, Zea mays
  Clone ID: LIB3151-006-Q1-K1-G1
gcagatgaggatgatggacgtgcagaccgaacagcatgaactgcggatgatgatgcagcgtgagcgtgccgctgccggctgcaacagcctgtacgagccagatgtgatgcagcagcagcaggatgtgctggtagcacagggtttgaaccccatggacaagaagaaggggcacaacatgccgtgcatgggtggactctaccacgaccagtaccagatgcacagctaccgcaccaacccctgtggtatctccggtgtcattacaccatactactgattcatgatattcgggaaatctgctgtatgcatccgtctatgtctatatatgtgataatgcaggaagacgacacacattataatgtgtggtatgaccaataatatatgcatcataataaa

SEQ ID NO: 16949 - DNA, 328 bp, Zea mays
  Clone ID: LIB3151-006-Q1-K1-G10
acgcgtcgctaaacctgagccaccgcctccggagtcgcgtccggtgggacttagcgtggggagcccctcagggctagcggcgagaagtcggaaaccgataccctcctccttacggggagggagaaactagcggagagcgaatcagtcaaggggccgagaggacatgatcaaggagcgtgtggaagacacgggacaatctaagcggcggagaagtacggaagaaccatggcgcgcattgtgtgtcgccgaagtcgcaagcaggcaggccgtggtacagggtcgaccgtcataagaaaccgatggacaaggagaggatgaaaatacttat

SEQ ID NO: 16950 - DNA, 197 bp, Zea mays
  Clone ID: LIB3151-006-Q1-K1-G12
agaccattagctttatctactccagagctcattttatacccgatcgacaccattaagggggggctcgttgccctcgctctcctggctctcgctacaagcgccacctccactcatacaagcggctgctgctgctgccaaccacctccgacggttcatctaccgcctcctgtgcatctgccacctcctgttcaccttcc

SEQ ID NO: 16951 - DNA, 366 bp, Zea mays
  Clone ID: LIB3151-006-Q1-K1-G2
cggacgcgtgggtgagcattcagaaacacaccaagcgaagcgcactagcaacgacctaacaacaatggctaccaagatattagccctccttgcgcttcttgccctttttgtgagcgcaacaaatgcgttcattattccacaatgctcacttgctcctagtgccattattccacagttcctcccaccagttacttcaatgggcttcgaacacctagctgtgcaagccaacatgcaacaacaagcgcttgcggcgagcgtcttacaacaaccaattgcccaattgcaacaacaatccttgccacatctaacaatacaagccatcacaacgcaacagcaacaacagttcctaccagcactgagccacct

SEQ ID NO: 16952 - DNA, 384 bp, Zea mays
  Clone ID: LIB3151-006-Q1-K1-G3
ggactatctatggtcagctatgtcaggatgacatgcctatggtcagaagagcagctgcatcaaatcttggaaagtttgcagctacagttgaacagaatcatttgaagacagaaataatgtcaatatttgatgatttaacccaagatgatcaagattcagtgcgtctgttggctgttgaaggctgtgctgcccttggtaaattgttggaaccacaagattgcgtagcacacattcttccagtcattgtcaatttctcccaggataaatcatggcgtgttcgttatatggtcgccaatcaattatatgagctctgtgaagctgttggccctgagcctacaagagctgatttggtgcctgcctatgttcgccttcttcgtgataatg

SEQ ID NO: 16953 - DNA, 428 bp, Zea mays
  unsure at all n locations
  Clone ID: LIB3151-006-Q1-K1-G4
gggagctgatatcgtgatgcactcggctaccaaatttatagcgggacatagtgatcttatggctggaattcttgcagtgaagggtgagagtttggctaaagaggtagggtttctgcaaaatgctgaagggtcgggtctggcaccttttgactgctggctttgcttgaggggaatcaaaaccatggctctgcgggtggagaaacaacaggctaatgcccagaagattgctgaattcctggcgtctcacccgagggtcaagcaagtaaactacgctgggcttcctgaccatcctgggcgagctttacactattcccaggcaaagggagcgggctctgttctcagttntctcaccggctcactggccctctcaaaacacgtcgtggagaccaccaagtacttcagcgtaacagtcagcttcgggagcgtga

SEQ ID NO: 16954 - DNA, 413 bp, Zea mays
  Clone ID: LIB3151-006-Q1-K1-G6
gaggacttggaagttcctagccacaagacgaaaaacattgtgcaatacattagacagatggatgactcaaagaaggttctgttggtggatggaggcgacattgataagaagctaaagttggccactcaaaaccttcactacgttaacgtacttccttccattggcctcaacgtctacagtatcctccagcatgacacccttgtaatgactcgggccgctatcaacagaatcgtcgagcggatgcatacccccatcaaccgctagctaggagggtttctgagtcgcaccactgtttcttacagccagcaacctgtgctttttcgttccctgttaaagctcgaaggtttcctgttatcttggtgctaacatggaactgcagcgtcagctgtttattttctgtcagactgaaagca

SEQ ID NO: 16955 - DNA, 404 bp, Zea mays
  Clone ID: LIB3151-006-Q1-K1-G7
attttcagcattcagaaacacaccaagcgaagcgcactagcaacaacctaacaacaatggctaccaagatattagccctccttgcgcttcttgcccttttagtgagcgcaacaaatgcgttcattattccacagtgctcacttgctcctagtgccattattccacagttcctcccaccagttacttcaatgggcttcgaacatccagccgtgcaagcctacaggctacaactagcgcttgcggcgagcgtcttacaacaaccaattgcccaattgcaacaacaatccttggcacatctaaacctacaaaccatcgcaacgcaacagcaacaacagtttctgccatcactgagccacctagccgtggtgaaccctgtcgcctacttgcaacagcagctacttgca

SEQ ID NO: 16956 - DNA, 310 bp, Zea mays
  unsure at all n locations
  Clone ID: LIB3151-006-Q1-K1-G9
gccgcatatgaagtgaaaggcacttncaacaatttatcatcaatggcggccaagatattgtccagggttatgctccttgctctttctgcacctgttgctaacacgaccattgtccctcaatactcacaagctgctatgtctgcccttgttcccccataccttccatcgatgaccgcttcagtctttgaaaacccagcccttcaaccctagcagctccaacaagcaatcgtagcaggcaacctacctttctcaccccttgtgcattcacaatcgacatccctatctttggtgcaatcattgtgacaaacca

SEQ ID NO: 16957 - DNA, 433 bp, Zea mays
  unsure at all n locations
  Clone ID: LIB3151-006-Q1-K1-H1
ctttctgcagtgcaagaactaggaaagcgctacccccaaggtcttccgaaactacatccaatcaatgacatgggtattcaagaacctgaactagttgacttggtacataaacttgaagaccttgagcagaaacaatgctctcaccgacttcataagtccggtcaaagtgaacaggaactatcatggtaccaaaaaaaagcagatctgaatactgaaattcagcaactcaagtcaaagatgcgggattcacagctacaaaaatttagagatgaacttangaaccggtcccgtgttctgaagatgctggggcatattgatgctgacggtgttctccaattgaaaagacgtgctgcctgtctaatagacacaggggatgaactgcttatcactgaacttatgttcaatggtacatttaatgatcttgaccatcatc

SEQ ID NO: 16958 - DNA, 416 bp, Zea mays
  Clone ID: LIB3151-006-Q1-K1-H10
caacaacttgtgctagcaaaccttgctgtctactttcagcaacagcagtttcttacattcaaccgactagctgcattgaactctgcttcttatttgcaacaacaacaactaccattcagccagctacctgttgcctacccccagcaatttcttccattcaaccaactggcagcattgaactctcctgcttatttacagcatcaacaactactaccattcatccagctagctggtgtgagccctgctacctttttgacacaaccacagttgttgccgttctaccagcacgctgcgcctaacgctggcaccctcttacaactgcaacaattgctgacattcaaccaacttgctttgacaaacctatcagtgttctaccaacaacccatcattggtggtgccctcttttagatttctta

SEQ ID NO: 16959 - DNA, 395 bp, Zea mays
  Clone ID: LIB3151-006-Q1-K1-H11
cctatcgccggatctctttgcagctgcggaaatggcgaatcggctagcggtgcttcaggaccacctcaagctcgctcgggactactcgctcgagggcctctacgacacctccatcatcttcttcgacggcgccatcgcccagatcaacaagcatctaactactttggacgatgctctgattcttacgaaatggatgaactgcaagaaagcaatctctgaagaagtggaaattgtgaaacacttggatgctcaattaaagtcccttaaagaagctcctgggtcaaggcggtcatcatcacctcctattcggtctaataaatcatttgttttccaaccgttggatgagtatccaacatctttaccagcaccctttgatgatcctgatgtgtgggctc

SEQ ID NO: 16960 - DNA, 379 bp, Zea mays
  Clone ID: LIB3151-006-Q1-K1-H12
cacaccaagcggaagcgcactgatcaacaacgctatttttctatcggctacacaagtattattattccctatctggtcgtcttcttgcagcctttcttcgtagcacatcaacatcgcgcttcattatatgcacattcgcttacctcgctcccagttctcaatatgccagaactgctctcaccacttacttaaatcgactatgaacacccatctgctctagcctatcggctactacatgctactgccgcaagcgacttacatcaaccaagtgccctactactacaactatgcgcagaccatctatctataccaaccattgctactaaacagctaccacaattacatccagcttttagacacccatccctggtgaaccctg

SEQ ID NO: 16961 - DNA, 364 bp, Zea mays
  Clone ID: LIB3151-006-Q1-K1-H2
aagcacaatagtgtaccaacaatggcagccaaaatatattgcctccttatgctccttggtctttctgcaagtgctgctacggcgaccattttcccgcaatgctcgcaagctcctatagcttcccttcttaccccgtacctctaaccagcggagtcttccgtatgtgaaaacccaattcttcaaccctacaggatccaacaggcaatcgcagctggcatcttacctttatcacccttgatgctgcaacaatcattagccatattacaacagttacctttgatgcatttattggcacagaacatcatggcacatacaactacaacaacttgtgctagcaaacattgctgtctactctcagcaacag

SEQ ID NO: 16962 - DNA, 425 bp, Zea mays
  Clone ID: LIB3151-006-Q1-K1-H4
caacatagaaagtggaatccagtagcaacaatagagcaacaatggcgaccaagatattttccctccttatgctccttgctctttctgcatgtgttgctaacgcgacaattttccctcaatgctcacaagctcctatagcttcccttcttcccccataccttccatcaatgatagcttcagtatgtgaaaacccagctcttcaaccctataggctccaacaagcaatcgcagcaagcaacatacctttatcacccttgtttcaacaatcgccagccctatctttggtgcagtcattggtacaaaccatcagggcacagcagctgcagcaactcgtgctacctgtgatcaaccaagtagctctggcaaacctttctccctactctcagcaacaacaatttcttccattcaaccaactgtctacattg

SEQ ID NO: 16963 - DNA, 408 bp, Zea mays
  Clone ID: LIB3151-006-Q1-K1-H5
gtgtcttcggtatgtgaaaacccaattcttcaaccctacaggatccaacaggcgatcacagctggcatcttacctttatcacccttgttcctccaacaatcatcagccctattacatcagttacctttggtgcatttattggcacaaaacatcagggcacaacaactacaacaacttgtgctagcaaaccttgctgcctactctcagcaacagcagtttcttccattcaaccaactagctgcattgaactctgcttcttatttgcaacaacaacaactaccattcagccagctacctgctgcctacccccagcaatttcttccattcaaccaactggcagcattgaactctcctgcttatttacagcggcaacaactactaccattcaaccaactagctggtgtgagc

SEQ ID NO: 16964 - DNA, 429 bp, Zea mays
  unsure at all n locations
  Clone ID: LIB3151-006-Q1-K1-H6
actttatctactccagagcgcagaagaacccgatcgacaccatgagggtgttgctcgttgccctcgctctcctggctctcgctgcgagcgccacctccacgcatacaagcggcggctgcggctgccagccaccgccgccggttcatctaccgccgccggtgcatctgccacctccggttcacctgccacctccggtgcatctcccaccgccggtccacctgccgccgccggtccacctgccaccgccggtccatgtgccgccgccggttcatctgccgccgccaccatgccactaccctactcaaccgccccggcctcagcctcatccccagccacacccatgcccgtgccaacagccgcatccaagcccgtgccagctgcanggaacctgcggcgttggcagcaccccgatcctggccagtgcgtcga

SEQ ID NO: 16965 - DNA, 337 bp, Zea mays
  Clone ID: LIB3151-006-Q1-K1-H7
tgatggagcaaacacaaacacggcagggtcaaaatattcccatggagctcccagcggtggggacaaaaatgtgcggcccaaatgccctaaccgtcttacttgtgaacacgtggctggccaaattaaggacaaagcgttgacgatcaccgatgcacgttcacgcatttcaacacatcctggtaacggttaggctatgactgaaccaacatgtgtcagcaaatgtccatcttcggtcattggaaataatggtctcacagaaacaaaccgtcgaaattagtcaaaaggtgctgcaatatgtcatgctgaatgccgccccttcgaatttatggcgaccaac

SEQ ID NO: 16966 - DNA, 329 bp, Zea mays
  Clone ID: LIB3151-006-Q1-K1-H8
acgattttgagcattcacaaacacaccaagcgacgcgcactagcaacaacctaacagcaatgggtaccaagatattatccctccttgcgcttcttgcactttctgcgagcgcaacaaatgcgtccattattccacaatgctcacttgctcctagttccattattccacaggtcctaccaccagttacttcaatggccttcgaacactcagctgtgcaagcctataggctacaacaagcgattgcggtgagcgtgttacaacaaccaattgcccaattgttacaacaattctttggtacatttaacaatacaaaccattgcatcgcaaca

SEQ ID NO: 16967 - DNA, 269 bp, Zea mays
  Clone ID: LIB3151-007-Q1-K1-A1
cagaccattagctttatctactccagagcgcagaagaacccgatcgacaccatgagggtgatgctgggggccctcgctctcctggctctcgctgcgagcgccacctccacgcatacaagcggcggctgcggctgccagccaccgccgccggttcatctaccgccgccggtgcatctgccacctccggttcacctgccacctacggtgcatcttccaccgccggtccacctgccgccgccggtccacctgccaccgacggtccatgtgcc

SEQ ID NO: 16968 - DNA, 190 bp, Zea mays
  Clone ID: LIB3151-007-Q1-K1-A10
actcgtacaagatcgcgagcgtgcactctagcagactcaaccttacttccgcgcgcatgggaaatcatagcttatgtacagtgccacctaacatgaatttactgtccggcactttacaaactcctgacttgaaaaaccttgacgatacgaaacttattggccttgcaccaaatctgcgtttcgccaggtt

SEQ ID NO: 16969 - DNA, 319 bp, Zea mays
  Clone ID: LIB3151-007-Q1-K1-A11
caactagcaacatagaaagcacaatagtgtaccaacaatggcagccaaaatattttgcgtccttatgctccttggtctttctgcaagtgctgctacggcgaccattttcccgaaatgctcgcaagctcctatagcttcccttcttcccccgtacctctcaccagcggtgtcttcggtatgtgaaaacccaattcttcaaccctacaggatccaacaggcaatcacagctggcatcttacctttatcacccttgttcctccaacaatcatcagccctattacatcagttacctttgggtgcattattggcacaaaacatc

SEQ ID NO: 16970 - DNA, 376 bp, Zea mays
  unsure at all n locations
  Clone ID: LIB3151-007-Q1-K1-A12
ctgggtcttcagaccatttgctttatctactccagagcgcagaagaaccggatcgacagcatgagggtgttgctcgttgccctcnctctcctggctctcgctgcgagcgccacctccacgcatacaagcggcggctgcggctgccagccaccgccgccggttcatctaccgccgccggtgcatctgccacctccggttcacctgccacctccggtgcatctcccaccgccggtccacctgccgccgccggtccacctgccaccgccggtccatgtgccgccggcggttcatttgccgccgncaccatgccactaccttattaaaccgccccggcctcagcctaatcccaagccacaccaatccccttgcaaacagc

SEQ ID NO: 16971 - DNA, 479 bp, Zea mays
  unsure at all n locations
  Clone ID: LIB3151-007-Q1-K1-A2
ccagagctacttggttgatcacaggtagctctggtaaacctttctccctactctcagcaacaacagggtgttccattcaaccaactgtctacattgaaccgtgctgcttatttgcagcaacaactattaccattcagccagctagctactgcctactctcagcaacaacaacttcttccatttaaccaattggccgcactgaaccccgctgcttatttgcagcagcaaatactactaccatttagccagctagctgcagcaagccgtgcttccttcttgacacagcaacagttgctgcctttctaccagcagtttgcggctaaccccgcaacccttttacaactaccacaattggtggcctttggcccacttgctttgacaaacaccagaagnctctaacaacaacacaataatggtggggccctcttttagaatgcttattaattggaaatcaataataaaggtttttggatgatgta

SEQ ID NO: 16972 - DNA, 450 bp, Zea mays
  Clone ID: LIB3151-007-Q1-K1-A3
gccaccatgccactaccctactcaaccgccccggtctcagcctcatccccagccacacccatgccggggccaacagccgcatccaagcccgtgccagctgcagggaacctgcggcgttggcagcaccccgatcctgggccagtgcgtcgagtttctgaggcatcagtgcagcccgacggcgacgccctactgctcgcctcagtgccagtcgttgcggcagcagtgttgccagcagctcaggcaggtggagccgcagcaccggtaccaggcgatcttcggcttggtcctccagtccatcctgcagcagcagccgcaaagcggccaggtcgcggggctgttggcggcgcagatagcgcagcaactgacggcgatgtgcggcctgcagcagccgactccatgcccctacgctgctgccggcggtgtcccccaactgagaaactatgtgctgta

SEQ ID NO: 16973 - DNA, 394 bp, Zea mays
  Clone ID: LIB3151-007-Q1-K1-A4
caacaactaccattcagtcagctagctgctgcctacccccagcaatttcttccattcaaccaactgggagcattgaactctgctgcttatttacaacagcaacagctaccaccattcagccagctagctgatgtgagccctgttgccttcttgacacaacaacagttgttgccgttctacctgcacgctgcgcctaacgctggcaccctcttacaactgcaacaattgctgccattcaaccaacttgctttgacaaacccaacagcgttctaccaacaacccatcattgggggtgccctcttttaaaatgcttatgagttatagttcaataatgaagttttttggatgaagtttggggcttcccagaaataagaaagtacatttctagattctt

SEQ ID NO: 16974 - DNA, 463 bp, Zea mays
  Clone ID: LIB3151-007-Q1-K1-A5
gagaccaacaagcaacatagaaagtggaatccagtagcaacaatagagcaacaatggcgaccaagatattttccctccttatgctccttgctctttctgcatgtgttgctaacgcgacaattttccctcaatgctcacaagctcctatagcttcccttcttcccccataccttccatcaatgatagcttcagtatgtgaaaacccagctcttcaaccctataggctccaacaagcaatcgcagcaagcaacatacctttatcacccttgtttcaacaatcgccagccctatctttggtgcagtcattggtacaaaccatcagggcacagcagctgcagcaactcgtgctacctgtgatcaaccaagtagctctggcaaacctttctccctactctcagcaacaacaatttcttccattcaccaactgtctacattgacccgtgctgcttattgcagcaacact

SEQ ID NO: 16975 - DNA, 478 bp, Zea mays
  Clone ID: LIB3151-007-Q1-K1-A6
ggtcttcagaccattagctttatctactccagagcgcagaagaacccgatcgacaccatgagggtgttgctcgttgccctcgctctcctggctctcgctgcgagcgccacctccacgcatacaagcggcggctgcggctgccagccaccgccgccggttcatctaccgccgtcggtgcatctgccaccttcggttcacctgccaccttcggtgcatcttccaccgccggtccagctgccgccgccggtccacctgccaccgccggtccatgtgcccgcgccggttcatctgccgccgccaccatgccactaccctactcaaccgccccggccttagcctcatccccagccacacccatgcccgtgccaacagccgcatccaagcccgtgccagctgcagggaacctgcggcgttggcagcaccccgatcctgggccagtgcgtcgagtttctgaggcatcagtgcatcccgacggcga

SEQ ID NO: 16976 - DNA, 240 bp, Zea mays
  Clone ID: LIB3151-007-Q1-K1-A8
atacagggttccacccacgcgtccgcttctatcaataccatcaatcatgattcatcctattactataagcaccaaatcaaatatgcagcgtgaggcctttaacttcatatgccatgaagctagtgcttgtggctatcgctgaaatcgcttccttgtgaagtgtcttttgatcacttacatgtcaatgattcttgtggtcaacaacagagccatgagctttagcttaatacacaacctctt

SEQ ID NO: 16977 - DNA, 440 bp, Zea mays
  Clone ID: LIB3151-007-Q1-K1-A9
tattgataccaactagcaacatacatagtgaagtacactagcaacatcttagcaccagtgggagccaagatttttgccctccttgccctccttgctctttcagcaagcgctgctacctcgacttttattccacaatgctcacaacaatacctctctccggcgacagccgtgggatttcaatacccaactatacaatcctacatggtacaagaggccatccaagcaagcatcttacggtcattagcattaaccctccaacaaccatatgctctattgcaacagccatccttagtgcatctgtatctccaaagaatcgcggcacaacaactacaacaacagttgctaccaacaatcaatcaagtagttgcagcgaaccttgctgcttacctccagcaacaacagtttcttccattcaatcaactagatggggtgaaccctgc

SEQ ID NO: 16978 - DNA, 310 bp, Zea mays
  Clone ID: LIB3151-007-Q1-K1-B1
agaccattagctttatctactccagagcgcagaagaacccgatcgacaccatgagggtgttgctcgttgccctcgctctcctggctctcgctgcgagcgccacctccacgcatacaagcggcggctgcggctgccagccaccgccgccggttcatctaccgccgccggtgcatctgccacctccggttcacctgccacctccggtgcatctcccaccgccggtccacctgccgccgccggtccacctgccaccgccggtccatgtgccgccgccggttcatctgccgccgccaccatgccactaccctac

SEQ ID NO: 16979 - DNA, 438 bp, Zea mays
  Clone ID: LIB3151-007-Q1-K1-B10
tgagaccaacaagcaacatagaaagtggaatacagtagcaacaatagagcaacaatggcggccaagatattttccatccttatgctccttgctctttctgcatgtgttgctaacgcgaccatttttcctcaatactcacaagctcctatagctgcccttcttcccccataccttccatcaatgaccgcttcagtatgtgaaaacccagcccttcaaccctacaggctccaacaagcaatcgcaacaagcaacttacctttatcacccctgttctttcaacaatcgccagccctatctttggtgcagtcattggtacaaaccatcagggcacaacagctgcagcaactcgtgctaccagtgatcagccaagtagctctggcaaacctttctccctactctcagcaacaacaatttcttccattcaaccaactgtctaca

SEQ ID NO: 16980 - DNA, 469 bp, Zea mays
  unsure at all n locations
  Clone ID: LIB3151-007-Q1-K1-B11
gacccacgcgtcggagcagtcancaacacaacatacaaagctctttatgtactaacaatcgccaacaaaaacggatactttcgtgtgctcttgggcctctctccatgtgttgctacccaacccatgctttcacaatgctcacaagctcatatagcttctattctcattatatcacagttactaccagcgttttctatgttggaatacccacacgttcatccctacacgatcctacaacaactcgcagcatgcatctataccattatcaccactccatcctccaacaaccgacaaccctattacacaaatttcccaatgcacattatcacagcccaacaataacggcacatcctatacgacatcttgcgcttaaccatcgtgaagcctactgtctacttcctagagcatcttcattcaaccaacccacttgatctaactatcgtagttatttagccacaacattaccatt

SEQ ID NO: 16981 - DNA, 434 bp, Zea mays
  Clone ID: LIB3151-007-Q1-K1-B12
cagcattcacaaacacaccaagcgaagctcactagcaacaacctaacagcaatggctgcgaagatattagccctccttgcgcttcttgcccttttagtgagcgcaacaaatgcgttcattattccacagtgctcacttgctcctagtgccattattccacagttcctcccaccagttacttcaatgggcttcgaacatccagccgtgcaagcctacaggctacaactagcgcttgcggcgagcgtcttacaacaaccaattgcccaattgcaacaacaatccttggcacatctaaacctacaaaccatcgcaacgcaacagcaccaacagtttctgccatcactgacccacctagccgtggtgaaccctgtcgcctacttgcaacagcagctacttgcatccaacccacttgctctggcgaacgtagctgcata

SEQ ID NO: 16982 - DNA, 463 bp, Zea mays
  Clone ID: LIB3151-007-Q1-K1-B2
atttgcactcatgcatcacaaaacatccttctatcagtaccatcaatcatcattcatcttagtagtggaggcaccaaatcaaatctgcaacatcaattatctaactccaaaaaccatgaagctggtgcttgtggttcttgctttcattgctttagtatcaagtgtttcttgtacacagacaggcggctgcagctgtggtcaacaacaaagccatgagcagcaacatcattcacaacaacatcatccacaaaaacaacaacattaaccaccaccacaacatcaccagcagcagcaacacccacaacaacaagtttacatgccaccacaaaaacatcagcaacaacaaggaagttatggtcaacaaccaccacaaccaccggagcacccacaaccaccaccaccaccggtcccacaacaacattaattgtgaaggccacaacaacattacccacaattacaaggg

SEQ ID NO: 16983 - DNA, 303 bp, Zea mays
  Clone ID: LIB3151-007-Q1-K1-B3
cccacacgcgcgatgtccgctcattcatcacataccatccttctatttttaccatcaatcataacacatcttacaactgtagcttttaaatcatatcttctacattaattatctaacttcaaaaaccatcaaccaattactttcatttaactcttccatttcattactataactacatcttccatcaaacacactacttttcacctaccctcaacaacaaattcatttaacccaacttacatctatatactatcctgcttatttacaacaacatcaactactaccatacaaacatctattttt

SEQ ID NO: 16984 - DNA, 337 bp, Zea mays
  Clone ID: LIB3151-007-Q1-K1-B4
attcctcccaacaccacctcgcctgcgatctccgtagcctccgtcgcgtcgagcatcgatcatgtcgggctactgcggaaagtacaaggatgagctcatcaagaatgctgcctacattggcacccctggcaagggtatccttgctgctgatgagtccactggcaccattggcaagcgcctttccagcatcaatgtcgagaacgttgaggagaaccggcgtgcccttcgcgaggctctattctgctgccctggtgctcttcagtacatataagcgggtgaacctcttccaggagaccctgtaccaaaacaccaaggatggcgagccctttgttgatgt

SEQ ID NO: 16985 - DNA, 441 bp, Zea mays
  Clone ID: LIB3151-007-Q1-K1-B5
gccagcagttacctttggtgcatttattggcacaaaacatcagggcacaacaactacaacaacttgtgctagcaaaccttgctgcctactctcagcaacagcagtttcttccattcaaccaactagctgcattgaactctgcttcttatttgcaacaacaacaactaccattcagccagctacctgttgcctacccccagcaatttcttccattcaaccaactggcagcattgaactctcctgcttatttacagcagcaacaactactaccattcagccagctagctggtgtgagccctgctaccttcttgacacaaccacagttgttgccgttctaccagcacgctgcgcctaacgctggcaccctcttacaactgcaacaattgctgccattcaaccaacttgctttgacaaacctagcagtgttctaccaacaaccca

SEQ ID NO: 16986 - DNA, 372 bp, Zea mays
  Clone ID: LIB3151-007-Q1-K1-B6
cagcaaagcggcagtgcgtagagaggatcgtcgaacagaacagcatgaagatggtcatcgttctcgtcgtgtgcctggctctgtcagctgccagcgcctctgcaatgcagatgccctgcccctgcgcggggctgcagggcttgtacggcgctggcgccggcctgacgacgatgatgggcgccggcgggctgtacccctacgcggagtacctgaggcagccgcagtgcagcccgctggcggcggcgccctactacgccgggtgtgggcagacgagcgccatgtaccagccgctccggcaacagtgctgccagcagcagatgaggatgatggacgtgcagtccgtcgcgcagcagctgcagatgatgatgcaac

SEQ ID NO: 16987 - DNA, 399 bp, Zea mays
  Clone ID: LIB3151-007-Q1-K1-B9
gagcatcataaaaagtggattccagtattaacaatcgatcaacaacggcgaccaaaaggttttccttgggtatgctccttgctctttctgcatgtgttgctaacgcgacaattttccctcaatgctcacaagctcctatatctacccttcttcccccataccttccatcaatgatagctttagtatgtgaaaacccaactcttcaaccctataggctctaacaagcaatcgcaacatgcaacatacctttatcacccttgtttcaacaatcgccagccctatctttggtgcagtcattggtacaaaccattacggcacataagctgcagcaactcatgctatctgtgatcaaccaagtagctctggcaaacctttcttctactctcagcaacaacaatt

SEQ ID NO: 16988 - DNA, 298 bp, Zea mays
  Clone ID: LIB3151-007-Q1-K1-C10
cttgtgccatcaattattcataccatgttcttgcaagcaagttaactgggggatgacagtgtaactgcagataaataaagaagttcaggagcttttaaggcttacgttaagcaaggcccgagtcaagctgaccgaaaataccatttttaaacgaatcattatggacactaacagcacagatccatttaatggtctctatgtgggagcatttagtccatatggaccagaaattgtgcagctacgtctgaagttcggccactgtaacagtactgatgacgttgagtttttcgagtatgtc

SEQ ID NO: 16989 - DNA, 289 bp, Zea mays
  Clone ID: LIB3151-007-Q1-K1-C11
gaccacgcctccgccagcagcaacatgtaaagtaacattcttcagcaacattaaatcaacaatggcctaccgagatattttgcatgcttatactcctcactctttccacacgccctgctaacactaccatttatgataacttctcacaaccacctataccttcacttcttccacaataccttccatcaaccacctatcaacactctgaaaacccacccacttaaccatacaatctcaaacacgcaaacggatcaaacaacttacctttatcaccccttatctctaaaca

SEQ ID NO: 16990 - DNA, 333 bp, Zea mays
  Clone ID: LIB3151-007-Q1-K1-C12
ccggcccgacgcacgcgtccgattagctttatctactctttagcgcattttaacccgatcgacaccatgggggtgttgcgcgatgctcctactctcctggctctctctgcaaccgccacctacacgcatacaagcggctgctgcggctgccagccaccgccgccggttcatctaccgccgacggtgcatctgccacctacgtttcacctgccacctccagtgcatctcccaccgccagtccacatgccaactcctgtccacctgccaccgacgatacatgtgccaacaacggttcatctgacgccgtcaccatgccactaccctactcaaccg

SEQ ID NO: 16991 - DNA, 471 bp, Zea mays
  Clone ID: LIB3151-007-Q1-K1-C2
caatagtgtaccaacaatggcagctaaaatattttgcctccttatgctccttggtctttctgcaagtgctgctacggcgaccattttcccacaatgctcacaagctcctatagcttcccttcttcccccgtacctctcaccaacggtgtcttcggtatgtgaaaacccaattcttcaaccctacaggatccaacaggcaaatcgcagctggcatcttacctttatcacccttgttcctccaacaatcatcagccctattacagcagttacctttggtgcatttattggcacaaaacatcagggcacaacaactacaacaacttgtgctagcaaaccttgctgcctactctcaacaaccagaagttctttcattcaacccactaacttcattggacttttgttcttatttggaacaaccaccactaccattcaacccgctatctgctggctaaccccaacaatttctttcat

SEQ ID NO: 16992 - DNA, 432 bp, Zea mays
  Clone ID: LIB3151-007-Q1-K1-C3
caacaatccttgccacatctaacaatacaagccattacaacgcaacagcaacaacagttcctaccagcactgatccacctagccatggtgaaccctgccgcctacttgcaagagcagctgcttgcatccaacccacttgctctggcgaacgtagttgcaaaccagcaacaacaacagctacaacagtttctgccaacgctcagtcaactagccatggtgaaccctgccgcctacgtacaacaacaacaactgctttcatctagcccgctcgcttggggcaatgcacctacatacctgcaacaacaattgttgcaacagattgtaccagctctgactcaactagctgcggcaaaccctgttgcctacttgcaacagctgctttcatttcaccaactgactctgtcgaactctgctgcgtacctacaacagcga

SEQ ID NO: 16993 - DNA, 290 bp, Zea mays
  Clone ID: LIB3151-007-Q1-K1-C4
ctgtacggaaaaaccgatttgtcatcctccccaatgacttcgaaaagggcttccgaaccaacgtgggggagcccgtgacagactttgatttctacaaatgagtcatcccaaagtgttgaacttgtttctttctgcaaatgagtcaacccagagtgtcgaactcgactattgtttatcaattcgattatgtcttaccatcaactgagtttatggatagatgccattacaaatattcaagtttctcaacgattatgcgtgttctgtaatgattcttacgccaagtaccaacc

SEQ ID NO: 16994 - DNA, 373 bp, Zea mays
  Clone ID: LIB3151-007-Q1-K1-C5
caaaaaatcgatagtgagtaaagaggatcgtatattaaaacagtatgaaaatagtgatcgtcgggggggtgtgattctctcagtcagctaccagcgcttcttacttgcagatgccatgcccagtgtcgggactacatgcacttgtacagtgatggcgcccgcacaaccagcatgataggcgccatttgtctgtgaccctacggacattacctatggaaaaccctgttcactctgctgagctaaacacgctactatgcctggtgctgtcagacatgcgcaatgtacgaacctacttggcaatacagatgctagaagaagatgaggatgatggaagtccagtcgctcaggcagaaggttcacaagatgatccagc

SEQ ID NO: 16995 - DNA, 204 bp, Zea mays
  Clone ID: LIB3151-007-Q1-K1-C6
gctcataccggcagtgcctacatagcatcgccattcaaaacagggctcagaccgtcattccactcgggatgagcatccctatagcagccacctactcacattctttgcagatctcataccacagcacctgactgtaatgttcgtactgtactagctaacaacatcaccactatgatgctgtccgggtgctctacacttacgaaa

SEQ ID NO: 16996 - DNA, 445 bp, Zea mays
  Clone ID: LIB3151-007-Q1-K1-C7
tagcaacatagaaagcacaatagtgtaccaacattggcagccaaaatattttgcctccttatgctggttggtatttctgcaagtgctgctacggcgaccattttcccgcaatgctcacaagctcctatagcttcccttcttcccccgtacctctcaccagcggtgtcttcggtatgtgaaaacccaattcttcaaccctacaggatccaacaggcaatcgcagctggcatcttacctttatcacccttgttcctccaacaatcatcagccctattacagcagttacctttggtgcatttattggcacaaaacatcaaggcacaacaactacaacaacttgtgctagcaaaccttgctgcctactctcaagcacagcagtttctttcattcaaccaactagctgcattgaactctgcttcttatttgcaacaacaacaactaccat

SEQ ID NO: 16997 - DNA, 92 bp, Zea mays
  Clone ID: LIB3151-007-Q1-K1-D1
gcaaagggtaacatccaaaaggtgtatgcgggaccgtggatcccttgaccgtctgtgaatcatgaaaacaaaataaaggatttcaacttggc

SEQ ID NO: 16998 - DNA, 429 bp, Zea mays
  unsure at all n locations
  Clone ID: LIB3151-007-Q1-K1-D10
cggcccgacccacgcgtccgcccactcgtccgacaaattccaagctgttattgaatctggcgtgttccggcgccttgggtaacttttgatgcatccttcagcctctgtactgattccagctctgcgcacggtgggtaacatcgtaactggggacgacatgcagactcagtgtgtcattgacaatcaagcacttccatgccttttgaacctactgaccaccaaccacaagaaaagcatcaagaaagaagcatgctggacaatctcaaacatcacagctggtaacagggaacagattcaggccgtgattaatgcanacataattgcacctctggtgcaacttctgcaaactgctgaatttgacatcaagaaagaagcaacctgggcaatttcaaatgccacttctggtggcacacatgatcagatcaagta

SEQ ID NO: 16999 - DNA, 144 bp, Zea mays
  Clone ID: LIB3151-007-Q1-K1-D11
ctaacaccccctacagaacaagcggctcctgtggctcccacacaccaccgtttcatctaccgcctccgtcctatacgccgcctactttctatctgccaccacaccatcatccgcagccatgtcaataccccactcaaccacctc

SEQ ID NO: 17000 - DNA, 431 bp, Zea mays
  Clone ID: LIB3151-007-Q1-K1-D12
agggaacctgcggcgttttcagcaccctttatcctgggccagtgcgtcgggttcctgaggcatcattgcagcccgacggcgacgccctactgctcgcctcagtgccagtcgttgcggcagcagtgttgccagcagctcaggcaggtggagccgcagcaccggtaccaggcgatcttcggcttggtcctccagtccatcctgcagcagcagccgcaaagcggccaggtcgcggggctgttggcggcgcagatagcgcagcaactgacggcgatgtgcggcctgcagcatccgactccatgcccctacgctgctgccggcggtgtcccccactgaagaaactatgtgctgtagtatagccgctggctagctagctagttgagtcatttagcggcgatgattgagtaataatgtgtcacgcatcaccatgggtg

SEQ ID NO: 17001 - DNA, 394 bp, Zea mays
  Clone ID: LIB3151-007-Q1-K1-D2
ctgggtcttcagaccattagctttatctactccagagcgcagaagaacccgatcgacaccatgagggggttgctcgttgccctcgctctcctggctctcgctgcgagcgccacctccacgcatacaagcggcggctgcggctgccagccaccgccgccggttcatctaccgccgccggtgcatctgccacctccggttcacctgccacctccggtgcatctcccaccgccggtccacctgccgccgccggtccacctgccaccgccggtccatgtgccgacgccggttcatctgccgccgccaccatgccactaccctactcaaccgccccggcctcagcctcatccgcagccacacccatgcccgtgccaacagccgcatccaagcccgtgcc

SEQ ID NO: 17002 - DNA, 395 bp, Zea mays
  Clone ID: LIB3151-007-Q1-K1-D3
caaagcggcagtgcgtagagaggatcgtcgaacagaacagcatgaagatggtcatcgttctcgtcgtgtgcctggctctgtcagctgccagcgcctctgcaatgcagatgccctgcccctgcgcggggctgcaaggcttgtacggcgctggcgccggcctgacgacgatgatgggcgccggcgggctgtacccctacgcggagtacctgaggcagccgcagtgcagcccgctggcggcggcgccctactacgccgggtgtgggcagacgagcgccatgtaccagccgctccggcaacagtgctgccagcagcagatgaggatgatggacgtgcagtccgtcgcgcagcagctggagaataagatgcagcttgagcgtggccgtgacggcagcaac

SEQ ID NO: 17003 - DNA, 372 bp, Zea mays
  Clone ID: LIB3151-007-Q1-K1-D4
cagcaaagcggcagtgcgtagagaggatcgtcgaacagaacagcatgaagatggtcatcgttctcgtggtgtgcctggctctgtcagctgccagcgcctctgcaatgcagatgccctgcccctgcgcggggctgcagggcttgtacggcgctggcgccggcctgacgacgatgatgggcgccggcgggctgtacccctacgcggagtacctgaggcagccgcagtgcaacccgctggcggcggcgccctactacgccgggtgtgggcagacgagcgccatgtaccagccgctccggcaacagtgctgccagcagcagatgaggatgatggacgtgcagtccgtcgcgcagcagctgcagatgatgatgcagc

SEQ ID NO: 17004 - DNA, 383 bp, Zea mays
  Clone ID: LIB3151-007-Q1-K1-D5
atagagagcacaatagtgtaccaacaatggcagccacaacatgtagcttgcttatgctccttgggggtgctggaagtgttgataccgcaaccattttcccacaatgctcacaagctcctatagcttgccttattcccccatacctctcaccagcggtgtcttcaatgtgagaaaacccaattgttcaaccctacaggatccaacaggcaatcgcaacaagcatcttaccattatcacccttgttcctccaacaaccgtcagccctattacagcagataccttaggtccatttggtggcacacaacatcagggcacaacaactacaacaacttgtgctagcaaaccttgctgcatactctcagcaacatcagtttcttccattc

SEQ ID NO: 17005 - DNA, 418 bp, Zea mays
  Clone ID: LIB3151-007-Q1-K1-D6
gctgctacggcgaccattttcccgaaatgctcgcaagctcctatagcttcccttcttcccccgtgcctctcaccagcggtgtcttcggtatgtgaaaacccaattcttcaaccctacaggatccaacaggcaatcacagctggcatcttacctttatcacccttgttcctccaacaatcatcagccctattacatcagttacctttggtgcatttattggcacaaaacatcagggcacaacaactacaacaacttgtgctagcaaaccttgctgcctactctcagcaacagcagtttcttccattcaaccaactagctgcattgaactctgcttcttatttgcaacaacaacaactaccattcagccagctacctgctgcctacccccagcaatttcttccattcaaccaactggcag

SEQ ID NO: 17006 - DNA, 423 bp, Zea mays
  Clone ID: LIB3151-007-Q1-K1-D7
attcagaaacacaccaagcgaagcacattagcaacaacctaacaacaatggctaccaagatattatgcctccttgcgcttcttgcgctttttgcgagcgcaacaaatgcgttcattattccacaatgctcacttgctccaagttccattattacacacctcctcccaccagttactttaatgggcttttaacacacacctgtgcaagcctatatgctacaacaagcaattgcggcgagcgtgttacaacaaccaatttcccagttgcaacaacaatccttggcacatctaacaatacaaaccatcgcaacgcaacagcaacaacaattcctaccagcactgagccacctagccatggtgaaccctgccgcctacttgcaacagcagttgcttgcatcaaacccacttgcttttggcaacgtag

SEQ ID NO: 17007 - DNA, 373 bp, Zea mays
  Clone ID: LIB3151-007-Q1-K1-D8
tcagaccattagctatatctactccagagcgcagaagaacccgatcgacaccatgagggtgttgctcgttgccctcgctctcctggctctcgctgcgagcgccacctccacgcatacaagcggcggctgcggctgccagccaccgccgccggttcatctaccgccgccggtgcatctgccacctccggttcacctgccacctccggtgcatctgccaccgccggtccacctgccgccgccggtccacctgccaccgccggtccatgtgccgtcgccggttcatctgccgccgccaccatgccactaccctactcaaccgccccggcctcagccttaatccccagccacacccatgcccgtgccaacagacgca

SEQ ID NO: 17008 - DNA, 441 bp, Zea mays
  Clone ID: LIB3151-007-Q1-K1-D9
cgctgctcgcctctcgattccgcctcatcgcgtccgcgaactccatgtccactgcgacggcgaccctggccgccgcgcgatccccggctgtcgcgcttctcagcctgcgccgccgcgcacccgcggctgcccccattcgcttccccggtctccgcgtcggctctggttgccgtcacatagctatggcttccgcggcgcacgcccgcgcccccaccgacccgcttcccaagggtgctgatttatttttccgggcagtaatctcgaacatggaaaaggtttatttgagcaggaatcctacagccaaaaccattctggagcttgtgcgatcttatgatggtgatcatatttgctatgatcactttgctttccggacatttggggtcaatggttatggtataaactcactttctgattttttcactgattttggttatttacctc

SEQ ID NO: 17009 - DNA, 362 bp, Zea mays
  Clone ID: LIB3151-007-Q1-K1-E1
tcgccaacaagcaacatagaaagtggtatccagtagcattatatagagcaacaatggagaccaagatattgggggtccttatgctccttgctctttctacatgtgttgctaacgcgacaattttccctcaatgctcacaagctcctatagcttccctttttcccccataccttccatcaattatagcttcagtatgtgaaaacccagctctttaaccatataggcttcaacaagcaatcgcagcaagcaacatacacttatcgcccttgttgagtcaacaatcgccagccctatctttggtgcagtcattggtacaaaccattatggcacaacagctgcagcaacttctgctacctgtgatc

SEQ ID NO: 17010 - DNA, 428 bp, Zea mays
  unsure at all n locations
  Clone ID: LIB3151-007-Q1-K1-E10
cgtccgccgacccnntnaggcgtttatccatctttctcggacagcggctccagaggcctcctgtggcagtgtttgaggttggcttcgtgctattcaaaaacacagtagcgagaactattcggtggggccgaagatggtgtcgctgaaggtgccaaagcgcctcgccgcaagcgttctcaagtgtgggaaaggcaaagtgtggcttgaccccaatgaagttagtgagatctccatggcgaactcccgccataacatccggaagttggttaaggatgggtttatcatcaagaagcctcagaaaatccactctagatctcgtgcaagaagggcgcacgaggctaagcagaagggacggcactcaggatatgggaagcgtagaggtaccagggaggctaggctccccaccaaggtactgtggatgaggagga

SEQ ID NO: 17011 - DNA, 218 bp, Zea mays
  Clone ID: LIB3151-007-Q1-K1-E12
cctctccctttataccacaaatcttattttcaatctacttgtctatccatttccaattctccacttcttaatgcttacatccctcaacctacgctcactgcctcgcagcttaacaccatccaatcacacatcttccattacctacaacatcaccacacacacatttctcctactaccacacctgtaacccttccctacttcaacactcttcatcacca

SEQ ID NO: 17012 - DNA, 395 bp, Zea mays
  Clone ID: LIB3151-007-Q1-K1-E2
attttgagcattcagaaacacaccaagcgaagcacattagcaacaacctaacaacaatggctaccaagatattatccctccttgcgcttcttgcgctttttgcgagcgcaacaaatgcgttcattattccacaatgctcacttgctccaagttccattattacacagttcctcccaccagttacttcaatgggcttcgaacacccagctgtgcaagcctataggctacaacaagcaattgcggcgagcgtcttacaacaaccaatttcccagttgcaacaacaatccttggcacatctaacaatacaaaccatcgcaacgcaacagcaacaacaattcctaccagcactgagccacctagccatggtgaaccctgccgcctacttgcaacagcag

SEQ ID NO: 17013 - DNA, 381 bp, Zea mays
  Clone ID: LIB3151-007-Q1-K1-E3
gtgccagcgacgcggctcgtttgatccgattgttggtcgagccccgccctcgctgccgcgcttcggtccggctgtgcagcggcgtgagcaccgagcacactcgcgaatggggaactgctggggtgcgcggatcaaggatgggagccctcaccctggcgcctcaggaatgttctcaaagagtagtggcaaggatgggagtaggcttagcggctgtagtagtcgagcctcttcagcttctatgccaccaagtgcgaagactgaatgtgaaatcctgcgatcagccaatgttaagatcttcaaccttcaataatctcaaggcagccacaaggaatttccgtcctgatagtgttctaagtgaaaggagggttggatctgtctata

SEQ ID NO: 17014 - DNA, 438 bp, Zea mays
  Clone ID: LIB3151-007-Q1-K1-E4
gtcagcctagcaattagctcatcgactccagattggagaactcgacaccatgaaggtgctgatcggtgcccttgctctcctggcgctcgctgcgagcgccgcctccagtacaagcggcggctgtggctgccagacaccaccgtttcatctaccgcctccgttctatatgccgcctccgttctatctgccgccgcagcagcagccgcagccatggcaataccccactcaaccaccgcagctaagcccgtgccagcagttcggatcctgcggcgtcggcagcgtcggcagcccgttcctgggccagtgcgtcgagttcctgaggcaccagtgcagcccggcggcgacgccctacggctcgccacagtgccaggcgctgcagcagcagtgctgccaccagatcaggcaggtggagccgctgcaccggtaccaggcgacata

SEQ ID NO: 17015 - DNA, 254 bp, Zea mays
  Clone ID: LIB3151-007-Q1-K1-E5
caacaagcaacatagaaagtggaatccagtagcatttattgagccaccatggagacccagaattgggggttcttatgctccttgctctttctacatgtggtgctaaccccacaatttttccttaatgctcacaagcttctattgctttccttttttccccatacctttcattaattattgcttcagtattgtaaaacccaacttttcaaccatattggcgttaacaagccattgcagcaaggcacataccttta

SEQ ID NO: 17016 - DNA, 427 bp, Zea mays
  Clone ID: LIB3151-007-Q1-K1-E6
gcattcaactcatcactccgatttataactccacaccatcaacgttctctaccaggatattattcttccttgcgcttcttgcactttttgcgagcgcaacaaatgcgttcattattccacaatgctcacttgctccaagttccattattacacagttcctcccaccagttacttcaatgggcttcgaacacccagctgtgcaagcctatatgctacaacaagcaattgcggcgagcgtcttacaacaaccaatttcccagttgcaacaacaatccttggcacatctaacaatacataccatcgcaacgcatcagcaacaacaattcctaccagcactgaaccacctagccatggtgaaccctgccggctacttgcaacagcagttgcttgcatcaaacccacttgctctgtcaaaccgtattgcaaa

SEQ ID NO: 17017 - DNA, 216 bp, Zea mays
  Clone ID: LIB3151-007-Q1-K1-E7
tacctcatcccagttaaatcgaatcaggggtggtcatggaggccgtgagcaccgaccacacattggaattgctaattccgcagcgccgccagatgcaaccgatccatgcagcgaccgtcggcggtaggcaatcgtgtgaaaaacgcgcgtcatacgatgccggagtggtcatgatgtgctaccaatgaggggattatgacctaattcgatccagag

SEQ ID NO: 17018 - DNA, 428 bp, Zea mays
  Clone ID: LIB3151-007-Q1-K1-E8
cgccggttcatctgccgccgccaccatgccactaccctactcaaccgccccggcctcagcctcggcgccagccacacccatgcccgtgccaacagccgcatccaagcccgtgccagctgcagggaacctgcggcgttggcagcaccccgatcctgggccagtgcgtcgagttcctgaggcatcagtgcagcccgacggcgacgccctactgctcgcctcagtgccagtcgttgcggcagcagtgttgccagcagctcaggcaggtggagccgcagcaccggtaccaggcgatcttcggcttggtcctccagtccatcctgcagcagcagccgcaaagcggccaggtcgcggggctgttggcggcgcatatagcgcagcaactgacggcgatgtgcggactgcagcagccgactccatgcccctacgct

SEQ ID NO: 17019 - DNA, 357 bp, Zea mays
  unsure at all n locations
  Clone ID: LIB3151-007-Q1-K1-F10
gcgatataacacntattttttccacacttcaccacaaacccatcctccgcctccttgggacccacttcacatcctcccaacccactcacgccactcacgccaccatgcactatacatcccatgcctctaagcccaccccaaaggagatcaatgatccacacgctctctttcacctcacacccaactatcacactgcactgttcctcacactacctaaatctaatccattgcacacacctgaatatcagattaaagctatcgcatagccttccaagaataacccgccgttttctcaattcataaaccactctccacctccaaaagctaccactgataatgctatacaccaaatatctt

SEQ ID NO: 17020 - DNA, 420 bp, Zea mays
  Clone ID: LIB3151-007-Q1-K1-F12
gctgctattgaactctgtttcttatttgttacaacaacaactaccattcagccagctgtgtgctgtctacccccagcaatttcttccattcaaccaactgacagctttgaactctcctgcttatttacagcagcaacaactactaccattcagccagctagctggtgtgagccctgctaccttcttgacacaaccacaattgttgccgttctaccagcacgctgcgcctaacgctggcaccctcttacaactgcaacaattgctgccattcaaccaacttgctttgacaaacccaacagcattctaccaacaacccatcattggtggtgccctcttttagatttcttatgagttatagttcaataataaagttttttgtctgatgtttgtggcttcccagaaataagaaagtacatttct

SEQ ID NO: 17021 - DNA, 457 bp, Zea mays
  Clone ID: LIB3151-007-Q1-K1-F2
gaccattagctttatctactccagagcgcagaagaacccgatcgacaccatgagggtgttgctcggggccctcgctctcctggctctcgctgcgagcgccacctccacgcatacaagcggcggctgcggctgccagccaccgccgccggttcatctaccgccgccggtgcatctgccacctccggttcacctgccacctccggtgcatctcccaccgccggtccacctgccgccgccggtccacctgccaccgccggtccatgtgccgccgccggttcatctgccgccgccaccatgccactaccctactcaaccgccccggcctcagcctcatccccagccacacccatgcccgtgccaacagccgcatccaagcccgtgccagctgcagggaacctgcggcgttggcagcaccccgatcctgggccagtgcgtcgagttcctgaggcatcagtgc

SEQ ID NO: 17022 - DNA, 427 bp, Zea mays
  Clone ID: LIB3151-007-Q1-K1-F3
ccgacggcgacgccctactgctcgcctcagtgccagtcgttgcggcagcagtgttgccagcagctcaggcaggtggagccgcagcaccggtaccaggcgatcttcggcttggtcctccagtccatcctgcagcagcagccgcaaagcggccaggtcgcggggctgttggcggcgcagatagcgcagcaactgacggcgatgtgcggcctgcagcagccgactccatgcccctacgctgctgccggcggtgtcccccactgaagaaactatgtgctgtagtatagccgctggctagctagctagttgagtcaatttagccggcgatgaattgaataaataatgtgtcacgcatcaccatgggtggcagtgtcagtgtgagccatgacctggattgaccattgaaatggaaaggaaaaagtattggtcc

SEQ ID NO: 17023 - DNA, 439 bp, Zea mays
  Clone ID: LIB3151-007-Q1-K1-F4
agaccattagctttatctactccagagcgcagaagaacccgatcgacaccatgagggtgttgctcggtgccctcgctctcctggctctcgctgcgagcgccacctccacgcatacaagcggcggctgcggctgccagccaccgccgccggttcatctaccgccgccggtgcatctgccacctccggttcacctgccacctccggtgcatctcccaccgccggtccacctgccgccgccggtccacctgccaccgccggtccatgtgccgccgccggttcatctgccgccgccaccatgccactaccctactcaaccgccccggcctcagcctcatccccagccacacccatgcccgtgccaacagccgcatacaagcccgtgccagctgcagggaacctgcggcgttggcagcaccccgatcctgggccagtgcgtcga

SEQ ID NO: 17024 - DNA, 487 bp, Zea mays
  Clone ID: LIB3151-007-Q1-K1-F5
accgtccggcaacatagaaagcacaatagtgtaccaacaatagcagccaaaatattttgcctccttacactccagggaatttctgcaagagctgctacaccaaccaatctcccgcaatgctcacaagctcatatagcttcccttcttcccacgcacctctcaccagcggcgtcttccgtatgtgaaaacccaattcttcaaccctacaggatccaacaggcaatcgcagctggcatcttacctttatcacccttgttcctccaacaatcatcagccctattacagcagttacctttggtgcatttattggcacaaaacatcagggcacaacaactacaacaacttgtgctagcaaaccttgctgcctaacttcaacaacagcagtttcttccattcaaccaactagctgcattgaactctgctttttatttgcaacaacaacaactaccattcagccaactacctgttgcctacccccaacaatttc

SEQ ID NO: 17025 - DNA, 479 bp, Zea mays
  unsure at all n locations
  Clone ID: LIB3151-007-Q1-K1-F7
gcgacgacaacccacgcgcacaccaaccaacaagccacaccggcccacaggccacagctcaccaggggggctagcaaccacctcgatcgcagaggcagaggccgccggaagctcagccgtgaattcggcaggaaggaaaggaaaaagtcttgggtggtttcaacaagagatagaagatggagaaggcagggcagcacgagcatgtgatcggcatccccgtgaacaacagggcgttcggtatcgaggagccagatttccccagcaatggccccgccaagaacgcagccgccggcgccgggggacggcgccgggtgaccggggacagggtcgcccaaggcctgaaagagcacggtaagttcttctatctccgatccaaccaaaacattcgatgcttctaccgtgcattctttgtctgtcatctttccagctgcccatccatccgtggattggcacctnctgtatctcgagagactgaactg

SEQ ID NO: 17026 - DNA, 320 bp, Zea mays
  Clone ID: LIB3151-007-Q1-K1-F9
agggaggcgcacaccattaactccatctacttcacaactcttaacaacccaaccaacaccaggagggtgtgaggtttttccctggctctcctgcctctcgctactagcgccacctccacacatacaagctgcgactgcgggtgccagccaccaccgccagttcatctaccacctaccgtgcatctgccacctacggttcacctgccacctgcggtgcatctcccaccgccaatccacctgccgcctcctgtccacctgccaccgcccgtccatgtgccaccgccagttcatctgccatctgcaccatgccactaccctac

SEQ ID NO: 17027 - DNA, 402 bp, Zea mays
  Clone ID: LIB3151-007-Q1-K1-G1
ggagcacggaggctaaggaggaggagcagcagcatcttgcggcgccgaggagcggcatcccactcaagtcttgcaaccatggctaggggattgaagaaacacttgaagaggctcaatgcgcccaagcattggatgctcgacaagcttggcggagcttttgctcccaagccatcttctggacctcacaagtccagggagtgccttcctctgatccttatcatcaggaacaggctcaagtatgctctgaactaccgtgaggtcatttctatcctgatgcaacgccatgtacttgttgatggcaaggtcaggactgacaagacctaccctgctgggttcatggatgtcatttccatccctaagacaatggaaaactacaggctgctttattacacctatggccct

SEQ ID NO: 17028 - DNA, 426 bp, Zea mays
  Clone ID: LIB3151-007-Q1-K1-G10
atcgttgcccttgctctcctggcgctctctgcgagcgccgcctccagggcaagcgggggctgtgtctgccagacaccaccgtttcatctaccgcctccgttctatatgccgcctccgttctatctgccgccgcagcagcagccgcagccatggcaataccccactcaaccaccgcagctaagcccgtgccagcagttcggatcctgcggcgtcagcagcgtcagcagcccgttcctgggccagtgcgtcgagttcctgaggcaccagtgcagcccggcggcgacgccctacggctcgccacagtgccaagcgctgcagcagcagtgctgccaccacatcaggcacgtggagccgatgcaccggtaccaggcgacatacggtgtggtcctgcagtccttcctgcagcagcagccgcacggcgagctc

SEQ ID NO: 17029 - DNA, 286 bp, Zea mays
  Clone ID: LIB3151-007-Q1-K1-G11
cacgcattcgcaggatataaagcacaatgatctaccaacaatgcacgctaaaataggggccttctgggctgcttgtgctttttgcaggtgctactacctctaccatgcacatacactgctcacacgctgctatagctgcctttactgcgcttacctctcaccaacgacgattatgggctccgaaaacccaatcccttaaccctacaagatccagcaggcaatcgcagctggcatgttacctttatcatactacgctccttcaacaacaaacaagcgctatacacca

SEQ ID NO: 17030 - DNA, 242 bp, Zea mays
  Clone ID: LIB3151-007-Q1-K1-G3
gtcaacaccattatctaaatctactccagatcgcagaaaaacgcgatcgacacaataagggtgttgtgggccaccgtgtctagtttgtgtggcattagtagagccagatggacacatactagtggtggcttgagttgcaatccacgggggagcattgatgtaaggacgtcagggcatttgagacctacgattgatatgagacgatctgtgcatttgtcatcgagtgtatacttgacgacgag

SEQ ID NO: 17031 - DNA, 451 bp, Zea mays
  Clone ID: LIB3151-007-Q1-K1-G4
caactagcaacatagaaagcacaatagtgtaccaacaatggcagccaaaatattttgcctccttatgctccttggtctttctgcaagtgctgctacggcgaccattttcccacaatgctcacaagctcctatagcttcccttcttcccccgtacctctcaccagcggtgtcttcggtatgtgaaaacccaattcttcaaccctataggatccaacaggcaatcgcagctggcatcttacctttatcacccttgttcctccaacaatcatcagccctattacagcagttacctttggtgcatttattggcacaaaacatcagggcacaacaactacaacaacttgtgctagcaaaccttgctgcctactctcagcaacaacagtttcttccattcaaccaactagctgcattgaactctgcttcttatttgcaacaacaacaactaccattc

SEQ ID NO: 17032 - DNA, 382 bp, Zea mays
  Clone ID: LIB3151-007-Q1-K1-G5
ccacgcgtccgctggacgtcagcctatcaattagctcatcgactttagattggagaactcgacaccatgaaggtgcgtgtcgttgcccttgctctcctggcgctcgctgcgagcgccgcctccagtacaagcggcggctgtggctgccagacaccaccgtttcatctaccgcctccgttctatatgccgcctccgttctatctgccgccgcagcagcagccgcagccatggcaataccccactcaaccaccgcagctaagcccgtgccagcagttcggatcctgcggcgtcagcagcgtcggcagcccgttcctggggcaatgcgtagagttcctgagggaccagtgcagcccggcggcgacgccctacggcttgccacagt

SEQ ID NO: 17033 - DNA, 418 bp, Zea mays
  unsure at all n locations
  Clone ID: LIB3151-007-Q1-K1-G6
tcccactacanctgcgcgctctgggctttgctttcggcgtggcgtgcaaccgtgttaccaggccgtgtatcttcatgaccttcctgtccctctccaaggctattaccatcggcggcagcttctttctctactccggcatcgccgcggacgggtgggtattcttcttcacgtgccttccggagacccgtggtcgtacgctggaagacatgggcaatctgttctccatgccagacactgacatggctgaagcagacgacaccgcatccaatgagaaagtggtgcaaatgtccaccaagtatgctagtaaatcgaactaaaatacaatattccgcgtgctcggccatataggcaatgattgttgcagcgtcccttacaagagcagagctcaaccaactcaaacaaaaaaaggaacaaaaac

SEQ ID NO: 17034 - DNA, 478 bp, Zea mays
  Clone ID: LIB3151-007-Q1-K1-G7
actgataccaactaccaacatacaaagcacagttttttaccaacaacggcatccaaaatattatgcgtccttatgctccttggtctttgtgcaattgctgctactgcgaccattttaccgcattgctctcaagctcctataacttctcttattgccccgtacctctcaccagcactgtcatcggtatgtgaaaacctcaattcttaaccctacacgatccaacaggcaatcgcagctggcatgttacatttatcatacttcgttccttcaacaaacatcagtcctattacaacaatcacttttggagcatttattgacacaaaacattatgatcacatcaactacaacaacttgtgctaacaaaccttgctgcctacttttagcaacatgcagtttcttccattcaaccaactaggctaattgaactctgtttcttatttgcaacaacaacaactaccaatgagtcaaaatacctttt

SEQ ID NO: 17035 - DNA, 418 bp, Zea mays
  unsure at all n locations
  Clone ID: LIB3151-007-Q1-K1-G8
gcttgcttgctgctgcagtgctgcctccccctttcccagcagcagggagcagccatgccaggttgccactgtttcaagggcgacatctccttcnccggacgcttcacggccagcgccatcgcagcatgcttcgcagagatatgtaccatcccgctcgacacggccaaggtcaggctccagctgcagaagaacgtcttcgccgccgcctcctcctgggacgccgcgccagcgcttcccaagtaccgcggcctgctcggaactgccgccaccatctctagggaggaaggggccgtagcgctctggaagggcatcttcccgggcctccaccgacagtgcatctacggggggctccgcattggcctctactagcctgtcaaatccttttacgtctgctaagaccacgttggggatgtccctt

SEQ ID NO: 17036 - DNA, 446 bp, Zea mays
  Clone ID: LIB3151-007-Q1-K1-H10
cacgctcgagccacgcgtccggcgttcacacacacacctagcgaagcatattagcaacaacctaacaacgatggctaccgagatattatccctccttgcgcttcttgcgctttttgcgagcgcaacaaatgcgttcattattccacaatgctcacttgctccaagttccattattacacagttcctcctaccagttacttcaatgggcttcgaacacccagctgtgcaagcctataggctacaacaagcaattgcggcgagcgtcttacaacaaccaatttcccagttgcaacaacaatccttggcacatctaacaatacaaaccatcgcaacgcaacagcaacaacaattcctaccagcactgagccacctagccatggtgaaccctgccgcctacttgcaacagcagttgcttgcatcaaacccacttgctctggcaaacgtag

SEQ ID NO: 17037 - DNA, 257 bp, Zea mays
  unsure at all n locations
  Clone ID: LIB3151-007-Q1-K1-H12
gcaacagggaaagcacaannttttaccaacatttgncaccaaaaaaaaccgcgccattattcgcgaattaagaccgcgccacggccgcaacaacaaccatctcccccaaaacctcgccggcacccataacacaccgccttccctcgaacctctcaccagcggtgctcctggagcatgaaaacccaacccggcaacccccccaatccaccacccaaccacagccggcagagcacctacaccaccccagctcccccaac

SEQ ID NO: 17038 - DNA, 479 bp, Zea mays
  Clone ID: LIB3151-007-Q1-K1-H2
gcaacatagaaagcacaatagtgtaccaacaatggcagccaaaatattttgcctccttatgctccttggtctttctgcaagtgctgctacggcgaccattttcccgcaatgctcgcaagctcctatagcttcccttcttcccccgtacctctcaccagcggtgtcttcggtatgtgaaaacccaattcttcaaccctacaggatccaacaggcaatcgcagctggcatcttacctttatcacccttgttcctccaacaatcatcagccctattacaacagttacctttggtgcatttattggcacaaaacatcagggcacaacaactacaacaacttgtgctagcaaaccttgctgcctactctcagcaacagcagtttcttccattcaaccaactaggttcattgaactctgcttcttatttgcaacaacaacaactaccattcagccagctacctgctgcctacccccagcaatttc

SEQ ID NO: 17039 - DNA, 336 bp, Zea mays
  Clone ID: LIB3151-007-Q1-K1-H3
caacgtacaaagctcaatcatctaccaacaatggcatccaaagtattctgactccttatgctccttgggatttttgtaagtgctgctacagcgaccaattttgcgcactgcttacaagctcttatagctttccttcttacctcgtacctatcaccagcggtgtctttggtatctgaaaactcaattcttaaaccctacaagatgcaacaggcaatcgcatctgacatttaacatttatgacccttgatccttcaacaatcatatgacctattacagctgttacccatggagcgtttattggcacaaaacatcagggcccaccaactactacgactt

SEQ ID NO: 17040 - DNA, 476 bp, Zea mays
  Clone ID: LIB3151-007-Q1-K1-H4
gcaacatagaaagcacaatagtgtaccaacaatggcagccaaaatattttgcctccttatgctcctgggtctttctgcaagtgctgctacggcgaccattttcccacaatgctcacaagctcctatagcttcccttcttcccccgtacctctcaccagcggtgtcttcggtatgtgaaaacccaattcttcaaccctataggatccaacaggcaatcgcagctggcatcttacctttatcacccttgttcctccaacaatcatcagccctattacagcagttacctttggtgcatttattggcacaaaacatcagggcacaacaactacaacaacttgtgctagcaaaccttgctgcctactctcagcaacaacagtttcttccattcaaccaactagctgcattgaactctgcttcttatttgcaacaacaacaactaccattcagccagctatctgctgcctacccccacaatt

SEQ ID NO: 17041 - DNA, 408 bp, Zea mays
  Clone ID: LIB3151-007-Q1-K1-H7
ccgggccgcaccacaccgtccggggtcttaagaccattagctttatctactccatatcgcagaagaacccgatcgacaccatgaggggtgtgctcgttgccctcgctctcctggctctcgctgcgagcgccacctccacgcatacaagcggcggctgcggctgccagccaccgccgccggttcatctaccgccgccggtgcatctgccacctccggttcacctgccacctccggtgcatctcccaccgccagtccacctgccgtcgccggtccacctgccaccggcggtccatgtgccgccgccggttcatatgccgtcgccaccatgccactaccctactcaaccgccccggcctcagtctcattactagacacaaccatgcccgtgccaacagcctcatacaagcc

SEQ ID NO: 17042 - DNA, 353 bp, Zea mays
  Clone ID: LIB3151-007-Q1-K1-H8
gccacgtcgccgggaagaactccgtcctgagcgtcttgccggccgccgtcatcgccagctcgtgggccatctccatggaggaagctgcagagctcaagaacggtaggaagcatgagctggctgtgcttactcctgctggcagtggcagctaccaacaaggtcaagctggcagcgcccaacagtaggcacaacctcagagtgatctgcctgaataagtactcgtagactgtaataattaaacaaagcttgctcatggttaaactgcgtgttgattagtctttcaactacatagctctaaagtttttgatacaccgagtgatttgccaggaaaaaaatgagcagattgttgtaag

SEQ ID NO: 17043 - DNA, 217 bp, Zea mays
  Clone ID: LIB3151-007-Q1-K1-H9
caggaccccataccatttctcaactttccacacccaaaaaacgggaatcgcgcgtgatttatagctccatccctctatctcctgactatcctaacaccaccacatccactcatacgatccgacgctacatgattccatccaccgatgacccatcattcaccaccaaccaagcctctgccacttccggaccatatgccacgtcccatacatataacac

SEQ ID NO: 17044 - DNA, 342 bp, Zea mays
  Clone ID: LIB3151-008-Q1-K1-A1
catccttctatcagtaccatcaatcatcattcatcttagtagtataggcaccaaatcaaatctgcggcatcaattatctaactccaaaaaccatgaagctggtgcttgtggttcttgctttcattgctttagtatcaagtgtttcttgtacacagacaggcggctgcagctgtggtcaacaacaaagccatgagcagcaacatcatccacaacaacatcatccacaaaaacaacaacatcaaccaccaccacaacatcaccagcagcagcaacaccaacaacaacaagttcacatgcaaccacataaacatcagctacaacatgaagttcatgttcaacaac

SEQ ID NO: 17045 - DNA, 280 bp, Zea mays
  Clone ID: LIB3151-008-Q1-K1-A10
ccgggcttccatttattccccacctactttctcaacctttccagcattactgataccccggctcgcacgtcaagtcgaggcaagctctcgactcacaagcaccaccgctcccctgtccgtctccgcacacctactgtgctcactgcctgcctgcctaccacatcaatcagtgtgaccatccagcacattcccatgacgtgccacgccagcctgatgctgccggcgatcgccgacgttatgctctgctgacccctagcgcaatgcgggcagcagaactaca

SEQ ID NO: 17046 - DNA, 240 bp, Zea mays
  Clone ID: LIB3151-008-Q1-K1-A11
tcttcccttaatcctcacaagctactatctctactataataacctcgtacctctcaccatcaatgtcttctctataaaaaaacccaattcttcaaccctacaacatacaacatgcaatcacatctcgcatcttacctttatcacccttcttcctgcaacaatcatcacccctattacatcagttacatttgatgcatttattctcacaaaacataagagcacaacaactacaacaacttc

SEQ ID NO: 17047 - DNA, 440 bp, Zea mays
  Clone ID: LIB3151-008-Q1-K1-A12
cgacccacgcgtgcgccacgcctacacgagaccaacaaacatctttcaaagcgtattacaacaccaacaatagagggcaattggggccaatatattgtccatccttatgctccttgctctttctccatgtgttgctaacgcgaccatttttcctcaatactcacaagctcctatagctgcccttcttcccccatacctttcatcaatgaccgcttcagtatatgaaaacccagtccttcaaccctacacgctccaacaagcactcgcaacaagcaacttacctttatcacccctgctctttcaacaatcgccagccctatctttggtgcagtcattggtacaaaccatcacggcacaacagctgcagcaactcgtgctaccagcgatcagccaagtacctctggcaaacctttctccctactctcagcaacaacaatttc

SEQ ID NO: 17048 - DNA, 385 bp, Zea mays
  Clone ID: LIB3151-008-Q1-K1-A3
cacctagcaccatataaagcacaatactgtaccaacaatggccgccacaatattgtgcctgcttatgcgccttggtctttctgcatgtgctgctacgcgcgaccattttcccgacatgctcgcaagctcctatagcttcccttcttcccccgtacctatcaccagcggtgtattcggtatgtgaaaacccaattcttcaaccctacaagatccaacaggcaatcacagctggcatgttacctttattaccattgttcctccaacaatcatcagccctattacatcagttaccttcggtgcatttattgacacaaaacatcagggctcagcaactacaacaacttgtgctatgcaaccttgatggctactatcaaaaacagcactt

SEQ ID NO: 17049 - DNA, 414 bp, Zea mays
  Clone ID: LIB3151-008-Q1-K1-A4
gcaacagcctaacaacaatggctaccaagatattatccctccttgcgcttcttgcgctttttgcgagcgcaacaaatgcgtccattattccacaatgctcacttgctcctagttccattattccacagttcctcccaccagttacttcaatggccttcgaacacccagctgtgcaagcctataggctacaacaagcgattgcggcgagcgtcttacaacaaccaattgcccaattgcaacaacaatccttggcacatctaacaatacaaaccatcgcaacgcaacagcaacaacagttcctaccagcactgagccacctagccatggtgaaccctgtcgcctacttgcaacagcagctgcttgcattcaacccacttgctctagcaaacgtagttgcaaaccagcaacaacaac

SEQ ID NO: 17050 - DNA, 258 bp, Zea mays
  Clone ID: LIB3151-008-Q1-K1-B10
cgggaccaacaagcaccttaaacagtgttctccagcagcaacaatacaggaacaatttgcgccataatattcctcatcctgcttctcgtcgttctatcgagctcagcagatgcctccaccattccacatcgctaattagatgctactgtcgctgttctacatctcctatacctagcatctatgaccggctcagaacatgcaaacgcgcacgcctacccgttccagctagagcttgcagtctgcgcatgccacctacct

SEQ ID NO: 17051 - DNA, 443 bp, Zea mays
  Clone ID: LIB3151-008-Q1-K1-B11
tagcaacatagaaagcacaatagtgtaccaacaatggcagccaaaataggttgcttccggatgctccttggtctttctgcaagtgttgctaccgcaaccattttcccacaatgctcacaagctcctatagcttcccttcttcccccatacctctcaccagcggtgtcttcaatgtgtgaaaacccaattgttcaaccctacaggatccaacaggcaatcgcaacaggcatcttaccattatcacccttgttcctccaacaaccgtcagccctattacagcagttacctttggtccatttggtggcacaaaacatcagggcacaacaactacaacaacttgtgctagcaaaccttgctgcatactctcagcaacatcagtttcttccattcaaccaactggctgcattgaactctgctgcttatttgcaacaacaattaccatt

SEQ ID NO: 17052 - DNA, 442 bp, Zea mays
  Clone ID: LIB3151-008-Q1-K1-B12
ccaacaagcaacatagaaagtggaatacagtagcaacaatagagcaacaatggcggccaggatattttgcatccttatgctccttgctctttctgcatgtgttgctaacgcgaccatttttcctcaatactcacaagctcctatagctgcccttcttcccccataccttccatcaatgaccgcttcagtatgtgaaaacccagcccttcaaccctacaggctccaacaagcaatcgcaacaagcaacttacctttatcacccctgttctttcaacaatcgccagccctatctttggtgcagtcattggtacaaaccatcaaggcacaacagctgcagcaactcgtgctaccagtgatcagccaagtagctctggcaaacctttctccctactctcagcaacaacaatttcttccattcaaccaactgtctacactgaaccct

SEQ ID NO: 17053 - DNA, 513 bp, Zea mays
  Clone ID: LIB3151-008-Q1-K1-B2
caacaagcaacatagaaagtggaatccagtagcaacaatagagcaacaatggagaccaagatatttgccctccttatgctccttgctctttctacatgtgttgctaacgcgacaattttccctcaatgctcacaagctcctatagcttccctttttcccccataccttccatcaattatagcttcagtatgtgaaaacccagctcttcaaccatataggcttcaacaagcaatcgcagcaagcaacatacctttatcgcccttgttgtgtcaacaatcgccagccctatctttggtgcagtcattggtacaaaccatcagggcacaacagctgcagcaactcgtgctacctgtgatcaaccaagtagctctggcaaacctttctccctactctccgcaacaacaatttcttccattcaaccaactgtctacactgaacccttgtgcttatttgcagcaacaactattaccatttagccagctagctactggctactctcaacaacaacaactt

SEQ ID NO: 17054 - DNA, 336 bp, Zea mays
  unsure at all n locations
  Clone ID: LIB3151-008-Q1-K1-B3
gtacaattactccccactcgaggctcagattcaaactgccttagccgaccaccgccatggaagctacggtgccttctgcggcgaagtctggatgtccttggcaaccttccagaaagagcgaggcggcagatctgaagcagcaatagcagaaggtggcagcgaacgcccctcccgatgcctacaaccagcgccgctatggcttcaacaggacgatctcctgcatgacgagcaccatcaacttgtcgcccgcgttgaggcagacacgtctcttctacagcaccctcgacatgctaaccgagaatattagctangnacaggcacgttcccactcttgga

SEQ ID NO: 17055 - DNA, 506 bp, Zea mays
  Clone ID: LIB3151-008-Q1-K1-B4
catcaatcatcattcatcttagtagtataggcaccaaatcaaatctgcaacatcaattatctaactgcaaaaaccatgaagctggtgcttgtggttcttgctttcattgctttagtatcaagtgtttcttgtacacagacaggcggctgcagctgtggtcaacaacaaagccatgagcagcaacatcatccacaacaacatcatccacaaaaacaacaacatcaaccaccaccacaacatcaccagcagcagcaacaccaacaacaacaagttcacatgcaaccacaaaaacatcagcaacaacaagaagttcatgttcaacaacaacaacaacaaccgcagcaccaacaacaacaacaacaacagcaccaacaacaacatcaatgtgaaagccaacaacaacatcaccaacaatcacaaggccatgtgcaacaacacgaacagagccatgagccacaccaaggacagagccatgagcaacaacatcaacaacaatttcagggtca

SEQ ID NO: 17056 - DNA, 439 bp, Zea mays
  Clone ID: LIB3151-008-Q1-K1-B9
ctgtaataccagagatcgaacaacttggtcctgcagctcaagaagagagttttgtgcgggtgggggccgggggcaagagagagagagagagagccatggcggcggaccagcagccgcagctgcaggaggagatgaacgacgctgccggcggcggcctcaggctgcctccagggttccgcttccacccgagcgacttcgagattgtcagcttctacctcaccaacaaggtgctcaacacgcgcttcacctgcaccgccatcacggaggccgacctaaacaagattgagccatgggacctcccgagcaaggcgaagatgggcgagaaagagtggtacttcttctaccagaaggaccgcaagtacccgacggggctgagggcgaaccgggccaccgaggccggttactggaaggcgacgggcaaggacaaggaggtctacaa

SEQ ID NO: 17057 - DNA, 330 bp, Zea mays
  Clone ID: LIB3151-008-Q1-K1-C1
gcacgctgcgcctaacgctggcaccctcttacaactgcaacaattgctgccattcaaccaacttgctttgacaaacccaacagcaatctaaaagagggcaccaccaatgatgggttgttggtagaacgctgccaacaagcaacatagaaagtggaatacagtagcaacaatagagcaacaatggcggccaagatattttccatccttatgctccttgctctttctgcatgtgttgctaacgcgaccatttttcctcaatactcacaagctcctatagctgcccttcttcccccataccttccatcaatgaccgctttagtatgtgaaaac

SEQ ID NO: 17058 - DNA, 410 bp, Zea mays
  unsure at all n locations
  Clone ID: LIB3151-008-Q1-K1-C10
cgaccacacgcctccgccagcaatcaacatttaaaatnaaatactctancaacttataaaacaacaatcccaccgggatattttgcatacttatactcctttctctttcttcatgtatttctaacactaccatttctactcaatactcacaacctcctataacttcccttcttacaccataccttccatcaattaccacttcaatatctaaaaacccatcccttcaaccatacaagctccaacaagcaaacacatcaatcaacttacctttatcaccccccttctatcaacaatctccaaacctatcttttttacattcattcctacaaaccatcaaaacacaacatcttcagcaacttgctctaccaataatcaaccaaactaactcttcaaaccttactccctactat

SEQ ID NO: 17059 - DNA, 338 bp, Zea mays
  Clone ID: LIB3151-008-Q1-K1-C2
gtggaatccagtagcaacaatagagcaacaatggagaccaagatattttccctccttatgctccttgctctttctacatgtgttgctaacgcgacaattttccctcaatgctcacaagctcctatagcttccctttttcccccataccttccatcaattatagcttcagtatgtgaaaacccagctcttcaaccatataggcttcaacaagcaatcgcagcaagcaacatacctttatcgcccttgttgtgtcaacaatcgccagccctatctttggtgcagtcattggtacaaaccatcaaggcacaacagctgcagcaactcgtgctacctgtgat

SEQ ID NO: 17060 - DNA, 366 bp, Zea mays
  unsure at all n locations
  Clone ID: LIB3151-008-Q1-K1-D1
gtcttcagaccattagctttatctactccagagcgcagaagaacccgatcgacaccatgagggtgtggctcgttgccctcgctctcctggctctcgctgcgagcgccacctccacgcatacaagcggcggctgcggctgccagccaccgccgccggttcatctaccgccgccggtgcatctgccacctccggttcacctgccacctccggtgcatctcccaccgccggtccacctgccgccgccggtccacctgccaccgncggtccatgtgccgccgccggttcatctgccgccgccaccatgccactaccctactcaaccgccccggcctcagcctcatccccagccacacccatgcccgtgcc

SEQ ID NO: 17061 - DNA, 296 bp, Zea mays
  Clone ID: LIB3151-008-Q1-K1-D10
aaagcggtactgcgttaacaggatcgttttacagaacttcatgacgatggccatcgcgcgcgtcttgggcctttctctatcatctgccagcacctctgcaatgcacatgccctcccactgcgcggggctgcacggctcgtacggcgctggcccctgtctgactactatactagacgccggcggcctatacccttacgcgcatgacctcaggcacccgcactgcagccagctggcagcgtggctctactacgcacggagtgtacatactagcaccatataccatccgctccagcaac

SEQ ID NO: 17062 - DNA, 371 bp, Zea mays
  Clone ID: LIB3151-008-Q1-K1-D12
gttgccagcagctcaggcaggtggagccgcagcaccggtaccaggcgatcttcggcttggtcctccaggccatcctgcagcagcagccgcaaagcggccaggtcgcggggctgttggcggcgcagatagcgcagcaactgacggcgatgtgcggcctgcagcagccgactccatgcccctacgctgctgccggcggtgtcccccactgaagaaactatgtgctgtagtatagccgctggctagctagctagttgagtcatttagcggcgatgattgagtaataatgtgtcacgcatcaccatgggtggcagtgtcagtgtgagcaatgacctgaaagaacaattgaaatgaaaagaaaaaagtattgttcc

SEQ ID NO: 17063 - DNA, 470 bp, Zea mays
  Clone ID: LIB3151-008-Q1-K1-D2
attttcagcattcagaaacacaccaagcgaagcgcactagcaacaacctaacaacaatggctaccaagatattagccctccttgcgcttcttgcccttttagtgagcgcaacaaatgcgttcattattccacagtgctcacttgctcctagtgccattattccacagttcctcccaccagttacttcaatgggcttcgaacatccagccgtgcaagcctacaggctacaactagcgcttgcggcgagcgtcttacaacaaccaattgcccaattgcaacaacaatccttggcacatctaaacctacaaaccatcgcaacgcaacagcaacaacagtttctgccatcactgagccacctagccgtggtgaaccctgtcgcctacttgcaacagcagctacttgcatccaacccacttgctctggcgaacgtagctgcataccagcaacaacaacgtctgcaacagtttatg

SEQ ID NO: 17064 - DNA, 343 bp, Zea mays
  Clone ID: LIB3151-008-Q1-K1-D3
gtcggcgctcgcgcggtccttcggcgcgtacttcccgcgctcttcggcgcaggtgcgccccgccggcgcgcgcgccgccgcaggtcgccgagctgctgcgcgccatcgagcagctccaggagcgggagtcgcgcctccgcgtggagctgctggagcagaagatactcaaggagaccgtcgccatcgtcccgttcctggaggccgagctcgcggccaagaaggccgagctccagaggtgcagggacaccgcggagcggctggaggccgagaacgggcggctgtgcgccgagctcgacgccgccgcgctcgaggtcacgagcaggaagcagaggatcgtcgagct

SEQ ID NO: 17065 - DNA, 177 bp, Zea mays
  Clone ID: LIB3151-008-Q1-K1-D4
taagcagccagatattcaggaccaccgatcacgatcccaaaaacagcggctctgtgtcgcgacgtggacagcgatggacgctccggccatgttcgcgcgcaagcaagtccccgatgacgtcggcctccggaacatcggcgaagctgaggacgaaggagccgggggccaggcccagct

SEQ ID NO: 17066 - DNA, 346 bp, Zea mays
  Clone ID: LIB3151-008-Q1-K1-D9
atggttttagcattcataaacacaccattcgaagcacattaccaacaacggtaacaacagtggctatcaagatattatccctccttgcgcttcttgcgctttttgcgagcgcaacaaatgcgttcattattccacaatgctcacttgctccaagttccattattacacagttccttccaccagttacttcaatgggcttcgaacacccaactgtgcaagcctataggctacaacaagcaattgcggcgagcgttttacaacaaccaatttcccagttgcaacaacaattcttggcacatctaacaatacaaaccatcgtaacgcaacagcaacaacaattcctacc

SEQ ID NO: 17067 - DNA, 450 bp, Zea mays
  Clone ID: LIB3151-008-Q1-K1-E1
ctcctatagcttcccttcttcccccataccttccatcaatgatagcttcagtatgtgaaaacccaggtcttcaaccctataggctccaacaagcaatcgcagcaagcaacatacctttatcacccttgtttcaacaatcgccagccctatctttggtgcagtcattggtacaaaccatcagggcacagcagctgcagcaactcgtgctacctgtgatcaaccaagtagctctggcaaacctttctccctactctcagcaacaacaatttcttccattcaaccaactgtctacattgaaccgtgctgcttatttgcagcaacaactattaccattcagccagctagctactgcctactctcagcaacaacaacttcttccatttaaccaattggccgcactgaaccccgcttgttatttgcagcagcaaatactactaccatttaaccagc

SEQ ID NO: 17068 - DNA, 250 bp, Zea mays
  Clone ID: LIB3151-008-Q1-K1-E10
acacatagctcaccaactcacaacaacattctacctccatcaccccactccatgcctctactctgcttccaacaccctcccccactaaacaaactaccacctctattacatccgcttactacctaacaacaacaaacatttaacaattatcaactaaccataattcatcacacatcaccatacatctcaacaacaaacttaacaaagaccttaactaacaaattaaattaaaataaaaaaacattcttcc

SEQ ID NO: 17069 - DNA, 444 bp, Zea mays
  Clone ID: LIB3151-008-Q1-K1-E11
ggggcttcagaccattagctttatctactccagagcgcagaagaacccgatcgacaccgtgagggtggggctcgttgccctcgctctcctggctctcgctgcgagcgccacctccacgcatacaagcggcggctgcggctgccagccaccgccgccggttcatctaccgccgccggtgcatctgccacctccggttcacctgccacctccggtgcatctcccaccgccggtccacctgccgccgccggtccacctgccaccgccggtccatgtgccgccgccggttcatctgccgccgccaccatgccactaccctactcaaccgccccggcctcagcctcatccccagccacacccatgcccgtgccaacagccgcatccaagcccgtgccagctgcagggaacctgcggcgttggcagcaccccgatcctgggccagtgcgt

SEQ ID NO: 17070 - DNA, 447 bp, Zea mays
  Clone ID: LIB3151-008-Q1-K1-E12
gcattcagaaacacaccaagcgaagcgcactagcaacaacctaacaacaatggctaccgagatattaggcctccttgcgcttcttgcccttttagtgagcgcaacaaatgcgttcattattccacagtgctcacttgctcctagtgccattattccacagttcctcccaccagttacttcaatgggcttcgaacatccagccgtgcaagcctacaggctacaactagcgcttgcggcgagcgtcttacaacaaccaattgcccaattgcaacaacaatccttggcacatctaaacctacaaaccatcgcaacgcaacagcaacaacagtttctgccatcactgagccacctagccgtggtgaaccctgtcgcctacttgcaacagcagctacttgcatccaacccacttgctctggcgaacgtagctgcataccagcaacaacaacg

SEQ ID NO: 17071 - DNA, 320 bp, Zea mays
  unsure at all n locations
  Clone ID: LIB3151-008-Q1-K1-E2
ctgggtcttcagaccattagctttatctactccagagcgcagaagaacccgatcgacaccatgagggtgttgctcgttgccctcgctctcctggctctcgctgcgagcgccacctccacgcatacaagcggcggctgcggctgccagccaccgccgccggttcatctaccgccgccggtgcatctgccacctccggttcacctgccacctccggtgcatctcccaccgccggtccacctgccgccgccggtccacctgccaccgccggtccatgtgccgccgccggttcatctgccgncgccaccatgccactaccctac

SEQ ID NO: 17072 - DNA, 486 bp, Zea mays
  Clone ID: LIB3151-008-Q1-K1-E3
gcaacatagaaagcacaatagtgtaccaacaatggtagccaaaatattttgcttccttatgctccggtggtctttctgcaagtgctgctatcgcaaccattttcccacaatgctcacaagctcctatagctttctttctttccccatacctctcaccagcggtgtcttcagtatgtgaaaacccaattcttcaaccctacaggatccaacaggcaatcgcagcaggcatcttacctttatcacccttgttcctccaacaaccgtcagccctattacagcagttacctttggtgcatttgttggcacaaaacatcaaggcacaacaactacaacaacttgtgctaggaaaccttgctgcctactctcaacaacagcagtttctttcatttaaccaactggctgcattgaactctgctgcttatttgcaacaacaactaccattcagtcagctagctgctggctacccccagcaatttctttcattca

SEQ ID NO: 17073 - DNA, 395 bp, Zea mays
  Clone ID: LIB3151-008-Q1-K1-E4
ggagtatgggttcgagcccgatgtggtggtcatgaccaccaccgtcgccgtggagccgcggtttggggaaatggtgggcgctggtagggccattcgtggtgaaggccgtcgggttcctgctgctcgcgggcctcttgttccgggtgctctggtcctttccgtcctctccggcgccggcgttgcagatcacaaaaggaaaatgcagtcttttcaatggggaatggataccaaacccctctggtccagcctatacaaatgcaagctgtcgatttattgacgatcaccagaactgcatgatgaatggtagacctgataaggaatatctacattggaagtggaaaccttatggatgtgatcttccaccatttgatgcaagtagatttctagattctatg

SEQ ID NO: 17074 - DNA, 172 bp, Zea mays
  Clone ID: LIB3151-008-Q1-K1-E9
cccccacttaaaaaactatcttctccaatatacccgcttactaactatctacttgaatcatttatccccgatgattgaaaaataatatctcacccatcaccatacctttcaaaaacaaacctagcaaagacctaaatgaacaatttaaattaaaataaaaaagtattgatcc

SEQ ID NO: 17075 - DNA, 486 bp, Zea mays
  Clone ID: LIB3151-008-Q1-K1-F1
caacaagcaacatagaaagtggaatccagtagcaacaatagagctcctatagcttcccttcttcccgcataccttccatcaatgatagcttcagtatgtgaaaacccagctcttcaaccctataggctccaacaagcaatcgcagcaagcaacatacctttatcacccttgtttcaacaatcgccagccctatctttggtgcagtcattggtacaaaccatcatggcacagcagctgcagcaactcgtgctacctgtgatcaaccaagtagctctggcaaacctttctccctactctcagcaacaacaatttcttccattcaaccaactgtctacattgaaccgtgctgcttatttgcagcaacaactattaccattcagccagctagctactgcctactctcagcaacaacaacttctttcatttaaccaattggccgcactgaaccccgctgcttatttgcagcagcaaatactactaccattt

SEQ ID NO: 17076 - DNA, 409 bp, Zea mays
  unsure at all n locations
  Clone ID: LIB3151-008-Q1-K1-F10
cacaccaagtttaccacttttacaacctttcaacaaacgctaccaanatagtaaccttggttgcgcttatcgcccttatagtcaccccaacacaagcgttcattattccacagtgctcacttgctactagtgccattactccacagatcctcccaccagttacttcaatgccctgctaacatccagccgagcaagcctacatgctacaactaccgcttgcttcgagcgtctcacaacaaccaattgcccaattgcaacaacaatccttgtcacatctaaacctacaaaccatcgcaacgcaacagcaacaacacattctgccatcactgagccacctaaaccaggtgaaccctgtcgcctacttgcaacagcagctacttgcatccaacccacttgctctggcgaacgt

SEQ ID NO: 17077 - DNA, 462 bp, Zea mays
  Clone ID: LIB3151-008-Q1-K1-F11
cgacccacgcctgcggcagcatataaagcacaataatcgtacctttaatcacagtcaaaatattccccttccttaggctccttggtatttctgcaagcgctcctacctcaaccattttcccacaatgctcacaagctcctatagcttcctttcttcccccatacctctcaccaccggtatctacagtatgtgaaaacccaattcttcaaccctacactatccaacacgcaatctcagcaagcatcttacctttatcacccttgttcctccaacaaccgtcagccctattacagcacttaccttatgtgcatttgttggcacaaaacatcaatgcacaacaactacaacaacttgtgctaggaaaccttgctgcctactctcagcaacagcagtatcttacattcaaccaactggctgcattgaactctgctgcttatttgcaacaacaactaccattcagtc

SEQ ID NO: 17078 - DNA, 233 bp, Zea mays
  Clone ID: LIB3151-008-Q1-K1-F12
ccaccccttcatctaccgcctccgttctatataccgcctccgttctatctgccgccacaacaacaaccacaaccatggcaataccccactcaaccaccccagctaaacccgtgccaacagttcagatcctgccgcgtcaacaacctcagcaaccccttcctgggccattgcacccacttcctgaagcaccaatgcaaccccgctgtgacaccctacagctcaccacaatgcca

SEQ ID NO: 17079 - DNA, 411 bp, Zea mays
  unsure at all n locations
  Clone ID: LIB3151-008-Q1-K1-F2
gctctggttggaaggtttggagaaactccccggctcgaggagatcgtgacattgagaggacgatgggagggcgcgcgctcctcctcctcctggtctcggcgttggtctttcagatccacgcctccgacccgctgctgtacgagccgttcgatgaggactttgaggggagatgggtcgtctccaagaaggatgaataccaaggtgtgtggaagcatgccaagagtgatggtcatgaggactatggcctccttgttagtgagaaggcaaggaaatatgccataatcaaggagcttgatgagccagttaccttgaaggatgggacagtggtcctgcagtttgaagtgagacttcagaatggccttgaatgtggaggtgcctacattaagtacatccgcccttangatgctggat

SEQ ID NO: 17080 - DNA, 62 bp, Zea mays
  Clone ID: LIB3151-008-Q1-K1-F3
attccctttatctactccacagcacagaacaaccttatcgacaccatgacggtgtggctcgg

SEQ ID NO: 17081 - DNA, 203 bp, Zea mays
  Clone ID: LIB3151-008-Q1-K1-F9
catgacgctcaccatacgcatggacaacttgtacctcttgggcttcacgacccccagcggggtgtggggggagttcggcaaggacggctacacccacctcctcgacaacaaccccaggtggctcgacttcggctgcaggtaccagcacctcatcggcaacaagggtctggagaccgtcaccatgggccgcgccgaaatgacca

SEQ ID NO: 17082 - DNA, 429 bp, Zea mays
  Clone ID: LIB3151-008-Q1-K1-G1
agcttcccttcttcccccataccttccatcaatgatagcttcagtatgtgaaaacccagctcttcaggcctataggctccaacaagcaatcgcagcaagcaacatacctttatcacccttgtttcaacaatcgccagccctatctttggtgcagtcattggtacaaaccatcagggcacagcagctgcagcaactcgtgctacctgtgatcaaccaagtagctctggcaaacctttctccctactctcagcaacaacaatttctttcattcaaccaactgtctacattgaaccgtgctgcttatttgcagcaacaactattaccattcagccagctagctactgcctactctcagaacaacaacttctttcatttaaccaattggccgcactgaaccccgctgcttatttgcagcagcaaatactacta

SEQ ID NO: 17083 - DNA, 437 bp, Zea mays
  Clone ID: LIB3151-008-Q1-K1-G10
attgagaccaacaagcaacatagaaagtggaatccagtaccaacaatagagcaacagtggcgaccaagatattttccctccttatgctccttgctctttctgcatgtgttgctaacgcgacaattttccctcaatgctcacaagctcctatagcttcccttcttcccccataccttccatcaatgatagcttcagtatgtgaaaacccagctcttcaaccctataggctccaacaagcaatcgcagcaagcaacatacctttatcacccttgtttcaacaatcgccagccctatctttggtgcagtcattggtacaaaccatcagggcacagcagctgcagcaactcgtgctacctgtgatcaaccaagtatctctggcaaacctttctctctactctcagcaacaacaatttcttacattcaaccaactgtctaca

SEQ ID NO: 17084 - DNA, 378 bp, Zea mays
  unsure at all n locations
  Clone ID: LIB3151-008-Q1-K1-G12
gacttcatgaaggtgctgatcggggcccttgctgtcctgtcgctcgctgcgagcgccncctccattacaagcggcggctgaggctgccagacaccaccgattcatctaccgcctccgttctatatgccgcctacgttctatctgccgccgcagcagcagccgcagacatggcaataccctactcaaccaccgcagataagcccgtgccagcagttcggatcctgcagcgtctgcagcattggcagcccgttcctgggccactgcgtcgagttcctgaggcaccactgcaacccggcggcgactccctacggctcgtcacagtgccaggcgctgcagcaacagtgctgccaccagatcaggcaggtggagccgctgcac

SEQ ID NO: 17085 - DNA, 449 bp, Zea mays
  Clone ID: LIB3151-008-Q1-K1-G3
gaccgatcgatcgccacagccaacaccacccgcctaggcgacgcgacagccgccaggaggaaggagtgaactcactgccagccagtgaagggggagaagtgtactgctccgtcgaccagtgcgcgcaccgcccggcagggctgctcatctcgtcgacgaccagtggattaatcggcatggcggctctggccacgtcgcagctcgtcgcaacgcccgccggcctgggcgtaccggacgcgtccacgttccgccgcggcgccgcgcagggcctgaggggggcccgggcgtcggcggcggcggacacgctcagcatgcggaccagcgcgcgcgcggcgcccaggcaccagcagcaagcgcgccgcgggggcaggttcccgtcgctcgtcgtgtgcgccagcgccggcatgaacgtcgtcttcgtcggcgccgagatggcgccgtggagcaag

SEQ ID NO: 17086 - DNA, 98 bp, Zea mays
  Clone ID: LIB3151-008-Q1-K1-G4
cttttagattacatatgagatgtactcaacaatggtgccctcataccggcatgtgtttcctagagataatcaatatattgattgagatttatcttgat

SEQ ID NO: 17087 - DNA, 444 bp, Zea mays
  Clone ID: LIB3151-008-Q1-K1-G9
agaccaactagcaacatagaaagcacaatagtgtaccaacaatggcagctaaaatattgggcctccttatgctccttggtctttctgcaagtgctgctacggcgaccattttcccacaatgctcacaagctcctatagcttcccttcttcccccgtacctctcaccaacggtgtcttcggtatgtgaaaacccaattcttcaaccctacaggatccaacaggcaatcgcagctggcatcttacctttatcacccttgttcctccaacaatcatcagccctattacagcagttacctttggtgcatttattggcacaaaacatcagggcacaacaactacaacaacttgtgctagcaaaccttgctgcctactctcagcaacagcagtttcttccattcaaccaactagctgcattgaactctgcttcttatttgcaacaacaac

SEQ ID NO: 17088 - DNA, 511 bp, Zea mays
  unsure at all n locations
  Clone ID: LIB3151-008-Q1-K1-H1
cagaacccgtgcatatttcagtcgtcgctcgcggagccgtggcgcatcgcgactcaggcactcaccgaccgcggatatggccccgtcgccatggcctctccttgcgacttccctcctcctcatcctattccaccactcgcctcgcgccgcggcggcgtttccgccgtctcttggcgacggcctcctgggcgccgcccgcgcgccgggtttcgcggcgtggctgcgcggcttgcggcgccgcatccacgagccccccgagctcgccttccaggagcaccgcaccagcgagctcgtccgcgacgagctcgacgcgatcggggtgccgtacgcgtggcccgtcgcgcagacgggcgtcgtggcgaccatcgccggcggcagcgatggccccgtcgtcgcgctccgagccgacatggacgcgctacccttgcaggaattggtagactgggaacacaagagcaaggagaatgngaagatgcatgcttgtggacatgatgctcacacaacgatgctt

SEQ ID NO: 17089 - DNA, 435 bp, Zea mays
  unsure at all n locations
  Clone ID: LIB3151-008-Q1-K1-H10
ccgacccacgcgtgcgccaactagcaacatagaaagcacaatactgtaccaacaatggcagccaaaatattttgcctccttatgcgccttggtctttctgcaagtgctgctacggcgaccattttcccgaaatgctcgcaagctcctatagctttccttcttcccccgtacctctcaccagcggtgtcttcggtatgtgaaaacccaattcttcaaccctacaggatccaacaggcaatcacagctggcatcttacctttatcacccttgttcctccaacaatcatcagccctattacatcagttacctttggtgcatttattggcacanaacatcatggcacaacaactacaacaacttgtgctagcaaaccttgctgcctactctcagcaacagcagtttcttccattcaaccaactagctgcattgaactct

SEQ ID NO: 17090 - DNA, 371 bp, Zea mays
  Clone ID: LIB3151-008-Q1-K1-H11
gttgccagcagctcaggcaggtggagccgcagcaccggtaccaggcgatcttcggcttggtcctccagtccatcctgcagcagcagccgcaaagcggccaggtcgcggggctgttggcggcgcagatagcgcagcaactgacggcgatgtgcggcctgcagcagccgactccatgcccctacgctgctgccggcggtgtcccccactgaagaaactatgtgctgtagtatagccgctggctagctagctagttgagtcatttagcggcgatgattgagtaataatgtgtcacgcatcaccatgggtggcagtgtcagtgtgagcaatgacctgaaggaacaattgaaatgaaaagaaaaaagtattgttcc

SEQ ID NO: 17091 - DNA, 120 bp, Zea mays
  unsure at all n locations
  Clone ID: LIB3151-008-Q1-K1-H2
agaccattagctttatctactccagagcgcagaagaacccgatcgacaccatgagggtgttgctcgttgccctcgctctcctggctctcgctgcgagcgccacctncacgcatacaagcg

SEQ ID NO: 17092 - DNA, 499 bp, Zea mays
  Clone ID: LIB3151-008-Q1-K1-H3
gtcctttcgataatggaggtaccagcaccaccagcatgggcgtcccccctcgcgacgacgacgacgagcctgctggtcacggccgccctcgtcctcgtgacgacgaccgtcctccgccggcgtgcccaccgccaccggaaacgacaacgacaagcgccgccgggccctcggccctggccggtgatcggcaacctgaacctgctaggcgcgctgccgcaccgctccatccacgagctctcggcgcggtacggcccgctcatgtcgctccgcttcggctccttccccgtcgtcgtgggctcctccgtcgaggtggccgaggtcgtcctcaggacccaggacctggcgtacctcgaccggccccgcatggcctgcggcaagtacaccgtgtacaactactccggcatgctgtggtcgcactacgggccctactggcgtcagctccgcaagttgtgggtcacggagctgctcagcgcgcgccagctccgccttacggagcgcg

SEQ ID NO: 17093 - DNA, 441 bp, Zea mays
  Clone ID: LIB3151-009-Q1-K1-A10
attgagaccaacaagcaacatagaaagtggaatccagtagcaacaatagagcaacaatggagaccaagatattttccctccttatgctccttgctctttctacatgtgttgctaacgcgacaattttccctcaatgctcacaagctcctatagcttccctttttcccccataccttccatcaattatagcttcagtatgtgaaaacccagctcttcaaccatataggcttcaacaagcaatcgcagcaagcaacatacctttatcgcccttgttgtgtcaacaatcgccagccctatctttggtgcagtcattggtacaaaccatcagggcacaacagctgcagcaactcgtgctacctgtgatcaaccaagtagctctggcaaacctttctccctactctccgcaacaacaatttcttccattcaaccaactgtctacac

SEQ ID NO: 17094 - DNA, 455 bp, Zea mays
  Clone ID: LIB3151-009-Q1-K1-A11
cgattgagaccaactagcaacatagaaagcactatagtgtaccaacaatggcagccaaaatgttttgcttccttatgctccttggtctttctgcaagtgttgctaccgcaaccattttcccacaatgctcacaagctcctatagcttcccttcttcccccatacctctcaccagcggtgtcttcaatgtgtgaaaacccaattgttcaaccctacaggatccaacaagcaatcgcaacaggcatcttaccattatcacccttgtttctccaacaaccgtcagccctattacagcagttacctttggtccatttggtggcacaaaacatcagggcacaacaactacaacaacttgtgctagcaaaccttgctgcatactctcagcaacatcagtttcttccattcaaccaactggctgcattgaactctgctgcttatttgcaacaacaattacca

SEQ ID NO: 17095 - DNA, 440 bp, Zea mays
  Clone ID: LIB3151-009-Q1-K1-A12
attgagaccaacaagcaacatagaaagtgtaatccagtagcaacaatagagcaacaatggggaccaagatattttccctccttatgctccttgctctttctgcatgtgttgctaacgcgacaattttccctcaatgctcacaagctcctatagcttcccttcttcccccataccttccatcaatgatagcttcagtatgtgaaaacccagctcttcaaccctataggctccaacaagcaatcgcagcaagcaacatacctttatcacccttgtttcaacaatcgccagccctatctttggtgcagtcattggtacaaaccatcagggcacagcagctgcagcaactcgtgctacctgtgatcaaccaagtagctctggcaaacctttctccctactctcagcaacaacaatttcttccattcaaccaactgtctacattg

SEQ ID NO: 17096 - DNA, 340 bp, Zea mays
  Clone ID: LIB3151-009-Q1-K1-A8
ccggcacgacccacgcctccagcaccaacactcaacatataaagctttttgcactagcaacaatacatcaacaatggggaccaggtattatacctccttatgctccttgtatctgacagcatgtgttgctaacgccacaatgtaattcttaatagctcacaagctactatagctccccttcttccccaatacctttcatcaattatagtttcactaagaaaaaacacaactcttcaaccctataagctccaacaagcaatctcatcatgcaacatacctatatcactctagattcaacaatcgccagccatatctttggtgcattcattggtacaaacca

SEQ ID NO: 17097 - DNA, 413 bp, Zea mays
  Clone ID: LIB3151-009-Q1-K1-A9
gtatgtgaaaacccagctcttcaaccctataggctccaacaagcaatcgcagcaagcaagatacctttatcacccttgtttcaacaatcgccagccctatctttggtgcagtcattggtacaaaccatcagggcacagcagctgcagcaactcgtgctacctgtgatcaaccaagtagctctggcaaacctttctccctactctcagcaacaacaatttcttccattcaaccaactgtctacattgaaccgtgctgcttatttgcagcaacaactattaccattcagccagctagctactgcctactctcagcaacaacaacttcttccatttaaccaattggccgcactgaaccccgctgcttatttgcagcagcaaatactactaccatttagccagctagctgcagcaag

SEQ ID NO: 17098 - DNA, 425 bp, Zea mays
  Clone ID: LIB3151-009-Q1-K1-B12
cagaccattagctttatctactccagagcgcagaagaacccgatcgacaccatgagggagttgctcgttgccctcgctctcctggctctcgctgcgagcgccacctccacgcatacaagcggcggctgcggctgccagccaccgccgccggttcatctaccgccgccggtgcatctgccacctccggttcacctgccacctccggtgcatctcccaccgccggtccacctgccgccgccggtccacctgccaccgccggtccatgtgccgccgccggttcatctgccgccgccaccatgccactaccctactcaaccgccccggcctcagcctcatccccagccacacccatgcccgtgccaacagccgcatccaagcccgtgccagctgcagggaacctgcggcgttggcagcaccccgatcct

SEQ ID NO: 17099 - DNA, 396 bp, Zea mays
  unsure at all n locations
  Clone ID: LIB3151-009-Q1-K1-B2
caaagcggcagtgcgtagagaggatcgtcgaacagaacagcatgaagatggtcatcgttctcggcgtgtgcctggctctgtcagctgccagcgcctctgcaatgcagatgccctgcccctgcgcggggctgcagggcttgtacggcgctggcgccggcctgacgacgatgatgggcgccggcgggctgtacccctacgcggagtacctgaggcagccgcagtgcagcccgctggcggcggcgccctactacgccgggtgtgggcagacgagcgccatgtaccagccgctccggcaacagtgctgccagcagcagatgaggatgatggacgtgcagtccgtcgcgcagcagctgcagatgatgatgcagctngagcgtgccgctgccgccagcagca

SEQ ID NO: 17100 - DNA, 148 bp, Zea mays
  unsure at all n locations
  Clone ID: LIB3151-009-Q1-K1-B4
gcaacgnagaccggggcgcgcaccgcccgcaagggaggaacaacggggagaaaaacagnggacgaaccgaggcggcgggcccggccgggggggagcgcgacgcagcaacgccggcccgggcgacaggacgcgacaggnccgcgggcgc

SEQ ID NO: 17101 - DNA, 403 bp, Zea mays
  Clone ID: LIB3151-009-Q1-K1-B6
gtccatttggctaaccgagtcttgatgtaggacgaacaacacaacctccgaactaaggcgttggctattgtgtatgttgacagatcacaggatgctaacaggattggactaacacactgaagatgcaacgacctctaatgaatacataacacgagcttacaagtccaagactccagaccaacagatgccactaatgaaatacataagacctacaagatgggttgtaaagtgggagcaccattgacacacagttggatcaccgacggctcacagatgtcgcaccgctggaacacaggtggctcactgcgggcacacagttggcgcaccggcggcacacagttggctaaccggaggtacacagattgcgcacaggacatccaacacagttttctgacagaatgca

SEQ ID NO: 17102 - DNA, 432 bp, Zea mays
  Clone ID: LIB3151-009-Q1-K1-B8
cggacgcgtgggtcagaccattagctttatctactccagagcgcagaagaacccgagcgacacgatgagggtgttgctcgttgccctcgctctcctggctctcgctgcgagcgccacctccacgcatacaagcggcggctgcggctgccagccaccgccgccggttcatctaccgccgccggtgcatctgccacctccggttcacctgccacctccggtgcatctcccaccgccggtccacctgccgccgccggtccacctgccaccgccggtccatgtgccgccgccggttcatctgccgccgtcaccatgccactaccctactcaaccgccccggcctcagcctcatccccagccacacccatgcccgtgccaacagccgcatacaagcccgtgccagctgcagggaacctgccgcgttggcagcacccc

SEQ ID NO: 17103 - DNA, 253 bp, Zea mays
  Clone ID: LIB3151-009-Q1-K1-B9
gggatcttgttttattgttaataatgagtttcacgcgatggcatgtcaactcattattcgatacatctcaaatatttctatctagaatgcagcaccaacaaagggttgctgtaagaacatgggtggaatcgtcatggccattgggtaccatgaacccatgcatgcattactgcatgatgcaacaggggcttgccagcttgatggcgtgtccatccctgatgctgcaacaactgcttgccttaccgcttaatac

SEQ ID NO: 17104 - DNA, 159 bp, Zea mays
  Clone ID: LIB3151-009-Q1-K1-C10
gccgatcaattatctcatctactccagattttacaactcgacaccattaacgcgctgaagattgcctttgctctcctggcgctcgctcccagctccatctccaatacaagctactgctgtggctgtcaaacaccaccacatcatttaccgtctccgttc

SEQ ID NO: 17105 - DNA, 396 bp, Zea mays
  Clone ID: LIB3151-009-Q1-K1-C11
gcctagcaattagctcatcgactccagattggagaactcgacaccatgaaggtgctgagcgttgcccttgctctcctggcgctcgctgcgagcgccgcctccagtacaagcggcggctgtggctgccagacaccaccgtttcatctaccgcctccgttctatatgccgcctccgttctatctgccgccgcagcagcagccgcagccatggcaataccccactcaaccaccgcagctaagcccgtgccagcagttcggatcctgcggcgtcggcagcgtcggcagcccgttcctgggccagtgcgtcgagttcctgaggcaccagtgcagcccggcggcgacgccctacggctcgccacagtgccaggcgctgcagcagcagtgctgccaccagatc

SEQ ID NO: 17106 - DNA, 415 bp, Zea mays
  Clone ID: LIB3151-009-Q1-K1-C12
caacaagcaacatagaaagtggaatccagtttcaacaatagagcaacaatggcgaccaaggtattttccctccttatgctccttgctctttctgcatgtgttgctaacgcgacaattttccctcaatgctcacaagctcctatagcttcccttcttcccccataccttccatcaatgatagctttcagtttgtgaaaaccccacctctttaaaccctataagctccaacaagcaatcgcagcaagcaacatacctttatcaaccttgtttcaacaatcgccagccctatcttttgtgcagtcattggtacaaaccatcagggcacagcatctgcagcaactcgtgctacctgtgatcaaccaagtagctctggcaaacctttctccctactctcagcaacaacatatttctttca

SEQ ID NO: 17107 - DNA, 365 bp, Zea mays
  Clone ID: LIB3151-009-Q1-K1-C2
gggtcttcagaccattagctttatctactccagagcgcagaagaacccgatcgacaccatgagggtgttgctcgttgccctcgctctcctggctctcgctgcgagcgccacctccacgcatacaagcggcggctgcggctgccagccaccgccgccggttcatctaccgccgccggtgcatctgccacctccggttcacctgccacctccggtgcatctcccaccgccggtccacctgccgccgccggtccacctgccaccgccggtccatgtgccgccgccggttcatctgccgccgccaccatgccactaccctactcaaccgccccggcctcagcctcatccccagccacacccatgcccgt

SEQ ID NO: 17108 - DNA, 389 bp, Zea mays
  Clone ID: LIB3151-009-Q1-K1-C4
ggtcttcagaccattagctttatctactccagagcgcagaagaacccgatcgacaccatgagggtgttgctcgttgccctcgctctcctggctctcgctgcgagcgccacctccacgcatacaagcggcggctgcggctgccaaccaccgccgccggttcatctaccgccgccggtgcatctgccaccttcggttcacctgccaccttcggtgcatcttccaccgccggtccacctgccgccgccggtccacctgccaccgccggtccatgtgccgccgccggttcatctgccgccgccaccatgccactaccctactcaaccgccccggcctcagcctcattcccagccacacccatgcccgtgccaacagccgcattcaaacccgtg

SEQ ID NO: 17109 - DNA, 246 bp, Zea mays
  Clone ID: LIB3151-009-Q1-K1-C6
gccagtgccaacacccacatccaaatttgcgttagataccaggaacctgcgcgttagggagcggctcgattctgtgccagtgcgtgcagttcctgaagcatcaacgcagccccatagcaacgccctactgctcgcctcagtaccagtcgtcgcttcatcaatgttgccagcagctcatgcaagttgagtctcaccttccataccaggcgatctttcgattgttcgtccagttcatgctgcaggatc

SEQ ID NO: 17110 - DNA, 401 bp, Zea mays
  Clone ID: LIB3151-009-Q1-K1-C8
ggccgccgtacccagaccggatcgaccaacaatacaggaccgagagaggtatacgggtcgtcgggtgcatggctgtcgcaggtgccagactgtatggaggggagattgcctatgtctgcaatgtgctatagagctaatgcaacgctgcctgactgctcgagacgattatgaacgaagcgggtctgtaccgttgattttattacatgaggaaggctccggatataacgataacattatctaattactactattctattgtacatactatatcataaaaccacaacataactgaaacataatggctgcagtatatgaggatgatggacttgcaccaaacactatataacttgcatatgactatgccgctcgagcgtgccgctgccgccagcagcagcctgtac

SEQ ID NO: 17111 - DNA, 405 bp, Zea mays
  Clone ID: LIB3151-009-Q1-K1-C9
cttgctttgacaaacctagcagtgttcttctcaacaacccatcattggtggtgccctcttgtagatttcttatgagttatagttcaataataaagttttttgtctgatgtttgtggcttcccagaaataagaaagtacatttctaaaaaaaaaaaaaaaaaaaaaaaaaaaaaaaaaaaaaaaaaaaaaaaaaaaaaaaaaaaaaaaaaaaaaaaaaataaaaaaaaaaaaaatggggggtcaatataaataattcaacttttgtttaccaagcataaacaaataaaaaccctttaatatattgggcggggcccttttaaatggcccacttttttaaacccgtgggattgagaaaacaactgttttttaaccggtcaatatttttttactaccggcgcccctttt

SEQ ID NO: 17112 - DNA, 430 bp, Zea mays
  Clone ID: LIB3151-009-Q1-K1-D4
gcaacatagaaagcacaatagtgtaccaacaatggcagccaaaatattttgcttccttatgctccttgggctttctgcaagtgttgctaccgcaaccattttcccacaatgctcacaagctcctatagcttcccttcttcccccatacctctcaccagcggtgtcttcaatgtgtgaaaacccaattgttcaaccctacaggatccaacaggcaatcgcaacaggcatcttaccattatcacccttgttcctccaacaaccgtcagccctattacagcagttacctttggtccatttggtggcacaaaacatcagggcacaacaactacaacaacttgtgctagcaaaccttgctgcatactctcagcaacatcagtttcttccattcaaccaactggctgcattgaactctgctgcttatttgcaacaa

SEQ ID NO: 17113 - DNA, 346 bp, Zea mays
  Clone ID: LIB3151-009-Q1-K1-D8
aaaaagcacaccaagcgaagcacattttcaacttcctaacaacaatggctaccaagagattatggttccttgcgcttcttgcgctttatgcgagcgcaacaaatgcgtacattattccacaatgctcacttgctccaagttccattattacacagtttcttccaccagttactacaatgggcttcgaacacccagctgcgcaagcctatatgctacaacaagcaattgctgctagcgttttacaacaaccaatttgccagttgcaacaacaatgcttggcacatctaacaatacagaccatagcatcgcagcagcaacaacaattcctaccaggactgagccacct

SEQ ID NO: 17114 - DNA, 385 bp, Zea mays
  Clone ID: LIB3151-009-Q1-K1-D9
cagaccattagctttatctactccagagctcagaagaacccgatcgacaccatgagggagttgctcgttgccctcgctctcctggctctcgctgcgagcgccacctccacgcatacaagcggcggctgcggctgccagccaccgccgccggttcatctaccgccgccggtgcatctgccacctccggttcacctgccacctccggtgcatctcccaccgccggtccacctgccgccgccggtccacctgccaccgccggtccatgtgccgccgccggttcatctgccgccgccaccatgccactaccctactcaaccgccccggcctcagcctcatccccagccacacccatgcccgtgccaacagccgtatacaaacccgtgcc

SEQ ID NO: 17115 - DNA, 430 bp, Zea mays
  Clone ID: LIB3151-009-Q1-K1-E10
tcgacccacgcgttcggcaacgagcaacatagaatgtggaatccagtttcaacaatagagcaacaatggcgaccaaggtattttccctccttatgctccttgctctttctgcatgtgttgctaacgcgacaattttccctcaatgctcacaagctcctatagcttcccttcttcccccataccttccatcaatgatagcttcagtatgtgaaaacccagctcttcaaccctataggctccaacaagcaatcgcagcaagcaacatacctttatcacccttgtttcaacaatcgccagccctatctttggtgcagtcattggtacaaaccatcatggcacagcagctgcagcaactcgtgctacctgtgatcaaccaagtagctctggcaaacctttctccctactctcagcaacaacaatttctttcatt

SEQ ID NO: 17116 - DNA, 272 bp, Zea mays
  Clone ID: LIB3151-009-Q1-K1-E2
cgcacataccctacctacctcgccgtcgccgtttcattttccatgggggcgtacaaatacgtgggggaggtattgataaagaagcaatccgacgtgattccgttcgttcaacgcgtgcgctgttgggagtacaggcagcaaccgggcattgtgcgccttacaagggccacccgccccgacaaggactgtcggctcggcttcaaggacaagcaggggtgtgttttttacacgcgtacgcgtgaggcgtaggggctggaacaggcctgtgccca

SEQ ID NO: 17117 - DNA, 380 bp, Zea mays
  Clone ID: LIB3151-009-Q1-K1-E4
gctggcttctcctccccctcttaccaagtcctcttcgggttagggttacttagggttttgtggaggggcgatggcggcggctgatgtggagtaccgatgcttcgtcggcgggcttgcctgggccaccagcaacgagtcgctggagaatgccttcgcctcctacggcgagatcctcgactccaaggtcatcaccgaccgggagacggggaggtctcgcggcttcggcttcgataccttctcctccgagaactccatgctcgacgctatcgagaacatgaacggcaaggagctcgacggccgtaacatcaccgttaaccaggcccagtcccgtggcggtggctgtggcggcggtggctacagcggctgtcgctgcggctgcg

SEQ ID NO: 17118 - DNA, 179 bp, Zea mays
  Clone ID: LIB3151-009-Q1-K1-E6
atccagatcaacacagcggcagtgctttaagtttatcggcaaacagaacagcatgaggatggtcattgctctcgttgagtgcctggctctgtcaactgccaccgcctcttcaatgcacctgcaccaaccatgcgcggtgctacaagacttgtaccgagctggcaccggccttactacaa

SEQ ID NO: 17119 - DNA, 480 bp, Zea mays
  unsure at all n locations
  Clone ID: LIB3151-009-Q1-K1-E8
ntccgattttgagcatttcagaaacacaccatttcgaagtacattagcaacaancctaacaacaggtggctgcgaagatattatccctccttgcgcttcttgcgctttttgcgagcgcaacaaatgcgttcattattccacaatgctcacttgctccaagttccattattacacagttcctcccaccagttacttcaatgggcttcgaacacccagctgtgcaagcctataggctacaacaagcaattgcggcgagcgtcttacaacaaccaatttcccagttgcaacaacaatccttggcacatctaacaatacaaaccatcgcaacgcaacagcaacaacaatttctaccagcactgagccacctagccatggtgaaccctgccgcctacttgcaacagcagttgcttgcatcaaacccacttgctctggcaaacgtagtttgcaaccagccacaacaacagctgtaacaattttttg

SEQ ID NO: 17120 - DNA, 438 bp, Zea mays
  Clone ID: LIB3151-009-Q1-K1-F11
tagcaacatagaaagcacaatagtgtaccaacaatggcagccaaaatattttgcttccttgtgctccttggtctttctgcaagtgttgctaccgcaaccattttcccacaatgctcacaagctcctatagcttcccttcttcccccatacctctcaccagcggtgtcttcaatctgtgaaaacccaattgttcaaccctacaggatccaacaggcaatcgcaacaggcatcttaccattatcacccttgttcctgcaacaaccgtcagccctattacagcagttacctttggtccatttggtggcacaaaacatcatggcacaacaactacaacaacttgtgctagcaaaccttgctgcatactctcagcaacatcattttcttccattcaaccaactggctgcattgaactctgctgcttatttgcaacaacaatta

SEQ ID NO: 17121 - DNA, 373 bp, Zea mays
  Clone ID: LIB3151-009-Q1-K1-F2
tgggtcttcagaccattagctttatctactccagagcgcagaagaacccgatcgacaccatgagggtgttgctcgttgccctcgctctcctggctctcgctgcgagcgccacctccacgcatacaagcggcggctgcggctgccagccaccgccgccggttcatctaccgccgccggtgcatctgccacctccggttcacctgccacctccggtgcatctcccaccgccggtccacctgccgccgccggtccacctgccaccgccggtccatgtgccgccgccggttcatctgccgccgccaccatgccactaccctactcaaccgccccggcctcagcctcatccccagccacacccatgcccgtgccaaca

SEQ ID NO: 17122 - DNA, 253 bp, Zea mays
  Clone ID: LIB3151-009-Q1-K1-F4
tgagcgttcataccaatagcggaatgtactacagaacacaaagaaaaccgacagacaccatggggggggcgtggctctgccatcttctaccgcctctggaatgcagatccacctcccctgatccaagctgcaggtgttgtacgcaactaccgccggcctgacaactatcatcggcgccgcatgtctgatctcctactcagatgacatgacgcatgcatattgcaccccccttgcagcttgcccctactaccac

SEQ ID NO: 17123 - DNA, 476 bp, Zea mays
  Clone ID: LIB3151-009-Q1-K1-F6
gcgcccacgcgtccggcgaagcgcactatcaacattctaacaacaatggctaccaagataggggccctccttgcgcttcttgcccttttagtgagcgcaacaaatgcgttcattattccacagtgctcacttgctcctagtgccattattccacagttcctcccaccagttacttcaatgggcttcgaacatccagccgtgcaagcctacaggctacaactagcgcttgcggcgagcgtcttacaacaaccaattgcccaattgcaacaacaatccttggcacatctaaacctacaaaccatcgcaacgcaacagcaacaacagtttctgccatcactgagccacctagccgtggtgaaccctgtcgcctacttgcaacagcagctacttgcattcaacccacttgctctggcgaacgtaactgcataccagcaacaacaacgtgtgcaacaggttatgccagcgctcaatcaact

SEQ ID NO: 17124 - DNA, 328 bp, Zea mays
  Clone ID: LIB3151-009-Q1-K1-G10
atcacggacccacctatccttggtgaaccctgtcgactacttgcaacaaagaatactttaatacaacccactcgctctctccaacgtacctgcataccaccaacaacaacgtctagcgacagcttatgccagcgctcagtcaactagccatggtgaaccctgtcgcctacctacaacaacaacaattgctttcatctagcccgctcgctgtgggcaatgcacctacgtacctacaacaacagttgctgcaacagattgtaccagctctgactcagttagctgtggccaaccctactgcctacaagcaacaggtgctaacatacaacca

SEQ ID NO: 17125 - DNA, 364 bp, Zea mays
  Clone ID: LIB3151-009-Q1-K1-G2
gaccattagctttatctactccagagcgcagatgaacccgatcgacaccatgagggtgttgctcgttgccctcgctctcctggctctcgctgcgagcgccacctccacgcatacaagcggcggctgcggctgccagccaccgccgccggttcatctaccgccgccggtgcatctgccacctccggttcacctgccacctccggtgcatctcccaccgccggtccacctgccgccgccggtccacctgccaccgccggtccatgtgccgccgccggttcatctgccgccgccaccatgccactaccctactcaaccgccccggcctcagcctcatccccagccacacccatgcccgtgccaacag

SEQ ID NO: 17126 - DNA, 101 bp, Zea mays
  unsure at all n locations
  Clone ID: LIB3151-009-Q1-K1-G4
cggaannnnccgggtccaccccaacgcgtccggcacgcggtacccaggcgactcttcgtgcatggtctctccagtctcatccctcgcagcagcagcacgca

SEQ ID NO: 17127 - DNA, 362 bp, Zea mays
  Clone ID: LIB3151-009-Q1-K1-G6
tcgggtcttcagaccattagctttatctactacagagcgcagaagaacccgatcgacaccgtgagggtgttgctcgttgccctcgctctcctggctctcgctgcgagcgccacctgcacgcatacaatcggcggctgcggctgccagccaccgccgccggttcatctaccggcgccggtgcatctgccagctacggttcacctgtcacctacggtgcatctaccaccgccggtccacctgcctgcgacggtccacctgtcagcgccggtccatgtacctgcggcggttcatatgccgccgccaccatgccactaccctacttaaccgtcatggcctgagactcatatgcaggcacacacatg

SEQ ID NO: 17128 - DNA, 211 bp, Zea mays
  Clone ID: LIB3151-009-Q1-K1-G8
cctgcagcagcagcacgcaaaggcggccagggcgctgtgctgttggcggcgcaaatagcgcatcaactgacagcgatgtgcggcctgcagcacgcgactccatgcccctactctgctgccggcggctgcccccactgaagaaactatgtgctgtagtatagccgctagctaactagctagttgaatcatttagcggccgtcctttcttttt

SEQ ID NO: 17129 - DNA, 334 bp, Zea mays
  Clone ID: LIB3151-009-Q1-K1-H10
gtagaatattagggggtacattgcccccttttgcccctccctaaaatctcccctgtgcagttgggtttccggaggactctgagggcggtctattccttcttccccatatctcactttcgccgccctccctccccgcttttgttaccacttcttcttttttcattatttatgtatgatggtatctctgtgctttattttttccctctcattacttctcttatttttttaccctactttctctttactcttactttcatatccctttttcatttttattcttccctttttcttcttcgtccgatttttttcattatatttctttactatgtttttt

SEQ ID NO: 17130 - DNA, 332 bp, Zea mays
  unsure at all n locations
  Clone ID: LIB3151-009-Q1-K1-H11
ctagttctgattccagctgccgccctttttttactttttctttcaatatttttttcttagagattctctttattctttttgcattctttttttcccctccaacagacacacaaatctcaccatctctgttatctaactacaccccccacaccttccaaattttttatccccacaatgacataacccaaatatgcaaccatttcgttcccaaaaacatttttctactcataatccaccactacacccctcattttacccccccccccccctccctttttttattcaaaaaattccccccatcggggaccaaaacaaaangcctcttttcctac

SEQ ID NO: 17131 - DNA, 290 bp, Zea mays
  Clone ID: LIB3151-009-Q1-K1-H12
gaccaactagcaacatagaaagcacaattttgtaccaacaatggcagccaaaatattcaggttccttatgctccttggtctttctgcaagtgttgctaccgcaaccattttcccacaatgctcacaagctcctatagcttcccttcttcccccatacctctcaccagcggtgtcttcaatgtgtgaaaacccaattgttcaaccctacaggatccaacaggcaatcgcaacaggcatcttaccattatcacccttgttactccaacaaccgtcagccctattacaacaat

SEQ ID NO: 17132 - DNA, 405 bp, Zea mays
  Clone ID: LIB3151-009-Q1-K1-H2
aacatgcaacatataaagtggaatccagtatcaacaattgagcaacaatggcgaccaagatgtggtgcgtccttatgctccttgctctttctgcatgtgttgctaacgcgacaattttccctcaatgctcacaagctcctatagcttcccttcttcccccataccttgcatcaatgatagcttcagtatgtgaaaacccagctcttcaaccctataggctccaacaagcaatcgcagcaagcaacatacctttatgacccttgtttcaacaatcgtcagccctatctttggtgcagtcattggtacaaaccatcagggcacagcaactgcagcaactcgtgctacctgtgatcaaccaagtaagctctgcaaaacctttgtccctactctgagcaacaacaattt

SEQ ID NO: 17133 - DNA, 387 bp, Zea mays
  Clone ID: LIB3151-009-Q1-K1-H4
cagcctagcaattagctcatcgactccagattggagaactcgacaccatgaaggtgctgatcggtgcccttgctctcctggcgctcgctgcgagcgccgcctccagtacaagcggcggctgtggctgccagacaccaccgtttcatctaccgcctccgttctatatgccgcctccgttctatctgccgccgcagcagcagccgcagccatggcaataccccactcaaccaccgcagctaagcccgtgccagcagttcggatcctgcggcgtcggcagcgtcggcagcccgttcctgggccagtgcgtcgagttcctgaggcaccagtgcagcccggcggcgacgccctacggctcgccacagtgccaggcgctgcagcagcagtgct

SEQ ID NO: 17134 - DNA, 226 bp, Zea mays
  Clone ID: LIB3151-009-Q1-K1-H9
cagaggattatctatatgctactccagagttctaacaacccgaccgacaccatgagggaggtgttctctgccgtcgctctgctggctctcgctgcgagcgccacctccacgcatacaaacaggcgctgatgatgtcactcaccgccgcctacctatctacagccgtgggtgcaatgggcaaaaaccgcaaagctgaaacctacagggcacaacacaccgtcggtac

SEQ ID NO: 17135 - DNA, 442 bp, Zea mays
  Clone ID: LIB3151-010-Q1-K1-A11
agaccattatctttatctactccagagcgcataagaacccgatcgacaccatgagggtggggctcgttgccctcgctctcctggctctcgctgcgagcgccacctccacgcatacaagcggcggctgcggctgccagccaccgtcgccggttcatctaccgccgccggtgcatctgccacctccggttcacctgccacctccggtgcatctcccaccgccggtccacctgccgtcgccggtccacctgccaccgccggtccatgtgccgccgccggttcatctgccgccgccaccatgccactaccctactcaaccgccccggcctcagcctcatccccagccacacccatgcccgtgccaacagccgcatccaagcccgtgccagctgcagggaacctgcggcgttggcagcaccccgatcctgggccagtgcgtcgagtt

SEQ ID NO: 17136 - DNA, 459 bp, Zea mays
  Clone ID: LIB3151-010-Q1-K1-A12
tattgagaccaactagcaacatataaagcactatagtgtaccaacaatggcagccaaaatgttttgcctccttatgctccttggtctttctgcaagtgctgctacggcgaccattttcccgaaatgctcgcaagctcctatagcttcccttcttcccccgtacctctcaccagcggtgtcttcggtatgtgaaaacccaattcttcaaccctacaggatccaacaagcaatcacagctggcatcttacctttatcacccttgttcctccaacaatcatcagccctattacatcagttacctttggtgcatttattgtcacaaaacatcatggcacaacaactacaacaacttgtgctagcataccttgctgcctactctcagcaacagcagtttcttacattcaaccaactagctgcattgaactctgctttttatttgcaacaacaacaactaccatt

SEQ ID NO: 17137 - DNA, 360 bp, Zea mays
  Clone ID: LIB3151-010-Q1-K1-A3
caacaagcaacatagaaagtggaatccagtagcaacaatagagcaacaatggagaccaagatatttgtccctccttatgctccttgctctttctacatgtgttgctaacgcgacaattttccctcaatgctcacaagctcctatagcttccctttttcccccataccttccatcaattatagcttcagtatgtgaaaacccagctcttcaaccatataggcttcaacaagcaatcgcagcaagcaacatacctttatcgcccttgttgtgtcaacaatcgccagccctatctttggtgcagttcaattggtacaaaccatcagggcacaacagctgcagcaactcgtgctacctgtgatc

SEQ ID NO: 17138 - DNA, 390 bp, Zea mays
  Clone ID: LIB3151-010-Q1-K1-A4
gggtcttcagaccattagctttatctactccagagcgcagaagaacccgatcgacgccatgagggtgttgctcgttgccctcgctctcctggctctcgctgcgagcgccacctccacgcatacaagcggcggctgcggctgccagccaccgccgccggttcatctaccgccgccggtgcatctgccacctccggttcacctgccacctccggtgcatctcccaccgccggtccacctgccgccgccggtccacctgccaccgccggtccatgtgccgccgccggttcatcttgccgccgcccaccatgccactaccctactaaccgcccggcccagcctcatcccagccacacccatgcccgtgccaacagccgcatccaagcccgtgcc

SEQ ID NO: 17139 - DNA, 399 bp, Zea mays
  Clone ID: LIB3151-010-Q1-K1-A5
ctagcccaccgccgtgctgactcccctagccaggcacgacgtctaagagagcaggggcgggggcggcaacctgatgcccagccccccgtgggggccatggagctcgtcctcgtcaagcccgcggcaggagctctcgtcgaggtgggctccgggtccgttgccggcgcgggctcgatcccggcgatggtggcggcgcatcaggagattttgcacgaacaggtggaccagctccaacgcctcgtcgtcgctcagtgccgcctcaccggcgtcaaccccctcgcccaggagatggctgtcccggtgcattgtttataagatggtaagggccaaggatctgttgatccaaaagcagttaatgcatgcagtcactttttgctttgaagacatttttggcaaaaa

SEQ ID NO: 17140 - DNA, 342 bp, Zea mays
  Clone ID: LIB3151-010-Q1-K1-A6
ctacagcttgaccccgcgacgacgcacttttacgccagtcgtcctaccggcatcggacagggtgcgcactcaacaatggtccgatctgccactccgagcccccactgctgatctcactgctgcccatccaggaactagccgcgcgcttcgcgcttgtggaaatactaaataggccgacatgcgctttaaatgcacgcagaacctgtccagctgtccattgtagggggagcatctctaacagaactgatggtttcatatgctccaatacaagaaagtttgattgtgcactactcacaacctatttttgtcccccgttccttcttgctgttaggatgataccgc

SEQ ID NO: 17141 - DNA, 233 bp, Zea mays
  Clone ID: LIB3151-010-Q1-K1-A7
gtgtcttaacaccatcagccctatttactttatagcgcataaaaacccgagcgaggccaggagggtgttactaaactccctcactctacatactctacttgcgagctccacctccactcatacaagaaagctctcataggtcagatcatcctctaacacgcatcgaccgccaaaattgcatacttcatctaacgtgtcacctacgacctcccaggcacatgccaacaaccgac

SEQ ID NO: 17142 - DNA, 361 bp, Zea mays
  Clone ID: LIB3151-010-Q1-K1-A8
agcaacataaaatgcacattcgtgtaccaacaatggcacccaaaatattccgcttccttatgctcctgggtctttctgcaagctgttgctaccgtaaccattttcccacaatgctcacaagctcctatagctgttcttattaccccatacctgtcaccaacggtgtcttcaatgtgtgaaaacccaattgttcaaccctacatggatccaacatgcaatcgcaacaggcatcttaccattatgaccattgttcctccaacaaccgtgtgccctattacagtaattacctttggtccatttggtggctatccaatacatcagggcacaacaactacaacaacttgtgctagcaaacattgct

SEQ ID NO: 17143 - DNA, 358 bp, Zea mays
  Clone ID: LIB3151-010-Q1-K1-A9
caacaagcaacatagaaagtggaatacagttgcaacaatagagcaacaatggcggccaagagattttccatccttatgctccttgctctttctgcatgtgttgctaacgcgaccatttttcctcaatactcacaagctcctatagctgcccttcttcccccataccttccatcaatgaccgcttcagtatgtgaaaacccagcccttcaaccctacaggctccaacaagcaatcgcaacaagcaacttacctttatcacccctgttctttcaacaatcgccagccctatctttggtgcagtcattggtacaaaccatcagggcacaacagctgcagcaactcgtgctaccagtgatca

SEQ ID NO: 17144 - DNA, 402 bp, Zea mays
  unsure at all n locations
  Clone ID: LIB3151-010-Q1-K1-B1
cggacgcgtgggtagcaacatacatagtgaagtacactagcaacatcttagcaccaatgggagccaagatttttgccctccttgccctccttgctctttcagcaagcgctgctacctcgacttttattccacaatgctcacaacaatacctctctccggcgacagccgtgggatttcaatacccaactatacaatcctacatggtacaagaggccatccaagcaagcatcttacggtcattagcattaaccctccaacaaccatatgctctattgcaacagccatccttagtgcatctgtattcntttcaaagaatcgcggcacaataactacaacaacagttgctaccaacaatcaatcaagtagttgcagcgaaccttgctgcttacctncagcaacaac

SEQ ID NO: 17145 - DNA, 379 bp, Zea mays
  Clone ID: LIB3151-010-Q1-K1-B10
agcaaagcggcagtgcgtacagaggatcgtctaacagaacagcatgaagatggtcatcgtgcgcgtcgtgtgcctggctctgtcagctgccagcgcctctgcaatgcagatgccctgcccctgcgcggggctgcatggcttgtacggcgctggcgccggcctgacgacaatgatgggcgccgggctgctgtacccctacgcgaagtacctgaggcaggcgcagtgcagcccgctggcggcggcgccctactacgcacggtgtggtcagacgagcgccatgtaccaaccgctccggctacagtgctgccagcagcagatgaagatgatggacgtgcagtccgtcgcgcagcagctgcagatgatgatgcagcttgagcgt

SEQ ID NO: 17146 - DNA, 427 bp, Zea mays
  Clone ID: LIB3151-010-Q1-K1-B11
aaagatttgtgagagtgatccggcgctgagaagagatggctaagatcgccgcagccgccggggcggctgcggcgctgtgcttcgcggccctggtggccgtggccgtctgccaaggcgaggtcgagcggcagaggctcagggacctgcagtgctggcaggaggtccaggagagcccgctcgacgcgtgccgccaggtcctcgaccggcagctaaccggcggcggcgtcggcggcccgttccggtggggcaccgggctccggatgcggtgctgccagcagctccaggacgtgagccgcgagtgccgctgcgccgccatccggagcatggtcaggggctacgaggaggccatgccgcctctggagaaaggctggtggccatgggggcggcagcagcagccgccgccgcatggaggatgaggaggacaggg

SEQ ID NO: 17147 - DNA, 124 bp, Zea mays
  unsure at all n locations
  Clone ID: LIB3151-010-Q1-K1-B12
tccgtccgcatgacgcattatgtctttatctacctccagtagctcatnaagtaaccccgatccgactnaccatgagggtagggtgctctggttgccctcatgctctcgtggcttctcgctgcga

SEQ ID NO: 17148 - DNA, 290 bp, Zea mays
  Clone ID: LIB3151-010-Q1-K1-B2
ataccaacaagcaacatagaaagtgtaatacagtagcaacaatatagcaacaatggcgggcgggatattttccatccttatgctccttgctctttctgcatgtgttgctaacgcgaccatttttcctcaatactcacaagctcctatagctgcccttcttcccccataccttccatcaatgaccgcttcagtatgtgaaaacccaacccttttaccctacaagcttcaacaagcaatcgcaacaagcaacttacctttatcacccctgttctttcaacaatcgccagccc

SEQ ID NO: 17149 - DNA, 330 bp, Zea mays
  Clone ID: LIB3151-010-Q1-K1-B3
gtcagaagctcaaatactgatctcactgatccagtatggctatggcaaaggcaggcgcgcgcggggtctcggcggcccagctggtgactctcgggctatcactcctctgcgctgtcgccggcccggccgccgcgcagaactgcggctgccagccaaacgtatgctgcagcaagtttggctactgcggcacgaccgacgagtactgcggcgacgggtgccagtcgggcccgtgccgctcgggcggcggcggcagcagtggcggcggtggtgcgaacgtggctagcgtcgtcaccggctcctttcctttaacggcataagaccagccggagc

SEQ ID NO: 17150 - DNA, 431 bp, Zea mays
  Clone ID: LIB3151-010-Q1-K1-B4
gcgaatattttgagcattcagaaacacaccaagtctaagcgcactatcaacaacctaacggcaatggctaccaagatattatccctccttgcgcttcttgcgctttttgcgagcgcaacaaatgcgtccattattccacaatgctcacttgctcctagttccattattccacagttcctcccaccagttacttcaatggccttcgaacacccagctgtgcaagcctataggctacaacaagcgattgcggcgagcgtcttacaacaaccaattgcccaattgcaacaacaatccttggcacaattcttaacaatacaaaccatcgcaacgcaacagcaacaacagttcctaccagcactgagccacctagccatggtgaaccctgtcgcctacttgcaacatcagctgtttgcattcaacccacttgctct

SEQ ID NO: 17151 - DNA, 296 bp, Zea mays
  Clone ID: LIB3151-010-Q1-K1-B5
acccatctataccatcctatttgtttcaactagcgatcgcggcaagcgtcttagggcaacgaattggtcaattgctacaacaatccttctcgcatcctaacaatacaaaccatctcaacgcaaccaaaccaacagttcctatcagcacttaaccacctagttattgtaaaccctgtgacccatttgccacatcaggttcttgtatcacaatccacttcctctagcacacgtagttgcattaccgctacaacaacaactgccacagtttctgccatgcttaatcaaataacatggtg

SEQ ID NO: 17152 - DNA, 185 bp, Zea mays
  Clone ID: LIB3151-010-Q1-K1-B7
taacaatttaactttctatatcctttcatttaacaatcacgatctacatcccatgaacaagctgctcttatttcatcttcaccccttttctccataaccctactagagtcctcaaccaactcgccttattattctaaactagtctactttttaaaagtttgatatatccataatccctttattta

SEQ ID NO: 17153 - DNA, 419 bp, Zea mays
  Clone ID: LIB3151-010-Q1-K1-C1
cggcctcagcctcatccccagccacacccatgcccgtgccaacagccgcatccaagcccgtgccagctgcagggaacctgcggcgttggcagcaccccgatcctgggccagtgcgtcgagttcctgaggcatcagtgcagcccgacggcgacgccctactgctcgcctcagtgccagtcgttgcggcagcagtgttgccagcagctcaggcaggtggagccgcagcaccggtaccaggcgatcttcggcttggtcctccagtccatcctgcagcagcagccgcaaagcggccaggtcgcggtggtcctgttggcggcgcagatagcgcagcaactgacggcgatgtgcggcctgcagcagccgactccatgcccctacgctgctgccggcggtgtcccccacttgagaaactatgtgct

SEQ ID NO: 17154 - DNA, 358 bp, Zea mays
  Clone ID: LIB3151-010-Q1-K1-C12
attgataccaactagcaacatacatagtgaagtacactagcaacatcttagcaccaatgggagccaagatttttgccctccttgccctccttgctctttcagcaagcgctgctacctcgacttttattccacaatgctcacaacaatacctctctccggcgacagccgtgggatttcaatacccaactatacaatcctacatggtacaagaggccatccaagcaagcatcttacggtcattagcattaaccctccaacaaccatatgctctattgcaacagccatccttagtgcatctgtatctccaaagaatcgcggcacaacaactacaacaacagttgctaccaacaatcaatca

SEQ ID NO: 17155 - DNA, 390 bp, Zea mays
  Clone ID: LIB3151-010-Q1-K1-C2
attttgagcattcataatcacacctagcgtttctacctagcaacgacttaacaacggtgggtaccaagatattagccctccttgcgcttcttgccctttttgtgagcgcaacaaatgcgttcattattccacaatgctcacttgctcctagtgccattataccacagttcctccgaccagttacttcaatgggcttcgaacacctagctgtgcaagcctacaggctacaacaagcgcttgcggtgagcgtcttacaacaaccaattaaccaattgcaacaacaatccttggcacatctttaaaccatacataccatctcaacacaacagcaacaacagtttctaccagcactgagccaactagatgtggtgaaccctgtcgcctacttgc

SEQ ID NO: 17156 - DNA, 374 bp, Zea mays
  Clone ID: LIB3151-010-Q1-K1-C3
gtcgccgccgtctgctccgggctgctgttctgcgcctccacaaggctttggcctctgtggtgtaagttttaagcttcacctccagccatgggtaaagagaagtcccacatcaacattgtggttattggccatgtcgactctggcaagtcaaccaccactggccacctgatctacaagcttggaggcattgacaagcgtgtgattgagaggttcgagaaggaagccgctgaaatgaacaaacggtccttcaagtacgcctgggtgcttgacaagctcaaggctgagcgtgagagaggtatcaacccaattgatattgctctgtggaagtttgagaccaccaagtactactgcactgtcattgatgccccttgaca

SEQ ID NO: 17157 - DNA, 425 bp, Zea mays
  Clone ID: LIB3151-010-Q1-K1-C4
cccacgccactctccctactcccttcctctttctctatctccctctctctagctcggcatgcagcagcagccccccctcccttggagctagcgaccgagccctcccatgctcctccctcaccttggcagctcttccatggcgtcaccccctcctctacggtagcaaggtgtaggaccgagagatgctgatcgtgcaagtgatgaggtgccaaccacaagatgcagttggtggatgacctgaagaatggtggaattaaccagtggatgctcgccaagcgagtatcccccagcaaacactaatttctaagtgttaaattaaagatggtcgagagggttactgcttccgcaggagaggaccaagagtagcgtggccaggcttcgccattattactcgccgaagaatcctaaaaaaagaaacaccttca

SEQ ID NO: 17158 - DNA, 349 bp, Zea mays
  Clone ID: LIB3151-010-Q1-K1-C5
gaacaatttaaatgaaaagaaaaatgtattgttccaaaaaaaaaaaaaaaaaaaaagaaaagtaaaaataaaaaaaaaaaaaaaaaaaaaaaaaaaaaaataaaaaatttaataaaaaaaaaaaaaaaaaaaaaaaaatggggcggccgttttaaaaattcaaaacttacttccccttgcttccaaagcaataatttttttttatttacccctaaattaaattcactgccctgctttttaaaacttcgatatttgaaaaaccctttttttaccaaatttaattactttgtaaaaaattccctttttttttccattttgcttatataaaaaaaacccccaaccattttcc

SEQ ID NO: 17159 - DNA, 400 bp, Zea mays
  Clone ID: LIB3151-010-Q1-K1-C6
tgggtcttcagaccattagctttatctactccagagcgcagaagaacccgatcgacaccatgagggtgttgctcgttgccctcgctctcctggctctcgctgcgagcgccacctccacgcatacaagcggcggctgcggctgccagccaccgccgccggttcatctaccgccgccggtgcatctgccacctccggttcacctgccacctccggtgcatctcccaccgccggtccacctgccgccgccggtccacctgccaccgccggtccatgtgccgccgccggttcatctgccgccgccaccccattgccactaccctactcaaccgccccgggctcagcctgatccccagtcacacccatgcccgtgccaacagccgcattcaagcccgtgccagct

SEQ ID NO: 17160 - DNA, 345 bp, Zea mays
  Clone ID: LIB3151-010-Q1-K1-C7
gcgtccgcctcccctaccatctatggtttttagggttttcgaggaggaggaaatggcgtctgatagggtgctcgggactgtgaagtggttcaacggaaccaatggcttcggtttcatcacccccgacgactgtagcgaggacctattcgtccaccagtcctccatcaagtccgacggctaccgtagtcttaacgactgcgatgccgtctaatacaccgtctgcagcggcaactacagccgcgccaaggccctctatgtcaccgcgcccggctgcggccctcttgccggcggagaaccggtttcctactgcggcaactgcggtgggcgaggcggatactgctgctg

SEQ ID NO: 17161 - DNA, 332 bp, Zea mays
  Clone ID: LIB3151-010-Q1-K1-C8
cggacgcgtggggcgttcagaccattgggctgatgtgcgcccaaacagcgcagaacctgagggagatgttcaggctgcagctcgctactccatgtctctacgctgttgccggcagcgccccccactgaagaaactatgtgctgtagtatatccacccgctagctacctagcatagacattcagcggcgattattgcatcataatgtgacacgcctcatcatgggcgtctgcgtcagcgtgagcaactacctgaatgaacacatcgtgataaaaagaaaacatgtgtcgtcccggttcatctagcccgctcgcccatccactaccctactaac

SEQ ID NO: 17162 - DNA, 252 bp, Zea mays
  Clone ID: LIB3151-010-Q1-K1-C9
gaccattttcagcatctacccctgatcacttaagaaccctatcgacaacacctgggtgtggggggttgatatgactgtcctgtttttcgatctaaacaccaccttcagccatacaaacctcgagtgtcacttccacccacctacctatgtttatgtacactccattactaatgatgaacttaaggtttacctgccacctccggtgcatcttcgacctgcagtccacattaccgcgccagtacacctgacacc

SEQ ID NO: 17163 - DNA, 442 bp, Zea mays
  unsure at all n locations
  Clone ID: LIB3151-010-Q1-K1-D1
gagacagtcattctggtaccggctattcaagaatatgctgctggttattcactgctgagcaaagctgacactactgatcaaacacaggccaatcaggaatacattgctgatcaagtacaatcgtgcctaacagacccactcattccagtaaaagctattgaggaatacacaactgattattcacatattagtaaagctgacattacaaatcaaatacaggtcaatcaggaaagcactgatgatcacttatatttacgtcaagtagactgtctcgctgaaatgcagataattgagcaaaatnttgggttcaagcaacctcagctgagccaaccagcactggggtcaaatacgaattgatctggaaagcactaccaatcacttgcaaccaaactacgatgaaaattctatgctgcaatctggtttctcttgggctcctgaacaa

SEQ ID NO: 17164 - DNA, 341 bp, Zea mays
  Clone ID: LIB3151-010-Q1-K1-D10
cccacgcgtcctcccactcgtccgcatcatgtcacaacagctgcagcaactcgtgctaccgatgatcagccaagtagctctggcaaacctttctccctactctcagcaacaacaatttcttccattcaaccaactgtctacactgaaccctgctgcttatttgcagcaacaacaactactaccattcagccagctagctactgcctactctcagcagcaacaatttcttcattttaaccattccgccgaactgaacccctttgttaatttccagcaccaaatacctactaccatttggtccagctagctacaacaaagcccccgctttccttctttgacac

SEQ ID NO: 17165 - DNA, 448 bp, Zea mays
  unsure at all n locations
  Clone ID: LIB3151-010-Q1-K1-D12
gaactacccaagagttggctaggcggtgtgttactcttatcagactggttgaaaaggaaagtcaagaatatgatgagcaagagaggcaggcaaggaaggagaaaaggcttgctaagaatacgactccaacaaagagagcagcactaaggaattcagagggtgagagtgctccgttgagctcattcaagaggcgacggcagtctcttatggacgattatgtgggctcgggaaggcgaaagagagggtgatgtgatgtttgacatcctgcctttggagctctcagcgagatgcagtctctgcaatgctttaagcccgtacgtgctgtgcttagtttcttgtgcacgtgagttgaatgcctcaagggctggtgaacttgtagtgtaagttatgcaacgatgacatagattagttattataaatcctaaatgangtatgtatgcgcatgctg

SEQ ID NO: 17166 - DNA, 306 bp, Zea mays
  Clone ID: LIB3151-010-Q1-K1-D2
gtctaagggcacatcttatgaagactccattcgcagcgttcatctgtcgacgtaggtgagaagtgcactcaagttatacatctactaaagagcaagacatttgaaagcttattggccacctgtgttactgttgatgcaagcgaaagtcgtctgctggagcctataaaaacagctctgaggtcactcaccgcactatccgagccaatatgatttcttctgccccatggcatacattttcatctttggcatttaaagaattgaaccatataaaaaataaagacaggagcactttttcagtaatttcaa

SEQ ID NO: 17167 - DNA, 274 bp, Zea mays
  Clone ID: LIB3151-010-Q1-K1-D3
cagccgactccatgcccctacgctgctgccggcggtgtcccccactgaagaaactatgtgctgtagtatagccgctggctagctagctagttgagtcatttagcggcgatgattgagtaataatgtgtcacgcatcaccatgggtggcagtgtcagtgtgagcaatgacctgaatgaacaattgaaatgaaaagaaaaaagtattgttcccaaaaaaaaaaaaaaaaaaaaaaaaaaaaaaaaaaactaaaaataaagaaaaaaaaaataacac

SEQ ID NO: 17168 - DNA, 440 bp, Zea mays
  Clone ID: LIB3151-010-Q1-K1-D4
caactagcaacatagaaagcacaatagtgtaccaacaatggcagccaaaatattgggcctgcttatgctccttggtctttctgcaagtgctgctacggcgaccattttcccacaatgctcacaagctcctatagcttcccttcttcccccgtacctctcaccagcggtgtcttcggtatgtgaaaacccaattcttcaaccctataggatccaacaggcaatcgcagctggcatcttacctttatcacccttgttcctccaacaatcatcagccctattacagcagttacctttggtgtccaatttattggcacaaaacatcatggcacaacaactacaacaacttgtgctagcaaaccttgctgcctactctcagcaacaacagtttcttccattcaaccaactagctgcattgaactctgcttcttatttgcaacaac

SEQ ID NO: 17169 - DNA, 336 bp, Zea mays
  Clone ID: LIB3151-010-Q1-K1-D5
aacaatggcagccaaaatattttgcctccttatgctccttggtctttctgcaagggctgcgtacggctaccattttcccgcaatgctctcaagctcctatagcttcccttcttcccccgtacctctcaccagcagtgtcttcggtatgtgaaaacccaattcttcaaccctacaggatccaacatgcaatcgcagctggcatcttacctttatcacccttgttcctccaacaatcatcagccctattacaacagttacctttggtgcatttattggcacaaaacatcaaggcacaacataactacaacaacttgtgctagcaaccttgctgctact

SEQ ID NO: 17170 - DNA, 327 bp, Zea mays
  Clone ID: LIB3151-010-Q1-K1-D6
gcgacaagttccttatgcatcactgcacgctgacggacacgccctactgctcgcctgagtggcagtctttcctgtatctacggtgtctgcatctcaggccggtgtagccgcataaccggtgccagtctttgtggcagcctcgttgccagcatctcatgcaggtggagccgcatctccgattccaggctaacttgggctttggtctgcattccataccgcaggaacaaccgcagagcgggcaagtcctgatactgtcggcggatcaaatagcgcaggatcttacggcgatgtgcggactgcattcatccctactcatgccctacctgt

SEQ ID NO: 17171 - DNA, 299 bp, Zea mays
  Clone ID: LIB3151-010-Q1-K1-D7
aatctagcatcatataaagcacaactctcgctctcaacatatgtgctcgccaaaatatcggagccgggcgtatgctcccttggtctctcgcgcaaatacatactacacgcaaccagttttcccacaggtgctcacaggactactataacattcccttccttccccacaacactatgaccaacttgcgtcttctgtatgtgaaaacactattcttcaaccctataccattcaacaggaactcgcaggtgccatcttacctttatgacccagcttcctccaacaataataacctctattac

SEQ ID NO: 17172 - DNA, 408 bp, Zea mays
  unsure at all n locations
  Clone ID: LIB3151-010-Q1-K1-D8
ccaacaagcaacatagaaagtggaatccagtagcaacaatagagcaacaatggcgaccaagatattgtccctccttatgctccttgctctttctgcatgtgttgctaacgcgacaattttccctcaatgctcacaagctcctatagcttcccttcttcccccataccttccatcaatgatagcttcagtatgtgaaaacccagctcttcaaccctataggctccaacaagcaatcgcagcaagcaacatacctttatcacccttgtttcaacaatcgccagccctatctttggtgcagtcatttgggntacaaaccatcagggcacagcagctgcagcaactcgtgctacctgtgatcaaccaagtagctctggcaaacctttctccctactctcagcaacaacaatt

SEQ ID NO: 17173 - DNA, 382 bp, Zea mays
  Clone ID: LIB3151-010-Q1-K1-D9
agaccattagctttatctactccagagcgcttaagaacccgatcgacaccatgagggtggggctcgttgccctcgctctcctggctctcgctgcgagcgccacctccacgcatacaagcggcggctgcggctgccagccaccgccgccggttcatctaccgccgccggtgcatctgccacctccggttcacctgccacctccggtgcatctcccaccgccggtccacctgccgccgccggtccacctgccaccgccggtccatgtgccgccgccggttcatctgccgccgccaccatgccactaccctactcaaccgccccggcctcagcctcatccccagccacacccatgcccgtgccaacagccgcatccaaacccgtg

SEQ ID NO: 17174 - DNA, 393 bp, Zea mays
  Clone ID: LIB3151-010-Q1-K1-E1
tgcagcaactcgtgctacctgtgatcaaccaagtagctctggcaaacctttctccctactgtccgcaacaacaatttcttccattcaaccaactgtctacactgaaccctgctgcttatttgcagcaacaactattaccatttagccagctagctactgcctactctcaacaacaacaacttcttccatttaaccaattggccgcactgaaccccgctgcttatttgcagcagcaaatactactaccatttagccagctagctacagcaagccgtgcttccttcttgacacaacaacagtttgcttggcgttctaccacatttgggtaaccccaaccttacacacacaatgtgccttgtcaactgttacaaccacagctctacacacacatat

SEQ ID NO: 17175 - DNA, 430 bp, Zea mays
  Clone ID: LIB3151-010-Q1-K1-E10
ccaacaagcaacatagaaagtggaatccagtagcaacaatagagcaacaatggcgaccaagatattttccctccttatgctccttgctctttctgcatgtgttgctaacgcgacaattttccctcaatgctcacaagctcctatagcttcccttcttcccccataccttccatcaatgatagcttcagtatgtgaaaacccagctcttcaaccctataggctccaacaagcaatcgcagcaagcaacatacctttatcacccttgtttcaacaatcgccagccctatctttggtgcagtcattggtacaaaccatcagggcacagcagctgcagcaactcgtgctacctgtgatcaaccaagtagctctggcaaacctttctccctactctcagcaacaacaatttcttccattcaaccaactgtctaca

SEQ ID NO: 17176 - DNA, 436 bp, Zea mays
  Clone ID: LIB3151-010-Q1-K1-E12
gcaaagcggcagtgcgtagagaggatcgtctaacagaacagcatgaagatggtcatcggtgtcgtcgtgtgcctggctctgtcagctgccagcgcctctgcaatgcagatgccctgcccctgcgcggggctgcagggcttgtacggcgctggcgccggcctgacgacgatgatgggcgccggcgggctgtacccctacgcggagtacctgaggcagccgcagtgcagcccgctggcggcggcgccctactacgccgggtgtgggcagacgagcgccatgtaccagccgctccggcaacagtgctgccagcagcagatgaggatgatggacgtgcagtccgtcgcgcagcagctgcagatgatgatgcagcttgagcgtgccgctgccgccagcagcagcctgtacgagccagctctgatgcagcagcagcagcagc

SEQ ID NO: 17177 - DNA, 423 bp, Zea mays
  Clone ID: LIB3151-010-Q1-K1-E2
gccgctcccttgacattgagcgccctacctacaccaacctcaacaggcttgtgtgcgcaggtgatctcatccctgactgcttccctgaggttcgatggtgctctgaacgttgatgtgaacgagttccagaccaacctggtgccctaccctaggatccacttcatgctttcgtcctacgctccagtcatttctgctgagaaggcctaccacgagcagctgtccgtggccgaaatcaccaacagcgccttcgagccatcctccatgatggccaagtgcgacccccgccatggcaagtacaatgtggcatgctgcctcatgtaccgtggtgatgtggttcccaaggacgtgaacgctgctgtggccacaatcaataccaagcgcaccatccagttcgtggactggtgcccgactggcttcaagtgc

SEQ ID NO: 17178 - DNA, 372 bp, Zea mays
  Clone ID: LIB3151-010-Q1-K1-E3
ccgatcgacaccatgagggtgttgctcgttgccctcgctctcctggctctcgctgcgagcgccacctgcacgcatacaagcggcggctgcggttgccagccaccgccgccggttcatctaccgccgccggtgcatctgccacctccggttcacctgccacctccggtgcatcttccaccgccggtccacctgccgccgccggtccacctgccaccgccggcccatgtgccgccgccggttcatctgtcgccgcccctatgtcactaccctactcaaccgccccggcctcagcctcatttctagccctaacaccatgccgtgccaacagcgatcaacccggccgctgcaggacctgcgcgtggagacccatct

SEQ ID NO: 17179 - DNA, 393 bp, Zea mays
  Clone ID: LIB3151-010-Q1-K1-E4
attttcatcattcataaacacaccatgcgtttcgcactatcaacaacctaacaacggtgtgtaccaatatattagccctccttgcgcttcttgcccttttagtgagcgcaacaaatgcgttcattattccacagtgctcacttgctcctagtgccattattccacagttcctcccaccagttacttcaatgggcttcgaacatccagccgtgcaagcctacaggctacaactagcgcttgcggcgagcgtcttacaacaaccaattgcccaattgcaacaacaatccttggcacatcttatatacctacaaaccatcgcaacgcaacagcaacaacagtttctgccatcactgagccacctagccgtggtgaaccctgtcgcctacttgcaac

SEQ ID NO: 17180 - DNA, 238 bp, Zea mays
  Clone ID: LIB3151-010-Q1-K1-E5
gcggcctctggcttctcacgtaagtactaatgttttccctccaaccacctccacctagagcctgggtaacaatatctttcgcattcatccggctcattctagctaagctctacccccctttctcctcaaccttttatatcgatctcgcacagacgttcgaccccgtctagacttcatctaactttgccatttacgccatttacccctctgaagccgttcgctcactctcctccccgca

SEQ ID NO: 17181 - DNA, 398 bp, Zea mays
  Clone ID: LIB3151-010-Q1-K1-E6
attttgagcattcagaaacacaccaagcgaagcacattatcaacaacctaacaacaatggctaccaagatattatccctccttgcgcttcttgcgctttttgcgagcgcaacaaatgcgttcattattccacaatgctcacttgctccaagttccattattacacagttcctcccaccagttacttcaatgggcttcgaacacccagctgtgcaagcctataggctacaacaagcaattgcggcgagcgtcttacaacaaccaatttcccagttgcaacaacaatccttggcacatctaacaatttaacaaaccatcgcaacgcaacagcaacaacaattcctaccagcactgagccacctagccatggtgaaccctgccgcctacttgcaacagcag

SEQ ID NO: 17182 - DNA, 300 bp, Zea mays
  Clone ID: LIB3151-010-Q1-K1-E8
gcccctggcatctcccgaaagtccaaaggcccccctccccgcgcctccgcggggaccttggtaacaatctgggccgcatccagggggggcattctgcaaagcgcgagcccggttcgttctcgacctttcgtctcgctctcgcccgcccgcccgaccccgcggagccctagcctagccttgccccgaccgcggatttcccctcggccgccgcgcgcccgcacccgtacccgcgatgatgaactgcgccggaggcggagaccccgtggaggacttcctgatctccggcgccgtcgacgacga

SEQ ID NO: 17183 - DNA, 316 bp, Zea mays
  Clone ID: LIB3151-010-Q1-K1-E9
aaaaccggcccgaccgacgcgtccggccgccaccacccagcgtcccccaaagcttaaccctcaatccatacccaccatggcgtaagacctttcaaatcctcgctcctccgctccgcgtgccgcctgcgggccgcctcacccgctgcgccacgcccacacgcgccaccttaccgcccgtccccggccagatacctcatcaaccacgctgccagctacgcctatcccacctctgcccacgcatgacctgccaccccccctccgggcacccagaataccgttgtcagcatgatcaccgaacagttcacccccacttgcg

SEQ ID NO: 17184 - DNA, 320 bp, Zea mays
  Clone ID: LIB3151-010-Q1-K1-F1
ccagatcagcaaagcggcagtgcgtagagaggatcgtcgaacagaacagcatgaagatggtcatcgttctcgtcggtgcctggctctgtcagctgccagcgcctctgcaatgcagatgccctgcccctgcgcggggctgcagggcttgtacggcgctggcgccggcctgacgacgatgatgggcgccggcgggctgtacccctacgcggagtacctgaggcagccgcagtgcatcccgctggcggcggcgccctactacgccgggtgtgggcagacgagcgccatgtaccagccgctccggcataccagtgctgcagcac

SEQ ID NO: 17185 - DNA, 236 bp, Zea mays
  Clone ID: LIB3151-010-Q1-K1-F2
gtcagcctagcaattagctcatcgtctccatattggagaactcgacaccatgaaggtgcggatcgttgcccttgctctcctggcgctcgctgcgagcgccgccttcagtacaagcggcggctgtggctgtcagacaccaccgtttcatctaccgcctccgttctatatgccgccttcgttctatctgtcgccgcagcagcagccgcagccatggcaataccccactcaaccaccgc

SEQ ID NO: 17186 - DNA, 336 bp, Zea mays
  Clone ID: LIB3151-010-Q1-K1-F3
cgttgatcagcctagctagctagcgctgttttcctgtgtgctaatggcgcccgttcaatgtgcgcgttcgcagagggtgttccacttcggcaagggcaagagcgagggcaacaagaccatgaaggaactgctgggcggcaagggcgcgaacctggcggagatggcgagcatcgggctgtcggtgccgccagggttcacggtgtcgacggaggcgtgccagcagtaccaggacgccgggtgcgccctccccgcggggctctgggccgagatcgtcgacggcctgcagtgggtggaggagtacattgagtgcgccaccctgggcgatccgcagcgccc

SEQ ID NO: 17187 - DNA, 198 bp, Zea mays
  Clone ID: LIB3151-010-Q1-K1-F5
ttcccataaataatcattaatctttttatcttacccaccaacacatatatctaaagacaagtgtctatctacaaaaaccacttatcttgcccttattgatcctcctatcattactttaccctcaagtctactttcaacaccaactacttgcatccaacccaattcactaactcaataccattactcatttaccatcat

SEQ ID NO: 17188 - DNA, 383 bp, Zea mays
  Clone ID: LIB3151-010-Q1-K1-F7
agcaaagcggcagtgcgtagagaggatcgtcgaacagaacagcatgaagatggtcatcgggctcgtcgtgtgcctggctctgtcagctgccagcgcctctgcaatgcagatgccctgcccctgcgcggggctgcagggcttgtacggcgctggcgccggcctgacgacgatgatgggcgccggcgggctgtacccctacgcggagtacctgaggcagccgcagtgcagcccgctggcggcggcgccctactacgccgggtgtgggcagacgagcgccatgtaccagccgctccggcataccaagtgctgccagcagcagatgaggatgatggacgtgcagtccgtcgcgcagcagctgcagatgatgatgcagcttgagcgtg

SEQ ID NO: 17189 - DNA, 407 bp, Zea mays
  unsure at all n locations
  Clone ID: LIB3151-010-Q1-K1-F8
gtaccatcaatcatcattcatcttagtagtataggcaccaaatcaaatctgcaacatcaattatctaactccaaaaaccatgaagctggtgcttgtggttcttgctttcattgctttagtatcaagtgtttcttgtacacagacaggcggctgcagctgtggtcaacaacaaagccatgagcagcaacatcatccacaacaacatcatccacaaaaacaacaacatcaaccaccaccacaacatcaccagcagcagcaacaccaacaacaacaagttcacatgcaaccacaaaaacatcagtcnaaacaacaagaagttcatgttcaacaacaacaacaacaaccgcagcaccaacaacaacaacaacaacagtcccaacaacaacatcaatgtgaaggccaacaac

SEQ ID NO: 17190 - DNA, 370 bp, Zea mays
  Clone ID: LIB3151-010-Q1-K1-F9
gtatagaggatcgtctatacagaacagcatgaatatggtcatcgaagtcgtcttttgcctggctctggcagctgccatcgcctctgcaatgcatatgccctgcccctgcgcggggctgcagggcttgtacggcgctggcgccggcctgacgacgatgatgggcgccggcgggctgtacccctacgcggagtacctgaggcagccgcattgcagcccgctggcggcggctccctactacgccgggtgtgggcagacgagcgccatgtaccatccgctccggcaacagtgctgccagcagcagatgaggatgatggacgtgcagtccgtcgcgcatcagctgcagatgatgatgcaacttggagcgtgccgc

SEQ ID NO: 17191 - DNA, 295 bp, Zea mays
  Clone ID: LIB3151-010-Q1-K1-G1
acagaccaagcgtagcgcactagcaacgacctaactgcactggctaccaagatattagccgtccgtgcgcttattgcccttggtgtgagcgcaacagatgcgtccattattacacaatgctcactcgctcatagtgccattattccacagtttctcccaccagtttcttcaatgggcttttaacacctagctgtgcaagccatcatgcaacaacaagcgcttgcggcgagcgtattacaacaaccaattgtacaattgcaacaacaataattgccacatgtaacaatacaagcca

SEQ ID NO: 17192 - DNA, 372 bp, Zea mays
  Clone ID: LIB3151-010-Q1-K1-G10
cccacgcatcctcagacgcgtgcgttgactctaactaccaacatacatagcacaatagaagaccaactattgcacccacaatatcttgcttacttatgctccttgttattcccgcaagtgttgctaccacaaccatttccccacacttctcacaacctcctatacattctcttattgccccatacctttcaccatacctgtctccaatgtctgataacccaattgaacaaccctacatgatacatcacgcaaatcaaacaaccatcttaccattatcaccctcattactacaacaaccgccacacctattacaacacttacctctggaccatcttgtggcacataacatgacggcacaccaactacaacaac

SEQ ID NO: 17193 - DNA, 435 bp, Zea mays
  unsure at all n locations
  Clone ID: LIB3151-010-Q1-K1-G2
gagaccaactagcaacatagaaagcacaatagtgtaccaacaatggcagccaagagatttggcctccttatgctccttggtctttctgcaagtgctgctacagcgaccattttcccgcaatgctcgcaagctcctatagcttcccttcttcccccgtacctctcaccagcggtgtcttcggtatgtgaaaacccaattcttcaaccctacaggatccaacaggcaatcgcagctggcatcttacctttatcacccttgttcctctaacaatcatcatccctattacaacagttacgcnttttggtgcatttattgcacaaaacatcagggcacaacaactacaacaacttgtgcttgcaaaccttgctgcctactctcagcaacagcagtttcttccattcaaccaactaggttcattgaactctgcttcttatt

SEQ ID NO: 17194 - DNA, 412 bp, Zea mays
  Clone ID: LIB3151-010-Q1-K1-G4
cgcttcttgcccttttagtgagcgcaacatatgcgttcattattccacagtgctgacttgctcctagtgccattattccacagttcctcccaccagttacttcaatgggcttcgaacatccagccgtgcaagcctacaggctacaactagcgcttgcggcgagcgtcttacaacaaccaattgcccaattgcaacaaccaatccttggcacatctaaacctacaaaccatcgcaacgcaacagcaacaacagtttctgccatcactgagccacctatccgtggtgaaccctgtcgcccttacttgcaacagcagctacttgcatcacccacttgcttgcgaacgtagctgcataccagcaacaacaacgtctgcaacagtttatgccagcgctcagtcaactagccatggtg

SEQ ID NO: 17195 - DNA, 371 bp, Zea mays
  Clone ID: LIB3151-010-Q1-K1-G5
attttcagcattcataaacacaccaagcgaatcgcactagcaacaacctaacaacaatggggaccaagatattagccctccttgcgcttcttgcccttttagtgagcgcaacaaatgcgttcattattccacagtgctcacttgctcctagtgccattattccacagttcctcccaccagttacttcaatgggcttcgaacatccagccgtgcaagcctacaggctacaactagcgcttgcggcgagcgtcttacaacaaccaattgcccaattgcaacaacaatccttggcacatctatatatcctacaaaccatcgcaacgcaacagcaacaacagtttctgccatcactgagccacctagccgtggtg

SEQ ID NO: 17196 - DNA, 383 bp, Zea mays
  Clone ID: LIB3151-010-Q1-K1-G6
gaccaactagcaacatagaaagcacaatagtgtaccaacaatggcagctaaaatattttggctccttatgctccttggtctttctgcaagtgctgctacggcgaccattttcccacaatgctcacaagctcctatagcttcccttcttcccccgtacctctcaccaacggtgtcttcggtatgtgaaaacccaattcttcaaccctacaggatccaacacgcaatcgcagctggcatcttacctttatcacccttgttcctccaacaatcatcagccctattacagcagttacctttggttgcccatttattggccaaaacatcaggccaacaactcaacaacttgtgctagcaaaccttgctgtctactctcagcaacagca

SEQ ID NO: 17197 - DNA, 378 bp, Zea mays
  Clone ID: LIB3151-010-Q1-K1-G7
gcggccgtcacgcgtcatacccacgcagcgtttccttctcttctccgccgcgtcgcggccgggcatcagcatcggatcgatggagggctgggacaaggggaccaagagcacggtgggcgagatcccgctgctgtcgacgcgcgcgggtccgcgggacggcgaggcgtggcggcagcggctcaaggaggagtaccgcgcgctcatcgtctacaccttggtgaacaaggccaaggacaacgactggttccgcatcgtcgccgccaacccggagggaacccgctgggaggggacctgctggtaaccgttcacaacctccgccgcttgagttcctctcagttcgaatccccgtcgcctacccccaggtagcccccgtgatcg

SEQ ID NO: 17198 - DNA, 334 bp, Zea mays
  Clone ID: LIB3151-010-Q1-K1-G8
gcctgccctagccgctctcccggtcccactcccgcataggcgccgccgccgctacccgcggcccgggcagccggcactcggcaggttcttcccctggcatccggcactcggcttcttcttgccccggctcccggcgcggcggcgcccgctcctcctcccccggtcgcccgctgcaggtcctcccccccgcggcacgcgcccgctggtgcagcctgcagctcccagcccaactggcgattgcagctcctccggtcctccccctgccggcgccggctgcgagctgcacagttgcagcttcccccccctggtggcaactgcacttaacttctgaagc

SEQ ID NO: 17199 - DNA, 395 bp, Zea mays
  Clone ID: LIB3151-010-Q1-K1-G9
gggtcttcagaccattagctttatctactccagagcgcagaagaacccgatcgacaccaagagggtgttgctcgttgccctcgctctcctggctctcgctgcgagcgccacctccacgcatacaagcggcggctgcggctgccagccaccgccgccggttcatctaccgccgccggtgcatctgccacctccggttcacctgccacctccggtgcatctcccaccgccggtccacctgccgccgccggtccacctgccaccgccggtccatgtgccgccgccggttcatctgccgccgccaccatgccactaccctactcaaccgccccggcctcagcctcatccccagccacacccatgcccgtgccaacagccgcatccaagcccgtgccagc

SEQ ID NO: 17200 - DNA, 404 bp, Zea mays
  Clone ID: LIB3151-010-Q1-K1-H11
caactagcaacatagaaagcacaatagtgtaccaacaatggcagccaaaatattttgctggcttatgctccttggtctttctgcaagtgttgctaccgcaaccattttcccacaatgctcacaagctcctatagcttcccttcttcccccatacctctcaccagcggtgtcttcaatgtgtgaaaacccaattgttcaaccctacaggatccaacaggcaatcgcaacaggcatcttaccattatcacccttgttcctccaacaaccgtcagccctattacagcagttacctttggtccatttggtggcacaaaacatcaaggcacaacaactacaacaacttgtgctagcaaaccttgctgcatactctcagcaacatcagtttcttccattcaaccaactgc

SEQ ID NO: 17201 - DNA, 366 bp, Zea mays
  Clone ID: LIB3151-010-Q1-K1-H2
gcaacaacaagaagttcatgttcaacaacaacaacaacaaccgcagcaccaacagcaacagcaacaacagcaccaacaacaacatcaatgtgaaggccaacaacaacatcaccaacaatcacaaggccatgtgcaacaacacgaacagagccatgagcaacaccaaggacagagccatgagcaacaacatcaacaacaattccagggtcatgacaagcagcaacaaccacaacagcctcagcaatatcagcagggccaggaaaaatcacaacagcaacaatgtcattgccaggagcaagccaaacagactacaaggtgcagctataactactatagcagtagctcaaatctaaaaaattgtcatga

SEQ ID NO: 17202 - DNA, 386 bp, Zea mays
  unsure at all n locations
  Clone ID: LIB3151-010-Q1-K1-H3
actggatcaatgcataacatgggtgtaccaattcagcctgtgaaccttgctattagggcaggatctcgtcatcatcccactgaggacccagaggttcaagaagtcgacaggagtcaagtctcaaacaacaagggaaagaagaaggttgcccaacgaggaaagtcattcaccaaggaggaagatagagcaatttgctcagcgtttttgcatgttagcacagatcctattgtatgaactaaccaatctgcagctgggtattatacaagaatgcatcgacacttcatggagaacattggagtgtgnggtagtaataggactaaggtttccatagaaaatcggtggaccacaattcagaaggccgtcaataaattttgtggtttctttgc

SEQ ID NO: 17203 - DNA, 356 bp, Zea mays
  unsure at all n locations
  Clone ID: LIB3151-010-Q1-K1-H6
attagctttatctactccagagcgcagaagaacccgatcgacaccatgagggtgttgctcgttgccctcgctctcctggctctcgctgcgagcgccacctccacgcatacaagcggcggctgcggctgccagccaccgccgccggttcatctaccgccgccggtgcatctgccacctccggttcacctgccacctccggtgcatctcccaccgccggtccacctgccgccgccggtccacctgccaccgccggtccatgtgccgccgccggttcatctgccgccgccaccatgccactacnccnctactaaccgcccggctcagctcatccagcacaccatgncgtgcaacagcga

SEQ ID NO: 17204 - DNA, 388 bp, Zea mays
  Clone ID: LIB3151-010-Q1-K1-H7
gggtcttcagaccattagctttatctactccagagcgcagaagaacccgatcgacaccatgagggtgttgctcgttgccctcgctctcctggctctcgctgcgagcgccacctccacgcatacaagcggcggctgcggctgccagccaccgccgccggttcatctaccgtcgccggtgcatctgccacctccggttcacctgccacctccggtgcatctcccaccgccggtccacctgccgtcgccggtccacctgccaccgccggtccatgtgccgtcgccggttcatcttgcgccgccacccattgccactaccctactaaccgcccggctagcctatcccagcaaccatgccgtgcaacagcgatcagccgtgcactgaggacct

SEQ ID NO: 17205 - DNA, 370 bp, Zea mays
  Clone ID: LIB3151-010-Q1-K1-H8
tgagcattcataaacacaccaagcgaagctcattatcaacaacctaacaacaatggctacggagatattatccctccttgcgcttcttgcgctttttgcgagcgcaacaaatgcgttcattattccacaatgctcacttgctccaagttccattattacacagttcctcccaccagttacttcaatgggcttcgaacacccagctgtgcaagcctataggctacaacaagcaattgcggcgagcgtcttacaacaaccaatttcccagttgcaacaacaatccttggcacatctaacaattatccaaaccatcgcaacgcaacgcaacaacaattcctaccagcactgagccacctagccatggtgaacc

SEQ ID NO: 17206 - DNA, 429 bp, Zea mays
  Clone ID: LIB3151-010-Q1-K1-H9
ttctgttcctccccactcactcctgcgctttctcgccgcgcggttccttctccctgatccgcctttggcttcgcggttcatggcgatgtggagggccgccgctaggcagctggtcgaccgggcgctcggctcaagggccgcgcacacgtctacaggcagcaaaaagatagtcggggtgttctacaaggccggggagtatgccgacaagaaccccaacttcgtcggctgcgtcgagggtgcactcggcatccgcggctggctcgagtcgcagggccatcaatacattgtcaccgatgacaaggaaggccccaactgtgaactggagaagcacattgaagacatgcatgtcctgattaccaccccattccacccagcttatgtcactgcagagaggataaaagaagcgaagaatcttgagcttcttctcac

SEQ ID NO: 17207 - DNA, 422 bp, Zea mays
  Clone ID: LIB3151-011-Q1-K1-A1
ccgaagctcaatcaattgactcaaacctcttccccaaatcttcgattagattctcgttgacaagaagactagaaccgaacctgaccatgtcgctgatccgccgcagcaacgtgttcgatcccttctccctcgacctctgggacccctttgagggcttccccttcggctccggcagcagcagcagtctcttcccctcgttcccgcggaccagctcggagaccgcggccttcgctggcgcgcggatcgactggaaggagactccagaggcgcacgtgttcaaggcagacgtaccggggctgaagaaggaggaggtcaaggtggaggtcgaggacggcaacgttcttcagatcagcggcgagcgcaacaaggagcaggaggagaagactgacaccttgcaccgcgtggagcggagcaacgggaga

SEQ ID NO: 17208 - DNA, 441 bp, Zea mays
  Clone ID: LIB3151-011-Q1-K1-A10
gacgtcagcctagcaattagctcatcgactccagattggagaactcgacaccatgaaggtgctgatcgttgcccttgctctcctggcgctcgctgcgagcgccgcctccagtacaagcggcggctgtggctgccagacaccaccgtttcatctaccgcctccgttctatatgccgcctccgttctatctgccgccgcagcagcagccgcagccatggcaataccccactcaaccaccgcagctaagcccgtgccagcagttcggatcctgcggcgtcggcagcgtcggcagcccgttcctgggccagtgcgtcgagttcctgaggcaccagtgcagcccggcggcgacgccctacggctcgccacagtgccaagcgctgcagcagcagtgctgccaccagatcaagcaagtggagccgctgcaccggtaccaggcgacata

SEQ ID NO: 17209 - DNA, 270 bp, Zea mays
  unsure at all n locations
  Clone ID: LIB3151-011-Q1-K1-A11
gacgatagnctaacattaatctaatcgcctctaaatgggtaactccacaccatgaaagtgctgagtcgtgcccttgttctgctggcgctcgctgccagcgccgcctccagtacaagcggcggctgtggctgccagacaccaccgtttcatctaccgcctccgttctatatgccgcctccgttctatctgccgccgcatcagcagcctcagccatggcaataccacactcaaccaccggagctaatgccgtgccagcagtatggatcctgc

SEQ ID NO: 17210 - DNA, 462 bp, Zea mays
  unsure at all n locations
  Clone ID: LIB3151-011-Q1-K1-A12
gttgccaaagaattccctcccctagccgccgccgacgctcgtctccctgagaggtgccgggaccgacgatgtggccgatttctaggtacagaatcggttttacttgtctcagcccggcgtctgctgcgtctggtggtggtgaaggggagaaattcctgagatctgttccagatcacgcgtgcgagctcgggaatcaagggtttcacacatagctttgtcgatctgaatttgatgtactaatggagtctaagggcggcaaaaagtctagcagtagtcgatctatgatgtatgaagctcctcttggctacagcattgaggacgttcgacctgccggaggcgtgaagaagttccagtctgctgcttactccaactgcgcgaagaaaccatcctgatatccctattggcttnctcattctagtagtttaggatttcttttctgacactgtgattctgaccaatctc

SEQ ID NO: 17211 - DNA, 450 bp, Zea mays
  Clone ID: LIB3151-011-Q1-K1-A3
cactagcaacatagaaagcacaatagtgtaccaacaatggcagccaaaatattttgcctcctgatgctccttggtctttctgcaagtgctgctacggcgaccattttcccgaaatgctcgcaagctcctatagcttcccttcttcccccgtacctctcaccagcggtgtcttcggtatgtgaaaacccaattcttcaaccctacaggatccaacaggcaatcacagctggcatcttacctttatcacccttgttcctccaacaatcatcagccctattacatcagttacctttggtgcatttattggcacaaaacatcagggcacaacaactacaacaacttgtgctagcaaaccttgctgcctactctcagcaacagcagtttcttccattcaaccaactagctgcattgaactctgcttcttatttgcaacaacaacaactaccattc

SEQ ID NO: 17212 - DNA, 324 bp, Zea mays
  Clone ID: LIB3151-011-Q1-K1-A4
gtcactgtccctgcgtacttcaatgatgcgcagaggcaggcaaccaaggatgctggtgtcattgctggcctcaatgttgctaggatcatcaatgagccaactgctgctgctattgcctatggtttggacaagaagggtggcgagaagaacatccttgtctttgaccttggtggtggcacttttgatgtcagtatcttgaccattgacaacggtgtgtttgaggtgctggccaccaatggtgacactcatcttggaggtgaggactttgaccagaggatcatggagtacttcatcaagttgatcaagaaaaagtacagcaaggac

SEQ ID NO: 17213 - DNA, 461 bp, Zea mays
  unsure at all n locations
  Clone ID: LIB3151-011-Q1-K1-A5
gggtaaaagattgatggaaattgccaaaaaggaaggtattcaagctcaagagaatgcaatggaagagcttgctgaaagagtgcacggagatattcgcatggcactcaaccatttgcagtatatgagcctctcccagtctgtggtcaaatatgatgatataaaggagcgacttaatagcagttcaaaggatgaagatatttctccttttactgctgttgacaaactttttggtttcaatggcgggaggttaaggatggatgagagaatggattttggcatgagcgatcctgatttagttcccttgatcatccaggaaaattatatcaattatcggcctaacaccatcggcaaggatgaaagtggagttaaaagaatgaatgctttagcccgggctgctgaatctatagcggacggtgatcttgntaatgtacagataagaagatatcgacagtggcagctgt

SEQ ID NO: 17214 - DNA, 409 bp, Zea mays
  Clone ID: LIB3151-011-Q1-K1-A6
gcattcagaaacacaccaagcgaagcgcactatcaacaacctaacaacaatggcgaccaagatgttatccctccttgcgcttcttgcgctttttgcgagcgcaacaaatgcgtccattattccacaatgctcacttgctcctagttccattattccacagttcctcccaccagttacttcaatggccttcgaacacccagctgtgcaagcctataggctacaacaagcgattgcggcgagcgtcttacaacaaccaattgcccaattgcaacaacaatccttggcacatctaacaatacaaaccatcgcaacgcaacagcaacaacagttcctaccagcactgagccacctagccatggtgaaccctgtcgcctacttgcaacagcagctgcttgcatccaacccactt

SEQ ID NO: 17215 - DNA, 122 bp, Zea mays
  Clone ID: LIB3151-011-Q1-K1-A7
tcgtgtaaaacgaattgcgtaaattggccaaacgatcagaactccatcacaatagggggccatcggggaacttgcttaaatatagcacccgacatcccctctggcaatcaaacgttttgcct

SEQ ID NO: 17216 - DNA, 422 bp, Zea mays
  Clone ID: LIB3151-011-Q1-K1-B1
cattagctttatctactccagagcgcagaagaacccgatcgacaccatgagggtgttgctcgttgccctcgctgtcctggctctcgctgcgagcgccacctccacgcatacaagcggcggctgcggctgccagccaccgccgccggttcatctaccgccgccggtgcatctgccacctccggttcacctgccacctccggtgcatctcccaccgccggtccacctgccgccgccggtccacctgccaccgccggtccatgtgccgccgccggttcatctgccgccgccaccatgccactaccctactcaaccgccccggcctcagcctcatgcccagccacacccatgcccgtgccaacagccgcatccaagcccgtgccagctgcagggaacctgcggcgttggcagcaccccgatcctgg

SEQ ID NO: 17217 - DNA, 394 bp, Zea mays
  Clone ID: LIB3151-011-Q1-K1-B10
ctggacgtcagcctagcaattagctcatcgactccagattggagaactcgacaccatgaaggtggtgatcgttgcccttgctctcctggcgctcgctgcgagcgccgcctccagtacaagcggcggctgtggctgccagacaccaccgtttcatctaccgcctccgttctatatgccgcctccgttctatctgccgccgcagcagcagccgcagccatggcaataccccactcaaccaccgcagctaagcccgtgccagcagttcggatcctgcggcgtcggcagcgtcggcagcccgttcctgggccagtgcgtcgagttcctgaggcaccagtgcagcccggcggcgacgccctacggctcgccacagtgccaggcgctgcaacagcagtgc

SEQ ID NO: 17218 - DNA, 463 bp, Zea mays
  Clone ID: LIB3151-011-Q1-K1-B11
attgagaccaacaagcaacatagaaagtggaatccagtagcaacaatagagcaacaatggagaccaagatattttccctacttatgctccttgctctttctacatgtgttgctaacgcgacaattttccctcaatgctcacaagctcctatagcttccctttttcccccataccttccatcaattatagcttcagtatgtgaaaacccagctcttcaaccatataggcttcaacaagcaatcgcagcaagcaacatacctttatcgcccttgttgtgtcaacaatcgccagccctatctttggtgcagtcattggtccaaaccatcagggcacaacagctgcagcaactcgtgctacctgtgatcaaccaagtagctctggcaaacctttctccctactcttccgaacaacaatttcttccattcaaccaactgtctacactgaaccctgctgcttatttgca

SEQ ID NO: 17219 - DNA, 206 bp, Zea mays
  Clone ID: LIB3151-011-Q1-K1-B12
atgcgtacacacttataatgcatacaatccagatcgcagtttaaacccaccgacaccatgagggcgcggggggcaggttccctctcctggctcttgctgccagcgccaccatgaagcatacatgcggcggctgcgactgacagccaccgaccacgatccatctaccgtcgcccgtgcatctgcgacctccggttcacctggcacct

SEQ ID NO: 17220 - DNA, 361 bp, Zea mays
  Clone ID: LIB3151-011-Q1-K1-B2
ccagattggagaactcgacaccatgaaggtgctgatcgttgcccttgctctcctggcgctcgctgcgagcgccgcctccagtacaagcggcggctgtggctgccagacaccaccgtttcatctaccgcctccgttctatatgccgcctccgttctatctgccgccgcagcagcagccgcagccatggcaataccccactcaaccaccgcagctaagcccgtgccagcagttcggatcctgcggcgtcggcagcgtcggcagcccgttcctgggccagtgcgtcgagttcctgaggcaccagtgcagcccggcggcgacgccctacggctcgccacagtgccaggcgctgcagcaacagtgc

SEQ ID NO: 17221 - DNA, 436 bp, Zea mays
  Clone ID: LIB3151-011-Q1-K1-B3
aagccatcttccttccgcggactagttttttctgaagattcggcgatggcggcgacgatccaatccgtgaaggcgcgccagatctttgacagccgcggcaaccctacagtcgaggtcgacgtgttttgctcagatggaacctttgcaagggcagctgttcccagtggagcatcaactggtgtatatgaagctctggagttgagggatggtggctctgactatttggggaagggtgtctccaaggctgtgaacaatgtgaattctgttattggacctgctctgattggcaaggaccctacagcacagactgagattgataacttcatggttcaacaacttgatgggaccaaaaatgagtggggatggtgcaagcaaaagcttggtgctaatgcgattctggctgtgtcattagctgtttgcaaagctggggctagca

SEQ ID NO: 17222 - DNA, 308 bp, Zea mays
  Clone ID: LIB3151-011-Q1-K1-B4
caacaagcaacatataaagtgcaatccagttctgacaatagagcaacaatggcgaccaagacatgtgcccctccggacgctccttgctctttctgcatgtgttgctaacgcgacaagtttccctgaatgcttacaagctactatagcttgccttctttccccataccttacatcaatgatagcttcaggatgtgaaaacccagctgtataaccctattggctacaacaagcaatcgcagcacgcaacatacctctatcacccttgtgtcaacaatcgtcagccctatgtttggtgcagtcattggtac

SEQ ID NO: 17223 - DNA, 395 bp, Zea mays
  Clone ID: LIB3151-011-Q1-K1-B5
caactagcaacatagaaagcacaatagtgtaccaacaatggcagacaaaatatgttgcttccgtatgctccttggtctttctgcaagtgctgctaccgcaaccattttcccacaatgctcacaagctcctatagcttcctttcttcccccatacctctcaccagcggtgtcttcagtatgtgaaaacccaattcttcaaccctacaggatccaacaggcaatcgcagcaggcatcttacctttatcacccttgttcctccaacaaccgtcagccctattacagcagttacctttggtgcatttgttggcacaaaacatcaaggcacaacaactacaacaacttgtgctaggaaaccttgctgcctactctcagcaacagcaatttctttcattca

SEQ ID NO: 17224 - DNA, 351 bp, Zea mays
  Clone ID: LIB3151-011-Q1-K1-B6
cagaccattagctttatctactccagagcgcagaagaacccgatcgacaccatgagggtgttgctcgttgccctcgctctcctggctctcgctgcgagcgccacctccacgcatacaagcggcggctgcggctgccagccaccgccgccggttcatctaccgccgccggtgcatctgccacctccggttcacctgccacctccggtgcatctcccaccgccggtccacctgccgccgccggtccacctgccaccgccggtccatgtgccgccgccggttcatctgccgccgccaccatgccactaccctactcaaccgccccggcctcagcctcatccccagccacaccca

SEQ ID NO: 17225 - DNA, 431 bp, Zea mays
  Clone ID: LIB3151-011-Q1-K1-B8
ctcgccctccacaccaggccacgccacacactttatatcgagcgggagcgacggcggcggcgggggagctagggttttgatccggcctcgccggctaggctgcgccgccccgacgccgaagccatggacagggagcttctagagacgtttgacgcggccaataaggcggccgacgaggcggcaggggacggcaactcgccggaggctggccgctgcctcgacgcgctgcggcggctgcgcgacattcgcgttaacaccgacattctcgtctcgacgcaggttggcaaacgccttcgaccccttactaagcatcctcactcaagcattcaagcagttgctgcagacctttttgggtactggaaaaaagttgtccttgaagagtcaagaaaaaaaaatggcgggctaaaaaatgaaagatcaagtgactcttt

SEQ ID NO: 17226 - DNA, 439 bp, Zea mays
  unsure at all n locations
  Clone ID: LIB3151-011-Q1-K1-B9
ggtccagcangcgtgcgctggcgncaacaacaaagccatgagcagcaatttcatccactacaacatcatccacaaaaacaagaacattagccaccatcacatcatcaccatcatcatcaacaccaacaacaacatggttacatgcaaccacaaaaacattagctacaacaagaagttcatgttcaacatcaacaacaacaaccgcagcaccaacaacaacaacaactacaacaccaacaacaacatcaatgtgaatgccaacaacaacatcaccaacaatcacaaggccatgtgcaacaacacgaacagagccattagcaacaccaatgacagagccattagcaacaacatctacaacaataccagggtcatgacaatgcatcatcaaccacaacaaccttagcattattagcaaggtcagtaaaaattacaacaacca

SEQ ID NO: 17227 - DNA, 265 bp, Zea mays
  Clone ID: LIB3151-011-Q1-K1-C1
aaggcgaccaactttcagcatataaagcacattaatgatccatctatggccgccaacatattgggccttcttgggctccttgatctttctccaagtgctgctacctcgacccttttgccacattgctcgcaaactcctatacctttccttgttaccctttacctttcaccaacagagtcttctgtattatacaacccaattcttgaacctttcatgatacaacatgtaataccatctggcctcttacctttatcacccttatttt

SEQ ID NO: 17228 - DNA, 347 bp, Zea mays
  Clone ID: LIB3151-011-Q1-K1-C10
ctacatcgcgagcgaccgccctttattctcattttcttcattcgcaccaccaaaggctcagaagggttatgggaaataggataacactcacattgatccacatttcattctacaaagactgagcacagatgtttagtgcattattgcaacgctttgaggatctgctaacatctgaaccaaaggaggccctctgaacggcagctgtcaccgcttttacacttcatcccccgatccgtcgaaccctttgaggccatccaacaccgcacgtgcacgatcatgagcctgcctatccaccgccacaaactataggctcacagcactgaccacggctcatatccagacgatgc

SEQ ID NO: 17229 - DNA, 188 bp, Zea mays
  Clone ID: LIB3151-011-Q1-K1-C11
cgcgggcgcccgatcgacaccatgaggattttgctcatttttctcactttccaggctcaagctgccagcgcgaacttcgcgcatacaaccagcggctacagttgccaaccaccaacttcagttcatctaccgacaccggtgcatttgacaactgcggctcacctgccatctacggagaatctaccaca

SEQ ID NO: 17230 - DNA, 328 bp, Zea mays
  Clone ID: LIB3151-011-Q1-K1-C2
acgcgtccgcaccactgggtcttcagaccattagctttatctactccagagcgcagaagaacccgatcgacggcatgagggggttgctcgttgccctcgctctcctggctctcgctgcgagcgccacctccacgcatacaagcggcggctgcggctgccagccaccgccgccggttcatctaccgccgccggtgcatctgccacctccggttcacctgccacctccggtgcatctcccaccgccggtccacctgccgccgccggtccacctgccaccgccggtccatgtgccgccgccggttcatatgccgtcgccaccatgccacta

SEQ ID NO: 17231 - DNA, 348 bp, Zea mays
  Clone ID: LIB3151-011-Q1-K1-C4
gcagctcaggcaggtggagccgcagcaccggtaccaggcgatcttcggcttggtcctccagtgcatcctgcagcagcagccgcaaagcggccaggtcgcggggctgttggcggcgcagatagcgcagcaactgacggcgatgtgcggcctgcagcagccgactccatgcccctacgctgctgccggcggtgtcccccactgaagaaactatgtgctgtagtatagccgctggctagctagctagttgagtcatttagcggcgatgattgagtaataatgtgtcacgcatcaccatgggtggcagtgtcagtgtgagcaatgacctgaatgaacaattgaaatgaaaag

SEQ ID NO: 17232 - DNA, 451 bp, Zea mays; identical to SEQ ID NO: 17031
  Clone ID: LIB3151-011-Q1-K1-C5

SEQ ID NO: 17233 - DNA, 409 bp, Zea mays
  Clone ID: LIB3151-011-Q1-K1-C6
ccaatccagatcagcaaagcggcagtgcgtatagaggatcgtcgaacagaacagcatgaagatggtcatcgttctcgtcgtgtgcctggctctgtcagctgccagcgcctctgcaatgcagatgccctgcccctgcgcggggctgcagggcttgtacggcgctggcgccggcctgacgacgatgatgggcgccggcgggctgtacccctacgcggagtacctgaggcagccgcagtgcagcccgctggcggcggcgccctactacgccgggtgtgggcagacgagcgccatgtaccagccgctccggcaacagtgctgccagcagcagatgaggatgatggacgtgcagtccgtcgcgcagcagctgcagatgatgatgcagcttgagcgtgccgctgccgtcagcagc

SEQ ID NO: 17234 - DNA, 319 bp, Zea mays
  Clone ID: LIB3151-011-Q1-K1-C7
agcaaagcggcattgcgtatataggatcgtctttcagaacagcatgaagatgggcatccttgggggcgtgtgcctggctctgtcagctgccagcacctctgcaatgcatatgccctgcccctgcgcggggctgcagggcttgtacggcgctggcaccggcctgactaccatgatgggcgccatcgggctgtacccctacgcggactacctgaggcattcgcagtgcattccgctggcggcggcgctctactacgccgggtgtgggcatacgagcgccatgtaccattcgctccggcaacagagctgccagcagcatatg

SEQ ID NO: 17235 - DNA, 363 bp, Zea mays
  Clone ID: LIB3151-011-Q1-K1-C8
tcgatcgacaccatgagggtgttgctcgatgccctttctctcctggctctagatgggagcgccacgtgcacgcatacaagctgcggctgcggctgacagccaccgccgccggttcatctaccgccgccggtgcatttgccacctccggttcacctgccacctccggtgcattttccaccgtcggtccacctgccgacgccggtacacctgccaccgccagtccatgtgccgtcgccggatcatctgtcgtcgccaccatgccactaccctactcaaccgtccctgcctcagccttattctcagccacacccatgcccgtgccaacaaccacatacaagcccttgccaactgcaaggaacctgc

SEQ ID NO: 17236 - DNA, 459 bp, Zea mays
  Clone ID: LIB3151-011-Q1-K1-C9
gagcattcagaaacacaccaagcgaagcacattagcaacaacctaacaacaatggctaccaagatattatccctccttgcgcttcttgcgctttttgcgagcgcaacaaatgcgttcattattccacaatgctcacttgctccaagttccattattacacagttcctcccaccagttacttcaatgggcttcgaacacccagctgtgcaagcctataggctacaacaagcaattgcggcgagcgtcttacaacaaccaatttcccagttgcaacaacaatccttggcacatctaacaatacaaaccatcgcaacgcaacagcaacaacaattcctaccagcactgagccacctagccatggtgaaccctgccgcctacttgcaacagcagttgcttgcatcaaacccacttgctctggcaaacgtagttgcaaaccagccacaacaacagctgcaacag

SEQ ID NO: 17237 - DNA, 343 bp, Zea mays
  Clone ID: LIB3151-011-Q1-K1-D1
ccccaaaattgatttctggatctagtgaagggggtgcggctgtattcaagcttctgtacaatggtcaacctgcttgtttggcacaatcccctcagttatacaagcaaatggctatctctggtggttttgagcgagtatttgaggtcggcccttgtgttagagcagaaaattcaaacacacacaggcatctatgtgagttcgttggtcttgatgcttaaattgaaattaaagagcattattttgaggtctgtgacattataaatggcttattcgtattaatatttaaacacttgtcttaaaacttccagaaagaacctgaatcaataaacaagcagtattcatt

SEQ ID NO: 17238 - DNA, 284 bp, Zea mays
  Clone ID: LIB3151-011-Q1-K1-D10
acccaggcgtccggaagaaactatgtgctgtattatagccgctggctagctagctagttgagtcatttatcggcgatgattgagtgataatgtgtcacgcatcaccatgggtggcagtgtcagtgtgagcaatgacctgaatgaacaattgaaatgaaaagaaaaaagtattgttccataagatagaagataatccccctttcaacaagattgcgtcataaataaaaaggcctataacgaacttgattttcaaaaaatgtggaagtcttgtatgaaaaataaga

SEQ ID NO: 17239 - DNA, 367 bp, Zea mays
  Clone ID: LIB3151-011-Q1-K1-D11
gcgctggcatccgcagagagcttgttttttccattttaccaaaaagcaagttgccccggggcgcaggggaagaagagagcagaggaggatggctcgtacgaagcagaccgcccgcaagtccacgggaggcaaggccccccgcaagcagctcgccaccaaggtccgtccgtctgcccttctctacccgtttcggatccgctgttctgttctctagggttcccttctgagacgcgccggcggttgtgctgtggttgcaggcggcgaggaagtctgcgccgacgaccggcggcgtgaaaaaaccccacaggtacaggcccggaaccgtggcgctgcgcgagatccgcaagtaccaagaagagcacggagc

SEQ ID NO: 17240 - DNA, 404 bp, Zea mays
  Clone ID: LIB3151-011-Q1-K1-D2
caacaagcaacatagaaagtggaatccagtagcaacaatagagcaacaatggcgaccaagatattttccctccttatgctccttgctctttctgcatgtgttgctaacgcgacaattttccctcaatgctcacaagctcctatagcttcccttcttcccccataccttccatcaatgatagcttcagtatgtgaaaacccagctcttcaaccctataggctccaacaagcaatcgcagcaagcaacatacctttatcacccttgtttcaacaatcgccagccctatctttggtgcagtcattggtacaaaccatcagggcacagcagctgcagcaactcgtgctacctgtgatcaaccaagtagctctggcaaacctttctccctactctcagcaacaacaatt

SEQ ID NO: 17241 - DNA, 360 bp, Zea mays
  Clone ID: LIB3151-011-Q1-K1-D3
ggacgaggtaaagacaatggttggagaaatgatgatagaagcaattctgggtttggaagggaaaataacagtggcgatggaccaaaatggggtggtggaggtaattggaacgctacaaatccaccaagtagcagtgtaggcaccaagtcatatggtcaaaatcagcctttcacttggaataattctgaggataacaaaccatctgtaggtgaacaaggtgatccttgggcaagcaaggtgtcttctactgaagatacagaacaacagaatgattcttggtcaagcaagatgatttctggtggtgctgaggataccagtggtggctgggacaccaaggtgaaagactctttctgcaatgat

SEQ ID NO: 17242 - DNA, 353 bp, Zea mays
  Clone ID: LIB3151-011-Q1-K1-D4
cagaaacacaccaagcgaggcgcactaacaacaacctaacaacaatggctaccaagatattatgcctccttgcgcgttgttgcgctttttgcgagcgcaacaaatgcgtgcattattccacaatgctcacttgctcctagttacattattccacagttcctcccaccagttacttcaatggccttcgaacacccagctgtgcaagcctataggctacaacaagcgattgccgcgagcgtcttacaacaaccaattgtccaattgcaacaacaatccttggcacatctaacaatacaaaccatcgcaacgcaacagcaacaacagttcctaccagcactgagccacctaaccat

SEQ ID NO: 17243 - DNA, 440 bp, Zea mays
  Clone ID: LIB3151-011-Q1-K1-D5
cttggccctgctcctctgcaggatatggcaaggcaaattgctacagccaatggccctactggcgataatagggattacctgttctcaatggagaaggcattagccagcattagccacgaagatgattcgatcatagagcttgcaaaccaagtgaaggaaggtcttaaccaaaccaaagggaaccaaaacaattggggccatggcttccttgaaataacttccccttttggggaactgtgcccgccttcacaagggacccgtgtggactcgagataacgagagccttttgacgttggacctctactctgaatttacttccagctcttgcatgtgtgtggccatcatgtactgattttcccttttcaacagttgtcgtgaggctgtatcttctggagttaaaaaatatgctaaaagcccgcactaataatgatattaacttg

SEQ ID NO: 17244 - DNA, 454 bp, Zea mays
  Clone ID: LIB3151-011-Q1-K1-D6
gccataaatgatgtcctaaaggggaacgaagctgatggtagattaccttattggttgtccaaggcctctgcattgctatgccttctccaaagaaatctgcggtcaaatggattattcactaccccgtctcgtcgttctggtggagctctagggaagatagcacaaacattgaggtctccttcaaagtttataggccgcagtgatactctaccacatgttgatgcacggtatccagccatactattcaaacagcagcttactgcatgtgtcgaaaagatatttgggcagctcagagataatctaaaaaaggaaatatcacctcttcttaatgtttgcattcaggcttcaaagtcaacacgtgggcaatctggaaaagcatccaagtcatctagtagttgtgcccacccagcatcgaacttcaactgggacaaaatcgtcaattttcttgacttac

SEQ ID NO: 17245 - DNA, 454 bp, Zea mays
  Clone ID: LIB3151-011-Q1-K1-D7
attttcagcattcagaaacacaccaagcgaagcgcactagcaacaacctaacaacaatggctaccaagatattagccctccttgcgcttcttgcccttttagtgagcgcaacaaatgcgttcattattccacagtgctcacttgctcctagtgccattattccacagttcctcccaccagttacttcaatgggcttcgaacatccagccgtgcaagcctacaggctacaactagcgcttgcggcgagcgtcttacaacaaccaattgcccaattgcaacaacaatccttggcacatctaaacctacaaaccatcgcaacgcaacagcaacaacagtttctgccatcactgagccacctagccgtggtgaaccctgtcgcctacttgcaacagcagctacttgcatccaacccacttgctctggcgaacgtagctgcataccagcaacaacaacg

SEQ ID NO: 17246 - DNA, 299 bp, Zea mays
  unsure at all n locations
  Clone ID: LIB3151-011-Q1-K1-D8
accaagcgaatttacgagcacaaccnaacgcaanggcnagcaagatatagcccnccnagcgccacacgccccnacagagagcgcaacaaangcgnncacnannccacagagcncacncgcncccagngccanaanaccacagaaccncccaccagaaacaacaaggggcgccgaacagccagccgagcaagccgacaggcgacaacaagcgcaagcggcgagcgacaaacaacaaccaanngcccaaaagcaacaacaagccacggcacaacnaaaccaacaaaccaacgcaacgcaac

SEQ ID NO: 17247 - DNA, 358 bp, Zea mays
  Clone ID: LIB3151-011-Q1-K1-D9
ggcgtacgagctcctgcctactatcaccaaaaacaactttttgcataggttcactagaagcaaactgcaccggggtgctgaggaagaacagagcatactacgaccgtttatccagatagacctaccaagagtccattggttgttaagacagccacaagcagctgcccacctacgagcagtctgctgctcttctctacaccttttggatactacgatcttttctgtaatgttgccttctgagacgcaccaaccgatgtgctgccgttgaacgccacatggtagttggcgccctctatcagattgctgattaatccccacaagttcatgaccggaaccggatgacttatctagatcccca

SEQ ID NO: 17248 - DNA, 304 bp, Zea mays
  Clone ID: LIB3151-011-Q1-K1-E1
cgaccgatcgatcgtcacagtcaacaccaccctccgaggcgactcgacagccgccaggaggaaggaataaactggctgccagccagtgaagggggagaagtgtactgctccgtcgaccagtgcgcgcaccgccctgctgggctgctcatcttgtctacgaccagtggattaatcggcatggcggctctggccacgtagtagtttgtcgcaacgcccgccggcctgggcattccggacgcgtacacgtttcgccgaggcgtcgttcaagacctgaggggggcccgtgcgtcggaggctggggaca

SEQ ID NO: 17249 - DNA, 186 bp, Zea mays
  Clone ID: LIB3151-011-Q1-K1-E11
tcctggctctcgctccgagccccaccttcacgcatacaagctgtgcgtgcggctgccagcaaccgacgccccctcatctactccagcccgtgcttctcccaccttccgttcacctgccaactacggagcatctcccaccgcccgtccatctacccgcgctggtgcaccctccactggtgctccatt

SEQ ID NO: 17250 - DNA, 442 bp, Zea mays
  unsure at all n locations
  Clone ID: LIB3151-011-Q1-K1-E12
gaccacgcgtccggtattntgcaccatgcatcacaaaacatccttctatcagtaccatcaatcatcattcatcttagtagtataggcaccaaatcaaatctgcaacatcaattatctaactccaaaacccatgaacctgtgcctgggggtcttgctttcattgctttagtatcaagtgtttcttgtacacagacaggcggctgcagctgtggtcaacaacaaagccatgagcagcaacatcatccacaacaacatcatccacaaaaacaacaacatcaaccaccaccacaacatcaccagcagcagcaacaccaacaacaacaagttcacatgcaaccacaaaaacatcagcaacaacaagaagttcatgttcaacaacaacaaccacaaccgcagcaccaacaacaacaacaacaacagcaccaacaacaacatcaatgtg

SEQ ID NO: 17251 - DNA, 394 bp, Zea mays
  Clone ID: LIB3151-011-Q1-K1-E2
gtgttgaagagctcctcaacatgatggatccggccttgcttgacgacgtcatacgccggctgctggaggtgaggaatctcaagcctgggaagaacgcgcagttgtcggagtcggagatcaagcagctctgcgctgccgccaaggagatcttcctgcaccagcccaacctgctggagctcgaggcgcccatcaaaatctgcggtgatgtccatggccagtactctgatctcctgaggctattcgattatggtggctatccgcctcaggccaactaccttttcttgggtgattatgtggatcgtggaaagcaaagcttggaaacaatatgtcttcttttggcctacaaggtcaagtacccagaaaacttctttcttctaaggggcaaccatgaatg

SEQ ID NO: 17252 - DNA, 383 bp, Zea mays
  Clone ID: LIB3151-011-Q1-K1-E3
aagcaacatagaaagtggaatccagtagcaacaatagagcaacaatggcgaccaagatattttggctccttatgctccttgctctttctgcatgtgttgctaacgcgacaattttccctcaatgctcacaagctcctatagcttcccttcttcccccataccttccatcaatgatagcttcagtatgtgaaaacccagctcttcaaccctataggctccaacaagcaatcgcagcaagcaacatacctttatcacccttgtttcaacaatcgccagccctatctttggtgcagtcattggtacaaaccatcagggcacagcagctgcagcaactcgtgctacctgtgatcaaccaagtagctctggcaaacctttctccctac

SEQ ID NO: 17253 - DNA, 395 bp, Zea mays
  Clone ID: LIB3151-011-Q1-K1-F1
attgagaccaactagcaacatataaagcacaatagtgtaccaacaatggcagccaaaatatttggcttccttatgctccttggtctttctgcaagtgctgctaccgcaaccattttcccacaatgctcacaagctcctatagcttcctttcttcccccatacctctcaccagcggtgtcttcagtatgtgaaaacccaattcttcaaccctacaggatccaacaggcaatcgcagcaggcatcttacctttatcacccttgttcctccaacaaccgtcagccctattacagcagttacctttggtgcatttgttggcacaaaacatcaaggcacaacaactacaacaacttgtgctaggaaaccttgctgcctactttcaacaacagcagttttt

SEQ ID NO: 17254 - DNA, 448 bp, Zea mays
  unsure at all n locations
  Clone ID: LIB3151-011-Q1-K1-F12
cgcggggctagatcgcgagcgccctcccttaattttttttaactctttacccttttctattaaaccagacttcctaagaaaattttcaaatcttttttcactctaccaacnggcttcattgaactcttctgcatattttcaacaacaactaccattcattcatttaactgctacctacccccaacaattttttccattcaaccaactttcatcatttaactcttcttcttatttacaacaacaacatctaccaccattcactcatctatcttaatttaaccctatttccttttttacacaacaacaatttgtttcctttctaacttcacactactcctaactctatcacccttttacaactgtttcaaattacttccattcaaccaactttcttttacaaacccaacatcgttctaccaacaacccatcatttgtaatgccctctttt

SEQ ID NO: 17255 - DNA, 363 bp, Zea mays
  Clone ID: LIB3151-011-Q1-K1-F3
cgggcgacccacgcgtccgcgataggggacagcgtgtttctgcaaccacatatccatgagccacaacactccttggctcaggtacctatactgaccattttaacgcagcgacccacaacaatatgtactgcactgagccagctagctatggtgaaccctggcgcactacttgcgccatcattgactatgtatcgaacccagtatctccgtcgaacgtagttgcaaaccgagcacagaaacaaatgcaccagtgtctggcagcgcttactcaacttgccatggtgaaccctgccggctacctacaacagcaacaactgctttaatctagcccgctcgctgtggccaatgcacctacatacctgc

SEQ ID NO: 17256 - DNA, 266 bp, Zea mays
  Clone ID: LIB3151-011-Q1-K1-F4
cgtccggtgccgtgcccctaactgatactgacacatctggcctacattacacgatcccgcccgctaggggcctttcgggggcattttatatcttgtactctcttcaccagatatgaccattttgcaattagaatttgaagcccttaactcgataatcccgttacaagtgcatctgtattcactgaccatattagctttctttagattgcttctcaactgccaagcttcatacaatccagtccaccgtcttgttgattgattaaaca

SEQ ID NO: 17257 - DNA, 287 bp, Zea mays
  Clone ID: LIB3151-011-Q1-K1-F5
gaccaactagcaacatagaaagcacaatagtgtaccaacaatggcagccaaaatattttgcctgcttatgctccttggtctttctgcaagtgctgctacggcgaccattttcccacaatgctcacaagctcctatagcttcccttcttcccccgtacctctcaccagcggtgtcttcggtatgtgaaaacccaattcttaaccctataggatccaacaggcaatcgcagctggcatcttacctttatcacccttgttcctccaacaatcatcagccctattacagca

SEQ ID NO: 17258 - DNA, 445 bp, Zea mays
  Clone ID: LIB3151-011-Q1-K1-F6
attgataccaactagcaacatacatagtgaagtacactagcaacatcttagcaccaatgggagccaagatttttgccctccttgccctccttgctctttcagcaagcgctgctacctcgacttttattccacaatgctcacaacaatacctctctccggcgacagccgtgggatttcaatacccaactatacaatcctacatggtacaagaggccatccaagcaagcatcttacggtcattagcattaaccctccaacaaccatatgctctattgcaacagccatccttagtgcatctgtatctccaaagaatcgcggcacaacaactacaacaacagttgctaccaacaatcaatcaagtagttgcagcgaaccttgctgcttacctccagcaacaacagtttctttcattcaatcaactagatggggtgaaccctgctatcta

SEQ ID NO: 17259 - DNA, 415 bp, Zea mays
  Clone ID: LIB3151-011-Q1-K1-F7
gcatttattggcacaaaacattagggcacaacttctacaacaacttgtgctagcaaaccttggggcctactctcagcaacagcagtttctttcattcaaccaactagctgcattgaactctgcttcttatttgcaacaacaacaactaccattcagccagctacctgttgcctacccccagcaatttcttccattcaaccaactggcagcattgaactctcctgcttatttacagcagcaacaactactaccattcagccagctagctggtgtgagccctgctacctttttgacacaaccacagttgttgccgttctaccagcacgctgtgcctaacgctgcaccccttttacaactgcaacaatttgctgccatttaaccaacttgctttgacaaacctagcagtggttttacc

SEQ ID NO: 17260 - DNA, 460 bp, Zea mays
  Clone ID: LIB3151-011-Q1-K1-F8
caacaagcaacatagaaagtggaatccagtagcaacaatagagcaacaatggcgaccaagatgggttccctccttatgctccttgctctttctgcatgtgttgctaacgcgacaattttccctcaatgctcacaagctcctatagcttcccttcttcccccataccttccatcaatgatagcttcagtatgtgaaaacccagctcttcaaccctataggctccaacaagcaatcgcagcaagcaacatacctttatcacccttgtttcaacaatcgccagccctatctttggtgcagtcattggtacaaaccatcagggcacagcagctgcagcaactcgtgctatctgtgatcaaccaagtagctctggcaaacctttctccctactctcaacaacaacaatttcttccattcaaccaactgtctacattgaaccgtgctgcttatttgcagcaacaac

SEQ ID NO: 17261 - DNA, 331 bp, Zea mays
  Clone ID: LIB3151-011-Q1-K1-F9
ggcgggcgcagaggggagaactcgacaccatgaaggtgcttatcgttttccttgctctcctggcgctcgcggggagctcgacctccattacaagcggcggctgttgctgccagacaccaccgtttcatctaccgcctccgttctatatgccgcctccgttctatctgccgccgcagcagcagccgcagccatggcaataccccactcaaccaccgcagctaagcccgtgccagcagttcggatcctgcggcgtcggcagcgtcagcagcccgttcctgggccagtgcgtcgagttcctgaggcaccagtgcagcccggcggcgacgcccta

SEQ ID NO: 17262 - DNA, 353 bp, Zea mays
  unsure at all n locations
  Clone ID: LIB3151-011-Q1-K1-G12
ggtcgacnacgcgtccgcttgtttttatagcagcagttttcgcgcggttttgaattcccgtaggatttgagagcggttcggagcgtttaggagatgataataaagcggttggcggggaatattgatatgccggcagggagcggggccccagcgcttgcgcggcagggctcggtctactctctcacggtcgacgaggtctggcgcgagatcgtgagcctcaccagcggcgaggacgcgcagcaagttgcgggttccgcttccgctcccgcgcccgagcccgagcccgagcccgcgcccgcgcccgcgccgttttcggcgcatgcgcatgcgcagcaaacgctggggtccatgac

SEQ ID NO: 17263 - DNA, 364 bp, Zea mays
  Clone ID: LIB3151-011-Q1-K1-G2
attttgagcattcagaaacacaccaagcgaagcacattagcatcaacctaacaacaatggctaccaagatatggtccctccttgcgcttcttgcgctttttgcgagcgcaacaaatgcgttcattattccacaatgctcacttgctccaagttccattattacacagttcctcccaccagttacttcaatgggcttcgaacacccagctgtgcaagcctataggctacaacaagcaattgctgcgagcgtgttacaacaaccaatttcccagttgcaacaacaatgcttggctcatctaacaatacaaactatcgcaacgcaacagcaacaacaatttctaccagcactgagccacctagccat

SEQ ID NO: 17264 - DNA, 375 bp, Zea mays
  unsure at all n locations
  Clone ID: LIB3151-011-Q1-K1-G3
gcaacatagaaagcacaatagtgtaccaacaatggcagccaaaatattttgcctccttatgctgcttggtattgctgcaagtgctgctacggcgaccattttcccgcaatgctcacaagctcctatagcttcccttcttcccccgtacctctcaccagcggtgtcttcggtatgtgaaaacccaattcttcaaccctacaggatccaacaggcaatcgcagctggcatcttacctttatcacccttgttcctccaacaatcatcagccctattacagcagntacctttggtgcatttattggcacanaacatcagggcacaacaactacaacaaacttgtgctagcaaaccttgctgnctactctcagcaacagc

SEQ ID NO: 17265 - DNA, 351 bp, Zea mays
  Clone ID: LIB3151-011-Q1-K1-G4
gaccattagctttatctactccagagcgcagaagaacccgatcgacaccatgagggtgttgcgggttgccctggctctcctggctctcgctgcgagcgccacctccacgcatacaagcggcggttgcggctgccagccaccgccgccggttcatctaccgccgccggtgcatctgccacctccggttcacctgccacctgcggtgcatcttccaccgccggtccacctgtcgccgccggtccacctgccaccgccggtccatgtgccgccgtcggttcatctgccgtcggcaccatgccactaccctactcaaccgccccggcctcaacctcatccccagccacacccatg

SEQ ID NO: 17266 - DNA, 457 bp, Zea mays
  Clone ID: LIB3151-011-Q1-K1-G5
attttgagcattcagaaacacaccaagcgaagcgcactagcaacaacctaacaacaatggctagcaagatattatccctccttgcgcttcttgcgctttttgcgagcgcaacaaatgcgtccattattccacaatgctcacttgctcctagttccattattccacagttcctcccaccagttacttcaatggccttcgaacacccagctgtgcaagcctataggctacaacaagcgattgcggcgagcgtcttacaacaaccaattgcccaattgcaacaacaatccttggcacatctaacaatacaaaccatcgcaacgcaacagcaacaacagttcctaccagcactgagccacctagccatggtgaaccctgtcgcctacttgcaacagcagctgcttgcatccaacccacttgctctagcaaacgtagttgcaaaccagcaacaacaacaact

SEQ ID NO: 17267 - DNA, 381 bp, Zea mays
  unsure at all n locations
  Clone ID: LIB3151-011-Q1-K1-G6
ggcgttcccaccccttgccacctcgcccgctcccggctcctccccctcgcccgtcctgctctggtcgcggcggagccgcagatctgggccacgagtgccagcccagccggcgggcggcgggacggagggctgcgggatgaagtcgtcgttgaggagccggcaggagccgcggcgggcagcaacggcgtcatcatcggcgccatgctgctatccctctgcgtctagcatcgtcaaggccagatactgcgccacccccttcggcaaggccgaggacagctccaggagcagatgaactccagcatccggatggagccggaggagtcgtcgccggccaggacgcccggagaggaggaggaggaagacgactganagaatggggcg

SEQ ID NO: 17268 - DNA, 404 bp, Zea mays
  Clone ID: LIB3151-011-Q1-K1-G7
caacaagcaacatagaaagtgtaatccagtatctacaatagagcaacaatggcgaccaagatgggttcccttcttatgctccttgctctttctgcatgtgttgctaacgcgacaattttccctcaatgctcacaagctcctatagcttcccttctttccccataccttccatcaatgatagcttcagtatgtgaaaacccagctcttcaaccctataggctccaacaagcaatcgcagcaagcaacatacctttatcacccttgtttcaacaatcgccagccctatctttggtgcagtcataggtacaaaccatcagggcacagcagctgcagcaactcgtgctacctgtgatcaaccaagtagctttggcaaacctttctccctactcttaacaacaacaatt

SEQ ID NO: 17269 - DNA, 463 bp, Zea mays
  Clone ID: LIB3151-011-Q1-K1-G8
caacaagcaacatagaaagtggaatccagtatcaacaatagagcaacaatggcgaccaagatggtttccctccttatgctccttgctctttctgcatgtgtggctaacgcgacaattttccctcaatgctcacaagctcctatagcttcccttcttcccccataccttccatcaatgatagcttcagtatgtgaaaacccagctcttcaaccctataggctccaacaagcaatcgcagcaagcaacatacctttatcacccttgtttcaacaatcgccagccctatctttggtgcagtcattggtacaaaccatcagggcacagcagctgcagcaactcgtgctacctgtgatcaaccaagtagctctggcaaacctttcttcctactctcagcaacaacaatttcttccattcaaccaactgtctacattgaaccgtgcttgttatttgcagcaacaactat

SEQ ID NO: 17270 - DNA, 459 bp, Zea mays
  Clone ID: LIB3151-011-Q1-K1-G9
cacatagaaagttgaatacagtaacttcaatacttcaacaatggcggccaagatatgttccattgttatgctcctagctctctctgcatgtgttgctaacgcgaccattcttcctcaatactcacaagctcctatagctgcccttcttccctcataccttccatcaatgaccgcttcattatgtgaaaacccagcccttcaaccctacatgctccaacaagcaatcgcaacatgcaacttacctttatcacccctgttctttcaacaatcgccagccctatctttggtgcagtcattggtacaaaccatcacggcacaacagcttcagcaactcatgctaccaatgatcagacaagtagcttttgcaaaactatctccctactctcatcaacaacaatttctttcattcaaaccaatgtctacacttaaccctgcttgttattttcaacaacaacaact

SEQ ID NO: 17271 - DNA, 257 bp, Zea mays
  Clone ID: LIB3151-011-Q1-K1-H10
tattcaattcagctgttttacaccgcattacatacccatcattcattaagatccgctcgtaaccatcctcaaattaatataccaccttctctacataaaatacagatgccacttccttctttaccttatctctaacacgaaagagtttgaattacttgctcattctataccatgtcttgcgccagactcttcaacctcaccaccccataaaactctcctcatgttcttgctaaccctttccattccctgccttatcc

SEQ ID NO: 17272 - DNA, 289 bp, Zea mays
  Clone ID: LIB3151-011-Q1-K1-H11
caacaatagaccaacaactgtgactttataaattttcccaccaaaacctccttccccgtgctgtgtgtgtttttaaccctacattttctcctcattctcacaaactcctataacttacattcttatcccatacctttcataaatgatagcttcagtttataaaaacccagctattcaatcctaatgctccaacactcaatcgctgcaagcaacatacatctatcatccttctgtcaacaatcgtcaaccctatatttacagcagatatatctacacaccatcatctcac

SEQ ID NO: 17273 - DNA, 239 bp, Zea mays
  Clone ID: LIB3151-011-Q1-K1-H12
ccaaaaccacctatctcacccctcctcctttttttcacgtcccccgcctctatgcgatcgggtgcgggtctatgggcatgggaatgtcctcctccttgcactcatcttcggccacggctcaccaccagcaatattacccgcggcagacaggacggagcagtctcgtgccgctcgccgcgctcatcaaggatgaggcccgcactgagcgccaatccatacactgcggcgaaagcaggatc

SEQ ID NO: 17274 - DNA, 417 bp, Zea mays
  Clone ID: LIB3151-011-Q1-K1-H2
cgtccgttagctttatctactccagagcgcagaagaacccgatcgacaccatgagggtgttgctcggggccctcgctggcctggctctcgctgcgagcgccacctccacgcatacaagcggcggctgcggctgccagccaccgccgccggttcatctaccgccgccggtgcatctgccacctccggttcacctgccacctccggtgcatctcccaccgccggtccacctgccgccgccggtccacctgccaccgccggtccatgtgccgccgccggttcatctgccgccgccaccatgccactaccctactcaaccgccccggcctcagcctcatccccagccacacccatgcccgtgccaacagccgcatccaaacccgtgccagctgcagggaacctgccgcgttggcagcaccc

SEQ ID NO: 17275 - DNA, 356 bp, Zea mays
  Clone ID: LIB3151-011-Q1-K1-H3
attgagaccaactagcaacatagaaagcacaatagtgtaccaacaatggcagccaaaatatttggcctccttatgctccttggtctttctgcaagtgctgctacggcgaccattttcccgcaatgctcgcaagctcctatagcttcccttcttcccccgtacctctcaccagcggtgtcttcggtatgtgaaaacccaattcttcaaccctacaggatccaacaggcaatcgcagctggcatcttacctttatcacccttgttcctccaacaatcatcagccctattacaacagttaccttttgtgcatttattggcacaaaacatcagggcacaacaactacaacaacttgtgct

SEQ ID NO: 17276 - DNA, 378 bp, Zea mays
  Clone ID: LIB3151-011-Q1-K1-H5
gctagctactgcctactctcaacaacaacaacttcttccatttaaccaattggccgcactgaaccccgctgcttatttgcagcagcaaatactactaccatttagccagctagctacagcaagccgtgcttccttcttgacacaacaacagttgctgccgttctaccagcagtttgcggctaaccccgcaaccctcttacaactacaacaattgttgccctttgtccaacttgctttgacaaacccagcagcctcctaccaacaacacatcattggtggtgccctcttttagattgcttattagatgtaattcaataataaagttttttggatgatgtatgtggccaaccagaaataaaaagttacatttccagattc

SEQ ID NO: 17277 - DNA, 372 bp, Zea mays
  Clone ID: LIB3151-011-Q1-K1-H6
tgagcattcataaacacaccaagcgaagcgcactatcaacgacctaacaacaatggctaccaagatattagctccttcttgcgcttcttgccctttttgtgagcgcaacaaatgcgttcattattccacaatgctcacttgctcctagtgccattattccacagttcctgccaccagttacttcaatgggcttggaacacctagctgtgcaagccaacatgcaacaacaagcgcttgcggtgagcgttttacaacaaccaattgtccaattgcaacaacaatccttgccacatctaacaatacaagccattacaacgcaacagcaacaacagtttctaccagcactgagccacctagccatggagaaccctg

SEQ ID NO: 17278 - DNA, 426 bp, Zea mays
  Clone ID: LIB3151-011-Q1-K1-H7
atcgacaccatgagggtgttgctcgctgccctcgctctcctggctctcgctgggagcgccaccggcacgcatacaagcggcggctgcggctgccagccaccgccgccggttcatctaccgccgccggtgcatctgccaccttcggttcacctgccacctgcggtgcatatcccaccgccggtccacctgccgacgccggtccacctgccaccgccggtccatgtgccgccgtcggtgtcatctgccgacgacaccatgccactaccctactcaaccgtcccgggctcagtctcattctcagacacacccatgcccgtgccaacagacgaatccaagcccgtgccagctgcatggaacctgcggagtttgcagcacccctatcctaggccagtgcgtcgagcttctgaggcattagtgcaaaccgac

SEQ ID NO: 17279 - DNA, 419 bp, Zea mays
  Clone ID: LIB3151-011-Q1-K1-H8
accaacaatggcatacaatttattttgcctccttatgctcgttggtatttgtgcaagtgctgctacagctaccatttttccgcaatgctcacaagctcctatagcttaccttcttcccccgtacctctcaccagcggtgtcttctgtatgtgaaaacccaattcttcaaccctacaggatccaacaggcaatcgcagctggcatcttacctttatcacccttgttcctccaacaatcatcagccctattacagcagttacctttggtgcatttattggcacaaaacatcagggcacaacaactacaacaacttgtgctagcaaaccttgctgtctactcttagcaacagcagttttcttcattcaaccaactagctgcattgaactttgctttttaattgaacaacaacaactaccatt

SEQ ID NO: 17280 - DNA, 314 bp, Zea mays
  Clone ID: LIB3151-011-Q1-K1-H9
caattttccttccaaaaaccctaccaaagaaattttggaaattttaatactcccttctcctcttccccttttaacaaacacaaccaaatctttccttttttcccaaagctcaatatcttccaaaaccattatttcacaattgcttacaccatttacttcaattgccctccaacaccccactttccaaacccaattcctacaacaaactattctcctcaacctttttacataaaacaaataccccatttctacaactattccttttatattctaacatacaaaccatcccaacgcaataattacaacagttccta

SEQ ID NO: 17281 - DNA, 308 bp, Zea mays
  Clone ID: LIB3151-012-Q1-K1-A1
ggacgaaatctgacccgggccacactccgctgctccgccatggcgatccgctccaaggcctggatctcgctgctgctcgcgctgaccgtcgctctctccgcccgggcggaggaggagcccgccgccgcggcggagggcgaggccgtgctcaccctcgacgtcgacagcttcgacgaggccgtcgccaagcaccccttcatggtcggcgagttctacgccccctggtgtgggcactgcaagaaacttgctccagagtatgagaatgcggccaaggcacttagcaagcatgacccaccgattgttctcgc

SEQ ID NO: 17282 - DNA, 468 bp, Zea mays
  unsure at all n locations
  Clone ID: LIB3151-012-Q1-K1-A10
ccaactagcaacatagaaagcacaatagtgtaccaacaatggcagccaaaatattttgcctccttatgctccttggtatttctgcaagtgctgctacggcgaccattttcccgcaatgctcacaagctcctatagcttcccttcttcccccgtacctctcaccagcggtgtcttcggtatgtgaaaacccaattcttcaaccctacaggatccaacaggcaatcgcagctggcatcttacctttatcacccttgttcctccaacaatcatcagccctattacagcagttacctttggtgcatttattggcacaaaacatcagggcacaacaactacaacaacttgtgctagcaaaccttgctgcctactctcagcaacagcagtttcttccattcaaccaactagctgcattgaactctgcttcttatttgcaacaacaacnaactaccattcagccagctacctgtg

SEQ ID NO: 17283 - DNA, 455 bp, Zea mays
  Clone ID: LIB3151-012-Q1-K1-A11
ccaactagcaccatacaaagcacaatagtgtactcaacaacggcagccaaaatattgtgcctcggtgatgctccttggtatttctgcaaatgcctctaccgccaacattttcccgcaatgctcacaagcttctatatactttccttttttccccgcacctcttaacacccgtgtgttttgtgtgtgaaaaacccccttttttaacctccatgatatccacacgcgatttcaggtgtgggatttttctttttaacccactttttctctcacaaaaaaaatatccttttttaaaaaatatccttcttttgggtttttttgggcacaaaaaaaagggggaccacaacaaccaacaacattttgtgctaaacaattttttgtttttttttttaaaaaaaagtatttttttttatacaaaccaattagctggataaaactttttttttttatttggaaaa

SEQ ID NO: 17284 - DNA, 446 bp, Zea mays
  Clone ID: LIB3151-012-Q1-K1-A12
ctgggtcttcagaccattagctttatctactccagagcgcagaagaacccgatcgacaccatgagggtgttgctcgttgccctcgctctcctggctctcgctgcgagcgccacctccacgcatacaagcggcggctgcggctgccagccaccgccgccggttcatctaccgccgccggtgcatctgccacctccggttcacctgccacctccggtgcatctcccaccgccggtccacctgccgccgccggtccacctgccaccgccggtccatgtgccgccgccggttcatctgccgccgccaccatgccactaccctactcaaccgccccggcctcagcctcatccccagccacacccatgcccgtgccaacagccgcatccaagcccgtgccagctgcagggaacctgcggcgttggcagcaccccgatcctggcccagtgcgt

SEQ ID NO: 17285 - DNA, 91 bp, Zea mays
  Clone ID: LIB3151-012-Q1-K1-A2
ggacaaaatatgaacccggaccacactacgctgctccgccatggcaaaaccgctccaaggactggagctagatggtggtcgcgctgaccgg

SEQ ID NO: 17286 - DNA, 448 bp, Zea mays
  Clone ID: LIB3151-012-Q1-K1-A3
gcgcccacgcgtccgagaccaactagcatcatataatgcacaatattgtaccaataatggcagccaaaatattttgcctcattatgctccttggtctttctgcaagtgctgctacggcgagcattttcccgcaatgctcacaagctcctatatcttcccttcttcccccatacctctcaccaacgatgtcttcagcatgtgaaaatccaattcttctaccctacacgatccaacaggcaatcgcagcgaggcatcttacctttatcacccttgttcctccaacaatcatcaggcctattacagcagttaccttttgtgcatttattagcacaaaacaatcaggcacaacaacttccaaaacctgtgccaacaaaactttattgctaatattaacaacaaccgttaccttaagtgcatttgatggcacaaaacattaaggcgcaacaac

SEQ ID NO: 17287 - DNA, 427 bp, Zea mays
  Clone ID: LIB3151-012-Q1-K1-A4
gggtcttcagaccattagctttatctactccagagcgcagaagaacccgatcgacaccatgagggtgttgctcgttgccctcgctctcctggctctcgctgcgagcgccacctccacgcatacaagcggcggctgcggctgccagccaccgcctgcggttcatctaccgccgccggtgcatttgccacctacggttcacctgccacctactgtgcatcttccaccgtcggttcacctgccgacgccggtccacctgccaccgacggtccatgtgccgccgccggttcatctgccgccgccaccatgccactaccctactcaacgcgcccggccttaaccttattcccagacacacccatgcccgtgccaacagccgcattcaaacccgtgccagctgcagggaacctgcggcgttggcagcaccccg

SEQ ID NO: 17288 - DNA, 291 bp, Zea mays
  Clone ID: LIB3151-012-Q1-K1-A5
ctcaagactctaactatgatattagcacaacaatagtgacattgaataaccatgccttggctctagaggagcgttcaaaggcagaaattgttcacagtgctgagattggccagtttgcagcaggaatccttccccaaaaatctgaactgtctaactgtgaaactgacagaggacggggttcggaacctgaagcatacgagtcactcataggagaaccgtgattgcacactgatgggggataataatctgtaccatatccgtatatcctctgataacgtgctggccacttca

SEQ ID NO: 17289 - DNA, 472 bp, Zea mays
  Clone ID: LIB3151-012-Q1-K1-A6
gcaagtccagtgagagagggagagcggcgagaggatggctgggatggcatcgctgcagggcgccatggcgtcgctctccatctccgcgctaggcgcggcgacggcgagcagcagcagcttctggggcaaccggctcgccacctactccgcgccgcagcctggggtaaggtgtatggtcaagatatgcccaattgaaatgagacttaagagatgggagcgaaagaagtgtaaaccaaacagtcttcctgtgctgcacaagatgcatgttaggatcggggacacggtacaggttattgcaggccgtgagaaaggaaaggtcggagaagtcacacgccttttcaagcacaacagcacggtgatcgtgaaggacctgaacttgaagtcgaagcacaagaaaggcacagacgatgaacccggtgaaatcgtcatgattgaaggccccattcatagctcaaatgtgatgctctactct

SEQ ID NO: 17290 - DNA, 474 bp, Zea mays
  Clone ID: LIB3151-012-Q1-K1-A7
atcacatcgccatggcagccaagatgtttgcattgtttgcgctcctagctctttgtgcaaccgccactagtgctacccatatcccagggcacttgtcaccactactgatgccattggctaccatgaacccatggatgcagtactgcatgaagcaacagggggttgccaacttgctagcgtggccgaccctgatgctgcatcaactgttggccttaccgcttcagccgtgccagatgccaatgatgatgccaggtatgatgccaccgatgacaatgatgccgatgccgaatatgatgccatcgatgatggtgccgactatgatgtcaccaataacgatagctagtatgatgccaccgatgatgatgccaaacatggtttcaccaatgatgatgccgagtatgatgccttcgacgatgacgccgagtatgatgccaccgataatgatgccaagtatgataccaccgatgatgatgc

SEQ ID NO: 17291 - DNA, 343 bp, Zea mays
  Clone ID: LIB3151-012-Q1-K1-A8
atccaatccatatcagaacaacggtagcgcgatgagaggatcgcagaacacaacgggatgaagagggtcattgttctccttgggcgcctggctatgccagatgccaacgccaatgcgctgcagaggccctgcgcttgcacggggctgcagggcttgtacggctgtggagccagagtgactaaaatgatgggcagccactggatgtacccctacgcggcagaactgagggacacacagcggataccaggtgcggaggggccctactaccccagctgtggacagaccaacgtcatgtaccatccgctcaggtacagggctgacacagcagatgaggatgatggac

SEQ ID NO: 17292 - DNA, 212 bp, Zea mays
  unsure at all n locations
  Clone ID: LIB3151-012-Q1-K1-A9
cggntgtcaaacaattacctcccttttccaccgtttacgctcgaactccacacaaggggcgtgatggtcgatttcgccgctctcttggtacacaatctgatctacttctctcagacaagcgtctgctgcgtctgccagacaccaacgttatatataccggatacctgctatataccaggtgcgctatctctgccatcatagtattaacacat

SEQ ID NO: 17293 - DNA, 342 bp, Zea mays
  Clone ID: LIB3151-012-Q1-K1-B1
gcaattagctcatcgactccagattggagaactcgacaccatgaaggtgctgatcgttgcccttgctctcctggcgctcgctgcgagcgccgcctccagtacaagcggcggctgtggctgccagacaccaccgtttcatctaccgcctccgttctatatgccgcctccgttctatctgccgccgcagcagcagccgcagccatggcaataccccactcaaccaccgcagctaagcccgtgccagcagttcggatcctgcggcgtcggcagcgtcagcagcccgttcctgggccagtgcgtcgagttcctgaggcaccagtgcagcccggcggcgacgcccta

SEQ ID NO: 17294 - DNA, 379 bp, Zea mays
  Clone ID: LIB3151-012-Q1-K1-B10
gttttaaagaaaaaaaaactttattatgatgcatatattattggtcataccacacatgataatgtgtgtcgtcttactgcattattacatatatagatagagagggatggatagaggagatttcccaaatatcatgaatcagtacgtcagcctagcaattagctcatcgactccagattggagaactcgacaccatgaaggtgctgatcgttgcccttgctctcctggcgctcgctgcgagcgccgcctccagtacaagcggcggctgtggctgccagacaccaccgtttcatctaccgcctccgttctatatgccgcctccgttctatctgccgccgcagcagcagccgcagccatggcaataccccactcaaccacc

SEQ ID NO: 17295 - DNA, 400 bp, Zea mays
  Clone ID: LIB3151-012-Q1-K1-B11
atctctataccgtccgagaccccaaacccccattccgccgccggggccggggcggcggcgaccgtggctttcggaaagaacaagaggatctccaagggaaagaagggtggcaagaaaaagaccgtcgaccctttctctaagaaggattggtatgacatcaaggcaccgtcggtgttcagtgtgcgcaacatcgggaagactctcgtatccaggacacagggtaccaggattgcttctgagggtctgaagcacagagtctttgaggtttgcctagctgatcttcagggcgacgaggatcaagcttacaggaaaatcaggctccgtgctgaagatgtgcagggcaggaatgtgctcacaaacttttggggcatgaattttaccactgataaactcagatccc

SEQ ID NO: 17296 - DNA, 457 bp, Zea mays
  Clone ID: LIB3151-012-Q1-K1-B12
gaccattagctttatctactccagagcgcagaagaacccgatcgacaccatgagggtgttgctggttgccctcgctctcctggctctcgctgcgagcgccacctccacgcatacaagcggcggctgcggctgccagccaccgccgccggttcatctaccgccgccggtgcatctgccacctccggttcacctgccaccttcggtgcatctcccaccgccggtccacctgccgccgccggtccacctgccaccgccggtccatgtgccgccgccggttcatctgccgccgccaccatgccactaccctactcaaccgccccggcctcagcctaatccccagccacacccatgcccgtgccaacagccgcattcaagcccgtgccagctgcagggaacctgcggcgttggcagcaccccgatcctgggccagtgcgtctagtttctgaggcatcagtgc

SEQ ID NO: 17297 - DNA, 470 bp, Zea mays
  Clone ID: LIB3151-012-Q1-K1-B2
aagcaacatagaaagtggaatccagtagcaacaatagagcaacaatggagaccaagatattttccctccttatgctccttgctctttctacatgtgttgctaacgcgacaattttccctcaatgctcacaagctcctatagcttccctttttcccccataccttccatcaattatagcttcagtatgtgaaaacccagctcttcaaccatataggcttcaacaagcaatcgcagcaagcaacatacctttatcgcccttgttgtgtcaacaatcgccagccctatctttggtgcagtcattggtacaaaccatcagggcacaacagctgcagcaactcgtgctacctgtgatcaaccaaatagctctggcaaacctttcttcctactcttcgcaacaacaatttctttcattcaaccaactgtctacactgaacccttgtgcttatttgcagcaacaactattaccattt

SEQ ID NO: 17298 - DNA, 468 bp, Zea mays
  Clone ID: LIB3151-012-Q1-K1-B5
agaccaactagcaacatagaaagcacaatagtgtaccaacaatggcagctaaaatattttgccggcttatgctccttggtctttctgcaagtgctgctacggcgaccattttcccacaatgctcacaagctcctatagcttcccttcttcccccgtacctctcaccaacggtgtcttcggtatgtgaaaacccaattcttcaaccctacaggatccaacaggcaatcgcagctggcatcttacctttatcacccttgttcctccaacaatcatcagccctattacagcagttacctttggtgcatttattggcacaaaacatcagggcacaacaactacaacaacttgtgctagcaaaccttgctgcctactctcagcaacagcagtttcttccattcaaccaactagctgcattgaactctgcttcttatttgcaacaacaacaactaccattcagccagctatctg

SEQ ID NO: 17299 - DNA, 474 bp, Zea mays
  Clone ID: LIB3151-012-Q1-K1-B6
attgataccaactagcaacatacatagtgaagtacactagcaacatcttagcaccaatgggagccaagatttttgccctccttgccctccttgctctttcagcaagcgctgctacctcgacttttattccacaatgctcacaacaatacctctctccggcgacagccgtgggatttcaatacccaactatacaatcctacatggtacaagaggccatccaagcaagcatcttacggtcattagcattaaccctccaacaaccatatgctctattgcaacagccatccttagtgcatctgtatctccaaagaatcgcggcacaacaactacaacaacagttgctaccaacaatcaatcaagtagttgcagcgaaccttgctgcttacctccagcaacaacagtttcttccattcaatcaactagatggggtgaaccctgctatctacttgcaggcacaacagctactaccattta

SEQ ID NO: 17300 - DNA, 474 bp, Zea mays
  Clone ID: LIB3151-012-Q1-K1-B7
gcatttattggcacaaaacatcagggcacaactactacaacaacttgtgctagcaaaccttggggcctactctcagcaacagcagtttcttccattcaaccaactagctgcattgaactctgcttcttatttgcaacaacaacaactaccattcagccagctacctgctggctacccacagcaatttcttccattcaaccaactggcagcattgaactctagtgcttatttacagcttcaacaactactaccattcagccagctagctggtgtgagccctgctaccttcttgatacaaccacagttgatgccgttctaccagcacgctgcgcctaacgctggcaccctcttacaactgcaacaattgctgccattcaaccaacttgctttgacaaacccagcagcgttctaccaacaacccatcattggtggcgccctcttttagatttcttatgagttatagctcaataataa

SEQ ID NO: 17301 - DNA, 470 bp, Zea mays
  Clone ID: LIB3151-012-Q1-K1-B8
cagcctgttgccttcttccaaagctgctctcgtccccataaatcaagcagctccggcgggggcggcgaactactcctcgtcgccaaaaccctagccctgcttctttgccatggcgagcagcgctagccaggcgagcctcctgctccagaagcagctcaaggatcttgttatgaacctccatggatgggttctccgtcgggcttgttgacgacagcaacatcttcgagtggcaggtcaccatcatcggaccgcctgacaccctatatgatggaggctacttcaatgcaataatgaccttcccccagaactatcccaacagcccgccatcagtaagatttacttctgagatgtggcatccgaatgtttatcctgatggacgtgtttgcatttctattcttcatccacctggtgaagatcccaatggttatgagcttgcaagcgaacgatggacaccagtgcacacggttgaa

SEQ ID NO: 17302 - DNA, 473 bp, Zea mays
  unsure at all n locations
  Clone ID: LIB3151-012-Q1-K1-B9
ganccaggccgncccacgcgtccgattgagaccaacaagcaacatagaaagtggaatccagtagcaacaatagagcaacagtggagacgaagatattttccctccttatgctccttgctctttctacatgtgttgctaacgcgacaattttccctcaatgctcacaagctcctatagcttccctttttcccccataccttccatcaattatagcttcagtatgtgaaaacccagctcttcaaccatataggcttcaacaagcaatcgcagcaagcaacatacctttatcgcccttgttgtgtcaacaatcgccagccctatctttggtgcagccattggtacaaaccatcagggcacaacagctgcagcaactcgtgctacctgtgatcaaccaagtagctctggcaaacctttctccctactctncgcaacaacaatttcttccattcaaccaactgtctacactgaaccct

SEQ ID NO: 17303 - DNA, 394 bp, Zea mays
  Clone ID: LIB3151-012-Q1-K1-C1
caactagcaacatagaaagcacaatagtgtaccaacaatggcagccaaaatattttgcctccttatgctccttggtctttctgcaagtgctgctacggcgaccattttcccgcaatgctcgcaagctcctatagcttcccttcttcccccgtacctctcaccagcggtgtcttcggtatgtgaaaacccaattcttcaaccctacatgatccaacaggcaatcgcagctggcatcttacctttatcacccttgttcctccaacaatcatcagccctattacaacagttacctttggtgcatttattggcacaaaacatcaaggcacaacaactacaacaacttgtgctagcaaaccttgctgcctactctcagcaacagcaagttcttccattc

SEQ ID NO: 17304 - DNA, 147 bp, Zea mays
  unsure at all n locations
  Clone ID: LIB3151-012-Q1-K1-C10
atccaatccagatcagcaaagcggcagtgcgttnagaggatcgtcgaacagaacaggatgaagaggggcatcgttctcgtcgtgtgcgtgtgtctgtgagatgtgacagcgtctgtgatgtgcatatgcttgccttgcgcgggctga

SEQ ID NO: 17305 - DNA, 397 bp, Zea mays
  Clone ID: LIB3151-012-Q1-K1-C11
atccaatccatatcagcaaagcggcagtgcgtttagaggatcgtcgaacagaacaggatgaagggggtcatcgttctcgtcgtgtgcctggctctgtcagctgccagcgcctctgcaatgcagatgccctgcccctgcgcggcgctgcagggcttgtacggcgctggcgccggcctgacgacgatgatgggcgccggcgggctgtacccctacgcggagtacctgaggcagccgtatggcaccccgctggcggcggcgcactactacgccgggtgtgggcatgacgagcgccatgtaccagccgctccggcaacagtgctggcagcagcagatgaggatgatggacgtgcagtccgtcgcgcagcagctgcagatgatgatgcagcttgagcgtgcc

SEQ ID NO: 17306 - DNA, 455 bp, Zea mays
  Clone ID: LIB3151-012-Q1-K1-C12
attgagaccaacaaacaacatagatagtgcaattcaaggacaacaatacagcaccgggggcgacggggattttttccctccttatgctcctcgctctttctgcatgtgttgctaacgcgacaattttccctcaatgctcacaagctcctatagctttccttctttccccataccttccatcaatgatagcttcagtatgtgaaaacccagctcttcaaccctataggctacaacaagcaatcgcagcaagcaacatacctttatcacccttgtttcaacaatcaccagccctatctttggtgcagtcattggtacaaaccatcacggcacagcagctgtagcaactcgcgctacctgtgatcaaccaagtatctctggcaaacctttgtgcctactctcagcaacaacaattttcttcattcaaccaactgtctacattgaaccgtgctgcttat

SEQ ID NO: 17307 - DNA, 320 bp, Zea mays
  Clone ID: LIB3151-012-Q1-K1-C2
cccagcgcgccgtctagggtttcacagccgtgccccgatccattcgagcgccccgcaccgccggcatggagtttgacgaatacgagtacttggagaaggcggtagagcccgctcccccacaggccaatggttccggctccggctccggcgagaaggaccgcggctcgcgccgtcgcgagggcggcgaggaccgcatatcgaagcgctctcgctcgggggaggaccgcgaccaggacaggcaccgtagcggtcgggagcaccgtgaccgggacaaggatgacgtgaaagaggagaggagccgcgaaagccgcgggaaggac

SEQ ID NO: 17308 - DNA, 371 bp, Zea mays
  Clone ID: LIB3151-012-Q1-K1-C3
cagaccattagctttatctactccagagcgcagaagaacccgatcgacaccatgagggtgttgctcgttgccctcgctctcctggctctcgctgcgagcgccacctccacgcatacaagcggcggctgcggctgccagccaccgccgccggttcatctaccgccgccggtgcatctgccacctccggttcacctgccacctccggtgcatcttccaccgacggtccacctgccgacgccggtccacctgccaccgacggtccatgtgccgacgccggttcatctgccgacgacaccatgccactaccctactcaaccgccccggcctcagcctgatccccagccacacccatgcccgtgccaacagccgca

SEQ ID NO: 17309 - DNA, 349 bp, Zea mays
  Clone ID: LIB3151-012-Q1-K1-C4
attgagaccaactagcaacatagaaagcacaatagtgtaccaacaatggcagccaaaatattgtgcctccttatgctccttggtctttctgcaagtgctgctacggcgaccattttcccgcaatgctcgcaagctcctatagcttcccttcttcccccgtacctctcaccagcggtgtcttcggtatgtgaaaacccaattcttcaaccctacaggatgcaacaggcaatcgcagctggcatcttacctttatcacccttgttcctccaacaatcatcagccctattacaacagttacctttggtgcatttattggcacaaaacatcaaggcacaacaactacaacaac

SEQ ID NO: 17310 - DNA, 477 bp, Zea mays
  Clone ID: LIB3151-012-Q1-K1-C5
cagaccattagctttatctactccagagcgcataagaacccgatcgacaccatgagggtgttgctcgttgccctcgctctcctggctctcgctgcgagcgccacctccacgcatacaagcggcggctgcggctgccagccaccgccgccggttcatctaccgccgccggtgcatctgccacctccggttcacctgccacctccggtgcatctcccaccgccggtccacctgccgccgccggtccacctgccaccgccggtccatgtgccgccgccggttcatctgccgccgccaccatgccactaccctactcaaccgccccggcctcagcctcatccccagccacacccatgcccgtgccaacagccgcatccaagcccgtgccagctgcagggaacctgcggcgttggcagcaccccgatcctgggccagtgcgtcgagttcctgaggcatcagtgcagcccgacggcgacgccc

SEQ ID NO: 17311 - DNA, 336 bp, Zea mays
  Clone ID: LIB3151-012-Q1-K1-C6
ttcagcattcacaaacacaccaatcgaagcgcactaacaacaacctaacaacagtggctaccgagatattagccctccttgcgcttcttgcccttttagtgagcgcaacaaatgccaacattattccacagtgtgtacttgctcctagtgccattattacacaattcttttcatcattaacttaatgggctttgaatattcagccgtataaaactacatgctacaactagcgtttgcgggtagcgttttacaacaaccaatttatcaattgcaggaacaatccttggcacatctaaacctactaaccatctcaacgcaacagcaacaacagttttt

SEQ ID NO: 17312 - DNA, 475 bp, Zea mays
  Clone ID: LIB3151-012-Q1-K1-C7
ctaacaacatacaaagcacactagtgtaccaacaatggcagccaaaatattttgcctgcttatgctccttggtctttctgcaagtgctgctactgcgaccatttttccacaatgctcacaagctcctatagctttccttcttcccccgtacctctcaccagcggtgtctgtggtatgtgaaaacccaattcttcaacattataggatccaacatgcactcttagctggcatcttacctttatcacccttgttcctccaacaatcatcagccctattacagcagttacctttggtgcatttattggcacaaaacatcagggcacaacaactacaacaacttgtgctagcaaaccttgctgcctactctcagcaacaacagtttcttccattcaaccaactagctgcattgaactctgcttcttatttgcaacaacaactactaccattcagccagctagctggtgtgagccctgct

SEQ ID NO: 17313 - DNA, 433 bp, Zea mays
  unsure at all n locations
  Clone ID: LIB3151-012-Q1-K1-C8
gtccgttcaagtcttattcttcaaccatgttggtgttttcgggatcccgaaaactttgggcgcgcctgcgccggccttggttccttccgcngctaaaaaccaaaaccaccctctctcgttgcgcgcgcgtttctattgtctacaggtagactttcctcacacgctggaactttttgattttgtgtgtcactacaaaattgtcttttggctttgattcgagagttacagtgactgctatattgattgcgacgatgcacccccgccgcgcggatccgatcatggggccagtcgccccgccactgtccgcgccaacagaggcgcagacctcgccgtcttctagcacttctagcggatggagaggaaagtggaaataagcaatggagctatagatgacggtccactgcagaaatctctacttccttcatttgaatct

SEQ ID NO: 17314 - DNA, 434 bp, Zea mays
  unsure at all n locations
  Clone ID: LIB3151-012-Q1-K1-C9
gcggcgagcagatatcccacgagaaagccctctaccccttcaattctccagcaaactagtcaccggcgtgtgcactggtgcagtgcacgcacgacgccggcagcatggcgggcagggccagggcacggcggttcgtgctcgccggcgctctgatgatcgcctggctcctctgtcttctcccacgggccacggcggcggccgtccgcaggagcgacttcccgccgtcgttcctcttcggcaccgccacctcctcgtaccagatcgaaggcgcgtacctcgagggcaacaagagcttgagcaactgggatgtcttcagccacgtaccangaagaatcgaagacggaagcaccggagatatcgcggatgatcactatcatcgttacgaggatgacattgagctcatgcactctctcggcaccaacgcctacagattt

SEQ ID NO: 17315 - DNA, 473 bp, Zea mays
  Clone ID: LIB3151-012-Q1-K1-D1
gtgcgatttcgatctcgcagccaccttttttttgttctgttgtgtatctagtagttggaggagatatgcagtttgcacttgcattggacacgaactcaggtcctcaccagataagatcttgtgagggtgatgggattgacaggttggaaaaattaagtattgggggcagaaagcaggagaaagctttgagaaataggtgctttggtggtagagttgctgcaactacacaatgtattcttacctcatatgcttgtcctgaaactcttcattctcaaacacagtcctctaggaaaaattatgctgatgcaaaccgtgtatctgctatcattttgggcggaggcactggatctcagctctttcctctgacaagcacaagagctacgcctgctgtacctgtttgaggatgttacaggcttattgatatccctatgagtaactgcttcaacagtggtataaataagatatttgtgatg

SEQ ID NO: 17316 - DNA, 211 bp, Zea mays
  Clone ID: LIB3151-012-Q1-K1-D11
attggttttaaacagagaccggcccttctaatgtaccaaaccttacttcccctgggggcccaggggataattatatcttaggaggacctaaattaatttacctgccgcccgttttccaccgtagggacgggaaaacccttgcggttccccacctaagtgcctttgaatgaaatcctcttttggcaacttgtcttattaccaaaaaggccgg

SEQ ID NO: 17317 - DNA, 165 bp, Zea mays
  Clone ID: LIB3151-012-Q1-K1-D12
aacatgcaacatagaaagcggactccataaattaccaaagagcaacaacgccgggggacatgtgggacccttcttatgctccttgctctttctgcatgtgttgcgtcacgcgacaatcatccctaaatagctgacaaaaccctgatagctcccatttttacccca

SEQ ID NO: 17318 - DNA, 122 bp, Zea mays
  Clone ID: LIB3151-012-Q1-K1-D2
gcggtgcgatataaatctcactgtcacctcaactttgttctgctgtgtatgtagctcacggaggagggatgcagtgtgcacttgcgttgtacacgaactcttgtcctaaccagataagatct

SEQ ID NO: 17319 - DNA, 351 bp, Zea mays
  Clone ID: LIB3151-012-Q1-K1-D3
gtcagcctagcaattagctcatcgactccagattggagaactcgacaccatgaaggtgctgatcgttgcccttgctctcctggcgctcgctgcgagcgccgcctccagtacaagcggcggctgtggctgccagacaccaccgtttcatctaccgcctccgttctatatgccgcctccgttctatctgccgacgcagcagcagccgtagccatggcaataccccactcaaccaccgcagctaatcccgtgccagcagttcggatcctgcggcgtcggcagcgtcggcagcccgttcctgggccagtgcgtcgagttcctgaggcaccagtgcagcccggcggcgacgcccta

SEQ ID NO: 17320 - DNA, 315 bp, Zea mays
  Clone ID: LIB3151-012-Q1-K1-D4
aatattttcagcattcagaaacacaccaagcgaagcgcactagcaacaacctaacaacaatggctaccaagatattagccctccttgcgcttcttgcccttttagtgagcgcaacaaatgcgttcattattccacagtgctcacttgctcctagtgccattattccacagttccttccaccagttacttcaatgggcttcgaacatccagccgtgcaagcctacatgctacaactagcgctagcggcgagcgtcttacaacaaccaattgcccaattgcaacaacaatccttggcacatctaaacctacaaacca

SEQ ID NO: 17321 - DNA, 383 bp, Zea mays
  Clone ID: LIB3151-012-Q1-K1-D5
gcggcagcaatgttgccagcagttcaggcatgttgagccccagcaccggtaccaggcgatcttgggcttgttcctccagtccatcctgcagcagctgccgcaaagcggacaggtatcggtgaatgacacggcatgtatagcgcactatctgacggcgatttgcattattaactaatttcttatatgaccctacgctgttgccagcggataataataaatgaaaaaacaattttcattcatttacccgatggctaactctctagttgagacatctaccggcgatgattaattaacaatgtgtcacgcatcatcatgggcgacagtgtcagtgtgagcaatgacctgaatgaacaattgaactgaaaagaaaaaagcattgctcc

SEQ ID NO: 17322 - DNA, 450 bp, Zea mays
  unsure at all n locations
  Clone ID: LIB3151-012-Q1-K1-D6
cgctcgcatgcctgtgcacttcttcatcaccatcactgggtcttcagaccattagctttatctgctccagagcgcagaagaacccgatcgacaccatgagggtgttgctcgttgccctcgctctcctggctcttgctgcgagcgccacctccacgcatacaagcggaggttgcggttgccatccaccgccgccggtatatctaccgcctgcggtgcatctgccaccttctggttacctgccacctccggtgcatctcccaccgccggtccacctgccgccgccggtccacctgccaccgccggtccatgtgccgccgccggttcatctgccgncgccaccatgccactaccctactcaaccgncccggcctcagcctcattcccagccacacccatgcccgtgccaacagtcgcatgcaagcccgtgccagcttcagggaacctgcggcg

SEQ ID NO: 17323 - DNA, 241 bp, Zea mays
  Clone ID: LIB3151-012-Q1-K1-D7
ccttcttgacacaaccacagttgttgccgttctaccagcacgttgcgcctaacgctggcacccggttacaactgcaacaattgctgccattcaaccaacttgctttgacaaacccagcagtgttctaccaacaacccatcattggtggtgccctcttttagatttcttatgagttatagttcaataataaagttttttatctgatgtttgaggtttcccagaaataagaaagtacatttct

SEQ ID NO: 17324 - DNA, 315 bp, Zea mays
  Clone ID: LIB3151-012-Q1-K1-D8
ccctcttcctgtcagtagttgagtgagagtgttgcagcgagtgggagacaaggggaaatgggggagggagcgcaagggagcgatgcggcggcagcgggcggcgaggtggaggagaacatggcggcgtggctgattgccaagaacacgctcaagatcatgcccattaatctaccgtctgtttttccttatgatgttctggtgctgcatgaatgctttggagattagctgtatctattgtcactacctaagggagatgcgcatcgcgcacttcgtggtgaaggagccgatggtgatctggcacaagtgctcgggcgt

SEQ ID NO: 17325 - DNA, 459 bp, Zea mays
  Clone ID: LIB3151-012-Q1-K1-D9
ctggcatccgcagagagcttgttccgtccaggcaaccaaaaagcaagttgccccgccgcgcagaggaagaagagagcagaggaggatggctcgtacgaagcagaccgcccgcaagtccacgggaggcaaggccccccgcaagcagctcgccaccaaggtccgtccgtctgcccttctctacccgtttcggatccgctgttctgttctctagggttcccttctgagacgcgccggcggttgtgctgtggttgcaggcggcgaggaagtcggcgccgacgaccggcggcgtgaagaagccccacaggtacaggcccggaaccgtggcgctgcgcgagatccgcaagtaccagaagagcacggagctgctgatccgcaagctgcccttccagcgcctggtgcgcgagatcgcgcaggacttcaagacagacctccgattccagagccacgccgtgctggcgc

SEQ ID NO: 17326 - DNA, 454 bp, Zea mays
  Clone ID: LIB3151-012-Q1-K1-E10
attgagaccaactagcaacatagaaagcacaatagtgtaccaacaatggcagctaaaatatttggcctccttatgctccttggtctttctgcaagtgctgctaccgcaaccattttcccacaatgctcacaagctcctatagcttcctttcttcccccatacctctcaccagcggtgtcttcagtatgtgaaaacccaattcttcaaccctacaggatccaacaggcaatcgcagcaggcatcttacctttatcacccttgttcctccaacaaccgtcagccctattacagcagttacctttggtgcatttgttggcacaaaacattaaggcacaacaactacaacaacttgtgctaagaaaacttggtgtctactcttaaaaacagaaatttcttccattcaaccaactggctgcattgaactctgctgcttatttgcaacaacaactaccat

SEQ ID NO: 17327 - DNA, 316 bp, Zea mays
  Clone ID: LIB3151-012-Q1-K1-E12
ccacgcgtccgttaaacacaccaagcgactctttttaaccattttctaacaacaattcataccaggagattagtgcccctttcacatcttgcccttttaattattctcctcacatacaccacaatattccacactggtgactttctcctaatgccattattccacaagtgctcccaccacacactcaaatgggctttgaacacctaactatgcaagccatcatgcaacaactagcgctcgaggacagcatcttacaaaacccaattgtccaactgcaacacaacttcttgacccatataacaatacacgccatcac

SEQ ID NO: 17328 - DNA, 299 bp, Zea mays
  unsure at all n locations
  Clone ID: LIB3151-012-Q1-K1-E2
ctggacgtcagcctagcaattagctcatcgactccagattggagaactcgacaccatgaaggtgctgatcgttgcccttgctctcctggcgctcgctgcgagcgccgcctccagtacaagcggcggctgtggctgccagacaccaccgtttcatctaccgcctccgttctatatgccgactccgttctatctgccgccgcagctatagcctcagccatggcaatacctcactcaaccacctcaactaagcccgtgccagcagttcggatcctgcggcgtcngcagcgtctgcagccccg

SEQ ID NO: 17329 - DNA, 366 bp, Zea mays
  Clone ID: LIB3151-012-Q1-K1-E3
aagcgcgctagcatcgacctaacatcaatggctaccaatatattaaccctccttgctcttcttgctctttttgtgagcgcatcaaatgcgttcattattccacaatgctcacttgctcctagtgccatttttccacagttctttccaccagtttcttcaatgggcttcgaatacttatctgtgcttgcctacatgcaacaacatatgctttctgctagtgttttacatcaaccaattgcctaatttcaacaacaatccttgccacatataacaatacaagccatcacaacgcaacagcaacaacagttcctaccatcactgtaccacctagccattgagaaccctgccgcctactttcaagatcag

SEQ ID NO: 17330 - DNA, 108 bp, Zea mays
  Clone ID: LIB3151-012-Q1-K1-E4
gcggttaggcacacccatgcacgtgccaacatctgtatccaatccagtgccaggtacatggaacctggggtgttggtatttccccaaaccttggccagtgcgactatt

SEQ ID NO: 17331 - DNA, 154 bp, Zea mays
  Clone ID: LIB3151-012-Q1-K1-E6
atttagaccaactagcaacatattaagcacattattgtaccaacaatggcaacggaaatatttggcctccttatgctccttggcatttctgcaagtgctgctacggcgaccattattcctaagtgctcacaagcatttatagattaacttcttc

SEQ ID NO: 17332 - DNA, 368 bp, Zea mays
  Clone ID: LIB3151-012-Q1-K1-E7
ccaacaagcaacatagaaagtggaatccagtatcacaatagagcaacaatggagaccaagatgttttccctccttatgctccttgctctttctacatgtgttgctaacgcgacaattttccctcaatgctcacaagctcctatagcttccctttttcccccataccttccatcaattatagcttcagtatgtgaaaacccagctcttcaactatataggtttcaacaagcaatcgtagcaagcaacatacctttatcgcccttgttgtgtcaacaatcgccagccctatctttggtgcagtcattggtacaaaccatcagggcacaacagctgcaggcactcgtgctacctgtgatcacccaagtagc

SEQ ID NO: 17333 - DNA, 462 bp, Zea mays
  Clone ID: LIB3151-012-Q1-K1-E9
cctcacttactccccgcgcgatccacggccccctccccccgcgctcctgtctgctgtgcctctggggaatggcgacgccctcggccgtgggcgccgagtgcctcctcctcgcgcgggccgactggccggccggcgtcggcgaccgggcgcgcccgcggcggctccagcgcgtgctgcgccgccggtgcgtcgcggagctgagcagggaggggcccgcgccgcgcccgctgtcacccgcgctgctggcgcccccgctcgtgcccggcttcctcgcgccgccggccgagcccacgggtgagccggcatcgacgccgtcgaccgtgcccgacgccggtctgggggacctcggtctcgaacctgaaaggattgctgaaggctccatcgataacacagtagttgtggcaagtgagcaagactctgagattgtggttggaaaggagcaagctcgagctaaagtaacac

SEQ ID NO: 17334 - DNA, 443 bp, Zea mays
  Clone ID: LIB3151-012-Q1-K1-F1
tggacgtcagcctagcaattagctcatcgactccagattggagaactcgacaccatgaaggtgctgatcgttgcccttgctctcctggcgctcgctgcgagcgccgcctccagtacaagcggcggctgtggctgccagacaccaccgtttcatctaccgcctccgttctatatgccgcctccgttctatctgccgccgcagcagcagccgcagccatggcaataccccactcaaccaccgcaagtaagcccgtgccagcagttcggatcctgcggcgtcggcagcgtcggcagcccgttcctgggccagtgcgtcgagttcctgaggcaccagtgcagcccggcggcgacgccctacggctcgccacagtgccaggcgctgcagcagcagtgctgccaccagatcaggcaagtggagccgctgcaccggtaccaggcgacata

SEQ ID NO: 17335 - DNA, 302 bp, Zea mays
  unsure at all n locations
  Clone ID: LIB3151-012-Q1-K1-F10
gctatatctctatctctctatctatagcagcttttcttacgtacccaagcatacgagcacatagatgttttataatatcacctatatacaattcactaaccncaattcaacaaccactggactacaaaaacactaccgctacaaacctcaatatactcaaatcacatacccctcattacagctctcttaatatagaagagatcataaccatatagccctttacaacacactctcaccaacaatttcgcatactacacgcccaatattactccatttttagcgcctcatttaacgcttacact

SEQ ID NO: 17336 - DNA, 446 bp, Zea mays
  Clone ID: LIB3151-012-Q1-K1-F11
tttatctactccatagcgcatttaacccgatcgacaccatgagggtgttacgcgttgtcctcactctcctggctctcactacaagcgccacctccactcatacaagcggcggctgcggctgccagccaccgccgtcggttcatctaccgccgacggtgcatctgccacctccggttcacctgccacctccggtgcatctcccaccgccggtccacctgccgccgccggtccacctgccaccgccggtccatgtgccgccgccggttcatctgccgccgccaccatgccactaccctactcaaccaccccggcctcagcctcatccccagccacacccatgcccgtgccaacagccgcatccaagcccgtgccagctgcagggaacctgcagcgttggcagcacccctatcctgggccagtgcgtctagtttctgaagcatcagtgc

SEQ ID NO: 17337 - DNA, 475 bp, Zea mays
  Clone ID: LIB3151-012-Q1-K1-F12
gttggcacaaaacatcaaggcacaacaactacttcaacttgtgctaggaaacctggctgcctagtctcagcaacagcagtttcttccattcaaccaactggctgcattgaactctgctgcttatttgcaacaacaactaccattcagtcagctagctgctgcctacccccagcaatttcttccattcaaccaactggcagcattgaactctgctgcttatttacaacagcaacagctaccaccattcagccagctagctgatgtgagccctgttgccttcttgacacaacaacagttgttgccgttctacctgcacgctgcgcctaacgctggcaccctcttacaactgcaacaattgctgccattcaaccaacttgctttgacaaacccaacagcgttctaccaacaacccatcattggtggtgccctcttttagattgcttatgagttatagttcaataatgaaagtttttgg

SEQ ID NO: 17338 - DNA, 64 bp, Zea mays
  Clone ID: LIB3151-012-Q1-K1-F2
tcggatggatagaggagatttccctctctatctatatatgtaataatgcagtaagacgacacac

SEQ ID NO: 17339 - DNA, 455 bp, Zea mays
  unsure at all n locations
  Clone ID: LIB3151-012-Q1-K1-F3
aagcaacatagaaagtggaatccagtagcaacaatagagcaacaatggagaccaagatatttggcctccttatgctccttgctctttctacatgtgttgctaacgcgacaatttttccctcaatgctcacaagctcctatagcttccctttttcccccataccttccatcaattatagcttcagtatgtgaaaacccagctcttcaaccatataggcttcaacaagcaatcgcagcaagcaacatacctttatcgcccttgttgtgtcaacaatcgccagccctatctttggtgcagtcattggtacaaaccatcagggcacaacagctgcagcaactcgtgctacctgtgatcaaccagtagctctggcaaaccttttctcctactctccgcaacaacaattcttncattcaaccactgtctacactgaaccctgctgcttatttgcagcacac

SEQ ID NO: 17340 - DNA, 95 bp, Zea mays
  Clone ID: LIB3151-012-Q1-K1-F4
caacatcttcaacaagaaaaactaggaattggaagtatgcctgttgatgggggcatacccaaacggatttgggggagctgaacagacagcgaaaa

SEQ ID NO: 17341 - DNA, 337 bp, Zea mays
  Clone ID: LIB3151-012-Q1-K1-F5
accaactagcaacatagaaagcacaatagcgttccaacaatggcagctaaaatggggtgcctcgtcatgcttcttggtcttcatgcaagtgctactacagcgaccattttcccacaatacaaacaagctattaatgtcttctttcttcccacgtacctctcactaacattttcatttttgataataaaacccaattttacaactctacattatacaaccaattgtcgcaagtgatattttaccttcatcacccttgttcctacaacaatcatcactattattacagcagttacctttgctgaatatattggcacaacacatgagggcacaacaactg

SEQ ID NO: 17342 - DNA, 406 bp, Zea mays
  Clone ID: LIB3151-012-Q1-K1-F7
gtgctcaaacaagtgctcctgtcccagaggtccaaccttcagatgtcaaagttgacgagggaagcaatggtagcgggaaagatactttgtctctgcccgacaagactgctggctctggggtaaatacggactctagtgcctcaactgaagcaccacctcagcctgttgaaaccagtgacaaggcagaagacacaaaggacgaatctagtggagacaaagtggtagttggagaacccaatgaaggcagttgcatgccatctgaagttgagggcaaaacaaaagagggagatgctgaagaaaaggaaaggacagatgaagctggaaatatcgataaaattagcaaggatgacactgggaagaaagatggagatgacactgagaagaaagatggaggtgatgatactgg

SEQ ID NO: 17343 - DNA, 457 bp, Zea mays
  Clone ID: LIB3151-012-Q1-K1-F8
attcagaaacacaccaagcgaagcacattagctacaacctaacaacaatggctgccaagataggatccctccttgcgcttcttgcgctttttgcgagcgcaacaaatgcgttcattattccacaatgctcacttgctccaagttccattattacacagttccttctacatgttacttcaatgggcttcgaacacccagctgtgcaagctcttaggctacaacaagcaatggatgtgagcgtcttacaacaaccaatttcccagttgcaacaacaatccttggcacatctaacaatacaaaccatcgcaacgcaacagcaacaacaattcctaccagcactgagccacctagccatggagaaccctgccgcctacttgcaacagcagttgcttgcatcaaacccacttgctctggcaaacgtagttgcaaaccagccacaacaacagctgcaacagtt

SEQ ID NO: 17344 - DNA, 117 bp, Zea mays
  unsure at all n locations
  Clone ID: LIB3151-012-Q1-K1-G10
acccacgcgtccggttctatatcacaaccggccgcccttcncgtatattaattcctctaatatatgagaacttatttgtatctttttttatacccataataactctccttttctttt

SEQ ID NO: 17345 - DNA, 456 bp, Zea mays
  Clone ID: LIB3151-012-Q1-K1-G11
attttgagcattcagaaacacaccaagcgaagcgcactagcaacaacctaacaacaatggctaccaagatattatccctccttgcgcttcttgcgctttttgcgagcgcaacaaatgcgtccattattccacaatgctcacttgctcctagttccattattccacagttcctcccaccagttacttcaatggccttcgaacacccagctgtgcaagcctataggctacaacaagcgattgcggcgagcgtcttacaacaaccaattgcccaattgcaacaacaatccttggcacatctaacaatacaaaccatcgcaacgcaacagcaacaacagttcctaccagcactgagccacctagccatggtgaaccctgtcgcctacttgcaacagcagctgcttgcatccaacccacttgctctaacaaacgtagttgcaaaccagcaacaacaacaac

SEQ ID NO: 17346 - DNA, 456 bp, Zea mays
  Clone ID: LIB3151-012-Q1-K1-G12
ctggtttttcagagcagcagtccaggcgcggaattgaattccggtaggatttgagagcggagcggagcggagaggagaggagaagaaggcggtaggcggggaagatggagatgccggcagggagcggggccccagcgctggcgcggcagggctcggtctactcgctcacggtcgacgaggtctggcgcgagatcgtgagcctcaccagcggcgaggacgcgcagcaggttgcggctcccgctcccgctcccgcgcccgagcccgagcccgagcccgcgcccgcgcccgcgccgctgccggcgcaggcgcaggcgcagcagacgctggggtccatgactctggaggagttcctggtacgcgccggcgtggttcgtgaggacatgggggggcaccagaccctcctgcttgagccgcacgcgcaggggcttttctcccaggggaatgcggtcgcgccgc

SEQ ID NO: 17347 - DNA, 124 bp, Zea mays
  Clone ID: LIB3151-012-Q1-K1-G4
ggtcttgagaccattagctttatctactccagagcgcagaagaaccccatcgacaccatgagggtggtgctcggtggcctcgctcttctggctctctctggaagcgccaccttcacacatacaa

SEQ ID NO: 17348 - DNA, 453 bp, Zea mays
  unsure at all n locations
  Clone ID: LIB3151-012-Q1-K1-G5
atccaggacaaggagggcatcccttcggaccatcagcggctcatttttgccggggggcatctggaggacggtcgcacgctggccgactacaacacncagaatgagagcaccctccacttgacgccgcgnccaaagggaggcatgcagatcttcgtgaagacactgactggcaagacgaacacacttgaggtggaattctcatacaccatatataacgttaaggtcaatatccatgacaaggagggcattccaccggaccagcagcggctgatcttcgccggcaagcagctggaggatggtcgcaccttggctgactacaacatccagaaggagagcaccctccacctggtgctccgtctcaggggtggtatgcagatttttgcgaagacattgactgtcaagaccatcaccttggaggtggagtcgtctgacacaatcgataatgtcaaagcc

SEQ ID NO: 17349 - DNA, 472 bp, Zea mays
  Clone ID: LIB3151-012-Q1-K1-G7
agaccattaactttatctactccagagcgcattataacccgatcgacaccatgagggtgttgggcgttgccctcgatctcctggctctcgctgcgagcgccacctacactcatacaagcggaagctgcggctaacagccaccgactccggttcatctaccgcttccttatcatatatcacatacagttcacctgacacatcaggtgcatctttgaccaatttttcaaattccaagatcggtacacctgccaccgtcggtccatgtgccaacgccggttcatctgccgcctacaccatgccactaccctactcaaccgccccggcctcagcctgatccccagccacacccatgctcgtgccaacagccgtattcaagctcgtgccaactgcagggaacctgcggcgttggcagcaccccgatcctgggccagtgcgtctagttcctgaggcatcagtgcaacccgacggcgac

SEQ ID NO: 17350 - DNA, 481 bp, Zea mays
  Clone ID: LIB3151-012-Q1-K1-G9
gaccacgcgtgcgctcatatgtatttgcactcatgcatcacaaaatatccttctatcagtaccatcaaggatcattcgtcttattagtataggcaccaaatcaaatctgcaacatcaattatctaactccaaaaaccatgaaactggtgcttgtggttcttgctttcattgctttaatatcaaatgtttcttgtacacaaacaagcggcttgctctgtggtcaacaacaaaaccattatcagcaacatcattcacaacaacattattcacaaaaacaacaacatcaaccaccaccacaacattaccagcagcagcaacaccaacaacaacaagttcacattcaaccacaaaaacattagctacaacaagaagttcatgttcaacaacaacaacaacaaccgcatcaccaacaacaacaactacaacagcaccaacaacaacatttatgtgaatggcaacaacaacatcaccaacaattaca

SEQ ID NO: 17351 - DNA, 150 bp, Zea mays
  Clone ID: LIB3151-012-Q1-K1-H1
caacaacacatcattggtggtgccctcttttagattgcttattagatgtaattcaataataaaggtttttggatgatgtatgtggccaaccagaaataaaaagttacatttccagattctgaaactagaaaacaaacaaaaataaagaac

SEQ ID NO: 17352 - DNA, 463 bp, Zea mays
  Clone ID: LIB3151-012-Q1-K1-H11
gtcgatacaccattacctcaatctactcgagagcgcataacaacacgatcgacaccatgagggtgttgatcgttgccctcgctgtcctggctgttgttgcaagcagccacctccacgcatacaatcagtggatagtgctgacagccaccgccgtctgctgatatagcggcggcagtgcatttgccacctatccattacctgacagctcaggaggatatcccaccgacggtccaactgccatcaccagtacacctgccaccgccatatcatgtatcgccacaggcatatttagcgcctccaccatgccaatgaattactgaaccgcaactacctcagcattatctacagacacacaaatgcgcgtgcgaacagaagcatgcaagctcagcgccagctgcaagaaacctgtggattcaacagaacccatagcctgaaccatgctatctagttgctgacgcatcag

SEQ ID NO: 17353 - DNA, 130 bp, Zea mays
  unsure at all n locations
  Clone ID: LIB3151-012-Q1-K1-H2
gnnccggnccncaccccgcccgnccannnccgacngggccgnncctccnccacgccccggcgcgcgnnccggcagaacgggaggcgaggccanccgcgcgcgcgcganggcgccggacccgngcggcgac

SEQ ID NO: 17354 - DNA, 434 bp, Zea mays
  Clone ID: LIB3151-012-Q1-K1-H3
gtggaatccagtagcaacaatagagcaacaatggagaccaagatattttccctccttatgctcggtgctctttctacatgtgttgctaacgcgacaattttccctcaatgctcacaagctcctatagcttccctttttcccccataccttccatcaattatagcttcagtatgtgaaaacccagctcttcaaccatataggctttaacaagcaatcgcagcaagcaacatacctttatcgccactgttgtgtcaacaatcgccagccctatctttggtgcagtcattggtacaaaccatcagggcacaacagctgcagcaactcgtgctacctgtgatcaaccaagtagctctggcaaacctttctccctactctccgcaacaactattaccatttagccagctagctacttgctactcttaacaacaacaact

SEQ ID NO: 17355 - DNA, 466 bp, Zea mays
  Clone ID: LIB3151-012-Q1-K1-H5
cggatcgacgcgacaggagggagggaggaaggtgacggtcgatcagagtctgaggcggaggccgatccaccaccgcagcgacgagcgggaggagatgaagatcatcattgacacggatcccggcatcgatgacagcgtggccatcctgatggcattccagattcagggaatccatgttctatggctcaccaccatcttctgaaactgcacctcagagcatgccacactcaacgttattatcctgtgcgagaaggcaagccatctagaggtcccagtagctgagggcagccatgagcctctcaagggaggaaagccgcacgttgctgacttcgttcatggacctgatggcctcgggaacgtagatcttcctgatcccactatcaagaaagtggaggaaagtgctaccgacttcttggttgataaggtctcgcgatttcctggagaggtctctgtgctcgccttgggt

SEQ ID NO: 17356 - DNA, 422 bp, Zea mays
  Clone ID: LIB3151-012-Q1-K1-H7
gtacgtcaacctagcaattagctcatcgacttcatattggagaactcgacaccgggaaggtggggatcgttgcccttgctctcctggcgctcgctgcgagcgccgcctccagtacaagctaagggtgtggctagatatacaccaacgtttcatctaacgccttagtaaataatatcgattacaaattgtctgccgtagaaacatactgccagattcatgctaattatctattaaattaactcacttaatgccgtgccagcaattcagatcctgatccgacacaagcgtcagcataccgttcctcggccaaaacgtaaagttgctgaagcaccactgcattccgacggcaacaccctactgatcgccacagtgccaaacgctgcagcagcactgctgacaccagatcacgcaggtggagccgc

SEQ ID NO: 17357 - DNA, 360 bp, Zea mays
  unsure at all n locations
  Clone ID: LIB3151-012-Q1-K1-H8
ngcngctgnnaaaaagcagcaacaaccactaccatncagccagctagctggtgtgagccctggtaccttcttgacacaaccacagttgttgccgttctaccagcacgctgcgcctaacgctggcaccctcttacaactgcaacaattgctgccattcaaccaactggctttgacaaacccagcagcattctaccaacaacccaacattggagggggcctcttttaaaattcttatgaaataaaagtcaaaaaataaagtttttggccggaggttgggggtttccaaaaaaaagaaagagccattctataatcttaaaaanaaaaaaaaannnnnnaaaanaanaaaaaaaaaaagaaaaa

SEQ ID NO: 17358 - DNA, 434 bp, Zea mays
  Clone ID: LIB3151-012-Q1-K1-H9
gcctaagcaccagcaccagcaccatcaccagtgtatccggccaaggtccgtaccgaggaaagacgggcggggaggagatggccgcctccgggaccggtaacaacaggttcgcccatacatgcgctcgcgtgcggcagttcatgatggagcacaacaggcaggtgcggatggatgacctcatcggctcctcctcgtccccgaggccactgcaactgacgccagtccctgtagcgacggggccgccgccggcggctgcctgagagaccgacgccggcgctaggactttgccgctgttccccgtccgcaatagcagtagcacggagatcatcatgccagagcaggaggccaaggccaccctaaccatcttctaccagggccaggtggcaacgtttcacaacttcccggcagacagagccaaagaccttatacaaaat

SEQ ID NO: 17359 - DNA, 473 bp, Zea mays
  Clone ID: LIB3151-013-Q1-K1-A3
gtcgaggatcgataagcttactaaattacacataataattcaattaataaaatttataaacattgtttccgacaataaagtcctcaacaggattcctggagataaggtttttaatagagttcttgtcaattagagcttacaataggtgagtaatgctcaaatcaatagtacaaatcaatttccacatttcaacaacattcagtaatcattaaagataatgcctaatgaacgttatacggatacgagtacacagttaaccatccaacacactagatgctcataagagccaataccatccaacacaccagatgctcataagaactagtaccatccaacacaccagatgcttagaagagctagtaccatctagcacaccaaataacattgtaaaataacatgatagtccacaacaaatataggaccttggtatatccagtgaacagagatatacaaaaaaatcatctttatttctc

SEQ ID NO: 17360 - DNA, 465 bp, Zea mays
  Clone ID: LIB3151-013-Q1-K1-A4
tcgcaagcttactaaatacacataataattcaattaataaaaattattttcattgtttccgacaataaagtcctcaaggggattgctggagataaggttttaaatagacaacttgccaattaaagcttacaataagtgagtaatgctcaaatcaatagtacaaatcaatttccacatttcaacaacagtcagtaatcattaaagataatgcctaatgaacgttatacggatacgaatacacagttaaccatccaacacactagatgctcataagagccaataccatccaacacaccagatgctcataagaactagttccattcaacacaccatatgcttagaagagctagtaccatctagcacaccaaataacattgtaaaataacatgatagtccacaacaaatataggaccttggtatatccagtgaacagagaatatacaaaaaaaatcatctttatttctc

SEQ ID NO: 17361 - DNA, 471 bp, Zea mays
  Clone ID: LIB3151-013-Q1-K1-A5
aggtcgacggtatcgataagcttagaagtttgggcttggcgaaataaggttcgccaatagatttggtaagctgaagtatgccaataaggttggtgagttggagttcgccagaagacgtggtgagatggtgtttaccggaaggctgggtaagctggtatttgccagtggactaagcaaatgtaatcgccgaagggcttggcgagttgaatttcgtcagtgggcctagtgagttgtattgtaacacctcgcaagtgaagggttcgccagttttccaactaactggttgtttgccaaggtttaagcgagctgggggtttaccaaaagattatcaacaagggacttcactagtaaaagtgtatgccttaagatgtccgataccaagttgggtttgctagtttctctataaggtaggtttgctaatgtgatggtgagctagtgttcgccagtcttgctgtgaacaggggattgtca

SEQ ID NO: 17362 - DNA, 461 bp, Zea mays
  Clone ID: LIB3151-013-Q1-K1-A6
tcgataagcttaagaaaatcggctatggtggttcgctagactaaagtatttttgatattattctttgagattcatgtatgttttaagttgtaagtgaaaatctacctagccatggttcaaattttgttaattgaaggagatgatattcggccatgaatgttacattcttggttggtattttgatgtctttggcgatgaggtatgaagatggttgattttgagtgttaaataaaaaggatgcatgaattattgttaaataatggtcgaatgtagcatgattaaagatgtgaataaattgaagttaacgaggttgtcaatgaaaaatatgagttggatgaggcttaaagaataaaaatctatgtgactagaggtcaaggacattcggtcatatgcttgtatgctagcaaaatcggccaagtgattatgtggtggaaattaagtgttaaatggaatgaaaatga

SEQ ID NO: 17363 - DNA, 473 bp, Zea mays
  Clone ID: LIB3151-013-Q1-K1-B11
cggctgcgagaagacgacagaagggatcaaagacacatgtcaaaaatggaacttcatgtgaaataaactatggaactggatcaatatctggtttcttcagtcaagataatgttaaagttggcagtgctgttgtcaagcatcaggatttcattgaggctacccactaaggaagtcttacctttctgtcagcaaagttcgatggaatactgggacttggatttcaggagatctcagttgaaaatgctgagcccgtatggttcaaaatggtggagcaaaaacttatcaatgagaaggtgttctctttttgacttaatggggatccgaatgcgaaaaaaggtggtgaattagcttttggtggtgttgacccagagcacttaaaaggaaaccacacttatgatccaattactgaaaaacgttactgacatattgaaatgggagattttctcgctggaggcgtttcaacaggtgtttgt

SEQ ID NO: 17364 - DNA, 479 bp, Zea mays
  unsure at all n locations
  Clone ID: LIB3151-013-Q1-K1-B3
gacggtatcgataagcttgatgggataaaacattttcaacaatcaaattcgatcactggagataaaacatgcttttaagagaatttacttatagataaaataatcttataactctatttgaattgtcctaaaattatatccaaagtattatctaaaaaactctttaaacatctgtttaaacgtgaaaatgaacaaatggttgaaagagttgaagcttttgtgatctgtgaagatatgacatttttctctgtacagatggtgtccccagatctttcaagaaaatacaatggctgcaagctctaaatcatgagccgagtagtttttctcgtgcagtttcaactgttgggacgcataagctaccactttaccttcttgcatcaaaacacagcccaaaccatttaatgaagcattgatataaatcacaaattctttactggactatgattgaaccaacatanggctcttgtcaataatgcttt

SEQ ID NO: 17365 - DNA, 396 bp, Zea mays
  Clone ID: LIB3151-013-Q1-K1-B4
gacggtatcgataagcttaatttgaatatgtttagatcaagaaccaaagaaatcagatttggatcaagggaaaacgaaagttatcgactagctgccttgttccgttttgtatcgttcgaggtaagtttataaggaaatagacatgtttaattgtagtttaatattaaatatgtatgatggaacgaaatgtatgaagttatagatgctatggctgaatatgaataagcttactcgacttgtataaaacatttgttttactatttaaaattaataaaataataaatatatatttataattaaaattaaaattaattttacattatttaaattgaacttggataggatcaaaagctttgtgcttttaagatattggaatatttagctgaaatttccttg

SEQ ID NO: 17366 - DNA, 417 bp, Zea mays
  Clone ID: LIB3151-013-Q1-K1-B5
gcgcccacgcgtccgcccacgcgtccgttctacttatccaacttgttgctgctgatcaactggtgacaagtgccatcaaacgcaagggaactgcccccactgcgaaaattgactgcggtggagcttgagcggctaggagccgattattatagacgccacacctacgcaagagggcttacgggacatgttgctcacgcggtaactgtattccaccgaggacagtctctaaccaagaaacagtgcccttgctatgatatcttgaccaccgacgctagaacacgtacgtgctcttgattgataatcgacaatcggaacaaatatttctattttaacggtcttccgcaattgataaacacacacatggtttactttaaagagggataaatcgaagcattggacttaattacttgcattttt

SEQ ID NO: 17367 - DNA, 72 bp, Zea mays
  Clone ID: LIB3151-013-Q1-K1-B6
aaaccaagcaagattcctaatgcttccttttttaattatcatgaattcctgccggccggggcatccattaat

SEQ ID NO: 17368 - DNA, 491 bp, Zea mays
  Clone ID: LIB3151-013-Q1-K1-B9
tcgacaagctgtagagactgtgtacggcctgatgccccatagctggaaattattggccaccgcctggagctaaccatcgcaggtgttgtctgcacatcatactgctcatgaaagccaaacaatgcacccattctaaggatgatggttggaacctttgaaacaactggaattgaaagtgtttgccccagcgtaagcatagagagtaggtggtagtttcttatgccaatttttaccagtctcggtcatcttctgtaatttgttttttcttctgtttcttttcttttggcaacctttgttgtactgtggtatggcgcattatctttgaaaagactgcaaacttttggcattgtgcaattatatataatctttttttttttgaaatggatgacttttgactttgtaatattggcatatgaagctatcttccccttttaatggagtagttgacgtccacaaaaataagtcattgtcagcttgaaacttttgacgag

SEQ ID NO: 17369 - DNA, 466 bp, Zea mays
  Clone ID: LIB3151-013-Q1-K1-C2
tcgacggtatcgataagcttcttgttatccttgataatcaatattaattcactaatagttcgactatgtggttgaccaggcactggatcaagtggcttctactgatctgaaacaggtcatgcttgttaaggcattattaaatgctcgtgacacactgcttgcggagctgcaaaaacttagtgctgccattaaccatgctgttcatttgactgaatttacctccaaaatgaacgatatgaagttatttgattcctttctgcaagaaccggttgctgctgatgctgaagattcagcacaaggcaagccacaaaatggtcttgaggtccttgctttatgttattgaacagtgtactcttattcttatttttgtgttttaatatattaaaatgataacacctttgtctcttaacagagagtaaatggcagattagagtttcaaagtgatagattgctccataatttatcg

SEQ ID NO: 17370 - DNA, 473 bp, Zea mays
  Clone ID: LIB3151-013-Q1-K1-C3
tcgacggtatcgataagcttgttcaacatacaaacttacttcggttcctaaaatggcaaaaggacctattcgtcaattattttgtttttcactcgatctacacctgaactttgtttttcttgatctataatatcacatttaacttatttaatcatcacattattcaatatagtccaaaaatgcattatggaaaaaattacatttttgctcctaccttttcaacattttacaatttagtccctagacttgtaaaatgaatttttttcaatttcatcacaacccaagtctagcaaaatattatttgtgctcataaaaacccatatttttcatttattcacacttttgtacacattttatagacttttacaaataagtccctatttaacgtttttatcaaaaatcacttgacaaacgttgtttaactaacaatgaacatgcattttctaccatcaaacaccaaaatacaaacatat

SEQ ID NO: 17371 - DNA, 430 bp, Zea mays
  Clone ID: LIB3151-013-Q1-K1-C7
atcgctgagcttgcggttaaattataaaacagaaaagatcgaaacaagggttaaattgcaacgagttggaaagggtgagggagtgcacacgcaactatgcccttcataggaaacacgcggatccttgccccgggtcggcacaacgtgcgggtcgagagggcctaaaaacggcgccgttgtatgacttgtattaatatataacaaatgcccaaaaaaatcacttttatctgttttctaaaaaaaaacatagagccttttgtctaaagccctacaaggacgcccaagattcggcggctttcgataatccgattattctccgaagaccatcgtgcacgggggtatgaagtacaaaatcagatcttttcggttcatgtctaatctgactgactctataccacagattcatggtgaaatgatgagaaagacgatt

SEQ ID NO: 17372 - DNA, 465 bp, Zea mays
  Clone ID: LIB3151-013-Q1-K1-C8
aggtcgacggtatcgataagctttgcaagcgatcgtcggaatgtaaggcttaggctagtagctaacgactttaacccttttaaaatcatgagtacttcgtacaatacttggcttgtagtgcttgttctttacaatttgcctccatggatttgcatgaagcaatcttcttttatattatctatgattatccctggagagaaaggtcccggaaatgatgttgacatttatttgcagccacttattgaagagttaaaatagttatggtcgggtgttgagacatatgatgtattgagaaaggagaacttcaatttacgtgcagctttgttgtggacaattaatgatttcccgacttatgccaatttatttggttggagtaccaaaggacgttatgcttgtgcttattgtgctgcgcaaacatgtttgaaatggttatataatgggaagaagttctcttatatgggggca

SEQ ID NO: 17373 - DNA, 495 bp, Zea mays
  Clone ID: LIB3151-013-Q1-K1-C9
gaggtcgacggtatcgataagcttgaaaattgaagaaaccctagctatggaggagagcaaatttcggcagcaactagtgaagatgatgaccaattgggtgttatttttcccattttatttcatttaatatacaaacccttactactaaactttccaaaaattccctccatgtccaacttttgtccataacttaggaatgggtcaaattgctatttaagacctcctagttaatatcccaaagcaatttcatactaaaaacttctaaaacacgagttttacaatttattcggtttagtccctaatctcaacttaagcactcaatgtatagaatttcataacgaaattttcacgaaatcatgaaatcatatcataaaccccaaaataattataaaacaattatgtctatcgccgatttgtggtcacaaaaccactattctgattaggccctaattcgggttgtcacaattcttccccctttagaagattttcgccccg

SEQ ID NO: 17374 - DNA, 476 bp, Zea mays
  Clone ID: LIB3151-013-Q1-K1-D1
gtcgacggtatcgataagcttgagcattgctctcaacttcctcggattcagctcagttgaatgacattactatatgaaaaacatgtttaaaatgatcaggagatatcacactatcacagattatataatggcatgtatagctagactcgtatacaccacgttagtccgataatcgactaaatcgtagctctgataccaataaaacatgcattagaaacaagtcaaaacattagaatctcaaagaagtattttgcaaaattttaaattttttcaaagtgcaggggacacacgcccgtgtggtcaggccgtgtggtatttgacgtagggcacacgaccatggccccaacgtgtgtaaccctttgacttgcaatacatttaagtgcaggggtcacatggccaagccacacgctcgtgtgccaagccgtgtgattaattctgagcattctgttttgaaattttaagatgtaggggacaca

SEQ ID NO: 17375 - DNA, 424 bp, Zea mays
  Clone ID: LIB3151-013-Q1-K1-D12
agctgagaagctcataggcattaaacacaaatcatatcaaatattgacacaatcttatatctattaggttaactgatggatcctccaaatcacaatttcattaataactcattggaataatttccatatggctactcacaatttaactcccttaggcccatttctcatttacttcattgtcaatttaaggaacaataagggaattgagtgcttcattatcacattgccatagtaaactatggactttcacattgttacgcatcacacaccgaagccatagccttgccatggtcttacacggttcacatatcataccgaagccatatccagacatggtcttatacggaatcacattatcacattataccgatgccatagcccagctatggtcttatacggagtcacattatcacattgaaccgat

SEQ ID NO: 17376 - DNA, 398 bp, Zea mays
  Clone ID: LIB3151-013-Q1-K1-D8
cgaggtatcgataagcttcagagttccagtgatatacaaccatccatacggcaacattcaaaataaaacacacttggagcgtgacaagtctcgaacgtcagaccccatggaacactgcacatgcctctatcccctagactagtaggcattttatgtcatgttttactcacatttatttaaaaatctaccaactaaaggcaagggtttatttcataaaaataaaactttcttgcaaaagcccaggtttgaacctaagacctctcagacactcccagaacatgtaaccactgaagcagacatgcatttgtgtgcaacacaatatacgtaaatagatatttaaattttggggcggtataactctaccccactaaaaaaaaattttggccttaaaaattaac

SEQ ID NO: 17377 - DNA, 407 bp, Zea mays
  Clone ID: LIB3151-013-Q1-K1-D9
gttttcgaaaaaaaggcgcttttatcatgaatggtttaatttgtgagggagatcgcccctacacaataaaaacaagaagcaaatggcttctttccatctcagaagattagtaagcagcgttcttaactcgcgggtgcaaacaaatccccttttgaccttcaagtgcttctgttctcctcctgttacacctttcacttcccatgctagttacgaccctaactccatccacttgtccaaccaataaagcaaaagacgcttgttcaacatgctattatacaaaatcaagcagcgagggttcctcgaactcgatttggttcttcgaaaatgggtagaggacaatattcactccttggatgaatatcgcgtttgaactttcattcttcttctcgacttggagaatccaaatt

SEQ ID NO: 17378 - DNA, 477 bp, Zea mays
  Clone ID: LIB3151-013-Q1-K1-E1
ggtcgacggtatcgataagcttgtgtacaagaaaactttgtgtattttgtgattttgtgaattagggattaaagtgtcgaaatgtgaaaatgtgagggctagtttgcaatatgccttaattgtgcgtatatggattggtttgaatattatagatcaagaaaagtggaattcgcttcaaggttacccaaaagcgacttacctcccaccttcaatatatcaatagaatctcacacctaaataagtctttgattgatgcccacgagtgcttgaaaatctctctcaagcatcgagaaggagaaaacagacatttcccaataagagaaaaggttcagcaatatagaaaaggttcagccaaaaagagcaatgtggggaaaacttgtctacaatgaaatacagtaaaagggatcaaacgaatattcagcaaagaaagaggaagaagagactaacgtgaaaactaaatggcaaaactgaaagaac

SEQ ID NO: 17379 - DNA, 352 bp, Zea mays
  Clone ID: LIB3151-013-Q1-K1-E10
aggtcgacggtatcgataagctttgactgtgatgacacacttcatgtcatgatatatattatgaaatcgacgacgatcctacatagagtagtacgactgtactacacacacatttatatcatatatgaacacttaacgcatcaagcaatccttgaaccaaaaaaacacataacgctatactactaaatacacgtggaacaaatcttattgattcaacaaagaaatctatattgttgatcgagactatcaagtgtatactatgcatgatgaaggacacacacagtattagagcagtcgccaccgttatatatctacggatcttaatatgaatacagacggacacaatgatgct

SEQ ID NO: 17380 - DNA, 466 bp, Zea mays
  Clone ID: LIB3151-013-Q1-K1-E11
cctcaggtcacggtatcgataagctttctgggattagctggctattatcaacgctttgtaaaaggattctcgatgatttctacaccgaggactcattttctatagaaagatgtgaagttcgaatggtctaagaaatgtcaatagagttttgaacaactgaaagcattgttaactaaagcaccagttttagttcagcttgaatttggtaaagagtttgtgatcttcagcgacatgtcattgaacaatttgggatgtgttttgatgcaagaaggcaaggtgatagcttatgctactaaacagttgaaactgcatgaaaagaattatccgatgcacgacttagaattggtcgctattgtatttgcattaaaaatttggcgacatcatttatttggtgaaaagtgccacatcattactaacaacaagagtttgaagtatttaatgactcaaaagatttgaatttgcaaca

SEQ ID NO: 17381 - DNA, 375 bp, Zea mays
  Clone ID: LIB3151-013-Q1-K1-E2
tcgacggtatcgataagcttcaactgttgctccctcacacgcgcggttccagccctttccacgtcaccacacgaacgacctcttttgtacgatggtttcacctgcaacaaacatgcaacaaggaaagcaagcaaaggaaaaacaacaaaaattacagagattaaaaatgtttataatttttttttctgtgattttagctatataaagccgattgattcatttgtaaaaggattcacacatagtatcaataaaaaagaaagaattctaaaacaaaaatcagaaagttttgaaaaagtgggctgagtttttttttcttttcgattatattcttttacgatcgatttgatccttttatttgtttgattattcattgag

SEQ ID NO: 17382 - DNA, 417 bp, Zea mays
  Clone ID: LIB3151-013-Q1-K1-E3
aaagcttgaaccatcaaaacatttgattcacctaacacatttcttacaatattttaaacatcacacaatgcaggggatggagggacactattataaccatcataatatgtcctatttatatgagtgtcgacttagccaaccccatgagctcctataattggccgcacttccaattacatatgtctatcccatctaaagattcctcataattatcacacgctaacatatttgtgttatgcgcccattaacagtacattactcatccatccattataattgacagaacctatcatttttaattttaaaataatgtatttataatgccaatagtcattcactaaagatatactttgtataactgaactaaagacataatgctataccaagtcttaactatatttttcatcaaaagtgact

SEQ ID NO: 17383 - DNA, 513 bp, Zea mays
  unsure at all n locations
  Clone ID: LIB3151-013-Q1-K1-E5
gagggcgacgggatgcgataagcctaggagagtctgaattggctactcgatctcttggcacaaatggtgtgctcttggtgtaagccaaaaaatgaatcagcgcttcgatgcattgtacacagactgctacatgcatcttaccattacatgtgaactcttcatgcatcgaactcttgtgtaatgggttctaaacaaaatatttggcgtgtaccgtatttaacacacagaactcaaatgtaagattaaactaaattttctagttggaacataatttaaaacataaatgtaaacacattaagttaacagtttagacacaattaaataatgaacttagcaacgacaaaacttaaattcgtgctattaaccagacattaattaaatacatgtaatatatctaacgacaatatttacattgaactaagggcttaattatgttcagcttaagacaacggcataattaaacacattgtaatnaattaagaacaagttgtataagctattacgtaatatttg

SEQ ID NO: 17384 - DNA, 448 bp, Zea mays
  Clone ID: LIB3151-013-Q1-K1-E6
gacggtatcgataagcttgtgaaattgaaaagaaaaaagaagaagagaaaactattgtaaaatcctatatgttagggaagttgctgtcactcattctatgtaccattataacaaatatgttttttttttacttgagccatcattttgggccttatataggtttcaattgggctaagtttggtctatttaattatgacatgtttgacaaaacagtagcatgggtcgactagattagtcacccaatcaacttcctttagatggtttgataatgtaacatcctatactcggtccagtcaccaaacctgagctataggatgttacaacagtaaaagtgatgtttggaatgttaggattatttggtatttatttcactaaagtttttaacttttaatgatgctttacttaagataactaaaagtgaaccacaattttaaactcgatattctat

SEQ ID NO: 17385 - DNA, 396 bp, Zea mays
  Clone ID: LIB3151-013-Q1-K1-E7
aaaaaataagaatagaaatctattgtttaaaactatacaaaatggaaggggctgtgtctcattttatataccaccataacaaatatgttttttttttacttgacccattattttgggccttatgtaagtttcaattgggctaacctaggtctatttaattatcacattttagataaaacagtaacattcgccgactaaattagtcaccctatcaactcactttagatggattgataatgtaacatcctatacttggaacacacaccatacctgatctataagatggtacaacaataaaaataatgtttacaaagaaaggattatttggaatacattttactaaagtaattaacttttaatgatccttctcttattataactaaaaaagagccacaa

SEQ ID NO: 17386 - DNA, 489 bp, Zea mays
  Clone ID: LIB3151-013-Q1-K1-E9
ggtcacggatcgatcagcttatatgtactttggctatgtgagttaggtgttaagtaacctaattatcttgatatgcatattacaaggtatagatgagttgtgttttggttgcataactatgtttggttaataatatgaatgtaaagagttgtgaattagtatattgtaataaatctgcttaagacagcagctgtaatgtgattttggaaaatcaccataaattgagggaaaggagttagaagctgaataaattatgtaattaaatattaatgagtctagtttctaataaaagaaaccgtgtaagcaaaagagtttccaataatgagatatttgaaatgatgtgggacagggtcaaaatgacttctagatcctctattctgtgtttatagaataattataaattgtacaaaaatgtttataagatgaagtttacatgcttagactccttaatgaatctagtttcaaatgaaataaacgagaacatatttt

SEQ ID NO: 17387 - DNA, 487 bp, Zea mays
  Clone ID: LIB3151-013-Q1-K1-F1
ctcgaggtcgacggtatcgataagcttccatattaagcaaatgaatcttgggaatgcatgtagcagctacattcagctgatgagcttaattgatcattcaataggcaactcttactgaaaagttatcaataataaagagggcacttgaacagccacattaggtgtgaatggacggttttgaagagccttaaaatgtgaacaccaagaaccgaatggccaaaatgtatccagcaatgtgaaggaaataatggcagcttgaaaaactatctctttagccgaatggtcacttagagaacttcaataatcagcacaccatttttaatgtagttcatgcatgtatcattaggtgcattgaatccaacatgcatgcatcttgcacaccacattcggccaacctttcccatgcatcttccacattcggctgaacctaaataaaacaaatgaacctcattaatttaactcaattcagctgaacataatatgaaca

SEQ ID NO: 17388 - DNA, 331 bp, Zea mays
  Clone ID: LIB3151-013-Q1-K1-F11
tcatccttgcatctaacttacactttatttcatgctaaaatatttatatgccttgagaggctttataactcaaaccacctatcccaatgattaataaacaaaaaagttacaagcctaaggcacttacattaatgcataaaggttttttatatgaatgatagatcaaaattaatatttaatgatagcttaatatactatcaaaataaattataataaacacatttcaatcaatgaatttaatttcaaaatataaaaacttccataaaataaatctaaaataaaattaatatatgtctcgctacacaccaaacttatattaatctatcatctt

SEQ ID NO: 17389 - DNA, 393 bp, Zea mays
  unsure at all n locations
  Clone ID: LIB3151-013-Q1-K1-F5
gggaaaaaagggtggaaccaagagaactaattattgaaagaggattgtacttttaattttatgtagtatcaaaatttgatggtggtggggtaaattattaccgaacagntatattgcgaataagaggatggtttaatataaatgtttgtgggaactggaatgctttattaggcttataatttgcaaaccaataaccgcattggacaaatgtatttagcaaagggaaagaaattatgggtagttgaaaaaatttttttttaaaaaaatggttttttaacactatttgattaaaatcatgtcattttttattgtgcaaaagcattgaataattggggcagttgatataagataattggtttttggaaaacatgtttgagataactttaccaagta

SEQ ID NO: 17390 - DNA, 448 bp, Zea mays
  Clone ID: LIB3151-013-Q1-K1-F7
gtcgaggtatcgataagctttatgggtttagtcggttactaccaaagattgtaaaaggattctccatgatagtgactccaatgtcaaggttgctacagaaagacattaagtttgaatggacagaaaagtgtcagcaaagtttcgacaagttaaagacattactgactgaagctcctgttttagtattgcctgaaccgggaaaagagtttgtggtctatagtgatgcatccttaaatggattgggttgtgtacttatgcaagatggcaaggtgatagactatgcttcacaacagttgaagccacacgagaagaactatccgacgcgcgatctagagcttgccgccattgtttttgccttgaaaatttggaggcattatttatatggtgaaacttgttgtatatttacgaccacaaaagtttgaagtatttgatgactcaaaaagaattg

SEQ ID NO: 17391 - DNA, 475 bp, Zea mays
  Clone ID: LIB3151-013-Q1-K1-F9
gaggtcgacggtatcgataagcttctcaattctcaacgcaaacactaaccgaaatcctagtagtttgcataaaatagttaggtattgacaggaggagcacccaagcaggattcacacaccctaccatggccggaagattagcttccaacctttccaccttttttaaacccttttaatggccaaaatggaaggttaatggccattggcggtgggaccatgggcttccttaattgggacctaaaataaccggcttaattaattccaggtccaccacaattttaagtaccacctttgggtcttgatttttaaaagaaaaccacatgggcttaataggatataacttaaggccctgaaccactccaaatggtgtttaaaccatcctggacaattttttctgggctacatatactttcgcaaacacgagattattcatcaacacagaatagatgcaaaatagtccggccattcctcccaa

SEQ ID NO: 17392 - DNA, 434 bp, Zea mays
  unsure at all n locations
  Clone ID: LIB3151-013-Q1-K1-G1
gacggnnatcgataagcttccatcatcatacanaacttagatgagcanaacatttgccttcaanctccgccacagtctcttcgacttaacgcatcagccacgacatttgcttttcctagatggtacttgatcgaacagtcatagtcctttaacaactctatccaccttcgctgtctaagattcatctccttttgagtcagcaagtacttaagactcttgtaatccgtatagatgatacatttctccccatacaagtaatgcctccatatcttaagtgcgaaaatcaccgctaccaactccaagtcatgcgtaggatagttcccctcgtgaggcttgagctgttgagaagcataagcgaccactttacccttttgcatcaacgcgcagcccaaacctacaagtgacgcatcgctgaacacagtgaaatccttacc

SEQ ID NO: 17393 - DNA, 454 bp, Zea mays
  Clone ID: LIB3151-013-Q1-K1-G10
aggtcgacggtatcgataagctttgtatatatagtatataacatgaataggctagtgtcattttggtatgttttgaaccttgaatttagccatgtgagttggcttgtaaatggtattgttgatgatgttgaattttattaatgttatgagttaatttgtgatatgtgatgtatttatgacgctttatgctttggtagacataatgtggttattttgatgagttgatgaataagtatttagaaaattgttaatgatatgttatggtttgagaaatggtaaattttggtataatttaatatgatacttggatgccattttggtttagttaatgcttgatgatttgggttatgtctaaatatggatattagttaaagtatcaatttgatttggcatgtttttggttgtggaattgagtagtgaaaaggatgatgtataaatggcatgaaatgcgtat

SEQ ID NO: 17394 - DNA, 501 bp, Zea mays
  Clone ID: LIB3151-013-Q1-K1-G12
aggtgaggatcgacagctagtcaaatgtacatatgatatggactaaaagaaaaagagatatatgtcttctttaaattgggcaggactacagatgatgtgatggaaagagtccataaaataatttctcatggtaaacacattaatgtataattatacttccaaaaaagactggtgagacttaaaatggcagttttaaaacatttggaatgcaactttcatgaaattaggcaggactatggatgatgtggtggaaagagtccataaaataatttctcatagtaaacacattaatttataacttccaaaaaagactaatgagacttaaaatgggagttttaaaacatttggaatgttacttccattaaagtttttagttacaaatagtgtgtcactgataaaacttagatggtaaattttgcagtaaatgaaataaaggattttcattcaaattcaacacttggatttatccaagtgccaggtagcttgcctgtctcgataggc

SEQ ID NO: 17395 - DNA, 474 bp, Zea mays
  Clone ID: LIB3151-013-Q1-K1-G3
tcgacggtatcgataagcttatattttataagtgatttatggatatgtgatttatgttgttggttgttttacagttttgcttaatagtcctaaagtttttgagaaaatatttggggatcaattaatcatggatattatcagttctcttgaatgtaagtcctatactgcttgttcgtggatttattattggtgactattgttgattgaattaaatgtctaatttgaaaatttacttatattattggcacgatacttctttatgcaaataactttgttatattttaggattttctgagagttcttatgtttccagtttgtttgctttctcttttcaagtgcatggttttttgtgttattttttaattcaatttctaaattatgacctactatatctgtaactagagttttttttgaagttaacctccatgtagcagcaaagatggccacgatggtcacatgcagaaaggcagcagc

SEQ ID NO: 17396 - DNA, 462 bp, Zea mays
  unsure at all n locations
  Clone ID: LIB3151-013-Q1-K1-G5
aggtggaggnatcgataagcttatatgtactttggctatgtgagttaggtgttaagtaacctaattatcttgatatgcatatgagaagggatatatgatttgtgttctgggtgcataactatgttaggataataatatgaatgtaaagagttgcgaattagtatattgtaataaatctgcttaagacagcagctgtaatgtgattttggaaaatcaccataaattgagggaaaggagttagaagctgaataaattatgtaattaaatattaatgagtctagtttctaataaaagaaaccgcgtaagcaaaagagtttccaataatgtgatatttgaaaagatgtgggacacggttaaaatgacttctataacctctattctgagtctatagaataattataaattgtacacaaatgattataatgatgaactttacatgcttagactctgtaatgagtgtag

SEQ ID NO: 17397 - DNA, 284 bp, Zea mays
  unsure at all n locations
  Clone ID: LIB3151-013-Q1-K1-G6
gacggnannngaaagctcggaagatggtggagttggaatgagactctgaggttgaattggtcatgagtgcttcaaggaaaattgaggtgggtgttgagtgatttggggagaaaataaaggaatttgaaataggagagttgcatgggtggagtgttggtgccgaatttgaactccctttcttactcaaaatttctgcagggggttgaggtcacatttcagtttttctttgctcaatttttggtttttcgaggtgtttgacatactaaaattggatttctactcct

SEQ ID NO: 17398 - DNA, 461 bp, Zea mays
  Clone ID: LIB3151-013-Q1-K1-G8
gacggtatcgataagcttactttgtttattttccattagaaacacaaaaatttatatactttttcatacccaattctacttaaattcatgcaaattcggttaaattcttgtcaaaaaaataattaaatattataaaataattaaattatgttaaaaatatgaacattatgaattttaattaattttatagttattttttattaaatttggttatttttgacagaattacacaatttgagaaaaaggacccgatgaacactgcgagaagaacaaaatcgagagtaatttgaagtatcgaggccaattaatttccagcccaagacggtccagaaatgtgtattaattcataattaaattaattttaatttatttcctatttaatttaggttaaatgaattaattttaattaattatgaagaaatggcctagtgaaccgcattggttgaaccgaatgaagtgag

SEQ ID NO: 17399 - DNA, 291 bp, Zea mays
  Clone ID: LIB3151-013-Q1-K1-G9
cccttcgcttgggctgttaataacgacagaagggtgcaccgcttgaggatagttttcaacatcacatagcgccttactgtctgttcaagctaccatctctctctctctttcttagtgcctccttgccagaaattaaaatggcccaagaaactttcctattcacatctgaatcagtgaacgaagggcacccttacaagctctgtgaccagatctccgatgctgtgctcgatgcatgctttaagcaagaccctgacagcaaggttgcctgttaaacctgcaccaataccaaca

SEQ ID NO: 17400 - DNA, 443 bp, Zea mays
  unsure at all n locations
  Clone ID: LIB3151-013-Q1-K1-H11
aggtngacggaatcgacaagctttcaggatctttcaagttagggggaaacttgtttatcaagactgtactacagccttctgtgagtgcaatagtgtcaggatcagtgagttttttcttcttggacaagaggtctttcataaatttcctataattagaaatttgtaccagagcacccactaaaggaatgttgatctgcagttgttccagtgtatgcaaaaactactgatactatttataattttcattcctcttgaatctttgtggaaaaggtatagataaaagtacatttggttgaggcgatacttttggttgcatccacaatttcgagggtcgaatataaagcatgtgaacggcagttggcggtacttctttgtctggtacatctacaagctcttcagcattcgccttcccatcagggtttatgtcaccaatatctggggat

SEQ ID NO: 17401 - DNA, 377 bp, Zea mays
  unsure at all n locations
  Clone ID: LIB3151-013-Q1-K1-H12
agacggtgcacggccgtgtggtgtcaagcacgttttgttacgtggaaagaaagccgngtggttgaaaagtatagggtataggaagggaaaatggggattaatgcaaggagagtggatttgagggtggtttgggggttggggaagtgagaatctggggaattgtggtcggaatagggattaggggttacgaaagggtagatttcagctggggttttgaaagggggaagaagatgaacagtggtttgtttatataggggagggtcaaacggcctatagccacgcctgtgtactttaagggtgagcccatgtttttcatatttggcaagtttggtcgtgcccgtctactatcacatgccagtgtgtcttgagcgtgtgtc

SEQ ID NO: 17402 - DNA, 238 bp, Zea mays
  Clone ID: LIB3151-013-Q1-K1-H2
ttttaaacacaaaaatttatatactatttatacccaaaaatacttaaattcatgcgtgtaccttttaattcttgtcaaacaaataaataaatattatataattattaaattatgttaaatatattaacaatatgaatccttattaattttataattttttttaattaaatttggttaaatatgacacaattacacaatttgagaaaaatgaccactttaacactgctaaaagaacaaa

SEQ ID NO: 17403 - DNA, 453 bp, Zea mays
  Clone ID: LIB3151-013-Q1-K1-H4
ataagcttatcaaaggaataatctgtacgaaccggaatgaaatgattcgatttagtcaatctgtccacagtaaccgggattgcatctttcttacttggtgacagaggtaaacctgatacaaaatccatcgtgattttgtcctattttcactcaagaatcataatcggttgaagtaacccagacgaaacttgatgttcagctttaacttgctaacaaattaagcattttataacaaatttcgagataggtagttccataccacgccaccaataaagttgtttcagatcattatacattttagtactacccagatgaacaggtaactaactgctatgagcttcatttaaaatcatctgaaataactctgaatttctcggaacacatattcgatctctaaatatcaaacaaccttcaccatcaatcaaaattctgaatcagtatttagatcacact

SEQ ID NO: 17404 - DNA, 424 bp, Zea mays
  Clone ID: LIB3151-013-Q1-K1-H8
atcgataagctttgattagttaattgcatgtgaatctagttaataggacttatgtgtgacacttttgaaatgtgataggtgaatctataaggatctattagtgcatgtaatcaaaggggtggacttgcatgtcaatttcccccttttaattagtagaggccggccatgacattgaggatagacaaaatgtgatgggtaaaacacattaaaaacaatttgggataacatgttgtgggaaaaacaataaaattgaggggagtgggaggagaaaccaaagttgtttcatccttgctcccccattttgccgtacctagaagaagaaaaagaaaaaaaaaggcttcatcctctttgatcttcttgaccgacaaatcaaatgaagaagaaaggagttctcttgattcattttcggtttggatgacgatta

SEQ ID NO: 17405 - DNA, 471 bp, Zea mays
  Clone ID: LIB3151-013-Q1-K1-H9
tacggctggagaagacgacagaaggggacccttttgctttctttatccaataataataaccccggttttccctctccatacccttttgcttttctttatccaataataagaacttcccacgagtggctttaactggtctggtctggtctggtcggacacacaaaaatattagtatggagaaggtgagttttgtgaagaatggagagcttagattgcctccggggtttcgtttccacccgactgatgaggagccggttttgcagtacttgaagcgcaaggtcttctcctgccctctgccagcctctatcattcctgaggttgatgtttgcaagtctgatccttgggatttgccaagtgatttggagcaagagagatacttctttagcaccaaagaggccaaatatcccaacggaaatcgctctaacagagccacaaattcgggttattggaaggcaactggcttggacaaac

SEQ ID NO: 17406 - DNA, 345 bp, Zea mays
  Clone ID: LIB3151-014-Q1-K1-A1
ctcgtacatcgctctcgctctctctcctgctgtccacgaccgaccaaaggcgccgggcacagactcttcgtcggatccaagagaagctcgcgccctccccgaccatggtctcggcggataccatccgtacggctatcggcgtcatcggcaatggcaccgcccttgtgctcttcctctccccggtgcccaccttcgtgggcatctggaagaagcgtgcggtggagcagtactcgccgatcccgtacgtggcgacgctgctgaactgcatgatgtgggtgctgtacgggctgccgctggtgcacccgcacagcatgctggtggtgaccatcaacggcaccggcatgc

SEQ ID NO: 17407 - DNA, 351 bp, Zea mays
  Clone ID: LIB3151-014-Q1-K1-A11
gaaaaaagggacccgcacgcgtgcgattattgaaacctaatagcaacatatcatgcattttcaagcaccaacaatcacaaccgggatattgtgcttttttatactgctgtggcgtctcccaaatctcgctaccacaaccatcagcccacaatgctcacaagctcctatatcttcccttcttcccccttacctctcaacaacggtgtcttcggaatttgaaaacccaattcttcaaccctacaggatccaacagctaatcgcagctcgaatcttacctttatcacccttgttccttcaacaatcattagacttatttcaacatatacctttgctgcatttattggcacaaaa

SEQ ID NO: 17408 - DNA, 393 bp, Zea mays
  unsure at all n locations
  Clone ID: LIB3151-014-Q1-K1-A2
ctgcgtacacggtctccctcttcctgtcagtagtagagtgagagtgaggcagcgagtgggagacagggggaaatggggaagggagcgcaagggagcgatgcggcggcggcgggcggcgaggtggaggagaacatggcggcgtggctggttgccaagaacaccctcaagatcatgcccttcaagctcccgcccgtcggcccttatgatgtccgcgtgcgcatgaaggcagnggggatttgcggcagcgatgtgcactacctaagggagatgcgcatcgcgcacttcgtggtgaaggagccgatggtgatcgggcacgagtgcgcgggcgtggtcgaggaggtgggcgcctgcgtgacgcacctgtccgtgggcgaccgcgtggcgcttgagccg

SEQ ID NO: 17409 - DNA, 385 bp, Zea mays
  Clone ID: LIB3151-014-Q1-K1-A4
cagaaacacaccacgcgaagcgcactagccacattctaaatacaacggctaccaagatatgggcgcgtccttgctcttcttgcccttttagagaacgcaacacatgcgtacataattccacagcgctaacttgctcctagtgccattattccacagctcctcccaccagttacttgaatgggcttcgaacatccagccgtgcaagcctacaggctacaactagcgcttgcggtgagcgtcttacaacaaccaattgcccaattgcaacaacaatccttggcacatctaaacctacaaaccatcgcaacgcaacaagcaacaacagtttctgccatcactgagccacctagccgtggtgaaccctgtcgcctacttgcaacagcag

SEQ ID NO: 17410 - DNA, 493 bp, Zea mays
  Clone ID: LIB3151-014-Q1-K1-A5
gacccacgcgccacgcgttagatgcttatcgactccagattggagaactcgacaccatgaaggtgctgatcgatgccctggctcgcctggcgctcgctgcgagcgccgcctccagtacaagcggcggctgtggctgccagacaccaccgtttcatctaccgcctccgttctatatgccgcctccgttctatctgccgccgcagcagcagccgcagccatggcaataccccactcaaccaccgcagctaagcccgtgccagcagttcggatcctgcggcgtcagcagcgtcggcagcccgttcctgggccagtgcgtcgagttcctgaggcaccagtgcagcccggcggcgacgccctacggctcgccacagtgccaggcgctgcagcagcagtgctgccaccagatcaggcaggtggagccgctgcaccggtaccaggcgacatacggtgtggtcctgcagtccttcctgcagcagcagccgcaaggcgagct

SEQ ID NO: 17411 - DNA, 422 bp, Zea mays
  unsure at all n locations
  Clone ID: LIB3151-014-Q1-K1-A6
ctgtgtcgttgcgcgtacgcgtacacagccccgttccgaatcgacctcctcgcgagcctggccgagtcctcactccccttgccttgcttcaagatgcaaatctttgtgaagaccctcaccggcaagactatcaccctcgaggtggagtcttatgacaccattgacaatgtcaaggctaagatccaggacaaggagggcatccctcctgaccagcagcggcttatcttcgccggtgagcatcttgaggaccgccgcacacttgctgactacaacatccagaaggagtcaacccttcatttggtgctgcgccttaggggaggcatgcagatctttgtcaagaccttgactggcaagacaatcaccctngaggtggagtcttcagacaccatcgataatgtcaaggctaagatccangacaagga

SEQ ID NO: 17412 - DNA, 432 bp, Zea mays
  unsure at all n locations
  Clone ID: LIB3151-014-Q1-K1-A7
aagtcgagcggctccgctttgagagtttcgattttcagaacaccatcatnatagncgggggtctgtgctattgcctgactatgtcagatgccaatgcctgtgcaatgaaaatgccctgactgtgagaagcgctgcaaggcttgtactgctctggctccagcctgaccactatgatgtacgtcgctgacatgtaaacatacacgtactaactgacgcagccagatatgcaccagcttgaattgtgacactactacgccctgtgtgggcacactagcgccatgtactatactctctagtaacagcgctgccagtagcatatgaagatgattgacgtgcagtccttnacgcagcatcatgtagatgattatgcaggttgagcgtgcacgctgccgacagcagtaaactgtacgatccatatatgatgcagcatca

SEQ ID NO: 17413 - DNA, 393 bp, Zea mays
  Clone ID: LIB3151-014-Q1-K1-A8
gccttcgaataaacacactaatcgatgcgcactatccacattctaacaacaatggctaccaagataggagccggccttgcgcttcttgcccttttagtgagcgcaacaaatgcgttcattattccacagtgctcacttgctcctagtgccattattccacagttcctcccaccagttacttcaatgggcttcgaacatccagccgtgcaagcctacaggctacaactagcgcttgcggcgagcgtcttacaacaaccaattgcccaattgcaacaacaatccttggcacatctaaacctacaaaccatcgcaacgcaacagcaacaacagtttctgccatcactgagccacctagccgtggtgaaccctgtcgcctacttgcaacagcagcta

SEQ ID NO: 17414 - DNA, 398 bp, Zea mays
  Clone ID: LIB3151-014-Q1-K1-A9
actataaacattcaacactcaagagccaagagggagagacgatgaaggttgatgtggtggggacgacgcttgtggcgccgagcgaggacacgccgcacccggagctgtggctgtcgaacctggacctggcagtccccaagacgcacacgccgctcgtgtactactacccggcgccggcggccggaggcgacaccgacggagaagcggccttcttcgcgccggagcggctcgaggcggcgctggccaaggcgctggtgccgttctacccgctggcggggaggctgggcgtgggcgagggcgggcgcctgcagatcgactgcaccggcgagggcgcgctcttcgtcgtcgccagggccgacttcgccggcgaggacgtgttcagtgactacgagccgtcg

SEQ ID NO: 17415 - DNA, 253 bp, Zea mays
  Clone ID: LIB3151-014-Q1-K1-B1
cgcaaattgcaccaagaaatccatcgagaggccgtcgacaggggaattaatggcgtcgtcgtcgagcagcggccaccgccgcctcatcctcgcagccgccgtcctgctctccgtgctcgcggctgccagcgccagcgccgggacctcctgcgtgccggggtgggccatcccgcacaacccgctcccgagctgccgctggtacgtgaccagccggacctgcggcatcgggccgcgccctccgtggccggagctg

SEQ ID NO: 17416 - DNA, 478 bp, Zea mays
  Clone ID: LIB3151-014-Q1-K1-B10
cacaagcaacatagaaagtggaatccagtagcatcaatagagcaacaatggcgaccaagatattggccctccttatgctccttgctctttctgcatgtgttgctaacgcgacaattttccctcaatgctcacaagctcctatagcttcccttcttcccccataccttccatcaatgatagcttcagtatgtgaaaacccagctcttcaaccctataggctccaacaagcaatcgcagcaagcaacatacctttatcacccttgtttcaacaatcgccagccctatctttggtgcagtcattggtacaaaccatcaaggcacagcagctgcagcaactcgtgctacctgtgatcaaccaagtagctctggcaaacctttctccctactctcagcaacaacaatttcttacattcaaccaactgtctacattgaaccgtgctgcttatttgcagcaacaactattaccattcagccagct

SEQ ID NO: 17417 - DNA, 464 bp, Zea mays
  unsure at all n locations
  Clone ID: LIB3151-014-Q1-K1-B12
acccacgcggccgcagaaacacaccaagcgaagcgcactagcaacgatttaacaacaanggcnaccaagacgagagcccggcnngcgcaacangcccgnnnggggagcgcaacaaangcgnncaanaanccacaangcncacnngcnccnagngccannannccacagnnccncccaccagnnacnncaangggcnncgaacaccgagcngngcaagccaacangcaacaacaagcgcnngcggcgagcgncnaacaacaaccaanngcccaanngcaacaacaanccgggccacaacgaacaagacaagccagcacaacgcaacagcaacaacacggccgaccagcacngagccaccnagccanggngaacccngccgccaacnngcaagagcagcngcnngcanccaacccacnngcncnggcgaacgnagnngcaaaccagcaacaacaacagcnacaaca

SEQ ID NO: 17418 - DNA, 342 bp, Zea mays
  Clone ID: LIB3151-014-Q1-K1-B2
ccagtgtccgccgtcgtgcgctcgctacccctctccctcgaggcctttgccggcgaagagcgcccagtcgcccaccaggatgaagtttgttgctgcctacctgcttgctgtcctcgctgggaactccagcccctctgccgaggacttgacagccattcttggagtcagttggctgtgaagttgacaatgaaaagatggaactccttctgtcccaactgagcggtaaggacattaccgagctcattgccgccggcagggagaagtttgcttcagtcccatgtggcggtggcggtgtggctgtcgcggcagctgcccctgctgctggcggcgctcctgcagctg

SEQ ID NO: 17419 - DNA, 398 bp, Zea mays
  Clone ID: LIB3151-014-Q1-K1-B3
gcaacatagaacgtggaatccaatatcaacaatttagcatttatgacgaccaacatattttcccgccatatgctccttgctctttctgcatgtcttcctcacactacaattcttcctcaatgctcacaagctcctatagcttaccttcttcccccataccttccatcaatgatagcatcagtatgtgaaaacccagctcttcaaccctatacgctccaacaagcaatcgcagcaagcaacatacctttatcacccttgtttcaacaatcgccagccctatcttttgtgcaatcattggtacaaaccatcacggcacagcaacttgagcaactcgtgctacctgtgatcaaccaaataactttgtgcaacctttcttcctactctcaacaacaacaatt

SEQ ID NO: 17420 - DNA, 244 bp, Zea mays
  Clone ID: LIB3151-014-Q1-K1-B4
gcaacatagaacgaacaaatctataccaacgctttcaacttgaatattaagggcgcttatgcttggggagggctatggaagtgttgttatcgcaaccatcttcctacaatgcttacacgctgctatcagttccattgttgggacatacttcttaccagcggggtctataatgtacgaaaacctaattagctaactctacaggatcgacaacgcaatctgcacaagcatattaccattatcaccc

SEQ ID NO: 17421 - DNA, 479 bp, Zea mays
  Clone ID: LIB3151-014-Q1-K1-B6
gaaacttgctccagagtatgagaatgctggcattgcacttagcaagcatgacccaccgagtgttggcgctaaggttgatgctaacgaggagaagaacaggccggttgctaccaagtacgagatccaagggttcccaaccatcaagatcttcagggaccaggggaagaacattcaggaatacaagggccctagggaggctgatggcattgtggattacttgaagaagcaggttggccctgcgtccaaggagatcaagtcaccacaagatgcgacggtccttatcgatgacaagaagatctacattgttggtatcttcgttgaattcagcggcaccgaatttacaaacttcatggaagtcgcaaagaagctgaggtatgactacgactttggccacactttgcatgccaaccaccttccacgtggtgatgcaacagtggaacggccattggtcaggctgctgaagccatttgatgagcttg

SEQ ID NO: 17422 - DNA, 130 bp, Zea mays
  unsure at all n locations
  Clone ID: LIB3151-014-Q1-K1-B8
gggacgaccacgcgtccggcaactgttcatanaaagtatccactctcacattataatgaaaagggtcatcctactgggggtgggcgatcctattgtagctgccaatgccaataccatgcagatggcatgc

SEQ ID NO: 17423 - DNA, 347 bp, Zea mays
  Clone ID: LIB3151-014-Q1-K1-B9
cagaaacacaccaagcgaagcgcactagcaacaacctaacaacaatggctaccaagatattatccgtccttgcgcttcttgcgctttttgcgagcgcaacaaatgcgtccattattccacaatgctcacttgctcctagttccattattccacagttcctcccaccagttacttcaatggccttcgaacacccagctgtgcaagcctataggctacaacaagcgattgcggcgagcgtcttacaacaaccaattgcccaattgcaacaacaatccttggcacatctaacaatacaaaccatcgcaacgcaacagcaacaacagttcctaccagcactgagccaccta

SEQ ID NO: 17424 - DNA, 191 bp, Zea mays
  Clone ID: LIB3151-014-Q1-K1-C1
atggagaccaacaagccgcatagagggtcgtattccataacaacattaaaacggcaatggcgaccgagatgtgcctggttctgatgcttgtcgctctctctgcatgtcatgttcactcgacaatcgcggctcaatgctgacaggctcgtatatgcttcccttcttaccacataccatgcatcaatgatggc

SEQ ID NO: 17425 - DNA, 239 bp, Zea mays
  Clone ID: LIB3151-014-Q1-K1-C10
gcaactgacggggacgtgcggcctgcacacaacgactccatgcccctacacagcggccggcggtgtcccccactgaaaaaacaatgtgctgtagaatagccgctggctagctagctagacgagtcattgagcggcgaagaatgaataataatgcgccacgcatcaccatgggtggcaaagccagtgtgagcaatgaccagaatgaacaattgaaaagaaaagaaaaaaggagtgtccgc

SEQ ID NO: 17426 - DNA, 241 bp, Zea mays
  Clone ID: LIB3151-014-Q1-K1-C11
gaaaacccaattctacaaccctacaggatccaacaggcaatcgcagctggcatcttacctttatcacccttgttcctccaacaatcatcagtcctattacaacagttacctttggtgcatttattggcacaaaacatcagggcacaacaactacaacaacttgtgctagcaaaccttgctgcctactttcatcaacagcagttttcttccattcaaccaactaggttcattgaactcttct

SEQ ID NO: 17427 - DNA, 255 bp, Zea mays
  Clone ID: LIB3151-014-Q1-K1-C12
cgcgggcgaacaaagacaccaagcgaagcgcactagcaacattctaacaacaacggccaccaaaagggaccccgcggggcacaaaatgccccttgagcgatcacaacaaaggcgtgcatcaggccacagcgctcaccagcaccgagggccacaatcacacagatgctgccaccagatacgtgaatgggcgacgaacatccagccgtgcaagcatacaggctacaacgagcgctcgcggagagacggttacaacaa

SEQ ID NO: 17428 - DNA, 374 bp, Zea mays
  Clone ID: LIB3151-014-Q1-K1-C4
ataatattttgagcattcagaaacacaccaagctaagcacattagcaacaacctaacaacaatggcgtccaagatattatccctccttgcgcttcttgcgctttttgcgagcgcaacaaatgcgttcattattccacaatgctcacttgctccaagttccattattacacagttcctcccaccagttacttcaatgggcttcgaacacccagctgtgcaagcctataggctacaacaagcaattgcggcgagcgtcttacaacaaccaatttcccagttgcaacaacaatccttggcacatctaacaatacaaaccatcgcaacgcaacagcaacaacaattcctaccagcactgagccacctagccatggtga

SEQ ID NO: 17429 - DNA, 192 bp, Zea mays
  Clone ID: LIB3151-014-Q1-K1-C5
cccacacaatcaacaacacgtcttacttttgcttatactacacacccaaaaattgaccaagcggatgtctaaatttaatggcacttctttctatccccgaccttaatacatgcggcaattgcgcttcacaaacaccaacatgtaaacaaccgcctacacactatatgcctctcttcattctatctcatcacc

SEQ ID NO: 17430 - DNA, 331 bp, Zea mays
  unsure at all n locations
  Clone ID: LIB3151-014-Q1-K1-C6
cgcgttcgatccggctactgaaaccacacactttccttttcacgatcgcatatcgatcaccgggccgtggatagttaactcccgtgcccttcacccgcaccttgagctcgcaacacaatgctcgctagaggcacacctctcacgggtcaaggcatcaactgtcgcaaccgtcgtctctgcagttaccaccctggttagcgaccagatgcttccatgggccaatgccaacatcaaccccgttggccaggccctcatacaatacacagntgctgacatggcagcactctatcttggcgcacataacgatactctccatggcgacgcaacactc

SEQ ID NO: 17431 - DNA, 339 bp, Zea mays
  unsure at all n locations
  Clone ID: LIB3151-014-Q1-K1-C9
aaataaaaaaaaattaaaaaatttaaaaaaaaaaaaaaaaaagggaaatctgtaagattaaaaagggaaagggcaaaataaaanataaaaaaataaataataaaataaataaatataaaataaaaaaaattaaaaatataaaaaaaaaaaataaaaaaaaaatataaaaaaataaaaaaaaaaaaaaaaaaaaaaaaaaataataaataataaaaaaaaaataaaaaaaaaaaaattaaataaaataatatataaaaaaaatataattgaaataataaaataaaaatatttaataataaataataaaaaataaaaataaaataaaaagatagtaaaatt

SEQ ID NO: 17432 - DNA, 378 bp, Zea mays
  unsure at all n locations
  Clone ID: LIB3151-014-Q1-K1-D11
gggnccacccacgcgnccgcctgcctgnaccgccccgacanggcgangctatttcgcgcagccacctccgcggcccggcgcccggtcctgccgccgcctaggcttctggcggtgagggcgatggcgtcgtcgctcttcggccacgtcgagccggcgcccaaggaccccatcctcggcgtcaccgaggctttcctcgccgacccctcgtccgacaaagtgaacgtcggcgtcggcgcctaccgggacgacaacggccagcccgtcgtgctcagctgcgtgcgcgaggccgagcgccggatcgcgggcaacctcaacatggagtaccttccgatgggaggcagcgtcaagatgattgaagagtcactgaaactggcgtac

SEQ ID NO: 17433 - DNA, 458 bp, Zea mays
  unsure at all n locations
  Clone ID: LIB3151-014-Q1-K1-D12
cccagcggccganncacaaacacaccaagcgaagcacatgagcaatatcccaacaacaacggcnaccaagggancagggccnccnngcgcancgggcgccgncngcgagcgcaacaaangcgnncannannccacaaggcgcacncgcnccaaagggcaaaaaaacacgaggccacccaccaggnaccccaaggggcnncgaacacccaacngagcaagccganaggcgacaacaagcaaacgcggcgagcgnncgacaacaaccaagngcccagcggcaacaacaanccgaggcacaacaaacaanacaaaccancgcaacgcaacagcaacaacaangccgaccagcacggagccaccaagccagggngaacccagccgccaacnngcaacagcagnngcaggcancaaacccacnngccccggcaaaacgaggngcaaaccagccacaacaacag

SEQ ID NO: 17434 - DNA, 201 bp, Zea mays
  Clone ID: LIB3151-014-Q1-K1-D3
attgagaccaacaagcaacatataaagtggaatccagtttcaacactcgagcatcaatggcgaccgagatggtatacctccatatgctcctagctctttctgcatgtgttgctaacgcgacaattttgcctcaatgctcacaagctcctatagcttcccttcttcccacatccctttcatcaatgatagctacagtatgtg

SEQ ID NO: 17435 - DNA, 312 bp, Zea mays
  Clone ID: LIB3151-014-Q1-K1-D4
gcaacatagaaagcacaatattgtaccaacaatggcagttaaaatattttgcttccttatgctccgtggtggttctgcaagtgctgctaccgcaaccattttcccacaatgctcacaagctcctatagcttcctttcttcccccatacctctcaccagcggtgtcttcagtatgtgaaaacccaattcttcaaccctacaggatccaacaggcaatcgcagcaggcatcttacctttatcacccttgttcctccaacaaccgtcagccctattacagcagttacctttggtgcatttgttggcacaaaacat

SEQ ID NO: 17436 - DNA, 396 bp, Zea mays
  unsure at all n locations
  Clone ID: LIB3151-014-Q1-K1-D8
ggacccggccttggacccctacnagaacagccttatctttttcgtcgcctcctacatcatcccctgcgtggggccaccggctacgtcggcgccaaccccactctcctcacccctcaggccagaaagctgctggcggggctgctggcggtggagtcggcgcaggacgcggtgatcaggacgctgctgtacgagcgcgggatggcgcgtgtgccgagctacgccggcggagtggcggagatcacggcgcgcatctcggacctccggaactcgctggggaggaggggcgtgaaggactagggcctggtggtggcgcccgagctggggcccgaggggctgaccgtggggaacatcatcgccggcgaccacctgtcgctcgcctacgaccggacgccggag

SEQ ID NO: 17437 - DNA, 373 bp, Zea mays
  Clone ID: LIB3151-014-Q1-K1-D9
aagggaccacccacgcgtccgcgcaccggtgactccaccttcttcattctcgatttcttcgccgcgcggagatccaagagcagggggtggctgacaggggaacgggcggctatgggaggaagcagcgcgatgctcgccgcgttggcggtggtggttcttgcggaggtcggcggcgctgacgccgcggcggaatcgagtgaggcgtctgtcaaggggaggtaccacgcgctcttcaatttcggggactcgctagccgacgctggcaacctcatccagaacggcacccaggacatcctggccaccgcgcgcctgccctacggccagacctacttctgcagggccaccggccgctgctccgacggacgcctagtca

SEQ ID NO: 17438 - DNA, 190 bp, Zea mays
  Clone ID: LIB3151-014-Q1-K1-E1
acgatcgacaccatgagggtgtcgctcgctgctttcgctctactggctctcggtgtcagcgccagggttacgcatacaagcggtggttgccgctgccaaccaccgtcaccggctcatctaccgtcgccggtgcatctgtcaccttcagctcaggtgccacctgcagggcatatcccacacgctggtacac

SEQ ID NO: 17439 - DNA, 404 bp, Zea mays
  Clone ID: LIB3151-014-Q1-K1-E10
cacccacgcgtccgaaaatactgatctaactgcaccagaattgatatttttaaggcacgcccgcccaacgtcgtggagtgcgcaatgatgactctcggcctatcactcctctgcgctgaccgcggccctgccgtcgagcagaactgcggctgcacagccaaacgtatgctgcagcaagtatggctactgcagcacgaccgacaagtactgcggcaaccggtgccagtcaggcccatgccgctcgggcggcggctgcagcaatcgcggcagaggtgcgaacgtggctagcgtcgcaaccggctccttctttaacggccataaaaaccatgcctggagccggtgcgaaggcaataacttctacacccggagcgcgtttctgagcgccgtcaaagcgtacccaagct

SEQ ID NO: 17440 - DNA, 408 bp, Zea mays
  unsure at all n locations
  Clone ID: LIB3151-014-Q1-K1-E12
gaccaacaagcaacatagaaagtggaatccagtttcaacaatagagcaacaatggcgaccaagatattttccctccttatgctccttgctctttctgcatgtgttgctaacgcgacaattttccctcaatgctcacaagctcctatagcttcccttcttcccccataccttccatcaatgatagccttcagtatgtgaaaacccagctcttcaaccctataggctccaacaagcaatcgcagcaagcaacatacctttatcacccttgtttcaacaatcgccagccctatctttggtgcagtcattggtacaaaccatcanggcacagcagctgcagcaactcgtgctacctgtgatcaaccaagtagctctggaaacctttcccctactctacaacaacaattttca

SEQ ID NO: 17441 - DNA, 356 bp, Zea mays
  Clone ID: LIB3151-014-Q1-K1-E2
ggacccgcccttcgacccctacgagaacagcctcaacttcctcgtcgcctcctacatcatccccgacgtcggcctcaccggctacgtcggcgccaaccccaggctcctcacccctcaggccagaaagctgctggcggggctgctggcggtggagtcggcgcaggacgcggtgatcaggacgctgctgtacgagcgcgggatggcgcgtgtgccgagctacgccggccggggtggcggagatcacggcgcgcatctcggacctccggaactcgctggggaggaggggcgtgaaggacgagggcctggtggtggcgcccgagctggggcctgagggggctgaccgtgggaacatcatc

SEQ ID NO: 17442 - DNA, 333 bp, Zea mays
  Clone ID: LIB3151-014-Q1-K1-E4
ccgcatgcaagcccgtgccagctgcagggaacttgcggtgttggcagcaccccgatcctgggccggtgcgtggagtttctgaggcatcagtgcagcccgacggcgacgccctactgctcgcctcagtgccagtcgttgcggcagcagtgttgccagcagctcaggcaggtggagccgcagcaccggtaccaggcgatcttcggcttggtcctccagtccatcctgcagcagcagccgcaaagcggccaggtcgcggggctgttggcggcgcagatagcgcagcaactgacggcgatgtgcggcctgcagcagccgacttcatgcccctacgct

SEQ ID NO: 17443 - DNA, 352 bp, Zea mays
  Clone ID: LIB3151-014-Q1-K1-E5
attatttagaccaactagcaacatatatagcacattagtgtaccaacaatggcagccaagatatggggcctccttatgctccttggtatttctgcaagtgctgctacggcgaccattttcccgcaatgctcacaagctcctatagcttcccttcttcccccgtacctctcaccagcggtgtcttcggtatgtgaaaacccaattcttcaaccctacaggatccaacaggcaatcgcagctggcatcttacctttatcacccttgtttctccaacaatcatcagccctattacagcagttacctttggtgcatttattggcacaaaacatcaaggcacaacaactacaacaac

SEQ ID NO: 17444 - DNA, 330 bp, Zea mays
  unsure at all n locations
  Clone ID: LIB3151-014-Q1-K1-E6
cgggacgaccacgcgtccgatcaatcanaccaaacagattaagctattgattttatcaaaaccaccgatgccagtcatgaacgggtcctatcataggcttccaggtataactccaaacacagatactcagaccattcatatgtattgctcacaatgctcctaaacttctcattgctcacagctacgctaacaacatgggattctatgtagagcaaacctactctttcaacattacatgataaaacacccatttaaatgttacgtttgaaagtcatctcaaacttgtcatcaagcctattcattcaaaccatactattcatcgtgcctcta

SEQ ID NO: 17445 - DNA, 271 bp, Zea mays
  unsure at all n locations
  Clone ID: LIB3151-014-Q1-K1-E7
cccacgcatacgattctatatcccaaaccccctccctttttttctttttttancacacaaccccctatcatgcaatggttatatttcacgcatcaccaacccctacaatatcaactttagcaatcactctaactaacaactgaaatcaaatgataaaaatatccctccaaaaaaaaaaatataaattttctatctctctaattaaaccccccatacctacacacacaaactaccacaacccatttctatcttgctacctaaatacaaaaca

SEQ ID NO: 17446 - DNA, 410 bp, Zea mays
  unsure at all n locations
  Clone ID: LIB3151-014-Q1-K1-E8
ctggccgttgcgggcgaaccgaaaatcacgggctcgagagatcggagcacggcatgtcggaggagcagttcctcgccgtggcggtggaagccgccaagagcgccggcgagattattcgcaagggattctaccagaccaagaacgtcgagcacaagggccaggtggatttggtgacggagacggacaaggcctgcgaggacctcatcttcaaccacctccggaagcacttcccggaccacaagttcatcggggaggaggagtccgcggcgctcggggccaccgctgacctcaccgacgaccccacctggatcgtcgatcccctcgacgggaccactaatttcgtccatggtttcccatttgtatgtgtctncgttggcctcaccattgngaaaattccactgtcggagtcg

SEQ ID NO: 17447 - DNA, 365 bp, Zea mays
  Clone ID: LIB3151-014-Q1-K1-E9
attttgagcattcagaaacacaccaagcgaagctacctagcaacgacttaacaacaatggctaccaagatattagccctccttgcgcttcttgccctttttgtgagcgcaacaaatgcgttcattattccacaatgctcacttgctcctagtgccattataccacagttcctccgaccagttacttcaatgggcttcgaacacctagctgtgcaagcctacaggctacaacaagcgcttgcggcgagcgtcttacaacaaccaattaaccaattgcaacaacaatccttggcacatctaaccatacaaaccatcgcaacacaacagcaacaacagttcctaccagcacttgaccaactagatgtg

SEQ ID NO: 17448 - DNA, 162 bp, Zea mays
  Clone ID: LIB3151-014-Q1-K1-F1
agaaactatgtgctgtagtatagccgctggctagctagctagttgagtcatttagcggcgatgagggagtgataatgtgtcacgcatcaccatgggtggcagtgtcagtgtgagcaatgacctgaatgaacaattgaaatgaaaagaaaaaagtattgttcc

SEQ ID NO: 17449 - DNA, 384 bp, Zea mays
  Clone ID: LIB3151-014-Q1-K1-F10
aagggtccccccgcgtgcggaacacaccaattaagcgcactttttcaactttcaacaatggctaccaagatatgtgcccttcttgcgcttcttgcccttttagtgagcgcaacaaatgcgttcattattccacagtgctcactagctcctagtgccattattccacagttcctaccaccagttacttcaatgggcttcgaacatccagccgtgcaagcctacatgctacaactaacgcttgcggcgagcgttttacaacaaccaattgcccaattgcaacaacaatccttggcacatttaaacctacaaaccattgcaacgcaacagcaacaacagtttctgccatcactgagccacctagccgaggtgaaccctgtcggctac

SEQ ID NO: 17450 - DNA, 260 bp, Zea mays
  Clone ID: LIB3151-014-Q1-K1-F11
aaataacgctcgcatgcctgtgcacttctccattttcaccactgggtcttcagaccattagctttggctactccagagcgcagaagaacccgatcgacaccatgagggtgttgctcgttgccctcgctctcctggctctcgctgcgagcgccacctccacgcatacaagcggcggctgcggctgccagccaccgccgccggttcatctaccgccgccggtgcatctgccacctccggttcacctggccacctccggtgca

SEQ ID NO: 17451 - DNA, 279 bp, Zea mays
  Clone ID: LIB3151-014-Q1-K1-F12
cccacgcgtccggacaaactctcaaattccaatgcacttttccattttaacaacgggggctaaaaaccatgggtttgggctactccttagcgtttatgaacccgatccaaaccataacgtttttgcacaatgctcacaactctcctatctctcgctttgatccccaatatctctcatacaagctgtctttaatgtgtgaaaacacaatcgttcaatcatacacgatccaacaggcatttgcaacatgcatcttaccatgataatccttgttacttcaac

SEQ ID NO: 17452 - DNA, 340 bp, Zea mays
  Clone ID: LIB3151-014-Q1-K1-F3
cagaaacacaccaagcgaagcacattatcaacatcctaataacaatggctaccaagatattatccgtgcttgcgcttcttgcgctttttgcgagcgcaacaaatgcgttcattattccacaatgctcacttgctccaagttccattattacacagttcctcccaccagttacttcaatgggcttcgaacacccagctgtgcaagcctataggctacaacaagcaattgcggcgagcgtcttacaacaaccaatttttcagatgcaacaacaatccttggcacatctaacaatacaaaccatcgtatcgcaacagcaacaacaatttctaccagcactgag

SEQ ID NO: 17453 - DNA, 388 bp, Zea mays
  Clone ID: LIB3151-014-Q1-K1-F4
ctttaatcgccagttcgccaccaccgccgtgaaatccgcacgcgtgcttcctgtcgaattttgagctgtgactgtgagcgccatggccgtggaggctgtgtccggaaatggcaccgaggcagtggccgcgacgccggcgaaggaggtgagcaccaagcaggcgtctttccgggaggagagcaacttcctggacgatctcaaggagagcgagcgtaaggcgctcgccgagctccgcgacaaggtcgaggcagccatcgtggagggcaagctgttcgacgacggtaagccggaggtgaaggagaaggagaaggagaaggaggaagccaagaagaaagcagtggagaaaaaagatgagcagcccgaaaccctagagaagggagagaggatg

SEQ ID NO: 17454 - DNA, 460 bp, Zea mays
  unsure at all n locations
  Clone ID: LIB3151-014-Q1-K1-F5
aaagcatcctctccgccgcggcgcaacggccacaccttccgtcccccggcctccgctcgcctgtcgcctctctctctctctcccctcgctgagtcgccgccagccatgaacaacctcctcacggattcctttgagctcccccggcgggactcctcaagagatgcagacattgaaatgggaatgcatcaagctgatgcttcagacaacttaaaagatttcttgaagaaggtcgatgcaattgagagtttaattgcaaagctgacaaatctattgaataagctacagactgcaaatgaggaatccaaagcagttacaaaagcaagttccatgaaagcaattaagcagcggatggagaaagatattgatgaagtggggaaaatngctcgtcaagcgaagacaaaaagttgatgaaatggaaaaaagaccaacttatcaaataagcaaaaaacctggatgtgga

SEQ ID NO: 17455 - DNA, 343 bp, Zea mays
  Clone ID: LIB3151-014-Q1-K1-F6
aaaacattctctactacctgccgcaaatcccattctcatccgtccccccaccaccgctgggctgcggcgctctctctctctcccctcgctcagtcgccgccaaccatgaacaacctcctgaccgatacctttgatctcccccagcgggactcctcaagagatgcacacattgaaatggcaatgcatcaagctgatgctacaaacaacttaaaagacatcttgaagacagtcgatgcaatcgagagatcaatcgcaaagctgacaaatctattgaataagctacagactgcaaatgacaaatccaaagcatatacaaacgcccgttccatgaaagcaattaaac

SEQ ID NO: 17456 - DNA, 282 bp, Zea mays
  Clone ID: LIB3151-014-Q1-K1-F8
cgtacctgcactgaaaacacttcccagcgccatttatcgcctaccaaacccttaggctgctatggctcaccatgacattcatggcgctggatccgaccgccaatttcatgcactgcaagaatgcttgcatcgttccacctgcatgacatgtctcttctaccagcgtagggtctggtgccagataccgccaacattaaaacttacgagaatcagctcacggtagtcgacgtgatattaactgacctactgtcgatgaaggaacattgatcagcgctagttcaa

SEQ ID NO: 17457 - DNA, 384 bp, Zea mays
  unsure at all n locations
  Clone ID: LIB3151-014-Q1-K1-F9
ccacgcgtccgtagcaacatanaatgcacaatagtgtttcaacattttcagccaaaatattttgcctccgtatgctgggtggtctttctgcaagtgctgctacggcgaccattttcccgaaatgctcgcaagctcctatagcttcccttcttcccccgtacctctcaccagcggtgtcttcggtatgtgaaaacccaattcttcaaccctacaggatccaacaggcaatcacagctggcatcttacctttatcacccttgttcctccaacaatcatcagccctattacatcagttacctttggtgcatttattggcacaaaacatcagggcacaacaactacaacaacttgtgctagcaaaccttgctgcctactctcaacaac

SEQ ID NO: 17458 - DNA, 351 bp, Zea mays
  Clone ID: LIB3151-014-Q1-K1-G1
attatgagcattcagaaacacaccaagcgaagcgcactaacaacaacctaacaacaatggctaccaagatattatccctccttgcgcttcttgcgctttttgcgagcgcaacaaatgcgtccattattccacaatgctcacttgctcctagttccattattccacagttcctcccaccagttacttcaatggccttcgaacacccagctgtgcaagcctataggctacaacaagcgattgcggcgagcgtcttacaacaaccaattgcccaattgcaacaacaatccttggcacatctaacaatacataccatcgcaacgcaacagcaacaacagttcctaccagcactga

SEQ ID NO: 17459 - DNA, 281 bp, Zea mays
  Clone ID: LIB3151-014-Q1-K1-G10
ggctcacaccagctagcttcttgatacaaccacttttgttgccgttctaccagcacgctgcgcctgacgctggcaccctcttacaactgcaacaattgctgccattcaaccaacttgctttgacaaacccagcagcgttctaccaacaacccatcattggtggtgccctcttttagatttcttatgagttatagttcaataataaagttttttgtcaaaaaaaaaaaaaaaaaaaaaaaaaaaaaaaaaaataaaaaaaaaaaaagaaaaacaaataaaaa

SEQ ID NO: 17460 - DNA, 500 bp, Zea mays
  Clone ID: LIB3151-014-Q1-K1-G11
ggggccacccacgcgtccgcaactagcaacatagaaagcacaatattgtaccttttatggcagccaaaatattttgcttccttatgctccttggtctttctgcaagtgttgctaccgcaaccattttcccacaatgctcacaagctcctatagcttcccttcttcccccatacctctcaccagcggtgtcttcaatgtgtgaaaacccaattgttcaaccctacaggatccaacaggcaatcgcaacaggcatcttaccattatcacccttgttcctccaacaaccgtcagccctattacagcagttacctttggtccatttggtggcacaaaacatcagggcacaacaactacaacaacttgtgctagcaaaccttgctgcatactctcagcaacatcagtttcttccattcaaccaactggctgcattgaactttgctgcttatttgcaacaacaattaccattcacccaacttgttgctgcctacccccaacaattt

SEQ ID NO: 17461 - DNA, 326 bp, Zea mays
  Clone ID: LIB3151-014-Q1-K1-G12
cagtatgtgaaaacccaattcttcaaccctacattatccaacaggcaatcgcagcagggatcttggctttatcacccttgttcctgcaacaaccgccagccctattacagcagttacctttggtgcatttgttggcacaaaacatcaaggcacaacaactacaacaacttgtgctaggaaaccttgctgcctactctcagcaacagcagtttcttccattcaaccaactggctgcattgaactctgctgcttatttgcaacaacaactaccattcagtcagctagctgctgcctacccccagcaatttcttccattcaaacaactg

SEQ ID NO: 17462 - DNA, 343 bp, Zea mays
  Clone ID: LIB3151-014-Q1-K1-G2
gtgtgtcttgcgcgtcgcgtcacagccccgatccgaatcgactcctcgaagcctcgccgagcccggctcccctcccctcgctgcaagcgcacatctggtgaagaccctcacggcgagactatcaccctcgagggggtcttctgacaccattgacaatgtcaggctagatccaggacaaggagggcatcctcctgaccagcagcggtttatcttggcggcagcagctcgggacggacgacacttgctgactacaacatccagaacgagtcaaccctccatttggtgctgcgccttaggggaggcatgcagatctatgacaagaccttgactggcaagacaatca

SEQ ID NO: 17463 - DNA, 373 bp, Zea mays
  unsure at all n locations
  Clone ID: LIB3151-014-Q1-K1-G3
ntccgctggacgtcagctctagcacattagcctcatncgacttctcagattgtgagaaaactcgnnacaccatgaagggtgcgtgatcggtgtgcccttgggctctcctggcgccgtcgctgcgagccgccgcctccagtacanagcggcgtgctgtggctgccagacacgcaccgtttcatctactcgcctccgttctatatgccgcctccgttctatctgccgccgcagcagcagccgcagccatggcaataccccactcaaccaccgcagctaagcccgtgccagcagttcggatcctgcggcgtcggcagcgtcggcagcccgttcctgggccagtgcgtcgagttcctgaagcaccagtgcagcccgg

SEQ ID NO: 17464 - DNA, 476 bp, Zea mays
  Clone ID: LIB3151-014-Q1-K1-G4
acgcgtgcgatgtagagcattcataaacacaccaagcgaagttctcttttaacaacctaacaacaatggctacggagatggtatccctccttgcgcttcttgcgctatttgcgagcgcaacaaatgcattcattattccacaatgctcacttgctcctagttacattattccacagatcctaccaccagatacttcaatggccttcgaacacccagctgtgcaagcctataggctacaacaagcgattgcggcgagcgtcttacaacaaccaattgcccaattgcaacaacaatccttggcacatctaacaatacaaaccatcgcaacgcaacagcaacaacagttcctaccagcactgagccacctagccatggtgaaccctgtcgcctacttgcaacagcagctgcttgcattcaacccacttgctctagcaaacgtagttgcaaaccagcaacaacaacaactgccacagttt

SEQ ID NO: 17465 - DNA, 381 bp, Zea mays
  Clone ID: LIB3151-014-Q1-K1-G5
gtctgcatgtactgctaactcgaccatttttctttaatactcacaaactcctataactgggctgggttccccataccttccatcaatgaccgcttcagaacgcgaaaacccagcccttcaaccctacatgctccaacacgcaatcgcaacaagcaacttacctttatcacccctgttctttcaacaatcgccagcactatctttggcgcactcattggtacaaaccatcagggcacaacaactgcatcaactagcgctaccagtgatcagccaaatagctctggcaaacctttatacttactctcagcaacaacaatttttttcattcaaccaactgtctacactgaaccctgctgctgattagcagcaacaacaactact

SEQ ID NO: 17466 - DNA, 369 bp, Zea mays
  unsure at all n locations
  Clone ID: LIB3151-014-Q1-K1-G6
gccacgcgtacgttatcagcattcattttcactttaagccaaccacattancaacaaccgaactgctttgtcttccaagatattatccctccttgctcttcttgcacttattgcgagcgcaacaaatgcgttcattataccacaatgctcacttgcttcacgttccattattacacagctactcccaccagttacttcaatgggcttctaacacccagctctacaagcctataggctacaacaagcaattgcggcgatcgtcttacaacaaccaatttctcatgtgcaacaacaatccttgtcacatctaacaatacaaaccatctgaacgcaacagcatcaacaatttctaccatcactgatccacct

SEQ ID NO: 17467 - DNA, 388 bp, Zea mays
  Clone ID: LIB3151-014-Q1-K1-G8
gcagcagcagcccttctttttggagcatcaccataggggagatcgatcaatcaatcaggaagcagagcgcgcacggcacaggtgggtagctagcaatggcgacgccgccgaaccctcctcctccgagcactcccatagctgcggcggcgcccttattgccagcagagttcaccagattcaccttccgggccttgtacgtccgccggaccggcccaagcagcagggagatgattcagccggggagaccttacgatgagctgggcagaagactcaccagtgactacccggtgtacgatggccgtggctccgacgccgcccttgtcgctcgcatgcaggggatcaccgtcctcgtcggtaacgcgcaccagctgttcaccatcgtgttcga

SEQ ID NO: 17468 - DNA, 475 bp, Zea mays
  Clone ID: LIB3151-014-Q1-K1-G9
agcatagagaccaactaacaacatatttagcacttttttggaccaacaatggcagccggggtatgtgtgcatcttatgctgcctgatatttctacacgagctgctacggtgaccattttcccgcaatgctcacaagctcctatagctatccttgttgccccgtacctctcaccagcggcgtcttcggtatgtgaaaacccaattcatcaaccctacatgatccaacaggcaatcgcagctggcatcttacctttatcacacttggtccttcaacaatcatgacccctattacagcatgtacctctggtgcatttattggcacaaaacatgatggcacaacaactacaacaacttgcgctatcaaaccttgctgcctactcttagcaacagcagtttcttacattcaaccaactaactgcattgaactctgcttcttatttgcaagaacaacaactaccattcaggcagctacctg

SEQ ID NO: 17469 - DNA, 425 bp, Zea mays
  Clone ID: LIB3151-014-Q1-K1-H2
gaccacgcgtccgcgaaagcggatgcagaaaagcttgtgatgagagttaatggtagggaagggcttcttacatgctgtgtacgcgcaagtagcatttttggccctggtgataagctaatggttccatctttggttgctgctgcaagggcagggaagtccaaatacattattggtgatgggaacaactactatgatttcacctacgtggaaaatgtggcatatggccatgtttgtgcagagaaaactctatcatctgaagatggtgcaaagatagccgctggaaaaacctatttcataacaaatatggagcctataaaattctgggagttcatgtcattgattttagaaggtcttggatatgaaaagccttcagtaaaaataccagtctcttgtatgatgccagtggctcatgttgtaaaatggac

SEQ ID NO: 17470 - DNA, 357 bp, Zea mays
  Clone ID: LIB3151-014-Q1-K1-H4
gaccaacaagcaacatagaaagtggaatccagtatcaattatagagcaacaatggcgaccaagaggttgtgcctccttatgctccttgctctttctgcatgtgttgctaacgcgacaattttccctcaatgctcacaagctcctatagcttcccttcttcccccataccttccatcaatgatagcttcagtatgtgaaaacccagctcttcaaccctataggctccaacaagcaatcgcagcaagcaacatacctttatcacccttgtttcaacaatcgccagccctatctttggtgcagtcattggtacaaaccatcaaggcacagcagctgcagcaactcgtgctacctgtgatc

SEQ ID NO: 17471 - DNA, 423 bp, Zea mays
  unsure at all n locations
  Clone ID: LIB3151-014-Q1-K1-H7
tgggtcttcagaccattagctttatctactccagagcgcagaagaacccgatcgacaccatgagggtgttgctcgttgccctcgctctcctggctctcgctgcgagcgccacctccacgcatacaagcggcggctgcggctgccagccaccgccgccggttcatctaccgccgccggtgcatctgccacctccggttcacctgccacctccggtgcatctcccaccgccggtccacctgccgccgccggtccacctgccaccgccggtccatgtgccgccgccggttcatctgccgccgccaccatgccactaccctactcaaccgccccggcctcagcctcatccccagccacacccatgcccgtgccaacagccgcatccaagcccgtgccagctgcagggaacctgcnngcgttgcagca

SEQ ID NO: 17472 - DNA, 427 bp, Zea mays
  unsure at all n locations
  Clone ID: LIB3151-014-Q1-K1-H8
ggtcttcagaccattagctttatctactccagttcgcagaagaacccgatcgacaccatgagggggttgctcgttgccctcgctctcctggctctcgctgcgagcgccacctccacgcatacaagcggcggctgctgctgccagccaccgccgccggttcatctaccgccgccggtgcatctgccacctccggttcacctgccacctccggtgcatctcccaccgccggtccacctgccgacgccggtccacctgccaccgccggtccatgtgccgccgccggttcatctgccgccgccaccatgccactaccctactcaaccgccccggcctcagcctcatccccagccacacccatgcccgtgccaacagccgcatncaagcccgtgccagctgcagggaacctgcggcgttggcagcaccccca

SEQ ID NO: 17473 - DNA, 499 bp, Zea mays
  unsure at all n locations
  Clone ID: LIB3151-014-Q1-K1-H9
gggaccacccacgcgtcgcgtttcagcattcaaaaaacacaccaagctatagcgctttattcaacaacactaacaacaattggcgtaccatggtattagctcctccttgcgccttcttcgcccttttaagtgagcgcaactaaatgctgttcatttattccacagangctcaacttgctcctagttgcctatttattccacagttcctcccaaccagttactttctaatgggctgtcgaacaatcctagccgtgcaagctctacagtgctacaactatgcgcttgcggcgagctgtcttacaaccaaccaattgtccaattgcaacaacaattcttggcacatctaaacctacaaaccatcgcaacgcaacagcaacaacagtttctgccatcactgaaccacctagccgtggtgaaccctgtcgcctacttgcaacaacagctacttgcatccaacccacttgctcttgcgaacgtagcttcataccaacaacaacaa

SEQ ID NO: 17474 - DNA, 420 bp, Zea mays
  Clone ID: LIB3151-015-Q1-K1-A10
ccttgctgaacttcctcaaggctcataactacaagggcacgacgatgatgttgaatgacagaatccaaagccttcgtggtctccaatcatccctgagaaaggcagaggagtatctactgagtgttcctcaagacactccctactcggagttcaaccataggttccaagagcttggcttggagaagggttggggtgacactgcgaagcgtgtactcgacacactccacttgcttctcgaccttcttgaggcccctgatcctgccaacttggagaagttccttggaactataccaatgatgttcaacgttgttatcctttctcctcatggctacttcgctcagtccaatgtgcttggataccctgacactggcggtcaggttgtgtacattctggatcaagtccgtgctttggagaatgaga

SEQ ID NO: 17475 - DNA, 372 bp, Zea mays
  Clone ID: LIB3151-015-Q1-K1-A11
gcgatttcgatctcgcagccaccttttttttgttctgctgtgtatctagtagttggaggagatatgcagtttgcacttgcattggacacgaactcacgtcctcaccagataagatcttgtgagggtgatgggattgacaggttggaaaaattaagtattgggggcagaaagcacgagaaagctctgagaaataggtgctttggtggtagagttgctgcaactacacaatgtattcttacctcagatgcttgtcctgaaactcttgattctcaaacacagtcctctaggaaaaattatgctgatgcaaaccgtgtatctgctatcattttgggcggaagcactggatctcagctctgtgctctgacaagcaca

SEQ ID NO: 17476 - DNA, 368 bp, Zea mays
  Clone ID: LIB3151-015-Q1-K1-A12
caacaagcaacatagaaagtggaatccagtagcaacaatagagcaacaatggagaccaagatattttccctccttatgctccttgctctttctacatgtgttgctaacgcgacaattttccctcaatgctcacaagctcctatagcttccctttttcccccataccttccatcaattatagcttcagtatgtgaaaacccagctcttcaaccatataggcttcaacaagcaatcgcagcaagcaacatacctttatcgcccttgttgtgtcaacaatcgccagccctatctttggtgcagtcattggtacaaaccatcagggcacaacagctgcagcaactcgtgctacctgtgatcaaccaagtagc

SEQ ID NO: 17477 - DNA, 431 bp, Zea mays
  unsure at all n locations
  Clone ID: LIB3151-015-Q1-K1-A3
ggtcttcaaacaataaccttaatctactcaaaaccgcaaaaaaacccgatcggacaccaggagggtgttgctcgttgccctcgctctcctggctctcgctgcgagcgccacctncacgcatacaagcggcggctgcggctgccagccaccgccgccggttcatctaccgccgccggtgcatctgccacctccggttcacctgccacctccggtgcatctcccaccgccggtccacctgccgtcgccggtccacctgccaccgccggtccatgtgccgccgccggttcatctgccgccgccaccatgccactaccctactcaaccgccccggcctcagcctcatccccagccacacccatgcccgtgccaacagccgcatccaagcccgtgccagctgcagggaacctgcggcgttggcagcaccccgatcc

SEQ ID NO: 17478 - DNA, 437 bp, Zea mays
  Clone ID: LIB3151-015-Q1-K1-A4
cagaaacacaccaagcgaagctacctagcatcgacttaacaacaatggctaccaagatattagccctccttgcgcttcttgccctttttgtgagcgcaacaaatgcgttcattattccacaatgctcacttgctcctagtgccattataccacagttcctccgaccagttacttcaatgggcttcgaacacctagctgtgcaagcctacaggctacaacaagcgcttgcggcgagcgtcttacaacaaccaattaaccaattgcaacaacaatccttggcacatctaaccatacaaaccatcgcaacacaacatcaacaacagttcctaccagcactgagccaactagatgtggtgaaccctgtcgcctacttgcaacagcaggtgcttgcatccaacccacttgctctggcaaacgtagctgcataccaacaacaa

SEQ ID NO: 17479 - DNA, 433 bp, Zea mays
  Clone ID: LIB3151-015-Q1-K1-A5
gcaaagcggcagtgcgtaaagaggatcgtcgaacagaacagcatgaagatggtcatcgttctcgtcgtgtgcctggctctgtcagctgccagcgcctctgcaatgcagatgccctgcccctgcgcggggctgcagggcttgtacggcgctggcgccggcctgacgacgatgatgggcgccggcgggctgtacccctacgcggagtacctgaggcagccgcagtgcagcccgctggcggcggcgccctactacgccgggtgtgggcagacgagcgccatgtaccagccgctccggcaacagtgctgccagcagcagatgaggatgatggacgtgcagtccgtcgcgcagcagctgcagatgatgatgcagcttgagcgtgccgctgccgccagcagcagcctgtacgagccagctctgatgcagcagcagcagc

SEQ ID NO: 17480 - DNA, 387 bp, Zea mays
  Clone ID: LIB3151-015-Q1-K1-A6
aacccttccgcaataccaaactatacaatcctacatggtttattaggccatccaggcaagcatcttacgggggttagcattaaccgtcctacaaccttacgctctattgcaacagccatccttagtgcatttgtatctccaaagaatcgcggcccaacaactacaacaacagttgctaccaacaatcaatcaaagatttgcaaaaaaccttgctgcttacctgcaacaacaacagtttcctacattcaatcaactaaatagcgtgaaccctgctatctacttgcacgcacaacagctactaccatttaaccaacttgtcgggagcccttatgccttcttactgcaacaacagcttctaccattccatcttcaagctgtagcaaacat

SEQ ID NO: 17481 - DNA, 264 bp, Zea mays
  Clone ID: LIB3151-015-Q1-K1-A7
accgacccatcgcgtccggcggcagtgcgtacagaggatcgtctaacataacagcatgaagatggtcatcgctggcgtcgtgtgcctggctctgtcagctgccatcgcctctgcaatgcagatgccctgcccctgcgcgactctgaaaaaacatgtacgtacgctagctccatcctgacgacgatgatgggcgcctgccggctgtacccctacgcggagtacccgaagcagtcgagcttcacccggtggcggcggccccctact

SEQ ID NO: 17482 - DNA, 426 bp, Zea mays
  Clone ID: LIB3151-015-Q1-K1-A9
gttggcacaaatcatcaaggcacaacaactactacaacttgtgctaggaaaccttgctgcctactctcagcaacagcagtttcttccattcaaccaactggctgcattgaactctgctgcttatttgcaacaacaactaccattcagtcagctagctgctgcctacccccagcaatttcttccattcaaccaactggcagcattgaactctgctgcttatttacaacagcaacagctaccaccattcagccagctagctgatgtgagccctgttgccttcttgacacaacaacagttgttgccgttctacctgcacgctgcgcctaacgctggcaccctcttacaactgcaacaattgctgccattcaaccaacttgctttgacaaacccaacagcgttctaccaacaacccatcattggtggtgc

SEQ ID NO: 17483 - DNA, 340 bp, Zea mays
  Clone ID: LIB3151-015-Q1-K1-B1
gccgtctacaccaactccgttcccctattacctagttagtccagtccgcctgctgcctgcctcaacggatcgacgcgacaggagggagggaggaaggagacagtcgatcagagtctgagacggatgccgatccaccaccgcagcgacgagcgggaggagatgaagatcatcattgacacggatcccggcatctatgacagcgtggccatcctgatggcattgcacatgccgggcgtgcatgtcctaaggctcaccaccatcttcggaaactgcaccacagagcatgccacacgcaacgccttgatcctgtgcgagaaggcaagccatctacaggtcccag

SEQ ID NO: 17484 - DNA, 419 bp, Zea mays
  Clone ID: LIB3151-015-Q1-K1-B10
tgaaaacccaattcttcaaccctacaggatccaacaggcaatcacagctggcatcttacctttatcacccttgttcctccaacaatcatcagccctattacatcagttacctttggtgcatttattggcacaaaacatcagggcacaacaactacaacaacttgtgctagcaaaccttgctgcctactctcagcaacagcagtttcttccattcaaccaactagctgcattgaactctgcttcttatttgcaacaacaacaactaccattcagccagctacctgctgcctacccccagcaatttcttccattcaaccaactggcagcattgaactctcctgcttatttacagcagcaacaactactaccattcagccagctagctggtgtgagccctgctaccttcttgatacaaccac

SEQ ID NO: 17485 - DNA, 430 bp, Zea mays
  Clone ID: LIB3151-015-Q1-K1-B11
attttgagcattcagaaacacaccaagcgtagcacattagcaacaacctaacaacaatggctaccaagatattatccctccttgcgcttcttgcgctttttgcgagcgcaacaaatgcgttcattattccacaatgctcacttgctccaagttccattattacacagttcctcccaccagttacttcaatgggcttcgaacacccagctgtgcaagcctataggctacaacaagcaattgcggcgagcgtcttacaacaaccaatttcccagttgcaacaacaatccttggcacatctaacaatacaaaccatcgcaacgcaacagcaacaacaattcctaccagcactgagccacctagccatggtgaaccctgccgcctacttgcaacagcagttgcttgcatcaaacccacttgctctggcaaacgt

SEQ ID NO: 17486 - DNA, 423 bp, Zea mays
  Clone ID: LIB3151-015-Q1-K1-B12
gaccattagctttatctactccagagcgcagaagaacccgatcgacaccatgagggtgttgctcgttgccctcgctctcctggctctcgctgcgagcgccacctccacgcatacaagcggcggctgcggctgccagccaccgccgccggttcatctaccgccgccggtgcatctgccacctccggttcacctgccacctccggtgcatctcccaccgccggtccacctgccgccgccggtccacctgccaccgccggtccatgtgccgccgccggttcatctgccgccgccaccatgccactaccctactcaaccgccccggcctcagcctcatccccagccacacccatgcccgtgccaacagccgcatccaagcccgtgccagctgcagggaacctgcggcgttggcagcaccccgatcct

SEQ ID NO: 17487 - DNA, 204 bp, Zea mays
  Clone ID: LIB3151-015-Q1-K1-B2
tctttgaccttgtttattgatcgccccaatgcttctgtcacgctgagagcctgatagagagggcatgaacacaccgtgaatgcggtcggtgccagcatgtctgtgcgaatcaaggcgtctgtagacctattcgcgaaagaactgcatgaggcgctggacgctgacattatagaccttgttatgtaagaactcgagatgcatatc

SEQ ID NO: 17488 - DNA, 389 bp, Zea mays
  Clone ID: LIB3151-015-Q1-K1-B3
ggtcttaaaaccattagctttatctactccagagcgcaaaaaaacccgatcgacaccatgagggtgttgctcgttgccctcgctctcctggctctcgctgcgagcgccacctccacgcatacaagcggcggctgcggctgccagccaccgccgccggttcatctaccgccgccggtgcatctgccacctccggttcacctgccacctccggtgcatctcccaccgccggtccacctgccgccgccggtccacctgccaccgccggtccatgtgccgccgccggttcatctgccgccgccaccatgccactaccctactcaaccgccccggcctcagcctcatccccagccacacccatgcccgtgccaacagccgcatccaagcccgtg

SEQ ID NO: 17489 - DNA, 405 bp, Zea mays
  Clone ID: LIB3151-015-Q1-K1-B4
ggctggaccgctgggtggaggagaggtacacggacgacgagaagaacgccaagattctcgaagtggacaacggcaagccagggcggcacggttccaagaggcgcggcggcggcggcggcggcaaccatcaccagtcgccgtgctcgacgatgacctccgagcagaacagccggagctacgcgaccatgccggagtcgccgtccaaggactcgacgaccgcgcagcagtccgtgccgagcccgtcgtccgtgggcatggcggccgaggccctgagcccgctgcgcgtgccagcggacatcgccgagctctgcgacagcccccagttcttctcggcgacgtcgcggcccgggagctccaggagggggggcgcgttcaccccggcggccaagagcgagtgctcgcgta

SEQ ID NO: 17490 - DNA, 440 bp, Zea mays
  Clone ID: LIB3151-015-Q1-K1-B5
ccacgcgtccgcgccggttaatggctctccctccagtgccgtgcagtgcgcacagggttttaggaagggggcgacaccggtatcgccattcgccagccatggaatccgcaacggcggccgtccgcagcgcgtcgctagcccgggcccggcccgcgccgctcgtccacgggcgcgcgcgcggggcgggtcgcgtcgtgggcgctggcctcgccgcgcgcgcccggcggagggcgctcgtcgccgtagcctcccaccaggagcaccacgagccgctcccgccgcgcgcgcaagagggcggcgccgtggctgtggcgacgcatgctgacgaggcggaggtccatgcgattgacgctccggcggctgctgctgaaacctcgtcttcccaactggctgctggcaagacagtgcgtgttcgatttgtgctgaaaaggcagtgcacg

SEQ ID NO: 17491 - DNA, 421 bp, Zea mays
  Clone ID: LIB3151-015-Q1-K1-B6
gtccataaacacactattctatccacatacttttttaacctaacaacaatggctaccaagaggatgctcctttcttgcgcattcttgcgctctttgcaagcgcaacaaatgcgttcattattccacaatgctcacttgctccaaccttccattattacacatttcccaccccccgttacttcaatgggcctttgaacacccagctgtgcaagcctatttgctacaacaagcaattgcggcgagcgttttacaacaaccaatttcccagtttcaacaacaattcttgtaacatctaacaatacaaaccatttcaacgcatcatcaacaacatttcctaccattacttgatccacctagccattgtgaacacctgcccctacttacaacatcttttgcttatcattaaaccccactttctttt

SEQ ID NO: 17492 - DNA, 349 bp, Zea mays
  Clone ID: LIB3151-015-Q1-K1-B7
gacccacgcgttcggccacgcgttcagactagtgggcggtctactgctggactggagcgtttgcgatggcgagcggcgtcatcagaaggaagaacctttttgccggtggcggtgacagtggcgggaactccgacgagcttagcgtggaagtgttctgcccggtgttcggctcaccggagcagccgtcaaaggacgacgtcgatggctccgccgtctccaacattggactatggggtgggccgggaggatcggcacatgacatcacgacgacagatgcaccaaagcgtctgaacagcgtctacattcgcgcccgtattgccgtcgactcgatcgagttcacttacacttg

SEQ ID NO: 17493 - DNA, 417 bp, Zea mays
  Clone ID: LIB3151-015-Q1-K1-B9
caactagcaacatagaaagcacaatagtgtaccaacaatggcagccaaaatattttgcctgcttatgctccttggtctttctgcaagtgctgctacggcgaccattttcccacaatgctcacaagctcctatagcttcccttcttcccccgtacctctcaccagcggtgtcttcggtatgtgaaaacccaattcttcaaccctatatgatccaacaggcaatcgcagctggcatcttacctttatcacccttgttcctccaacaatcatcagccctattacagcagttacctttggtgcatttattggcacaaaacatcagggcacaacaactacaacaacttgtgctagcaaaccttgctgcctactctcagcaacaacagtttcttccattcaaccaactagctgcattgaactc

SEQ ID NO: 17494 - DNA, 249 bp, Zea mays
  unsure at all n locations
  Clone ID: LIB3151-015-Q1-K1-C1
attttgagcattcaaaaacacacnaagcgatgcggacttacaaccaccttacaaccatgggttacaagaattttacccttcctgtgctctttggccttttgtgagagcgcaacatacgcgtcattattccacaatgctcacttgctcctagagccattattccacacatcctcccaccagatactctaatgggcttcgaacacctatctgtgcaagccaacatgcaacaacaagcgcttgcggcgagcg

SEQ ID NO: 17495 - DNA, 354 bp, Zea mays
  Clone ID: LIB3151-015-Q1-K1-C10
ctcgcgccgcctccgagacagccgccgcaaccatggccaccaccgccgccgcgtctaccgcgctcactggcgccactaccgctgcgcccaaggcgaggcgccgggcgcacctcctggccacccgccgcgccctcgccgcgcccatcaggtgctcagcggcgtcacccgccatgccgatggctcccccggccaccccgctccggccgtggggccccaccgagccccgcaagggtgctgacatcctcgtcgagtccctcgagcgctgcggcgtccgcgacgtcttcgcctaccccggcggcgcgtccatggagatccaccaggcactcacccgctcccccgtcatcgccaaccacc

SEQ ID NO: 17496 - DNA, 422 bp, Zea mays
  Clone ID: LIB3151-015-Q1-K1-C11
ccgaccacgcgtccgacaatgtcatccaattattttgccttttatgctccttggtctttctgcaagtgctacgacggttaccattttcccgcaatgctcgcaagctcctatagctttccttcttcccccgtacctctcaccagcggtgtcttcggtatgtgaaaacccaattcttcaaccctacaggatccaacatgcaatcgcagctggcatcttacctttatcacccttgttcctccaacaatcatcaaccctattacaacagttacctttggtgcatttattggcacaaaacatcatggcacaacaactacaacatcttgttctagcaaaccttgctgcctactctcatcaacagcattttcttccattcaaccaactatgttcattgaactctgcttcttatttgcaacaacaacaac

SEQ ID NO: 17497 - DNA, 427 bp, Zea mays
  Clone ID: LIB3151-015-Q1-K1-C12
gcatctcgcaagagatcgacaggttcaaggccaccgatgccaataggcttcgtgctgaatacaacagactggtggatggactggcacagcgaggaaatctaccaatatcggatgcttggctcgcgaatccgtctttgcctgatgacatcttgaaggaagctgttcctggaaacataaggagggctgaacattttcttgctgtcttgcggaggcttgtgagattccttgatggccggcttgaaacagaaaatgttgagaatgaaatgccagtttcctttgttgcctcaatccattcccaggctggaatcgaccaaaaaatgctgaggttttgttatgaccggctacactgcctaatgatgacattatagataactgatacagatgagttcatgcacatacagaccatatgtgactttgccacactgat

SEQ ID NO: 17498 - DNA, 413 bp, Zea mays
  unsure at all n locations
  Clone ID: LIB3151-015-Q1-K1-C2
cgccttcggaaaccaaaatgcgcttccagggcacttatggttgcaaatcacagtggggcacaaggtggagtggaccaaggtttttgagatgggtgtctccaacaagacccctgagtttctaaagatgaacccccttgggaaggttcctgttctggagactcctgatggccctgtttttgagagtaatgctattgcgcgctatgttgctcgcttgaaggatgacaaccctcttttcgggtcttcccgtattgaacaagcccacgttgagcagtggatggactttgctgcaacagaagttgatcctagtgttggatggtacttgtatccaaggcttgggtacattccttatgctcacacgactgagganacagctattgcttcattgaagagatcccttgtgctctgaacacaca

SEQ ID NO: 17499 - DNA, 462 bp, Zea mays
  Clone ID: LIB3151-015-Q1-K1-C4
cgtccggattcccgttcgaccacgcgtccgatctagcatcatagatagccttagtgtaccacaatggcagccaaaatattttgcctgcttatgctccttggtatttctgcaagtgctgctacggcgaccattttcccgcaatgctcacaagctcctatagcttccctttcttccccgttacctctcaccagcggtgtcttcggtatgtgaaaacccaattcttcaaccctacaggatccaacaggcaatcgcagctggcatcttacctttatcacccttgttcctccaacaatcatcagccctattacagcagttacctttggtgcatttattggcacaaaacatcagggcacaacaactacaacaacttgtgctagcaaaccttgctgcctactctcagcaacagcagtttcttccattcaaccaactagctgcattgaactctgcttcttatttgcaaca

SEQ ID NO: 17500 - DNA, 418 bp, Zea mays
  unsure at all n locations
  Clone ID: LIB3151-015-Q1-K1-C5
cccacgcgcctttccaagggctcttactacggggcctactatgatgttgaatgacagaatccaaagcgtgggggtctccaatcatccctgaaaaggagaggagtatctactgagtgttcctcngacactccctactcggagttcaaccataggttccaagagcttggcttggagaagggttggggtgacactgcgaagcgtgtactcgacacactccacttgcttctcgaccttcttgaggcccctgatcctgccaacttggagaagttccttggaactataccaatgatgttcaacgttgttatcctttctcctcatggctacttcgctcagtccaatgtgcttggataccctgacactggcggtcaagttgtgtacattctggatcaagtccgtgctttggagaatgagatgcttc

SEQ ID NO: 17501 - DNA, 351 bp, Zea mays
  Clone ID: LIB3151-015-Q1-K1-C6
acccacgcgtccgctaaataaactatgatatctacaatagcttttttcatacctaccaatgacagaattcaaggcggtgattttcatcaataatccctcacacatgcacatgagtatctactgtctatatctcaaacacttcctactacaattccaaccataagttccaagaactgttcctattctaaaaatacgagtgacactcctaaccttttactcaacacactccacttgcttctccaccttttttaggccccaaaatcctaacaactgggagaactcccttgaaactatacctatcatactcaaccttgcaattccttattctcatatatacttacctaaattcaa

SEQ ID NO: 17502 - DNA, 126 bp, Zea mays
  Clone ID: LIB3151-015-Q1-K1-C7
agatcaatatgatggatgggaagagcatgctcaggtgcttgacaatgacaaaaccgcttggggaggttgctgctctgaaaactcctcatggcccgcatctttatagtaataatcttgtgcgccata

SEQ ID NO: 17503 - DNA, 275 bp, Zea mays
  unsure at all n locations
  Clone ID: LIB3151-015-Q1-K1-C8
ccacagacaacaccacccgccgaggcgtctcgacagccgccaggaggaaggaataaggtcactggcagccagtgaagggggagaagagtactgctccgtcgaccattgcgcgcaccgcccggcagggctgatcatctcgtcgaccaccagnggaccaatcggcatggaggctctgtccacgtcgcaactagtctcaactcccgccggactgggctttcttgacgcgttcacgttatgaaccagcgccgctcaaggcctgaagggggcctggtcgt

SEQ ID NO: 17504 - DNA, 332 bp, Zea mays
  Clone ID: LIB3151-015-Q1-K1-D1
ttcagcattcaaaaacacaccaagcgaagcgcactatcaacaacctaacaacaatggctaccaagatattagccctccttgcgcttcttgcccttttagtgagcgcaacaaatgcgttcattattccacagtgctcacttgctcctagtgccattattccacagttcctcccaccagttacttcaatgggcttcgaacatccagccgtgcaagcctacaggctacaactagcgcttgcggcgagcgtcttacaacaaccaattgcccaattgcaacaacaatccttggcacatctaaacctacaaaccatcgcaacgcaacagcaacaacag

SEQ ID NO: 17505 - DNA, 374 bp, Zea mays
  Clone ID: LIB3151-015-Q1-K1-D10
tgccgtcgcctgtccacctttcttcgcctgtccatgtgccgccgccggggatgtggcgtcgccaccatgccactaccctactcaaccgccccggcctcagcctcatccccagccacacccatgcccgtgccaacagccgcatccaatcccgtgccagctgcagggaacctgcggcgttggcagcaccccgatcctgggccagtgcgtcgagttcctgaggcatcagtgcagcccgacggcgacgccctactgctcgcctcagtgccagtcgttgcggcagcagtgttgccagcagctcaagcaggtggagccgcagcaccggtaccaggcgatctttggcttgggcctccagtccatcctgcagcaacagccgc

SEQ ID NO: 17506 - DNA, 426 bp, Zea mays
  Clone ID: LIB3151-015-Q1-K1-D11
caactagcaacatataaagcacaatagtgtaccaacaatggcagccaaaatattttgcctgcttatgctccttggtctttctgcaagtgctgctacggcgaccattttcccgcaatgctcgcaagctcctatagcttcccttcttcccccgtacctctcaccagcggtgtcttcggtatgtgaaaacccaattcttcaaccctacaggatccaacaggcaatcgcagctggcatcttacctttatcacccttgttcctccaacaatcatcagccctattacaacagttacctttggtgcatttattggcacaaaacatcagggcacaacaactacaacaacttgtgctagcaaaccttgctgcctactctcagcaacagcagtttcttccattcaaccaactaggttcattgaactctgcttctta

SEQ ID NO: 17507 - DNA, 418 bp, Zea mays
  Clone ID: LIB3151-015-Q1-K1-D12
attagctttatctactccagagcgcagaagaacccgatcgacaccatgagggtgttgctcgttgccctcgctctcctggctctcgctgcgagcgccacctccacgcatacaagcggcggctgcggctgccagccaccgccgccggttcatctaccgccgccggtgcatctgccacctccggttcacctgccacctccggtgcatctcccaccgccggtccacctgccgccgccggtccacctgccaccgccggtccatgtgccgccgccggttcatctgccgccgccaccatgccactaccctactcaaccgccccggcctcagcctcatccccagccacacccatgcccgtgccaacagccgcatccaagcccgtgccagctgcagggaacctgcggcgttggcagcaccccgatcc

SEQ ID NO: 17508 - DNA, 354 bp, Zea mays
  Clone ID: LIB3151-015-Q1-K1-D2
caactagcaacatacatagtgaagtacactagcaacatcttagcaccaatgggagccaagatttttgccctccttgccctccttgctctttcagcaagcgctgctacctcgacttttattccacaatgctcacaacaatacctctctccggcgacagccgtgggatttcaatacccaactatacaatcctacatggtacaagaggccatccaagcaagcatcttacggtcattagcattaaccctccaacaaccatatgctctattgcaacagccatccttagtgcatctgtatctccaaagaatcgcggcacaacaactacaacaacagttgctaccaacaatcaatcaagta

SEQ ID NO: 17509 - DNA, 416 bp, Zea mays
  Clone ID: LIB3151-015-Q1-K1-D3
gccctgcccctgcgcggggctgcagggcttgtacggcgctggcgccggcctgacgacgatgatgggcgccggcgggctgtacccctacgcggagtacctgaggcagccgcagtgcagcccgctggcggcggcgccctactacgccgggtgtgggcagacgagcgccatgtaccagccgctccggcaacagtgctgccagcagcagatgaggatgatggacgtgcagtccgtcgcgcagcagctgcagatgatgatgcagcttgagcgtgccgctgccgccagcagcagcctgtacgagccagctctgatgcagcagcagcagcagctgctggcagcccaaggtctcaaccccatggccatgatgatggcgcagaacatgccggccatgggtggactctaccagtaccagtaccagc

SEQ ID NO: 17510 - DNA, 435 bp, Zea mays
  Clone ID: LIB3151-015-Q1-K1-D4
gccggtccacctgccgccgccggtccacctgccaccgccggtccatgtgccgccgccggttcatctgccgccgccaccatgccactaccctactcaaccgccccggcctcagcctcatccccagccacacccatgcccgtgccaacagccgcatccaagcccgtgccagctgcagggaacctgcggcgttggcagcaccccgatcctgggccagtgcgtcgagttcctgaggcatcagtgcagcccgacggcgacgccctactgctcgcctcagtgccagtcgttgcggcagcagtgttgccagcagctcaggcaggtggagccgcagcaccggtaccaggcgatcttcggcttggtcctccagtccatcctgcagcagcagccgcaaagcggccaggtcgcggtgctgttggcggcgcatatagcgcagcaact

SEQ ID NO: 17511 - DNA, 139 bp, Zea mays
  Clone ID: LIB3151-015-Q1-K1-D5
accataccactaccctactcaacctcccacacctcatcctcatacctatccacacccatcccctatccaacatccactttcaaaccacttccatctacatataaccttcaacacaatcatcaccccaatcctttaccat

SEQ ID NO: 17512 - DNA, 373 bp, Zea mays
  Clone ID: LIB3151-015-Q1-K1-D7
gcgtaactagcagacatacatagtgaagtacactatcttcatcttagcaccaatgggagccaagaggtgcgccctccttgccctccttgctctttcaacaagcgctgctacctcaacttttattccacaatgctcacaacaatacctctctcccgcgacagccgtgggatttcaatacccaactatacaatcctacatggtacaagaggccatccaagcaagcatcttacggtcattagcattaaccctccaacaaccatatgctctattgcaacagccatccttagtgcatctgtatcttcaaagaataagggcacaacaactactacaacagttgctaccaacaatcaatcaagtagttgcagcgaacctt

SEQ ID NO: 17513 - DNA, 157 bp, Zea mays
  unsure at all n locations
  Clone ID: LIB3151-015-Q1-K1-D8
tccgatttgaccttgggttctccggttcattgtatctcggtgcagntaattcgctgatgggggtgtctgtttgatcatcgacagaacataacagaaatggccttgcgcattgtactcccaaagcttccatcttcaaatctgccttttagatatagat

SEQ ID NO: 17514 - DNA, 422 bp, Zea mays
  Clone ID: LIB3151-015-Q1-K1-D9
tacatagcgaagtacactagcaacatgttatcaccaatgggagccaagatttttgcggtgcttgccctccttgctctttcagcaagcgctgctacctctacttttattccacaatgctcacaacaatacctctctccggcgacagccgtgggatttcaatacccaactatacaatcctacatggtacaagaggccatccaagcaagcatcttacggtcattagcattaaccctccaacaaccatatgctctattgcaacagccatccttagtgcatctgtatctacaaagaatcgcggcacaacaactacaacaacagttgctaccaacaatcaatcaagtagttgcagcgaaccttgctgattaccttcagcaacaacagtttcttgcattcaatcaactagatcgggtgaaccctgctat

SEQ ID NO: 17515 - DNA, 425 bp, Zea mays
  Clone ID: LIB3151-015-Q1-K1-E1
accaactagcaacatataaagcacaatagtgtaccaacaatggcagccaaaatattttgcttccttatgctccttggtctttctgcaagtgttgctaccgcaaccattttcccacaatgctcacaagctcctatagcttcccttcttcccccatacctctcaccagcggtgtcttcaatgtgtgaaaacccaattgttcaaccctacaggatccaacaggcaatcgcaacaggcatcttaccattatcacccttgttcctccaacaaccgtcagccctattacagcagttacctttggtccatttggtggcacaaaacatcagggcacaacaactacaacaacttgtgctagcaaaccttgctgcatactctcagcaacatcagtttcttccattcaaccaactggctgcattgaactctgctgc

SEQ ID NO: 17516 - DNA, 383 bp, Zea mays
  Clone ID: LIB3151-015-Q1-K1-E2
tccttgaagttgaagtcgtgatggccaatgattgcattggtgaagaggttgagaagttggctgccgctttgccagaaggtggagttctgctcctagagaatgttagattctacaaggaggaagagaagaacgaacctgagtttgctaagaagctagcatctgttgctgacctttatgtcaatgatgcttttggcacggcacacagagctcatgcttcaaccgaaggagttaccaagtatttgaagcctgctgttgccggcttcctcatgcagaaggaacttgactaccttgttggagctgttgccaacccaaagaagccatttgccgctattgttggtggatccaaggtctcaagtaagattggtgtcattgagtccttgctg

SEQ ID NO: 17517 - DNA, 86 bp, Zea mays
  Clone ID: LIB3151-015-Q1-K1-E3
aaacagttgcgacagctcgacaaagatttgtgagagtgatccggcgctgagaagagatggctaagatcgccgcagccgccgcggcg

SEQ ID NO: 17518 - DNA, 413 bp, Zea mays
  Clone ID: LIB3151-015-Q1-K1-E4
cgacccacgcatgcgaaagattttccttctcttctacaaagatctttttttaccaaccgacaccatataatatatggctgagattcctctcatctcctttctctcgctcctaaccccatcttcacacatacaatcttcgattgcttcttccaaccacactccaaccttcatatacctacgcacctgcattttccacctcaagttcaccagacacctccttatcactttccaccagcttctcaccttcctactacactccaccttccaccaccgatccattttcctgcgcacacttctcttcaatcgtcaccatcccaataccctactctaccgccccgatctcagcctcatcctcatccacacccatgcccattccaacagactaattcataccctttccaaataaaagcaac

SEQ ID NO: 17519 - DNA, 414 bp, Zea mays
  Clone ID: LIB3151-015-Q1-K1-E5
ggacgagcaaaccctagaaagctacggcgttgagacagatcacacaattcacttggtgcgtggtgttgccccaccagctgcatccagtgcacctgctgctgccagctcccttgcttcatctactcctagtagcgtcccggcaggtggcctgggagatctatttccaggtgttggtgctccaggaagtggcaggtcatcaggtatatttgggccaggatttccagagttagagcaagttgagcagcatttaagccagaatcccaacttgatgagggagataatgaatatgccagcgatgcaaaatctcatgaataaccctgatttaatacgcaatatgattatgagcaacccacaaatgcgcgagatcatggatcggaatcctgatcttgcccatgtgctcaatgacccaagtgt

SEQ ID NO: 17520 - DNA, 424 bp, Zea mays
  Clone ID: LIB3151-015-Q1-K1-E6
gtccgcctggctgaacttcctcaaggctcataacttcaagggcacgacgatgatgttgaatgacggagtccaaagccttcgtggtctccaatcatccctgagaaaggcagaggagtatctactgagtgttcctcaagacactccctactcggagttcaaccataggttccaagagcttggcttggagaagggttggggtgacactgcgaagcgtgtactcgacacactccacttgcttctcgaccttcttgaggcccctgatcctgccaacttggagaagttccttggaactataccaatgatgttcaacgttgttatcctttctcctcatggctacttcgctcagtccaatgtgcttggataccctgacactggcggtcaggttgtgtacattctggatcaagtccgtgctttggagaatgag

SEQ ID NO: 17521 - DNA, 306 bp, Zea mays
  Clone ID: LIB3151-015-Q1-K1-E7
ggtgagaagaagggggtcaaaggcgcgagccccaacgaggaggagaaagagaaagaggaggggaagaagcaacaggcggtggagaaagagaaagagaaggggaagaagcagcaggtggagtcggtgctgctcaagatccgcctgcactgcgacggctgcgcctaccgcatcaggcaacgcatcggcaagatcaaaggcgtcaaggatgtggtgctggaggccaatgccaaggacgaggtggaggtcacggtcaccatggacataccgaacatggtctcctacctcaaggagaagctcaaccgctac

SEQ ID NO: 17522 - DNA, 377 bp, Zea mays
  Clone ID: LIB3151-015-Q1-K1-E8
tgactgactactgtaataccagagatcgaacaacttggtcctgcagctcaagaagagaggtttgtgcatttgggggccgggggcaagagagagagagagagagccatggcggcggaccagcagccgcagctgcaggaggagatgaacgacgctgccggcggcggcctcatgctgcctccagggttccgcttccacccgagcgacttcgagattgtcagcttctacctcaccaacaaggtgctcaacacgcgcttgacctgcaccgccatcacggatgccgacctaaacaagattgagccatgggacctcccgagcaaggcgaagatgggcgagaaagagtggtacttcttctaccagaaagaccgcaagtacccgac

SEQ ID NO: 17523 - DNA, 397 bp, Zea mays
  unsure at all n locations
  Clone ID: LIB3151-015-Q1-K1-E9
cggacgcgtgggctcgccatcaaggtgttctgcacgccggcgtacgaggagatggggaggaactgcatgatccaggatctctcctggaagggccctgccaagaactgggagaacgtgctgctcagcctcggggtcgccggcggcgagccaggggtcgaaggcgaggagatcgcgccgctcgccaaggagaacgtggccgcgccctgaagagttcggcctgcatggcccctgatctcgcgcgtggtgcaaagatgttgggacatcttcttatatatgctgnttcgtttatgtgatatggacaagtatgtgtagctgcttgcttgtgctagtgtaatgtagtgtagtggtggccagtggcacaacctaataagcgcatgaactaattgcttgcgtgtgt

SEQ ID NO: 17524 - DNA, 322 bp, Zea mays
  Clone ID: LIB3151-015-Q1-K1-F10
caatgctcacttcctactatttacataactacacagtttcccacaagagtgactttatttggcctttaacacccatctgtgcacgcctataatccacaacaaacaattgaatgcagcgtcttacaacaaccaattttccaattgcaacaacaatccttggcacatctaacaatacaaaccatagcaacgcaacacctacaacattttctaccagcactgagccacctattcatagtaaacccttgaccctacttacaacaacagttgcttgcatcaaacccacttgctcttgcaaacataattgcaaaccaaccacaacaac

SEQ ID NO: 17525 - DNA, 429 bp, Zea mays
  Clone ID: LIB3151-015-Q1-K1-F11
aaacacaccaagcgaagcgcactagcttcaacctaacaacaatggctaccaagataggagccctccttgcgcttcttgcccttttagtgagcgcaacaaatgcgttcattattccacagtgctcacttgctcctagtgccattattccacagttcctcccaccagttacttcaatgggcttcgaacatccagccgtgcaagcctacaggctacaactagcgcttgcggcgagcgtcttacaacaaccaattgcccaattgcaacaacaatccttggcacatctaaacctacaaaccatcgcaacgcaacagcaacaacagtttctgccatcactgagccacctagccgtggtgaaccctgtcgcctacttgcaacagcagctacttgcatccaacccacttgctctggcgaacgtagctgcataccagc

SEQ ID NO: 17526 - DNA, 347 bp, Zea mays
  Clone ID: LIB3151-015-Q1-K1-F3
ttcagcattcaaaaccacaccaagcgaagcgcactagcaacaacctaacaacaatggctaccaagatattagccctccttgcgcttcttgcccttttagtgagcgcaacaaatgcgttcattattccacagtgctcacttgctcctagtgccattattccacagttcctcccaccagttacttcaatgggcttcgaacatccagccgtgcaagcctacaggctacaactagcgcttgcggcgagcgtcttacaacaaccaattgcccaattgcaacaacaatccttggcacatctaaacctacaaaccatcgcaacgcaacagcaacaacagtttctgccatcactg

SEQ ID NO: 17527 - DNA, 433 bp, Zea mays
  Clone ID: LIB3151-015-Q1-K1-F4
gttcattattccacaatgctcacttgctccaagttccattattacacagttcctcccaccagtggacttaatgggcttcgaacacccagctgtgcaagcctataggctacaacaagcaattgcggcgagcgtcttacaacaaccaatttcccagttgcaacaacaatccttggcacatctaacaatacaaaccatcgcaacgcaacagcaacaacaattcctaccagcactgagccacctagccatggtgaaccctgccgcctacttgcaacagcagttgcttgcatcaaacccacttgctctggcaaacgtagttgcaaaccagccacaacaacagctgcaacagtttctgccagcgctcagtcaactagccatggtgaaccctgccgcctacctacaacagcaacaactgctttcatctagcccgctcgct

SEQ ID NO: 17528 - DNA, 434 bp, Zea mays
  Clone ID: LIB3151-015-Q1-K1-F5
gaaagcacaatagtgtaccaacaatggcatccaaaatattttgcctccttatgctccttggtggttctgcaagtgctgctacggcgaccattttcccgcaatgctcacaagctcctatagcttcccttcttcccccgtacctctcaccagcggtgtcttcggtatgtgaaaacccaattcttcaaccctacaggatccaacaggcaatcgcagctggcatcttacctttatcacccttgttcctccaacaatcatcagccctattacagcagttacctttggtgcatttattggcacaaaacatcagggcacaacaactacaacaacttgtgctagcaaaccttgctgcctactctcagcaacagcagtttcttccattcaaccaactagctgcattgaactctgcttcttatttgcaacaacaacaactacca

SEQ ID NO: 17529 - DNA, 430 bp, Zea mays
  Clone ID: LIB3151-015-Q1-K1-F6
tccgaccacgcgtccgattgagaccaacaagctacatagaaagtttaatccagtagcaacaatagagcaacaatggcgaccaagatattttccctccttatgctccttgctctttctgcatgtgttgctaacgcgacaattttccctcaatgctcacaagctcctatagcttcccttcttcccccataccttccatcaatgatagcttcagtatgtgaaaacccagctcttcaaccctataggctccaacaagcaatcgcagcaagcaacatacctttatcacccttgtttcaacaatcgccagccctatctttggtgcagtcattggtacaaaccatcagggcacaacagctgcagcaactcgtgctacctgtgatcaaccaagtagctctggcaaacctttctccctactctcagcaacaacaatttc

SEQ ID NO: 17530 - DNA, 351 bp, Zea mays
  Clone ID: LIB3151-015-Q1-K1-F7
tccacgcgtacgcccacgcgtacgcccactcgtccgaccacgcgttcgcccacgcgtgcgaccacgcgtacgcttttttttttttttttctggaaatgtaactttttataactggttggccacatacatcattcaaaaaactctattattgaattacatctaaaaagcaatctaaaagagggcaccaacaatgaagagtggccgacaggacgctgttgccaacatcaaagcaagctgaacaaagaacaacactcgccctatatctaagacataagcgcggttagccgtatactgacgctcaaacggaaccatacactggtgagtgaactaggaaccactgctttctgtttc

SEQ ID NO: 17531 - DNA, 374 bp, Zea mays
  Clone ID: LIB3151-015-Q1-K1-G1
ctgggtcttcagaccattagctttatctactccagagcgcagaagaacccgatcgacaccatgagggtgttgctcgttgccctcgctctcctggctctcgctgcgagcgccacctccacgcatacaagcggcggctgcggctgccagccaccgccgccggttcatctaccgccgccggtgcatctgccacctccggttcacctgccacctccggtgcatctcccaccgccggtccacctgccgccgccggtccacctgccaccgccggtccatgtgccgccgccggttcatctgccgccgccaccatgccactaccctactcaaccgccccggcctcagcctcatccccagccacacccatgcccgtgccaaca

SEQ ID NO: 17532 - DNA, 345 bp, Zea mays
  Clone ID: LIB3151-015-Q1-K1-G10
cacagcggttcgtggtgcgtgcgaacgccaaagacattgcctttgaccagaaatccagggcagcgctgcaggccggcgtcgagaagctggcaaacgccgtcggtgtcaccctcgggccacgagggaggaatgtggtgctcgatgagtacggcaaccccaaagttgtgaatgatggagtcactattgcccgtgctattgagctgtatgatccaatggaaaatgctggtgcagcattgattcgtgaggttgctagcaagaccaatgattcagctggtgatgggactacaactgcatccgtccttgctcgtgaaatcatcaagctaggccttctgagtgtaacatctg

SEQ ID NO: 17533 - DNA, 150 bp, Zea mays
  Clone ID: LIB3151-015-Q1-K1-G11
cgctgactagctacctagctcgctagtttactcatttagcggcgatgagtaacgtagtgtcacccatcaccatgggtggcagtgtgagcaatgacctgaatgaaccattgaaatggaaaggaataatatataaggaaaaaagatgattgg

SEQ ID NO: 17534 - DNA, 272 bp, Zea mays
  Clone ID: LIB3151-015-Q1-K1-G12
gacccacgcgttcgcgctgacttacttcctatctctctatatacttttttaccacacaataataacgtagtaggaggcattatcattgctggcattgccaacaatcaccacaattaaccattcaaatggaaagtaataatacataccccacaaatactatcataaaccgccacaaaataatataccacaataaatataacccttcacatataatccaatttcaacaactaaatacatctacaaaaaaaaaataaaaaatcacatcctccctc

SEQ ID NO: 17535 - DNA, 435 bp, Zea mays
  Clone ID: LIB3151-015-Q1-K1-G2
agccttcgccaatggtgatttcttccggggtggtggtggcgaacttgctccgccgtaacccccgcgcaaggccaaaaatgccctggcgtgtcatggacatgaccgacatgcagtttgcagatgggtcatttgatgtcattcttgataaaggaggactggatgctcttatggagccagaggctgggacaaaactggggataaaatatctgattgaggtcaagagagttatgaaatcaggagggaagtttgtgtgccttacccttgcagaatcccatgttttagcgcttcttttgtctgagttcagatttggatgggatatgagtattcaagctatagctagtgaatcctctgaaaaatctgcgttccaaacattcatggtggtcatggtaaaaaggaagatgggtgtagctcaaacaataaaatcatcattggatc

SEQ ID NO: 17536 - DNA, 431 bp, Zea mays
  Clone ID: LIB3151-015-Q1-K1-G3
gcttaatctactccagagcgcaaaaaaacccgatcgacaccatgagggtgttgctcgttgccctcgctctcctggctctcgctgcgagcgccacctccacgcatacaagcggcggctgcggctgccagccaccgccgccggttcatctaccgccgccggtgcatctgccacctccggttcacctgccacctccggtgcatctcccaccgccggtccacctgccgccgccggtccacctgccaccgccggtccatgtgccgccgccggttcatctgccgccgccaccatgccactaccctactcaaccgccccggcctcagcctcatccccagccacacccatgcccgtgccaacagccgcatccaagcccgtgccagctgcagggaacctgcggcgttggcagcaccccgatcctgggccagtgcgtcgag

SEQ ID NO: 17537 - DNA, 423 bp, Zea mays
  Clone ID: LIB3151-015-Q1-K1-G4
cacagcggttcgtggtgcgtgcgaacgcctaagacattgcctttgaccagaaatccagggcagggctgcaggccggcgtcgagaagctggcaaacgccgtcggtgtcaccctcgggccacgagggaggaatgtggtgctcgatgagtacggcaaccccaaagttgtgaatgatggagtcactattgcccgtgctattgagctgtatgatccaatggaaaatgctggtgcagcattgattcgtgaggttgctagcaagaccaatgattcagctggtgatgggactacaactgcatccgtccttgctcgtgaaatcatcaagctaggccttctgagtgtaacatctggtgcaaatcctgtatcactaaagaaaggaatagacaaaactgtgcagggcctaattcaggagcttgagaataagtcta

SEQ ID NO: 17538 - DNA, 299 bp, Zea mays
  Clone ID: LIB3151-015-Q1-K1-G5
acgcagaccattagctctatctactccatatctcacaagaacccgatcgacaccatgagggtggtgctcgtcgccctcgatatacctgctctaactgcgagcgccacctctacgcatacaagcggaggatgcggttcccatccaccgccgccacctcatctaccgcatcctgtgcatctgcctgctccggtctcacctaccacctccagtgcatctacaaccgccggtccacctgcacccgccagtccacctgccacagccattacatatgccgtcatcggatcacatgtcgatgccac

SEQ ID NO: 17539 - DNA, 431 bp, Zea mays
  Clone ID: LIB3151-015-Q1-K1-G6
gcagacacctccgccacctccaccctctaatcgttccccaccatggcgtcgcagggagcctccgtcttcgccgcactcgagcaggccccggaggaccccatcctcggagtgaccgttgcctacaacaaggatcccagccccgtgaaggtcaacctcggggtcggcgcctaccggaccgaggaagggaagcccctagtgctgaacgtggtcaggcgcgccgagcaaatgttgatcaataatccgtcacgtgtcaaggagtacctaccaatcaccggtctggctgaattcaataagctgagcgctaagcttatctttggcgctgacagccctgctattcaggagaatagggttgctaccgtgcagtgcctatcgggtactggttctttaagagtcggaggtgaatttcttgcaaggcactatcacgagcgcac

SEQ ID NO: 17540 - DNA, 436 bp, Zea mays
  Clone ID: LIB3151-015-Q1-K1-G7
cgcgtgcgcaatgttgatttctcccgcgtcgtcgtcgtcttcatgctccgccgtcacgcgcgcgcgagggcagagatgcgctggcgtgtcatggacatgaccgacatgcagtttgcagatgggtcatttgatgtcattcttgataaaggaggactggatgctcttatggagccagaggctgggacaaaactggggataaaatatctgaatgaggtcaagagagttatgaaatcaggagggaagtttgtgtgccttacccttgcagaatcccatgttttagcgcttcttttgtctgagttcagatttggatgggatatgagtattcaagctatagctagtgaatcctctgaaaatctgcgtccaaacattcatggggtcatggtaaaagggaagatgggtgtagctcaaacaataaatcatcattggatcaatctgg

SEQ ID NO: 17541 - DNA, 384 bp, Zea mays
  Clone ID: LIB3151-015-Q1-K1-G8
atgtctatcattcacaaacacaccaagcgaaacgcactagcaacaacctaccatcaggggctaccaagatattacccctgcttgcgcttcttgcccttttagtgagcgcaacaaatgcgttgattattccacagagctcacttgctcctagtgccattatgccacagttgctaacaccagatacgttaatgggctataaacatccagccactgcaagcctacatgctaacaatatcgcttgcggtgagcgtattacaacaaccaatggtccaactgcaacaacaatacttggcacatataatcctacaaaccatcacagcgcagcatgcacaacagtttctgacatcactgacccacctagccatggtgaaccctgtcatctac

SEQ ID NO: 17542 - DNA, 275 bp, Zea mays
  Clone ID: LIB3151-015-Q1-K1-G9
gacccacgcgtacgaagcgacctaccatcatatacctcactttctcatcaccatcaccatcgcataaactaaagtagtttatacagatctccatacatcttaaacatgattctctatctgccccacccactccctccttccctccttcgtccatactccatctttcctcctcacacctaccatcaatatccaatctcgatatctaatactacatcccccaaccgtaccctcaccaactagctagttcctcatccaacttatcttcattacaccta

SEQ ID NO: 17543 - DNA, 432 bp, Zea mays
  Clone ID: LIB3151-015-Q1-K1-H1
caacaagcaacatagaaagtggaatccagtagcaacaatagagcaacaatggcgaccaagatattttccctccttatgctccttgctctttctgcatgtgttgctaacgcgacaattttccctcaatgctcacaagctcctatagctgcccttcttcccccataccttccatcaatgaccgcttcagtatgtgaaaacccagcccttcaaccctacaggctccaacaagcaatcgcaacaagcaacttacctttatcacccctgttctttcaacaatcgccagccctatctttggtgcagtcattggtacaaaccatcatggcacaacagctgcagcaactcgtgctaccagtgatcagccaagtagctctggcaaacctttctccctactctcagcaacaacaatttcttccattcaaccaactgtctaca

SEQ ID NO: 17544 - DNA, 305 bp, Zea mays
  Clone ID: LIB3151-015-Q1-K1-H11
attagctttatctactccagagcgcagaagaacccgatcgacaccatgagggtgttgctcgttgccctcgctctcctggctctcgctgcgagcgccaccttcacgcatacaagcggcggctgcggctgccagccaccgccggcggttcatataccgccgccggtgcatctgccacctccggttcacctgccaccttcggtgcatatcccaccgccggtgcacctggcgccgccggtgcacctgtcaccgccggtccatgtgccgccgccggttcatatgtcgccgccaccatgccactaccctac

SEQ ID NO: 17545 - DNA, 118 bp, Zea mays
  Clone ID: LIB3151-015-Q1-K1-H12
aattgcccgaccgacgcgtgcgtgacgcatatcctttacctactccacagcgcttattaacccgctcgacaccatgaggggggggggggtttcccttactctactggcactcccttct

SEQ ID NO: 17546 - DNA, 280 bp, Zea mays
  Clone ID: LIB3151-015-Q1-K1-H2
ggcaaacattgctgctttcttgcaacaacaacaattgctgccattttacccacaggttgtgggaaacattaacgccttcttgcaacagcaacagttgctgccattctacccacaggatgtggcaaacaatgtcgccttcttacaacaacaacaattgctgccatttatccaacttgctttgacgaatcctaccaccttattacagcagcccaccattggtggtgccatcttctagatttttttatgctttatactgtaataataaagttctcatactgat

SEQ ID NO: 17547 - DNA, 337 bp, Zea mays
  Clone ID: LIB3151-015-Q1-K1-H3
tccctgttcctgtctgtattaaagtgagagtgaggcaccgagtgggagacaaggggaaatggggaagggagcgcaagggagcgatgcggcggcggcgggcggcgaggtggaggagaacatggcggcgtggctggttgccaagaacaccctcaagatcatgcccttcaagctcccgcccgtcggcccttatgatgtccgcgtgcgcatgaaggcagtggggatttgcggcagcgatgtgcactacctaagggagatgcgcatcgcgcacttcgtggtgaaggagccgatggtgatcgggcacgagtgcgcgggcgtggtcgaggaggtgggcgccggc

SEQ ID NO: 17548 - DNA, 389 bp, Zea mays
  unsure at all n locations
  Clone ID: LIB3151-015-Q1-K1-H4
tcgaccacgcgtgcgattagctttatctactccagagcgcanaatatcttgatcgacacccatgagggtgttgctgggggggctctctctcctggctctcgctgcgaacgccacctccactcatacaagcggcggctgctgctgccagccaccgccgccggttcatctaccgccgccggtgcatctgccacctccggttcacctgccacctccggtgcatcttccaccgccggtccacctgccgccgccggtccacctgccaccgccggtccatgtgccaccgccggttcatctgccggcgtcaccatgccactaccctaactaaccgtcccggtctcagccttattcccagccacacccatgcccgtgccaacaaccgcattcaagcc

SEQ ID NO: 17549 - DNA, 431 bp, Zea mays
  Clone ID: LIB3151-015-Q1-K1-H5
ctgggtcttcagaccattagctttatctactccagagcgcagaagaacccgatcgacaccatgagggtgttgctcgttgccctcgctctcctggctctcgctgcgagcgccacctccacgcatacaagcggcggctgcggctgacagccaccgccggcggttcatctaccgtcgccggtgcatctgccacctccggttcacctgccacctccggtgcatctcccaccgccggtccacctgccgccgccggtccacctgccaccgccggtccatgtgccgccgccggttcatctgccgccgccaccatgccactaccctactcaaccgccccggcctcagcctcatccccagccacacccatgcccgtgccaacagccgcatccaagcccgtgccagctgcaaataacctgctgcctttgcagcaccccgat

SEQ ID NO: 17550 - DNA, 151 bp, Zea mays
  Clone ID: LIB3151-015-Q1-K1-H7
gcaggttgcacctaacattgctgctgctgttgttggcgagaccgggccattcttgcaggggtgttttacatggaaccagaccttctcgtttgctgatgtcgctcgctgctgttccgtgctattccgattgtggtcaacgcatcgtgctgag

SEQ ID NO: 17551 - DNA, 349 bp, Zea mays
  Clone ID: LIB3151-015-Q1-K1-H8
cgccgccgcaagccgtccgccttgcccttcacgaaggcttggtcctcctccttgtatctggactccccccttcacagatccgttcctccagctagggttagcgttcctctgcagcgatggcgatcaagcggaccaaggcggagaagaagatcgcgtacgacaagaagctgtgcagcctgctcgatgagtacaccaaggtgctcatcgccctcgccgacaacgtcggttccaagcagctccaggacatccgccggggcctcaggggcgactcggtggtgctcatggggaagaacacgctcatcacgcgctgcatcaaggtgtacgccgagaagaccggtaaccacacctt

SEQ ID NO: 17552 - DNA, 427 bp, Zea mays
  Clone ID: LIB3151-015-Q1-K1-H9
acagcaacgctcgctcgacactgtcactagctagttgctctactagagggcgggtatagagctgcctgcaatccgccgctgagaagggaggatcggaagcgacgatgaggtcgtttgctcctgtctttctgtcggcggtcgtggcctggctggagctggcgggcaccgctcagggcggcaacttctaccaggacacagagatgacctggggcgatggccgcggcaaggtagtggacggcgggcgcgggctggacctgacgctggaccgcacgtccggctccgggttccagtccaagagcgagtacctgttcggcaagatcgacatgcagatcaagctggtgccaggcaactccgtggcacggtcaccaccttctacctgtcgtcccatggcgacgcgcacgacgagatcgacttcgagttcctgggc

SEQ ID NO: 17553 - DNA, 393 bp, Zea mays
  Clone ID: LIB3151-016-Q1-K1-A1
gcaacaacctaacaacaatggctaccaagatattatccctccttgcgcttcttgcgctttttgcgagcgcaacaaatgcgtccattattccacaatgctcacttgctcctagttccattattccacagttcctcccaccagttacttcaatggccttcgaacacccagctgtgcaagcctataggctacaacaagcgattgcggcgagcgtcttacaacaaccaattgcccaattgcaacaacaatccttggcacatctaacaatacaaaccatcgcaacgcaacagcaacaacagttcctaccagcactgagccacctagccatggtgaaccctgtcgcctacttgcaacagcagctgcttgcatccaacccacttgctctagcaaacgtag

SEQ ID NO: 17554 - DNA, 436 bp, Zea mays
  Clone ID: LIB3151-016-Q1-K1-A10
gtcagcctagcaattagctcatcgactccatattggagaactcgacaccatggaagggcgggtcggtggccttggttctgggggctggttgaaggccccccttcaagacaaacggggggttgtggtgccagacaccaccgtttcatctaccgccttcgttctatatggcggcttcgttctatctgccgccgcagcagcagccgcagccatggcaataccccactcaaccaccgcagctaagcccgtgccagcagttcggatcctgcggcgtcggcagcgtcggcagcccgttcctgggccagtgcgtcgagttcctgaagcaccagtgcagcccggcggcgacgccctacggctcgccacagtgccaggcgctgcagcagcagtgctgccaccagatcaagcaggtggagccgctgcaaccgtaccaggcgacata

SEQ ID NO: 17555 - DNA, 233 bp, Zea mays
  Clone ID: LIB3151-016-Q1-K1-A11
agacgattaactttatctacaccagagcgcttaagaaccagatcgacaccatgaggggggggctcgtggccctggttctgctggttcttgctagcagcgccacctgcacacatacaagctgcggctgcgacagacaaccaccgcatctacctcatctaccgtatatggcgcatctgccatatctggttcaccagccacatccggagcatttgccacagccgaatcaactaccg

SEQ ID NO: 17556 - DNA, 231 bp, Zea mays
  unsure at all n locations
  Clone ID: LIB3151-016-Q1-K1-A12
ctagaagcgcccctctccctctctctctctctcttcgccgnccgaagctccgcaccccaaggtaatcgacacctcgccgagatgggccggaaggtctttgtccgtgggcactgggaatgccatggaaccacagatcaagtcgagaagattgtcaaaaccctgaatgaaggacagggtcccccttcagaagttgtggaggtcgttgtcagccctccttatgtcttccttcct

SEQ ID NO: 17557 - DNA, 353 bp, Zea mays
  Clone ID: LIB3151-016-Q1-K1-A2
tacctaacatcgacttaacaacattgggtgccaagatatttgccctccttgcgcttgttgccctttttgtgagcgcaacaaatgcgtgcattatgccacaatgctcacttgctcctagtgccattataccacagttcctgccaccagttacttcaatgggctccgaacacctagctgcgcaagcctacaggctacaacaagcgcttgcggcagagcgttttacaacaaccaattaaccaattgcaacagcaatccttggcacatctaaccatacaatccatggcagcacagcagcaacaacagttgctaccatgactgagccaactacatgtggtgaaccctggcgcctactt

SEQ ID NO: 17558 - DNA, 309 bp, Zea mays
  Clone ID: LIB3151-016-Q1-K1-A3
acaatggcgaccaagatattgtgcctaggatatgctccctgctctgcccgcatgtgctgctaacgcgacaatactacctcaatgctcacaagctcctatagctttcctccttccgccatacctcccatcaatgatagcccaagtatgtgaaaacccagctcttccaccctataggctgcatcaagcaatcgcagaacgctacatacctgcatcaccctagatccaacaatcgactgccatatccttggtgcagccattgttacaaaccattatgtcacagcacatgaagaaactcgtgctatctgtgat

SEQ ID NO: 17559 - DNA, 402 bp, Zea mays
  Clone ID: LIB3151-016-Q1-K1-A4
cctaacaaccaatggctaccaagatatagtccctgcttgcgcttcttgcgctttttgcgagcgcaacaaatgcgttcattattccacaatgctcacttgctccaagttccattattacacagttcctcccaccagttacttcaatgggcttcgaacacccagctgtgcaagcctataggctacaacaagcaattgcggcgagcgtcttacaacaaccaatttcccagttgcaacaacaatccttggcacatctaacaatacaaaccatcgcaacgcaacagcaacaacaattcctaccagcactgagccacctagccatggtgaaccctgccgcctacttgcaacagcagttgcttgcatcaaacccacttgctctggcaaacgtagttgcaaaccagccac

SEQ ID NO: 17560 - DNA, 288 bp, Zea mays
  Clone ID: LIB3151-016-Q1-K1-A6
ctccttgcgcttcttgcccttttagtgagcgcaacaaatgcgttcattattgcacagtgctcacttgctcctagtgccattattccacagttcctgccaccagttacttcaatgggcttcgaacatccagccgtgcaagcctacaggctacaactagcgcttgcggcgagcgtcttacaacaaccaattgcccaattgcaacaacaatccttggcacatttaaacctacaaaccatcagaacgcatcagcaacaacagtttctgtcatcactgagccacctatgcgtg

SEQ ID NO: 17561 - DNA, 431 bp, Zea mays
  Clone ID: LIB3151-016-Q1-K1-A9
gcgagagagagcggcatatgcgcacagcgctaccgagcgagagagacaggactgcgacgggggatatgatggggtggggagaggaagtggtggctctgtccctgccaggctacagctatggcaacgaagaggactaccggccggagaagccgcggcggtacggggtgactgagatgcctagccccttctactccttccgccccgcaaaccaggcgctccacgaaatattggatactcttagtccattcggtgatggtatgaagttctctggcggatgccataacttgatgggaaaggagttggctagagagaacacttatctatcacacatgcatgacatttttgttagcccacgtgatttgttaaagcatctggttgtccatggaccctttttttcattcaatatataaagattgcaagccttaagtttg

SEQ ID NO: 17562 - DNA, 366 bp, Zea mays
  Clone ID: LIB3151-016-Q1-K1-B1
tccatcggagccccgcacggccgcaccgcggcgtgcggccaccgcatcgcctcgtatgctccgcgcttgcacacgcgtcggcggcgcgggcgcgggcggctgcggccgacgagaacgcctcatggcctccctcatccccttcctccctccctcaccttactccactcacctcccgcgccagccccagccccagccgccgacagccgctacccagcccgccgcagcggcgcgcccatcccggttccgcctcctgttcgcgcgcgccgcggcgcatcggcagcgcgactccgagccggcgccggcggccgaggagaggcggtcgctggccgtcagaacgggggagctgttcctggggctggcggcgct

SEQ ID NO: 17563 - DNA, 384 bp, Zea mays
  Clone ID: LIB3151-016-Q1-K1-B10
gaccattagctctatctactccagagcgcattagaacccgatcgacaccatgagggtgtggctcgttgccctcgctctcctggctctcgctgcgagcgccacctccacgcatacaaacggcggctgtggctgcacagccaccgccgccggttcatctaccgccgacggagcatctgccacctccggttcacctgccacctccggagcatatcccaccgacggtacacctgccgacgccggtacacctgccaccgccgagacatgtgccgccgccggttcatctgccgacgccaccatgccactaccctactcaaccgccccgggctcagactcatacacagccacacacatgcgcgtgccaacagccgcatgcaagcccgtgcc

SEQ ID NO: 17564 - DNA, 326 bp, Zea mays
  Clone ID: LIB3151-016-Q1-K1-B11
aacagtaccatcaatcatcatcaaacttagtaaaatacgcaccaaaccaaatatgaaccgtggattatataacttcaaaaaccattgagctggtgctggtggttgttgccgcaatagatgcagtaataagtgtacattgctcacttactggcagctgcagatgacgcaaacaacaaaaccatgagctgcaacgtgattcacaaaaccatcatgcacaagaacatcagcttcaaccagcactagaacatagcgtgttacagcaacaccaacaacaactagttcacatgcaaccgccacatcataacctacaacacgatgttcatgtt

SEQ ID NO: 17565 - DNA, 439 bp, Zea mays
  Clone ID: LIB3151-016-Q1-K1-B12
acatgagctatatttactccacagcgcaatttaacccgatcgacaccatgagggcagcagggggtagccctacatcttctggctcttgccgtgagcgccaccttcacacctacaacacaggcgctgatgatgccacacacctcactcgcttcatgtaccgtcatcacagcatctgtcacatcaggtacaccagtgaccttcgagcatctaccagcgcaagcctatatgctacaacaagcacacctggcaagcgtggtacatgtgccaacttcgcatcatcatcagccatcctcgtgacatttaactattcaaacgatcgggacgcagcatcatcaacaattcctaccatgactgagccaactagccattgcgaaccctggcgactacttgcgacaccagttgcttgcatcaaacccactcgctgtggcaaacgtagttg

SEQ ID NO: 17566 - DNA, 266 bp, Zea mays
  Clone ID: LIB3151-016-Q1-K1-B2
ccttccgccatggccacctcccctggcgcctcgtcctcctccgctccgaccgcctccgcggtggctgcggctacgatggctgttgaggccaccgacgggccggtgctcagcgtagtatcgaagcgtctccgcgcactgcggaagaagtacaaccgaatcacgcatatggaggagtcgttcgccgccggcaagaccctcaaccgagagcaggagggggttctccgctccaagcccgtcgtcgccgttctgatagaagagctagagcg

SEQ ID NO: 17567 - DNA, 380 bp, Zea mays
  Clone ID: LIB3151-016-Q1-K1-B3
ggccttcaaatttttcgcttccttattgcggctgggtctttttgcaatgtgctggtatcgcaaccatcttcccacactgctgacaggctcgtatcgctcgctttcttgctccatacctctcaccagcggtgtcttcagcatgtgaaaacccacttcttcaaccctacagagatccaacatgcattcgcagcacgcatctcacctttatcacccttgttccttcaacaaccgtcagccctattacagcagtttcctttggtgcatttgttggcacaaaacatcaatgcactacaactacaacaacttgcgctaggaaaccttgctgcctactctcagcaacagcagtttcttccattcaaccaactggctgcattgaactc

SEQ ID NO: 17568 - DNA, 320 bp, Zea mays
  Clone ID: LIB3151-016-Q1-K1-B5
ttagcaacaacctaacaacaatggctaccaagatattatccctccttgcgcttcttgcgctttttgcgagcgcaacaaatgcgttcattattccacaatgctcacttgctccaagttccattattacacagttcctcccaccagttacttcaatgggcttcgaacacccagctgtgcaagcctataggctacaacaagcaattgcggcgagcgtcttacaacaaccaatttcccagttgcaacaacaatctggccattaacaatcaaaccatgaacgcacacaacacattctaccacctgaccacagctgggaactgcgc

SEQ ID NO: 17569 - DNA, 108 bp, Zea mays
  Clone ID: LIB3151-016-Q1-K1-B7
ccctgccttttttccattccatcttatcacaaaattctcacactattctcacttgctctctttccccatatttcacacattctccgtctcattcactaaaaacccaat

SEQ ID NO: 17570 - DNA, 377 bp, Zea mays
  Clone ID: LIB3151-016-Q1-K1-B9
aatattttgagcattcagaaacacaccaagcgaagcacattagcaacaacctaacaacaatggctaccaagatattatccctccttgcgcttcttgcgctttttgcgagcgcaacaaatgcgttcattattccacaatgctcacttgctccaagttccattattacacagttcctcccaccagttacttcaatgggcttcgaacacccagctgtgcaagcctataggctacaacaagcaattgcggcgagcgtcttacaacaaccaatttcccagttgcaacaacaatccttggcacatctaacaatacaaaccatcgcaacgcaacagcaacaacaattcctaccagcactgagccacctagccatggtgaaccct

SEQ ID NO: 17571 - DNA, 392 bp, Zea mays
  Clone ID: LIB3151-016-Q1-K1-C1
aacctaacaacaatggctaccaagatattggcccgtcttgcgcttcttgcgctttttgcgagcgcaacaaatgcgttcattattccacaatgctcacttgctccaagttccattattacacaggtcctcccaccagttacttcaatgggcttcgaacacccagctgtgcaagcctataagctacaacaagcaattgcggcgagcgtcttacaacaaccaatttaccagttgcaacaacaatccttggcacatttaacaatacaaaccatcgcaacgcaacagcaacaacaattcctaccagcactgagccacctagccatggtgaaccctgccgtctacttgcaacagcagttgcttgcatcatacccacttgctctggcaaacgtagttgc

SEQ ID NO: 17572 - DNA, 306 bp, Zea mays
  Clone ID: LIB3151-016-Q1-K1-C10
acccacgcgtccggcaggttcatacctcgatcccccccactattatatcctatcccaccaacccgtccacgccgcgtcttttccattctaaaaggtccacaaacaaacaccaactctccgaccacaataaacaaattctaccgatccaacatatcctgaacctcaaactaattacctctcatcatatttttcttttgtaagataaaacccaattctataatcctacaccaaccaacaatcaaatacatctcgcatcctacctttataaaactttcttctccaacaatcatcaaccctatcacatca

SEQ ID NO: 17573 - DNA, 165 bp, Zea mays
  Clone ID: LIB3151-016-Q1-K1-C11
cccattctatatcctcatcatccccacctatctaccctttacaaccaaccctaccaacccgcgcattttacattctaaaagctccacatattcacctaaattcaattcacactccacaaatctacacacgtacaacttttaaaaccctcaaattacccaacttaa

SEQ ID NO: 17574 - DNA, 392 bp, Zea mays
  Clone ID: LIB3151-016-Q1-K1-C2
gcgaagcgcactagcaacgacctaacaacggtggctaccaagatattagccctccttgcgcttcttgccctttttgtgagcgcaacaaatgcgttcattattccacaatgctcacttgctcctagtgccattattccacagttcctcccaccagttacttcaatgggcttcgaacacctagctgtgcaagccaacatgcaacaacaagcgcttgcggcgagcgtcttacaacaaccaattgcccaattgcaacaacaatccttgccacatctaacaatacaagccatcacaacgcaacagcaacaacagttcctaccagcactgagccacctagccatggtgaaccctgccgcctacttgcaagagcagctgcttgcatccaacccacttgc

SEQ ID NO: 17575 - DNA, 377 bp, Zea mays
  Clone ID: LIB3151-016-Q1-K1-C3
tttgcgtggtcgagagagagaggatgtggtgctgcggaggcaactgtgggtgcggctccggctgcaagtgcggcaacggctgcggagggtgcagcaagatgtacccggacatggctgagcaggtgaccaccaccacccaggctctcatcatgggtgtcgcaccatccaaggggcacgccgagggcgggttcgaggcggccgccggagctgagaacggcgggtgcaagtgcggcggcaactgccagtgcgacccctgcaactgcggcaagtgagctaggtgctccaccctgcaggccggccggaggaagctagctaattattataagctaaataaagtatagcggcgtcgctgtgtgtgtttcgagtcagtcagtcag

SEQ ID NO: 17576 - DNA, 340 bp, Zea mays
  Clone ID: LIB3151-016-Q1-K1-C4
aacagcatgaagatggtcatcgttctcgtggtgtgcctggctctgtcagctgccagcgcctctgcaatgcagatgccctgcccctgcgcggggctgcagggcttgtacggcgctggcgccggcctgacgacgatgatgggcgccggcgggctgtacccctacgcggagtacctgaggcagccgcagtgcagcccgctggcggcggcgccctactacgccgggtgtgggcagacgagcgccatgtaccagccgctccggcaacagtgctgccagcagcagatgaggatgatggacgtgcagtccgtcgcgcagcagctgcagatgatgatgcagcttgagc

SEQ ID NO: 17577 - DNA, 398 bp, Zea mays
  Clone ID: LIB3151-016-Q1-K1-C6
gcagaagaacccgatcgacaccgggagtgtgttgctcgttgccctcgctctcctggctctcgctgcgagcgccacctccacgcatacaagcggcggctgcggctgccagccaccgccgccggttcatctaccgccgccggtgcatctgccacctccggttcacctgccacctccggtgcatcttccaccgccggtccacctgccgccgccggtccacctgccaccgccggtccatgtgccgccgccggttcatctgccgccgccaccatgccactaccctactcaaccgccccggcctcagcctcatccccagccacacccatgcccgtgcctacagccgcattcaagcccgtgccagctgcagggaacctgcggcgttggcagcaccccgatcctgg

SEQ ID NO: 17578 - DNA, 390 bp, Zea mays
  Clone ID: LIB3151-016-Q1-K1-C7
gcactagcaacaacctaacagcgtgggggcatgatattatccctccttgcgcttcttgcgctttttgcgagcgcaacatatgcgtccattataccacaatgctcacttgctcctaggtccattattccacagttgctctctctagtgacttcaaaggcctccgaacacccagctgtgccagcttatacgccgcaactagcgattgtggcgagcgtcttacaacaaccaattgcccaattgcgacaaccatccttggcacatttaacaatacaaaccatggcatcgcagcagcgacaagggagcctaccagcactgatccacctagccatggtgaaccctgtcggctacttgcaacagaagctgcttgcatgcaacccacttgccctagca

SEQ ID NO: 17579 - DNA, 400 bp, Zea mays
  Clone ID: LIB3151-016-Q1-K1-D1
gaactcgacaccatgaaggtgctgatcggtgcccttgctctcctggcgctcgctgcgagcgccgcctccagtacaagcggcggctgtggctgccagacaccaccgtttcatctaccgcctccgttctatatgccgcctccgttctatctgccgccgcagcagcagccgcagccatggcaataccccactcaaccaccgcagctaagcccgtgccagcagttcggatcctgcggcgtcggcagcgtcggcagcccgttcctgggccagtgcgtcgagttcctgaggcaccagtgcagcccggcggcgacgccctacggctcgccacagtgccaggcgctgcagcagcagtgctgccaccagatcatgcaggtggagccgctgcaccggtaccaggcgacat

SEQ ID NO: 17580 - DNA, 359 bp, Zea mays
  Clone ID: LIB3151-016-Q1-K1-D10
atgtgtagcattcataaacacaccatgcgttgcgcactatcaacaccctaacaacactgggtgcgaggatattagccctccttgcgcttttggcccttgtagtgagcgcaacatatgcctatattattccacagtgctcacttgctcctagtgccattattcaacaattgctcccactcacatacttcaatgggcttcaaacatccagtcgtgcaagtctacaagctacaactagcgtttgcggcgagcgtcttacaacaaccaattgcccaattgcaacaacaattcatgtcacatctaaaccttaaaactatcgtaatgcatcagccacaacagattctgacatcactgaaccacct

SEQ ID NO: 17581 - DNA, 290 bp, Zea mays
  unsure at all n locations
  Clone ID: LIB3151-016-Q1-K1-D11
ggccganggacgcgnncggggtgttcaaaccattatctttatctactttatagcgtttaagaacccgatagacaccgggagggtgtggctcgttgccctcgctctcctggctctcgctgcgagcgccaccttcacgcatacaagcggcggctgctgttgccagccaccgccgccggttcatctaccgtcgccggtgcatctgccaccttcggttcacctgccacctccggtgcatcttccaccgtcggttcacctgccgccgtcggtccatcttgccatcgacggtccat

SEQ ID NO: 17582 - DNA, 312 bp, Zea mays
  Clone ID: LIB3151-016-Q1-K1-D2
cccccaccacgaccaaaaaaaatccggtcgccgatgccgtctgctgcctgacatcggtcagccagggtagatcgcgcaggcaggcaggcagccccacacacatacgaaacccaatcctgcttcgatcccgtcggccggcgatggagggccggcggccgggcgcgcccgtggcgggcctgcccatcggcttccgcttccgccccaccgacgaggagctgctgctgcactacctccgccgcaaggcgctggcctgcccgctccccgccggcgtcatcttcgacgccgacctcgcgcgcctgcacccgtgggacc

SEQ ID NO: 17583 - DNA, 385 bp, Zea mays
  Clone ID: LIB3151-016-Q1-K1-D3
acccgatcgacaccatgagggtggggctcgttgccctcgctctcctggctctcgctgcgagcgccacctccacgcatacaagcggcggctgcggctgccagccaccgccgccggttcatctaccgccgccggtgcatctgccacctccggttcacctgccacctccggtgcatctcccaccgccggtccacctgccgccgccggtccacctgccaccgccggtccatgtgccgccgccggttcatctgccgccgccaccatgccactaccctactcaaccgccccggcctcagcctcatccccagccacacccatgcccgtgccaacagccgcatccaagcccgtgccagctgcagggaacctgcggcgttggcagcaccccgat

SEQ ID NO: 17584 - DNA, 372 bp, Zea mays
  Clone ID: LIB3151-016-Q1-K1-D4
ggggacaggaacttttttcttttcatttcaattggtcattcagggcattggtcacactgacactgccacccatggggatgcgtgacacattattactcaatcatcgccgctaaatgactcaactagctagctagccagcgggtatactacagcaccccgatcctgggccagggcgtcgagttcctgaggcattagtgcagcccgacggggaccccctactggtcgcctcaatgccagtcgttgcggcagcagtgttgccagcagctcaggcagggggagccgcagcaccggtaccaggcgatcttcgggttggtcctccagtccatcctgcagcaacagccgcaaagcggccaggtcgcggggctgttggcg

SEQ ID NO: 17585 - DNA, 314 bp, Zea mays
  Clone ID: LIB3151-016-Q1-K1-D5
ctctcctggcgctggctgcgagcgccacctccaatacaagcggcggctgtggctgccagacaccaccgtttcatctaccggctccgttctatatgccggctccgttctatctgccggcgcagcagcagccgcagccatggcaataccccactcaaccaccgcagctaatcccgtgccagcagttcggatcctgcggcgtcggcagcgtcggcagcccgttcctgggccagtgcgtcgagttcctgaggcaccagtgcagcccggcggcgacgccctactgctcgccacagtgccaggcgctgcagcagcagtgc

SEQ ID NO: 17586 - DNA, 393 bp, Zea mays
  Clone ID: LIB3151-016-Q1-K1-D6
ccaacaatggcagccaaaatatgggggtggcttatgctccttggtctttctgcaagtgctgctaccgcaaccattttcccacaatgctcacaagctcctatagcttcctttcttcccccatacctctcaccagcggtgtcttcagtatgtgaaaacccaattcttcaaccctacaggatccaacaggcaatcgcagcaggcatcttacctttatcacccttgttcctccaacaaccgtcagccctattacagcagctacctttggtgcatttgttggcacaaaacatcaaggcacaacaactacaacaacttgtgctaggaaaccttgctgtctactctcagcaacagcagtttcttccattcaaccaactggctgcattgaactctgctgct

SEQ ID NO: 17587 - DNA, 298 bp, Zea mays
  Clone ID: LIB3151-016-Q1-K1-D7
gaacagcatgaagatggtagtgttcgggtggtgtgcctggctctgtcagctgccagcgcctctgcaatgcacatgccctgcccctgcgcggggctgcacggcttgtacggcgctatcgcccgcctgacgacgatgatgggcgcccgcgggctgtacccctacgcggagtacctgaggcagccgcaatgcagcccgctggcggcggctccctactacgccgggtgtgggcagaccagcgccatgtaccagccgatcctgcaacagtgctgccagaaccagatgaggataatggacttgc

SEQ ID NO: 17588 - DNA, 324 bp, Zea mays
  Clone ID: LIB3151-016-Q1-K1-D8
actggctgtcttgacttcttgcactccttggctccttgggctgtgcggatgcgctgataacgttaccactttgctaccatgctcacatggttgtattgcttcctctgttcctctaaacatctgagcattggggatgtgaatacgcgattacccaaccctttaagattacacgagccatcagggctgggatgttagcattttaactttattacccttgtcactcctacaacctattaccgtatttcagtatggagcttttgtgggttcgttggatcaagacacaacagctccaccacctcgtgctctcgtgcctggataccttgt

SEQ ID NO: 17589 - DNA, 444 bp, Zea mays
  Clone ID: LIB3151-016-Q1-K1-D9
gggtcttcagaccattagctttatctactttagagcgcagaagaacccgatcgacaccatgagggtgttgctcgttgccctcgctctcctggctctcgctgcgagcgccacctccacgcatacaagcggcggctgcggctgccagccaccgccgccggttcatctaccgccgccggtgcatctgccacctccggttcacctgccacctccggtgcatctcccaccgccggtccacctgccgccgccggtccacctgccaccgccggtccatgtgccgccgccggttcatctgccgccgccaccatgccactaccctactcaaccgccccggcctcagcctcatccccagccacacccatgcccgtgccaacagccgcatccaagcccgtgccagctgcagggaacctgcggcgttggcagcaccccgatcctgggccagtgcgt

SEQ ID NO: 17590 - DNA, 338 bp, Zea mays
  Clone ID: LIB3151-016-Q1-K1-E1
tctgttgtgtatctagtaattggaggggggctggtgtttgtacttgcattggacacgaactcaagccctaaccagataagatcttgtgagggttatgggattgacaggtcggaaaaatttagtattgggggcagaaagcaggagaaagctttgagaaataggcgctttggtggtagagttgctgcaactacacaatgtattcttacctcagatgcttgtcctgaaactctttattctcaaacacatgatctgtaggaaaaattatgctgatgcaaaacgtgtatctgctatcattttgggcggaggcactggatctcatctctttgctatgacaagca

SEQ ID NO: 17591 - DNA, 297 bp, Zea mays
  Clone ID: LIB3151-016-Q1-K1-E2
tcataagcaacacaacacccttcgtttggcgtcgctcctccggcctcccctccctggtcggtcgatcgcgaggatgacgccggcgagcgtggtcgccgcgcccaggagcgtcggggcgttgcccttggcggcgttcccggcgcccgcgagggccggggtgcggaggaacggccggtcctcgaggcccgcggcgtgcggcggggacgaccagcagccgccgtccatggccgcgatgccggcgtcgctgcgcgccatccatgccaggaggaagcaggaggcggctcaactcggggtgcc

SEQ ID NO: 17592 - DNA, 389 bp, Zea mays
  Clone ID: LIB3151-016-Q1-K1-E3
cggcctcttccgcttcgtctccccgcgcaggcgcccccagtccaccgacatcgtggctgccgcctcctggggagtcttcgccggcaccgccggcctctacctcgtccagacaaagaagggaaaaagactggtggaacaaggaagccgcagaattcgaaagataacaagtgatatctacagcaaggcccatggttggaagccggttgacaggcgtctccagtgacattttgctgctgataatacatcttttgcttctggatgtattcagtttgtctgcttttggtagataaaaactagcttttagtcatttctggtgatgcgatgttcctggctgcttttgggatctatcctttgtagatattcagtgatgtctgttagactgtcggact

SEQ ID NO: 17593 - DNA, 385 bp, Zea mays
  Clone ID: LIB3151-016-Q1-K1-E4
ccatgagggtgctgctcgtggggctggctctcctggctctcggtgcgagcgccacctgcacgcatacatgcggcggctgcgggtgtcagccaccgacggcggttcatgtaccgccggcggtgcatgtgccacctacggttcacctgccacctccggtgcatctccgaccgccggtccacctgccgtcgacggtccacctggcaccgacggtccatgtgccgccgtcggttgatctgccgcggccaccatgccactaccctactcaaccgtcccggccttagactcattgccaggcacactcatgcccgtgccgacagtcgcatccaagcccgtgccaactgcatggaacctgccgcgttggcagcaccgcgatccttggccaatg

SEQ ID NO: 17594 - DNA, 334 bp, Zea mays
  Clone ID: LIB3151-016-Q1-K1-E5
atcgtggcggccgcctcctggggagtcttcgccggcaccggcggcctgtacctggtccacacaaagaagggaaaaagactggtggaacaaggaagccgcagaattcgaaagataacaagcgatatctacagcatggcccatggttggaagccggttgacaggcgtctccagtgacattttgctgctgataatacatcttttgcttctggatgtattcagttcgtctgcttttggtagataaaaactagctattagtcattgctggtgatgcgatgttcctggcttgtttggggatctatcctttgcagatattcagtagatgtctgttttactg

SEQ ID NO: 17595 - DNA, 389 bp, Zea mays
  Clone ID: LIB3151-016-Q1-K1-E6
aacccgatcgacaccatggaggtggtgctcgttgccctcgctctcctggctctcgctgcgagcgccacctccacgcatacaagcggcggctgcggctgccagccaccgccgccggttcatctaccgccgccggtgcatctgccacctccggttcacctgccacctccggtgcatctcccaccgccggtccacctgccgccgccggtccacctgccaccgccggtccatgtgccgccgccggttcatctgccgccgccaccatgccactaccctactcaaccgccccggcctcagcctcatccccagccacacccatgcccgtgccaacagccgcatccaagcccgtgccagctgcagggaacctgcggcgttggcagcaccccgatcct

SEQ ID NO: 17596 - DNA, 136 bp, Zea mays
  Clone ID: LIB3151-016-Q1-K1-E7
cgccttctggggggtattctccggcgccgccgggctttgactgctgcagacaaagaagggggaaagactggtggaacaaggaagccccagaatttgaaagataacaagtgatatctacagcaaagcccatagttgg

SEQ ID NO: 17597 - DNA, 376 bp, Zea mays
  Clone ID: LIB3151-016-Q1-K1-E8
ccgcgccatcaacgccgagcggaacgtccctgctgtcccgcgccgagcacaaccgcctgccatcgcgcgctactctccctccccgcgcccgcagtccgcagtccgcgccatcaacgccgagcacagccgcctgcctgagcgcgctacgctccctccccgcgccccgccccgcagtcccgcgccgagcagagccgccccgcagtcccgcgccgagcagagccgccccgcagtcccgcaatccctccccaccggtggtctggcacgtcgcctcctcgcctagatccgtccgtggtgcacccctccagccttgcccagctccaaagttccctcctgctcgcgggcacgcggactcaccctaggggccaggccctgggcc

SEQ ID NO: 17598 - DNA, 386 bp, Zea mays
  Clone ID: LIB3151-016-Q1-K1-F1
atagagcaacaatggcgacgaggaggttttccctccttatgctccttgctctttctgcatgtgttgctaacgcgacaattttccctcaatgctcacaagctcctatagcttcccttcttcccccataccttccatcaatgatagcttcagtatgtgaaaacccagctcttcaaccctataggctccaacaagcaatcgcagcatgcaacatacctttatcacccttgtttcaacaatcgccagccctatctttggtgcagtcattggttcaaaccatcagggcacagcatctgcagcaactcgtgctacctgtgatcaaccaagtagctctggcaaacctttctccctactctcagcaacaacattttcttccattcaaccaactg

SEQ ID NO: 17599 - DNA, 372 bp, Zea mays
  Clone ID: LIB3151-016-Q1-K1-F10
caactagcaacatagaaagcacaatagcgctccaacattggcagccaaaatattttgccggcttatgcgtccttggtctttctgcaagtgctgctacggcgaccattttcccgcaatgctcgcaagctcctatagcttcccttcttcccccgtacctctcaccagcggtgtcttcggtatgtgaaaacccaattcttcaaccctacaggatccaacaagcaatcgcagctggcattttacctttatcacccttgttccttcaacaatcatcagccctattacaacagttacctttggtgcatttattggcacaaaacatcaaggcacaacaactacaacaacttgtgctagcaaaccttgctgtctaccctg

SEQ ID NO: 17600 - DNA, 449 bp, Zea mays
  Clone ID: LIB3151-016-Q1-K1-F12
attgagaccaactagcaacatagaaagcactattagtgtaccaacaatggcagccaaaatgggtttgcttccttatgctccttggtctttctgcaagtgttgctaccgcaaccattttcccacaatgctcacaagctcctatagcttcccttcttcccccatacctctcaccagcggtgtcttcaatgtgtgaaaacccaattgttcaaccctacaggatccaacaggcaatcgcaacaggcatcttaccattatcacccttgttcctccaacaaccgtcagccctattacagcagttacctttgtgccatttggtggcacaaaacatcatggcacaacaactacaacaacttgtgctagcaaaccttgctgcatactctcagcaacatcagtttcttccattcaaccaactggctgcattgaactctgcttgttatttgcaacaacaa

SEQ ID NO: 17601 - DNA, 378 bp, Zea mays
  Clone ID: LIB3151-016-Q1-K1-F3
ctagcaacgacttaacaacaatggcgaccaagatatatgccctccttgcgcttcttgccctttttgtgagcgcaacaaatgcgttcattattccacaatgctcacttgctcctagtgccattataccacagttcctccgaccagttacttcaatgggcttcgaacacctagctgtgcaagcctacaggctacaacaagcgcttgcggcgagcgtcttacaacaaccaattaaccaattgcaacaacaatccttggcacatctaaccatacaaaccatcgcaacacaacagcaacaacagttcctaccagcactgagccaactagatgtggtgaaccctgtcgcctacttgcaacagcaggtgcttgcatccaacccac

SEQ ID NO: 17602 - DNA, 197 bp, Zea mays
  Clone ID: LIB3151-016-Q1-K1-F5
ctttttcactccatccagatctccacggggcgggggttatatcggcttctatgcggtcaacgctgtctcgtaagccatcgcgtacgacgagcaccccgagatgctgcattagtcctaggaacatgccccctttgttccaacctacaatataattaagaagaattttaacatctaagtgcccaatcatgaagggtaca

SEQ ID NO: 17603 - DNA, 387 bp, Zea mays
  Clone ID: LIB3151-016-Q1-K1-F6
cccgatcgacaccatgagggtggtgctggttgccctcgctctcctggctctcgctgcgagcgccacctccacgcatacaagcggcggctgcggctgccagccaccgccgccggttcatctaccgccgccggtgcatctgccaccttcggttcacctgccacctccggtgcatcttccaccgccggtccacctgccgccgccggtccacctgccaccgccggtccatgtgccgccgccggttcatctgccgccgccaccatgccactaccctactgaaccgccccggcctcagcctcattcccagccacacccatgcccgtgccaacagccgcattcaagcccgtgccagctgcagggaacctgcggcgttggcagcaccccgatcct

SEQ ID NO: 17604 - DNA, 395 bp, Zea mays
  Clone ID: LIB3151-016-Q1-K1-F7
ttaaccctacggatccaacaggaatcggacaggcatcttaccattatcacccttgttcctccaacaaccgtcagccctattacagcagttacctttggtccatttggtggcacaaaacatcagggcacaacaactacaacaacttgtgctagcaaaccttgctgcatactctcagcaacatcagtttcttccattcaaccaactggctgcattgaactctgctgcttatttgcaacaacaattaccattcagccagctagttgctgcctacccccagcaatttcttccattcaaccaactagcagcattgaactctgctgcttatttacagcagcaacaactactaccattcagccagctagctgatgtgagccctgctgccttcttgacacaac

SEQ ID NO: 17605 - DNA, 403 bp, Zea mays
  Clone ID: LIB3151-016-Q1-K1-F8
ggaatatcattaagtgcacgccaatctactgaaggggggtctcactctatgctgagcagaatgagctccaatttgctgtcccaggagggcttattggtgtgggaacaaccatggacccaactctaacgcgtgctgataggctggttggccaggttcttggtgaagttggttcactacctgatgtttatgtagagcttgagatcaatttcttcctactccggaggctgttgggtgtgaggacgaaaggtacagagaaggcagggaaggtgtcgaagctcaccaagggcgagatcctcatgcttaacatatgatccatgtccacaggcgcccgtgtactcgccgttaagaacgatcttgccaagctacagctcaccgcgcctgtctgcacgagccgaggagagaa

SEQ ID NO: 17606 - DNA, 366 bp, Zea mays
  Clone ID: LIB3151-016-Q1-K1-G1
tgcagtgcaggggcaggccggtgaggtctgggagaggaggaggaggaggagatggccggtagggagagcggcgggatggcggcggcgctgcgctgcgctggaaggatcgggatcctggccaccgtcgcagtgaacctcgcgtggatcgcgacgtacatccgccggcgctacttcggcggcgggaaccgatccgacaacaacggtggcggcggggaggtggagccgtcaagagggaagccgccggtcacttcggactccatcgtcaacctcgatcatggcgacccgactatgtacgaggagttctggcgcggcacaggagatagcgcctccatcttcatccctggttggcaaacaatgagctacttc

SEQ ID NO: 17607 - DNA, 428 bp, Zea mays
  unsure at all n locations
  Clone ID: LIB3151-016-Q1-K1-G10
ggccgaccacgcgtccgatgtancattcaaaacacaccaagcgtgcgcactatcaacaacctaacaacaatggctaccaggatattagccctccttgcgcttcttgcccttttagtgagcgcaacaaatgccttcattattccacagtgctcacttgctcctagtgccattattccacagttcctcccaccagttacttcaatgggcttcaaacattcagccgtgcaagcctacaagctacaactaacgcttgcggcgagcgtcttacaacaaccaattgcccaattgcaacaacaattcttggcacatctaaacctacaaaccatcgtaacgcaacaacaacaacagtttctgacatcactgaaccacctagccgtggcgaacccttgtctcctaattcaacagaatttacttgcatccaaaccact

SEQ ID NO: 17608 - DNA, 429 bp, Zea mays
  Clone ID: LIB3151-016-Q1-K1-G11
tatcgataccaactagcaacatacatagtgaagtatactagaaacaacttagcaccaatggcagccaagatttttgccctccttgccctccttgctctttcagcaagcgctgctacctcgactgttattccacaatgctcacaacaatacctctctttggcgacagccgcgagatttcaatacccaactatacaaccctacatgctacaagaggccattgcagcaagcatcttacggtcattagcatttaccctccaacaaccatatgccctattgcagcaagcatccttagtgcatcagtatctccaaagaatcgcggcacaacaactacaacaacaattgctaccaacaatcaatcaagtagttgcagcgaaccctgctgcttacctccatcaacaatagtttcttccgttcaatcaactaactggg

SEQ ID NO: 17609 - DNA, 368 bp, Zea mays
  Clone ID: LIB3151-016-Q1-K1-G12
ccacccgtccggaaggacaccaactcgtaaaaagcatagtttatcagtttagaaacaacatggcccccgtggcggccgtgaaccttgccctgccagcccccatcgccttttcaatacacactccctcgcccctccgcgatgccacaatgctcacaccagtactctctctctttctgacaaccatgatagtcgcatacccaactatacaaccctacatgctacctgaggcaatcgcaacacgcatctcacgctgcattagcactaacactccaacaaccatttgacctattccatgaaccattcttatcgcattaaaatcttccaacaacttatgcagatcatctacatcaactcttgctaccaacaat

SEQ ID NO: 17610 - DNA, 401 bp, Zea mays
  Clone ID: LIB3151-016-Q1-K1-G2
cgcactagcaacaacctaacaacaatggctaccaagatattagccctccttgcgcttcttgcccttttagtgagcgcaacaaatgcgttcattattccacagtgctcacttgctcctagtgccattattccacagttcctcccaccagttacttcaatgggcttcgaacatccagccgtgcaagcctacaggctacaactagcgcttgcggcgagcgtcttacaacaaccaattgcccaattgcaacaacaatccttggcacatctaaacctacaaaccatcgcaacgcaacagcaacaacagtttctgccatcactgagccacctagccgtggtgaaccctgtcgcctacttgcaacagcagctacttgcatccaacccacttgctctggcgaacgtagc

SEQ ID NO: 17611 - DNA, 398 bp, Zea mays
  Clone ID: LIB3151-016-Q1-K1-G4
acccgatcgacaccatgagggtggggctcgttgccctcgctctcctggctctcgctgcgagcgccacctccacgcatacaagcggcggctgcggctgccagccaccgccgccggttcatctaccgccgccggtgcatctgccacctccggttcacctgccacctccggtgcatctcccaccgccggtccacctgccgccgccggtccacctgccaccgccggtccatgtgccgccgccggttcatctgccgccgccaccatgccactaccctactcaaccgccccggcctcagcctcatccccagccacacccatgcccgtgccaacagccgcatccaagcccgtgccagctgcagggaacctgcggcgttggcagcaccccgatcctgggccagtgc

SEQ ID NO: 17612 - DNA, 317 bp, Zea mays
  Clone ID: LIB3151-016-Q1-K1-G5
gatggcatcgtcgggagtgtgcctggctctgtctgctgccagcgcctctgcaatgcatatgccctgcccctgcgcggggctgcagggcttgtacggcgctggcgccggcctgacgacaatgatgggcgccggcgggctgtacccctacgcagagtacctgaggcagccgcagtgcacacagctggcggcggcgccctactacgccgggtgtgggcagacgagcgccatgtaccagccgcttcggcaacagtgctgccagcagcagatgagtatgatggacgtgcagtccgcctcgcagcagctgcagatgatgatgc

SEQ ID NO: 17613 - DNA, 296 bp, Zea mays
  Clone ID: LIB3151-016-Q1-K1-G8
atggcagctaaaatattgggccgggtatgctccttggtctgtctgcaagtgctgctacagcgaccattttaccacaatgctcacaagctcctatagcttcccttcttcctccgttcctctcaccaacggtgtcttcggtatgtgaaaacccaattcttcaaccctacatgatccaacaggcaatctcgggtgggctttttacatcatcaaatttgttcctgtaacaatcatcagtcatattacatcagaatcctttggtgcatttattggcacaaaacatcatggcacaactacta

SEQ ID NO: 17614 - DNA, 389 bp, Zea mays
  Clone ID: LIB3151-016-Q1-K1-G9
ggccgaccacgcgtccggggtgttcaaaccattatctttatctactctagagcgcaaaaaaacccgatcgacaccatgagggtgttgctcgttgccctcgctctcctggctctcgctgcgagcgccacctccacgcatacaagcggcggctgcggctgccagccaccgccgccggttcatctaccgccgccggtgcatctgccacctccggttcacctgccacctccggtgcatctcccaccgccggtccacctgccgccgccggtccacctgccaccgccggtccatgtgccgccgccggttcatctgccgccgccaccatgccactaccctactcaaccgccccggcctcagccttattcccagccacacccatgcccgtgccaaca

SEQ ID NO: 17615 - DNA, 280 bp, Zea mays
  Clone ID: LIB3151-016-Q1-K1-H11
gctgtatctactccagagcgcagaagaaccttatcgacaccatgagggtgttgctcggtggcctcgctctcctggctctcgctgcgagcgccacctccacgcatacaagcggcggctgcggctgccagccaccgccgccggttcatctaccgccgccggtgcatctgccacctccggttcacctgccacctccggtgcatgtcccaccgccgggccacctgccgtcgccggtccacctgtcaccgccggtccatgtgccgacaccggttcatctgccgcc

SEQ ID NO: 17616 - DNA, 400 bp, Zea mays
  Clone ID: LIB3151-016-Q1-K1-H2
aacctaacaacaatggctaccaagatatgtatccctccttgcgcttcttgcgctttttgcgagcgcaacaaatgcgttcattattccacaatgctcacttgctccaagttccattattacacagttcctcccaccagttacttcaatgggcttcgaacacccagctgtgcaagcctataggctacaacaagcaattgcggcgagcgtcttacaacaaccaatttcccagttgcaacaacaatccttggcacatctaacaatacaaaccatcgcaacgcaacagcaacaacaattcctaccagcactgagccacctagccatggtgaaccctgccgcctacttgcaacagcagttgcttgcatcaaacccacttgctctggcaaacgtagttgcaaaccag

SEQ ID NO: 17617 - DNA, 264 bp, Zea mays
  Clone ID: LIB3151-016-Q1-K1-H3
gtgcttgggaacaacactttttttttttcatttaaattggtcattcaggggattggtgacactgacactgccacccatggggatgcgtgacacattattactcaatcatcgccgcttaaagacccaactagctagctagccagcggcttttctacaacaatgttgcccacttctcaggcagggggagccctacttcccgcaccaagcaattcttagcttggtaccccaacacattctgcaatagctaccagaaatgggccacct

SEQ ID NO: 17618 - DNA, 388 bp, Zea mays
  Clone ID: LIB3151-016-Q1-K1-H5
ccaaaatattttgcctggggatagtccttggtctttctgcaagtgctgctaccgcgagcattttcccgcaatgctcacaagctcctatagcttcccttcttcccccatacctctcaccagcgatgtcttcagtatgtgaaaatccaattcttctaccctacaggatccaacaggcaatcgcaaaaagcatctcacctttatcacccttgttcctccaacaatcatcagccctattacagcagctacctttggtgcatctatcggcacaaaacatcatggcacaacaactacaacaactcgtgctagcaaaccttgctgtctactctcaacaacagcagttacctttggtgcatatgctggcacaaaacatcacggctcatcaactaca

SEQ ID NO: 17619 - DNA, 388 bp, Zea mays
  Clone ID: LIB3151-016-Q1-K1-H6
cgatcgacaccatgagggtggggctcgttgccctcgctctcctggctctcgctgcgagcgccacctccacgcatacaagcggcggctgcggctgccagccaccgccgccggttcatctaccgccgccggtgcatctgccacctcctgttcacctgccaccttcggtgcatctcccaccgccggtgcacctgccgccggcggtccacctgccaccgccggtccatgtgccgccgccggttcatctgccgtcgccaccatgccactaccctactcaaccgccccggccttagcctcatccccagccacacccatgcccgtgccaacagccgcattcatgcccgtgccagctgcagggaacctgcggcgttggcagcaccccgatcctggg

SEQ ID NO: 17620 - DNA, 312 bp, Zea mays
  Clone ID: LIB3151-016-Q1-K1-H7
tttgcccttcttgcgcgtggtgccctttttagagctcagaaatgcgtgcattatgccacaatgctcacttgctcctagtgccattataccacagttcctccgaccagttacttcaatgggctccgaacacctagctgcgcaagcctacaggctacaacaagcgcttgcggagagcgttttacaacaaccaattaaccaattggaacagcagtccttggcacatctaaccatacaatccatggcagcacaggagcaacaacagctcctaccatctctgagccaactacatgtggggaaccctggcgcctactt

SEQ ID NO: 17621 - DNA, 276 bp, Zea mays
  Clone ID: LIB3151-016-Q1-K1-H9
tatggataccaactagcttcatacatagtgtagtattctttaaacaacttaacaccaatggcagcctttatttttgcccttctttccctccttgctctttcaacaagcgcttctacctctactgttatttcacaatgctttacaacaatacctttttttggcgacagccgcgagatttcaatacccaactatacaaccctacatgctacaagaggccatttcatcaagcattttaccgacattaacatttacccttcaacaaccatattccctatt

SEQ ID NO: 17622 - DNA, 388 bp, Zea mays
  Clone ID: LIB3151-017-Q1-K1-A1
cagaccattagctttatctactccagagcgcataagaacccgatcgacaccatgagggtgttgctcgttgccctcgctctcctggctctcgctgcgagcgccacctccacgcatacaagcggcggctgcggctgccagccaccgccgccggttcatctaccgccgccggtgcatctgccacctccggttcacctgccacctccggtgcatctcccaccgccggtccacctgccgccgccggtccacctgccaccgccggtccatgtgccgccgccggttcatctgccgccgccaccatgccactaccctactcaaccgccccggcctcagcctcatccccagccacacccatgcccgtgccaacagccgcattcaaacccgtgccagc

SEQ ID NO: 17623 - DNA, 388 bp, Zea mays
  Clone ID: LIB3151-017-Q1-K1-A10
ggcagtgcgtagagaggatcgtcttacagaacagcatgaagatggtcatcgttctcgtcgtgtgcctggctctgtcagctgccagcgcctctgcaatgcagatgccctgcccctgcgcggggctgcagggcttgtacggcgctggcgccggcctgacgacgatgatgggcgccggcgggctgtacccctacgcggagtacctgaggcagccgcagtgcagcccgctggcggcggcgccctactacgccgggtgtgggcagacgagcgccatgtatcagccgctccggcaacagtgctgccagcagcagatgaggatgatggacgtgcagtccgtcgcgcagcagctgcagatgatgatgcagcttgagcgtgccgctgccgccagcag

SEQ ID NO: 17624 - DNA, 348 bp, Zea mays
  Clone ID: LIB3151-017-Q1-K1-A11
tgctatccctccaccaaaaaaaattttactgttaaccagcgaggcagcctaggaaaaatgcgcgaaagcaaagaaaacaatctcccacgctcacaagcagatcggcgcgcattactgcagcccagtgcgctcgcagaccagcagatcgagaggcgaggatccggggggacgacctgggtcatggccgcggctgccgcggcggcgaggacgccggactggtactgatgttgctgctgctgctgctgcagcgcctgctgcatcaggagcgcctgctgctgctgctgctgccggagcctgtgctgctgctggtggtggctgcccccggtgccgttcatctcctccagctcc

SEQ ID NO: 17625 - DNA, 345 bp, Zea mays
  unsure at all n locations
  Clone ID: LIB3151-017-Q1-K1-A12
ggccggccgcacgcgtgcggagcgcanattaacccgatcgactttatgtttgtgttgcncgcagccctcgctcggctggcgctcgctgttagcgccacctccacccatacaatctgttgctgatgctgccagccaccgccaccggttcatctaccgtcgccggtgcatctgccacctacggttcacctgccacctccggtgcatatcccaccgccggtccacctgccgccgccggtccacctgccaccgtcggtccatgtgccatcgccggttcatctgccgtcgacaccatgccactaccctactcaaccgcccctgtcttagcctcattcccagccacaccca

SEQ ID NO: 17626 - DNA, 446 bp, Zea mays
  Clone ID: LIB3151-017-Q1-K1-A4
cggcggcgggcggcgaggtggaggagaacatggcggcgtggctggttgccaagaacaccctcaagatcatgcccttcaagctcccgcccgtcggcccttatgatgtccgcgtgcgcatgaaggcagtggggatttgcggcagcgatgtgcactacctaagggagatgcgcatcgcgcacttcgtggtgaaggagccgatggtgatcgggcacgagtgcgcgggcgtggtcgaggaggtgggcgccggcgtgacgcacctgtccgtgggcgaccgcgtggcgctggagccgggcgtcagctgctggcgctgccgccactgcaagggcgggcggtacaacctgtgcgaggacatgaagttcttcgccaccccgccggtgcacggctcgcttgcgaacccaggtgtgcacccggccgacctgtgctttaagctccccgacggggtgagc

SEQ ID NO: 17627 - DNA, 418 bp, Zea mays
  Clone ID: LIB3151-017-Q1-K1-A5
caactagcaacatagaaagcacaatagtgtaccaacaatggcagccaaaatattttgcctccttatgctccttggtctttctgcaagtgctgctacggcgaccattttcccgaaatgctcgcaagctcctatagcttcccttcttcccccgtacctctcaccagcggtgtcttcggtatgtgaaaacccaattcttcaaccctacaggatccaacaggcaatcacagctggcatcttacctttatcacccttgttcctccaacaatcatcagccctattacatcagttacctttggtgcatttattggcacaaaacatcagggcacaacaactacaacaacttgtgctagcaaaccttgctgcctactctcagcaacagcagtttcttccattcaaccaactagctgcattgaactct

SEQ ID NO: 17628 - DNA, 431 bp, Zea mays
  Clone ID: LIB3151-017-Q1-K1-A6
agaccaacaagcaacatagaaagtggaatcctttagcaacaatagagcaacaatggcgaccaagatattttccctccttatgctccttgctctttctgcatgtgttgctaacgcgacaattttccctcaatgctcacaagctcctatagcttcccttcttcccccataccttccatcaatgatagcttcagtatgtgaaaacccagctcttcaaccctataggctccaacaagcaatcgcagcaagcaacatacctttatcacccttgtttcaacaatcgccagccctatctttggtgcagtcattggtacaaaccatcagggcacagcagctgcagcaactcgtgctacctgtgatcaaccaagtagctctggcaaacctttctccctactctcagcaacaacaatttctttcattcaccaactgtctac

SEQ ID NO: 17629 - DNA, 407 bp, Zea mays
  Clone ID: LIB3151-017-Q1-K1-A7
acattattactcaattatcgccgctagctactgcctacgctcaacaacaacaacttcttccatttaaccaattggccgcactgaaccccgctgcttatttgcagcagcaaatactactaccatttagccagctagctacagcaagccgtgcttccttcttgacacaacaacagttgctgccgttctaccagcagtttgcggctaaccccgcaaccctcttacaactacaacaattgttgccctttgtccaacttgctttgacaaacccagcagcctcctaccaacaacacatcattggtggtgccctcttttagattgcttattagatgtaattcaataataaagttttttggatgatgtatgtggccaaccagaaataaaaaagtacatttccagattctaatgtg

SEQ ID NO: 17630 - DNA, 334 bp, Zea mays
  Clone ID: LIB3151-017-Q1-K1-A8
tcaaaacattttaaattttgcaacccacgacctagggaatgggtccataatacagaaccccaaatcttcttgccctttttgtgagcgcaacaaatgcttcattatttattttgccgaccggccccaacttcatcattttatatttaatgggaacagatactccaaagggcttccaacacctatctgtgcaagccaacacgcaacaacaagcgcttgccgcgagcttcttacaacaaccaattgcccaattgcaacaacaatccttgccacatctaacaatacaagccatcacaacgcaacagcaacaacagttcctaccatcactgatccacct

SEQ ID NO: 17631 - DNA, 373 bp, Zea mays
  Clone ID: LIB3151-017-Q1-K1-A9
gcggcagtgcgtagagaggatcgtctaacataacagcatgaagatggtcatcgttctcgtcgtgtgcctggctctgtcagctgccagcgcctctgcaatgcagatgccctgcccctgcgcggggctgcagggcttgtacggcgctggcgccggcctgacgacgatgatgggcgccggcgggctgtacccctacgcggagtacctgaggcagccgcagtgcagcccgctggcggcggcgccctactacgccgggtgtgggcagacgagcgccatgtaccagccgctccggcaacagtgctgccagcagcagatgaggatgatggacgtgcagtccgtcgcgcagcagctgcagatgatgatgcaacttgagcgt

SEQ ID NO: 17632 - DNA, 348 bp, Zea mays
  Clone ID: LIB3151-017-Q1-K1-B1
gtagatgtcaagcctttaaggatgggatgaaacaaggaattattaatccaagtgatattgatgttacctttgaggattttccttattatgtcagtgagaacacaaagaatgtgctcttgtcatgtgcattcatacacttggaaaagaaggagttcatcaagcagtttgctgagatttcatcaataaaccaacgaattttgttatccggtccagcaggttctgagatttatcaggaaacattggtaaaggcacttgcgaaacattttggtgctagacttcttgtcgtagattcacttttgctacctggggcacctttgaaagatgcaaagtcccaaaaagatgttggga

SEQ ID NO: 17633 - DNA, 377 bp, Zea mays
  Clone ID: LIB3151-017-Q1-K1-B10
acgtcagcctatcaattagctcatctactccatattggagaactcgacaccatgaaggtgctgatcgttgcccttgctctcctggcgctcgctgcgagcgccgcctacagtacaagcggcggctgtggctgccagacaccaccgtttcatctaccgcctccgttctatatgccgcctccgttctatctgccgccgcagcagcagccgcagccatggcaataccccactcaaccaccgcagctaagcccgtgccagcagttcggatcctgcggcgtctgcagcgtctgcagcccgttcctgggccagtgcgtctagttactgaggcaccagtgcagcccggctgcgacgccctacggctcgtcacagtgccaggcgct

SEQ ID NO: 17634 - DNA, 405 bp, Zea mays
  Clone ID: LIB3151-017-Q1-K1-B11
gcgaagaaggaagccggttagggtttctcactttctttcccctcctctccttcagcgacgacggcgggccacaccctcgatatccttcccctcggacccggaggcgagcagcagcctccagcgcctgccacgcctgcccgtctcgttattgggaggattcgccatgtctgacatggagtccgtcgcagctcttatgaactcgacaagctccaagatacatcagcttcaggaggcatttgctgagcttgagagccagagcacggtttccatgaacctcaagtggaagcagcttgaagaccactttcgtggtcttgaacagtccctcaagaaaaagtttgacgagctaaaagagcatgagaaggagttccaggagactgtcgcaaatcagacagattctggagcagc

SEQ ID NO: 17635 - DNA, 399 bp, Zea mays
  unsure at all n locations
  Clone ID: LIB3151-017-Q1-K1-B2
gccaagaagtacatcgaggccggcttgtcggtaggaggcgaggtcgctggggcccaagggatcggaggcgcacaaagcggcggtgatcggggacaccatcggcgacccgctcaaggacacctccggaccgtccctcaacatcctcatcaagcttatggccgtggagtcgctcgtcttcgcgcccttcttcgccgcgcacggtggcatcatcttcgaccacctctgatcaatgcatgctgctgacgttccatggcaaaggcgccggctgtcgccgcaagccgcctctttgaatttgccgtgatcagttagtaagaataatcgtcgtgtatgtagcctgtaacaagtaatgccagaccaccagagttggaggcttattcatgtctggcccttntatcttac

SEQ ID NO: 17636 - DNA, 398 bp, Zea mays
  Clone ID: LIB3151-017-Q1-K1-B3
gaaaaagtctagacgacgcgctttggtgcgttgccggacctgaaaagccggttcctcccccgaccccggcgccccaccgcagccgccggctcccaccgcccggcgcaccccgtcacctctccaccaaccggatacccggacggatccgctcccacctggatcctgatccggggaagtcaaaggggagatcgaagcttgagcagagggagccaaaatggtgaaggacacgcggtactacgacgtgctgggcgtggacccgtccgccaccgagtccgagatcaagaaggcgtactacgtcaaggcgaggctggtccaccccgataagaacccgaatgatccgcaggccgcggagaagttccaggaactaggagaagcataccaagttctcagtgacccta

SEQ ID NO: 17637 - DNA, 439 bp, Zea mays
  unsure at all n locations
  Clone ID: LIB3151-017-Q1-K1-B4
ccacgcgtccgnacaatgctacaagctcctatagcttcctttcttctttcatacctctcaccagcggtgtgttcaatgtgtgaaaacccaattgttcaaccctacaggatccaacaggcaatcgcaacaggcatcttaccattatcacccttgttcctccaacaaccgtcagccctattacagcagttacctttggtccatttggtggcacaaaacatcagggcacaacaactacaacaacttgtgctagcaaaccttgctgcatactctcagcaacatcagtttcttccattcaaccaactggctgcattgaactctgctgcttatttgcaacaacaattaccattcagccagctagttgctgcctacccccagcaatttcttccattcaaccaactagcagcattgaactctgctgttatttacagcagcaacaact

SEQ ID NO: 17638 - DNA, 399 bp, Zea mays
  Clone ID: LIB3151-017-Q1-K1-B5
gcgacgtcagcctatcatataacgcacattcttgtgccagcagtggcagcaaaaatattgtgcttgctcatgctccttggtctttgtgcacgtgtggctaccgcaaccattttcccacaatgctcacaagctcctatagcttcccttcttcccccatacctctcaccagcggtgtcttcaatgtgtgaaaacccaattgttcaaccctacaggatccaacaggcaatcgcaacaggcatcttaccattatcacccttgttcctccaacaaccgtcagccctattacagcagttacctttggtccatttggtggcacaaaacatcagggcacaacaactacaacaacttgtgctagcaaaccttgctgcatactctcagcaacatcagtttcttccattc

SEQ ID NO: 17639 - DNA, 266 bp, Zea mays
  Clone ID: LIB3151-017-Q1-K1-B8
cccttgctatcctggagctcgttcggagacccgctcaaggacacctcgggaccttgcgttaacatactcaacaagttaatgtaccggcttcgttctatatgccgcctttgttctatctgccgccggagcagaagtcgcagccatggtaataccccactcaaccaccgcatctaaacccgtgccaccagttcggatcctgcggcgtctgtagcgattgcagcccgttcctgggccagagaaatgagttcctgaggcaccagtgcaaa

SEQ ID NO: 17640 - DNA, 440 bp, Zea mays
  Clone ID: LIB3151-017-Q1-K1-B9
gcggcacacaattcgcgcagcagcgtagaaactagaaagtccagtccccaaactccccagcgggggcgagcagaggaggaagagtagccgccgccatgtctgggggaatcgcccgcggccgcctcgccgaggagcgcaaggcctggcgcaagaaccacccgcacggtttcgtcgcgaagccggagtcgctgcccgacgggacggtgaacctgatgatctggcagtgcaccatccccggcaagcaagggactgactgggagggtggatatttccctctcacccttcattttagtgaggattaccctagcaagcctcccaagtgcaagttccctcagggtttcttccacccaaatgtgtatccttctggaacagtctgcctttcgatccttaatgaggacagtggttggagaccagctattactgttaagcagattctcgtc

SEQ ID NO: 17641 - DNA, 356 bp, Zea mays
  unsure at all n locations
  Clone ID: LIB3151-017-Q1-K1-C10
ctggacgtcagcctagcaattattttatcgttccagacaggagaacncgacaccgggaaggggctgatcgttgcccttgctctcctggcgctcgctgcgagcgccgcctccagtacaagcggcggctgtggctgccagacaccaccgtttcatctaccgcctccgttctatatgccgcctccgttctatctgccgccgcagcagcagccgcagccatggcaataccccactcaaccaccgcagctaagcccgtgccagcagttcggatcctgcggcgtctgcagcgtctgcagcccgtttctgggccagtgcgtcgagtttctgatgcaccatcgcagcccggcggcgacgcccta

SEQ ID NO: 17642 - DNA, 252 bp, Zea mays
  Clone ID: LIB3151-017-Q1-K1-C11
gggcgacccacgcgttcgattagttatttacccaacaccgttttaacattctaaacaacaccaaaaaggcgggggggcgggggcatttcatctttgacgtagcacctaaatccaatcttctagcccacaatgctcaaaacaatgactgggtaatccctcacgcttcccatctcaatagccaagtatacaatcccactttttccaacaggcgatataaccaagaatcctacaccgattatccttaacaacaca

SEQ ID NO: 17643 - DNA, 351 bp, Zea mays
  Clone ID: LIB3151-017-Q1-K1-C12
ggcaaatcaactgtatgaactatgtgaagcttttggtactgagcccacaaggggtgatctggtgtcagcgtatgttcgccttctctgtgacaatgaggctgaagtgcggattgcagctgctggaaaagttacaaaattctgcaaaatattaaacccacaaattgcaattgaacatattcttccgtgtatcaaggaattatcatcagattcatctcagcatgttcgttcagctttggcatcggttattatgggaatggctcctgtattgggaaaggacgccactcttgaacaactgcttcccatttttctttctttgctgaaagatgagttccctgatgttcgactcaacat

SEQ ID NO: 17644 - DNA, 457 bp, Zea mays
  unsure at all n locations
  Clone ID: LIB3151-017-Q1-K1-C3
ggaannncccgggnccgacccaacgcgtnnccgggtcttcagaaccattanngctttatctatctccagtagcgcattatagaacccccgatcgatcaccatgagtgggtgttggctcgttggccctcgctttctcctggtgctctcgctgcgagccgccatcctccatcgcatacaatgcggctggctggcggtctgtccatccatccgccgctcggttcaatctatccgtccgtccgtgttcattctgccatcctctcgtgttcatcctgtccatcctctcgtgtgcattctctccaacccgccggtccaacctgtccgccgtccggtccaacctgccatccgccggtccaatgtgccgccgccggttcaatctgccgccgccaccatgccactaccctactcaaccgccccggcctcagcctcatccccagccacacccatgcccgtgccaaca

SEQ ID NO: 17645 - DNA, 380 bp, Zea mays
  Clone ID: LIB3151-017-Q1-K1-C4
gaccattagctttatctactccagagcgcagtagaacccgatcgacaccatgagggtgttgctcgttgccctcgctctcctggctctcgctgcgagcgccacctccacgcatacaagcggcggctgcggctgccagccaccgccgccggttcatctaccgccgccggtgcatctgccacctccggttcacctgccacctccggtgcatcttccaccgccggtccacctgccgccgccggtccacctgccaccgccggtccatgtgccgccgccggttcatctgccgtcgtcaccatgccactaccctactcaaccgccccggcctcagcctcattcccagccacacccatgcccgtgccaacagccgcattcaagcccgt

SEQ ID NO: 17646 - DNA, 312 bp, Zea mays
  Clone ID: LIB3151-017-Q1-K1-C5
cagcgacaccaaaagggcggggcgaggggccctttctctcctggctctcgctgcgagcgccaccttcacgcatacaagcggtggctgcggttgccagccaccgccgccggttcatttaccgccgccggtgcatctgccacctccggttcacctgacacctccggtgcatctcccaccgtctgtccacctgccgccgccggtccacctgtcaccgccggtccatgtgccgccgacggttcatctgccgccgtcaccatgccactaccctactcaaccgccccgggcttatactcatccacaaccacacccatg

SEQ ID NO: 17647 - DNA, 359 bp, Zea mays
  Clone ID: LIB3151-017-Q1-K1-C6
gcaacatacatagtgaagtacactagcaacatcttagcaccaatgggagccaagatttttgccctccttgccctccttgctctttcagcaagcgctgctacctcgacttttattccacaatgctcacaacaatacctctctccggcgacagccgtgggatttcaatacccaactatacaatcctacatggtacaagaggccatccaagcaagcatcttacggtcattagcattaaccctccaacaaccatatgctctattgcaacagccatccttagtgcatctgtatctccaaagaatcgcggcacaacaactacaacaacagttgctaccaacaatcaatcaagtagttgcagcgaa

SEQ ID NO: 17648 - DNA, 325 bp, Zea mays
  Clone ID: LIB3151-017-Q1-K1-C7
ctgtctctcattaccattagcattatctacttcatagcgcaaaagaaccccaagggcaccgggagggttttgctcgttgccctctctctcctggctcttactgcgagcgccatctcacacgcactcaaacgagtgttgctgttgccagacaccggcggcatttcatctaccaactacacgacactacacacctcatgatgacctgccacctaccatgcatctgccaccagcagtccacctgccaccaccattccacctatcaccacaggcacacgtaccgccgccggatcatctaacaacggcaccataccaactacataatcaa

SEQ ID NO: 17649 - DNA, 355 bp, Zea mays
  Clone ID: LIB3151-017-Q1-K1-C9
ggccgacccacgcgtgcggatcagcaaatctgcagctcgtttataggactgtctaacagaacagcatgaagagggtcatcggtctcgtcgtgtgcctggctctgtcagctgccagcgcctctgcaatgcatatgccctgcccctgcgcggggctgcagggcttgtaccggcgctggcgccggcctgacgacgatgatgggcgccggcgggctgtacccctacgctgagtacctgaggcagccgcagtgcatcccgctggcggctgcgccctactactccgggtgtgggcagacgaacgccatgtaccatccgctccggcaacagttctgccagctgcagatgatgatgatggacg

SEQ ID NO: 17650 - DNA, 240 bp, Zea mays
  Clone ID: LIB3151-017-Q1-K1-D1
gttccatcctgcaacgcgacaccatgagggagtgcatttcgatccacatcggccagtccggtatccatggtcggaaacgcttgctgggagctgtactgccatgagcatggcattcaggctgacggtcaaatgcccggtgacaagaccattgggggaggtgaagatgctttcaacaccatcttcagagagactggtgcttgtaaacacgtgccccgcgcttgttttgttgaccttgaaccc

SEQ ID NO: 17651 - DNA, 289 bp, Zea mays
  Clone ID: LIB3151-017-Q1-K1-D10
gagggatccacatataaagccattttaaggttcttcttttcagccaacttctcaagcaagaggtctatggtacatcagcggattgctatatctcctgcagtgagttcacactacagtggtgctgtgcctctgacatgctatatatgccgctctcaacgtcggcgtacgagccatcgtcaatataccgcttgcatgaagactcatgtattcaactctatcagcgccaaagaggtttcatcttgtacgtcatacttctacaacgcgcatctcagccagacccacatctatg

SEQ ID NO: 17652 - DNA, 350 bp, Zea mays
  Clone ID: LIB3151-017-Q1-K1-D2
caactagcaacatagaaagcacaatagtgtaccaacaatggcagccaaaatattttgcttcctttatgctccttggtctttctgcaagtgttgctaccgcaaccattttcccacaatgctcacaagctcctatagcttcccttcttcccccatacctctcaccagcgggtgtcttcaatgtgtgaaaacccaattgttcaaccctacaggatccaacaggcaatcgcaacaggcatcttaccattatcacccttgttcctccaacaaccgtcagccctattacagcagttacctttggtccatttggtggcacaaaacatcaaggcacaacaactacaacaacttgtgct

SEQ ID NO: 17653 - DNA, 207 bp, Zea mays
  Clone ID: LIB3151-017-Q1-K1-D3
gcgctcttgtctcaccttacacaaaatctctctgtctcacgtctctcccgcgcgcccttctcccgcgcacgggcggctccgccgccggtcgcgccgccccgaccgcgccccgccctcgaggagcccaccccggccgtcaccgcggccgcctctccagcccccaatagcgccgcgtccaagtggagaaaacccaattgttgaaccctc

SEQ ID NO: 17654 - DNA, 367 bp, Zea mays
  unsure at all n locations
  Clone ID: LIB3151-017-Q1-K1-D4
cgtncgggcaaatcaactgtatgaactatgtgaagctgttggtactgagcccacaaggggtgatctggtgtcagcgtatgttcgccttctctgtgacaatgaggctgaagtgcggattgcagctgctggaaaagttacaaaattctgcaaaatattaaacccacaaattgcaattgaacatattcttccgtgtatcaaggaattatcatcagattcatctcagcatgttcgttcagctttggcatcggttattatgggaatggctcctgtattgggaaaggacgccactcttgaacaactgcttcccatttttctttctttgctgaaggatgagttccctgatgttcgactcaacattataagcaaa

SEQ ID NO: 17655 - DNA, 301 bp, Zea mays
  Clone ID: LIB3151-017-Q1-K1-D6
ccggggcccaagggatgggaggggcgcaatgcgaccgttatcggggacaccatcagcaacccgctcaaggacacctccggaccgtccctcatcatcctcatcaagcttatggccgtggagtcgctcttcttcgcgcccttctttgccgcacacagtggcatcatcttcgaccacctctgatcaatgcatgctgctgacgtttcatggcatatgcgccggctgtcgcacaaagcctcctctttgaatatgccgtgatcagttactaagaataatcgtcgtgtatgtagactgtaacaagtaa

SEQ ID NO: 17656 - DNA, 436 bp, Zea mays
  Clone ID: LIB3151-017-Q1-K1-D9
gcgtgcgtacatcatattaagcacaatagttttccaataattgcagctaaaatattttggcggcttatgctccttggtctttctgcaagtgctgctacggcgaccattttcccacaatgctcacaagctcctatagctaacgttcttcccccgtacctctcaccaacggtgtcttcggtatgtgaaaacccaattcttcaaccctacaggatccaacaggcaatcgcagctggcatcttacctttatcacccttgttccttcaacaatcatcatccctattacagcagttacctttggtgcatttattggcacataacatcagggcacatcaactacaacaacttgtgctagcaaaccttgctgtctactctcagcaccagcattttcttcattcaaccaacttactgcattgaactctgcttcttaatttcaaca

SEQ ID NO: 17657 - DNA, 387 bp, Zea mays
  Clone ID: LIB3151-017-Q1-K1-E1
tacagcctcatcgacgagtacaagttgaagggccatattcggtggatctcggcgcagatgaaccgtgtccgcaacggggagctgtaccgctacatttgtgataccaagggcgcattcgtgcagcctgcgttctacgaagcgttcggcctgactgtgatcgagtccatgacgtgcggtctgccaacgatcgcgacctgccatggtggccctgctgagatcatcgtggacggggtatctggcctgcacattgacccttaccacagcgacaaggccgcggatatcctggtcaacttctttgacaaatgcaagggagatccgagctactgggacaagatctcacaaggcggcctgcagagaatctatgagaagtacacctggaagctctac

SEQ ID NO: 17658 - DNA, 351 bp, Zea mays
  unsure at all n locations
  Clone ID: LIB3151-017-Q1-K1-E10
ggccgacccacgcgtacagcctttattgacccaattagcattttcctatttacaacaacaacnagngctagcggaccttgttgccttctttgagcaacagcagtttcttccattcaaccaactagctgcattgaactctgcttcttatttgcaacaacaacaactaccattcagccagctatctgctgcctacccccagcaatttcttccattcaaccaactgacagcattgaactctcctgcttatttacagcaacaacaactactaccattcatccagctagctggtgtgagcccttctacctttttgacacaaccacagttgttgccgttctaccagcacgcttttcc

SEQ ID NO: 17659 - DNA, 392 bp, Zea mays
  Clone ID: LIB3151-017-Q1-K1-E2
ctggacgtcagcctagcaattagctcatcgactccagattggagaactcgacaccatgaaggtgctgatcgttgcccttgctctcctggcgctcgctgcgagcgccgcctccagtacaagcggcggctgtggctgccagacaccaccgtttcatctaccgcctccgttctatatgccgcctccgttctatctgccgccgcagcagcagccgcagccatggcaataccccactcaaccaccgcagctaagcccgtgccagcagttcggatcctgcggcgtcggcagcgtcggcagcccgttcctgggccagtgcgtcgagttcctgaggcaccagtgcagcccggcggcgacgccctacggctcgccacagtgccaggcgctgcagcagcagt

SEQ ID NO: 17660 - DNA, 398 bp, Zea mays
  Clone ID: LIB3151-017-Q1-K1-E3
cccagagcagacccggatttcgctcttgcggtcgctggttttttagcattggctgatcagttcgatccgatccggctgcgaaggcgagatggcgttcgcggtttctggggcggtgctcggtggggccgtaagggctccccgactcaccggcggcggggagggtagtctagtcttccggcacaccggcctcttcttaactcggggtgctcgagttggatgttcggggacgcacggggccatgcgcgcggcggccgcggccaggaaggctgtcatggttcctgagggcgagaatgatggcctctcatcaagggctgactcggctcaattccagtcggatgaactggaggtaccagacatttctgaagagacaacgtgcggtgctggtgtggctgatgctc

SEQ ID NO: 17661 - DNA, 410 bp, Zea mays
  Clone ID: LIB3151-017-Q1-K1-E4
cgcgtccgcagaaacacaccaagcgaagcacattagcatctacctattaacaatggctaccaagatattatccctccttgcgcttcttgcgctttttgcgagcgcaacaaatgcgttcattattccacaatgctcacttgctccaagttccattattacacagttcctcccaccagttacttcaatgggcttcgaacacccagctgtgcaagcctataggctacaacaagcaattgcggcgagcgtcttacaacaaccaatttcccagttgcaacaacaatccttggcacatctaacaatacaaaccatcgcaacgcaacagcaacaacaattcctaccagcactgagccacctagccatggtgaaccctgccgcctacttgcaacagcagttgcttgcatcaaacccac

SEQ ID NO: 17662 - DNA, 270 bp, Zea mays
  Clone ID: LIB3151-017-Q1-K1-E5
acattatcaatgcttacttcaagcgtttccaggtgaatttcaagagaaggcgcgctggctagacagactacagggccaggataaggctgattatccaagacaaaaacatgtacaatacacccaaatacagatttgttgtgcgatttaccaacaaggacatcacagcacaaatcatctctgctagtatagcaggtgatatggttcttgcttcttcttactcgcatgagttgccacgatatggtcttgaatttggtctgaccaactttgcat

SEQ ID NO: 17663 - DNA, 276 bp, Zea mays
  Clone ID: LIB3151-017-Q1-K1-E8
gccgcagtgccgctccttccctctttctacttgtctccgctgctgccatggacgaagtcgtgagccagattttggagaagcaagtgctgtctgccgcgaaggcggtggaggacaagctcgatgaggagatcgccgcgctcgaccgcctcgatccggacgatatcgaggcgctccgcgagcgccggatccagcagatgcgcctcgccgtctagcgcctcgccaagtggcgtgcgctggggcacggggagtacaccgaggtccccgagaaggagttct

SEQ ID NO: 17664 - DNA, 154 bp, Zea mays
  Clone ID: LIB3151-017-Q1-K1-F1
cctagccttaatgagcgacactgctttccgtgttgttgtggttgattatgccgatgatgacacagcatctgttgcagactacactgaggttgatcatacaatctactctgtgggacctgccgatgctctatcaggacatatagttgatcgcatc

SEQ ID NO: 17665 - DNA, 403 bp, Zea mays
  Clone ID: LIB3151-017-Q1-K1-F10
atccagatcagcaaagcggcagtgcgtagagtggatcgtcgaacagaacagcatgaagatggtcatcgttctcgtcgtgtgcctggctctgtcagctgccagcgcctctgcaatgcagatgccctgcccctgcgcggggctgcagggcttgtacggcgctggcgccggcctgacgacgatgatgggcgccggcgggctgtacccctacgcggagtacctgaggcagccgcagtgcagcccgctggcggcggcgccctactacgccgggtgtgggcagacgagcgccatgtaccagccgctccggcaacagtgctgccagcagcagatgaggatgatggacgtgcagtccgtcgcgcagcagctgcagatgatgatgcagcttgagcgtgccgctgccgccagc

SEQ ID NO: 17666 - DNA, 332 bp, Zea mays
  Clone ID: LIB3151-017-Q1-K1-F11
ggccgaccacgcgtgcgtccagacatcaaacctcattttaaaattgatcccacaacagaacaccaggaatatgggcgtctttctcttcgtgtgccttgccctcgcagctgtcaacagcctctgtattgctcatgccctacccccgcgcagagctaccgggctcgttctatactcccgccccgctctctacgacgacggaggcacaaccgctgtacccctacgcggagtacctgaggcagcccatatgcacacccgctggcgtgctgagccctactacgccggatgtgggcagactatctccatgtaccatcacgtccggcaccaatgctgcc

SEQ ID NO: 17667 - DNA, 424 bp, Zea mays
  Clone ID: LIB3151-017-Q1-K1-F12
ggtcttcagaccattaactttatttactccttagcgcagaagaacccgatcgacaccatgagggtgttgctcgttgccctcgctctcctggctctcgctgcgagcgccacctccacgcatacaagcggcggctgcggctgccagccaccgccgccggttcatctaccgccgccggtgcatctgccacctccggttcacctgccacctccggtgcatctcccaccgccggtccacctgccgccgccggtccacctgccaccgccggtccatgtgccgccgccggttcatctgccgccgccaccatgccactaccctactcaaccgccccggcctcagcctcatccccagccacacccatgcccgtgccaacagccgcattcaagcccgtgccagctgcatggaacctgctgcgttggcagcaccc

SEQ ID NO: 17668 - DNA, 373 bp, Zea mays; identical to SEQ ID NO: 17121
  Clone ID: LIB3151-017-Q1-K1-F2

SEQ ID NO: 17669 - DNA, 406 bp, Zea mays
  Clone ID: LIB3151-017-Q1-K1-F3
caactagcaacatagaaagcacaatagtgtaccaacaatggcagccaaaatattttgcctccttatgctccttggtctttctgcaagtgctgctacggcgaccattttcccacaatgctcacaagctcctatagcttcccttcttcccccgtacctctcaccagcggtgtcttcggtatgtgaaaacccaattcttcaaccctataggatccaacaggcaatcgcagctggcatcttacctttatcacccttgttcctccaacaatcatcagccctattacagcagttacctttggtgcatttattggcacaaaacatcagggcacaacaactacaacaacttgtgctagcaaaccttgctgcctactctcagcaacaacaagtttctccattcaaccaactagct

SEQ ID NO: 17670 - DNA, 154 bp, Zea mays
  unsure at all n locations
  Clone ID: LIB3151-017-Q1-K1-F5
cgggccgacccacgcgttcgatccagatcaatnaaantgtnagtgcgtagagaggatcgtcgtcctgaacatgatgaaaatgggcatcgttctcgtcgggtgtgttatctatgtaagctgccagcgcctctgctatgcagatgccctgcccctg

SEQ ID NO: 17671 - DNA, 254 bp, Zea mays
  Clone ID: LIB3151-017-Q1-K1-F6
cgtgcggagcctatcaattagctcatcgactccagattgttagaattctacaccatgaatgtgctgatcgttgccggggctctcctggcgctcgctgcgagcgccgactccagtacaagcggcggctgtggctgccagacaccaccgtttcatctaccgccttcgttctatatgccgcctccgttctatctgccgccgcagtatcagccgcaaccatggcaataccccacttaaccaccgtagcttagcccgtg

SEQ ID NO: 17672 - DNA, 406 bp, Zea mays
  Clone ID: LIB3151-017-Q1-K1-F7
gtcgccatctaccagtccaaggtctccctatttaggaagtctggacccgacgtgccgccggggtacgatccggcgcaagtggccgatgccaaacccaagacgaaggcggccaagcggaacgagcgacggaaagagaaacggcagcaggtagcggttctctgtctggtgcttgtgctcgtatcgccatggattgcgagggaaaccgtcagatttagttggattggattggtcatcataggagtttgtttactaagtgtccattggagaaccaacaatggagttgtgcttgtgatggaaggaggaattgtaccttttgtttctcgtgcattagtcagccatactcaatagtctgtataggaaaaagtcgacccttttacaatgcttccaccattaccatgataccttt

SEQ ID NO: 17673 - DNA, 383 bp, Zea mays
  Clone ID: LIB3151-017-Q1-K1-F8
gcaacatagaaagtggaatacagtagcaacaatagagcaacaatggcggccaagatattttccatccttatgctccttgctctttctgcatgtgttgctaacgcgaccatttttcctcaatactcacaagctcctatagctgcccttcttcccccataccttccatcaatgaccgcttcagtatgtgaaaacccagcccttcaaccctacaggctccaacaagcaatcgcaacaagcaacttacctttatcacccctgttctttcaacaatcgccagccctatctttggtgcagtcattggtacaaaccatcagggcacaacagctgcagcaactcgtgctaccagtgatcagccaagtagctctggcaaaccttctccctac

SEQ ID NO: 17674 - DNA, 368 bp, Zea mays
  Clone ID: LIB3151-017-Q1-K1-F9
ccgggccgacccacgcgtgcgaaaatcataatgcagaatacagttttaagtttcaaacaacaacggcggccacgagattctggatgcttatactacgagccctgtgcgcgtggatcgctgacgcaacgatttataatcaatacgtacaagctcacatacctgccgttgttgccgcatacattacatcaatgaccgggctaagactgtgaaaacccaatccttatacactacaacatccaacttgccatcgtaccaagcatctccagtttcttacacccgttcttctaccaattgccagccctactctttggcgcagtcatcggcacaaaccataagggcaacaacaactgcaacaactcgtgctacca

SEQ ID NO: 17675 - DNA, 368 bp, Zea mays
  Clone ID: LIB3151-017-Q1-K1-G1
gtgttcacgcctgccgcggcgaagcttctgccctccccggcgtcgggctctggtcgtcgtcggccgggaagatggctggcggcttcagggtacttcatctggtcaggccctttctggctttcttgccagaggtgcagagcgcggataggaagataccattcagagaaaaagttatctacactgttatttctctcttcatttttctggtgtgcagccagctcccactctatggcattcattcgacgactggagctgatcctttctactggatgcgtgttatcctcgcatcaaaccgtggcactgtgatggagttgggtattactccaattgtgacctctggtatggtaatgcaacttcttgtcggatcg

SEQ ID NO: 17676 - DNA, 206 bp, Zea mays
  Clone ID: LIB3151-017-Q1-K1-G10
atcgttgccctagctctcctggcactcgctgcaagcgccgtctccagtacaagcggcagctgaggctgccatacaccaccgtttcatctaccgcctccgatctatatgccgcctccgatctatctgccaccacagcatcagccgcagccatggcaataccccactcaaccaccgtaactaagcccgtgccagcatttcagatcctg

SEQ ID NO: 17677 - DNA, 307 bp, Zea mays
  Clone ID: LIB3151-017-Q1-K1-G11
atctcctaccatggccggttcgctttctcctttctcccggagctgaacctcccggagagatgcaagtcttccttcgatttcatcgacggctactagaagcccgtggaaggccggaagatcaactggatgaaggccgggatcctcgaggccgacagggtcctcaccgtcagcccctactacgccgaggagctcatctcctgcatcgccaggggctgcgagctcgacatcatcatgcgcctcaccggcatcaccggcatttgtaactgcattgacgtcagcgagtgggaccccatcagggacaagttca

SEQ ID NO: 17678 - DNA, 219 bp, Zea mays
  Clone ID: LIB3151-017-Q1-K1-G3
cgtcgctccataacgattgacggaccagggggctgcatgatcgtcgtgctacactgggatcaaactactaggtgtaggcagcctttgtccgtactttcagcaacaacgctttcttccattaaagcaactatctacattgggccgtgctgttcttttgcaacgacgactattacaattcacgcacttagctcctgcctaatgtgaacaccaacaacttct

SEQ ID NO: 17679 - DNA, 438 bp, Zea mays
  Clone ID: LIB3151-017-Q1-K1-G4
ctttatcgcccttgttgtgtcaacaatcgccttccctatctttggtgcagtcattggtacaaaccatcagggcacaacagctgcagcaactcgtgctacctgtgatcaaccaagtagctctggcaaacctttctccctactctccgcaacaacaatttcttccattcaaccaactgtctacactgaaccctgctgcttatttgcagcaacaactattaccatttagccagctagctactgcctactctcaacaacaacaacttcttccatttaaccaattggccgcactgaaccccgctgcttatttgcagcagcaaatactactaccatttagccagctagctacagcaagccgtgcttccttcttgacacaacaacagttgctgccgttctaccagcagtttgcggctaaccccgcaaccctcttacaactacaac

SEQ ID NO: 17680 - DNA, 429 bp, Zea mays
  Clone ID: LIB3151-017-Q1-K1-G5
agcgaagctacctagcaacgacttaacaacattggctaccaagatattagccctccttgcgcttcttgccctttttgtgagcgcaacaaatgcgttcattattccacaatgctcacttgctcctagtgccattataccacagttcctccgaccagttacttcaatgggcttcgaacacctagctgtgcaagcctacaggctacaacaagcgcttgcggcgagcgtcttacaacaaccaattaaccaattgcaacaacaatccttggcacatctaaccatacaaaccatcgcaacacaacagcaacaacagttcctaccagcactgagccaactagatgtggtgaaccctgtcgcctacttgcaacagcaggtgcttgcatccaacccacttgctctggcatacgtagctgcataccaacaacaacaaca

SEQ ID NO: 17681 - DNA, 290 bp, Zea mays
  unsure at all n locations
  Clone ID: LIB3151-017-Q1-K1-G6
cgggcgagggacgcacacaccgaccgacccacgaacttcgatccttttgacaatccaaagccnggcggggcttgtggtgatgctgatctcagcaaagaccctcactggaaagactatcacactcgatgtggaggcttctgacaccatggacatcgtcacggccaatatccaggactaggagggcatacctgcggaccagtacaggctcaaatatgctggcaagcagatcgaggacaggcgcacacttgccgactacaacatccagaaggagagcaccctacaccttgttc

SEQ ID NO: 17682 - DNA, 264 bp, Zea mays
  unsure at all n locations
  Clone ID: LIB3151-017-Q1-K1-G7
ggccgacccacgcgttcggcaaatggcaccaagaaatccatttataggttttcttcaggggaanaaacggcggggncgtgtagcatttgccaccgccgcctcatcctctcaaccgacgtcctgctctccgtgctcgcggctgacagcgccagcgccaggacctcctgcatgccatagtggaccattctgcacaacccaatcccaagctgcctatggttctagaccagcctgacctgctgtatatggccattcctcccctgtcct

SEQ ID NO: 17683 - DNA, 442 bp, Zea mays
  Clone ID: LIB3151-017-Q1-K1-G8
cccacgcgtccggccgccgccggttcatctgccgttttcacctttccactaccctactcaaccgccccggcctgagcctcatccccagccacacccatgcccgtgccaacagccgcatccaagcccgtgccagctgcagggaacctgcggcgttggcagcaccccgatcctgggccagtgcgtcgagttcctgaggcatcagtgcagcccgacggcgacgccctactgctcgcctcagtgccagtcgttgcggcagcagtgttgccagcagctcaggcaggtggagccgcagcaccggtaccaggcgatcttcggcttggtcctccagtccatcctgcagcagcagccgcaaagcggccaggtcgcggtgctgttggcggcgcatattgcgcatcaactgacggcgatgtgcggtctgcagcagccgactccatgcccctac

SEQ ID NO: 17684 - DNA, 377 bp, Zea mays
  unsure at all n locations
  Clone ID: LIB3151-017-Q1-K1-H1
actgggtcttcagaccattagctttatctactccagagcgcagaagaacccgatcgacaccatgagggtgttgctcgttgccctcgctctcctggctctcgctgcgagcgccacctccacgcatacaagcggcggctgcggctgccagccaccgccgccggttcatctaccgccgccggtgcatctgccacctccggttcacctgccacctccggtgcatctcccaccgccggtccacctgccgccgccggtccacctgccaccgccggtccatgtgccgccgccggttcatctgccgccgccaccatgccactaccctactcaaccgccccggcctcagcctcatccncagccacacccatgcccgtgccaacaag

SEQ ID NO: 17685 - DNA, 240 bp, Zea mays
  Clone ID: LIB3151-017-Q1-K1-H10
gcgtgcggatcgatcgttacagccaacactctcccagcttgtcgacgcaacaacccccacgaggaacgagggaactcactgactgccacagaagggggagaagcgtactgctccgactaccagtgcgcgcaccagccggcagggctgctcatctccgcgacgaccagtggattaatcggcatggcggatctggccaccatacaattcgttgtaacacccgccagcctaggcgtcccggac

SEQ ID NO: 17686 - DNA, 383 bp, Zea mays
  Clone ID: LIB3151-017-Q1-K1-H2
ctcatatgtatttgcactcatgcatcacaaatcatccttctatcagtaccatcaatcatcattcatcttagtagtataggcaccaaatcaaatctgcaacatcaattatctaactccaaaaaccatgaagctggtgcttgtggttcttgctttcattgctttagtatcaagtgtttcttgtacacagacaggcggctgcagctgtggtcaacaacaaagccatgagcagcaacatcatccacaacaacatcatccacaaaaacaacaacatcaaccaccaccacaacatcaccagcagcagcaacaccaacaacaacaagttcacatgcaaccacaaaaacatcagcaacaacaagaagttcatgttcaacaacaacaacaac

SEQ ID NO: 17687 - DNA, 415 bp, Zea mays
  Clone ID: LIB3151-017-Q1-K1-H3
cgccgcccaccgctgccgcatcatccgcccgttgcccgttgtcgtcgcctggccagcggctgccgcccccattcgccgtcgcagcgcgccgagccccgtcccagatcgccgctgcgcttcctgccgccgtcggcgcggcgcagggttgaaatctatttgaccactcagttataaccatttctggtctgaagatgcttcgtcaatgacatctggaaactgtaatagtatgcgctgatcttctatgcttcaccacctgactatcaatgggctctttcctgtggaaacagcccagctacctcttcattttgataattcttcaccttgttgctcatgaggcaagaacgctgagttcagatggtgaagcacttcttgccttcaagaaagcagttacaaattcagatggagtctttctaaa

SEQ ID NO: 17688 - DNA, 333 bp, Zea mays
  Clone ID: LIB3151-017-Q1-K1-H4
tgaagttaattgatgctatcaccattcctttatttgtttcttttgacaagaaccctgacagccacccatacctgatgaaattcttccaaagctcagcccccaaggctatgctgttcttgaacttctccaccggaccttttgattctttcaagtctgcctactctgctgccgcggaggaattcaaggacaaggaaatcaagttccttattggtgacatcgaagccagccagggtgccttccagtactttggcctgaaagaggaccagacaccccttatcctcatccaggatggtgactccaagaagttcttgaaggttcacgttgaggctgacc

SEQ ID NO: 17689 - DNA, 237 bp, Zea mays
  Clone ID: LIB3151-017-Q1-K1-H5
attacctctatcacccatgatctttcgacatttatcagccctactacaacagttacctttggtgcatttattggcacaaaacatcagggcacaacagctacaacaacttgtgctagcaaaccttgctgactactctcagtaacagcagtttcttccattcaaccaactaggttcatggaactctggttcgtattcgcaacaacaacaacttccatgcagccagctgcctgctgacta

SEQ ID NO: 17690 - DNA, 338 bp, Zea mays
  Clone ID: LIB3151-017-Q1-K1-H7
cccggcctcatcctcatacacagttacacccttgctcgtgccaacagccgcatgcaagcccgtgccatgctgctgggaacctgcggcgttggcatcaccccgatcctgggccaacgcgtccagttcctgaggcatcaatgcagcccgacggctacaccctactgcttgcctcaaggccagtcgctgcggcagcagtgttgccagcagctcatagcaggtggagcctgagcaccggaaccagacgatcttcggcttggaccttcagtccatcctgcagcagcagccgcaaagcggccatgtcgcggggctggtggctgctcacatagcgcagcaactga

SEQ ID NO: 17691 - DNA, 431 bp, Zea mays
  Clone ID: LIB3151-017-Q1-K1-H8
tcggacgaaggaagagagcctaggactgtctcacttacccgaacccgttcccggcgggacttcctctcgaatcgtcccagtcgagaccctagttgccccacgaaccgaggatccaagatgagtttcctgttcgggaagaggaagacgcccgccgagctgttaagagaaaacaagagaatgctagatcgatccatcagggaaattgagcgagagagacaaggattgcaggcccaggagaaaaagctcatcactgagatcaagaaaacagctaaagaaggccagatgggagctgtcaaagtaatggccaaagatcttattcgcacccggcatcagataacaaagttctaccaactcaaatctcaactccaaggagttttctctaagagttcagacactaaaatcaactcaagctatgggtgatgccatgaagg

SEQ ID NO: 17692 - DNA, 439 bp, Zea mays
  Clone ID: LIB3151-017-Q1-K1-H9
gcaacatagaaagcacaatagtgttccaactttggcagccaaaatattttgcctcgcttatgctccttggtctttctgcaagtgctgctacggcgaccattttcccgaaatgctcgcaagctcctatagcttcccttcttcccccgtacctctcaccagcggtgtcttcggtatgtgaaaacccaattcttcaaccctacaggatccaacaggcaatcacagctggcatcttacctttatcacccttgttcctccaacaatcatcagccctattacatcagttacctttggtgcatttattggcacaaaacatcagggcacaacaactacaacaacttgtgctagcaaaccttgctgcctactctcagcaccagcagtttcttccattcaaccaactagctgcattgaactctgcttttatttgcaacaacaacaacta

SEQ ID NO: 17693 - DNA, 167 bp, Zea mays
  Clone ID: LIB3151-018-Q1-K1-A10
gttgctatctctgctggtctgaacggatgggccttataccctcactaactttcgaacagaggcttgcatgtaattttggagtctgggaaactaagacgatggagaggctctggagagagaacttttttgacactgcgacaaataactggaccaccaataacacaaga

SEQ ID NO: 17694 - DNA, 432 bp, Zea mays
  unsure at all n locations
  Clone ID: LIB3151-018-Q1-K1-A11
atctgccgccgccaccatgccactaccctactcaaccgccccggcctcagcctcatgcccagccacacccatgcccgtgccaacagccgnatncaagcccgtgccagctgcagggaacctgcggcgttggcagcaccccgatcctgggccagtgcgtcgagttcctgaggnnnnannncattcctactgtaaatctctactgtttttnccagtgccagtcgttgcggcagcagtgttgccagcagctcaggcaggtggagccgcagcaccggtaccaggcgatcttnggtttggtccttcagtccatcctgcagcagcagccgcaaagcggccaggtcgcggggctgttggcggcgcagatagcgcagcaactgacggcgatgtgcggcctgcaacagccgactccatgcccctacgctgctgccggcggtg

SEQ ID NO: 17695 - DNA, 435 bp, Zea mays
  unsure at all n locations
  Clone ID: LIB3151-018-Q1-K1-A12
gagaccaactagcaacatagaaagcacaatagtgtaccaacaatggcagccaaaatattttgcttccttatgctccttggtctttctgcaagtgctgctaccgcaaccattttcccacaatgctcacaagctcctatagcttcctttcttcccccatacctctcaccagngnnnnnnnnnnnntgtgnanacnnnntnntnnnnnnntacaggatccaacaggcaatcgcagcaggcatcttacctttatcacccttgttcctccaacaaccgtcagccctattacagcagttacctttggtgcatttgttggcacaaaacatcaaggcacaacaactacaacaacttgtgctaggaaaccttgctgcctactctcagcaacagcagtttcttccattcaaccaactggctgcattgaactctgctgcttatttg

SEQ ID NO: 17696 - DNA, 278 bp, Zea mays
  Clone ID: LIB3151-018-Q1-K1-A2
actaggagcacggaatgctcttctcattatacttcagcttttctttgctggcatcattgtcatctgtttggatgaacttctccagaaaggttatggtttgggatctggtatttctctgttcattgctaccaatatctgtgagaatatcatctggaaggcctttagccccacaaccatcaacagtggtcgtggtgctgaattcgaaggggctgtcattgcactgttccatctgttgattacgagaaccgataaagtccgtgcttttcgtgaggctttct

SEQ ID NO: 17697 - DNA, 362 bp, Zea mays
  unsure at all n locations
  Clone ID: LIB3151-018-Q1-K1-A3
ctgggtcttcagaccattagctttatctactccagagcgcaaaagaacccgatcgacaccatgagggtgttgctcgttgccctcgctctcctggctctcgctgcgagcgccacctccacgcatacaagcggcggctgcggctgccagccaccgccgccggttcatctaccgccgccggtgcatctgccacctccggttcacctgccacctccggtgcatctnccaccgccggtccacctgccgccgccggtccacctgccaccgccggtccatgtgccgccgccggttcatctgccgccgccaccatgccactaccctactcaaccgccccgggctcagcctcatccccagccacacccatg

SEQ ID NO: 17698 - DNA, 435 bp, Zea mays
  unsure at all n locations
  Clone ID: LIB3151-018-Q1-K1-A4
ccataaccttaatctactccaaagcgcataagaaacccgatcgacaccatgagggtgttgctcgttgccctcgctctcctggctctcgctgngagcgccacctncacgcatacaagcggcggctgcggctgccagccaccgccgccggttcatctaccgccgccggtgnntntnnnttctnntnnttanntgncaccttcngtgcttttcccaccgccggtccacctgccgccgccggtccacctgccaccgtcggtccatgtgccgccgccggttcatctgccgncgccaccatgccactaccctactcaaccgccccggcctcagcctcatccccagccacacccatgcccgtgccaacagccgcatccaaacccgtgccagctgcagggaacctgcggcgttggcagcaccccgatcctgggccagtgcgtc

SEQ ID NO: 17699 - DNA, 78 bp, Zea mays
  Clone ID: LIB3151-018-Q1-K1-A5
ggccacatacatcatccaaaaataagatgttacatttccagattctactgtgaaaaaaacaatgaggtagttgctcgt

SEQ ID NO: 17700 - DNA, 289 bp, Zea mays
  Clone ID: LIB3151-018-Q1-K1-A7
cccacgcgtccgggaagggcagacgggctagcaggatgagagagatcatcagcatccacatcggccaggccgggatccaggtcggcaacgcctgctgggagctctactgcctcgagcacggcatcgagcccgatggcaccatgcccagtgataccacggttggcgtcgcacatgatgccttcaacacgttcttcaccgagaccggttctggcaagcatgtgccgagggccatcttcgtcgaccttgagcccactgtcattgatgaggttcgcactggctcgtaccggca

SEQ ID NO: 17701 - DNA, 274 bp, Zea mays
  Clone ID: LIB3151-018-Q1-K1-A8
caactcgccgtctgccttctgcgcctccatttcggcctctgtcccttgcaagttcagtctcgcctccaaccatgggtaaagagaagtcccacatcaacattgtggttattggccatgtcgactctggcaagtcgaccaccacaggacaccttatctacaagcttggaggcattgacaagcgtgtgatcgagaggtttgagaaggaggctgctgaaatgaacaagcggtccttcaagtacgcctgggtgctcgacaagctcaaagcttgaacgtg

SEQ ID NO: 17702 - DNA, 334 bp, Zea mays
  Clone ID: LIB3151-018-Q1-K1-A9
ccagatcagcaaagcggcagtgcgtttataggatcgtcgaacagaacagcatgaagatggtcatcgttctcgtcgtgtgcctggctctgtcagctgccagcgcctctgcaatgcagatgccctgcccctgcgcggggctgcagggcttgtacggcgctggcgccggcctgacgacgatgatgggcgccggcgggctgtacccctacgcggagtacctgaggcagccgcagtgcagcccgctggcggcggcgccctactacgccgggtgtgggcagacgagcgccatgtaccaaccgctccggcaacagtgctgccagcagcagatgaggatgat

SEQ ID NO: 17703 - DNA, 439 bp, Zea mays
  unsure at all n locations
  Clone ID: LIB3151-018-Q1-K1-B11
gagaccaacaagcaacatagaaagtggattccagtagcaacaatagagcaacaatggcgaccaagatattttccctccttatgctccttgctctttctgcatgtgttgctaacgcgacaattttccctcaatgctcacaagctcctatagcttcccttcttcccccatacctnnnatcaannnnnnnnnnnnnntttnnnnnnnnnnnnncttcaaccctatatgctccaacaagcaatcgcagcaagcaacatacctttatcacccttgtttcaacaatcgccagccctatctttggtgcagtcattggtacaaaccatcatggcacagcagctgcagcaactcgtgctacctgtgatcaaccaagtagctctggcaaacctttctccctactctcagcaacaacaatttcttccattcaaccaactgtctacattga

SEQ ID NO: 17704 - DNA, 425 bp, Zea mays
  unsure at all n locations
  Clone ID: LIB3151-018-Q1-K1-B12
tctgtctcgcgctggcgcagcgcagggctctcgacacgcgcgcctcatccggtaccggcgtgacgagcgcctccgagctcttcaccgcgcgccgtgccgcccgtggggcccgactctccgacctggacctggatccgcacgccgacgcgctccgggaccagcacggacttggnnnnnnnnnncggttctgttgttgccttttcgttannnaagcttaacgccgtcggggacgtgcggcagcacctgcacaccggggncccgccaccgcgtcgccgcgggtcagtacaccgatcagatcttatcgtacatagacaacaacaaccttggggttggggattctgcagctcggaggaacagacttgataagctgatgttcaggacaaatgagctgcttgctggtgctgtactgcaagcacaagcgcgtg

SEQ ID NO: 17705 - DNA, 412 bp, Zea mays
  Clone ID: LIB3151-018-Q1-K1-B2
cacaaaacatcaaggcacaacaactacaacaacttgtgctaggaaaccttgctgcctactctcagcaacagcagtttcttccattcaaccaactggctgcattgaactctgctgcttatttgcaacaacaactaccattcagtcagctagctgctgcctacccccagcaatttcttccattcaaccaactggcagcattgaactctgctgcttatttacaacagcaacagctaccaccattcagccagctagctgatgtgagccctgttgccttcttgacacaacaacagttgttgccgttctacctgcacgctgcgcctaacgctggcaccctgttacaactgcaacaattgctgccattcaaccaacttgctttgacaaacccaacagcgttctaccaacaacccatcat

SEQ ID NO: 17706 - DNA, 416 bp, Zea mays
  Clone ID: LIB3151-018-Q1-K1-B3
gagaccaacaagcagcatacaaagtggaatccagtagcaacaatagaccaacaatggagaccaagatattttccctccttatgctccttgctctttctacatgtgttgctaacgcgacaattttccctcaatgctcacaagctcctatagcttccctttttcccccataccttccatcaattatagctccagtatgtgaaaacccacctcttcaaccatataggcttcaacaagcaatcgcagcaagcaacatacctttatcgcccttgttgtgtcaacaatcgccagccctatctttggtgcactcattggtacaaaccatcacggcacaacaactgcagcaacttgtgctacctgtgatcaaccaagtagctctggcaaacctttttccctactatccgcaacaacaatttctt

SEQ ID NO: 17707 - DNA, 438 bp, Zea mays
  unsure at all n locations
  Clone ID: LIB3151-018-Q1-K1-B4
attcagaaacacaccaagcgaagcacattagctacaacctaacaacaatggctaccaagatattatccctccttgcgcttcttgcgctttttgcgagcgcaacaaatgcgttcattattccacaatgctcacttgctccaagttccattattacacagttcctcccaccagttnntnnantgnncttnnnacacccanctnttcnancntttaggctacaacaagcaattgcggcgagcgtcttacaacaaccaatttcccagttgcaacaacaatccttggcacatntaacaatacaaaccatcgcaacgcaacagcaacaacaattcctaccagcactgagccacctagccatggtgaaccctgccgcctacttgcaacagcagttgcttgcatcaaacccacttgctctggcaaacgtagttgcaaaccagccac

SEQ ID NO: 17708 - DNA, 420 bp, Zea mays
  unsure at all n locations
  Clone ID: LIB3151-018-Q1-K1-B5
caaagcggcagtgcgtagagaggatcgtcgaacagaacagcatgaagatggtcatcgttctcgtcgtgtgcctggctctgtcagctgccagcgcctctgcaatgcagatgccctgcccctgcgcggggctgcagggcttgtacggcgctggcgccggcctgacgacgatgatgggnnnnnnnngnnttttnnnnttcnnnnnntnnnttnggcagccgcagtgcagcccgctggcggcggcgccctactacgccgggtgtgggcagacgagcgccatgtaccagccgctccggcaacagtgctgccagcagcagatgaggatgatggacgtgcagtccgtcgcgcagcagctgcagatgatgatgcagcttgagcgtgccgctgccgncagcagcaagctgtacgagccagctttgatgc

SEQ ID NO: 17709 - DNA, 436 bp, Zea mays
  unsure at all n locations
  Clone ID: LIB3151-018-Q1-K1-B6
ccagaatacaagggaccatggaaacaaaagataatcaagaacccgaactaccagggtaaatggaaggcacctatgattgacaacccagattttaaggatgatccatacatttacgccttcgacagcttgaagtacattggcattgagctgtggcaggttaaatcgggcactctgntngncnncatnatnatnactgatgaccctgngtngtccaagacttttgcagaggagacttggggcaagcacaaggaggcagaaaaggctgcttttgatgaggccgagaaaaagaaggaagaagaggatgccgccaagggtggggatgatgaggatgatgacctagaggatgaggaagacgatgagaaagcagacgaggacaaagccgactctgatgccgaggatagcaaggattctgatgatgagaagcaacacgacgagc

SEQ ID NO: 17710 - DNA, 381 bp, Zea mays
  Clone ID: LIB3151-018-Q1-K1-B8
ccggcctcgccgccgccgcctgcttctgcgggcgggacccagctcgcagcgtctcccctgcggcgaggtacacgatggagggagcgggaagagatgccaaccctttgagcggttacagaattggcaaaaccctgggaattgggtcgttcggtaaagtgaagatcgcggaacatatattgactggtcataaggtggcgatcaagattctcaatcgcaagaagatcagaagcatggatatggaagagaaagttaagagagaaatcaagatactgagattatttatgcatcctcatatcatacgcctttatgaggtgatagatacacctgctgatatctgtgttgttatggagtatgttaaatctggagagttgtttgattaca

SEQ ID NO: 17711 - DNA, 314 bp, Zea mays
  Clone ID: LIB3151-018-Q1-K1-B9
gggtcttaaaacaattaccttaatttactccaaagcgcaaaaaaacccgatcgacaccatgagggtgttgctcgttgccctggttttcctggttttggttggaagcgcaacctcaacccatacaaccgggggttgcggttgcaacccaccgccgccggttaatttaccgccgccggtgcatttgccacctccggttaacctgcaacctccggtgcatttccaaccgccggtcaacttgccgccgccggtccacctgcaaccgccggtcaatgtgccgccgccggttaatttgccgccgccacaatgccattacc

SEQ ID NO: 17712 - DNA, 180 bp, Zea mays
  unsure at all n locations
  Clone ID: LIB3151-018-Q1-K1-C1
gagttctatgatcnngcgagcggcnncgctctagtaggttatccaagnncttacgtaccgnnngtgcatgcgagcgtcgatagctttcttctatagtggtnncacctaaattcaaaattcatctggccgnntcgttttaccaacngnntcgtgactagggggaaaacccctgggggcgtt

SEQ ID NO: 17713 - DNA, 436 bp, Zea mays
  unsure at all n locations
  Clone ID: LIB3151-018-Q1-K1-C10
cagaccattagctttatctactccagagcgcagaagaacccgatcgacaccatgagggtgttgctcgttgccctcgctctcctggctctcgctgcgagcgccacctccacgcatacaagcggcggctgcggctgccagccaccgccgccggttcatctaccgccgccggtgcatntgnnanntncggttaaactgnctcctncggtgnttctcccaccgccggtccacctgccgccgccggtccacctgccaccgccggtccatgtgccgccgccggttcatctgccgncgccaccatgccactaccctactcaaccgccccggcctcagcctcatccccagccacacccatgcccgtgccaacagccgcatccaagcccgtgccagctgcagggaacctgcggcgttggcagcaccccgatcctgggccagtgcg

SEQ ID NO: 17714 - DNA, 164 bp, Zea mays
  Clone ID: LIB3151-018-Q1-K1-C11
gaagaaactatgtgctgtagtatagccgctggctagctagctagttgagtcatttagcggcgatgattgagtaataatgtgtcacgcatcaccatgggtggcagtgtcagtgtgagcaatgacctgaatgaacaattgaaatgaaaagaaaaaagtattgttcc

SEQ ID NO: 17715 - DNA, 412 bp, Zea mays
  unsure at all n locations
  Clone ID: LIB3151-018-Q1-K1-C12
gagaccaacaagctacttagaaagtggtaacagtagcaacaatagagcaacaatggctgccaagatattttccatccttatgctccttgctcttnctgcatgtgttgctaacgcgaccatttttcctcaatactcacaagctnntatagctgcccttcttcccccatacttngnatcaatgnntgtgataatattttatatataattattttaatcttacaggctacaacaatcattcacttcaaggaaaatannnttatcacccctgttctttcaacattcgccagccctatctttggtgcattcattgttacaaaccatcaaggcacaacaactgcagcaacttgtgctaccagtgatcagccaagtagctctggcaaacctttctccctactctcagcaacaacaattc

SEQ ID NO: 17716 - DNA, 429 bp, Zea mays
  Clone ID: LIB3151-018-Q1-K1-C2
cccacgccagtccggcagaggtgcggttgccggtagagggcgtatccgtcgtgtgggtgtcggtagcggtggaggagggatggccgacgtgcaggtgagacatacgaggcatgctctggtaggatcgacgctttccccgacgacgggcgccttatatacggaggagggaggtggaggagaacccatcagcggaggcgacgaggaagaggaggaggacgtcgacggcctcgccagcttccttgagtcggagatcctctccggatccagcgacgaggatcctattgacgagcagcggcagcagaaggaggaaggcgatgctgcgaagaataagcggaagcagggttcaggatcggacggggatggctgcagcggcagcgagggggagcagacgaagagggcgaggagggaggagaagaggaggcaagcgaa

SEQ ID NO: 17717 - DNA, 393 bp, Zea mays
  unsure at all n locations
  Clone ID: LIB3151-018-Q1-K1-C3
tctagatcgcgagcgggcgccctttttttttttntttttttttctttttttttttgcgccaaatgttccagtatcatatatgcatagacaggtacagtgtctagcagccacaaaggtggtcagcagcagggccaacaaatgaaaaaataaactacaacattgcaggatcatctgcgtcgacatattttattactgcagaattgatcccagcagcactaccggtagttacggtagacaggagtgtacatgcagctctgtgcatatttcaccaggtcccttgggggaggcagacgggtcgccaaaccgagttcataagcttttgcagccacggctgcggcaatgcgcgcaaagatctttctaatgttggtgaagggcgggaagattgatcccttg

SEQ ID NO: 17718 - DNA, 433 bp, Zea mays
  unsure at all n locations
  Clone ID: LIB3151-018-Q1-K1-C4
tgggtcttcagaccattagctttatctactccagagcgcagaagaacccgatcgacaccatgagggtgttgctcgttgccctcgctctcctggctctngctgcgagcgccacctccacgcatacaagcggcggctgcggctgccagccaccgccgccggttcatctaccgccgnnngtgcatntgncacctnncggttacctgnnnnntnntgtgcatctcccaccgccggtccacctgccgccgccggtccacctgccaccgccggtccatgtgccgccgccggttcatctgccgccgccaccatgccactaccctactcaaccgccccggcctcagcctcatccccagccacacccatgcccgtgccaacagccgcatccaaacccgtgccagctgcaaggaacctgcggcgttggcagcaccccgatcct

SEQ ID NO: 17719 - DNA, 439 bp, Zea mays
  unsure at all n locations
  Clone ID: LIB3151-018-Q1-K1-C5
cagcctagcaattagctcatcgactccagtattggagaactcgacaccatgaaggtgctgatcgttgcccttgctctcctggcgctcgctgcgagcgccgtctncagtacaagcggcggctgtggctgccagacaccaccgtttcatctaccgcctccgttctatatgccgcctncgttctatnnnnncnnnnntnnatnnnttttntnnntttcaataccccactcaaccaccgnanctaagcccgtgccagcagttcggatcctgcggcgtcggcagcgtcggcagcccgttcctgggccagtgcgtcgagttcctgaggcaccagtgcagcccggcggcgacgccctacggctcgccacagtgccaggcgctgcaacagcagtgctgccaccagatcaggcaagtggagccgctgcaccggtaccaggcgacatac

SEQ ID NO: 17720 - DNA, 433 bp, Zea mays
  unsure at all n locations
  Clone ID: LIB3151-018-Q1-K1-C6
cagcaacaacagtttctgccatcactgagccacctagccgtggtgaaccctgtcgcctacttgcaacagcagctacttgcatccaacccacttgctctggcgaacgtagctgcataccagcaacaacaacgtctgcaacagtttatgccagcgctcagtcaactagccatggtgaannntgnnnnnnnnttnntnttnttnatttgntttaattagccngntcgctgtgggcaatgcacctacgtacctacaanaacagttgctgcaacagattgtaccagctctgactcagctagctgtggcaaaccctactgcctacttgcaacagttgcttccattcaaccaactggctgtgtcgaactctgctgtgtacctacaacagcgacaacagttacttaatccactagcagtggctaacccattggtcgctaac

SEQ ID NO: 17721 - DNA, 423 bp, Zea mays
  Clone ID: LIB3151-018-Q1-K1-C7
gaccaactagcaacatagaaagcacaatagtgtaccaacaatggcagccaaaatattttgcctccttatgctccttggtctttctgcaagtgctgctacggcgaccattttcccacaatgctcacaagctcctatagcttcccttcttcccccgtacctctcaccagcggtgtcttcggtatgtgaaaacccaattcttcaaccctataggatccaacaggcaatcgcagctggcatcttacctttatcacccttgttcctccaacaatcatcagccctattacagcagttacctttggtgcatttattggcacaaaacatcagggcacaacaactacaacaacttgtgctagcaaaccttgctgcctactctcagcaacaacagtttcttccattcaaccaactagctgcattgaactctgc

SEQ ID NO: 17722 - DNA, 430 bp, Zea mays
  unsure at all n locations
  Clone ID: LIB3151-018-Q1-K1-C9
tagcaacatataaagcacaatagtgtactaacaatggctgccaaaatannnngcctncttatgctccttggtctttctgcaagtgctgctacggcgaccattttcccacaatgctcacaagctcctatagcttcccttcttcccccgtacctctcaccagcggtgtcttcggtatgtgaaaacccaattcttcaaccctataggatccaacaggcaatcgcagctggcatcttacctttatcacccttgttcctccaacaatcatcagccctattacagcagntacctttggtgcatttattggcacaaaacatcagggcacaacaactacaacaacttgtgctagcaaaccttgctgcctactctcagcaacaacagtttcttgcattcaaccaactagctgcattgaactctgcttcttatttgcaac

SEQ ID NO: 17723 - DNA, 432 bp, Zea mays
  unsure at all n locations
  Clone ID: LIB3151-018-Q1-K1-D1
ctgttctgncccannccggcggattctccccagctaagctgcgtgcgatgcttntngggctagagaaacaccagcgcaacagcggcgaggacacgtcgccggaggccaacgactccggcgagctcgacgaccggaggagcttggaatgctccacctccaccgagatgtcgagcaacagcggccacaggtcaaggaaccgggccccggacgacgacagcttcgactcggagagcagctcgtcggggccgcccacggtgaagaggtcggccgcggtggccgccttgctgccgcccttctctcggccaacgccgtccaagtgggacgacgccgagaagtggatttccagccccacgtccaaccgtactggccgtgccgggcctaccgctggaactatgccaaagaagtccgcattggcatttcctggacatggag

SEQ ID NO: 17724 - DNA, 422 bp, Zea mays
  unsure at all n locations
  Clone ID: LIB3151-018-Q1-K1-D10
attgagaccaacaagcaacatagaaagtggaatccagtagcaacaatagagcaacaatggcgaccaagatattttccctccttatgctccttgctctttctgcatgtgttgctaacgcgacaattttccctcaatgctcacaagctcctatagcttcccttcttcccccataccttncatnaatgatagcttcagtatgtgaaaacccagctcttcaaccctataggctccaacaagcaatcgcagcaagcaacatacctttatcacccttgtttcaacaatcgccagccctatctttggtgcagtcattggtacaaaccatcatggcacagcagctgcagcaactcgtgctacctgtgatcaaccaagtagctctggcaaacctttctccctactctcagcaacaacaatttcttccattc

SEQ ID NO: 17725 - DNA, 429 bp, Zea mays
  unsure at all n locations
  Clone ID: LIB3151-018-Q1-K1-D3
caacaagcaacatagaaagtggaatccagtatcaacaatagagcaacaatggcgaccaagatattttccctccttatgctcctggctctttctgcatgtgttgctaacgcgacaattttccctcaatgctcacaagctcctatagcttcccttcttcccccataccttccatnaatgatagnttcagtatgtgaaaacccagctcttaaaccctataggctccaacaagcaatcgcagcaagcaacatacctttatcacccttgtttcaacaatcgccagccctatctttggtgcagtcattggtacaaaccatcagggcacagcagctgcagcaactcgtgctacctgtgatcaaccaagtagctctggcaaacctttctccctactctcagcaacaacaatttcttccattcaaccaactgtctaca

SEQ ID NO: 17726 - DNA, 435 bp, Zea mays
  unsure at all n locations
  Clone ID: LIB3151-018-Q1-K1-D4
cgggtcccccaacccgtccgcagaccattagctttatctactccagagcgctgaagaacccgatcgacaccatgagggtggttgctcgttgccctcgctctcctggctctcgctgcgagcgccacctccacgcatacaagcggcggctgcggctgccagccaccgccgccggttcatctaccgccgccggtgcatntgccanntnnngttnanctgncanntnnnnnntcttttttaccgtcggtccacctgccgccgccggtccacctgccaccgncggtccatgtgccgccgccggttcatctgccgncgccaccatgccactaccctactcaaccgccccggcctcagcctcatccccagccacacccatgcccgtgccaacagccgcatccaaacccgtgccaacttgcaggaacctgcggcgttggcagc

SEQ ID NO: 17727 - DNA, 321 bp, Zea mays
  unsure at all n locations
  Clone ID: LIB3151-018-Q1-K1-D5
ctactccagagcgcagaaggaacgcggtcgacagcaagagggcgatggtcgttgacctctttctgctggctctcactgcgagcgccacctccacgcatacaatcggcggttgctagttgtcagccagcgctttcgactcatgtaacttcgtcggtgcatctggcagctccggtccacctgagannnttngtgcatcttgacacgactgataagctggtagccgcggtcacagctgcatcggcagtccatgtcccggtnacggttcatcatgacgacgaaggatgtcactatgctaatgaaccgatcactgcacatactcat

SEQ ID NO: 17728 - DNA, 188 bp, Zea mays
  unsure at all n locations
  Clone ID: LIB3151-018-Q1-K1-D6
ccacgcgtccgcagcaaagcggcagtgcgtttagaggatttttgaacagaacagcatgaagatggtcatcgggcgcgtcgtgtgcctggctctgtcagctgccancgcctttgcaatgcagatgccctgcccctgcgcggggctgcagggcttgtacggngctaactccagcctgacgactatgatgg

SEQ ID NO: 17729 - DNA, 436 bp, Zea mays
  unsure at all n locations
  Clone ID: LIB3151-018-Q1-K1-D7
gacccacgcgtncgnagntgnggngtgcacggcngctctgtgacttgtgaggaggaagggagcggatccatggggtcgaagcggatcctcaaggagctcaaggacctgcagaaggatcctcccacctcttgcagcgcaggccctgttgccgaagatatgttctactggcaggcgacgattatggggccatcagatagcccatacgctggtggcgtatttttggtcactattcactttccaccggactacccattcaaaccaccgaaggttgcattcaagacgaaggtttaccatncgaatatcaacagcaacgggagcatctgtcttgatatcttgaaggagcaatggagccctgcactgacagtttctaaggtcctcctctcaatttgttcccttctgacggacccaaaccctgacgatccgttggtcccagaga

SEQ ID NO: 17730 - DNA, 417 bp, Zea mays
  Clone ID: LIB3151-018-Q1-K1-D9
gaaaacccagctcttcaaccatataggcttcaacaagcaatcgcagcaagcaacatacctttatcgcccttgttgtgtcaacaatcgccagccctatctttggtgcagtcattggtacaaaccatcagggcacaacagctgcagcaactcgtgctacctgtgatcaaccaagtagctctggcaaacctttctccctactctccgcaacaacaatttcttccattcaaccaactgtctacactgaaccctgctgcttatttgcagcaacaactattaccatttagccagctagctactgcctactctcaacaacaacaacttcttccatttaaccaattggccgcactgaaccccgctgcttatttgcagcagcaaatactactaccatttagccagctagctacagcaagccgtgct

SEQ ID NO: 17731 - DNA, 387 bp, Zea mays
  unsure at all n locations
  Clone ID: LIB3151-018-Q1-K1-E10
ttcagaaacacaccaagcgaagcgcactatcaacaacctaacaacaatggctaccaagatgttatccctccttgcgcttcttgcgctttttgcgagcgcaacaaatgcgtccattattccacaatgctcacttgctcctagttccattattccacagttcctcccaccagttacttcaatggncttngaacacccagctgtgcaagcctataggctacaacatgcgattgcggcgagcgtcttacaacaaccaantgcccaattgcaacaacaatccttggcacatctaacantncanancatcgcaacgcaacagcaacaacagttcctaccagcactgagccacctagccatggtgaaccctgtcggctacttgcaacaacagct

SEQ ID NO: 17732 - DNA, 370 bp, Zea mays
  unsure at all n locations
  Clone ID: LIB3151-018-Q1-K1-E12
ctctcatctgcgtacacggtctccctttttttgtcagtagtagagtgagagtgaggcagggagtgggagacaaggggaaatggggaagggagcgcaagggagcgatgcggcggcggcgggcggcgaggtggaggagaacatggcggcgtggctggttgccaagaacaccctcaagatcatgcccttnaagctcccgtccgttggcccttatgatgttcgcgtgcgcttgaatgctgtggggatttgcggcagnaatgtgcactacctaagggagatgcgcatcgcgcacttnctggtgaatgagccgatggtgatcggtcacgattgcgctggcgttgtctaagaagtgggcgccggcgtgacgcacctg

SEQ ID NO: 17733 - DNA, 419 bp, Zea mays
  unsure at all n locations
  Clone ID: LIB3151-018-Q1-K1-E2
gctcgttgccctcgctctcctggctctcgctgcgagcgccacctncacgcatacaagcggcggctgcggctgccagccaccgccgncggttcatctaccgccgccggtgcatctgccacctccggttcacctgccacctccggtgcatctnccaccgccggtccacctgnnnnnnnnngtccacctgccaccgccggtccatgtgccgccgccggttcatctgccgccgccaccatgccactaccctactcaaccgccccggcctcagcctcatccccagccacacccatgcccgtgccaacagccgcatccaagcccgtgccagctgcagggaacctgcggcgttggcagcaccccgatcctgggccagtgcgtcgagttcctgaggcatcagtgcagcccgacggcgacgccctact

SEQ ID NO: 17734 - DNA, 438 bp, Zea mays
  unsure at all n locations
  Clone ID: LIB3151-018-Q1-K1-E4
tactccagagcgcagaagaacccgatcgacaccatgagggtgttgctcgttgccctcgctctcctggctctcgctgcgagcgccacctccacgcatacaagcggcggctgcggctgccagccaccgccgccggttcatctaccgccgccggtgcatctgccacctccggttcacctgccacctncggtgcatctcccaccgccggtccacctgccgccgccggtccacctgccaccgccggtccatgtgccgncgncggttcatctgccgccgccaccatgccactaccctactcaaccgccccggcctcagcctcatccccagccacacccatgcccgtgccaacagccgcatccaagcccgtgccagctgcagggaacctgcggcgttggcagcaccccgatcctgggccagtgcgtcgagtttctgaggcatcag

SEQ ID NO: 17735 - DNA, 380 bp, Zea mays
  unsure at all n locations
  Clone ID: LIB3151-018-Q1-K1-E5
ctgggtcttcagaccattagctttatctactccagagcgcagaagaacccgatcgacaccatgagggtgttgctcgttgccctcgctctcctggctctcgctgcgagcgccacctccacgcatacaagcggcggctgcggctgccagccaccgccgccggttcatctaccgccgncggtgcatntgnnnanntnnggtttatctgccacctntggtgcatctcccaccgtcggtccacctgccgccgccggtccacctgncaccgccggtccatgtgccgccgccggttcatctgccgncgncaccatgccactaccctactcaaccgccccggcctcagcctcatccccagccacacccatgcccgtgccaacagccgc

SEQ ID NO: 17736 - DNA, 440 bp, Zea mays
  Clone ID: LIB3151-018-Q1-K1-E6
gggcaatcgcagctggcatcttacctttatcacccttgttcctccaacaatcatcagccctattacaacagttacctttggtgcatttattggcacaaaacatcagggcacaacaactacaacaacttgtgctagcaaaccttgctgcctactctcagcaacagcagtttcttccattcaaccaactaggttcattgaactctgcttcttatttgcaacaacaacaactaccattcagccagctacctgctgcctacccccagcaatttcttccattcaaccaactagcagcattgaactctcctgcttatttacagcagcaacaactactaccattcagccagctagctggtgtgagccctgctaccttcttgacacaaccacagttgttgccgttctaccaacacgttgcgcctaacgctggcaccctcttacaactg

SEQ ID NO: 17737 - DNA, 431 bp, Zea mays
  unsure at all n locations
  Clone ID: LIB3151-018-Q1-K1-E7
gaaagcacaatagtgtaccaacaatggcagctaaaatattttgcctccttatgctccttggtctttctgcaagtgctgctacngcgaccattttcccacaatgctcacaagctcctatagcttcccttcttcccccgtacctctcaccaacggtgtcttcggtatgtgaaaacccaattcttcaaccctacaggatccaacaggnaatcgcagctggcatcttacctttatcacccttgttcctccaacaatcatcagccctattacagcagttacctttggtgcatttattggcacaaaacatcagggcacaacaactacaacaacttgtgctagcaaaccttgctgcctactctcagcaacagcagtttcttccattcaaccaactagctgcattgaactctgcttcttatttgcaacaacaacaacta

SEQ ID NO: 17738 - DNA, 432 bp, Zea mays
  unsure at all n locations
  Clone ID: LIB3151-018-Q1-K1-E8
agaccattagctttatctactccagagcgcagaagaacccgatcgacaccatgagggtgttgctcgttgccctcgctctcctggctctcgctgcgagcgccacctncacgcatacaagcggcggctgcggctgccagccaccgccgncggttcatctaccgccgccggnnnntntgncacctncggttcacctgccacctccggtgcatctcccaccgccggtccacctgccgccgccggtccacctgccaccgccggtccatgtgccgccgccggttcatntgncgccgccaccatgccactaccctactcaaccgccccggcctcagcctcatccccagccacacccatgcccgtgccaacagccgcatccaagcccgtgccagctgcagggaacctgcggcgttggcagcaccccgatcctgggccagt

SEQ ID NO: 17739 - DNA, 426 bp, Zea mays
  unsure at all n locations
  Clone ID: LIB3151-018-Q1-K1-E9
attgagaccaactagcaacatagaaagcacaatagtgtaccaacaatggcagccaaaatattttgcctccttatgctccttggtctttctgcaagtgctgctacggcgaccattttcccacaatgctcacaagctcctatagcttcccttcttcccccgtacctctnannannggngtcttnggtntgtgaaaacccaannnttnaaccctataggatccaacaggcaatcgcagctggcatcttacctttatcacccttgttcctccaacaatcatcagccctattacagcagttacctttggtgcatttattggcacaaaacatcagggcacaacaactacaacaacttgtgctagcaaaccttgctgcctactctcagcaacaacagtttcttccattcaaccaactagctgcattgaactct

SEQ ID NO: 17740 - DNA, 162 bp, Zea mays
  Clone ID: LIB3151-018-Q1-K1-F1
agctgaagttgttctgcgacaaggactaccctgagaaaccaccatcagttcgatttcattcaagaataaacttaacatgcgttaatcatgaaactggagtggttgacccgaagaagttcagcgttctgggtaactggcaacgtgattacttaatggaataca

SEQ ID NO: 17741 - DNA, 436 bp, Zea mays
  Clone ID: LIB3151-018-Q1-K1-F10
attgagaccaactagcaacatagaaagctcaatagtgtaccaacaatggcagccaaaatattttgcctccttatgctccttggtctttctgcaagtgctgctacggcgaccattttcccgcaatgctcgcaagctcctatagcttcccttcttcccccgtacctctcaccagcggtgtcttcggtatgtgaaaacccaattcttcaaccctacaggatccaacaggcaatcgcagctggcatcttacctttatcacccttgttcctccaacaatcatcagccctattacaacagttacctttggtgcatttattggcacaaaacatcagggcacaacaactacaacaacttgtgctagcaaaccttgctgcctactctcagcaacagcagtttcttccattcaaccaactaggttcattgaactctgcttcttatt

SEQ ID NO: 17742 - DNA, 175 bp, Zea mays
  unsure at all n locations
  Clone ID: LIB3151-018-Q1-K1-F11
accggccgacccacgcgtacgatttacaccaacttgtttcacagatttcttatataccgcaccaacaatggcagccaaaagacgttgtctccttatgctccctggcctnnntaatagngctgttaaggagaccattttaccataatgctttcaagttnttataggtttccttttt

SEQ ID NO: 17743 - DNA, 190 bp, Zea mays
  unsure at all n locations
  Clone ID: LIB3151-018-Q1-K1-F12
cgcagaataacccgatcgacaccatgatggttgctcgttgccctcgctctcctggctcgggctgcgagcgccacctccacgcatacaagcggcggctgcggctgccagccaccgccgccggttcatctaccgccgccggtgcatctgccacctccggttcacctgccaccttcggtgcatntnccaccgt

SEQ ID NO: 17744 - DNA, 418 bp, Zea mays
  unsure at all n locations
  Clone ID: LIB3151-018-Q1-K1-F4
cagaccattagctttatctactccagagcgcataagaacccgatcgacaccatgagggtgtcgctcgttgccctcgctctcctggctctcgctgcgagcgccacctgcacgcatacaagcggcggctgcggctgccagccaccgtcgccggttcatctaccgccgcctgtgcatctgccacctncggttcacctgccaccttcggtgcatctcccaccgccggtccacctgacgacgccagtccatctgccaccgccggtccatgtgccgccgtcggttcatctgccgtcgacaccatnnnnctaccctactcaaccgccccggccgtaagcttatacgcagccacacccatgcacgtgccaacagtctgattcaaacccgtgccacctgcaaggaacctggcgcgttagcagcaccc

SEQ ID NO: 17745 - DNA, 435 bp, Zea mays
  unsure at all n locations
  Clone ID: LIB3151-018-Q1-K1-F5
cccaattcttcaaccctacatgatccaacttgcaatcgcagcaggcatcttacctttatcacccttgttcctccaacaaccgtcagccctattacagcagttacctttggtgcatttgttggcacaaaacatcaaggcacaacaactacaacaacttgtgctaggaaaccttgctgcctactctcagcaacagcagtttcttccattcaaccaactggctgcattgaactctgctgcttatttgcaacaacaactaccattcagtcagctagctgctgcctacccccagcaatttcttncattcaaccaactggcagcattgaactctgctgcttatttacaacagcaacagctaccaccattcagccagctagctgatgtgagccctgttgcctttttgacacaacaacagntgttgccgttctacctgcacgc

SEQ ID NO: 17746 - DNA, 434 bp, Zea mays
  unsure at all n locations
  Clone ID: LIB3151-018-Q1-K1-F7
attagctttatctactccagagcgcagaataacccgatcgacaccatgagggtgttgctcgttgccctcgctctcctggctctcgctgcgagcgccacctccacgcatacaagcggcggctgcggctgccagccaccgccgccggttcatctaccgccgccggtgcatntnnnnanntncggttcacctgccacctncggtgcatntcccaccgccggtccacctgccgccgccggtccacctgccaccgncggtccatgtgccgccgccggttcatctgccgncgncaccatgccactaccctactcaaccgccccggcctcagcctcatccccagccacacccatgcccgtgccaacagccgcatccaagcccgtgccagctgcagggaacctgcggcgttggcagcaccccgatcctgggccagtgcgtcg

SEQ ID NO: 17747 - DNA, 430 bp, Zea mays
  unsure at all n locations
  Clone ID: LIB3151-018-Q1-K1-F8
cgcccgttgttgtatcttgtcactgatcagtgttgtttgctttgctttgccgtgctaatggcgcccgctccatgtggccgttcgtngcaaagggtgttccacttcggcaagggcaagagcgagggcaacaagaacatgaaggagctgctgggcggcaagggcgcgaacntggnnganatggctagcattgggctgtcggtgccgtgggggttcacggtgtcgacggaggcgtgccagcagtaccaggaggccgggcgcgccctcccgccggggctctgggcggaggtcctcgacggcctgcggtgggtggaggagtacatgggcgccgtcctcggcgacccgcggcgcccgctcctgctctccgtccgctccggcgccgcggtgtccatgcccgggatgatggacacggtgctcaacctggggctcaacg

SEQ ID NO: 17748 - DNA, 431 bp, Zea mays
  unsure at all n locations
  Clone ID: LIB3151-018-Q1-K1-F9
acagaccgagctgccgcccgctgctctctccacccctcctctcctcgcggagcaggcaggcagggattccccgtccgcggggggaggtggcattcgccgctagggcaggacggggaaggctggcgtccggcatggcgaccgaggaggtactccataaggtccagagtctnnnnnngngctgccttnatatgtacatggaccanaaagaagtggtcgatgccctctcccaccactcgaagatagagccctgcattactgaacttgtttggcgacaacttgagcatcaaaatcctctgtttttcaaggcgtattatatgaggctaatgcttaagactcaaataatggtcttcaacaagcttcttcaggatcagtttgaggttatcaataaagaattttcttcagggatcccttctatgtcgcttcctaatggc

SEQ ID NO: 17749 - DNA, 114 bp, Zea mays
  unsure at all n locations
  Clone ID: LIB3151-018-Q1-K1-G1
gttagtagaggctccgtttgatcaataagcaactacatacacccttccgtttggcgtcgcttcctccggccgtaccctccctggtcgtgtcgatcgnnnannannnactccggc

SEQ ID NO: 17750 - DNA, 335 bp, Zea mays
  Clone ID: LIB3151-018-Q1-K1-G10
ctctcatctgcgtacacggtctccctcttcctgtcagtagtagagtgagagtgaggcagcgagtgggagacaaggggaaatggggaagggagcgcaagggagcgatgcggcggcggcgggcggcgaggtggaggagaacatggcggcgtggctggttgccaagaacaccctcaagatcatgcccttcaagctcccgcccgtcggcccttatgatgtccgcgtgcgcatgaaggcagtggggatttgcggcagcgatgtgcactacctaagggagatgcgcatcgcgcacttcgtggtgaatgagccgatggtgatcgggcacgagtgcgcgggcg

SEQ ID NO: 17751 - DNA, 286 bp, Zea mays
  unsure at all n locations
  Clone ID: LIB3151-018-Q1-K1-G12
cccacgcgtccgcgagcggcagcacatcttacagctacgactacgactacgagcacctggtgctcgacccggcgtctctgggcgtgccgtgggccgacccggccgccgtggagatcccgccgcatctcctcgccgcgctcggggagtacctctccggctccgcggcccggggggacgtcgaggcggaggcggatgcggacgacgagttcatgatgcacgagttcaaggtgcggcggtgcgcgcgcgcgcggaancacgactggacggcgtgcccctacgcgcaccc

SEQ ID NO: 17752 - DNA, 436 bp, Zea mays
  unsure at all n locations
  Clone ID: LIB3151-018-Q1-K1-G2
attttgagcattcagaaacacaccaagctaatcacattagcaacaacctaacaacaatggctaccaagatattatccctccttgcgcttcttgcgctttttgcgagcgcaacaaatgcgttcattttcccgcaatgctcgcaagctcctatagcttcccttcttcccccgtnnnnnnnaccagcggngtcnnnngtatgtgaaaacccaattcttcaaccctacaggatccaacaggcaatcgcagctggcatcttacctttatcacccttgttcctccaacaatcatnagccctattacaacagttacctttggtgcatttattggcacaaaacatcagggcacaacaactacaacaacttgtgctagcaaaccttgctgcctactctcagcaacagcagtttcttccattcaaccaactaggttcattgaactc

SEQ ID NO: 17753 - DNA, 378 bp, Zea mays
  unsure at all n locations
  Clone ID: LIB3151-018-Q1-K1-G4
gtcggcccaacccttccgggggaagccgccgccgttgtcatgtccttattcaccgcaggagactgagatggggggttttggcaagacccacaagagcaatgcgtacttcaagcgtttccaggtgaagttcaagagaaggcgcgctggcaagacagactacagggccaggataaggctgattaaccaagacaaaaacaagtacaatacacccaaatacagatttgttgtgcgatttaccaacaaggacatcacagcacaaatcatctctgctagtatagcatgtgatatggttcttgcttctgcttactcgcatgagtngncacgatatggtcttgaagttggtctgaccaactatgcagctgcctactgcactggcct

SEQ ID NO: 17754 - DNA, 188 bp, Zea mays
  Clone ID: LIB3151-018-Q1-K1-G5
cagaccattagctttatctactccagagtcgcataataacccgatcgacaccatgagggggtggtcggtggccctggtctcctggcttttgcttggagcgccaacttcacgcatacaagcggcggctgcggctgccagccaccgccgtcggttcatctaccgccgccggtgcatctgtcatcctcggt

SEQ ID NO: 17755 - DNA, 322 bp, Zea mays
  unsure at all n locations
  Clone ID: LIB3151-018-Q1-K1-G6
acggacgccacgccctgcccgccggggctgcttgccactcctctctcttcctcatccatgctggccccggccccgcccccagaaccaaaccagcctccctccccagcagctcacgagagagcgcaagcaagtattactgcgcaccgcctcgcccgcgggcgtcagcgtgaagctgccgcacagctaccccgcgaggcatggggatggacgccggcggcgggaagatgccgtacagctaccccgcccaccaggacggnaagctggtgaagagcttcagccgcgtggagccccgcaagttcggcctcgccctcgtcgcggcctt

SEQ ID NO: 17756 - DNA, 427 bp, Zea mays
  unsure at all n locations
  Clone ID: LIB3151-018-Q1-K1-G7
gaggaaacctctcgactacgaggagctgaacgagaacgtcaagagggtgcagtacgcggtgcgcggggagctgtacctccgcgcctccgagctgcagaaggagggcaagaagatcatcttcaccaacgtcggcaacccgcacgccctcggccagaaaccgctcaccttnnnnnnnnngtggtggcgctgtgccaggcttcgttcctcctcgacgatccccacgtcggcctcatgttcccggcggacgccatcgctagggccaagcactatctcgccatggcgcccggcggtctaggtgcgtacagtgactcccgcggcatcccgggaatcaggaaggaagttgccgacttcatccacaagcgtgatggatatcccagtgatccggaactcatctacctcacagacggtgccagcaaaggtgtgatgc

SEQ ID NO: 17757 - DNA, 247 bp, Zea mays
  unsure at all n locations
  Clone ID: LIB3151-018-Q1-K1-G8
ctgctaccttcttgacacaaccacagttgttgccgttctaccagcacgctgcgcctaacgctggcaccctcttacaactgcaacaattgctgccattcaaccaacttgctttgacaaacccagcagcattctaccaacaacccatcattggtggtgccctcttttagatnnnnnangantnatagttcaataataaagntttttgtntgatgtttgtggcttcccagaaataagaaagtacatttct

SEQ ID NO: 17758 - DNA, 422 bp, Zea mays
  unsure at all n locations
  Clone ID: LIB3151-018-Q1-K1-G9
atccatccatcgtccgatcgatcgcctcatccaacaccacccgccgaggcgacgcgacagccgccaggaggaaggaataaactcactgccagccagtgaagggggagaagtgtactgctccgtcgaccagtgcgcgcaccgcccggcagggctgctcatctcgtcgacgannnnngnannaataagcatggnggctttggccacgttgcatctcgtcgcaacgcccgtcggnctgtgcgttccggacgcgttcacgttccgccgaggcgccgcgcagggcctgaggggggcccgggcgtctgcggcggcggacacgctcagcatgcggaccatcgcgcgcgcggtgcccaggcaccatcatcaggcgcgccaggggggcaggttcccgtcgctcgtcgtgtgcgccagcgccggcatgaacg

SEQ ID NO: 17759 - DNA, 309 bp, Zea mays
  unsure at all n locations
  Clone ID: LIB3151-018-Q1-K1-H1
gacgtgatctatatatagtgaaaatcggtttacgcgcccttactaggcctatgcctgagaggctaccacatatttacagaactctggaagagaacttcactgatagagtcccgcctttaataatacatgaaacactgaatgatgctgctgctcaatttaatgctagctagannnnnnnaccnanagacactgtcagttggtananntgggacatactgactgagagggcttgactctcaaacattagatgctgatgacatgtacatcacaagacctgagctgtgggaaggagtctacatcatgccattg

SEQ ID NO: 17760 - DNA, 295 bp, Zea mays
  Clone ID: LIB3151-018-Q1-K1-H10
ctcaaccgccccggcctcagcctcatctctcagccacacccatgcccgtgccaacagccggatccaagcccgtgccagctgcagggaacctgcggcgttggcagcaccccgatcctgggccagtgcgtcgagtttctgaggcatcagtgcagcccgacggcgacgccctactgctcgcctcagtgccagtcgttgcggcagcagtgttgccagcagctcatgcaggtggagccgcagcaccggtaccaggcgatcttcggcttggtcctccagtccatcctgcagcaacagccgc

SEQ ID NO: 17761 - DNA, 372 bp, Zea mays
  unsure at all n locations
  Clone ID: LIB3151-018-Q1-K1-H11
cggacgcgtgggcggacgcgtgggttgagaccaactagcaacatagaaagcacaatagtgtgccaacaatggcagccaaaatattttgcttccttatgctactcggtctttctgcaagtgctgctaccgcaaccattttcccacaatgctcacaagctcctatagcttcctttgttccaccatacctttcaccatcggtgtcttgagtatgtgaaaacccaattcttcaaccctacaggatccaacaggcaatcgcagcaggcatcttacctttatgacccttgttcctacgacaacnnnnagccctattacagcagttacctttggtgcatttgccggcacaaaacatgaaagcacaacaactgcaacaac

SEQ ID NO: 17762 - DNA, 412 bp, Zea mays
  Clone ID: LIB3151-018-Q1-K1-H12
aagcaacatacctttatcacccttgtttcaacaatcgccagccctatctttggtgcagtcattggtacaaaccatcagggcacagcagctgcagcaactcgtgctacctgtgatcaaccaagtagctctggcaaacctttctccctactctcagcaacaacaatttcttccattcaaccaactgtctacattgaaccgtgctgcttatttgcagcaacaactattaccattcagccagctagctactgcctactctcagcaacaacaacttcttccatttaaccaattggccgcactgaaccccgctgcttatttgcagcagcaaatactactaccatttagccagctagctgcagcaagccgtgcttccttcttgacacagcaacagttgctgcctttctaccagcagttt

SEQ ID NO: 17763 - DNA, 389 bp, Zea mays
  unsure at all n locations
  Clone ID: LIB3151-018-Q1-K1-H2
cacaaacacaccaagcgaatcgcactatcttttacctaacaacaagggttaccaagatatgtagcacctgcttgcgcttgtagcccttntagngagcgcaacagatgcgtccattattccacaatgctcactagctactagtgccattattncacagttcctgccaccagtttnnnntnagtgattanatttnntatcttatcaagnnnnnttgcaacaacaagcgcttgcggagagcgtcttacatcaaccaattgcccaactgcaacaacaatcctagncacatntgaaattacaagccatcacaacgaaacagtaacgacagtttctaccaacactgatgcacctagccatggtgaaccctgtcagctacttgcaagaacagctgc

SEQ ID NO: 17764 - DNA, 435 bp, Zea mays
  unsure at all n locations
  Clone ID: LIB3151-018-Q1-K1-H3
gatcagcaaagcggcagtgcgtagagaggatcgtcgaacagaacagcatgaagatggtcatcgttctcgttgtgtgcctggctctgtcagctgccagcgcctntgcaatgcagatgccctgcccctgcgcggggctgcagggcttgtacggcgctggcgccggcctgacgannnnnatngncnccggnggtntttaccccttcccggnntacctgaggcagccgcagtgcagcccgctggcggcggcgccctactacgccgggtgtgggcagacgagcgccatgtaccanccgctccggcaacagtgctgccagcagcagatgaggatgatggacgtgcaagccgtcgcgcagcagctgcagatgatgatgcagcttgagcgtgccgctgccgccagcagcagcctgtacgagccagctctgatgcagcagcagc

SEQ ID NO: 17765 - DNA, 226 bp, Zea mays
  Clone ID: LIB3151-018-Q1-K1-H4
acaacgcgtccgcctgtttcgtggtttttcttaaacgtgtgcaccggtgccgatcgcacgcagggaggatgcaccaccattacatgggctgctgtggcctgacggctgaggagctcgctcacgcccttgcgctagcggacgtcgtggggtgcgccggcaacatcttcggaggccacgtgaaccctgacgttaccttcggcgcgctgctcgacggtcagatctgcct

SEQ ID NO: 17766 - DNA, 349 bp, Zea mays
  Clone ID: LIB3151-018-Q1-K1-H5
gcatccggcaacatagaaagtggaatccagtagcatcaatagagcaacaatggcgaccaagatattttccctccttatgctccttgctctttctgcatgtgttgctaacgcgacaattttccctcaatgttcacaagctcctatagcttcccttcttcccccataccttccatcaatgatagcttcagtatgtgaaaacccagctcttcaaccctataggctccaacaagcaatcgcagcaagcaacatacctttatcacccttgtttcaacaatcgccagccctatctttggtgcagtcattggtacaaaccatcatggcacagcagctgcaacaactcgtgctacct

SEQ ID NO: 17767 - DNA, 418 bp, Zea mays
  unsure at all n locations
  Clone ID: LIB3151-018-Q1-K1-H6
acgaagcaacatacgtttgtcacccttgttttatactatacacaatggctaccaagatattagccctccttgcgctcctttccctttcagtgagcgcaacaactgcattcattattccacaatgctcacttgctcctaatgccattattccacagttcctcccatcagttacatcaatgggcatcgaacaccctattgtgcaagcctataggctacaacaagcgcttgcggcgagcgtcttacaacaaccgtttgcccaattacaacaacaatccttggcacatctaaccatacaaaccatcgnaacacaactagagcaacagtttgtgcccgcattgagccaactagccgcagtgaaccctgtctcctacttgcaacagcaactgcttgcatccaacccacttgctctggcgaacac

SEQ ID NO: 17768 - DNA, 433 bp, Zea mays
  unsure at all n locations
  Clone ID: LIB3151-018-Q1-K1-H7
gatcgatcgccacagccaacaccacccttcgaggcgacgcgacagccgccaggaggaaggaataaactcactgccagccagtgaagggggagaagtgtactgctccgtcgaccagtgcgcgcaccgcccggcagggctgctcatctngtcgacgaccagtggattaatnnnnnngttcntttttttcttttgctccttatattgcttttggagcaagaccggcggcctcggcgacgtcctctgcggtctgnctcctgccatggccgcgaacgggcaccgtgtcatggtcgtctctccccgctacgaccagtacaaggacgcctgggacaccagcgtcgtgtccgagatcaagatgggagacgggtacgagacggtcaggttcttccactgctacaagcgcggagtggaccgcgtgttcgttgaccacccactg

SEQ ID NO: 17769 - DNA, 439 bp, Zea mays
  unsure at all n locations
  Clone ID: LIB3151-018-Q1-K1-H9
gaccattagctttatctactccagagtcgctatgaagaacccgatcgacaccatgagggtgttgctcgttgccctcgctctcctggctctcgctgcgagcgccacctccacgcatacaagcggcggctgcggctgccagccaccgccgccggttcatctaccgccgccggtnnntntnnntttttctttttnanntgtcatcatcntnnnnccttccaccgccggtccacctgccgccgccggtccacctgccaccgacggtccatgtgccgccgtcggttaatntgnngnngtcaccatgccactaccctactcaaccgccccggcctcagcctcatccccagccacacccatgcccgtgccaacagccgcatccaagcccgtgccagctgcagggaacctgcggcgttggcagcaccccgatcctgggccagtgcgt

SEQ ID NO: 17770 - DNA, 444 bp, Zea mays
  Clone ID: LIB3151-019-Q1-K1-A1
cccacgcgtccgtagcaacatagaaagcacaatagtgtaccaacaatggcagccaaaatatgttgcttccttatgctccttggtctttctgcaagtgttgctaccgcaaccattttcccacaatgctcacaagctcctatagcttcccttcttcccccatacctctcaccagcggtgtcttcaatgtgtgaaaacccaattgttcaaccctacaggatccaacaggcaatcgcaacaggcatcttaccattatcacccttgttcctccaacaaccgtcagccctattacagcagttacctttggtccatttggtggcacaaaacatcagggcacaacaactacaacaacttgtgctagcaaaccttgctgcatactctcagcaacatcagttcttccattcaccaacttgctgcattgactctgctgcttatttgcacaacatt

SEQ ID NO: 17771 - DNA, 342 bp, Zea mays
  Clone ID: LIB3151-019-Q1-K1-A10
caccatgaaggtgctgatcgttgcccttgctctcctggcgctcgctgcgagcgccgcctccagtacaagcggcggctgtggctgccagacaccaccgtttcatctaccgcctccgttctatatgccgcctccgttctatctgccgccgcagcagcagccgcagccatggcaataccccactcaaccaccgcagctaagcccgtgccagcagttcggatcctgcggcgtcggcagcgtcggcagcccgttcctggccagtgcgtcgagttcctgaggcaccagtgcagcccgcggcgacgccctacagctcgcacagtgccagcgctgcacagcagtgctgca

SEQ ID NO: 17772 - DNA, 416 bp, Zea mays
  Clone ID: LIB3151-019-Q1-K1-A11
cccatctccaccgcgccacgaatccgcgccgggccctgccctccgtccgcccagccatccctgcggctccggccgaggccgtccccggcagccgcggccgccgtccaggcggagcaccagcccgcgttgaccgcggcgccgaagccacccgcgctaccgttccgcgtgggccacggcttcgacctccaccgcctggagcccgacctcccgctcatcatcggcggcatcaacatcccccacgaccgcggctgcgaggctcactctgacggcgacgtgctgctgcactgcgtggtggacgcgattctcggcgcgctggggctgccagacatcggccagattttcccggactccgacccccgttggaagggcgccgattctcggtgttcatgagggaagctgtgaaattgatgcatgaa

SEQ ID NO: 17773 - DNA, 374 bp, Zea mays
  Clone ID: LIB3151-019-Q1-K1-A2
attttgagcattcagaaacacaccaagcgaagcgcactagcaacgacctaacaacaatggctaccaagatattagccctccttgcgcttcttgccctttttgtgagcgcaacaaatgcgttcattattccacaatgctcacttgctcctagtgccattattccacagatcctcccaccagttacttcaatgggcttcgaacacctagctgtgcaagccaacatgcaacaacaagcgcttgctgcgagcgtcttacaacaaccaattgcccaattgcaacaacaatccttgccacatctaacaatacaagccatcacaacgcaacagcaacaacagttcctaccagcactgagccacctagccatggtgaaccct

SEQ ID NO: 17774 - DNA, 367 bp, Zea mays
  Clone ID: LIB3151-019-Q1-K1-A4
caagcaacatagaaagtggaatacagtagcaacaatagagcaacaatggcggccaagatattttccatccttatgctccttgctctttctgcatgtgttgctaacgcgaccatttttcctcaatactcacaagctcctatagctgcccttcttcccccataccttccatcaatgaccgcttcagtatgtgaaaacccagcccttcaaccctacaggctccaacaagcaatcgcaacaagcaacttacctttatcacccctgttctttcaacaatcgccagccctatctttggtgcagtcattggtacaaaccatcagggcacaacagctgcagcaactcgtgctaccagtgatcagccaagtagctc

SEQ ID NO: 17775 - DNA, 388 bp, Zea mays
  Clone ID: LIB3151-019-Q1-K1-A5
ctggtgcatatcgcgaaccatcgaaagcatttttttgttccaacaatggcagccaaaataggttgcttgcttatgctccttggtctttctgcaagtgttgctaccacaaccatttttccacaatgctcacaagctcctataacttcccttcttcccccatacctctcaccagcagagtcttcaatgtgtgaaaacccaattgttcaaccctacaggatccaacaggcaatcgcaacaggcatcttaccattatcacccttgttcctccaacaaccgtcagccctattacagcaggtaccttttgtccatttggtggcacaaaacatcatggcacaacaactacaacaacttgtgctaacaaaccttgctgcatactctcagcaacatc

SEQ ID NO: 17776 - DNA, 355 bp, Zea mays
  Clone ID: LIB3151-019-Q1-K1-A6
caagcgacatttaaagagcactacaggcgcttcactctagcaacaatggcggacaagagggggcccatacttatgctccttgctctctctgcatgcgttgctaacgcgaccatttttcctcaatactcacaagctgctatagctgtcctatttcccccataccttacatcaatgaaccgtttaactatgtgattattcattccttcaaccctacaggctccaacacgcaatcgcaacaagcaacttacctttatcacccctgttctttcaacaatcgccagccctatctttggtgcagtcattggtacagacctatcaggcacaccagctgcagcaactcgtgctaccagtgatc

SEQ ID NO: 17777 - DNA, 295 bp, Zea mays
  Clone ID: LIB3151-019-Q1-K1-A7
ctcgtctacaactcgagccacccccctttttttacactttctacctcctatcaccaatgggagccatgattcttgaccttcttgccctccttgccctttgaagaacaccgctaacttgacttttatttcacaaagctcacaagaataccctctctaccgcgaccgccgtaggcacccaatccccaactatgcgaatctccattgttcaagaagccatgcacgcacacataatactggcattcacattaaccctataacaaccatatgctctattgccacaagccttattagagca

SEQ ID NO: 17778 - DNA, 336 bp, Zea mays
  Clone ID: LIB3151-019-Q1-K1-A8
acgccgcagcgtacaaagaggaatacagtcagtccgatagagcaacaatggagggcaagatagtgtacatgcttatgctgcttgctcattctggaagagtggctcacgcgactcattgctcgtcaatactaacaagctcgtatagacgtcctgcttgcccgataccttccatcaatgacagctgcagtatgtgaaaagccagtccttcaacagtacaagctgcaacatgcaatcgcaccaagcatcttacgttgatcaccacatgactttcaacaatcgtcgcgcctatctttggtgctgtcatgtgtacaaaccatcacggcacaacagctggag

SEQ ID NO: 17779 - DNA, 309 bp, Zea mays
  Clone ID: LIB3151-019-Q1-K1-A9
ctacaatcacaaacacacctatttaagcgtttttgcaacaacctaacaacagggggtaggaagatattaaccctccttgcgcatcttgcccttttagtgagcgcaacaaacgcggacattagttgataccacacactagctcctaatgccattattccacattatctaccaccagttacttaaatggactttgaacattcagccgtgcaagcctactagctacaactatcgcttgccgagagcgtcttacaacaaccaattgctcatttgcatcaacaattcttggcacatataaacctacaaaccatc

SEQ ID NO: 17780 - DNA, 399 bp, Zea mays
  Clone ID: LIB3151-019-Q1-K1-B1
attgataccaactagcagcatacatagtgaagtacactagcaacatcttaccaccaatgggagccaagatttttgccctccttgccctccttgctctttcagcaagcgctgctacctagacttttattccacaatgctcacaacaatacctctctacggcgacagccgagggatttcaatacccaactatacaatcctacatggtacaagaggccatccaagcaagcatcttacggtcattagcattaaccctacaacaaccatattctctattgccacagccatccttagtgcatgtgtatctgcaaagaatggcggcacaacaactacaacaacagttgctaccaacaatcaatcaagtagctgcagcgaaccttgctgcttacctccagcaacaac

SEQ ID NO: 17781 - DNA, 438 bp, Zea mays
  Clone ID: LIB3151-019-Q1-K1-B11
gctccttacggggcatactcttttgccacttccccagttccaacggttgatgggcagatgtttggcgcacagcattaccagtatccaaccacgtattttcagcctcctacaccaattccttctaccactcaaagcaacctccagtcttccaacaatcctgaaaagccagcagctaaagcagatcctgccaaggcaaccgctaatggtgttccaaatggtactggtcacactcacagttacagtggaactgtaccaagccaacaaagttcagcactgacgcctgatggaacttatagggcgcccttgctaggtggagttccttctgctggttacctagacacgacatattatgggtatgacagcacaggggcacaatttgcatggtatgatggctctgcttatgcaaatggacagcaaaaaacaaccacaactaatcgt

SEQ ID NO: 17782 - DNA, 256 bp, Zea mays
  Clone ID: LIB3151-019-Q1-K1-B12
tctcttttttacttttcatactcttttttcattttcccaattccaactttttatgtgcatatgtgttattcacattattacctttatacatccacctattttcacttctttacactaatttcttttaccactcaaaacaacctttattcttacaacacatcctaaaaatccatcatctaaatcatattcttccaattcatccactcatggaaaaacaaatattacttttaacactcaccctacatttaaactaaac

SEQ ID NO: 17783 - DNA, 363 bp, Zea mays
  Clone ID: LIB3151-019-Q1-K1-B2
cgcaaattgcaccaagaaatccatcgagaggccgtcgacaggggaattaatggcgtcgtcgtctagcagcagccaccgccgcctcatcctcgcagccgccgtcctgctctccgtgctcgcggctgccagcgccagcgccgggacctcctgcgtgccggggtgggccatcccgcacaacccgctcccgagctgccgctggtacgtgaccagccggacctgcggcatcgggccgcgcctcccgtggccggagctgaagaggagatgctgccgggagctggcggacatcccggcgtactgccggtgcacggcgctgagcatcctcatggacggcgcgatcccgccgggcccggacgcgcagctgga

SEQ ID NO: 17784 - DNA, 375 bp, Zea mays
  Clone ID: LIB3151-019-Q1-K1-B3
gaccgacgcgcccagcgcgtacgagaccgctgaggacgtagctggtgctggtgcagatggactatgggagtcccagaataagattttcgacgtcctgtacaagattgctgatgttccgttcttggcaccctacaagaccaagatcattgatgttatcaacaagggagagaagcagcccaccatcactattggcattctggtctccgttgtcgtcgtgttcgttaccgttctcttcaagatcctgtttggaggcaagaagccggcggtacctgtgaaacctgcagctgaggcgaagaacctcatggccacattgaccgacggtgctggaagcattggctacaaggatgagaaagaggacgaaaaggatgagacagc

SEQ ID NO: 17785 - DNA, 401 bp, Zea mays
  Clone ID: LIB3151-019-Q1-K1-B4
cacgcgtccgattctgagcattcacaaacacaccaagcgaagctacctaacaacgacttaacaacaatggctaccaagatattagccctgcttgcgcttcttgccctttttgtgagcgcaacaaatgcgttcattattccacaatgctcacttgctcctagagccattataccacagtttctccgaccagttactgcaatgggcttcgaacacctagctgtgcaagcctacaggctacaacaagcgcttgcggcaagcgtcttacatcaaccaattaaccaattgcaacaacaatgcttggcacatgtaaccatacaaaccatcgcaacacaacagcaacaacagttgctaccagcactgagccaactagatgtggtgaaccctgtcggctacttgcaaca

SEQ ID NO: 17786 - DNA, 296 bp, Zea mays
  Clone ID: LIB3151-019-Q1-K1-B5
cgcgaacgagaccagactagcaacatagaaagtacaatagcgtaccaacaatggcagccaaaagattttgcttccttatgctccttgctctttctgcaagtgttgctaccgcaaccattttcccacaatgctcacaagctcctatagcttcccttcttcccccatacctctcaccagcggtgtcttcaatgtgtgaaaacccaattgttcaaccctacaggatccaacaggcaatcgcaacaggcatcttaccattatcacccttgtttcttcacaaccgtgagccctattacagc

SEQ ID NO: 17787 - DNA, 237 bp, Zea mays
  unsure at all n locations
  Clone ID: LIB3151-019-Q1-K1-B7
ggcgttgtgaantatctttcaatacgaaatttctggttctgaggtccatctgaggctcggaagatgagtttcgtccttgcgctcattattgtttatgtgagcgcacctggaagcgctcattgaccaacatcattgatgttatccagaagggagagaagcagcccaacatcactattggcattctggtctcctgtagcggcgagttcgttaccgttctcttcaagatcctgtttggag

SEQ ID NO: 17788 - DNA, 377 bp, Zea mays
  unsure at all n locations
  Clone ID: LIB3151-019-Q1-K1-B8
agaccattagctttatctactccagagcgcagaagaacccgatcgacaccatgagggtgtggctcgttgccctcgctctcctggctctcgctgcgagcgccacctccacgcatacaagcggcggctgcggctgccagccaccgccaccggttcatctaccgccgccggtgcatctgccacctccggttcatctgccagctncggtgcatctaccaccgccagtacacctgccgccaccagtccacctgccaccgccagtacatgtgccgcctgacgttcatctgccgccgccaccatgccactaccctactcaaccgacccggcctcagcctcatccccagccacacccatgcgcgtgccaacagccgcatccaaac

SEQ ID NO: 17789 - DNA, 441 bp, Zea mays
  Clone ID: LIB3151-019-Q1-K1-B9
agaccattagctttatctactccagagcgcagaagaacccgatcgacaccatgagggtgttgctcgttgccctcgctctcctggctctcgctgcgagcgccacctccacgcatacaagcggcggctgcggctgccagccaccgccgccggttcatctaccgccgccggtgcatctgccacctccggttcacctgccacctccggtgcatctcccaccgccggtccacctgccgccgccggtccacctgccaccgccggtccatgtgccgccgccggttcatctgccgccgccaccatgccactaccctactcaaccgccccggcctcagcctcatccccagccacacccatgcccgtgccaacagccgcatccaagcccgtgccagctgcagggaacctgcggcgttggcagcaccccgatcctgggccagtgcgtcgagt

SEQ ID NO: 17790 - DNA, 250 bp, Zea mays
  Clone ID: LIB3151-019-Q1-K1-C1
tcagaaacacaccaagcgaagcgcactagcaacgacctaacaacaatggctaccaagatattagccctacttgcgcttcttgccctttttgtgagcgcaacaaatgcgttcattattccacaatgctcacttgctcctagtgccattattccacagttcctcccaccagttacttcaatgggcttcgaacacctagctgtgcaagccaacatgcaacaacaagcgcttgcggcgagcgtcttacaacaac

SEQ ID NO: 17791 - DNA, 453 bp, Zea mays
  Clone ID: LIB3151-019-Q1-K1-C10
caactagcaacatagaaagcacaatagtgtaccaacaatggcagccaaaatatgttgcctccttatgctccttggtctttctgcaagtgctgctacggcgaccattttcccgaaatgctcgcaagctcctatagcttcccttcttcccccgtacctctcaccagcggtgtcttcggtatgtgaaaacccaattcttcaaccctacaggatccaacaggcaatcacagctggcatcttacctttatcacccttgttcctccaacaatcatcagccctattacatcagttacctttggtgcatttattggcacaaaacatcagggcacaacaactacaacaacttgtgctagcaaaccttgctgcctactctcagcaacagcagtttcttccattcaaccaactagctgcattgaactctgcttcttatttgcaacaacaacaactaccattcag

SEQ ID NO: 17792 - DNA, 443 bp, Zea mays
  Clone ID: LIB3151-019-Q1-K1-C11
cttccatcccgattcctccgcctttgactttccgcgcccgcagcccccgccggggtcctggcgacctgcctaggacagctgtcacgcccgcaaatcacgtgaccatgcccttccatgtcctcgcgtcctccactccgcccgcgattcccctccccgcacccgcagcccccgccgtcgtcctcgcggccagccgaggacagccaccgcgcccgcaaatcacacgaccatgcccttccatgcccgcaaatcacgtcaccccttccatccatggcagtcgcgctccctctgcgcccttccatccatggtcgcggatccctacgcgccgcgattcttcccatacgctccctctgcgcccttccatccatggccgcggatccccgatgttgagatctgggagctgaagctggagatctcgcggatgcgggtgcggctgacggcggacg

SEQ ID NO: 17793 - DNA, 324 bp, Zea mays
  Clone ID: LIB3151-019-Q1-K1-C12
gcagcattgaactctcctgcttatttacattagcaacaactactaccattcaggcagctggctggtgtgagccctgctaccttcttgacacaaccacagttgttgccgttctaccagcacgttgcgcctaacgctggcaccctcttacaactgcaacaattgctgccattcaaccaacttgctttgacaaacccagcagtgttctaccaacaacccatcattggtggtgccctcttttagatttcttatgagttatagttcaataataaagttttttatctgatgtttgtggcttcccagaaataagaaagtacatttctagat

SEQ ID NO: 17794 - DNA, 291 bp, Zea mays
  Clone ID: LIB3151-019-Q1-K1-C2
gcagctacgacgttcgatcgccacagtacaacacacagccgtcgaggcgacgcgacagccgtcaggaggaaggaataaactcactgccagccagcgaagggggagaagcgtactgctccgtcgaccagagcgcgcactcgccggcatggatgctcatctcgtcgacgaccagtggattaatcggcatggcgggtctggccacgttgcaggtcgtcgcaacgcccgacggcctgggcgtcccggacgcgttcacgttccagcgtggtgccgcgcatggcctgaagggggccc

SEQ ID NO: 17795 - DNA, 358 bp, Zea mays
  Clone ID: LIB3151-019-Q1-K1-C3
agaccattagctttatctactccagagcgcataagaacccgatcgacaccatgagggtgttgctcgttgccctcgctctcctggctctcgctgcgagcgccacctccacgcatacaagcggcggatgcggctgccagccaccgccgtcggttcatctaccgacgccggtgcatctgccacctccggttcacctgccacctgcggtgcatgtcccaccgccggtccacctgccgtcgccggtccacctgccaccgccggtccatgtgccgtcaacggttcatgtggcggcggcaacatgccactaccctactcaaccggccaggcctcaacctcatgctcagtcacacccatgcccgtg

SEQ ID NO: 17796 - DNA, 85 bp, Zea mays
  Clone ID: LIB3151-019-Q1-K1-C4
agctccaggcagtgtcgaatgcacattgcattaccgacctcacttgccttaccaaaccgaaactaagctgtcggtatcggatttt

SEQ ID NO: 17797 - DNA, 300 bp, Zea mays
  Clone ID: LIB3151-019-Q1-K1-C6
agacaacaacatttgttgccattttacccacaggttgtgggaaacattaatgccttcttgcaacagcaacaattgctaccattctacccacagaatgtggcaaacattgttgccttcttacaacaacaacaattgttgccatttagccaacatgctttgacgaatcctaccaccttattgcaaccgcccaccattggtggtgccatcttctagattttttatgatttatactgtaataataaagttctcatgctgatatgtgcgacctctcagtaataaagtattagagatctatatttt

SEQ ID NO: 17798 - DNA, 391 bp, Zea mays
  Clone ID: LIB3151-019-Q1-K1-C8
ggaagtttcagtcgaatgactgcgaaggttcttcaatcccaaataggcagaaatgtattaacttatgttgatgacatcattgtcaaaagcacgaagcaggagaatcatattgctgatctgcaggagaccttcgccagtttcaggcaagctggcttaaagttaaatccagaaaaatgtgtcttcggagtgaagaaggggaaatttcttggatgcttggtttcaacaaaggggattgaagctaatccaagtaaaattgaagctatacttcggatggagccaccaactacgaagaagggagctcaaagattgacaggaagattggcatctctcaatagattcatatccagatcagcagagagaaatttaccattcttcgaagtgctgaagtcag

SEQ ID NO: 17799 - DNA, 438 bp, Zea mays
  Clone ID: LIB3151-019-Q1-K1-C9
gtaccatcaatcatcattcattttattagtttacgcaccaaatcaaatctggggcatcggtgtatctaactccaaaaaccatgaagctggtgcttgtggttcttgctttcattgctttagtatcaagtgtttcttgtacacagacaggcggctgcagctgtggtcaacaacaaagccatgagcagcaacattatccacaacaacatcattcacaaaaacaacaactttaaccaccaccacaacattaccagcagcagcaacaaccacaacagcctcagcaatatcagcagggccaggaaaaatcacaacagcaacaatgtcattgccaggagcagcaacagactacaaggtgcagctataactactatagcagtagctcaaatctaaaaaattgtcatgaattcctaatgcagcagtgcagccctttggtaatgcctt

SEQ ID NO: 17800 - DNA, 386 bp, Zea mays
  Clone ID: LIB3151-019-Q1-K1-D1
cagctagaaacatacaacgctcgccccacgattcacgagtcaggacccttgtttgcctatacgctgccagcctgccttttctaagttcttcttccatcgatccaaccccacccccttctctctcgtagcaacgtttggggcgccgccgctgccgctctactcgggtgcccaggtcttgttcgggcccttcgccggcgagccaggggacactttctttggtatgagaggatcaatgtccaattattatgatgattacgatgacattgatgagattgaggatgactatgatatggatgatcctgctgatgacatggtagacgagcagcgaggggttagggattctgatgcggaggataatgattatggacaaccaaatgacaagatcc

SEQ ID NO: 17801 - DNA, 364 bp, Zea mays
  unsure at all n locations
  Clone ID: LIB3151-019-Q1-K1-D10
ggcaccaactactgcgatgacctgtgctcgtcaaccacggtgtctagtccgaggaacactagatgcctccattcaaccaagtggctggattggactcaaatcttgatgtgcagcgaccacaactaccaataatccacgtacctgatgactaccctcaaaaattacttgcgaccaaccaacagtggatagtgaattctactgcttatctacagaagcaactactactacgatacaaaccactggctggggtgagcccagctacctttttgatgcaaccacagatggcgacattataccaccacgatgttcataacgctgtcacccgntcacatatgccacatgagctgtcattcaaccaaattga

SEQ ID NO: 17802 - DNA, 310 bp, Zea mays
  Clone ID: LIB3151-019-Q1-K1-D11
accatcatcatcgagaaacaaattaagccttttacatgacctacaacctaccagcaatgggtgccaatacattatgcgtccttgcccttattgcgcttcttgcgagagcaacaaaagcattcattattgaacaatgctcactagctacacgttctaccattacacaggtgccaccactagtaacttcaacgggttgagaacaaccacctgttcatgattataggctacaacatgcaatacgagcgagcgtgttacaataactaatttcgcaactgcatcaacaactgcttgtagaactaaaattacaaac

SEQ ID NO: 17803 - DNA, 327 bp, Zea mays
  Clone ID: LIB3151-019-Q1-K1-D12
cccacgcgtacggttctagatattgagcggtcgccctttttttttttttattagtaattggttttattatattatatttttttttttttattttttttttttttatattttatatttttttataattttacattgtttattatttacaatttctattattatatattttctattaaaaataacttcaatgggggaaaaacaacatttttttatgattataggctacaacatgcaacaaaaaagagttttttacaataactattatagcaacttctaaaaaagggcccccacaacaaaaattatcaaccattggaactcaccaacatc

SEQ ID NO: 17804 - DNA, 261 bp, Zea mays
  Clone ID: LIB3151-019-Q1-K1-D2
agcgcgacgcgtagggtggatgcttactgagagaatgcaatttcaagcatgctgtgattggagtggggtcgcgtgtcaccctctggatgtgaacctcaagactccgcgatgatggtagcggacacctattgaactgcagaagaagcttgcaagctactgttagctgggatggtaccagttgtgataggaaggagcacaaagataaagaacttggtcactgacatgaaagctaggagatggaagaacgtggtgatcacaaac

SEQ ID NO: 17805 - DNA, 314 bp, Zea mays
  Clone ID: LIB3151-019-Q1-K1-D3
cccataccatcatagatagcacaatatcgtatcaattatgccagccaaactataccgcctcattaagctacgtgctctgtcttcgagcgctgctatggtcagcatggtcgcgcagcgctctcaacctccaatagctaagcttcatcgcgcatacctttcaccagggatgccttcagtgtgtgaaaatcaactacttctaccgtcatggatccagaaggcactccaggaaggcatgttacctcattgacctttagacttgaaaaaatcattagtctaattgaagcagcttccttagaggcttttatttgcacaaa

SEQ ID NO: 17806 - DNA, 343 bp, Zea mays
  Clone ID: LIB3151-019-Q1-K1-D4
attgataccaacaagcaacatatatagcgttatccagtcccatcaatacagcaacagtggagaccaagatattttccctccttatgctccgttgtatgcgtacatttcatgcatacacgacaatgttgcatctgtgatcacacgctcctatagcttccatttttccccgataccttgcatcaactatagcatcaggatgtgaaaacccatctcttacaaccatataagcttcaacaagcaatcgcaccaagcaacatacctttattgcccttggtgggtcatcaatcgccagcactatctttggtgcattctttaggacataccactagggctcatcagctgc

SEQ ID NO: 17807 - DNA, 403 bp, Zea mays
  Clone ID: LIB3151-019-Q1-K1-D6
cggacgcgtgggtggttgcttactgagagaatgcaacatcgagcattctgtgattggagtctgctcacgtgtcagctctggatgtgaactcaaggactccgtgatgatgggagcggacacctatgaaactgaagaagaagcttcaaagctactgttagctgggaaggtcccagttggaataggaaggaacacaaagataaggaactgtatcattgacatgaatgctaggattgggaagaacgtggtgatcacaaacagtaagggcatccaagaagctgatcacccggaagaagggtactacataaggtctggaatcgtggtgatcttgaagaatgcaaccatcaacgatgggtctgtcatatagatcggctgcgtttgcgtctacaaaacaagaacctacaat

SEQ ID NO: 17808 - DNA, 194 bp, Zea mays
  Clone ID: LIB3151-019-Q1-K1-D7
aacgacggacgcgatccacgcgtccgatggttactagcaacctacattttaagtgttttccgccaacatcattagcgcaaggtaggggactagctatttctgcctccacatccacgttgagcattctacctgactggccaaaacctccaatgtccatacatgctcacgtgcacctatcgcttgcaatatcctca

SEQ ID NO: 17809 - DNA, 389 bp, Zea mays
  Clone ID: LIB3151-019-Q1-K1-D8
ggtcttcataccattagctttatctactccagagcgcagaagaacccgatcgacaccatgagggtgttgctcgttgccctcgctctcctggctctcgctgcgtgcgccacctccacgcatacaagcggcggctgcggctgccagccaccgccgccggttcatctaccgccgccggtgcatctgccacctccggttcacctgccacctccggtgcatctcccaccgccggtccacctgccgccgccggtccacctgccaccgccggtccatgtgccgccgccggttcatctgccgccgccaccatgccactaccctactcaaccgccccggcctcagcctcatccccagccacacccatgcccgtgccaacagccgcatccaagcccgtg

SEQ ID NO: 17810 - DNA, 428 bp, Zea mays
  Clone ID: LIB3151-019-Q1-K1-D9
gcatttattggcacaaaacatcagggcacatcaactacaacaacttgtgctagcaaaccttgctgcctactctcagcaacagcagtttcttccattcaaccaactaggttcattgaactctgcttcttatttgcaacaacaacaactaccattcagccagctacctgctgcctacccccagcaatttcttccattcaaccaactagcagcattgaactctcctgcttatttacagcagcaacaactactaccattcagccagctagctggtgtgagccctgctaccttcttgacacaaccacagttgttgccgttctaccagcacgttgcgcctaacgctggcaccctcttacaactgcaacaattgctgccattcaaccaacttgctttgacaaacccagcagtgttctaccaacaacccatcattg

SEQ ID NO: 17811 - DNA, 428 bp, Zea mays
  Clone ID: LIB3151-019-Q1-K1-E1
cacctcccagatctcatctgcgacgacctcctccctcccgatcccgctccgtctccccccaccgccaccgctgccgctgccgcctcccccaccgaggtcttgtcttcggcgatccagccggagcccgcggcggcgacgatgtacgggtgggagatgctgtcgttcaacatacacgatgggttcctggaggccatcgtgcggggcaaccgctcgggcctcctcaccgccgccgactacaacaacctctgccagtgcgagaccctcgacgacatcaagatgcacctcaccgccaccgagtacgggccctacctccagaacgaaccttcacccttgcacacaacgacaattgtggagaagtgcactcttaaactagtcgatgagtacaagcacatgctgtgccaggccactgaaccactatctacgttttt

SEQ ID NO: 17812 - DNA, 383 bp, Zea mays
  Clone ID: LIB3151-019-Q1-K1-E11
actatgagcatcgagaaacaaatcaagccagggacatgacctacaacctaacagcaatggctgccaatatattatacgtcgttgcgcttattgggcttcgtgcgagagcaagaaaagcattcattattgaacaatgctcactagctacaagttctattattacacatgggctacgactagtaacttcaatgggtgtagaacaacctgctgctcatgattataggctacaacatgcaatagcagcgagcgtgttacgataactatgacggcaactggctgatgaactgttgggagatctaaaaatacagagcattggagctgaacaacatcaacaattactaccaggactgagacacctagtgaaagggaaccctgtcttctac

SEQ ID NO: 17813 - DNA, 456 bp, Zea mays
  Clone ID: LIB3151-019-Q1-K1-E12
attcagaaacacaccaagcgaagcacattatcaacaacctaacaacaatggctaccaagatattatccctccttgcgcttcttgcgctttttgcgagcgcaacaaatgcgttcattattccacaatgctcacttgctccaagttccattattacacagttcctcccaccagttacttcaatgggcttcgaacacccagctgtgcaagcctataggctacaacaagcaattgcggcgagcgtcttacaacaaccaatttcccagttgcaacaacaatccttggcacatctaacaatacaaaccatcgcaacgcaacagcaacaacaattcctaccagcactgagccacctagccatggtgaaccctgccgcctacttgcaacagcagttgcttgcatcaaacccacttgctctggcaaacgtagttgcaaaccagccacaacaacagctgcaacagt

SEQ ID NO: 17814 - DNA, 348 bp, Zea mays
  Clone ID: LIB3151-019-Q1-K1-E2
caacaagcaacatatatagtggaatccagtttcaacaatagagcaacaatggcgaccaagatattgttcctccttatgctccttgctctttttgcatgtgttgctaacgccacaatatcccctcaatgctcacaagctcctatagcttccgttcatctaccataccttgcatcaatgacagcttcagtttagcaaaacccacctgttcatatctatacgctggaacaagtgactccagcagtgcacataccatcatcacccatgttgcacaatcgccaatcctatctttgcagcagtcattgtaccatactcatacggcacagcttatgctgatactcatgctaactg

SEQ ID NO: 17815 - DNA, 374 bp, Zea mays
  Clone ID: LIB3151-019-Q1-K1-E3
ctagcaacatagaaagcacaatagtgtaccaacaatggcagccaaaatattttgcctccttatgctccttggtctttctgcaagtgctgctacggcgaccattttcccgaaatgctcgcaagctcctatagcttcccttcttcccccgtacctctcaccagcggtgtcttcggtatgtgaaaacccaattcttcaaccctacaggatccaacaggcaatcacagctggcatcttacctttatcacccttgttcctccaacaatcatcagccctattacatcagttacctttggtgcatttattggcacaaaacatcagggcacaacaactacaacaacttgtgctagcaaaccttgctgcctactctcagcaac

SEQ ID NO: 17816 - DNA, 417 bp, Zea mays
  Clone ID: LIB3151-019-Q1-K1-E4
caactagcaacatacatagtgaagtacactttcaacatcttagcaccaatgggagccaagagttttgcccttcttgccctccttgctctttcagcaagcgctgctacctcgacttttattccacaatgctcacaacaatacctctctccggcgacagccgtgggatttcaatacccaactatacaatcctacatggtacaagaggccctccaagcaagcatcttacggtcattagcattaaccctccaacaaccatatgctctattgcaacagccatccttagtgcatctgtatctgcaaagaatcgcgggacaacaactacaacaacagttgctaccaacaatcaatcaaatagttgcagcgaaccttgctgcttacctccagcaacaacagtttcttccattcaatcaactatat

SEQ ID NO: 17817 - DNA, 74 bp, Zea mays
  Clone ID: LIB3151-019-Q1-K1-E5
ggacttcatacaattatatctatttactgtttaacgcaaaacaaccccatcgagacgccgagggtgctgctcga

SEQ ID NO: 17818 - DNA, 389 bp, Zea mays
  Clone ID: LIB3151-019-Q1-K1-E6
ggggaagggagcgcaagggagcgatgcggcggcggcgggcggcgaggtggaggagaacatggcggcgtggctggttgccaagaacaccctcaagatcatgcccttcaagctcccgcccgtcggcccttatgatgtccgcgtgcgcatgaaggcagtggggatttgcggcagcgatgtgcactacctaagggagatgcgcatcgcgcacttcgtggtgaaggagccgatggtgatcgggcacgagtgcgcgggcgtggtcgaggaggtgggcgccggcgtgacgcacctgtccgtgggcgaccgcgtggcgctggagccgggcgtcagctgctggcgctgccgccactgcaagggcgggcggtacaacctgtgcgaggacatgaagttct

SEQ ID NO: 17819 - DNA, 310 bp, Zea mays
  Clone ID: LIB3151-019-Q1-K1-E7
tctgcgtacacggtctccctcttcctgtcattagtagagtgagagtgatgcagcgagtgggagacaaggggaaatggggaagggagcgcaagggagcgatgcggcggcggcggtcggcgaggtggaggagaacatggcggcgtggctggttgccaagaacaccctcaagatcatgccctgtaagctcccgcccgtcggcccttatgatgtccgcgtgcgcatgaaggcagtgtggatttgcggcatcgatgtgcactacctaagggagatgcgcatcgcgcacttcgtggtgaaggagccgatggtgatc

SEQ ID NO: 17820 - DNA, 413 bp, Zea mays
  unsure at all n locations
  Clone ID: LIB3151-019-Q1-K1-E8
caactagcaacatacatagtgaagtacactagcaacatcttagcaccaatgggagccaagatttttgccctccttgccctccttgctctttcagcaagcgctgctacctcgacttttattccacaatgctcacaacaatacctctctccggcgacagccgtgggatttcaatacccaactatacaatcctacatggtacaagaggccatccaagcaagcatcttacggtcattagcattaaccctccaacaaccatatgctctattgcaacagccatccttagtgcatctgtatctccaaagaatcgcggcacaacaactacaacaacagttgctaccaacaatcaatcaagtagttgcagcgaaccttgctgcttacctncagcaacaacagtttcttccattcaatcaact

SEQ ID NO: 17821 - DNA, 406 bp, Zea mays
  Clone ID: LIB3151-019-Q1-K1-F1
gttctgtgagggcaatctgtaccaagtttgtaggaacgcaagttgcactgttactctgcagctgcctacaggaggtcagcgtcgcgttgcggaaaatgagatattggtgctgaggtattatcctcgacggcagccttgctgggatgtggtgaagaacctgggaggtcactcactttttgttggaaggaacaatgcagtgtcaatgtatgcagagggtgtgccaggattgaggggcaactgcgtatactggataggtgggcgcggcaaggatcaaggcatggtctttgacatggaatctgggagctccacgccgtgcacggctcctcctgttagccttttacctgggcatccacatagcacaatctgctggtacttcttgagcgatttaatgagcatcaacaacagc

SEQ ID NO: 17822 - DNA, 226 bp, Zea mays
  Clone ID: LIB3151-019-Q1-K1-F10
aactagcaacccaaaagcctttaacgtctaacacaggaaaccaaaagagcttacgggcttattctccttggccattcctcaaatggtgacaccgcaaccatattgctactatgctcacaaacctctaattcttcccttgttcctccaaaccacttaccatcggtgtcttcaaagcccgaaaatccaattgttcaagcccccacgagccaacaggcgaagcgcaaca

SEQ ID NO: 17823 - DNA, 165 bp, Zea mays
  unsure at all n locations
  Clone ID: LIB3151-019-Q1-K1-F11
ggccgacccacgcgtccncttatatccatatacctacacattatacttttcacacccgcaacccccgccggggaactggtaacaattaaaaaacacctctcacccccccaaatcacatataccataccctcaaatttcctcacaattaacacattatcctaaatt

SEQ ID NO: 17824 - DNA, 294 bp, Zea mays
  Clone ID: LIB3151-019-Q1-K1-F12
tcggttggcaccaccccgatcctggttcagcttttcgagcccctgaggcatcagggcggcctgtcgaccactccctactgctcgcctcactcccagactacgcgaccatagtgtttccagcatctcaggcatgtatagccgcagcacctgcaccatacgattttctgcttggtccttcagtccatcctgaagcagtattctcaaatctgtcatttcaagaatgctgatggcaccgcatatagcccattaactgacgtctatgttccacctgcatcagacgaccttattctccta

SEQ ID NO: 17825 - DNA, 267 bp, Zea mays
  Clone ID: LIB3151-019-Q1-K1-F2
ctagtcgcaacatacatagtgaagtacactatcaacatttgaacaccaatgggagccaagggtgctgggctgcttgccctccttgctgtgtcatcaatcgctgctccctctacttttattccacaaggcgcagatgactacctctctccggtgacagaccggtgatttctatactgcactatacaatctatacatcgtacaagaagccatccaagccagcgtcttaccgtcattagcataaacagttcaacaaccagatgctctatt

SEQ ID NO: 17826 - DNA, 370 bp, Zea mays
  Clone ID: LIB3151-019-Q1-K1-F3
cccacgcgtccgattttgagcattcagaaacacaccaagcgaagcgcactagcaacgacctaacaacaatggctaccaagatattagccctccttgcgcttcttgccctttttgtgagcgcaacaaatgcgttcattattccacaatgctcacttgctcctagtgccattattccacagtttctcccaccagttacttcaatgggcttcgaacacctagctgtgcaagccaacatgcaacaacaagcgcttgcggcgagcgtcttacaacaaccaattgcccaattgcaacaacaatccttgccacatctaacaatacaagccatcacaacgcaacagcaacaacagtttctaccatcactgaaccaact

SEQ ID NO: 17827 - DNA, 190 bp, Zea mays
  Clone ID: LIB3151-019-Q1-K1-F4
ggaaggcgtagttggatgtcgttagaggctctgcaatcccaaatacgcagagaggggtggacgcatcttgatgacatcattgtctaaaggacgaagcgggccaatcttattgctgctcttcgagagagcttataccagcgaaggctagctgggctaatgtcgaatccagacaaatgtgtgttctgagtga

SEQ ID NO: 17828 - DNA, 232 bp, Zea mays
  Clone ID: LIB3151-019-Q1-K1-F5
cagaccattagctctatgtactccagagcgcagaagaacccgatcgacaccatgagggtgacgctcgttgaccatattctcctggatatcgctgagagcgccacctacactcatacaataggcgggtgctgctgccaccaccgacagaactttatataccactgactgtgcattggccacatccagttaacctgccagcatccatacatttctcaacgactgaacacctgcc

SEQ ID NO: 17829 - DNA, 394 bp, Zea mays
  Clone ID: LIB3151-019-Q1-K1-F6
ctggacgtcagcctagcaattagctcatcgactccagattggagaactcgacaccatgaaggtgctgatcgttgcccttgctctcctggcgctcgctgcgagcgccgcctccagtacaagcggcggctgtggctgccagacaccaccgtttcatctaccgcctccgttctatatgccgcctccgttctatctgccgccgcagcagcagccgcagccatggcaataccccactcaaccaccgcagctaagcccgtgccagcagttcggatcctgcggcgtcggcagcgtcggcagcccgttcctgggccagtgcgtcgagttcctgaggcaccagtgcagcccggcggcgacgccctacggctcgccacagtgccaggcgctgcagcagcagtgc

SEQ ID NO: 17830 - DNA, 378 bp, Zea mays
  Clone ID: LIB3151-019-Q1-K1-F7
gagaccgcaggcgccgtcaccaccaccactacccaggcgccaccggcatccgagaaggcagccgtcgccgagcccgtcaaggacgagctgtgagcatccaaggtgtggacggctgtggctgcgtaagcatgggaggaaaacctggcgctaacgtgcctccaacgcctagtttttgcgggaccagagggagagagagagagggacggagttagagagagaggggatctgcgacgtgttttgctctgcggcggcatgtctgtgtatcccattgaggttatgtacacaattacaccgcggtcggtgggtgttttttagttaattatcacatgtgacagtagaaaggaacagattgcgatgaggttgaatggatgaataaat

SEQ ID NO: 17831 - DNA, 287 bp, Zea mays
  Clone ID: LIB3151-019-Q1-K1-F8
ggaagaccgggccgacccacgcgtacggagaccgaagcgcctgtactataccacttcacagcgccaccggcatccgagaagggagacttcgcctagcccgtcaaggacgagcttgtagcattcaaggtgacgacagcttttgctgtgtatgcatagaaggtaaacttggcgctaacgttcctccatagcctacattattcataaccacagggtgagagagagaagcactgcaacagagtgagatgcgaccagcgaccggagtaggtatgatacgttttttatgctta

SEQ ID NO: 17832 - DNA, 343 bp, Zea mays
  Clone ID: LIB3151-019-Q1-K1-G1
gggcacaacaactacaacaacttgtgctagcaaaccttgctgcctactctcagcaacagcagtttcttccattcaaccaactagctgcattgaactctgcttcttatttgcaacaacaacaactaccattcagccagctacctgttgcctacccccagcaatttcttccattcaaccaactggcagcattgaactctcctgcttatttacagcagcaacaactactaccattcagccagctagctggtgtgagccctgctaccttcttgacacaaccacagttgttgccgttctaccagcacgctgcgcctaacgctggcaccctcttacaactgcaacaatt

SEQ ID NO: 17833 - DNA, 453 bp, Zea mays
  Clone ID: LIB3151-019-Q1-K1-G10
attaagaccaactagcaacatataaagcacaatagtgtaccaacaatggcaacgaaaatattttgcttccttatgctccttggtctttctgcaagtgctgctaccgcgaccattttcccgcaatgctcacaagctcctatagcttcccttcttcccccatacctctcaccagcggtgtcttcagtatgtgaaaacccaattcttcaaccctacaggatccaacaggcaatcgcagcaggcatcttacctttatcacccttgttcctccaacaaccgtcagccctattacagcagttacctttggtgcatttgttggcacaaaacatcagggcacaacaactacaacaacttgtgctagcaaaccttgctgcctactctcagcaacagcagtttcttccattcaaccaactggctgcattgaactctgctgcttatttgcaacaacaactacca

SEQ ID NO: 17834 - DNA, 270 bp, Zea mays
  Clone ID: LIB3151-019-Q1-K1-G11
gacggccacttacaacgtacacaatgttttgtatttcttaccacccacgccccatgtgcggcctagtattttgcactgggatcccatactgctcattcaacaagagcctgctactcgactttggtttccacaatgctcacaacaaaccctctctttggctacagccacgaaattttaatatccaacatattcaaccctacacaccttaaagaggccattgcatggaccacttttaccagacacataaccattagcccttgacaaacatat

SEQ ID NO: 17835 - DNA, 307 bp, Zea mays
  Clone ID: LIB3151-019-Q1-K1-G12
accagtatccaaccacgtattttcagcctcctacaccaattccttctaccactcaaagcaacctacagtcttccaacaatcctgaaaagccagcagctaaagcagatcctgtcaaggcaaccgctaatggtgttccaaatggtactggtcacactcacagttacagtggaactgtaccaagccaacaaagatcagcactgacgcctgatggaacttatatggcgcccttgctatgtggagctccttctgctggttacctatacacgacatattattggtatgacagcacttgggcacaatttgaatg

SEQ ID NO: 17836 - DNA, 362 bp, Zea mays
  Clone ID: LIB3151-019-Q1-K1-G2
attgagaccaacaagcaacatagaaagtggtatccagtttcaacaatagagcaacaatggcgaccaagatattttccctccttatgctccttgctctttctgcatgtgttgctaacgcgacaattttccctcaatgctcacaagctcctatagcttcccttcttcccccataccttccatcaatgatagcttcagtatgtgaaaacccagctcttcaaccctatatgctccaacaagcaatcgcagcaagcaacatacctttatcacccttgtttcaacaatcgccagccctatctttggtgcagtcattggtacaaaccatcatggcacagcagctgcagcaactcgtgctacctgtgatc

SEQ ID NO: 17837 - DNA, 331 bp, Zea mays
  Clone ID: LIB3151-019-Q1-K1-G3
ctagcaacatagaaagcacaatagtgtaccaacaatggcagccaaaatattttgcctccttatgctccttggtctttctgcaagtgctgctacggcgaccattttcccgcaatgctcgcaagctcctatagcttcccttcttcccccgtacctctcaccagcggtgtcttcggtatgtgaaaacccaattcttcaaccctacaggatccaacaggcaatcgcagctggcatcttacctttatcacccttgttcctccaacaatcatcagccctattacaacagttacctttggtgcatttattggcacaaaacatcaaggcacaacaacta

SEQ ID NO: 17838 - DNA, 271 bp, Zea mays
  Clone ID: LIB3151-019-Q1-K1-G5
cgacccacgcgacccacgcgtcacatacaatgaacactagtgctcctttaccgttctacaaactattaggcacaggggggcttcttgttctatctactagtgctgctacaaccaccatattacttgcatgcatccaagctactattcattcagttatttgttgtcaactctcagcaactgcgtccatacaatcaaaagacccaattgtactatcctgcttgattcaagacgcaaccactactagcattcaacctttttgacggttggacct

SEQ ID NO: 17839 - DNA, 58 bp, Zea mays
  Clone ID: LIB3151-019-Q1-K1-G7
gttctagatcgccgagcggcctcccttctttttttatgttcttatcctaacgggggac

SEQ ID NO: 17840 - DNA, 395 bp, Zea mays
  Clone ID: LIB3151-019-Q1-K1-G8
atattcagcattcacaaacacaccaagcgaagcgcactagcaacaacctaacaacaatggctaccaagatattagccctccttgcgcttcttgcccttttagtgagcgcaacaaatgcgttcattattccacagtgctcacttgctcctagtgccattattccacagttcctcccaccagttacttcaatgggcttcgaacatccagccgtgcaagcctacaggctacaactagcgcttgcggcgagcgtcttacaacaaccaattgcccaattgcaacaacaatccttggcacatctaaacctacaaaccatcgcaacgcaacagcaacaacagtttctgccatcactgagccacctagccgtggtgaaccctgtcgcctacttgcaacagcag

SEQ ID NO: 17841 - DNA, 71 bp, Zea mays
  Clone ID: LIB3151-019-Q1-K1-G9
ccgggccgacccacgcgtgcacatacctacaatataactacattttctttctattaaacaccaaacaactc

SEQ ID NO: 17842 - DNA, 254 bp, Zea mays
  Clone ID: LIB3151-019-Q1-K1-H1
gcaattagctcatcgactccagattggagaactcgacaccatgaaggtgctgatcgttgcccttgctctcctggcgctcgctgcgagcgccgcctccagtacaagcggcggctgtggctgccagacaccaccgtttcatctaccgcctccgttctatatgccgcctccgttctatctgccgccgcagcagcagccgcagccatggcaataccccactcaaccaccgcagctaagcccgtgccagcagttcggat

SEQ ID NO: 17843 - DNA, 329 bp, Zea mays
  Clone ID: LIB3151-019-Q1-K1-H10
cgcaaattgcaccaagaaatccttcgagaggccgccgacaggggaattaatggggtcggggtataacaacagtcaccgtcgtctcattctctgagccgtcgtcctgctctccgtgctcgcggatgccagcaccagcgccagtacctcctgcgtgccggggtgggccattccgcacaacccgctcccgagctgccgctggtacttgaccagccggacctgccgcatcaggccgcgccttccggggccggagctgaaaaggacatgctgccgggagctggcaggacatcctggcgtactgacggtgcacggcgctgagcatcctaatggac

SEQ ID NO: 17844 - DNA, 441 bp, Zea mays
  Clone ID: LIB3151-019-Q1-K1-H12
ctcgcttccacccatccgccgctgctcgtttccgtctcccggctcttcggcgtctagctcgtcaacgcgcgcgtccgccgtcggctcctccgacgggcgtcccaccgcaggggaatacagatcgtcgatccgctgggcttgcaaacatgtatatccgagtgaagcgcaacaagagtacctacttcattcaatgtgaaccaacagagacagctttgagcatcaaacagaagttgcactcgctgatagatcaacctcctagtagtcagcagttggtcttgtggcctagcagtgatgtgcttgaagactcaaagactttggcagatcaaaaggtggataacgattccattgttgcattggcactaagaaaagatgacggtgagtttgaggaagtatttatcgctaggccggaggatttcatgtcatcatcatgattaagattag

SEQ ID NO: 17845 - DNA, 240 bp, Zea mays
  Clone ID: LIB3151-019-Q1-K1-H2
accgcgcccacctaagcctgttgagagatgactgagggatgcccagaggcacacaaacaacgtcgacgacgtatgcctcgtgggcggcttcactatgatgctccgggtaccatttttgctcacatgactacattctcctataggagctgttcatgaacattacctctgaccaggcgcgtgtctatggtgttaatacccaagcctttatccttataggatacagcaagcaaaaggtgctgg

SEQ ID NO: 17846 - DNA, 362 bp, Zea mays
  Clone ID: LIB3151-019-Q1-K1-H3
cgcgttcttcagaccattagctgtatctactccagagctcagaagaacccgatcgacaccatgagggtgttgctcgttgccctcgctctcctggctctcgctgcgagcgccacctccacgcatacaagcggcggctgagggtgccaaccaccgccgcctgttcatctaccaccgccggagcatctgccaccttctgtttatctgtcacctccggagcatctcccaccaccggtccacctgccgtcgccggtccacctgccaccgccggtacatgtgccaccgacggttcatctgccgccgccaccatgccactaccctactcaaccgccccggcctcagcctcatccccagccacacccatg

SEQ ID NO: 17847 - DNA, 387 bp, Zea mays
  Clone ID: LIB3151-019-Q1-K1-H4
cttcaagaggggatcatcagattgggcttattattccttactactgcatgcagaggccggtgtttgtgtaaaccctgagcggcaagactatcaccctcgaggtggagtcgtctgacaccattgacaacgttaaggccaagatccaggacaaggagggcatccccccagaccagcagcggctcatcttcactggcaaacagcttgaggacggtcgcacgcttgctgactacaacatccagaaggagagcaccctccaccttgtgctccgtctcaggggaggcatgcacatctttgtgaaaaccctgaccggcaagactatcaccctcgaggtggagtcctctgacaccattgacaacgtcaaggccaatatccatgacaaggagggca

SEQ ID NO: 17848 - DNA, 280 bp, Zea mays
  Clone ID: LIB3151-019-Q1-K1-H5
ctcatcgactccagattggagatctcgacatcatgaaggtgctgatcggtgcgcttgctgtcctggcgctcgctgcgagcgccggctccagtacaagcggcggctgtggctgccagacaccaccgtttcatgtaccgcctccgttctatatgcccgccttcgctctatctggcgccgcagcaacagtcgtagacatggcaataccccactcaaccaccgcagctaagcccgtgccagcagctcggatcctgcggcgtctgcggcgttgcagaccgttcct

SEQ ID NO: 17849 - DNA, 408 bp, Zea mays
  unsure at all n locations
  Clone ID: LIB3151-019-Q1-K1-H6
ccggnccgggacgacccaggcgtaccgcacgcgtccggactaaccatcttgatagatcgctcagggatgcaccaacgcagccaaccaagcgagcttgcctccttacgctccgcggcctgtctgcaagtgctgctgcggcgaccattctcccgtaatgctcgcaagctcatatagctttacttcttccctcgtacctatcaccagcggattctatggttgtgtgacaacatgcttctaccaccctacatgacccaacgagcaatcgcatggagcttcttaccttgaccacccttgctccctcaatgatcatcacgactaccacaacagtgatgtttgcatcatttattggcacaaaacatcagggcacaacaactacaacgacttgtgctagcaaaccttgctgtctac

SEQ ID NO: 17850 - DNA, 330 bp, Zea mays
  unsure at all n locations
  Clone ID: LIB3151-019-Q1-K1-H7
attttgagcattcagaaacacaccaagcgattcgcactatcaacgacctaacaacaatggggaccaagatattagcccttcttgcgcttcttgccctttttgtgagcgcttcttatgcgtccattattccacaatgctcacttgctcctagtgccattattccacagatcctcccaccagttacttcaatgttttttttactcctagctgngcaagccaacatgcaacaacaagcgcttgctgcgagcgtcttacaacaaccaattgcccaattgcaacaacaattcttgccacatctaacaatacaagccatcacaacgcaacagcaac

SEQ ID NO: 17851 - DNA, 191 bp, Zea mays
  Clone ID: LIB3151-019-Q1-K1-H8
ggagcgcacacacacacaggcagatctacctcgaacttattattccttactactgcattcaaagatcggtgttgctctaaaccgactgaaccatgactgtgacaatggcagtgacgacgattgtgaccatgagcaaggagagctgctcgttattgcacgtgcaggccgtggcattccattagaagccacta

SEQ ID NO: 17852 - DNA, 415 bp, Zea mays
  Clone ID: LIB3151-020-Q1-K1-A10
gttctagatcgcgagcggctgcccttttttttttttttttttttttttttttttttttttttttttttttttttttttttttttttttttttttttttttttttttttttttttttttttttttttttttttttttttttaaaaaaacaaaaaaagccttttttttttttggggaaacccaaaaccataaaaaaaaaattttttttttgaactattacccaaaaaaaaaaaaaaaaggggccgcccttttaaaaaaaacaatttttacttccgcgggttgcaaagtattttttttttttttggggcccctaaattaaatttcctggccggtgttttaaaaatccctaaatggaaaaaccctggtgttaacaaaattatttgtttttaaaaaaaatccctttttcccaagttggtt

SEQ ID NO: 17853 - DNA, 452 bp, Zea mays
  Clone ID: LIB3151-020-Q1-K1-A11
gggccagtgcgtcgagtttctgaggcatcagtgcagcccgacggcgacgccctactggtcgcctcagtgccagtcgttgcggcagcagtgttgccagcagctcaggcaggtggagccgcagcaccggtaccaggcgatcttcggcttggtcctccagtccatcctgcagcagcagccgcaaagcggccaggtcgcggggctgttggcggcgcagatagcgcagcaactgacggcgatgtgcggcctgcagcagccgactccatgcccctacgctgctgccggcggtgtcccccactgaagaaactatgtgctgtagtatagccgctggctagctagctagttgagtcatttagcggcgatgattgagtaataatgtgtcacgcatcaccatgggtggcagtgtcagtgtgagcaatgaccttaatgaacaattgaaatgaaaagaaaaaaga

SEQ ID NO: 17854 - DNA, 75 bp, Zea mays
  unsure at all n locations
  Clone ID: LIB3151-020-Q1-K1-A12
cgggccgaccgnngcgtgagggggtagatcccgagcgtctgcccttctttttttcattttttctttaactcctta

SEQ ID NO: 17855 - DNA, 368 bp, Zea mays
  Clone ID: LIB3151-020-Q1-K1-A2
attttgagcattcagaaacacaccaagctaagcgcactagcaacaacctaacaacaatggctaccaagatattatccctccttgcgcttcttgcgctttttgcgagcgcaacaaatgcgtccattattccacaatgctcacttgctcctagttccattattccacagttcctcccaccagttacttcaatggccttcgaacacccagctgtgcaagcctataggctacaacaagcgattgcggcgagcgtcttacaacaaccaattgcccaattgcaacaacaatccttggcacatctaacaatacaaaccatcgcaacgcaacagcaacaacagttcctaccagcactgagccacctaaccatggtg

SEQ ID NO: 17856 - DNA, 367 bp, Zea mays
  Clone ID: LIB3151-020-Q1-K1-A4
caacacgcaacatagaaagtggaatacagtggcaacaatagagcaacaatggcggccgggatattttgcatccttatgctccttgctctttctgcatgtgttgctaacgcgaccatttttcctgaatactcacaagctcctatagctgcccttcttgccccataccttccatcaatgaccgcttcagtatgtgaaaacccagcccttcaaccctacaggctccaacaagcaatcgcaacaagcaacttacctttatcacccctgttctttcaacaatcgccagccctatctttggtgcagtcattggtacaaaccatcagggcacaacagctgcagcaactcgtgctaccagtgatcagccaagtag

SEQ ID NO: 17857 - DNA, 436 bp, Zea mays
  Clone ID: LIB3151-020-Q1-K1-A5
accaactagcaacatagaaagcacaatagtgtaccaacaatggcagccaaaatatttgggctccttatgctccttggtctttctgcaagtgctgctacggcgaccattttcccacaatgctcacaagctcctatagcttcccttcttcccccgtacctctcaccagcggtgtcttcggtatgtgaaaacccaattcttcaaccctataggatccaacaggcaatcgcagctggcatcttacctttatcacccttgttcctccaacaatcatcagccctattacagcagttacctttggtgcatttattggcacaaaacatcagggcacaacaactacaacaacttgtgctagcaaaccttgctgcctactctcagcaacaacagtttcttccattcaaccaactagctgcattgaactctgcttcttatttgcaac

SEQ ID NO: 17858 - DNA, 178 bp, Zea mays
  Clone ID: LIB3151-020-Q1-K1-A6
acaagatctggtcataaacagagcaccatggtccctatacaagcggccgcgagatgatggactgttatgctctcaaggcttatgttaaagagctggtgccacgatcatttttgcccaaaccaaacaatgacgtatatcttcctgttcttctaccgaagatgtgagaagacatgtgttg

SEQ ID NO: 17859 - DNA, 431 bp, Zea mays
  Clone ID: LIB3151-020-Q1-K1-A7
ctgggtcttcagaccattagctttatctactccagagcgcagaagaacccgatcgacagcatgagggtgttgctcgttgccctcgctctcctggctctcgctgcgagcgccacctccacgcatacaagcggcggctgcggctgccagccaccgccgccggttcatctaccgccgccggtgcatctgccacctccggttcacctgccacctccggtgcatctcccaccgccggtccacctgccgccgccggtccacctgccaccgccggtccatgtgccgccgccggttcatctgccgccgccaccatgccactaccctactcaaccgccccggcctcagcctcatccccagccacacccatgcccgtgccaacagccgcatccaagcccgtgccagctgcagggaacctgcggcgttggcagcaccccgat

SEQ ID NO: 17860 - DNA, 437 bp, Zea mays
  Clone ID: LIB3151-020-Q1-K1-A8
aagcaacataaaaagtggaatccagtattaacaatagagcaacaatggcgggcaagatggtttccctccttatgctccttgctctttctgcatgtgttgctaacgcgacaattttccctcaatgctcacaagctcctatagcttcccttcttcccccataccttccatcaatgatagcttcagtatgtgaaaacccagctcttcaaccctataggctccaacaagcaatcgcagcaagcaacatacctttatcacccttgtttcaacaatcgccagccctatctttggtgcagtcattggtacaaaccatcagggcacagcagctgcagcaactcgtgctacctgtgatcaaccaagtagctctggcaaacctttctccctactctcagcaacaacaatttcttccattcaaccaactgtctacattgaaccgtgct

SEQ ID NO: 17861 - DNA, 392 bp, Zea mays
  Clone ID: LIB3151-020-Q1-K1-A9
gcgaaggcgaccattccttcttcgctccttcgccgccgctatggttaagtactcgcaggagccgggcaaccctaccaaatcggccaaggccatgggaagggacctgagggtccacttcaagaacacaagggagacagcttttgcgcttcgcaagctgcctttgaccaaggctaagcgataccttgaggatgttattgctcacaagcaggcaattcccttccggagatactgtggaggtgttggtcgcaccgcacaagcaaagtctcgccactccaatgggcagggtcgctggcctgttaagtcagccaggttcatattggatttgctgaagaatgctgagagtaacgctgatgtgaaaggcttggacgtggacaacctctatgtttcacaca

SEQ ID NO: 17862 - DNA, 446 bp, Zea mays
  Clone ID: LIB3151-020-Q1-K1-B10
caactagcaacatagaaagcacaatagtgtaccaacaatggcagccaaaatattttgcggccttatgctccttggtctttctgcaagtgctgctaccgcaaccattttcccacaatgctcacaagctcctatagcttcctttcttcccccatacctctcaccagcggtgtcttcagtatgtgaaaacccaattcttcaaccctacaggatccaacaggcaatcgcagcaggcatcttacctttatcacccttgttcctccaacaaccgtcagccctattacagcagttacctttggtgcatttgttggcacaaaacatcaaggcacaacaactacaacaacttgtgctaggaaaccttgctgcctactctcagcaacagcagtttcttccattcaaccaactggctgcattgaactctgctgcttatttgcaacaacaactaccat

SEQ ID NO: 17863 - DNA, 393 bp, Zea mays
  Clone ID: LIB3151-020-Q1-K1-B11
gcgctacagaccgccccggcctcagcctcatccccagccacacccatgcccgtgccaacagccggatccaagcccgtgccagctgcagggaacctgcggcgttggcagcaccccgatcctgggccagtgcgtcgagttcctgaggcatcagtgcagcccgacggcgacgccctactgctcgcctcagtgccagtcgttgcggcagcagtgttgccagcagctcaggcaggtggagccgcagcaccggtaccaggcgatcttcggcttggtcctccagtccatcctgcagcagcagccgcaaagcggccaggtcgcggggctgttggcggcgcagatagcgcagcaactgacggcgatgtgcggcctgcatcagccgactccatgcccctacgc

SEQ ID NO: 17864 - DNA, 419 bp, Zea mays
  Clone ID: LIB3151-020-Q1-K1-B12
ggggcttcagaccattagctttatctactccagagcgcagaagaacccgatcgacaccgggagggtgttgctcgttgccctcgctctcctggctctcgctgcgagcgccacctccacgcatacaagcggcggctgcggctgccagccaccgccgccggttcatctaccgccgccggtgcatctgccacctccggttcacctgccacctccggtgcatctcccaccgccggtccacctgccgccgccggtccacctgccaccgccggtccatgtgccgccgccggttcatctgccgccgccaccatgccactaccctactcaaccgccccggcctcagcctcatccccagccacacccatgcccgtgccaacagccgcatccaagcccgtgccagctgcagggaacctgcggcgttggca

SEQ ID NO: 17865 - DNA, 356 bp, Zea mays
  Clone ID: LIB3151-020-Q1-K1-B2
cagaccattagctttatctactccagagcgcagaagaacccgatcgacaccatgagggtgttgctcgttgccctcgctctcctggctctcgctgcgagcgccacctccacgcatacaagcggcggctgcggctgccagccaccgccgccggttcatctaccgccgccggtgcatctgccacctccggttcacctgccacctccggtgcatctcccaccgccggtccacctgccgccgccggtccacctgccaccgccggtccatgtgccgccgccggttcatctgccgccgccaccatgccactaccctactcaaccgccccggcctcagcctcatccccagccacacccatgccc

SEQ ID NO: 17866 - DNA, 402 bp, Zea mays
  Clone ID: LIB3151-020-Q1-K1-B3
tttgagcattcagaaacacaccaagcgaagcgcactatcaacaacctaacaacaatgggtgccaagagattagccctccttgcgcttcttgcccttttagtgagcgcaacaaatgcgttcattattccacagtgctcacttgctcctagtgccattattccacagttcctcccaccagttacttcaatgggcttcgaacatccagccgtgcaagcctacaggctacaactagcgcttgcggcgagcgtcttacaacaaccaattgcccaattgcaacaacaatccttggcacatctaaacctacaaaccatcgcaacgcaacagcaacaacagtttctgccatcactgagccacctagccgtggtgaaccctgtcgcctacttgcaacagcagctacttgca

SEQ ID NO: 17867 - DNA, 392 bp, Zea mays
  Clone ID: LIB3151-020-Q1-K1-B4
ggacgtcagcctagcaattagctcatcgactccagattggagaactcgacaccatgaaggtgctgagcgttgcccttgctctcctggcgctcgctgcgagcgccgcctccagtacaagcggcggctgtggctgccagacaccaccgtttcatctaccgcctccgttctatatgccgcctccgttctatctgccgccgcagcagcagccgcagccatggcaataccccactcaaccaccgcagctaagcccgtgccagcagttcggatcctgcggcgtcggcagcgtcggcagcccgttcctgggccagtgcgtcgagttcctgaggcaccagtgcagcccggcggcgacgccctacggcttcgcacagtgccaggcgctgcagcagcagtgc

SEQ ID NO: 17868 - DNA, 408 bp, Zea mays
  Clone ID: LIB3151-020-Q1-K1-B5
cgtacacggtctccctcttcctgtcagttgtagagtgagagtgaggcagcgagtgggagacaaggggaaatggggaagggagcgcaagggagcgatgcggcggcggcgggcggcgaggtggaggagaacatggcggcgtggctggttgccaagaacaccctcaagatcatgcccttcaagctcccgcccgtcggcccttatgatgtccgcgtgcgcatgaaggcagtggggatttgcggcagcgatgtgcactacctaagggagatgcgcatcgcgcacttcgtggtgaaggagccgatggtgatcgggcacgagtgcgcgggcgtggtcgaggaggtgggcgccggcgtgacgcacctgtccgtgggcgaccgcgtggcgcttgagccgggcgtcagctgctggcgc

SEQ ID NO: 17869 - DNA, 302 bp, Zea mays
  Clone ID: LIB3151-020-Q1-K1-B6
aataccgatacctacaactactatagaacgcacaataacccacccgcaacggtgggggggatattctgcttccttatgctcctggctctttctgcaagcgctgctaccacacatacaatccgacaatgctgacaacctccaatagcttcctttcatctaccatacctcttagcagtggcgccttcagtatacgaacaacctattgttcatctctacacgatcgaacaggtgatggcagcaggccacctaccatcatcagtctaggtgctgcaacaaccgtatgtgctattacagccattaca

SEQ ID NO: 17870 - DNA, 306 bp, Zea mays
  Clone ID: LIB3151-020-Q1-K1-B7
aataccattaccaacttctactatagattgcacaataacccaccaacaacggcgacggggatattcttattccttattctccttgctcttactgcaagcgctacttccgcacatacaatcccacaatgctcacaggcatccaatcgcttcctttcatataccataccaccataccattgacacctccagtatacgaaaaccctactgttcatctctacacgaccgaacaggtgatcgcaccaggcaacctaccttaatcaccctatgtgctcccacaaccttatgtgctattacagccatatacat

SEQ ID NO: 17871 - DNA, 438 bp, Zea mays
  unsure at all n locations
  Clone ID: LIB3151-020-Q1-K1-B8
gcaacatagaaagcacaatagtgtaccaacaatggcagccaaaatattttgcctccttgggctccttggtctttctgcaagtgctgctacggcgaccattttcccacaatgctcacaagctcctatagcttcccttcttcccccgtacctctcaccagcggtgtcttcggtatgtgaaaacccaattcttcaaccctataggatccaacaggcaatcgcagctggcatcttacctttatcacccttgttcctccaacaatcatcagccctattacagcagttacctttggtgcatttattggcacaaaacatcagggcacaacaactacaacaacttgtgctagcaaaccttgctgcctactctcagcaacaacagtttcttccattcaaccaactagctgcatngaactctgcttcttatttgcaacaacaacaact

SEQ ID NO: 17872 - DNA, 394 bp, Zea mays
  Clone ID: LIB3151-020-Q1-K1-B9
caactagcaacatagaaagcacaatagtgtaccaacaatggcagccaaaatattttgcctccttatgctccttggtctttctgcaagtgctgctacggcgaccattttcccgcaatgctcgcaagctcctatagcttcccttcttcccccgtacctctcaccagcggtgtcttcggtatgtgaaaacccaattcttcaaccctacaggatccaacaggcaatcgcagctggcatcttacctttatcacccttgttcctccaacaatcatcagccctattacaacagttacctttggtgcatttattggcacaaaacatcagggcacaacaactacaacaacttgtgctagcaaaccttgctgcctactctcagcaacagcagtttcttccattc

SEQ ID NO: 17873 - DNA, 399 bp, Zea mays
  Clone ID: LIB3151-020-Q1-K1-C1
gctgaatgctcacaagctccaatagctttcctccttttcccataccttccatcaatgatggctccagtatgtgaaaacccagctcttcaaccctatatgctccaacaagcaatcgcagcaagcaacatacctttatcacccttgtttcaacaatcgccagccctatctttggtgcagtcattggtacaaaccatcagggcacagcagctgcagcaactcgtgctacctgtgatcaaccaagtagctctggcaaacctttctccctactcttatcaacaacaatttcttccattcaaccaacttgctacatttaaccgtgctgcttatttgcagcaacaactattaccattcagccagatagctactgactactctcagcaacaacaacttcttccattt

SEQ ID NO: 17874 - DNA, 66 bp, Zea mays
  Clone ID: LIB3151-020-Q1-K1-C10
aaagaaacaacaaacaataaaaaaaaaattaaaaaacataaataaaaaaaaaaataaaggaacaat

SEQ ID NO: 17875 - DNA, 390 bp, Zea mays
  Clone ID: LIB3151-020-Q1-K1-C11
gggtcttcagaccattagctttatctactccagagcgcagaagaacccgatcgacaccgtgagggtgttgctcgttgccctcgctctcctggctctcgctgcgagcgccacctccacgcatacaagcggcggctgcggctgccagccaccgccgccggttcatctaccgccgccggtgcatctgccacctccggttcacctgccacctccggtgcatctcccaccgccggtccacctgccgccgccggtccacctgccaccgccggtccatgtgccgccgccggttcatctgccgccgccaccatgccactaccctactcaaccgccccggcctcagcctcatccccagccacacccatgcccgtgccaacagccgcatccaagcccgtg

SEQ ID NO: 17876 - DNA, 451 bp, Zea mays
  Clone ID: LIB3151-020-Q1-K1-C12
attgagaccaactagcaacatagaaagctcaatagtgtaccaacaatggcagccaaaatattttgcctccttatgctccttggtctttctgcaagtgctgctacagcgaccattttcccgaaatgctcgcaagctcctatagcttcccttcttcccccgtacctctcaccagcggtgtcttcggtatgtgaaaacccaattcttcaaccctacaggatccaacaggcaatcacagctggcatcttacctttatcacccttgttcctccaacaatcatcagccctattacatcagttacctttggtgcatttattgtcacaaaacatcagggcacaacaactacaacaacttgtgctagcaaaccttgctgcctactctcagcaacagcagtttcttccattcaaccaactagctgcattgaactctgcttcttatttgcaacaacaacaac

SEQ ID NO: 17877 - DNA, 355 bp, Zea mays
  Clone ID: LIB3151-020-Q1-K1-C5
gttctagatcgcgagcggcccccctttttttttttttttttttttttttgggaacaatgcttttttcttttcatttcaattgttcattcaggtcattgctcacactgacactgccacccatggtgatgcgtgacacattattactcaatcatcgccgctaaatgactcaactagctagctagccagcggctatactacagcaccccgatcctgggccagagcgtcgagtttctgaagcatcattgcaccccgacggcgacaccctactgatcgcctcagtgccagtcattgccgcagcagtgttgccaccagctcaagcaggtggagccgcacaaccggtaccaggcgatctttg

SEQ ID NO: 17878 - DNA, 250 bp, Zea mays
  unsure at all n locations
  Clone ID: LIB3151-020-Q1-K1-C6
gttctagatcgcgagcggttccccttttttttttttttttttttttcnacggaacaatgctttttttttttcatttcaattgttcattcaggccattgctcacactgacactgccacccatggtgatgcctgacacattattactcaatcatcgccgctaaatgactcaactagctagctagccagcggctatactacagcaccccgatcctttgccaattcgtccagtttttaaggcataattgccccc

SEQ ID NO: 17879 - DNA, 430 bp, Zea mays
  unsure at all n locations
  Clone ID: LIB3151-020-Q1-K1-C7
caagaananaccaacaanggcagccaatttatnnngcctccttatgctccgtggtcttgctgcaattgctgctacggcgaccattttcccacaatgctcacaagctcctatagcttcccttcttcccccgtacctctcaccagcggtgtcttcggtatgtgaaaacccaattcttcaaccctataggatccaacaggcaatcgcagctggcatcttacctttatcacccttgttcctccaacaatcatcagccctattacagcagttacctttggtgcatttattggcacaaaacatcagggcacaacaactacaacaacttgtgctagcaaaccttgctgcctactctcagcaacaacagattcttccattcaaccaactagctgcattgaactctgcttcttatttgcaacaacaacaactaccattc

SEQ ID NO: 17880 - DNA, 392 bp, Zea mays
  Clone ID: LIB3151-020-Q1-K1-C9
acagttgctaccaacaatcaatcaagtatttgcagcgatccttgctgcttacctccagcgacaacagtgtcttccattcaatcaactagatggggtgaaccctgctatctacttgcaggcacaacagctactaccatttaaccaacttgtcgggagcccttatgccttcttactgcaacaacagcttctaccattccatctgcaagctgtggcaaacattgctgctttcttgagacaacaacatttgttgccattttacccacaggttgtgggaaacattaatgccttcttgcaacagcaacaattgctaccattctacccacagaatgtggcaaacattgttgccttcttacaacaacaacaattgttgccatttagccaacatgctttga

SEQ ID NO: 17881 - DNA, 389 bp, Zea mays
  Clone ID: LIB3151-020-Q1-K1-D1
gaccaactagcaacatagaaagcacaatattgtaccaacaatggcagccaaaatatttggcctcctgatgctccttggtctttctgcaagtgctgctacggcgaccattttcccgaaatgctcgcaagctcctatagcttcccttcttcccccgtacctctcaccagcggtgtcttcggtatgtgaaaacccaattcttcaaccctacaggatccaacaggcaatcacagctggcatcttacctttatcacccttgttcctccaacaatcatcagccctattacatcagttacctttggtgcatttattggcacaaaacatcagggcacaacaactacaacaacttgtgctagcaaaccttgctgcctactctcagcaacagcagtttc

SEQ ID NO: 17882 - DNA, 399 bp, Zea mays
  unsure at all n locations
  Clone ID: LIB3151-020-Q1-K1-D10
ggccgaccacgcgtgcgagaccaactagcaacatanaaagcacaattttgtaccttcaatggcagccaaaatataagacctccttaggctactcggtctgtccgcaagtgctgctacggtacaccaaccatcctaaaagctcgcaagcaaccatatatatccttctttcttcgtacctatcaccaacgaagtcttccgtatgtgaaaacccaattcttcaaccctacatgatccaacaggcaatcacagctagcatcttacctttatcacccttgctcctccaacaatcatcagccctattacatcaagtaccttttgtgcatgtattggcacaaaacatcatggcacaacaactacaacaacttgtgctagcaaaccatgctgcctactattatcaac

SEQ ID NO: 17883 - DNA, 248 bp, Zea mays
  Clone ID: LIB3151-020-Q1-K1-D11
cgcgtgcgcaggaaataaagtcgtatacagcaccattaattgatttacaccgcagaccaaaacttggaccatcgaggcgctcatgggtctccttacatttctggctctcgctacaatctccccttacagttcaaaagctcgattagcttccctataccccccattcatttaaccgctgctggctatatgccggcaaaccccaatcttccacccaactaggctccaccagccattccataccccactca

SEQ ID NO: 17884 - DNA, 424 bp, Zea mays
  unsure at all n locations
  Clone ID: LIB3151-020-Q1-K1-D12
tatcaacatanaattttcaatactttaccaacaatgccagctaaaagattttgtgtacttatgctccttggtctttctgcaagtgctgctacggcaaccattttcccacaatgctcacaagctcctatagcttcccttcttcccccgtacctctcaccaacggtgtcttcggtatgtgaaaacccaattcttcaaccctacaggatccaacaggcaatcgcagctggcatcttacctttatcacccttgttcctccaacaatcatcagccctattacagcagttacctttggtgcatttattggcacaaaacatcagggcacaacaactacaacaacttgtgctagcaaaccttgctgcctactctcagcaacagcagtttcttccattcaaccaactaactgcattgaactctgcttcttatt

SEQ ID NO: 17885 - DNA, 334 bp, Zea mays
  Clone ID: LIB3151-020-Q1-K1-D2
gaccacgcgtccgggtctttctgcaagtgttgctaccgcaaccattttcccacaatgctcacaagctcctagggcttcccgtcttcccccatacctctcaccagcggtgtcttcaatgtgtgaaaacccaattgttcaaccctacaggatccaacaggcaatcgcaacaggcatcttaccattatcacccttgttcctccaacaaccgtcagccctattacagcagttacctttggtccatttggtggcacaaaacatcagggcacaacaactacaacaacttgtgctagcaaaccttgctgcatactctcagcaacatcagtttctttcattc

SEQ ID NO: 17886 - DNA, 354 bp, Zea mays
  Clone ID: LIB3151-020-Q1-K1-D4
ggagaccaacaagcggcatacacagcgttatgcacttgcaccaataaagcaccaatggggaccaagagatttacactctttacgctgcttgctatctgtgcatgtgttgctaacgcgacaataatcactgaatgctcacaagctgctatagctgcccttcttcccccataaattccatcaatgatagcttgaatgtgtgaaaacccagctctttaaccctataggctccaacaagcaatcagcacaagcaacataccattatcatccttgcttcaacaatcgccagccctatctatgctgcaaccattggtacaaaccatcagggcacactaggtgcagaaagtcgtgctatct

SEQ ID NO: 17887 - DNA, 423 bp, Zea mays
  Clone ID: LIB3151-020-Q1-K1-D5
cggacgcgtgggcaacgccgtgcgccgtttcggcaaggtgcgctacgacacgctgcgcgggccgcacaaggtcgtggcgcgggaggccgacggctccgtcaagttcggccagggcgagggctccgcctacctcttcgacccggacatctacaccgacgggaggatctccgtgcagggcatcgacgccgtgctgttcgcgcccgacgacaccaaggccacgcagacagccgaccctaacaggaagcctcccgccatcgtcacccacaagaagaagatcaagctccggcgaggcaagttgttagaggcgacgtgccagatggccgggctcttcggtcagcgatcgcgattcgcgagctgccagtagacggagaaaggatctgttgatctccacgacaccgaaagacgaacgaacgaacgaactga

SEQ ID NO: 17888 - DNA, 342 bp, Zea mays
  Clone ID: LIB3151-020-Q1-K1-D6
cggacgcgtggtcaacgccttgcgccgtttcggcaaggtgcgctacgacgggctgcgcgtgccgcacaaggtcgtggcgcgggaggcctacggctccgtcaagtacggccagggcgagggctccgcctacctattcgacccggacatctacaccgacgggaggatctccgtgcagggcatcgacgccgtgctgttcgcgcccgacgacaccaaggccactcagacagccgaccctaacaggaagcctcccgtcatcgtcacccacaagaagaagatcaagctacggcgaggcaagttgttagaggcgacgtgccagatggccgggctcttcagtcagcgatc

SEQ ID NO: 17889 - DNA, 389 bp, Zea mays
  Clone ID: LIB3151-020-Q1-K1-D7
cgctcactgactgactactgtaataccatagatcgaacaacttggtcctgcagctcaggaagagagttttgtgcatttgggggccgggggcaagagagagagagagagagccatggcggcggaccagcagccgcagctgcaggaggagatgaacgacgctgccggcggcggcctcaggctgcctccagggttccgcttccacccgagcgacttcgagattgtcagcttctacctcaccaacaaggtgctcaacacgcgcttcacctgcaccgccatcacggaggccgacctaaacaagattgagccatgggacctcccgagcaaggcgaagatgggcgagaaagagtggtacttcttctaccagaaggaccgcaagtacccgacggggc

SEQ ID NO: 17890 - DNA, 248 bp, Zea mays
  Clone ID: LIB3151-020-Q1-K1-D8
acaaactcctagggcttatgtatataccccataccatctcaccagctcagtcttcaatatttaaaaacccaattattcaaccctacaggatccaacatgcaatcacaacatgcatctcaccattatcacccttgttactccaacaaccgtgagccctattacagcaattaccttttatacatttagtttcacccatcatcagggcgcaacaactaccacaacttgttctaacaaacctagctgtatac

SEQ ID NO: 17891 - DNA, 365 bp, Zea mays
  Clone ID: LIB3151-020-Q1-K1-D9
acccacgcgtgcgtatgtgtcagcattcagaaacacaccaagttaagcgcattatcaacaacctaacaacaatggctaccaagagatttgccctccttgctctttttgcccttttagtgagcgcaacacatgcgttcattattccacagtgctcacttgctactagtgccattattccacagtttctcccaccaattacttctacggtctttcaacatccagccgtgcaagcctacacgctacaactagcgcttgcagcgagcgtcttacaacaaccaattgcccaatagcctcaacaatccttggcacatctaaacctacaaaccatcgcaacgcaacagtaacaacagattctgccatcactg

SEQ ID NO: 17892 - DNA, 252 bp, Zea mays
  Clone ID: LIB3151-020-Q1-K1-E1
aaataatccatgcagcacatgacattattgggtttgaattgaagaattgtgtctacctagccgttatactcctataacggtgttaagcaataaagtaccatacattatgatgtttgtactatgatatttgaataagaatactaattgtaattataatgctacaaaaaaaaattctgaaaataaaaagccaaaaaaaaaaaaaaacaaaggtgtataataaaataaaaaagaaaaattcggcagcgtttgaat

SEQ ID NO: 17893 - DNA, 368 bp, Zea mays
  Clone ID: LIB3151-020-Q1-K1-E10
ctagttatagatcgccagcagccgaccttttctatctttcacctaccaccaatgtcttgcgaaaatggacccttttttgcgcttctaagcctcctacttcacgcaacaaactccattattgttccatagctcatattcgctcctaacgacggcaccacctattaccggctgccagttacacctttgagcttctaacacaccaacctgctagcatccaacctacaactaccgctggcagagagcgtctttcatcagcgcatctcccactttcaacagcaacaattgattcatctcaacctacgcaccatttctcccaaacaataactgcataatctgtcataactgttgctcctacacatcatgcaccc

SEQ ID NO: 17894 - DNA, 415 bp, Zea mays
  Clone ID: LIB3151-020-Q1-K1-E11
gtgaaaacccaattcttcaaccctacattatccaacattcaatcgcagcaggcatcttacctttatcagccttgttcctccaacaaccgtcagccctattacagcagttacctttggtgcatttgttggcacaaaacatcaaggcacaacaactacaacaacttgtgctaggaaaccttgctgcctactctcagcaacagcagtttcttccattcaaccaactggctgcattgaactctgctgcttatttgcaacaacaactaccattcagtcagctagctgctgcctacccccagcaatttcttccattcaaccaactggcagcattgaactctgctgcttatttacaacagcaacagctaccaccattcagccagctagctgatgtgagccctgttgccttcttgacacaaca

SEQ ID NO: 17895 - DNA, 396 bp, Zea mays
  Clone ID: LIB3151-020-Q1-K1-E12
tctgcagaccattagctttatctactcctgagcgcagtagaacccgatcgacaccatgagggtgttgcgcgttgccctcgctctcctggctctcgctgcgagcgccacctccacgcatacaagcggcggctgcggctgccaaccaccgcccgcggttcatttaccggcggcggtgcatctgccaacctccggttacccggccacctccgtggcatttcccaccgccggtcaacttgcggccgccggtccacctgccaccgccggtccatgtgccgccgccggttaatctgccgccgccaccatgccactaccttactaaaccgccccggcctaagcctcatccccagccacacccatgcccgtgccaacagccgcatccaagcccgtgccagctgc

SEQ ID NO: 17896 - DNA, 350 bp, Zea mays
  unsure at all n locations
  Clone ID: LIB3151-020-Q1-K1-E2
tagaaagtggaatccagtagcaacaatatagcaacaatggcgaccaagatattttccctccttatgctccttgctctttctgcatgtgttgctaacgtgaccattttcccacaatgctcacaagctcctatagcttcccttcttcccccgtacctctcaccagcggtgtcttcggtatgtgaaaacccaattcttcaaccctataggatccaacaggcaatcgcagctggcatcttacctttatcacccttgttcctccaacaatcatcagccctattacagcagttacctttggtgcatttattggcacanaacatcagggcacaacaactacaacaactngtgctagc

SEQ ID NO: 17897 - DNA, 404 bp, Zea mays
  Clone ID: LIB3151-020-Q1-K1-E3
catgcatcattttagctgttgatacaaatagaagggaatggccgagataaccctagaggcgagtgaggttatggcgcaaacaaacaaaagaatagtgccaaagttcactgaaatcttccccgtggaggacgcgaactacccttacagcgccttcatcgcgtcggtccggaaagacgtgatcaaacactgcaccgaccataaagggatcttccagcccgtgctgccaccggagaagaaggtcccggagctatggttctacacagagctcaaaactaggaccagctccatcacgctcgccatacgcatggacaacctgtacctcgtgggcttcaggaccccgggcggggtgtggtgggagttcggcaaggacggcgacacccaccttctcggcgacaaccccaggt

SEQ ID NO: 17898 - DNA, 218 bp, Zea mays
  unsure at all n locations
  Clone ID: LIB3151-020-Q1-K1-E4
gggcggancnacgcgtccggatgaatattnaccactcctgaaccctttttcacgatctccgccccaaacccatcgtctggcgattgtgccatcttccatatcaacaacctattacctctaacctccagcgacagctccctcgacgcgctgtccaactaggtttacagcggctagccgggactggggcttctacaggttatgaaccactgcatccccat

SEQ ID NO: 17899 - DNA, 304 bp, Zea mays
  unsure at all n locations
  Clone ID: LIB3151-020-Q1-K1-F1
gcggaaccacgcgtgcgantgggancattcagaaacacaccaaattaaacactttttcaacgacctaacaacaatggctacttgcatattatccctacttacacttctatacctttttaagagcacaacaaattccttcattattacacaaagctcactttctcctacttccattattccacacttacaaacaccaattaattacaatagcttcaaacacctatctttgcaacccaacatgcaacaacaaacaatttccccgagctttttacatcaaccaaatgccaaattacaaccacaatcc

SEQ ID NO: 17900 - DNA, 404 bp, Zea mays
  Clone ID: LIB3151-020-Q1-K1-F3
aatgtgaacattcaaaaacacaccaagctaagcgcactaacaacgacctaacaacaatgggtaccaagatattagccctccttgcgcttcttgccctttttgtgagcgcaacaaatgcgttcattattccacaatgctcacttgctcctagtgccattattccacagttcctcccaccagttacttcaatgggcttcgaacacctagctgtgcaagccaacatgcaacaacaagcgcttgcggcgagcgtcttacaacaaccaattgcccaattgcaacaacaatccttgccacatctaacaatacaagccatcacaacgcaacagcaacaacagttcctaccagcactgagccacctagccatggtgaaccctgccgcctacttgcaagagcagctgcttgca

SEQ ID NO: 17901 - DNA, 311 bp, Zea mays
  Clone ID: LIB3151-020-Q1-K1-F4
gaccattagctttatctactccagagcgcagaagaacccgatcgacaccatgagggtggggctcgttgccctcgctctcctggctctcgctgcgagcgccacctccacgcatacaagcggcggctgcggctgccagccaccgccgccggttcatctaccgccgccggtgcatctgccacctccggttcacctgccacctccggtgcatctcccaccgccggtccacctgccgccgccggtccacctgccaccgccggtccatgtgccgccgccggttcatctgccgccgccaccatgccactaccctactc

SEQ ID NO: 17902 - DNA, 277 bp, Zea mays
  Clone ID: LIB3151-020-Q1-K1-F5
aaattttaaacctccctctactaactcttattaagaacgcaacctacacgcacattatcacacaatgcttaattttatccatactcctcattattcaacaactttctatcaaccaaatactctaattgaccttcaaacacctaattttgcaaaccaacatgcaacaacaaacccttgctccgaacttcatacaacaaccaatttccaaatttcaacaacaattcatgccacatctaaaaatacaaaccatcataactcaacagcaacaacatatcct

SEQ ID NO: 17903 - DNA, 388 bp, Zea mays
  Clone ID: LIB3151-020-Q1-K1-G1
attgtgagcattcagaacccaccaagctaagctacctaccaccacctaaacaccatgggctaccaagatattagccctccttgcgcttcttgccctttttgcgagcgcaacaaatgcgttcattattccacaatgctcacttgctcctagtgccattataccacagatcctccgaccagttacttcaatgggcttcgaacacctagctgtgcaagcctacaggctacaacaagcgcttgcggcgagcgtcttacaacaaccatataaccaattgcaacaacaatccttggcacatgtaaccatacaaaccatcgctacacatcagcaacaacagttcctaccagcacttgaccaactagatgtggtgaacccttgtcgctacttgcaa

SEQ ID NO: 17904 - DNA, 356 bp, Zea mays
  Clone ID: LIB3151-020-Q1-K1-G2
caagaagcaacatataaagtggaatccattagcaacattagagcaacaatggcgaccaggatatttggcctccttatgctccttgctctttctgcatgtgttgctaacgcgacaattttccctcaatgctcacaagctcctatagctttccttctttcctcatacctttcatcaatgatagcttcagtatgtgaaaacccagctcttcaaccctataggctccaacaagcaatcgcagcaagcaacatacacttatcacccttgtttcaacaatcgccagccctatctttggtgcagtcattggtacaaaccatcagggcacagcagctgcagtaactcgagctacctgtgatcaa

SEQ ID NO: 17905 - DNA, 374 bp, Zea mays
  Clone ID: LIB3151-020-Q1-K1-G3
ctcgtctcctcttcctctccccaacccgtcaagaccatccttcccttcttccctcctcggcagaggggagactagctagctagggtttccaccaatggcggcgcccaccacctcccgccgcggccccggcggcgcgcgcaacatggacgatgaaaacctcaccttcgagacctccccgggggtcgaggtcgtcagcagcttcgaccagatgggcatcaatgacgacctactccgcggcatctacggctactgtttcaaaaagccctccgccatccagcagcgcgccgtcctccccatcatcaacggccgagacgtcatcacgcacgcccagtccggcaccggcaagacattcatgatctccctcaccgtatgcc

SEQ ID NO: 17906 - DNA, 439 bp, Zea mays
  Clone ID: LIB3151-020-Q1-K1-G5
gagaccaacaagcaacatattaagtggtttccagtagcaacaatagagcagcgatggcggccaatatattttccctccttatgctccttgctctttctgcatgtgttgctaacgcgacaattttccctcaatgctcacaagctcctatagcttcccttcttcccccataccttccatcaatgatagcttcagtatgtgaaaacccagctcttcaaccctataggctccaacaagcaatcgcagcaagcaacatacctttatcacccttgtttcaacaatcgccagccctatctttggtgcagtcattggtacaaaccatcagggcacagcagctgcagcaactcgtgctacctgtgatcaaccaagtagctctggcaaacctttctccctactctcagcaacaacaatttctttcattcaaccaactgtctacattgaa

SEQ ID NO: 17907 - DNA, 419 bp, Zea mays
  Clone ID: LIB3151-020-Q1-K1-G6
caagcaacatagaaagtggtatccagtatcaacaatagagcaacaatggcggccaagggattatccctccttatgctcctagctctttctgcatgtgttgctaacgcgacaattttccctcaatgctcacaagctcctatagctttccttcttcccccataccttccatcaatgatagcttcagtatgtgaaaacccagctcttcaaccctataggctccaacaagcaatcgcagcaagcaacatacctttatcacccttgtttcaacaatcgccagccctatctttgttgcagtcattgatacataccatcagggcacagcagctgcagcaactcgtgctatctgtgatcaaccaagtagctctggcaaacctttcttcctactctcatcaacaacaatttcttacattcaaccaact

SEQ ID NO: 17908 - DNA, 313 bp, Zea mays
  unsure at all n locations
  Clone ID: LIB3151-020-Q1-K1-G7
gntgtaaatcacgagcggcttcccttttttttttttttccggcctcccatggctcgcggggcgaccacccgattcgaagcgtgcggatagaccgaataagcgggagagatggctcgcaccaagcagactgctcgcaagtccacgggagggaaggctcccaggaagcagcttgccaccaaggctgcccgtaagtctgcccccaccactggtggaatgaagaaacctcaccgctaccgccctgtaactgatgccctccgttagatccgccagtatcacaagagcactgagctgcttatcaggaaactgcccttcc

SEQ ID NO: 17909 - DNA, 470 bp, Zea mays
  Clone ID: LIB3151-020-Q1-K1-H1
aatcccggtcgaccacgcgtccgattgagaccaactagcaacatagaaagcacaatagtgtaccaacaatggcagccaaaatgttttgcttccttatgctccttggtctttctgcaagtgctgctaccgcaaccattttcccacaatgctcacaagctcctatagcttcctttcttcccccatacctctcaccagcggtgtcttcagtatgtgaaaacccaattcttcaaccctacaggatccaacaggcaatcgcagcaggcatcttacctttatcacccttgttcctccaacaaccgtcagccctattacagcagttacctttggtgcatttgttggcacaaaacatcaaggcacaacaactacaacaacttgtgctaggaaaccttgctgcctactctcagcaacagcagtttcttccattcaaccaactggctgcattgaactctgctgcttatttgcaacaacaa

SEQ ID NO: 17910 - DNA, 145 bp, Zea mays
  Clone ID: LIB3151-020-Q1-K1-H11
acgcgtccggagcaagaacaagcacaccaacccatatttctcaacttttacttaccaccacaggctaggaaaatatgagcctttcttgcgctccaagcccaatttacgagcgcaacaaatacaaccattatatccacataacact

SEQ ID NO: 17911 - DNA, 405 bp, Zea mays
  Clone ID: LIB3151-020-Q1-K1-H3
aagaaaaaaataaaaaaaaaaaaaaaattaaaaaaataaaaaaaaaaaaaaaaacaaagagaaaaaggaaattaatcaaacctaccccttcttacacattaaatcaacacaaaaaaatgccaccattattcaataaacctcacttgcttctacatctttttttttaaaaaaactccaaccaatcccaacaaaattcttttatctcccatctttttaatcccagctgccataataaactattgccgccaactttacctttttttcaatttttccactttttcaactattcacgcaacaccactattccaaccattaaactcatcatttcgatatttcttcatctttatcgctctttttttttttactattcccatactttcacttttttctttctttctcccactt

SEQ ID NO: 17912 - DNA, 318 bp, Zea mays
  Clone ID: LIB3151-020-Q1-K1-H4
cccgatccagcgatatggctggctccgtagctccccacgccgtggtcctcggtcttctcctgctcgcggggctcgcggcggcgcaaagggcgacgacgccggctgcggcggcccccgcgcccgaccccggctgcaacggcatccagctgacctacaacttcgtggaccgcaccaagatccggcccttcgtcagcgacaagaacaagcagccctacgccttccgcgccaatgtcaccgtgctcaactccggcacccgcccgctcaagtcctgggtggcactcgtcacattcggctacggcgagatcctcgtcggcgtcg

SEQ ID NO: 17913 - DNA, 342 bp, Zea mays
  unsure at all n locations
  Clone ID: LIB3151-020-Q1-K1-H5
gacccacgcgtgncggggatcttacctttatcattcttgttttttcaacaatcatcanccctattgcatcagtgacctttgtttcatttattgtcacaaaacatcatgtcacaacaactacaacaacttgtgctagcaaaccttgctgcctactctcattaacttctcttttttacattcaaccaactaactgcattgaactctacttcttatttgctacaacaacaactaccattcagccagctacctgctgcctacctccatctttttctttcattcaaccatctgccaatattgaactctcctgtttattcacagcatcaacaactactaccattcatc

SEQ ID NO: 17914 - DNA, 323 bp, Zea mays
  Clone ID: LIB3151-020-Q1-K1-H7
cccacccgacccacgcgtacccagaccattaccactaatattacacattcacaacaacccaaccgccacggggagggggatgttattcgccctcgctctcctggctctcgctgcgagcgccacctacacgcatacaaacgcacaatgctgatgtcatccatagtcgacgattcatctaccgccgccaccacatatgtcaactgcgcttcaaacaccaacttcggcgcatctataacctacaacacacctgtccgcgtagcgccatataacaacgaatttccatatgccgacaacgattcatgtcacatcgaaaacatgacact

SEQ ID NO: 17915 - DNA, 340 bp, Zea mays
  unsure at all n locations
  Clone ID: LIB3151-020-Q1-K1-H8
tgtacctnnncaccgcgtttccgcctagccccagtcaaccacatcacccgtgctcttgtggcgctatctaacagcgccgccttcaatacaagcngcggctgtggctgccaaacaccaccgtttcatctaccgcctccgttctatatgccgcctccgttctatctgccgccgcagcagcagccgcagccatggcaataccccactcaaccaccgcagctaagcccgtgccagcagttcggatcctgcggcgtcggcagcgtcggcagcccgttcctgggccagtgcgtcgagttcctgaggcaccagtgcagcccggcggcgacgccctacggctcgccac

SEQ ID NO: 17916 - DNA, 400 bp, Zea mays
  Clone ID: LIB3151-020-Q1-K1-H9
gcgacagccagtcacacactcccactctttcgaccgctctcggccctcggccccgtccgggtcgccgcagggcgaggaggcaatggcggcgggcgggaatggcgccggcggggacaccagggcggccttcgcgcggatctacaagacgctcaaggaggagctgctcaccgacccggccttcgagttcaccgaggagtcacgccagtggatcgaccgcatggttgactacaatgtactcggaggcaagtgtaaccgtgggctctctgtggtcgacagctacaagctgctcaagggcgctgatgctctgggcgaggaggaaacgttccttgcttgcaccctcggctggtgcattgaatggcttcaggctttctttcttgtgcttgatgatatcatggatgac

SEQ ID NO: 17917 - DNA, 360 bp, Zea mays
  Clone ID: LIB3151-021-Q1-K1-A1
ggacgggagtccgccttatgttgtaggctccgttcgatcataagcaacacaacacccttggggttgcgtcgctcctccggcctcccctccctggtcggtcgatcgcgaggatgacgccggcgagcgtggtcgccgcgcccaggagcgtcggggcgttgcccttggcggcgttcccggcgcccgcgagggccggggtgcggaggaacggccggtcctcgaggcccgcggcgtgcggcggggacgaccagcagccgccgtacatggccgcgatgccggcgtcgctgcgcgccatccaggccaggaggaagcacgaggcggcgcagcgcggggtgccgcgggcgacggccacgagcgcgggcg

SEQ ID NO: 17918 - DNA, 402 bp, Zea mays
  Clone ID: LIB3151-021-Q1-K1-A10
ctccaatctcctcgccccccacggacctgaaccgagaacctttaccgccgccgcctgtggcctagccgccggagaagcgccgctcgctcatgaggacagccatggcgccggagccggaggatgatattatgaacgagaagaatccccgcccgctcgacgaggatgacatcgcgctcctcaaaacctatggactggggccgtattcgaccagcattaagaaggtcgagaaggagatcaaggaaatggccaagaaaatcaacgacctctgtgggataaaggagtctgatacaggggctgctccacctagccagtgggatttggtttcagataagcagatgatgcaagaagaacaaccgttacaagtagcaagatgtacaaagattataagccctaatacggatg

SEQ ID NO: 17919 - DNA, 376 bp, Zea mays
  Clone ID: LIB3151-021-Q1-K1-A11
attgataccaactagcaacatagatagcacaatattgtaccaataatggcagccaaggaggtttgtctcattatgctccctggtctttctgcaagtgctgctacggcgagcattttcccgcaatgctcacaagctcctatagcttcccttcttcccccatacctttcaccagcgatgtcttcagtatgtgaaaatccaattcttctaccctacaggatccaacaggcaatcgcagcatgcatcttacctttatcaaccttgttccttcaacaataatcaaccctattacagcaattacctttggtgcatttattggcacaaatcatcaaggcacaacaactacaacaacttcgtgctaccaaaccttgctttctac

SEQ ID NO: 17920 - DNA, 56 bp, Zea mays
  Clone ID: LIB3151-021-Q1-K1-A12
cattgccccaccctgattgggaattggacccccccctgtaccggccctttaacccc

SEQ ID NO: 17921 - DNA, 433 bp, Zea mays
  Clone ID: LIB3151-021-Q1-K1-A6
cggacgcgtgggctcacggcgaactccccacctcctatcgcccccctctctctagcgcggcacaaatctctcctcccccgctcgccctcgctgcattgggcgccgccaagccccccgccggatagagaggacgagaagctgcgtggctgcgggaggagcgggcggcatgtgcgacctggtggcccgcacgggccggcaccagcagcggtacgaggatggccgtcggctagtggccggatgcataccatttaggtatagagctaacaatgatgaaatctctggtgacaaaactaagaaagtcgtggaaagtctcatgataaattcccaaagcggacctggtcttttgttttcaaagggaggatgggaaaatgatgaaactggtgaagaggcaacagctcgagaagctatagaagaagccggagttcgaggtgat

SEQ ID NO: 17922 - DNA, 425 bp, Zea mays
  Clone ID: LIB3151-021-Q1-K1-A7
gcatacaatgtcatcaacggcggttgacatgctggaaacaagcttggtaggcgggagtttatgatccttcctactggagcttcctcatttaaggaggctatgaagatggctgttgatgttgatcaccacctgaagtgcgttatcaaaaagatgtatgggctatacgccacgaatgttggtgaccaacgtggttttgctcccaacattcaggagaacaaggtaggacttgagctcttgaaaactgccattgagaaggctgcatacactggcaaggttgtcatcggaatggatgttgctgcttcggagtgttacagagacacggaccaaacatatgagctcaacttttaagaggagaataatgatgggtgacagaaaatatctggcgatagcttatagaatgtattcaaatcttttgtgagcgaata

SEQ ID NO: 17923 - DNA, 361 bp, Zea mays
  Clone ID: LIB3151-021-Q1-K1-B1
gcaacatagaaagcacaatggtgtaccaactatggccgacaaaatattaagcctgcttacgctccatggtctttctgctagttctgctaccgcgaccattttccagaaatgctcgcaagctcctatagcttatatttttcccccgtacctctcaccagtgatgtgctgggtatgcgaaaacccaattcttcatccctacaggatacaacaggcaataacagctggcatcttacatttatcacccttgttcctggaacattcatcaatcctattacatattacacctttggcgcatgtatcgtcacaaaacacaaaggctcaacaactacaaccacctgcgctagcgaaccttgctgcctac

SEQ ID NO: 17924 - DNA, 235 bp, Zea mays
  unsure at all n locations
  Clone ID: LIB3151-021-Q1-K1-B10
ccgaattcccaggcaggcaggtcggcgaggagggcaggaagaccgaagaccgagccgtgcgggggctcgggacgggaacgggacaggaccccaaaatctcagatccttcctgcccgcccgcccgtgcccgtcgacgcgtcgttcttgccggccgcgccccaccttcgccctctcctcctccagggggatcggatacgccacangctgcgcgatggtgctgtgggtcttcggctac

SEQ ID NO: 17925 - DNA, 373 bp, Zea mays
  Clone ID: LIB3151-021-Q1-K1-B2
gcccccccctctctctaggcttggaggacgcccctctcactcctccacccatttgcaggcgccaccccacctcccccatcaaaccctagccgccccctcctcaagcccttctctccgaggtgccattcgtttcccgctcggatctacgtcgcgtttgtgcatgtctccaattggattttggtggagggaagaagaagggaggaaagggggaggattcaaggtggtggacttccggatcgtacttagggatttgcccgaacttccggtaaaggtacttgatacatgttgggaatgaggggagtagcagcacgtccactttcactctcacaataacgctggcgaggtgcagccataatttaattagaaatttatt

SEQ ID NO: 17926 - DNA, 364 bp, Zea mays
  Clone ID: LIB3151-021-Q1-K1-B3
tgcttatttgcaacaacaactaccattcagtcagctagctgctgcctacccccagcaatttgttacattcaaccaactggcagcattgaactctgctgcttatttacaacagcaacagctaccaccattcagacagctagctgatgtgagtcctgttgccttcttgacacaacaacagttgttgccgttctacctgcacgctgcgcctaacgctggcaccctcttacaactgcaacaattgctggcattcaaccaacttgctttgacaaacccaacagcgctctaccaacaaccgattattggtggtgccctcttttagattgcttatgagctatagctcaataatgaagctttttggatgatg

SEQ ID NO: 17927 - DNA, 299 bp, Zea mays
  Clone ID: LIB3151-021-Q1-K1-B5
caagcaacaggaggagaaaaaacaaggagcgagacctcgcagctgacgcgcacaaggcaaaacccaatcggagccgtggaccgggccggagatagggctcgaggccatggcaagcggaggcgagggcgcatggagcggcgagtccccacccgctgcctcagtggaggcggcagcggtggaggcgacgctgcacatccggtgcgcgaacggctctaagttcacggtgcagacggacctgtgcgccacggtgggcgggttcaaggaggtcgtaaccgggagctgcgacgtgccggcgccgc

SEQ ID NO: 17928 - DNA, 289 bp, Zea mays
  Clone ID: LIB3151-021-Q1-K1-B6
gccgccgccaccatgccactaccctactcaaccgccccggcctcagcctcatccccagccacgcccatgcccgtgccaacagccgcatccaagcccgtgccagctgcagggaacctgcggcgttggcagcaccccgatcctgggccagtgcgtcgagttcctgaggcatcagtgcatcccgacggcgacgccctactgctcgcctcagtgccagtcgttgcggcagcagtgttgccagcagctcatgcaggtggagccgcagcaccggtaccaggcgatcttcggcttg

SEQ ID NO: 17929 - DNA, 430 bp, Zea mays
  Clone ID: LIB3151-021-Q1-K1-B8
gcggaaacacaccaagcgtagcgcactagcaacaacctatcatcaatggctaccaagaggtgagccctccttgcgcttcttgcccttttagtgagcgcaacaaatgcgttcattattccacagagctcacttgctcctagtgccattattccacagttcctcccaccagttacttcaatgggcttcgaacatccagccgtgcaagcctacaggctacaactagcgcttgcggcgagcgtcttacaacaaccaattgcccaattgcaacaacaattcttggcacatctaaacctacaaaccatcgcaacgcatcagcaacaacagtttctgccatcactgagccacctagccgtggtgaaccctgtcgcctacttgcaacaacagttacttgcattcaacccacttgctctggcgaacgtagctgcatacc

SEQ ID NO: 17930 - DNA, 428 bp, Zea mays
  Clone ID: LIB3151-021-Q1-K1-B9
attgataccaactagcaacatacatagtgaagtacactagcaacatcttagcaccaatgggagccaagatttttgccctccttgccctccttgctctttcagcaagcgctgctacctcgacttttattccacaatgctcacaacaatacctctctccggcgacagccgtgggatttcaatacccaactatacaatcctacatggtacaagaggccatccaagcaagcatcttacggtcattagcattaaccctccaacaaccatatgctctattgcaacagccatccttagtgcatctgtatctccaaagaatcgcggcacaacaactacaacaacagttgctaccaacaatcaatcaagtagttgcagcgaaccttgctgcttacctccagcaacaacagtttcttccattcaatcaactagatggg

SEQ ID NO: 17931 - DNA, 438 bp, Zea mays
  Clone ID: LIB3151-021-Q1-K1-C1
ccaactagcaacatagaaagcacaatagtgtaccaacaatggctaccaagatattagccctccttgcgctcctttccctttcagtgagcgcaacaactgcattcattattccacaatgctcacttgctcctaatgccattattccacagttcctcccatcagttacatcaaaggggcatcgaacaccctattgtgcaagcctataggctacaacaagcgcttgcggcgagcgtcttacaacaaccgtttgcccaattacaacaacaatccttggcacatctaaccatacaaaccatcgcaacacaactagagcaacagtttgtgcccgcattgagccaactagccgcagtgaaccctgtctcctacttgcaacagcaactgcttgcatccaacccacttgctctggcgaacacagccgcataccagcaacaactacag

SEQ ID NO: 17932 - DNA, 408 bp, Zea mays
  unsure at all n locations
  Clone ID: LIB3151-021-Q1-K1-C3
gacaccttcattcatatcactgatttgtctgggagggaaactctggttcggatcaccggtggcatgaaggtgaaggctgaccgtgatgagtcgtcaccttacgctgctatgcttgctgctcaagacgtcgcacagcgctgcaaggagcttggcattactgcactgcacattaagcttcgtgccaccggaggcaacaagaccaagaccccaggacctggtgcccagtctgccctcagggcgcttgctcgttccgggatgaaaatcggacgcattgaggacgttaccccggtccccacggacagcactcgcagaaagggcggtaggaggggaaggaggctgtangcgtctctgctgcgtgccatttgctggctcttggcgggtggccatcatgaagctagtcctctctgg

SEQ ID NO: 17933 - DNA, 230 bp, Zea mays
  Clone ID: LIB3151-021-Q1-K1-C5
attgagaccaacaagcaacatagaaagtggaatccagtagcaacaatatagcaacaatggcgaccaagatattttccctccttatgctccttgctctttctgcatgtgttgctaacgcgacaattttccctcaatgctcacaagctcctatagcttcccttcttcccccataccttccatcaatgatagcttcagtatgtgaaaacccagttcttaaaccttataggctc

SEQ ID NO: 17934 - DNA, 242 bp, Zea mays
  Clone ID: LIB3151-021-Q1-K1-C6
tcttatgctacttgctcttactgcatgtgtttctaacgcgtcaattattcctcatatgctcacaagctcctatagcttcctttttttcttcattacctttcatcaatgaaagttttaacttgagaaaacccatatctataatcttataagcttccaacaagctatctctttaagcaatatatcttatattaccctagtttcaacaatttccagctcttatatttgtctctattattgataca

SEQ ID NO: 17935 - DNA, 175 bp, Zea mays
  Clone ID: LIB3151-021-Q1-K1-C8
tcgacccacgcgtacggacaccatatttatcattctcattagatgttccaagcaaacttactcctactttccggggcgtggcttttttatactttctcctaaatctaattcacttaccgccgctttacaaattcgtgactaattaaacaatgactttacgaaccttattattact

SEQ ID NO: 17936 - DNA, 435 bp, Zea mays
  Clone ID: LIB3151-021-Q1-K1-D1
gatcagcaaagcggcagtgcgtagagaggatcgtcgaacagaacagcatgaagatggtcatcgttctcgtcgtgtgcctggctctgtcagctgccagcgcctctgcaatgcagatgccctgcccctgcgcggggctgcagggcttgtacggcgctggcgccggcctgacgacgatgatgggcgccggcgggctgtacccctacgcggagtacctgaggcagccgcagtgcagcccgctggcggcggcgccctactacgccgggtgtgggcagacgagcgccatgtaccagccgctccggcaacagtgctgccagcagcagatgaggatgatggacgtgcagtccgtcgcgcagcagctgcagatgatgatgcagcttgagcgtgccgctgccgccagcagcagcctgtacgagccagctctgatgcagcagcagc

SEQ ID NO: 17937 - DNA, 432 bp, Zea mays
  Clone ID: LIB3151-021-Q1-K1-D2
tgaactgggaatgacgaggccgaggacaaaagcaaattgacaccttctccgttcccgacgactcccgtgagcgtggagcggcgactaggcgaggccatggcctccggcatcggctccggccagcagcaacccccagttagattggatgccctagcagcgccggcggcagatgctgacccgggagccgtcggcgacaagctcgtcttcgaagcgccgcctcagcccgtgagggaggactacgtccagaacgccgtcaagtttctctcccaccccaaggtcaggggctcccccgtcgtctacaggcgatccttcctcgagaagaagggccttagcaccgaggagatcgacgaggccttccgaagggttcctgatcctcaacccagcactacggctaccacttctccgcagcagcaggtcaacagccagaatcaa

SEQ ID NO: 17938 - DNA, 432 bp, Zea mays
  Clone ID: LIB3151-021-Q1-K1-D3
ccagagaccaaactattcgtatcgtgcgtaggtgttgcttgctgttgcaacggaccatccatctagtgcttgcattgctgtcgcactcgctcagctatctccaccgctattggttgttgtttggttacccacgccctgctctctgataccagttgatagcagcagcagctagctataggttgtcagcaggatcgaccagatagatagcgcggatcggaattaacagcgctgcaggaggatggtgaagagcacgacgacgatgggggcggcgagctgctgcggcggcgtgctgccgctggcgtcgctgaaccacatcagcatcgtgtgccggtcggtggaggcgtcgctgcgcttctacacggacgtgctcggcttcgtccccatccgccgccccggctctttcgacttcggcggcgcctggctgttcaacta

SEQ ID NO: 17939 - DNA, 388 bp, Zea mays
  Clone ID: LIB3151-021-Q1-K1-D4
attcagccagctagctactgcctactctcagcaacaacaacttcttccatttaaccaattggccgcactgaaccccgctgcttatttgcagcagcaaatactactaccatttagccagctagctgcagcaagccgtgcttccttcttgacacagcaacagttgctgcctttctaccagcagtttgcggctaaccccgcaaccctcttacaactacaacaattgttgccctttgtccaacttgctttgacaaacccagcagccttctaccaacaacacatcattggtggtgccctcttttagattgcttattagtcgtaattcaataataaagttttttggatgatgtatgtggccaaccagaaataagaagttacatttccagattct

SEQ ID NO: 17940 - DNA, 359 bp, Zea mays
  Clone ID: LIB3151-021-Q1-K1-D5
gccagcgcctctgcaatgcagatgccctgcccctgcgcggggctgcaaggcttgtacggcgctggcgccggcctgacgacgatgatgggcgccggctggctgtacccctacgcggagtacctgaggcagccgcagtgcagcccgctggcggcggcgccctactacgccgggtgtgggcagacgagcgccatgtaccagccgctccggcaacagtgctgccagcagcagatgaggatgatggacgtgcagtccgtcgcgcaacagctgcagatgatgatgcaccttgagcgtgccgctgccgccagcagcaacctgtacgagccagctctgatgcagcagcagcagcagctgctggcagc

SEQ ID NO: 17941 - DNA, 316 bp, Zea mays
  Clone ID: LIB3151-021-Q1-K1-D7
atttccggagcgacccactcgttctgtctaacacctgaaaactgtgctaaaggctgagctactccttccggtgtattcagggatggtcataggcccagaatatctttcaaacaatgttaaaattccaggtggtgagtatcttctgaagcctctcggctttgattggatcaaaggaccagctaaaatctgtgagatcctcaaagacagttaccatcgacttagatatactataaaagacgactttttacgttttaaccagccttttgtctgggcattcaaccttgcactgcccaaggataactttagcgcaatattc

SEQ ID NO: 17942 - DNA, 451 bp, Zea mays
  Clone ID: LIB3151-021-Q1-K1-D9
ggaattccggccgacccagcgttcgcaacaagcaacatataaagtggaatacagtagcaacaattgagcaacaatggcggggaagatattttccatccttatgctccttgctctttctgcatgtgttgctaacgcgaccatttttcctcaatactcacaagctcctatagctgcccttcttcccccataccttccatcaatgaccgcttcagtatgtgaaaacccagcccttcaaccctacaggctccaacaagcaatcgctacaagcaacttacctttatcacccctgttctttcaacaatcgccagccctatctttggtgcaatcattggtacaaaccatcagggcacaacagctgcagcaactcgtgctaccagtgatcagccaagtagctctggcaaacctttctccctactctcagcaacaacaatttcttccattcaaacaactg

SEQ ID NO: 17943 - DNA, 408 bp, Zea mays
  Clone ID: LIB3151-021-Q1-K1-E1
cctccttccccgatccagtcccgcagcaacgccgagggagagcgaggagagacagatacagatcgcgcgctgagatgtcgtcggactcctcgtcgtgggcgcgcgccctggtgcagatctcgccctacaccttctccgccatcggcatcgccgtctccatcggcgtctctgttctcggcgcggcatggggtatcttcatcacggggagcagcctcatcggggccgccatcaaggcgcccaggatcacatctaagaacctcatcagtgtcatcttctgtgaggctgttgcaatttatggtgtaattgtggcaatcatcctccagacaaagcttgaaagtgtgccaacatcccaaatgtacgatccggagtctcttcgagctggctatgcgatctttgcatctggtctta

SEQ ID NO: 17944 - DNA, 430 bp, Zea mays
  Clone ID: LIB3151-021-Q1-K1-E11
ttttcagcattcagaaacacaccaagcgaagcgcactagcaacaacctaacaacaatggctaccaagatattagccctccttgcgcttcttgcccttttagtgagcgcaacaaatgcgttcattattccacagtgctcacttgctcctagtgccattattccacagttcctcccaccagttacttcaatgggcttcgaacatccagccgtgcaagcctacaggctacaactagcgcttgcggcgagcgtcttacaacaaccaattgcccaattgcaacaacaatccttggcacatctaaacctacaaaccatcgcaacgcaacagcaacaacagtttctgccatcactgagccacctagccgtggtgaaccctgtcgcctacttgcaacagcagctacttgcatccaacccacttgctctggcgaacgta

SEQ ID NO: 17945 - DNA, 434 bp, Zea mays
  Clone ID: LIB3151-021-Q1-K1-E2
gaaagcacaatagtgtaccaacaatggcagccaaaatattttgcttccttatgctccttggtctttctgcaagtgctgctaccgcaaccattttcccacaatgctcacaagctcctatagcttcctttcttcccccatacctctcaccagcggtgtcttcagtatgtgaaaacccaattcttcaaccctacaggatccaacaggcaatcgcagcaggcatcttacctttatcacccttgttcctccaacaaccgtcagccctattacagcagttacctttggtgcatttgttggcacaaaacatcaaggcacaacaactacaacaacttgtgctaggaaaccttgctgcctactctcagcaacagcagtttcttccattcaaccaactggctgcattgaactctgctgcttatttgcaacaacaactaccattc

SEQ ID NO: 17946 - DNA, 436 bp, Zea mays
  Clone ID: LIB3151-021-Q1-K1-E3
agaccattagctttatctactccagagcgcagaagaacccgatcgacaccatgagggtgttgctcgttgccctcgctctcctggctctcgctgcgagcgccacctccacgcatacaagcggcggctgcggctgccagccaccgccgccggttcatctaccgccgccggtgcatctgccacctccggttcacctgccacctccggtgcatctcccaccgccggtccacctgccgccgccggtccacctgccaccgccggtccatgtgccgccgccggttcatctgccgccgccaccatgccactaccctactcaaccgccccggcctcagcctcatccccagccacacccatgcccgtgccaacagccgcatccaagcccgtgccagctgcagggaacctgcggcgttggcagcaccccgatcctgggccagtgcgt

SEQ ID NO: 17947 - DNA, 437 bp, Zea mays
  Clone ID: LIB3151-021-Q1-K1-E4
agaccaacaagcaacatagaaagtggaatccagtagcaacaatagagcaacaatggagaccaagatattttccctccttatgctccttgctctttctacatgtgttgctaacgcgacaattttccctcaatgctcacaagctcctatagcttccctttttcccccataccttccatcaattatagcttcagtatgtgaaaacccagctcttcaaccatataggcttcaacaagcaatcgcagcaagcaacatacctttatcgcccttgttgtgtcaacaatcgccagccctatctttggtgcagtcattggtacaaaccatcagggcacaacagctgcagcaactcgtgctacctgtgatcaaccaagtagctctggcaaacctttctccctactctccgcaacaacaatttcttccattcaaccaactgtctacac

SEQ ID NO: 17948 - DNA, 99 bp, Zea mays
  Clone ID: LIB3151-021-Q1-K1-E5
atcacgcgcactgatcttcacaccattcgctgcacattctccacatcgcatcatcaccgggtcgacacatttagggcgttgttgcgctccttgcgcttt

SEQ ID NO: 17949 - DNA, 373 bp, Zea mays
  Clone ID: LIB3151-021-Q1-K1-E6
cccactcgtacagttttcaactattcattaaacacactcattctaatcgcactatcaacaacctaacaacaggggggttcctaaatattagccctccttgcgcttcttgcccttttagttagcgcaacaaatgcgttcattattccaaagtgctcatcttttcctattgccattattccacattttctcccaccagttacttcaatggtctacaaacattcatcacttcaagcctacaggctacaactaacgcttgccgtaagcgtcttacaacacccaatttcccaatttcaacaacaatccttgtcacatttaaaactacaaaccatttcaacccaacatcaacaaacatttttgccattacttaaccacc

SEQ ID NO: 17950 - DNA, 162 bp, Zea mays
  Clone ID: LIB3151-021-Q1-K1-E7
atactaagctgtttccttaacctctgcggagctttcgcaaaatcttactccgactccattttctaacagtgctacctaggttctatttcttcctatatcttcttcttccttttactcacgtttttcatagaaaaatatcacctattacgccaaccctacatc

SEQ ID NO: 17951 - DNA, 431 bp, Zea mays
  Clone ID: LIB3151-021-Q1-K1-F1
cgatcggcctccctcccccaagatcctccactcgatcccaaacaaaccaacaaatccatccatcgcacatggacgcgttcttctcggcctcctccgcgtcggcgccctacggctacggcgccggcggatggagctacgactcgctcaagaacttccgccagatcacccccgccgtccagacccacctcaagctcgtctacctcaccctgtgcgcggcgctggcctcgtcggcggtgggcgcttacctgcacgtggtctggaacatcggcggtacgctgacaatgctcggttgcgtcggcagcatcgcctggctcttctcggtgcccgtctacgaggagaggaagaggtatgggctgctgatggcggctgccctcctggaggcgcttcggtcggacccctcgtcaagctcgccgtggaatttgacccaagca

SEQ ID NO: 17952 - DNA, 351 bp, Zea mays
  Clone ID: LIB3151-021-Q1-K1-F12
tcgaaccattaaagtgatctactccagacctcataataaaccgatcgacaccatgagggtggtgctcgttgccctcgctctcctggctctcgctgtgagcgccaccttcacgcatacaagcggcggttgctgctgccatccaccgccgccggttcatctaccgtcgtcggtgcatctgccacctacggttaaactgccaccttcaatgcattttccaccgccggtccacctgccgtcgcctgtccacctgccaccgccggtccatgtgccgccgccggttcatctgccgtcgccaccatgccactaccctactcaaccgtcccgtccttagcctcatccccagccacaccc

SEQ ID NO: 17953 - DNA, 317 bp, Zea mays
  Clone ID: LIB3151-021-Q1-K1-F2
agcagaacacacctgcagctgcagaaatagggtcatgtcctgctagcttgagagctctggtacggtgtagcaaggtacgggagagagagagagtagcaaactagctagggcacagggcagggcaggggccggctgcattatattgggatcggatctgggggcgaccgagctagcatcagctgagagaagagagagggggcaatatataatggtgttgttgtcgctggaggcgttgaggaagaggaacgtggccggtccgcttgtgctgttcaaccttgccctctacgtctccatgttggggttcgcgagctgggcgc

SEQ ID NO: 17954 - DNA, 379 bp, Zea mays
  Clone ID: LIB3151-021-Q1-K1-F3
agcaatcgcagcaagcaacatacctttatcacccttgtttcaacaatcgccagccctatgtttggtgcagtcattggtacaaaccatcagggcacagcagctgcagcaactcgtgctacctgtgatcaaccaagtagctctggcaaacctttctccctactctcagcaacaacaatttcttccattcaaccaactgtctacattgaaccgtgctgcttatttgcagcaacaactattaccattcagccagctagctactgcctactctcagcaacaacaacttcttccatttaaccaattggccgcactgaaccccgctgcttatttgcagcagcaaatactactaccatttagccagctagctgcagcaagccgtgct

SEQ ID NO: 17955 - DNA, 432 bp, Zea mays
  Clone ID: LIB3151-021-Q1-K1-F4
gggtcttcagaccattagctttatctactccagagcgcagaagaacccgatcgacaccatgagggtgttgctcgttgccctcgctctcctggctctcgctgcgagcgccacctccacgcatacaagcggcggctgcggctgccagccaccgccgccggttcatctaccgccgccggtgcatctgccacctccggttcacctgccacctccggtgcatctcccaccgccggtccacctgccgccgccggtccacctgccaccgccggtccatgtgccgccgccggttcatctgccgccgccaccatgccactaccctactcaaccgccccggcctcagcctcatccccagccacacccatgcccgtgccaacagccgcatccaagcccgtgccagctgcagggaacctgcggcgttggcagcaccccgatcct

SEQ ID NO: 17956 - DNA, 422 bp, Zea mays
  Clone ID: LIB3151-021-Q1-K1-F5
gggcctcacccttttccctggtgttgcaagttgcaacacacagcgtccggcgagatcggcgatgagaaaccacgagcccacccaccattcggtacgcgcgcgcgatgtgtcccgtcagaggcggtggttgttcttggccagcgtccgtcgtcggctctgtcacggcggcgctgctcctcgccgccgtcatcgtgcggctcttcgtaccccgtgcctgttcttcaggaattatcaaggggcggcggcaggtaggtgctggtgctgccggaggagcacggctccctgccggctcgctcgggtggccgttcctcggcgagacgctggcgttcatccgggccgcgttctcgcctcgcccggagtcctttgtcgagaaacgccgcgtcttgtacgggaaggtgttcaagtcgcacctgtgggggtcg

SEQ ID NO: 17957 - DNA, 407 bp, Zea mays
  unsure at all n locations
  Clone ID: LIB3151-021-Q1-K1-F6
aagcaacatanaaagtggaatccagtagcaacaatagagcaacaatggcgaccaagatattggccctccttatgctccttgctctttctgcatgtgttgctaacgcgacaattttccctcaatgctcacaagctcctatagcttcccttcttcccccataccttccatcaatgatagcttcagtatgtgaaaacccagctcttcaaccctataggctccaacaagcaatcgcagcatgcaacatacctttattaacccttgtttcaacaatcgccagccctatttttggtgcatcctttgttccaaaccttaaggccccagaacttgcgcaacctctgcctaccgtgatcaaaccaattacctttgccaaacttttttccttattttaagaacaacaatttttttca

SEQ ID NO: 17958 - DNA, 289 bp, Zea mays
  Clone ID: LIB3151-021-Q1-K1-F7
ctgggacatcgactacgatctccatgtctggctcaccgtcgacctccccatcgtcggcgacttcaccatcccgctctccacctctggcgagttcaagctccccaccctcaaggacttgttctgatctagtagtagctcgcttgccttgtgttctgtgcgggcgcgcaccatcgatctgtacgacgagcttttgcaaataaacgacgcagctcctctgttctatatatctcagtgaatgcctaagctaaggggatggatggtttaataaataaagagctggatttcattc

SEQ ID NO: 17959 - DNA, 405 bp, Zea mays
  Clone ID: LIB3151-021-Q1-K1-F8
gcgcaatcatcattcatcttagtagtataggcaccaaatcaaatctgcaacatcaattgtctaactccaaaaaccatgaagctggtgcttgtggttcttgctttcattgctttagtatcaagtgtttcttgtacacagacaggcggctgcagctgtgtgtcaacaacaaagccatgagcagcaacatcatccactacatcatcatccacaaaaacatcaacattaaccaccaccacaacatcaccagcagcatcaacaccaactacaacaagttcacatgcatccactaatacatcagcaacaacaagaagttcatgttcaacatcttcaacaacaaccgtagtaccaacatcaacaacaacaacatcaccaacaacatcatttatgtgaatgccaacaacaaca

SEQ ID NO: 17960 - DNA, 371 bp, Zea mays
  Clone ID: LIB3151-021-Q1-K1-G1
atggagggcgtgtcgctctacttcagcgacaaggcctacggcagggtgctcatcgaggaggagcgcgccgccgagaacgtctacatacataaaatggagcgggagaagctggataaactgaggaggaaggaagacaaggccaaggccgaggcggccaacagggccgtcgtctccgtcagaggcgacacgaagaatggtgaggaggctcatccgagctgatcatcgccaaaatcggaccagtgctcccgtgaatcgtgtgatgctgtactactgatgacacgtagatgcaaatagacgccgtcgtactactctgatctgcaactctgctagtcgtgtccagcgtgataccattcctgtgactgttgtgaact

SEQ ID NO: 17961 - DNA, 417 bp, Zea mays
  Clone ID: LIB3151-021-Q1-K1-G10
tcgcgggctgctccttcctcccagaggaagcgtacaaacctggaggggaactgcccgtctgggcggctgacccgtccacctccttcttttcccctcgtgtccgccgctacacgcgccgtcggaaccctagcctccaccgccacaggcagcagggatggagaaaggagcctcggaggcgtcgcccccttgcgctcgctgcggcaagcccgctcagcttcaatgccccaagtgtgtcgaacttaagttaccgcgtgagaatgcagctttctgcacacaggattgttttagggcagcatggagctctcacaaatctgttcacccaaagcctggtgcaccggcatcccagcagtctccagaaggttggaaatattgtctgagaaaagggcgggaacgtgcattgcaacttcctcgttttga

SEQ ID NO: 17962 - DNA, 400 bp, Zea mays
  Clone ID: LIB3151-021-Q1-K1-G11
tcgaaagtggaatacattattcaacaatagtttcaactaatggcgcgccaagatatttctccatcctgtgatgctccttgctctttctgcatgtgttgctaacgcgaccatttttcctcaatactcacaagctcctatagctgcccttcttcccccataccttccatcaatgaccgcttcagtatgtgaaaacccatcccttcaaccctacatgctccaacaagctatcgcaacaagcatcttacctttatcacccttgttcctccaacaatcatcaaccctattacagcagttacctttggtgcatttattggcacaaaacatcatggcacaacaactacaacaacttgtgctagcaaaccttgctgcctactctcatcaacaacaatttttttcattc

SEQ ID NO: 17963 - DNA, 417 bp, Zea mays
  Clone ID: LIB3151-021-Q1-K1-G12
tcgcagaaacacaccaagcgaagcacattatcttcaacctaacaacaatggctaccaagatattagtggcctccttgcgcttcttgcgctttttgcgagcgcaacaaatgcgttcattattccacaatgctcacttgctccaagttccattattacacagttcctcccaccagttacttcaatgggcttcgaacacccagctgtgcaagcctatatgctacaacaagcaattgcggcgagcgttttacaacaaccaatttcccagttgcaacaacaatccttggcacatctaacaatacaaaccatcgcatcgcaacagcaacaacaattcctaccagcactgatccacctagccatggtgaaacctgccgtctacttgcaacagcagttgcttgcattaaacccacttgctctggc

SEQ ID NO: 17964 - DNA, 386 bp, Zea mays
  unsure at all n locations
  Clone ID: LIB3151-021-Q1-K1-G2
attagctatatctactccacagcgcagaagaacccgaccgacaccctcagggtgtcgatcgttgccctcgctcttctggctatcgctgcgagcgccacctgcacgcatacaagcggggggtgacggtgacaaccaccgccgtcggttcatctaccgccgtcggtgcatttgccacctccggatcacctgccacctccagtgcatctcccaccgacggtccatctgacgacggcggtccacctgatcaccgaacggtacatgtgcctgcagncggttcatctagcgccgccaccatgccactaacctacataaccgccgctgccttagcctgatccctagccacacccatgcccgtgccaacagccgcattcaatcccgcgccagct

SEQ ID NO: 17965 - DNA, 350 bp, Zea mays
  Clone ID: LIB3151-021-Q1-K1-G3
atttagaccaactagcaacatataaagcacaattgtgttccaactatggcagccaacatgttgtgcctgcttatgctccttggtatttatgcaagtgctgctaccgataccattttcccgcactgctcacaagctcctatagcttaccttcttacaacatacctgtcaccagccgtgtattccgtgtgcgaaaacacaattcttcatccctacaggatccaacaggcaatcgctgctggcatcttacctttatgacccttgtttcttcaacaatcatcagccctattacattcattacctttggtgcattcatcggcacaaaacatcttggctcaacaactacaacaact

SEQ ID NO: 17966 - DNA, 353 bp, Zea mays
  Clone ID: LIB3151-021-Q1-K1-G4
tcgtaggcttctccttacttccacaggaagtgtacaaacctggaggggaaccatcagggtgggggtcttagccgtccatctccttcctttcccctcgagtccgcacgtacacgcacacgtcggacgctatcgttgacagccacacgcagcaggtataggtaaaaggagcctcgcatgcgtcacccccttgctatctgtcaccttcggcgcatcagctacaatccctccagcttgtcgaacctaaccaaccgccagagaatgcacatttttgcacacatgattgttttagggcagcatggacccactacacatctcaacacccaaagcctgatgcacattcttaccaacactca

SEQ ID NO: 17967 - DNA, 375 bp, Zea mays
  Clone ID: LIB3151-021-Q1-K1-G5
cgggctgctccttcctcccagaggaagcgtacaaacctggaggggaactgcccgggtgggcggctgacccgtccacctccttcttttcccctcgtgtccgccgctacacgcgccgtcggaaccctagcctccaccgtcacaggcagcagggatggagaaaggagcctcggaggcgtcgcccccttgcgctcgctgcggcaagcccgctcagcttcaatgccccaagtgtgtcgaacttaagttaccgcgtgagaatgcagctttctgcacacaagattgttttagggcagcatggagctctcacaaatctgttcacccaaagcctggtggcacggcattccaagcagtctccaaaaaggtggaaaaattggcctg

SEQ ID NO: 17968 - DNA, 306 bp, Zea mays
  Clone ID: LIB3151-021-Q1-K1-G8
attagctttatctactccagagcgcagaagaacccgatcgacaccatgagggtgttgcgtggttgccctcgctctcctggctctcgctgcgagcgccacctccacgcatacaagcggcggctgcggctgccagccaccgccgccggttcatctaccgccgccggtgcatctgccacctccggttcacctgccacctccggtgcatctcccaccgccggtccacctgccgccgccggtccacctgccaccgtcggtccatgtgccgccgccggttcatctgccgtcgccaccatgccactaccctac

SEQ ID NO: 17969 - DNA, 431 bp, Zea mays
  Clone ID: LIB3151-021-Q1-K1-H1
cagggaacctgcggcgttggcagcaccccgatcctgggccagtgcgtcgagtttctgaggcatcagtgcagcccgacggcgacgccctactgctcgcctcagtgccagtcgttgcggcagcagtgttgccagcagctcaggcaggtggagccgcagcaccggtaccaggcgatcttcggcttggtcctccagtccatcctgcagcagcagccgcaaagcggccaggtcgcggggctgttggcggcgcatatagcgcagcaactgacggcgatgtgcggcctgcagcagccgactccatgcccctacgctgctgccggcggtgtcccccactgaagaaactatgtgctgtagtatagccgctggctagctagctaagtgagtcatttagcggcgatgattgagtaataatgtgtcacgcatcaccatgggtg

SEQ ID NO: 17970 - DNA, 413 bp, Zea mays
  Clone ID: LIB3151-021-Q1-K1-H10
caactagcaacatagaaagcacaatagtgtaccaacaatggcagccaaaatattttgcctccttatgctccttggtctttctgcaagtgctgctacggcgaccattttcccacaatgctcacaagctcctatagcttcccttcttcccccgtacctctcaccagcggtgtcttcggtatgtgaaaacccaattcttcaaccctataggatccaacaggcaatcgcagctggcatcttacctttatcacccttgttcctccaacaatcatcagccctattacagcagttacctttggtgcatttattggcacaaaacatcagggcacaacaactacaacaacttgtgctagcaaaccttgctgcctactctcagcaacaacagtttcttccattcaaccaactagctgcattga

SEQ ID NO: 17971 - DNA, 383 bp, Zea mays
  unsure at all n locations
  Clone ID: LIB3151-021-Q1-K1-H11
atcgacaccatgagggtggtgctcgttgccctcgctctcctggctctcgctgcgagcgcgacgttcacgcatacaagcggcggctgcggctgccagccaccgccgtcggctcatctaccgccggcggtgcatgtgccacctgcggttcacctgccacctacggtgcatgttccaccgccggtccacctgccgtcgccggtccacctgccaccgacggtccatgtgccgccgccggttcatctgccgacgccaccatgccactaccctactcaaccgacccgggctcatgctcattctcagccacacccatgcccgtgccaacagccgcatncaagcccgtgccagctgcagggaacctgcggcgttggcagcaccccgatcct

SEQ ID NO: 17972 - DNA, 443 bp, Zea mays
  unsure at all n locations
  Clone ID: LIB3151-021-Q1-K1-H12
tagcacatnaaagcacaatatgtaccaacaatggcagccaaaatattttgcctgcgggtgctccttggtctttctgcaagtgctgctacggcgaccattttcccacaatgctcacaagctcctatatcttcccttcttcccccgtacctctcaccagcggtgtcttcggtatgtgaaaacccaattcttcaaccctatatgatccaacaggcaatcgcagctggcatcttacctttatcacccttgttcctccaacaatcatcagccctattacagcagttacctttggtgcatttattggcacaaaacatcagggcacaacaactacaacaacttgtgctagcaaaccttgctgcctactctcagcaacaacagtttcttccattcaaccaactagctgcattgaactctgcttcttatttgcaacaacaacaactaccatt

SEQ ID NO: 17973 - DNA, 439 bp, Zea mays
  Clone ID: LIB3151-021-Q1-K1-H2
attttgagcattcagaaacacaccaagcgaagcgcactagcaacaacctaacaacaatggctaccaagatattatccctccttgcgcttcttgcgctttttgcgagcgcaacaaatgcgtccattattccacaatgctcacttgctcctagttccattattccacagttcctcccaccagttacttcaatggccttcgaacacccagctgtgcaagcctataggctacaacaagcgattgcggcgagcgtcttacaacaaccaattgcccaattgcaacaacaatccttggcacatctaacaatacaaaccatcgcaacgcaacagcaacaacagttcctaccagcactgagccacctagccatggtgaaccctgtcgcctacttgcaacagcagctgcttgcatccaacccacttgctctagcaaacgtagttgcaaa

SEQ ID NO: 17974 - DNA, 314 bp, Zea mays
  unsure at all n locations
  Clone ID: LIB3151-021-Q1-K1-H3
attgagaccattagctatatctactccagagcgcagaagaacccgatcgacaccatgagggtgttgctcgttgccctcgctctcctggctctggatgcgagcgccatctgcacacatacaagcggacggtgcggctggcagccaccgtcgtcggttcatctaccgacgacggtgcatgtgccacctgcggatcacctgccacctccgatgcatctcccaccggcggtccacctgccgtcgccggtccacctgccaccgccggtccatgtgccggcggcggttcatctgccgccgncaccatgccactaccctac

SEQ ID NO: 17975 - DNA, 189 bp, Zea mays
  Clone ID: LIB3151-021-Q1-K1-H4
gcactattgtgcccccactgtcgcccaaaatattttgctgcggggggctccttgggctctctgcaagagctcttaccccgaccacattcccacacagcgcacaagctcctatatctttctttttttccccatacctctcacaacaggtgtgtttagtatgtgaaaacacaattttttaaccctacatga

SEQ ID NO: 17976 - DNA, 281 bp, Zea mays
  Clone ID: LIB3151-021-Q1-K1-H5
ggacatatatagagcactccagttcccacaaagagcaacaatggcgaccaagagggtggcgctccttatgctccctgctctttctgcatgtgctgctaacgcgacaattttctctcaatgctcacaagctcctatagcttcccttcttcccccataccttccatcaatgatagcttaagaatgtgaaaacccagctcttcaaccctatcggctccaacaagcaatcgcagcaagcaacatacccttatcacccttgttttaacaatcgccagtcctatctt

SEQ ID NO: 17977 - DNA, 189 bp, Zea mays
  Clone ID: LIB3151-021-Q1-K1-H7
attttgagcattcataaacacaccaagcgaagcgtggtccagtgcgtctagcatctaaggcagcgaagaaattatacgtccttgcgcttcttgcgcttttagcgagcgcaacaaatgcgtccatgttgccagcagctcatgcaggtggagccgcaacatcggtaccaggccgatctttcgggtttggtt

SEQ ID NO: 17978 - DNA, 220 bp, Zea mays
  Clone ID: LIB3151-021-Q1-K1-H9
gcaacatataaagtggaatccagtagctacaatagagcaacattggcgaccaagaggtgggcctccttatgctccttgctctttctgcatgtgttgctaacgctacaattttccctcaatgctcacaagctcctttagcttcccttcttcccccataccttccatcaatgatagcttcagtatgtgaaaacccagctcttcaaccctataggctccaaca

SEQ ID NO: 17979 - DNA, 400 bp, Zea mays
  Clone ID: LIB3151-022-Q1-K1-A1
caacaatggctaccaagatattatccctccttgcgcttcttgcgctttttgcgagcgcaacaaatgcgttcattattccacaatgctcacttgctccaagttccattattacacagttcctcccaccagttacttcaatgggcttcgaacacccagctgtgcaagcctataggctacaacaagcaattgcggcgagcgtcttacaacaaccaatttcccagttgcaacaacaatccttggcacatctaacaatacaaaccatcgcaacgcaacagcaacaacaattcctaccagcactgagccacctagccatggtgaaccctgccgcctacttgcaacagcagttgcttgcatcaaacccacttgctctggcaaacgtagttgcaaaccagccacaaca

SEQ ID NO: 17980 - DNA, 444 bp, Zea mays
  Clone ID: LIB3151-022-Q1-K1-A10
agaccattagctttatctactccagagcgcagaagaacccgatcgacaccatgagggtgttgctcgttgccctcgctctcctggctctcgctgcgagcgccacctccacgcatacaagcggcggctgcggctgccagccaccgccgccggttcatctaccgccgccggtgcatctgccacctccggttcacctgccacctccggtgcatctcccaccgccggtccacctgccgccgccggtccacctgccaccgccggtccatgtgccgccgccggttcatctgccgccgccaccatgccactaccctactcaaccgccccggcctcagcctcatccccagccacacccatgcccgtgccaacagccgcatccaagcccgtgccagctgcagggaacctgcggcgttggcagcaccccgatcctgggccagtgcgtcgagtttc

SEQ ID NO: 17981 - DNA, 527 bp, Zea mays
  unsure at all n locations
  Clone ID: LIB3151-022-Q1-K1-A12
gaccccaactagcannacatagaaagggcacaanntagtgtnnaccaaccaatnnggcagnnccaaaanntattttgcgcgtccttaatgcctnnccttggnntctttctnnngcaagtgccctgctanncggcgacncnnattttcnnccgaaatggccctcgcaagggctcctnaatagcttccnnncttcttnncccccgtacccctctcaaccanngcggtgtnncttcggtatttgtgaaaacccccaattnncttcaaccctttacaggatccnnnacaggcaatcacanngctggcatcttaacctttatcaaacccttgttcctccaacccaatcatcagccctattacatcnnagttacctttggtgcatttatntggcacanaaacaatcagggcacaacaacctacannacaacttgtgctagcaaaccttgctgcctactctcagcaacagcagtttcttccattcaaccaactagctgcattgaactctgcttcttatttgcaacaacaacaac

SEQ ID NO: 17982 - DNA, 224 bp, Zea mays
  Clone ID: LIB3151-022-Q1-K1-A2
aaaacccgacgcccatgggggtgtcggcctcgtctcctggcttcgtggagcgcacctcccatacaacgggtgcgtgcaccaccgcgcggtattacgcgcgggcattgcactcggtactgcacctcgggcatctccacgcggtcactgcgcgcggtcactgcaccgcggccatgccgcgcggtattgcgcgcacatgccactaccctataacgcccgctagctat

SEQ ID NO: 17983 - DNA, 362 bp, Zea mays
  Clone ID: LIB3151-022-Q1-K1-A3
cgtccgtttcagctttcataaacacaccaagcgaagcgcactagcaacaacctaacagcaatggctacggggagattatccctgcttgcgcttttcgccctactagtgagcgcaacaaatgcgtccattattccacagcgctcactcactcgtagtacgataagtgaacaggcccttcgaccaggaacttcaatgggcttctaacatgcatccgtgcaagcctacacgctacaactagcgcttgcagctagcgtcttacaacaaccaattgcccacttgtaacatcaatccttggcacatctaatcctacaatccatcgcaacgcaacagcaataacagtttctgacatcaatgagccacct

SEQ ID NO: 17984 - DNA, 365 bp, Zea mays
  Clone ID: LIB3151-022-Q1-K1-A4
gaaaaattgaaacaaaaatggattgcctgtaacatattctggaccctgcgggcaatacaccaggcacctatgccttattatgagggggcgcatattataagctggtatatttttagcacaactagcatacatgttgctgacatgcaaatcccaatatgtacaagtaataatcaaatcctgatctctcatcattgccctagcatactgaagactgacgcaatcaatcatactgacacgagaatgtataacttaatagtgcatgcttttttcaccatctgttaacactgtcgccactgcaagggcggacggtacaacctgtgcgaggacatagaagttcttcgccaccccgccggtgcacggctcgc

SEQ ID NO: 17985 - DNA, 388 bp, Zea mays
  Clone ID: LIB3151-022-Q1-K1-A5
ttcatttgcgtacacggcctccctcttcctgtcacttttacagcgagattgcggcagtgagtgggagacaaggtgaaatggttgaagggagcgcacgtatccatgcggcgccggcggccggcataggtggacgataacatgtcggcttggctggttgtcaagaacaccctcaagatcatgcctcttcaagctcccgtccgtacgcccttatgatgtccgctttcgcatgaaggcagcggtgatttgcagcatctatctgcactacctaagggagatgcgcctcccgcacttggtgcatatagaaccgatggcgatcgggcacgactgcgccggcgttgtctacgaggtctgcgccagctagacacacctgtccgtgggcgatcctttg

SEQ ID NO: 17986 - DNA, 396 bp, Zea mays
  Clone ID: LIB3151-022-Q1-K1-A6
gtatccacctgattgattgctgattgctgaactcgacacccggagggcaatgactagcgaactcgctctcctgcatgtccgatgaagagtactcttccaagcaggcggacgatgacccttccacacagcagcggtgcatggagcgcttttgtgctatgtggcgtgtctggtctatcggtggcggcaccacgaggcacaacacatggtgataccccactcaaccagacgcagctaagcgaagcgccagcgcgcaggaatactgcggcgcggagctttaacgccgcacaggtcatgcgccactgcgtcgagaacctgaagcaccactgcagcccggttgggacgcgatactgctcgccacagagccaggcgctgcagcagcagtcctatcaccagatc

SEQ ID NO: 17987 - DNA, 181 bp, Zea mays
  Clone ID: LIB3151-022-Q1-K1-A7
ggaacggccgggccgacccaggcgtacggtgctgtagtatagccgctggctagctagctagttgagtcatttagcggcgatgattgaggggtaatgtgtcacgcatcaccatgggtggcagtgtcagtgtgagcaatgacctgaatgaacaattgaaatgaaaagaaaaaagtattgttcc

SEQ ID NO: 17988 - DNA, 449 bp, Zea mays
  unsure at all n locations
  Clone ID: LIB3151-022-Q1-K1-A8
tcttgcgcttcttgcgctttttgcgagcgcaacaaatgcgtccattattccacaatgctggggtgctcctagttccattattccacagttcctcccaccagttacttcaatggccttcgaacacccagctgtgcaagcctataggctacaacaagcgattgcggcgagcgtcttacaacaaccaattgcccaattgcaacaacaatccttggcacatctaacaatacaaaccatcgcaacgcaacagcaacaacagttgctaccagcactgagccacctagccatggtgaaccctgtcgcctacttgcaacagcagctgcttgcatccaacccacttgctctagcaaacgtagttgcaaaccagcaacaacaacaactgcaacagtttctgccagcgcttaatcaactagccatggtgaaccctgccgnctacctacaacagcaacaac

SEQ ID NO: 17989 - DNA, 452 bp, Zea mays
  Clone ID: LIB3151-022-Q1-K1-A9
gcgcgccatcaaggtggtcggcacgccggcgtacgaggagatggtgaggaactgcatgatccaggatctctcctggaagggccctgccaagaactgggagaacgtgctgctcagcctcggggtcgccggcggcgagccaggggtcgaaggcgaggagatcgcgccgctcgccaaggagaacgtggccgcgccctgaagagttcggcctgcagggcccctgatctcgcgcgtggtgcaaagatgttgggacatcttcttatatatgctgtttcgtttatgtgatatggacaagtatgtgtagctgcttgcttgtgctagtgtaatgtagtgtagtggtggccagtggcacaacctaataagcgcatgaactaattgcttgcgtgtgtagttaagtaccgatcggtaattttatattgcgagtaaataaatggacctgtagtggtggagttaat

SEQ ID NO: 17990 - DNA, 438 bp, Zea mays
  Clone ID: LIB3151-022-Q1-K1-B1
atcgacaccatgagggtgttgctcgttgccctcgctctcctggctctcgctgcgagcgccacctgcacgcatacaagcggcggctgcggctgccagccaccgccgccggttcatctaccgccgccggtgcatctgccacctccggttcacctgccacctccggtgcatctcccaccgccggtccacctgccgccgccggtccacctgccaccgccggtccatgtgccgccgccggttcatctgccgccgccaccatgccactaccctactcaaccgccccggcctcagcctcatccccagccacacccatgcccgtgccaacagccgcatccaagcccgtgccagctgcagggaacctgcggcgttggcagcaccccgatcctgggccagtgcgtcgagttcctgaagcatcagtgcagcccgacggcgacgccctac

SEQ ID NO: 17991 - DNA, 442 bp, Zea mays
  Clone ID: LIB3151-022-Q1-K1-B10
tatatagagcgctagcgtaccaactatagagcatcaatggcggccaagatattttccatcctgatgctccttgctctttctgcatgtgttgctaacgcgaccatttttcctcaatactcacaagctcctatagctgcccttcttcccccataccttccatcaatgaccgcttcagtatgtgaaaacccagcccttcaaccctacaggctccaacaagcaatcgcaacaagcaacttacctttatcacccctgttctttcaacaatcgccagccctatctttggtgcagtcattggtacaaaccatcagggcacaacagctgcagcaactcgtgctaccagtgatcagccaagtagctctggcaaacctttctccctactctcagcaacaacaatttcttccattcaaccaactgtctacactgaaccctgctgcttatttgc

SEQ ID NO: 17992 - DNA, 390 bp, Zea mays
  Clone ID: LIB3151-022-Q1-K1-B11
ttcagaccattagctttatctactccagagcgcagaagaacccgatcgacaccatgagggtgtggctcgttgccctcgctctcctggctctcgctgcgagcgccacctccacgcatacaagcggcggctgcggctgccagccaccgccgccggttcatctaccgccgccggtgcatctgccacctccggttcacctgccacctccggtgcatctcccaccgccggtccacctgccgccgccggtccacctgccaccgccggtccatgtgccgccgccggttcatctgccgccggcaccatgccactaccctactcaaccgccccggcctcagcctcatccccagccacacccatgcccgtgccaacagccgcatccaagcccgtgccagc

SEQ ID NO: 17993 - DNA, 348 bp, Zea mays
  Clone ID: LIB3151-022-Q1-K1-B12
cttcaatccaggaaaggatccactcaagttcgtgctagcagctgggatcgggacgttgcttgtggtgtcactggcggttctcagaatatacctggggtggagctacgttggtgatcgcctgctgtcagcggtggtaccgtacgaagaaaccgggtggtacgacggccagatgtgggtgaagccaccagaggtgttggcccgtgacaggctcctgggatcttacaaggtgaagccggtggtcaacctgctgaagcagacgctggtgggcaccggcgcgctgctcgtcggcgccgtctcgctcttcgcgttcgccgcgccggtcgaagacttcctacacgccctgagcca

SEQ ID NO: 17994 - DNA, 428 bp, Zea mays
  Clone ID: LIB3151-022-Q1-K1-B2
ccacgcgtccgaaacaggtagcgacagctcgacaaagatttgtgagagtgatccggcgctgagaagagatggctaagatcgccgcagccgccgcggcggcggcggcgctgtgcttcgcggccctggtggccgtggccgtctgccaaggcgaggtcgagcggcagaggctcagggacctgcagtgctggcaggaggtccaggagagcccgctcgacgcgtgccgccaggtcctcgaccggcagctaaccggcggcggcgtcggcggcccgttccggtggggcaccgggctccggatgcggtgctgccagcagctccaggacgtgagccgcgagtgccgctgcgccgccatccggagcatggtcaggggctacgaggaggccatgccgcctctggagaaaggctggttggccatggggcggcagcagcag

SEQ ID NO: 17995 - DNA, 443 bp, Zea mays
  Clone ID: LIB3151-022-Q1-K1-B3
aggacatccacaccaacccgtgctcaaggaaaaaaaaccggggcggcgaaaaccctcgaacccgaatccttacgcccctcatggcggacgctgatgcggcgctgccaacgccgcctccggaggtagtagcccccgaggagcatcccgtgggcgccgaatccaccgtcgccgcgccggccgaagtcgataacaagcggaagctagaggaggtcagcgccgacgcggaggtgaaaggcaccagcgaggacgccaagcgcccgcgcgtggacggcgagcccgacgccgcaacaggggttgagcagcaaatcgatgggtcctccgtgaatgcggatcccgcagctccggaggataaggctgctcttaacgttggcgcagcaatggatggtgataatgacacgcctgctcccgctcccgctccagactcgcaggcggtttctgacgag

SEQ ID NO: 17996 - DNA, 328 bp, Zea mays
  Clone ID: LIB3151-022-Q1-K1-B4
acccgctcgacaccatgagggtgttgcggggtgccctcgctctcctggctcttgctgtgagcgccacctccacgcatacaagcggcggttgcggctgccagccaccgtcgccggttcatctaccggcgccggtgcatctgccacctccggttcacctgccacctccggtgcatcttccaccgccggtccaactgccggcgccggtgcacctgccaccgcccgtgcatgtgccggcgccggttcatctgccggcgccaccatgccactaccctactcaaccgccccggcctcagcctcatccccagccacacccatggccgtgccaaca

SEQ ID NO: 17997 - DNA, 398 bp, Zea mays
  Clone ID: LIB3151-022-Q1-K1-B5
catttaaccaacttgtcgggagcccttatgccttcttactgcaacaacagcttctaccattccagctgcaagctgtggcaaacattgctgctttcttgagacaacaacatttgttgccattttacccacaggttgtgggaaacattaatgccttcttgcaacagcaacaattgctaccattctacccacagaatgtggcaaacattgttgccttcttacaacaacaacaattgttgccatttagccaacatgctttgacgaatcctaccaccttattgcaaccgcccaccattggtggtgccatcttctagattttttatgatttatactgtaataataaagttctcatgctgatatgtgcgacctctcagtaataaagtattagagatctatatttt

SEQ ID NO: 17998 - DNA, 373 bp, Zea mays
  Clone ID: LIB3151-022-Q1-K1-B6
attttgagcattcagaaacacaccaagcgaagcgcactagcaacaacctaacaacaatggctaccaagatattatccctccttgcgcttcttgcgctttttgcgagcgcaacaaatgcgtccattattccacaatgctcacttgctcctagttccattattccacagttcctcccaccagttacttcaatggccttcgaacacccagctgtgcaagcctataggctacaacaagcgattgcggcgagcgtcttacaacaaccaattgcccaattgcaacaacaatccttggcacatctaacaatacaaaccatcgcaacgcaacagcaacaacagttcctaccagcactgagccacctagccatggtgaaccc

SEQ ID NO: 17999 - DNA, 446 bp, Zea mays
  Clone ID: LIB3151-022-Q1-K1-B7
agaccattagctttatctactccagagcgcagaagaacccgatcgacaccatgagggtggggctcgttgccctcgctctcctggctctcgctgcgagcgccacctccacgcatacaagcggcggctgcggctgccagccaccgccgccggttcatctaccgccgccggtgcatctgccacctccggttcacctgccacctccggtgcatctcccaccgccggtccacctgccgccgccggtccacctgccaccgccggtccatgtgccgccgccggttcatctgccgccgccaccatgccactaccctactcaaccgccccggcctcagcctcatccccagccacacccatgcccgtgccaacagccgcatccaagcccgtgccagctgcagggaacctgcggcgttggcagcaccccgatcctgggccagtgcgtcgagttcctg

SEQ ID NO: 18000 - DNA, 395 bp, Zea mays
  Clone ID: LIB3151-022-Q1-K1-B9
gaacatagaaagtggaatccagtagcaacaatagagcaacaatggcgaccaagatattgtggcttcttatgctccttgcgtctttctgcatgtgttggttacaccaccatttttccttaatgcgtcacaagctcctatagcttcccttcttcccccataccttccatcaatgatagcttcagtatgtgaaaacccagctcttcaaccctataggctccaacaagcaatcgcagcaagcaacatacctttatcacccttgtttcaacaatcgccagccctatctttggtgcagtcattgttgcacaccaccatggcgcagcagctgcagcaactcgtgctacctgtgatcaaccaagtagctctggcaaacctttctccctactctcagcaacaac

SEQ ID NO: 18001 - DNA, 434 bp, Zea mays
  Clone ID: LIB3151-022-Q1-K1-C1
caacaagcaacatagaaagtggaatccagtagcaacaatagagcaacaatggagaccaagatgtggtccctccttatgctccttgctctttctacatgtgttgctaacgcgacaattttccctcaatgctcacaagctcctatagcttccctttttcccccataccttccatcaattatagcttcagtatgtgaaaacccagctcttcaaccatataggcttcaacaagcaatcgcagcaagcaacatacctttatcgcccttggtgtgtcaacaatcgccagccctatctttggtgcagtcattggtacaaaccataagggcacaacagctgcagcaactcgtgctacctgtgatcaaccaagtagctctggcaaacctttcttcctactcttcgcaacaacaatttctttcattcaaccaactgtgtacact

SEQ ID NO: 18002 - DNA, 443 bp, Zea mays
  unsure at all n locations
  Clone ID: LIB3151-022-Q1-K1-C10
gcaagagtatttccttcctgatggccttctatattcacccacaccagggtatcatcaaccgtgcagctcatttgacagagcactgacacagccaaataatgctcctgggttgtttggtcaagggagtctaccactggcttctgcaatgcatcattgaccgatgtatggtcctggatcctacaagggacgccagtatggtagcaaatttggtggcactactccaagttggagttctgctggccgcagatttggtactttcgacttgagtggcaatcaacaaagggggagcatgtcatttggtagtcataatggctctctggagtttatgaatgagcaaaaccgtgggccacgtgctacaaacccaaagatacangacacagagaactcaggagatgagaaaagcgagaaaacttgtcttctaattgatagtgaactgtacaatc

SEQ ID NO: 18003 - DNA, 461 bp, Zea mays
  Clone ID: LIB3151-022-Q1-K1-C3
caccaagcgaagcgcactagcaacaacctaacaacaatggctaccaagatattatccctccttgcgcttcttgcgctttttgcgagcgcaacaaatgcgtccattattccacaatgctcacttgctcctagttccattattccacagttcctcccaccagttacttcaatggccttcgaacacccagctgtgcaagcctataggctacaacaagcgattgcggcgagcgtcttacaacaaccaattgcccaattgcaacaacaatccttggcacatctaacaatacaaaccatcgcaacgcaacagcaacaacagttcctaccagcactgagccacctagccatggtgaaccctgtcgcctacttgcaacagcagctgcttgcatccaacccacttgctctagcaaacgtagttgcaaaccagcaacaacaacaactgcaacagtttctgccagcgcttaa

SEQ ID NO: 18004 - DNA, 389 bp, Zea mays
  unsure at all n locations
  Clone ID: LIB3151-022-Q1-K1-C4
gaagcttttgctgtcgtgcaacatttgggttccgaaattgagtttatcgtaaaatttacaagtgacctaagcagtgagattattagagaaaaggttaatatagaccaaaataagggcaacgttgagagggtcttcttgaatagttatattcgaactgacaagtctcatggttttcgagctttggttgtaatggaggatcattcactcttgttaattcaacaaggtgaggttgtttggagcagagacgatgggctggcttcaattgttgatgtaacaacatcagaattgcctgttgagaaggatggtgtatcagttgttggtgtggaacacaatctctntgagtggcttaagggacacatgctgaaactcanaggaactctaatgcttgc

SEQ ID NO: 18005 - DNA, 445 bp, Zea mays
  Clone ID: LIB3151-022-Q1-K1-C5
gctgaagcagccacttcaccttggggccatacagaaatggcggcttcttgcgcctccacactggcttcactttccttcgtttcctcctccagttcatcccgccgattcaggcgctctggtgtggtggccatggccagcgttgggcagaaggtgtatgcgcccggtgtggcggtgtcggagggcaatggcgggctgccgaaaatcgacctcaaatccccgcacgggagcgaggctgagatttatctgtttggagcgtgtgttacttctttcaaagtccctaatggcaaggacctgctctttgttcgaccagatgctgtgtttaatggacagaaacccatcagcggtggaattccacattgtttcccccagtttggcccaggtcccatgcagcagcatgggtttgcacggaatgtgaattggtctatcacagattcagaagtcacag

SEQ ID NO: 18006 - DNA, 434 bp, Zea mays
  Clone ID: LIB3151-022-Q1-K1-C6
cagcattcagaaacacaccaagcgaagcgcactagcaacaacctaacaacaatggctaccaaggtattagccctccttgcgcttcttgcccttttagtgagcgcaacaaatgcgttcattattccacagtgctcacttgctcctagtgccattattccacagttcctcccaccagttacttcaatgggcttcgaacatccagccgtgcaagcctacaggctacaactagcgcttgcggcgagcgtcttacaacaaccaattgcccaattgcaacaacaatccttggcacatctaaacctacaaaccatcgcaacgcaacagcaacaacagtttctgccatcactgagccacctagccgtggtgaaccctgtcgcctacttgcaacagcagctacttgcatccaacccacttgctctggcgaacgtagctgcata

SEQ ID NO: 18007 - DNA, 457 bp, Zea mays
  Clone ID: LIB3151-022-Q1-K1-C7
cagaaacacaccaagcgaagcgcactagttataacctaacaacaatggctaccaagatatgagccctccttgcgcttcttggcccttttagtgagcgcaacaaatgcgttcattattccacagtgctcacttgctcctagtgccattattccacagttcctcccaccagttacttcaatgggcttcgaacatccagccgtgcaagcctacaggctacaactagcgcttgcggcgagcgtcttacaacaaccaattgcccaattgcaacaacaatccttggcacatctaaacctacaaaccatcgcaacgcaacagcaacaacagtttctgccatcactgagccacctagccgtggtgaaccctgtcgcctacttgcaacagcagctacttgcatccaacccacttgctctggcgaacgtagctgcataccagcaacaacaacgtctgcaacagttta

SEQ ID NO: 18008 - DNA, 425 bp, Zea mays
  Clone ID: LIB3151-022-Q1-K1-C8
gggtcttcagaccataagctctatctacgtcagagcgcacaagaacccgatcgacaccatgagggtgttgctcgtggccctcgctctcctggctctcgctgcgagcgccacctccacacatacaagcggggggtgtggctgtcagccaccgccgccggatcatataccgccgccggtgcatatgccacctccggttcacctgccacctccggtgcatatcccaccgccggtgcacatgtcgccgccggtccacctgtcaccgccggtacatgtgccgccgccggttcatatgtcgccgccaccatgcgactacactactcaaccgccccggcctcagactcatatccagacacacacatgtgcgtgccaacagacgcatacaagcccgtgccaactgcagagaacctgcggcgttggcagcaccc

SEQ ID NO: 18009 - DNA, 434 bp, Zea mays
  Clone ID: LIB3151-022-Q1-K1-C9
tccacacctatctgactgtggacttgctgtcttgactccaaatactgaaagacaggtttgagctgaagtatttggatcatttggctatagcgccccagagtttgcaatgtctggcatttatactgtaaagagcgatgtatacagttttggagtggtaatgttagagctattgacagggcggaagccactagacagttccagagagaggtcacaacagtctcttgatagatgggctacccctcaacttcatgatattgatgcacttgctaggatggttgatccagcattaaacggaatgtacccagctaaatcactctctcgttttgcagacgtaattgcactctgcgttcagcctgagccagagttccgcccacccatgtcagaagttgtccaacaacttgtgcgcttgatgcaaagggctagcatcgtgaggc

SEQ ID NO: 18010 - DNA, 478 bp, Zea mays
  Clone ID: LIB3151-022-Q1-K1-D1
cggccggaatcccggtcgccacgcgtccggagaaggaggacgcgccgccgcctccgccgcccccgccgccggaggaggtcgagatgcgggtgtacatgcactgcgaagggtgcgcccgcaaggtcaagaagatcctcaggcgcttcgacggagtggaggatgtgatcgccgactccaaggcgcacaaggtgctggtgaaggggaagaaggcggccgccgaccccatgaaggtggtggagcgcgtgcagaagaagactggccgcaaggtcgagctgctgtcgccgatgccgcccccgccggaggtggaggagaagaaggaagatgaggcggagaagaagaaggacgatgagaagaaggcagagcccgagccgccgaagccggaagagaagaaggatgcaggcggagccggaagcgaagagaagaaggacggcaaggaagaggaagagaagaaggaccgcggcgagaagaatgaagagaa

SEQ ID NO: 18011 - DNA, 355 bp, Zea mays
  Clone ID: LIB3151-022-Q1-K1-D10
agaccattagctttatctactccagagcgcagaagaacccgatcgacaccatgagggtgtggcgcgttgccctcgctctgctggctctcgctgcgagcgccacctccacgcatacaagcggcggctgcggctgccagccaccgccgccggttcatctaccgccgccggtgcatctgccacctccggttcacctgccacctccggtgcatctcccaccgccggtccacctgccgccgccggtccacctgccaccgccggtccatgtgccgccgccggttcatctgccgccgccaccatgccactaccctacttaaccggccccggcctcagcctcatcctcagccacacccatgcc

SEQ ID NO: 18012 - DNA, 453 bp, Zea mays
  Clone ID: LIB3151-022-Q1-K1-D12
ccggttggaataccggggcggcgacgcgtccgggtcttcagaccattagctttatctactccagagcgcagaagaacccgatcgacaccatgagggtgttgctcgtggccctcgctctcctggctctcgctgcgagcgccacctccacgcatacaagcggcggctgcggctgccagccaccgccgccggttcatctaccgccgccggtgcatctgccacctccggttcacctgccacctccggtgcatctcccaccgccggtccacctgccgccgccggtccacctgccaccgccggtccatgtgccgccgccggttcatctgccgccgccaccatgccactaccctactcaaaccgcccggcctcagcctcatccccagccacacccatgcccgtgccaacagccgcattcaagcccgtgccagctgcaaggaacctgctgcgtttgcagca

SEQ ID NO: 18013 - DNA, 372 bp, Zea mays
  Clone ID: LIB3151-022-Q1-K1-D2
gggtctacagaccattagctttatctactccagagcgcagaagaacccgatcgacaccatgagggtgttgctcgttgccctcgctctcctggctctcgctgcgagcgccacctccacgcatacaagcggcggctgcggctgccagccaccgccgccggttcatctaccgccgccggtgcatctgccacctccggttcacctgccacctccggtgcatctcccaccgccggtccacctgccgccgccggtccacctgccaccgccggtccatgtgccgccgccggttcatctgccgccgccaccatgccactaccctactcaaccgccccggcctcagcctcatccccagccacacccatgcccgtgccaaca

SEQ ID NO: 18014 - DNA, 365 bp, Zea mays
  Clone ID: LIB3151-022-Q1-K1-D3
cgcaggaagaaaggattaacttaattgccggcaatgaaaggggaaaagtgtacttgttcgttgaacaatgcgcgcaccggccgggaaggctgtttatattgtggacaaccagtggattaatcggcatgtggggtctgtgcacatgtcagatcttgtcaacgcccgccgggctgtgcgtgtcggacgcgtgtacatttcgccgcggcgccgcgcacgggctgtggggggcccgggcgtctgcggcggcggacacactcagcatgcggaccagcgcgcgcgcggcgcccaggcaccagcagcaggcgcgccgcgggggcaggttcccgtcgctcgtcgtgtgcgccagcgccggcatgaacgtcgtc

SEQ ID NO: 18015 - DNA, 405 bp, Zea mays
  unsure at all n locations
  Clone ID: LIB3151-022-Q1-K1-D4
tagcaacatagaaagcacaatagtgtaccaccaatggcagccaaaatattttgcctccttatgctccttggtctttctgcaagtgctgctacggcgaccattttcccgaaatgctcgcaagctcctatagcttcccttcttcccccgtacctctcaccagcggtgtcttcggtatgtgaaaacccaattcttcaaccctacaggatccaacaggcaatcacagctggcatcttacctttatcacccttgttcctccaacaatcatcagccctattacatcagttacctttggtgcatttattggcacaaaacatcagggcacaacaactacaacaactngtgctagcaaaccttgctgcctactctcagcaacagcagtttcttccattcaaccaactagctgca

SEQ ID NO: 18016 - DNA, 401 bp, Zea mays
  unsure at all n locations
  Clone ID: LIB3151-022-Q1-K1-D5
gtccgaagcacatanaaagtggaatccagtagcaacaatagagcaacaatggcgaccaagatatttgcgctccttatgctcgttgctctttctgcatgtgttgctaacgcgacaattttccctcaatgctcacaagctcctatagcttcccttcttcccccataccttccatcaatgatagcttcagtatgtgaaaacccagctcttcaaccctataggctccaacaagcaatcgcagcaagcaacatacctttatcacccttgtttcaacaatcgccagccctatctttggtgcagtcattggtacaaaccatcaaggcacagcagctgcagcaactcgtgctacctgtgatcaaccaagtagctctggcaaacctttctccctactctcagcaacaaca

SEQ ID NO: 18017 - DNA, 444 bp, Zea mays
  Clone ID: LIB3151-022-Q1-K1-D6
ggccgctgatctggcggcggcggcagcggctgacccacaggccgacacgaagagcaagctggtgaagctggtggtcatggtgtgcgaggggctgcggttcaacaccgtgtcccgcacggtggacgcggggttcaacagccagcacggggtgaccttgaccgtgacgcaggggaagcaggtgcagaagtgggacaggatctccaaggcggccttcgagtgggctgaccaccccaccgctgtgatccccgacatgcagaagcttggcatcaaggataagaacgaagcagcgaggatcgttgcgctcgttaagaatcaaactactgccgctgccgctactgctgccagtgctgacaacgacgacgacgagggcctgatcaatgcaacgacacatcatgatctgctgctgcacttaattactatgttcgtatacaaataaatacaccc

SEQ ID NO: 18018 - DNA, 449 bp, Zea mays
  Clone ID: LIB3151-022-Q1-K1-D7
aaagcacaatactgtacctacaatggctgccaaaatattttgcctccttatgctccttggtctttctgcaagtgctgctacggcgaccattttcccgcaatgctcgcaagctcctatagcttcccttcttcccccgtacctctcaccagcggtgtcttcggtatgtgaaaacccaattcttcaaccctacaggatccaacaggcaatcgcagctggcatcttacctttatcacccttgttcctccaacaatcatcagccctattacaacagttacctttggtgcatttattggcacaaaacatcagggcacaacaactacaacaacttgtgctagcaaaccttgctgcctactctcagcaacagcagtttcttccattcaaccaactaagttcattgaactctgcttcttatttgcaacaacaacaactaccattcaaccagctacctg

SEQ ID NO: 18019 - DNA, 174 bp, Zea mays
  Clone ID: LIB3151-022-Q1-K1-D8
tctaaatcgcgactgcccccttttttttcttttatctccattataaactggaattttttacagccagtaaattctataatttcaaatccctacaccaaatcaaacaccaaccgaatctcttaaaaaatatatcacaaccattttatttatttttttcaaaaatatccccaaata

SEQ ID NO: 18020 - DNA, 452 bp, Zea mays
  Clone ID: LIB3151-022-Q1-K1-D9
accgaattccctgcgattcctctcccctcgcctcctcgtctccccctaggggatcgtcggagaggaatcgcaaagagggccgtctcatccgagttaaggaagccatggagcacaaggaggctgggtgccaggcccccgagggacccatcctctgcatcaataactgtggcttcttcggcagcgcggcgaccatgaacatgtgctctaagtgccacaaggagatgataacgaagcaggatcaggccaagctggctgcctcctctatcgacagcatcgtgaacggcagcgacgccgtcatggagccggttgttgctggcagcaacacggtagtagctgttgcccaagtcgagttgcaaacaatgaacgtgcagcagcccgctgatgttgccggacccagcgagggggtggcggcgatctccaaaggggggaaagtagggccgaaccggtgcagc

SEQ ID NO: 18021 - DNA, 438 bp, Zea mays
  Clone ID: LIB3151-022-Q1-K1-E1
ggagaagctcaagaagatggcgggtgctgtgcgcactggaggaaagggcagcatgcgcaggaagaagaaggcagtccacaagaccgcaaccaccgatgacaagcggcttcagagcacgttgaaaagaattggagtgaacactattcctggtattgaggaggtcaacattttcaaggatgacattgttatccaattccagaaccctaaagtgcaagcatccattcctgctaatacatgggtagtcagtggagtaccccagacaaaaagtctacaagaccttctgccaacaattatcaaccaactgggccctgataacctggagaacctcaagaggcttgctgagcatttccagaagcaggtacctggtgccgaagccagcgccagtgcagctgcacaggatgatgacgatgtccctgagcttgtcccaggagagacatt

SEQ ID NO: 18022 - DNA, 204 bp, Zea mays
  Clone ID: LIB3151-022-Q1-K1-E10
gcaagtttaattcggtgtctcacgccatgtatttacaatggcttcttggtgtctccgcagcagggctattacaaggtcaacgacctcaacaagcgctacaagcgcgtggtctacctgctctgccgctgccgttccttcctagtggtctataaccacgctctgctttacgtcttttactaacttactctcaatgccaaagactaa

SEQ ID NO: 18023 - DNA, 422 bp, Zea mays
  Clone ID: LIB3151-022-Q1-K1-E11
ccagagcgcataagaacccgatcgacaccatgagggtgttgctcgttgccctcgctctccgggctctcgctgcgagcgccacctccacgcatacaagcggcggctgcggctgccagccaccgccgccggttcatctaccgccgccggtgcatctgccacctccggttcacctgccacctccggtgcatctcccaccgccggtccacctgccgccgccggtccacctgccaccgccggtccatgtgccgccgccggttcatctgccgccgtcaccatgccactaccctactcaaccgccccggccttagcctcatcctcagccacacccatgcccgtgccaacagccgcatccaagcccgtgccagctgtatggaacctgcggcgttggcagcaaccccgatcctgggccagtgcgtcgagtt

SEQ ID NO: 18024 - DNA, 437 bp, Zea mays
  Clone ID: LIB3151-022-Q1-K1-E12
cttccttcttgagaaatatgctggtgcagtctcagttgcagctgctggagtgatccttggggggcctttctcaattttggtcttcctccctgttaccgtttattctctaattagaggatcttttagaagggtttttctatctggatttgtgacttcactgtgctttcttgttctttcgtttgttgctgattattactgctatggtcgattgacattctcggtgttcaatcttctgaaatataacgttattggtggcggcgaaagtcacttgtatggaaccgaggggttttcattttacttcaggaatggattcaataatttcaattttgccttcatcctggctcttcttttcttgggggttgtaccatttgcaagaaagaaatatgctcctgatctcctgatagttgtctctcctgtctatatctggttggctttca

SEQ ID NO: 18025 - DNA, 454 bp, Zea mays
  Clone ID: LIB3151-022-Q1-K1-E3
agaccattagctttatctactccagagcgcataagaacccgatcgacaccatgagggtgttgcgcgttgccctcgctctcctggctctcgctgcgagcgccacctccacgcatacaagcggcggctgcggctgccagccaccgccgccggttcatctaccgccgccggtgcatctgccacctccggttcacctgccacctccggtgcatctcccaccgccggtccacctgccgccgccggtccacctgccaccgccggtccatgtgccgccgccggttcatctgccgccgccaccatgccactaccctactcaaccgccccggcctcagcctcatccccagccacacccatgcccgtgccaacagccgcatccaagcccgtgccagctgcagggaacctgcggcgttggcagcaccccgatcctgggccagtgcgtcgagtttctgaggcatca

SEQ ID NO: 18026 - DNA, 390 bp, Zea mays
  Clone ID: LIB3151-022-Q1-K1-E4
gatcaagcagacggtgaggggcttcccgaggccgttgctggacatcagcgcggccaacttcgggaggatcatcgagcaagcgctgaacgcgacgctggacccgcccttcgacccctacgagaacagcctcaacttcctcgtcgcctcctacatcatcccctacgtcggcctcaccggctacgtcggcgccaaccccaggctcctcacccctcaggccagaaagctgctggcggggctgctggcggtggagtcggcgcaggacgcggtgatcaggacgctgctgtacgagcgcgggatggcgcgtgtgccgagctacgccggcggggtggcggagatcacggcgcgcatctcggacctccggaactcgctggggaggaggggcgtgaagga

SEQ ID NO: 18027 - DNA, 444 bp, Zea mays
  Clone ID: LIB3151-022-Q1-K1-E5
gaccaacaagcaacatagaaggtggaatccagtagcaacaatagagcaacaatggcgaccaagagattttccctccttatgctccttgctctttctgcatgtgttgctaacgcgacaattttccctcaatgctcacaagctcctatagcttcccttcttcccccataccttccatcaatgatagcttcagtatgtgaaaacccagctcttcaaccctataggctccaacaagcaatcgcagcaagcaacatacctttatcacccttgtttcaacaatcgccagccctatctttggtgcagtcattggtacaaaccatcagggcacagcagctgcagcaactcgtgctacctgtgatcaaccaagtagctctggcaaacctttctccctactctcagcaacaacaatttcttccattcaaccaactgtctacattgaaccgtgct

SEQ ID NO: 18028 - DNA, 445 bp, Zea mays
  Clone ID: LIB3151-022-Q1-K1-E6
catcaatcatcattcatcttagtagtataggcaccaaatcaaatctgcaacatcaattatctgagtccaaaaaccatgaagctggtgcttgtggttcttgctttcattgctttagtatcaagtgtttcttgtacacagacaggcggctgcagctgtggtcaacaacaaagccatgagcagcaacatcatccacaacaacatcatccacaaaaacaacaacatcaaccaccaccacaacatcaccagcagcagcaacaccaacaacaacaagttcacatgcaaccacaaaaacatcagcaacaacaagaagttcatgttcaacaacaacaacaacaaccgcagcaccaacaacaacaacaacaacagcaccaacaacaacatcaatgtgaaggccaacaacaacatcaccaacaatcacaaggccatgtgcaacaacacgaacaga

SEQ ID NO: 18029 - DNA, 450 bp, Zea mays
  Clone ID: LIB3151-022-Q1-K1-E7
attttgagcattcagaaacacaccaagcgaagcacattagcaacaacctaacaacaatgggtgccaagatattatccctccttgcgcttcttgcgctttttgcgagcgcaacaaatgcgttcattattccacaatgctcacttgctccaagttccattattacacagttcctcccaccagttacttcaatgggcttcgaacacccagctgtgcaagcctataggctacaacaagcaattgcggcgagcgtcttacaacaaccaatttcccagttgcaacaacaatccttggcacatctaacaatacaaaccatcgcaacgcaacagcaacaacaattcctaccagcactgagccacctagccatggtgaaccctgccgcctacttgcaacagcagttgcttgcatcaaacccacttgctctggcaaacgtagttgcaaaccagccacaac

SEQ ID NO: 18030 - DNA, 448 bp, Zea mays
  Clone ID: LIB3151-022-Q1-K1-E8
ccgggccgagccgacgcgtccggctttatctactccagagcgcacaagaactttatcgacaccatgagggtgttgctcgtgtggctcgctctcctggctctcgctgcgagcgccacctccacgcatacaagcggcggctgctgctgccagccaccgccgccggttcatctaccgccgtcggtgcatctgccacctccggttcacctgccacctccggtgcatctcccaccgccggtccacctgccgccgccggtccacctgccaccgacggtccatgtgccgccgccggttcatctgccgccgccaccatgccactaccctactcaaccgccccggcctcagcctcatccccagccacacccatgcccgtgccaacagccgcatacaagcccgtgccaactgctaggaacctgctgcgtttgcagcacccccatccttggccagtgcg

SEQ ID NO: 18031 - DNA, 407 bp, Zea mays
  Clone ID: LIB3151-022-Q1-K1-E9
ccggttcacctgccacctccggtgcatctttcaccgccggtccacctgccgccgccggtccgcctgccaccgccgggccatgtgccgccgccggttcatctgccgccgccaccatgccactaccctactcaaccgccccggcctcagcctcatccccagccacacccatgcccgtgccaacagccgcatccaagcccgtgccagctgcagggaacctgcggcgttggcagcaccccgatcctgggccagtgcgtcgagttcctgaggcatcagtgcagcccgacggcgacgccctactgctcgcctcagtgccagtcgttgcggcagcagtgttgccagcagctcaagcaggtggagccgcagcaccggtaccaagcgatcttcggcttgggccttcagtccattct

SEQ ID NO: 18032 - DNA, 356 bp, Zea mays
  Clone ID: LIB3151-022-Q1-K1-F1
gcaacatacatagtgaagtacactagcaacatcttagcaccaatgggagccaagatttttgccctccttgccctccttgctctttcagcaagcgctgctacctcgacttttattccacaatgctcacaacaatacctctctccggcgacagccgtgggatttcaatacccaactatacaatcctacatggtacaagaggccatccaagcaagcatcttacggtcattagcattaaccctccaacaaccatatgctctattgcaacagccatccttagtgcatctgtatctccaaagaatcgcggcacaacaactacaacaacagttgctaccaacaatcaatcaagtagttgcagc

SEQ ID NO: 18033 - DNA, 431 bp, Zea mays
  unsure at all n locations
  Clone ID: LIB3151-022-Q1-K1-F10
ctgggtcttcagaccattagctttatctactccagagcgcagaagaacccgatcgacaccgggagggtgttgctcgttgccctcgctctcctggctctcgctgcgagcgccacctccacgcatacaagcggaggctgctgttgccatccaccgatcactgcacatctaccgccaccagtgcatttgacagcttcggaacacctaccagctccagcgcatatgctaccaccagtccatctggcgacgccggtacaactaccaactgcccaacatgaaccaccatccgttgatcatctaacaataccataccactacactacttaaccgncccggcctcagcctcattcccagccacacccatgcccgtgccaacagccgcattcaagcccgagccagctgcaaggaacctgccgcgttggcagcaccccgat

SEQ ID NO: 18034 - DNA, 431 bp, Zea mays
  Clone ID: LIB3151-022-Q1-K1-F11
cttcagaccattagctttatctactccagagcgcagaagaacccgatcgacaccatgagggggttgctcgttgccctcgctctcctggctctcgctgcgagcgccacctgcacgcatacaagcggcggctgcagctgccagccaccgccgccggttcatctaccgccgccggtgcatctgccacctccggttcacctgccacctccggtgcatataccaccgacggtccacctgccgccgccggtccacctgccaccgtcggtccatgtgccgacgacggttcatctgacgtcgacaccatgccactaccctactcaaccgccccggccttagtctcatccccagccacacccatgcccgtgccaacagccgcatacaagcccgtgccagctgcagggaacctgcggcgttggcagcaccccgatcctggg

SEQ ID NO: 18035 - DNA, 409 bp, Zea mays
  Clone ID: LIB3151-022-Q1-K1-F12
gcgtacggtcaatcacaactggcatcttacctttattacccttgatcctccaacaatcatcatccctagtacatctattacctggggtgcatttattggcacaaaacatcatggcacaacaactacaacaacttgtgctagcaaaccttgcttcctactctcagcaacagcattttctttcattcaaccaactaggttcattgaactctgctccttatttgcaacaacaacaactaccattcagccagctacctgctttctacccacagcaaattcttccattcaaccaactagcagcattgaactctccttcttatttacagcagcaacaactactaccattcatccagctaaactgttgtgagccctgctaccttcttgacacaaccacaattgtagcccttttacc

SEQ ID NO: 18036 - DNA, 365 bp, Zea mays
  Clone ID: LIB3151-022-Q1-K1-F2
attttgagcattcagaaacacaccaagcgaagcacattagcaacaacctaacaacaatggctggcaagatattatccctccttgcgcttcttgcgctttttgcgagcgcaacaaatgcgttcattattccacaatgctcacttgctccaagttccattattacacagttcctcccaccagttacttcaatgggcttcgaacacccagctgtgcaagcctataggctacaacaagcaattgcggcgagcgtcttacaacaaccaatttcccagttgcaacaacaatccttggcacatctaacaatacaaaaccatcgcaacgcaacagcaacaacaattcctaccagcactgagccacctagccat

SEQ ID NO: 18037 - DNA, 402 bp, Zea mays
  Clone ID: LIB3151-022-Q1-K1-F3
atcaatcatcattcatcttagtagtataggcaccaaatcaaatctgcaacatcaattatctagctccaaaaaccatgaagctggtgcttgtggttcttgctttcattgctttagtatcaagtgtttcttgtacacagacaggcggctgcagctgtggtcaacaacaaagccatgagcagcaacatcatccacaacaacatcatccacaaaaacaacaacatcaaccaccaccacaacatcaccagcagcagcaacaccaacaacaacaagttcacatgcaaccacaaaaacatcagcaacaacaagaagttcatgttcaacaacaacaacaacaaccgcagcaccaacaacaacaacaacaacagcaccaacaacaacatcaatgtgaaggccaacaacaac

SEQ ID NO: 18038 - DNA, 441 bp, Zea mays
  Clone ID: LIB3151-022-Q1-K1-F4
attttgagcattcagaaacacaccaagcgaagcgcactagcaacaacctaacaacaatggctgccaagatattatccctccttgcgcttcttgcgctttttgcgagcgcaacaaatgcgtccattattccacaatgctcacttgctcctagttccattattccacagttcctcccaccagttacttcaatggccttcgaacacccagctgtgcaagcctataggctacaacaagcgattgcggcgagcgtcttacaacaaccaattgcccaattgcaacaacaatccttggcacatctaacaatacaaaccatcgcaacgcaacagcaacaacagttcctaccagcactgagccacctagccatggtgaaccctgtcgcctacttgcaacagcagctgcttgcatccaacccacttgctctagcaaacgtagttgcaaacc

SEQ ID NO: 18039 - DNA, 380 bp, Zea mays
  Clone ID: LIB3151-022-Q1-K1-F5
cattagctttatctactccagagcgcagaagaacccgatcgacaccatgagggtgttgctcgtggccctcgctctcctggctctcgctgcgagcgccacctccacgcatacaagcggcggctgcggctgccagccaccgccgccggttcatctaccgccgccggtgcatctgccacctccggttcacctgccacctccggtgcatctcccaccgccggtccacctgccgccgccggtccacctgccaccgccggtccatgtgccgccgccggttcatctgccgccgccaccatgccactaccctactcaaccgccccgggcttaggcttattcccagccacacccatgcccgtgccaacagccgcatccaagcccgtgcc

SEQ ID NO: 18040 - DNA, 449 bp, Zea mays
  Clone ID: LIB3151-022-Q1-K1-F6
tccgtagcaccatataaagcacaatagtgtaccaacaatggcagccaaaatattttgcctccttatgggcgcttggtctttctgcaagtgctgctacggcgaccattttcccgaaatgctcgcaagctcctatagcttcccttcttcccccgtacctctcaccagcggtgtcttcggtatgtgaaaacccaattcttcaaccctacaggatccaacaggcaatcacagctggcatcttacctttatcacccttgttcctccaacaatcatcagccctattacatcagttacctttggtgcatttattggcacaaaacatcagggcacaacaactacaacaacttgtgctagcaaaccttgctgcctactctcagcaacagcagtttcttccattcaaccaactagctgcattgaactctgcttcttatttgcaacaacaacaactacca

SEQ ID NO: 18041 - DNA, 364 bp, Zea mays
  Clone ID: LIB3151-022-Q1-K1-F7
caaccagtcgtacccccaccgaccatgcgtacgcgttgagtagatccagagcagtggggctgggaagtgcccgaggtgagatcaggcgaggtgatcaggtccgcttcctcctcttcctccgttggcttctacacgctccaggacgaggaggagtagggtgatgagggccgcgtccttgaggcatgggagcacgcatacgccgccctaggccaggtgaccagcttttggccgggcccattgctggcgacgagaatccaatagtgaagctttctatgtgttggcagataaactgagcagtgaggggtcttgacggtagcagagtaagtcctggctgtgttggaaggtaaactaaacagtgaggggt

SEQ ID NO: 18042 - DNA, 429 bp, Zea mays
  unsure at all n locations
  Clone ID: LIB3151-022-Q1-K1-F8
caacaagcaacatagaaagtggaatccagtatcaacaatagagcaacaatggcgaccaagaggttttccctccttatgctccttgctctttctgcatgtgttgctaacgcgacaattttccctcaatgctcacaagctcctatagcttcccttcttcccccataccttccatcaatgatagcttcagtatgtgaaaacccagctcttcaaccctataggctccaacaagcaatcgcagcaagcaacatacctttatcacccttgtttcaacaatcgccagccctatctttggtgcagtcattggtacaaaccatcagggcacagcagctgcagcaactcgtgctacctgtgatcaaccaagtagctctggcaaacctttcttcctactctcagcaacaacaanttctttcattcaaccaactgtctaca

SEQ ID NO: 18043 - DNA, 301 bp, Zea mays
  Clone ID: LIB3151-022-Q1-K1-F9
ccgagcacaccgcctcctcctcttatttgagcacattgttacctgctcttgctaggagtcactctagcacgccccctcctctagcctaaagtccctctatcacacccacgccttatctacccttaacacgccgacacctcatcaggtgagggattcttatctagacatagctgatgtctgcacccaactactggactttcaagacgaaaagctctttctgatcaaccacgaaaagatggatgcatataacaacctcatatcattgaaacacgttccatgaccgattactaaaagactaaac

SEQ ID NO: 18044 - DNA, 423 bp, Zea mays
  unsure at all n locations
  Clone ID: LIB3151-022-Q1-K1-G1
cggnccgaattaccggggcgacggcgcgtccggcgagcgccacctncacgcatacaagcggccgatgagggtgccagccaccgtcgccggttcagatgccgccggcggtgcatgtgccacctgctgctcacctgccatctccagagcgtttaccagcgtcggtagacttgccttcttccgtcgaccttttaacaacgggngcattgggcatgtgaaaacccaattcttcaaccctacaggattcaacatggtaatcgagctggcatcttacctttatcacccttgttccttcaacaatcatcaagcctattacagcagttaccctttgtgcatttactggcgcaaaacatcagggcacaacaactaccacaacttgtgcttgcaaacctttgtggctactctcaggaacagcagtttttttca

SEQ ID NO: 18045 - DNA, 402 bp, Zea mays
  Clone ID: LIB3151-022-Q1-K1-G10
gtggccgattccgaagcctcggcgcatactatggctgaaccctggcccgagctactccgggcggttcagcagaaaggaggctactctcatgtcataacttcatccacatcattcgcgaagaatctgcttacacgtgctgcggctctacttgatgtgtcccctgttactgatgtcaccgctgtaaaggagccacacgtctttgtgaggccaatttatgctggaaatgcactttgtactgcgaaatatactggagaggggcctcgcatgatgagtattaaatcaacttcattttccccatctactgaggctatgtctgaaacaaaggttgcacctatcacccaggttgatctctctttcctcagtgaagggaaatctacatgggtgaatctgacatcacaagac

SEQ ID NO: 18046 - DNA, 444 bp, Zea mays
  Clone ID: LIB3151-022-Q1-K1-G11
gagcattcataaacacaccaagcgaagcgcactagcaacgacctaacaacaatggctaccgagggtattagccctccttgcgcttcttgccctttttgtgagcgcaacaaatgcgttcattattccacaatgctcacttgctcctagtgccattattccacagttcctcccaccagttacttcaatgggcttcgaacacctagctgtgcaagccaacatgcaacaacaagcgcttgcggcgagcgtcttacaacaaccaattgcccaattgcaacaacaatccttgccacatctaacaatacaagccatcacaacgcaacagcaacaacagtttctaccagcactgagccacctagccatggtgaaccctgccgcctacttgcaagagcagctgcttgcatccaacccacttgctctggcgaacgtagttgcaaaccagcaaca

SEQ ID NO: 18047 - DNA, 442 bp, Zea mays
  Clone ID: LIB3151-022-Q1-K1-G12
cccacgcgtccgattttgagcattcagaaacacaccaagcgaagcacattagcaacaacctaacaacaatggctaccaagatattatccctccttgcgcttcttgcgctttttgcgagcgcaacaaatgcgttcattattccacaatgctcacttgctccaagttccattattacacagttcctcccaccagttacttcaatgggcttcgaacacccagctgtgcaagcctataggctacaacaagcaattgcggcgagcgtcttacaacaaccaatttcccagttgcaacaacaatccttggcacatctaacaatacaaaccatcgcaacgcaacagcaacaacaattcctaccagcactgagccacctagccatggtgaaccctgccgcctacttgcaacagcagttgcttgcatcaaacccacttgctctggcaaacgt

SEQ ID NO: 18048 - DNA, 447 bp, Zea mays
  Clone ID: LIB3151-022-Q1-K1-G2
attgataccaactagcaacatacatagtgaagtacagtagcaacatcttagcaccaatggcagccaagatttttgccctccttgccctccttgctctttcagcaagtgttgctaccgcgactattattccacaatgctcacaacaatacctctctccggtgacagccgcgagatttgaatacccaactatacaatcctacaggctacaagaggccatcacagcaagcatcttacggtcgttagcattgactgtccaacaaccaatatgccctattgcaacaaccatccttagtgaatctatatctccaaagaatcgcagcacaacaactacaacagcagttgcttccaacaatcaatcaagtagttgcagcgaaccttgctgcttacctccagcaacaacaatttcttccattcaatcaactagctggggtgaaccttgctgcttac

SEQ ID NO: 18049 - DNA, 446 bp, Zea mays
  Clone ID: LIB3151-022-Q1-K1-G3
ctgggtcttcagaccattagctttatctactccagagcgcagaagaacccgatcgacaccaggggggtgttgctcggtgccctcgctctcctggctctcgctgcgagcgccacctccacgcatacaagcggcggctgcggctgccagccaccgccgccggttcatctaccgccgccggtgcatctgccacctccggttcacctgccacctccggtgcatctcccaccgccggtccacctgccgccgccggtccacctgccaccgccggtccatgtgccgccgccggttcatctgccgccgccaccatgccactaccctactcaaccgccccggtctcagcctcatccccagccacacccatgcccgtgccaacagccgcatccaagcccgtgccagctgcaaggaacctgcggcgttggcagcaccccgatcctgggccagtgcgt

SEQ ID NO: 18050 - DNA, 430 bp, Zea mays
  Clone ID: LIB3151-022-Q1-K1-G4
gtgcagcccgacggcgacgccctactgctcgcctcagtgccagtcgttgcggcagcagtgttgccagcagctcaggcaggtggagccgcagcaccggtaccaggcgatcttcggcttggtcctccagtccatcctgcagcagcagccgcaaagcggccaggtcgcggggctgttggcggcgcagatagcgcagcaactgacggcgatgtgcggcctgcagcagccgactccatgcccctacgctgctgccggcggtgtcccccactgaagaaactatgtgctgtagtatagccgctggctagctagctagttgagtcatttagcggcgatgattgagtaataatgtgtcacgcatcaccatgggtggcagtgtcagtgtgagcaatgacctgaatgaacaattgaaatgaaaagaaaaaagtattgttcc

SEQ ID NO: 18051 - DNA, 447 bp, Zea mays
  Clone ID: LIB3151-022-Q1-K1-G5
atggagaccaactagcaccatataaagcacaattttgtaccaataatggcagccaaaatatgggggctcattatgctccttggtctttctgcaagtgctgctacggcgagcattttcccgcaatgctcacaagctcctatagcttcccttcttcccccatacctctcaccagcgatgtcttcagtatgtgaaaatccaattcttctaccctacaggatccaacaggcaatcgcagcaggcatcttacctttatcacccttgttcctccaacaatcatcagccctattacagcagttacctttggtgcatttattggcacaaaacatcagggcacaacaactacaacaactcgtgctagcaaaccttgctgcctactctcagcaacagcagttacctttggtgcatttgttggcacaaaacatcatggcacaacaactacaacaactc

SEQ ID NO: 18052 - DNA, 446 bp, Zea mays
  Clone ID: LIB3151-022-Q1-K1-G6
tttcgccgtgccgcacctgcgaggagaggagacttcgccgcgaagctcaccatgatctcgccggggaggagctcgtcacagagccagcggtcggcggcggcgggggcgccgttcctgtcgatctccgtcacggatcccgtaaagatgggtaccggcgtgcagtcctacatctcctaccgcgtcatcaccaagaccaacctccctgaatttgagggaccagagaaaattgttattcggcgctatagtgattttgaatggttgcatgatcggcttgctgagaggtacaaaggcatttttataccccctcttccggagaagaatgctgttgagaaattccggtttagcaaggagttcattgaattgcggcgtcaagctctggatttattcgttaacaggatagcttcacaccctgaactcaagcaaagtgatgtcttgaggacattttt

SEQ ID NO: 18053 - DNA, 79 bp, Zea mays
  Clone ID: LIB3151-022-Q1-K1-G7
ataccaacaacccatcattggtggtgccctcttttagatttcttatgagttatagttcaataagaaagttttttgtctg

SEQ ID NO: 18054 - DNA, 387 bp, Zea mays
  Clone ID: LIB3151-022-Q1-K1-G9
acccgatcgacaccaggagggtgttgttgggtgacctcgctctactggctttggctgcgagcgccaccttcacgcatacaagcggccggttgcggatgccagccaccgcgcgccggttcatctaccgccgtcggtgcatctgccacctacggttcacctgccacctgcggtgcatctcccaccgccggtccacctgccgccgccggtccacctgccaccgtcggtccatgtgccgccgtcggttcatctgccgccgtcaccatgccactaccctactcaaccgccccggcctcagcctcatccccagccacacccatgcccgtgccaacagccgcatccaagcccgtgccagctgcagggaacctgcggcgttggcagcaccccgat

SEQ ID NO: 18055 - DNA, 428 bp, Zea mays
  unsure at all n locations
  Clone ID: LIB3151-022-Q1-K1-H10
nccacgccgtccggtgagccctgctaccttcttcaattcaaccaacgacaactttgaacggtcgtgcttatttacagcagcaacaactactaccattcagccagctagctggtgtgagccctgctaccttcttgacacaaccacaattgttgccgttctaccagcacgctgcgcctaacgctggcaccctcttacaactgcaacaattgctgccattcaaccaacttgctttgacaaacccaacagcattctaccaacaacccatcattggtggtgccctcttttagatttcttatgagttatagttcaataataaagttttttgtctgatgtttgtggcttcccagaaataagaaagtacatttctagaanaaaaaaantatttaaaaaaataataaattaaaatattaaaatattaaatcccctat

SEQ ID NO: 18056 - DNA, 411 bp, Zea mays
  Clone ID: LIB3151-022-Q1-K1-H11
actgggtcttcagaccattagctttatctactccagagcgcagaagaacccgatcgacaccgtgagggtgttgctcgttgccctcgctctcctggctctcgctgcgagcgccacctccacgcatacaagcggcggctgcggctgccagccaccgccgccggttcatctaccgccgccggtgcatctgccacctccggttcacctgccacctccggtgcatctcccaccgccggtccacctgccgccgccggtccacctgccaccgccggtccatgtgccgccgccggttcatctgccgccgccaccatgccactaccctactcaaccgccccggcctcagcctcatccccagccacacccatgcccgtgccaacagccgcatccaagcccgtgccaactgcagggaacctg

SEQ ID NO: 18057 - DNA, 395 bp, Zea mays
  Clone ID: LIB3151-022-Q1-K1-H2
ccaactagcaacatagaaggcacattagtgtaccaacaatggcagccaaaatattttgcctcgttatgctccttggtctttctgcaagtgctgctacggcgaccattttcccgaaatgctcgcaagctcctatagcttcccttcttcccccgtacctctcaccagcggtgtcttcggtatgtgaaaacccaattcttcaaccctacaggatccaacaggcaatcacagctggcatcttacctttatcacccttgttcctccaacaatcatcagccctattacatcagttacctttggtgcatttattggcacaaaacatcagggcacaacaactacaacaacttgtgctagcaaaccttgctgcctactctcagcaacagcagtttcttccattc

SEQ ID NO: 18058 - DNA, 447 bp, Zea mays
  Clone ID: LIB3151-022-Q1-K1-H3
gttggcgaaggcccggcccgcagggccagtagcaaccctcccatggcctacgctgcgcctccgatggcgtcgtccctcaccgcctcccacccccctctttccccgtcccacctcataacccatccgcatcgctgccctgcgcgccccaaccccaccaccggcctcctccgcctcaccccgtctcgccgccgcggtcgtccccccgtggccgtccgcctcgcaatatctgcctcgtccacctcagccccgcccccgtcggcggatcggtcggaggccgcgtcgtcgctggagagatacctctcggcgacggtgacgggagcggtgatgggaacgggggcggccccaccagcttcggccccgccgcgcgccccgccggcgatgaaggggggacggaagcagtatagcgcgttgggggctgtcacgctcgagaaggccaagctcgatctc

SEQ ID NO: 18059 - DNA, 403 bp, Zea mays
  Clone ID: LIB3151-022-Q1-K1-H4
gagagagagagtgatcggtacaaggatcaccgctgtgcctgcgcgtgctgcttcaccgaatcgagtcagaccctgtccgaatccgagccaagggatggcaaccggtagtgaggcctcgaaggcagctgaggctgtggttgactggcataaacaggacagcaagaggatgctccatgcggtttaccgtggtggggatctggaccgtacaatcaagtactacacggaatgctttgggatgaaactgctgaggaaaaaggatgttcctgatgagaagtacaccaacgcctttcttggctttgggccagagaacaccaactttgcaggtgaattgacatacaactatggcgttgacaagtatgatattggaaccggctttgggcatttctcaattgctaatgatgat

SEQ ID NO: 18060 - DNA, 334 bp, Zea mays
  Clone ID: LIB3151-022-Q1-K1-H5
caactagcaacatagaaggcccaatagtgtaccaacaatggcagccaaaatattttgcttccttatgctccttggtctttctgcaagtgttgctaccgcaaccattttcccacaatgctcacaagctcctatagcttgccttcttcccccatacctctaaccagcggtgtcttcaatgtgtgaaaacccaattgttcaaccctacaggatccaacaagcaatcgcaacaagcattttaccattatcacccttggtccttcaacaacacgtaaccctattacaacaattacctttggtccatttggtggcacaaaacattagggcacaacaacta

SEQ ID NO: 18061 - DNA, 305 bp, Zea mays
  Clone ID: LIB3151-022-Q1-K1-H6
ttacctttatctactccagagcgcagaaaaacccgatcgacaccatgagggtgttgctggttgccctcgctctcctggctctcgctgcaagcgccaccttcacgcatacaagcggcggctgcggctgccagccaccgccgccggttcatctaccgccgccggtgcatctgccacctacggttcacctgccacctccggtgcatctcccaccggcggtccacctgccgccgccgagccacctgccaccgccggtccatgtgccgccgccgattcatctgccgccgtcaccatgccactaccctact

SEQ ID NO: 18062 - DNA, 443 bp, Zea mays
  Clone ID: LIB3151-022-Q1-K1-H7
attgagaccaacaagcaacatagaatgtggaatccaatagcaacaatagaacaacaatgacgaccaagatattttccctccttatgctccatgctctttctgcatgtgttgctaatgcgaccattttccctcaacgctcacaagctcctatagctgcccttcttcacccatacctcccatcaatgatagattcagtatgtgaaaacccagctcttcaaccctataggctccaacaagcaaatgcagcaagcaacttacctttatcaccctcgttgtttcaacaatcgccatccctatctttggtgcagtcattggtacaaaccatcggggcacaacagctgcagcaactcttgctacttgtgatcaaccaagtagctctggcaaacctttctccctactctcagcaacaacagtttcttccattcaaccaactgcctacactg

SEQ ID NO: 18063 - DNA, 221 bp, Zea mays
  Clone ID: LIB3151-022-Q1-K1-H8
gtgagagaggggaaagttgattctctctctgacccgcccactccctccttccctgctcgccgcgcactccgtcgttcctgcgcgcacgtacgtacagtagccagacacgagatcgagtggtacaggtcccgccagaaacctcacgagctagctggttcctgatcggcggtctgtgccgcgcgccgatccacgcatggcgccgtcgctcctgcccgcgcgct

SEQ ID NO: 18064 - DNA, 421 bp, Zea mays
  Clone ID: LIB3151-022-Q1-K1-H9
ttgataccaacaagcaacatataatgtgttttccaatagcaacattataacaacaatgacgaccaatatatattgcggccttatgctccatgctctttctgcatgtgttgctaatgcaaccattttccctcaacgctcacaagctactataacttgcctaattcaccaataccttccatcaatgatagattcagcatgcgaaaacccaactcttcaaccctatatgctccaacaagcaaatgcatcaagcaacttacctttatcaccctcgttgtttcaacaatcgccatccctatctttggtgcattcattggtacaaaccatctttgcacaacagctgctataactcttgctacttgtgatcaaccaagtagctctgtcaaaccttttttcctactcttaacaacaacagtttctttca

SEQ ID NO: 18065 - DNA, 325 bp, Zea mays
  unsure at all n locations
  Clone ID: LIB3151-023-Q1-K1-A1
gttgaccaccctccggtgctcggcgtcgcccaggacggcctcctccacgcgcggcggcaggagcgccgcgaacttggcggcggcgtagcggccgaaggcgcaggtcgggagcacgcccagcagctccgcgggctccatcccgcgcatgtcccggaactgcgcgtaccgctcccgccggaacgcggcggtgtccagcagcgacgagagggagccgtccaggtagaaggactcgtgctcgaagccgccnaggagggcgcgcgtggcgtgcgcctccagcgcgtgcttggccagctgcggggaggacaccgggatcttggtgagcgac

SEQ ID NO: 18066 - DNA, 437 bp, Zea mays
  Clone ID: LIB3151-023-Q1-K1-A10
tcgccaacaagcaacatataaagtggaatacagtagcaacaatagatcaacaatggcggccaagagattttccatccttatgctccttgctctttctgcatgtgttgctaacgcgaccatttttcctcaatactcacaagctcctatagctgcccttcttcccccataccttgcatcaatgaccgcttcagtatgtgaaaacccagcccttcaaccctacaggctccaacaagcaatcgcaacaagcaacttacctttatcacccctgttctttcaacaatcgccagccctatctttggtgcagtcattggtacaaaccatcagggcacaacaactgcagcaactcgtgctaccagtgatcagccaaatagctcttgcaaacctttctccctactctcagcaacaacaatttcttgcattcaaccaactgtctacac

SEQ ID NO: 18067 - DNA, 333 bp, Zea mays
  Clone ID: LIB3151-023-Q1-K1-A11
agcattcataaacacaccaggtttatcgcactaccaacaacctaacaccaatgggtaccaagatattatccctccttgcgcttcttgcccttttagtgagcgcaacaaatgcgctcattattccacagtgctcacttgctcctaatgccattatttcacaaatactcccaccagatacttcaatgggcttcgaacatacaaccgtgcaagcctacacgataccaattagggctggcggaaagggtttaaaacaaccaaatgcccaatttgaacaacaattcctggcccaatttaaacttcaaaccattggcaccccaccaggaccacaatttt

SEQ ID NO: 18068 - DNA, 442 bp, Zea mays
  Clone ID: LIB3151-023-Q1-K1-A12
attttgagcattcagaaacacaccaagcgaagctacctagcaacgacttaacagcaatggcgaccaagatattagccctccttgcgcttcttgccctttttgtgagcgcaacaaatgcgttcattattccacaatgctcacttgctcctagtgccattataccacagttcctccgaccagttacttcaatgggcttcgaacacctagctgtgcaagcctacaggctacaacaagcgcttgcggcgagcgtcttacaacaaccaattaaccaattgcaacaacaatccttggcacatctaaccatacaaaccatcgcacaacaactacaacaacttgtgctagcaaaccttgctgcctactctcagcaacagcagtttcttccattcaaccaactagcttgattgaactctgcttcttatttgcaacaacaacaactaccatt

SEQ ID NO: 18069 - DNA, 433 bp, Zea mays
  Clone ID: LIB3151-023-Q1-K1-A2
attggccactggcccctagccctcgccctcccttttctattgctccgaagcccgagttgcgagctgtctcctccactcttctccttcactgtcgcagccgccccttgtagaagcttcgaggctgctgctgctgcgcccatggccgcggaaggcaagacgccgtccctcgccgaggagtattcacttccaccacaggaagttccagtggaaaaggcagctgaggagaagccctctagtggtactgagtctgaagctgctccctcaaccaatgatgaaactcctccatctgtagaagacaagaatggaacttctgaagtacaagatgctgctgaaaatccagaggcagaagaaactaacactgctgcagaggaaacacctgctgtagaggaagcaagtgagactaccgaggaggaagaggctgagaaacctgaga

SEQ ID NO: 18070 - DNA, 387 bp, Zea mays
  Clone ID: LIB3151-023-Q1-K1-A3
aatgaagaatcatacatagtggtatccactttcttcatattactacaatggcgaccagggagctgtcctctcttatgctccttgctcattgctgcatgtcttgcttacgcgacacttttaccttaatgctgacaagctcatatagcttgaatgcttgacccataccctccatcaatgatagctactgtctgcgaaaacccagctattgaaccctataggctacaacaagcaatctgatgaagcagacatacatttatcacccttgtttcaacaatagacatgccctatctttggagcacacattggtacataccatcatggcacatgactttcagcatctcgtgctacctgagatcaaccctgttgctgtggcaaaaccttctgcct

SEQ ID NO: 18071 - DNA, 219 bp, Zea mays
  Clone ID: LIB3151-023-Q1-K1-A4
attcttcttgctcttcctgcatgtactggctactcctcaaaactccctcaatgctcacaaactcgtattgtttgccttcttcccccatacctcccatcaattatagcttccgtatgttaaaacccatctcttcaaccatatacgctcgaacaagcaatcacagcaagccacataccttcatcactcctccttcaacactcggcagccgtatcttctgtg

SEQ ID NO: 18072 - DNA, 427 bp, Zea mays
  Clone ID: LIB3151-023-Q1-K1-A5
gcaattagctcatcgactccagattggagaactcgacaccatgaaggtgctgatcgttgcccttgctctcctggcgctcgctgcgagcgccgcctccagtacaagcggcggctgtggctgccagacaccaccgtttcatctaccgcctccgttctatatgccgcctccgttctatctgccgccgcagcagcagccgcagccatggcaataccccactcaaccaccgcagctaagcccgtgccagcagttcggatcctgcggcgtcggcagcgtcggcagcccgttcctgggccagtgcgtcgagttcctgaggcaccagtgcagcccggcggcgacgccctacggctcgccacagtgccaggcgctgcagcagcagtgctgccaccagatcaggcaggtggagccgctgcaccggtaccaggcgaca

SEQ ID NO: 18073 - DNA, 430 bp, Zea mays
  Clone ID: LIB3151-023-Q1-K1-A6
ctgggtcttcagaccattagctttatctactccagagcgcagaagaacccgatcgacaccatgagggtgttgctcgttgccctcgctctcctggctctcgctgcgagcgccacctccacgcatacaagcggcggctgcggctgccagccaccgccgccggttcatctaccgccgccggtgcatctgccacctccggttcacctgccacctccggtgcatctcccaccgccggtccacctgccgccgccggtccacctgccaccgccggtccatgtgccgccgccggttcatctgccgccgccaccatgccactaccctactcaaccgccccggcctcagcctcatccccagccacacccatgcccgtgccaacagccgcatccaagcccgtgccagctgcagggaacctgcggcgttggcagcaccccga

SEQ ID NO: 18074 - DNA, 242 bp, Zea mays
  Clone ID: LIB3151-023-Q1-K1-A7
gcgacgcgtttttgcaacattaactttttctgctattctacccacaagatgcggatgagaatggggactttttacaacaacaacaattgctgccatttatctcaacttgatttgacaaatcctaccaccttattacagcatgccaccattggtggcgccatcttctaaattattttatgctttatactgtgataataaagttctcataccgatatgtgcgcatataaaaaaaactgtaaacg

SEQ ID NO: 18075 - DNA, 394 bp, Zea mays
  Clone ID: LIB3151-023-Q1-K1-A8
acccacgccccacgcgtgcgcatatataaaggtagatcgcgcatttttttttaacacctccggccacaagaaaggggtgggtcattctcctcgttctttctgcaagtgttgttaccacaaccaaaatcccacaatgctcacacaatcctatatatttcttctttttccatacaccttacattaatatagcattgtgtgaaaaaaaaacaactcatccatacaatatgcatcaaacaatcaaaccaggcatcgaacaatcatcactctcgctccttcaacaaacggcaaacctattactggagttacatatgggccataaccttgcagaaaacaatatggaacaacacctactacaactggaaaaaacaaacattgctgcacacactcatcacca

SEQ ID NO: 18076 - DNA, 438 bp, Zea mays
  unsure at all n locations
  Clone ID: LIB3151-023-Q1-K1-A9
caacaacaactaccattcagccagctacctgttgcctacccccagcaatttcttccattcagccaactggcagcattgaactctcctgcttatttacagcagcaacaactactaccattcagccagctagctggtgtgagccctgctaccttcttgacacaaccacagttgttgccgttctaccagcacgcttggcctaaagcttggacccttttacaactgcaacaattggtggcattcaaccaacttggtttgacaaaactaacaatggtctaacaacaacccatcattggtgggggcctcttttaaaattcttatgaagtataagtcaataataaaagtttttggctgatggttggggcttcccaaaaataagaaaggacatttctagatttaaaaaaaaaaaanaaaaaaaaaaaaaaaaaannnnnnnccccc

SEQ ID NO: 18077 - DNA, 430 bp, Zea mays
  Clone ID: LIB3151-023-Q1-K1-B1
cagggaacctgcggcgttggcagcaccccgatcctgggccagtgcgtcgagttcctgaggcatcagtgcagcccgacggcgacgccctactgctcgcctcagtgccagtcgttgcggcagcagtgttgccagcagctcaggcaggtggagccgcagcaccggtaccaggcgatcttcggcttggtcctccagtccatcctgcagcagcagccgcaaagcggccaggtcgcggggctgttggcggcgcagatagcgcagcaactgacggcgatgtgcggcctgcagcagccgactccatgcccctacgctgctgccggcggtgtcccccactgaagaaactatgtgctgtagtatagccgctggctagctagctagttgagtcatttagcggcgatgattgagtaataatgtgtcacgcatcaccatgggt

SEQ ID NO: 18078 - DNA, 441 bp, Zea mays
  Clone ID: LIB3151-023-Q1-K1-B10
attttcagcattcagaaacacacttagcgaatcgcactagcaacaacctaacaagaatggggaccaagatattagccctccttgcgcttcttgcccttttagtgagcgcaacaaatgcgttcattattccacagtgctcacttgctcctagtgccattattccacagttcctcccaccagttacttcaatgggcttcgaacatccagccgtgcaagcctacaggctacaactagcgcttgcggcgagcgtcttacaacaaccaattgcccaattgcaacaacaatccttggcacatctaaacctacaaaccatcgcaacgcaacagcaacaacagtttctgccatcactgagccacctagccgtggtgaaccctgtcgcctacttgcaacaacagctactttgattcaacccacttgctcttgcgaacgtagctgcatacc

SEQ ID NO: 18079 - DNA, 349 bp, Zea mays
  Clone ID: LIB3151-023-Q1-K1-B11
gaccaggcgtccgaaaaaacattaacaaataattttcatttttaccaacaatcaatcccaggggcgagcaagatattttccgtccttatgctccacgctacatctgcatgtgaagctaacccaacaattatagctcaatgctcacaagcttatatagaatcccttattcccccataccttgcatcaacgattgcttcaccctatgaaaacccacctcttaaaccctataggctccaacaagcaataccatcaggcaacatacctccatcaccttcgataaacaatcatcagtcctatccatcttgcaaccatagctacaaaacatcatggcacaacaaatgcaccaact

SEQ ID NO: 18080 - DNA, 434 bp, Zea mays
  Clone ID: LIB3151-023-Q1-K1-B2
gtcgctgcagcgaaagggggatcgcgcgaggcgagatggagctctcgccggtggggaggtgggccgacctccccgaggacatcgccgtagccgtcgcctcctgcctccaggaggccgacgtctgcgcgctcggcggctgctcgcgctcctggcgcagagcctgcgacgctgactgcatctgggagcgcctcttccgctgccgctggccatctgccgtggcgtcagcgtcccctgtgcagggatggaaagctctctacatcagccagcacagaagaatggctgttgcaatatctaatgtggttgaatttgtgggcagcagcttaaataatgagtcacttgaatccgaatactatctgaaagctattgctgatttggccttgatacctgatataggattcctcgatgtccagtttttcttgttctcaaggaatcat

SEQ ID NO: 18081 - DNA, 119 bp, Zea mays
  Clone ID: LIB3151-023-Q1-K1-B3
gtcagatcaccagaaggcggatcacacgattcaagattaagctctcgcccgtgcgaaggggtacctatcttatagagtacattaacttaaacttactgtcctgccttttacaagccgac

SEQ ID NO: 18082 - DNA, 434 bp, Zea mays
  Clone ID: LIB3151-023-Q1-K1-B4
caactagcaacatagaaagcacaatagtgttccaacaatggcagccaaaatattttgcctgcttatgctccttggtctttctgcaagtgctgctacggctaccattttcccgcaatgctcgcaagctcctatagcttcccttcttcccccgtacctctcaccagcggtgtcttcggtatgtgaaaacccaattcttcaaccctacaggatccaacaggcaatcgcagctggcatcttacctttatcacccttgttcctccaacaatcatcagccctattacaacagttacctttggtgcatttattggcacaaaacatcatggcacaacaactacaacaacttgtgctagcaaaccttgctgcctactctcagcaacagcaatttcttccattcaaccaactaggttcattgaactctgcttcttatttgcaac

SEQ ID NO: 18083 - DNA, 309 bp, Zea mays
  unsure at all n locations
  Clone ID: LIB3151-023-Q1-K1-B5
acagaacancatgaagagtgtcagtgttctcttcttgtgcctggctctttcaactgccagcgcctttgaaatgcatatgccctgcccctgcgcggttctgcaaggcttttacagagctggcccctgcctttctacgattatgggcgcctgcgatctatacccctacgctgagtacctgaaacagtcgcattacactcaagtggcatatgacccctactactccgggtgttttcagactagcgccatgtaccatacgctcctactacactgctgacatgttcacaccatgatgatagactttcattcctt

SEQ ID NO: 18084 - DNA, 430 bp, Zea mays
  Clone ID: LIB3151-023-Q1-K1-B6
ccaacaagcaacatataaagtggaatacagttgcaacaatagagcatcaatggcggccaagatattttccatccttatgctccttgctctttctgcatgtgttgctaacgcgaccatttttcctcaatactcacaagctcctatagctgcccttcttcccccataccttccatcaatgaccgcttcagtatgtgaaaacccagcccttcaaccctacaggctccaacaagcaatcgcaacaagcaacttacctttatcacccctgttctttcaacaatcgccagccctatctttggtgcagtcattggtacaaaccatcagggcacaacagctgcagcaactcgtgctaccagtgatcagccaagtagctctggcaaacctttctccctactatcagcaacaacaatttcttccattcaaccaactgtct

SEQ ID NO: 18085 - DNA, 427 bp, Zea mays
  Clone ID: LIB3151-023-Q1-K1-B7
cagaaacacaccaagcgaagcgctctaccttctaacctaacaacaatggcttcggggatatgatcccttcttgcgctattcgcccttttattgatcgcagcatatgcatccattatttcacagcgctcacttgctactagtgcctttattccacagttcctccctccatttacttaattgggctttgaacatgcaaacacgcaagccttcaagcttcaactatcgctcgcggcgagcgtcttacaacaaccaattgaccaaccgcgacatcaatactttggacatctatacctacaaaccatcgattcgcaccaacaacaacagcttatgacatgactgatccacctatacgaggtgtaccctgtcgcctacttgcaaaagctgctacttgcattcaacacaatcgctctggcgaacgtaactgaat

SEQ ID NO: 18086 - DNA, 425 bp, Zea mays
  Clone ID: LIB3151-023-Q1-K1-B8
cagaccattagctttatctactccagagcgcagaagaacccgatcgacaccatgagggtgttgctcgttgccctcgctctcctggctctcgctgcgagcgccacctccacgcatacaagcggcggctgcggctgccagccaccgccgccggttcatctaccgccgccggtgcatctgccacctccggttcacctgccacctccggtgcatctcccaccgccggtccacctgccgccgccggtccacctgccaccgccggtccatgtgccgccgccggttcatctgccgccgccaccatgccactaccctactcaaccgccccggcctcagcctcatccccagccacacccatgcccgtgccaacagccgcatccaagcccgtgccagctgcagggaacctgcggcgttggcagcaccccgatcct

SEQ ID NO: 18087 - DNA, 417 bp, Zea mays
  unsure at all n locations
  Clone ID: LIB3151-023-Q1-K1-B9
aaaaccgggccgaccgacgcgtccgcagagcattatctttatctactctatagcttcttaaaaacccgatcgacaccaggagggtaggtctcttttccctcnctctcctgtctctctcttcgagcgccacctccacgcatacaatcggcggctgctgctgccatccaccgccgccggttcatctaccgccgccggtgcatctgccacctccggttcacctgccacctccggtgcatctcccaccgccggtccacctgccgccgccggtccacctgccaccgccggtccatgtgccgccgccggttcatctgccgccgccaccatgccactaccctactcaaccgccccggcctcagcctcatccccagccacacccatgcccgtgccaacagcctcatccaagcccgtgccaacttc

SEQ ID NO: 18088 - DNA, 282 bp, Zea mays
  Clone ID: LIB3151-023-Q1-K1-C1
gtcagcctagcaattagctcatcgactccagattggagaactcgacaccatgaaggtgctgatcgttgcccttgctctcctggcgctcgctgcgagcgccgcctccagtacaagcggcggctgtggctgccagacaccaccgtttcatctaccgcctccgttctatatgccgcctccgttctatctgccgccgcagcagcagccgcagccatggcaataccccactcaaccaccgcagctaagcccgtgccagcagttcggatcctgcggcgtcggcagcgt

SEQ ID NO: 18089 - DNA, 430 bp, Zea mays
  Clone ID: LIB3151-023-Q1-K1-C10
ccaactatcaacatagaaagcactatagtgtaccaacaatggcagccaaaatatggtgcttccttatgctccttggtctttctgcaagtgttgctaccgcaaccattttcccacaatgctcacaagctcctatagcttcccttcttcccccatacctctcaccagcggtgtcttcaatgtgtgaaaacccaattgttcaaccctacatgatccaacaggcaatcgcaacaggcatcttaccattatcacccttgttcctccaacaaccgtcagccctattacagcagttacctttggtccatttggtggcacaaaacatcatgtcacaacaactacaacaacttgtgctagcaaaccttgctgcatactctcagcaacatcagtttcttccattcaaccaactggcttcattgaactctgctgcttattt

SEQ ID NO: 18090 - DNA, 361 bp, Zea mays
  unsure at all n locations
  Clone ID: LIB3151-023-Q1-K1-C12
cttcagaccattagctttatctactccagatcgcagaagaacccgatcgacacgcatgagggtgttgctcgttgccctcgctctcctggctctcgctgcgagcgccacctccacgcatacaagcggcggctgcggctgccagccaccgccgccggttcatctaccgccgccggtgcatctgccacctccggttcacctgccacctccggtgcatctcccaccgccggtccacctgccgccgccggtccacctgccaccgccggtccatgtgccgccgccggttcatctgccgccgncaccatgccactaccctactcaaccgccccggcctcagcctcatncccagccacacccatgcccg

SEQ ID NO: 18091 - DNA, 436 bp, Zea mays
  Clone ID: LIB3151-023-Q1-K1-C2
cttcagaccattagctttatctactccagagcgcagaagaacccgatcgacaccatgagggtgttgctcgttgccctcgctctcctggctctcgctgcgagcgccacctccacgcatacaagcggcggctgcggctgccagccaccgtcgccggttcatctaccgccgccggtgcatctgccacctgcggttcacctgccacctccggtgcatctcccaccgccggtccacctgccgccgccggtccacctgccaccgccggtccatgtgccgccgccggttcatctgccgccgccaccatgccactaccctactcaaccgccccggcctcagcctcatccccagccacacccatgcccgtgccaacagccgcatccaagcccgtgccagctgcaaggaacctgcggcgttggcagcaccccgatcctgggccagt

SEQ ID NO: 18092 - DNA, 401 bp, Zea mays
  Clone ID: LIB3151-023-Q1-K1-C3
aatattttgagcattcagaaacacaccaagcgaagcacattagcaacaacctaacaacagtggctaccaagatattatccctccttgcgcttcttgcgctttttgcgagcgcaacaaatgcgttcattattccacaatgctcacttgctccaagttccattattacacagttcctcccaccagttacttcaatgggcttcgaacacccagctgtgcaagcctataggctacaacaagcaattgcggcgagcgtcttacaacaaccaatttcccagttgcaacaacaatccttggcacatctaacaatacaaaccatcgcaacgcaacagcaacaacaattcctaccagcactgatccacctagccatggtgaaccctgacgcctacttgcaacagcagttg

SEQ ID NO: 18093 - DNA, 420 bp, Zea mays
  Clone ID: LIB3151-023-Q1-K1-C4
catgattcatcttagtagtataagcaccattttaaatttgcaacatcaattatctaactggggaaggcatgaatctggtgcttgtggttcttgctttcattgctttagtatcaagtgtttcttgtacacagacaggcggctgcatctgtggtcaacaacaaagccatgagcagcatcatcattcacaacaacatcatccacaataacaacatcatcaaccaccaccacaacatcaccagcagcagcaacaccaacaacaacaagttcacatgcatccacaaaaacattagcaacaacaagatgttcatgttcaacaacaacaacaacaaccgcagcaccaactacaacaacatcaactgcaccaacatcaacatcaatgtgaaggccaacaacaacattaccaacaatcacatagccatg

SEQ ID NO: 18094 - DNA, 299 bp, Zea mays
  Clone ID: LIB3151-023-Q1-K1-C5
acgagttgctgcagctgctgtgctacctgtgatcaaccaaatagctctggcaaacctttgtgcctactctcagcaacaacaatttcttccattcaaccaactgtctacattgaaccgtgctgcttatttgcagcaacaactattaccattcagccagctagctactgcctactctcagcaacaacaacttctttcatttaaccaattggccgcactgaaccccgctgcttatttgcagcagcaaatactactaccatttagccagctagctgcagcaagccgtgctttcttcttgacac

SEQ ID NO: 18095 - DNA, 457 bp, Zea mays
  Clone ID: LIB3151-023-Q1-K1-C6
aatacccgggccagacccacggcgtccgacgagttgcctgcaatctgctgcgctatcctgttatcaaccaagtacgatatggcaaagggtttggccctactctcatcaacatcaattctttccattcaaccaactgcttacatcgtaccatgctgcttatttgctgcaacaactattaccatgcagacatatcgctaccggctactctgacaaacaacaactacttgcattctaccaatcgtccgcaatcaaccgtgctgctgatttgcaggatccaactctactaccatgtacacatgtcgccgccggatgatgtgcttccttcttgacacaactacagtagttgcctttctaccactcattctcatctcaacccacaaccttgttacaactacaacaattgttgcacttcgtgcaacttgctttgacaaagccagcatggtcctaccaacaacac

SEQ ID NO: 18096 - DNA, 331 bp, Zea mays
  Clone ID: LIB3151-023-Q1-K1-C7
attaagaccattaactgcatctactccagttctcaaaagaacccgatcgacagggggagctggttgctctttgccctcactctactgtctctacctgcaagctcctcctacactcatacaaacggcctatgaggctgccatccaccgactacctttcatcaaccgtcgcctgaacatgtgacaaacccaattgaccaaccacacacgatgcatcatccaaccccaacacacatgtcaccatcatcacacttgtcactgcaacaacatgtacccctattacagcatttaccttctgtacaattccactaacataatattacggcccaacatc

SEQ ID NO: 18097 - DNA, 357 bp, Zea mays
  Clone ID: LIB3151-023-Q1-K1-C8
acgacccacgcgtcgcgaacacctttcaccatatgtacgtccatatcgttgaacaacactggtcgacacaatgggggtggcgctctttgccctttgtctcctgtctattgattccagcgccaactattctcatacaatcggccggtgctgctgctagccaccgtcgtcggatcatataccgacgacagtgcatcttccacctccgaattacctgccacatacggcgcatatgacaccgccggtcacacactgccgtcgtctgacatttaacaccgtcgttccatgtacagtcaccagttcatctgcaaccgtcaccattccactatcctactcaacaacacatgcctgagcctcatc

SEQ ID NO: 18098 - DNA, 321 bp, Zea mays
  Clone ID: LIB3151-023-Q1-K1-C9
agaaacacaccaagcgaagcgcactagcatcaacctaacaacaatggctaccgagatattaggcctccttgcgcttcttgcgctttttgcgagcgcaacaaatgcgtccattattccacaatgctcacttgctcctagttccattattccacagttcctcccaccagttacttcaatggccttcgaacacccagctgtgcaagcctataagctacaacaagcgattgcggcgagcgtcttacaacaaccaattgcccaattgcaacaacaatccttggcacatctaacaatacaaaccatcgcaacgcaacagcaacaaca

SEQ ID NO: 18099 - DNA, 385 bp, Zea mays
  Clone ID: LIB3151-023-Q1-K1-D1
gagaccaactagcaacatagaaagcacaatagtgtaccaacaatggcagccaaaatattttgcttccttatgctccttggtctttctgcaagtgttgctaccgcaaccattttcccacaatgctcacaagctcctatagcttcccttcttcccccatacctctcaccagcggtgtcttcaatgtgtgaaaacccaattgttcaaccctacaggatccaacaggcaatcgcaacaggcatcttaccattatcacccttgttcctccaacaaccgtcagccctattacagcagttacctttggtccatttggtggcacaaaacatcagggcacaacaactacaacaacttgtgctagcaaaccttgctgcatactctcagcaacatc

SEQ ID NO: 18100 - DNA, 218 bp, Zea mays
  Clone ID: LIB3151-023-Q1-K1-D10
cgtgcggttcgattattccacagtttcttttaccagtctcttcaatgggcttccaacagctatcttgtcgattcttacatgctacaacaagcgcttgcttcgagcgtcttacaacatccaattaaccaattgcaacaacaatccttggcacatctaaccatacaaaccatcgcaacacaacagcaacaacagttcctaccagcactgatccaactaga

SEQ ID NO: 18101 - DNA, 436 bp, Zea mays
  Clone ID: LIB3151-023-Q1-K1-D12
agaccaacaagcaacatagaaagtggaatccagtagcaacaatagagcaacaatggcgacggagatattttccctccttatgctccttgctctttctgcatgtgttgctaacgcgacaattttccctcaatgctcacaagctcctatagcttcccttcttcccccataccttccatcaatgatagcttcagtatgtgaaaacccagctcttcaaccctataggctccaacaagcaatcgcagcaagcaacatacctttatcacccttgtttcaacaatcgccagccctatctttggtgcagtcattggtacaaaccatcagggcacagcagctgcagcaactcgtgctacctgtgatcaaccaagtagctctggcaaacctttctccctactctcagcaacaacaatttcttccattcaaccaactgtctacattg

SEQ ID NO: 18102 - DNA, 434 bp, Zea mays
  Clone ID: LIB3151-023-Q1-K1-D2
attgagaccaactagcaacatagaaagcacaatagtgtaccaacaatggcagccaaaatatgttgcgtccttatgctccttggtctttctgcaagtgctgctacggcgaccattttcccgcaatgctcgcaagctcctatagctttccttcttcccccgtacctatcaccagcggtgtcttcggtatgtgaaaacccaattcttcaaccctacatgatccaacaggcaatcgcagctggcatcttacctttatcacccttgttcctccaacaatcatcagccctattacaacagctacctttggtgcatttattggcacacaacatcatggcacaacaactacaacaacttgtgctagcaaaccttgctgcctactctcagcaacagcagtttcttccattcaacccaactaggtcatcgaactctgcttctta

SEQ ID NO: 18103 - DNA, 342 bp, Zea mays
  Clone ID: LIB3151-023-Q1-K1-D3
gtgagaccaactagcaacataaaacgcactgtagtgtaccaacaatggcaacaaaaatggggtgcgtgccttatgctccttggtctttctgcaattgctgctagcgccaccattgcccagcaatgctcacaatgtgctattgcttctcttgccacaatgtacctatcaccagcggcgtcttcgtcatgggaaaacacacttctacctccgtacatgatccaacaagcactcgcaggtggcgtcagagctttataacacctgatcgtccaacagtcatcactattattacaacagctacctttggagcatatattagcacaaaacatcgggcagcaactacta

SEQ ID NO: 18104 - DNA, 435 bp, Zea mays
  Clone ID: LIB3151-023-Q1-K1-D4
cagaaacacaccaagcgaagcgcactagcatcaacctaacaacaatggctaccaagatatgagccctccttgcgcttcttgcccttttagtgagcgcaacaaatgcgttcattattccacagtgctcacttgctcctagtgccattattccacagttcctcccaccagttacttcaatgggcttcgaacatccagccgtgcaagcctacaggctacaactagcgcttgcggcgagcgtcttacaacaaccaattgcccaattgcaacaacaatccttggcacatctaaacctacaaaccatcgcaacgcaacagcaacaacagtttctgccatcactgagccacctagccgtggtgaaccctgtcgcctacttgcaacagcagctacttgcatccaacccacttgctctggcgaacgtagctgcataccagcaac

SEQ ID NO: 18105 - DNA, 333 bp, Zea mays
  Clone ID: LIB3151-023-Q1-K1-D5
ctcacttgctcctacagccattatttcactttttctccgaccagttacttcatggggctgggaacacctagctgtgcatgcctacaggctacaacaagcgcttgcggagagcgtcttacaacaaccaattaaccaattgctactacaatccttggctcatctaaccattcataccatctcaacacaacatcaacaacagttcctaccagcactgatccaactagatgtggtgaaccctgtctcctacttgcaacagcatgtgcttgcatccaacccacttgctctggcaaacgtagctgctataccaacaacaacaacaattgcaacagtttc

SEQ ID NO: 18106 - DNA, 173 bp, Zea mays
  Clone ID: LIB3151-023-Q1-K1-D8
aagccgtcggagaaaacaaactatgcgaactccactacctccaacttaccaccatgggttccaaaaaatgaggccggctttgcgctctttgcccttttagggagcgcacaaaaggcgtcaatatttcaccagggttaactggttctaatggccatatttcacaagttctctcc

SEQ ID NO: 18107 - DNA, 401 bp, Zea mays
  unsure at all n locations
  Clone ID: LIB3151-023-Q1-K1-D9
cagaccattagctttatctactccagagcgcagaagaacccgatcgacaccatgagggtgtggctcgttgccctcgctctcctggctctcgctgcgagcgccacctccacgcatacaagcggcggctgcggctgccagccaccgccgccggttcatctaccgccgccggtgcatctgccacctccggttcacctgccacctccggtgcatctcccaccgccggtccacctgccgccgccggtccacctgccaccgccggtccatgtgccgccgccggttcatctgccgtcgncaccatgccactaccctactcaaccgccccggcctcagcctcatccccagccacacccatgcccgtgccaacagccgcatncaagcccgtgccagctgcagggaacctg

SEQ ID NO: 18108 - DNA, 425 bp, Zea mays
  Clone ID: LIB3151-023-Q1-K1-E1
cccagcacacccatgcccgtgccaacagcctcatccaagcccgtgccagctgcagggaacctgcggcgttggcagcaccccgatcctgggccagtgcgtcgagttcctgaggcatcagtgcagcccgacggcgacgccctactgctcgcctcagtgccagtcgttgcggcagcagtgttgccagcagctcaggcaggtggagccgcagcaccggtaccaggcgatcttcggcttggtcctccagtccatcctgcagcagcagccgcaaagcggccaggtcgcggggctgttggcggcgcagatagcgcagcaactgacggcgatgtgcggcctgcagcagccgactccatgcccctacgctgctgccggcggtgtcccccactgaagaaactatgtgctgtagtatagccgctggctagctagct

SEQ ID NO: 18109 - DNA, 433 bp, Zea mays
  Clone ID: LIB3151-023-Q1-K1-E10
gaaccctccgagcatcctagtgactcccatggctccggccatgtcggcgcagttcacaagagtcaccttcagcaacctgtttgtccgtcgggctggcccaggcagcacggagctgaccgtggagggaaggccatccgaccagctgggcaggagaaacctcactgacagccccgtatttgacggccgtggccctgacgccagcctcgtggctcgcgtacagggagtcgctacccagatgggcgacgtgcgccagttgtacaccgtcgtgttccaggagaggccgctcaagggctccacgctcgtcaccgaaggcgcgatgacggaagggtcagacgagtgggcgatctacggcggaactggagtgttcgcgatggcgagaggcgtcataaggagaacgtttcttgctgacacgagcggcgggaactccgacgag

SEQ ID NO: 18110 - DNA, 466 bp, Zea mays
  Clone ID: LIB3151-023-Q1-K1-E11
gaaaaccgggccggcacgcgtgcgccacgcgttcgcttgaatatttttcaatttatacttgcgttggcatcaccggagactgcgactgattttgattatgctgctattctgggtgctgttggacatgagtatttccacaactggactgggaatagagtaacttgccgtgattggttccagctaaccctgaaagaaggactgaccgttttcagggatcaggagttcttttcagatcttggctgtcgtacggtaaaacgtattgctgatgtctccaaacttagaatctatcaattcccacaagacgccgggcctattgcacattctatccgcccccattcttatatcaagattgacaacttctatactgttacggtttaccagaaaggtgcttaaattttcagaatgtacaagaccatgttttgagcattaaggtttccaaagggcattgatctttattttaaaaaga

SEQ ID NO: 18111 - DNA, 432 bp, Zea mays
  Clone ID: LIB3151-023-Q1-K1-E2
agaccattagctttatctactccagagcgcagaagaacccgatcgacaccatgagggtgttgctcgttgccctcgctctcctggctctcgctgcgagcgccacctccacgcatacaagcggcggctgcggctgccagccaccgccgccggttcatctaccgccgccggtgcatctgccacctccggttcacctgccacctccggtgcatctcccaccgccggtccacctgccgtcgccggtccacctgccaccgccggtccatgtgccgccgccggttcatctgccgccgccaccatgccactaccctactcaaccgccccggcctcagcctcatccccagccacacccatgcccgtgccaacagccgcatccaagcccgtgccagctgcagggaacctgcggcgttggcagcaccccgatcctgggccagt

SEQ ID NO: 18112 - DNA, 429 bp, Zea mays
  Clone ID: LIB3151-023-Q1-K1-E3
agacgattatctttatctactccagagcgcttaatatcccgatcgacaccatgagggtgaggctcggggccctcactctcctggctctcgctgcgagcgccacctccacgcatacaagcggcggctgcggctgccagccaccgccgccggttcatctaccgccgccggtgcatctgccacctccggttcacctgccacctgcggtgcatctcccaccgccggtccacctgccgtcgccggtccacctgccaccgccggtccatgtgccgacgccggttcatctgccgccgccaccatgccactaccctactcaaccgacccggactgagcctcatgcccagccacacccatgcccgtgccaacagccgcatccaagcccgtgccagctgcacggaacctgcggcgttagcagcaccccgatcctgggcc

SEQ ID NO: 18113 - DNA, 426 bp, Zea mays
  Clone ID: LIB3151-023-Q1-K1-E4
cagaaacacaccaagcgaagcgcactaacttcaacctaacaacaatggctaccaagatattagccctgcttgcgcttcttgcccttttagtgagcgcaacaaatgcgttcattattccacagtgctcacttgctcctagtgccattattccacagttcctcccaccagctacttcaatgggcttcgaacatccagccgcgcaagcctacaggctacaactagcgcttgctgcgagcgtcttacatcatccaattgcccaattgcgacaacaatccttggcacatcttaacctacaaaacatttgaacgcaacagcaacaacagtttctgccattactgagccacctatgccgggtgaaccctgtcgactacttgcaacaacaggtacttgcatccaacccaatttctctggcgaacgtagctgcat

SEQ ID NO: 18114 - DNA, 317 bp, Zea mays
  Clone ID: LIB3151-023-Q1-K1-E5
ggccgaccacgcgtgcggacgttttcttccatccaaaccttttcccctcttacggagaccaaccttataaggagcttgttcgactaccaccacgcaccagatctctatgtatatgtcaatagggccccaaaatggtgctgcttatgtctccaatttatctcctcaaactcacgagaatatgctggattgtatattatcacaccataaagttgctaaagaaggacatataccatgggctctcaaaattttgcatccataccaacataaatcacaatgaaccaaacggtcatgcttcaattactttttatgatcaaaat

SEQ ID NO: 18115 - DNA, 341 bp, Zea mays
  Clone ID: LIB3151-023-Q1-K1-E6
tccccctcccccctctttctgcgaaaaccaaccccaccaatccactcactgcttactacccccaaccacctcctccattcaatctaccgccaccattgcattttgctgcttctttacaacagccacctctaccactattcatccaactagccaactgagccctgcttccatcttcccacaacaccaccttgttgcccgccccacctgcactcttcgcctaacgctgccaccctcttacaactgcaacacctgctgacattcatcccaaatcccttccacaaacccaacaacgttctaccaacaacccatcatcggttgagccctcttttagattgcttatg

SEQ ID NO: 18116 - DNA, 407 bp, Zea mays
  unsure at all n locations
  Clone ID: LIB3151-023-Q1-K1-E9
ggtccgaccacgcgtgcgctccgttgctcgcctcgttcataccctattttggagtngatttatccgctgcggccatgggtaagttgcagtctgagtctgtcaaggatgccatctcccagattgttggggatgccaaggagaagaataggaagttcactgagactgtggaacttcagattggtctgaagaattatgatccacagaaggacaagcgtttcagtggctctgttaagttgccccatatccctcgtcccaagatgaaggtgtgcatgcttggtgatgcccagcatgttgaggaagccgagaagatgggacttgactacatggatgttgaagctctcaagaaaatgaacaagaacaagaagcttgttaagaggcttgccaagaagtaccatgctttcttggca

SEQ ID NO: 18117 - DNA, 428 bp, Zea mays
  Clone ID: LIB3151-023-Q1-K1-F1
ctcccacccaacaacaaaacaagcctaatggcttcctctccatctcacgccactgcggttgcctacttgccctataaccctcgccgccgcccctctttaggattcccatgtccctggtcgccccctgacacgcccgccccggatcctgcacccgaattccgcgtggaattccgggccgaaccgcctctctgcgtgcgcctccgaccaccaaactctctctctcacacgcgcgcgcgcgcgcacgtctgaggcggtttgattctccggtgggggttccttggtctcgaactctcgatttgctgctgatgggggtgccgaagcagcgctggacgccggaggaagaggccgcgctcaaggccggtgtcgccaagcacgggcccggcaagtggcgcaccatcctccgggactcggacttcagcgcgctcctg

SEQ ID NO: 18118 - DNA, 228 bp, Zea mays
  Clone ID: LIB3151-023-Q1-K1-F10
ggacgaccgacgcgtccgacaaggcatatcagcaaagcggcagggcgtttagaggatcgtcgaacagaacagcatgaaggtggtcagcgttctcgtcatgtgcctggctctgtcagctgccatcgcctctgcaatgcagatgccctgcccctgcgcggtgctgcagggcttgtacggcgctggcgcctgcctgactacaatgatgggcgccggcagactgtaccccta

SEQ ID NO: 18119 - DNA, 417 bp, Zea mays
  unsure at all n locations
  Clone ID: LIB3151-023-Q1-K1-F11
caactagcaacatagaaagcactttagtgttccaacaatggcagctaaaatatgtggcctggttatgctccttggtctttctgcaagtgctgctacggcgaccattttcccacaatgctcacaagctcctatagcttcccttcttcccccgtacctctcaccaacggtgtcttcggtatgtgaaaacccaattcttcaaccctacaggatccaacaggcaatcgcagctggcatcttacctttatcacccttgntcctccaacaatcatcagccctattacagcagttaccctttggtgcattattggcacataacatcagggcacaacaactacaacaacttgtgctagcaaaccttgctgcctactctcagcaacagcagttttttccattcaaccaactagctgcattgaactc

SEQ ID NO: 18120 - DNA, 434 bp, Zea mays
  Clone ID: LIB3151-023-Q1-K1-F2
cccacgcgtccgctgggtcttcagaccattagctttatctactccagagcgcagaagaacccgatcgacaccatgagggtgttgctcgttgccctcgctctcctggctctcgctgcgagcgccacctccacgcatacaagcggcggctgcggctgccagccaccgccgccggttcatctaccgccgccggtgcatctgccacctccggttcacctgccacctccggtgcatctcccaccgccggtccacctgccgccgccggtccacctgccaccgccggtccatgtgccgccgccggttcatctgccgccgccaccatgccactaccctactcaaccgccccggcctcagcctcatccccagccacacccatgcccgtgccaacagccgcatccaagcccgtgccagctgcagggaacctgcggcgttggcag

SEQ ID NO: 18121 - DNA, 253 bp, Zea mays
  Clone ID: LIB3151-023-Q1-K1-F3
cccacgcatccgttatgacttaagacaattttctatgtatactacaaaacgcacaacaacggcgacgtcaccatgaagacgatgatggtggcgctcgctgttctggctctcattgctagcgccacctgcgcgcattcaacacagacatgcggctgccagccacctccacaacttaatctaccgccgccggttcatctaccacatcctgttcaactgacacatcaagatcatccaccaccacaagatcacctgc

SEQ ID NO: 18122 - DNA, 434 bp, Zea mays
  Clone ID: LIB3151-023-Q1-K1-F4
tagctttatctactccagagcgcagaagaacccgatcgacaccatgagggtgttgctcggtgccctcgctctcctggctctcgctgcgagcgccacctccacgcatacaagcggcggctgcggctgccagccaccgccgccggttcatctaccgccgccggtgcatctgccacctccggttcacctgccacctccggtgcatctcccaccgccggtccacctgccgccgccggtccacctgccaccgccggtccatgtgccgccgccggttcatctgccgccgccaccatgccactaccctactcaaccgccccggcctcagcctcatccccagccacacccatgcccgtgccaacagccgcatccaagcccgtgccagctgcagggaacctgcggcgttggcagcaccccgatcctgggccagtgcgtcgagt

SEQ ID NO: 18123 - DNA, 294 bp, Zea mays
  Clone ID: LIB3151-023-Q1-K1-F8
aacgggccgacccacgcgtgcggactaaatgaaatccattcactttatacctctaaagacaccaggagtcaccatgagggggtttgttcttatcctcgcacagcccaatctcacttaaatccccgaacatcaacctaaaaatctgcttcagaagcaccatccaaaacctccacttcatctagctcatccactttaattacaccttcggcaccaactatctcttcactaacaaccaccaacaccctatacaataatctttacagcgacaaactacaaaatgcccacatataatat

SEQ ID NO: 18124 - DNA, 431 bp, Zea mays
  Clone ID: LIB3151-023-Q1-K1-G1
attgagaccaacaagcaacatagaaagtggaatccagtagcaacaatagagcaacaatggagaccaagatattttccctccttatgctccttgctctttctacatgtgttgctaacgcgacaattttccctcaatgctcacaagctcctatagcttccctttttcccccataccttccatcaattatagcttcagtatgtgaaaacccagctcttcaaccatataggcttcaacaagcaatcgcagcaagcaacatacctttatcgcccttgttgtgtcaacaatcgccagccctatctttggtgcagtcattggtacaaaccatcagggcacaacagctgcagcaactcgtgctacctgtgatcaaccaagtagctctggcaaacctttctccctactctccgcaacaacaatttcttccattcaaccaa

SEQ ID NO: 18125 - DNA, 420 bp, Zea mays
  Clone ID: LIB3151-023-Q1-K1-G12
cccagcacaaacaaacaccgcgctgccgcctcagctttgccctacagaatccgggtactcggaagattctcaagacgcccctgatggctccccgcgtcgcctccgctctgctcttcgtcgtggccgtcctcgtggcctccgcggcggcgcaggagtccatggcgcccgcgtctgctccggcgccgggaccggtcgctggcgcggcctccgctccggcctccgctgtggccgtggtgtcgtccgcactgctgtccctccttatgacggccctgatgcagtagaagtatcatactagatttgagcgggaatttggttcagtgttgctattcctcattctttttgaatcatatatgtctgcgacatttatatatatgaataaagttggatgatctgctgcatacctttttttatcggattcat

SEQ ID NO: 18126 - DNA, 405 bp, Zea mays
  Clone ID: LIB3151-023-Q1-K1-G2
cttgccagcagctctctctatcgctccctcacgctctctctcctcaccatttttgctcctgccgagagctcgccaagctccgaaaggcgcaagttttcttgccatggggaagaacacatgcaagctctgctcccgccgcttcgccagttcccgcgcccttgccgggcacatgcgctctcattacatggccgcaactaaggagacagcggcgactgcaaccgcagcggctgcggcagccgcagcaacggcgcaacatcacatctcttcggcatcatccgcgtcaacctccatcgccatcgccgacgaggaagtcggctcgatgatgaccgcttccaccaacgggctccgggagaatacgaagcgcacccttggcgtggcggatgtacgtttctcggatcgcgagag

SEQ ID NO: 18127 - DNA, 431 bp, Zea mays
  Clone ID: LIB3151-023-Q1-K1-G4
attgagaccaactagcaacatagaaagcactatagtgtaccaacaatggcagccaaaatggtttgcctccttatgctccttggtctttctgcaagtgctgctacggcgaccattttcccgaaatgctcgcaagctcctatagcttcccttcttcccccgtacctctcaccagcggtgtcttcggtatgtgaaaacccaattcttcaaccctacaggatccaacaggcaatcacagctggcatcttacctttatcacccttgttcctccaacaatcatcagccctattacatcagttacctttggtgcatttattggcacaaaacatcagggcacaacaactacaacaacttgtgctagcaaaccttgctgcctactctcagcaacagcagtttcttccattcaaccaactagctgcattgaactctgcttc

SEQ ID NO: 18128 - DNA, 355 bp, Zea mays
  Clone ID: LIB3151-023-Q1-K1-G6
atcgtacatccttagccaacattctacactttctaccaatcaaaccaacaaagggatccgtggtacatggacccagttcttcaccgcacttctacagttctgcgccctacggctacagggcctgccggtggaacaactactcgctcaagaactaatgccagatcacccacatcgtccatacccaacttaagctcgtataccttacgctgtgcccggtgctggcctcgatcactgtggccgcttacatgcacaatgtgtggaacattgtatgtacgcatacaatgctcgggtgcgggtggataatcgcatggctcttgttgctgccggtataccaagagaggaagatgtatttgct

SEQ ID NO: 18129 - DNA, 425 bp, Zea mays
  Clone ID: LIB3151-023-Q1-K1-G7
cccacgcgtccgctccataccgaccgcgagtgtcgacaaggagaaggataaggagagcgatgctggcgacaagctggctccgacaggtggcgacctcgtgctgtacaggcggattgctgaagtaaaagagaaggaacggagaaggactttggaggagatactctatgctctggttgttcagaagttcgttgaagctggtgtctctctggttccagcactctcacgctccaccgatccttctggaagagttgatcagtgggcagaaactgtggaagaaaagcttcaacggctgcactcgcatgaggcctatgaaatgatcgagaatcacctcaccctcattctggggcagcgtcaaggtgacgccactatcgcagccataagtaagctccgcgttggccaggtctatgctgcatctgtgatgtacg

SEQ ID NO: 18130 - DNA, 410 bp, Zea mays
  Clone ID: LIB3151-023-Q1-K1-G8
atagagaccaactagcaacatattaagcactattgtgcaccaacaatggcagggaaaagggtttgcttccttatgctccttggtctttctgcaagtgttgctaccgcaaccattttaccacaatgctcacaagctcctatagcttctcttcttcccccatacctatcaccagcggtgtcttaaatgtgtgaaaacccaattgttcaaccctacaggatccaacaggcaatcgcaacaggcatattaccattatcaccctcgttacttcaacaacacgaagccctattacagcagctacctctggtccatttggttgcacaaaacatcatggctcaacaactacaacaacttgttctaacaaaacttgctgcatactatgaacaacatcagtttctttcattcaaccaact

SEQ ID NO: 18131 - DNA, 394 bp, Zea mays
  Clone ID: LIB3151-023-Q1-K1-G9
tgagaccaactagcaacatagatagcacatttttgtaccaacaatggcagccgaaatattgtgcttccttatgctccttggtctttctgcaagtgctgctaccgcaaccattttcccacaatgctcacaagctcctatagcttcctttcttcccccatacctctcaccagcggtgtcttcagtatgtgaaaacccaattcttcaaccctacaggatccaacaggcaatcgcagcaggcatcttacctttatcacccttgttcctccaacaaccgtcagccctattacagcagttacctttggtgcatttgttggcacaaaacatcaaggcacaacaactacaacaacttgtgctaggaaaccttgctgcctactctcagcaacagaagtttttt

SEQ ID NO: 18132 - DNA, 294 bp, Zea mays
  Clone ID: LIB3151-023-Q1-K1-H10
ggcaatcgcagctggcatcttacctttatctcccttgttcctccaacaatcatcagccctggtacaacggttacctttggtgcatttattggcacaaaacatcagggcacaacaactacaacaacttgtgctagcataccttgctgcctactctcagcaacagcagtttcttccattcaaccaactaggttcattgaactctgtttctaattggcaacaacaacatctaccattcacccagttacctgctgcctacccccagtaattatttccttccaaccacctagcagcttt

SEQ ID NO: 18133 - DNA, 297 bp, Zea mays
  Clone ID: LIB3151-023-Q1-K1-H11
aagaagacagctgataacccatatgtccgcgatgctgctagataatctgctcttcatgagatcaatgagcgcatcaagaagaccaaggatgagaagaaagcgaataatgcggaggtgagcaagtcccagatgacgcagacaaagggtgcggtccacaagggttccaagggccccaaattgggcggctgtggttttaaacgctgaaagaacttattgttccttctcgacatttcagtctttccttatccaaaaccactttcctataacctgtgttgaattttcaagacttattaaagc

SEQ ID NO: 18134 - DNA, 427 bp, Zea mays
  Clone ID: LIB3151-023-Q1-K1-H2
gtcagctgccagcgcctctgcaatgcagatgccctgcccctgcgcggggctgcagggcttgtacggcgctggcgccggcctgacgacgatgatgggcgccggcgggctgtacccctacgcggagtacctgaggcagccgcagtgcagcccgctggcggcggcgccctactacgccgggtgtgggcagacgagcgccatgtaccagccgctccggcaacagtgctgccagcagcagatgaggatgatggacgtgcagtccgtcgcgcagcagctgcagatgatgatgcagcttgagcgtgccgctgccgccagcagcagcctgtacgagccagctctgatgcagcagcagcagcagctgctggcagcccagggtctcaaccccatggccatgatgatggcgcagaacatgccggccatgggtggactc

SEQ ID NO: 18135 - DNA, 263 bp, Zea mays
  Clone ID: LIB3151-023-Q1-K1-H3
actgaaacaaacatcaaaggatctttttcttttgctgccaccaaagaataaggggggggagctatttgtctacacagatctcttaactacgaccacctccatcacgctcgccatacgcatggacatcctgtacctcgtgggcttcaagaccccacgcggggtgtggtgggagttcgaaaacgacggtgacacccacctcctgatccacaaccccatgtggctcggcttctgacgttggtaccaggacctcatccaccacaaag

SEQ ID NO: 18136 - DNA, 130 bp, Zea mays
  Clone ID: LIB3151-023-Q1-K1-H7
ctctgaatgcatatgccatgcccctgcgcagggctgaagggcttgtactgcgctggcgcccgactgaccacgatgatgggcgacgacgggctgttcccatacgctgagtacctgatgcagccagaatgca

SEQ ID NO: 18137 - DNA, 304 bp, Zea mays
  Clone ID: LIB3151-023-Q1-K1-H9
tgaacgaccggggcgaccgacgcgttcagaccattagcgttccggtaacagttatggcattagaacacgatgatgatggtcgtgcagttggtcgcgcaccatctgtatactatgattcagtttgagcgtgccgttgacgccagcaacaggctgttcgagccagctctgatgcagcagcagcagcagttgctggcagcccaaggtctcaaccccatggccatgatgatggcgcagaacatgccggccatgggtggactctaccagtaccagtaccagtttgccagctaccgcaccaacccctgtg

SEQ ID NO: 18138 - DNA, 285 bp, Zea mays
  Clone ID: LIB3151-024-Q1-K1-A1
gtgcgctatatctgcttcagttttcatgtgggctttcacacccaaattcagctgccacctacataagcgtagctatgatggaagaaggcatgggaaatgttcatgttgctcttcgatacttgcatgaagccctgaagtgcaataagaggttgctaggagctgatcacatccagactgctgcaagctaccatgctatagccatagccctttcaatgatggatgcgtactccctaagtgtgcaacatgaacaaacaaccatgcagatacttcaggagaaactagggg

SEQ ID NO: 18139 - DNA, 342 bp, Zea mays
  Clone ID: LIB3151-024-Q1-K1-A10
acccacgcgtccgggacatacaaagcacattcatataccaactttggcattttaaacaaatagactccttatgcggacggggctttctttaagtgctgctactgcgaccattaccacgaaatgctcacacagctcatataactatactttttccaccgtacctatcaccaacatcttattagatatgtgaatacacaatcctactaccctacaccaaccataacgcattcacaattcaaactttacccatatcaccctcgatcctccaacaataattaaccctattacatcaacaacacttgattcatttactgtcacaaaccattaacacaaaacaactac

SEQ ID NO: 18140 - DNA, 442 bp, Zea mays
  Clone ID: LIB3151-024-Q1-K1-A11
gcaacatataaagcacaatactgtaccaactatggcagtcaaaatatctcgcctccttatgctccttggtgtttctgcaagtgctgctacggcgaccattttcccgcaatgctcacaagctcctatagcttcccttcttcccccgtacctctcaccagcggtgtcttcggtatgtgaaaacccaattcttcaaccctacatgatccaacaggcaatcgcagctggcatcttacctttatcacccttgttcctccaacaatcatcatccctattacagcagttacctttggtgcatttattggcacaaaacatcaaggcacaacaactacaacaacttgtgctagcaaaccttgctgcctactctgagcaacagcagttttttccattcaaccaactagctgcattgaactctgcttcttatttgcaacaccaacaactacca

SEQ ID NO: 18141 - DNA, 378 bp, Zea mays
  Clone ID: LIB3151-024-Q1-K1-A2
cccatcttcgtccgctccggccactcgtttctccgtcgtcggtcgccacccgcaaggtttgggggagaagattcgggaaggatggcttccggtgggcagccgcagttccggtacacgcatccgccgtcgaaggtgctccacctgcggaatctgccgtgggactgcactccagaagagctggtcgagctggtgacccccttctgcaaggtcgtcaacaccaagtgcggcgtctgcgccaaccgcaatcacgcattcatcgaattcggcgaccaaaatcaagctattgccatgatatcatattatgcatcgtcaacagagccagcacaagtaagagggaaaaatgtgtaccttcagtactcaaatagacaggagattgtc

SEQ ID NO: 18142 - DNA, 290 bp, Zea mays
  Clone ID: LIB3151-024-Q1-K1-A4
aacaaatccctagatgtaattaacaacgccgtacctctccgacacacaccttaaagagctggggagccggccatggtctcctgacctctagctctaagcacacccattcccctacgacccgaagagtgaagttgacatccacccgctgcccatatctactgctgcagagcacctagccctaaagtcactacatcaccagacaccgcctcaatgccccctggaacgtcagtcatctgcacgcacatctgaacacctctggacctctggctcttcactatgacctcactact

SEQ ID NO: 18143 - DNA, 344 bp, Zea mays
  unsure at all n locations
  Clone ID: LIB3151-024-Q1-K1-A5
agcattcanaaacacaccaagcgaatcgcactatcaacaacctaacaacaatggctgccaagatattatccctccttgcgcttcttgcgctttttgcgagcgcaacaaatgcgtccattattccacaatgctcacttgctcctagttccattattccacagttcctcccaccagttacttcaatggccttcgaacacccagctgtgcaagcctatatgctacaacaagcgattgcggcgagcgtcttacaacaaccaattgcccaattgcaacaacaatccttggcacatctaacaatacaaaccatcgtaacgcaacagcaacaacagtttctaccagcactg

SEQ ID NO: 18144 - DNA, 422 bp, Zea mays
  Clone ID: LIB3151-024-Q1-K1-A6
ggctagcgaagattgatcatactgtacgtgttcttcaattctttgaaaaaccaaggggggctgattttaattctatgagagttgagaccaacttcctgagctatgctatagatgatgcacagaaatatccataccttgcatcaatgggcatttatgtcttcaagaaagatgcacttttagaccttctcaagtcaaaatatattcaattacatgactttggatctgaaatcctaccaagagctgtactagatcatagtgtgcaagcatgcatttttacgggctattgggaggatgttggaacaatcaaatcattctttgatgcaaacttggccctcactgaccaaccttccaagtttgatttttatgatccaaaaacacctgttttcactgcaccccgatgcttgcctccgactcaattagac

SEQ ID NO: 18145 - DNA, 127 bp, Zea mays
  Clone ID: LIB3151-024-Q1-K1-A8
gaccacgcgtacgaaccattcactttctctactacactacaccttcgccctccatggacaccttaatcatctcggtccccggttcactctcaccctactcgtcacccaactcccatcctttcccctc

SEQ ID NO: 18146 - DNA, 413 bp, Zea mays
  Clone ID: LIB3151-024-Q1-K1-A9
ctgggtcttcagaccattatctttatctacttcagagcgcagaagaacccgatcgacaccgtgagggtggtgctcgttgccctcgctctcctggctctctctgcgagcgccaccttcacgcatacaagcggcggctgcggctgccagccaccgccgccggttcatctaccgccggcggtgcatctgccacctgcggttcacctgccacctccggtgcatctcccaccgccggtacacctgccgccgccggtccacctgccaccgccggtccatgtgccgccgccggttcatttgccgccgccaccatgccactaccttactaaaccgccccggcctaagcctcatcccaagccacacccatgccctggccaacagccgattccaacccctggcaagttgaaggaaacctgcgg

SEQ ID NO: 18147 - DNA, 358 bp, Zea mays
  Clone ID: LIB3151-024-Q1-K1-B1
ctcccccttctgctcatcctccgtccctccgtcggaagggctggcgctaagggacgatccctccgtgcgcccgtccgttcgacgggacctcggttggtttcgtcggtcgctgggaggacaggtgacggaacggtgatatgaggcggtggttatgttgtaactgccactatgacgttgaggaagatgaccacgccaaggaacaggccaaagctcagagcaataagaccgactccaagcagaagtcttcaaagcctactggtagtcaacctgagccagagttcttccctcctacaattgatgtacctgaattgtctttggatgatttgaaactaaagactgatgattttggatcaagtgc

SEQ ID NO: 18148 - DNA, 376 bp, Zea mays
  unsure at all n locations
  Clone ID: LIB3151-024-Q1-K1-B10
ttggatcgaccgacgcgtccacaactagcaacatataaagcgcagtcgccctttatcattttcatccaaaatatttngcctgggtatgcgcctaggtatttctgcaagtgctgctacggcgaccattttcccgcaatgctcacaagctcctatagcttcccttcttcccccgtacctttcaccagcagtgtcttcggtatgtgaaaacccaattcttcaaccctacatgatccaacaggcaatcgcagctggcatcttacctttatcacccttgttccttcaacaatcatcaaccctattacagcagttacctttggtgcatttattggcacataacaatatggcacaacaactacaacaacttgtgctaacaaac

SEQ ID NO: 18149 - DNA, 393 bp, Zea mays
  unsure at all n locations
  Clone ID: LIB3151-024-Q1-K1-B11
ttaggtttatctactccatagcgcanaagatcccgatctacaccatgagggtgttgctcggtgccctgggtctcctggctctcgctgcgagcgccacctccacgcatacaagcggcggctgcggctgccagccaccgccgccggttcatctaccgccgccggtgcatctgccacctccggttcacctgccacctccggtgcatctcccaccgccggtccacctgccgccgccggtccacctgccaccgccggtccatgtgccgccgccggttcatctgccgccgccaccatgccactaccttactcaaccgccccggcctaagcctcatccccagccacacccatgcccgtgccaacagccgaatccaagcccgtgccagctgaagggaacct

SEQ ID NO: 18150 - DNA, 267 bp, Zea mays
  Clone ID: LIB3151-024-Q1-K1-B12
tgatagctcacctcacctcctcgcccgttgtttcgtgctccgtccttcaccccccaccaagcttgccggtcaaaaactatccacccctccacggctccacccctacccgccgacgagcgccatcgattgattccgctcaagcctggccgtggacgacgatgcatctccccagcgctgtgtgagcccaccaaataccactaccgcaaaccctacaataaacaacctgctgtcgcaaaaccaattttagcactatgacgcttgtgcctc

SEQ ID NO: 18151 - DNA, 418 bp, Zea mays
  Clone ID: LIB3151-024-Q1-K1-B2
atccttccactccctcgccgaccctcccccctcgcccgccatggacacggcgatcggctcgggcccgggagcctccgacgcggcgcgtcacccagcgccgtccgcgtccgccccgcgcgacgcgacgctgggccggcacctagcgcggcgcctggcggaggtgggcgcccgggacgtgttcacggtgccgggggacttcaacctcacgctcctcgacgagctggaggccgagccgggcggcgtccgcctcgtcggctgctgcaacgagctcaacgcggcgtacgcggccgacgggtacgcccgcgcgcgcgccggcggggtcggcgcctgcgccgtcaccttcaccgtcggcggcctcagcgccatcaacggcgtcgccggcgccttcagcgagaacctccccgtcgtgtgcatcgtc

SEQ ID NO: 18152 - DNA, 333 bp, Zea mays
  Clone ID: LIB3151-024-Q1-K1-B4
acaaagcacaaagctgtcccaacaatggctttcaaaatattttgcctccttatgctccttagagttggtgtatgtgctgatacggcgaccattttcccgaaatgctcgcacgctcctataactgacattattccgccgtacctctcaccaacggtgtcttcggtctgtgaaaacccaattgttgaaccctacaggatccaacaggcaatcacagctggtatcttacctttatcacccttgatgctccaacaatcatcacccctattacatcaattacctttggtgcatgtattggcacaaaacatcatggcccatcaactacaacaacttgtg

SEQ ID NO: 18153 - DNA, 192 bp, Zea mays
  Clone ID: LIB3151-024-Q1-K1-B5
ctcatacacaccaagcgaaccgcactagcatcagcctaacaacaatggtctaccagggagtgggggccttcttgcgcttgtcgcccttatagctagcgcatcaaatgcacttattatagcacagagctcactggctcctagggccaatattccacagtcccttccacacaattcttcgatgggcttagaaca

SEQ ID NO: 18154 - DNA, 156 bp, Zea mays
  Clone ID: LIB3151-024-Q1-K1-B6
gtagcaactagctcgccatcgtgactttgatctgctgctttgtgtggttttatgtggagccgtctgttcaacaaaaagtgatgctttaatgtcacagtatgtgtgaaataaattaaaaaggattttctggtttactaaaacaaaacataacaaatg

SEQ ID NO: 18155 - DNA, 278 bp, Zea mays
  Clone ID: LIB3151-024-Q1-K1-B7
gacccacgcgtagctaattatctaactaaccataacaccttaaaatttcatgcttacttatgctccgtgagagcgggtctaatgcttctaccgcatccattttcccacaattcttacaagctcctatatcttccattcttacccaattcctctcaccaacggagccttcagtatatgaaaacctaattcttcaaccctacaagatccaacacgcaatcacatcatgctttttacctttatcacccttgtaattccaacaaccagtaaccctattacag

SEQ ID NO: 18156 - DNA, 255 bp, Zea mays
  Clone ID: LIB3151-024-Q1-K1-B8
cacgcccacgcgtaacattacataccttctaccaattaccttcatctttttcattccctgctctagcacgcgcgcgagtgaaatatccaaaagatatgcctcactattattaccactataaaaacacactcttgtatttttgcaaatttaccactcatactcgttccctcaatttaaaacatctcatatgcagatatcgaaaaataccaaaaatggatttaaaacgtgactattcatttattcaccttagttatt

SEQ ID NO: 18157 - DNA, 452 bp, Zea mays
  Clone ID: LIB3151-024-Q1-K1-B9
cgtgcggagaaccctccgagcatcctattgactcctttggctccttccatgtcggcgcagttcacaggaatcagggtcagcaacctgtttgtccgtcgggctggcccatgcagcacggagctgaccgtggagggaaggccatccgaccagctgggcaggagaaacctcactgacagccccgtatttgacggccgtggccctgacgccagcctcgtggctcgcgtacagggagtcgctacccagatgggcgacgtgcgccagttgtacaccgtcgtgttccaggagaggccgctcaagggctccacgctcgtcaccgaaggcgcgatgacggaagggtcagacgagtgggcgatctacggcggaactggagtgttcgcgatggcgagaggcgtcataaggagaacgtttcttgctgacacgagcggcgggaactccgacgagcttgccgtgga

SEQ ID NO: 18158 - DNA, 327 bp, Zea mays
  Clone ID: LIB3151-024-Q1-K1-C1
gaaagcacaatagtgtaccaacaatggcagccaaaatattttgcttccttatgctccttggtctttgtgcaagtgctgctaccgcaaccattttcccacaatgctcacaagctcctatagcttcctttcttcccccatacctctcaccagcggtgtcttcagtatgtgaaaacccaattcttcaaccctacaggatccaacaggcaatcgcagcaggcatcttacctttatcacccttgttcctccaacaaccgtcagccctattacagcagttacctttggtgcatttgttggcacaaaacatcaaggcacaacaactacaacaac

SEQ ID NO: 18159 - DNA, 299 bp, Zea mays
  Clone ID: LIB3151-024-Q1-K1-C12
tttcctggtgcctacttgctaaatgaaaatatttcttcagaaggtgaaagttcggacgatgagtctgatggtttctactccgatgatgagatggacttgacacctgcccctcctgtaacataagaaaatatggagggttcatctgttgcaaacaaacatgatgccgatggagataccaaataggaagatgatgcatctgatgatgaagatggtacatatcaagatgactccaacagtgatagcgattaactagacgattactctgatgtggatgaggatactgatatattctataaaaa

SEQ ID NO: 18160 - DNA, 461 bp, Zea mays
  Clone ID: LIB3151-024-Q1-K1-C2
gtagaattcatatccctcctaccacatccgttccccccttcccttccctcctctcgcgcgcgggctgggcgcatatccaggagatatgcctcgctatgatgaccgctatggaggcacgcgcttgtatgttggcagattggccactcgtactcgttcccgcgatttagaacatctgtttggcagatatggaagaatacgagaagtggagttgaagcgtgactatgcatttattgagttcagtgattatcgcgatgctgatgaggctcgataccagctagatggcacggatgttgatgggagtcgtattgctgttgaagttgctaaaagggtcccacgtggttcaggtggctcacgtgaatatatggggagaggccctccaccaagtacaggtcggttgttcaactgtggaagtgatggtcactgggcaaggagacatgtaagctggtgactggaaaaacaaa

SEQ ID NO: 18161 - DNA, 343 bp, Zea mays
  Clone ID: LIB3151-024-Q1-K1-C6
ggggacgaccacgcgttcagaatatattacattacaccaactgtttacacttaaccctgctgattatttgccgcggcatggtttatgatttatccggataggctctgactactatcatcttcaacaactgcttccatgttaccatatggtcgctctgtaccccgctgcttatatgaagggggtaatactgtctgcgaaaaagccaaattgctaccgtacgcggtgcatccttcttgacacaacaacaggtgttgtcgatctaccaggagcttgcgactataatcacaacccttttaccagtaccactattggcaccctttgtgccacttgatttgggaaaaac

SEQ ID NO: 18162 - DNA, 313 bp, Zea mays
  unsure at all n locations
  Clone ID: LIB3151-024-Q1-K1-C7
acaccattaactatatctactccagagcgcacacaaacccgatcgacaccatgaggggggtgctagttgccctcgctctcctggctctcgctgctagcgccaccttcacgcatacaagctgcgggtgcggatgccatccaccgccgccggttcatctaccancgccggtgcatctgccacctgcagatcacctgccacctccgtagcatatcccaccggcggtccacctgccgacgtcagttcaactaccaccgtcggtccatgtgccatcagcggtatatctgccgtcaccaccatgccactaccctactca

SEQ ID NO: 18163 - DNA, 185 bp, Zea mays
  Clone ID: LIB3151-024-Q1-K1-C8
ctaggtcttcataccattagctctatctacttcagagcgcagaagaacccaatcgggaccatgagggtgtcgttcgttgccctccctttcctggctctcgctgctagcgccacctccacgcatactagcggtggctgccgctgccagccaccgacgtcggttcatctaccgacgtcggtgcatct

SEQ ID NO: 18164 - DNA, 254 bp, Zea mays
  Clone ID: LIB3151-024-Q1-K1-C9
attgggtctatctactacaaaacgcagaacttcccggtctacaccatgagggtgtagctcgggggcctggctctcctggctctcgctgcgagcgccaccttcacgcatacaatcggcggactgcggctgacagccaccgatgccggttcatctaccgccatacggtgcatctagccagctcctggataagctggcacatccagtgcatctaccatcgacgatccaccaggcgacggcagcacacatgtcaccat

SEQ ID NO: 18165 - DNA, 451 bp, Zea mays
  unsure at all n locations
  Clone ID: LIB3151-024-Q1-K1-D1
ttcccgggttcgaacccacgccgtcacgcagtatcangtcaaagtcggcatgtggcgtagaagagggtatcgtctgaaccagaacccagcatgaagaatgggtcaggngtgtcgtcgtcgtgtgccctggtctctgtnncagctgccatgcgcctctgcaatggcagatgtcacctagcccctgcgcggtgtgctgcatgggcttgtaccgggcgctggctgccggccctgacgaacgatgtatgtggctgccgtgcgggtctgtatcccctacgcggagtatcctgagggcagccgcagtgcatgcccgctggcggctggctgccctatctacgccgggtggtgggcagacgagcgccatgtaccagcccgctccggcaacagtgctgccagcagcagatgaggatgatggacgtgcagtccgtcgcgcagcagctgcagatgatgatgc

SEQ ID NO: 18166 - DNA, 279 bp, Zea mays
  Clone ID: LIB3151-024-Q1-K1-D12
ccgagcaacatataaagcactttaccgtaccatcattggcttttaaaataaaatgcctccttgggctcctgtgtatttttgcaagtgctgctacacctaccattttcccacaatgctcacaagctcctatatcttcccttctttccccgaaccttttaccaacgttgtcttcacaatgctaaaacccaattcttcaaccctacaagatccaacatgctatctcagctatcatcttacctttatcacccttgctcctccaacaatcatattacctatttc

SEQ ID NO: 18167 - DNA, 446 bp, Zea mays
  Clone ID: LIB3151-024-Q1-K1-D2
atcaccctcgaggtggagtcttcagacaccatcgacaacgtcaaggccaagatccatgacgaggagggcattccaccggaccagcatcgtttgatcttcgctggcaagcagctggaggatggccgcacccttgcggattacaacatccagaaggagagcaccctccacctggtgctccgtctcaggggtggcatgcatatctttgtgaagacactcactggcaagacaatcacccttgaggtggagtcttccgataccattgacaatgtcaaggccaaaatccaagacaaggagggcatcccaccggaccatcagcgcctcatattcgccggcaagcagctggaagatggccgcaccctgtcggactacaacatccagaaggagagcaccctccacctggtgctccgcctcacgggtggcatgcaaatttttgtgaagacattgac

SEQ ID NO: 18168 - DNA, 374 bp, Zea mays
  Clone ID: LIB3151-024-Q1-K1-D4
cggacgcgtgggcaagcctgtcgtcgtcgttaacacagagagagggagctcgtccatgtccggctgagtcctcttggcgatcgagggagtggccaaccggtgataatctagctagccagcctcgccatgcctcgccagaggaccctcgcctccgcggcggcgggcgggcggctgctgctcgtggtggcggcggtcctgctgtgcctgtccgtgcctccggggcgcgcggcacccccgggcgcggaggtcgcggagttccctgggttcacgggcaaactcccctccaagcactacgccgggtacgtaacagttggtcgacatgagcaacgaaagaaacacctgtactactaccttgccgtctctgaaaggaaccc

SEQ ID NO: 18169 - DNA, 270 bp, Zea mays
  Clone ID: LIB3151-024-Q1-K1-D5
ccacgcatacgataccaacaagcatcctttaaagtgttatcttttacacaacactctaacaacaataggtggcgtgtattatatacattctctctctcacctctcaactcctctgcaatgcacaccccatcacccttcacaactcttcacaaactcaactaaatctccttcttcctcaataccattaatcaatcagccgtactgtacccctacacccaacacctcaaccataccaactgcatcacccattcggtacaagccctactacct

SEQ ID NO: 18170 - DNA, 348 bp, Zea mays
  Clone ID: LIB3151-024-Q1-K1-D6
gacccacgcgtacgctccctcttcaatagggtatcatcatacacttcttaagagaccttattacatccagggcggggtcctatttgctatcaatggactgaaccaccgcggatactatagctagcacgactatgcatacctggagcaaggacagctcgcttccattgcacgtgccggcaggttcatgttcttggaagccacgagcctgctatacctgtgccctcctcctgcgctcgcgggacaccctggcccgcatgtggcgtaactacctcccttgactggcaaactatcctgaaaccactacagcccgtaccaaacaattgctggccatcagcaactagagaaaca

SEQ ID NO: 18171 - DNA, 317 bp, Zea mays
  Clone ID: LIB3151-024-Q1-K1-D8
cgacccacgacgtacgcgtacgctctcactaaactatccatgtcgattactcttacatacgtacatcatcaacatccgcctgagtcctattcgctatctacgcacaatgcacccacataccttctacaacaaccagttctaaccatagcctacccagaggacacctaacctgctgtggcaaaccctgtcggctacttataacagatgcttccattctactaagcctctctgtccaaccctggtgcgcacctaccacaggcacaacagttacttaattcactggtattacataaaaaattccctgccaacactactac

SEQ ID NO: 18172 - DNA, 370 bp, Zea mays
  Clone ID: LIB3151-024-Q1-K1-E1
cgtccctgcagtgcatgggcaggccggtgaggtctgtgagaggaggaggaggaggagatgggcgggagggagagcggctggatggcggcggctctgcgctgcgctggaaggatcgggatcctggccaccgtcgcagtgaacctcgcgtggatcgcgacgtacatccgccggcgctacttcggcggcgggaaccgatccgacaacaacggtggcggcggtgaggtggagccgtcaagagggaagccgccggtcacttcggactccatcgtcaacctcgatcatggcgacccgactatgtacgaggagttctggcgcggcacatgagatagcgcctccatcttcatccctggttggcaaacaatgagctact

SEQ ID NO: 18173 - DNA, 344 bp, Zea mays
  Clone ID: LIB3151-024-Q1-K1-E12
aagcaacatataaagtggaatccagtagcatcaatagagcaacaatggcgaccgggatatgttccctccttatgctccttgctctttctgcatgtgttgctaacgcgacaattttccctcaatgctcacaagctcctatagcttcccttcttcccccataccttccatcaatgatagcttcagtatgtgaaaacccagctcttcaaccctataggctccaacaagcaatcgcagcaagcaacatacctttatcacccttgtttcaacaatcgccagccctatctttggtgcagtcattggtacaaaccatcagggcacagcagctgcagcaactcgtgctacct

SEQ ID NO: 18174 - DNA, 381 bp, Zea mays
  Clone ID: LIB3151-024-Q1-K1-E2
gatggccgctatgcatagcccccccatggcttccgttctgcgctgcgctggaaggatcgcgatccgggtcaccgtcgcagtgaacctcgcgtgcatcgcgacgtacatacgacagcgctactttggcggcgggaaccgatccgacaacaacggtggcggcggagaggtggagccatcaagagggaagccgccggtcacttctgactccatcgtcaacctcgatcatggccacccgactatgtacgaggagttctggcgccgcacaggagatagcgcctacatcttcatccctggttggcaaacaatgagctacttctccgacctcggacggatctgttggttactggagcctggattcgagcgcgaggtgcggcgtctcca

SEQ ID NO: 18175 - DNA, 381 bp, Zea mays
  Clone ID: LIB3151-024-Q1-K1-E3
ttcacgcatcgcacggagaacagaacaccgttcgatctatccctcgagaagcagagacaaggagccggtccgttcgcccgcacacatagagacagatagaatcaagccgccgccgaccagtgacatggcgccctgggccattgccatccacggcggcgcgggcgtggacccgaacctcccggagcaccggcaggaggaggcgaagcgcgtgctggcgcggtgcctgcaggtgggcgtggacctgctgcgcgcgggcgcgcatgcgctggacgtcgtggaggccgtggtgcgcgagctggagacggaccccttcttcaactcggggcgcgggtccgcgctcacccgcgccggcaccgtggagatggaggccagcattatgga

SEQ ID NO: 18176 - DNA, 351 bp, Zea mays
  Clone ID: LIB3151-024-Q1-K1-E4
ggacgacccacgcgtgcggtggcgaatgtctcacatcacacaacaccttttgttttacaactatacatggcacatctagcgaggcgtacgatcgcaacgcaacatctacaccaatagctaccagcacgtgagccacctatgcctggtgaaccctgccgactactttccacagcagttgcttggatgaaacccacttgctctggcaaacgtaggtggaaaccaaccacaacatcagctcggacactttgtgtcaccgctgacctaactaggcatggtgaacactgccggatacctacaacagcaacaactgcttacatctagacagctcgctgtttgaaatgcacctacata

SEQ ID NO: 18177 - DNA, 236 bp, Zea mays
  unsure at all n locations
  Clone ID: LIB3151-024-Q1-K1-E5
ttcatctactccatatctctgaaaaacccgatcgacaccataaaggcngcagctagtattccatcgctctcctgcctctcactncaagcaccaccttcacacatacaagctgaggctgcagatgacagccaccgacatcggttcatataccgaccccaacgcatctgacaacttctattcacatgccaactacgttgcatctcccaccctcgaccacctgacgactctcttccacc

SEQ ID NO: 18178 - DNA, 157 bp, Zea mays
  Clone ID: LIB3151-024-Q1-K1-E6
gagggcacgcggacgggtgggattgggatacataccaccttacccttatttttatcaacctaacaacaacgactaagaacacgttcaatttcattgcgaccctcgcaccaatcgctaccaccactcatcctcccatcattggacgaacgctgccgac

SEQ ID NO: 18179 - DNA, 406 bp, Zea mays
  Clone ID: LIB3151-024-Q1-K1-E7
agcaacatataaagtggaatccagttgcaactatagagcaacaatggagaccaagagattggccctccttatgctccttgctctttctacatgtgttgctaacgcgacaattttccctcaatgctcacaagctcctatagcttccctttttcccccataccttccatcaattatagcttcagtatgtgaaaacccagctcttcaaccatataggcttcaacaagcaatcgcagcaagcaacatacctttatcgcccttgttgtgtcaacaatcgccagccctatctttggtgcagtcattggtacaaaccatcagggcacaacagctgcagcaactcgtgctacctgtgatcaaccaagtagctctggcaaacctttctacctactcttcggaacaacaatttctt

SEQ ID NO: 18180 - DNA, 335 bp, Zea mays
  Clone ID: LIB3151-024-Q1-K1-E8
gccgaccgacgcgtccgatcttcataattcataaacacacctttcttttctcactcaccacaacctaccaacgatggcgtccaatttattagccctccttgctctacaagcccttataacgagcccatcatacgctattattatcacacagcgctcacttgcttctagcgccattatttcacatatcctcccaccagttacttaaataaccttctaacatccacccattcaagcctacatgctacaactagcacctgcctaccacgatttacaacaaccaattgcccaactgcaacaacatttcttgacccatctaaacctacaaaccatcggaa

SEQ ID NO: 18181 - DNA, 419 bp, Zea mays
  Clone ID: LIB3151-024-Q1-K1-F1
ctcctccggctagggtgttcacgcctgccgcggcgaagcttctgccctccccggcgtcgggctctggtcgtcgtcggccgggaagatggctggcggcttcagggtacttcatctggtcaggccctttctggctttcttgccagaggtgcagagcgcggataggaagataccattcagagaaaaagttatctacactgttatttctctcttcatttttctggtgtgcagccagctcccactctatggcattcattcgacgactggagctgatcctttctactggatgcgtgttatcctcgcatcaaaccgtggcactgtgatggagttgggtattactccaattgtgacctctggtatggtaatgcaacttcttgtcggatcgaagatcattgaagttgacaacagtgtgagagaggatc

SEQ ID NO: 18182 - DNA, 426 bp, Zea mays
  unsure at all n locations
  Clone ID: LIB3151-024-Q1-K1-F10
gttaaatatcaggcacacaagctgtactttgccatgtcccttttgagtacacatcagtatgatgcaggaggtaatgtctagtagtggtcggtttaggtggtgtagtcatgggaactcgacatcagatacctggtctcttttgattgtgatgttatcttgcattattgctcctgctggagcttttaggatttgttgtaagctcatattttcaggggggtttggatcttttgtgcgagtcatatctcgtgtacgttgcattgcattgttgtgttatgcttctgctggcttgtcccnnnnaaaaaaaaaaaaaaaaaaaaaaaaaaaaaaaaaaaaaatataaaaaaaaaaaaaaaaaaaaaaaaaaaaaaaaaaaaaaaaaaaaaaaaaaaaaaaaaaaangggggggggcctttttaaagaaccaaa

SEQ ID NO: 18183 - DNA, 230 bp, Zea mays
  unsure at all n locations
  Clone ID: LIB3151-024-Q1-K1-F12
gcccactcgtccgaaaccattttctttatcctctccagagcgcanaaaaaccggatcgacagcatgatgttgttgctcgttgccctctctctcctggctctcgctgcgagcgccacctccacgcatacaagcggcggctgctgctgccagccaccgccgccggttcatctaccgccgccggtgcatctgccacctccggttcacctgccacctccggtgcatctcccacc

SEQ ID NO: 18184 - DNA, 427 bp, Zea mays
  Clone ID: LIB3151-024-Q1-K1-F2
catttattggcacaaaacataagggcacaactactacaacaacttgtgctagcaaaccttgcggtggactctcagcaacagcagtttcttccattcaaccaactagctgcattgaactctgcttcttatttgcaacaacaacaactaccattcagccagctacctgttgcctacccccagcaatttcttccattcaaccaactggcagcattgaactctcctgcttatttacagcagcaacaactactaccattcagccagctagctggtgtgagccctgctaccttcttgacacaaccacagttgttgccgttctaccagcacgctgcgcctaacgctggcaccctcttacaactgcaacaattgctgccattcaaccaacttgctttgacaaacctagcagtgttctaccaacaacccatcattg

SEQ ID NO: 18185 - DNA, 429 bp, Zea mays
  Clone ID: LIB3151-024-Q1-K1-F4
ggtcttcagaccattagctttatctactccagagcgcagaagaacccgatcgacaccatgagggtggtgctcgttgccctcgctctcctggctctcgctgcgagcgccacctccacgcatacaagcggcggctgcggctgccagccaccgccgccggttcatctaccgccgccggtgcatctgccacctccggttcacctgccacctccggtgcatctcccaccgccggtccacctgccgccgccggtccacctgccaccgccggtccatgtgccgccgccggttcatctgccgccgccaccatgccactaccctactcaaccgccccggcctcagcctcatccccagccacacccatgcccgtgccaacagccgcatccaagcccgtgccagctgcagggaacctgcggcgttggcagcaccccgatc

SEQ ID NO: 18186 - DNA, 259 bp, Zea mays
  Clone ID: LIB3151-024-Q1-K1-F5
cacgctcccgctcctagtctgataaccccttccccttcctttctaagtccctaccctacccccggcgaccgtcgtctttgaccgcaaacatagcagtcagctccaggacacatcatgtcgtaactctccttctacccttcctgccagagttccatagcccgctatataagacaccattcagagaaatagttatccacactatcattatcctcctcatccatctgcaatgccaccatctacaactacatgaacttgattc

SEQ ID NO: 18187 - DNA, 332 bp, Zea mays
  Clone ID: LIB3151-024-Q1-K1-F6
ggacgcgtcttattaccatcaactatatctactccataccgtttaaaaacccaaccgacaccatgggggtaggtgtctttttaactcgctctcctgcctctcaatgcaatcgccacctacacacatacaaacaatggttacaactaccaaccaccgtcttcggttcatctaccgtctcacccgcatctatccacctccagttaacctaccaccttcaatgcatcttccaccgtctgtacacctgccgccaccagttcacctgccaccgcctgtccatgtgacgactccgtttcatctgtcaacaacaccatgccactaccctactcaaccac

SEQ ID NO: 18188 - DNA, 409 bp, Zea mays
  unsure at all n locations
  Clone ID: LIB3151-024-Q1-K1-F7
ggccgacccacgcgtncgctatcaacatanaaagcacaatagtttaccttcaatggcagctaaaatattttggcgccttagtctccttggtctttctgcaagcgctgctacagcgaccattttcccacaatgctcacaagctcctatagcttcccttcttcccccgtacctctcaccaacggtgtcttcggtatgtgaaaacccaattcttcaaccctacaggatccaacaggcaatcgcagctggcatcttacctttatcacccttgttcctccaacaatcatcagccctattacagcagttacctttggtgcatttattggcacaaaacatcatggcacaacaactacaacaacttgtgctaacaaaccttgctgcctactctcaacaacagcagtttctttcattc

SEQ ID NO: 18189 - DNA, 450 bp, Zea mays
  Clone ID: LIB3151-024-Q1-K1-F8
ggacgaccccgcgtgcgggtcgttaaaccattagctttatctactccttagcgcacaagaacccgatcgacaccatgagggtggtgctcgttgccctcgctctcctggctctcactgcgagcgccacctccacgcatacaagcggcggctgcggctgccagccaccgccgccggttcatctaccgccgccggtgcatctgccacctccggttcacctgccacctccggtgcatcttccaccgccggtccacctgccgccgccggtccacctgccaccgccggtccatgtgccgccgccggttcatctgccgccgccaccatgccactaccctactcaaccgccccggcctcagcctcatccccagccacacccatgcccgtgccaacagccgcatccaagcccgtgccagctgcaaggaacctgccgcgttggcagcaccccgatcctgg

SEQ ID NO: 18190 - DNA, 372 bp, Zea mays
  Clone ID: LIB3151-024-Q1-K1-G1
acttggagcaggaccaagtgaatgctgttctgactgctgttgtccagggaatgaaccaggcagagctcagccctgaagttcgtcttgctgcagttaaagccctatataatgctcttgactttgctgagagtaactttgcaaatgaaatggagaggaattatataatgaaggtggtttgtgagactgctatgtctaaagaagtggagatcagacaggctgcatttgaatgccttgttgcaatagcatccacatattattcacacttagacccttatatgcaaaccatattcgacctgacagctaatgcagtgaaaggcgatgaaaaaccagttgcacttcaagctgtcgagttctggagcgctatttgtgatg

SEQ ID NO: 18191 - DNA, 359 bp, Zea mays
  Clone ID: LIB3151-024-Q1-K1-G10
cgggccgacccacgcgtgcggctgtatctactccagagcgcataagaactttatcgacaccatgagggtgtggctcgttaccctctctctcctggctctcgctgcgagcgccacctccacgcatacaagcggcggctgcggctgccagccaccgccgccggttcatctaccgccgccggtgcatctgccacctccggttcacctgccacctccggtgcatctcccaccgccggtccacctgccgccgccggtccacctgccaccgccggtccatgtgccgccggcggttcatctgccgccgccaccatgccactaccctactcaaccgccccggcctaagcctcatcccaagccacacc

SEQ ID NO: 18192 - DNA, 411 bp, Zea mays
  Clone ID: LIB3151-024-Q1-K1-G11
ccgctccggcaacagttctgcctttagcagatgatgatgatggacgggcagtgggtcgctcaccatctgtctactgatgattcactttgagcgctaccttgacgcatacaagcggctgttgcagctacctgtcacccacgacgattaatctaccgccgccggtgcatctgccacctccggttcacctgccacctccggtgcatctcccaccgccggtccacctgccgacgccggtccacctgtcaccacctgtccatgtgccgccgtcggttcatctgccgccgtcaccatgccactaccctactaaaccgtcccggactcatcctcatccccagccacacccatgctcgtgccaacagccgcatccaagcccgtgccatctgcagggaacctgcggcgttggcagcaccc

SEQ ID NO: 18193 - DNA, 352 bp, Zea mays
  Clone ID: LIB3151-024-Q1-K1-G12
cgcagcacaaacaaacaccgcgccgccgccacagctttgccctacagaatccttttactccgaagattctcaagacgcccctgatggctccccgcgtcgcctccgctctgctcttcgtcgtggccgtcctcgtggcctccgcggcggcgcaggagtccatggcgcccgcgtctgctccggcgccgggaccggtcgctggcgcggcctccgctccggcctccgctgtggccgtggtgtcgtccgcactgctgtccctccttatgacggccctgatgcagtagaagtatcatactagatttgagcgggaatttggttcagggtggctatccctcattctttgtgtatcatatat

SEQ ID NO: 18194 - DNA, 459 bp, Zea mays
  unsure at all n locations
  Clone ID: LIB3151-024-Q1-K1-G2
ggtcttcagaccattagctctatctactccagagcgcagaagaacccgatcgacaccatgggggtgttgctcgttgccctcgctctcctggctctcgctgcgagcgccacctccacgcatacaagcggcggctgcggctgccagccaccgacgccggttcatctaccgccgacggtgcatctgccacctgcggttcacctgccacctccggtgcatctcccaccgccggtccacctgccgacgccggtccacctgccaccgccggtccatgtgccgncgccggttcatctgccgccggcaccatgccactaccctactgaaccgccccggactgagcctcatccccagccacacccatgcccgtgccaacagccgcatacaagcccgtgccagctgcagggaacctgcggcgttggcagcaccccgatcctgggccagtgcgtctagtttctgaggcat

SEQ ID NO: 18195 - DNA, 173 bp, Zea mays
  unsure at all n locations
  Clone ID: LIB3151-024-Q1-K1-G3
gctttatctactccagagcgcatattaacccgatcgacaccatgagggtgttgctcgttgcggtcgctgtcctggctctcgctgcgagcgccacctacacgcatacaagcggcggctgctgctgccagccaccgccgccggttcatataccgncgcctgtgcatatgccacct

SEQ ID NO: 18196 - DNA, 372 bp, Zea mays
  Clone ID: LIB3151-024-Q1-K1-G4
attttgaacattcagaaacacaccaagccattcacattaacaacaacctaacaacaatggcgaccaggatattatccctccttgcgcttcttgcgctttttgcagagcgcaacaaatgcgttcattattccacaacgctcacttgctccaagttccattattacacagttcctcccaccagttacttcaatgggcttcgaacacccagctgtgcaagcctataagctacaacaagcaattgcggcgagcgtcttacaacaaccaatttcccagttgcaacaacaatccttggcacatctaacaatacaaaccatcgcaacgcaacagcaacaacaattcctaccagcacttgaccacctagccatggtgaac

SEQ ID NO: 18197 - DNA, 244 bp, Zea mays
  Clone ID: LIB3151-024-Q1-K1-G5
gcaacataaaaagcacaatattgcttcaactttggcagccaaaatattttgcttgcggatgcggcttggtctttctgcaagtgctgctaccacaaccattttcccacaatgctcacaagctcctatagcttcctttcttaccccatacctctcaccaacggtgtattcagtatgtgaaaacccaattcttcaaccctacaggatccaacaggcaatcgcagcatgcatcttacctttatcaccc

SEQ ID NO: 18198 - DNA, 175 bp, Zea mays
  Clone ID: LIB3151-024-Q1-K1-G6
actagttataaatcgatatcgtcctttctatataatacaaccttacgtacccttgggtgcgatttatatctctcttatactcccacctaaattcaattcaccacctcttcccttacaacttcgagactgggaaatccctcaccctacccaaattaattatcttctaacacatatt

SEQ ID NO: 18199 - DNA, 415 bp, Zea mays
  Clone ID: LIB3151-024-Q1-K1-G7
tacgacccacgcgtacgattgagaccaactcccaacataaatatcacatttgttttccaacaacggcaatcaaactacgggggcgacttatactccttggcctcttatcctcctttctttccctacccatgttgctaacgcgactacaatctctcaatgctcacactgcttctcatcatcctcttaccaccccataccttcacatcaatgataactcaattgtgcaaccatcccagatccaccaccctatacgatccaacatcttaccattatcagcctcattccttcatcacccttgattcatatatcaccagccacctcttttgcacttggattcacacaaaatatcagcgcaccaactacgacaactcttgctctccctcctatctacctactctcatcaacatacctttct

SEQ ID NO: 18200 - DNA, 234 bp, Zea mays
  Clone ID: LIB3151-024-Q1-K1-G8
gtcgagggcacgacgtacgcgtctagatagcgagcggctttacactatcactgttttactactgctgcattcgctgccatggatccgacttgctgtgacatactcaacagtgatctaccaacaacccatcattggtggtgcgctatttcagagtgcttatgaatcatagttgaatagtgaagcattctggatgatgctggtggcgtcctagagataagaaagtacatgtttgga

SEQ ID NO: 18201 - DNA, 86 bp, Zea mays
  Clone ID: LIB3151-024-Q1-K1-G9
ataaaaaaaaaaaaaaataaaaaaaaaaataaaaaaaattaaaaaaaaaaatattaaaataaaaaaattataaaaatattaataat

SEQ ID NO: 18202 - DNA, 325 bp, Zea mays
  Clone ID: LIB3151-024-Q1-K1-H1
attgagaccaactagcaacatagaaagcacaatagtgtaccaacaatggcagccaaaatatggtgctgccttatgctccttggtctttctgcaagtgttgctaccgcaaccattttcccacaatgctcacaagctcctatagcttcccttcttcccccatacctctcaccagcggtgtcttcaatgtgtgaaaacccaattgttcaaccctacaggatccaacaggcaatcgcaacaggcatcttaccattatcacccttgttcctccaacaaccgtcagccctattacagcagttacctttggtccatttggtggcacaaaaca

SEQ ID NO: 18203 - DNA, 330 bp, Zea mays
  Clone ID: LIB3151-024-Q1-K1-H10
gctgcttgcccttttagtgagctcaacaatttcgttcattattccacagtgctcacttgcgcctagttccattattccacagttcctcccaccagttacttcaatgggcttcgaacatccagccgtgcaagcctacatgctacaactagcgcttgcggctagcgtcttacaacaaccaattgcccaattgcaacaacaatccttggcacatctaaacctacaaaccatcgcaacgcaacagcaacaacagtttctgccatcactgagccacctagccgtggagaaccctgtcgcctacttgcaacagcagctacttctatccaacccact

SEQ ID NO: 18204 - DNA, 362 bp, Zea mays
  Clone ID: LIB3151-024-Q1-K1-H11
gagcatcaaaaccagcacatttatgtaccttctatcgcatacaaaccatttcgacaccatgagcgtcgtgggtctttgtcatgtgcctgctacctatccattttacacaatgttcacaatacaatatagctgtctttcttgcaccaacctctcaccattcatgtacctcactacgtgaaatcccacatcttcaaccatacaggatccaacaggcatttgcaaccggcatttcacctttatcacccttgttacttcaacaaccgtgatcattattacaacagctatcatctgtgcatttgatcatacaaataatctactcacaacaactacaacaacttttattacgaaacacagctatctac

SEQ ID NO: 18205 - DNA, 392 bp, Zea mays
  Clone ID: LIB3151-024-Q1-K1-H12
atgtgtctacacaccattagctttatatactatcagagcgcaaaaaaacccgcgcgacacggtgagggtgttgctcggcgccctctctcttctgtctctctgtgagagcgccacctacacacacacaagcggcggtgtgtgctgacacacaccgccgtcgttttatataccggcggcggcgcatgtgacacctgcggtacacctgacatctgcggagtatctcacaccgggtgtacatctgccggcgcgtgtacatctgccaccgggggcatatgtgccgccgcctttttatgtgccggcgacactatgcctatactatattaaaccgccggggtctgattcttatccagacacacacatatgcgtgtcaaaacagacatataaaaccccgc

SEQ ID NO: 18206 - DNA, 332 bp, Zea mays
  Clone ID: LIB3151-024-Q1-K1-H2
cacgcgtacgggtctagatcgcgagcgtcttactcttactttctctttcaactgcaacaattgctgcccttggaaccgatttgctttgacaaactcatcagccacctaccaacatcccatcatgggtggtgccctctttaacatagcttatgagttatagtccaataacgaagtttttcggatgatgatcgtggcgtaccagaaataagaaaggacatctctggaggtgctaaatcaaaggactatgtgcacgtgcatattcaccagctcaacggtaggaatagtctgacaactgttcagggcttgaagaaagagtacagctacaacaagat

SEQ ID NO: 18207 - DNA, 402 bp, Zea mays
  Clone ID: LIB3151-024-Q1-K1-H4
ctcgtccttccatgtcgaagtccatcggaaatggagtgcaattccttaaccgacacctgtggtccagagttgttccaggacaaggagagtttgtaccccttgctgaacttcctcaaggctcataactacaagggcacgacgatgatgttgaatgacagaatccaaagccttcgtggtctccaatcatccctgagaaaggcagaggagtatctactgagtgttcctcaagacactccctactcggagttcaaccataggttccaagagcttggcttggagaagggttggggtgacactgcgaagcgtgtactcgacacactccacttgcttctcgaccttcttgaggcccctgatcctgccaacttggagaagttccttggaactataccaatgatgttcaac

SEQ ID NO: 18208 - DNA, 133 bp, Zea mays
  Clone ID: LIB3151-024-Q1-K1-H5
cgacccacgcgtgcgacccagtctccactcactctgcctttttttcttcaaggagacgtcggcagactcgcgggcggtcatattcagcgtggagcgctggcccctgcatctaccgtatgcattgcaccacctt

SEQ ID NO: 18209 - DNA, 460 bp, Zea mays
  Clone ID: LIB3151-024-Q1-K1-H6
gaattacagcccgacctacgcgtccacttcgtccgcgtcttactctgacgttctcttacatctccaacaattgctcccactgccacagttatacttttacaatactactacatccaacttaccaacatctcatcatgaccaatcacactcattaactaagcttaatatctaatctccactaacaaatttcatctgattatgatccgtgcgcacaagcaattactaaggacttctctgctggtgctggatcaaaagactatgtgcacgtgcgtattcatcagctcaacgaaaggaagagtctgacaactgttcagggcttgaagaaagagtacagctacaacaagatcctcaaagatctcaaaaaagagttctgctgcaatggtactgtagtccaggatccatagataggccaagtcattcaactgcaaagtgatcagcgtaaaaatgtctatacttttct

SEQ ID NO: 18210 - DNA, 445 bp, Zea mays
  Clone ID: LIB3151-024-Q1-K1-H7
ctcgcctgctatctccgtagcctccgtcgcgtcgagcatcgatcatgtcggcctagggcgggaagtacaaggatgagctcatcaagaatgctgcctacattggcacccctggcaagggtatccttgctgctgatgagtccactggcaccattggcaagcgcctttccagcatcaatgtcgagaacgttgaggagaaccgccgtgccctccgtgagctcctattctgctgccctggtgctctccagtacatcagcggtgtgatcctcttcgaggagaccctgtaccagaagaccaaggatggcaagccttttgttgatgtcctcaaggagggaggcgtcctccctggcatcaaggttgacaagggcaccattgaggttgttggcactgataaagagaccaccacccaatgccatgacgaccttggcaagcgctgcgccaagtacta

SEQ ID NO: 18211 - DNA, 405 bp, Zea mays
  Clone ID: LIB3151-024-Q1-K1-H8
ctcgcctgctatctccgtatcctctttcgtttctagcatcgatcatgtcggcctagtgcagagagtacatggatgagctcatgaagaatgctgcctacattgtcacccctggcaagggtatccttgctgctgatgagtccactggcaccattgacaagcgcctttccagcatcaatgtcgagaacgttgaggagaaccgccgtgccctccgtgagctcctattctgctgccctggtgctctccagtacatcagcggtgtgatcctcttctaggagaccctgtaccagaagaccaaagatggcaagccttttgttgatgtcctcaaggagggaggcgtactccctggcatcaaggctgacatgggcaccattgaggttgttggcactgattaggtgaccaccaccc

SEQ ID NO: 18212 - DNA, 428 bp, Zea mays
  Clone ID: LIB3151-025-Q1-K1-A10
tagaaagcacactagtgttccaacaatgttagccaaaatattatgcttcggtatgctcgttggtctttctgcacgtgctgctaccgcaaccattttcccacaatgctcacaagctcctatagcttcctttcttcccccatacctctcaccagcggtgtcttcagtatgtgaaaacccaattcttcaaccctacacgatccaacaggcaatcgcagcaggcatcttacctttatcacccttgttcctccaacaaccgtcagccctattacagcagatacctttggtgcatttgttggcacaaaacatcaaggcacaacaactacaacaacttgtgctaggaaaccttgctgactactctcagcaacagcattttctttcattcaaccaactggctgcattgaactctggtgtttatttgcaacaaccac

SEQ ID NO: 18213 - DNA, 444 bp, Zea mays
  Clone ID: LIB3151-025-Q1-K1-A12
tagcaacatagaaagcacaatagtgtaccaacaatggcagccaaaatatggggcctccttatgctccttggtctttctgcaagtgctgctacggcgaccattttcccacaatgctcacaagctcctatagcttcccttcttcccccgtacctctcaccagcggtgtcttcggtatgtgaaaacccaattcttcaaccctataggatccaacaggcaatcgcagctggcatcttacctttatcacccttgttcctccaacaatcatcagccctattacagcagttacctttggtgcatttattggcacaaaacatcagggcacaacaactacaacaacttgtgctagcaaaccttgctgcctactctcagcaacaacagtttcttccattcaaccaactagctgcattgaactctgcttcttatttgcaacaacaacaactacca

SEQ ID NO: 18214 - DNA, 169 bp, Zea mays
  Clone ID: LIB3151-025-Q1-K1-A3
acaatcgccagccctatctttggtgcagtcattggtacaaaccatcagggcacaacagctgcagcaactcgtgctacctgtgatcaaccaagtagctctggcaaacctttctccctactctccgcaacaacaatttcttccattcaaccaactgtctacactgaaccct

SEQ ID NO: 18215 - DNA, 85 bp, Zea mays
  Clone ID: LIB3151-025-Q1-K1-A6
cctgcaacaatcactagccctattacagaatgttacctcttggtgcatgtattggcacaaaacatccgggcccatcaggctacaa

SEQ ID NO: 18216 - DNA, 113 bp, Zea mays
  Clone ID: LIB3151-025-Q1-K1-A7
gggcagacagcgccatgtaccaggcgctccggaacagcgctgccagcagcagatgaggatgatggacgtgcagtccgtcgcgcaacacctgcagatgatgatgcaccttgagc

SEQ ID NO: 18217 - DNA, 189 bp, Zea mays
  Clone ID: LIB3151-025-Q1-K1-A8
acatacctttatcacccttgttgtgcaacaatcgccagccctatctttggtgcagtcattggtacaaaccatgagggcacaacagctgcagcaactcgtgctacctgtgatcaaccaagtagctctggcaaacctttcttcctactctccgcaacaacaaattcttccattcaaccaactggctacact

SEQ ID NO: 18218 - DNA, 421 bp, Zea mays
  unsure at all n locations
  Clone ID: LIB3151-025-Q1-K1-A9
gcgacgccctactgctctcctcagtgccagtcgttgcggcagcagtggggccagcagctgaggcaggtggagccgcagcaccggtaccaggcgatcttcggcttggtcctccagtccatcctgcagcagcagccgcaaagcggccaggtcgcggggctgttggcggcgcagatagcgcagcaactgacggcgatgtgcggcctgcagcagccgactccatgcccctacgctgctgccggcggtgtcccccactgaagaaactatgtgctgtagtatagccgctggctagctagctagttgagtcatttagcggcgatgattgagtaataatgtgtcacgcatcaccatgggtggcagtgtcagtgtgagcaatgacctgaatgaacaattgaaatgaaaagaaaaaagtattgttccnnac

SEQ ID NO: 18219 - DNA, 347 bp, Zea mays
  Clone ID: LIB3151-025-Q1-K1-B10
actatatatagatagcgatcggtctatatgaacgaagcatacttacgcgggcatgcatgggaatagatattttatatatgcagctacataaaattaactgactgtccgtctacaaacaacggactgacagaaaaatgcctttacccacctaacttaacttgcttgaaatacatctttcttcagctggctagcttactaataaggacgtactgacacgatcttccttacataacagtcagcctgaatgaataacgaaacgcaccctgcctgtagccattaattaagcccggtgtgtgtggtacttacactatgaacgctccacttactagccatctagctctcgcaca

SEQ ID NO: 18220 - DNA, 346 bp, Zea mays
  Clone ID: LIB3151-025-Q1-K1-B11
cgtacacagtctcactcttcctgtcagttttagagtgagagtgaggccgggagtgggagacaaggggaaatggggaacggagcgcaagggagcgatgcggaggcggcgggcggccaggtggaggagaacatggcggcgcggctggtcgccaagaacaccctcaagatcatgcccttcaagctcccgcccgtcggcccttatgatgtccgcgtgcgcatgaacgcaatggggatttgcggcagcgatgtgcactacctaagggagatgcgcatcgcgcacttcctggtgaaggagccgatggtgatctgtcaccagtgcacatgcgtggtcaacgaagtgggcgccg

SEQ ID NO: 18221 - DNA, 424 bp, Zea mays
  Clone ID: LIB3151-025-Q1-K1-B12
cgggaaagcaggcagcagtgcgtccagtcttgcgagcgccggcgacaggagcgcggcggcagccgtgactccgacgtcgacgaggacgacagcgaccggcggtgccagatgaaatgccggcgccacagcgatcggcaggcgaggcagtggtgcgtgcagcgctgcgagcgtaagcaacaggaggacgccgacgccgacgacgagaatagcgaccggtgccagaagaagtgccggcaccacagcgatcggcaggcgaggcagtggtgcgtgcagcgctgctagcgtaagcaacaggaggacgccgccgccgacgacgacgacaacagcgaccggtgccagaagagatgccagcaccacagcgactggatgataaagctgcggtgcatgcaacggtgcgggcgacatgaggagggctgcgcacgcg

SEQ ID NO: 18222 - DNA, 118 bp, Zea mays
  Clone ID: LIB3151-025-Q1-K1-B2
ctgccaccgcggtccatgtgccgccgccggttcatctgccgccgccaccatgccactaccctactcaaccgccccggcctcagcctcattcccagccacacccatgcccgtgccaaca

SEQ ID NO: 18223 - DNA, 127 bp, Zea mays
  Clone ID: LIB3151-025-Q1-K1-B5
atgtgccgccgccggttcatctgccgccgccaccatgccactaccctacttcaaccgcccggctagcctatcccagcacaccatgccggcacagcgatcaccggcactgagactgggtgagaccact

SEQ ID NO: 18224 - DNA, 154 bp, Zea mays
  Clone ID: LIB3151-025-Q1-K1-B6
cgccggtccacctgccaccgccggtccatgtgccgccgccggttcatctgccgccgccaccatgccactaccctactcaaccgccccggcctcagcctcatacccagccacacccatgcccgtgccaacagccgcattcaagcccgtgccagct

SEQ ID NO: 18225 - DNA, 163 bp, Zea mays
  Clone ID: LIB3151-025-Q1-K1-B7
catggtgcggagaggaggccaggactgcaaaacgctaggggggctcacggactgtttcttatggcgctcataagtgaattagagtttttgacggctggctgcaacctcttcatttctgccaaacggagatcctgatggagggatcagagctagggtttgcatg

SEQ ID NO: 18226 - DNA, 154 bp, Zea mays
  Clone ID: LIB3151-025-Q1-K1-B8
cattaaccctccaacaaccatatgctctattgcaacagccatccttagtgcatctgtatctccaaagaatcgcggcacaacaactacaacaacagttgctaccaacaatcaatcaagtagttgcagcgaaccttgctgcttacctccagcaaca

SEQ ID NO: 18227 - DNA, 417 bp, Zea mays
  unsure at all n locations
  Clone ID: LIB3151-025-Q1-K1-B9
gcggcgactccacggcgtcgacgccagcgcgctccgcgggacgccgtggcgcagtaaacacgaccaagctgaagcacacttagcaaccaaccgaacaacaatggcgtacgcaagatattatcacctccttggcgcttcttgncgctttttagcgagcgcaacaaatggcgttcattacttccacaatggctcacttgctccaagttccattattacacagttcctcccaccagttacttcaatgggcttcgaacacccagctgtgcaagcctataggctacaacaagcaattgcggcgagcgtcttacaacaaccaatttcccagttgcaacaacaatccttggcacatctaacaatacaaaccatcgcaacgcaacagcaacaacaattcctaccagcactgagccacctagccat

SEQ ID NO: 18228 - DNA, 211 bp, Zea mays
  Clone ID: LIB3151-025-Q1-K1-C1
ccctgccgctacttgaacagcagttgcttgcataaacccacttgctctggcaaacgtagttgcaaaccagccacaacaacagctgcaacagtttctgccagcgctcagtcaactagccatggtgaaccctgccgcctacctacaacagcaacaactgctttcatctagcccgctcgctgtggccaatgcacctacatacctgcaacaacaa

SEQ ID NO: 18229 - DNA, 448 bp, Zea mays
  Clone ID: LIB3151-025-Q1-K1-C10
tgagcattcagaaacacactcaagcgaatctacctagcaacgacttaacagcaatggctgccaagatattagccctccttgcgcttcttgccctttttgtgagcgcaacaaatgcgttcattattccacaatgctcacttgctcctagtgccattataccacagttcctccgaccagttacttcaatgggcttcgaacacctagctgtgcaagcctacaggctacaacaagcgcttgcggcgagcgtcttacaacaaccaattaaccaattgcaacaacaatccttggcacatctaaccatacaaaccatcgcaacacaacagcaacaacagttcctaccagcactgatccaactagatgtggtgaaccctgtcgcctacttgcaacagcatgtgcttgcatacaacccacttgctctggcaaacgtagctgcataccaacaacaaca

SEQ ID NO: 18230 - DNA, 420 bp, Zea mays
  Clone ID: LIB3151-025-Q1-K1-C11
gaaatacaggcgcgacccacgcgtcacaccatgagcatctatctacttcaaagcgtatagctaccgcgaacgaagccggcgaaccaggagcacctacacctccatctgctgcttctaactctcagcgccatctccacgcatacaaccggcggctagctacaacaacacaacctgctcgcatcaagcacgctcgctgtgggaaatgcaactacatacctacatcaacacttgttggaacataccaccccagctctaactgaactagctggggcaaatcctatcgcctactcataacaggtgcttccattataccaagtgactatgatgcaactagcttactcaactacaacagcgatcacacttactcaaaccacagccattggctaaccaacaggccgatgccatcctacagcaactaca

SEQ ID NO: 18231 - DNA, 360 bp, Zea mays
  Clone ID: LIB3151-025-Q1-K1-C12
cgagcgccacaaccaacatcacccgcctttgcgacacgacagccgacagggggaaggggtaaacttactgccagccagtgaacggggagaagtgtactgctccgtcgaccagtgcgcgcaccggccggcaaggctgctcatttcttcgacgaccattgcattaatcggcatggcggctctggccacgtcacatctcgacgcatcgcccatcggcctgggcgtcccagacgcgttcacatttcgacgaggcgccgtgcaaggactgaggtgggccctatcatatgaggtacgctgacacgctcataatgcggaccagcatgcgcgcacagcacatacaccaacatcaggcacgccacgttg

SEQ ID NO: 18232 - DNA, 203 bp, Zea mays
  Clone ID: LIB3151-025-Q1-K1-C4
gcggcggcgccctactacgccgggtgtgggcagacgagcgccatgtaccagccgctccggcaacagtgctgccagcagcagatgaggatgatggacgtgcagtccgtcgcgcagcagctgcagatgatgatgcagcttgagcgtgccgctgccgccagcaagcagcctgtacgagccagctctgatgcaacagcagcagcagc

SEQ ID NO: 18233 - DNA, 111 bp, Zea mays
  Clone ID: LIB3151-025-Q1-K1-C6
cagcccgctggctgcggcgccctactacgccgggtgtgggcagactaagcgccatgtaccagccgctccggcaacagtgctgccagcagcagatgaagatgatggacgtgc

SEQ ID NO: 18234 - DNA, 340 bp, Zea mays
  Clone ID: LIB3151-025-Q1-K1-C9
acgcgattggggcggatttcctcaccaaggatgtgcagttcgaggacaggcgcttcactctggaaatatgggacactgctggtcaggaaaggtttcagagtcttggcgttgcattctaccggggagcagattgtggcagcctactctatgatgttaattctatgaaacggtgcgataatcttcacaactggacgtgaagagtttctaattaatgcgagcccatcagatcctgacaatttcccttcagttgtgaccggtaacacatgtgacgtagatggtggaaacagccgcgtggtgtccgagaaaaatgctcaagcatggtgcgcctataaaggtaaca

SEQ ID NO: 18235 - DNA, 326 bp, Zea mays
  unsure at all n locations
  Clone ID: LIB3151-025-Q1-K1-D10
caactagcaacatagaaagcacaatagtgtaccaacaatggcagctaaaatattttgcctccttatgctccttggtctttctgcaagtgctgctacggcgaccattttcccacaatgctcacaagctcctatagcttcccttcttcccccgtacctctcaccaacggtgtcttcggtatgtgaaaacccaattcttcaaccctacaggatccaacaggcaatcgcagctggcatcttacctttatcaccctngttcctccaacaatcatcagccctattacagcaagtacctttggtgcaattattggcacaaaacatcagggcac

SEQ ID NO: 18236 - DNA, 359 bp, Zea mays
  Clone ID: LIB3151-025-Q1-K1-D11
gaaaagcggccatgcatatagcggatctttacccacaacagcatgaagagggtcatggctctttatgcgtgccgggctctgtcagctgccagctcctgtgacctgcatatgccatgcctctgcgcgtggtatcgatgctcgtactgccctgacgcctgactgacgacgattatgggctccgaaagcctaaacccctacccctactacctgcagcaggcgcagtgcagctcagatggcagctgtatcatactacgtcctgcgacgacaaacaagcgtcttgcaccagccacttcggcaacattgctggcagcagcacatgaggatgaaggacctacaacaccttgtgcataaaaacctta

SEQ ID NO: 18237 - DNA, 407 bp, Zea mays
  Clone ID: LIB3151-025-Q1-K1-D12
aatattttcagcattcataaacacaccttgcgaagcgcactagcaacaaggtaacaacgatggctaccaagatattagccctccttgcgcttcttgcccttttagtgagcgcaacaaatgcgttcattattccacagtgctcacttgctcctagtgccattattccacagttcctcccaccagttacttcaatgggcttcgaacatccagccgtgcaagcctacaggctacaactagcgcttgcggcgagcgtcttacaacaaccaattgcccaattgcaacaacaatccttggcacatctaaacctacaaaccatcgcaacgcaacagcaacaacagtttctgccatcactgagccacctagccgtggtgaaccctgtcgcctacttgcaacagcagctacttgca

SEQ ID NO: 18238 - DNA, 126 bp, Zea mays
  Clone ID: LIB3151-025-Q1-K1-D4
ggtccacctgccaccgccggtccatgtgccgccgccggttcatctgccgccgccaccatgccactaccctactcaaccgccccggcctcagcctcatccccagccacacccatgcccgtgccaaca

SEQ ID NO: 18239 - DNA, 60 bp, Zea mays
  Clone ID: LIB3151-025-Q1-K1-D5
atgtaccacatcgctctagcaatcagtgatggcagcagcatatgacgatgatggacgtgc

SEQ ID NO: 18240 - DNA, 356 bp, Zea mays
  Clone ID: LIB3151-025-Q1-K1-D9
tggacgtcagcctagcaattagctcatcgactccagattggagaactcgacaccatgaaggtgctgatcgttgcccttgctctcctggcgctcgctgcgagcgccgcctccagtacaagcggcggctgtggctgccagacaccaccgtttcatctaccgcctccgttctatatgccgcctccgttctatctgccgccgcagcagcagccgcagccatggcaataccccactcaaccaccgcagctaagcccgtgccagcagttcggatcctgcggcgtcggcagcgtcggcagcccgttcctgggccagtgcgtcgagttcctgaggcaccagtgcagcccggcggcgacgcccta

SEQ ID NO: 18241 - DNA, 432 bp, Zea mays
  unsure at all n locations
  Clone ID: LIB3151-025-Q1-K1-E11
aaaaacaggccggagccaagcatccaantgcttaaccctattttatccaacattcttacgaacccnacatacaagatgaattagccgcttttctacaacaaccttcacccctattacagcagctacctatggagcattaaatcgcacataacatcaaggcacaccaactacaacatcatgtgctaggaaaccttgctgtctactctcagcaacaccagccacttccattcaaccaactacctgcattgaactctgctgcttatttgcaacaacaactaccattcaatcagctagcttctgcctacccccagcaattactttcattcaaccaatcttcagcattgaactctgctgcttatttacaacaacaccagctaccatcatttatccagctatctaatgtgagccctgtttccttttttacacaacaac

SEQ ID NO: 18242 - DNA, 371 bp, Zea mays
  Clone ID: LIB3151-025-Q1-K1-E12
ggaaaacaggcggacccagcgtccactgtctcacacccctttcaccaaactttaagcatcgccacctccccagacctactagactattttcccgctctgccgacccccaccggcaacaacgacaaccccccttcactcgacgcatacttctacatggccgacctagcttccctagacgccacggccgttacatccgccaccaccggctgatctccttccacccgctcccgtcccaaagccaatgcaaatcccaacccgaatgctgatcctcccacacccgcaccagttgccgtacccatacctgaccctgaaccatatccataccttattccattgccggagcccgatgccaaccccttgccgccaccata

SEQ ID NO: 18243 - DNA, 120 bp, Zea mays
  Clone ID: LIB3151-025-Q1-K1-E2
cggtccacctgccaccgccggtccatgtgccgccgccggttcatctgccgccgccaccatgccactaccctactcaaccgccccggcctcagcctcatccccagccacacccatgcccgt

SEQ ID NO: 18244 - DNA, 125 bp, Zea mays
  Clone ID: LIB3151-025-Q1-K1-E3
aaatcctttgcttatcaacggctacaagcgcacctttaatctcgcttgcattgaccacagaggcacacctgagcatacggcgaggacctgcacgctagaaacctacgactaagccatatgctggg

SEQ ID NO: 18245 - DNA, 153 bp, Zea mays
  Clone ID: LIB3151-025-Q1-K1-E4
cttcgtttagcttttagccaagtacaaggttccagcctgagacctccaaaaactggatgtctccgccatggctgtatacaaggtgaagcttgtcgggcctgaaggtgaagagcacgagtttgatgctccagacgacgcctacatccttgacgc

SEQ ID NO: 18246 - DNA, 115 bp, Zea mays
  Clone ID: LIB3151-025-Q1-K1-E7
tgtcctccacaatcatcagccctattacagcagttacctttggtgcatttattggcacaaaacatcagggcacaacaactacaacaacttgtgctaagcaaaccttgctggctac

SEQ ID NO: 18247 - DNA, 192 bp, Zea mays
  Clone ID: LIB3151-025-Q1-K1-E8
ccaattgcccaattgcaacaacaatccttggcacatctagacctacaaaccatcgcaacgcaaacagcaacaacagtttctgccatcactgagccacctagccgtggtgaaccctgtacgctactagcaacagcaggtacttgcatacaacccacttgctctggcgaacgtagctgcataccaagaacaaca

SEQ ID NO: 18248 - DNA, 345 bp, Zea mays
  Clone ID: LIB3151-025-Q1-K1-E9
cgcaccagcgtttcatctttcgcatcattctcatggtcccggtatatgcggtgatgtcgtttctttcccttgtcttaccgcatcaagcaatctacttcaattctattcgagaaatctatgatgcttgggtcatctacaatttctttctcactttgcttggcatgggttggaggtcctggtaatgtggtggtaagtttgaatggacaatctctgaaaccctcatggttactgatgacttgcttgttaccagctattcccctagatgggcgttttatacggagatgtaaacaaggctgtctgcagtttgtgatcctaaaaccaatcttgggcgttatcactttcata

SEQ ID NO: 18249 - DNA, 395 bp, Zea mays
  Clone ID: LIB3151-025-Q1-K1-F11
gaaatacaggcccgacccacgcgtacggctatatatcgctagcgttcggtctattttaaccacgcatacttacgcagacatgcttgggaattactatcccatatatacacctaactaaaattaactgaccgaccgtctacaaccacaaaactgtcaaaacactccccttacccaacttaattaacttgcatcacatacatctttctttagctggcttaataactaaaaagaacgcacttaccgaccttcccaacaaataaatagccagaatgactaacgatacgcaccctctataaacgcattaattacggccggtgcgcgcagtacgaacactaaaactgatacattcataagccacctaccttacgctcgcttcccttactttctttcctttc

SEQ ID NO: 18250 - DNA, 434 bp, Zea mays
  Clone ID: LIB3151-025-Q1-K1-F9
gcgccgcgttcgagatgctccgccgcacgctccgctggcgcagggactggaccggcttcggctccggcgccgagtccgacgccgacgccgacctccccgaggagctcgcgggcgcgtgctacctcgacggcgcggaccacgagggccacccggtgtgctacaacgcgctgggcgtgttcgcggacgacgccgtgtacaagaaggcgctgggcaccgaggaaggcaaggccaggttcctccggtggcgggtgcgcgccatggagcgccacgtcgccgagctggacctgaggcccggcggcgtcgcgtcgctgctgcaggtgatcgacctcaggaactcgccggggccggccaagaaggacttccgagtcgccgtcaagcaggtgctcgacctgttccaggacaactaccccgagctcgtcgcgagaaacatcttg

SEQ ID NO: 18251 - DNA, 151 bp, Zea mays
  Clone ID: LIB3151-025-Q1-K1-G1
gcgcatcttcgacaccacgctgcgcgacggggagcagtcgccgggcgccaccatgacgagcgcccaaagctcgtcgtcgcgcgccaagctggccgctcgggtgacatatcagccggttccggctctcccgacactgagcggcgctcatgca

SEQ ID NO: 18252 - DNA, 240 bp, Zea mays
  Clone ID: LIB3151-025-Q1-K1-G10
cgacccacgcgtacgcagaaacacaccaatcgatcgcactattctcaacctaacaacaatggctgccaaaattgttacccttcttgcgcttcttgcccttttagtgagcgcaacaaatgcgttcattattccacaaagctcacctgcttccaaagccatatttccacacatccttccaccaattactttaatgggctttgaacatacaaccctgcaaaactacacgcttcaactatagct

SEQ ID NO: 18253 - DNA, 426 bp, Zea mays
  Clone ID: LIB3151-025-Q1-K1-G11
attgagaccaactagcatcatagaaagctcaatagtgtaccaacaatggcagccaaaaggttttgcttccttatgctccttggtctttctgcaagtgctgctaccgcaaccattttcccacaatgctcacaagctcctatagcttcctttcttcccccatacctctcaccagcggtgtcttcagtatgtgaaaacccaattcttcaaccctacaggatccaacaggcaatcgcagcaggcatcttacctttatcacccttgttcctccaacaaccgtcagccctattacagcagttacctttggtgcatttgttggcacaaaacatcaaggcacaacaactacaacaacttgtgctaggaaaccttgctgcctactctcagcaacagcagtttcttccattcaaccaactggctgcattgaactct

SEQ ID NO: 18254 - DNA, 206 bp, Zea mays
  Clone ID: LIB3151-025-Q1-K1-G12
ggcgatcaaacggaccaatgctgagaatatagatcgcgtacgacaagaagctgtgcagggggctctatgagtacaccaaggtgctcatcgccctcgccgacaacgtctgttccaagcagctccaggacatccgccggggccttaagggcgactcggtggtgctcatggggaagaacacgctcatcaggcgcttcatcaaagtgtac

SEQ ID NO: 18255 - DNA, 441 bp, Zea mays
  Clone ID: LIB3151-025-Q1-K1-H11
gatcagcaaagcggcagtgcgtagagagtatcgtcgaacagaacagcatgaagatggggatcgttctcgtcgtgtgcctggctctgtcagctgccagcgcctctgcaatgcagatgccctgcccctgcgcggggctgcagggcttgtacggcgctggcgccggcctgacgacgatgatgggcgccggcgggctgtacccctacgcggagtacctgaggcagccgcagtgcagcccgctggcggcggcgccctactacgccgggtgtgggcagacgagcgccatgtaccagccgctccggcaacagtgctgccagcagcagatgaggatgatggacgtgcagtccgtcgcgcagcagctgcagatgatgatgcagcttgagcgtgccgctgccgccagcagcagcctgtacgagccagctctgatgcagcagcagcagcagc

SEQ ID NO: 18256 - DNA, 118 bp, Zea mays
  unsure at all n locations
  Clone ID: LIB3151-025-Q1-K1-H12
gaaaacnggcgcgaccgacgcgtncggtgggtcttcagaccattagctttatttactccagagcgcagaagaaggcgatcgagaccatgagggtgttgctcgttgccctcgctctcct

SEQ ID NO: 18257 - DNA, 151 bp, Zea mays
  Clone ID: LIB3151-025-Q1-K1-H2
ttatcacccctgttctttcaacaatcgccagccctatctttggtgcagtcattggtacaaaccatcagggcacaacagctgcagcaactcgtgctaccagtgatcagccaagtagctctggcaaacctttcttcctactctcagcaacaac

SEQ ID NO: 18258 - DNA, 186 bp, Zea mays
  Clone ID: LIB3151-025-Q1-K1-H3
caacatacctttatcacccttgtttaacaatcgccagccctatctttggtgcagtcattggtacaaaccatcagggcacagcagctgcagcaactcgtgctacctgtgatcaaccaagtagctctggcaaacctttctccctactctcaacaacaacaatttcttccattcaaccaactgtctaca

SEQ ID NO: 18259 - DNA, 57 bp, Zea mays
  Clone ID: LIB3151-025-Q1-K1-H4
tacgcccgtctttgttttcttcttttgcagtgcgttccgagttaatggtctagtcat

SEQ ID NO: 18260 - DNA, 91 bp, Zea mays
  Clone ID: LIB3151-025-Q1-K1-H5
ttgttggacaaaaggagggacaacaactacacaacttgtgctggaaaccttgctgcctactgtcagaacaacagtttctttcattcaacca

SEQ ID NO: 18261 - DNA, 207 bp, Zea mays
  Clone ID: LIB3151-025-Q1-K1-H9
attcggctctttacaccataaattttacaaactttagaacgcataaaaacccgggggtaactatgaggttgttgcacctaaccctacttcacctggctctcgttgacagcgccaccactacgcatacaatcggggtacgcaactgaaaaccaccgcagcacattcatctatcgccagctgtgcatataacaaatacggctgacactg

SEQ ID NO: 18262 - DNA, 446 bp, Zea mays
  Clone ID: LIB3151-026-Q1-K1-A1
cgccggtccatgtgccgccgccggttcatctgccgccgccaccatgccactaccctactcaaccgccccggcctcagcctcatccccagccacacccatgcccgtgccaacagccgcatccaagcccgtgccagctgcagggaacctgcggcgttggcagcaccccgatcctgggccagtgcgtcgagttcctgaggcatcagtgcagcccgacggcgacgccctactgctcgcctcagtgccagtcgttgcggcagcagtgttgccagcagctcaggcaggtggagccgcagcaccggtaccaggcgatcttcggcttggtcctccagtccatcctgcagcagcagccgcaaagcggccaggtcgcggggctgttggcggcgcaaatagcgcagcaactgacggcgatgtgcgggctgcagcagccgactccatgcccctacgct

SEQ ID NO: 18263 - DNA, 448 bp, Zea mays
  Clone ID: LIB3151-026-Q1-K1-A10
attagctttatctactccagagcgcagaagaacccgatcgacaccatgagggtgttgctcgttgccctcgctctcctggctctcgctgcgagcgccacctccacgcatacaagcggcggctgcggctgccagccaccgccgccggttcatctaccgccgccggtgcatctgccacctccggttcacctgccacctccggtgcatctcccaccgccggtccacctgccgccgccggtccacctgccaccgccggtccatgtgccgccgccggttcatctgccgccgccaccatgccactaccctactcaaccgccccggcctcagcctcatccccagccacacccatgcccgtgccaacagccgcatccaagcccgtgccagctgcagggaacctgcggcgttggcagcaccccgatcctgggccagtgcgtcgagttcctgaggcatc

SEQ ID NO: 18264 - DNA, 431 bp, Zea mays
  Clone ID: LIB3151-026-Q1-K1-A12
gaaagcacaatagtgtaccaacaatggcagccaaaatattttgcttccttatgctccttggtctttctgcaagtgttgctaccgcaaccattttcccacaatgctcacaagctcctatagcttcccttcttcccccatacctctcaccagcggtgtcttcaatgtgtgaaaacccaattgttcaaccctacaggatccaacaagcaatcgcaacaggcatcttaccattatcacccttgttcctccaacaaccgtcagccctattacagcagttacctttggtccatttggtggcacaaaacatcagggcacaacaactacaacaacttgtgctagcaaaccttgctgcatactctcagcaacatcagtttcttccattcaaccaactggctgcattgaactctgctgctaatttgcaacaacaattacca

SEQ ID NO: 18265 - DNA, 200 bp, Zea mays
  Clone ID: LIB3151-026-Q1-K1-A2
gtcgcattcagtcatattgcttctgcctacctctagcaatctctttcatttaacctactggcagcaccgaactgtgctgattatatacgacacctataggtacctgcaatgaggcacgtaaatgatgagagccctgatgcattcttggcagaacaacaagtgacggcggtgtagctgaacgctgagccttacgctgacag

SEQ ID NO: 18266 - DNA, 433 bp, Zea mays
  unsure at all n locations
  Clone ID: LIB3151-026-Q1-K1-A3
attagctttatctactccagagcgcagaagaacccgatcgacaccatgagggtgttgctcgttgccctcgctctcctggctctcgctgcgagcgccacctccacgcatacaagcggcggctgcggctgccagccaccgccgccggttcatctaccgccgccggtgcatctgccacctccggttcacctgccacctccggtgcatctcccaccgccggtccacctgccgccgccggtccacctgccaccgccggtccatgtgccgccgccggttcatctgccgccgccaccatgccactaccctactcaaccgccccggcctcagcctcatccccagccacacccatgcccgtgccaacagccgcatncaaacccgtgccagctgcaaggaacctgcggcgttggcagcaccccgatcctgggccaatgcgtcg

SEQ ID NO: 18267 - DNA, 378 bp, Zea mays
  Clone ID: LIB3151-026-Q1-K1-A4
cagaaacacaccaagcgaagctacctagcaacgacttaacaacaatggctaccaagatattagccctccttgcgcttcttgccctttttgtgagcgcaacaaatgcgttcattattccacaatgctcacttgctcctagtgccattataccacagttcctccgaccagttacttcaatgggcttcgaacacctagctgtgcaagcctacaggctacaacaagcgcttgcggcgagcgtcttacaacaaccaattaaccaattgcaacaacaatccttggcacatctaaccatacaaaccatcgcaacacaacagcaacaacagttcctaccagcactgagccaactagatgtggtgaaccctgtcgcctacttgcaac

SEQ ID NO: 18268 - DNA, 322 bp, Zea mays
  Clone ID: LIB3151-026-Q1-K1-A6
caacaactacaacaactgtagttaccaacactcaatcacgtaattgcaacgaaccttgctgcttaccttcaccaacaacatgcttgttccattcaatcaactacatggcgcgaaccctgctatctacttgcaggcacaacacactactaccatttaaccaacttgccgggagcccttatgcctttttactgcaacaacaacttctaccatttcatctgcaagctgtggcaaacattgctgctttcttgatacaacaacatttgcatgcattttacccacaggatgtgggaaacattaatgccttcttgcatcatcaacaatt

SEQ ID NO: 18269 - DNA, 432 bp, Zea mays
  Clone ID: LIB3151-026-Q1-K1-A7
agcggcagtgcgtagagaggatcgtcgaacagaacagcatgaagatggtcatcgttctcgtcgtgtgcctggctctgtcagctgccagcgcctctgcaatgcagatgccctgcccctgcgcggggctgcagggcttgtacggcgctggcgccggcctgacgacgatgatgggcgccggcgggctgtacccctacgcggagtacctgaggcagccgcagtgcagcccgctggcggcggcgccctactacgccgggtgtgggcagacgagcgccatgtaccagccgctccggcaacagtgctgccagcagcagatgaggatgatggacgtgcagtccgtcgcgcagcagctgcagatgatgatgcagcttgagcgtgccgctgccgccagcagcagactgtacgagccagctctgatgcagcagcagcagcagc

SEQ ID NO: 18270 - DNA, 361 bp, Zea mays
  Clone ID: LIB3151-026-Q1-K1-A8
gcaacatagaaagcacaatagtgtaccaacaatggcagccaaaatattttgcttccttatgctccttggtctttctgcaagtgttgctaccgcaaccattttcccacaatgctcacaagctcctatagcttcccttcttcccccatacctctcaccagcggtgtcttcaatgtgtgaaaacccaattgttcaaccctacaggatccaacaggcaatcgcaacaggcatcttaccattatcacccttgttcctccaacaaccgtcagccctattacagcagttacctttggtccatttggtggcacaaaacatcagggcacaacaactacaacaacttgtgctagcaaaccttgctgcatac

SEQ ID NO: 18271 - DNA, 450 bp, Zea mays
  Clone ID: LIB3151-026-Q1-K1-B1
attttgagcattcagaaacacaccaagcgaagcgcactagcaacaacctaacaacaatggctaccaagatattatccctccttgcgcttcttgcgctttttgcgagcgcaacaaatgcgtccattattccacaatgctcacttgctcctagttccattattccacagttcctcccaccagttacttcaatggccttcgaacacccagctgtgcaagcctataggctacaacaagcgattgcggcgagcgtcttacaacaaccaattgcccaattgcaacaacaatccttggcacatctaacaatacaaaccatcgcaacgcaacagcaacaacagttcctaccagcactgagccacctagccatggtgaaccctgtcgcctacttgcaacagcagctgcttgcatccaacccacttgctctagccaacgtagttgcaaaccagcaacaac

SEQ ID NO: 18272 - DNA, 252 bp, Zea mays
  Clone ID: LIB3151-026-Q1-K1-B10
gaagaacccgatcgacaccatgagggtgccgctcggtgcacctgctctaacagctctcgctgccatcgcacaccttcacacatacagaacgctgctgtgtatgtcaaccaccaacagctactaatataccgccaactgggcatgagccaccatgcgttcacactgcaactacagtgcatatcataccatctgtacacctggcgacacatggccacctgccagagacagcacatgtgcgcggcgactgtacat

SEQ ID NO: 18273 - DNA, 449 bp, Zea mays
  Clone ID: LIB3151-026-Q1-K1-B11
ccaactagcaacatagaaagcacaatagtgtaccaacaatggcagccaaaatattttgcctccttatgctccttggtctttctgcaagtgctgctacggcgaccattttcccgaaatgctcgcaagctcctatagcttcccttcttcccccgtacctctcaccagcggtgtcttcggtatgtgaaaacccaattcttcaaccctacaggatccaacaggcaatcacagctggcatcttacctttatcacccttgttcctccaacaatcatcagccctattacatcagttacctttggtgcatttattggcacaaaacatcagggcacaacaactacaacaacttgtgctagcaaaccttgctgcctactctcagcaacagcagtttcttccattcaaccaactagctgcattgaactctgcttcttatttgcaacaacaacaactacca

SEQ ID NO: 18274 - DNA, 417 bp, Zea mays
  Clone ID: LIB3151-026-Q1-K1-B12
ctagcaacatacatagtgaagtacactatcaacatcttagcaccaatgggagccaagatgtttgccctccttgccctccttgctctttcagcaagcgctgctacctcgacttttattccacaatgctcacaacaatacctctctccggcgacagccgtgggatttcaatacccaactatacaatcctacatggtacaagaggccatccaagcaagcatcttacggtcattagcattaaccctccaacaaccatatgctctattgcaacagccatccttagtgcatctgtatctccaaagaatcgcggcacaacaactacaacaacagttgctaccaacaatcaatcaagtagttgcagcgaaccttgctgctttacctcagcaacaacagtttcttccattcaatcaactagatggg

SEQ ID NO: 18275 - DNA, 386 bp, Zea mays
  Clone ID: LIB3151-026-Q1-K1-B2
caactagcaacatagaaagcacaatagtgtaccaacaatggcagccaaaatattttgcttccttatgctccttggtctttctgcaagtgctgctaccgcaaccattttcccacaatgctcacaagctcctatagcttcctttcttcccccatacctctcaccagcggtgtcttcagtatgtgaaaacccaattcttcaaccctacaggatccaacaggcaatcgcagcaggcatcttacctttatcacccttgttcctccaacaaccgtcagccctattacagcagttacctttggtgcatttgttggcacaaaacatcaaggcacaacaactacaacaacttgtgctaagaaaccttgctgcctactctcaacaacaagcagttc

SEQ ID NO: 18276 - DNA, 454 bp, Zea mays
  Clone ID: LIB3151-026-Q1-K1-B3
attttgagcattcagaaacacaccaagcgaagcgcactagcaacgacctaacaacaatggctaccaagatattagccctccttgcgcttcttgccctttttgtgagcgcaacaaatgcgttcattattccacaatgctcacttgctcctagtgccattattccacagttcctcccaccagttacttcaatgggcttcgaacacctagctgtgcaagccaacatgcaacaacaagcgcttgcggcgagcgtcttacaacaaccaattgcccaattgcaacaacaatccttgccacatctaacaatacaagccatcacaacgcaacagcaacaacagttcctaccagcactgagccacctagccatggtgaaccctgccgcctacttgcaagagcagctgcttgcatccaacccacttgctctggcgaacgtagttgcaaaccagcaacaacaacc

SEQ ID NO: 18277 - DNA, 387 bp, Zea mays
  Clone ID: LIB3151-026-Q1-K1-B4
gatcagcaaagcggcagtgcgtagagaggatcgtcgaacagaacagcatgaagatggtcatcgttctcgtcgtgtgcctggctctgtcagctgccagcgcctctgcaatgcagatgccctgcccctgcgcggggctgcagggcttgtacggcgctggcgccggcctgacgacgatgatgggcgccggcgggctgtacccctacgcggagtacctgaggcagccgcagtgcagcccgctggcggcggcgccctactacgccgggtgtgggcagacgagcgccatgtaccagccgctccggcaacagtgctgccagcagcagatgaggatgatggacgtgcagtccgtcgcgcagcagctgcagatgatgatgcaacttgagcgtgccg

SEQ ID NO: 18278 - DNA, 421 bp, Zea mays
  Clone ID: LIB3151-026-Q1-K1-B5
caaagcggcagtgcgtagagaggatcgtcgaacagaacagcatgaagatggtcatcgttctcgtcgtgtgcctggctctgtcagctgccagcgcctctgcaatgcagatgccctgcccctgcgcggggctgcagggcttgtacggcgctggcgccggcctgacgacgatgatgggcgccggcgggctgtacccctacgcggagtacctgaggcagccgcagtgcagcccgctggcggcggcgccctactacgccgggtgtgggcagacgagcgccatgtaccagccgctccggcaacagtgctgccagcagcagatgaggatgatggacgtgcagtccgtcgcgcagcagctgcagatgatgatgcagcttgagcgtgccgctgccgccagcagcagcctgtacgagccagctctgatgca

SEQ ID NO: 18279 - DNA, 395 bp, Zea mays
  Clone ID: LIB3151-026-Q1-K1-B6
attgagaccaactagcaacatagaaagcacaatagtgtaccaacaatggcagctaaaatattttgcctccttatgctccttggtctttctgcaagtgctgctacggcgaccattttcccacaatgctcacaagctcctatagcttcccttcttcccccgtacctctcaccaacggtgtcttcggtatgtgaaaacccaattcttcaaccctacaggatccaacaggcaatcgcagctggcatcttacctttatcacccttgttcctccaacaatcatcagccctattacagcagttacctttggtgcatttattggcacaaaacatcagggcacaacaactacaacaacttgtgctagcaaaccttgctgcctactctcagcaaccagcagttct

SEQ ID NO: 18280 - DNA, 363 bp, Zea mays
  Clone ID: LIB3151-026-Q1-K1-B7
caacaagcaacatagaaagtggaatccagtagcaacaatagagcaacaatggcgaccaagatattttccctccttatgctccttgctctttctgcatgtgttgctaacgcgacaattttccctcaatgctcacaagctcctatagcttcccttcttcccccataccttccatcaatgatagcttcagtatgtgaaaacccagctcttcaaccctataggctccaacaagcaatcgcagcaagcaacatacctttatcacccttgtttcaacaatcgccagccctatctttggtgcagtcattggtacaaaccatcagggcacagcagctgcagcaactcgtgctacctgtgataaaccaagta

SEQ ID NO: 18281 - DNA, 441 bp, Zea mays
  Clone ID: LIB3151-026-Q1-K1-B8
atcaaccaccaccacaacatcaccagcagcttcaacaccaacaacaacaagttcacatgcaaccacaaaaacatcagcaacaacaagaagttcatgttcaacaacaacaacaacaaccgcagcaccaacaacaacaacaacaacagcaccaacaacaacatcaatgtgaaggccaacaacaacatcaccaacaatcacaaggccatgtgcaacaacacgaacagagccatgagcaacaccaaggacagagccatgagcaacaacatcaacaacaattccagggtcatgacaagcagcaacaaccacaacagcctcagcaatatcagcagggccaggaaaaatcacaacagcaacaatgtcattgccaggagcagcaacagactacaaggtgcagctataactactatagcagtagctcaaatctaaaaaattgtcatgaat

SEQ ID NO: 18282 - DNA, 423 bp, Zea mays
  Clone ID: LIB3151-026-Q1-K1-B9
cttcagaccattagctttatctactccagagcgcagaagaacccgatcgacaccatgagggtgttgctcgttgccctcgctctcctggctctcgctgcgagcgccacctccacgcatacaagcggcggctgcggctgccagccaccgccgccggttcatctaccgccgccggtgcatctgccacctccggttcacctgccacctccggtgcatctcccaccgccggtccacctgccgccgccggtccacctgccaccgccggtccatgtgccgccgccggttcatctgccgccgccaccatgccactaccctactcaaccgccccggcctcagcctcatccccagccacacccatgcccgtgccaacagccgcatccaagcccgtgccagctgcagggaacctgcggcgttggcagcaccccg

SEQ ID NO: 18283 - DNA, 390 bp, Zea mays
  Clone ID: LIB3151-026-Q1-K1-C1
cggacgcgtgggcagccccgtactactatccccgctaccgctagccgccgcgctgctcatctggtggcggctcgcctccctccccccatccgccgccgccggctcctcctctagctccctccttaccccgagctttaagctcgtgctacctgcctacctatccgtagggagagagagagagaggggagaaggttcggtcggtcggtcgggggctctcggatctcgccgctgcctccccgtttcttcgttgggatctcgctcgcttcgcgccatggccgccgtcgcgacgccaccggcccccgcgcccgccgcgccggcaccggcaccggcaccggctgctgctccggctcccgtcaccgtcgcccctgccgcggaccaaaccacggatct

SEQ ID NO: 18284 - DNA, 446 bp, Zea mays
  Clone ID: LIB3151-026-Q1-K1-C10
ctcctccattggactgcttgctccctgttgaccattgggtattctgaaccatcgagccatggctgccaagctgactcgcctccacagtcttcgcgaacgccttggtgccaccttcttcttccattccaatgaactgatagcactcttttccaggtatgttcaccagggcaagggaatgcttcagcgccatcagctgcttgcggagtttgatgccctgtttgatagtgacaaggagaagtatgcaccctttgaagacattcttcgtgctgctcaggaagcaattgtgctccccccatgggttgcacttgctatcaggccaaggcctggtgtctgggattacattcgggtgaatgtaagtgagctggctgtggaggagctgagtgtttctgagtacttggcattcaaggaacagctggtggatggacaatccaacagcaactttgtgc

SEQ ID NO: 18285 - DNA, 449 bp, Zea mays
  unsure at all n locations
  Clone ID: LIB3151-026-Q1-K1-C11
cagcttgctccgccatcaccgtatcgagagagacagagacaggctagcgagggaatggagaggatgctggccaggctgatgcggcggcggagctccgtccccctgtccggcctcctccaccacggaggagcgcccgccccgctgcaggccgccggcgccactggggcctccccgctgatcttgtcgcaccagcagcagcagcagcacacggccgcctccgccgtcctgccggggctcaagatcagggactccgcgtcccagctgatcgggaggaccccgatggtgtacctgaacaaggtgaccgatgggtgcggcgcccgggtggctgccaagctcgagttcctgcagccgtccttcagcgtcaaagacagaccggcgatctcgatgctggaagacgctgaatagagggggctcatcactccaggaaagaccacgtngatcgagcccac

SEQ ID NO: 18286 - DNA, 428 bp, Zea mays
  Clone ID: LIB3151-026-Q1-K1-C12
tttgagcattcataaacacaccaagcgattcacattagcaacaacctaacaacggtggcgaccaagatattatccctccttgcgcttcttgcgctttttgcgagcgcaacaaatgcgttcattattccacaatgctcacttgctccaagttccattattacacagttcctcccaccagttacttcaatgggcttcgaacacccagctgtgcaagcctataggctacaacaagcaattgcggcgagcgtcttacaacaaccaatttcccagttgcaacaacaatccttggcacatctaacaatacaaaccatcgcaacgcaacagcaacaacaattcctaccagcactgagccacctagccatggtgaaccctgccgcctacttgcaacagcagttgcttgcatcaaacccacttgctcttgcaaacgt

SEQ ID NO: 18287 - DNA, 421 bp, Zea mays
  unsure at all n locations
  Clone ID: LIB3151-026-Q1-K1-C3
gcaacatagaaagcacaatagtgtaccaacaatggcagctaaaatattttgcctccttatgctccttggtctttctgcaagtgctgctacggcgaccattttcccacaatgctcacaagctcctatagcttcccttcttcccccgtacctctcaccaacggtgtcttcggtatgtgaaaacccaattcttcaaccctacaggatccaacaggcaatcgcagctggcatcttacctttatcacccttgttcctccaacaatcatcagccctattacagcagttacctttggtgcatttattggcacaaaacatcagggcacaacaactacaacaacttgtgctagcaaaccttgctgtctactctcagcaacagcagnttgttgcattcaaccaactagctgcattgaactctgctgtttat

SEQ ID NO: 18288 - DNA, 365 bp, Zea mays
  Clone ID: LIB3151-026-Q1-K1-C4
aaagcggcagtgcgtagagaggatcgtcgaacagaacagcatgaagatggtcatcgttctcgtcgtgtgcctggctctgtcagctgccagcgcctctgcaatgcagatgccctgcccctgcgcggggctgcagggcttgtacggcgctggcgccggcctgacgacgatgatgggcgccggcgggctgtacccctacgcggagtacctgaggcagccgcagtgcagcccgctggcggcggcgccctactacgccgggtgtgggcagacgagcgccatgtaccagccgctccggcaacagtgctgccagcagcagatgaggatgatggacgtgcagtccgtcgcgcagcagctgcagatgatgatgc

SEQ ID NO: 18289 - DNA, 428 bp, Zea mays
  Clone ID: LIB3151-026-Q1-K1-C5
cttaaaaccataacctttatctactacaaagcgcacaaaaacccgatcgacagcatgagggtgttgctcgtagacctcgatctactggctatcgatgggagcgccacctacacgcatacaaccggcagatgcgggtgccaaccaccgtcaacggtttatctaccgacgccggtgcatctgccacctgcggttcacctgacacctgcggcgcatctcccaccgacggtccacctgacgccgacggtccacctgccaccgccctgccatgtgccatcaacggctcatgtggcggcggcaacatgcaactacactactaaaccggccagggctcaagctcatgctcagtcacacccatgcccgtgccaacaggcgaattcaagcccgtgccagctgcaaggaacctagggcgggggcagcacacggatcct

SEQ ID NO: 18290 - DNA, 426 bp, Zea mays
  Clone ID: LIB3151-026-Q1-K1-C6
attgagaccaactagcaacatagaaagcacaatagtgtaccaacaatggcagccaaaatattttgcctccttatgctccttggtctttctgcaagtgctgctacggcgaccattttcccacaatgctcacaagctcctatagcttcccttcttcccccgtacctctcaccagcggtgtcttcggtatgtgaaaacccaattcttcaaccctataggatccaacaggcaatcgcagctggcatcttacctttatcacccttgttcctccaacaatcatcagccctattacagcagttacctttggtgcattcattggcacaaaacatcagggcacaacaactacaacaacttgtgctagcaaaccttgctgcctactctcagcaacaacagtttcttccattcaaccaactagctgcattgaactct

SEQ ID NO: 18291 - DNA, 416 bp, Zea mays
  unsure at all n locations
  Clone ID: LIB3151-026-Q1-K1-C7
gtcggcatgaagaagacgctcgtcttctacaggggcagggctcccaggggtgacaagacaaactgggtcatgcacgagtacaggctcgaaggcagcggcaggctccccgccggcctcgcgtccgcaaccggctcagccgccgccaacgccgcggcggccttgaaagcttctgcttataaggatgagtgggtggtatgtcgtgtgttccacaagaccactgggatcaagaagaccaccactgctgcaccggcgtaccaggtggccatggccggcgctgagatggatcagaatcagaacaacatccccttccccatgccgatgcaattttccatgctgcccgacttctccttggacccggtgcccccctactacccgtaccccaacgctggcgcggngatgccgatgcttcctatggc

SEQ ID NO: 18292 - DNA, 446 bp, Zea mays
  Clone ID: LIB3151-026-Q1-K1-C8
cttcagaccattagctttatctactccagagcgcagaagaacccgatcgacaccatgagggtgttgctcgttgccctcgctctcctggctctcgctgcgagcgccacctccacgcatacaagcggcggctgcggctgccagccaccgccgccggttcatctaccgccgccggtgcatctgccacctccggttcacctgccacctccggtgcatctcccaccgccggtccacctgccgccgccggtccacctgccaccgccggtccatgtgccgccgccggttcatctgccgccgccaccatgccactaccctactcaaccgccccggcctcagcctcatccccagccacacccatgcccgtgccaacagccgcattcaaacccgtgccagcttgaaggaacctgcggcgttggcagcaccccgatcctgggccaatgcgtcgagtt

SEQ ID NO: 18293 - DNA, 282 bp, Zea mays
  Clone ID: LIB3151-026-Q1-K1-C9
caactagcaacatagaaggcccaattatgtaccaaccatgggcagccaaataatttggcctccttatgctcctgggtctttctgcaagtgctgctacggcgaccattttcccgaaatgctcgcaagctcctatagcttcccttcttccccgtaccttttaacaacggggtcttcggtatgggaaaacccaattcttcaacccttccggatccaacaggcaatcacagctggcatcttacctttatcacccttggtccttcaacaatcatcagacctattaca

SEQ ID NO: 18294 - DNA, 93 bp, Zea mays
  Clone ID: LIB3151-026-Q1-K1-D1
gcaaggctcccaagggtggcaagacggactgggtcatgcaccaatacaggctcgaaggcagcggcaggctccccgccggcctcgcgttcgcaa

SEQ ID NO: 18295 - DNA, 404 bp, Zea mays
  Clone ID: LIB3151-026-Q1-K1-D10
agacaccaccgtttcatctaccgcctccgttctatatgccgcctccgttctatctgccgccgcagcagcagccgcagccatggcaataccccactcaaccaccgcagctaagcccgtgccagcagttcggatcctgcggcgtcggcagcgtcggcagcccgttcctgggccagtgcgtcgagttcctgaggcaccagtgcagcccggcggcgacgccctacggctcgccacagtgccaggcgctgcagcagcagtgctgccaccagatcaggcaggtggagccgctgcaccggtaccaggcgacatacggtgtggtcctgcagtccttcctgcagcagcagccgcagggcgagctcgcggcgctgatggcggcccatgtagcgcagcagctgacggcgatgtgc

SEQ ID NO: 18296 - DNA, 423 bp, Zea mays
  Clone ID: LIB3151-026-Q1-K1-D12
cttgtttctccggacgcgctcgttcgttctcgaaggcgccccttcctgccctcgcatcggctcctccctccccgacaccgaccgaccccctcgtccgatcgcctccctcctcgatccccgccgccatggccgccgccgccgccgcgtcctcctcttcctcatccgaggttccgatcgccgcccgcacctgcgtctccgtcggcgaggtggcggtgggagcggtggctacaagcagcggcgaccgggtggcggcggattgcggggtgtgcgccatctgcctcgacaggatagcgctccaggagacggccctcgtcaagggttgcgaccacgcctactgtgtgacctgtattttgaggtgggcatcctacaaggagaaccctctctgtccacagtgcaagcatccatttcgattcctcagcgtgc

SEQ ID NO: 18297 - DNA, 309 bp, Zea mays
  Clone ID: LIB3151-026-Q1-K1-D2
attttgagcattcagaaacacaccaagcgaattacattagcatcaacctaacaacaatggctaccaagatatgatacctccttgcgcttattgtgcttgatgcgagcgcaacaaatgcgtggattattacacaatgctcacttgctccaagatccattattacacagattctaccaccaactacttgaatgggctgcgaacacccagatgtgcaagcctatacgctacaacaagcaattgcggcgagcggcttactacaaccaatttcctaagtgcaacaactatccttggcacattgaacaatacaaa

SEQ ID NO: 18298 - DNA, 447 bp, Zea mays
  Clone ID: LIB3151-026-Q1-K1-D3
gaaaaacttattggccttgttacaagtagagacgaaattgctgatttactaaagcttcatgatgtaattgatcttgtcattccaagaggcagcaataagctggtttcacaaatcaagacatcaactaagatccctgttcttggtcatgctgatggtatctgtcatgtatacatcgacaaatcagctaacatgaatatggcaaaacaaatagtgatggatgccaaaattgattacccagcagcctgcaatgctatggagacattgcttgttcataaagatcttataaaggctccaggtcttgatgacttactgctatcactcaaaacaaaaggagttgctatttttggggggcctgttgcacatgaagtattgtgcattccagaagcaaattcattccatcatgaatatagttctatggcctgcacaattgaatttgttgatgatgta

SEQ ID NO: 18299 - DNA, 308 bp, Zea mays
  Clone ID: LIB3151-026-Q1-K1-D4
gcaaaagggagggacagcccacgcggatcggtgtgcgtggctccgcgctcccttccgccgccagtccgccggctcaactccagccgccgcgtgcccctcctctccccacccgatgcgggccctcgcgcgcgccgcgtcgctgctccgccgcgccgcggggtccgcgcctactacggcgtcgctgtaccatccgccgcggaacgtaagcccttgcctcgtgaagaatctgccaggtttctttttcaatgggtattctactcttttggctccaccaaatgaagtgttgattccaccagaactcctttcta

SEQ ID NO: 18300 - DNA, 437 bp, Zea mays
  unsure at all n locations
  Clone ID: LIB3151-026-Q1-K1-D5
ggcgaaacaaggccacaccaccagctgaccgccgaacggaacgagcccggcgggcggaagggagagagcgcgccagagcggcgccgaacaaccctcgtccaccgcactctcctggaccgtggccatggccatggccgccgcgtcccgatcccgggcgctgtgggcgtcccgcgccgccgcctacctcaggatctccaccttccccagggccttctccaccgtgctgaaggatctgaaatatgctgacactcatgaatgggtgaaggttgagggcgattcagcaaccgtggggattactgaccatgcccaggatcatctgggtgatgttgtctacgtggagctgccagaagttggcgtcagtgtatcccangggaagaacttcggtgctgtcgaaagcgtgaaggcgaccagtgatatcaattcaccagtgtccggag

SEQ ID NO: 18301 - DNA, 429 bp, Zea mays
  Clone ID: LIB3151-026-Q1-K1-D6
cctctcctgcgcctcgccaccgcttcctcttgtcgcccgcctctctctcgaccctaggcgcgccgcctcgccgccgccgatcccgcagctatcgatcctggccgctccgatagccggtcagtccgtccccatcatcccctcgctatcgatcgccttcgacttgcgtgggtttccggcgcttgcacggccgcgacgcgactactcttggagtcatagttcgtggattgtcaatcgaaagagggctacttgattgtttggaatctacttttatagttgattccaagcatggaaagtctaccaaatggttcagtaaacaatgcggagcataaccaggaaaacaagaagtccatggatgctagtgtgcctgaagaagtacaagatgtttttatttacagagaagatgttgtgagcttgaagtccaaggaggat

SEQ ID NO: 18302 - DNA, 441 bp, Zea mays
  Clone ID: LIB3151-026-Q1-K1-D7
caacaagcaacatagaaagtggaatccagtagcaacaatagagcaacaatggcgaccaagatattttccctccttatgctccttgctctttctgcatgtgttgctaacgcgacaattttccctcaatgctcacaagctcctatagcttcccttcttcccccataccttccatcaatgatagcttcagtatgtgaaaacccagctcttcaaccctataggctccaacaagcaatcgcagcaagcaacatacctttatcacccttgtttcaacaatcgccagccctatctttggtgcagtcattggtacaaaccatcagggcacagcagctgcagcaactcgtgctacctgtgatcaaccaagtagctctggcaaacctttctccctactctcagcaacaacaatttcttccattcaaccaactgtctacattgaaccgtgct

SEQ ID NO: 18303 - DNA, 445 bp, Zea mays
  Clone ID: LIB3151-026-Q1-K1-D8
gttgaccattgggtattctgaaccatcgagccatggctgccaagctgactcgcctccacagtcttcgcgaacgccttggtgccaccttctcctcccatcccaatgaactgatagcactcttttccaggtatgttcaccagggcaagggaatgcttcagcgccatcagctgcttgcggagtttgatgccctgtttgatagtgacaaggagaagtatgcaccctttgaagacattcttcgtgctgctcaggaagcaattgtgctccccccatgggttgcacttgctatcaggccaaggcctggtgtctgggattacattcgggtgaatgtaagtgagctggctgtggaggagctgagtgtttctgagtacttggcattcaaggaacagctggtggatggacaatccaacagcaactttgtgcttgagcttgattttgagcccttcaa

SEQ ID NO: 18304 - DNA, 431 bp, Zea mays
  unsure at all n locations
  Clone ID: LIB3151-026-Q1-K1-D9
gctgcattgaactctgcttcttatttgctacaacaacaactaccattcagccaggtacctgctgcctacccccagcaatttcttccattcaaccaactggcagcattgaactctcctgcttatttacagcagcaacaactactaccattcagccagctagctggtgtgagccctgctaccttcttgatacaaccacagttgttgccgttctaccagcacgctgcgcctaacgctggcaccctcttacaactgcaacaattgctgccattcaaccaacttgctttgacaaacccagcagcgttctaccaacaacccatcattggtggtgccctcttttagatttcttatgagttatagttcaataataaagttttttgtctgatgtttgtggcttcccagaaataagaaagtacatttctagattaannaaa

SEQ ID NO: 18305 - DNA, 354 bp, Zea mays
  Clone ID: LIB3151-026-Q1-K1-E1
gggtcttcagaccattagctttatctactccagagcgcagaagaacccgatcgacaccatgagggtgttgctcgttgccctcgctctcctggctctcgctgcgagcgccacctccacgcatacaagcgggggctgcggctgccacccaccgccgccggttcatataccgacgacggtgcatctgccaccttcggttcacctgccacctccggtgcatctcccaccgccggtccacctgccgccgccggtccacctgccaccgccggtccatgtgccgccgccggatcatctgccgccgacaccatgccactaccctactcaacacgcccggcctcagcctcatccccagccaca

SEQ ID NO: 18306 - DNA, 429 bp, Zea mays
  Clone ID: LIB3151-026-Q1-K1-E10
gcaacatagaaagtggaatccagtagcatcaatagagcaacaatggagaccaagatatgggccctccttatgctccttgctctttctacatgtgttgctaacgcgacaattttccctcaatgctcacaagctcctatagcttccctttttcccccataccttccatcaattatagcttcagtatgtgaaaacccagctcttcaaccatataggcttcaacaagcaatcgcagcaagcaacatacctttatcgcccttgttgtgtcaacaatcgccagccctatctttggtgcagtcattggtacaaaccatcagggcacaacagctgcagcaactcgtgctacctgtgatcaaccaagtagctctggcaaacctttctccctactctccgcaacaacaatttcttccattcaaccaactgtctacactg

SEQ ID NO: 18307 - DNA, 448 bp, Zea mays
  Clone ID: LIB3151-026-Q1-K1-E11
cccacgcgagctcccattcccatccatggcgaccaccacctcttcctcctcgctgaccactcctctcctccgcccgaaccccaataccaaccctgctcccagatctctccaactcctcaggagcaggaggtgcgctcgtgccgtaactaccgccgtagccggaggtgcggtgccttacggggctaatccgcggcgcgggatttggtcgatcagggatgacttggtggtgccaaggtcgccctacttcccagtggagtccgcggcggggcaggagcgtgggccgtcgcccatggtgatggagcggttccagagcgtcgtcagtcagcttttccagcacagaattattcggtgcggaggccctgttgaggatgatatggccaacatcattgtagcacagctgctctacctcgacgctattgatcccaataaggatatcattatgtatgtg

SEQ ID NO: 18308 - DNA, 295 bp, Zea mays
  Clone ID: LIB3151-026-Q1-K1-E2
tgaagaggtcgcttggtgctctgaacacacaccttgcctcaaacacataccttgttgggcatgctgttactctagctgacattgtattgacatgcaacctctaccatggaattgcacggatcttgaccaagaccttcacgtctgatttccctcatgtcgagaggtatttctggaccatggttaaccagcctaacttcaagaaggtcattggtgaggtcaagcaggcagagtctgcacctcctattccgaaaaaggctgctccttctaaggagccaaaggcaaaggatgtcaagaa

SEQ ID NO: 18309 - DNA, 311 bp, Zea mays
  Clone ID: LIB3151-026-Q1-K1-E4
ggcgtgggctaccgccgcagccgccgccctacgtccggtgaccaggctttcattgagctttgccgacgacgaccacgcaccagatggctgggtatatgtcaagagggccccaaaatggttctgtgtatgtctgcaatctacctcctggaactgacgagaatatgttggctgaatattttggcaccatagggttgctaaagaaggacaaaaggaatgggcgcccaaaaatttggatctatagggacaaagtttccaatgaaccaaagggtgatgctacagtcacttatgaggatccacatgctgcttcagct

SEQ ID NO: 18310 - DNA, 434 bp, Zea mays
  Clone ID: LIB3151-026-Q1-K1-E5
gaaagcacaatagtgtaccaactatggcagttaaaatattttgcttccttatgctccttggtctttctgcaagtgttgctaccgcaaccattttcccacaatgctcacaagctcctatagcttcccttcttcccccatacctctcaccagcggtgtcttcaatgtgtgaaaacccaattgttcaaccctacaggatccaacaggcaatcgcaacaggcatcttaccattatcacccttgttcctccaacaaccgtcagccctattacagcagttacctttggtccatttggtggcacaaaacatcaggggacaacaactacaacaacttgtgctagcaaaccttgctgcatactctcaacaacatcagtttcttccattcaaccaactggctgcattgaactttgctgcttatttgcaacaacaattaccattc

SEQ ID NO: 18311 - DNA, 428 bp, Zea mays
  unsure at all n locations
  Clone ID: LIB3151-026-Q1-K1-E6
attagctcatcgactccagattggagaacttgacaccatgaaggtgctgatcgttgcccttgctctcctggcgctcgctgcgagcgccgcctccagtacaagcggcggctgtggctgccagacaccaccgtttcatctaccgcctccgttctatatgccgcctccgttctatctgccgccgcagcagcagccgcagccatggcaataccccactcaaccaccgcagctaagcccgtgccagcagttcggatcctgcggcgtcggcagcgtcggcagcccgttcctgagccagtgcgtcgagttcctgaggcaccagtgcagcccggcggcgacgccctacggctcgccacagtgccaggcgctgcagcagcagtgctgccaccagatcangcaggtggagccgctgcaccggtaccaggcgacatacg

SEQ ID NO: 18312 - DNA, 421 bp, Zea mays
  Clone ID: LIB3151-026-Q1-K1-E7
gcaaagcggcagtgcgtagagaggatcgtcgaacagaacagcatgaagatggtcatcgttctcgtcgtgtgcctggctctgtcagctgccagcgcctctgcaatgcagatgccctgcccctgcgcggggctgcagggcttgtacggcgctggcgccggcctgacgacgatgatgggcgccggcgggctgtacccctacgcggagtacctgaggcagccgcagtgcagcccgctggcggcggcgccctactacgccgggtgtgggcagacgagcgccatgtaccagccgctccggcaacagtgctgccagcagcagatgaggatgatggacgtgcagtccgtcgcgcagcagctgcagatgatgatgcagcttgagcgtgccgctgccgccagcagcagcctgtacgagccagctctgatgc

SEQ ID NO: 18313 - DNA, 171 bp, Zea mays
  Clone ID: LIB3151-026-Q1-K1-E8
ctaggcaggtggagccgcagcaccggtaccaggcgatcttcggcttggtcctgcagtccatcctgcagcagcagccgcaaagcggccaagtcgcggggctggtggcggcgcaaatagcgcagcaactgacggcgatgggcggccttgaacaaccgactccatgcccctacg

SEQ ID NO: 18314 - DNA, 437 bp, Zea mays
  Clone ID: LIB3151-026-Q1-K1-E9
cctacaggctacaactagcgcttgcggcttagcgtcttacaacaaccaattgcccaattgcaacaacaatccttggcacatctaaacctacaaaccatcgcaacgcaacagcaacaacagtttctgccatcactgagccacctagccgtggtgaaccctgtcgcctacttgcaacagcagctacttgcatccaacccacttgctctggcgaacgtagctgcataccagcaacaacaacgtctgcaacagtttatgccagcgctcagtcaactagccatggtgaaccctgtcgcctacctacaacagcaacaattgctttcatctagcccgctcgctgtgggcaatgcacctacgtacctacaacaacagttgctgcaacagattgtaccagctctgactcagctagctgtggcaaaccctactgcctacttgcaaca

SEQ ID NO: 18315 - DNA, 436 bp, Zea mays
  Clone ID: LIB3151-026-Q1-K1-F10
aaagcacaatagtgtaccaacaatggcagctaaaatattttgcctccttatgctccttggtctttctgcaagtgctgctacggcgaccattttcccacaatgctcacaagctcctatagcttcccttcttcccccgtacctctcaccaacggtgtcttcggtatgtgaaaacccaattcttcaaccctacaggatccaacaggcaatcgcagctggcatcttacctttatcacccttgttcctccaacaatcatcagccctattacagcagttacctttggtgcatttattggcacaaaacatcagggcacaacaactacaacaacttgtgctagcaaaccttgctgcctactctcagcaacagcagtttcttccattcaaccaactagctgcattgaactctgcttcttatttgcaacaacaacaactaccattc

SEQ ID NO: 18316 - DNA, 262 bp, Zea mays
  Clone ID: LIB3151-026-Q1-K1-F12
ctccttgcgcctcttgcccttttagtgagcgcaacaaatgcgttcattattccacagtgctcacttgctcctagtgccattattccacagttcctcccaccagttacttcaatgggctttgaacatccagccgtgcaagcctacaggctacaactagcgcttgcagtgagcgtcttacaacaaccaattgcccaattgcaacaacaatccttggcacatcttaacctacaaaccattgcaacgcaacagcaacaacagtttc

SEQ ID NO: 18317 - DNA, 225 bp, Zea mays
  Clone ID: LIB3151-026-Q1-K1-F2
gcattcagaaacacaccaagcgaagcgcactatcaacaacctaacaacaatggctaccaagatattagccctccttgcgcttcttgccctttaagggagcgcaacaaatgcgttcattattccacagggctaacttgctcctagtgccattattccacagttcctcccaccagttacttcaatgggcttggaacatccagccgtgcaagcctacaggctacaact

SEQ ID NO: 18318 - DNA, 357 bp, Zea mays
  Clone ID: LIB3151-026-Q1-K1-F3
tttgagcattcagaaacacaccaagcgaagcacattagcaacaacctaacaacaatggctaccaagatattatccctccttgcgcttcttgcgctttttgcgagcgcaacaaatgcgttcattattccacaatgctcacttgctccaagttccattattacacagttcctcccaccagttacttcaatgggcttcgaacacccagctgtgcaagcctataggctacaacaagcaattgcggcgagcgtcttacaacaaccaatttcccagttgcaacaacaatccttggcacatctaacaatacaaaccatcgcaacgcaacagcaacaacaattcctaccagcactgagccaccta

SEQ ID NO: 18319 - DNA, 371 bp, Zea mays
  Clone ID: LIB3151-026-Q1-K1-F4
tgagcattcagaaacacaccaagcgaagcacattatcaacaacctaacaacaatggctaccaagatattatccctccttgcgcttcttgcgctttttgcgagcgcaacaaatgcgttcattattccacaatgctcacttgctccaagttccattattacacagttcctcccaccagatacttaaatgggcttcgaacacccacctgtgcaagcctataggctacaacaagcaattgcggcgagcgtcttacaacaaccaatttgccaggtgcaacaacaatacttggcacatctaacaatacaaaccatcgcaacgcaacagcaacaacaatttctaccagcactgagccacctagccatgggggaaccct

SEQ ID NO: 18320 - DNA, 385 bp, Zea mays
  Clone ID: LIB3151-026-Q1-K1-F5
cccacgcgtccgcccacgcgttcggcaacatttaaagcacaatagtgtaccaacaatggcagccaaaatattttgcctccttatgctccttggtctttctgcaagtgctgctacggcgaccattttcccacaatgctcacaagctcctatagcttcccttcttcccccgtacctctcaccagcggtgtcttcggtatgtgaaaacccaattcttcaaccctataggatccaacaggcaatcgcagctggcatcttacctttatcacccttgttcctccaacaatcatcagccctattacagcagttacctttggtgcatttattggcacaaaacatcagggcacaacaactacaacaacttgtgctagcaaaccttgctgcctac

SEQ ID NO: 18321 - DNA, 438 bp, Zea mays
  unsure at all n locations
  Clone ID: LIB3151-026-Q1-K1-F6
gggtggtgagagcgagggcaagacgttgttgccatattgcaggggcctcgagttattggtggacagcagattggtcgagagaaagccatcggcaactgaacaagctccagcacatgttgcaaaggatgcagcagctaccatccgctctcaccaacaagggcaacagagacctcagaacttgtcgaggcaggaattcttggacaggtttaagaggagcgctggactggtcgcttcaggtgttgcgaagaatctaaacaaaacagccaattatatcaaagaaaatattcaggacatgtacaccgatcgtcgtccaccaaagtagcaaccatgccgagtgattgtcgtcaagagctgaagaaatcgcttgctactggaaactttacatcaggactacgctggaaacttactccactcttctcacttgntaaacgaaatgga

SEQ ID NO: 18322 - DNA, 445 bp, Zea mays
  Clone ID: LIB3151-026-Q1-K1-F7
attgagaccaactagcaacatagaaagcacaatagtgtaccaacaatggcagccaaaatattttgcctccttatgctccttggtctttctgcaagtgctgctacggcgaccattttcccgaaatgctcgcaagctcctatagcttcccttcttcccccgtacctctcaccagcggtgtcttcggtatgtgaaaacccaattcttcaaccctacaggatccaacaggcaatcacagctggcatcttacctttatcacccttgttcctccaacaatcatcagccctattacatcagttacctttggtgcatttattggcacaaaacatcagggcacaacaactacaacaacttgtgctagcaaaccttgctgcctactctcagcaacagcagtttcttccattcaaccaactagctgcattgaactctgcttcttatttgcaacaac

SEQ ID NO: 18323 - DNA, 435 bp, Zea mays
  Clone ID: LIB3151-026-Q1-K1-F9
gcaattagctcatcgactccagattggttaactcgacaccatgaaggtgctgatcgttgcccttgctctcctggcgctcgctgcgagcgccgcctccagtacaagcggcggctgtggctgccagacaccaccgtttcatctaccgcctccgttctatatgccgcctccgttctatctgccgccgcagcagcagccgcagccatggcaataccccactcaaccaccgcagctaagcccgtgccagcagttcggatcctgcggcgtcggcagcgtcggcagcccgttcctgggccagtgcgtcgagttcctgaggcaccagtgcagcccggcggcgacgccctacggctcgccacagtgccaggcgctgcagcagcagtgctgccaccagatcatgcaggtggagccgctgcaccggtaccaggcgacatacggtgt

SEQ ID NO: 18324 - DNA, 431 bp, Zea mays
  Clone ID: LIB3151-026-Q1-K1-G10
caagcaacatagaaagtggaatacagtatcaacaatagagcaacaatggcggccaagatattttccatccttatgctccttgctctttctgcatgtgttgctaacgcgaccatttttcctcaatactcacaagctcctatagctgcccttcttcccccataccttccatcaatgaccgcttcagtatgtgaaaacccagcccttcaaccctacaggctccaacaagcaatcgcaacaagcaacttacctttatcacccctgttctttcaacaatcgccagccctatctttggtgcagtcattggtacaaaccatcagggcacaacagctgcagcaactcgtgctaccagtgatcagccaagtagctctggcaaacctttctccctactctcagcaacaacaatttcttccattcaaccaactgtctacact

SEQ ID NO: 18325 - DNA, 443 bp, Zea mays
  Clone ID: LIB3151-026-Q1-K1-G11
gcaacatagaaagcacaatagtgtaccaacaatggcagccaaaatattttgcttccttatgctccttggtctttctgcaagtgttgctaccgcaaccattttcccacaatgctcacaagctcctatagcttcccttcttcccccatacctctcaccagcggtgtcttcaatgtgtgaaaacccaattgttcaaccctacaggatccaacaggcaatcgcaacaggcatcttaccattatcacccttgttcctccaacaaccgtcagccctattacagcagttacctttggtccatttggtggcacaaaacatcagggcacaacaactacaacaacttgtgctagcaaaccttgctgcatactctcagcaacatcagtttcttccattcaaccaactggctgcattgaactctgctgcttatttgcaacaacaattaccattca

SEQ ID NO: 18326 - DNA, 363 bp, Zea mays; identical to SEQ ID NO: 17783
  Clone ID: LIB3151-026-Q1-K1-G12

SEQ ID NO: 18327 - DNA, 400 bp, Zea mays
  Clone ID: LIB3151-026-Q1-K1-G3
aagcaacatagaaagtggaatccagtagcaacaatagagcaacaatggcgaccaagatattttccctccttatgctccttgctctttctgcatgtgttgctaacgcgacaattttccctcaatgctcacaagctcctatagcttcccttcttcccccataccttccatcaatgatagcttcagtatgtgaaaacccagctcttcaaccctataggctccaacaagcaatcgcagcaagcaacatacctttatcacccttgtttcaacaatcgccagccctatctttggtgcagtcattggtacaaaccatcagggcacagcagctgcagcaactcgtgctacctgtgatcaaccaagtagctctggcaaacctttcttcctactctcagcaacaacaatt

SEQ ID NO: 18328 - DNA, 384 bp, Zea mays
  Clone ID: LIB3151-026-Q1-K1-G4
gcaacatagaaagtggaatccagtagcaacaatagagcaacaatggagaccaagatattttccctccttatgctccttgctctttctacatgtgttgctaacgcgacaattttccctcaatgctcacaagctcctatagcttccctttttcccccataccttccatcaattatagcttcagtatgtgaaaacccagctcttcaaccatataggcttcaacaagcaatcgcagcaagcaacatacctttatcgcccttgttgtgtcaacaatcgccagccctatctttggtgcagtcattggtacaaaccatcagggcacaacagctgcagcaactcgtgctacctgtgatcaaccaagtagctctggcaaacctttctccctac

SEQ ID NO: 18329 - DNA, 413 bp, Zea mays
  Clone ID: LIB3151-026-Q1-K1-G5
cattgacgtacagctatgatgcggccgacgtcgacccttgctatggtcgtgccgtcgctcgctgtagccatcctctgcatcctagtccggtccgcctccgcggagttctggctcgacgagttcaccacggacggcgacgtccgcagagactacgaccgttctggccggcaggtggcgtcgcttgtcctcgaccagcgttctggcgctggcttcaactccacgcgcaagtacctcttcggcgagttcagcgtggagatgaagctcgtcggcggcaactccgctgggactgtcacctccttctacctgacgtccggcgagggcgacgagcacgacgagatcgacatggagttcatgggcaactccagcggctcctcgacggtgctcaacacgaacgtgtgggccaacggcgacgg

SEQ ID NO: 18330 - DNA, 437 bp, Zea mays
  Clone ID: LIB3151-026-Q1-K1-G6
gaaagcacaatagtgtaccaacaatggcagtcaaaatattttgcctccttatgctccttggtctttctgcaagtgctgctacggcgaccattttcccgaaatgctcgcaagctcctatagcttcccttcttcccccgtacctctcaccagcggtgtcttcggtatgtgaaaacccaattcttcaaccctacaggatccaacaggcaatcacagctggcatcttacctttatcacccttgtcctccaacaatcatcagccctattacatcagttacctttggtgcatttattggcacaaaacatcagggcacaacaactacaacaacttgtgctagcaaaccttgctgcctactctcagcaacagcagtttcttccattcaaccaactagctgcattgaactctgcttcttatttgcaacaacaacaactaccattca

SEQ ID NO: 18331 - DNA, 445 bp, Zea mays
  unsure at all n locations
  Clone ID: LIB3151-026-Q1-K1-G7
caactagcaacatagaaagcacaatagtgtaccaacaatggcagccaaaatattttgcctccttatgctccttggtctttctgcaagtgctgctacggcgaccattttcccacaatgctcacaagctcctatagcttcccttcttcccccgtacctctcaccagcggtgtcttcggtatgtgaaaacccaattcttcaaccctataggatccaacaggcaatcgcagctggcatcttacctttatcacccttgttcctccaacaatcatcagccctattacagcagttacctttggtgcatttattggcacanaacatcagggcacaacaactacaacaacttgtgctagcanaccttgctgcctactctcagcaacaacagtttcttccattcaaccaactagctgcattgaactctgcttcttattgcaacaacaacaactac

SEQ ID NO: 18332 - DNA, 447 bp, Zea mays
  Clone ID: LIB3151-026-Q1-K1-G8
caactagcaacatagaaagcacaatagtgtaccaacaatggcagccaaaatattttgcttccttatgctccttggtctttctgcaagtgttgctaccgcaaccattttcccacaatgctcacaagctcctatagcttcccttcttcccccatacctctcaccagcggtgtcttcaatgtgtgaaaacccaattgttcaaccctacaggatccaacaggcaatcgcaacaggcatcttaccattatcacccttgttcctccaacaaccgtcagccctattacagcagttacctttggtccatttggtggcacaaaacatcagggcacaacaactacaacaacttgtgctagcaaaccttgctgcatactctcagcaacatcagtttcttccattcaaccaactggctgcattgaactctgctgcttatttgcaacaacaattaccatt

SEQ ID NO: 18333 - DNA, 433 bp, Zea mays
  Clone ID: LIB3151-026-Q1-K1-G9
ggagacatatatgaggaaccagtagcaccatactgtaacctcatcttctctgatgagaaagagatgatgagagagggtgatgcacgtgttacgcttctaagaagcaagctccatggcctggtcgaaaggaaccgagatctggaagaggaaaacaagcaattgagacaccaagtgagccaattaaaaggtcagatctcctctctcgaaggccaggaaactaataagaggatgctgtggaagaagctggagaattctgcaaccggcatcagctactccaaggaaaagcagtttgtccagagcaacgatggtgctaaggaagccgtagatctcaacagctcattgtctcacagcaggcagcaattctccagggtaaaccaagtgagatcaagggcgccaagggttccaaatcaacctcccaatccgacaagcaccc

SEQ ID NO: 18334 - DNA, 394 bp, Zea mays
  unsure at all n locations
  Clone ID: LIB3151-026-Q1-K1-H1
ggtcttcaaaccattaactttatctactccagagcgcagaagaacccgatcgacaccatgagggtgttgctcgttgccctcgctctcctggctctcgctgcgagcgccacctccacacatacaagcggcggatgcggctgccagccaccgccgccggttcatctaccgacgtcggtgcatctgccacctgcggttcacctgccacctccggtgcatctcccaccgccggtccacctgccgccgccggtccacctgccaccgccggttcatgtgccgccgacggttcatctgccgccgncaccatgccactaccgtactcaaccgtcccgggctcagtctcatccgcagccacacccatgcccgtgccaacagccgcatccaaacccgggccaac

SEQ ID NO: 18335 - DNA, 377 bp, Zea mays; identical to SEQ ID NO: 10429
  Clone ID: LIB3151-026-Q1-K1-H10

SEQ ID NO: 18336 - DNA, 447 bp, Zea mays
  Clone ID: LIB3151-026-Q1-K1-H11
attttgagcattcagaaacacaccaagctaagcacattagcaacaacctaacaacaatggctaccaagatattatccctccttgcgcttcttgcgctttttgcgagcgcaacaaatgcgttcattattccacaatgctcacttgctccaagttccattattacacagttcctcccaccagttacttcaatgggcttcgaacacccagctgtgcaagcctataggctacaacaagcaattgcggcgagcgtcttacaacaaccaatttcccagttgcaacaacaatccttggcacatctaacaatacaaaccatcgcaacgcaacagcaacaacaattcctaccagcactgagccacctagccatggtgaaccctgccgcctacttgcaacagcagttgcttgcatcaaacccacttgctctggcaaacgtagttgcaaaccagccac

SEQ ID NO: 18337 - DNA, 240 bp, Zea mays
  Clone ID: LIB3151-026-Q1-K1-H12
gtgtcttcggtatgtgaaaacccaattcttcaaccctacaggatccaacaggcaatcacagctggcatcttacctttatcacccttgttcctccaacaatcatcagccctattacatcagttacctttggtgcatttattggcacaaaacatcagggcacaacaactacaacaacttgtgctagcaaaccttgctgcctactctcagcaacagcagtttcttccattcaaccaactagct

SEQ ID NO: 18338 - DNA, 318 bp, Zea mays
  Clone ID: LIB3151-026-Q1-K1-H2
gggtcttcagaccattagctttatctactccagagcgcagaagaacccgatcgacaccatgagggtgttgctcgttgccctcgctctcctggctctcgctgcgagcgccacctccacgcatacaagcggcggctgcggctgccagccaccgccgccggttcatctaccgccgccggtgcatctgccacctccggttcacctgccacctccggtgcatctcccaccgccggtccacctgccgccgccggtccacctgccaacggccggtcatgtgccgccgccggtcatctgccgccgcaccatgccactaccctactc

SEQ ID NO: 18339 - DNA, 355 bp, Zea mays
  unsure at all n locations
  Clone ID: LIB3151-026-Q1-K1-H3
cagaccattagctttatctactccagagcgcagaagaacccgatcgacaccatgagggtgttgctcgttgccctcgctctcctggctctcgctgcgagcgccacctccacgcatacaagcggcggctgcggctgccagccaccgccgccggttcatctaccgccgccggtgcatctgccacctccggttcacctgccacctccggtgcatctcccaccgccggtccacctgccgccgccggtccacctgccaccgccggtccatgtgccgccgccggttcatctgccgccgccaccatgccactaccctactcaaccgccccggcctcagcctcatncccagccacacccatgcc

SEQ ID NO: 18340 - DNA, 440 bp, Zea mays
  Clone ID: LIB3151-026-Q1-K1-H4
agcaacatagaaagcacaatagtgtaccaacaatggcagccaaaatattttgcctccttatgctccttggtctttctgcaagtgctgctacggcgaccattttcccgcaatgctcgcaagctcctatagcttcccttcttcccccgtacctctcaccagcggtgtcttcggtatgtgaaaacccaattcttcaaccctacaggatccaacaggcaatcgcagctggcatcttacctttatcacccttgttcctccaacaatcatcagccctattacaacagttacctttggtgcatttattggcacaaaacatcagggcacaacaactacaacaacttgtgctagcaaaccttgctgcctactctcagcaacagcagtttcttccattcaaccaactacgttcattgaactctgcttcttatttgcaacaacaacaacta

SEQ ID NO: 18341 - DNA, 448 bp, Zea mays
  Clone ID: LIB3151-026-Q1-K1-H5
gaagaacccgatcgacaccatgagggtgttgctcgttgccctcgctctcctggctctcgctgcgagcgccacctccacgcatacaagcggcggctgcggctgccagccaccgccgccggttcatctaccgccgccggtgcatctgccacctccggttcacctgccacctccggtgcatctcccaccgccggtccacctgccgccgccggtccacctgccaccgccggtccatgtgccgccgccggttcatctgccgccgccaccatgccactaccctactcaaccgccccggcctcagcctcatccccagccacacccatgcccgtgccaacagccgcatccaagcccgtgccagctgcaaggaacctgcggcgttggcagcaccccgatcctgggccagtgcgtcgagtttctgaggcatcagtgcagcccgacggcgacgccctac

SEQ ID NO: 18342 - DNA, 446 bp, Zea mays
  Clone ID: LIB3151-026-Q1-K1-H6
ccaactagcaacatagaaagcacaatagtgtaccaacaatggcagccaaaatattttgctggcttatgctccttggtctttctgcaagtgttgctaccgcaaccattttcccacaatgctcacaagctcctatagcttcccttcttcccccatacctctcaccagcggtgtcttcaatgtgtgaaaacccaattgttcaaccctacaggatccaacaggcaatcgcaacaggcatcttaccattatcacccttgttcctccaacaaccgtcagccctattacagcagttacctttggtccatttggtggcacaaaacatcagggcacaacaactacaacaacttgtgctagcaaaccttgctgcatactctcagcaacatcagtttcttccattcaaccaactggctgcattgaactctgctgcttatttgcaacaacaattacca

SEQ ID NO: 18343 - DNA, 365 bp, Zea mays
  Clone ID: LIB3151-026-Q1-K1-H7
catttattggcacaaaacatcagggcacaacaactacaacaacttgtgctagcaaaccttgctgcctactctcagcaacagcagtttcttccattcaaccaactagctgcattgaactctgcttcttatttgcaacaacaacaactaccattcagccagctacctgctgcctacccccagcaatttcttccattcaaccaactggcagcattgaactctcctgcttatttacagcagcaacaactactaccattcagccagctagctggtgtgagccctgctaccttcttgatacaaccacagttgttgccgttctaccagcacgctgcgcctaacgctggcaccctcttacaactgcaacaatt

SEQ ID NO: 18344 - DNA, 433 bp, Zea mays
  Clone ID: LIB3151-026-Q1-K1-H8
ccaacaagcaacatagaaagtggaatccagtagcaacaatagagcaacaatggcgaccaagatattttccctccttatgctccttgctctttctgcatgtgttgctaacgcgacaattttccctcaatgctcacaagctcctatagcttcccttcttcccccataccttccatcaatgatagcttcagtatgtgaaaacccagctcttcaaccctataggctccaacaagcaatcgcagcaagcaacatacctttatcacccttgtttcaacaatcgccagccctatctttggtgcagtcattggtacaaaccatcagggcacagcagctgcagcaactcgtgctacctgtgatcaaccaagtagctctggcaaacctttctccctactctcagcaacaacaatttcttccattcaaccaactgtctacattg

SEQ ID NO: 18345 - DNA, 354 bp, Zea mays
  Clone ID: LIB3151-026-Q1-K1-H9
ggccgccctttttttttttttttttttttttttttttttggaaccccgcaaaaaagtctgctactttttgttcaaacaaagtcgccattagcttggttgcccaggggcatttctggcaaagacagggtccttcgctctggcaggggcaggacgccaggaccccgcgcaaagacagggtcctacggttcttttttttttacatgacatttgagtgacaactacatgacggagcaggcgttggggttctcgtcgctgaaaatctgcggcgccatgggctgctgctggtgcaagtggtggtgcggcggcccctaaaacggcggcgggtaggccggctggtaggcgtacgggtacccc

SEQ ID NO: 18346 - DNA, 423 bp, Zea mays
  Clone ID: LIB3151-027-Q1-K1-A1
cggacgcgtgggcaatcatcattcatcttagtagtataggcaccaaatcaaatctgcaacgaggaattatctaactccaaaaaccatgaagctggtgcttgtggttcttgctttcattgctttagtatcaagtgtttcttgtacacagacaggcggctgcagctgtggtcaacaacaaagccatgagcagcaacatcatccacaacaacatcatccacaaaaacaacaacatcaaccaccaccacaacatcaccagcagcagcaacaccaacaacaacaagttcacatgcaaccacaaaaacatcagcaacaacaagaagttcatgttcaacaacaacaacaacaaccgcagcaccaacaacaacaacaacaacagcaccaacaacaacatcaatgtgaaggccaacaacaacatcaccaaca

SEQ ID NO: 18347 - DNA, 449 bp, Zea mays
  Clone ID: LIB3151-027-Q1-K1-A10
acgattagctctatctactccagagcgcacaagaacccgatcgacaccatgagggtgttgctgggtgccctcgctctcctggctctcgctgcgagcgccacctccacgcatacaagcggcggctgcggctgccagccaccgccgccggttcatctaccgccgccggtgcatctgccacctccggttcacctgccacctccggtgcatctcccaccgccggtccacctgccgccgccggtccacctgccaccgccggtccatgtgccgccgccggttcatctgccgccgccaccatgccactaccctactcaaccgccccggcctcagcctcatcctcagccacacccatgcccgtgccaacagccgcatccaagcccgtgccagctgcagggaacctgcggcgttggcagcaccccgatcctgggccagtgcgtcgagtttctgaggca

SEQ ID NO: 18348 - DNA, 465 bp, Zea mays
  Clone ID: LIB3151-027-Q1-K1-A11
gagaccaacaagcaacatagaaagtggaatccagtagcaacaatagagcaacaatggcgagcaggatattttccctccttatgctccttgctctttctgcatgtgttgctaacgcgacaattttccctcaatgctcacaagctcctatagcttcccttcttcccccataccttccatcaatgatagcttcagtatgtgaaaacccagctcttcaaccctataggctccaacaagcaatcgcagcaagcaacatacctttatcacccttgtttcaacaatcgccagccctatctttggtgcagtcattggtacaaaccatcagggcacagcagctgcagcaactcgtgctacctgtgatcaaccaagtagctctggcaaacctttctccctactctcagcaacaacaatttcttccattcaaccaactgtctacattgaaccgtgctgcttattgcagcaacaact

SEQ ID NO: 18349 - DNA, 367 bp, Zea mays
  unsure at all n locations
  Clone ID: LIB3151-027-Q1-K1-A12
ccggggcggccggcgcgtacgttcagcattcanaaacacaccaagcgaagcgcactagcaacaacctaacaacaatggctaggaagatattaaccctcgttgcgctgcttgcccttttagtgagcgcaacaaatgcgttcattattccacagtgctcacttgctcctagtgccattattccacagttcctcccaccagttacttcaatgggcttcgaacatccagccgtgcaagcctacaggctacaactagcgcttgcggcgagcgtcttacaacaaccaattgcccaattgcaacaacaatccttggcacatctaaacctacaaaccatcgcaacgcaacagcaacaacagtttctgcatcactg

SEQ ID NO: 18350 - DNA, 270 bp, Zea mays
  Clone ID: LIB3151-027-Q1-K1-A2
acgattcaagattcttaatttttaaaccaaaactgtttgcaatcatctcagatgcggaaagagaaaagcaaaggtgttaatcctctggttgagccgtttgacttgaccttcttcgcacccatcagtctaccgattaaccaacttcctgcaaagtcgactgcgtgttcttccacgcactggtgctcgaggagacgcggggaaaaaaaaaacaactcaagaaactgtaccctttcgggtctagcgcctattccccttttattctcaccccct

SEQ ID NO: 18351 - DNA, 448 bp, Zea mays
  Clone ID: LIB3151-027-Q1-K1-A3
acgattcaagattcttaatttttaaaccaaaactgtttgcaatcatctcagatgcggaaagagaaaagcaaaggtgttaatcctctggttgagccgtttgacttgaccttcttcgcacccatcagtctaccgattaaccaactccctgcaaagtcgactgcgtctcctcccacgcactgctgctcgaggagacgcggggaaaaaaaaaacaactcaggaaactgtaccctttcggttctagcgcctatccccctcttattctcaccccctgagctctcttcactgatgagtgagtcatcccctttggatggctcgtataatttagatccacgtctggagattctggacaggtatgtttagaacgacaggtgcgatgagaccatcgcctggaccttctcgaggtccatgccaggagacagcacgtaactagcagcaacagcgagcgcga

SEQ ID NO: 18352 - DNA, 326 bp, Zea mays
  Clone ID: LIB3151-027-Q1-K1-A4
gtcctatatcattagctaccgttctacaagatccgatcttacgaccgcatccatgcgacagcagacgtcttttataccggggcctaaattcaataaactgaccaaccaccaacaacttcctgacactaataaccctgacgcatacccaactgaattgccttgagcacatccctctttccccaacttgcgacataacaagacatgcgccgaccaagcgccctatcgaaaaatagtccagcctcaatggagaatcgaacacgccctgtagctgcgcattatgctcgaccggtatggtgcgcacacccagactgacagctacacctgct

SEQ ID NO: 18353 - DNA, 357 bp, Zea mays
  Clone ID: LIB3151-027-Q1-K1-A6
ttcagaccattagctttatctactccagagcgcagaagaacccgatcgacaccatgagggggttgctcgttgccctcgctctcctggctctcgctgcgagcgccacctccacgcatacaagcggcggctgcggctgccagccaccgccgccggttcatctaccgccgccggtgcatctgccacctccggttcacctgccacctccggtgcatctcccaccgccggtccacctgccgccgccggtccacctgccaccgccggtccatgtgccgtcgccggttcatctgccgccgccaccatgccactaccttactgaaccgtcccggccttagcctcatccgcagccacacccatgcc

SEQ ID NO: 18354 - DNA, 456 bp, Zea mays
  Clone ID: LIB3151-027-Q1-K1-A7
aaaccttgcccgcaacaatggccgcctccctcccgaccaccgccgcgcgcctcgcgggccggtccttcgcctaccggtcgcccaaggctccctccgccaccgccctcccgcgtgccgccgccttccctgcaatcgccgtcgcggcggcgcccctgcgcccgcgccgcgcgccgaggccggtggcggcccgggccgggggcgaggagcgggagacgatactgctccccgggtgcgactacaaccactggctgatcgtcatggagttccccaaggaccccgcgcccacccgcgagcagatgatcgacacctacctcaacacactcgccaccgtcctcggcagcatggaggaagccaagaagaacatgtacgcattcagcacgaccacctacaccgggttccagtgcaccgtggacgaagagacgtctgagaagttcaagggtctgcctggggtgctgt

SEQ ID NO: 18355 - DNA, 182 bp, Zea mays
  Clone ID: LIB3151-027-Q1-K1-A9
ctcggtcttacatctataactccacatctacatctaccaattacacgtacgctctcatgcgacggcattgttcaagcgaagtggcacctaaactcaacttactgtcacccatgtacaccacccaatgactgacaaaacactacacttacttaactaaatagcattgcaagccatcccacttt

SEQ ID NO: 18356 - DNA, 452 bp, Zea mays
  Clone ID: LIB3151-027-Q1-K1-B1
gggacagtggtcctgcagtttgaagtgagacttcagaatggccttgaatgtggaggtgcctacgttaagtacatccgccctcaggatgctggatgggatgccaaggagtttgataatgagactccatacactattatgtttggtccagataagtgtggatcaaccaacaaggttcatttcatccttaagcacaagaatcctaagactggaaagtatgttgagcatcatctcaaattcccaccatctgtcccatatgacaagctctctcatgtctacacggctatcttgaagccagacaatgaggtcagaattttggtagatggggaagaaaagaagaaggcgaacttcctttctgctgatgattttgagccagcacttatcccatccaagaccattcctgaccctgatgacaagaagccggaggactgggatgagagagctaaaattcctga

SEQ ID NO: 18357 - DNA, 421 bp, Zea mays
  Clone ID: LIB3151-027-Q1-K1-B10
tcagaccattagctttatctactccagagcgcagaagaacccgatcgacaccatgagggtgtggctcgttgccctcgctctcctggctctcgctgcgagcgccacctccacgcatacaagcggcggctgcggctgccagccaccgccgccggttcatctaccgccgccggtgcatctgccacctccggttcacctgccacctccggtgcatctcccaccgccggtccacctgccgccgccggtccacctgccaccgccggtccatgtgccgccgacggttcatctgccgccgccaccatgccactaccctactcaaccgccccggcctcagcctcatccccagccacacccatgcccgtgccaacagccgcatccaagcccgtgccagctgcagggaacctgcggcgttggcagcaccccg

SEQ ID NO: 18358 - DNA, 409 bp, Zea mays
  Clone ID: LIB3151-027-Q1-K1-B11
gaccgacgcgtccgaataagcacaccaagcaacacacactaccaacatcctaaccacaatcgctaccacaatgtgtagcattatatcactccttgcgctgcttgctaccccaacaaatacctccactaatccacaaatcttactacatcctacactcattattacacacatccttccaccagttacttcaatagccacttaacacccatctgaacaagcctatatgctacaacacacgataccactaagcctcttacaacacccaatacaccaattactacaacaattcttgccacatttaacaatacatatcatcctaccgcaacatcaacaacagcagctaccacaactgatccacttactcatcctgaaacctgtcgtctactttcaacactacttgcttcaatac

SEQ ID NO: 18359 - DNA, 471 bp, Zea mays
  Clone ID: LIB3151-027-Q1-K1-B12
cgtccgagcaaagcggcagtgcgtatagaggatcgtcgaacagaacagcatgaacatggtcgtgcggctcgtcgtgtgcctgggtctggcagctgccagcgcctctgcaatgcagatgccctgcccctgcgcggggctgcagggcttgtacggcgctggcgccggcctgacgacgatgatgggcgccggcgggctgtacccctacgcggagtacctgaggcagccgcagtgcagcccgctggcggcggcgccctactacgccgggtgtgggcagacgagcgccatgtaccagccgctccggcaacagtgctgccagcagcagatgaggatgatggacgtgcagtccgtcgcgcagcagctgcagatgatgatgcagcttgagcgtgccgctgccgccagcagcagcctgtacgagccagctctgatgcagcagcagcagcagctgctggcagcccagggtctcaaccccat

SEQ ID NO: 18360 - DNA, 375 bp, Zea mays
  Clone ID: LIB3151-027-Q1-K1-B2
ctagcaacatagaaagcacaatagtgtaccaacaatggcagccaaaatattttgcttccttatgctccttggtctttctgcaagtgttgctaccgcaaccattttcccacaatgctcacaagctcctatagcttcccttcttcccccatacctctcaccagcggtgtcttcaatgtgtgaaaacccaattgttcaaccctacaggatccaacaggcaatcgcaacaggcatcttaccattatcacccttgttcctccaacaaccgtcagccctattacagcagttacctttggtccatttggtggcacaaaacatcagggcacaacaactacaacaacttgtgctagcaaaccttgctgcatactctcagcaaca

SEQ ID NO: 18361 - DNA, 394 bp, Zea mays
  Clone ID: LIB3151-027-Q1-K1-B3
attacatcataaacggcacactaagaacaaacaaaggcacgcaacatacttgcgaactggaggtccttgatctttgtgcggagatgcaaccgcaaccattggcccaaatgctcaaagctgctatagctatacttctatccacatacatctcaccagcggagaatcaaatgtgtgaaaacccagttgttgaaacatagaagatgcaacaggcaatcgcaacaagcatcataccattatcacccatggtgattcaacaaccgtcagccctataacagcagttaccgttggtgcattgggtagcacaaaagataaaggtacaacagctacaacaactggtgctagcaaattttgctgtatacttttagcaacatcagttgttttcattcaaccaact

SEQ ID NO: 18362 - DNA, 461 bp, Zea mays
  Clone ID: LIB3151-027-Q1-K1-B4
gcggcagtgcgtagagaggatcgtcgaacagaacagcatgaagatggtcatcgttctcggcgtgtgcctggctctgtcagctgccagcgcctctgcaatgcagatgccctgcccctgcgcggggctgcagggcttgtacggcgctggcgccggcctgacgacgatgatgggcgccggcgggctgtacccctacgcggagtacctgaggcagccgcagtgcagcccgctggcggcggcgccctactacgccgggtgtgggcagacgagcgccatgtaccagccgctccggcaacagtgctgccagcagcagatgaggatgatggacgtgcagtccgtcgcgcagcagctgcagatgatgatgcagcttgagcgtgccgctgccgccagcagcagcctgtacgagccagctctgatgcagcagcagcagcagctgctggcagcccagggtctcaaccccatgg

SEQ ID NO: 18363 - DNA, 458 bp, Zea mays
  unsure at all n locations
  Clone ID: LIB3151-027-Q1-K1-B5
catgaccatccagaccgccgtcctcatcgagaccctcaccgcgctcggcgccgaggtccggtggtgctcctgcaacatcttctccacgcaggaccacgccgccgccgccatcgcgcgcgactcggccgccgtgttcgcctggaagggggagacccttgaggagtactggtggtgcaccgagcgctgcctcgactggggcgaggcgggcggccccgacctcatcgtcgacgacggcggcgacgccacgctgctcatccacgagggtgtcaaggccgaggaggactacgagaagaccggcaagatccccgatccggagtccaccgacaacgctgagttcaagatcgtgctcaccatcatccgcgacgggctcaaggctgaccccaagaagtaccgcaagatgaaggagaggctngtcggcgtctctgaggagaccaccacgggtgtcaagaggctctacc

SEQ ID NO: 18364 - DNA, 410 bp, Zea mays
  unsure at all n locations
  Clone ID: LIB3151-027-Q1-K1-B6
cacacctcccgaactccgaactacaagtttcgcttctcgtcgcgacgactgggcgagaggggcgccgccgcctgagttctttagaaatggctgatggtgaggacatccagcctcttgtctgcgacaatggcactggaatggtcaaggctggttttgctggcgacgatgcaccaagggctgttttccctagtattgttggccgtcctcgccacactggtgttatggtagggatgggacagaaggatgcgtatgttggcgacgaggcacagtccaagagaggtattctcacgctcaagtatccgatcgagcatggtattgtgagcaactgggatgacatggagaaaatctggcatcacactntctacaacgagcttcgtgttgccccagaggagcaccctgtgttgctcact

SEQ ID NO: 18365 - DNA, 381 bp, Zea mays
  Clone ID: LIB3151-027-Q1-K1-B8
ccgatgataccaactatcacatacatagttatttacagtagcaacatctcatcaccaatggcggcctatatatttgcgctgcttgccctccttgatttttcatcaagttttgcttccctgactattattccacaatgctcacaacattacctctctccagtgacagtcgctatatttgaatacccaactatacaatcctacaagctacaatataccatcacaacaatcattttacggtcttcatcattgactgtacaacaaccatatgccctatcgcaacaaccatccttagttaatttatatcttcaaagaatcactacacatcaacttacacatctttagctttcaacaatcaattttgtattttcatctaaccttttc

SEQ ID NO: 18366 - DNA, 422 bp, Zea mays
  Clone ID: LIB3151-027-Q1-K1-B9
accattatctatatctactacacagcgcataataacccgatcgacaccatgagggggcggctcgttgccctcgctgggcgggctctcgctgcgagcaccacctccacgcatacaagcagcggctgcggctgccagccaccgccgccggttcatctaccgccgccggtgcatctgccacctccggatcacctgccacctccggtgcatctcccaccgacggtccacctgccgccgccggtccacctgccaccgccggtccatgtgccgccgccggttcatctgccgacgacaccatgccactaccctacatcaaccgcccggcctcagcctcatccccagccacacccatgcccgtgccaacagccgcatccaagcccgtgccagctgcagggaacctgcggcggtggcagcaccccgatcct

SEQ ID NO: 18367 - DNA, 381 bp, Zea mays
  Clone ID: LIB3151-027-Q1-K1-C1
cgagttgcaaaccatggacatggctttggcgtctaaagcctcccctccgccatggaatgggggggccttcgagcagccaattccaaagcgtgacaaagccgttgcaaatgattcaacatacctcaatcctcaagctcatgatagtgttcttggaatcattctgggaggtggtgctgggactagattgtaccccttgacaaagaagcgtgccaagcctgcagtgccattgggtgccaactatagactgattgatattcctgtcagcaattgtctcaacagcaacatattcaagatctatgtgctaacgcaatttaactttgctttcctcaaccgtcacctctcaagagcctacgggagcaacattggagggtacaagaatga

SEQ ID NO: 18368 - DNA, 134 bp, Zea mays
  Clone ID: LIB3151-027-Q1-K1-C11
agctgtgcaagcctacaggctacaacaagcgcttgctgcgagcgtcttacaacaaccaattgaccaattgcaacaacaatccttggcacatctaaccatacaaaccatttcaacacaacaacctcaacattttt

SEQ ID NO: 18369 - DNA, 337 bp, Zea mays
  Clone ID: LIB3151-027-Q1-K1-C2
gtggatatggacgtggaaggtacgaggaagaatacggctacaagaagaagccagccatcgggggctatagatgaggaaaatacaaggatgaagatgactacacgaggaaacctagcactgctagctatggtgggggatggcacgaggatgtagatgattacaagaagaaacccacaagatgaggctttggtggagggagggatgaacaagatgataatccctagaagcctacacgtggcggctcaggtgacagcaggcatgaacaggaccatgaatacaagaagcctctgaccgtatgtggcagtgcactaatggggacgcacgattgaggatcatc

SEQ ID NO: 18370 - DNA, 457 bp, Zea mays
  Clone ID: LIB3151-027-Q1-K1-C3
gagcattcataaacacaccaagcgaagcgcactagcaacgacctaacaacaatggctaccaaggtattagccctccttgcgcttcttgccctttttgtgagcgcaacaaatgcgttcattattccacaatgctcacttgctcctagtgccattattccacagttcctcccaccagttacttcaatgggcttcgaacacctagctgtgcaagccaacatgcaacaacaagcgcttgcggcgagcgtcttacaacaaccaattgcccaattgcaacaacaatccttgccacatctaacaatacaagccatcacaacgcaacagcaacaacagttcctaccagcactgagccacctagccatggtgaaccctgccgcctacttgcaagagcagctgcttgcatccaacccacttgctctggcgaacgtagttgcaaaccagcaacaacaacagctacaac

SEQ ID NO: 18371 - DNA, 438 bp, Zea mays
  Clone ID: LIB3151-027-Q1-K1-C5
caacaagcaacatagaaagtggaatccagtatcaacaattgagcaacaatggcgaccaagagatttttcctccttatgctccttgctctctctgcatgtgttgctaacgcgacaattttccctcaatgctcacaagctcctatagcttcccttcttcccccataccttccatcaatgatagcttcagtatgtgaaaacccagctcttcaaccctataggctccaacaagcaatcgcagcaagcaacatacctttatcacccttgtttcaacaatcgccagccctatctttggtgcagtcattggtacaaaccatcagggcacagcagctgcagcaactcgtgctacctgtgatcaaccaagtagctctggcaaacctttctccctactctcagcaacaacaatttcttacattcaaccaactgtctacattgaaccgt

SEQ ID NO: 18372 - DNA, 454 bp, Zea mays
  Clone ID: LIB3151-027-Q1-K1-C6
caacaagcaacatagaaagtggaatccagtagcaacaatagagcaacaatggcgaccaagagattttccctccttatgctccttgctctttctgcatgtgttgctaacgcgacaattttccctcaatgctcacaagctcctatagcttcccttcttcccccataccttccatcaatgatagcttcagtatgtgaaaacccagctcttcaaccctataggctccaacaagcaatcgcagcaagcaacatacctttatcacccttgtttcaacaatcgccagccctatctttggtgcagtcattggtacaaaccatcagggcacagcagctgcagcaactcgtgctacctgtgatcaaccaagtagctctggcaaacctttctccctactctcagcaacaacaatttcttccattcaaccaactgtctacattgaaccgtgctgcttatttgcagc

SEQ ID NO: 18373 - DNA, 216 bp, Zea mays
  Clone ID: LIB3151-027-Q1-K1-C7
aaaaccggccgacccagcatacgttctatatatctatctacactatacattatcaaactacatacccattcatacggcggcttatttttttatattctcacctaaatataatccactttctctcatactacaacttaatcacttttaaaacccttcctatacccaactaaatctccttacatcacattcaactttcaccatcatttttaatatctc

SEQ ID NO: 18374 - DNA, 412 bp, Zea mays
  Clone ID: LIB3151-027-Q1-K1-C8
attcgctctatctactccagagcgcacaataacccgatcgacaccatgagggtgatgcgggtggccctcgctctactggctctcgctgcgagcgccaccttcactcatacaaccggttgctgtagctgccagccaccgccatcggttcatctaccgccgccggcgcatctgccaccttcggttcacctgccacctaacgtacatcttccaccgtctgtccacctgccagcgccggtccacctgccactaccggtacatgtgccgcctcctcatcatctaccgctatcaccattccactaccttactcaaccgctccggcctcagcctcatccccagccacacccatgctcgtgccaacagcctcattcaagcccgtgccagctgctagtaacctgccgacatatgcagtacc

SEQ ID NO: 18375 - DNA, 183 bp, Zea mays
  unsure at all n locations
  Clone ID: LIB3151-027-Q1-K1-C9
caactcacaccacccttctaggccacccgacaaccgacaaaccgcaggaataaaaaaaccgccagccatcaaaaagcaaaaaacacactacncccccaaccaatgctcccaccttcctgcaaacctactcatatctattaccatcatttcatataatctaacatccagctctaaccactactt

SEQ ID NO: 18376 - DNA, 412 bp, Zea mays
  unsure at all n locations
  Clone ID: LIB3151-027-Q1-K1-D1
atgctcgctcacctcctctgtcgacgcaccaccccgaagaccccccgccgcgctcgcagggtgtgcgacccttcgcccgcgcgccctcacgacatggccgcctccgtctccgccgccgccaaggccgccgcggcgttcgcgcacaaggtccagaaggagctggccgcgccggcgcagcgccgcgcgggcttgacccgccggaccaagccgtgcagcgtgcgcgccgtcgcttcgcccgcgcgcgccccccgcgccccgtcgtccaccggctcggtgaagagcgcgatgacgatgacggagaagatactggcgcgggcgtcggagcgcgcggcgctggagcccggngagaacgtgtgggtcgacgtcgacgtgctcatgacgcacgacgtctgcgggcccggcgccttcgaca

SEQ ID NO: 18377 - DNA, 449 bp, Zea mays
  Clone ID: LIB3151-027-Q1-K1-D10
gcattcaaaaacacaccaagcgaagcgcactagcaacaacctaacaacaatggctaccaaggatttaacccttcttgggcctcttggccttttaatgagcgccacaaatgcgttcattattccacagtgctcacttgctcctagtgccattattccacagttcctcccaccagttacttcaatgggcttcgaacattcagccgtgcaagcctacaggctacaactagcgcttgcggcgagcgtcttacaacaaccaattggccaattgcgacaacaattcttggcacatataaacctacaaaccatcgcaacgcaacagcaacaacagtttctgtcatcactgagccacctagacgtggtgaaccctgtcgcctacttgcaacagcagctacttgcatccaacccacttgctctggcgaacgtagctgcataccaacaacaacaacgtc

SEQ ID NO: 18378 - DNA, 151 bp, Zea mays
  Clone ID: LIB3151-027-Q1-K1-D12
acaaaaacaccaaccaactctcaagagtatccaaccaacaccactccctcacccgccggaataaaaaaaacgcagccccacccaaaacaaacacaacaccaactttaacaacccacagaccacaaaaacccctactacacccaacacaaac

SEQ ID NO: 18379 - DNA, 427 bp, Zea mays
  Clone ID: LIB3151-027-Q1-K1-D3
ctctccttttgctcggaacgcacacaccgcccggtccccgatctccgatcccctcgtcgatccggagatgcagatcttcgtcaagaccctcactggaaagactatcaccctcgaggtggagtcttctgacaccattgacaacgtcaaggccaagatccaggacaaggagggcatccccccggaccagcagcggctcatctttgctggcaagcagctcgaggacgggcgcacacttgccgactacaacatccagaaggagagcaccctccaccttgttctccgcctcaggggaggcatgcagatcttcgtcaagaccctcactggaaagactatcaccctcgaggtggagtcttctgacaccatcgacaacgtcaaggccaagatccaagacaaggagggcatcccttcagaccagcagcggctcatt

SEQ ID NO: 18380 - DNA, 457 bp, Zea mays
  Clone ID: LIB3151-027-Q1-K1-D4
ctctcatctgcgtacacggtctccctcttcctgtcagtagtagagtgagagtgaggcagcgagtgggagacaaggggaaatggggaagggagcgcaagggagcgatgcggcggcggcgggcggcgaggtggaggagaacatggcggcgtggctggttgccaagaacaccctcaagatcatgcccttcaagctcccgcccgtcggcccttatgatgtccgcgtgcgcatgaaggcagtggggatttgcggcagcgatgtgcactacctaagggagatgcgcatcgcgcacttcgtggtgaaggagccgatggtgatcgggcacgagtgcgcgggcgtggtcgaggaggtgggcgccggcgtgacgcacctgtccgtgggcgaccgcgtggcgctggagccgggcgtcagctgctggcgctgccgccactgcaagggcgggcggtacaacctgtgcgag

SEQ ID NO: 18381 - DNA, 369 bp, Zea mays
  Clone ID: LIB3151-027-Q1-K1-D6
tagctggttccattggttgaggaataaggctcgcgaggggcaggtgcagggctgtcctgccggtaattgatagaaggtgggggtggacgtttcggagatcctggagctggtggaggaccgggaggcgttcggtatgctcgtggacaccaagtttcggcagctcgactccgacggcgactgcttgctctccttgggggacctgctccctcacttggcagacatctttttcgctctcggactgcttgcttagggtgctgtcttcaactccgaccatgtcttctcatatgtggtgagcgagttgactcatgggacattccatggcgaggtgagcaatgtcgatttccaatatgccctttttgacatactttt

SEQ ID NO: 18382 - DNA, 419 bp, Zea mays
  Clone ID: LIB3151-027-Q1-K1-D8
ccagatccctgttcgtcttcggccccttcggagggaacgactacaatgccatgctcttcgtcgggctcaccatggatcaggcaaggaactacacgcccaagatcgtcgacaccgtcgccagcggcgtcgagcaactcatccagctgggcgcagtggacatcgtcgtcccgggagcgctgcccgtggggtgcttcgccatctacctcacgtttctcccgagcgacgacccggccgactacgacgggcacgggtgcctgagggcgctcaacgagctgtccgtctaccagaactccctgctccagagcaggctcgccgccctccaggcaaggtatccctcggcgaggatcgtgtacgccgactactacacccacatcgaccggctggtgcgcagcccggcgcgcttcggcttcacaactggc

SEQ ID NO: 18383 - DNA, 430 bp, Zea mays
  unsure at all n locations
  Clone ID: LIB3151-027-Q1-K1-E1
gagcattcanaaacacaccaagcgaagcgcactatcaccgacctagcaacactggctaccgagggattagccctccttgcgcttgttgccctttttgcgagcgcaacatatgcgttcattattccacactgctgacttgctcctagtgccattattacacagttcctacgaccagatacttcaatgggcttcgaacacctagctgtgcaggccaacatgcaacaacaagcgctcgcagagagcgtattacaacatccaattgagcaattgccacaacaatccttgccacatataacaatacaagccatcacatcgcaccatccacaacagttcctaccagcactgagccacctaggcatggtgaaccctgccgcctacttgcaagagcagctgcttgcattcaacccacttgctgtggcgaacgtagctg

SEQ ID NO: 18384 - DNA, 447 bp, Zea mays
  Clone ID: LIB3151-027-Q1-K1-E10
gagaccaactagcaacatagaaagcacaatagtgtaccaacaatggcagccaaaatattgggcttccttatgctccttggtctttctgcaagtgttgctaccgcaaccattttcccacaatgctcacaagctcctatagcttcccttcttcccccatacctctcaccagcggtgtcttcaatgtgtgaaaacccaattgttcaaccctacaggatccaacaggcaatcgcaacaggcatcttaccattatcacccttgttcctccaacaaccgtcagccctattacagcagttacctttggtccatttggtggcacaaaacatcagggcacaacaactacaacaacttgtgctagcaaaccttgctgcatactctcagcaacatcagtttcttccattcaaccaactggctgcattgaactctgctgcttatttgcaacaacaatta

SEQ ID NO: 18385 - DNA, 468 bp, Zea mays
  Clone ID: LIB3151-027-Q1-K1-E12
gcaacatagaaagcacaatagtgtaccaacaatggcagccaaaatattttgcctccttatgctccttggtctttctgcaagtgctgctacggcgaccattttcccgaaatgctcgcaagctcctatagcttcccttcttcccccgtacctctcaccagcggtgtcttcggtatgtgaaaacccaattcttcaaccctacaggatccaacaggcaatcacagctggcatcttacctttatcacccttgttcctccaacaatcatcagccctattacatcagttacctttggtgcatttattggcacaaaacatcagggcacaacaactacaacaacttgtgctagcaaaccttgctgcctactctcagcaacagcagtttcttccattcaaccaactagctgcattgaactctgcttcttatttgcaacaacaacaactaccattcagccagctacctgctgcctaccc

SEQ ID NO: 18386 - DNA, 461 bp, Zea mays
  Clone ID: LIB3151-027-Q1-K1-E2
ctgggtcttcagaccattagctttatctactccagagcgcagaagaacccgatcgacaccgtgagggtgttgctcgttgccctcgctctcctggctctcgctgcgagcgccacctccacgcatacaagcggcggctgcggctgccagccaccgccgccggttcatctaccgccgccggtgcatctgccacctccggttcacctgccacctccggtgcatctcccaccgccggtccacctgccgccgccggtccacctgccaccgccggtccatgtgccgccgccggttcatctgccgccgccaccatgccactaccctactcaaccgccccggcctcagcctcatccccagccacacccatgcccgtgccaacagccgcatccaagcccgtgccagctgcagggaacctgcggcgttggcagcaccccgatcctgggccagtgcgtcgagtttctgaggca

SEQ ID NO: 18387 - DNA, 439 bp, Zea mays
  Clone ID: LIB3151-027-Q1-K1-E3
catccgcacctctctccatctccctgctcctccgcctccttcttgatccagccaagccagggggggccatgtcggactcggaggagcaccacttcgaatcgaaggccgacgccggagcgtccaagacctacccgcagcaggctggcaccgtccgtaagaacggcttcatcgtcatcaagaaccgcccctgcaaggttgtggaggtttctacctcaaagactggtaagcatggccatgccaaatgccactttgttgccatagacatattcaacgggaaaaagctcgaagatattgttccttcgtcacacaactgtgatattccgcatgtgaaccgtactgagtaccagctgattgatatatcagaggatggatttgtgagccttcttacttcagatggcaacactaatgatgatcttagacttccaactgatgagactct

SEQ ID NO: 18388 - DNA, 463 bp, Zea mays
  Clone ID: LIB3151-027-Q1-K1-E4
attttgagcattcagaaacacaccaagcgaagcacattagcaacaacctaacaacaatggctaccaagatattatccctccttgcgcttcttgcgctttttgcgagcgcaacaaatgcgttcattattccacaatgctcacttgctccaagttccattattacacagttcctcccaccagttacttcaatgggcttcgaacacccagctgtgcaagcctataggctacaacaagcaattgcggcgagcgtcttacaacaaccaatttcccagttgcaacaacaatccttggcacatctaacaatacaaaccatcgcaacgcaacagcaacaacaattcctaccagcactgagccacctagccatggtgaaccctgccgcctacttgcaacagcagttgcttgcatcaaacccacttgctctggcaaacgtagttgcaaaccagccacaacaacagctgcaaca

SEQ ID NO: 18389 - DNA, 453 bp, Zea mays
  Clone ID: LIB3151-027-Q1-K1-E5
attgagaccaactagcaacatagaaagcacaatagtgtaccaacaatggcagccaaaatatgttgcctccttatgctccttggtctttctgcaagtgctgctacggcgaccattttcccgaaatgctcgcaagctcctatagcttcccttcttcccccgtacctctcaccagcggtgtcttcggtatgtgaaaacccaattcttcaaccctacaggatccaacaggcaatcacagctggcatcttacctttatcacccttgttcctccaacaatcatcagccctattacatcagttacctttggtgcatttattggcacaaaacatcagggcacaacaactacaacaacttgtgctagcaaaccttgctgcctactctcagcaacagcagtttcttccattcaaccaactagctgcattgaactctgcttcttatttgcaacaacaacaacta

SEQ ID NO: 18390 - DNA, 417 bp, Zea mays
  Clone ID: LIB3151-027-Q1-K1-E6
gaccgcacgcgtacgattgacaccaactatcatcatataacgcacactatatcaccaacattaccacccaaattacgatttttacatacactccttggtttctcttaatcttctacaactccaacaatttacccaatattctcaaatgctcctataacttaatttccatctttacacatatcaccacaccaatcttttttatttgaaaccaacattcttctaccctattctatccaacatacaaatacatctactattacatctttaacatcctatttatctccatcacactatacaatcttaaacatacctcacattttatcctatttacttccacacaacatctactctcatcaactttataaaactaatttaacttaagtgtaacctactccactcattaacaatcattttttt

SEQ ID NO: 18391 - DNA, 248 bp, Zea mays
  Clone ID: LIB3151-027-Q1-K1-E7
ctgccacctacatttcatctcccaccgcctgtccacctgcctcctccggtccacctggccgttcttccattgccgccgccgttcatctgcctcctcctccatgccactaccctactcaaccgtcccggcctcatccttatccccagccacacccatgcccgtgccaacagccgcatccaagcccttgccatctgcatgtaacctgccgcgtttgcacacaccccgatcctgggccattgcgtctagtt

SEQ ID NO: 18392 - DNA, 159 bp, Zea mays
  Clone ID: LIB3151-027-Q1-K1-E9
aagacgactcacgcctccggtactctccaacaacagctacaataagccgccgattttttaaaagacgcggacgtcacacaaaatctgccaccacgaccacactcctgaaaatatcccaagcagttcttatttttcttcatgcaacatacctcctaccat

SEQ ID NO: 18393 - DNA, 449 bp, Zea mays
  Clone ID: LIB3151-027-Q1-K1-F1
caactagcaacatagaaagcacaatagtgtaccaacaatggcagccaaaatattttgcctcctgatgctccttggtctttctgcaagtgctgctacggcgaccattttcccgaaatgctcgcaagctcctatagcttcccttcttcccccgtacctctcaccagcggtgtcttcggtatgtgaaaacccaattcttcaaccctacaggatccaacaggcaatcacagctggcatcttacctttatcacccttgttcctccaacaatcatcagccctattacatcagttacctttggtgcatttattggcacaaaacatcagggcacaacaactacaacaacttgtgctagcaaaccttgctgcctactctcagcaacagcagtttcttccattcaaccaactagctgcattgaactctgcttcttaattgcaacaacaacaactaccat

SEQ ID NO: 18394 - DNA, 440 bp, Zea mays
  unsure at all n locations
  Clone ID: LIB3151-027-Q1-K1-F11
gagcaacataaaaagcacaatactgcacctacaatggcagccaaaatattttgcctcgttgtgttcataggacgggcgggggtactgctacagcgaccattttcccacaatgctcacaagctcctatagcttcccttcttcccccgtacctttcaccagcggtgtcttcggtatgtgaaaacccaattcttcaaccctataggatccaacaggcaatcgcagctggcatcttacctttatcacccttgttcctccaacaatcatcagccctattacagcagttacctttggtgcatttatcggcacanaacatcatggcacaacaactacaacaacttgtgctagcaaaccttgctgcctactctcagcaacaacagtttctttcattcaaccaactagctgcattgaactttgcttctaattgcaacaacaacaactac

SEQ ID NO: 18395 - DNA, 441 bp, Zea mays
  Clone ID: LIB3151-027-Q1-K1-F2
gttgtatcttgtcactgatcagtgttgtttgctttgctttgccgtgctaatggcgcccgctccgtgtggccgttcgtcgcagagggtgttccacttcggcaagggcaagagcgagggcaacaagaacatgaaggagctgctgggcggcaagggcgcgaacctggcggagatggcgagcatcgggctgtcggtgccgccggggttcacggtgtcgacggaggcgtgccagcagtaccaggaggccgggcgcgccctcccgccggggctctgggcggaggtcctcgacggcctgcggtgggtggaggagtacatgggcgccgccctcggcgacccgcggcgcccgctcctgctctccgtccgctccggcgccgcggtgtccatgcccgggatgatggacacggtgctcaacctggggctcaacgaccaagtggccgccgggct

SEQ ID NO: 18396 - DNA, 391 bp, Zea mays
  unsure at all n locations
  Clone ID: LIB3151-027-Q1-K1-F3
ggacgacacaccannagccanancaaccccagagcgcagaagaacccgaccgacaccggnagggngnngcacggagcccgcgcgcaccaggcacncgcagcgagcgccaccaccacgcanacaagcggcggcagcggcagccagccaccgccgccggggcaacaaccgccgccggagcaacngccaccaccggaacaccagccaccaccggcgcagcncccaccgccggaccaccggccgccgccggaccaccggccaccgccggaccaagagccgccgccggagcanccgccgccgccaccaggccacgacccgacgcaaccgccccgggcacagccgcagccgcaggcacacccaggcccgagccaacagccgcaaccaagcccgagcc

SEQ ID NO: 18397 - DNA, 448 bp, Zea mays
  Clone ID: LIB3151-027-Q1-K1-F5
attgagaccaactagcaacatagaaagcacaatagtgtaccaacaatggcagccaaaatatggtgcctccttatgctccttggtctttctgcaagtgctgctacggcgaccattttcccgaaatgctcgcaagctcctatagcttcccttcttcccccgtacctctcaccagcggtgtcttcggtatgtgaaaacccaattcttcaaccctacaggatccaacaggcaatcacagctggcatcttacctttatcacccttgttcctccaacaatcatcagccctattacatcagttacctttggtgcatttattggcacaaaacatcagggcacaacaactacaacaacttgtgctagcaaaccttgcttgcctactctcatcaacagcagtttctatcattcaaccaactagctgcattgaactttgcttcttatttgcaacaacaa

SEQ ID NO: 18398 - DNA, 448 bp, Zea mays
  Clone ID: LIB3151-027-Q1-K1-F6
cctactatcaacatataaagctcaatattgttccaacaatggcagccaaaatattttggcgccttattctccttggtctgtctgcaatttctgctacttctaccattttccctaaatgctctcaagctcctatatcttcccttcttcccccgtaccttttaccagctgtgtcttttgtatgtgaaaacccaattcttcaatcctacacgatccaacattcaatcacagctggcatcttatctttattacccttgttcctccatcattcatcaatcctattacatcatttacctttgatgcatatattttctcatatcattatgttcacaacaactacaacatctagtgctttcatatcttgctgcctactctcatcaacatcagttcttttttttcaactaactatctgctatgatttctgcttcctattttactcatcattctaact

SEQ ID NO: 18399 - DNA, 341 bp, Zea mays
  Clone ID: LIB3151-027-Q1-K1-F9
catacaatacacactactcacccatccgttatcatccaaatatttggcttccttaggcgcgttggttttcctgcaagggcgtggtacagcaaccattttcccacaatgctcacaagctcctatagcttcctttcttccaccatacctctcaccagcggtgtcttcagaatgtgaaaacccaattcttcaaccctacaggatccaacaggcaatagcatcatgcatcttacctttatcacccttgtatccttcaacaaccgtcagccctattacaatcagctacctattgtgcattttgttggcacaaaaacatcaatggcacatcaactactaacaacttg

SEQ ID NO: 18400 - DNA, 444 bp, Zea mays
  Clone ID: LIB3151-027-Q1-K1-G1
cgcgccatggatcgcgccgaccccgcgcggggccgccttgccgtgctctcctcccacctccgtggtgcaggggccgaggaggcggcggggctggagaggtcgccggtatccgcgccggcgcccgggccccgcgccggcgcgcttgccgtggtggacgggaggaccgggaagcggcacgaggtcaaggtctccgaagacggcaccgtgcgcgccaccgacttcaagaagattaccactggaaaggacgacaagggtcttaagatttatgatcctggttaccttaacactgcccctgttcgctcgtccatctgctacatcgatggagatgagggaatccttcgctataggggttatccaatcgaagaattggctgaaagcagctcgtttgttgaggtggcctaccttttaatgtatgggaacttgcctactcagagtcaattggca

SEQ ID NO: 18401 - DNA, 466 bp, Zea mays
  Clone ID: LIB3151-027-Q1-K1-G10
agaaagtggaatccagtagcaacaatagagcaacaatggcgaccaagatattttccctccgtatgctccttgctctttctgcatgtgttgctaacgcgacaattttccctcaatgctcacaagctcctatagcttcccttcttcccccataccttccatcaatgatagcttcagtatgtgaaaacccagctcttcaaccctataggctccaacaagcaatcgcagcaagcaacatacctttatcacccttgtttcaacaatcgccagccctatctttggtgcagtcattggtacaaaccatcagggcacagcagctgcagcaactcgtgctacctgtgatcaaccaagtagctctggcaaacctttctccctactctcagcaacaacaatttcttccattcaaccaactgtctacattgaaccgtgctgctttattgcagcaacaactattaccattcagccagct

SEQ ID NO: 18402 - DNA, 416 bp, Zea mays
  Clone ID: LIB3151-027-Q1-K1-G11
cgggtcggccggcgcgtccgcaaatggcaccaagaaatccatcgagaggccgtcgacaggggaattaatggcgtcgtcgtgtagcagcagccaccgcgcggggatcctcgcagccgccgtcctgctctccgtgctcgcggctgccagcgccagcgccgggacctcctgcgtgccggggtgggccatcccgcacaacccgctcccgagctgccgctggtacgtgaccagccggacctgcggcatcgggccgcgcctcccgtggccggagctgaagaggagatgctgccgggagctggcggacatcccggcgtactgcccgtgcacggcgctgagcatcctcatggacggcgcgatcccgccgggcccggacgcgcagctggaggtgccgctagaggacctgccgggctgcccgcggg

SEQ ID NO: 18403 - DNA, 418 bp, Zea mays
  unsure at all n locations
  Clone ID: LIB3151-027-Q1-K1-G12
ataaccgggccggccgacgcgtacggnacgtcagcctancaattanctcatcgactccagattggagaactcgacaccatganagggcggatcgttgcccttgctggcctggcgctcgctgcgagcgccgcctccagtacaagcggcggctgtggctgccagacaccaccgtttcatctaccgcctccgttctatatgccgcctccgttctatctgccgccgcagcagcagccgcagccatggcaataccccactcaaccaccgcagctaagcccgtgccagcagttcggatcctgcggcgtcggcagcgtcggcagcccgttcctgggccagtgcgtcgagttcctgaggcaccagtgcagcccggcggcgacgccctacggctcgccacagtgccaggcgctgcagcagcagtgct

SEQ ID NO: 18404 - DNA, 463 bp, Zea mays
  Clone ID: LIB3151-027-Q1-K1-G2
aacacaccaagcgaagcgcactagcaacaacctaacaacaatggctaccaagatattagccctgcttgcgcttcttgcccttttagtgagcgcaacaaatgcgttcattattccacagtgctcacttgctcctagtgccattattccacagttcctcccaccagttacttcaatgggcttcgaacatccagccgtgcaagcctacaggctacaactagcgcttgcggcgagcgtcttacaacaaccaattgcccaattgcaacaacaatccttggcacatctaaacctacaaaccatcgcaacgcaacagcaacaacagtttctgccatcactgagccacctagccgtggtgaaccctgtcgcctacttgcaacagcagctacttgcatccaacccacttgctctggcgaacgtagctgcataccagcaacaacaacgtctgcaacagtttatgccagcgctc

SEQ ID NO: 18405 - DNA, 434 bp, Zea mays
  Clone ID: LIB3151-027-Q1-K1-G3
ctgccacctccggtgcatctcccaccgccggtccacctgccgccgccggtccacctgccaccggcggtccatgtgccgccgccggttcatctgccgccgccaccatgccactaccctactcaaccgccccggcctcagcctcatccccagccacacccatgcccgtgccaacagccgcatccaagcccgtgccagctgcagggaacctgcggcgttggcagcaccccgatcctgggccagtgcgtcgagtttctgaggcatcagtgcagcccgacggcgacgccctactgctcgcctcagtgccagtcgttgcggcagcagtgttgccagcagctcaggcaggtggagccgcagcaccggtaccaggcgatcttcggcttggtcctccagtccatcctgcagcagcagccgcaaagcggccaggtcgcggggct

SEQ ID NO: 18406 - DNA, 452 bp, Zea mays
  Clone ID: LIB3151-027-Q1-K1-G4
attagctcatctactccagattggagaactcgacaccatgaaggtgctgatcgttgcccttggtctcctggcgctcgctgcgagcgccgcctccagtacaagcggcggctgtggctgccagacaccaccgtttcatctaccgcctccgttctatatgccgcctccgttctatctgccgccgcagcagcagccgcagccatggcaataccccactcaaccaccgcagctaagcccgtgccagcagttcggatcctgcggcgtcggcagcgtcggcagcccgttcctgggccagtgcgtcgagttcctgaggcaccagtgcagcccggcggcgacgccctacggctcgccacagtgccaggcgctgcagcagcagtgctgtcaccagatcacgcaggtggagctcgttcaccggtaccaagcgacatacggtgtggtcctgcagtccttcctgc

SEQ ID NO: 18407 - DNA, 446 bp, Zea mays
  Clone ID: LIB3151-027-Q1-K1-G5
attgagaccaacaagcaacatagaaagtggaatccagtagcaacaatagagcaacaatggggaccaatatattttccctccttatgctccttgctctttctacatgtgttgctaacgcgacaattttccctcaatgctcacaagctcctatagcttccctttttcccccataccttccatcaattatagcttcagtatgtgaaaacccagctcttcaaccatataggcttcaacaagcaatcgcagcaagcaacatacctttatcgcccttgttgtgtcaacaatcgccagccctatctttggtgcagtcattggtacaaaccatcagggcacaacagctgcagcaactcgtgctacctgtgatcaaccaagtagctctggcaaacctttctccctactctccgcaacaacaatttcttccattcaaccaactgtctacactgaac

SEQ ID NO: 18408 - DNA, 396 bp, Zea mays
  Clone ID: LIB3151-027-Q1-K1-G6
gcaaaactggcaatcaaaatattttgcctccttatgctccttgctctttctgcaagtgctgctaacgcgaccaatttggtgcaatgctcacaagatccaattgcttcccttcttcccgtacctctcaccagcggtgtctttggtatgtgaaaacccaattctttaaccctactggatccaacagacaatcacagctggcatcttacctttatcacccttgtttcttcaacaatcattagccctattacatcagttacctttggtgcatttattggcacaaaacatcatgtcacaacaactacaacaacttgtgctagcaaaccttgctgcctactcttatcaacagcattttctttcattcaaccaactagctgcatttgaactctgcttcttatt

SEQ ID NO: 18409 - DNA, 426 bp, Zea mays
  unsure at all n locations
  Clone ID: LIB3151-027-Q1-K1-G7
accggnccggaanacccggggcggccgacgcgnccganaaacccaagccccaccgccgccgccaaggcgggcccgaccggcgcaacacccaccgggggcggcgccggcgggggggggggccgcnaccacagcccgccccacgagcgccgccagcagcaggaggagcagcggcagcggcacaagggcccggcccaggggcagcgcccgacgaccccagcggcggggacgcccacgcccaggggggccaagcagaagacgccaccggccgagaagcccgacccggacaaggagcccgagaggcgggccgacgcgaccaccaagccgcccgcgacagcgccggcccacaccggcaaggcggccgcgacagcagacggggagacgaccccgccgccgacgcccgcgggacagggagaggcggggaaacac

SEQ ID NO: 18410 - DNA, 459 bp, Zea mays
  Clone ID: LIB3151-027-Q1-K1-G9
catcaatcatcattcatcttattagtataggcattaaatcaaatctgcaacatcaattatgtaggtccaaaaaccatgaagctggtgcttgtggttcttgctttcattgctttagtatcaagtgtttcttgtacacagacaggcggctgcagctgtggtcaacaacaaagccatgagcagcaacatcatccacaacaacatcatccacaaaaacaacaacatcaaccaccaccacaacatcaccagcagcagcaacaccaacaacaacaagttcacatgcaaccacaaaaacatcagcaacaacaagaagttcatgttcaacaacaacaacaacaaccgcagcaccaacaacaacaacaacaacagcaccaacaacaacatcaatgtgaatgccaacaacaacatcaccaacaatcacaaggccatgttcaacaacacgaacagagccatgagcaacac

SEQ ID NO: 18411 - DNA, 439 bp, Zea mays
  unsure at all n locations
  Clone ID: LIB3151-027-Q1-K1-H1
gncagcctagcaannagcncatcgactccagaggggagaactcgacaccatgaaggggctgatgggngccctngctcggctggcgctcgctgcgagcgccgcctccagtacaagcggcggctgtggctgccagacaccaccgtttcatctaccgcctccgagctatatgccgcctccgttctatctgccgccgcagcagcagccgcagccatggcaataccccactcaaccaccgcagctaagcccgtgccagcagttcggatcctgcggcgtcggcagcgtcggcagcccgttcctgggccagtgcgtcgagttcctgaggcaccagtgcagcccggcggcgacgccctacggctcgccacaatgccaggcgctgcagcagcagggctggcaccagaacaggcagggggagccggtgcaccgggaccaggcgacaaac

SEQ ID NO: 18412 - DNA, 474 bp, Zea mays
  Clone ID: LIB3151-027-Q1-K1-H10
cggggcgaccgacgcgtccggaagaaggatgatggcaaggacgaaaagaaagatgaagacaagaaagaagcggataaacagaaggattatggcaatgctggtgatgaacggaaaaacaaagaccctggcgccgttgctaacatgtatatgcactacccgaggtccaatcatctgagcgaatacggatatgcctaccagtacccacctcagctcttcagcgacgagaacccgaatgcctgttctctgatgtgagaaagccagaaccaagtgaccttaagcgcgaaaataagaggggattgagttatcccctgattttggaggatcaggaagtttacaacttttcttttctatttctaaggttgaactttttgtctggtacaaagtgaactctgggctgctttgtggacataatattgcgtatgctactggttagaaggattttgtgttgcacctttcaccttttgcttttatttt

SEQ ID NO: 18413 - DNA, 465 bp, Zea mays
  Clone ID: LIB3151-027-Q1-K1-H11
attattgataccaactatcaacatacatatttaagtacagtagcaacatcttaccgccatttttaaccaagaggggtgccctccttaccctccttgctctttcagcaagtgttgctaccgcgactattattccacaatgctcacaacaatacctctctccggtgacagccgcgagatttgaatacccaactatacaatcctacaggctacaagaggccatcacagcaagcatcttacggtcgttagcattgactgtccaacaaccatatgccctattgcaacaaccatgcttagtgaatctatatctccaaagaatcgcaacacaacaactacaacagcagctgcttacaacaatcaatcaagtagttgcagcgaaccttgctgcttacctccagcaacaacaatttcttccattcaatcaactatctggcgtgaaccttgctgtttacttgcaggcacaacaat

SEQ ID NO: 18414 - DNA, 329 bp, Zea mays
  Clone ID: LIB3151-027-Q1-K1-H12
ggtcttcagaccattagctttatctactccagagcgcagaagaacccgatcgacaccatgggggtgttgctcgatgccctcgctctcctggctctcgctgcgagcgccacctccacgcatacaagcggcggctgcggctgccagccaccgccgccggttcatctaccgccgccggtgcatctgccacctccggttcacctgccacctccggtgcatctcccaccgccggtccacctgccgtcgccggtccacctgccaccgtcggtccatgtgccgccgccggttcatctgccgccgccaccatgccactaccctactcaaccgccccg

SEQ ID NO: 18415 - DNA, 465 bp, Zea mays
  unsure at all n locations
  Clone ID: LIB3151-027-Q1-K1-H4
gcgcttcagaccattanctttatctactccagagcgcagaagaacccgatcgacaccatgagggtggtgctcgttgccctcgctctcctggctctcgctgcgagcgccacctccacgcatacaagcggcggctgcggctgccagccaccgccgccggttcatctaccgccgccggtgcatctgccacctccggttcacctgccacctccggtgcatctcccaccgccggtccacctgccgccgccggtccacctgccaccgccggtccatgtgccgccgccggttcatctgccgccgccaccatgccactaccctactcaaccgccccggcctcagcctcatccccagccacacccatgcccgtgccaacagccgcatccaagcccgtgccagctgcagggaacctgcggcgttggcagcaccccgatcctgggccagtgcgtcgagtttctgaggcatcagtgc

SEQ ID NO: 18416 - DNA, 459 bp, Zea mays
  Clone ID: LIB3151-027-Q1-K1-H5
cgcagaacccgctcgaggagttcttcgaggtcgagcggagcaccgaggagggcaagcctcctccccactacggtcgcagctggaaggcttctgaactgcgactaaaatcttgggatgaccttcagaaattgtggtatgttcttctaaaggaaaagaacatgctaatgacacagcgtcaaatgctgcattcagagagcatgaggttcccaaatccagaacgaatttccaaggtaaagaaatcaatgtgccggataaagcatgtcttgactgagagggctatagcggagcccgatccaaggagatcttcggaatgaagcggatgataaatgccctgtgattcactcacaggcattctcccttgggacttttgatggtacttattagaaagatctgctgccttctgttgtatctttatcccataagaactgtgagaccaaatcttttcgatgcccatggtat

SEQ ID NO: 18417 - DNA, 423 bp, Zea mays
  Clone ID: LIB3151-027-Q1-K1-H6
accattacctttatctactccagagcgcagaagaacccgatcgacaccatgagggtgggggtggttgccctcgctgtcgtggctctcgctgcgagcgccacctccacgcatacaagcggcggctgcggctgccagccaccgccgccggttcatctaccgccgccggtgcatctgccacctccggttcacctgccaccttcggtgcatctcccaccgccggtccacctgccgccgccggtccacctgccaccgccggtccatgtgccgccgccgggtcatctgccgccgccaccatgccactaccctactcaaccgccccggcctcagtctcatccccagccacacccatgcccgtgccaacagccgcattcaagcccgtgctagctgcagggaacctgcggcggtggcagcacctcgatcctg

SEQ ID NO: 18418 - DNA, 459 bp, Zea mays
  Clone ID: LIB3151-027-Q1-K1-H7
acggaccaactagcaacatataaagcacaatagtgtaccaacaatggcagtcaaaatatttgcgttccttatgctccttgggctgtctgcaagtgttgctaccgcaaccattttcccacaatgctcacaagctcctatagcttcccttcttcccccatacctctcaccagcggtgtcttcaatgtgtgaaaacccaattgttcaaccctacaggatccaacaggcaatcgcaacaggcatcttaccattatcacccttgttccttcaacaaccgtcagccctattacagcatttacctttggtccatttgtgtggcacaaaacatcatgtcacaacaactacaacaacttgtgctagcaaaccttgctgcatactcttagcaacatcagtttcttccattcaaccaactggctgcattgaactctgttgcttatttgtaacaacaattaccattcatcc

SEQ ID NO: 18419 - DNA, 462 bp, Zea mays
  Clone ID: LIB3151-027-Q1-K1-H8
attgagaccaacaagcaacatagaaagtggaatccagtagcaacaatagagcaacaatggcgaccaagatattttccctccttatgctccttgctctttctgcatgtgttgctaacgcgacaattttccctcaatgctcacaagctcctatagcttcccttcttcccccataccttccatcaatgatagcttcagtatgtgaaaacccagctcttcaaccctataggctccaacaagcaatcgcagcaagcaacatacctttatcacccttgtttcaacaatcgccagccctatctttggtgcagtcattggtacaaaccatcagggcacagcagctgcagcaactcgtgctacctgtgatcaaccaagtagctctggcaaacctttctccctactctcagcaacaacaatttcttccattcaaccaactgtctacattgaaccgtgctgcttatttgcagc

SEQ ID NO: 18420 - DNA, 398 bp, Zea mays
  unsure at all n locations
  Clone ID: LIB3151-027-Q1-K1-H9
cggggcggccgcacgcgtgcgctcatgtgcgtacacggtctccctcttcctgtctttagtagagtgagagtgaggcagcgagtgggatacaaggggaaatggggaagggagcgcaagggagcgatgcggcggcggcgggcggctaggtggaggagaacatggcggcgtggctggttgccaagaacaccctcaagatcatgcccttcaagctcccgcccgtcggcccttatgatgtccgcgtgcgcatgaaggcagtggggatttgcggcagcgatgtgcactacctaagggagatgcgcatcgcgcacttcgtggtgaaggagccgatggtgatcgggcacgagtgcgcgggcgtggtcnatgaggttggcgccggcgtgacgcacctgtccgtgggc

SEQ ID NO: 18421 - DNA, 58 bp, Zea mays
  Clone ID: LIB3151-028-Q1-K1-A1
attcataatacctagagagcatcctacaatataacaccataaatacgctcataaacct

SEQ ID NO: 18422 - DNA, 216 bp, Zea mays
  Clone ID: LIB3151-028-Q1-K1-A10
ggtcttcagaccattagctttatctactccagagcgcagaagaacccgatcgacaccatgagggtgttgctcgttgccctcgctctcctggctctcgctgggagcgccacctccacgcatacaagcggcggctgctgctgccagccaccgccgccgggtcatctaccgtcgtcggtgcatctgccaccttcggttcaactgccacctcgggtgcat

SEQ ID NO: 18423 - DNA, 120 bp, Zea mays
  Clone ID: LIB3151-028-Q1-K1-A11
gttcattcaggtcatagcgacactgacactgccaaccatggagatgctgcacatgggactcttcatcctcggtcaattactaaactagctagctagccgcgcctttactacatcacatag

SEQ ID NO: 18424 - DNA, 409 bp, Zea mays
  Clone ID: LIB3151-028-Q1-K1-A12
cgcatccaagcccgtgccagctgcagggaacctgcggcgttggcagcaccccgatcctgggccagtgcgtcgagttcctgaggcatcagtgcagcccgacggcgacgccctactgctcgcctcagtgccagtcgttgcggcagcagtgttgccagcagctcaggcaggtggagccgcagcaccggtaccaggcgatcttcggcttggtcctccagtccatcctgcagcagcagccgcaaagcggccaggtcgcggggctgttggcggcgcatatagcgcagcaactgacggcgatgtgcggcctgcagcagccgactccatgcccctacgctgctgccggcggtgtcctccactgaagaaactatgtgcttgagtatagccgctggctagctagctatgtgagtcattt

SEQ ID NO: 18425 - DNA, 388 bp, Zea mays
  Clone ID: LIB3151-028-Q1-K1-B10
atccagatcagcaaagcggcagtgcgtagagaggatcgtcgaacagaacagcatgaagatggtcatcgttctcgtcgtgtgcctggctctgtcagctgccagcgcctctgcaatgcagatgccctgcccctgcgcggggctgcagggcttgtacggcgctggcgccggcctgacgacgatgatgggcgccggcgggctgtacccctacgcggagtacctgaggcagccgcagtgcagcccgctggcggcggcgccctactacgccgggtgtgggcagacgagcgccatgtaccagccgctccggcaacagtgctgccagcagcagatgaggatgatggacgtgcagtccgtcgcgcagcagctgcagatgatgatgcagcttgagcgt

SEQ ID NO: 18426 - DNA, 410 bp, Zea mays
  Clone ID: LIB3151-028-Q1-K1-B11
ctgggtcttcagaccattagctttatctactccagagcgcagaagaacccgatcgacaccatgagggtgttgctcgttgccctcgctctcctggctctagctgcgagcgccacctctacgcatacaagcggcggctgcggctgccagccaccgacgccggttcatctaccgccgccggtgcatctgccacctccggttcacctgccaccttcggtgcatttcccaccgacggtccacctgccggcgccggtccacctgtcaccgccggtccatgtgccgacgccggttcatctgccggcggcactcatgccactaccctactgaaccgtcccggcctcagcctgatgcccagccacacacatgcccgtgccaacagccgaatccaagcccgtgccagctgcagggaacct

SEQ ID NO: 18427 - DNA, 412 bp, Zea mays
  Clone ID: LIB3151-028-Q1-K1-B12
gcccccaaaaccttcccagaaaggcgacggagtcaggttcgaatcgaaatcggggtcaccgcggcggcggcggcggcggcgggtctactcatcagagactacagagcagggggtctcacgctccggcggcgggacgatggccatggcgccgtcctcctcttcctccggtggcggcggcggcgacggcgccaacgccgccgacgcgatggctctcgtgcaggggtacacggccgaggagctcgccatcgcgggggagttcctcaccacctggctccccttcctctctgccggcctctgtccctcctgcgcctcctcgctccgcggccgcgtcgactccctgatcacgcgaggccgcgcagctgaagaatcgccgccggtcgatcagattgagccgtcagggtgggactcggat

SEQ ID NO: 18428 - DNA, 406 bp, Zea mays
  Clone ID: LIB3151-028-Q1-K1-B9
ccccgtcatcgatctcgtttcaaatccatccatcctcgtttcctccgtcccgcaccatctcaaccccatggccaagatcaagatcgggatcaatgggttcggcaggatcggaaggctggtggccagggtggccctgcagagtgacgatgtcgagctcgtcgccgtgaacgaccccttcatcagcaccgactacatgacctacatgttcaagtacgacactgtgcacggacagtggaagcaccatgaagtcaaggtgaaggactccaaaacccttctctttggtgagaaggaggttgctgtgtttggctgcaggaaccctgaggagatcccgtggggttcggttggtgctgaatatgttgttgagtctactggtgttttcactgaccaggagaaggctgcagctcac

SEQ ID NO: 18429 - DNA, 363 bp, Zea mays
  Clone ID: LIB3151-028-Q1-K1-C10
gaagccattccctcttcaagaggggatcatcagattgggcttattattccttattactccaggcaaggatcggagttgctctgaattgactgaaccatggcggcgacaatggcagtgacgacgatggtgacgaggagcaaggagagctggtcgtcattgcaggtcccggcggtggcattcccttggaagccacgaggtggcaagaccggcggcctcgagttccctcgccgggcgatgttcgccagcgtcggcctcaacgtgtgcccgggcgttccagcggtgcgcgacccgcgggagcccgatcccaatgtcgtgcgggcggccgacaactgcgacattgcgcgccaacttggcgccgtcgat

SEQ ID NO: 18430 - DNA, 376 bp, Zea mays
  Clone ID: LIB3151-028-Q1-K1-C11
cacaaacgccggcgcaaactctcgcccgagcccgacagatcttcaattccccattccgcccaccgatcgaccttcacgccagtctcggtctcttccgaaggcgtcgcgcgcggttgtttgagaggagaggaggaagatgagggagtgcatctccgtccacatcgggcaggccggcatccaagtcggcaacgcgtgctgggaactttactgcctcgagcacggcatccagcctgatggccaagtgcctggagataagaccgcgggacatcacgatgatgccttcagcaccttcttcagccagactggtgctgggaagcacgttgcccgtgcaatcttcgttgatctagaacccactgtgatcgatgaggtgcgcact

SEQ ID NO: 18431 - DNA, 363 bp, Zea mays
  Clone ID: LIB3151-028-Q1-K1-C12
cggaatgggagcaggccagcggcggcaggagggacgaggatctccgcccgctctcacctgctgcgcgacgctggtgacgaggctgcgatgcgtgagcatgacgcccttgggcatcccggtggtgccggaggagtagggcagcgcgacgacgtcgtcggggccgacctcctcgtcggcggcgagcggctcggcggcgtccaccagggcccggagctccaggcacccgtcgaaggcgccgtcgacggtgaccaccggcacgccgcgctcggcggcgaacccgcgcaccttgtcgacggcgcatgcctcggtgacgaccaccctgacccccgccgcggccgcctggcggtggatctcgtgcggggt

SEQ ID NO: 18432 - DNA, 399 bp, Zea mays
  Clone ID: LIB3151-028-Q1-K1-C9
cgtacacggtctccctcttcctgtcagtagtagagtgagagtgaggcagcgagtgggagacaaggggaaatggggaagggagcgcaagggagcgatgcggcggcggcgggcggcgaggtggaggagaacatggcggcgtggctggttgccaagaacaccctcaagatcatgcccttcaagctcccgcccgtcggcccttatgatgtccgcgtgcgcatgaaggcagtggggatttgcggcagcgatgtgcactacctaagggagatgcgcatcgcgcacttcgtggtgaaggagccgatggtgatcgggcacgagtgcgcgggcgtggtcgaggaggtgggcgccggcgtgacgcacctgtccgtgggcgaccgcgtggcgctggagccgggcgtcagc

SEQ ID NO: 18433 - DNA, 372 bp, Zea mays
  Clone ID: LIB3151-028-Q1-K1-D10
ggtcttcagaccattagctttatctactccagagcgcagaagaacccgatcgacaccatgagggtgttgctcgttgccctcgctctcctggctctcgctgcgagcgccacctccacgcatacaagcggcggctgcggctgccagccaccgccgccggttcatctaccgccgccggtgcatctgccacctccggttcacctgccacctccggtgcatctcccaccgccggtccacctgccgccgccggtccacctgccaccgccggtccatgtgccgccgccggttcatctgccgccgccaccatgccactaccctactcaaccggcccggcctcagcctcatccccagccacacccatgcccgtgccaacag

SEQ ID NO: 18434 - DNA, 383 bp, Zea mays
  Clone ID: LIB3151-028-Q1-K1-D11
cattagctttatctactccagagcgcagaagaacccgatcgacaccatgagggtgttgctcgttgccctcgctctcctggctctcgctgcgagcgccacctccacgcatacaagcggcggctgcggctgccagccaccgccgccggttcatctaccgccgccggtgcatctgccacctccggttcacctgccacctccggtgcatctcccaccgccggtccacctgccgccgccggtccacctgccaccgccggtccatgtgccgccgccggttcatctgccgccgccaccatgccactaccctactcaaccgccccggcctcagcctcatccccagccacacccatgcccgtgccaacagccgcatccaagcccgtgccagc

SEQ ID NO: 18435 - DNA, 424 bp, Zea mays
  Clone ID: LIB3151-028-Q1-K1-D12
agaccattagctttatctactccagagcgcagaagaacccgatcgacaccatgagggtgttgctcgttgccctcgctctcctggctctcgctgcgagcgccacctccacgcatacaagcggcggctgcggctgccagccaccgccgccggttcatctaccgccgccggtgcatctgccacctccggttcacctgccacctccggtgcatctcccaccgccggtccacctgccgccgccggtccacctgccaccgccggtccatgtgccgccgccggttcatctgccgccgccaccatgccactaccctactcaaccgccccggcctcagcctcatccccagccacacccatgcccgtgccaacagccgcatccaagcccgtgccagctgcagggaacctgcggcgttggcagcaccccgatcct

SEQ ID NO: 18436 - DNA, 372 bp, Zea mays
  Clone ID: LIB3151-028-Q1-K1-D9
gggtcttcagaccattagctttatctactccagagcgcagaagaacccgatcgacaccatgagggtgttgctcgttgccctcgctctcctggctctcgctgcgagcgccacctccacgcatacaagcggcggctgcggctgccagccaccgccgccggttcatctaccgccgccggtgcatctgccacctccggttcacctgccacctccggtgcatctcccaccgccggtccacctgccgccgccggtccacctgccaccgccggtccatgtgccgccgccggttcatctgccgccgccaccatgccactaccctactcaaccgccccggcctcagcctcatccccagccacacccatgcccgtgccaaca

SEQ ID NO: 18437 - DNA, 421 bp, Zea mays
  Clone ID: LIB3151-028-Q1-K1-E10
cagaaacacaccaagcgaagcgcactagcaacaacctaacaacaatggctaccaagatattagccctccttgcgcttcttgcccttttagtgagcgcaacaaatgcgttcattattccacagtgctcacttgctcctagtgccattattccacagttcctcccaccagttacttcaatgggcttcgaacatccagccgtgcaagcctacaggctacaactagcgcttgcggcgagcgtcttacaacaaccaattgcccaattgcaacaacaatccttggcacatctaaacctacaaaccatcgcaacgcaacagcaacaacagtttctgccatcactgagccacctagccgtggtgaaccctgtcgcctacttgcaacagcagctacttgcatccaacccacttgctctggcgaacgtagc

SEQ ID NO: 18438 - DNA, 416 bp, Zea mays
  Clone ID: LIB3151-028-Q1-K1-E11
atttagaccaactagcaacatagaaagcacaatagtgtaccaacaatggcagccaaaatattttgcctccttatgctccttggtatttctgcaagtgctgctacggcgaccattttcccgcaatgctcacaagctcctatagcttcccttcttcccccgtacctctcaccagcggtgtcttcggtatgtgaaaacccaattcttcaaccctacaggatccaacaggcaatcgcagctggcatcttacctttatcacccttgttcctccaacaatcatcagccctattacagcagttacctttggtgcatttattggcacaaaacattagggcacaacaactacaacaacttgtgctatcaaaccttgcttgctactcttaacaacagcagtttcttccattcaaccaactagctgc

SEQ ID NO: 18439 - DNA, 322 bp, Zea mays
  Clone ID: LIB3151-028-Q1-K1-E12
cacacgcgtacgtagaccaactgctgaatgcacaacaaaccgcacaacaacccgagggagacgatgagggcgctggttgttgtggttgttgttgtgagtgtcacttcgagccctacatgcaggcattcgagctgccagtgacggtggcaggcacatctaccggctcatgtacatccgccagctcatgtgcaacttccagctcaggtgcctcttccagcgcatgtccaaccgccggcgcacgtgcagctgccagtgcacgtgcatgtgccggtgcatgtgcatctgccggctcatctatggcagtaaccatgtcaatagccta

SEQ ID NO: 18440 - DNA, 411 bp, Zea mays
  Clone ID: LIB3151-028-Q1-K1-F10
attcagaaacacaccaagcgaagcgcactagcaacaacctaacaacaatggctaccaagatattatccctccttgcgcttcttgcgctttttgcgagcgcaacaaatgcgtccattattccacaatgctcacttgctcctagttccattattccacagttactcccaccagttacttcaatggccttcgaacacccagctgtgcaagcctatacgctacaacaagcgattgcggtgagcgtcttacaacaaccaattgcccaattgcaacaacaatccttgtcacatctaacaatacaaaccatcgcaacgcaacagcaacaacagttactaccagcactgagccacctagccatggtgaaccctgacgcctacttgcaacagcagctgcttgcattcaactcacttgctc

SEQ ID NO: 18441 - DNA, 403 bp, Zea mays
  Clone ID: LIB3151-028-Q1-K1-F11
gaaagcacaatagtgtaccaacaatggcagccaaaatattttgcctccttatgctccttggtctttctgcaagtgctgctacggcgaccattttcccacaatgctcacaagctcctatagcttcccttcttcccccgtacctctcaccagcggtgtcttcggtatgtgaaaacccaattcttcaaccctataggatccaacaggcaatcgcagctggcatcttacctttatcacccttgttcctccaacaatcatcagccctattacagcagttacctttggtgcatttattggcacaaaacatcagggcacaacaactacaacaacttgtgctagcaaaccttgctgcctactctcagcaacaacagtttcttccattcaaccaactagctgcattgaactc

SEQ ID NO: 18442 - DNA, 424 bp, Zea mays
  Clone ID: LIB3151-028-Q1-K1-F12
cccacgcgtccgcccacgcgtccgcccacgcgtccgaacaggcaatcgcagctggcatcttacctttatcacccttgttcctccaacaatcatcagccctattacagcagttacctttggtgcatttattggcacaaaacatcagggcacaacaactacaacaacttgtgctagcaaaccttgctgcctactctcagcaacaacagtttcttccattcaaccaactagctgcattgaactctgcttcttatttgcaacaacaacaactaccattcagccagctatctgctgcctacccccagcaatttcttccattcaaccaactgacagctttgaactctcctgcttatttacagcagcaacaactactaccattcagccagctagctggtgtgagccctgctaccttcttgacacaaccaca

SEQ ID NO: 18443 - DNA, 392 bp, Zea mays
  Clone ID: LIB3151-028-Q1-K1-F9
ctaaatctcgagcagcacaccatgcgtttttcactagcaacaacctaacaacaatggctgccaacatattaaccctccttgcgcttcttgccctttgaatgagcgcaacaaatgcgtccattattccacaccgctcacttgctgctagtgccattatgccacagttcctgccaccacatacttcaatgggcttcgaacatgcagccgtgcaagcctacatgctacaactagcgcttgcggcgagcgtattacaacaaccaattgcccaattgcaacaacaatgcttggcacatataaacctacaaaccatcgcaacgcaacagcaacaacagtttctgccatcactgagccacctagccgtggtgaacccctgtccctacttgcaacagcag

SEQ ID NO: 18444 - DNA, 247 bp, Zea mays
  Clone ID: LIB3151-028-Q1-K1-G10
ctagcaacatagaaagcacaatagtgtaccaacaatggcagccaaaatattttgccttcttatgctccttggtctttctgcaagtgctgctacggcgaccattttcccacaatgctcacaagcttctatagcttcccttcatcccgcgtacctatcaccagcggcgtgtgctgtctgtgaatactcaatactctaaccctatacgatccatcacgcactcgcaactggcatcatacctctatgatcc

SEQ ID NO: 18445 - DNA, 412 bp, Zea mays
  Clone ID: LIB3151-028-Q1-K1-G11
caacaacaaagccatgagcagcaacatcatccacaacaacatcatccacaaaaacaacaacatcaaccaccaccacaacatcaccagcagcagcaacaccaacaacaacaagttcacatgcaaccacaaaaacatcagcaacaacaagaagttcatgttcaacaacaacaacaacaaccgcagcaccaacaacaacaacaacaacagcaccaacaacaacatcaatgtgaaggccaacaacaacatcaccaacaatcacaaggccatgtgcaacaacacgaacagagccatgagcaacaccaaggacagagccatgagcaacaacatcaacaacaattccagggtcatgacaagcagcaacaaccacaacagcctcagcaatatcagcaggggccagaaaaatcacaacagc

SEQ ID NO: 18446 - DNA, 393 bp, Zea mays
  unsure at all n locations
  Clone ID: LIB3151-028-Q1-K1-G12
attttgagcattcagaaacacaccaagcgaagcgcactagcaacgacctaacaacaatggctaccaagatattagccctccttgcgcttcttgccctttttgtgagcgcaacaaatgcgttcattattccacaatgctcacttgctcctagtgccattattccacagttcctcccaccagttacttcaatgggcttcgaacacctagctgtgcaagccaacatgcaacaacaagcgcttgcggcgagcgtcttacaacaaccaattgcccaattgcaacaacaatccttgccacatctaacaatacaagccatcacaacgcaacagcaacaacagttcctaccagcactgagccacctagccatggtgaaccctgccgnctacttgcaagagc

SEQ ID NO: 18447 - DNA, 394 bp, Zea mays
  Clone ID: LIB3151-028-Q1-K1-G9
gaccaactagcaacatagaaagcacaatagtgtaccaacaatggcagccaaaatattttgcctccttatgctccttggtctttctgcaagtgctgctacggcgaccattttcccacaatgctcacaagctcctatagcttcccttcttcccccgtacctctcaccagcggcgtcttcggtatgtgaaaacccaattcttcaaccctataggatccaacaggcaatcgcagctggcatcttacctttatcacccttgttcctccaacaatcatcagccctattacagcagttacctttggtgcatttattggcacaaaacatcagggcacaacaactacaacaacttgtgctagcaaaccttgctgcctactctcagcaacaacagttttcttca

SEQ ID NO: 18448 - DNA, 401 bp, Zea mays
  Clone ID: LIB3151-028-Q1-K1-H11
agcggcagtgcgtagagaggatcgtcgaacagaacagcatgaagatggtcatcgttctcgtcgtgtgcctggctctgtcagctgccagcgcctctgcaatgcagatgccctgcccctgcgcggggctgcagggcttgtacggcgctggcgccggcctgacgacgatgatgggcgccggcgggctgtacccctacgcggagtacctgaggcagccgcagtgcagcccgctggcggcggcgccctactacgccgggtgtgggcagacgagcgccatgtaccagccgctccggcaacagtgctgccagcagcagatgaggatgatggacgtgcagtccgtcgcgcagcagctgcagatgatgatgcagcttgagcgtgccgctgccgccagcagcagcctgtac

SEQ ID NO: 18449 - DNA, 223 bp, Zea mays
  Clone ID: LIB3151-028-Q1-K1-H9
atcgacgtcagcctaagaggttcgtcatacactacagattggagaacgcgacaccacgaaggtgctgatcggctctgttactttcctggccctctctaatagcgctgccttgagtatgagcggcggttgagggtttgtaccacgatcgcttcatctataccaccattattatctgccgcctgctgtatatctgcccggagatcatgaggcagacgcattgcat

SEQ ID NO: 18450 - DNA, 316 bp, Zea mays
  Clone ID: LIB3151-029-Q1-K1-A1
ggtcttcagaccattagctatatctactccagagcgcagaagaacccgatcgacaccatgagggtgttgctcgttgccctcgctctcctggctctcgctgggagcgccacctacacgcatacaagcggcggctgcggctgccaaccaccgtcgccggttcatctaccgacgccggtgcatctgccaccttcggttcagctgccaacttcggtgcatctaccaccgccggtccacctgacgccgccggaccacctgtcaccgtcggtccatgtgccgccgtcggtcatctgccgccgcaccatgccactaccctact

SEQ ID NO: 18451 - DNA, 375 bp, Zea mays
  Clone ID: LIB3151-029-Q1-K1-A10
agcggcagtgcgtagagaggatcgtcgaacagaacagcatgaagatggtcatcgttcgggtcgtgtgcctggctctgtcagctgccagcgcctctgcaatgcagatgccctgcccctgcgcggggctgcagggcttgtacggcgctggcgccggcctgacgacgatgatgggcgccggcgggctgtacccctacgcggagtacctgaggcagccgcagtgcagcccgctggcggcggcgccctactacgccgggtgtgggcagacgagcgccatgtaccagccgctccggcaacagtgctgccagcagcaaatgaggatgatggacgtgcagtccgtcgcgcagcagctgcagatgatgatgcagcttgagcgtg

SEQ ID NO: 18452 - DNA, 55 bp, Zea mays
  Clone ID: LIB3151-029-Q1-K1-A11
gttcattcagattatctctcacacctacacagccaaccataaccatgcctgccac

SEQ ID NO: 18453 - DNA, 134 bp, Zea mays
  Clone ID: LIB3151-029-Q1-K1-A2
ggtcaagaaaccaataactacatctacctcaaagcgcagaaaaaaccgatcgacaccaggggggtgttgctcgtaggcatcattctcctggttcttgttaggaacgcgatcataacgtattcaaacggccactg

SEQ ID NO: 18454 - DNA, 350 bp, Zea mays
  Clone ID: LIB3151-029-Q1-K1-A3
cgaagccattccctcttcaagaggggatcatcagattgggcttattattccttattactccaggcaaggatcggagttgctctgaattgactgaaccatggcggcgacaatggcagtgacgacgatggtgactaggagcaaggagagctggtcttcattgcaagtcccggcggtggcattcccttggaagccacgaggtggcaagaccggcggactcaagttccctcgccgggcgatgttcgccagcgtctgcctcaacgtgtgctcgggcgtcccagctgggcgcgacccgagagagcccgatcccaatgtcgtccgggctgcctacaactgcgacatctcgcgccagc

SEQ ID NO: 18455 - DNA, 451 bp, Zea mays
  Clone ID: LIB3151-029-Q1-K1-A4
atttagaccaactagcaacatagaaagcacaatagtgtaccaacaatggcagccaaaatattttgcctccttatgctccttggtatttctgcaagtgctgctacggcgaccattttcccgcaatgctcacaagctcctatagcttcccttcttcccccgtacctctcaccagcggtgtcttcggtatgtgaaaacccaattcttcaaccctacaggatccaacaggcaatcgcagctggcatcttacctttatcacccttgttcctccaacaatcatcagccctattacagcagttacctttggtgcatttattggcacaaaacatcagggcacaacaactacaacaacttgtgctagcaaaccttgctgcctactctcagcaacagcagtttcttccattcaaccaactagctgcattgaactctgcttcttatttgcaacaacaacaac

SEQ ID NO: 18456 - DNA, 366 bp, Zea mays
  unsure at all n locations
  Clone ID: LIB3151-029-Q1-K1-A5
cagaccattagctttatctactccagagcgcagaagaacccgatcgacaccatgagggtgttgctcgttgccctcgctctcctggctctcgctgcgagcgccacctccacgcatacaagcggcggctgcggctgccagccaccgccgccggttcatctaccgccgccggtgcatctgccacctgcggttcacctgccacctccggtgcatctcccaccgccggtccacctgccgccgccggtccacctgccaccgccggtgcatgtgccgccgccggttcatctgccgccgccaccatgccactaccctactcaaccgccccggactcagcctcatcncccagcacactcatgcccgtgccaacag

SEQ ID NO: 18457 - DNA, 347 bp, Zea mays
  Clone ID: LIB3151-029-Q1-K1-A6
attcatattagttgtataggcaccaaatcaaatctgcaacattaattatctaactgcatataccatgttagccgtcgctggtggttctcgctttcattgctttagtatcaagtgtttcttgtactcagacaggcgtttgctgctgtggttaacaactaagccatgagcagcagctttatccactgcaacatacattcacaattacaacatcattgaccaccacggcaacattacctgcagtagtaactctatcaacatcaggtttacatgcatcctcagaaacatcagcaacagcaacattttgatgttcaattgcaacaacacctacctacttgttttgtcaaacc

SEQ ID NO: 18458 - DNA, 231 bp, Zea mays
  Clone ID: LIB3151-029-Q1-K1-A7
gtcgagtttctgaggcatcagtgcagaccgactgcgacgccctactgctcgactaagtggcagtcgttgccgcagcagtgtttccagcagatcaggcacgtggagccgaagcaccggtaccaggcgatcttctgcttggtcctgcagtccatcctgcatcagcagccgcaaagcgtccaagtcgcagcgctgttggcggcacaaatagcgcatcaactgacggcgatgtgc

SEQ ID NO: 18459 - DNA, 246 bp, Zea mays
  Clone ID: LIB3151-029-Q1-K1-A8
gcgtacgaccccgattctgggccagtgcgtcaagtttctgaagcatcagtgcagcccgacggcgacgccctactgatgcgctcaggtccagtcgcatgtgctgctagggtgaccatagttcaggcatgctgacgacctgctatagctccaggcgatcttcggcttggttctccagtccatcctgcagcatcagacgacaaacggccaggtcgctgcgctgttggccgcgcaaatagcgcagcaact

SEQ ID NO: 18460 - DNA, 358 bp, Zea mays
  Clone ID: LIB3151-029-Q1-K1-A9
attttgagcattcagaaacacaccaagcgaagcgcactagcaacgacctaacaacaatggctaccaagatattagccctccttgcgcttcttgccctttttgtgagcgcaacaaatgcgttcattattccacaatgctcacttgctcctagagccattattccacagttcctcccaccagttacttcaatgggcttcgaacacctagctgtgcaagccaacatgcaacaacaagcgcttgcggcgagcgtcttacaacaaccaattgcccaattgcaacaacaatccttgccacatgtaacaatacaagccatgacaacgcaacatgaacaacaagtactaccagcactgagccacct

SEQ ID NO: 18461 - DNA, 387 bp, Zea mays
  Clone ID: LIB3151-029-Q1-K1-B1
gaccattagctttatctactccagagcgcagaagaacccgatcgacaccatgagggtgttgctcgttgccctcgctctcctggctctcgctgcgagcgccacctccacgcatacaagcggcggctgccgctgccagccaccgacgccggttcatctaccgccgccggtgcatctgccacctgcggttcacctgccacctccggtgcatctcccaccgacggtccacctgacgtcgccggtccacctgccaccgccggtccatgtgccgacgacggttcatctgccgccgccaccatgccactaccctactcaaccgccccgggctcagcctaatccacagccacacccatgcccgtgccaacagacgcatccaagcccgtgccagct

SEQ ID NO: 18462 - DNA, 363 bp, Zea mays; identical to SEQ ID NO: 17783
  Clone ID: LIB3151-029-Q1-K1-B10

SEQ ID NO: 18463 - DNA, 355 bp, Zea mays
  Clone ID: LIB3151-029-Q1-K1-B11
ccccgtcatcgatctcgtttcaaattcatccatcctagcgtactcagccccgcaccatctcaaccggatggccaagatcaagatcggtatcaatgctctcggcaggatcggaaggctggtggtcacagtggccctgcagagtgaccatctccagctcgtggtcattaaccaccccttgatcatcacccactacatgacctacatgttcaagtacgacactgtgcacggacagtgcaagcaccatgaagtcaaggtgaaggactccaaaacccttttctttggtgagaaggaggttgctgggtttggctgcaggaaccttgatgagatcccgtggggttcggttggtgctgaatat

SEQ ID NO: 18464 - DNA, 162 bp, Zea mays
  unsure at all n locations
  Clone ID: LIB3151-029-Q1-K1-B12
ggaaggaangggcgcgccgacccacgcctccgggccataagaccataaccgaaaggcactccagagcgcgtcgaaaccaacacgacgccaagggggattggtctggtgccgtgcctctctctgtcagatgccagagcctccagcttgcaacataccctgccg

SEQ ID NO: 18465 - DNA, 447 bp, Zea mays
  Clone ID: LIB3151-029-Q1-K1-B2
cagcaccccgatcctgggccagtgcgtcgagtttctgaggcatcagtgcagcccgacggcgacgccctactgctcgcctcagtgccagtcgttgcggcagcagtgttgccagcagctcaggcaggtggagccgcagcaccggtaccaggcgatcttcggcttggtcctccagtccatcctgcagcagcagccgcaaagcggccaggtcgcggggctgttggcggcgcagatagcgcagcaactgacggcgatgtgcggcctgcagcagccgactccatgcccctacgctgctgccggcggtgtcccccactgaagaaactatgtgctgtagtatagccgctggctagctagctagttgagtcatttagcggcgatgattgagtaataatgtgtcacgcatcaccatgggtggcagtgtcagtgtgagcaatgacctgaatgaacaat

SEQ ID NO: 18466 - DNA, 353 bp, Zea mays
  Clone ID: LIB3151-029-Q1-K1-B3
aagcaacataaaacggggcctacacgtgcagcaattgagcaacaatggcggccaagatatgacccatctcttatgctccttgctctctctgcatgcgtggctaacgcgaccattttttctcactactcacaggctactatagctgccattctatcttcatcccttccatcaatgaccgcttgagtatgcgaaaacccagccctcaaaccctacaggctccaacaggccatagcaacaagcaactgacctttatcacccgtgtgctttcaacaattgccagccctatctctggtgcaggcattggtacaaactatcaaggcacaacagctgcagctactcgtgctaccagtgat

SEQ ID NO: 18467 - DNA, 449 bp, Zea mays
  Clone ID: LIB3151-029-Q1-K1-B4
cagcattcagaaacacaccaagcgaagcgcactaacaacaacctaacaacaatgggtaccaagatatttacccttcttgcgcttcttggccttttagtgagcgcaacaaaagcgttcattattccacagagctcacttgctcctagtgccattattccacagtttctcccaccagttacttcaatgggcttcgaacatacagccgtgcaagcctacaggctacaactagcgcttgcggcgagcgtcttacaacaaccaattgcccaattgcaacaacaatccttggcacatctaaacctacaaaccatcgcaacgcaacagcaacaacagtttctgccatcactgagccacctagccgtggtgaaccctgtcgactacttgcaacagcagctacttgcatccaacccacttgctctggcgaacgtagctgcataccagcaacaacaacg

SEQ ID NO: 18468 - DNA, 370 bp, Zea mays
  Clone ID: LIB3151-029-Q1-K1-B5
cccacgcgtccgctcgctagctctgcatcatccgtcgatctggtgagccagcgagcgagtgagacacctatcttgactgaccggccgccggcaggccgagaacgaagcgcgtgtttgtgcatgagccatggcggaccatcagcagccacagcagtagccgtaggagatggacgttgatcgtaccggtggcctcgaactgcctccatggttgcgcttgcacccgagcgactttgagattgtcaacgactacctcacgaagatggtgcacgacagggactacagctgcattgccatcgcggacgccgacctaaacaagaccgagccatgggacctcccgcaagttgtaaatatgggcgagaatgagtggtac

SEQ ID NO: 18469 - DNA, 401 bp, Zea mays
  Clone ID: LIB3151-029-Q1-K1-B6
caacaagcaacacaaaaagagctatccaaccgcatcaatacaccaacaccggccactcacgatcaccctcctccttatgcttcttgctcttcctacatgtgttgctaacgcgacaatcgcccctcaatgctcacaagctgctattgcttgcctttttccccgataccttgcatcaattatagcctcagtatgcgataacccagctcttcaaccctataggctgcaacaagctaccgcaccaagcaacatacctgcatcgaccttggtgcgtcaacaatcgccagccctatcttgcgcgcaggcattggtacaaaccatcatgccacaacagctgcagcaactcgtgctacctgtgatcaatcaagtaggtctggcaaacccttatccctactctgcgcaac

SEQ ID NO: 18470 - DNA, 381 bp, Zea mays
  Clone ID: LIB3151-029-Q1-K1-B7
cagcaagcaacacaaaaagaggtatccaaccgcatcaatacagcaacacaggagatcgagagcactttcctccgtatgcttcttgctgtgtgtacatgtgttgctaacgcgacaatcgctgcttcaatgctcacaagctggctactgcttgcgtttttccacgataccttgcatcaattatagcttcagtatgtgaaaacccagctcttcaacgcatataggctgcaacaggcaattgcagcaagcaacatacactcatcgaccttggccgtcgacaatctccagccctatctttggtgcaggcattgctacaagccataatggcgcaacagctgcagcaactcgtgctacctgtgatcaatcaagtgggtctggcaaacc

SEQ ID NO: 18471 - DNA, 421 bp, Zea mays
  Clone ID: LIB3151-029-Q1-K1-B8
ggaaggaatgggtggaccgacgcgtgcgtacgcacaccaagcgaagcgcactagcatcgacctaacaacattggctaccaagatattcgccgtgcttgcgcttcttgccctttttgggagcgcaacgaatgcgttcattattccacaatgctcacttgcgtcctagtgccattattgcacagattctcccaccagtatacttcaatgggcttagaacacctagctgagcaagccaacatgcaacaacaagcgcttgcagcgagcgtcttacaacaaccacatgcccaaatggaacaacaatccttgccacatttaacacttctagccatcacaacgcttcagacacaacagtttctaccagcactgacctaactaaccatggtgaaccctgccaactacttgcaagagcagctgcttgcat

SEQ ID NO: 18472 - DNA, 383 bp, Zea mays
  Clone ID: LIB3151-029-Q1-K1-B9
gcccatcatcgatctcgtttcaaatccatccatcctcgtttcctccgtcccgcaccagctcaaccccatggccaagatcaagatcgggatcaatgggttcggcaggatcggaaggctggtggccagggtggccctgcagagtgacgatgtcgagctcgtcgccgtgaacgaccccttcatcagcaccgactacatgacctacatgttcaagtacgacactgtgcacggacagtggaagcaccatgaagtcaaggtgaaggactccaaaacccttctctttggtgagaaggaggttgctgtgtttggctgcaggaaccctgaggagatcccgtggggttcggttgttctgaatatgttgttgagtctactggtgttttcactga

SEQ ID NO: 18473 - DNA, 442 bp, Zea mays
  Clone ID: LIB3151-029-Q1-K1-C1
gttgatgccagcgctcagtcaactagccatggtgaaccctgccgcctacctacaacagcaacaactgctttcatctagccctctcgttgtgggtaatgcacctacatacctgcaacaacaattgctgcaacagattgtaccagctctgactcagctagctgtggcaaaccctgctgcctacttgcaacagctgcttccattcaaccaactgactgtgtcgaactctgctgcgtacctacaacagcgacaacagttacttaatccactagcagtgcctaacccattggtcactgccttcctacagcagcaacaattgctaccatacagccagttctctttgatgaaccctgccttgtcgtggcagcaacccatcgttggaggtgccatcttttagattacatatgagatgtaatcgataatggtgccctcatacccgcatgtg

SEQ ID NO: 18474 - DNA, 431 bp, Zea mays
  Clone ID: LIB3151-029-Q1-K1-C10
gcccccaaaaccttcccagaaaggcgacggagtcaggttcgaatcgaaatcggggtcaccgcggcggcggcggcggcggctggtctactcatcagagactacagagcagggggtctcacgctccggcggcgggacgatggccatggcgccgtcctcctcttacttcggtggcggcggcggcgacggcgccaacgccgccgacgcgatggctctcgtgcaggggtacacggccgaggagctcgccatcgcgggggagttcctcaccacctggctgccctttctctctgccggcctctgtccctcctgcgcctcctcgctccgcggccgcgtcgactccctgatcacgcgaggccgcgcagctgaagaatcgccgccggtcgatcagattgagccgtcagggtgggactcggatccagcgggcccgcagaacc

SEQ ID NO: 18475 - DNA, 337 bp, Zea mays
  Clone ID: LIB3151-029-Q1-K1-C11
cacaaacggacgcgcaaactctggcacgagcccagcgggagttaaactccccatgggggccaccgatcgaccttcaagccagccttgggctattacgaaggcgtcgcgcgcggttgtttgagaggaaacgtggaagatgagggagtgcatatccgcacacataagaccaggccgtatacaattccgcaacgcgtgctggaaaatttactggctcgaacacaggaattagggatatgccccagcgacttgcactacctacgggagacgcgcatagggcactttgaggacaatgatcagacggagatgtgccacgaatgaccatgcgtgtgcaatgatg

SEQ ID NO: 18476 - DNA, 352 bp, Zea mays
  Clone ID: LIB3151-029-Q1-K1-C12
cctcaatcatcattcatcttagtagggtttgctccaaatgggatctgcatcatctattacctaactccaaaaaccatgaagctggttcttgtcgtgtccgctgacaccgctatggcttcaactgctactgggacacagaccaacggctgctactcttgactgcaccacctccttgtgcggttacatcggatcacaacgacgtgatcagaacggacatctacatttacctccaccacggcatttcgagcgtgagcaactccaactgcgacttgtcgacatgcacccacacaaacatcagcaacaccaagtagttcatcgttccacaacgacaacaacaaccgcagcaccaaca

SEQ ID NO: 18477 - DNA, 244 bp, Zea mays
  unsure at all n locations
  Clone ID: LIB3151-029-Q1-K1-C2
gaaacacaccaagcgaagcgcactagcaacgacctaacaacaatggctaccaagatattagccctccttgcgcttcttgccctttttgtgagcgcaacaaatgcgttcattattccacaatgctcacttgctcctagtgccattattccacagttcctcccaccagttacttcaatgggcttcgaacacctagctgtgcaagccaacatgcaacaacaagcgctngcggcgagcgtcttacaac

SEQ ID NO: 18478 - DNA, 283 bp, Zea mays
  Clone ID: LIB3151-029-Q1-K1-C3
cgatcgatcgccacagccaacactacccgccgaggcgacgcgacagccgccaggaggaaggaataaactcactgccagccagtgaagggggagaagtgtactgctccgtctaccagtgcgcgcaccgtccggcatggctgctcatctcgtcgacgaccagtggattaatcggcatggcggctctggccacgtcgtagctcgtcgcaacgcccgccggcctgggcgtcccggacgcgttcacgttccgccgcggcgccgtgcagggcctgaggggggcccggtc

SEQ ID NO: 18479 - DNA, 447 bp, Zea mays
  Clone ID: LIB3151-029-Q1-K1-C4
tagcaacatagaaagcacaatagtgtaccaacaatggcagccaaaatatcctgccttcttatgctccttggtatttctgcaagtgctgctacggcgaccattgtcccgcaatgctcacaagctcctatagctcaccttattaccccgtacctgtgaccagcggtgtcttcggtatgtgaaaacccaattcttgaaccctacacgatccaacaggcaatcgcagctggcatcttacctttatcacccttgttcctccaacaataatcagccctattacagcagttacctttggtgcatttattgtcacaaaacatcagggcacaacaactacaacaacttgtgctagcaaagcttgctgcctactcttagcaacagcagtttcttccattcaaccaactagctgcattgaactctgcttcttattcgcaacaacaacaactaccattc

SEQ ID NO: 18480 - DNA, 81 bp, Zea mays
  Clone ID: LIB3151-029-Q1-K1-C5
ggatcacatcacacgccactcactctcgtggccctagcatcgataccagtaaggaggaaggaactccttgccattcatgca

SEQ ID NO: 18481 - DNA, 322 bp, Zea mays
  Clone ID: LIB3151-029-Q1-K1-C6
cggacgcatgggcggacgcgtgggcggacgcgtgggtgagaccaactagcaacatagaaggcacagtactgtacgaacaatgggagacaaaatattatgcctccttatgctcccagggctttctggatgcgctggtacggcgaccatattccctaaatgctcgcaagctcctatagcttccattcttacctcgtacactctcaccagcagcgtcttccgcatgcgaaaacccaatttttcaaccctacaggatccaacaggcaatcacagctggcatattacctttatcacgcttgttcctcccacaatcatcagccctatt

SEQ ID NO: 18482 - DNA, 435 bp, Zea mays
  Clone ID: LIB3151-029-Q1-K1-C7
gaccattagctttatctactccagagcgcagaagaacccgatcgacaccatgagggggttgctcgttgccctcgctctcctggctctcgctgcgagcgccacctccacgcatacaagcggcggctgcggctgccagccaccgccgccggttcatctaccgccgccggtgcatctgccaccttcggttcacctgccacctccggtgcatctcccaccgccggtccacctgccgtcgccggtccacctgccaccgccgctccatgtgccgccggcggttcatctgtcgccgccaccatgccactaccctactcaaccggcccggcctgagcctgatccccagccacacccatgcccgtgccaacagtcgcatccaagcccgtgccagctgcagggaacctgctgcgttggcagcaccccgatcctgagccagcgcgt

SEQ ID NO: 18483 - DNA, 192 bp, Zea mays
  Clone ID: LIB3151-029-Q1-K1-C9
ctgagactttataccattagctgtatctactccagagcgcaggagacccccatcggcaggatgagggtaatgctctatgcccccccacgcacggctctagctgcgagcgccacctacactcatacaaacatcggttgcggcttccattcaccgaatacctttcatatactgccccttaagcatctgccccct

SEQ ID NO: 18484 - DNA, 399 bp, Zea mays
  Clone ID: LIB3151-029-Q1-K1-D1
gtgaaaacccaattcttcaaccctacaggatccaacaggcaatcgcagcaggcatcttacctttatcacccttgttcctccaacaaccgtcagccctattacagcagttacctttggtgcatttgttggcacaaaacatcaaggcacaacaactacaacaacttgtgctaggaaaccttgctgcctactctcagcaacagcagtttcttccattcaaccaactggctgcattgaactctgctgcttatttgcaacaacaactaccattcagtcagctagctgctgcctacccccagcaatttcttccattcaaccaactggcagcattgaactctgctgcttatttacaacagcaacagctaccaccatttcaccagctagctgatgtgagccctgttg

SEQ ID NO: 18485 - DNA, 447 bp, Zea mays
  Clone ID: LIB3151-029-Q1-K1-D10
ggaagaacggccgacgacgcgtccgaccaagcagcatagcaaagcggaatccagttttatcaatagaacacaccggagaccaagatgttgtccctccttatgcaccttgctcttattacatgtgatgataacgcgacacatacccgtgaatgctgacaagctcgtatagcttacctctttccccgataccttccatcaattatagcttaactatgtgaaaacccacatcatcaaccatatctgcttgaacacgcaataggcgcaagcaacatacattaatcgcactcgttgcgtcaacaatcgccagccctatttttggtgcagtcatgggtacaaaccatcatggcacaccagctgcatgaactcgtgctacctgtgatcaaccaagtagctatagcaacctctatccctactctgcgaacaacaatttctttcattcaaccaact

SEQ ID NO: 18486 - DNA, 375 bp, Zea mays
  Clone ID: LIB3151-029-Q1-K1-D11
cattatctatatctactccagagcgcagtacaacccgatcgacaccacgagggtggggctcgtggccctcgctctcctggctcttgctgcgagcgccacctccacgcatacaagcggccgttgcagctgccagtcaccgtcgccggctcatctaccggctcctgtgcatctgccacctcctgttcacctgccacctccggtgcatcttccaccgcctgtccaactgccggcgccggtgcacctgccaccgccggtccatgtgccggcgcctgttcatctgccggcgcctccatgccactaccctactcaaccgccccggcctcagcctcatcctcagccacacccatgcccgtgccaacagccgtatccaaaccc

SEQ ID NO: 18487 - DNA, 308 bp, Zea mays
  Clone ID: LIB3151-029-Q1-K1-D12
ggactataaaccataaccactatatactgcagaacaaaccaaaacacaccctgaggggggaggttgttgctctctgtcttctgtctcttggttctagctccaactgcaagcatacaacatgcaagtgggggttgcagccaccaccgaccgttcatctaccatcgaccgtgcatgtgccatctgcgatttacctgtcacctgcgatgcatcttgcatcgccgatccacctgccaccggcggtccacctgccacctgcgatccatgtgccatctgccggttatctgtcatcggcaccatgccactaccct

SEQ ID NO: 18488 - DNA, 155 bp, Zea mays
  Clone ID: LIB3151-029-Q1-K1-D2
gacgtcaccctatcaattaactcatcgacttccgactggcaaactcgacacgcataatgcgctgatcgtctccttgctcacggcgtcgctctagcgccgacttcactcaagccgttggtgtggctgacacacaccagcgcatcatctaccgcctc

SEQ ID NO: 18489 - DNA, 482 bp, Zea mays
  unsure at all n locations
  Clone ID: LIB3151-029-Q1-K1-D3
cggccggaatcccggtcgaccacgcgncgaaggatcgccaacaaaacaacatggagatgggcattggtctcgtcgtgtgcctggctctgtcagctgccagcgcctctgcaatgcagatgccctgcccctgcgcggggctgcagggcttgtacggcgctggcgccggcctgacgacgatgatgggcgccggcgggctgtacccctacgcggagtacctgaggcagccgcagtgcagcccgctggcggcggcgccctactacgccgggtgtgggcagacgagcgccatgtaccagccgctccggcaacagtgctgccagcagcagatgaggatgatggacgtgcagtccgtcgcgcagcagctgcagatgatgatgcagcttgagcgtgccgctgccgccagcagcagcctgtacgagccagctctgatgcagcagcagcagcagctgctgggcagcccaggtctcaaccccatggccatgatg

SEQ ID NO: 18490 - DNA, 334 bp, Zea mays
  unsure at all n locations
  Clone ID: LIB3151-029-Q1-K1-D4
caacatagaaagcacaatagtgtaccaacaatggcagccaaaatattttgcctccttatgctccttggtatttctgcaagtgctgctacggcgaccattttcccgcaatgctcacaagctcctatagcttcccttcttcccccgtacctctcaccagcggtgtcttcggtatgtgaaaacccaattcttcaaccctacaggatccaacaggcaatcgcagctggcatcttacctttatcacccttgttcctccaacaatcatcagccctattacagcagttacctttggtgcatttattggcacaaaacatcanggcacaacaactacaacaac

SEQ ID NO: 18491 - DNA, 274 bp, Zea mays
  Clone ID: LIB3151-029-Q1-K1-D5
cttgtgcagccgcccccccctctctctaggcttggaggacgcccctcgcactcctgcacccatatgcagccgccaccccacctcccccatcaaaccctagccggcccctgctcaagctctactatccgaggtgccattctgctaccgctctgatctacctcgcgtttgtgcatctctccaactgcatttaggaggagggaagaagaacggtggaaagggggcggatatctaagcggtggacttctggatcgcaccaagggccatgccctaactt

SEQ ID NO: 18492 - DNA, 76 bp, Zea mays
  Clone ID: LIB3151-029-Q1-K1-D6
atagaatgaacgttatctactccacataggatgggaagacgctcgacacccttatggtggtggttgttgccgtcag

SEQ ID NO: 18493 - DNA, 391 bp, Zea mays
  Clone ID: LIB3151-029-Q1-K1-D7
tttcagcattcagaaacacaccaagcgaagcgcactagcaacaacctaacaacaatggctaccaagatattagccctccttgcgcttcttgcccttttagtgagcgcaacaaatgcgttcattattccacagtgctcacttgctcctagtgccattattccacagttcctcccaccagttacttcaatgggcttcgaacatccagccgtgcaagcctacaggctacaactagcgcttgcggcgagcgtattacaacaaccaattgcccaattgcaacaacaatccttggcacatctaaacctacaaaccatcgcaacgcaacagcaacaacagtttctgccatcactgatccacctagccgtggtgaaccctgtcgcctacttgcaacagc

SEQ ID NO: 18494 - DNA, 429 bp, Zea mays
  unsure at all n locations
  Clone ID: LIB3151-029-Q1-K1-D8
accgggaaggaanggcgggaccgacgcatgcgttcgggtggtaatacaatcaacttattttatttaaagcggaggaaaaaccactccgtccggtgggggttgttgttggttgcctccctctccttgctctctctgggagcgcgacctacacgcatacatacaggcggtgggtgtggcagccaccgaccgcggttcatttactcgccgccgggcatctgtcacctacggttcacctgccacctgcggtgcatgtatcaccgaccgtccatctgtcggcggcggtccacctaccaccgaccgtccatgtgccggcgccggttgatgtatcgtcggcaccatgccactaccctactcaaccggcccggcctgagtcttatacacagccacacccatgcccgtgccaacagacggattcattcacgtgccagc

SEQ ID NO: 18495 - DNA, 388 bp, Zea mays
  Clone ID: LIB3151-029-Q1-K1-E1
cgatcgatcgccacagccaacaccacccgccgaggcgacgcgacagccgccaggaggaaggaataaactcactgccagccagtgaagggggagaagtgtactgctccgtcgaccagtgcgcgcaccgtccggcagggctgctcatctcgtcgacgaccagtggattaatcggcatggcggctctggccacgtcgcagctagtcgcaacgcccgccggcctgggcgtcccggacgcgtccacgttccgccgtggcgccgcgcacggcctgaggggggcccgggcgtcggctgcggcggacacgctcagcatgccgaccagcgcgcgcgcggcgcctaggcaccatcatcatgcgcgccgaggaggcaggttcccggcgctcgccgtgtg

SEQ ID NO: 18496 - DNA, 331 bp, Zea mays
  unsure at all n locations
  Clone ID: LIB3151-029-Q1-K1-E10
gggaagaancgccgggaccgacgcctcctgcccaactactcacctagagaactccactgtctacaaccaatcagcactgactaccaagagtgtagctactccttgctcttcttgctgttttagtgagcgcagcaaatgttttcacatatagacagcgctcacttgttgctagcaccattattccataatttctaccaccagttacttcaatgagctacgaacatcctgccgtgccagcctacatgctacaactagtgcttgcggcgagcgtattacaacaaccaattgcccaacatcaacaaccatccttgtcacatctaaacccacaaac

SEQ ID NO: 18497 - DNA, 295 bp, Zea mays
  Clone ID: LIB3151-029-Q1-K1-E11
gaccaactagcaacatagaaagcacaatagcgtaccaacaatggcacgccaagcatatcaggcctccttatcgctccttgctctttgtgcaagtgctgctgccgggaccattttccaacaatgctcacagcctactatcgcttacctttttcctccgtacctctcaccagtgacgtgttgggtatgtgaaaaccgaatacttaaaccttatacgatacaacaggcaaccggcgatggcatcttacctttatcacccttgaccctccaacattcatcaatcatattacataataca

SEQ ID NO: 18498 - DNA, 297 bp, Zea mays
  Clone ID: LIB3151-029-Q1-K1-E12
gcgcacaccctcaccatgagcatctccattgcataatccaaacaccagaagaccccaaggggagtggccgtgggtgctgctcttgcccttctagtgagcggatcaccactcctacacaaacatacactgattactggctgacaactgcgatgattgcacacatctaccgactaatttacatctgccagcttagaataaacagccgagtaagctgacacgttaaaagtatctcctactgccagcgcatgtaaacctgccagtgcacattcgtaacaacgatcctgtgcacatgtcaac

SEQ ID NO: 18499 - DNA, 404 bp, Zea mays
  Clone ID: LIB3151-029-Q1-K1-E2
ctgggtcttcagaccattagctttatctactccagagcgcagaacaacccgatcgacaccatgagggtgttgctcgttgccctcgctctcctggctctcgctgcgagcgccacctccacgcatacaagcggcggctgcggctgccagccaccgccgccggttcatctaccgccgccggtgcatctgccacctgcggttcacctgccacctgcggtgcatctcccaccgccggtccacctgccgccgccggtccacctgccacacgcggtccatgtgccggcgccggttcatctgccgccgccaccatgccactaccctactcaaccgccccggcctgagcctcatccccagccacacccatgcccgtgccaacagccgcatccaagcccgtgccagctgcaagg

SEQ ID NO: 18500 - DNA, 415 bp, Zea mays
  Clone ID: LIB3151-029-Q1-K1-E4
gccgaggcgacgcgacagccgccaggaggaaggaataaactcactgccagccagtgaagggggagaagtgtactgctccgtcgaccagtgcgcgcaccgcccggcagggctgctcatctcgtcgacgaccagtggattaatcggcatggcggctctggccacgtcgcagctcgtcgcaacgcccgccggcctgggcgtcccggacgcgtccacgttccgccgcggcgccgcgcagggcctgaggggggcccgggcgtcggcggcggcggacacgctcagcatgcggaccagcgcgcgcgcggcgcccaggcaccagcagcaggcgcgccgcgggggcaggttcccgtcgctcgtcgtgtgcgccagcgccggcatgaacgtcgtcttcgtcggcgccgagatggcgccgtggagc

SEQ ID NO: 18501 - DNA, 195 bp, Zea mays
  Clone ID: LIB3151-029-Q1-K1-E5
gtgtacgactagacagtggctgctatcttcacgcgcgagcatactgccgctataggggcggtatgaattgcctgcgaatcgcggtctaagcacactatggaaggatcttcctccatacttcctaatttcggacagaagagatgcacttccttgcatcaagttatgtacatacgcggttttgtgtatatctggttt

SEQ ID NO: 18502 - DNA, 348 bp, Zea mays
  unsure at all n locations
  Clone ID: LIB3151-029-Q1-K1-E6
gggaaggaangggncgaccgacgcatgcgttcggtcttcagaccattagctttatctactccagagcgcagaacaacccgatcgacaccgggggggtgttgctcgttgccctcgctctcctggctctcgctgcgagcgccacctacacgcatacaagcggcggctgcggctgccagccaccgtcgccggttcatctaccgccgccggtgcatctgccacctgcggttcacctgccacctccggtgcatctcccaccgccggtccacctgccggcggcggtccacctgctacggtcggtccatgcgccagcatcggtccatctgtcgccggcaccatgccactacccta

SEQ ID NO: 18503 - DNA, 443 bp, Zea mays
  Clone ID: LIB3151-029-Q1-K1-E7
ctgtaaataagcaggagagttcaatgctgccattcagccagctagctggtgtgagccctgctaccttcttgatacaaccacagttgttgccgttctaccagcacgctgcgcctaacgctggcaccctcttacaactgcaacaattgctgccattcaaccaacttgctttgacaaacccagcagcgttctaccaacaacccatcattggtggtgccctcttttagatttcttatgagttatagttcaataataaagttttttgtctgatgtttgtggcttcccagaaataagaaagtacatttctaaaaaaaaaaataaaaaaaaaaaaaatattataaaaaaaattttttttataaatttattttatttatattttttttattaatttttaattaatttatattttttttttttataaaatttttaattattttttttttttt

SEQ ID NO: 18504 - DNA, 372 bp, Zea mays
  Clone ID: LIB3151-029-Q1-K1-E8
gggtcttgcaaccattacctgcatctactccagagcgcacaagaacccgatcgacaccatggaggtgctgctcgttgccctcgctctcctggctctcgctgcgagcgccacctccacgcatacaagcggcggctgcggctgccagccaccgccgccggttcatctaccgccgccggtgcatctgccacctccggttcacctgccacctccggtgcatctcccaccgccggtccacctgccgccgccggtccacctgccaccgccggtccatgtgccgccgccggttcatctgccgccgccaccatgccactaccctactcaaccgccccgggctcagcctcatccccagccacacccatgcccgtgccaaca

SEQ ID NO: 18505 - DNA, 352 bp, Zea mays
  Clone ID: LIB3151-029-Q1-K1-F1
aacccgccccgcgctgccctcgtcccgatctctgacccaaatacccgatccaccatggccggaataaggcttacgctcgaggaacccgagatgcccgttggcacgccaccttgtcctcagctcccacactttgtcgtcgctgcaggcggtggtcaatacctttcattaatgaccgtttcagcatgtgaatacatagcccttgaaccctacaggcttcaacatgtaatcgcaacaagcaacttacctttatcacccatgttctttcaacaatagtaagccatatctttggtgcagtcattgttacacaccataatggcacaccagctgcagcaactcgtgctaccagtgatca

SEQ ID NO: 18506 - DNA, 234 bp, Zea mays
  Clone ID: LIB3151-029-Q1-K1-F10
ccaactacagtattcactacaaaccgcataacaacccgagggggaccattatggtcttgctcgttgcccctcctcttctgagtgtcacctttaggcctacattcagccaatcaatctgcctgtgcccgtgtcaggctcatctaccggttcatctacatctgccaactcatgttcaacctccacttcacctgcaacttccagcgcatgtccaactgtcggtgcaagtgcacctgc

SEQ ID NO: 18507 - DNA, 307 bp, Zea mays
  unsure at all n locations
  Clone ID: LIB3151-029-Q1-K1-F11
ttcagcattcagaaacacaccaagcgaagcgcactagcaacaacctaacaacaatggctaccaagatattagccctccttgcgcttcttgcccttttagtgagcgcaacanatgcgttcattattccacagtgctcacttgctcctagtgccattattccacagttcctcccaccagttacttcaatgggcttcgaccatcaagccgtgcaagcctacaggctacaactagcgcttgcggcgagcgtcttacaacaaccaattgcccaattgcaccaccattcctgggcacatttaaacctacaaac

SEQ ID NO: 18508 - DNA, 315 bp, Zea mays
  Clone ID: LIB3151-029-Q1-K1-F12
gggaggaatggcgggacgaacgccgccgccgaccaatcgaccgcgcacgcgtgcgccgatacatacaaactgtcaactcgcgcgcgcgggatatcataattactcgcgcgtcttgcacaattttcattcgcagtacatgagttaactatggcgcatttattggcacacaagtatttacctaaattactttgactgctatgcatagctatattggctgtctactatcaaccacagcaggccctttcgttcaaccaaccaattgcattgaacgcctgtctttatctacttgcactacttctaccattaaaccaggca

SEQ ID NO: 18509 - DNA, 139 bp, Zea mays
  Clone ID: LIB3151-029-Q1-K1-F2
ggctccaacagcaatcgcaacagcaacttacctttatcacccctgttctttcaacaatcgccagagctacttggtgtactggtgcacgagttgtgagctgtgtgcctgaggttgaccaatgctgcccaagatgggctgc

SEQ ID NO: 18510 - DNA, 74 bp, Zea mays
  Clone ID: LIB3151-029-Q1-K1-F5
tgcttgatggatgatacgacccctcctgcagcgcatcattcaccgcggctgtggtggttactaccagcatgacc

SEQ ID NO: 18511 - DNA, 306 bp, Zea mays
  Clone ID: LIB3151-029-Q1-K1-F6
cagcattcaaaaacacaccaagcgaagatcactatcaacaacctaacaacaacggctgcgggaatattatttccttcttgcgctttttgccctattagtgagcgcaacaaatgcgttcattattccacagagctcacttgctccaagtgccattatttcacagttactcccacctgttactttaatgggcttagaacatacaaccgtgcaatcgtacattgctactaatagcgcttgctgactgcgtaatagaacaaccacttgctcaattgcatcatcaatcccggtgacttttgtacctacaaa

SEQ ID NO: 18512 - DNA, 357 bp, Zea mays
  Clone ID: LIB3151-029-Q1-K1-F8
atgcggggtcttaaaaccaacagctttatctactgaattacgcacacgaacccgcgcgaccccaggagggtgtttcttatagcgctacctaacctgactctagctgccagcgccatctacacgcatgcaagcggaagctgtggctgtcagccacctaatcccgttgatgtacatacccctgtgcatatgtcacctactatccaacaggcacctaccgagcgtccttcaccaccggtgcacatgccgcatggggaaagggacgcgccctcgttcatggcattaaccgcggtgattgtgctgggtacccacaccattaccctactaaatcgccgcggcctaaggctcattcctagccat

SEQ ID NO: 18513 - DNA, 396 bp, Zea mays
  Clone ID: LIB3151-029-Q1-K1-G1
gatcgacaccatgagggtgttgctcgtagccctcgctctcctggatctcgctgcgagcgccacctgcacgcatacaagcggtggctgtggctgccatccatcgccgccggttcatctaccgtcgacggtgcatctgccacctccggctcacctgccaccttcggtgcatgtcccaccgacggtccacctgtcgccgtcagtccacctgccaccggcggttcatgtgccgtcgccggttgatctgtcgtcgccaccatgccactaccctacttaaccgccccggccttagtctgatccccagacacacccatgcccgtgccaacagccgcatgcaagcccgtgccagctgcagggaacctgcggcgttggcagcaccgcgatcctgcgccagcgcgt

SEQ ID NO: 18514 - DNA, 285 bp, Zea mays
  unsure at all n locations
  Clone ID: LIB3151-029-Q1-K1-G10
gaaggaanaggccgggaccgacgcgtccgccgacgcctcctgcatcagcgcagccggacagtcacgccatagtgctagcctaagtgccaggggatgttgtaaccctgtgtgccagcaactcacacaagtggtgccacagcaccggccccaggcgcacttatggtcgcacctccagaccatactgcaacaacagccgcttagcctacacatccttgcgctgttggctgagcaaatagcgcatcttctgtcgagccaactacggactgtagaactctgcttcatacc

SEQ ID NO: 18515 - DNA, 380 bp, Zea mays
  Clone ID: LIB3151-029-Q1-K1-G11
cccgaccccgtcggcatctcggagaatcgcggcggtcaaagcccagcctaccccacctcgcgccgcgtcgccgcggtttccgcgggccagtgctctcgggagtcgggagctcagatcaggagggacgggctaggtagggttcgcgagcgagcgagggtgctgccgtcgagcgccggtgtccgagtagcacgaggagagatggacgcgttcctgcagaggctcaagcggttggacgcgtaccccaaggtgaacgaggacttctacaagcggacgctctccggcggcatcgtcacgctcgtcgacgccgtcgtcatgctgcttctcttcatctccgagaccaggtcatatctttattcagcaacagagactaagttagttgt

SEQ ID NO: 18516 - DNA, 246 bp, Zea mays
  Clone ID: LIB3151-029-Q1-K1-G12
gttcactaagaacacaaagcgagccactgcacaacacacggggtgctattatcctcgcctctgcctatggagccacaatctgatattacatgctatactataggctattcaattctccacagtcttaatggctcaacacctacttgcagccacatccaacagccttgcgggcgttaacaccaatggcatgcacacaatctggcattacatacagcaccaccacacacacagtctacaccgaccact

SEQ ID NO: 18517 - DNA, 444 bp, Zea mays
  Clone ID: LIB3151-029-Q1-K1-G2
gggtcttcagaccattagctttatctactccagagcgcagaagaacccgatcgacaccatgagggtgttgctcgttgccctcgctctcctggctctcgctgcgagcgccacctccacgcatacaagcggcggctgcggctgccagccaccgccgccggttcatctaccgccgccggtgcatctgccacctccggttcacctgccacctccggtgcatctcccaccgccggtccacctgccgccgccggtccacctgccaccgccggtccatgtgccgccgccggttcatctgccgccgccaccatgccactaccctactcaaccgccccggcctcagcctcatccccagccacacccatgcccgtgccaacagccgcatccaagcccgtgccagctgcagggaacctgcggcgttggcagcaccccgatcctgggccagtgcgt

SEQ ID NO: 18518 - DNA, 433 bp, Zea mays
  unsure at all n locations
  Clone ID: LIB3151-029-Q1-K1-G3
cggacgcgtgggctcagctagaaatgaggacaccaatggatctggctgctgcagtggcaaactttggagccggaggtgtgcaggtgcaagagagcatggttgtgtcgcctcatgcactggaagcagtcgaggggagccaggatgttgaagaacacaaggacgagaaggaagattctcaggctacagaaatctacagtgaccatcaggctcctgttgttgacgctgaacatgtggatgatgaaggcctggtgaacccagctcatgaagttccttcagctgaggcagagcaggagacatttgacgattatgtggacgatcaggaacaaaaagaccaacaattcacccagcggcgctcttaccagaaccagcgtantggctgcggtcgtggtggcggcaggaggagctatcctaatggtcgtggagtgcgtgggta

SEQ ID NO: 18519 - DNA, 442 bp, Zea mays
  Clone ID: LIB3151-029-Q1-K1-G4
gaaacacaccaagcgaagcgcactagcaacgacctaacaacaatggctaccaagatattagccctccttgcgcttcttgccctttttgtgagcgcaacaaatgcgttcattattccacaatgctcacttgctcctagtgccattattccacagttcctcccaccagttacttcaatgggcttcgaacacctagctgtgcaagccaacatgcaacaacaagcgcttgcggcgagcgtcttacaacaaccaattgcccaattgcaacaacaatccttgccacatctaacaatacaagccatcacaacgcaacagcaacaacagttcctaccagcactgagccacctagccatggtgaaccctgccgcctacttgcaagagcagctgcttgcatccaacccacttgctctggcgaacgtagttgcaaaccagctacaacaacagc

SEQ ID NO: 18520 - DNA, 308 bp, Zea mays
  Clone ID: LIB3151-029-Q1-K1-G5
gggccacgccaccctaagcttgatagactccatatcacagaaaagcctcctcgacaacatgaggtgcatgctgcgagccctcgctctaaagcctctcggtggcagcgcaaccttcacacatacaaacgggggctgaggatgtcatacaccacaaccagatcaagaaccatcgcaggagcatatgaacacctaggtgcaattaccatcattgggtgcatcaacgaacgccgggacagctagagccgtctgtacacccgacatgaaatgtccatgtgtcacccacaggtcaatatacgccaccacaatgc

SEQ ID NO: 18521 - DNA, 346 bp, Zea mays
  Clone ID: LIB3151-029-Q1-K1-G6
accaacaagcaacatagaaagtggaatacagtaccaacaatagagcaacaatggcggccaagatatttcccatccttatgctccttgctctttctgcatgtgttgctaacgcgaccatttttcctgaatactcacaagctcctatagctgcccttcttcccccataccttccatgaatgaccgattcagtatgtgaaaacccagtccttcaaccctacaggctccaacaagcaatcgcaacacgcaacttacctttatcacccctgttctttcaacaatcgacagtcctatctatggcgcagccattggtacaaaccatcatggcacaactgatgcagctactcgt

SEQ ID NO: 18522 - DNA, 76 bp, Zea mays
  Clone ID: LIB3151-029-Q1-K1-G7
tccgtccacccgcctaaagctagagagacatatctcacattctctctcaccgcatcggtccaatctatagcaaggg

SEQ ID NO: 18523 - DNA, 366 bp, Zea mays
  Clone ID: LIB3151-029-Q1-K1-G9
gacagcacaatagcgtaccaaccacggtagtctacctactttggctgcctatgcttggtggcctctctgcctgcgctgctactgcgaccattctgccacagtgctcacaagctcctatagcttacattcttccacagtacctcttaccagcggtgtcttctgaatgtgaaaacccaattcttgaaccctataagatccaacacgctatcggagctggcatgttacctttatcacccttgtaccttcaacactcatgagccctataacagcatttaccttttacgcatttatccgcacaaaacatctagtgacaacaactacaacaacttgtgctcgccaacctcgctggctactatcacaacaaca

SEQ ID NO: 18524 - DNA, 375 bp, Zea mays
  Clone ID: LIB3151-029-Q1-K1-H10
attttgagcattcataaacacaccaagcgaagcgcactagcaacgacctaacaacaatggctaccaagatattagccctccttgcgcttcttgccctttttgtgagcgcaacaaatgcgttcattattccacaatgctcacttgctcctagtgccattattccacagttcctcccaccagttacttcaatgggcttcgaacacctagctgtgcaagccaacatgcaacaacaagcgcttgcggcgagcgttttacaacaaccaattgcccaattgcaacaacaatccttgccacatctaacaatacaagccatcacaacgcaacagcaacaacagttcctaccatgcactgaaccacctagccatggtgaaccct

SEQ ID NO: 18525 - DNA, 374 bp, Zea mays
  Clone ID: LIB3151-029-Q1-K1-H11
agcggcagtgcgtagagaggatcgtcgaacagaacagcatgaagatggtcatcgttctcgtcgtgtgcctggctctgtcagctgccagcgcctctgcaatgcagatgccctgcccctgcgcggggctgcagggcttgtacggcgctggcgccggcctgacgacgatgatgggcgccggcgggctgtacccctacgcggagtacctgaggcagccgcagtgcagcccgctggcggcggcgccctactacgccgggtgtgggcagacgagcgccatgtaccagccgctccggcaacagtgctgccagcagcagatgaggatgatggacgtgcagtccgtcgcgcagcagctgcagatgatgatgcagcttgagcgt

SEQ ID NO: 18526 - DNA, 360 bp, Zea mays
  unsure at all n locations
  Clone ID: LIB3151-029-Q1-K1-H4
gggtcttcagaccattagctttatctactccagagcgcagaagaacccgatcgacaccatgagggtgttgctcgttgccctcgctctcctggctctcgctgcgagcgccacctccacgcatacaagcggcggctgcggctgccagccaccgccgccggttcatctaccgccgccggtgcatctgccacctccggttcacctgccacctccggtgcatctcccaccgccggtccacctgccgccgccggtccacctgccaccgccggtccatgtgccgccgccggttcatctgccgccgccaccatgccactaccctactcaaccgccccggcctcagcctcatccncagccacacccatg

SEQ ID NO: 18527 - DNA, 440 bp, Zea mays
  unsure at all n locations
  Clone ID: LIB3151-029-Q1-K1-H7
caagcaacatagaaagtggaatacagtagcaacaatagagcaacaatggcggccaagatattttccatccttatgctccttgctctttctgcatgtgttgctaacgcgaccatttttcctcaatactcacaagctcctatagctgcccttcttcccccataccttccatcaatgaccgcttcagtatgtgaaaacccagcccttcaaccctacaggctccaacaagcaatcgcaacaagcaacttacctttatcacccctgttctttcaacaatcgccagccctatctttggtgcagtcattggtacaaaccatcagggcacaacagctgcagcaactcgtgctaccagtgatcagccaagtagctctggcaaacctttctccctactctcagcaacaacaatntcttccattcaaccaactgtctacactgaaccctgc

SEQ ID NO: 18528 - DNA, 317 bp, Zea mays
  Clone ID: LIB3151-029-Q1-K1-H8
gcgctgagaccatagacctatatctactatcatactgcagagcgaacacgaacgacaccaggagggtgagggtggtggtcctcgctctcctctctctggctgtgagcgccacctccacccatacaaacagaagctgcggctgccagccaccgccaccggctcatgtacagccaccggcgcatgtgccacctccagctcacctgccacctccagcgcatgtgcaaccgccagtgcaggtgccgccgccggtccaggtgccaccgccagtgcatgtgcatgcgccggttcatgtgcctgcgccaccatgccaataccct

SEQ ID NO: 18529 - DNA, 218 bp, Zea mays
  Clone ID: LIB3151-029-Q1-K1-H9
tccgaaaacaatcacgctttgaacaaactggtttactcgatcttcatgatgtcgcagcgggggcggggtgactgcttcttgagagacccacggcgcctacaaaatcatcagccataaaaataagcgacaggatacgtacatttccccagtgaattaagtttctagattctataactataatgcctgctatatatcttacacatggatacattctacgt

SEQ ID NO: 18530 - DNA, 438 bp, Zea mays
  unsure at all n locations
  Clone ID: LIB3151-030-Q1-K1-A10
ctagcaacatanaaagcacaatagtgtaccaacaatggcagccaaaatattttgcttcgttatgctccttggtcttgctgcaagtgttgctaccgcaaccattttcccacaatgctcacaagctcctatagcttcccttcttcccccatacctctcaccagcggtgtcttcaatgtgtgaaaacccaattgttcaaccctacaggatccaacaggcaatcgcaacaggcatcttaccattatcacccttgttcctccaacaaccgtcagccctattacagcagttacctttggtccatttggtggcacaaaacatcagggcacaacaactacaacaacttgtgctagcaaaccttgctgcatactctcagcaacatcagtttcttccattcaacccaactgctgcattgaactctgctgcttatttgcaacaacaatt

SEQ ID NO: 18531 - DNA, 380 bp, Zea mays
  Clone ID: LIB3151-030-Q1-K1-A11
acactaacaacctacaaacaacgagaaatccactaccaacaatacaacaacattggcgcgaagatatttttcctgcttggcgggctgctcttactgcatgtgttgctaacccaacaatacaccctcaaagctcacacgctcctatagcataccttctacccccataccttccatcaatgatagcttcagtatgtgaaaactcagctcttcaaccatatatgctccaacaagcaatcccagcaagcaacatacctttatcacccttgtttcaacaatcaccagccctatctttggtgcattcattggtacaaaccatcatggcacagcagctgcaacaactcgtgctacctgagatcaaccaagacgctctggcacacctt

SEQ ID NO: 18532 - DNA, 192 bp, Zea mays
  Clone ID: LIB3151-030-Q1-K1-A12
taataaccccccgacccacccacacgtccaaccataacatacatctactccaaagcacacaataacccgaacaacaacattagaggggcggtctataaaatagctttccctactttcacttaaatcaccacctctacacatacaaacaactcataaaactcacatccatctcaacctaatcatctaccatca

SEQ ID NO: 18533 - DNA, 367 bp, Zea mays
  Clone ID: LIB3151-030-Q1-K1-B10
agcaaagcggcagtgcgtagagaggatcgtcgaacagaacagcatgaagatggtcatcgggctcgtcgtgtgcctggctctgtcagctgccagcgcctctgcaatgcagatgccctgcccctgcgcggggctgcagggcttgtacggcgctggcgccggcctgacgacgatgatgggcgccggcgggctgtacccctacgcggagtacctgaggcagccgcagtgcagcccgctggcggcggcgccctactacgccgggtgtgggcagacgagcgccatgtaccagccgctccggcaacagtgctgccagcagcagatgaggatgatggacgtgcagtccgtcgcgcagcaactgcagatgatgatg

SEQ ID NO: 18534 - DNA, 321 bp, Zea mays
  Clone ID: LIB3151-030-Q1-K1-B11
aacaccaacaaacaacataaaaagtatcatccaataccaccacttgaacaacaatgtgtcagctatatattttccttgcttatgctccttgctctttctgtatctattacaaaccctacaattttccctcaatgctcacaatctactatagcttcccttcttccaccatacactatatcaatcatagctctattatgttaaaacccatctcttcaaccctataagctccaacaagtaatcgcagcacgctacatacctttatcacccttgattcaacaattgtcacacctatttttggtgcagtcattgctacagaccatc

SEQ ID NO: 18535 - DNA, 148 bp, Zea mays
  Clone ID: LIB3151-030-Q1-K1-B12
agcaaatccacagtacataaataggatcatcaaacataacaacatgaatatcctcatgcggctctttatttacctggctctggcagctaccaacacctttacaatgcaaatcccctacccctccacaactctccatctctcgtactac

SEQ ID NO: 18536 - DNA, 385 bp, Zea mays
  unsure at all n locations
  Clone ID: LIB3151-030-Q1-K1-B9
cagaaacacaccaagcgaagcgcactagcaacaacctaacaacaatggctaccaanatgtatccctccttgcgctgcttgcgctttttgcgaacgcaacaaatgcatccattattccacaatgctcacttgctcctagatccattattccacagttcctcccaccagttacttcaatggccttcgaacacccagctgtgcaagcctataagctacaacaagcgattgcggcgagcgtcttacaacaaccaattgcccaattgcaacaacaatccttggcacatctaacaatacaaaccatcgcaacgcaacagcaacaacagttcctaccatcactgagccacctagccatggtgaaccctgtcacctacttgcaacagcagctg

SEQ ID NO: 18537 - DNA, 439 bp, Zea mays
  Clone ID: LIB3151-030-Q1-K1-C11
ggcacaacagctgcagcaactcgtgctaccagtgatcagccaagtagctctggcaaacgtttctccctactctcaggagcagcaatttcttccattcaaccaactgtctacactgaaccctgctgcttatttgcagcaacaacaactactaccattcagccagctagctactgcctactctcagcagcaacaatttcttccatttaaccaattcgccgcactgaacccctctgcttatttccagcagcaaatactactaccatttggccagctagctacaacaagccccgcttccttcttgacacaacaacaattgcttccgttctaccagcagtttgtggctaaccccgcaacccttttacaactgcaacagttgctgccctatgtccaacttgctttgacaaacccagcagccttctaccaacaacacatcattggc

SEQ ID NO: 18538 - DNA, 411 bp, Zea mays
  unsure at all n locations
  Clone ID: LIB3151-030-Q1-K1-C12
aaggaannccccggccgacccacacatccttcaaaaacacaccaacctactctctctattttcaaccaaacaacaatgcctaccaacgggcgtatttcctactttctcttcctccccttttacagatcacaacaaattcgttcattattccacagacctcactaactcctacttccattattccacaattcctcccaccaattactttaatgctcttttaacatacatccaagcaagcctacatgctacaactagcacttgcgtctaccttcttacaacaaccaattacccaatttcaacaacaatactaagcacatctaaacctacaaaccatcgcaactcaacatcaacaacagtttattccattactgaaccacctatcctattttaaccctttcttctactttcaac

SEQ ID NO: 18539 - DNA, 284 bp, Zea mays
  unsure at all n locations
  Clone ID: LIB3151-030-Q1-K1-C9
acccaaacaaaccgcnaacccaaaaaaccacaccaactcctttttttcctccccccacaacaaacccccgcgcaattatataaaaaccaccctccccccaactaacaaaccaaactatataaccacaaccaccacaacatcacctacctaccccccaacaacattaacaattacctcctttctctcaccaaccacaactacaacttccaacaaacccccttcatcttcatcactaactttcatatctcccacaactacaaattccccaatcctcattctccaca

SEQ ID NO: 18540 - DNA, 375 bp, Zea mays
  Clone ID: LIB3151-030-Q1-K1-D10
aacacaccaagcaaatcgcactattttttacctaacaacaatggctaccaccgtggtattcctacatgcgcttgttgcccttttaatgatcacaacaaatgcgttcattattccacagtgctcacttgctcctagtgccattattccacagttcctcccaccagttacttcaatgggcttcgaacatccagccgtgcaagcctacatgctacaactatcgcttgcagcgagcgtcttacaacaaccaattgcccaatttcaacaacaatccttggcacatctaaacctacaaaccatcttaacgcaacaacaacaacattttctgccatcacttagccacctagccctggtaaaccctgtctcctacttgcaaca

SEQ ID NO: 18541 - DNA, 340 bp, Zea mays
  unsure at all n locations
  Clone ID: LIB3151-030-Q1-K1-D11
gacccacgcgaacacaggcaatcncacacgcatcttacctttattacccttgttcctccaacaaccatcacgcctattacatcaaatacctttcgcgcatttattaacacaaaacatcaatgcacaacaactacaacaacttgtgctaggaaaccttgctgcctactctcaccaacagcactttcttccattcaaccaactggctacattgaacactcctgcttatatccaacaacaactaccattcacacacttaattgctacctacactcaccaattacttccattcaaccaacttccagtattgaactctctttcttatttacaacaacaacagcta

SEQ ID NO: 18542 - DNA, 415 bp, Zea mays
  Clone ID: LIB3151-030-Q1-K1-D12
ccgacgcgtacggacaccaactacaacatacaaagcacaatattttaccaacaatcgcagccaaaatattctgctcgacttatactcctggggcgttctgcaaatattgctaccgcaaccattttcccacaatgctcacaaactcctataacttcccttcttcccccatacctctcaccaacggtgtcttcaatgtgtgaaaacccaattattcaaccctacaagatccaacatgcaatctcaacaagcatcttaccattattacccttgttccttcaacaaccgtcagccctattacagcacttaccttttgtccatttggtggcacaaaacatcagtgcacaacaactacaacaacttgtgctaacaaacctttcttcatactctcatcaacataattttttttcattcaacc

SEQ ID NO: 18543 - DNA, 73 bp, Zea mays
  Clone ID: LIB3151-030-Q1-K1-D9
aaaatcaattcaacctccttctacaaacataccactgacaaaacatactcttaccccacccaaatcactcatc

SEQ ID NO: 18544 - DNA, 354 bp, Zea mays
  Clone ID: LIB3151-030-Q1-K1-E10
gacaccaactaaccacataaaaagaccaacaatgtccccccaatggcagccccaacatagggtcggcttattctccgcgggcgctgctacagcaaccataccgcacccatgctcccacactgctaacaatctcctatatctcccctacttcccacatacctcttactagcggtgtgatcaccgagtgaaaacaccatacatcaaccatccagcatccaccacgcgcttctaacatgcatcataccattatcaccaacgatcatccaacatctgacatccctattacagcagtcacctattgtcccttaagaggcacacaacataacgacacaacaactacaacaacttgtgcta

SEQ ID NO: 18545 - DNA, 287 bp, Zea mays
  Clone ID: LIB3151-030-Q1-K1-E11
acagtgctctcatctccttacaccgactccctctttctgccactagtatattgacaatggggcggcttcttttacacagggctacaatcttaatcaatctcaacctatccatccgtcctcttctcaccatctatatcacgacaacactttccccccgctccttgccaacatcaccctcaacatcatgcccttccagctcccgcccttccatccttatcatgtcctcgtgctcattaatgcacttttgatttaccacactcatgtgcactacctactgcataatccca

SEQ ID NO: 18546 - DNA, 351 bp, Zea mays
  unsure at all n locations
  Clone ID: LIB3151-030-Q1-K1-E12
ggaaggcncggccgcgcgtgcggcccatacaaagcacaatattgtaccaacaatttcatccaaactatttagcctccttatcgtcggtgatctttctgcaagtgctgctactgccaccatcttcccgaaatgctcacacgctcctatagcttccctacttcccccgtaccatatcaccagctgtgtcttccatatgtgaaaacccaattcttcaaccctacaggatccaacaggcaatcacagttagcattttacctttatcacccttgttcctacaacaatcattaaccctattacatcaattacctttcgtgcatttattggcacaaaacattatggcacaacatctac

SEQ ID NO: 18547 - DNA, 427 bp, Zea mays
  unsure at all n locations
  Clone ID: LIB3151-030-Q1-K1-E9
acggcaacatacaaaccacaataatctaccaacttnttcacccaaaatattttccctggtgatgctttttttactctctgcacgcgctactacaacaaccattttccaaaaatgctcacaagctcctataactttccttcttcccccatacctctcaccaacattctattatgtatgtgaaaacccaatacttcaaccctacacgatccaacaagcaatcacagctggcatcttacctttatcaccctttttcctccaacattcatcatacctattacatcaattacctttatttcatttatttacacacaacatcatgtcacaacaactacaacaactttttctaacaaaccattctccctacatctagcaacatcattttcttccatccaaccaactaccttcatataacttttactttatattt

SEQ ID NO: 18548 - DNA, 277 bp, Zea mays
  Clone ID: LIB3151-030-Q1-K1-F10
caaatacttctacctttaccattttccaacaattcttacaagctcctataacttcccttcttccccacaacctctcaccatcttaatcttcactatatcaaaacccaattcttcaaccctaaaccatccaacattcaatcccatatttcatcttacctttatcacccttgttcctccaacaatcatcatccctaatacatctcttacctctcgttcatttattttcacaaaacattaatgtacaacaactacaccaactatttgctaacaaaccctt

SEQ ID NO: 18549 - DNA, 381 bp, Zea mays
  Clone ID: LIB3151-030-Q1-K1-F11
cgcaaattgcaccaagaaatccatcgagaggccgtcgacaggggaattaatggcggggtgggctatcaacagccacgggcgggtcatcctcgcaggcgccgtcctgctctccgtgctcgcggctgccagcgccagcgccgggacctcctgcgtgccggggtgggccatcccgcacaacccgctcccgagctgccgctggtacgtgaccagccggacctgcggcatcgggccgcgcctcccgtggccggagctgaagaggagatgctgccgggagctggcggacatcccggcgtactgccggtgcacggagctgagcatcctcatggacggcgcgatcccgccgggcccggacgcgcagctggagggccgcctagaggacct

SEQ ID NO: 18550 - DNA, 134 bp, Zea mays
  Clone ID: LIB3151-030-Q1-K1-F12
ataaacacaaccatctttcttcaatacttacaaacttctataacttccattcttcccacctactttctatcaattattatcttttactttataaccacctacctaactaaccctataacctcacacaaacaacc

SEQ ID NO: 18551 - DNA, 327 bp, Zea mays
  unsure at all n locations
  Clone ID: LIB3151-030-Q1-K1-G10
aaggaangccccggccgacccacacgaacaagtctaaatcactagcaactcattctacattatccaagctcacgaactcttccatgcgacggcttatttctcttatagcgtcacctaaaaacactacacattcccctcaattacaacaacctcacatagcaaaccctctccccacacaccttacatcaatgatagctcaaccaccttaaaacacatctcttcaaccctataagctccaacaagcaatctcttccaaccacatacccatatcaaacttgtaataacaatcgccatccctatcttcattacacgcattgatacaaacca

SEQ ID NO: 18552 - DNA, 321 bp, Zea mays
  unsure at all n locations
  Clone ID: LIB3151-030-Q1-K1-G12
aacaccacgcatcccatccaatcacanatcatctttatcttcaatacatacacattatcgcggggcttttcatcataaagatggtcatcctactcatcaagtccctggctctctcaactaccagctcctcttctatacaaattcccttcccctgcacgaatctgcatatcttttacagctctcactccaaccttacaactatgataatccccatccctctttacccctactacaaatacctaatccattctcatttcatcccactttctgatgctccctactactccccttattttcacactaacgccatttaccactctc

SEQ ID NO: 18553 - DNA, 381 bp, Zea mays
  Clone ID: LIB3151-030-Q1-K1-H10
gccacacgtccgcccacgcatcccgatgttccaacttccgttgacccttgaacaaaagactgttgagtatttactgaggagaggtgttctacaatatattgttactctgggtgtaagtctcaagtcatgctacctacatcatgaactcctgaacttgatgctagttcttatgtcaactcacatatgttctggaccatcttcagaaccaaaggatgtgcatcctttcattgatgcagctatgcttcaagacagctccatagtggcttcagcagtgcacaaattgttgctcaattttgtaacacggacaaaacttcctctaaatgcttctcaccctgctttctctgatgatgctcagcctggtgttctgcagcgagttggctc

SEQ ID NO: 18554 - DNA, 238 bp, Zea mays
  Clone ID: LIB3151-030-Q1-K1-H11
cgggcttgaaaccattagctttatctactccatatctcagaagaacccgatcgacaccactgtccgtttttatatcgagggcgtcggtctcctgcctctccatgcgaacgccaccttcacgcatacaatcggcggctgcggctgccagccaccttcgccggttcatctaccgacaccggtgcatctgccacctccagttcacctgccacctccagtgcatctaccaccgccagtccac

SEQ ID NO: 18555 - DNA, 324 bp, Zea mays
  unsure at all n locations
  Clone ID: LIB3151-030-Q1-K1-H12
attttgagcattcanaaacacaccaagcgaagctcactagcaacgacctaacaacagtgggtgccaagatattagccctccttgcgcttcttgccctttttgtgagcgcaacaaatgcgttcattattccacaatgctcacttgctcctagtgccattattccacagttcctcccaccagttacttcaatgggcttcgaacacctagctgtgcaagccaacatgcaacaacaagcgcttgcggcgagcgtcttacaacaaccaattgcccaattgcaacaacaatccttgccacatctaacaatacangccattacaacgcaac

SEQ ID NO: 18556 - DNA, 353 bp, Zea mays
  unsure at all n locations
  Clone ID: LIB3151-030-Q1-K1-H9
caagcaacatagaaagtggaatccagtagcaacaatagagcaacaatggagaccaaggtagtttccctccttatgctccttgctctttctacatgtgttgctaacgcgacaattttccctcaatgctcacaagctcctatagcttccctttttcccccataccttccatcaattatagcttcagtatgtgaaaacccagctcttcaaccatataggcttcaacaagcaatcgcagcaagcaacatacctttatcgcccttgttgtgtcaacaatcgccagccctatcttttgtgcagtcatttggacaaaccatcanggcacaacagctgcaacaactcgtgctacctgtgat

SEQ ID NO: 18557 - DNA, 442 bp, Zea mays
  Clone ID: LIB3151-031-Q1-K1-A12
cagaaacacaccaagcgaagcgcactagcattgacctaacaacaatggctaccaagatattagccgtccttgcgcttcttgccctttttgtgagcgcaacaaatgcgttcattattccacaatgctcacttgctcctagtgccattattccacagttcctcccaccagttacttcaatgggcttcgaacacctagctgtgcaagccaacatgcaacaacaagcgcttgcggcgagcgtcttacaacaaccaattgcccaattgcaacaacaatccttgccacatctaacaatacaagccatcacaacgcaacagcaacaacagttcctaccagcactgagccacctagccatggtgaaccctgccgcctacttgcaagagcagctgcttgcatccaacccacttgctctggcgaacgtagttgcaaaccagcaacaacaaca

SEQ ID NO: 18558 - DNA, 449 bp, Zea mays
  Clone ID: LIB3151-031-Q1-K1-A2
tctacttctctcctctctcccaccgcatcctatctcgtacctcacttcatcgccgcgcgccgccgcttcgacggcgcgccgaccggctaggacgcgcctccgacccggatagtgttccgctcggtcgaatccgacggccgctcgctgctgcagcgggcgcttgctgtgcgtcgcgtgggctcggctggaggcaggcggaacctttcctgggtctcggagatggcggcgcctccggcgagggcccgggccgactacgacttcctcatcaagctgctcctcatcggagatagcggtgttgggaaaagttgtctccttttacgggtctcagatggctccttcactactagcttcatcaccaccattgggattgacttcaaaataagaacagttgagcttgatggttagcgcattaaggtacagatatgggatactgctggtcaagaacgttt

SEQ ID NO: 18559 - DNA, 450 bp, Zea mays
  Clone ID: LIB3151-031-Q1-K1-A3
gcaacatagaaagtggaatccagtatcaactatagagcaacaatggcgaccaagagatttgccctccttatgctccttgctctttctgcatgtgttgctaacgcgacaattttccctcaatgctcacaagctcctatagcttcccttcttcccccataccttccatcaatgatagcttcagtatgtgaaaacccagctcttcaaccctataggctccaacaagcaatcgcagcaagcaacatacctttatcacccttgtttcaacaatcgccagccctatctttggtgcagtcattggtacaaaccatcagggcacagcagctgcagcaactcgtgctacctgtgatcaaccaagtagctctggcaaacctttctccctactctcagcaacaacaatttcttccattcaaccaactgtctacattgaaccgtgctgcttatttgcagcaa

SEQ ID NO: 18560 - DNA, 436 bp, Zea mays
  Clone ID: LIB3151-031-Q1-K1-A4
gcaaagcggcagtgcgtagagaggatcgtctaacagaacagcatgaagatggtcatcgttctcgtcgtgtgcctggctctgtcagctgccagcgcctctgcaatgcagatgccctgcccctgcgcggggctgcagggcttgtacggcgctggcgccggcctgacgacgatgatgggcgccggcgggctgtacccctacgcggagtacctgaggcagccgcagtgcagcccgctggcggcggcgccctactacgccgggtgtgggcagacgagcgccatgtaccagccgctccggcaacagtgctgccagcagcagatgaggatgatggacgtgcagtccgtcgcgcagcagctgcagatgatgatgcagcttgagcgtgccgctgccgccagcagcagcctgtacgagccaactctgatgcagcagcagcagcagc

SEQ ID NO: 18561 - DNA, 303 bp, Zea mays
  Clone ID: LIB3151-031-Q1-K1-A6
cagaccattagctttatctactccagagcgtagaagaacccgatcgacaccatgagggtggggctcgttgccctcgctctcctggctctcgctgcgagcgccacctccacgcatacaagcggcggctgcggctgccagccaccgccgccggttcatctaccgccgccggtgcatctgccacctccggttcacctgccacctccggtgcatctcccaccgccggtccacctgccgccgccggtccacctgccaccgccggtccatgtgccgccgccggttcatctgccgccgccaccatgccac

SEQ ID NO: 18562 - DNA, 400 bp, Zea mays
  unsure at all n locations
  Clone ID: LIB3151-031-Q1-K1-A9
aagcgaancacattancatcaacctaacatttatggtttccaagatattatccctccttgggcttgttgcgctttttgcgagcgcaacaaatgcgttcattattccacaatgctcacttgctccaagttccattattacacagttcctcccaccagttacttcaatgggcttcgaacacccagctgtgcaagcctataggctacaacaagcaattgcggcgagcgtcttacaacaaccaatttcccagttgcaacaacaatccttggcacatctaacaatacaaaccatcgcaacgcaacagcaacaacaattcctaccagcactgagccacctagccatggtgaaccctgccgcctacttgcaacagcagttgcttgcatcaaacccacttgctctgca

SEQ ID NO: 18563 - DNA, 454 bp, Zea mays
  Clone ID: LIB3151-031-Q1-K1-B1
ccaacaagcaacatagaaagtggattccattatcaacaatagagcaacaatggaggccaagatattttccctccttatgctccttgctctttctacatgtgttgctaacgcgacaattttccctcaatgctcacaagctcctatagcttccctttttcccccataccttccatcaattatagcttcagtatgtgaaaacccagctcttcaaccatataggcttcaacaagcaatcgcagcaagcaacatacctttatcgcccttgttgtgtcaacaatcgccagccctatctttggtgcagtcattggtacaaaccatcagggcacaacagctgcagcaactcgtgctacctgtgatcaaccaagtagctctggcaaacctttctccctactctccgcaacaacaattttttccattcaaccaactgtctacactgaaccctgctgcttatttg

SEQ ID NO: 18564 - DNA, 393 bp, Zea mays
  unsure at all n locations
  Clone ID: LIB3151-031-Q1-K1-B10
gncctagcttatgtgtttccagagggttatttaagatttcgcccttcaagacatgtgaaccgtcaggctgataaaaatgacactgaagatggcacaacgaccaggtctccagacagtcaactgaagagaaagcatgattctgttggaactgatgatatcaggtatgcaaagaggtcatcgaccagcccagttcatccgaaaaattcacctcaatctggaagcactggcgatgagactagatgtaacaaccaaataaaaagggctcctagcgatgcaagtggtggcagtccggcttcaccttaggcatcagagagaagcccagatactattctgtctgcccctaagtgcacgacaacaggagcagtgggttctggtgatgcaattagtaagcat

SEQ ID NO: 18565 - DNA, 291 bp, Zea mays
  Clone ID: LIB3151-031-Q1-K1-B11
ccataccgagttcttgcaactgggcaagatgaatggatgcttgaatttattacttccagttctcttgcacagattctatcagaacatcgcagtattacaagttacctacagaagttccatcctgatgaggatggtccttttgttataacggctcaatgtttggagacattcataaaaagctgcgccggttactctgtcattacatacatattgtgggttggagacaggcatttggataatcttcttctaactgatgatggacgtctttttcatgttgacttttctattatt

SEQ ID NO: 18566 - DNA, 387 bp, Zea mays
  Clone ID: LIB3151-031-Q1-K1-B12
cccacgcgtccgctccattcattcacacactataccttccgaactccgaactacaagtttcgcttctcgtcgcgacgactgggcgagaccgtcgccgccgcctgagttctttagaaatggctgatggtgaggacatccagcctcttgtctgcgacaatggcactggaatggtcaaggctggttttgctggcgacgatgcaccaagggctgctttccctagtattgctggccgtcctcgccacactggtgttatggtagggatgggacagaaggatgcgtatgttggcgactaggcacagtccacgagaggtattctcacgctcaagtatccgatcgagcatggtattgagagcaactgggatgacatggagaaaatctggcatcaca

SEQ ID NO: 18567 - DNA, 442 bp, Zea mays
  Clone ID: LIB3151-031-Q1-K1-B3
gttccttggaactataccaatgatgttcattgttgttatcctttctcctcatggctacttcgctcagtccaatgtgcttggataccctgacactggcggtcaggttgtgtacattctggatcaagtccgtgctttggagaatgagatgcttctgaggattaagcagcaaggccttgatatcactccgaagatcctcattgttaccaggctgttgcctgatgctgctgggactacgtgcggtcagcggctggagaaggtcattggtactgagcacacagacatcattcgcgttccgttcagaaatgagaatggcatcctccgcaagtggatctctcgttttgatgtctggccatacctggagacatacactgaggatgtttccagtgaaataatgaaagaaatgcaggccaagcctgaccttatcatttgcaactacagcgat

SEQ ID NO: 18568 - DNA, 446 bp, Zea mays
  Clone ID: LIB3151-031-Q1-K1-B4
gttggagatggcgctggagctcggtgacgctacgaggccggaggtcgcctgcccctactgcgacgaggaccatgacgtcgcatccctctgcatccacctcgaggaggaccacccctacgagccccacgccgcgccctgccccatttgctcccaaaggattacaagggatatgcttaaccatatcaccatgcaacatggttacttgttcaagaatggtcacagatcccgtagatttattgttccagagagccatgcgatttcattattgagtcgagatctacgtggtactcatttacaggctcttctagggggtggtcatggccacagatcaaataacgcagtgaccacaaacatttccagtgatcctcttctttcatcgtttggcctgagcttctcagcatctgatgcaccaaaaccatcaaaatcagcatcttctattccagacg

SEQ ID NO: 18569 - DNA, 451 bp, Zea mays
  unsure at all n locations
  Clone ID: LIB3151-031-Q1-K1-B5
tttgagcattcataaacacaccaagcgaagttcattagcaacaacctaacaacaatggctgcgaagatattatccctccttgcgcttcttgcgctttttgcgagcgcaacaaatgcgttcattattccacaatgctcacttgctccaagttccattattacacagttcctcccaccagttacttcaatgggcttcgaacacccagctgtgcaagcctataggctacaacaagcaattgcggcgagcgtcttacaacaaccaatttcccagttgcaacaacaatccttggcacatctaacaatacaaaccatcgcaacgcaacagcaacaacaattcctaccagcactgagccacctagccatggtgaaccctgccgcctacttgcaacagcagttgcttgcatcaaacccacttgcttctgcanacgtagtttgcaaccagccacaacaac

SEQ ID NO: 18570 - DNA, 416 bp, Zea mays
  unsure at all n locations
  Clone ID: LIB3151-031-Q1-K1-B6
ctctactccgagaggctgatgaccctgaccttcgtgtacgggttctggaagtacgtgagcggcctggagaggcgcgagacccgccgctacatcgaaatgttctacgccctgaagtaccgtagcctggcaagccaggttccgctgtccttcgattagtacggggaaagaagaagaagaagaagcccaggccggagaaccatcgcctgcatttcgatctgtttcaccgcaattcgcattgttagtcgtgtattggagttatgtgtacttggtttccaagaactttggttccttgtttttttttctttcttgtttgagcgtttttgggcagcgctggcctggttcctagtatggtgagaattggctgcaccttttgcttcgaataaaaatgcctgctcgttcacctgtcaaaanaaaaa

SEQ ID NO: 18571 - DNA, 329 bp, Zea mays
  Clone ID: LIB3151-031-Q1-K1-B7
cagcgcaacaaacgcgtccataatttcacaatgctcactcagctcctagttccattattccacagttcctcccaccaattactttcaatggccttcaaacacccagctgagcaagcctatatgcttcaacaagctattgcggctagcgtcttacaacaaccaattgcccaattgcaacaaccaatccttggcacatctaacaatacaaaccatcgcaacgcaacatcaacaacagttactaccatcactgaaccacttatccattgtaaaccctgtctcctaccatcaacatcagcttcttgcatacaatccacttgctctatcaaacc

SEQ ID NO: 18572 - DNA, 385 bp, Zea mays
  Clone ID: LIB3151-031-Q1-K1-C1
caacaagcaacatagaaagtggaattcagtttcaacaatagagcaacaatggcgaggaagatattttccctccttatgctccttgctctttctgcatgtgttgctaacgcgacaattttccctcaatgctcacaagctcctatagcttcccttcttcccccataccttccatcaatgatagcttcagtatgtgaaaacccagctcttcaaccctataggctccaacaagcaatcgcagcaagcaacatacctttatcacccttgtttcaacaatcgccagccctatctttggtgcagtcattggtacaaaccatcagggcacagcagctgcagcaactcgtgctacctgtgatcaaccaagtagctttggcaaacctttcttcct

SEQ ID NO: 18573 - DNA, 436 bp, Zea mays
  unsure at all n locations
  Clone ID: LIB3151-031-Q1-K1-C11
cataagaagaaaaaaaaaacacacacacactcacaaagcgcacttttcaaatcgacaaaggggaaaggttcgcttcttgtggcatcttgctttccttcgagtgccatggccgatccggcggaggagaacgttgtctcgccgccaccgacccctgcggccccagccgtgggcgcctcagacccgcccctgcagcctgctgctgacagcgcctcaacggagaaggtgtctgctccggcgccggaggtaaggtcccggggattcaggcttcttggagaggacacttccgtgcacaaatcccttgggggcggtaaaactgctgacgttctgttatggaaagacaagaaaacttctgctgttgtaataagcggcgcaactgtcatctgngttctgttcgaagtgcttgattaccacctnctgacccttgatatccatgtac

SEQ ID NO: 18574 - DNA, 444 bp, Zea mays
  Clone ID: LIB3151-031-Q1-K1-C12
gctcatcgactccagattggagaactcgacaccatgaaggtgctgatcgttgcccttgctgtcctggcgctcgctgcgagcgccgcctccagtacaagcggcggctgtggctgccagacaccaccgtttcatctaccgcctccgttctatatgccgcctccgttctatctgccgccgcagcagcagccgcagccatggcaataccccactcaaccaccgcagctaagcccgtgccagcagttcggatcctgcggcgtcggcagcgtcggcagcccgttcctgggccagtgcgtcgagttcctgaggcaccagtgcagcccggcggcgacgccctacggctcgccacagtgccaggcgctgcagcagcagtgctgccaccagatcaggcaggtggagccgctgcaccggtaccaggcgacatacggtgtggtcctgcagtccttc

SEQ ID NO: 18575 - DNA, 455 bp, Zea mays
  Clone ID: LIB3151-031-Q1-K1-C2
tcgttttgagcattcagaaacacaccatgtcgatttacattagcaacaacctaacaacggtggcgaccaagatattatccctccttgcgcttcttgcgctttttgcgagcgcaacaaatgcgttcattattccacaatgctcacttgctccaagttccattattacacagttcctcccaccagttacttcaatgggcttcgaacacccagctgtgcaagcctataggctacaacaagcaattgcggcgagcgtcttacaacaaccaatttcccagttgcaacaacaatccttggcacatctaacaatacaaaccatcgcaacgcaacagcaacaacaattcctaccagcactgagccacctagccatggtgaaccctgccgcctacttgcaacagcagttgcttgcatcaaacccacttgctctggcaaacgtagttgcaaaccagccacaacaa

SEQ ID NO: 18576 - DNA, 402 bp, Zea mays
  Clone ID: LIB3151-031-Q1-K1-C3
tttcagcattcagaaacacaccaagcgaagttcactagcaacaacctaacaacaatggctgccaagatattagccctccttgcgcttcttgcccttttagtgagcgcaacaaatgcgttcattattccacagtgctcacttgctcctagtgccattattccacagttcctcccaccagttacttcaatgggcttcgaacatccagccgtgcaagcctacaggctacaactagcgcttgcggcgagcgtcttacaacaaccaattgcccaattgcaacaacaatccttggcacatctaaacctacaaaccatcgcaacgcaacagcaacaacagtttctgccatcactgagccacctagccgtggtgaaccctgtcgcctacttgcaacagcagctacttgca

SEQ ID NO: 18577 - DNA, 429 bp, Zea mays
  unsure at all n locations
  Clone ID: LIB3151-031-Q1-K1-C4
accggccggaatcccggtcgccacgcgtcgacacctaccaacgagacgccggcgcctggtggccttcgcgaaggaggagcaccagttcctcgccgagctcggctcgcgcagcgcacccgggcgcgttcgcatgcggtgcgtgggcggctcaggtcccaccgcacctccacgagcccgaccaacaatcaggtcatcgcagaggtcgtggaggcgtcgtgcacgactacgaggagggcatgcgcgcctgcttnacgccgncaaacatggatggcgattcctgctcaaagcgaggagagatcgtaggcaaatcggtgatgcactgagagcaaagctccatcaccttggcaggcttgtgtcacttgagatggggaaaattcttcctgaaaggatcggtgaagttcaggaaatcatcgacatgtgtgattatgc

SEQ ID NO: 18578 - DNA, 428 bp, Zea mays
  Clone ID: LIB3151-031-Q1-K1-C5
caattagctcatcgactccagattggagaattcgattccatgaaggtgctgatcgttgcccttgctctcctggcgctcgctgcgagcgccgcctccagtacaagcggcggctgtggctgccagacaccaccgtttcatctaccgcctccgttctatatgccgcctccgttctatctgccgccgcagcagcagccgcagccatggcaataccccactcaaccaccgcagctaagcccgtgccagcagttcggatcctgcggcgtcggcagcgtcggcagcccgttcctgggccagtgcgtcgagttcctgaggcaccagtgcagcccggcggcgacgccctacggctcgccacagtgccaggcgctgcaacagcagtgctgccaccagatcaggcaggtggagccgctgcaccggtaccaggcgacata

SEQ ID NO: 18579 - DNA, 404 bp, Zea mays
  Clone ID: LIB3151-031-Q1-K1-C7
ctctgcctcccctgcctgtctctccacgccagtgctcgcagatccggcgggtgtgaagaggagctcatcacatcctctgctgctgcttctgtccaataagagctagctacctagctagctcgccgattcaacagcaagcggcggcagtgatgcgcgtacttgtcctcgcatagccaagatccgtccagcagcggcagcttgagcgcagacagattcaagaatggaggagaaagcggcggacgcgacggcgacagtggcggcggcagcggcagcggcagcggcagcggatcaggacggcgcggtgtactgcagcgagcacccgtacccgccaagcgcggcagcggcggccggggcgggcgcccgcggcatctgcgccttctgtctgcaggagaaagctggcatgc

SEQ ID NO: 18580 - DNA, 448 bp, Zea mays
  Clone ID: LIB3151-031-Q1-K1-D1
gcaacatacaaagtggaatccagtttcagctatagagcaacaatggagaccacgaggtctggcctacttatgctccttgctctttctacatgtgctgctaacgcgacaattttacctcaatgctcacaagctcctatagcttccctttttcccccataccttccatcaattatagcttcagtatgtgaaaacccagctcttcaaccatataggcttcaacatgcaatcgcagcaagcaacatacctttatcgcccttgttgtgtcaacaatcgccagccctatctttggtgcagtcattgctacataccatcagggcacaacagctgcaacaactcttgctacctgtgatcaaccaagtaactctggcaaacctttcatactactctgcgtaacaacaatttctttcattcaaccaactgtctacactgaaccctgctgcttatttgc

SEQ ID NO: 18581 - DNA, 396 bp, Zea mays
  Clone ID: LIB3151-031-Q1-K1-D11
gccagctgctgggaacctgcggcttaggctttacgctgaccctgggccagagcgtacagtttttgaggcatcagtgcagcccgacggcgacgccctactgctcgcctcagtgccagtcgttgcggcagcagtgttgccagcagctcaggcaggtggagccgcagcgccggtaccaggcgatcttcggcttggtcctccagtccatcctgcagcagcagccgcaaagcgggcaggtcgcggagctgttggcggcgcagatagcgcagcaactgacggcgatgtgcggtctgcagcagacgactacatgcccctacgctgctgccggttgtgtcccccactgaagaaactatgtgctgtagcatagccgctggctaactagctagttgagtcatttag

SEQ ID NO: 18582 - DNA, 336 bp, Zea mays
  Clone ID: LIB3151-031-Q1-K1-D12
attgagaccaacaagcaacatagaaagtggaatccagtagcaacaatagagcaacaatggcgaccaagatattttccctccttatgctccttgctctttctgcatgtgttgctaacgcgacaattttccctcaatgctcacaagctcctatagcttcccttcttcccccataccttccatcaatgatagcttcagtatgtgaaaacccagctcttcaaccctataggctccaacaagcaatcgcagcaagcaacatacctttatcacccttgtttcaacaatcgccagccctatctttggtgcagtcattggtacaaaccatcagggcacagcagc

SEQ ID NO: 18583 - DNA, 365 bp, Zea mays
  unsure at all n locations
  Clone ID: LIB3151-031-Q1-K1-D4
ggggtcttcanacnatnatctnnatntactttatagcttttaagaacccgatcgacaccatgagggtggtgctcgttgccctcgctctgctggctctcgctgcgagcgccacctccacgcatacaagcggcggctgcggctgccagccaccgccgccggttcatctaccgtcgacggtgcatctgccacctgcgggtcacctggcaactccggagcataatccaccgacggatcacctgccagcagctgggcacctgccaccgtcggagcatgtgccgcccgttgctgatccagcgccgtcagtttctgaggcaccaatgcagcccggcggcgacaccctacggctcgacacagtgccaggcgct

SEQ ID NO: 18584 - DNA, 397 bp, Zea mays
  Clone ID: LIB3151-031-Q1-K1-D5
cttcataattcacctagcgttcaatttaacaacaaccgaacaacaatggggaccgggatattatcaatccttgcgcttcttgcgctttttgcgagcgcaacaaatgcgtttattattccacaatgctcacttgctccaagttccattattacacagttcctcccaccagttacttcaatgggcttagaacacccagctgcgcaagcctataggctacaacaagcaattgcggtgagcgttttacaacaaccaattttccagttgcaacaacaatccttggcacatctaacaatacaaaccatcgcaacgcaacagcaacaacaattcctaccaacactgatccacctaaccatggtgaacccttgacactacttgcaacagcatttgcttgcatcaa

SEQ ID NO: 18585 - DNA, 453 bp, Zea mays
  unsure at all n locations
  Clone ID: LIB3151-031-Q1-K1-D7
acccaggcgnccgatggataccaactaccattttacttacggttttattttagcaacatcttagcaccaatgggggccgagatttttgccctccttgccctccttgctctttcagcaagcgctgctacctcgacttttattccacaatgctcacaacaatacctctctccggcgacagccgtgggatttcaatacccaactatacaatcctacatggtacaagaggccatccaagcaagcatcttacggtcattagcattaaccctccaacaaccatatgctctattgcaacagccatccttagtgcatctgtatcttcaaagaatcgcggcacaacaactacaacaacagttgctaccaacaatcaatcaagtagttgcagcgaaccttgcttgttacctccagcaacaacagtttctttcattcaatcaactagatggggtgaaccctgct

SEQ ID NO: 18586 - DNA, 210 bp, Zea mays
  unsure at all n locations
  Clone ID: LIB3151-031-Q1-K1-D8
tttttcatttttttttccccttttacatctccancaaccnaacaacagggggtgccaggatattataactcagggcacaactttcgcattttgcaagcgcaacaaatgccttcataatttacacaaagctcactagctccaacatccatcattacacataatcctttcaccaattacttcaatgtgcgaagtacacccaatttgagcaaa

SEQ ID NO: 18587 - DNA, 286 bp, Zea mays
  Clone ID: LIB3151-031-Q1-K1-D9
atatactaaagcttcatggggtagttgatcttgtcattccaagaggcatcaataagctggtttcacaaatcaagacatcaactaagatccctgttcttggtcatgctgatggtatctgtcatgtatacatcgacaaatcagctaacatgaatatggcaaaacaaatagtgatggatgccaaaattgattacccagcagcctgcaatgctatggagacattgcttgttcataaaagatctataaaggctccaggtctcgatgacttactgctatcactcaaaacaaa

SEQ ID NO: 18588 - DNA, 431 bp, Zea mays
  Clone ID: LIB3151-031-Q1-K1-E10
gcacaacccgctcccgagctgccgttggtacttgaccagccggacctgcggcatcgggccgcgcctcccgtggccggagctgaagaggagatgctgccgggagctggcggacatcccggcgtactgccggtgcacggcgctgagcatcctcatggacggcgcgatcccgccgggcccggacgcgcagctggagggccgcctagaggacctgccgggctgcccgcgggaggtgcagaggggattcgccgccaccctcgtcacggaggccgagtgcaacctggccaccatcagcggcgtcgccgaatgcccctggattctcggcggcggaacgatgccctccaagtaactgcgaagagcatagtgcatgaggaatgagctcgtagctagctcatatgtctgaataataagcacagcaagaagatgaatgcatt

SEQ ID NO: 18589 - DNA, 383 bp, Zea mays
  Clone ID: LIB3151-031-Q1-K1-E2
ggaaacccgggccgacccacgcgttcggtccctctggtcccacataaacatttcttttttaccgaaccacctgacgagctagggccagagcttgggagctgggacctgacacagccaccccggaatagcacgcacgatcggcaccctgccatgattaaagctaccagcgtgcctgatgcattttttctctgatgaagaaccatcgatcgattataaagcatcatttgtccattttgaccaattagtttccaggtcaaaaccaggcgattactttccagagtccagacccattcaaagctctccgccgtcctccttgctcctactcgggctacgacgctgcgccggtaggcacgaagcgttcgacgagtctctgcgcttcgacc

SEQ ID NO: 18590 - DNA, 451 bp, Zea mays
  unsure at all n locations
  Clone ID: LIB3151-031-Q1-K1-E5
gcgtccggcaacataaaaagcacattagngtaccaactttggctttcaaaatattttgcctccttatgctccttggtctttctgcaagtgctgctacagagaccattttcccgcaatgctcgcaagctcctatagcttgccttcttaccgcgtacctctcaccaacggagtcttcggtatgtgaaaacccaattcttcaaccctacaggatccaacaagcaatcgcagcttgcatcttacctgtatcacaccttgttcctccaacaatcattaaccgtatgacaacagctaccttccacgcatatattggcacaaaacatcagggcacaacaactacaacaactngtgctagcaaaccttgctgcctactctcagcaacagcagtttcttccattcaaccaactaggttcattgaactctgcttcttatttgcaacaacaacaactaccat

SEQ ID NO: 18591 - DNA, 367 bp, Zea mays
  Clone ID: LIB3151-031-Q1-K1-E9
agcaaagcggcagtgcgtagagaggatcgtttaacataacagcatgaagatggtcatcgggctcgtcgtgtgcctggctctgtcagctgccagcgcctctgcaatgcagatgccctgcccctgcgcggggctgcagggcttgtacggcgctggcgccggcctgacgacgatgatgggcgccggcgggctgtacccctacgcggagtacctgaagcagccgcagtgcagcccgctggcggcggcgccctactacgccgggtgtgggcagacgagcgccatgtaccagccgctccggcaacagtgctgccagcagcagatgaggatgatggacgtgcagtccgtcgcgcagcaactgcagatgatgatg

SEQ ID NO: 18592 - DNA, 451 bp, Zea mays
  Clone ID: LIB3151-031-Q1-K1-F1
caacaagcaacatagaaagtggaatccagtttcaacaatagagcaacaatggcgaccaagatattttccctccttatgctccttgctctttctgcatgtgttgctaacgcgacaattttccctcaatgctcacaagctcctatagcttcccttcttcccccataccttccatcaatgatagcttcagtatgtgaaaacccagctcttcaaccctataggctccaacaagcaatcgcagcaagcaacatacctttatcacccttgtttcaacaatcgccagccctatctttggtgcagtcattggtacaaaccatcagggcacagcagctgcagcaactcgtgctacctgtgatcaaccaagtagctctggcaaacctttctccctactctcagcaacaacaatttcttccattcaaccaactgtctacattgaaccgtgctgcttatttgc

SEQ ID NO: 18593 - DNA, 352 bp, Zea mays
  Clone ID: LIB3151-031-Q1-K1-F10
accaactagcaacatagaaagcacaatagtgtaccaacaatggcagccaaaatattttgcctccttatgctccttggtctttctgcaagtgctgctacggcgaccattttcccgcaatgctcgcaagctcctatagcttcccttcttcccccgtacctctcaccagcggtgtcttcggtatgtgaaaacccaattcttcaaccctacaggatccaacaggcaatcgcagctggcatcttacctttatcacccttgttcctccaacaatcatcagccctattacaacagttacctttggtgcatttattggcacaaaacatcagggcacaacaactacaacaacttgtgctag

SEQ ID NO: 18594 - DNA, 437 bp, Zea mays
  Clone ID: LIB3151-031-Q1-K1-F11
aactagcaacatagaaagcacaatagtgtatcaacaatggcagccaaaatattttgcctccttatgctccttggtctttctgcaagtgctgctacggcgaccattttcccgaaatgctcgcaagctcctatagcttcccttcttcccccgtacctctcaccagcggtgtcttcggtatgtgaaaacccaattcttcaaccctacaggatccaacaggcaatcacagctggcatcttacctttatcacccttgttcctccaacaatcatcagccctattacatcagttacctttggtgcatttattggcacaaaacatcaaggcacaacaactacaacaacttgtgctagcaaaccttgctgcctactctcagcaacagcagtttcttccattcaaccaactagctgcattgaactctgcttcttatttgcaacaaca

SEQ ID NO: 18595 - DNA, 436 bp, Zea mays
  Clone ID: LIB3151-031-Q1-K1-F12
gcaaagcggcagtgcgtagagaggatcgtcgaacagaacagcatgaagatggtcatcgttctcgtcgtgtgcctggctctgtcagctgccagcgcctctgcaatgcagatgccctgcccctgcgcggggctgcagggtttgtacggcgctggcgccggcctgacgacgatgatgggcgccggcgggctgtacccctacgcggagtacctgaggcagccgcagtgcagcccgctggcggcggcgccctactacgccgggtgtgggcagacgagcgccatgtaccagccgctccggcaacagtgctgccagcagcagatgaggatgatggacgtgcagtccgtcgcgcagcagctgcagatgatgatgcagcttgagcgtgccgctgccgccagcagcagcctgtacgagccagctctgatgcagcagcagcagcagc

SEQ ID NO: 18596 - DNA, 430 bp, Zea mays
  Clone ID: LIB3151-031-Q1-K1-F2
caactagcaacatagaaagcacaattttgtttcaacaatggcagccaaaatattgggcctgcttatgctccttggtctttctgcaagtgctgctacggcgaccattttcccacaatgctcacaagctcctatagcttcccttcttcccccgtacctctcaccagcggtgtcttcggtatgtgaaaacccaattcttcaaccctataggatccaacaggcaatcgcagctggcatcttacctttatcacccttgttcctccaacaatcatcagccctattacagcagttacctttggtgcatttattggcacaaaacatcagggcacaacaactacaacaacttgtgctagcaaaccttgctgtctactctcaacaacaacagtttcttccattcaaccaactagctgcattgaactctgcttcttatttg

SEQ ID NO: 18597 - DNA, 448 bp, Zea mays
  Clone ID: LIB3151-031-Q1-K1-F3
gctcaaggtcctggcaaacgcggatacccctgaggatgcattggctgcacggaacaacggggcagaaggaatcgggttatgccggacagagcacatgttcttcgcttcggatgagaggattaaggctgtgaggcagatgattatggctcccacagttgagctgaggcagcaggcgctggatcgccttctgccttaccagaggtctgacttcgaaggcatcttccgtgctatggatggactttcagtgactattcgacttctggaccctcccctccacgagttccttccagaagggaacgtcgaggaaatcgtgcgtgaactgtgttctgagacgggagccaaccaggaagatgccctcgcacggatcgaaaagctttcggaagtaaacccgatgcttggcttccgtggctgcaggcttggtatatcgtaccctgagctaacagaaatg

SEQ ID NO: 18598 - DNA, 421 bp, Zea mays
  unsure at all n locations
  Clone ID: LIB3151-031-Q1-K1-F7
ggcccgacccacgcgtctcgtaacattgcaacattanaaagtgggaattttagttttctcacaatcgagcaacacatggcgacggcgagaggtgtttccctcccttatgcgtccttgcgtctttctgcactgtgttgcgtaacagccacacattttctccttaatgcgtcacaagactcctatacgcttcccttcttcccccataccttccatcaatgatagcttcagtatgtgaaaacccagctcttcaaccctataggctacaacaaggcaatcgcagaaggcaccatacctttatcacccttgtttaaacatcgccagccctatctttggtgcacacattggtacaaaccatcagggcacagaagctgtagcaacttcgtgctacctgtgatcaaccaagaagctcttggaaaacctt

SEQ ID NO: 18599 - DNA, 364 bp, Zea mays
  unsure at all n locations
  Clone ID: LIB3151-031-Q1-K1-F9
agaccattagctttatctactccagagcgcagaagaacccgatcgacaccatgagggtgttgctcgttgccctcgctctcctggctctcgctgcgagcgccacctccacgcatacaagcggcggctgcggctgccagccaccgccgccggttcatctaccgccgccggtgcatctgccacctccggttcacctgccacctccggtgcatctcccaccgccggtccacctgccgccgccggtccacctgccaccgccgtccatggtgccgcgggggtcatctgcgcgcacatgcactacctactcaccgccnnggctagctatccagcaaccatgccggcacagcgatcaacccggcagtgagga

SEQ ID NO: 18600 - DNA, 452 bp, Zea mays
  Clone ID: LIB3151-031-Q1-K1-G1
gctggcttctcctccccctcttaccaagtcttcttcgggttagggttacttagggttttgtggaggggcgatggcggcggctgatgtggagtaccgttgcttcgtcggcgggcttgcctgggccaccagcaacgagtcgctggagaatgccttcgcctcctacggcgagatcctcgactccaaggtcatcaccgaccgggagacggggaggtctcgcggcttcggcttcgttaccttctcctccgagaactccatgctcgacgctatcgagaacatgaacggcaaggagctcgacggccgtaacatcaccgttaaccaggcccagtcccgtggcggtggcggtggcggcggtggctacggcggcggtcgcggcggcggcggctatggtggcgggcgccgtgacggcggttattgcggcggtggcggctaccgcggtcggcgcgagggtggtg

SEQ ID NO: 18601 - DNA, 438 bp, Zea mays
  Clone ID: LIB3151-031-Q1-K1-G10
cgcacacacacacaaccagatcttccccaattccacccgtcggcacctccgcttcaagatgcagatctttgtgaaaaccctgaccggcaagactatcaccctcgaggtggagtcgtctgacaccattgacaacgttaaggccaagatccaggacaaggagggcatccccccagaccagcagcggctcatcttcgctggcaaacagcttgaggacgggcgcacgcttgctgactacaacatccagaaggagagcaccctccaccttgtgctccgcctcaggggaggcatgcagatctttgtgaaaaccctgaccggcaagactatcaccctcgaggtggagtcctctgacaccattgacaacgtcaaggccaagatccaggacaaggagggcatcccttcagaccagcagcggctcatctttgctgggaagcagcttga

SEQ ID NO: 18602 - DNA, 405 bp, Zea mays
  Clone ID: LIB3151-031-Q1-K1-G11
gcaacatagaaagtggaatccagtagcaacaatagagcaacaatggcgaccaagatattttccctccttatgctccttgctctttctgcatgtgttgctaacgcgacaattttccctcaatgctcacaagctcctatagcttcccttcttcccccataccttccatcaatgatagcttcagtatgtgaaaacccagctcttcaaccctataggctccaacaagcaatcgcagcaagcaacatacctttatcacccttgtttcaacaatcgccagccctatctttggtgcagtcattggtacaaaccatcaaggcacagcagctgcagcaactcgtgctacctgtgatcaaccaagtagctctggcaaacctttcttcctactctcagcaacaacaatttctttca

SEQ ID NO: 18603 - DNA, 386 bp, Zea mays
  Clone ID: LIB3151-031-Q1-K1-G12
ggtcttcagaccattagctttatttactcctgagcgcagaagaacccgatcgacggcatgagggtgttgctcgttgccctcgctctcctggctctcgctgcgagcgccacctccacgcatacaagcggcggctgcggctgccagccaccgccgccggttcatctaccgccgccggtgcatctgccacctccggttcacctgccacctccggtgcatctcccaccgccggtccacctgccgccgccggtccacctgccaccgccggtccatgtgccgccgccggttcatctggcggcgccaccatgccgctaccctactgaaacgcccctgcctaaagctcatccccagccacacccatgcccgtgccaacagccgcattcaagccc

SEQ ID NO: 18604 - DNA, 213 bp, Zea mays
  Clone ID: LIB3151-031-Q1-K1-G2
cggaccgacccacgctttttttttttttcttctcgacttccgttttgagttttgaacaaacacactgccagtcagggaaggtgtataattttactgctccttccaccaccacccacacctatccaaatggctgatgactttgacaaccaccaacgtattaatatttatcgccgcctttgacatttccaacctcgtatcaactaccacctactt

SEQ ID NO: 18605 - DNA, 449 bp, Zea mays
  Clone ID: LIB3151-031-Q1-K1-G3
atggaatatgggcttggacaagattcaatctactgttcaattatctcccactcgctgccatgatagaaaagaaaataatctgcatgcatggaggcataggaaggtcaataaacacagtggagcaaattgagaaacttgagaggcctatcacaatggatgttggttccattgtcctcatggacctgctatggtctgatcctacagaaaatgatagtgtggagggtttgagacctaatgcacgagggcccggcttagtgacatttgggcctgatcgagtaacagaattctgtaaacgaaacaaattgcagttgatcataagagcccatgagtgtgttatggatgggtttgagcgtttcgctcatggacaattgatcactttattttcagcaacaaattactgtggtactgcgaacaacgcaggggccatacttgttgtcggcaggggctta

SEQ ID NO: 18606 - DNA, 366 bp, Zea mays
  unsure at all n locations
  Clone ID: LIB3151-031-Q1-K1-G6
caggtagataccacaaccctgtgcagagtttttgcagtctcatcaaggngacaggaacgacggaggacatggaggccaccctgtgcccgaagccccatttcgtggtcatcccatggccagccaccagccacatgatccccatcgtggacatcggctgcctcctcgccgcgcacggcgccgcggtcacgatcatcaccacgccctccagctcgcaactcgtccagagccgcgtggaccgcgccgggcaagcctcagcgggggtcacggtcaccgcgatcccgttcccgggcgcggaggccggcctgccggacggctgcgagaggacggaccacantccatcgtctgaccttgtgcccaactttttcg

SEQ ID NO: 18607 - DNA, 413 bp, Zea mays
  Clone ID: LIB3151-031-Q1-K1-G7
attatctttatctactccagagcgcagaatttcccgttcgacaccatgagggtgttgctcggtgccctcgctctcctggctctcgctgcgagcgccacctccacgcatacaagcggcggctgcggctgccagccaccgccgccggttcatctaccgccgccggtgcatctgccacctccggttcacctgccacctccggtgcatctcccaccgccggtccacctgccgccgccggtccacctgccaccgccggtccatgtgccgccgccggttcatctgccgccgccaccatgccactaccctactcaaccgccccggcctcagcctcatccccagccacacccatgcccgtgccaacagccgcattcaagcccgtgccagcttgaaggaacctggggggttggcaacacccc

SEQ ID NO: 18608 - DNA, 456 bp, Zea mays
  unsure at all n locations
  Clone ID: LIB3151-031-Q1-K1-G9
cgggcccgacgtacgcgtcctattaattctgttccatttcggcgctttcagttgtgcacataggnatgctcttgagagtcaggctgttaatgaagctactttccgttgccctgatgagctaggatggaaaccacagaggacacctatcatatcgtcagatggaagcatcttacacgcaagacagactacactgccagtggaggagataagcaagtctctccaacagatgggatacgacgtggtgccttcagacgacgctggtcgatttgtgtgcaactacgtctactaccactcactcaagtttgcagagaagcatgggatcgggtctctgtttgtccatttccccctcttcctggcaatcgatgaggaagtccagatgcaggttgtcgcttcccttctaaaagtcctcgctttcttgaacttccagtgaacctagtggtagaactaccactttcc

SEQ ID NO: 18609 - DNA, 444 bp, Zea mays
  Clone ID: LIB3151-031-Q1-K1-H1
ccaactagcaacatagaaagcacaattgtgttccaacaatggcagccaaaatattttgctggcttatgctccttggtctttctgcaagtgctgctaccgcaaccattttcccacaatgctcacaagctcctatagcttcctttcttcccccatacctctcaccagcggtgtcttcagtatgtgaaaacccaattcttcaaccctacaggatccaacaggcaatcgcagcaggcatcttacctttatcacccttgttcttccaccaccgcgaagccttataccagaagtaacttttgtggcattggtggcgccaaacaataaaggccaaacacttccaacacttgtgctaagaaaccttgctgcctactcttagcaacagcagtttctttcattcaaccaactggctgcattgaactctgctgcttatttgcaacaacaactacc

SEQ ID NO: 18610 - DNA, 445 bp, Zea mays
  Clone ID: LIB3151-031-Q1-K1-H10
attttgagcattcagaaacacacttagcgtttctacctagcaacgacttaacaacaatggctaccaagatattagccctccttgcgcttcttgccctttttgtgagcgcaacaaatgcgttcattattccacaatgctcacttgctcctagtgccattataccacagttcctccgaccagttacttcaatgggcttcgaacacctagctgtgcaagcctacaggctacaacaagcgcttgcggcgagcgtcttacaacaaccaattaaccaattgcaacaacaatccttggcacatctaaccatacaaaccatcgcaacacaacagcaacaacagttcctaccagcactgagccaactagatgtggtgaaccctgtcgcctacttgcaacagcaagtgcttgcatccaacccacttgctctggcaaacgtagctgcataccaaca

SEQ ID NO: 18611 - DNA, 240 bp, Zea mays
  Clone ID: LIB3151-031-Q1-K1-H11
cagaccattagctttatctactctagagcgtataagaacccgatcgacaccatgagggtggggctcgttgccctcgctctcctggctctcgctgcgagcgccacctccacgcatacaagcggcggctgcggctgccagccaccgccgccggttcatctaccgccgacggtgcatatggcaactacgggacacctggcacgttccgtgcatctatcacggacgagcaacctggaagcggcc

SEQ ID NO: 18612 - DNA, 405 bp, Zea mays
  unsure at all n locations
  Clone ID: LIB3151-031-Q1-K1-H2
ctactgcctactctcagcagcaacaatttcttccatttaaccaattcgccgcactgaaccgctctgcttatttccagcagcaaatactactaccatttggccagctagctacaacaagccccgcttccttcttgacacaacaacaattgcttccgttctaccagcagtttgtggctaaccccgcaacccttttacaactgcaacagttgctgccctttgtccaacttgctttgacaaacccagcagccttctaccaacaacacatcattggcggtgccctcttttagattgcttattagttgtcattcaataatgaagttttttggctgatgtatgtggcctcctagaaataagaagttatatttccaaaaaaaaaaannntaaaaataaaataaaataatatat

SEQ ID NO: 18613 - DNA, 449 bp, Zea mays
  Clone ID: LIB3151-031-Q1-K1-H3
cagcattcagaaacacaccaagcgaagcgcactagcaacaacctaacaacaatggctaccaagatattagccctccttgcgcttcttgcccttttagtgagcgcaacaaatgcgttcattattccacagtgctcacttgctcctagtgccattattccacagttcctcccaccagttacttcaatgggcttcgaacatccagccgtgcaagcctacaggctacaactagcgcttgcggcgagcgtcttacaacaaccaattgcccaattgcaacaacaatccttggcacatctaaacctacaaaccatcgcaacgcaacagcaacaacagtttctgccatcactgagccacctagccgtggtgaaccctgtcgcctacttgcaacagcagctacttgcatccaacccacttgctctggcgaacgtagctgcataccagcaacaacaacg

SEQ ID NO: 18614 - DNA, 349 bp, Zea mays
  Clone ID: LIB3151-031-Q1-K1-H4
accacgcgtccgattttcagcattcagaaacacaccaagcgattcgcactatcaacaacctaacaacaatggcgaccaagatattagccctccttgcgcttcttgcccttttagtgagcgcaacaaatgcgttcattattccacagtgctcacttgctcctagtgccattattccacagttcctcccaccagttacttcaatgggcttcgaacatccagccgtgcaagcctacaggctacaactagcgcttgcggcgagcgtcttacaacaaccaattgcccaattgcaacaacaatccttgcacatctaaacctacataccatcgcaacgcaacagcaacaacagttt

SEQ ID NO: 18615 - DNA, 313 bp, Zea mays
  Clone ID: LIB3151-031-Q1-K1-H5
cagaccattagctttatctactccagagcgcagaagaacccgatcgacaccatgagggtgttgctcgttgccctcgctctcctggctctcgctgcgagcgccacctccacgcatacaagcggcggctgcggctgccagccaccgccgccggttcatctaccgccgccggtgcatctgccacctccggttcacctgccacctccggtgcatctcccaccgccggtccacctgccgccgccggtccacctgccaccgccggtccatgtgccgccgccggttcatctgccgccgccaccatgccactaccctactc

SEQ ID NO: 18616 - DNA, 380 bp, Zea mays
  Clone ID: LIB3151-031-Q1-K1-H6
gcaacatagaaagcacaatagtgtaccaacaatggcagccaaaatattttgcttccttatgctccttggtctttctgcaagtgctgctaccgcaaccattttcccacaatgctcacaagctcctatagcttcctttcttcccccatacctctcaccagcggtgtcttcagtatgtgaaaacccaattcttcaaccctacaggatccaacaggcaatcgcagcaggcatcttacctttatcacccttgttcctccaacaaccgtcagccctattacagcagttacctttggtgcatttgttggcacaaaacatcaaggcacaacaactacaacaacttgtgctaggaaaccttgctgcctactctcagcaacagcagtttc

SEQ ID NO: 18617 - DNA, 435 bp, Zea mays
  unsure at all n locations
  Clone ID: LIB3151-031-Q1-K1-H7
ggccgaccacgcgtccgtgttgccatggtcaagcctatccaggacctttaggttgcagcaaacaagcttctcgaagaagcttgccgaaggggaagctccgataacatcacagttatcatcgtccgcttcatagacggaactaccggtgagaaatcaggcgacgacaaagagaccaccaacgaccaacactcctagctgtctcgtgtagggatccatcgtgctgtgtgttcttctggctgttgtacctgatgctcagagtagacactggctgctgctccgcaaggaaactgactcccccgaccgccgttcatgctcctggctggctcgctggccgcctcgacgggaacgctgccgcagaatgacgactggggctggtgtttgtgttacagtatggaccttttctttctttctttctttnccctttcatccattaag

SEQ ID NO: 18618 - DNA, 457 bp, Zea mays
  Clone ID: LIB3151-031-Q1-K1-H9
cgaccacgcgtccgggaacctgctcgttggcagcaccccgatcttgggtcagtgcgtcgagttcctgaggcatgagtgcagcccgacggcgacgccctactgctcgcctcagtgccagtcgttgcggcagcagtgttgccagcagctcaggcaggtggagccgcagcaccggtaccaggcgatcttcggcttggtcctacagtccatcctgcagcagcagccgcaaagcggccaggtcgcggagctgttggcggcgcagatagcgcagcaactgacggcgatgtgcggcctgcagcagccgactccatgcccctacgctgctgccggcggtgtcccccactgaagaaactatgtgctgtaatatagccgctggctagctagctagttgagtcatttaacggcgatgatcgagtaataatgtggcacgcatcaccatgggtggcagtgtcagtgtgag

SEQ ID NO: 18619 - DNA, 311 bp, Zea mays
  Clone ID: LIB3151-033-Q1-K1-A1
agaccattagctttatctactccagagcgcagaagaacccgatcgacaccatgagggtggggctcgttgccctcgctctcctggctctcgctgcgagcgccacctccacgcatacaagcgggggctgcggctgccagccaccgacgccggttcatctaccgtcgccggtgcatatgccacctacggttcacctgccacctccggtgcatttcccaccgacggtccacctgccggcgccggtccacctgccaccgccggtccatgtgccgccgtcggttcatgtgccgtcgtcaccatgccactaccctact

SEQ ID NO: 18620 - DNA, 326 bp, Zea mays
  Clone ID: LIB3151-033-Q1-K1-A2
agacagtgaacttcatttacatcaatacaccaacaatcgcgaccaacacctttaccctccggatggtccttgctctttgtgggtgtgttgctaacaccacaatctccactcaatgctcacaagcttgtatagcgttacctccttcccccataccatccatcaatcatcgctgcatgtgtgcgaaaaccgatcatcttcaaccttataggcatcaacaagcagacgtaccaatcaacatacctgtataacccttgttacaacaatctgcaggcctatctttggagcagtcattggtacaaaccatcatcgctcatcaactgcaccaa

SEQ ID NO: 18621 - DNA, 185 bp, Zea mays
  Clone ID: LIB3151-033-Q1-K1-A3
gtacagacacccataactatatcacggttgcccaatggatgcttcaaactcctgcagcaacgagtggcatgtgatgcattggagcggacaaattatcacacgaaatgaagaaaaacgctcaagctgcaggagctactgctcattactacgaggatgagactgcttctactggcacatgtactgta

SEQ ID NO: 18622 - DNA, 537 bp, Zea mays
  unsure at all n locations
  Clone ID: LIB3151-033-Q1-K1-A4
aattcaccgggctcgagcccagcgcgtcgcgatacttttgagccattcagtaaacactacctaagcgaagctacattagcaacaactctaacaacaatgggctggcaagnatattatcgcctccttgcgccttcttgcgcatttttgcgaagcgcaagcaaatgcgttcattanttccacaatggctttcacttgctccaagttccattattacacgagttcctcccaccaagtatacattcaatgggtcttcgaacaagcccagctgtgcaagcactatanggctacatacaagcaattgcggctgagcgtcttacaacaaccaatttcccagttgcaacaacaatccttggcacatctaacaatacaaaccatcgcaacgcaacagcaacaacaattcctaccagcactgagccacctagccatggtgaaccctgccgcctacttgcaacagcagttgcttgcatcanacccacttgctctggcaaacgtagttgcaaaccagccacaacaacagctgcacagtttttgcagcgc

SEQ ID NO: 18623 - DNA, 89 bp, Zea mays
  Clone ID: LIB3151-033-Q1-K1-A5
atcacccaaacctctatcagctctccccactacatacttcaaactcctccttccaggagtggcttcttatacattatgcctctctactc

SEQ ID NO: 18624 - DNA, 366 bp, Zea mays
  Clone ID: LIB3151-033-Q1-K1-A6
ggctcgctgggctagacttcgtgcagctgtggcagcctcagacatctttactctccgttagcagctatctggctattggagcttttccaatgagactgtcaccgccaatcctccatttgcatggcttcgctacaacaaggatgatattgaagatctggaggccttcctactcgagaaaaagattatcactcgaggtggcacaaggtttggagtggatgcaagggctgtcacagttagtatggttgacacagaccaagccttcaatgtgttcatcaatcgtctggccacaatgaagtgaaatttcagcgcaaattaataaagcactttgtggttactacaaggatgaccccgttttacatggaacaa

SEQ ID NO: 18625 - DNA, 360 bp, Zea mays
  Clone ID: LIB3151-033-Q1-K1-A7
gccacccagaactctatcagggttgcccaatggatgcttcaaactcctggtgcaacaagtggcatgggatgcattggaaaggacaagtttggtgaggaaatgaagaaaaacgctcaagctgcaggagttactgctcattactacgaggatgagactgctcctactggcacatgtgctgtatgtgttgttggtggtgaaaggtcattgattgcaaatctgtcagcggcaaactgttacaaatctgagcatctaaagagaccagagaactgggcactagttgaaaaggcaaaatacatctacattgctggatttttccttacagtgtcgcctgattctatccagctagtcgctgagcatgct

SEQ ID NO: 18626 - DNA, 412 bp, Zea mays
  Clone ID: LIB3151-033-Q1-K1-A8
ttttgctcggaacgcacacaccgcccggtccccgatctccgatcccctcgtcgatccaaagaggcagatcttcgtcaagaccctcactggaaagactatcaccctcgaggtggagtcttctgacaccattgacaacgtcaaggccaagatccaggacaaggagggcatccccccggaccagcagcggctcatctttgctggcaagcagctcgaggacgggcgcacacttgccgactacaacatccagaaggagagcaccctccaccttgttctccgcctcaggggaggcatgcagatcttcgtcaagaccctcactggaaagactatcaccctcgaggtggagtcttctgacaccatcgacaacgtcaaggccaagatccaggacaaggagggcatccctccagaccagcag

SEQ ID NO: 18627 - DNA, 419 bp, Zea mays
  Clone ID: LIB3151-033-Q1-K1-B1
attttgaacactcaaaatcacaccattcgaaccacatatgctacaacctatcaacactgggtgcgaggatattatccctccgtgcgcttattgcgctttttgcaagcgcaacaaatgcgtacattattccacaatgcttacttgctccaagttccattattacacagctcctccaaccagttacttcaatgggcttcgaacacccacctgtgcaagtctataagctacaacaagcaattgcggcgatgcgcttacaacaaccaatttcccagttgcaacaacaattattggcacatctaacaatacaaaccattgcatcgcaacagcatcaactatttctaccaacactgagccatctagccatggtgaaaactgccgcctacttgcaacagcaagttgcttgcatcaaacccacttgc

SEQ ID NO: 18628 - DNA, 369 bp, Zea mays
  Clone ID: LIB3151-033-Q1-K1-B2
atttagtgcattcagaaccacgcgaagcgaagcacattcactgcaacctaactgcattggagtgcggagatattatcctgcgttgcgcttcttgcgctttttgcgagcgcaacaaatgcgtacattataccacactgctgattcgctccaagttacatcattacacagatcctcccaccagttactgcaatgggcttctaacaccgagctgtgctagcgtatacgctacaacaagcaattgcgcggagcgtattacaacaaccaatttccgagatgcaacaactagtcttggcacatctaacaatacataccatcgcaacgcaacagcaacaacatttcctaccagaactgagccacctagccatggcg

SEQ ID NO: 18629 - DNA, 386 bp, Zea mays
  Clone ID: LIB3151-033-Q1-K1-B3
attttgatcattcagaagcacgccatgcgaagcacattaacaacaacctagcaacagtgggtacgcggacatgatcgcgccgtgcgctacttgcgcgttttgcgagcgcaacaaatgcgttcattattccacactgctgactcgctccaagttccatcattacacagatcctcccaccagttactgcgttgagcttctaacacccagctgtgcaagcgtatacgctacaacaagcaattgtgcttagcgtaatacaacaaccaatttccgagatgcaacaacaattcttggcacatgtaacaatacaaaccattgcaacgcaacagcaacgacaattttctaccatcattgagccacctaaccatggtgaaccctgccggctactt

SEQ ID NO: 18630 - DNA, 338 bp, Zea mays
  Clone ID: LIB3151-033-Q1-K1-B5
cagaaacacaccaagcgaagcacattagcaacaacctaacaacaatggctaccaagatatgatccctccttgcgcttcttgcgctttttgcgagcgcaacaaatgcgttcattattccacaatgctcacttgctccaagttccattattacacagttcctcccaccagttacttcaatgggcttcgaacacccagctgtgcaagcctataggctacaacaagcaattgcggcgagcgtcttacaacaaccaatttcccagttgcaacaacaatccttggcacatctaacaatacaaaccatcgcaacgcaacagcaacaacaatttctaccagcactg

SEQ ID NO: 18631 - DNA, 239 bp, Zea mays
  Clone ID: LIB3151-033-Q1-K1-B6
ctgggtcttcagaccattagctttatctactccagagcgcagaagaacccgatcgacaccgtgagggtgttgctcgttgccctcgctctcctggctctcgctgcgagcgccacctccacgcatacaagcggcggctgcggctgccagccaccgccgccggttcatctaccgccgccggtgcatctgccacctccggttcacctgccacctccggtgcatctcccaccgccggtccacct

SEQ ID NO: 18632 - DNA, 239 bp, Zea mays
  Clone ID: LIB3151-033-Q1-K1-B7
atgtttatcattcacaaacacaccatgcgatgcacactaccaacaagctaacaacagtggcgtccaagatatgagccctccttgcgcttcttgccgcttcagtgagcgcaacaaatgcattcattattccacagggcgcacttgcttctagtgccattatttcacaattccttccaccagttacttaaatgcgctttgaacatgcatctctgctagcctacacgctacaactagcgctt

SEQ ID NO: 18633 - DNA, 283 bp, Zea mays
  Clone ID: LIB3151-033-Q1-K1-B8
accaactagcaacatagaaagcacaatagtgtaccaacaatggcagccaaaatattttgctgccttatgctccttggtctttctgcaagtgttgctaccgcaaccattttcccacaatgctcacaagctcctatagcttcccttcttcccccatacctctcaccagcggtgtcttcaatgtgtgaaaacccaattgttcaaccctacaggatccaacaggcaatcgcaacaggcatcttaccattatcacccttgttcctccaacaaccgtcagccctattac

SEQ ID NO: 18634 - DNA, 167 bp, Zea mays
  Clone ID: LIB3151-033-Q1-K1-C2
attctgaacattcagaaacacaccaagcgaagcacattatccacagcctaacaacattggcggccgagatattatccctgcttgcgctgcttgcgctatttgcgagcgcatcaaatgcgtatcattattacacaatgctaacttgcttcaagttccattattacaca

SEQ ID NO: 18635 - DNA, 374 bp, Zea mays
  Clone ID: LIB3151-033-Q1-K1-C3
gttctagatcgcgagcggccgacctagaggatcatattttactcactcttgctaacacagctagggttataaaatggattcgtgagacaccctatctataaccaccactttacatccataccattactatcacacttacatgtggcacacacattagtcaatcacatgatcgcccatgatatatatgtaaagatagcaaatattaaagcactaaacctaattgccaacatcacaacaagctgattggcccatggcactcgcaatggcccacgccattacgctctttcttcttctacattacgcgtctcttaaaagaaacactacagggcgcattacattcaccccctttgggttaaatcggacacttgcataaa

SEQ ID NO: 18636 - DNA, 390 bp, Zea mays
  Clone ID: LIB3151-033-Q1-K1-C4
agaccattagctttatctactccagagcgcagaagaacccgatcgacaccatgagggtggggctcgttgccctcgctctcctggctctcgctgcgagcgccacctccacgcatacaagcggcggctgcggctgccagccaccgccgccggttcatctaccgccgccggtgcatctgccacctccggttcacctgccacctccggtgcatctcccaccgccggtccacctgccgccgccggtccacctgccaccgccggtccatgtgccgccgccggttcatctgccgccgccaccatgccactaccctactcaaccgccccggcctcagcctcatccccagccacacccatgcccgtgccaacagccgcatccaagcccgtgccagctgc

SEQ ID NO: 18637 - DNA, 326 bp, Zea mays
  Clone ID: LIB3151-033-Q1-K1-C5
agcaacatagaaaggggaatccactagcaacaataaaccaacaatggagaccaagagatgggccctccttatgctccgtgctgtttctacatgtgttgctaacgcgacaatataccctcaatgctcacaagctcctatagcttccctttttcccccataccttccatcaattatagctacagtatgtgaaaacccaactcttcaaccatataggcttcaacaggcatttgcagcaagcagcatacctttatcgcccttgttgtgtcaacaatccccagccctatctttggtgcagtcatcggtacaaaccaaaagggcacaacagc

SEQ ID NO: 18638 - DNA, 447 bp, Zea mays
  unsure at all n locations
  Clone ID: LIB3151-033-Q1-K1-C7
tagcaacatagaaagcacaatagtgtaccaacaatggcagccaaaatattttgcctgcgttgtgctccttggtctttctgcaagtgctgctacggcgaccattttcccgaaatgctcgcaagctcctatagcttcccttcttcccccgtacctctcaccagcggtgtcttcggtatgtgaaaacccaattcttcaaccctacaggatccaacaggcaatcacagctggcatcttacctttatcacccttgttcctccaacaatcatcagccctattacatcagttacctttggtgcatttattggcacaaaacatcagggcacaacaactacaacaacttgtgctagcaaacctngctgcctactctcagcaacagcagtttcttccattcaaccaactaactgcattgaactctggtttttatttgcacaacaacaacttcccatt

SEQ ID NO: 18639 - DNA, 320 bp, Zea mays
  Clone ID: LIB3151-033-Q1-K1-C8
ctgcattgaactctgctgcttatttgcaacaacaattaccattcagccagctagttgctgcctaccctcagcaatttcttccattcaaccaactagcagcattgaactctgctgcttatttacagcagcaacaactactaccattcagccagctagctgatgtgagccctgctgccttcttgacacaacaacagttgttgccgttctacctgcacgctatgcctaacgctggcaccctcttacaactgcaacaattgctgccattcaaccaacttgctttgacaaactcaacagtgttctaccaacaacccatcattggt

SEQ ID NO: 18640 - DNA, 372 bp, Zea mays
  Clone ID: LIB3151-033-Q1-K1-D1
attatgagcattcacaaacacaccaagcgaagcacattagcaacaacctaacaacaatggcgtacgcaagatattatccctccttgcgcttcttgcgctttttgcgagcgcaacaaatgcgttcattattccacaatgctcacttgctccaagttacattattacacagttcctcccaccagttacttcaatgggcttcgaacacccagctgtgcaagcctataggctacaacaagcaattgcggcgagcgtcttacaacaaccaatttcccagttgcaacaacaatccttggcacatctaacaatacaaaccatcgcaacgcaacagcaacaaacaattcctaccagcactgagccacctagccatggtga

SEQ ID NO: 18641 - DNA, 106 bp, Zea mays
  Clone ID: LIB3151-033-Q1-K1-D3
tcgtccacgcgtgatatattatttctccaatcgagcaacaccggcaacgaacaaatcgagcccggggagaggcaatgacacactcgcacgcgttgcacaccctaca

SEQ ID NO: 18642 - DNA, 89 bp, Zea mays
  Clone ID: LIB3151-033-Q1-K1-D4
tacacccatgaaagaaatgacaacaatcgaccttcctagccaaccagatcatctactaccatggcgacaaatgatccttcttcgtgcca

SEQ ID NO: 18643 - DNA, 311 bp, Zea mays
  Clone ID: LIB3151-033-Q1-K1-D5
cagaccattatctttatctactccagagcgcagaagaacccgatcgacaccatgagggtggggctcagagccctcgcggtcctggctctcgctccgagcgccacctccacgcatacaagcggcggctgcggctgccagccaccgccgacggttcatctaccgccgccggtgcatctgccaccttcggttcacctgccacctccggagcatctcccaccgccggtccacctgccgccgccggtccacctgccaccgccggtccatgtgccgcctccggttcatctgccgccgccaccatgccactaccctac

SEQ ID NO: 18644 - DNA, 76 bp, Zea mays
  Clone ID: LIB3151-033-Q1-K1-D6
gccgccgccacaatgcaattaccttattaaaccgcccgggcttaagcttattcccaggcagaaccattcccgtggc

SEQ ID NO: 18645 - DNA, 306 bp, Zea mays
  Clone ID: LIB3151-033-Q1-K1-D7
aagtggaattcagtagcaacaatagagcaacaatggcgaccaagatattttccctccttatgctccttgctctttctgcatgtgttgctaacgcgacaattttccctcaatgctcacaagctcctatagcttcccttcttcccccataccttccatcaatgatagcttcagtatgtgaaaacccagctcttcaaccctataggctccaacaagcaatcgcagcaagcaacatacctttatcacccttgtttcaacaatcgccagccctatctttggtgcagtcattggtacaaaccatcagggcac

SEQ ID NO: 18646 - DNA, 356 bp, Zea mays
  Clone ID: LIB3151-033-Q1-K1-D8
aagcggaatccagtatcaacaatagagcaacaatggcgaccaacatattttccctccttaggctccttgctctttctgcatgtgttgctaacgcgacaattttccctcaatgctcacaagctcctatagcttcccttcttcccccataccttccatcaatgatagcttcagtatgtgaaaacccagctcttcaaccctataggctccaacaagcaatcgcagcaagcaacatacctttatcacccttgtttcaacaatcgccagccctatctttggtgcagtcattggtacaaaccatcatggcacagcagctgcagcaactcgtgctacctgtgatcaaccaagtagctctggca

SEQ ID NO: 18647 - DNA, 340 bp, Zea mays
  Clone ID: LIB3151-033-Q1-K1-E1
gccgaaagatgtaccaacggcagcacatcagccgccgtcgccatcccaataccctactcagccgggcccgcctcagcctcaggctgagtgcaaccacgccagtgccaacaaacgcatcacaagcccgtactagctgcacggaacctgcagacctggcagcaatcatagcctgagccagtgcaaacagatcctgacgcatcaatgcactccgacagggacgccctacaagcaacataactttatcacccttggttcaacaatcgccaggcctatctttggtgcagacattggtgcaaaccatcagggcacagcagctgcagcaactcgtgctatctgtgat

SEQ ID NO: 18648 - DNA, 155 bp, Zea mays
  Clone ID: LIB3151-033-Q1-K1-E2
aacaaatcacattctcaccttctaaactatgcaatcttttctacacacgaataccacgtggtaggtcttctatattgtcatgtatgttcaattcactgcccattgctcaacaacatttcgactgtgataacgctagccattcccaacttaattta

SEQ ID NO: 18649 - DNA, 54 bp, Zea mays
  Clone ID: LIB3151-033-Q1-K1-E3
actagttctagatcgcgagcggacgaccttaacaaccccttaacaccctttgat

SEQ ID NO: 18650 - DNA, 324 bp, Zea mays
  Clone ID: LIB3151-033-Q1-K1-E5
cagaaacacaccaagcgaagcacattagcaacaacctaacaacaatggctaccaagatatgagccctccttgcgcttcttgcgctttttgcgagcgcaacaaatgcgttcattattccacaatgctcacttgctccaagttccattattacacagttcctcccaccagttacttcaatgggcttcgaacacccagctgtgcaagcctataggctacaacaagcaattgcggcgagcgtcttacaacaaccaatttcccagttgcaacaacaatccttggcacatctaacaatacaaaccatcgcaacgcaacagcaacaacaat

SEQ ID NO: 18651 - DNA, 357 bp, Zea mays
  Clone ID: LIB3151-033-Q1-K1-E6
attgagaccaactagcaacatagaaagcacaatagtgtaccaacaatggcagccaaaatatgttgcctccttatgctccttggtctttctgcaagtgctgctacggcgaccattttcccgaaatgctcgcaagctcctatagcttcccttcttcccccgtacctctcaccagcggtgtcttcggtatgtgaaaacccaattcttcaaccctacaggatccaacaggcaatcacagctggcatcttacctttatcacccttgttcctccaacaatcatcagccctattacatcagttacctttggtgcatttattggcacaaaacatcaaggcacaacaactacaacaacttgtgcta

SEQ ID NO: 18652 - DNA, 369 bp, Zea mays
  Clone ID: LIB3151-033-Q1-K1-E8
agaccaactagcaacatagaaagcacaatagtgtaccaacaatggcagccaaaatagttgggctccttatgctccttggtctgtctgcaagtgctgctacggcgaccattttcccgaaatgctcgcaagctcctatagcttcccttcttcccccgtacctctcaccagcggtgtctttggtatgtgaaaacccaattcttcaaccctacaggatccaacaggcaatcacagctggcatcttacctttatcacccttgttcctgcaacaatcatcagccctattacatcagttacctttggtgcatatattggcacaaaacatcatggcacaacaactacaacaacttgtgcttgcaaactctgctgcct

SEQ ID NO: 18653 - DNA, 180 bp, Zea mays
  Clone ID: LIB3151-033-Q1-K1-F1
ctacaagcagcatggaaagtgcaatccagtggcagcaatgaagcaacaatggagaccacgagatgctctctgcttaagctccacgctcgctatacatgtgctgatgacccgacaattattactgaatgctcacaagctcatatagctatggttgctgcaccagacctaccatcaatgata

SEQ ID NO: 18654 - DNA, 443 bp, Zea mays
  Clone ID: LIB3151-033-Q1-K1-F2
gccaggtcataatcgatcactggctggtcacagttctgctgataattcttttcctaagcagatggacaaaagcctttctgaagggcattgagacatggaacaaagagacagtaatccaaagggaggctgcgaaacttttggagcaaactgcaggtgacgaagcagagtatgcagcacttactactggaccagatgttgcaccaaacaaaaaagccctcacatgagatgaggcgccatcgcttataaagaacatacactggaagaaggttggtcttctttcattagtatgggtggcattccttgttcttcaggtcacaaagaattacactgctacttgctccccatggtattgggtcttgaaccttatccaggttccagtgtcagtaggagtgacactgtatgaaggatttgggctgatgagtgggaagagggtgttatcatca

SEQ ID NO: 18655 - DNA, 75 bp, Zea mays
  Clone ID: LIB3151-033-Q1-K1-F3
atctaataaccaaagaaacctaaatcgcatcactccattccattacatatcaaatgatcgagtaggggtctgtgt

SEQ ID NO: 18656 - DNA, 324 bp, Zea mays
  Clone ID: LIB3151-033-Q1-K1-F4
tttcttaacaatatcagccaaaatattctgcttccttatgctccttggtctttctgcaagtgttgggtaccgaaccaatttcgcacagtgctcacaagctcctatagcttcccttattcccccatacctctcaacagcggtgtcttcaatgtgtgaaaacccaattgttcaaccctacaggatccaacaggcaatcgcaacacgcattttaccattatcacccttgttcctccaacaaccgacagccctattacagcagttacctttggtccatttggtggcacaaaacaatatggcacaacaactacaacaacttgtgctagc

SEQ ID NO: 18657 - DNA, 145 bp, Zea mays
  Clone ID: LIB3151-033-Q1-K1-F5
accattatatctatctactccagagcgcataataacccgatcgacaccatgagggtggtggtcgttgccctcgctctgctggctctctatatgagctccacctccacacatacaacctgcgggtgcggctgccagtcaccgtcgc

SEQ ID NO: 18658 - DNA, 346 bp, Zea mays
  Clone ID: LIB3151-033-Q1-K1-F6
caacaatggcagccaaaatattttgcttccttatgctccttggtctttctgcaagtgttgctaccgcaaccattttcccacaatgctcacaagctcctatagcttcccttcttcccccatacctctcaccagcggtgtcttcaatgtgtgaaaacccaattgttcaaccctacaggatccaacaggcaatcgcaacaggcatcttaccattatcacccttgttcctccaacaaccgtcagccctattacagcagatacctttggtccatttggtggcacaaaacatcagggcacaacaactacaacaacttgtgctagcaaaccttgctgcatactctcagcaaca

SEQ ID NO: 18659 - DNA, 313 bp, Zea mays
  Clone ID: LIB3151-033-Q1-K1-F7
attagctcatcgactccagattggagaactcgacaccatgaaggtgctgatcgttgccctggctctcctggcgctcgctgcgagcgccgactccagtacaagcggcggctgtggctgccagacaccaccgtttcatctaccgactccgtactatatgccggctccgttctatctgccgccgcagcagcagccgcagccatggcaataccccactcaaccaccgcagctaagcccgtgccagcagttcggatcctgcggcgtcggcagcgtcggcagcccgatcctgggccagtgcgtccagttcctgaggcac

SEQ ID NO: 18660 - DNA, 367 bp, Zea mays
  Clone ID: LIB3151-033-Q1-K1-G1
caactagcaacatataaagcacaatagtgtaccaacaatggcagccaaaatatttcgcctcgttatgctccttggtctttctgcaagtgctgctacagcgaccattttcccacaatgctcacaagctcctatagcttcccttcttcccccgtacctctcaccagcggtgtcttcggtatgtgaaaacccaattcttcaaccctataggatccaacaggcaatcgcagctggcatcttacctctatcacccttgttcctccaacaatcatcagccctattacagcagttacctttggtgcatttattggcacaaaacatcatggcacaacaactacaacaacttgtgctagcaaaccttgctgcctac

SEQ ID NO: 18661 - DNA, 225 bp, Zea mays
  Clone ID: LIB3151-033-Q1-K1-G3
tacgtaccactataaacagaacaagcacaatcctgcaccagcaaccgaagcataaagactgcgggtgcttatgctccttggtgtatgtgcaggtgctgctaccgctaccattcaacgactatgctcacacgatcctatagcttccttccttaacctgtcactatcaccaactgtgtcttcggaatgagacaaccctataccctaccctaccaatccaacatgcaa

SEQ ID NO: 18662 - DNA, 58 bp, Zea mays
  Clone ID: LIB3151-033-Q1-K1-G4
gtattggtgaactacaaagaacagattctaatccaactccggcgtgcccaaacatttt

SEQ ID NO: 18663 - DNA, 235 bp, Zea mays
  Clone ID: LIB3151-033-Q1-K1-G5
ggggaaaggttatgagggtgtggtcactcgttggggtgtcacccggcttccccgcgagacggacaggggtctccgcagagtggcttgtatcggtgcatggcatccggctagggtctcctatacggatgctcgtgctggtcagaatgggtaccaccaccgcactgagatgaacatgagggtttacaagatcggcaaggcttgacaagagacccacgatgcctccacagagtttgac

SEQ ID NO: 18664 - DNA, 341 bp, Zea mays
  Clone ID: LIB3151-033-Q1-K1-G6
aaagcggcagtgcgtagagaggatcgtcgaacagaacagcatgaagatggtcatcgttctggtcgtgtgcctggctctgtcagctgccagcgcctctgcaatgcagatgccctgcccctgcgcggggctgcagggcttgtacggcgctggcgccggcctgacgacgatgatgggcgccggcgggctgtacccctacgcggagtacctgaggcagccgcagtgcagcccgctggcggcggcgccctactacgccgggtgtgggcagacgagcgccatgtaccagccgctccggcaacagtgctgccagcagcagatgaggatgatggacgtgcagtccgtcg

SEQ ID NO: 18665 - DNA, 265 bp, Zea mays
  Clone ID: LIB3151-033-Q1-K1-G7
cttccacccactagcaaccatagaaggcacattagtgtaccaccaatggcagctaaaaaatttggcgtcctaagcctcctgggccttctggcagggcctgctacggcgaccattttcccacaatgctcacaagctcctatagcttcctttcttccccggtacctctcaccaacggtgtcttcggtatgtgaaaacccaattctataaccctacaggatccaacaggcaatcgcagctggcatcttacctatatcacccttgttcc

SEQ ID NO: 18666 - DNA, 323 bp, Zea mays
  Clone ID: LIB3151-033-Q1-K1-G8
ctagcaacatagaaagcacaatagtgtaccaacaatggcagccaaaatattttgcttcctgatgctccttggtctttctgcaagtgttgctaccgcaaccattttcccacaatgctcacaagctcctatagcttcccttcttcccccatacctctcaccagcggtgtcttcaatgtgtgaaaacccaattgttcaaccctacaggatccaacaggcaatcgcaacaggcatcttaccattatcacccttgttcctccaacaaccgtcagccctattacagcagttacctttggtccatttggtggcacagaacatcagggcac

SEQ ID NO: 18667 - DNA, 61 bp, Zea mays
  Clone ID: LIB3151-033-Q1-K1-H1
gtcatctacttacaacattagaagcaccattgcgtgacaacaatgggagcccaaacatttc

SEQ ID NO: 18668 - DNA, 416 bp, Zea mays
  Clone ID: LIB3151-033-Q1-K1-H4
ggacgtcagcctagcaattagctcatcgactccagattggagaactcgacaccatgaaggtgctgatcgttgcccttgctctcctggcgctcgctgcgagcgccgcctccagtacaagcggcggctgtggctgccagacaccaccgtttcatctaccgcctccgttctatatgccgcctccgttctatctgccgccgcagcagcagccgcagccatggcaataccccactcaaccaccgcagctaagcccgtgccagcagttcggatcctgcggcgtcggcagcgtcggcagcccgttcctgggccagtgcgtcgagttcctgaggcaccagtgcagcccggcggcgacgccctacggctcgccacagtgccaggcgctgcagcagcagtgctgccaccagatcaggcaggtggag

SEQ ID NO: 18669 - DNA, 297 bp, Zea mays
  Clone ID: LIB3151-033-Q1-K1-H6
agacggaagacatacatgcttatgtgcgtgcgctggcatattacccttaccgacaccctggggtaatggcaaggaatgctcgcattcctgtctcatgttaccaacaccttactcacagactacagctggcatgtgaggaatccagacaacgacgccgaaccatctatatgcctcctagcttctatctaccgcatgacatatgccatcaccggggcatgtctacacgacgtgtcaccagcttatggctgtccagataacatcgtcacatcatgtgcggacgccggtttataagctctt

SEQ ID NO: 18670 - DNA, 280 bp, Zea mays
  Clone ID: LIB3151-033-Q1-K1-H7
atcccgtcgcatcccatcccactaccacccatctcgtcgtccgccgattcgatccggttctgccaacccaggggcagtgatggcgacgaagaggagcgtgggcaccctcggcgaggcggatctgaaggggaagaaggtgttcgtgcgcgccgacctcaacgtcccgctcgacgatgcccagaagatcaccgacgacacccgcatccgcgcctccgtccccaccatcaagttcctcctcgagaagggcgccaaggtcatcctcgccagccacctgggtcgt

SEQ ID NO: 18671 - DNA, 314 bp, Zea mays
  Clone ID: LIB3151-033-Q1-K1-H8
ccgcactgaaccccgctgcttatttgcagcagcaaatactactaccatttagccagctagctgcagcaagccgtgcttccttcttgacacagcaacagttgctgcctttctaccagcagtttgcggctaaccccgcaaccctcttacaactacaacaattgttgccctttgtccaacttgctttgacaaacccagcagcctcctaccaacaacacatcattggtggtgccctcttttagattgcttattagttgtaattcaataataaagttttttggatgatgtatgtggccaaccagaaataagaagttaca

SEQ ID NO: 18672 - DNA, 329 bp, Zea mays
  Clone ID: LIB3151-034-Q1-K1-A10
agcaacatagaaagcacaatagtgtaccaacaatggcagctaaaatattttgcctccttatgctccttggtctttctgcaagtgctgctacggcgaccattttcccacaatgctcacaagctcctatagcttcccttcttcccccgtacctctcaccaacggtgtcttcggtatgtgaaaacccaattcttcaaccctacaggatccaacaggcaatcgcagctggcatcttacctttatcacccttgttcctccaacaatcatcagccctattacagcagttacctttggtgcatttattggcacaaaacatcagggcacaacaacta

SEQ ID NO: 18673 - DNA, 235 bp, Zea mays
  unsure at all n locations
  Clone ID: LIB3151-034-Q1-K1-A11
gtccatctcatcccgagcgccgaaatccaaacgcacaatgactttgccgtccccgcccccggcccccaccgtgtgcggtgtcctccccttctctgcctcgtgcgccggccggccttaccactcgtgccaccccgcgcgccgncgnctgtgcgtgcgcagctcaagggccagcccaccgggcatgcccaacaccagcaccaggccgacttcgctgccgccgcgccgactgcacgga

SEQ ID NO: 18674 - DNA, 111 bp, Zea mays
  Clone ID: LIB3151-034-Q1-K1-A12
ccgacaagagactcactgccttccatcctgaaatcgaggagctcatctacagcgacgtcgaggactccgagcacaagttcgtgctgaaagacaagaagaagccgatcattt

SEQ ID NO: 18675 - DNA, 302 bp, Zea mays
  unsure at all n locations
  Clone ID: LIB3151-034-Q1-K1-A9
ctagcaacatagaaagcacaatagtgtaccaacaatggcagctaaaatattttgcctccttatgctccttggtctttctgcaagtgctgctacngcgaccattttcccacaatgctcacaagctcctatagcttcccttcttcccccgtacctctcaccaacggtgtcttcggtatgtgaaaacccaattcttcaaccctacaggatccaacaggcaatcgcagctggcatcttacctttatcacccttgttcctccaacaatcatcagccctattacagcagttacctttggtgcatttat

SEQ ID NO: 18676 - DNA, 333 bp, Zea mays
  Clone ID: LIB3151-034-Q1-K1-B10
tttcagcattcagaaacacaccaagcgaagcgcactagcaacaacctaacaacaatggctacgcaagatattagccctccttgcgcttcttgcccttttagtgagcgcaacaaatgcgttcattattccacagtgctcacttgctcctagtgccattattccacagttcctcccaccagttacttcaatgggcttcgaacattcagccgtgcaagcctacaggctacaactagcgcttgcggcgagcgtcttacaacaaccaattgcccaattgcaacaacaattcttggcacatctaaacctacaaaccattgcaacgcaacagcaacaaca

SEQ ID NO: 18677 - DNA, 247 bp, Zea mays
  Clone ID: LIB3151-034-Q1-K1-B11
cagaaacacaccaagcgaagcgcactagcaacaacctaacaacaatggctaccaagatattagccctccttgcgcttcttgcgcttttttcgaaccccaccaaagccgtcattatttcacaatggtcacttgctcctagttccattattccacagttcctcccaccagttacttcaatggccttcgaacacccagctgtgcaagcctataggctacaacaagcgattgcggcgagcgtcttacaaca

SEQ ID NO: 18678 - DNA, 289 bp, Zea mays
  Clone ID: LIB3151-034-Q1-K1-B12
attgagaccaactagcaacatagaaagcacaatagtgtaccaacaatggcagccaaaatatggggcctccttatgctccttggtctttctggaagtgctgctacggggaccattttcccgaaatgctcgcaagctcctatagcttccttttttcccccgtacctctcaccagcggtgtcttcggtatgtgaaaacccaattcttcaaccctacaggatccaacaggcaatcacagctggcatcttacctttatcacccttgttcctccaacaatcatcaggccctatta

SEQ ID NO: 18679 - DNA, 427 bp, Zea mays
  Clone ID: LIB3151-034-Q1-K1-B9
gcaacatagaaagtggaatccagtagcaacaatagagcaacaatggcgaccaagatattttgcctccttatgctccttgctctttctgcatgtgttgctaacgcgacaattttccctcaatgctcacaagctcctatagcttcccttcttcccccataccttccatcaatgatagcttcagtatgtgaaaacccagctcttcaaccctataggctccaacaagcaatcgcagcaagcaacatacctttatcacccttgtttcaacaatcgccagccctatctttggtgcagtcattggtacaaaccatcagggcacagcagctgcagcaactcgtgctacctgtgatcaaccaagtagctctggcaaacctttctccctactctcagcaacaacaatttcttccattcaaccaactgtctacattga

SEQ ID NO: 18680 - DNA, 400 bp, Zea mays
  unsure at all n locations
  Clone ID: LIB3151-034-Q1-K1-C10
aaaaaaaaaaaaaaaaaaaaaaaaaaaaaaaaaaaaaaaaaaaaaaaaaaaaaaaaaaaaaaagggaaaaaaaaaaaaaaaggaaaaaataaaaaaaaaaaaaaaaaaaaaaaaaaaaaaaaaaaaaaaaataattttttaaaaaaaaaaaaaaaaattaaatttaaaaaaaaataaatgggggggggttttaaaaaaaaaaaaattttatatggtttttttgatgagataattttttatttagggttgtgtaaattaaatttatttagggggtttttaaaaaatattaaaatttaaaaaaatgtgtgtatagaaaattaaaagttttaaaataaattatattttttaaaaattgtgttatattaaaaaatgagannaaaaatattttttaaaaaattta

SEQ ID NO: 18681 - DNA, 310 bp, Zea mays
  Clone ID: LIB3151-034-Q1-K1-C11
gctcaggctctcagctcaacaagctcgccgcaccgtcgccatggacgccgccaccggcaagtgttcctcctctccgctgcgcatcgtgatctgcccgtggctcgcgttcggccacatgctcccgtgcctggagctcgcggagcgtctggcttcgcggggccaccgcgtgtccttcgtctccacgccgcgcaacctggcgcgcctcccgccgcggcgccacgacgtgcacctcgtgcccctgcccctcccacgcgtggagggcctccccgacggcgtcgagtccaccaacgacgtgccccccgacaagaga

SEQ ID NO: 18682 - DNA, 257 bp, Zea mays
  Clone ID: LIB3151-034-Q1-K1-C12
caccggagttaagcctgtgccagcagttcggatcctgcagcgtcagcagcgtacggagaccggtcctgggccactgcgtcgagttcctgaggcaccagtgcagcccggcggggacgccctacgggtcaccacagtggcaggcgcttcagcagcagtgctgccaccaaatcacgcacgtggaacccctgaaccggttccatgcgacatacagcgtggtcctgcagtacttcctgcagcaacagccagaaggcgagctc

SEQ ID NO: 18683 - DNA, 448 bp, Zea mays
  unsure at all n locations
  Clone ID: LIB3151-034-Q1-K1-C9
atagtgtgcaggcatgcatttttacgggctattgggaggatgttggaacaatcaaatcatggtttgatgcaaacttggccctcactgagcagccttccaagtttgatttttatgatccaaaaacacctttcttcactgcaccccgatgcttgcctccgacgcaattggacaagtgcaagatgaaagatgcatttatctcagatggttgcttactgagagaatgcaacatcgagcattctgtgattggagtctgctcacgtgtcagctctggatgtgaactcaaggactccgtgatgatgggagcggacacctatgaaactgaagaagaagcttcaaagctactgttagctgggaaggtcccagtttggataggaaggaacacanagataaggaactgtatcattgacatgaatgctaggattgggaagaacgtggtgatcacaaacag

SEQ ID NO: 18684 - DNA, 391 bp, Zea mays
  Clone ID: LIB3151-034-Q1-K1-D10
gcggtgtcttcggtatgtgaaaacccaattcttcaaccctataggatccaacaggcaatcgcgagctggcatcttacctttatcacccttgttcctccaacaatcatcagccctattacagcagttacctttggtgcatttattggcacaaaacatcagggcacaacaactacaacaacttgtgctagcaaaccttgctgcctactctcagcaacaacagtttcttccattcaaccaactagctgcattgaactctgcttcttatttgcaacaacaacaactaccattcagccagctatctgctgcctacccccagcaatttcttccattcaaccaactgacagctttgaactctcctgcttatttacagcagcaacaactactaccattc

SEQ ID NO: 18685 - DNA, 427 bp, Zea mays
  Clone ID: LIB3151-034-Q1-K1-D11
agaccattagctttatctactccagagcgcataagaacccgatcgacaccatgagggtggggctcgttgccctcgctctcctggctctcgctgcgagcgccacctccacgcatacaagcggcggctgcggctgccaaccaccgccgccggttcatctaccgccgccggcgcatctgccacctgcggttcacctgccacctccggtgcatctcccaccgccggtccacctgccgccggcggtccacctgccaccgtcggtccatgtgccgacgtcggttcatctgccgccgccaccatgccactaccctactcaacgcgcccggcctcagcctcatacccagccacacccatgctcgtgccaacagccagatccaagcccgtgccagctgcaaggaacctgcagcgttgcagcaccctgatcctgggc

SEQ ID NO: 18686 - DNA, 403 bp, Zea mays
  Clone ID: LIB3151-034-Q1-K1-D12
atcgcgcgccagcttggcgccgccgttcccgggcagcaggccgcctgggaggcggaggaagaggcagcgaagaggaggaagcagaagggcggcggcagcaagaagcagcagcagctgggcgatctgagcctgaggaaggtcagggtcaagatcgccaacccgcacctgcggcgcctggttagcggcgccatcgccggcgccgtgtccaggacgtttgtggcgccgctggagacgatccggacgcacttgatggtcggcagcatcggcgtcgactccatggccggggtgttccagtggatcatgcagaacgaagggtggaccggcctgttccgcggcaacgccgtcaacgtcctgcgcgtcgctccgagcaaggctatcgagcatttcacctatgacaccggcc

SEQ ID NO: 18687 - DNA, 239 bp, Zea mays
  unsure at all n locations
  Clone ID: LIB3151-034-Q1-K1-D9
tctcatctcaacaagctctccgtaccatcgccatggaccccnccaccggcaactgttccttctctccgctgggcatcctaatcttcccattgctcgcgttcttccacatgctcccatgcctggaactctcggagcgtctggcttcgcggagccaccgcatgtccttcgtttncaccccattcaaacttgctccccttccgtcctagatccacgacctgcaccttttgccccttcccctt

SEQ ID NO: 18688 - DNA, 387 bp, Zea mays
  Clone ID: LIB3151-034-Q1-K1-E10
ccaactagcaacatagaaagcacaatagtgtaccaacaatggcagccaaaatattttgcttgcttatgctccttggtctttctgcaagtgttgctaccgcaaccattttcccacaatgctcacaagctcctatagcttcccttcttcccccatacctctcaccagcggtgtcttcaatgtgtgaaaacccaattgttcaaccctacaggatccaacaggcaatcgcaacaggcatcttaccattatcacccttgttcctccaacaaccgtcagccctattacagcagttacctttggtccatttggtggcacaaaacatcagggcacaacaactacaacaacttgtgctagcaaaccttgctgcatactctcagcaacatcagtttc

SEQ ID NO: 18689 - DNA, 428 bp, Zea mays
  unsure at all n locations
  Clone ID: LIB3151-034-Q1-K1-E11
aagcaacatagaaagtggaatccagtagcaacaatagagcaacaatggcgaccaagatattgtccctccttatgctccttgctctttctgcatgtgttgctaacgcgacaattttccctcaatgctcacaagctcctatagcttcccttcttcccccataccttccatcaatgatagcttcagtatgtgaaaacccagctcttcaaccctataggctccaacaagcaatcgcagcaagcaacatacctttatcacccttgtttcaacaatcgccagccctatctttggtgcagtcattggtacaaaccatcanggcacagcagctgcagcaactcgtgctacctgtgatcaaccaagtagctctggcaaacctttctccctactctcagcaacaacaatttcttccattcaaccaactgtctacattg

SEQ ID NO: 18690 - DNA, 402 bp, Zea mays
  Clone ID: LIB3151-034-Q1-K1-E12
attttcagcattcagaaacacaccaagcgaagcgcactagcaacaacctaacaacaatggctgccaagatattagccctccttgcgcttcttgcccttttagtgagcgcaacaaatgcgttcattattccacagtgctcacttgctcctagtgccattattccacagttcctcccaccagttacttcaatgggcttcgaacatccagccgtgcaagcctacaggctacaactagcgcttgcggcgagcgtcttacaacaaccaattgcccaattgcaacaacaatccttggcacatctaaacctacaaaccatcgcaacgcaacagcaacaacagtttctgccatcactgagccacctagccgtggtgaaccctgtcgcctacttgcaacagcagctacttg

SEQ ID NO: 18691 - DNA, 447 bp, Zea mays
  unsure at all n locations
  Clone ID: LIB3151-034-Q1-K1-E9
ggcaataccccactcaaccaccgcagctaagcccgtgccagcagttcggatcctgcggcgtgggcagcgtcggcagcccgttcctgggccagtgcgtcgagttcctgaggcaccagtgcagcccggcggcgacgccctacggctcgccacagtgccaggcgctgcagcagcagtgctgccaccagatcaggcaggtggagccgctgcaccggtaccaggcgacatacggtgtggtcctgcagtccttcctgcagcagcagccgcaaggcgagctcgcggcgctgatggcggcccangtagcgcagcagctgacggcgatgtgcgggctgcagctgcagcagccaggtccctgcccttgcaacgcagctgccggcggtgtctactactgaggaaactatgtactgtagtaataatgtaatggagccgctgactagctacctagctcgc

SEQ ID NO: 18692 - DNA, 414 bp, Zea mays
  Clone ID: LIB3151-034-Q1-K1-F10
tagcaacatagaaagcacaatagtgtaccaacaatggcagccaaaatattttgcctccttgtgctccttggtctttctgcaagtgctgctacggcgaccattttcccacaatgctcacaagctcctatagcttcccttcttcccccgtacctctcaccagcggtgtcttcggtatgtgaaaacccaattcttcaaccctataggatccaacaggcaatcgcagctggcatcttacctttatcacccttgttcctccaacaatcatcagcgctattacagcagttacctttggtgcatttattggcacaaaacatcagggcacaacaactacaacaacttgtgctagcaaaccttgctgcctactctcagcaacaacagtttcttccattcaaccaactagctgcattgaactct

SEQ ID NO: 18693 - DNA, 426 bp, Zea mays
  Clone ID: LIB3151-034-Q1-K1-F11
attgagaccaactagcaacatagaaagcacaatagtgtaccaacaatggcagccaaaatatggtgcctccttatgctccttggtctttctgcaagtgctgctacggcgaccattttcccacaatgctcacaagctcctatagcttcccttcttcccccgtacctctcaccagcggtgtcttcggtatgtgaaaacccaattcttcaaccctataggatccaacaggcaatcgcagctggcatcttacctttatcacccttgttcctccaacaatcatcagccctattacagcagttacctttggtgcatttattggcacaaaacatcatggcacaacaactacaacaacttgtgctagcaaaccttgctgcctactctcagcaacaacagtttcttccattcaaccaactagctgcattgaactct

SEQ ID NO: 18694 - DNA, 196 bp, Zea mays
  Clone ID: LIB3151-034-Q1-K1-F12
acgagatcaaagcggatctggagggcagcgatggccccgccaaagccgacgccatgcgccgcgccatctcgctcctcctaaacggagagacgctgccgcagctcttcatcaccatcgtccgctacgtgctcccctccgaggaccacaccgtgcagaagctcctcctcctctacctcgagatcatcgaccgccggga

SEQ ID NO: 18695 - DNA, 352 bp, Zea mays
  Clone ID: LIB3151-034-Q1-K1-F9
tggtttcgtaactggtgagggactgagggtctcggagtggattgatttgggattctgttcgaagatttgcggaggggggcaatggcgaccgcggggaaggtgatcaagtgcaaagctgcggtggcatgggaggccggcaagccactgtcgatcgaggaggtggaggtagcgcctccgcaggccatggaggtgcgcgtcaagatcctcttcacctcgctctgccacaccgacgtctacttctgggaggccaaggggcagactcccgtgttccctcggatctttggccacgaggctggaggtatcatagagagtgttggagagggtgtgactgacgtagctccgggcgaccatg

SEQ ID NO: 18696 - DNA, 413 bp, Zea mays
  unsure at all n locations
  Clone ID: LIB3151-034-Q1-K1-G10
gccgtcaccaagttcaccagcaattgagcagcctccagcgtccacggatttgttaggtctggccttcttacaagggttcttcgtcgtgtcctctacccctcccctccccgcctatgtatgtgctgtgaaatcgttgatgttctcgtcgggtgaacaaaggccagtagctagcttgcctgcttcataaatcgtgccggattgtaatgggcctcttagatttggcgcccctgttttggaatatagttgtatccgtgccttccctgcttgctnaaaaaaaaaaaaaaaaaaaaaaaaaaaaaaaaaaaaaaaaaagaaaaaaaaaaaaaaaaaaaaaaaaaaaaaaataanaaaaaaaaaaaaaaaaaaagaaaaaaaaaaaanaaaaaaaaaaaaaaaaaggggggcccctttaa

SEQ ID NO: 18697 - DNA, 400 bp, Zea mays
  Clone ID: LIB3151-034-Q1-K1-G11
tttcagcattcagaaacacaccaagcgaagcgcactagcaacaacctaacaacaatggctagcaagatattagccctccttgcgcttcttgcccttttagtgagcgcaacaaatgcgttcattattccacagtgctcacttgctcctagtgccattattccacagttcctcccaccagttacttcaatgggcttcgaacatccagccgtgcaagcctacaggctacaactagcgcttgcggcgagcgtcttacaacaaccaattgcccaattgcaacaacaatccttggcacatctaaacctacaaaccatcgcaacgcaacagcaacaacagtttctgccatcactgagccacctagccgtggtgaaccctgtcgcctacttgcaacaagagctacttg

SEQ ID NO: 18698 - DNA, 357 bp, Zea mays
  Clone ID: LIB3151-034-Q1-K1-G12
gaccaacaagcaacatagaaagtggaatccagtagcaacaatagagcaacaatggcgaccaggatattttccctccttatgctccttgctctttctgcatgtgttgctaacgcgacaattttccctcaatgctcacaagctcctatagcttcccttctttccccataccttccatcaatgatagcttcagtatgtgaaaacccagctcttcaaccctataggctccaacaagcaatcgcagcaagcaacatacctttatcacccttgtttcaacaatcgccagccctatcttttgtgcagtcattggtacaaaccatcaaggcacagcaactgcagcaactcgtgctacctgtgatc

SEQ ID NO: 18699 - DNA, 413 bp, Zea mays
  Clone ID: LIB3151-034-Q1-K1-H10
gacgcaactataagaatgctttccatgcactctaccgtatcagtgctgatgagggagtccgtgcgctttggaagggtgcaggtccaactgtggtgagagctatggcactcaatatgggtatgcttgcttcctatgaccagagtgtcgagctatttagggacaaatttggcgcaggagaaatttctactgttgttggagccagcgctgtttctggattcttcgcctcagcatgcagtttgccctttgactatgtgaagacacagattcagaagatgcaacctgatgctaatggcaagtacccatacacagggtctttggactgtgctgtgaagaccttcaagagcggtggcccattcaagttctacactggtttccccgtgtactgcgtcaggattgcaccccatgtcatgatg

SEQ ID NO: 18700 - DNA, 448 bp, Zea mays
  Clone ID: LIB3151-034-Q1-K1-H11
ccaactagcaacatagaaagcacaatagtgtaccaacaatggcagccaaaatattttgcctggttatgctccttggtctgtctgcaagtgctgctacggcgaccattttcccgaaatgctcgcaagctcctatagcttcccttcttcccccgtacctctcaccagcggtgtcttcggtatgtgaaaacccaattcttcaaccctacaggatccaacaggcaatcacagctggcatcttacctttatcacccttgttcctccaacaatcatcagccctattacatcagttacctttggtgcatttattggcacaaaacatcagggcacaacaactacaacaacttgtgctagcaaaccttgctgcctactctcagcaacagcagtttcttccattcaaccaactagctgcattgaactctgcttcttatttgcaacaacaacaactacc

SEQ ID NO: 18701 - DNA, 212 bp, Zea mays
  Clone ID: LIB3151-034-Q1-K1-H12
atcagtgcagcccgacggcgacgccctactgctcgcctcagtgccagtcgttgcggcagcggtgttgccagcagctcaggcaggtggagccgcatcaccggtaccaggcgatcttcggcttggtcctccagtccatcctgcagcagcagccgcaaagcggccaggtcgcggcgctgttggcggcgcacatagcgcagcaactgacggcgatg

SEQ ID NO: 18702 - DNA, 349 bp, Zea mays
  unsure at all n locations
  Clone ID: LIB3151-035-Q1-K1-A1
attgagaccaactagcaacatagaaagcacaatagtgtaccaacaatggcagccaaaatatgttgcttccttatgctccttggtctttctgcaagtgttgctaccgcaaccattttcccacaatgctcacaagctcctatagcttcccttcttcccccatacctctcaccagcggtgtcttcaatgtgtgaaaacccaattgttcaaccctacaggatccaacaggcaatcgcaacaggcatcttaccattatcacccttgttcctccaacaaccgtcagccctattacagcagntacctttggtccattttgtggcacaaaacattaaggcacaacaactacaacaac

SEQ ID NO: 18703 - DNA, 407 bp, Zea mays
  Clone ID: LIB3151-035-Q1-K1-A10
gcccaccagcacctgccctcctcgccgtcgccgcctccctccgcgcgaccgatctaccctccgccaccaccatgtcgctgatcgccggggaggacttccagcatatcctgcgtttgctgaacaccaacgtggatgggaagcagaagatcatgttcgccatgacctcaatcaagggtgtcgggcgccgcttctccaacatcgtctgcaagaaggccgacatcgacatgaacaagagggccggcgagctgacgcctgatgagctggagcgcctgatgacggtcgtggccaaccctaggcagttcaaggtgccggactggttcctcaacaggaagaaggattacaaggacggcaggttctcgcaggtcgtctccaacgcccttgatatgaagctcagggacgaccttgag

SEQ ID NO: 18704 - DNA, 297 bp, Zea mays
  Clone ID: LIB3151-035-Q1-K1-A11
cgcccgtcggcccttatgatgtccgcgtgcgcatgaaggcagtggggatttgcggcagcgatgtgcactacctaaaggagatgcgcatcgcgcacttcgtggtgaaagagccgatggtgatcgggcacgagtgcgcgggcgtggtcgaagaagtgggcgccggcgttacccaacctgtcccgtggcgaaccgcgtgccgctgaacccggcctcagctgttgcgcttgccgcaattgcaagggcgggcggtacaacctgtgcgaggacatgaagttcttcgccaccccgccggtgcac

SEQ ID NO: 18705 - DNA, 295 bp, Zea mays
  Clone ID: LIB3151-035-Q1-K1-A2
caactagcaacatagaaagcacactagtgtaccaacaatggcagccaaaatattttgcctgcttatgctccttggtctttctgcaagtgctgctacggcgaccattttcccacaatgctcgcaagctcctatagcttcccttcatcccccgtacctcttaccagcggtgtcttaagaatgtgaaaacccaattcttcaaccctacaggatccaacaggcaatcgcagctcgcatattacctttatcaccctagttcctgcaacaatcatcagacctattacaacaggtacctttg

SEQ ID NO: 18706 - DNA, 348 bp, Zea mays
  unsure at all n locations
  Clone ID: LIB3151-035-Q1-K1-A3
ctccggactcgggagtcggcactcgggtctcgacgtctcgtctcgtctcgtctcgcctgcccgcagccccttggcttcgttccatccggcttctcggcggcggcggagaggagggggatggcgcaccggctgctgcgggacgcgcaggcggacgggtgggagcggtcggacttncccatcatctgcgagtcatgcctcggcgacaacccctacgtccggatgttaagagctgaatatgacaaagaatgcaaaatttgtgcacgtccttttactgtattccggtggcgtcctgggcgagatgcaaggtacaagaagactgagatctgccagacatgttgcaagctaaag

SEQ ID NO: 18707 - DNA, 412 bp, Zea mays
  Clone ID: LIB3151-035-Q1-K1-A5
attgagaccaactagcaacatataaagcacaatagtgtaccaacaatggcagccaaaatatgttgcttccttatgctccttggtctttctgcaagtgttgctaccgcaaccattttcccacaatgctcacaagctcctatagcttcccttcttcccccatacctctcaccagcggtgtcttcaatgtgtgaaaacccaattgttcaaccctacaggatccaacaggcaatcgcagcaggcatcttaccattatcacccttgttgctccaacaaccgtcagccctattacagcagttaccttaggtccatttggtggcacaaaacatcagggcacaacaactacaacaacttgtgctagcaaaccttgctgcatactctcagcaacatcaagttttttccattcaaccaactg

SEQ ID NO: 18708 - DNA, 448 bp, Zea mays
  Clone ID: LIB3151-035-Q1-K1-A6
ctcacctgccacctccggtgcatctcccaccgccggtccacctgccgccgccggtccacctgccaccgccggtccatgtgccgccgccggttcatctgccgccgccaccatgccactaccctactcaaccgccccggcctcagcctcatccccagccacacccatgcccgtgccaacagccgcatccaagcccgtgccagctgcagggaacctgcggcgttggcagcaccccgatcctgggccagtgcgtcgagtttctgaggcatcagtgcagcccgacggcgacgccctactgctcgcctcagtgccagtcgttgcggcagcagtgttgccagccgcttaagccgggggagcccgaacaccggtaccaggcgatcttcggcttggtccttcagtccattctgcaacagcagccgcaaagcggtcaggtcgcggggctgttggcggc

SEQ ID NO: 18709 - DNA, 443 bp, Zea mays
  unsure at all n locations
  Clone ID: LIB3151-035-Q1-K1-A7
ctttgatggagcgtagtgaggccgagttggcagaacccattatacggttgcttcctgttgcgcttggccttttatatcttggaaaacaggatagtgtggaggctaccgcagaggtctctaaaacatttgatgagaagatagggaagtactgtgatgtaacacttatgtcactggcatatgccgggacaggaaatgtgcttaaggttcagaaacttcttggcatttgctcacagcatcttgagaaaggtgaaacacaccaagggccagctgtcctagggattgctcttattgctatggctgaagaattaggagctgaaatggctgtacgttcacttgagcgtcttctgcagtatggcgagcagaatataagacgggcangccctcttgctcttggtatactctgcatatctaatcccaaggtgaacgttatggacacactgagc

SEQ ID NO: 18710 - DNA, 456 bp, Zea mays
  Clone ID: LIB3151-035-Q1-K1-A9
atcagtaccatcaatcatcattcatcttagtagtataggcaccaaatcaaatctggaacatcaattatctaactccaaaaaccatgaagctggtgcttgtggttcttgctttcattgctttagtatcaagtgtttcttgtacacagacaggcggctgcagctgtggtcaacaacaaagccatgagcagcaacatcatccacaacaacatcatccacaaaaacaacaacatcaaccaccaccacaacatcaccagcagcagcaacaccaacaacaacatgttcacatgcaaccacataaacatcagcaacatcatgatgttcatgttcaacaacaacaacaacaaccgcagctccaacaacaacaacaacaacagcaccaacaacaacatcaatgtgaaggccaacaccaacttcaccaacaataacaaggccttgtgcaccaccacgaacagagcc

SEQ ID NO: 18711 - DNA, 350 bp, Zea mays
  Clone ID: LIB3151-035-Q1-K1-B1
agaccattagctttatctactccagagcgcagaagaacccgatcgacaccatgagggtgttgctcgttgccctcgctctcctggctctcgctgcgagcgccacctccacgcatacaagcggcggctgcggctgccagccaccgccgccggttcatctaccgccgccggtgcatctgccacctccggttcacctgccacctccggtgcatctcccaccgccggtccacctgccgccgccggtccacctgccaccgccggtccatgtgccgccgccggttcatctgccgccgccaccatgccactaccctactcaaccgccccggcctcagcctcatccccagccacaccca

SEQ ID NO: 18712 - DNA, 197 bp, Zea mays
  Clone ID: LIB3151-035-Q1-K1-B10
ctcaagcataccaagccacgtgcgctacgaccgacacagcaatgctggcaactgagctcttagaactccgcaaactaattgtcatatcactgagcgcaactgatccgtctatgatctaacaaagctcagatgctcctactgatatcattgaacctgtagggcgaactgttactttaatggtgattaggagatgcaca

SEQ ID NO: 18713 - DNA, 453 bp, Zea mays
  Clone ID: LIB3151-035-Q1-K1-B11
gggtcttcagaccattagctttatctactccagagcgcagaagaacccgatcgacaccatgagggtgttgctcgttgccctcgctctcctggctctcgctgcgagcgccacctccacgcatacaagcggcggctgcggctgccagccaccgccgccggttcatctaccgccgccggtgcatctgccacctccggttcacctgccacctccggtgcatctcccaccgccggtccacctgccgccgccggtccacctgccaccgccggtccatgtgccgccgccggttcatctgccgccgccaccatgccactaccctactcaaccgccccggcctcagcctcatccccagccacacccatgcccgtgccaacagccgcatccaagcccgtgccagctgcagggaacctgcggcgtggcagcaccccgatcctgggccagtgcgtcgagtttctg

SEQ ID NO: 18714 - DNA, 304 bp, Zea mays
  unsure at all n locations
  Clone ID: LIB3151-035-Q1-K1-B12
gcagcattcaaaaacacaccaagcgtagcgcactagcaacaacctaacaacaaaggctaccaagatattagctccttcgtgctgcttttgcccttttagggagcgcaacacatgcgtacatatatcacacagtgcttacttgttcctagcgccattattgcacaattactcccacccggtacttcaatgggcttcgaacatncagccgtgcaagcgtacatgctacaactagcgcttgcggcgagcgtggtacaacatccaattgcccaatatgtacaacaatccttggatcatctaaacctac

SEQ ID NO: 18715 - DNA, 382 bp, Zea mays
  Clone ID: LIB3151-035-Q1-K1-B2
cagcaacatagaaagcacaatagtgtaccaacaatggcagccaaaatattttgcctccttatgctccttggtctttctgcaagtgctgctacggcgaccattttcccgcaatgctcgcaagctcctatagcttcccttcttcccccgtacctctcaccagcggtgtcttcggtatgtgaaaacccaattcttcaaccctacaggatccaacaggcaatcgcagctggcatcttacctttatcacccttgttcctccaacaatcatcagccctattacaacagttacctttggtgcatttattggcacaaaacattagggcacaacaactacaacaacttgtgctagcaaaccttgctgcctactctcagcaacagcagtttc

SEQ ID NO: 18716 - DNA, 429 bp, Zea mays; identical to SEQ ID NO: 16783
  Clone ID: LIB3151-035-Q1-K1-B3

SEQ ID NO: 18717 - DNA, 420 bp, Zea mays
  Clone ID: LIB3151-035-Q1-K1-B4
tagccgccgccggcgccaagcccctgcccgccgccacctccacgtccgtctccttcccggccacccaccagcccgcgtgcctgctctcctcgcccgcgcccgggtctctgcgccgccgggacgtcgccgccatggtctccgcgccgccggccgtcggcaccgccatgccgtcgctcgacttcgacacctccgtcttcaacaaggagaaggtctccctcgccggccacgacgagtacatcgtgcgcggcgggaggaacctgttcccgctgcttccggaggcgttcaagggggtcaagcagatcggagttattggatggggctcgcagggtcctgcccaagcccagaacctgagagattcactggcttgagcccagtcagatattggtgggaagattggtctccggaaaggatccaaatctt

SEQ ID NO: 18718 - DNA, 404 bp, Zea mays
  Clone ID: LIB3151-035-Q1-K1-B5
gccgtaccggtcccgattcgacgccacgcctccggcgtacagcggcagtgcgtaaagaggatcgtcgaccagaacaagctgaagatggtcatcgggctcggggtgtgcctggctctgtcagctgccatcgcctctgcaatgcaaatgccctgtccatgcgcggggctggagggcttgtacggcgctggcgccggcctgacgacgatgatgggcgccggcgggctgtacccctacgcagagtacctgatgcagcacgcagtgcaccccggtggcggcggcgccctactacaccgggtgtgcgcagacgagcgccatgtaccatgcggtccggcaacagtgctgacagcagtaaatgaggatgatggacgtgtcatccgtggcgcagcagatgcagatgatgatgc

SEQ ID NO: 18719 - DNA, 231 bp, Zea mays
  Clone ID: LIB3151-035-Q1-K1-B6
tttatattacaaggtgagcgtctgctgtatccgagccaaccttagcctccctggcatgccatggcttttctatagtgtcgtgtaacttcaattcaatgcactggccgctacatcacaacgtctggactgactctgccctggcgtaactcaactgcatcgtcttgcagctcattttcgtcacctgaggtgtcatcaaagagaacaggtccgttcgcacttcccatcagtaca

SEQ ID NO: 18720 - DNA, 445 bp, Zea mays
  Clone ID: LIB3151-035-Q1-K1-B7
gaccattagctttatctactccagagcgcagaagaacccgatcgacaccatgagggtgttgctcgttgccctcgctctcctggctctcgctgcgagcgccacctccacgcatacaagcggcggctgcggctgccagccaccgccgccggttcatctaccgccgccggtgcatctgccacctccggttcacctgccacctccggtgcatctcccaccgccggtccacctgccgccgccggtccacctgccaccgccggtccatgtgccgccgccggttcatctgccgccgccaccatgccactaccctactcaaccgccccggcctcagcctcatccccagccacacccatgcccgtgccaacagccgcatccaagcccgtgccagctgcagggaacctgcggcgttggcagcaccccgatcctgggccagtgcgtcgagtttctg

SEQ ID NO: 18721 - DNA, 277 bp, Zea mays
  Clone ID: LIB3151-035-Q1-K1-B8
attcgatgattttttctctgaaatgccatggcttgctgtaccctgggaagatgaaaggaaagcatcgctgaagaaaaccttcaagatccgtggaatcccttcacttgtcgccatcggacctactgggcagacagtcagcagggacgcaaagtcccagctgatgatccacggtgctgatgctttcccattcaccgaggagagacttgaggagctacagaagaagctggatgagatggcgaaggggtggcctcagaagctgaagcatgagctgcatgac

SEQ ID NO: 18722 - DNA, 102 bp, Zea mays
  Clone ID: LIB3151-035-Q1-K1-B9
gttcaggggtatccgccggcgcccgtggggcaaatgggctgctgagatcaaagagcctcgcgagggcgtgcgcgtctggctcggtacattcaactctcccga

SEQ ID NO: 18723 - DNA, 399 bp, Zea mays
  Clone ID: LIB3151-035-Q1-K1-C1
ccaacaagcaacatagaaagtggaatccagtagcaacaatagagcaacaatggcgaccaagatattttccctccttatgctccttgctctttctgcatgtgttgctaacgcgacaattttccctcaatgctcacaagctcctatagcttcccttcttcccccataccttccatcaatgatagcttcagtatgtgaaaacccagctcttcaaccctataggctccaacaagcaatcgcagcaagcaacatacctttatcacccttgtttcaacaatcgccagccctatctttggtgcagtcattggtacaaaccatcagggcacagcagctgaagcaactcgtgctacctgtgatcaaccaagtagctctggcaaaccttttctcctactctcagcaaca

SEQ ID NO: 18724 - DNA, 388 bp, Zea mays
  Clone ID: LIB3151-035-Q1-K1-C10
gaccgtcacaccattagctttatttactccagagcgcagaacaacccaatcgacacgacgaggttgttgctcgtttcgctcgctctcctggctctggttgcgagcgccacgtccactcatacaatccgaggctgcggttgccatccaccgccgccgggtcatctaccgtcgccggtgcatctgacatctccggttcagctgacacgtccggtgcatatcatatcgccggtccagttgacgtcgccggtccagctgacatcgcaggttcatgtgccgtccccggttcatttgatgtcgcgaccatgccattacactactcaactgaaccgccctgagcttaatcccatcccaaaccaatcccagtgccatcagacgaatccaagccagt

SEQ ID NO: 18725 - DNA, 353 bp, Zea mays
  unsure at all n locations
  Clone ID: LIB3151-035-Q1-K1-C11
ccgccctttattttttttttttctttttatagtatacannattaattgactcttgtggttataggtgatcggtgcaatggggaccgacctaaattggatttaacccccaaaaaaaatcggtttcttttttataaaaaaaaagcccctttatttttgttgcccaggggcattttttgaaaaaaaagggttttttttttttgggggggggggacccccggaccccccccaaaaaaaggggcctacgggttttttttttttacaagacatttgggggaccacttcattacggagccggcgttggggttctcagaaataaaaatatgcggccccatggacttttttttgttcaagtg

SEQ ID NO: 18726 - DNA, 340 bp, Zea mays
  Clone ID: LIB3151-035-Q1-K1-C12
attgagaccaactagcaacatagaaagcacaatattctaccaataatggcagccaggatattttgcctcattatgctccttggtctttctgcaagtgctgctacggcgagcattttcccgcaatgctcacaagctcctatagcttcccttcttcccccatacctctcaccagcgatgtcttcagtatgtgaaaatccaattcttctaccctacaggatccaacaggcaatcgcagcaggcatcttacctttatcacccttgttcctccaacaatcatcagccctattacagcagttacctttggtgcatttattggcacaaaacatcagggcacaacaac

SEQ ID NO: 18727 - DNA, 452 bp, Zea mays
  Clone ID: LIB3151-035-Q1-K1-C2
cgtagcctcccaccaggagcaccacgagccgctcccgccgcgcgcgcaggagggcggcgccgtggctgtggcgacgcaggctgacgaggcggaggtccatgcgattgacgctccggcggctgctgctgaaacctcgtcttcccaactggctgctggcaagacagtgcgtgttcgatttgtgctgaaaaggcagtgcacgttcgggcagagcgtctgccttgtcggcgacgaccctgcgctcggcctctgggatctgtcgaacgcgtttcctttgaagtgggcggaaagccacgactggaccttagagaaagatttgccggccaacaagctgattgagttcaagttcttgctccaagattccacaagaaagttgcattggcagggtgggccaaacagaagctttcagacaggggaaaccgccgcaaacacattggttgtgtttgaagattggg

SEQ ID NO: 18728 - DNA, 380 bp, Zea mays
  Clone ID: LIB3151-035-Q1-K1-C3
ctgggtcttcagaccattagctttatctactccagagcgcagaagaacccgatcgacaccatgagggtgttgctcgttgccctcgctctcctggctctcgctgcgagcgccacctccacgcatacaagcggcggctgcggctgccagccaccgccgccggttcatctaccgccgccggtgcatctgccacctccggttcacctgccacctccggtgcatctcccaccgccggtccacctgccgccgccggtccacctgccaccgccggtccatgtgccgccgccggttcatctgccgccgccaccatgccactaccctactcaaccgccccggcctcagcctcatccccagccacacccatgcccgtgccaacagccgca

SEQ ID NO: 18729 - DNA, 401 bp, Zea mays
  Clone ID: LIB3151-035-Q1-K1-C4
gaaggttcctgattgcatgctaccatggagtcgaaaaaggcaatggataacatgtggcacagcatttgatccggtcccctgcgccttggtctgacatggaattttaccttctttgtctgagcactataatattttagtcctttcatatcattggcctatctttagatctttctatgttgttgtgacaagttctgcgaaaacgcattactgtggtttgctttgtataacgccgccgaaacaatcgaacggtttcctttatcacctgctgttctgttaagcttgtaatctttctgaacgtgcagttacctgcccagagctgagttcattatacaataaatacccggatgttaatgtttggacctttgtgcattgagaatcaagggtgcctggttttacccttg

SEQ ID NO: 18730 - DNA, 449 bp, Zea mays
  Clone ID: LIB3151-035-Q1-K1-C5
agcaacatagaaagcacaatagtgtaccaacaatggcagccaaaatattttgcctccttatgctccttggtctttctgcaagtgctgctacggcgaccattttcccgaaatgctcgcaagctcctatagcttcccttcttcccccgtacctctcaccagcggtgtcttcggtatgtgaaaacccaattcttcaaccctacaggatccaacaggcaatcacagctggcatcttacctttatcacccttgttcctccaacaatcatcagccctattacatcagttacctttggtgcatttattggcacaaaacatcagggcacaacaactacaacaacttgtgctagcaaaccttgctgcctactctcagcaacagcagtttcttccattcaaccaactagctgcattgaactctgcttcttatttgcaacaacaacaactaccattcagc

SEQ ID NO: 18731 - DNA, 406 bp, Zea mays
  Clone ID: LIB3151-035-Q1-K1-C7
gcgcacaataacccgatagacaccatgagggtgttgctcgtagccctcgctatcctggctgtcgctgtgagcgccaccttcacgcatacaagcggcgggtgtggctgtcagccaccgacgtcggttcatctaccgccgccggggcatttgccacctccggttcacctgcaacctccggtgcatgtcccaccgccggtccagctgacgtcgccggtccagctgatatcgccggtccatgtgccgtcgccgggtcatttgacgtcgccaccatgccactaccgtactcaaccggtcatgtctcagcctcatcatgagacacacctatgcccgtgccaacagccgcatccaagcccgagccagctgcatggaacctgcggcgttggcagcacccccatcctgggccagt

SEQ ID NO: 18732 - DNA, 386 bp, Zea mays
  Clone ID: LIB3151-035-Q1-K1-C8
caggcgcctgattgcatgctaccatggagtctaaaatggcaatggataacatgtggcacagcattggatccggtcccctgcgccttggtctgacatggaattttaccttctttgtctgagcactataatctattagtcctttcatatgataggcctatctttagatctttctatgttggtctgacaagttctgcgaaaacgcattactgtggtttgctttgtataacgccgcccaaacaatctaacggtttcctttatcacctgatggtctgttcagcttgtaatctttctgaacgtgcagttacctgcccagagctgagttcattatacaataaataccgggatgataatgtttggactctggtgcatggagatgcagtggtgct

SEQ ID NO: 18733 - DNA, 424 bp, Zea mays
  Clone ID: LIB3151-035-Q1-K1-D1
ctgggtcttcagaccattagctttatctactccagagcgcagaagaacccgatcgacaccatgagggtgttgctcgttgccctcgctctcctggctctcgctgcgagcgccacctccacgcatacaagcggcggctgcggctgccagccaccgccgccggttcatctaccgccgccggtgcatctgccacctccggttcacctgccacctccggtgcatctcccaccgccggtccacctgccgccgccggtccacctgccaccgccggtccatgtgccgccgccggttcatctgccgccgccaccatgccactaccctactcaaccgccccggcctcagcctcatcctcagccacacccatgcccgtgccaacagccgcattcaagcccgtgccagctgcagggaacctgctgcgttggcagca

SEQ ID NO: 18734 - DNA, 304 bp, Zea mays
  Clone ID: LIB3151-035-Q1-K1-D10
gcgccaccttcacacatacaagcggcggctgcggcttgcagccaccgactgcggttcatctaccgccggcggtgcatctgccacctacggttcacctgccacctccggtgcatcttccaccgccggtccacctgccgccgccggtccacctgccaccgccggtccatgtgccgccgccggttcatatggcgccgccaccatgccactaccctactcaaccgccccggcctcagcctcattcccagccacacccatgcccgtgccaacagccgcatccaaacccgtgccagctgcagggaacctg

SEQ ID NO: 18735 - DNA, 437 bp, Zea mays
  Clone ID: LIB3151-035-Q1-K1-D11
cttcctttcttcccccatacctctcaccagcggtgtcttcagtatgtgaaaacccgattcttgaaccctacaggatccaacaggcaatcgcagcaagcatcttacctttatcacccttgttcctccaacaaccgtcagccctattacagcagttacctttggtgcatttgttggcacaaaacatcaaggcacaacaactacaacaacttgtgctaggaaaccttgctgtctactctcagaacagcagtttcttcattcaccaactggctgcattgactctgctgctattttgcacaacaactaccattcagtcagctagctgctgcctacccccagcaatttcttccattcaaccaactggcagcattgaactctgctgcttatttacaacagcaacagctaccaccattcagccagctagctgatgtgaagccctg

SEQ ID NO: 18736 - DNA, 351 bp, Zea mays
  unsure at all n locations
  Clone ID: LIB3151-035-Q1-K1-D12
tagcaacatagaaagcacaatagtgtaccaacaatggcagccaaaatattttgcgtgcttatgctccttggtctttgtgcaagtgttgctaccgcaaccattttcccacaatggctacaagctcctatagcttcccttctttccccatacctntaaccaacggtgttttcaatgggtgaaaacccaattgttcaaccctacaggatccaacaggcaatcgcaacaggcattttaccattatcacccttgttcctccaacaaccgacagccctattacagcagttacctttggtccatttggtggcacaaaacattagggcacaacaactgcaacaacttgtgctagcaaac

SEQ ID NO: 18737 - DNA, 351 bp, Zea mays
  Clone ID: LIB3151-035-Q1-K1-D2
ccgtacgtcgtcgtcagtgtcgtgtactcgttttcccttccaaggcacccgttgcgagggcggaggcgccgatggccggggcgggggcgggtgcgggagcgggggcgctggccgggctcgcagcgtgcgcgacgctggcgtgcaacgtcgcaggcgccgtgctcttcctcctcagccaagacgacgagcggctgcggcgcgggtgtgcggcgaggttgggcgctggcggcgtcgcgtcgcagccggtggaggagtgcggggatgaagaggcgctcgcgccggacgccgtcctcaacctcgagctcggcgacccgacgatgtaccgggcgttctggcgggaggttggggact

SEQ ID NO: 18738 - DNA, 430 bp, Zea mays
  Clone ID: LIB3151-035-Q1-K1-D3
gcgatttcgatctcgcagccacctttttttttgttctgttgtgtatctagtagttggaggagatatgcagtttgcacttgcattggacacgaactcaggtcctcaccagataagatcttgtgagggtgatgggattgacaggttggaaaaattaagtattgggggcagaaagcaggagaaagctttgagaaataggtgctttggtggtagagttgctgcaactacacaatgtattcttacctcagatgcttgtcctgaaactcttcattctcaaacacagtcctctaggaaaaattatgctgatgcaaaccgtgtatctgctatcattttgggcggaggcactggatctcagctctttcctctgacaagcacaagagctacgcctgctgtacctgttggaggatgttacaggcttattgatatccctatg

SEQ ID NO: 18739 - DNA, 142 bp, Zea mays
  Clone ID: LIB3151-035-Q1-K1-D4
agctcagctactccagattggacaacttgacaccatgaacgttcgactccatgcccttgctgtactggctctagctggtagcgccgattgcattacaagaggatggcttggataacaaaaagcatggactaatctaccgact

SEQ ID NO: 18740 - DNA, 394 bp, Zea mays
  Clone ID: LIB3151-035-Q1-K1-D5
ctcccgtgccccttactagatagtggcgacgactggtcgacagtcgccgccaccgcccgctaggggccgagcccctggtctccatcctttgcgctccgcccaccagatatgaccagctggcaattcgattttgaggccattatttgataacccgagacaagtgcactggttacctgaccattttagctttttgagatggctacacactggccatgctttacacagctcactccaccgtcttgtacctggataaaagatgctgggaactgcaaggctactcctgatagggtagcacagaagtgcccgagctttgggccactgtcacttaccgtgctgtgcaggccctcgtagtgcaaactctttctagaagaaagactatttgcagaagaaagac

SEQ ID NO: 18741 - DNA, 327 bp, Zea mays
  Clone ID: LIB3151-035-Q1-K1-D6
gcgacataaaaagcacactaagctaccaacactggcagctaaaatatatcgcctgcttatgcgacgtgggctttctgcgagcgctgttaccttcaacatatcgccacaatggccacaatcttttatcactgctcatttgctcccagacctatcaccaaccaggtcttcccgctgggaaaacccaagtcttcaacacataccagatccaccaggcaacaggctactgcatgttacctttatgagccttgtacatccaccaatcatcaaacctattacaccagccacctctgatgtatatattggcaccatacatccgggcacaacacc

SEQ ID NO: 18742 - DNA, 345 bp, Zea mays
  Clone ID: LIB3151-035-Q1-K1-D7
gcggccggcctcctcttctcttcacccacacgctggtcatagagatgtcggctgcagaggcgaaggcggcggcggtcccggagtctgtgctgcggaagcgcaagcgggaggggcaatgggcagcggacaagaaggagaaggcgctcgcggacaggaagaaggcgctcgagagccgcaagatcatcttcgcccgcgccaagcagtacgccgaggagtaccacgcccaggagaaggagcttgtgcagctcaagcgtgaggcccggttgaagggtgggttctatgtgagcccagaggccaagcttctgtttgtggttcgcatccgtggtatcaatgccatgcacccca

SEQ ID NO: 18743 - DNA, 281 bp, Zea mays
  Clone ID: LIB3151-035-Q1-K1-D8
agctcatttactccagatcgcacaactctacaccatgaacgttcgactccattccgttgctgttctggctctagctggtggcgccgattgcattacaagaggctgctgtggttaacagacagcatggattaatctaccgactctattagataagacggctgcgctctgtctgctctcgcaccagcaatccaatgcgtggcaataacctactggatcctagtatctaacgcggtgccgctggttcagatcactgctgagccggctgaggcgagagtccttgt

SEQ ID NO: 18744 - DNA, 424 bp, Zea mays
  unsure at all n locations
  Clone ID: LIB3151-035-Q1-K1-D9
cacatatctactatactatactctaggaagcaaggacaccaccgccatggcagccaagatgcttgcattgttcgctctcctagctctttgtgcaagcgccactagtgcgacccatattccagggcacttgccaccagtcatgccattgggtaccatgaacccatgcatgcagtactgcatgatgcaacaggggcttgccagcttgatggcgtgtccgtccctgatgctgcagcaactgttggccttaccgcttcagacgatgccagtgatgatgccacagatgatgacgcctaacatgatgtcaccattgatgatgccgagcatgatgtcaccaatggtcttgccgagcatgatgtcncatatgatgatgccacaatgtcactgcgacgccgtctcgcatattatgctgcaacagcagttacca

SEQ ID NO: 18745 - DNA, 444 bp, Zea mays
  Clone ID: LIB3151-035-Q1-K1-E1
agaccattagctttatctactccagagcgcagaagaacccgatcgacaccatgagggtgttgctcgttgccctcgctctcctggctctcgctgcgagcgccacctccacgcatacaagcggcggctgcggctgccagccaccgccgccggttcatctaccgccgccggtgcatctgccacctccggttcacctgccacctccggtgcatctcccaccgccggtccacctgccgccgccggtccacctgccaccgccggtccatgtgccgccgccggttcatctgccgccgacaccatgccactaccctactcaaccgccccggcctgagcctcatccccagccacacccatgcccgtgccaacagccgcatacaaacccgtgccagctgcagggaacctgcggcgttggcagcaccccgatcctgggccagtgcgtcgagtttc

SEQ ID NO: 18746 - DNA, 444 bp, Zea mays
  Clone ID: LIB3151-035-Q1-K1-E10
tgggtcttcagaccattagctttatctactccagagcgcagaagaacccgatcgacaccatgagggtgttgctcgttgccctcgctctcctggctctcgctgcgagcgccacctccacgcatacaagcggcggctgcggctgccagccaccgccgccggttcatctaccgccgccggtgcatctgccacctccggttcacctgccacctccggtgcatctcccaccgccggtccacctgccgccgccggtccacctgccaccgccggtccatgtgccgccgccggttcatctgccgccgccaccatgccactaccctactcaaccgccccggcctcagcctcatccccagccacacccatgcccgtgccaacagccgcatccaagcccgtgccagctgcagggaacctgcggcgttggcagcaccccgatcctgggccagtgcg

SEQ ID NO: 18747 - DNA, 403 bp, Zea mays
  Clone ID: LIB3151-035-Q1-K1-E11
atgatggacgtgcagtccgtcgcgcagcagctgcagatgatgatgcagcttgagcgtgccgctgccgccagcagcagcctgtacgagccagctctgatgcagcagcagcagcagctgctggcagcccagggtctcaaccccatggccatgatgatggcgcagaacatgccggccatgggtggactctaccagtaccagtaccagctgcccagctaccgcaccaacccctgtggcgtctccgctgccattccgccctactactgattcatgatatttgggaaatctcctctatccatccctctctatctatatatgtaataatgcagtaagacgacacacattatcatgtgtggtatgaccaataatatatgcatcataataaagttttggttttaaagaattt

SEQ ID NO: 18748 - DNA, 379 bp, Zea mays
  Clone ID: LIB3151-035-Q1-K1-E12
acgggcgcacacttgccgactacaacatccagaaggagagcaccctccaccttgtggtccgcctcagggaggcatgcagatcttcgtcaagaccctcactggaaagactatcaccctcgaggtggagtcttctgacaccatcgacaacgtcaaggccaagatccaggacaaggagggcatccctccagaccagcagcggctcatttttgccggcaagcagctcgaggacgggcgcacgctggccgactacaacattcagaaggagagcaccctccacttggtgctgcgtctcaggggcggcatgcagatctttgtgaagactctgaccggcaagactatcacccttgaggtcgagtcttctgataccattgataatgtc

SEQ ID NO: 18749 - DNA, 453 bp, Zea mays
  Clone ID: LIB3151-035-Q1-K1-E2
ctcccgtcactccttatcccttcccatcgatcccatgccctgttgccgcgcccgcacctccttccccatccgcgcccgccgcggctcctccggcagctccgccacgcgcccaaccgcaacctgcccgcacggccaccgctgcctggtagtatctatcaaatcagccacctgtcctctttttcttcaaatcaagtccgtttccctttcctttctaccctctccctcgtctccggcgggcggtggcctcacctccctctccccgtcgccctgatggctccctccacagctctcgctccggtggccttccgctccgccttctcgacgccgctcgcgtcgaaacctacccgtaatagaatgaacatagagggcgctttctgtttgccgtgttccacaaggaagagagcaagttatagacctttccgagtgtacagtttatttggagggaagaaggat

SEQ ID NO: 18750 - DNA, 265 bp, Zea mays
  Clone ID: LIB3151-035-Q1-K1-E3
ccattgccgagaagctgtgcaaggccccggggcagccagggaggcttgtcaagagcattggcctgcacgggcggatcatggagcggcacgccatgtcagctactcttctggcgaagctgccgtaccagcacatcgctctgaacctggcgctgatcaaccagggcgcgatggttaccgtgctagccaagatagaggagatgcatcgcggcgagacgccgggcaagccgcatgcgaaggcgtatatggagggcctcgtgggtgtgct

SEQ ID NO: 18751 - DNA, 454 bp, Zea mays
  Clone ID: LIB3151-035-Q1-K1-E4
cccacgcgtccgtccagatcagcaaagcggcagtgcgtagagaggatcgtcgaacagaacagcatgaagatggtcatcgttctcgtcgtgtgcctggctctgtcagctgccagcgcctctgcaatgcagatgccctgcccctgcgcggggctgcagggcttgtacggcgctggcgccggcctgacgacgatgatgggcgccggcgggctgtacccctacgcggagtacctgaggcagccgcagtgcagcccgctggcggcggcgccctactacgccgggtgtgggcagacgagcgccatgtaccagccgctccggcaacagtgctgccagcagcagatgaggatgatggacgtgcagtccgtcgcgcagcagctgcagatgatgatgcagcttgagcgtgccgctgccgccagcagcagcctgtacgagccagctctgatgcagcagcagcagc

SEQ ID NO: 18752 - DNA, 444 bp, Zea mays
  unsure at all n locations
  Clone ID: LIB3151-035-Q1-K1-E5
cccacgcgtccgcccctgcgtctgcccctccaggatgtgtacaagattggtggtattggaactgtaccggttggtcgcgtggagactggtgtcatcaagcctggtatggtagtcacctttggtccaactggcctgactactgaggtgaagtctgttgagatgcaccatgaggcgcttcacgaggctcttccgggcgacaatgttggcttcaacgtgaagaacgttgctgtcaaggatctcaagcgtgggttcgtggcctccaactccaaggatgaccctgccaaggaggctgccagcttcacctcccaggtcatcatcatgaaccaccctgggcagattggcaacggctatgccccagtgctggactgccacacctnccacatcgccgtcaagtttgctgagctcattaccaagatcgacaggcgatctggcaaggagctcgag

SEQ ID NO: 18753 - DNA, 314 bp, Zea mays
  Clone ID: LIB3151-035-Q1-K1-E6
cttcagaccattagctttatctactccagagcgcagaagaacccgatcgacaccatgagggtgttgctcgttgccctcgctctcctggctcttgctgcgagcgccacctccacgcatacaagcagcggctgcggcttgccagccacctgcgtcagttcatctaccgccgccggtgcatgtcccacctgcgggtcacctgccacctgcggtgcatctcccaccgccggaccacctgccgacgccggtccacctgccaccgccggttcatgtgccggtcgcgagtcaatctagcgacggcaccatgccactaccct

SEQ ID NO: 18754 - DNA, 366 bp, Zea mays
  Clone ID: LIB3151-035-Q1-K1-E7
gaccattagctttatatacttcagagcgcataccaaccggagaaacaccatccgggagtgggttgatggccgcgctctcctggctgtcgctggcagcgcgagcttcacccatacaaacaggtggtggaggtggcacaccaacgccgaaggtttatataacgtagccagtgtatgtgtcatctttggtataaatggcacctgcagtgcatttatcaccggcaattcatctgtcgacgacggtacacctgccatcgtctgtcacatgtgacttcgaggttcatgcagagatcgcagtatgctcactacgccactcaacctggtcggcgtcacactcatgcaaacctacaccgatgcccttgacaacag

SEQ ID NO: 18755 - DNA, 447 bp, Zea mays
  Clone ID: LIB3151-035-Q1-K1-E8
tgggtcttcagaccattagctttatctactccagagcgcagaagaacccgatcgacaccatgagggtgatgctcgttgccctcgctctcctggctctcgctgcgagcgccacctccacgcatacaagcggcggctgcggctgccagccaccgccgtcggttcatctaccgccgccggtgcatctgccacctccggttcacctgccacctccggtgcatctaccaccgccggtccacctgccgccgccggtccacctgccaccgacagtccatgtgccgacgtcggatcatctgtcgccgaccccatgccactaccctacttaagcggcccggcctgagtcttatcctcagccacacccatgtccgtgccaacagccgcatccaagcccgtgccagctgtagggaacctgcggcgttggcagcacccagatcctgggccagtgcgtcg

SEQ ID NO: 18756 - DNA, 333 bp, Zea mays
  Clone ID: LIB3151-035-Q1-K1-E9
cgcaacatcaacaacagttcctacttgcactgagccacctagacaaggcgaaccgtgacgggtacttgctacaacaggtgcttgcattcaacccacttgctctagcaaacgtagttgcaaaccaccaacaacaacatctggatcaatttctgccagcgcttattaaaataggcatggggaaccctgccacctacctacaacaagaacaactggtttcatctataacgctcggtgtagccaatgcacctacatacctgtaacaagaattgttgaaacagattgtaccatctattactcagctagctgtggcaaaacctgatgcctacttgcaac

SEQ ID NO: 18757 - DNA, 348 bp, Zea mays
  Clone ID: LIB3151-035-Q1-K1-F1
ccgacatcgacccttcgtccccacgagcaaccgataatccgccggcgttgagatgttggggtatcaggatctcctatctggcgactagctcctgttggattcattcacttacaaggtgctcgagaacggtgtcctgtgggaggtcgagggaaagtggatcacccaaggtcctgctgatgtggacattggtgccaattcatacctcgagggtggtgaggacgaaagcgttgatgacacagctgtgaaagctgttgatattgttgacacattccgtctacaggagcaacctgcttttgacatgaaattatctgtgtcttacatcaaagaactcatcatgaatctcactgc

SEQ ID NO: 18758 - DNA, 170 bp, Zea mays
  Clone ID: LIB3151-035-Q1-K1-F10
ctgggtcttcagaccattagctttatctactccagagcgcagaagaacccgatcgagaccatgagggtgttgctcgttgccctcgctctcctggctctcgctgcgagcgccacctccacgcatacaagcggcggctgcggctgccagccaccgccgccggttcatctacc

SEQ ID NO: 18759 - DNA, 421 bp, Zea mays
  Clone ID: LIB3151-035-Q1-K1-F11
cggatccgtcctcttactggcgagggacgcgcagcggaaacagcggccgttcctcgctctcgcgctcgtcctatggtcgccggcgctgttagctgtcgaccacgtacactttcagtacaatggattcctcatcgggctgctgctgctttcgctgcacttcctcgagcaggggtgggatcttatcgggggagtcgtgttcgcatgcttgctgtgctcgaagcacctgttcctcgtggcagcgccggtgtactttatgtatttgttcaggcattattgctgcggccggggtgtcgtgaaggggctgggaaggctcgtgctgatgggttctggagtggctgctgattttgccgcaccatttgtgcccttcgtgtattatggtcagatgcaacacgtaattagccgattgtttccctttgggcga

SEQ ID NO: 18760 - DNA, 255 bp, Zea mays
  unsure at all n locations
  Clone ID: LIB3151-035-Q1-K1-F12
caacaagcaacatataaagtggaattcagcagcaacaatagagcaacaatggagacgaagatattttccctccttatgcgccttggcttttctacatgtgttgctaaccccacaattttccctcaatgctcacaagctcctatagctntcctttttcccccataccttacagtaattatagcttcagtatgggaaaacccagctctctaaccatataggcttcaacaagcaatcgcagcaagcaacataccttta

SEQ ID NO: 18761 - DNA, 454 bp, Zea mays
  Clone ID: LIB3151-035-Q1-K1-F2
caacaagcaacatagaaagtggaatccagtagcaacaatagagcaacaatggcgaccaagatatttggcctccttatgctccttgctctttctgcatgtgttgctaacgcgacaattttccctcaatgctcacaagctcctatagcttcccttcttcccccataccttccatcaatgatagcttcagtatgtgaaaacccagctcttcaaccctataggctccaacaagcaatcgcagcaagcaacatacctttatcacccttgtttcaacaatcgccagccctatctttggtgcagtcattggtacaaaccatcagggcacagcagctgcagcaactcgtgctacctgtgatcaaccaagtagctctggcaaacctttctccctactctcagcaacaacaatttcttccattcaaccaactgtctacattgaaccgtgctgcttatttgcagc

SEQ ID NO: 18762 - DNA, 431 bp, Zea mays
  unsure at all n locations
  Clone ID: LIB3151-035-Q1-K1-F3
gggatcagcgtgaacgagacatacgggacgtacgtgcgagggatgcagcaggacgtgttcctgaagcggaacggcaccaactacctcggcaaggtgtggcccgggtacgtctacttcccggacttcctcaacccgcgcgccgccgagttctgggcgcgcgagatcgccctgttccggcggacgctccccgtcgacggcctctggatcgacatgaacgaggtctccaacttcgtcgacccggcgcccctcaacgcgctggacgacccgccgtaccgcatcaacaactccggcgtgcanccgcccatcaacaacaagaccacgccggcgtccgcgtgcactacggcggcgtgcgcgactacgacgcacacaacctttacggtttcttggaggcgcgagccacgcacggagcgctgttcgccgacaccggccgc

SEQ ID NO: 18763 - DNA, 453 bp, Zea mays
  Clone ID: LIB3151-035-Q1-K1-F4
ggcagtcccacaagatcacagcacatacgcttcctccattcccactcgccgcgaacgcgaaccgcgagcgccaacgaagggccgaggtgggacgccccgccgcttctgcagaaagaaaaaggccaggtgaggtgctcgacgcgggagcgggaccggagtagcgccagcgtcccattcccggccaacctccctgttcatctccatgccgacctgactcggactcttgatttgctcctcgcgggggttcggtcccatggcggcagctgcgctggcaatggcagagcacgtggtggccgagctcccagtgaggtgtgagacgccgccgtcgatgctgcgcgaggtggccgtggagatggcccgcgagatgggcgcggggctggagaacgacggcgggagcaaggtcagatgctcctctcctacgtcgataagctccccacagggagagaggaagga

SEQ ID NO: 18764 - DNA, 427 bp, Zea mays
  Clone ID: LIB3151-035-Q1-K1-F6
ctatactatactctaggaagcaaggacaccaccgtcctggcagccaagatgctagcattgggcgctctcctagctctttgtgcaagcgccactagtgcgacccatattccagggcacttgccaccagacatgccattgggtaccatgaacccatgcctgcatgactgtatgatgcaacaggggcttgccagcttgatggcgtgtccgcacctgatgctgcatgaacatgttggccttaccgcttcaaacgatgccagtgatgatgccacagatgaggactgctaacatgatgacaccattgatgatgccgaacatgaagtcaccaactgtcttgccgagcatgatgttgcaaatgatgaagccacagtgtcactgcgacccactctcgcagattatgctgcaacagtagttaccactcatgttcaac

SEQ ID NO: 18765 - DNA, 341 bp, Zea mays
  Clone ID: LIB3151-035-Q1-K1-F7
gccggcgggctgtacccctacgcggagtacctgaggcagccgcagtgcagcccgctggcggcggcgccctactacgccgggtgtgggcagacgagcgccatgtaccagccgctccggcaacagtgctgccagcagcagatgaggatgatggacgtgcagtccgtcgcgcagcagctgcagatgatgatgcagcttgagcgtgccgctgccgccagcagcagcctgtacgagccagctctgatgcagcagcagcagcagctgctggcagcccagggtctcaaccccatggccatgatgatggcgcacaacatgccggccatgggtggactctaccagtacca

SEQ ID NO: 18766 - DNA, 447 bp, Zea mays
  Clone ID: LIB3151-035-Q1-K1-F8
gcaacatagaaagcacaatagtgtaccaacaatggcagccaaaatattttgcctccttatgctccttggtctttctgcaagtgctgctacggcgaccattttcccgcaatgctcgcaagctcctatagcttaccttcttcccccgtacctctcaccagcggtgtcttttgtatgtgaaaacccaattcttcaaccctacaggatccaacaggcaatcgcagctggcatcttacctttatcacccttgttcctccaacaatcatcagccctattacaacagttacctttggtgcatttattggcacaaaacatcagggcacaacaactacaacaacttgtgctagcaaaccttgctgcctactctcagcaacagcagtttcttccattcaaccaactaagttcattgaactctgcttcttatttgcaacaacaacaactaccattcag

SEQ ID NO: 18767 - DNA, 298 bp, Zea mays
  Clone ID: LIB3151-035-Q1-K1-G1
ttagctttatctactccagagcgcagaagaacccgatcgacaccatgagggtgttgctcggtgccctcgctctcctggctctcgctgcgagcgccacctccacgcatacaagcggcggctgcggctgccagccaccgccgccggttcatctaccgccgccggtgcatctgccacctccggttcacctgccacctccggtgcatctcccaccgccggtccacctgccggcgccggtccacctgccaccgccggtccatgtgccgccgccggttcatctgccgtcgccaccatgccacta

SEQ ID NO: 18768 - DNA, 210 bp, Zea mays
  Clone ID: LIB3151-035-Q1-K1-G10
cgcgcacccggttccgcgtgcctttccccacctactctcgcggctctcgccagccagtctagggtttcggtcccggcgtgcttatccgcccccgccggccatgtcgaagcaaggagggaaagccaagccgcttaaggcgcccaaggccgacaagaaggagtaccacgagaccgatcttgcatatttgcagaagaagaaagatgagggaaa

SEQ ID NO: 18769 - DNA, 434 bp, Zea mays
  Clone ID: LIB3151-035-Q1-K1-G11
gaaaaactatggaacaagaggccggaatgaaatgtatgtatcagacttgtctcgttgttttggccatccaagcagcagattatccgctggcacagcatgcggtaataatcttgtcacagtgctgtaattgggagcgtttctcttgttagaagtgtttctggtctgtttgaccatttacggatcgatttttctttctgaagagtatataaacattttactgagcttaaggccaaggcacagaagggcgcgattgtgggctcgggtctataaaaagtggaaagaaatgagactggtcacccggctccaatacctagaggatgatatggcagctgtctatctgggtggcgcttaactaattgtgattgtaacagatggacctcttgtgttctgtgttccgcaatgttgcaattgattgctggatcgaaagatgttta

SEQ ID NO: 18770 - DNA, 445 bp, Zea mays
  Clone ID: LIB3151-035-Q1-K1-G2
cagcaaagcggcagtgcgtagagaggatcgtcgaacagaacagcatgaagatggtcatcgatctcgtcgggtgcctggctctgtcagctgccagcgcctctgcaatgcagatgccctgcccctgcgcggggctgcagggcttgtacggcgctggcgccggcctgacgacgatgatgggcgccggcgggctgtacccctacgcggagtacctgaggcagccgcagtgcagcccgctggcggcggcgccctactacgccgggtgtgggcagacgagcgccatgtaccagccggtgcggcaacagtgctgccagcagcagatgaggatgatggacgtgcagtccgtcgcgcagcatctgcagatgatgatgcagcttgagcgtgccgctgccgtcagcagcagtctgtacgagccagctctgatgcagcagcagcagcagctgctggc

SEQ ID NO: 18771 - DNA, 335 bp, Zea mays
  Clone ID: LIB3151-035-Q1-K1-G3
gagaccaacaagcaacatagaaagtggaatacagtagcaacaatagagcaacaatggcggccaagatattttccatccttatgctccttgctctttctgcatgtgttgctaacgcgaccatttttcctcaatactcacaagctcctatagctgcccttcttcccccataccttccatcaatgaccgcttcagtatgtgaaaacccagcccttcaaccctacaggctccaacaagcaatcgcaacacgcaacttacctttatcacccctgttctttcaacaatcgccagccctatctttggcgcagtcattggtacaaaccatgagggcacaacag

SEQ ID NO: 18772 - DNA, 188 bp, Zea mays
  Clone ID: LIB3151-035-Q1-K1-G4
ccgactagcaacatagagagcacagtagtgtaccaacactggcagccaaaatatttagcttgcatgtgctcacttgggcttctgcatgtgctgctaccgcagccatcttgcgacaatgctcagcagcacctatggcttcattttttcgcccatacctgtcaccagcggtgtcgtcagtacgagaaaac

SEQ ID NO: 18773 - DNA, 446 bp, Zea mays
  Clone ID: LIB3151-035-Q1-K1-G5
tagcaacatagaaagcacaatagtgtaccaacaatggcagccaaaatattttgcttccttatgctccttggtctttctgcaagtgctgctaccgcaaccattttcccacaatgctcacaagctcctatagcttcctttcttcccccatacctctcaccagcggtgtcttcagtatgtgaaaacccaattcttcaaccctacaggatccaacaggcaatcgcagcaggcatcttacctttatcacccttgttcctccaacaaccgtcagccctattacagcagttacctttggtgcatttgttggcacaaaacatcaaggcacaacaactacaacaacttgtgctaagaaaccttgcttgctactctcaacaacaagcagttcttgcattcaaccaactggcttgattgaactcttgtgcttatttgcaacaacaactaccattcag

SEQ ID NO: 18774 - DNA, 315 bp, Zea mays
  Clone ID: LIB3151-035-Q1-K1-G6
cggggtcgagggacgcgtcacgcgtacggccacgcgtgcgagtataggactgtagaaacacaccaagcgaagatgactagcgaggaccgtgacgacaagtgctaccgagatatgatacctcctttgccatgttgcggctttggcgagcgccacaaatgcgtgcattattccacaatgctcacttgctcgtagttacattattccacaggtactccgaccagttactttaatggccttaggacacccaagtgtgcaagcctataggctacaaccagctattgcggcgagcgtcttacaaccaccaagtgcccaatt

SEQ ID NO: 18775 - DNA, 334 bp, Zea mays
  Clone ID: LIB3151-035-Q1-K1-G7
cgtacctctcaccagcggtgtcttgggtatgtgaaaacccaattcttcaaccctatatgatccaacaggcaatcgcagctggcatcttacctttatcacccttgttgctccaacaatcatcagccctattacagcagttacctttggtgcatttattggcacaaaacatcagggcacaacaactacaacaacttgtgctagcaaaccttgctgcctactctcagcaacaacagtttcttgcattcaaccaactagctgcattgaactctgcttgttatttgcaacaacaacaactaccattcagccagctatctgctgcctacccgcagcaatt

SEQ ID NO: 18776 - DNA, 101 bp, Zea mays
  Clone ID: LIB3151-035-Q1-K1-G8
cagaccgttacctttatcgactccagagcgcacaacaacccgatcgacaccatgagggtggcgctcgctgcccgtcctctcctgggtgtcgctgcgagcgc

SEQ ID NO: 18777 - DNA, 369 bp, Zea mays
  Clone ID: LIB3151-035-Q1-K1-G9
gttcggagcgcacacacacacaaccagatctcccccaaatccacccgtcggcaccgccgcttgaagatgcagatctttgtgaaaaccctgaccggcaagactatcaccctcgaggtggagtcgtctgacaccattgacaacgttaaggccaagatccaggacaaggagggcatcccgccagaccagcagcggctcatcttcgctggcaaacagcttgaggacgggcgcacgcttgctgactacaacatccagaaggagagcaccctccaccttgtgctccgcctcatgggaggcatgcagatctttgtgaaaaccctgaccggcaagactatcaccctcgaggtggagtgctctgacaccattgacaac

SEQ ID NO: 18778 - DNA, 214 bp, Zea mays
  Clone ID: LIB3151-035-Q1-K1-H10
cacactcactcatacaacgtgcgattcacactctccaatacctcaacactatggagccccagtttttacccccttatggccctttatcccttttaattgagttcacaaaacgccattttattacaatgtattcattctctcttagctcccttttttcccccatacttccactcattattaaattagcttgaaaaaacccacctttccaacctta

SEQ ID NO: 18779 - DNA, 434 bp, Zea mays
  Clone ID: LIB3151-035-Q1-K1-H11
cgccgcccgctcgctcgcctccgctccggcagcgagctctatcccccgcgacgagcagcagctgccaccgacgcacgcagaccggggaataaatattggtattggtagtgtgatatctataagaagtcaagatggtgaagttcacagctgaagagctccgtgctatcatggacaaaaagaacaacattcgtaacatgtctgtcattgctcatgtggaccatggcaagtctacgcttacagattcccttgtggcagctgctgggattattgcccaggaagttgctggtgatgttcgcatgactgatactcgtgcagatgaagcagagcgtggcattacaatcaaatctactggtatctctctttactatgagatgactgacgagtcactgaagaactacaagggtgagagagatgggtaccaatacttgatcaac

SEQ ID NO: 18780 - DNA, 383 bp, Zea mays
  Clone ID: LIB3151-035-Q1-K1-H12
gcgtcgcacggatcctccgtcttctccggactcgagcatgccccggaggaccccggcctcggagtgaccgttgcctacaacaaggatcccagccccgggaaagtcaacctcggggtcggtgcctacccgaccgaggaaaggaagcccctaatgctgaacgtggtcaagcgcgccgagcaaatgttgatcaataatccgtcacgtgtgcaggagtaccctacaatcaccggtctggctgaaattaataagctgagcgctaagcttatatttggcgctgacagccctgctattcaggaaaatatggttgctaccgtgcagtgcctatcgggtacttgttctttaagagtcggaggtgaatttcttgcaaggcactatcacgagcg

SEQ ID NO: 18781 - DNA, 438 bp, Zea mays
  Clone ID: LIB3151-035-Q1-K1-H2
agaaagcacaatagtgtaccaacaatggcagccaaaatattttgcctccttatgctccttggtctttctgcaagtgctgctacggcgaccattttcccgcaatgctcgcaagctcctatagcttcccttcttcccccgtacctctcaccagcggtgtcttcggtatgtgaaaacccaattcttcaaccctacaggatccaacaggcaatcgcagctggcatcttacctttatcacccttgttcctccaacaatcatcagccctattacaacagttacctttggtgcatttattggcacaaaacatcagggcacaacaactacaacaacttgtgctagcaaaccttgctgcctactctcagcaacagcagtttcttccattcaaccaactaggttcattgaactctgcttcttatttgcaacaacaaccactaccattc

SEQ ID NO: 18782 - DNA, 384 bp, Zea mays
  Clone ID: LIB3151-035-Q1-K1-H3
agcaatcgcagcaagcaacatacctttatcacccttgtttcaacaatcgccagccctatctttggtgcagtcattggtacaaaccatcagggcacagcagctgcagcaactcgtgctacctgtgatcaaccaagtagctctggcaaacctttctccctactcttagcaacaacaaatattcttccattcaaccaactgtctacattgaaccgtgctgcttatttgcagcaacaactattaccattcagtcagctagctactgcctactcttagcaacaacaacttcttccatttaaccaattggccgcactgaaccccgctgcttatttgtagcagcaaatactactaccatttagccagctagctgcagcaagccgtgctttc

SEQ ID NO: 18783 - DNA, 445 bp, Zea mays
  Clone ID: LIB3151-035-Q1-K1-H4
ctggacgtcagcctagcaattagctcatccactccagattggagaactctacaccatgaaggtgctgatcagcgcccttgctctactgacactcgctacgagcgccacctccagcacaagcggcatgctgaggctgccagacaccaccgtttcatcgaccgcctccgttctatatgccgactgcggtctatctgccgccgtaggagccaccgtagacatggtgataccgaactcaaccaccggagttaatcccgtgccagcagttttgatcctacggcgtcgaccacgtctgcagaccgttcctgggccacacgcgtctagttccagacgcaccagaacaaggcggctgagactccataccgctcgccacagagccaggcgctgaaaaagcagtgctgccaccagatcaggcaagtggagccgctgcaccggtaccaggcgacat

SEQ ID NO: 18784 - DNA, 443 bp, Zea mays
  Clone ID: LIB3151-035-Q1-K1-H5
ggacgtcagcctagcaattagctcatcgactccagattggagaactcgacaccatgaaggtgctgatcgttgcccttgctctcctggcgctcgctgcgagcgccgcctccagtacaagcggcggctgtggctgccagacaccaccgtttcatctaccgcctccgttctatatgccgcctccgttctatctgccgccgcagcagcagccgcagccatggcaataccccactcaaccaccgcagctaagcccgtgccagcagttcggatcctgcggcgtcggcagcgtcggcagcccgttcctgggccagtgcgtcgagttcctgaggcaccagtgcagcccggcggcgacgccctacggctcgccacagtgccaggcgctgcagcagcagtgctgccaccagatcaagcaggtggagccgctgcaccggtaccaggcgacatac

SEQ ID NO: 18785 - DNA, 411 bp, Zea mays
  Clone ID: LIB3151-035-Q1-K1-H6
acggcgaaacgtacgggcaaaagcgccgtaaagatcgccggggacatggttaacgagggacttgttgagcgccgtgcggcgatcaacatgtgtatagccaggccacctggaccagcttcttcatcctcagtttgagaacccatcggcgtacaaggaccaagtcattgccacaggcttaccggcgtcacttggggccgctgtgggccagggtagattcactgctgacgatgctgaaacatggcattcctaagggaaatcagctattctggcgagggcggagaccacccctgaggacctcagcagcatgcacgcggctgccggaatactcacagaaagaggtggcatgagcctccatgccgcccgggaggcacgcgggtggagaaaatgctgtgtctcgggatgctctgggat

SEQ ID NO: 18786 - DNA, 373 bp, Zea mays
  Clone ID: LIB3151-035-Q1-K1-H7
ctagcaacatagaaagcacaatagtgtaccaacaatggcagccaaaatattttgcttccttatgctccttggtctttctgcaagtgttgctaccgcaaccattttcccacaatgctcacaagctcctatagcttcccttcttcccccatacctctcaccagcggtgtcttcaatgtgtgaaaacccaattgttcaaccctacaggatccaacaggcaatcgcaacaggcatcttaccattatcacccttgttcctccaacaaccgtcagccctattacagcagttacctttggtccatttggtggcacaaaacaataaggcacaaccactaccacaacctgggctagccaaccttggtgtgtacttttaacaa

SEQ ID NO: 18787 - DNA, 359 bp, Zea mays
  Clone ID: LIB3151-035-Q1-K1-H8
cagacaaccctatactgttacaacctacacacacacacatgcataatggttggggcacggtgaaactataccaggctaaggtcgatcgctcgtctatagctagaccactatcaccagtaccacctgcatggttacttgactgatagatagaccgacgagaatgaataagctagctagctactatatatatcatcagtagagcgttcagttgttgatgatggccatttcctagcccctggtcaccactgggctgcgccattctccgtaggagcagtcaccgagggtggtcctgtagagcgaggactcgaccgagtggtgagcgtgcacgcaccacgggcaccgactgtcgatggccatgc

SEQ ID NO: 18788 - DNA, 239 bp, Zea mays
  Clone ID: LIB3151-035-Q1-K1-H9
caccttgcaacacacaccgtgggattcgctctcaacactacctcaccactggggacgccaagattttacctcctcatgcgcctcgctccctcttcatgagctgctcacacgacaatattatttcacagctcacaagctcctatagctgccttatttcacacataccttccctcaattattgcttgggcttgtgacaacccagctttccaaccatctaggcttaaacaagccatggcggc

SEQ ID NO: 18789 - DNA, 336 bp, Zea mays
  Clone ID: LIB3151-037-Q1-K1-A10
aatattttgagcattcacaaacacaccaagcgaagcacattagcaacaacctaacaacaatggctaccaagatattatccctccttgcgcttcttgcgctttttgcgagcgcaacaaatgcgttcattattccacaatgctcacttgctccaagttccattattacacagttcctcccaccagttacttcaatgggcttcgaacacccagctgtgcaagcctataggctacaacaagcaattgcggcgagcgtcttacaacaaccaatttcccagttgcaacaacaatccttggcacatctaacaatacaaaccatcgcaacgcatcagctacaac

SEQ ID NO: 18790 - DNA, 351 bp, Zea mays
  Clone ID: LIB3151-037-Q1-K1-A11
gataatctgagcattcacaaacacacccagccaagctcactaccatcagcctcacgacattggctaccatgatgctatgcgtgcttgcgcttctcgcgctttacgcgagcgcaacacatgcgtgcattattgctccatgctcacttgctccaagttccattattacacacgccctactaccagttgctcgaatgggcttgcaacacccaggtgtgcaagcctctatgctacaacaggcctttgaggatagcgtttcacatcagccaattttccagttgcgacatctatccttgcaacatataacaacacaacaccatacgcaacgctactgctagcacagttcctaccagc

SEQ ID NO: 18791 - DNA, 273 bp, Zea mays
  Clone ID: LIB3151-037-Q1-K1-A2
cccacgcgtccggcggcagtgcgtagagaggatcgtcgaacagaacagcatgaagatggtcatcgttctcgtcgtgtgcctggctctgtcagctgccagcgcctctgcaatgcagatgccctgcccctgcgcggggctgcagggcttgtacggcgctggcgccggcctgacgacgatgatgggcgccggcgggctgtacccctacgcggagtacctgaggcagccgcagtgcagcccgctggcggcggcgccctactacgccgggtgtgggca

SEQ ID NO: 18792 - DNA, 206 bp, Zea mays
  Clone ID: LIB3151-037-Q1-K1-A3
cgggacgaccgcacgcgtgcgcccacgcgtacggcggcagtgcgtatagaggtatcgttaacagaacagcatgaaaatggtcagcgttgtcttcatgtgcctggctctgtcaactgccaacgcctctgcaatgcatatgccctgcccctgcacggggctgcagggcttgtactgtgctggctccggactgacgactatgatgggcg

SEQ ID NO: 18793 - DNA, 299 bp, Zea mays
  Clone ID: LIB3151-037-Q1-K1-A4
gagaccaacaagcaacatagaaagtggaatccagtagcaacaatagagcaacaatggagaccaagatattttccctccttatgctccttgctctttctacatgtgttgctaacgcgacaattttccctcaatgctcacaagctcctatagcttccctttttcccccataccttccatcaattatagcttcagtatgtgaaaacccagctcttcaaccatataggcttcaacaagcaatcgcagcaagcaacatacctttatcgcccttgttgtgtcaacaatcgccagccctatctttg

SEQ ID NO: 18794 - DNA, 365 bp, Zea mays
  Clone ID: LIB3151-037-Q1-K1-A5
tcgcaaaacatccttctattagtaccattaatcattattcatcttagtagtataggcgcgaaatgaaatctgcaacatcaattatctaactccaaaaaccatgaagctggtgcttgtggttcttgctttcattgctttagaatcaagtgtttcttgtacacagacaggcgggtgcagctgtggtcaacaacaaagccatgagcagcaacataatccactacaacatcgtccacaaaaacaactgcataaaccgccatcacaacattaccagcagtagcaacaccaacatacaacaagttcacatgcgaccacaaaaacatcatgaacaacaagaatgttaatggtcaataacaacaactacttcc

SEQ ID NO: 18795 - DNA, 236 bp, Zea mays
  Clone ID: LIB3151-037-Q1-K1-A6
ccaacaagcaacatagaaagtggaatccagtagcaacaatagagcaacaatggagaccaagatattttccctccttatgctccttgctctttctacatgtgttgctaacgcgacaattttccctcaatgctcacaagctcctatagcttccctttttcccccatcccttccatcaattatagcttcagtatgtgaaaacccagctcttcaaccatataggcttcaacaggcaatcg

SEQ ID NO: 18796 - DNA, 332 bp, Zea mays
  Clone ID: LIB3151-037-Q1-K1-A7
ccaacaagcaacatagaaagtggaattcagtagcaacaatagagcaacaatggagaccaagatattttccctccttatgctccttgctctttctacatgtgttgctaacgcgacaattttccctcaatgctcacaagctcctatagcttccctttttcccccataccttccatcaattatagcttcagtatgtgaaaacccagctcttcaaccatataggcttcaacaagcaatcgcagcaagcaacatacctttatcgcccttggtgtgtcaacaatcgccagccctatctttggtgcagtcattggtacaaaccatcacggcacaacagc

SEQ ID NO: 18797 - DNA, 219 bp, Zea mays
  Clone ID: LIB3151-037-Q1-K1-A8
gacgaacatagatcatataaagcgggataccttattgacactacaacaacaatggagacggggacattttgcctcgctatgcgctgtgctctttctacaagtgtggctaacgcgacaattttacctctatgctcacacactcctatatatgttctttttacaccatacctttcatgaagtatagagttagaatgtgaaaaaccacctctttaaccatat

SEQ ID NO: 18798 - DNA, 435 bp, Zea mays
  Clone ID: LIB3151-037-Q1-K1-A9
gcacaatagtgtaccaacaatggcagccaaaatattttgcctccttatgctccttggtctgtctgcaagtgctgctacggcgaccattttcccacaatgctcacaagctcctatagcttcccttcttcccccgtacctctcaccagcggtgtcttcggtatgtgaaaacccaattcttcaaccctataggatccaacaggcaatcgcagctggcatcttacctttatcacccttgttcctccaacaatcatcagccctattacagcagttacctttggtgcatttattggcacaaaacatcagggcacaacaactacaacaacttgtgctagcaaaccttgctgcctactctcagcaacaacagtttcttccattcaaccaactagctgcattgaactctgcttcttatttgcaacaacaacaactaccattcag

SEQ ID NO: 18799 - DNA, 375 bp, Zea mays
  unsure at all n locations
  Clone ID: LIB3151-037-Q1-K1-B1
cgtagttgcaaaccagcaacaacaacaactgcaacagtttctgccagcgcttagtcaactagccatggtgaaccctgccgcctacctacaacagcaacaactgctttcatctagcccgctcgctgtggccaatgcacctacatacctgcaacaagaattgttgcaacagattgtaccagctctaactcagctagctgtggcaaaccctgttgcctacttgcaacagctgcttccattcaaccaactaactatgtcgaactctgttgcgtacctacaacagcgacaacagttacttaatccattggcagtggctaacccattggtcgctgccttcctacagcagcaacaattgctgccatacaaccggntctcttt

SEQ ID NO: 18800 - DNA, 211 bp, Zea mays
  Clone ID: LIB3151-037-Q1-K1-B10
gcggccgctttagaagcaccacactcacttccgagtgcataccacgtcacaacaatggtatcgaagattgtacttgcacttcagtggctggccttttacaacgcctagactacgaaaaccctgtggggcagcaacacaataccgttgcatctaatgcctctgttgtctgtgcacgctatactgtataggccggcgcagatcgagctgcaca

SEQ ID NO: 18801 - DNA, 411 bp, Zea mays
  Clone ID: LIB3151-037-Q1-K1-B11
ctcaatttttcccagccgccacagccattcttcctccctgtcttcttatctccacggcagggagcctctcccatggcgcagcagcaaatcccatgcagcgagctcctcccccatgcggtgtccggccaccacttcttcacatgtgctgcgtaggatcccctagcccaaccccttgcggcgggagcacaaccgtcgtttctcttggtgctcagctcctaggcgcagatccctccatggccgtcagctgcgctcgagctccactcctcccatggcgccacaaccccagccagcccccttcttccccatggccgagcatctccatggctggcgctcccctttccttggtgccccatggctgctcgttcaggtgccctgctccacctcgcacagcgcctgctcttcccctactcg

SEQ ID NO: 18802 - DNA, 459 bp, Zea mays
  Clone ID: LIB3151-037-Q1-K1-B12
agaaagcacaatattgtaccaataatggcagccaaaatattttgcctcattatgctccttggtctttctgcaagtgctgctacggcgagcattttcccgcaatgctcacaagctcctatagcttcccttcttcccccatacctctcaccagcgatgtcttcagtatgtgaaaatccaattcttctaccctacaggatccaacaggcaatcgcagcaggcatcttacctttatcacccttgttcctccaacaatcatcagccctattacagcagttacctttggtgcatttattggcacaaaacatcagggcacaacaactacaacaactcgtgctagcaaaccttgctgcctactctcagcaacagcagttacctttggtgcatttgttggcacaaaacatcatggcacaacaactacaacaactcgtgctagcaaaccttgctgcctactctcagcaa

SEQ ID NO: 18803 - DNA, 445 bp, Zea mays
  Clone ID: LIB3151-037-Q1-K1-B2
attatttagaccaactagcaacatagaaagcacaatagtgtaccaacaatggcagccaaaatattttgcctccttatgctccttggtatttctgcaagtgctgctacggcgaccattttcccgcaatgctcacaagctcctatagcttcccttcttcccccgtacctctcaccagcggtgtcttcggtatgtgaaaacccaattcttcaaccctacaggatccaacaggcaatcgcagctggcatcttacctttatcacccttgttcctccaacaatcatcagccctataccagcaagttactttgggtgctttattgggcccaaacattaagggaccacaactaccacaacttgggcttacaaaacttggtggctacttttaacaacaacaggttctttcattcaaccaactaactgcattgaactctgcttcttatttgcaac

SEQ ID NO: 18804 - DNA, 441 bp, Zea mays
  Clone ID: LIB3151-037-Q1-K1-B5
ccaacaagcaacatagaacgtggaatgcacaatcaacaatcgagcatcaatggcgaccaagatattctccctacgcatgctccttgctctttctgcatgtgttgctaacgcgacaattttccctgaacgctcacaagcttctatagctttccttcttcccacataccttccatcaatgatagcttcagtatgtgaaaacccacctattcatccctataggctccaacaagcaatcgcagcaagcaacataccttaatcacccttgtttcaacaatcgccagccctatctttggtgcactcattgggacataccatgagggcacaatagctgcagcaactcgtgctacctgtgatcaaccaagtagctctggctaactctttatgctactgtcagcatcaacaatttctttcattcaaccgactgtctacattgaaccgcgc

SEQ ID NO: 18805 - DNA, 361 bp, Zea mays
  Clone ID: LIB3151-037-Q1-K1-B7
ggccatcacaacaagcatcttacggtctatagcattgactgtccaacaaccatatgggctattgcaacaaccatccttagtgaatctatatctccaaagaatcgcagcacaacaactacaacagcagttgcttccaacaatcaatcaagtagttgcagcgaaccttgctgcttacctccatcaacaacaattttttacattcaatcaactagctggggtgaaccttgctgcttacttgcaggcacaacagctactaccattcaaccaacttgtcaggagccctgctgccttcttactgcaacaacaagttgctgtcattccatatacaagttgtggcaaacattgctgcttttttgcaaca

SEQ ID NO: 18806 - DNA, 353 bp, Zea mays
  Clone ID: LIB3151-037-Q1-K1-B8
tcgattgagaccaactagcaacatagaaagcacaatagtgtaccaacaatggcagccaggggattttgcttccttatgctccttggtctttctgcaagtgttgctaccgcaaccattttcccacaatgctcacaagctcctatagcttcctttcttctcccatacctctcaccagcggtgtgttcaaggagaaacaacccaattgttataccctaaacgaaccaacaaggcaatccaacaagcatcttaccattatcacgctggttccttcaacaacacgccagcctattaacagaattacctttggtccatttgggggcacaaaaaatcaaggcacaacaactacaacaact

SEQ ID NO: 18807 - DNA, 353 bp, Zea mays
  Clone ID: LIB3151-037-Q1-K1-B9
gagcattcagaaacacaccaagcgaagcgcactagcaacaacctaacaacaatggctaccaagatattatccctccttgcgcttcttgcgctttttgcgagcgcaacaaatgcgtccattattccacaatgctcacttgctcctagttccattattccacagttcctcccaccagttacttcaatggccttcgaacacccagctgtgcaagcctataggctacaacaagcgattgcggcgagcgtcttacaacaaccaattgcccaattgcaacaacaatccttggcacatctaacaatacaaaccatcgcaacgcaacagcaacaacagttcctaccagcactgagccacct

SEQ ID NO: 18808 - DNA, 368 bp, Zea mays
  Clone ID: LIB3151-037-Q1-K1-C1
cagcaaagcggcagtgcgtagagaggatcgtcgaacagaacagcatgaagatggtcatcgttctcgtcgtgtgcctggctctgtcagctgccagcgcctctgcaatgcagatgccctgcccctgcgcggggctgcagggcttgtacggcgctggcgccggcctgacgacgatgatgggcgccggcgggctgtacccctacgcggagtacctgaggcagccgcagtgcagcccgctggcggcggcgccctactacgccgggtgtgggcagacgagcgccatgtaccagccgctccggcaacagtgctgccagcagcagatgaggatgatggacgtgcagtccgtcgcgcagcagctgcaaatgatgatg

SEQ ID NO: 18809 - DNA, 454 bp, Zea mays
  Clone ID: LIB3151-037-Q1-K1-C10
gggtcttcagaccattagctttatctactccagagcgcagaagaacccgatcgacaccatgagggtgttgctcgttgccctcgctctcctggctctcgctgcgagcgccacctccacgcatacaagcggcggctgcggctgccagccaccgccgccggttcatctaccgccgccggtgcatctgccacctccggttcacctgccacctccggtgcatctcccaccgccggtccacctgccgccgccggtccacctgccaccgccggtccatgtgccgccgccggttcatctgccgccgccaccatgccactaccctactcaaccgccccggcctcagcctcatccgcagccacacccatgcccgtgccaacagccgcatccaagcccgtgccagcttgcaggaacctgcgggcgtggcaacaccccgatcctgggccagtgcgtcgagtttctg

SEQ ID NO: 18810 - DNA, 423 bp, Zea mays
  Clone ID: LIB3151-037-Q1-K1-C11
caggaagctgatttctatatagcgttatcccccaatcgaagaggtgatcagcacaggagtggggccgcgattcattgagtttcttacacgtgaggaccatccccaactccagtttgaggctgcatgggcactcaccaacattgcatcatgcacatcagagaacactaaagtggtggttgagagtggtgctgtgcccatctttgtcaagctactcaacttcctcagcgaggatgttcgtgaacaggctgtatgggctttaagtaatgttgctggtgactccccaaagtgccgtgatctggtacttggtcattgtgggctataccctttgctgcagcatcttaatgagcatgctaagctttcgatgcttatgaatgctacatggactctcttcaactttcttcgggggaagccacaaccaaactt

SEQ ID NO: 18811 - DNA, 247 bp, Zea mays
  Clone ID: LIB3151-037-Q1-K1-C12
gcctaaaccccattccttgctgcaatactgtttacattacctaatgcgggtggctccacaggaccggttccaatcgatcttgggcttggtcctccactccatactgcaacaatagctccctaatcggtcacatcccggtactgctggcggttcagatagctcattatctgactgtaattatcgatctgcataaaactaattcattccactacactggtgccaacagtgttccccactaaacaaacta

SEQ ID NO: 18812 - DNA, 444 bp, Zea mays
  Clone ID: LIB3151-037-Q1-K1-C2
atttagaccaactagcaacatagaaagcacaatagtgtaccaacaatggcagccaaaatatgttgcctccttatgctccttggtatttctgcaagtgctgctacggcgaccattttcccgcaatgctcacaagctcctatagcttcccttcttcccccgtacctctcaccagcggtgtcttcggtatgtgaaaacccaattcttcaaccctacaggatccaacaggcaatcgcagctggcatcttaaccttaataaccctggttcttccaccaataataacccttttaccagaagtacctttggggcctttattggcaccaaacattaagggacaaccacttccacaacttgggcttacaaaacttggtggctacttttaacaacaacaggttctttcattcaaccaactaactgcattgaactctgcttcttatttgcaacaa

SEQ ID NO: 18813 - DNA, 252 bp, Zea mays
  Clone ID: LIB3151-037-Q1-K1-C3
ctggacgtcagcctagcaattagctcatcgactccagattggagaactcgacaccatgaaggtgctgatcgttgcccttgctctcctggcgctcgctgcgagcgccgcctccagtacaagcggcggctgtggctgccaaacaccaccgtttcatctaccgcctccgttctatatgccgcctccgttctatctgccgccgcagcagcagccgcagccatggcaataccccactcaaccaccgcagctaagccc

SEQ ID NO: 18814 - DNA, 370 bp, Zea mays
  Clone ID: LIB3151-037-Q1-K1-C4
catcgatgatcatagagtcgatgaccagcagaaaacgcaggtatgttaacatattctttgacgtcattcttgttcagatatgatttgatcattgttgctatgtgcaaaaatatttaatatttattgttcataagaagcaggcaccgcacacagcatcactggctatatgtgagaatgctcaaaacgatggcaatagaatccttgaatcaatggtgtatcaggtaacatgattatacataatatttaaaaaattactttgtgttgtgtaatatgattttgttaacaacccatttaacattaggaggttattaaccttacccaacttttattggttcttgaagtggaatggcttttgaattccgagaaaatg

SEQ ID NO: 18815 - DNA, 445 bp, Zea mays
  Clone ID: LIB3151-037-Q1-K1-C5
cttgggcatcaagtgtttatagcatacttctacttctaatccgggactcaaacaattataagataaagatgcatgcagctgttgctctatcagtgccagtgtcaaggcttgattacagcagctcatttccagatgttgttcgaggcctcgtgcatgctctcgagtcattgaactcaaacaattcatcgttaccttcaaatttcaaacagagagacaacctcgagaagcagcttacgtttactgctctccatttgcttagttttgtgtcaccaaacgacgatccaagcctgaaagattttcttaccaagaaatcgtcgttcctagaagactggctgagatcactatgcgcatcgttgaacagctccgagcgccagcccttgccaacggaggccacaaacgacgaggacggcttcagcccaaacgtgactcaaaaaggcatgctgtc

SEQ ID NO: 18816 - DNA, 438 bp, Zea mays
  Clone ID: LIB3151-037-Q1-K1-C6
attgagaccaactagcaacatagaaagcacaatagtgtaccaacaatggcagccaaaatatggtgcttccttatgctccttggtctttctgcaagtgttgctaccgcaaccattttcccacaatgctcacaagctcctatagcttcccttcttcccccatacctctcaccagcggtgtcttcaatgtgtgaaaacccaattgttaaaccttacaggatcaaccaggcattcgcaccaggattttaacaatattaaccttggttcttccaccaccggcaagccttatacaacaagtacctttggtccatttgggggcacaaaaaattaaggcacaacaactaccacaacttgggcttacaaaacttggttgataattttaacaacattaagttctttcattcaaacaactggcttgattgaactttgctggttatttgc

SEQ ID NO: 18817 - DNA, 380 bp, Zea mays
  Clone ID: LIB3151-037-Q1-K1-C7
attgagaccaacaagcaacatagaaagtggaatccagtagcaacaatagagcaacagtggcgaccaagatattttccctccttatgctccttgctctttctgcatgtgttgctaacgcgacaattttccctcaatgctcacaagctcctatagcttcccttcttcccccataccttccatcaatgatagcttcagtatgtgaaaacccagctcttcaaccctataggctccaacaagcaatcgcagcaagcaacatacctttattaccctgggtgtcaacaatcgccagccctatctttggtgcagtcattggtacaaaccatcagggcacagcagctgcagcaactcgtgctacctgtgatcaaccaagtagctctggc

SEQ ID NO: 18818 - DNA, 364 bp, Zea mays
  Clone ID: LIB3151-037-Q1-K1-C9
gggtcttcagaccattagctttatctactccagagcgcagaagaacccgatcgacaccatgagggtgttgctcgttgccctcgctctcctggctctcgctgcgagcgccacctccacgcatacaagcggcggctgcggctgccagccaccgccgccggttcatctaccgccgccggtgcatctgccacctccggttcacctgccacctccggtgcatctcccaccgccggtccacctgccgccgccggtccacctgccaccgccggtccatgtgccgccgccggttcatctgccgccgccaccatgccactaccctactcaaccgccccggcctcagcctcattcccagccacacccatgcccg

SEQ ID NO: 18819 - DNA, 329 bp, Zea mays
  Clone ID: LIB3151-037-Q1-K1-D1
cagaaacacaccaagcgaagcacattagcaacaacctaacaacaatggctaccaagatattatccctccttgcgcttcttgcgctttttgcgagcgcaacaaatgcgttcattattccacaatgctcacttgctccaagttccattattacacagttcctcccaccagttacttcaatgggcttcgaacacccagctgtgcaagcctataggctacaacaagcaattgcggcgagcgtcttacaacaaccaatttcccagttgcaacaacaatccttggcacatctaacaatacaaaccatcgcaccgcaccagcaacaccaattctta

SEQ ID NO: 18820 - DNA, 427 bp, Zea mays
  Clone ID: LIB3151-037-Q1-K1-D10
gccttgttggggcatgggactcgagacgactgagagttgagggcggacacattgagcgagcacgggatcatctggcgacctcagaggctgtttgcctctgggggcggtggaattctttagcaccccatcttccacatgtctttcgactggctgctgctctttcggttggtaatatgcttggatctatgactctagaccgttccacgaaatctccagtcctttcttcctcttggaggaggagggctgccgcttgagcaggagacgggagacatgggtagcttcgttaagctcgcgaggatggcggtggagacagacgcgccggtcatggtcaatatacaagaactgcttccaggggccaacgatatgatgtcgcttgcgcacggagttgtttactggcaacctgctgattcaccaatggctaacgtcg

SEQ ID NO: 18821 - DNA, 123 bp, Zea mays
  Clone ID: LIB3151-037-Q1-K1-D11
atgagttatagttcaataataaatctaaaagagggcaccaccaataatcggctcccccttgaacggtggttgttttgtcaaagcaagttgttcttaatcgcatcaacccatcattggtgcata

SEQ ID NO: 18822 - DNA, 284 bp, Zea mays
  Clone ID: LIB3151-037-Q1-K1-D12
tctgcgtacacagtctccctcttcctgtcattagttttttgagagtgaggcagctagtgggagacggggggaaatggggaagggtgcgcatgggatcgatgctgcggcagcggtcggctaggtgtatgagaacatgtctgcgtggcatggttgccaagaacacccttatgatcatgcccttaaagctcccgcccgtcggtccttatgatgtccgcgtgctcatgaaagcagtgtggatttgcggcatctatgtgcactacctaagggagatgcgcatcttgcac

SEQ ID NO: 18823 - DNA, 371 bp, Zea mays
  Clone ID: LIB3151-037-Q1-K1-D3
accgatcgatcgccacagccaacaccacccgccgaggcgacgcgacagccgccaggaggaaggaataaactcactgccagccagtgaagggggagaagtgtactgctccgtcgaccagtgcgcgcaccgcccggcagggctgctcatctcgtcgacgaccagtggattaatcggcatggcggctctggccacgtcgcagctcgtcgcaacgcccgccggcctgggcgtcccggacgcgtccacgttccgccgcggcgccgcgcagggcctgaggggggcccggccgtcggcggcggcggccaccctaagaatgcggacaagggggggcccggggccaaggaccaagaagaaggccccccggggggccaggt

SEQ ID NO: 18824 - DNA, 445 bp, Zea mays
  Clone ID: LIB3151-037-Q1-K1-D5
atcgcccacaaaggagagccaggcagccagccaaatcttccacctcctccatttccagccccgtccccacaccagctcgcgtaacctcctgcccatggctggaggcggcggcgcaggcgcgggctcgtcgtccggcggcggcggagggggcggcagggagggcgactgggactgcggcagctgcggcaaccgcaactacgccttccgctcgctctgcaaccgctgcaagcagccgcgcctcctcgtcgaccccaacaccccgcgcgactccaagtggctaccccgcgccggggactggatctgcaccggttgcagtaacaataattatgcatccagaaagaactgcaaaaagtgtggcttgcccaaggaggaagcagcaatgccagcattgcaaatggcagggatgactatgccaacttatgcaacttatattgcaagactacaa

SEQ ID NO: 18825 - DNA, 268 bp, Zea mays
  Clone ID: LIB3151-037-Q1-K1-D6
caacaagcaacatagaacgtggaatccagtagcaacaatagagcaacaatggagaccaagatattttccctccttatgctccttgctctttctacatgtgttgctaacgcgacaattttacctcaatgctcacaagctcctatagcttccctttttcccccataccttccatcaattatagcttcagtatgtgaaaacccagctcttcaaccatataggcttcaacaagcaatcgcagcaagcaacataccgttatcgccttgttgtg

SEQ ID NO: 18826 - DNA, 360 bp, Zea mays
  Clone ID: LIB3151-037-Q1-K1-D7
gcgcgaacgcgaggacggacaccagggctgacgcgtacgtttcgagcattcagaagacgggatgtcttactgctagccagtacatgacgacaattgttctgatgctattaccagtgcgcgaccttgttgcctactttgagaaacaaccaaatgttttatttattcaactgtgttcatttgattttagtgccattattccacagctcctcccacctgttagttgaatgggtcgcgtacacgttccgccgcggcgccacgcacggcctgagggggccccggccttcgctggcggcgacacccttaagattgcgaacaaggggggccgcggggccaaggaacaacaacaaggccccccgcggg

SEQ ID NO: 18827 - DNA, 144 bp, Zea mays
  Clone ID: LIB3151-037-Q1-K1-D8
taacatgctcatctaaagaggcatacagtactcaacactacaccatcaagggcggggtcgatgttctccatccttctgctccttgcttctatctgcaatcttcactcatcacaaccatttgtcctcaatgccaacaaactccta

SEQ ID NO: 18828 - DNA, 206 bp, Zea mays
  Clone ID: LIB3151-037-Q1-K1-D9
ctgcactgtcttgttctaggcctagctagctagccctccagctcgcacacatgccatggcgctgtcgtggtcgcccgccgtcgtcgtcttcctcctcctcctgttgctcctccctgccccatggccccgcgcggccgcccaggccggccggtaccacgccgtgtcggtgtccagggcaggaggccagctgtccgcgcggttggagc

SEQ ID NO: 18829 - DNA, 302 bp, Zea mays
  Clone ID: LIB3151-037-Q1-K1-E1
ggcatcttacctttatcacccttgttcctccaacaaccgtcagccctattacagcagttacctttggtgcatttgttggcacaaaacatcaaggcacaacaactacaacaacttgtgctaggaaaccttgctgcctactctcagcaacagcagtttcttccattcaaccaactggctgcattgaactctgctgcttatttgcaacaacaactaccattcagtcagctagctgctgcctacccccagcaatttcttccattcaaccaactggcagcattgaactctgctgcttatttacaaca

SEQ ID NO: 18830 - DNA, 376 bp, Zea mays
  unsure at all n locations
  Clone ID: LIB3151-037-Q1-K1-E2
gaccattagctttatctactccagagcgcagaagaacccgatcgacaccatgagggtgttgctcgttgccctcgctctcctggctctcgctgcgagcgccacctccacgcatacaagcggcggctgcggctgccagccaccgccgccggttcatctaccgccgccggtgcatctgccacctccggttcacctgccacctccggtgcatctcccaccgccggtccacctgccgccgccggtccacctgccaccgncggtccatgtgccgccgccgggtcatctgccgccgccaccatgcaactaccttactaaaccgcccgggcttaagcttaatcccaagcaaaaccaaggccggggccaccagcggattcaaacc

SEQ ID NO: 18831 - DNA, 295 bp, Zea mays
  Clone ID: LIB3151-037-Q1-K1-E3
attttgagcattcagaaacacaccaagcgaagcgcactagcaacaacctaacaacaatggctgccaagatattatccctccttgcgcttcttgcgctttttgcgagcgcaacaaatgcgtccattattccacaatgctcacttgctcctagttccattattccacagttcctcccaccagttacttcaatggccttcgaacacccagctgtgcaagcctataggctacaacaagcgattgcggcgagcgtcttacaacaaccaattgcccaattgcaacaacaatccttggcaca

SEQ ID NO: 18832 - DNA, 426 bp, Zea mays
  Clone ID: LIB3151-037-Q1-K1-E4
gggaagtgagatgtggagaagtaaaacgaaagattctaagcctgccaagtctggacgtctatctcacgaagaaaagaagcttgggaagtctaatgatgaaaagaagacaaaacctcggaagtcaatggaatttcataacatcaagattggcaaggttgaacttcttgttacatacgagggatcaaggcttgctattaatgacctaaggttgcttatggatactttccacaaggcagaatttactggtacatggaggcgactattctctagagtcaaaaaacatatcatctgggggagttttgaagtcggaaccgggatggaagggaagaaagttaaccaccataaggaaacacttggggggtctatttctggaaatgatcttaacttgagtgacaaggatgttggtcaacctggaaaacatgatca

SEQ ID NO: 18833 - DNA, 286 bp, Zea mays
  Clone ID: LIB3151-037-Q1-K1-E5
ccaactagcaacatataaagcacaatagtgtaccaacaatggcagccaaaatattgggcctgcttatgctccttggtctttctgcaagcgctgctacagcgaccattttcccgaaatgctcgcaagctcctatagcttcccttcttcccccgtacctctcaccagcggtgtcttcggtatgtgaaaacccaattgttcaaccctacaggatccaacaggcaatcacagctggcatcttacctttatcacccttgttcctccaacaatcatcagccctattacatca

SEQ ID NO: 18834 - DNA, 376 bp, Zea mays
  Clone ID: LIB3151-037-Q1-K1-E6
agcaaagcggcagtgcgtagagaggatcgtcgaacagaacagcatgaagatggtcgtcgttctcgtcgtgtgcctggctctgtcagctgccagcgcctctgcaatgcacatgccctgcccctgcgcggggctgcatggcttgtacggcgctggcgccggcctgacaactatgatgggcgccggcggtctgtacccctacgcggagtacctgaggcagccgcatggcagcccgctggcagcggcaccctactacgctgtgtgtggggaaaacaaatccattgtcccaaccgttccggaaccatgcttgccagcaccgaatgaggatattggccgggcataccgcaggccagagctggaaattaatattcaacctggg

SEQ ID NO: 18835 - DNA, 291 bp, Zea mays
  Clone ID: LIB3151-037-Q1-K1-F1
gtgaaattgagcagtctacagcaataccagccgctgacctgaagcgatgcctccagtcactagctcttgtgaagggtaagcaagtcctgcggaaagagccgatgagcagggacattgccgatgatgacaacttctgcgtgaacgacaagttcaccagcaagctcttcaaggtgaagatcggcaccgtggtggcgcagaaggagaccgaccccgagaagctagagacgcggcagcgggtggaggaggacaggaagccgcagatcgaggcggccattgtgcggatcatgaaag

SEQ ID NO: 18836 - DNA, 447 bp, Zea mays
  Clone ID: LIB3151-037-Q1-K1-F12
caactagcaacatagaaagcacaatagtgtaccaacaatggcagccaaaatattttgcttggcgttatgctccttggtctttctgcaagtgctgctaccgcaaccattttcccacaatgctcacaagctcctatagcttcctttcttcccccatacctctcaccagcggtgtcttcagtatgtgaaaacccaattcttcaaccctacaggatccaacaggcaatcgcagcaggcatcttacctttatcacccttgttcctccaacaaccgtcagccctattacagcagttacctttggtgcatttgttggcacaaaacatcaaggcacaacaactacaacaacttgtgctaggaaaccttgctgcctactcttagcaacagcagtttcttccattcaaccaactggctgcattgaactctgctgcttatttgcacaacaactaccat

SEQ ID NO: 18837 - DNA, 301 bp, Zea mays
  Clone ID: LIB3151-037-Q1-K1-F2
tttatctactccagagcgcagaagaacccgatcgacaccatgagggtgttgctcgttgccctcgctctcctggctctcgctgcgagcgccacctccacgcatacaagcggcggctgcggctgccagccaccgccgccggttcatctaccgccgccggtgcatctgccacctccggttcacctgccacctccggtgcatctcccaccgccggtccacctgccgccgccggtccacctgccaccgccggtccatgtgccgccgccggttcatctgccgccgccaccatgccactaccctactc

SEQ ID NO: 18838 - DNA, 122 bp, Zea mays
  Clone ID: LIB3151-037-Q1-K1-F3
agatcctcgaaggccatttcagtactcgaacagctctggctctccctgcgtttcagaatcagggtctgacatttatagcaaaagagaggtcatacagaagctaagacagcacctcaagaaac

SEQ ID NO: 18839 - DNA, 348 bp, Zea mays
  unsure at all n locations
  Clone ID: LIB3151-037-Q1-K1-F4
gagcaatgacctgaatgaacaattgaaatgaaaagaaaaaagtattgttccaaaaaaaaaaaaaaagggcggcccgacggcgacgccctactgctcgcctcagtgccagtcgttgcggcagcagtgttgccagcagctcangcaggtggagccgcagcaccggtaccaggcgatcttcggcttggtcctccagtccatcctgcagcagcagccgcaaagcggccaggtcgcggggctgttggcggcgcanatagcgcagcaactgacggcgatgtgcggcctgcagcagccgactccatgcccctacgctgctgccggcggtgtcccccactgaaaaaactatgtgct

SEQ ID NO: 18840 - DNA, 183 bp, Zea mays
  Clone ID: LIB3151-037-Q1-K1-F5
gttctaaatcgcgaccggccacccttttttttttttataattttacaacaatatctctcccgttatattttcttccttttctttcttaacatttttttttcctcttttctattttccccaatacaaccataaacaccaccccccaattcctttttccccaaaaacccccaccaaaaacactaa

SEQ ID NO: 18841 - DNA, 240 bp, Zea mays
  Clone ID: LIB3151-037-Q1-K1-F8
aaatactgatctcactgatccagtatggctatagcatttgctgtcacaccaagggtatggggggcccacctggtgactctctgtctatcactcctatgcgctgtcgtcggcccggacgtcgtgcaaaactgttgctgccagccaaacgtatgctgcagcaaggttggctactgcggtacgaccgacgagtactgcggcgacagatgccaatagggcccgtgccgctcggtctgtggcggc

SEQ ID NO: 18842 - DNA, 450 bp, Zea mays
  Clone ID: LIB3151-037-Q1-K1-G1
caactagcaacatagaaagcacaatagtgtaccaacaatggcagctaaaatattttgcctccttatgctccttggtctttctgcaagtgctgctacggcgaccattttcccacaatgctcacaagctcctatagcttcccttcttcccccgtacctctcaccaacggtgtcttcggtatgtgaaaacccaattcttcaaccctacaggatccaacaggcaatcgcagctggcatcttacctttatcacccttgttcctccaccattaataagccttattacagcagttaccttgggggcattaattggcccaaaaaataagggcccaccacttccaacaactggggttagcaaacttggttgcttattttaacaacaacaagttttttcatttaacccactaactggattggactctgcttcttatttggaacaacaacaactaccattt

SEQ ID NO: 18843 - DNA, 395 bp, Zea mays
  Clone ID: LIB3151-037-Q1-K1-G12
caacaagcatcatataatgtggaatacagtttcaacaatttatcaacaatggcggccaaggaggttgggcatccttatgctccttgctctttctccatgtgttgctaacgcaaccatttttcctcaatactcacaagctcctatagctgcccttctttctccatacctttcattaatgaccacttcagtatgttaaaacccatcccttctaccctacatgctcctacaagcaatggcaacaagcaactaacctttatcacccctgttttttcaacaattgtcagccctttatttggtgcagtcatcggctcaaaccatcacggcacaaacagctgcatatactcgttctaccattgaatagccaattatcttttggcaaacctttttccctactc

SEQ ID NO: 18844 - DNA, 335 bp, Zea mays
  unsure at all n locations
  Clone ID: LIB3151-037-Q1-K1-G2
gcaacatagaaagcacaatagtgtaccaacaatggcagccaaaatattttgcctccttatgctccttggtatttctgcaagtgctgctacggcgaccattttcccgcaatgctcacaagctcctatagcttcccttcttcccccgtacctctcaccagcggtgtcttcggtatgtgaaaacccaattcttcaaccctacaggatccaacaggcaatcgcagctggcatcttacctttatcacccttgttcctccaacaatcatcagccctattacagcagttacctttggtgcatttattggcacanaacatcagggcacaacaactacaacaac

SEQ ID NO: 18845 - DNA, 105 bp, Zea mays
  Clone ID: LIB3151-037-Q1-K1-G4
gtcatacttagtcattgaactacaggaaaatgtgcacgtgggtgcagagcacacattcggggcagagctcatcatcgggcgatctcgcggagggacgtgaagcca

SEQ ID NO: 18846 - DNA, 296 bp, Zea mays
  Clone ID: LIB3151-037-Q1-K1-G5
cccgcccgctcgacgtgatcccaccggcagccatggatccatacaagcaccgcccgtctagtgggagcaactccagcttctggaccaccaactccggcgcccccgtctggaacaacaactctgccctcaccgtcggacagcgaggtccaatcctccttgaggattatcatctaatcgaaaagcttgctcagttcgacagagaacgtatccctgaacgtgttgtgcatgcacggggagccagtgccaagggtttctttgaagtcactcatgatgtctctcaccttacatgtgctgga

SEQ ID NO: 18847 - DNA, 445 bp, Zea mays
  unsure at all n locations
  Clone ID: LIB3151-037-Q1-K1-G7
gcaacatagaaagcacaatagtgtaccaacaatggcagccaaaatattttgcctccttatgctccttggtctttctgcaagtgctgctacggcgaccattttcccgcaatgctcgcaagctcctatagcttcccttcttcccccgtacctctcaccagcggtgtcttcggtatgtgaaaacccaattcttcaaccctacaggatccaacaggcaatcgcagctggcatcttacctttatcacccttgttcctccaacaatcatcagccctattacaacagttacctttggtgcatttattggcacanaacatcagggcacaacaactacaacaacttgtgctagcaaaccttgctgcctactctcaacaacagcaggttctttcattcaaccaactaagttcattgaactctgcttcttatttgcaacaacaacaactaccattc

SEQ ID NO: 18848 - DNA, 184 bp, Zea mays
  Clone ID: LIB3151-037-Q1-K1-G8
ccgggacgacgccacgccgtccgcttactcctctgagcgcgtatgacactaccgcaccgcaccgaccggacgaatagacgccgactgcggggcgtgataacccccacccaccaaccaacgcgactaacgtctctctctctctcaatctccaagcgagcgcgggcggcgcgcggttgcagcatgg

SEQ ID NO: 18849 - DNA, 453 bp, Zea mays
  Clone ID: LIB3151-037-Q1-K1-G9
caaaacatcagggcacaacaactacaacaacttgtgctagcaaaccttgctgcctactctgagcaacagcagtttcttccattcaaccaactagctgcattgaactctgcttcttatttgcaacaacaacaactaccattcagccagctacctgctgcctacccccagcaatttcttccattcaaccaactggcagcattgaactctcctgcttatttacagcagcaacaactactaccattcagccagctagctggtgtgagccctgctaccttcttgatacaaccacagttgttgccgttctaccagcacgctgcgcctaacgctggcaccctcttacaactgcaacaattgctgccattcaaccaacttgctttgacaaacccagcagcgttctaccaacaacccatcattgggggtgccctcttttagatttcttatgagttatagttc

SEQ ID NO: 18850 - DNA, 294 bp, Zea mays
  Clone ID: LIB3151-037-Q1-K1-H1
ggagtgagtcgagatccattcccaactgcacctgcgcgcctcgactggtagcccgaaccctagctagcaggtcggaggcgagagagcagccatggcgcggtgcctcgcgctcgtctccctccttctcctcggcctcgcctccgccgcctccgctgccgatgcgccctttgtcgtcgcgcacaagaaggtttcgctctcccgccccaagccgggcgtcgagcgcgtcgccgtctccctcgacctctacaaccagggatccgcgactgcctatgatgtgtcacttaatgacgactc

SEQ ID NO: 18851 - DNA, 279 bp, Zea mays
  Clone ID: LIB3151-037-Q1-K1-H2
agcgctctcactagcctcgcattccgtccctgcagtgcaggggcaggccggtgaggtctgggagaggaggaggaggaggagatggccggtagggagagcggcgggatggcggcggcgctgcgctgcgctggaaggatcgggatcctggccaccgtcgcagtgaacctcgcgtggatcgcgacgtacatccgccggcgctacttcggcggcgggaaccgatccgacaacaacggtggcggcggggaggtggagccgtcaagagggaagccgccggtcact

SEQ ID NO: 18852 - DNA, 416 bp, Zea mays
  Clone ID: LIB3151-037-Q1-K1-H3
gctgcctacttgcaacagctgcttccattcaaccaactgactatgtcgaactctgctgcgtacctacaacagcgacaacagttacttaatccactagcagtggctaacccattggtcgctgccttcctacagcagcaacaattgctgccatacaaccagttctctttgataaaccctgtcttgtcgaggcagcaacccatcgttggaggtgccatcttttagattacatatgagatgtactcgataatggtgccctcattccggcatgtgtttcctaaaaaaaatcatatattggatggaaattatttcaatatatttttgggcaaaaaaaaaggaaagggaaaaaaaaaaaaaacatttttttttaaaaatggaaaaaaaaaaataaaccaacttccccgggggagggggcaaaa

SEQ ID NO: 18853 - DNA, 319 bp, Zea mays
  Clone ID: LIB3151-037-Q1-K1-H4
gagcattcagaaacacaccaagcgaagcgcactagcaacaacctaacaacaatggctaccaagatattatccctccttgcgcttcttgcgctttttgcgagcgcaacaaatgcgtccattattccacaatgctcacttgctcctagttccattattccacagttcctcccaccagttacttcaatggccttcgaacacccagctgtgcaagcctataggctacaacaagcgattgcggcgagcgtcttacaacaaccaattgcccaattgcaacaacaatccttggcacatctaacaatacaaaccatcgcaacgcaac

SEQ ID NO: 18854 - DNA, 447 bp, Zea mays
  Clone ID: LIB3151-037-Q1-K1-H6
agcaacatagaaagcacaatagtgtaccaacaatggcagccaaaatattttgcctccttatgctccttggtctttctgcaagtgctgctacggcgaccattttcccacaatgctcacaagctcctatagcttcccttcttcccccgtacctctcaccagcggtgtcttcggtatgtgaaaacccaattcttcaaccctataggatccaacaggcaatcgcagctggcatcttacctttatcacccttgttcctccaacaatcatcagccctattacagcagttacctttggtgcatttattggcacaaaacatcagggcacaacaactacaacaacttgtgctagcaaaccttgctgcctactctcagcaacaacagtttcttccattcaaccaactagctgcattgaactctgcttcttatttgcaacaacaacaactaccattca

SEQ ID NO: 18855 - DNA, 438 bp, Zea mays
  Clone ID: LIB3151-037-Q1-K1-H7
agcagcttctgcttgctctggggggaaggagagagagagagagcgagagagagatctagtagagaggctagtaggtggtcctcgaacgaagatgttggcggtgttcagcgggcaggtggtggaggtgccggcggagctggtggcggcgggcagccggacgccgtcgcccaagacgaaggcgtcgcagctggtggggcgcttcctggccgcgtccgagccggccgtgtccgtgcagctcggcgaccacggccacctcgcctactcccacaccaaccaggcgctcctccgccccaggtcgttcgcggccaaagacgaaggggtcttgcttgtcgaaggggtgctggacaacctgggtcgtctgagccagcagcacgggctgtcaagcaagggcgccaacgaagtgctcctcgtcatcgaggcctacaagacgctgcgcga

SEQ ID NO: 18856 - DNA, 233 bp, Zea mays
  Clone ID: LIB3151-037-Q1-K1-H8
aaaacggcagtgcgtagagaggatcgtcgaacataacagcatgaagatggtcatcggtctcgtcccgtgcctggctttgtcagctgccaacccctctgcaatgcagatgccctgcccctgcgcggggctgcagggcttgtacggcgctggcgccagcctgactacgatgatgggcgacggcgggctgtacccctacgcggagtacctgatgcacccgcacggcagcccgctgg

SEQ ID NO: 18857 - DNA, 478 bp, Zea mays
  Clone ID: LIB3151-038-Q1-K1-A1
attgagaccaacaagcaacatagaaagtggaatacagtagcaacaatagagcaacaatggcggccaagatattttccatccttatgctccttgctctttctgcatgtgttgctaacgcgaccatttttcctcaatactcacaagctcctatagctgcccttcttcccccataccttccatcaatgaccgcttcagtatgtgaaaacccagcccttcaaccctacaggctccaacaagcaatcgcaacaagcaacttacctttatcacccctgttctttcaacaatcgccagccctatctttggtgcagtcattggtacaaaccatcagggcacaacagctgcagcaactcgtgctaccagtgatcagccaagtagctctggcaaacctttctccctactctcagcaacaacaatttcttccattcaaccaactgtctacactgaaccctgctgcttatttgcagcaacaacaactact

SEQ ID NO: 18858 - DNA, 285 bp, Zea mays
  Clone ID: LIB3151-038-Q1-K1-A10
cgtcagcctagcaattagctcatcgactccagattggagaactcgacaccatgaaggtgctgatcgttgcccttgctctcctggcgctcgctgcgagcgccgcctccagtacaagcggcggctgtggctgccagacaccaccgtttcatctaccgcctccgttctatatgccgcctccgttctatctgccgccgcagcagcagccgcagccatggcaataccccactcaaccaccgcagctaagcccgtgccagcagtttcggatcctgcggcgtctgcagcgtc

SEQ ID NO: 18859 - DNA, 418 bp, Zea mays
  Clone ID: LIB3151-038-Q1-K1-A11
cagaccctccccggcaaccgcgtccggccgtccgcttccctttccttggataaccacggcacccgcccgcccgcccgccggcaagcgaaagcgaagcgagcaaacccagccatggagaaggcgatcgatcggcagcgggtcctcctggcgcacctcctcccctccccctccgccgcctcctcgcagcctcagcttgcggcgtcggcgtgcgcggccggggacagcgccgcctaccagaggtcctcctccttcggggacgatgtcgtcgtcgtcgctgcctacaggacgccgatatgcaaggccaagcgaggaggcttcaaggacacctacccagaggacctcctcactgttgttctcaaggctgttctggacaacactagaatcaatccagctgacatcggtgacatcgtcgttggga

SEQ ID NO: 18860 - DNA, 420 bp, Zea mays
  Clone ID: LIB3151-038-Q1-K1-A12
cacagttcctcccaccagttacttcaatgggcttcgaacatccagccgtgcaagcctacaggctacaactagcgcttgcggcgagcgtcttacaacaaccaattgcccaattgcaacaacaatccttggcacatctaaacctacaaaccatcgcaacgcaacagcaacaacagtttctgccatcactgagccacctagccgtggtgaaccctgtcgcctacttgcaacagcagctacttgcatccaacccacttgctctggcgaacgtagctgcataccagcaacaacaacgtctgcaacagtttatgccagcgctcaatcaactagccatggtgaacccttgtcgctacctacaacaacaacaattgctttcatctaacccggtcgcttggggcaatgcacctacgtacctacaacaac

SEQ ID NO: 18861 - DNA, 347 bp, Zea mays
  Clone ID: LIB3151-038-Q1-K1-A2
gatcagcaaagcggcagtgcgtagagaggatcgtcgaacagaacagcatgaagatggtcatggttctcgtcgtgtgcctggctctgtcagctgccagcgcctctgcaatgcagatgccctgcccctgcgcggggctgcagggcttgtacggcgctggcgccggcctgacgacgatgatgggcgccggcgggctgtacccctacgcggagtacctgaggcagccgcagtgcagcccgctggcggcggcgccctactacgccgggtgtgggcagacgagcgccatgtaccagccgctccggcaacagtgctgccagcagcagatgaagatgatggacgtgcagtccgtc

SEQ ID NO: 18862 - DNA, 467 bp, Zea mays
  Clone ID: LIB3151-038-Q1-K1-A3
cataaacacaccaagcgaagcgcactagcatcgacctaacaacaatggctaccaagatatgagccctccttgcgcttcttgccctttttgtgagcgcaacaaatgcgttcattattccacaatgctcacttgctcctagtgccattattccacagttcctcccaccagttacttcaatgggcttcgaacacctagctgtgcaagccaacatgcatcaacaagcgcttgcggcgagcgtcttacaacaaccaattgcccaattgcaacaacaatccttgccacatctaacaatacatgccatcacaacgcaacagcaacaacagttcctaccagcactgagccacctatccatggtgaaccctgccgcctacttgcaagagcagctgcttgcatccaacccacttgctctggcgaacgtagttgcaaaccagcaacaacaacagctacaacagtttctgccaacgctc

SEQ ID NO: 18863 - DNA, 386 bp, Zea mays
  Clone ID: LIB3151-038-Q1-K1-A4
aatattttgagcattcataaacacaccaagcgaagcgcactaccaacaacctatcaacaatggagaccattatattatgcgtgcttgcgcttcttgcgctttttgcgagcacaacaaatgcgtccattattgcacaatgctcacttgctcctagttccattattccacagttcctcccaccagttacttcaatggccttcaaacacccatctgtgcaagcctataagctacaacaagcgattgcagatagcgtcttacaacaaccaattgcccaattgcaacaacaatccttggcacatctaacaatacaaaccatagcaacgcaacagcaacaacagttcctaccagcactgagccacctatacatggtgaaccctgtcgcctac

SEQ ID NO: 18864 - DNA, 451 bp, Zea mays
  Clone ID: LIB3151-038-Q1-K1-A5
gagaccatctagcaacatagaaagcacattagtgtaccaacaatggcagccaaaatattgagcctccttatgctccttggtctttctgcaagtgctgctactgcgaccattttcccgaaatgctcgcaagctcctatagcttcccttcttaccccgtacctctcaccagcagtgtcttcggtatgtgaaaacccaattcttcaaccctacaagatccaacaggcaatcacagctggcatcttacctttatcacccttgttcctccaacaatcatcagccctattacatcagttacctttggtgcattcattggcacaaatcatcttggcacaacaactacaacaacttgtgctagcaaaccttgctgcctactctcagcaacagcagtttcttccattcaaccaactagctgcattgaactctgcttcttatttgcaacagcaacaactac

SEQ ID NO: 18865 - DNA, 388 bp, Zea mays
  Clone ID: LIB3151-038-Q1-K1-A6
gcaacatacaaagcacattagtgtaccaacaatggcacccaaaatattttgcctccttagaggcctttgtatttctgcaagtgctgctacagcgaccattttcccgcaatgctcacaagctcctatagcttcccttcttcccccgtacctctcaccagcggtgtcttcggtatgtgaaaacccaattcttcaaccctacaagatccaacaagcaatcacatctgacatcttacctttatcacccttgttcctccaacaatcatcagccctattacagcagttacctttgatgcatctattggcacataacatcagggcacaacaactacaacaacttgtgctagcaaaccttgctgcctactctcagcaacagcagtttctttcattc

SEQ ID NO: 18866 - DNA, 456 bp, Zea mays
  Clone ID: LIB3151-038-Q1-K1-A8
ctgggtcttcagaccattagctttatctactccagagcgcagaagaacccgatcgacagcgggagggtgttgctcggtgccctcgctctcctggctctcgctgcgagcgccacctccacgcatacaagcggcggctgcggctgccagccaccgccgccggttcatctaccgccgccggtgcatctgccacctccggttcacctgccacctccggtgcatctcccaccgccggtccacctgccgccgccggtccacctgccaccgccggtccatgtgccgccgccggttcatctgccgccgccaccatgccactaccctactcaaccgccccggcctcagcctcatccccagccacacccatgcccgtgccaacagccgcatccaagcccgtgccagcttgcaggaacctgcggcgttggcagcaccccgatcctgagccaatgcgtcgagttcctg

SEQ ID NO: 18867 - DNA, 233 bp, Zea mays
  unsure at all n locations
  Clone ID: LIB3151-038-Q1-K1-A9
cgtcagcctagcaattagctcatcgactccagattggagaactcgacaccatgaaagtgctgatcgttgcccttgctctcctggcgctcgctgcgagcgccgncttcagtacaagcggcggctgtggctgccaaacaccaccgtttaatctaccgcctccgttctatatgccgcctccgttctatctgccgccgaagcagcagccgcagccatggaattccccaattaaacac

SEQ ID NO: 18868 - DNA, 462 bp, Zea mays
  Clone ID: LIB3151-038-Q1-K1-B1
tgagcattcagaaacacaccaagcgaagcacattagcaacaacctaacaacaatggctacgaagatattatccctccttgcgcttcttgcgctttttgcgagcgcaacaaatgcgttcattattccacaatgctcacttgctccaagttccattattacacagttcctcccaccagttacttcaatgggcttcgaacacccagctgtgcaagcctataggctacaacaagcaattgcggcgagcgtcttacaacaaccaatttcccagttgcaacaacaatccttggcacatctaacaatacaaaccatcgcaacgcaacagcaacaacaattcctaccagcactgagccacctagccatggtgaaccctgccgcctacttgcaacagcagttgcttgcatcaaacccacttgctctggcaaacgtagttgcaaaccagccacaacaacagctgcaacagtt

SEQ ID NO: 18869 - DNA, 287 bp, Zea mays
  Clone ID: LIB3151-038-Q1-K1-B10
atttttccaactatcatcatataaagcacattagtgtaccaacaatggcagccaaaatagtttgcctccttatgctcgtaggtatttctgcaagtgctgctacagcgaccattttcccgcaatgctcacaagctcctatagcttcccttcttcccccgtacctctcaccagcggtgtcttcggtatgtgaaaacccaattcttcaaccctacaagatccaacatgcaatcgcagctgacattcttacctttatcaccctttttccttcaacaatcattagccctatt

SEQ ID NO: 18870 - DNA, 421 bp, Zea mays
  Clone ID: LIB3151-038-Q1-K1-B11
ttgtttaccattcctccccaaaacacatcctgcgatcctcgaagcctccgccgagcatcgatcatgtctgcctactgcggcaagtacgcggatgagctcatcaagaatgctgcctacatcggcacccctggcaagggtatccttgctgctgatgagtcaactggcaccattggcaagcgcctttccagcatcaatgtcgagaacgtggaggagaaccggcgggctctccgtgagctcctgttctgctgccctggtgccctccagtacatcagcggtgtgatcctcttcgaggagaccctctaccagaagaccaaggatggcaagccttttgtcgatgtcctcaaggagggaggcgtcctccctggcatcaaggtcgacaagggcaccattgaagttagtggcaccgacaaggagaccacca

SEQ ID NO: 18871 - DNA, 366 bp, Zea mays
  Clone ID: LIB3151-038-Q1-K1-B12
gaaacacaccaagcgaagcgcactagcaacaacctaacaacaatggctaccaagatattagccctccttgcgcttcttgcgctttttgcgagcgcaacaaatgcgtccattattccacaatgctcacttgctcctagttccattattccacagttcctcccaccagttacttcaatggccttcgaacacccagctgtgcaagcctataggctacaacaagcgattgcggcgagcgtcttacaacaaccaattgcccaattgcaacaacaatccttggcacatctaacaatacaaaccatcgcaacgcaacagcaacaacagttcctaccagcactgaaccaccttaccatggtgaaccctgtcgcc

SEQ ID NO: 18872 - DNA, 367 bp, Zea mays
  unsure at all n locations
  Clone ID: LIB3151-038-Q1-K1-B2
gtcttcgtactcgcctacctccgcggctcaaacctttcccccttctcccaattcccgccggcggtccatcccgtaacgcgacaccatgagggagtgcatttcgatccacatcggccaggccggtatccaggtcggaaacgcgtgctgggagctgtactgccttgagcatggcattcaggctgacggtcagatgcccggtgacaagaccattgggggaggtgatgatgctttcaacaccttcttcagtgagactggtgctgggaagcacgtgccccgtgctgtttttgttgaccttgaacccactgtcatcgatgaggtgagaactggcacctaccgccagctcttncaccctgagcagctcatcagt

SEQ ID NO: 18873 - DNA, 447 bp, Zea mays
  Clone ID: LIB3151-038-Q1-K1-B4
tagcaacatataaagcacaatattgtaccaacaatggcagccaaaatattttgcctccttaggctccttggtatttctgcaagtgctgctacggcgaccattttcccgcaatgctcacaagctcctatagcttcccttcttcccccgtacctctcaccagcggagtcttcggtatgtgaaaacccaattcttcaaccctacaggatccaacaggcaatcgcagctggcatcttacctttatcacccttgttcctccaacaatcatcagccctattacagcagttacctttggtgcatttattggcacaaaacatcagggcacaacaactacaacaacttgtgctagcaaaccttgctgcctactctcagcaacagcagtttctttcattcaaccaactagctgcattgaactctgcttcttatttgcaacaacaacaactaccattc

SEQ ID NO: 18874 - DNA, 342 bp, Zea mays
  Clone ID: LIB3151-038-Q1-K1-B5
aggactcgtgggtgggtcttcagaccattatctttatctactccacagcgcagaataaggggatctacaccatgagggggctgctcgccgccctcgctatccagactctcgctgcgatcaccacctacacgcatacaagcggcagctgcagttgtcaaccaccgccgccagttcatataccaacggcggtgcatctgccacctgcggttcacctgccacctccggagcatattccagcgacggtcctactaccaccgactgtccacctgccaccaccagtccatgtgccatcaacaattcatatgacggcgacaccatgacaataccctactcaaccgaccc

SEQ ID NO: 18875 - DNA, 359 bp, Zea mays
  Clone ID: LIB3151-038-Q1-K1-B6
cagccacacccatgcccgtgccaacagccgcatccaagcccgtgccagctgcagggaaccgggggcgttggcagcaccgcgatcctgggccagtgcgtcgagttcctgaggcatcagtgcagcccgacggcgacgccctactgctcgcctcagtgccagtcgttgcggcagcagtgttgccagcagctcaggcaggtggagccgcagcaccggtaccaggcgatcttcggcttggtcctacagtccatgctgcagcagcagccgcaaagcggccaggtcgcggtgctgttggcggctcagatagcgcaacaactgacggcgatgtgcggcctgcagcatgcgactccatgcccctacgc

SEQ ID NO: 18876 - DNA, 394 bp, Zea mays
  Clone ID: LIB3151-038-Q1-K1-B8
tcataacttcccccccactaggctatataacctattttctttgattcctaacctttctacttcagaagaactttttaataaaacagcaaaccttcacttctccatctactttcccaattccactccctattcttcaaccccctctcaattatctcataaaaacaacttattcttaccttatacatatcaccttattataccaattatttgcttcctcaatttacattccaacctctaatccactttcaacttttttaccttgaatcattatcaattttaaccaatccattacatttttactttacactaacatcaagatcaaaactctaatatccctatattcattttctactattttcttatcatcctaacatttataaaatttcacttcctt

SEQ ID NO: 18877 - DNA, 343 bp, Zea mays
  Clone ID: LIB3151-038-Q1-K1-B9
gcagcattgaactctcctgctgccagttggttgaatggaagaaattgctgggggtaggcggcaggtatctggctgaatggtagttgttgttgttgcaaataagaagcagagttcaatgcagctagttggttgaatggaagaaactgctgttgctgagagtaggcagcaaggtttgctagcacaagttgttgtatttgttgtgccctgatgttttgtgccaataaatgcaccataggttactgctgttatagggctgatgattgttggaggaacatgggtgattaatgtaagattccagctgcattgaactgtgcttcttatttgcatactcatcatctaccat

SEQ ID NO: 18878 - DNA, 466 bp, Zea mays
  Clone ID: LIB3151-038-Q1-K1-C1
cggacgcgtgggtttgagcattcagaaacacaccaagcgaagcgcactagcaacaacctaacaacaatggctaccaagatattatccctccttgcgcttcttgcgctttttgcgagcgcaacaaatgcgtccattattccacaatgctcacttgctcctagttccattattccacagttcctcccaccagttacttcaatggccttcgaacacccagctgtgcaagcctataagctacaacaagcgattgcggcgagcgtcttacaacaaccaattgcccaattgcaacaacaatccttggcacatctaacaatacaaaccatcgcaacgcaacagcaacaacagttcctaccagcactgagccacctagccatggtgaaccctgtcgcctacttgcaacagcagctgcttgcatccaacccacttgctctagcaaacgtagttgcaaaccagcaacaacaacaac

SEQ ID NO: 18879 - DNA, 316 bp, Zea mays
  Clone ID: LIB3151-038-Q1-K1-C12
gtgtcttcagaccattagctttatctactccagagcgcagaagaacccgatcgacaccgagagggtgttgctcgttgccctcgctctcctggctctcgctgcgagcgccacctccacgcatacaagcggcggctgcggctgccagccaccgccgccggttcatctaccgccgccggtgcatctgccacctccggttcacctgccacctccggtgcatctcccaccgccggtccacctgccgccgccggtccacctgccaccgtcggtccatgtgccgccgccggttcatctgtcatcgtcaccatgccactaccct

SEQ ID NO: 18880 - DNA, 424 bp, Zea mays
  Clone ID: LIB3151-038-Q1-K1-C2
cctagcctccccctgcccggctgtcctcctcgatttcgcaagctcctggttacggcggcatgggatcgttccgccgcaagggccgcatcgtctctctcgcgacgctgccccagaccgccgagataatggctggccaccgaaacagtcatggaaagcgccagtctgattttactgaaaatggaggcagtaagagaagaaatcctggcgatgatacatatgcacctggtcctgatgacactgtgtatcgctacctctgtgcctctagaaaaattgggagtatcattggcaggggtggagaaattgcaaagcagttgaggactgagacccaagctaagatcaggattggcgagagtgtccctggatgtgatgagcgagttgttaccatatttagcacaagcaggaaaactaataccatcgatggtgc

SEQ ID NO: 18881 - DNA, 478 bp, Zea mays
  Clone ID: LIB3151-038-Q1-K1-C3
cagccactgaagtcgaatcccctcacactataaagctcctccattgcgccgccgccactcggctttcggaggaggcggaccaggtaagcagcagcaggaaccctagcaccgccgcatccgcagccatgggtatcgacctcgttgccggtgggaggaacaagaagaccaagcgcacagcgccgaagtccgacgatgtttatctcaagctccttgtcaagctctaccgtttcttggtcaggaggaccaagagcaacttcaatgctgtcattctcaagaggctcttcatgagcaaaaccaatcgcccaccaatctccatgcgccgccttgtcaagttcatggaaggaaaggagaagaacattgctgtgattgttggcacagtcacagatgacaagaggatccaagaggttccagcaatgaaggttactggcctgaggttcaccgagacggcaagggccaggattgtcaatgctggtgggga

SEQ ID NO: 18882 - DNA, 402 bp, Zea mays
  Clone ID: LIB3151-038-Q1-K1-C4
attgagaccaactagcaacatagaaagcacaatagtgtaccaacaatggcagccaaaatatggtgcttccttatgctccttggtctttctgcaagtgttgctaccgcaaccattttcccacaatgctcacaagctcctatagcttcccttcttcccccatacctctcaccagcggtgtcttcaatgtgtgaaaacccaattgttcaaccctacaggatccaacaggcaatcgcaacaggcatcttaccattatcacccttgttcctccaacaaccgtcagccctattacagcagttacctttggtccatttggtggcacaaaacatcaaggcacaacaactacaacaacttgtgctagcaaaccttgctgcatactctcagcaacatcagtttcttccattc

SEQ ID NO: 18883 - DNA, 330 bp, Zea mays
  Clone ID: LIB3151-038-Q1-K1-C5
aaagaattaaaaccaaaactttattatgatgcatatattattggtcataccacacatgatgatgtgtgtcgtcttactgcattattacatatatagatagagagggatggatagaggagatttcccaaatatcatgaatcagcagcctgtacgagccagctctgatgcagcagcagcagcagctgctggcatcccaaggtctcaaccccatggccatgatgatggcgcagaacatgccggccatgggtggactctaccagtaccagtaccaaatgcccagttactgcaccaacccttgtggcgtcttacgctatcattccgccctactac

SEQ ID NO: 18884 - DNA, 183 bp, Zea mays
  unsure at all n locations
  Clone ID: LIB3151-038-Q1-K1-C7
ccccttctccntcccccactcccccacattccccaccatctccttttacctcccttccccccccttaccccctatcacctttctctcactgcctttatcccccaatttttatatccatctccatcccacactctaccgcttctttttccttaccacccataacctctttcctcctaccatttt

SEQ ID NO: 18885 - DNA, 201 bp, Zea mays
  Clone ID: LIB3151-038-Q1-K1-C8
ttttcttccccatccctttttccaccattctctccatcccctatttctttccttttttccccattcctttcaccattcgtgtcttcaattttttaaaaccccattttttaacccttccatattcctccatcaatctctacacacctttttccatttttacccttttttcctccacaacccctattcctatttcaccctttt

SEQ ID NO: 18886 - DNA, 431 bp, Zea mays
  Clone ID: LIB3151-038-Q1-K1-C9
ctcgctcactgactgactactgtaataccagagatcgaacaacttggtcctgcagctcaggaggagagttttgtgcatttgggggccgggggcaagagagagagagagagagccatggcggcggaccagcagccgcagctgcaggaggagatgaacgacgccggttcatctgccgccgccaccatgccactaccctactcaaccgccccggcctcagcctcatccccagccacacccatgcccgtgccaacagccgcatccaagcccgtgccagctgcagggaacctgcggcgttggcagcaccccgatcctgggccagtgcgtcgagtttctgaagcatcattgcagcccgacggcgacgccctactgctcgcctcattgccagtcgttgcggcagcagtgttgccagcagctcatgcaggtggagccgc

SEQ ID NO: 18887 - DNA, 457 bp, Zea mays
  Clone ID: LIB3151-038-Q1-K1-D1
attttcagcattcagaaacacaccaagcgaagcgcactagcaacaacctaacaacaatggctgaccaagatattagccctccttgcgcttcttgcccttttagtgagcgcaacaaatgcgttcattattccacagtgctcacttgctcctagtgccattattccacagttcctcccaccagttacttcaatgggcttcgaacatccagccgtgcaagcctacaggctacaactagcgcttgcggcgagcgtcttacaacaaccaattgcccaattgcaacaacaatccttggcacatctaaacctacaaaccatcgcaacgcaacagcaacaacagtttctgccatcactgagccacctagccgtggtgaaccctgtcgcctacttgcaacagcagctacttgcatccaacccacttgctctggcgaacgtagctgcataccagcaacaacaacgtc

SEQ ID NO: 18888 - DNA, 417 bp, Zea mays
  Clone ID: LIB3151-038-Q1-K1-D11
gaccattagctttatctactccagagcgcagaagaacccgatcgacaccatgagggtgggggtcgttgccctcgctctcctggctctcgctgcgagcgccacctccacgcatacaagcggcggctgcggctgccagccaccgccgccggttcatctaccgccgccggtgcatctgccacctccggttcacctgccacctccggtgcatctcccaccgccggtccacctgccgccgccggtccacctgccaccgccggtccatgtgccgccgccggttcatctgccgccgccaccatgccactaccctactcaaccgccccggcctcagcctcatccccagccacacccatgcccgtgccaacaagccgattcaagcccgtgccagctgcagggaacctgcggcggtggcagcacccc

SEQ ID NO: 18889 - DNA, 313 bp, Zea mays
  Clone ID: LIB3151-038-Q1-K1-D12
gcgaagcgcactatcaacgacctaacaacattggctaccaagatattagccctccttgcagtgctttccctttttgtgagcgcaacaaatgcgttcattattccacaatgctcacttgctcctagtgccattattccacagttcctcccaccagttacttcaatgggcttcgaacacctagctgtgcaagccaacatgcaacaacaagcgcttgcggcgagcgtcttacaacatccaattgcccaattgcaacaacattccttgccacatctaacaatacaagccatcacaactcaacagcaacaacagtttc

SEQ ID NO: 18890 - DNA, 290 bp, Zea mays
  Clone ID: LIB3151-038-Q1-K1-D2
acgattttaaatcctaacaaacacaccaatctcttttctctaccaacaatctcacatccaatagtgagattttttatactcggggaacacccatcccattttcctaatcactacaatctccaccatcatcaccaaaaaccattaatatccctttccccaaaaacacatttccctcaagattttccacgactcaaaaccctattatctcaaccccacactattccattttacacaaaaaactcccatttaccattataaacccttcttctctcaattctgaatcctttttc

SEQ ID NO: 18891 - DNA, 278 bp, Zea mays
  Clone ID: LIB3151-038-Q1-K1-D3
gcaacatataaagcacaatagtgtaccaacaatggcagccaaaatattttgcctccttatagcgtccttggtctttctgcaagtgctgctacggcgaccattttcccacaatgctcacaagctcctatagcttcccttcttcccccgtacctctcaccagcggtgtcttcggtatgtgaaaacccaattcttcaaccctataggatccaacaggcaatcgcagctggcatcttacctttatcacccttgttcctccaacaatcatcagccctattaca

SEQ ID NO: 18892 - DNA, 305 bp, Zea mays
  Clone ID: LIB3151-038-Q1-K1-D4
attagctttatctactccagagcgcagaagaacccgatcgacaccatgagggtgttgctcgttgccctcgctctcctggctctcgctgcgagcgccacctccacgcatacaagcggcggctgcggctgccagccaccgccgccggttcatctaccgccgccggtgcatctgccacctccggttcacctgccacctccggtgcatctcccaccgccggtccacctgccgccgccggtccacctgccaccgccggtccatgtgccgccgccggttcatctgccgccgccaccatgccactaccctac

SEQ ID NO: 18893 - DNA, 415 bp, Zea mays
  Clone ID: LIB3151-038-Q1-K1-D5
gttggcttctcctccccctccggttcgggttcgggttcgtgaggttctccggggttcggggtcgtgggtgagcggatcgagatggcggcgtcggatgttgagtaccgctgcttcgtcggcggcctcgcctgggccacggacgaccactccctccacaacgccttcagcacctacggcgaggtcctcgagtccaagatcatcctcgatcgggagacgcagaggtcccgcggcttcggcttcgtcaccttctccacggaggaggcgatgcggaacgccatcgagggcatgaacggcaaggagctggacggccgcaacatcaccgtcaacgaggcccagtcccgcggcggccgtggaggcggcggcggcggcgggtacagtggtggccgtggaggcggcggctactgcggtggcgggc

SEQ ID NO: 18894 - DNA, 464 bp, Zea mays
  Clone ID: LIB3151-038-Q1-K1-D6
attttcagcattcagaaacacaccaagcgaagcgcactagcaacaacctaacaacaatggggaccaagatattagccctgcttgcgcttcttgcccttttagtgagcgcaacaaatgcgttcattattccacagtgctcacttgctcctagtgccattattccacagttcctcccaccagttacttcaatgggcttcgaacatccagccgtgcaagcctacaggctacaactagcgcttgcggcgagcgtcttacaacaaccaattgcccaattgcaacaacaatccttggcacatctaaacctacaaaccatcgcaacgcaacagcaacaacagtttctgccatcactgagccacctagccgtggtgaaccctgtcgcctacttgcaacagcagctacttgcatccaacccacttgctctagcgaacgtagctgcataccagcaacaacaacgtctgcaacaa

SEQ ID NO: 18895 - DNA, 274 bp, Zea mays
  Clone ID: LIB3151-038-Q1-K1-D8
gccagctagctgcagcaagccgtgcttccttcttgacacagcaacagttgctgcctttgtggcagcagtttgcggctaaccccgcaaccctcttacaactacaacaattgttgccctttgtccaacttgctttgacaaacccagcagcctcctaccaacaacacatcattggtggtgccctcttttagattgcttattagttgtaattcaataataaagttttttggatgatgtatgtggccaaccagaaataagaagttacatttccagattc

SEQ ID NO: 18896 - DNA, 418 bp, Zea mays
  Clone ID: LIB3151-038-Q1-K1-D9
attgagaccaactagcaacatagaaagcacaatagtgtaccaacaatggcagccaaaataagttgcttccttatgctccttggtctttctgcaagtgttgctaccgcaaccattttcccacaatgctcacaagctcctatagcttcccttcttcccccatacctctcaccagcggtgtcttcaatgtgtgaaaacccaattgttcaaccctacaggatccaacaggcaatcgcaacaggcatcttaccattatcacccttgttcctccaacaaccgtcagccctattacagcagttacctttggtccatttggtggcacaaaacatcaaggcacaacaactacaacaacttgtgctatcaaacctagctgcatactctcagcaacatcaatttcttccattcaaccaactggctgcat

SEQ ID NO: 18897 - DNA, 434 bp, Zea mays
  Clone ID: LIB3151-038-Q1-K1-E1
cttgcaagtatagtctcggcggctctagaagacgatgggcaaggacgacgtgatcgagagcggcgctggcggcggcgagttcgctgccaaggactacacggaccctcccccggcgccgctgatcgacgcggctgagctggggtcctggtcgctgtaccgcgccgtgatcgccgagttcatcgccacgctgctgttcctgtacatcacggtggccaccgtgatcgggtacaagcaccagacggacgcgtcggcgtcgggtgccgacgcggcgtgcggcggcgtgggggtgctgggcatcgcctgagccttcggcggcatgatcttcgtcctcgtctactgcaccgccggcatctcggggggccacatcaaccccgccgtcaccttcggcctcttcctggcgcgcaaggtctccctggtgcgcgcgctgctctaca

SEQ ID NO: 18898 - DNA, 449 bp, Zea mays
  Clone ID: LIB3151-038-Q1-K1-E10
caactagcaacatagaaagcacaatagtgtaccaacaatggcagccaaaatattttgcttagcttatgctccttggtctttctgcaagtgttgctaccgcaaccattttcccacaatgctcacaagctcctatagcttcccttcttcccccatacctctcaccagcggtgtcttcaatgtgtgaaaacccaattgttcaaccctacaggatccaacaggcaatcgcaacaggcatcttaccattatcacccttgttcctccaacaaccgtcagccctattacagcagttacctttggtccatttggtggcacaaaacatcagggcacaacaactacaacaacttgtgctagcaaaccttgctgcatactctcaacaacatcagtttcttccattcaaccaactggctgcattgaactctgctgcttatttgcaacaacaattaccattc

SEQ ID NO: 18899 - DNA, 454 bp, Zea mays
  Clone ID: LIB3151-038-Q1-K1-E11
ccgcagtgcagcccgctggcggcggcgccctactacgccgggtgtgggcagacgagcgccatgtaccagccgctccggcaacagtgctgccagcagcagatgaggatgatggacgtgcagtccgtcgcgcagcagctgcagatgatgatgcagcttgagcgtgccgctgccgccagcagcagcctgtacgagccagctctgatgcagcagcagcagcagctgctggcagcccagggtctcaaccccatggccatgatgatggcgcagaacatgccggccatgggtggactctaccagtaccagtaccagctgcccagctaccgcaccaacccctgtggcgtctccgctgcatttcagcctactactgattcatgatatttggggaaatcttctctatccatccctctctatctatatatggtataatggcagtagacgacacacattatcatgt

SEQ ID NO: 18900 - DNA, 480 bp, Zea mays
  unsure at all n locations
  Clone ID: LIB3151-038-Q1-K1-E2
acgattgagaccaacaagctacatanaaagtggaatccagtagcaacactagagcaacaatggggagcgtatattttccgtgcgttatgctccttgctctttctgcatgtgttgctaacgcgacaattttccctcaaagctcacaagctcctatagcttcccttcttcccccataccttccatcaatgatagcttcagtatgtgaaaacccagctcttcaaccctataggctccaacaagcaatcgcagcaagcaacatacctttatcacccttgtttcaacaatcgccagccctatctttggtgcaggcattggtacaaaccatcttggcacagcagctgcagcaactcgtgctacctgtgatcaaccaagtagctctggcaaacctttctctctactctcagcaacaacaatttctttcattcaaccaactggctacatttgaaccgtgctgcttatttgcaacaacaactattacca

SEQ ID NO: 18901 - DNA, 336 bp, Zea mays
  Clone ID: LIB3151-038-Q1-K1-E3
ggaatccagtagcaacaatagagcaacaatggagaccaagatattttccctccttatgctccttgctctttctacatgtgttgctaacgcgacaattttccctcaatgctcacaagctcctatagcttccctttttcccccataccttccatcaattatagcttcagtatgtgaaaacccagctcttcaaccatataggcttcaacaagcaatcgcagcaagcaacatacctttatcgcccttgttgtgtcaacaatcgccagccctatctttggtgcagtcattggtacaaaccatcagggcacaacagctgcagcaactcgtgctacctgtgat

SEQ ID NO: 18902 - DNA, 405 bp, Zea mays
  Clone ID: LIB3151-038-Q1-K1-E4
ccccccgcgagctctatctttcgtggcgcagctcggcagctgggcggccgccccccgccggcgccacgccctaagctacgccaggttcccagttcttcgtccgtccttttgctaggtcttcgttggacacttaaacggcgacgagcaccgccagacgcgctggtgcctggatccggcgggagtgcttcaagttttgacggttcgtctctctcgttgtttccggcggggttatgaaggcggtgggatacagcccctacgacagcagcgcacaaaatagaggactaagagggcgatctttcagtgggaatgtcgtagcatctgctggggcatttccttacatgagggcaaataatgatctggagagtgaaatacatcgggttgagcaagatgcatatactggtattc

SEQ ID NO: 18903 - DNA, 317 bp, Zea mays
  Clone ID: LIB3151-038-Q1-K1-E6
cctcctttaccctatctttctcgccgcctgttatcttgctgcagctacgctcgctaggagagctcctacccaacgtgggctccctcccattccattcccctcccgtttcaccagtttctggcccccaccttatcacgcacaaaccactccaatttcccacctgactcatctccggttttatccactcccgcttacctcttcctcacgtacgggatttgattggtggttaatcttctccttagatgaagcacattatccgttcatcatcctaatagactaaacttagccgctcccgttcccacgctaatgctacaccc

SEQ ID NO: 18904 - DNA, 326 bp, Zea mays
  Clone ID: LIB3151-038-Q1-K1-E7
acgattgataccaactagcatcatacatagtgtagtacaatagcaacatcttaccaccaaagagagcctttattataagggtgggtaccctccctactctttctgcaagtgttgctaccgcgactattatcccactatgctcacaacaacacctaattattgagacagccgctatattaaaatacccatctacacaatcctactagctacaagtggccatcacaacaatcatcttacagccgctagcattgtctgaccaacaaccacattctctattgcaacaaccattcttaacgaatctatatctacaaagaatcgcagctcaa

SEQ ID NO: 18905 - DNA, 380 bp, Zea mays
  Clone ID: LIB3151-038-Q1-K1-E8
caactagcaacatagaaagcacaatagtgtaccaacaatggcagccaaaatattttgcttccttatgctccttggtctttctgcaagtgttgctaccgcaaccattttcccacaatgctcacaagctcctatagcttcccttcttcccccatacctctcaccagcggtgtcttcaatgtgtgaaaacccaattgttcaaccctacaggatccaacaggcaatcgcaacaggcatcttaccattatcacccttgttcctccaacaaccgtcagccctattacagcagttacctttggtccatttggtggcacaaaacatcagggcacaacaactacaacaacttgtgctagcaaaccttgctgcatactctcagcaacatc

SEQ ID NO: 18906 - DNA, 446 bp, Zea mays
  Clone ID: LIB3151-038-Q1-K1-F1
gcgagccgcgcgcattccccgtcccgtgccaccggaccaggggaaggaggacacacatgtcgtcgtctctctctccagcggcggcagccgcgcccctggatctggacggcaactccgtcgcgcccctcaccatctgcatgattggcgccggcggcttcatcggctcccacctctgcgagaagctcatggccgagacgcgccatgtcgtcctcgccgtcgacgtatactgcgataagatccgccacctcgtcgaccccgcgccgccgcacctcgcggagcgcatctccttccaccgcctcaacataagaatgactcagctcgaggcctataagatgcgactgcataactgcggtttgacgcgggatcaaccccctacacattcagactatatgctcaggcagctgtcagaagaggtatccttcctcagcatgagacatggtctccaa

SEQ ID NO: 18907 - DNA, 251 bp, Zea mays
  Clone ID: LIB3151-038-Q1-K1-F11
cggacgcgtgggtgagcggcgagggtggtgactagaccaaagatatcctcctccttgaaggggctcccctcaccctgggtatcgagaccgtcggtggagtcatgaccaagttgatcccgatgaacactgtcatcccgaccaatatgtcgcaagtgttcaccacctaccaggaccagcagaccactgtctccatccaggtctttgagggtgagcgcagtatgaccaatgactgccgtcttctcggcaagttc

SEQ ID NO: 18908 - DNA, 409 bp, Zea mays
  Clone ID: LIB3151-038-Q1-K1-F2
tccatttcggcctctgtcccttgcaagttcaatctcacctccaaccatgggtaaagagaaggcgcacatcaacattgggggtattggccatgtcgactctggcaagtcgaccaccacaggacaccttatctacaagcttggaggcattgacaagcgtgtgatcgagaggttcgagaaggaggctgctgaaatgaacaagcggtccttcaagtacgcgtgggtgctccacaagctcaaagctgagcgtgagagaggtatcaccattgatatcgctctgtggaagtttgagaccaccaagtactactgcacgggcattgatgcccctggacaccgtgacttcatcaagaacatgatcactggtaccttccatgctgactgtgctgtccttatcattgactccaccactggt

SEQ ID NO: 18909 - DNA, 437 bp, Zea mays
  Clone ID: LIB3151-038-Q1-K1-F3
cgcacaagccctagccgccgaccaccatggcggcggcgccacctccggacccgacggttctgattgaagacctcgtcgaggagttcctcctccgcattcccccggatgaccccgccagcctcgctcgtgccgccctcgtcagtaggcactggcaccgcgtcatcaccggccccgtcttccgccgtagattccgtgagttccaccgctcgccacctttgcagggctacatctccaacatccacaattccatccacttcgtccctatatcgtcgttccgcccgcgccatgctgacctcgacgacgtgatagcgatccactcaagccctggtcgcgtccttctctgtcgccgccccgggaagggtctggatgtcttccccgggaagggtctggatgtcttcctctccgtgtgggatcccatcaccgatgagctgcgggat

SEQ ID NO: 18910 - DNA, 480 bp, Zea mays
  Clone ID: LIB3151-038-Q1-K1-F4
caggcaggtcggcgaggagggcaggaagaccgaagaccgagccgtgcgggggctcgggacgggaacgggacaggaccccaaaatctcagatccttcctgcccgcccgcccgtgcccgtcgacgcgtcgttcttgccggccgcgccccacctccgccctctcctcctccagggggatcggatacgccacaggctgcgcgatggtgctgtgggtcttcggctacggctccctcatctggaaccccggcttcgacttcgacgacaaaatcctcggcttcatcaagggctacaagcgcacctttaatctcgcttgcattgaccacagaggcacaccggagcatccggcgaggacctgcacgcttgaaaccgacgacgaggccatatgctggggaattgcatattgtgtcaagggtggtccagaaaaagagctaaaagcaatacagtacttggagagaagagagtgtgagtacgaccagaaaata

SEQ ID NO: 18911 - DNA, 375 bp, Zea mays
  Clone ID: LIB3151-038-Q1-K1-F5
tcccgttcgacccacgcatccctcctcctcctccacccataccttattttccccctactcttcccgctaccagagtctcttataaaaaagacgatacccctccctttcctgattaaccacctactcttcatctcccttcttctctatacctccgcaattcccccttccatatcaaaatccaactccactaccaaaatccccttcactaacaatctctcgcatcaaaattcctttcttatcctttatcattcaattatcacccatcctttctttgtctccagccttatctcaaccctctatttcctacaaactcctgtcaactcttctaccttttattcattcactacctgtagacaaccttttttctttttttcc

SEQ ID NO: 18912 - DNA, 286 bp, Zea mays
  Clone ID: LIB3151-038-Q1-K1-F6
atacgcttcctgtcagttgtatattgtgagtcatgcttccagtgggagacacggggaaatgggaagaggttctctaaggagcgaggcgggcccaactgtctgcgatgtgtttgataacatgtcgtcgtgactgtttaccaagaacaccctctagatcatgcccttcaagctcccacccgtctgcccttattatttccgtgtgcgcatgatagcagtgtggatttgctgcagcgatgtgcactacctatatgaaatgctcatctctcactctttcttttttgatccc

SEQ ID NO: 18913 - DNA, 175 bp, Zea mays
  Clone ID: LIB3151-038-Q1-K1-F9
tcccctcgtcacttcccatgacgacgcccttctccacgccttccccacctaaccctaaaggagttttcttaaatgcgacggctcttctgctacagcccctatttaactccaacataccacctccaatatcatatactgctcctacactcctgactacctatatctaccccaccct

SEQ ID NO: 18914 - DNA, 468 bp, Zea mays
  Clone ID: LIB3151-038-Q1-K1-G1
caagcaacatagaaagtggaatccagtagcaacaatagagcaacaatggcgaccaagatatggtccctccttatgctccttgctctttctgcatgtgttgctaacgcgacaattttccctcaatgctcacaagctcctatagcttcccttcttcccccataccttccatcaatgatagcttcagtatgtgaaaacccagctcttcaaccctataggctccaacaagcaatcgcagcaagcaacatacctttatcacccttgtttcaacaatcgccagccctatctttggtgcagtcattggtacaaaccatcagggcacagcagctgcagcaactcgtgctacctgtgatcaaccaagtagctctggcaaacctttctccctactctcagcaacaacaatttcttccattcaaccaactgtctacattgaaccgtgctgcttatttgcagcaacaactattaccattc

SEQ ID NO: 18915 - DNA, 333 bp, Zea mays
  Clone ID: LIB3151-038-Q1-K1-G10
gaattaccgggccgagcgcgcacgcgtccgattgagaccaactagcatcatagaaagcactatagtgtaccaacaatggcagccaaaatgtgttgtttccttatgctccttggtctttctgcaagtgctgctacagcgaccattttcccgcaatgctcgcaagctcctatagcttcccttcttcccccgtacctttcaccagcggtgtcttcggtatgtgaaaacccaattcttcaaccctacatgatccaacaggcaatctcatctggcatcttacctttatcacccttgttcctccaacaatcatcagccctattacatcagttacctttg

SEQ ID NO: 18916 - DNA, 407 bp, Zea mays
  Clone ID: LIB3151-038-Q1-K1-G2
acggaaacacaccaagcgaatcgcactagcaacatcctaacaacaccggctaccacgatattaaacctcctttcactccttgcccttttacctagcgcaacaaatgccttcattattccacagtgctcacttgctcctagtgccattattccacatttcctcccaccttttacttcaataggcttcaaacatccaaccgtgcatgcctacaagctacaactaacgcttgccgcaagcgtcttacaacaaccaattgcccaatttcaacaacaatccttggcacatctaaacctacaaaccatcgcaacacaacaaaaacaacagtttatgccatcactgaaccacctaaccgctatgaaccctgtcacctacttgcaacagcagctacttgcatccaacccacttgc

SEQ ID NO: 18917 - DNA, 377 bp, Zea mays
  Clone ID: LIB3151-038-Q1-K1-G3
cgcgtacgagacgattatctttatctactccacagcgcatttataacccgatcgacaccatgaaggagaggatcgtttccctcgctgggcgggctctcgctgcgagcgccaccttcacgcatacaagcggcggctgctgctgccatccaccgtcgccggttcatctaccgccgtcggtgcatctgccacctccggttcacctgccaccttctgtgcatctcccaccgccgatccacctgtcgtcgccaggtccatctgccaccgtcggttcatgtgccgtcgcctgttcatctgccgtcgtcaccatgccactaccctactcaaccgccccggcctcagtcttattcccagccacacccatgcccgagccaacagtc

SEQ ID NO: 18918 - DNA, 431 bp, Zea mays
  Clone ID: LIB3151-038-Q1-K1-G4
acgatccaatccagatcagcaaagcggcagtgcgtatagaggatcgtcgaacagaacagcatagagatggtcatcgttctggtcgagtgcctggctctgtcagctgccagcgcctctgcaatgcagatgccctgcccctgcgcggggctgcaaggcttgtacggcgctggcgccggcctgacgacgatgatgggcgccggcgggctgtacccctacgcggagtacctgaggcatccgcagtgcatcccgctggcggcggcgccctactacgccgggtgtgggcagacgagcgccatgtaccatccgctccggcaacagtgctgccagcagcagatgaggatgatggacgtgcagtccgtcgcgcagcagctgcagatgatgatgcaacttgagcgtgccgctgccgccagcaacaacctgtacgagccatc

SEQ ID NO: 18919 - DNA, 444 bp, Zea mays
  Clone ID: LIB3151-038-Q1-K1-G6
acgcaattagctcatcgactccagattggataactcgacaccatgaaagtgctgatcgagaagattgctctcctggcgcgcgctgcgagcgccgcctccagtacaagcggcggctgtggctgccagacaccaccgtttcatctaccgcctccgttctatatgccgcctccgttctatctgccgccgcagcagcagccgcagccatggcaataccccactcaaccaccgcatctaagcccgtgccagcagttcggatcctgcggcgtctgcagcgtctgcagcccgttcctgggccagtgcgtctagttcctgatgcaccattgcatcccggcggctacgccctacagctcgccacagtgccaggcgctgcagcagcagtgctgccaccagatcaagcaggtggagccgctgcaccggtaccaggcgacatacggtgtggtcctg

SEQ ID NO: 18920 - DNA, 224 bp, Zea mays
  Clone ID: LIB3151-038-Q1-K1-G9
cggctccagctgagttcgcttccccatcctcatccccatcccgctcccgctagctccgaggcgtggtctccgagatcggggggcctttccttgccgatttgatccgcccagctggaaaacgaaaatcgctgatgggttttggaaggaaagttgtcatttcttggtgaggtttccgtttctggatcgactagctgatcgatcgtagtatcgtactatccaccatg

SEQ ID NO: 18921 - DNA, 353 bp, Zea mays
  Clone ID: LIB3151-038-Q1-K1-H1
gcgacagcgagcaccggcggcatccagccatgtgcggcggcgccatcctgtcggacatcatcccgccgccgccgccgcggcgggtcacggcgggccacctctggcccgagagcaagaagccgaggagggctgcagccggcaggaggagagcccccgtggagcaggagcaggaggaggatttcgaggccgacttcgaggagttcgaggtggagtccggcgagtcggagctcgagtccgaggacgagcccaagcccaagcccttcgccgcccccagcagcgcgctcgccagaggtggactaaacactggtgcagctggtgtcgatggccctgctgcaaattcagttaaaaggaag

SEQ ID NO: 18922 - DNA, 298 bp, Zea mays
  Clone ID: LIB3151-038-Q1-K1-H10
gcagcttctgcttgctctggggggaaggatagagagagagagcgagagagagatctaagagagatgtctataggtggtcctcgatcaaatatgttggcgagtttcaccagtcaggcagtggaggtgccggtagagctagtagcagcaggcagtcggacgccatctcccaagacgaatgcatcgcacctggtatggcgcttactgaccacttccaacctcgacgcatccgtgcagatcgagcgaccacagtcaccttgtctactcacacaccaaccaggctctactacgacccaggtct

SEQ ID NO: 18923 - DNA, 369 bp, Zea mays
  Clone ID: LIB3151-038-Q1-K1-H11
gagcattcagaaacacaccaagcgaagcgcactagcaacgacctaacaacaatggctaccaagatattagccctccttgcgcttcttgccctttttgtgagcgcaacaaatgcgttcattattccacaatgctcacttgctcctagtgccattattccacagttcctcccaccagttacttcaatgggcttcgaacacctagctgtgcaagccaacatgcaacaacaagcgcttgcggcgagcgtcttacaacaaccaattgcccaattgcaacaacaatccttgccacatctaacaatacaagccatcacaacgcaacaaccacaacaattcctaccaacactgaaccacctaaccatggtgaaccct

SEQ ID NO: 18924 - DNA, 477 bp, Zea mays
  Clone ID: LIB3151-038-Q1-K1-H2
attcataaacacaccaagcgaatcacattatctacaacctaacaacaatggctaccaagaggtgatccctccttgcgctgcttgcgctttttgcgagcgcaacaaatgcgttcattattccacaatgctcacttgctccaagttccattattacacagttcctcccaccagttacttcaatgggcttcgaacacccagctgtgcaagcctattagctacaacaagcaattgcggcgagcgtcttacaacaaccaatttcccagttgcaacaacaatccttggcacatctaacaatacaaaccatcgctgcgcatcagctacatcaattcctaccagcactgagccacctagccatggtgaaccctgccgcctacttgcaacagcaattgcttgcatcaaacccacttgctctggcaaacgtatttgcaaaccatgcacaacaacagctgcaacagtttctgtcaacgcttagtcaac

SEQ ID NO: 18925 - DNA, 448 bp, Zea mays
  Clone ID: LIB3151-038-Q1-K1-H3
ctagcaacatagaaagcacaatagtgtaccaacaatggcagccaaaatattttgcctccttatgctccttggtctttctgcaagtgctgctacggcgaccattttcccgaaatgctcgcaagctcctatagcttcccttcttcccccgtacctctcaccagcggtgtcttcggtatgtgaaaacccaattcttcaaccctacaggatccaacaggcaatcacagctggcatcttacctttatcacccttgttcctccaacaatcatcagccctattacatcagttacctttggtgcatttattggcacaaaacatcagggcacaacaactacaacaacttgtgctagcaaaccttgctgcctactctcagcaacagcagtttcttccattcaaccaactagctgcattgaactctgcttcttatttgcaacaacaacaactaccattc

SEQ ID NO: 18926 - DNA, 448 bp, Zea mays
  Clone ID: LIB3151-038-Q1-K1-H4
acgctgggtcttcagaccattagctttatctactccagagcgcagaagaacccgatcgacaccgggagggtgttgctcgttgccctcgctctcctggctctcgctgcgagcgccacctccacgcatacaagcggcggctgcggctgccagccaccgccgccggttcatctaccgccgccggtgcatctgccacctccggttcacctgccacctccggtgcatctcccaccgccggtccacctgccgccgccggtccacctgccaccgccggtccatgtgccgtcgccggttcatctgccgccgccaccatgccactaccctactcaaccagcccggcctcagcctcattcccagccacacccatgcccgtgccaacagccgcattcaagcccgtgccagctgcaaggaacctgcggcgttggcagcaccccgatcctgggccaatgcg

SEQ ID NO: 18927 - DNA, 424 bp, Zea mays
  Clone ID: LIB3151-038-Q1-K1-H5
cagcaaagcggcagtgcgtagagaggatcgtcgaacagaacagcatgaagatggtcatcggtctcgtcgtgtgcctggctctgtcagctgccagcgcctctgcaatgcagatgccctgcccctgcgcggggctgcagggcttgtacggcgctggcgccggcctgacgacgatgatgggcgccggcgggctgtacccctacgcggagtacctgaggcagccgcagtgcatcccgctggcggcggcgccctactacgccgggtgtgggcagacgagcgccatgtaccagccgctccggcaacagtgctgccagcagcagatgaggatgatggacgtgcagtccgtcgcgcagcagctgcagatgatgatgcagcttgagcgtgccgctgccgccagcagcagcctgtacgaaccatctctgatgca

SEQ ID NO: 18928 - DNA, 338 bp, Zea mays
  Clone ID: LIB3151-038-Q1-K1-H6
gaattcccaagtcagacccacacatactgatcattcatacactctcctttctatcctctctatccactccctaccctcatcctcaagaaaaattttaaacataaaagcactacttcccccttttcctatctcatccaataccctcactttcacacaattctcattttctcctaccacccttaatccatttttttcccccacctattacttcctcaaactcctaacactcctctaccccatccaactttctacaacccactctcccttcttactcttttaccacatcccatttcccaatcttttcaccactccttccctcttctccacacttcaattca

SEQ ID NO: 18929 - DNA, 351 bp, Zea mays
  Clone ID: LIB3151-039-Q1-K1-A1
accaagcgaagcacattagcaacaacctaacaacaatggctaccaagatattatccctccttgcgcttcttgcgctttttgcgagcgcaacaaatgcgttcattattccacaatgctcacttgctccaagttccattattacacagttcctcccaccagttacttcaatgggcttcgaacacccagctgtgcaagcctataggctacaacaagcaattgcggcgagcgtcttacaacaaccaatttcccagttgcaacaacaatccttggcacatctaacaatacaaaccatcgcaacgcaacagcaacaacaattcctaccagcactgagccacctagccatggtgaacc

SEQ ID NO: 18930 - DNA, 402 bp, Zea mays
  Clone ID: LIB3151-039-Q1-K1-A11
atctatatctccaaagaatcgcagcacaacaactacaacagcagttgcttccaacaatcaagcaagtagttgcagcgaaccttgctgcttacctccagcaacaacaatttcttccattcaatcaactagctggggtgaaccttgctgcttacttgcaggcacaacagctactaccattcaaccaacttgtcaggagccctgctgccttcttactgcagcaacagttgctgccattccatctacaagttgtggcaaacattgctgctttcttgcaacaacaacaattgctgccattttacccacaggttgtgggaaacattaacgccttcttgcaacagcaacagttgctgccattctacccacaggatgtggcaaacaatgtcgccttcttacaacaacaac

SEQ ID NO: 18931 - DNA, 245 bp, Zea mays
  Clone ID: LIB3151-039-Q1-K1-A12
ccgacgcgtggcatacaccgtgaactctatctacatcaaagcgcaaacaaacgccatcgagactatgagggtgttgctcgccgcctcgctctcaggctctgctgcgagcgcacctcactcatacatacggggctgtagtgccaccactgcccccgccatctatcgcgatggtgcattgcagatacgctcactgcaccttatggcatcaccaacagttgtacacatgaacacgcctgtacaactgt

SEQ ID NO: 18932 - DNA, 307 bp, Zea mays
  Clone ID: LIB3151-039-Q1-K1-A2
caacaagcaacatagaaagtggaatccagtagcaacaatagagcaacaatggagaccaagatattttccctccttatgctccttgctctttctacatgtgttgctaacgcgacaattttccctcaatgctcacaagctcctatagcttccctttttcccccataccttccatcaattatagcttcagtatgtgaaaacccagctcttcaaccatataggcttcaacaagcaatcgcagcaagcaacatacctttatcgcccttgttgtgtcaacaatcgccagccctatctttggtgcagtcattgg

SEQ ID NO: 18933 - DNA, 139 bp, Zea mays
  Clone ID: LIB3151-039-Q1-K1-A3
tcgctaccccccgcattaactaacaaaaaaaaacccgggcccttgggggccttttgaaagaagaggacccatttctttcccaagtttggccttcgcaaaggaaacccggggccctttcatttcgggcgcggggggggtt

SEQ ID NO: 18934 - DNA, 249 bp, Zea mays
  Clone ID: LIB3151-039-Q1-K1-A4
ggagaaccctccgagcatcctattgactcccatggctccggccatgtcggcgcagttcacaagaatcaccttcagcaacctgtttgtccgtcgggctggcccaggcagcacggagctgaccggggagggaaggccatccgaccagctgggcaggagaaacctcactgacagccccgtatttgacggccgtggccctgacgccagcctcgtggctcgcgtacagggagtcgctacccagatgggcgacgt

SEQ ID NO: 18935 - DNA, 56 bp, Zea mays
  Clone ID: LIB3151-039-Q1-K1-A5
tcgagaccattagctttatctactacagagcgccaaagaacccgatcgacaccatg

SEQ ID NO: 18936 - DNA, 151 bp, Zea mays
  Clone ID: LIB3151-039-Q1-K1-A6
cccgaccaaggcttctcaagatgccgctgaggccggagaggacaacctgagctcgatgtgggaggaagctggcgacgccgacgacatctttgcctcccccggcagcgccgacgccgtagccgacgatgaggaggtcgcccgcgtctgcgcc

SEQ ID NO: 18937 - DNA, 115 bp, Zea mays
  Clone ID: LIB3151-039-Q1-K1-A7
aaccaagtagctctggcaaacctttctccctactctcagcaacaacaatttcttccattcaaccaactgtctacattggaccgggctgcttatttgcagcaaccactattaccat

SEQ ID NO: 18938 - DNA, 87 bp, Zea mays
  Clone ID: LIB3151-039-Q1-K1-A8
caactagcaacatagaaagcacaatagtgtaccaacaatggcagccaaaatattttgcttccttatgctcccttggtctttctgcaa

SEQ ID NO: 18939 - DNA, 285 bp, Zea mays
  Clone ID: LIB3151-039-Q1-K1-A9
acgcactgggtcttcagaccattagctttatctactccagagcgcagaagaacccgatcgacaccatgagggtgttgctcgttgcccttgctctcctggctctcgctgcgagccgccaccttcacgcataacaacggggggtgcggcttgcaaccaccggcgccggttcatctaccgccgccggtgcatctgccacctacggttcacctgccacctccggtgcatctcccaccgccggtccacctgccgccgccggtccacctgccaccggcggtccatgtgccg

SEQ ID NO: 18940 - DNA, 192 bp, Zea mays
  Clone ID: LIB3151-039-Q1-K1-B10
tcggctacatattgaacccgagctgactctctttagggtgccaaaccacgttcgctagtttgcgaaggtgtttctattttatcaagtcaccatgattaaatctgctgggcgcctacatacaacacaacaactgcttaaacccttggcggaggctaatccattggctggtggcacattaccgcatttacaact

SEQ ID NO: 18941 - DNA, 437 bp, Zea mays
  Clone ID: LIB3151-039-Q1-K1-B11
cagaccattagctttatctactccagagcgcagaagaacccgatcgacaccatgagggtgttgctcgttgccctcgctctcctggctctcgctgcgagcgccacctccacgcatacaagcggcggctgcggctgccagccaccgccgccggttcatctaccgccgccggtgcatctgccacctccggttcacctgccacctccggtgcatctcccaccgccggtccacctgccgccgccggtccacctgccaccgccggtccatgtgccgccgccggttcatctgccgccgccaccatgccactaccctactcaaccgccccggcctcagcctcatccccagccacacccatgcccgtgccaacagccgcatccaagcccgtgccagctgcaaggaacctgcggcgttggcagcaccccgatcctgggccagtgcgt

SEQ ID NO: 18942 - DNA, 361 bp, Zea mays
  unsure at all n locations
  Clone ID: LIB3151-039-Q1-K1-B12
gtttcttttacttgcgcctgggacgcaagccaacggcttgcgcgctcaggtggggttctcatcgacggcgtcagcggcttnccctcccggctctcgccagtcgcttcgcgccctcgcctncggtccttcgcacactggccggtgaccctgcatagtattatctgattttcctggaggccacattttaaggactgaggttacaatggcagatgccagccctagaacagaaacatcaacagatgatactgacgacaataacgggcttgaaccaagcagaggtggtcttggtgcttctgactccatgacagatccaaagacaaacatggagatcaaaagacattgcgtcgccttgctcaaaatc

SEQ ID NO: 18943 - DNA, 221 bp, Zea mays
  Clone ID: LIB3151-039-Q1-K1-B2
cgccgccatgtcgaagcgaggcaggggaggttcggcggggaacaagttccgcatgtcgctgggtctgccggttgccgcgacggtgaactgcgcggacaacacgggcgccaagaacctctacatcatctgcgtcaagggcattaagggccggctcaaccggcttccgtacggctgggttggcgacatggtcatggccaccgtcaagaaggggaagcccgacc

SEQ ID NO: 18944 - DNA, 163 bp, Zea mays
  Clone ID: LIB3151-039-Q1-K1-B3
ggacataaaaaggggaatccaatagcaacaatagagccacaatggagacccaaatattttgccttcctatgcctcctggtctttttacaaggggtggtaaacccaccatttttccttaaaggctaccaagctctattggtttccttttttccccaaaactttc

SEQ ID NO: 18945 - DNA, 332 bp, Zea mays
  Clone ID: LIB3151-039-Q1-K1-B4
gtcagcctagcaattagctcatcgactccagattggagaactcgacaccatgaaggtgctgatcgttgcccttgctctcctggcgctcgctgcgagcgccgcctacagtacaagcggcgggtgtggctgccagacaccaccgtttcatctaccgcctccgttctatatgccgcctccgttctatctgccgccgcagcagcagccgcagccatggcaataccccactcaaccaccgcagctaagcccgtgccagcagttcggatcctgcggcgtcggcagcgtctgcagcccgttcctgggccagtgcgtcgagttcctgaggcaccagtgca

SEQ ID NO: 18946 - DNA, 129 bp, Zea mays
  Clone ID: LIB3151-039-Q1-K1-B5
gccacgcgttcggagaccattagctttatctactccagagcgcagaagaacccgatcgacaccatgagggtgttgctcgttggccttgctctcctggctctcgctgcgagcgccacctccacgcataca

SEQ ID NO: 18947 - DNA, 106 bp, Zea mays
  Clone ID: LIB3151-039-Q1-K1-B6
cgaacgatgaccatgacgtactcgatgatctactgcaccgctaaacacaccaccggcgccaccatcaatacgatccctgtcccaagatccgtccggtgcgtccatg

SEQ ID NO: 18948 - DNA, 348 bp, Zea mays
  Clone ID: LIB3151-039-Q1-K1-B7
caactagcaacatagaaagcacaatagtgtaccaacaatggcagccaaaatattttgcttccttatgctccttggtctttctgcaagtgctgctaccgcaaccattttcccacaatgctcacaagctcctatagcttcctttcttcccccatacctctcaccagcggtgtcttcagtatgtgaaaacccaattcttcaaccctacaggatccaacaggcaatcgcagcaggcatcttacctttatcacccttgttcctccaacaaccgtcagccctattacagcagttacctttggtgcatttgttggcacaaaacatcaaggcacaacaactacaacaacttgtgct

SEQ ID NO: 18949 - DNA, 278 bp, Zea mays
  Clone ID: LIB3151-039-Q1-K1-B8
acgcatcaagtaacccattacgcacatcagattacagcactcgacaccatgaaggtgccgatcgatgcgctcgctctcctggctctcgctgcgagcgccacctccatgcacacacacagctgatgaagctgtaaaccaccgttgcatgcacagacaccgtactatatgccgcctccactatatgttgacccgccacatcagccgcaaccatgagaatacctcaatcaaccaccgcagctaaacccgtgacagcagttccgatcctgcggcgatggcag

SEQ ID NO: 18950 - DNA, 432 bp, Zea mays; identical to SEQ ID NO: 17955
  Clone ID: LIB3151-039-Q1-K1-B9

SEQ ID NO: 18951 - DNA, 63 bp, Zea mays
  Clone ID: LIB3151-039-Q1-K1-C1
gacgatgatgacatggatcccactcaatactatgagaataggctcaaggctcttgattcactg

SEQ ID NO: 18952 - DNA, 389 bp, Zea mays
  Clone ID: LIB3151-039-Q1-K1-C10
cagaccattagctttatctactccagagcgcagaagaacccgatcgacaccatgagggtgttgctcgttgccctcgctctcctggctctcgctgcgagcgccacctccacgcatacaagcggcggctgcggctgccagccaccgccgccggttcatctaccgccgccggtgcatctgccacctccggttcacctgccacctccggtgcatctcccaccgccggtccacctgccgccgccggtccacctgccaccgccggtccatgtgccgccagcggttcatctgccgccgccaccatgccactaccctactcaaccgccccggcctcagcctcatccccagccacacccatgcccgtgccaacagccgcatacaagcccgtgccagct

SEQ ID NO: 18953 - DNA, 316 bp, Zea mays
  Clone ID: LIB3151-039-Q1-K1-C11
ctggacgtcagcctagcaattagctcatcgactccagattggagaactcgacaccatgaaggtgctgatcgttgcccttgctctcctggcgctcgctgcgagcgccgcctccagtacaagcggcggctgtggctgccagacaccaccgtttcatctaccgcctccgttctatatgccgcctccgttctatctgccgccgcagcagcagccgcagccatggcaataccccactcaaccaccgcagctaagcccgtgccagcagttcggatcctgcggcgtcagcagcgtcagcagcccgttcctgggccaatgcgtc

SEQ ID NO: 18954 - DNA, 377 bp, Zea mays
  Clone ID: LIB3151-039-Q1-K1-C12
agaccattagctttatctactccagagcgcaaaaaaccccgaccgaaccataagggggtggtcggtgccctcgcttttctggctttcgttgcaacccccacctccacccaaccaaacgggggttgcggttgccacccaccgccgccggttcattaaccgccgccgggcattctgccacttccggtaacctgccacctccggtgcatctcccaccggcggtccacctgccgccgccggtccacctgccaccgccgttccatgtgccgccaccggttcatctgccgtcgccaccatgccactaccctactcaaccgccccggcctcagcctcattcccagccacacccatgcccgtgccaacagccgcatccaaacccg

SEQ ID NO: 18955 - DNA, 315 bp, Zea mays
  unsure at all n locations
  Clone ID: LIB3151-039-Q1-K1-C2
gaccattagctttatctactccagagcgcagaagaacccgatcgacaccatgagggtgttgctcgttgccctcgctctcctggctctcgctgcgagcgccacctccacgcatacaagcggcggctgcggctgccagccaccgccgccggttcatctaccgccgccggtgcatctgccacctacggttcacctgccacctacggtgcatctaccaccgccggtccacctgctcgcgccggtccacctgccaccgncggtccatgtgccgccgccggttcatctgccgccgccaccatgccactaccctactcaacc

SEQ ID NO: 18956 - DNA, 387 bp, Zea mays
  unsure at all n locations
  Clone ID: LIB3151-039-Q1-K1-C3
cccacgcgtccggctttatctactacagagcgcagaagaacccgatcgacaccatgagggtgttgctcgttgccctcgctctcctggctctcgctgcgagcgccacctncacacatacaagcggcggctgcggctgccagccaccgccgccggttcatctaccgccgccagtgcatctgccacctccggttcacctgccacctccggtgcatctcccaccgccggtccacctgccgccgacggtccacctgtcaccgtcggtccatgtgccgccgtcggttcatatgccgccgccaccatgccactaccctactcaaccgaccctgactcagtctcatcctcagncacacgcatgcccgtgccaacagccgcattcaagcccgtgcc

SEQ ID NO: 18957 - DNA, 368 bp, Zea mays
  unsure at all n locations
  Clone ID: LIB3151-039-Q1-K1-C4
gccgtacgcggcctgtaacttctacgcctacgagacgctgaagcggctctaccgtcgcgcgaccgggcggcgtcccggcgcggacgtgggccccgtggcgacgctgctcatcgggtccgcggcgggcgccatcgccagctcggccacgttcccgctagaggtggcccgcaagcagatgcaggtgggcgctgtgggcgggaggcaggtgtaccagaacgtgctccacgctatctactgcatcctcaaaaaagaagggggccggcggtctgtaccgaggtctcggacctagctgcatcaagctcatgcccgccgccggcatcgncttcatgtgctacgaggcgtgcaagaagatcctcgtcgacaaggag

SEQ ID NO: 18958 - DNA, 438 bp, Zea mays
  Clone ID: LIB3151-039-Q1-K1-C5
ctgggtcttcagaccattagctttatctactccagagcgcagaagaacccgatcgacaccatgagggtgttgctcgttgccctcgctctcctggctctcgctgcgagcgccacctccacgcatacaagcggcggctgcggctgccagccaccgacgacggttcatctaccgccgccggtgcatctgccacctgcggttcacctgccacctccggtgcatctcccaccgccggtccacctgccgccgccggtccacctgccaccgccggtccatgtgccgtcgacggttcatctgccgcctgcaccatgccactaccctactcaaccggcccggcctcaggctcatccccagccacacccatgcccgtgccaacagccgattccaaccccgtgccagctgcagggaaacctgcggcgttggcagaaccccgatcctggg

SEQ ID NO: 18959 - DNA, 263 bp, Zea mays
  Clone ID: LIB3151-039-Q1-K1-C6
attgagaccaacaagcaacatagaaagtggaatccagtagcaacaatagagcaacaatggcgaccaagatattttccctccttatgctccttgctctttctgcatgtgttgctaacgcgacaattttccctcaatgctcacaagctcctatagcttgccttcttcccccataccttccatcaatgatagcttcagtatgtgaaaacccagctcttcaaccctataggctccaacaagcaatcgcagcaagcaacataccttta

SEQ ID NO: 18960 - DNA, 366 bp, Zea mays
  Clone ID: LIB3151-039-Q1-K1-C7
cattagctttatctactccagagcgcagaagaacccgatcgacaccatgagggtgttgctcgttgccctcgctctcctggctctcgctgcgagcgccacctccacgcatacaagcggcggctgcggctgccagccaccgccggcggttcatctaccgccgccggtgcatctgccacctccggttcacctgccacctccggtgcatctcccaccgccggtccacctgccgccgccggtccacctgccaccgccggtccatgtgccgccgccggttcatctgccgccgccaccatgccactaccctactcaaccgacccggcctcagcctcatccccagccacacccatgcccgtgccaacagccgca

SEQ ID NO: 18961 - DNA, 352 bp, Zea mays
  Clone ID: LIB3151-039-Q1-K1-C9
tcgaagccattccctcttcaagaggggatcatcagattgggcttattattccttattactccaggcaaggatcggagttgctctgaattgactgaaccatggcggcgacaatggcagtgacgacgatggtgacgaggagcaaggagagctggtcgtcattgcaggtcccggcggtggcattcccttggaagccacgaggtggcaagaccggctgcctcgagttccctcgccgggcgatgttcgccagcgtgcggctcaacgtgtgcccgggcgtaccatgaggtgcgcgacccgcgagagcccgatcccaaggtcgtgcgggcggtcgacaactgctacatcgcgcgccagc

SEQ ID NO: 18962 - DNA, 442 bp, Zea mays
  Clone ID: LIB3151-039-Q1-K1-D1
caactagcaacatagaaagcacaatagtgtaccaacaatggcagccaaaatattttgcttacttatgctccttgggctttctgcaagtgctgctaccgcaaccattttcccacaatgctcacaagctcctatagcttcctttgttcccccatacctctcaccagcggtgtcttcagtatgtgaaaacccaattcttcaaccctacaggatccaacaggcaatcgcagcaggcatcttacctttatcacccttgttactccaacaaccgtcagccctattacagcagttacctttggtgcatttgttggcacaaaacatcaaggcacatcagctacaacaacttgtgctacgaaaccttgctgactactctgagcaacagcagtttcttccattcaaccaactggctgcattgaactctgctgattatttgcaacaacaacta

SEQ ID NO: 18963 - DNA, 322 bp, Zea mays
  unsure at all n locations
  Clone ID: LIB3151-039-Q1-K1-D10
tgagaccaactagcaacatagaaagcacaatagtgtaccaacaatggcagccaaaatattgtgcctacctatgctccttggtctttctgcaagtgctgctacagcgaccattttcccgcaatgctcgcaagctcctatagcttcccttcttcccccgtacctctcaccagcggtgtcttcggtatgtgaaaacccaattcttcaaccctacaagatccaacaggcaatcgcagctggcatcttacctttatcacccttgtttctccaacaatcattaaccctattacaacagntacctttggtgcatttattggcacaaaac

SEQ ID NO: 18964 - DNA, 439 bp, Zea mays
  Clone ID: LIB3151-039-Q1-K1-D11
gtccactgcccagcacggatctcatctcaccagctgcccgcgcatccaattcctctcgctggacggctgcagcacatcatcaggtgagaccgtgagagggaatgggatcaacaacaatgtcccctccatcttttcccgtcgtcctcctgctcctcctcctcgccaccatagccgcagccgccggaagcaacatggatgaggaggtggcggacgacctccagtatcttattgacaactccgacgacatgcccaccaacgatcccgacgggtggcctgagggagactacgacgacgacgaccttctcttccaagatcaggaccaggacctgacaggccaccagccggagatcgacgagacccacgtcgtggtcctcgccgccgcaaacttttccttctttctcgccttcagccaccatgttatgggtgagttctacgcacc

SEQ ID NO: 18965 - DNA, 424 bp, Zea mays
  Clone ID: LIB3151-039-Q1-K1-D4
cgtcgtcagtgtcgtgtactcgttttcccttccaaggcacccgttgcgagggcggaggcgccgatggccggggcgggggcgggtgcgggagcgggggcgctggccgggctcgcagcgtgcgcgacgctggcgtgcaacgtcgcaagcgccgtgctcttcctcctcagccaagacgacgagcggctgctgcgcgggtgtgcggcgaggttgggcgctggcggcgtcgcgtcacaaccggtggaggagtgcggagatgaagaggcgctcgcgccggacgccgtactcaacctcgagctcggcgacccgacgatgtaccgggcgttctgcgggaggctgggactgcggcccaccgtgatccgcggtgccagggatgagctactgtcgacacgacgccgtgctctgctggttctctagccgaactgga

SEQ ID NO: 18966 - DNA, 391 bp, Zea mays
  unsure at all n locations
  Clone ID: LIB3151-039-Q1-K1-D5
cgcaaattgcaccaagaaatccatcgagaggccgtcgacaggggaattaatggcgtcgtcgtctagcagcagccaccgccggctcatcctcgcagccgccgtcctgctctccgtgctcgcggctgccagcgccagcgccgggacctcctgcgtgccggggtgggccatcccgcacaacccgctcccgagctgccgctggtacgtgaccagccggacctgcggcatcgggccgcgcctcccgtggccggagctgaagaggagatgctgccgggagctggcggacatcccggcgtactgccggtgcacggcgctgagcatcctcatggacggcgcgatcccgccggcccggacgcgcagctggagggctgnctagaggacctgcctggctgcc

SEQ ID NO: 18967 - DNA, 376 bp, Zea mays
  unsure at all n locations
  Clone ID: LIB3151-039-Q1-K1-D6
cagaaacacaccaagcgaagcgcactagcgacaacctaacaacaatggctaccaagatattatccctccttgcgcttcttgcgctttttgcgagcgcaacaaatgcgtccattattccacaatgctcacttgctcctagttccattattccacagttcctcccaccagttacttcaatggccttcgaacacccagctgtgcaagcctataggctacaacaagcgattgcggcgagcgtcttacaacaaccaattgcccaattgcaacaacaatgcttggcacatctaacaatacaaaccatcgcaacgcaacagcaacaacagttcctaccagcactgagccacctagccatggtgaaccctgtcgnctacttgca

SEQ ID NO: 18968 - DNA, 334 bp, Zea mays
  Clone ID: LIB3151-039-Q1-K1-D7
ccagagcgcagaagaacccgatcgacaccatgagggtgttgctcgttgccctcgctctcctggctctcgctgcgagcgccacctccacgcatacaagcggcggctgcggctgccagccaccgccgccggttcatctaccgccgccggtgcatctgccacctccggttcacctgccacctccggtgcatctcccaccgccggtccacctgccgccgccggtccacctgccaccgccggtccatgtgccgccgccggttcatctgccgccgccaccatgccactaccctactgaaccgccccggcctcagcctcatccccagccacacccatgccc

SEQ ID NO: 18969 - DNA, 392 bp, Zea mays
  Clone ID: LIB3151-039-Q1-K1-D8
attttgagcattcagaaacacaccaagcgaagcgcactagcaacaacctaacaacaatggctaccaagatattatccctccttgcgcttcttgcgctttttgcgagcgcaacaaatgcgtccattattccacaatgctcacttgctcctagttccattattccacagttcctcccaccagttacttcaatggccttcgaacacccagctgtgcaagcctataggctacaacaagcgattgcggcgagcgtcttacaacaaccaattgcccaattgcaacaacaatccttggcacatctaacaatacaaaccatcgcaacgcaacagcaacaacagttcctaccagcactgagccacctagccatggtgaaccctgtcgcctacttgcaacag

SEQ ID NO: 18970 - DNA, 311 bp, Zea mays
  Clone ID: LIB3151-039-Q1-K1-D9
ggtcttcagaccattagctttatctactccagagcgcagaagaacccgatcgacaccatgagggtgttgctcgttgccctccctctcctgggtctcggtgcgagcgccacctccacgcatacaagcggcgggtgccgctgacaaccaccggcgaccgttcatctaccggccgcggagcatctgccacctcccgttcacctgccacctccggtgcatttcccacccgcggtgcacctgccctcgacgggccacctgccaccgccgagccatgtgtcgtcgccagatcatgtgccggcggcctcatggcacta

SEQ ID NO: 18971 - DNA, 432 bp, Zea mays
  Clone ID: LIB3151-039-Q1-K1-E1
atagaaagcacaatagtgtaccaacaatggcagccaaaatattttgcttccttatgctccttggtctttctgcaagtgttgctaccgcaaccattttcccacaatgctcacaagctcctatagcttcccttcttcccccatacctctcaccagcggtgtcttcaatgtgtgaaaacccaattgttcaaccctacaggatccaacaggcaatcgcaacaggcatcttaccattatcacccttgttcctccaacaaccgtcagccctattacagcagttacctttggtccatttggtggcacaaaacatcaaggcacaacaactacaacaacttgtgctagcaaaccttgctgcatactctcagcaacatcagtttcttttcattcaaccaactggctgcattgaactctgctgcttatttgcaacaacaatta

SEQ ID NO: 18972 - DNA, 101 bp, Zea mays
  Clone ID: LIB3151-039-Q1-K1-E10
cataccattcgcttgatctactccagagcgcagaataacccgatcgacaccatgagggggttgttcgatgccctcactttaccggctctggctgaaaacgc

SEQ ID NO: 18973 - DNA, 251 bp, Zea mays
  unsure at all n locations
  Clone ID: LIB3151-039-Q1-K1-E12
cctgcaggtaccggccgaattccggtcgaccagcgtcgccaccgtncggcgtgcaggatctcgtttcgcgcactcacaagcccggagacccatctcgaggacgtgctacaaagatccaccccgtgaggcaacctcgggtcggcgcctaccggaccgaggaagggaagcccctagtgctgaacgtggtcaggcgcgccgagcaaatgttgatcaataatccgtcacgtgtcaaggagtacctaccaatcacc

SEQ ID NO: 18974 - DNA, 432 bp, Zea mays
  Clone ID: LIB3151-039-Q1-K1-E2
aacatacatagtgaagtacagtagcaacatcttagcaccaatggcagccaagatttttgccctccttgccctccttgctctttcagcaagtgttgctaccgcgactattattccacaatgctcacaacaatacctctctccggtgacagccgcgagatttgaatacccaactatacaatcctacaggctacaagaagcccatacaagcagcatcttacggtcgttagcattgactgtccaacaaccatatgccctattgcaacaaccatccttagtgaatctatatctccaaagaatcgcagcacaacaactacaacagcagttgcttccaacaatcaatcaagtagttgcagcgaaccttgctgcttacctccagcaacaacaatttcttccattcaatcaactagctggggtgaacctttgctgctactt

SEQ ID NO: 18975 - DNA, 400 bp, Zea mays
  Clone ID: LIB3151-039-Q1-K1-E3
cagaccattagctttatctactccagagcgcagaagaacccgatcgacaccatgagggtgttgctcgttgccctcgctctcctggctctcgctgcgagcgccacctccacgcatacaagcggcggctgcggctgccagccaccgccgccggttcatctaccgccgccggtgcatctgccacctccggttcacctgccacctccggtgcatctcccaccggcggtccacctgccgccgccggtccacctgccaccgccggtccatgtgccgccgacggttcatctgccgccgccaccatgccactaccctactcacaccgcccgggctcagcctcatccccagccacacccatgcccgtgccaacagccgcatccaagcccgtgccagctgcagggaacct

SEQ ID NO: 18976 - DNA, 431 bp, Zea mays
  Clone ID: LIB3151-039-Q1-K1-E4
cgccgccggcgccaagcccctgcccgccgccacctccacgtccgtctccttcccggccacccaccagcccgcgtgcctgctctcctcgcccgcgcccgggtctctgcgccgccgggacgtcgccgccatggtctccgcgccgccggccgtcggcaccgccatgccgtcgctcgacttcgacacctgcgtcttcaacaaggagaaggtctccctcgccggccacgacgagtacatcgtgcgcggcgggaggaacctgttcccgctgcttccggaggcgttcaagggggtcaagcagatcggagttattggatggagctcgcagggtcctgcccaagcccagaacctgagagattcactggctgaagccaagtcagatattggtgtgaagatgggtctccggaaaggatccaaatcttttgaggaagcacgtg

SEQ ID NO: 18977 - DNA, 272 bp, Zea mays
  Clone ID: LIB3151-039-Q1-K1-E5
attttgagcattcataaacacaccaagcgaagctacctagcgacgacttaacaacaatggctaccaagatattagccctccttgcgcttcttgtcctttttgtgagcgcaacaaatgcgttgattattccacaatgctcacttgctcctagagccattataccacaggtgcttccaccagctacttcaatgggcttcgaacaactagctgtgcaagcctacaagctacaacaagcggttggggtgagcgtgttacaacaacccatttaccca

SEQ ID NO: 18978 - DNA, 350 bp, Zea mays
  Clone ID: LIB3151-039-Q1-K1-E7
atattgatcattaaaaaacacaccaagcgaagcggactagcaacaacctaacaacagagggtaccaacatattagccctccttgaacttgtagaactgttctggagcgcaacacatgggtcgattattccacaatggttacttacttctactaccatcattgcacaaattctcccagcagttacttccatgggctacgtacatgcagccgcgcaaggcttcaggctacaactagcgctcgcggtgagcgtctgacaacaaccaattgtccaattgcaacaacaatccttggcacatgtaaacctacaaaccatcgcaacgcaacagcgacgacagtttctgccatcactg

SEQ ID NO: 18979 - DNA, 361 bp, Zea mays
  Clone ID: LIB3151-039-Q1-K1-E8
gaccaactagcaacatagaaagcacaatagtgtaccaacaatggcagccaaaatattttgcctccttatgctccttggtctttctgcatgtgctgctacggtgaccattttcccaaaatgctcgcaagctgctatagcttcccttcttcccccgtacctctcaccagaggagtcttgggtatgtgaaaacccaattcttcaaccctacaggatccaacaggcaatcacagctggcatctgacgtttatcacccttgctcctccaacaatcatgagccctattacatcagtgacctttggtgcatgcattggcacaaaacatcagggcacaacaactacaacaacttgtgctaacaaatctt

SEQ ID NO: 18980 - DNA, 264 bp, Zea mays
  Clone ID: LIB3151-039-Q1-K1-F1
gacggtcgtggccaaccctaggcagttcaaggtgccggactggttcctcaacaggaagaaggattacaaggaccgaagggtcttacaggtcgtttccaacgcccttgacatgaagctcaaggaccaccttgagaggctcaagaagatcaagaaccaccggggtctgcgtcactactggggccttcgtgtccgtggccagcacaccaagaccactggcaggcgtggaaaaactgttggtgtctccaagaagcgataagctacata

SEQ ID NO: 18981 - DNA, 264 bp, Zea mays
  Clone ID: LIB3151-039-Q1-K1-F10
atcgactccagattggagaactcgacaccatgaaggtgctgatcgttgcccttgctctcctggcgctcgctgcgagcgcccgctccagtacaagcggcggctgtggctgccagacaccaccgtttcatctaccgcctccgttctatatgccggctccgttctatctgccgccgcagcagcagccgcagccatggcaataccccactcaaccaccgcagctaagcccgtgccagcagttcggatcctgcggcgtcggcagcgtcg

SEQ ID NO: 18982 - DNA, 315 bp, Zea mays
  Clone ID: LIB3151-039-Q1-K1-F11
caccaagcgaagcgcactaacaacaacctaacaacaatggctaccaagatattatccctgcttgcgcttcttgcgctttttgcgagcgcaacaaatgcgtccattattccacaatgctcacttgctcctagttccattattccacagttcctcccaccagttacttcactggccttcgaacacccagctgtgcaagcctatatgctacaacaagcgattgcggcgagcgtcttacaacaaccaattgcccaattgcaacaacaattcttggcacatctaacaatacaaaccatcgcaacgcaacagcaacaacag

SEQ ID NO: 18983 - DNA, 341 bp, Zea mays
  Clone ID: LIB3151-039-Q1-K1-F12
acacaccaagcgaagcgcactagcaacgacctaacaacaatggctaccaagatattagccctccttgcgcttcttgccctttttgggagcgcaacaaatgcgttcattattccacaatgctcacttgctcctagtgccattattccacagttcctcccaccagttacttcaatgggcttcgaacacctagctgtgcaagccaacatgcaacaacaagcgcttgcggcgagcgtcttacaacaaccaattgcccaattgcaacaacaatccttgccacatctaacaatacaagccatcacaacgcaacagcaacaacagttcctaccagcactgagccacct

SEQ ID NO: 18984 - DNA, 129 bp, Zea mays
  Clone ID: LIB3151-039-Q1-K1-F2
ctgggtcttcagaccattagctttatctactgcagagcgcagaagaacccgatcgacaccatgagggtgttgctcgttgccctcgctctcctggctctcgctgcgagcgccacctccacgcatacaagc

SEQ ID NO: 18985 - DNA, 253 bp, Zea mays
  Clone ID: LIB3151-039-Q1-K1-F3
gcggccgcccttacttttttttttttttactttatttggttccacctacattcatgtatatcatccagtttacacaaggcactcaaggccacaccataccaactgacaaacaagtatagtactgctagctagtctacagtctgcgccgcgcacggataatttcatagttcatactgctcagcgcacgctcacaactcacccatgcgctacgcgaggagccccctggcgatgcggccgtctgcgccctggggaa

SEQ ID NO: 18986 - DNA, 436 bp, Zea mays
  unsure at all n locations
  Clone ID: LIB3151-039-Q1-K1-F4
attttgagcattcagaaacacaccaagcgaagcacattagcaacaacctaacaacaatggctaccaagatattatccctccttgcgcttcttgcgctttttgcgagcgcaacaaatgcgttcattattccacaatgctcacttgctccaagttccattattacacagttcctcccaccagttacttcaatgggcttcgaacacccagctgtgcaagcctataggctacaacaagcaattgcggcgagcgtcttacaacaaccaatttcccagttgcaacaacaatccttggcacatctaacaatacaaaccatcgcaacgcaacagcaacaacaattcctaccagcactgagccacctagccatggtgaaccctgccgnctacttgcaacagcagttgcttgcatcaaacccacttgctctggcaaacgtagttgc

SEQ ID NO: 18987 - DNA, 161 bp, Zea mays
  Clone ID: LIB3151-039-Q1-K1-F5
ctctatctcctgcttccgaaccctcgcccttccagcccccaaaggcccaaaccccaatctgtctcttccgctagggttagcgtaattccatggccggcgccggtatccacccgttccagcagtggccacccgcggggggcgcgccgcccccgccgggggcc

SEQ ID NO: 18988 - DNA, 338 bp, Zea mays
  Clone ID: LIB3151-039-Q1-K1-F6
gatgtacaacatctagagctagctgaccttgctggctactcttagcaacagcagtgtcttcgattcaaccaactacgctgcacttgaactcgtggttccttattggcaacaacaacaactaccatttagccaactacctggatggtaccctcagcattattttgcattgaaccaactggaataattgaactctcctgattatttacagcagcaagaactactagcattcagccagctagcttgggcgggctctgctacctgcctgatacagccacgagaggtgccgatctaccagctctctgctactaacgctggcaccttcttacaactgcaacaat

SEQ ID NO: 18989 - DNA, 235 bp, Zea mays
  Clone ID: LIB3151-039-Q1-K1-F7
caacaagcaacatagaaagtggaatccagtagcaacaatagagcaacaatggcgaccaagatattttccctccttatgctccttgctctttctgcatgtgttgctaacgcgacaattttccctcaatgctcacaagctgctatagcttcccttcttcccccataccttccatcaatgataggcttagtatgtgaaaacccagctcttcaaccctatatgctccaacaagcaattg

SEQ ID NO: 18990 - DNA, 193 bp, Zea mays
  Clone ID: LIB3151-039-Q1-K1-F8
aattggccgggtccgacccacgccgtccggttctatgatcgcgagccgggcgcctctttttttttttttcttctaacaaacgccactttcttatttgatgggaacgccaccaaacactcgagataacaaaacgcctatttattgacactatacactcataagtaaacctaaaaggaggcgcaccaccaatgat

SEQ ID NO: 18991 - DNA, 279 bp, Zea mays
  Clone ID: LIB3151-039-Q1-K1-F9
ctcgcaacatagaaagcacaatagtgtaccaacaatggtagtcaaaacatctagcctgcgtaagcttcttggtcattctgcaagtgctgctacggcgaccattatcccgcaatgctcgcaagctcctatagcttcccttgttgccccgtacctctaaacagcggtgacctccgtatgtcgaaaacccaaacgttcaaccctacaggatccaacacgaccatcgagacagcatctcaactttatgacccttgatcctgcaccaatgattagagctcttac

SEQ ID NO: 18992 - DNA, 345 bp, Zea mays
  unsure at all n locations
  Clone ID: LIB3151-039-Q1-K1-G1
gggtcttcagaccattagctttatctactccagagcgcagaagaacccgatcgacaccatgagggtgttgctcgttgccctcgctctcctggctctcgctgcgagcgccacctccacgcatacaagcggcggctgcggctgccagccaccgccgccggttcatctaccgccgccggtgcatctgccacctgcggttcacctgccacctccggtgcatctcccaccgccggtccacctgccgncgccggtacacctgacaccgccggtcatgtgccgccgccggttaatctgccgccgccacaatgccattaccttactaaacggcccgggcctaagcctaatccc

SEQ ID NO: 18993 - DNA, 353 bp, Zea mays
  unsure at all n locations
  Clone ID: LIB3151-039-Q1-K1-G10
attagctttatctactccagagcgcagaagaacccgatcgacaccatgagggtgttgctcgttgccctcgctctcctggctctcgctgcgagcgccacctccacgcatacaagcggcggctgcggctgccagccaccgccgccggttcatctaccgccgccggagcatctgccacctccggttcacctgccacctacggggcatctcccaccgccggtccacctgccggcgccggttcacctgccaacgncagtccatgtgccgccgcccgttcatctgccgccgccaccatgccactaccctactgaaccgccccggcctcagcctcatacccagccacacccatgcccgtg

SEQ ID NO: 18994 - DNA, 366 bp, Zea mays
  Clone ID: LIB3151-039-Q1-K1-G11
cagaccattagctttatctactccagagcgcagaagaacccgatcgacaccatgagggtggtgctcgttgccctcgctctcctggctctcgctgcgagcgccacctccacgcatacaagcggcggctgcggctgccagccaccgccgccggttcatctaccgccgccggtgcatctgccacctccggttcacctgccacctccggtgcatctcccaccgccggtccacctgccgccgccggtccacctgccaccgtcggtacatgtgccggcgacggttcatctgccgtcgtcaccatgccactaccctactcaaccgccccggcctaagcctaatccccagccacacccatgcccgtgccaacag

SEQ ID NO: 18995 - DNA, 417 bp, Zea mays
  unsure at all n locations
  Clone ID: LIB3151-039-Q1-K1-G12
ctgggtcttcagaccattagctttatctactccagagcgcagaagaacccgatcgacaccatgagggtgttgctcgttgccctcgctctcctggctctcgctgcgagcgccacctccacgcatacaagcggcggctgcggctggcagccaccgccgccggttcatctaccgccgccggtgcatctgccacctccggatcacctgccacctncggtgcatctaccaccgccggtccacctgccgccgccggtacacctgccaccgncggtccatgtgccgccgccggttcatctgccgtcgccaccatgccactaccctactcaaccgccccggcctcagcctcatccccagccacacccatgcccgtgccaacagccgcatncaagcccgtgccagctgcagggaacctggcgcgtt

SEQ ID NO: 18996 - DNA, 441 bp, Zea mays
  Clone ID: LIB3151-039-Q1-K1-G2
cttcacgactccggtcggccgtcagctcgattcgccttcccccccacctcccccgccctccgatgacggggcgtccgtgggcgggcgcgccgccgccgcctcttcctctcgccgtcgccgtgggcgtcgcggcgctgctgtcctgctgctgctgctgctgctgccagggcgcgtcggcgacggcggcggcgtcgttcggcgacaacttcgagatcacgggcgccgaggaccacgtgaagacctccgccgacgggcagacctggtacctatacctcgacaacaagacaggcgtcgggttccagacgaagcagcgctacctgttcggctggttcagcatgaagctgaagctggtgggcaacgactccgcgggcgtcgtcaccgcctactacatgtgctccgacctggacgcggcgcccctgcgcgacgagctggacttcgagt

SEQ ID NO: 18997 - DNA, 303 bp, Zea mays
  Clone ID: LIB3151-039-Q1-K1-G3
aatcatcattcatcttagtagtataggctccaaatcatatctgccacatcaattgtctaactcggaaaaccatgaagctggtgcttgtgggtcttgctttgattgctctagactcacgtgttccttgtacacagacaagcggctgcagctgatgtcaacaacacatccgtgagcaggatcatgatgcacatgaacttgatgcacaattacagcaacttttaccaccagcacaacatgatcagctgcatcaacaccaacaacagcaggttcacatgcaaccacaaaaacatcagttgcaaccag

SEQ ID NO: 18998 - DNA, 237 bp, Zea mays
  Clone ID: LIB3151-039-Q1-K1-G4
ccgatcgatcgccacagccaacaccacccgccgaggcgacgcgacagccgccaggaggaaggaataaactcactgccagccagtgaagggggagaagtgtactgctccgtcgaccagtgcgcgcaccgcccggcagggctgctcatctcgtcgacgaccagtggattaatcggcatggcggctctggccacgtcgcagctcgtcgcaacgcccgccggcctgggcgtcccggacgcg

SEQ ID NO: 18999 - DNA, 203 bp, Zea mays
  Clone ID: LIB3151-039-Q1-K1-G5
ccgcccggcagggctgctcatctcgtcgacgaccagtggattaatcggcatggcggctctggccacgtcgcatgtcgtcgcaacgcccgccggcctgggcgtcccggacgcgtccacgttccgccgcggcgccgcgcagggcctgaggggggcccgggcgttagcggcggcggacactctcagcatgcggaccaacgcgcgcg

SEQ ID NO: 19000 - DNA, 341 bp, Zea mays
  Clone ID: LIB3151-039-Q1-K1-G6
cccacgcgtccggcggcagtgcgtagagaggatcgtcgaacagaacagcatgaagatggtcatcgttctcgtcgtgtgcctggctctgtcagctgccagcgcctctgcaatgcagatgccctgcccctgcgcggggctgcagggcttgtacggcgctggcgccggcctgacgacgatgatgggcgccggcgggctgtacccctacgcggagtacctgaggcagccgcagtgcagcccgctggcggcggcgccctactacgccgggtgtgggcagacgagcgccatgtaccagccgctcccgcaacagtgctgccagcagcagatgatgatgatggacgtgc

SEQ ID NO: 19001 - DNA, 320 bp, Zea mays
  unsure at all n locations
  Clone ID: LIB3151-039-Q1-K1-G7
attagctttatctactccagagcgcagaagaacccgatcgacaccatgagggtgttgctcgttgccctcgctctcctggctctcgctgcgagcgccacctccacgcatacaagcggcggctgcggctggcagccaccgccgccggttcatctaccgccgccggtgcatctgccacctccggttcacctgccacctccggtgcatctcccaccgccggtccacctgccgccgccggtccacctgccaccgccggtccatgtgccgccgccggttcatctgccngcgtcaccatgccactaccctactcaaccgccccggcc

SEQ ID NO: 19002 - DNA, 320 bp, Zea mays
  Clone ID: LIB3151-039-Q1-K1-G8
ccgtccgataagaaagcacatatacgtgtacacaaccaatgagcacgcccaaaatatctttcgcttcctgtatgcgtgctgtggtactttctcgcaagctgtgtgctacgcgcaacacattcttacccaccaatgcatcaacaagctgcctatagcgttccgcttcttcaccccataccttttcaccagaccgtgtgcttcaaatgtgtgaacaacccacattgttcacaccctacagtgatccaacagtgcaatcgcaacatggacatcttaccaattatcaccacttgtttcctccaacagaccgtcatgccctatta

SEQ ID NO: 19003 - DNA, 363 bp, Zea mays
  Clone ID: LIB3151-039-Q1-K1-G9
gaccaacaagcaacatagaaagtggaatccagtaccaacaatagagcaacactggcgaccaagatattttcccttcttatgctcgttgctctttatgcatgtgatgctaacccaacaattttccctcaatgctcacaagctcgtatagattacattctttccccgtacattccattaatgatagctgcagtaagtgaaaacacacctctccaccctataagctccaacgggcggctcgcagaatggacaatacctttctcactcttgcttcaacaatacgtcagtcctatatttggtgcactcataggtacaaaccatcaggggacagacgactgagcaactggtgctacctgtgatcaacca

SEQ ID NO: 19004 - DNA, 283 bp, Zea mays
  Clone ID: LIB3151-039-Q1-K1-H1
gaccaacaagcaacatagaaagtggaatccagtagcaacaatagagcaacaatggcgaccaagatattttccctccttatgctccttgctctttctgcatgtgttgctaacgcgacaattttccctcaatgctcacaagctcctatagcttcccttcttcccccataccttccatcaatgatagcttcagtatgtgaaaacccagctcttcaaccctataggctccaacaagcaatcgcagcaagcaacatacctttatcacccttgtttcaacaatcgccag

SEQ ID NO: 19005 - DNA, 51 bp, Zea mays
  Clone ID: LIB3151-039-Q1-K1-H10
gatcaagaaaacggcagtgcgtaaaaaggatccgtcaacaaaacaacatga

SEQ ID NO: 19006 - DNA, 252 bp, Zea mays
  Clone ID: LIB3151-039-Q1-K1-H11
attcagaaacacaccaagcgaagcgcactagcaacaacctaacaacaatggctaccaagatattagccctccttgcgcttcttgcccttttagtgagcgcaacaaatgcggtcattattccacagtgctcacttgctcctagtgccattattccacagttcctcccaccagttacttcaatgggcttcgaacatccagccgtgcaagcctacaggctacaactagcgcttgcggcgagcgtcttacaacaac

SEQ ID NO: 19007 - DNA, 272 bp, Zea mays
  Clone ID: LIB3151-039-Q1-K1-H12
gctccttggtctttctgcaagtgctgctacggcgaccattttcccgaaatgctcgcaagctcctatagcttcccttcttcccccgtacctctcaccagcggtgtcttcggtatgtgaaaacccaattcttcaaccctacaggatccaacaggcaatcacagctggcatcttacctttatcacccttgttgcttcaacaatcatcagccctattacatcagttacctttggtgcatttattggcacaaaacatcagggcacaacaactacaac

SEQ ID NO: 19008 - DNA, 99 bp, Zea mays
  Clone ID: LIB3151-039-Q1-K1-H2
ccacaaccgaaaaactcccaaaaaaattggaattccccaattcgggagatcttttaatattcggccgattaaccgacccaattgttagggttaagtttc

SEQ ID NO: 19009 - DNA, 269 bp, Zea mays
  Clone ID: LIB3151-039-Q1-K1-H3
gaccatctaccgtcgtttctccctgaggcatatcaacccgaccgacaacctctaggtggtagattatggcatccccatatattggcatatctatagaatgccgagcgttataacacaaacattgctattgtctacttcaaagacagaatctttatcatctacctccactacaatttctgggacatgaccatcagctgccaccatcagaggcttttgaatatgagagccgccaggaagaatcagaacaggtgccatcgcattgtcatgag

SEQ ID NO: 19010 - DNA, 188 bp, Zea mays
  unsure at all n locations
  Clone ID: LIB3151-039-Q1-K1-H4
gtgggaaccaccaggcacataaaaaggggggaatccagtngccaccaataaaaccaccaattggggaaccaagatatttttcccctccttatgctccttgccttttcaaaaggggtggctaacccgaaatttttccctcaatgctaacaagctcctttagcttccctttttcccccataccttccata

SEQ ID NO: 19011 - DNA, 79 bp, Zea mays
  Clone ID: LIB3151-039-Q1-K1-H5
atcagcaaagcggcagtgcgtaaagaggatcgtccaacagaacaacatgaagatggtgatcgttctcgtctggtgcctg

SEQ ID NO: 19012 - DNA, 301 bp, Zea mays
  Clone ID: LIB3151-039-Q1-K1-H6
ccaactagcaacatagttagcacaatagtgtaccaacaatggcagccaaaatattttgcttccttatgctccttggtctttctgcaagtgctgctaccgcaaccattttcccacaatgctcacaagctcctatagcttcctttcttcccccatacctctcaccagcggtgtcttcagtatgtgaaaacccaattcttcaaccctacaggatccaacaggcaatcgcagcaggcatcttacctgtatcaccctagttcctccaacaaccgtcagccctattacagcagttacctttggtgca

SEQ ID NO: 19013 - DNA, 230 bp, Zea mays
  Clone ID: LIB3151-039-Q1-K1-H7
cccacgcgttcgaagtgattctagttcagagaaagaaagaagctgacaatgagaagcatgtgaggcgcgtttgctgtgaagtggttcttgtgaggcttaggaattcacccttattttcttccccttatagaaatggagatggtcctactgtcttagagtcctatctggcttgggagtgggccggcgctcattttttcacccaccggcgatggcggatgaagcgggcctta

SEQ ID NO: 19014 - DNA, 332 bp, Zea mays
  Clone ID: LIB3151-039-Q1-K1-H8
tcgcgatgatgttgaatgacaaaatccaaaacctttctggtctcccatcattccttggaaagggcggaggagtatcttctggatggtgctctagacacttccttctccgaggtccaccattagtttccaaaaccttgctttggaaaaggttgggggggacattgcaaaacgggtactcacaacactcaatttgttttttgaccttcttgaggcccctgatcctgccaacttggagaagttccttggaactataccaatgatgttcaacgttgttatgctttctcctcatggctacttcgctcagtccaatgtgcttggataccctgacactg

SEQ ID NO: 19015 - DNA, 344 bp, Zea mays
  unsure at all n locations
  Clone ID: LIB3151-039-Q1-K1-H9
gggtcttcagaccattagctttatctactccagagcgcagaagaacccgatcgacaccatgagggtgttgctcgttgccctcgctctcctggctctcgctgcgagcgccacctccacgcatacaagcggcggctgcggctgccagccaccgccgccgggtaatctaccgccgacggtgcatctgccacctgcggttcacctgccacctccggtgcatctcccaccgccagtccacctgccgccgcgggccacctgccaccgccgtccatgtgccgccgcggtcatntgccgccgcacatgcactacctactaaacgcccggcctagcccatcccagcacaccat

SEQ ID NO: 19016 - DNA, 342 bp, Zea mays
  unsure at all n locations
  Clone ID: LIB3151-040-Q1-K1-A10
attgagaccaactagcaacatagaaagcacaatagtgtaccaacaatggcagccaaaatattttgcctccttatgctccttggtctttctgcaagtgctgctacggcgaccattttcccgcaatgctcgcaagctcctatagcttcccttcttcccccgtacctctcaccagcggtgtcttcggtatgtgaaaacccaattcttcaaccctacaggatccaacaggcaatcgcagctggcatcttacctttatcacccttgttcctccaacaatcatcagccctattacaacagttacctttggtgcatttattggcacaaaacatcanggcacaacaacta

SEQ ID NO: 19017 - DNA, 357 bp, Zea mays
  unsure at all n locations
  Clone ID: LIB3151-040-Q1-K1-A11
tcatcattcatcttagtagtataggcaccaaatcaaatctgcaacatcaattatctaactccaaaaaccatgaagctggtgcttgtggttcttgctttcattgctttagtatcaagtgtttcttgtacacagacaggcggctgcagctgtggtcaacaacaaagccatgagcagcaacatcatccacaacaacatcatccacaaaaacaacaacatcaaccaccaccacaacatcaccagcagcagcaacaccaacaacaacaagttcacatgcaaccacaaaaacatcagcaacaacaagaagttcatgttcaacaancaacaacacaaccgcagcaccaacaacaacaacaacaa

SEQ ID NO: 19018 - DNA, 356 bp, Zea mays
  Clone ID: LIB3151-040-Q1-K1-A12
attcagaaacacaccaagcgaagcgcactagcaacaacctaacaacaatggctaccaagatattatccctccttgcgcttcttgcgctttttgcgagcgcaacaaatgcgtccattattccacaatgctcacttgctcctagttccattattccacagttcctcccaccagttacttcaatggccttcgaacacccagctgtgcaagcctataggctacaacaagcgattgcggcgagcgtcttacaacaaccaattgcccaattgcaacaacaatccttggcacatctaacaatacaaaccatcgcaacgcaacagcaacaacagttcctaccagcactgagccacctagccatg

SEQ ID NO: 19019 - DNA, 278 bp, Zea mays
  unsure at all n locations
  Clone ID: LIB3151-040-Q1-K1-A4
ctgggtcttcagaccattagctttatctactccagagcgcagaagaacccgatcgacaccatgagggtgttgctcgttgccctcgctctcctggctctcgctgcgagcgccacctccacgcatacaagcggcggctgcggctgccagccaccgccgccggttcatctaccgccgccggtgcatctgccacctncggttcacctgccacctccggtgcatctnccaccgccggtccacctgccgncgccggtccacctgccaccgccggtccatgtgcc

SEQ ID NO: 19020 - DNA, 255 bp, Zea mays
  Clone ID: LIB3151-040-Q1-K1-A6
caacaagcaacatagaaagtggaatccagtagcaacaatagagcaacaatggagaccaagatattttccctccttatgctccttgctctttctacatgtgttgctaacgcgacaattttccctcaatgctcacaagctcctatagcttccctttttcccccataccttccatcaattatagcttcagtatgtgaaaacccagctcttcaaccatataggcttcaacaagcaatcgcagcaagcaacataccttta

SEQ ID NO: 19021 - DNA, 288 bp, Zea mays
  Clone ID: LIB3151-040-Q1-K1-A7
gatcagcaaagcggcagtgcgtagagaggatcgtcgaacagaacagcatgaagatgggcatcgttctcgccgagtgcctggctctgtcagctgccagcgcctctgcaatgcatatgccctgcccgtgcgcggggctgcatggcttgtacggtgctggcgccggtctgacgacgatgatgggcgccggcgggctgtacccctacgcggagtacctgatgcagccgcagtgcagcccgttggcggcagcgccctactacgccgggtgtgggcagacgagcgccatgtacc

SEQ ID NO: 19022 - DNA, 408 bp, Zea mays
  Clone ID: LIB3151-040-Q1-K1-A8
cgatcgatcgccacagccaacaccacccgccgaggcgacgcgacagccgccaggaggaaggaataaactcactgccagccagtgaagggggagaagtgtactgctccgtcgaccagtgcgcgcaccgcccggcagggctgctcatctcgtcgacgaccagtggattaatcggcatggcggctctggccacgtcgcagctcgtcgcaacgcccgccggcctgggcgtcccggacgcgtccacgttccgccgcggcgccgcgcagggcctgaggggggcccgggcgtcggcggcggcggacacgctcagcatgcggaccagcgcgcgcgcggcgcccaggcaccagcagcaggcgcgccgcgggggcaagttcccgtcgctcgtcgtgtgcgccagcgccggcatgaacg

SEQ ID NO: 19023 - DNA, 338 bp, Zea mays
  Clone ID: LIB3151-040-Q1-K1-A9
aagcaacatagaaagtggaatccagtagcaacaatagagcaacaatggagaccaagatattttccctccttatgctccttgctctttctacatgtgttgctaacgcgacaattttccctcaatgctcacaagctcctatagcttccctttttcccccataccttccatcaattatagcttcagtatgtgaaaacccagctcttcaaccatataggcttcaacaagcaatcgcagcaagcaacatacctttatcgcccttgttgtgtcaacaatcgccagccctatctttggtgcagtcattggtacaaaccatcaaggcacaacagctgcagcaactc

SEQ ID NO: 19024 - DNA, 443 bp, Zea mays
  Clone ID: LIB3151-040-Q1-K1-B10
agcaacatagaaagcacaatagtgtaccaacaatggcagctaaaatattttgcctccttatgctccttggtctttctgcaagtgctgctacggcgaccattttcccacaatgctcacaagctcctatagcttcccttcttcccccgtacctctcaccaacggtgtcttcggtatgtgaaaacccaattcttcaaccctacaggatccaacaggcaatcgcagctggcatcttacctttatcacccttgttcctccaacaatcatcagccctattacagcagttacctttggtgcatttattggcacaaaacatcagggcacaacaactacaacaacttgtgctagcaaaccttgctgcctactctcagcaacagcagtttcttccattcaaccaactagctgcattgaactctgcttcttattttgcacaacaacaactacca

SEQ ID NO: 19025 - DNA, 303 bp, Zea mays
  unsure at all n locations
  Clone ID: LIB3151-040-Q1-K1-B11
cgcagcgtccccgccacgaccacgagcgaaaggaggtcgccggaagagggggcgcggagatgagcgggagcgcgttcaacgcgttcaagtcgcgggtgccggtggcgtggagtccccggctgtacatcacgctggtgcggggccttcccgggacgcggngccttcaccgncgcacgctcgaggccatgcgccttcgccgctgccaccgcaccgtcgagcaccgcaccacgccgtcgcttctcgggatgctcacccaggtgaagcgcctcgtcgccgtcgagaccgaagagatgtacaacgcgc

SEQ ID NO: 19026 - DNA, 78 bp, Zea mays
  Clone ID: LIB3151-040-Q1-K1-B2
ttccgggttttcaaaaccattgcttttatttattccaaaccccaaaaaaacccgttcgaccccttgggggggtggttc

SEQ ID NO: 19027 - DNA, 405 bp, Zea mays
  Clone ID: LIB3151-040-Q1-K1-B5
gggaatcacatcgccatggcagccaagatgtttgcattgtttgcgctcctagctctttgtgcaaccgccactagtgctacccatatcccagggcacttgtcaccactactgatgccattggctaccatgaacccatggatgcagtactgcatgaagcaacagggggttgccaacttgctagcgtggccgaccctgatgctgcagcaactgttggccttaccgcttcagccgtgccagatgccaatgatgatgccaggtatgatgccaccgatgacaatgatgccgatgccgaatatgatgccatcgatgatggtgccgactatgatgtcaccaataacgatagctagtatgatgccaccgatgatgatgccaaacatggtttcaccaatgatgatgccgagtatg

SEQ ID NO: 19028 - DNA, 384 bp, Zea mays
  unsure at all n locations
  Clone ID: LIB3151-040-Q1-K1-B6
atcaatcatcattcatcttagtagtataggcaccaaatcaaatctgcaacatcaattatctaactgcaaaaaccatgaagctggtgcttggggttcttgctttcattgctttagtatcaagtgtttcttgtacacagacaggcggctgcagctgtggtcaacaacaaagccatgagcagcaacatcatccacaacaacatcatccacaaaaacaacaacatcaaccaccaccacaacatcaccagcagcagcaacaccaacaacaacaagttcacatgcaaccacaaaaacatcagcaacaacaagaagttcatgttcaacaacaacaacaacaaccgcagcacccacaacaacaaccacaacagcnccaacaacaacattaat

SEQ ID NO: 19029 - DNA, 394 bp, Zea mays
  Clone ID: LIB3151-040-Q1-K1-B7
caactagcaacatagaaagcacaatagtgtaccaacaatggcagccaaaatattttgcttccttatgctccttggtctttctgcaagtgttgctaccgcaaccattttcccacaatgctcacaagctcctatagcttcccttcttcccccatacctctcaccagcggtgtcttcaatgtgtgaaaacccaattgttcaaccctacaggatccaacaggcaatcgcaacaggcatcttaccattatcacccttgttcctccaacaaccgtcagccctattacagcagttacctttggtccatttggtggcacaaaacatcagggcacaacaactacaacaacttgtgctagcaaaccttgctgcatactctcagcaacatcagtttcttccattc

SEQ ID NO: 19030 - DNA, 396 bp, Zea mays
  unsure at all n locations
  Clone ID: LIB3151-040-Q1-K1-B8
gacgggctgaaaaccgaagcaccgaacacacgcgcaccgcagcttgtccgtatcgcccatcgccatgctcgcctacctcctcaacggcccagccgccgccatcgccgcggcgcccagcgccttcctcctccgctccctcccgccggcgaagaccccgttcctatcctctctcccgcgcccggtctcgccgaggcgcgctgccgcagccgcgttcgccttcaaccccgctgccgcagcggcccccatcgtggcgtcgctgctcgagggccccgtgctggtctgggccggccggctctgcctctactacgcgcttctccacgtcgggctcgccggctccccgcgcaaccccttnctctctcacgagatcggcggcgaggacggcgccggggataagcg

SEQ ID NO: 19031 - DNA, 422 bp, Zea mays
  Clone ID: LIB3151-040-Q1-K1-B9
cggacgcgtgggtgagaccaacaagcaacatagaaagtggaatacagtagcaacaatagagcaacaatggcggccaagatattttccatccttatgctccttgctctttctgcatgtgttgctaacgcgaccatttttcctcaatactcacaagctcctatagctgcccttcttcccccataccttccatcaatgaccgcttcagtatgtgaaaacccagcccttcaaccctacaggctccaacaagcaatcgcaacaagcaacttacctttatcacccctgttctttcaacaatcgccagccctatctttggtgcagtcattggtacaaaccatcagggcacaacagctgcagcaactcgtgctaccagtgatcagccaagtagctcttgcaaacctttctccctactctcagcaacaaca

SEQ ID NO: 19032 - DNA, 319 bp, Zea mays
  Clone ID: LIB3151-040-Q1-K1-C10
tgggtcttcagaccattagctttatctactccagagcgcagaagaacccgatcgacaccatgagggtgttgctcgttgccctcgctctcctggctctcgctgcgagcgccacctccacgcatacaagcggcggctgcggctgccagccaccgccgccggttcatctaccgccgccggtgcatctgccacctccggttcacctgccacctccggtgcatctcccaccgccggtccacctgccgccgccggtccacctgccaccgccggtccatgtgccgccgccggttcatctgccgccgccaccatgccactaccctac

SEQ ID NO: 19033 - DNA, 382 bp, Zea mays
  unsure at all n locations
  Clone ID: LIB3151-040-Q1-K1-C11
ccctcttcctgtcagtagtagagtgagagtgaggcagcgagtgggagacaaggggaaatggggaagggagcgcaagggagcgatgcggcggcggcgggcggcgaggtggaggagaacatggcggcgtggctggttgccaagaacaccctcaagatcatgcccttcaagctcccgcccgtcggcccttataatgtccgcgtccgcataaagcagtggggatttgccgcagcgattgtccactacctaaggaagatgcccatcggccacttcgtggggaaggacccaatggtaatcggccccaattccccggccttggtcnaggaggtgggcgccggcgtgacccacctgtccgtgggcgaccgcgtggcgctggagccgggcg

SEQ ID NO: 19034 - DNA, 91 bp, Zea mays
  Clone ID: LIB3151-040-Q1-K1-C2
cttcggacaaaaaaaccaaccgggccttctttcaaccggttttccaccccggacacccggaaattggtcctatttgccccttttgcccttt

SEQ ID NO: 19035 - DNA, 395 bp, Zea mays
  unsure at all n locations
  Clone ID: LIB3151-040-Q1-K1-C3
ctctattgcaacagccatccttagtgcatctgtatctccaaagaatcgcggcacaacaactacaacaacagttgctaccaacaatcaatcaagtagttgcagcgaaccttgctgcttacctccagcaacaacagtttcttccattcaatcaactagatggggtgaaccctgctatctacttgcaggcacaacagctactaccatttaaccaacttgtcgggagcccttatgccttcttactgcaacaacagcttctaccattccatctgcaagctgtggcaaacattgctgctttcttgagacaacaacatttgttgccattttacccacaggttgggggaaacattaatgccttcttgcaacagcaacaatngctaccattctacccacagaat

SEQ ID NO: 19036 - DNA, 242 bp, Zea mays
  Clone ID: LIB3151-040-Q1-K1-C4
attcagaaacacaccaagcgaagcgcactagcaacaacctaacaacaatggctaccaagatattatgcctccttgcgcttcttgcgctttttgcgagcgcaacaaatgcgtccattattccacaatgctcacttgctcctagttccattattccacagttcctcccaccagttacttcaatggccttcgaacacccagctgtgcaagcctataggctacaacaaagcgattgcgggagagcg

SEQ ID NO: 19037 - DNA, 123 bp, Zea mays
  unsure at all n locations
  Clone ID: LIB3151-040-Q1-K1-C5
aagaacgacaccgacctcaccgncaccggcctcaaagagctggtgagccagtacaaagacgtctacgtggaagctaaaggagaagccattcccctcaaaccccaaaaagcaacttgagttggc

SEQ ID NO: 19038 - DNA, 440 bp, Zea mays
  Clone ID: LIB3151-040-Q1-K1-C7
aacaagcaacatagaaagtggaatacagtagcaacaatagagcaacaatggcggccaagatattttccatccttatgctccttgctctttctgcatgtgttgctaacgcgaccatttttcctcaatactcacaagctcctatagctgcccttcttcccccataccttccatcaatgaccgcttcagtatgtgaaaacccagcccttcaaccctacaggctccaacaagcaatcgcaacaagcaacttacctttatcacccctgttctttcaacaatcgccagccctatctttggtgcagtcattggtacaaaccatcagggcacaacagctgcagcaactcgtgctaccagtgatcagccaagtagctctggcaaacctttctccctactctcagcaacaacaatttcttccattcaaccaactgtctacactgaaccct

SEQ ID NO: 19039 - DNA, 362 bp, Zea mays
  Clone ID: LIB3151-040-Q1-K1-C8
ctgggtcttcagaccattagctttatctactccagagcgcagaagaacccgatcgagaccatgagggtgttgctcgttgccctcgctctcctggctctcgctgcgagcgccacctccacgcatacaagcggcggctgcggctgccagccaccgccgccggttcatctaccgccgccggtgcatctgccacctccggttcacctgccacctccggtgcatctcccaccgccggtccacctgccgccgccggtccacctgccaccgccggtccatgtgccgccgccggttcatctgccgccgccaccatgccactaccctactcaaccgccccggcctcagcctcatccccagccacacccatg

SEQ ID NO: 19040 - DNA, 327 bp, Zea mays
  Clone ID: LIB3151-040-Q1-K1-C9
cccacgcgtccgattcagaaacacaccaagcgaagctacctagcaacgacttaacaacaatggctaccaagatattagccctccttgcgcttcttgccctttttgtgagcgcaacaaatgcgttcattattccacaatgctcacttgctcctagtgccattataccacagttcctccgaccagttacttcaatgggcttcgaacacctagctgtgcaagcctacaggctacaacaagcgcttgcggcgagcgtcttacaacaaccaattaaccaattgcaacaacaattcttggcacatctaaccatacaaaccatcgcaacacaac

SEQ ID NO: 19041 - DNA, 180 bp, Zea mays
  Clone ID: LIB3151-040-Q1-K1-D1
caaaaggacaggcagccaaatgccccaccacagcggagcccctcctcactgactcacctgcaaaaaccacttgcaaaccacacaaaccgaaaacgccagcttccctgccttcatttttagcaactttttcctttaatctcccgtggcagtcacccttctttgccccccgcgcagatttcg

SEQ ID NO: 19042 - DNA, 378 bp, Zea mays
  Clone ID: LIB3151-040-Q1-K1-D11
cagcaaagcggcagtgcgtagagaggatcgtcgaacagaacagcatgaagatggtcatcgttctcgtcgtgtgcctggctctgtcagctgccagcgcctctgcaatgcagatgccctgcccctgcgcggggctgcagggcttgtacggcgctggcgccggcctgacgacgatgatgggcgccggcgggctgtacccctacgcggagtacctgaggcagccgcagtgcagcccgctggcggcggcgccctactacgccgggtgtgggcagacgagcgccatgtaccagccgctccggcaacagtgctgccagcagcagatgaagatgatggacgtgcagtccgtcgcgcagcagctgcagatgatgatgcaacttgagc

SEQ ID NO: 19043 - DNA, 253 bp, Zea mays
  Clone ID: LIB3151-040-Q1-K1-D12
ggagctataaatctcggcgcccccccgctaccggaccccgcattcccgtgcgcgagctccggtgatcgccgggagcggtcggcggccatggggcagtgctacgcgaggaacgtgcgcggcgtcgacgccgactgcggcggcgtgggggcgaccaccatcacggtctcagcggcaggagggccggaggatgcggcgtctgtagggggagggggaggacgacgaggagggaggcggagcgcgcggccgtctacta

SEQ ID NO: 19044 - DNA, 204 bp, Zea mays
  Clone ID: LIB3151-040-Q1-K1-D2
tccagatcagcaaaaccgcagtgcgtaaaaaggatcgtcgaacaaaacaacatgaaaatgggcatcggtctcgtcgtgtgcctggctcttgtaactggcaacgccttttgaatgcaaatgccctggccctgcgccgggctttaaggcttgtaccgggcttgggcccggcttaacaccattattggggcccgcgggctttacccc

SEQ ID NO: 19045 - DNA, 456 bp, Zea mays
  unsure at all n locations
  Clone ID: LIB3151-040-Q1-K1-D3
tttcagcattcagaaacacaccaagcgaagcgcactagctgcattgaactctgcttcttatttgcaacaacaacaactaccattcagccagctacctgctgcctacccccagcaatttcttccattcaaccaactggcagcattgaactctcctgcttatttacagcagcaacaactactaccattcagccagctagctggtgtgagccctgctaccttcttgatacaaccacagttgttgccgttctaccagcacgctgcgcctaacgctggcaccctcttacaactgcaacaattgctgccattcaaccaacttgctttgacaaacccagcagcgttctaccaacaacccatcattggtggtgccctcttttagatttcttatgagttatagntcaataataaaagtttttggctgatggttgtggcttcccagaaataggaaagtacatttct

SEQ ID NO: 19046 - DNA, 381 bp, Zea mays
  Clone ID: LIB3151-040-Q1-K1-D4
gatcagcaaagcggcagtgcgtagagaggatcgtcgaacagaacagcatgaagatggtcatcgttctcgtcgtgtgcctggctctgtcagctgccagcgcctctgcaatgcagatgccctgcccctgcgcggggctgcagggcttgtacggcgctggcgccggcctgacgacgatgatgggcgccggcgggctgtacccctacgcggagtacctgaggcagccgcagtgcagcccgctggcggcggcgccctactacgccgggtgtgggcagacgagcgccatgtaccagccgctccggcaacagtgctgccagcagcagatgaggatgatggacgtgcaatccgtcgcgcagcagctgcagatgatgatgcagcttgagc

SEQ ID NO: 19047 - DNA, 431 bp, Zea mays
  unsure at all n locations
  Clone ID: LIB3151-040-Q1-K1-D5
tacaaaccatcgcaacgcaacagcaacaacagtttctgccatcactgagccacctagccgtggtgaaccctgtcgcctacttgcaacagcagctacttgcatccaacccacttgctctggcgaacgtagctgcataccagcaacaacaacgtctgcaacagtttatgccagcgctcagtcaactagccatggtgaaccctgtcgcctacctacaacagcaacaattgctttcatctagcccgctcgctgtgggcaatgcacctacgtacctacaacaacagttgctgcaacagattgtaccagctctgactcagctagctgtggcaaaccctactgnctacttgcaacagttgctttcattcaaccaactggctgtgtcgaactctgctgtgtacctacaacagcgacaacagttacttaatccactagca

SEQ ID NO: 19048 - DNA, 447 bp, Zea mays
  Clone ID: LIB3151-040-Q1-K1-D7
catccgtgttcttgtttgcgaggtcgagagagagaggatgtcgtgctgcggaggcaactgtgggtgcggctccggctgcaagtgcggcaacggctgcggagggtgcagcaagatgtacccggacatggctgagcaggtgaccaccaccacccaggctctcatcatgggtgtcgcaccatccaaggggcacgccgagggcgggttcgaggcggccgccggagctgagaacggcgggtgcaagtgcggcggcaactgccagtgcgacccctgcaactgcggcaagtgagctaggtgctccaccctgcaggccggccggaggaagctagctaattattataagctaaataaagtatagcggcgtcgctgtgtgtgtttcgagtcagtcagtcagttaagtgcgtgccatggctggcatgctctgagtctgagatgatgatgatgcctgat

SEQ ID NO: 19049 - DNA, 364 bp, Zea mays
  unsure at all n locations
  Clone ID: LIB3151-040-Q1-K1-D8
ggtcttcagaccattagctttatctactccagagcgcagaagaacccgatcgacaccatgagggtgttgctcgttgccctcgctctcctggctctcgctgcgagcgccacctccacgcatacaagcggcggctgcggctgccagccaccgccgccggttcatctaccgccgccggtgcatctgccacctccggttcacctgccacctccggtgcatctcccaccgccggtccacctgccgccgccggtccacctgccaccgccggtccatgtgccgccgccggttcatctgccgccgccaccatgccactaccctactcaaccgccccggcctcagcctcatncccagccacacccatgcccgt

SEQ ID NO: 19050 - DNA, 334 bp, Zea mays
  Clone ID: LIB3151-040-Q1-K1-D9
gttctagatcgcgagggccgcccttttttttttttttttttttttctttttttttttttgtggcaagcaatcactattctaggattctttattcaaaattcaatccttgtatattactcacctaatctatattttctttttactgaaagggaggatcgattcccccaacgaatattacatgatcagttgcagggggcccaagattttcagtcttatgtccacccgcgcatttcttcctgtgctcggccttcggcttcttcttttcacatcttttcctgccacaacacgggccagttggcccgggcctcttcgatgccgaacagcgaccctttct

SEQ ID NO: 19051 - DNA, 396 bp, Zea mays
  Clone ID: LIB3151-040-Q1-K1-E10
cctgcttctagctcctcctccttccccagcgggtggccgcagcaatttgcaagcagaggaagaaagcttccgggcgtctcggcgcgaagaacagcgtcacgttctgacggaggagaacaggagaaggtctcgggtttcggccggctgcctgtatgagcgccaccatggcgtggtatccattaccgcagagcggaggcacaggcacgccgtcgggcggcggcgagctgttggacgaccagagcggcggctgggcgctctggagcttcggctcagctgacgacgaccacggcgctggcgtggtgcgcgcggagacgcgcgggagttcagacgagcggacggaggagggccggcccgcgccgccgcagcagcagcaggcaacagacgacatcttcatga

SEQ ID NO: 19052 - DNA, 373 bp, Zea mays
  Clone ID: LIB3151-040-Q1-K1-E11
attttgagcattcagaaacacaccaagcgaagcgcactagcaacgacctaacaacaatggctaccaagatattagccctccttgcgcttcttgccctttttgtgagcgcaacaaatgcgttcattattccacaatgctcacttgctcctagtgccattattccacagttcctcccaccagttacttcaatgggcttcgaacacctagctgtgcaagccaacatgcaacaacaagcgcttgcggcgagcgtcttacaacaaccaattgcccaattgcaacaacaatccttgccacatctaacaatacaagccatcacaacgcaacagcaacaacagttcctaccagcactgagccacctagccatggtgaaccc

SEQ ID NO: 19053 - DNA, 350 bp, Zea mays
  unsure at all n locations
  Clone ID: LIB3151-040-Q1-K1-E12
gaccattagctttatctactccagagcgcagaagaacccgatcgacaccatgagggtgttgctcgttgccctcgctctcctggctctcgctgcgagcgccacctccacgcatacaagcggcggctgcggctgccagccaccgccgccggttcatctaccgccgccggtgcatctgccacctccggttcacctgccacctccggtgcatctcccaccgccggtccacctgccgccgccggtccacctgccaccgccggtccatgtgccgccgccggttcatctgccgccgccaccatgccactaccctactcaaccgccccggcctcagcctcatncccagccacacccat

SEQ ID NO: 19054 - DNA, 394 bp, Zea mays
  Clone ID: LIB3151-040-Q1-K1-E3
tgtttcgctgctcgcccgatctcgcgctgccggcagcgatctgagatcgagcgaagctaagctttttcatcgagatggtgcttgtactgcatgctaacagtggtaacaaaaatgcattcaaaacactaattgccgcagaatacagcggtgtcaaggttgagttggtgaaggactttcaaatgggtgtctccaacaaaactccagagttcctcaagatgaaccctattgggaagattcctgtcctggagactcctgatggtcctgtttttgagagcaatgcaattgcaagatatgttactcgcttgaaggctgataacccactttatggatcttcactgattgattatgcccatattgagcaatggattgactttgctgcaacagagattgatgc

SEQ ID NO: 19055 - DNA, 443 bp, Zea mays
  unsure at all n locations
  Clone ID: LIB3151-040-Q1-K1-E4
tagcaacatagaaagcacaatagtgtaccaacaatggcagccaaaatattttgcctccttatgctccttggtctttctgcaagtgctgctacggcgaccattttcccgcaatgctcgcaagctcctatagcttcccttcttcccccgtacctctcaccagcggtgtcttcggtatgtgaaaacccaattcttcaaccctacaggatccaacaggcaatcgcagctggcatcttacctttatcacccttgttcctccaacaatcatcagccctattacaacagttacctttggtgcatttattggcacanaacatcagggcacaacaactacaacaacttgtgctagcaaaccttgctgcctactctcagcaacagcagtttcttccattaaccaactaggttcattgaactctgcttcttatttgcaacaacaacaactacca

SEQ ID NO: 19056 - DNA, 345 bp, Zea mays
  unsure at all n locations
  Clone ID: LIB3151-040-Q1-K1-E5
gctccctgcagccgccgcccaaaccctagcaacccgtcctccgccatggccgacgaccactactcctctaagaggaagtacgacgacccctcgccgccgccgcggcgcacggggttctcttcgggcccgccgcctgcctcgccgctcgcgggcggcgccccgtcgtacaacagcgtgccaccgccccccgatgagatccagctcgcgaagcagcgcgcgcaggagatcgcggcgcggatctttaacgccgcagaggccaagcgtnctcgcgtcgacaacggcgacgatgacagcggcggcttcggtgtaggcctgggcagcactggtggcggtggccgcatcggc

SEQ ID NO: 19057 - DNA, 207 bp, Zea mays
  unsure at all n locations
  Clone ID: LIB3151-040-Q1-K1-E6
aagcgaaacacattagcaacagcctaccaacaatggctaccaagatatgatccctccgtgcgcatcttgcgctntatgcgagcgcaacacatgcgtntattattccacaatgctcactggctccaagttccaatattacacagcttgtcgcatcagctacttcaatgggctttgaacacccagctgtgcaagcctataagctacaac

SEQ ID NO: 19058 - DNA, 357 bp, Zea mays
  Clone ID: LIB3151-040-Q1-K1-E7
gtttccgcttcctccctccacgtcgtctcggtcttcctctcctgtaatcccgtgacacgggtggctgcgacggcgaatcagatccctacccgtggcgttggtcgtgaattggcgccgtctccccctgccagccggattccctgctttgttctcaggcaacattttgttcactagtgtggtagctttgttgattggagtgcgcaatgggaggctgtgcgggaaaggtacgtcgtgatgacgaagaaaagcttgattttaaaggtggaaatgttcatattataacaagcaatgagggctgggaccagaagattgcagaagcaaacagagatgggaaaactggtggtgcaaatttcagcg

SEQ ID NO: 19059 - DNA, 312 bp, Zea mays
  Clone ID: LIB3151-040-Q1-K1-E8
cgaccaccagcaagggtcaggatcgaaagttcaccaatatgcaaagcagttcctttcatctgatagcaatagcggccaacaaaaggagtagctagctagtgtccttgcgaagtgcaagcagcggagtgggcgttatttcctgatcaaataattttgcctatggcacattctgtggaaactttgacggatctttgcctgcttttctatgcgatgtaagctgctgaaacctgcactcatcaaatgttgtgtatgcagatggtaccatgcatttgtttccctgaatggcttcaaatgaaacgaatggtttttttt

SEQ ID NO: 19060 - DNA, 374 bp, Zea mays
  Clone ID: LIB3151-040-Q1-K1-E9
atctgcgtacacggtctccctcttcctgtcagtagtagagtgagagtgaggcagcgagtgggagacaaggggaaatggggaagggagcgcaagggagcgatgcggcggcggcgggcggcgaggtggaggagaacatggcggcgtggctggttgccaagaacaccctcaagatcatgcccttcaagctcccgcccgtcggcccttatgatgtccgcgtgcgcatgaaggcagtggggatttgcggcagcgatgtgcactacctaagggagatgcgcatcgcgcacttcgtggtgaaggagccgatggtgatcgggcacgagtgcgcgggcgtggtcgaggaggtgggcgccggcgtgacgcacctgtccgtgggc

SEQ ID NO: 19061 - DNA, 318 bp, Zea mays
  unsure at all n locations
  Clone ID: LIB3151-040-Q1-K1-F10
gggtcttcagaccattagctttatctactccagagcgcagaagaacccgatcgacaccatgagggtgttgctcgttgccctcgctctcctggctctcgctgcgagcgccacctccacgcatacaagcggcggctgcggctgccagccaccgccgccggttcatctaccgccgccggtgcatctgccacctccggttcacctgccacctccggtgcatctcccaccgccggtccacctgccgccgccggtccacctgccaccgncggtccatgtgccgccgccggttcatctgccgncgncaccatgccactaccctac

SEQ ID NO: 19062 - DNA, 368 bp, Zea mays
  Clone ID: LIB3151-040-Q1-K1-F11
aatattttgagcattcagaaacacaccaagcgaagcacattagcaacaacctaacaacaatggctaccaagatattatccctccttgcgcttcttgcgctttttgcgagcgcaacaaatgcgttcattattccacaatgctcacttgctccaagttccattattacacagttcctcccaccagttacttcaatgggcttcgaacacccagctgtgcaagcctataggctacaacaagcaattgcggcgagcgtcttacaacaaccaatttcccagttgcaacaacaatccttggcacatctaacaatacaaaccatcgcaacgcaacagcaacaacaattcctaccagcactgagccacctagccatg

SEQ ID NO: 19063 - DNA, 255 bp, Zea mays
  Clone ID: LIB3151-040-Q1-K1-F12
cacgaattcaccaaccaaactccactgtctccaactctccatcgcgtctgctacgcctctcctgcaggacgaccaatggcttccaggaagttcttcgtgggtggcaactggaaatgcaacggtactggcgaggacgtgaagaagatcgtcaccgtgctcaaccaagccgaggtgccctctgaagacgtcgtcgaggtggtggtgagtccgcctttcgtttttctgcagcaagtcaaggggctgctgcggctggac

SEQ ID NO: 19064 - DNA, 176 bp, Zea mays
  Clone ID: LIB3151-040-Q1-K1-F3
cagaccattagctttatctactccagagcgcagaagaacccgatcgacaccatgagggtgttgctcgttgccctcgctctcctggctctcgctgcgagcgccacctccacgcatacaagcggcggctgcggctgccagccaccgccgccggttcatctaccgccgccggtgcatct

SEQ ID NO: 19065 - DNA, 382 bp, Zea mays
  Clone ID: LIB3151-040-Q1-K1-F4
cagaaacacaccaagcgaagctacctagcaacgacttaacaacaatggctaccaagatattagccctccttgcgcttcttgccctttttgtgagcgcaacaaatgcgttcattattccacaatgctcacttgctcctagtgccattataccacagttcctccgaccagttacttcaatgggcttcgaacacctagctgtgcaagcctacaggctacaacaagcgcttgcggcgagcgtcttacaacaaccaattaaccaattgcaacaacaatccttggcacatctaaccatacaaaccatcgcaacacaacagcaacaacagttcctaccagcactgagccaactagatgtggtgaaccctgtcgcctacttgcaacagca

SEQ ID NO: 19066 - DNA, 369 bp, Zea mays
  unsure at all n locations
  Clone ID: LIB3151-040-Q1-K1-F5
tctgcgtacacggtctccctcttcctgtcagtagtagagtgagagtgaggcancgagtgggagacaaggggaaatggggaagggagcgcaagggagcgatgcggcggcggcgggcggcgaggtggaggagaacatggcggcgtggctggttgccaagaacaccctcaagatcatgcccttcaagctcccgcccgtcggcccttatgatgtccgcgtgcgcatgaaggcagtggggatttgcggcagcgatgtgcactacctaagggagatgcgcatcgcgcacttcgtggtgaaggagccgatggtgatcgggcacgagtgcgcgggcgtggtcgaggaggtggngcgccgcgtgacgcacctgtccgt

SEQ ID NO: 19067 - DNA, 358 bp, Zea mays
  Clone ID: LIB3151-040-Q1-K1-F6
cagaccattagctttatctactccagagcgcagaagaacccgatcgacaccatgagggtgttgctcgttgccctcgctctcctggctctcgctgcgagcgccacctccacgcatacaagcggcggctgcggctgccagccaccgccgccggttcatctaccgccgccggtgcatctgccacctccggttcacctgccacctccggtgcatctcccaccgccggtccacctgccgccgccggtccacctgccaccgccggtccatgtgccgccgccggttcatctgccgccgccaccatgccactaccctactcaaccgccccggcctcagcctcatccccagccacacccatgcccgt

SEQ ID NO: 19068 - DNA, 348 bp, Zea mays
  Clone ID: LIB3151-040-Q1-K1-F7
gcgccggcgggctgtacccctacgcggagtacctgaggcagccgcagtgcagcccgctggcggcggcgccctactacgccgggtgtgggcagacgagcgccatgtaccagccgctccggcaacagtgctgccagcagcagatgaggatgatggacgtgcagtccgtcgcgcagcagctgcagatgatgatgcagcttgagcgtgccgctgccgccagcagcagcctgtacgagccagctctgatgcagcagcagcagcagctgctggcagcccagggtctcaaccccatggccatgatgatggcgcagaacatgccggccatgggtggactctaccagtaccagtacc

SEQ ID NO: 19069 - DNA, 351 bp, Zea mays
  Clone ID: LIB3151-040-Q1-K1-F8
attagctttatctactccagagcgcagaagaacccgatcgacaccatgagggtgttgctcgttgccctcgctctcctggctctcgctgcgagcgccacctccacgcatacaagcggcggctgcggctgccagccaccgccgccggttcatctaccgccgccggtgcatctgccacctccggttcacctgccacctccggtgcatctcccaccgccggtccacctgccgccgccggtccacctgccaccgccggtccatgtgccgccgccggttcatctgccgccgccaccatgccactaccctactcaaccgccccggcctcagcctcatccccagccacacccatgcccg

SEQ ID NO: 19070 - DNA, 362 bp, Zea mays
  unsure at all n locations
  Clone ID: LIB3151-040-Q1-K1-F9
attgagaccaacaagcaacatagaaagtggaatccagtagcaacaatagagcaacaatggcgaccaagatattttccctccttatgctccttgctctttctgcatgtgttgctaacgcgacaattttccctcaatgctcacaagctcctatagcttcccttcttcccccataccttccatcaatgatagcttcagtatgtgaaaacccagctcttcaaccctataggctccaacaagcaatcgcagcaagcaacatacctttatcacccttgtttcaacaatcgccagccctatctttggtgcagtcattggtacaaaccatcanggcacagcagctgcagcaactcgtgctacctgtgatc

SEQ ID NO: 19071 - DNA, 401 bp, Zea mays
  Clone ID: LIB3151-040-Q1-K1-G1
gccccattttgatgcagagttgaattcggaactgggagcactgcaactggtgctggacctgcacatgatgttatcatgactgagtgtgcccatgattaacacgctcatgacgttagctactgagtactgctatttctcttgcatcggtgtccattacggcgcttagctgaacttctatctttatttgaggaaggagaatcatcacctgcaatgacattacatgacttcatgggacaacatgtgtataccgagcaagtagctgtatatggtgcaccatggacaacttaatgcttgccatatgtggcatactcgcatgctgttgcaccactgacatcgtcaagctaccatgtccctgagagaaccactgatcgtactgcataccatgatcataggaaccccat

SEQ ID NO: 19072 - DNA, 339 bp, Zea mays
  Clone ID: LIB3151-040-Q1-K1-G10
gcaacatagaaagtggaatccagtagcaacaatagagcaacaatggcgaccaagatattttccctccttatgctccttgctctttctgcatgtgttgctaacgcgacaattttccctcaatgctcacaagctcctatagcttcccttcttcccccataccttccatcaatgatagcttcagtatgtgaaaacccagctcttcaaccctataggctccaacaagcaatcgcagcaagcaacatacctttatcacccttgtttcaacaatcgccagccctatctttggtgcagtcattggtacaaaccatcagggcacagcagctgcagcaactcgtgcta

SEQ ID NO: 19073 - DNA, 395 bp, Zea mays
  unsure at all n locations
  Clone ID: LIB3151-040-Q1-K1-G11
attttgagcattcagaaacacaccaagcgaagcgcactagcaacaacctaacaacaatggctaccaagatattatccctccttgcgcttcttgcgctttttgcgagcgcaacaaatgcgtccattattccacaatgctcacttgctcctagttccattattccacagttcctcccaccagttacttcaatggccttcgaacacccagctgtgcaagcctataggctacaacaagcgattgcggcgagcgtcttacaacaaccaattgcccaattgcaacaacaatccttggcacatctaacaatacanaccatcgcaacgcaacagcaacaacagttcctaccagcactgagccacctagccatggtgaaccctgtcgcctacttgcaacagcag

SEQ ID NO: 19074 - DNA, 164 bp, Zea mays
  Clone ID: LIB3151-040-Q1-K1-G12
gcgccatcggcacgaccaggcctgtccagggatggggcggagaggggagccctactacgtcgaagcggcgccgccggtggacgtgaacaagaacacagagtggttcatgtacccgggcgtctggaccacctaatcctcctgtcttttccttggctctgtcttcg

SEQ ID NO: 19075 - DNA, 381 bp, Zea mays
  Clone ID: LIB3151-040-Q1-K1-G3
caactagcaacatagaaagcacaatagtgtaccaacaatggcagccaaaatattttgcctccttatgctccttggtatttctgcaagtgctgctacggcgaccattttcccgcaatgctcacaagctcctatagcttcccttcttcccccgtacctctcaccagcggtgtcttcggtatgtgaaaacccaattcttcaaccctacaggatccaacaggcaatcgcagctggcatcttacctttatcacccttgttcctccaacaatcatcagccctattacagcagttacctttggtgcatttattggcacaaaacatcagggcacaacaactacaacaacttgtgctagcaaaccttgctgcctactctcagcaacagca

SEQ ID NO: 19076 - DNA, 420 bp, Zea mays
  Clone ID: LIB3151-040-Q1-K1-G5
gaccgatcgatcgccacagccaacaccacccgccgaggcgacgcgacagccgccaggaggaaggaataaactcactgccagccagtgaagggggagaagtgtactgctccgtcgaccagtgcgcgcaccgcccggcagggctgctcatctcgtcgacgaccagtggattaatcggcatggcggctctggccacgtcgcagctcgtcgcaacgcccgccggcctgggcgtcccggacgcgtccacgttccgccgcggcgccgcgcagggcctgaggggggcccgggcgtcggcggcggcggacacgctcagcatgcggaccagcgcgcgcgcggcgcccaggcaccagcagcaggcgcgccgcgggggcaagttcccgtcgctcgtcgtgtgcgccaacgccggcatgaacgtcgtcttcg

SEQ ID NO: 19077 - DNA, 165 bp, Zea mays
  Clone ID: LIB3151-040-Q1-K1-G6
ccaacaagcaacatagaaagtggaatccagtagcaacaatagagcaacaatggagaccaagatattttccctccttatgctccttgctctttctacatgtgttgctaacgcgacaattttccctcaatgctcacaagctcctatagcttccctttttcccccata

SEQ ID NO: 19078 - DNA, 381 bp, Zea mays
  Clone ID: LIB3151-040-Q1-K1-G8
ccaactagcaacatagaaagcacaatagtgtaccaacaatggcagccaaaatattttgcttccttatgctccttggtctttctgcaagtgctgctaccgcaaccattttcccacaatgctcacaagctcctatagcttcctttcttcccccatacctctcaccagcggtgtcttcagtatgtgaaaacccaattcttcaaccctacaggatccaacaggcaatcgcagcaggcatcttacctttatcacccttgttcctccaacaaccgtcagccctattacagcagttacctttggtgcatttgttggcacaaaacatcaaggcacaacaactacaacaacttgtgctaagaaaccttgctgcctactctcagcaacagc

SEQ ID NO: 19079 - DNA, 138 bp, Zea mays
  unsure at all n locations
  Clone ID: LIB3151-040-Q1-K1-H10
ccgtccgagaaaccattnnngctttatctaaactccagagnncgcagaagaaacnccgcattccgacaccanntgagggtggttgcgtnncgttgcccnttcgctctccctgnngctctcgctttgcgagcccgccac

SEQ ID NO: 19080 - DNA, 123 bp, Zea mays
  Clone ID: LIB3151-040-Q1-K1-H11
gacatgaacgacgttatgccacatgcctaccaagagctagtcgacaactgcaggatactggcgagccactctaaagaaatgcatgacatccaatctacagatcacgagagcaggttgcggatg

SEQ ID NO: 19081 - DNA, 209 bp, Zea mays
  unsure at all n locations
  Clone ID: LIB3151-040-Q1-K1-H2
cagaccattagctttatctactccagagcgcagaagaacccgatcgacaccatgagggtgttgctcgttgccctcgctctcctggctctcgctgcgagcgccaccttcacgcatacaagcggcggctgcggctgccagccaccgccgccggttcatctaccgccgccggtgcatctgccacctncggttcacctgccacctccggtgca

SEQ ID NO: 19082 - DNA, 365 bp, Zea mays
  Clone ID: LIB3151-040-Q1-K1-H3
attttgagcattcagaaacacaccaggcgaacggcactaccaccgacctaacaccaatggctaccaaaatattacccttccttgcgctttttgcctttttgtgagcccacaaaagccttcattattcacatggctactgctcctaggcatattcacagtcctccacagtactcatggcttgacacctactggcagccactgacacaggctgcggaggttacacaccatgccaatgacacatctgccattacatcagcatacacgacacacacagtctacacctggcactacctgggaactgcgctatgagacagtgtgctcaccactgttgggacgagtgaacacacacacgtcaaatttgcacc

SEQ ID NO: 19083 - DNA, 389 bp, Zea mays
  Clone ID: LIB3151-040-Q1-K1-H4
gacgtcagcctagcaattagctcatcgactccagattggagaactcgacaccatgaaggtgctgatcgttgcccttgctctcctggcgctcgctgcgagcgccgcctccagtacaagcggcggctgtggctgccagacaccaccgtttcatctaccgcctccgttctatatgccgcctccgttctatctgccgccgcagcagcagccgcagccatggcaataccccactcaaccaccgcagctaagcccgtgccagcagttcggatcctgcggcgtcggcagcgtcggcagcccgttcctgggccagtgcgtcgagttcctgaggcaccagtgcagcccggcggcgacgccctacggctcgccacagtgccaggcgctgcagcagcagt

SEQ ID NO: 19084 - DNA, 445 bp, Zea mays
  Clone ID: LIB3151-040-Q1-K1-H5
attcagaaacacaccaagcgaagcgcactaacaacaaccttaccaccatggctaccaagatattagcccttcttgcgcttcttgcccttttagtgagcgcaacaaatgcgttcattattccacagtgctcacttgctcctagtgccattattccacagttcctcccaccagttacttcaatgggcttcgaacatccagccgtgcaagcctacaggctacaactagcgcttgcggcgagcgtcttacaacaaccaattgcccaattgcaacaacaatccttggcacatctaaacctacaaaccatcgcaacgcaacagcaacaacagtttctgccatcactgagccacctagccgtggtgaaccctgtcgcctacttgcaacagcagctacttgcatccaacccacttgctctggcgaacgtagctgcataccagcaacaacaacg

SEQ ID NO: 19085 - DNA, 148 bp, Zea mays
  unsure at all n locations
  Clone ID: LIB3151-040-Q1-K1-H6
gtcgatttctaattctcctcgcgagcccaaaccctaaacctaaaccttttacccgccgncgccgccaccaccagcactgtcacttcgtcaccaccgtgccgaagccccctcccagcgccatcgactttatctcggattgaagcaatgt

SEQ ID NO: 19086 - DNA, 148 bp, Zea mays
  Clone ID: LIB3151-040-Q1-K1-H7
gactgactactgtagtaccatagatcgaacaacttggagctgcaactcaaaaagagagatttgtgctttttatggcccgtggtctgatagatagagagagaaccatgacggtggaccatcagtgctcacatgcatgatagagatgaac

SEQ ID NO: 19087 - DNA, 355 bp, Zea mays
  Clone ID: LIB3151-040-Q1-K1-H8
agaccattagctttatctactccagagcgcagaagaacccgatcgacaccatgagggtgttgctcgttgccctcgctctcctggctctcgctgcgagcgccacctccacgcatacaagcggcggctgcggctgccagccaccgccgccggttcatctaccgccgccggtgcatctgccacctccggttcacctgccacctccggtgcatctcccaccgccggtccacctgccgccgccggtccacctgccaccgccggtccatgtgccgccgccggttcatctgccgccgccaccatgccactaccctactcaaccgccccggcctcagcctcatccccagccacacccatgccc

SEQ ID NO: 19088 - DNA, 360 bp, Zea mays
  Clone ID: LIB3151-040-Q1-K1-H9
agaccattaacttaatctactacagagcgcacaataacccgatcgacaccaacaagagcggtggggttgcccacgctcgtggggctctagatacgagcgccacctccacgcatacaaccggagggtgcagatgccagcaaacgacgccggcgcatttatcaccgatgtcgcaccagccatctctaggtgacctgccacatcccgtgcatcttccaccgccggaccaactgccgccggcggtcaacatgctataaccgtgccatgtgccgacggcggatcatctgatgacgacaccatgccactaccccattaaagcgcacaagactcaggagcataaccagtcacacatattcccgaacc

SEQ ID NO: 19089 - DNA, 104 bp, Zea mays
  Clone ID: LIB3151-041-Q1-K1-A1
gtccgttcaattcttggggccgttgccgaatctcctctacaggtaaggaggagagaaagagggcgaaatggggaacacaacaacgtcatccccaaagggcactt

SEQ ID NO: 19090 - DNA, 422 bp, Zea mays
  unsure at all n locations
  Clone ID: LIB3151-041-Q1-K1-A10
ctatcagtaccatcaatcatcattcatcttattagtataggcaccaaatcaaatctgcgggggcaattatctaactccaaaaaccatgaagctggtgcttgtggttcttgctttcattgctttagtatcaagtgtttcttgtacacagacaggcggctgcagctgtggtcaacaacaaagccatgagcagcaacatcatccacaacaacatcatccacaaaaacaacaacatcaaccaccaccacaacatcaccagcagcagcaacaccaacaacaacaagttcacatgcaaccncnanancatttgcaccaacaagaagttcatgttcaacaacaacaacaacaaccgtagtaccatcatacacatcaacaacagccccaacaacaacatcaatgtgaaggccaacaacaacattcccaac

SEQ ID NO: 19091 - DNA, 222 bp, Zea mays
  Clone ID: LIB3151-041-Q1-K1-A11
cgtccgattccgtcgcccaccgtcgattagattcaaacacaccagcgaatcgcactacaacacctacacatggcgccagaattaccctcttgcgcttttgcctttatgagcgcacaagcgtcattattccacaggctacttgtcctatgccattattcacagtcgtccaccagtctaaatgggcttctaacatccaaccgtgcagcctacaagctcaactag

SEQ ID NO: 19092 - DNA, 340 bp, Zea mays
  Clone ID: LIB3151-041-Q1-K1-A3
tccttggcacgttccatgcggtggtgtgtgctacggagatggaaatttggtgttcattgccaatgattggcacactgcactcctgcctgtttatctgaaggcatattacagagaccatgggttaatgcagtacactcgctccgttctcgtcatacataacatcgcccaccagggccgtggtcctgtagatgaattcccgtacatggacttgcctgaacactaccttcaacatttcgagctgtacgatcccgtcggtggcgagcacgccaacatctttgccgcgggtctgaagatggcagaccgggtggtgactgtcagccgcggctacctgtgggagctg

SEQ ID NO: 19093 - DNA, 366 bp, Zea mays
  Clone ID: LIB3151-041-Q1-K1-A4
gcacgggcacggggacgcgagcgtgtcacgtgcgcaccaacattccgccccgaattcggcatcccgtttccagcaacctaaaagaaaaggaaacagaaaaaaaaaatcacaggagaaaccgatttcccccttttctttattttcttcgtcctcttcgtctctactcgccgcccagtcacctcgaatcccttcgatccaatctccaaaccctaggcaatccaacatcaaagtattaggtgcccccttcctcaaaccgcggcgttgcggccatggcccacggcggcggcgccgggaaggcgaaggtgacgccgaacctggcggtggacggcgagggcacgcgcacgctcaaccgcactgtgctgcagc

SEQ ID NO: 19094 - DNA, 353 bp, Zea mays
  Clone ID: LIB3151-041-Q1-K1-A5
tactgtttataacatggaaaatgccttactgaatgatgaaactcggcaacctctatctagaaaagtgccaattccttcatccagaataaatccgtacagaatggtcattgtgctacgtttggctgttctatgcatattcttgcgctaccgtatcacacatcctgtgaacaatgcatatccactgtggcttttatccgtcatatgtgagatctggtttgctttgtcctggattttggatcagttcccaaagtggtccccaatcaaccgtgaaacataccttgatagactggctttaaggtatgaccgagaaggtgaaccatctcaattagctcctgttgatatttttgtcagta

SEQ ID NO: 19095 - DNA, 378 bp, Zea mays
  Clone ID: LIB3151-041-Q1-K1-A6
caaaaaccggctggggtatgcagagatcgcacacatggcggcggcaaccgtgacatgcaactgagggccattgtgctcaaacgcgccggcgccccgcaggctctcctcgctctacaggtaggtgcacacgagccggttcctgcacacgctgtccctcccctgcgtgctgcggtccaacttattggtcgtcgaccgccccgccagctgcgccgcgggtaaccccgatgagatcgccaagctcttccccaacctgttcggccagccctcggcgtcgctggtgccttcggccgagcccgcggctaccaggccgctaaaggtcggtgtcctgctctctggtggacaggcgccccgcgggcacaatgtcatctggggcatctt

SEQ ID NO: 19096 - DNA, 267 bp, Zea mays
  Clone ID: LIB3151-041-Q1-K1-A7
gccgccgccgctgccaacgccgcctgctgccgcagccgccatgggggcgtacaagtatgtgtcggaactatggaggaggaagcagtcggacgtgatgcgcttcgtgcagcgcgtgcgctgctgggagtacaggcagcagccgtccatcgtccgcctcaccaggcccacccgccccgacaaggcccgtcgtctcggctacaaggccaagcagggatatgttgtctaccgtgtccgtgtgaagcgtggtggcaggaagaggcctgtgcc

SEQ ID NO: 19097 - DNA, 330 bp, Zea mays
  unsure at all n locations
  Clone ID: LIB3151-041-Q1-K1-A8
cagcgctcagtcaactagccatggtgaaccctgtcgcctaccaacaacaacaaccatgtgagttatgtggatctcaacaagctactcaaagtgcggtggcaatcttgacagcagcacaatacctaccatcaatgtgcggcttgtaccactcatactaccaaaatattccatgcagcagaaaggacattaggggggtttgcaatggaagaatggtgtctacctagccgttttcttcctataccggggttaagcattaaaggcccttcctttaaaaaattgccggggtctgaagatgngccaccgggtggtgactgtcaattcccagggggg

SEQ ID NO: 19098 - DNA, 380 bp, Zea mays
  Clone ID: LIB3151-041-Q1-K1-A9
gaccaactagcaacatagaaagcacaatagtgtaccaacaatggcagccaaaatattttgcttccttatgctccttggtctttctgcaagtgctgctaccgcaaccattttcccacaatgctcacaagctcctatagcttcctttcttcccccatacctctcaccagcggtgtcttcagtatgtgaaaacccaattcttcaaccctacaggatccaacaggcaatcgcagcaggcatcttacctttatcacccttgttcctccaacaaccgtcagccctattacagcagttacctttggtgcatttgttggcacaaaacatcaaagcacaacaactacaacaacttgtgctaagaaaccttgctgcctactctcaacaac

SEQ ID NO: 19099 - DNA, 354 bp, Zea mays
  Clone ID: LIB3151-041-Q1-K1-B1
caccaagcgaagcgcactagcaacaacctaacaacaatggctaccaagatattagccctccttgcgcttcttgcccttttagtgagcgcaacaaatgcgttcattattccacagtgctcacttgctcctagtgccattattccacagttcctcccaccagttacttcaatgggcttcgaacatccagccgtgcaagcctacaggctacaactagcgcttgcggcgagcgtcttacaacaaccaattgcccaattgcaacaacaatccttggcacatctaaacctacaaaccatcgcaacgcaacagcaacaacagtttctgccatcactgagccacctagccgtggtgaaccct

SEQ ID NO: 19100 - DNA, 372 bp, Zea mays
  Clone ID: LIB3151-041-Q1-K1-B11
gttggcttctcctccccctccggttcgggttcgggttcgtgaggttctccggggttcggtttcgtgggtgagcggatcgagatggcggcgtcggatgttgagtaccgctgcttcgtcggcggcctcgcctgggccacggacgaccactcccttcacaacgccttcagcacctacggcgaggtcctcgagtccaagatcatcctcgatcgggagacgcagaggtcccgcggcttcggcttcgtcaccttctccacggaggaggcgatgcggaacgccatcgagggcatgaacggcaaggagctggacggccgcaacatcaccgtcaacgaggcccattcccgcggcggccgtggaggcggcggcggcggcggg

SEQ ID NO: 19101 - DNA, 412 bp, Zea mays
  Clone ID: LIB3151-041-Q1-K1-B12
gagaggatcgtcgaacagaacagcatgaagatggtcatcgttctcgtcgtgtgcctggctctgtcagctgccagcgcctctgcaatgcagatgccctgcccctgcgcggggctgcagggcttgtacggcgctggcgccggcctgacgacgatgatgggcgccggcgggctgtacccctacgcggagtacctgaggcagccgcagtgcagcccgctggcggcggcgccctactacgccgggtgtgggcagacgagcgccatgtaccagccgctccggcaacagtgctgccagcagcagatgaggatgatggacgtgcagtccgtcgcgcagcagctgcagatgatgatgcagcttgagcgtgccgctgccgccagcagcagcctgtacgagccagctctgatgcaacaacagc

SEQ ID NO: 19102 - DNA, 440 bp, Zea mays
  unsure at all n locations
  Clone ID: LIB3151-041-Q1-K1-B2
gcgccatggatcgcgccgaccccgcgcggggccgccttgccgtgctctcctcccacctccgtggtgcangggccgaggaggcggcggggctggagaggtcgccggtatccgcgccggcgcccgggccccgcgccggcgcgcttgccgtggtggacgggaggaccgggaagcggcacgaggtcaaggtctccgaagacggcaccgtgcgcgccaccgacttcaagaagattaccactggaaaggacgacaagggtcttaagatttatgatcctggttaccttaacactgcccctgttcgctcgtccatctgctacatcgatggagatgagggaatccttcgctataggggttatccaatcgaagaattggctgaaagcagctcgtttgttgaggtggcctaccttttaatgtatgggaacttgcctactcagagtcaattg

SEQ ID NO: 19103 - DNA, 404 bp, Zea mays
  Clone ID: LIB3151-041-Q1-K1-B3
ggacgtcagcctagcaattagctcatcgactccagattggagaactcgacaccatgaaggtgctgatcgttgcccttgctctcctggcgctcgctgcgagcgccgcctccagtacaagcggcggctgtggctgccagacaccaccgtttcatctaccgcctccgttctatatgccgcctccgttctatctgccgccgcagcagcagccgcagccatggcaataccccactcaaccaccgcagctaagcccgtgccagcagttcggatcctgcggcgtcggcagcgtcggcagcccgttcctgggccagtgcgtcgagttcctgaggcaccagtgcagcccggcggcgacgccctacggctcgccacagtgccaggcgctgcagcagcagtgctgccaccagatc

SEQ ID NO: 19104 - DNA, 368 bp, Zea mays
  unsure at all n locations
  Clone ID: LIB3151-041-Q1-K1-B4
cgcccctcctcccctccgccgctccccccagtccccacctcacctcgtcaaccccctccttggatagggttagagttcccccggcacgagcgcgagccatggcctccttcacctgctcccaggtcggcgctgcggcagcgggcggagcctcgcccttcctcggctaccggcggcggagcggccctgggggcgccattccgtcgagctccctcttcgtgggccggcggttggcggcggtgcagatgcgcgcgccctctcgcggggtccgcgggggctccgcgctgcgggtcacgtgcgagaaggtgggggggatcgacctgngcaccaccaactcccgggtcgccgccatggagggcggcaagccgacc

SEQ ID NO: 19105 - DNA, 354 bp, Zea mays
  unsure at all n locations
  Clone ID: LIB3151-041-Q1-K1-B5
cgccctccccttttctcctccgccctttcttgtgaccgccgccgcgggccctagcccgccgttccctctccggcgccccgctcccgcacccgcaccggatcagtccgggccgcgtggtcgcccccacctaccgcctcgggtccactcgctcgcggttgcgtgtcccgcggggtggcccctcgggcctcggcagctcccggtttcgaatggggctctcgtcggccgccactggcgacggggtgcagctctgcgtgttcgacctccagagggggcagcacgagggccaggagctcgacaagatcctctacttctaccccgacgactgccccatnctgctccagctctctgtcatcg

SEQ ID NO: 19106 - DNA, 437 bp, Zea mays
  Clone ID: LIB3151-041-Q1-K1-B6
agaaagcacaatagtgtaccaacaatggcagccaaaatattttgcttccttatgctccttggtctttctgcaagtgttgctaccgcaaccattttcccacaatgctcacaagctcctatagcttcccttcttcccccatacctctcaccagcggtgtcttcaatgtgtgaaaacccaattgttcaaccctacaggatccaacaggcaatcgcaacaggcatcttaccattatcacccttgttcctccaacaaccgtcagccctattacagcagttacctttggtccatttggtggcacaaaacatcagggcacaacaactacaacaacttgtgctagcaaaccttgctgcatactctcagcaacatcagtttcttccattcaaccaactggctgcattgaactctgctgcttatttgcaacaacaattaccattcaa

SEQ ID NO: 19107 - DNA, 437 bp, Zea mays
  Clone ID: LIB3151-041-Q1-K1-B7
ggacgtcagcctagcaattagctcatcgactccagattggagaactcgacaccatgaaggtgctgatcgttgcccttgctctcctggcgctcgctgcgagcgccgcctccagtacaagcggcggctgtggctgccagacaccaccgtttcatctaccgcctccgttctatatgccgcctccgttctatctgccgccgcagcagcagccgcagccatggcaataccccactcaaccaccgcagctaagcccgtgccagcagttcggatcctgcggcgtcggcagcgtcggcagcccgttcctgggccagtgcgtcgagttcctgaggcaccagtgcagcccggcggcgacgccctacggctcgccacagtgccaggcgctgcagcagcagtgctgccaccagatcaggcaggtggagccgctgcaccggtaccaggcg

SEQ ID NO: 19108 - DNA, 437 bp, Zea mays
  Clone ID: LIB3151-041-Q1-K1-B8
gctttatctactccagagcgcagaagaacccgatcgacaccatgagggtgttgctcgttgccctcgctctcctggctctcgctgcgagcgccacctccacgcatacaagcggcggctgcggctgccagccaccgccgccggttcatctaccgccgccggtgcatctgccacctccggttcacctgccacctccggtgcatctcccaccgccggtccacctgccgccgccggtccacctgccaccgccggtccatgtgccgccgccggttcatctgccgccgccaccatgccactaccctactcaaccgccccggcctcagcctcatccccagccacacccatgcccgtgccaacagccgcatccaagcccgtgccagctgcagggaacctgcggcgttggcagcaccccgatcctgggccagtgcgtcgagttcctg

SEQ ID NO: 19109 - DNA, 439 bp, Zea mays
  Clone ID: LIB3151-041-Q1-K1-B9
ccaatccagatcagcaaagcggcagtgcgtagagaggatcgtcgaacagaacagcatgaagatggtcatcgttctcgtcgtgtgcctggctctgtcagctgccagcgcctctgcaatgcagatgccctgcccctgcgcggggctgcagggcttgtacggcgctggcgccggcctgacgacgatgatgggcgccggcgggctgtacccctacgcggagtacctgaggcagccgcagtgcagcccgctggcggcggcgccctactacgccgggtgtgggcagacgagcgccatgtaccagccgctccggcaacagtgctgccagcagcagatgaggatgatggacgtgcagtccgtcgcgcagcagctgcagatgatgatgcagcttgagcgtgccgctgccgccagcagcagcctgtacgagccagctctgatgcagcag

SEQ ID NO: 19110 - DNA, 364 bp, Zea mays
  Clone ID: LIB3151-041-Q1-K1-C1
ccaacaagcaacatagaaagtggaatccagtagcaacaatagagcaacaatggcgaccaagatattttccctccttatgctccttgctctttctgcatgtgttgctaacgcgacaattttccctcaatgctcacaagctcctatagcttcccttcttcccccataccttccatcaatgatagcttcagtatgtgaaaacccagctcttcaaccctataggctccaacaagcaatcgcagcaagcaacatacctttatcacccttgtttcaacaatcgccagccctatctttggtgcagtcattggtacaaaccatcagggcacagcagctgcagcaactcgtgctacctgtgatcaaccaagta

SEQ ID NO: 19111 - DNA, 359 bp, Zea mays
  Clone ID: LIB3151-041-Q1-K1-C10
aaacaatctgaaggatgtattgattatttctaggaaacacatgccggtatgagggcaccattgttgagtacatctcatatgtaatctaaaagatggcacctccaacgatgggttgctgcaaggcagggttcatcaaagagaactggttgtatggcagcaattgttgctgctgcaggaagttagcgaccaatgggttagccactgctagtggattaagtaactgttgtcgctgttgtaggtacacagcatagttcgacacagccagttggttgaatggaagcaactgttgcaagtaggcagtagggtttgccacaactagctgagtcagaactggtacaatttgttgcagcaacctgtgt

SEQ ID NO: 19112 - DNA, 410 bp, Zea mays
  Clone ID: LIB3151-041-Q1-K1-C11
agaccaactagcaacatagaaagcacaatagtgtaccaacaatggcagccaaaatattttgcttccttatgctccttggtctttctgcaagtgttgctaccgcaaccattttcccacaatgctcacaagctcctatagctttccttcttcccccatacctctcaccagcggtgtcttcaatgtgtgaaaacccaattgttcaaccctacaggatccaacaggcaatcgcaacaggcatcttaccattatcacccttgttccttcaacaaccgtcagccctattacagcagttacctttggtccatttggtggcacaaaacatcatggcacaacatctacaacaacttgtgctagcaaaccttgctgcatactctcagcaacatcagtttcttccattcaaccaactggct

SEQ ID NO: 19113 - DNA, 351 bp, Zea mays
  Clone ID: LIB3151-041-Q1-K1-C12
ccagtagcaacaatagagcaacaatggagaccaagatattttccctccttatgctccttgctctttctacatgtgttgctaacgcgacaattttccctcaatgctcacaagctcctatagcttccctttttcccccataccttccatcaattatagcttcagtatgtgaaaacccagctcttcaaccatataggcttcaacaagcaatcgcagcaagcaacatacctttatcgcccttgttgtgtcaacaatcgccagccctatctttggtgcagtcattggtacaaaccatcagggcacaacagctgcagcaactcgtgctacctgtgatcaaccaagtagctctggcaa

SEQ ID NO: 19114 - DNA, 397 bp, Zea mays
  Clone ID: LIB3151-041-Q1-K1-C2
ttcaacggactttagccgaccgcccccgcccaccgacatcggaagccctagctgctgcaggaactgccctgccggcccgccgctcctccgctcgaagcgtctccggtttcttggatgcaccggctgctccgatggctgcccttccgcccgccgcagaggaccccgacgccgtggagatccgtgaagtttgggcgagcaacctggaggaggagttcgcagtgatccgcgccgtcgtcgacgtgtacccgtacgtggccatggacacggagtttcccggcttcgtggtgacgccgagcgccgagtaccggttcacctgcgaccgcaactacgccgccctcgagggcaacgtcaacgtgctcaagctcatccagcttggcctcaccctctccaacggggc

SEQ ID NO: 19115 - DNA, 344 bp, Zea mays
  Clone ID: LIB3151-041-Q1-K1-C3
ctagttctagatcgtgagcgggcgcccttttttcttggtgcggacgattagatcaagatccagctctatgaatatattgactatttttgggaaacacaggccgagctgagggcgccatacactgagacatctcatatgtaatctaaaacacggcacctgcaacgacgggttggtgaatggctaggctcatcaaagagagctggctggatggcaccatttggtgctgctgcttgatgctagcgaccaatgggttaacctccgctcctggagtacatacctgttgctggtagtgcaggtcctcagcagagtttggcacggccgattggttgaatggaaacaactgc

SEQ ID NO: 19116 - DNA, 425 bp, Zea mays
  Clone ID: LIB3151-041-Q1-K1-C5
gttccgtcgtcgtggatgctgctgctaccagcagcagcgagaagaagacgtcgtggccggaggtggtgggcatgtccatcaaggaggcgacggagaccattctcaaggacatgcccaacgcgtacatccaggtgctgcctgttgggtcgcccgtgacgctggaccttcgccccgaccgcgtgcgtatcttcgttgacaccgtcgccatgactccgacagttgggtgatacacaccaaatgcaataaacaaaccctacttttttattctatgtttccagctaataataaaccaggccttagcttcttggttgtccttccttggttggtgttagcttctaagctactagtacaccattaaaaaaaaggaggacctcatgtatggctaccgtgaaaaatgtgatcttgatggaataatatatcataaa

SEQ ID NO: 19117 - DNA, 398 bp, Zea mays
  Clone ID: LIB3151-041-Q1-K1-C6
caactagcaacatagaaagcacaatagtgtaccaacaatggcagccaaaatattttgcctccttatgctccttggtctttctgcaagtgctgctacggcgaccattttcccgcaatgctcgcaagctcctatagcttcccttcttcccccgtacctctcaccagcggtgtcttcggtatgtgaaaacccaattcttcaaccctacaggatccaacacgcaatcgcagctggcatcttacctttatcacccttgttcctccaacaatcatcagccctattacaacagttacctttggtgcatttattggcacagaacatcagggcacaacaactacaacaacttgtgctagccaaccttgctgtctactctcagcaacaagaagttttttcctttcaac

SEQ ID NO: 19118 - DNA, 439 bp, Zea mays
  Clone ID: LIB3151-041-Q1-K1-C7
atttagaccaactagcaacatagaaagcacaatagtgtaccaacaatggcagccaaaatattttgcctccttatgctccttggtatttctgcaagtgctgctacggcgaccattttcccgcaatgctcacaagctcctatagcttcccttcttcccccgtacctctcaccagcggtgtcttcggtatgtgaaaacccaattcttcaaccctacaggatccaacaggcaatcgcagctggcatcttacctttatcacccttgttcctccaacaatcatcagccctattacagcagttacctttggtgcatttattggcacaaaacatcagggcacaacaactacaacaacttgtgctagcaaaccttgctgcctactctcagcaacagcagtttcttccattcaaccaactagctgcattgaactctgcttcttatttgc

SEQ ID NO: 19119 - DNA, 344 bp, Zea mays
  Clone ID: LIB3151-041-Q1-K1-C9
gttccttcaggtcattgctcacactgacactgccacccatggtgatgcgtgacacattattactcaatcatcgccgctaaatgactcaactagctagctagccagcggctatactacagcacatagtttcttcagtgggggacaccgccggcagcagcgtaggggcatggagtcggctgctgcaggccgcacatcgccgtcagttgctgcgctatctgcgccgccaacagccccgcgacctggccgctgtgcggctgctgctgcaggatggactggaggaccaagccgcaaatcgcctggcatcagagcataccgaccgcgacaccctactgctcgatttattg

SEQ ID NO: 19120 - DNA, 415 bp, Zea mays
  Clone ID: LIB3151-041-Q1-K1-D1
gttcgcacgcgactaacagccagcccccgacacgtgaacaagcacaagggcgtcgcctcgcctcgcgcgcgctggcgccgcgcacagacacgcaagcgtggatcgcgccgccgctcatcggggcatcgtccgtcgcgacagggatccgtcgccgccgccgccggccgagccacaggcggcgggagacgtcggaggcggcggtgtctcttggggcggcccccggttgcgcgccgaggacgagcacgccgtcatcgtcgcggccctggctcacgtcgtcggcgccgggacgcggagctcgccaccggccgggctcggccagcaaggccgacacgctcccctcttctgcgtggattcagtgacgctgacgcaccgcaggggcagggccgtccacgcgccggcgacggagacacagcgg

SEQ ID NO: 19121 - DNA, 409 bp, Zea mays
  Clone ID: LIB3151-041-Q1-K1-D10
gagaccaacaagcaacatagaaagtggaatccagtagcaacaatagagcaacaatggagaccaagatattttccctccttatgctccttgctctttctacatgtgttgctaacgcgacaattttccctcaatgctcacaagctcctatagcttccctttttcccccataccttccatcaattatagcttcagtatgtgaaaacccagctcttcaaccatataggcttcaacaagcaatcgcagcaagcaacatacctttatcgcccttgttgtgtcaacaatcgccagccctatctttggtgcagtcattggtacaaaccatcagggcacaacagctgcagcaactcgtgctacctgtgatcaaccaagtagctctggcaaacctttttgcctactctccggaacaaca

SEQ ID NO: 19122 - DNA, 240 bp, Zea mays
  Clone ID: LIB3151-041-Q1-K1-D11
cgggagtccgccttaggttgtaggctccgttcgatcataagcaacacaacacccttccgtttgcgtcgctcctccggcctcccctccctggtcggtcgatcgcgaggatgacgccggcgagcgtggtcgccgcgcccaggagcgtcggggcgttgcccttggcggcgttcccggcgcccgcgagggcccgggtgcggaggaaccggccgtcctctaaggccccggcgtgcgggggggacc

SEQ ID NO: 19123 - DNA, 329 bp, Zea mays
  Clone ID: LIB3151-041-Q1-K1-D12
ggaggagttctcatcactcttaccattcttatgttatccacgggctactttgggggaattggtgccccatttgctccatatttctggccgtatctaggacaagttccaaagaagagggaacgcaaaaggcctgtgagagtgtacatggatggatgctttgatctcatgcactacggccatgcaaatgcattgcggcaggccaagttgctgggcgatcagcttgtaattggagtggttagtgatgaggagattgtggcaaacaaaggtccacctgtcctttctatggaagagaggttgacctcttgttagtggtctcaagtgggtcgatg

SEQ ID NO: 19124 - DNA, 423 bp, Zea mays
  Clone ID: LIB3151-041-Q1-K1-D2
agctcatcgactccagattggagaactcgacaccatgaaggtgctgatcgttgcccttgctctcctggcgctcgctgcgagcgccgcctccagtacaagcggcggctgtggctgccagacaccaccgtttcatctaccgcctccgttctatatgccgcctccgttctatctgccgccgcagcagcagccgcagccatggcaataccccactcaaccaccgcagctaagcccgtgccagcagttcggatcctgcggcgtcggcagcgtcggcagcccgttcctgggccagtgcgtcgagttcctgaggcaccagtgcagcccggcggcgacgccctacggctcgccacagtgccaggcgctgcagcagcagtgctgccaccagatcaggcaggtggagccgcttgcaccgtaccaggcgacata

SEQ ID NO: 19125 - DNA, 398 bp, Zea mays
  unsure at all n locations
  Clone ID: LIB3151-041-Q1-K1-D3
ggagtacctgaggcagccgcagtgcagcccgctggcggcggcgccctactacgccgggtgtgggcagacgagcgccatgtaccagccgctccggcaacagtgctgccagcagcagatgaggatgatggacgtgcagtccgtcgcgcagcagctgcagatgatgatgcagcttgagcgtgccgctgccgccagcagcagcctgtacgagccagctctgatgcagcagcagcagcagctgctggcagcccagggtctcaaccccatggccatgatgatggcgcagaacatgccggccatgggtggactctaccagtaccagtaccagctgcccagctaccgcaccaacccctgtggcgtctncgctgccattccgccctactactgattcatgatatttg

SEQ ID NO: 19126 - DNA, 356 bp, Zea mays
  Clone ID: LIB3151-041-Q1-K1-D5
ctactccagagcgcataagaacccgatcgacaccatgagggtgttgctcgttgccctcgctgtcctggctctcgctgcgagcgccacctccacgcatacaagcggggggtgaggctgccagccaccggcggcggttcatctaccggcgccggtgcatctgccacctgcggttcacctgccacctacggtgcatgtgccaccgacggtccacctgtcgacgccggtccacctgccaccggcggaccatgtgccgccgccggttgatctgacgccggcaccatgccactaccctactgaaccgacgcaggctgaggctgatccccaggcacacccatgcccgagccaacagacgcatg

SEQ ID NO: 19127 - DNA, 312 bp, Zea mays
  Clone ID: LIB3151-041-Q1-K1-D6
ctactatactatactctaggaagcaaggacaccaccgccatggcagccaagatgcttgcattggtcgctctcctagctctttgtgcaagcgccactagtgcgacccatattccagggcacttgccaccagtcatgccattgggtaccatgaacccatgcatgcagtactgcatgatgcaacaggggcttgccagcttgatggaacgtccgtccctgatgctgcagcaactgttggccttaccgcttcagaccatgccacctatgatgccacacatgatgactcctaacatgatgtcaccattgatgatgccg

SEQ ID NO: 19128 - DNA, 434 bp, Zea mays
  Clone ID: LIB3151-041-Q1-K1-D7
ccaacaagcaacatagaaagtggaatccagtagcaacaatagagcaacaatggcgaccaagatattttccctccttatgctccttgctctttctgcatgtgttgctaacgcgacaattttccctcaatgctcacaagctcctatagcttcccttcttcccccataccttccatcaatgatagcttcagtatgtgaaaacccagctcttcaaccctataggctccaacaagcaatcgcagcaagcaacatacctttatcacccttgtttcaacaatcgccagccctatctttggtgcagtcattggtacaaaccatcagggcacagcagctgcagcaactcgtgctacctgtgatcaaccaagtagctctggcaaacctttctccctactctcagcaacaacaatttcttccattcaaccaactgtctacattga

SEQ ID NO: 19129 - DNA, 433 bp, Zea mays
  Clone ID: LIB3151-041-Q1-K1-D8
cggcagaaatgtcatccatggaagcgactccgtggagaacgggaagaaggagatcgctctctggttccctgaaggtgtggcacagtggaagagcaaccttcatccctggatctacgaggcttgagcagttgagcttggatgccttgcctgcttccatggaaaccagagttttgtttgagtattatctgttggctctggctgaagagtcataatttagcgctctgtgtgttacaccagagttaagtctgcctgaacttatgtggcatttgtttgagtttctgccttcgtgccctgttttctaatgtaccgtggttgtgaaccggtcaatgtgatctgaaataaaacattgcgtgccaagtttgtgttacaagtttgatgcactgggaatgccaagcaactaatgtggtaataaacattttcgtcaatctttttt

SEQ ID NO: 19130 - DNA, 380 bp, Zea mays
  Clone ID: LIB3151-041-Q1-K1-D9
gcaacatagaaagcacaatagtgtaccaacaatggcagccaaaatattttgcctccttatgctccttggtctttctgcaagtgctgctacggcgaccattttcccgaaatgctcgcaagctcctatagcttcccttcttcccccgtacctctcaccagcggtgtcttcggtatgtgaaaacccaattcttcaaccctacaggatccaacaggcaatcacagctggcatcttacctttatcacccttgttcctccaacaatcatcagccctattacatcagttacctttggtgcatttattggcacaaaacatcagggcacaacaactacaacaacttgtgctagcaaaccttgctgcctactctcagcaacagcaggttc

SEQ ID NO: 19131 - DNA, 345 bp, Zea mays
  Clone ID: LIB3151-041-Q1-K1-E1
gccattgacgtaccaagtgagtttgacggctaatgctaccagatcttgttcttggtgacgccgtgcggtaatgtgacatgctactacagacgcaggacggcggactacatcttctacttgatgaagatgatgctggagaccgtatgcgccggcaccaccaccaccatgcaggcgccaccgctatacaagaaggcagtcgaccacaaccccctcatggacgagctgttatcatccaaggagaggacgggtgtggctgtgtaagcatgggacgaaaacctgtcactaacgtgcctccaacgcctagtttttgcggtaccagacggaaagaaagagagggactgagtt

SEQ ID NO: 19132 - DNA, 328 bp, Zea mays
  Clone ID: LIB3151-041-Q1-K1-E10
gcaacatagaaagcacaatagtgtaccaacaatggcagccaaaatattttgcctccttatgctccttggtatttctgcaagtgctgctacggcgaccattttcccgcaatgctcacaagctcctatagcttcccttcttcccccgtacctctcaccagcggtgtcttcggtatgtgaaaacccaattcttcaaccctacaggatccaacaggcaatcgcagctggcatcttacctttatcacccttgttcctccaacaatcatcagccctattacagcagttacctttggtgcatttattggcacaaaacatcagggcacaacaacta

SEQ ID NO: 19133 - DNA, 420 bp, Zea mays
  unsure at all n locations
  Clone ID: LIB3151-041-Q1-K1-E11
gttctagatcgcggcgccgcccttttttttttttttttttgtttgaatttggaaatataacttcttatttctaggaggccacatacatcagccaaaaaacttcattattgaatgacaactaataagcaatctaaaagagggcaccgccaatgatgtgttgttggtagaaggctgctgggtttgtcaaagcaagttggacaaagggcagcaactgttgcagttgtaaaagggttgcggggttagccacaaactgctggtagaacggaagcaattgttgttgtgtcaagaaggaagcggggcttgttgtagctagctggctgaatggtagtagttgttgttgctgcaaataagcagcagggttcagtgtagacaagtggttgaatggaaaaaattgntgttgctgagagtatggagaaaggt

SEQ ID NO: 19134 - DNA, 328 bp, Zea mays
  Clone ID: LIB3151-041-Q1-K1-E12
cacacaaagctctgcacaagaaatgggtatgtaggtctagccggagccaatctgccgacacctaactaatcgatagctcgcctgcatgcgaccacacgctcttgctgccgggccatggcgactgcgttccaccacacagtcctggtgccgaacatggcgaccagcgttattgacagtgaagccctcgcctgactacgcgcggttgcttgccctcctgcctgctgactttcggatgataggcgcaacaacctgcgcagccgaaacgtggacggtctgagccataaccggtgtttctgcagagaaggagcctggacattaaacgcatggg

SEQ ID NO: 19135 - DNA, 417 bp, Zea mays
  Clone ID: LIB3151-041-Q1-K1-E2
gtggaatccagtagcaacaatagagcaacaatggagaccaagatattttccctccttatgctccttgctctttctacatgtgttgctaacgcgacaattttccctcaatgctcacaagctcctatagcttccctttttcccccataccttccatcaattatagcttcagtatgtgaaaacccagctcttcaaccatataggcttcaacaagcaatcgcagcaagcaacatacctttatcgcccttgttgtgtcaacaatcgccagccctatctttggtgcagtcattggtacaaaccatcagggcacaacagctgcagcaactcgtgctacctgtgatcaaccaagtagctctggcaaacctttctccctactctccgcaacaacaatttcttccattcaaccaactgtctacactg

SEQ ID NO: 19136 - DNA, 212 bp, Zea mays
  Clone ID: LIB3151-041-Q1-K1-E3
atgggattaattttgtccagagggcaaaaaaacccgatcgacaccatgagggggttgctggccgtggttgatctcctgcgtgtcgctacgagaggcacctgcacgcatacaaaccgccgatgcgggtgccagccaccggcggcggttcatctaccgccgacggaggatgtgacaactacggttcacctggcacctacggtgcatatcccacc

SEQ ID NO: 19137 - DNA, 394 bp, Zea mays
  Clone ID: LIB3151-041-Q1-K1-E5
atttagaccaactagcaacatagaaagcacaatagtgtaccaacaatggcagccaaaatattttgcctccttatgctccttggtatttctgcaagtgctgctacggcgaccattttcccgcaatgctcacaagctcctatagcttcccttcttcccccgtacctctcaccagcggtgtcttcggtatgtgaaaacccaattcttcaaccctacaggatccaacaggcaatcgcagctggcatcttacctttatcacccttgttcctccaacaatcatcagccctattacagcagttacctttggtgcatttattggcacaaaacatcagggcacaacaactacaacaacttgtgctagcaaaccttgcttgctactctcagcaacagcagtttc

SEQ ID NO: 19138 - DNA, 410 bp, Zea mays
  Clone ID: LIB3151-041-Q1-K1-E6
cgcacatatctactatactatactctaggaagcaaggacaccaccgccatggcagccaagatgcttgcattgttcgctctcctagctctttgtgcaagcgccactagtgcgacccatattccagggcacttgccaccagtcatgccattgggtaccatgaacccatgcatgcagtactgcatgatgcaacaggggcttgccagcttgatggcgtgtccgtccctgatgctgcagcaactgttggccttaccgcttcagacgatgccagtgatgatgccacagatgatgacgcctaacatgatgtcaccattgatgatgccgagcatgatgtcaccaatggtcttgccgagcatgatgtcgcaaatgatgatgccacaatgtcactgcgacgccgtctcgcagattatgct

SEQ ID NO: 19139 - DNA, 387 bp, Zea mays
  Clone ID: LIB3151-041-Q1-K1-E7
ttcagcattcagaaacacaccaagcgaagcgcactagcaacaacctaacaacaatggctaccaagatattagccctccttgcgcttcttgcccttttagtgagcgcaacaaatgcgttcattattccacagtgctcacttgctcctagtgccattattccacagttcctcccaccagttacttcaatgggcttcgaacatccagccgtgcaagcctacaggctacaactagcgcttgcggcgagcgtcttacaacaaccaattgcccaattgcaacaacaatccttggcacatctaaacctacaaaccatcgcaacgcaacagcaacaacagtttctgccatcactgagccacctagccgtggtgaaccctgtcgcctacttgcaac

SEQ ID NO: 19140 - DNA, 378 bp, Zea mays
  Clone ID: LIB3151-041-Q1-K1-E8
gtgaaattgactgtaacgaggtggaatgaaagcgacgatggaagccctggcttggttgaagagtggcttttagtgtctggggtcccaagaatgtatagaaactggaaggagctatatgaggttgcttctgcacttggtgtgctgatcgacgtcgatgaggaaagtttgcaagtcggagataaggagcctattaggctgaagctgaagacagcattcaggagttttgatgctgctcccttttcttactactttgcatttggatgttggtcgtcaagactagtaatggtcacagcagtacaagacaaaacacaaggtatggaacataaaattaaggaggtagactgcaaggagcataaaaaggaactgaatgggggaaaa

SEQ ID NO: 19141 - DNA, 374 bp, Zea mays
  Clone ID: LIB3151-041-Q1-K1-E9
ctcttccattccattctattcccgcttccacacgtcggtcggcgcccttcgcgatcgtgtcgtttcttcccgcagcctgcctgcgtgtggggtgatggctaggcacttcaagtacgtcatcctcggcggcggtgtcgcggcggggtacgcggcgagggagttcgccaagcagggcgtcaaccccggcgagctcgccatcatctccaaggaaccagtggccccttatgagcgccctgcactcagcaagggatacctcttccctcagaacgctgcaagactgccaagcttccacacgtgtgtgggcagcggtggagagagactacttcctgaatggtactctgagaaaggcattgaactgatcctgagtactgaga

SEQ ID NO: 19142 - DNA, 393 bp, Zea mays
  Clone ID: LIB3151-041-Q1-K1-F1
tggaaaaggctataatttccactaattgtcagaatgaccttggtcttgcgactgccaacacactagcgggcgctcgtgcaggagcacggcagttagaggttactattaatggtattggtgaaagggctggaaatgcttctttggaggaggttgtcatggcaattaaatgccgcagagaactgttagatggtctctatactggaatcgattcccgccatatcactttgacgagcaaaatggtgcaagagcatagtggacttcacgtgcagccacataaagctattgttggtgccaatgcgttcgctcatgaaagtggaattcatcaggatgggatgcttaaatataaaggaacttacgaaattatatcgcctgatgatattggtctaacacgtg

SEQ ID NO: 19143 - DNA, 433 bp, Zea mays
  Clone ID: LIB3151-041-Q1-K1-F10
gagcagcagcagacacctccgccacctccaccctcgaatcgttccccaccatggcgtcgcagggatcctctgtcttcgccgcactcgagcaggccccggaggaccccatcctcggagtgaccgttgcctacaacaaggatcccagccccgtgaaggtcaacctcggggtcggcgcctaccggaccgaggaagggaagcccctagtgctgaacgtggtcaggcgcgccgagcaaatgttgatcaataatccgtcacgtgtcaaggagtacctaccaatcaccggtctggctgaattcaataagctgagcgctaagcttatctttggcgctgacagccctgctattcaggagaatagggttgctaccgtgcagtgcctatcgggtactggttctttaagagtcggaggtgaatttcttgcaaggcactatcacga

SEQ ID NO: 19144 - DNA, 381 bp, Zea mays
  Clone ID: LIB3151-041-Q1-K1-F12
ctgggtcttcagaccattagctttatctactccagagcgcataagaacccgcatcgacaccatgagggtgttgctcggtgccctcgctctcctggctctcgctgcgagcgccaccttcacgcatacaagcggcggctgcggctgccagccaccgccggcggttcatctaccgccgccatgtgcatctgccacctgcatgttcacctgccacctacggtgcatctcccaccgccggtccacctgccgccggcggtccacctgccatccgctgtccatgtgccgccgtcggttcatgtgccgtcgccaccatgccactaccctactcaaccgcccatgtctcagcctcatccccagccacacacatgcccgtgccaacaagcc

SEQ ID NO: 19145 - DNA, 371 bp, Zea mays
  Clone ID: LIB3151-041-Q1-K1-F2
ataggcttcaacaagcaatcgcagcaagcaacatacctttatcgcccttgttgtgtcaacaatcgccagccctatctttggtgcagtcattggtacaaaccatcagggcacaacagctgcagcaactcgtgctacctgtgatcaaccaagtagctctggcaaacctttctccctactctccgcaacaacaatttcttccattcaaccaactgtctacactgaaccctgctgcttatttgcagcaacaactattaccatttagccagctagctactgcctactctcaacaacaacaacttcttccatttaaccaattggccgcactgaaccccgctgcttatttgcagcagcaaatactactaccatttagc

SEQ ID NO: 19146 - DNA, 365 bp, Zea mays; identical to SEQ ID NO: 17107
  Clone ID: LIB3151-041-Q1-K1-F3

SEQ ID NO: 19147 - DNA, 357 bp, Zea mays
  Clone ID: LIB3151-041-Q1-K1-F4
gatcagcagaacggacatgcgcatagaggaccgtatgacagaacagcatgaacatggacatcgttgtgcaaccgtgactggctctgccaattgccaacggctctggaatgcacatccgatgccattgggcagcactaaacgattggtacagcactggatcaagcctcacgacgatgacaggctgctagcgtgtgcaaccctactgctagaacctcgtggcagccttaccgcatcacgctggccagatgccaatgatgatgccagggatgacagaacagatgacagtgacacccattccgaatacaatgccatcaataatagaggaggatgatagacgagcaataacgatagctagaa

SEQ ID NO: 19148 - DNA, 382 bp, Zea mays
  Clone ID: LIB3151-041-Q1-K1-F5
gaccaacaagcaacatagaaagtggaatccagtagcaacaatagagcaacaatggagaccaagatattttccctccttatgctccttgctctttctacatgtgttgctaacgcgacaattttccctcaatgctcacaagctcctatagcttccctttttcccccataccttccatcaattatagcttcagtatgtgaaaacccagctcttcaaccatataggcttcaacaagcaatcgcagcaagcaacatacctttatcgcccttgttgtgtcaacaatcgccagccctatctttggtgcagtcattggtacaaaccatcatggcacaacagctgcagcaactcgtgctacctgtgatcaaccaagttgcttttgcaaacc

SEQ ID NO: 19149 - DNA, 352 bp, Zea mays
  Clone ID: LIB3151-041-Q1-K1-F6
cccacgcgtacgcttgctcgccgtctgtggtcatttcgtcgccgcgcggcgagccgcccatgttgagctcgcgtcggatctgatgggcttgttgtgatctcctgcaggtaaggaagaggaggagggcaggatgtcccaccgtatgcccaagcacccgaggcacggctccctccgcttccttcccagtaagcgctcctcccgccaccgcggaccggtgaagctattccacagggatgacccctagaagccttgccataccactgccttccttggctactaagctcgcatgactcacattgtccgcgcagttgagacgccacgatccacactgcattagaaggaaactcgttag

SEQ ID NO: 19150 - DNA, 356 bp, Zea mays
  Clone ID: LIB3151-041-Q1-K1-F7
atttagaccaactagcaacatagaaagcacaatagtgtaccaacaatggcagccaaaatattttgcctccttatgctccttggtatttctgcaagtgctgctacggcgaccattttcccgcaatgctcacaagctcctatagcttcccttcttcccccgtacctctcaccagcggtgtcttcggtatgtgaaaacccaattcttcaaccctacaggatccaacaggcaatcgcagctggcatcttacctttatcacccttgttcctccaacaatcatcagccctattacagcagttacctttggtgcatttattggcacaaaacatcagggcacaacaactacaacaacttgtgct

SEQ ID NO: 19151 - DNA, 407 bp, Zea mays
  Clone ID: LIB3151-041-Q1-K1-F8
cgaacgccggagctcgacgaggacgaccgacgacgcacgcagagatccggcgtactgcaaattttgaaaactgaactgtaagatggcatcagcagagctttcccgtgaggaaaatgtgtacatggcgaagctcgccgagcaggcggagaggtacgaggagatggttgagttcatggagaaggtagccaagactgttgactcggaggagctcactgtggaggagcgaaacctcctgtctgttgcatacaagaacgtcattggagcccgccgcgcctcatggcgcatcatctcctccatcgagcagaaggaggagggccgaggcaatgaggaccgagtaacactcatcaaggattatcgtggcaagattgagactgagctgaccaaaatctgtgatggcatcctcaagc

SEQ ID NO: 19152 - DNA, 304 bp, Zea mays
  Clone ID: LIB3151-041-Q1-K1-F9
atattcagaaacacaacacacgacaagcgatacccactacctaccacctatcgacaccgggatcctatacattattgctctttttgctctttgtgctatcacagcacacgacaacatcattcatcattgctcactggttactagctccaatatccaacatttcataccacctgctactaaaatgttcaatgaacacccaacagtgaaagcctctaggctacaacatacaactaccgctagcgtctaacagcatacaactgcccaatggccacatcaatcatcgatacatgtcacatttcaaacc

SEQ ID NO: 19153 - DNA, 377 bp, Zea mays
  Clone ID: LIB3151-041-Q1-K1-G10
cgacgcgcctctgaaagttcggagccgccggcccgtccgcctccctctccgcctcccgtccccaaggccaatagttttcaagtggcaatggcggaccaggctaaccaacccactgtccttcataagctcggtggccagttccacctgcgctcgatcatctctgaaggtgtacgggcccgtaacatatgcccatctgtctcatcttatgaaaggagatttgccacaaggaactacatgacccagagcctttggggcccttcaatgtctgttagcggtggcatcaatgtcccagtgatgcagaccccgctctgtgctaatgctcctgctgagaaaggaggcaagaacttcatgattgatttcatgatgggcggtgtttc

SEQ ID NO: 19154 - DNA, 380 bp, Zea mays
  Clone ID: LIB3151-041-Q1-K1-G11
cgacgcgcctctgaaagttcggagccgactgtccgtccgccttcctctccgtctcccgtgggcaaggccaatagttgtcaagtggcaatggcggaccaggctaaccaacccactgtccttcataagctcggtggccagttccacctgcgctcgatcatctgtgaaggtgtacgggcccgtaacatatgcccatctgtctcatcttatgagaggagatttgccacaaggaactacatgacccagagcctttggggcccttcaatgtctgttagcggtggcatcaatgtcccagggatgcagaccccgatatgtgctaatgctcctgctgagaaaagaagctagaacctcatgattgacttcatgatgggcggtggttcaac

SEQ ID NO: 19155 - DNA, 429 bp, Zea mays
  Clone ID: LIB3151-041-Q1-K1-G12
gtcccctgctccattctcagccgccgccaatcccttcccgtgctccgcaaccgctgagtgagaagaagagatggccggcaagggcgatggcccggctatcggcatcgatctcggcacgacgtactcttgcgtcggcgtgtggcagcacgaccgcgtcgagatcattgccaacgaccagggtaaccgcaccacgccctcgtacgtcgccttcaccgactccgagcgcctcatcggagatgcggccaagaaccaggtcgccatgaaccccatcaacaccgtctttgatgccaagcgtctcatcggcaggaggttcagtgatgcgtctgtccagagtgatatcaagctgtggcccttcaaggtcatttctgggcctggtgagaagccaatgattgttgtccagcacaagggtgaagagaagcagtttgcagc

SEQ ID NO: 19156 - DNA, 378 bp, Zea mays
  Clone ID: LIB3151-041-Q1-K1-G3
cccgtccaagcccctgctccggcgccggctgccggcggcgaggctcgcggcatccgccgcatccaggggtcaagcctcggcgaccgcgggcgcggcggcgccggcggccgtggagacccgcggcggggacagggaggggcaggtcacgccgcggtccgcggacttcaacgcctggtacacggacgtcatcgccgctgccgagctcgcggactacgggcccgtgcgagggaccatggtcattcgcccctacggatacgccatctgggaggccatccaggattatttgaatgtcaaattcaaggagacagggcacagcaacatgtacttccctcagttcattccatactcatttatagagaaggaagctagtcatgttga

SEQ ID NO: 19157 - DNA, 351 bp, Zea mays
  Clone ID: LIB3151-041-Q1-K1-G4
gtcccaccatcccagggccgccgcgctgcttctctttcccgtcgcacctccaacgctgccgccgcggcagattaatccaacaccgggccgggatacgtgacaggtttctgagctcgcagctctacgccagcgatgccggagacggcggcgccgatcggcctgtcatgggcgcccaagcttccttccttcgcaacgaccagcggcggcagcaagagcgaccacgcgccgaacccgagcgctgcgcagggatcgctctggaaccgcgcgagcgacctcgtggacgggctgttcgttgccccgagggaccctaggcagctgaataagctggccaggaagaacgtcaaggacact

SEQ ID NO: 19158 - DNA, 409 bp, Zea mays
  Clone ID: LIB3151-041-Q1-K1-G5
ccaacaagcaacatataaagtaggaatccagttgcaacaatagagcaacaatggagaccaagatatgtgccctgcttatgctccttgctctttgtacatgtgttgctaacgcgacaatatcacctgaatgctcacaagctcctatagcttccctttttcccccataccttccatcaattatagcttcaggatgcgaaaacccagctcttcaaccatataggcttcaacatgcaatcgcagcaagcaacatacctttatcgcccttgttgtgtcaacaatcgacagccctatctttggtgcagtcattggtacaaaccatcaaggcacaacagctgcagcaacttgtgctacctgtgatcaaccaagtagctgtggcaaacctttatccctactctgcgcaacaacaatt

SEQ ID NO: 19159 - DNA, 436 bp, Zea mays
  Clone ID: LIB3151-041-Q1-K1-G6
tgctctttctgcatgtgttgctaacgcgaccatttttcctcaatactcacaagctcctatagctgcccttcttcccccataccttccatcaatgaccgcttcagtatgtgaaaacccagcccttcaaccctacaggctccaacaagcaatcgcaacaagcaacttacctttatcacccctgttctttcaacaatcgccagccctatctttggtgcagtcattggtacaaaccatcagggcacaacagctgcagcagctcgtgctaccagtgatcagccaagtagctctggcaaacctttctccctactctcagcaacaacaatttcttccattcaaccaactgtctacactgaaccctgctgcttatttgcagcaacaacaactactaccattcagccagctagctactgcctactctcagcagcaacaatttctt

SEQ ID NO: 19160 - DNA, 333 bp, Zea mays
  Clone ID: LIB3151-041-Q1-K1-G7
tttcagcattcataaacacaccaagcgaagcgcactagcaacaacctaacaacaatggctaccaagatattagccctccttgcgcttcttgcccttttagtgagcgcaacaaatgcgttcattattccacagtgctcacttgctcctagtgccattattacacagttcctcccaccagttacttcaatgggcttcgaacatccagccgtgcaagcctacaggctacaactagcgcttgcggcgagcgtcttacaacatccaactgcccaattgcaacaacaatccttggcacatgtaaacctacaaaccatcgcaacgcaacagcaacaacag

SEQ ID NO: 19161 - DNA, 393 bp, Zea mays
  Clone ID: LIB3151-041-Q1-K1-G8
aatattttgagcattcagaaacacaccaagcgaagcacattagcaacaacctaacaacaatggctaccaagatattatccctccttgcgcttcttgcgctttttgcgagcgcaacaaatgcgttcattattccacaatgctcacttgctccaagttccattattacacagttcctcccaccagttacttcaatgggcttcgaacacccagctgtgcaagcctataggctacaacaagcaattgcggcgagcgtcttacaacaaccaatttcccagttgcaacaacaatccttggcacatctaacaatacaaaccatcgcaacgcaacagcaacaacaattcctaccagcactgagccacctagccatggtgaaccctgccgcctacttgcaac

SEQ ID NO: 19162 - DNA, 397 bp, Zea mays
  Clone ID: LIB3151-041-Q1-K1-H1
aaccattggtgaaaatgttagtggaatgcctacatttgcccttcctgttcacgatggtggggtaggttttgactatcggatgcatatggctgtggctgacaaatggattgaccttctcaagcaaagtgatgaaacttggaagatgggtgatattgtgcacacactgacaaataggaggtggttagagaagtgtgtaacttatgctgaaagtcatgatcaagcattagtcggcgacaagactattgcgttttggttgatggacaaggatatgtatgatttcatggccctcgatagaccttcaactcctaccattgatcgtgggatagcattacataagatgattagacttatcacaatgggtttaggaggagagggctatcttaatttcatgggaaat

SEQ ID NO: 19163 - DNA, 335 bp, Zea mays
  unsure at all n locations
  Clone ID: LIB3151-041-Q1-K1-H10
ggtgccggaattcgccgggtacgacaccacgtcgtggcgtctagcgaaccatatgaaaggcaccaanntagtgtacccaacccaataggcagcccannaaatattttagcattcgctctatgacctccttaggtcatcttctaggcaagtgggttgcntacccccgcaacnccatnctttgcccaccaatagggctcacaaagcntnncctatangnncttccctttcnnttcccccaatacncnntctcaccnnngcggtgtnncttcaatgggtgtgaaannnacccaatnttgttcaaaaccctaccaggaatcctatacaggnncaatcgc

SEQ ID NO: 19164 - DNA, 429 bp, Zea mays
  Clone ID: LIB3151-041-Q1-K1-H11
atagaaagcacaatagtgtaccaacaatggcagccaaaatattttgcctccttatgctccttggtctttctgcaagtgctgctacggcgaccattttcccgaaatgctcgcaagctcctatagcttcccttcttcccccgtacctctcaccagcggtgtcttcggtatgtgaaaacccaattcttcaaccctacaggatccaacaagcaatcacagctggcatcttacctttatcacccttgttccttcaacaatcatcagccctattacatcagttacctttggtgcatttattggcacaaaacatcagggcacaacaactacaacaacttgtgctagcaaaccttgctgcctactctcagcaacagcagattctttcattcaaccaactaactgcattgaactctgcttcttatttgcaacaacaac

SEQ ID NO: 19165 - DNA, 104 bp, Zea mays
  Clone ID: LIB3151-041-Q1-K1-H12
attttgagcaccaacaatggcacccaacatatctcgcctgcttatgcctctcggcaatggcgaccaagatgttaccgctacctttgcttcttgatgcttttgag

SEQ ID NO: 19166 - DNA, 405 bp, Zea mays
  Clone ID: LIB3151-041-Q1-K1-H2
caactagcaacatagaaagcacaatagtgtaccaacaatggcagccaaaatattttgcttccttatgctccttggtctttctgcaagtgctgctaccgcaaccattttcccacaatgctcacaagctcctatagcttcctttcttcccccatacctctcaccagcggtgtcttcagtatgtgaaaacccaattcttcaaccctacaggatccaacaggcaatcgcagcaggcatcttacctttatcacccttgttcctccaacaaccgtcagccctattacagcagttacctttggtgcatttgttggcacaaaacatcaaggcacaacaactacaacaacttgtgctaagaaaccttgctgcctactctcagcaacagcagtttcttccattcaaccaactggc

SEQ ID NO: 19167 - DNA, 365 bp, Zea mays
  Clone ID: LIB3151-041-Q1-K1-H3
gcgacgagggcccgtcggagctgtaccgtgggctgacacccagcctgatcggcgtggtgccgtacgcggcctgtaacttctacgcctacgagacgctgaagcggctctaccgtcgcgcgaccgggcggcgtcccggcgcggacgtgggccccgtggcgacgctgctcatcgggtccgcggcgggcgccatcgccagctcggccacgttcccgctagaggtggcccgcaagcagatgcaggtgggcgctgtgggcgggaggcaggtgtaccagaacgtcctccacgctatctactgcatcctcaagaaggagggcgccggcggcctgtaccgaggtctcggccctagctgcatcaagctcatgccc

SEQ ID NO: 19168 - DNA, 400 bp, Zea mays
  Clone ID: LIB3151-041-Q1-K1-H4
ccgatcgacaccatgagggtgttgctcgttgccctcgctctcctggctctcgctgcgagcgccacctccacgcatacaagcggcggctgcggctgccagccaccgccgccggttcatctaccgccgccggtgcatctgccacctccggttcacctgccacctccggtgcatctcccaccgccggtccacctgccgccgccggtccacctgccaccgccggtccatgtgccgccgccggttcatctgccgccgccaccatgccactaccctactcaaccgccccggcctcagcctcatccccagccacacccatgcccgtgccaacagccgcatccaagcccgtgccagctgcagggaacctgcggcgttggcagcaccccgatcctgggccagtgcgtcg

SEQ ID NO: 19169 - DNA, 221 bp, Zea mays
  unsure at all n locations
  Clone ID: LIB3151-041-Q1-K1-H5
tgcagcgttagccagtggctttcgtagaggttagctcaaagtattcagaaaagtttcataatgcgaacgagagncctttcagaactccaataaggggatctggtacgaagggtggatcggcacgaacagatgtatttggtatcaatctgcatgcattatccatatgggcagctnaatgcaggatgacntttctgaagtctattgggaaattgcnttgggaa

SEQ ID NO: 19170 - DNA, 357 bp, Zea mays
  unsure at all n locations
  Clone ID: LIB3151-041-Q1-K1-H6
cagcattcagaaacacaccaagcgaagcgcactagcaacaacctaacagcaatggctaccaagatgttatccctgcttgcgctgcttgcgctaccagtgagcgcaacagatgcgatgattatatcacagtgctcacttgctcctagcgccattattccacagtttctgccaccagttacttcaatgggcttcgaacatccagccgtgcaagcctacaagctacaactagcgcttgcggcgagcgttttacaacaaccaattgcccaattgcaacaacaatccttgggacatctaaacctacaaaccatnngaacgcaacagcaacaacagattctggcatcacttgaccacctagcc

SEQ ID NO: 19171 - DNA, 368 bp, Zea mays
  Clone ID: LIB3151-041-Q1-K1-H7
gaccaacaagcaacatagaaagtggaatccagtagcaacaatagagcaacaatggcgaccaagatattttccctccttatgctccttgctctttctgcatgtgttgctaacgcgacaattttccctcaatgctcacaagctcctatagcttcccttcttcccccataccttccatcaatgatagcttcagtatgtgaaaacccagctcttcaaccctataggctccaacaagcaatcgcagcaagcaacatacctttatcacccttgtttcaacaatcgccagccctatctttggtgcagtcattggtacaaaccatcaaggcacagcagctgcagcaactcgtgctacctgtgatcaaccaagtagc

SEQ ID NO: 19172 - DNA, 380 bp, Zea mays; identical to SEQ ID NO: 18616
  Clone ID: LIB3151-041-Q1-K1-H8

SEQ ID NO: 19173 - DNA, 368 bp, Zea mays
  Clone ID: LIB3151-041-Q1-K1-H9
aacctcgccgcccgccgccctaatttacgtgcccaggtcttcgtccgtcccctctctaggacttcgccgatcctttctcaggcgacgggagccaaccagctgccccaatggaagttgagctgccaaacatccataaagctacttcgagtgaccattggagtttaaccagcagccaatacccgtctggtaaatttcctaaggtctcagtgggtatcatgattccgaaagcaggtagtataccgagaggtggagaagctaccccaactcctacatttgacaggaacttgtctcaaggaactgatggtttatctagaccaaaaggtgataatacttcacttcgtgtttcacaagaagcttttgaacatgat

SEQ ID NO: 19174 - DNA, 383 bp, Zea mays
  Clone ID: LIB3151-042-Q1-K1-A1
cgcgagcgtagcctctccttctcccctctcacgtcccaccgcatgcgcaacacgcgcctgccttcccggtccagccccctgcccccaggtgttgcgtcccccgtcgatcgccactcgaccctgctggtggagtgagtgccggtgatccatccggagttggatttgtcctcggcaaggaggttttgcaccatacaagatcgtcaaaattgccgaaatgggaggtataattagtggggactcgcctaggcacagctcaccagcatcgaagttagagaaaaagatggttgacgctatgcaacagagggcattaaaaggaacctctgtgaaatcattcaatagtgtcatcatgaaatttcctaaaatcgacgagaggttgagaaact

SEQ ID NO: 19175 - DNA, 352 bp, Zea mays
  unsure at all n locations
  Clone ID: LIB3151-042-Q1-K1-A10
gaccattagctttatctactccagagcgcagaagaacccgatcgacaccatgagggtgttgctcgttgccctcgctctcctggctctcgctgcgagcgccacctccacgcatacaagcggcggctgcggctgccagccaccgccgccggttcatctaccgccgccggtgcatctgccacctccggttcacctgccacctccggtgcatctcccaccgccggtccacctgccgccgccggtccacctgccaccgccggtccatgtgccgccgccggttcatctgccgccgccaccatgccactaccctactcaaccgccccggcctcagcctcatncccagccacacccatgc

SEQ ID NO: 19176 - DNA, 354 bp, Zea mays
  unsure at all n locations
  Clone ID: LIB3151-042-Q1-K1-A11
gccactcacatggtgctcctccatcttccaagtcaccaacgcaaattgcaccaagaaatccatcgagaggccgtcgacaggggaattaatggcgtcgtcgtctagcagcagccaccgccgcctcatcctcgcagccgccgtcctgctctccgtgctcgcggctgccagcgccagcgccgggacctcctgcgtgccggggtgggccatcccgcacaacccgctcccgagctgccgctggtacgtgaccagccggacctgcggcatcgggccgcgcctcccgtggccggagctgaagaggagatgctgccgggagctggcggacatcccggcgtactgnccgtgcacggcgctgag

SEQ ID NO: 19177 - DNA, 441 bp, Zea mays
  Clone ID: LIB3151-042-Q1-K1-A12
tagcaacatagaaagcacaatagtgtaccaacaatggcagctaaaatattttgcctcgttatgctccttggtctttctgcaagtgctgctacggcgaccattttcccacaatgctcacaagctcctatagcttcccttcttcccccgtacctctcaccaacggtgtcttcggtatgtgaaaacccaattcttcaaccctacaggatccaacaggcaatcgcagctggcatcttacctttatcacccttgttcctccaacaatcatcagccctattacagcagttacctttggtgcatttattggcacaaaacatcagggcacaacaactacaacaacttgtgctagcaaaccttgctgcctactctcagcaacagcagtttcttccattcaaccaactagcttgattgaactctgctttttatttgccacaacaacaacta

SEQ ID NO: 19178 - DNA, 111 bp, Zea mays
  Clone ID: LIB3151-042-Q1-K1-A6
ctagggttttgctgctctccaaccccaacttccaaaggccgaacaataaggcccggcccccttggggtgtgaccgaaatggcgctgccgaatcaggggaccgttgataacc

SEQ ID NO: 19179 - DNA, 290 bp, Zea mays
  unsure at all n locations
  Clone ID: LIB3151-042-Q1-K1-A7
cacggnttcatcatcactccactagccagtcagctactggcctacagctagccggctgctctgctctcatcccatcccatctcatctccgacaagcgaagcagagcactggcatgagcatggaccgcatggcgcggcgttccgtgtccttgctcctcgctctggctctcctggccgccgcggcgtcngcggactcgtggctgtacgagaagttcacgacggagggcaacgtgcgcgcggactacaacgcgcaggggcagcaggtgacgtctctgatcctgacgcagcagt

SEQ ID NO: 19180 - DNA, 349 bp, Zea mays
  unsure at all n locations
  Clone ID: LIB3151-042-Q1-K1-A8
ctcttggaggtgggctcccaaggaccttagcggtgcttatcctcacagttgcgcttacatacatgaactacagagggctgactatagttggctgggtggcagtctttcttggggtgttctctcttctcccgttctttgtgatgggattgatagctattccacagattgaaccttctaggtggcttgaaatggacttggggagtgtggattggggattgtatctgaatacactattttggaacctcaactattgggattcaatcagcacattggctggtgaagtcgagaatccaaagagaaccctaccaagagcgctntcttatgctctagttctagtggtgggaggata

SEQ ID NO: 19181 - DNA, 425 bp, Zea mays
  Clone ID: LIB3151-042-Q1-K1-B10
tttgagcattcagaaacacaccaagcgaagcgcactagcaacaacctaacaacaatggctggcaagatattatccctccttgcgcttcttgcgctttttgcgagcgcaacaaatgcgtccattattccacaatgctcacttgctcctagttccattattccacagttcctcccaccagttacttcaatggccttcgaacacccagctgtgcaagcctataggctacaactagcgattgcggcgagcgtcttacaacaaccaattgcccaattgcaacaacaatccttggcacatctaacaatacaaaccatcgcaacgcaacagcaacaacagttcctaccagcactgagccacctagccatggtgaaccctgtcgcctacttgcaacagcagctgcttgcatacaacccacttgctctagcaaa

SEQ ID NO: 19182 - DNA, 381 bp, Zea mays
  Clone ID: LIB3151-042-Q1-K1-B11
caactagcaacatagaaagcacaatagtgtaccaacaatggcagctaaaatattttgcctcgttatgctccttggtctttctgcaagtgctgctacggcgaccattttcccacaatgctcacaagctcctatagcttcccttcttcccccgtacctctcaccaacggtgtcttcggtatgtgaaaacccaattcttcaaccctacaggatccaacaggcaatcgcagctggcatcttacctttatcacccttgttcctccaacaatcatcagccctattacagcagttacctttggtgcatttattggcacaaaacatcagggcacaacaactacaacaacttgtgctagcaaaccttgctgcctactctcagcaacagca

SEQ ID NO: 19183 - DNA, 358 bp, Zea mays; identical to SEQ ID NO: 19067
  Clone ID: LIB3151-042-Q1-K1-B12

SEQ ID NO: 19184 - DNA, 110 bp, Zea mays
  unsure at all n locations
  Clone ID: LIB3151-042-Q1-K1-B4
gttctaaatcggcccgccttattttttttggggccaaccctggcagttccggccggggcggttggcctacttggccatggccgngggggcccccgttggttaacaaggtt

SEQ ID NO: 19185 - DNA, 78 bp, Zea mays
  Clone ID: LIB3151-042-Q1-K1-B6
gggtcttcagaccattagctttatctactccaaagcgcaaaaaaacccgatcgacaccatgagggtgttgttggttgc

SEQ ID NO: 19186 - DNA, 359 bp, Zea mays
  Clone ID: LIB3151-042-Q1-K1-B8
cttctatcagtaccatcaatcatcattcatcttagtagtataggcaccaaatcaagaggtgcgacatcaattatctaactccaaaaaccatgaagctggtgcttgtggttcttgctttcattgctttagtatcaagtgtttcttgtccacaaacaggcggttgcagctgtggtcacaccaaagccttgacaagaacattttccacccacctatatccacaaaacacaacataaccaccccaacttcccagtgatgaaccaaaaaaaaggttaatcacccaaaactacacacagagtatgtaaacacacacacgagacacaacacacacagacacacactatggagcacacactacacat

SEQ ID NO: 19187 - DNA, 431 bp, Zea mays
  Clone ID: LIB3151-042-Q1-K1-B9
gaccaacaagcaacatagaaagtggaatccagtagcaacaatagagcaacaatggcgaccaagatattttccctccttatgctccttgctctttctgcatgtgttgctaacgcgacaattttccctcaatgctcacaagctcctatagcttcccttcttcccccataccttccatcaatgatagcttcagtatgtgaaaacccagctcttcaaccctataggctccaacaagcaatcgcagcaagcaacatacctttatcacccttgtttcaacaatcgccagccctatctttggtgcagtcattggtacaaaccatcagggcacagcagctgcagcaactcgtgctacctgtgatcaaccaagtagctctggcaaacctttcttcctactctcagcaacaacaatttcttccattcaaccaactgtctac

SEQ ID NO: 19188 - DNA, 245 bp, Zea mays
  unsure at all n locations
  Clone ID: LIB3151-042-Q1-K1-C1
ctcgataatggtgccctcattcccgcatgtgtttcctagaaataatcaatatattgattgagatttatctcannnnanannannnnnnccnnccccccnnnnnnnnnnnnnccaaaannnnccgggaaaaaaaaaaaaaaaaattttaaaaaaaaaaaaaannnaaaaaaaaaaaaaaaaaaggggccgccccttttaaagatccaaacttaccttccccttctttccaagttataagttttttt

SEQ ID NO: 19189 - DNA, 320 bp, Zea mays
  unsure at all n locations
  Clone ID: LIB3151-042-Q1-K1-C10
gggtcttcagaccattagctttatctactccagagcgcagaagaacccgatcgacaccatgagggtgttgctcgttgccctcgctctcctggctctcgctgcgagcgccacctccacgcatacaagcggcggctgcggctgccagccaccgccgccggttcatctaccgccgccggtgcatctgccacctccggttcacctgccacctccggtgcatctcccaccgccggtccacctgccgccgccggtccacctgccaccgccggtccatgtgccgccgccggttcatctgccgncgncaccatgccactaccctactc

SEQ ID NO: 19190 - DNA, 343 bp, Zea mays
  Clone ID: LIB3151-042-Q1-K1-C11
caccaacgcaaattgcaccaagaaatccatcgagaggccgtcgacaggggaattaatggcgtcgtcgtctagcagcagccaccgccgcctcatcctcgcagccgccgtcctgctctccgtgctcgcggctgccagcgccagcgccgggacctcctgcgtgccggggtgggccatcccgcacaacccgctcccgagctgccgctggtacgtgaccagccggacctgcggcatcgggccgcgcctcccgtggccggagctgaagaggagatgctgccgggagctggcggacatcccggcgtactgccggtgcacggcgctgagcatcctcatggacggcgcgatc

SEQ ID NO: 19191 - DNA, 434 bp, Zea mays
  Clone ID: LIB3151-042-Q1-K1-C12
ggccggtttgttagcagcactcaaggtggttggtgggaccttggcagagcacacttattggtgacttggtgctggggaggctggaactcgcattgcagaactcattgctcttgagatttcaaaacagacgtcggctccaattgaagagtgccgcaagaagatttggctggtggactcaaagggcttgattgttgactctcgtaaaaactccgttcagtcattcaacaaaccttgggcacatgagcatgagcccttgacaactttgtacgatgctgttcagtccatcaaacctacagttctgattgggacgtctggagttggaagaacattcacaaaagaagttggtgacgccatggcttcctttaatgagaggcctatcatcttttcactgtcaaatccaacctttcattctgaatgtactgctgaagaagcat

SEQ ID NO: 19192 - DNA, 315 bp, Zea mays
  unsure at all n locations
  Clone ID: LIB3151-042-Q1-K1-C2
tgcgcttctttgcgctntttgcgagcgcaacanatgcgttcattattccacaatgctcacttgctcccaagttccattattacacagttcctcccaccagttacttcaatgggcttcgaacacccagctgtgcaagcctataggctacaacaagcaattgcggcgagcgtcttacaacaaccaatttcccagttgcaacaacaatccttggcacatctaacaatacaaaccatcgcaacgcaacagcaacaacaattcctaccagcactgagccacctagccatggtgaaccctgccgcctacttgcaacagcag

SEQ ID NO: 19193 - DNA, 191 bp, Zea mays
  Clone ID: LIB3151-042-Q1-K1-C4
cacttcctttgttttttcttttcccccacttttgcgtccgtgcgttgggtttgtttaggcggcaaccgcaaggcccattggcggccggccaaaagctggtggtgagtttcggcgagatgttgatagacttcgtgcccaccgtggcgggggtctcgctggcggaggcgccggccttcttcaaggcgcccggg

SEQ ID NO: 19194 - DNA, 400 bp, Zea mays
  unsure at all n locations
  Clone ID: LIB3151-042-Q1-K1-C6
agaaagtggaatacagtagcaacaatagagcaccattggcggccaagatattttccatccttatgctccttgctctttctgcatgtgttgctaacgcgaccatttttcctcaatactcacaagctcctatagctgcccttcttcccccataccttccatcaatgaccgcttcagtatgtgaaaacccagcccttcaaccctacaggctccaacaagcaatcgcaacaagcaacttacctttatcacccctgttctttcaacaatcgccagccctatctttggtgcagtcattggtacanaccatcagggcacaacagctgcagcaactcgtgctaccagtgatcagcccaagtagctctggcaaaacctttctccctactctcagcaaacaacaattttc

SEQ ID NO: 19195 - DNA, 380 bp, Zea mays
  Clone ID: LIB3151-042-Q1-K1-C7
ccgacgtgctcgccgtcaccagccgcttcgagccctgcggcctcatccagctgcaggggatgcgatacggaacgccctgcgcctgcgcgtccaccggtggactcgtcgacaccatcatcgaaggcaagaccgggttccacatgggccgcctcagcgtcgactgtaacgtcgtggagccggcggacgtcaagaaggtggccaccacattgcagcgcgccatcaaggtggtcggcacgccggcgtacgaggagatggtgaggaactgcatgatccaggatctctcctggaagggccctgccaagaactgggagaacgtgctgctcagcctcggggtcgccggcggcgagccaggggtcgaaggcgaggagatcgcgccgctc

SEQ ID NO: 19196 - DNA, 436 bp, Zea mays
  Clone ID: LIB3151-042-Q1-K1-C8
gtgcgatttcgatctcgcagccacctttttttttttgttctgttgtgtatctagtagttggaggagatatgcagtttgcacttgcattggacacgaactcaggtcctcaccagataagatcttgtgagggtgatgggattgacaggttggaaaaattaagtattgggggcagaaagcaggagaaagctttgagaaataggtgctttggtggtagagttgctgcaactacacaatgtattcttacctcagatgcttgtcctgaaactcttcattctcaaacacagtcctctaggaaaaattatgctgatgcaaaccgtgtatctgctatcattttgggcggaggcactggatctcagctctttcctctgacaagcacaagagctacgcctgctgtaccttgtggaggatgttacaagcttattgatatccctatgag

SEQ ID NO: 19197 - DNA, 380 bp, Zea mays
  Clone ID: LIB3151-042-Q1-K1-C9
cgcagcggaccatcttcgacaacctccacgacgccggcctctccttcggcgtctacttccaggacgtgccggcggtgctcttctacaggaacctccgcaagctcaagtaccttctggacttccacccgctgcgcccctccttcgccgaccacgcccgccgcgggacgctccccaactacgccgtcatcgagcagcactacctggactccaagctggacccggccaacgacgaccacccgtcgcacgacgtgtaccagggccagatgctcgtcaagtacgtctacgagacgctgcgcgccagcccgcagtggaaccagacgctgctcgtcatcacctacgacgagcacggcggcttcttcgaccacgtgcccacgcccgtc

SEQ ID NO: 19198 - DNA, 325 bp, Zea mays
  unsure at all n locations
  Clone ID: LIB3151-042-Q1-K1-D12
cgcgaggcgagccacgcgagagagatgaggctcctgacgcacaacatgctggcgtcgaacgtccggggcgcaaccaccggctacccgctgacgctggaggcgaccaactggtgcaccaaggaggtggagctcaactccgacttcatccgcggtctcctccccaagatcgactggcgcgcgctcgtcgccgccacccgcgcgatcggcctccccgagctcctccccgaggagcagccccccgaggaggagatcttcgccgagggcgccgccgacgtcgagggaagcgccatccgccgcatncaccacgcgctcctcgaggttcatg

SEQ ID NO: 19199 - DNA, 130 bp, Zea mays
  unsure at all n locations
  Clone ID: LIB3151-042-Q1-K1-D3
tcgcagctggcatcttacctttatcacccttgtttctccaacaatcatcagccctattacaacagttaccttttgtgcatttattggcacaaaacatcanggcacaacaactacaacaactngtgctagc

SEQ ID NO: 19200 - DNA, 349 bp, Zea mays
  Clone ID: LIB3151-042-Q1-K1-D5
gtccgccttgcccttcacgaaggcttggtcctcctccttgtatctccactccccccttcacagatccgttcctccagctagggttagcgttcctctgcagcgatggcgatcaagcggaccaaggcggagaagaagatcgcgtacgacaagaagctgtgcagcctgctcgatgagtacaccaaggtgctcatcgccctcgccgacaacgtcggttccaagcagctacaggacatccgccggggcctcaggggcgactcggtggtgctcatggagaagaacacgctcatcaggcgctgcatcaaggtgtacgccgagaagaccggtaaccacacctttgacccgctcatgg

SEQ ID NO: 19201 - DNA, 347 bp, Zea mays
  Clone ID: LIB3151-042-Q1-K1-D6
caaatggcaccaagaaatccatcgagaggccgtcgacgggggaattaatggcgtcgtcgtgtagcggcagccaccgccgcctaatcctcgcacccgccgtcctgctctccgtgctcgcggctgccagcgccagcgccgggacctcctgcgtgccggggtgggccttcccgcacaacccgttcccgagctgccgctggtacgtgaccagccggacctgcggcatcgggccgcccctcccgtggccggagctgaagaggagatgctgccgggagctggcggacatcccggcgtactgccggtgcacggcgctgagcatcctcatggacggcgcgatcccgccgggcccg

SEQ ID NO: 19202 - DNA, 441 bp, Zea mays
  unsure at all n locations
  Clone ID: LIB3151-042-Q1-K1-D7
caacatagaaagcacaatagtgtaccaacaatggcagccaaaatattttgcctccggatgctccttggtctttctgcaagtgctgctacggcgaccattttcccgaaatgctcgcaagctcctatagcttcccttcttcccccgtacctctcaccagcggtgtcttcggtatgtgaaaacccaattcttcaaccctacaggatccaacaggcaatcacagctggcatcttacctttatcacccttgttcctccaacaatcatcagccctattacatcagttacctttggtgcatttattggcacanaacatcagggcacaacaactacaacaacttgtgctagcaaaccttgctgcctactctcagcaacagcagtttcttccatcaaccaactagctgcattgaactctgcttcttatttgcaacaacaacaactaccat

SEQ ID NO: 19203 - DNA, 131 bp, Zea mays
  unsure at all n locations
  Clone ID: LIB3151-042-Q1-K1-D8
gacccacgccgtcncnngcattagctttaaatctactccagaaagcgctagaatgtaacccgatcggacnnaccatgagggtggtgggctgcgttggctcctcgcnttctcctgggggctctccgctggcg

SEQ ID NO: 19204 - DNA, 441 bp, Zea mays
  unsure at all n locations
  Clone ID: LIB3151-042-Q1-K1-D9
caactagcaacatagaaagcacaatattgtaccaataatggcagccaaaatattttgcctgattatgctccttggtctttctgcaagtgctgctacggcgagcattttcccgcaatgctcacaagctcctatagcttcccttcttcccccatacctctcaccagcgatgtcttcagtatgtgaaaatccaattcttctaccctacaggatccaacaggcaatcgcagcaggcatcttacctttatcacccttgttcctccaacaatcatcagccctattacagcagttacctttggtgcatttattggcacaaaacatcagggcacaacaactacaacaactcgtgctagcaaaccttgctgcctactctcagcaacagcagttacctttggtgcatttgttggcacanaacattanggcacaacaactacaacaactcgt

SEQ ID NO: 19205 - DNA, 303 bp, Zea mays
  Clone ID: LIB3151-042-Q1-K1-E1
tttccttcctatggctcctgctctttctacatggggtgctaacgcgacaattttccctcaatgctcacaagctcctatagctttcctttttcccccataccttccatcaattatagctttagtatgtgaaaacccagctctttaaccatataagcttcaacaagcaatcgcagcaagcaacatacctttatcgcccttgttgtgtcaacaatcgccagccctatctttggtgcagtcattggtacaaaccatcagggcacaacagctgcagcaactcgtgctacctgtgatcaaccaagtagc

SEQ ID NO: 19206 - DNA, 400 bp, Zea mays
  unsure at all n locations
  Clone ID: LIB3151-042-Q1-K1-E10
cccagctcttcaaccatataggctttatcaagcaatcgcagcaagcaacataccttgantcggtcttgttgtgtcaacaatcgccacccctatctttggtgcagtcattggtacaaaccatcagggcacaacagctgcagcaactcgtgctacctgtgatcaaccaagtagctctggcaaacctttctccctactctccgcaacaacaatttcttccattcaaccaactgtctacactgaaccctgctgcttatttgcagcaacaactattaccatttagccagctagctactgcctactctcaacaacaacaacttcttccatttaaccaattggccgcactgaaccccgctgcttatttgcagcagcaaatactactaccatttagccagctagctac

SEQ ID NO: 19207 - DNA, 396 bp, Zea mays
  Clone ID: LIB3151-042-Q1-K1-E11
ttttcagcattcagaaacacaccaagtcgaatcgcactagcaacaacctaacaacagtggctactaagatattagccctccttgcgcttcttgcccttttagtgagcgcaacaaatgcgttcattattccacagtgctcacttgctcctagtgccattattccacagttcctcccaccagttacttcaatgggcttcgaacatccagccgtgcaagcctacaggctacaactagcgcttgcggcgagcgtcttacaacaaccaattgcccaattgcaacaacaatccttggcacatctaaacctacaaaccatcgcaacgcaacagcaacaacagtttctgccatcactgagccacctagccgtggtgaaccctgtcgcctacttgcaacagcagc

SEQ ID NO: 19208 - DNA, 361 bp, Zea mays
  Clone ID: LIB3151-042-Q1-K1-E12
tgagcattcagaaacacaccaagcgattcacattagcaacaacctaacaacaatggcgtccaatatattatccctccttgcgcttcttgcgctttttgcgagcgcaacaaatgcgttcattattccacaatgctcacttgctccaagttccattattacacagttcctcccaccagttacttcaatgggcttcgaacacccagctgtgcaagcctataagctacaacaagcaattgcggcgagcgtcttacaacaaccaatttcccagttgcaacaacaatccttggcacatctaacaatacaaaccatcgcaacgcaacagcaacaacaattcctaccagcactgagccacctaaccatg

SEQ ID NO: 19209 - DNA, 126 bp, Zea mays
  Clone ID: LIB3151-042-Q1-K1-E5
accacgcgtccggtgaaaacccaattcttcaaccttacaggttccaccaggcattcgcagttggcatctaacgttaataaccttggttcctccaacaatcatcacccttattacagcagttacctt

SEQ ID NO: 19210 - DNA, 358 bp, Zea mays
  Clone ID: LIB3151-042-Q1-K1-E7
gaaggaaacagagcacaatagctgtaccaacatatggtgggccaaaagcagtttagcttcctgatgcgtcattgttctttctagcaggagctgctaccgaaccattattccacagtgctcacaagctcctattgctagcttgtttcgcccatacgtgtcaccagcggtgtctagagtatgtgaaaactcaattcttcaaccatacatgatccaacaggcaatagcagcaagcatcttacctttatcacccttgatactgcaacaaccagtagggctattacagggagtacatatggcgcatttgttggcacaaaatcataaggcacaacaactacaacaacttgcgctaggaaacctt

SEQ ID NO: 19211 - DNA, 345 bp, Zea mays
  Clone ID: LIB3151-042-Q1-K1-E8
cctcttcctgtcagtagtagagtgagagtgttgcagcgagtgggagacaaggggaaatggggaagggtgcgcaagggagcgatgcggccgcggcgggcggcgaggtggaggagaacatggcggcgtggctggttgccaagaacaccctcaagatcatgcccttcaagctcccgcccgtcggcccttatgatgtccgcgtgcgcatgaaggcagtggggatttgcggcagcgatgtgcactacctaagggagatgcgcatcgcgcacttcgtggtgaaggagccgatggtgatcgggcacgagtgcgcgggcgtggtcgaggaggtgggcgccggcgtgacgcacc

SEQ ID NO: 19212 - DNA, 364 bp, Zea mays
  Clone ID: LIB3151-042-Q1-K1-E9
gtcccctgctccattctcagccgccgccaatcccttcccgtgctccgcaaccgctgagtgagaagaatagatggccggcaagggcgatcgcccggctatcggcatcgatctcggcacgacgtactcttgcgtcggcgtgtggcagcacgaccgcgtcgagatcattgccaacgaccagggtaaccgcaccacgccctcgtacgtcgccttcaccgactccgagcgcctcatcggagatgcggccaagaaccaggtcgccatgaaccccatcaacaccgtctttgatgccaagcgtctcatcggcaggaggttcagtgatgcgtctgtccagagtgatatcaagctgtggccctttcaggtcatt

SEQ ID NO: 19213 - DNA, 91 bp, Zea mays
  Clone ID: LIB3151-042-Q1-K1-F1
aaaaccgttaaattgggacaaggcttttttttttttatattaaatggtccatcaaggcaatggttaaaactgcacctgcacccaatgggga

SEQ ID NO: 19214 - DNA, 444 bp, Zea mays
  Clone ID: LIB3151-042-Q1-K1-F10
gtaacatcctgccgtgggagtcacgatcatcggctccgcctcctccgagggaagtacagatcccttcaccgctgctcgaatagatcgtctgcagtcgcgtgactcgactttaccccgccccacagctcgaagccgacgaggtggcctcagcacacgcgcgcgcagccatggcagctgctcaaggtggcactgttgtgtgttcatctgagaaagttgagtttctgaagcttcaaaatggcagtgatattcgtggtgttgctgttgctggggttgaaggtgagcctgtcaacctcacggaagatgtcactaaagctatagctgcagcttttgctgcatggctgttaaacaagaaaccagatggctggagacttttaagaatctcttgtggacatgattcacgaatttctgcacataaattgcagaacgcagtcactcatggaatca

SEQ ID NO: 19215 - DNA, 384 bp, Zea mays
  Clone ID: LIB3151-042-Q1-K1-F11
gaggattctttcaagatgtcggacattatcttgaagttgaaaactagcactagatccgtaagcctgtcactagtttcatctactgatagcgagagaaggaaactatctcatgtgtattggtctcatagcaccggagacgatttacaactatcacatgctgaggttcaagtggatatggtttggcagcagaatgtgccattgtcccccaacggatcaacatttactccatctccttcaaacaattcagataactatcatgtttcttgggtttggttctctcctacatcgcatggaactggcacatacattcccaacatgagttatcatacatacagggaacgtatgatgcttgaaagagaaaccatacgagcaagaaaacaacga

SEQ ID NO: 19216 - DNA, 353 bp, Zea mays
  Clone ID: LIB3151-042-Q1-K1-F12
tattattgagaccaactagcaacatagaaagcacaatagtgtaccaacaatggcagctaaaatattttgcctccttatgctccttggtctttctgcaagtgctgctacggcgaccattttcccacaatgctcacaagctcctatagcttcccttcttcccccgtacctctcaccaacggtgtcttcggtatgtgaaaacccaattcttcaaccctacaggatccaacaggcaatcgcagctggcatcttacctttatcacccttgttcctccaacaatcatcagccctattacagcagttacctttggtgcatttattggcacaaaacatcagggcacaacaactacaacaac

SEQ ID NO: 19217 - DNA, 173 bp, Zea mays
  unsure at all n locations
  Clone ID: LIB3151-042-Q1-K1-F3
gttctagtccgaccggccgccctttttttttttttttttttttttnnnccaataaaaagagccaggtattatttcatttggctttttccagccaaaattttattttacctccaaattcaaaaccggggcttcccttttttgacctaggcaaaaaaggagcctacccagttttt

SEQ ID NO: 19218 - DNA, 391 bp, Zea mays
  Clone ID: LIB3151-042-Q1-K1-F4
tgagcattcagaaccacaccaagcgaagcacattagcaacaacctaacaacaatggctaccaagatattatccctccttgcgcttcttgcgctttttgcgagcgcaacaaatgcgttcattattccacaatgctcacttgctccaagttccattattacacagttcctcccaccagttacttcaatgggcttcgaacacccagctgtgcaagcctataggctacaacaagcaattgcggcgagcgtcttacaacaaccaatttcccagttgcaacaacaatccttggcacatctaacaatacaaaccatcgcaacgcaacagcaacaacaattcctaccagcactgagccacctagccatggtgaaccctgccgcctacttgcaacagcag

SEQ ID NO: 19219 - DNA, 411 bp, Zea mays
  unsure at all n locations
  Clone ID: LIB3151-042-Q1-K1-F5
gtggaatccagtaccaccaatagagcaacattggcgaccaaaatattttccctccttatgctccttgctctttctgcatgtgttgctaacgcgacaattttccctcaatgctcacaagctcctatagcttcccttcttcccccataccttccatcaatgatagcttcagtatgtgaaaacccagctcttcaaccctataggctccaacaagcaatcgcagcaagcaacatacctttatcacccttgtttcaacaatcgccagccctatctttggtgcagtcattggtacaaaccatcagggcacagcagctgcagcaactcgtgctacctgtgatcaaccaagtagctctggcaaacctttctccctactctaagcacaacaatttcttncattcaaccactgtctacatt

SEQ ID NO: 19220 - DNA, 372 bp, Zea mays
  Clone ID: LIB3151-042-Q1-K1-F6
gcgatttcgatctcgcagccaccttttttttgttctgttgggtatctagaagttggaggagatatgcagtttgcacttgcattggacacgacctcaggtcctaaccagataagatcttgtgagggtgatgggattgacaggttggaaaaattaagtattgggggcagaaagcaggagaaagctttgagaaataggtgctttggtggtagagttgctgcaactacacaatgtattcttacctcagatgcttgtcctgaaactcttcattctcaaacacagtcctctaggaaaaattatgctgatgcaaaccgtgtatctgctatcattttgggcggaggcactggatctcagctctttcctctgacaagcaca

SEQ ID NO: 19221 - DNA, 417 bp, Zea mays
  unsure at all n locations
  Clone ID: LIB3151-042-Q1-K1-F7
ccgaattcccaggcaggcaggtcggcgaggagggcaggaagaccgaagaccgagccgtgcgggggcttcggacgggaacgggacaagaccccaaaatctcaaaatcctttctggccgcccggccgtgcccgttgacgcgtcgttcttgccgggcgggccccaccttcggccttttcttctncagggggatcggatacgccacaggctgcgcgatggtgctgtgggtcttcggctaccgcttcctcatctggaaccccggcttcgacttcgacgacaaaatcctcggcttcatcaagggctacaagcgcacctttaatctcgcttgcattgaccacagaggcacaccggagcattcggcgaggacctgcacgcttgaaaccgacgacgaagccatatgctggggaattgcatattgtg

SEQ ID NO: 19222 - DNA, 399 bp, Zea mays
  Clone ID: LIB3151-042-Q1-K1-F8
ggcgcaccagggcccgttccgccgggagctcaatttctcggacttcgcgtccactccttccttggcggcgaccccgccgttcttcaagcccgagtccggcgagatcctcagcttcggcgccgacagcaacgcccggaggaacccgtcgccggtacctcccgccgccaccgccagcctcaccaccgctcccgggagcctcttctcgcagcacacggcgaccatgacggccgccgcggcgaacgacgcgaagaacaacaacaagcgctcaatggaggccacctcccgggcgagcaacaccaaccaccacccggcggcgacggcgaacgagggcatgctgtccttctcgtcggcgccgactacgcggccgtcgacgggcacgggcgcgccggccaagtcgga

SEQ ID NO: 19223 - DNA, 389 bp, Zea mays
  unsure at all n locations
  Clone ID: LIB3151-042-Q1-K1-F9
ccaatccagatcagcaaagcggcagtgcgtagagaggatcgtcgaacagaacagcatgaagatggtcatcgttctcgtcgtgtgcctggctctgtcagctgccagcgcctctgcaatgcagatgccctgcccctgcgcggngctgcagggcttgtacggcgctggcgccggcctgacgacgatgatgggcgccggcgggctgtacccctacgcggagtacctgaggcagccgcagtgcagcccgctggcggcggcgccctactacgccgggtgtgggcagacgagcgccatgtaccagccgctccggcaacagtgctgccagcagcagatgaggatgatggacgtgcagtccgtcgcgcaacagctgcagatgatgatgcaacttgagc

SEQ ID NO: 19224 - DNA, 388 bp, Zea mays
  Clone ID: LIB3151-042-Q1-K1-G10
gcaacatagaaagcacaatagtgtaccaacaatggcagccaaaatattttgcctccttatgctccttggtctttctgcaagtgctgctacggcgaccattttcccgcaatgctcgcaagctcctatagcttcccttcttcccccgtacctctcaccagcggtgtcttcggtatgtgaaaacccaattcttcaaccctacaggatccaacaggcaatcgcagctggcatcttacctttatcacccttgttcctccaacaatcatcagccctattacaacagttacctttggtgcatttattggcacaaaacatcagggcacaacaactacaacaacttgtgctagcaaaccttgctgcctactctcagcaacagcagtttcttccattc

SEQ ID NO: 19225 - DNA, 212 bp, Zea mays
  unsure at all n locations
  Clone ID: LIB3151-042-Q1-K1-G11
cagcctagcaattagctcatcgactccagattggagaactcgacaccatgnaagtgctgatcgttgcccttgctctcctggcgctcgctgcgagccgccgctcaacaagcngggctgggctgcagacaccccgttatcaccgctcgttattccgctcgttatctgcgcgacacagcgagctggatcccctaccccgagtacccgccacagtc

SEQ ID NO: 19226 - DNA, 59 bp, Zea mays
  Clone ID: LIB3151-042-Q1-K1-G12
cgcgtccgcgcattgaaaccagggcctgagcggtgggttgggcggacagcaccagacag

SEQ ID NO: 19227 - DNA, 385 bp, Zea mays
  unsure at all n locations
  Clone ID: LIB3151-042-Q1-K1-G3
ataaacgtgtgcaccggtgccgcccgcacccagggaggatgcaccaccatgacaaggccgggggcggcctgccggcggtggccctcgcgcaaccccttgggcctcgcggccgccgtgggggccgccgccacaatctccggcgccacgtcaacccggccgtccccttcgggccgctgctcgccggccgatctgcctcgtccctccctcgtctactggccgcgcagctgctcngcgccgtcgccgcgcgctcgtgctcaggctcgccaccgagggatgcatctngccgagtacccccctgcgggggcgtgagcggattgaacgcgcngtgctngangcngnncatgcgttcgggctcatgtacgcctactttgcgacngtgatggac

SEQ ID NO: 19228 - DNA, 397 bp, Zea mays
  Clone ID: LIB3151-042-Q1-K1-G4
gttcgccagagaaagtgggttggatgcaagccagcaacaacaacagctacaacagtttctgccaacgctcagtcaactagccatggtgaaccctgccgcctacgtacaacaacaacaactgctttcatctagcccgctcgctgtgggcaatgcacctacatacctgcaacaacaattgttgcaacagattgtaccagctctgactcaactagctgtggcaaaccctgttgcctacttgcaacagctgcttccattcaaccaactgactctgtcgaactctgctgcgtacctacaacagcgacaacagttacttaatccattggtagtggctaacccattggtcgccgccttcctacagcagcaacaattgctgccatacaaccagttctctttgatg

SEQ ID NO: 19229 - DNA, 407 bp, Zea mays
  Clone ID: LIB3151-042-Q1-K1-G5
gaccaacaagcaacatagaaagtggaatccagtagcaacaatagagcaacaatggcgaccaagatattttccctccttatgctccttgctctttctgcatgtgttgctaacgcgacaattttccctcaatgctcacaagctcctatagcttcccttcttcccccataccttccatcaatgatagcttcagtatgtgaaaacccagctcttcaaccctataggctccaacaagcaatcgcagcaagcaacatacctttatcacccttgtttcaacaatcgccagccctatctttggtgcagtcattggtacaaaccatcagggcacagcagctgcagcaactcgtgctacctgtgatcaaccaagtagctctggcaaacctttctccctactctcagcaacaacaatt

SEQ ID NO: 19230 - DNA, 353 bp, Zea mays
  unsure at all n locations
  Clone ID: LIB3151-042-Q1-K1-G6
caacaagcaacatagaaagtggaatccagtaccaacaatagagcaccaatggcgaccaagagattgtccctccttatgctccttgctctttctgcatgtgttgctaacgcgacaattttccctcaatgctcacaagctcctatagcttcccttcttcccccataccttccatcaatgatagcttcagtatgtgaaaacccagctcttcaaccctataggctccaacaagcaatcgcagcaagcaacatacctttatcacccttgtttcaacaatcgccagccctatctttggtgcagtcattggtacaaaccatcanggcacagcagctgcagcaactcgtgctacctgtgat

SEQ ID NO: 19231 - DNA, 373 bp, Zea mays
  Clone ID: LIB3151-042-Q1-K1-G7
gtcggcctactgcggcaagtacgcggatgagctcatcaagaatgctgcctacatcggcacccctggcaagggtatccttgctgctgatgagtcaactggcaccattggcaagcgcctttccagcatcaatgtcgagaacgtggaggagaaccggcgggctctccgtgagctcctgttctgctgccctggtgccctccagtacatcagcggtgtgatcctcttcgaggagaccctctaccagaagaccaaggatggcaagccttttgtcgatgtcctcaaggagggaggcgtcctccctggcatcaaggtcgacaagggcaccattgaagttgttggcaccgacaaggagaccaccacccagggccacgatgac

SEQ ID NO: 19232 - DNA, 354 bp, Zea mays
  unsure at all n locations
  Clone ID: LIB3151-042-Q1-K1-G9
cagaccattagctttatctactccatgtatcgcagaagaacccgatcgacaccatgagggtggggctcgttgccctcgctctcctggctctcgctgcgagcgccacctncacgcatacaagcggcggctgcggctgccagccaccgccgccggttcatctaccgccgccggtgcatctgccacctccggttcacctgccacctccggtgcatctcccaccgccggtccacctgccgccgccggtccacctgccaccgccggtccatgtgccgccgccggttcatctgccgccgccaccatgccactaccctactcaaccgccccggnctcagcctcatccccagccacacccat

SEQ ID NO: 19233 - DNA, 61 bp, Zea mays
  Clone ID: LIB3151-042-Q1-K1-H1
tcggtccaagcttcctggaagccgccgccaaaatttttttaccccgtcctccgccatggcc

SEQ ID NO: 19234 - DNA, 265 bp, Zea mays
  unsure at all n locations
  Clone ID: LIB3151-042-Q1-K1-H10
acccacgcgtccgggcatcgacttctacatcgacgaccattgctcgccgggcgaccactacgacgagcgcgcgcgccgtctcgactacttcaacagcatgtactaccacgccacgacgaagcacgtacggctgacggcgacgccgcggtgcgcgttcccgcccgacggccccatggcgcgggcgctgcggacggggctgttcgagcgcatccacgtncgcttctacggcgacgccgacaagtgctcgtacaagaacggcgacgtg

SEQ ID NO: 19235 - DNA, 80 bp, Zea mays
  Clone ID: LIB3151-042-Q1-K1-H11
atctgcgtacacggtctccctcttcctgtcattagtagagtgagagtgaggcaacgagtgggagacaatgggaaatgggg

SEQ ID NO: 19236 - DNA, 336 bp, Zea mays
  Clone ID: LIB3151-042-Q1-K1-H12
cgcaaattgcaccaagaaatccatcgtgaggtcgtcgacaggggaattaatggcgtcgtcggctagcatcagccaccgccgcctcatcctcgcagccgccgtcctgctctccgtgctcgcggctgccagcgccagcgccgggacctcctgcgtgccggggtgggccatcccgcacaacccgctcccgagctgccgctggtacgtgaccagccggacctgcggcatcgggccgcgcctcccgtggccggagctgaagaggagatgctgccgggagctggcggacatcccggcgtactgccggtgcacggcgctgagcatcctcatggacggcgcgat

SEQ ID NO: 19237 - DNA, 112 bp, Zea mays
  Clone ID: LIB3151-042-Q1-K1-H3
ccaaaaggccgttgggtgctctgaacacacactttgttttaaacacatacctttgtgggcatgctggtggttttacttacattggattggccttccacctttaccattggat

SEQ ID NO: 19238 - DNA, 52 bp, Zea mays
  Clone ID: LIB3151-042-Q1-K1-H4
taaaaggcacaatagtgtaccaacattggcagccaaaatattttgcctcctt

SEQ ID NO: 19239 - DNA, 336 bp, Zea mays
  Clone ID: LIB3151-042-Q1-K1-H6
aaaatatttggcctcctaatgctggtgggtttttttgcaagtgctgctacggcgaccattttcccgcaatgctcacaagctcctatagcttcccttcttcccccgtacctctcaccagcggtgtcttcggtatgtgaaaacccaattcttcaaccctacaggatccaacaggcaatcgcagctggcatcttacctttatcacccttgttcctccaacaatcatcagccctattacagcagttacctttggtgcatttattggcacaaaacatcagggcacaacaactacaacaacttgtgctagcaaaccttgctgcctactctcagcaacagcag

SEQ ID NO: 19240 - DNA, 386 bp, Zea mays
  unsure at all n locations
  Clone ID: LIB3151-042-Q1-K1-H7
attgagaccaactagcaacatagaatgcacattagtgtaccaacaatggcagccaaaatatggtgctttcttatgctccttggtctttctgcaagtgttgctaccgcaaccattttcccacaatgctcacaagctcctatagcttcccttcttcccccatacctctcaccagcggtgtcttcaatgtgtgaaaacccaattgttcaaccctacaagatccaacaagcaatcgcaacaggcatcttaccattatcacccttgttcctccaacaaccgtcagccctattacagcagttacctttggtccatttggtggcacaaaacatcagggcacaacaactacaacaactngtgctagcaaaccttgctgcatactctcagcaaca

SEQ ID NO: 19241 - DNA, 117 bp, Zea mays
  Clone ID: LIB3151-042-Q1-K1-H8
ttcagaccattagctttatctactccagagtgcagaagaacccgatcgacaccatgagggtgttgctcgttgccctcgctctcctggctctcgctgcgagcgccacctccacgcata

SEQ ID NO: 19242 - DNA, 96 bp, Zea mays
  Clone ID: LIB3151-042-Q1-K1-H9
gacccacgcgtcgaccattagctttatctactccagagcgcataaaacccgatcgacaccatgagggtgtgctcgtgcctgctctctggcttgctg

SEQ ID NO: 19243 - DNA, 226 bp, Zea mays
  Clone ID: LIB3151-043-Q1-K1-A1
cggatgctcaaggacaatgggttccagaaggtcaagctgttcgacgccgaggagggcaccatgagcgccctcaggaagagcgggctggaagtgatggtcggcatccccaacgacttgctgtccacgatggccaccagcatgaaggccgcggagaagtgggtcgacaccaacgtcttcagctaccttaacgacggcgtcagcatcaagtatgttgcagtcgggaatg

SEQ ID NO: 19244 - DNA, 155 bp, Zea mays
  Clone ID: LIB3151-043-Q1-K1-A10
cggccgattcccggtcgcacacgcgtccgactgatttacaatgaaacgggagacaatgccttcatggcttgaactgttgcttgcaacacaagtctttacgacttgtgctaaccatcttcttgcttgtcgcgaatgaatggaaactattttgcacc

SEQ ID NO: 19245 - DNA, 132 bp, Zea mays
  unsure at all n locations
  Clone ID: LIB3151-043-Q1-K1-A11
agaccattagctntatctactccagagcgcagaaaaacccgatcgacaccatgagggggttgggcggtgccctcgctcttctgggtctcgctttgagagccacacttacacatacaaacggggggttggggt

SEQ ID NO: 19246 - DNA, 258 bp, Zea mays
  Clone ID: LIB3151-043-Q1-K1-A12
tcgcaacaagcaacataaaaagggggatcccgtagccacaatagagccacaatggggacccagatattttccctccttatgctccttgctctttctacatgtgttgctaacgcgacaatttttcctcaatgctcacaagctcctatagctttccttttttccccatacctttcatcaattatagcttcagtatgtgaaaacccagctctttaaccatataggctttaacaagcgatcgcagcaagcaacataccttta

SEQ ID NO: 19247 - DNA, 132 bp, Zea mays
  unsure at all n locations
  Clone ID: LIB3151-043-Q1-K1-A2
gccactcacatggtgctcctccatcttccaagtcaccaacgcaaattgcaccaagaaatccatcgagaggccgtcgacaggggaattaatggcgtcgtcgtctagcaacaaccaccgccgncttattctcgc

SEQ ID NO: 19248 - DNA, 343 bp, Zea mays
  Clone ID: LIB3151-043-Q1-K1-A3
caacaagcaacatagaatgtggaatccagtagcaacaatagagcaacaatggcgaccaagatattttccctccttatgctccttgctctttctgcatgtgttgctaacgcgacaattttccctcaatgctcacaagctcctatagcttcccttcttcccccataccttccatcaatgatagcttcagtatgtgaaaacccagctcttcaaccctataggctccaacaagcaatcgcagcaagcaacatacctttatcacccttggttcaacaatcgccagccctatctttggtgcagtcattggtacaaaccatcatggcacagcagctgcagcaactcgtgc

SEQ ID NO: 19249 - DNA, 223 bp, Zea mays
  Clone ID: LIB3151-043-Q1-K1-A4
caaatgcgttcattattccacagtgctcacttgctcctagtgccattattccacagttcctgccaccagttacttcaatgggcttcgaacatccagccgtgcaagcctacaggctacaactagcgcttgcggcgagcgtcttacaacaaccaattgcccaattgcaacaacaatccttggcacatctaaacctacaaaccatcgcaacgcaacagcaacaaca

SEQ ID NO: 19250 - DNA, 157 bp, Zea mays
  Clone ID: LIB3151-043-Q1-K1-A5
attagctttatctactccagagcgcagaagaacccgatcgacaccatgagggtgttgctcgttgccctcgcttcctggcttcgctggagcgccactcacgcatacaacggggtgggtgccaccaccgcgcggtattaccgcgcgggcattgcacctc

SEQ ID NO: 19251 - DNA, 151 bp, Zea mays
  Clone ID: LIB3151-043-Q1-K1-A7
aatgcaacctacttgatataacaacatgccaagtcaagccccaccatgggcttcagagccaaatgcatcaaaagcatcttcgatgctacagctcaatcctctaatgtgcacattccacgcttgtgccatcctgagcaaactgcctctattg

SEQ ID NO: 19252 - DNA, 374 bp, Zea mays
  Clone ID: LIB3151-043-Q1-K1-A8
cggacgcgtggggcggcagtgcgtaaagaggatcgtcgaacagaacagcatgaagatggtcatcgttctcgtcgtgtgcctggctctgtcagctgccagcgcctctgcaatgcagatgccctgcccctgcgcggggctgcaaggcttgtacggcgctggcgccggcctgacgacgatgatgggcgccggcgggctgtacccctacgcggagtacctgaggcagccgcagtgcagcccgctggcggcggcgccctactacgccgggtgtgggcagacgagcgccatgtaccagccgctccggcaacagtgctgccagcagcaaatgaggatgatggacgtgcagtccgtcgcgcaacagctgcagatgatgatgc

SEQ ID NO: 19253 - DNA, 278 bp, Zea mays
  Clone ID: LIB3151-043-Q1-K1-A9
cttccccttctgcagatgtgctcccctggcccgcggcgccgccgctagcctctcgtgcgccatgccaccgcgaaagcgcccggcgctgccgccggatgagcccttccctttctcgaagcattaacctgaagcacaggcgtgcgaacccttcaaacccttccccgatttcgagcagccgatcatatcgggggcgatcctcgcccaacttgccccccaggagcgcctggcttacaagctcatcttcgaggcgggcaacaagggtatgtggatgctggata

SEQ ID NO: 19254 - DNA, 352 bp, Zea mays
  Clone ID: LIB3151-043-Q1-K1-B1
gtcagcctagcaattagctcatcgactccagattggagaactcgacaccatgaaggtgctgatcgttgcccttgctctcctggcgctcgctgcgagcgccgcctccagtacaagcggcggctgtggctgccagacaccaccgtttcatctaccgcctccgttctatatgccgcctccgttctatctgccgccgcagcagcagccgcagccatggcaataccccactcaaccaccgcagctaagcccgtgccagcagttcggatcctgcggcgtcggcagcgtcggcagcccgttcctgggccagtgcgtcgagttcctgaggcaccagtgcagcccggcggcgacgccctac

SEQ ID NO: 19255 - DNA, 295 bp, Zea mays
  Clone ID: LIB3151-043-Q1-K1-B10
gtcttcataccataagctggggctactactgtccgcataagaaccccagcgacacccaggagcagtttctacgagccgtggctatcctgtttctggttgccagcaccaactccacccattcatgccgcgggggaggatgccacccaccgccggctgctaatatacgcgccaccagtgaatatgccacaccgcgcgtcaactgccatctgggggcaattccaccacgccgttcagctgtcggcgcctgatgacgtaccacctgctggccatgtgcgcgcaactgttattattactg

SEQ ID NO: 19256 - DNA, 278 bp, Zea mays
  Clone ID: LIB3151-043-Q1-K1-B11
cgccgccggtgcatctgccaccttaggttcacctgccacctaaggtgcatgtcccaccgccggtgcacctgccgacgccggttcacctgccaccggcggtccatgtgccgtcgacggttcatatgccgccgtcaccatgccactaccctactcaaccgcactggcctgagcctcatgcctagccacacccatgcccgtgccaacagtccgatgcaagcccgtgccagctgcaaggaacctgcggcgttggcagcaccccgatcctgggtcatgtgcgt

SEQ ID NO: 19257 - DNA, 312 bp, Zea mays
  Clone ID: LIB3151-043-Q1-K1-B12
agaaagcacaatagtgtaccaacaatggcagccaaaatattttgcttccttatgctccttgggctttctgcaagtgctgctaccgcaaccattttcccacaatgctcacaagctcctatagctgcctttcttcccccatacctctcaccagcggcgtctacaggatgtgaaaacccaattcttcaaccctacaggatccaaacaggcaatcgcagcatgcatcttacctttatcaccctggttcctccaacaaccgtcagccgtattacagcagttacctttggtgcattggttgcacaaaacatcaaggac

SEQ ID NO: 19258 - DNA, 381 bp, Zea mays
  Clone ID: LIB3151-043-Q1-K1-B2
ctccagagtatgagaatgcggccaaggcacttagcaagcatgacccaccgattgttctcgctaaggttgatgctaacgaggagaagaacaggccgcttgctaccaagtacgagatccaagggttcccaaccatcaagatcttcagggaccaggggaagaacattcaggaatacaagggccctaaggaggctgatggcattgtggattacttgaagaagcaggttggccctgcgtccaaggagatcaagtcaccagaagatgcgacggcccttatcgatgacaagaagatctacattgttggtatcttcgctgaattcagcggcaccgaatttacaaacttcatggaagtcgcagagaagctgaggtctgactacgactttg

SEQ ID NO: 19259 - DNA, 376 bp, Zea mays
  Clone ID: LIB3151-043-Q1-K1-B3
gtcttcagaccattagctgtatctactccagagcgcagaagaacccgatcgacaccatgagggtgttgctcgttgccctcgctctcctggctctcgctgcgagcgccacctccacgcatacaagcggcggctgcggctgccagccaccgccgccggttcatctaccgccgccggtgcatctgccacctccggatcacctgccacctccggtgcatatcccaccgacggtccacctgccgccgccggtccacctgacaccgccggtccatgtgccgccgccggttcatctgccggcggcaccatgccactaccctactcaaccgacccgggctcagactcatgctcagccacacccatgcccgtgccaacagccgca

SEQ ID NO: 19260 - DNA, 291 bp, Zea mays
  Clone ID: LIB3151-043-Q1-K1-B4
caacaaacaacataaactgtataaactacttttaacaatagaaccccatcgacaaccaaggtgtttttcttacttatgctccttgctctttctatatgtgttagctaacacctacaatcatacataaatgctcataagcttctataccttccctttttaccacataaccttccatcaattatagcttcattatgttaaaacccacatcttcaccatttatgcttcaacaatcaatctgagcaagcaacataactttatacccctttgtcatgtaacaactcccagtcatat

SEQ ID NO: 19261 - DNA, 372 bp, Zea mays
  Clone ID: LIB3151-043-Q1-K1-B6
ttttattttttcagacaaaaacctttattattgaactataactcataagaaatttaaaagagggcaccaccaatgatggcttgttggtagaacgctgctgggtttgtcaaagcaagttggttgaatggcagcaattgttgcagttgtaacacggtgccagctgttaggcgcaacgtgctggtagaacggcaacaactgtggttgtatcaagaaggtagcaggcctcacaccatctagctggctgaatggtagcaactgttgctgctgtaaataaacaggacagttcaatgctgccaggtggctgaatggaagaaattgctgggggtaggcagcaggtagctggctgaatggtagttgttggtgttgcaaata

SEQ ID NO: 19262 - DNA, 353 bp, Zea mays
  unsure at all n locations
  Clone ID: LIB3151-043-Q1-K1-B7
cttcgcttttggaggcaaatgccaattcgatctcgcaaccaccctttttttggtctgttgggtatctaggaantggaggagatatgcaatttgcacttgcattggacaccaactcaaggcctcaccaaataaaatcttgtgagggtgatgggattgacaaggtggaaaaattaaatattgggggcagaaagcaagagaaagctttgagaaataagggctttggtgggagaattgctgcaactacacaatgtattcttaacctaaatgcttgtcctgaaactcttcattctcaaacacagtcctctatgaaaaattatgctgatgcaaaccgngtatctgctatcattttgggc

SEQ ID NO: 19263 - DNA, 171 bp, Zea mays
  Clone ID: LIB3151-043-Q1-K1-B8
gaacgcaggaaaaagctcctacaaataggcgctatggacgagaacatgctgcacctacacaatgtattggtacgttacattcttgtcctgaaactgcagattctgatacacaactctttaagcagaattgtgctgatgcagaccgtgtatctactctaagcttgggcggac

SEQ ID NO: 19264 - DNA, 176 bp, Zea mays
  Clone ID: LIB3151-043-Q1-K1-B9
agggtcgtcgaacaaaacaacatgaaaatgggcattggtctcgtcgggtggctggctctgtcaacttgcaacgccttttgaatgcaaattcccttgcccttcgccgggctgtaaggctttgaccgggcttgcgcccggcttaccaccattattggcgcccgcgggctttaccccta

SEQ ID NO: 19265 - DNA, 401 bp, Zea mays
  Clone ID: LIB3151-043-Q1-K1-C1
cgatacgtcgccatctgctgcgggctgctgttctgcgcctccacaacgctttggcctctgcgttgtaagttttaagctttacctccagccatgggtaaagagaaggcccacatcaacattgtgggtattggccatgtcgactctggcaagtaaaccaccactggtcacctgatttacaagcttggaggcattgacaagcgtgtgattgacaggttcgagaaggaatccgatgaaatgaacaaacggtactgtaagtacgcctgggtgcttgacaagctcaaagctgaccgtgagagaggtatcaccattgatattgctctgtggaagtgtgagaccaccaagtactactgcactgtcattgatgcccctggacatcgcgacttcatcaagaacatgatcac

SEQ ID NO: 19266 - DNA, 376 bp, Zea mays
  Clone ID: LIB3151-043-Q1-K1-C10
gcaaagcggcagtgcgtagagaggatcgtcgaacagaacagcatgaagatggtcatcgttctcgtcgtgtgcctggctctgtcagctgccagcgcctctgcaatgcagatgccctgcccctgcgcggggctgcagggcttgtacggcgctggcgccggcctgacgacgatgatgggcgccggcgggctgtacccctacgcggagtacctgaggcagccgcagtgcagcccgctggcggcggcgccctactacgccgggtgtgggcagacgagcgccatgtaccagccgctccggcaacagtgctgccagcagcagatgaggatgatggacgtgcaatccgtcgcgcatcaactgcagatgatgatgcaacttgagc

SEQ ID NO: 19267 - DNA, 287 bp, Zea mays
  Clone ID: LIB3151-043-Q1-K1-C11
cgccgccggtgcatctgccacctccggttcacctgccacctccggtgcatctcccaccgccggtccacctgccgccgccggtccacctgccaccgccggtccatgtgccgccgccggttcatctgccgccgccaccatgccactaccctactcaaccgccccggcctcagcctcatccccagccacacccatgcccgtgccaacagccgcatccaagcccgtgccagctgcaaggaacctgcggcgttggcagcaccccgatcctgggccagtgcgtcgagttcctg

SEQ ID NO: 19268 - DNA, 215 bp, Zea mays
  Clone ID: LIB3151-043-Q1-K1-C12
cagaccattagctttatctactccagagcgcagaagaacccgatcgacaccatgagggtgttgctcgttgccctcgctctcctggctctcgctgcgagcgccacctccacgcatacaagcggcggctgcggctgccagccaccgccgccggttcatctaccgccgccggtgcatctgccacctccggttcacctgccacctccggggcatcttcc

SEQ ID NO: 19269 - DNA, 442 bp, Zea mays
  Clone ID: LIB3151-043-Q1-K1-C2
agcaacatagaaagcacaatagtgtaccaacaatggcagccaaaatattttgcctccttatgctccttggtctttctgcaagtgctgctacggcgaccattttcccacaatgctcacaagctcctatagcttcccttcttcccccgtacctctcaccagcggtgtcttcggtatgtgaaaacccaattcttcaaccctataggatccaacaggcaatcgcagctggcatcttacctttatcacccttgttcctccaacaatcatcagccctattacagcagttacctttggtgcatttattggcacaaaacatcagggcacaacaactacaacaacttgtgctagcaaaccttgctgcctactctcagcaacaacagtttcttccattcaaccaactagctgcattgaactctgcttcttatttgaacaacacaactaccat

SEQ ID NO: 19270 - DNA, 351 bp, Zea mays
  Clone ID: LIB3151-043-Q1-K1-C3
gcaacatagaaagcacaatagtgtaccaacaatggcagctaaaatattttgcctccttatgctccttggtctttctgcaagtgctgctacggcgaccattttcccacaatgctcacaagctcctatagcttcccttcttcccccgtacctctcaccaacggtgtcttcggtatgtgaaaacccaattcttcaaccctacaggatccaacaggcaatcgcagctggcatcttacctttatcacccttgttcctccaacaatcatcagccctattacagcagttacctttggtgcatttattggcacaaaacatcaaggcacaacaactacaacaacttgtgctagcaaacct

SEQ ID NO: 19271 - DNA, 364 bp, Zea mays
  Clone ID: LIB3151-043-Q1-K1-C4
cagaaaacattgcgcaggaggcctttcttaataaagaatcttgaaaatgttatgcgtaaattcctgcaatccttggagttctttgaggaaaatgagaggaagaaactcgccatattcacagcccttgcattttctcagaagctatcaaggcttcctcctgagactgtgttccagccattgctcaaggataatcttgttgccaaagggatagtactttcattcattactgagtttttcaaggagtaccttgaggaaaacagcttggatgatttgattgcacttttgaagaaaggcaaaatggaggacaatctgttggacttcttcccatcagctaagagatcttctgaggctttatctgagcatt

SEQ ID NO: 19272 - DNA, 411 bp, Zea mays
  Clone ID: LIB3151-043-Q1-K1-C5
aaagcacaatagtgtaccaacaatggcagccaaaatattttgcctccttatgctccttggtatttgtgcaagtgctgctacggcgaccattttcccgcaatgctcacaagctcctatagcttcccttcttcccccgtacctctcaccagcggtgtcttcggtatgtgaaaacccaattcttcaaccctacaggatccaacaggcaatcgcagctggcatcttacctttatcacccttgttgctccaacaatcatcagccctattacagcagttacctttggtgcatttattggcacaaaacatgacggcacaacaactacaacaacttgtgctagcaaaccttgctggctactctcagcaacagcagattcttacattcaaccaactagctgcattgaactctgcttctta

SEQ ID NO: 19273 - DNA, 144 bp, Zea mays
  Clone ID: LIB3151-043-Q1-K1-C6
gcaacaacttccttcattcgctttgaggcgtgcccaaccatggctgtcctcggcaccgcggcggttgaggtgctcatcccggagcggattggtgcatcgtttccgtgtgagggatgggggcaagtccggcttcacccgagacgg

SEQ ID NO: 19274 - DNA, 222 bp, Zea mays
  Clone ID: LIB3151-043-Q1-K1-C7
cttccatttggacccacttgccacatttaaagggccatagggggcccacaatgggcgcccaaatattttggtttcctatgccccctgggctttctgccaaggttgtgacccgaacccattttccacaaaggttacaaacttctataggtttccttttttccccataccctttaacaaaggggggtttaaaggggggaaaacccatttgttaaaccttcccgg

SEQ ID NO: 19275 - DNA, 352 bp, Zea mays
  Clone ID: LIB3151-043-Q1-K1-C8
cttccaaagcctttcctttttaaagagggggatcatcagattgggcttattattccttattactccaggcaaggatcggagttgctctgaattgactgaaccatggcggcgacaatggcagtgacgacgatggtgacgaggagcaaggagagctggtcgtcattgcaagtcccggcggtggcattcccttggaagccacgaggtggcaagaccggcggcctcgagtttcctcgccgggcgatgttcgccagcgtcggccttaacgtgtgcccgggcgttccaacggggcgcgacccgcgggagcccgatcccaatgtcgttcgggcggccgacaactgcgacatcgcgcgcc

SEQ ID NO: 19276 - DNA, 447 bp, Zea mays
  Clone ID: LIB3151-043-Q1-K1-C9
tcgacccacttgcaacataaaaaggaccattagggtcccaccatgggcagccaaatattttggcttcttatgctccttggtctttctgcaagtgttgctaccgcaaccattttcccacaatgctcacaagctcctatagcttcccttcttcccccatacctctcaccagcggtgtcttcaatgtgtgaaaacccaattgttcaaccctacaggatccaacaggcaatcgcaacaggcatcttaccattatcacccttgttcctccaacaaccgtcagccctattacagcagttacctttggtccatttggtggcacaaaacatcagggcacaacaactacaacaacttgtgctagcaaaccttgctgcatactctcagcaacatcagtttcttccattcaaccaactggctgcattgaactctgctgcttatttgcaacaacaatta

SEQ ID NO: 19277 - DNA, 405 bp, Zea mays
  Clone ID: LIB3151-043-Q1-K1-D1
ctagcaacatacatagtgaagtacagtagcaacatcttagcaccaatggcagccaaaatttttgccctccttgccctccttgctctttcaacgagtggtgctaccgcgactattattccacaatgctcacaacaatacctctctccggggacagccgcgagatttgaatacccaactatacaatcctacaggctacaagaagccatcacagcaagcatcttacggtcgttagcattgactgtccaacaaccatatgccctattgcaacaaccatccttagtgaatctatatctgcaaagaatcgcagcacaacaactacaacagcagttgcttgcaacaatcaatcaagtagttgcagcgaaccttgctgcttacctccagcaacaacaatttcttccattcaat

SEQ ID NO: 19278 - DNA, 320 bp, Zea mays
  Clone ID: LIB3151-043-Q1-K1-D10
cgaggagagagaaagttctcgagctagacgagcgccgtgcgaggagagaagcgagatgagcggtgaggcggcggccgtgggcggaggcgaaagaaaagcgaatggcatcccgccgaacgtcaccatctatatcaacaacctcaacgagaagatcaagctcgaagaacttaagaagtccctaacaaccgttttttcccaagttgggaaaattcttgatgggcttgctttcaaaactttggagcataaaagtcaagcttgggttggcttcgaaaatgtcgcattaactactggagcttttaaaaagatgcaaggcttttcct

SEQ ID NO: 19279 - DNA, 363 bp, Zea mays
  Clone ID: LIB3151-043-Q1-K1-D11
aacaaactcccgtcgtggcgtctcaccgtttccaggatacgaacatgaggtcggccaccctgcttacgatctgcaccttgtccgcgctgctgctggtggcgcgcggctcggagaagccatcggccgcgccgccgccggtggtggccgtgggcgtggcggcagccaccgaccttattcgcttcggcggtcaccgctacctggacggtagaacagaagaagaattcaagagggggcatggggaggatttactcaacgggccctatcttttcttcacttcacaaggaagggagaagaaccccaagttcatcgcacaggtcgcagcgggtttcgacaaagaggacaacataggtgtgggctgcaaaa

SEQ ID NO: 19280 - DNA, 451 bp, Zea mays
  Clone ID: LIB3151-043-Q1-K1-D12
caactagcaacatagaaagcacaatagtgtaccaacaatggcagccaaaatattttgcctccttatgctccttggtctttctgcaagtgctgctacggcgaccattttcccgaaatgctcgcaagctcctatagcttcccttcttcccccgtacctctcaccagcggtgtcttcggtatgtgaaaacccaattcttcaaccctacaggatccaacaggcaatcacagctggcatcttacctttatcacccttgttcctccaacaatcatcagccctattacatcagttacctttggtgcatttattggcacaaaacatcagggcacaacaactacaacaacttgtgctagcaaaccttgctgcctactctcagcaacagcagtttcttccattcaaccaactagctgcattgaactctgcttcttatttgcaacaacaacaactaccattc

SEQ ID NO: 19281 - DNA, 326 bp, Zea mays
  Clone ID: LIB3151-043-Q1-K1-D2
tctatacagatcacggacgctgtagagcatacaaaggaacgtacaacagaacaccacgaagatggtcatctatctcgtcacgtgcctggatttgacaggtggcagcgccactacaatgcaaatgccatgaccctgcgcggagctaaatgaattgtacggcgctagatcccgcctgacgacgatgatgggcgcccgaagactgcaccactactcggcgttcctaacacatgcgcagtgtaaatggctaacgggacgcgccttctacccccgcattaagcacacgagctcgatggactacccgctgcgggaacagtgctctcggcagc

SEQ ID NO: 19282 - DNA, 418 bp, Zea mays
  Clone ID: LIB3151-043-Q1-K1-D3
cgcgacgtccctcgccttcgccgccgaatccgagactccgatctcgggttcaccgcagcgcacagagcagccccgactcccggcccgatccgcgctctcctctccgtcgcttcagtcatggcaggaatggcacctgagggttctcagttcgatgctaagcactatgattctaagatgcaggagctgctgagcaccggtgagactgaggagttcttcacttcatatgatgaagtttttgagagttttgatgatatgggcctccaagagaatcttctgagaggcatttatgcttatggttttgagaagccatctgcaattcagcagagaggaattgttcccttctgcaagggtcttgatgtcattcagcaagcacaatctggtacaggaaagacagcaaccttctgttctgggatcttgc

SEQ ID NO: 19283 - DNA, 325 bp, Zea mays
  Clone ID: LIB3151-043-Q1-K1-D4
tcggcaggagacaacttcggcaccttcacccttgaattgtttcccaccattgggtcgcaaggattcttcgttttttccgcactttagcagggccccgaggaacccattctttgagagaccgcgggcttcaacaaagataccaaccccgtggaaaggaaactttggggtggggccttaccgaaccaaggaagggaaccccttatgctttaaccgggtcagggcgcccaaccaaattttgatcaataatccggaccggtgaaaggggtacctaccaataaccgggttggttgaattaaataagctggcgcctaaacttttttttggg

SEQ ID NO: 19284 - DNA, 357 bp, Zea mays
  Clone ID: LIB3151-043-Q1-K1-D5
caactagcaacatagaaagcacaatagtgtaccaacaatggcagccaaaatattttgcttccttatgctccttggtctttctgcaagtgctgctaccgcaaccattttcccacaatgctcacaagctcctatagcttcctttcttcccccatacctctcaccagcggtgtcttcagtatgtgaaaacccaattcttcaaccctacaggatccaacaggcaatcgcagcaggcatcttacctttatcacccttgttcctccaacaaccgtcagccctattacagcagttacctttggtgcatttgttggcacaaaacatcaaggcacaacaactacaacaacttgtgctaggaaacct

SEQ ID NO: 19285 - DNA, 417 bp, Zea mays
  Clone ID: LIB3151-043-Q1-K1-D7
tggacgtcagcctagcaattagctcatcgactccagattggagaactcgacaccatgaatgtgctgatcgttgcccttgctctcctggcgctcgctgcgagcgccgcctccagtacaagcggcggctgtggctgccagacaccaccgtttcatctaccgactccgttctatatgccgcctccgttctatctgccgccgcagcagcagccgcagccatggcaataccccactcaaccaccgcagctaagcccgtgccagcagttcggatcctgcggcgtcggcagcgtcggcagcccgttcctgggccagtgcgtcgagttactgaggcaccagtgcagcccggcggcgacgccctacggctcgccacagtgccaggcgctgcagcagcagtgctgccaccagatcaagcaggtggag

SEQ ID NO: 19286 - DNA, 468 bp, Zea mays
  Clone ID: LIB3151-043-Q1-K1-D8
aaaccaccttaaaaggtggaatacagtagcaacaatagagcaacaatggcggccaagatattttccatccttatgctccttgctctttctgcatgtgttgctaacgcgaccatttttcctcaatactcacaagctcctatagctgcccttcttcccccataccttccatcaatgaccgcttcagtatgtgaaaacccagcccttcaaccctacaggctccaacaagcaatcgcaacaagcaacttacctttatcacccctgttctttcaacaatcgccagccctatctttggtgcagtcattggtacaaaccatcagggcacaacagctgcagcaactcgtgctaccagtgatcagccaagtagctctggcaaacctttctccctactctcagcaacaacaatttcttgcattcaaccaactgtctacactgaaccctgctgcttatttgcagcaacaacaactacta

SEQ ID NO: 19287 - DNA, 409 bp, Zea mays
  unsure at all n locations
  Clone ID: LIB3151-043-Q1-K1-D9
tcggcaaaacgcaaaaaaacccggacggaaacattaagggggtggctcgttgccttcgctcttcctggctctcgctgcgagcgccacctccacgcatacaagcggcggctgcggctgccaaccaccgccgccggttcatctaccgccgccggtgcatctgccacctncggttcacctgccacctccggtgcatctnccaccgccggtccacctgccgccgccggtccacctgccaccgccggtccatgtgccgccgccggttcatctgccgccgccaccatgccactaccctactcaaccgccccggcctcagcctcatccccagccacacccatgcccgtgccaacagccgcatncaagcccgtgccagctgcagggaacctgcggcgttggcagcaccccgatcctg

SEQ ID NO: 19288 - DNA, 388 bp, Zea mays
  Clone ID: LIB3151-043-Q1-K1-E1
ggacgtcagcctagcaattagctgatcgactccagataggagaactcgacaccatgaaggtgctgatcgttgcccttgctctcctggcgctcgctgcgagcgccggctccagtacaagcggcgggtgtggctgccacacaccaccggttcatctaccgacttcgttctatatgccgcctacgttctatctggcgtcgcagcaacagctcgagccatggcaataccccactcaaccaccgtaactaagcccgtgccaggagttcggatcctgcggcgtcggcagcgtccgcagcccgttcctgggacagtgcgtcgagttactgatgcaccagtgcacgccggcggcgacgccctacggctcgccacaaggacatgcgctgcatcatca

SEQ ID NO: 19289 - DNA, 408 bp, Zea mays
  unsure at all n locations
  Clone ID: LIB3151-043-Q1-K1-E10
cacagccaacaccacccgccgaggcgacgcgacagccgccaggaggaaggaataaactcactgccagccagtgaagggggagaagtgtactgctccgtcgaccagtgcgcgcaccgcccggcagggctgctcatctcgtcgacgaccagtggattaatcggcatggcggctctggccacgtcgcagctcgtcgcaacgcccgccggcctgggcgtcccggacgcgtccacgttccgccgcggcgccgcgcanggcctgaggggggcccgggcgtcggcggcggcggacacgctcagcatgcggaccagcgcgcgcgcggcgcccangcaccagcagcaagcgcgccgcgggggcaggttcccgtcgctcgtcgtgtgcgccagcgccggcatgaacgtcgtcttcgtc

SEQ ID NO: 19290 - DNA, 399 bp, Zea mays
  Clone ID: LIB3151-043-Q1-K1-E11
cctcacccagccaccggccatgtcggtggagacggagcggagctccaccgagtcctccggggcttccgggctcgacttcgaggacaccgcgctcacgctcaccctccgcctcccgggctccgcgccttccgccgccgccgccgccgcggcctccctgtccctctcctcctcgtcgtcctccgccttccccgaccccgaccgcaagcgcgcctcctccgacgctgaccccggccgctcctccccgctcgccgcgtcctccgacgctgcaccggcacccaaagctcgtgtggtgggctggccgccggtgaggtcgtaccgcaagaacgcgctcgccgacgccgcgggctccggcaaggccgccaagttcgtcaaggtggccgtcgacggcgcgccctacct

SEQ ID NO: 19291 - DNA, 355 bp, Zea mays
  Clone ID: LIB3151-043-Q1-K1-E12
agaccattagctttatctactccagagcgcagaagaacccgatcgacaccatgagggtgttgctcgttgccctcgctctcctggctctcgctgcgagcgccacctccacgcatacaagcggcggctgcggctgccagccaccgccgccggttcatctaccgccgccggtgcatctgccacctccggttcacctgccacctccggtgcatcttccaccgccggtccacctgccgccgccggtccacctgccaccgccggtccatgtgccgccgccggttcatctgccgccgccaccatgccactaccctactcaaccgccccggcctcagcctcattcccagccacacccatgccc

SEQ ID NO: 19292 - DNA, 314 bp, Zea mays
  Clone ID: LIB3151-043-Q1-K1-E2
ccaacaagcaacatagaaagtggaatccagtagcaacaatagagcaacaatggcgaccaagatattttccctccttatgctccttgctctttctgcatgtgttgctaacgcgacaattttccctcaatgctcacaagctcctatagcttcccttcttcccccataccttccatcaatgatagcttcagtatgtgaaaacccaactcttcaaccctataggctccaacaagcaatcgcagcaagcaacatacctttatcacccttggttcaacaatcgccagccctatctttggtgcaagcattggtaccaacca

SEQ ID NO: 19293 - DNA, 186 bp, Zea mays
  Clone ID: LIB3151-043-Q1-K1-E4
tcggagaccttagaccattaactttatttaatctacaacggcgaaaaaccccgaacgaaccgtgggggggctgcgcgtctggctcgctcttccggcttttgctgggagcgccacctccacccatacaatctgcgggtgtggctgtcaggcaccgccggcggttgatctaccggcgacggggcatat

SEQ ID NO: 19294 - DNA, 316 bp, Zea mays
  unsure at all n locations
  Clone ID: LIB3151-043-Q1-K1-E6
ctnccgaccattaactttattttattccaaacggcaaaaaaccccgatcgacaccttgagggtgttgctggttgacctcgctctcctggctcttgctgggaacgccaacttcacgcatacaagcggcggctgcggctgccagccacccggcgccggttcatctaccgccgccggtgcatctgccaccttcggttcactgccacctcgggcattccaccgcgccactgcgcgcgtcactgcacgcgtctggcgcgcgtattgcgcgacatgcatctataacgccgctagctatccagccacctgcggcaagcgatca

SEQ ID NO: 19295 - DNA, 131 bp, Zea mays
  unsure at all n locations
  Clone ID: LIB3151-043-Q1-K1-E7
cccacgcgtncggaccaactagcaacatagaaagcacaatagtgtaccaacaatggcagctaaaatattgtgcctacttatgctccttggtctttctgcaagtgctgctaccgcgaccattttcccacaat

SEQ ID NO: 19296 - DNA, 350 bp, Zea mays
  unsure at all n locations
  Clone ID: LIB3151-043-Q1-K1-E8
cttccaccacctactaccattcagccagctagctggtgtgagccctgctaccttcttgacacaaccacagttgttgccgttctaccagcacgctgcgcctaacgctggcaccctcttacaactgcaacaattgctgccattcaaccaacttgctttgacaaacctagcagtgttctaccaacaacccatcattggtggtgccctcttttagatttcttatgagttatagttcaataataaaagtttttgtctgatgtttggggcttcccaaaaataagaaagtacatttcttgaaaaaaaaanggnaacccacaaaaagaccaaaacactagccaacaccataacacaag

SEQ ID NO: 19297 - DNA, 405 bp, Zea mays
  unsure at all n locations
  Clone ID: LIB3151-043-Q1-K1-F10
gacacaatcaactctatgtaatctgcagggaacatgaaccggatggacaacatgaaggcggggctagtgggcctagtttttctggctttagctgagagcgacagctacacgcttatgatcggctgatggccatgccatgcaccagcagcggtgcatgtacctcaggcagggcatgtggcacctccggtacaactggaacttccggtggatcttccaccgcatgctgaactagcagccgcagagcagctagcaccggcggttcatgtgccggcanatagtgatataactgacggagatgcgccgactgtactaaaccactccatgctcatactctattgccggcagagtcatgcactggagaaaatatgtattgaagcataggccatgtgtaggtaactatgtgag

SEQ ID NO: 19298 - DNA, 436 bp, Zea mays
  Clone ID: LIB3151-043-Q1-K1-F11
ttgagaccaacaagcaacatagaaagtggaatccagtagcaacaatagagcaacaatggcgaccaagatattttccctccttatgctccttgctctttctgcatgtgttgctaacgcgacaattttccctcaatgctcacaagctcctatagcttcccttcttcccccataccttccatcaatgatagcttgagtatgtgaaaacccagctcttcaaccctataggctccaacaagcaatcgcagcaagcaacatacctttatcacccttggttcaacaatcgccagccctatctttggtgcaggcattggtacaaaccatgaaggcacatcagctgcagcaactcgtgctacctgtgatcaaccaagtagctgtggcaaacctttctccctactctcagcaacaacaatttcttccattcaaccaactgtctaca

SEQ ID NO: 19299 - DNA, 242 bp, Zea mays
  Clone ID: LIB3151-043-Q1-K1-F12
gcctagcaattagctcatcgactccagattggagaactcgacaccatgaaggtgctgatcgttgcccttgctctcctggcgctcgctgcgagcgccgcctccagtacaagcggcggctgtggctgccagacaccaccgtttcatctaccgcctccgttctatatgccgcctccgttctatctgccgccgcagcagcagccgcaaccatggcaataccccactcaaccaccgcaactaaaccc

SEQ ID NO: 19300 - DNA, 425 bp, Zea mays
  Clone ID: LIB3151-043-Q1-K1-F2
gtgaaggccaacaacaacatcaccaacaatcacaaggccatgtgcaacaacacgaacagagccatgagcaacaccaaggacagagccatgagcaacaacatcaacaacaattccagggtcatgacaagcagcaacaaccacaacagcctcagcaatatcagcagggccaggaaaaatcacaacagcaacaatgtcattgccaggaagcagcaacagactacaaggtgcagctataactactatagcagtagctcaaatctaaaaaattgtcatgaattcctaaagcagcagtgcagccctttggtaatgccttttctccaatcacgtttgatacaaccaaatagctgccaggtattgcagcaacaatgttgtcatgatcttaggcagattgaaccacaatacattcaccaagcaatctacaacat

SEQ ID NO: 19301 - DNA, 364 bp, Zea mays
  unsure at all n locations
  Clone ID: LIB3151-043-Q1-K1-F3
gttcccctccacaggatgtccgaccccgccgctggaggcgccatggttcctgctgccggacgcggcatcgcatgggcgaacggcggcccccggttcggcgacatggtctgggccaaggtgaagtcccatccgtggtggcctggccatatctacagcgtcagcctcaccgacgacgaggaggtacaccgcggccaccgcgacgggctcgtcctcgtcgccttcttcggtgactcgagctatgggtggtttgaccccagcgagctcgtccccttcgtggaccacttcaccgagaaggcggcccanggcggcagcttccgcagcagctttgccgccgccgtggccgaggccgtcgacgaggtaaccc

SEQ ID NO: 19302 - DNA, 458 bp, Zea mays
  Clone ID: LIB3151-043-Q1-K1-F4
attttgagcatttaaaaacacacccagcgaaacggacttaccaccaccttaccaaaaatggctaccaagatattatccctccttgcgcttcttgcgctttttgcgagcgcaacaaatgcgtgcattattccacaatgctcacttgctcctagttccattattccacagttcctcccaccagttacttcaatggccttcgaacacccagctgtgcaagcctataagctacaacaagcgattgcggcgagcgtcttacaacaaccaattgcccaattgcaacaacaatccttggcacatctaacaatacaaaccatcgcaacgcaacagcaacaacagttcctaccagcactgagccacctagccatggtgaaccctgtcgcctacttgcaacagcagctgcttgcatccaacccacttgctctagcaaacgtagttgcaaaccagcaacaacaacaact

SEQ ID NO: 19303 - DNA, 465 bp, Zea mays
  unsure at all n locations
  Clone ID: LIB3151-043-Q1-K1-F5
gtgcgtagagaggatcgtcgaacagaacagcatgaagatggtcatcgttctcgtcgtgtgcctggctctgtcagctgccagcgcctctgcaatgcagatgccctgcccctgcgcggggctgcagggcttgtacggcgctggcgccggcctgacgacgatgatgggcgccggcgggctgtacccctacgcggagtacctgaggcagccgcagtgcagcccgctggcggcggcgccctactacgccgggtgtgggcagacgagcgccatgtaccagccgctccggcaacagtgctgccagcagcagatgaggatgatggacgtgcagtccgtcgcgcagcagctgcagatgatgatgcagcttgagcgtgccgctgccgccagcagcaacctgtacgagccagctctgatgcaacagcagcagcagctgctggcagcccanggtctcaaccccatggccatgatgat

SEQ ID NO: 19304 - DNA, 359 bp, Zea mays
  Clone ID: LIB3151-043-Q1-K1-F6
tccggcaacttgaaggaaccttgcggggttggaagacccccaatcttgggccagtccttcaagtttttgaggattaaatgcagcccgacggcgacaccctacttgctcgcctcaatgccagtcgttgcggcagcagtgttgccagcagctcaagcaggtggagccgcagcaccggtaccaggcgatcttcggcttggtcctccagtccattctgcagcaacagccgcaaagcggccacgtcgcggggctgttggcggcgcaaatagcgcaacaactgaccgcgatgtgcgggctgtaacaaccgacttcatgcccctacgctggtggcggcggtgtgccccactgaagaaactatgtgc

SEQ ID NO: 19305 - DNA, 293 bp, Zea mays
  Clone ID: LIB3151-043-Q1-K1-F7
aatattttgcctccttatgctccttggtctttctgcaagtgctgctacggcgaccattttcccgcaatgctcgcaagctcctatagacttccttctttccccgtacctctcaccagcggtgtcttcggtatgtgaaaacccaattcttcaaccctacaggatccaacaggcaatcgcagctggcatcttacctttatcacccttggtcctccaacaatcatcagccctattacaacaggtacctttggtgcatttattggcacaaaacattagggcacaacaactacaacaac

SEQ ID NO: 19306 - DNA, 368 bp, Zea mays
  Clone ID: LIB3151-043-Q1-K1-F9
tcgactaggtctagatcgcgagccggccgcctttttttttttttttaaaaaattaaaaaaggaccttcttaatttttgggaagccccaaaacattagggcacaacaactacaacaacttgtgctagcaaaccttgctgcctactctcagaaacagcagtttcttccattcaaccaactagctgcattgaactctgcttcttatttgcaacaacaacaactaccattcagccagctatctgctggctacccccaacaatttctttcattcaaccaactgacagcattgaactctcctgcttatttacagcagcaacaactactaccattcagccagctagctggtgtgagccctgctaccttcttgaca

SEQ ID NO: 19307 - DNA, 440 bp, Zea mays
  Clone ID: LIB3151-043-Q1-K1-G1
agaaagcacaatagtgtaccaacaatggcagccaaaatattttgcctccttatgctccttggtctttctgcaagtgctgctacggcgaccattttcccgaaatgctcgcaagctcctatagcttcccttcttcccccgtacctctcaccagcggtgtcttcggtatgtgaaaacccaattcttcaaccctacaggatccaacaggcaatcacagctggcatcttacctttatcacccttgttcctccaacaatcatcagccctattacatcagttacctttggtgcatttattggcacaaaacatcagggcacaacaactacaacaacttgtgctagcaaaccttgctgcctactctcagcaacagcagtttcttccattcaaccaactagctgcattgaactctgcttcttatttgcaacaacaacaactaccattcag

SEQ ID NO: 19308 - DNA, 351 bp, Zea mays
  unsure at all n locations
  Clone ID: LIB3151-043-Q1-K1-G10
agaccattagctttatctactccagagcgcagaagaacccgatcgacaccatgagggtgttgctcgttgccctcgctctcctggctctcgctgcgagcgccacctccacgcatacaagcggcggctgcggctgccagccaccgccgccggttcatctaccgccgccggtgcatctgccacctccggttcacctgccacctacggtgcatctcccaccgccggtccacctgccgccgccggtccacctgccaccgacggtccatgtgccgncgacggttcatctgccgacgtcaccatgccactaccctactcaaccgccccggcctcaacctgatgcccagccacacccat

SEQ ID NO: 19309 - DNA, 342 bp, Zea mays
  Clone ID: LIB3151-043-Q1-K1-G11
caacaagcaacatagaaagtggaatccagtagcaacaatagagcaacaatggagaccaagatattttccctccttatgctccttgctctttctacatgtgttgctaacgcgacaattttccctcaatgctcacaagctcctatagcttccctttttcccccataccttccatcaattatagcttcagtatgtgaaaacccagctcttcaaccatataggcttcaacaagcaatcgcagcaagcaacatacctttatcgcccttgttgtgtcaacaatcgccagccctatctttggtgcagtcattggtacaaaccatcaaggcacaacagctgcagcaactc

SEQ ID NO: 19310 - DNA, 441 bp, Zea mays
  Clone ID: LIB3151-043-Q1-K1-G12
caacaagcaacatagaaagtggaatacagtagcaacaatagagcaacaatggcggccaagatattttccatccttatgctccttgctctttctgcatgtgttgctaacgcgaccatttttcctcaatactcacaagctcctatagctgcccttcttcccccataccttccatcaatgaccgcttcagtatgtgaaaacccagcccttcaaccctacaggctccaacaagcaatcgcaacaagcaacttacctttatcacccctgttctttcaacaatcgccagccctatctttggtgcagtcattggtacaaaccatcagggcacaacagctgcagcaactcgtgctaccagtgatcagccaagtagctctggcaaacctttctccctactctcagcaacaacaatttcttccattcaaccaactgtctacactgaaccct

SEQ ID NO: 19311 - DNA, 427 bp, Zea mays
  Clone ID: LIB3151-043-Q1-K1-G2
cccacgcgtccgcactcatgcatcacaaaacatccttctatcagtaccatcaatcatcattcatcttagtagtataggcaccaaatcaaatctgcaacatcaattatctaactccaaaaaccatgaagctggtgcttgtggttcttgctttcattgctttagtatcaagtgtttcttgtacacagacaggcggctgcagctgtggtcaacaacaaagccatgagcagcaacatcatccacaacaacatcatccacaaaaacaacaacatcaaccaccaccacaacatcaccagcagcagcaacaccaacaacaacaagttcacatgcaaccacaaaaacatcagcaacaacaagaagttcatgttcaacaacaacaacaacaaccgcagcaccaacaacaacaacaacaacagcaccaacaacaaca

SEQ ID NO: 19312 - DNA, 135 bp, Zea mays
  unsure at all n locations
  Clone ID: LIB3151-043-Q1-K1-G4
tttaaattatcaactccataccttatttttaattctatcaacaccaaaaaattntttctgttttttttaaaactcctggctccctctaaaaacaccatctacacacatacaatctattattttctaatttcaacc

SEQ ID NO: 19313 - DNA, 53 bp, Zea mays
  Clone ID: LIB3151-043-Q1-K1-G8
cttcgaaaacattaactttatttaattcaaaagggcaaaaaaacccgaccgac

SEQ ID NO: 19314 - DNA, 296 bp, Zea mays
  Clone ID: LIB3151-043-Q1-K1-G9
ctcgcccccacggaccctcgccgccggggaagcgccgctcgctcaggaggacagccatggcgccggagccggaggatgatattatgaacgagaagaatccccgcccgctcgacgaggacgacatcgcgctcctcaagacctatgggcttgggccgtactctactagcattaagaaggtcgagaaggagatcaaggaaatggccaagaaaatcaatgacctttgtggtataaaggagtctgatacaaggttggctccacctaaccagtgggatttggtttcagataaacagatgatg

SEQ ID NO: 19315 - DNA, 70 bp, Zea mays
  Clone ID: LIB3151-043-Q1-K1-H1
attttaatattataaacttgcaccgagtcgaacaaagtttatttttttttgcccaaactaagataaactt

SEQ ID NO: 19316 - DNA, 250 bp, Zea mays
  Clone ID: LIB3151-043-Q1-K1-H10
tttcagcattcagaaacacaccaagcgaagcgcactagcaacaacctaacaacaatggctaccaagatattagccctccttgcgcttcttgcccttttagtgagcgcaacaaatgcgttcattattccacagtgctcacttgctcctagtgccattattccacagttcctcccaccagttacttcaatgggcttcgaacatccagccgtgcaagcctacagggctacaactaagccgcttgcggcgaagc

SEQ ID NO: 19317 - DNA, 173 bp, Zea mays
  Clone ID: LIB3151-043-Q1-K1-H11
atcgacaccatgagggtgttgctcgttgccctcgctctcctggctctcgctgcgagcgccacgtccacgcatacaagcggcggctgcggctgccagccaccgccgccggttcatctaccgccgccggtgcatctgccacctccggttcacctgccacctccggtgcatcttcc

SEQ ID NO: 19318 - DNA, 456 bp, Zea mays
  Clone ID: LIB3151-043-Q1-K1-H7
ctgggtcttcagaccattagctttatctactccagagcgcagaagaacccgatcgacaccatgagggtgttgctcgttgccctcgctctcctggctctcgctgcgagcgccacctccacgcatacaagcggcggctgcggctgccagccaccgccgccggttcatctaccgccgccggtgcatctgccacctccggttcacctgccacctccggtgcatctcccaccgccggtccacctgccgccgccggtccacctgccaccgccggtccatgtgccgccgccggttcatctgccgccgccaccatgccactaccctactcaaccgccccggcctcagcctcatccccagccacacccatgcccgtgccaacagccgcatccaagcccgtgccagctgcaaggaacctgccggcgtggcagcaccccgatcctgggccaatgcgtcgagttcctg

SEQ ID NO: 19319 - DNA, 152 bp, Zea mays
  Clone ID: LIB3151-043-Q1-K1-H8
ttaccgcggccgtggatttggcaacttcgggtgaacctgccacctccggggattttccaacgggggggcaactggcggcggcggggcacctggcaccggcggggcatttgcccccccccggttatatgtcgccgccaccattgcactatcct

SEQ ID NO: 19320 - DNA, 103 bp, Zea mays
  Clone ID: LIB3151-043-Q1-K1-H9
ggccggaaccggggccggggccaacgggcccaattaccaaccggttctttcttttaaatgggccaattggcccgaatgttttttggcccaatttttttttttt

SEQ ID NO: 19321 - DNA, 203 bp, Zea mays
  Clone ID: LIB3151-044-Q1-K1-A1
gatagaaagtggaatccagtagcaacaatagagcaacaatggggaccaagatattttccctccttatgctccttgctctttctgcatgtgttgctaacgcgacaatttttcctcaatgctcacaaactgctatagcttcccttcttcccccataccttccatcaatgatagcttgagtatgtggaaacccacctcttttaccc

SEQ ID NO: 19322 - DNA, 436 bp, Zea mays
  Clone ID: LIB3151-044-Q1-K1-A10
agaccaacatgcaacatagaaagtggaatgcagaagcaacaatagatcaacaatggcgaccaagacattttccctgcttatgctccttgctctatctgcatgtgctgctaacgcgacaattttgcctcaatgctcacaagcttctatagcttcccttcttgccccataccttccatcaatgatagcttcagaatgtgaaaacccaactcttcaaccctataggctgcaacaagcaatcggagcaagcaacatacctttatcacccttgtttcaacaatcgacagccctatctttggtgcagtcattgatacaaaccatgagggcacagtagctgcagcaactcgtgctacctgtgatcaaccaagtagctctggcgaacctttgtacctactctcagcaacaacaatttcttccattcaaccaactgtctacattg

SEQ ID NO: 19323 - DNA, 176 bp, Zea mays
  Clone ID: LIB3151-044-Q1-K1-A11
ctgcaaatgcatacattattctacattgattactagctgctaaatacattattccacaccatgtgggagcatgctacttgaatgtcctttaacactctctgtgcagcctatatctaaaaaccgatgcggtgggtttaacaaccatggaatgaacacatgtggaattaaataaacca

SEQ ID NO: 19324 - DNA, 155 bp, Zea mays
  Clone ID: LIB3151-044-Q1-K1-A12
caactagcaacatagaaagcacaatagtgtaccaacaatggcagccaaaatattttgcttccttatgctccttggtctttctggaagtgttgctaccgcaaccattttcccacaatgctcacaagctcctatagcttgccttttttccccatacc

SEQ ID NO: 19325 - DNA, 211 bp, Zea mays
  Clone ID: LIB3151-044-Q1-K1-A4
attgagaccaacttgcgacatagaaagcacaatattgtacccataatggcagccaaaatattttgcctcaatatgctccctgggctttctgcaaatgctgctacagcgagcatttttccgcaatgctcacaaactcctatagctttccttttttccccatacctctcaccagcgatgtgtttagtatgtgaaaatacaattcttttaccct

SEQ ID NO: 19326 - DNA, 134 bp, Zea mays
  Clone ID: LIB3151-044-Q1-K1-A5
tcggagaccattaactttatctacttcagaacgcaaaaaaacccgatcgacaccattagggggttggtcggtggccttgctcttctgggtcttgctgggagcgccaccttcacgcatacaaacggggggtgggg

SEQ ID NO: 19327 - DNA, 193 bp, Zea mays
  Clone ID: LIB3151-044-Q1-K1-A6
cagaaacacaccaagcgaagcacattagcaacaacctaacaacaatgggtaccaagatattatcccttcttgcgcttcttgcgctttttgcgagcgcaacaaatgcgttcattattccacaatgctcacttgctccaaggtccattattacacaagtcctcccaccaagtactttaatgggctttgaacaccc

SEQ ID NO: 19328 - DNA, 361 bp, Zea mays
  Clone ID: LIB3151-044-Q1-K1-A7
aatattttgagcattcagaaacacaccaagcgaagcgcactaacaacgacctaacaacaatggctaccaagatattaaccctccttgcgcttcttgccctttttgtgagcgcaacaaatgcgttcattattccacaatgctcacttgctcctagtgccattattccacagttcctcccaccagttacttcaatgggcttcgaacacctagctgtgcaagccaacatgcaacaacaagcgcttgcggcgagcgtcttacaacaaccaattgcccaattgcaacaacaatccttgccacatctaacaatacaagccatcacaacgcaacagcaacaacagttcctaccagcactgagccacct

SEQ ID NO: 19329 - DNA, 462 bp, Zea mays
  Clone ID: LIB3151-044-Q1-K1-A8
attttgagcattcagaaacacaccaagcgaagcgcactagcaacgacctaacaacaatggctaccaagatattagccctccttgcgcttcttgccctttttgtgagcgcaacaaatgcgttcattattccacaatgctcacttgctcctagtgccattattccacagttcctcccaccagttacttcaatgggcttcgaacacctagctgtgcaagccaacatgcaacaacaagcgcttgcggcgagcgtcttacaacaaccaattgcccaattgcaacaacaatccttgccacatctaacaatacaagccatcacaacgcaacagcaacaacagttcctaccagcactgagccacctagccatggtgaaccctgccgcctacttgcaagagcagctgcttgcatccaacccacttgctctggcgaacgtagttgcaaaccagcaacaacaacagctacaac

SEQ ID NO: 19330 - DNA, 300 bp, Zea mays
  Clone ID: LIB3151-044-Q1-K1-A9
tagaaagtggaatccagtagcaacaatagagcaacaatggcgaccaagatattttcccctcgtatgcctcctgctctttctgcatgtgttgctaacgcgacaattttccctcaatgctcacaagctcctatagcttcccttctttccccatacctttcatcaatgatagcttcagtatgtgaaaacccagctcttcaaccctataggctccaacaagcaatcgcagcaagcgacatacctttatcacccttgtgttaacaatcgccagccctatctttggtgcaggcattgggacaaacc

SEQ ID NO: 19331 - DNA, 383 bp, Zea mays
  Clone ID: LIB3151-044-Q1-K1-B10
gaccaactagcaacatagaaagcacaatagtgtaccaacaatggcagccaaaatattttgcttccttatgctccttggtctttctgcaagtgctgctaccgcaaccattttcccacaatgctcacaagctcctatagcttcctttcttcccccatacctctcaccagcggtgtcttcagtatgtgaaaacccaattcttcaaccctacaggatccaacaggcaatcgcagcaggcatcttacctttatcacccttgttcctccaacaaccgtcagccctattacagcagttacctttggtgcatttgttggcacaaaacatcaaggcacaacaactacaacaacttgtgctaagaaaccttgctgcctactctcagcaacagc

SEQ ID NO: 19332 - DNA, 476 bp, Zea mays
  Clone ID: LIB3151-044-Q1-K1-B11
ctgggtcttcagaccattagctttatctactccagagcgcagaagaacccgatcgacaccatgagggtgttgctcgttgccctcgctctcctggctctcgctgcgagcgccacctccacgcatacaagcggcggctgcggctgccagccaccgccgccggttcatctaccgccgccggtgcatctgccacctccggttcacctgccacctccggtgcatctcccaccgccggtccacctgccgccgccggtccacctgccaccgccggtccatgtgccgccgccggttcatctgccgccgccaccatgccactaccctactcaaccgccccggcctcagcctcatccccagccacacccatgcccgtgccaacagccgcatccaagcccgtgccagctgcagggaacctgcggcgttggcagcaccccgatcctgggccagtgcgtcgagtttctgaggcatcagtgcagcccgac

SEQ ID NO: 19333 - DNA, 427 bp, Zea mays
  Clone ID: LIB3151-044-Q1-K1-B12
gatggccatcgcctcaggcggcgccagctcgctcatcctgtccaactacgcgcagctcctgtacgagatcgacaaggacatcgagagggcggagatgtacttcaagcaggcggtggccgccgagccggcggacggcgaagcgatgcggaggtacggcatgttcctgtggcacgcccgcggcgacacgggcggcgcggaagacatgttcaccggcgccattgacgcggagcccgagagcagccaccaccggagcagctacgcgtggttcctatggatgaccggcggcgtcgagacctgcctcatggacaccggcaggcagagcgacggcaacgacgcggattgaaccgcgcagcgcccttggcttgggatcggagacacaatccaaaagcagacaagaaaaagacgacgacgaccttacctttaccac

SEQ ID NO: 19334 - DNA, 259 bp, Zea mays
  Clone ID: LIB3151-044-Q1-K1-B2
ctcgcctgcgatcttcgtaaccttcggcgcgttgagcattgatcatgtcgggctatggggaaggacaaggtgagctcatcaagaatgctgcctacattggcacccctggcaagggtatccttgctgctgatgagtccactggcaccattggcaagcgcctttccagcatcaatgtcgagaacgttgaagagaaccgccgtgccctccgtgagctcctattctgctgccctggtgctctccagtacatcagcggtgtgat

SEQ ID NO: 19335 - DNA, 297 bp, Zea mays
  Clone ID: LIB3151-044-Q1-K1-B3
gttctagatcgcgagcgggcgcccttttttttttttttttttaaacgggaatttcaggtctcatagcattatcatgaatcttagaacataacaggtggaacacgaattaaaccgaagcgccctggggttcacaaatccacacctaaaccgcttaattaaactgcgagcgatacatgataaacttagaccaccacttaaattaccaccattttgtttttaaaccaatgaacttatttactgcgaagcgcaaaaaaacccgaaggagacccttagggggcttgtttttgcccctttttt

SEQ ID NO: 19336 - DNA, 93 bp, Zea mays
  Clone ID: LIB3151-044-Q1-K1-B5
cagtagggtgggaattgtacctcgaccaaatcacttgtcgggtgggggaccaccaccccttggggaaggtaatgggggtgcatcatggtgggc

SEQ ID NO: 19337 - DNA, 244 bp, Zea mays
  Clone ID: LIB3151-044-Q1-K1-B6
cttgtgctaacaaaccttgctggctactcttaacaacagcaggttctttcattcaacccactagctggattggactctggtttttatttggaacaacaacaactaccattcagccaggtacctggtggctacccccagcaatttctttcattcaacccactggcagcattgaactctcctgcttatttacagcagcaacaactactaccattcaaacagctagctggtgtgagccctgctacct

SEQ ID NO: 19338 - DNA, 456 bp, Zea mays
  Clone ID: LIB3151-044-Q1-K1-B7
agaccaactagcaacatagaaagcacaatagtgtaccaacaatggcagctaaaatattttgcctccttatgctccttggtctttctgcaagtgctgctacggcgaccattttcccacaatgctcacaagctcctatagcttcccttcttcccccgtacctctcaccaacggtgtcttcggtatgtgaaaacccaattcttcaaccctacaggatccaacaggcaatcgcagctggcatcttacctttatcacccttgttcctccaacaatcatcagccctattacagcagttacctttggtgcatttattggcacaaaacatcagggcacaacaactacaacaacttgtgctagcaaaccttgctgcctactctcagcaacagcagtttcttccattcaaccaactagctgcattgaactctgcttcttatttgcaacaacaacaactaccattca

SEQ ID NO: 19339 - DNA, 336 bp, Zea mays
  Clone ID: LIB3151-044-Q1-K1-B8
aatgccaccaacttgatctactgcaagccgcataataacccgaccgacaccatcaaggtgttgcgccttcgtatgcttctcgtggcttttgctgcgagcgctaccgcgaccaatacaaccggatgctggcagggtcatacacctgcgcttgttcatctacacctgtcagcacatgtgtcatctgcatgtgaactgccaactcttgaacattacacgatgccagaggaaatggcagctggggtccaacttttatcaccggtgcatgtgccaccatcatttgatctattaccaccaccatgtctgtagcctactttggcgcacaagattaaggctcat

SEQ ID NO: 19340 - DNA, 392 bp, Zea mays
  unsure at all n locations
  Clone ID: LIB3151-044-Q1-K1-B9
cgaaggcaagaccgggttccacatgggccgcctcagcgtcgactgtaacgtcgtggagccggcggacgtcaagaaggtggccaccacattgcagcgcgccatcaaggtggtcggcacgccggcgtacgaggagatggtgaggaactgcatgatccaggatctctcctggaagggccctgccaagaactgggagaacgtgctgctcagcctcggggtcgccggcggcgagccaggggtcgaaggcgaggagatcgcgccgctcgccaaggagaacgtggccgcgccctgaagagttcggcctgcagggcccctgatctcgcgcgtggtgcaaagatgttgggacatcttcttatatatgcnntgttcgttatgtgatatggacaagtatgtgt

SEQ ID NO: 19341 - DNA, 122 bp, Zea mays
  Clone ID: LIB3151-044-Q1-K1-C1
gcgtcttcagaccattatctttatctactccagagcgcagaaaaacaccatcgacaccatgaggggggtgctcgttgccctcgctcttctggctcttgctgcgagcgccaccttcacgcata

SEQ ID NO: 19342 - DNA, 353 bp, Zea mays
  Clone ID: LIB3151-044-Q1-K1-C11
gaaagcacaatagtgtaccaacaatggcagccaaaatattttgcttccttatgctccttggtctttctgcaagtgttgctaccgcaaccattttcccacaatgctcacaagctcctatagcttcccttcttcccccatacctctcaccagcggtgtcttcaatgtgtgaaaacccaattgttcaaccctacaggatccaacaggcaatcgcaacaggcatcttaccattatcacccttgtttcttcaacaaccgtcagccctattacagcagttacctttggtccatttgggggcacaaaacattagggcacaacaactacaacaacttgtgctagcaaaccttgctggatac

SEQ ID NO: 19343 - DNA, 112 bp, Zea mays
  Clone ID: LIB3151-044-Q1-K1-C12
cctgactcggcttttttttttcggcggcgaccgctggtcgagttgcggcgctctgttcagtgttcattgtgcccttcgccacgacgattattctccagtagtgagtcaccat

SEQ ID NO: 19344 - DNA, 258 bp, Zea mays
  Clone ID: LIB3151-044-Q1-K1-C2
tggcaacatacatagggaagtacaggagccacatcttaacaccaatggcagccgacaattttgcccttcttgcccttcttgctctttcaacaaggggtgctaccgcgactattattacaaatgctacaacaatacctctctcccgtgacagccgcgagatttgaatacccaactatacaattctacaagctacaagaaggcattacagcaagcattttacggtcgttagcattgactgtccaacaaccatatgcccta

SEQ ID NO: 19345 - DNA, 369 bp, Zea mays
  Clone ID: LIB3151-044-Q1-K1-C3
tcgaattagaaacacaccgagcgaagcgcactatcaacaaactaacaacaatggctaccaagatattagcccttcttgcgcttcttggccttttaatgagcgcaacaaatgggtttattatttcacagtgctcacttgcttctaaagccattatttcacaagtccttccaccaagtactttaatgggctttgaacattcaaccgggcaagcctacaggctacaactagcgctttgggggagcgttttacaacaaccaattggccaattggcacaacaattcttggcacatgtaaacctaacaaccatcgaacgcaacagaacaacaggtgtgcatgatgacccctaccgggtgacctgtgctactgcac

SEQ ID NO: 19346 - DNA, 295 bp, Zea mays
  Clone ID: LIB3151-044-Q1-K1-C4
attttgagcattcacaaacacaccaagcgaagcacattagcaacaacctaacaacaatggctaccaagatattatcccttcttgcgcttcttgcgctttttgcgagcgcaacaaatgcgttcattatttcacaatgctcacttgctccaagtttcattattacacagatcctcccaccagttactttaatgggctttgaacacccagctgtgcaagcctatatgctacaacaagcaattgcggcgagcgtcttacaacaaccaaatttccagtttgaacaacaatgcttgggaca

SEQ ID NO: 19347 - DNA, 431 bp, Zea mays
  Clone ID: LIB3151-044-Q1-K1-C7
gggtcttcagaccattagctttatctactccagagcgcagaagaacccgatcgacaccatgagggtgttgctcgttgccctcgctctcctggctctcgctgcgagcgccacctccacgcatacaagcggcggctgcggctgccagccaccgccgccggttcatctaccgccgccggtgcatctgccacctccggttcacctgccacctccggtgcatctcccaccgccggtccacctgccgccgccggtccacctgccaccgccggtccatgtgccgccgccggttcatctgccgccgccaccatgccactaccctactcaaccgccccggcctcagcctcatccccagccacacccatgcccgtgccaacagccgcatccaagcccgtgccagctgcagggaacctgcggcgttggcagcaccccgatcc

SEQ ID NO: 19348 - DNA, 445 bp, Zea mays
  Clone ID: LIB3151-044-Q1-K1-C8
gcaacatagaaagcacaatagtgtaccaacaatggcagccaaaatattttgcctccttatgctccttggtctttctgcaagtgctgctacggcgaccattttcccacaatgctcacaagctcctatagcttcccttcttcccccgtacctctcaccagcggtgtcttcggtatgtgaaaacccaattcttcaaccctataggatccaacaggcaatcgcagctggcatcttacctttatcacccttgttcctccaacaatcatcagccctattacagcagttacctttggtgcatttattggcacaaaacatcagggcacaacaactacaacaacttgtgctagcaaaccttgctgcctactctcagcaacaacagtttcttccattcaaccaactagctgcattgaactctgcttcttatttgcaacaacaacaactaccattc

SEQ ID NO: 19349 - DNA, 492 bp, Zea mays
  Clone ID: LIB3151-044-Q1-K1-C9
cccggcgtacccacacgcgtccgccatcataaaacgcacattactccaccatctttgccacccaacatattctgcctccttattgtccatgttcaatctgcaagaggctctctgctaaccatttacccacaatgctcacaagctcctatagctttcctacccaccccgcacctgtcaccaacggcgtctacggtcatgtgaaaacccaattcttcaaccctacaggatccaacaggcaatcgcagctggcatcttacctttatcaccattgatcctccaacaatcatcagccctatcacagctgttacactttgtgcatttattggcacaaaacatcacggcacaacaactacaacaacttgtgctagcacaccttggtgactactctcagcaacaacagctacttccatttaaccaactaactgcattgaacttctgcatattatttgcaacaacaacaactaccattcagccaactatctgctgcctacc

SEQ ID NO: 19350 - DNA, 119 bp, Zea mays
  Clone ID: LIB3151-044-Q1-K1-D1
tttatctactccagagcgcagaagaacccgatcgacaccatgagggtggtgctcgatggcctcgctcttctgggtctcgctgtgagagccaacttcacgcatacaaacggggggtgggg

SEQ ID NO: 19351 - DNA, 476 bp, Zea mays
  Clone ID: LIB3151-044-Q1-K1-D10
ctgggtcttcagaccattagctttatctactccagagcgcagaagaacccgatcgacaccatgagggtgttgctcgttgccctcgctctcctggctctcgctgcgagcgccacctccacgcatacaagcggcggctgcggctgccagccaccgccgccggttcatctaccgccgccggtgcatctgccacctccggttcacctgccacctccggtgcatctcccaccgccggtccacctgccgccgccggtccacctgccaccgccggtccatgtgccgccgccggttcatctgccgccgccaccatgccactaccctactcaaccgccccggcctcagcctcatccccagccacacccatgcccgtgccaacagccgcatccaagcccgtgccagctgcagggaacctgcggcgttggcagcaccccgatcctgggccagtgcgtcgagttcctgaggcatcagtgcagcccgac

SEQ ID NO: 19352 - DNA, 471 bp, Zea mays
  unsure at all n locations
  Clone ID: LIB3151-044-Q1-K1-D11
gctgcagcaactcgtgctacctgtgatcaaccaagtagctctggcaaacctttctccctactctccgcaacaacaatttcttccattcaaccaactgtctacactgaaccctgctgcttatttgcagcaacaactattaccatttagccagctagctactgcctactctcaacaacaacaacttcttccatttaaccaattggccgcactgaaccccgctgcttatttgcagcagcaaatactactaccatttagccagctagctacagcaagccgtgcttccttcttgacacaacaacagttgctgccgttctaccagcagtttgcggctaaccccgcaaccctcttacaactacaacaattgttgccctttgtccaacttgctttgacaaacccagcaagcttctaccaacaacacatnattggtggtgccctcttttagatggcttattagatgtaattcaataataa

SEQ ID NO: 19353 - DNA, 442 bp, Zea mays
  Clone ID: LIB3151-044-Q1-K1-D12
gcaacatagaaagcacaatagtgtaccaacaatggcagctaaaatattttgcctccttatgctccttggtctttctgcaagtgctgctacggcgaccattttcccacaatgctcacaagctcctatagcttcccttcttcccccgtacctctcaccaacggtgtcttcggtatgtgaaaacccaattcttcaaccctacaggatccaacaggcaatcgcagctggcatcttacctttatcacccttggtcctccaacaatcatcagccctattacagcagttacctttggtgcatttattggcacaaaacatcagggcacaacaactacaacaacttgtgctagcaaaccttgctgcctactctgagcaacagcagtttcttgcattcaaccaactagctgcattgaactctgcttcttatttgcaacaacaacaactacca

SEQ ID NO: 19354 - DNA, 380 bp, Zea mays
  Clone ID: LIB3151-044-Q1-K1-D3
gatcaacaaaaccggaagtgcgtaaaaaggaatcgtcgaccaaaacagattgaaaagggtcatcgttctcgtcgtgtgcctggctcttgtcagcttgccaacgcctttggaatggaaaatgccctggccctgggcggggctgcaaggcttggacggcgcttgcgcccggcttgcaacaataatggcccccggcgggctgaacccctacccggagtccttgagcagccgcagtgcaaccccgctggcggcggcgccctactacgccgggtgtgggcagacgagcgccatgtaccagccgctccggcaacagtgctgccagcagcagatgaggatgatggacgtgcagtccgtcgcgcagcagctgcagatgatgatgcaac

SEQ ID NO: 19355 - DNA, 421 bp, Zea mays
  unsure at all n locations
  Clone ID: LIB3151-044-Q1-K1-D5
cgtcccggtccgtggtaagtggccgggtcctcgttttcctttccaaggcacccgttgcaagggcggaggcgccgatggccggngcggnggcgggtgcgggagcggtggcgctggcccgggctcgcaacggtgcgcgacgctggcgtgcaacgtcgcaggcgccgtgctcttcctcctcagccaagaccacnagcggctgcngcgcgggtgtgcgggcgaggttgggcgctggcggcgtcgcgtcgcaacccggtggaggagtgcggngatgaagaggcgctcgcgccggacgccgtcctcaacctcgagctcggcgacccgacgatgtaccgggcgttctggcgggaggttggggactgcggcgccaccgtgatccgcgggtgccaggggatgagctacttctccgacgacgacgccgtgc

SEQ ID NO: 19356 - DNA, 457 bp, Zea mays
  Clone ID: LIB3151-044-Q1-K1-D6
aaaggccaacccctattgcatggtggcagcaaatgggacacgtgtgtaaagctggattggtaatgtaggcagcacttacgggcgaccgtaagcagggtgactgcactaaagacaagaaatttgatccacccgctgccccttcccgtgtcggcccggaagcagaagcggcagaagggctccgaggcggcggcgcggctccccgccgtggcgccgctctcaaagtgccgccttcgcctactcaagctcgaacgcgtcaaggactaccttctcatggaagaggagttcgttgccagccaggagcgcctgcgccccagcgaggataagacggaggaggaccgatccaaggtcgacgacctccgcggcactcccatgaacgtcggatcgctggaggagatcatcgacgagacccatgccatcgtctcctcgtccgtcggtcccgagtactacgtcgggatac

SEQ ID NO: 19357 - DNA, 464 bp, Zea mays
  Clone ID: LIB3151-044-Q1-K1-D7
caactagcaacatagaaagcacaatagtgtaccaacaatggcagccaaaatattttgcctccttatgctccttggtctttctgcaagtgctgctacggcgaccattttcccacaatgctcacaagctcctatagcttcccttcttcccccgtacctctcaccagcggtgtcttcggtatgtgaaaacccaattcttcgaacacccagctgtgcaagcctataggctacaacaagcgattgcggcgagcgtcttacaacaaccaattgcccaattgcaacaacaatccttggcacatctaacaatacaaaccatcgcaacgcaacagcaacaacagttcctaccagcactgagccacctagccatggtgaaccctgtcgcctacttgcaacagcagctgcttgcatccaacccacttgctctagcaaacgtagttgcaaaccagcaacaacaacaactgcaacag

SEQ ID NO: 19358 - DNA, 384 bp, Zea mays
  Clone ID: LIB3151-044-Q1-K1-D8
aaaaaaaaaaaaaaaaaaaaaaaaaaaaaatttaaaaaaaaaaaaaaaaaaaaaaaaaaaaagggaaaaataaaaaaaaaaaaaaaaaaaaaaaaaaaaaaaaaaaaaaaaaaaaaaaaagaaaaaaaaaaaaaagggggggcctttttaaaaaaaaaaaaaataaaaaaaggggggggcctttttaaggattcaattttttttccccgtgctttgaaataatttttttttttttttgggccccttaatttgattaattgggggggtttttaaaaaggggggtttgggaaaaccttgggttttcccaattttattttttttgaaaaaattccctttttagcgggttgggtaaaaagaaaaaagcccacccccaatgccctttcc

SEQ ID NO: 19359 - DNA, 443 bp, Zea mays
  Clone ID: LIB3151-044-Q1-K1-D9
agaccaactagcaacatacaaagcacaatagtgtaccaacaatggcagccaaaatattttgcctccttatgctccttggtctttctgcaagtgctgctacggcgaccattttcccacaatgctcacaagctcctatagcttcccttcttcccccgtacctctcaccagcggtgtcttcggtatgtgaaaacccaattcttcaaccctataggatccaacaggcaatcgcagctggcatcttacctttatcacccttgttcctccaacaatcatcagccctattacagcagttacctttggtgcatttattggcacaaaacatcagggcacaacaactacaacaacttgtgctagcaaaccttgctgcctactctcagcaacaacagtttcttccattcaaccaacttgctttgacaacccaacagcattctaccaacaaccca

SEQ ID NO: 19360 - DNA, 64 bp, Zea mays
  Clone ID: LIB3151-044-Q1-K1-E1
gcagtgtcagtgtgagcaatgacctgaatgaacaattgaaatgaaaagaaaaaagtattggtcc

SEQ ID NO: 19361 - DNA, 461 bp, Zea mays
  Clone ID: LIB3151-044-Q1-K1-E10
caacaagcaacatagaaagtggaatccagtagcaacaatagagcaacaatggcgaccaagatattttccctccttatgctccttgctctttctgcatgtgttgctaacgcgacaattttccctcaatgctcacaagctcctatagcttcccttcttcccccataccttccatcaatgatagcttcagtatgtgaaaacccagctcttcaaccctataggctccaacaagcaatcgcagcaagcaacatacctttatcacccttgtttcaacaatcgccagccctatctttggtgcagtcattggtacaaaccatcagggcacagcagctgcagcaactcgtgctacctgtgatcaaccaagtagctctggcaaacctttctccctactctcagcaacaacaatttcttccattcaaccaactgtctacattgaaccgtgctgcttatttgcagcaacaact

SEQ ID NO: 19362 - DNA, 445 bp, Zea mays
  Clone ID: LIB3151-044-Q1-K1-E11
caccatgccactaccctactcaaccgccccggcctcagcctcatccccagccacacccatgcccgtgccaacagccgcatccaagcccgtgccagctgcagggaacctgcggcgttggcagcaccccgatcctgggccagtgcgtcgagtttctgaggcatcagtgcagcccgacggcgacgccctactgctcgcctcagtgccagtcgttgcggcagcagtgttgccagcagctcaagcaggtggagccgcagcaccggtaccaggcgatcttcggcttggtcctccagtccatcctgcagcagcagccgcaaagcggccaggtcgcggggctgttggcggcgcaaatagcgcagcaactgacggcgatgtgcggcctgcaacagccgactccatgcccctacgctgctgccggcggtgtcccccactgaagaaactatgtgct

SEQ ID NO: 19363 - DNA, 159 bp, Zea mays
  Clone ID: LIB3151-044-Q1-K1-E12
ccagccgccaccaggtgcagagtctttcgtcatctcttctccggcgaagaacccccagtcgcgcaccagatcacttgttaaactgtgttgacgggtgatggcggtttctttcgcaaacctcaacaccgaagcagggcttaaaaagcttgatgagtacct

SEQ ID NO: 19364 - DNA, 479 bp, Zea mays
  Clone ID: LIB3151-044-Q1-K1-E2
gagaccaactagcaacatagaaagcacaatagtgtaccaacaatggcagccaaaatattttgcttccttatgctccttggtctttctgcaagtgctgctaccgcaaccattttcccacaatgctcacaagctcctatagcttcctttcttcccccatacctctcaccagcggtgtcttcagtatgtgaaaacccaattcttcaaccctacaggatccaacaggcaatcgcagcaggcatcttacctttatcacccttgttcctccaacaaccgtcagccctattacagcagttacctttggtgcatttgttggcacaaaacatcaaggcacaacaactacaacaacttgtgctaggaaaccttgctgcctactctcagcaacagcagtttcttccattcaaccaactggctgcattgaactctgctgcttatttgcaacaacaactaccattcagtcagctagctgctgcctaccccca

SEQ ID NO: 19365 - DNA, 94 bp, Zea mays
  Clone ID: LIB3151-044-Q1-K1-E3
ctcgcttttgatcgattggattcggtaccggctatggactgaaggtctttgagcggattgatctgggatttttttccaaaaattgcggtagggg

SEQ ID NO: 19366 - DNA, 198 bp, Zea mays
  Clone ID: LIB3151-044-Q1-K1-E4
tcggccccaactggcggaaaattgagaaaggggattggctttattccaatgggtttcgacctggccatgatgtaaccttggttaatgggcccattgataaaaaccttattaaggtagcttcttaaaaaatgcatttcgctttcattggggtccatttgggcgcttaacttaactttcatttttatttgggggaaggga

SEQ ID NO: 19367 - DNA, 414 bp, Zea mays
  unsure at all n locations
  Clone ID: LIB3151-044-Q1-K1-E6
tccggacgatctaaccggccgcttaactcatgtccggccacttctccgtgtctcagagcgaggtcgagagcctcctcgtaggcgccgacaccaaagaaccaccgcccaaggacaaggaggagccttgcgagcatactaagctgctggaggacgacgtccccaccatcccgttcgatgacggcaaggcgctgaaaggcatgggtctggtcggngaagagccggccgggttctcgtcgcctgtctacagctccatcacggagagcaggagtgacaagaggagcgaggagcctactactctgcatagtttcaaccccgtgactggctcaacaaaggtcgtctcacctgacgagcagagcgagcctgctgctgggtctgggtcccggtctgggtcaagcccgcgtgaagcgtggtgga

SEQ ID NO: 19368 - DNA, 460 bp, Zea mays
  Clone ID: LIB3151-044-Q1-K1-E7
attattgagaccaactagcaacatagaaagcacaatagtgtaccaacaatggcagccaaaatattttgcctccttatgctccttggtctttctgcaagtgctgctacggcgaccattttcccgcaatgctcgcaagctcctatagcttcccttcttcccccgtacctctcaccagcggtgtcttcggtatgtgaaaacccaattcttcaaccctacaggatccaacaggcaatcgcagctggcatcttacctttatcacccttgttcctccaacaatcatcagccctattacaacagttacctttggtgcatttattggcacaaaacatcagggcacaacaactacaacaacttgtgctagcaaaccttgctgcctactctcagcaacagcagtttcttccattcaaccaactaggttcattgaactctgcttcttatttgcaacaacaacaactaccat

SEQ ID NO: 19369 - DNA, 464 bp, Zea mays
  Clone ID: LIB3151-044-Q1-K1-E8
gagaccaactagcaacatagaaagcacaatagtgtaccaacaatggcagccaaaatattttgcttccttatgctccttggtctttctgcaagtgctgctaccgcaaccattttcccacaatgctcacaagctcctatagcttcctttcttcccccatacctctcaccagcggtgtcttcagtatgtgaaaacccaattcttcaaccctacaggatccaacaggcaatcgcagcaggcatcttacctttatcacccttgttcctccaacaaccgtcagccctattacagcagttacctttggtgcatttgttggcacaaaacatcaaggcacaacaactacaacaacttgtgctaggaaaccttgctgcctactctcagcaacagcagtttcttccattcaaccaactggctgcattgaactctgctgcttatttgcaacaacaactaccattcagtcagctagc

SEQ ID NO: 19370 - DNA, 456 bp, Zea mays
  Clone ID: LIB3151-044-Q1-K1-E9
cttcagaccattagctttatctactccagagcgcagaagaacccgatcgacaccatgagggtgttgctcgttgccctcgctctcctggctctcgctgcgagcgccacctccacgcatacaagcggcggctgcggctgccagccaccgccgccggttcatctaccgccgccggtgcatctgccacctccggttcacctgccacctccggtgcatctcccaccgccggtccacctgccgccgccggtccacctgccaccgccggtccatgtgccgccgccggttcatctgccgccgccaccatgccactaccctactcaaccgccccggcctcagcctcatccccagccacacccatgcccgtgccaacagccgcatccaagcccgtgccagctgcagggaacctgcggcgttggcagcaccccgatcctgggccagtgcgtcgagtttctgaggcat

SEQ ID NO: 19371 - DNA, 453 bp, Zea mays
  unsure at all n locations
  Clone ID: LIB3151-044-Q1-K1-F10
ntccgggcgggctggagaggtcgccggtatccgcgccggcgcccgggccccgcgccggcgcgcttgccgtggtggacgggaggaccgggaagcggcacgaggtcaaggtctccgaagacggcaccgtgcgcgccaccgacttcaagaagattaccactggaaaggacgacaagggtcttaagatttatgatcctggttaccttaacactgcccctgttcgctcgtccatctgctacatcgatggagatgagggaatccttcgctataggggttatccaatcgaagaattggctgaaagcagctcgtttgttgaggtggcctaccttttaatgtatgggaacttgcctactcagagtcaattggcaggctgggaatttgctatttctcagcattctgctgttccccaaggactgttggatatcatacaatcaatgccccatgatgctcacccca

SEQ ID NO: 19372 - DNA, 444 bp, Zea mays
  Clone ID: LIB3151-044-Q1-K1-F11
ctccaacaatcatcagccctattacaacagttacctttggtgcatttattggcacaaaacatgagggcacaacaactacaacaacttgtgctagcaaaccttgctgcctactctcagcaacagcagtttcttccattcaaccaactaggttcattgaactctgcttcttatttgcaacaacaacaactaccattcagccagctacctgctgcctacccccagcaatttcttccattcaaccaactagcagcattgaactctcctgcttatttacagcagcaacaactactaccattcagccagctagctggtgtgagccctgctaccttcttgacacaaccacagttgttgccgttctaccagcacgttgcgcctaacgctggcaccctcttacaactgcaacaattgctgccattcaaccaacttgctttgacaaacccagca

SEQ ID NO: 19373 - DNA, 448 bp, Zea mays
  Clone ID: LIB3151-044-Q1-K1-F12
caactagcaacatagaaagcacaatagtgtaccaacaatggcagccaaaatattttgcctccttatgctccttggtctttctgcaagtgctgctacggcgaccattttcccacaatgctcacaagctcctatagcttcccttctttccccgtacctctcaccagcggtgtcttcggtatgtgaaaacccaattcttcaaccctataggatccaacaggcaatcgcagctggcatcttacctttatcacccttgttcctccaacaatcatcagccctattacagcagttacctttggtgcatttattggcacaaaacatcatggcacaacaactacaacaacttgtgctagcaaaccttgctgcctactctcagcaacaacagtttctttcattcaaccaactagctgcattgaactctgcttcttatttgcaacaacaacaactacca

SEQ ID NO: 19374 - DNA, 353 bp, Zea mays
  Clone ID: LIB3151-044-Q1-K1-F2
tcggccacgccttccggaacataaaaaggaccattggtggacccaccatgggcggccaaatattttgctttcttatgctccttgggctttctgcaagggcttggtccgcaaccattttcccacaatgctcacaagcttctatagcttcctttcttaccccatacctctcaccagcggggtcttcagtatgtgaaaacccaattcttcaaccctacaggatccaacaggcaatcgcagcaagcatcttacctttatcacccttgttcctccaacaaccggcaggcctattacagcagttacctttggtgcatttgttggcacaaaacattaaggcacaacaactacaacaactt

SEQ ID NO: 19375 - DNA, 81 bp, Zea mays
  Clone ID: LIB3151-044-Q1-K1-F6
tggctgttctgttgtgacgcactccctcacgggtcgtgcaccgcgcgtattacgcgcggcttgcactccgtcactgcactc

SEQ ID NO: 19376 - DNA, 437 bp, Zea mays
  unsure at all n locations
  Clone ID: LIB3151-044-Q1-K1-F7
cacgcggtacgtgagttccaccacagagcacaggggcggaacacacgggcactagcggcggacgcgtgtggccggggatctagatctcccatcgcctcgcctcgtctccctccagtccaaaccgccgtcgaccgccttgcccccgactccgcccgcactcccacccgctgctgccggatcccctgcccctaccgtacggtctgcccgctttcaccggccgcccgcccgccgncgccagcctagctggggtcgggtggagatccaccaggaaaagagggtgctctcttctcctcgtgcgggtgttgtaattttgtcaagccagaaaggcagcagtacttatagagttgttccaccatggccaatgatggagacgatggacaaagccaggattatctcttcaaaattgtcctgatcggggattcctctgttgtaaatcg

SEQ ID NO: 19377 - DNA, 452 bp, Zea mays
  Clone ID: LIB3151-044-Q1-K1-F9
caactagcaacatagaaagcacaatagtgtaccaacaatggcagccaaaatattttgcctccttatgctccttggtctttctgcaagtgctgctacggcgaccattttcccgcaatgctcgcaagctcctatagcttcccttcttcccccgtacctctcaccagcggtgtcttcggtatgtgaaaacccaattcttcaaccctacaggatccaacaggcaatcgcagctggcatcttacctttatcacccttgttcctccaacaatcatcagccctattacaacagttacctttggtgcatttattggcacaaaacatcagggcacaacaactacaacaacttgtgctagcaaaccttgctgcctactctcagcaacagcagtttcttccattcaaccaactaggttcattgaactctgcttcttatttgcaacaacaacaactaccattca

SEQ ID NO: 19378 - DNA, 377 bp, Zea mays
  unsure at all n locations
  Clone ID: LIB3151-044-Q1-K1-G10
atccagatcagcaaagcggcagtgcgtagagaggatcgtcgaacagaacagcatgaagatggtcatcgttctcgtcgtgtgcctggctctgtcagctgccagcgcctctgcaatgcagatgccctgcccctgcgcggngctgcagggcttgtacggcgctggcgccggcctgacgacgatgatgggcgccggcgggctgtacccctacgcggagtacctgaggcagccgcagtgcagcccgctggcggcggcgccctactacgccgggtgtgggcagacgagcgccatgtaccagccgctccggcaacagtgctgccagcagcagatgaggatgatggacgtgcagtccgtcgcgcagcagctgcagatgatgatgc

SEQ ID NO: 19379 - DNA, 475 bp, Zea mays
  Clone ID: LIB3151-044-Q1-K1-G11
gcaaagcggcagtgcgtagagaggatcgtcgaacacaacagcatgaagatagtcatcgctctcgacgtgtgcctggctctgtcagctgccagcgcctctgcaatgcagatgccctgcccctgcgcggggctgcagggcttgtacggcgctggcgccggcctgacgacgatgatgggcgccggcgggctgtacccctacgcggagtacctgaggcagccgcagtgcagcccgctggcggcggcgccctactacgccgggtgtgggcagacgagcgccatgtaccagccgctccggcaacagtgctgccagcagcagatgaggatgatggacgtgcagtccgtcgcgcagcagctgcagatgatgatgcagcttgagcgtgccgctgccgccagcagcagcctgtacgagccagctctgatgcagcagcagcagcagctgctggcagcccaaggtctcaaccccatggccatgatga

SEQ ID NO: 19380 - DNA, 374 bp, Zea mays
  Clone ID: LIB3151-044-Q1-K1-G12
ctgggtcttcagaccattagctgtatctactccagagcgcagaagaacccgatcgacaccatgagggtgttgctcgttgccctcgctctcctggctctcgctgcgagcgccacctgcacgcatacaagcggcggctgcggctgccagccaccgccgccggttcatataccgacggcggtgcatctgccacctccggttcacctgccacctacggtgcatctcccaccgccggtccacctgccgccgccggtccacctgccaccgccggtccatgtgccgccgccggttcatctgccgccgccaccatgccactaccctactgaaccgccccggcctcagcctcatgcacagccacacccatgcccgtgccaaca

SEQ ID NO: 19381 - DNA, 258 bp, Zea mays
  Clone ID: LIB3151-044-Q1-K1-G2
gcaacaactactaccattcaaccagctagctggtgtgagccctgctaccttcttgacacaaccacaggtgttgccggtctaccaacacgttgcgcctaacctggaccctttacaacggaaattgtgcattaaccaacttgctttgacaacccagcagggctacaacaacccatatgggggccctttttgatttttagaggatagtcaatataagtttttattgagttgggcttccaaaataaaaaggcatttctgtaa

SEQ ID NO: 19382 - DNA, 256 bp, Zea mays
  Clone ID: LIB3151-044-Q1-K1-G3
gagaccaactagcaacataaaaagcacaatagtgtacccaccatggccggccaaatattttgctttcctatgctccttgggctttctgcaagtgctgctaccgcaaccattttcccacaatgctcacaagctcctatagcttcctttctttccccatacctctcaccagcggtgtcttcagtatgtgaaaacccaattcttcaaccctacaggatccaacaggcaatcgcagcaagcatcttacctttatcaccct

SEQ ID NO: 19383 - DNA, 194 bp, Zea mays
  Clone ID: LIB3151-044-Q1-K1-G4
tcgcagaaacacaccaagcggagcacattaaccaccacctaaccaccatgggttacaaaatattatcccttcctgggcttttgcgcttttgcgagcgcaacaaatgcgttcattattccacaatgctcacttgctccaagttccattattacacaggtcctcccaccaagtactttaatgggctttgaacaccc

SEQ ID NO: 19384 - DNA, 476 bp, Zea mays
  unsure at all n locations
  Clone ID: LIB3151-044-Q1-K1-G7
cgtgatggagctcttgtcctggaagcaacccaagtgcccccaattgtacatatacagctccgccgacagggtgatcccagcgaaatcagtggaggcattcatcgacggccagcggaaagccgggcatgaggtgagggcctgcgacttcgtgtcatcgccccatgtggaccattaccggagcaatcctgggctgtatagctctcagctggccaacttcttggaggattgtgtgcttgccaagcgctgtgagggtgcttgcacatcatgattgtctcttttatttgttcctggtcttgaattggaatgcaccanggacactgacatacgtgggttatacatgattttgttctctccttgttttaacggtctttgtgggtgacctttttttccccctcttgtaactcttgtctttgtggttggagtctgggcgcacaattgtaaaaacgtgtgaggagaaataaccaaatgaaaggaga

SEQ ID NO: 19385 - DNA, 307 bp, Zea mays
  Clone ID: LIB3151-044-Q1-K1-G9
gccgccaccaggtgcagagtctttcgtcatctcttctccggcgaagaacccccagtcgcccaccagatcacttgttaaactttgttgaggggtgatggcggtttctttcgcaaacctcaacaccgaggcagggcttaaaaagcttgatgagtaccttctcactcgcagatacatcactggctaccaatcttccaacgatgacttggctcgctacacttcgttttcgtctgctacctcgtgcaagtatatcaacgtagcaaggtggtttaatcacattgatgcgctcgtgaagctgagcggaattact

SEQ ID NO: 19386 - DNA, 151 bp, Zea mays
  Clone ID: LIB3151-044-Q1-K1-H1
ctgggtcttcagaccattaactttatctactccaaaacgcaaaaaaacccgatcgacaccatgaggggggtgctcggtggccttgctttcctgggttttgctgggagcgccaccttcacgcatacaaacggggggttggggttgcaaccac

SEQ ID NO: 19387 - DNA, 391 bp, Zea mays
  Clone ID: LIB3151-044-Q1-K1-H10
tccctcttcaagaggggatcatcagattgggcttattattccttattactccaggcaaggatcggagttgctctgaattgactgaaccatggcggcgacaatggcagtgacgacgatggtgacgaggagcaaggagagctggtcgtcattgcaggtcccggcggtggcattcccttggaagccacgaggtggcaagaccggcggcctcgagttccctcgccgggcgatgttcgccagcgtcggcctcaacgtgtgcccgggcgtcccagcggggcgcgacccgcgggagcccgatcccaaggtcgtccgggcggccgacaactgcgacatcgcgcgccagcttggcgccgccgttcccgggcagcaggccgcctgggaggcggaggaagag

SEQ ID NO: 19388 - DNA, 328 bp, Zea mays
  Clone ID: LIB3151-044-Q1-K1-H12
cgatcctctgcgggtcattcttactggggaccggattcgttgctttcttgcttccatctcatgttggaggactgagagagggagttgtaatttcaaataccagctagaggactgtcactcagctgttaagctggtatataatgggtggctgctgccgctgttggtgcataacatctgaagcagttagagcacgagcacgagcagatatatatgatcaacaatatgttgacgagcaggaatcatgggcttcaatttttgatggatcatattcagcctctgcaattgttgcattatacacaaatatggatactttcacacctgacacata

SEQ ID NO: 19389 - DNA, 54 bp, Zea mays
  Clone ID: LIB3151-044-Q1-K1-H3
agtcttaaacggcaaccggcggttttaaaggttccaacttacctaccccggcct

SEQ ID NO: 19390 - DNA, 111 bp, Zea mays
  Clone ID: LIB3151-044-Q1-K1-H6
gcgtattacggcggattgcactcgtactgcactcggattcacgcgtacgcgcgcgtacgcacgcgtctgtcgcgcggtattgcgcgcaatgcatactataacgccgctagc

SEQ ID NO: 19391 - DNA, 439 bp, Zea mays
  Clone ID: LIB3151-044-Q1-K1-H7
tagcaacatagaaagcacaatagtgtaccaacaatggcagccaaaatattttgcctccttatgctccttggtctttctgcaagtgctgctacggcgaccattttcccgcaatgctcgcaagctcctatagcttcccttcttcccccgtacctctcaccagcggtgtcttcggtatgtgaaaacccaattcttcaaccctacaggatccaacaggcaatcgcagctggcatcttacctttatcacccttgttcctccaacaatcatcagccctattacaacaggtacctttggtgcatttattggcacaaaacatcaaggcacaacaactacaacaacttgtgctagcaaaccttgctggctactctcagcaacagcagtttcttccattcaaccaactagggtcattgaactctgcttcttatttggaacaacaacaac

SEQ ID NO: 19392 - DNA, 448 bp, Zea mays
  Clone ID: LIB3151-044-Q1-K1-H8
ggcaaacctttctccctactctcagcaacaacaatttcttccattcaaccaactgtctacattgaaccgtgctgcttatttgcagcaacaactattaccattcagccagctagctactgcctactctcagcaacaacaacttcttccatttaaccaattggccgcactgaaccccgctgcttatttgcagcagcaaatactactaccatttagccagctagctgcagcaagccgtgcttccttcttgacacagcaacagttgctgcctttctaccagcagtttgcggctaaccccgcaaccctcttacaactacaacaattgttgccctttgtccaacttgctttgacaaacccagcagcctcctaccaacaacacataattgggggtgccctcttttagattgcttattagatgtaattcaataataaaagtttttggatgatgtat

SEQ ID NO: 19393 - DNA, 439 bp, Zea mays
  Clone ID: LIB3151-044-Q1-K1-H9
gaggcatcagtgcagcccgacggcgacgccctactgctcgcctcagtgccagtcgttgcggcagcagtgttgccagcagctcaggcaggtggagccgcagcaccggtaccaggcgatcttcggcttggtcctccagtccatcctgcagcagcagccgcaaagcggccaggtcgcggggctgttggcggcgcagatagcgcagcaactgacggcgatgtgcggcctgcagcagccgactccatgcccctacgctgctgccggcggtgtcccccactgaagaaactatgtgctgtagtatagccgctggctagctagctagttgagtcatttagcggcgatgattgagtaataatgtgtcacgcatcaccatgggtggcagtgtcagtgtgagcaatgacctgaatgaacaattgaaatgaaaagaaaaaagtattgttcc

SEQ ID NO: 19394 - DNA, 310 bp, Zea mays
  unsure at all n locations
  Clone ID: LIB3151-045-Q1-K1-A1
attccgggcgaccacgcgtccggcgttttacaaaggcgggggcaaacttttgcccgagcccgacagattttcaattccccattcggcccaccgatcgaccttaaggccagtctcggtctttttcgaaggcgtcgcgcgcggttgtttgaaaggagaggaggaagataagggagtgcatctccgtacacatcgggcaggccggcatacaagtcggcaacgcgtgctgggaactntactggctcgagcacggcatccagcctgatggccaagtgcctggagataagaaccgcgggacatcacgatgatgcct

SEQ ID NO: 19395 - DNA, 365 bp, Zea mays
  Clone ID: LIB3151-045-Q1-K1-A10
atccaggacaaggagggcatccccccagaccagcagcggctcatcttcgctggcaaacagcttgaggacgggcgcacgcttgctgactacaacatccagaaggagagcaccctccaccttgtgctccgcctcaggggaggcatgcagatctttgtgaaaaccctgaccggcaagactatcaccctcgaggtggagtcctctgacaccattgacaacgtcaaggccaagatccaggacaaggagggcatccctccagaccagcagcggctcatctttgctgggaagcagcttgaggacgggcgcacgcttgccgactacaacatccagaaggagagcaccctccactttggtgctgcgcctcaggg

SEQ ID NO: 19396 - DNA, 405 bp, Zea mays
  unsure at all n locations
  Clone ID: LIB3151-045-Q1-K1-A11
ggcaaaggacgacgggtcggcgagaggcggggccatgaggatccggaagcgcacccctgccagggcagcgtcgccgggaccgccgcctctgcctcctcctcctcccctaccgctgcagcgtcccacggagaaaccacgggatgaggcggcggcggaggaggaggaggagaagcgggcggtcctcgccgccggagtccgagaaggcgacgaccgggttcgccccgccgccgccgccgctggctctgggaacagcagcgcaacggacgacgtgccgaggccggagccgcaggagcaggacgccgccaggtgcagccggaacgacgggaagcggtggcgctgcaagaaggcggccgtgccggngtacctgttctgcgaccgccacatcgcgtggtccacacgcaagcg

SEQ ID NO: 19397 - DNA, 363 bp, Zea mays
  Clone ID: LIB3151-045-Q1-K1-A12
gcatttattggcacaaaacatcagggcacaacaactacaacaacttgtgctagcaaaccttgctgcctactctcagcaacagcagtttcttccattcaaccaactagctgcattgaactctgcttcttatttgcaacaacaacaactaccattcagccagctacctgctgcctacccccagcaatttcttccattcaaccaactggcagcattgaactctcctgcttatttacagcagcaacaactactaccattcagccagctagctggtgtgagccctgctaccttcttgatacaaccacagttgttgccgttctaccagcacgctgcgcctaacgctggcaccctcttacaactgcaaca

SEQ ID NO: 19398 - DNA, 346 bp, Zea mays
  unsure at all n locations
  Clone ID: LIB3151-045-Q1-K1-A2
gaccaccccaccgccgcttgaaaccccagccgatcgacggtggcggaaatgtcgttgtcctcggggaagatcggcgaggaggtgtggctcacatgcctctcccacgccctcactaccgagaccgangaggtcatggggctcctcctcggcgacgtcgagctttccagcaaggtcgccacagccctggtatggggggcgtcgccgcagatgaagtgcgagcggaagaaggaccgcgtcgaggtcaaccccgagcttntcgccgccgcatncgcgcaagccgagaaaatgacggccaccatcaagaggactacgagggtgatcggatggtaccactcgcacccacata

SEQ ID NO: 19399 - DNA, 338 bp, Zea mays
  Clone ID: LIB3151-045-Q1-K1-A3
cccacgcgtccgaagcacaatagtgtaccaacaatggcagccaaaatattttgcttccttaggctccttggtctttctgcaagtgctgctaccgcaaccattttcccacaatgctcacaagctcctatagcttcctttcttcccccatacctctcaccagcggtgtcttcagtatgtgaaaacccaattcttcaaccctacaggatccaacaggcaatcgtagcaggcatcttacctttatcacccttgttcctgcaacaaccgtcagccctattacagcagttacctttggtgcatttgttggcacaaaacatcaaggcacaacaactacaacaact

SEQ ID NO: 19400 - DNA, 305 bp, Zea mays
  unsure at all n locations
  Clone ID: LIB3151-045-Q1-K1-A5
attagctttatttactccagagcgcaaaaaaacccgatggacaccatgagggtgttgctcgtgggcttcgctctcctggctctcgctgcgagcgcaacctgcaggcatacaagccggggctgcggctgccagccaccgccgncggttcatctaccgccgccggtgcatctgccacctccggttcacctgccacctccggtgcatctnccaccgccggtccacctgccgccgccggtccacctgccaccgccggtccatgtgccgccgccggttcatctgccgccgccaccatgccactaccctac

SEQ ID NO: 19401 - DNA, 367 bp, Zea mays
  unsure at all n locations
  Clone ID: LIB3151-045-Q1-K1-A6
cccacgcgtacgcccacgcgtncgggacgggagtccgccttaagttgtaggctccgttcgatcataagcaacacaacacccttccgtttgcgtcgctcctccggcctcccctccctggtcggtcgatcgcgaggatgacgccggcgagcgtggtcgccgcgcccaggagcgtcggggcgttgcccttggcggcgttcccggcgcccgcgagggccggggtgcggaggaacggccggtcctcgaggcccgcggcgtgcggcggggacgaccagcagccgccgtccatggccgcgatgccggcgtcgctgcgcgccatccatgccaggaggaagcangaggcggcgcancgcggggtgccgcgggcgac

SEQ ID NO: 19402 - DNA, 333 bp, Zea mays
  Clone ID: LIB3151-045-Q1-K1-A7
agcgaagcgcactagcaacgacctatcaacaatggctaccaagatattagccctccttgcgcttcttgccctttttgtgagcgcaacaaatgcgttcattattccacaatgctcacttgctcctagtgccattattccacagttcctcccaccagttacttcaatgggcttcgaacacctagctgtgcaagccaacatgcaacaacaagcgcttgcggcgagcgtcttacaacaaccaattgcccaattgcaacaacaatccttgccacatctaacaatacaagccatcacaacgcaacagcaacaacagttcctaccagcactgagccacct

SEQ ID NO: 19403 - DNA, 384 bp, Zea mays
  Clone ID: LIB3151-045-Q1-K1-A8
gcaacatagaaagcacaagattgttccaataatggcagccaaaatattatgcctgatgtatgcttcttggactttttggaagcgctgctactgcgagcattttgccgcaatgctcacaagctcctatagcttacattcttccatcatacctcttaccagcgatgacttcagaatgagaaaatccaattcttgtaccctacaagatccaacacgctatcggagcaagcatgttacctttatcacccttgttccttcaacaatcatgagccctattacagcagctacctttggtgcattgattggcacaaaacataagggcacaacacctacaacaactcgtgctaagctaccttggtgcctactatcagcaacagcaaatacctt

SEQ ID NO: 19404 - DNA, 343 bp, Zea mays
  Clone ID: LIB3151-045-Q1-K1-A9
gcaattagctcatcgactccagattggagaactcgacaccatgaaggtgctgatcggtgcccttgctctcctggcgctcgctgcgagcgccgcctccagtacaagcggcggctgtggctgccagacaccaccgtttcatctaccgcctccgttctatatgccgcctccgttctatctgccgccgcagcagcagccgcagccatggcaataccccactcaaccaccgcagctaagcccgtgccagcagttcggatcctgcggcgtcggcagcgtcggcagcccgttcctgggccagtgcgtcgagttcctgaggcaccagtgcagcccggcggcgacgccctac

SEQ ID NO: 19405 - DNA, 297 bp, Zea mays
  Clone ID: LIB3151-045-Q1-K1-B1
gaccacctagcaccttaaaaggcccattgttgtcccaccattggcagccaaaaaatttggcttccttatgctccttggtctttctgcaagggctgctaccgcaaccattttccaacaatgctcacaagctcctatagctttctttttttcccccatacctctcaccagcggtgtcttcagtatgtgaaaacccaatttttcaaccctacaggatccaacaggcaatcgcagcaggcatcttacctgtatcacccttggtcctccaacaaccgtcagccctattacagcaggtacctt

SEQ ID NO: 19406 - DNA, 404 bp, Zea mays
  unsure at all n locations
  Clone ID: LIB3151-045-Q1-K1-B10
gcgccgcccccagatccggcaccgcccgctgctcgaacccgcaccccacgcccgcaggccgggaccggtgggcgcgcgccgggcagtangagggagaggaagggcggcatggcggcgccgccggcgagggcccgggccgactacgactaccttatcaagcttcttctcattggggatagcggtgttggcaagagttgcctcctgttgcggttctctgatggttccttcactacaagctttattaccacaattggtattgactttaagatacggacaatagaattggatggtaagcgtataaagctacagatttgggatacagcgggccaagaacgcttccgtactattaccactgcgtactaccgtggagctatgggtatcttgctggtttatgatgtcaccga

SEQ ID NO: 19407 - DNA, 433 bp, Zea mays
  Clone ID: LIB3151-045-Q1-K1-B11
caactagcaacatagaaagcacaatagtgtaccaacaatggcagctaaaatattttgcctccttatgctccttggtctttctgcaagtgctgctacggcgaccattttcccacaatgctcacaagctcctatagcttcccttcttcccccgtacctctcaccaacggtgtcttcggtatgtgaaaacccaattcttcaaccctacaggatccaacaggcaatcgcagctggcatcttacctttatcacccttgttcctgcaacaatcatcagccctattacagcagttacctttggtgcatttattggcacaaaacatcagggcacaacaactacaacaacttgtgctagcaaaccttgctgcctactctcagcaacagcagtttcttccattcaaccaactagctgcattgaactctgcttcttattgcaac

SEQ ID NO: 19408 - DNA, 210 bp, Zea mays
  Clone ID: LIB3151-045-Q1-K1-B12
cgtcatcagcagcttctgcttgctctggggggaaggagagagagagagagcgagagagagatctaatatagaggcttgtaaggggtcctcgaaccaaaattttggcggtgttcaaccggcaagtggtggaagtgcccgccgaacttgtggcggcgggcaacccgaccccgtcgcccaaaacgaaagcgtcgcaactggtggggcgctttc

SEQ ID NO: 19409 - DNA, 413 bp, Zea mays
  Clone ID: LIB3151-045-Q1-K1-B2
attccaaataacaaaaccggaagggcgtattaaggttcgtcaaccaaaccacattgaaaagggccatcgttttcgtcgggtgcctggttttgtaagttgccaccgcctttgcaatgccaatgccctgcccctgcccggggctgcagggcttgtacggcgctggcgccggcctgacgacgatgaatgggcgccgggggggctgtactccctacgcgggagtactctgagggcagccgcaagtgcaactccggctggcggcgggccgccctacttacgcccgggtggtgggcacgacgaagcgcccatgtaaccagccgcgtccggcaacaagtggctgccagcagcaggatgaacgatgatggacgtgcaatccgtcgcgcagcagctgcagatgatgatgcagcttgagcgtg

SEQ ID NO: 19410 - DNA, 383 bp, Zea mays
  Clone ID: LIB3151-045-Q1-K1-B3
agcctagcaattagctcatcgactccagattggagaactcgacaccatgaaggtgctgatcgttgcccttgctctcctggcgctcgctgcgagcgccgcctccagtacaagcggcggctgtggctgccagacaccaccgtttcatctaccgcctccgttctatatgccgcctccgttctatctgccgccgcagcagcagccgcagccatggcaataccccactcaaccaccgcagctaagcccgtgccagcagttcggatcctgcggcgtcggcagcgtcggcagcccgttcctgggccagtgcgtcgagttcctgaggcaccagtgcagcccggcggcgacgccctacggctcgccacagtgccaggcgctgcagcagcagt

SEQ ID NO: 19411 - DNA, 366 bp, Zea mays
  Clone ID: LIB3151-045-Q1-K1-B4
gcaacatagaaagtggaatccagtagcaacaatagagcaacaatggagaccaagatattttccctccttatgctccttgctctttctacatgtgttgctaacgcgacaattttccctcaatgctcacaagctcctatagcttccctttttcccccataccttccatcaattatagcttcagtatgtgaaaacccagctcttcaaccatataggcttcaacaagcaatcgcagcaagcaacatacctttatcgcccttgttgtgtcaacaatcgccagccctatctttggtgcagtcattggtacaaaccatcagggcacaacagctgcagcaactcgtgctacctgtgatcaaccaagtagctctg

SEQ ID NO: 19412 - DNA, 411 bp, Zea mays
  Clone ID: LIB3151-045-Q1-K1-B5
atcttctgccgcgccaacgagaactactgcctggccgtccgcgacggcgccgtcgtgctggccccggtcaaccccaaggacgaccaccagcactggtacaaggacatgcgcttcagcacccgggtcaaggacgaggaaggcatgccggcgttcgcgctcgtcaacaaggccacggggctcgccatcaagcactccctcggccagtcccacccggtcaagctcgcgcctttcagcccggaccaggaggacgcgtcggtgctgtggacggagagcaaggacgtgggcaagggcttccgctgcatccgcatggtcaacaacacccgcctcaacttcgacgccttccacggcgacaaggaccacggcggcgtgcacgacggcaccggcgtcgtgctcttggagtggtgcaagggc

SEQ ID NO: 19413 - DNA, 433 bp, Zea mays
  Clone ID: LIB3151-045-Q1-K1-B6
caacaagcaacatagaaagtggaatccagtagcaacaatagagcaacaatggagaccaagatattttccctccttatgctccttgctctttctacatgtgttgctaacgcgacaattttccctcaatgctcacaagctcctatagcttccctttttcccccataccttccatcaattatagcttcagtatgtgaaaacccagctcttcaaccatataggcttcaacaagcaatcgcagcaagcaacatacctttatcgcccttgttgtgtcaacaatcgccagccctatctttggtgcagtcattggtacaaaccatcagggcacaacagctgcagcaactcgtgctacctgtgatcaaccaagtagctctggcaaacctttctccctactctccgcaacaacaatttcttccattcaaccaactgtctacac

SEQ ID NO: 19414 - DNA, 365 bp, Zea mays
  Clone ID: LIB3151-045-Q1-K1-B7
ctgggtcttcagaccattagctttatctactccagagcgcagaagaacccgatcgacaccatgagggtgttgctcgttgccctcgctctcctggctctcgctgcgagcgccacctccacgcatacaagcggcggctgcggctgccagccaccgccgccggttcatctaccgccgccggtgcatctgccacctccggttcacctgccacctccggtgcatctcccaccgccggtccacctgccgccgccggtccacctgccaccgccggtccatgtgccgccgccggttcatctgccgccgccaccatgccactaccctactcaaccgccccggcctcagcctcatccccagccacacccatgccc

SEQ ID NO: 19415 - DNA, 393 bp, Zea mays
  Clone ID: LIB3151-045-Q1-K1-B8
tctatctatatatactactagcaaaaccagcaacaacaacacccaatggcatcacgaatgtggaacctcaaagccctggtcacctcactactctgcatctcggcgttgtcgtcgtcgccatggccatgcacggcagccggtcagctgggcggcaagcccctggtcaccgccgtcaccaaggacgcgtccacctccctctacacggcgccgctcaaggacggccacccgctcgtcctcgacctcactagcccggtcatctcgctggccacgtgcgcctcctcctccaagaacaacaacggcacgctcaccgtcacgctatccgccaacgccaccgacggccaaaacccgctgttcccggtctccttctcggcggtggccacgtgcgcgccgtcg

SEQ ID NO: 19416 - DNA, 343 bp, Zea mays
  unsure at all n locations
  Clone ID: LIB3151-045-Q1-K1-C1
cgcggggctgttggcggcccaggtagcccattacttgacggcaatgtgcggcctgcagctgcagcagccaggtccctgcccttgcaacgaaactgccggcggtgtctactactgaggaaactatgtactgtagtaataatgtaatggagccgctgactagctacctagctcgctagtttactcatttagcggcgatgagtaacgtagtgtcacccatcaccatgggtggcagcgtgagcaatgacctgaatgaaccattgaaatggaaaggaatactatataaggaaaaacgatgattgcgacattgagggtgccctcttttaaatttcttatgaattatant

SEQ ID NO: 19417 - DNA, 372 bp, Zea mays
  Clone ID: LIB3151-045-Q1-K1-C10
cgcactagcaacaacctaacaacaatggctaccaagatattagccctccttgcgcttcttgcccttttagtgagcgcaacaaatgcgttcattattccacagtgctcacttgctcctagtgccattattccacagttcctcccaccagttacttcaatgggcttcgaacatccagccgtgcaagcctacaggctacaactagcgcttgcggcgagcgtcttacaacaaccaattgcccaattgcaacaacaatccttggcacatctaaacctacaaaccatcgcaacgcaacagcaacaacagtttctgccatcactgagccacctagccgtggtgaaccctgtcgcctacttgcaacagcagctacttgca

SEQ ID NO: 19418 - DNA, 403 bp, Zea mays
  Clone ID: LIB3151-045-Q1-K1-C11
tcgcaaccgtccacgcgagcaaagagccctcgttccccttccgctcgagtccatcgccgtcgcagaccgcggaggagctcgccacccagatcgagcagcagacgctcgatgagcagaagaccgagaatgctttggagcagttggcatccattgatctcatcgagctatgaaaggaggccagaattgagcgttgtcgtgcaactagagacttgagtagctgtggtcgctatgtgcaccatgtgcttaactcatgtggccatgcctcattatgtgctgagtgcagccaaagatgtgacgtctgcccaatctgcaggagtccaatatcggacaatggaaatagggttcacctatgtctttactacaagtgcctggaagcgggccttatttctaagcagcacgatga

SEQ ID NO: 19419 - DNA, 410 bp, Zea mays
  Clone ID: LIB3151-045-Q1-K1-C12
gcagtttcttccattcaaccaactggctgcattgaactctgctgcttatttgcaacaacaactaccattcagtcagctagctgctgcctacccccagcaatttcttccattcaaccaactggcagcattgaactctgctgcttatttacaacagcaacagctaccaccattcagccagctagctgatgtgagccctgttgccttcttgacacaacaacagttgttgccgttctacctgcacgctgcgcctaacgctggcaccctcttacaactgcaacaattgctgccattcaaccaacttgctttgacaaacccaacagcgttctaccaacaacccatcattggtggtgccctcttttagattgcttatgagttatagttcaataatgaaagtttttggatgatggttg

SEQ ID NO: 19420 - DNA, 82 bp, Zea mays
  Clone ID: LIB3151-045-Q1-K1-C2
ggtcttaaaacaataactttatttaattcataacggcaaaaaacccgacgaaacctgggggggggtggtgccttgttttcct

SEQ ID NO: 19421 - DNA, 362 bp, Zea mays
  Clone ID: LIB3151-045-Q1-K1-C3
tgttgctgcaacaacttcttccattaaaccaattggccgaactgaaccccgctggttattggcaggagcaaatactactaccatttagccagatagctgcagcaagccgtgctttcttcttgacacagcaacagttgctgcctttctaccagcagtttgcggctaaccccgcaaccctgttacaactacaacaattgttgccctttgtacaacttgctttgacaaacccagcagcctgctaccaacaacacattattggtggtgccctcttttagattgcttattaattgtaattcaataataaagttttttggatgatgtatgtggccaaccagaaataagaagtgacattgccagattct

SEQ ID NO: 19422 - DNA, 308 bp, Zea mays
  Clone ID: LIB3151-045-Q1-K1-C4
gactaattggcacaaaacatcggggaacactatctacaccatctagcgctagcggacatcgctaggtactctcagcatcagcagcttgttccatttaaccgactagctgaatcgaactttgcttcttattggtaacaacatcatctaccattcattctgctatcagctgtctaatcacagatagttcttgcatgcgaccaaccgactgtatagaactatacggtttatctacagcatggacaacgtctaccatttatacaactcgctggtgagagatctgctaccttattgacacaaccacaattggt

SEQ ID NO: 19423 - DNA, 369 bp, Zea mays
  Clone ID: LIB3151-045-Q1-K1-C5
attgtgtgtattaacaaacacaccaagcgtatcgcactagcaacaacctaacgacagtggctaccgcgatattatggctacttgcgctccttgcgctttttgcgagcgcaacaaatgcgtccattattccacaatgcgtgacttgcttctagttccattattccacaggtcctcccaccagttacgttaatggccttagaacacacacctgtgcaagcctatccgctacaacaagcgattgcggcgagcgttttacaacaaccaattgcccaattgcaacaacaatccttggcacatgtaacaatacaaaccatcggaacgcaacagtaacaacaggtcctaccagcactgaaccacctaatcatggag

SEQ ID NO: 19424 - DNA, 432 bp, Zea mays
  Clone ID: LIB3151-045-Q1-K1-C6
caacaagcaacatagaaagtggaatccagttgcaacaatagagcaacaatggcgaccaagatattgtccctccttatgctccttgctctttctgcatgtgttgctaacgcgacaattttccctcaatgctcacaagctcctatagcttcccttcttcccccataccttccatcaatgatagcttcagtatgtgaaaacccagctcttcaaccctataggctccaacaagcaatcgcagcaagcaacatacctttatcacccttgtttcaacaatcgccagccctatctttggtgcagtcattggtacaaaccatcagggcacagcagctgcagcaactcgtgctacctgtgatcaaccaagtagctctggcaaacctttctccctactctcagcaacaacaatttcttccattcaaccaactgtctacattg

SEQ ID NO: 19425 - DNA, 420 bp, Zea mays
  Clone ID: LIB3151-045-Q1-K1-C7
ggtgacctaccccttgggtaccatcataaggaccttgtcatatatgaaatgcatttgcgtggattcacaaagcacaactcaagcaagacaaaacacccaggaacttacattggtgctgtgtcaaagcttgaccatctaaaggaacttggagtgaactgtatagagctaatgccctgccatgagttcaatgagctagagtacttcagctcctcttcgaagatgaacttctggggatattccacaataaattttttctcaccaatggcaagatattcttcaagtggcataagagactctggatgtggtgccataaatgaatttaaagcttttgtaagggaagcccacaaacggggaattgaagtgatcatggatgttgtcttcaatcatacagctgaaggtaatgagaaaggcccaatatta

SEQ ID NO: 19426 - DNA, 391 bp, Zea mays
  Clone ID: LIB3151-045-Q1-K1-C8
agaccaactagcaacatagaaagcacaatagtgtaccaacaatggcagccaaaatattttgcttccttatgctccttggtctttctgcaagtgctgctaccgcaaccattttcccacaatgctcacaagctcctatagcttcctttcttcccccatacctctcaccagcggtgtcttcagtatgtgaaaacccaattcttcaaccctacaggatccaacaggcaatcgcagcaggcatcttacctttatcacccttgttcctccaacaaccgtcagccctattacagcagttacctttggtgcatttgttggcacaaaacatcaaggcacaacaactacaacaacttgtgctaggaaaccttgctgcctactctcagcaacagcagtttct

SEQ ID NO: 19427 - DNA, 390 bp, Zea mays
  Clone ID: LIB3151-045-Q1-K1-C9
gaaacacaccaagcgaagcgcactagcaacaacctaacaacaatggctaccaagatattatccctccttgcgcttcttgcgctttttgcgagcgcaacaaatgcgtccattattccacaatgctcacttgctcctagttccattattccacagttcctcccaccagttacttcaatggccttcgaacacccagctgtgcaagcctataggctacaacaagcgattgcggcgagcgtcttacaacaaccaattgcccaattgcaacaacaatccttggcacatctaacaatacaaaccatcgcaacgcaacagcaacaacagttcctaccagcactgagccacctagccatggtgaaccctgtcgcctacttgcaacagcagctgcttgca

SEQ ID NO: 19428 - DNA, 59 bp, Zea mays
  Clone ID: LIB3151-045-Q1-K1-D1
ttggaaccaccaggcaccttggaagggggattccattgccaccattggagcaccattgg

SEQ ID NO: 19429 - DNA, 363 bp, Zea mays
  Clone ID: LIB3151-045-Q1-K1-D10
gggtcttcagaccattagctttatctactccagagcgcagaagaacccgatcgacaccatgagggtgttgctcgttgccctcgctctcctggctctcgctgcgagcgccacctccacgcatacaagcggcggctgcggctgccagccaccgccgccggttcatctaccgccgccggtgcatctgccacctccggttcacctgccacctccggtgcatctcccaccgccggtccacctgccgccgccggtccacctgccaccgccggtccatgtgccgccgccggttcatctgccgccgccaccatgccactaccctactcaaccgccccggcctcagcctcatccccagccacacccatgccc

SEQ ID NO: 19430 - DNA, 356 bp, Zea mays; identical to SEQ ID NO: 17865
  Clone ID: LIB3151-045-Q1-K1-D11

SEQ ID NO: 19431 - DNA, 295 bp, Zea mays
  Clone ID: LIB3151-045-Q1-K1-D2
gttgcaaccaacgcgcaacatggaacgaccattggtggccaaacaatggggcttactaaagctggtcggcttttgcgcacgggtcgttatcgaaaccatgctcccacaacgatcacacgacactgttgataagcttctatcgccatacttcttaccacgtgcgtctcaactgcgggaaaacccgattgtgcaaacctacaggatccaacatgcaagagccaccaggctattaccattatcaccctagcttcttcaacactcgtcagccctattacatcagccaccttacggccat

SEQ ID NO: 19432 - DNA, 387 bp, Zea mays
  Clone ID: LIB3151-045-Q1-K1-D3
ccctgctccattctcagccgccgccaatcctttcccgtgctccgcaaccgctgagtgagaagaagagatggccggcaagggcgatggcccggctatcggcatcgatctcggcacgacgtactcttgcgtcggcgtgtggcagcacgaccgcgtcgagatcattgccaacgaccagggtaaccgcaccacgccctcgtacgtcgccttcaccgactccgagcgcctcatcggagatgcggccaagaaccaggtcgccatgaaccccatcaacaccgtctttgatgccaagcgtctcatcggcaggaggttcagtgatgcgtctgtccagagtgatatcaagctgtggcccttcaaagtcatttctgggcctggtgagaagccaatgat

SEQ ID NO: 19433 - DNA, 432 bp, Zea mays
  Clone ID: LIB3151-045-Q1-K1-D5
attttgagcattcagaaacacaccaagcgaagcacattagcaacaacctaacaacaatggctaccaagatattatccctccttgcgcttcttgcgctttttgcgagcgcaacaaatgcgttcattattccacaatgctcacttgctccaagttccattattacacagttcctcccaccagttacttcaatgggcttcgaacacccagctgtgcaagcctataggctacaacaagcaattgcggcgagcgtcttacaacaaccaatttcccagttgcaacaacaatccttggcacatctaacaatacaaaccatcgcaacgcaacagcaacaacaattcctaccagcactgagccacctagccatggtgaaccctgccgcctacttgcaacagcagttgcttgcatcaaacccacttgctctggcaaacgtag

SEQ ID NO: 19434 - DNA, 318 bp, Zea mays
  Clone ID: LIB3151-045-Q1-K1-D6
gaccaactagcaacatagaaagcacaatagtgtaccaacaatggcagccaaaatattttgcctccttatgctccttggtctttctgcaagtgctgctacggcgaccattttcccacaatgctcacaagctcctatagcttcccttcttcccccgtacctctcaccagcggtgtcttcggtatgtgaaaacccaattcttcaaccctataggatccaacaggcaatcgcagctggcatcttacctttatcacccttgttgctccaacaatcatcaagcctattacagcaagtacctttggtgcatttattggcacaaaa

SEQ ID NO: 19435 - DNA, 339 bp, Zea mays
  Clone ID: LIB3151-045-Q1-K1-D7
cgaccagtgcgcgcaccgcccggcagggctgctcatctcgtcgacgaccagtggattaatcggcatggcggctctggccacgtcgcagctcgtcgcaacgcccgccggcctgggcgtcccggacgcgtccacgttccgccgcggcgccgcgcagggcctgaggggggcccgggcgtcggcggcggcggacacgctcagcatgcggaccagcgcgcgcgcggcgcccaggcaccagcagcaggcgcgccgcgggggcaggttcccgtcgctcgtcgtgtgcgccagcgccggcatgaacgtcgtcttcgtcggcgccgagatggcgccgtggagcaagac

SEQ ID NO: 19436 - DNA, 412 bp, Zea mays
  Clone ID: LIB3151-045-Q1-K1-D8
ggcacccagccggtgtgcagtgggctggctgttggcctcctttcctcgccgcgctttggagcccacctcggtctcggtgcagtgtctcgctcgcgcgtgccggcgtgcgtgccctggtggcccatggggaggaggataatgaagagtgggcgacgcacgacgatgcagccgcggccggcgcttcttctcctcgtcctcgtcctcggcgtgtcgctgcgtggatgcattgcgcaaggcgggggcggaggaggagggctcacgcgggggagcttccccaagggcttcgtcttcggcaccgccgccgccgcttaccagtacgagggagccgtgaagacggatggcagagggcaaacgatctgggacacgtttgcacacacttttggcaagatttcaaacttcagcaacgcggatg

SEQ ID NO: 19437 - DNA, 379 bp, Zea mays
  Clone ID: LIB3151-045-Q1-K1-D9
gctcggcacccggttccccgcggctcgaatcaaaaagataatgcaagcagatgaggatgttggaaagattgcattagcagtgcctgttttagtctcgagggctcttgaattgtttttacaagatttaattgaccggacttatgaaattactcttcaaagtggagcaaagacactgaattccttccacctgaagcaatgtgtgaagaggtacagttcttttgatttcctaactgaagttgtcagcaaggtaccagatcttggtggtgctgattcatgtggagatgaaagagtgttacctagaagaagaaagtcaaatggcagtgacccaaagaatgatgaatcaagatctagtaaaatggctataagaaatgcaaatacc

SEQ ID NO: 19438 - DNA, 383 bp, Zea mays
  Clone ID: LIB3151-045-Q1-K1-E10
cccttccgccttcaattcctacgcgcggtctcccttctcttccacctcaattcgtgtcgcctacgcctctcgctctcctcccgccgcgcgcgcgagaggagggaaagggaggggaggaagccggcggggggcgcgcggcatggacgcgcgggccagggaggctgcagagaccagcggccccgggttgccgctcgccgtgcgggagctcctcgccggaggggtcgccgggggagtcgccaagaccgctgtcgcgccgctcgagcgcgtcaagatcctgttccagacaagaagagcggagttccatggttctggattgattggatccttccgaacaatctatcggacagaaggtcttttacggttttacaggggaaatggagcta

SEQ ID NO: 19439 - DNA, 403 bp, Zea mays
  Clone ID: LIB3151-045-Q1-K1-E11
cttctcctcctcgcctcctctccctagtctccacgacgcaagggagagtgacggaaagcgacgcggcgcgagcgaggagggccaaggcgaagaggggaagcaccgcaccaggacccttgttcgccgccgccgcctctgatctccgcgaggttgtcaggattcaatatgtcgaccagcacattcgctacttcctgcacgctgttgggcaatgttagaacaacgcaggcctcccagacagcggtgaagagcccttcgtctctaagcttcttcagccaagttacgaaggttccaagcctgaagacctgcaagaaactggatgtctccgccatggctgtatacaaggtgaagcttgtcgggcctgaaggtgaagagcacgagtttgatgctccaaacgacgcctaca

SEQ ID NO: 19440 - DNA, 442 bp, Zea mays
  Clone ID: LIB3151-045-Q1-K1-E12
tagcaacatagaaagcacaatagtgtaccaacaatggcagccaaaatattttgcttccttatgctccttggtctttctgcaagtgctgctaccgcaaccattttcccacaatgctcacaagctcctatagcttcctttcttcccccatacctctcaccagcggtgtcttcagtatgtgaaaacccaattcttcaaccctacaggatccaacaggcaatcgcagcaggcatcttacctttatcacccttgttcctccaacaaccgtcagccctattacagcagttacctttggtgcatttgttggcacaaaacatcaaggcacaacaactacaacaacttgtgctaggaaaccttgctgcctactctcagcaacagcagtttcttccattcaaccaactggctgcattgaactctgctgcttatttgcaacaacaactaccat

SEQ ID NO: 19441 - DNA, 432 bp, Zea mays
  Clone ID: LIB3151-045-Q1-K1-E3
cggagaacgccaacaaagccctaacctgctcaacctttcccccctcgcaagcaaagccgaacagatctcctcgtcgtcgcctcgctgtctcctccgccgttgcctgcgatcccgatcatggagggcgacagtaccaacctcgacgcggctatagagtcgctcctgaacgtggagaagcagatgaggctggcaggcgatgtcgccggcacgcggaaggccgtcatcgacatcgtcgagctctgctacaagaccggcgcgtggaagacgctaaacgaccagatcgttctcctctccaagaggagaggccagcttaagcaggccattactgctatggttcagaaagcaatggactacattgatttgacaccagacattgacacacgagtcgagctaatcaaaacactgagcagcgtctctgcttgcaaaatttat

SEQ ID NO: 19442 - DNA, 365 bp, Zea mays
  Clone ID: LIB3151-045-Q1-K1-E4
ctgggtcttcaaaccattagctttatctactccagagcgcagaagaacccgatcgacaccatgagggtgttgctcgttgccctcgctctcctggctctcgctgcgagcgccacctccacgcatacaagcggcggctgcggctgccagccaccgccgccggttcatataccgccgacggtgcatctgccacctccggatcacctgccacctccggtgcatctcccaccgccggtccacctgccgtcgccggtccacctgccaccgacggtccatgtgccgacgccggttcatctgccgacgacaccatgccactaccctactcaaccggcccgggctcagactcatacgcagccacacccatgccc

SEQ ID NO: 19443 - DNA, 438 bp, Zea mays
  Clone ID: LIB3151-045-Q1-K1-E5
ggcaatcacagctggcatcttacctttatcacccttgttcctccaacaatcatcagccctattacatcagttacctttggtgcatttattggcacaaaacatcagggcacaacaactacaacaacttgtgctagcaaaccttgctgcctactctcagcaacagcagtttcttccattcaaccaactagctgcattgaactctgcttcttatttgcaacaacaacaactaccattcagccagctacctgctgcctacccccagcaatttcttccattcaaccaactggcagcattgaactctcctgcttatttacagcagcaacaactactaccattcagccagctagctggtgtgagccctgctaccttcttgatacaaccacagttgttgccgttctaccagcacgctgcgcctaacgctggcaccctcttacaact

SEQ ID NO: 19444 - DNA, 368 bp, Zea mays
  unsure at all n locations
  Clone ID: LIB3151-045-Q1-K1-E6
agcaaagcggcagtgcgtagagaggatcgtcgaacagaacagcatgaagatggtcatcgttctcggcgtgtgcctggctctgtcagctgccagcgcctctgcaatgcagatgccctgcccctgcgcggggctgcagggcttgtacggcgctggcgccggcctgacgacgatgatgggcgccggcgggctgtacccctacgcggagtacctgaggcagccgcagtgcagcccgctggcggcggcgccctactacgccgggtgtgggcagacgagcgccatgtaccagccgctccggcaacagtgctgccagcagcaaatgaggatgatggacgtgcagtccgtcgcgcancagctgcagatgatgatgc

SEQ ID NO: 19445 - DNA, 404 bp, Zea mays
  Clone ID: LIB3151-045-Q1-K1-E7
attttcagcattcagaaacacaccaagcgaagcgcactagcaacaacctaacaacaatgggtaccaagatattagccctccttgcgcttcttgcccttttagtgagcgcaacaaatgcgttcattattccacagtgctcacttgctcctagtgccattattccacagttcctcccaccagttacttcaatgggcttcgaacatccagccgtgcaagcctacaggctacaactagcgcttgcggcgagcgtcttacaacaaccaattgcccaattgcaacaacaatccttggcacatctaaacctacaaaccatcgcaacgcaacagcaacaacagtttctgccatcactgagccacctagccgtggtgaaccctgtcgcctacttgcaacagcagctacttgca

SEQ ID NO: 19446 - DNA, 424 bp, Zea mays
  Clone ID: LIB3151-045-Q1-K1-E9
gcacaatagtgtaccaacaatggcagccaaaatattttgcttccttatgctccttggtctttctgcaagtgttgctaccgcaaccattttcccacaatgctcacaagctcctatagcttcccttcttcccccatacctctcaccagcggtgtcttcaatgtgtgaaaacccaattgttcaaccctacaggatccaacaggcaatcgcaacaggcatcttaccattatcacccttgttcctccaacaaccgtcagccctattacagcagttacctttggtccatttggtggcacaaaacatcagggcacaacaactacaacaacttgtgctagcaaaccttgctgcatactctcagcaacatcagtttcttgcattcaaccaactggctgcattgaactctgctgcttatttgcaacaacaatta

SEQ ID NO: 19447 - DNA, 441 bp, Zea mays
  Clone ID: LIB3151-045-Q1-K1-F10
caactagcaacatagaaagcacaatagtgtaccaacaatggcagccaaaatattttgcctccttatgctccttggtctttctgcaagtgctgctacggcgaccattttcccgaaatgctcgcaagctcctatagcttcccttcttcccccgtacctctcaccagcggtgtcttcggtatgtgaaaacccaattcttcaaccctacaggatccaacaggcaatcacagctggcatcttacctttatcacccttgttcctccaacaatcatcagccctattacatcagttacctttggtgcatttattggcacaaaacatcaaggcacaacaactacaacaacttgtgctagcaaaccttgctgcctactctcagcaacagcaagttcttccattcaaccaactagctgcattgaactctgcttcttatttgcaacaacaaca

SEQ ID NO: 19448 - DNA, 354 bp, Zea mays
  unsure at all n locations
  Clone ID: LIB3151-045-Q1-K1-F11
gatcgatcgccacagccaacaccacccgccgaggcgacgcgacagccgccaggaggaaggaataaactcactgccagccagtgaagggggagaagtgtactgctccgtcgaccagtgcgcgcaccgcccggcagggctgctcatctcgtcgacgaccagtggattaatcggcatggcggctctggccacgtcgcagctcgtcgcaacgcccgccggcctgggcgtcccggacgcgtccacgttccgccgcggcgccgcgcaaggcctgaggggggcccgggcgtcggcggcggcggacacgctcagcatgcggaccagcgcgcgcgcggcgcccangcaccagcagcaggcgcg

SEQ ID NO: 19449 - DNA, 72 bp, Zea mays
  Clone ID: LIB3151-045-Q1-K1-F12
tcgccaacaagcaacatagaaagtggaatccagttgcaacaatggagcaccattggcaaccaagaatttttc

SEQ ID NO: 19450 - DNA, 339 bp, Zea mays
  Clone ID: LIB3151-045-Q1-K1-F2
gaccataaaaaggggaatccatagccaccattgaaccaccattgggacccaaaaattttgccttcctatgcctcctgctctttttccatgggtgctaaccgccattttccttatgctacaaactctatagctttccttttttccccatacctttcataattatagcttcagtatgtgaaaacccagcttttaaccatatatgcttcaacaagcaatcgcagcaagcaacatacctttatcgcccttgttgtgtcaacaatcgccagccctatctttggtgcagtcattggtacaaaccatgagggcacaacagctgcagcaactcgtgctacctgtgat

SEQ ID NO: 19451 - DNA, 384 bp, Zea mays
  Clone ID: LIB3151-045-Q1-K1-F3
gaccaactagcaacatagaaagcacaatagtgtaccaacaatggcagccaaaatattttgcttccttatgctccttgggctttctgcaagtgctgctaccgcaaccattttcccacaatgctcacaagctcctatagcttcctttcttcccccatacctctcaccagcggtgtcttcagtatgtgaaaacccaattcttcaaccctacaggatccaacaggcaatcgcagcaggcatcttacctttatcacccttgttcctccaacaaccgtcagccctattacagcagttacctttggtgcatttgttggcacaaaacatcaaggcacaacaactacaacaacttgtgctaggaaaccttgctgcctactctcagcaacagca

SEQ ID NO: 19452 - DNA, 349 bp, Zea mays
  Clone ID: LIB3151-045-Q1-K1-F4
tttcagcattcagaaacacaccaagcgaagtgcactagcaacaacctaacaacaatggctaccaagatattagccctccttgcgcttcttgcccttttagtgagcgcaacaaatgcgttcattattccacagtgctcacttgctcctagtgccattattccacagttcctcccaccagttacttcaatgggcttcgaacatccagccgtgcaagcctacaggctacaactagcgcttgcggcgagcgtcttacaacaaccaattgcccaattgcaacaacaatccttggcacatctaaacctacaaaccatcgcaacgcaacagcaacaacagtttctgccatcactga

SEQ ID NO: 19453 - DNA, 386 bp, Zea mays
  Clone ID: LIB3151-045-Q1-K1-F5
caactagcaacatagaaagcacattagtgtgccaacaatggcagccaaaatattttgcctccttatgctccttggactttctgcaagtgctgctacggcgaccattttgccgcaatgctcgcaagctgctatagcttcccttcttcccccgtacctctcaccaacggtgtcttcggtatgtgaaaacccaattcttcaaccctacaggatccaacaggcaatcgcagctggcatcttacctttatcacccttgttcctccaacaatcatcagccctattacaacagttacctttggtgcatttattggcacaaaacatgagggcacaacaactacaacaacttgtgctagcaaacctttgctgctactctcagcaacaagcagttc

SEQ ID NO: 19454 - DNA, 403 bp, Zea mays
  unsure at all n locations
  Clone ID: LIB3151-045-Q1-K1-F6
ctccgcgcaaacagacatggcggagacgctcgacatgaccctcgacgacatcatcaagaacaacaagaagagtaactcctcatctcgcggggcccgccgcaaccgcggcggatccgcccctggcggcgggaccggcggggtcgggccgaccaggcgcccctttaaaagggctgggaacaggcaggcgccctaccagccgccgaaggcccccgacgctgcgtggcagcacgacatgtaccctgcggtcgccgcaagaagcggcggcggcgggagggtctcggctcttgagacgggcgccaagctctacatctncaacctggactttggggtttcgaacgacgatattaaggagcttttctctgagctaggtgatttgaagcgtttttcgataaattatgatcga

SEQ ID NO: 19455 - DNA, 389 bp, Zea mays
  Clone ID: LIB3151-045-Q1-K1-F7
attgagaccaactagcaacatagaaagcacaatagtgtaccaacaatggcagccaaaatattttgcttccttatgctccttggtctttctgcaagtgttgctaccgcaaccattttcccacaatgctcacaagctcctatagcttcccttcttcccccatacctctcaccagcggtgtcttcaatgtgtgaaaacccaattgttcaaccctacaggatccaacaggcaatcgcaacaggcatcttaccattatcacccttgttcctccaacaaccgtcagccctattacagcagttacctttggtccatttggtggcacaaaacatcagggcacaacaactacaacaacttgtgctagcaaaccttgctgcatactctcagcaacatca

SEQ ID NO: 19456 - DNA, 422 bp, Zea mays
  Clone ID: LIB3151-045-Q1-K1-F8
cgcctggtgatgggcgtcgaactggcgcaaccgaccgccgccgcggctgcggtgaccaccgctgagcaggctcaggatctcatcgacgccgctaggtacgacgacttggaggacgtcgtcgccctgttctccgctggtgtctcgctggactccacagattcgcaaggccgcacagctcttcacatggcttctgccaatggtcaccttgctgtggtggaatacttgattcaaaatggagcgaatgttaacgccaccaacatggagaagaacacaccactccactgggcatgccttaatggacgtatagaggtaatcagggctttgatctcagcgggggctagcgtgagtgctctgaacagccacgagaaaacgccaatggacgaagcggtgaccacaggcaaaatggacgtgatcgacgcgat

SEQ ID NO: 19457 - DNA, 411 bp, Zea mays
  Clone ID: LIB3151-045-Q1-K1-F9
aatcatcattcatcttagtagtataggcactaaatcaaatctgcaacatcaattatgtaacgtccaaaaaccatgaagctggtgcttgtggttcttgctttcattgctttagtatcaagtgtttcttgtacacagacaggcggctgcagctgtggtcaacaacaaagccatgagcagcaacatcatgcacaacaacatcatccacaaaaacaacaacatcaaccaccaccacaacatcaccagcagcagcaacaccaacaacaacaagttcacatgcaaccacaaaaacatcagcaacaacaagaagttgatgttcaacaacaacaacaacaaccgcagcaccaacaacaacaacaacaacagcaccaacaacaacatcaatgtgaaggccaacaacaacatcaccaacaa

SEQ ID NO: 19458 - DNA, 350 bp, Zea mays
  Clone ID: LIB3151-045-Q1-K1-G10
attttgagcattcagaaacacaccaagcgatgcgcactagcaacaacctaacaacaatggctaccaagatattatccctccttgcgcttcttgcgctttttgcgagcgcaacaaatgcgtccattattccacaatgctcacttgctcctagttccattattccacagttcctcccaccagttacttcaatggccttcgaacacccagctgtgcaagcctataggctacaacaagcgattgcggcgagcgtcttacaacaaccaattgcccaattgcaacaacaatccttggcacatctaacaatacaaaccatcgcaacgcaacagcaacaacagttcctaccagcactg

SEQ ID NO: 19459 - DNA, 352 bp, Zea mays
  unsure at all n locations
  Clone ID: LIB3151-045-Q1-K1-G11
gaccattagctttatctactccagagcgcagaagaacccgatcgacaccatgagggtgttgctcgttgccctcgctctcctggctctcgctgcgagcgccacctccacgcatacaagcggcggctgcggctgccagccaccgccgccggttcatctaccgccgccggtgcatctgccacctccggttcacctgccacctccggtgcatctcccaccgccggtccacctgccgccgccggtccacctgccaccgccggtccatgtgccgncgccggttcatctgccgcgcaccatgcactacctactcaaccgccgggctagctatcccagcaaccatgccggcacagcgatc

SEQ ID NO: 19460 - DNA, 374 bp, Zea mays
  unsure at all n locations
  Clone ID: LIB3151-045-Q1-K1-G12
aacacaccaagcgaagcacattagcaacaacctaacaacaatggctaccaagatattatccctccttgcgcttcttgcgctttttgcgagcgcaacaaatgcgttcattattccacaatgctcacttgctccaagttccattattacacagttcctcccaccagttacttcaatgggcttcgaacacccagctgtgcaagcctataggctacaacaagcaattgcggcgagcgtcttacaacaaccaatttcccagttgcaacaacaatccttggcacatctaacaatacaaaccatcgcaacgcaacagcaacaacaattnctaccagcactgagccacctagccatggtgaaccctgccgcctacttgcaac

SEQ ID NO: 19461 - DNA, 349 bp, Zea mays
  unsure at all n locations
  Clone ID: LIB3151-045-Q1-K1-G2
tagcaacatagaaggcacaatagtgtcccaccattggcagctaaaatttttggcctccttatgctccttggtctttctgcaagggctgctacggcgacctttttccaacaatgctcacaagctcctatagcttccttttttcccccgtccctctcaccaacggtgtcttcggtatgtgaaaacccaattcttcaaccctacaggatccaacaggcaatcgcagctggcatcttacctttatcacccttgttcctccaacaatcatcagccctattacagcagttacctttggtgcatttattggcacaaaacatcanggcacaacaactacaacaactngtgctagcaa

SEQ ID NO: 19462 - DNA, 162 bp, Zea mays
  Clone ID: LIB3151-045-Q1-K1-G3
aatagcttatttaattcaaaacggaaaaaaaaccggaccgaaacaataagggggtggttggtggccttggttttcctggttttggttggaagcgcaacctcaacccatacaaccgggggttgcggttgccacccaccgccgccggttaatctaccgccgccg

SEQ ID NO: 19463 - DNA, 71 bp, Zea mays
  Clone ID: LIB3151-045-Q1-K1-G4
caactagcaacatagaaggcacaatagggtaccaacaatggcagccaaaatattttgcctccttatgctcc

SEQ ID NO: 19464 - DNA, 352 bp, Zea mays
  unsure at all n locations
  Clone ID: LIB3151-045-Q1-K1-G5
agaccattagctttatctactccagagcgcaaaaaaacccgatcgacaccatgagggtgttgctcgttgccctcgctctcctggctctcgctgcgagcgccacctccacgcatacaagcggcggctgcggctgccagccaccgccgccggttcatctaccgccgccggtgcatctgccacctncggttcacctgccacctccggtgcatctcccaccgccggtccacctgccgccgccggtccacctgccaccgccggtccatgtgccgccgccggttcaatctgccgcgccaccatgccactaccctactcaaccgccccggcctcagcctcatncccagccacacccatg

SEQ ID NO: 19465 - DNA, 369 bp, Zea mays
  Clone ID: LIB3151-045-Q1-K1-G6
atttctaaaaaaaaaaactttattattgaactataactcataagcaatctaaaagagggcaccaccaatgatgggttgttgatctgtcgccgtctcgccaacagcaccaaccgcctcctagaactcgaccgccatggcgagccaaggcgagccgtcttcctccgatccgaaggggaagaaggattactcgacggcgatcctggagaggaagaagtcgccgaaccggctggtggtcgacgaggccaccaatgatgacaactccgtcgtcgctctgcacccggacaccatggagaggctgcagctctttcgcggtgacacggtcctgctcaagggtaagaagagaaaggacactatctgcattgtgctcgc

SEQ ID NO: 19466 - DNA, 371 bp, Zea mays
  Clone ID: LIB3151-045-Q1-K1-G7
tgcgctttttgcgagcgcaacaaatgcgttcattattccacaatgctcacttgctccaagttccattattacacagttcctcccaccagttacttcaatgggcttcgaacacccagctgtgcaagcctataggctacaacaagcaattgcggcgagcgtcttacaacaaccaatttcccagttgcaacaacaatccttggcacatctaacaatacaaaccatcgcaacgcaacagcaacaacaattcctaccagcactgagccacctagccatggtgaaccctgccgcctacttgcaacagcagttgcttgcatcaaacccacttgctctggcaaacgtagttgcaaaccagccacaacaacagctgcaac

SEQ ID NO: 19467 - DNA, 340 bp, Zea mays
  unsure at all n locations
  Clone ID: LIB3151-045-Q1-K1-G8
gaggcgtcttccaagcttgtagggttaccggatcggaggagcatccccgcctaggtcaccacagccatggttcgcggatcgctaggcaagcttgcgtcgcgcgccctctccgtcgccgggagatggcagcaccagcagcttcgccgcctcaacatccacgagtaccagggtgcggagttgatggggaagtacggtatcaacgtacccaggggtgcggcggcggggtccgtacaggaggtcaatgacgccttgaagaacatgttccccagtgagaaagagatagttgttaaaagtcaaatccttgctggtggccganggctgggaactttcaaaagtgggc

SEQ ID NO: 19468 - DNA, 365 bp, Zea mays
  Clone ID: LIB3151-045-Q1-K1-G9
cgcttccagccgccgccgcgtccgcctcgccaagcgcagcagccgccgcagcacatcgctgtcttgatctcagccatggcggaggtggagcagcaacaggacacgccgaagctcttcaaccgctggaccttcgatgatgtccaggtgaacgacatctcgctgaacgactacctcgctgtgaacgcgacgaagcacgcgatgtacctgccgcacaccgcggggcgctactccaagaagcggttccgcaaggcgcagtgcccgatcgttgagcgccttacaaactccctcatgatgcacgggcgcaacaacggcaagaaggtcatggctgtccgcatcatcaagcataccctggagatcattcacct

SEQ ID NO: 19469 - DNA, 98 bp, Zea mays
  Clone ID: LIB3151-045-Q1-K1-H1
aaattacgttcatggagggaaatatattttaaacctgaggtggggggttattaaaaggaggggcgagaaaattcaaatattgatgatgaaatggagtt

SEQ ID NO: 19470 - DNA, 331 bp, Zea mays
  unsure at all n locations
  Clone ID: LIB3151-045-Q1-K1-H10
ctcttcaagaggggatcatcagattgggcttattattccttattactccaggcaaggatcggagttgctctgaattgactgaaccatggcggcgacaatggcagtgacgacgatggtgacgaggagcaaggagagctggtcgtcattgcaggtcccggcggtggcattcccttggaagccacgaggtggcaagaccggcggcctcgagttccctcgccgggcgatgttcgccagcgtcggcctcaacgtgtgcccgggcgtcccagcggngcgcgacccgcgggagcccgatcccaaagtcgtntcggcggccgacaactgcgacatcgcg

SEQ ID NO: 19471 - DNA, 144 bp, Zea mays
  Clone ID: LIB3151-045-Q1-K1-H11
cggacgcgtgggtgactctgacactgttgtcattgacaatagttatggtattactgcccctgtaggggcttggagtctaataccaaccattgtgggggctgatacaaatgtttatggtgctaaaatatactgtgatcctacaga

SEQ ID NO: 19472 - DNA, 295 bp, Zea mays
  unsure at all n locations
  Clone ID: LIB3151-045-Q1-K1-H12
cggacgcatgggtgactctaacaattattttattgacaatagatagggtattaaagggcgggtaggtttttaaagagtaataacaaccattgtagaggctgatacaaatgtttatggtgctaaaatatactgcgagcctacagctgatcatagtagcaagctctatgatcttgttacatcactcgggagctggaatataatgcagatgttgcttctgcaagngaaaagctactaaacaaatggattataatgctgttcgattatgatggtcatactactgagtggaataaatatg

SEQ ID NO: 19473 - DNA, 371 bp, Zea mays
  unsure at all n locations
  Clone ID: LIB3151-045-Q1-K1-H2
ccaactagcaacatagaaggcacaatagtgtcccaacaatggcagccaaaatattttgcctccttatcctccttggactttctgcaagtgctgctacngcgaccattttcccgcaatgctcgcaagctcctatagcttcccttcttcccccgtacctctcaccagcggtgtcttcggtatgtgaaaacccaattcttcaaccctacaggatccaacaggcaatcgcagctggcatcttacctttatcacccttgttcctccaacaatcatcagccctattacaacagttacctttggtgcatttattggcacaaaacatcaaggcacaacaactacaacaacttgtgctagcaaaccttgctgcctactct

SEQ ID NO: 19474 - DNA, 388 bp, Zea mays
  Clone ID: LIB3151-045-Q1-K1-H3
caagctcctatagcttcccttcttcccccataccttccatcaatgatagcttcagtatgtgaaaacccagctcttcaaccctataggctccaacaagcaatcgcagcaagcaacatacctttatcacccttgtttcaacaatcgccagccctatctttggtgcagtcattggtacaaaccatcagggcacagcagctgcagcaactcgtgctacctgtgatcaaccaagtagctctggcaaacctttctccctactctcagcaacaacaatttcttccattcaaccaactgtctacattgaaccgtgctgcttatttgcagcaacaactattaccattcagccagctagctactgcctactctcagcaacaacaacttcttccattta

SEQ ID NO: 19475 - DNA, 368 bp, Zea mays
  Clone ID: LIB3151-045-Q1-K1-H5
attgataccaactagcaacatacatagggaagtacactagcaacatcttagcaccaatgggagccaagatttttgccctccttgccctccttgctctttcagcaagcgctgctacctcgacttttattccacaatgctcacaacaatacctctctccggcgacagccgtgggatttcaatacccaactatacaatcctacatggtacaagaggccatccaagcaagcatcttacggtcattagcattaaccctccaacaaccatatgctctattgcaacagccatccttagtgcatctgtatctccaaagaatcgcggcacaacaactacaacaacagttgctaccaacaatcaatcaaagtagtgca

SEQ ID NO: 19476 - DNA, 267 bp, Zea mays
  Clone ID: LIB3151-045-Q1-K1-H6
ccgggggaggatcgagagaggccaggaccagccagcttagccatggacggcggcggcgacgcgggcgagacgaggatgaagacggtgtgcgtgacgggcgccgggggcttcgtcgcctcgtggctcgtgcaactcctcctctccagaggcgactacctcgtgcgtggcactgttcgcgaccccggtgaccccaagaacgcgcacctggcggcgctgggcggcgccagcgagcggctgcggctgttcaaggcggacctgctggaccct

SEQ ID NO: 19477 - DNA, 350 bp, Zea mays
  Clone ID: LIB3151-045-Q1-K1-H7
attagctttatctactccagagcgcagaagaacccgatcgacaccatgagggtgttgctcgttgccctcgctctcctggctctcgctgcgagcgccacctccacgcatacaagcggcggctgcggctgccagccaccgccgccggttcatctaccgccgccggtgcatctgccacctccggttcacctgccacctccggtgcatctcccaccgccggtccacctgccgccgccggtccacctgccaccgccggtccatgtgccgccgccggttcatctgccgccgccaccatgccactaccctactcaaccgccccggcctcagcctcatccccagccacacccatgccc

SEQ ID NO: 19478 - DNA, 375 bp, Zea mays
  Clone ID: LIB3151-045-Q1-K1-H8
cggacgcgtgggccggcaccaaccttcgccaggttttcgtgggctctttcaccgatacaaccatcctccaggctacttatattcggatctaacccaaagttgctgttttttccatatatgaaaagaagaacgcaagggatgctcgattgactctagttacttagcagaaccaaaagtggaaggccatcaaagatacgaggctattttctctccatgtctcggtcaccccacctcccaccccgctgcccaccgctgggtcctcagatcactcgaagggatgacggcatgttcacgcaaagctgcaggtttccatctggggatacgttcattggtgaaccaccgtgctggctggatgatctccttgaagattctggg

SEQ ID NO: 19479 - DNA, 350 bp, Zea mays
  unsure at all n locations
  Clone ID: LIB3151-045-Q1-K1-H9
cagagataatggttcctcttgttggaacacctcangaattggggcatcaggtggcccttatccgtcaagtcgctaacaaagttttcaccagtatgggtaaaactattgggtacaagatcggaacgatgattgagattcccagggcagctctagtggctgacgagatcgcggagcaggctgaattcttctcctttggaacgaacgacctcacgcagatgacctttggctacagcagggatgatgtggggaagttcatccccatttatctggctcanggcatcctccagcatgaccccttcgaggttctcgaccagagaggagtaagcgagctggttaagcttgctacagag

SEQ ID NO: 19480 - DNA, 267 bp, Zea mays
  Clone ID: LIB3151-046-Q1-K1-A1
caaaccataaccttaatctactccaaagcgcaaaaaaacccgaccgacaccatgagggtgtggctcgttgccctcgctctcctggctctcgctgcgagcgccacctccacgcatacaagcggcggctgcggctgccagccaccgccgccggttcatctaccgccgccggtgcatctgccacctccggttcacctgccacctccggtgcatctcccaccgccggtccacctgccgccgccggtccacctgccaccgccggtccatgtg

SEQ ID NO: 19481 - DNA, 406 bp, Zea mays
  Clone ID: LIB3151-046-Q1-K1-A10
caacatacatagtgaagtacactagcaacatcttagcaccaatgggagccaagatttttgccctccttgccctccttgctctttcagcaagcgctgctacctcgacttttattccacaatgctcacaacaatacctctctccggcgacagccgtgggatttcaatacccaactatacaatcctacatggtacaagaggccatccaagcaagcatcttacggtcattagcattaaccctccaacaaccatatgctctattgcaacagccatccttagtgcatctgtatctccaaagaatcgcggcacaacaactacaacaacagttgctaccaacaatcaatcaagtaggtgcagcgaaccttgctgcttacctccagcaacaacaggttctttcattcaatcaact

SEQ ID NO: 19482 - DNA, 383 bp, Zea mays
  Clone ID: LIB3151-046-Q1-K1-A11
cagaaacacaccaagcgaagcacattagcaacaacctaacaacaatggctaccaagatattatccctccttgcgcttcttgcgctttttgcgagcgcaacaaatgcgttcattattccacaatgctcacttgctccaagttccattattacacagttcctcccaccagttacttcaatgggcttcgaacacccagctgtgcaagcctataggctacaacaagcaattgcggcgagcgtcttacaacaaccaatttcccagttgcaacaacaatccttggcacatctaacaatacaaaccatcgcaacgcaacagcaacaacaattcctaccagcactgagccacctagccatggtgaaccctgccgcctacttgcaacagcag

SEQ ID NO: 19483 - DNA, 415 bp, Zea mays
  Clone ID: LIB3151-046-Q1-K1-A12
cgcagtcgtcctccccaccccacccaccccaccccacccggtccccactttccactcccaaccccaccagaccttcaaccgctacatttccatcactaccggagccgccactcccacgaacgcgggcggcggagcggaagcgaaccagttatctagtggagttgcctccttcaagctactctaatgtcctttctattcaagtctagcaatggcggcaccactgaaaaaatcccatccccagaagaacagcgagaaaaaataaacgaattacgcaaggagcttggtgaacactcatcagaagccattaaagacttcctttcagatgcctcgttagtgcgatttcttcgagcaaggaactggaatgtgcagaaagctagtaaaatgatgaaagcagctgtgaagtggcggcttgcat

SEQ ID NO: 19484 - DNA, 282 bp, Zea mays
  Clone ID: LIB3151-046-Q1-K1-A2
gaccataaaaggtggaatccagtaccaccaatagagcaccattggcgaccaaaatatttgccctccttatgctcctggctctttctgcatgtgttgctaacgcgacaattttccctcaatgctcacaagctcctatagcttcccttcttcccccataccttccatcaatgatagcttcagtatgtgaaaacccagctcttcaaccctataggctccaacaagcaatcgcagcaagcaacatacctttatcacccttgtttcaacaatcgccagccctatctt

SEQ ID NO: 19485 - DNA, 328 bp, Zea mays
  Clone ID: LIB3151-046-Q1-K1-A3
caactagcaccatacatagggaagtccactaccaccatctaaccaccaagggaagccaaaattttggccttcctggccttcctggctctttcagcaggcgctgttacctcaactttaattccacaaggctcacaacaatacctttttccggcgacagccgtgggatttcaatacccaactatacaatcctacatggtacaagaggccatccaagcaagcatcttacggtcattagcattaaccctccaacaaccatatgctctattgcaacagccatccttagtgcatctgtatctccaaagaatcgcggcacaacaactacaacaac

SEQ ID NO: 19486 - DNA, 394 bp, Zea mays
  Clone ID: LIB3151-046-Q1-K1-A4
gggcctgttcccaagccaattgatcctcccaaaactgaacctccttcaaaaggacctgtcaggtcgcacaaggcaaaagctgctcttgatgctgatgatgattataaggctgaccccctgaaggaaaaggcaaagcctacggaggctgatgtggctaagttgaaagagatcaagaggcaggaggagattgagaagaacaagcttgcattggagaggaagaagaagcaggctgagaagcaagcagcaaaagccgcggcccgggcacagaaggaagctgagaagaagctgaagaaagaggagaagaaagccaagaagaaatctggtgcagctgacactgatgagccctcagaatcggacgccaagtctgatgaagccatggaagccccagtggagc

SEQ ID NO: 19487 - DNA, 441 bp, Zea mays
  Clone ID: LIB3151-046-Q1-K1-A5
caaggtctgatccgacctcttccacaaatgctaaggttgtaccgacccagcctgccagtattcgcgcaacggacctgatggaagctaccgttccgcgctgggatgacgtaaacgtgccaaatataaaggtcgctgagccgcagtccaaacgcaagagcggtggctacatcttagatgagtgggacgaggagtacgaccgagggaagacgaagaaggtgcggagatcaaagcaagactttggcgggccaaacccgttccaggaggaggcggactacgtatcgcagcggaggacgaagcagaaatcctaccgaggcaagtcttggaacaagcgggcctaacacggtagtagagggggagttgagagaatacgcgagagagaatccctggacgcacatgcttgttggtggtacgttttagcacccattggtgagggagatttac

SEQ ID NO: 19488 - DNA, 263 bp, Zea mays
  Clone ID: LIB3151-046-Q1-K1-A7
attgagaccaacaagcaacatagaaagtggaatccagtagcaacaatagagcaacaatggagaccaagatattttccctccttatgctccttgctctttctacatgtgttgctaacgcgacaattttccctcaatgctcacaagctcctatagcttccctttttcccccataccttccatcaattatagcttcagtatgtgaaaacccagctcttcaaccatatacgcttcaacaagcaatcgcagcaagcaacataccttta

SEQ ID NO: 19489 - DNA, 192 bp, Zea mays
  Clone ID: LIB3151-046-Q1-K1-A9
accattagctttatctactccagagcgcagaagaacccgatcgacaccatgagggtgtggctcgatgccctcgctctcctggctctcgctgcgagcgccacctacacgcatacaagcggcggatgcggatgacagccaccgtcgccggatcatctaccggcgccggtgcatctgcacacctccggttcacct

SEQ ID NO: 19490 - DNA, 410 bp, Zea mays
  Clone ID: LIB3151-046-Q1-K1-B1
cctgccgaccggccgaatcccggtcgaccacgcgtccggggtcttcaaaccattagctttatctactccagagcgcagaagaacccgatcgacaccatgagggtgttgctcgttgccctcgctctcctggctctcgctgcgagcgccacctccacgcatacaagcggcggctgcggctgccagccaccgccgccggttcatctaccgccgccggtgcatctgccacctccggttcacctgccacctccggtgcatctcccaccgccggtccacctgccgccgccggtccacctgccaccgccggtccatgtgccgccgccggttcatctgccgccgccaccatgccactaccctactcaaccgccccggcctcagcctcatccccagccacacccatgcccgtgccaaca

SEQ ID NO: 19491 - DNA, 124 bp, Zea mays
  Clone ID: LIB3151-046-Q1-K1-B10
ctagttctagatagcgagcggtcgaccttttttatattttttattaacccgatcgacaccaggagggagacgctcgtagcgctctatatcctggatcaaactgaaagcacgacctccacgcata

SEQ ID NO: 19492 - DNA, 412 bp, Zea mays
  Clone ID: LIB3151-046-Q1-K1-B11
tgggtcttcagaccattagctttatctactccagagcgcagaagaacccgatcgacaccatgagggtgttgctcgttgccctcgctctcctggctctcgctgcgagcgccacctccacgcatacaagcggcggctgcggctgccagccaccgccgccggttcatctaccgccgccggtgcatctgccacctccggttcacctgccacctccggtgcatctcccaccgccggtccacctgccgccgccggtccacctgccaccgccggtccatgtgccgccgccggttcatctgccgccgccaccatgccactaccctactcaaaccgcccggcctcagcctcattccagcccacccatgtcgtgccacagccgcatcaagcccgtccagctgaggaacctgggcgttgcaga

SEQ ID NO: 19493 - DNA, 447 bp, Zea mays
  Clone ID: LIB3151-046-Q1-K1-B12
cctccttgcaactccagtgctgctcactgccactgccagcagatcgagctgctccgtctcacaaaccctctagcttgctttgctgctccacctgcaagtctgcaaccgcgtacagagatgtcgacggtgagccgtgcgtccctcgaccagaagctcgccctcgccaagcgctgctcccgagaggcgaccctcgccggagccaaggcggcagccgtggcgactatcgcctccgcgatccccaccctggccagcgtgcggatgctgccatgggccaaggccaacatcaaccccaccggccaggcgctcatcgtctccacggtggctgggatggcctacttcatcgccgccgacaagaagatcctgtcgctggcgaggcgccactcgttcgagcaagcccctgaccacctcaagaacacctccttccagggcaccggccgtccccacccg

SEQ ID NO: 19494 - DNA, 397 bp, Zea mays
  Clone ID: LIB3151-046-Q1-K1-B2
ccggccgaattccggtcgaccacgcctcgcattcatctagtatataggcaccaaatcaaatctgcaacatcaattatctaactccaaaaaccatgaagctggtgcttgtggttcttgctttcattgctttagtatcaagtgtttcttgtacacagacaggcggctgcagctgtggtcaacaacaaagccatgagcagcaacatcatccacaacaacatcatccacaaaaacaacaacatcaaccaccaccacaacatcaccagcagcagcaacaccaacaacaacaagttcacatgcaaccacaaaaacatcagcaacaacaagaagttcatgttcaacaacaacaacaacaaccgcaggcccgacaacaacaacaacaacagcaccgacaacaaca

SEQ ID NO: 19495 - DNA, 121 bp, Zea mays
  Clone ID: LIB3151-046-Q1-K1-B3
attaagtgcagcaccagaggatgatgtgtctctgcatttactaactatgatcgtatacaaataaacacaccgcgtatgcgggttcgatctcatagcacaacatgtaaagggtgaacactat

SEQ ID NO: 19496 - DNA, 417 bp, Zea mays
  Clone ID: LIB3151-046-Q1-K1-B4
gttcctcccaccagttacttcaatggccttcgaacaacccagctgtgcaagcctataggctacaacaagcgattgcggcgagcgtcttacaacaaccaattgcccaattgcaacaacaatccttggcacatctaacaatacaaaccatcgcaacgcaacagcaacaacagttcctaccagcactgagccacctagccatggtgaaccctgtcgcctacttgcaacagcagctgcttgcatccaacccacttgctctagcaaacgtagttgcaaaccagcaacaacaacaactgcaacagtttctgccagcgcttagtcaactagccatggtgaaccctgccgcctacctacaacagcaacaactgctttcatctagcccgctcgcttgggccaatgcacctacatacctgcaacaag

SEQ ID NO: 19497 - DNA, 358 bp, Zea mays
  unsure at all n locations
  Clone ID: LIB3151-046-Q1-K1-B5
ctagttctagatagcgagcggtcgcctttttcaaaacccgtataaaactgtgcgaaacctgtacactctacatagtgtcctggttcatactgggggagtcaatgaaggacactattatgcctttattcgtccgaagctgcttgatcaatgtgacaagttcnaggatgacctagtgacaaaagaagacatgaaacgagcattggaggaacaatatggtggtgaaaaatagctcccgcataccaactctgggttgatactgcaccgcttagatttaccaaccattcanatgcttacatgcttgctaacattcaagaaagtgacacagataacattatctgtgattcggatgatgaagata

SEQ ID NO: 19498 - DNA, 445 bp, Zea mays
  Clone ID: LIB3151-046-Q1-K1-B6
tgcagcgagcccaccccgaccactgccatgtcgaggcgcggcgactgggtctacgagaacaacggcgggacctgcgtggccatcgccggcgccgattactgtgtcgtcgcggcggacacccgcctctctgtcggatacagcatcctcacgcgcgaccactctaagatctgcgacctggctgacaaatgtgtactagcatcttctggctttcagggtgatattaaagctctgcacaagaacctagctgccagagaattgctataccaacaccagcataacaaaaggatgagctgccctgccatggcacagctcctctccaataccctgtactacaagcgcttcttcccatattacgccttcaatgtgctcggtgggcttgacagcgaggggaaagggtgtgttttcacctatgatgcagtaggttcctatgagagaactggttata

SEQ ID NO: 19499 - DNA, 275 bp, Zea mays
  Clone ID: LIB3151-046-Q1-K1-B8
catcattcatcttagtagtataggcaccaaatcaaatctgcaacatcaattatctaactccaaaaaccatgaagctggtgcttgcggttcttgctttcattgctttagtatcaagtgtttcttgtacacagacaggcggtatgcagttgtggtcaacaacaaagccatgagcagcagacatcatccacaacaacatcatccacaaaaacaacaacatcaaccaccaccacaacatcaccagcagcagctacaccaacaacaacaagttcacatgc

SEQ ID NO: 19500 - DNA, 367 bp, Zea mays
  Clone ID: LIB3151-046-Q1-K1-B9
aacaagcaacatagaaagtggaatacagtagcaacaatagagcaacaatggcggccaagatattttccatccttatgctccttgctctttctgcatgtgttgctaacgcgaccatttttcctcaatactcacaagctcctatagctgcccttcttcccccataccttccatcaatgaccgcttcagtatgtgaaaacccagcccttcaaccctacaggctccaacaagcaatcgcaacaagcaacttacctttatcacccctgttctttcaacaatcgccagccctatctttggtgcagtcattggtacaaaccatcagggcacaacagctgcagcaactcgtgctaccagtgatcaaccaagtagc

SEQ ID NO: 19501 - DNA, 353 bp, Zea mays
  Clone ID: LIB3151-046-Q1-K1-C1
cccacgcgtccgccaacaagcaacatagaaagtggaatccagtagcaacaatagagcaacaatggagaccaagatattttccctccttatgctccttgctctttctacatgtgttgctaacgcgacaattttccctcaatgctcacaagctcctatagcttccctttttcccccataccttccatcaattatagcttcagtatgtgaaaacccagctcttcaaccatataggcttcaacaagcaatcgcagcaagcaacatacctttatcgcccttgttgtgtcaacaatcgccagccctatctttggtgcagtcattggtacaaaccatcagggcacaacagctgcagcaac

SEQ ID NO: 19502 - DNA, 344 bp, Zea mays
  Clone ID: LIB3151-046-Q1-K1-C10
gaccaactagcaacatagaaagcacaatagtgtaccaacaatggcagccaaaatattttgcttccttatgctccttggtctttctgcaagtgctgctaccgcaaccattttcccacaatgctcacaagctcctatagcttcctttcttcccccatacctctcaccagcggtgtcttcagtatgtgaaaacccaattcttcaaccctacaggatccaacaggcaatcgcagcaggcatcttacctttatcacccttgttcctccaacaaccgtcagccctattacagcagttacctttggtgcatttgttggcacaaaacatcaaagcacaacaactacaacaac

SEQ ID NO: 19503 - DNA, 323 bp, Zea mays
  unsure at all n locations
  Clone ID: LIB3151-046-Q1-K1-C11
cagaccattagctttatctactccagagcgcagaagaacccgatcgacaccatgagggtgttgctcgttgccctcgctctcctggctctcgctgcgagcgccacctccacgcatacaagcggcggctgcggctgccagccaccgccgccggttcatctaccgccgccggtgcatctgccacctccggttcacctgccacctccggtgcatctcccaccgccggtccacctgccgccgccggtccacctgccaccgccggtccatgtgccgccgccggttcatctgccgncgncaccatgccactaccctactcaaaccgcccg

SEQ ID NO: 19504 - DNA, 400 bp, Zea mays
  Clone ID: LIB3151-046-Q1-K1-C12
gagagaggtttgcatgcaagtattgagggggatgtaaaaagtctcctggatggtaaaacgggcacagagcttgaagatatgcaaagtcaaattgagtcccaaatgcgctctggaactgcgaaagttgttgaatactgggaggctattctgaaacggcttcatatttacaaagcaaaggcttgcctgagggagatacatgcttctatcctaaggaagcatttacatcgattggagcatcctggtgctgctgaacaggatgtggattctgagaaagaagttgataataaatctgtaggatgaaatgcatgaagacgaagatgataaaacgatatttacctgagcctatgccttatcagacagataatcgaatttgaagaggccgatggatccttttctccac

SEQ ID NO: 19505 - DNA, 401 bp, Zea mays
  Clone ID: LIB3151-046-Q1-K1-C2
ttgagaccaactagcaacatagaaagcacaatagtgtaccaacaatggcagccaaaatattttgcttccttatgctccttggtctttctgcaagtgttgctaccgcaaccattttcccacaatgctcacaagctcctatagcttcccttcttcccccatacctctcaccagcggtgtcttcaatgtgtgaaaacccaattgttcaaccctacaggatccaacaggcaatcgcaacaggcatcttaccattatcacccttgttcctccaacaaccgtcagccctattacagcagttacctttggtccatttggtggcacaaaacatcaaggcacaacaactacaacaacttgtgctagcaaaccttgctgcatactctcagcaacatcagtttcttccattc

SEQ ID NO: 19506 - DNA, 397 bp, Zea mays
  Clone ID: LIB3151-046-Q1-K1-C4
ctcactcattaccgtgtcagtatatggttctgaaaacttcagtgctctgcgatgcagaacaacccggatagagtatgctttgtcaatgcaattgtttttcttcttctttggtcatgtcatcctccttaagtccccctctaattattcaaggtacattcggcgaggacaaccggatgctggtttccctctttttgagtccgagtccttgaaatggcctggatttgtagagtttgatgatgtcaatggaaaggttttgacttactctgctcaagacagcacttacaaggtgtttgatttgaaaaactacacattactgtattcggtgtcagataaaaatgttcaagaaataaagatcagccctgggataatgctattgatttatacaagaacaaatagc

SEQ ID NO: 19507 - DNA, 365 bp, Zea mays
  Clone ID: LIB3151-046-Q1-K1-C6
ctgggtcttcagaccattagctttatctcctccagagcgcagaagaacccgatcgacaccatgagggtgttgctcgttgccctcgctctcctggctctcgctgcgagcgccacctccacgcatacaagcggcggctgcggctgccagccaccgccgccggttcatctaccgccgccggtgcatctgccacctccggttcacctgccacctccggtgcatctcccaccgccggtccacctgccgccgccggtccacctgccaccgccggtccatgtgccgccgccggttcatctgccgccgccaccatgccactaccctactcaaccgccccggcctcagcctcatccccagccacacccatgccc

SEQ ID NO: 19508 - DNA, 307 bp, Zea mays
  Clone ID: LIB3151-046-Q1-K1-C7
aactgatagccgaattccgcgcgccggtccctaaaaaaatgcaagtactaggtagtagataagatgcatttcccagtaatttttcgttattatatatactcagcacgggaaggaggggagacactctgttcaaccaccagccgagttcgcagcggcactccaggtccagcagtctcttcggctcttcgttggtggtgcgtggacaccggaaattacctcggggattgcgttcctgatctaagcccggcatgaagtgctgctcagagcgtttgctgctcctgctgctgctggcatcgtcgtcgttact

SEQ ID NO: 19509 - DNA, 248 bp, Zea mays
  Clone ID: LIB3151-046-Q1-K1-C8
ctagcaacatagaaagcacaatagtgtaccaacaatggcagccaaaatattttgcctccttatggctccttggtctttctgcaagtgctgctacggcgaccattttcccgcaatgctcgcaagctcctatagcttcccttcttcccccgtacctctcaccagcggtgtcttcggtatgtgaaaacccaattcttcaaccctacaggatccaacaggcaatcgcagctggcatcttacctttatcaccc

SEQ ID NO: 19510 - DNA, 167 bp, Zea mays
  Clone ID: LIB3151-046-Q1-K1-C9
ctccctcgctctcgtcgcctcgttcgcttcgcctcctccccgccccgccccgagccgagcagagcgcagccctatccggagctgggatggcggacgcgaagcagcagcagcagcagccacagcaggcggcagcggcagccaccggcgtgtggaagacggtcaagccc

SEQ ID NO: 19511 - DNA, 327 bp, Zea mays
  Clone ID: LIB3151-046-Q1-K1-D1
attttcagcattcagaaccacaccaagcgaagcgcactaccaacaacctaacaacaatggctaccaagatattagccctccttgcgcttcttgcccttttagtgagcgcaacaaatgcgttcattattccacagtgctcacttgctcctagtgccattattccacagttcctcccaccagttacttcaatgggcttcgaacatccagccgtgcaagcctacaggctacaactagcgcttgcggcgagcgtcttacaacaaccaattgcccaattgcaacaacaatccttggcacatctaaacctacaaaccatcgcaacgcaacagc

SEQ ID NO: 19512 - DNA, 184 bp, Zea mays
  Clone ID: LIB3151-046-Q1-K1-D10
aaccaatttgcttcgaggaactgtctattgttctagaggcatcacaacattgatggtgtgggctatgagaatgttaataagttatacactaagcgtggggagtattggctgatgccagtacttaccataaattggaaggttgtttgctaaatctaccaaataaatataaagggcagccgttata

SEQ ID NO: 19513 - DNA, 357 bp, Zea mays
  Clone ID: LIB3151-046-Q1-K1-D11
agaccattagctttatctactccagagcgcagaagaacccgatcgacaccatgagggtgttgctcgttgccctcgctctcctggctctcgctgcgagcgccacctccacgcatacaagcggcggctgcggctgccagccaccgccgccggttcatctaccgccgccggtgcatctgccacctccggttcacctgccacctccggtgcatctcccaccgccggtccacctgccgccgccggtccacctgccaccgccggtccatgtgccgccgccggttcatctgccgccgccaccatgccactaccctactcaaccgccccggcctcagccctatccccaggcacacccatgcccgt

SEQ ID NO: 19514 - DNA, 350 bp, Zea mays; identical to SEQ ID NO: 19477
  Clone ID: LIB3151-046-Q1-K1-D12

SEQ ID NO: 19515 - DNA, 80 bp, Zea mays
  Clone ID: LIB3151-046-Q1-K1-D3
aacttagcaacttaaaaggcccattagtgtaccaccaatggcttccataatatttagcctccttatgctcctagatcttt

SEQ ID NO: 19516 - DNA, 359 bp, Zea mays
  Clone ID: LIB3151-046-Q1-K1-D4
ccaccataaaaggtggattccagtaccaccattgaaccaccattggcgaccaaaatattttccctccttatgctcctggctctttctgcatgtgttgctaacgcgacaattttccctcaatgctcacaagctcctatagcttcccttcttcccccataccttccatcaatgatagcttcagtatgtgaaaacccagctcttcaaccctataggctccaacaagcaatcgcagcaagcaacatacctttatcacccttgtttcaacaatcgccagccctatctttggtgcagtcattggtacaaaccatcagggcacagcagctgcagcaactcgtgctacctgtgatcaaccaagtagc

SEQ ID NO: 19517 - DNA, 332 bp, Zea mays
  Clone ID: LIB3151-046-Q1-K1-D5
acatcctatcatcattggcgggcaagatattatccctccttgcgcttcttgcgctttttgcgagcgcaacaaatgcgttcattattgcagatggcaaccaccgtcgacggttcatctatacacagtttctcccaccagttactttaatgggcttcgaacacccagctgtgcaagcctataggctacaacaagcaattgctgcgagcgtcttacaacaaccaatttcccagtttgcaacaacaattcttggctcatctaacaattcaaaccatcgcatctcaacagctacaacaatttctaccagcactgaaccacctagccatggtgaaccc

SEQ ID NO: 19518 - DNA, 440 bp, Zea mays
  Clone ID: LIB3151-046-Q1-K1-D6
ccgcagaccggccggaattccggtcgaccacgcctccgtttggggccagccatgggtccaaaccatcaaagcacagcagctgcagcaactcgtgctacctggtgatcaaccaagtagctctggcaaacctttctccctactctcagcaacaacaatttcttccattcaaccaactgtctacattgaaccgtgctgcttatttgcagcaacaactattaccattcagccagctagctactgcctactctcagcaacaacaacttcttccatttaaccaattggccgcactgaaccccgctgcttatttgcagcagcaaatactactaccatttagccagctagctgcagcaagccgtgcttccttcttgacacagcaacagttgctgcctttctaccagcagtttgcggctaaccccgcaaccctcttacaactacaacaa

SEQ ID NO: 19519 - DNA, 341 bp, Zea mays
  Clone ID: LIB3151-046-Q1-K1-D8
cgcttatccgcaaatatctctcttcctctttgcagtcggcaccatgggttccgacttcaaatcgatccccttgatcgatatcggcccgcttgtcgaaaagattgatgatccaagcatggccaacgataaggatttactgcaggttgtccggttactggatgatgcttgcaaggaggccggattcttctatgtgaaaggccatggtattgatgagtcactgatgagggaagtcaggaatgtaacccgtgaattctttcagcttccttatgaagaaaaattaaaaattaagatgacacctcaaagtggatatagagggtatcaaaagataggggaaaatatta

SEQ ID NO: 19520 - DNA, 232 bp, Zea mays
  unsure at all n locations
  Clone ID: LIB3151-046-Q1-K1-D9
agaccattagctttatctactccagagcgcagaagaacccgatcgacaccatgagggtgttgctcgttgccctcgctctcctggctctcgctgcgagcgccacctccacgcatacaagcggcggctgcggctgccagccaccgccgccggttcatctaccgccgccggtgcatctgccaccttcggttcacctgccacctncggtgcatatcccaccgccggtccacctgcc

SEQ ID NO: 19521 - DNA, 339 bp, Zea mays
  Clone ID: LIB3151-046-Q1-K1-E1
cataccaccctaattataatggttataataatcatccaattccaactccaactcgtacgcgagttttagcccgagttgttaggttgttggtgagtcttcgagggaaaataatccttttggagttcttctgtaccgagtagcgagtaactcggataacggattccaagcaaaagcggtcaagctataaatacaaaactgattgactccaagtcctctcaatccgcctcgcccctcgacttcctctctctcacggcggcggcgagatgaaggtcacggtaatgaccggcgacgagcagatcgtcaccctcgacgtcgaccgcgacgaatccgtggaaaatc

SEQ ID NO: 19522 - DNA, 286 bp, Zea mays
  Clone ID: LIB3151-046-Q1-K1-E10
caactagcaacatagaaagcacaatagtgtaccaacaatggcagccaaaatattttgcttccttatgctccttggtctttctgcaagtgttgctaccgcaaccattttcccacaatgctcacaagctcctatagcttcccttcttcccccatacctctcaccagcggtgtcttcaatgtgtgaaaacccaattgttcaaccctacaggatccaacaggcaatcgcaacaggcatcttaccattatcacccttgttcctccaacaaccgtcaggcctattacagcag

SEQ ID NO: 19523 - DNA, 443 bp, Zea mays
  Clone ID: LIB3151-046-Q1-K1-E11
tggacgtcagcctagcaattagctcatcgactccagattggagaactcgacaccatgaaggtgctgatcgttgcccttgctctcctggcgctcgctgcgagcgccgcctccagtacaagcggcggctgtggctgccagacaccaccgtttcatctaccgcctccgttctatatgccgcctccgttctatctgccgccgcagcagcagccgcagccatggcaataccccactcaaccaccgcagctaagcccgtgccagcagttcggatcctgcggcgtcggcagcgtcggcagcccgttcctgggccagtgcgtcgagttcctgaggcaccagtgcagcccggcggcgacgccctacggctcgccacagtgccaggcgctgcagcagcagtgctgccaccagatcaggcaagtggagccgctgcaccggtaccaggcgacata

SEQ ID NO: 19524 - DNA, 375 bp, Zea mays
  Clone ID: LIB3151-046-Q1-K1-E2
aattagctcatcgactccagattggagaactcgacaccatgaaggtgctgatcgttgcccttgctctcctggcgctcgctgcgagcgccgcctccagtacaagcggcggctgtggctgccagacaccaccgtttcatctaccgcctccgttctatatgccgcctccgttctatctgccgccgcagcagcagccgcagccatggcaataccccactcaaccaccgcagctaagcccgtgccagcagttcggatcctgcggcgtcggcagcgtcggcagcccgttcctgggccagtgcgtcgagttcctgaggcaccagtgcagcccggcggcgacgccctacggctcgccacagtgccaggcgcttgaacagcagt

SEQ ID NO: 19525 - DNA, 450 bp, Zea mays
  Clone ID: LIB3151-046-Q1-K1-E4
tagtgaagtccagtaccaccatctaaccaccaatggcagccaaaatttttgccctccttgccctccttgctctttcagcaagtgttgctaccgcgactattattccacaatgctcacaacaatacctctctccggtgacagccgcgagatttgaatacccaactatacaatcctacaggctacaagaggccatcacagcaagcatcttacggtcgttagcattgactgtccaacaaccatatgccctattgcaacaaccatccttagtgaatctatatctccaaagaatcgcagcacaacaactacaacagcagttgcttccaacaatcaatcaagtagttgcagcgaaccttgctgcttacctccagcaacaacaatttcttccattcaatcaactagctggggggaaccttgctgcttacttgcaggcacaacagctactaccattta

SEQ ID NO: 19526 - DNA, 449 bp, Zea mays
  Clone ID: LIB3151-046-Q1-K1-E5
ctagaggcccagccgaaggcatctccaatctcctggccccccacggacctgaaccgagaacctttaccgccgccgcctctcgcctagccgccggagaagcgccgctcgctcaggaggacagccatggcgccggagccggaggatgatattatgaacgagaagaatccccgcccgctcgacgaggatgacatcgcgctcctcaaaacctatggactggggccgtattcgaccagcattaagaaggtcgagaaggagatcaaggaaatggccaagaaaatcaacgacctctgtgggataaaggagtctgatacagggctggctccacctagccagtgggatttggtttcagataagcagatgatgcaagaagaacaaccgttacaagtagcaagatgtacaaagattataagccctaatacggatgatgccaaatatgttataaatgtaaa

SEQ ID NO: 19527 - DNA, 444 bp, Zea mays
  Clone ID: LIB3151-046-Q1-K1-E6
cagaaccccgatcctgggccagtgcgtcgagttcctgaggcatcagtgcagcccgacggcgacgccctactgctcgcctcagtgccagtcgttgcggcagcagtgttgccagcagctcaggcaggtggagccgcagcaccggtaccaggcgatcttcggcttggtcctccagtccatcctgcagcagcagccgcaaagcggccaggtcgcggggctgttggcggcgcagatagcgcagcaactgacggcgatgtgcggcctgcagcagccgactccatgcccctacgctgctgccggcggtgtcccccactgaagaaactatgtgctgtagtatagccgctggctagctagctagttgagtcatttagcggcgatgattgagtaataatgtgtcacgcatcaccatgggtggcagtgtcagtgtgagcaatgacctgaatgaac

SEQ ID NO: 19528 - DNA, 270 bp, Zea mays
  Clone ID: LIB3151-046-Q1-K1-E7
gcaattgcggcgagcgtcttacaacaaccaatttcccagttgcaacaacaatccttggcacatctaacaatacaaaccatcgcaacgcaacagcaacaacaattcctaccagcactgagccacctagccatggtgaaccctgccgcctacttgcaacagcagttgcttgcatcaaacccacttgctctggcaaacgtagttgcaaaccagccacaacaacagctgcaacagtttctgccagcgctcagtcaactagccatggtgaaccct

SEQ ID NO: 19529 - DNA, 263 bp, Zea mays
  Clone ID: LIB3151-046-Q1-K1-E8
acaaggtctacggggacgtcttcgacagggtcttcgcgcaggagcttgcctatgctcgccggatggtcgttcccgagcccgctgcgccgccggtcattgggaaccttgattccccctatgcgcaggtcactgctttctacagttattggcttgggtttggctcgggcatggatttcggatgggcggctgcgtgggacgctgcgcgtggggaaagtcgccgtgttcggaggcttatggaggaggactaacagaaggcgatgcgt

SEQ ID NO: 19530 - DNA, 292 bp, Zea mays
  Clone ID: LIB3151-046-Q1-K1-E9
ccgggccggaaaatcccgggcgagccacacgcgcgcgactagaacgagagcgaaccacaccaagcgaagcacattagcaacaacctaacaacaatggctaccaagatattatccctccttgcgcttcttgcgctttttgcgagcgcaacaaatgcgttcattattccacaatgctcacttgctccaagttccattattacacagttcctaccaccagttactttaatgggcttcgaacacccagctgtgcaagcctataggctacaacaagcaatttgcgcgagcgtcttac

SEQ ID NO: 19531 - DNA, 385 bp, Zea mays
  Clone ID: LIB3151-046-Q1-K1-F1
cccgttccgtcgccgccgcgcgcctcggagaaagagaatagaggcggccgctgcatcgaccccgcgccacctccgcctgcctcccccggcaccgatcgggtttgatcgatggcgtcgaagaggatcctgaaggagttgaaggacctgcagaaggacccgcccacctcctgcagcgcaggtcctgttggtgaggacatgttccattggcaagcgaccatcatggggccttcggacagcccatttgcaggtggggtattcttggtgaacattcacttcccaccggattaccctttcaagccaccaaaggtattccacccgaacatcaacagcaacggcagcatttgccttgacattcttaaagaacagtggagtcctgctttaacta

SEQ ID NO: 19532 - DNA, 253 bp, Zea mays
  Clone ID: LIB3151-046-Q1-K1-F10
ctcttttagattgcttatgagttatagttcaataatgaagttttttagaaatgtactttcttatttctgggacgccacaaacatcatccaaaaataagaaagtacatttctaaaaaaaaaaaaataaaataaatacaacataccatatacaaaaaagaaaaataaatgagtgaaaaccaaataagtaaaaccctacaggatccaacaaagaaatcgaaacaaagcatgggggcggcctctttataggaccaaa

SEQ ID NO: 19533 - DNA, 444 bp, Zea mays
  Clone ID: LIB3151-046-Q1-K1-F11
gttcagatcatgctggagaggcacacaaaccgccacaggggctttggcttcgtgacattcgaagatcgaagggcagttgacagcgctatcaaagagatgcgtggccaagagttagatggtcgtaccatctcagtgaacaaggctgagcctaagatgaatacagatgacacaaggttcgacaatggcggtggacgagactatcgaggtggtagaggtgatggtccaccccctggcaattgctatgagtgtggccgtcctggtcattgggtccgtgactgcccgagtgctgttggtggtcgttctggcagattcccgtccaagttcagtgatggtggcaggggagaccgcttttctggatcagataggtttagtgatcgttacatggatgatcgttatgatggtggtcgttatgggtaccgtgatcaagttgatgcaagggacaag

SEQ ID NO: 19534 - DNA, 386 bp, Zea mays
  Clone ID: LIB3151-046-Q1-K1-F12
gccgaggcgacgcgacagccgtcaggaggaaggaataaactcactgccagccagtgaagggggagaagtgtactgctccgtcgaccagtgcgcgcaccgcccggcagggctgctcatctcgtcgacgaccagtggattaatcggcatggcggctctggccacgtcgcagctcgtcgcaacgcccgccggcctgggcgtcccggacgcgtccacgttccgccgcggcgccgcgcagggcctgaggggggcccgggcgtcggcggcggcggacacgctcagcatgcggaccagcgcgcgcgcggcgcccaggcaccagcagcaggcgcgccgcgggggcaggttcccgtcgctcgtcgtgtgcgccagcgccggcatgaacgtcgtct

SEQ ID NO: 19535 - DNA, 327 bp, Zea mays
  unsure at all n locations
  Clone ID: LIB3151-046-Q1-K1-F2
caaatactgatctcactgatccagtatggctatggcaaaggcaggcgcgccgagggtctcggcggcccagctggtgactctcgggctatcactcctctgcgctgtcgccggcccggccgccgcgcaaaactgcggctgccagccaaacgtatgctgcagcaagtttggctactgcggcacgaccgacgagtactgcggcgacgggtgccagtcgggcccgtgccgctcgggcggcggcggcagcagtggcggcggtggtgcgaacgtggctagcgtcgtcaccggctccttcttcaacggcatcaagagccangccgggagcgggtg

SEQ ID NO: 19536 - DNA, 437 bp, Zea mays
  Clone ID: LIB3151-046-Q1-K1-F3
tttaagcattcaaaaccacaccaggcgaagcgcactaccaccaacctaacaccaatggctaccaagatattagccctccttgcgcttctggccctttaagggagcgcaacaaatgcgttcattattccacagtgctcacttgctcctagtgccattattccacagttcctcccaccagttacttcaatgggcttcgaacatccagccgtgcaagcctacaggctacaactagcgcttgcggcgagcgtcttacaacaaccaattgcccaattgcaacaacaatccttggcacatctaaacctacaaaccatcgcaacgcaacagcaacaacagtttctgccatcactgagccacctagccgtggtgaaccctgtcgcctacttgcaacagcagctacttgcatccaacccacttgctctggcgaacgtagctgcata

SEQ ID NO: 19537 - DNA, 173 bp, Zea mays
  unsure at all n locations
  Clone ID: LIB3151-046-Q1-K1-F4
caataccgtctgtccggtgacagccgcgagatgtgcatacgcaactatacaatcatacaggctacaagaggccattacagccagcatnttacgggcggtagcatggactgctcaacaaccatgtgcattatcgcaacaacgatccttagtgaatgtatatatgcaaagaatct

SEQ ID NO: 19538 - DNA, 259 bp, Zea mays
  Clone ID: LIB3151-046-Q1-K1-F5
cccgtcctctaaatccgcaagcggccgccttttttttttttttttaattttttttttttttttttttttgtgtttttaattggcttttttctttttttttttcggttacttttttttttttttgttctttaaaaccaaaatctttttttgtggcctctttttttggccatcccacacttaagaatgtggagaccctattctgcatctttacatgtttcaacaggcaggtgttgctggcattttaccttcataattcttg

SEQ ID NO: 19539 - DNA, 322 bp, Zea mays
  Clone ID: LIB3151-046-Q1-K1-F7
caaatgcgttcattattccacagtgctcacttgctcctagtgccattattccacagttcctgccaccagttacttcaatgggcttcgaacatccagccgtgcaagcctacaggctacaactagcgcttgcggcgagcgtcttacaacaaccaattgcccaattgcaacaacaatccttggcacatctaaacctacaaaccatcgcaacgcaacagcaacaacagtttctgccatcactgagccacctagccgtggtgaaccctgtcgcctacttgcaacagcagctacttgcatccaacccacttgctctggcgaacgtagc

SEQ ID NO: 19540 - DNA, 422 bp, Zea mays
  Clone ID: LIB3151-046-Q1-K1-F8
tagaaagtggaatacagtagcaacaatagagcaacaatggcggccaagatattttccatccttatgctccttgctctttctgcatgtgttgctaacgcgaccatttttcctcaatactcacaagctcctatagctgcccttcttcccccataccttccatcaatgaccgcttcagtatgtgaaaacccagcccttcaaccctacaggctccaacaagcaatcgcaacaagcaacttacctttatcacccctgttctttcaacaatcgccagccctatctttggtgcagtcattggtacaaaccatcaaggcacaacagctgcagcaactcgtgctaccagtgatcagccaagtagctctggcaaacctttctccctactctcagcaacaacaatttctttcattcaaccaactgtctacact

SEQ ID NO: 19541 - DNA, 313 bp, Zea mays
  Clone ID: LIB3151-046-Q1-K1-F9
gtcctctgttacttctccctccgccgccactcccctcccattcaccgccaccgccaattccataccgtgctccgccacctctgctgagagcgagaagagatggcaggcaagggtgatgggccggcaatcggcatcgatctcggcacgacgtactcttgcgtcggcgtctggcagcacgaccgtgtcgagatcatcgccaacgaccagggtaaccgcaccacaccctcgtacgtctgcttcaccgactccgagcgcctcatcggagaagcggccaaaaaccaggtcggcatgaaccccattaacaacgtctttg

SEQ ID NO: 19542 - DNA, 359 bp, Zea mays
  Clone ID: LIB3151-046-Q1-K1-G1
gtcggcagcgtcggcagcccgttcttgggccagggcgtcaagttcctgaggcaccagggcagcccggcggcaaccccctacggttcgccacagtgccaggcgctgcagcagcagtgctgccaccaaatcaggcaggtggagccgctgcaccggtaccaggcgacatacggtgtggtcctgcagtccttcctgcagcagcagccgcagggcgagctcgcggcgctgatggcggcccaggtagcgcagcagctgacggcgatgtgcggcctgcagctgcagcagccaggtccctgcccttgcaacgcagctgccggcggtgtctactactgaggaaactatgtactgtagaataatgaatg

SEQ ID NO: 19543 - DNA, 323 bp, Zea mays
  Clone ID: LIB3151-046-Q1-K1-G10
ctcgatcgggagacgcagaggtcccgcggcttcggcttcgtcaccttctccacggaggaggcgatgcggaacgccatcgagggcatgaacggcaaggagctggacggccgcaacatcaccgtcaacgaggcccagtcccgcggcggccgtggaggcggcggcggcggcgggtacggtggtggccgtggaggcggcggctacggcggtggcgggcgccgtgatggcggcggcggctactgcggtggcggctgctacagtggtggcggcggctgctacagtggtggtggctgcggctactgcggaggcaaccgtggcggcggcta

SEQ ID NO: 19544 - DNA, 450 bp, Zea mays
  Clone ID: LIB3151-046-Q1-K1-G11
agaccaacaagcaacatagaaagtggaatccagtagcaacaatagagcaacaatggcgaccaagatattttccctccttatgctccttgctctttctgcatgtgttgctaacgcgacaattttccctcaatgctcacaagctcctatagcttcccttcttcccccataccttccatcaatgatagcttcagtatgtgaaaacccagctcttcaaccctataggctccaacaagctgtctgagctcaagttctttgaccgggcagctgccggcggtggcgcctacacggggccagaggattccttcttcgaaatggtcacactgcagcctggtggcgtgtacaccaagtcgcagctgttgaaggagcttgaaacactcgtttcctgtggcatgttcgagcgggttgatctggaggtgaagcccaagccagataacacaattgggctcacag

SEQ ID NO: 19545 - DNA, 453 bp, Zea mays
  Clone ID: LIB3151-046-Q1-K1-G12
caactagcaacatagaaagcacaatagtgtaccaacaatggcagccaaaatattttgcttccttatgctccttggtctttctgcaagtgctgctaccgcaaccattttcccacaatgctcacaagctcctatagcttcctttcttcccccatacctctcaccagcggtgtcttcagtatgtgaaaacccaattcttcaaccctacaggatccaacaggcaatcgcagcaggcatcttacctttatcacccttgttcctccaacaaccgtcagccctattacagcagttacctttggtgcatttgttggcacaaaacatcaaggcacaacaactacaacaacttgtgctaggaaaccttgctgcctactctcagcaacagcagtttcttccattcaaccaactggctgcattgaactctgctgcttatttgcaacaacaactaccattcaatca

SEQ ID NO: 19546 - DNA, 313 bp, Zea mays
  Clone ID: LIB3151-046-Q1-K1-G5
cttccggaaagccattcctttttcaagaggggatcatcaaattgggcttattattccttattactccaggcaaggatcggagttgctctgaattgactgaaccatggcggcgacaatggcagtgacgacgatggtgacgaggagcaaggagagctggtcgtcattgcaggtcccggcggtggcattcccttggaagccacgaggtggcaagaccggcggcctcgagttccctcgccgggcgatgttcgccagcgtcggcctcaacgtgtgcccgggcgtcccagcggggcgcgacccgcgggagcccgatccc

SEQ ID NO: 19547 - DNA, 441 bp, Zea mays
  Clone ID: LIB3151-046-Q1-K1-G6
cccttccgacccacctaccaccataaaaggcacaatagtgtaccaacaatggcagccaaaatattttgcttccttatgctccttggtctttctgcaagtgctgctaccgcaaccattttcccacaatgctcacaagctcctatagcttcctttcttcccccatacctctcaccagcggtgtcttcagtatgtgaaaacccaattcttcaaccctacaggatccaacaggcaatcgcagcaggcatcttacctttatcacccttgttcctccaacaaccgtcagccctattacagcagttacctttggtgcatttgttggcacaaaacatcaaggcacaacaactacaacaacttgtgctaggaaaccttgctgcctactctcagcaacagcagtttcttcatttcaccaactggctgcattgaactctgttgtttatttgc

SEQ ID NO: 19548 - DNA, 274 bp, Zea mays
  Clone ID: LIB3151-046-Q1-K1-G7
gagtcttaagaccattagctctatctactccaaagcgcagaagaacccgatcgacaccatgagggtgatgctcgttgccctctctctcctgactgtagctgcaagcgccacctctactgatacaatcagtggctgcggctgccagacaccggcggcgactcatttaccgacgtcgatgcatatgacacctacgattcaactgtcagctccggtgcatattccatcgtcggtccacctgccgacagcggtccacctgccaccgccggtccatgtg

SEQ ID NO: 19549 - DNA, 440 bp, Zea mays
  Clone ID: LIB3151-046-Q1-K1-G8
gcaacatagaaagcacaatagtgtaccaacaatggcagccaaaatattttgcttccttatgctccttggtctttctgcaagtgctgctaccgcaaccattttcccacaatgctcacaagctcctatagcttcctttcttcccccatacctctcaccagcggtgtcttcagtatgtgaaaacccaattcttcaaccctacaggatccaacaggcaatcgcagcaggcatcttacctttatcacccttgttcctccaacaaccgtcagccctattacagcagttacctttggtgcatttgttggcacaaaacatcaaggcacaacaactacaacaacttgtgctaggaaaccttgctgcctactctcaacaacagcagtttcttccattcaaccaactggctgcattgaactctgctgcttatttgcaacaacaactaccat

SEQ ID NO: 19550 - DNA, 316 bp, Zea mays
  Clone ID: LIB3151-046-Q1-K1-G9
gtcttcagaccattagctttatctactccagagcgcagaagaacccgatcgacaccatgagggtgttgctcgttgccctcgctctcctggctctcgctgcgagcgccacctgcacgcatacaagcggcggctgcggctgccagccaccgccgccggttcatctaccgccgccggtgcatctgccacctccggttcacctgccacctgcggtgcatctcccaccgccggtccacctgccgccgccggtccacctgccaccgccggtccatgtgccgccgccggttcatctgccgacgccaccatgccactaccctac

SEQ ID NO: 19551 - DNA, 410 bp, Zea mays
  Clone ID: LIB3151-046-Q1-K1-H1
caccaatggcagccaaaatatttggcttccttatgctccttggtctttctgcaagtgctgctaccgcaaccattttcccacaatgctcacaagctcctatagcttcctttcttcccccatacctctcaccagcggtgtcttcagtatgtgaaaacccaattcttcaaccctacaggatccaacaggcaatcgcagcaggcatcttacctttatcacccttgttcctccaacaaccgtcagccctattacagcagttacctttggtgcatttgttggcacaaaacatcaaggcacaacaactacaacaacttgtgctaggaaaccttgctgcctactctcagcaacagcagtttcttccattcaaccaactggctgcattgaactctgctgcttatttgcaacaacaacta

SEQ ID NO: 19552 - DNA, 236 bp, Zea mays
  Clone ID: LIB3151-046-Q1-K1-H11
agtaagcacagatctctaccaacactgtctagacgaaccatgctgcacttcctctgctccgcgacctttctagcatgtgctatatacggacactcattttaccgcactgctcgcaagctcccatcgttatccttcttaccccgtacctctcaccaaccgtgacttcggtatgtgaaatcccaattctccaaccctacaggatccaacaagacgtcgcacctgacatcttaccttta

SEQ ID NO: 19553 - DNA, 364 bp, Zea mays
  Clone ID: LIB3151-046-Q1-K1-H12
atttagaccaactagcaacatagaaagcacaatagtgtaccaacaatggcagccaaaatattttgcctccttatgctccttggtatttctgcaagtgctgctacggcgaccattttcccgcaatgctcacaagctcctatagcttcccttcttcccccgtacctctcaccagcggtgtcttcggtatgtgaaaacccaattcttcaaccctacaggatccaacaggcaatcgcagctggcatcttacctttatcacccttgttcctccaacaatcatcagccctattacagcagttacctttggtgcatttattggcacaaaacatcagggcacaacaactacaacaacttgtgctagcaaacc

SEQ ID NO: 19554 - DNA, 432 bp, Zea mays
  Clone ID: LIB3151-046-Q1-K1-H2
attttgagcattcagaaacacaccaagcgaagcgcactagcaacaacctaacaacaatggctaccaagatattatccctccttgcgcttcttgcgctttttgcgagcgcaacaaatgcgtccattattccacaatgctcacttgctcctagttccattattccacagttcctcccaccagttacttcaatggccttcgaacacccagctgtgcaagcctataggctacaacaagcgattgcggcgagcgtcttacaacaaccaattgcccaattgcaacaacaatccttggcacatctaacaatacaaaccatcgcaacgcaacagcaacaacagttcctaccagcactgagccacctagccatggtgaaccctgtcgcctacttgcaacagcagctgcttgcatccaacccacttgctctagcaaacgtag

SEQ ID NO: 19555 - DNA, 342 bp, Zea mays
  Clone ID: LIB3151-046-Q1-K1-H5
tcgcgccgagacgcccttcggcttcggcgaagcctcgaaccttttttggttcaacctttccaaaacggaggcgctaacgcaggccttccgccgcgccattggcgtgcgcatcaaggaggagacggaaatcatcgagggcgaggtcgtggagatcttgatcgaccgccctttgtcggcctctgccgctggcggcagctcggctgcccctacaggtgctactgcggttggtaagtcggggcggctcacgctgaagaccacggacatggaaacggtgtacgagctcgggggaaagatgattgaggctcttgggaaggagaaggtgcaaagcggggatgtgattgc

SEQ ID NO: 19556 - DNA, 320 bp, Zea mays
  Clone ID: LIB3151-046-Q1-K1-H6
accatccatagggaagtccactaccaccatcttaccaccaatgggagccaagattttggccctccttgccctccttgctctttcagcaagcgctgctacctcgacttttattccacaatgctcacaacaatacctctctccggcgacagccgtgggatttcaatacccaactatacaatcctacatggtacaagaggccatccaagcaagcatcttacggtcattagcattaaccctccaacaaccatatgctctattgcaacagccatccttagtgcatctgtatctccaaagaatcgcggcacaacaactacaacaac

SEQ ID NO: 19557 - DNA, 436 bp, Zea mays
  Clone ID: LIB3151-046-Q1-K1-H7
cttcgggaggcaagtgcgatttcgatctcgcagccaccttttttttgttctgttgtgtatctagtagttggaggagatatgcagtttgcacttgcattggacacgaactcaggtcctcaccagataagatcttgtgagggtgatgggattgacaggttggaaaaattaagtattgggggcagaaagcaggagaaagctttgagaaataggtgctttggtggtagagttgctgcaactacacaatgtattcttacctcagatgcttgtcctgaaactcttcattctcaaacacagtcctctaggaaaaattatgctgatgcaaaccgtgtatctgctatcattttgggcggaggcactggatctcagctctttcctctgacaagcacaaaagctacgcctgctgtacctgttggaggatgttacaggcttattgata

SEQ ID NO: 19558 - DNA, 244 bp, Zea mays
  Clone ID: LIB3151-046-Q1-K1-H8
cacacacacgcgcgtgcgaggcgatatctcttttatagagtgacctataaacacaacactgtgcgcggctttacaccgcggcgactgtgaaaaccctgtggcgacccaacttaaactccttgtgcaacataccccttttgcccgctggggtaatatcgagaagaggcccaccccgagcgcttttcaacagatgtgcacactctatatggaaagtgacacgcgctgtatcggcgcatttaacgcg

SEQ ID NO: 19559 - DNA, 387 bp, Zea mays
  Clone ID: LIB3151-046-Q1-K1-H9
gggtcttcagaccattagctttatctactccagagcgcagaagaacccgatcgacaccatgagggtgttgctcgttgccctcgctctcctggctctcgctgcgagcgccacctccacgcatacaagcggcggctgcggctgccagccaccgccgccggttcatctaccgccgccggtgcatctgccacctccggttcacctgccacctccggtgcatctcccaccgccggtccacctgccgccgccggtccacctgccaccgccggtccatgtgccgccgccggttcatctgccgtcgccaccatgccactaccctactcaaccgccccggcctcagcctcatgcccagccacacccatgcccgtgccaacagccgcattcaaaccc

SEQ ID NO: 19560 - DNA, 152 bp, Zea mays
  Clone ID: LIB3151-047-P1-K1-A1
ctgggtcttcagaccattagctttatctactccagagcgcagaagaacccgatcgacaccatgagggtgttgctcgttgccctcgctctcctggctctcgctgcgagcgccacctccacgcatacaagcggcggctgcggctgccagccacc

SEQ ID NO: 19561 - DNA, 216 bp, Zea mays
  Clone ID: LIB3151-047-P1-K1-A10
gggtcttcagaccattagctttatctactccagagcgcagaagaacccgatcgacaccatgagggtgttgctcgttgccctcgctctcctggctctcgctgcgagcgccaccttcacgcatacaagcggcggctgcggctgccagccaccgccgtcggttcatctaccgccgccggtgcatctgccaccttcggttcacctgccaccttcggtgca

SEQ ID NO: 19562 - DNA, 153 bp, Zea mays
  Clone ID: LIB3151-047-P1-K1-A11
gtgctgtagtatagccgctggctagctagctagttgagtcatttagcggcgatgattgagtaataatgtgtcacgcatcaccatgggtggcagtgtcagtgtgagcaatgacctgaatgaacaattgaaatgaaaagaaaaaagtattgttcc

SEQ ID NO: 19563 - DNA, 212 bp, Zea mays
  Clone ID: LIB3151-047-P1-K1-A3
gcaacatagaaagtggaatacagtagcaacaatagagcaacaatggcggccaagatattttccatccttatgctccttgctctttctgcatgtgttgctaacgcgaccatttttcctcaatactcacaagctcctatagctgcccttcttcccccataccttccatcaatgaccgcttcagtatgtgaaaacccagcccttcaaccctacag

SEQ ID NO: 19564 - DNA, 292 bp, Zea mays
  unsure at all n locations
  Clone ID: LIB3151-047-P1-K1-A4
atctgcgtacacggtctccctcttcctgtcagtagtacagtgagagtgaggcagcgagtgggagacatggggtaatggggaagggtgcgcatgggagcgatgcggccgcggttgccggcgaggtggaggagaacatggcggcgtggctggttgccaagaacaccctcaagatcatgccattcaaggttccgnccgtcggtccttatgatgtccgtgtgcgcatgaaggcagcggggatttgcggcatagatgtgcactacctaagggagatgcgcatcgctcacttggtggt

SEQ ID NO: 19565 - DNA, 227 bp, Zea mays
  unsure at all n locations
  Clone ID: LIB3151-047-P1-K1-A5
cttcagaccattagctttatctactccagagcgcagaagaacccgatcgacaccatgagggtgttgctcgttgccctcgctctcctggctctcgctgcgagcgccacctccacgcatacaagcggcggctgcggctgccagccaccgccgncggttcatctaccgccgccggtgcatctgccaccttcggttcacctgccacctccggtgcatctcccaccgccggt

SEQ ID NO: 19566 - DNA, 234 bp, Zea mays
  Clone ID: LIB3151-047-P1-K1-A6
gggaaacagagcattggttgtctgttctggctgctcgcccgaatggtcctccagatgcgcggtacaattcttccaggacacaagtgggacatcatggtagatcttttcttctacagagacccagaggaagcgaagcagctggaggaagaagaggctctggttgcacctgactatggcgcggttgcagaatacactgcaccaggcgctgacaactggggcggtgaatggggtgct

SEQ ID NO: 19567 - DNA, 108 bp, Zea mays
  Clone ID: LIB3151-047-P1-K1-A7
tggcagctggcgcgaacggtgcaccagatacggggggcaaatgtgccaccacacatgcatgtcatgacggtagattgccactactacagtgacccagagggagctaag

SEQ ID NO: 19568 - DNA, 235 bp, Zea mays
  Clone ID: LIB3151-047-P1-K1-A8
gaccaactagcaacatagaaagcacaatagtgtaccaacaatggcagccaaaatattttgcttccttatgctccttggtctttctgcaagtgttgctaccgcaaccattttcccacaatgctcacaagctcctatagcttcccttcttcccccatacctctcaccagcggtgtcttcaatgtgtgaaaacccaattgttcaaccctacaggatccaacaggcattcgcaacaggc

SEQ ID NO: 19569 - DNA, 228 bp, Zea mays
  Clone ID: LIB3151-047-P1-K1-A9
cggacgcgtgggcggacgcgtgggttcctcctcgccctcgtcgcggagcggagtggaggcgcgcgttccggtacggcacgggacaggagcggaggaagctcatctgggtgttggcctcatcccctgcacaagctgaggaatggggcaaaaggactccaagccttcaaatggatatggctactcttctgattacgggggcacttcatcgggatataacttgagaaatac

SEQ ID NO: 19570 - DNA, 268 bp, Zea mays
  Clone ID: LIB3151-047-P1-K1-B10
gcaacatacatagtgaagtacagtagcaacatcttagcaccaatggcagccaagatttttgccctccttgccctccttgctctttcagcaagtgttgctaccgcgactattattccacaatgctcacaacaatacctctctccggtgacagccgcgagatttgaatacccaactatacaatcctacaggctacaagaggccatcacagcaagcatcttacggtcgttagcattgactgtccaacaaccatatgccctattgcaacaac

SEQ ID NO: 19571 - DNA, 177 bp, Zea mays
  Clone ID: LIB3151-047-P1-K1-B11
gtgacacaacacgcaacactgcatgtggcatccagtcacatcaatcgagcttctatgactgccaacttgtctcccctcggtatgctcagagctctttctttaacagttgctaacgctacaatttttgctgaccgatcacacgcttctatagcaaaccttgttgccgcatacctttca

SEQ ID NO: 19572 - DNA, 59 bp, Zea mays
  Clone ID: LIB3151-047-P1-K1-B12
gtgggtcttcagaccattagctttatctacttcagagcgcaaaagaacccgatcgacac

SEQ ID NO: 19573 - DNA, 223 bp, Zea mays
  unsure at all n locations
  Clone ID: LIB3151-047-P1-K1-B2
gccctactgctcgcctcagtgccagtcgttgcggcagcagtgttgccagcagctcaggcaggtggagccgcagcaccggtaccaggcgatcttcggcttggtcctccagtccatcctgcagcaacagccgcaaagcggccaggtcgcggngctgttggcggcgcatatagcgcagcaactgacggtgatgtgcggcctgcagcagccgactccatgcccctac

SEQ ID NO: 19574 - DNA, 56 bp, Zea mays
  Clone ID: LIB3151-047-P1-K1-B3
ttctcatgctgatatgtgcgacctctcagtaataaagcattagagatctatatttt

SEQ ID NO: 19575 - DNA, 258 bp, Zea mays
  Clone ID: LIB3151-047-P1-K1-B4
gcaattagctcatcgactccagattggagtactcgacaccatgaaggtgctgatgggtgcccttgctctcctggcgctcgctgcgagcgccgactccagtacaagcggcggttgtggctgccagacaccaccgattcatctaccgcctgcgctgtatatgccgtctacgttctatctgccgacgtagcagcagccgaagtcatggcaataccccactcaaccaccgaaggtaagcccgtgccagcagttcggatcctg

SEQ ID NO: 19576 - DNA, 61 bp, Zea mays
  Clone ID: LIB3151-047-P1-K1-B5
tcgatctggtcttggtggcccgattcggcacgaagccgcactttgagagaggggcgcgggc

SEQ ID NO: 19577 - DNA, 174 bp, Zea mays
  Clone ID: LIB3151-047-P1-K1-B6
tcggacgagcccaaggcagaggaggcggctgcccaagagcccgtcaaggaggaggccaagcctgaggagcccaaaacggaggcgccggcggaagcagcgcccgtggaggtttaggacgagacacccgtgccggaagagaccaagactgaggcttccgcgccggaggagcccaag

SEQ ID NO: 19578 - DNA, 220 bp, Zea mays
  Clone ID: LIB3151-047-P1-K1-B7
caacaagcaacatagaaagtggaatccagtagcaacaatagagcaacaatggagaccaagatattttccctccttatgctccttgctctttctacatgtgttgctaacgcgacaattttccctcaatgctcacaagctcctatagcttccctttttcccccataccttccatcaattatagcttcagtatgtgaaaacccagctcttcaaccatataggc

SEQ ID NO: 19579 - DNA, 212 bp, Zea mays
  Clone ID: LIB3151-047-P1-K1-B8
cgctatttctcaaaagatgctgttcagatcataacaaaaatggctgctgccaatggagtaagacgtgtttgggttggacaaaacagtctcatgtctactcctgctgtatctgctgtcatccgtgaaagaattggtgcagatggatcaaaggctactggtgccttcatcttgacagcgagccataacccaggtggtcctacggaggactttgg

SEQ ID NO: 19580 - DNA, 209 bp, Zea mays
  Clone ID: LIB3151-047-P1-K1-B9
cgctatttctcaaaagatgctgttcagatcataacaaaaatggctgctgccaatggagtaagacgtgtttgggttggacaaaacagtctcatgtctactcctgctgtatctgctgtcatccgtgaaagaattggtgcagatggatcaaaggctactggtgccttcatcttgacagcgagccataacccaggtggtcctacggaggactt

SEQ ID NO: 19581 - DNA, 231 bp, Zea mays
  Clone ID: LIB3151-047-P1-K1-C1
cgaaaccctaacgccgccgccgcttcacaggtaagccgccgtcatggtctccggttccggcgtatgcgcgaagcgcatcgtggtggacgcgcgccaccacatgctgggccgcctgtcgtcgattatcgccaaggaactgctcaatgggcagaaggtggtcgtcgtccgctgcgaggagatctgtatgtcgggtggactcgtacgccagaagatgaagtacctccgctttct

SEQ ID NO: 19582 - DNA, 354 bp, Zea mays
  Clone ID: LIB3151-047-P1-K1-C10
tagcaacatagaaagcacaatagtgtaccaacaatggcagccaaaatattttgcctccttatgctccttggtctttctgcaagtgctgctacggcgaccattttcccgcaatgctcgcaagctcctatagcttcccttcttcccccgtacctctcaccagcggtgtcttcggtatgtgaaaacccaattcttcaaccctacaggatccaacaggcaatcgcagctggcatcttacctttatcacccttgttcctccaacaatcatcagccctattacaacagttacctttggtgcatttattggcacaaaacatgagggcacaacaactacaacaacttgtgctagcaaacctt

SEQ ID NO: 19583 - DNA, 319 bp, Zea mays
  unsure at all n locations
  Clone ID: LIB3151-047-P1-K1-C11
atttgcactcatgcatcacaaaacatccttctatcagtaccatcaatcatcagtcatcttagtagtataggcaccaaatcaaatctgcaacatcaattatctaactccaaaaaccatgaagctggtgcttgtggttcttgctttcattgctttagtatcaagtgtttcttgtacacagacaggcggctgcagctgtggtccacaacacagccatgagcagcaacatgattcacaacatcatcatccacaaaaacaacatcattaaccaccatcacaacatnaccagctggagcaacaccaacaacaacatgtttacatg

SEQ ID NO: 19584 - DNA, 406 bp, Zea mays
  unsure at all n locations
  Clone ID: LIB3151-047-P1-K1-C12
tctagatcggagcgtccgccctttttttttttttttttttttttgaagagaagcttctttactattattactagagaacaactgaccgcagttgattagccatggttctctacaaactcaaaccagcacttaaaacaatataccattatttctgacaaaaaatataccaatgaggcagtgaagataatgtacaccacaatattttctctgattgatacatagcctagtactagcatacagaagtgatgtccaaaactgggatgtctcagttgtcgcagaatgcatgtagggtttcatcgagtgcattcccgtcataatcccccgtaaatacacagcaccctagcggtcctttcagaaggatgagtctnaacagaccatcagcaacctttttgtcaacagccatgat

SEQ ID NO: 19585 - DNA, 62 bp, Zea mays
  Clone ID: LIB3151-047-P1-K1-C2
gatcagcaaagcggcagtgcgtagagaggatcgtcgaacagaacaacatgaaaatggtcatc

SEQ ID NO: 19586 - DNA, 367 bp, Zea mays
  unsure at all n locations
  Clone ID: LIB3151-047-P1-K1-C3
gccattccctcttcaagaggggatcatcagattgggcttattattccttattactccaggcaaggatcggagttgctctgaattgactgaaccatggcggcgacaatggcagtgacgacgatggtgacgaggagcaaggagagctggtcgtcattgcaagtcccggcggtggcattcccttggaagccacgaggtggcaagaccggcggcctcgagttccctcgccgggcgatgttcgccagcgtcggcctcaacgtgtgcccgggcgtcccagcggggcgcgacccgcgggagcccgatccaatgtcgttcgggcggncgacaactgcgacatcgcgcgccagcttggcgccgncgttcccgggca

SEQ ID NO: 19587 - DNA, 310 bp, Zea mays
  unsure at all n locations
  Clone ID: LIB3151-047-P1-K1-C4
agaccattagctttatctactccagagcgcagaagaacccgatcgacaccatgagggtgttgctcgttgccctcgctctcctggctctcgctgcgagcgccacctccacgcatacaagcggcggctgcggctgccagccaccgccgccggttcatctaccgccgccggtgcatctgccacctgcggttcacctgccacctgcggtgcatctcccaccgccggtccacctgccggcgtcggtccacctgccaccgtcggtccatgtgccgccgccggtttatctgccgncgncaccatgccactaccctac

SEQ ID NO: 19588 - DNA, 73 bp, Zea mays
  unsure at all n locations
  Clone ID: LIB3151-047-P1-K1-C5
agatcaacaagcaacattgaaagtagaatacagtagcaacaaaagagcaacaatggcggncaagatattttcc

SEQ ID NO: 19589 - DNA, 120 bp, Zea mays
  Clone ID: LIB3151-047-P1-K1-C6
tgggaccaacccttccgagaccattagctttatttactccagagcgcagaagaacccgttcgacaccatgggggtgttgttggttgccctggttttcctggctttggttgggggggcaac

SEQ ID NO: 19590 - DNA, 233 bp, Zea mays
  Clone ID: LIB3151-047-P1-K1-C7
ctgcatctccctcgctctcgtcgcctcgttcgcttcgcctcctccccgccccgccccgagccgagcagagcgcagccctatccggagctgggatggcggacgcgaagcagcagcagcagcagccacagcaggcggcagcggcagccaccggcgtgtggaagacggtcaagcccttcgttaacggcggtgcctctgggatgctcgcgacctgcgtcatccagcctatcgacatg

SEQ ID NO: 19591 - DNA, 360 bp, Zea mays
  Clone ID: LIB3151-047-P1-K1-C8
cagaaacacaccaagcgaagcgcactagcaacgacctaacaacaatggctaccaagatattagccctccttgcgcttcttgccctttttgtgagcgcaacaaatgcgttcattattccacaatgctcacttgctcctagtgccattattccacagttcctcccaccagttacttcaatgggcttcgaacacctagctgtgcaagccaacatgcaacaacaagcgcttgcggcgagcgtcttacaacaaccaattgcccaattgcaacaacaatccttgccacatctaacaatacaagccatcacaacgcaacagcaacaacatgtcctaccagcactgagccacctagccatggtgaacc

SEQ ID NO: 19592 - DNA, 412 bp, Zea mays
  Clone ID: LIB3151-047-P1-K1-C9
gccggacagagcacatgttcttcgcttcggatgagaggattaaggctgtgaggcagatgattatggctcccacagttgagctgaggcagcaggcgctggatcgccttctgccttaccagaggtctgacttcgaaggcatcttccgtgctatggatggactttcagtgactattcgacttctggaccctcccctccacgagttgcttccagaagggaacgtcgaggaaatcgtgcgtgaactgtgttctgagacgggagccaaccaggaggatgccctcgcacggatcgaaaagctttcggaagtaaacccgatgcttggcttccgtggctgcaggcttggtatatcgtaccctgagctaacagaaatgcaagcccgtgccatctttgaagctgctatagcgatgaccaacca

SEQ ID NO: 19593 - DNA, 315 bp, Zea mays
  Clone ID: LIB3151-047-P1-K1-D1
tcgccgaaacaaagcaatcacccgagcaaaggagtgcggggcgaccatccaacgggatttcgcattcgacgaacgaagcgccgccatctgatcccgcacgcaacgcaatgggggggggactgaagaggccgtcgttcgggacgcgggcgtggcggctgctgcggctggcggtgctgtgggcgcagaaaggcggggcggagcacaggcaaacccagcttctgaaccctataggctgcaacaagcgatcggagcaaggaccatacctttatcacccttgttttaacaatcggcaggcctatctttggtgcagtcatt

SEQ ID NO: 19594 - DNA, 454 bp, Zea mays
  unsure at all n locations
  Clone ID: LIB3151-047-P1-K1-D11
attttgagcattcagaaacacaccaagcgaagctacctagcaacgacttaacaacaatggctaccaagatattagccctccttgcgcttcttgccctttttgtgagcgcaacaaatgcgttcattattccacaatgctcacttgctcctagtgccattataccacagttcctccgaccagttacttcaatgggcttcgaacacctagctgtgcaagcctacaggctacaacaagcgcttgcggcgagcgtcttacaacaaccaattaaccaattgcaacaacaatccttggcacatctaaccatacaaaccatcgcaacacaacagcaacaacagttcctaccagcactgagccaactagatgtggtgaaccctgtcgcctacttgcaacagcaggtgcttgcatccaacccactngctctggcatacgtagctgcataccaacaacaacaaca

SEQ ID NO: 19595 - DNA, 380 bp, Zea mays
  Clone ID: LIB3151-047-P1-K1-D4
agaccaccagctatagctactgcacagcgcaagatagcccaagcgacaccatgagggagtggctcgttgccctagaatctacaggctctcgctgcgagcgccacctacacgcatacaagcggcggatgcagctgacagccaccgccggcggttcatctaccgccgccggtgcatctgccacctgcggttcatctgccacctacggtgcatctcccaccgacggtccacctgacgtcgtcggtgcacctgccaccgtcggtccatgtgccgtcgtcggttcatgtggcgacggcaccatgccaataccctactgaaccagcccggtctcagcctcatccccagccacacccatgcccgtgccaacagacgcatgcaagccc

SEQ ID NO: 19596 - DNA, 326 bp, Zea mays
  Clone ID: LIB3151-047-P1-K1-D5
ctggcatcttacctttatcacccttgttcctccaacaatcatcagccctattacatcagttacctttggtgcatttattggcacaaaacatcagggcacaacaactacaacaacttgtgctagcaaaccttgctgcctactctcagcaacagcagtttcttccattcaaccaactagctgcattgaactctgcttcttatttgcaacaacaacaactaccattcagccagctacctgctgcctacccccagcaatttcttccattcaaccaactggcagcattgaactctcctgcttatttacagcagcaacaactactaccattc

SEQ ID NO: 19597 - DNA, 435 bp, Zea mays
  Clone ID: LIB3151-047-P1-K1-D6
ctaccattagacctttatcaccctttttgtttcaacactcatcagccctaatgcaggagttacctatggcggatttattgccacaaaacattatgacacatcaactacaacatcctatgctagcaaaccttgttgcctactctcagcaacatcagtttctgtcattcaaccaactagctgcattgaactctgcttcttatttgcaacaacaacaactaccattcagccagatacctgctgtctacccccaacaattccttccattcaaccaactgtcagcattgaactctcctgcttatttacagcagcaacaactactaccattcagccagctagctggtgtgagccctgctaccttcttgatacaaccacagtttttgtcgttctaccagcacgcttttgcctaacgctggcaccctcttacaactgcaacaa

SEQ ID NO: 19598 - DNA, 263 bp, Zea mays
  unsure at all n locations
  Clone ID: LIB3151-047-P1-K1-D7
ctagttctagatcgcgagcggccgccccttttttttttttttttttttgttgttttttttttttttgggtggggttttttaaatatatatttttttgtttatttttttttttatgttgtttttggaaggggggggggaaaaggggggnttnntttgggggagggggaaagggaacttttttttgggggggggccccataccttttacaaaaaccttttttggggggccccccccaagggggcccccaagggggggcccccccc

SEQ ID NO: 19599 - DNA, 292 bp, Zea mays
  Clone ID: LIB3151-047-P1-K1-D9
aaaatccggaatcgtgcagacgggcaccgcttatcctccgcgcaggcaagagcagccagccgattcgggatcggtacgcggagaggggaaaggcgagtcgtcgactcgtcgtccgggcagcttacctccctctcctgtccgtccccgcttacctaggccggccccgtctacgcacgcctaccgtcgtcgcacgatgagcacttctcccgacgccgacgacgtttcgcctttgccgcctactgctgccgccgacgaggccgcgcgggcgacagaaacgggggtggtcgatgag

SEQ ID NO: 19600 - DNA, 165 bp, Zea mays
  unsure at all n locations
  Clone ID: LIB3151-047-P1-K1-E1
gctttatctactccagagcgcagaaaaaaccccgatcgacaccatgagggtgttgctcgttgccctcgctctcctggctctcgctgcgagcgccacctncacgcatacaagcggcggctgcggctgccagccaccgccgccggttcatctaccgccgccggtgca

SEQ ID NO: 19601 - DNA, 124 bp, Zea mays
  Clone ID: LIB3151-047-P1-K1-E10
cgcccgctgggcatatgcaacattattctccgaggcgacgcgacatgcgtcgggctgaatgaataaactcactgtcatccagtgaagggggagttgcgtactgatccttatatcaatgcgtgca

SEQ ID NO: 19602 - DNA, 413 bp, Zea mays
  Clone ID: LIB3151-047-P1-K1-E11
ggacgtcagcctagcaattagctcatcgactccagattggagaactcgacaccatgaaggtgctgatcgttgcccttgctctcctggcgctcgctgcgagcgccgcctccagtacaagcggcggctgtggctgccagacaccaccgtttcatctaccgcctccgttctatatgccgcctccgttctatctgccgccgcagcagcagccgcagccatggcaataccccactcaaccaccgcagctaagcccgtgccagcagttcggatcctgcggcgtcggcagcgtcggcagcccgttcctgggccagtgcgtcgagttcctgaggcaccagtgcagcccggcggcgacgccctacggctcgccacagtgccaggcgctgcagcagcagtgctgccaccagatcaggcaggtg

SEQ ID NO: 19603 - DNA, 394 bp, Zea mays
  Clone ID: LIB3151-047-P1-K1-E12
aagaaatccatcgagaggccgtcgacaggggaattaatggcgtcgtcgtctagcagcagccaccgccgcctcatcctcgcagccgccgtcctgctctccgtgctcgcggctgccagcgccagcgccgggacctcctgcgtgccggggtgggccatcccgcacaacccgctcccgagctgccgctggtacgtgaccagccggacctgcggcatcgggccgcgcctcccgtggccggagctgaagaggagatgctgccgggagctggcggacatcccggcgtactgccggtgcacggcgctgagcatcctcatggacggcgcgatcccgccgggcccggacgcgcagctggagggccgtctagaggacctgccgggctgcccgcgggaggtgcaga

SEQ ID NO: 19604 - DNA, 344 bp, Zea mays
  Clone ID: LIB3151-047-P1-K1-E3
gagaccaactagcagcatagaaagcacaattgtgtaccaacaatggcagccaaaatattttgcctccttatgctccttggtctttctgcaagtgctgctacggcgaccattttcccacaatgctcacaagctcctatagcttcccttcttcccccgtacctctcaccagcggtgtcttcggtatgtgaaaacccaattcttcaaccctataggatccaacaggcaatcgcagctggcatcttacctttatcacccttgttcctccaacaatcatcagccctattacagcagttacctttggtgcatttatgggcacaaaacatgggggcacaacatctacaaca

SEQ ID NO: 19605 - DNA, 450 bp, Zea mays
  unsure at all n locations
  Clone ID: LIB3151-047-P1-K1-E4
agctttatctactccagagcgcagaagaacccgatcgacaccatgagggtgttgctcgttgccctcgctctcctggctctcgctgcgagcgccacctccacgcatacaagcggcggctgcggctgccagccaccgccgccggttcatctaccgccgccggtgcatctgccacctccggttcacctgccacctccggtgcatctcccaccgccggtccacctgccgtcgccggtccacctgccaccgccggtccatgtgccgccgccggttcatctgccgccgtcaccatgccactaccctactcaaccgtcccggcctcagcctcatccncagccacacccatgcccgtgccaacagccgcatccaagcccgtgccagctgcagggaacctgcggcgttggcagcaccccgatcctgggccagtgcgtcgagttcctgaggcatcagtgc

SEQ ID NO: 19606 - DNA, 439 bp, Zea mays
  Clone ID: LIB3151-047-P1-K1-E5
agctttatctactccagagcgcagaataacccgatcgacaccatgagggtgttgctcgttgccctcgctctcctggctctcgctgcgagcgccacctccacgcatacaagcggcggctgcggctgccagccaccgccgccggttcatctaccgccgccggtgcatctgccacctccggttcacctgccacctccggtgcatctcccaccgccggtccacctgccgtcgccggtccacctgccaccgtcggtccatgtgccgccgccggttcatctgccgccgtcaccatgccactaccctactcaaccgtcccggcctcagcctcatgcccagccacacccatgcccgtgccaacagccgcattcaagcccgtgccagctgcagggaacctgcggcgttggcagcaccacgatcctgagccagtgcgtcgagttcctga

SEQ ID NO: 19607 - DNA, 120 bp, Zea mays
  Clone ID: LIB3151-047-P1-K1-E6
agaccattagctttatctactccagagcgcagaagaacccgatcgacaccatgagggtgttgctcgttgccctcgctctcctggctctcgctgcgagcgccaccttcacgcatacaagcg

SEQ ID NO: 19608 - DNA, 366 bp, Zea mays
  Clone ID: LIB3151-047-P1-K1-E7
gatccaccgattcgagcagggcgacgtggtggccatgccggccggcgcccagcactggctgtacaacgacggcgacgcgccgcttgtggcggtctacgtcttcgacgagaacaacaacatcaaccagctcgagccttccatgaggaaattcttgctggctgggggcttcagcaaggggcagccccacttcgccgagaacatcttcaaagggatcgacgcccggttcctgagcgaagccctgggcgtcagcatgcacgtcgccgagaagctgcagagccggcgtgaccagcgaggcgagatcgtccgtgtggagccggagcacggttttcaccagctgaatccggcgccgtcgtggtcgtttttttt

SEQ ID NO: 19609 - DNA, 236 bp, Zea mays
  Clone ID: LIB3151-047-P1-K1-E8
gggtcttcagaccattagctttatctactccagagcgcagaagaacccgatcgacaccatgagggtgttgctcgttgccctcgctctcctggctctcgctgcgagcgccaccttcacgcatacaagcggtgggtgcggctgccagccaccgtcgccggttcatctaccgccgccggtgcatctgccacctccggttcacctgccacctgcggtgcatctcccaccgccggtccacc

SEQ ID NO: 19610 - DNA, 223 bp, Zea mays
  Clone ID: LIB3151-047-P1-K1-E9
cgatcgatcgccacagccaacaccacccgccgaggcgacgcgacagccgccaggaggaaggaataaactcactgccagccagtgaagggggagaagtgtactgctccgtcgaccagtgcgcgcaccgcccggcagggctgctcatctcgtcgacgaccagtggattaatcggcatggcggctctggccacgtcgtagatcgtcgcaacgcccgccggcctggg

SEQ ID NO: 19611 - DNA, 130 bp, Zea mays
  Clone ID: LIB3151-047-P1-K1-F1
gaggatgattgcactctgttttttatttggcacatcaacaactaccattgagccagctacgtgctgactacccaccagaattaccttcacttaaccgaacggccgcattgaactctccagcttatttaca

SEQ ID NO: 19612 - DNA, 314 bp, Zea mays
  Clone ID: LIB3151-047-P1-K1-F10
caagcgaagcgcactagcaacaacctaacaacaatggctaccaagatattagccctccttgcgcttcttgcccttttagtgagcgcaacaaatgcgttcattattccacagtgctcacttgctcctagtgccattattccacagttcctcccaccagttacttcaatgggcttcgaacatccagccgtgcaagcctacaggctacaactagcgcttgcggcgagcgtcttacaacaaccaattgcccaattgcaacaacaatccttggcacatctaaacctacaaaccatctgaacgcaacagcaacaacagtt

SEQ ID NO: 19613 - DNA, 462 bp, Zea mays
  unsure at all n locations
  Clone ID: LIB3151-047-P1-K1-F12
caacaagcaacatagaaagtggaatacagtagcaacaatagagcaacaatggcggccaagatattttccatccttatgctccttgctctttctgcatgtgttgctaacgcgaccatttttcctcaatactcacaagctcctatagctgcccttcttcccccataccttccatcaatgaccgcttcagtatgtgaaaacccagcccttcaaccctacaggctccaacaagcaatcgcaacaagcaacttacctttatcacccctgttctttcaacaatcgccagccctatctttggtgcagtcattggtacaaaccatcagggcacaacagctgcagcaactcgtgctaccagtgatcagccaagtagctctggcaaacctttctccctactctcagcaacaacaatttcttncattcaaccaactgtctacactgaaccctgctgcttatttgcagcaacac

SEQ ID NO: 19614 - DNA, 348 bp, Zea mays
  Clone ID: LIB3151-047-P1-K1-F2
tacgatccactgcactctcttcttcatttgtttcaacaacagctgccattctgttagcttcctgaggagtgcgcagggcatttactttcattcaaccaaccgtcacgtttgaactctcctgcttattgacagtagtttcatcttctacgacctaagccagatggctgcagtgagctcagctacctcctcgatacatccacaggtggtgccgttctaccagtacgctgtgcctaacgttagcaccctcattacaactgcaacattcgctgcacattcaacctacttgttttgtcatacccagcatggttctaccaacaacccatcattggaggtgccctctttacagat

SEQ ID NO: 19615 - DNA, 280 bp, Zea mays
  Clone ID: LIB3151-047-P1-K1-F6
aacacatcattggtggtgccctcttttagattgctgattagatgaaactcaataatacagttggttggatgatgtatgcggccaaccagaaataaaaagttacatttccagattctaaaatacaaaagaaagtgtgctggtgacaagcacggatgacggatcatttaccgtagatggtgcaactgccaacatacgttgctactgccaactatgaagcatgttcaaaccgacgaaacaactgaaaacgacgaaacaacttaaatcgggggggccgttttaa

SEQ ID NO: 19616 - DNA, 318 bp, Zea mays
  unsure at all n locations
  Clone ID: LIB3151-047-P1-K1-F7
gggtcttcagaccattagctttatctactccagagcgcagaagaacccgatcgacaccatgagggtgttgctcgttgccctcgctctcctggctctcgctgcgagcgccaccttcacgcatacaagcggcggctgcggctgccagccaccgccgccggttcatctaccgccgccggtgcatctgccaccttcggttcacctgccacctccggtgcatctcccaccgccggtccacctgccgtcgccggtccacctgccaccgtcggtccatgtgccgccgccggttcatctggcgncgtcaccatgccactaccctac

SEQ ID NO: 19617 - DNA, 363 bp, Zea mays
  Clone ID: LIB3151-047-P1-K1-F8
tagcaacatagaaagcacaatagtgtaccaacaatggcagccaaaatattttgcttccttatgctccttggtctttctgcaagtgctgctaccgcaaccattttcccacaatgctcacaagctcctatagcttcctttctttccccatacctctcaccagcggtgtcttcagtatgtgaaaacccaattcttcaaccctacaggatccaacaggcaatcgcagcaggcatcttacctttatcacccttgttcctccaacaaccgtcagccctattacagcagttacctttggtgcatttgttggcacaaaacatcaaggcacaacaactacaacaacttgtgctaggaaaccttgctgcctac

SEQ ID NO: 19618 - DNA, 130 bp, Zea mays
  Clone ID: LIB3151-047-P1-K1-F9
ctgggtcttcagaccattagctttatctactccagagcgcagaagaacccgatcgacaccatgagggtgttgctcgttgccctcgctctcctggctctcgctgcgagcgccaccttcacgcatacaagcg

SEQ ID NO: 19619 - DNA, 290 bp, Zea mays
  Clone ID: LIB3151-047-P1-K1-G1
ctctcatctgcgtacacgggctccctcttcctgtcagtagtagagtgagagtgaggcaacgagtgggagacaaggggaaatggggaagggagcgcaagggagcgatgcggcggccgccgtcggctaggtggatgagaacatggcggcgtggctggttgccaagaacaccctcaagatcatgcccttcaagctcccgcccgtcggcccttattatgtccgcgtgcgcattgaagcagtggggatttgctgcagcgatgtgcactacctaagggagatgcgcatcgcgcact

SEQ ID NO: 19620 - DNA, 404 bp, Zea mays
  Clone ID: LIB3151-047-P1-K1-G11
cccacacgtccgtatctagcaacatagaaagcacaatagtgtaccaacaatggcagccaaaatattttgcttccttatgctccttggtctttctgcaagtgttgctaccgcaaccattttcccacaatgctcacaagctcctatagctttcctttttcccccatacctatcaccagcggggtcgttaatgtgtgaaaacccaattgttcaaccctacaggatccaacaagcaatcgcaacaggcatcttaccattatcacccttgttcctccaacaaccgtcagccctattacagcagttacctttggtccatttggtggcacaaaacatcagggcacaacaactacaacaacttgtgctagcaaaccttgctgcatactctcagcaacatcagtttctttcat

SEQ ID NO: 19621 - DNA, 394 bp, Zea mays
  Clone ID: LIB3151-047-P1-K1-G12
gcaacatataaagagctagacagattcaacgatcgagcatcaaccgcggccgggagataagatatcctgattctccatgctccttgggcttgctgcacgagctcctaccgcaaccattattccacagtggtcacaagctcctatcgcttttcttcttaccccataccaatgaccagcggagtcttgaatgactgaaaacccaattgtttaaccctacaggatccaacatgcaatcgcaacaggcatattaccattatgagccttgttcctgcaacaaccgtcagccctattacagcagttacctttggttcatttggtggctcagaacatcatgttacaacaactacaacaacttgtgctagcaaaccttgctgaatactgtcagcatcatcag

SEQ ID NO: 19622 - DNA, 383 bp, Zea mays
  Clone ID: LIB3151-047-P1-K1-G2
atccaatccagatcagcaaagcggcagtgcgtagagaggatcgtcgaacagaacagcatgaagatggtcatcgttctcgtcgtgtgcctggctctgtcagctgccagcgcctctgcaatgcagatgccctgcccctgcgcggtgctgcagggcttgtacggcgctggcgccggcctgacgacgatgatgggcgccggcgggctgtacccctacgcggagtacctgaggcagccgcagtgcagcccgctggcggcggcgccctactacgccgggtgtgggcagacgagcgccatgtaccagccgctccggcaacagtgctgccagcagcagatgaggatgatggacgtgcagtccgtcgcgcagcagctgcagatgatgatgca

SEQ ID NO: 19623 - DNA, 245 bp, Zea mays
  Clone ID: LIB3151-047-P1-K1-G3
tcgcacggcgaccaaccctcttccaacccgactagtcggactcgcagctccgccccaaagtccaggtcgaagcatggaagtcgcggcggcgtctgcgaggcccgtcctgcgcgtggctgccatctgcggctccctccgcaaggccttcttcaaccgcggtcttcttcgcgccgcccgggaggtgtgcgaggacttcattccggggcttcgcattgacgagctcgacattttcgaccttgccatta

SEQ ID NO: 19624 - DNA, 311 bp, Zea mays
  unsure at all n locations
  Clone ID: LIB3151-047-P1-K1-G4
acacaggtagataccacaaccctgtgcagtggtcttgcagtctcatcaaggtgacaggtacgacataggacatggaggccaccctgtgcccgaagccccatttcgtggtcattccatgggcagccaccagccacatgatccccattgtggacatcggctgcctcctcgccgcgcacggcgccgcggtcacgatcatcaccacgccctccaggtcgcaactcgtacagagccgcgtggaccgagccgggcaagccttatcggcggtcacggtcaccgngatcccgttcccgggcgcggaggtcggtctggcg

SEQ ID NO: 19625 - DNA, 466 bp, Zea mays
  Clone ID: LIB3151-047-P1-K1-G5
cttcggtatgtgaaaacccaattcttcaaccctacaggatccaacaggcaatcacagctggcatcttacctttatcacccttgttcctccaacaatcatcagccctattacatcagttacctttggtgcatttattggcacaaaacatcagggcacaacaactacaacaacttgtgctagcaaaccttgctgcctactctcagcaacagcagtttcttccattcaaccaactagctgcattgaactctgcttcttatttgcaacaacaacaactaccattcagccagctacctgctgcctacccccagcaatttcttccattcaaccaactggcagcattgaactctcctgcttatttacagcagcaacatctactaccattcagccagctagctggtgtgagccctgctaccttcttgatacaaccacagtttgttgccgtctaccagcacgctgcgcctaacgc

SEQ ID NO: 19626 - DNA, 422 bp, Zea mays
  Clone ID: LIB3151-047-P1-K1-G6
cagaccattagctttatctactccagagcgcagaagaacccgatcgacaccatgagggtgttgctcgttgccctcgctctcctggctctcgctgcgagcgccaccttcacgcatacaagcggcggctgcggctgccagccaccgccgccggttcatctaccgccgccggtgcatctgccacctccggttcacctgccacctccggtgcatctcccaccgccggtccacctgccgtcgccggtccacctgccaccgccggtccatgtgccgccgccggttcatctgccgccgtcaccatgccactaccctactcaaccgccccggcctcagcctcatccccagccacacccatgcccgtgccaacagccgcattcaagcccgtgccagctgcagggaacctgccgcgttggcagcaccccgat

SEQ ID NO: 19627 - DNA, 449 bp, Zea mays
  Clone ID: LIB3151-047-P1-K1-G7
ctagcaacatagaaagcacaatagtgtaccaacaatggcagccaaaatattttgcctccttatgctccttggtctttctgcaagtgctgctacggcgaccattttcccacaatgctcacaagctcctatagcttgccttcttcccccgtacctctcaccagcggtgtcttcggtatgtgaaaacccaattcttcaaccctataggatccaacaggcaatcgcagctggcatcttacctttatcacccttgttcctccaacaatcatcagccctattacagcagttacctttggtgcatttattggcacaaaacatcagggcacaacaactacaacaacttgtgctagcaaaccttgctgcctactctcagcaacaacagtttcttccattcaaccaactagctgcattgaactctgcttcttatttgcaacaacaacaactaccattca

SEQ ID NO: 19628 - DNA, 449 bp, Zea mays
  Clone ID: LIB3151-047-P1-K1-G8
attgagaccaacaagcaacatagaaagtggaatccagtagcaacaatagagcaacaatggagaccaagatattttccctccttatgctccttgctctttctacatgtgttgctaacgcgacaattttccctcaatgctcacaagctcctatagcttccctttttcccccataccttccatcaattatagcttcagtatgtgaaaacccagctcttcaaccatataggcttcaacaagcaatcgcagcaagcaacatacctttatcgcccttgttgtgtcaacaatcgccagccctatctttggtgcagtcattggtacaaaccatcatggcacaacagctgcagcaactcgtgctacctgtgatcaaccaagtagctctggcaaacctttctccctactctccgcaacaacaatttcttccattcaaccaactgtctacactgaaccct

SEQ ID NO: 19629 - DNA, 312 bp, Zea mays
  Clone ID: LIB3151-047-P1-K1-G9
agagcccagataatccaaactggtttcagggtaccggagatgctgtaaggcagtacttgtggttgtttgaggagcataatgcgatggaatttgtaattcttgctggcgatcacctgtaccggattgactatgaaaagctcattcatgctcacagagaaacaaatgctgatattaccagggctgccctaccgatagatgagaaacgtgcaactgtatttgtcctcatgaatattgatgaataagggaggatcattgagcttgctgagaaaccgcaaggagagcatgttgaagcaatggatcttgacaccacca

SEQ ID NO: 19630 - DNA, 359 bp, Zea mays
  Clone ID: LIB3151-047-P1-K1-H10
gttgcagccaactagcagcagaacctgtacatttgcgttccaacaatggcagccaaaatatgtcgcttgcttatgctcattggtctgtctgcaagtgttgctaccgcagccatgttcccacaatgcttacaagcttccatagctttccttctaccgccatacctgtcaccagcggtgtcttcaatgtgtgaaaacgcacatgttcatccctacaggatccaacaagcaatctgaacaggcatattaccattctcacccgtggtcctccaacatccgacagtcctattacagcagttacctccggtccatttggtggcacaaaacatgagggcacaccaacttcaacagactgtgctagc

SEQ ID NO: 19631 - DNA, 445 bp, Zea mays
  unsure at all n locations
  Clone ID: LIB3151-047-P1-K1-H11
ggaagaaattgcaaccgaaacaatggcggcagattccggcgctcgcagacaaccaagcttcaccaaggtcgaccagctgcgccctggaacccacggccacaacctcatcctcaaggttgttgactccaagatggtcgtccagagaggccgcgagggagggccccagggaagacagatgaggattgcggagtgcttggttggtgatgaaaccggcatcattgtcttcactgcaagaaacgatcaagtggatgtaattaggcctggaacaactgttgaactgaggaacgcaaagatcgacatgttcaagggttcgatgcggcttgcagtggacaagtggngaattgtgaaagctgctgaaagctcagctgagtggacagtcaaggaggacaacaacctgtccttaattgagtttgagcttgtgaccgtgacggagtgaaaaccggca

SEQ ID NO: 19632 - DNA, 92 bp, Zea mays
  Clone ID: LIB3151-047-P1-K1-H12
ctatcctcttctctgttctaccccctttgaagcaacaatcgttcaccgatcgatccagtgcgttctgcatggaaactgccgccgtcgccgcc

SEQ ID NO: 19633 - DNA, 387 bp, Zea mays
  Clone ID: LIB3151-047-P1-K1-H2
ttctagatcgcgagcggtcgccctttttttttttttttattttcctttttgggtgttttttttgggcaaaggaggggattctttttattgccaacacacacaaaaaaagggttaacatttttttattggtttacatcaccattcaaggggaaaaatgaatgggcagagcaagaatgtaattgctttgtttttatttccatgctcctgccttgtgccattagataacctccaaactcattggctcttttctatcttcatcccaatgcatagccgtaagtgcattcactgtatttccaacatatggaagccctaaaaatttcccaataaagatgttttgacaagggtaaaaagtaaaggtaaaattgtagctcacttaaaatctttatc

SEQ ID NO: 19634 - DNA, 406 bp, Zea mays
  Clone ID: LIB3151-047-P1-K1-H3
aaatattttgcctccttatgctccttggtctttctgcaagtgctgctacggcgaccattttcccacaatgctcacaagctcctatagcttcccttcttcccccgtacctctcaccagcggtgtcttcggtatgtgaaaacccaattcttcaaccctataggatccaacaggcaatcgcagctggcatcttacctttatcacccttgttcctccaacaatcatcagccctattacagcagttacctttggtgcatttattggcacaaaacatcagggcacaacaactacaacaacttgtgctagcaaaccttgctgcctactctcagcaacaacagtttcttccattcaaccaactagctgcattgaactctgcttcttatttgcaacaacaacaactaccattcag

SEQ ID NO: 19635 - DNA, 74 bp, Zea mays
  Clone ID: LIB3151-047-P1-K1-H4
tcggaccattagctttatctactccagagcgcagaagaacccgatcgacaccatgagggtgttgctcgttgccc

SEQ ID NO: 19636 - DNA, 354 bp, Zea mays
  Clone ID: LIB3151-047-P1-K1-H5
gaccattagctttatctactccagagcgcagaagaacccgatcgacaccatgagggtgttgctcgttgccctcgctctcctggctctcgctgcgagcgccacctccacgcatacaagcggcggctgcggctgccagccaccgccgccggttcatctaccgccgccggtgcatctgccacctccggttcacctgccacctccggtgcatcttccaccgccggtccacctgccgccgccggtccacctgccaccgtcggtccatgtgccgccgccggttcatctgccgtcgtcaccatgccactaccctactcaaccgccccggtctcagcctcatccccagccacacccatgccc

SEQ ID NO: 19637 - DNA, 58 bp, Zea mays
  Clone ID: LIB3151-047-P1-K1-H6
ccggtcgccacgcgtcgcttcctatttatgctaaacaatttcggcagattccggcgct

SEQ ID NO: 19638 - DNA, 236 bp, Zea mays
  Clone ID: LIB3151-047-P1-K1-H8
attgagaccaactagcaacatagaaagcacaatagtgtaccaacaatggcagccaaaatattttgcttccttatgctccttggtctttctgcaagtgttgctaccgcaaccattttcccacaatgctcacaagctcctatagctttccttctttccccatacctctcaccagcggtgtcttcaatgtgtgaaaacccaattgttcaaccctacaagatccaacaagcaatcgcaac

SEQ ID NO: 19639 - DNA, 294 bp, Zea mays
  Clone ID: LIB3151-047-P1-K1-H9
cacgcagccgagtcctgacccgaccctcccgaggccgtcagacttatgctctccgactcccgtcgttccccgagacccatccgcatgcgcgagtggaagacatgggctcgacgttcggtgccacttttacaggtggccttatggctgctccaacggggaagaatgtgcgccttcagaggagggctaacttcagagtaaaagcggctaaggagctgtactctaacagggatgggtcagctatcaagaagctccagactggagtcaataagcttgcagacctagttggagttacac

SEQ ID NO: 19640 - DNA, 343 bp, Zea mays
  Clone ID: LIB3151-048-P1-K1-A1
atcacaccaagcgaagcgcactagcaacgccctaacatcaatggctaccaagatattaggccttcttgcgctttttgccctttttgcgagcgcaacatatgcgttcattattccacaatgctcacttgcttctagtgccattattccacagtttctcccaccagttactttaatgggcttcgaacaccttgctgtgcaagccaacatgcaacaacatgcgcttgcggcgagctgtttacaacaaccaattgtccaatttgcacaacaatccttgccacatttaacaattcaagccattacaacgcaacaacaacaacagttccttccagcactgagccaccta

SEQ ID NO: 19641 - DNA, 387 bp, Zea mays
  unsure at all n locations
  Clone ID: LIB3151-048-P1-K1-A10
gccgccgccaccatgccactaccctactcaaccgccccggcctcagcctcatgcccagccacacccatgcccgtgccaacagtcgcatccaagcccgtgccagctgcagggaacctgcggcgttggcagcaccccgatcctgggccagtgcgtcgagttcctgaggcatcagtgcagcccgacggcgacgccctactgctcgcctcagtgccagtcgttgcggcagcagtgttgccagcagctcaggcaggtggagccgcagcaccggtaccaggcgatcttcggcttggtcctccagtccattctgcagcagcagccgcaaagcggccaggtcgcggngctgttggctgcgcagatagcgcagcaactgactgtgatgtgcgggct

SEQ ID NO: 19642 - DNA, 399 bp, Zea mays
  Clone ID: LIB3151-048-P1-K1-A11
cagaccattagctttatctactccagagcgcagaagaacccgatcgacaccatgagggtgttgctcgttgccctcgctctcctggctctcgctgcgagcgccacctccacgcatacaagcggtggctgcggctgccagccaccgccgtcggttcatctaccgccgccggtgcatctgccacctccggttcacctgccacctccggtgcatctcccaccgccggtccacctgccgccggcggtccacctgccaccggcggtccatgtgccgccggcggttcatctgccggcgccaccatgccactaccctactcaaccgccccggcctcagcctcattcccagccacacccatgcccgtgccaacagccgtatccaagcccgtgccagctgcagggaacc

SEQ ID NO: 19643 - DNA, 372 bp, Zea mays
  Clone ID: LIB3151-048-P1-K1-A12
cagaccattagctttatctactccagagcgcacaagaacccgatcgacaccatgagggtgttgctcgttgccctggctctcctggctctcgctgcgagcgccacctccacgcatacaagcggctggtgcggctgtcagccaccgccgccggttcatgtaccgtcagcagtgcatctgtcaccttcagataacctgccacccttggtggatcttccaccgccggtacacctggcgccggcagttcacatgtcatcggcggttcaagtgccgccaggggttcttctgtcgccgcctccattccattattcttcattaacaccaccaggagggcattctcatcatcatcctcatcgttgcccattgccaacataa

SEQ ID NO: 19644 - DNA, 401 bp, Zea mays
  Clone ID: LIB3151-048-P1-K1-A3
attgagaccaactagcaacatagaaagcacaatagtgtaccaacaatggcagctaaaatattttgcctgcttatgctccttggtctttctgcaagtgctgctacggcgaccattttcccacaatgctcacaagctcctatagcttcccttcttcccccgtacctctcaccaacggtgtcttcggtatgtagaaaacccaattcttcaaccctacaggatccaacaggcaatcgcagctggcatcttacctttatcacccttgttcctccaacaatcatcagccctattacagcagttacctttggtgcatttattggcacaaaacatcagggcacaacaactacaacaacttgtgctagcaaaccttgctgcctactctcagcaacagcagtttcttccat

SEQ ID NO: 19645 - DNA, 400 bp, Zea mays
  Clone ID: LIB3151-048-P1-K1-A5
agttggttgaatggaagaaattgtctacactgaaccctgctgcttatttgcagcaacaacaactactaccattcagccagctagctactgcctactctcagcagcaacaatttcttccatttaaccaattcgccgcactgaacccctctgcttatttccagcagcaaatactactaccatttggccagctagctacaacaagccccgcttccttcttgacacaacaacaattgcttccgttctaccagcagtttgtggctaaccccgcaacccttttacaactgcaacagttgctgccctttgtccaacttgctttgacaaacccagcagccttctaccaacaacacatcattggcggtgccctcttttagattgcttattagttgtcattcaataatga

SEQ ID NO: 19646 - DNA, 392 bp, Zea mays
  Clone ID: LIB3151-048-P1-K1-A6
caacaagcaacatagaaagtggaatccagtagcaacaatagagcaacaatggagaccaagatattttccctccttatgctccttgctctttctacatgtgttgctaacgcgacaattttccctcaatgctcacaagctcctatagcttccctttttcccccataccttccatcaattatagcttcagtatgtgaaaacccagctcttcaaccatataggcttcaacaagcaatcgcagcaagcaacatacctttatcgcccttgttgtgtcaacaatcgccagccctatctttggtgcagtcattggtacaaaccatcagggcacaacagctgcagcaactcgtgctacctgtgatcaaccaagtagctctggcaaacctttctccctactc

SEQ ID NO: 19647 - DNA, 386 bp, Zea mays
  Clone ID: LIB3151-048-P1-K1-A7
tcgtgccttcagtcctactcctacacccatctcattgctttcggaatccggagagctcgagtcgtgcgtgcgcgagtctttgttgcatgctgcggcgaatcaccagcaccaccctttcgcgtcgtgcgcgcgtttcgatggccgacagcgagcctttcatcacgcgctggacctttgaggatttcgtggtccactacgaaacgcgcttcggtctccggctcgaggccgaccgttacggttactgtgatggcgacgattgcacccccgtcgtgcgtattcgatcatggggccagtcgtcccgtcactgtccgtgccaacggtggtcgcataccatgtccgtcttagatcagatctagcggatggagaggaaggtggagattatccat

SEQ ID NO: 19648 - DNA, 395 bp, Zea mays
  Clone ID: LIB3151-048-P1-K1-A8
gcaacatagaaagcacaatagtgtaccaacaatggcagctaaaatattttgcctccttatgctccttggtctttctgcaagtgctgctacggcgaccattttcccacaatgctcacaagctcctatagcttcccttcttcccccgtacctctcaccaacggtgtcttcggtatgtgaaaacccaattcttcaaccctacaggatccaacaggcaatcgcagctggcatcttacctttatcacccttgttcctccaacaatcatcagccctattacagcagttacctttggtgcatttattggcacaaaacatcagggcacaacaactacaacaacttgtgctagcaaaccttgctgcctactctcagcaacagcagtttcttccattcaaccaac

SEQ ID NO: 19649 - DNA, 255 bp, Zea mays
  Clone ID: LIB3151-048-P1-K1-A9
gtcgtatacaactagatattcacctagttcaccgcaacggaaataagctgaggtcaatatatacctaggcatgcgccaacactggcattcaaggccgttgctgctacagcgctcatgcggtgttggtagtacactgatcctggggtagtcctgtctgatcctgaggtatctgtggagcaggacggtgattgcactactgcatcgttcagtgtcagagcgtgttggagcagcgacgccagtgaatcaggcgggtgg

SEQ ID NO: 19650 - DNA, 125 bp, Zea mays
  Clone ID: LIB3151-048-P1-K1-B1
gcctcttggaaaaagaagaatccaatttattgttgagtgctgatgctatctctccaggaaagcacatgcttgctactattcctggactgccaacactttcatgtagctacagtaagggtatcata

SEQ ID NO: 19651 - DNA, 397 bp, Zea mays
  Clone ID: LIB3151-048-P1-K1-B10
gagaccaactagcaacatagaaagcacaatagtgtaccaacaatggcagccaaaatattttgcctccttatgctccttggtctttctgcaagtgctgctacggcgaccattttcccgcaatgctcgcaagctcctatagcttcccttcttcccccgtacctctcaccagcggtgtcttcggtatgtgaaaacccaattcttcaaccctacaggatccaacaggcaatcgcagctggcatcttacctttatcacccttgttcctccaacaatcatcagccctattacaacagttacctttggtgcatttattggcacaaaacatcagggcacaacaactacaacaacttgtgctagcaaaccttgctgcctactctcagcaacagcagtttctttcat

SEQ ID NO: 19652 - DNA, 395 bp, Zea mays
  Clone ID: LIB3151-048-P1-K1-B11
attttcagcattcagaaacacaccaagcgaagcgcactagcaacaacctaacaacaatggctaccaagatattagccctccttgcgcttcttgcccttttagtgagcgcaacaaatgcgttcattattccacagtgctcacttgctcctagtgccattattccacagttcctcccaccagttacttcaatgggcttcgaacatccagccgtgcaagcctacaggctacaactagcgcttgcggcgagcgtcttacaacaaccaattgcccaattgcaacaacaatccttggcacatctaaacctacaaaccatcgcaacgcaacagcaacaacagtttctgccatcactgagccacctagccgtggtgaaccctgtcgcctacttgcaacagcag

SEQ ID NO: 19653 - DNA, 396 bp, Zea mays
  Clone ID: LIB3151-048-P1-K1-B12
caactagcaacatagaaagcacaatagtgtaccaacaatggcagccaaaatattctgcctccttatgctccttggtctttctgcaagtgctggtacggcgaccattttcccacaatgctcacaagctcctatagctttccttctttccccgtacctctcaccagcggtgtcttcggtatgtgaaaacccaattcttcaaccctataggatccaacaggcaatcgcagctggcatcttacctttatcacccttgttcctccaacaatcatcagccctattacagcagttacctttggtgcatttattggcacataacatcagggcacaacaactacaacaacttgtgctagcaaaccttgctggctactttcagcaacaacagtttgttccattcaa

SEQ ID NO: 19654 - DNA, 399 bp, Zea mays
  Clone ID: LIB3151-048-P1-K1-B2
gcaacatagaaagcacaatagtgtaccaacaatggcagccaaaatattttgcttccttatgctccttggtctttctgcaagtgttgctaccgtaaccattttcccacaacgctcacaagctcctatagcttcccttcttcccccatacctttcaccagcggagtcttcaatgtgtgaaaacccaattgttcaaccctacaggatccaacaggcaatcgcaacaagcatcttaccattatcacccttgttccttcaacaaccgtcagccctattacagcagttacctttggtccatttggtggcacataacataagggcacaacaactacaacaacttgtgctagcaaaccttgctgcatactctgagcaacatcagtgtcttccattcaaccaactggc

SEQ ID NO: 19655 - DNA, 354 bp, Zea mays
  Clone ID: LIB3151-048-P1-K1-B3
gctttatctactccagagcgcagaagaacccgatcgacaccatgagggtgttgctcgttgccctcgctctcctggctctcgctgcgagcgccacctccacgcatacaagcggcggctgcggctgccagccaccgtcgccggttcatctaccgccgccggtgcatctgccacctccggttcacctgccacctccggtgcatctcccaccgccggtccacctgccgccgccggtccacctgccaccgtcggtccatgtgccgccgtcggttcatttgccgacgccaccatgccactaccctacttaaccgccccgggcttagtcttattcccagccacacccatgcccgtgccaac

SEQ ID NO: 19656 - DNA, 402 bp, Zea mays
  Clone ID: LIB3151-048-P1-K1-B4
ccaactagcaacatagaaagcacaatagtgtaccaacaatggcagccaaaatattttggcctcctaatgctcctgggctttcttgaaggggtgctacggcgaccattttcccgcaatgctcgcaagctcctatagcttcccttctttccccgtacctctcaccagcggtgtcttcggtatgtgaaaacccaattcttcaaccctacaggatccaacaggcaatcgcagctggcatcttacctttatcacccttgttcctccaacaatcatcagccctattacaacagttacctttggtgcatttattggcacaaaacatcagggcacaacaactacaacaacttgtgctagcaaaccttgctgcctactctcagcaacagcagtttttttcattcaaccaac

SEQ ID NO: 19657 - DNA, 381 bp, Zea mays
  unsure at all n locations
  Clone ID: LIB3151-048-P1-K1-B5
ggtaaaaacaacacaggatgaactgcttggagaactcgggttctgtcctctcgcgacttcttcgtcacaggccccacgtagccgcgccggcgacggcgccgcagtcaccagctttacggtactactactacgccttccgcgttaagccagtcgtcttccgaccgccggcgccgtcccagttgccgagatctagggactactacacatncccgcagcggcagcaggtcgttcactttaaccgccgtcgcggcgggttccggtggtaccacgaccagcggaagctcacggcggcggtgttaatcagcggcggcggagcggtcgcgttctactttggccatttggagaaccgttcctacaccaaccggttccaacctgtcgttc

SEQ ID NO: 19658 - DNA, 220 bp, Zea mays
  Clone ID: LIB3151-048-P1-K1-B7
ctgggtcttaagaacattagctccatgtactgcagagcgcaaaaaaacccactcgacaccatgagggtgttgctcgctgccctggctctcctggctctcggtgagagcgccacctccacgcatacaagcgagcgggtgcagttgccagccaccgccttctgttcatgtaccgccgacggtgcatttgacagctccggttcacactgccacctccggtgca

SEQ ID NO: 19659 - DNA, 218 bp, Zea mays
  Clone ID: LIB3151-048-P1-K1-B8
cagaccattagctttatctactccagagcgcagaagaacccgatcgacaccatgagggtgttgctcgttgccctcgctctcctggctctcgctgcgagcgccacctccacgcatacaagcgggggctgcggctgccagccaccgccgccggttcatctaccgccggcggtgcatctgccaccttcggttcacctgccacctccggtgcattttccacc

SEQ ID NO: 19660 - DNA, 219 bp, Zea mays
  Clone ID: LIB3151-048-P1-K1-B9
gataaggccaaaagctttggtttatttgattattggttatgcactccaaagccattcagattacttgtaaaataaaaaaacagggggggactaccggtttcaacaacaataccagcttccaggttatttgtgctttttttcaaaaagaacagcgcttaattaatttctgctgaaccctccaaaacttgacatggaaaccagcctcctcgctggtgtttt

SEQ ID NO: 19661 - DNA, 67 bp, Zea mays
  Clone ID: LIB3151-048-P1-K1-C1
gtggaattaagcgtaaaaatcagcttatagacttcagatcgaataacttcagagcaggatggcgctg

SEQ ID NO: 19662 - DNA, 398 bp, Zea mays
  Clone ID: LIB3151-048-P1-K1-C10
cgcccggctccccctcctggtcctcgccgttgtcgctgcatccctcctcgctgccgacgcgcggccgtgccacaccttcttcgtcgccttccgcgccgaccccaaccccaccagaggcgacgacgctgtaccccaccacctcggcgccccgcatgtcgctacagtcatcaccgtcttccgtgtccgccgtctcggtccgcacgtcccccacggtcaccgtaaccaccaccaccttcactccatccccgacaacgttcggatccaccgccccgatctcccgcaccccgccgtggggccccaggagcgcgccagggacatcttcgtggtcgtcatcgggctcctctttggcgtcgcctgcggagcgctcaccgctgctttcgtgtacctcgtctggtcca

SEQ ID NO: 19663 - DNA, 323 bp, Zea mays
  Clone ID: LIB3151-048-P1-K1-C11
ctcccggcttcgcctcgtggtactcgccgtagtgggcgcatacctacgggatggcgacgcgcggccgtgccacaccttcttctttgccttacgcgccgtccccaaccccaccagatgcgatgattttgtaccccagcaccttggcgcccgtcatgattgttacaacatgaccgtcttccgttgtccgacgtctcgttccgtacttccttcacggacaccgaaaccatcaccaccgccactgcatcctgggcaacgcacggacccaccgtcccattcttacaaactccgtcggggtaccctaggtgagcgtcagtgacatctct

SEQ ID NO: 19664 - DNA, 400 bp, Zea mays
  Clone ID: LIB3151-048-P1-K1-C12
cacagttcctcccaccagttacttcaatgggcttcgaacatccagccgtgcaagcctacaggctacaactagcgcttgcggcgagcgttttacaacaaccaattgcccaattgcaacaacaatccttggcacatctaaacctacaaaccatcgcaacgcaacagcaacaacagtttctgccatcactgagccacctagccgtggtgaaccctgtcgcctacttgcaacagcagctacttgcatccaacccacttgctctggcgaacgtagctgcataccagcaacaacaacgtctgcaacagtttatgccagcgctcagtcaactagccatggtgaaccctgtcgtctacctacaacagcaacaattgctttcatctagcccgctcgctgtgggcaatgg

SEQ ID NO: 19665 - DNA, 364 bp, Zea mays
  Clone ID: LIB3151-048-P1-K1-C3
gtccgagccagctgcagggaacctgcggcgttggcagcaccccgatcctgggccagtgcgtcgagttactgaggcatcagcgcagaccgacggcgacgccctactgctcgcctcagtgccagtcgttgcggcagcagtgttggcagcagctcaggcaggtggagccgcagcaccggtaccaggcgatcttcggcttggtcctccagtccatcctgcagcagccgactccatgcccatacgctgctgccggctgtgtcccccactgaagaaactatgcgctgtagtatagtcgctggctagctagctagctgagtcatttagcggcggtgattgagtaataacgtggtccgcatcaacatgggtg

SEQ ID NO: 19666 - DNA, 398 bp, Zea mays
  Clone ID: LIB3151-048-P1-K1-C4
gaccattagctttatctactccagagcgcagaagaacccgatcgacaccatgagggtgttgctcgttgccctcgctctcctggctctcgctgcgagcgccacctccacgcatacaagcggcggctgcggctgccagccaccgccgccggttcatctaccgccggcggtgcatctgccacctccggttcacctgccacctccggtgcatctcccaccgccggtccacctgccgccgccggtccacctgccaccgtcggtccatgtgccgccgccggttcatctgtcgtcgccaccatgccactaccctacttaaccgtcccggccttagccttattcccagacacacccatgcccgtgccaacagccgtattcaagcccgtgccagctgcagggaacct

SEQ ID NO: 19667 - DNA, 126 bp, Zea mays
  Clone ID: LIB3151-048-P1-K1-C5
tgtccattagttatatttacttcagattgcattttaacccgtatcgttaccatgggggggctgttagttgccctggttattctggatctcgctttgtgcgccatcttcattcatacaatcgatgtc

SEQ ID NO: 19668 - DNA, 339 bp, Zea mays
  Clone ID: LIB3151-048-P1-K1-C6
gttctgggaaactagaaacacaactagtgcatcagcgttgaaacaccctatggtcagtgtgctcgtggttctttttgcttcttgatcttcttgcgctttgagcgggcgcaaaatatgcggacatggtgccacagtgttcattttatcatcgttccattcttccacggtgtcttccagtagttacttgaatggacttcaaacaggcaggtgcgcaagggtattggctacagcaagggatcgttgatagcgttttgtaccaacccattgatcaattgtaccaccaatgcttggtacagttaacatttcaaaccatcgcatcgtaacacaaccaccacttcc

SEQ ID NO: 19669 - DNA, 274 bp, Zea mays
  Clone ID: LIB3151-048-P1-K1-C7
gttttgggcatctagttaacacaccatgttgagcgcactttcatcaagggaagatcaatggctatcatgttatttttccaccttgcgcttcttgcgcttttttcgagcgcaacatatgcgttcattattccacaatgcttacttgctcctagtttcattatttcacaatttctcccaccatttacttgaatggacctcgaacacccaattgttcatgcctattcgctacaacaagctattgatggtagcgttttacaccaaccaattgtccaat

SEQ ID NO: 19670 - DNA, 295 bp, Zea mays
  Clone ID: LIB3151-048-P1-K1-C9
ctcctcgcctcgccttggagttcacgccgtagctagcgcctgccgaggagaaggttcttccctccccggcgccaggctatagtcgtagccagacacacatctgctaccccagatcaccaacacaccagctcggcagtaccacgcgatgcgaaacgtaaactcgtgaagaaaaaagccgccactgacaaaacacttgcgacggaagtgggctacacgtgacatctttcccatcagtcgctccatccatgtcgcaaatatgccaggctgcaggaagacagaccatattcagagacaa

SEQ ID NO: 19671 - DNA, 99 bp, Zea mays
  Clone ID: LIB3151-048-P1-K1-D1
gttgtatcaagagagaaacataaattgtgtttaagagtacaaacacccagaggggagaggagttctttgtttttgtgctacttgtatttattacactat

SEQ ID NO: 19672 - DNA, 387 bp, Zea mays
  Clone ID: LIB3151-048-P1-K1-D10
gtcagcctagcaattagctcatcgactccagattggagaactcgacaccatgaaggtgctgatcgttgcccttgctctcctggcgctcgctgcgagcgccgcctccagtacaagcggcggctgtggctgccagacaccaccgtttcatctaccgcctccgttctatatgccgcctccgttctatctgccgccgcagcagcagccgcagccatggcaataccccactcaaccaccgcagctaagcccgtgccagcagttcggatcctgcggcgtcggcagcgtcggcagcccgttcctgggccagtgcgtcgagttcctgaggcaccagtgcagcccggcggcgacgccctacggctcgccacagtgccaggcgctgcagcagcagtg

SEQ ID NO: 19673 - DNA, 397 bp, Zea mays
  Clone ID: LIB3151-048-P1-K1-D11
cagaagctcaaatactgatctcactgatccagtatggctatggcaaaggcaggcgcgccgagggtctcggcggcccagctggtgactctcgggctatcactcctctgcgctgtcgccggcccggccgtcgcgcagaactgcggctgccagccaaacgtatgctgcagcaagtttggctactgcggcacgaccgacgagtactgcggcgacgggtgccagtcgggcccgtgccgctcgggcggcggcggcagcagtggcggcggtggtgcgaacgtggctagcgtcgtcaccggctccttcttcaacggcatcaagagccaggccgcgagcgggtgcgagggcaagaacttatacacccggagcgcgttcctgagcgccgacaaggcgtacccaggct

SEQ ID NO: 19674 - DNA, 393 bp, Zea mays
  Clone ID: LIB3151-048-P1-K1-D12
cggacgcgtgggcagaaacacaccaagcgaagcacattagcaacaacctaacaacaatggctaccaagatattatccctccttgcgcttcttgcgctttttgcgagcgcaacaaatgcgttcattattccacaatgctcacttgctccaagttccattattacacaattgctcccaccagctacttcaatgggcttcgaacacccagctgcgcaagcctataggctacaacaagcaattgcggcgagcgtcttacaacaaccaattttccagttgcaacaacaatccttggcacatctaacaatacaaaccatcgcaacgcaacagcaacaacaattgctaccagcactgagccacctagccatggtgaaccctgccgtctacttgcaacagc

SEQ ID NO: 19675 - DNA, 394 bp, Zea mays
  Clone ID: LIB3151-048-P1-K1-D3
gttttgttgatgatgtcgagctcattcttggcaaggtagaagatgctaccaaagtacagacgcttctgttcagtgccactctgccagattgggtgaataagctctctatgaggtttctgaaagttgacaggaaaacagttgatcttgtcggtaatgagaaactgaaggccagtgcatctgttaagcaccttgctcttcattgtaacaaggcagcaagggcacaagttattccagacattatccgatgttatagccatggaggtcgaaccatcatcttcactgagacgaaagattctgcatcagagctttctggtttgattcctggatcccgtgccttgcatggagatgtagcgcaagcgcagcgtgaagtaaatttttgctgattccgtagcgg

SEQ ID NO: 19676 - DNA, 398 bp, Zea mays
  Clone ID: LIB3151-048-P1-K1-D4
ctccttttgctcggaacgcacacaccgtccggtccccgatctccgatcccctcgtcgatccaaagatgcagatcttcgtcaagaccctcactggaaagactatcaccctcgaggtggagtcttttgacaccattgacaacgtcaaggccaagatccaggacaaggagggcatccccccggaccagcagcggctcatctttgctggcaagcagctcgaggacgggcgcacacttgccgactacaacattcagaaggagagcaccctccaccttgttctccgtctcaggggaggcatgcagatcttcgtcaagaccctcactggaaagactatcacccttgaggtggagtcttctgacaccatcgacaacgtcaaggccaagatccaggacaaggagggc

SEQ ID NO: 19677 - DNA, 392 bp, Zea mays
  Clone ID: LIB3151-048-P1-K1-D5
ggaccattaacctaatctcctacagagcgcagaagaacccgatcgacaccatgggggtgttgctcgttgccctctctctcctggctctcgctgcgagcgccacctccacgcatacaaacggctgatgagagtgtcagccaccgccgcccggtcatctaccgccgccggtgcatctgccaactccgggttaactgacacctacggtgcatctaccaccgccggaccacatgccagcgccggaccaccctgtctcgtacgaccatgtgccgacgacggcaatctgccgtcgcaccatgccactaccctactaaacgcgaccaggactaaggccactcccaggcacaaccatgcccgtgccaacagtcgcatacaagcccgtgccagctgcaggg

SEQ ID NO: 19678 - DNA, 402 bp, Zea mays
  Clone ID: LIB3151-048-P1-K1-D6
tgagcattcagaaacacaccaagcgaagcacattagcaacaacctaacaacaatggctaccaagatattatccctccttgcgcttcttgcgctttttgcgagcgcaacaaatgcgttcattattccacaatgctcacttgctccaagttccattattacacagttcctcccaccagttacttcaatgggcttcgaacacccagctgtgcaagcctataggctacaacaagcaattgcggcgagcgtcttacaacaaccaatttcccagttgcaacaacaatccttggcacatctaacaatacaaaccatcgcaacgcaacagcaacaacaattcctaccagcactgagccacctagccatggtgaaccctgccgactacttgcaacagcagttgcttgcatc

SEQ ID NO: 19679 - DNA, 188 bp, Zea mays
  Clone ID: LIB3151-048-P1-K1-D8
gttctagatcgcgagctgccgccctttttttttttttttttaatattgttagtgtttttttttttttttttttttttttttatttttttttattatattttaactgccaaatatacactatgatcttatcagaataataattttgccttatattactaaattcaattataaaacatacccttaacgtg

SEQ ID NO: 19680 - DNA, 396 bp, Zea mays
  Clone ID: LIB3151-048-P1-K1-E10
agaccaacaagcaacatagaaagtggaatacagtagcaacaatagagcaacaatggcggccaagatattttccatccttatgctccttgctctttctgcatgtgttgctaacgcgaccatttttcctcaatactcacaagctcctatagctgcccttcttcccccataccttccatcaatgaccgcttcagtatgtgaaaacccagcccttcaaccctacaggctccaacaagcaatcgcaacaagcaacttacctttatcacccctgttctttcaacaatcgccagccctatctttggtgcagtcattggtacaaaccatcagggcacaacagctgcagcaactcgtgctaccagtgatcagccaagtagctctggcaaacctttctccctactc

SEQ ID NO: 19681 - DNA, 323 bp, Zea mays
  Clone ID: LIB3151-048-P1-K1-E11
actatgtgctgtagtatagccggtggctagctagctagttgagtcatttagcggggatgattgagtaataatgtgtcacgcatcaccatgggtggcagtgtcagtgtgagcaatgacctgtatgaacaattgtaatgaaatgaaataagtattgttccatccctataccatttcatcatatgttccgattcagtctgtgaaaacccagccctcttatccctaatggctccaacaagcattataaacatgcttcttaccttttatatccctgttttttaaacaatggacagccctatcttttgtgcatttattggtacaaacca

SEQ ID NO: 19682 - DNA, 397 bp, Zea mays
  Clone ID: LIB3151-048-P1-K1-E12
attttgagcattcagaaacacaccaagcgaagcacattagcaacaacctaacaacaatggctaccaagatattatccctccttgcgcttcttgcgctttttgcgagcgcaacaaatgcgttcattattccacaatgctcacttgctccaagttccattattacacagttcctcccaccagttacttcaatgggcttcgaacacccagctgtgcaagcctataggctacaacaagcaattgcggcgagcgtcttacaacaaccaatttcccagttgcaacaacaatccttggcacatctaacaatacaaaccatcgcaacgcaacagcaacaacaattcctaccagcactgagccacctagccatggtgaaccctgccgcctacttgcaacagcagtt

SEQ ID NO: 19683 - DNA, 58 bp, Zea mays
  unsure at all n locations
  Clone ID: LIB3151-048-P1-K1-E2
ggggngggaagcgaaaaggggaaagaggggaggaggggggggaaagcacgaggggggg

SEQ ID NO: 19684 - DNA, 72 bp, Zea mays
  Clone ID: LIB3151-048-P1-K1-E3
gttgcataaaacgaaaagccttaattattcagtagcgcacaaaaaccataacggcagtgtgggtctttgtct

SEQ ID NO: 19685 - DNA, 382 bp, Zea mays
  Clone ID: LIB3151-048-P1-K1-E4
gttgcattaaacgaacatcattcatagtgcagtagcgcacaaaaaatctcaggggagtgtgcttcttggtctttgtgctcctggtgctcacgacactatcatcctccaatgatacaaaggtcctattgggagaacttcttacaacattacctttgatgggccagtgtaccggaagctgacaaccaagggtgttaagctacaggaccacaacacgcaatcgcatccaccaccttaccttaatcagcctagtggcttcaacaaccatgaggcctattacaacaatcacctgtctgggatttattgtctcaaaaaaatagggaccaaaaactacaacaacttggtgtagtcaaccttgctgccaactcttagcaacagcagtttt

SEQ ID NO: 19686 - DNA, 123 bp, Zea mays
  Clone ID: LIB3151-048-P1-K1-E5
gttccattaaactaaaatcacacatagcgcagaagagcacaaacaaccccaggggagggatcctctttgtcttttcgctccttgtgctcactacaatatccgcccgccagcatacaaacggcc

SEQ ID NO: 19687 - DNA, 301 bp, Zea mays
  Clone ID: LIB3151-048-P1-K1-E8
aaagaacacagtaactagctagcagatcaaacaagtagcgacagctcgacaaagatttgtgagagtgatccggcgctgagaagagatggctaagatcgccgcagccgccgcggcggcggcggcgctgtgcttcgcggccctggtggccgtggccgtctgccaaggcgaggtcgagcggcagaggctcagggacctgcagtgctggcaggaggtccaggagagcccgctcgacgcgtgccgtcaggtcctcgaccggcagctaaccggcggcggtgttggcggcccgttccggtggggcacc

SEQ ID NO: 19688 - DNA, 108 bp, Zea mays
  Clone ID: LIB3151-048-P1-K1-E9
aaagaacacagtaactagctagctgatcaaacaagtagcgacagctcgacaaagatttgtgagagtgatccggcgctttaaagagatggctaagtatcgccgctagcc

SEQ ID NO: 19689 - DNA, 61 bp, Zea mays
  Clone ID: LIB3151-048-P1-K1-F1
gttgaataaatctagaatcacacctagtgaattacagctgaaacaacctcacagcagtggt

SEQ ID NO: 19690 - DNA, 393 bp, Zea mays
  Clone ID: LIB3151-048-P1-K1-F10
gaccaacaagcaacatagaaagtggaatccagtagcaacaatagagcaacaatggagaccaagatattttccctccttatgctccttgctctttctacatgtgttgctaacgcgacaattttccctcaatgctcacaagctcctatagcttccctttttcccccataccttccatcaattatagcttcagtatgtgaaaacccagctcttcaaccatataggcttcaacaagcaatcgcagcaagcaacatacctttatcgcccttgttgtgtcaacaatcgccagccctatctttggtgcagtcattggtacaaaccatcagggcacaacagctgcagcaactcgtgctacctgtgatcaaccaagtagctctggcaaacctttctccctac

SEQ ID NO: 19691 - DNA, 389 bp, Zea mays
  Clone ID: LIB3151-048-P1-K1-F11
gaccaacacgcagcatttgaagtgtgatgcaggtggagcaattcttgggcaatggttaccaccacatgattgctccttatacaccttgctctttatacatgagttgctcacgcgacaattatgcctcaatgctcacatgctcctatagcttccctttttgccccatacctgctattaatcataggtccacaatatgtaaacccaggtctgcatccatataggctctaacaagcaatgagagtaaggagcatacctctatcgcccttgatgtgtcaacaatcggcagccttatctttggtgcagtcattgttacacaccatcagggcacaacaaatgaagtaactcgtgctacctgcgatcaagcaagtagatctggagaacctttcttc

SEQ ID NO: 19692 - DNA, 148 bp, Zea mays
  Clone ID: LIB3151-048-P1-K1-F12
cttgctttgacaaacccagcagtgttctaccaacaacccatcattggtggtgccctcttttagatttcttatgagttatagttcaataataaagttttttatctgatgtttgtggcttcccagaaataagaaagtacatttctagatt

SEQ ID NO: 19693 - DNA, 200 bp, Zea mays
  Clone ID: LIB3151-048-P1-K1-F5
gttgaattaaacgaaaatcatacattgtgcagtacagtcggatcaataccaggggagagatggtcttggtattttagctccttgtgctaactacaatctcatggtccacggatacaaacgtcctatgcgcacagatgcttgatagctcacagttttcatcgaagagcaccagattttgaaattccagattgaaaaacaca

SEQ ID NO: 19694 - DNA, 395 bp, Zea mays
  Clone ID: LIB3151-048-P1-K1-F7
gtccaactagcaacatagaaagcacaatagtgtaccaacaatggcagccaaaatgtttcgcctccttatgctccttgatctttctgcaagtgctgctacggtgaccattttcccacaatgctcacaagctcctatagcttgccttcttcccccgtacctctcaccagcggagtcttcggtttgtgaaaacccaattcttcaaccctataggatccaacaggccatcgcagctggcatcttacctttatgacccttgtttctccaacaatcatgagtcctattacagcagttacctttggtgcatttattggcacaaaacatcagggcacaacaactacaacaacttgtgctagcaaaccttgctgtctactctcagcaacaacagcttctttcat

SEQ ID NO: 19695 - DNA, 349 bp, Zea mays
  Clone ID: LIB3151-048-P1-K1-F8
gtcgaaccaaactaagaacatgcatattccaacaccgacaacaaaattctagggctttcttatgcttgtccttctttctgcatgtgctactaacgataccatggccccacaatgataacagtctcatatcactatccttcttcttccatacctctcaccatcaatgaccgaaatttgtgaatacgcaattgaacaacactaaacgattcaaaatgcaatggaaataaaaagactaccatcatcagccttgctgctgcaacacccgcgagacttattacaataattccacttgctttatgtgctggcacatgatattaaggtacaagaacaacaactacttgaactcagc

SEQ ID NO: 19696 - DNA, 185 bp, Zea mays
  Clone ID: LIB3151-048-P1-K1-F9
taagaaagtactttcttagttctgggacacaaacttcattattgaactatcactaatatggaaccgtaacaggcatgctaccattatcagccttgttccttcaacaaccgtgtgccctattacagcagttaccttttgtccatttggtggcacaatacatttgggggcaacaaataccacagctt

SEQ ID NO: 19697 - DNA, 73 bp, Zea mays
  Clone ID: LIB3151-048-P1-K1-G1
gttgagtgaagcgaggaggataaaaaggggaggagagtagaaacaatcccaggggagtggtggtgttgggttt

SEQ ID NO: 19698 - DNA, 119 bp, Zea mays
  Clone ID: LIB3151-048-P1-K1-G11
gatcgatcgccacagccaacaccactctccaaggcgacccgacattcgtcaggaggaaggaataaactcactgcctgccagcgaagggtgagaagtgttctgctccgtttaccagtgct

SEQ ID NO: 19699 - DNA, 392 bp, Zea mays
  Clone ID: LIB3151-048-P1-K1-G12
tttccctcaatgctcacaagctcctattgctttccttctttccccataccttccatcaatgatagcttcagtgtgtgaaaacccagctcttgaaccctataggctccaacaagcaatcgcagcaagcaacatacctttatcacccttgtttcaacaatcgccagccctatctttggtgcagtcattggtacaaaccatcagggcacagcagctgcagcaacttgtgctacctgtgatcaaccaagtagctctggcaaacctttctccctactctcagcaacaacaattttttccattcaaccaactgtctacattgaaccgtgctgcttatttgcagcaacaactattaccattcagccagctagctactgcctactctcagcaacaacaac

SEQ ID NO: 19700 - DNA, 133 bp, Zea mays
  Clone ID: LIB3151-048-P1-K1-G2
gttgaattaaacgaacatcatacattgtgcagaagagtacaaacaatatgaggggaatggtggtctttggtttttagctccctgtgctagctacaatctcagggtcccaggataaatacgtcctaatgggcag

SEQ ID NO: 19701 - DNA, 401 bp, Zea mays
  Clone ID: LIB3151-048-P1-K1-G3
ggtcttcagaccattagctttatctactccagagcgcagaagaacccgatcgacaccatgagggtgttgctcgttgccctcgctctcctggctctcgctgcgagcgccacctccacgcatacaagcggcggctgcggctgtcagccaccgtcgtcggttcatctaccgccgccggtgcatctgccaccttcggttcacctgccacctccggtgcatctcccaccgccggtccacctgccgtcgccggttcacctgccaccgtcggtccatgtgccgccgacggttcatctgtcgtcgtcaccatgccactaccctactcaaccgacccggcctcagtctcattcccagccacacccatgcccgtgccaacagccgcattcaagcccgtgccagctgcaggg

SEQ ID NO: 19702 - DNA, 84 bp, Zea mays
  Clone ID: LIB3151-048-P1-K1-G4
gttgtataaaacataaatcatatatagtgcagaacggtgaaaaaaactatagggacaaggtgggctttgctttttgtcttcatg

SEQ ID NO: 19703 - DNA, 208 bp, Zea mays
  Clone ID: LIB3151-048-P1-K1-G5
gttcttcagaccattagctttatctactccagtgcgcagaagaacccgatcgtcaccatgagggtgttgcttgtcgtcctctctatcctggatctagctgtgagtgccatcttcacgcttacaagcggtggctgtggttgacagccaccgttgtctttcattttaccgccgttgtagcatatgtcaacttcggttcatcttgccatct

SEQ ID NO: 19704 - DNA, 354 bp, Zea mays
  Clone ID: LIB3151-048-P1-K1-G7
ctcgcgcgatcggaagatcataacatgtacatcaccgtcagcacccttgttgcgccaacatccgctagtcctattacatgagtgagcttttgccgatacgatggcacaacacttctggggagatcatctacatctccttgtgctagcatacctttctgcatactcgtagcaacattgggatcttccatttgaccaactgtatgcattgcactctgctgctgacttgcaacaacaaccaccattcagcttgctagttcctgcctacccccagctatttcttccattcaaccaactagaagtgttggaccatgatgtttatttacagcagcaacaactactaccattcagccagct

SEQ ID NO: 19705 - DNA, 375 bp, Zea mays
  Clone ID: LIB3151-048-P1-K1-G8
ctagcaacatagaaagcacaatagtgttccaacaatggcagccaaaatattttgcttccttatgctccttggtctttctgcaagtgttgctaccgcaaccattttcccacaatgctcacaagctcctatagctttccttcttcccccatacctctcaccagcggtgtcttcaatgtgtgaaaacccaattgttcaaccctacaggatccaacaggcaatcgcaacaggcatcttaccattatcacccttgtttcttcaacaaccgtcagccctattacagcagttacctttggtccatttggtggcacaaaacattatggcacaacaactacaacaacttgtgctagcaaactttgctgcatactctcagcaaca

SEQ ID NO: 19706 - DNA, 399 bp, Zea mays
  Clone ID: LIB3151-048-P1-K1-G9
agcgaagcgcactagcaacaacctaacaacaacggctaccaagatattatccctccttgcgcttcttgcgctttttgcgagcgcaacaaatgcgtccattatttcacaacgctgacttgctgctagttccattattccacagttcctaccaccagttacttcaatggccttcgaacacccagctgcgcaagcctataggctacaacaagcgattgcggtgagcgcattacaacaaccaattgcccaattgcaacaacaactacttggcacatctaacactacaaaccattgcaacgcatcagcagcaacagttcctaccagcactgagccaactagccatggtgaaccctgtcgtctacttgtaacagcagctgcttgcattcaacccacttgctctag

SEQ ID NO: 19707 - DNA, 91 bp, Zea mays
  Clone ID: LIB3151-048-P1-K1-H1
gttgcatcaaacgagcatcacaaatagcgcagaagagtacaaacaatctcaggggaaagagattctagttcttttcgctccttgatctctc

SEQ ID NO: 19708 - DNA, 363 bp, Zea mays
  Clone ID: LIB3151-048-P1-K1-H10
agaccattagctttatctactccagagcgcagaagaacccgatcgacaccatgagggtgttgctcgttgccctcgctctcctggctctcgctgcgagcgccacctccacgcatacaagcggcggctgcgggtgtcagccaccgccgccggttcatctaccgccgccggtgcatctgccaccttcggttcacctgccacctccggtgcatataccaccgccggtgcacctggcggcggcggtccacctttcatcgccggtgcatgtgacgccgtcggctcattttgcgccgacaccatgccactaccctactaaaccgcaccggtctcagactcatcccagccacacccatgcccgtgccaaca

SEQ ID NO: 19709 - DNA, 355 bp, Zea mays
  unsure at all n locations
  Clone ID: LIB3151-048-P1-K1-H12
atcgagaccaacatgcaacattgaaagtggagtacattcgnaacaatagagcaacaatggcggccaagatattttccattcttatgctccttgctctttctgcatgcgctgctaacgcgaccatttttcctcaatactcacaagctcctatagctgaccttcttcccccataccttgcattaatgaccgcttcagtatgtgaaaacccagcccttcaaccctacaggctccaacaagcaatcgcatcaagcaacttacctttatcacccctgttctttcaacaatcgccagccctatgtttggtgcagtcattgttacaaaccattagggcacaacagctgcagcaactcgtgct

SEQ ID NO: 19710 - DNA, 333 bp, Zea mays
  Clone ID: LIB3151-048-P1-K1-H2
gttgaattaaactagaaacataaatagtgcattacagcacaaacaatccaaggggaaagattgtcttggcttatttgctccttgtgctacttaggatattcttggtgccaagattcttacgtccttgtatcacattgcttaatacttcaactcttttctcatagtgtaacgatttttgttgttccacgatttaacaacacatatgcatgcactcaggtttcttcactaacgtaaatcaatcagtaaggttgcttgaaccacccttgtggcaaatttaacaaccatttatttggggatatttgtctccaaatgatcgttacagaaaagaacaac

SEQ ID NO: 19711 - DNA, 133 bp, Zea mays
  Clone ID: LIB3151-048-P1-K1-H3
gttgcatcaaactagaatcataaatagtgcagtaccgtccaaacaattccacgggaaagtttttctttgcttattagctcctggatcttcttacgagatcatggtgccacgcattcttccggcatactatcag

SEQ ID NO: 19712 - DNA, 239 bp, Zea mays
  Clone ID: LIB3151-048-P1-K1-H6
gttccagtaaactaggagcacacatagtgcagtagagtgcaaacaacctcacgggaatggttttctttgtttttttgctccctgtgcttgctacgctctgagcgggcgaaactatcgccgtcatcgtatcagattccttagttgcccatactttcctactcacagcacagatccttgttgttacctgattgaacaacacttaggcatgcacccaggtgcctccacaacaacacgacagt

SEQ ID NO: 19713 - DNA, 396 bp, Zea mays
  Clone ID: LIB3151-048-P1-K1-H9
aagcaacatagaaagtggaatccagtctcaacaatagagcaacaatggcgaccaagatattttccctccttatgctccttgctctttctgcatgtgttgctaacgcgacaattttccctcaatgctcacaagcttctatagcttcccttcttcccccataccttccatcaatgatagcttcagtatgtgaaaacccagctcttcaaccctataggctccaacaagcaatcgcagcaagcaacatacctttatcacccttgtttcaacaatcgccagccctatctttggtgcagtcattggtacaaaccatcagggcacagcagctgcagcaactcgtgctacctgtgatcaaccaagtagctctggcaaacctttctccctactctcagcaacaac

SEQ ID NO: 19714 - DNA, 219 bp, Zea mays
  unsure at all n locations
  Clone ID: LIB3151-049-P1-K1-A1
acgattgagaccaacaagcaacatataaagtggattccagtatcaacaatagagcaacaggggagtccaagatatttttcctccttatgctccttgctctttatacatgtgttgttatcgcgacaatttttccttaatgtttatatgctcctatagcttctctttnttgtnctataccttttcataaattattgctttaatctgtgaaaacccaatttt

SEQ ID NO: 19715 - DNA, 335 bp, Zea mays
  Clone ID: LIB3151-049-P1-K1-A10
ccatcgagcaacatagaacgcacaattgtgtgccaacaacggccgacataatatcacgccttactatgctccttggtctttctgcaagtgctgctacagctaccagcgcaccaaattgctcgaatgctcctataggttcacttgctccacggtacattataccagcggtgctcttcaccatgtgctaaaccgagttttgaacactacaggatccaacagtctatgctagatcacgtattagctgtatgagtcttataacatccacaatcataagcgctacaacattagttgccacagttgactatactgacactagaaatgaagcagcaacaact

SEQ ID NO: 19716 - DNA, 273 bp, Zea mays
  Clone ID: LIB3151-049-P1-K1-A12
tcgggacgtcaggctagcaattagctcatatactccagattggggaactcgacaccatgaaggtgctgatcggtgcccttgctctcctggcgctcgctgcgagcgccgcctccagtacaagcggggggtgtgggtgacagacaccaccgcttcatataccgccttcgttctatatgccgccttcgttctatctggcgccgcagcagcagccgcagccatgggaataccccactcaaccaccgcagctaatcccgtgccagcagttcggattct

SEQ ID NO: 19717 - DNA, 417 bp, Zea mays
  Clone ID: LIB3151-049-P1-K1-A2
attgagaccaactagcaacatagaaagcacaatagtgtaccaacaatggcagccaaaatattttgcctccttatgctccttggtctttctgcaagtgctgctacggcgaccattttcccgcaatgctcgcaagctcctatagcttcccttcttcccccgtacctctcaccagcggtgtcttcggtatgtgaaaacccaattcttcaaccctacaggatccaacaggcaatcgcagctggcatcttacctttatcacccttgttcctccaacaatcatcagccctattacaacagttacctttggtgcatttattggcacaaaacatcagggcacaacaactacaacaacttgtgctagcaaaccttgctgcctactctcagcaacagcagtttcttccattcaaccaactaggttca

SEQ ID NO: 19718 - DNA, 380 bp, Zea mays
  Clone ID: LIB3151-049-P1-K1-A3
aaggggactacagagccacctatagagcaccattggcggccaacatatgcagcatacttatgctgcttgctcatgctgcatgtgttgctaacgcgaccagttatcgtgactactcacacgctccgatagctggcttttatagctcatacctttcatcaatgactgttacagtatgtgaatacccagtgcgttaaccctacaggctacaactagcagttgcaacaggcaactgaccttgatcactcatgttcattcaacaagcgccagccatatctatgatgcagatatcggcacaaaccatcggggcacatcatgtgacacaacatgagctaccagtgattacaacagcttgtgttagcaaactttgttgcttattttaa

SEQ ID NO: 19719 - DNA, 417 bp, Zea mays
  Clone ID: LIB3151-049-P1-K1-A4
aagcgaagcgcactagcaacaacctaacaacaatggctaccaagatattagccctccttgcgcttcttgcccttttagtgagcgcaacaaatgcgttcattattccacagtgctcacttgctcctagtgccattattccacagttcctcccaccagttacttcaatgggcttcgaacatccagccgtgcaagcctacaggctacaactagcgcttgcggcgagcgtcttacaacaaccaattgcccaattgcaacaacaatccttggcacatctaaacctacaaaccatcgcaacgcaacagcaacaacagtttctgccatcactgagccacctagccgtggtgaaccctgtcgcctacttgcaacagcagctacttgcatccaacccacttgctctggcgaacgtagctgcatacc

SEQ ID NO: 19720 - DNA, 156 bp, Zea mays
  Clone ID: LIB3151-049-P1-K1-A5
tcgatcttaatagatctagatccaaagcggccgctttagccaccaaaatttgaagtctccgggtcttgcacgcttagacagctagcccagtattggcgttcatctatggatactatttacctgcatctagagcaagtttctaatagttctctttat

SEQ ID NO: 19721 - DNA, 415 bp, Zea mays
  Clone ID: LIB3151-049-P1-K1-A6
attgagaccaacaagcaacatagaaagtggaatccagtagcaacaatagagcaacaatggagaccaagatattttccctccttatgctccttgctctttctacatgtgttgctaacgcgacaattttccctcaatgctcacaagctcctatagcttccctttttcccccataccttccatcaattatagcttcagtatgtgaaaacccagctcttcaaccatataggcttcaacaagcaatcgcagcaagcaacatacctttatcgcccttgttgtgtcaacaatcgccagccctatctttggtgcagtcattggtacaaaccatcagggcacaacagctgcagcaactcgtgctacctgtgatcaaccaagtagctctggcaaacctttctccctactctccgcaacaacaatt

SEQ ID NO: 19722 - DNA, 343 bp, Zea mays
  Clone ID: LIB3151-049-P1-K1-A7
cggacgcgtgggcggacgcgtggctgagcctatccataaactcgtgactaggggcaatcgcgacgaaccactcttcagcttttattccccggcgctaactgtgacaagaattgcatgatctcggcaaaaatgctggtacctcacttgcgcctgacaacaccaatgatttctcagtccttgaaggaatgatagccttagtattcgaaaaccctgctcttcaaaactatatgctgaaacaagcagcagcagcaaggaacatacctttataccccttgctgtcacatcaatcgccagccgtatgtttggtgcagccagttgttcaaaccatcacggcacaacagat

SEQ ID NO: 19723 - DNA, 335 bp, Zea mays
  unsure at all n locations
  Clone ID: LIB3151-049-P1-K1-A9
attttgagcattcagaaacacaccaagcgaagcacattagcaacaacctaacaacaatggctaccaagatattatccctccttgcgcttcttgcgctttttgcgagcgcaacaaatgcgttcattattccacaatgctcacttgctccaagttccattattacacagttcctcccaccagttacttcaatgggcttcgaacacccagctgtgcaagcctataggctacaacaagcaattgcggcgagcgtcttacaacaaccaatttccaagtgcaacaaacaatcttggcacatctaacaatacanaccatcgcaacgcaacagcaacaacaat

SEQ ID NO: 19724 - DNA, 396 bp, Zea mays
  Clone ID: LIB3151-049-P1-K1-B10
cgcacgcttccttagcaacgtactaggtggacactagtcgcaacaatagagctacaatggttaccaagagatttaacttccttatgctattagctgtgtctgcatgtgttagctaacgtagacagatgaatggctgaatgctgacatgcatcctatagctatgcgtcattgcccacatgcattgcataagggctagtttgatgatgaggaaacgcaaagtagttaactcctataagcattgaacaggcgatcacagcaagcaacatacatttatcacacttgtttaaacaatggctagccatatgttgggtgtaatgattggtgcagactattaaggctcagcagctgcagcgactatggctacctgagatcaaccaagtacgatgtgcaaacctt

SEQ ID NO: 19725 - DNA, 407 bp, Zea mays
  Clone ID: LIB3151-049-P1-K1-B11
ctcggattcccaaacgccaaaatctcgttgtcacgcccacgcaccgccatcgttcgcttcctttcgtcaactccacttctcttctccgcgtcacctcctcttcgccgccggcgacgctccaccgggcagccagccatggatgaggagtacgacgtgatcgtgctaggcacggggctcaaggagtgcatcctcagcggtctcctctctgtggacggcctcaaggttttgcatatggacagaaatgactactatggaggagattccacctcgctcaaccttaatcagctctggaagaggtttagaggggaagacaaaccctcagcacatctaggtgcaagcagagactacaatgtggacatggtgccaaagtttatgatggcaaatgggacattggttcgaaccctcat

SEQ ID NO: 19726 - DNA, 411 bp, Zea mays
  Clone ID: LIB3151-049-P1-K1-B12
ggacgtcagcctagcaattagctcatcgactccagattggagaactcgacaccatgaaggtgctgatcgttgcccttgctctcctggcgctcgctgcgagcgccgcctccagtacaagcggcggctgtggctgccagacaccaccgtttcatctaccgcctccgttctatatgccgcctccgttctatctgccgccgcagcagcagccgcagccatggcaataccccactcaaccaccgcagctaagcccgtgccagcagttcggatcctgcggcgtcggcagcgtcggcagcccgttcctgggccagtgcgtcgagttcctgaggcaccagtgcagcccggcggcgacgccctacggctcgccacagtgccaggcgctgcagcagcagtgctgccaccagatcaggcagg

SEQ ID NO: 19727 - DNA, 360 bp, Zea mays
  Clone ID: LIB3151-049-P1-K1-B2
ccaactagcatcatagaaagctcaataacgttccaacaatggctgctaaaatattttgactacttatgcttctaggtctttctgcaacgtctgctaccgctaccattttcccacaaggctcacaagcattctatagcttccattcttcccccgtacctatcaccaacagtgtgtatggtatgtgaaaacccaattctttaaccctacaggatccaacaggcaatcgcagctggcatcttacctttatcacccttggtcctccaacaatcatcagccctattacagcagttacctttggtgcatttattggcacaaaacatgagggcacaacaactacaacaacttgtgctagcaaacctt

SEQ ID NO: 19728 - DNA, 390 bp, Zea mays
  Clone ID: LIB3151-049-P1-K1-B3
cccacgcgtccgcaacaacctaacaacaatggctaccaagatattatccctccttgcgcttcttgcgctttttgcgagcgcaacaaatgcgttcattattccacaatgctcacttgctccaagttccattattacacagttccttccaccagttacttcaatgggcttcgaacacccagctgtgcaagcctataggctacaacaagcaattgcggcgagcgtcttacaacaaccaatttcccagttgcaacaacaatccttggcacatctaacaatacaaaccatcgcaacgcaacagcaacaacaattcctaccagctctgagccacctagccatggtgaactctgccggctacttgcaacagcagatgcttgcatcaaacccacttgc

SEQ ID NO: 19729 - DNA, 199 bp, Zea mays
  Clone ID: LIB3151-049-P1-K1-B4
agaccattagctttatctactccagagcgcagaagaacccgatcgacaccatgagggtgttgctcgttgccctcgctctcctggctctcgctgcgagcgccaccttcacgcatacaagcggcggctgcggctgccagccaccgacgccggttcatctaccgccgccggtgcatctgccaccttcgggtcacctgccacc

SEQ ID NO: 19730 - DNA, 103 bp, Zea mays
  Clone ID: LIB3151-049-P1-K1-B5
ggtacggaattggagtttcggcctagacgtacgcgaccgcagtcgtagtcacttagcatcatcgactgcagattggagaactcgccaccatgaaggtgctgat

SEQ ID NO: 19731 - DNA, 415 bp, Zea mays
  Clone ID: LIB3151-049-P1-K1-B6
cgtcagcctagcaattagctcatcgactccagattggagaactcgacaccatgaaggtgctgatcgttgcccttgctctcctggcgctcgctgcgagcgccgcctccagtacaagcggcggctgtggctgccagacaccaccgtttcatctaccgcctccgttctatatgccgcctccgttctatctgccgccgcagcagcagccgcagccatggcaataccccactcaaccaccgcagctaagcccgtgccagcagttcggatcctgcggcgtcggcagcgtcggcagcccgttcctgggccagtgcgtcgagttcctgaggcaccagtgcagcccggcggcgacgccctacggctcgccacagtgccaggcgctgcagcagcagtgctgccaccagatcaggcaggtggagcc

SEQ ID NO: 19732 - DNA, 363 bp, Zea mays
  unsure at all n locations
  Clone ID: LIB3151-049-P1-K1-B7
cccacgcgtccgatgagggtgttgctcgttgccctcgctctcctggctctcgctgcgagcgccacctccacgcatacaagcggcggctgcggctgccagccaccgccgccggttcatctaccgccgccggtgcatctgccacctccggttcacctgccacctccggtgcatctcccaccgccggtccacctgccgccgccggtccacctgccaccgtcggtccatgtgccgccgccggttcatctgccgncgtcaccatgccactaccctactcaaccgccccggcctcagcctcatccccagccacacccatgcccgggccaacagccgcattcaagcccgtgccagcttgagggaacctgc

SEQ ID NO: 19733 - DNA, 363 bp, Zea mays
  Clone ID: LIB3151-049-P1-K1-B8
aatattttgagcattcaaaaacacacaaagggaagtgcactagcaacttcctaacaacaatggctaccaagatattagccctccttgcgctcctttccctttcagtgagcgcaacaactgcattcattattccacaatgctcacttgctcctaatgccattattccacagttcctcccatcagttacatcaatgggcatcgaacaccctattgtgcaagcctataggctacaacaagcgcttgcggcgagcgtcttacaacaaccgtttgcccaattacaacaacaatccttggcacatttaaccatacaaaccattgcaacacaactagagcaacagtttgtgcccgcattgagccaactag

SEQ ID NO: 19734 - DNA, 411 bp, Zea mays
  Clone ID: LIB3151-049-P1-K1-B9
gagaccaactagcaacatagaaagcacaatagtgtaccaacaatggcagccaaaatattttgcctccttatgctccttggtctttctgcaagtgctgctacggcgaccattttcccgaaatgctcgcaagctcctatagcttcccttcttcccccgtacctctcaccagcggtgtcttcggtatgtgaaaacccaattcttcaaccctacaggatccaacaggcaatcacagctggcatcttacctttatcacccttgttcctccaacaatcatcagccctattacatcagttacctttggtgcatttattggcacaaaacatcagggcacaacaactacaacaacttgtgctagcaaaccttgctgcctactctcagcaacagcagtttcttccattcaaccaactagct

SEQ ID NO: 19735 - DNA, 322 bp, Zea mays
  Clone ID: LIB3151-049-P1-K1-C1
gctacatagacagaacaaccgagtaacagcattggcagccaaaatatttcgcgggcagattattgtgggtctttatgctacttgtgctacctgaacgatttgataacgctgcttatatgctaatatggttgtaaggtcttattcgataccttttatcagcggtgtgtttaatgcgcgaagacgcgcgtggttaaaaccacaagttagaacatgcaatgagcgcatgagtactaccaagatgacagttgctcctacaacacttggcacatctaacactacaaacccttgtagcgcattagcctcaacaaaacataatggcaca

SEQ ID NO: 19736 - DNA, 409 bp, Zea mays
  unsure at all n locations
  Clone ID: LIB3151-049-P1-K1-C10
cagaccattagctttatctactccagagcgcagaagaacccgatcgacaccatgagggtgttgctcgttgccctcgctctcctggctctcgctgcgagcgccacctccacgcatacaagcggcggctgcggctgccagccaccgccgccggttcatctaccgccgccggtgcatctgccacctccggttcacctgccacctccggtgcatctcccaccgccggtccacctgccgccgccggtccacctgccaccgccggtccatgtgccgccgccggttcatctgccgccgccaccatgccactaccctactcaaccgccccggcctcagcctcatccccagccacacccatgcccgtgccaacagccgcatncaagcccgtgccagctgcagggaacctgcggcgttg

SEQ ID NO: 19737 - DNA, 407 bp, Zea mays
  Clone ID: LIB3151-049-P1-K1-C11
ctcggctcctcgagtcttcgcagccgctcactgcgtgcgccaaaagcagcagcagctccagccgtcgccgtcttcactctccagtctccaccactgctccgcgcgcgccggatcgcgggagggcaggcggacgaggaggcgggatgagtctcttcgggctcggacgaaaccagaagacattccgccccaagacgagcgctccatcaggtagcaagggagcacagctccgtaagcacatagatgccactctcggcagcggaaaccttacggaagctgtgaggttgcctgctggagaggatatcaatgaatggcttgcggtgaatactgtggatttctgtaaccaagttaatatgctgtatggcacactcacagaattttgcacacctgagagctgtacgacaatgaca

SEQ ID NO: 19738 - DNA, 401 bp, Zea mays
  Clone ID: LIB3151-049-P1-K1-C12
gcaacatagaaagtggaatccagtagcaacaatagagcaacaatggagaccaagatattttccctccttatgctccttgctctttctacatgtgttgctaacgcgacaattttccctcaatgctcacaagctcctatagcttccctttttcccccataccttccatcaattatagcttcagtatgtgaaaacccagctcttcaaccatataggcttcaacaagcaatcgcagcaagcaacatacctttatcgcccttgttgtgtcaacaatcgccagccctatctttggtgcagtcattggtacaaaccatcagggcacaacagctgcagcaactcgtgctacctgtgatcaaccaagtagctctggcaaacctttctccctactctccgcaacaacaatt

SEQ ID NO: 19739 - DNA, 364 bp, Zea mays
  unsure at all n locations
  Clone ID: LIB3151-049-P1-K1-C2
gccttacttcatcaccagccgagggacacccgcggaaccgtcgctcgagctcgcgcctgaacccctcaaactctgccaaatttcggcaaacccagccggtcggacctcggaacacattgccaaaccaaccgggccggtcgacacaagccgcatcccgtggcgatggacctggcgttgagcgaccttgcggcgctggacgcggcggagctggtccgtgtatcggcgtagataccgcgcgcagatacgtgcacattctggctggtcaccggctgtctnagattcctgctgtgctagggcgtgctggcgcattggctctagagccagcccatactgatccgcatacaggtcgccacctactccgagc

SEQ ID NO: 19740 - DNA, 412 bp, Zea mays
  Clone ID: LIB3151-049-P1-K1-C3
caattagctcatcgactccagattggagaactcgacaccatgaaggtgctgatcgttgcccttgctctcctggcgctcgctgcgagcgccgcctccagtacaagcggcggctgtggctgccagacaccaccgtttcatctaccgcctccgttctatatgccgcctccgttctatctgccgccgcagcagcagccgcagccatggcaataccccactcaaccaccgcagctaagcccgtgccagcagttcggatcctgcggcgtcggcagcgtcggcagcccgttcctgggccagtgcgtcgagttcctgaggcaccagtgcagcccggcggcgacgccctacggctcgccacagtgccaggcgctgcagcagcagtgctgccaccagatcaggcaggtggagcccgtgcacc

SEQ ID NO: 19741 - DNA, 392 bp, Zea mays
  unsure at all n locations
  Clone ID: LIB3151-049-P1-K1-C4
ggtcttcagaccattagctttatctactccagagcgcagaagaacccgatcgacaccatgagggtgttgctcgttgccctcgctctcctggctctcgctgcgagcgccacctgcacgcatacaagcggcggctgcggttgacagccaccgccgtcggttcatctaccgccgtcggtgcatctgccacctccggttcacctgccaccttcggtgcatctaccaccgccggtacacctgccgccgccggtccacctgtcaccggcggtccatgtgccgacgccggttcatctgccgncggcaccatgccactaccctactcaaccgccccgggcttagccttatcctcagccacacccatgcccgtgccaacagccgtatccaagcccgtgcca

SEQ ID NO: 19742 - DNA, 260 bp, Zea mays
  Clone ID: LIB3151-049-P1-K1-C5
catctagagaacattatctatatctacttaatagcgacgacgaacccgatcggcacggtgattgcgctgctggcgcggcttgctatcctgccatatcggtgcaagcgccacctgctcgtatacaactacccgctgacattgacagccaccgttctacgttcattttccgacgtcattgtatatgtagtttcccaagaagagcgctccatcaggttgtaagggagcacagttacctaagcacatagattccactctcagca

SEQ ID NO: 19743 - DNA, 97 bp, Zea mays
  Clone ID: LIB3151-049-P1-K1-C6
acttagtatgttttttgtcatgatacatgtttatacactgttgccccctcctttatgctattttgcaaaggagatgttgtcgaaattttatatatgg

SEQ ID NO: 19744 - DNA, 411 bp, Zea mays; identical to SEQ ID NO: 19734
  Clone ID: LIB3151-049-P1-K1-C7

SEQ ID NO: 19745 - DNA, 412 bp, Zea mays
  Clone ID: LIB3151-049-P1-K1-C8
agaaacacaccaagcgaagcgcactatcaacaacctaacaacaatggctaccaagatattagccctccttgcgcttcttgcccttttagtgagcgcaacaaatgcgttcattattccacagtgctcacttgctcctagtgccattattccacagttcctcccaccagttacttcaatgggcttcgaacatccagccgtgcaagcctacaggctacaactagcgcttgcggcgagcgtcttacaacaaccaattgcccaattgcaacaacaatccttggcacatctaaacctacaaaccatcgcaacgcaacagcaacaacagtttctgccatcactgagccacctagccgtggtgaaccctgtcgtctacttgcaacagcagctacttgcattcaacccacttgctctggcg

SEQ ID NO: 19746 - DNA, 74 bp, Zea mays
  Clone ID: LIB3151-049-P1-K1-C9
aatagatttggcagtgactgagcgaccgatccgtggggtaccttgtcttctactttcaacaggagcgacgtgta

SEQ ID NO: 19747 - DNA, 243 bp, Zea mays
  Clone ID: LIB3151-049-P1-K1-D1
agctcattaaatcaatatactagagatagcaactaaaccggttctaaaccatgcgcgtgttgttctgagacttggttatactggcatcttactgaacaagccgaatctaggcatacaagacgaaacagatccagccagccaccacaagactatataccgactccaagcaatgtgcctccaaagaactagtcacagtcgacgcaaggctccactcaaacacccgagctaaatcagcaccagcag

SEQ ID NO: 19748 - DNA, 407 bp, Zea mays
  Clone ID: LIB3151-049-P1-K1-D10
aggtgtcctacatgtctctcgatcagatttctccattgacattcagcattggcaatacaatgaagcgtatatcagtgattgtttcatcaatcattatcttccacactcctgtccgcgctgtcaatgcactgggagctgccattgccatccttggcacattcctgtactctcaggcaaaggtgtgaggcgggccatgatgacgaacgtctgcagaatcagtagcaagcactaaatccaattttgcttgttccagtggcatgtagatatcgggttaggtttccgtatgagagtttgtaataatggatgaatggctctgctgtttcgttcttgtttgttggccagactcaaatccataggctatgaactgcggtcgagtgtacctgaataatactgtaatggagaattcg

SEQ ID NO: 19749 - DNA, 284 bp, Zea mays
  Clone ID: LIB3151-049-P1-K1-D11
aggtgtcctacatgtctcttgttcatatttctccattgacattcaggattggcaatacaatgaagcgtatatcagcgattgcttcatcaatcattatcttccacactcctgtccgtgctgttaatgcactgggagctgtcattgccatccttggcacattcctgtactctcaggcataggtgtgcggcggtccatgatgacgaacgtttgcagaattagtagcaagcactaaaatcaattctgcttgttccagtgtcatgtatatttctgcttaggttttcgtt

SEQ ID NO: 19750 - DNA, 413 bp, Zea mays
  Clone ID: LIB3151-049-P1-K1-D12
aaaccagatacaggggtttgcagtagattcatgagagcaacaatggaatccgaaatattagccatcgtcatgctaattgttctttatacatgagttgctaacacgacaatgttcgctcaatgattacacgctgagataggctttcctattttcgccataccttccatcaattatagctacagtatgggaaaacccagctctccaaccatataggctgtaacaagcaatcgctaaaagcaacatacctgtatcgaccttgttgtgtaaacaatcgccagccctatctttggtgcagtcattggtacaaaccatcagggcacaacagctgcagcaactcgtgctacctgagatcaaccaagtagctatggcaaacctttctccctactctccgcaacaacaatttcttccattca

SEQ ID NO: 19751 - DNA, 417 bp, Zea mays
  unsure at all n locations
  Clone ID: LIB3151-049-P1-K1-D2
gtcttcagaccattagctttatctactccagagcgcagaagaacccgatcgacaccatgagggtgttgctcgttgccctcgctctcctggctctcgctgcgagcgccacctncacgcatacaagcggcggctgcggctgccagccaccgccgccggttcatctaccgccgccggtgcatctgccacctncggttcacctgccacctccggtgcatctcccaccgccggtccacctgccgccgccggtccacctgccaccgtcggtccatgtgccgccgccggttcatctgccgccgccaccatgccactaccctactcaaccgccccggcctcagcctcatccccagccacacccatgcccgtgccaacagccgcatccaagcccgtgccagctgcagggaacctgcggcgttggca

SEQ ID NO: 19752 - DNA, 416 bp, Zea mays
  unsure at all n locations
  Clone ID: LIB3151-049-P1-K1-D3
agaccattagctttatctactccagagcgcagaagaacccgatcgacaccatgagggtgttgctcgttgccctcgctctcctggctctcgctgcgagcgccacctccacgcatacaagcggcggctgcggctgccagccaccgccgccggttcatctaccgccgccggtgcatctgccacctccggttcacctgccacctccggtgcatcttccaccgccggtccacctgccgccgccggtccacctgccaccgccggtccatgtgccgccgccggttcatctgccgccgccaccatgccactaccctactcaaccgccccggcctcagcctcatccccagccacacccatgcccgtgccaacagccgcatncaagcccgtgccagctgcagggaacctgcggcgttggcagcacc

SEQ ID NO: 19753 - DNA, 415 bp, Zea mays
  Clone ID: LIB3151-049-P1-K1-D4
ctagcaacatagaaagcacaatagtgtaccaacaatggcagccaaaatattttgcctccttatgctccttggtctttctgcaagtgctgctacggcgaccattttcccgcaatgctcgcaagctcctatagcttcccttcttcccccgtacctctcaccagcggtgtcttcggtatgtgaaaacccaattcttcaaccctacaggatccaacaggcaatcgcagctggcatcttacctttatcacccttgttcctccaacaatcatcagccctattacaacagttacctttggtgcatttattggcacaaaacatcagggcacaacaactacaacaacttgtgctagcaaaccttgctgcctactctcagcaacagcagtttcttccattcaaccaactaggttcattgaactct

SEQ ID NO: 19754 - DNA, 388 bp, Zea mays
  unsure at all n locations
  Clone ID: LIB3151-049-P1-K1-D5
cagaccattagctttatctactccagagcgcagaagaacccgatcgacaccatgagggtgttgctcgttgccctcgctctcctggctctcgctgcgagcgccacctccacgcatacaagcggcggctgcggctgccagccaccgccgtcggttcatctaccgccgccggtgcatctgccacctccggttcacctgccacctccggtgcatctaccaccgccggtccacctgccgacgccggtccacctgccaccgccggtccatgtgccgccgacggatcatctgccgtcgtcaccatgccactaccctactcaaccgccccgagctcagacttatnctcaggcacacccatgcccgtgccaacagtcagatacaagcccgtgccaga

SEQ ID NO: 19755 - DNA, 418 bp, Zea mays
  Clone ID: LIB3151-049-P1-K1-D6
cacaaacgctgagcgcctgagcctgctctcgcggtctaggagatggcgttgatcacgaatgtctctgactatgaggagcttgcaaagcagaagctgcctaagatggtttatgacttctatgccgggggtgcagaagaccagtggacactcaaggagaataaggaggcattctccaagattctgtttcgaccacgggtgctgattgatgtgtctcatattgacatgtctacaagtatattgggttacaaaatttccatgcctattatggtggctcccactgctttgcacaaactagcccaccaagaaggagaggttgcttctgcccaggcagcagctgctgcaggaactataatgacgttgtcttcatggtcatcttgcagcattgaggaagttagctcaattgcaccaggactccgtt

SEQ ID NO: 19756 - DNA, 406 bp, Zea mays
  Clone ID: LIB3151-049-P1-K1-D7
cccacgcgtccgccttcttcctacctgccattctcccatccaacacagcaggacgtctcctcctcctccctcccgcttctatcgccgtcttcatttccaggacgcgtcgaattcctccatctaccgcgccggccgccgaggcccgagggggaggaggatgctgggcgccgcgaggaggcagcttggatccggtcccatgctgggacaggttttgcgaaggctccgcccggcggcggcggctgaggtggcgaggggctactccgctgcggcgaaggagatgactgtccgtgatgcattgaactctgcactggatgaagagatgtctgctgatccttcagtttttctgatgggagaagaggttggagagtatcaaggtgcatacaagatttctaagggcttgcttgac

SEQ ID NO: 19757 - DNA, 408 bp, Zea mays
  Clone ID: LIB3151-049-P1-K1-D8
gaccattagctttatctactctagagcgcagaagaacccgatcgacaccatgagggtgttgctcgctgccttcgctttctatggctctcgttgatgagcgccacctgcacgcatacaagcatgtacctgcgcgcgtgccagccagcgcccgagggggaggtaggatgctgggcgcccagaggaggcagcttggatacgggcccatgctgggacaggttttgcgaaggctccgcccggcggcggcggctgaggtggcgaggggctacttcgttgcggcgaaggagatgactgtccgtgatgcattgaactctgcactggatgaagagatgtctgctgatcctttagtttttctgatgggagaagaggttggagagtatcaaggtgcatacaagatttctaagggcttgc

SEQ ID NO: 19758 - DNA, 216 bp, Zea mays
  Clone ID: LIB3151-049-P1-K1-D9
ccaagctcaaaaaagcgccgccaggcgccaatgtagcagccacgacagcaagaggttgtcgccggctgccttcgcttttatggcgcgtatagccagaccgcgcatcagcagtaccggccgcgcaggcccggggaggggtgctggcgcgggggcagtggaccgccatgctgacagttggaagtcgcggggggcgtgagggagggctctcgtggggaa

SEQ ID NO: 19759 - DNA, 189 bp, Zea mays
  Clone ID: LIB3151-049-P1-K1-E1
ctagttctagatcgcgagcggacgactttttttttattattttctatagagggacattttaatcaatatagtgattattttctaataatcacatgtcttattgagtgcaccattatcgagtacatcttatattaagtctaaaagttggcatctataatcttgtgttgctagattgacaattcaggtttg

SEQ ID NO: 19760 - DNA, 410 bp, Zea mays
  Clone ID: LIB3151-049-P1-K1-E10
ggtcttgagaccatgcgctctatctacttcagagcgcagaagaacccgatcgacaccatgagggtgttgctcgttgccctcgctctcctggctctcgctgcgagcgccacctccacgcatacaagcggcggctgcggctgccagccaccgccgccggttcatctaccgccgccggtgcatctgccacctccggttcacctgccacctccggtgcatcttccaccgccggtccacctgccgtcgccggtccacctgccaccgtcggttcatgtgccgccggcggttcatctgccgacgccaccatgccactaccctactcaaccgccccggactgagccttatccccagtcacacccatgcccgtgccaacaggcgcattcaagcccgtgccagctggagggaacctgcgg

SEQ ID NO: 19761 - DNA, 414 bp, Zea mays
  Clone ID: LIB3151-049-P1-K1-E11
cagaggtgtctcagcacgtggagctgatgtcggctaccagagggttgaccatgctggatatgctggtggtcgtggtggccgcacagtagccgctggtgcacctgcaaaatgagggacaacatagctgttgcacgtctcctgtgtcgttcggtggccctcagattgttttgaagttggcatagagatccatcaattggtcgagtgcggggttaccagaaaaggctggatacaaatttttggagttcctgttcatcactatttttgcaggcaacaaaagctaaaaaagtgattactaattgagtaattgtagaatagacacctattcagatgtagttttagttttggtcgtcggttggtgagcctgtcatttttgcaatgttatgttactgctagtattcatttattgtgtcgatt

SEQ ID NO: 19762 - DNA, 400 bp, Zea mays
  unsure at all n locations
  Clone ID: LIB3151-049-P1-K1-E12
cagaccattagctttatctactccagagcgcagaagaacccgatcgacaccatgagggtgttgctcgttgccctcgctctcctggctctcgctgcgagcgccacctccacgcatacaagcggcggctgcggctgccagccaccgccgccggttcatctaccgccgccggtgcatctgccacctccggttcacctgccacctccggtgcatctcccaccgccggtccacctgccgtcgccggtccacctgccaccgccggtccatgtgccgccgccggttcatctgccgncgccaccatgccactaccctactcaaccgccccggcctcagcctcatccccagccacacccatgcccgtgccaacagccgcatncaagcccgtgccagctgcagggaacct

SEQ ID NO: 19763 - DNA, 419 bp, Zea mays
  Clone ID: LIB3151-049-P1-K1-E2
caaatgcgttcattattccacaatgctcacttgctcctagtgccattattccacagttcctcccaccagttacttcaatgggcttcgaacacctagctgtgcaagccaacatgcaacaacaagcgcttgcggcgagcgtcttacaacaaccaattgcccaattgcaacaacaatccttgccacatctaacaatacaagccatcacaacgcaacagcaacaacagttcctaccagcactgagccacctagccatggtgaaccctgccgcctacttgcaagagcagctgcttgcatccaacccacttgctctggcgaacgtagttgcaaaccagcaacaacaacagctacaacagtttctgccaacgctcagtcaactagccatggtgaaccctgccgcctacgtacaacaacaacaactg

SEQ ID NO: 19764 - DNA, 412 bp, Zea mays
  Clone ID: LIB3151-049-P1-K1-E3
agaccattagctttatctactacagagcgcataagaacccgatcgacaccatgagggtgttgctcgttgcccttgctctcctggctctcgctgggagcgccacctccacgaatacaagcgagggcttaggggtgagcgtattacaacagtctaatgtacaatcgtaacaagcatatgttgacacatgtaaaaatacaagccatcagagcgcatcagtaacaacagctgctaccagcagtgagccaactagccatggggaaccatggcgactacttgtaagagcaggtgcttgcatgcaacacacttgctgtggcgaacgtagttgtataccagtatcaacaacagcttcaacagtttatggtaacatttaggaaactagccatggaaaaccctgtcaactacgtacaataac

SEQ ID NO: 19765 - DNA, 412 bp, Zea mays
  Clone ID: LIB3151-049-P1-K1-E4
ttgagaccaactagcaacatagaaagcacaatagtgtaccaacaatggcagccaaaatattttgcttccttatgctccttggtctttctgcaagtgttgctaccgcaaccattttcccacaatgctcacaagctcctatagcttcccttcttcccccatacctctcaccagcggtgtcttcaatgtgtgaaaacccaattgttcaaccctacaggatccaacaggcaatcgcaacaggcatcttaccattatcacccttgttcctccaacaaccgtcagccctattacagcagttacctttggtccatttggtggcacaaaacatcagggcacaacaactacaacaacttgtgctagcaaaccttgctgcatactctcagcaacatcagtttcttccattcaaccaactggc

SEQ ID NO: 19766 - DNA, 266 bp, Zea mays
  Clone ID: LIB3151-049-P1-K1-E5
agaccattagctttatctactccagagcgcagaagaacccgatcgacaccatgagggtgttgctcgttgccctcgctctcctggctctcgctgcgagcgccacctccacgcatacaagcggcggctgcggctgccagccaccgccgccggttcatctaccgccgccggtgcatctgccacctccggttcacctgccaccttcggtgcatctcccaccgccggtccacctgtcgccggcggtccacctgccatcgtcgttccatgtg

SEQ ID NO: 19767 - DNA, 403 bp, Zea mays
  Clone ID: LIB3151-049-P1-K1-E6
caagcaacatagaaagtggaatccagtagcaacaatagagcaacaatggcgaccaagatattttccctccttatgctccttgctctttctgcatgtgttgctaacgcgacaattttccctcaatgctcacaagctcctatagcttcccttcttcccccataccttccatcaatgatagcttcagtatgtgaaaacccagctcttcaaccctataggctccaacaagcaatcgcagcaagcaacatacctttatcacccttgtttcaacaatcgccagccctatctttggtgcagtcattggtacaaaccatcagggcacagcagctgcagcaactcgtgctacctgtgatcaaccaagtagctctggcaaacctttttccctactctcagcaacaacaatttc

SEQ ID NO: 19768 - DNA, 283 bp, Zea mays
  Clone ID: LIB3151-049-P1-K1-E7
atcgaccgatcgatcgctactttcattactacccgtcgaggcgacgcgacagctcgtcaggaggaaggaataaactcactgccagccagtgaagggggagaagtgtactgttccgttgaccagtgcgcgcaccgtccggcagggctgttcatcttgtcgacgaccagtggattaatcggcatggtgtttttggtcacgtcttagttcgttccattcttttattctctgtgcgtttttttttctttttttttaacaatagtttatttatatgttttttattttt

SEQ ID NO: 19769 - DNA, 131 bp, Zea mays
  Clone ID: LIB3151-049-P1-K1-E8
gccaacaccacccgtcgaggctacgttacagccgtcaggaggaaggaataaactcactgccagccagtgaagggggagaagtgtactgttccgtcgaccagtgcgcgcaccgaccggcagggctgctcatc

SEQ ID NO: 19770 - DNA, 412 bp, Zea mays
  Clone ID: LIB3151-049-P1-K1-E9
gagtggagctcttccacggccgcggtggagatggcggcgaatctggaggacgtgccgtcactggatctgatgcacgagctgctccgccgcatgaagtgcagctccaagcccgacaagcgcctcatcctcatcggtccacctggctctggaaagggaactcagtctcctattatcaaggatgaatattgcttgtgccatttagccactggtgacatgctgagggctgctgtggcggccaagacacctctaggtatcaaagctaaagaagctatgaataagggagagcttgtttcagatgatttggttgtgggcattattgatgaagctatgaagaaaccctcatgccagaaaggtttcattcttgatggctttcctagaactgtgactcaagcacagaagcttgatgagatgt

SEQ ID NO: 19771 - DNA, 329 bp, Zea mays
  Clone ID: LIB3151-049-P1-K1-F1
ggtacggattcgagatttcggcccagacctacgcgtgcgaagaggagctattacacggacggggttgagatggcagcaaatgtggagcacgggccaccactgtatctgacgcactagctgttctggcgcatgaagtgcgtgttcaagaccgacaagtgcttcatccttattgaccagctggttttggaaagggaactcagtctcctattatcaaggatgaatattgcttgtgccatttagccactggtgacatgctgagggctgttgtggcggccaagacacctttaggtatcaaagctaaagaagctatgaataagggagagctcgtt

SEQ ID NO: 19772 - DNA, 413 bp, Zea mays
  unsure at all n locations
  Clone ID: LIB3151-049-P1-K1-F11
attttgagcattcagaaacacaccaagcgaagcacattagcaacaacctaacaacaatggctaccaagatattatccctccttgcgcttcttgcgctttttgcgagcgcaacaaatgcgttcattattccacaatgctcacttgctccaagttccattattacacagttcctcccaccagttacttcaatgggcttcgaacacccagctgtgcaagcctataggctacaacaagcaattgcggcgagcgtcttacaacaaccaatttcccagttgcaacaacaatccttggcacatctaacaatacaaaccatcgcaacgcaacagcaacaacaattcctaccagcactgagccacctagccatggtgaaccctgccgnctacttgcaacagcagttgcttgcatcaaaccca

SEQ ID NO: 19773 - DNA, 293 bp, Zea mays
  Clone ID: LIB3151-049-P1-K1-F12
gcagatcaaacaagtagcgacagctcgacaaagatttgtgagagtgatccggcgctgagaagagatggctaagatcgccgcagccgccgcgggggcggcggcgctgtgcttagcggccctggtggccgtggacgtctgccaaggcgaggtcgagcggcatacgctcagggacctgcagtgctggcaggaggtccaggagagcccgcttgacgcgtgccgtcaggtacttgaccggcatgtaaccggcggctgcgaccgaccactgttccggtggtgcaacgggctcttggtgc

SEQ ID NO: 19774 - DNA, 417 bp, Zea mays
  Clone ID: LIB3151-049-P1-K1-F2
gcaacatagaaagtggaatccagtagcaacaatagagcaacaatggcgaccaagatattttccctccttatgctccttgctctttctgcatgtgttgctaacgcgacaattttccctcaatgctcacaagctcctatagcttcccttcttcccccataccttccatcaatgatagcttcagtatgtgaaaacccagctcttcaaccctataggctccaacaagcaatcgcagcaagcaacatacctttatcacccttgtttcaacaatcgccagccctatctttggtgcagtcattggtacaaaccatcagggcacagcagctgcagcaactcgtgctacctgtgatcaaccaagtagctctggcaaacctttctccctactctcagcaacaacaatttcttccattcaaccaactg

SEQ ID NO: 19775 - DNA, 382 bp, Zea mays
  Clone ID: LIB3151-049-P1-K1-F3
attttgagcattgagaaacacaccaagcgaagcgcactagcaacaacctaacaacaatggctaccaagatattatccctccttgcgcttcttgcgctttttgcgagcgcaacaaatgcgttcattattccacaatgctcacttgctcctagttccattattccacagatccttcgaccaggtacttgaatggccttcgaacacccagctgtgcaagcctataggctacaacaagcgattgcggcgagcgtcttacaacaaccaattgtccaatggcaacaacaatgcttggcacatgtaacaatacataccatcgcaacgcatcagcaacaacagtttctaccagcactgagccacctagccatggtgaaccctgtcgtcta

SEQ ID NO: 19776 - DNA, 355 bp, Zea mays
  unsure at all n locations
  Clone ID: LIB3151-049-P1-K1-F4
agaccattagctttatctactccagagcgcagaagaacccgatcgacaccatgagggtgttgctcgttgccctcgctctcctggctctcgctgcgagcgccacctccacgcatacaagcggcggctgcggctgccagccaccgccgccggttcatctaccgccgccggtgcatctgccaccttcggttcacctgccacctccggtgcatctcccaccgccggtccacctgccgncgccggtccacctgccaccgccggtccatgtgccgccgccggttcatctgccgccgncaccatgccactaccctactcaaccgccccggccttaacctcatcctcagccacacccatgccc

SEQ ID NO: 19777 - DNA, 337 bp, Zea mays
  Clone ID: LIB3151-049-P1-K1-F5
gcaccttctgcttgctctgcggggaaggagagagagagagagccagcgagagatctagtaaagtggctagtacgtatgctcttgaacgaagatgttggcggtgtttaccggcctactggtggatgatactgatgagctgctatagctgcgcttcatttcgcctaccttcaatatatgaccgtttcagtttgtgagaacctatctgttcatctctacacgctccaacacgtgatagcatcaagccactgaccacgatcactactgttatatcaacaatggactgctctatcttaggtgcatacattgctacaaaccatgatggtacatcagctggagc

SEQ ID NO: 19778 - DNA, 196 bp, Zea mays
  Clone ID: LIB3151-049-P1-K1-F6
tagcaattagctcatcgactccagattggagaactcgacaccatgaaggtgctgatcgttgcccttgctctcctggcgctcgctgcgagcgccgtctccagtacaagcggcggctgtggctgccatacaccaccgtttcatctaccgccttcgttctatatgccgccttcgatctatctgtcgcagcagaagcagc

SEQ ID NO: 19779 - DNA, 404 bp, Zea mays
  Clone ID: LIB3151-049-P1-K1-F8
agaaagcacaatagtgtaccaacaatggcagccaaaatattttgcttccttatgctccttggtctttctgcaagtgttgctaccgcaaccattttcccacaatgctcacaagctcctatagcttcccttcttcccccatacctctcaccagcggtgtcttcaatgtgtgaaaacccaattgttcaaccctacaggatccaacaggcaatcgcaacaggcatcttaccattatcacccttgttcctccaacaaccgtcagccctattacagcagttacctttggtccatttggtggcacaaaacatcagggcacaacaactacaacaacttgtgctagcaaaccttgctgcatactctcagcaacatcagtttcttccattcaaccaactggctgcattgaactc

SEQ ID NO: 19780 - DNA, 277 bp, Zea mays
  Clone ID: LIB3151-049-P1-K1-F9
tagaaagcacaatagggtaccaacaatggcagccaaaatatttggcttccttatgctcctgggtctttctgcaggggctgttaccgaaaccattttccaacaatgctaacaggctctaatagcttccttttttccccaatacctttaaccagcggggttttaaggatgtgaaaacccaatgcttaaaccttacaggatccaacaggcaatcgcagaaggcatttaacattaataaccctggttcttccaacaacgcgaagccttattacagcagtta

SEQ ID NO: 19781 - DNA, 164 bp, Zea mays
  Clone ID: LIB3151-049-P1-K1-G1
tgcgtacccttatgaggaccccgattatccaaagaatttcagaaaaacgattgggagaatagtgtcaattgagtaccagataccagagtatgttcacatattccaagactgcagacagctgctggctcggagctttttctcaaattctgtaaagagaatcataa

SEQ ID NO: 19782 - DNA, 369 bp, Zea mays
  unsure at all n locations
  Clone ID: LIB3151-049-P1-K1-G10
cgcatccaagcccgtgccagctgcagggaacctgcggcgttggcagcaccccgatcctgggccagtgcgtcgagtttctgaggcatcagtgcagcccgacggcgacgccctactgctcgcctcagtgccagtcgttgcggcagcagtgttgccagcagctcaggcaggtggagccgcagcaccggtaccaggcgatcttcggcttggtcctccagtccatcctgcagcagcagccgcaaagcggccaggtcgcggngctgttggcggcgcagatagcgcagcaactgacggcgatgtgcggcctgcagcagccgactccatgcccctacgctgctgccggcggtgtnccccactgaagaactatgtgct

SEQ ID NO: 19783 - DNA, 370 bp, Zea mays
  unsure at all n locations
  Clone ID: LIB3151-049-P1-K1-G11
gatcagcaaagcggcagtgcgtagagaggatcgtcgaacagaacagcatgaagatggtcatcgttctcgtcgtgtgcctggctctgtcagctgccagcgcctctgcaatgcagatgccctgcccctgcgcggggctgcagggcttgtacggcgctggcgccggcctgacgacgatgatgggcgccggcgggctgtacccctacgcggagtacctgaggcagccgcagtgcagcccgctggcggcggcgccctactacgccgggtgtgggcagacgagcgccatgtaccagccgttccggcaacagtgctgncagcagcagatgaagatgatggacgtgcagtccgtcgcgcagcagctgcagatgatgat

SEQ ID NO: 19784 - DNA, 386 bp, Zea mays
  Clone ID: LIB3151-049-P1-K1-G12
gagaccaactagcaacatagaaagcacaatagtgtaccaacaatggcagccaaaatattttgcttccttatgctccttggtctttctgcaagtgctgctaccgcaaccattttcccacaatgctcacaagctcctatagcttcctttcttgccccatacctctcaccagcggtgtcttcagtatgtgaaaacccaattcttcaaccctacaggatccaacaggcaatcgcagcaggcatcttacctttatcacccttgttcctccaacaaccgtcagccctattacagcagttacctttggtgcatttgttggcacaaaacatcaaggcacaacaactacaacaacttgtgctaggaaaccttgctgcctactctcagcaacagca

SEQ ID NO: 19785 - DNA, 401 bp, Zea mays
  Clone ID: LIB3151-049-P1-K1-G2
gttatagttcaataataaagttttttgtctgatgtttgtggcttcccagaaataagaaagtacatttctaaaaaaaaaaaaaaaaaaaaaaaaaaaaataaaaaaaaaaaaaaaaaaaaaaaaaaaaaaaaaaaaaataaaaaaaaaaaaaaatttaaaacaaaaaaaaaaaaaaaagggaaaaaaaaagaattcaaaaaaaaaaaaaaaaaataaaaaaaaagggggcgcccttttaaaggaacaaaagtttaataacccttgattgaaaaaaaaaaatttttaaaaggggccccaaaaataaaaacaagggaccggggttaaaaaacgtggagccggaaaaaccccgggcgatccaaaaataaactctttgaaacaaaacccctttattccaaggtgcg

SEQ ID NO: 19786 - DNA, 261 bp, Zea mays
  Clone ID: LIB3151-049-P1-K1-G3
ctgggtcttcagaccattagctttatctactccagagcgcagaagaacccgatcgacaccatgagggtgttgctcgttgccctcgctctcctggctctcgctgcgagcgccaccttcacgcatacaagcggcggctgcggctgccagccaccgccgccggttcatttaccgccgccggtgcatctgccacctccggttcacctgccaccttcggtgcatctgccaccgtttgtacgaattgatgtcttcggaccactttgt

SEQ ID NO: 19787 - DNA, 354 bp, Zea mays
  Clone ID: LIB3151-049-P1-K1-G4
caacaagcaacatagaaagtggaatccagtagcaacaatagagcaacaatggcgaccaagatattttccctccttatgctccttgctctttctgcatgtgttgctaacgcgacaattttccctcaatgctcacaagctcctatagcttcccttcttcccccataccttccatcaatgatagcttcagtatgtgaaaacccagctcttcaaccctataggctccaacaagcaatcgcagcaagcaacatacctttatcacccttgtttcaacaatcgccagccctatctttggtgcagtcattggtacaaaccatcagggcacagcagctgcagcaactcgtgctacctgtgatc

SEQ ID NO: 19788 - DNA, 97 bp, Zea mays
  unsure at all n locations
  Clone ID: LIB3151-049-P1-K1-G5
ccggncggaatccgggtcgacccagcgnccgctgggaggnnagaccaagagcgngagcgacgcgagagcgcaaaagaacccgagcgacaccangagg

SEQ ID NO: 19789 - DNA, 395 bp, Zea mays
  unsure at all n locations
  Clone ID: LIB3151-049-P1-K1-G6
attattgagaccaactagcaacatagaaagcacagtagtgtaccaacaatggcagccaaaatattttgcttccttatgctccttggtctttctgcaagtgttgctaccgcaaccattttcccacaatgctcacaagctcctatagcttcccttcttcccccatacctctcaccagcggtgtcttcaatgtgtgaaaacccaattgttcaaccctacaggatccaacaggcaatcgcaacaggcatcttaccattatcacccttgttcctccaacaaccgtcagccctattacagcagttacctttggtccatttggtggcacaaaacatcagggcacaacaactacaacaactngtgctagcaaaccttgctgcatactctcagcaacatcagtt

SEQ ID NO: 19790 - DNA, 177 bp, Zea mays
  Clone ID: LIB3151-049-P1-K1-H10
tgccacctccggtgcatctcccaccactgggtcttcagaccattagctttatctactccagagcgcagaagaacccgatcgacaccatgagggtgttgctcgttgccctcgctctcctggctctcgctgcgagcgccacctccacgcatacaagcggcggctgcggctgccagccac

SEQ ID NO: 19791 - DNA, 323 bp, Zea mays
  Clone ID: LIB3151-049-P1-K1-H12
gcattcataaacacaccaagcgaagcgcactagcaacgacctaacaacaagggctaccaagatattagccctccttgcgcttcttgccctttttgtgagcgcaacaaatgcgttcattattccacaatgctcacttgctcctagtgccattattccacagttcctcccaccagttacttcaatgggcttcgaacacctagctgtgcaagccaacatgcaacaacaagcgcttgcggcgagcgttttacaacaaccaattgcccaattggaacaacaattcttgccacatttaacaaatcaagccattacaacgcaacagcaac

SEQ ID NO: 19792 - DNA, 346 bp, Zea mays
  Clone ID: LIB3151-049-P1-K1-H4
attgagaccaactagcaacatagaaagcacaatagtgtaccaacaatggcagccaaaatattttgcctccttatgctccttggtctttctgcaagtgctgctacggcgaccattttcccgaaatgctcgcaagctcctatagcttcctttcttcccccgtacctctcaccagcggtgtcttcggtatgtgaaaacccaattcttcaaccctacaggatccaacaggcaatcacagctggcatcttacctttatcacccttgttcctccaacaatcatcagccctattacatcagttacctttggtgcatttattggcacaaaacattagggcacaacaactacaac

SEQ ID NO: 19793 - DNA, 404 bp, Zea mays
  Clone ID: LIB3151-049-P1-K1-H5
cttcatggcgtcttaattactgtgtaggaggagaggtcacaactttgtttcacttggatcggccaatgtatttattaggatatcttgcaaaccaaagccgtgtctatcttattgataagcaatttaatgttgtggggtatactttactccttagtttgatcgaatataaaacacttgtaatgcgtggggatttcgatcgcgcgaatgatgttttatcatctataccaaaggaacaatatgacagtgtggcgcgtttcttggaatcacggtgaatgttggaggaagccctcgagatagcaactgacactaattacagatttgacctggctgtgcaacttggtcgacttggaaatgcgaaggcgattgctaccgaggtgcaaagtgagtccaagtggaagatatta

SEQ ID NO: 19794 - DNA, 377 bp, Zea mays
  Clone ID: LIB3151-049-P1-K1-H6
gttcaatgcagctaccattcagccagctatctgctgcctacccccagcaatttcttccattcaaccaactgacagcggtgaaccctgctatctacttgcaggcacaacagctactaccatttaaccaacttgtcgggagcccttatgccttcttactgcaacaacagcttctaccattccatctgcaagctgtggcaaacattgctgctttcttgagacaacaacatttgttgccattttacccacaggttgtgggaaacattaatgccttcttgcaacagcaacaattgctaccattctacccacagaatgtggcaaacattgttgccttcttacaacaacaacaattgttgccatttagccaacatgctttgacg

SEQ ID NO: 19795 - DNA, 355 bp, Zea mays
  Clone ID: LIB3151-049-P1-K1-H7
agaccattagctttatgtactacagagcgcagaagaacccgatcgacaccatgagggtgttgctggatgccatctgtctcctggctctcgctgcgagcgccacctacacgcatacaagcggggggtgtgggtgccagccaccggcgacggtttatttatcgcctgaggggcatctgccacctacggatcacctgccacctctgatgcatgtggcaccgccggaccacctgccggcgacggtccacttggcactgccggtccatgtgccgccgccggctcatatggcgccggcaccatgccagtaccctactcaaacggcgcggcctcagactgatacgcagccacatgcatgccc

SEQ ID NO: 19796 - DNA, 242 bp, Zea mays
  Clone ID: LIB3151-049-P1-K1-H8
aattcttcaaccctacaggatccaacaggcaatcgcagcaggcatattacctgtatcacccttgttcctccaacaaccgtcagccctattacagcagttacctttggtgcattagatggcacaaaacatcatggcacaacaactacaacaactagtgctaggaaaccttgctgtcgactcttagcaacagcagtgctcatttcatttaaatatctggccgcattgaactctgctgtctattt

SEQ ID NO: 19797 - DNA, 170 bp, Zea mays
  Clone ID: LIB3151-049-P1-K1-H9
aaaacattaactctatatgattcatttttcagaagcaccaggcagatgacaggaggtacttgtgggacgccaacaactcttcatggctcattactgcgagcgatcattttgagcatatacaaggctgtaggatgttaaatgtaataacacccgacgatgtatttattgta

SEQ ID NO: 19798 - DNA, 270 bp, Zea mays
  Clone ID: LIB3151-050-P1-K1-A1
gcgcttgcggcgagcgtcttacaacaaccaattaaccaattgcaacaacaatccttggcacatctaaccatacaaaccatcgcaacacaacagcaacaacagttcctaccagcactgagccaactagatgtggtgaaccctgtcgcctacttgcaacagcaggtgcttgcattcaacccacttgctctggcaaacgtagctgcataccaacaacaacaacaattgcaacagtttctgccagcgctcaatcaactagccatggtgaaccct

SEQ ID NO: 19799 - DNA, 418 bp, Zea mays
  unsure at all n locations
  Clone ID: LIB3151-050-P1-K1-A10
caactagcaacatagaaagcacaatagtgtaccaacaatggcagccaaaatattttgcctccttatgctccttggtatttctgcaagtgctgctacggcgaccattttcccgcaatgctcacaagctcctatagcttcccttcttcccccgtacctctcaccagcggtgtcttcggtatgtgaaaacccaattcttcaaccctacaggatccaacaggcaatcgcagctggcatcttacctttatcacccttgttcctccaacaatcatcagccctattacagcagttacctttggtgcatttattggcacanaacatcagggcacaacaactacaacaacttgtgctagcaaaccttgctgnctactctcagcaacagcagtttctttcattcaaccaactagctgcattgaactct

SEQ ID NO: 19800 - DNA, 414 bp, Zea mays
  unsure at all n locations
  Clone ID: LIB3151-050-P1-K1-A11
tagcaacatagaaagcacaatagtgtaccaacaatggcagccaaaatattttgcctccttatgctccttggtctttctgcaagtgctgctacggcgaccattttcccgcaatgctcgcaagctcctatagcttcccttcttcccccgtacctctcaccagcggtgtcttcggtatgtgaaaacccaattcttcaaccctacaggatccaacaggcaatcgcagctggcatcttacctttatcacccttgttcctccaacaatcatcagccctattacaacagttacctttggtgcatttattggcacanaacatcagggcacaacaactacaacaacttgtgctagcaaaccttgctgtctactctcagcaacagcaggttcttccattcaaccaactagggtcattgaactct

SEQ ID NO: 19801 - DNA, 204 bp, Zea mays
  Clone ID: LIB3151-050-P1-K1-A2
ctcatcccggcgccaggagagccgcctcggtcggttcgtttacgatcccagatctgctctcgtacgagcgttctcggcgggtgttcgctcgcgaggcgcagcgtgccacgttcactgagagcttcgagaagctgaaatggctgctaaagctgctcccgccaagaagcgtgatgccaccacccatgccttgaaggttgccaatgc

SEQ ID NO: 19802 - DNA, 382 bp, Zea mays
  Clone ID: LIB3151-050-P1-K1-A3
gaccgcggcgcgccccacctgggcgccggccaagggcggcaacgagcaggggggcacccgcatcttcggcccctcccagaagttctcctcccgcgacctcgccgcgcacacctccctcaagccaagaaaagacggtcaacagacccaagaggagttacagaagaggaatctcagggaggaacttgaggaacgtgagcgcaagcactactcttccaaggataagtcctatgccgaagaaagagaccggcggaaaagctctagccatctactcttagaaggttcaaagagagagacagaggataagatagttccacgagaaatcgatgctgatgactccgatgtggagcctaaaaagcgatgacgagagcgatgaagatgatga

SEQ ID NO: 19803 - DNA, 361 bp, Zea mays
  Clone ID: LIB3151-050-P1-K1-A4
gaccaactagcaacatagaaagcacaatagtgtaccaacaatggcagccaaaatattttgcttccttatgctccttgggctttctgcaagtgctgctaccgcaaccattttcccacaatgctcacaagctgctatagcttcctttcttgccccatacctctcaccagcggtgtcttcagtatgtgaaaacccaattcttcaaccctacaggatccaacaggcaatcgcagcaggcatcttacctttatcacccttgttactccaacaaccgtcagccctattacagcagttacctttggtgcatttgttggcacagaacattaaggcacaacatctacaacaacttgtgctaggaaacctt

SEQ ID NO: 19804 - DNA, 366 bp, Zea mays
  Clone ID: LIB3151-050-P1-K1-A5
atcgagaccaactagcaacatagaaagcacaatagtgtaccaacaatggcagccaaaatattttgcctccttatgctccttggtctttctgcaagtgctgttacggcgaccatttttccgaaatgctcgcaagctcctatagcttcccttcttgccccgtacctgtgaccagcggtgtgttcggtatgtgaaaacccaattctttaaccctacaggatccaacaggcaatcacagatggcatcttacctttatcacccttgttcctacaacaatcatcagccctattacatcagttacctttggtgcatttattggcacaaaacatcagggcacaacaactacaacaacttgtgctagcaaacctt

SEQ ID NO: 19805 - DNA, 348 bp, Zea mays
  Clone ID: LIB3151-050-P1-K1-A6
cgactccagattggagaactcgacaccatgaaggtgctgatcggtgcccttgctctcctggcgctcgctgcgagcgccgactgcagtacaagcggcggctgtggctgccagacaccaccgtttcatctaccgcctccgctctatatgccgcctacgttctatctgtcgccgcagtagcagtcgcagccatggcaataccccactcaaccaccgcagctaagcccgtgccagcagttcggatcctgcggcgtctgcagcgtcggcagcccgttcctgggccagagcgtcgagtttctgaggcaccagtgcagatccgccggcgacgccctacggctcgccacagtgcca

SEQ ID NO: 19806 - DNA, 138 bp, Zea mays
  Clone ID: LIB3151-050-P1-K1-A7
cgctcgtctgcccacacccggcgtagtagggcgccatgtaccagccgctccggcaacagtgctgccagcagcagatgaggatgatggacgtgcagtccgtcgcgcagcaactggagatgatgatgcagcttgagcgtg

SEQ ID NO: 19807 - DNA, 68 bp, Zea mays
  Clone ID: LIB3151-050-P1-K1-A8
atgacatactctgttgcagatgtgtaatgcgagaggacgaccgtcgccatacgacagtggcagctgat

SEQ ID NO: 19808 - DNA, 316 bp, Zea mays
  Clone ID: LIB3151-050-P1-K1-A9
gtgctaggaaaccttgctgcctactctcagcaacagcagtttcttccattcaaccaactggctgcattgaactctgctgcttatttgcaacaacaactaccattcagtcagctagctgctgcctacccccagcaatttcttccattcaaccaactggcagcattgaactctgctgcttatttacaacagcaacagctaccaccattcagccagctagctgatgtgagccctgttgccttcttgacacaacaacagttgttgccgttctacctgcacgctgcgcctaacgctggcaccctcttacaactgcaacaat

SEQ ID NO: 19809 - DNA, 335 bp, Zea mays
  Clone ID: LIB3151-050-P1-K1-B1
aaagcacaatagtgtaccaacaatggcagccaaaatattttgcctccttatgctccttggtatttctgcaagtgctgctacggcgaccattttcccgcaatgctcacaagctcctatagcttcccttcttcccccgtacctctcaccagcggtgtcttcggtatgtgaaaacccaattcttcaaccctacaggatccaacaggcaatcgcagctggcatcttacctttatcacccttgttcctccaacaatcatcagccctattacagcagttacctttggtgcatttattggcacaaaacatcaaggcacaacaactacaacaacttgtgctag

SEQ ID NO: 19810 - DNA, 392 bp, Zea mays
  unsure at all n locations
  Clone ID: LIB3151-050-P1-K1-B10
actgggtcttcagaccattagctttatctactccagagcgcagaagaacccgatcgacaccatgagggtgttgctcgttgccctcgctctcctggctctcgctgcgagcgccacctccacgcatacaagcggcggctgcggctgccagccaccgccgccggttcatctaccgccgccggtgcatctgccacctccggttcacctgccacctccggtgcatctcccaccgccggtccacctgccgtcgtcggtccacctgccaccgtcggtccatgtgccgccgccggttcatctgccgncgccaccatgccactaccctactcaaccgncccggncttagcctcattctcagccacacccatgcccgtgccaacagtcgcatncaagcccgt

SEQ ID NO: 19811 - DNA, 384 bp, Zea mays
  Clone ID: LIB3151-050-P1-K1-B11
attcagaaacacaccaagcgaagcgcactagtaacaacctaacaacaatggctaccaagatattagccctccttgcgcttcttgcccttttagtgagcgcaacaaatgcgttcattattacacagtgctcacttgctcctagtgccattattccacagttgcttccaccagttacttcaatgggcttcgaacatccagccgagcaagcctacaggctacaactagcgcttgcggcgagcgtcttacaacaaccaattgcccaattgcaacaacaatgcttggcacatctaaacctacaaaccatcgcaacgcaacagcaacaacagtttctgccatcactgagccacctagccgtggtgaaccctgtcgcctacttgcaacagc

SEQ ID NO: 19812 - DNA, 304 bp, Zea mays
  Clone ID: LIB3151-050-P1-K1-B12
ggtgtaccttcgaggtgagatttttgacattgtctgcggcgagggcagtgcacgcaccgaacgtcatgagttgtttggtcactggagggagaggctcacctatgctgggctaactcaagtgcggttcgaccccgatgaggttgacacgctaaaagaccagttgatccatgtgacatccttatctgtctctgggttcaacatcctagcgtgtgatggccgccttgcactagcgtggcataatcgaccgttatatgtggcaacagcttggtgtgtgacacgaggaaatgctgtcagttccatggtt

SEQ ID NO: 19813 - DNA, 173 bp, Zea mays
  Clone ID: LIB3151-050-P1-K1-B2
atcacacacgaacaaccccactaccggcagggaggccctcttgtctatcgggccatggttcgctcagccgagaagaggctagccgcgggagctcttaacagtggcaaggagacggcgtggttcgaccccacctaggtctacctgatctcgacggccaactcgagtcagaacat

SEQ ID NO: 19814 - DNA, 337 bp, Zea mays
  Clone ID: LIB3151-050-P1-K1-B3
ggcaatcacagctggcatcttacctttatcacccttgttcctccaacaatcatcaggcctattacatcagttacctttggtgcatttattggcacaaaacatcagggcacaacaactacaacaacttgtgctagcaaaccttgctgcctactctcagcaacagcagtttcttccattcaaccaactagctgcattgaactctgcttcttatttgcaacaacaacaactaccattcaggcagctacctgctgcctacccccagcaatttctttcattcaaccaactggcagcattgaactctcctgcttatttacagcagcaacaactactaccattc

SEQ ID NO: 19815 - DNA, 310 bp, Zea mays
  Clone ID: LIB3151-050-P1-K1-B4
gccggcgccgcctctgcaaaaggctcacttttgcctccggaacccagcggaatccgccggcggaccggaaacactcgctcgcccccctcaccccctgtctgcccggccgtcggagcgcgtcgccttcgggcgtgcagcagcagtccgtggaggtggagccgggaggaggaggaggaggaccaggacgaggcataatctgccgagagcgggacagcaggagtgggctgctccgctcgcgctggagccaaagctactgattgtcttgtactgaccagcgaaagagggatctttgggaggcaatcagaggtgt

SEQ ID NO: 19816 - DNA, 365 bp, Zea mays
  unsure at all n locations
  Clone ID: LIB3151-050-P1-K1-B5
cacttttacggttcctccgagttttcgtttggtattttctgtttaccgaaatcggcaattattcccctccacaaccattctgngatgacagtgtttagcaagatactgtttggttccatgcacctcaagtcctatgattgggctaaaagtctgccggcgggtagcaacgataatgcacttgagaactctgatggagcaggagctcgtctggccaaggtgaacacagatgccgtttttgacgcttcatctgagaccgtagttctgtaccctgaaaatggagggaacttgcactgttttacggcgctgaccccttgtgccgtgctggatgtgatgggccctccctacaaccgtgctcaaggaaggga

SEQ ID NO: 19817 - DNA, 351 bp, Zea mays
  unsure at all n locations
  Clone ID: LIB3151-050-P1-K1-B6
gcaacatagaaagcacaatagtgtaccaacaatggcagccaaaatattttgcctccttatgctccttggtatttctgcaagtgctgctacggcgaccattttcccgcaatgctcacaagctcctatagcttcccttcttcccccgtacctctcaccagcggtgtcttcggtatgtgaaaacccaatttttcaaccctacaggatccaacaggcaatcgcagctggcatcttacctttatcacccttgttcctccaacaatcatcagccctattacagcaggtacctttggtgcatttattggcacanaacatcatggcacaacaactacaacaacttgtgctagcaaacct

SEQ ID NO: 19818 - DNA, 253 bp, Zea mays
  Clone ID: LIB3151-050-P1-K1-B7
attagaaacacaccaagcgaagcgcactagcaacaacctaacaacaatggctaccaagatattagccctccttgcgcttcttgcccttttagtgagcgcaacaaatgcgttcattattccacagtgctcacttgctcctagtgccattattccacagttcctcccaccagttacttcaatgggcttcgaacatccagccgtgcaagcctacaggctacaactagcgcttgcggcgagcgtcttacaacaacca

SEQ ID NO: 19819 - DNA, 304 bp, Zea mays
  Clone ID: LIB3151-050-P1-K1-B8
tttcagtattgagaaacacaccaagcgaagcgcactagcaacaacctaacaacagtggctaccaagatattagccctccttgcgctttttgcccttttagtgagcgcaacaaatgcgttcattattgcacagtgctcacttgctcctagtgccattatttcacagttcctcccaccagatacttcaatgggcttcgaacattcagccgcgcaagcctacaggctacaactagcgcttgcggcgagcgtcttacaacaaccaattgcccaattgcaacaacaatccttggcacatttaaacctac

SEQ ID NO: 19820 - DNA, 388 bp, Zea mays
  Clone ID: LIB3151-050-P1-K1-C1
agcaacatacctttatcgcccttgttgtgtcaacaatcgccagccctatctttggtgcagtcattggtacaaaccatcagggcacaacagctgcagcaactcgtgctacctgtgatcaaccaagtagctctggcaaacctttctccctactctccgcaacaacaatttcttccattcaaccaactgtctacactgaaccctgctgcttatttgcagcaacaactattaccatttagccagctagctactgcctactctcaacaacaacaacttcttccatttaaccaattggccgcactgaaccccgctgcttatttgcagcagcaaatactactaccatttagccagctagctacagcaagccgtgcttccttcttgacacaacaac

SEQ ID NO: 19821 - DNA, 196 bp, Zea mays
  Clone ID: LIB3151-050-P1-K1-C10
gttctagatcgcgagggccgcccttttttttttatagcgcataagaacccgcacgacaccatgaggttgatgttagttgcccttgctcttctggttttagatgcgagcggcacctacacgcatacaagcggcgtatgaggatgtaatccaccgccgtcaatatatctaccggctacagcgcatttgtcatctccag

SEQ ID NO: 19822 - DNA, 346 bp, Zea mays
  Clone ID: LIB3151-050-P1-K1-C11
aaggaaagcacaatagcgtaccgagaatggcagacaaaaacatcaggctgattatgatcgttggtgtttctggacgggctgttacagctaccattttctctgaaaggtagaaagcttgtataggttccgttcttcaggcgtagctctgaccagcggcgtgtttggcatgtgaaaacccaattcttcaaccctacaggatccaacaggcaatcacagctggcatcttacctttatcacccttgttcctccaacaatcatcagccctattacatcagttacctttggtgcatttattggcacaaaacatcagggcacaacaactacaacaacttgtgctagcaaacct

SEQ ID NO: 19823 - DNA, 417 bp, Zea mays
  Clone ID: LIB3151-050-P1-K1-C12
atgaacaattgaaatgaaaagaaaaaagtattgttcattgaacgcgtagaccaacgatgctgggccaatatattatagtgttcttacacattaccgctgtctctggatgtcttgcttactgctataattatccctcattgctgacacgcttctattgccagcattttaggcagatacgatcccataaatgttagacctacggatttcaaaactcgagttcttcaatccctatttgcttcaacaagcaatggcagccagacacataccttgattatcctagcattaacaatcgccagtcctatttttgcagcacatattggtacaaactatacagcaacatgagctggagaaccttgttctctctgttaacaaccaagaagctcttgcatacatttatctatattcttagaaccatca

SEQ ID NO: 19824 - DNA, 103 bp, Zea mays
  Clone ID: LIB3151-050-P1-K1-C2
agcaagctcactagagcgcccacagtgggtgaccaaatatcaggcctacttatgctgcatggactgtgtgcaagcgctgatgcgcagaccattttgccacaat

SEQ ID NO: 19825 - DNA, 311 bp, Zea mays
  Clone ID: LIB3151-050-P1-K1-C3
ggaacatagaaagcacaatcgtgtaccaacaatggcagccaaaatattttgctgccttatgctccttggcctatctgcaagtgctgctaccgtaaccatctttgcacactgcttacaagctcctatagctttctttcttcccccatacctctcaccagcggtgtatttagtatgtgaaaacccaattcttcaaccctacaggatccaacaggcaatcgcagcaggcatctaacctttatgacccttgctccttcaacaaccgtacgacatattacagcagttacctttggtgcatttgttggcacaaaaca

SEQ ID NO: 19826 - DNA, 197 bp, Zea mays
  Clone ID: LIB3151-050-P1-K1-C4
gcagcatagaaagcacaatagtgtaccaacactggcagccaaaatattctgcttccttatgctccttggtctttctgcaagtgctgctaccgcaaccattttcccacaatgctcacaagctcctatagcttgccttctttccccatacctctcaccagcggtgtctttaatgtgtgaaaacccaattgttcaaccct

SEQ ID NO: 19827 - DNA, 413 bp, Zea mays
  Clone ID: LIB3151-050-P1-K1-C5
gcaacatataaagcacaatagtgtaccaacattggcagccaaaatattttgcttccttatgctccttgggctttctgcaagtgctgctaccgcaaccattttcccacaatgctcacaagctcctatagcttcccttcttcccccatacctctcaccagtggtgtctttaatgtgtgaaaacccaattgttcaaccctacaggatccaacaggcaatcgcaacatgcatcttaccattatcacccttgttccttcaacaaccgtcagtcctattacagcagttacctttggttcatttggtggcacaaaacatcatggcacaacaactacaacaacttgtgctagcaaaccctgctgcttacttttagcaacatgtagtttttttcattcaaccaactggctgcattgaactct

SEQ ID NO: 19828 - DNA, 398 bp, Zea mays
  Clone ID: LIB3151-050-P1-K1-C6
cagcctagcaattagctcatcgactccagattggagaactcgacaccatgaaggtgctgatcgttgcccttgctctcctggcgctcgctgcgagcgccgcctccagtacaagcggcggctgtggctgccagacaccaccgtttcatctaccgcctccgttctatatgccgcctccgttctatctgccgccgcagcagcagccgcagccatggcaataccccactcaaccaccgcagctaagcccgtgccagcagatcggatcctgcggcgtcggcagcgtcggcagcccgttcctgggccagtgcgtcgagttcctgaggcaccagtgcagcccggcggcgacgccctacggctcgccacagtgccaggcgctgcagcagcagtgctgccaccagatc

SEQ ID NO: 19829 - DNA, 359 bp, Zea mays
  Clone ID: LIB3151-050-P1-K1-C7
agaaggaagatgaggcggagaagaagaaggacgatgagaagaaggcagagcccgagccgccgaagccggaggagaagaaggagccgccggtgatcgctgtggtgctgaaggtgcacatgcactgcgaggcgtgcgccgaggggatcaagaagaggatcctcaagatgaaaggcgtgcagtccgtagaaccggacctcaaggcgtcggaggtgacggtgaagggcgtgttcgaggagtccaagctggcggagtacgtgtacaagcgcacgggcaagcacgcggccgtcgtcaagtccgagccggccccggcgcctgagggcggcggcggcgacatggcggttcaagaggaggagaagaag

SEQ ID NO: 19830 - DNA, 386 bp, Zea mays
  Clone ID: LIB3151-050-P1-K1-C8
gtctacattgaaccgcgctgcttatttgcagcaacaactattaccattcagccaggtagctactgcctactgtgagcaacaacaacttcttgcatttaaccaattggccgcactgaaccccggtgattatttgcagcaacaacaacttgttacatttaaccaattggacggactgaaccccgctgcttatttgcagcagcaaatactactaccatttagccagctagctgcagcaagccgtgcttccttcttgacacagaaacagatgctgactttctaccagcagtttgcggctaaccccgcaacccttttacaactacaacaattgttagcctttgtccaacttgctttgacaaacccagcaggcttctaccaacaacacatta

SEQ ID NO: 19831 - DNA, 278 bp, Zea mays
  unsure at all n locations
  Clone ID: LIB3151-050-P1-K1-C9
ctgggtcttcagaccattagctttatctactccagagcgcagaagaacccgatcgacaccatgagggtgttgctcgttgccctcgctctcctggctctcgctgcgagcgccacctacacgcatacaagcggcggctgcggatgacagccaccgacgccggttcatgtaccgccggcggtgcatttgccacctccggttcacctgccacctccggtgcatctaccaccgtcggtccagctgtcgtcgncggtccacctgccaccgacggttcatgtgcc

SEQ ID NO: 19832 - DNA, 222 bp, Zea mays
  Clone ID: LIB3151-050-P1-K1-D1
ccacgcgtccggcaccaagaaatccatcgttaggccttcgacagggggaattaatggcgtggtcgggtagcagcagccaccgtcgcctcatcctcgcagccgtcgtcctgctctccgtgctcgcggatgccagcgccagcgccgggacctcctgcgtgccggggtgggccattccgcacaacccgctcccgagctgtcgctggtacgagaccaggcggacct

SEQ ID NO: 19833 - DNA, 263 bp, Zea mays
  Clone ID: LIB3151-050-P1-K1-D10
ctgggtcttcagaccattagctttatctactccagagcgcagaagaacccgatcgacaccatgagggtgttgttcgttgccctcgctctcctggctctcggtgagagcgccacctgcacgcatacaagcggagggtgcagttgctagtcaccgcatactgttaaagtaccgccgacgaggcatttgacagctccgtgtacactcacatctgcgaggctattgctacaacatgcgattgtcgggagcgttttacatcaaccaat

SEQ ID NO: 19834 - DNA, 414 bp, Zea mays
  Clone ID: LIB3151-050-P1-K1-D11
accagagatcgaacaacttggtcctgcagctcaagaagagagttttgtgcatttgggggccggtggcaagagagagagagagagagccatggtggcggaccagcagccgcagctgcaggaggagatgaacgacgctgtcggctgcggcctcaggctgcctccagggttccgcttgcacccgagcgactttgagattgtcagcttctacctcaccaacaaggtgctcaacacgcgctttacctgcaccgacatcacggaggccgacctaaacaagattgagccatgggacctcccgagcaaggcgaagatgggcgagaaagagtggtacttcttctaccagaaggaccgcaagtacccgacggtgctgagggcgaaccgggccaacgaggccggttactggaaggcgacgggcaa

SEQ ID NO: 19835 - DNA, 414 bp, Zea mays
  unsure at all n locations
  Clone ID: LIB3151-050-P1-K1-D12
gccgcatccaagcccgtgccagctgcagggaacctgcggcgttggcagcaccccgatcctgggccagtgcgtcgagtttctgaggcatcagtgcagcccgacggcgacgccctactgctcgcctcagtgccagtcgttgcggcagcagtgttgccagcagctcaggcaggtggagccgcagcaccggtaccaggcgatcttcggcttggtcctccagtccatcctgcagcagcagccgcaaagcggccaggtcgcggggctgttggcggcgcagatagcgcagcaactgacggtgatgtgcggactgcagcagccgactacatgcccctacgctgctgccggcggtgtccctcactgaagaaactatgtgctgtagtatagacgctggctagctagctagntgagtcatttagc

SEQ ID NO: 19836 - DNA, 62 bp, Zea mays
  Clone ID: LIB3151-050-P1-K1-D2
tcggtacacaccacgcaccatacatttgctccatggttttatcacaggttactaagagacta

SEQ ID NO: 19837 - DNA, 390 bp, Zea mays
  Clone ID: LIB3151-050-P1-K1-D3
cccacgcgtccgtagcaacatagaaagcacaatagtgtaccaacaatggcagccaaaatattttgcctccttatgctccttggtctttctgcaagtgctgctacggcgaccattttcccacaatgctcacaagctcctatagctttccttcttcccccgtacctctcaccagcggtgtcttcggtatgtgaaaacccaattcttcaaccctataggatccaacaggcaatcgcagctggcatcttacctttatcacccttgttcctccaacaatcatcagccctattacagcagttacctttggtgcatttattggcacaaaacatcagggcacaacaactacaacaacttgtgctagcaaaccttgctgtctactctcaacaacaacag

SEQ ID NO: 19838 - DNA, 320 bp, Zea mays
  unsure at all n locations
  Clone ID: LIB3151-050-P1-K1-D6
ggtcttcagaccattagctttatctactccagagcgcagaagaacccgatcgacaccatgagggtgttgctcgttgccctcgctctcctggctctcgctgcgagcgccacctccacgcatacaagcggcggctgcggctgccagccaccgccgccggttcatctaccgccgccggtgcatctgccaccttcggttcacctgccacctgcggtgcatattccaccgtcggaccacctgccggcgccggttcacctgccacacgcggttcatgtgccgccagcggttcatttgtcgtcgncaccatgccactaccctactta

SEQ ID NO: 19839 - DNA, 419 bp, Zea mays
  Clone ID: LIB3151-050-P1-K1-D7
gttggacctcgatattctggttctgtgccttccactgcaccaagaagtgtggaaaacagcaaagacaatggtggaagggcctccaaacccaaaccttgtgacatagttgttcaaaatggctcttcaaagcctgaaagggaaccaggcaattcgtcaaacaaaagagcaacggataaaatggacgactttggccacaaggatagtttctctgaagtgtcctatgaatactgtgtaagggtggtcaggtggctggagtgtgagggctatattgagacaaacttcaggatgaagtttcttacatggtttagcttacgtgccaccctgcaagagagaaagatagttagcgtatatgtggatactcttatcgaggaccctgtcagtctctctggccagctcgtcgacagcttctcggagaggat

SEQ ID NO: 19840 - DNA, 355 bp, Zea mays
  Clone ID: LIB3151-050-P1-K1-D8
atttttcgtgcattcagaaacacaccgcgtgaagcacattcgcaacatcctaacaacagtggctaccaagatattatcccttcttgcgcttctcgcgctttcagagagcgcaacaaatgctcttattattccacaatgctcacttgctccaagttacattattacacagcttctcacaccagctactttagtggcattgatacaccctgttgagcgagctattaatactcaacaagcatttgcagtgagctgttttacaacaacctattttgcagctgactccacgatgctgggcatatcatacaatacataacatggcaacgtaacagagacaacaattgctaccagctctgtg

SEQ ID NO: 19841 - DNA, 364 bp, Zea mays
  Clone ID: LIB3151-050-P1-K1-D9
attttgagcattcagaaacacaccaagcgaagcgcactagcaacaacctaacaacaatggctaccaagatattatccctccttgcgcttcttgcgctttttgcgagcgcaacaaatgcgtccattattccacaatgctcacttgctcctagttccattattccacagttcctcccaccagttacttcaatggccttcgaacacccagctgtgcaagcctataggctacaacaagcgattgcggcgagcgtcttacaacaaccaattgcccaattgcaacaacaattcttggcacatctaacaatacaaaccatcggaacgcaacagcaacaacagtttctaccagcactgagccacctagccat

SEQ ID NO: 19842 - DNA, 373 bp, Zea mays
  Clone ID: LIB3151-050-P1-K1-E10
gcagctcaggcaggtggagccgcagcaccggtaccaggcgatcttcggcttggtcctccagtccatcctgcagcagcagccgcaaagcggccaggtcgcggggctgttggcggcgcagatagcgcagcaactgacggcgatgtgcggcctgcagcagccgactccatgcccctacgctgctgccggcggtgtcccccactgaagaaactatgtgctgtagtatagccgctggctagctagctagttgagtcatttagcggcgatgattgagtaataatgtgtcacgcatcaccatgggtggcagtgtcagtgtgagcaatgacctgaatgaacaattgaaatgaaaagaaaaaagtattgttcctaattaaaa

SEQ ID NO: 19843 - DNA, 412 bp, Zea mays
  Clone ID: LIB3151-050-P1-K1-E11
agaagctcaaatactgatctcactgatccagtatggctatggcaaaggcaggcgcgccgagggtctcggcggcccagctggtgactctcgggctatcactcctctgcgctgtcgccggcccggccgccgcgcagaactgcggctgccagccaaacgtatgctgcagcaagtttggctactgcggcacgaccgacgagtactgcggcgacgggtgccagtcgggcccgtgccgctcgggcggcggcggcagcagtggcggcggtggtgcgaacgtggctagcgtcgtcaccggctccttcttcaacggcatcaagagccaggccgggagcgggtgcgagggcaagaacttctacacccggagcgcgttcctgagcgccgtcaaggcgtacccaggcttcgcccatggcgggtc

SEQ ID NO: 19844 - DNA, 412 bp, Zea mays
  Clone ID: LIB3151-050-P1-K1-E12
attgagaccaacaagcaacatagaaagtggaatccagtagcaacaatagagcaacaatggcgaccaagatattttccctccttatgctccttgctctttctgcatgtgttgctaacgcgacaattttccctcaatgctcacaagctcctatagcttcccttcttcccccataccttccatcaatgatagcttcagtatgtgaaaacccagctcttcaaccctataggctccaacaagcaatcgcagcaagcaacatacctttatcacccttgtttcaacaatcgccagccctatctttggtgcagtcattggtacaaaccatcagggcacagcagctgcagcaactcgtgctacctgtgatcaaccaagtagctctggcaaacctttctccctactctcagcaacaacaatt

SEQ ID NO: 19845 - DNA, 193 bp, Zea mays
  Clone ID: LIB3151-050-P1-K1-E2
cgaggaactatgtttagaccttatagacaggcttaaaactactgttaataatgcactgagagatgtcaagttgtctcttagtgatctggatgaagatatacttgtgggtggatgcatcccaatacctgcagttcaagaacttgtgaggaagcatactgacaaggatcccaatgttacggtcaaccctgatgag

SEQ ID NO: 19846 - DNA, 381 bp, Zea mays
  unsure at all n locations
  Clone ID: LIB3151-050-P1-K1-E3
agaccattagctttatctactccagagcgcagaagaacccgatcgacaccatgagggtgttgctcgttgccctcgctctactggctctcgctgcgagcgccacctccacgcatacaagcggaggctgcggctgccagccaccgccgccggttcatctaccgccgccggtgcatgtgccacctacggttcacctgccaccttcggtgcatctaccaccgccggtccacctgccgccgncggtccacctggcaccggcggtccatgtgccgacgccggttcatctgtcgtcgccaccatgccactaccctactgaaccgncccggcctcaggcttatccccagncacacccatgcccgtgccaacagccgtatacaagcccgt

SEQ ID NO: 19847 - DNA, 322 bp, Zea mays
  Clone ID: LIB3151-050-P1-K1-E4
cggacgcgtgggcggacgcgtgggttagctttatctactccagagcgcagaagaacccgatcgacaccatgagggtgttgctcgttgccctcgctctcctggctctcgctgcgagcgccaccttcacgcatacaagcggcgggtgcggctgtcagccaccgccgccggttcatctaccgccgacggtgcatctgccacctccggttcacctgccacctccggtgcatcttccaccgccggtccacctgccgccgccggttcacctgccaccgtcggtccatgtgccgtcgccggatatctgtcgccgcaccatggcactacc

SEQ ID NO: 19848 - DNA, 211 bp, Zea mays
  Clone ID: LIB3151-050-P1-K1-E5
cttcagaccattagctttatctactccagagtcgcataataacccgatcgacaccatgagggtgttgctggttgccctttgtttgctggctctagtttcctgcgtctccttcatacatacaagtgctggcattcaatgtcaggctgcggttgtcatccaccgacgtctgttcatctaccgtcttcggtgcattctgtcaccttcttttcat

SEQ ID NO: 19849 - DNA, 201 bp, Zea mays
  Clone ID: LIB3151-050-P1-K1-E8
gtgatgctagggcggcagccggcgaggtagtggataccatgtcaccgtcgctggcttccaagaacacacttatgatcatgcgcttcaagattccgaccgactggccttatgatgaccacgtgcgcactaaggaaacgctgatttgtcccagacttatgcactagctaaggatgatgctcttggcagctttcgagattacgg

SEQ ID NO: 19850 - DNA, 408 bp, Zea mays
  unsure at all n locations
  Clone ID: LIB3151-050-P1-K1-E9
cccaccagcacctgccctcctcgccgtcgccggctccctccgcgcgaccgatctaccctccgccaccaccatgtcgctgatcgccggggaggacttccagcatatcctgcgtttgctgaacaccaacgtggatgggaagcagaagatcatgttcgccatgacctcaatcaagggtgtcgggcgccgcttctccaacatcgtctgcaagaaggccgacatcgacatgaacaagagggccggcgagctgacgcctgatgagctggagcgcctgatgacggtcgtggccaaccctaggcagttcaaggtgccggactggttcctcaacaggaagaaggattacaaggacggcaggttctcgcaggtcgtctncaacgcccttgatatgaagctcagggacgaccttgagag

SEQ ID NO: 19851 - DNA, 417 bp, Zea mays
  Clone ID: LIB3151-050-P1-K1-F1
caactagcaacatagaaagcacaatagtgtaccaacaatggcagccaaaatattttgcctccttatgctccttggtatttctgcaagtgctgctacggcgaccattttcccgcaatgctcacaagctcctatagcttcccttcttcccccgtacctctcaccagcggtgtcttcggtatgtgaaaacccaattcttcaaccctacaggatccaacaggcaatcgcagctggcatcttacctttatcacccttgttcctccaacaatcatcagccctattacagcagttacctttggtgcatttattggcacaaaacatcagggcacaacaactacaacaacttgtgctagcaaaccttgctgcctactctcagcaacagcagtttcttccattcaaccaactagctgcattgaactc

SEQ ID NO: 19852 - DNA, 417 bp, Zea mays
  Clone ID: LIB3151-050-P1-K1-F10
gtcagacaaacttatcaacattcctagggactgatgaatctgactgaccgaccgtgcaggagcacactaagtgaggtacattatcaacaacgtaacaccattggctaccaagataatatccatccttgcgcttgttgcgctttatgtgagcgcaacaaatacgtccattattgcacaatgctcactcgctccaagcgtcattattacacagatcctcccaccagttactctaatgggcttcaaacagccacctgtgcaagcctataggctacaacaagtaattgcgactagcgttttacaacaaccaatttaccagttgcaacaacagtccttggcacatctaacaattcaaaccatcgtaacgcaacaataacaacaatgtctaccagtactgagccacctagccatggtgaaccc

SEQ ID NO: 19853 - DNA, 393 bp, Zea mays
  Clone ID: LIB3151-050-P1-K1-F11
attgagaccaactagcaacatagaaagcacaatagtgtaccaacaatggcagccaaaatattttgcttccttatgctccttggtctttctgcaagtgttgctaccgcaaccattttcccacaatgctcacaagctcctatagcttcccttcttcccccatacctctcaccagcggtgtcttcaatgtgtgaaaacccaattgttcaaccctacaggatccaacaggcaatcgcaacaggcattttaccattatcacccttgttccttcaacaaccgtcagccctattacagcagttacctttggtccatttggtggcacaaaacatcagggcacaacaactacaacaacttgtgctagcaaaccttgctgcatactctcagcaacatcagttt

SEQ ID NO: 19854 - DNA, 359 bp, Zea mays
  Clone ID: LIB3151-050-P1-K1-F12
attttcagcattcagaaacacaccaagcgaagcgcactagcaacaacctaacaacaatggctaccaagatattagccctccttgcgcttcttgcccttttagtgagcgcaacaaatgcgttcattattacacagtgctcacttgctcctagtgccattattccacagatcctcccaccagttacttcaatgggcttcgaacattcagccgtgcaagcctacaggctacaactagcgcttgcggcgagcgttttacaacaaccaattgcccaattgcaacaacaattcttggcacatctaaacctacaaaccatcgcaacgcaacagcaacaacagtttctgccatcactgagccaccta

SEQ ID NO: 19855 - DNA, 406 bp, Zea mays
  Clone ID: LIB3151-050-P1-K1-F2
catctagcaacatagaaagcacaatagtgtaccaacaatggcagccaaaatatttcgcctcgcttatgctccttggtatttctgcaagtgctgctacagcgaccattttcccgcaatgctcacaagctcctatagcttcccttcttcccccgtacctctcaccagcggtgtcttcggtatgtgaaaacccaattcttcaaccctacaggatccaacaggcaatcgcagctggcatcttacctttatcacccttgttcctccaacaatcatcagccctattacagcagttacctttggtgcatttattggcacaaaacatcaaggcacaacaactacaacaacttgtgctagcaaaccttgctgcctactctcagcaacagcagtttcttccattcaaccaactagc

SEQ ID NO: 19856 - DNA, 365 bp, Zea mays
  unsure at all n locations
  Clone ID: LIB3151-050-P1-K1-F3
caacaagcaacatagaaagtggaatccagtagcaacaatagagcaacaatggcgaccaagatattttccctccttatgctccttgctctttctgcatgtgttgctaacgcgacaattttccctcaatgctcacaagctcctatagcttcccttcttcccccataccttncatcaatgatagcttcagtatgtgaaaacccagctcttcaaccctataggctccaacaagcaatcgcagcaagcaacatacctttatcacccttgtttcaacaatcgccagccctatctttggtgcagtcattggtacaaaccatcagggcacagcagctgcagcaactcgtgctacctgtgatcaaccaagtagc

SEQ ID NO: 19857 - DNA, 353 bp, Zea mays
  Clone ID: LIB3151-050-P1-K1-F4
attgagaccaactagcaacatagaaagcacaatagtgtaccaacaatggcagccaaaatattttgcttccttatgctccttggtctttctgcaagtgttgctaccgcaaccatttttccacaatgctcacaagctcctatagcttcccttcttcccccatacctctcaccagcggtgtcttcaatgtgtgaaaacccaattgttcaaccctacaggatccaacaggcaatcgcaacaggcatcttaccattatcacccttgttgcttcaacaaccgtcagccctattacagcagttacctttggtccatttggtggcacaaaacattagggcacaacaactacaacaacttgt

SEQ ID NO: 19858 - DNA, 330 bp, Zea mays
  Clone ID: LIB3151-050-P1-K1-F5
cccatccatcattttagctgttgatacaaagagaagggaatggccgagataaccctagagccgagtgatcttatggcgcaaacaaacaaaagaatagtgccaaagttcactgaaatcttccccgtggaggacgcgaactacccttacagcgccttcatcgcgtcggtccggaaagacgtgatcaaacactgcaccgaccataaagggatcttccagcccgtgctgccaccggagaagaaggtcccggagctatggttctacacagagctcaaaactaggaccagcttcatcacgctcgccatacgcatggacaacctgtacctcgtgggc

SEQ ID NO: 19859 - DNA, 405 bp, Zea mays
  Clone ID: LIB3151-050-P1-K1-F6
gggcacaacaactacaacaacttgtgctagcaaaccttgctgcctactctcagcaacagcagtttcttccattcaaccaactagctgcattgaactctgcttcttatttgcaacaacaacaactaccattcagccagctacctgctgcctacccccagcaatttcttccattcaaccaactggcagcattgaactctcctgcttatttacagcagcaacaactactaccattcagccagctagctggtgtgagccctgctaccttcttgatacaaccacagttgttgccgttctaccagcacgctgcgcctaacgctggcacccttttacaactgcaacaattgctgccattcaaccaacttgctttgacaaacccagcagcgttctaccaacaacccatcattg

SEQ ID NO: 19860 - DNA, 178 bp, Zea mays
  Clone ID: LIB3151-050-P1-K1-F7
atccaatttaaacgcgcgcgtctgctttagtgtatctatgtttaccgacccaagcttgcgacgccaatctaattgtctcgtggccgcgaagggccatacgctgttcgtcggtggacaccggaaatgctgtggaaccacagatcatgccgagatgaatgtcaaaaccctgcatgaagga

SEQ ID NO: 19861 - DNA, 288 bp, Zea mays
  Clone ID: LIB3151-050-P1-K1-F8
gtcttgcccggtgtgcaccgtcgaaaccagtgtcagcagcacagagaccaacggcgtggtatcctactgcattagatgcttcctagctaggggcgctctgtaccgcttcgagtacgcaggcaaccccaggctattccttgccaaagcgcgaggagggacgagcacgctcgatgcctatgaccctgactacacagaggctcgacaggccagatacctgctgacgaacggattcaggcgctacaacctgatcaagagcaactgcgaggacttcgcgatatactgcacgac

SEQ ID NO: 19862 - DNA, 397 bp, Zea mays
  unsure at all n locations
  Clone ID: LIB3151-050-P1-K1-F9
ctgagacaattttatgaacattcctaggcactggtaacttcgattgtacgagcattcagaaacacaccaagcgaagcacattagcaacaacctaacaacaatggctaccaagatattatccatccttgcgcttcttgcgctttttgcgagcgcaacaaatgcgttcattattgcacaatgctcacttgcttcaagtttcattattacacaggtcctcccaccagttactataatgggcttcgaacacccagctgtgcaagcctataggctacaacaagcaattgcggcgagcgtnttacaacaaccaatttaccagttgcaacaacaatccttggcacatctaacaatacaaaccatcgcaacgcaacagcaacaacaatttctaccagcactgagc

SEQ ID NO: 19863 - DNA, 354 bp, Zea mays
  Clone ID: LIB3151-050-P1-K1-G10
gcccttgcaacatataaagtggtattcagttggaacaatagagcaacaatggcgaccaagatattttccctccttatgcttcttgctctttctgcatgtgttgctaacgcgacaattttacctcaatgctcacaagctcctatagatttccttcctcccccatacctttcatcaatgatagcttcagtatgtgaaaacccagctcttcaaccctataggctccaacaagcaatcgcagcaagcaacatacctttatcacccttgtttcaacaatcgccagccctatctttggtgcagtcattggtacaaaccatcaaggcacagcagctgcagcaactcgtgctacctgtgatc

SEQ ID NO: 19864 - DNA, 264 bp, Zea mays
  Clone ID: LIB3151-050-P1-K1-G11
agcatacacagagaaccaaccatgcattatttatggagctgatatgtaccagattgagggcattgctacattcatggactatgggctgccagagatattaagcacaaaactttgggacccacacaccacagttaactatggcttggaggcaaagttggcagggaaccacatatgacattgtccgactatgggctcaggtcaattgggccctgagttccacaggatgcattggctgtggaggtcttgtggcttagtggcaccttg

SEQ ID NO: 19865 - DNA, 223 bp, Zea mays
  Clone ID: LIB3151-050-P1-K1-G12
tgctttgacaaaccgcagcagcgttctaccaacaacccatcattggtggtgccctcttttagatttcttatgagttatagttcaataataaagttctttatctgatgttcgcggcttcccagaaataagaaagtacatttctaaaccacacatgcaccaatttaaactatgatacttcgagatactaaaatgtgcttttcaagattcaaccaaacaatgtctc

SEQ ID NO: 19866 - DNA, 418 bp, Zea mays
  Clone ID: LIB3151-050-P1-K1-G2
tccagaattatcagaaagcaatctttacagctatatccaccagtacatccatttgctcgagagtgatgtacgactagatgttctagaaggactaaatgagaagataagaaagcgtttcaagacaccgaagttatcaaatagtaacttcgctaagatatgcaagcatgcttctctggcatggtgccggtgtattctcatcaaactggcctcaatcactccactgcctgaatccgcagatgcaaccaatcagcctgcaccattatccaatgggcttctactctatgttgacttgcaacctgatgagctttttatctcatcccctgatgggcctgctcaattcaaagggcttgacatgaactggtttgagacacttaacagaattaaaaacattcccggcaagaaacattcgtagataact

SEQ ID NO: 19867 - DNA, 388 bp, Zea mays
  Clone ID: LIB3151-050-P1-K1-G3
gtggaatccagtagcaacaatagagcaacaatggcgaccaagatattttccctccttatgctccttgctctttctgcatgtgttgctaacgcgacaattttccctcaatgctcacaagctgctatagcttcccttcttcccccataccttccatcaatgatagcttcagtatgtgaaaacccagctcttcaaccctataggctccaacaagcaatcgcagcaagcaacatacctttatcacccttgtttcaacaatcgccagccctatctttggtgcagtcattggtacaaaccatcagggcacagcagctgcagcaactcgtgctacctgtgatcaaccaagtagctctggcaaacctttctccctactctcagcaacaacaatttt

SEQ ID NO: 19868 - DNA, 354 bp, Zea mays
  unsure at all n locations
  Clone ID: LIB3151-050-P1-K1-G4
gaccattagctttatctactccagagcgcagaagaacccgatcgacaccatgagggtgttgctcgttgccctcgctctcctggctctcgctgcgagcgccacctccacgcatacaagcggcggctgcggctgccagccaccgccgccggttcatctaccgccgccggtgcatctgccacctccggttcacctgccacctccggtgcatctcccaccgccggtccacctgtcgncgncggtccacctgccaccgncggtccatgtgccgccgccggttcatctgtcgncgncaccatgccactaccctactcaaaccgcccggnctcagcctcatncccagccacacccatgccc

SEQ ID NO: 19869 - DNA, 238 bp, Zea mays
  Clone ID: LIB3151-050-P1-K1-G5
ctcaactcgttctcgacccgaaaccccaaatacctcgcggaaaacccttccctcccgatggcaaccggcgccaccgccatggtggtacccgagcagccacgccgtcggaagccggccccggggcgcgggggagtggccctccctgcgggtctctcggaggaggaggccagggtgcgggccatcgccgagattgtctcggcgatgggggagctctcgcggggcggggaggacgtggacc

SEQ ID NO: 19870 - DNA, 340 bp, Zea mays
  Clone ID: LIB3151-050-P1-K1-G6
gtgaaaaacattgttgggatacagcatggattccgtggattttttgaggatcacttatcagaagtgccgctttctaggcatgtagtccaaaatatcaatcttgctggtggtagcttcttaggagtctctcgcggtggtgcaaacatttcagacattgttgacagtattcaggctaggaggcttgatatgctatttgtgcttggtggaaatggaacacatgctggagctaatgctatacatgatgagtgccgcaagagaaaactgcaagtatcgattgtatgtgtccccaaaactattgacaatgacatattactgatggacaagacctttggatttgata

SEQ ID NO: 19871 - DNA, 368 bp, Zea mays
  unsure at all n locations
  Clone ID: LIB3151-050-P1-K1-G7
gctttatctactccagagcgcagaagaacccgatcgacaccatgagggtgttgctcgttgccctcgctctcctggctctcgctgcgagcgccacctccacgcatacaagcggcggctgcggctgccagccaccgccgccggttcatctaccgccgccggtgcatctgccacctccggttcacctgccacctccggtgcatctcccaccgccggtccacctgccgccgccggtccacctgccaccgtcggtccatgtgccgncgccggttcatctgccgtcgtcaccatgccactaccctactcaaccggcccggcctcagccttatccccagacacacccatgcccgtgccaacaggcgcattcaagc

SEQ ID NO: 19872 - DNA, 355 bp, Zea mays
  Clone ID: LIB3151-050-P1-K1-G8
gccttgcccggtgtgcaccgacgaaaccagcgacagcagcacagagacgaacggcgtggtatcctcctgccttagctgcttcctagctgggggtgctctctaccgcttggagtacgcagtcaacccggcgctcttcctcgccaaagcgcgaggagggacgtgcacgctcgcttcctctgaccctgacgacacggtggcttgtcgcgccagatacctgctgagcaacggttttaggtgctacaacctgttcaagagcaactgcgaggactttgcgatatactgcaagactgggcttcttgtcgctgagcagggcgttgttgggcagagcgggcaggctatattcatcatcggtgga

SEQ ID NO: 19873 - DNA, 363 bp, Zea mays
  Clone ID: LIB3151-050-P1-K1-G9
gcactgcccccacctctccagctccgtcggtaggggtccatttgccctgcacctccggcggcgccggatcttactttgcctcgtcgccggcggcgccgtttcaacatcagaagcaccggattcggtgctgtttctcggctgcctcagcttccgccgccgggaggtccctggcggcgctcgccgtcgccctacggcctttggtgagtcctgtagacttgagaaggctgctgctgagtatatggtatctgtggggcattgtgctgtccatgcgagcggagagcatgcgtgtcaactgtgctttggttgatgcccctgaccagagtagcttgcgatgcatttctgtgtgttgacgatcggactgtt

SEQ ID NO: 19874 - DNA, 372 bp, Zea mays
  unsure at all n locations
  Clone ID: LIB3151-050-P1-K1-H1
attttgagcattcagaaacacaccaagcgaagcacattagcaacaacctaacaacaatggctaccaagatattatccctccttgcgcttcttgcgctntntgcgagcgcaacanatgcgttcattattccacaatgctcacttgctccaagttccattattacacagttcctcccaccagttacttcaatgggcttcgaacacccagctgtgcaagcctataggctacaacaagcaattgcggcgagcgtcttacaacaaccaatttcccagttgcaacaacaatccttggcacatctaacaatacanaccatcgcaacgcaacagcaacaacaattcctaccagcactgagccacctagccatggtgaacc

SEQ ID NO: 19875 - DNA, 326 bp, Zea mays
  Clone ID: LIB3151-050-P1-K1-H10
gcattcagaaacacaccaagcgaagcgcactagcaacaacctaacaacaatggctaccaagatattagccctccttgcgcttcttgcccttttagtgagcgcaacaaatgcgttcattattccacagtgctcacttgctcctagtgccattattccacagttcctcccaccagttacttcaatgggcttcgaacatccagccgtgcaagcctacaggctacaactagcgcttgcggcgagcgtcttacaacaaccaattgcccaattgcaacaacaatccttggcacatctaaacctacaaaccatcgcaacgcaacagcaacaac

SEQ ID NO: 19876 - DNA, 175 bp, Zea mays
  Clone ID: LIB3151-050-P1-K1-H11
taatttagtaaattccatacagattggaacatgaaaggtttacacaatttatgtattcataggtttaccgtcaccatcagggagaacacaacctgctgtttccccacgtggccaaagctttggacaaagaattatgggcaatatgatggataatcttttggttagaagtcttaca

SEQ ID NO: 19877 - DNA, 269 bp, Zea mays
  Clone ID: LIB3151-050-P1-K1-H12
aatgaaggtacaatccctggcattggggttgcaatgaccttggcaggccagtcttttgatggatctgatggagagcagaggccatctattccgggtcttccacctgggcaacccccgttgtcaccaggtcctcatccatcacttcttgggcagcaacaacagtatcaacagatacctcagcagcaacatccccagttttcgcagccaccacctccaaacatgccccaactgcaggcaccaggttacatgctttcacattcacaaggatc

SEQ ID NO: 19878 - DNA, 297 bp, Zea mays
  Clone ID: LIB3151-050-P1-K1-H6
ggtttggagaagtattagctgcacattagagttcagataatccaaactggtttcaggatactgtagatgctgtaaggcagtacttgtggttgaatcaggagcataatgttatggaatttctaattatagatggagagcacctgtaccgtatggactatgaatagtttatttaagcacacatagttaacataaacagatgttaccgatgttttttttataatcttactagaaaagggcaacttgaatttgtttttaataaaaaaatttttatgaggggaggataattttgtttttttt

SEQ ID NO: 19879 - DNA, 313 bp, Zea mays
  Clone ID: LIB3151-050-P1-K1-H8
aatcatgattcatcgtagtcgtataggcaccaaaacaaatttgcaacactaattatgtaactgcaaaaaccatgaagctggtgcttgtggttattgctttcactggtttagtaataagaggttcttggacacagacaggcggctgcagctgtggtcaacaacaaagccttgtgcagtaacattattcacaacaacattattcacaaaaacaacaacattattcaccaccacaacattacctgtaggaggaacaccaacaacaacatgtttacatgctaccacaaaaacatctgtatcaacaagaagttcatgt

SEQ ID NO: 19880 - DNA, 413 bp, Zea mays
  Clone ID: LIB3151-050-P1-K1-H9
cgcctacttgcaagagcagctgcttgcatccaacccacttgctctggcgaacgtagttgcaaaccagcaacaacaacagctacaacagtttctgccaacgctcagtcaactagccatggtgaaccctgccgcctacgtacaacaacaacaactgctttcatctagcccgctcgctgtgggcaatgcacctacatacctgcaacaacaattgttgcaacagattgtaccagctctgactcaactagctgtggcaaaccctgttgcctacttgcaacagctgcttccattcaaccaactgactctgtcgaactctgctgcgtacctacaacagcgacaacagttacttaatccattggtagtggctaacccattggtcgccgccttcctacagcagcaacaattgctgccataca

SEQ ID NO: 19881 - DNA, 160 bp, Zea mays
  Clone ID: LIB3151-052-Q1-K1-A12
agaccattagctgtatctactccagagcgcagaagaacccgatcgacaccatgagggtgttgctcgttgccctcgctctcctggctctcgctgcgagcgccacctcgaggcatacaagcggcggctgcggctgccagccaccgccgacggttcatctacc

SEQ ID NO: 19882 - DNA, 273 bp, Zea mays
  unsure at all n locations
  Clone ID: LIB3151-052-Q1-K1-A2
gaccacgcgtccgctggtcttcagaccattagctntatctactccagagcgcagaagaacccgatcgacaccatgagggtgttgctcgttgccctcgctctcctggctctcgctgcgagcgccacctgcacgcatacaagcggcggctgcggctgccagccaccgccgccggtcattaccgccgcggtgcattgcacctcggtcactgcactcgggcattcacagtcactgcgcgcgtcactgacgcgtcatggcgcgcgtattgcgcgacat

SEQ ID NO: 19883 - DNA, 331 bp, Zea mays
  unsure at all n locations
  Clone ID: LIB3151-052-Q1-K1-A5
accattagctgtatctactccagagcgcagaagaacccgatcgacaccatgagggtgttgctcgttgccctcgctctcctggctctcgctgcgagcgccacctgcaggcgtcaagcggcggctgcggctgccagccaccgccgccggttcatctaccgccgccggtgcatctgccacctncggttcacctgccacctncggtgcatctnccaccgccggtccctggccgcgccggtcacctgcaccgcggccatgtgccgcgcgtcattgcgcgcacatgactacctactaccgccngctagctatncagcaaccatgcggcacagcgatc

SEQ ID NO: 19884 - DNA, 77 bp, Zea mays
  Clone ID: LIB3151-052-Q1-K1-A6
ggctctcagacatatcttatcactccaatccaaagaacccacgacaccattttttgtgccgtcccctctctccgctc

SEQ ID NO: 19885 - DNA, 220 bp, Zea mays
  Clone ID: LIB3151-052-Q1-K1-A7
ccattagcttatctactccaagcgcagaagacccgatcgacaccatgaggggtgctcgtgccctcgctctctgctctcgctgcgagcgccactcacgcagtacactgggctgcgtgcaccacgcgcggtattacgcgcggcattgcactcgtactgcctcggattcacgcgcatgcgcgcgcactgacgcgcatgcgcggtattgggcaacatcatacgc

SEQ ID NO: 19886 - DNA, 318 bp, Zea mays
  Clone ID: LIB3151-052-Q1-K1-A8
attctgagcattcagaaacacaccaagcgaagcgcactagcaacaacctaacaacaatggctaccaagatattatccctccttgcgcttcttgcagcttttgcgagcgcgacatatgcgtccattattccacaatgctcactactcctagtccattattcacagtctccaccagtacttaatggcttgaacaccactgcagcttttaaaaaggatgcgaggctaaaacaatgcaatgacacatctgccattacataacatgacgacagacaagtcacagatacactactggactgcctatgaagagtgtgtcacatgt

SEQ ID NO: 19887 - DNA, 100 bp, Zea mays
  Clone ID: LIB3151-052-Q1-K1-B2
aacttgcttgacataccctcagcgttctaccaacaacccatcattgtggtgccctctttatatttcttagagtatagttcaataataaagtttttgctga

SEQ ID NO: 19888 - DNA, 168 bp, Zea mays
  Clone ID: LIB3151-052-Q1-K1-B5
caccattaggctcccgcaagcaccgatttgtttactgctctctccgacgcgcggcggcggagctccctacgacaactgaaccatgtgcggcggcgcgatccttgccaaggtcgcgagccggcgccgccccggctacaagcgggacattggcacaaagaagaactaaga

SEQ ID NO: 19889 - DNA, 344 bp, Zea mays
  unsure at all n locations
  Clone ID: LIB3151-052-Q1-K1-B6
ttcagaaacacaccaagcgaagcgcactagcaacgacctaacaacaatggctaccaagatattagccctccttgcgcttcttgcccttttgtgagcgctcatatgcgtcattattcacaatgctacttgctctaggcattattcacagtctccacagtacttaatggcttnaacactactgtgcagccactcacacaagctggggaggctacacaacaatgcaatgacacatctgcaattacatcaagcataacgacagacacagtctcaactgcactactggactgcgtatgagaagtgtgatcacatgttgcacgatgacagacaaagtcaagttgacgtag

SEQ ID NO: 19890 - DNA, 326 bp, Zea mays
  unsure at all n locations
  Clone ID: LIB3151-052-Q1-K1-B7
ctagcaacatagaggcacatagtgtaccaacaatggcagccaaaatatttgcctccttatgctccttggtctttctgcaagtgctgctacggcgaccattttgccgaatgctcgcngctcctatagcttccttcttcccgacctctcaccagcgggtctcggatgtgaaaaccatcttaacctcggatcacagatccatggattacttatacctgtctccatatagctatccatcttggctatgaaaatagcaactcaactggtaaatgtgattaaaggttatacatgttgatgttatgaaaatctacatcttgtacaattataca

SEQ ID NO: 19891 - DNA, 256 bp, Zea mays
  Clone ID: LIB3151-052-Q1-K1-B9
cccaattctgcaagcctacaggatccaacaggcaatcacagctggcatcttactcttatcacccttgttcctccaacaatcatcagccctattacatgagttacctgtggtgcatttattggcacaaaacatcatggcacaacaactacaacaacttgtgctagcaaaccttgctgcctactctcagcaacagcagtttcttccattcaaccaaccagctgcatcgaactccgcttcctatttcatcaacaacaac

SEQ ID NO: 19892 - DNA, 197 bp, Zea mays
  unsure at all n locations
  Clone ID: LIB3151-052-Q1-K1-C12
cggacgcgtgggcggacgcgtgggtggacgtgagcctancaattagctcatctactccagattgtataactcgacaccatgaaggtgctgatcgttgcccttgctctgctggcgctcgctgcgagcgccgcctccagtacaagcggcggctgtggctgccagacaccaccgtttcatctaccgcctccgttctatat

SEQ ID NO: 19893 - DNA, 383 bp, Zea mays
  unsure at all n locations
  Clone ID: LIB3151-052-Q1-K1-C2
tagtgtaccaacaatggcagccaaaaatatttgcttccttatgctcctaggtctttctgcaagtgttgctaccgcaaccattttcccacaatgctcacaagctcctatagctgcccttcttccnccatacctctcaccagcggtgtcttcaatgtgtgaaaacccaattgttcaaccctacaggatccaacaggcaatcgcaacaggcatcttaccatttcaccctttcctcaacaaccgcagcctatacagagtacctttgtcattgtggacaaacataggacaaaatcacaactggtagaaacttgtgatacttagacatagtcttcatcaacactgctgatgacttgtgtattgacacaatacatcagcagtagtgtgct

SEQ ID NO: 19894 - DNA, 91 bp, Zea mays
  unsure at all n locations
  Clone ID: LIB3151-052-Q1-K1-C5
atcatcatgccgcgttacacgcggctggtacctgcgtccactatcgctgaccatcccttncagtgctatacaaagcccccatcgctcacag

SEQ ID NO: 19895 - DNA, 180 bp, Zea mays
  Clone ID: LIB3151-052-Q1-K1-C6
gtcccacttattccatgtacacatcctttcgccagcggattaatcacttcatctctgcagagctcacactttacgctatacctcacaaccttctatgacagctctggcttgttcaagatggaacactcacacagtgtacacatataagagtgaggaactgttgtactcagacacagtttt

SEQ ID NO: 19896 - DNA, 226 bp, Zea mays
  Clone ID: LIB3151-052-Q1-K1-C7
aggtcttagaccatagcttatctactccagagccagaagacccgatcgacaccatgagggtgttgctcgtgccctcgctctctgctctcgtgaagcgccactcaccatacaagcgcggtgcagtgcaccccgcgcggtattccgcgcggcattgcactcggtactgcactcggcattcaccggtcacgcgcgcgcactgacgcgcatggcgccgtattgcgcgaca

SEQ ID NO: 19897 - DNA, 334 bp, Zea mays
  Clone ID: LIB3151-052-Q1-K1-C9
atccaacccacttgctctggcgaacgtagctgcataccatcaacaacaacgtctgcaacagtttatgctagcgctcagtcaactagccatggtgaaggcctgtcgcctaggtacaacagcaacaattgctttcatctagcccgctcgctgtgggcaatgcacctacgtacctacaacaacagttgctgcaacagattgtaccagctctgactcagctagctgtggcaaaccctactgcctacttgcaacagttgcttccattcaaccaactggctgtgtcgaactctgctgtgtacctacaacagcgacaacagttacttaatccactagcagt

SEQ ID NO: 19898 - DNA, 230 bp, Zea mays
  Clone ID: LIB3151-052-Q1-K1-D1
acgtcagcctagcaattagctcatcgactccagataggagaactcgacaccatgaaggtgctgatcgttgcccttgctctcctggcgctcgctgcgagcgccgcctccagtacaagcggcggctgtggctgccagacaccaccgtttcatctaccgcctccgttctatatgccgcctccgttctatctgccgccgcagcagcagccgcagccatggcaataccccacaac

SEQ ID NO: 19899 - DNA, 316 bp, Zea mays
  unsure at all n locations
  Clone ID: LIB3151-052-Q1-K1-D3
gccgccaccaggtgcagagtctttcgtcatctcttctccggcgaagaacccncagtcgcccaccagatcactagttaaactttgttgaggggtgatggcggtttcttcgcgacctcacaccgggcagggctaaaagctgatagtcctctactccagtcatactgctccaacttcaagtactgctgctcctcgttctgtcctgcaagttacgacaggggaaaatgtcctggagtacgatctgaggcagggagtatctaagtctagccatcaatgtgtaccagcacttggaggcatatatgtacttgagacaataaag

SEQ ID NO: 19900 - DNA, 90 bp, Zea mays
  Clone ID: LIB3151-052-Q1-K1-D5
acgtactgtctgtgtcatcaaaggcaacgccaaacctcttcacgtgcaaccgtactacgcacaactcatagcaggggggtgtcgaactaa

SEQ ID NO: 19901 - DNA, 140 bp, Zea mays
  Clone ID: LIB3151-052-Q1-K1-D7
tgaacaaacaagcatgtgcattgagcttcctctttgcgagaaaatcgctgcatattggtaatcttccatacaacaggggggagaggaacactacagtccctcacacattttttaacaaaacaacaaaacaggcgatatat

SEQ ID NO: 19902 - DNA, 262 bp, Zea mays
  unsure at all n locations
  Clone ID: LIB3151-052-Q1-K1-D8
atcgcgagcgctcgagagcgcagaagaacccgatcgacaccatgagggtgttgctcgttgccctcgctctcctggctctcgctgcgagcgccacctccacgcatacaagcggcggctgcggctgccagccaccgncgccggttcatctaccgccgcggagcattgcacctcggttcactgcacctcgggcattccccgcggtcacnccgcggcactgacgcgtctggccgcgtattgcccacacatctatacgcagtactat

SEQ ID NO: 19903 - DNA, 349 bp, Zea mays
  Clone ID: LIB3151-052-Q1-K1-E1
tcgaccacgcgtccgccacgcgtccgccacgcgtccgccccgcgtccgccacgcgtccgtgagcattagaacacatatgcgaagcgcactacacgacctacacaatgctacgagatataccctctgcctcttgcttttggaccacaatcttatattacatgctactgctaggctatcatgtctcacattcatggttaaacagtggagcacatgaacaggtgcgaggtaacacatgcatgacacatctgcattacatcagataacgacagacacagtctaagctgcactactgtacctggctctgagaagtgtgatcacactgttgcacgatgaaagacacacagtcaag

SEQ ID NO: 19904 - DNA, 161 bp, Zea mays
  unsure at all n locations
  Clone ID: LIB3151-052-Q1-K1-E10
cagaccattagctntatctactccagagcgcagaagaacccgatcgacaccatgagggtgttgctcgttgccctcgctctcctggctctcgctgcgagcgccacctggacgcatacaagcggcggctgcggctgccagccaccgccgccggttcatctacc

SEQ ID NO: 19905 - DNA, 315 bp, Zea mays
  unsure at all n locations
  Clone ID: LIB3151-052-Q1-K1-E5
cccncactcagataacccagccgccgccgcatcggcctcccaggtaagcagtagcgtccaccccatccgccgccatgaagcgcaacccccgcgtcacgagctcccggcggaagtgtcgtaagggcacttacggccccgtcctcgccgcgcggctatgtcggggcttcgacgactcgccagtcaagggtcatcgtcagcacaggangggggacaagcggggagggggcgggtgaagaggacagagagagaggtactagagcagaggaggagcagggggtagaggtgatcttgggtgttataacatgttttttatat

SEQ ID NO: 19906 - DNA, 265 bp, Zea mays
  unsure at all n locations
  Clone ID: LIB3151-052-Q1-K1-E8
accattagcttatctactccagagcgcagaagaacccgatcgacaccatgagggtgttgctcgttgccctcgctctcctggctctcgtgcgagcgccacctcacgcatacaacggcggctgcggtgcagccaccgcgcggttattaccgccgcgggcattgcacctcgtacctgcactcgtgcattcacgcnncctgcgcgcggcactgacgcgcatgtgcggcgtattgcggacatcatctatacgccgctagctatcagcaca

SEQ ID NO: 19907 - DNA, 254 bp, Zea mays
  unsure at all n locations
  Clone ID: LIB3151-052-Q1-K1-F1
cgcgtccgcactagcaacatagatagcactatagtgtaccaacaatggcagccaaaantatttgcctccttatgctctctaggtatttctgcaagtgctgctacggcgaccatttgggccagtgctcacaagctcctatagcttcccttcttcccccgtacctctcaccagcggtgtcttcggatgtgaaacccaatctcaacccacggtccacaggcttcctagcattaccttataccctgcctcacaatata

SEQ ID NO: 19908 - DNA, 265 bp, Zea mays
  Clone ID: LIB3151-052-Q1-K1-F11
acgcgcgagcaaggcggcccgccgcgcgtcgcgaccggcctgctctccatcttcatactttgtctggaaatggcggtgactacctacgctggggtcaaagtcatgcagccggctgtgacaaatctttcattcgcatgacaaccgataacatgctatctgtacatggcccaagcaatatggagatcactgtgactctattgcatgacattctgcttgtttgccaaaagaaggctttgatatacactatatggggagttgtgtgctc

SEQ ID NO: 19909 - DNA, 166 bp, Zea mays
  Clone ID: LIB3151-052-Q1-K1-F12
gctctgcctctgtttaagggtctattattaaagtacaactttcgcagcgatatcactcacctgcaagctcagacttcgataatacccacactttatgacactctatgttgttcagatggaacacaccacatgtcacatataaagtgaggactgtgtactcacacac

SEQ ID NO: 19910 - DNA, 200 bp, Zea mays
  unsure at all n locations
  Clone ID: LIB3151-052-Q1-K1-F2
cagaccattagctntatctactccagagcgcagaagaacccgatcgacaccatgagggtgttgctcgttgccctcgctctcctggctctcgctgcgagcgccacctcgacgcatacaagcggcggctgcggctgccagccaccagcgccggttcatctaccgccgccggtgcatctgccacctccggttcacctgccacc

SEQ ID NO: 19911 - DNA, 147 bp, Zea mays
  unsure at all n locations
  Clone ID: LIB3151-052-Q1-K1-F3
cttcagacaccatcgacaacgtcaaggccaagatccaggacaaggagggcattcccccagaccagcagcgtctcatctntgctggaaagcagctngaggacgggcgcacgctggccgactacaacatccagaaggtagcaccctcac

SEQ ID NO: 19912 - DNA, 74 bp, Zea mays
  Clone ID: LIB3151-052-Q1-K1-F4
gtctctcctctacagcggtagtgagacatctacctagacacagatgacagcttactatacctgtctcacaccga

SEQ ID NO: 19913 - DNA, 270 bp, Zea mays
  unsure at all n locations
  Clone ID: LIB3151-052-Q1-K1-F5
cgctctgctggctctcgctgcgagcgccacctccacgcatacaagcggcggctgcggctgccagccaccgccgccggttcatctaccgccgccggtgcatctgccacctgcggttcacctgccacctccggtgcatctnccaccgncggtccacctgccgccgccggccacctgccaccgcggccatagtgccgcgcggttattttgcgcgcaccatcactaccctactcaaccgcccgggctcagctcatncncagcacacccatgccc

SEQ ID NO: 19914 - DNA, 148 bp, Zea mays
  Clone ID: LIB3151-052-Q1-K1-F7
cgctcgcacagcaacatacagtttctgccatcactgaccacctagccgggtgaaccctgtcgcctacttgcacagcagctacttgatccaaccacttgcttggcgaacgtactgcataccacacacaactctgcaacagtatgcacct

SEQ ID NO: 19915 - DNA, 250 bp, Zea mays
  Clone ID: LIB3151-052-Q1-K1-F9
ccacgcgtcggcgcttacctatgacacggcacatgttctaccccatggcacggccgccatgatcccgatcccactcgtggtgccgagcttaccgatgcgctatctgtgcacctactatggagctgatcagaccggtcacatgagacgcgttacacacgtgccaccgtcggagatctaccacagggccgcggactgccgggctgcatcacctgtcggtgtgcgacgcgctgactttagctacaacgctgac

SEQ ID NO: 19916 - DNA, 238 bp, Zea mays
  Clone ID: LIB3151-052-Q1-K1-G1
gcaacatacatagtgaagtacactagcaacatcttagcaccaatgggagccaagattcttgccctccttgccctccttgctctttcagcaagcgctgctacctcgactgtgagtgcacaatgctcacaacaatacctctcttccgcgacagccgagggattcaatacccaactatcaatcctacatggacaagaggcatgcaacaagcgtttacggcatacataacccttcacaccat

SEQ ID NO: 19917 - DNA, 158 bp, Zea mays
  Clone ID: LIB3151-052-Q1-K1-G11
ttacatatactgtctcacacgcagctataagagtaccttgtcattgtgacaacatatgccacactcacactgtgtgcaactgtgatcttagacatagttttcatcacactgtgatgacttgtgtattgacacatacatagcagtgtgtgctcccacat

SEQ ID NO: 19918 - DNA, 361 bp, Zea mays
  unsure at all n locations
  Clone ID: LIB3151-052-Q1-K1-G2
gtcgaccacgcgtccgcacaagcacatagaaagtggaaacagtaccacaatagagcacaatggcggccaagatatttccatcctatgctcctgctcttctgctgtgtgctacgcgaccattttctaaactacaagctcatactgcctcttccatactcatatgccgttagatgtgaaccaccctacctcggtcacngcgacagactactatacctgcttacaatgagctattggccatgtcacatagccacagtgaactgctcaggaagcagagttgcaactttctattagacacattctcatcaccctgctcatgaacctgtgtattgagacacactctcatcagcagtagtctgctatt

SEQ ID NO: 19919 - DNA, 148 bp, Zea mays
  unsure at all n locations
  Clone ID: LIB3151-052-Q1-K1-G7
gtcgcacatatctactatactatactctaggaagcaaggacaccacctccatggcagccatgatgctagcattgttcgctctcctagctctntgtgcaagcgcgggtggtgcgacctatattccagggcacttgccaccttcacgcca

SEQ ID NO: 19920 - DNA, 369 bp, Zea mays
  Clone ID: LIB3151-052-Q1-K1-G9
atcccggtcgccacgcgtcgtctcacagcgggtctcggtatggaaaccaatctcaacctacagatcaacaggcaatccagtgcatttacttataccctgtcctcagcgatatagctatacacataccttgggcttatgcacaaacatagcacacacacacactgtgtgcaacctgtgctacttacaacagagttctcatcaacactagtcatgacttgctttattgaacacacactacatcagcagtactgtgctacccagcattctcatcaacactcacatgacttctgtattacagacacaactcacattagcagtagtgggtagcctgtacctttgcacacacagtgtgcgtcacagacgtggcta

SEQ ID NO: 19921 - DNA, 102 bp, Zea mays
  unsure at all n locations
  Clone ID: LIB3151-052-Q1-K1-H6
gcgaagcgcactagcaacaacctaacaacaatggctaccaagatattagccctccttgcgcttcttgcccttntagtgagcgcaacanatgcgttcattatt

SEQ ID NO: 19922 - DNA, 381 bp, Zea mays
  Clone ID: LIB3151-053-Q1-K1-A1
atttagaccaactagcaacatagatgcacattattgtaccaacaatggcagccaaaagattttgcctccttatgctccttggtatttctgcaagtgctgctacggcgaccattttcccgcaatgctcacaagctcctatagcttcccttcttcccccgtacctctcaccagcggtgtcttcggtatgtgaaaacccaattcttcaaccctacaggatccaacaggcaatcgcagctggcatcttacctttatcacccttgttcctccaacaatcatcagccctattacagcagttacctttggtgcatttattggcacaaaacatcagggcacaacaactacaacaacttgtgctagcaaaccttgctgcctactctcagc

SEQ ID NO: 19923 - DNA, 89 bp, Zea mays
  Clone ID: LIB3151-054-Q1-K1-A10
tttcgggtcgtcctgctcgcgaggcggctgtcttctttcatgcccttcctgtgcgggggtcccatgagtacttgtgctgttattgccgt

SEQ ID NO: 19924 - DNA, 299 bp, Zea mays
  Clone ID: LIB3151-054-Q1-K1-A11
ttccattccttagtgaaaacatcgattatgaagatgaagagcttcttgcaatggcagaaaagttgggcgtttttattccttatgttggaggtgttgagcatgcacatgttttgcttccaccactggaaacattgtgttctgtggaggaaacctgcgtcagagacaaagctgttgaatcactttgtcagattggtgcacagatgaaagaaaatgattttggggactggtttgcccatgtcgttaagaggttggcggtaagtgagtggttcacagctcgagtttcttcatgtggccctttt

SEQ ID NO: 19925 - DNA, 319 bp, Zea mays
  unsure at all n locations
  Clone ID: LIB3151-054-Q1-K1-A12
gggtcttcataccattaacttttttttctccagagcgcanaataacccgagcgactccattaaggtgcgggtcgttgccctctctctcctgactctcgctggcagctcctcctcctcgcatactagctgcagctgctgctgccatccacccccgcctgttcatctaccgtcgtcagtgcatctgccatcttcgattcatccaccacctacaatgcatttgccaactgcggtgcacctgccgtcaacaggccacctgccaccgactgtccatgtgccggcgtctgttcatgtggcgtcttcaacatgccacttccctact

SEQ ID NO: 19926 - DNA, 319 bp, Zea mays
  Clone ID: LIB3151-054-Q1-K1-A2
agttcaggttcggaatggccgggccaaccgtcgcagctcatataaaggacaatagtgttccctcaatggcagcccaaatattttggttccctatgctccctggtccttctgcaagagttggttccgcaaccatttttccacaatgctctcaaactcctattgttttccttttttccccatacctctcaccagcggggtgttctatgtgtgtaaacccaattgttctacccctcaagctccaacaagcaatcgctgcaagcaacattcccttatctcccctgttgtaacaatcgccagccccatctttggtgcagtcatt

SEQ ID NO: 19927 - DNA, 373 bp, Zea mays
  Clone ID: LIB3151-054-Q1-K1-A5
ggaagctataggagcttgtgagcattgaagcttcaacaagcaatcgcagctagcaacatacctttatcgcccttgttgtgtcaacaatcgccagccctatctttggtgcagtcattggtacataccattaaggcacatcagctgctgcaactcgtgctacctgtgatcaaccaagtagctctggcaaacctttctccctactctccgcaacaacaatttcttccattcaaccaactgtctacactgaaccctgctgcttatttgcagctacaactattaccatttagccagctagctactggctactctcaacaacaacaacttcttccattttaccaattggccgcactgtaccccgctgcttatttgcagc

SEQ ID NO: 19928 - DNA, 366 bp, Zea mays
  Clone ID: LIB3151-054-Q1-K1-A6
ggaagaccgaagaccgagccgtgctggggctcgggacgggaacgggacaggaccccaatttctcagatccttcctgcccgcccgcccgtgcccgtcgacgcgtcgttcttgccggccgagccccaccttcgtcctctcctcctccagggggatcggatacgccacaagctgcgcgatggtgctgtgggtcttcggctacagctccctcatctggaaccccggcttcgacttcgacgacaaaatcctcggcttcatcaaaggctacaagcgcacctttaatctcgcttgcattgaccacagaggcacaccggagcatccggcgaggacctgctcgcttgataccgacgacgaggccatatgctgggg

SEQ ID NO: 19929 - DNA, 277 bp, Zea mays
  Clone ID: LIB3151-054-Q1-K1-A7
tgggtcttcagaccattagctttatcttctccagagcgcagtatatcccgatcgacaccatgagggtgttgctcgttgccctcgctctcctggctctcgctgcgagcgccaccttcacgcatacaagcggcggctgcggctgccagccaccgccgtcggttcatctaccgccgccggtgcatctgccacctccggttcacctgccacctccggtgcatcttccaccgccggtccacctgccgtcgccggtccacctgccaccgtcggtccatgtgcc

SEQ ID NO: 19930 - DNA, 383 bp, Zea mays
  Clone ID: LIB3151-054-Q1-K1-A8
caacaagcaacatagaaagtggtatccagtagcaacaattgagcttcaatggcgaccatgatattttccctccttatgctccttgctctttctgcatgtgttgctaacgcgacaattttccctcaatgctcacaagctcctattgcttcccttcttcccccataccttccatcaatgatagcttcagcatgtgaaaacccagctcttcaaccctattagctccaacatgcaatcgcagcaagcatcattcctttatcacccttgtttcaactatcgccagccctatctttggtgcagtcattggttcaaaccatcatggcacagcatctgctgctactcgtgctacctgtgatcaaccaagttgctctggcaaacctttctcc

SEQ ID NO: 19931 - DNA, 370 bp, Zea mays
  Clone ID: LIB3151-054-Q1-K1-A9
tgagcattcagaaacacaccttgcgttgcacattagcaacaacctaacaacaatggctaccatgatattatccctccttgcgcttcttgcgctttttgcgagcgcaacaaatgcgttcattattccacaatgctcacttgctccaagttccattattacacagttcctcccaccagttacttcaatgggcttcgaacacccagctgtgcaagcctattagcttcaacaagcaattgcggcgagcgtcttacaacaaccaatttcccagttgcaacaacaatccttggcacatctaacaatacaaaccatcgcaacgcatcagctacaacaattcctaccagcactgatccacctagccatggtgaaccct

SEQ ID NO: 19932 - DNA, 376 bp, Zea mays
  Clone ID: LIB3151-054-Q1-K1-B10
ccaccactgggtcttcagaccattttctttatctactccagagcgctgaagaacccgatcgacaccatgagggtgttgctcgttgccctcgctctcctggctctcgctgcgtgcgccacctccacgcatacatgcggcggctgcggctgccagccaccgccgccggttcatctaccgccgccggtgcatctgccacctccggttcacctgccacctccggtgcatctcccaccgccggtccacctgccgtcgccggtccacctgccaccgccggtccatgtgccgccgtctgttcatctgccgtcgtcaccatgccactaccctactcaaccgccccggcctctgcctcatccccagccacacccatgcccgtgcc

SEQ ID NO: 19933 - DNA, 305 bp, Zea mays
  Clone ID: LIB3151-054-Q1-K1-B11
ttgcttcattgatagcacatttgtgttccttctatggctgccaaattatttagcctccttatgctccttggtctgtctgcatgtgctgcttcggcgtccattttcccactatgctcacaagctcctatagcttacgttcttaccccgtacctctcaccagcggagtcttcgagtttgtgattacccaattctccatccctattggttccatctggcattcgctgctggcttcttacctttatcacccttgctgctccaacaatcttctgccctattacagctgcttcctttggggcattttttgg

SEQ ID NO: 19934 - DNA, 352 bp, Zea mays
  Clone ID: LIB3151-054-Q1-K1-B4
gcgttggcttcggccatagaaggtttcggttctccgtccaagaggactgcgctggatgatctctacgagctccagggcctgtccccgtggttcgtcttcctatgccgccctgtcactgacttgctgcccattatcgcctgcggcgtccgtggtgtctcctgctaccctacgtttttccataaggccatttcatcgtccagcgcatatgatgatcagttcatgcagctcatttcggctggtttggatgcggagagcgcttactgggatctcgttataaaggatatccaagatgcgtgctatctttttgagcccatcttcgtcgagactgatggggctgatgggtatgtctccg

SEQ ID NO: 19935 - DNA, 363 bp, Zea mays
  Clone ID: LIB3151-054-Q1-K1-B6
agaccattagctttatctactccatttctctgaagaacccgatcgacaccatgagggtgttgctcgttgccctcgctctcctggctctcgctgcgagcgccacctccacgcatacatgcggcggctgcagctgccagccaccggcgccggttcatctaccgccgtcggtgcatctgccacctgcagttcacctgccacctgcagtgcatcttccaccggcggtccacctgccgtcgccggtccacctgccaccgccggtccatgtgccgtcgtcggttcatctgccgtcgtcaccatgccactaccctatctaaccgccccggcctcagtctcatccccagccacacccatgcccgtgccaac

SEQ ID NO: 19936 - DNA, 380 bp, Zea mays
  Clone ID: LIB3151-054-Q1-K1-B7
attcaaccaactagctgcattgttctctgcttcttatttgcaacaacaacaactaccattcagccagctatctgctgcctacccccagcaatttcttccattcaaccaactgacagctttgaactctcctgcttatttacagctgcaacaactactaccattcagccagctagctggtgtgagccctgctaccttcttgacacatccacaattgttgccgttctaccagctcgctgcgcctaacgctggcaccctcttacaactgcaacaattgctgccattcaaccaacttgctttgacaaacccaacagcattctaccaacaacccatcattggtggtgccctcctttagatttcctatgagttatagctcaataata

SEQ ID NO: 19937 - DNA, 362 bp, Zea mays
  Clone ID: LIB3151-054-Q1-K1-B8
ctgaaacacaccaagcgaatctcattttcttcatcctttcaacaatgggtaccaagatattatccctccttgcgcttcttgcgctttttgcgtgcgctactaatgcgttcattattccacaatgctcacttgctccatgttccattattacacagtttcttccaccagttacttcaatgggcttcgaacacccatctgtgcatgcctataagcttcatcaagcaattgcggcgagcgtctttaaacatccaatttcccaactgctacaacaatcgctggcacatcttacaattcataccatcgctacgcatctgctacaacaattcctaccatcactgagccacctagccatggtgaaccct

SEQ ID NO: 19938 - DNA, 380 bp, Zea mays
  Clone ID: LIB3151-054-Q1-K1-C1
gttagcacaatattgttccaacaatgtgtgttcttaatattttgcctccttatgcgccttggtatttctgcaagtgctgcttcagcgaccattttcccgcaatgctcacaagctcctattgcttcccttcttcccccgtacctctcaccagcggtgtcttcggtatgtgaaaacccaattcttcaaccctacaggatccaacaggcaatcgcagctggcatcttacctttatcacccttgttcctccaacaatcatctgccctattacaacagttacctttggtgcatttattggcacaaaacatctgggcacatcaacttcaacaacttgtgcttgcaaaccttgctgcctactctcagcaacagcagtttcttccatt

SEQ ID NO: 19939 - DNA, 375 bp, Zea mays
  Clone ID: LIB3151-054-Q1-K1-C10
tccactcgtccgcctactagcttcttttttagctcaatagtgtaccaacaatggcagcctttatattttgcttggttatgctccttggtctttctgcaagtgttgctaccgcttccattttccctcaatgctcacatgctcctatagcttcccttcttcccccatacctctcaccagcggtgtcttcaatgtgtgaaaacccaattgttcaaccctactagatccatctggctttcgcatcaagcatcttaccattatcacccttgttcctccaacaaccgtctgccctattactgctgttacctttggtccatttggtggcacataacatcagggcacaacttctacatcatcttgtgctagcaaaccttgctg

SEQ ID NO: 19940 - DNA, 248 bp, Zea mays
  Clone ID: LIB3151-054-Q1-K1-C12
tccctccttggatagggtttgagactgagctcccccgctcgcgcgcgagccatggtctccttcacctgttcccatgtcggcgcgacggctgcgggcggagcctcgcccttcctcggcttccggtggcggagcggccccgggggagccaccccgtcgagctccctcttcgttggccggcggctggcatcggtgcatatgcgcgcgccatctcgcggggcccgcgggggctccgcgctgcgggtcacgtg

SEQ ID NO: 19941 - DNA, 333 bp, Zea mays
  Clone ID: LIB3151-054-Q1-K1-C2
tcgtccgtgccgatctgtgcgcatccctattctgtgctgggatggcggtcgcgtatctgctgctgctgctgctgccacagctagcggctgcggctgccaccggcgtgtggatgacagtcttgcccttcgttttcagcggggcctctgggatgctcgcgacctgcgtcatccatcctatcgtcatggtcatagtgaggatccatttgggtgtaggctctgctggtcaagtcacaaagaacatgcttgcatatgaaggtgtccgttctttcttcaaaggtttgtccgccggtttgctgtagcttgcgtcgttcacgtctgctcgtcttggatcct

SEQ ID NO: 19942 - DNA, 304 bp, Zea mays
  Clone ID: LIB3151-054-Q1-K1-C6
gcgacatataaagggcaattgtggtccttctatgggggcccaaatattttgcccccttttgccccccgggatttccgcgagagctgctacagggaccattttcccgcaaaggtcacaaaatgctattaatttcccttttcccccggtcccctcaccaacggggggtttggggtgggaaaaacccattctttaacccctctagatcccacaagggatcgcaaatgggatttttcccttttcacccccgtttctcccacaatttttaaacccttttccacaatttcccttgggggctttgttggga

SEQ ID NO: 19943 - DNA, 373 bp, Zea mays
  Clone ID: LIB3151-054-Q1-K1-C7
ctctagggttttagattttagccgtcgccgctgctcatctcacatccctcgagatgacgcctgctcctcgccgatcgattcgatggccgtcttctccgacctccacaccgccgacggcctcatgtccctcgaggctctcctcgccggcaaaacctatgtgtctggtgactccattactaaagatgacattaaagtcttcgccgcggtgccgtcgtagcctggcgctgtgtttcctaatgccgcccgctggtacgagaccgtctctgcggctgtagcctcaagattccctggtaaggctgttggtgtaaatctgcctgcgggatcagctcctgcggcagctgctcctgcggatgaagctgaagatgatgatgac

SEQ ID NO: 19944 - DNA, 161 bp, Zea mays
  Clone ID: LIB3151-054-Q1-K1-C8
agggtcttcagaccattagcttttttttctccagtgcgctgaataacccgatggacaccttgagggaggtgcgggctgccctcgctctgctggctctcgctgcgagcgccacctccacgcatacaagcgggaggtgctgctggcagccaccaccgacgggt

SEQ ID NO: 19945 - DNA, 369 bp, Zea mays
  Clone ID: LIB3151-054-Q1-K1-C9
ggtcttcagaccattagctttttcttctccagagcgcagtagaatcccgagcgagaccattaaggtgttgctcgttgccctcactctcctggctctcgctgagagcgccacctccacgcatacaagcggcggctgcggctgccagccaccgtcgccggttcatctaccgccgccggtgcatctgccaccttcggttcacctgccacctccggtgcatctcccaccgccggtccacctgccgccgccggtccacctgccaccgccggtccatgtgccgccgtcggttcatctgccgtcgtcaccatgccacttccctactctaccgccccggcctcagccctattcccagccacacccatgcccgtgcca

SEQ ID NO: 19946 - DNA, 353 bp, Zea mays
  Clone ID: LIB3151-054-Q1-K1-D10
gctagccacttcttaaacttttctttttctatcctgattctgctctctcggatggctcttttgatcgatcgaggctctttcccttcttcctctctctcgctctctctctctctatccgtgactgccatgtttccgcctgcgagctttctgcacgaccaaagcggcggaagaagagcacaggagctaagcggctcccatctggagcacgtggaggatgtcccctgcactctggacatgttctcgcacgaagcacggggctccctctagaccatccgcttctactgtgacctccattacttttactcgagactggcgcttacgtcagcacccgactcctgctcctgcgcgcgcct

SEQ ID NO: 19947 - DNA, 386 bp, Zea mays
  Clone ID: LIB3151-054-Q1-K1-D11
tccctcgcgtccggagcctccgttcgctcctcttttctttcctcattccagttcctctcctggggaggtgccgttcgtcgtctccgattctccgtctgtccgtcctcttagtcttgtgcgggatccacagaaggatgagtgaagaggatatgactgctgcttctgctgtgctgccgttgtgggcccctatgctcaatgaaaggatcctctcttctctgtccaggaagtccgttgctgctcatccgtggcatgatcttgagatcggtcctgatgctcctgctgttttcaatgttgttgttgagatcacaaagggaagcaatgtttaatatgagcttgacaagaaaactggactgattaaagttgatcgagtcctatactcatcagtt

SEQ ID NO: 19948 - DNA, 350 bp, Zea mays
  unsure at all n locations
  Clone ID: LIB3151-054-Q1-K1-D12
actagttctagatcgncgagcgtttctccctttttttttttttttttcttagaaaggttttttttaatttttaaggttcttttttttttttttttttttttttttttttttttttttttttttttttttttttttttttttttttttttttttttaaaaaaaaaaaaaaaaaccccccttttttggggggacccccaaaaccaaaaaaaaaaaccttttttttgaccccttcccccaaaaaaaattaaaaaagggccccccccttttagaacccatttttccccgccggggggtggaaaaccttcttcttttttttttcccctcccaattcactttcccccccccctttt

SEQ ID NO: 19949 - DNA, 121 bp, Zea mays
  Clone ID: LIB3151-054-Q1-K1-D3
ggtcttaacaccattagcctcacctattcttgagcgcagtagaaccccttcgagaccaggatggtgtttctcgttgccctctctctcctggctcccgctgtgagcgccaccttcacgcata

SEQ ID NO: 19950 - DNA, 373 bp, Zea mays
  Clone ID: LIB3151-054-Q1-K1-D7
gaccaacttgcaacatagattgctcttttgtgtaccaacaatggctgccgaaatattttgcctccttatgctccttggtatttctgcaagtgctgctacggcgaccattttcccgcaatgctcacatgctcctattgcttcccttcttcccccgtacctctcaccagcggtgtcttcggtatgtgaaaacccaattcttcaaccctactggatccatcaggcaatcgcagctggcatcttacctttatcacccttgttcctccaacaatcatcagccctattacagcagttacctttggtgcatttattggcacataacatctaggcacaacaactacaacaacttgtgcttgcaaaccttgctgcctactct

SEQ ID NO: 19951 - DNA, 373 bp, Zea mays
  Clone ID: LIB3151-054-Q1-K1-D8
acaatctgttccagttaattttcctttttctctgcgttctgtagatgagcaacagtctgctgatggggagctggtatttgaattttttgaatatgaacagccatactctcggcgacaattatttgacatggttaatgtgctgattgccggtgcgtttccgtcatattgccatatatctggggtcccatagtatctggatgccatcctgcatgatctccatccagcgtcttggtattgtgttgcatggtatcccatattccggatacctgatggtaaattccaggctacattcttgacatatcactctcttggccactggattcgtcggagcatctcatctagtggggccgttgttttgccagtcatgggcctg

SEQ ID NO: 19952 - DNA, 371 bp, Zea mays
  Clone ID: LIB3151-054-Q1-K1-D9
gttcggatcgctctctctctcttcctgttctcccccttatcctcccgtcggctgctccgcttcaagatgcagatctttgtgatatccctgtccggcttgactatcaccctcgaggtggtgtcgtctgacaccattgtcttcgttttggccatgatccaggtcttggtgggcttccccccagtcctgctgcggctcatcttcgctggcatactgcttgaggacgggcgctcgcttgctgtcttcatcatcctgttagtgtgctccctccaccttgtgctccgcctcaagggtggcatgcagatctttgtgtaaaccctgtccggcttgactatcaccctcgatgtggagtcctctgacaccattgtcaacgt

SEQ ID NO: 19953 - DNA, 353 bp, Zea mays
  Clone ID: LIB3151-054-Q1-K1-E10
agtcctactagcaccctagcctcctctttctggcaccaactaattcagagagaaagattttgtttacttatgctggctattctttgtacggttctctcttccgcttccattttccctctatgctctcatgcttctatatcttgccttcttggccccattcccttctccatcctcatgatcttacgcttgtataccccatccttcatcccttctgattcccacatgcactcgaaagcagcatgtttccactaccaccattgtcactacatcaaccagatgcccttctaccactttttcctttaggacacttgggggctcatatcctaatggctcatcatcttcataatcttgtg

SEQ ID NO: 19954 - DNA, 362 bp, Zea mays
  Clone ID: LIB3151-054-Q1-K1-E11
aggcaatcgctgctggcatctttcctttatcacccttgttcctccatcagggaggtgccctattacaacaggtgcctttggtgcatttattggcacataacatctgggctcttcttcttcttcttcttgtgcttgcaatccttgctgcctactctcagcatctgctgtttcttccattcaaccaactaagttcattgaactctgcttcttatttgcaacaacaacatcttccattctgccagcttcctgctgcctacccccagcaatttcttccattcaaccaacttgcagcattgaactctcctgcttatttacagctgcaactacttcttccattcagccagcttgctggtgtgagccct

SEQ ID NO: 19955 - DNA, 290 bp, Zea mays
  Clone ID: LIB3151-054-Q1-K1-E4
tgctagtcggcagtgagcatcatgtttgttctgctcaagatcaacaccgtccgcggtgtgttgtttgccgatggcatgtcgcggttttcaatcaatgggaagcccatctaccactttgttgggactttcaccttcagcgagtacaccgtcatgcatgtgggttgtgttgcatagatcaaccctcaagcttcccctgatatattttgcgtccctagctgtggtatttctaccggtcctggtgcatctatttatggtgcaatacctccgaaaggttcgacagtggctggttt

SEQ ID NO: 19956 - DNA, 253 bp, Zea mays
  Clone ID: LIB3151-054-Q1-K1-E5
tgctacccatatccaggcacttgtaccactactgatgccattggcttcatgaatcctggatgcagttctgcatgaaacaacaaggggttgcaacttgtatgcgtggcgccctgatgctgacaactgtggccttaccgttatccgtgcctgatgcaatgatgatgccaagtttgatgccaccgatgacaatgatgccgatgccgtaatgatgccatcgatatggtgccgctatgatgtcaccaataacgatagc

SEQ ID NO: 19957 - DNA, 374 bp, Zea mays
  Clone ID: LIB3151-054-Q1-K1-E6
gttagctctttattgttccaacattttctgccaaattttttagcctccttatgctccttggtctttctgcaagtgctgctacagcgaccattttcccgaaatgctcgcaagctcctatagcttcccttcttcccccgtacctctcaccagcggtgtcttcggtatgtgaaaacccaattcttctacccttcaggatccaacaggcaatcacagctggcatcttacctttatcacccttgttcctccaacaatcatctgccctattacatcagttacctttggtgcatttattggcacaaaacatctgggcacatcttcttcatcttcttgtgcttgcaaaccttgctgcctactctcagcaacagcagtttctt

SEQ ID NO: 19958 - DNA, 375 bp, Zea mays
  Clone ID: LIB3151-054-Q1-K1-E7
ctacatcaattgctgctactgtttgttccagctctgactcagctagctgtggcaaaccctgctgcctacttgcaacagctgcttccattcaaccaactgactgtgtcgaactctgctgcgttcctacaactgcgacatcagtttcttaatccacttgctgtgcctaacccattggtcactgccttcctacagctgcaacaattgctaccatacagccagttctctttgatgaaccctgccttgtcgtggctgcaacccatcgttggaggagccatcttttagattacatatgagatgtaatcgataatggtgccctcataccggcatgtgtttcctagaaataatcaatatattgattgacatttatctcgaaaa

SEQ ID NO: 19959 - DNA, 360 bp, Zea mays
  Clone ID: LIB3151-054-Q1-K1-E8
gaccaacaagcaacatagatagtggtttccagttgctacaattgagctacaatggcgaccatgatattttccctccttatgctccttgctctttctgcatgtggtgcttacgcgacatttttccctcaatgctcacaagctcctatatgattcacttttgccccattccttccatcaatgagtagctcattatgtgaaaacccagctcctctaccctattagctcctacaagcaatcgcagcaagcaacatacctctatcacccttgttgtaactatcgccagccctatctttggtgcagtcattggtacataccatcatggcacatctgctgcagcaactcgtgctacctgtgatcaac

SEQ ID NO: 19960 - DNA, 361 bp, Zea mays
  Clone ID: LIB3151-054-Q1-K1-E9
agaccaacttgcatcatagatagctctatagtgttccaacaatggcagccaaaatattttgctttcttatgctccttggtctttctgcaagtgttgctaccgcaaccattttcccacaatagctcacaagctcctattgcttcccttcttcccccattcctctcaccagcggtgtcttctatgtgtgaaaacccaattgttcatcccttcaggatccaacaagcaatcgcaactggcatcttaccattatctcccttgttcctccaacatccgtctgccctattactgcagttacctttggtccatttggtggcacatttcatctgggctcatcaacttcatcatcttgtgcttgcatacc

SEQ ID NO: 19961 - DNA, 147 bp, Zea mays
  Clone ID: LIB3151-054-Q1-K1-F1
gcgttcgagaccattagctttatctactccagttcgctgtagaacccgatcgacaccatgaggggggtgctcgttgaccccggtctcccgggtctcgctgggagcgccaccttctcgcattcaaacggggggtgggggtggcaacca

SEQ ID NO: 19962 - DNA, 292 bp, Zea mays
  Clone ID: LIB3151-054-Q1-K1-F10
ggtcttgattgctagcggtcatgttttattatcctaggttaagtacgcttaagggcccactttcattgtccctgccacacaaaatgtgtggatggacgtatatagccttcctgtacctggatcacgggggaaaaacctgcgcccagactattttatgaggctggttgtaatacaccatcttgtccttattgcagtacttgttagggcggccccggatatacctttgcacagttgaacgaacctaatggctaatggttcaccacctactggaactctccaagcacgacggggc

SEQ ID NO: 19963 - DNA, 230 bp, Zea mays
  Clone ID: LIB3151-054-Q1-K1-F11
tcccgggtcgtccctctcgtccggcggtccgttgtccccggattgttctttttccttccatcgctgctaatctgatgcgtctttttcaccatgggcgggcatcgttctcttggttatcctctaccccaaagtcttgaaatgtgagtatgctctccgtggcgtgaccgtgatccatgctcagcgcttgctgcctcttcttccatcacaaactgggtctcttccttttgatg

SEQ ID NO: 19964 - DNA, 171 bp, Zea mays
  Clone ID: LIB3151-054-Q1-K1-F2
tcccggggcgggccagccgtccggcaccttaaaaggcccattagggttcttctatgggagcccaaatattttggcccgcggatgccccctgaggcttctggaaaagccgcttccgggaccattttcccgaaatgcccgcaagctcccataggtttccttttttccccggtc

SEQ ID NO: 19965 - DNA, 378 bp, Zea mays
  Clone ID: LIB3151-054-Q1-K1-F3
gtgaaaacccaattcttcaacccttctggatccaactggcaatcgctgctagcatcttacctttatcacccttgttcctccaacatccgtctgccctattacagctgttacctttggtgcatttgttggcacaaaacatcatggcacatcatcttcatcatcttgtgcttagaaaccttgctgcctactctcagcaacagcagtttcttccattcaaccaactggctgcattgaactctgctgcttatttgcaacaacaactaccattcagtcagcttgctgctgcctacccccagcaatttcttccattcaaccaactggcagcattgaactctgctgcttatttacaacagcaacagcttccaccattcagccagc

SEQ ID NO: 19966 - DNA, 377 bp, Zea mays
  Clone ID: LIB3151-054-Q1-K1-F7
cgaaaaccatctcaaagaaagggattctagaagtgtacaactctttgagcgaggaaagcttaaaggagttcaacaaggcttattgcgcatcgttttacccatgcatggatatactctacgaatgctatgaagatgtggcctctggaagtgaaatccggagcgtggtgttggctgggcggaagttttatgagaaagagggcctcccagcttttccgatgggcaacatcgaccaaactcgcatgtggaaagttggtgaaaaggtgcgctcaacccgtccggatagtgatcttggcccgctccatgccttcactgctggagtgtacattgccctgatgatggctcagattgtgatcctgaagaagaaagggcactcctac

SEQ ID NO: 19967 - DNA, 260 bp, Zea mays
  unsure at all n locations
  Clone ID: LIB3151-054-Q1-K1-F8
tgctggatcttctccggcggcgtccagcacttgctaccaggggttaaaaataaagtgagagacggcgcgacgtgcattgcgcatcatgtgttctgggcgcgtgcacatccagtttgtcgtttctctgtcgtgggctcgctttattctggcgtgttcgtcacaattttgatgttaactgtgaggaatatagttgggtatgccgccagtgccagttagttctggcgccggctctccgtnacggatggtgtgttcattgccct

SEQ ID NO: 19968 - DNA, 375 bp, Zea mays
  Clone ID: LIB3151-054-Q1-K1-G10
attttcagcattcagaaactctcttttcgtagcgcacttgcttcttccgggcaggttttgcttccttgagatgagccctccttgcgcttcttgccctttttgtgtgcgcaacatatgcgttcattattccacagtgctctcttgctcctagtgccattattccacagtttcttccaccagtttcttcaatgggcttcgtacatccttccgtgcatgccttcatgcttcaacttgcgcttgcggggagcgtctttcatcaaccaattgcccaattgctactacaatccttggcacatcttaacctacataccatcgcatcgcaacagctacaacagtttctggcatcactgatccacctagccgtggtgaaccctg

SEQ ID NO: 19969 - DNA, 369 bp, Zea mays
  Clone ID: LIB3151-054-Q1-K1-G11
gggtcttcagaccattagctttttcttctccagagcgcagaataacccgagcgagaccatgagggtgttgctcggtgccctcgctctcctggctctcgctgcgagcgccacctccacgcatacaagcggcggctgcggctgccagccaccgccgccggttcatctaccgccgccggtgcatctgccacctccggttcacctgccacctccggtgcatctcccaccgccggtccacctgccgtcgccggtccacctgccaccgccggtccatgtgccgccgccggttcatctgccgtcgtcaccatgccactaccctactcaaccgtcccggcctcagcctcatccccagccacacccatgcccgtgcca

SEQ ID NO: 19970 - DNA, 378 bp, Zea mays
  Clone ID: LIB3151-054-Q1-K1-G12
cttctatcagtaccatcaatcttctttcatcttagtagtataggcaccaaatgggatctgctacatcaattatgtaactccaaaaaccatgatgctggtgcttgtggttcttgctttcattgctttaatatcaagagtttcttgtacacagacaggcggctgctgctgtggtcaacatcattgccatgtgctgcttcatcatccacatcatcatcatcctctttatcatcttcatcttccacctccacttcatctcctgctgctgcttcaccaacaacaacatgttctcatgcttccactaaatacatctgcaacatcatgatgttcatgttcaacaacaacatcaactaccgctgctccttcttcttcttcttcttc

SEQ ID NO: 19971 - DNA, 347 bp, Zea mays
  Clone ID: LIB3151-054-Q1-K1-G5
ctacttgctacattgttagcacatttgtgttcctactttggctgccattattttgagcctccttatgctccttggtctttctgcaagtgctgctacagcgaccattttcccgtaatgctcgcaagctcctatatgcttcctttttcccccgttcctctcaccagcggtgtcttcggtatgtgtaaacccaattcttctacccttcaagatccaacatgcattcacagctggcatcttacctttatcacccttgttcctccaacattcatcagccctattacatcagtttcctttggtgcatctattggcacattacatcatggcacaacatcttctacaacttgtgc

SEQ ID NO: 19972 - DNA, 355 bp, Zea mays
  Clone ID: LIB3151-054-Q1-K1-G7
cgcaaatagcaccaagaaatccatcttgaggccgtcgacaggggaattaaaggcgtcgtcgtctagcagcagccaccgccgcctcatcctcgctgccgccgtcctgctctccgtgctcgcggctgccagcgcctgcgccgggacctcctgcgtgccggggtgggccatcccgcacaacccgctcccgagctgccgctggtacgtgaccagccggacctgcggcatcgggccgcgcctcccgtggccggagctgtagaggagatgctgccgggagctggcggacatcccggcgtactgccggtgcacggcgctgagcatcctcatggacggcgcgatcccgccgggcccggacgcg

SEQ ID NO: 19973 - DNA, 351 bp, Zea mays
  Clone ID: LIB3151-054-Q1-K1-G8
tatatattcaaccacaagactttttttctgaaatcctaccaagagctgtacgaggtcattgtgtacatgcatgcatctttacaggctattgggaggatgctggtactatcaattcattctttgatgcaaacttgggcctgattgtgctgccttccaaggtggatcattatgaacaaaaaactcctttattgactgtaccacgttacctgcctgacacgcagtttgactactgccctacgatagacgcatctatatatgagaggctgccactgactgaatgccacatcgagcttcctgcgattggaggctgctaacatgccaactgtcgatgcgatcccaacgactccgtta

SEQ ID NO: 19974 - DNA, 319 bp, Zea mays
  Clone ID: LIB3151-054-Q1-K1-G9
ctcatctgcgttctcagtctcccttttcctgtcagttgttgagtgtgtgtgaggctgcgtgtgggtgacatggggttttggggttgggtgcgctagggtgcgatgcggcggcggcgggcggcgtggtggtagtgtacatggcggcgtggctggttgccttgtactccctcttgatcatgcccttcttgctcccgcccgtctgcccttatgatgtccgcgtgcgcatgatagcagtggggatttgcggctgcgatgtgcacttccttaaggtgatgcgcatcgcgcacttcgtggtgatagatccgatggtgatcgggct

SEQ ID NO: 19975 - DNA, 374 bp, Zea mays
  Clone ID: LIB3151-054-Q1-K1-H10
gcggcagagcgtagagaggatcgtcttacagaacagcatgaagatggtcatcgggctcgtcgtgtgcctggctctgtcagctgccagcgcctctgcaatgcagatgccctgcccctgcgcggggctgctaggcttgttcggcgctggcgccggcctgacgacgatgatgggcgccggcgggctgttcccctacgcggagttcctgaagctgccgctgtgctgcccgctggcggcggcgccctacttcgccgggtgtgggctgacgtgcgccatgttccagccgctccggcaacagtgctgccagcagcagatgaagatgatggacgtgcagtccgtcgcgcagcagctgcagatgatgatgcatcttgagcgtg

SEQ ID NO: 19976 - DNA, 318 bp, Zea mays
  Clone ID: LIB3151-054-Q1-K1-H12
tctctgctttcataaacacaccttgcgtttctctcttgctacaacctttcttctatgaggtccttgatattagccctggttgcgcttctttcccttttattgagcgcaacaaatgcgttcattattccacagtgctcacttgctgctagtgccattattccacatttactcccaccagttacttcaatgggcttcgaacatccatccgtgcatgcctacaagcttcaacttgcgcttgcggcgtgcgtctttcaacatccaattgcccaattgcaacatcaatccttggcacatcttaaccttcaaaccatcggaacg

SEQ ID NO: 19977 - DNA, 362 bp, Zea mays
  Clone ID: LIB3151-054-Q1-K1-H7
ctttttgtgagcgcaacaaatgcgttcattattccacaatgctcacttgctcctagtgccattattccacagttcctccgaccagttacttcaatgggcttcgaacaccttgctgtgcatgccttctggcttcatcatgcgcttgcggcgtgcgtctttcatcatccaattttccaattgcatcaacaatccttggctcatctttccattcaatccatcgcttcacatctgcttcatcagttccttccagctctgatccatcttgatgtggtgaaccctgtcgcctacttgcaacaacaggtgcttgcattcaacccacttgctctggcaaacgttgctgcattccaacaacaacaacaatt

SEQ ID NO: 19978 - DNA, 180 bp, Zea mays
  Clone ID: LIB3151-054-Q1-K1-H8
ctttttgtgagcgctacatacgcgttttttattccacattgctcactcgctcggggtgccattattccactgttgctccgaccaggctctttaatgggcttggatcacctagatgtgcttgcctactagcctcttcttgcgcttgccgagtgcgtgtttctactaccattctaccaattg

SEQ ID NO: 19979 - DNA, 373 bp, Zea mays
  Clone ID: LIB3151-054-Q1-K1-H9
gcggcagagcgtagagaggatcgtcttacagaacagcatgaagatggtcatcgttctcgtcgtgtgcctggctctgtcagctgccagcgcctctgcaatgcagatgccctgcccctgcgcggggctgcaaggcttgtacagcgctggcgccggcctgacgacgatgatgggcgccggcgggctgttcccctacgcggagttcctgaagctgccgcagtgcatcccgctggcggcggcgccctactacgccgggtgtgggctgacgtgcgccatgttccagccgctccggcaacagtgctgccagcagcagatgaagatgatggacgtgcagtccgtcgcgcagcatctgcagatgatgatgcatcttgagcgt

SEQ ID NO: 19980 - DNA, 241 bp, Zea mays
  Clone ID: LIB3151-055-Q1-K1-A11
cccacgcgtccgcctacctacaacagcaacaattgctttcatctagcccgctcgctgtgggcaatgcacctacgtacctacaacaacagttgctgcaacagattgtaccagctctgactcagctagctgtggcaaaccctactgcctacttgcaacagttgcttccattcaaccaactggctgtgtcgaactctgctgtgtacctacaacagcgacaacagttacttaatccactagcagt

SEQ ID NO: 19981 - DNA, 152 bp, Zea mays
  unsure at all n locations
  Clone ID: LIB3151-055-Q1-K1-A12
ctccaacaactcgtcagctcctattacagcagttactcttggtccaattggtggcacanaacatcatggcacaacaactacaacaacttgtgctagcaaaccttgctgcatactctcagcaacatcagtttcttccattcaaccaactggct

SEQ ID NO: 19982 - DNA, 183 bp, Zea mays
  unsure at all n locations
  Clone ID: LIB3151-055-Q1-K1-B8
caactagcagcatagaaagcacaatagtgtaccaacaatggcagctaaaatantttgcctccttatgctccttggtctttctgcaagtgctgctaccgcgaccagtgggccacaatgctcacaagctcctatagcttcccttcttcccccgaacctctcaccaacggtgtcttcggtatgtga

SEQ ID NO: 19983 - DNA, 412 bp, Zea mays
  unsure at all n locations
  Clone ID: LIB3151-055-Q1-K1-C10
gtgtactcaacgagcaacatataaagtggaatccagtatcaacaatagagcatcaatggagactatgtatatttccctccttatgctccttgctctntctacatgtgttgcgggcgcgtcttttttccctcaatgctcacaagctccatagcctnccttttccccataccttcataatatagcttagttgtgaaaccactttaacattagctaacagcatccgagacatcttatgctgtggtcatgcagccattgtcatatgcaaatagcccattttactgttttataattttgaattttcatttaacattttattttttctttgttttttctttttttttttgttttttttttatttttttttttttttattttattttttttttttatttttttttgttttttatttttt

SEQ ID NO: 19984 - DNA, 289 bp, Zea mays
  unsure at all n locations
  Clone ID: LIB3151-055-Q1-K1-C11
tcagtatgtgaaacccagctcttaaccctataggctcaacaagcaatcgcagcagcaacatactctttatcaccctgttaacaatcgcttccctatctgtgggcagtcattgtacaaaccatagggcacagcactgagcaactcgtgctacctggncaaccaagtagctctggcaaccttctcctactctagcaacacaattcttcatcaaccactgctacattgaccggctgttattgcagcacactataccattcagcagtagctactgctactctagaacaacaac

SEQ ID NO: 19985 - DNA, 214 bp, Zea mays
  unsure at all n locations
  Clone ID: LIB3151-055-Q1-K1-D10
cccacgcgaccgccagcgagcggcagagaaagcacaatagtgtactcaacaagtcatattacatatttcgccttcttatgctcctnggtatttctgcaagtgctgctacggcgacggggggggcgaatgttcacaagctcctatagcttcccttctccaccgaccattacagcgggtctcggatgtgaacccaatctcaaccacagaccacagc

SEQ ID NO: 19986 - DNA, 367 bp, Zea mays
  unsure at all n locations
  Clone ID: LIB3151-055-Q1-K1-D9
ccaactagcaacatagaaagcacaatagtgtaccaacaatggcagccaaaatantttgcctccttatgctccttggtatttctgcaagtgctgctacggcgaccattttcccgcaatgctcacaagctcctatagcttcccttcttcccccgtacctctcaccagcggtgtcttcggtatgtgaaaacccaattcttaaccctacggatcaacagcatccactggctttacttataccttgtctcacatatagccattagagtacttgtcttatggcaaaataggccactcaactgctgaactgtctttaacgattttatacatgtatgatgttatgacacaatctacgtcttctccgattctacat

SEQ ID NO: 19987 - DNA, 131 bp, Zea mays
  unsure at all n locations
  Clone ID: LIB3151-055-Q1-K1-E12
tagcaacatagagagcacaatagtgtaccaacaatggcagccaaaatattgtgcctccttatgctctctggtctntctgcaagtgctgctacggcgaccattttcccgcaatgctcgcaagctcctatagc

SEQ ID NO: 19988 - DNA, 176 bp, Zea mays
  unsure at all n locations
  Clone ID: LIB3151-055-Q1-K1-E6
atacagcagttactcttggtgccattgttggcacataacatcaaggcacaacaactacaacaactngtgctaggaaaccttgctgcctactctcagcaacagcagtttcttccattcaaccaactggctgcatngaactctgctgctttattgcaacaacaactaccattcagtca

SEQ ID NO: 19989 - DNA, 393 bp, Zea mays
  Clone ID: LIB3151-055-Q1-K1-F12
atctccctctctggtctggtcacaggagctccgagacgcggccaatggttgttaagatctacgttgtgtactattccatgtatgggcatgttggcaaactagctgacgagatcaagaaaggtgccttatctgttgaaggtgttgaggctaagatatggcaggtccctgaaattctctctgaagaagtgcttggaaagatgggcgcgccctctaagcccgacgtgccagtcatcacaccgcaagaacttgcagaggctgacggtatcctctttgggtttccgacaaggttcggaatgatggcagctcagatgaaggcgttcttcgatgccaccggtgggctctggagggagcagagcctcgctggcaagcctgccggcatgttcttcatcactg

SEQ ID NO: 19990 - DNA, 302 bp, Zea mays
  Clone ID: LIB3151-055-Q1-K1-F7
accgcattatcggacgccctccaagtccaaaccctctccccgccgcatcgccgccgccggaagcgcctccctcgatccagatccaggagatatgcctcgctatgaggagcgctctgggaatacacgcttgtatgttggaagattgtctccccgcacccgttctcgtgacctagaataccttttcagcaaatatggaagaattcgagaagtggagttgaagcgtgactatgcattcattgaattcagtgacccccgtgatgctgatgatgcacagtacaacctagatggcagggaagtcgatg

SEQ ID NO: 19991 - DNA, 179 bp, Zea mays
  Clone ID: LIB3151-055-Q1-K1-F8
tcgatccagaccaggagaatgcctcgtatgaggagggtctttaatacacgctgtatgttgaagattgtctccccacccgtctcgtgacctaaatacctttagaaatatggaaaattcagagtggagttgagcgtgactatgcatcatgaattagcgcccccggatgctatgatcacagt

SEQ ID NO: 19992 - DNA, 51 bp, Zea mays
  Clone ID: LIB3151-055-Q1-K1-F9
caaccccccccccattcccccctatctcttcccaccaaccagaaatccacc

SEQ ID NO: 19993 - DNA, 209 bp, Zea mays
  Clone ID: LIB3151-055-Q1-K1-G4
cccaagccagcaggcgctcgatacattccacacaacaacccccagctctgccccagcccgcccacaggagttcccgcatctccctctctggtctggtcacaggagctccgagacctctccaatggcggttaagatctacgttgtgtactattccatgtatgggcatgttggcaaactagctgacgagatcaagaaaggtgccttatctg

SEQ ID NO: 19994 - DNA, 305 bp, Zea mays
  unsure at all n locations
  Clone ID: LIB3151-055-Q1-K1-G5
gcattcagaaacacaccaagcgaagcgcactagcaacaacctaacaacaatggctaccaagatattagccctccttgcgccttcttgccctttagtgagcgcaacanatgcgttcattattccacagtgctcacttgctcctagtgccattattccacagttcctcccaccagttacttcaatgggcttcgaacatccagccgtgcaagcctacaggctacaactagcgcttgcggcgagcgtcttacaacaaccaattgcccaattgcaacaacaatccttggcacatctaaacctacaaacca

SEQ ID NO: 19995 - DNA, 225 bp, Zea mays
  Clone ID: LIB3151-055-Q1-K1-G7
ctactccagagcgcagatgattccgatcgacaccatgagggtgttgctcgttgccctcgctctcctggctctcgctgcgagcgccacctccacgcatacaagcggcggcggctgctgttagccaccgccgccggttcatctaccgccgccggtgcatctgccaccttcggttcatctgccaccttcggtgcatgctccaccgacggttcacctgcctgcgccggt

SEQ ID NO: 19996 - DNA, 191 bp, Zea mays
  Clone ID: LIB3151-055-Q1-K1-H11
gattgagaccaacaagcaacatagaaagtggaatccagtagcaacaatagagcaacaatggcgaccaagatattttccctccttatgctccttgctctttctgcatgtgttgctaacgcgacaattttccctaatgctccaagctcctatagcttcccttttaccccaaccttcataatgatgcttagttg

SEQ ID NO: 19997 - DNA, 78 bp, Zea mays
  Clone ID: LIB3151-055-Q1-K1-H4
cgacgcacgcgtccagaacaagcaacatagaaagtggaatccagtagcaacaatagagcaacaatggcgaccaagata

SEQ ID NO: 19998 - DNA, 166 bp, Zea mays
  Clone ID: LIB3151-055-Q1-K1-H5
tgtgctgttctgttgtgacgcactagctcagcggtggtgcacacgcgcgtcatacgcccgtgattgcactcgatactgcactcggtcttacactcgtcactgcgcgcgtcactgcacgcggcattccgcgcgtattgcgcgacatcatactatacgccgctactat

SEQ ID NO: 19999 - DNA, 170 bp, Zea mays
  unsure at all n locations
  Clone ID: LIB3151-055-Q1-K1-H6
cgtaccaacaatggcagatacatatatttgcctncttatgctcctnggtctttctgcatgttctgctacggcgaccatnttcccacaatgctcacaagctgctatagcttcccttcttaccccgtaactctcaccaacggtgtcttcggtatgtgaaaacccaattcttc

SEQ ID NO: 20000 - DNA, 218 bp, Zea mays
  unsure at all n locations
  Clone ID: LIB3151-055-Q1-K1-H7
cgcanatggcaccaagaaatccatcgagaggccgtcgacaggngaattaatggcgtcgtcgtctagcagcagccaccgccgcctcatcctcgcagccgccgtcctgctctccgtgctcgcggctgccagcgccagcgccgggacctcctgcgtgccggggtgggccatcccgcacaacccgctcccgagctgccgctggtacgtgaccagccggacct

SEQ ID NO: 20001 - DNA, 168 bp, Zea mays
  unsure at all n locations
  Clone ID: LIB3151-055-Q1-K1-H8
tcgatttgagcattcagaaacacaccaagcgaagcgcactagcaacgacctaacaacaatggctaccaagatattagccctccttgcgccttcttgcccttttgtgagcgcaacanatgcgttcattattccacaatgctcacttgctcctagtgccattattccaca

SEQ ID NO: 20002 - DNA, 150 bp, Zea mays
  unsure at all n locations
  Clone ID: LIB3151-055-Q1-K1-H9
ccctctcctaccgccgccccgtcctcggcccncacgcgctcgcgcggcgcacgaggcgacgaaccctaccttcttcttcgcgcccgttcctgtcaccggtcgccgatattggaaggagctctgagggctggggcgcttaccttagtttta

SEQ ID NO: 20003 - DNA, 322 bp, Zea mays
  Clone ID: LIB3151-056-Q1-K1-A11
aattcccgttcgacccatcgtcgttaaaaccaccaagcaacttatatttcaaccacaacattctcgggaggatcttcttggcgctgccttttctatccacattatcttattttctaatttacatcttcttattgtctattttaccttttactacaaatttctataacttttattatatattattatacaatattttatataacctaattattatattttttaaaaaaataaaattattctacctttttatagatccaacttactacctttcattcacgtatatttttttatattttacctatttaatttatgccttattttt

SEQ ID NO: 20004 - DNA, 123 bp, Zea mays
  Clone ID: LIB3151-056-Q1-K1-A12
ggccgccccacctcgctgttacgtgtatgtgcttccctaacctcgaagcttctacgcgagaggcggtgaatccaatggcgggcgaggaatatctcactgtatgctgctgctttcccattctgc

SEQ ID NO: 20005 - DNA, 135 bp, Zea mays
  Clone ID: LIB3151-056-Q1-K1-B11
gccaaaatccaagcgcgtcgccacgcatttctcccattgcctcaaatccggaaattgcgcgtttggccggctctgaaggccttctttgtagacgcgcgcgggctgctatgcgttcgcgctgcagggaatttttcc

SEQ ID NO: 20006 - DNA, 137 bp, Zea mays
  Clone ID: LIB3151-056-Q1-K1-B12
tacatttccagattctaaaaaactttattattgatacaacaataagcaatctaaaagagggcccaccagatggttgtggtggggctgctgggtttgtcaaacagtggacaaggcaactttgttgagttgttgagggt

SEQ ID NO: 20007 - DNA, 441 bp, Zea mays
  Clone ID: LIB3151-056-Q1-K1-B9
ggccgaccgacgcgtacggtttgtgaattctttactttattctcaagcttatggtgcgttgaaaacaacagcggatctagaagactttgatttggcagatgaaactcattcttatgaataaaaagttgaaattgcacaaaaggatgtcccgtctgctgtgtttggaggtattcggaagagggaagatggcgatgacattcatgatggagatgatgcctctgctgccaaagaaaaatgcagtataagcctactgggtgcacttgaacgaattaaaaggcacaaacaagcttataaatattacacatccaactcgtactactgagatatatctttgacaattctatgaactaactgtgtaatgtctacactataagcgaaatttgagtgccatctattggatcattttgtatatttggaacaaaattatatacatttcaagtt

SEQ ID NO: 20008 - DNA, 258 bp, Zea mays
  Clone ID: LIB3151-056-Q1-K1-C11
atcgttctcgtcgtgtgcctggctctgtcatctgccagcgcctcttcaatgcagatgccctaccccttctcggggcggcattgcttgtacaactctaatgacttttttacatttattattgagattggatcccaattttatatcattttaaaactaattttttattaaaaaaatttttttttattttcttgtaagggtttaaatttgtacccggatttgcccctgttttttataatattctatttttaaaaatacatt

SEQ ID NO: 20009 - DNA, 376 bp, Zea mays
  Clone ID: LIB3151-056-Q1-K1-C12
aatattttgagcattcagaaacacaccaagcgaagcgcactagcaacgacctaacaacaatggctaccaagatattagccctccttgcgcttcttgccctttttgtgagcgcaacaaatgcgttcattattccacaatgctcacttgctcctagtgccattattccacagttcctcccaccagttacttcaatgggcttcgaacacctagctgtgcaagccaacatgcaacaacaagcgcttgcggcgagcgtcttacaacaaccaattgcccaattgcaacaacaatccttgccacatctaacaatacaagccatcacaacgcaacagcaacaacagttcctaccagcactgaaccacctagccatggtgaaccc

SEQ ID NO: 20010 - DNA, 166 bp, Zea mays
  Clone ID: LIB3151-056-Q1-K1-D11
ttacatcccccaccatcccttttattattcccattaataactacaaaattttctttctaattactaacttttccaaaactaatataccatatcatatcacttctcccttatatcctatcatatacaataatcaaacattcaaatcctatttaatccaccttttaac

SEQ ID NO: 20011 - DNA, 417 bp, Zea mays
  Clone ID: LIB3151-056-Q1-K1-D12
gcaacatagaaagtggaatccagtagcaacaatagagcaacaatggcgaccaagatattttcgctccttatgctccttgctctttctgcatgtgttgctaacgcgacaattttccatcaatgatagcttcagtatgtgaaaacccagctcttcaaccctatatgctccaacaagcaatcgcagcaagcaacatacctttatcacccttgtttcaacaatcgccagccctatctttggtgcagtcattggtacaaaccatcatggcacagcagctgcagcaactcgtgctacctgtgatcaaccaagtagctctggcaaacctttctccctactctcagcaacaacaatttcttccattcaaccaactgtctacattgaaccgtgctgcttatttgcagcaacaactattaccattca

SEQ ID NO: 20012 - DNA, 260 bp, Zea mays
  Clone ID: LIB3151-056-Q1-K1-E11
gagaccaacaagcaacatagaaagtggaatccagtagcaacaatagagcaacaatggcgaccaagatattttccctccttatgctccttgctctttctgcatgtgttgctaacgcgacaattttccctcaatgctcacaagctcctatagcttcccttcttcccccataccttccatcaatgatagcttcagtatgtgaaaacccagctcttcaaccctataggctccaacaagcaatcgcagcaagcaacataccttta

SEQ ID NO: 20013 - DNA, 341 bp, Zea mays
  unsure at all n locations
  Clone ID: LIB3151-056-Q1-K1-E12
acttataaacacaccaatcatatctctttatatttatacataacaacaatagctaccaaggtataagttatattttaacttggggatcatcatactatttcttcaatttttcataacaaaacaaaattcaattatttatcaaaatccaatataaattatcaacttataatatatttcaaattaataaattcataattatttacaaaacaaaacaaatatatctatatatataaattaaataattaatcataaattatttcattaaaattatnattattattaataaaaccattttatacttttttttaaatttttcattaaaaatataattcttattattt

SEQ ID NO: 20014 - DNA, 177 bp, Zea mays
  Clone ID: LIB3151-056-Q1-K1-E9
tctctcataccattttccttaatcatcaccctcttccttcaaaacctcttccagtataatttcaaactaaacttgcacttaattccattcctactatagacacattatcatctcaaactacaatccataaaaacaaacctacaaacctattatactatatataaatccaacaaaaca

SEQ ID NO: 20015 - DNA, 394 bp, Zea mays
  unsure at all n locations
  Clone ID: LIB3151-056-Q1-K1-F10
ctggctttcactggtttctgttcatatttattgaaggntactttccntatcggtctacgtttaatctcaacttaatctcaatcaaactaaactcttatttatcattataaactatcttccaactgtcttttaaattgtaacttgaaggaaccccatataatacaatcccacattacaaaatttaatccaatcacgaaacatctccaatatatcaatctatttacatccaaaaaacaatcctaaattagttgatcaaaattattatgaggatgaataataacatgtccacacctttttcccgatttttggtggaagatataattctcattagttttggatcacttgtgacaactttgaaccgtcttaccatttaatagttcgttaatattacacc

SEQ ID NO: 20016 - DNA, 399 bp, Zea mays
  Clone ID: LIB3151-056-Q1-K1-F12
gagcattcaaaaacacaccaagccgagctacctagcaacgactaaacaacaatggctaccaagatattagccctccttgcgcttcttgccctttttgtgagcgcaacatatgcgttcattattccacaatgctcacttgctcctagtgccattataccacagttcctccgaccagttacttcaatgggcttcgaacacctagctgtgcaagcctacaggctacaacaagcgcttgcggcgagcgtcttacaacaaccaattaaccaattgcaacaacaatccttggcacatctaaccatacaaaccatcgcaacacaacagcaacaacagttcctaccagcactgagccaactagatgtggtgaaccctgtcgcctacttgcaacagcatgtgcttgca

SEQ ID NO: 20017 - DNA, 411 bp, Zea mays
  Clone ID: LIB3151-056-Q1-K1-G12
gatgaatcctacaatttggttgtaggcctgcttatcagacagaacctcgttgattcatctctgaagtatttggatctgatgcttaaatcgggctacatgttatcactaactgttttcacagattatatccgagcatgtatgagatctgggaggttggacacgttgacatcaattatagagaaatgcaagacaactgataagaacaaagtcttgtgtccggaatggacttggtgcattgacatatcagatgctgcatttgaagctaacaacagcaaattagctctttttgctttggaatatcttgcaagatggattgctcgtggtgagaatgttaaacctcctgttcagctgtcagttaatgaaggtcttgtaatatcagctctgagtgctgctggcagaacttataatact

SEQ ID NO: 20018 - DNA, 258 bp, Zea mays
  Clone ID: LIB3151-056-Q1-K1-H11
tctatttttaaaaaatatacccttaaaacccccacattccccacatactttctttcccaaatcctctttttgcaattttcttatataggataaatccctccaatctcccttctcaaaatttttactcttatttctaatttacactccctttttttccatttttgttttgtttttttactctctcactttacccctcactttcaaatcccttattccccctcctttttatttttttccttcctttttttccacaaattt

SEQ ID NO: 20019 - DNA, 271 bp, Zea mays
  Clone ID: LIB3151-056-Q1-K1-H12
acgctatctactgcatcctcaagaaggagggcgccggcggcctgtaccgaggtctcggcccgtagctgcataagctcatgcccgccccgcatcgccttatgtgctacgaggcgtgcaagaagatcctgtcgacaaggaggatgaggaggaggaggacgaaccgcggcggagaggatgacaagaaaaaggttgaatgatcaaagttcttggccaagaaggtagcatgtcttgaagcgtcgtgaactggaaacggatggacaagttatttgga

SEQ ID NO: 20020 - DNA, 388 bp, Zea mays
  Clone ID: LIB3151-057-Q1-K1-A1
cacgcgtccgaatattttgagcattcaaaaacacatttttcgaagcacattaccaacaaccggagggcagtttctaccaagagatggtccctacttgcgcttattgcgctttttgcgagcgcaacaaatgccgccattattccacaatgctcacttgctccaagatccattattacacaggtactgccaccatgtacttcaatgagcttggaacacccacctgtgcaagcctatatgctacaacaagcaattgcggggagcgggttacaacaaccaatttgccagttgcaacaacaatccttggcacatctaacaatacaaaccatcgcaacgcaacagcaaccacaattcctaccaacactgaaccacctaaccatggtgaaccctg

SEQ ID NO: 20021 - DNA, 315 bp, Zea mays
  unsure at all n locations
  Clone ID: LIB3151-057-Q1-K1-A10
cccacgcgtccgattagctttatctactccagagcgcagaagaacccgatcgacaccatgagggtgttgctcgttgccctcgctctcctggctctcgctgcgagcgccacctccacgcatacaagcggcggctgcggctgccagccaccgccgccggttcatctaccgccgccggtgcatctgccaccttcggttcacctgccacctccggtgcatcttccaccgccggtccacctgccgccgccggtccacctgccaccgncggtccatgtgccgccgccggttcatctgccgccgccaccatgccactaccct

SEQ ID NO: 20022 - DNA, 382 bp, Zea mays
  Clone ID: LIB3151-057-Q1-K1-A11
ctgcctccccacttcgcaccgccaccgtctcccgaccgcgacgccggcgacctccgcaccgcatcgctccagccgatcgttccgagatttgttgatcaaagaaccatggaaggatcgttccagttgaatcccaacgccagtcctttcatacctggattgctgggttcatctgcacaaaaagccccagaaaaacaaggagggtcatcatcaaagggagagccttctggtagcacctttgatccttctgagtatgaggaaaatgacatggatgaacttgctctagtcaaaatggtcttttcaatgttcccaaatgtctccacggacttcattgatgagttaatcaaagcaaatgattttgacatgaatctgactgttgatatgc

SEQ ID NO: 20023 - DNA, 315 bp, Zea mays
  unsure at all n locations
  Clone ID: LIB3151-057-Q1-K1-A12
cttcagaccattagctttatctatttctgagcgcagaagaaccccatcgacgggaggatggtgttgctcgttgccgtccttcttctggttgttgttgctagcaccacctccacgcatactaccagcggctgctgctgctagccaccgccgccggttgatctaccgccgccggcgcatcagccacctcctgttgatctgccgcctcctgcgcatcttctaccgccggtgcacctgctgccgccggtggacctgctaccgccggtccatgatgcgccgccggttgatcatgtgccgncaccatgatactactactac

SEQ ID NO: 20024 - DNA, 358 bp, Zea mays
  Clone ID: LIB3151-057-Q1-K1-A2
caactagcaacatagaaagcacaatattgtaccaacaatggcagctaaaatatgggggctccttatgctccttggtctttctgcaagtgctgctacggcgaccattttcccacaatgctcacaagctcctatagcttcccttcttcccccgtacctctcaccaacggtgtcttcggtatgtgaaaacccaattcttcaaccctacaggatccaacaggcaatcgcagctggcatcttacctttatcacccttgttcctccaacaatcatcagccctattacagcagttacctttggtgcatttattggcacaaaacatcaaggcacaacaactacaacaacttgggctagcaaacctt

SEQ ID NO: 20025 - DNA, 236 bp, Zea mays
  unsure at all n locations
  Clone ID: LIB3151-057-Q1-K1-A3
cggaanccggggcggccacgcgtccgctccagagcgcagaagaacccgatcgtctccatgagggtgttgctcgttgcccgcgctctcctggctctcgctgcgagcgccacctccacgcatacaagcggcggctgcggctgccagccaccgccgccggttcatctaccgccgccggtgcatctgccacctccggttcacctgccacctccggtgcatctcccaccgccggtccacct

SEQ ID NO: 20026 - DNA, 382 bp, Zea mays
  Clone ID: LIB3151-057-Q1-K1-A4
caaatgttgatgggatcaaaattttttgtgcagcgaagtggaaatgtactgatgggctttaacaacaaggaggcaagctctgcgatcccactattttcacctgtaattgttcctatggcacagagttttggccctatattctcccaattggcatcgtatccaacaatccgatttggggcagaagcagctattaagcagcttgagaatctaagcccacctgttgttaagcaacttctacctttacttcaacaacttcctccgttgtatatggacctaataaaagggcgggaggacttcattccaaaaccagaagagacacgccgcctgataaaatcctactatggaatttctcggaatctcttagtaaaagttaaagatgatc

SEQ ID NO: 20027 - DNA, 323 bp, Zea mays
  Clone ID: LIB3151-057-Q1-K1-A6
agccttccggaccggaagtccgctttaggtggttgtctccgttcgatcataagcaacacaacggggttccgtttgcgtcgctccggcggcctcccctccctggtcggtcgatcgcgaggatgacgccggcgagcgtggtcgccgcgcccaggagcgtcggagcgttgcccttggcggcgttcccggcgcccgcgagggccggggtgcggaggaacggtcggtcctcgaggcccgccgcgtgcggcggggactaccagcatgcgacgtccatggccgcgatgcctgcgtcgctgcgcgccatgcaggcccggacgaagcaagag

SEQ ID NO: 20028 - DNA, 377 bp, Zea mays
  Clone ID: LIB3151-057-Q1-K1-A7
aatattttgagcattcagaaacacattaagcgaagcacattagcaacaacctagcaacaatggctaccaagatattatccctccttgcgcttcttgcgctttttgcgagcgcaacaaatgcgttcattattccacaatgctcacttgctccaagttccattattacacagttgctgccaccagttacttcaatgggccttgaacacccagctgtgcaagcctataggctacaacaagcaattgcggcgagcgtcttacaacaaccaatttcccagttgcaacaacaatccttggcacatctaacaatacaaaccatcgcaacgcaacagcaacaacaattgctaccagcactgagccacctagccatggtgaaccct

SEQ ID NO: 20029 - DNA, 386 bp, Zea mays
  Clone ID: LIB3151-057-Q1-K1-A8
gtctacattgaaccgtgctgcttatttgcagcaacaactattaccattcagggggctagctactgcctactgtgagcaacaacaacttcttccatttaaccaattggccgcactgaaccccgctgcttatttgcagcagcaaatactactaccatttacccagctagctgcagcaagccgtgctttcttcttgacacagcaacagttgctgcctttctaccagcagtttgcggctaaccccgcaaccctcttacaactacaacaattgttgccctttgtccaacttgctttgacaaacccagcaggcttctaccaacaacacatcattggtggtgccctcttttagattgcttattaggtcgaattcaataataaagatttttgga

SEQ ID NO: 20030 - DNA, 367 bp, Zea mays
  Clone ID: LIB3151-057-Q1-K1-A9
agaccattagctttatctactccatttcgcagaagaacccgatcgacaccgtgggggtgttgctcgttggcctggctctcctggctctcgctgcgagcgccacctccacgcatacaagcggcggctgcggctgccagccaccgccggcggttcatctaccgccgtcggtgcatctgccacctgcggttcacctgccacctccagggcaatgtccaccggccgtccacctgccgccgccagtgcacctgccaccggcagtccatggtgccccgactgttcatatgtcgtcgacaccatgccactaccctacttaaccgacccggccttagcctgatccccaggcacacccatgcccgtgccaacaggc

SEQ ID NO: 20031 - DNA, 349 bp, Zea mays
  Clone ID: LIB3151-057-Q1-K1-B1
aagaaccccatcgacaccgtccgccgttttgcaaaaatgacgcgggctctccaaactatagctgcgagcaccacctccactcatacaaacagctgctgcggctgccatccaccgcctccggttcatctaccgccgacagtgcatctgccaccttcggatcacctgccacctccagtgcatatcccaccaacaagccacctgacgacgccagaccacctgacaccgcctgtccatgtgccaacgccgattcatatgtcggcggcaccatgccactaccctactcaaccgcccccgcctgagcctaattctcagccacacccatgcccctgccaacagccgcatacaaacc

SEQ ID NO: 20032 - DNA, 374 bp, Zea mays
  Clone ID: LIB3151-057-Q1-K1-B10
aaagcggcagtgcgtagagaggattgtcgaacagaacagcatgaagatggtcatcgttctcgtcgtgtgcctggctctgtcagctgccagcgcctctgcaatgcagatgccctgcccctgcgcggggctgcagggcttgtacggcgctggcgccggcctgacgacgatgatgggcgccggcgggctgtacccctacgcggagtacctgaggcagccgcagtgcagcccgctggcggcggcgccctactacgccgggtgtgggcagacgagcgccatgtaccagccgctccggcaacagtgctgccagcagcagatgaggatgatggacgtgcagtccgtcgcgcagcagctgcagatgatgatgcagcttgagc

SEQ ID NO: 20033 - DNA, 340 bp, Zea mays
  Clone ID: LIB3151-057-Q1-K1-B11
caacaactacaacaacttgtgcttttaaaccttgctgcctactctcagcaacaggagtttcttccattcaaccgactaggttcattgaactctgcttcttatttgcaacaacaacaactaccattcagccagctacctgctgcctacccccagcaatttcttccattcaaccaactagcagcattgaactctcctgcttatttacagcagcaacaactactaccattcagccagctagctggtgtgagccctgctaccttcttgacacaaccacagttgttgccgttctaccagcacgttgcgcctaacgctggcaccctcttacaactgcaacaattgc

SEQ ID NO: 20034 - DNA, 322 bp, Zea mays
  unsure at all n locations
  Clone ID: LIB3151-057-Q1-K1-B12
agaccattagctttatctactccagagcgcagaagaacccgatcgacaccatgagggtgttgctcgttgccctcgctctcctggctctcgctgcgagcgccacctccacgcatacaagcggcggctgcggctgccagccaccgccgccggttcatctaccgccgccggtgcatctgccaccttcggttcacctgccaccttcggtgcatctcccaccgccggtccacctgccgncgccggtccacctgccaccgccggtccatgtgccgccgccggttcatctgccgccgccaccatgccactaccctactcaaccgccccg

SEQ ID NO: 20035 - DNA, 336 bp, Zea mays
  Clone ID: LIB3151-057-Q1-K1-B2
gccattccctctttagaggggatttttttatcgggcttattattccttattaggccaggcaaggatcggagttgctctgaattgactgaaccatggcggcgacaatggcagtgacgacgatggtgacgaggagcaaggagagctggtcgtcattgcaggtcccggcggtggcattcccttggaagccacgaggtggcaagaccggcggcctcgagttccctcgccgggcgatgttcgccagcgtcggcctcaacgtgtgcccgggcgtcccagcggggcgcgacccgcgggagcccgatcccaaggtcgtccgggcggccgacaactgcgacatcg

SEQ ID NO: 20036 - DNA, 380 bp, Zea mays
  Clone ID: LIB3151-057-Q1-K1-B3
caacaagcaacatagaaagtggaattttttagcaacaatagagcaacaatggcgaccaagatattttccctccttatgctccttgctctttctgcatgtgttgctaacgcgacaattttccctcaatgctcacaagctcctatagcttcccttcttcccccataccttccatcaatgatagcttcagtatgtgaaaacccagctcttcaaccctataggctccaacaagcaatcgcagcaagcaacatacctttatcacccttgtttcaacaatcgccagccctatctttggtgcagtcattggtacaaaccatcagggcacagcagctgcagcaactagtgctacctgtgatcaaccaagtagctctggcaaacctttc

SEQ ID NO: 20037 - DNA, 334 bp, Zea mays
  Clone ID: LIB3151-057-Q1-K1-B4
cccacgcgtccgcagaaacacaccattttaagcgcactagcaacgacctaacaacgggggctaccaagatattagccctccttgcgcttcttgccctttttgtgagcgcaacaaatgcgttcattattccacaatgctcacttgctcctagtgccattattccacagttcctcccaccagttacttcaatgggcttcgaacacctagctgtgcaagccaacatgcaacaacaagcgcttgcggcgagcgtcttacaacaaccaattgcccaattgcaacaacaatccttgccacatctaacaatacaagccatcacaacgcaacagcaacaaca

SEQ ID NO: 20038 - DNA, 312 bp, Zea mays
  Clone ID: LIB3151-057-Q1-K1-B5
taacaacgacctaacagcgccggttatcaagatatcaggggttcttacgcttcttgccctttttggcaacccaacaaatgcattcattattccacaatgctcacttactcctagtgccattattacacagttcctcccaccacttacttcaatgtacttaccacacctagctgcccaagccaacatgcaacaacaagcgcttgcggcgaacgtcttacaacaaccaattgccccattgcaacaacataccttgccacatctaatactacaagccatcacaccgcaccaacctcaacacatcctaccaacact

SEQ ID NO: 20039 - DNA, 338 bp, Zea mays
  unsure at all n locations
  Clone ID: LIB3151-057-Q1-K1-B6
cggaccaagccttccgttgggttttaaaaccattacctttttttattccaaagcgcaaaaaaacccgagggggaccatgagggtgttgctggttgccctcgctctcctggctttcgctgcgagcgccacctncacccatccaaccgggggctgcggctgccagccaccgccgccggttatctaccgccgccggtgcatctgccacctccggttcacctgccacctccggtgcatctcccaccgccggtccacctgccgccgccggtccacctgccaaccgncggtccatgtgccgccgccggttcatctgccgncgccaccatgccactaccctactc

SEQ ID NO: 20040 - DNA, 116 bp, Zea mays
  Clone ID: LIB3151-057-Q1-K1-B7
acaccataaactgtgtctactttttttctcaaaagaaccccatcgacaccgtgggggttttgcttcgttgcgctcgctcttctggctatagctgcgagcgccacctccacgcatac

SEQ ID NO: 20041 - DNA, 384 bp, Zea mays
  Clone ID: LIB3151-057-Q1-K1-B8
cggacgcgtgggtagctttatctacttcagagcgcagaagaacccgatcggcgccatgagggtgttgctcggtgccctcgctctcctggctctcgctgcgagcgccacctccacgcatacaagcggcggctgcggctgccagccaccgccgccggttcatctaccgccgccggtgcatctgccacctccggttcacctgccacctccggtgcatctcccaccgccggtccacctgccgccgccggtccacctgccaccgccggtccatgtgccgccgccggttcatctgccgccgccaccatgccactaccctactcaaccgccccggcctcagcctcatccccagccacacccatgcccgtgccaacagccgcatccaagccc

SEQ ID NO: 20042 - DNA, 376 bp, Zea mays
  unsure at all n locations
  Clone ID: LIB3151-057-Q1-K1-B9
aacatattatttnggaatcctgnatctacaatagagcaacaanggcgccgcggattttaaactccggaggctcctaaatctttctgcatgtgttgctaacgcgacaattttccctcaatgctcacaagctcctatagcttcccttcttcccccataccttccatcaatgatagcttcagtatgtgaaaacccagctcttcaaccctataggctccaacaagcaatcgcagcaagcaacatacctttatcacccttgtttcaacaatcgccagccctatctttggtgcagtcattggtacaaaccatcaaggcacagcagctgcagcaactagtgctacctgtgatcaaccaagtaactcttgcaaacctttctccc

SEQ ID NO: 20043 - DNA, 393 bp, Zea mays
  Clone ID: LIB3151-057-Q1-K1-C10
cacgcgtccggggtttttgattttagccgccgttttttttcatctcacatccctcgagaagacgcgtgcttctagccgatcgatgcgatggccgtcttctccgacctccacaccgccgacggcctcaagtccctcgaggctcacctcgccggcaaaacctatgtgtctggtgactccattactaaggatgacattaaggtcttcgccgcggtgccgtcgaagcctggcgctgagtttcctaatgccgcccgctggtacgagaccgtctctgcggctgtagcctcaagattccctggtaaggctgttggtgtaaatctgcctgcgggatcagctcctgcggcagctgctcctgcggatgaggctgaggatgatgatgaccttgatctttttggg

SEQ ID NO: 20044 - DNA, 353 bp, Zea mays
  Clone ID: LIB3151-057-Q1-K1-C11
gaccaactagcaacatagaaagctttatagtgtaccaacaatggcagccaaaaggttttgcctccttatgctccgtggtctttctgcaagtgctgctacggcgaccattttcccgaaatgctcgcaagctcctatagcttcccttcttcccccgtacctctcaccagcggtgtcttcggtatgtgaaaacccaattcttcaaccctacaggatccaacaggcaatcacagctggcatcttacctttatcacccttgttcctccaacaatcatcagccctattacatcagttacctttggtgcatttattggcacaaaacatcagggcacaacaactacaacaacttgtgctag

SEQ ID NO: 20045 - DNA, 365 bp, Zea mays
  Clone ID: LIB3151-057-Q1-K1-C3
cgcacacacacacaaccagatctcttttaaatccacccgtcggcacctccgctggaagatgcagatctttgtgaaaaccctgaccggcaagactatcaccctcgaggtggagtcgtctgacaccattgacaacgttaaggccaagatccaggacaaggagggcatccccccagaccagcagcggctcatcttcgctggcaaacagcttgaggacgggcgcacgcttgctgactacaacatccagaaggagagcaccctccaccttgtgctccgcctcaggggaggcatgcagatctttgtgaaaaccctgaccggcaagactatcaccctcgaggtggagtcctctgacaccattgacaacgtca

SEQ ID NO: 20046 - DNA, 173 bp, Zea mays
  Clone ID: LIB3151-057-Q1-K1-C5
gggtttttgattttagccgccgccttggttcatctcacatccctcgagaagacgggtgcttctagccgatcgaggccatggccaaattctccgacctccacaccgccgacggcctcaagtccctcgaagctcacctcgccggcaaaacctatgtgtctggggactccattact

SEQ ID NO: 20047 - DNA, 364 bp, Zea mays
  Clone ID: LIB3151-057-Q1-K1-C7
gcagtcccccgacccggagcctttgctaacaaacagccggtccgccttctggcgcggctgcagccagcgcgaggtacctggctggcattttagcatttgaggtcatcattgaatggctgcaacgatgggttcaatatctgccaacggttcttaccaaacaaataggcccagtgcactaaagcaggcacctcacatgcaattgcaacaatgatgcaacggtcgacttacgttcttaagcaagcactcacaatccatgcgaagtacgatacaggtggctaaaacaagagctacagataatggaattaatccaaagactacgggacatcgtgcacctattgtatgctcaggtgggatgactattgta

SEQ ID NO: 20048 - DNA, 379 bp, Zea mays
  Clone ID: LIB3151-057-Q1-K1-C8
agaccattagctttatctacttttgtgcgcagaagaacccgatcgacaccgggggggtgttgctcgttgccctcgctctcctggctctcgctgcgagcgccacctccacgcatacaagcggcggctgcggctgccagccaccgccgccggttcatctaccgccgccggtgcatctgccacctccggttcacctgccacctccggtgcatctgccaccgccggtccacctgccgccgccggtccacctgccaccgccggtccatgtgccgccgccggttcatctgccgccgccaccatgccactaccctactcaaccgccccggccttagcctcatacccagccacacccatgcccgtgccaacagccgcattcaagccc

SEQ ID NO: 20049 - DNA, 347 bp, Zea mays
  Clone ID: LIB3151-057-Q1-K1-C9
gcaattagctcatctactccattgtgtagaactcgacaccatgaacgtgcggggcgtttttcttgctctcctggctctcactacgagcgcctcctccagtacaagcggcggctgtggctgccagacaccaccgtttcatctaccgcctccgttctatatgccgcctccgatctatctgccgccgcagcagcagccgcagccatggcaataccccactcaaccaccgcagctaagcccgtgccagcagttcggatcctgctgcgtctgcagcgtaagcagcccgttcctaggccagtgcgtacagtttctgaggcaacaatacagcccggcggcgactccctacagct

SEQ ID NO: 20050 - DNA, 350 bp, Zea mays
  Clone ID: LIB3151-057-Q1-K1-D1
attgagaccaactagcaacatagattgttcaatagtgtaccaacaatggcagccaagatattttgcttccttatgctccttggtctttctgcaagtgttgctaccgcaaccattttcccacaatgctcacaagctcctatagcttcccttcttcccccatacctctcaccagcggtgtcttcaatgtgtgaaaacccaattgttcaaccctacaggatccaacaggcaatcgcaacaggcatcttaaccattatcacccttgttcctccaacaaccgtcagccctattacagcagttacctttggtccatttggtggcacaaaacatcagggcacaacaactacaacaac

SEQ ID NO: 20051 - DNA, 367 bp, Zea mays
  Clone ID: LIB3151-057-Q1-K1-D10
ctccaactccaaggatgaccctgctttgaggctgccagcttcacctcccagggcatcatcatgaaccaccctgggcagattggcaacggctatgccccagtgctggactgccacacctcccacattgctgtcaagtttgctgagctcattaccaagatcgacaggcggtctggcaaggagcttgagaaggagccaaagttcctgaagaacggtgatgctggtatggtgaagatgataccaaccaagcccatggtggtggagacattctcagcgtatcctcccctcggtaggtttgctgtccgtgacatgaagcaaacgggtgctgttggagttatcaagagtgtggagaagaaggacccgaccggcg

SEQ ID NO: 20052 - DNA, 384 bp, Zea mays
  unsure at all n locations
  Clone ID: LIB3151-057-Q1-K1-D11
tcaacaagcaacatttaaagcggtattctttagcaacaatagagcaacaatggcgcccattttataatccatccgggatgctccaaaactctntctgcatgtgttgctaacactaccatttttcctcaatactcacaagctcctatagctgcccttcttcccccataccttccatcaatgaccgcttcagtatgtgaaaacccagcccttcaaccctacaggctccaacaagcaatcgcaacaagcaacttacctttatcacccctcatctttcaacaatcgccagccctatctttggtgcagtcattgctacaaaccatcagggcacaacagctgcaacaactcctgctaccagtgatcagccaagtagctcttgcaaacctt

SEQ ID NO: 20053 - DNA, 266 bp, Zea mays
  Clone ID: LIB3151-057-Q1-K1-D12
gctagctggtgtgagccctgcttttttcttgatacaaccacagttgttgccgggctaccagcacgctgcgcctaacgctggcaccctcttacaactgcaacaattgctgccattcaaccaacttgctttgacaaacccagcagcgttctaccaacaacccatcattggtggtgccctcttttagatttcttatgagttatagttcaataataaagttttttgtctgatgtttgtggcttcccagaaataagaaagtacatttctag

SEQ ID NO: 20054 - DNA, 391 bp, Zea mays
  unsure at all n locations
  Clone ID: LIB3151-057-Q1-K1-D2
ggggcgcacgccgtccgggtcttcaaaccattagctttatcttctccagagcgcagaagaacccnatcgggggcatgagggtgttgctcggtgccctcgctctcctggctctcgctgcgagcgccacctccacgcatacaagcggcggctgcggctgccagccaccgccgccggttcatctaccgccgccggtgcatctgccacctccggttcacctgccaccttcggtgcatctcccaccgccggtccacctgccgccgccggtccacctgccaccgccggtccatgtgccgccgccggttcatctgccgccgccaccatgccactaccctactcaaccgccccggcctcagcctcatccccagccacacccatgcccgtgccaacagcc

SEQ ID NO: 20055 - DNA, 301 bp, Zea mays
  unsure at all n locations
  Clone ID: LIB3151-057-Q1-K1-D3
caccacttgcccgagagtcgtattgtccaagccaacgcaggtgcagatgggggccgatcaccacctccgggcggancacgaccaccacaaaagggggaggaaggggggtcacccccaccaactgaaaccgcgctggtggcgccgcaacccccggtacagatactactacagcgggggcaagggcgggggcgcggatcccgccctctgcttcgacgaactcgtcctgctcctggccgcggggatcaccctgctggtgctctacgtaatgtaccgaccgttccaccccaccttacccgtcacc

SEQ ID NO: 20056 - DNA, 376 bp, Zea mays
  Clone ID: LIB3151-057-Q1-K1-D5
ccaacccttccgcaaatgaaaaaattgtgtcaaccaatccgtaaaactccaataacggtgttaagcagtaaattaccatacattgaggaaaaaaaaaaaaaaaaaaaaaaaaaaaaaaaaaaaaaaaaaaaaaaaaaaaaaaaaaaaaaaaaaaaaaaaaaaggggccaacgaaaaaaaaaaaaaaaaaaaaaaaaaaaaaaaaaaaaaaaaaaaaaaaaaaaaaaaaaaaaaaaaaaaaaaaaaaaaaaaaaaaaaaggggggggagaatttaaaaaaaaaaaaaaataatggccgtgcccaagaaaaaaaaaatttattaaaaggcgcataaaaaaaaaaaaaaaatgaccgaataaaaaaaacacgaagcggg

SEQ ID NO: 20057 - DNA, 295 bp, Zea mays
  Clone ID: LIB3151-057-Q1-K1-D6
aacattagggaccacaaaaaacaaaaaaaaaacaaaaacaaaaacaaacaacacaaacaaccaaaaaccaaacaaaaaaaaaccacaacccccacatacaaaaaccacaacaacaaaaacaaaaaacaaaaaacccaaaccacaccaccctacaaaaaccaaacaaaaaatcaaaaccacccatcccacccaccattaaccctcctaaatccaacaacaccccacccccacaacaacacttacccaaaacccattccacccacacaaaacatcacaacacaacacctacaccaac

SEQ ID NO: 20058 - DNA, 365 bp, Zea mays
  Clone ID: LIB3151-057-Q1-K1-D7
cttacctttatcacccttgttctttttcaatcatcagccctattacaacagggacctttggtgcatttattggcacaaaacatcagggcacaacaactacaacaacttgtgctagcaaaccttgctgcctactctcagcaacagcagtttcttccattcaaccaactaggttcattgaactctgcttcttatttgcaacaacaacaactaccattcagccagctacctgctgcctacccccagcaatttcttccattcaaccaactagcagcattgaactctcctgcttatttacagcagcaacaactactaccattcagccagctagctggtgtgagccctgctaccttcttgacacaaccaca

SEQ ID NO: 20059 - DNA, 383 bp, Zea mays
  Clone ID: LIB3151-057-Q1-K1-D8
caacaagcaacatagaaagtggtttttagtagcaacaatagagcaacaatggagaccaagatattttccctccttatgctccttgctctttctacatgtgttgctaacgcgacaattttccctcaatgctcacaagctcctatagcttccctttttcccccataccttccatcaattatagcttcagtatgtgaaaacccagctcttcaaccatataggcttcaacaagcaatcgcagcaagcaacatacctttatcgcccttgttgtgtcaacaatcgccagccctatctttggtgcagtcattggtacaaaccataagggcacaacagctgcagcaactcgtgctaactgtgatcaaaccaattacttttggcaaaccttt

SEQ ID NO: 20060 - DNA, 152 bp, Zea mays
  Clone ID: LIB3151-057-Q1-K1-D9
ccccgtcatcgatctcgtttctaatctatccatcctcgtttcctccgtccgcgagcattttaaccccatgggcgggatcaaaatcgggatcaatgggttcggcaggatcggaaggctggtggccagggtggcccttcagagtgaccatgtct

SEQ ID NO: 20061 - DNA, 371 bp, Zea mays
  Clone ID: LIB3151-057-Q1-K1-E1
gcttcaacctgtccccagcgccccttgttcacacactgtctttctctgcctttggttgcctagcgccgcgccggcgccgccattcgatcaggccgcttcgccggcgacagcatattccaggtcggttggttttggcacttcggaccggcggccatggcttccgacggcatcggccccagagatgtatgtgttgttggggttgcacgcacccctatgggcggtttccttggtgccttgtctcccttgcctgctacgaaacttggttctatagtaattcaagctgctctggaaagagcaaacgtggatccagtcctcgtgcaggaggtctactttggaaacgtattgagtgctaatttggggcaagctcctgc

SEQ ID NO: 20062 - DNA, 347 bp, Zea mays
  Clone ID: LIB3151-057-Q1-K1-E10
ccttccgaacttggcaccttaaaaggcccatttttgacccaccaagggaggccaaaggggggggcctcctaagcctcgtgggccttttggaaaggcctgttccgggaaccattttccaacaaggctaacaacctccaatagccttcccttcttcccccgaacctttaaccaccggggtcttcggtatgtgaaaaaccccaattcttcaaccctataggacccaaacaggcaatcgcagctggcatcttacctttatcaccccttgttcctccaacaatcatcagccctattacagcagttacctttgggtgcatttattggcacaaaacatcagggcacaacaacta

SEQ ID NO: 20063 - DNA, 401 bp, Zea mays
  Clone ID: LIB3151-057-Q1-K1-E11
ccggggcggcccacgcatcctcaactagcaacatataaagcacagtagtttaccaacaatggcaaccaaaatgcgccgctttctaaagctccggggtctttctaaaaatgctgctacggcgaccattttcccacaatgctcacaagctcctatagcttcccttcttcccccgtacctctcaccagccgtgtattcggtatgtgaaaacccaattcttcaaccctatacgatccaacaggcaatcgcagctggcatcttacctttatcacccttgttcctccaacaatcatcagccctattacagcagttacctttggtgcatttattggcacaaaacatcagggcacaacaactacaacaacttgtgctagcaaaccttgctgcctactctcagcaacaac

SEQ ID NO: 20064 - DNA, 386 bp, Zea mays
  Clone ID: LIB3151-057-Q1-K1-E12
gacaaagcccaatacaaccaattctcatatcctgacaatggcacacatacttgggggcattgtcatcctcggcggcacctatgcaactgctcttaccgcgtccatttccgcaccatggtgacagactgccttcgcttcgtaccaccacacgatccacgctctaccgggggatacagtctgtccaaacgccattgttcaccagtatcggaaccaacacgtactggcagttctgatcactacttttatgacccttgccactgaaccaaatatcacacctataactgcttactcccttacagtacatatattggcacagaacatcaagccacaacaatatacaacatctagcgctagcaaacttcactgcctactctgagaaacaacaa

SEQ ID NO: 20065 - DNA, 380 bp, Zea mays
  Clone ID: LIB3151-057-Q1-K1-E2
accgggggggggcaaggcgtccgcttccttcccccaagatcctccactttttcccaaacaaaccaacaaatccatccgtggcacatggacgcgttcttctcggcctcctccgcgtcggcgccctacggctacggcgccggcggatggagctacgactcgctcaagaacttccgccagatcacccccgccgtccagacccacctcaagctcgtctacctcaccctgtgcgcggcgctggcctcgtcggcggtgggcgcttacctgcacgtggtctggaacatcggcggtacgctgacaatgctcggttgcgtcggcagcatcgcctggctcttctcggtgcccgtctacgaggagaggaagaggtatgggctgctgatggc

SEQ ID NO: 20066 - DNA, 270 bp, Zea mays
  Clone ID: LIB3151-057-Q1-K1-E3
ccctttcctccgccacagcatattccaggtcggttggttttggcacttcgcaccggcgaccatggcttccaacggcatcagccccacatatgtatgtgttgctcgggttgcacgcacccctatgggcgctttcctaggcgcctagactcccttgcctgctacaaaaccagcctctatactaattcaatctgctcttcaaagaacaaacctcgatccaatccctcaacatgacgtctactttggaaacctatcgagtgctaatattccaca

SEQ ID NO: 20067 - DNA, 83 bp, Zea mays
  Clone ID: LIB3151-057-Q1-K1-E4
cccacgccttccggttgggaaaaacctccccggttcgggttggatcgggacattgaaaggacgatgggggggcgcgcgctcct

SEQ ID NO: 20068 - DNA, 381 bp, Zea mays
  Clone ID: LIB3151-057-Q1-K1-E6
tccggccggtttttcccaacttaaacggttttggcagttagttgttacaagcttagcttgccgggccccccttaaggcggcggtcgacgttaccgtccttggaatccaactggtcttaagttcttttactcgaacgccggacacccttgaacccggccgccccccgtggccatggtcgccggcgccgccgccatccttctggtcctgcccgtcgtcgccgtcctcgcgtcgtcgtccgcggcggcggacgggtcgttcataacgtgggacgacctcagcaccccgtccgccgccgccgtgcagggcggcgtgaaggcggccagcgggggaggcgcccgcgagctggacacgatcgtggtggcgcaagacgggacggggcac

SEQ ID NO: 20069 - DNA, 382 bp, Zea mays
  Clone ID: LIB3151-057-Q1-K1-E8
cagctcgccgctccactctcctggttctgctgcggccgtcgccggctaactagctatagccagccactcggagtcggaggcacagcacctccccccgcgtcgccagcgcacttggacgaccgatggggagggcgccgtgctgcgagaagaaggggctgcggcggggcgcgtggagccccgaggaggaccagcgcctggtggcctacgtccggcagaacgggcaccccaactggcgcgcgctgccccggcaggcggggctgctccgctgcggcaagagctgccgcctgcgctggatcaactacctccacccggacatcaagcgcggcaacttcaccgccgacgaggaggccctcgtcgtccgcctccaccgcgagctcgggaa

SEQ ID NO: 20070 - DNA, 378 bp, Zea mays
  Clone ID: LIB3151-057-Q1-K1-F1
agcagcagcccttctttttggagcatctttacaggggagatcgatcaatcaatcggcgggcaaagcgcgcacgggacaggtgggtagctagcaatggcgacgccgccgaaccctcctcctccgagcactcccatagctgcggcggcgcccttattgccagcagagttcaccagattcaccttccgggccttgtacgtccgccggaccggcccaagcagcagggagatgattcagccggggagaccttacgatgagctgggcagaagactcaccagtgactacccggtgtacgatggccgtggctccgacgccgcccttgtcgctcgcatgcaggggatcaccgtcctcgtcggtaacgcgcaccagctgttcaccatc

SEQ ID NO: 20071 - DNA, 288 bp, Zea mays
  Clone ID: LIB3151-057-Q1-K1-F10
gcccttaaagcgtgggagtgatcttttgttttgctgtcgccgagctgggaaaggggaatttgaatcgacctcggaagcggggaatgtatccttttttgctgcaacataaaaaatgctacccaggcatagctgggtaccttttaacttctgtttggggatttgctagagtgatggtttcgatatatagggggacttgaatgtctgtggaatgctacggtataacgcacatttgggtgcaatgtctgttgcattgctgtctgaatgatatcgttggtacatttttctttt

SEQ ID NO: 20072 - DNA, 372 bp, Zea mays
  Clone ID: LIB3151-057-Q1-K1-F11
gaagccattccctcttcaagagtttttcatcagattgggcttattattcctggggacttcatgcaaggatcggagttgctctaaattgactgaaccatggcggcgacaatggcagtgacgacgatggtgacgaggagcaaggagagctggtcgtcattgcaggtcccggcggtggcattcccttggaagccacgaggtggcaagaccggcggcctcgagttccctcgccgggcgatgttcgccagcgtcggcctcaacgtgtgcccgggcgtcccagcggggcgcgacccgcgggagcccgatcccaaggtcgtccgggcggccgacaactgcgacatcgcgcgccagcttggcgccgccgttcccgggcag

SEQ ID NO: 20073 - DNA, 361 bp, Zea mays
  unsure at all n locations
  Clone ID: LIB3151-057-Q1-K1-F2
acaataaccttatttaactcaattttgtaaaaaaacccgaccgacaccatgggggggttgctcgaagccctcggtctcctggctctcgctgcgagcgccacctccacgcatacaagcggcggctgcggctgccagccaccgccgccggttcatctaccgccgccggtgcatctgccaccttcggttcacctgccacctccggtgcatctnccaccgccggtccacctgccgacgccggtgcacctgccaccgncggtccatgtgccgccgacggttcatatgccgccgccaccatgccactaccctactcaaccgccccggcctcagactcatacccagccacacccatgcccgtgccaac

SEQ ID NO: 20074 - DNA, 385 bp, Zea mays
  Clone ID: LIB3151-057-Q1-K1-F3
tcccggattattgcactttattgtgctttttttattttaaaaattcccttaatgcctggggattattggcaaattcccagcacaatatttgtttgtattgcttggccctggtgatgaagccaaaaaccaacttcctgatatcctgggggtaaatcaaggtttgttggaaaggacaaatttttcaaagtcagctataaaagcctgaatgagggccgttcaccttccggtgatcaaataccatggaaattttgtgaacagttccaagacaatgtatttccaagtctctcaagagctcgtatagtgcgaattgctgtccatcctagcgccttgaagcttgggtatggctcagctgccattggccttctatctcggtactatgaaaggc

SEQ ID NO: 20075 - DNA, 419 bp, Zea mays
  unsure at all n locations
  Clone ID: LIB3151-057-Q1-K1-F4
ccggtccggaaattccccggggggcgccacgcgtncgattgagaccaacaagcaacatagattgtggaatccagtagcaacaatagagcagcagtggagaccaagatattttccctccttatgctccttgctctttctacatgtgttgctaacgcgacaattttccctcaatgctcacaagctcctatagcttccctttttcccccataccttccatcaattatagcttcagtatgtgaaaacccagctcttcaaccatataggcttcaacaagcaatcgcagcaagcaacatacctttatcgcccttgttgtgtcaacaatcgccagccctatctttggtgcagtcattggtacaaaccatcagggcacaacagctgcagcaactcgtgctacctgtgatcaaccaagtagctctggc

SEQ ID NO: 20076 - DNA, 369 bp, Zea mays
  unsure at all n locations
  Clone ID: LIB3151-057-Q1-K1-F5
cccccttccaaataggaacctcctgtttccaaaaattgcaaaagtaacgggccctttaaaaagatgggggacatcaccacanccgccgtggcggcatgcggctctgtgcttcccggccctggtggccagggccgtctgccaaggctaggtcgagcggcacacgctcacggacctgcaatgcttgcaggaggtccaggagagcccgctcgacacgtgcctccacgtcctcaaccggcagctaaccggcagctgcctctgccgccctttccgggtgaacacccggctccccattctgtgctgccagcatctccacaacctaagaccggactgcccctgctccaacatccgctacatggtcacaacctacta

SEQ ID NO: 20077 - DNA, 386 bp, Zea mays
  unsure at all n locations
  Clone ID: LIB3151-057-Q1-K1-F6
atcgatcgccacattcaacaccacttttcgaggcgacgcgacagccgccaggaggagaggaataaactcactgccagccagtgaagggggagaagtgtactgctccgtcgaccagtgcgcgcaccgcccggcagggctgctcatctcgtcgacgaccagtggattaatcggcatggcggctctggccacgtcgcagctcgtcgcaacgcccgccggcctgggcgtnccggacgcgtccacgttccgccgcggcgccgcgcatggcctgaggggggcccgggcgtcggcggcggcggacacgctcagcatgcggaccagcgcgcgcgcggcgcccaggcaccagcagcaagcgcgccgcgggggcaaggtcccgtcgctcgtcgtgt

SEQ ID NO: 20078 - DNA, 371 bp, Zea mays
  unsure at all n locations
  Clone ID: LIB3151-057-Q1-K1-F7
ggtcttcagaccattagctttattttttccagagcgcagaagaacccgatcgaggccatgagggtgttgctcgttgccctcgctctcctggctctcgctgcgagcgccacctccacgcatacaagcggcggctgcggctgccagccaccgccgccggttcatctaccgccgccggtgcatctgccacctncggttcacctgccacctccggtgcatctnccaccgccggtccacctgccgccgccggtccacctgccaccgccggtccatgtgccgccgccggttcatctgccgccgccaccatgccactaccctactcaaccgccccggcctcagcctcatccccagccacacccatgcccgtgccaaca

SEQ ID NO: 20079 - DNA, 377 bp, Zea mays
  Clone ID: LIB3151-057-Q1-K1-F8
attttgagcattcaaaaacacacttttggaagtgcactagcaacttcctaacgggaatggctaccaagatattagccctccttgcgctcctttccctttcagtgagcgcaacaactgcattcattattccacaatgctcacttgctcctaatgccattattccacagttcctcccatcagttacatcaatgggcatcgaacaccctattgtgcaagcctataggctacaacaagcgcttgcggcgagcgtcttacaacaaccgtttgcccaattacaacaacaatccttggcacatctaaccatacaaaccatcgcaacacaactagagcaacagtttgtgcccgcattgagccaactagccgcagtgaaccctgtc

SEQ ID NO: 20080 - DNA, 283 bp, Zea mays
  unsure at all n locations
  Clone ID: LIB3151-057-Q1-K1-F9
catcgaccgatcgatcgccacagctaataccacccgccgaggcgacncgacgcgcgcctttaggaaggaatgggctcactacacagccagtgaagggggagaagtgtactgctccgtcgaccagtgcgcgcaccgaccggcagggctgctcatctcgtcgacgaccaggggattaatcggcatggcggctcttgccacgtcgcagctcgtcgcaacgcccgcccgcctgggcgttcccgacgcgttcacgttccgccctggcaccgaacatggcctgaagggg

SEQ ID NO: 20081 - DNA, 407 bp, Zea mays
  unsure at all n locations
  Clone ID: LIB3151-057-Q1-K1-G1
ccggtccggaaannccggggggcccacgccgtccggggtcttaaaaccattagctttatctatttcagagcgcagaagaacccgatcgacagcatgagggtgttgctcggtgccctcactctcctggctctcgctgcgagcgccacctccacgcatacaagcggcggctgcggctgccagccaccgccgccggttcatctaccgccgccggtgcatctgccacctccggttcacctgccacctccggtgcatctcccaccgccggtccacctgccgccgccggtccacctgccaccgccggtccatgtgccgccgccggttcatctgccgccgccaccatgccactaccctactcaaccgccccggcctcagcctcatccccagccacacccatgcccgtgccaaca

SEQ ID NO: 20082 - DNA, 352 bp, Zea mays
  Clone ID: LIB3151-057-Q1-K1-G10
ctctcccctcgcctcctcgtctttttttaggggatcgacggagaggaatcgggggagggccgtctcatccgaggtaaagaagccatggagcacaaggaggctgggtgccaggcccccgagggacccatcctctgcatcaataactgtggcttcttcggcagcgcggcgaccatgaacatgtgctctaagtgccacaaggagatgataacgaagcatgatcaggccaagctggctgcctcctctatcgacagcatcgtgaacggcagcgacaccgtcatggagcccgttgttgcttgcaacaacacggtagtagctgttgcccacatcgagttgcaaacaatgaacgtgcagc

SEQ ID NO: 20083 - DNA, 339 bp, Zea mays
  Clone ID: LIB3151-057-Q1-K1-G11
aagcaacataaatagtgcaattctttatcctcaatagagcatcaatctcaggggggatattttacatacttatgctcaacgctctctctgcatactggtgctaacacgaccatttttcctcaatactcacaaactactatagctgcccttcttacaccataccttccatcaatgaccgcttcaatatgagaaaacccatcccttcaaccctacaggctccaacaagcaatcgcaacacgcaacttacctttatcacccctgttctttcaacaatcgccagccctatctttagtgcagtcagtggtacaaaaccatcatgcacaacagctgcagcaactc

SEQ ID NO: 20084 - DNA, 145 bp, Zea mays
  Clone ID: LIB3151-057-Q1-K1-G2
accctacaggatccaacaggcaatcgcagcaggcatcttacctttatcacccttgttcctccaacaaccgtcagccctattacagcagttacctttggtgcatttgttggcacaaaacatcaaggcacaacaactacaacaactt

SEQ ID NO: 20085 - DNA, 403 bp, Zea mays
  Clone ID: LIB3151-057-Q1-K1-G3
ggggcccaagccgtccgtccaaatcagcaaagcggcagtgcgttttgaggatcgtcgaacagaacagcatggagatggtcatcgttctcggcgtgtgcctggctctgtcagctgccagcgcctctgcaatgcagatgccctgcccctgcgcggggctgcagggcttgtacggcgctggcgccggcctgacgacgatgatgggcgccggcgggctgtacccctacgcggagtacctgaggcagccgcagtgcagcccgctggcggcggcgccctactacgccgggtgtgggcagacgagcgccatgtaccagccgctccggcaacagtgctgccagcagcagatgaggatgatggacgtgcagtccgtcgcgcagcagctgcagatgatgatgcagcttgagcg

SEQ ID NO: 20086 - DNA, 371 bp, Zea mays
  Clone ID: LIB3151-057-Q1-K1-G4
ctcacacgtacgcctaatccgatattttttcatctacctgtccctactccaaccggggctaatctaaacaacttgcacagcttgctccgacatcaccgtatcgagagagacagagacaggctaacgagggaatggagaggatgctggccaggctgatgcggcgacgaaactacgaacgcctatacggcctactacaccacggaggagcgcccgacccgctgcacgccgacggcgccactggggcctacccggtgatcttgtcgcactcagcagcagcagcagcacacggacgtctacatcgtcctgtacatgctcaagatcagggactccccgtaccaactgatcaggatgacccctatggcgtacctgaa

SEQ ID NO: 20087 - DNA, 382 bp, Zea mays
  Clone ID: LIB3151-057-Q1-K1-G7
cccagtgaaggctacatctgatctgtttcttgtgcacactgatctttacacgtgggctgatggctttgtcatgcggaacccatccagagcgaatccagctaacccttcaattgagcttggacctgagttcatgaaggttgccaatttccttggtcggttcaaggccatccccagcatatgtgagctcgacagcttgaaggcttatggggatgtatgggttggctctggaattacactcaagggcaaagcgacaattatcgccaaatctggagtgatattggagattccagatggggacgtacttgagaacaaagatgtcaatgcgcctcacgatctttaacgcgatgttatcaacaccagtttttacaaagacatgtcacag

SEQ ID NO: 20088 - DNA, 383 bp, Zea mays
  Clone ID: LIB3151-057-Q1-K1-G9
gaccaacaagcaacatagaaagtggtttccagtagcaacaatagagcaacaggggcgaccaagatattttccctccttatgctccttgctctttctgcatgtgttgctaacgcgacaattttccctcaatgctcacaagctcctatagcttcccttcttcccccataccttccatcaatgatagcttcagtatgtgaaaacccagctcttcaaccctataggctccaacaagcaatcgcagcaagcaacatacctttatcacccttgtttcaacaatcgccagccctatctttggtgcagtcattggtacaaaccatcagggcacagcagctgcagcaactcgtgctacctgtgatcaaccaagtagctctggcaaacctttc

SEQ ID NO: 20089 - DNA, 378 bp, Zea mays
  Clone ID: LIB3151-057-Q1-K1-H1
attattgagaccaacaagcaacatattttttggaatccagtagcaacaatagaggagcaattgcgaccaagatatgggccctccttatgctccttgctctttctgcatgtgttgctaacgcgacaattttccctcaatgctcacaagctcctatagcttcccttcttcccccataccttccatcaatgatagcttcagtatgtgaaaacccagctcttcaaccctataggctccaacaagcaatcgcagcaagcaacatacctttatcacccttgtttcaacaatcgccagccctatctttggtgcagtcattggtacaaaccatcagggcacagcagctgcagcaactcgtgctacctgtgatcaaccaagtagctc

SEQ ID NO: 20090 - DNA, 354 bp, Zea mays
  Clone ID: LIB3151-057-Q1-K1-H10
attcaaaaacacaccaagcgaatttttctagcaacgacttaacaacaatggcgggcaagatattagccctcctggcgcttcttgccctttttgtgagcgcaacaaatgcgttcattattccacaatgctcacttgctcctagtgccattataccacagttcctccgaccagttacttcaatgggcttcgaacacctagctgtgcaagcctacaggctacaacaagcgcttgcggcgagccgtttacaacagccaattaaccaattgcaacaacaatccttggcacatctaaccatacaaaccatcgcaacacaacagcaacaacagttcctaccagcactgagccaactagatg

SEQ ID NO: 20091 - DNA, 376 bp, Zea mays
  Clone ID: LIB3151-057-Q1-K1-H11
cagaccgtccgaatccggggcgaccaccgtcgcatacttatctactcatttttaaaacccatcaaccagagggggtgatataagcctcgggtactgactctctctgcgagcgccacctacacgcatacaaactgtggctgcggctgccaaccaccgccgccggttcatctaccgccgcacaagcatctgccacctacggttcacctgccacctacggtgcatttcccaccgccagtccacctgccgccgccggtccacctgccaccgccggttcatgtgccgccgacggatcatcttgcccctccaccatgccaataccctaattaaacagccccgcctcaggctcattcgcagccacacccatgcccgtgccaac

SEQ ID NO: 20092 - DNA, 363 bp, Zea mays
  unsure at all n locations
  Clone ID: LIB3151-057-Q1-K1-H12
attcggggggcgacccactcctgctatataaaaacaaactacccctctattttataccaacctcctaacaacaatcagggggcatatattaaccctcctggcgctacctaaacttaattcactcgcccaaatgcatacattattccactgtgctaacctcctcctaacccaattataccacaggtcctcccaccatctacttcaatgngctacgtacaaccaacagtgcatgtctaaacgctacttctagtgcttgcggcgagccacttacaacaaccaattcatcaatcgcaacaacattatctgccacatgtaacattacaatacattactaaaccacaccaacatcagtttcatccataa

SEQ ID NO: 20093 - DNA, 386 bp, Zea mays
  Clone ID: LIB3151-057-Q1-K1-H2
aaacaagcaacatagaaagtggaatttattatcaacaatagagcaacaatggcggcgaagatattttccctccttatgctccttgctctttctgcatgtgttgctaacgcgacaattttccctcaatgctcacaagctcctatagcttcccttcttcccccataccttccatcaatgatagcttcagtatgtgaaaacccagctcttcaaccctataggctccaacaagcaatcgcagcaagcaacatacctttatcacccttgtttcaacaatcgccagccctatctttggtgcagtcattggtacaaaccatcagggcacagcagctgcagcaactcgtgctacctgtgatcaaccaagtagctctggcaaacctttctcccta

SEQ ID NO: 20094 - DNA, 419 bp, Zea mays
  unsure at all n locations
  Clone ID: LIB3151-057-Q1-K1-H3
ccggtcccgaaatncccggggggcccaacccgtccggccagctgcagggaacctgcggcgtttttagcaccccgatcctgggccagtgcggggagtttttgaggcatcagggcatcccaacagcgactccctactgctcgcctcagtgccagtcgttgcggcagcagtgttgccagcagctcaagcaggtggagccgcagcaccggtaccaggcgatcttcggcttggtcctccagtccatcctgcagcagcagccgcaaagcggccaggtcgcggggctgttggcggcgcatatagcgcagcaactgacggcgatgtgcggcctgcagcagccgactccatgcccctacgctgctgccggcggggtcccccactgaagaaactatgtgctggagtatagccgctggctagctagctag

SEQ ID NO: 20095 - DNA, 336 bp, Zea mays
  unsure at all n locations
  Clone ID: LIB3151-057-Q1-K1-H5
agcaccccgatccttgggccagtgcgggggagttcctgaggcatcagtgcagcccgacggcgacgccctactgctcgcctcagtgccagtcgttgcggcagcagtgttgccagcagctcaggcaggtggagccgcagcaccggtaccaggcgatcttcggcttggtcctccagtccatcctgcagcagcagccgcaaagcggccaggtcgcggggctgttggcggcgcagatagcgcagcaactgacggcgatgtgcggcctgcagcagccgactccatgcccctacgctgctgcncggcggtgtcccccactgaagaaactatgtgctgtagtat

SEQ ID NO: 20096 - DNA, 380 bp, Zea mays
  Clone ID: LIB3151-057-Q1-K1-H7
ctgggtcttcagaccattagctttatttactccagagcgcagaagaacccgggggacaccatgagggtgttgctcgttgccctcgctctcctggctctcgctgcgagcgccacctccacgcatacaagcggcggctgcggctgccagccaccgccgccggttcatctaccgccgccggtgcatctgccacctccggttcacctgccacctccggtgcatctcccaccgccggtccacctgccgccgccggtccacctgccaccgccggtccatgtgccgccgccggttcatctgccgccgccaccatgccactaccctactcaaccgccccggcctcagcctcatccccagccacacccatgcccgtgccaacagccgca

SEQ ID NO: 20097 - DNA, 353 bp, Zea mays
  Clone ID: LIB3151-058-Q1-K1-A1
gccagcagctcaggcaggtggagcctcagcttcggtaccaggcgatcttcggctgggtgctccagtccatcctgcagcagcagccgcaaagcggccaggtcgcggggctgttggcggcgcatatagcgcagcaactgacggcgatgtgcggcctgcagcagccgactccatgcccctacgctgctgccggcggtgtcccccactgaagaaactatgtgctgtagtatagccgctggctagctagctagttgagtcatttagcggcgatgattgagtaataatgtgtcacgcatcaccatgggtggcagtgtcagtgtgagcaatgacctgaatgaacaattgaaatgaaaaga

SEQ ID NO: 20098 - DNA, 344 bp, Zea mays
  Clone ID: LIB3151-058-Q1-K1-A10
cgaggatgcgtcggtcgaagacgtatagcggcacgacggggcgccgcggctccgagacggcggcggcgaggcccgggtggtcgtcgatgcggagatcatgcttaaaccacaccaccgcggcagcgcccccgtccctcacgggggtgggggcattggaggcgacgatccggactcggcatcggttccgcaggacccgacggtggtggggcggggcagggagaagcggcccgaaccgtagcgcaagcagagccatgggaggggctgcgcggaggcgtcagctgtagcagcggcagccataggcggggaagagcggggataagaagggcggggctagggcgcgccca

SEQ ID NO: 20099 - DNA, 347 bp, Zea mays
  Clone ID: LIB3151-058-Q1-K1-A11
ggtcttcagaccattagctttatctactccagagcgcagaagaacccgatcgacaccatgagggtgttgctcgttgccctcgctctcctggctctcgctgcgagcgccacctccacgcatacaagcggcggctgcggctgccagccaccgccgccggttcatctaccgccgccggtgcatctgccacctccggttcacctgccacctccggtgcatctcccaccgccggtccacctgccgccgccggtccacctgccaccgccggtccatgtgccgccgccggttcatctgccgccgccaccatgccactaccctactcaaccgccccggcctcagcctcatcccca

SEQ ID NO: 20100 - DNA, 344 bp, Zea mays
  Clone ID: LIB3151-058-Q1-K1-A12
aagcaacatagaaagtggaatccagtttcaacaatagagcaacaatggcgaccaagatattttccctccttatgctccttgctctttctgcatgtgttgctaacgcgacaattttccctcaatgctcacaagctcctatagcttcccttcttcccccataccttccatcaatgatagcttcagtatgtgaaaacccagctcttcaaccctataggctccaacaagcaatcgcagcaagcaacatacctttatcacccttgtttcaacaatcgccagccctatctttggtgcagtcattggtacaaaccatcagggcacagcaggtgcagcaactcgtgctacct

SEQ ID NO: 20101 - DNA, 359 bp, Zea mays
  unsure at all n locations
  Clone ID: LIB3151-058-Q1-K1-A2
gcgtncgctgggtcttcagaccattatctttatttacttcagagcgcagaagaacccgatcgacagcatgagggtgttgctcgttgccctcgctctcctggctctcgctgcgagcgccacctccacgcatacaagcggcggctgcggctgccagccaccgccgccggttcatctaccgccgccggtgcatctgccacctccggttcacctgccacctccggtgcatcttccaccgccggtccacctgccgccgccggtccacctgccaccgccggtccatgtgccgccgccggttcatctgccgccgccaccatgccactaccctactcaaccgccccggcctcagcctcatccccagc

SEQ ID NO: 20102 - DNA, 351 bp, Zea mays
  Clone ID: LIB3151-058-Q1-K1-A5
ccaactagcaacatagaaagcacaattttgttccaacaatggcagccaaaatatggtggctccttatgctccttggtctttctgcaagtgctgctacggcgaccattttcccgaaatgctcgcaagctcctatagcttcccttcttcccccgtacctctcaccagcggtgtcttcggtatgtgaaaacccaattcttcaaccctacaggatccaacaggcaatcacagctggcatcttacctttatcacccttgttcctccaacaatcatcagccctattacatcagttacctttggtgcatttattggcacaaaacatcagggcacaacaactacaacaacttgtgctag

SEQ ID NO: 20103 - DNA, 351 bp, Zea mays
  Clone ID: LIB3151-058-Q1-K1-A6
caacaagcaacatataaagtggaatttagtttctacaatagagcaacaatggcggccgagatattttccctccttatgctccttgctctttctgcatgtgttgctaacgcgacaattttccctcaatgctcacaagctcctatagcttcccttcttcccccataccttccatcaatgatagcttcagtatgtgaaaacccagctcttcaaccctataggctccaacaagcaatcgcagcaagcaacatacctttatcacccttgtttcaacaatcgccagccctatctttggtgcagtcattggtacaaaccatcagggcacagcagctgcagcaactcgtgctacctgtg

SEQ ID NO: 20104 - DNA, 311 bp, Zea mays
  Clone ID: LIB3151-058-Q1-K1-A7
gcaacatagaaagcacaatagtgttttaacaatggcagccaaaatatttgggctgcttatgctccttgggctttctgcaagtgctgctaccgcgaccattttcccgaaatgctcgcaagctcctatagcttcccttcttcccccgtacctctcaccagcggtgtcttcggtatgtgaaaacccaattgttcaaccctacaggatccaacaggccatcacagctggcattttacctttatcacccttgctccttcaacaatcatcatgcctattacatcaattacctttggtgcatttattgggacaaaaca

SEQ ID NO: 20105 - DNA, 343 bp, Zea mays
  Clone ID: LIB3151-058-Q1-K1-A8
attattgagaccaactagcaacatattaagcacaatagtgtaccaacaatggcagccaaaatattttgcttgcttatgctccttggtctttctgcaagtgttgctaccgcaaccattttcccacaatgctcacaagctcctatagcttcccttcttcccccatacctctcaccagcggtgtcttcaatgtgtgaaaacccaattgttcaaccctacaggatccaacaggcaatcgcaacaggcatcttaccattatcacccttgttcctccaacaaccgtcagccctattacagcaattacctttggtccatttggtggcacaaaacatcagggcacaacaac

SEQ ID NO: 20106 - DNA, 355 bp, Zea mays
  Clone ID: LIB3151-058-Q1-K1-B1
gcgcagaagaacccgatcgacaccatgagggtgttgctcgttgccctcgctctgctggctctcgctgcgagcgccacctccacgcatacaagcggcggctgcggctgccagccaccgccgccggttcatctaaccgccgcggtgcatttgccccctccggttaacttgcaacctccggggcttttccaacggcggttcaacctgccgccgccggtcaacttgcaaccgccggtccatgtgccgccgccggttaatttgccgccgccacaatgccattaccttattaaaccgccccggcctaagccttatccccagccacacccatgcccgtgccaacagccgtatccaagcccgg

SEQ ID NO: 20107 - DNA, 310 bp, Zea mays
  Clone ID: LIB3151-058-Q1-K1-B11
gccgtcgtcttctgcggttcttctcttctactcctccaatttgacctcggggcggggcatgtttaagcttcaccttcaaccatgggtaaggagaagtcccacatcaacattgtggtcattggccacgtctactctggcaagtcgacctccacctgccacctgatctacaagcttggaggcattgacaagcgtgtaatagagaggtttgagaaggatgctgcttatatgaacaagcggtccttcaagtatgcttggttgctcgacttgctcaaggctcaccgtgacaggggtatcaccaattgatttcttc

SEQ ID NO: 20108 - DNA, 302 bp, Zea mays
  Clone ID: LIB3151-058-Q1-K1-B12
attgagaccaactagcaacatttaatgcacaatagtgtaccaacaatggcggccaaaatattttgcctccttatgctccttggtctttctgcaagtgctgctacggcgaccattttcccgaaatgctcgcaagctcctatagcttcccttcttcccccgtacctctcaccagcggtgtcttcggtatgtgaaaacccaattcttcaaccctacaggatccaacaggcaatcacagctggcatcttacctttatcacccttgttcctccaacaatcatcagccctattacatcagttaccttt

SEQ ID NO: 20109 - DNA, 156 bp, Zea mays
  unsure at all n locations
  Clone ID: LIB3151-058-Q1-K1-B2
atnttgagcattcagaaacacaccaagcgaagctacctagcaacgacttaacaacaatggctaccaagatattagccctccttgcgcttcttgccctttttgtgagcgcaacaaatgcgttcattattccacaatgctcacttgctcctagtgcca

SEQ ID NO: 20110 - DNA, 335 bp, Zea mays
  Clone ID: LIB3151-058-Q1-K1-B3
atgaccctgccaaggaggctgacattttcttcttccatgtcatcatcataaaccaccctgggcagattgtcatcggctatgccccactgctggactgtcacacctgccacattgctgtcaagtttgctgagctcattaccaagatcgacaggcggtctggcaaggagcttgagaaggagccaaagttcctgaagaacggtgatgctggtatggtgaagatgataccaaccaagcccatggtggtggagacattctcagcgtatcctcccctcggtaggtttgctgtccgtgacatgaggcacacggttgctgttggagttatcaagagtgtggag

SEQ ID NO: 20111 - DNA, 143 bp, Zea mays
  Clone ID: LIB3151-058-Q1-K1-B4
catcaatcatcattcatcctagcatttttttctccaaatcaaacctccaacagcgaagggtctaacttcaaaaacgatgatgctgcagctcttggcttttgctcttaccacattaatatcaagtttgtttagctcacatccaa

SEQ ID NO: 20112 - DNA, 352 bp, Zea mays
  Clone ID: LIB3151-058-Q1-K1-B5
attttgagcattcagaaacacacctttcgtttcacattagcaacaacctaacaacaatggctaccaagatattatccctccttgcgcttcttgcgctttttgcgagcgcaacaaatgcgttcattattccacaatgctcacttgctccaagttccattattacacagttcctcccaccagttacttcaatgggcttcgaacacccagctgtgcaagcctataggctacaacaagcaattgcggcgagcgtcttacaacaaccaatttcccagttgcaacaacaatccttggcacatctaacaatacaaaccatcgcaacgcaacagcaacaacaatttctaccagcactgag

SEQ ID NO: 20113 - DNA, 345 bp, Zea mays
  unsure at all n locations
  Clone ID: LIB3151-058-Q1-K1-B6
caaagcggcagtgcgtatagaggattttcttacagaacagcatgaanatggtcagcgggctcgtcttgtgcctggctctgtcagctgccatcgcctctgcaatgcagatgccctgcccctgcgcggggctgcagggcttgtacggcgctggcgccggcctgacgactatgatgggcgccggcgggctgtacccctacgcggagtacctgaggcagccgcagtgcatcccgctggcggcggcgccctactacgccgggtgtgggcagactagcgccatgtaccagccgctccggcaacagtgctgccagcagcagatgaggatgatggacgtgcattccgtcgcgc

SEQ ID NO: 20114 - DNA, 204 bp, Zea mays
  Clone ID: LIB3151-058-Q1-K1-B8
gatcgtgctaattctacttctttttggtatcgccgccgctcccggcgcggggggttgtctactaccgcaggaggtctccgctgcaggatcggtggtccagcgtgcgatggctgcggctcctaccgtgcggggctacgggccagcgacgccgtcgtcgtcgtcggtggcgctgcctcggtcgcgatcgtgggtgcccgccccttt

SEQ ID NO: 20115 - DNA, 345 bp, Zea mays
  Clone ID: LIB3151-058-Q1-K1-B9
tcgacaccatgagggtgttgttcgtttccctcgctctcctggctctcgctgggggcgccatctccacgcatacgagcggccactgctgctgccatccaccgccgccggttcatctaccgccggcggagcatctgccacctccggttcacctgccacctccggtgcatctcccaccgccggtccacctgacgacgccggtccacctgccaccgccggtccatgtgccgccgccggttcatctgccgccgtcaccatgccactaccctactcaaccgccccggcctcagcctcatccccagccacacccatgcccgtgccaacagccgcattcaagcccgtgccaac

SEQ ID NO: 20116 - DNA, 353 bp, Zea mays
  Clone ID: LIB3151-058-Q1-K1-C1
aacaaccacaacagcctcagcaatatcagctgggccaggaaaaatcacaacagcgacaatgtcattgccaggagcagcaacagactacaaggtgcagctataactactatagcagtagctcaaatctaaaaaattgtcatgaattcctaaggcagcagtgcagccctttggtaatgccttttctccaatcacgtttgatacaaccaagtagctgccaggtattgcagcaacaatgttgtcatgatcttaggcagattgagccacaatacattcaccaagcaatctacaacatggttcaatccataatccaggaggagcaacaacaacaaccatgtgagttatgtggatctcaa

SEQ ID NO: 20117 - DNA, 341 bp, Zea mays
  Clone ID: LIB3151-058-Q1-K1-C10
gccgtacttttgagtggtacatgctttggaggaacgaacttgagggctgcctggctgcctgcggacatgggctccagcctcaagtaccgatctggcctgtgcctcatcgtcgccgtcgtgctgatctgggtcatctccgccgaggtcacgcaggggatattcacaaagtacagacatccatttgcagttacttacttgggggcctcccttatggtcatatacctccctttgtcattttctaaaagattttatatacaattctgttgagaaggcattctagaaacactagtgctttcaaaattgcaagcaaatcttcctttggtggctgcgcccccttgaag

SEQ ID NO: 20118 - DNA, 275 bp, Zea mays
  Clone ID: LIB3151-058-Q1-K1-C11
tcgcgccagccgcacgggctggctttctttggcgccaaccaggtgctccccgggggggttggctacaaaacggtgggggaccgctcgccctacccgggcagtttcatgctcgaccagctcaccggcttctacgccttcgttgtttttaacaagcatcaacaacaacctgctagtcgcatttgaccccaatggccgggtgccattcttccgggggatcacccgcgacagctgcatcgccttcttcgacgacattgacatgctcaaaggctcatgcg

SEQ ID NO: 20119 - DNA, 351 bp, Zea mays
  Clone ID: LIB3151-058-Q1-K1-C12
cgcgcctttcagcccggaccaggagttctcttcggtgctgtggacggagagcaggggcgtgggcaagggcttgcgctgcatccgcatggtcaacaacacccgcctcaacttcgacgccttccacggcgacaaggaccacggcggcgtgcacgacggcaccggcgtcgtgctctgggagtggtgcaagggcgagaaccagagctggaagatcctgccgtggggtcccgaggccaactccgccgcggcccacgcgggaggcccgcacgccgtgcgcgtcttctgcaaggccggcggcgaggactacagcctcacggtgcgcaacggcacggcgtgcctggcgcccaccaaccc

SEQ ID NO: 20120 - DNA, 349 bp, Zea mays
  Clone ID: LIB3151-058-Q1-K1-C2
attgagaccaactagcaacatagattgctctttcgtgtaccaacaatggccggggagagattttgcttccttatgctccttggtctttctgcaagtgctggtaccgcaaccatttttccacaatgctcacaagcttctatagcttcctttcttgccccatacctgtcaccagcggcgtcttcagcatgtgaaaacccaattcttcaaccgtacatgatccaacaggcaatcgtagcaggcatgttacatctatcaccctcggtccttctacaaccgtcagccctattacagcagttacctttggtgcatttttttgcacaaaacatgaatgcgcatcatctacaaccac

SEQ ID NO: 20121 - DNA, 358 bp, Zea mays
  Clone ID: LIB3151-058-Q1-K1-C3
cctgggtcgggccacgcgtccggctggatcaaccaatgggagttcatttgtttttatgtccaaaggaactccttaggcggagttatcatacaaggtgagcgaatctttcccttacaaggggatcaataaaaagtggaaagaatggttccatgtaacatctattgccactgctgtaaacccctgacgcgtaattatgtcaaggaactcatgggtttatactcatgttgtagagtaggacttcctgcaccctatcgaaggcatccatctacaattggagactgggtacatgataacttccacagccgccaccaatgaccaacctgctttcatcttgagcatgcctaaccgcaagccgatt

SEQ ID NO: 20122 - DNA, 347 bp, Zea mays
  Clone ID: LIB3151-058-Q1-K1-C5
ttttagcattcataacacaccattcgatttgcactagcaacaacctaacaacaggggctaccaagatattagccctccttgcgcttcttgcccttttagtgagcgcaacaaatgcgttcattattccacagtgctcacttgctcctagtgccattattccacagttcctcccaccagttacttcaatgggcttcgaacatccagccgtgcaagcctacaggctacaactagcgcttgcggcgagcgtcttacaacaaccaattgcccaattgcaacaacaatccttggcacatctaaacctacaaaccattacaacgcaacagctacaacagtttctgccatcactg

SEQ ID NO: 20123 - DNA, 286 bp, Zea mays
  Clone ID: LIB3151-058-Q1-K1-C6
agccagcagcacgggcggtctttcttgggcgccaaccaagtgcttcccgggggggggggctacaagacggtgggcgaccgctcgccctacccgggcagctttatgcttgcccagatcaccggcttctacgcctttgttctctttgacaagtccaccaactccctgctagtcgcatctgaccccgagggcagggtgccgctcttctgggggatcaccgccgacggctgcgtcgccttctccgacgacatcgacatgctcaaaggctcatgcggcaagtcgctcgcgc

SEQ ID NO: 20124 - DNA, 238 bp, Zea mays
  unsure at all n locations
  Clone ID: LIB3151-058-Q1-K1-C8
gcctaatccaagcccgtgctatctgtttnggaacctgcggcgttngcagcacccgtatcctgggccagggcgtctagttcctgatgcatcattgcaacccgacggcgactccctactgctcgcctcagtgccagtcgttgcggcagcagtgtttccagcatctcatgcatgtggagccgcatcaccggtaccaagcgatcttcggcttggtcctccagtccatcctgcatcagcagcc

SEQ ID NO: 20125 - DNA, 309 bp, Zea mays
  Clone ID: LIB3151-058-Q1-K1-C9
attgtgtctgtgtgtgtattctacgtagttcggaaggagaatatgcgatgtttgcatcttgtcattgtgacacagaacatcaggtgccctcaccagataaagaatcttgtgaagggtgatttgggattgacacaggttggaaaaaattatagtatttgggggccagaaaagcagtgagaaaagcctttgaagaaatagagtgcctttggtgtgtaagagtttgctgcaacatacaccaatgtgattcttacactcagattgcttgtgcctgaaaccttcttcattctcaaacacaagtcctctaggaaa

SEQ ID NO: 20126 - DNA, 362 bp, Zea mays
  Clone ID: LIB3151-058-Q1-K1-D1
ggggggcgtgcgaacccctagccctttcgccgccgttctttttcccagcgctcgagctcctcggcgggggcgagctcgcgccgcatcgccaccatgaagttcaacatcgcgaacccgtctaccgggtgccagaagaagctggaaatcgatgacgaccagaaactacgtgccttttatgaccgaaggatctcccaggaggtcagtggtgatgctctgggtgaggagtttaagggttatgtcttcaagatcatgggtggatgtgacaaacaaggcttcccaatgaagcaaggagttctgacttctggtcgtgtccgccttctgctccacagaggcactccctgcttccgcggttatggcaggcg

SEQ ID NO: 20127 - DNA, 341 bp, Zea mays
  Clone ID: LIB3151-058-Q1-K1-D10
cccacgcgtccgccaaatacaaatttttttttgggaaagccgctcgaatccgggccgggaccccacacccactgatgggaccctccaccttctctcctccctcccttccatccaatcctcggaacgagcgcgcgggcgaggaggacccccgacggaggatggcggcggcggctagggttttccgcgggtccctcttcctgatgtccccggcggcgggcgccaaggcgtctgcagccaataaggcgggcacagcggctgcggctgcagccgtggccaataagaccgaggcggccactaccaagccgagactgccgaccgggatcacgaagccggtgccggtc

SEQ ID NO: 20128 - DNA, 348 bp, Zea mays
  Clone ID: LIB3151-058-Q1-K1-D11
gagaccaacaagcaacatagaaagtgttttctagtagcaacaatagagcaacaatggcgaccaatatattttccctccttatgctccttgctctttctgcatgtgttgctaacgcgacaattttccctcaatgctcacaagctcctatagcttcccttcttcccccataccttccatcaatgatagcttcagtatgtgaaaacccagctcttcaaccctataggctccaacaagcaatcgcagcaagcaacatacctttatcacccttgtttcaacaatcgccagccctatctttggtgcagtcattggtacaaaccatcagggcacagcagctgcagcaactcgtgc

SEQ ID NO: 20129 - DNA, 323 bp, Zea mays
  Clone ID: LIB3151-058-Q1-K1-D12
ctcgcatgcctgtgcacttctccatttcctccactgggtcttcagaccattagctttatctactccagagcgcagaagaacccgatcgacaccatgagggtgttgctcgttgccctcgctctcctggctctcgctgcgagcgccacctccacgcatacaagcggcggctgcggctgccagccaccgccgccggttcatctaccgccgccggtgcatctgccacctccggttcacctgccacctccggtgcatctcccaccgccggtccacctgccgccgccggtccacctgccaccgccggtccatgtgccgccgccggttca

SEQ ID NO: 20130 - DNA, 349 bp, Zea mays
  Clone ID: LIB3151-058-Q1-K1-D2
ctagcaacatacatagtgaagtacactattttcatcttagcaccaatgggaggggagagttttgccctccttggcctccttgctctttcagcaagcgctgctacctcgacttttattccacaatgctcacaacaatacctctctccggcgacagccgtgggatttcaatacccaattatacaatcctacatggtacaagaggccatccaagcaagcatcttacggtcattagcattaaccctccaacaaccatatgctctattgcaacagccatccttagtgcatctgtatctccaaagaatcgcggcacaacaactacaacaacagttgctaccaacaatcaatcaag

SEQ ID NO: 20131 - DNA, 349 bp, Zea mays
  Clone ID: LIB3151-058-Q1-K1-D3
ctggggctcaacgaccaagtggccttctttctttcggccaagagcggggaccggttggcctactactccttccgccggttcctcgacatgttcggcaacgtcgtgatggacatcccccacgcgctgttcgaagagaagcttgaagccatgaagaaagccaagggggtgaagaacgacaccgacctcaccgtcaccggcctcaaagagctggtgagccagtacaaggacgtctacgtggaggctaatggagagccattcccctcagaccccaagaggcagctggagttggcagtgctggccgtgttcgactcctgggagagcccgagggcaaagaagtacaggagcatca

SEQ ID NO: 20132 - DNA, 295 bp, Zea mays
  Clone ID: LIB3151-058-Q1-K1-D4
gcaacatagaaagcacaatagtgttccaacaatggcagccaaaatattttgcctgcttatgctccttggtctttctgcaagtgctgctacggcgaccattttcccgcaatgctcgcaagctcctatagcttcccttcttcccccgtacctctcaccagcggtgtcttcggtatgtgaaaacccaattcttcaaccctacaggatccaacaggcaatcgcagctggcatcttacctttatcacccttgttcctccaacaatcatcagccctattacaacagttacctttggtgcat

SEQ ID NO: 20133 - DNA, 337 bp, Zea mays
  Clone ID: LIB3151-058-Q1-K1-D5
ctggcgaggcaaaagcattgctacttcagacagcgcgcgcttcaaggcctttgggttttgagataacaaggaggagaggaggagatggcggtcacgatcacgtgggtgaaggcgaggcagatcttctacagccgcggcaaccccaccgtcgaggtggacgtgggccttagcgacggcagctacgcgaggggggccgtacccagcggcgcatccactggaatatatgaggccttggagttgagggatggaggatctgattatcttggcaagggtgttcttaaagctgtcagcaatgtaaataacattattggaccaacaattgttggaaaggacccca

SEQ ID NO: 20134 - DNA, 343 bp, Zea mays
  Clone ID: LIB3151-058-Q1-K1-D6
cttgcgcgtacgcgtacacttttcttctccgaatcgtcctcctatcgagcctgggtgatcccacactccggtggcctcgcttcaagatgcagatctttgtgaagaccctcaccggcaagactatcaccctcgaggtggagtcttctgacaccattgacaatgtcaaggctaagatccaggacaaggagggcatccctcctgaccagcagcggcttatcttcgccggcaagcagcttgaggacggccgcacacttgctgactacaacatccagaaggagtcaacccttcatttggtgctgcgccttaggggaggcatgcagatctttgtcaagaccttgactgg

SEQ ID NO: 20135 - DNA, 345 bp, Zea mays
  Clone ID: LIB3151-058-Q1-K1-D8
cagaaacacaccaagcgaagctcattttctacaacctaacaacaatggctgccgagatattatccctccttgcgcttcttgcgctttttgcgagcgcaacaaatgcgttcattattccacaatgctcacttgctccaagttccattattacacagttcctcccaccagttacttcaatgggcttcgaacacccagctgtgcaagcctataggctacaacaagcaattgcggcgagcgtcttacaacaaccaatttcccagttgcaacaacaatccttggcacatctaacaatacaaaccatcgcaacgcaacagcaacaacaattcctaccagcactgagccacc

SEQ ID NO: 20136 - DNA, 348 bp, Zea mays
  Clone ID: LIB3151-058-Q1-K1-D9
ctagttctagatcgcgagcggccgttctttttttttttttttttttttcgacgggaactcttcaatctgtggtgggacttgcaacagtacacggactacaccacttcctgaataactgtagcatttaagggaaaaaagggggaaggccacaatactacaagggcaaggaaaccgctgatggcacaacaaaccagcaaagccaggcctggaagtgttttacacaatgcgcgtaggcatggcggcttctggccacggagaatcattgggaagatgagctaccatattgccatgggctgaacttgactgaagtgacatctgtctcgtcggtgacatcggagcggtctatgg

SEQ ID NO: 20137 - DNA, 252 bp, Zea mays
  unsure at all n locations
  Clone ID: LIB3151-058-Q1-K1-E1
tcggtaaaagataccgaaacgacaactgtttgtttctatctggccaggtgtanggcggaagggtcactggtggatagatggcagattgtgacggtacctgactcggactgcaccattcaggatatggacatttttcatgataatttagttctctttcttcgaaagaatggtactcctcttttttgttccatcagtatgccaattgatgttcaggagccaaaggaacttgatgatctcaacccaatgtttttt

SEQ ID NO: 20138 - DNA, 342 bp, Zea mays
  Clone ID: LIB3151-058-Q1-K1-E10
ccaactagcaacatataaagcacattttttttccaacaatggcagccaaaatagggtggcttcttatgctccttggtctttctgcaagtgctgctacggcgaccattttcccgaaatgctcgcaagctcctatagcttcccttcttcccccgtacctctcaccagcggtgtcttctgtatgtgaaaacccaattcttcaaccctacaggatccaacaggcaatcacagctggcatcttacctttatcacccttgttcctccaacaatcatcagccctattacatcagttacctttggtgcatttattggcacaaaacatcagggcacaacaactacaacaac

SEQ ID NO: 20139 - DNA, 345 bp, Zea mays
  Clone ID: LIB3151-058-Q1-K1-E11
atcggacaaggcgccggagcctcatctatccctgagcagactagaggagtagctaaggcaaagggaggtggcaaagatgctgccgacgaccgcgtccaaggggcgcggggcctcccgctccgccccgccgctcttcggtccctacctccgccgcatcgtcaagtggcaacaaatggatattgaatacacattttggcaaatggttcatctctgtacttcaccaaaagtagtctatcagcacaccaaatatcacaagcaaacaaagaaccagtgggcccgtgatgatcctgcatttgttgttattctgattcttttcctcgggtttgcaacatcagcttactgtgc

SEQ ID NO: 20140 - DNA, 272 bp, Zea mays
  Clone ID: LIB3151-058-Q1-K1-E12
gcaacatataaagcacaatagtgtttctctatggcagccaaaatattttgccggcggatgctccttggtctatctggacacgctactaccgccaccattttgccacaatgctcacaagctactatagcttaccttgttcccccgtacctttcaccagcggtgtcttctgacatatgaaaacccaattcttcaaccctataggatccaacaggcaactcgtaggttgcatctcacctttattacacttgttcctccaacaatcatcaccccta

SEQ ID NO: 20141 - DNA, 347 bp, Zea mays
  Clone ID: LIB3151-058-Q1-K1-E2
caacaagcaacatagaaagtggaatccagtttcaacaatagagcaacaatggagaccaggatattttccctccttatgctccttgctctttctacatgtgttgctaacgcgacaattttccctcaatgctcacaagctcctatagcttccctttttcccccataccttccatcaattatagcttcagtatgtgaaaacccagctcttcaaccatataggcttcaacaagcaatcgcagcaagcaacatacctttatcgcccttgttgtgtcaacaatcgccagccctatctttggtgcagtcattggtacaaaccatcagggcacaacagctgcagcaactcgtgct

SEQ ID NO: 20142 - DNA, 348 bp, Zea mays
  Clone ID: LIB3151-058-Q1-K1-E3
ccgtctcgtttggacctccatccgttgctttcgccgccgcgctgagtttgggccgggctctgttaatctgggcgactttgattttctctgctcccgctgccccggccgtcaggagtgaagcgatgctggagaaagaccggatatcctacttctacgacggagatgttggcaatgtctactttgggccaaatcaccccatgaagccacatcgtctctgtatgacacatcaccttgttctttcatatggacttcatcaaaagatggagatatataggccacacaaagcatatccaatagagcttgcccaattccattctgctgattatgtggaattcttgcaccggataa

SEQ ID NO: 20143 - DNA, 341 bp, Zea mays
  Clone ID: LIB3151-058-Q1-K1-E6
gccattccctcttcaagagggtatcttcagattgggcttattattccttattgggccaggcaaggatcggaggtgctctgaattgactgaaccatggcggcgacaatggcagtgacgacgatggtgacgaggagcaaggagagctggtcgtcattgcaggtcccggcggtggcattcccttggaagccacgaggtggcaagaccggcggcctcgagttccctcgccgggcgatgttcgccagcgtctgcctcaacgtgtgcccgggcgtcccagcggggcgcgacccgcgggagcccgatcccaatgtcgtccgggcggccgacaactgcgacatcgcgcg

SEQ ID NO: 20144 - DNA, 341 bp, Zea mays
  Clone ID: LIB3151-058-Q1-K1-E8
ctgggtcttcagaccattagctttttctactccagagcgcagaagaacccgagcgacaccatgagggtgttgctcgttgccctcgctctcctggctctcgctgcgagcgccacctccacgcatacaagcggcggctgcggctgccagccaccgccgccggttcatctaccgccgccggtgcatctgccacctccggttcacctgccacctccggtgcatctcccaccgccggtccacctgccgccgccggtccacctgccaccgccggtccatgtgccgccgccggttcatctgccgtcgccaccatgccactaccctactcaaccgccccggcctcagcc

SEQ ID NO: 20145 - DNA, 345 bp, Zea mays
  Clone ID: LIB3151-058-Q1-K1-E9
gagcattcagaaacacaccattcgtttctcactagcaacaacctaacaacaatggctaccaagatattatgcctccttgcgcttcttgcgctttttgcgagcgcaacaaatgcgtccattattccacaatgctcacttgctcctagttccattattccacagttcctcccaccagttacttcaatggccttcgaacacccagctgtgcaagcctataggctacaacaagcgattgcggcgagcgtcttacaacaaccaattgcccaattgcaacaacaatccttggcacatctaacaatacaaaccatcggaacgcaacagcaacaacagttcctaccagcactg

SEQ ID NO: 20146 - DNA, 346 bp, Zea mays
  unsure at all n locations
  Clone ID: LIB3151-058-Q1-K1-F1
gcaaagcggcagtgcgtagagaggatcgtttaacagaacagcatgaanatgggggtgggtctcgtcgtgtgcctggctctgtcagctgccagcgcctctgcaatgcagatgccctgcccctgcgcggggctgcagggcttgtacggcgctggcgccggcctgacgacgatgatgggcgccggcgggctgtacccctacgcggagtacctgaggcagccgcagtgcatcccgctggcggcggcgccctactacgccgggtgtgggcagacgagcgccatgtaccagccgctccggcaacagtgctgccagcagcagatgaggatgatggacgtgcagtccgtcgcgc

SEQ ID NO: 20147 - DNA, 200 bp, Zea mays
  Clone ID: LIB3151-058-Q1-K1-F10
attgagaccaactagcaacatagtttttcttttttttgtaccaacaatctcatcggaaaggttatgcctccttatgctggccacgtctctctgcacgtgctgctacggctaccatttccccctaatgcaggcaagctcgtatacgttccgtttttaccgcatccacacgatcaccatgtggatcggcgtcataaaacccg

SEQ ID NO: 20148 - DNA, 347 bp, Zea mays
  Clone ID: LIB3151-058-Q1-K1-F11
ctttccccggcgccatggccaggctttctcttgtgctcctcctgctgctggccgtgggggctttcgcgtgggccggcgccagcgcgagccacctcgatctgggcttgggcttcctctcctccggggaccgccggcgggagtgccgcggcacggtggccgagtgcctggacgagtcatagggcctggacctgggggcggggcccgcgtccgtggagtcccaccgccgcgcgctctacggcggcggcgggtacatcagctacggcgcgctgcggcgggacaacgtgccctgctcccgccgcggcgccagctactacaactgccgccccgggggccaggccaacccctac

SEQ ID NO: 20149 - DNA, 352 bp, Zea mays
  Clone ID: LIB3151-058-Q1-K1-F12
tcattattccacagtgctcacttgttcttattgccattattccacagttcctcggaccagttacttcaatgggcttcgaacatccagccgtgcaagcctacaggctacaactagcgcttgcggcgagcgtcttacaacaaccaattgcccaattgcaacaacaatccttggcacatctaaacctacaaaccatcgcaacgcaacagcaacaacagtttctgccatcactgagccacctagccgtggtgaaccctgtcgcctacttgcaacagcagctacttgcatccaacccacttgctctggcgaacgtagctgcataccagcaacaacaacgtctgcaacagtttatgcc

SEQ ID NO: 20150 - DNA, 349 bp, Zea mays
  Clone ID: LIB3151-058-Q1-K1-F2
ctgggtcttcagaccattagctttatcttctccagagcgcagaagaacccgagggacaccatgagggtgttgcgtcgttgccctcgctctcctggctctcgctgcgagcgccacctccacgcatacaagcggcggctgcggctgccagccaccgccgccggttcatctaccgccgccggtgcatctgccacctccggttcacctgccacctccggtgcatctcccaccgccggtccacctgccgccgccggtccacctgccaccgccggtccatgtgccgccgccggttcatctgccgccgccaccatgccactaccctactcaaccgccccggcctcagcctcatccc

SEQ ID NO: 20151 - DNA, 340 bp, Zea mays
  Clone ID: LIB3151-058-Q1-K1-F3
gaaatacccaattcctcagggtgaatttctttatgtcatgaaccctgatccttggcgggggactttcgggtctgatgctgcatcttatgctaaggaagtcgaagaacacataacttatggaagttcaggaagggttgcaggcttcattgcagaaacattccaaggtgtgggaggtgctgttgaactagctcctggatacctaaagttagcttatgacattgtgcgcaaggctggtggcgtttgtattgctgatgaagtccagagtggttttggccgtactggcagtcattactggggattccagacacaaggtgtcattcctgacatagtcaccatggca

SEQ ID NO: 20152 - DNA, 307 bp, Zea mays
  unsure at all n locations
  Clone ID: LIB3151-058-Q1-K1-F4
ccgccgctccagcggcgactcttctcttttacacctncaacgcgctggtcgttaaggacaggtacctggagctgaccactgcgctgccgccggagggcggggcgtcgctgtacgggctaggcgagcacaccaagcgcacgttccggctgcagcgcaacgacacgttcacgatgtggaacgccgacatcccggccgccaacgcggacgtcaacctgtacggctcccacccgttctacctcgacgtgcgccacgccggcgccgcgcacggcgtgctcctgctcaacagcaacggcatggacgtcgagta

SEQ ID NO: 20153 - DNA, 302 bp, Zea mays
  Clone ID: LIB3151-058-Q1-K1-F5
atcttggaggaacaacttgctttattctcagagcaagttggagcatttccgtatggataatgaaagcttgactgaaacaaataatactttgaatgaggagttggaagtacatcataacaagttgaacgatttacaacttgcacttgctgctgcagtagcagaaaaggaggaggcatctgaagagattcattcgctgcataaaacgctcgatggaatgatcgagcacaaagcaaaattagaaatacaggtatcttctactatacaagagcacgaagaactgtagagcaagttcccaaatacaa

SEQ ID NO: 20154 - DNA, 343 bp, Zea mays
  Clone ID: LIB3151-058-Q1-K1-F8
cccgaatcccaactccggcttcctttttcgactcggggcggtcactccggcgggtgctgttgctgctggtcccccaaccgctcccgcccggagcacgccgccggcgccgactccggcgcgtcgcatggatatggcccccgcgtctgtctacttcaatccgcgctcggtcgaggaaatcttcaaggacttctccggccgccgcgcggggctcgtccgcgccctcacctccgatgtggacgatttctgcagcttgtgcgacccacataaggagaatttgtgtctctacggccttcccaacgggagctgggaggtgtcgccgtcagcggaggaggttcctccggag

SEQ ID NO: 20155 - DNA, 347 bp, Zea mays
  Clone ID: LIB3151-058-Q1-K1-F9
gcaattagctcatcgactccagattttagaactcgacaccatgaaggtgctgggcgttgcccttgctctcctggcgctcgctgcgagcgccgcctccagtacaagcggcggctgtggctgccagacaccaccgtttcatctaccgcctccgttctatatgccgcctccgttctatctgccgccgcagcagcagccgcagccatggcaataccccactcaaccaccgcagctaagcccgtgccagcagttcggatcctgcggcgtctgcagcgtcggcagcccgttcctgggccagtgcgtcgagttcctgaggcaccagtgcagcccggcggcgacgccctacggct

SEQ ID NO: 20156 - DNA, 352 bp, Zea mays
  Clone ID: LIB3151-058-Q1-K1-G1
cgcttgcgcctctctctctctctctttgttttctgcttcacccctgccgccggggcgggcgtcttcgccctacgcttggtgcctaggtcttcatcggatcgttcaccgagcacaagcatcacccagcagggtttcttgccctatctgtttaagactgggatcgcttctcccccgccgaccaagccgtgcctcccctgttgccggcgtcgcccctcccccaccagtgaaactcgcggtctctctccaccgcacgcacctcgtgtagttgtcgccgcgtgcaccccctgtagccccggcgttgggtcctactgctccatccggtttgcttccggcaacaagatcaacaacaagg

SEQ ID NO: 20157 - DNA, 348 bp, Zea mays
  Clone ID: LIB3151-058-Q1-K1-G10
ggagagaggatagtctcatttcattttctatcgcgagcggcacctttaagagggtgatcattgaaaaccaatgacaccctccccttctgcctcaatgccggcgtaaaggccaacctcgcgcctccgcacccgttcaagtccagcatccaatcggaggccaagttctgggcggacaaaaaaaattttgggacagaggccatttacggatccgccttgaacatccgaaaggttctctatgccaaaatccttttaaggttccaaaggccccttgaggcttggcaattatttttgttggatatgaggcactgacaggttccctaaatgattgtggttttgaagattatctta

SEQ ID NO: 20158 - DNA, 309 bp, Zea mays
  Clone ID: LIB3151-058-Q1-K1-G11
caagcacacacttttttttttagccagcgccagtatgaagagggggattttcgagagcggctagagccccctctcatctctcaatgtggggcttgaggtctgacctcaacaagcaaaaaagctaatgtcaagcatccaatctgaagataccaccctgaagggcccgaataaggttaagaagatcttcatttaactagaccctcggtatgatcgcaggaagcatgttgaagatgcaccactggaacgagcaaaggaagactaggcccttctatgacatgcttgacgatgtcaagaacagacatgttccct

SEQ ID NO: 20159 - DNA, 373 bp, Zea mays
  Clone ID: LIB3151-058-Q1-K1-G2
ttcccgggcggccacgcgtccgagaggcgtctccggtccgggccacttcactttcggcggatatggctgtcgaagggcgagggcctcctcttagcaggagggcacaagcaactcaccagcgcgggatggccttggacgaccggcgacgaatctagatgcgcgacggcgtgaccgagccaccagcaggctttccagctccagcaggcctcgtgtgtgggcgtgggcgtgggcctgccggcggcggctccggtctcgtcggccgcggcggcgccaccagcgccgatgatagcgcagcagtacgctgctggcggacggctgttcgtgggagacgcggcggagagcggcgtcacgttcggaggaggaggtgcggtgc

SEQ ID NO: 20160 - DNA, 305 bp, Zea mays
  Clone ID: LIB3151-058-Q1-K1-G3
gtgttgccagcagctcaggcaggttttgctttatcaccggtaccaggcgatctgggggttggtcctccagtccatccggcatcagcagccgcaaagcggccaggtcgcggggctgttggcggcgcatatagcgcatcaactgacggcgatgtgcggcctgcagcagccgactccatgcccctacgctgctgccggcggtgtcccccactgaagaaactatgtgctgtagtatagccgctggctagctagctagttgagtcatttagcggcgatgattgaggtataatgtgtcacgcatcaccatg

SEQ ID NO: 20161 - DNA, 346 bp, Zea mays
  Clone ID: LIB3151-058-Q1-K1-G5
ggagagaggagaggcgcagagcatctacgatggcgagcggcagcatgaagagggagatcagcgagacccacgacaccctccgcttcggcctcaatgccggcgtcaaggccgacctcgcgccgccgcacccgctccagtccagcatccaatcggaggccaagttctgggcggacaagaagaagtttgggacagaggccatctacggatccgccttgaacatccgcaaggatctcgatgcccaaatcctctcaaggttccaaaggccccctggtgctttgccatcatctctgcttggatatgaggcactgacaggttccctagatgattttggttttgaagattatct

SEQ ID NO: 20162 - DNA, 291 bp, Zea mays
  Clone ID: LIB3151-058-Q1-K1-G6
gtagagaggagaggcgcaaatcattttacgatggccagcggcatcatgaagagggggatcagcgagacccacgagaccctccccttctgcctcaatgccggcataaaagccgacctcctgccgacataccagctccagtccagcatccaatcggaggccaagttctagtcggacatgaagacgtaagggacagaggccatttacagatccgccttcgaacatccgcagagatctcgataccacactcctctcaaggacccaaaaggctcctgctgcttctccataatctct

SEQ ID NO: 20163 - DNA, 348 bp, Zea mays
  Clone ID: LIB3151-058-Q1-K1-G7
agcaaagcggcagtgcgtagagaggtatcgtcgaacagaacagcatgaagatgggcatcgttctcgtcgtgtgcctggctctgtcagctgccagcgcctctgcaatgcagatgccctgcccctgcgcggggctgcagggcttgtacggcgctggcgccggcctgacgacgatgatgggcgccggcgggctgtacccctacgcggagtacctgaggcagccgcagtgcatcccgctggcggcggcgccctactacgccgggtgtgggcagacgagcgccatgtaccagccgctccggcaacagtgctgccagcagcagatgaggatgatggacgtgcagtccgtcgcgc

SEQ ID NO: 20164 - DNA, 347 bp, Zea mays
  Clone ID: LIB3151-058-Q1-K1-G8
gcaacatagaaagtggaatcctgttttaacaatagagcaacaatggagaccaagatattttccctccttatgctccttgctctttctacatgtgttgctaacgcgacaattttccctcaatgctcacaagctcctatagcttcccttttttccccataccttccatcaattatagcttcagtatgtgaaaacccagctcttcaaccatataggcgttaacaagcaatcgcagcatgcaacatacctttatcgcccttgttgtgtcaacaatcagcagccctatctttggtgcagtcattggtacaaaccatcagggcacaacagctgcagcaactcgtgctacctgt

SEQ ID NO: 20165 - DNA, 347 bp, Zea mays
  Clone ID: LIB3151-058-Q1-K1-G9
cggacgcgtgggttctggtacttctttgccaagttcttcgggcccaagcgcccggccgcggaccccgggattctcatgtccaacctcttccagaagggcgagccaatggatatgtggatgtatttatcagagagtgacaagttcaacgattttgctaatgaggacgcacttatttggcatgaggcaaacataccatatgcagtatggggacctaccagtactagaacacggtcattaacatactacccttcagaggctctcaagcataatggatctttgtatgctcatgtttactttgcccgctcgggttaccctgtggacccaacagatcctgaatatgagcagaa

SEQ ID NO: 20166 - DNA, 353 bp, Zea mays
  Clone ID: LIB3151-058-Q1-K1-H1
gtcaattaaacatagagttttttttttttttgaaagcgaaaaacgaaaactctgtgtggaattgacaccttgaaggggttatatatatagagaggacaacgcagcgagatgcatgggctttccagcatcgattaaagtatcagaaccttattgtagcatgcatgcatgcatctgccggttttggaagaaggtttttcctcacatcgacagccccacacatgccgcgcagcaacgagtaccccgctatcactccactggagcatagacgacacatgttctgcttggtgtataaaccgagaatgaatatggcctattatcatgcgaacagtcggcggtgaagtgctcggctgcgt

SEQ ID NO: 20167 - DNA, 352 bp, Zea mays
  Clone ID: LIB3151-058-Q1-K1-H10
ccccctcctacgccgcccccgtcctttgtcctcacgcgctcgcgcggcgcacgaggcggcgaacccgacctcctgctgcgcgcccgtccctgccaccggtcgccgatattggaaggagctcggagggctggggcgctgacctgagttttatggagagaggatgccagagctgcgaagcagtactcgccaagcatgcctaaggtcgaagaagcttgaagatctgcagctaggagagccgcctgcgaaaccggtgtcacctgctccgccgagggcaggaaagcgtgctcctacacgtgctgctaggggcagaaagggtgccactgggaaaggagtgccccccgcacctaagact

SEQ ID NO: 20168 - DNA, 364 bp, Zea mays
  Clone ID: LIB3151-058-Q1-K1-H11
gcgttcgcccacgcgtccgccctgctccattctttttttgtcgccaatcccttccccttctcgggggccgctgagtgagaagaagagatggccggcaagggcgatggcccggctatcggcatcgatctcggcacgacgtactcttgcgtcggcgtgtggcagcacgaccgcgtcgagatcattgccaacgaccagggtaaccgcaccacgccctcgtacgtcgccttcaccgactccgagcgcctcatcggagatgcggccaagaaccaggtcgccatgaaccccatcaacaccgtctttgatgccaagcgtctcatcggcaggaggttcagtgatgcgtctgtccagagtgatatcaagctgg

SEQ ID NO: 20169 - DNA, 357 bp, Zea mays
  Clone ID: LIB3151-058-Q1-K1-H12
ctcgctctcctggctctcgctgcgagctcctcctccacgcatacaagcggcgggtgcggctgccagccaccgccgccggttcatctaccgccgccggtgcatctgccacctccggttcacctgccacctccggtgcatctcccaccgccggtccacctgccgccgccggtccacctgccaccgccggtccatgtgccgccgccggttcatctgccgccgccaccatgccactaccctactcaaccgccccggcctcagcctcatccccagccacacccatgcccgtgccaacagccgcatccaagcccgtgccagctgcagggaacctgcggcgttggcagcaccccgatcctgggg

SEQ ID NO: 20170 - DNA, 352 bp, Zea mays
  unsure at all n locations
  Clone ID: LIB3151-058-Q1-K1-H2
ttatcattcanaaacacaccaagcgttatctctctatcaacgacctaacaacagggggtgccaagatattatccgtgcttgcacttcttgccctttttgtgagcgcaacaaatgcgttcattattccacaatgctcacttgctcctagtgccattattccacagttcctcccaccagttacttcaatgggcttcgaacacctagctgtgcaagccaacatgcaacaacaagcgcttgcggagagcgttttacaacaaccaattgcccaattgcaacaacaatccttgccacatctaacaatacaagccatcacaacgcatcagcaacaacagttcctaccagcactgagcca

SEQ ID NO: 20171 - DNA, 353 bp, Zea mays
  unsure at all n locations
  Clone ID: LIB3151-058-Q1-K1-H3
attagctttatctactccagagcgcttattaacccgatcgacaccatnaaggggggggtcgttgacctcactctgctggctctcactgcgagcgccacctccacgcatacaagcggcggctgcggctgccagccaccgccgccggttcatctaccgccggcggtgcatctgccacctcctgttcacctgccacctccggtgcatctcccaccgccggtccacctgccggcgccggtccacctgccaccgccggtccatgtgccgccgcctgttcatctgccgccggcaccatgccactaccctactcaaccgccccggcctcatcctcatccccagccacacccatgcccgtg

SEQ ID NO: 20172 - DNA, 317 bp, Zea mays
  Clone ID: LIB3151-058-Q1-K1-H4
gccaagcggacaagtgcaacttattttcaacatcgaacgcacacttgaggagggagatcagcaactcaaatatcgcgcccccttatgctccctgtgccttcttcaagggctacctcgggcagcatttccccacacagctcacaatctaatatagggtcccttatttcgcagaccctattaccaacgggtgctatagaggatgtgaaaacccaatttttcaaccctacaggatccaacaggcaatcgcatctagcattctacctttatcacccttgttcgtcctactactcatcatgcctattacaagaaataccgtt

SEQ ID NO: 20173 - DNA, 350 bp, Zea mays
  Clone ID: LIB3151-058-Q1-K1-H5
attttgagcattcataaacactcctttcgaagcacattagcaacaacctggcagcaatggctaccaagatattatccctccttgcgcttcttgcgctttttgcgagcgcaacaaatgcgttcattattccacaatgctcacttgctccaagttccattattacacattttctcccaccagttacttgaatgggcttcgaacacccagctgtgctagcctatatgctacaacaagcaattgcatgcagcgtcttacaacaaccaatttcccagtttcaacaacaattcttgtgccatttaacaatacaaaccatcgcaacgcaacagctacaacaattcctaccagcactg

SEQ ID NO: 20174 - DNA, 342 bp, Zea mays
  Clone ID: LIB3151-058-Q1-K1-H6
tattgagaccaacaagcaactttttttttggaatccagtagcaacaatagggcggcaatggagaccaagatattgtccctccttatgctccttgctctttctacatgtgttgctaacgcgacaattttccctcaatgctcacaagctcctatagcttccctttttcccccataccttccatcaattatagcttcagtatgtgaaaacccagctcttcaaccatatatgcttcaacaagcaatcgcagcaagcaacatacctttatcgaccttgttgtgtcaacaatcgacagccctatctttggtgcagtcattggtacaaaccatcatggcacaacagctg

SEQ ID NO: 20175 - DNA, 347 bp, Zea mays
  Clone ID: LIB3151-058-Q1-K1-H7
gatcccggcactgcaagcaacaaagttctactctgaccatatccgtccatctaggtgccaagacgaaccaatccgtaccagcgctatccggccggccatggcggcggcgcgccggctctccctgcccctcgtgctgctggtcgtcctggccgtctccgggcgcgcggcggcgcatgactacgacttcttatacctcgtgctgcagtggccgggggcctactgcgacaccaagcagagctgctgctaccccaagtccggcaagccggcggcggacttcgggatccacggcctctggcccaaccgcgacgacggaacgtacccgcagaactgcagacccgacaacgcct

SEQ ID NO: 20176 - DNA, 349 bp, Zea mays
  Clone ID: LIB3151-058-Q1-K1-H8
aaatcggcggcgaatccccaaccctttcagcagtgggcggccggaccgggacgggcggtagacggctccagcacgcaacgctgacaggtttggccgtgcgaggcgcgagggctagacaggtgtcgcggcgccaggcatccagttccagggctgcgtgggctcgaccagagcgagtctgcaatccgcccgtccttgtccccgtcggcggccgttcaccagtgtcaggtgcggaggtgacaacatttctgaaagaagtaagcaagcactagttatatggtgagtcatgtcaaaggcacgtaatgctgtagttgccactggattgctgctcttcgctggtgctggcttatca

SEQ ID NO: 20177 - DNA, 342 bp, Zea mays
  Clone ID: LIB3151-058-Q1-K1-H9
attgagaccaactatcaacatatatttctcaattgtgcaccaacaacgggaggggaaatattttgactcattatgctcctttgactttctgcaagtgctgatactggaaccatttacccgaattgctctcaagctcatataggttcagttcttccccggctcctctaaagagcgggtgcactactatgtgaaaacccaactcttgaagcctaccacctccaacaggcactcacaggtcgtcttttaccttaataaccctcaatcactcaacatatattgagcctattacatcagctacatgcgggacatctatactgacaaaacattatggcacagcaacta

SEQ ID NO: 20178 - DNA, 388 bp, Zea mays
  unsure at all n locations
  Clone ID: LIB3151-059-Q1-K1-A10
ngggtcttcaaacattagctttatttactttagagcgcagaagaacccgatcgacaccatgagggtgttgctcgttgccctcgctctcctggctctcgctgcgagcgccacctccacgcatacaagcggcggctgcggctgccagccaccgccgccggttcatctaccgccgccggtgcatctgccacctccggttcacctgccacctccggtgcatctcccaccgccggtccacctgccgccgccggtccacctgccaccgccggtccatgtgccgccgccggttcatctgccgccgccaccatgccactaccctactcaaccgccccggcctcagccttatccccagccacacncatgcccgtgccaacagccgcatccaagcccg

SEQ ID NO: 20179 - DNA, 382 bp, Zea mays
  unsure at all n locations
  Clone ID: LIB3151-059-Q1-K1-A11
attagctntatctctccagagcgtttaagattccgatcgacaccatgagggtgttgctcgtggccctcgctctcctggctctcgctgcgagcgccacctccacgcatacaagcggcggctgcggctgccagccaccgccgccggttcatctaccgccgccggtgcatctgccacctccggttcacctgccacctccggtgcatctcccaccgccggtccacctgccgccgccggtccacctgccaccgccggtccatgtgccgccgccggttcatctgccgccgccaccatgccactaccctactcaaccgccccggcctcagcctcattcccagccacacccatgcccgtgccaacagccgcatccaagccccgtgccagc

SEQ ID NO: 20180 - DNA, 344 bp, Zea mays
  Clone ID: LIB3151-059-Q1-K1-A12
ctagcaacatagaagcacaatagtttaccaacaatggcagccaaaatattttgcctccttatgctccttggtctttctgcaagtgctgctacggcgaccattttcccgcaatgctcgcaagctcctatagcttcccttcttcccccgtacctctcaccagcggtgtcttcggtatgtgaaaacccaattcttcaaccctacaggatccaacaggcaatcgcagctggcatctaacctttatcacccttgttcctccaacaatcatcaacccttattacaacaagtaccttttggtgcattttattggcacaaaaacatcaagggcacaacaactaccaacaact

SEQ ID NO: 20181 - DNA, 254 bp, Zea mays
  Clone ID: LIB3151-059-Q1-K1-A3
cccacgcgtacgtagcttttctactccagagcgcagattaacccgatcgacaccatgagggtgttgctcgttgccctcgctctcctggctctcgctgcgagcgccacctccacgcatacaagcggcggctgcggctgccagccaccgccgccggttcatctaccgccgccggtgcatctgccacctccggttcacctgccacctccggtgcatcttccaccgccggtccacctggccgcgccggtcacctggca

SEQ ID NO: 20182 - DNA, 233 bp, Zea mays
  Clone ID: LIB3151-059-Q1-K1-A6
cgctgttctcagcgatgccctgcccagcgtttgtgggacaacgcgacagcggcggaaggggcggcgcatgcgtttctgctggccgaacccccccggggacaacgaacccccgtgcgggggccggttccctttcgggcttggccccgggggcaaactggtgaccagcggggtgggcgcccggattatttttaatccggcgggcattcccctgcttggcgtggtgcccggtgggg

SEQ ID NO: 20183 - DNA, 256 bp, Zea mays
  Clone ID: LIB3151-059-Q1-K1-A7
gcgctgttcgagagaagctggaagccatgattaaagccaaggggtgaagaacgacaccggcctcaccgtcaccgggctcaaagagctggtgagccagtacaaggacgtctacgtggaggctaagggagagccatttccctcagaccccaagaggcagctggaggttggcagttgctggccggtgttcgaccttctggggagaagccctgagggcaaaagaagtacagggagcattaaaccagattcaccgggcctt

SEQ ID NO: 20184 - DNA, 337 bp, Zea mays
  Clone ID: LIB3151-059-Q1-K1-A8
attcggcaaagcggcatgcgtagagaggatcgtttttcagaacagcatgaagatggtcatggttctcgtcgtgtgcctgggtgtgtcagctgccaacgcctttgcaatgcagatgccctgcccctgcgcggggctgcaaggcttgtacggcgctggcgccggcctgacgacgattatgggcgcctgggggcatgtacccctacgcggagtacctgaagcagtcgcagtgcattccgttggcggcggcgccctactacgccgggtgtgggcagacgagcgccatgtaccagccgctccggcaacagtgctgcccgcagcagatgaggatgaatggacg

SEQ ID NO: 20185 - DNA, 256 bp, Zea mays
  unsure at all n locations
  Clone ID: LIB3151-059-Q1-K1-B1
gcagaccanagcnnnancacaccagagcgcagaagaacccgancgacaccangagggngnggcncggggcccncgcncnccgggcncgcgcngcgagcgccaccnccacgcanacaagcggcggcggcggcggccagccaccgccgccggnacaacaaccgccggcggngcaacagccaccnccggggcaccagccaccnccggggcaacaaccaccgccgggccaccagccgccgccgggccaccngccaccggc

SEQ ID NO: 20186 - DNA, 366 bp, Zea mays
  unsure at all n locations
  Clone ID: LIB3151-059-Q1-K1-B10
tgggtcttcagacattagctttatctactttagagcgcagaagaacccgatcgacaccatgagggtgttgctcgttgccctcgctctcctggctctcgctgcgagcgccacctccacgcatacaagcggcggctgcggctgccagccaccgccgccggttcatctaccgccgccggtgcatctgccacctccggttcacctgccacctccggtgcatcttccaccgccggtccacctgccgccgccggtccacctgccaccgccggtccatgtgccgccgccggttcatctngccgcgcaccatgtactaccctactaaccgcccgcctcagctatcccagcacancatgtcgtgcaacagtgatc

SEQ ID NO: 20187 - DNA, 389 bp, Zea mays
  Clone ID: LIB3151-059-Q1-K1-B11
atggcgtcgaagagatcctgaaggagttgattgacctgcagaaggacccgcccacctcctgcagcgcaggtcctgttggtgaggacatgttccattggcaagcgaccatcatggggccttcggacagcccatttgcaggtggggtattcttggtgaacattcacttcccaccggattaccctttcaagccaccaaaggtgtctttccgcaccaaggtattccacccgaacatcaacagcaacggcagcatttgccttgacattcttaaggaacagtggagtcctgctttaactatctcaaaggttctcctgtcaatctgctcactgctcacggacccaaaccctgatgatcctcttgtccctgagattgctcacatgtacaagaccgac

SEQ ID NO: 20188 - DNA, 388 bp, Zea mays
  Clone ID: LIB3151-059-Q1-K1-B12
atgaggagctcgttcctactaccttaagcgcaaggtcctcggccgcccgctcaaggttgatgccatcgccgatgtggacctttacaagctcgagccctgggacctgcccgcccgctcccgcctccgctcccgcgactcccagtggtatttcttcagccgcctcgaccgcaagcacgccaaccgcgcccgcaccaaccgcgccacgtcgggagggtactggaagaccaccgggaaggacagggaggtgcgccatgggcccagacttgtcgggatgaagaagacgctcgtcttccacgcgggacgcgcccccaagggcgaacgcaccaactgggtcatgcacgaataccgcctcgagggcgatgacgccgcagggataccgcaggactca

SEQ ID NO: 20189 - DNA, 193 bp, Zea mays
  Clone ID: LIB3151-059-Q1-K1-B3
acctgcgacaccagataggtgagacagcgatttcatttttcgttcctctccccggcggtgctaggggggcacacccggagggggatcagctatccagtggaacttcaaattaccggcggcagctcctagccaattgctcctttccggtaaccacccctttggacctctgttctcatttggacgcatgcaacaa

SEQ ID NO: 20190 - DNA, 333 bp, Zea mays
  unsure at all n locations
  Clone ID: LIB3151-059-Q1-K1-B4
cagcattcanaaacacaccagcgaagcgcactatcattttcctaacaacaatggctaccaagatattagccctccttgcgcttcttgcccttttagtgagcgcaacaaatgcgttcattattccacagtgctcacttgctcctagtgccattattccacagttcctcccaccagttacttcaatgggcttcgaacatccagccgtgcaagcctacaggctacaactagcgcttgcggcgagcgtcttacaacaaccaattgcccaattgcaacaacaattcttgggacatctaaacctacaaaccatcgcaacgcaacagcaacaacaggttt

SEQ ID NO: 20191 - DNA, 124 bp, Zea mays
  Clone ID: LIB3151-059-Q1-K1-B5
tcaaatcgtacatcatattcaaaacacgacttcatgtttgtgcttatcgcacccccccctgttctgggggtcgtttatagcgcaagctgcggtacaagctgccacttactctcccatactctac

SEQ ID NO: 20192 - DNA, 123 bp, Zea mays
  Clone ID: LIB3151-059-Q1-K1-B6
gcaaagcggcagtgcgtagaaggatcggtgtttttattatcatgaagatggtcatcgttctcggcgtgtgcctggttctgtcagctgccagctccttagcaatgcaaattccctgcccctgct

SEQ ID NO: 20193 - DNA, 342 bp, Zea mays
  Clone ID: LIB3151-059-Q1-K1-B8
ctcaagcttatgaaagaatggagctgcatgtttgagcattttgacagatgagaagtactttcagggaagctttgataatcttgaaaaggtgcgcagctcacgagtgaagtgccctcttctctgcaaggagtttgtcattgacaagtggcaaatctataatgctcgctctaagggtgctgatgcaattctactaattgctgctgtgctaccagatcttgacataaggaaatttcttcagatttgcgaagagttgggaatgacagctcttattgaggttcatgatgaaagagagatggaacgtgtgctgaagataaatggaattaagcttattggtatcaataa

SEQ ID NO: 20194 - DNA, 333 bp, Zea mays
  Clone ID: LIB3151-059-Q1-K1-B9
aacaattcctacagcactgagccttctagttatggtgaaccctgccgcctacttgcaacaggagttgcttgcatcaaacccacttgctctggcaaacgtagttgcaaaccagccacaacaacagctgcaacagtttttgccagcgctcagtcaactagccatggtgaaccctgccgcctacctacaacagcaacaactggttttatctagcccgctcgctgtggccaatgcacctacatacctgcaacaacaattgttggaacagattggaccagctctgactcactaggtgtgggaaaaccctgtgcctactttgcaacagctggtttcatt

SEQ ID NO: 20195 - DNA, 357 bp, Zea mays
  Clone ID: LIB3151-059-Q1-K1-C1
gtcttagatgaaatgttaatgctctagaccaccggcatcctgagggtgtaagggaggaggtcatcgttgaccttgttggccaatgccgatcttatcaatctcgtgtcatggatcttgttaacagtactggcgatgagagccttttatttcaggcactaggactaaatgatgagttacagcgtgttgttcagcgtcatgatgacatagcgaaggggatcctccctcctggtaccggagcacctgtacctgcttctgcaaatgtcaaccaagggactaccccacctaggcccacggcggtttcattttctccactcctgaatgtacacgaggacgatgaaccggaagacgagttcgtcg

SEQ ID NO: 20196 - DNA, 349 bp, Zea mays
  Clone ID: LIB3151-059-Q1-K1-C11
ccaatccagatcacaaagcggctgttcgtttataggatcgtcgaacagaacagcatgaagatggtcatcgttctcgtggcgtgcctggctctgtcagctgccagcgcctctgcaatgcagatgccctgcccctgcgcggggctgcagggcttgtacggcgctggcgccggcctgacgacgatgatgggcgccggcgggctgtacccctacgcggagtacctgaggcagccgcagtgcagcccgctggcggcggcgccctactacgccgggtgtgggcagacgagcgccatgtaccaaccgctccggcaacagtgctgccagcagcagatgatgatgatggacgtgcagt

SEQ ID NO: 20197 - DNA, 330 bp, Zea mays
  Clone ID: LIB3151-059-Q1-K1-C12
atcgaagcgctccctcgggggattaccgttagcggggccggcaccgcagcgttcgggagcaccgggatcgggataaggatgacgggaaggagaaggagaggagccgcgatagccgcgggaaggacagagacagggaagggagagaacgggagaaggagaggggggacaggcaccggcccagagagagggaggtggaacgggagcggaggagcctgagccgttcggagcggcgccgtatcgaggaagaggagatggtgagggagctggagatggagcgcgagcgcagcgagcgacaccactatcgcgaccgtgacgtcaggcgtaggaaag

SEQ ID NO: 20198 - DNA, 230 bp, Zea mays
  Clone ID: LIB3151-059-Q1-K1-C2
gtcatacactattcgagagggatcatcacattgggcttattatggcttattgctacgagggcggatcggacctggtttgactaggctgaaccatggaagctacaatggcggagactactatcgtgactaggaacaagggcagctgatcgtaattgctaggactgactgaggcattacattggaagccacaaggtggcgagaccggaggcctcgagttccctcgcccggcg

SEQ ID NO: 20199 - DNA, 335 bp, Zea mays
  Clone ID: LIB3151-059-Q1-K1-C4
cgcaaattgcaccaagaaatcatcgagaggttgtcgttaggggaattaatggcgtcgtcggctagcagcagccaccgtcgcctgatcctcgcagccgccgtcctgctctccgtgctcgcggctgccagcgccagcgccgggacctcctgcgtgccggggtgggccatcccgcacaacccgctcccgagctgccgctggtacgtgaccagccggacctgcggcatcgggccgcgcctcccgtggccggagctgaagaggagatgctgccgggagctggcggacatcccggcgtactgccggtgcacggggctgagcattcttatggacggcgcgat

SEQ ID NO: 20200 - DNA, 107 bp, Zea mays
  Clone ID: LIB3151-059-Q1-K1-C5
gccattccctcttcaagagggatcatcagattgtgcttattattccttattaccccaagcaaggatcggtgttgctcttaattgactgaaccatcgctgctacaatt

SEQ ID NO: 20201 - DNA, 303 bp, Zea mays
  Clone ID: LIB3151-059-Q1-K1-C6
cactgatcagtgttgtttgcttgctttgccttgctaatggcgcccgctccatgtggccgttcgtcgcagagggtgttccacttcggcaagggcaagagcgagggcaacaagaacatgaaggagctgctgggcggcaagggcgcgaacctggcggagatggcgagcatcgggctgtcggtgccgccggggttcacggtgtcgacggaggcgtgccagcagtaccaggaggccgggcgcgccctcccgccggggctctgggcggaggtcctcgaccgcctgcggtgggtggaggagtacatgggc

SEQ ID NO: 20202 - DNA, 294 bp, Zea mays
  Clone ID: LIB3151-059-Q1-K1-C8
aatcatcattcacttagtagtatattgcactttatcaaatctgcaacatcaattatctaactgcaaaaaccatgaagctggtgcttgtggttcttgctttcattgctttagtatcaagagtttcttgtacacagacaggcggttgcagctgttgtcaacatcatatccatgatcagtaacatcattcataataacatcattcactaaaacaactccattaaccaccaccacaacattaccagcatttttaatcccatctacatcaatgtttacatgtaaccacaaaatcattta

SEQ ID NO: 20203 - DNA, 362 bp, Zea mays
  Clone ID: LIB3151-059-Q1-K1-C9
gggtcttcagacattagctttatctactctttatcgcagaagaacccgatcgacaccatgagggtgttgctcgttgccctcgctctcctggctctcgctgcgagcgccaccttcacgcatacaagcggcggctgcggctgccagccaccgccgccggttcatctaccgccgccggtgcatctgccaccttcggttcacctgccaccttcggagcatctcccaccgccggtccacctgccgtcgccggtccacctgccatcgtcggtccatgtgccgtcgccggttcatctgtcgccgtcaccatgccactaccctactcaaccgccccggcctcaagcttatccccagccacacccatgccc

SEQ ID NO: 20204 - DNA, 324 bp, Zea mays
  Clone ID: LIB3151-059-Q1-K1-D1
gtccccactagcaaccgaatacgccgccgttgcgattttggtttatcaggatctcctatctggcgacgagctcctgtcggattcattcacctacaaggagctcgagaacggcgtcctgtgggaggtcgagggaaagtgggtcacccaaggtcctgttgatgtggacattggtgccaatccatccgccgagggtggtgaggacgaaagcgttgatgacacagctgtgaaggtggttgatattgatgacacattccgtctacaggagcaaccttcttttgacaagaaatcatttgtgtcttacatcaaaaaatacatcacgaatct

SEQ ID NO: 20205 - DNA, 217 bp, Zea mays
  Clone ID: LIB3151-059-Q1-K1-D10
tcgggaaaacagggggaagacatcgtttgaaacttatacaaaacagaacttgcaaggcaaattttactcattttcattgtgaagtggggccacaacattttaggtcctttccgggctgaaccagagaggaagccaagtggatcacatgaagctagtaatgaacagaccatcgtcttaggcaagaacgcttttggtcgcaaagatcccgataaacaag

SEQ ID NO: 20206 - DNA, 388 bp, Zea mays
  Clone ID: LIB3151-059-Q1-K1-D2
ttgagaccaacaagcaacaagaaagtggaattcagtttcaacaatagagcaacaatggagaccaagatattttccctccttatgctccttgctctttctacatgtgttgctaacgcgacaattttccctcaatgctcacaagctcctatagcttccctttttcccccataccttccatcaattatagcttcagtatgtgaaaacccagctcttcaaccatataggcttcaacaagcaatcgcagcaagcaacatacctttatcgcccttgttgtgtcaacaatcgccagccctatctttggtgcagtcattggtacaaaccatcagggcacaacagctgcagcaactcgtgctacctgtgatcaacccagtagctctggcaaaccttt

SEQ ID NO: 20207 - DNA, 255 bp, Zea mays
  unsure at all n locations
  Clone ID: LIB3151-059-Q1-K1-D3
gggtgcctgattacatnccaggagggacctttctgtttgtcacatagcacccctgaggaagctccacgatgactccgacaaaataggcttgtgaaatgtacaacttcggggacttggaaaggggacgttccgcgttggaaatggtcgctgcattctaaaaggcttctgggaagaaaacccctttggtgttgcgtgggcgaagacccgcacacgcatagatcgtatacgctgtaactgtgcaagcagagaaagagc

SEQ ID NO: 20208 - DNA, 195 bp, Zea mays
  Clone ID: LIB3151-059-Q1-K1-D4
tggacgtcagcctagcaattactcatcgactttagattggagaactcgacaccatgaagggggtgatcgttgcccttgctctcctggcgctcgctgcgagcgccccctccaatacaagcggcgggtgtggctgccaaacaccaccggttcatctaccggctccgctctatatgccgccttcgttctatctgccgc

SEQ ID NO: 20209 - DNA, 265 bp, Zea mays
  Clone ID: LIB3151-059-Q1-K1-D7
attttgagcattagaaacacaccattcgtaattttactagcaacaacctaacaacaatggctaccaagatattatccctgcttgcgcttcttgcgctttttgcgagcgcaacaaatgcgttcattattccacaatgctcacttgctcctagttccattattccacagtttctcccaccagttactttaatggcctttcaacacccagctgtgcaagcctataggctacaacaagcgattgcggcgagcgttttacaacaacctat

SEQ ID NO: 20210 - DNA, 406 bp, Zea mays
  Clone ID: LIB3151-059-Q1-K1-D8
tcgcaactagcaacaagaaagacacaatttttttttttataatggcaagccaaaatatttcgcctcatgatgctccttggtctggctgcaagtcctcgctactgcaagccatttcacccaatgctcacaagctctctataactttccttcttaccccatacctctcaccatcgatgtcttcagtatgtgaaaatccaattcttctaccctacaggatccaacaggcaatcgcagcaggcatcttacctttatcacccttgttccttcaacaatcatcatccctattacaagagctacctttgcggcatttattggcacaaaacattagggcacaacaactacaacaactcgtgcttgctaaccttgctgcctactctcaacaacaagcagttacctttggggcatt

SEQ ID NO: 20211 - DNA, 335 bp, Zea mays
  Clone ID: LIB3151-059-Q1-K1-E10
cctcaatgctcacagctcctatagcttccctttttcccccataccttccatcaattatagcttcagtatgtgaaaacccagctcttcaaccatataggcttcaacaagcaatcgcagcaagcaacatacctttatcgcccttgttgtgtcaacaatcgccagccctatctttggtgcagtcattggtacaaaccatcagggcacaacagttgcagcaactcgtgctacctgtgatcaaccaagtagctctggcaaacctttctccctactctccgcaacaacaatttcttccattcaaccaactgtctaacactgaaccctgctgcttatttgca

SEQ ID NO: 20212 - DNA, 368 bp, Zea mays
  Clone ID: LIB3151-059-Q1-K1-E2
attgagaccaactagcacatagaaagcactttattgttccaacaatggcagccaaaatattgggccttcttatgctccttggtctttctgcaagtgctgctacggcgaccattttcccgcaatgctcgcaagctcctatagcttcccttcttcccccgtacctctcaccagcggtgtcttcggtatgtgaaaacccaattcttcaaccctacaggatccaacaggcaatcgcagctggcatcttacctttatcacccttgttcctccaacaatcatcagccctattacaacagttacctttggtgcatttattggcacataacatcagggcacaacaactacaacaacttgtgctagcaaaccttgct

SEQ ID NO: 20213 - DNA, 350 bp, Zea mays
  Clone ID: LIB3151-059-Q1-K1-E4
caactgtctacatgtgaaccgctgcttatttgcagcttcaactattaccattcagccagctggttgaatggaagaaatcggacgcgtgggcggacgcgtgggcggacgcgtgggcggacgcgtgggcggacgcgtgggttcagaaacacaccaagcgaagcacattagcaacaacctaacaacaatggctaccaagatattatccctccttgcgcttcttgcgctttttgcgagcgcaacaaatgcgttcattattccacaatgctcacttgcttcaagttccattattacacaggttcctgccaccagttactttaatggggcttcgaacactcaggtgtggcagccta

SEQ ID NO: 20214 - DNA, 271 bp, Zea mays
  Clone ID: LIB3151-059-Q1-K1-E5
ctcgccgtctgccttctgcgctccatttcggtctctgtcccttgcaagttcaatctcacctccaaccatgggtaaagagaagtcccacatcaacattgtggttattggccatgtcgactctggcaaggcgaccaccacaagacaccttatctacaagcttggaggcattgacaagcgtgtgatcgagaggttcgagaaagaggctgctgaaatgaacaagcggtccttcaagtacgcgtgggtgctcgacaagctcaaagcttagcgtgag

SEQ ID NO: 20215 - DNA, 407 bp, Zea mays
  unsure at all n locations
  Clone ID: LIB3151-059-Q1-K1-E6
cgacccacgcgnccggnncnagaccgcgagcggacaaccacaattcaaangccgggaacacaaagcaaaggaaaaaggagccagcaaagccaaggcggggagcagaggagagaggggaacaggcaaaacgacacacgcgaagaggcaacccacaggagaggaagagaaaaaaaaggaaccaaccaggggagcgggaaggaaaccagcggaagcaccacaaaaggggggaagagcagggccaaccgacgggaagccgaaggcaaaaaaagacagggggaccgaaggaagggaaccacaaaacagcggaacacgggaaaacaaaaacgcacgaaaggaacaaccaaagcggcaaaagacaaaaaaacgagccgcacgggggcaaacggaaaaagaaaaaaagcaagggg

SEQ ID NO: 20216 - DNA, 176 bp, Zea mays
  Clone ID: LIB3151-059-Q1-K1-E7
gaaagtggaatcagtagcaacaatagagcatttatggcgaccaagatattttccctccttatgctccttgctctttctgcatgtgttgctaacgcgacaatttttcctcaatgctcacaagctcctatagctttccttcttcccccataccttccatcaatgatagccttcagtat

SEQ ID NO: 20217 - DNA, 300 bp, Zea mays
  Clone ID: LIB3151-059-Q1-K1-E9
caaacctctgtcaaagttttacctccggtctttggtttcctccaatctccgtggtagttcagcgcgagcgggcggcggggtttgagctcgatggccacttccggcgaacaatcggctggcggcgggtctgcggcgagggcgtcgaagctgcggtacccgctgcggtcggcgagcaaggggaaggcggcggtcgttcccccggcggctgatgctcctcccaccatctctgctccgcgacgggcaaaaccatcttcagatgtcagcaagagcatgtgtttagacctttctgtgaaggataat

SEQ ID NO: 20218 - DNA, 390 bp, Zea mays
  Clone ID: LIB3151-059-Q1-K1-F1
caacaatggcgaccaagaattttccctccttatgctttttgctctttctgcatgtgttgctaacgcgacaattttccctcaatgctcacaagctcctatagcttcccttcttcccccataccttccatcaatgatagcttcagtatgtgaaaacccagctcttcaaccctataggctccaacaagcaatcgcagcaagcaacatacctttatcacccttgtttcaacaatcgccagccctatctttggtgcagtcattggtacaaaccatcagggcacagcagctgcagcaactcgtgctacctgtgatcaaccaagtagctctggcaaacctttcttcctactttcagcaacaacaatttcttccattcaaccaactgtctacattgaa

SEQ ID NO: 20219 - DNA, 395 bp, Zea mays
  unsure at all n locations
  Clone ID: LIB3151-059-Q1-K1-F10
ntattctgctaccatccacctgatttccttttgattacccgcaagttcatgaacaaaccagtgagaattcttgtgaagagagatgagctgacccttgagggtatcaagcagttctatgtgaatgtggacaaggaagactggaagctggacacactgtgtgacctgtatgagaccctggccattacccagagtgtcatctttgtcaacacccgccgcaaggtggactggctcactgacaagatgaggagcagggaccacaccgtttctgccactcatggtgacatggaccagaacacttgagacatcatcatgagggagttccgggctggctcctcccggtgctcataccactgacctgttgctcgtggattgatgtcaacaggtgtccttggcat

SEQ ID NO: 20220 - DNA, 166 bp, Zea mays
  Clone ID: LIB3151-059-Q1-K1-F11
gagaccaactagcacatagaaagttcaatattgtaccaacaatggcagccaaaatattttgcttccttatgctccttggtctttctgcaagtgttgctacctcaaccatcttcccacattgctcacaagctcctatagctttccttcttgtcccatacttatcacc

SEQ ID NO: 20221 - DNA, 322 bp, Zea mays
  Clone ID: LIB3151-059-Q1-K1-F12
caacaacggcgaccaagatattgttcctccttatgctccttgctctttctgcatgtgttgctaacgcgacaattttccctcaatgctcacaagctcctatagcttcccttcttcccccataccttccatcaatgatagcttcagtatgtgaaaacccagctctttaaccctatatgctccaacaagcaatcgcagcaagcaacatacctttattacccttgtttcaacaatcgccagccctatctttggtgcagtcattggtacaaaccatcatggcacagcagctgtagcaactcgggctacttgagatcaaccaagtagc

SEQ ID NO: 20222 - DNA, 384 bp, Zea mays
  unsure at all n locations
  Clone ID: LIB3151-059-Q1-K1-F2
caacaagcaacatagaaaggaatacagtttttcattagagcaacaatggcggccaagatattttccatccttatgctccttgctctttctgcatgtgttgctaacgcgaccatttttcctcaatactcacaagctcctatagctgcccttcttcccccataccttccatcaatgaccgcttcagtatgtgaaaacccagcccttcaaccctacaggctccaacaagcaatcgcaacaagcaacttacctttatcacccctgttctttaacaatcgccagccctatctttggtgcagtcattggtacaaaccatcanggcacaacagctgcagcaactcgtgctaccaagtgatcagcctagtagcttttggcaaaccttttttc

SEQ ID NO: 20223 - DNA, 365 bp, Zea mays
  Clone ID: LIB3151-059-Q1-K1-F3
cttaccatacaaaccattcggctcgacatcttcattttttcctaccagcactgagccaactggatgtggtgaaccctgtcgcgtacttgcaacagcaggtgcttgcatccaacccacttgctctggcaaacgtagctgcataccaacaacaacaacaattgcaacagcttctgccagcgctcagtcaactagccatggtgaaccctgtcgcctacctacaacagcaacaactgctttcatctagccctctccgtgtgggtaatgcacctacatacctgcaacaacaattgctgcaacagaatgtaccagctctgaactagctagctgtggcaaaccctgctggctacttggaacagctgttttca

SEQ ID NO: 20224 - DNA, 368 bp, Zea mays
  Clone ID: LIB3151-059-Q1-K1-F4
ggttgctacatggaaacatatcggcctggtttacgtaatgaggccgtagcatttgcggcgaagaacacaaagaggaaacggagaagttctccgaacgagtcgaaggatttgctgttggtaagtgaggaagctgcttcgggcagtggaggaagtgctggcacaagcctcgagaccaacggcgaggatgttgctactgacgatgagatttcaggtgctccgaggagtgctgttcttcaggcttgcactctcacgtcaggcttgctgcttgccggagggcttctgcttcgcgaggcatcgcacctagcatcaataaatggatggcccattgctgaccctacagatgtgtcattcagttttgaaacctggca

SEQ ID NO: 20225 - DNA, 265 bp, Zea mays
  Clone ID: LIB3151-059-Q1-K1-F5
ccgacctgctggaacagatcataaagaacgtgctctttctattacaacccaggacagaggaagcccagtgagaatttttgggaagagagatgatctcaccctagagggtataaagcagttatatgagacactggacgaggtgaacacatacctaaagccactgaactgcactacctatatggtcacgctcgcggagacgattccttaacccatgggagccggcactatgcgcacagtgactgagccacacttgccggtgaccctg

SEQ ID NO: 20226 - DNA, 225 bp, Zea mays
  Clone ID: LIB3151-059-Q1-K1-F8
cgcgccgctgcgtgagccaaggctcttatggttacctccacctcagttcccgtcctcgtgctgctcgccgtcgccggcggcctgctcctgctccccggctcgctggcgtggcagagcagcaactgtgcaccgggcgcgcccggcagtggctcgccgacgtggccttcacccggcttcggcttcggcggcggtcacagcatgccgcccaagctccaccatggcaag

SEQ ID NO: 20227 - DNA, 358 bp, Zea mays
  Clone ID: LIB3151-059-Q1-K1-F9
tcgaccagcaacaacacgtctgcaacattttatttcagcgctcagtcaactagccatggggaaccctgtcgcctacctacaacagcaacaattgctttcatctagcccgctcgctgtgggcaatgcacctacgtacctacaacaacagttgctgcaacagattgtaccagctctgactcagctagctgtggcaaaccctactgcctacttgcaactagtgctttcattcaaccaactggctgtgtcgaactctgctgtgtacctacaacagcgacaacagttacttaatccactaagcagggctaacccattgggcgttaacttcctgcatgagcaacaattgctgccatacaaccat

SEQ ID NO: 20228 - DNA, 72 bp, Zea mays
  Clone ID: LIB3151-059-Q1-K1-G1
atctcctccgggcgcccagtcagcgcccgctttttatcgctcgaccgaaatctatgccccctccttcaccac

SEQ ID NO: 20229 - DNA, 205 bp, Zea mays
  Clone ID: LIB3151-059-Q1-K1-G10
aagcaacatagaaagggaatacagttgcttttttagagcaacaatggcggccaagagattggccatccttatgcgcggggctgttacggcaggggtggctaacccacccatttttcttaatacccacaagcttctattgctggccttttttctccatacacttcccattaattgcccggtttagttatggaaaaaacctatcctt

SEQ ID NO: 20230 - DNA, 383 bp, Zea mays
  unsure at all n locations
  Clone ID: LIB3151-059-Q1-K1-G11
gcaacatanaaagtgaatacagtttcaacttttgagcaacaatggcggccaagatattttccatccttatgctccttgctctttctgcatgtgttgctaacgcgaccatttttcctcaatactcacaagctcctatagctgcccttcttcccccataccttccatcaatgaccgcttcagtatgtgaaaacccagcccttcaaccctacaggctccaacaagcaatcgcaacaagcaacttacctttatcacccctgttctttcaacaatcgccagccctatctttggtgcagtcattggtacaaaccatcagggcacaacagctgcagcaactcgtgctaccagtgatcagccaagtagctctggcaaacctttcttcctac

SEQ ID NO: 20231 - DNA, 236 bp, Zea mays
  unsure at all n locations
  Clone ID: LIB3151-059-Q1-K1-G2
agttctagatcgcgagcggcgcccttttttttttttttttctaccnaaatacccctatcacgggtctgtcttaatcttaatgggctcatccctcctctatcctttattaccattaatctttttttttctcagactctttttttttcttttttattttctctttttttttttaaaaaaacaaaaaaagacctttttttttttgggggccccccaaaaaattataaaaaaaatttttt

SEQ ID NO: 20232 - DNA, 240 bp, Zea mays
  unsure at all n locations
  Clone ID: LIB3151-059-Q1-K1-G3
ccggaannncgggcgacccacgcgngcgcaacaaagaaagcacaacaggcaccaacaatggcagccaaaanacancgccgacaaaagcacggagggcggaccgcaagagcggcgacggcgaccaaaaacccgcaacgcgcgcaagccccaagagcgacccgacaacccccggaccgcgcaccagcggagggcacggcaagagaaaacccaacacaacaacccgacaggaaccaacaggca

SEQ ID NO: 20233 - DNA, 367 bp, Zea mays
  Clone ID: LIB3151-059-Q1-K1-G4
atccacaaaaacaacaacatcaccaccactttatcattaccagcagcagcaacaccaacaacaacaagttcacatgcaaccacaaaaacatcagcaacaacaagaagttcatgttcaacaacaacaacaacaaccgcagcaccaacaacaacaacaacaacagcaccaacaacaacatcaatgtgaaggccaacaacaacatcaccaacaatcacaaggccatgtgcaacaacacgaacagagccatgagcaacaccaaggacagagccatgagcaacaacatcaacaacaattccagggtcatgacaagcagcaacaaccacaacagccttagcaatattagcagggccagggaaaattacaacag

SEQ ID NO: 20234 - DNA, 310 bp, Zea mays
  Clone ID: LIB3151-059-Q1-K1-G6
cagaccattagctttatctactcagagcgcttaagaatttgatcgacaccatgagggtgttgctcgttgccctcgctctcctggctctcgctgggagcgccacctccacgcatacaagcgggggctgcggctgccagccaccgccgccggttcatctaccgccgccggtgcatctgccaccttcgggtcacctgccaccttcggtgcatcttccaccggcggtccacctggcggcgccggttcacctgccaccgccggtccatgtgccggcggcggttcatctgccgccggcaccatgccactaccctac

SEQ ID NO: 20235 - DNA, 359 bp, Zea mays
  Clone ID: LIB3151-059-Q1-K1-G8
ggagaatttcattagggggagttttgttttttcaaaggaaaagcatttgaaacagggggagaaaatttcaaatcttgaaaatgctttgcaaaattcttattcactacctttgactatttgcaaaagaactttaacaaggatttacaaaagaatttgcaaaaacaaaacatgtggtgcaaagggggtccaaaattttataagaaagaaacaatccatgcatatcttgtaagtatttatattggctcaaattctaagcaacctttacacttacattatgcaaactagttcaaattatgcacttatatattttgctttggtttgagtcggcatcaatcaccaaaaatggggaaaatggaaag

SEQ ID NO: 20236 - DNA, 194 bp, Zea mays
  Clone ID: LIB3151-059-Q1-K1-G9
gcgacccacgcgttcgctcgccgacgtctctgcggtacctgtcgtcttttcctccaatacggcctttttcccttgcgagggtaagctcaatcgtcaaccatgggtaacgagaaatcccacatcaacattgcgtgaattggccacgtcgactctggcaagtcgaccaccaccggccacctgatctacaagcttgg

SEQ ID NO: 20237 - DNA, 318 bp, Zea mays
  Clone ID: LIB3151-059-Q1-K1-H1
cagaccattagcgatatatctacaaaggggttgataattcgattgacactacgagggtgttgtgcgagggccaccttctcctggatatgggtgggatggcgatgtcaacccatacaagcggttgatgtagctgccacccaccatctgccatttatgtatcacctgcgacgtatgtggcatcttccaccgacctgccacctgccgtggattgtccacctgccatcgacctgccatgagccgtccacctgtcatctgccggccatgtgatgccactagtttaattaaccggcccagcatgagactaaactacaaaaacac

SEQ ID NO: 20238 - DNA, 352 bp, Zea mays
  Clone ID: LIB3151-059-Q1-K1-H11
gcaacatagaaagcaaatagtgtttcaacattggcagccaaaatattttgcctccttatgctccttggtctttctgcaagtgctgctacggcgaccattttcccgaaatgctcgcaagctcctatagcttcccttcttcccccgtacctctcaccagcggtgtcttcggtatgtgaaaacccaattcttcaaccctacaggatccaacaggcaatcacagctggcatcttacctttatcacccttgttcctccaacaatcatcagccctattacatcagttacctttggtgcatttattggcacaaaacatcaaggcacaacaactacaacaacttgtgctagcaaaccttg

SEQ ID NO: 20239 - DNA, 286 bp, Zea mays
  Clone ID: LIB3151-059-Q1-K1-H12
tcggacggccagccctacgagttcatattccgtttctggttgtccgtccatggccgcgtcgctgcttcgccgtggcgtcgtcaccagccgccggcgatgcccggtggagatgctgcggcggctggtctcgtccgaggcggcggctgaccgggcaccgtcgcggccgccgccggagatgccgtcgttcgaccaccggccccgcccgtatgccgggctgggtggcgccgagatcttcaaaaagaggaaggcggtgctcggcccgtctctcttccattttaccagaagc

SEQ ID NO: 20240 - DNA, 296 bp, Zea mays
  Clone ID: LIB3151-059-Q1-K1-H2
ctaccaacatacaaagcgcattaagtaccttcatgctcagacggaatattctgcatggcttatgcgacctggtctttctgccaggaggctaccgcaaccattgttctcacaatgctcatcagctacgatagcttgcctacttgccccatacctctcaccatcggtgtcgtccatgagtgaaaacccagtcgcgtaaccctacaggatccaacaggtctagcgcaacacgcgtcttaccattgtgacccttagtgctacaacaacccatactcctatgacaccagatacctttggtc

SEQ ID NO: 20241 - DNA, 191 bp, Zea mays
  Clone ID: LIB3151-059-Q1-K1-H5
caatccagatcagcaaagcggcgtgcgtagtgaggatcgtcgaacagaacagcatgaagatggtcatcgttctcgtcgtgtgcctggctctgtcagctgccagcgcctctgcaatgcagatgccctgcccctgcgcggggctgcagggcttgtacggcgcttgcgccggcctgactacgattattggctcc

SEQ ID NO: 20242 - DNA, 364 bp, Zea mays
  Clone ID: LIB3151-059-Q1-K1-H6
attgagaccaacaagcaacataaaagtggaatccagtttcaacaatagagcaacaatggagaccaagatattttccctccttatgctccttgctctttctacatgtgttgctaacgcgacaattttccctcaatgctcacaagctcctatagcttccctttttcccccataccttccatcaattatagcttcagtatgtgaaaacccagctcttcaaccatataggcttcaacaagcaatcgcagcaagcaacatacctttatcgcccttgttgtgtcaacaatcgccagccctatctttggtgcagtcattggtacaaaccatcagggcacaacagctgcagcaactcgtgctacctgtgatc

SEQ ID NO: 20243 - DNA, 247 bp, Zea mays
  Clone ID: LIB3151-059-Q1-K1-H7
cttggctcccgcccctccgcaggttctatcttatcaccgccttgaggaccccccaagtcgccggctgtatccatggtgaaatattcgaccgacccaaccaaccccaccaagtcaaccaaggtcacgggccgtgacctacgtgttcacttcaagaacacccgcgagacagcttttgcccttaggaagttgtcactcaccaaggccaaaaggtaccttgaggatgtgattgcccacatgcaggtcattc

SEQ ID NO: 20244 - DNA, 107 bp, Zea mays
  Clone ID: LIB3151-061-Q1-K1-A1
tggtgccctctaaacaacttggcgtgaccaaagccataggcgcctactaagctacatgctcttgcggtaaccgttgctaacacgacaattatccctcaatgctcaca

SEQ ID NO: 20245 - DNA, 415 bp, Zea mays
  unsure at all n locations
  Clone ID: LIB3151-061-Q1-K1-A10
cnnnaattagctttatctactccagagcgcagaagaacccgatcgacaccatgaggggggggctcgttgccctcgctctcctggctctcgctgcgagcgccacctccacgcatacaagcgggggctgcggctgccagccaccgccgccggttcatctaccgccgccggtgcatctgccacctccggttcacctgccacctccggtgcatctcccaccgccgggccacctgccggcgccgggccacctgccaccgccgggccatgtgccgccgccgggtcatttggcggcgtcaccatgccactaccctactcaaccgccccgggctcaggctcatcccccggcacacccatggcccgggcaacagccgcatccaagcccgtgccagctgaggggacctgggtgttggaggacccc

SEQ ID NO: 20246 - DNA, 416 bp, Zea mays
  unsure at all n locations
  Clone ID: LIB3151-061-Q1-K1-A12
nnccgcagaagaacccgatcgacaccattagggtgttgctcgttgccctcgctctcctggctctcgctgcgagcgccacctccacgcatacaagcggcggctgcggctgccagccaccgccgccggttcatctaccgccgccggtgcatctgccacctccggttcacctgccacctccggtgcatctcccaccgccggtccacctgccgccgccggtccacctgccaccgccggtccatgtgccgccgccggttcatctgccgccgccaccatgccactaccctactcaaccgccccggcctcagcctcatccccagccacacccatgcccgtgccaacagccgcatccaagcccgtgccagctgcagggaacctgcggcgttggcagcaccccgaacctgggccagtgcgtcgag

SEQ ID NO: 20247 - DNA, 312 bp, Zea mays
  Clone ID: LIB3151-061-Q1-K1-A2
agtgaagacactatctcatcttagcaccaatgggagccaagatttttgccctccttgccctccttgctctttcagcaagcgctgctacctcgacttttattccacaatgctcacaacaatacctctctccggcgacagccgtgggatttcaatacccaactatacaatcctacatggtacaagaggccatccaagcaagcatcttacggtcattagcattaaccctccaacaaccatatgctctattgcaacagccatccttagtgcatctgtatctcaaagaaatgtggtacaacaactacaacaacagtt

SEQ ID NO: 20248 - DNA, 128 bp, Zea mays
  Clone ID: LIB3151-061-Q1-K1-A3
aagcgaagcgcactagcaacaacctaacaacaagggcgaccaagatattagccctccttgcgctggttgccctttaagtgagcgcaacaaatgcgttcattatgccacagtgctcacttgctccaagg

SEQ ID NO: 20249 - DNA, 301 bp, Zea mays
  Clone ID: LIB3151-061-Q1-K1-A4
ccccgccactgcgcagcgcgagtgcggcgacagccagggggacactcccacgcccgggaccggtctcggccctcggccccgtccgcgtcgccgcagggcgaggaggcaatggcggcgggcgggaatggcgccggcggggacaccagggcggccgtcgcgcggatctacaagacgctcaaggaggagctgctcaccgacccggccttcgagttcaccgaggagtcacgccagaggatcgaccgcatggttgactacaatgtactcggaggcaagggtaaccgtgggctctctgggggcgaca

SEQ ID NO: 20250 - DNA, 322 bp, Zea mays
  unsure at all n locations
  Clone ID: LIB3151-061-Q1-K1-A5
ggtaatccggggccaaccacccagccgagccgnaagcaaaccggcagtgcgtatttagtttcgtctaacagaacaccatgaatagggggggcgttctcgtcgtgtgcctggctctgtcagctgccagcgcctctgcaatgcagatgccctgcccttgcgcggggctgcagggcttgtacggcgctggcgccggcctgacgactatgatgggcgccggcaggctgtacccctacgcgtagtacctgaggcagcctcattgcaccccgctggctgcagttccctactactccttttgcgtgccgcaactaactctcattgtacc

SEQ ID NO: 20251 - DNA, 375 bp, Zea mays
  unsure at all n locations
  Clone ID: LIB3151-061-Q1-K1-A6
gtcnnnnnagctactatactatactctaggaagtaaggacaccaccgccatggcagccaagatgcttgcattgttcgctctcctagctctttgtgcaagcgccactagtgcgacccatattccagggcacttgccaccagtcatgccagtgggtaccatgaacccatgcatgcagtactgcatgatgcaacaggggcttgccagcttgatggcgtggccggccctgatgctgcagcaactgttggccttaccgcttcagacgatgccagtgaagacgcgccagatgatgacgcccaacatgaggtcaccattgatgatgccgagcatgaaggcaccaaaggtcttgccgagcatgaggtcgcaaatgatgatgcc

SEQ ID NO: 20252 - DNA, 227 bp, Zea mays
  Clone ID: LIB3151-061-Q1-K1-A7
gcaacatagaatgtgtaattcagtagcaacaatagagcaacaatggcgaccaagatattttccctccttatgctccttgctctttctgcatgtgttgctaacgcgacaattttccctcaatgctcacaagctcctatagcttgcctttttcttccatacctttcattaatgatagctttagtatgtgaaaactcacctctttaaccctatttgctccaacaagcttt

SEQ ID NO: 20253 - DNA, 343 bp, Zea mays
  Clone ID: LIB3151-061-Q1-K1-B1
tggcatcctgtttgacaatatcttgattgctgacgatgagaaggttgccacctccattctggagaagacctggaagctcaagtatgatgttgagaaggaaaaggagaaggctgaggaggaggctgctgctggtgcagatggtctttctgagttccagaagaagatttttgacgtcctgtacaagattgctgatgttccgttcttggcaccctacaagaccaagatcattgatgttatcgagaagggagagaagcagcccaacatcactattggcattctggtctccgttgtcgtcgtgttcgttacccgtctcttcaagatcctgtttgggaggcaagaagcc

SEQ ID NO: 20254 - DNA, 413 bp, Zea mays
  unsure at all n locations
  Clone ID: LIB3151-061-Q1-K1-B10
nnnncctcaacatacaaagtggaattctttttctacaatcgagcaacaatggcgaccaagagatattccctccttatgctccttgctctctctgcatgtgatgctaacgcgacaatttttccttaatgctcacaagctcctatagcttccctttttcccccataccttccatcaatgatagcttcagtatgtgaaaacccaactctttaaccctataggctccaacaagcaatcggagcaagcaacatacctttatcacccttgtttcaacaatcgccagccctatctttggtgcagacattggaacataccatcacggcacagccagctgagcaactcgggctagctgcgaccaaccaagtagctttggcgaacctttttgcctactctcaggacaacaatatcttacattc

SEQ ID NO: 20255 - DNA, 386 bp, Zea mays
  unsure at all n locations
  Clone ID: LIB3151-061-Q1-K1-B12
nncctaccattagctttatctactcttatatcgcagaagaacccgatcgacaccatgagggtgttgctcgttgccctcgctctcctggctctcgctgcgagcgccacctccacgcatacaagcggcggctgcggctgccagccaccgccgccggttcatctaccgccgccggtgcatctgccacctccggttcacctgccacctccggtgcatctcccaccgccggtccacctgccgccgccggtccacctgccaccgccggtccatgtgccgccgccggttcatctgccgccgccaccatgccactaccctactcaaccgccccggcctcagcctcatccccagccacacccatgcccgtgccaacagccgcatccaagcccgtg

SEQ ID NO: 20256 - DNA, 430 bp, Zea mays
  unsure at all n locations
  Clone ID: LIB3151-061-Q1-K1-B4
atncnnnaccaccaagcgaagcacatttttattaacctaacaacaatggctaccaagatattatccctccttgcgcttcttgcgctttttgcgagcgcaacaaatgcgttcattattccacaatgctcacttgctccaagttccattattacacagttcctcccaccagttacttcaatgggcttcgaacacccagctgtgcaagcctataggctacaacaagcaattgcggcgagcgtcttacaacaaccaatttcccagttgcaacaacaatccttggcacatctaacaatacaaaccatcgcaacgcaacagcaacaacaattcctaccagcactgagccacctagccatggtgaaccctgccgcctacttgcaacagcagttgcttgcatcaaacccacttgctctggcaaacgtagttgcaaacc

SEQ ID NO: 20257 - DNA, 173 bp, Zea mays
  Clone ID: LIB3151-061-Q1-K1-B5
tccatcctgaaatcaaggtttttttttacagcgacgtcgggaactccgagcgcaagttttggccgaaggacaggatgaagccgatcatcttttcgataggcgcgtcttgaccgcgggtagaacatgacaggcctggtggagatgtacggcatgaacgcgcgcctgagggagct

SEQ ID NO: 20258 - DNA, 414 bp, Zea mays
  Clone ID: LIB3151-061-Q1-K1-B6
ctatcagtaccatcaattattattcatcttagtagtataggcaccaaatcaaatctgcaacatcaattatctaactccaaaaaccatgaagctggtgcttgtggttcttgctttcattgctttagtatcaagtgtttcttgtacacagacaggcggctgcagctgtggtcaacaacaaagccatgagcagcaacatcatccacaacaacatcatccacaaaaacaacaacatcaaccaccaccacaacatcaccagcagcagcaacaccaacaacaacaagttcacatgcaaccacaaaaacatcagcaacaacaagaagttcatgttcaacaacaacaacaacaaccgcagcaccaacaacaacaacaacaacagcaccaacaacaacatcaatgtgaaagccaacaacaaca

SEQ ID NO: 20259 - DNA, 326 bp, Zea mays
  Clone ID: LIB3151-061-Q1-K1-B7
caagcgaagctacctagcttcgacttaacaacaatggctaccaagatattagccctccttgcgcttcttgccctttttgtgagcgcaacaaatgcgttcattattccacaatgctcacttgctcctagtgccattataccacagttcctccgaccagttacttcaatgggcttcgaacacctagctgtgcaagcctacaggctacaacaagcgcttgcggcgagcgtcttacaacaaccaattaaccaattgcaacaacaatccttggcacatctaaccatacaaaccatcgcaacacaacagcaacaacagtttctaccagcact

SEQ ID NO: 20260 - DNA, 389 bp, Zea mays
  Clone ID: LIB3151-061-Q1-K1-B8
gctagatcgcgagcggccttcctttttttttttttttttttttttagaatctggaaatgtaactttttatttctggttggccacatacatcatccaaaaaactttattattgaattacatctaataagcaatctaaaagagggcaccaccaatgatgtgttgttggtaggaggctgctgggtttgttaaagcaagttggacaaagggcaacaattgttgtagttgtaagagggttgcggggttagccgcaaactgctggttgaacggcagcaactgttgttgtgtcaataaagaagcacggcttgctgtaactagcttgctaaatggtaaaagtttttgctgctgcatattaacaacggggtttaattgcggcctatttgtttaattga

SEQ ID NO: 20261 - DNA, 422 bp, Zea mays
  Clone ID: LIB3151-061-Q1-K1-B9
tcttcagaccgtttgctttatctactccagagcgcagaagaacccgatcgacaccatgagggtgttgctcgttgccctcgctctcctggctctcgctgcgagcgccacctccacgcatacaagcggcggctgcggctgccagccaccgccgccggttcatctaccgccgccggtgcatctgccacctccggttcacctgccacctccggtgcatctcccaccgccggtccacctgccgccgccggtccacctgccaccgccggtccatgtgccgccgccggttcatctgccgccgccaccatgccactaccctactcaaccgccccggcctcagccttattcccagccacacccatgcccgtgccaacagccgcattcaagcccgtgccagctgcagggaacctgcggcgtttgcagcaccc

SEQ ID NO: 20262 - DNA, 427 bp, Zea mays
  Clone ID: LIB3151-061-Q1-K1-C10
ataacagcattcataaacacaccaagtgtttcgcactagcaacaacctaacaacaatgggtaccaagatattagccctccttgcgcttcttgcccttttagtgagcgcaacaaatgcgttcattattccacagtgctcacttgctcctagtgccattattccacagttcctcccaccagttacttcaatgggcttcgaacatccagccgtgcaagcctacaggctacaactagcgcttgcggcgagcgtcttacaacaaccaattgcccaattgcaacaacaatccttggcacatctaaacctacaaaccatcgcaacgcaacagcaacaacagtttttgccatcactgagccacctagccgtggtgaaccctgtcgcctacttgcaacagcagctacttgcatccaacccacttgctctggcgaac

SEQ ID NO: 20263 - DNA, 396 bp, Zea mays
  unsure at all n locations
  Clone ID: LIB3151-061-Q1-K1-C11
nntccgcccttctggccgacgaaaccttatgcgcgcgcgctgccaagccctcgccggcgggcctactccgactccgacgccgcagtcgtgatgtacgccgacaggacctcgggcaggaaacgctctgtaatggaccgcctcggctcgggcggcggctcgcgctcgcggtccgacgactcaaaaaggttttgccaggatgatgggacatggagacgtgagctttataaggattctagaggaactcagacttcatctgaacctactttcagaaatctggaatcgaacaaaaaatcccaagtgcagcaaaaggttgtgaagaaattaccagtttcagatcttcgtggaaagttatctggtgtcgtgagccagcgccctcaacttatcattactggtcat

SEQ ID NO: 20264 - DNA, 276 bp, Zea mays
  unsure at all n locations
  Clone ID: LIB3151-061-Q1-K1-C12
nnncccagcgcgctccgcagacgcccacttagcttccgctattcaccaaaaggtccccttctgccctccgccctatctatccatggaaaggcggcacggcttcttcgcggcgctgcgggaggaggtggcgcgcgggctgtcgccggcgcgggcgcgccgcaagccggacgccacggacctggccgccgcgctcagcttcaccggagtggcaggcgccggcgagatgctggcgccgctcatggaggggcccgatccggagcccagcgacaactggga

SEQ ID NO: 20265 - DNA, 377 bp, Zea mays
  Clone ID: LIB3151-061-Q1-K1-C2
gagggtgtggctcgttgttttcgctctcctggctctcgctgcgagcgccacctccacgcatacaagcggcggctgcggctgccagccaccgccgccggttcatctaccgccgccggtgcatctgccacctccggttcacctgccacctccggtgcatctcccaccgccggtccacctgccgccgccggtccacctgccaccgccggtccatgtgccgccgccggttcatctgccgccgacaccatgccactaccctactcaaccgccccgggctaagcctcatactcagccacacccatgcccgtgccaacagccgaatccaaaccccgtgccagctgcagggaacctgcggcgtttgcagcacccccaaccctggc

SEQ ID NO: 20266 - DNA, 275 bp, Zea mays
  Clone ID: LIB3151-061-Q1-K1-C3
tgccagctgcaggtaacttgcggcgttggcagcaccccgatcctgggccagtgcgtcgagtttctgaggcatcagtgcagcccgacggcgacgccctactgctcgcctcagtgccagtcgttgcggcagcagtgttgccagcagctcatgcaggtggagccgcagcaccggtaccaggcgatcttcggcttggtcctccagtccatcctgcagcagcagccgcaaagcggccaggtcgcggggctgttggcggcgcatatagcgcaacaacttga

SEQ ID NO: 20267 - DNA, 404 bp, Zea mays
  unsure at all n locations
  Clone ID: LIB3151-061-Q1-K1-C4
canannccccaagcgaagcgcactagcttcattctaacaacaatggctaccaagatattatccctccttgcgcttcttgcgctttttgcgagcgcaacaaatgcgtccattattccacaatgctcacttgctcctagttccattattccacagttcctcccaccagttacttcaatggccttcgaacacccagctgtgcaagcctataggctacaacaagcgattgcggcgagcgtcttacaacaaccaattgcccaattgcaacaacaatgcttggcacatctaacaatacaaaccatcgcaacgcaacagcaacaacagttcctaccagcactgagccacctagccatggtgaaccctgtcgcctacttgcaacagcaagtgcttgcattcaacccacttgc

SEQ ID NO: 20268 - DNA, 411 bp, Zea mays
  Clone ID: LIB3151-061-Q1-K1-C6
agtggaatccagttgttacaatagagcaacaatggcgaccaagatatgttccctccttatgctccttgctctttctgcatgtgttgctaacgcgacaattttccctcaatgctcacaagctcctatagcttcccttctttccccataccttccatcaatgatagcttcagtatgtgaaaacccagctcttcaaccctataggctccaacaagcaatcgcagcaagcaacatacctttatcacccttgtttcaacaatcgccagccctatctttggtgcagtcattggtacaaaccatcatggcacagcagctgctgcaactcgtgctacctgtgatcaaccaattttctctggcatacctttcttccacttttagcaacaacaatttctttcattcaaccaactgtttaca

SEQ ID NO: 20269 - DNA, 341 bp, Zea mays
  Clone ID: LIB3151-061-Q1-K1-C7
cttatctactcgagcgttaagaacccgatcgacaccatgagggtgttgctcgttgccctcgctctcctggctctcgctgcgagcgccacctccacgcatacaagcggcggctgcggctgccagccaccgccgccggttcatctaccgccgccggtgcatctgccacctccggttcacctgccacctccggtgcatctcccaccgccggtccacctgccgccgccggtccacctgccaccgccggtccatgtgccgccgccggttcatctgccgccgccaccatgccactaccctactcaaccgccccggcctcagcctcatccccagccacacccatgccc

SEQ ID NO: 20270 - DNA, 427 bp, Zea mays
  Clone ID: LIB3151-061-Q1-K1-C8
tttctccctactctccgtaacattcaatttcttccattcaaccaactgtctacactgaaccctgctgcttatttgcagcaacaactattaccatttagccagctagctactgcctactctcaacaacaacaacttcttccatttaaccaattggccgcactgaaccccgctgcttatttgcagcagcaaatactactaccatttagccagctagctacagcaagccgtgcttccttcttgacacaacaacagttgctgccgttctaccagcagtttgcggctaaccccgcaaccctcttacaactacaacaattgttgccctttgtccaacttgctttgacaaacccagcagcctcctaccaacaacacattattggtggtgcccttctttagattgcttattagatgtaattcaataataaaggtt

SEQ ID NO: 20271 - DNA, 283 bp, Zea mays
  Clone ID: LIB3151-061-Q1-K1-C9
gttacttagggttttgtggaggggcgatggcggcggctgatgtggagtaccgttgcttcgtcggcgggcttgcctgggccaccagcaacgagtcgctggagaatgccttcgcctcctacggcgagatcctcgactccaaggtcatcaccgaccgggagacggggaggtctcgcggcttcggcttcgttaccttctcctccgagaactccatgctcgacgctatcgagaacatgaacggcaaggagctcgacggccgtaacatcaccgttaaccaggcccagtc

SEQ ID NO: 20272 - DNA, 336 bp, Zea mays
  Clone ID: LIB3151-061-Q1-K1-D1
ggccggaggacgagcccttctccgacggagacgccacggagtcggacaccgacgagtctcctccgcaggggattagtgctcgccgccccggcgccaccaccaacccgatcctgactcgcctcgcggtgtcgcggaacccgagcccgctggccgcggccaccgcggcccccggggtgtgcctcctccgcttcgcctgggagtccgccgcgggatccctcgtcggcgccgttgtcggatacggtaaaggtctggtcatgaagaagggttttaaaggatcatttcctgatgctgcttcgtctgctaaaatatttgctggccttgctggcgtacaaagtt

SEQ ID NO: 20273 - DNA, 210 bp, Zea mays
  unsure at all n locations
  Clone ID: LIB3151-061-Q1-K1-D10
ngccttgagctttatctactccagagtgcataagaacccgatcgacaccatgaggggggtgctcgttgccctcgctctcctggctctcgctgcgagcgccaccttcacgcatacaagcggcggttgcggctgccagccaccgtcgccggttcatctaccgccgtcggtgcatctgccaccttcggttcacctgccaccaccggtgcattt

SEQ ID NO: 20274 - DNA, 80 bp, Zea mays
  unsure at all n locations
  Clone ID: LIB3151-061-Q1-K1-D11
cgaaacccgggcgacccacgcgnnnggttctagcatatcactccattttttttaagaacccgaccgacaccatgaggggg

SEQ ID NO: 20275 - DNA, 418 bp, Zea mays
  unsure at all n locations
  Clone ID: LIB3151-061-Q1-K1-D12
nanctcgcaccccaatctaatcgacaccttttcgagatgggccgcaagttcttcgtcggtggcaactggaaatgcaatggaaccacagatcaggtcgagaagattgtcaaaaccctgaatgaaggacaggttcccccttcagatgttgtggaggtcgttgtcagccctccttatgtcttccttcctgtggtcaagagccagctgcgccaagagttccatgttgcggctcagaactgctgggttaagaagggaggtgctttcaccggtgaagtcagtgctgagatgctcgtcaaccttggtgttccctgggtcattcttggacactctgaaaggagagctctgctgggagaatcaaatgaatttgttggagacaaggttgcgtatgccctgtctcagggactaaaggtcattgcatgtg

SEQ ID NO: 20276 - DNA, 269 bp, Zea mays
  unsure at all n locations
  Clone ID: LIB3151-061-Q1-K1-D4
actantnttgatcgcgagcgccgccctttttttttttttttttttttaaattttttttgtgctttaaaaccaaaactttattatgatgcatatattattgggcataccacacatgataatgtgtgtcgtcttactgcattattacatatatagaaagagaggggtggactctaccagttccagtaccagttgtccagctaccgcaccaacccctgtggcgttatcgctgccattccgccctactactgatttatgatatttgggaaaat

SEQ ID NO: 20277 - DNA, 408 bp, Zea mays
  unsure at all n locations
  Clone ID: LIB3151-061-Q1-K1-D5
ncccacncctcgcccacgcgtccgctggcttttcttcgttaacgtgatcgcgacgcgcgtccgagaagcatccgccttccgtccgcagaccgcaaccatggtgacaccagcctccaccgcccctgcgtccaccgcttccgccgcagcggcgaccggctccggccgcgaagtagtccgcctcctccgctatcccgcccgctgcctccttcctttggctgcggcgcccaggacaggcacgcggctgaccaccgtgctccgcgcaagaacccagccggcggagcccgagctggtggagcagtcggtgaacactatccggttcctggccgtcgacgccgtggagaaggcgcattctggccatccaggcctccccatgggctgcgcgccgctgggacacgttctgttcgacga

SEQ ID NO: 20278 - DNA, 433 bp, Zea mays
  unsure at all n locations
  Clone ID: LIB3151-061-Q1-K1-D6
gggnctnccaccattagctttatctactctagatcgcagaagaacccgatcgacaccatgagggtgttgctcgttgccctcgctctcctggctctcgctgcgagcgccacctccacgcatacaagcggcggctgcggctgccagccaccgccgccggttcatctaccgccgccggtgcatctgccacctccggttcacctgccacctccggtgcatctcccaccgccggtccacctgccgccgccggtccacctgccaccgccggtccatgtgccgccgccggttcatctgccgccgccaccatgccactaccctactcaaccgccccggcctcagcctcatccccagccacacccatgcccgtgccaacagccgcattcaagcccgtgccagctgcagggaacctgcggcgttggcagcaccccgatcctgg

SEQ ID NO: 20279 - DNA, 357 bp, Zea mays
  Clone ID: LIB3151-061-Q1-K1-D7
ccctcgctctcctggctctcgctgcgagcgccacctccacgcatacaagcggcggctgcggctgccagccaccgccgccggttcatctaccgccgccggtgcatctgccacctccggttcacctgccacctccggtgcatctcccaccgccggtccacctgccgccgccggtccacctgccaccgccggtccatgtgccgccgccggttcatctgccgccgccaccatgccactaccctactcaaccgccccggcctcagcctcatccccagccacacccatgcccgtgccaacagccgcatccaagcccgtgccagctgcagggaacctgcggcgttggcagcaccccgatcctgg

SEQ ID NO: 20280 - DNA, 420 bp, Zea mays
  Clone ID: LIB3151-061-Q1-K1-D8
acaccaagcgaagcgtactttcaacaacctaacaacaatggctaccaagatattagccctccttgcgcttcttgcccttttagtgagcgcaacaaatgcgttcattattccacagtgctcacttgctcctagtgccattattccacagttcctcccaccagttacttcaatgggcttcgaacatccagccgtgcaagcctacaggctacaactagcgcttgcggcgagcgtcttacaacaaccaattgcccaattgcaacaacaatccttggcacatctaaacctacaaaccatcgcaacgcaacagcaacaacagtttctgccatcactgagccacctagccgtggtgaaccctgtcgcctacttgcaacagcagctacttgcatccaacccacttgctctggcgaacgtagctgcata

SEQ ID NO: 20281 - DNA, 356 bp, Zea mays
  Clone ID: LIB3151-061-Q1-K1-D9
aagcacaatagtgtttcatttctggcagccaaaatattctgcttgcttatgctccttggtatttctgcaagtgctgctaccgtaaccattttcccacaatgcttacaagcttctatagattcctttcttgcggcatacctctcaccagcggagtctttagtgtgcgaaaactcaatatcttcaaccgctacaggatgcaacaggccaatcgcagcatgcatgttacctttatcacccttgttcctcgcaacaaccgtcagccctatgtacaggagttacctttgcggcatttgttggcacacatcatcagggcacaacaactacaacaacttgtgctcggagaccttgctggctac

SEQ ID NO: 20282 - DNA, 381 bp, Zea mays
  Clone ID: LIB3151-061-Q1-K1-E10
gcatcggaaacacaccaagcgaagctcattttcaacaacctaacaacaatggctaccaagatattatccctccttgcgcttcttgcgctttttgcgagcgcaacaaatgcgttcattattccacaatgctcacttgctccaagttccattattacacagttcctcccaccagttacttcaatgggcttcgaacacccagctgtgcaagcctataggctacaacaagcaattgcggcgagcgtctacaacaaccaatttccagttgcacaacaatcttggcacatttaacaatcaaaccatcgcaacgcaacagcaacaacaatttctaccaacactgagccacctagccatggtgaaccctgccgcctacttgcaacagca

SEQ ID NO: 20283 - DNA, 400 bp, Zea mays
  Clone ID: LIB3151-061-Q1-K1-E11
attccgtcattgctcacactgacactgtttcccatggtgatgcgtgacacattattactcaatcatcgccgctaaatgactcaactagctagctagccagcggctatactacagcaccccgatcctgggccagtgcgtccagtttctgaggcatcagtgcagcccgacggcgacgccctactgctcgcctcagtgccagtcgttgcggcagcagtgttgccagcagctcaggcaggtggagccgcagcaccggtaccaggcgatcttcggcttggtccttcaggtcatcctgcagcagcagccgtaaagcggccaggtcgcggggcttgtggcggcgcagatagcgcagcaactgacggcgatgtgcgggctgcagcaaccgactccatgcccctacact

SEQ ID NO: 20284 - DNA, 424 bp, Zea mays
  Clone ID: LIB3151-061-Q1-K1-E12
gcaactagaaagcacaatagtgtaccatctttggcagccaaaatattttgcctccttatgctccttggtctttctgcaagtgctgctacggcgaccattttcccgaaatgctcgcaagctcctatagcttcccttcttcccccgtacctctcaccagcggtgtcttcggtatgtgaaaacccaattcttcaaccctacaggatccaacaggcaatcacagctggcatcttacctttatcacccttgttcctccaacaatcatcagccctattacatcagttacctttggtgcatttattggcacaaaacatcagggcacaacaactacaacaacttgtgctagcaaaccttgctgcctactctcagcaacagcagtttcttccattcaaccaactagctgcattgaactctgcttcttatttgc

SEQ ID NO: 20285 - DNA, 138 bp, Zea mays
  Clone ID: LIB3151-061-Q1-K1-E2
tatgggtatgctccttacggggcatactctccggccacttccccagttccaacggttgatggtcagatgtttggcgcacagcattaccagtatccaaccacgtattttcagctctacacaatctttacactaagacct

SEQ ID NO: 20286 - DNA, 324 bp, Zea mays
  Clone ID: LIB3151-061-Q1-K1-E4
agaccattattttatctactccagagcgctgatgaacccgatcgacaccatgagggtgttgctcgttgccctcgctctcctggctctcgctgcgagcgccaccttcacgcatacaagcggcggctgcggttgtcagccatcgtcgtcgtgttttttacttgttgctgtgtatttgtttctttattgttcttttctatctttaatttttattttattttgattccgtctttttttttttttttttatttatttttgttatttacaaatttaacttgtatttttttttattatataatatttagtctattatttttttttttcttt

SEQ ID NO: 20287 - DNA, 187 bp, Zea mays
  unsure at all n locations
  Clone ID: LIB3151-061-Q1-K1-E5
cannacctaatcatcattcatcttagttttttaggcaccaaatcaaatctgcaacatcaattatctaactccaaaaaccatgaagctggtgcttgtggttcttgctttcattgctttagtatcaagtgtttcttgtacacagacaggcggctgcagctgtggtcaacaacaaagccatgagcagcaa

SEQ ID NO: 20288 - DNA, 420 bp, Zea mays
  Clone ID: LIB3151-061-Q1-K1-E6
agaccattcgtttatctactccagagcgcagattaacccgatcgacaccatgagggtgttgctcgttgccctcgctctcctggctctcgctgcgagcgccacctccacgcatacaagcggcggctgcggctgccagccaccgccgccggttcatctaccgccgccggtgcatctgccaccttcggttcacctgccacctccggtgcatctcccaccgccggtccacctgccgccgccggtccacctgccaccgccggtccatgtgccgccgccggttcatctgccgccgccaccatgccactaccctactcaaccgccccggcctcagcctcatccccagccacacccatgcccgtgccaacagccgcatccaagcccgtgccagctgcaaggaacctgcggcgttggcagcaccccgat

SEQ ID NO: 20289 - DNA, 369 bp, Zea mays
  Clone ID: LIB3151-061-Q1-K1-E7
ggcagtgcgtagagaggatcgtcgaacagaacagcatgaagatggtcatcgttctcgtcgtgtgcctggctctgtcagctgccagcgcctctgcaatgcagatgccctgcccctgcgcggggctgcagggcttgtacggcgctggcgccggcctgacgacgatgatgggcgccggcgggctgtacccctacgcggagtacctgaggcagccgcagtgcagcccgctggcggcggcgccctactacgccgggtgtgggcagacgagcgccatgtaccaaccgctccggcaacagtgctgccagcagcagatgaggatgatggacgtgcaatccgtcgcgcagcagctgcaaatgatgatgcagcttgagc

SEQ ID NO: 20290 - DNA, 421 bp, Zea mays
  unsure at all n locations
  Clone ID: LIB3151-061-Q1-K1-E8
gnnnnacttccactccccacgttccccgtttgcttcctccaggccccggccagatccgcgcgcccgcggggaagagggcctcctctcctccctcctcccttggctcgcgctctggtcgaggaggcggaggccggtgccggcgggcgggcggggaggtaggtagcagcttgcggttgcgggagggaagctgcgcgcgctaggctgccatggcggtggagaagacgctgcccggcgcgagtgcggggaggaccgtgctggtcacgggcggggcgggctacatcggtagccacgccgtgctgcagctcctcctcgcgggcttccgcgccgtcgtcatcgacaacctcaacagctctaacagttttaggaaatgactatgccacaagagacgggactggggtccgagaatacatccatgtgggtg

SEQ ID NO: 20291 - DNA, 175 bp, Zea mays
  unsure at all n locations
  Clone ID: LIB3151-061-Q1-K1-E9
nnnnnaaatcggaggatgttggcttactctactgttggtacacctgattacattgcacccgaggtggtcacttggtgcaataatgttcgaaatgcttgtggggtatccgccattttattctgaagacccaatgtcaacatgtaagaagatagtgaattggagaagtcatctaaaa

SEQ ID NO: 20292 - DNA, 397 bp, Zea mays
  Clone ID: LIB3151-061-Q1-K1-F1
aagtggaatacagtatcaactttatagcaacaatggcggccaagatattttgcatccttatgctccttgctctttctgcatgtgttgctaacgcgaccatttttcctcaatactcacaagctcctatagctgcccttctttccccataccttccatcaatgaccgcttcagtatgtgaaaacccagccctttaaccctacaggcttcaacaagcaatcgcaacaagcaacttacctttatcacccctggtctttcaacaatcgccagccctatctttggtgcagtcattgggtcaaaccatcagggcacaacagctgcagcaactcgtgctaccagtgatcaggccaagtagcttttggaaaaccttttcttcctacttttaacaacaacaattttt

SEQ ID NO: 20293 - DNA, 396 bp, Zea mays
  Clone ID: LIB3151-061-Q1-K1-F10
gtcctcgcaggttcaatctcacctttcttcatgggtcaagagaaaccccacattaacatggggggtattggccatgtcgactctggcaagtcgaccaccacaggacaccttatctacaagcttggaggcattgacacgcgtgtgatcgagaggctcgagaaggaggctgctgaaatgaacaagcgggccttcaagcacgcgaggccgctcagacaagctcaacgctgagcgtgagagaggtatcaccacatgatatacctctgcggaagtttgagaccaccaagtgctactgcaccgacattgatgcccgctggacaccgtgacttcatcaagaacatgatcactggctcctcccaggctgactgggctgtacttatcactgactacaccactgga

SEQ ID NO: 20294 - DNA, 376 bp, Zea mays
  Clone ID: LIB3151-061-Q1-K1-F11
tatttcatagaaagtggaatccttattttcaattgagcaacaatggcgaccaagagatttttcctgcgtatgcgccgtgctctttctgcatgtgttgctaacgcgacaattttccctcaatgctcacaagctcctatagcttcccttcttcccccatacctttcatcaatgatagctttagtatgtgaaaacccagctcttcaaccctataggctccaacaagcaatctcagcaagcaacatacctttatcacccttgtttcaacaatcggcagccctatctttggtgcagtcattgggacaaaccatcagggcacaacagctgcagcaacttttgctacctgtgatcaaaccaagagctgtgggaaacctttctt

SEQ ID NO: 20295 - DNA, 427 bp, Zea mays
  Clone ID: LIB3151-061-Q1-K1-F12
gcatttgaaacacaccaagcgaagtgcactagcaacaacctaacaacaatggctaccaagatattagccctccttgcgcttcttgcccttttagtgagcgcaacaaatgcgttcattattccacagtgctcacttgctcctagtgccattattccacagttcctcccaccagttacttcaatgggcttcgaacatccagccgtgcaagcctacaggctacaactagcgcttgcggcgagcgtcttacaacaaccaattgcccaattgcaacaacaatccttggcacatctaaacctacaaaccatcgcaacgcaacagcaacaacagtttctgccatcactgagccacctagccgtggtgaaccctgtcgcctacttgcaacagcagctacttgcatccaacccacttgctcttgcgaacgtagctg

SEQ ID NO: 20296 - DNA, 202 bp, Zea mays
  Clone ID: LIB3151-061-Q1-K1-F2
gactcagcgcccttctatctctcttctcccccgcctgtctagcgagcggcggacaccaccaccgttcagttattatagcaagcatgacgaagcacggcgtggtgatcggcccggaggacgtcgcggcggcgcggcatttttcgttcccgccgccgaggacggcggcgggcggcgagtcgtgcatgaagctggcggcgcaggt

SEQ ID NO: 20297 - DNA, 220 bp, Zea mays
  Clone ID: LIB3151-061-Q1-K1-F3
cagaagcacacgccgtgcctatctatctatagctagcaccagcaggggggcacaccgaaaaggacagcgccagcagcctcgaggacgaacaccagcagcggctgcggcggcggcgcgtccacggacaagcaaagggcagtgggcgtctaccccgacgccacggggacgccgccggagcgcaagggcaacagcgccaacgcggacccggacaccgcccaac

SEQ ID NO: 20298 - DNA, 432 bp, Zea mays
  unsure at all n locations
  Clone ID: LIB3151-061-Q1-K1-F5
attttcancttcagaaacacaccaagcgattcgcactagcaacaacctaacaacaatggctaccaagatattagccctccttgcgcttcttgcccttttagtgagcgcaacaaatgcgttcattattccacagtgctcacttgctcctagtgccattattccacagttcctcccaccagttacttcaatgggcttcgaacatccagccgtgcaagcctacaggctacaactagcgcttgcggcgagcgtcttacaacaaccaattgcccaattgcaacaacaatccttggcacatctaaacctacaaaccatcgcaacgcaacagcaacaacagtttctgccatcactgagccacctagccgtggtgaaccctgtcgcctacttgcaacagcagctacttgcatccaacccacttgctctggcgaacgtagc

SEQ ID NO: 20299 - DNA, 426 bp, Zea mays
  Clone ID: LIB3151-061-Q1-K1-F6
cagaaacacacaagcgaagcgcactagcttcaacctaacaacaatggctaccaagatattagccctccttgcgcttcttgcccttttagtgagcgcaacaaatgcgttcattattccacagtgctcacttgctcctagtgccattattccacagttcctcccaccagttacttcaatgggcttcgaacatccagccgtgcaagcctacaggctacaactagcgcttgcggcgagcgtcttacaacaaccaattgcccaattgcaacaacaatccttggcacatctaaacctacaaaccatcgcaacgcaacagcaacaacagtttctgccatcactgagccacctagccgtggtgaaccctgtcgcctacttgcaacagcagctacttgcatccaacccacttgctctggcgaacgtagctgcata

SEQ ID NO: 20300 - DNA, 369 bp, Zea mays
  Clone ID: LIB3151-061-Q1-K1-F7
agtttctgaggcatcagtgcattccgacggcgacgccctactgctcgcctcagtgccagtcgttgcggcagcagtgttgccagcagctcaggcaggtggagccgcagcaccggtaccaggcgatcttcggcttggtcctccagtccatcctgcagcagcagccgcaaagcggccaggtcgcggggctgttggcggcgcagatagcgcagcaactgacggcgatgtgcggcctgcagcagccgactccatgcccctacgctgctgccggcggtgtcccccactgaagaaactatgtgctgtagtatagccgctggctagctagctagttgagtcatttagcggcgatgattgagtaataatgtgtcacgc

SEQ ID NO: 20301 - DNA, 342 bp, Zea mays
  Clone ID: LIB3151-061-Q1-K1-F8
agccgccactctcttcttccttctctcccacacgcacagccctctcctctcctgttcatggcgcagagaagctctccgccgagctgctcccatggcgccaaccttccctgcggcgagctccttcctccaggcacccatgccgccgagctctccttcacggcgcgggcgagctccctcctcggctgcttccagcccaactcggtgcccttgctgcaggcgagcagcaggctccctgctccacgcgcctccccagccatggcgtcctgcttcctcccatggcgcaggagatgccccagcgagctcccttcccttccccatggctcgagctcgagtttcctcatg

SEQ ID NO: 20302 - DNA, 348 bp, Zea mays
  unsure at all n locations
  Clone ID: LIB3151-061-Q1-K1-F9
annnaaccaactagcaacatagaaagcattatagtgtaccaacaatggcagccaaaatattttgcctccttatgctccttggtctttctgcaagtgctgctacggcgaccattttcccgcaatgctcgcaagctcctatagcttcccttcttcccccgtacctctcaccagcggtgtcttcggtatgtgaaaacccaattcttcaaccctacaggatccaacaggcaatcgcagctggcatcttacctttatcacccttgttcctccaacaatcatcagccctattacaacagttacctttggtgcatttattggcacaaaacattagggcacaacaactacaacaac

SEQ ID NO: 20303 - DNA, 254 bp, Zea mays
  Clone ID: LIB3151-061-Q1-K1-G1
tccgatccgccgagtgcactctacctttccccactccgatcgaatcgatggccgccgagggcgagaagaagatgataaccctcaaaagctccgatggcgaggagttcgaggtggaagaggcggtggcgatggagtcgcagaccatccgccacatgatcgaggatgactgcgccgacaacggcatccctcttcctaacgttaactccaagatcctatccaaggtaatcgagtactgcaacaagcacgtacatgcc

SEQ ID NO: 20304 - DNA, 269 bp, Zea mays
  unsure at all n locations
  Clone ID: LIB3151-061-Q1-K1-G10
natttcgcagccaacaccacccgttgtgtttacgcgacagccgccaggaggaaggaatgaacttactgtcagccagtgaagggggagaagtgtactgctccgtagaccagtgcgcgcaccgtccggtatggttgctcatttcgacgacgaccagtggattaatccgtatggcagttattgccacggtgtatctatacgcaacgcctgtcggcctgagggtacatggacgcattcacggtgcgcgtctgacatcaacctatttttcaggt

SEQ ID NO: 20305 - DNA, 390 bp, Zea mays
  Clone ID: LIB3151-061-Q1-K1-G11
tcggaacactacttggacaaattcgtctgtttttaccacttctcttgccagttcacagctgaccttattgccatgaaccacaccgatttcatcattaccagcacattccaagaaatcgcgggaagcaaggacaccgtggggcagtacgagtcccacatcgcgttcactcttcctgggctctaccgtgtcgtccatggcatcgatgttttcgatcccaagttcaacattgtctctcctggagcagacatgaatgtttactacccgtatacggaaacccgcaagagacttactggcttccatcctgaaattgaggagctcatctacagcggcgtttttaatttctagcacaaattcgtgctggaggacaagaagaaacctttcatttttttg

SEQ ID NO: 20306 - DNA, 406 bp, Zea mays
  unsure at all n locations
  Clone ID: LIB3151-061-Q1-K1-G12
naacactaacatagaaagtggaattcagtttcaacaatagagcaacaatggcgaccaagatattttccctccttatgctccttgctctttctgcatgtgttgctaacgcgacaattttccctcaatgctcacaagctcctatagcttcccttcttcccccataccttccatcaatgatagcttcagtatgtgaaaacccagctcttcaaccctataggctccaacaagcaatcgcagcaagcaacatacctttatcacccttgtttcaacaatcgccagccctatctttggtgcagtcattggtacaaaccattagggcacagcagctgcagcaactcgtgctacctgtgatcaaccaagtagctcttgcaaacctttcttcctactctcagcaacaacaatttct

SEQ ID NO: 20307 - DNA, 325 bp, Zea mays
  Clone ID: LIB3151-061-Q1-K1-G2
tcttcaagaggggatcatcatattgggcttattattccttattactccaggcaaggatcggagttgctctgaattgactgaaccatggcggcgacaatggcagtgactacgatggtgacaaggagcaaggagagctggtcgtcattgcaggtcccggcggtggcattcccttggaagccacgaggtggcaagaccggcggtctctagttccctcgccgggcgatgttcgccagcgtcggcctcaacgtgtgcccgggcgtcccagcggggcgcgactcgcgggagcccgatcccaaggtcggtcgggcggccgacaactgcgaca

SEQ ID NO: 20308 - DNA, 432 bp, Zea mays
  Clone ID: LIB3151-061-Q1-K1-G4
gggtcttcaacccttagctttatctacttcagagcgcagaagaacccgatcgacaccatgagggtgttgctcgttgccctcgctctcctggctctcgctgcgagcgccacctccacgcatacaagcggcggctgcggctgccagccaccgccgccggttcatctaccgccgccggtgcatctgccacctccggttcacctgccacctccggtgcatctcccaccgccggtccacctgccgccgccggtccacctgccaccgccggtccatgtgccgccgccggttcatctgccgccgccaccatgccactaccctactcaaccgccccggcctcagcctcatccccagccacacccatgcccgtgccaacagccgcatccaagcccgtgccagctgcagggaacctgcggcgttggcagcaccccgatcctg

SEQ ID NO: 20309 - DNA, 402 bp, Zea mays
  unsure at all n locations
  Clone ID: LIB3151-061-Q1-K1-G5
gggcttanactttagctttatctactctttagtgcagaagaacccgatcgacaccatgagggtgttgctcgttgccctcgctctcctggctctcgctgcgagcgccacctccacgcatacaagcggcggctgcggctgccagccaccgccgccggttcatctaccgccgccggtgcatctgccacctccggttcacctgccacctccggtgcatctcccaccgccggtccacctgccgccgccggtccacctgccaccgccggtccatgtgccgccgccggttcatctgccgccgccaccatgccactaccctactcaaccgccccggcctcagcctcatacccagccacacccatgcccgtgccaacagacgcattcaagcccgtgccagctgcagggaac

SEQ ID NO: 20310 - DNA, 433 bp, Zea mays
  Clone ID: LIB3151-061-Q1-K1-G6
gccacctctattcggcatcgacgaggcgataccctagcgccggagtcccgctccctcctcccacgacccatggcgtcggatatggcgtacgcgccgccgatgaaggcgggcaaggccgggttcgaagctggcatgatggatccgcagcacaggatccgcatcacgctctcctccaagagcgtcaagaacctcgagaaagtctgcggggatctggtgaagggcgccaagggtaaggagctcaaggtcaagggccccgtgcggatgcctaccaaggtgctccacatcaccaccaggaagtctccctgtggcgaaggtaccaacacctgggatcgctttgagatgaggattcacaagagggtgatcgatctcgtcagtacaccagacgttgtcagcagatcacctcaatcaccattgaaccaggtgtcgaggttga

SEQ ID NO: 20311 - DNA, 256 bp, Zea mays
  unsure at all n locations
  Clone ID: LIB3151-061-Q1-K1-G8
nnnnaactgaaaccggtccacgcccttctttttcgcgcagagccagccaagccaaccagccagtcagaaaaagaaccggggagcggcagctgcagcggccgagggcggagcacgcgaggttcaagattatccggtttaaaaacatcaaaagaggctgcggcatggatagataccaaagggtagagaagcctcggaatgacacgcccatcagcccgaatgagatcagaatcactactcaggggagggtgaggaacta

SEQ ID NO: 20312 - DNA, 321 bp, Zea mays
  unsure at all n locations
  Clone ID: LIB3151-061-Q1-K1-G9
gngnttcagaaacacaccaagcgaatcattttatcaacaacctaacaacaatggctaccaagatattatccctccttgcgcttcttgcgctttttgcgagcgcaacaaatgcgttcattattccacaatgctcacttgctccaagttccattattacacagttccttccaccagttacttcaatgggctttgaacacccagctgtgcaagcctataggctacaacaagcaattgcggcgagcgtcttacaacaaccaatttcccagttgcaacaacaatccttggcacatctaacaatacaaaccattgcaacgcaacagc

SEQ ID NO: 20313 - DNA, 346 bp, Zea mays
  Clone ID: LIB3151-061-Q1-K1-H10
tcgttttatttcagaaacacaccaatttaattacattagcaacaacctaacaacaatggctgccaagatattatccctgcttgcgcttcttgcgctatttgcgagcgcaacaaatgcgttcattattccacaatgctcacttgctccaagtttcattattacacagctcctctcaccagttacttcaatgggcttctaacacccagctgaacaagcctataggctacaacaagcaattgcggcgagcgttttactatcaacaatttctcaagttgtaacaacaaatccttgggcacattttacaataacataaccaatcgtaacgggacacagcaatctaccaatt

SEQ ID NO: 20314 - DNA, 262 bp, Zea mays
  unsure at all n locations
  Clone ID: LIB3151-061-Q1-K1-H11
tcagnaactgggaatcacatcgccatggcatttcaagatgtttgcattgtttgcgctcctagctctttgtgcaaccgccactagtgctacccatatcccagggcacttgtcaccactactgatgccattggctaccatgaacccatggatgcagtactgcatgaagcaacagggggatgccaacttgatagcgtggccgaccctgatgctgcagcaactggtggccttaccgtttcagccgtgccagatgccaatgatgatg

SEQ ID NO: 20315 - DNA, 389 bp, Zea mays
  Clone ID: LIB3151-061-Q1-K1-H12
gggtctcagaccattagctttatctacttcagagcgcagaagaacccgatcgacaccatgagggtgttgctcgttgccctcgctctcctggctctcgctgcgagcgccacctccacgcatacaagcggcggctgcggctgccagccaccgccgccggttcatctaccgccgccggtgcatctgccacctccggttcacctgccacctccggtgcatctcccaccgccggtccacctgccgccgccggtccacctgccaccgccggtccatgtgccgccgccggttcatctgccgccgccaccatgccactaccctactcaaccgccccggcctcagcctcattcccagccacacccatgcccgtgccaacagccgcattcaagcccgtg

SEQ ID NO: 20316 - DNA, 336 bp, Zea mays
  unsure at all n locations
  Clone ID: LIB3151-061-Q1-K1-H3
gccagggggggngcggcaggagcgggatctactccagagcgcagaagaacccgatcgacaccatgagggggttgctcgatgccctcgcgctcctggctctcgctgcgagcgccacctccacgcatacaagcggcggctgcggctgccagccaccgccgccggggcatctaccgccgccggcgcaactgccacctccggggcaccagccacctccggggcatctcccaccgccggtccacctgccggcgccgggccacctgccaccggcggtccatgtgccgccgccggggcatctgccggcggcaccatgccactaccctacgaaaccgggccggg

SEQ ID NO: 20317 - DNA, 54 bp, Zea mays
  Clone ID: LIB3151-061-Q1-K1-H4
attatcatgtcggtatgaccaataatatatgcatcataataaagttttggtttt

SEQ ID NO: 20318 - DNA, 426 bp, Zea mays
  unsure at all n locations
  Clone ID: LIB3151-061-Q1-K1-H5
gcaacatanacgcacaatagtgtaccaacattgttagccaaaatattttgcttccttatgctccttggtctttctgcaagtgctgctaccgcaaccattttcccacaatgctcacaagctcctatagcttcctttcttcccccatacctctcaccagcggtgtcttcagtatgtgaaaacccaattcttcaaccctacaggatccaacaggcaatcgcagcaggcatcttacctttatcacccttgttcctccaacaaccgtcagccctattacagcagttacctctggtgcatttgttggcacaaaacatcaaggcacaacaactacaacaacttgtgctaggaaaccttgctgcctactcttagcaacagcagtttcttccattcaaccaactggctgctttgactctgctgcttatttgcaac

SEQ ID NO: 20319 - DNA, 147 bp, Zea mays
  Clone ID: LIB3151-061-Q1-K1-H6
cagaccaatacttgatgtacttcagagcgcagaatatcccgatcgacaccatgagggcgttgctggttgcccttgctgtcctggctatcgctgcgagcgccacctccacgcaaacaagcggagggtgaagatgccagccacccccca

SEQ ID NO: 20320 - DNA, 336 bp, Zea mays
  Clone ID: LIB3151-061-Q1-K1-H8
cccgggctgccgtgcccgggagccgtgctcctttctctcttcgtaacccccgccaaaaccttcatctgccggagctgcaccggcggcgcggcgacaacaaaagctcgcgatccggtgactgatctcttccttccttggttcactttgatattccaacaaaggtcacattgctagactcccacattggtttctaacaaatcgagggcgcatagaacgagccgccctgtggctctcgcctgtctgagcttgggtgcactgttggctacacgtaagacccaatatgtgaatgtggtattgacagcctgccttactggctatgttggttgccaccgatct

SEQ ID NO: 20321 - DNA, 307 bp, Zea mays
  unsure at all n locations
  Clone ID: LIB3151-061-Q1-K1-H9
ganntcaacagcacaagagggatccagttacggcaatcgagctacaatggctaccaaggcatcttgccttcttatgctgcgtggtctctctgcccgtgttgctaacgcgacaacatgcccttattgctcacatgcttctatagttcctcttattaccccataccttacatcaatgatagctactggatgtgacatcccagatctctcacgctataggctccaacatgctatcgctatcagcctcgtacctttatcaaccttgtgtcatctaacagcagccccatttttggcgcatggaggggcacaa

SEQ ID NO: 20322 - DNA, 338 bp, Zea mays
  Clone ID: LIB3151-062-Q1-K1-A1
aactagcaacatacatagtgaagacactattttttcttatcaccaatgggagccaagatgttggccctccttgccctccttgctctatcatcaagcgctgctacctcgacttttattccacaatgctcacaacaatacctttattcggcgacagttgtgttattttaattcccaactatacaatcctacatggtacaagaggccattcaagcaagcatattacggcctatatcataaaccctccaacaaccatatgctttattgcaacagacatccttagtgcatctgtatctccaaagaatcttggcacatcattctacatcaacagttgctaccat

SEQ ID NO: 20323 - DNA, 365 bp, Zea mays
  Clone ID: LIB3151-062-Q1-K1-A10
gtcttcagaccattagctttatctacttcattagcgcagaagaacccgatcgacaccatgagggtgttgctcgttgccctcgctctcctggctctcgctgcgagcgccacctccacgcatacaagcggcggctgcggctgccagccaccgccgccggttcatctaccgccgccggtgcatctgccacctccggttcacctgccacctccggtgcatctcccaccgccggtccacctgccgccgccggtccacctgccaccgccggtccatgtgccgccgccggttcatctgccgccgccaccatgccactaccctactcaaccgccccggcctcagcctcattcccagccacacccatgcccgtg

SEQ ID NO: 20324 - DNA, 251 bp, Zea mays
  Clone ID: LIB3151-062-Q1-K1-A11
cgaccgatcgatcgccacagccaacactattcttcgaggcgacgcgacagccgccaggaggaaggaataaactcactgccagccagtgaagggggagaagtgtactgctccgtcgaccagtgcgcgcaccgcccggcagggctgctcatctcgtcgacgaccagtggattaatcggcatggcggctctggccacgtcgcagctcgtcgcaacgcccgccggcctgggcgtcccggacgcgttcacgttccg

SEQ ID NO: 20325 - DNA, 333 bp, Zea mays
  Clone ID: LIB3151-062-Q1-K1-A12
attgagaccaacaagcaacatagaaagtggtttacagtagcaacaatagagcaacaatggcggccaagatattttccatccttatgctccttgctctttctgcatgtgttgctaacgcgaccatttttcctcaatactcacaagctcctatagctgcccttcttcccccataccttccatcaatgaccgcttcagtatgtgaaaacccagcccttcaaccctacaggctccaacaagcaatcgcaacaagcaacttacctttatcacccctgttctttcaacaatcgccagccctatctttggtgcagtcattggtacaaaccatcaaggcac

SEQ ID NO: 20326 - DNA, 208 bp, Zea mays
  Clone ID: LIB3151-062-Q1-K1-A2
cgtccgagctgcagtgcgtatagaggatcgtcgaattttatagtatgaagatggccatcgctctcgtcgcgtgcctggctctgtcagcagccagcgcctctgcaatgcacatgctctgcccctgcaccgctccgcatgatttgcaacagccacgactaccattcaacgcagctatcttgctgcctacccccagcaatttcttttcatt

SEQ ID NO: 20327 - DNA, 418 bp, Zea mays
  Clone ID: LIB3151-062-Q1-K1-A3
gtaccatcaatcatcattcatcttagtagtatatgtaccaaatcaaatctgcaacatcaattatctaactccaaaaaccatgaagctggtgcttgtggttcttgctttcattgctttagtatcaagtgtttcttgtacacagacaggcggctgcagctgtggtcaacaacaaagccatgagcagcaacatcatccacaacaacatcatccacaaaaacaacaacatcaaccaccaccacaacatcaccagcagcagcaacaccaacaacaacaagttcacatgcaaccacaaaaacatcagcaacaacaagaagttcatgttcaacaacaacaacaacaaccgcagcaccaacaacaacaacaacaacagcaccaacaacaacatcaatgtgaaggccaacaacaacatcaccaacaa

SEQ ID NO: 20328 - DNA, 370 bp, Zea mays
  Clone ID: LIB3151-062-Q1-K1-A4
attgataccaactagcaacatacatagtgaagtacagtagcaacatcttagcaccaatggcagccaagatttttgccctccttgccctccttgctctttcagcaagtgttgctaccgcgactattattccacaatgctcacaacaatacctctctccggtgacagccgcgagatttgaatacccaactatacaatcctacaggctacaagaggccatcacagcaagcatcttacggtcgttagcattgactgtccaacaaccatatgccctattgcaacaaccatccttagtgaatctatatctccaaagaatcgcagcacaacaactacaacagcagttgcttccaacaatcaatcaagtagttgcagc

SEQ ID NO: 20329 - DNA, 351 bp, Zea mays
  Clone ID: LIB3151-062-Q1-K1-A5
caactagcaacatagaaagcacaatagtgtatcaacaatggcagccaaaatattttgcctccttatgctccttggtctttctgcaagtgctgctacggcgaccattttcccacaatgctcacaagctcctatagcttcccttcttcccccgtacctctcaccagcggtgtcttcggtatgtgaaaacccaattcttcaaccctataggatccaacaggcaatcgcagctggcatcttacctttatcacccttgttcctccaacaatcatcagccctattacagcagctacctttggtgcatttattggcacaaaacatcagggcacaacaactacaacaacttgtgctagc

SEQ ID NO: 20330 - DNA, 245 bp, Zea mays
  Clone ID: LIB3151-062-Q1-K1-A6
cataccattagctgtattgattacggacgcttctttaacctcatgcataccattaggacggagcgagtcgcctgcattatgggggcacttgcaacaagcgccacctgtacacatacgaggaggggctgccgctggcatccagacccgaaggttgatctaccgaagcgcttgcatcagccagcgacatttgacatatcaaatgcggagaatgtgacaactatggtcaacctgactactaccatgca

SEQ ID NO: 20331 - DNA, 406 bp, Zea mays
  Clone ID: LIB3151-062-Q1-K1-A7
tgcatttattggcacaaaacatcagggcacatcaactacaacaacttgtgctagcaaaccttgctgcctactctcagcaacagcagtttcttccattcaaccaactagctgcattgaactctgcttcttatttgcaacaacaacaactaccattcagccagctatctgctgcctacccccagcaatttcttccattcaaccaactgacagcattgaactctcctgcttatttacagcagcaacaactactaccattcagccagctagctggtgtgagccctgctaccttcttgacacaaccacagttgttgccgttctaccagcacgctgcgcctaacgctggcaccctcttacaactgcaacaattgctgccattcaacccacttggcttgacaaaccagcagca

SEQ ID NO: 20332 - DNA, 208 bp, Zea mays
  Clone ID: LIB3151-062-Q1-K1-A8
gggtcttcagaccattagctttatctactcttgagcgcagaagaacccgatcgacaccatgagggtgttgctcgtagccctcgctctcctggctctcgctgcgagcgccaccttcacgcatacaagcggcggctgcggctgccagccaccgccgccggttcatttaccgccgccggtgcatctgctacctttcgttcacctgccacct

SEQ ID NO: 20333 - DNA, 177 bp, Zea mays
  Clone ID: LIB3151-062-Q1-K1-B1
gcaaagtattgagacagccgccggtggggatggttgtttcaaggcggcccgccctggctcgtgggccggctcggctgagccaatggcacgggcccttggggcgcgaacgccctaacgtgggtcgtggcgggcggcgagcaaaggcgcccgttgcttagcttggattctgacttagag

SEQ ID NO: 20334 - DNA, 316 bp, Zea mays
  Clone ID: LIB3151-062-Q1-K1-B10
cgatcgacaccatgagggtgttgctcgttgtcctcgctctcctggctctcgctgcgagcgccacctccacgcatacaagcggcggctgcggctgccagccaccgccgccggttcatctaccgccgccggtgcatctgccacctccggttcacctgccacctccggtgcatctcccaccgccggtccacctgccgccgccggtccacctgccaccgccggtccatgtgccgccgccggttcatctgccgccgccaccatgccactaccctactcaaccgccccggcctcagcctcatccccagccacacccatgccc

SEQ ID NO: 20335 - DNA, 400 bp, Zea mays
  Clone ID: LIB3151-062-Q1-K1-B11
gcacaatagtgtaccaacaatggcagccaatatattttgcctccttatgctccttggtatttctgcaagtgctgctacggcgaccattttcccgcaatgctcacaagctcctatagcttcccttcttcccccgtacctctcaccagcggtgtcttcggtatgtgaaaacccaattcttcaaccctacaggatccaacaggcaatcgcagctggcatcttacctttatcacccttgttcctccaacaatcatcagccctattacagcagttacctttggtgcatttattggcacaaaacatcagggcacaacaactacaacaacttgtgctagcaaaccttgctgcctactcttagcaacagcagtttcttccattcaaccaactagctgcattgaactct

SEQ ID NO: 20336 - DNA, 407 bp, Zea mays
  Clone ID: LIB3151-062-Q1-K1-B12
cccacgcgtccggcaagagaccaacagtttgggtgcgaagaaagggtggccccctagctagcctagctagagagagagagagtcatcataatactcagagagaagcacgagcacagctgcactagctagctagctactgcaaagaagcaagctctcgatcacaatggccgccattccttctctgctgcgtcgtcgactcgccattgtcgtcgccaccaccgccatgctcgtcctgcttccctccccgtccgtcgccggcgaccccgacctgctccaggacatctgcgtcgcggacctcacgtccaccgtgaaggtgaacgggtacgcctgcaaggcggcggcggcggtgaccgcggacgacttctacttcagcgggctatgcggcgcgggcaacacgagcgccagcg

SEQ ID NO: 20337 - DNA, 420 bp, Zea mays
  Clone ID: LIB3151-062-Q1-K1-B2
agaaagtggaatccagtagcaacaatagagcttctatggcgaccaagatattttccctccttatgctccttgctctttctgcatgtgttgctaacgcgacaattttccctcaatgctcacaagctcctatagcttcccttcttcccccataccttccatcaatgatagcttcagtatgtgaaaacccagctcttcaaccctataggctccaacaagcaatcgcagcaagcaacatacctttatcacccttgtttcaacaatcgccagccctatctttggtgcagtcattggtacaaaccatcagggcacagcagctgcagcaactcgtgctacctgtgatcaaccaagtagctctggcaaacctttctccctactctcagcaacaacaatttcttccattcaaccaactgtctacattga

SEQ ID NO: 20338 - DNA, 419 bp, Zea mays
  Clone ID: LIB3151-062-Q1-K1-B3
cattattccacaatgctcacttgctccaagtttcattattacacagttcctcccaccagttacttcaatgggcttcgaacacccagctgtgcaagcctataggctacaacaagcaattgcggcgagcgtcttacaacaaccaatttcccagttgcaacaacaatccttggcacatctaacaatacaaaccatcgcaacgcaacagcaacaacaattcctaccagcactgagccacctagccatggtgaaccctgccgcctacttgcaacagcagttgcttgcatcaaacccacttgctctggcaaacgtagttgcaaaccagccacaacaacagctgcaacagtttctgccagcgctcagtcaactagccatggtgaaccctgccgcctacctacaacagcaacaactgctttcatcta

SEQ ID NO: 20339 - DNA, 413 bp, Zea mays
  Clone ID: LIB3151-062-Q1-K1-B4
ccaagcgaagcacattagcaacaacctaacatcattggctaccaagatattatccctccttgcgcttcttgcgctttttgcgagcgcaacaaatgcgttcattattccacaatgctcacttgctccaagttccattattacacagttcctcccaccagttacttcaatgggcttcgaacacccagctgtgcaagcctataggctacaacaagcaattgcggcgagcgtcttacaacaaccaatttcccagttgcaacaacaatccttggcacatctaacaatacaaaccatcgcaacgcaacagcaacaacaattcctaccagcactgagccacctagccatggtgaaccctgccgcctacttgcaacagcagttgcttgcatcaaacccacttgctcttggcaacgtagttg

SEQ ID NO: 20340 - DNA, 404 bp, Zea mays
  Clone ID: LIB3151-062-Q1-K1-B5
gttcgttgctcgatcgttgcaggtaatggagaaccctgctccgagtatcgtagtgtcccccatcgccgcacctgtatcagcgaacttcagcagactcgccttccgcaacctgtacatccgacggacgggtccagacagcagggagatggtgactgtggagggaagaagaggctctagtgatcagacaggcgacatgaggtacgtgagtgacttccccgtctacgatggccgtggctccgacgccgtcctggtggctcgcgtgcagggcgtcacaaccacgttcgggaactccaaccagttcttcaccgtcgccttcgaggccggcagcaggctcaagggctccacgctccttaccgaaagagtggtgacggatggatcagaagaatgggcaatctacggcggga

SEQ ID NO: 20341 - DNA, 409 bp, Zea mays
  Clone ID: LIB3151-062-Q1-K1-B6
ggcgttggcagcaccccgatcctgggccagtgcgtcgagtttctgaggcatcagtgcagcccgacggcgacgccctactgctcgcctcagtgccagtcgttgcggcagcagtgttgccagcagctcaggcaggtggagccgcagcaccggtaccaggcgatcttcggcttggtcctccagtccatcctgcagcagcagccgcaaagcggccaggtcgcggggctgttggcggcgcagatagcgcagcaactgacggcgatgtgcggcctgcagcagccgactccatgcccctacgctgctgccggcggtgtcccccactgaagaaactatgtgctgtagtatagccgctggctagctagctagttgagtcatttagcggcgatgattgagtaataatgtgtcacgcatc

SEQ ID NO: 20342 - DNA, 390 bp, Zea mays
  Clone ID: LIB3151-062-Q1-K1-B7
catacctgcaacaagaattgttgcaacagattgtaccagctctaactcagctagctgtggcaaaccctgttgcctacttgcaacagctgcttccattcaaccaactaactatgtcgaactctgttgcgtacctacaacagcgacaacagttacttaatccattggcagtggctaacccattggtcgctgccttcctacagcagcaacaattgctgccatacaaccggttctctttgatgaatcctgtcttgtcgaggcagcaacccatcgttggaggtgccatcttttagattacatatgagatgtactcgataatggtgccctcataccggcatgtgtttcctagaaataatcaatatattggttgagatttatctcgatatatttctg

SEQ ID NO: 20343 - DNA, 416 bp, Zea mays
  Clone ID: LIB3151-062-Q1-K1-B8
agaccattagctttatctactccagagcgcttaagaacccgatcgacaccatgagggtgttgctcgttgccctcgctctcctggctctcgctgcgagcgccacctccacgcatacaagcggcggctgcggctgccagccaccgccgccggttcatctaccgccgccggtgcatctgccacctccggttcacctgccacctccggtgcatctcccaccgccggtccacctgccgccgccggtccacctgccaccgccggtccatgtgccgccgccggttcatctgccgccgccaccatgccactaccctactcaaccgccccggcctcagcctcatccccagccacacccatgcccgtgccaacagccgcatccaagcccgtgccagctgcagggaacctgcggcgttggcagcacc

SEQ ID NO: 20344 - DNA, 341 bp, Zea mays
  unsure at all n locations
  Clone ID: LIB3151-062-Q1-K1-B9
catcattggnggtgccctcttttagattttttatgagttatagttcaataataaaggtgtgtgtctgatgtttgtggcttcccagaaataagaaagtacatttctagattaaaaaaaacaaaaaaaaataaaaaaaaaaaaaaaaaaaaaaaaaaaaaaaaaaaaaaaaaaaaaaaaaaaaaaaaaaaaaaacncttataaaaaaaaaaaaaagggggcggccgttttagaggaacaaattttatacccgggcccatgtaccattatagtttttatttgggtgcacaaaaaaaaaatacaggggcgggtttttaaccacggggaactgggaaaacccgggg

SEQ ID NO: 20345 - DNA, 419 bp, Zea mays
  Clone ID: LIB3151-062-Q1-K1-C1
gcaacatagaaagcacaatagtgtaccaactatggtagccaaaatatttcgcttccttatgctccttggtctttctgcaagtgctgctaccgcaaccattttcccacaatgctcacaagctgctatatgcttcctttcttcccccatacctgttaccagcaggtgtcttcagtatgtgaaaacccaattcttcaaccctacatgatccaacaggcaatcgcagcaggcatcttacctttatcacccttgttcctccaacaaccgataggcctattacagcagatacctttggtgcatttggtggctcaaaacatcaaggcacaacaactacaacaacttgtgctaggaaaccttgctcgctactctaagcaacagcagtttcttgcattctaccaactggctgcattgaactctgctgc

SEQ ID NO: 20346 - DNA, 334 bp, Zea mays
  Clone ID: LIB3151-062-Q1-K1-C10
ggagtccgccttaggttgtaggctccgttttatcataagcaacacaacacccttccgtttgcgtcgctcctccggcctcccctccctggtcggtcgatcgcgaggatgacgccggcgagcgtggtcgccgcgcccaggagcgtcggggcgttgcccttggcggcgttcccggcgcccgcgagggccggggtgcggaggaacggccggtcctcgaggcccgcggcgtgcggcggggacgaccagcagccgccgtccatggccgcgatgccggcgtcgttgtgcgccatcccagccttgtaggattctggaagcggctcaatttttgggagttttt

SEQ ID NO: 20347 - DNA, 337 bp, Zea mays
  Clone ID: LIB3151-062-Q1-K1-C11
gactagttctagatcgcgagcggccgctcttttttttttttttttttagacaaaaaactttattattgaactataactcataagaaatctaaaagagggcaccaccaatgatgggttgttggtagaatgctgttgggtttgtcaaagcaagttggttgaatggcagcaattgttgcagttgtaagagggtgccagcgttaggcgcagcgtgctggtagaacggcaacaattgtggttgtgtcaagaaggtagcagggctcacaccagctatctgctggctacccccagcaatttgtttcatttaaccaactgacagctttgaactcttctgtttatt

SEQ ID NO: 20348 - DNA, 346 bp, Zea mays
  Clone ID: LIB3151-062-Q1-K1-C12
cagaaacacaccaagcgaagcacattatcattaacctaacaacaatggctaccaagatattatccctccttgcgcttcttgcgctttttgcgagcgcaacaaatgcgttcattattccacaatgctcacttgctccaagttccattattacacagttcctcccaccagttacttcaatgggcttcgaacacccagctgtgcaagcctataggctacaacaagcaattgcggcgagcgtcttacaacaaccaatttcccagttgcaacaacaatccttggcacatctaacaatacaaaccatcgcaacgcaacagcaacaacaattcctaccagcactgagccacct

SEQ ID NO: 20349 - DNA, 325 bp, Zea mays
  Clone ID: LIB3151-062-Q1-K1-C2
tattgattgacagtcatcttgtttctgacatttttttagtgagagagaaggcaaaaagtgggagacaaggtgtaaaatggggaagggagcgcaaagggagcgatgcggcggcagcaagtcggcgaggtggaggagaacaatggcggcgtggctaggttgccaagagcgccctcaagatcatgccctacaagctcccgcccgtcggcccttatgatgtcctcttgcgcatgaaggccgtatggatttgcggcggcgatgttcactacctaagggagatgcgaatcgcgcactttttggagaatgagccgatggagatcattcacca

SEQ ID NO: 20350 - DNA, 69 bp, Zea mays
  Clone ID: LIB3151-062-Q1-K1-C3
gtcctgaccagtcgtatgtcttggctggcttggtagttattaaaacgtgttgcaatagctgtggtcggc

SEQ ID NO: 20351 - DNA, 375 bp, Zea mays
  Clone ID: LIB3151-062-Q1-K1-C4
ctgggtcttcagaccattagctttatctactccatagcgcagaagaacccgatcgacaccatgagggtgttgctcgttgccctcgctctcctggctctcgctgcgagcgccacctccacgcatacaagcggcggctgcggctgccagccaccgccgccggttcatctaccgccgccggtgcatctgccacctccggttcacctgccacctccggtgcatctcccaccgccggtccacctgccgccgccggtccacctgccaccgccggtccatgtgccgccgccggttcatctgccgccgccaccatgccactaccctactcaaccgccccggcctcagcctcatccccagccacacccatgcccgtgccaacag

SEQ ID NO: 20352 - DNA, 409 bp, Zea mays
  Clone ID: LIB3151-062-Q1-K1-C5
caactagcaacatagaaagcacaatagtgttctctcaatggcagccaaaatattttgcctccttatgctccttggtctttctgcaagtgctgctacggcgaccattttcccgcaatgctcgcaagctcctatagcttcccttcttcccccgtacctctcaccagcggtgtcttcggtatgtgaaaacccaattcttcaaccctacaggatccaacaggcaatcgcagctggcatcttacctttatcacccttgttcctccaacaatcatcagccctattacaacagttacctttggtgcatttattggcacaaaacatcatggcacaacaactacaacaacttgtgctagcaaaccttgctgcctactctaagcaacagcagtttcttccattcaaccaactaggttca

SEQ ID NO: 20353 - DNA, 388 bp, Zea mays
  Clone ID: LIB3151-062-Q1-K1-C6
cagaccattagctttatctactccagagcgttgaataacccgatcgacaccatgagggtgttgctcgttgccctcgctctcctggctctcgctgcgagcgccacctccacgcatacaagcggcggctgcggctgccagccaccgccgccggttcatctaccgccgccggtgcatctgccacctccggttcacctgccacctccggtgcatctcccaccgccggtccacctgccgccgccggtccacctgccaccgccggtccatgtgccgccgccggttcatctgccgccgccaccatgccactaccctactcaaccgccccggcctcagcctcatccccagccacacccatgcccgtgccaacagccgcatccaagcccgtgccagc

SEQ ID NO: 20354 - DNA, 384 bp, Zea mays
  Clone ID: LIB3151-062-Q1-K1-C7
cagaccattagctttatctactccagagcgtagaagaacccgatcgacaccatgagggtgttgctcgttgccctcgctctcctggctctcgctgcgagcgccacctccacgcatacaagcggcggctgcggctgccagccaccgccgccggttcatctaccgccgccggtgcatctgccacctccggttcacctgccacctccggtgcatctcccaccgccggtccacctgccgccgccggtccacctgccaccgccggtccatgtgccgccgccggttcatctgccgccgccaccatgccactaccctactcaaccgccccggccttagcctcattcccagccacacccatgcccgtgccaacagccgcattcaagcccgtgc

SEQ ID NO: 20355 - DNA, 365 bp, Zea mays
  Clone ID: LIB3151-062-Q1-K1-C8
tgagaccaacatgcaacatagaaagtggttttcagtagcaacaatagagcaacaatggcgaccaagatattttccctccttatgctccttgctctttctgcatgtgttgctaacgcgacaattttccctcaatgctcacaagctcctatagcttcccttcttcccccataccttccatcaatgatagcttcagtatgtgaaaacccagctcttcaaccctataggctccaacaagcaatcgcagcaagcaacatacctttattacccttgtttcaacaattgccagccctatctttggtgcagtcattggtacaaaccatcagggcacaacagctgcagcaactcgtgctacctgtgatcaacca

SEQ ID NO: 20356 - DNA, 253 bp, Zea mays
  Clone ID: LIB3151-062-Q1-K1-C9
aacaaagtgaccgtgcgtacagaggatcgttttacacaacagcatgaacactgtcatcgatgttgaaacatgcctggctctgtgaaatgccagcgcctttgcaatgcagatgccctgcccctgcgccgtgctgcagggctagtacggtgctggcgcccgtctgacaacatgatgggcacctgccatgtgtacccctacgccactacctgaggaacctatgcacccagttctgggtccctactacgcggtgtgg

SEQ ID NO: 20357 - DNA, 415 bp, Zea mays
  Clone ID: LIB3151-062-Q1-K1-D1
cagaccattagctttatctactccagagcgcatattaacccgatcgacaccatgagggtgttgctcgttgccctcgctctcctggctctcgctgcgagcgccacctccacgcatacaagcggcggctgcggctgccagccaccgccgccggttcatctaccgccgccggtgcatctgccacctccggttcacctgccacctccggtgcatctcccaccgccggtccacctgccgccgccggtccacctgccaccgccggtccatgtgccgccgccggttcatctgccgccgccaccatgccactaccctactcaaccgccccggcctcagcctcatccccagccacacccatgcccgtgccaacagccgcatccaagcccgtgccagctgcagggaacctgcggcgttggcagca

SEQ ID NO: 20358 - DNA, 373 bp, Zea mays
  Clone ID: LIB3151-062-Q1-K1-D10
gaccgactacatgaatcgaacgtacagttgtctcctgtcaatgaccgactatctatgccaacgctttctgcttactgtaagatgcggcaatgcttaccatgcaaccatttgtctgcattgctccgtggttcttattggttgcatcagctattagcacgtatcaagatagatgctgtctgccagcaaaaaccccatcgttttacattaaacgatgtcaaccggcctgcaccgctgtgctcatacgtagatcacccttctacttccatcaatccagatcgctattacatagccgtgccttcgttgcagtcaaaagaacaggggctgcctgtctaaacaactacagcaactagcgctagcaaaccttgacaactac

SEQ ID NO: 20359 - DNA, 359 bp, Zea mays
  Clone ID: LIB3151-062-Q1-K1-D11
gaccaacaagcaacatagaaagtggaattttttagcaacaatagagcaacaatggcgaccaagatattttccctccttatgctccttgctctttctgcatgtgttgctaacgcgacaattttccctcaatgctcacaagctcctatagcttcccttcttcccccataccttccatcaatgatagcttcagtatgtgaaaacccatctcttcaaccctataggctccaacaagcaatcgcagcaagcaacatacctttattacccttgtttcaacaatcgccagccctatctttggtgcagtcattggtacaaaccatcaaggcacagcagctgcagcaacttgtgctacctgtgatcaa

SEQ ID NO: 20360 - DNA, 402 bp, Zea mays
  Clone ID: LIB3151-062-Q1-K1-D12
gtcgcacatatctactatactatactctattaagcaaggacaccaccgccatggcagccaagatgcttgcattgttcgctctcctagctctttgtgcaagcgccactagtgcgacccatattccagggcacttgccaccagtcatgccattgggtaccatgaacccatgcatgcagtactgcatgatgcaacaggggcttgccagcttgatggcgtgtccgtccctgatgctgcagcaactgttggccttaccgcttcagacgatgccagtgatgatgccacagatgatgacgcctaacatgatgtcaccattgatgatgccgagcatgatgtcaccaatggtcttgccgagcatgatgtcgcaaatgatgatgccacaatgtcactgcgacgccgtctcgc

SEQ ID NO: 20361 - DNA, 361 bp, Zea mays
  Clone ID: LIB3151-062-Q1-K1-D2
attttgagcattcagaaacacaccaagcgatttttattagcaacaacctaacaacaatggctaccaagatattatccctccttgcgcttcttgcgctttttgcgagcgcaacaaatgcgttcattattccacaatgctcacttgctccaagttccattattacacagttcctcccaccagatacttcaatgggcttcgaacacccagctgtgcaagcctataggctacaacaagcaattgcggcgagcgtcttacaacaaccaattttccagttgcaacaacaattcttggcacatctaacaatacaaaccatcgcaacgcaacagcaacaacaatttctaccaacactgagccacctagc

SEQ ID NO: 20362 - DNA, 233 bp, Zea mays
  unsure at all n locations
  Clone ID: LIB3151-062-Q1-K1-D3
cttcagaccattagctttatctactccagagtgtttaagaacccgatcgacaccatgagggtggtgctcgttgccctcgctctcctggctctcgctgcgagcgccacctccacgcatacaagcggcggctgcggctgccagccaccgccgccggttcatctaccgccgccggtgcatctgccacctccggttcacctgccacctccggtgcatctnccaccgccggtccacct

SEQ ID NO: 20363 - DNA, 191 bp, Zea mays
  Clone ID: LIB3151-062-Q1-K1-D4
gcaacatttgttgccgttctacctgcacactgtttctaacgttggcaccctcttacaactgcaacaattgctgccattcgaccaacttgctttgacaaacccagcagtgttctaccaacaacccatcattggtggtgccctcttttagattgcttatgagttatagttcaataataaagttttttttgctg

SEQ ID NO: 20364 - DNA, 397 bp, Zea mays
  Clone ID: LIB3151-062-Q1-K1-D5
ggtcttcagaccattagctttatctactccttagtgcagaagaacccgatcgacaccatgagggtgttgctcgttgccctcgctctcctggctctcgctgcgagcgccacctccacgcatacaagcggcggctgcggctgccagccaccgccgccggttcatctaccgccgccggtgcatctgccacctccggttcacctgccacctccggtgcatctcccaccgccggtccacctgccgccgccggtccacctgccaccgccggtccatgtgccgccgccggttcatctgccgccgccaccatgccactaccctactcaaccgccccggcctcagcctcatccccagccacacccatgcccgtgccaacagccgcatccaagcccgtgccagctgc

SEQ ID NO: 20365 - DNA, 408 bp, Zea mays
  Clone ID: LIB3151-062-Q1-K1-D6
cttgttgtgtcaacaatcgccagccctatcttttgtgcagtcattggtacaaaccatcagggcacaacagctgcagcaactcgtgctacctgtgatcaaccaagtagctctggcaaacctttctccctactctccgcaacaacaatttcttccattcaaccaactgtctacactgaaccctgctgcttatttgcagcaacaactattaccatttagccagctagctactgcctactctcaacaacaacaacttcttccatttaaccaattggccgcactgaaccccgctgcttatttgcagcagcaaatactactaccatttagccagctagctacagcaagccgtgcttccttcttgacacaacaacagttgctgccgttctaccagcagtttgcggctaaccccgc

SEQ ID NO: 20366 - DNA, 412 bp, Zea mays
  Clone ID: LIB3151-062-Q1-K1-D7
gcattcagaaacacaccaagcgaagcgcattttcaacaacctaacaacaatggctaccaagatattagccctccttgcgcttcttgcccttttagtgagcgcaacaaatgcgttcattattccacagtgctcacttgctcctagtgccattattccacagttcctcccaccagttacttcaatgggcttcgaacatccagccgtgcaagcctacaggctacaactagcgcttgcggcgagcgtcttacaacaaccaattgcccaattgcaacaacaatccttggcacatctaaacctacaaaccatcgcaacgcaacagcaacaacagttttctgccatcacttgaccacctaaccgtggtgaaccctgtcgcctacttgcaacagcagctacttgcatccaacccacttgc

SEQ ID NO: 20367 - DNA, 393 bp, Zea mays
  Clone ID: LIB3151-062-Q1-K1-D8
ccgcaatgctcacaagctcctatagctttttttcttcccccatacctctcaccagcgatgtcttcagtatgtgaaaatccaattcttctaccctacaggatccaacaggcaatcgcagcaggcatcttacctttatcacccttgttcctccaacaatcatcagccctattacagcagttacctttggtgcatttattggcacaaaacatcagggcacaacaactacaacaactcgtgctagcaaaccttgctgcctactctcagcaacagcagttacctttggtgcatttgttggcacaaaacatcagggcacaacaactacaacaactcgtgctagcaaaccttgctgcctactctcagcaacaacagtttctgccattcaaccaactagct

SEQ ID NO: 20368 - DNA, 348 bp, Zea mays
  Clone ID: LIB3151-062-Q1-K1-D9
gctcgcgcatcctattgccctcgcgccactttcgccgccgccgccgctgcagcgagccaccgccccgccgtcgcttgaggtagacaccaatccaccgccatggggcgtatgcacagccgcgggaagggtatctcttcatcggcgctgccgtacaagaggactcctccgatctggctcaagacagctaccaccgaggtggaggagatgattaccaaggctgcgaagaagggccagatgccgtcgcagattggtgttctgctccgtgaccagcacggcatcccgcttgtcaagagcgtgactggtagcaagatcctccgcatcctcaaggcccatgggttggcgccggag

SEQ ID NO: 20369 - DNA, 340 bp, Zea mays
  Clone ID: LIB3151-062-Q1-K1-E1
tcccattccgtgccaccgccgccgcgctgtttctgcgtctgcgtgcgtcgcccgcccgcccgcccgcagtgtccgcagccagagccagagccagcgcacgcgctgctccgccgacgccgaagcctcgtccgcgagcgcgtggctaagcaagcactcgagtcgagctccctccagcggcgggcgcagtgcagccaggccgcgcgcgccgcagcatgaacggcgtcggcgacgcgcacgcggccgtggccgcggccgccatggtgcagcagacgctggggatgtcgctgccgatggcggcgttcgtgcccgagcagggcagcgccaataagctgaccaggcc

SEQ ID NO: 20370 - DNA, 280 bp, Zea mays
  Clone ID: LIB3151-062-Q1-K1-E10
ggacgtcagcctagcaattagctcatttttttcagattggagaactcgacaccatgaaggtgctgatcgttgcccttgctctcctggcgctcgctgcgagcgccgactgcagtacaagcggcggctgtggctgccagacaccaccgtttcatctaccgcctccgttctatatgccgcctccgctctatctgccgtcggatcagcagccgcggacatggcaataccccactaaaccaccgaacctaaccccgtgccagcagcctggatcctgcggcgtcgc

SEQ ID NO: 20371 - DNA, 410 bp, Zea mays
  Clone ID: LIB3151-062-Q1-K1-E12
ggcacatctaaacctacaaaccatcgcatctcaacagcaacaacagtttctgccatcactgagccacctagccgtggtgaaccctgtcgcctacttgcaacagcagctacttgcatccaacccacttgctctggcgaacgtagctgcataccagcaacaacaacgtctgcaacagtttatgccagcgctcagtcaactagccatggtgaaccctgtcgcctacctacaacagcaacaattgctttcatctagcccgctcgctgtgggcaatgcacctacgtacctacaacaacagttgctgcaacagattgtaccagctctgactcagctagctgtggcaaaccctactgcctacttgcaacagttgcttccattcaaccaactggctgtgtcgaactctgctgtgtacc

SEQ ID NO: 20372 - DNA, 409 bp, Zea mays
  Clone ID: LIB3151-062-Q1-K1-E2
caactagcaacatagaaagcacaatagtgtaccttcaatggcagccaaaatattttgcctccttatgctccttggtctttctgcaagtgctgctacggcgaccattttcccacaatgctcacaagctcctatagcttcccttcttcccccgtacctctcaccagcggtgtcttcggtatgtgaaaacccaattcttcaaccctataggatccaacaggcaatcgcagctggcatcttacctttatcacccttgttcctacaacaatcatcagccctattacagcagttacctttggtgcatttattggcacaaaacatcagggcacaacaactacaacaacttgtgctagcaaaccttgctgcctactctcagcaacaacagtttcttccattcaaccaactagcctga

SEQ ID NO: 20373 - DNA, 380 bp, Zea mays
  Clone ID: LIB3151-062-Q1-K1-E3
caagctcctatagcttccctttttcccccatatctttcatcaattatagcttcagtatgtgaaaacccagctcttcaaccatataggcttcaacaagcaatcgcagcaagcaacatacctttatcgcccttgttgtgtcaacaatcgccagccctatctttggtgcagtcattggtacaaaccatcagggcacaacagctgcagcaactcgtgctacctgtgatcaaccaagtagctctggcaaacctttctccctactctccgcaacaacaatttcttccattcaaccaactgtctacactgaaccctgctgcttatttgcagcaacaactattaccatttagccagctagctactgcctactcttaacaacaacaact

SEQ ID NO: 20374 - DNA, 404 bp, Zea mays
  Clone ID: LIB3151-062-Q1-K1-E4
gcaacatagaaagtggaatccagtagcaactttttagcaacaatggagaccaagatattttccctccttatgctccttgctctttctacatgtgttgctaacgcgacaattttccctcaatgctcacaagctcctatagcttccctttttcccccataccttccatcaattatagcttcagtatgtgaaaacccagctcttcaaccatataggcttcaacaagcaatcgcagcaagcaacatacctttatcgcccttgttgtgtcaacaatcgccagccctatctttggtgcagtcattggtacaaaccatcagggcacaacagctgcagcaactcgtgctacctgtgatcaaccaagtagctctggcaaacctttctccctactctccgcaacaacaatttct

SEQ ID NO: 20375 - DNA, 411 bp, Zea mays
  Clone ID: LIB3151-062-Q1-K1-E6
gcaacatagaaagcacaatagtgtaccaactttgtcagccaaaatattttgcctccttatgctccttggtatttctgcaagtgctgctacggcgaccattttcccgcaatgctcacaagctcctatagcttcccttcttcccccgtacctctcaccagcggtgtcttcggtatgtgaaaacccaattcttcaaccctacaggatccaacaggcaatcgcagctggcatcttacctttatcacccttgttcctacaacaatcatcagccctattacagcagctacctttggtgcatttattggcacaaaacatgagggcacaacaactacaacaacttgtgctagcaaaccttgctgcctactctcagcaacagcagtttcttccattcaaccaactagctgcattgaactc

SEQ ID NO: 20376 - DNA, 330 bp, Zea mays
  Clone ID: LIB3151-062-Q1-K1-E7
attttgagcattcagaaacacaccaagcgattcacattagcaacaacctaacaacaatggctaccaagatattatccctccttgcgcttcttgcgctttttgcgagcgcaacaaatgcgttcattattccacaatgctcacttgctccaagttccattattacacagttcctcccaccagttacttcaatgggcttcgaacacccagctgtgcaagcctataggctacaacaagcaattgcggcgagcgtcttacaacaaccaatttcccagttgcaacaacaatccttggcacatctaacaatacaaaccatcgcaacgcaacagcaac

SEQ ID NO: 20377 - DNA, 329 bp, Zea mays
  Clone ID: LIB3151-062-Q1-K1-E8
aggaagcgccgtgcatccatcgacatctttttattagcctcaacaactcatctgcgtcatcagtctatacgtaggcacgagactttgggtccactcaccatcaacacgcaactcctatcaccttgggctcaacgtgaagacccactctggccatgccaacatcccggggtgcacgggctatatggtgttacacatatgagaacggacttgtggacatactgaaagagcatgctgatatcccaatgtacaaagcacacaacggttggacaacagagggctgggtcagtattaccaacccgttcaacgacacgtttgcttgggctcatttt

SEQ ID NO: 20378 - DNA, 342 bp, Zea mays
  Clone ID: LIB3151-062-Q1-K1-E9
ctctcttgctagctcctctttgtccttcagttcagatctctcagaagagtagagtgcctgccagtgccatgtcgctgccagtcacacagcccattgcatgagcagaagggcaaggaagcttgggagggtgtaagctgaggatcggtgacgtgcaaatgcggccacggggaacctctctgcaacaaagctccgcatctgctctcggcgacggcgatgcggcgctaccgaagaagaagaggaaccggccaggcaatccgaaacctgatgcggaggtgatcgcgctgtcgcctcgaacgctgctggcgacgaaccggttcgtgtgcgaggtgtgcagcaagggct

SEQ ID NO: 20379 - DNA, 207 bp, Zea mays
  unsure at all n locations
  Clone ID: LIB3151-062-Q1-K1-F1
acagtgcactcggcgctggtcacctacacctncatgctcgcgctcctgtccctctgcccgcccttcgtcatcctcctgtggtacacgatggtgcacgcggacggatcggtggtgcggacttacgagcacctcagggatcacggcgtgctcgaggggctaaaggccatctggcccatgcccaccctcgtcgcgtggaagatcatcttc

SEQ ID NO: 20380 - DNA, 397 bp, Zea mays
  unsure at all n locations
  Clone ID: LIB3151-062-Q1-K1-F10
tcagcattcagaaacacaccaagcgaagcgtactaacaacaacctaacaacaatggctaccaagatattagccctccttgcgcttcttgcccttttagtgagcgcaacaaatgcgttcattattccacagtgctcacttgctcctagtgccattattccacagttcctcccaccagttacttcaatgggcttcgaacatccagccgtgcaagcctacaggctacaactagcgcttgcggcgagcgtcttacaacaaccaattgcccaattgcaacaacaatccttggcacatctaaacctacaaaccatcgcaacgcaacagcaacaacagtttctgccatcactgagccacctagccgtggtgaaccctgtcgnctacttgcaacagcagctactt

SEQ ID NO: 20381 - DNA, 381 bp, Zea mays
  Clone ID: LIB3151-062-Q1-K1-F11
cttcagaccattagctttatctactccttatcgcagaagaacccgatcgacaccatgagggtgttgctcgttgccctcgctctcctggctctcgctgcgagcgccacctccacgcatacaagcggcggctgcggctgccagccaccgccgccggttcatctaccgccgccggtgcatctgccacctccggttcacctgccacctccggtgcatctcccaccgccggtccacctgccgccgccggtccacctgccaccgccggtccatgtgccgccgccggttcatctgccgccgccaccatgccactaccctactcaaccgccccggcctcagcctcatccccaaccacacccatgcccgtgccaacagccgcatccaagc

SEQ ID NO: 20382 - DNA, 338 bp, Zea mays
  Clone ID: LIB3151-062-Q1-K1-F12
ggcaatcacagctggcatcttacctttattttccttgttcctccaacaatcatcagccctattacatcagttacctttggtgcatttattggcacaaaacatcagggcacaacaactacaacaacttgtgctagcaaaccttgctgcctactctcagcaacagcagtttcttccattcaaccaactagctgcattgaactctgcttcttatttgcaacaacaacaactaccattcagccagctacctgctgcctacccccagcaatttcttccattcaaccaactggcagcattgaactctcctgcttatttacagcagcaacaactactaccattca

SEQ ID NO: 20383 - DNA, 337 bp, Zea mays
  Clone ID: LIB3151-062-Q1-K1-F2
aaggatataaagctcacgaggcgatccatcattagtattttcaacatacaacgacactgtacacttcaagagctttgtgaaggcgaagctccgtgtaccattggtcggatatgctctggcgcgatctataacaggctttctatggggatcgtgagagaaggatctttttaaagttagtgaaaaccatattatttgaccctactagatacagcaggcagtcagagacggactcttagcttcatgcacgctagaagctataacacttaacattcatgattgattattggacgtgagtggattaatctggcctatacattttatcgcagcagatgcgaca

SEQ ID NO: 20384 - DNA, 377 bp, Zea mays
  Clone ID: LIB3151-062-Q1-K1-F3
catctgcgtacacggtctccctcttcctgtctgttttagagtgagagtgaggcagcgagtgggagacaaggggaaatggggaagggagcgcaagggagcgatgcggcggcggcgggcggcgaggtggaggagaacatggcggcgtggctggttgccaagaacaccctcaagatcatgcccttcaagctcccgcccgtcggcccttatgatgtccgcgtgcgcatgaaggcagtggggatttgcggcagcgatgtgcactacctaagggagatgcgcatcgcgcacttcgtggtgaaggagccgatggtgatcgggcacgagtgcgcgggcgtggtcgaggaggtgggcgcccgcgtgacgcacctgtccgtgggcga

SEQ ID NO: 20385 - DNA, 411 bp, Zea mays
  Clone ID: LIB3151-062-Q1-K1-F4
attttgagcattcagaaacacaccaagcgaatttctctagcaacgacctaacaacaatggctaccaagatattagccctccttgcgcttcttgccctttttgtgagcgcaacaaatgcgttcattattccacaatgctcacttgctcctagtgccattattccacagttcctcccaccagttacttcaatgggcttcgaacacctagctgtgcaagccaacatgcaacaacaagcgcttgcggcgagcgtcttacaacaaccaattgcccaattgcaacaacaatccttgccacatctaacaatacaagccatcacaacgcaacagcaacaacagttcctaccagcactgagccacctagccatggtgaaccctgccgcctacttgcaagagcagctgcttgcatccaacc

SEQ ID NO: 20386 - DNA, 410 bp, Zea mays
  Clone ID: LIB3151-062-Q1-K1-F5
cagattttgtagagccatctaagacaaaagtcactactcttccaaatggcgtcaagatcgcctcggagacatcatcgagcccagcagcatctgtgggtctgtacattgactgtggttccatttacgaaacacctgcttcatctggagtatcacatctgttggagagaatggccttcaagagcacagtgaatcggactcacttacggttagttcgtgaggtagaagccattggaggaaatgtctctgcatcagcttcccgtgaacaaatgagctatacctatgatgcattgaagagctatacaccagaaatggttgaagttctcattgacagtgtgaggaatccagcattcctcgattgggaagtcaaagagcagctccagaacataaaatctgaaatagctgatgcgtct

SEQ ID NO: 20387 - DNA, 362 bp, Zea mays
  Clone ID: LIB3151-062-Q1-K1-F6
gctgtgggacatcacacgcaccgctacgatttctttctgcgagcgagatcttaccaccgcagcggcgccgtggccatggcgggaaggtatcaccaggatcagggcggggacgggggcgcgtccatggaggtagtcagcacgccgaaccaggagctggcccttaccaactgcgcatacgtctctcccgctgacctccgccgcttccccaacgggctcgccctcgttgccgacgcctgggtcttcaccctacgtgaccacaatgctgttgcaagtggacgcattgccttgaatgctattcagcgtcggcaggcaaaggtttcagctggggattctgttactggtagcagttttgtccccctgat

SEQ ID NO: 20388 - DNA, 401 bp, Zea mays
  Clone ID: LIB3151-062-Q1-K1-F7
ttctatcagtaccatcaatcatcattcatcttagtagtataggcaccaaatcaaatctgcaacatcaattatctaactccaaaaaccatgaagctggtgcttgtggttcttgctttcattgctttagtatcaagtgtttcttgtacacagacaggcggctgcagctgtggtcaacaacaaagccatgagcagcaacatcatccacaacaacatcatccacaaaaacaacaacatcaaccaccaccacaacatcaccagcagcagcaacaccaacaacaacaagttcacatgcaaccacaaaaacatcagcaacaacaagaagttcatgttcaacaacaacaacaacaaccgcggcaccaacaacaacaacaacaacagcaccaacaacaacattaatgtga

SEQ ID NO: 20389 - DNA, 360 bp, Zea mays
  Clone ID: LIB3151-062-Q1-K1-F8
gaccaacaagcaacatagaaagtggaatactttagcaacaatagagcaacaatggcggccaagatattttccatccttatgctccttgctctttctgcatgtgttgctaacgcgaccatttttcctcaatactcacaagctcctatagctgcccttcttcccccataccttccatcaatgaccgcttcagtatgtgaaaacccagcccttcaaccctacaggctccaacaagcaatcgcaacaagcaacttacctttatcacccctgttctttcaacaatcgccagccctatctttggtgcagtcattggtacaaaccatcagggcacaacagctgcagcaactcgtgctaccagtgatc

SEQ ID NO: 20390 - DNA, 108 bp, Zea mays
  Clone ID: LIB3151-062-Q1-K1-G1
ggggagtcttttgaggatgctcttgctcgtgtttttcgctgtcttggaggtggaggtgctacggacaatgctgatagtgatagcgacctggaagtggttactgaatct

SEQ ID NO: 20391 - DNA, 306 bp, Zea mays
  Clone ID: LIB3151-062-Q1-K1-G10
ccgctgcttatttgcagcagcaaatattattaccatttagccagctagctgcagcaagccgtgcttccttcttgacacagcaacagttgctgcctttctaccagcagtttgcggctaaccccgcaaccctcttacaactacaacaattgttgccctttgtccaacttgctttgacaaacccagcagcctcctaccaacaacacataattggtggtgccctcttttagattgcttattagttgtaattcaataatcaagttttttagaatctggacatgaactacttatttctggatggcccataca

SEQ ID NO: 20392 - DNA, 391 bp, Zea mays
  Clone ID: LIB3151-062-Q1-K1-G12
ctccatcgtcttgaggcgtgcgcagtcttttttgtcctcggcaccgcggcggttgaggtgctcatcccggtagcggcattggttggcatcgctttcgcgttgttgcagtggtatgtggtggccagagtccccgtgccttcgcacgccggcgaggacggcggtggaggaggcaataagaacgtgagggaggaggaagagcatgtggaggaggacggcatggactaccttctcgtggaggcccggtgcgccgagaatcagcgcgccatcttcgtcggcgccacgtcgttcctgctaaccgagtacaagtacctggcccggttcacggcggcgttcgcgggggtgaacttcgtgttcctggggtcggggcaacggttcaacgcgccccctgggc

SEQ ID NO: 20393 - DNA, 261 bp, Zea mays
  Clone ID: LIB3151-062-Q1-K1-G2
aatcgctcactcgctgtcgtcggctacctgttttttggcgacacccaacactaccctgcttgccgcgcttgcattgaggggggagcggccggtgcggaaggaatcgacacagagttcagttcacatggccgctgaattcagagaacggcaactgcatagcctgggcagcgagagatccttctggagttctctcaccacacagttttaaccgcagagcattgcaaagcggcgatgtttcgttgaagatcatatactgtggag

SEQ ID NO: 20394 - DNA, 240 bp, Zea mays
  Clone ID: LIB3151-062-Q1-K1-G3
ataattttggtctgcttccgtcactgattcttcctgttctgttgccggcaacagaggcccagagaggcgccaatccgccggctggatctgaaccatgaacaagcaatctgatgggcagggggtggagagggttgctgaggaaaaccaacttgatgagaaagagttagaaaggaagctgaaaaaagatcaaatggcaaaagagaaagatgagaagaaacttaaggcaaaacaaaaggaggc

SEQ ID NO: 20395 - DNA, 350 bp, Zea mays
  Clone ID: LIB3151-062-Q1-K1-G4
gtggaatccagtagcaacaatagagcaacattggttaccaagatattttccctccttatgctccttgctctttctacatgtgttgctaacgcgacaattttccctcaatgctcacaagctcctatagcttccctttttcccccataccttccatcaattatagcttcagtatgtgaaaacccagctcttcaaccatataggcttcaacaagcaatcgcagcaagcaacatacctttatcgcccttgttgtgtcaacaatcgccagccctatctttggtgcagtcattggtacaaaccatcagggcacaacagctgcagcaactcgtgctacctgtgatcaaccaagtagc

SEQ ID NO: 20396 - DNA, 288 bp, Zea mays
  Clone ID: LIB3151-062-Q1-K1-G5
gaccccataacatcattctacgcacaagcgtttaccaacactggcgactccatgatggtgccgctttatgctctttggtctctgtgtattgctgctagcggccactatactcatacaatggtgagatgctgctgtcagtcaccttcttcggttgatcctactgacgacggtgcatttgccaccgtgagaacacctgtcatctacggtgcatgatccaacgggggatcacatgtcgcctccggcctatatgacactggcggttcatgtgctgatgacggttaatacagc

SEQ ID NO: 20397 - DNA, 82 bp, Zea mays
  Clone ID: LIB3151-062-Q1-K1-G6
agaccgtgaacttcatctactccagagcgcttactaacgcgaccgacaccatgagggtgctgatgcgtcccgctcgctctac

SEQ ID NO: 20398 - DNA, 349 bp, Zea mays
  Clone ID: LIB3151-062-Q1-K1-G7
ccaaaccctagacctaaacggctccatgctgtgagaccaccaacagtgtccatggctctggacgccccggtggagcgacgggacgaggtacagatcgcgatggggaacggaaacggcgtggcgccgtctcaaccgtcgcggccagccggtcggccaacggctgctgcggcggcagcgccatacgcggacaggcggctgcggctgaacccaaatgcggatcacaagccggaagactacagcgacgtgcgcggcgagtacgcgccggccgtgtacagcgcactcgagcggcatcttccacccagccttattgatgccgaccgcgatgtcaagctacactttatgcgggaca

SEQ ID NO: 20399 - DNA, 389 bp, Zea mays
  Clone ID: LIB3151-062-Q1-K1-G8
ggacgtcagcctagcaattagctcatcgatttcagattggagaactcgacaccatgaaggtgctgatcgttgcccttgctctcctggcgctcgctgcgagcgccgcctccagtacaagcggcggctgtggctgccagacaccaccgtttcatctaccgcctccgttctatatgccgcctccgttctatctgccgccgcagcagcagccgcagccatggcaataccccactcaaccaccgcagctaagcccgtgccagcagttcggatcctgcggcgtcggcagcgtcggcagcccgttcctgggccagtgcgtcgagttcctgaggcaccagtgcagcccggcggcgacgccctacggcttgccacagtgccaggcgctgcaacagcag

SEQ ID NO: 20400 - DNA, 301 bp, Zea mays
  Clone ID: LIB3151-062-Q1-K1-G9
catctgcgtacacggtctccctcttcctgtttgtagtagagtgagagtgaggcagcgagtgggagacaaggggaaatggggaagggagcgcaagggagcgatgcggcggcggctggcggcgaggtggaggagaacatggcggcgtggctggttgccaagaacaccctcaagatcatgccctttaagcttccgcccgtcggtccttatgatgtccgcgtgcgcatgaaggcagtggggatttgcggcagcgatgtgcactacctaagggagatgcgcatcgcgcacttcgtggtgaaagagc

SEQ ID NO: 20401 - DNA, 397 bp, Zea mays
  Clone ID: LIB3151-062-Q1-K1-H1
cccgatcgacaccatgagggtgtggctcgttgctttcgctctcctggctctcgctgcgagcgccacctccacgcatacaagcggcggctgcggctgccagccaccgccgccggttcatctaccgccgccggtgcatctgccacctccggttcacctgccacctccggtgcatctcccaccgccggtccacctgccgccgccggtccacctgccaccgccggtccatgtgccgccgccggttcatctgccgccgccaccatgccactaccctactcaaccgccccggcctcagcctcatccccagccacacccatgcccgtgccaacagccgcatccaagcccgtgccagctgcagggaacctgcggcgttggcagcaccccgatcctgggccagtgc

SEQ ID NO: 20402 - DNA, 130 bp, Zea mays
  Clone ID: LIB3151-062-Q1-K1-H12
acggggtcttcagaccattagctttatctactcttagcgcagaagaacccgatcgacaccatgagggtgttgctcgttgccctcgctctcctggctctcgctgcgagcgccaccttcacgcatacaagcg

SEQ ID NO: 20403 - DNA, 350 bp, Zea mays
  Clone ID: LIB3151-062-Q1-K1-H2
gagaccaacaagcaacatagaaagtggaatccagtatcaacaatagagcaacaatggcgaccaagatattttccctccttatgctccttgctctttctgcatgtgttgctaacgcgacaattttccctcaatgctcacaagctcctatagcttcccttcttcccccataccttccatcaatgatagcttcagtatgtgaaaacccagctcttcaaccctataggctccaacaagcaatcgcagcaagcaacatacctttatcacccttgtttcaacaatcgccagccctatctttggtgcagtcattggtacaaaccatcagggcacagcagctgcagcaactcgtgcta

SEQ ID NO: 20404 - DNA, 390 bp, Zea mays
  Clone ID: LIB3151-062-Q1-K1-H3
gaccattagctttatctactccagagcgcataataacccgatcgacaccatgagggtgttgctcgttgccctcgctctcctggctctcgctgcgagcgccacctccacgcatacaagcggcggctgcggctgccagccaccgccgccggttcatctaccgccgccggtgcatctgccacctccggttcacctgccacctccggtgcatctcccaccgccggtccacctgccgccgccggtccacctgccaccgccggtccatgtgccgccgccggttcatctgccgccgccaccatgccactaccctactcaaccgccccggcctcaggctcatgcccagccacacccatgcccgtgccaacagccgcatccaagcccgtgccagctgca

SEQ ID NO: 20405 - DNA, 390 bp, Zea mays
  Clone ID: LIB3151-062-Q1-K1-H4
caacaagcaacatagaaagtggaatacagtatcatcaatagagcaacaatggcggccaagatattttccatccttatgctccttgctctttctgcatgtgttgctaacgcgaccatttttcctcaatactcacaagctcctatagctgcccttcttcccccataccttccatcaatgaccgcttcagtatgtgaaaacccagcccttcaaccctacaggctccaacaagcaatcgcaacaagcaacttacctttatcacccctgttctttcaacaatcgccagccctatctttggtgcagtcattggtacaaaccatcagggcacaacagctgcagcaactcgtgctaccagtgatcagccaagtagctttggcaaacctttcttcctac

SEQ ID NO: 20406 - DNA, 158 bp, Zea mays
  Clone ID: LIB3151-062-Q1-K1-H5
cccgaccgggaatggaccgggtcggcccacgccacgcgattcagctctatctacatccacgagcgcaggaagatccttgtatctgacaccactgaggggtgggttgctcagttgcgcgctcagctctcactggggctctcggctggcgagcccgccac

SEQ ID NO: 20407 - DNA, 334 bp, Zea mays
  unsure at all n locations
  Clone ID: LIB3151-062-Q1-K1-H6
accggnactgaatgcccggaccgacgcacgcgtacctagcaacatacatagtgaagtacactatctttatcttagcaccaatgggagccaagattggtgcccttcttgccctccttgctctttcagcaagcgctgctacctcgacttttattccacaatgctcacaacaatacctctctccggcgacagccgtgggatttcaatacccaactatacaatcctacatggtacaagaggccatccaagcaagcatcttacggtcattagcattaaccctccaacaaccatatgctctatggcaacagccatccttagtgcatctgtttttccaaag

SEQ ID NO: 20408 - DNA, 356 bp, Zea mays
  Clone ID: LIB3151-062-Q1-K1-H7
ggtcttcagaccattagctttatctactccatagcgcagaagaacccgatcgacaccatgagggtgttgctcgttgccctcgctctcctggctctcgctgcgagcgccacctccacgcatacaagcggcggctgcggctgccagccaccgccgccggttcatctaccgccgccggtgcatctgccacctccggttcacctgccacctccggtgcatctcccaccgccggtccacctgccgccgccggtccacctgccaccgccggtccatgtgccgccgccggttcatctgccgccgccaccatgccactaccctacttaacccgcccggccctaagcttattcccaggcacaacc

SEQ ID NO: 20409 - DNA, 314 bp, Zea mays
  Clone ID: LIB3151-062-Q1-K1-H8
cacatatctactatactatactctaagtagcttggacaccaccgccatggcagccaagatgcgtgcattgttcgctctcctagctctttgtgcaagcgccactagtgcgacccatattacacggcacttgccaccagtcatgccattgggtaccatgaacccatgcatgcagcactgcatgatgcaacaggggcttgccagcttgatggcgtgtacgtccctgatgctgcacaaactgttgggcttaccgatttagacgatgccagtgatgatgccacagatgatgacgcctaacatgatgtaaccattgatga

SEQ ID NO: 20410 - DNA, 395 bp, Zea mays
  Clone ID: LIB3151-062-Q1-K1-H9
attttcagcattcagaaacacaccaatttttttgcactagcaacaacctaacaacaatgggtaccaatatattagccctccttgcgcttcttgcccttttagtgagcgcaacaaatgcgttcattattccacagtgctcacttgctcctagtgccattattccacagttcctcccaccagttacttcaatgggcttcgaacatccagccgtgcaagcctacaggctacaactagcgcttgcggcgagcgtcttacaacaaccaattgcccaattgcaacaacaatccttggcacatctaaacctacaaacaatttgaacgcaccagcaacaacagtttttgtcatcactgagacacctagccgtggtgaacccttttgctactttgaacagcaaa

SEQ ID NO: 20411 - DNA, 506 bp, Zea mays
  Clone ID: LIB3151-010-E8-R1A
gggggcgcggtcgccgggtggtgcgggggcggggtgcggggggggtcgggcgggcgggcggcggggcggggcccgcgtcgggtggggcggggggggggcggcgccgggggggtgcgggtggggggccgggctggggtggggcgcggggcgtggcgcgggcggtgggggggggggggcgggggggggggggcgggcggggggcgcggcgggtggggtgggggcgggggggcggtggggggcgggggggggtggggtggggggggcggggcggggggcggggggggggggtgggggggggggggggggggggggggggtgggggcggcgcggggggggggggggggggggggggggggggggggggtgggggggggggggggcgcggggggggggggggggtgggggtggcgtggggggggggggggggtgggtgggggggggtggggggggggggggcgggccgggcggggggggggggggggcggggggggggggcggggggtggg

SEQ ID NO: 20412 - DNA, 515 bp, Zea mays
  Clone ID: LIB3151-010-E8-F1A
attcggctcgagctcgagcgctcgagccgctcgagccgctcgagttccgttaacgctctccaatacaaaataaccactcactgaatattcggtcgaagatgtccgccgccgaagaagctaaagttcccgccgtcgaaaagccggtggaggaggtgaaggcgccgaagcttgccaaggagaagaaacctaaggctccgaaggaaaagaagccgaaacaggccaaaactgcttctcatcctccatatctccagatgattaaggacgctttgattgctctgaacgagaaaggaggatcgagtccatatgcgatacgaagtacatggaggagaagcacaaggcggtgcttcctgcgaatttcaagaagatactaggtctgcaactgaagaaccaagctgcgagagggaaactcgtcaagatcaaggcttcgtacaagttagccgaagccgcgaagaaggtgaaggagagcaccgccaaagcgacgaaggaatcgcgtccgaaacgaaacaaaatcgcaa

SEQ ID NO: 20413 - DNA, 435 bp, Zea mays
  Clone ID: LIB3151-023-F1-F1A
aatcttaaacgctgtcaccatataatcatttctgcaaaaataatatcacagcaatttgcattaactaaggcggctttctgacattttcttttcactacagttgttctattagacgacatcacttcatcaactaatgaagggaaaaggctatagtttaattacaaagcaacacaatggggaacaaaaaaaaatggagactactttctcgatcattcttgttatcatgttgtcgattggctgcacagcacagggcaacagcaagctgttgaaaacccgccatgatctataaggctatacaagaaactcatctatccagaaaatctttgcagcagaacatcggtgtgctgcatgggtgaaggatcagcaagctcgaagtatcatgggagcagcgttcctgtttctcattggcaaaatggcagcatcaagaaaagcctt

SEQ ID NO: 20414 - DNA, 483 bp, Zea mays
  Clone ID: LIB3151-024-Q1-K1-E3-F2A
actctatattggaggccgcgctaatcaacttttatacacgaattattaattattttccagggcactccgtcacaatcaccatacagatagacccgagcaccaatctccattgcaatcgttactacaagaggaggatcatcgacaacacctgagacccggagattaaacacatggcaatcgtaggatggccacatgcagctgcacgcacactgattttgatttgtgttgagatggcggggcctccagctcactcccagatgccgacctccatgaacccgtccttgggaggcgcagacccggaacatgccggtgcagttgaaatcgtacgccacctagacggtgccggagacggcgatgaggccggcgaatccctggtcgaggcgctccttgactcaaaattctaccggcctgttgcaggggcaggaccctgtactccatgacggtggccaactcgcgcgcgagcgtgcaaaggatgatggcctc

SEQ ID NO: 20415 - DNA, 487 bp, Zea mays
  Clone ID: LIB3151-024-Q1-K1-E3-R2A
ttcacgcatcgcacggggaacagaacaccgatcgatcgatccctcgagaagcagagacaagcagcccgcccgtccgcccgcacacatagagacagagagaatcaagccgccgccgaccagagacatggcgccctgggccattgccatccacggaggcgcgggcgtggacccgaacctcccggagcaccggcaggaggaggcgaagcgcgtgctggcgcggagcctgcaggtgggcgtggacctgctgcgcgcgggcgcgcaggcgctggacgtcgaggaggccgtggtgcgcgagctggagacggaccccttcttcaactcggggcgcgggtccgcgctcacccgcgccggcaccgtggagatggaggccagcatcatggacggccgcggccgccgatgctgcgccgagtccggcgtatccaccgtcaagaaccccaggtccctggcgcgccgcgtcatggacaactcgccccactcgtacctcgcc

SEQ ID NO: 20416 - DNA, 686 bp, Zea mays
  Clone ID: LIB3151-008-Q1-K1-E4-M1
gttttatgggttcgagcccgatgtggtggtcaggaccaccaccgtcgccgtggagccgcggtttagggaaatggtgggcgctggtagggccattcgtggtgaaggccgtcgggttcctgctgctcgcgggcctcttgttccgggtgctctggtcctttccgtcctctccggcgccggcgttgcagatcacaaaaggaaaatgcagtcttttcaatggggaatggataccaaacccctctggtccagcctatacaaatgcaagctgtcgatttattgacgatcaccagaactgcatgatgaatggtagacctgataaggaatatctacattggaagtggaaaccttatggatgtgatcttccaccatttgatgcagtaagatttctagattctatgagaaacaaaggttggggactaattggtgactccatcctccgtaaccaagttcagtcattgctttgccttctgtctaaggctgaagaacctgttgaggtttaccatgataacgaattcaaaaacaggagatggcacttccaattctacaacttcacagtgtccatcgtctgggctcctttcctcatcaaatctggtatttttgagaatgaggatggcgtgtctacctctgaaatacagctccaccttgatatactcgatgctaactggacaagtcagtttgagagctttgac

SEQ ID NO: 20417 - DNA, 629 bp, Zea mays
  Clone ID: LIB3151-008-Q1-K1-E4-N1
acaaatccataaggttttcatggatccagggccattttcataacaagatcattccatgcatcaatggggcctggtacacaccagtgcaagcaatcattttggacgggcgtggatttactgctgccccttgcaaagggatagggtgttctgtaaggcccaacgtggccgtccggtctcaaggacaaaaggctgtaggtatccatcagtctcagtctatccacgtccgctgaacccctaagcgcggttacagccttgttgaaggactcaagctcgatctgtctcatgacacgctcgatgttaccctctctgtactctcccttggtggagggcaatttcctgcgacaagacccaccggtgaaccactctccatcctcgaagtgatcaggtgaccaggtcctgaaaaaaattactggcttgggtttcgctgaaacgatgaagttgaaaacgttttgtaaagttttccgatacaggggctcaaaaccaagttcagcgaggttcttgttctgagaattatgaccaccaaccactgccccgttctcccagtaaaccgctgtcctcaaaaaccattgtccgccagaaataataatatagtcaaagctctcatactgacttgtccagttagcatcgag

SEQ ID NO: 20418 - DNA, 397 bp, Zea mays
  Clone ID: LIB3151-001-P1-K1-A5
caaaacattcttctatcagtaccatcaatcatcattcatcttagtagtataggcacggaatgaaatctgcaacatcaattatctaactccaaaaaccatgaagctggtgcttgtggttcttgctttcattgctttagtatcaagtgtttcttgtacacagacaggcggctgcagctgtggtcaacaacaaaagccatgagcagcaacatcatccacaacaactacaacaacttgtgctagcaaaccttgctgcctactctcagcaacagcagtttctttcattcaaccaactagctgcattgaactctgtttttatttgcaacaacaacaactaccattcagccagctatctgctgcctacccccagcaatttcttccattcaaccaactgcaagct

SEQ ID NO: 20419 - DNA, 233 bp, Zea mays
  unsure at all n locations
  Clone ID: LIB3151-001-P1-K1-A6
gacgccgcgcggcgccgacggcgtcataccgactaccgaagagctgtaactgcagggctcggtcggcgtggcccggagagaaagcttaaaaagcaaggggatttaccagactgaacacttgaatcttgaagcgggggcaataatgagaggtctcgaccttgataagacgctttatggaangcagcagggccccgatatgggcggttgccgagaaagtagacagggggagttga

SEQ ID NO: 20420 - DNA, 283 bp, Zea mays
  unsure at all n locations
  Clone ID: LIB3151-001-P1-K1-B4
tcatctatgctctgtcttctgatgtgttgtaacgcgaccatttttcctcaatactcacaagctcctatagctgcccttcttcccccataccttccatcaatgaccgcttcagtatgtgaaaacccagcccttcaaccctacaggctccaacaagcaatcgcaacaagcaacttacctttatcacccctggttctttcaacaatcgccagccctatctttggtgcagtcattggtacaaaccatcanggcacaacagctgcagcaactcgtgctaccagtgatc

SEQ ID NO: 20421 - DNA, 332 bp, Zea mays
  Clone ID: LIB3151-001-P1-K1-B5
gtcgagcgcaacattcccgaggacgaccctcgcaaccacgcggtgatcgccgacaacgtgggggacaacgtcggcgacatcgccgggatggggtcggacctgttcgggtcgtacgcggagtcgtcctgcgcggcgctcttcgtggcttacatcttctccttcggggcggagcacaacctcacggggatgatgtacccgctgctcatcagcgccgtgggcctgctcgtgtgcgcgatcaccactgtcgtcgccaccgacgttaccgaggtgaagggttccgacgaggttgggccggcgctcaagcgggagatcctcatcttcatcgtgcttat

SEQ ID NO: 20422 - DNA, 184 bp, Zea mays
  Clone ID: LIB3151-001-P1-K1-B6
ttgccagcagctcatgcaggtggagccgcagcaccggtaccaggcgatcttcggcttggtccgccaggccattctgcagcagcagccgcaaagcggccaggtcgcggagctgttggcggcgcatatagcgcagcaactgacggcgatgtgcggcctgcatcagcccactccatgcccttacgct

SEQ ID NO: 20423 - DNA, 302 bp, Zea mays
  Clone ID: LIB3151-001-P1-K1-C5
agttttatatactacatagcgcacaagaatcttatcgacaccatgagcgtgcttctcgcggccctggctctcctgactgtcgctgagagccccacctccacgcatacaagcagagcctgcggattgcaaccaccgccgccggatcatataccgtcgccggtgcatatatcacctccggttcacctgccaccttcggtgcatatcccaccaccgatccacctgccgacatcggtccacctgccaacgacgattcatgtgcccccgtcggttcatctgacaacgccaccatgccactaccttac

SEQ ID NO: 20424 - DNA, 204 bp, Zea mays
  unsure at all n locations
  Clone ID: LIB3151-001-P1-K1-C6
cacgcatacaagcggcggctgcggctgccagccaccgccgccggttcatctaccgccgccggtgcatctgccacctccggttcacctgccacctccggtgcatcttccaccggcggtccacctgccgncgccggtccacctgccaccgccggtccatgtgccgccgccggttcatctgccgncgccaccatgccactaccctac

SEQ ID NO: 20425 - DNA, 373 bp, Zea mays
  unsure at all n locations
  Clone ID: LIB3151-001-P1-K1-D5
ctcgtcttcagaccattagctntatctactccagagcgcagaagaacccgatcgacaccatgagggtgtggctcgttgccctcgctctcctggctctcgctgcgagcgccacctccacgcatacaagcggcggctgcggctgccagccaccgccgccggttcatctaccgccgccggtgcatctgccaccttcggttcacctgccaacttcggtgcatctcccaccgccggtccacctgccgccgccggtccacctgccaccgncggtccatgtgccgncgccggttcatctgccgccgccaccatgccactaccctaactcaaccgcccggcctcagcctcatncccagccacacccatgcccgtgccaaca

SEQ ID NO: 20426 - DNA, 334 bp, Zea mays
  Clone ID: LIB3151-001-P1-K1-E4
tcgggcagaccaggtgagcagccacatgaacactagcaccgacgcattcgcagccatatgtatagacctcggtgtcggcgggagggacaagaagacgaaccacacaacgccgcactccgacgatgattatgtcaagcttcatgtcaagctctaccgcttgttggacaggaggaccaagagcaactccaatggtgacattcttaagaggcttttcatgaggataatcaagagcccaccaatttgcatgcgccgccttgtgaagttcatggaaaggaaggagaaaagcattgctgtgaatgttggcgcaatcgcagatgacaagacggatcacgag

SEQ ID NO: 20427 - DNA, 406 bp, Zea mays
  Clone ID: LIB3151-001-P1-K1-E5
gcccggattcccggtcgacccacctccgagtgtacaacaatggcagccaaaatatttgcttcttatctcctggctttctcaaggtggggccaaccatttccaaatgctcacaactctatagcttccttttcccatacctataccacgtgctttaattttttacccaattgttaaccctattgtcctactgttttttacattctttaccatttttctttgttctttaatttttttctcattcaactatttcttttttattattttttttttttttttttctattctttatatcttttctttttttcttttttattttttttccttttctttttttttctttatctttttttttctatttttttctttttttatttttttcttattttttttctttttttttttattt

SEQ ID NO: 20428 - DNA, 442 bp, Zea mays
  unsure at all n locations
  Clone ID: LIB3151-001-P1-K1-E6
attttgagcattcagaaacacaccaagcgaagcacattagcaacaacctaacaacaatggctaccaagatattatccctccttgcgcttcttgcgctttttgcgagcgcaacaaatgcgttcattattccacaatgctcacttgctccaagttccattattacacagttcctcccaccagttacttcaatgggcttcgaacacccagctgtgcaagcctataggctacaacaagcaattgcggcgagcgtcttacaacaaccaatttcccagttgcaacaacaatccttggcacattttaacaatacaaaccatcgcaacgcaacagcaacaacaattcctaccagcactgagccacctagccatggtgaaccctgccgcctacttgcaacagcagttgcttgcatcaaacccacttgctctggcanacgtagttgcaaacc

SEQ ID NO: 20429 - DNA, 157 bp, Zea mays
  Clone ID: LIB3151-001-P1-K1-F1
tactaccatgcaaccaacttgtcacgagccctgctgccttattactgcagcaacagttgctgccattccatctacaagttgtggcaaacattgctgctttcttgcaacaacaacaattgctgccattttacccacaggttggggggaaacattaacg

SEQ ID NO: 20430 - DNA, 374 bp, Zea mays
  Clone ID: LIB3151-001-P1-K1-F3
ctgggtcttcagaccattagctttatctactccagagcgcagaagaacccgatcgacaccatgagggtggtgctcgttgccctcgctctcctggctctcgctgcgagcgccacctccacgcatacaagcggcggctgcggctgccagccaccgccgccggttcatctaccgccgccggtgcatctgccacctccggttcacctgccacctccggtgcatctcccaccgccggtccacctgccgccgccggtccacctgccaccgccggtccatgtgccgccgccggttcatctgccgccgccaccatgccactaccctactcaaccgccccggcctcagcctcatccccagccacacccatgcccgtgccaaca

SEQ ID NO: 20431 - DNA, 323 bp, Zea mays
  Clone ID: LIB3151-001-P1-K1-F5
gccgccggttcatctaccgccgccggtgcatctgccaccttcggttcacctgccacctccggtgcatctgccaccgccggttcacctgccggcgccggtccacctgccaccgccggtccatgtgccgccgtcggttcatctgccggcgccaccatgccactaccctactcaaccgccccggccttagactcattcccagccacacccatgcccgtgccaacagccgcattcaagcccgtgccagctgcagggaacctgcggcgttggcagcaccccgatcctgggccagtgcgtcgagttcctgaggcatcagtgcagaccga

SEQ ID NO: 20432 - DNA, 319 bp, Zea mays
  unsure at all n locations
  Clone ID: LIB3151-001-P1-K1-F6
gggtcttcagaccattagctttatctactccagagcgcagaagaacccgatcgacaccatgagggtgtggctcgttgccctcgctctcctggctctcgctgcgagcgccacctccacgcatacaagcggcggctgcggctgccagccaccgccgccggttcatctaccgccgccggtgcatctgccaccttcggttcacctgccaccttcggtgcatcttccaccggcggtccacctgccgccgccggtccacctggcaccgncggtccatgtgccgccgccgggttaatctgccgncgccaccatgccactaccctac

SEQ ID NO: 20433 - DNA, 400 bp, Zea mays
  unsure at all n locations
  Clone ID: LIB3151-001-P1-K1-G2
ccgcccgaattccggtcgccacgcgtcgtagcacatagaggcacatagtgtccaacaatggagccaaaatatttgcctccttatgctccttggtctttctgcaagtgctgctacggcgaccattttcccacaatgctcacaagctcctatagcttcccttcttcccccgtacctctcaccagcggtgtcttcggtatgtgaaaacccaattcttcaaccctataggatccaacaggcaatcgcagctggcatcttacctttatcacccttgttcctccaacaatcatcagccctattacagcagttacctttggtgcatttattggcacaaaacatnagggcacaacaactacaacaacttgtgctagcaaaacctgctgnctactctcagcaacaacag

SEQ ID NO: 20434 - DNA, 421 bp, Zea mays
  Clone ID: LIB3151-001-P1-K1-G3
ggatttatgggtgccatgatatccaaccttgcatttgttttccgcaacatcttctcgaagaggggcatgaaggggaagtccgtcagtggcatgaattactacgcttgcctgtcaattatgtccctggtcatactgactccatttgctatagctatggaaggccctcaaatgtgggctgctggttggcaaaaggctcttgcagaagttggacccaatgttgtctggtggattgctgcacagagcgtgttctaccaccttatataaccaggtgtcctacatgtctctcgatcagatttctccattgacattcagcattggcaatacaatgaagcgtatatcagtgattgtttcatcaatcattatcttccacactcctgtccgcgctgtcaatgcactgggagctgccattgccatccttggc

SEQ ID NO: 20435 - DNA, 238 bp, Zea mays
  Clone ID: LIB3151-001-P1-K1-G4
gtccataccattcatttattcaacaccgaagggaaaccaacccgatccacaacgggagggggttggtcctttcccttccttgccttgcttttagatggaaaccccaattcaaccaatacaagctggggttgctcttcccccccaccgccttcatttaatgtaccggggccgtggcatatcccacttccagatcactccccagttgaggtgcataccccagcgccgtttcacctggcgg

SEQ ID NO: 20436 - DNA, 322 bp, Zea mays
  Clone ID: LIB3151-001-P1-K1-G5
gcaattagctcatcgactccagattggagaactcgacaccatgaaggtgctgatcgttgcccttgctctcctggcgctcgctgcgagcgccgcctccagtacaagcggcggctgtggctgccagacaccaccgtttcatctaccgcctccgttctatatgccgcctccgttctatctgccgccgcagcagcagccgcagccatggcaataccccactcaaccaccgcagctaagcccgtgccagcagttcggatcctgcggcgtcggcagcgtcggcagcccgttcctgggccagtgcgtcgagttcctgaggcaccagtgc

SEQ ID NO: 20437 - DNA, 321 bp, Zea mays
  unsure at all n locations
  Clone ID: LIB3151-001-P1-K1-G6
gaccaactagcaacatagaaagcacaatagtgtaccaacaatggcagccaaaatattttgcctgcttatgctccttggtctttctgcaagtgctgctacngcgaccatttttccgcaatgctcgcaagctcctatagcttcccttctttccccgtacctctcaccagcggtgtcttcggtatgtgaaaacccaattcttcaaccctacaggatccaacaggcaatcgcagctggcatcttacctttatcacccttgttcctccaacaatcatcagccctattacaacagttacctttggtgcatttaattggcacaaaaca

SEQ ID NO: 20438 - DNA, 509 bp, Zea mays
  unsure at all n locations
  Clone ID: LIB3151-001-P1-K1-G8
ccgtccgcattttcaaagctattcagaaacccacaccatagcgannagcgcactatgcaaccccacctaacaacgaagtggctacgcannagatattagccgctgccttgcgcctnntcttgcccttttagtcggagcgcaacacaatcgcgnnntcattattccaaacagtgctcaaacttgctcctcagtgccattcattccaaacagttcctcccacctagttaccttcaatgggggcttcgaacaaatccagccgtgccannagcctactaggctacaactagcgcnnttgcggcgagggcgtcttaaacaacaaccacattgcccacattggcaacaacannatccttggcacaaatctaaacctacnaaaccatcgcnaacgcaaccagcannacaacagtttctgccatcaaactgagccacctagccgtggtgaaaccctgtcgcctacttgcaacagcagctacttgcattcaaaccaacttgctctggcgaacgtagct

SEQ ID NO: 20439 - DNA, 357 bp, Zea mays
  Clone ID: LIB3151-001-P1-K1-H3
ggatcgtcgaacagaacagcatgaagatggtcatcgttctcgtcgtgtgcctggctctgtcagctgccagcgcctctgcaatgcagatgccctgcccctgcgcggggctgcagggcttgtacggcgctggcgccggcctgacgacgatgatgggcgccggcgggctgtacccctacgcggagtacctgaggcagccgcagtgcagcccgctggcggcggcgccctactacgccgggtgtgggcagacgagcgccatgtaccagccgctccggcaacagtgctgccagcagcagatgaggatgatggacgtgcagtccgtcgcgcagcagctgcagatgatgatgcagcttgagcgtg

SEQ ID NO: 20440 - DNA, 293 bp, Zea mays
  Clone ID: LIB3151-001-P1-K1-H4
gcttcaacaagcaatcgcagcaagcaacatacctttatcgcccttgttgtgtcaacaatcgggagccctatctttggtgcagtcattggtacaaaccatcagggcacaacagctgcagcaactcgtgctacctgtgatcaaccaagtagctctggcaaacctttcttcctactctccgcaacaacaatttcttccattcaaccaactgtctacactgaaccctgctgcttatttgcagcaacaactattaccatttagccagctagctactgcctactctcaacaacaacaac

SEQ ID NO: 20441 - DNA, 277 bp, Zea mays
  unsure at all n locations
  Clone ID: LIB3151-001-P1-K1-H5
cccacgcgtccgcccacgcgtncgaatattttgagcattcagaaacacaccaagcgaagcacgggagcggcgaacctaacaacaatggctaccaagatattatccctccttgcgcttcttgcgctttttgcgagcgcaacaaatgcgttcattattccacaatgctcacttgctccaagttccattattacacaggtcctcccaccaggtacttcaatgggcttcgaacacccagctgtgcaagcctataggctacaacaagcaattgcggcgagcg

SEQ ID NO: 20442 - DNA, 428 bp, Zea mays
  unsure at all n locations
  Clone ID: LIB3151-001-P1-K1-H7
cgaagccattccctcttcaagaggggatcatcagattgggcttattattccttattactccaggcaaggatcggagttgctctgaattgactgaaccatggcggcgacaatggcagtgacgacgatggtgacgaggagcaaggagagctggtcgtcattgcaggtcccggcggtggcattcccttggaagccacgaggtggcaagaccggcggcctcgagttccctcgccgggcgatgttcgccagcgtcggcctcaacgtgtggcccggcgtnccagcggggcgcgacccgcgggagccccgatcccaggtcgtncgggcggncgacaactgcgacatcgcgccgcactttggggccgccgttcccgggcagaaggccgcttgggaggcggaggaagaggcaccgaaaaggaggaagcataagggcg

SEQ ID NO: 20443 - DNA, 124 bp, Zea mays
  Clone ID: LIB3151-002-P1-K1-F8
aaaataaaaactattaaataaataaaaatatataaaacaaataaacaaaaaaataaacaatgggaaaataaataaaaaaaaataaatataataaatataaataaaaaaaaaaaaataaaaaaat

SEQ ID NO: 20444 - DNA, 167 bp, Zea mays
  Clone ID: LIB3151-003-Q1-K1-E3
aaaaaaaagaaaaaaaaaaaaaaaaaaaaaaaaaaaaaaaaaaaaaaaaaaaaaaaaaaaaggggggggacctttataaaagataaaagggcggcccctcgtggggtctccaagctttctccctcctttattccacgctctagctattttttagttctccgtaagtc

SEQ ID NO: 20445 - DNA, 308 bp, Zea mays
  Clone ID: LIB3151-004-Q1-K1-F1
ctgcttctgctacctttttccgaacagaaaagaacattcttatgcgtttcatcattggaaaccccgcctttaactggcctttttttcctttacatccccgttgagaggcccctacaggggccattatgtatgttttcccccaaccccccttaaaaacaaaaaaaacttacattctccacatccctttttataaaaaaacaatacacccctggaaatttgtccatccttatcgaaacggcgggggcgcgggggtttcctatcatacctccctttctactttcagctccctcaatttttaccctttacca

SEQ ID NO: 20446 - DNA, 251 bp, Zea mays
  Clone ID: LIB3151-005-Q1-K1-E8
gggaaaaataacctcttatttcttgggggccccattcattagcccaaaaacttcttttttgaatgccccctactttgcattcttaaaaagggccccccccattatcttttgttggtaaaaagctgctgggtttgtcaaaacaagtttgaccaagggcaccaacttgttcattttgtaaagggttgcggggtttgccccaaactgcttgttgaaccgaagcatttttttttttttcataaaagaaccggggc

SEQ ID NO: 20447 - DNA, 257 bp, Zea mays
  Clone ID: LIB3151-006-Q1-K1-D1
ggcagcaccaaaaagcaccatttttttccttaggatttaacttaaaataaagcctgacgggggtaacagcacccatcgatccgcaatccatgctggttgatgcatgggtctgctggagccgaggatgaacacagcactaacaactgacacagagcgacctttaatcaaaaacacagatgggcaacaacaaacacgagacgaacgaagataaacactctggactagggtaaacaacacggtagcgaacaggataactt

SEQ ID NO: 20448 - DNA, 184 bp, Zea mays
  Clone ID: LIB3151-006-Q1-K1-D3
gggaaaaaaaaattttttttttttatttaaaaggggaaatgagggaaatggtaaaaaaaaaaatggcaacaagggggggggggaaaaaatttttttttaaaattggcgcgaaaaaaaataaaataaatttttgggaggggggttattaaaaaaaaaaaaatttttaaaggggggaaaacccccc

SEQ ID NO: 20449 - DNA, 96 bp, Zea mays
  Clone ID: LIB3151-006-Q1-K1-G5
cgcaccttaatgaatagataatggcacgcgctctcgaacatcccattaaactgccagcgcatggtgcttaacatcctcatggaccggtacaattgc

SEQ ID NO: 20450 - DNA, 268 bp, Zea mays
  Clone ID: LIB3151-007-Q1-K1-A7
cgaccacacccgtccgcaccaatatctttatttactgcagttctcgactttacggtgatttgtttatttacatttatcggagttccatgtttacgttgtgtatgagttcatttgtttctgttgcacgttcttaggagagttcaatattcattacaagaaagaagacaattgtttggtatcatcattgatagaccactgatgagataatggctaatccttaagctgaagcaacaaaaaacaacaaaacaactaaagcaaatataacaac

SEQ ID NO: 20451 - DNA, 109 bp, Zea mays
  Clone ID: LIB3151-007-Q1-K1-C8
tcggcgatgattgagtaataatgtgtcacgcatcttcatgggtggcagtgtcagtgtcagcaagagcactgaatgaacaattgaaatgaaaagaaaaaagtattgttcc

SEQ ID NO: 20452 - DNA, 365 bp, Zea mays
  Clone ID: LIB3151-008-Q1-K1-C4
aaccaaaaaccaaacatctttttttttttttttttttttttttttatttttttttttttttttaacacccttttttaaaaaatcgccaccccttttttttgtacaattttttgttcaaaacattaaggcacaaaagctttaaaaactttttctaccttttaaaaaccaaatattttttgcaaaactttttctctacttttaaaaaaaaaaatttttttcttttaaccaaatttttaaatttaacccgtctttttattttgctctaccactttttccttttaacccggttttcatttcctacttttaaaaaaaacaacttttttcatttaacccaattgccctccttaaccccctttttttttttt

SEQ ID NO: 20453 - DNA, 359 bp, Zea mays
  Clone ID: LIB3151-008-Q1-K1-H4
gttcaaacaaagtcgccattagcttggttgcccaggggcatttctggcaaagacagggtccttcgctctggcaggggcaggacgccaggaccccgcgcaaagacagggtcctacggttcttttttttttacatgacatttgagtgacaactacatgacggagcaggcgttggggttctcgtcgctgaagatctgcggcgccatgggctgctgctggtgcaagtggtggtgcggctgcccgtaaaacggcggcgggtaggccggctggtaggcgtacgggtaccccggaagcggctggtaagccggccgctggtaataccctccaacgaacgggaaccgcgggtagtgcatgtacaagct

SEQ ID NO: 20454 - DNA, 288 bp, Zea mays
  Clone ID: LIB3151-009-Q1-K1-D2
agataaaacccaatcaatatattgattgtttgtgggaaacacatgcggtcttgagggcaccattgttgactacatctcatatgtaatctaaaagatggcaccttcaaagaagggttgctgcaaggaagggttcatcaaagagaactggctgtatggcagcaattggtgctgctggatgaagttagcacaccaatgggataggcactgctagtggattaaagaactgttgtcgctgttgccggtacacaataaattgccacacaccctgttggttgaatggaatcaact

SEQ ID NO: 20455 - DNA, 279 bp, Zea mays
  Clone ID: LIB3151-009-Q1-K1-G12
gagagagatcacgcttgcttgctcgctattctatttattaactgcagttcttctacaaacagttcacaagctgggcaagacgttctgtcccctttcatcaatttattcgggggagggggactattaaacttcaccataacaccaacataccacccggggagcatgcccattaaatcatctgcctttcagtttcatttcaggccatgcatcttgcggttgcaagaagtgttgtttccacgcagacacattgtcaactcagagcatgttccttcaaaaccc

SEQ ID NO: 20456 - DNA, 242 bp, Zea mays
  Clone ID: LIB3151-010-Q1-K1-A1
ggaaactggggctttaaatatagtatagatatgtagacgttgacccaatagagaatgcaagacccgccatgcaagacccgccaacggatcatagcatttcatgcaacctaacggcggatcctatgttattaattttccaaaaccgctgaactacagacagattgtgtagtctactgtgcctattattgagctattacatgcatctatggagtgtgaagtgtctgtctataaagtaagctaaa

SEQ ID NO: 20457 - DNA, 361 bp, Zea mays
  Clone ID: LIB3151-010-Q1-K1-G12
cgagataaatctcaataagtatatttattatttctaggaaacacacctcggtatgagggcaccattatcgagtacatctcatatgtaatctaaaagatggcacctccaacgatgggttgctgcctcgacaagacaggattcatcaaagagaactggttgtatggcagcaattgttgctgctgtaggaaggcggcgaccaatgggttagccactaccaatggattaagtaactgttgtcgctgttgtatgtacgcagcacagttcgacagagtcagttggttgaatggaagcagctgttgcaagtaggcaacagggtttgccacagctagttgagtcagagctggtacaatctgttgcaaca

SEQ ID NO: 20458 - DNA, 206 bp, Zea mays
  Clone ID: LIB3151-011-Q1-K1-E4
gaagaaactatgtgctgtagtatagccgctggctagctagctagttgagtcatttagcggcgaggattgagtgataatgtgtcacgcatcaccatgggtggcagtgtcagtgtgagcaatgacctgaatgaacaattgaaatgaaaagaaaaaagtattgttccaaattaaaaaagcaaaaagaaaaaaaaaaaataaatatataa

SEQ ID NO: 20459 - DNA, 233 bp, Zea mays
  Clone ID: LIB3151-011-Q1-K1-E6
ccagaaataagaaagtacatttctgggaagctactaaacatcagacaaaaaactgtattattgagctataactcataagaaatctaaaagagggcaccaccaatgatgggttgttggtagaacactgctaggtttgtcaaagcaagttggtggcttcccagaaataagaaagtacatttcttaaaaaaaaaaaaataaaaaaaattaaaaaaattttaaaaaaaccaatttat

SEQ ID NO: 20460 - DNA, 279 bp, Zea mays
  Clone ID: LIB3151-012-Q1-K1-B4
attgcgagcccacatcagagctacgtcattctggatttgcacgcgcacagttcacatgctgcgccttgcacgtcgcgccgactcactcttttttttttaaccctggtagctagtactggtcgccgacggagaagatgctgcactcctggggctccgacagccggcacattatcggcaaacccgcgggggacttcccgggcctatgtaagcctcacgcggccgatccttggcccggtggtgccgggacgacacggtggatacatctgcgtttggtatccc

SEQ ID NO: 20461 - DNA, 54 bp, Zea mays
  Clone ID: LIB3151-013-Q1-K1-E8
ggtattgaatctcaaaaaatgatgaattcctgcattccgggggtatccactagt

SEQ ID NO: 20462 - DNA, 117 bp, Zea mays
  Clone ID: LIB3151-014-Q1-K1-B5
ctgcatgcggcgtcggggctattctatagtgcgaactaatttcaactcattggccgtcgatgtacaacatcaagactggcaagaccatgccgttacccaacataatagactagcagc

SEQ ID NO: 20463 - DNA, 93 bp, Zea mays
  Clone ID: LIB3151-014-Q1-K1-F7
acgcgccaggcgtacggcactagaccgcgcgcagtcgctctattcgatttacgctggctaccacgatcatgcgcgggcatgggtttcttgtgc

SEQ ID NO: 20464 - DNA, 278 bp, Zea mays
  Clone ID: LIB3151-015-Q1-K1-A1
aaaaccaaaactttggtatgatgcatatattattggtcataccacacatgataatgtgtgtcgtcttactgcattattacatatatagatagagagggatggatagaggagatttcccaaatatcatgaatcagtagtagggcggaatggcagcggagacgccacaggggttggtgcggtagctgggcagctggtactggtactggtagagtccacccatggccggcatgttctgcgccatcatcatggccatggggttgagaccctgggctgccagc

SEQ ID NO: 20465 - DNA, 228 bp, Zea mays
  Clone ID: LIB3151-016-Q1-K1-B6
ttttgtttttttttttttttttttttgtggtttgttttgttttctttggtctcttgcttttttttttatttaatcgttttctttctctgtggaagaagtacaagcgtttaactctattgaggaattgcttgtcgccggctcgacccggagcggaaaacagatgatgtttttcattacaaagcggaaaagacggtttgatcaaaaaccacaacgcccccccgggggggg

SEQ ID NO: 20466 - DNA, 251 bp, Zea mays
  Clone ID: LIB3151-016-Q1-K1-C9
gtctatgcgacgtcgtggcttttctataaggtccacaaaattcaactaacggtgcggtcacaatacacagcttataatgagacaaccgtggagaaaatcaactgaactatcgcggatgatatgcttcttgcgacagatcatgtaagcagcgaaaaggccatgacgccattgccctaccgaacaattgtcgcaacatgcatgtgcgaaagggacacaccctgttacctctcatcaagcgcagactgagaagg

SEQ ID NO: 20467 - DNA, 64 bp, Zea mays
  Clone ID: LIB3151-016-Q1-K1-G3
cccactgcttctcgtgcctttcgttcataccacgctcgtcgagtctgcccagcaagttctaaat

SEQ ID NO: 20468 - DNA, 120 bp, Zea mays
  Clone ID: LIB3151-016-Q1-K1-G6
ttgagtcatttagcggcgatgattgagtaaggatgtgtcacgcatcaccatgggtggcagtgtcagtgtgagcaatgacctgaatgaacaattgaaatgaaaagaaaaaagtattgttcc

SEQ ID NO: 20469 - DNA, 315 bp, Zea mays
  Clone ID: LIB3151-017-Q1-K1-F4
ggccgggataaattgttcccaacaatttatgcaaacagggttccaaataacttgttttaatggctgtcaacagttcacacaattggcaaccagacgactttcagcagtgttcaagcaaacaatgcaccataaaatggattgatacaagctacctggttgcaattgcaccaaaccgcagctccaacaagctacctggttgtttctccaggacaagcccacgattaaatggattgtgacaccataaaatctagaactcgagttggcttctcagcagctcgctcaaaaccgagcagtgatctgggagaacagtgccct

SEQ ID NO: 20470 - DNA, 321 bp, Zea mays
  Clone ID: LIB3151-018-Q1-K1-B7
gcagagattggctgcagaagtactgctgaataattacaagcagcaggctccatcaaaggcgccccttatcagcagcttgttaaagaacatgaaactcagctgataccaactagctctacacattcagaatgtcctgattcgatagatagttaagttaaattgatgtggcataatgcttgtttttttttgtggcactggcaccaacattgtgcaatggttaaaaagtaggtgctcccaatgccatgggttgtgtacactacacctgtttgcttgcagagaaatatgcatgacttctttttcaaaaaaaaaaatatttataaa

SEQ ID NO: 20471 - DNA, 232 bp, Zea mays
  Clone ID: LIB3151-019-Q1-K1-A3
ctactacgtttcttctttgggggcgatgatttttgctcttcgtgcgctttttggcgttgtgtgagcgccccttaagcgttttttttttctttttgctcacgcgctcctagtgccattattcctctgttgggggcagcagctactgtgttgggcttcgaacggggagctgtgggggattgcatgcaccagccgcggcccgcgggggggtggtacaacaactttttgcccaatt

SEQ ID NO: 20472 - DNA, 184 bp, Zea mays
  Clone ID: LIB3151-019-Q1-K1-G6
caaacggggaacaagacttttttctttgactttcaattgtacattcaggtcagtgctcacactgacactgccagccatggagatgcgtgacacattactactgaatcatggccgctaaatgacttaacgagctagctagctagcgggtatactacagcacatacgttctttacaggaggacacc

SEQ ID NO: 20473 - DNA, 257 bp, Zea mays
  Clone ID: LIB3151-020-Q1-K1-D3
ttttttttttttttttttttttttttttttttttttgtttttttttattttttttttttttttttttttttttttttttttaaaaaaaaaaaaattttatttttttttttaaaaaaaatttttaataaaaaaaaaaaaaaaaaaaaaattataaaaaaaaattttaaaatttaaatgaaataaaaataaaaaaaataatttatatgttattaaaaaagaaaaaaaacaatttattaatataaaaaaattatttttat

SEQ ID NO: 20474 - DNA, 319 bp, Zea mays
  Clone ID: LIB3151-020-Q1-K1-E9
gtagaaatgtactttcttatttctgggaagccacaaacatcatccaaaaaacttcattattgaactataactcataagcaatctaaaagagggcaccaccaatgatgggttgttggtagaacgctgttgggtttgtcaaagcaagttggttgaatggcagcaattgttgcagttgtaagagggtgccagcgttaggcgcagcgtgcaggtagaacggcaacaactgttgttgtgtcaagaaggcaacagggctcacatcagctagctggctgaatggtggtagctgttgctgttgtaaataagcagcagagttcaatgc

SEQ ID NO: 20475 - DNA, 154 bp, Zea mays
  Clone ID: LIB3151-020-Q1-K1-G10
gtgcatgcgggggtccatagcgtcttctataggggtcacctaaaattcaatcaatgggccgccgtttaccaccgccgggccgggaaaacccttgccgttccccacctaattggcctggcagaccatccccttttggccggttggggtattacca

SEQ ID NO: 20476 - DNA, 87 bp, Zea mays
  unsure at all n locations
  Clone ID: LIB3151-020-Q1-K1-G11
ggcgggcggnaggagatcgcgagctaccactctattttatccaattttacgaacgnccaacatacgaggtcatttagattctattta

SEQ ID NO: 20477 - DNA, 441 bp, Zea mays
  Clone ID: LIB3151-022-Q1-K1-C2
ataaaaagcacaatagtgtcccaccaatggtttccaaaatatttggcctccttatgctcctgggtctttctgcaagtgctgctacggcgaccattttcccgcaatgctcgcaagctcctatagcttcccttcttcccccgtacctctcaccagcggtgtcttcggtatgtgaaaacccaattcttcaaccctacaggatccaacaggcaatcgcagctggcatcttacctttatcacccttgttcctccaacaatcatcagccctattacaacagttacctttggtgcatttattggcacaaaacatcagggcacaacaactacaacaacttgtgctagcaaaccttgctgcctactctcagcaacagcagtttcttccattcaaccaactaagttcattgaactctgcttcttatttgcaacaacaacaactaccattca

SEQ ID NO: 20478 - DNA, 375 bp, Zea mays
  unsure at all n locations
  Clone ID: LIB3151-023-F1-F2A
tnntnntttttttttttttttnaagtcttaaacggtgacaccatataatcatttctgcaaaaataatatcacagcattttgcattaactaggggggctttctgacattttcttttcactacagggggtctattagacgacatcacttcatcaactaatgaggggaaagggctattgtttaattacaaagcaacacagggggaaacaaaaaaaaaggaagactactttctggagcattcttgttatcatgttggcgatgggctgcacagcacaggacaacagcaggctgttgaaaacccgccatgatctataggggtatacaagaaactcatttatccagaaaatctttgcagcagaacatcggtgtgctgcatgg

SEQ ID NO: 20479 - DNA, 435 bp, Zea mays
  Clone ID: LIB3151-023-F1-R2A
ctcccacccaacaacaaaacaagcctaatggcttcctctccatctcacgccactgcggttgcctacttgccctagaaccctcgccgccgcccctctttaggattcccatgtccctggtcgccccctgacacgcccgccccggatcctgcacccgaattccgcgtggaattccgggccgaaccgcctctctgcgtgcgcctccgaccaccaaactctctctctcacacgcgcgcgcgcgcgcacgtctgaggcggtttgattctccggtgggggttccttggtctcgaactctcgatttgctgctgatgggggtgccgaagcagcgctggacgccggaggaagaggccgcgctcaaggccggtgtcgccaagcacgggcccggcaagtggcgcaccatcctccgggactcggacttcagcgcgctcctgcgccttc

SEQ ID NO: 20480 - DNA, 233 bp, Zea mays
  unsure at all n locations
  Clone ID: LIB3151-023-Q1-K1-B12
annnnaccagcgttggggaacaatacttttttcttttcatttcaattgtccattcacggcattgctcacactgacactgccacccatggtgatgcctgacacattattactcaatcatcgccgcttaatgactcaactagcttgctagccagcggctatactacagcaccccgatcctgggccaatgcgtctagtttctgaggcatcaatgcaacccgacggccacaccctac

SEQ ID NO: 20481 - DNA, 406 bp, Zea mays
  Clone ID: LIB3151-026-Q1-K1-A5
agaaatgtactttcttatttctgggaagccacaaacatcagacaaaaaactttattattgaactataactcataagaaatctaaaagatgacacacctgggtacggttcatcccacgctgaagatgatgcacatggttttgttgttctcgatgatggtgttgagtccggtgaagattttgatgaaaaatcaggccacccttcagatcctgcagacagcaggagctgtgatactggcgcctcatgcaaatgttggttgaagaagcatatgacatgcttgtataaccaagcaaaggaaacaaatgctatctggtctgtggtggttgcagctgcactagttggtattgtgattttgggacgttggcacaaagataaattgcaccttaaccagcttaagtggcgctctgg

SEQ ID NO: 20482 - DNA, 328 bp, Zea mays
  Clone ID: LIB3151-026-Q1-K1-A9
ggaatcatgtacccccagcacgatattcttctgtgtgaccgagtgattcttctaatgcatggagattatacagcattatataatgaacaaagaacaaacaaattctgaagtacagtaccgtctctgtcgaagaacacgtagtacaccgtatacggctgagcggttgtgtataaccatcgtcggatcactcactctctgacccttgggaacaggcacctgtagatcctggacatgaaggacctcttggccttccccttcccgtgtcgccgcgcgcgtggcggcgctgcgtggtcgggcgacaacagcagcttcggcggctgcacgggcg

SEQ ID NO: 20483 - DNA, 378 bp, Zea mays
  Clone ID: LIB3151-027-Q1-K1-C10
gtataatccataaatggaggatggcaatgacgaggactcacgagaggaggcggccattgaggaaccagttggttctcttggcgcaatggctcctctattcatgtatgatcaagaaatggaggacaacgaggaggatcaggcacactagatgcagattgcaccagctgcagcgaagcctttgttttgtgttgctggggcggctctacttatgtaatgtggaatggagggattgcgcaagcttaaaagtatggctggatcggccttgttttttaactggctctctagttactgccatctaatagccaacatttttcccgcttttgtaaatccgcgcagttgtttgtttcagaggaaaatgcactaaggatatgcagaact

SEQ ID NO: 20484 - DNA, 169 bp, Zea mays
  Clone ID: LIB3151-027-Q1-K1-D5
ttgttgagtacatctcatatgtaatctaaaagatggtgccctcataccggcatgtgtttgctagaaataatcaatatattgattgagatttatcttgataaaaaaaaaaaaaaaaaaaaaaaaacaaaaaagggcggccaatataaaagaaccaaagctaacaaacaaa

SEQ ID NO: 20485 - DNA, 367 bp, Zea mays
  Clone ID: LIB3151-028-Q1-K1-A2
aaacgccccgccctggaaccctaaccctacctttcctctcccgccaccgcccgccccaatggcgaagccgatgaagtacgacgatgaggaggagatctcgtcctccgccgaggaggaggaccagtccgacgccgccggctccgtatctggcgaggaaggggatgacgacgacgaggatgctgcggcgccgcccgcggaggaagctgagggcgaggggcatcaagaggaggaggtcgacgaggaaaagatcgaagccgtcactaccggcgctggagcttaggacgaggaggacgctggtgcccgtacccgcgctgaaggcgacgactagtcccagtccaccgaggacgaccagcccgtcgcgagggac

SEQ ID NO: 20486 - DNA, 114 bp, Zea mays
  Clone ID: LIB3151-028-Q1-K1-A3
caagcgaagcacattagcaacaacctaacaacaatggctaccaagatattatccctgcttgcgcttcttgcgctttttgcgagcgcaacaaatgcgttcattattccacaatgc

SEQ ID NO: 20487 - DNA, 53 bp, Zea mays
  Clone ID: LIB3151-028-Q1-K1-A5
gtgaagttggaggaggagaaacaggctcttcaaagacaactccaattgaaaca

SEQ ID NO: 20488 - DNA, 353 bp, Zea mays
  Clone ID: LIB3151-028-Q1-K1-A6
agaccattagctttatctactccagagcgcagaagaacccgatcgacaccatgagggtgttgctcgttgccctcgctctcctggctctcgctgcgagcgccacctccacgcatacaagcggcggctgcggctgccagccaccgccgccggttcatctacggccgccggggcatctgccacctccggttcacctgcaacctccggtgcatgtcccaccgccggtccacttgctgccgccggtccacctgccaccgccggtccatgtgccgcctccagttcatctgccgacgccaccatgccactaccctactgaaccgcccctgcctcagcctcatctaaagacacacctatgc

SEQ ID NO: 20489 - DNA, 81 bp, Zea mays
  Clone ID: LIB3151-028-Q1-K1-A7
ggaccattagctttatctacttcagagcgcagaagaacccgatcgacaccaggagggggttgctcgttgccctcgatctct

SEQ ID NO: 20490 - DNA, 422 bp, Zea mays
  unsure at all n locations
  Clone ID: LIB3151-028-Q1-K1-A8
gctcaatcaattcactcaaacctcttccccaaatcttcgattagattctcgttgacaagaagactagaaccgaacctgaccatgtcgctgatccgccgcagcaacgtgttcgatcccttctccctcgacctctgggacccctttgagggcttccccttcggctccggcagcagcagcagtctcttcccctcgttcccgcggaccagctcggagaccgcggccttcgctggcgcgcggatcgactggaaggagactccagaggcgcacgtgttcaaggcagacgtaccggggctgaagaaggaggaggtcaaggtggaggtcgaggacggcaacgtccttcagatcagcggcgagcgcaacaaggagcatgaggagaagacggacacctggcaccgcgtggagcggagcanctggagattcct

SEQ ID NO: 20491 - DNA, 85 bp, Zea mays
  unsure at all n locations
  Clone ID: LIB3151-028-Q1-K1-B1
gaccaacagcnnaatctactccagagcgcataagaacccgatcgacaccaaaaggggtgtggctcgtagccctcgctctgctggc

SEQ ID NO: 20492 - DNA, 434 bp, Zea mays
  unsure at all n locations
  Clone ID: LIB3151-028-Q1-K1-B2
attgataccaactagcaacatacatagtgaagtacagtagcaacatcttagcaccaatggcagccaagatttttgccctccttgccctccttgctctttcagcaagtgttgctaccgcgactattattccacaatgctcacaacaatacctctctccggtgacagccgcgagatttgaatacccaactatacaatcctacaggctacaagaggccatcacagcaagcatcttacggtcgttagcattgactgtccaacaaccatatgccctattgcaacaaccatccttagtgaatctatatctgcaaagaatcgcagcacaacaactacaacagcagttgcttccaacaatcaatcaagtagttgcagcgaaccttgctgcttacctncagcaacaacaattttcttncattcaatcaactagcttgggtgga

SEQ ID NO: 20493 - DNA, 94 bp, Zea mays
  Clone ID: LIB3151-028-Q1-K1-B3
acatatttatcaatattcacaaggccatgtgcatcatcacgaacagagcgcattagcaacaccaaggacatatccttgttcattaactttaaca

SEQ ID NO: 20494 - DNA, 429 bp, Zea mays
  unsure at all n locations
  Clone ID: LIB3151-028-Q1-K1-B4
gcccggaaggaccgggccgacccacgcgtgcgatcgctgccgggccgctgactgcttaagggcgacgactgggcgacagtcgccgccgccggcggctaggggccgtgcccctggtctccatcttcggcgcttcgcccaccagatatgagcagctggcaattcgattttgaggccattatttgataacccgggacaagtgcactggttacctgaccattttagctttttgagatggctacacagttgccatgcttcacacagctcagtccaccgtcttgtagttggataaaagatgtcgggaactgcaaggctacgcctgatagggtagccagaagtgcccgagctttgggccactgtcacttccggtgctgtgcangcccccgtagtgcaaactctttcaagaagaaagactctntcgagaagaaagac

SEQ ID NO: 20495 - DNA, 429 bp, Zea mays
  unsure at all n locations
  Clone ID: LIB3151-028-Q1-K1-B5
gtgaaggccaacaacaacatcaccaacaatcacaaggccatgtgcaacaacacgaacagagccatgagcaacaccaaggacagagccatgagcaacaacatcaacaacaattccagggtcatgacaagcagcaacaaccacaacagcctcagcaatatcagcagggccaggaaaaatcacaacagcaacaatgtcattgccaggagcagcaacagactacaaggtgcagctataactactatagcagtagctcaaatctaaaaaattgtcatgaattcctaaggcagcagtgcagccctttggtaatgccttttctccaatcacgtttgatacaaccaagtagctgccaggtattgcagcaacaatgttgtcatgatcttnaggcagatgagccacaatacattcaccaagcaatctacaacatggtta

SEQ ID NO: 20496 - DNA, 398 bp, Zea mays
  unsure at all n locations
  Clone ID: LIB3151-028-Q1-K1-B6
ctcccgtgcccctcactgtttagtggcgacgactgggcgacagtcgccgccgccgcccgctaggggccgtgcccctggtctccatcttcggcgcttcgcccaccagatatgagcagctggcaattcgattttgaggccattatttgataacccgggacaagtgcactggttacctgaccattttagctttttgagatggctacacagttgccatgcttcacacagctcagtccaccgtcttgtagttggataaaagatgtcgggaactgcaaggctacgcctgatagggtagccagaagtgcccgagctttgggccactgtcacttccggtgctgtgcaggcccccgtagtgcaaactctttcaagaagaaagactctntcgagaagaaagactcttt

SEQ ID NO: 20497 - DNA, 292 bp, Zea mays
  Clone ID: LIB3151-028-Q1-K1-B7
gaaggcagttccctgtttagagaggggatcatcagattgggcttattattccttattactccaggcaaggatcggagttgctctgaattgactgaaccatggcggcgacaatggcagtgacgacgatggtgacgaggagcaaggagagctggtcgtcattgcaggtcccggcggtggcattcccttggaagccacgaggtggcaagaccggcggcctacagttccctcgccgggcgatgttcgccagcgtcggcctcaacgtgtgcccgggcgtaccagcggtgcgcgacct

SEQ ID NO: 20498 - DNA, 360 bp, Zea mays
  Clone ID: LIB3151-028-Q1-K1-B8
ggggagagagagaagtgggagacccgcgagaggctgccgtgtcgggactagggaccgtagagtaagcgacagcgaaggagggagagggggatggccgggatcgggccgatcaggcaggactgggagccggtggttgtgcggaagaaggcacccaccgccgctgccaagaaggatgaaaaggccgtaaacgccgggcgccgttccggcccgaaaatcgaaaccatgaaaaattccaacgcttgtatgaacaaggcggcgtcaagcggcacatacttcaacaccaagcgcctcgacgacgacacagagaacctcgcccgtgagcaatcatctgtctcggatgagcgagttccaagtgacctg

SEQ ID NO: 20499 - DNA, 296 bp, Zea mays
  Clone ID: LIB3151-028-Q1-K1-C1
gcggtccaccgccagcacggctcggaggcgcgactccctgcgacgcgcggcctcttggccccggcggctcgggcgtgggtgcccacggcgcgcggccccccggccccggcggcacgggcgcgactgcctgcgacgcgcggcccccccggccccggcggctcgggcgagggcccccgacgcgcactggtgaggcgcggcagcctccggcgctggggcacggtggcccggcaggcgggccacaaccagcgcgggcgcgcaaccccggggacttaaagccggccccgcttttacacggg

SEQ ID NO: 20500 - DNA, 120 bp, Zea mays
  unsure at all n locations
  Clone ID: LIB3151-028-Q1-K1-C2
gaatgaangggccgaccgacgcatgcgtacgccattcactgttaaataggagaccatcaaattgctctcattattcctcattactccgggcggggatcgtcatcgctcggaattgactga

SEQ ID NO: 20501 - DNA, 223 bp, Zea mays
  Clone ID: LIB3151-028-Q1-K1-C3
ggccgaccgacgcgtccggacgccattccctgttcaataagggaccattattattcggcataacacgcccgacaacatcggggtggtattcgatgcgctcggacttcactctctccatggcgagcgccatctgcactcacacaaacggcgactacgaccgccaaccaccgccccccattcatctacccgcgtcggtgcatctttcacattccgttacctgcca

SEQ ID NO: 20502 - DNA, 188 bp, Zea mays
  Clone ID: LIB3151-028-Q1-K1-C4
ttttttttttttttttttttttctatttcttcgggtattttttgttttttttttcttttggggaaaaaagtcattcttcgcctgttttattcctaaacaattggtcccatgcgatggcattcccactttattattgggcccaacaccaatgcttttttctggatggcaacacccacaaagggctcctt

SEQ ID NO: 20503 - DNA, 247 bp, Zea mays
  unsure at all n locations
  Clone ID: LIB3151-028-Q1-K1-C6
ccgggacggaanaccccgacccacccacccgttcctatatcgctagcgagcaccctttcttttttttactctcttctaccctcattatttcgggcgtttttttttttttttttttttccacaaaaaaaacccttatttccctgttttattcctaaacattttttccaatcctatggctttcccccttcattattgtttccaacacaaatccttttatttataatgcttttccaacatatgtcttttt

SEQ ID NO: 20504 - DNA, 373 bp, Zea mays
  Clone ID: LIB3151-028-Q1-K1-C7
cttcagaccattagctttatctactccagagcgcagaagaacccgatcgacaccatgagggtgttgctcgttgccctcgctctcctggctctcgctgcgagcgccacctccacgcatacaagcggcggctgcggctgccagccaccgccgccggttcatctaccgccgccggtgcatctgccacctccggttcacctgccacctccggtgcatctcccaccgccggtccacctgccgccgccggtccacctgccaccgccggtccatgtgccgccgccggttcatctgccgccgccaccatgccactaccctactcaaccgccccggcctcagcctcatccccagccacacccatgcccgtgccaacagccgc

SEQ ID NO: 20505 - DNA, 353 bp, Zea mays
  Clone ID: LIB3151-028-Q1-K1-C8
tattatttagaccaactagcaacatagaaagcacaatagtgtaccaacaatggcagccaaaatattttgcctccttatgctccttggtatttctgcaagtgctgctacggcgaccattttcccgcaatgctcacaagctcctatagcttcccttcttcccccgtacctctcaccagcggtgtcttcggtatgtgaaaacccaattcttcaaccctacaggatccaacaggcaatcgcagctggcatcttacctttatcacccttgttcctccaacaatcatcagccctattacagcagttacctttggtgcatttattggcacaaaacatcaaggcacaacaactacaacaac

SEQ ID NO: 20506 - DNA, 304 bp, Zea mays
  Clone ID: LIB3151-028-Q1-K1-D1
gctctatagaccattagctctatctactgcagatcgcacaaaaacccgatcgacaccatgagggtgttgctcgttgtcctctgtctcctggttctcgctgcaagcgccaccatacaagcatacaagtggcggttgcagctgccagccacgcgtcatctgatgatctaccggcatctgtgcatttgccatcacctgttaacttggcagcatctgtgaatgtccgaccacctgtcgacgtggggccacctgtcaacgtgccaccatgtgcccatgtgccgtcatctgttgatgtgacgatgccact

SEQ ID NO: 20507 - DNA, 352 bp, Zea mays
  Clone ID: LIB3151-028-Q1-K1-D2
gaccattaactctatctactccagagcgcagaagaacccgatcgacaccatgagggtgtggctcgttgccctcgctctgctggctctcgctgcgagcgccacctccacgcatacaatcggcggctgcggctgacaaccaccgctcccggttcatctaccgccgcccgtgcatctagccacctccggttcacctgccacctccggtgcatctaccaccgccggtccacctgccgacgccggtccacctgccaccgccagtccatgtgccgccgccggttcatttgacgccgacaccatgccactaccctactcaaccgacccggcctaagcctcatgcccagccacacccatg

SEQ ID NO: 20508 - DNA, 255 bp, Zea mays
  unsure at all n locations
  Clone ID: LIB3151-028-Q1-K1-D3
ggaagnaacggcccgaccgcacgcgtccggctctttaaactattacctctatctacttcatattcacataaaaacccactctacaccagcgtggtgttgcacactgtccactgtctattggttctagactgcaaaacacacatacaaacatactactggctttatcaagcaaccactcaaagccacctacctattatagccccatctgtgtatacaaaatcaacccctaactttggagcatctattaataccaaa

SEQ ID NO: 20509 - DNA, 62 bp, Zea mays
  Clone ID: LIB3151-028-Q1-K1-D4
acactcccaccaacgttcacacctactaaccatcactacaaaaccgcatcgacgccacgggg

SEQ ID NO: 20510 - DNA, 432 bp, Zea mays
  Clone ID: LIB3151-028-Q1-K1-D5
ccattagctttatctactccagagcgcagaagaacccgatcgacaccatgagggtgttgctcgttgccctcgctctcctggctctcgctgcgagcgccacctccacgcatacaagcggcggctgcggctgccagccaccgccgccggttcatctaccgccgccggtgcatctgccacctccggttcacctgccacctccggtgcatctcccaccgccggtccacctgccgccgccggtccacctgccaccgccggtccatgtgccgccgccggttcatctgccgccgccaccatgccactaccctactcaaccgccccggcctcagcctcatccccagccacacccatgcccgtgccaacagccgcatccaagcccgtgccagctgcagggaacctgcggcgttggcagcaccccgatcctgggccagtgcg

SEQ ID NO: 20511 - DNA, 310 bp, Zea mays
  unsure at all n locations
  Clone ID: LIB3151-028-Q1-K1-D6
gaccattagctttatctactccagagcgcagaagaacccgatcgacaccatgagggtgttgctcgttgccctcgctctcctggctctcgctgcgagcgccacctccacgcatacaagcggcggctgcggctgccagccaccgccgccggttcatctaccgccgccggtgcatctgccacctccggttcacctgccacctccggtgcatctcccaccgccggtccacctgccgccgccggtccacctgccaccgccggtccatgtgccgccgccggttcatctgccgncgncaccatgccactaccctact

SEQ ID NO: 20512 - DNA, 430 bp, Zea mays
  Clone ID: LIB3151-028-Q1-K1-D7
catgtgttgctaacgcgacaattttccctcaatgctcacaagctcctatagcttccctttttcccccataccttccatcaattatagcttcagtatgtgaaaacccagctcttcaaccatataggcttcaacaagcaatcgcagcaagcaacatacctttatcgcccttgttgtgtcaacaatcgccagccctatctttggtgcagtcattggtacaaaccatcagggcacaacagctgcagcaactcgtgctacctgtgatcaaccaagtagctctggcaaacctttctccctactctccgcaacaacaatttcttccattcaaccaactgtctacactgaaccctgctgcttatttgcagcaacaactattaccatttagccagctagctactgcctactctcaacaacaacaacttcttccatttaa

SEQ ID NO: 20513 - DNA, 315 bp, Zea mays
  Clone ID: LIB3151-028-Q1-K1-D8
catgtgttgctaacgcgacaatagtccctcaatgctcacaagctcctatagctgggcggtgtgccccataccttccatcaattatagcttcagtatgtgaaaacccagctcttcaaccatataggcttcaacaagcaatcgcagcaagcaacatacctttatcgcccttgttgtgtcaacaatcgccagccctatctttggtgcagtcattggtacaaaccatcagggcacaacagctgcagcaactcgtgctacctgtgatcaaccaagtagctctggcaaacctttctccctactcttcgcaacaacaatttc

SEQ ID NO: 20514 - DNA, 428 bp, Zea mays
  Clone ID: LIB3151-028-Q1-K1-E1
cacaaacacaccaagcgaagcgcactatctacaacctaacaacaatggctaccaagatattagcgcttcttgcgcttcttgcccttttagtgagcgcaacaaatgcgttcattattccacagtgctcacttgcttctagtgccattattccacagttcctaccaccagttacttgaatgggcttagaacatccagccgtgcaagcctacaggctacaactagcgcttgcggcgagcgtcttacaacaaccgattgcccaattgcaccaacaatccttgggacatctaaacctacataccatcgcaacgcagcagcaacaacagtttctgccatcactgagccacctagccgtggtgaaccctgtcgactacttgcaacagcagctacttgcattcaacccacttgctctggccaacgtagcttcatac

SEQ ID NO: 20515 - DNA, 330 bp, Zea mays
  Clone ID: LIB3151-028-Q1-K1-E2
cagaaacacaccaagcgaagcgcactaccttcaatctaacaacaatggctaccaagatattggcgggtgtcttgcgcttcttgcccttttactgagcgcaacaaatgcgttcattattccacagtgctcacttgcttctagtgccattattccacagttcctcccaccagttacttcaatgggcttcgaacatccagccgtgcaagcctacaggctacaactagcgcttgcggcgagcgtcttacaacaaccaattgcccaattgcaacaacaattcttggtacatctaaacctactaaccatcgcaacgcaacaacaactaacagtttt

SEQ ID NO: 20516 - DNA, 313 bp, Zea mays
  Clone ID: LIB3151-028-Q1-K1-E3
cagacacacaacatgctatgcgcaatggcttattattaacctcaacggctccgctgagaagggggtggctcgccctgcgcgccttgctcttgaagggagcgcatcgctatgcagtatacttattagcagcatcagcttgacttcgattctacatgccatctatagaataattcgcttccaccacgttattgaactgggtataaacatccaggcaagcatgcctactagatccaactattgctggcagcgagtgtcaaacaacaaccaactgaccgattgcaccaaccatggttggtacatttatacctaccaa

SEQ ID NO: 20517 - DNA, 311 bp, Zea mays
  Clone ID: LIB3151-028-Q1-K1-E4
acagttacctttggtgcatttattggcacaaaacatcagggcacaacaactacaacaacttgtgctagcaaaccttgctgcctactctcagcaacagcagtttcttccattcaaccaactaggttcattgaactctgcttcttatttgcaacaacaacaactaccattcagccagctacctgctgcctaccctcagcaattacttccattcaaccaactagcagcattgaactctcctgcttatttacagcatcagcaactactaccattcagccagctagctggtgtgagctctgttactttcttgacac

SEQ ID NO: 20518 - DNA, 397 bp, Zea mays
  Clone ID: LIB3151-028-Q1-K1-E5
atcaaagtacaatacgggaccgatgtatatatatatttaactcgcataaggtttctacaagcaagctaataacacacttatctgcacctcaacctgaatgacatccatgagatcaaatatacagagggctacacaaatgatgatgatgatgatgagttcttcgttaccaccaggttcttttggacactatattttattcaaaataagaagaaagggaaaaaaaaagagaccaatttggaacagggatccaacacttcactcccccaaactaatccggcacccttctgtctctcaccaacacaagaaccatccaataaaaaccttatgttgaacctatccttggatgatgcatgcttgttttgatcccaatgcaaatgcacagttgcctaatagcaac

SEQ ID NO: 20519 - DNA, 294 bp, Zea mays
  Clone ID: LIB3151-028-Q1-K1-E6
cggcaaaccatttctttcccttaaaccctagccaaaaacccttctgctgctccccgcccgccgcccgccaccatgtcgatggcggtggcctccctccgctccctggcgcgccgccaaccccgcctgcgcttgccccctgcgccgctcgtcgtacccggcggccgggcagcattactttccggcgcggccgaggaggcggccccgttggctgccgcggaagcggcggcgccgccacctgttcccggtcggaaggtgctggagagtttccgcgaggagtttgagatcggggggcgc

SEQ ID NO: 20520 - DNA, 348 bp, Zea mays
  Clone ID: LIB3151-028-Q1-K1-E7
ttcagaaacacaccaagcgaagcgcactagcaacaacctaacaacaatggctaccaagatattagccctccttgcgcttcttgcccttttagtgagcgcaacaaatgcgttcattattccacagtgctcacttgctcctagtgccattattccacagttcctcccaccagttacttcaatgggcttcgaacatccagccgtgcaagcctacaggctacaactagcgcttgcggcgagcgtcttacaacaaccaattgcccaattgcaacaacaatccttggcacatctaaacctacaaaccatcgcaacgcaacagcaacaacagtttctgccatcactgagccacct

SEQ ID NO: 20521 - DNA, 176 bp, Zea mays
  Clone ID: LIB3151-028-Q1-K1-E8
ccgcagcatgcgacgaagatatctcttccatagtaggctcctagctcaatctacatgggcggctaactacaacaatttgacttgaagaacacaggcgttacatactttaatcgtttcgcaatacattccattaattatagctggcgtattagaaaacaggactgtacagatagata

SEQ ID NO: 20522 - DNA, 417 bp, Zea mays
  Clone ID: LIB3151-028-Q1-K1-F1
cagaccattagctttatctactccagagcgcagaagaacccgatcgacaccatgagggtgttgctcgttgccctcgctctcctggctctcgctgcgagcgccacctccacgcatacaagcggcggctgcggctgccagccaccgccgccggttcatctaccgccgccggtgcatctgccacctccggttcacctgccacctccggtgcatctcccaccgccggtccacctgccgccgccggtccacctgccaccgccggtccatgtgccgccgccggttcatctgccgccgccaccatgccactaccctactcaaccgccccggcctcagcctcatccccagccacacccatgcccgtgccaacagccgcatccaagcccgtgccagctgcagggaacctgcggcgttggcagcacc

SEQ ID NO: 20523 - DNA, 359 bp, Zea mays
  Clone ID: LIB3151-028-Q1-K1-F2
gcgcagaccattagctttatctactccagagcgcagatgaacccgatcgacaccatgagggtgtcgcgcgttgccctcgctctcgtggctctcgctgcgagcgccacctccacgcatacaagcggcggctgcggctgccagccaccgccgccggttcatttaccgccgccggtgcatctgccacctccggttcacctgccacctacggtgcatctgccaccgccggtccacctgccgccgccggtccacctgccaacgacggtccatgtgccgtggaacgatcatctgccgccgatatcatgctactaacctactgaaccgaccaggtactaagactcattaccagccacacccaatgc

SEQ ID NO: 20524 - DNA, 321 bp, Zea mays
  Clone ID: LIB3151-028-Q1-K1-F3
cagaccattaactatatgctactccagagcgcaattgaacccgatcgacaccatgagggtggggcgcgttgccctcgctctgctggctctcgcatggagcgccaccttcaaacatacaagcggcggctgtagctgccagccatcgccggcggttcatataccggcggcggtgcatatgccaactccggatcacctgacaccttcggagcatatacgaccgccggtccacctgccgacgccggtccacctggcaccgtcagtacatgtgccgccgactattaatctgacgccggcaccatgccactaccctactcaaccggg

SEQ ID NO: 20525 - DNA, 400 bp, Zea mays
  Clone ID: LIB3151-028-Q1-K1-F4
caacaagcaacatagaaagtggaatccagtagcaacaatagagcaacaatggcgaccaagatattttccctccttatgctccttgctctttctgcatgtgttgctaacgcgacaattttccctcaatgctcacaagctcctatagcttcccttcttcccccataccttccatcaatgatagcttcagtatgtgaaaacccagctcttcaaccctataggctccaacaagcaatcgcagcaagcaacatacctttatcacccttgtttcaacaatcgccagccctatctttggtgcagtcattggtacaaaccatcagggcacagcagctgcagcaactcgtgctacctgtgatcaaccaagtagctctggcaaacctttctccctactctcagcaacaac

SEQ ID NO: 20526 - DNA, 335 bp, Zea mays
  Clone ID: LIB3151-028-Q1-K1-F6
gagcattcagaaacacaccaagcgaagcacattagcaacaacctaacaacaatggctaccaagatattatccctccttgcgcttcttgcgctttttgcgagcgcaacaaatgcgttcattattccacaatgctcacttgctccaagttccattattacacagttcctcccaccagttacttcaatgggcttcgaacacccagctgtgcaagcctataggctacaacaagcaattgcggcgagcgtcttacaacaaccaatttcccagttgcaacaacaatccttggcacatctaacaatacaaaccatcgcaacgcaacagcaacaacaatttct

SEQ ID NO: 20527 - DNA, 410 bp, Zea mays
  Clone ID: LIB3151-028-Q1-K1-F7
agcaacatagaaagcacaatagtgtaccaacaatggcagccaaaatattttgcctccttatgctccttggtctttctgcaagtgctgctacggcgaccattttcccacaatgctcacaagctcctatagcttcccttcttcccccgtacctctcaccagcggtgtcttcggtatgtgaaaacccaattcttcaaccctataggatccaacaggcaatcgcagctggcatcttacctttatcacccttgttcctccaacaatcatcagccctattacagcagttacctttggtgcatttattggcacaaaacatcaaggcacaacaactacaacaacttgtgctagcaaaccttgctgcctactctcagcaacaacagtttcttccattcaaccaactagctgcattgaac

SEQ ID NO: 20528 - DNA, 428 bp, Zea mays
  Clone ID: LIB3151-028-Q1-K1-F8
gcaacatagaaagtggaatacagtagcaacaatagagcaacaatggcggccaagatattttccatccttatgctccttgctctttctgcatgtgttgctaacgcgaccatttttcctcaatactcacaagctcctatagctgcccttcttcccccataccttccatcaatgaccgcttcagtatgtgaaaacccagcccttcaaccctacaggctccaacaagcaatcgcaacaagcaacttacctttatcacccctgttctttcaacaatcgccagccctatctttggtgcagtcattggtacaaaccatcagggcacaacagctgcagcaactcgtgctaccagtgatcagccaagtagctctggcaaacctttctccctactctcagcaacaacaatttcttccattcaaccaactgtctacact

SEQ ID NO: 20529 - DNA, 343 bp, Zea mays
  Clone ID: LIB3151-028-Q1-K1-G1
gcagcttctgcttgctctggggggaaggagagagagagagagcgagagagagatctagtagagaggctagtaggtggtcctcgaacgaagatgttggcggtgttcagcgggcaggtggtggaggtgccggcggagctggtggcggcgggcagccggacgccgtcgcccaagacgaaggcgtcgcagctggtggggcgcttcctggccgcgtccgagccggccgtgtccgtgcagctcggcgaccacggccacctcgcctactcccacaccaactaggcgcttctttcgcccaagtcgttcgccgccaaggacgaagtgttctgcctgttccagggggtgctgg

SEQ ID NO: 20530 - DNA, 74 bp, Zea mays
  Clone ID: LIB3151-028-Q1-K1-G4
gcgagcaaagcggcagcgcgtagagaggctcgtggaacaaaacattatgaacatcgtaagcgtcctggtcttgt

SEQ ID NO: 20531 - DNA, 404 bp, Zea mays
  Clone ID: LIB3151-028-Q1-K1-G5
ggtgggttggcttctcctccccctccggttcgggttcgggttcgtgaggttctccggggttcggtttcgtgggtgagcggatcgagatggcggcgtcggatgttgagtaccgctgcttcgtcggcggcctcgcctgggccacggacgaccactccctccacaacgccttcagcacctacggcgaggtcctcgagtccaagatcatcctcgatcgggagacgcacaggtcccgcggcttcggcttcgtcaccttctccacggaggaggcgatgcggaacgccatcgagggcatgaacggcaaggagctggacggccgcaacatcaccgtcaacgaggcccactcccgcggcggccgtggaggcggcggcggctgcgggtacagtggtggccgtggaggcagccgc

SEQ ID NO: 20532 - DNA, 380 bp, Zea mays
  Clone ID: LIB3151-028-Q1-K1-G6
agcaaagcggcagtgcgtagagaggatcgtcgaacagaacagcatgaagatggtcatcgttctcgtcgtgtgcctggctctgtcagctgccagcgcctctgcaatgcagatgccctgcccctgcgcggggctgcagggcttgtacggcgctggcgccggcctgacgacgatgatgggcgccggcgggctgtacccctacgcggagtacctgaggcagccgcagtgcagcccgctggcggcggcgccctactacgccgggtgtgggcagactagcgccatgtaccagccgctccggcaacagtgctgccagcagcagatgaggatgatggacgtgcagtccgtcgcgcagcagctgcagatgatgatgcaacttgagcgtg

SEQ ID NO: 20533 - DNA, 432 bp, Zea mays
  Clone ID: LIB3151-028-Q1-K1-G7
tgggtcttcagaccattagctttatctactccagagcgcagaagaacccgatcgacaccatgagggtgttgctcgttgccctcgctctcctggctctcgctgcgagcgccacctccacgcatacaagcggcggctgcggctgccagccaccgccgccggttcatctaccgccgccggtgcatctgccacctccggttcacctgccacctccggtgcatctcccaccgccggtccacctgccgccgccggtccacctgccaccgccggtccatgtgccgccgccggttcatctgccgccgccaccatgccactaccctactcaaccgccccggcctcagcctcatccccagccacacccatgcccgtgccaacagccgcatccaagcccgtgccagctgcagggaacctgcggcgttggcagcaccccgatcc

SEQ ID NO: 20534 - DNA, 375 bp, Zea mays
  Clone ID: LIB3151-028-Q1-K1-G8
gcaacatagaaagcacaatagtgtaccaacaatggcagccaaaatattttgcctccttatgctccttggtctttctgcaagtgctgctacggcgaccattttcccacaatgctcacaagctcctatagcttcccttcttcccccgtacctctcaccagcggtgtcttcggtatgtgaaaacccaattcttcaaccctataggatccaacaggcaatcgcagctggcatcttacctttatcacccttgttcctacaacaatcatcagccctattacagcagttacctttggtgcatttatgggcacaaaaacataggtcacaacaactacaacaacttgtgctagcaaaccttgctgcctactctcagcaacaaca

SEQ ID NO: 20535 - DNA, 357 bp, Zea mays
  Clone ID: LIB3151-028-Q1-K1-H3
ttcagcattcagaaacacaccaagcgaagcgcactagcaacaacctaacaacaatggctaccaagatattagccctccttgcgcttcttgcccttttagtgagcgcaacaaatgcgttcattattccacagtgctcacttgctcctagtgccattattccacagttcctcccaccagttacttcaatgggcttcgaacattcagccgtgcaagcctacaggctacaactagcgcttgcggcgagcgtcttacaacaaccaattgcccaattgcaacaacaatccttggcacatctaaacctacaaaccatcgcaacgcaacagcaacaacagtttctgccatcactgaaccacctag

SEQ ID NO: 20536 - DNA, 225 bp, Zea mays
  Clone ID: LIB3151-028-Q1-K1-H4
attgagaccaactagcaacatagaaagcacaattttgtaccaacaatggcagccaaaatattgtgcctccttatgctccttggtctttctgcaagtgctgctacggcgaccattttcccgaaatgctcgcaagctcctatagcttccgttctttccccgtacctctcaccagcggtgtctcttgtatgtgaaaacccaattcttcaaccctagctgatccaacag

SEQ ID NO: 20537 - DNA, 428 bp, Zea mays
  Clone ID: LIB3151-028-Q1-K1-H5
gtggaatccagtagcaacaatagagcaacaatggagaccaagatattttccctccttatgctccttgctctttctacatgtgttgctaacgcgacaattttccctcaatgctcacaagctcctatagcttccctttttcccccataccttccatcaattatagcttcagtatgtgaaaacccagctcttcaaccatataggcttcaacaagcaatcgcagcaagcaacatacctttatcgcccttgttgtgtcaacaatcgccagccctatctttggtgcagtcattggtacaaaccatcagggcacaacagctgcagcaactcgtgctacctgtgatcaaccaagtagctctggcaaacctttctccctactctccgcaacaacaatttcttccattcaaccaactgtctacactgaaccctgctgc

SEQ ID NO: 20538 - DNA, 362 bp, Zea mays
  unsure at all n locations
  Clone ID: LIB3151-028-Q1-K1-H8
gagaccaacaagcaacatagaaagtggaatacagtagcaacaatagagcaacaatggcggccaagatattttccatccttatgctccttgctctttctgcatgtgttgctaacgcgaccatttttcctcaatactcacaagctcctatagctgcccttcttcccccataccttccatcaatgaccgcttcagtatgtgaaaacccagcccttcaaccctacaggctccaacaagcaatcgcaacaagcaacttacctntatcacccctgttctttcaacaatcgccagccctatctttggtgcagtcattggtacaaaccatcanggcacaacagctgcagcaactcgtgctaccagtgatc

SEQ ID NO: 20539 - DNA, 374 bp, Zea mays
  Clone ID: LIB3151-029-Q1-K1-E3
ttagttaaatgcttcaatgcggaaaaatacttgatgattgccatgataattgttcattacggccattgttgacactgacacagccaaccatggggatgcctcacacattcttactcaactgttgccgttgaatgactcaactagatatgttgccagcggctctactacagcatataatttacttccattcaaccggcgtgctgcattgaacttctgatgcttattagcaacaacaataaccattcatgcaggatagttgctgcctacccccaataatgtcttccattcaatcaaatagcaataatgaactctgctgcttatttacagaagcaacaactactaccattcaggcagctagctgatgtgagccctgc

SEQ ID NO: 20540 - DNA, 292 bp, Zea mays
  Clone ID: LIB3151-029-Q1-K1-F9
ggaaatataacttcttattgctaggaggccacatacatcagccaaaaaacttcattattgaatgacaactaataagcaatctaaaagagggcaccgccaatgatgtgttgttggtagaaggctgctgggtttgtcaaagcaagttggacaaagggcagcaactgttgcagttgtaaaagggttgcggggttagccacaaactgctggtagaacggaagcaattgttgttgtgtcaagaaggaagcggggcttgttgtatctagctggccaaatggtagtagtatttgctgct

SEQ ID NO: 20541 - DNA, 93 bp, Zea mays
  Clone ID: LIB3151-030-Q1-K1-F9
aaaaaaaaaaaaaaaaaaaaaaaaaaaaaataaaaaaaaaaaaaaaaaaaaaaaaaagggagagaaaaaaaaaaaaaaaaaaagaaaaaaaaa

SEQ ID NO: 20542 - DNA, 144 bp, Zea mays
  Clone ID: LIB3151-033-Q1-K1-C1
tcgtgcttagccaactaaatttataaaatggagtcgcgatacaccctatctataatcaccactttggatccataccattgctatctcacttacatgtgggaccacatgagtcaaggacatgaggcgccatgatatatatgtaaa

SEQ ID NO: 20543 - DNA, 278 bp, Zea mays
  Clone ID: LIB3151-033-Q1-K1-C6
cttaaggtgtcgcttggaatcgtcacaccatatgaatgacacaccgtcacacccccgcactgttggctcacatcaacatgaacgaaacaaaaaaaaagagcttactactaccctggcccgacttttttttaaaaagagagagagagagaaaaggaactcaagagataagcaatcagcagcgctgctcatattctaacctatacataccggccggaaaccggcgagcgagcctgcggccggcgcggcgggggatcagaatcggctcagtccttgaagcc

SEQ ID NO: 20544 - DNA, 75 bp, Zea mays
  Clone ID: LIB3151-033-Q1-K1-D2
attatgaacattcaaaaacacaccaaacgtaagcatattatcaacaagctagcaccatttgggggagccaaatta

SEQ ID NO: 20545 - DNA, 127 bp, Zea mays
  Clone ID: LIB3151-033-Q1-K1-H5
ggtcttcagaccattagctttatctactccagagcgcagaagaacccgatcgacaccatgagggtgttgctcgttgccctcgctctcctggctctcgctgcgagcgccacctccacgcatacaagcg

SEQ ID NO: 20546 - DNA, 181 bp, Zea mays
  unsure at all n locations
  Clone ID: LIB3151-034-Q1-K1-G9
aaggagaaaaaaaaattttttttttttttataaaatttaaattaaaagaatttttataaaaaaaaaattatatgaagtgggagatggtaaaaatttttattaaaataaanggggaaaaaaaaaaaatattttttttttggaggtgtttttttataaaaaatttttttttttttaggggaat

SEQ ID NO: 20547 - DNA, 290 bp, Zea mays
  Clone ID: LIB3151-034-Q1-K1-H9
aagaggagacttgttttattgttaataatgagtcacacgcgatggcatgtcaactcattattcggtacaacacaaatatttctatctagaatgcagcaccaacaaagggttgctgtaagaacatgggtggaatcgtcatggccattgggttgaacatgaatggtaactgctgttgcagcataatctgcgagacggcgtcgcagtgacattgtggcatcatcatttgcgacatcatgctcggcaagaccattggtgacatcatgctcggcatcatcaatggtgacatcatg

SEQ ID NO: 20548 - DNA, 301 bp, Zea mays
  Clone ID: LIB3151-035-Q1-K1-F5
gcggccaggtcgcggggctgttggcggcgcagatagcgcagcaactgacggcgatgtgcggcctgcagcagccgactccatgcccctacgctgctgccggcggtgtcccccactgaagaaactatgtgctgtagtatagccgctggctagctagctagttgagtcatttagcggcgatgattgagtaataatgtgtcacgcatcaccatgggtggcagtgtcagtgtgagcaatgacctgaatgaacaattgaaatgaaaagaaaaaagtattgttccataaaaaaaaaaaaatacagaaa

SEQ ID NO: 20549 - DNA, 224 bp, Zea mays
  Clone ID: LIB3151-035-Q1-K1-H1
gttggaacaataattattatattatatttaaatgggctattcaagccattgctgagactgacactgccacccatggtgatgcgtgatacattattactaaatcattgccgctaaatgaattaactagcgatactagacagcggctgtaataaagcacataagctagtctatggggtacaccaactgaatgaagtgagctatgtacaacatctaaaacaacaaca

SEQ ID NO: 20550 - DNA, 54 bp, Zea mays
  Clone ID: LIB3151-037-Q1-K1-B4
ggaccccccttgaaccgggccttaaaggccggggggtggggggggttcccccca

SEQ ID NO: 20551 - DNA, 136 bp, Zea mays
  Clone ID: LIB3151-037-Q1-K1-E8
agcgttctaccaacaacccatcattggtggtgccctcttttagattgcttatgagttatagttcaataatgaagttgtttggatgatgtttgtggcttcccagaaatcagaaagtacatttctagattcttacaac

SEQ ID NO: 20552 - DNA, 146 bp, Zea mays
  Clone ID: LIB3151-037-Q1-K1-F6
agcgttctaccaacaacccatcattggtggtgccctcttttagattgcttatgagttataggtcaatcatgaagttttttagaaatgtactttcttattcctgggaagccacaaacatgatccaaaaatatgaaagtacatttctc

SEQ ID NO: 20553 - DNA, 268 bp, Zea mays
  Clone ID: LIB3151-038-Q1-K1-C10
gagataaataagaatcaatttattgattagttggaggaaacacatgccggaatgagggcaccattatcgagtacatctcatatgtaatctaaaagatggcacctccaacgatgggttgctgcctcgacaagacagggtttatcaaagagaactggttgtatggcaacaattgttgctgctgtaagaaggcatctaccaatgggttagccactgctagtggattaagtaactgttgtcgctgttgtatgtacgcaacaaaattcgacat

SEQ ID NO: 20554 - DNA, 252 bp, Zea mays
  Clone ID: LIB3151-039-Q1-K1-D2
atataacatttttttatgctttgcatcttattaatcctggcaaccatacataacatagtaccctgtcagtctggctcaatgcatacggacataccattcataccatctcatatgcttgtaccaaatcaactttgtctggcttcacagtgcctgaaatctaaggcgtccaggcatcactagccgtttatgtcgaagctttatgacaaccattactccaacagccgtcacgaatatttcaacccttaccttttg

SEQ ID NO: 20555 - DNA, 90 bp, Zea mays
  Clone ID: LIB3151-040-Q1-K1-B12
cccacgcgtccgaaaaaaaaaaaaaaaaaaaaaaaaaaaaaaaaaaaaaaaaaaaaaaaaaaagggcgggcgatataaaaaaaacaaaaa

SEQ ID NO: 20556 - DNA, 247 bp, Zea mays
  unsure at all n locations
  Clone ID: LIB3151-040-Q1-K1-B4
gtgggggggcgcgttttgcgagcgctacaaatgcgcgcacaatatacaaaacttatttgctcctaggtccattatttcnaatatttacaaacaattacttgaaggggcttataacacccctcttggctagcctataagctacaacaaccgattgcggcgagggggttacaacaactaattgtccaattgtaacaacaattcttggcacatcttacaatacaaaccatcgtaacaaaacaggaacaac

SEQ ID NO: 20557 - DNA, 292 bp, Zea mays
  Clone ID: LIB3151-040-Q1-K1-G7
ggaaaaaaacttttttttttttatttaaaatggtcattaagggaattgtttaaactgaaactgccacccatggggatgcgggacaaatttttacttaattatcgccgttaaaagacttaaatagcttgctagccagcggtttttctaaaacaaattttttttttaaggggggaaaccccccgcaacaacttaagggcatggaattggttttttaaagccaaaaattgcccgaagttgttgtgcttttttggccgcaaaaaaccccggaaactgggcctttttagggtttttt

SEQ ID NO: 20558 - DNA, 322 bp, Zea mays
  Clone ID: LIB3151-040-Q1-K1-G9
ggaacaatacttttttcttttcatttcaattgttcattcaggtcattgctcacactgacactgccacccatggtgatgcgtgacacattattactcaatcatcgccgctaaatgactcaactagctagctagccagcggctatactacagcaccccgatcctgggccagtgcgtcgagtttctgaggcatcagtgcagcccgacggcgacgccctactgctcgcctcagtgccagtcgttgcggcagcagtgttgccagcagctcaagcaggtggagccgcaacaccggtaccaggcgatcttcggcttggtcctcagtcca

SEQ ID NO: 20559 - DNA, 391 bp, Zea mays
  Clone ID: LIB3151-041-Q1-K1-C4
atcaagataaatctcaatcaatatattgattatttctaggaaacacatgccggtatgagggcaccattgttgagtacatctcatatgtaatctaaaagatggcacctccaacgatgggttgctgcaaggcagggttcatcaaagagaactggttgtatggcagcaattgttgctgctgcaggaagttagcgaccaatgggttagccactgctagtggattaagtaactgttgtcgctgttgtaggtacacagcagagttcgacacagccagttggttgaatggaagcaactgttgcaagtaggcagtagggtttgccacagctagctgagtcagagctggtacaatctgttgcagtaacttgtgttgtaagtacgtaggtgcattggccac

SEQ ID NO: 20560 - DNA, 418 bp, Zea mays
  Clone ID: LIB3151-041-Q1-K1-C8
tttttttttttttttttttttttttttttttttttttttttttttgttttttttttttttttttttttttttttttttttttttttttttttttttttttttttttttttttttaaagggggccaaatttttttttaaaaaaaaaaaaaaaaaaaaggaaaaaaacctggaaaaaaaaaaattttttttttttaaaaaaacggggggaaaaaaacactttgaaaaaaaggggggggaaaatttttattacggggggggaaaaaaccacaaaaaggggggggaaaaaaaaaaaaaagggggccgggaaaatttttaaaaataaaaagggccaaaaaagggggccacattcccgagggggaattagaaaaaaaaattttttttttgggggaaacaaaaaggttttttttttaattggggg

SEQ ID NO: 20561 - DNA, 308 bp, Zea mays
  Clone ID: LIB3151-041-Q1-K1-G1
tttgaaggcccaaagcggtcccaccaaaggatccaagattacttaggcttgcttgccacgttggactttctgcatgtgctgatactagagaccattttctgacagtgcgtcacacgctgctatagctggcattactccgccgtacctcaaccaacggggcttgcagaaagtgaaaacccaacagttgaccctataggatacaacaggcaatcgatagtggtatcataccttgatcacccttgatgctccaacgatcatcacccttattacaggcattacgcgcggtgcatgtagtggctacaaacatc

SEQ ID NO: 20562 - DNA, 336 bp, Zea mays
  unsure at all n locations
  Clone ID: LIB3151-042-Q1-K1-A3
tttttttttttttttataattanatttattttgtgntttgtttttttttatatttaattattctttcccggggggttatttttaaatataaaaaatgtggatgttgaagtttttataaaaacaatgaatatttatttgcgtaggagcaacagtaatttgtttttatttgcccgcnccggtttaaaaaaaaagggaaaaaaaaatatttttttttttagaaaaaaaaaaagggggttgggggggcccatttttaataaaacttttttatggaaaacaaaaaaaaggtggcctcccaaaaggggtgttgtgtgtttaaaaaaaaaaaagagaggtttt

SEQ ID NO: 20563 - DNA, 129 bp, Zea mays
  Clone ID: LIB3151-042-Q1-K1-G8
tgaaatgggactcgcactgtagctgtacattaacctcaagcgctgtggttgttacgctcaccctcaccgttacacttgccattgccatagcgctagctccttttgctttctttcctttctttttcgtca

SEQ ID NO: 20564 - DNA, 87 bp, Zea mays
  Clone ID: LIB3151-043-Q1-K1-D6
catatgagatgtactcgataatggtgccctcataccggcatgtgtttcctagaaataatcaatatattggttgagatttatctcgat

SEQ ID NO: 20565 - DNA, 368 bp, Zea mays
  unsure at all n locations
  Clone ID: LIB3151-043-Q1-K1-G7
aagaatctanaaatgtactttgttatttctggaaagccacagaacatcacggcacaacaactacaacaacttgtgctagcaaaccttgctgcctactctcagcaacagcaatttctttcattcaaccaactagctgcattgaactctgcttcttatttgcaacaacaacaactaccattcaaccagctatctgctgcctacccccagcaatttcttccattcaaccaactgacagcattgaactctcctgcttatttacagcagcaacaactactaccattcagccagctagctggtgtgagccctgctaccttcttgacacaaccacagatggtgccgttctaccaacacgctgcgcctaacgctgc

SEQ ID NO: 20566 - DNA, 60 bp, Zea mays
  Clone ID: LIB3151-044-Q1-K1-D2
gttctagatcgcgagccggcggtttaaaagattccaacttacctacccctgccttccaac

SEQ ID NO: 20567 - DNA, 300 bp, Zea mays
  Clone ID: LIB3151-044-Q1-K1-F8
gggagcacgcatgcaagctgtttttttttattcaaaaaattccgaggagcggggacgacaacaacgtcctgctggtcctgcatgcatgtagtcctttacccacgacgggggtcgccgaaacttggggcgggcttcttcttcttcttgggggccgtgccggcaacaaggtgcttgtaaaccaccccggaaaggccggggccgaccatgggccccacccaatacacccattggtgttttcagggacgggagcccacaaaggggggcccgaacgcgcgcgccggatttattaaggggcccttc

SEQ ID NO: 20568 - DNA, 107 bp, Zea mays
  Clone ID: LIB3151-044-Q1-K1-G8
tggcgttttagcagatagggtcataccgaacaggcttgcaaagagcggcgcttccaacatgtgcacaggctcaatggctaatgggacgcactctgtaccggcgcatt

SEQ ID NO: 20569 - DNA, 162 bp, Zea mays
  Clone ID: LIB3151-046-Q1-K1-E3
cacaggggaacaacactttgggattttcatttcaatgggccattgaggccatggctaacactgacactgccacccatggggatgggcgacacattattactcaatcatcgccgttaaatgactaacctagctagctagccaacggctatactacagcacata

SEQ ID NO: 20570 - DNA, 72 bp, Zea mays
  Clone ID: LIB3151-047-P1-K1-A12
atgcgtgcgacaatggagaccttgtattgtgtcatccatatgcaacttgctgtccgtggatgtgcagctaac

SEQ ID NO: 20571 - DNA, 174 bp, Zea mays
  Clone ID: LIB3151-047-P1-K1-F5
caacaacccatcattggtggtgccctcttttagattgcttatgagttatagttcaataatgaagttttttttaagaatctagaaatgtactttcttatttctgggaagccacaaacatcatccaaaaaataagaaagtacatttctagattcttaaaaaaaaaacaacaaataa

SEQ ID NO: 20572 - DNA, 112 bp, Zea mays
  Clone ID: LIB3151-047-P1-K1-H1
ggtcaaattatcgtattctctttattgccaacacacacaaaaaaagggttaacatttttttattggtttacaacacccttcaaggggaaaaaagaatgggcagagcatgaat

SEQ ID NO: 20573 - DNA, 250 bp, Zea mays
  Clone ID: LIB3151-047-P1-K1-H7
ggagataaatctcaaccaatatattgattatttctaggaaacacatgccggtttgagggcaccattatcgagtacatctcatatgtaatctaaaagatggcacctccaacgatgggttgctgcctcgacaagacaggattcatcaaagagaaccggttgtatggcagcaattgttgctgctgtaggaaggcagcgaccaatgggttagccactgccaatggattaagtaactgttgtcgctgttgtaggt

SEQ ID NO: 20574 - DNA, 137 bp, Zea mays
  Clone ID: LIB3151-048-P1-K1-C2
actcaacagagttctaccaacaacccatgattggtggtgccctcttttagattgcttatgagttatagttcaataatgaagttttttggatgatgcttgcggcgtcccagaaataagaaagtacatttctagattct

SEQ ID NO: 20575 - DNA, 88 bp, Zea mays
  Clone ID: LIB3151-048-P1-K1-E6
gttctatatagcgagcagccctactagttgtatagagttcaagcacccttacgtgagagggtataatgttgttataggtccatctcat

SEQ ID NO: 20576 - DNA, 127 bp, Zea mays
  Clone ID: LIB3151-049-P1-K1-H11
agtgccatctccaaacatacaagctttgcatgacattgccatttagcgagttggcgttatatacaagaggcgtggaatgttcgaccttccgatgttgtcattttacccacaggttgtgggaaacatt

SEQ ID NO: 20577 - DNA, 306 bp, Zea mays
  Clone ID: LIB3151-050-P1-K1-H5
gttgactccaccactacaggtccatttatttactcgcaatataaaattaccgatcggttcttaactacacacgcaagcaatttgttcatgcgcttatttaggtgggccactggcccccacttcacttcatttaccttggacaaggaggcggtttcacatacttgtccatattacataaacgaaacaggattttttagaagatgttccaacatttttttcccacccgcgagattaggggccctttaagccgaaatttttagggggggggcaagtttttttggggaggggggggattttttttttttt

SEQ ID NO: 20578 - DNA, 68 bp, Zea mays
  Clone ID: LIB3151-052-Q1-K1-G3
actacgcgtgcatgcgactattctctttataggcacctaatcaatcactgccgcgggacacgtctgct

SEQ ID NO: 20579 - DNA, 398 bp, Zea mays
  unsure at all n locations
  Clone ID: LIB3151-053-Q1-K1-A10
ntnncgccaacctagcaacataagaaaagcaccaatatgtgttaccaaacaaatggcagaccaaaatatgtgggcctccttatgctccttggtctttctgcaagtgctgctaccgcgaccattttcccgaaatgctcgcaagctcctatagcttcccttcttcccccgtacctctcaccagcggtgtctttggtatgtgaaaacccaattcttcaaccctacaggatccaacaggcaatcacagctggcatcttacctatatcacccttgttcctccaacaatcatcagccctattacatcagttacctttggtgcatttattggcacaaaacatcagggcacaacaactacaacaactngtgctagcaaaccttgctgcctactctcagcaacagca

SEQ ID NO: 20580 - DNA, 119 bp, Zea mays
  Clone ID: LIB3151-053-Q1-K1-A11
gtaggtatctctacggcagagcgcttaagaaccacctccacaccatcaatctgaggctgaggaacgtcagtgtcctgattgtcaactccgacctgcagcgcctgcatacaagcgccatc

SEQ ID NO: 20581 - DNA, 361 bp, Zea mays
  Clone ID: LIB3151-053-Q1-K1-A12
attttcagcattcagaaacacaccatgctaagcgcactagcaacaacctaacaacaatggctaccaagatattagccctccttgcgcttcttgcccttttagtgagcgcaacaaatgcgttcattattccacagtgctcacttgctcctagtgccattattccacagtttcctcccaccagttacttcaatgggcttcgaacatccagccgtgcaagcctacaggctacaactagcgcttgcggcgagcgtcttacaacaaccaattgcccaattgcaacaacaatccttggcacatctaaacctacaaaccatcgcaacgcaacagcaacaacagtttctgccatcactgagccacctag

SEQ ID NO: 20582 - DNA, 188 bp, Zea mays
  Clone ID: LIB3151-053-Q1-K1-A2
gtaccggtatcgcatggtcggcccacgcgtccgcaactagcaacatagaaagcacaattgtgtaccaacaatggcagccaaaatattttgcctccttatgctccttggtctttctgcaagtgctgctacggcgaccattttcccgaaatgctcgcaagctcctatagcttcccttcttcccccgtacc

SEQ ID NO: 20583 - DNA, 363 bp, Zea mays
  unsure at all n locations
  Clone ID: LIB3151-053-Q1-K1-A3
gaccattagctttatctactccagatcgcataagaacccgatcgacaccatgagggtgttgctcgttgccctcgctctcctggctctcgctgcgagcgccacctccacgcatacaagcggcggctgcggctgccagccaccgccgccggttcatctaccgccgccggtgcatctgccacctncggttcacctgccacctccggtgcatctcccaccgccggtccacctgccgccgccggtccacctgccaccgccggtccatgtgccgccgccggttcatctgccgccgccaccatgccactaccctactcaaccgccccggcctcagcctcatccccagccacacccatgcccgtgccaaca

SEQ ID NO: 20584 - DNA, 302 bp, Zea mays
  Clone ID: LIB3151-053-Q1-K1-A5
catcaagcctaatcaccacagggggggatttaataaaatacgggcggccaacaaccaagacgggtcaacaatggcctttacaaccaacctgaccacgaaccagcaaagctgaccgttaatgcatgtcccggcactcgcattaccttgtaagccactaagaggcaagaccgacagcctctaattccctagccgcacgatgttctccaacgccaacctcaacccgcgccccggcgtcccaacgcagcacaacccacgggagcccgatcccaaggactttctgaacctcaacaactgcgacatca

SEQ ID NO: 20585 - DNA, 381 bp, Zea mays
  Clone ID: LIB3151-053-Q1-K1-A6
gaccaactagcaacatagaatgcataatagtgtaccaacaatggcagccaaaagattttgcctccttatgctccttggtctttctgcaagtgctgctacggcgaccattttcccacaatgctcacaagctcctatagcttcccttcttcccccgtacctctcaccagcggtgtcttcggtatgtgaaaacccaattcttcaaccctataggatccaacaggcaatcgcagctggcatcttacctttatcacccttgttcctccaacaatcatcagccctattacagcagttacctttggtgcatttattggcacaaaacatcagggcacaacaactacaacaacttgtgctagcaaaccttgctgcctactctcagcaaca

SEQ ID NO: 20586 - DNA, 140 bp, Zea mays
  Clone ID: LIB3151-053-Q1-K1-A7
ggagaaccctccgagcattctagtgtctcccatggctccggccatgtcggggcagttcacaagaatcaccttcagcaacctgtttgtccgtcgggctggcccaggcagcacggagctgaccgtggagggaaggccatccg

SEQ ID NO: 20587 - DNA, 373 bp, Zea mays
  Clone ID: LIB3151-053-Q1-K1-A8
cttcaagaggggatcatcatattgttcttattattccttattactccaggcaaggatcggagttgctctgaattgactgaaccatggcggcgacaatggcagtgacgacgatggtgacgaggagcaaggagagctggtcgtcattgcaggtcccggcggtggcattcccttggaagccacgaggtggcaagaccggcggcctcgagttccctcgccgggcgatgttcgccagcgtcggcctcaacgtgtgcccgggcgtcccagcggggcgcgacccgcgggagcccgatcccaaggtcgttcgggcggccgacaactgcgacatcgcgcgccagcttggcgccgccgttcccgggcagcaggccgcctggga

SEQ ID NO: 20588 - DNA, 236 bp, Zea mays
  Clone ID: LIB3151-053-Q1-K1-A9
ccggaatgccggcgacccacgcgtcgcacatcgccacagccaacactaccccggcacgacagccgcggagaagaataaactcactgccaccaggaaggggagaaggtctgtcgcaccaggccgcaccgccgaggctgtattgtgcaccagggattaatgctggcggttggcatacactgtcaccccgcggctggcgtcggcgctcacttcgcgtgccgcaggctgagggggccgcg

SEQ ID NO: 20589 - DNA, 380 bp, Zea mays
  Clone ID: LIB3151-053-Q1-K1-B1
caactagcaacatagaaagcacaatattgttccaacaatggcagccaaaatatgttggttccttatgctccttggtctttctgcaagtgttgctaccgcaaccattttcccacaatgctcacaagctcctatagcttcccttcttcccccatacctctcaccagcggtgtcttcaatgtgtgaaaacccaattgttcaaccctacaggatccaacaggcaatcgcaacaggcatcttaccattatcacccttgttcctccaacaaccgtcagccctattacagcagttacctttggtccatttggtggcacaaaacatcagggcacaacaactacaacaacttgtgctagcaaaccttgctgcatactctcagcaacatc

SEQ ID NO: 20590 - DNA, 376 bp, Zea mays
  Clone ID: LIB3151-053-Q1-K1-B10
gtcttcagaccattagctttatcttttccatagcgcagaagaacccgatcgacgccaggagggtgttgctcgttgccctcgctctcctggctctcgctgcgagcgccacctccacgcatacaagcggcgggtgtggatgccagccaccggcggcggttcatctaccgccgccggtgcatctgccacctccggttcacctgccacctccggtgcatctcccaccgccggtccacctggcgccgccggtccacctgccaccgccggtccatgtgccgccgccggttcatctgccggcggcaccatgccactaccctactcaaccgccccggcctcagcctcatccccagccacacccatgcccgtgccaacagccgca

SEQ ID NO: 20591 - DNA, 382 bp, Zea mays
  Clone ID: LIB3151-053-Q1-K1-B11
gcggaccgccgaggaaatggcgtttttgcttagctggcgcaaggcctacggcggcatgaaggacaccaccaccggtagcatcgccaatctcaactccgacttcaaggatctggatgtggcgatcgtgaaggcgactaaccacgtggagtgcccgcctaaggagcgacacctgcgcagggttgttgcggcgacgtccatcaccaggcctcgggcagatgtcgcctactgcatccacgcccttgcccgccgtcttgccaagacccgcaactggatcgttgctctaaaagcacttgtagtgatccatagacttcttcgcgagggtgatcctacatttcgagaagagcttctcaactttacacagaggggacggatcctgcaactt

SEQ ID NO: 20592 - DNA, 385 bp, Zea mays
  Clone ID: LIB3151-053-Q1-K1-B12
caactagcaacatagaaagcacaattttgttccaacaatggcagccaaaatatggtggttccttatgctccttggtctttctgcaagtgttgctaccgcaaccattttcccacaatgctcacaagctcctatagcttcccttcttcccccatacctctcaccagcggtgtcttcaatgtgtgaaaacccaattgttcaaccctacaggatccaacaggcaatcgcaacaggcatcttaccattatcacccttgttcctccaacaaccgtcagccctattacagcagttacctttggtccatttggtggcacaaaacatcagggcacaacaactacaacaacttgtgctagcaaaccttgctgcatactctcagcaacatcagttt

SEQ ID NO: 20593 - DNA, 381 bp, Zea mays
  Clone ID: LIB3151-053-Q1-K1-B2
cagaccattagctttatctactccatagctcagaagaacccgatcgacaccatgagggtgttgctcgttgccctggctctcctggctctcgctgcgagcgccacctccacgcatacaagcggcggctgcggctgccagccaccgccgccggttcatctaccgccgccggtgcatctgccacctccggttcacctgccacctccggtgcatctcccaccgccggtccacctgccgccgccggtccacctgccaccgccggtccatgtgccgccgccggttcatctgccgccgccaccatgccactaccctactcaaccgccccggcctcagcctcatccccagccacacccatgcccgtgccaacagccgcatccaagcccg

SEQ ID NO: 20594 - DNA, 397 bp, Zea mays
  Clone ID: LIB3151-053-Q1-K1-B3
ggtcgggccacgcgtccgcagcaaagggggccccgaaccaaatttgttatgtgaatgcttcttcctggcagggttgtggaccacctccatcacaggcagttgcccctgtccaaatgagttccaatgctcccagtcattccaggtcaagtgctgaagatgatttgttttggggcccttctgagcactccaaacaagatacaaagcagtctgagtttccaagtctgttgagccaaagcagaagttccatgatgaaggatcattctgcactgaatcgtcaaaagtctcaggcaggcagattaccagttccttctgctgctactgcaaaccaatctggcaaagggaaagcagaggctacaaacaagcagactgaggcaatggacttcagagattggttgga

SEQ ID NO: 20595 - DNA, 378 bp, Zea mays
  Clone ID: LIB3151-053-Q1-K1-B4
aattagctcatcgactccagattggagaactcgacaccatgaaggtgctgatcgttgcccttgctctcctggcgctcgctgcgagcgccgcctccagtacaagcggcggctgtggctgccagacaccaccgtttcatctaccgcctccgttctatatgccgcctccgttctatctgccgccgcagcagcagccgcagccatggcaataccccactcaaccaccgcagctaagcccgtgccagcagttcggatcctgcggcgtcggcagcgtcggcagcccgttcctgggccagtgcgtcgagttcctgaggcaccagtgcagcccggcggcgacgccctacggctcgccacagtgccaggcgctgcagcagcagtgct

SEQ ID NO: 20596 - DNA, 381 bp, Zea mays
  Clone ID: LIB3151-053-Q1-K1-B5
caggagtacgagagtgctgcttctttctggcctcaggtgcactcccggagaagggctagcctactcatctctcatgtaactctgtttgggttgatgagcacaaaggaagctgcgtactccacccctctgctcatcttcctgcctctgctgacgatctggttccacaaatactgcaagagccggttcgaaccagctttcagaaagtatcctcttgaggaagcaatggcgaaggacaccatggagcacgcatcggagcctaacctgaacctggaatccttcctggctaacgcttacctgcaccccatcttccgccttttcgaggaagccgggaaagaggaggagacggtggaggtgaggatcgacaaagccgagaagcagcag

SEQ ID NO: 20597 - DNA, 383 bp, Zea mays
  Clone ID: LIB3151-053-Q1-K1-B6
cagaaacacaccaagcgaagcgcactagcaacaacctaacaacaatggctaccaagatattagccctccttgcgcttcttgcccttttagtgagcgcaacaaatgcgttcattattccacagtgctcacttgctcctagtgccattattccacagttcctcccaccagttacttcaatgggcttcgaacatccagccgtgcaagcctacaggctacaactagcgcttgcggcgagcgtcttacaacaaccaattgcccaattgcaacaacaatccttggcacatctaaacctacaaaccatcgcaacgcaacagcaacaacagtttctgccatcactgagccacctagccgtggtgaaccctgtcgcctacttgcaacagcaa

SEQ ID NO: 20598 - DNA, 378 bp, Zea mays
  Clone ID: LIB3151-053-Q1-K1-B7
cctcctcctctcctttcctctcctttaggctctagtcctctcgcatccgcaggttccccagccagctagggtttgcagatgacgaccgcggcgcgccccacctgggcgccggccaagggcggcaacgagcaggggggcacccgcatcttcggcccctcccagaagttctcctcccgcgacctcgccgcgcacacctccctcaagccaagaaaagacggtcaacagacccaagaggagttacagaagaggaatctcagggaggaacttgaggaacgtgagcgcaagcactactcttccaaggataagtcctatgccgaagaaagagaccggcggaaaagctctagccatctactcttagaaggttcaaagagagagaca

SEQ ID NO: 20599 - DNA, 351 bp, Zea mays
  unsure at all n locations
  Clone ID: LIB3151-053-Q1-K1-B8
gntctaaatcgctagcggccttcttttttttttttttttttttatctagggggtaatttagaacaatacttgtgttcttttcattacaattgatcactcaagccattgcccacactgatccttccccccatggctaaccccacacattattactcaaacatagactccaaatcacttatgtagcttgctcacctcccaccatccctgaaccaacatgccacctcctctacccacgcccccttctgcctatttgccatcacccgttcatggacctttgctctaaaatcactcgtcgcgagccatacactactctactaaaccgaaccgacattaaaccaatacccactcaca

SEQ ID NO: 20600 - DNA, 369 bp, Zea mays
  Clone ID: LIB3151-053-Q1-K1-C1
ggagaaggagaaagcactggagcatcttaaagttactgaaggaaaaactgtagctgttgggcaaaagatggaccttgttttctacacactacaaataggattgttctatatggactttgatctcatctcgaagtccattgacaaagcgaaaaacttgtttgaggaaggtggtgattgggaaaggaagaacagattgaaagtatatgaagggttgtactgcatggcaactagaaacttcaagaaagctgctagtttattcttggattcaatttcaactttcacgacatatgagctattcacatatgatacattcatcttctacacagtcctcacgagtgttatatctctggaccgtgtatctctgaaaca

SEQ ID NO: 20601 - DNA, 322 bp, Zea mays
  unsure at all n locations
  Clone ID: LIB3151-053-Q1-K1-C10
cgcagncgcagcgcacgccatcagtttgcatttagcgcgctcctccagcccaggagagaaaggccggcctacccactctctctctctctccaggctccaccggcagcgccaatagtaatagccatgggctccaccgccggcgacgtggccgcggtggtggacgaggaggcgtgcatgtacgcgatgcagctggcgtcgtcgtccatcctgcccatgacgctgaagaacgccatcgagctgggcctgctggaggtgctgcacaaggaggccggcggcggcaaggcggcgctggcgcccgaggaggtggtggcgcggatgcccg

SEQ ID NO: 20602 - DNA, 247 bp, Zea mays
  unsure at all n locations
  Clone ID: LIB3151-053-Q1-K1-C12
ccattttcccacaatgctcacaagctcctatagcttccctttttcccccgtacctctcaccaacggtgtcttcggtatgtaaaaacccaattcttcaaccctacaggatccaacaggcaatcgcagctggcatcttacctttatcacccttgttcctccaacaatcatcagccctattacagcagttacctttggtgcatttattggcacataacatnatggcacaacaactacaacaacttgtgct

SEQ ID NO: 20603 - DNA, 359 bp, Zea mays
  unsure at all n locations
  Clone ID: LIB3151-053-Q1-K1-C2
gctccagaccattatctttttttattccagaacacanaaaaacccgggcgacaccatgagggtggtgcgagtgccccacgctattgtgggtggggtgcgcactgcacctncacgcatacaagcggcggctgcggctgccagccaccgccggcgggtcatctaccggcgccggagcatatgccacctgcggttcacctgccacctccggtgcatattccaccgtcggaacacctgccgacgccggtccacctgccaacgccggtccatgtgccgccggcggttcatctgccggcgacaccatgccactaccatactcaaccgacccggcctcagcctgatacccagacacacccatgccc

SEQ ID NO: 20604 - DNA, 372 bp, Zea mays
  Clone ID: LIB3151-053-Q1-K1-C3
gggtcttcagaccattagctttatttactccagagcgcagaagaacccgatcgacaccatgagggtgttgctcgttgccctcgctctcctggctctcgctgcgagcgccacctccacgcatacaagcggtggctgcggctgccagccaccgccgccggttcatctaccgccgccggtgcatctgccacctccggttcacctgccacctccggtgcatctcccaccgccggtccacctgccgccgccggtccacctgccaccgccggtccatgtgccgccgccggttcatctgccgccgccaccatgccactaccctactcaaccgccccggcctcagcctcatccccagccacacccatgcccgtgccaaca

SEQ ID NO: 20605 - DNA, 308 bp, Zea mays
  Clone ID: LIB3151-053-Q1-K1-C4
gtgcgattcagatctcgcagtcaattttttttttgttctcgcgagtatctaggggttggaggagatatgcaggttgcacttgcattggacacgaactcaggtccttaccagataagatcttgtgagggtgatgggattgacaggttggaaaaattaagtattgggggcacaacgcaggagaaagctttgagaaataggtgctttggtggtagagctgctgcaactacacaatgtattcttacctcagatgcttgtgctgaaactcctcattctcaaagacaagtttctacgaaaaatcatgctgatgc

SEQ ID NO: 20606 - DNA, 365 bp, Zea mays
  Clone ID: LIB3151-053-Q1-K1-C5
attttgagcattcagaaacatactttgcgaagcacattagcaacaacctaacagcaatggctaccaagatattatccctccttgcgcttcttgcgctttttgcgagcgcaacaaatgcgttcattattccacaatgctcacttgctccaagttccattattacacagttcctcccaccagttacttcaatgggcttcgaacacccagctgtgcaagcctataggctacaacaagcaattgcggcgagcgtcttacaacaaccaatttcccagttgcaacaacaatccttggcacatctaacaatacaaaccatcgcaacgcaacagcaacaacaattcctaccagcactgagccacctagccatg

SEQ ID NO: 20607 - DNA, 382 bp, Zea mays
  Clone ID: LIB3151-053-Q1-K1-C6
attgagaccaactagcaacatagaaagcacaatagtgtaccaacaatggcagctaaaatattttgcctccttatgctccttggtctttctgcaagtgctgctacggcgaccattttcccacaatgctcacaagctcctatagcttcccttcttcccccgtacctctcaccaacggtgtcttcggtatgtgaaaacccaattcttcaaccctacaggatccaacaggcaatcgcagctggcatcttacctttatcacccttgttcctccaacaatcatcagccctattacagcagttacctttggtgcatttattggcacaaaacatcagggcacaacaactacaacaacttgtgctagcaaaccttgctgcctactctcagc

SEQ ID NO: 20608 - DNA, 309 bp, Zea mays
  Clone ID: LIB3151-053-Q1-K1-C7
ccgggggacccgcggcgggaaagagaaagcctggacatttaattttctgagaaaaactgagcggtgggcaaagatgaccgtgttttaccactacaaatggattgtctatagacttgatctcatctcaagtccattgacaaagcgaaaaacttgtttgaggaagtggtgattgggaaaggaagaacagattgaaagtatatgaagggttgtctgcatggaactgaaacttaagaaagctgctgttattcttggattaatttaacttcacgacatatgagctattacatatgatacattcatcttttacac

SEQ ID NO: 20609 - DNA, 109 bp, Zea mays
  unsure at all n locations
  Clone ID: LIB3151-053-Q1-K1-C9
gcgccgccgnctccatgtccaccttttcatccaccgcggcaccactgcactacggacatattactccccttgatggcccttgttctctgtgcacacgttgctcacgcaa

SEQ ID NO: 20610 - DNA, 376 bp, Zea mays
  unsure at all n locations
  Clone ID: LIB3151-053-Q1-K1-D1
gcgccgccgnctccatctccaccctttcatcctccgcggcgcccctgcactacggccatcgcactcccctcgctggcccttttcctctgtccccaccttgcccgcgcatcctccgtgcggccgtcgcggtttcttcgctggatctgcgcccgatcaccggcgggttcgcgctattcagcatggctgctgcctcctccgccacctccgtccacgacttcaccgtcaaggatgctagcgggaaagatgtggaccttagcacctataaggggaaggttctgctcatagtcaatgttgcatctcagtgtggcttaaccaattccaactacacagagctgagccagttgtatgagaagtacaaggaccagggttttgagat

SEQ ID NO: 20611 - DNA, 211 bp, Zea mays
  Clone ID: LIB3151-053-Q1-K1-D10
gccacaccccacgcccccacaccatttcttatcgcctgctccctatcgcccgggtggggttgtccacgctccgggggagtgaatgagcaactttgcttatccatcttcccattgcgttcccacccgcggtccggcggcggtacgtgaccctgacgcctcaacgctagctagctcttcggaacagcaggctgttgttcactacctgagatca

SEQ ID NO: 20612 - DNA, 386 bp, Zea mays
  Clone ID: LIB3151-053-Q1-K1-D11
agaccattagctttatctactccatatcttataagaacccgatcgacaccatgagggggttgctcgttgccctggctgtcctggctctagctgtgagcgccacctacacgcatacaagcggaggctgacgctgccaaccaccgccgccggttcatctaccgccgccggtgcatctgccacctgcggttgacctgccacctacggtgcatctcctaccgccggtacacctgccggcgaccgtccacctgccaccggcggtccatgtgccgccggcggttcatctgacgccggcaccatgccactaccctactgaaccgtcccggtctaagcctcatcctcagccacacccatgcccgtgccaacagtcgcatacaagcccgtgccag

SEQ ID NO: 20613 - DNA, 346 bp, Zea mays
  unsure at all n locations
  Clone ID: LIB3151-053-Q1-K1-D12
cccacgcgtccggttcgttcgggttttttacacacaaccagatctcccccgaatgggcccgtcggcacctccgctggaagatgcatatctttgtgaaaaccctgaccggcaagactatcaccctcgaggtggagtcgtctgacaccattgacaacgttaaggccaagatccaggacaaggagggcatccccccagaccagcagcggctcatcttcgctggcaaacagcttgaggacgggcgcacgcttgctgactacaacatccagaaggagagcaccctccaccttgtgctccgcctcangggaggcatgcagatcnttgtgaaaaccctgaccgggcagactat

SEQ ID NO: 20614 - DNA, 378 bp, Zea mays
  Clone ID: LIB3151-053-Q1-K1-D2
cagaaacacaccaagcgaagcgcactagcaacgacctaacaacaatggctaccaagatattagccctccttgcgcttcttgccctttttgtgagcgcaacaaatgcgttcattattccacaatgctcacttgctcctagtgccattattccacagttcctcccaccagttacttcaatgggcttcgaacacctagctgtgcaagccaacatgcaacaacaagcgcttgcggcgagcgtcttacaacaaccaattgcccaattgcaacaacaatccttgccacatctaacaatacaagccatcacaacgcaacagcaacaacagttcctaccagcactgagccacctagccatggtgaaccctgccgcctacttgcaag

SEQ ID NO: 20615 - DNA, 380 bp, Zea mays
  unsure at all n locations
  Clone ID: LIB3151-053-Q1-K1-D3
tattatcgcgaccaactagttgcattaaaagcacactagcgtcccagcggcggcagacaaaatattttgctgcgctatgcgccctggtcgtgaccggcagcagtaggctacccgaataccattacaaccacaaagctgacaagctcctatagcttccacttgttcccccatacctctcaccagcggggttttcaatgtgtgaaaacccaattgatcaaccctacacgatccaacaggcaatcgcaacaagcatattaccattatcacccttgttactacaacaaccgtcagccctattacagcagctacctttggtccatttggcggcacaaaacatcagggcacaacaactacaacaactngtgctagcaaaccttgct

SEQ ID NO: 20616 - DNA, 370 bp, Zea mays
  Clone ID: LIB3151-053-Q1-K1-D4
gcaggagccttttctcgcactcgcttgtctgcatttaccacattgccctcgggggcggcgccgaccagctgccggcgcgtccagcaaaacaaccggccgtaggtccaaaatagttccccatggcgtccatatcgtcgcttccctttgcgccgctgcgcggagccgccgagtggaggccgtcgtcgacggcggcggccgcctccggcgccgtcgtgctcagcgcgaggtctcggcggggctcgggctcggtggtgcgctgcgtcgccacggcgagtgatgtcccacctactgttggagaaacaaagttgaacttccttaagtcatacaaacgcccaatcccaagcatttacagtacggtcttacaagaact

SEQ ID NO: 20617 - DNA, 341 bp, Zea mays
  Clone ID: LIB3151-053-Q1-K1-D5
gatggcttctccttccccttttgttttggttcgggttcctgaggttctgggggggttattttcgtgggtgagcggatcgagatggcggcgtcggatgttgagtaccgctgtttcgtcagcggcctcgcctgggccacggacgaccactccctccacaacgccttcagcacctacggcgaggtcctcgagtccaagatcatcctcgatcgggagacgcagaggtcccgcggcttcggcttcgtcaccttctccacggaggaggcgatgcggaacgccatcgagggcatgaacggcaaggagctggacggccgcaacatcaccgtcaacgaggcccagtcccg

SEQ ID NO: 20618 - DNA, 379 bp, Zea mays
  Clone ID: LIB3151-053-Q1-K1-D6
aacacaccaagcgaagcgctttatttacaacctaacaacaatggctaccgagaggttattcctccttgcgctggttgcgctttttgcgagcgcaacaaatgcgtccattattccacaatgctcacttgctcctagttccattattccacagttcctcccaccagttacttcaatggccttcgaacacccagctgtgcaagcctataggctacaacaagcgattgcggcgagcgtcttacaacaaccaattgcccaattgcaacaacaatccttggcacatctaacaatacaaaccatcgcaacgcaacagcaacaacagttcctaccagcactgagccacctagccatggtgaaccctgtcgcctacttgcaacagcag

SEQ ID NO: 20619 - DNA, 365 bp, Zea mays
  unsure at all n locations
  Clone ID: LIB3151-053-Q1-K1-D7
actccagagctcatattaacccgatcgacaccatgagggtgccgctcggtgccctcgctctgctggctctcgctgcgagcgccacctccacgcatacaagcggcggatgcggctgccagccaccggcgacggatcatctaccgncgacggtgcatctgccacctacggttcacctgccacctacggtgcatctcccaccgacggtccacctgccgncgacggtccacctgccaccgacggtccatgtgccgtcgacggttcatctgccgncgacaccatgccactaccctactcaaccgccccggactcagcctcatccccagccacacccatgcccgtgccaacagccggatacaagcccgtgc

SEQ ID NO: 20620 - DNA, 335 bp, Zea mays
  Clone ID: LIB3151-053-Q1-K1-D8
gagctcacgtcagttgctgctccctttattttctcctcctgctcctgccctcgggtggtgatcagcgaacatgggaacccgcggcgtctccctgctgctcctcgcggcggtgctgctcctccaggcgctcctccccgcgtcgtcggagggcctggtgcgggtcgcgctgaagaagcagcccgtcgaccagaacggccgtgtcgccgcgcgcctctccgccgaggagaggcagcgccttctcctccgcggcgccaacgccctgggctcaggcggcgacgacgactccgacgtcatcgcgctcaagaactacatgaacgcgcagtactttggggaga

SEQ ID NO: 20621 - DNA, 376 bp, Zea mays
  Clone ID: LIB3151-053-Q1-K1-D9
cccagagcagacccggatttcgcttttgttgtcgctggggttttagcattgggtgatcagttcgatccgatccggctgcgaaggcgagatggcgttcgcggtttctggggcggtgctcggtggggccgtaagggctccccgactcaccggcggcggggagggtagtctagtcttccggcacaccggcctcttcttaactcggggtgctcgagttggatgttcggggacgcacggggccatgcgcgcggcggccgcggccaggaaggcggtcatggttcctgagggcgagaatgatggcctcgcatcaagggctgactcggctcaattccagtcggatgaactggaggtaccagacatttctgaagagacaacgtgc

SEQ ID NO: 20622 - DNA, 358 bp, Zea mays
  Clone ID: LIB3151-053-Q1-K1-E1
cagcattgaactctcctgcttattttcagcaccaacaactactaccatggaggcagctatctggtgtgagcgcggttacctccttgatacaaccacaacagatgccgttataacatcacactgctcataacgctggtaccctattacaactgcaacaattgctgccattcaaccaacttgctttgacacaacctcagcagcgcaagtacacacacaacccatcatatcacttgcgcctatgtgtagataccatatcaaatttatcacaatcatcaacaattctggcctcatctatcaggcttcgccaacataacgcagcaccttcgtcagaaaataccaggactgagcgccctcgcca

SEQ ID NO: 20623 - DNA, 379 bp, Zea mays
  Clone ID: LIB3151-053-Q1-K1-E10
gccttattcccccataccttccatttattatagcttcaaaatgcaaaaacccagctgggtaaccctataggctgcagcaagcaatcgcagcaagcaacatacctttatcacccttgtttcaacaatcgccagccctatctttggtgcactcattggtacaaaccatcagggcacagcagctgcagcaactcgtgctacctgtgatcaaccaagtagctctggcaaacctttctgcctactctcagcaacaacaatttgttccattcaaccaactgtctacattgaaccgtgctgcttatttgcagcaacaactattaccattcagccagctagctactgcctactctcagcaacaacaacttctttcatttaaccaatt

SEQ ID NO: 20624 - DNA, 368 bp, Zea mays
  Clone ID: LIB3151-053-Q1-K1-E12
attcagaaacacaccaagcgaagcttactagcaacgacctaacaacaatggctaccaagatattagccctccttgcgcttcttggcctttttgggagcgcaacaaaagcgttcattatttcacaatgctcacttgcttctaatgcccttattccacagttcctgccaccagttactttaaatgggcttttaaccacctagctgtgcaagcctacatgctacaacaagcgctttgcgggagcgtcttacaacaaccaattgaccaattgcaacaacaatccttggcacatctaaccatacaaaccatcgcaacgcaacagcaacaacagttcctaccagcactgagccaactagcttgggtgaacccta

SEQ ID NO: 20625 - DNA, 377 bp, Zea mays
  Clone ID: LIB3151-053-Q1-K1-E2
gctgcaacagtttctgccagcgcttagtcaactagccatggtgaaccctgccgcctacctacaacagcaacaactgctttcatctagcccgctcgctgtggccaatgcacctacatacctgcaacaacaattgttgcaacagattgtaccagctctgactcagctagttgtggcaaaccctgctgcctacttgcaacagctgcttccattcaaccaactgactatgtcgaactctgctgcgtacctacaacagcgacaacagttacttaatccactagcagtggctaacccattggtcgctgccttcctacagcagcaacaattgctgccatacaaccagttctctttgataaaccctgtcttgtcgaggcagcaac

SEQ ID NO: 20626 - DNA, 377 bp, Zea mays
  Clone ID: LIB3151-053-Q1-K1-E3
gcaacataaaaagtggaatttagtttcatcaatagagcaacaatggcgagcaagatattttccctccttatgctgcttgctctttctgcatgtggtgctaacgcgacaattttccctcaatgctcacaagctcctatagcttcccttcttcccccataccttccatcaatgatagcttcagtatgtgaaaacccagctcttcaaccctataggctccaacaagcaatcgcagcaagcaacatacctttatcacccttgtttcaacaatcgccagccctatctttggtgcagtcattggtacaaaccatcagggcacagcaacaacaatttcttccattcaaccaactgtctacattgaaccgtgctgcttatttgca

SEQ ID NO: 20627 - DNA, 383 bp, Zea mays
  Clone ID: LIB3151-053-Q1-K1-E4
gagttcctgaggcatcagttttatttgacggcgacgccctactgctcgcctcggtgccagtcgttgcggcagcggtgttgccagcagctcaggcaggtggagccgcagcaccggtaccaggcgatcttcggcttggtcctccagtccatcctgcagcagcagccgcaaagcggccaggtcgcggggctgttggcggcgcagatagcgcagcaactgacggcgatgtgcggcctgcagcagccgactccatgcccctacgctgctgccggcggtgtcccccactgaagaaactatgtgctgtagtatagccgctggctagctagctagttgagtcatttagcggcgatgattgagtaataatgtgtcacgcatcaccatgggtg

SEQ ID NO: 20628 - DNA, 272 bp, Zea mays
  Clone ID: LIB3151-053-Q1-K1-E5
gcgatcgacaccatgagggtttttttctttgccctagctctcctggcgggggggtgaagcgccacctccacgcatacaaccagctgctgcggatgccaaccaccgacttcggttcatctaccggcgccggtgcatctgccacctccagttaacctgccacctacggcgcatataccaccagctggccagctggcgccgctggaccaccttacaccacccgaccatgtggcggcgcgagctaatctttcatcatcaccagtccactactctac

SEQ ID NO: 20629 - DNA, 367 bp, Zea mays
  Clone ID: LIB3151-053-Q1-K1-E6
cgctcgctccgcgttcgcctttatttccaggccgctccgcctcgccggcgcggggtccgagcgggctaccagactccatgcccgcgccagcgtagtcgatgacttgccgctggtcgggaacaaggcgccagacttcgaagccgaggctgtgttcgaccaggagttcatcaacgtgaagctctctgattacattgggaagaagtacgtcattctgtgcttctaccccttggatttcaccttcgtctgcccgaccgagattactgcgtttagtgacagatacgacgaattcgagatgttgaacactgaggtggtcggggtatccatcgacagctgcgacgtccacctcgcatgggtgcacacagacagg

SEQ ID NO: 20630 - DNA, 379 bp, Zea mays
  Clone ID: LIB3151-053-Q1-K1-E7
gcggcgttggcagcaccccgatcctgggccagtgcgtcgagttcctgaggcatgagtgcagcccgacggcgacgccctactgctcgcctcagtgccagtcgttgcggcagcagtgttgccagcagctcaggcaggtggagccgcagcaccggtaccaggcgatcttcggcttggtcctccagtccatcctgcagcagcagccgcaaagcggccaggtcgcggggctgttggcggcgcagatagcgcagcaactgacggcgatgtgcggcctgcagcagccgactccatgcccctacgctgctgccggcggtgtcccccactgaagaaactatgtgctgtagtatagccgctggctagctagctagttgagtcatttagc

SEQ ID NO: 20631 - DNA, 374 bp, Zea mays
  Clone ID: LIB3151-053-Q1-K1-E8
attttgagcattcagaaacacaccttgcgttgcacattagcaacaacctaacagcagtggctaccaagatattatccctccttgcgcttcttgcgctttttgcgagcgcaacaaatgcgttcattattccacaatgctcacttgctccaagttccattattacacagttcctcccaccagttacttcaatgggcttcgaacacccagctgtgcaagcctataggctacaacaagcaattgcggcgagcgtcttacaacaaccaatttcccagttgcaacaacaatccttggcacatctaacaatacaaaccatcgcaacgcaacagcaacaacaattcctaccagcactgagccacctagccatggtgaaccct

SEQ ID NO: 20632 - DNA, 231 bp, Zea mays
  Clone ID: LIB3151-053-Q1-K1-E9
ggatgatgtatgtggccaaccagataactttattattgaattacaactaataagcagtgtaaaagagggcaccaccaatgatatgttgttggtaggaggctgctgggtttgtcaaagcaagttggacaaagggcaacaattgttgtagttgtaagagggttggggggttagccgcaaactgcctactctgaggaacaacaacttcttccatttaaccaattgggcggactg

SEQ ID NO: 20633 - DNA, 376 bp, Zea mays
  Clone ID: LIB3151-053-Q1-K1-F1
gcagtttcttccattcaacctactttctgcattgaactctgcttcttatgtgcaacaacaacaactaccattcagccagctacctgctgcctacccccagcaatttcttccattcaaccaactggcagcattgaactctcctgcttatttacagcagcaacaactactaccattcagccagctagctggtgtgagccctgctaccttcttgatacaaccacagttgttgccgttctaccagcacgctgcgcctaacgctggcaccctcttacaactgcaacaattgctgccattcaaccaacttgctttgacaaacccagcagcgttctaccaacaacccatcattggtggtgccctcttttagatttcttatgag

SEQ ID NO: 20634 - DNA, 385 bp, Zea mays
  Clone ID: LIB3151-053-Q1-K1-F10
cagacagacccctttcccctccctttttgttcactccgacgcccacagcgcctgcggggagctccacctctccaccggcggcagcgaggggcgaggggggctaatactgtaggcggaggaggaaccgagcccgatggggcagcagtcgctgatctacgccttcgtggcgcggggcaccgtggtgctggccgagtacaccgagttcaccggcaacttcaccaccatcgcccgccagtgcctgcagaagctccccgccagcaacaacaagttcacctacaactgcgacggccacaccttcaactacctcgtcgaggacggattcacgtactgtgtagttgctgttgaatcagtcgggcgacaaatccccatagctttcctggacaga

SEQ ID NO: 20635 - DNA, 385 bp, Zea mays
  Clone ID: LIB3151-053-Q1-K1-F11
gtgcgtaaagaggatcgtcgaacttaacatcatgaagatggccatcgttctcggcgggtgcctggctctgtcagctgccagcgcctatgcaatgcagatgccctgcccctgcgcggggctgcagggcttgtacggcgctggcgccggcctgactacgatgatgggcgccggcgggctgtacccctacgcggagtacctgaggcagccgcagtgcagcccgctggcggcggcgccctactacgccgggtgtgggcagacgagcgccatgtaccaaccgctccggcaacagtgctgccagcagcagatgaggatgatggacgtgcagtccgtcgcgcagcagctgcagatgatgatgcagcttgagcgtgccgctgccgtcagcagc

SEQ ID NO: 20636 - DNA, 389 bp, Zea mays
  Clone ID: LIB3151-053-Q1-K1-F12
gcagcttctgcttgctctggggggtttgtgagagagagagagcgagagagagatctagtatagaggctagtaggtggtcctcgaacgaagatgttggcggtgttcagcgggcaagtggtggaagtgccggcagagctggtggcggcgggcagccggacgccgtcgcccaagacgaatgcgtcgcagctggtggggcgctttctggccgcgtccgagccggccgtgtccgtgcagctcggcgaccacgggcacctaggctacttccacaccaaccaggcgctcctccgccccaggtcgttcgcggccaaggacgaggtgttctgcctgttcgagggggtgctggacaacctgggtcgtctgagccagcagcacgggctgtcaagcaaggg

SEQ ID NO: 20637 - DNA, 377 bp, Zea mays
  Clone ID: LIB3151-053-Q1-K1-F3
attgagaccaactagcaacatagattgcacaatagtgtaccaacaatggcagccaaaatattttgcctccttatgctccttggtctttctgcaagtgctgctacggcgaccattttcccgcaatgctcgcaagctcctatagcttcccttcttcccccgtacctctcaccagcggtgtcttcggtatgtgaaaacccaattcttcaaccctacaggatccaacaggcaatcgcagctggcatcttacctttatcacccttgttcctccaacaatcatcagccctattacaacagttacctttggtgcatttattggcacaaaacatcagggcacaacaactacaacaacttgtgctagcaaaccttgctgcctactc

SEQ ID NO: 20638 - DNA, 390 bp, Zea mays
  Clone ID: LIB3151-053-Q1-K1-F4
tctgactttacaatcacactttgcttctctgaattggcacaagctaactacaggggctacctaagatattcatcggtccttaaaactcctaagaccttgtaccctagcgcagccacaggccgtcatctacgtctacttcctcaccaggcagtattcatgccttgtcaccgtctccgcggaccgtcgccgcgccggggttgcgaaagtctcgtcggcgtgggtcatcggtaccgccatgccgtggctcgactttgagacctccgtcttcaagaaggaaaaggcgtccctggccggccatgatgagtatattgagaggggtgggagggatctgacaacagtgtttgccgtcgccttgccaggtatccaacaggaacgctgtatcctacttgg

SEQ ID NO: 20639 - DNA, 317 bp, Zea mays
  Clone ID: LIB3151-053-Q1-K1-F5
attgagaccaactagcaacttacatagcacaatagagtaccaacaatggcggggaaaatataaaagctgcttaagctccttggactttctgcaagtgctgctacgctgaccattttggccctagggtcgcaagccattatacaaggcgttgttgagccgcacatgttacaagacctgcattgctggtgtgagaaccaaaatatccacctctactcgagccaacaggaactcgaccgtgatataacacgtggatgagtcttgtgcctgctacagtgaggaaccgtactacaaaagctgcgctcgcagcatctacagga

SEQ ID NO: 20640 - DNA, 273 bp, Zea mays
  unsure at all n locations
  Clone ID: LIB3151-053-Q1-K1-F6
ccggacccggaagcccggggcgacccacgcgnccgaaagaaaccaccgagccccttacaaagaaaaanagacaagcagaaccggggggggaaagaaagagacagcgaggcacccagaagaccgaagacgcggcaggcaaaaagcccaacgaccaacgcgcagccagcaacgggaacggcacacaaaacacccanccaacggagccaaacaaagaagaccggcaagagagcagaaaccgagcacagaaagcgagacaccacaagcgaggagaca

SEQ ID NO: 20641 - DNA, 372 bp, Zea mays
  Clone ID: LIB3151-053-Q1-K1-F7
ctcggaaggatgatctgaagggtaccgtgaagcttgtcttccagccaggaaaagaaggctacggcggcgcttaccatgttctcagagaaggtgtcctggatgacgtgtctgccattttcggcttgcatgtggatccaggacttcctgtaggcaccgtttcgtccaagccagggccgtttctagcagcagcaggtagatttctggtgacggtcactggaaaaggcggacatgctgcagggccacaggatgctgtggatcccattgttgcggcatcctctgccatcgtcagccttcaacttttttgttgcccgcgaaattgatcccctccaggctgcagtggtctcggtcacgttcatgaaaggaggtgatgct

SEQ ID NO: 20642 - DNA, 381 bp, Zea mays
  Clone ID: LIB3151-053-Q1-K1-F8
gtcgcaaacatgtctaccgtgctttatcgttcgacccccggcacggtccaatggttcggtcgcaagaagacgggtgtggccgtcgcctacaccaagccggggcgcgggctgatcaaggtgaacggcgtcccgattgagctcatcaggccggagatgctccgcctcaaggccttcgagcccatcctgctggcggggcgctccaggttcaaggacatcgacatgaggatccgcgtccgaggcggcgggaagacgtcgcagatctacgccatccgccaggccgtcgccaaggggctcgtcgcctactaccagaagtacgtcgacgaggccgccaagaaggaggtcaaggacatcttcacccggtacgaccgcacccttctcgtc

SEQ ID NO: 20643 - DNA, 375 bp, Zea mays
  Clone ID: LIB3151-053-Q1-K1-G1
ggagaaccctccgagcatcctagtgactcccatggctccggccatgtcggcgcagttcacaagaatcaccttcagcaacctgtttgtccgtcgggctggcccaggcagcacggagctgaccgtggagggaaggccatccgaccagctgggcaggagaaacctcactgacagccccgtatttgacggccgtggccctgacgccagcctcgtggctcgcgtacagggagtcgctacccagatgggcgacgtgcgccagttgtacaccgtcgtgttccaggagaggccgctcaagggctccacgctcgtcaccgaaggcgcgatgacggaagggtcagacgagtgggcgatctacggcggaacttgagtgttcgcgat

SEQ ID NO: 20644 - DNA, 266 bp, Zea mays
  Clone ID: LIB3151-053-Q1-K1-G10
acgctgcgtcttcataccattattttttttctacaccagaccgcataataagcgcggggacattatgagggtgtcggtctatgaactacctatcctggctctctcttccagcgccacctccacccatactaacgaagcaatacaaatgacatccactcctcgcctggtcatatacctccttcagtgcatctaccaccaccagttcacctgccaccatcagtgcatctcccacctgcggatcatctaacgtctccagaccacctgcc

SEQ ID NO: 20645 - DNA, 222 bp, Zea mays
  Clone ID: LIB3151-053-Q1-K1-G11
ttctatatcacattcctccccctttatttttccaaactcacatacccccacgggcgagttataaaatatctgtccccccacaaaaaaccaactcactcaccctccctttacaacatcaacactggtaaaacccagccaccccccaccttacatctatcgccgcccatgcatctaccaccttctgtcgaactatcaaatacgtccacacccatcccccttccc

SEQ ID NO: 20646 - DNA, 387 bp, Zea mays
  Clone ID: LIB3151-053-Q1-K1-G12
cttcagaccattatctttatttacttcagagcgcagaagaacccgatggcagggtgagggtgttgctggttggcctccctctcctggctctcgctgcgagcgccacctccacgcatacaagcgggggctgcggctgccagccaccgccgccggttcatctaccgccgccggtgcatctgccacctccggttcacctgccacctccggtgcatctcccaccgccggtccacctgccgccgccggtccacctgccaccgccggtccatgtgccggcgccggttcatctgccgccgccaccatgccactaccctactcaacccgcccggcctcagcctcatccccagccacacccatgcccgtgccaacagccgcatccaagcccgtgcc

SEQ ID NO: 20647 - DNA, 354 bp, Zea mays
  Clone ID: LIB3151-053-Q1-K1-G2
caacaagcaacatagaaagtggaattcagtagcaacaatagagcaacagtggcgaccaagatattttccctccttatgctccttgctctttctgcatgtggtgctaacgcgacaattttccctcaatgctcacaagctcctatagcttaccttcttcccccataccttccatcaatgatagctacagtatgtgaaaacccagctcttgaaccctataggctgcaacaagcaatcgcagcaagcaacatacctttatcacccttgtttcaacaatcgccagccctatctttggtgcagtcattggtacaaaccatcatggcacagcaagtgcagcaactcgtgctacctgtgatc

SEQ ID NO: 20648 - DNA, 379 bp, Zea mays
  Clone ID: LIB3151-053-Q1-K1-G3
caacaagcaacatagaaagttgtatttagtagcaacactagagcaacaggggggagcaagatatagtgcgtccttatgctccttgctctttctgcatgtgttgctaacgcgacaattttccctcagtgctcacaagctcctatagctgtccttctttccccataccctacatcaatgatagcttcagtatgtgaaaacccaggtcttctaccctataggctgcaaaaagcaatcgcagcaagcaacatacatgttatcacccttgtttcaacaatcgtcagccctatctctggggcagtcatgcgcacaaaccatgatgccacagctgctgcagtaactcgtgctacctgtgatcaatcaaatagctcttgcaaacctt

SEQ ID NO: 20649 - DNA, 355 bp, Zea mays
  Clone ID: LIB3151-053-Q1-K1-G4
ggaagccgggtcgaccagcgtccgagaacataccttgcgatttcttttcaactacctaacaacaatgggtcgggagaattgaccttcttgggcttcttgccctttttgtgagcgcaacaaatgcgttcattattccacaatgctcacttgcttctaatgccattattacacagatcctgccaccagttacttcaatggtcttcgaacacctagctgtgcatgccaacatgcaacaacaagcgcttgcggctagcgtcttacaacaaccaattgcccaattgcaacaacaatccttgccacatctaacaatacatgccatcacaacgcaacatcaacaacagcttctaccagcagt

SEQ ID NO: 20650 - DNA, 365 bp, Zea mays
  unsure at all n locations
  Clone ID: LIB3151-053-Q1-K1-G5
agaccattagctttatctactccatttctttgaacaacccgatcgacaccacgaggggggtgcttattgccctggctctactggctctagctgggagcgccacctccactcatacaagctgcagctgctgctgccagccaccgccggcggttcatctaccgccggcggtgcatctgctcacctcctgttcacctgccacctacggtgcatctnccaccgccggtccacctgccgccgtcggtccacctgtcaccgccggtacatgtgccgtcgccggttcatctgccgccgtcaccatgccactaccctacgtaaccggcccggcctcaggctcattcccagccacacacatgcgcgtgccaaca

SEQ ID NO: 20651 - DNA, 368 bp, Zea mays
  unsure at all n locations
  Clone ID: LIB3151-053-Q1-K1-G7
tagcgccggcgcctccatttcgttttcctttctctctcctccagctcaaggtgcggcggcnaatggaaggcaagatgtacaccgcgaggaagaagatccagaaggagaagggtcttgagccctccgagttcgaggactccgttgcccaggctttctttgatctggagaacgggaaccaggagctcaagagcgacctcaaggacctgtacatcaacaatgctatccagatggatgttaccgggagtaggaaggctgttgtcattcacgtcccataccgcctgcgcaaggccttcaggaagatccatgtcagactcgtcagggagctggagaagaaattcagcggcaaggatgtggtaattgttgctaca

SEQ ID NO: 20652 - DNA, 376 bp, Zea mays
  Clone ID: LIB3151-053-Q1-K1-G8
aagaattttgagaagcttattcagtttgattagcggctatatcaattgagtcagcaggcggaaattacattagactctgcgttgtttgaacctaggagctcaatatttgaggatccggttgaatcaaaatgtgctgggtttactaatttgaaagatgaacatgaggctctacctggcttttcaggcccggtgtcaccatgtgctggttcctccatatctgctaagaatgaaaacaatgattccattggaatgacagctgaatatctttctcagacagtaggaacaggagttggtgctgtaggtgtacaagctgttggcagaaatgtgaatggtgcagcaccagaattcagtattccccactggtggagtcaattga

SEQ ID NO: 20653 - DNA, 327 bp, Zea mays
  Clone ID: LIB3151-053-Q1-K1-G9
gcagcagcagcccttctttttggatttgcttcacaggggagatcgatcaatcgggcaggaagcaaagcgcgcgcgggacaggtgggtagctagcaatggcgacgccgccgaaccctcctcctccgagcactcccatagctgcggcggcgtccttattgccagcagagttcaccagattcaccttccgggccttgtacgtccgccggaccggcccaagcagcagggagatgattcagccggggagaccttacgatgagctgggcagaagactcaccagtgactacccggtgtacgatggccgtggctccgacgccgcccttgtcgctc

SEQ ID NO: 20654 - DNA, 208 bp, Zea mays
  unsure at all n locations
  Clone ID: LIB3151-053-Q1-K1-H1
ggccaangcggcgaggtccttaggttttaatgcaaccccacagcgacggcctagtggttgccttaatggcaggcggtgcggcaacaatgtttgcaacaagttaaggaagttgaggccgaacaaccgtaccaagcgaactttgggttggttcttcaagtcattcttgaagaacaagccgaaaaggggccagttcccggggttgttggcg

SEQ ID NO: 20655 - DNA, 215 bp, Zea mays
  Clone ID: LIB3151-053-Q1-K1-H11
cggggcggccacacgtcctccacgcgtccgtctagattttatttttcccccctttttttttttttggccagggatcttttttacttaggtaggataccccaacatttaaaaggttcattcatggcatacctaacacattcacccaaattcatcgaccacaccaccttacccattaccccctaacgatttaactacccaactatccaacttttcac

SEQ ID NO: 20656 - DNA, 296 bp, Zea mays
  unsure at all n locations
  Clone ID: LIB3151-053-Q1-K1-H4
cccacgcctacgtaccaactagcatcttattatgcacaataccgnaccaacaagggcaggttaaatatttaggggccttagtctcctaggtctttctgcaagtgctgctaccacaaccacttttccacaatgctcacaagctcctatagcttcctttcattccccataccctttaccagcggcatcttcagtttattaaaaccctaattttaaaccctacacgatccaacattcaatcccaccatgcatcttacatctatcacccatgttccttcaacaacctatatgcctattac

SEQ ID NO: 20657 - DNA, 364 bp, Zea mays
  Clone ID: LIB3151-053-Q1-K1-H5
aagatgtgcttctgtttattgacattatttttcgtttcacccaggcaaattctgaggggtctgctcttcttggacgtatcccatctgctgtgggataccagccaacccttgccactgatcttggaggactgcaagagcgtattacgacaacaaagaagggttctattacgtctgtccaggctatatatgtgcctgctgatgacttgacagatcctgctcctgctactacctttgcccatcttgatgctacaactgtgttgtcacggcagatctctgagcttggtatttatcctgctgtcgatccactggattccacatcaagaatgctttctccccacgtgctgggtgaggatcattacaatac

SEQ ID NO: 20658 - DNA, 258 bp, Zea mays
  Clone ID: LIB3151-053-Q1-K1-H6
cctgtgggctttaatatctcccctttactgtcgccgcagtcgtcgccgtataggacactatcttcgcttctgggatatctatgtgagagagaaacaactcgatcgatcgatcaagaagaccggcgaggctctagcttcagaccgacaatgccgtacgcagccacaaggacgtcgccgcagcaacacagccgcgtggccagcaaccggagggccctggccgcgtgcgcaagccacgccggcgtgcccgaccaggtggcg

SEQ ID NO: 20659 - DNA, 410 bp, Zea mays
  unsure at all n locations
  Clone ID: LIB3151-053-Q1-K1-H7
aatncccggggcgtgcgacgcgttcgctcaaaatggagccttgctgtcctttatattttctccaatggccatgttgtccgggctgtcttgaataatgtggtcataggtagtgcatatggtaatggctcacaatcaagattcagtgtcaaattgcccatcaacctgaggactggaaagaatgaacttgcccttctaagtatgactgttggtttacaaaatgcatgattcgcttatgaatggataggagcaggctttacaaatgtgaacatctctggtgtgagaactgggatcatagacttgtctttaaataattgggcatacaagattggactggaaggggaatattataatttgttcaagcctgatcagacaaataaccaacggtggataccacaatccgagccaccaaa

SEQ ID NO: 20660 - DNA, 177 bp, Zea mays
  Clone ID: LIB3151-053-Q1-K1-H8
cttcagaccattagctggatctactttagagcgcagaagaacccgatcggccgatgagggtgttgctcgttggcctcgctctcctggctctcgctgcgagcgccaccttcacgcatacaagcggcggctgcggctgccagccaccgccgccggttcatctaccgccggcggtgcatc

SEQ ID NO: 20661 - DNA, 278 bp, Zea mays
  Clone ID: LIB3151-054-Q1-K1-B9
ggaacaagggcgggttcttttcatttggggggggcattcaaggcattgctcacaccgacactgccacccatggggatgcgtgacacattttttctctatcatcgccgcttaatgtcccaactttcttgcttgccagggggttttcttcagcacattgtttcttcaaagggggacaccgcccgctgcaacgtttgggcatggagtcggctgcttctagccgctcatcgccgtcagttgctgcgcttcctgcggcgttggcagcaccccaatcctgggcc

SEQ ID NO: 20662 - DNA, 126 bp, Zea mays
  Clone ID: LIB3151-054-Q1-K1-F5
ttgatcgcgagcggtcgccctttttttttctttttttaatctagaaatgtactttgttatttctgggatgccacaaacatctgacaataaactttatttttgaactattactcattagaaatcttt

SEQ ID NO: 20663 - DNA, 98 bp, Zea mays
  Clone ID: LIB3151-058-Q1-K1-C4
ggacgcgccctctagcggtgcatttatcgccgccggtgtatctgtcactcgcagcatgaccgttacactttccaacgccccagcgcccgcttctttcg

SEQ ID NO: 20664 - DNA, 541 bp, Zea mays
  unsure at all n locations
  Clone ID: LIB3151-058-Q1-K1-E3-F2A
ccgtctcgtttggacctccatccgcggcggccgccgccgcgctgagtttgggccgggctctgttaatctgggcgactttgattttctctgctcccgctgccccggccgtcaggagtgaagcgatgctggagaaagaccggatatgctacttctacgacggagatgttggcaatgtctactttgggccaaatcaccccatgaagccacatcgtctctgtatgacacatcaccttgttctttcatatggacttcatcaaaagatggagatatataggccacacaaagcatatccaatagagcttgcccaattccattctgctgattatgtggaattcttgcaccggataactcctgattcccagcacctatatgcaagtgaactaactagatacaatcttggagaagactgtccggtctttgataatntgtttgagttctgccaaatctatgctggaggaactttagatgctgctcgcagattaaatcataaaatatgtgacattgccattaattgggctggtgggctacatcatgccaaaaa

SEQ ID NO: 20665 - DNA, 374 bp, Zea mays
  Clone ID: LIB3151-058-Q1-K1-E3-R2A
gcatgcttaaaaatgtgcaaacttgtactacaatgtgtaattcaggaggggtcagaatcccttataaaagtctaaaccactttgacctgctaagttaggtccctgctgtcaactgacaaactattacatttcaagactgctgaactacacaacagtgaaaaatctcaggtttccatttacaccagggccttaaaagaagcagattagcgtgtgccatcgtcgtgatcgttgtcattggcaccttcatagtactcatcatcacggggaatctgcttgtcttgagtgtgctggtcaacacgttcatcaggatccaattcattttcatcaaagtccgggatataaaaatcgggaggaaccttttgcatttgaacacc

SEQ ID NO: 20666 - DNA, 289 bp, Zea mays
  Clone ID: LIB3151-060-Q1-K1-A10
gcaacatataaagcacaatattgttccaacattggcagccaaaatattttgcctccttatgctccttggtctttctgcaagtgctgctactgcgaccattttcccgaaatgctcgcaagctcctatagcttcccttcttcccccgtacctctcaccagcggtgtcttcggtatgtgaaaacccaattcttcaaccctacaggatccaacaggcaatcacagctggcatcttacctttatcacccttgttcctccaacaatcatcagccctattacatcaattacctttg

SEQ ID NO: 20667 - DNA, 395 bp, Zea mays
  Clone ID: LIB3151-060-Q1-K1-A2
catggccccacccacctattctccctgccgtcggcagccttaaccctaatctcatcgcctcctcttccttctccagttcctcgaaggcccagcagacaacagcccctctttcttctcagccatgtcggaggacgaagcgaacgctgctgctgcgccggcagagggaaagaactggcggcggaaggggaagcacgacaagcccaagccgtgggacgaggaccccaacatcgaccgctggaagatcgacaagttcgaccctgcctggaacgagggcggcatgctcgaagtcagctccttctccaccctctttccccagtaccgagagaagtacctacaggaggcgtggccggtcgtgaagggcgcattgaaggagtacgggatctcgtgcgagctca

SEQ ID NO: 20668 - DNA, 412 bp, Zea mays
  Clone ID: LIB3151-060-Q1-K1-A6
gaccatagctttatctactccagagcgcataagaacccgatcgacaccatgagggtgttggtcgttgccctcgctctcctggctctcgctgcgagcgccacctccacgcatacaagcggcggctgcggctgccagccaccgccgccggttcatctaccgccggcggtgcatctgccacctccggttcacctgccacctccggtgcatcttccaccgccggtccacctgccggcgccggtccacctgccaccgtcggtccatgtgccgccgccggttcatctgccgccgtcaccatgccactaccctactcaaccggcccggccttagccttatcctcaggcacacccatgcccgtgccaacagccgcatccaagcccgtgccatctgcagggaacctggggcgttggcagca

SEQ ID NO: 20669 - DNA, 309 bp, Zea mays
  Clone ID: LIB3151-060-Q1-K1-B10
cagaccattagctttatctacttcagagcgcttaagaacccgatcgacaccatgagggtgttgctcgttgccctcgctctcctggctctcgctgcgagcgccacctccacgcatacaagcggcgggtgcggctgccagccaccgtcgccggttcatctaccgccgccggtgcatctgccacctccggttcacctgccacctccggggcatttcccaccgccggtccacctgtcgccgccggttcacctgccaccggcggtccatgtgccgccgccggttcattttgcgtcggctccatgccacataccc

SEQ ID NO: 20670 - DNA, 367 bp, Zea mays
  Clone ID: LIB3151-060-Q1-K1-B12
gagcacacagaaacacaccagttttagccaccgagcaacgaccgaacaacaagggcgaccaagacaggagcccaccgggcgcgcagcgcccacagagggagcgcaacaaaggcgggcaggagaccacaaagcgcacgggctcctagtgccattataccacagttcctccgaccagtttctttaatgggcttcgaacaccttagtgtgcaagcctacaggctacaacaagcgcttgcggcgagcgtcttacaacatccaattaaccaattgcaacaacaatccttggcacattttaccatacaaaccatggcaacacaacagcatcaactagtcctaccagcactgaccaactagatgtggagaaccc

SEQ ID NO: 20671 - DNA, 349 bp, Zea mays
  Clone ID: LIB3151-060-Q1-K1-B2
ctgggtcttcagaccattagctttatctacttcagagcgcagaaaaacccgatcgacaccaggagggtgttgctcgttgccctcgatctcctggctctcgctgcgagcgccacctccacgcatacaagcggcggctgcggatgccagccaccaccgccggttcatctaccaccggcggtgcatatgccaactgcggttcacctggcacctgcggtgcatgttccaccgccggttcaactgccgtcgcctgtccacctgccaccgccggtccatgtgccgccgtcggttcatttgccgccgtcaccatgccactaccctacttaaccgccccggtcttagccttattccc

SEQ ID NO: 20672 - DNA, 333 bp, Zea mays
  Clone ID: LIB3151-060-Q1-K1-B3
acccgatcgacacctcgagggtggtgctcgttgccctggctatactggctctctctgggagcgccactctccacacattcaagcggaggctgctggttgccaaccaccgacgccggttcatctaccgccgccggagcatctgccaccttcggttcacctgccaccttcggtgcatctcccaccgccggtccacctgtcgccgccggtccacctgccaaccgcggtccatgtgccgccgccggttcatttgacggcggcaccattgccactaccctactcaaaccgcccgggcttagccttattccccagcacacccatgcccgtgccaacagc

SEQ ID NO: 20673 - DNA, 374 bp, Zea mays
  Clone ID: LIB3151-060-Q1-K1-B4
agaccaactagcaccatataaagcacattattgttccatcattggcagccaaaatattttgcctccttatgctccttggtatttctgcaagtgctgctacggcgaccattttcccgcaatgctcacaagctcctattgcttaccttcttcccccgtacctctcaccagcgggtgtctttggtatgtgaaaacccaattcttcaacccttcaggatccaactggcaatcgcagctggcattttacctttatcacccttggttctccaacaattatcagccctattacagcagttacctttggtgcatttattggcacaaaacattagggcacaacaactacaacaacttgtgcttgcaaaccttgctgtctactc

SEQ ID NO: 20674 - DNA, 413 bp, Zea mays
  Clone ID: LIB3151-060-Q1-K1-B5
ctagcatcatataaagcacaatagtgtaccttcaatggcttccaaaatattttgcctccttatgctccttggtctttctgcaagtgctgctacagcgaccattttcccgcaatgctcgcaagctcctatagcttcccttcttcccccgtacctctcaccagcggtgtcttcggtatgtgaaaacccaattcttcaaccctacaggatccaacaggcaatcgcagctggcatcttacctttatcacccttgttcctccaacaatcatcagccctattacaacaattacctttggtgcatttattggcacaaaacaatatggcacaactactacaacaacttgggctaacaaaacctgctgcctactctcatcaacagcagtttctttcattcaaccaactaaggttcattgaac

SEQ ID NO: 20675 - DNA, 417 bp, Zea mays
  Clone ID: LIB3151-060-Q1-K1-B6
ggtgaggttcattgtgctcgtcaaattgtatctatttccaatggtgaagaaaaatttattacttatgccaaaccgaagcaccattcaatgcgagggagtgacacatcaactgctgagtctggctcagaagctgacgatgctatctcccccaaagctctcagaagttacataccacatcctaagttgaccccagttcgtgaagaggtcaaaattgtcagggctacgagcttttctattcgtctccctgaatatgatgtacctgttgttgacaaggctgtggatgctacatggagaagggagcaaccacgaaagataccattcatgccccaagactcttctgtgaaaactatgtccaggccatctgatttctcctgggataagatcgctgcaactctgatggcttgtcttatggctatt

SEQ ID NO: 20676 - DNA, 340 bp, Zea mays
  Clone ID: LIB3151-060-Q1-K1-B7
attgagaccaactagcaacatagaaagcactttagtgttccaacaatggcagccaaaatattttgcctccttatgctccttggtctttctgcaagtgctgctaccgcgaccattttcccgcaatgctcgcaagctcctatagcttcccttcttcccccgtacctctcaccagcggtgtcttcggtatgtgaaaacccaattcttcaaccctacaggatccaacaggcaatcgcagctggcatcttacctttatcacccttgttcctccaacaatcatcagccctattacaacagttacctttggtgcatttattggcacaaaaccattaggcacaacaac

SEQ ID NO: 20677 - DNA, 374 bp, Zea mays
  Clone ID: LIB3151-060-Q1-K1-C1
tgagaccaactagcaacatatttagcacatttttgtaccaacaatggcagccaaaatattttgcttccttatgctccttgggctttctgcaagtgttgctaccgcaaccattttcccacaatgctcacaagctcctatagcttcccttcttcccccatacctctcaccatcggtgtcttcaatgtgtgaaaacccaattgttcaaccctacaggatccaacaggcaatcgcaacaggcatcttaccattatcacccttgttccttcaacaaccgtcagccctattacagcagtgacctttggtccattttgtggcacaaaacatcagggcacaacaactacaacaacttgtgctagcaaaccttgcttgatact

SEQ ID NO: 20678 - DNA, 267 bp, Zea mays
  Clone ID: LIB3151-060-Q1-K1-C10
ataaccttgctgaccacatgattgggaatgtctatgtccagttcagggaggaagagcaagcagccgcagcttacaatgctcttcaagggcgctttttacctctggccgccctataattggtgagtattcttctgtgaccgactttccgtgaagcaacctgtttgccagttgaggataacagctgcaaccgtggtggctcctgttaattcatgcatgtgaagcaatttggcatggttctcaagaggaagctggatgggcgttctgttt

SEQ ID NO: 20679 - DNA, 99 bp, Zea mays
  Clone ID: LIB3151-060-Q1-K1-C11
gttcttcagaccataagctgtttttactctctttcgcagaaaaaccctttcgacaccatgagggtgttgctcgtggccctcgctctcctggcttctcgc

SEQ ID NO: 20680 - DNA, 413 bp, Zea mays
  Clone ID: LIB3151-060-Q1-K1-C12
ccaactagcaacatagaaagcacaatagtgttccaacaatggcagccaaaatattttgcctccttatgctccttggtctttctgcaagtgctgctacggcgaccattttcccacaatgctcacaagctcctatagcttcccttcttcccccgtacctctcaccagcggtgtcttcggtatgtgaaaacccaattcttcaaccctataggatccaacaggcaatcgcagctggcatcttacctttatcacccttgttcctccaacaatcatcagccctattacagcagttacctttggtgcatttattggcacaaaacatcagggcacaacaactacaacaacttgtgctagcaaaccttgctgcctactctcagcaacaacagtttcttccattcaaccaactagctgcattg

SEQ ID NO: 20681 - DNA, 408 bp, Zea mays
  Clone ID: LIB3151-060-Q1-K1-C3
caacaagcaacatagaaagtggaatacagtttctacaatagagcaacaatggcggccaagatattttccatccttatgctccttgctctttctgcatgtgttgctaacgcgaccatttttcctcaatactcacaagctcctatagctgcccttcttcccccataccttccatcaatgaccgcttcagtatgtgaaaacccagcccttcaaccctacaggctccaacaagcaatcgcaacaagcaacttacctttatcacccctgttctttcaacaatcgccagccctatctttggtgcagtcattggtacaaaccatcagggcacaacagctgcagcatctcgtgctaccagtgatcagccaagttgctctggcaaaaccttttccctactctcagcaacaacaattt

SEQ ID NO: 20682 - DNA, 275 bp, Zea mays
  Clone ID: LIB3151-060-Q1-K1-C5
gcaaagcggcagtgcgtatagaggatcgtcttacagaacatcatgaagatggtcatcgttctcgtcgtgtgcctggctctgtcagctgccagcgcctctgcaatgcagatgccctgcccctgcgctgggctgcagggcttgtacggcgctggcgccggcctgactacaatgatgggcgccggctggctgtacccctacgcggatgacctgaggcagccgcagtgcaacccgctggcggtggtgccctactacgcctggtgtgggcagacgagcgc

SEQ ID NO: 20683 - DNA, 399 bp, Zea mays
  Clone ID: LIB3151-060-Q1-K1-C6
attttcagcattcagaaacacaccaagcgattcgcactatcaacaacctaacaacaatggctaccaagatattagccctccttgcgcttcttgcccttttagtgagcgcaacaaatgcgttcattattccacagtgctcacttgctcctagtgccattattccacagttcctcccaccagttacttcaatgggcttcgaacattcagccgtgcaagcctacaggctacaactagcgcttgcggcgagcgtcttacaacaaccaattgcccaattgcaacaacaatccttggcacatctaaacctacaaaccatcgcaacgcaacagcaacaacagttttttgcatcactgaaccacctagccggggtgaaacctgtcgcctactttcaacagcagctac

SEQ ID NO: 20684 - DNA, 393 bp, Zea mays
  Clone ID: LIB3151-060-Q1-K1-C7
ctgacgcgtgggccacaattggtattgactttaagatactaacgatagaattggatggcaagcgtataaagctacagatttgggatacggcgggccaagaacgcttccggactattaccaccgcgtactaccgaggagctatgggcatcttgctggtttatgatgtcaccgatgaatcttcttttaacaacatccgaaactggattcggaacattgaacaacacgcctctgataatgtcaacaagattttggttggcaacaaggccgatttggacgaaagcaagagggctgtacctactgcaaaaggacaagcacttgctgatgagtacgggatcaagttttttgaaacgagtgcgaagacaaacctgaatgtggagcaagtgtttttttcat

SEQ ID NO: 20685 - DNA, 400 bp, Zea mays
  Clone ID: LIB3151-060-Q1-K1-D1
cagaccattagctttatctactccagagcgcttaagaacccgatcgacaccatgagggtgttgctcgttgccctcgctctcctggctctcgctgcgagcgccaccttcacgcatacaagcggcggctgcggctgccagccaccgccgccggttcatctaccgccgccggtgcatctgccacctccggttcacctgccacctccggtgcatctcccaccgccggtccacctgccgccgccggtccacctgccaccgccggtccatgtgccgccgccggttcatctgccgccgccaccatgccactaccctactcaaccgccccggcctcagcctcattcccagccacacccatgcccgtgccaacagccgcatccaagcccgtgccagctgcagggaacct

SEQ ID NO: 20686 - DNA, 307 bp, Zea mays
  Clone ID: LIB3151-060-Q1-K1-D10
aagcaacatataaagggaatacatagcttctatagagcaacaatggcggccaagatatttggcatccttatgctccttgctctttctgcatgtgttgctaacgcgaccatttttcctcaatactcacaagctcctattgctgcccttttttccccataccttccattaaagaccgctttagtatgtgaaaacccagcccttttaccctacaggctccaacaagcaattgcaacaagcaacttaccttttataccccctgtttttcacaaattggcaaccctttctttggtgcagtcattggttcaaa

SEQ ID NO: 20687 - DNA, 141 bp, Zea mays
  Clone ID: LIB3151-060-Q1-K1-D11
caaagcggcattgcgtagagaggttctgctttcataacagcatgaaaatggtcattgttcgggtcgtgtgcctgggtctttcagcttccaacgcctcttcaaagcatatatccctgcccctgcgcagggctgtatggcttg

SEQ ID NO: 20688 - DNA, 398 bp, Zea mays
  Clone ID: LIB3151-060-Q1-K1-D3
agaccattagctttatctactccagagcgcttaagaacccgatcgacaccatgagggtgtggctcgttgccctcgctctcctggctctcgctgcgagcgccacctccacgcatacaagcggcggctgcggctgccagccaccgccgccggttcatctaccgccgccggtgcatctgccacctccggttcacctgccacctccggtgcatctcccaccgccggtccacctgccgccgccggtccacctgccaccgccggtccatgtgccgccgccggttcatctgccgccgtcaccatgccactaccctactcaaccgccccggcctcagcctcattcccagccacacccatgcccgtgccaacagccgcattcaagcccgtgccagctgcagggaacc

SEQ ID NO: 20689 - DNA, 251 bp, Zea mays
  Clone ID: LIB3151-060-Q1-K1-D4
tcggtcagcgcattgatccatacccacccggagcttggatacttggagttccagaccagcgagctcgtgcgccgggagctccacgccatggggatcccctacaggcaccccttcgtcgtcaccggcgtggtagctactgtcggcaccggcggtccgtccttcgttgttctgtggtcggacatggacgcgctgtccttacaagaaatgtgtggagtgggaacactataacaaaatccctttgaagacgcatg

SEQ ID NO: 20690 - DNA, 418 bp, Zea mays
  Clone ID: LIB3151-060-Q1-K1-D5
attttgagcattcagaaacacaccaagcgatttcacattttcaacaacctaacaacaatggctaccaagatattatccctccttgcgcttcttgcgctttttgcgagcgcaacaaatgcgttcattattccacaatgctcacttgctccaagttccattattacacagttcctcccaccagttacttcaatgggcttcgaacacccagctgtgcaagcctatatgctacaacaagcaattgcggcgagcgtcttacaacaaccaatttcccagttgcaacaacaatccttggcacatctaacaatacaaaccatcgcaacgcaacagcaacaacaattcctaccagcactgagccacctagccatggtgaaccctgccggctacttgcaacagcagttgcttgcattaaacccacttg

SEQ ID NO: 20691 - DNA, 164 bp, Zea mays
  Clone ID: LIB3151-060-Q1-K1-D7
tcgatccaatccagatcagcaaagcggcagtgctttatagaggttttgtcgaacagaacaagcattaagatggtcatgcgttctcgtcgggtgcctgtgctctgtcagctgccaacgcctctgtaatgcagatgccctgcccctgcgcggggctgcaaggcttg

SEQ ID NO: 20692 - DNA, 345 bp, Zea mays
  Clone ID: LIB3151-060-Q1-K1-E1
ccaactagcaacatagatagcactatgcttttctaactacggccaacataatatgaagcctgcttattctccttggtctttgtgcaagttctaataccgctaccattttccataaatgctcacatgctcctatctcttacctttttcccccgtacctctcaccagcagcgatttgtgtatgtgaaaacccaattcctcatccttacacgatccaacatgcaatctcagttggcatcttacatttatcacccttgttccttcaacattcatcaaccctattacatcattcacctttggcgcatttatcggcactaaacataagggctcaacaactaccacctcctg

SEQ ID NO: 20693 - DNA, 150 bp, Zea mays
  Clone ID: LIB3151-060-Q1-K1-E11
ccagtgcgcgcaccgcccggcatggctgctttttctcggcaacgaccagtggattaatcggcatggcggctctggccacatagcatctcgtcgcaacgcccgccagcctgggcgttccggacgcgttcacgttccgccgcggcgccgagc

SEQ ID NO: 20694 - DNA, 397 bp, Zea mays
  Clone ID: LIB3151-060-Q1-K1-E2
taggaagcaagggaatcacatcgccatggcttccaagatgtttgcattgtttgcgctcctagctctttgtgcaaccgccactagtgctacccatatcccagggcacttgtcaccactactgatgccattggataccatgaacccatggatgcagcactgcatgaagcaacacggggttgccaacttgctagcgtggccgaccctgatgctggaccagctgttggacttaccgcgttagccgagccagatgccaatgatgatgccaagtatgatgccaccgatgacaatgatgccgatgccaaatatgatgccatctatgatggggccgaccttgatgtcaccaataacgatagctaggatgaagcccccgatgatgatgccaaacatgggctcacca

SEQ ID NO: 20695 - DNA, 295 bp, Zea mays
  Clone ID: LIB3151-060-Q1-K1-E3
atgagcatggcgtaatcatgcgcggacgcgttcctacacggtcgcacaggcgtcggcggcgccaaatgccgccccggcgcggatctgctcggacagcggagcacctgcttcacgacgaccgactggaggtggagcaccgacaggggaatccgagctgaccttgcaccaccagcgcgggcgagcgcggatagcgccgccaaccccggtccggacgtaactgttcgccaaaccgatgacgctcctgaacatgccgacgatgatgcccaacctgatgccccccatgacaagcatgccg

SEQ ID NO: 20696 - DNA, 418 bp, Zea mays
  Clone ID: LIB3151-060-Q1-K1-E4
gagcgcataagaacccgatcgacaccatgagggtgttgctcgttgccctcgctctcctggctctcgctgcgagcgccacctccacgcatacaagcggcggctgcggctgccagccaccgccgccggttcatctaccgccgccggtgcatctgccacctccggttcacctgccacctccggtgcatctcccaccgccggtccacctgccgccgccggtccacctgccaccgccggtccatgtgccgccgccggttcatctgccgccggcaccatgccactaccctactcaaccgccccggcctcagcctcatccccagccacacccatgcccgtgccaacagccgcattcaaacccgtgccagctgcagggaacctgcggcggtggcagcaccccgatcctgggccagtgcgtcgagtt

SEQ ID NO: 20697 - DNA, 371 bp, Zea mays
  Clone ID: LIB3151-060-Q1-K1-F11
cgccagaccattagcggaatctactccagattgcagaaaaacccgatcgacaccatgagggtgttgctcgttggccgttctctcctggctctcgctgcgagcgccatctccacgcatacaagcggcggttgcggctgtcagccaccggcgccggtttatttaccgtcgtcggtgcatttgccacctccggttcacctgccaccttcggtgcatttaccaccgccggtccacctgccgtcgccggtccacctgccaccggcggtccatgtgccgccggcggttcatttgccggctgcaccatgccactaccctactcaaccggcccggtcttaggcttattcccagccacacccatgcccgtgccaacaggc

SEQ ID NO: 20698 - DNA, 372 bp, Zea mays
  Clone ID: LIB3151-060-Q1-K1-F12
tcgctctctttggatcgattggtttcttatctttttagggactgagggactcgtaggggattggagtgttattctggtggaagatttgcggatggtgtcaatggcgtccgttgggaaggtgatcaagtgcaaagctgcggtggcttgggaggccggtaagccactgacgatcgaagaggtggaggtagcgcctccgcatgccatggaggtgcgctgtaagatcctatttacctcgctctggcacaccgacgtctacttctgggaggccaatgggcagactctcgtgtttcctcggatcttttgccacgaggctggaggtatcatatagagtgttggagagggtgtgactgacgtatcttcgggcgaaccatg

SEQ ID NO: 20699 - DNA, 419 bp, Zea mays
  Clone ID: LIB3151-060-Q1-K1-F2
cacccttcctctgaaacacaccaggcgaagcacattagcatcaaccttttaccaatggctaccaagatattatccctccttgcgcttcttgcgctttttgcgagcgcaacaaatgcgttcattattccacattgctcacttgctccaagttccattattacacagttcctcccaccagttacttcaatgggcttcgaacacccagctgtgcaagcctattggctacaacaagcatttgcggcgagcgtcttacaacaaccaatttcccagttgcaacaacaattccttggcacattctaacataacaaaccatcgcaacgcaacagcctcaacattccctaccagcactgatccacctatccatggtgaaccctggcgcctacttgcaacagcagtttgcttgcttcaaacccacttgc

SEQ ID NO: 20700 - DNA, 402 bp, Zea mays
  Clone ID: LIB3151-060-Q1-K1-F5
gcggcaaattgcaccaagaaatccatcgagaggccttcgactggggaattaatggcgtcgtcggctagcagcagtcaccgccgcctcatcctcgcagccgccgtcctgctctccgtgctcgcggctgccagcgccagcgccgggacctcctgcgtgccggggtgggccatcccgcacaacccgctcccgagctgccgctggtacgtgaccagccggacctgcggcatcgggccgcgcctcccgtggccggagctgaagaggagatgctgccgggagctggcggacatcccggcgtactgcctgtgcacggcgctgagcatccttatggacggcgcgatcccgccgggcccggacgcgcagctggagggccgcctagaggacctgccgggctgcccgcgggag

SEQ ID NO: 20701 - DNA, 345 bp, Zea mays
  Clone ID: LIB3151-060-Q1-K1-F7
catagcggcagtgcgtagagaggatcgtctttcagaacagcatgaatatggtcatcgttctggtcgtgtgcctggctctgtcagctgccaacgcctctgcaatgcatatgccctgcccctgcgcggggctgcaaggcttgtacggcgctggcgccggcctgacgacgatgatgggcgccggcgggctgtacccctacgcggagtacctgaagcagccgcagtgcagcccgctggcggcggcgccccactacgccgggtgtgggcagacgagcgccatgtaccaaccgctccggcaacagtgctgccagcagcaaatgaggatgatggacgtgcagtccgtcgcgc

SEQ ID NO: 20702 - DNA, 411 bp, Zea mays
  Clone ID: LIB3151-060-Q1-K1-G1
tttgataccaacaagcatcatagaaagtggtatttcagtttttacaatagagcaacattggcggccaagatgtttgtacatcctgatgctccttgctctctctgcattgtgttgctaacgcgaccattttttctcaatactcacaagctcctatagctgcccttcttaccccataccatccatcaatgaccgccttaagtatgtgaaaacccagccctttaaccctacaggctccaacaagcaatcgcaacaagcaacttaccttttatcacccctgttctttcaacaatcgccaaccctatctttggtgcagtcattggtacaaaccatcatggcacaacaacttcatcaactcgtgctaccaatgatcaaccaagtagctctggcaaacttttccctactttagaacaa

SEQ ID NO: 20703 - DNA, 216 bp, Zea mays
  Clone ID: LIB3151-060-Q1-K1-G12
gggtcttcataccattagctttatttactttttagcgcaaaagaacctcatcgacaccatgagggtgttgctcgatgcccttgctctccttgctctcgctgcgtgcgctacctacacgcatacaatcggtagctgcggttgtcagccaccgccgtcggttcatctaccggcgccggtgcatctgccaccttcggtttacctgccacctccggtgca

SEQ ID NO: 20704 - DNA, 311 bp, Zea mays
  Clone ID: LIB3151-060-Q1-K1-G4
tccatcggccgcctggtgccccatccattttttccgtaaccctaaccctagtcggcgagggccgccttcccggttactacatgtcgaacccgatgggctccaaaatgctccagttatttaactaccgcatgcggttgacgatccacgacggacgcgaacatcgtgggcgcgttcatggccttcgaccgacatatgaacctcggtccacgtgacagcgacgagtcatgtgcgcctcgccggctcatatgtctccgacactacgcctgtacgctaggtaagcggcacgctctgagtctcattcctagcgcaca

SEQ ID NO: 20705 - DNA, 423 bp, Zea mays
  unsure at all n locations
  Clone ID: LIB3151-060-Q1-K1-G5
gggncttcagaccattagctttatctactccagagcgcataagaacccgatcgacaccatgagggtgttgctcgttgccctcgctctcctggctctcgctgcgagcgccacctccacgcatacaagcggcggctgcggctgccagccaccgccgccggttcatctaccgccgccggtgcatctgccacctccggttcacctgccacctccggtgcatctcccaccgccggtccacctgccgccgccggtccacctgccaccgccggtccatgtgccgccgccggttcatctgccgccgccaccatgccactaccctactcaaccgccccggcctcagcctcatccccagccacacccatgcccgtgccaacagccgcatccaagcccgtgccagctgcagggaacctgcggcgttggcagcac

SEQ ID NO: 20706 - DNA, 382 bp, Zea mays
  Clone ID: LIB3151-060-Q1-K1-G6
ccgacccccaaccatggatgaggcgcaagttgtggagtcaaaggatggaaccatctcggttgcttctgcatttgctggttatcaggaagctgtgcaagacagggatcacaaattcttgacaaaagcagtggaagaagcatatcgaggagtcgattgcggtgacggaggtccatttggagcagttgtcgtctgtaatgacgaagtagtagtcagctgccataacatggttctgaagcacactgaccctactgcgcatgctgaagtaactgcaattagagaggcttgcaaaaagcttgggaaaattgagctctcagactgcgaaatttacgcgtcctgcgagccatgcccaatgtgctttggtgcagttcatctctcccgaatc

SEQ ID NO: 20707 - DNA, 325 bp, Zea mays
  Clone ID: LIB3151-060-Q1-K1-G7
ccatatcaacatgtagacagcatcataaattttaaaaaacatggccttcagtaaagatatacatgaatcagccagtcctgtcctaaaaaaaatgcaacctaccactcgacaaggcaacggaacaagctttaatgaaacttgagggcccccaatctgagcccagtcactaccaacctacgctacttacaaaaacaaaatgtaccttcttcctgtttttcaaccctgtgtacaagtacaaaggtagatcaaacttggggcctcagtcagccactcagctgcatgcaaatatacacgtaggtagccttgtgacatcctggccttcatt

SEQ ID NO: 20708 - DNA, 415 bp, Zea mays
  Clone ID: LIB3151-060-Q1-K1-H10
caacaagcaacatagaatgtgtattccagtttctacaatagagcaacaatggcgaccaagatattttccctccttatgctccttgctctttctgcatgtgttgctaacgcgacaattttccctcaatgcttacaagctcctatagcttcccttcttcccccataccttgcattgaatgatagcttcagtatgtgaaaacccagcttttcaaccctatatgctccaacaagcaatcgcagcaagcaacatacctttatcacccttgtttgatcaatcgccaagcctatctttggtgcagtcattggtacaaaccattaaggcacagcagctgcagcaactcgtgctacctgtgatcaaccaagtagctctggcaaaaccttttccctactctcagcaacaacaatttctttcaatt

SEQ ID NO: 20709 - DNA, 410 bp, Zea mays
  Clone ID: LIB3151-060-Q1-K1-H11
attgataccaactagcaacatacatagtgatttacactagcaacatcttagcaccaatgggagccaagatttttgccctccttgccctccttgctctttcagcaagcgctgctacctcgacttttattccacaatgctcacaacaattccttctctccggcgacagccgtgggatttcaatacccaactatacaatcctacatggtacaagaggccatccaagcaagcatcttacggtcattagcattaaccctccaacaaccatatgctctattgcgacagccatccttagtgcatctgtatctccaaagaatcgtggggcaacaactacaacaacagttggtaccaacaatcaatcaagtagttgcagcggacccttgttggttaccttcaacatcaacagttttttt

SEQ ID NO: 20710 - DNA, 418 bp, Zea mays
  Clone ID: LIB3151-060-Q1-K1-H5
caactagcaacatagaaagcacaatagtgttccaacaattgctgctaaaatattttgccttcttatgctccttggtctatctgcaagtgctgctacggcgaccattttcccacaatgctcacaagctcctatagcttcccttcttaccccgtacctctcaccaacggggtcttcggtatgtgaaaacccaattcttcaaccctacaggatccaacaggcaatcgcagctggcatcttacctttatcacccttggtcctccaacaatcatcagccctattacagcagttacctttggtgcatttattggcacaaaacatcagggcacaacaactacaacaacttgggctagcaaaccttgctggctactctcagcaacagcagtttttttcattcaaccaactagctgcattgaactct

SEQ ID NO: 20711 - DNA, 399 bp, Zea mays
  Clone ID: LIB3151-060-Q1-K1-H8
cttcagaccattagctttatctactccagatctcagaagaacccgatcgacaccatgagggtgttgctcgttgccctcgctctcctggctctcgctgcgagcgccacctccacgcatacaagcggcggctgcggctgccagccaccgccgccggttcatctaccgccgccggtgcatctgccacctccggttcacctgccacctccggtgcatctcccaccgccggtccacctgccgccgccggtccacctgccaccgccggtccatgtgccgccgccggttcatctgccgccgccaccatgccactaccctactcaaccgccccggcctcagcctcatccccagccacacccatgcccgtgccaacagccgcattcaagcccgtgccagctgcaggga

SEQ ID NO: 20712 - DNA, 387 bp, Zea mays
  Clone ID: LIB3151-060-Q1-K1-H9
tccagatcagcaaagcggcagtgcgtagagtggatcgtcgaacagaacagcatgaagatggtcatcgttctcgtcgtgtgcctggctctgtcagctgccagcgcctctgcaatgcagatgccctgcccctgcgcggggctgcagggcttgtacggcgctggcgccggcctgacgacgatgatgggcgccggcgggctgtacccctacgcggagtacctgaggcagccgcagtgcagcccgctggcggcggcgccctactacgccgggtgtgggcagacgagcgccatgtaccagccgctccggcaacagtgctgccagcagcagatgatgatgatggacgtgcagtccgtcgcgcaacagctgcagatgatgatgcagcttgagcgt

SEQ ID NO: 20713 - DNA, 179 bp, Zea mays
  Clone ID: LIB3151-061-Q1-K1-G7
cccgttcgacaccttttttttgttgttgggaacaatacttttttcttttcatttcaatagggccatcagacccatccgcaccagcagtcccaatgccggccacccgcggcggtttatgtagcgccgatagcgcatcaaccagactgcggtttacctgcctgcttcagtgcatttcatac

SEQ ID NO: 20714 - DNA, 227 bp, Zea mays
  Clone ID: LIB3151-062-Q1-K1-A9
aggccacccacaaacgggatccaatacgagtttgggttttgggttgcaaaatacaaaaacatgttttgtttaagggacggggacagttgcgatgcgacaaaaaaacaaaaccacgggaatctgactccacagaacagggtctcaacaaagccctgatatcactgttcattggcagatttgtttgacggggggcaaaaactgggcgggctggaccacgggggggttct

SEQ ID NO: 20715 - DNA, 541 bp, Zea mays
  Clone ID: LIB3151-023-F1-F1B
aatcttaaacgctgtcaccatataatcatttctgcaaaaataatatcacagcaatttgcattaactaaggcggctttctgacattttcttttcacaacagttgttctattagacgacatcacttcatcaactaatgaagggaaaaggctatagtttaattacaaagcaacacaatgggaaacaaaaaaaaatgaagactactttctcgatcattcttgttatcatgttgtcgattggctgcacagcacaggacaacagcaagctgttgaaaacccgccatgatctataaggctatacaagaaactcatctatccagaaaatctttgcagcagaacatcggtgtgctgcatgggtgaaggatcagcaagctcgaagtatcatggaagcagcgttcctgtttctcattgacaaaatgacagcatcaagaaaagcctttgcagcttcagcatcattttctgcagcctctgcaactcttgctgcttcctcagcttctgccattgctacttctgcctcggcaactgccttggcagcaaaggcagca

SEQ ID NO: 20716 - DNA, 604 bp, Zea mays
  Clone ID: LIB3151-023-F1-R1B
ctcccacccaacaacaaaacaagcctaatggcttcctctccatctcacgccactgcggttgcctacttgccctagaaccctcgccggcgcccctctttaggattcccatgtccctggtcgccccctgacacgcccgccccggatcctgcacccgaattccgcgtggaattccgggccgaaccgcctctctgcgtgcgcctccgaccaccaaactctctctctcaacgcgcgcgcgggcacgtctgaggcggtttgattctccggtgggggttccttggtctcgaactctcgatttgctgctgatgggggtgccgaagcagcgctggacgccggaggaagaggccgcgctcaaggccggtgtcgccaagcacgggcccggcaagtggcgcaccatcctccgggactcggacttcagcgcgctcctgcgcctccgctccaatgttgacctcaaggacaagtggcgcaacttgagcgtcaccgcaagaggttacgggtctagagagaaggcaaggatggcgttgaaaaaaggcaggcgcgtggtgcctaagcttactgctgacccaatggatgtagatgaggaggatatggacaacgctcatgacac

SEQ ID NO: 20717 - DNA, 696 bp, Zea mays
  Clone ID: LIB3151-023-F1-F3A
ccatcctccgggactcggacttcagcgcgctcctgcgcctccgctccaatgttgacctcaaggacaagtggcgcaacttgagcgtcaccgcaggaggttacgggtctagagagaaggcaaggatggcgttgaaaaaaggcaggcgcgtggtgcctaagcttactgctgacccaatggatgtagatgagaaggatatggacaacgctcatgacacagtcattgatgtggaaccgttagcaatggctttcgagcccttgccacttttggaaagcccagataagtcagttgctaggctcgatgatctcatagtagaagctataaggaagcttaacgagccatctgggtccaataaggcagtcattgctggatatattgaggtaaaccaaaagtacagaattgcaccaagttcttccttgggcggaataagcactaaggtatcctcttctgaagggatgaacacagaaaataataatgttaaacggctaactaagcctcaagtggttgctgaactggagaagatgaaaggcatgaccagggaagaggctgctgcctttgctgccaaggcagttgccgaggcagaagtagcaatggcagaagctgaggaagcagcaagagttgcagaggctgcaaaaaatgatgctgaagctgcaaaggctttttcttgatgctgtcattttgtcaatgagaaaacaagaa

SEQ ID NO: 20718 - DNA, 324 bp, Zea mays
  unsure at all n locations
  Clone ID: LIB3151-020-Q1-K1-G7.F2
ggggggggggggggcnntttttgttttttttgtttttttttggtntgggttttgtggngtttgggtttttttggggccttctccctgctgggccggggtgtttttgcttnctttcctttctcttgggggtttgttttggggcccctcntgctcgggggctcngtggggggggngtnggttggggtcctggggcggtcccttctcttttgttctttgtgtggggccgggttgtccttggccccggggcttcttgttttttttgcggtgttttttggggttcgtttggttcttttgggggtgttcctgctttcctgtttggtgttc

SEQ ID NO: 20719 - DNA, 487 bp, Zea mays
  unsure at all n locations
  Clone ID: LIB3151-020-Q1-K1-G7.R2
cggactaccattgctgggggggggaccacccgattcgaagcgttctttttgaccgaanaacgggagagatggttcgtaccaagcagactgttcgcaagtccattttttgaaggctcccaggaagaatttgtggggggggggggcgtaagtctgcccccaccactggtggagtgaagaagcctcaccgatacccccctggaactgttgccctccgtgagatccgcaagtttcagaagagcactgagctgctgatcaggaagctgccctttcagagctggtcggggaaattgtacaggacttcaaaactgatttgcgtttccagagccatgcggtgcttgccctccaggaggctgctgtggtataccttggtggcctgtttgaggacaccaacctgtgcgccatccatgctaagcgtgtgaccatcatgccaaaggacattcacctggccagggagatccgcggcgagagggcctaatcgtcaactcaa

SEQ ID NO: 20720 - DNA, 647 bp, Zea mays
  Clone ID: LIB3151-023-F1-R3A
ttgcagcagaacatcggtgtgctgcatgggtgaaggatcagcaagctcgaagtatcatggaagcagcgttcctgtttctcattgacaaaatgacagcatcaagaaaagcctttgcagcttcagcatcattttctgcagcctctgcaactcttgctgcttcctcagcttctgccattgctacttctgcctcggcaactgccttggcagcaaaggcagcagcctcttccctggtcatgcctttcatcttctccagttcagcaaccacttgaggcttagttagccgtttaacattattattttctgtgttcatcccttcagaagaggataccttagtgcttattccgcccaaggaagaacttggtgcaattctgtacttttggtttacctcaatatatccagcaatgactgccttattggacccagatggctcgttaagcttccttatagcttctactatgagatcatcgagcctagcaactgacttatctgggctttccaaaagtggcaagggctcgaaagccattgctaacggttccacatcaatgactgtgtcatgagcgttgtccatatccttctcatctacatccattgggtcagcagtaagcttaggcaccacgcgcctgccttttttcaacgccatccttgcc

SEQ ID NO: 20721 - DNA, 494 bp, Zea mays
  Clone ID: LIB3151-019-Q1-K1-A11.F1
gaaatacagaaaaattctcattgcaatcagctttattgtttctaccacatgaagattttccatactggctagatcactcaacaatcacaagtataagataacaaccttttccgtgtagcatgatacaattagctgccatttgttctttctactttcgcatcaggggaactacagtatgagcagctatgctcctggttctcccctagactgtcaactttctcgggcgtcttggccttgagattgaccacagatggatctgccccaagtaggtcgcacaaattcgatcggattgtctccttgaatgggctaatttttggtttttgcaagatcagcgtagatcagggttgcccagctcgtagcctggcttcatgcatcaatttcacagcttccctcatgaacaccgaagaatcggggcccttccaacgggggtcggagtccgggaaaatctggccgatgtctggcagccccagcgcgccgagaatcgggtccaccac

SEQ ID NO: 20722 - DNA, 514 bp, Zea mays
  Clone ID: LIB3151-019-Q1-K1-A11.F2
gggaaatacagaaaaaattctcattgcaatcagctttattgtttctaccacatgaagattttccatactggctagatcactcaacaatcacaagtttaagataacaaccttttccgggtagcatgatacaattagctgccatttgttctttctactttcgcatcaggagaactacagtatgagcagctatgctcctgttctcccctaaactggcaactttctcgtgcgtcttggccttgaaattgaccacagatggatctgccccaagtaggtcgcacaaattcgatcggattgtctccttgaatgggctaatttttggtttttgcaagatcagcgtagcatcaaggttgcccagctcgtagcctgcttcatgcatcaatttcacagcttccctcatgaacaccgaaaaatcggcgcccttccaacgggggtcggagtccgggaaaatctggccgatgtctggcagccccagcgcgccgagaatcgcgtccaccacgcagtgcagcagcacgtc

SEQ ID NO: 20723 - DNA, 540 bp, Zea mays
  unsure at all n locations
  Clone ID: LIB3151-019-Q1-K1-A11.R1
cccatctccaccgcgccacgaatccgcgccgggccctgcctccgtccgcccagccatccctgcggctccggcgaggcgtccccgcagccgcggcgccgtccagcggacaccagcccgcgnttgaccggccgctcgaagccacccgcgctaccgttccgcgtgggccaggcttcgacctccaccgcctggagcccgacctcccgctcatcatcggcggcatcaacatcccccacgaccgcggctggaggctcactctgacggcgacgtgctgctgcatgcgtggtggacggattctcggcgcgctggggctgccagacatcggccagattttcccggactccgacccccgttggaagggcgccgattcttcggtgttcatgagggaagctgtgaaattgatgcatgaagcaggctacgagctgggcaaccttgatgctacgctgatcttgcaaaaaccaaaaattagcccattcaaggagacaatccgatcgaatttgtgcgacctacttggggcagatccatctgtggttcaatctcaag

SEQ ID NO: 20724 - DNA, 554 bp, Zea mays
  Clone ID: LIB3151-019-Q1-K1-A11.R2
cccatctccaccgcgccacgaatccgcgccgggccctgccctccgtccgcccagccatccctgcggctccggccgaggccgtccccggcagccgcggccgccgtccaggcggagcaccagcccgcgttgaccgcggcgccgaagccacccgcgctaccgttccgcgtgggccacggcttcgacctccaccgcctggagcccgacctcccgctcatcatcggcggcatcaacatcccccacgaccgcggctgcgaggctcactctgacggcgacgtgctgctgcactgcgtggtggacgcgattctcggcgcgctggggctgccagacatcggccagattttcccggactccgacccccgttggaagggcgccgattcttcggtgttcatgagggaagctgtgaaattgatgcatgaagcaggctacgagctgggcaaccttgatgctacgctgatcttgcaaaaaccaaaaattagcccattcaaggagacaatccgatcgaatttgtgcgacctacttggggcagatccatctgtggtcaatctcaaggccaa

SEQ ID NO: 20725 - DNA, 548 bp, Zea mays
  Clone ID: LIB3151-019-Q1-K1-D2.F1
agtaatatataggatgacagatatagttgatccaaagcaggtaatggaaatacaaaggttcataaaaaggtttgctgcaacttctagggcagcttataacagtacatactagcagcacaaatggtcaaggaacagcatgccagacaacgcatcttgcgcccgaacgctcgacttcctgtcaagcggctcttaccataccaaggttacacgatccatcgatgcaataccattgtaggttcttgttttgtagacgcaaacgcagccgatctatatgacagacccatcgttgatggttgcattcttcaagatcaccacgattccagaccttatgtagtacccttcttccgggtgatcagcctcttggatgcccttactgtttgtgatcaccacgttcttcccaatcctagcattcatgtcaatgatacagttccttatctttgtgttccttcctattccaactgggaccttcccagctaacagtagctttgaagcttcttcttcagtttcataggtgtcggctcccatcatcacggagccttgagttcaca

SEQ ID NO: 20726 - DNA, 531 bp, Zea mays
  Clone ID: LIB3151-019-Q1-K1-D2.F2
agtaatatataggatgacagatatagttgatccaaagcaggtaatggaaatacaaaggttcataaaaaggtttgctgcaacttctagggcagcttataacagtacatactagcagcacaaatggtcaaggaacagcatgccagacaacgcatcttgcgcccgaacgctcgacttcctgtcaagcggctcttaccataccaaggttacacgatccatcgatgcaataccattgtaggttcttgttttgtagacgcaaacgcagccgatctatatgacagacccatcgttgatggttgcattcttcaagatcaccacgattccagaccttatgtagtacccttcttccgggtgatcagcctcttggatgcccttactgtttgtgatcaccacgttcttcccaatcctagcattcatgtcaatgatacagttccttatctttgtgttccttcctattccaactgggaccttcccagctaacagtagctttgaagcttcttcttcagtttcataggtgtccgctcccatcatcac

SEQ ID NO: 20727 - DNA, 535 bp, Zea mays
  unsure at all n locations
  Clone ID: LIB3151-019-Q1-K1-D2.R1
ggcgagntngactatactagagagaatgcaacatcgagcattctgtgattggagtctgctcacgtgtcagctctggatgtgaactcaaggactccgtgatgatgggagcggacacctatgaaactgaagaagaagcttcaaagctactgttagctgggaaggtcccagttggaataggaaggaacacaaagataaggaactgtatcattgacatgaatgctaggattgggaagaacgtggtgatcacaaacagtaagggcatccaagaggctgatcacccggaagaagggtactacataaggtctggaatcgtggtgatcttgaagaatgcaaccatcaacgatgggtctgtcatatagatcggctgcgtttgcgtctacaaaacaagaacctacaatggtattgcatcgatggatcgtgtaacttggtatggtaagagccgcttgacaggaagtcgagcgttcgggcgcaagatgcgttgtctggcatgctgttccttgaccatttgtgctgctagtatgtactgttataagct

SEQ ID NO: 20728 - DNA, 567 bp, Zea mays
  Clone ID: LIB3151-019-Q1-K1-D2.R2
cggacgcgtgggtggttgcttactgagagaatgcaacatcgagcattctgtgattggagtctgctcacgtgtcagctctggatgtgaactcaaggactccgtgatgatgggagcggacacctatgaaactgaagaagaagcttcaaagctactgttagctgggaaggtcccagttggaataggaaggaacacaaagataaggaactgtatcattgacatgaatgctaggattgggaagaacgtggtgatcacaaacagtaagggcatccaagaggctgatcacccggaagaagggtactacataaggtctggaatcgtggtgatcttgaagaatgcaaccatcaacgatgggtctgtcatatagatcggctgcgtttgcgtctacaaaacaagaacctacaatggtattgcatcgatggatcgtgtaaccttggtatggtaagagccgcttgacaggaagtcgagcgttcgggcgcaagatgcgttgtctggcatgctgttccttgaccatttgtgctgctagtatgtactgttataagctgccctagagttgcagcaaaccttttt

SEQ ID NO: 20729 - DNA, 316 bp, Zea mays
  Clone ID: LIB3151-021-Q1-K1-G2.F2
aaaaaacttgggcaggggggttaacaatgggtatacctatagggctgatcccacccttatattgtaccttttggtatatgatgaatactctttttccaaactgaggacgcatgcatggccaaagggcgcgtttgtgtgtgtaataccaccaggtgtttttgaaacataaataatgtacatggggaaataaggccgtttgaacatcataatgaggcagcgcccattgccgaaagctcaaaccgaattgctcgacccagttttccaggctgaaccatttgcttttctggaaactgggcatgattacctaggtttgctt

SEQ ID NO: 20730 - DNA, 83 bp, Zea mays
  Clone ID: LIB3151-021-Q1-K1-G2.R1
gttagctttatctactgcagagcgcgaagaacccggtcgacaccatgagggtgttgcgcgttgccctcgctctcctggctctc

SEQ ID NO: 20731 - DNA, 455 bp, Zea mays
  Clone ID: LIB3151-022-Q1-K1-C8.F1
ggacaaaaattgtacccatggatttcaattgcacattcagggcaatgcacacactgacactgccacccaagggcaagcgagaaacagtataactcaaacatcgacgctaaaaaactcaactagccagctagccagcggtaagactacaagagagggttccccaagggggggacacgggggaaacaccgtaggggtatggaataagatgctgaggacggaaaacgttggcagttgctgagaaagctgcccgccaaaagccccgggacctggaagcttgggagaatgcgggaggactggactgggggaccaggcccaaaatcgcctggaaccggtgctggggatccaactgccagagctactggaaacactgctgccgaaacgactggaactgaggcgagcagtaaggcgtcggggtagggctaaactgaagcctcagaaactcgacgcagtggccc

SEQ ID NO: 20732 - DNA, 478 bp, Zea mays
  Clone ID: LIB3151-022-Q1-K1-C8.F2
ggacacaatacttttttttttttatttaaatgggtcatttaggtaattgttcacactgacactgaaacccagggggatgcttgacccgggattacccaacaatcgacaaaaaatgacttaagggacaagctagccagcggaaattactacagggcacaccccctttagggggggacaccgacaacagcagcggaggggcaagaaaccgggtgatgaaggccacacatccccgtaaggggagagggtatatgagccgccaacagccccgggaccagaacgctttgcggcggttgttgcaaaaaggactggaggaccaaccccaaaaccgccgggaaccggagcggcggttccacctgccaaaacgggtggaaacactgctgccccaacgactggaaatagaagaaaccatgggggagtagccgggggccggcaccgaagcctaaaaaactcgacccacaggcccaagaacggggggctg

SEQ ID NO: 20733 - DNA, 499 bp, Zea mays
  Clone ID: LIB3151-022-Q1-K1-C8.R1
cgagctcatcaacatagtaagcacaatatagtcccaacagtggcagccaccaatatttctaccatccttgatgctccttcggtcttcccgcactcgctgctatcgcgaccattttcacgtaatggtctaaaactcctatatcttcccttattaccccggagctctcactatagggccgttcggtatttgaaaacctaattcttaaatgctacatgatgcaataggcaatcgcagctggcatcttacctttatcaccattgttcatcgaagaatcatcagccctattacaataattaactgtggtgaaattatagtgacatacataagggcacaacaattacaacaatttgagctagaaaccttgctggctaaactcagcatcaaaagtttcgtcaattcaaccaaatagggtcattgaactatgcttcttatttgcaacaacaataaatattattaaggaaactaccagatgactgagacgagtaatttcttccattaa

SEQ ID NO: 20734 - DNA, 561 bp, Zea mays
  Clone ID: LIB3151-022-Q1-K1-C8.R2
gagctatgtcagcatagtaaagcactatatagtaccaacagcggaagaacaacgtatgacaccctgaggatggtgcttggtcgttctgcatgtgctggttctgggaccatgcgccacctatgctcatacagctgctatagtgtggctgcttcccacggacctctgaccatctacggctgccggatgataaaacacatttgtttaaccttacaggatccaagaggctatcacagctggcatattagctttatcacgcttgtttgtcaaacaatgatcatgtgtattacaacagttatctgtggtgcatacattggcacaaaacatcagggcacaacaactacaacaacttgtgctagcaaaacttgttgcctagtctcaagaacagtagaatcttgcattcaatcaactaagctcattgaactctgattattattagcatcagcaacaactaccatgcatccagctacctgctgcctacccccagcgattccttacattcaaccatatagcaacattgaactctactgctgatttacagaagtaacaactactaacattcag

SEQ ID NO: 20735 - DNA, 552 bp, Zea mays
  Clone ID: LIB3151-022-Q1-K1-D3.F1
atgacgtcggggcccttctgctcttccagcctgccgatgaacgccaccagcgggatgttccggtccaccgggagcccgacctccgcctgcaggcctccttgttcagcgccttggcctccacggccgtcgacacgtcgtacttcacggcgatgtacttgtccctgctggggtcccactcgctgacgtccatgccgttgacgatgccggtgatgccgtgagggcatgatgttgtcgagctcgcagcccctgcgatgcggagatgagctcctcggcgtataggggctgacggtgaggaccctgtcggcctcgaggatcccggccttcatccagttgatcttccggccttccacgggcttctcgtagccgtcgatgaaatcaggacgacttgaatctctccgggaggttcagctccgggtagtcggagaaggcgaaccggccctggtaggagatgttgtggatgcagaaagcggtctttgcgtccctgtagatgccgtgggactggtagttgctcttgaggtagcacgagagagggccggtgtgcaagtcgttgca

SEQ ID NO: 20736 - DNA, 567 bp, Zea mays
  Clone ID: LIB3151-022-Q1-K1-D3.F2
atgacgtcggggcccttctgctcttccagcctgccgatgaacgccaccagcgggatgttccggtccaccgggagcccgacctccgcctgcagcgcctccttgttcagcgccttggcctccacggccgtcgacacgtcgtacttcacggcgatgtacttgtccctgctggggtcccactcgctgacgtccatgccgttgacgatgccggtgatgccggtgaggcgcatgatgttgtcgagctcgcagcccctggcgatgccggagatgagctcctcggcgtagtaggggctgacggtgaggaccctgtcggcctcgaggatcccggccttcatccagttgatcttccggccttccacgggcttctcgtagccgtcgatgaaatcgaaggacgacttgaatctctccgggaggttcagctccgggtagtcggagaaggcgaaccggccctggtaggagatgttgtggatgcagaaagcggtctttgcgtccctgtagatgccgtgggactggtagttgctcttgaggtagcacgagagagggccggtgtgccagtcgttgcagacgaac

SEQ ID NO: 20737 - DNA, 519 bp, Zea mays
  Clone ID: LIB3151-022-Q1-K1-D3.R1
gatcgatcgccacagccaacaccacccgccgagggacgcgacacgcgccaggaggaaggaataaactcactgccagccagtgaagggggagaagtgtactgctccgtcgaccagtgcgcgcacgccggcacgtgctcatctcgtcgacgaccagtggattaatcggcatggcggctctggccacgtcgcagctcgtcgcaagcccgccggcctgggcgtcccggaccggtccacgttccgccgcgggccggcagggcctgaggggggccgggcgtcggcggcggcggacacctcagcatgcggaccagcgcgcgcgtccgccaggcaccagcagcaggcgcgccgcgggggcaggttcccgtcgctcgtcgtgtgcgccagccgggcatgaacgtcgtcttcgtcggcgccgagattccggagagcaagaccagcggcctcggcgacgtcctcggcggcctggcgcacaatgggccgcgaatgggcacggtgtcatggtcgtctctccccgctacgacc

SEQ ID NO: 20738 - DNA, 561 bp, Zea mays
  Clone ID: LIB3151-022-Q1-K1-D3.R2
gatcgatcgccacagccaacaccacccgccgaggcgacgcgacagccgccaggaggaaggaataaactcactgccagccagtgaagggggagaagtgtactgctccgtcgaccagtgcgcgcaccgcccggcagggctgctcatctcgtcgacgaccagtggattaatcggcatggcggctctggccacgtcgcagctcgtcgcaacgcccgccggcctgggcgtcccggacgcgtccacgttccgccgcggcgccgcgcagggcctgaggggggcccgggcgtcggcggcggcggacacgctcagcatgcggaccagcgcgcgcgcggcgcccaggcaccagcagcaggcgcgccgcgggggcaggttcccgtcgctcgtcgtgtgcgccagcgccggcatgaacgtcgtcttcgtcggcgccgagatggcgccgtggagcaagaccggcggcctcggcgacgtcctcggcggcctgccgccggccatggccgcgaatgggcaccgtgtcatggtcgtctctccccgctacgaccagtacaaggacgcctgggacaccag

SEQ ID NO: 20739 - DNA, 459 bp, Zea mays
  Clone ID: LIB3151-022-Q1-K1-F10.F1
ttgttttttttttttttttttttttttttttttttttttttttttttttttttttttttaaaaaattaatcttttcaaaaaagagggcctaccaaggaaaaggcccacgaaggaaaaaaacccacgggacgggaaaaggaaggcggccggggaaagggggcaagcgggggccaccgcaaaaggggcggggcaccagggggggcaggggggagccagaaagggagggaagggcgggaaggggaggggagagcaacgggggaggggaagcccggggggggaaaggcgggaaggggggggggcccgggagacgcgggggggggaagggcacggcggcaaggggggaaaaaggcgggaagaggggggggggggggcggaaaaagagcggggggggagggggagggggggggggaagggggaggaggggaaaaagcccgggaggggcgcaaagcaggggggggg

SEQ ID NO: 20740 - DNA, 529 bp, Zea mays
  Clone ID: LIB3151-022-Q1-K1-F10.F2
tttttttttttttttttttttttttttttttttttttttttttttttttttttttttttttaatttttttttttttttaaaaaaaatttttaaaaaaaaaaaaggtttataaaaaaaaaaaaacccattgcaaaaaaaaaaaaaaaagaaagaaaaaaaaaaaaaaaaaaaaaaaaaaaaaaaaggaaacaaaaaaaaaaaaaaaaaagaaaaaaaaaaaaaaaaaaaaacaacctaaaaaaaaaaaaaattaaaaaaaaaaaaaaggtaaaaaaaaaaaaaaaaagcttgaaaggagggaaaagggccggaaaacagtcggggaaaaaaaaaatttgggaaagggggaaaaatgagggagcgggggaccaataggggggcggacaaaaaaggggggagggggcaagcggggaaggggagaaaaaaaaagaaagggggaacaaaccggaaaaggcctgaacagggggggggggaagcaacaggggggaggggaaaaaaaaactggggccaaaaaaaagggcccggaagg

SEQ ID NO: 20741 - DNA, 448 bp, Zea mays
  unsure at all n locations
  Clone ID: LIB3151-022-Q1-K1-F10.R1
ctgggtcttcagacattagctttatctactccagagcgcaaagaacccgatcgacaccatgagggtgttgctcgttgccctcgctctcctggctctcgctgcgaggccacctccacgcatacaagcggcggctgcggctgccagccaccgcgcgggtnnntcatctaccgccgccggtgcatctgccacctccggttcacctgccacctccgggtcatctcccaccgccggtccacctgccgccgccggtccacctgccaccgccggtccatgtgccgccgccggttcatctgccgccgccaccatgccactaccctactcaaccgccccggcctcagcctcatccccagccacacccatgcccgtgccaacagcgcatccaagcccgtgccaggtgaagggaacgtggtgtggggagcaccccgatactgggccagttcgtcgagtt

SEQ ID NO: 20742 - DNA, 547 bp, Zea mays
  Clone ID: LIB3151-022-Q1-K1-F10.R2
ctgggtcttcagaccattagctttatctactccagagcgcagaagaacccgatcgacaccatgagggtgttgctcgttgccctcgctctcctggctctcgctgcgagcgccacctccacgcatacaagcggcggctgcggctgccagccaccgccgccggttcatctaccgccgccggtgcatctgccacctccggttcacctgccacctccggtgcatctcccaccgccggtccacctgccgccgccggtccacctgccaccgccggtccatgtgccgccgccggttcatctgccgccgccaccatgccactaccctactcaaccgccccggcctcagcctcatccccagccacacccatgcccgtgccaacagccgcatccaagcccgtgccagctgcagggaacctgcggcgttggcagcaccccgatcctgggccagtgcgtcgagttcctgaggcatcagtgcagcccgacggcgacgccctactgctcgcctcagtgccagtcgttgcggcagcagtgttgccagcagctcaggcaggtgg

SEQ ID NO: 20743 - DNA, 103 bp, Zea mays
  Clone ID: LIB3151-024-Q1-K1-A9.F1
attaattaattaattactttaatacagggaaaaaaaaaaaaaaaaaaaaaaacggaaaaaaagacgaaaaaagaaaaaaaaaccacaaaaaagggggcaacaa

SEQ ID NO: 20744 - DNA, 486 bp, Zea mays
  Clone ID: LIB3151-024-Q1-K1-A9.F2
aaaaaattatttaaaaatgggaaaaatttttataattttttaaaaattttttataatttaaaaaaaaaaaaaaaaagaaaaaaaagggggaaaaaaagaagggagaaagggggaaaaaaagaaaaaaaaaaaaaaaaaaaaagaaaaaggggggaaaaaagggagaggggggggggggaaaaagagggggggggggggggggggaaaaggggggaaaggggggaggggggggaaagaaaaaaagggggaaacaagcaaaaagggggaaggagaaaaaaaagggagggggggggaaaaaaaaaaaaaaaagggggcaaaaagggggaaagaaaaaaaaaaaggggggggggggggaggaaaaaggggggagaagggaagggggggggggggggggggggaaaaagggggggggggaagaaagaaagcagggggccaaaaaggtgctctaggggggaaaaaagggggaaggcggggaaaaaaggggaa

SEQ ID NO: 20745 - DNA, 424 bp, Zea mays
  Clone ID: LIB3151-024-Q1-K1-A9.R1
caacaacaactaccattcagccagctacctagttgcctacccccagcaatttcttccattcaaccaactggcagcattgaactctcctgcttatttacagcagcaacaactactaccattcagccagctagctggtagtgagccctgctaccttcttgacacaaccacagttgttgccgttctaccagcacgctgcgcctaacgctggcaccctcttacaactgcaacaattgctgccattcaaccaacttgctttgacaaacctagcagtgttctaccaacaacccatcattggtggtgccctcttttagatttcttatgagttatagttcaataataaagttttttgtctgatgtttgtggcttcccagaaataagaaagtacatttctagattaaaaaaaaaaaaaagaaaaaaaagaaaa

SEQ ID NO: 20746 - DNA, 394 bp, Zea mays
  Clone ID: LIB3151-024-Q1-K1-A9.R2
caacaacaactaccattcagccagctacctgttgcctacccccagcaatttcttccattcaaccaactggcagcattgaactctcctgcttatttacagcagcaacaactactaccattcagccagctagctggtgtgagccctgctaccttcttgacacaaccacagttgttgccgttctaccagcacgctgcgcctaacgctggcaccctcttacaactgcaacaattgctgccattcaaccaacttgctttgacaaacctagcagtgttctaccaacaacccatcattggtggtgccctcttttagatttcttatgagttatagttcaataataaagttttttgtctgatgtttgtggcttcccagaaataagaaagtacatttctagatt

SEQ ID NO: 20747 - DNA, 475 bp, Zea mays
  unsure at all n locations
  Clone ID: LIB3151-052-Q1-K1-A5.F1
ggaacaatacttttttcttttcatttcaattgttcattcaggtcattgctcacactgacactgccacccatggtgatgcgtgacacattattactcaatcatcgccgctaaatgactcaactagctagctagccagcggctatactacagcacatagtttcttcagtgggggacaccgccggcagcagcgtaggggcatggagtcggctgctgaggccgcacatcgccgtcagttgctgcgctatctgcgcgccaaaagccccgcgacctggccgctttgtggncttgctgcaggttggactggaggaccaagccgaagatcgcctggtaccggtgctgcggctccacctgcctgagctgctggcaaaactgctgccgcaacgactggcactgaggcgagcagtagggcgtcgcgttcgggctgcactgatgcctcagaaactcgacgcactggcccaggatcggggtgctgcca

SEQ ID NO: 20748 - DNA, 479 bp, Zea mays
  Clone ID: LIB3151-052-Q1-K1-A5.F2
ggaacaatacttttttcttttcatttcaattgttcattcaggtcattgctcacactgacactgccacccatggggatgcgtgacacattattactcaatcatcgccgctaaatgactcaactagctagctagccagcggctatactacagcacatagtttcttcagtgggggacacccccggcagcagcgtaggggcatggagtcggctgctgcaggccgcacatcgccgtcagttgctgcgctatctgcgccgccaacagccccgcgacctggccgctttgcggctgctgctgcaggatggactggaggaccaagccgaaaatcgcctggtaccggtgctgcggctccacctgcctgagctgctggcaacactgctgccgcaacgactggcactgaggcgagcagtagggcgtcgccgtcgggctgcactgatgcctcaaaaactcgacgcactggcccaggatcggggtgctgccaa

SEQ ID NO: 20749 - DNA, 495 bp, Zea mays
  unsure at all n locations
  Clone ID: LIB3151-052-Q1-K1-A5.R1
accattagctttatctactccagagcgcagaagaacccgatcgacaccatgagggtgttgctcgttgccctcgctctcctggctctcgctgcgagcgccacctccacgcatacaagcggcggctgcggctgccagcaccgcggcgattcatctaccgccgccggtgcatctgccacctccggttcacctgccacctccgggtcatctcccaccgccggtccacctgccgccgccggtccacctgccaccgccggtccatgtgccgccgccggttcatctgccgccgccaccatgccactaccctactcaaccgccccggcctcagcctcatccccagccacacccatgcccgtgccaaagccgcatccaagcccgtgccagctgcagggaactggtnntggcagcaccccgatcctgggccagtgcgtcgagtttctgaggcatcagtgcagcccgacggcgacgccttactgctcgcctcagtgccagtcgttg

SEQ ID NO: 20750 - DNA, 535 bp, Zea mays
  Clone ID: LIB3151-052-Q1-K1-A5.R2
accattagctttatctactccagagcgcagaagaacccgatcgacaccatgagggtgttgctcgttgccctcgctctcctggctctcgctgcgagcgccacctccacgcatacaagcggcggctgcggctgccagccaccgccgccggttcatctaccgccgccggtgcatctgccacctccggttcacctgccacctccggtgcatctcccaccgccggtccacctgccgccgccggtccacctgccaccgccggtccatgtgccgccgccggttcatctgccgccgccaccatgccactaccctactcaaccgccccggcctcagcctcatccccagccacacccatgcccgtgccaacagccgcatccaagcccgtgccagctgcagggaacctgcggcgttggcagcaccccgatcctgggccagtgcgtcgagtttctgaggcatcagtgcagcccgacggcgacgccctactgctcgcctcagtgccagtcgttgcggcagcagtgttgccagcagctcaggcaggtgg

SEQ ID NO: 20751 - DNA, 533 bp, Zea mays
  Clone ID: LIB3151-061-Q1-K1-E9.F1
gaagaaaaatagcattttcattatcattttcggtcgcttgtttatcacttgcaatttctttacactgtctcaaatcttacaacaacgatgtagaaatgcagatttctgcaccgtaaaaaggaaacaggcagcatacccccttggcatgctatatcgaaagaataaatctcagaaactcaaagaatccaaggatttacaggagagaacaaatacctcctcctctatatgacaaccaacctcctcgtgtcgttgccaaaggaactttggaaaccagtaacaatgtacaggacaatgtacattagatggctgctgagcaccacaaacatctcttcaaaagcaaactttatggagcttgtcctctgaatagagacctgcagatagcaatccatcactaggtgaaaggcctctatgtcttgcttttgttggactaagctggcaggtgccaaaaacacacctgctacctattccgtgcttgggaatcctcagaagagatactggagtgaggagagggctcaaggctctctggcagctcc

SEQ ID NO: 20752 - DNA, 538 bp, Zea mays
  Clone ID: LIB3151-061-Q1-K1-E9.F2
gaagaaaaatagcattttcattatcattttcggtcgcttgtttatcacttgcaatttctttacactgtctcaaatcttacaacaacgatgtagaaatgcagatttctgcacgtaaaaaggaaacaggcagcatacccccttggcatgctatatcgaaagaataaatctcagaaactcaaagaatccaaggatttacaggagagaacaaatacctcctcctctatatgacaaccaacctcctcgtgtcgttgccaaaggaactttggaaaccagtaacaatgtacaggacaatgtacattagatggctgctgagcaccacaaacatctcttcaaaagcaaactttatggagcttgtcctctgaatagagacctgcagatagcaatccatcactaggtgaaaggcctctatgtcttgcttttgttggactaagctggcaggtgccagaaaacacacctgctacctattccgtgcttgggaatcctcagaagagatactggagtgaggagagggctcaaggctctctggcagctccagttg

SEQ ID NO: 20753 - DNA, 552 bp, Zea mays
  Clone ID: LIB3151-061-Q1-K1-E9.R1
cgaaagaatcggaggatgttggcttactctactgttggtacacctgattacattgcacccgaggtggtcacttggtgcaataatgttcgaaatgcttgtggggtatccgccattttattctgaagacccaatgtcaacatgtaggaagatagtgaattggagaagtcatctaaaattccctgaagaggccagcctttctctagaagctaaagatctcattagcaagctattgtgtaatgtggatcagagaattggaacaaaaggtgcacatgagataaaggcacatccatggtttgcaggtgttgagtgggaaaaactatatcagatggaagcagctttcattcctgaggttaatgatgagttggacacacaaaactttgaaaagtttgaggagactgctcctccaatgcaaacttcatcaaaggcaggtccttggagaaagctgagctaaagaaaacgaacaacaagccaaagcgaccaaccatcaaatcattatttgagactgctgatagtgaagaccagccttctgatggcagttttctgaacctatta

SEQ ID NO: 20754 - DNA, 556 bp, Zea mays
  Clone ID: LIB3151-061-Q1-K1-E9.R2
cagaagaatcggaggatgttggcttactctactgttggtacacctgattacattgcacccgaggtggtcacttggtgcaataatgttcgaaatgcttgtggggtatccgccattttattctgaagacccaatgtcaacatgtaggaagatagtgaattggagaagtcatctaaaattccctgaagaggccagcctttctctagaagctaaagatctcattagcaagctattgtgtaatgtggatcagagaattggaacaaaaggtgcacatgagataaaggcacatccatggtttgcaggtgttgagtgggaaaaactatatcagatggaagcagctttcattcctgaggttaatgatgagttggacacacaaaactttgaaaagtttgaggagactgctcctccaatgcaaacttcatcaaaggcaggtccttggagaaagctgagctaaagaaaacgaacaacaagccaaagcgaccaaccatcaaatcattatttgagactgctgatagtgaagaccagccttctgatggcagttttctgaacctattaccca

SEQ ID NO: 20755 - DNA, 224 bp, Zea mays
  Clone ID: LIB3151-038-A4.A1.P1-
aatattttgagcattcagaaacacaccaagcgaagcgcactagcaacaacctaacaacaatggctaccaagatattatccctccttgcgcttcttgcgctttttgcgagcgcaacaaatgcgtccattattccacaatgctcacttgctcctagttccattattccacagttcctcccaccagttacttcaatggccttcgaacacccagctgtgcaagcctat

SEQ ID NO: 20756 - DNA, 54 bp, Zea mays
  Clone ID: LIB3151-038-A4.A3.P1+
aatattttgagcattcagaaacacaccaagcgaagcgcactagcaacaacctaa

SEQ ID NO: 20757 - DNA, 353 bp, Zea mays
  Clone ID: LIB3151-038-A4.A4.P1-
aatattttgagcattcagaaacacaccaagcgaagcgcactagcaacaacctaacaacaatggctaccaagatattatccctccttgcgcttcttgcgctttttgcgagcgcaacaaatgcgttcattattccacaatgctcacttgctcctagttccattattccacagttcctcccaccagttacttcaatggccttcgaacacccagctgtgcaagcctataggctacaacaagcgattgcggcgagcgtcttacaacaaccaattgcccaattgcaacaacaatccttggcacatctaacaatacaaaccatcgcaacgcaacagcaacaacagttcctaccagcactg

SEQ ID NO: 20758 - DNA, 445 bp, Zea mays
  Clone ID: LIB3151-038-A4.B1.P1+
gcctacctacaacagcaacaactgctttcatctagcccgctcgctgtggccaatgcacctacatacctgcaacaagaattgttgcaacagattgtaccagctctaactcagctagctgtggcaaaccctgttgcctacttgcaacagctgcttccattcaaccaactaactatgtcgaactctgttgcgtacctacaacagcgacaacagttacttaatccattggcagtggctaacccattggtcgctgccttcctacagcagcaacaattgctgccatacaaccggttctctttgatgaatcctgtcttgtcgaggcagcaacccatcgttggaggtgccatcttttagattacatatgagatgtactcgataatggtgccctcataccggcatgtgtttcctagaaataatcaatatattggttgagatttatctcgatggg

SEQ ID NO: 20759 - DNA, 590 bp, Zea mays
  unsure at all n locations
  Clone ID: LIB3151-038-A4.B1.P1-
cgccaccgcggtgaaacaagncggcagcggttcaccatggctagttgactaagcgctggcagaaactgttgcagttgttgttgttgctggtttgcaactacgtttgctagagcaagtgggttggatgcaagcagctgctgttgcaagtaggcgacagggttcaccatggctaggtggctcagtgctggtaggaactgttgttgctgttgcgttgcgatggtttgtattgttagatgtgccaaggattgttgttgcaattgggcaattggttgttgtaagacgctcgccgcattcgcttgttgtagcctataggcttgcacagctgggtgttcgaaggccattgaagttactggtgggaggaactgtggaataatggaactaggagcaagtgagcattgtggaataatggacgcatttgttgcgctcgcnnaaagcgcangaagcgcaaggagggatattttcttggtagccattgttgttaggttgttgctagtgcgcttcgcttggtgtgtttttgactgctcaaatttttccgacgcttgggtcgtcccgttttttccggtccggttcctgctggcctcccatctttt

SEQ ID NO: 20760 - DNA, 556 bp, Zea mays
  Clone ID: LIB3151-038-A4.B3.P1-
tatattttgagcattcagcaaacacaccaagcgaagcgcactagcaacaacctaacaacaatggctaccaagatattatccctccttgcgcttcttgcgctttttgcgagcgcaacaaatgcgtccattattccacaatgctcacttgctcctagttccattattccacagttcctcccaccagttacttcaatggccttcgaacacccagctgtgcaagcctataggctacaacaagcgattgcggcgagcgtcttacaacaaccaattgcccaattgcaacaacaatccttggcacatctaacaatacaaaccatcgcaacgcaacagcaacaacagttcctaccagcactgagccacctagccatggtgaaccctgtcgcctacttgcaacagcagctgcttgcatccaacccacttgctctagcaaacgtagttgcaaaccagcaacaacaacaactgcaacagtttctgccagcgcttagtcaactagccatggtgaaccctgccgcctacctacaacagcaacaactgctttcatctagcccgctcgctg

SEQ ID NO: 20761 - DNA, 90 bp, Zea mays
  unsure at all n locations
  Clone ID: LIB3151-038-A4.C1.P1-
cgccaccgcggttgaacactgnatagtactggttcttttctgcccttttggacgttcggcagctccatcgttacttaaatagctggtact

SEQ ID NO: 20762 - DNA, 582 bp, Zea mays
  Clone ID: LIB3151-038-A4.C2.P1+
gtccgaatattttgagcattcagaaacacaccaagcgaagcgcactagcaacaacctaacaacaatggctaccaagatattatccctccttgcgcttcttgcgctttttgcgagcgcaacaaatgcgtccattattccacaatgctcacttgctcctagttccattattccacagttcctcccaccagttacttcaatggccttcgaacacccagctgtgcaagcctataggctacaacaagcgattgcggcgagcgtcttacaacaaccaattgcccaattgcaacaacaatccttggcacatctaacaatacaaaccatcgcaacgcaacagcaacaacagttcctaccagcactgagccacctagccatggtgaaccctgtcgcctacttgcaacagcagctgcttgcatccaacccacttgctctagcaaacgtagttgcgaaccagcaacaacaacaactgcaacagttgctgccagcgcttagtcaactagccatggtgaaccctgccggctacctacaacaggaacaactgctttcatctagcccgctcgctgaggtcaatgcacctacatacct

SEQ ID NO: 20763 - DNA, 286 bp, Zea mays
  Clone ID: LIB3151-038-A4.C3.P1+
aatattttgagcattcagaaacacaccaagcgaagcgcactagcaacaacctaacaacaatggctaccaagatattatccctccttgcgcttcttgcgctttttgcgagcgcaacaaatgcgtccattattccacaatgctcacttgctcctagttccattattccacagttcctcccaccagttacttcaatggccttcgaacacccagctgtgcaagcctataggctacaacaagcgattgcggcgagcgtcttacaacaaccaattgcccaattgcaacaaca

SEQ ID NO: 20764 - DNA, 494 bp, Zea mays
  Clone ID: LIB3151-038-A4.C4.P1+
gcgaatcttgcgcgctattcagaaacacgacgcaagcgtaacgcgctagcgtcaacctaacgtcaatggctgccaagatattatgcctccttgcgcttcttgcgctctttgcgagcgcatcagatgcgtccattattccacaatgctcacttgctcctagtggcattgtgccgcagctgctcccaccaggtacttcattggccttacgacacccagctgtgcaagcctctaggctccaactagcagagtgcagcgacgcgtcttacaacacaccaattgcccaattgctacatcagtccttggcgcatctaacaattcaatccatcgcctcgcagcagccacagcagttcctaccagcgctgagccacctagccatggtgaaccctggcgcctacttgcaacagcggcgtgcttgcatgcaacccacttgactctagcaaacgtagcttgccgaccagcaccaacaacaactgctacaggtgctgccagagctt

SEQ ID NO: 20765 - DNA, 599 bp, Zea mays
  unsure at all n locations
  Clone ID: LIB3151-038-A4.D1.P1+
ccgtcgactcnaaaacacttcgacacccagctgtgcaagcctataggctacaacaagcgattgcggcgagcgtcttacaacaaccaattgcccaattgcaacaacaatccttggcacatctaacaatacaaaccatcgcaacgcaacagcaacaacagttcctaccagcactgagccacctagccatggtgaaccctgtcgcctacttgcaacagcagctgcttgcatccaacccacttgctctagcaaacgtagttgcaaaccagcaacaacaacaactgcaacagtttctgccagcgcttagtcaactagccatggtgaaccctgccgcctacctacaacagcaacaactgctttcatctagcccgctcgctgtggccaatgcacctacatacctgcaacaagaattgatgcaacagattgtaccagctctaactcagctagctgtggcaaaccctgaggcctacttgcaacagctgcttacattcaaccaactaactatgtcgaactctgtagcgtacctacaacagcgacaacagatacttaatgcattggcaggggctaacccattgggcgatggcttgctacaggagggacaa

SEQ ID NO: 20766 - DNA, 207 bp, Zea mays
  Clone ID: LIB3151-038-A4.D1.P1-
cgccaccgcggtgaaaacgtaagccattgaataactggtgggaggaactgtggaataatggaactaggagcaagtgagcattgtgtgaataatggacgcatttgttgcgctcgcaaaagcgcaagaagcgcagggagggataatatcttggtagccattgttgttaggttgttgctagtgcgcttcgcttggtgtgtttctggatgc

SEQ ID NO: 20767 - DNA, 274 bp, Zea mays
  unsure at all n locations
  Clone ID: LIB3151-038-A4.D2.P1-
gcactagcaacaacctaacaacaatggctaccaagatattatccctccttgcgcttcttgcgctttttgcgagcgcaacaaatgcgtccattattccacaatgctcacttgctcctagttccattattccacagttcctcccaccagttacttcaatggccttcgaacacccagctgtgcaagcctgtnggctacaacaagcgattgcggcgagcgtcttacaacatccaattgcccaattgcaacagcggtccttggcgcatctaacattgca

SEQ ID NO: 20768 - DNA, 280 bp, Zea mays
  unsure at all n locations
  Clone ID: LIB3151-038-A4.D3.P1+
ccgtcgacctcganacagccttccatgctggaatggctagagtactcgtagagcttccccttagtggagaagacgatgagcgcgacctctgcgtcgcagagcacggagatctcgtgggccttcttcagcagcccgttccggcgcttggagaaggtcacctggcggttgatcttgttctcgatccggcgcagctgcaccggcccccgccccatctccgccgcctcgccacctaccctctcccgctcactctcgtcgcagcaatggtgatggggacgtgtgg

SEQ ID NO: 20769 - DNA, 356 bp, Zea mays
  Clone ID: LIB3151-038-A4.D3.P1-
ccgccacccggtgaacaaagcattcttgagcgttaccagcgttactcatttgaagaagggcagtactctaacccaagtattgaagaccaggcaaattggggagatgaatatgtccggttaaaatccaaacttgatgcacttcagaagagtcaaaggcagctgttaggagaacaattgagttcactaaccataaaagaactccagcaactggagcaacaactggacagttctttgaagcatattaggtcaagaaagaatcagctcatgttcgattcaatttccgcgcttcagaaaaaggagaaagcacttacagatcaaaacggtgtcctgcaaaagttcatggaggcagagaagga

SEQ ID NO: 20770 - DNA, 391 bp, Zea mays
  Clone ID: LIB3151-038-A4.D4.P1+
cgggataaatctcaaccaattttttggttttttttaggaaacacatgccggtttgggggccccattttcgggtccatctcatttgtaatctaaaagatggcccctccaacggtgggttgctgcctcgccagggcagggttcttcaaagagaaccggttgtttggcagcaattgttgctgctgtgggaaggccgcgccccatgggtttgcccctgccaatgggttaagtaactgttgtcgctgttgttggtccccaccagagttcgccttagttagttggttgaatggaagcagctgttgccagtgggcaacagggtttgccccagcttgctgggtttgggctggtgcaatttgttgcaacaatttttgttgccggtttttaggtgccttgg

SEQ ID NO: 20771 - DNA, 317 bp, Zea mays
  Clone ID: LIB3151-038-A4.E1.P1+
aatattttgagcattcagaaacacaccaagcgaagcgcactagcaacaacctaacaacaatggctaccaagatattatccctccttgcgcttcttgcgctttttgcgagcgcaacaaatgcgtccattattccacaatgctcacttgctcctagttccattattccacagatgctgccaccagttacttaaatggccttcgaacacccagctgtgcaagcctataggctacaacaagcgattgcggcgagcgttttacaacaaccaattgcccaattggaacaacaattcttggttcatttaacaattcaaaccatt

SEQ ID NO: 20772 - DNA, 278 bp, Zea mays
  Clone ID: LIB3151-038-A4.E2.P1+
caattgggcaattggttgttgtaagacgctcgccgcaatcgcttgttgtagcctataggcttgcacagctgggtgttcgaaggccattgaagtaactggtgggaggaactgtggaataatggaactaggagcaagtgagcattgtggaataatggacgcatttgttgcgctcgcaaaaagcgcaagaagcgcaaggagggataatatcttggtagccattgttgttaggttgttgctagtgcgcttcgcttggtgtgtttctgaatgctcaaaatatt

SEQ ID NO: 20773 - DNA, 582 bp, Zea mays
  Clone ID: LIB3151-038-A4.E2.P1-
cgccaccgcggtgtaacaaatgcaacaacaatccttggcacatctaacaatacaaaccatcgcaacgcaacagcaacaacagttcctaccagcactgagccacctagccatggtgaaccctgtcgcctacttgcaacagcagctgcttgcatccaacccacttgctctagcaaacgtagttgcaaaccagcaacaacaacaactgcaacagtttctgccagcgcttagtcaactagccatggtgaaccctgccgcctacctacaacagcaacaactgctttcatctagcccgctcgctgtggccaatgcacctacatacctgcaacaagaattgttgcaacagattgtaccagctctaactcagctagctgtggcaaaccctgttgcctacttgcaacagctgcttccattcaaccaactaactatgtcgaactctgttgcgtacctacaacagcgacaacagttacttaatccattggcagtggctaacccattggtcgctgccttcctacagcagcaacaattgctgccatacaaccggttctctttgatgaatcctgtcttggcgaggcagcaacccat

SEQ ID NO: 20774 - DNA, 532 bp, Zea mays
  Clone ID: LIB3151-038-A4.E3.P1+
agttgttgctgttgtaggtaggcggcagggttcaccatggctagttgactaagcgctggcagaaactgttgcagttgttgttgttgctggtttgcaactacgtttgctagagcaagtgggttggatgcaagcagctgctgttgcaagtaggcgacagggttcaccatggctaggtggctcagtgctggtaggaactgttgttgctgttgcgttgcgatggtttgtattgttagatgtgccaaggattgttgttgcaattgggcaattggttgttgtaagacgctcgccgcaatcgcttgttgtagcctataggcttgcacagctgggtgttcgaaggccattgaagtaactggtgggaggaactgtggaataatggaactaggagcaagtgagcattgtggaataatggacgcatttgttgcgctcgcaaaaagcgcatgaagcgcagggagggataatgtcttggttgccattgttgtttggttgttgctagtgcgcttcgcttggtgtgtttctgtatgctcgcaatttt

SEQ ID NO: 20775 - DNA, 465 bp, Zea mays
  unsure at all n locations
  Clone ID: LIB3151-038-A4.E3.P1-
ccgccaccgcggtgtaaactttcatctagcccgctcgctgtggccaatgcacctacatacctgcaacaagaattgttgcaacagattgtaccagctctaactcagctagctgtggcaaaccctgttgcctacttgcaacagctgcttccattcaaccaactaactatgtcgaactctgttgcgtacctacaacagcgacaacagttacttaatccattggcagtggctaacccattggtcgctgccttcctacagcagcaacaattgctgccatacaaccggttctctttgatgaatcctgtcttgtcgaggcagcaacccatcggtggaggtgccatcttttagattacatatgagatgtactcgatgatggtgccctcataccggcgtgtgtttcctagaaataatcaatgtgttggttgagatttatctcngctcnccnncncccccctacccnntnccctc

SEQ ID NO: 20776 - DNA, 352 bp, Zea mays
  unsure at all n locations
  Clone ID: LIB3151-038-A4.E4.P1+
gtaccagctctaactcagctagctgtggcaaaccctgttgcctacttgcaacagctgcttccattcaaccaactaactatgtcgaactctgttgcgtacctacaacagcgacaacagttacttaatccattggcagtggctaacccattggtcgctgccttcctacagcagcaacaattgctgccatacaaccggttctctttgatgaatcctgtcttgtcgaggcagcaacccatcgttggaggtgccatcttttagattacatatgagatgtactcgataatggtgccctcataccggcatgtgtttcctagaaataatcaatatattggttgagatttatctcgatnna

SEQ ID NO: 20777 - DNA, 594 bp, Zea mays
  Clone ID: LIB3151-038-A4.F3.P1-
ccgccaccgcggtgtaaacatctcatatgtaatctaaagcaggcacctccaacgatgggttgctgcctcgacaagacaggattcatcaaagagaaccggttgtatggcagcaattgttgctgctgtaggaaggcagcgaccaatgggttagccactgccaatggattaagtaactgttgtcgctgttgtaggtacgcaacagagttcgacatagttagttggttgaatggaagcagctgttgcaagtaggcaacagggtttgccacagctagctgagttagagctggtacaatctgttgcaacaattcttgttgcaggtatgtaggtgcattggccacagcgagcgggctagatgaaagcagttgttgctgttgtaggtaggcggcagggttcaccatggctagttgactaagcgctggcagaaactgttgcagttgttgttgttgctggtttgcaactacgtttgctagagcaagtgggttggatgcaagcagctgctgttgcaagtaggcgacagggttcaccatggctaggtggctcagtgctggtaggaactgttgttgctgttgcgttgcgatggtttgtattgttaga

SEQ ID NO: 20778 - DNA, 531 bp, Zea mays
  Clone ID: LIB3151-038-A4.G2.P1-
ccgccaccgccggtgaaatatctagcgcttatactcgatcctttaggtttttttctttcctccctccaccccgaaacaatgacttgacccgtctatttcttttagggtggctaactcatcggtaatcgatgaaaactcaacgcgtcctcatcgccaaaagttaaactagggcgagtggcgcaccggaatagcttccatgcgtgccttgaattgcaccgcattgtatgccactaggccggcggacaaccaacagtcattggtggtcggttgtaccaaacagcaacagcactcaaccttatggcactcctttgattttgatggatcatgcatataactcctttcttccttttagctaccattagtgctagtttaacaattcttactgcgagttaacatttaattaatcaccttccttgtatgggcacctgttgatgctaaccggcaatgaaaccactcactggtattaaattaactacatctaaaaatacatcacactcatgtaaatacaaaccctgcgtgccgcttattctg

SEQ ID NO: 20779 - DNA, 352 bp, Zea mays
  Clone ID: LIB3151-038-A4.G4.P1-
gtcgggataaatcccaaccaattttttgtttttttgtaggaaacacatgccggggtgggggccccattgtcgggtccatctcatatgtaatctaaaagatggcccctccaacgatgggttgctgcctcgacaagacaggattcatcaaaaagaaccggttgtatggcaacaattgttgctgctgtgggaaggcccccaccaatgggttacccactgccaatggattaagtaactgttgtcgctgttgtcggtccccaacagagttcgacataattagttggttgaaaggaagcagttgttgcaagtaagcaacagggtttgccacagcttgctgagttagagctggaacaat

SEQ ID NO: 20780 - DNA, 586 bp, Zea mays
  Clone ID: LIB3151-038-A4.H2.P1+
gaacacccagctgtgcaagcctataggctacaacaagcgattgcggcgagcgtcttacaacaaccaattgcccaattgcaacaacaatccttggcacatctaacaatacaaaccatcgcaacgcaacagcaacaacagttcctaccagcactgagccacctagccatggtgaaccctgtcgcctacttgcaacagcagctgcttgcatccaacccacttgctctagcaaacgtagttgcaaaccagcaacaacaacaactgcaacagtttctgccagcgcttagtcaactagccatggtgaaccctgccgcctacctacaacagcaacaactgctttcatctagcccgctcgctgtggccaatgcacctacatacctgcaacaagaattgttgcaacagattgtaccagctctaactcagctagctgtggcaaaccctgttgcctacttgcaacagctgcttccattcaaccaactaactatgtcgaactctgttgcgtacctacaacagcgacaacagttacttaatccattggcagtggctaacccattggtcgctgccttcctacagcagcaacaattgctgc

SEQ ID NO: 20781 - DNA, 222 bp, Zea mays
  Clone ID: LIB3151-038-A4.H2.P1-
ccgccaccgccggtgaacagttcgaaggccattgaataactggtgggaggaactgtggaataatggaactaggagcaagtgagcattgtggaataatggacgcatttgttgcgctcgcaaaaagcgcaagaagcgcaaggagggataatatcttggtagccattgttgttaggttgttgctagtgcgcttcgcttggtgtgtttctgaatgctcaaaatatt

SEQ ID NO: 20782 - DNA, 449 bp, Zea mays
  Clone ID: LIB3151-038-A4.H4.P1+
ttgctggtttgcaactacgtttgctagagcaagtgggttggatgcaagcagctgctgttgcaagtaggcgacagggttcaccatggctaggtggctcagtgctggtaggaactgttgttgctgttgcgttgcgatggtttgtattgttagatgtgccaaggattgttgttgcaattgggcaattggttgttgtaagacgctcgccgcaatcgcttgttgtagcctataggcttgcacagctgggtgttcgaaggccattgaagtaactggtgggaggaactgtggaataatggaactaggagcaagtgagcattgtggaataatggacgcatttgttgcgctcgcaaaaagcgcaagaagcgcaaggagggataatatcttggtagccattgttgttaggttgttgctagtgcgcttcgcttggtgtgtttctgaatgctcaaaatatt

SEQ ID NO: 20783 - DNA, 581 bp, Zea mays
  unsure at all n locations
  Clone ID: LIB3151-038-A4.H4.P1-
ccgccaccgcggtgaaaacaacaacaacaactgcaacagtttctgccagcgcttagtacactagcctggtgaaccctgccgcctacctacaacagcaacaactgctttcatctagcccgctcgctgtggccaatgcacctacatacctgcaacaagaattgttgcaacagattgtaccagctctaactcagctagctgtggcaaaccctgttgcctacttgcaacagctgcttccattcaaccaactaactatgtcgaactctgttgcgtacctacaacagcgacaacagttacttaatccattggcagtggctaacccattggtcgctgccttcctacagcagcaacaattgctgccatacaaccggttctctttgatgaatcctgtcttgtcgaggcagcaacccatcgttggaggtgccatcttttagattacatatgagatgtactcgataatggtgccctcataccggcatgtgtttcctagaaataatcaatatattggttgagatttatctcngtncacaaaaaaaaaaaaaaaaaaaaaaaaaaaaaaaaaaaaaaaaaagggggggcggccg

SEQ ID NO: 20784 - DNA, 581 bp, Zea mays
  Clone ID: LIB3151-038-A4.F1A
gcatatgagacaacactgagcatcgtctagctatctcgatcgaactggccagttgtgagactccgtcattgggggggtgggggggggagctcacagatagcgttagtaagagaggcaggagggtgaccaaatatagcttcccagcaccctattaggagtcaggatagtgtagagcgaagtgaatacagcctattgttaatcagcccggctgcatatcatatcctacccagtagtaatcacaatgcctgcgagccgactaaggctgctgctgctaccaacctacgcattaagcccggacctatgctgacgccaggaacgaatgcagcgtctgcggcgaccgatctactacagggtcatatacgtacggccggcaagccaactactgcggctaacgagctactagccgggcttatactgactgcacgtacactgccgataagtgctgctactaaggcagcagctaccgagcgaccgctaggatttataatcacaccctgacagcaaactacggctgctgcggcgaccgacctgctacccggtattagcctgacggcatgcactctgcctagaaatgcggctaa

SEQ ID NO: 20785 - DNA, 435 bp, Zea mays
  Clone ID: LIB3151-038-A4.F2A
cagcgtgtggccggcgcccgtacgttgaccgtgtgaagcgcccaaacctgccctagtgccttcgcaacgtttcttgcggctggcgctcggatgcgacccttgctctctaacacatggcgttcccttcgcttgatgccgataaaaccgggacgcgattttggaggaggaggcgctgcgccagctttgggcgcgaccggagccgacggggatccccatcgacaggaggcagggcccgcgacatgcacgagatactgcacgctcatctgactctgagcataccaacgcgtgaacgcctagccgaaatggaacgaaacccaagccttctccgactggtccaaactccgaaaatgggccaacgagctcaaggaggcatccagatagcccgtcggcatcgcgaccagcatgttcttccgacgggggccaacggtgcggaca

SEQ ID NO: 20786 - DNA, 691 bp, Zea mays
  unsure at all n locations
  Clone ID: LIB3151-038-A4.R1A
tgtatgagaccaaactgccgatcttgctaccgattccgttccaaggtttcccgtcatttatctcggtcaggggcactaggtacaaatatattaactcaactgattgactaatcatggaataataagcctgattaacagaggactttgttggctctggtggctttgggggcgcactctaataaagctcggtaggaggttataagctgtatggctgttgacgcttaggagattatacggttgttcattacggatggtaagccctggtcaatattgactgcgctaacttgatacctgataataactctggctcctcactcgtggataataattaaggaattaaggctaataataagttggcctatagtgaattagataaattagtctaatataatactaataatacggttgattactatgcacttaatgacagcgccgcaatttgcgtcttgatggctaatactaccgctggctagttaatttatggctgtgcctaaatcgactgctagattaataataataataaggctaatacgggtgcttactctgtacgtaatgacttagccgcaatttgcttcttgattgataatactaataatgctgggtagtgactttgtgtcngcgcccgaagctattgatagattgctaataataaggctgctaatacaggcgattactgtgcatgtactgactg

SEQ ID NO: 20787 - DNA, 464 bp, Zea mays
  Clone ID: LIB3151-038-A4.R2A
gagcattcagaaacacaccaagcgaagggcactagcagcaacctagcaacaatggctaccaagatattatccctccttgcgcttcttgcgctttttgcgagcagcaacaaatgcgtccattattccacaatgctcacttgctcctagttccattattccacagttcctcccaccagttacttcaatggccttcgaacacccagctgtgcaagcctataggctacaacaagcgattgcggcgagcgtcttacaacaaccaattgcccaattgcaacaacaatccttggcacatctaacaatacaaaccatcgcaacgcaacagcaacaacagtttctaacatcactgagccacctagccatggtgaaccctgtcgtctacttgcaacagcaggtgcttggatccaacccacttgctctaacaaacgtagttgcaaaccaggaacaacaacaactggaacaagttt

SEQ ID NO: 20788 - DNA, 216 bp, Zea mays
  Clone ID: LIB3152-001-Q1-K1-A1
cagaaacacaccaagcgaagcgcactagcaacaacctaacaacaatggctaccaagatattagccctccttgcgcttcttgcccttttagtgagcgcaacaaatgcgttcattattccacagtgctcacttgctcctagtgccattattccacagttcctcccaccagttacttcaatgggcttcgaacatccagccgtgcaagcctacaggctac

SEQ ID NO: 20789 - DNA, 406 bp, Zea mays
  Clone ID: LIB3152-001-Q1-K1-A10
gcaattagctcatcgactccagattggagaactcgacaccatgaaggtgctgatcgttgcccttgctctgctggcgctcgctgcgagcgccgcctccagtacaagcggcggctgtggctgccagacaccaccgtttcatctaccgcctccgttctatatgccgcctccgttctatctgccgccgcagcagcagccgcagccatggcaataccccactcaaccaccgcagctaagcccgtgccagcagttcggatcctgcggcgtcggcagcgtcggcagcccgttcctgggccagtgcgtcgagttcctgaggcaccagtgcagcccggcggcgacgccctacggctcgccacagtgccaggcgctgcagcagcagtgctgccaccagatcaggcaggtggagccg

SEQ ID NO: 20790 - DNA, 303 bp, Zea mays
  Clone ID: LIB3152-001-Q1-K1-A11
agcacaatagtgtaccaacaatggcagccaaaatattttgcctccttatgctccttggtatgtctgcaagtgctgctacggcgaccattttcccgcaatgctcacaagctcctatagcttcccttcttcccccgtacctctcaccagcggtgtcttcggtatgtgaaaacccaattcttcaaccctacaggatccaacaggcaatcgcagctggcatcttacctttatcacccttgttcctccaacaatcatcagccctattacagcagttacctttggtgcatttattggcacaaaacatca

SEQ ID NO: 20791 - DNA, 279 bp, Zea mays
  Clone ID: LIB3152-001-Q1-K1-A12
agtccatcctgcagcagcagccgcaaagcggccaggtcgcggggctgttggcggcgcagatagcgcagcaactgacggcgatgtgcggcctgcagcagccgactccatgcccctacgctgctgccggcggtgtcccccactgaagaaactatgtgctgtagtatagccgctggctagctagctagttgagtcatttagcggcgatgattgagtaataatgtgtcacgcatcaccatgggtggcagtgtcagtgtgagcaatgacctgaatgaacaattg

SEQ ID NO: 20792 - DNA, 290 bp, Zea mays
  Clone ID: LIB3152-001-Q1-K1-A2
agcaatcgcaacaagcaacttacctttatcacccctgttctttcaacaatcgccagccctatctttggtgcagtcattggtacaaaccatcagggcacaacagctgcagcaactcgtgctaccagtgatcagccaagtagctctggcaaacctttctccctactctcagcaacaacaatttcttccattcaaccaactgtctacactgaaccctgctgcttatttgcagcaacaacaactactaccattcagccagctagctactgcctactctcagcagcaacaatttc

SEQ ID NO: 20793 - DNA, 266 bp, Zea mays
  Clone ID: LIB3152-001-Q1-K1-A3
attagctttatctactccagagcgcacaacaacccgatcgacaccatgagggcgttgctcgttgccggcgctctcctggctctcgctgagagcgccacctccacgcatacaagcggcggctgcggctgtcagccaccgccgtcggttcatataccgccgccagtgcatatgtcacctgggtgttagctgccaccttcggtgcatctcccaccgccggtccacctgtcgacgccggtacacctggcaccgacggtccatgtgccggc

SEQ ID NO: 20794 - DNA, 342 bp, Zea mays
  unsure at all n locations
  Clone ID: LIB3152-001-Q1-K1-A4
tagctctttgtgcaagcgccactagtgcgacccatattccagggcacttgccaccagtcatgccattgggtaccatgaacccatgcatgcagtactgcatgatgcaacaggggcttgccagcttgatggcgtgtccgtccctgatgctgcagcaactgttggccttaccgcttcagacgatgccagtgatgatgccacagatgatgacgcctaacatgatgtcaccattgatgatgccgagcatgatgtcaccaatggtcttgccgagcatgatgtcgcaaatgatgatgccacaatgtcactgcgacgccgtctcgcagattatgctgcancagcagttac

SEQ ID NO: 20795 - DNA, 256 bp, Zea mays
  Clone ID: LIB3152-001-Q1-K1-A5
caattagctcatcgactccagattggagaactcgacaccatgaaggtgctgatcgttgccgttgctctcctggcgctcgctgcgagcgccgcctccagtacaagcggcggctgtggctgccagacaccaccgtttcatctaccgcctccgttctatatgccgcctccgttctatctgccgccgcagcagcagccgcagccatggcaataccccactcaaccaccgcagctaagcccgtgccagcagttcggatcct

SEQ ID NO: 20796 - DNA, 435 bp, Zea mays
  Clone ID: LIB3152-001-Q1-K1-A7
cggacgcgtgggtgccacctccggtgcatctcccaccgccggtccacctgccgccgccggtccacctgccaccgccggtccatgtgccgccgcagcaccggtaccaggcgatcttcggcttggtcctccagtccatcctgcagcagcagccgcaaagcggccaggtcgcggggctgttggcggcgcagatagcgcagcaactgacggcgatgtgcggcctgcagcagccgactccatgcccctacgctgctgccggcggtgtcccccactgaagaaactatgtgctgtagtatagccgctggctagctagctagttgagtcatttagcggcgatgattgagtaataatgtgtcacgcatcaccatgggtggcagtgtcagtgtgagcaatgacctgtatgaacaattgggattggaaggaaaaaagttttgttcc

SEQ ID NO: 20797 - DNA, 453 bp, Zea mays
  Clone ID: LIB3152-001-Q1-K1-A8
ctacaggatccaacaggcaatcgcagctggcatcttacctttatcacccttgttcctccaacaatcatcagccctattacagcagttacctttggtgcatttattggcacaaaacatcagggcacaacaactacaacaacttgtgctagcaaaccttgctgcctactctcagcaacagcagtttcttccattcaaccaactagctgcattgaactctgcttcttatttgcaacaacaacaactaccattcagccagctacctgttgcctacccccagcaatttcttccattcaaccaactggcagcattgaactctcctgcttatttacagcagcaacaactactaccattcaaccagctagctggtgtgagccctgctaccttcttgacacaaccacagttgttgccgttctaccagcacgctgcgcctaacgctggcaccctcttacaact

SEQ ID NO: 20798 - DNA, 223 bp, Zea mays
  Clone ID: LIB3152-001-Q1-K1-A9
gagcattcagaaacacaccaagcgaagcgcactagcaacaacctaacaacaatggctaccaagatattatccctccttgcgcttcttgcgctttttgcgagcgcaacaaatgcgtccattattccacaatgctcacttgctcctagttccattattccacagttcctcccaccagttacttcaatggccttcgaacacccagctgtgcaagcctataagctac

SEQ ID NO: 20799 - DNA, 140 bp, Zea mays
  Clone ID: LIB3152-001-Q1-K1-B1
tacctataaccagcggggtattcggtatgtgaaaacccaattcttcaaccctataggatccaacaggcaatcgcagctggcgtgttacctttataacacttgttcctacaacactgataatccctattacagcagttaca

SEQ ID NO: 20800 - DNA, 322 bp, Zea mays
  Clone ID: LIB3152-001-Q1-K1-B10
ggcaaacattgctgctttcttgagacaacaacatttgttgccattttacccacaggttgtgggaaacattaatgccttcttgcaacagcaacaattgctaccattctacccacagaatgtggcaaacattgttgccttcttacaacaacaacaattgttgccatttagccaacatgctttgacgaatcctaccaccttattgcaaccgcccaccattggtggtgccatcttctagattttttatgatttatactgtaataataaagttctcatgctgatatgtgcgacctctcagtaataaagtattagagatctatatttt

SEQ ID NO: 20801 - DNA, 251 bp, Zea mays
  Clone ID: LIB3152-001-Q1-K1-B11
cggacgcgtgggtttgtgttgtacccaataatgaagtcggcatgccatcgcatgcgactcagtgtttaggaataaaacaagctaataatgacttttctctcattataatgtaaaaaaaaaaaaaaaaataaaaaaaaaaaaaaaaaaaaaaaataaaaaaacaaaataaacaaaaaaataaaaaaaaaaaatacaaaaaaaatggaaacaaaacaccattgaaggggcgggccttttaaaaaaaacaaaat

SEQ ID NO: 20802 - DNA, 344 bp, Zea mays
  Clone ID: LIB3152-001-Q1-K1-B12
cgacccacacgtccgcgtacacatttttttttttattacacaacaattcaattctcatcccatcccacacaactcagtgaatatgtataaaacctttttcatactcacacatttctccttatttatcccaaaatataatcaaaacatttttcctttttacaacaacaacatttttttccatttaaccaacattcttttacaaatcctaccactcttattcaaccccccacacatttttctcccatcttttaaattttttatatattaatactttaataaaaaattcctaatccttattttttcataccttttaattataatatttttaaaacatctatattttt

SEQ ID NO: 20803 - DNA, 250 bp, Zea mays
  Clone ID: LIB3152-001-Q1-K1-B2
acgaaccatgctaagcggaatggcggcttctggtgagggcgcgtcgctgccgtctcctgcgggcggcgaggatgctcaccgccgtcgcatcagctatttttactagccgtctatcggaaactactactacgggcaaggctacccaatgaagccccaccgcatcctgatggcgcactcactggcggtccactacggccttcaccgacttctctagctctaacgcccctacccagtctctgaagccgacatt

SEQ ID NO: 20804 - DNA, 322 bp, Zea mays
  Clone ID: LIB3152-001-Q1-K1-B3
cagaaacacaccaagcgaagcgcactagcaacaacctaacaacaatggctaccaagatattagccctccttgcgcttcttgcccttttagtgagcgcaacaaatgcgttcattattccacagtgctcacttgctcctagtgccattattccacagttcctcccaccagttacttcaatgggcttcgaacatccagccgtgcaagcctacaggctacaactagcgcttgcggcgagcgtcttacaacaaccaattgcccaattgcaacaacaatccttggcacatctaaacctacaaaccatcgcaacgcaacagcaacaaca

SEQ ID NO: 20805 - DNA, 277 bp, Zea mays
  Clone ID: LIB3152-001-Q1-K1-B4
acaatgggcttagaacacccagctgtgcactcctatcagctacaacaagcaattgcggcgagcgtgttacaacaaccaatttcccagttgccacaacaatccttggcacatctaacaatacaaaccatcgcaacgcaacagcaacaacaattcctaccagcactgagccacctagccatggtgaaccctgccccctacttgcaacagcagttgcttgcatcaaacccacttgctcttgcaaacgtaattgcaaaccagccacaacaacagctgcaac

SEQ ID NO: 20806 - DNA, 421 bp, Zea mays
  Clone ID: LIB3152-001-Q1-K1-B5
aaagcacaatagtgtaccaacaatggcagccaaaacattttgcctccttatgctccttgggctttctgcaagtgctgctactgcgaccattttcccacaatgctcacaagctcctatggctatcccttctttccccgcacctttcaccagcggcgtctaccgtatgcgaaaacccaattcttcaaccctataggatccaacaggcaatcgcagctggcatcttacctttatcacccttgttcctccaacaatcataagccctattacagcatttacctttgttgcatttattggcacaaaacatcacggcacaacaactacaacaacttgtgctagcaaaccttgctgtctactctcagcaacaacagtttcttccattcaaccaactagctgcattgaacttctgttgttatttgctaca

SEQ ID NO: 20807 - DNA, 343 bp, Zea mays
  Clone ID: LIB3152-001-Q1-K1-B7
cagaaacacaccaagcgaagcgcactagcaacaacctaacaacaatggcttaccaagatattatccctccttgcgcttcttgcgctttttgcgagcgcaacaaatgcgtccattattccacaatgctcacttgctcctagttccattattccacagttcctcccaccagttacttcaatggccttcgaacacccagctgtgcaagcctataggctacaacaagcgattgcggcgagcgtcttacaacaaccaattgcccaattgcaacaacaatccttggcacatctaacaatacaaaccatcgcaacgcaacagcaacaacagttcctaccagcactgagcc

SEQ ID NO: 20808 - DNA, 278 bp, Zea mays
  Clone ID: LIB3152-001-Q1-K1-B8
caatgggcttcgaacacccagctgtgcaagcctatatgctacaacaagcaattgcggcgagcgtcttacaacaaccaattttccagttgcaacaacaattcttggcacatctaacaatacaaaccattgcaacgcaacagcaacaacaatttctaccagcactgagccacctagccatggtgaaccctgccgcctacttgcaacagcagttgcttgcatcaaacccacttgctctggcaaacgtagttgcaaaccagccacaacaacagctgcaacag

SEQ ID NO: 20809 - DNA, 333 bp, Zea mays
  Clone ID: LIB3152-001-Q1-K1-B9
cacaccaagcgaagcgcactagcaacaacctaacaacaatggctaccaagatattagccctgcttgcgcgtcttgcccttttagtgagcgcaacaaatgcgttcattattccacagtgctcacttgctcctagtgccattattccacagttcctcccaccagttacttcaatgggcttcgaacatccagccgtgcaagcctacaggctacaactagcgcttgcggcgagcgtcttacaacaaccaattgcccaattgcaacaacaatccttggcacatctaaacctacaaaccatcgcaacgcaacagcaacaacagtttctgccatcactga

SEQ ID NO: 20810 - DNA, 319 bp, Zea mays
  Clone ID: LIB3152-001-Q1-K1-C1
tcgacggacgcgccacgcgtgcccataaacacaccaagcgaaacgctctatcatcaacctaacaacaatggctaccaggatatgattccttcttgcgcttcttgcgctttttgcgagcgcaacaaatgcgtccattatttcacaatgctcacttgctcctagttccattattccacagttcctcccaccagttactttaatggccttcgaacacccacctgtgcaagcctatatgctacaacaagcgattgcggcgagcgtcttacaacaaccaattgcccaattgcaacaacaatccttggcacatctaacaatacaa

SEQ ID NO: 20811 - DNA, 451 bp, Zea mays
  unsure at all n locations
  Clone ID: LIB3152-001-Q1-K1-C10
ccaactagcaacatagaaagcacaatagtgtaccaacaatggcagccaaaatattttgcttggttatgcggcttggtctttctgcaagtgttgctaccgcaaccattttcccacaatgctcacaagctcctatagcttcccttcttcccccatacctctcaccagcggtgtcttcaatgtgtgaaaacccaattgttcaaccctacaggatccaacaggcaatcgcaacaggcatcttaccattatcacccttgttcctccaacaaccgtcagccctattacagcagttacctttggtccatttggtggcacanaacatcagggcacaacaactacaacaacttgtgctagcaaaccttgctgcatactctcagcaacatcagtttcttccattcaaccaactggctgcattgaactctgctgcttatttgcaacaacaattaccattcag

SEQ ID NO: 20812 - DNA, 293 bp, Zea mays
  Clone ID: LIB3152-001-Q1-K1-C11
cggacgcgtgggcaagcaacatagaaagtggaatccagtagcaacaatagagcaacaatggagaccaagagattttccctccttatgctccttgctctttctacatgtgttgctaacgcgacaattttccctcaatgctcacaagctcctatagcttccctttttcccccataccttccatcaattatagcttcagtatgtgaaaacccagctcttcaaccatatatgcttcaacaagcaatcgcagcaagcaacatacctttatcgcccttgttgtgtcaacaatcgccagc

SEQ ID NO: 20813 - DNA, 421 bp, Zea mays
  Clone ID: LIB3152-001-Q1-K1-C12
catacacatacacacccaacatataacattttctacaatctcaccactatagcaacaattgggaccaatgtattttcccttcttatgctccttgctctttctacatatgttgctaacgcgacaattttccctcaatgctcacaagctcctatagcttccctttttcccccataccttccatcaattatagctttagtatttgaaaacccatctcttcaaccatataggcttcaacaagcaatctcagcaagcaacatacctttatcgcccttgttgttgtaacaatcgccagccctatcttttttgcagtcattggtacaaaccatcatggcacaacatcttcagcaacttctgctacctttgatcaaccaagtaactctggcaaacctttttcctactcttcgcaacaacaattttttca

SEQ ID NO: 20814 - DNA, 432 bp, Zea mays
  Clone ID: LIB3152-001-Q1-K1-C2
cacgcgttcgcaatggacttacaacacacacctgtgcaagctctatacgctacaacaagcaattgctgcgagcgtcttacaacaaccaattttccagttgcaacaacaatccttggcacatctaacaatacaaaccatcgtaacgcatcagcaacaacaattcctaccagcactgagccacctagccatggtgaaccctgccgcctacttgcaacagcagttgcttgcatcatacccacttgctctggcaaacgtagttgcaaaccagccacaacaacagctgcaacagtttctgtcagcgctcagtcaactagccatggtgaaccctgccgcctacctacaacagcaacaactgctttcatctatcccgctcgctgtggccaatgcacctacatacctgcaacaacaattgttgcaacagattgttccagc

SEQ ID NO: 20815 - DNA, 279 bp, Zea mays
  Clone ID: LIB3152-001-Q1-K1-C3
cacaatatttcacactggcgaccaagatacttcccctggttatggtccttgctctttctgcatgtgttgctaacgcgacaatattccctcaatgctcacaagctactatagcttgccttctttctccataccttccatcaatgatagcttcactatgtgaaaacccaactctttaaccctatatgctccaacaagcaatcgcattaagcaacataccttcatcacccttgcttcaacaatcgacagccctatcttttttgcagtcattggtacaaacca

SEQ ID NO: 20816 - DNA, 276 bp, Zea mays
  Clone ID: LIB3152-001-Q1-K1-C4
attgataccaactagcagcatacatagcgtagtacactaacaacatcttaccaccaatggcggccgggatttttgccctacttgccctccttgctctttcagcaagcgctgctaccgcgactattatatgacaatgctcacaacaatacctctctcccgcgacagcccagagattagaataccctactatacaatcctacaggctacaagaggccatcacatgaggcatcttacgggcgctagcattgactgtccaacgaccatatgccctattgc

SEQ ID NO: 20817 - DNA, 293 bp, Zea mays
  Clone ID: LIB3152-001-Q1-K1-C5
aatgttaccagctttcaacatcacacgcacagtagcgcaccaacaacggcctacgaactggggcgctcactaatgcttcctggcctgtgctcatggcgctctacgcgagcgcttctaatgcattgattattcgatactgttgacttgcttcatgctccattcttacaaacatccttgtatcaaatgcttgaaagccctattgacacacacttctgcatgcatctaggcttcaacacgcgcttgttaccatcgtcttacttcatcctacaacaaacgtgcgacatctatcattg

SEQ ID NO: 20818 - DNA, 267 bp, Zea mays
  Clone ID: LIB3152-001-Q1-K1-C6
agaaagcacaatattgtaccaacaatggcagccaaaatattttgcttccttatgctcctgggtctttctgcaagtgttgctaccgtaaccattttcccacaatgctcacaagctcctatagcttcctttcttcccccatacctctcaccagcggcgtcttcaatgtgtgaaaactcaattgtttaaccctacaggatccaacatgcaatctccacaagcctcttaccattatcacccttgttctttcaacaaccttcctccctatta

SEQ ID NO: 20819 - DNA, 457 bp, Zea mays
  unsure at all n locations
  Clone ID: LIB3152-001-Q1-K1-C7
gtggaatccagtagcaacaatagagcaacaatggcgaccaagatattttccctccttatgctccttgctctttctgcatgtgttgctaacgcgacaattttccctcaatgctcacaagctcctatagcttcccttcttcccccataccttccatcaatgatagcttcagtatgtgaaaacccagctcttcaaccctataggctccaacaagcaatcgcagcaagcaacatacctttatcacccttgtttcaacaatcgccagccctatctttggtgcagtcattggtacanaccatcagggcacagcaagccgtgctttcttcttgacacagcaacagttgctgcctttttaccaacagtttgcggctaaccccgcaacccttttacaactacaacaattgttgccctttgtccaacttgctttgacaaacccagcagcctcctaccaacaacacat

SEQ ID NO: 20820 - DNA, 303 bp, Zea mays
  Clone ID: LIB3152-001-Q1-K1-C8
cggacgcgtgggtgagcattcagaaacacaccaagcgaagcgcactagcaacaacctaacaacaatggctaccaagatattatccctccttgcgcttcttgcgctttttgcgagcgcaacaaatgcgttcattattccacaatgctcacttgctcctagttccattattccacagttactcccaccagttacttcaatggccttcgaacacccagctgtgcaagcctataggctacaacaagcgattgcggagagcgtcttacaacaaccaatttgccaattgcaacaacaatccttggcaca

SEQ ID NO: 20821 - DNA, 303 bp, Zea mays
  Clone ID: LIB3152-001-Q1-K1-C9
aatacccaactatacaatcctacatggtacaagaggccatccaagcaagcatcttacggtcattagcatgaaccctccaacaaccatatgctctattgcaacagccatccttagtgcatctgtatctccaaagaatcgcggcacaacaactacaacaacagaagctaccaacaatcaatcaagtagttgcagcgaaccttgctgcttacctccagcaacaacagtttcttccattcaatcaactagatggggtgaaccctgctatctacttgcaggcacaacagctactaccatttaaccaac

SEQ ID NO: 20822 - DNA, 303 bp, Zea mays
  Clone ID: LIB3152-001-Q1-K1-D1
ctagcaacatacatagtgaagtacactagcaacatcttagcaccaatgggagccaagattgttgcgcgtccttgccctccttgctctttcagcaagcgctgctacctcgacttttattccacaatgctcacaacaatacctctctccggcgacagccgcgggatttcaatacccaactatacaatcctacatggtacaagaggccatccaagcaagcatcttacggtcattagcattaaccctccaacaaccatatgctctattgcaacagccatccttagtgcatctgtatctccaaagaat

SEQ ID NO: 20823 - DNA, 417 bp, Zea mays
  Clone ID: LIB3152-001-Q1-K1-D10
gtgcgatttcgatctcgcagccaccttttttttgttctgttgtgtatctagtagttggaggagatatgcagtttgcacttgcattggacacgaactcaggtcctcaccagataagatcttgtgagggtgatgggattgacaggttggaaaaattaagtattgggggcagaaagcaggagaaagctttgagaaataggtgctttggtggtagagttgctgcaactacacaatgtattcttacctcagatgcttgtcctgaaactcttcattctcaaacacagtcctctaggaaaaattatgctgatgcaaaccgtgtatctgctatcattttgggcggaggcactggatctcagctctttcctctgacaagcacaagagctacgcctgctgtacctgttggaggatgttacaggctta

SEQ ID NO: 20824 - DNA, 298 bp, Zea mays
  Clone ID: LIB3152-001-Q1-K1-D11
cctctcgttgtgggtaatgcacctacatacctgcaacaacaattgctgcaacagattgtaccagctctgactcagctagctgtggcaaaccctgctgcctacttgcaacagctgcttccattcaaccaactgactgtgtcgaactctgctgcgtacctacaacagcgacaacagttacttaatccactagcagtgcctaacccattggtcactgccttcctacagcagcaacaattgctaccatacagccagttctctttgatgaaccctgccttgtcgtggcaagcaacccatcgtt

SEQ ID NO: 20825 - DNA, 379 bp, Zea mays
  unsure at all n locations
  Clone ID: LIB3152-001-Q1-K1-D12
cctctctttntatgtaatgcacctacatactttcaacatcaattgctgcaacatatattacgagctctggctcatctatctgtggcaaaccctacttcctacttgcaacagctgcttccattcaaccaactgactgtttctaactctgctgcttacctacaacagctacaacagttacttaatccactatcaattctctaacccatttttcactgccttcctacatcatcaacaattgctaccatacaaccagttctcttttattaaccctgtcttgtcaaatcatcaacccatccattatatgttccatcttttaaattacttattaaatgtaatctattattgtgccctctataccccttgttttttctaaaaataa

SEQ ID NO: 20826 - DNA, 450 bp, Zea mays
  Clone ID: LIB3152-001-Q1-K1-D2
gagaccaactagcaacatagaaagcacaatagtgtaccaacaatggcagccaaaatattttgcttccttatgctccttggtctttctgcaagtgctgctaccgcaaccatttttccacaatgctcacaagctcctatagcttcctttctttccccatacctctcaccagcggtgtcttcagtatgtgaaaacccaattcttcaaccctacaggatccaacaggcaatcgcagcaggcatcttacctttatcacccttgttcctccaacaaccgtcagtcctattacagcagttacctttggtgcatttgttggcacaaaacatcaaggcgcaacaactacaacaacttgtgctaggaaaccttgctgcctactctcagcaacagcagtttcttccattcaaccaactggctgcattgaactctgctgcttatttgcaacaacaactacca

SEQ ID NO: 20827 - DNA, 284 bp, Zea mays
  Clone ID: LIB3152-001-Q1-K1-D3
gtgtccacctactagcatcataagaagaacaatattgtaccaacaatggccgacaaaatatgctgcgttcttatgctccttggtattgcaggaagtgctgctgcagccaccattttaccgtgatgataagaagctattattgcttttcttacttcatcgctcctatcaccagcggcgtcttatgtatgagaaaaaccaattcttcaacactacatgatacaacaggcaatagcaggcagcatactaccattatcatccttgctgctacaacaatcatcagtact

SEQ ID NO: 20828 - DNA, 197 bp, Zea mays
  Clone ID: LIB3152-001-Q1-K1-D4
caacaagcaacatagaaagtggaatccagtagcaacaatagagcaacaatggcgaccaagagattttgcctccttatgctccttgctctttctgcatgtgttgctaacgccacaattttccctcaatgctcacaagctcctataggcttccttttttccccaatactttcataatgatagcttcagatgtggaaaac

SEQ ID NO: 20829 - DNA, 316 bp, Zea mays
  Clone ID: LIB3152-001-Q1-K1-D5
gaccaactagcaacatagaaagcacaatagtgtaccaacaatggcagctaaaatattttgcctccttatgctccttggtctttctgcaagtgctgctacggcgaccattttcccacaatgctcacaagctcctatagcttcccttcttcccccgtacctctcaccaacggtgtcttcggtatgtgaaaacccaattcttcaaccctacaggatccaacaggcaatcgcagctggcatcttacctttatcacccttgttcctccaacaatcatcagccctattacagcagttacctttggtgcatttattggcacaa

SEQ ID NO: 20830 - DNA, 410 bp, Zea mays
  Clone ID: LIB3152-001-Q1-K1-D6
gaccaactagcaacatagaaagcacaatagtgtaccaacaatggcagctaaaatattttgcgctccttatgctccttggtctttctgcacgtgctgctacggcgaccattttcccacaatgctcacaagctcctatagctttccttcttcctccgtacctctcaccaacggtgtcttcggtatgtgaaaacccaattcttcatccctacaggatccaacaggcaatcgcagctggcatcttacctttatcacccttgttcctccaacaatcatcatccctattacagcagttacctttggggcatttattggcacaaaacatgagggcacaacaactacaacaacttgtgctaacaaaccttgctgcctactctcagcaacagcagtttctttcattcaaccaactagct

SEQ ID NO: 20831 - DNA, 258 bp, Zea mays
  Clone ID: LIB3152-001-Q1-K1-D7
gagcattcagaaacacaccaagcgaagcgcactagcaacgacctaacaacaatggctaccaagatattagccctccttgcgcttcttgccctttttgtgagcgcaacaaatgcgttcattattccacaatgctcacttgctcctagtgccattattccacagttcctcccaccagttacttcaatgggcttcgaacacctagctgtgcaagccaacatgcaacaacaagcgcttgcggcgagcgtcttacaacaacca

SEQ ID NO: 20832 - DNA, 455 bp, Zea mays
  Clone ID: LIB3152-001-Q1-K1-D8
ggggtatcaaggtggttaccaagggaacccagtccctgcctaccaaggtggtaacactgggtatcaaggtggcaacccaccaccttcctaccaaggaagcaacccaccacctccttaccagggaggcagcccaccagggccaccacctccctaccgaggaggcagcccaccagggccaccaccttcctaccgaggaggcaaccccaacgtaccgccatattcgggtggtggcaatcctggctaccctggtggcagccctggctaccagggtcaaggaggcaactcgaacttccagtgaacatgaccactagtactaagttggcacccctgtttcagagtagccttctgcaagagatggtgcgccgtaccctagcataaatcgaacccttgttgctatcagattatcatggattgtcgctgattgcacttaatgttctatatatagtactcaaaac

SEQ ID NO: 20833 - DNA, 311 bp, Zea mays
  Clone ID: LIB3152-001-Q1-K1-D9
aagaaatccatcgagaggccgtcgacaggggaattaatggcgtcgtcgtctagcagcagccaccgccgcctcatcctcgcagccgccgtcctgctctccgtgctcgcggctgccagcgccagcgccgggacctcctgcgtgccggggtgggccatcccgcacaacccgctcccgagctgccgctggtacgtgaccagccggacctgcggcatcgggccgcgcctcccgtggccggagctgaagaggagatgctgccgggagctggcggacatcccggcgtactggcggtgcacggcgctgagcatcctcat

SEQ ID NO: 20834 - DNA, 232 bp, Zea mays
  unsure at all n locations
  Clone ID: LIB3152-001-Q1-K1-E1
gacccacacgttcgttgcatttataaacacaccaaccttatctctctatcaactacctaacaacaaagggataccgagatattatacctccttgcacttcttacccactntttgagcgcaacaaatgccttcattattccacaattctcactttctcctattgccattatttcacagttcctcccaccatttacttttatgggctaccaacacctatcttttcatgccaaca

SEQ ID NO: 20835 - DNA, 479 bp, Zea mays
  Clone ID: LIB3152-001-Q1-K1-E10
ccgggccgaccgacgcgtccggcgacatactgtgtggtcctgcagtccttctttcatcatctgccgcatggcgagctctcggggcttattgctgcccttgtagcgcatcaccttacctcaatttgcggcctgcaactgcagcatccaggtccctgcccttgcaacgcagctgccgtcggtgtctactactgaggaaactatgtactgtagtaataatgtaatggagccgctgactagctacctagctcgctagtttactcatttatcgtcgattagtaacgtattttcacccatcaccatttgtggcattgtgagcaattaccttaattaaccatttaaatggaaagtaattatttttaatgaaaaaatattattgtaaacttgtttatttaattaatatatttttttttcattttttaaatttaatctattttattttagtctttaattattttctttatttttaattatattttatt

SEQ ID NO: 20836 - DNA, 239 bp, Zea mays
  Clone ID: LIB3152-001-Q1-K1-E11
gtcagcctagcaattagctcatcgactccagattggagaactcgacaccatgaaggtgctgatcgttgcccttgctctcctggcgctcgctgcgagcgccgcctccagtacaagcggcggctgtggctgccagacaccaccgtttcatctaccgcctccgttctatatgccgcctccgttctatctgccgccgcagcagcagccgcagccatggcaataccccactcaaccaccgcagc

SEQ ID NO: 20837 - DNA, 384 bp, Zea mays
  Clone ID: LIB3152-001-Q1-K1-E12
ggaatccagtagcaacaatagagcaacaatttctaccaagatattttccctccttatgctggttgctctgtctgcatgtgttgctaacgcgacaattttccctcaatgctcacaagctcctatagcttcccttcttcccccataccttccatcaatgatagcttcagtatgtgaaaacccagctcttcaaccctataggctccaacaagcaatcgcagcaagcaacatacctttatcactcttgtttcaacaatcgccagccctatctttggtgcagtcattggtacaaaccatcatggcacagcagctgcagcaactcgtgctacctgtgatcaaccaagtatctctggcaaacctttcttcctactctcagcatcaacaatt

SEQ ID NO: 20838 - DNA, 297 bp, Zea mays
  Clone ID: LIB3152-001-Q1-K1-E2
gttcattattccacagtgctcacttgctcctagtgccattattccacagttcctcccaccagttacttcaatgggcttcgaacatccagccgtgcaagcctacaggctacaactagcgcttgcggcgagcgtcttacaacaaccaattgcccaattgcaacaacaatccttggcacatctaaacctacaaaccatcgcaacgcaacagcaacaacagtttctgccatcactgagccacctagccgtggtgaaccctgtcgcctacttgcaacagcagctacttgcatccaacccact

SEQ ID NO: 20839 - DNA, 269 bp, Zea mays
  Clone ID: LIB3152-001-Q1-K1-E3
gccacgcgtgcggtcagcctagcaattagctcatcgactccagattggagaactcgacaccatgaaggtgctgatcgttgcccttgctctcctggcgctcgctacgagcgcccgctccattacaagctgcggctgcagactgcagacaccaccggttcatctaccgtctgcgtgctatatgccggctccgctctatctgccgccgcagcaacatctcgcactcatgggaataccccactcaaccaccgtagataagtccgtgccagcag

SEQ ID NO: 20840 - DNA, 218 bp, Zea mays
  Clone ID: LIB3152-001-Q1-K1-E4
gagcattcataaacacaccaagcgaagcgctctagcaacgacctatcaacaattgctaccgggatatgagctctacttgcgcttcttgcccttgttgtctagcacatcacatgccttcattattgcacattgcttacttgctcctagagccattattctagaaacgctcctaccccttactgcacgctgctatgtacaccgagctgttgaagcaaaca

SEQ ID NO: 20841 - DNA, 454 bp, Zea mays
  Clone ID: LIB3152-001-Q1-K1-E5
ctctattgcaacagccatccttagtgcatctgtatctccaaagaatcgcggcacaacaactacaacaacagttgctaccaacaatcaatcaagtagttgcagcgaaccttgctgcttacctccagcaacaacagtttcttccattcaatcaactagatggggtgaaccctgctatctacttgcaggcacaacagctactaccatttaaccaacttgtcgggagcccttatgccttcttactggaaccaccagtttttaccatccaatctgcaacctgtggcaacattggctgcttcttggaaccaccacatttggttgcattttacccacaggttgtgggaaacattaatgccttcttgcaacagcaacaattgctaccattctacccacagaatgtggcaaacattgttgccttcttacaacaacaacaattgttgccatttagccaacatgc

SEQ ID NO: 20842 - DNA, 433 bp, Zea mays
  unsure at all n locations
  Clone ID: LIB3152-001-Q1-K1-E6
gagcaacaatggagaccaagatattttccctccttatgctccttgctctttctacatgtgttgctaacgcgacaattttccctcaatgctcacaagctcctatagcttccctttttcccccataccttccatcaattatagcttcagtatgtgaaaacccagctcttcaaccatataggcttcaacaagcaatcgcagcaagcaacatacctttatcgcccttgttgtgtcaacaatcgccagccctatctttggtgcagtcattggtacaaaccatcagggcacaacagctgcagcaactcgtgctacctgtgatcaaccaagtagctctggcaaacctttctccctactctccgcaacaacaatttcttncattcaaccaactgtctacactgaaccctgctgcttatttgcagcaacaactattaccatt

SEQ ID NO: 20843 - DNA, 309 bp, Zea mays
  Clone ID: LIB3152-001-Q1-K1-E7
gcggggcgaagccatccgaactccgaaaagccccccagcggccttccctccgccccgcaggcatggccgccaccggcgtggtcgccgagccgaagaccaagtacgatcgccagctcaggatatggggtgatcaaggccaggctgcactggagaaggctagcatatgcttgcttaactgtggtcctaccggaaccgaagcattgaagaatctcgtgcttggaggcataggaagtgtgactgttgttgatggctccaaagttgaagcatctgacctgggggaacaattttctgttggatgaaggctgtttg

SEQ ID NO: 20844 - DNA, 264 bp, Zea mays
  Clone ID: LIB3152-001-Q1-K1-E8
tccaatccagatcagcaaagcggcagtgcgtagagaggatcgttgaactgaacagcatgaagatggtcatcgttctcgtcgtgtgcctggctctgacagctgccaacgcctctgtaatgcaaatgccctgcccctgcgcgggtctgcagggctagtacggcgctggctcctgtctgacgactatgatgggcgccggccgactgaaaatctactcctagtaggcgtagcaggcgcaactcatgccgatggctgcagagccctact

SEQ ID NO: 20845 - DNA, 387 bp, Zea mays
  unsure at all n locations
  Clone ID: LIB3152-001-Q1-K1-E9
gcgacatacggtgtggtcctgcagtccttcctgcagcagcagccgcagggcgagctcgcggcgctgatggcggcccaggtagcgcagcagctgacggcgatgtgcggcctgcagctgcagcagccaggtccctgcccttgcaacgcagctgccggcggtgtctactactgaggaaactatgtactgtagtaataatgtaatggagccgctgactagctacctagctcgctagtttactcatttagcggcgatgagtaacgtagtgtcacccatcaccatgggtggcagtgtgagcaatgccctgaatgaaccattgaaatggaaaggattattttttagggaaaaaggataatgggaacctgttnnaaaaaaaaaaaaaaaataaat

SEQ ID NO: 20846 - DNA, 213 bp, Zea mays
  Clone ID: LIB3152-001-Q1-K1-F1
gccagcctagcaattaaacccaccgcactcttataggagcaccagccaccctacattcgctgcgcaggcgttatcgccaccctggtgctcgtcgtgcccgaaaccaaacaccaaaacccgctcatgatattgggagaacaaagcctagcatcaaccgaaaaagatagcaaatccctccataacctatgtcctgccggaaccgcaacattggac

SEQ ID NO: 20847 - DNA, 400 bp, Zea mays
  unsure at all n locations
  Clone ID: LIB3152-001-Q1-K1-F10
atcgccgtggtgttcgcgtggaagttcctgcgccccagcagacgtgctcccaagcggccccgacctacggctgcagcggctcccgctgcgactgtgcctgatgcggccgagcctatcggtgactcaggcaaggtagtaacacgggaaattgtggtgaagcgactgaaaggctgcagaaaggttacatgccaacttctcggtgttgtttttgaggagaaaattcctgaggagcttcagaaacatgccaccgttagaccctccgtggtagagctgctactggaaatatccagatattgtgatctctacctaatggagactgtaattgacgataagagcgaggaaaatgctctcatggccctggagacctctggactnttcagaactggtggcctgatgaaag

SEQ ID NO: 20848 - DNA, 336 bp, Zea mays
  Clone ID: LIB3152-001-Q1-K1-F11
gagcattcagaaacacaccaagcgaagctacctagcaacgacttaacaacaatggctaccaagatattagccctccttgcgcttcttgccctttttgtgagcgcaacaaatgcgttcattattccacaatgctcacttgctcctagtgccattataccacagttcctccgaccagttacttcaatgggcttcgaacacctagctgtgcaagcctacaggctacaacaagcgcttgcggcgagcgtcttacaacaaccaattaaccaattgcaacaacaatccttggcacatctaaccatacaaaccatcgcaacacaacagcaacaccagttccta

SEQ ID NO: 20849 - DNA, 304 bp, Zea mays
  unsure at all n locations
  Clone ID: LIB3152-001-Q1-K1-F12
aagcatacataaacacaccaaacaaagcttcttatcaactactcaacaacaatctctaccagtatatttgccatacttgaacttcttncccttccttttaactcaacaaattctttcattattccacaattctcacttactcctaattccattataccacatttccttcaaccacttactttaattttctttttacacctatctgttcaagcctacattctacatcaatctctttcaattaacttttacaacaaccaattaaccatattcaacaacaatttcttttctcatttaaccatacaaa

SEQ ID NO: 20850 - DNA, 350 bp, Zea mays
  unsure at all n locations
  Clone ID: LIB3152-001-Q1-K1-F2
caactagcaacatagaaagcacaatagtgtaccaacaatggcaaccaaaatattttgcttccttatgctccttggtctttctgcaagtgctgctaccgcgaccattttcccgcaatgctcacaagctcctatagcttcccttcttcccccatacctctcaccagcggtgtcttcagtatgtgaaaacccaattcttcaaccctacaggatccaacaggcaatcgcagcaggcatcttacctttatcacccttgttcctccaacaaccgtcagccctattacagcagttacctttggtgcatttgntggcacaaaacatcagggcacaacaactacaacaactngtgctag

SEQ ID NO: 20851 - DNA, 303 bp, Zea mays
  Clone ID: LIB3152-001-Q1-K1-F3
tttcagcattcagaaacacaccaagcgaagcgcactagcaacaacctaacaacaatggctaccaagatattagccctccttgcgcttcttgcccttttagtgagcgcaacaaatgcgttcattattccacagtgctcacttgctcctagtgccattattccacagttcctcccaccagttacttcaatgggcttcgaacatccagccgtgcaagcctacaggctacaactagcgcttgcggcgagcgtcttacaacaaccaattgcccaattgcaacaacaatcctttgcacatctaaaccta

SEQ ID NO: 20852 - DNA, 456 bp, Zea mays
  Clone ID: LIB3152-001-Q1-K1-F5
gcaacatagaaagcacaatagtgtaccaacaatggcagccaaaatattttgcctccttatgctccttggtctttctgcaagtgctgctacggcgaccattttcccgaaatgctcgcaagctcctatagcttcccttcttcccccgtacctctcaccagcggtgtcttcggtatgtgaaaacccaattcttcaaccctacaggatccaacaggcaatcacagctggcatcttacctttatcacccttgttcctccaacaatcatcaaccctattacattaattaccttttgtgcatttattagcacaaaacatcagggcacaacaactacaacaacttgtgctagcaaaccttgctgcctactctcagcaacagcagtttcttccattcaaccaactagctgcattgaactctgcttcttatttgcaacaacaacaactaccattcagccagctacc

SEQ ID NO: 20853 - DNA, 366 bp, Zea mays
  Clone ID: LIB3152-001-Q1-K1-F6
attgagaccaacaagcaacatagaaagtggaatacagtagcaacaatagagcaacaatggcggccaagatattttccatccttatgctccttgctctttctgcatgtgttgctaacgcgaccatatttcctcaatactcacaagctactatagatgcccttcttcccccataccttccatcaatgaccgcttcagtatgtgaaaacacaacccttcaaccctacaggctccaacaagctatcgcaacaagcaacttacctttatcacccctgttctttcaacaatcgtcagccctatctttggggcagtcattgttacacaccatcatggcacaacagctgcagcaactcgtgctaccagtgatca

SEQ ID NO: 20854 - DNA, 454 bp, Zea mays
  Clone ID: LIB3152-001-Q1-K1-F7
ggcaagatggttctccagaacgacattgatctgctcaacccgccggcagaactcgagaagctcaagcacaagaaaaagagactcgtccagtcgcccaactccttcttcatggatgttaagtgccaggggtgcttcagcataaccactgttttcagccactcccagactgttgttgtgtgccctggctgccaaactgtcctctgccaacccacaggaggaaaggcaaggctcactgagggctgttctttccgcaggaagggagactagagcggatgtggtcttcaagttttgctctatgccagatactagcgtcatgaactgcctttagctaaaactttccataagttgttctcgagcagctatgtgttgcatgttggctactttcaaacctatatctggtttggtttggattgtgatgaactaatggctctttgaatttatattatgatgttga

SEQ ID NO: 20855 - DNA, 358 bp, Zea mays
  Clone ID: LIB3152-001-Q1-K1-F8
attttgagcattcagaaacacaccaagcgaagcgcactagcaacgacctaacaacaatggctaccaagatattagccctccttgcgcttcttgccctttttgtgagcgcaacaaatgcgttcattattccacaatgctcacttgctcctagtgccattattccacagttcctcccaccagttacttcaatgggcttcgaacacctagctgtgcaagccaacatgcaacaacaagcgcttgcggcgagcgtcttacaacaaccaattgcccaattgcaacaacaatccttgccacatctaacaatacaagccatcacaacgcaacagcaacaacagttcctaccagcactgagccacct

SEQ ID NO: 20856 - DNA, 342 bp, Zea mays
  Clone ID: LIB3152-001-Q1-K1-F9
gcgcagaagaacccgatcgacaccatgagggtgttgctcgttgccctcgctctcctggctctcgctgcgagcgccacctccacgcatacaagcggcggctgcggctgccagccaccgccgccggttcatctaccgccgccggtgcatctgccacctccggttcacctgccacctccggtgcatctcccaccgccggtccacctgccgccgccggtccacctgccaccgccggtccatgtgccgccgccggttcatctgccgccgccaccatgccactaccctactcaaccgtcccggcctcggcctcatccccagcaacaccaatgcccgggccaacagccg

SEQ ID NO: 20857 - DNA, 274 bp, Zea mays
  unsure at all n locations
  Clone ID: LIB3152-001-Q1-K1-G1
agcttaatccatctgcccataataatttgagcgattgcaaaatacacacacaagggaagatgtcactagcagactgggctaaccaacaatggcgtaccatagactattagccgctcccttggcgctcactttctcctttcaagtgaggcgcaacaacgtgcanttcatttatttcacacatgcgtcacgttgtctcctaatggccattatgttcacacgtgtcctgccatcaagttacaatcgaatggtgcatcgaaacaccactattggtgca

SEQ ID NO: 20858 - DNA, 430 bp, Zea mays
  Clone ID: LIB3152-001-Q1-K1-G10
tttcagcatgcttcttatggataatggctgtaggcaccatagtctgtgcttcactctggagtgaatttggtacatgtgaacaggttgatgagcgttataatcagctgaccagaaaggatggacctgacacgggaataaactacagagaagataaagaggtcttcgagatcagcgcgaagggtgcttttatttttattatagtagcttcagttttcctcctccttctgttctacttcatgtcatcttggttcgtttgggtgctaattgtactattctgcattggtggtattgagggtatgcatgcttgcttggtcacgcttctagctaggatttttaaggactgtggacaaaagactgtacaactccctgttttgggggaggtcttgatcttatctgttggaattgtaccattttgtgcggtgtttgcaat

SEQ ID NO: 20859 - DNA, 345 bp, Zea mays
  Clone ID: LIB3152-001-Q1-K1-G11
agcattcagaaacacaccaagcgaagcgcactagcaacaacctaacaacaatggctaccaagatattatgcctccttgcgcttcttgcgctttttgcgagcgcaacaaatgcgtccattattccacaatgctcacttgctcctagttccattattccacagttcctcccaccagttacttcaatggccttcgaacacccagctgtgcaagcctataggctacaacaagcgattgcggcgagcgtcttacaacaaccaattgcccaattgcaacaacaatccttggcacatctaacaatacaaaccatcgcaacgcaacagcaacaacagttcctaccagcactga

SEQ ID NO: 20860 - DNA, 449 bp, Zea mays
  Clone ID: LIB3152-001-Q1-K1-G12
cggacgcgtgggatcgcccataatattttgagcattcaaaaacacacaaagggaagtgcagtagcaacggcctaacaacaatggctaccaagatattagccctccttgcgctcctttccctttcagtgagcgcaacaactgcattcattattccacaatgctcacttgctcctaatgccattattccacagttcctcccatcagttacatcaatgggcatcgaacaccctattgtgcaagcctataggctacaacaagcgcttgcggcgagcgtcttacaacaaccgtttgcccaattacaacaacaatccttggcacatctaaccatacaaaccatcgcaacacaactagagcaacagtttgtgcccgcattgagccaactagccgcagtgaaccctgtctcctacttgcaacagcaactgcttgcatccaacccacttgctctggcg

SEQ ID NO: 20861 - DNA, 320 bp, Zea mays
  Clone ID: LIB3152-001-Q1-K1-G2
caaatgttgttgtctcaagaaagcagcaatgtttgttgccattttacccacaggttgtgggaaacattaatgccttcttgcaacagcaacaattgctaccattctacccacagaatgtggcaaacattgttgccttcttacaacaacaacaattgttgccatttagccaacatgctttgacgaatcctaccaccttattgcaaccgcccaccattggtggtgccatcttctagattttttatgatttatactgtaataataaagttctcatgctgatatgtgcgacctctcagtaataaagtattagagatctatatttt

SEQ ID NO: 20862 - DNA, 280 bp, Zea mays
  Clone ID: LIB3152-001-Q1-K1-G3
cagcaaagcggcagtgcgtagagaggatcgtcgaacagaacagcatgaagatggtcatcggtctcgtcgtgtgcctggctctgtcagctgccagcgcctctgcaatgcagatgccctgcccctgcgcggtgctgcatggctagtacggcgctggcgccggcctgacgacgatgatgggcgccggcgggctggacccctacacagagtacctgaggcagccgcagtgcagaccgctggcggcggcgccctactacgccgggtgtgggcagacgagcgccat

SEQ ID NO: 20863 - DNA, 283 bp, Zea mays
  Clone ID: LIB3152-001-Q1-K1-G4
gtggaatccagtagcaacaatagagcaacaatggcgaccaagatattttccctccttatgctccttgctctttctgcatgtgttgctaacgcgacaatttttcctcaatgctcacaagctcctatagcttcccttcttcccccataccttccatcaatgatagcttcagtatgtgaaaacccagctcttcaaccctataggctccaacaagcaatcgcagcaagcaacatacctttatcacccttgtttcaacaatcgccagccctatctttggtgcagtcat

SEQ ID NO: 20864 - DNA, 280 bp, Zea mays
  Clone ID: LIB3152-001-Q1-K1-G5
cggcttttgctccgacgccggcgagcgagaccgagaggcgaggcgagccaccgcggcggcggttgcagcgatggggtccatgacgatcggtgccaagtacaagaccacgatcaaggaccccggcaccccgggcatcctccgcatgaacggtgataggttcaccttcacccctaatgatccacgatcggcaatgaagttcaatgttgatttccgaaccatcaaaggtcacaagttcaataaagtagagggtaacaaaagcagcataattgaacctttcaaa

SEQ ID NO: 20865 - DNA, 456 bp, Zea mays
  Clone ID: LIB3152-001-Q1-K1-G6
ctgggtcttcagaccattagctttatctactccagagcgcagaagaacccgatcgacaccatgagggtgttgctcgttgccctcgctctcctggctctcgctgcgagcgccacctccacgcatacaagcggcggctgcggctgccagccaccgccgccggttcatctaccgccgccggtgcatctgccacctccggttcacctgccacctccggtgcatctcccaccgccggtccacctgccgccgccggtccacctgccaccgccggtccatgtgccgccgccggttcatctgccgccgccaccatgccactaccctactcaaccgccccggcctcagcctcatccccagccacacccatgcccgtgccaacagccgcatccaagcccgtgccagctgcagggaacctgcggcgttggcagcaccccgatcctgggccagtgcgtcgagttcctg

SEQ ID NO: 20866 - DNA, 309 bp, Zea mays
  Clone ID: LIB3152-001-Q1-K1-G7
tgagcattcagaaacacaccaagcgaagcgcactagcaacgacctaacaacaatggctacgaagatattagccctccttgcgcttcttgccctttttgtgagcgcaacaaatgcgttcattattccacaatgctcacttgctcctagtgccattattccacagttcctcccaccagttacttcaatgggcttcgaacacctagctgtgcaagccaacatgcaacaacaagcgcttgcggcgagcgtcttacaacaaccaattgcccaattgcaacaacaatccttgccacattttaaaaattacaagcc

SEQ ID NO: 20867 - DNA, 309 bp, Zea mays
  Clone ID: LIB3152-001-Q1-K1-G8
cagcattcagaaacacaccaagcgaagcgcactagcaacaacctaacaacaatggctaccgagatattagccctccttgcgcttcttgcccttttagtgagcgcaacaaatgcgttcattattccacagtgctcacttgctcctagtgccattattccacagtttcttccaccagttacttcaatgggcttcgaacatccagccgtgcaagcctacaggctacaactagcgcttgcggcgagcgtcttacaacaaccaattgcccaatttgcacaacaatccttggcacatctaaacctaccaaccatc

SEQ ID NO: 20868 - DNA, 363 bp, Zea mays
  Clone ID: LIB3152-001-Q1-K1-G9
attttgagcattcagaaacacaccaagcgaagctacctagcaacgacttaacaacaatggctaccaagatattagccctccttgcgcttcttgccctttttgtgagcgcaacaaatgcgttcattattccacaatgctcacttgctcctagtgccattataccacagttcctccgaccagttacttcaatgggcttcgaacacctagctgtgcaagcctacaggctacaacaagcgcttgcggcgagcgtcttacaacaaccaattaaccaattgcaacaacaatccttggcacatctaaccatacaaaccatcgcaacacaacagcaacaacagttcctaccagcactgagccaactagatg

SEQ ID NO: 20869 - DNA, 321 bp, Zea mays
  Clone ID: LIB3152-001-Q1-K1-H1
cgcaaattgcaccaagaaatccatcgagaggccgtcgacaggggaattaatggcgtcgtcggctagcagcagccaccgccgcctcatcctcgcagccgccgtcctgctctccgtgctcgcggctgccagcgccagcgccgggacctcctgcgtgccggggtgggccatcccgcacaacccgctcccgagctgccgctggtacgtgaccagccggacctgcggcatcgggccgcgcctcccgtggccggagctgaagaggagatgctgccgggagctggcggacatcccggcgtactgccggtgcacggggctgagcatcct

SEQ ID NO: 20870 - DNA, 336 bp, Zea mays
  Clone ID: LIB3152-001-Q1-K1-H10
agcacatataaaccccactagcgtaccacctttgccacacaaaatctacaacctccatatggtcattgtgctttcttcaactgcttctacttcaaccattttccccaaatgctcccatgctcctataacttcccttcttcccccgtacctcttaccaacagtgtcttccatatgttaaaacccaattcttcaaccctacatgatccaacacgcaatcacagctggcatcttacctttatcacccttgttcctccaacaatcatcatccctattacattacttacctttgttgcattaattgacacaaaacatcatgtcacatcaactacaacaact

SEQ ID NO: 20871 - DNA, 375 bp, Zea mays
  Clone ID: LIB3152-001-Q1-K1-H11
attttgagcattcagaaacacaccaagcgaagctacctagcaacgacttaacaacaatggctaccaagagattagccctccttgcgcttcttgccctttttgtgagcgcaacaaatgcgttcattattccacaatgctcacttgctcctagtgccattataccacagttcctccgaccagttacttcaatgggcttcgaacacctagctgtgcaagcctacaggctacaacaagcgcttgcggcgagcgtcttacaacaaccaattaaccaattgcaacaacaatccttggcacatctaaccatacaaaccatcgcaacacaacagcaacaacagttcctaccagcactgagccaactagatgtggtgaaccctg

SEQ ID NO: 20872 - DNA, 453 bp, Zea mays
  Clone ID: LIB3152-001-Q1-K1-H12
gcgaagcgcactagcaacaacctaacaacaatggctaccaagatattagccctccttgcgcgtcttgccgttttagtgagcgcaacaaatgcgttcattattccacagtgctcacttgctcctagtgccattattccacagttcctcccaccagttacttcaatgggcttcgaacatccagccgtgcaagcctacaggctacaactagcgcttgcggcgagcgtcttacaacaaccaattgcccaattgcaacaacaatccttggcacatctaaacctacaaaccatcgcaacgcaacagcaacaacagtttctgccatcactgagccacctagccgtggtgaaccctgtcgcctacttgcaacagcagctacttgcatccaacccacttgctctggcgaacgtagctgcataccagcaacaacaacgtctgcaacagtttatgccagcgctc

SEQ ID NO: 20873 - DNA, 139 bp, Zea mays
  Clone ID: LIB3152-001-Q1-K1-H2
gaatcctaccaccttattgcaaccgcccaccattggtggtgccatcttctagattttttatgatatagactgtaataataaagttatcatgctgatatgtgcgacctctcagtaataaagtattagagatctatatttt

SEQ ID NO: 20874 - DNA, 328 bp, Zea mays
  unsure at all n locations
  Clone ID: LIB3152-001-Q1-K1-H3
taatattttgagcattcagaaacacaccaagcgaagcgcactagcaacgacctaacaacaatggctagcaagatattagccctccttgcgcttcttgccctttttgtgagcgcaacacatgcgttcattattccacaatgctcacttgctcctagtgccattattccacagttcctcccaccagttacttcaatgggcttcgaacacctagctgtgcaagccaacatgcaacaacaagcgcttgcggcgagcgtctacaacaaccaattgcccaattgcaacaacaatncttgccacatctaacaatacaagccatcacaacgcaaca

SEQ ID NO: 20875 - DNA, 295 bp, Zea mays
  unsure at all n locations
  Clone ID: LIB3152-001-Q1-K1-H4
ctagatcgcgagcgtccgccctttttttttttttttttttttcatttttttttttttatgggatttttgcagtcaacatttcttttttttcctttttttttttactctctccttncaaaaagttaaacaatcattccctcaaaccataaaaaacccacccccgttttatcggaccctccctttcaaaaaccaacaaactaggtaatcctttctccctcctttaacatacaaccatttctttccccctaacaaaaaaaaaaacttcttccttatgcttacttacaacaaaacctat

SEQ ID NO: 20876 - DNA, 454 bp, Zea mays
  Clone ID: LIB3152-001-Q1-K1-H5
aagcaacatagaaagtggaatccagtagcaacaatagagcaacaatggcgaccaagatatgttccctccttatgctccttgctctttctgcatgtgttgctaacgcgacaattttccctcaatgctcacaagctcctatagcttcccttcttcccccataccttccatcaatgatagcttcagtatgtgaaaacccagctcttcaaccctataggctccaacaagcaatcgcagcaagcaacatacctttatcacccttgtttcaacaatcgccagccctatctttggtgcagtcattgggaccaaacaattaggcgccagaacttgaacaacttgtgcttcccgtgatcaacccagtagctctggcaaacctttcttcctactcttagcaacaacaatttctttcattcaaccaactgtctacattgaaccgtgctgcttatttgcagcaaca

SEQ ID NO: 20877 - DNA, 273 bp, Zea mays
  Clone ID: LIB3152-001-Q1-K1-H6
cccacgcgtccggggaagctataggagcttgtgagcattgaggcttcaacaagcaatcggagcaagcaacatacctttatcgcccttgttgtgtcaacaatcgccagccctatctttggtgcagtcattggtacaaaccatcaaggcacaacagctgcagcaactcgtgctacctgtgatcaaacaagtaactcttgcaaaactttcttcctacttttcggaacaaccatttctttcatttaaaccaattgtttaacttaaaccttgttgtta

SEQ ID NO: 20878 - DNA, 327 bp, Zea mays
  Clone ID: LIB3152-001-Q1-K1-H7
attttgagcattcagaaacacaccaagcgaagcgcactagcaacaacctaacaacaatggctaccaagatattatccctccttgcgcttcttgcgctttttgcgagcgcaacaaatgcgtccattattccacaatgctcacttgctcctagttccattattccacagttcctcccaccagttacttcaatggccttcgaacacccagctgtgcaagcctataggctacaacaagcgattgcggcgagcgtcttacaacaaccaattgcccaattgcaacaacaatccttggcacatctaacaatacaaaccatcgcaacgcaacagc

SEQ ID NO: 20879 - DNA, 413 bp, Zea mays
  Clone ID: LIB3152-001-Q1-K1-H9
gcaacatagaaagcacaatagtgtaccaacaatggcagccaaaatattttgcctccttatgctccttgggctttctgcaagtgctgctacggcgaccattttcccgaaatgctcgcaagctcctatagcttcccttcttcccccgtacctctcaccagcggtgtcttcggtatgtgaaaacccaattcttcaaccctacaggatccaacaggcaatcacagctggcatcttacctttatcacccttgttcctccaacaatcatcagccctattacatcagttacctttggtgcatttattggcacaaaacatcagggcacaacaactacaacaacttgtgctagcaaaccttgctgcctactctcagcaacagcagtttcttccattcaaccaactagctgcattgaactttg

SEQ ID NO: 20880 - DNA, 431 bp, Zea mays
  Clone ID: LIB3152-002-Q1-K1-A1
gctacctcgacttttattccacaatgctcacaacaatacctctctccggcgacagccgtgggatttcaatacccaactatacaatcctacatggtacaagaggccatccaagcaagcatcttacggtcattagcattaaccctccaacaaccatatgctctattgcaacagccatccttagtgcatctgtatctccaaagaatcgcggcacaacaactacaacaacttgtgctagcaaaccttgctgcctactctcagcaacagcagtttcttccattcaaccaactagctgcattgaactctgcttcttatttgcaacaacaacaactaccattcagccagctacctgctgcctacccccagcaatttctttcattcaaccaactggcagcattgaactctcctgcttatttacagcagcaacaactact

SEQ ID NO: 20881 - DNA, 351 bp, Zea mays
  Clone ID: LIB3152-002-Q1-K1-A10
attttcagcattcagaaacacaccaagcgaagcgcactagcaacaacctaacagcaatgggtaccaagatattagccctccttgcgcttcttgcccttttagtgagcgcaacaaatgcgttcattattccacagtgctcacttgctcctagtgccattattccacagttcctcccaccagttacttcaatgggcttcgaacatccagccgtgcaagcctacaggctacaactagcgcttgcggcgagcgtcttacaacaaccaattgcccaattgcaacaacaatccttggcacatctaaacctacaaaccatcgcaacgcaacagcaacaacagtttctgccatcactga

SEQ ID NO: 20882 - DNA, 341 bp, Zea mays
  Clone ID: LIB3152-002-Q1-K1-A11
ctcatatgtatttgcactcatgcatcacaaaacatccttctatcagtaccatcgatcatgagttcatcttagtagtataggcaccaaatcaaatctgcaacatcaattatctaactccaaaaaccatgaagctggtgcttgtggttcttgctttcattgctttagtatcaagtgtttcttgtacacagacaggcggctgcagctgtggtcaacaacaaagccatgagcagcaacatcatccacaacaacatcatccacaaaaacaacaacatcaaccaccaacacaacatcaccagcagcagcaacaccaacaacaacaagttcacatgcaaccacaaaaa

SEQ ID NO: 20883 - DNA, 376 bp, Zea mays
  Clone ID: LIB3152-002-Q1-K1-A12
gcgagaataaggctgctgcactagctcgggccatcgatcttgcagagtcagctgttgtagacaaagaatagtgtgctatggttatcgtttagttcttgttcatgtttcttttacccactttccgttaaaaaaagatgtcattagtgggtggagaaaagcaataagactgttctctagagaaccgaagaaatatggaaattgaggttatggcttatgactgtcgtttgttcagtatgaaactagatttccaactgtgccttagaagtttgcaaatgtcttgttatataagggccggctcagtagactagtcatgtcttttaatacaactcatgtggtcctctttgtgcatattatattgcataggtatatggtagtg

SEQ ID NO: 20884 - DNA, 286 bp, Zea mays
  unsure at all n locations
  Clone ID: LIB3152-002-Q1-K1-A2
cccacgcgtccgggtcttcagaccattagctttatctactccagagcgcagaagaacccgatcgacaccatgagggtgttgctcgttgccctcgctctcctggctctcgctgcgagcgccacctccacgcatacaagcggcggctgcggctgccagccaccgccgccggttcatctaccgccgccggtgcatctgccacctccggttcacctgccacctccggtgcatctcccaccgccggtccacctgccgccgccggtccacctgccaccgncggtccatgtgc

SEQ ID NO: 20885 - DNA, 386 bp, Zea mays
  Clone ID: LIB3152-002-Q1-K1-A3
ggctaacatggcaaacaaacatggggacggctgacatcaaagtaacatttggaaatggaagcaagcatgaattgaacgtatcaacataccagatgtgtgttctcatgctgtttaactcagcagatgtcttgacttaccgtgaaattgagcagtctacagcaataccagccgctgacctgaagcgatgcctccagtcactagctcttgtgaagggtaagcaagtcctgcggaaagagccgatgagcagggacattgccgatgatgacaacttctgcgtgaacgacaagttcaccagcaagctcttcaaggtgaagatcggcaccgtggtggcgcagaaggagaccgaccccgagaagctagagacgcggcagcgggtggaggaggac

SEQ ID NO: 20886 - DNA, 363 bp, Zea mays; identical to SEQ ID NO: 17783
  Clone ID: LIB3152-002-Q1-K1-A4

SEQ ID NO: 20887 - DNA, 82 bp, Zea mays
  Clone ID: LIB3152-002-Q1-K1-A5
cagctagaccctacgcctacactcttccaacaatcctcctaaccctactcctgctggacgcttttctctgcgccgggctcat

SEQ ID NO: 20888 - DNA, 400 bp, Zea mays
  Clone ID: LIB3152-002-Q1-K1-A6
gcagcccgacggcgacgccctactgctcgcctcagtgccagtcgttgcggcagcagtgttgccagcagctcaggcaggtggagccgcagcaccggtaccaggcgatcttcggcttggtcctccagtccatcctgcagcagcagccgcaaagcggccaggtcgcggggctgttggcggcgcagatagcgcagcaactgacggcgatgtgcggcctgcagcagccgactccatgcccctacgctgctgccggcggtgtcccccactgaagaaactatgtgctgtagtatagccgctggctagctagctagttgagtcatttagcggcgatgattgagtaataatgtgtcacgcatcaccatgggtggcagtgtcagtgtgagcaatgacctgaatgaacaat

SEQ ID NO: 20889 - DNA, 429 bp, Zea mays
  Clone ID: LIB3152-002-Q1-K1-A7
cttcagaccattagctttatctactccagagcgcagaagaacccgatcgacaccatgagggtgttgctcgttgccctcgctctcctggctctcgctgcgagcgccacctccacgcatacaagcggcggctgcggctgccagccaccgccgccggttcatctaccgccgccggtgcatctgccacctccggttcacctgccacctccggtgcatctcccaccgccggtccacctgccgccgccggtccacctgccaccgccggtccatgtgccgccgccggttcatctgccgccgccaccatgccactaccctactcaaccgccccggcctcagcctcatccccagccacacccatgcccgtgccaacagccgcatccaagcccgtgccagctgcagggaacctgcggcgttggcagcaccccgatcctg

SEQ ID NO: 20890 - DNA, 53 bp, Zea mays
  Clone ID: LIB3152-002-Q1-K1-A8
caaattgtagccggttaatattcttttatagttgtagtgtttatggatgcttt

SEQ ID NO: 20891 - DNA, 431 bp, Zea mays
  Clone ID: LIB3152-002-Q1-K1-A9
attttgagcattcagaaacacaccaagcgaagcacattagcaacaacctaacagcaatgggtaccaagatattatccctccttgcgcttcttgcgctttttgcgagcgcaacaaatgcgttcattattccacaatgctcacttgctccaagttccattattacacagttcctcccaccagttacttcaatgggcttcgaacacccagctgtgcaagcctataggctacaacaagcaattgcggcgagcgtcttacaacaaccaatttcccagttgcaacaacaatccttggcacatgtaacaatacaaaccatcgcaacgcaacagcaacaacaattcctaccagcactgagccacctagccatggtgaaccctgccgcctacttgcaacagcagttgcttgcatcaaacccacttgctctggcaaacgta

SEQ ID NO: 20892 - DNA, 431 bp, Zea mays
  unsure at all n locations
  Clone ID: LIB3152-002-Q1-K1-B1
cttgttcctccaactgtctacactgaaccctgctgcttatttgcagcaacaacaactagtaccattcagccagctagctactgcctactctcagcagcaacaatttcttccatttaaccaattcgccgcactgaacccctctgcttatttccagcagcaaatactactaccatttggccagctagctacaacaagccccgcttccttcttgacacaacaacaattgcttccgttctaccagcagtttgtggctaaccccgcaacccttttacaactgcaacagttgctgccctttgtccaacttgctttgacaaacccagcagccttctaccaacaacacatcattggcggtgccctcttttagattgcttattagttgtcattcaataatgaagttntttggctgatgtatgtggcctcctagaaataag

SEQ ID NO: 20893 - DNA, 284 bp, Zea mays
  Clone ID: LIB3152-002-Q1-K1-B10
attttgagcattcagaaacacaccaagcgaagcgcactagcaacgacctaacaacaatggctaccaagatattagccctccttgcgcttcttgccctttttgtgagcgcaacaaatgcgttcattattccacaatgctcacttgctcctagtgccattattccacagttcctcccaccagttacttcaatgggcttcgaacacctagctgtgcaagccaacatgcaacaacaagcgcttgcggcgagcgtcttacaacaaccaattgcccaattgcaacaacaa

SEQ ID NO: 20894 - DNA, 337 bp, Zea mays
  Clone ID: LIB3152-002-Q1-K1-B11
attctgaccatcatgaaatagcaccatgcgaaccgcaactagaacgtcttaagaggcaaagggtaccaataaatcacctctccttgcccttctagccctttttttgatcgcaacaaatgcgttcattattccacaatgctcacttgctcctagtgccattattccacagttcctccaaacagttacttcaatgggcttggaacacctacctgtgcaagccaacatgcaacaacaagcacttgcgacgagcgtcttacaacaaccaattgcccaattgcaacaacaatccttgccacatctaacaatacaaaccattacaacgcaacatcaacaacag

SEQ ID NO: 20895 - DNA, 313 bp, Zea mays
  Clone ID: LIB3152-002-Q1-K1-B12
caacaaatgcgttcattattccacagtgctcacttgctcctagtgccattattcgcacagggcctcccaccagttacttcaatgggcttcgaacatccagccgtgcaagcctacaggctacaactagcgcttgcggcgagcgtcttacaacaaccaattgcccaattgcaacaacaatccttggcacatctaaacctacaaaccatcgcaacgcaacagcaacaacagtttctgccatcactgagccacctagccgtggtgaaccctgtcgcctacttgcaacagcagctacttgcatccaacccacttgctc

SEQ ID NO: 20896 - DNA, 274 bp, Zea mays
  Clone ID: LIB3152-002-Q1-K1-B2
aaagacctggatgcactaaatcctgttctggaacagttacggtcctggaattgatcccatgctgccgaacgggccctaagttggaacctgttcaggcggggggtcagctcgcagctgactggggatccggcatcgcatcgccagacgccaggaggggactatcagccatggcagcgaggcagccgccgacttcgtccgcgtccgcgcccgcgcccgcggcgggtctctccatgaaagactacctcaagaggtacatgtcgggcccaaggaccga

SEQ ID NO: 20897 - DNA, 437 bp, Zea mays
  Clone ID: LIB3152-002-Q1-K1-B3
aagtggaatccagtagcaacaatagagcaacaatggcgaccaagatattttccctccttatgctccttgctctttctgcatgtgttgctaacgcgacaattttccctcaatgctcacaagctcctatagcttcccttcttcccccataccttccatcaatgatagcttcagtatgtgaaaacccagctcttcaaccctataggctccaacaagcaatcgcagcaagcaacatacctttatcacccttgtttcaacaatcgccagccctatctttggtgcagtcattggtacaaaccatcagggcacagcagctgcagcaactcgtgctacctgtgatcaaccaagtagctctggcaaacctttctccctactctcagcaacaacaatttcttccattcaaccaactgtctacattgaaccgtgctgcttatttgcag

SEQ ID NO: 20898 - DNA, 437 bp, Zea mays
  Clone ID: LIB3152-002-Q1-K1-B4
cgacacgctcgccggcgtcgccatcaagtacggcgtcgaggtggcggacgtgaagcgcgccaacggcctcaccatcgacctgcagatgttcgcgcacaagacgctgcgggtcccgctccacggcaggcacgcgccgccgtctcctccctcctcgtccccaagccacgccgccagagaatggactaaaaatgctgcttccctggacccgctccttaaccttaaaccaccacggagcacagtttcgccatccatgagccttctactacaggggtgccatggcctgacgccggctccaaagggggacctgaacctgaccgatgaatgcgctcaaggccatcacaggaaagccggaagcttatcgagcacctttgtgccgaggagaagccggcaagggctggccctgaggccaaagtctggcggtcgggcagacacgaacg

SEQ ID NO: 20899 - DNA, 409 bp, Zea mays
  Clone ID: LIB3152-002-Q1-K1-B5
gcccgtgagaccatggacgcgagcgcggccaccgccaggcgcaagcgcaagcgccccgacgccgacaacaccggcgacgccaccgccgccgccgccgccgccccggccgccgtcgacgaggcctccgacgccgaggtcgaggagttctacgccatcctgcggcgcatccgcgacgcctcccgccggctgtgcggcgccggcgcccggcccgccccgcgggcgccggcgtggcggcccagcttctcctgggaggacttcgcgaccccggcccctggcgcgccggcgcctgagaccccgacgcccggcgccgcgcaggagccggcgcagccgcggcccgacgagcctgtagccgtcgtccgcgctaccgccccgtcgccgcgtgccgggctggacctgaacgcggagccgg

SEQ ID NO: 20900 - DNA, 440 bp, Zea mays
  unsure at all n locations
  Clone ID: LIB3152-002-Q1-K1-B6
tagcaacatagaaagcacaatagtgtaccaacaatggcagccaaaatattttgctgccttatgctccttggtctttctgcaagtgttgctaccgcaaccattttcccacaatgctcacaagctcctatagcttcccttcttcccccatacctctcaccagcggtgtcttcaatgtgtgaaaacccaattgttcaaccctacaggatccaacaggcaatcgcaacaggcatcttaccattatcacccttgttcctccaacaaccgtcagccctattacagcagttacctttggtccatttggtggcacaaaacatcagggcacaacaactacaacaacttgtgctagcaaaccttgctgcatactctcagcaacatcagtttcttccattcaaccaactagcagcattgaactctgctgcttatttacagcagncacaact

SEQ ID NO: 20901 - DNA, 435 bp, Zea mays
  Clone ID: LIB3152-002-Q1-K1-B7
attttcagcattcagaaacacaccaagcgaagcgcactagcaacaacctaacaacaatggctaccaagatattagccctccttgcgcttcttgcccttttagtgagcgcaacaaatgcgttcattattccacagtgctcacttgctcctagtgccattattccacagttcctcccaccagttacttcaatgggcttcgaacatccagccgtgcaagcctacaggctacaactagcgcttgcggcgagcgtcttacaacaaccaattgcccaattgcaacaacaatccttggcacatctaaacctacaaaccatcgcaacgcaacagcaacaacagtttctgccatcactgagccacctagccgtggtgaaccctgtcgcctacttgcaacagcagctacttgcatccaacccacttgctctggcgaacgtagctg

SEQ ID NO: 20902 - DNA, 444 bp, Zea mays
  Clone ID: LIB3152-002-Q1-K1-B8
agaaagtggaatccagtagcaacaatagagcaacaatggcgaccaagatattttcggtccttatgctccttgctctttctgcatgtgttgctaacgcgacaattttccctcaatgctcacaagctcctatagcttcccttcttcccccataccttccatcaatgatagcttcagtatgtgaaaacccagctcttcaaccctataggctccaacaagcaatcgcagcaagcaacatacctttatcacccttgtttcaacaatcgccagccctatctttggtgcagtcattggtacaaaccatcagggcacagcagctgcagcaactcgtgctacctgtgatcaaccaagtagctctggcaaacctttctccctactctcagcaacaacaatttcttccattcaaccaactgtctacattgaaccgtgctgcttatttgcagcaac

SEQ ID NO: 20903 - DNA, 386 bp, Zea mays
  Clone ID: LIB3152-002-Q1-K1-B9
gaaacacaccaagcgaagcgcactatcaacaacctaacaacaatggctaccaagatattagccctccttgcgcttcttgcccttttagtgagcgcaacaaatgcgttcattattccacagtgctcacttgctcctagtgccattattccacagttcctcccaccagttacttcaatgggcttcgaacatccagccgtgcaagcctacaggctacaactagcgcttgcggcgagcgtcttacaacaaccaattgcccaattgcaacaacaatccttggcacatctaaacctacaaaccatcgcaacgcaacagcaacaacagtttctggcatcactgagccacctagccgtggtgaacccttgtctctacttgcaacagcagctact

SEQ ID NO: 20904 - DNA, 436 bp, Zea mays
  Clone ID: LIB3152-002-Q1-K1-C1
cgcatggttgactacaatgtactcggaggcaagtgtaaccgtgggctctctgtggtcgacagctacaagctgctcaagggcgctgatgctctgggcgaggaggaaacgttccttgcttgcaccctcggctggtgcattgaatggcttcaggctttctttcttgtgcttgatgatatcatggatgactctcacactcgtcgcggccagccttgctggttcagggtgcctcaggttggcttaattgctgcgaatgacgggatcatccttcgcaaccatatctcacggatccttcggtgccactttaagggcaaaccttactatgctgatctccttgatttgttcaatgaggttgagttcaagacagcttcaggtcagcttctggaccttatcactacccatgagggagaaaaagatctaacaaagtataacataacag

SEQ ID NO: 20905 - DNA, 372 bp, Zea mays
  Clone ID: LIB3152-002-Q1-K1-C10
aagatttttgccctccttgccctccttgctctttcagcaagcgctgctacctcgactttgattccacaatgctcacaacaatacctctctccggcgacagccgtgggatttcaatacccaactatacaatcctacatggtacaagaggccatccaagcaagcatcttacggtcattagcattaaccctccaacaaccatatgctctattgcaacagccatccttagtgcatctgtatctccaaagaatcgcggcacaacaactacaacaacagttgctaccaacaatcaatcaagtagttgcagcgaaccttgctgctaacctccagaaccaacagttttttccattcaatcaactaaatggggggaaccct

SEQ ID NO: 20906 - DNA, 420 bp, Zea mays
  unsure at all n locations
  Clone ID: LIB3152-002-Q1-K1-C11
caaagcggcagtgcgtagagaggatcgtcgaacagaacagcatgaagatggtcatcgttgtcgtcgtgtgcctggctctgtcagctgccagcgcctctgcaatgcagatgccctgcccctgcgcggggctgcagggcttgtacggcgctggcgccggcctgacgacgatgatgggcgccggcgggctgtacccctacgcggagtacctgaggcagccgcagtgcagcccgctggcggcggcgccctactacgccgggtgtgggcagacgagcgccatgtaccagccgctccggcaacagtgctgccagcagcagatgaggatgatggacgtgcagtccgtcgcgcagcagctgcagatgatgatgcagcttgagcgtgccgctgncgccagcaacagcctgtacgagccagctctgatgc

SEQ ID NO: 20907 - DNA, 352 bp, Zea mays
  Clone ID: LIB3152-002-Q1-K1-C12
caccaagcgaagcgcactaacaacaacctaacaacaatggctaccaagatattatccctcgttgcgcttcttgcgctttttgcgagcgcaacaaatgcgtccattattccacaatgctcacttgctcctagttccattattccacagttcctcccaccagttacttcaatggccttcgaacacccagctgtgcaagcctataagctacaacaagcgattgctgcgagcgtcttacaacaaccaattgctcaattgcaacaacaatccttggcacatctaacaatacaaaccattgcaacgcaacagcaccaacagttcttaccaacactgagccacctagccatggtgaacc

SEQ ID NO: 20908 - DNA, 317 bp, Zea mays
  Clone ID: LIB3152-002-Q1-K1-C2
attgaactctcctgcttatttacagcagcaacaactactaccattcagccagctagctggtgtgagccctgctaccttcttgacacaaccacagttgttgccgttctaccagcacgttgcgcctaacgctggcaccctcttacaactgcaacaattgctgccattcaaccaacttgctttgacaaacccagcagtgttctaccaacaacccatcattggtggtgccctcttttagatttcttatgagttatagttcaataataaagttttttatctgatgtttgtggcttcccagaaataagaaagtacatttcttg

SEQ ID NO: 20909 - DNA, 439 bp, Zea mays
  Clone ID: LIB3152-002-Q1-K1-C3
caacaagcaacatagaaagtggaatacagtagcaacaatagagcaacaatggcggccgagatattttccatccttatgctccttgctctttctgcatgtgttgctaacgcgaccatttttcctcaatactcacaagctcctatagctgcccttcttcccccataccttccatcaatgaccgcttcagtatgtgaaaacccagcccttcaaccctacaggctccaacaagcaatcgcaacaagcaacttacctttatcacccctgttctttcaacaatcgccagccctatctttggtgcagtcattggtacaaaccatcagggcacaacagctgcagcaactcgtgctaccagtgatcagccaagtagctctggcaaacctttctccctactctcagcaacaacaatttcttccattcaaccaactgtctacactgaacc

SEQ ID NO: 20910 - DNA, 445 bp, Zea mays
  Clone ID: LIB3152-002-Q1-K1-C4
gtgaagtacagtagcaacatcttagcaccaatggcagccaagatttttgccctccttgggctccttgctctttcagcaagtgttgctaccgcgactattattccacaatgctcacaacaatacctctctccggtgacagccgcgagatttgaatacccaactatacaatcctacaggctacaagaggccatcacagcaagcatcttacagtcgctagcattgactgtccaacaaccatatgccctattgcaacaaccatccttagtgaatctatatctgcaaagaatcgcagcacaacaactacaacagcagttgcttccaacaatcaatcaagtacttgcagcgaaccttgcttgttaccttcagcaacaacaatttcatccattcaatcaactaaatcgggggaaccttgctgcttacttgcaagcacaacagctactaccat

SEQ ID NO: 20911 - DNA, 436 bp, Zea mays
  Clone ID: LIB3152-002-Q1-K1-C5
gggtcttcagaccattagctttatctactccagagcgcagaagaacccgatcgacaccatgagggtgttgctcgttgccctcgctctcctggctctcgctgcgagcgccacctccacgcatacaagcggcggctgcggctgccagccaccgccgccggttcatctaccgccgccggtgcatctgccacctccggttcacctgccacctccggtgcatctcccaccgccggtccacctgccgccgccggtccacctgccaccgccggtccatgtgccgccgccggttcatctgccgccgccaccatgccactaccctactcaaccgccccggcctcagcctcatccccagccacacccatgcccgtgccaacagccgcatccaagctcgtgccagctgcagggaaccttgcggcgttgcagcaccccgatcctgggc

SEQ ID NO: 20912 - DNA, 424 bp, Zea mays
  Clone ID: LIB3152-002-Q1-K1-C6
ggtgcatatagtcacagtcagggtatcaaaggactgcgtgatgcaattgctgctggaatcatgtcacgtgatggattccctgcaaatgcagatgacattttcattacagacggagcaagtcctggggtccacatgatgatgcaattactgattaggaatgagaaagatggcattctgtgcccaattcctcagtaccctttgtactcagcctccatagctcttcatggtggagctcttgtcccctattaccttaatgaaaaaactgggtggggtttggagatctctgatcttaagacgcaactggaaaatgctcggtcaaaaggcattgatgttagggccttggtggttatcaatccaggaaatccgactgggcaggttcttgctgaagacaaccaatatgatatagtgaaattctgcaaaaatg

SEQ ID NO: 20913 - DNA, 237 bp, Zea mays
  Clone ID: LIB3152-002-Q1-K1-C7
ggagaggcgcgagacccgccgctacatcgaaatgttctacgccctgaagtaccgtagcctggcaagccaggttccgctgtccttcgattagtacggggaaagaagaagaagaagaagcccaggccggagaaccatcgcctgcatttcgatctgtttcaccgcaattcgcattgttagtcgtgtattggagttatgtgtacttggtttccaagaactttggttccttgtttttttttc

SEQ ID NO: 20914 - DNA, 446 bp, Zea mays
  Clone ID: LIB3152-002-Q1-K1-C8
cagaaacacaccaagcgaagcgcactagcaacaacctaacaacaatggctaccaagatattatccctccttgcgcttcttgcgctttttgcgagcgcaacaaatgcgtccattattccacaatgctcacttgctcctagttccattattccacagttcctcccaccagttacttcaatggccttcgaacacccagctgtgcaagcctataggctacaacaagcgattgcggcgagcgtcttacaacaaccaattgcccaattgcaacaacaatccttggcacatctaacaatacaaaccatcgcaacgcaacagcaacaacagttcctaccagcactgagccacctagccatggtgaaccctgtcgcctacttgcaacagcagctgcttgcatccaacccacttgctctagcaaacgtagttgcaaaccagcaacaacaacaactg

SEQ ID NO: 20915 - DNA, 389 bp, Zea mays
  Clone ID: LIB3152-002-Q1-K1-C9
acttgctcctagtgccattattccacagttcctcccaccagttacttcaatgggcttcggacatccagccgtgcaagcctacaggctacaactagcgcttgcggcgagcgtcttacaacaaccaattgcccaattgcaacaacaatccttggcacatctaaacctacaaaccatcgcaacgcaacagcaacaacagtttctgccatcactgagccacctagccgtggtgaaccctgtcgcctacttgcaacagcagctacttgcatccaacccacttgctctggcgaacgtagctgcataccagcaacaacaacgtctgcaacagtttatgccagcgctcagtcaactagccatggtgaaccctgtcgcctacctacaacagcaacaat

SEQ ID NO: 20916 - DNA, 314 bp, Zea mays
  Clone ID: LIB3152-002-Q1-K1-D1
atgtcctctccgccgcccgctgcctccgcctccgcctccgcgcggtccccgcccgagcgtcgtcgcagcatcctccgcctccgcccaccccgcggtcgcggcggccggattacgtcccgaaccgcatcgacgaccccaactacgtgcgcatcttcgacaccacgctgcgcgacggggagcagtcgccgggcgccaccatgacgagcgcccagaagctcgtcgtcgcgcgccagctggcccgcctcggcgtcgacatcatcgaggccgggttcccggcctcctcccccgacgacctcgacgccgtgcgctccatc

SEQ ID NO: 20917 - DNA, 372 bp, Zea mays
  Clone ID: LIB3152-002-Q1-K1-D10
acacaacataaattcgacctcttcatctaccaaacatacaaacccatcacaaaattgaatatacaacacacaacaagccaacaagatagcctcaaaataaattggagccatagtgcaatgctaccttcttgacacaaccacaattgttgccgttctaccagcacgctgcgcctaacgctggcaccctcttacaactgcaacaattgctgccattcaaccaacttgctttgacaaacccaacagcattctaccaacaacccatcattggtggtgccctcttttagatttcttatgagttatagttcaataataaagttttttgtctgatgtttgtggcttcccagaaataagaaagtacatttctagattctt

SEQ ID NO: 20918 - DNA, 341 bp, Zea mays
  Clone ID: LIB3152-002-Q1-K1-D11
caactagcaacatagaaagcacaatagtgtaccaacaatggcagccaaaatattttgctggcttatgctccttggtctttctgcaagtgctgctaccgcaaccattttcccacaatgctcacaagctcctatagcttcctttcttcccccatacctctcaccagcggtgtcttcagtatgtgaaaacccaattcttcaaccctacaggatccaacaggcaatcgcagcaggcatcttacctttatcacccttgttcctccaacaaccgtcagccctattacaagagttacctttggtgcatttgttggcacaaaacatcaaggcacaacaactacaacaac

SEQ ID NO: 20919 - DNA, 403 bp, Zea mays
  Clone ID: LIB3152-002-Q1-K1-D12
agcgacagctcgacaaagatttgtgagagtgatccggcgctgagaagagatggctaagatcgccgcagccgccgcggcggcggcggcgctgtgcttcgcggccctggtggccgtggccgtctgccaaggcgaggtcgagcggcagaggctcagggacctgcagtgctggcaggaggtccaggagagcccgctcgacgcgtgccgccaggtcctcgaccggcagctaaccggcggcggcgtcggcggcccgttccggtggggcaccgggctccggatgcggtgctgccagcagctccaggacgtgagccgcgagtgccgctgcgccgccatccggagcatggtcaggggctacgaggaggccatgccgcctctggagaaaggctgtggcatggggcggagcagc

SEQ ID NO: 20920 - DNA, 394 bp, Zea mays
  Clone ID: LIB3152-002-Q1-K1-D2
atccaatccagatcagcaaagcggcagtgcgtagagaggatcgtcgaacagaacagcatgaagatggtcatcgttctcgtcgtgtgcctggctctgtcagctgccagcgcctctgcaatgcagatgccctgcccctgcgcggggctgcagggcttgtacggcgctggcgccggcctgacgacgatgatgggcgccggcgggctgtacccctacgcggagtacctgaggcagccgcagtgcagcccgctggcggcggcgccctactacgccgggtgtgggcagacgagcgccatgtaccagccgctccggcaacagtgctgccagcagcagatgaggatgatggacgtgcagtccgtcgcgcagcagctgcagatgatgatgcagcttgagcgtg

SEQ ID NO: 20921 - DNA, 436 bp, Zea mays
  Clone ID: LIB3152-002-Q1-K1-D3
aagcacaatagtgtaccaacaatggcagccaaaatattttgcctccttatgctccttggtctttctgcaagtgctgctacggcgaccattttcccgaaatgctcgcaagctcctatagcttcccttcttcccccgtacctctcaccagcggtgtcttcggtatgtgaaaacccaattcttcaaccctacaggatccaacaggcaatcacagctggcatcttacctttatcacccttgttcctccaacaatcatcagccctattacatcagttacctttggtgcatttattggcacaaaacatcagggcacaacaactacaacaacttgtgctagcaaaccttgctgcctactctcagcaacagcagtttcttccattcaaccaactagctgcattgaactctgcttcttatttgcaacaacaacaactaccattca

SEQ ID NO: 20922 - DNA, 399 bp, Zea mays
  Clone ID: LIB3152-002-Q1-K1-D4
cccacgcgtccgcagaaacacaccaagcgaagcacattagcaacaacctaacaacaatggctaccaagatattatccctccttgcgcttcttgcgctttttgcgagcgcgacacaaagcggcattatttcacaaaggtgacttgctgccagatgcattattacacagctcctcccaccagatacttcaatgggcttcgaacacccagctgtgcaagcctatatgctacaacaagcaattgcggcgagcgtcttacaacaaccaatttcccagttgcaacaacaatccttggcacatctaacaatacaaaccatcgcaacgcaacagcaacaacaattcctaccagcactgagccacctagccatggtgaaccctgccgcctacttgcaacagcagttgc

SEQ ID NO: 20923 - DNA, 435 bp, Zea mays
  Clone ID: LIB3152-002-Q1-K1-D5
aacacaccaagcgaagcgcactagcatcaacctaacaacaatggctaccaagatattatccctccttgcgcttcttgcgctttttgcgagcgcaacaaatgcgtccattattccacaatgctcacttgctcctagttccattattccacagttcctcccaccagttacttcaatggccttcgaacacccagctgtgcaagcctataggctacaacaagcgattgcggcgagcgtcttacaacaaccaattgcccaattgcaacaacaatccttggcacatctaacaatacaaaccatcgcaacgcaacagcaacaacagttcctaccagcactgagccacctagccatggtgaaccctgtcgcctacttgcaacagcagctgcttgcatccaacccacttgctctagcaaacgtagttgcaaaccagcaacaaca

SEQ ID NO: 20924 - DNA, 442 bp, Zea mays
  Clone ID: LIB3152-002-Q1-K1-D6
cccaattgttcaaccctacaggatccaacaggcaatcgcaacaggcatcttaccattatcacccttgttcctccaacaaccgtcagccctattacagcagttacctttggtccatttggtggcacaaaacatcagggcacaacaactacaacaacttgtgctagcaaaccttgctgcatactctcagcaacatcagtttcttccattcaaccaactggctgcattgaactctgctgcttatttgcaacaacaattaccattcagccagctagttgctgcctacccccagcaatttcttccattcaaccaactagcagcattgaactctgctgcttatttacagcagcaacaactactaccattcagccagctagctgatgtgagccctgctgccttcttgacacaacaacagttgttgccgttctacctgcacgctatgcct

SEQ ID NO: 20925 - DNA, 357 bp, Zea mays
  Clone ID: LIB3152-002-Q1-K1-D7
gttctagatcgcaagccgcctccctctcggtccagccgtctaggcgccgtcgccggtgccgtatgcccctgcccccacccaggccacagctcctggaataaaaatgacagaaaagaaactttatagttcgatgaatgggcagtttgccgtggttttggaataatttggactttgtcttcaaaaaaaaaaaaaaaaaaaaaaaaaaaaaaaaaaaaaaaaaaaataaaaaaaaaaaaaaaaaaaaaaaaaaaaaaaaaaaaaaaaaaattaaaaaaaaaaaaaaaataaaaaatatataataataaatatattaaaaatattatttttaatttataaatataaattttttttattttc

SEQ ID NO: 20926 - DNA, 438 bp, Zea mays
  Clone ID: LIB3152-002-Q1-K1-D8
agaccaacaagcaacatagaaagtggaatccagtagcaacaatagagcaacaatggagaccaagatattttccctccttatgctccttgctctttctacatgtgttgctaacgcgacaattttccctcaatgctcacaagctcctatagcttccctttttcccccataccttccatcaattatagcttcagtatgtgaaaacccagctcttcaaccatataggcttcaacaagcaatcgcagcaagcaacatacctttatcgcccttgttgtgtcaacaatcgccagccctatctttggtgcagtcattggtacaaaccatcagggcacaacagctgcagcaactcgtgctacctgtgatcaaccaagtagctctggcaaacctttctccctactcttcgcaacaacaatttctttcattcaaccaactgtctacact

SEQ ID NO: 20927 - DNA, 344 bp, Zea mays
  Clone ID: LIB3152-002-Q1-K1-D9
gagcattcagaaacacaccaagcgaagcacattagcaacaacctaacaacaatggctacgaagatattatccctccttgcgcttcttgcgctttttgcgagcgcaacaaatgcgttcattattccacaatgctcacttgctccaagttccattattacacagttcctcccaccagttacttcaatgggcttcgaacacccagctgtgcaagcctataggctacaacaagcaattgcggcgagcgtcttacaacaaccaatttcccagttgcaacaacaatccttggcacatctaacaatacaaaccatcgcaacgcaacagcaacaacaatttctaccagcact

SEQ ID NO: 20928 - DNA, 435 bp, Zea mays
  Clone ID: LIB3152-002-Q1-K1-E1
agcaatcgcagcaagcaacatacctttatcacccttgtttcaacaatcgccagccctatctttggtgcagtcattggtacaaaccatcagggcacagcagctgcagcaactcgtgctacctgtgatcaaccaagtagctctggcaaacctttctccctactctcagcaacaacaatttcttccattcaaccaactgtctacattgaaccgtgctgcttatttgcagcaacaactattaccattcagccagctagctactgcctactctcagcaacaacaacttcttccatttaaccaattggccgcactgaaccccgctgcttatttgcagcagcaaatactactaccatttagccagctagctgcagcaagccgtgcttccttcttgacacagcaacagttgctgcctttctaccagcagtttgcggctaaccc

SEQ ID NO: 20929 - DNA, 352 bp, Zea mays
  Clone ID: LIB3152-002-Q1-K1-E10
caacaagcaacatagaaagtggaatccagtagcaacaatagagcaacaatggagaccaagatattttccctccttatgctccttgctctttctacatgtgttgctaacgcgacaattttccctcaatgctcacaagctcctatagcttccctttttcccccataccttccatcaattatagcttcagtatgtgaaaacccagctcttcaaccatataggcttcaacaagcaatcgcagcaagcaacatacctttatcgcccttgttgtgtcaacaatcgccagccctatctttggtgcagtcattggtacaaaccatcagggcacaacagctgcagcaactcgtgctacctg

SEQ ID NO: 20930 - DNA, 380 bp, Zea mays
  Clone ID: LIB3152-002-Q1-K1-E11
gcattcagaaacacaccaagcgaagcgcactagcaacaacctaacaacaatggctaccaagatattatccctccttgcgcttcttgcgctttttgcgagcgcaacaaatgcgtccattattccacaatgctcacttgctcctagttccattattccacagttcctcccaccagttacttcaatggcctttgaacacccagctgtgcaagcctataggctacaacaagcgattgcggcgagcgtcttacaacaaccaattgcccaattgcaacaacaatccttggcacatttaacaatacaaaccatcgcatcgcatcagcaacaacagttcctaccagcactgatccacctagccatggggaaccttgtcgcctacttgc

SEQ ID NO: 20931 - DNA, 406 bp, Zea mays
  Clone ID: LIB3152-002-Q1-K1-E12
ttttgagcattcagaaacacaccaagcgaagcacattagcaacaacctaacagcgatggcgtaccaagatattatccctccttgcgcttcttgcgctttttgcgagcgcaacaaatgcgttcattattccacaatgctcacttgctccaagttccattattacacagttcctcccaccagttacttcaatgggcttcgaacacccagctgtgcaagcctataggctacaacaagcaattgcggcgagcgtcttacaacaaccaatttcccagttgcaacaacaatccttggcacatctaacaatacaaaccatcgcaacgcaacagcaacaacaattcctaccagcactgaaccacctagccatggtgaacccctgccggctacttgcaacagcagttgcttgcat

SEQ ID NO: 20932 - DNA, 439 bp, Zea mays
  Clone ID: LIB3152-002-Q1-K1-E2
gcaacatagaaagcacaatagtgtaccaacaatggcagccaaaatattttgcctccttatgctccttggtctttctgcaagtgctgctacggcgaccattttcccgaaatgctcgcaagctcctatagcttcccttcttcccccgtacctctcaccagcggtgtcttcggtatgtgaaaacccaattcttcaaccctacaggatccaacaggcaatcacagctggcatcttacctttatcacccttgttcctccaacaatcatcagccctattacatcagttacctttggtgcatttattggcacaaaacatcagggcacaacaactacaacaacttgtgctagcaaaccttgctgcctactctcagcaacagcagtttcttccattcaaccaactagctgcattgaactctgcttcttatttgcaacaacaacaacta

SEQ ID NO: 20933 - DNA, 435 bp, Zea mays
  Clone ID: LIB3152-002-Q1-K1-E3
cgcacatatctactatactatactctaggaagcaaggacaccaccgccatggcagccaagatgcttgcattgttcgctctcctagctctttgtgcaagcgccactagtgcgacccatattccagggcacttgccaccagtcatgccattgggtaccatgaacccatgcatgcagtactgcatgatgcaacaggggcttgccagcttgatggcgtgtccgtccctgatgctgcagcaactgttggccttaccgcttcagacgatgccagtgatgatgccacagatgatgacgcctaacatgatgtcaccattgatgatgccgagcatgatgtcaccaatggtcttgccgagcatgatgtcgcaaatgatgatgccacaatgtcactgcgacgccgtctcgcagattatgctgcaacagcagttaccattcatgttc

SEQ ID NO: 20934 - DNA, 427 bp, Zea mays
  Clone ID: LIB3152-002-Q1-K1-E4
atagaaagcacaatagtgtaccaacaatggcagccaaaatattttgcctccttatgctccttggtctttctgcaagtgctgctacggcgaccattttcccacaatgctcacaagctcctatagcttcccttcttcccccgtacctctcaccagcggtgtcttcggtatgtgaaaacccaattcttcaaccctataggatccaacaggcaatcgcagctggcatcttacctttatcacccttgttcctccaacaatcatcagccctattacagcagttacctttggtgcatttattggcacaaaacatcagggcacaacaactacaacaacttgtgctagcaaaccttgctgcctactctcagaacaacagtttcttccattcaaccaactagctgcattgaactctgcttcttatttgcacaacaac

SEQ ID NO: 20935 - DNA, 436 bp, Zea mays
  Clone ID: LIB3152-002-Q1-K1-E5
caacttcctgagctatgctatagatgatgcacagaaatatccatacctcgcatcaatgggcatttatgtcttcaagaaagatgcacttttagaccttgtcaagtcaaaatatattcaattacatgactttggatctgaaatcctgccaagagctgtactagatcatagtgtgcaggcatgcatttttacgggctattgcgaggatgttggaacaatcaaatcattctttgatgcaaacttgcccctcactgagcagccttccaagtttgattcttatgatccagaaacacctttcttcactgcaccccgatgctagcctccgacgcagttggacaagtgcatgatgaaagatgcatttatctcagatggttgcttactgagagaatgcatcatcgagcattctgtgattggagtctgctcacgtgttagctctgga

SEQ ID NO: 20936 - DNA, 374 bp, Zea mays
  Clone ID: LIB3152-002-Q1-K1-E6
ccaagacccactgaaccctcgccgtttcgtcgcacccaccaacacgagagatgagctccggcggcgcggacaagcccggcagtggcggcggcgcggtgaatacgccgtcggacttcctcaagtccatcaggggccgccccgtattcgtaaagctcaactccggcgtcgactacagaggtatattggcttgtctggatggttatatgaacatcgcaatggagcagaccgaggtgtacgtgaatggccagttgaagaacaagtatggcgatgccttcataaggggcatcaacggtacgacctggattttcaaatccaatccttctgttccctgagaactgctttatcggcttaattttgttttctttgttgtgaga

SEQ ID NO: 20937 - DNA, 435 bp, Zea mays
  Clone ID: LIB3152-002-Q1-K1-E7
ccaacaagcaacatagaaagtggaatccagtagcaacaatagagcaacaatggcgaccaagatattttccctccttatgctccttgctctttctgcatgtgttgctaacgcgacaattttccctcaatgctcacaagctcctatagcttcccttcttcccccataccttccatcaatgatagcttcagtatgtgaaaacccagctcttcaaccctataggctccaacaagcaatcgcagcaagcaacatacctttatcacccttgtttcaacaatcgccagccctatctttggtgcagtcattggtacaaaccatcagggcacagcagctgcagcaactcgtgctacctgtgatcaaccaagtagctctggcaaacctttctccctactctcagcaacaacaatttcttccattcaaccaactgtctacattgaa

SEQ ID NO: 20938 - DNA, 173 bp, Zea mays
  Clone ID: LIB3152-002-Q1-K1-E8
ctgtagtaataatgtaatggagccgctgactagctacctagctcgctagtttactcatttagcggcgatgagtaacgtagtgtcacccatcaccatgggtggcagtgtgagcaatgacctgaatgaaccattgaaatggaaaggaataatatataaggaaaaaagatgattgg

SEQ ID NO: 20939 - DNA, 74 bp, Zea mays
  Clone ID: LIB3152-002-Q1-K1-E9
gtaattcaataataaagttttttggatgatgtatgtggccaaccagaaataaaaagttagagtttccagattct

SEQ ID NO: 20940 - DNA, 265 bp, Zea mays
  unsure at all n locations
  Clone ID: LIB3152-002-Q1-K1-F10
tgagcattcataaacacaccatgctaagctcattatcaacaacctaacaacaggtgctaggaagatattatccgttcttgcgcttcttgcgctntttgcgagcgcaacaaatgcgttcattattccacattgctcacttgctccaagttccattattacacagtttctcccaccagttacttcaatggtctttgatcacccagctgtgcaagcctattggctacaacatgcatttgcggctagcgttttactacatccaatttcc

SEQ ID NO: 20941 - DNA, 186 bp, Zea mays
  Clone ID: LIB3152-002-Q1-K1-F11
acagttcctactaccagatacatcaatgggcttttaacacctatctgtgcaaggggacaggctacaacaatcagcttgcagcgagcgtctcacaacaaccaattaaccaatttgaacatcaatgcttggcacatctaaccatacaatccatcgcaacacatcagtaacaactttttctaccagcac

SEQ ID NO: 20942 - DNA, 424 bp, Zea mays
  Clone ID: LIB3152-002-Q1-K1-F12
gccgcctgtctccctgtccggtctccactcgtccgggcgacgagacgacgacggagggtgtctgcgggggatttgtttgtcgctgactcgccggcgaccaagatgaggccggttttcgtggggaacctagactatgatacccgccactcggagctcgaccacctcttctaccgctatggcagggtcgagcgcatcgacatgaagtcaggctttgcttttgtctactttgaggatgaacgtgatggcagtgatgccatacgtgctcttgatggttatccatttggccctggcagacgcaggctttcagtagagtggtcacggggtgatcgagctgctagacgtgatggcaacaaaccagaagtaaatactaagccaactaaaacattggttgtcattaactttgatccaatggacacaagagtca

SEQ ID NO: 20943 - DNA, 386 bp, Zea mays
  Clone ID: LIB3152-002-Q1-K1-F2
gaccattagctttatctactccagagcgcagaagaacccgatcgacaccatgagggtgttgctcgttgccctcgctctcctggctctcgctgcgagcgccacctccacgcatacaagcggcggctgcggctgccagccaccgccgccggttcatctaccgccgccggtgcatctgccacctccggttcacctgccacctccggtgcatctcccaccgccggtccacctgccgccgccggtccacctgccaccgccggtccatgtgccgccgccggttcatctgccgccgccaccatgccactaccctactcaaccgccccggcctcagcctcatccccagccacacccatgcccgtgccaacagccgcatccaagcccgtgccagc

SEQ ID NO: 20944 - DNA, 394 bp, Zea mays
  Clone ID: LIB3152-002-Q1-K1-F3
ggcgctggcgccggcctgacgacgatgatgggcgccggcgggctgtacccctacgcggagtacctgaggcagccgcagtgcagcccgctggcggcggcgccctactacgccgggtgtgggcagacgagcgccatgtaccagccgctccggcaacagtgctgccagcagcagatgaggatgatggacgtgcagtccgtcgcgcagcagctgcagatgatgatgcagcttgagcgtgccgctgccgccagcagcagcctgtacgagccagctctgatgcagcagcagcagcagctgctggcagcccagggtctcaaccccatggccatgatgatggcgcagaacatgccggccatgggtggactctaccagtaccagtaccagcttgccagctacc

SEQ ID NO: 20945 - DNA, 448 bp, Zea mays
  Clone ID: LIB3152-002-Q1-K1-F4
gccgagataaccctagagccgagtgatcttatggcgcaaacaaacaaaagaatagtgccaaagttcactgaaatcttccccgtggaggacgcgaactacccttacagcgccttcatcgcgtcggtccggaaagacgtgatcaaacactgcaccgaccataaagggatcttccagcccgtgctgccaccggagaagaaggtcccggagctatggttctacacagagctcaaaactaggaccagctccatcacgctcgccatacgcatggacaacccatgcccgtgccaacagccgcatccaagcccgtgccagctgcagggaacctgcggcgttggcagcaccccgatcctgggccagtgcgtcgagtttctgaggcatcagtgcagcccgacggcgacgccctactgctcgcctcagtgccagtcgttgcggcagcagtgttgccagc

SEQ ID NO: 20946 - DNA, 437 bp, Zea mays
  Clone ID: LIB3152-002-Q1-K1-F5
aagcaacatagaaagtggaatccagtagcaacaatagagcaacaatggcgaccaagatattttccctccttatgctccttgctctttctgcatgtgttgctaacgcgacaattttccctcaatgctcacaagctcctatagcttcccttcttcccccataccttccatcaatgatagcttcagtatgtgaaaacccagctcttcaaccctataggctccaacaagcaatcgcagcaagcaacatacctttatcacccttgtttcaacaatcgccagccctatctttggtgcagtcattggtacaaaccatcagggcacagcagctgcagcaactcgtgctacctgtgatcaaccaagtagctctggcaaacctttctccctactctcagcaacaacaatttcttccattcaaccaactgtctacattgaaccgtgct

SEQ ID NO: 20947 - DNA, 447 bp, Zea mays
  Clone ID: LIB3152-002-Q1-K1-F6
ccaacaagcaacatagaaagtggaatccagtagcaacaatagagcaacaatggcgaccaagatattttccctccttatgctccttgctctttctgcatgtgttgctaacgcgacaattttccctcaatgctcacaagctcctatagcttcccttcttcccccataccttccatcaatgatagcttcagtatgtgaaaacccagctcttcaaccctataggctccaacaagcaatcgcagcaagcaacatacctttatcacccttgtttcaacaatcgccagccctatctttggtgcagtcattggtacaaaccatcagggcacagcagctgcagcaactcgtgctacctgtgatcaaccaagtagctctggcaaacctttctccctactctcagcaacaacaatttcttccattcaaccaactgtctacattgaaccgtgctgctta

SEQ ID NO: 20948 - DNA, 439 bp, Zea mays
  Clone ID: LIB3152-002-Q1-K1-F7
cacagctggcatcttacctttatcacccttgttcctccaacaatcatcagccctattacaacagttacctttggtgcatttattggcacaaaacatcagggcacaacaactacaacaacttgtgctagcaaaccttgctgcctactctcagcaacagcagtttcttccattcaaccaactaggttcattgaactctgcttcttatttgcaacaacaacaactaccattcagccagctacctgctgcctacccccagcaatttcttccattcaaccaactagcagcattgaactctcctgcttatttacagcagcaacaactactaccattcagccagctagctggtgtgagccctgctaccttcttgacacaaccacagttgttgccgttctaccagcacgttgcgcctaacgctggcaccctcttacaactgcaacaa

SEQ ID NO: 20949 - DNA, 413 bp, Zea mays
  Clone ID: LIB3152-002-Q1-K1-F8
gcctggtggggcagatcgctaagcgccaggcggtcgtgaaccccgagaacacctggttctctgtcaagcgcttcatcggccgcaagatgtctgaggtcgacgacgaggccaagcaggtctcgtacggcgttgtcaaagacgagaacggcaacgtcaaactcgactgccccgctattggcaaacagtttgctgccgaggagatctctgcgcaggttttgaggaagttggtggatgatgcatctaagtttcttaatgagaaaattacaaaagcagtggttacagtaccagcatacttcaatgattcacaaaggacagcaactaaagatgctggccgcattgcaggactggaagttctccgtattataaatgaaccaactgctgcatcattggcctatgggttcgagaagaaaaat

SEQ ID NO: 20950 - DNA, 322 bp, Zea mays
  Clone ID: LIB3152-002-Q1-K1-F9
gggcaagggaatgcttcagcgccatcagctgcttgcggagtttgatgccctgtgggatagggacaaggagaagtatgcaccgtttgaagacattcttcgtgctgctcaggaagcaattgtgctccccccatgggttgcacttgctatcaggccaaggcctggtgtctgggattacattcgggtgaatgtaagtgagctggctgtggaggagctgagtgtttctgagtacttgggcattcaaggaacagctggtggatggacaatccaccagcaactttgggcttgagcttgattttgagcccttcaatgcctcctttcctcg

SEQ ID NO: 20951 - DNA, 434 bp, Zea mays
  Clone ID: LIB3152-002-Q1-K1-G1
aaaaagaagaaggttgtcatccaagaaccttctgatgaagtggacaagcttgcagagaagacagaaacactggcagtcgcagaacccgctgaacttaacttcactggaatgaagaagaaaaagaagaagccggtggatcttgattcaactcttgatgagcttggagatggggaggacactcaagatgatcaagctgtagaggaacaaggggaaggcattgtgctgggaagtgtccctacatacccttgggagggaactgatcgggattataaatatgaagagctgctggacagggtgttcaacattctacgtgagaacaacccagatcttgctggggataggcgtaggaccgttatgaggccaccacaagttcttagggagggaacaaagaagacagtttttgttaactttatggatttgtgtaaacgatgcat

SEQ ID NO: 20952 - DNA, 399 bp, Zea mays
  Clone ID: LIB3152-002-Q1-K1-G10
cagcattcagaaacacaccaagcgaagcgcactagcaacaacctaacaacaatggctacgaagatattagccctccttgcgcttcttgcccttttagtgagcgcaacaaatgcgttcattattccacagtgctcacttgctcctagtgccattattccacagttcctcccaccagttacttcaatgggcttcgaacatccagccgtgcaagcctacaggctacaactagcgcttgcggcgagcgtcttacaacaaccaattgcccaattgcaacaacaatccttggcacatctaaacctacaaaccatcgcaacgcaacagcaacaacagtttctgccatcactgagccacctagccgtggtgaaccctgtcgcctacttgcaacagcagctacttgca

SEQ ID NO: 20953 - DNA, 178 bp, Zea mays
  Clone ID: LIB3152-002-Q1-K1-G11
tcgagaaagtggaatccagtatcaacaatagagcatcactggcgaccaatatatttggcctcgtgaggctccttgctgttgcttgcatgtgttgcgaacgcgacaattttccttcaatgctcacaggctactatagcgctttcttcttttttcatacctttcatcaatgaattgcttt

SEQ ID NO: 20954 - DNA, 429 bp, Zea mays
  Clone ID: LIB3152-002-Q1-K1-G12
aggcagtacaccaaatggggcgaccgccctgccgccggggagcattcaatcgtcggcggcacaccgtccccattcttcccgttccccaacgtgaagtggcaccatggtcgccacgcgctcgccgcaggagcaggagcaggagcagcgactgcgggccagccagcctccggttgggtagctgttctgcgcaacagtccgaggggcgcggatggaggagggaccaaacaggagcggaggggaaggcgggcggtacaactgatgagccggtacctgttctacgatagcggtcgcttcagacacgaaagatgttcttgcgagggacatgctgatcatcgccttcgagtaagatgctccaaccatgaggagcataggcacaactagcagggagagcaggccgacctcccaacagcacgcgaaggcaacaatgat

SEQ ID NO: 20955 - DNA, 422 bp, Zea mays
  unsure at all n locations
  Clone ID: LIB3152-002-Q1-K1-G2
gtgcgatttcgatctcgcagccaccttttttttgttctgttgtgtatctagtagttggaggagatatgcagtttgcacttgcattggacacgaactcaggtcctcaccagataagatcttgtgagggtgatgggattgacaggttggaaaaattaagtattgggggcagaaagcaggagaaagctttgagaaataggtgctttggtggtagagttgctgcaactacacaatgtattcttacctcagatgcttgtcctgaaactcttcattctcaaacacagtcctctaggaaaaattatgctgatgcaaaccgngtatctgctatcattttgggcggaggcactggatcttagctctttcctctgacaagcacaagagctacgcctgctgtaccttgtggagggatgtacaagcttattgat

SEQ ID NO: 20956 - DNA, 439 bp, Zea mays
  Clone ID: LIB3152-002-Q1-K1-G3
gaccattagctttatctactccagagcgcagaagaacccgatcgacaccatgagggtgttgctcgttgccctcgctctcctggctctcgctgcgagcgccacctccacgcatacaagcggcggctgcggctgccagccaccgccgccggttcatctaccgccgccggtgcatctgccacctccggttcacctgccacctccggtgcatctcccaccgccggtccacctgccgccgccggtccacctgccaccgccggtccatgtgccgccgccggttcatctgccgccgccaccatgccactaccctactcaaccgccccggcctcagcctcatccccagccacacccatgcccgtgccaacagccgcatccaagcccgtgccagctgcagggaacctgcggcgttggcagcaccccgatcctgggccagtgcgtcgag

SEQ ID NO: 20957 - DNA, 421 bp, Zea mays
  Clone ID: LIB3152-002-Q1-K1-G4
gtgaaaacccaattcttcaaccctacaggatccaacaggcaatcgcagctggcatcttacctttatcacccttgttcctccaacaatcatcagccctattacagcagttacctttggtgcatttattggcacaaaacatcagggcacaacaactacaacaacttgtgctagcaaaccttgctgcctactctcagcaacagcagtttcttccattcaaccaactagctgcattgaactctgcttcttatttgcaacaacaacaactaccattcagccagctatctgctgcctacccccagcaatttcttccattcaaccaactgacagcattgaactctcctgcttatttacagcagcaacaactactaccattcagccagctagctggtgtgagccctgctaccttcttgacacaaccaca

SEQ ID NO: 20958 - DNA, 433 bp, Zea mays
  Clone ID: LIB3152-002-Q1-K1-G5
aacaagcaacatagaaagtggaatccagtagcaacaatagagcaacaatggagaccagagatattttccctccttatgctccttgctctttctacatgtgttgctaacgcgacaattttccctcaatgctcacaagctcctatagcttccctttttcccccataccttccatcaattatagcttcagtatgtgaaaacccagctcttcaaccatataggcttcaacaagcaatcgcagcaagcaacatacctttatcgcccttgttgtgtcaacaatcgccagccctatctttggtgcagtcattggtacaaaccatcagggcacaacagctgcagcaactcgtgctacctgtgatcaaccaagtagctctggcaaacctttctccctactctccgcaacaacaatttcttccattcaaccaactgtctacac

SEQ ID NO: 20959 - DNA, 446 bp, Zea mays
  Clone ID: LIB3152-002-Q1-K1-G6
attttgagcattcagaaacacaccaagcgaagctacctagcaacgacttaacaacgggtggctaccaagatattagccctccttgcgcttcttgccctttttgtgagcgcaacaaatgcgttcattattccacaatgctcacttgctcctagtgccattataccacagttcctccgaccagttacttcaatgggcttcgaacacctagctgtgcaagcctacaggctacaacaagcgcttgcggcgagcgtcttacaacaaccaattaaccaattgcaacaacaatccttggcacatctaaccatacaaaccatcgcaacacaacagcaacaacagttcctaccagcactgagccaactagatgtggtgaaccctgtcgcctacttgcaacagcaagtgcttgcattcaacccacttgctctggcaaacgtagctgcataccaaca

SEQ ID NO: 20960 - DNA, 417 bp, Zea mays
  Clone ID: LIB3152-002-Q1-K1-G7
attgataccaactagcaacatacatagtgaagtacactagcaacatcttagcaccggtgggagccaagatttttgccctccttgccctccttgctctttcagcaagcgctgctacctcgacttttattccacaatgctcacaacaatacctctctccggcgacagccgtgggatttcaatacccaactatacaatcctacatggtacaagaggccatccaagcaagcatcttacggtcattagcattaaccctccaacaaccatatgctctattgcaacagccatccttagtgcatctgtatctccaaagaatcgcggcacaacaactacaacaacagttgctaccaacaatcaatcaagtagttgcagcgaaccttgctgcttacctccagcaacaacagtttctttcattcaatc

SEQ ID NO: 20961 - DNA, 184 bp, Zea mays
  Clone ID: LIB3152-002-Q1-K1-G8
catgagcgagaacaagcatgagcatgtcgcggctaccatctaccacactgtgtggcgacgccaacgagaacaatctgaagtgcactgatacttgcaaactatcaattcgcatgaacaattatgacccacactacgacaagcctatcagtggctctggtcagatgcttcatatcactcgtaccaa

SEQ ID NO: 20962 - DNA, 421 bp, Zea mays
  Clone ID: LIB3152-002-Q1-K1-G9
gcaacatagaaagcacaatagtgtaccaacaatggcagccaaaatattttgcctccttatgctccttggtctttctgcaagtgctgctacggcgaccattttcccacaatgctcacaagctcctatagcttcccttcttcccccgtacctctcaccagcggtgtcttcggtatgtgaaaacccaattcttcaaccctataggatccaacaggcaatcgcagctggcatcttacctttatcacccttgttcctccaacaatcatcagccctattacagcagttacctttggtgcatttattggcacataacatcagggcacaacaactacaacaacttgtgctagcaaaccttgctgcctactcttagcaacaacaagttcttccattcaaccaactagctgcattgaaccctgccgcctac

SEQ ID NO: 20963 - DNA, 385 bp, Zea mays
  Clone ID: LIB3152-002-Q1-K1-H1
attcagaaacacaccaagcgaagcacattagcaacaacctaacaacaatggctaccaagatattatccctccttgcgcttcttgcgctttttgcgagcgcaacaaatgcgttcattattccacaatgctcacttgctccaagttccattattacacagttcctcccaccagttacttcaatgggcttcgaacacccagctgtgcaagcctataggctacaacaagcaattgcggcgagcgtcttacaacaaccaatttcccagttgcaacaacaatccttggcacatctaacaatacaaaccatcgcaacgcaacagcaacaacaattcctaccagcactgagccacctagccatggtgaaccctgccgcctacttgcaacagca

SEQ ID NO: 20964 - DNA, 359 bp, Zea mays
  Clone ID: LIB3152-002-Q1-K1-H10
atttagaccaactagcaacatagaaagcacaatagtgtaccaacaatggcagccgaaatattttgcctccttatgctccttggtatttctgcaagtgctgctacggcgaccattttcccgcaatgctcacaagctcctatagcttcccttcttcccccgtacctctcaccagcggtgtcttcggtatgtgaaaacccaattcttcaaccctacaggatccaacaggcaatcgcagctggcatcttacctttatcacccttgttcctccaacaatcatcagccctattacagcagttacctttggtgcatttattggcacagaacatcagggcacaacaactacaacaacttgtgctagc

SEQ ID NO: 20965 - DNA, 359 bp, Zea mays
  Clone ID: LIB3152-002-Q1-K1-H11
gcgaccaactagcaacatataaagcacaatagtgtaccaacaatggcagccaaaatagtgggcttgcttatgctccttggtctttctgcaagtgttgctaccgcaaccattttcccacaatgctcacaagctcctatagcttcccttcttcccccatacctctcaccagcggtgtcttcaatgtgtgaaaacccaattgttcaaccctacaggatccaacaggcaatcgcaacaggcatcttaccattatcacccttgttccttcaacaaccgtctgccctattacagcagttacctttggtccatttggtggcacaaaacattaaggcacaacaactacaacaacttgtgctagcaaa

SEQ ID NO: 20966 - DNA, 280 bp, Zea mays
  unsure at all n locations
  Clone ID: LIB3152-002-Q1-K1-H12
cagcctagcaattagctcatcgactccagattggagaactcgacaccatgaaggtgctgagcgttgcccttgctctcctggcgctcgctgcgagcgccgcctccagtacaagcggcggctgtggctgccagacaccaccgtttcatctaccgcctccgttctatatgccgcctccgttctatctgccgccgcagcagcagccgcagccatggcaataccccactcaaccaccgcagctaagcccgtgccagcagttcggatcctgcggcgtcngcagcgt

SEQ ID NO: 20967 - DNA, 305 bp, Zea mays
  Clone ID: LIB3152-002-Q1-K1-H2
gctcgcctcgggtcaaaccctaagcagggagttgatttatccgctgcagccatgagtaagttgcagtctgagtctgtcaaggatgccatctcccagattgttggggatgccaaggagaagaataggaagttcactgagactgtggaacttcagattggtctgaagaattatgatccacagaaggacaagcgtttcagtggctctgttaagttgccccatatccctcgtcccaagatgaaagtgtgcatgcttggtgatgcccagcatgttgaggaggccgagaagatgggacttgactacatgga

SEQ ID NO: 20968 - DNA, 349 bp, Zea mays
  Clone ID: LIB3152-002-Q1-K1-H3
agcaacatagaaagcacaactatgtaccaacaatggcagtcaaaatatttcgcctgcgtatgctccttggactttctgcaagtgctgctacggcgaccattttcccgcactgctcgcaagctcctatagcttactttcattccccgaacctctcaccagcgtggtctttagtatgtgaaaacccacttcttcaaccctacatgatccaacaggcaatctcagctggcatcttaccttaatgaccctaggttctgcaacaatcatcatgcctattacaacagttacatttggcgcatctactggcacaaaacatcatgtcacaacaactacaacaacttgagctagcaaa

SEQ ID NO: 20969 - DNA, 245 bp, Zea mays
  Clone ID: LIB3152-002-Q1-K1-H4
gtcaacacgttattcttgtctatacaagatacctttgtctagaaatcttgtctcaccatgttgtattcgactcaaacaatgttgcataccatggacattgtccgtttcaaaatttcttccttgcacatttacacaaaccttttcaatttttatttcttgctaaacattaaatgcttttggtttaatttcagtttgtgtaaatctagtttttttattttattttctttaacttactattaaatggg

SEQ ID NO: 20970 - DNA, 380 bp, Zea mays
  Clone ID: LIB3152-002-Q1-K1-H5
agcaaagcggcagtgcgtagagaggatcgtcgaacagaacagcatgaagatggtcagggttctcgtcgggtgcctgggtctgtcagctgccagcgcctctgcaatgcagatgccctgcccctgcgcggggctgcagggcttgtacggcgctggcgccggcctgacgacgatgatgggcgccggcgggctgtacccctacgcggagtacctgaggcagccgcagtgcagcccgctggcggcggcgccctactacgccggttgtgggcagacgagcgccatgtaccagccgctccggcaacagtgctgccagcctcatatgaggatgatggacgtgcattccgtcgcgcaccagctgcagatgatgatgcagcttgagcgtg

SEQ ID NO: 20971 - DNA, 121 bp, Zea mays
  Clone ID: LIB3152-002-Q1-K1-H6
tcggtagatattgcggccgacattattgattaccgtgcaccatgagtaggggcattctgggcttggggatcccatctcccagattgttggggatgccaaggagatgaataggatgtccact

SEQ ID NO: 20972 - DNA, 435 bp, Zea mays
  Clone ID: LIB3152-002-Q1-K1-H7
agaccaacaagcaacatagaaagtggaatccagtagcaacaatagagcaacaatggcgaccaagatattttccctccttatgctccttgctctttctgcatgtgttgctaacgcgacaattttccctcaatgctcacaagctcctatagcttcccttcttcccccataccttccatcaatgatagcttcagtatgtgaaaacccagctcttcaaccctataggctccaacaagcaatcgcagcaagcaacatacctttatcacccttgtttcaacaatcgccagccctatctttggtgcagtcattggtacaaaccatcagggcacagcagctgcagcaactcgtgctacctgtgatcaaccaagtagctctggcaaacctgtctccctactctcagcaacaacaatttcttacattcaaccaactgtctacatt

SEQ ID NO: 20973 - DNA, 186 bp, Zea mays
  Clone ID: LIB3152-002-Q1-K1-H8
ggcagtctagcaataagctcatcgactccatattggagaactcgacaccatgaaggtgcggatcgttgcccttgctcttctggcgctcgttgctagcgcctccttcagtacaagcggctgttgtggttgtcaaacaccaccgtttcatctaccgtcttcgttctatatgctctctttctttctatc

SEQ ID NO: 20974 - DNA, 423 bp, Zea mays
  Clone ID: LIB3152-002-Q1-K1-H9
caacaagcaacatagaaagtggagtacagtagcaacaatagagcgacaatggcggccaagagattttccatccttatgctccttgctctttctgcatgtgttgctaacgcgaccatttttcctcaatactcacaagctcctatagctgcccttcttgccccataccttccatcaatgaccgcttcagtatgtgaaaacccagccctttaaccctacaggctccaacaagcaatcgcaacaagcaacttacctttatcacccctgtgctttcaacaatcgccagccctatctttggtgcagtcattggtacaaaccatcagggcacaacagcttgcagcaactcgtgctaccagtgatcagccaagtagctctggcaaacctttctccttacttttagcaacaacaatttcttccattcaacca

SEQ ID NO: 20975 - DNA, 284 bp, Zea mays
  unsure at all n locations
  Clone ID: LIB3152-003-P1-K1-A1
cgacaacagttacttaatccactatcagttgcctaacccattggtcactgccttcctagagcagcaacaattgctaccatacagccagttctctttgatgaaccctgccttgtcgtggcagcaacccatcgttggaggtgccatcttttagattacatatgagatgtaatcgataatggtgccctcataccggcatgtgtttcctagaaataatcaatatattgattgacatttatctcgnannaaaaaaattatatttataatataaaaaatttaaaaataat

SEQ ID NO: 20976 - DNA, 393 bp, Zea mays
  unsure at all n locations
  Clone ID: LIB3152-003-P1-K1-A10
ggggggggcacgcgtccggtgcgtagagaggatcgncgattattacagcatgaagatggtcatcgttctncgtcnggtgcctggctctgtcagctgccagcgcctctgcaatgcagatgccctgcccctgcgcggggctgcagggcttgtacggcgctggcgccggcctgacgacgatgatgggcgccggcgggctgtacccctacgcggagtacctgaggcagccgcagtgcagcccgctggcggcggcgccctactacgccgggtgtgggcagacgagcgccatgtaccagccgctccggcaacagtgctgccagcagcagatgaggatgatggacgtgcagtccgtcgcgcagcagctgcagatgatgatgcattttgagcgtgccgttg

SEQ ID NO: 20977 - DNA, 436 bp, Zea mays
  unsure at all n locations
  Clone ID: LIB3152-003-P1-K1-A2
gaatgggccgggccgacgccacgcgtcacggcacaactaatggaccaacaattgattaccaagatattttgccctccttatgcgcncgggctctttctacatgtgttgctaacgcgacaattttccctcaatgctcacaagctcctatagcttccctttttcccccataccttccatcaattatagcttcagtatgtgaaaacccagctcttcaaccatataggcttcaacaagcaatcgcagcaagcaacatacctttatcgcccttgttgtgtcaacaatcgccagccctatctttggtgcagtcattggtacaaaccatcagggcacaacagctgcagcaactcgtgctacctgtgatcaaccaagtagctctggcaaacctttctccctactctccgcaacaacaatttcttccattcaaccaactgtctac

SEQ ID NO: 20978 - DNA, 409 bp, Zea mays
  Clone ID: LIB3152-003-P1-K1-A3
gtcggagataagaaaccgacgtgctttcatggtcaccgaaggacgcaacaggaggaagaagcaggagaaccaaatgaaacttgaggcaaaactgcataatttgcagattgaatggaatggaggctcggatactatggatgaaattcttgctaggatacaacaacgggaagaagcagcagtaaagcgtgagcgagccatggcgtacgcgttcaaccatcagtggagagcaaggtctgccacaagtctaggaaacttcagctatgaagtcggtaagggtggctggggctggagctggatggaccgctggatcgcagcacgaccatgggagccgcgatccatggtccaccctgagaacccgaagaaagcacaggcaaagaaggagaacaccacaaacccatcagctctcaag

SEQ ID NO: 20979 - DNA, 403 bp, Zea mays
  Clone ID: LIB3152-003-P1-K1-A4
cagaccattagctttatctactccatagcgcagaagaacccgatcgacaccatgggggtgttgctcgttgccctcgctctcctggctctcgctgcgagcgccacctccacgcatacaagcggcggctgcggctgccagccaccgccgccggttcatctaccgccgccggtgcatctgccacctccggttcacctgccacctccggtgcatctcccaccgccggtccacctgccgccgccggtccacctgccaccgccggtccatgtgccgccgccggttcatctgccgccgccaccatgccactaccctactcaaccgccccggcctcagcctcatccccagccacacccatgcccgtgccaacagccgcatccaagcccgtgccagctgcagggaacctgcg

SEQ ID NO: 20980 - DNA, 404 bp, Zea mays
  Clone ID: LIB3152-003-P1-K1-A5
gcaacatagaaagcacaatagtgtaccaacaatggcagccaaaatattttgcttgctgatgctccttggtctttctgcaagtgttgctaccgcaaccattttcccacaatgctcacaagctcctatagcttcccttcttcccccatacctctcaccagcggtgtcttcaatgtgtgaaaacccaattgttcaaccctacaggatccaacaggcaatcgcaacaggcatcttaccattatcacccttgttcctccaacaaccgtcagccctattacagcagttacctttggtccatttggtggcacaaaacatcagggcacaacaactacaacaacttgtgctagcaaaccttgctgcatactctcagcaacatcagtttcttccattcaaccaactggctgcat

SEQ ID NO: 20981 - DNA, 410 bp, Zea mays
  Clone ID: LIB3152-003-P1-K1-A6
ggcggaccacgcgtccgccagccacacccatgcccgtgccaacattcgaatccaagcccgtgccagctgcggggggcctgcggcgttggcagcaccccgatcctgggccagtgcgtcgagttcctgaggcatcagtgcagcccgacggcgacgccctactgctcgcctcagtgccagtcgttgcggcagcagtgttgccagcagctcaggcaggtggagccgcagcaccggtaccaggcgatcttcggcttggtcctccagtccatcctgcagcagcagccgcaaagcggccaggtcgcggggctgttggcggcgcaaatagcgcagcaactgacggcgatgtgcggcctgcagcagccgactccatgcccctacgctgctgccggcggtgtcccccactgaagaaacta

SEQ ID NO: 20982 - DNA, 437 bp, Zea mays
  unsure at all n locations
  Clone ID: LIB3152-003-P1-K1-A7
aatgggnngggtcgacgccacgcgtcacggcacaactagtgtaccaacaatgtctttccaaaatattttgcctccttatgcgcctgggtctttctgcaagtgctgctacggcgaccattttcccgaaatgctcgcaagctcctatagcttcccttcttcccccgtacctctcaccagcggtgtcttcggtatgtgaaaacccaattcttcaaccctacaggatccaacaggcaatcacagctggcatcttacctttatcacccttgttcctccaacaatcatcagccctattacatcagttacctttggtgcatttattggcacaaaacatcagggcacaacaactacaacaacttgtgctagcaaaccttgctgcctactctcagcaacagcagtttcttccattcaaccaactagctgcattgaactctgcttct

SEQ ID NO: 20983 - DNA, 390 bp, Zea mays
  Clone ID: LIB3152-003-P1-K1-A8
ttttcagcattcagaaacacttcattcgaagcgcactagcaacaacctaagaacgatggctaccaagatattagccctccttgcgcttcttgcccttttagtgagcgcaacaaatgcgttcattattccacagtgctcacttgctcctagtgccattattccacagttcctcccaccagttacttcaatgggcttcgaacatccagccgtgcaagcctacaggctacaactagcgcttgcggcgagcgtcttacaacaaccaattgcccaattgcaacaacaatccttggcacatctaaacctacaaaccatcgcaacgcatcagcaacaacagtttttgccatcactgagccacctagccgtggtgaaccctgtcgcctacttgcaaca

SEQ ID NO: 20984 - DNA, 404 bp, Zea mays
  Clone ID: LIB3152-003-P1-K1-A9
ggggacccacacgtccaaacaacatataaattcgaatttaatttcaacaacagagcaacaattgccagcagcatattttccctccttatgctccttacactttctgcatgtattgctaactctacatttttccctcaatactcacaaactcctatagcttcccttcttcccccataccttccattaattatttctttattatgtgaaaacccatctcttcaaccctatattctccaacaagcaattctatcaagcaacatacctttatcaccctttttacaacaatctccatccctatctttgatgcattcatttctacaaaccatcatttcacactaactatatcaactcttgctactcttgatcaaccaaatatctttgacaaactctttcttctctacttt

SEQ ID NO: 20985 - DNA, 404 bp, Zea mays
  Clone ID: LIB3152-003-P1-K1-B1
catgacatggagagcattgaaccttttctttgggggagcaatgggtgtgtttgcgacggggaaccttgctcaattctggtggagtctcccaaagcagggccgcatctggtgctgtggctatcaactggatactcaaggatggggctgggcgtgttggaaagatgttttttgcccgccaagggaagaaatttgattatgacctgaagcagcttcgcttttctggtgatctcttgatggagttaggagctgggatagaactagctactgcagcttttccacagttttttctaccaatggcatgcatagcaaatgttgttaagaatgttgctgctgtcactttcacctttactcgaacaccaatctacaaggcatatgccaaaggagaaaatatcggtgatgtcact

SEQ ID NO: 20986 - DNA, 355 bp, Zea mays
  Clone ID: LIB3152-003-P1-K1-B11
gcaacatattaagcacaatattttttcttcaatggcagtcaaaatattttggcgggttattctccttggtctttctgcaagtgttgctactgcgaccattttcccgatatgctcgcaagctcctatagcttccctttttttctcgttcctttcaccagatatgttttctgaatttgtatacccaattttttaaccttacaggatccaacaggcttttacagttggtatttcacctttatcacccttgattctccaacaatcatcagccctattacattagttacccttggtgccattattggcacaaaacatcaagtcacaacaacttcaacaactcgtgcttgcaaatctttgc

SEQ ID NO: 20987 - DNA, 379 bp, Zea mays
  Clone ID: LIB3152-003-P1-K1-B12
caagcaacatagaaagtggaattcattagcaacaatagagcaacaatggagaccaagatattttccctccttatgctccttgctctttctacatgtgttgctaacgcgacaattttccctcaatgctcacaagctcctatagcttccctttttcccccataccttccatcaattatagcttcagtatgtgaaaacccagctcttcaaccatataggcttcaacaagcaatcgcagcaagcaacatacctttatcgcccttgttgtgtcaacaatcgccagccctatctttggtgcagtcattggtacaaaccatcagggcacaacagctgcagcaactcgtgctacctgtgatcaaccaagtagctctggcaaaccttt

SEQ ID NO: 20988 - DNA, 409 bp, Zea mays
  Clone ID: LIB3152-003-P1-K1-B2
tttccctcaatgctcacaagctcctatagcttcccttcttcccccataccttcgagtcgatgatagcttcagtatgtgaaaacccagctcttcaaccctataggctccaacaagcaatcgcagcaagcaacatacctttatcacccttgtttcaacaatcgccagccctatctttggtgcagtcattggtacaaaccatcagggcacagcagctgcagcaactcgtgctacctgtgatcaaccaagtagctctggcaaacctttctccctactctcagcaacaacaatttcttccattcaaccaactgtctacattgaaccgtgctgcttatttgcagcaacaactattaccattcagccagctagctactgcctactctcagcaacaacaacttcttccatttaacca

SEQ ID NO: 20989 - DNA, 408 bp, Zea mays
  Clone ID: LIB3152-003-P1-K1-B3
cccacgcgtccgagaccaactagcatcatataaagcacaatagtgtaccaacaatggcagccaaaatattttgcctccttatgctccttggtctttctgcaagtgctgctacggcgaccattttcccgcaatgctcgcaagctcctatagcttcccttcttcccccgtacctctcaccagcggtgtcttcggtatgtgaaaacccaattcttcaaccctacaggatccaacaggcaatcgcagctggcatcttacctttatcacccttgttcctccaacaatcatcagccctattacaacagttacctttggtgcatttattggcacaaaacatcagggcacaacaactacaacaacttgtgctagcaaaccttgctgcctactctcagcaacagcagtttcttccat

SEQ ID NO: 20990 - DNA, 412 bp, Zea mays
  Clone ID: LIB3152-003-P1-K1-B4
ggcggcccaacccgtccgcacctagcaccatagaaagcacatttttttcccaacaatggcagccaaaatatttggcctccttatgctccttggtctttctgcaagtgctgctacggcgaccattttcccgaaatgctcgcaagctcctatagcttcccttcttcccccgtacctctcaccagcggtgtcttcggtatgtgaaaacccaattcttcaaccctacaggatccaacaggcaatcacagctggcatcttacctttatcacccttgttcctccaacaatcatcagccctattacatcagttacctttggtgcatttattggcacaaaacatcagggcacaacaactacaacaacttgtgctagcaaaccttgctgcctactctcagcaacagcagtttcttccattc

SEQ ID NO: 20991 - DNA, 404 bp, Zea mays
  Clone ID: LIB3152-003-P1-K1-B5
gtgctctgttctcatcttctgctcgctggtgtcccctctctctcacccatggcttcggcggcggcggcgactcaggtggggacttacttcctgcggaactactacaacctgctgcaacaaacccccgatgtcgtccaccagttctacagcgaagccagcaccatggtccgcgtcgacgacctcaccggcacgaccgcggctgccaacaacatgatggacatacactcactcatcatgtctttgaacttcacccaaattgagatcaagactgccaattttgtgaactcatggggcgatggggtgctagttatggtctctggtctagtgcagaccaaggagtacagccaccaaaggaaatttatccagatgttcttccttgcccctcaagagaagggttactttgt

SEQ ID NO: 20992 - DNA, 339 bp, Zea mays
  Clone ID: LIB3152-003-P1-K1-B6
cagaaacacaccaagcgaagcgcttttcttcaacctaacaacaatggctaccaagatattagccctccttgcgcttcttgcccttttagtgagcgcaacaaatgcgttcattattccacagtgctcacttgctcctagtgccattattccacagttcctcccaccagttacttcaatgggcttcgaacatccagccgtgcaagcctacaggctacaactagcgcttgcggcgagcgtcttacaacaaccaattgcccaattgcaacaacaatccttggcacatctaaacctacaaaccatcgcaacgcaacagcaacaacagtttctgccatcactgag

SEQ ID NO: 20993 - DNA, 404 bp, Zea mays
  Clone ID: LIB3152-003-P1-K1-B7
tagcaacatagaaagcacaattgtgtaccaacaatggcagccaaaatattgggggtccttatgctccttggtctttctgcaagtgctgctacggcgaccattttcccgaaatgctcgcaagctcctatagcttcccttcttcccccgtacctctcaccagcggtgtcttcggtatgtgaaaacccaattcttcaaccctacaggatccaacaggcaatcacagctggcatcttacctttatcacccttgttcctccaacaatcatcagccctattacatcagttacctttggtgcatttattggcacaaaacatcagggcacaacaactacaacaacttgtgctagcaaaccttgctgcctactctcagcaacagcagtttcttccattcaaccaactagctgc

SEQ ID NO: 20994 - DNA, 406 bp, Zea mays
  Clone ID: LIB3152-003-P1-K1-B8
caccaagcgaagcgcactagcaacaacctaacaacaatggctaccaagatattagtccctccttgcgcttcttgcgctttttgcgagcgcaacaaatgcgtccattattccacaatgctcacttgctcctagttccattattccacagttcctcccaccagttacttcaatggccttcgaacacccagctgtgcaagcctataggctacaacaagcgattgcggcgagcgtcttacaacaaccaattgcccaattgcaacaacaatccttggcacatctaacaatacaaaccatcgcaacgcaacagcaacaacagttcctaccagcactgagccacctagccatggtgaaccctgtcgcctacttgcaacagcagctgcttgcatccaacccacttgctctagca

SEQ ID NO: 20995 - DNA, 327 bp, Zea mays
  Clone ID: LIB3152-003-P1-K1-B9
tttcttagaccaacaagcatcatattttgttgtatccagcagcaacaatagagcagcaggggcgatcaatatatttaccctccttatgctccatgctctttttgcatgtgttgctaactcgacaatatttcctcaatgctcacaagctcctatagctttccttctttccccataccttccattaatgatagcttcagtatgcgaaaacccagctctttaactcttataggctccaacatagcaatctcataatgcaacatacctttttcacccttgtttcaacaattgtcagccctatttttggtgcattcattgttacataccatt

SEQ ID NO: 20996 - DNA, 408 bp, Zea mays
  Clone ID: LIB3152-003-P1-K1-C1
agcattcagaaacacaccaagcgaatcgtactagcaacaacctaacaacaatggctaccaagatattagccctccttgcgcttcttgcccttttagtgagcgcaacaaatgcgttcattattccacagtgctcacttgctcctagtgccattattccacagttcctcccaccagttacttcaatgggcttcgaacatccagccgtgcaagcctacaggctacaactagcgcttgcggcgagcgtcttacaacaaccaattgcccaattgcaacaacaatccttggcacatctaaacctacaaaccatcgcaacgcaacagcaacaacagtttctgccatcactgagccacctagccgtggtgaaccctgtcgcctacttgcaacagcagctacttgcatccaacccac

SEQ ID NO: 20997 - DNA, 376 bp, Zea mays
  Clone ID: LIB3152-003-P1-K1-C11
gcagtttcttccattcaaccaactttctgcattgaactctgcttcttatttgcaacaacaacaactaccattcagccagctacctgttgcctacccccagcaatttcttccattcaaccaactggcagcattgaactctcctgcttatttacagcagcaacaactactaccattcagccagctagctggtgtgagccctgctaccttcttgacacaaccacagttgttgccgttctaccagcacgctgcgcctaacgctggcaccctcttacaactgcaacaattgctgccattcaaccaacttgctttgacaaacccaacagcattctaccaacaacccatcattggtggtgccctcttttagatttttttatga

SEQ ID NO: 20998 - DNA, 165 bp, Zea mays
  Clone ID: LIB3152-003-P1-K1-C12
tgacaattcttcccttaatgctttcttttctcctatatgctctcctatcttccggggggacttttctattattttctggcgtttactattgcgataaaaccctactctacaaccatattttgcttcaacaagcaacatgttgtatgcaacacacctttatcgccc

SEQ ID NO: 20999 - DNA, 403 bp, Zea mays
  Clone ID: LIB3152-003-P1-K1-C2
cagcaaagcggcagtgcgtagagaggatcgtcgaacagaacagcatgaagatggtcatcgttctcgtcgtgtgcctggctctgtcagctgccagcgcctctgcaatgcagatgccctgcccctgcgcggggctgcagggcttgtacggcgctggcgccggcctgacgacgatgatgggcgccggcgggctgtacccctacgcggagtacctgaggcagccgcagtgcagcccgctggcggcggcgccctactacgccgggtgtgggcagacgagcgccatgtaccagccgctccggcaacagtgctgccagcagcagatgaggatgatggacgtgcagtccgtcgcgcagcagctgcagatgatgatgcagcttgagcgtgccgctgccgccagcagcagcct

SEQ ID NO: 21000 - DNA, 397 bp, Zea mays
  unsure at all n locations
  Clone ID: LIB3152-003-P1-K1-C3
gtttaaacccacttggcaccataaaaggttcattgtggtcccaccaatggcagccaaaatatttggcctccttatgctcctgggaatttttgcaagtgctgctacggcgaccattttcccgcaatgctaacaagctcctatagcttcccttcttcccccgtacctctaaccagcggtgtcttcggtatgtgaaaacccaattcttcaaccctacaggatccaacaggcaatcgcagctggcatcttacctttatcacccttgttcctccaacaatcatcagccctattacagcagttacctttggtgcatttattggcacaaaacatcagggcacaacaactacaacaacttgtgctagcaaaccttgctgnctactctcagcaacagcagtttctt

SEQ ID NO: 21001 - DNA, 328 bp, Zea mays
  Clone ID: LIB3152-003-P1-K1-C4
cccaccaatggcggccaaaatatgtgggttccttaggctcctgggcctttttgcaagggctgttaccgaaaccattttccaacaatgctaacaggctcctatagcttccttttttcccccatacctttcaccagcggggttttcagtatgtgaaaacccaatttttcaaccctacaggatccaacaggcaatcgcagcaggcatcttacctttatcacccttgttcctccaacaaccgtaagccctattacaggcagtacctttggtgcatttgttggcacaaaacataaaggcacaacaactacaacaacttgtgctaggaaacctt

SEQ ID NO: 21002 - DNA, 402 bp, Zea mays
  Clone ID: LIB3152-003-P1-K1-C5
caacaagcaacatagaaagtggaatactttagcaacaatagagcaacaatggcggccaagatattttccatccttatgctccttgctctttctgcatgtgttgctaacgcgaccatttttcctcaatactcacaagctcctatagctgcccttcttcccccataccttccatcaatgaccgcttcagtatgtgaaaacccagcccttcaaccctacaggctccaacaagcaatcgcaacaagcaacttacctttatcacccctgttctttcaacaattgccagccctatctttggtgcagtcattggtacaaaccatcagggcacaacagctgcagcaactcgtgctaccagtgatcagccaagtagctctggcaaacctttctccctactctcagcaacaa

SEQ ID NO: 21003 - DNA, 401 bp, Zea mays
  Clone ID: LIB3152-003-P1-K1-C6
aagcaacatagaaagtggaatccattagcaacaatagagcaacaatggcgaccaagatattttccctccttatgctccttgctctttctgcatgtgttgctaacgcgacaattttccctcaatgctcacaagctcctatagcttcccttcttcccccataccttccatcaatgatagcttcagtatgtgaaaacccagctcttcaaccctataggctccaacaagcaatcgcagcaagcaacatacctttatcacccttgtttcaacaatcgccagccctatctttggtgcagtcattggtacaaaccatcagggcacagcagctgcagcaactcgtgctacctgtgatcaaccaagtagctctggcaaacctttctccctactctcagcaacaacaattt

SEQ ID NO: 21004 - DNA, 363 bp, Zea mays
  Clone ID: LIB3152-003-P1-K1-C7
tcgattgagaccaacaagcaacattttttgtggaatccagttgcaacaatagagcagcaatggctatcaagatatttttcctccttatgctccttgctctttctgcatgtgttgctaacgcgacaattttcccttaatgcttacaagctcctatagctccccttcttcccccataccttccatcaatgatagtttcagtatgtgaaaacccatcttttcaaccctataggctcctacaagcaattctattatgcaacatacctttatcacccttgtttcatcaatcgctagccctatcattggtgcatgtcattggtactaatcatcaggtgttcatcatttgtagcaacttgtgctacctgt

SEQ ID NO: 21005 - DNA, 401 bp, Zea mays
  Clone ID: LIB3152-003-P1-K1-D11
cagcattcagaaacacaccatttgtttcgcactagcaacaacctaacaacaatggctaccaagatattagccctccttgcgcttcttgcccttttagtgagcgcaacaaatgcgttcattattccacagtgctcacttgctcctagtgccattattccacagttcctcccaccagttacttcaatgggcttcgaacatccagccgtgcaagcctacaggctacaactagcgcttgcggcgagcgtcttacaacaaccaattgcccaattgcaacaacaatccttggcacatttaaacctacaaaccatcgcaacgcaacagcaacaacagttttctgccatcactgagccacctagccgtggtgaaccctgtcgcctacttgcaacagcagctacttgcat

SEQ ID NO: 21006 - DNA, 407 bp, Zea mays
  Clone ID: LIB3152-003-P1-K1-D3
caactagcaacatagaaagcacaatagtgtaccaacaatggcagccaaaatattttgcctccttatgctccttggtctttctgcaagtgctgctacggcgaccattttcccgcaatgctcgcaagctcctatagcttcccttcttcccccgtacctctcaccagcggtgtcttcggtatgtgaaaacccaattcttcaaccctacaggatccaacaggcaatcgcagctggcatcttacctttatcacccttgttcctccaacaatcatcagccctattacaacagttacctttggtgcatttattggcacaaaacatcagggcacaacaactacaacaacttgtgctagcaaaccttgctgcctactctcagcaacagcagtttcttccattcaaccaactaggtt

SEQ ID NO: 21007 - DNA, 404 bp, Zea mays
  Clone ID: LIB3152-003-P1-K1-D4
cagatctcccccaaatccacccgtttttacctccgcttcaagatgcagatctttgtgaaaaccctgaccggcaagactatcaccctcgaggtggagtcgtctgacaccattgacaacgttaaggccaagatccaggacaaggagggcatccccccagaccagcagcggctcatcttcgctggcaaacagcttgaggacgggcgcacgcttgctgactacaacatccagaaggagagcaccctccaccttgtgctccgcctcaggggaggcatgcagatctttgtgaaaaccctgaccggcaagactatcaccctcgaggtggagtcctttgacaccattgacaacgtcaaggccaagatccaggacaaggagggcatccctccagaccagcagcggctcatctt

SEQ ID NO: 21008 - DNA, 405 bp, Zea mays
  Clone ID: LIB3152-003-P1-K1-D5
aaagcacaatagtgtaccaacaatgtcagccaaaatattttgcctccttatgctccttggtctttctgcaagtgctgctacggcgaccattttcccacaatgctcacaagctcctatagcttcccttcttcccccgtacctctcaccagcggtgtcttcggtatgtgaaaacccaattcttcaaccctataggatccaacaggcaatcgcagctggcatcttacctttatcacccttgttcctccaacaatcatcagccctattacagcagttacctttggtgcatttattggcacaaaacatcagggcacaacaactacaacaacttgtgctagcaaaccttgctgcctactctcagcaacaacagtttcttccattcaaccaactagctgcattgaactctgc

SEQ ID NO: 21009 - DNA, 397 bp, Zea mays
  Clone ID: LIB3152-003-P1-K1-D6
gcaacatagaaagcacaatagtgtttcatctaatggcagccaaaatattttgcttccttatgctccttggtctttctgcaagtgttgctaccgcaaccattttcccacaatgctcacaagctcctatagcttcccttcttcccccatacctctcaccagcggtgtcttcaatgtgtgaaaacccaattgttcaaccctacaggatccaacaggcaatcgcaacaggcatcttaccattatcacccttgttccttcaacaaccgtcagccctattacagcagttacctttggtccatttggtggcacaaaacatcagggcacaacaactacaacaacttgtgctagcaaaccttgctgcatactctcagcaacattagttttttccattcaaccaact

SEQ ID NO: 21010 - DNA, 74 bp, Zea mays
  Clone ID: LIB3152-003-P1-K1-D8
gaaccattgaaatggaaaggaataatatataaggaaaaaagatgattggaaactgatagttggttcatttagcg

SEQ ID NO: 21011 - DNA, 392 bp, Zea mays
  Clone ID: LIB3152-003-P1-K1-E1
tgcaacaacagcttctaccattccttcttcaagctgtggcaaacattgctgctttcttgagacaacaacatttgttgccattttacccacaggttgtgggaaacattaatgccttcttgcaacagcaacaattgctaccattctacccacagaatgtggcaaacattgttgccttcttacaacaacaacaattgttgccatttagccaacatgctttgacgaatcctaccaccttattgcaaccgcccaccattggtggtgccatcttctagattttttatgatttatactgtaataataaagttctcatgctgatatgtgcgacctctcagtaataaagtattagagatctatatttttaaaaaaataattaaaatattaaattttaattt

SEQ ID NO: 21012 - DNA, 406 bp, Zea mays
  Clone ID: LIB3152-003-P1-K1-E2
cccacgcgtccggcggccaagatattttccatccttatgctcctggctctttctgcatgtgttgctaacgcgaccatttttcctcaatactcacaagctcctatagctgcccttcttcccccataccttccatcaatgaccgcttcagtatgtgaaaacccagcccttcaaccctacaggctccaacaagcaatcgcaacaagcaacttacctttatcacccctgttctttcaacaatcgccagccctatctttggtgcagtcattggtacaaaccatcagggcacaacagctgcagcaactcgtgctaccagtgatcagccaagtagctctggcaaacctttctccctactctcagcaacaacaatttcttccattcaaccaactgtctacactgaaccctgctg

SEQ ID NO: 21013 - DNA, 357 bp, Zea mays
  Clone ID: LIB3152-003-P1-K1-E3
atagccgctggctagctagcttagttgattcatttagcggcgatgattgagtaataatgtgtcacgcatcaccatgggtggcagtgtcagtgtgagcaatgacctgaatgaacaattgaaatgaaaagaaaaaagtattgttccaaatttaaaaaaaaaaaaaaaaaaaaaaaaaaataaataaaaaaataaaataaataataaaaaaaaaaataaaaaaaaaaaaaaaaaaaaaagggtaaaaaaataataaaaaataaaaaaaaaataaaaaaggggggccctttttaagggaccaaatttttctacccggtttttgcaagtaaaaattttttttttggggcccccaaaataaaa

SEQ ID NO: 21014 - DNA, 402 bp, Zea mays
  Clone ID: LIB3152-003-P1-K1-E4
cagaaacacaccaagcgaagcgcactagttacaacctaacaacaatggctaccaagaggttatccctccttgcgcttcttgcgctttttgcgagcgcaacaaatgcgtccattattccacaatgctcacttgctcctagttccattattccacagttcctcccaccagttacttcaatggccttcgaacacccagctgtgcaagcctataggctacaacaagcgattgcggcgagcgtcttacaacaaccaattgcccaattgcaacaacaatccttggcacatctaacaatacaaaccatcgcaacgcaacagcaacaacagttcctaccagcactgagccacctagccatggtgaaccctgtcgcctacttgcaacagcagctgcttgcatccaacccac

SEQ ID NO: 21015 - DNA, 269 bp, Zea mays
  Clone ID: LIB3152-003-P1-K1-E5
cagcaaactaacaaggcaacatcgttcgatcgaggagaggagctgcgttcttggcgtggtggcggaatcggcgatctaccggctgccggaggagtgcgtggcatacgccatctcgctgacgacgcccggcgacgcgtgccactcgtctgcggtgtcgccggccttcagggccgccgcggactccgacgccgtctgggcgcggttactgctgccggtccacgccgacatcctggcgcgcgcctactacccgggtgctgtttccgtcggtt

SEQ ID NO: 21016 - DNA, 310 bp, Zea mays
  Clone ID: LIB3152-003-P1-K1-E6
atccttagtgaatctatatctccattttttgcagcacaacaactacaacagggggtgctttcaacaatcaatcaagtagttgcagcgaaccttgctgcttacctccagcaacaacaatttcttccattcaatcaactagctggggtgaaccttgctgctttacttgcaggcacaacatcttctaccattcaaccaacttgtcatgagccctgctgccttctttctgcatcaacagttgctgtctttccatcttacaagttgtggtaattcattgcttcttttttgtaacaacatcaattgttttccattt

SEQ ID NO: 21017 - DNA, 383 bp, Zea mays
  Clone ID: LIB3152-003-P1-K1-E7
gttgcaaaccagcaacaacaatatgttacaacagtttctgccaacgctcagtcaactagccatggtgaaccctgccgcctacgtacaacaacaacaactgctttcatctagcccgctcgctgtgggcaatgcacctacatacctgcaacaacaattgttgcaacagattgtaccagctctgactcaactagctgtggcaaaccctgttgcctacttgcaacagctgcttccattcaaccaactgactctgtcgaactctgctgcgtacctacaacagcgacaacagttacttaatccattggtagtggctaacccattggtcgccgtctttctacagcagcaacaattgctgccatacaaccagttctttttgatgaatcctg

SEQ ID NO: 21018 - DNA, 343 bp, Zea mays
  Clone ID: LIB3152-003-P1-K1-E8
aagcaacatagaaagtggaattttttttcaacaatagagcaacaatggcgaccgggatatttttcctccttatgctccttgctcttactgcatgtgtttgctaacgctacaattttccctcaatgcttacaagctcctatagcttcccttcttcccccataccttccatcaatgattgcttcagtatgtgaaaacccagctttttaaccctataggctccaacaagcaatctcatcaagcaacatacttttatcacccttgtattaacaatctccagtcctatttttggtgcttatcaatgttacacactcttattgcacatcatcttcttcaacttgtgctt

SEQ ID NO: 21019 - DNA, 396 bp, Zea mays
  Clone ID: LIB3152-003-P1-K1-E9
ttcagcattcagaaacacacctatgttgaagcgcactagcaacaacctaacaacagtggttaccaagatattagccctccttgcgcttcttgcccttttagtgagcgcaacaaatgcgttcattattccacagtgctcacttgctcctagtgccattattccacagtttctcccaccagttacttcaatgggcttcgaacatccagccgtgcaagcctacaggctacaactagcgcttgcggcgagcgtcttacaacaaccaattgcccaattgcaacaacaattcttggcacatctaaacctacaaaccattgcaacgcaacagcaacaacagtttttgccatcactgagccacctagccgtggtgaaccctgttgcctacttgcaacagcagct

SEQ ID NO: 21020 - DNA, 406 bp, Zea mays
  Clone ID: LIB3152-003-P1-K1-F1
cgtcagcctagcaattagctcatctactccagattggagaactcgacaccatgaaggtgctgatcgttgcccttgctctcctggcgctcgctgcgagcgccgcctccagtacaagcggcggctgtggctgccagacaccaccgtttcatctaccgcctccgttctatatgccgcctccgttctatctgccgccgcagcagcagccgcagccatggcaataccccactcaaccaccgcagctaagcccgtgccagcagttcggatcctgcggcgtcggcagcgtcggcagcccgttcctgggccagtgcgtcgagttcctgaggcaccagtgcagcccggcggcgacgccctacggctcgccacagtgccaggcgctgcagcagcagtgctgccaccagatcaggca

SEQ ID NO: 21021 - DNA, 263 bp, Zea mays
  Clone ID: LIB3152-003-P1-K1-F10
gcctcatccccagccacacctttgtttgtgccaacagccgcatccaagggggggccagctgcagggaacctgcggctatggcagcaccccgatcctgggccagagcgtcgcgtttctgaggcatcagtgcagcccgacggcgacgccctactgctcgcctcagtgccagtcgttgcggcagcagtgttgccagcagctcaagcaggtggagccgtagcaccggtaccaggcgatcttcggcttggtccttcagtccatcctgt

SEQ ID NO: 21022 - DNA, 271 bp, Zea mays
  Clone ID: LIB3152-003-P1-K1-F12
acttaatgtgtaatcctcaaacattttttttatcaacattggagaccaagatagtggggcttttcttatgcttctggctctttctacatgcgttgctaacgctacaatttttcctcaatcgctcacaagcttctatagcttaccttctaactacataccattcatcaaattttgctacattacgttaaaaccctactctttaaccatatttgcttcatcatgttatcgctatacgcaacatacctttaatgcccttgttgagttaaacaat

SEQ ID NO: 21023 - DNA, 401 bp, Zea mays
  Clone ID: LIB3152-003-P1-K1-F2
gtcagaagctcaaatactgatctcactgatccagtatggctatggcaaaggcaggcgcgccgagggtctcggcggcccagctggtgactctcgggctatcactcctctgcgctgtcgccggcccggccgccgcgcagaactgcggctgccagccaaacgtatgctgcagcaagtttggctactgcggcacgaccgacgagtactgcggcgacgggtgccagtcgggcccgtgccgctcgggcggcggcggcagcagtggcggcggtggtgcgaacgtggctagcgtcgtcaccggctccttcttcaacggcatcaagagccaggccgggagcgggtgcgagggcaagaacttctacacccggagcgcgttcctgagcgccgtcaaggcgtacccaggcttc

SEQ ID NO: 21024 - DNA, 405 bp, Zea mays
  Clone ID: LIB3152-003-P1-K1-F3
cagaaacacaccaagcgaagcgcactatcaacgacctaacaacaatggctaccaagatattagccctccttgcgcttcttgccctttttgtgagcgcaacaaatgcgttcattattccacaatgctcacttgctcctagtgccattattccacagttcctcccaccagttacttcaatgggcttcgaacacctagctgtgcaagccaacatgcaacaacaagcgcttgcggcgagcgtcttacaacaaccaattgcccaattgcaacaacaatccttgccacatctaacaatacaagccatcacaacgcaacagcaacaacagttcctaccagcactgagccacctagccatggtgaaccctgccgcctacttgcaagagcagctgcttgcatccaacccacttg

SEQ ID NO: 21025 - DNA, 403 bp, Zea mays
  Clone ID: LIB3152-003-P1-K1-F4
gcaggctgtccaggatcttggagaattaccagaccaactccgggaagattctgtggggtgagaagcacaagaacctgagtgcagagatcgacagagtcaagaaggagaacgacaacatgcagattcagctcaggcatctgaaaggcgaggacctgaactccctgcagcccagggagctgatcgctattgaagagggcctccagaatgggcagaccaacatgcgcgagaagcagatggactactggaggatgcacacgacgaatgggaagatgctggaggacgaacataagatactgacttttaggatgcaccaacaggctgttgatctgagcggcggcatgagggagctggagaccggataccatcaggtccagcacgacagggatttcatttcccagatgcc

SEQ ID NO: 21026 - DNA, 397 bp, Zea mays
  Clone ID: LIB3152-003-P1-K1-F5
gcattcagaaacacaccaagcgaagttctctagcaacaacctaacaacaatggctaccaagatattatccctccttgcgcttcttgcgctttttgcgagcgcaacaaatgcgtccattattccacaatgctcacttgctcctagttccattattccacagttcctcccaccagttacttcaatggccttcgaacacccagctgtgcaagcctataggctacaacaagcgattgcggcgagcgtcttacaacaaccaattgcccaattgcaacaacaatccttggcacatctaacaatacaaaccatcgcaacgcaacagcaacaacagttcctaccagcactgagccacctagccatggtgaaccctgtcgcctacttgcaacagcagctgcttgca

SEQ ID NO: 21027 - DNA, 442 bp, Zea mays
  unsure at all n locations
  Clone ID: LIB3152-003-P1-K1-F6
cgggtcggacccacgccgtccggcacaatatgtgtacccaaccaatggcttctcttaatanttttgcctaccttatgctcctgggggctttctgcaagttgctgcatacgcgcgacccattttcccgcaatggctcgcaagactcctatagcattcccttcttccccccgtaccctctcaccagctggtgtctttcggtatgtgaaatacccaattcttcaaccctacaggatccaacaggcaatcgcagctggcatcttacctttatcacccttgttcctccaacaatcatcagccctattacaacagttacctttggtgcatttattggcacaaaacatcagggcacaacaactacaacaacttgtgctagcaaaccttgctgcctactctcagcaacagcagtttcttccattcaaccaactaggttcattgaactctg

SEQ ID NO: 21028 - DNA, 281 bp, Zea mays
  Clone ID: LIB3152-003-P1-K1-F7
tccacgcgtacgcaactagttttttttaaagcacaatagtgtaccaacaatggcggccaatatatttggcttccttatgctcctaggtctttttgtaagtgctgcttcctcaaccattttcccacattgctcacaagcttctattgctttctttctttccccatacctcttaccagcggtgttttcagtctgttaaaacccaattctacaaccttacaggatccaacaggtaatcgcagtatgcattctacctctatcacccttgtttcctccaacattcc

SEQ ID NO: 21029 - DNA, 403 bp, Zea mays
  Clone ID: LIB3152-003-P1-K1-F8
caacaagcaacatagaaagtggtattcagtagcaacaatagagcaacaatggcgaccaagatattttccctccttatgctccttgctctttctgcatgtgttgctaacgcgacaattttccctcaatgctcacaagctcctatagcttcccttcttcccccataccttccatcaatgatagcttcagtatgtgaaaacccagctcttcaaccctataggctccaacaagcaatcgcagcaagcaacatacctttatcacccttgtttcaacaatcgccagccctatctttggtgcagtcattggtacaaaccatcagggcacagcagctgcagcaactcgtgctacctgtgatcaaccaagtagctctggcaaacctttctccctactctcagcaacaacaat

SEQ ID NO: 21030 - DNA, 311 bp, Zea mays
  Clone ID: LIB3152-003-P1-K1-F9
caaatactgatctcactgatccattttggctatggcaaaggcaggcgcgccgagggtctcggcggtccagctggtgactctcgggctatcactcctctgcgctgtcgccggcccggccgccgcgcagaactgcggctgccagccaaacgtatgctgcagcaagtttggctactgcggcacgaccgactagtactgcggcgacgggtgccagtcgggcccgtgccgctcgggcggcggctgcagcagaggctgcggtggtgctaacgttgcttgcgtctttaccggcttcttcttcaacggttttaagagcc

SEQ ID NO: 21031 - DNA, 405 bp, Zea mays
  Clone ID: LIB3152-003-P1-K1-G1
gaaacacaccaagcgaagcgcactagcaacaacctaacaacaatggctaccaagatattatccctccttgcgcttcttgcgctttttgcgagcgcaacaaatgcgtccattattccacaatgctcacttgctcctagttccattattccacagttcctcccaccagttacttcaatggccttcgaacacccagctgtgcaagcctataggctacaacaagcgattgcggcgagcgtcttacaacaaccaattgcccaattgcaacaacaatccttggcacatctaacaatacaaaccatcgcaacgcaacagcaacaacagttcctaccagcactgagccacctagccatggtgaaccctgtcgcctacttgcaacagcagctgcttgcatccaacccacttgct

SEQ ID NO: 21032 - DNA, 349 bp, Zea mays
  Clone ID: LIB3152-003-P1-K1-G10
attagctttatctactccagtttttataagaacccgatcgacaccatgagggtgttgctcgttgccctcgctctcctggctctcgctgcgagcgccacctccacgcatacaagcggcggctgctgctgccagccaccgccgccggttcatctaccgccgccggtgcatttgccacctccggtttacctgccaccatcggtgcatcttccaccgtcggtccatgtgccttctccggtttatttgccgtcgtcaccatgccactaccctatctatcctcccccggcttagtctcatcctcagtcacacccatgcccgtgccaaccagtcgtattcaatcccgttgtcattt

SEQ ID NO: 21033 - DNA, 196 bp, Zea mays
  Clone ID: LIB3152-003-P1-K1-G12
cattagaaactcaccaattgttctcattaccaacaacctaacaacactgtctgctttatattatccctccttcccctactcactctttatgctagcgcaacaaatgctttcattattccacaatgctcactttctccaacttccattattacacagttcctcccaccagtcacttcaatggccttataaacaccca

SEQ ID NO: 21034 - DNA, 405 bp, Zea mays
  unsure at all n locations
  Clone ID: LIB3152-003-P1-K1-G2
gcaataggctcatcgcctccagattggagaactcgacaccatgaaggtgctgatcgttgcccttgctctcctggcgctcgctgcgagcgccgnctccagtacaagcggcggctgtggctgccagacaccaccgtttcatctaccgcctccgttctatatgccgcctccgttctatctgccgccgcagcagcagccgcagccatggcaataccccactcaaccaccgcagctaagcccgtgccagcagttcggatcctgcggcgtcggcagcgtcggcagcccgttcctgggccagtgcgtcgagttcctgaggcaccagtgcagcccggcggcgacgccctacggctcgccacagtgccaggcgctgcagcagcagtgctgccaccagatcaagcaggtggagcc

SEQ ID NO: 21035 - DNA, 406 bp, Zea mays
  Clone ID: LIB3152-003-P1-K1-G3
agcgaagcgcactagcaacaaccttacatcaatggctaccaagatattatccctccttgcgcttcttgcgctttttgcgagcgcaacaaatgcgtccattattccacaatgctcacttgctcctagttccattattccacagttcctcccaccagttacttcaatggccttcgaacacccagctgtgcaagcctataggctacaacaagcgattgcggcgagcgtcttacaacaaccaattgcccaattgcaacaacaatccttggcacatctaacaatacaaaccatcgcaacgcaacagcaacaacagttcctaccagcactgagccacctagccatggtgaaccctgtcgcctacttgcaacagcagctgcttgcatccaacccacttgctctagcaaacgta

SEQ ID NO: 21036 - DNA, 404 bp, Zea mays
  Clone ID: LIB3152-003-P1-K1-G4
cggacgcgtgggtttgagcattcataaacacaccaagcgaagcacattagcaacaacctaacaacaatggctaccaagatattatccctccttgcgcttcttgcgctttttgcgagcgcaacaaatgcgttcattattccacaatgctcacttgctccaagttccattattacacagttcctcccaccagttacttcaatgggcttcgaacacccagctgtgcaagcctataggctacaacaagcaattgcggcgagcgtcttacaacaaccaatttcccagttgcaacaacaatccttggcacatctaacaatacaaaccatcgcaacgcaacagcaacaacaattcctaccagcactgagccacctagccatggtgaaccctgccgcctacttgcaacagca

SEQ ID NO: 21037 - DNA, 406 bp, Zea mays
  Clone ID: LIB3152-003-P1-K1-G5
caacaagcaacatagaaagtggaatctcagtagcaacaatagagcaacaatggagaccaagatattttccctccttatgctccttgctctttctacatgtgttgctaacgcgacaattttccctcaatgctcacaagctcctatagcttccctttttcccccataccttccatcaattatagcttcagtatgtgaaaacccagctcttcaaccatataggcttcaacaagcaatcgcagcaagcaacatacctttatcgcccttgttgtgtcaacaatcgccagccctatctttggtgcagtcattggtacaaaccatcagggcacaacagctgcagcaactcgtgctacctgtgatcaaccaagtagctctggcaaacctttcttcctactctccgcaacaacaa

SEQ ID NO: 21038 - DNA, 406 bp, Zea mays
  Clone ID: LIB3152-003-P1-K1-G6
aagcgaagcacattagcaacaacctaacatcaatggctaccaagatattatccctccttgcgcttcttgcgctttttgcgagcgcaacaaatgcgttcattattccacaatgctcacttgctccaagttccattattacacagttcctcccaccagttacttcaatgggcttcgaacacccagctgtgcaagcctataggctacaacaagcaattgcggcgagcgtcttacaacaaccaatttcccagttgcaacaacaatccttggcacatctaacaatacaaaccatcgcaacgcaacagcaacaacaattcctaccagcactgagccacctagccatggtgaaccctggcgcctacttgcaacagcagttgcttgcatcaaacccacttgctctggcaaacgt

SEQ ID NO: 21039 - DNA, 376 bp, Zea mays
  Clone ID: LIB3152-003-P1-K1-G7
attagctttatctactccagagcgctataagaacccgatcgacaccatgagggtgttgctcgttgccctcgctctcctggctctcgctgcgagcgccacctccacgcatacaagcggcggctgcggctgccagccaccgccgccggttcatctaccgccgccggtgcatctgccacctccggttcacctgccacctccggtgcatctcccaccgccggtccacctgccgccgccggtccacctgccaccgtcggtccatgtgccgtcgtcggttcatctgccgcctgcaccatgccactaccctactgaaccgacccggtctcagtcttattcccagccacacccatgcccgtgccaacagtcgtttacaagccct

SEQ ID NO: 21040 - DNA, 394 bp, Zea mays
  Clone ID: LIB3152-003-P1-K1-G9
aacaaatgcgttcattattccacattgctcacttgctcctagtgccattatacgacagttcctccgaccagttacttcaatgggcttcgaacacctagctgtgcaagcctacaggctacaacaagcgcttgcggcgagcgtcttacaacaaccaattaaccaattgcaacaacaatccttggcacatctaaccatacaaaccatcgcaacacaacagcaacaacagttcctaccagcactgagccaactagatgtggtgaaccctgtcgcctacttgcaacagcaggtgcttgcatccaacccacttgctctggcaaacgtagctgcataccaacaacaacaacaattgcaaccagttctgccagcgctcagtcaactagccatggtgaaccct

SEQ ID NO: 21041 - DNA, 405 bp, Zea mays
  Clone ID: LIB3152-003-P1-K1-H1
attcagaaacacaccaagcgaagcgcactagcaacaacctaacaacaatggctaccaagatattagccctccttgcgcttcttgcccttttagtgagcgcaacaaatgcgttcattattccacagtgctcacttgctcctagtgccattattccacagttcctcccaccagttacttcaatgggcttcgaacatccagccgtgcaagcctacaggctacaactagcgcttgcggcgagcgtcttacaacaaccaattgcccaattgcaacaacaatccttggcacatctaaacctacaaaccatcgcaacgcaacagcaacaacagtttctgccatcactgagccacctagccgtggtgaaccctgtcgcctacttgcaacagcagctacttgcattcaacccac

SEQ ID NO: 21042 - DNA, 380 bp, Zea mays
  Clone ID: LIB3152-003-P1-K1-H10
ttattgagaccaactagctttatataaagcacaatagtgtaccaacgatgtcggtcaaaatattttgcctccttatgctccttggtctttctgcaagtgctgctacggcgaccattttcccgcaatgctcacaagctcctatagcttcccttctttccccgtacctttcaccagcggtgtcttctgtatgtgaaaacccaattcttcaaccctataggatccaacaggcaatcgcagctggcatcttacctttatcaccctttgtccttcaacaatcatcagcccttattcagcagttacctttggtgcatttattggcacaaaaacatcatggtacaacaacttctaccacttgtgctagcaaaccttggtggctactc

SEQ ID NO: 21043 - DNA, 174 bp, Zea mays
  Clone ID: LIB3152-003-P1-K1-H11
tcgtctggcagcatagaatgctctttattttaccaacaatggcagccaaaattgtgagtctcctaatgctccttgagctcctccgcacgatgctgctacaggtgacacattttcccgcatttgcatcgcaagcttcccatatgctattctatcttccttccgacctttttactc

SEQ ID NO: 21044 - DNA, 400 bp, Zea mays
  Clone ID: LIB3152-003-P1-K1-H12
aaagcacaatagtgtaccaacaatgtgcagccaaaatattttgcctccttatgctccttggtctttctgcaagtgctgctacggcgaccattttcccgaaatgctcgcaagctcctatagcttcccttcttcccccgtacctctcaccagcggtgtcttcggtatgtgaaaacccaattcttcaaccctacaggatccaacaggcaatcacagctggcatcttacctttatcacccttgttcctccaacaatcatcagccctattacatcagttacctttggtgcatttattggcacaaaacatcagggcacaacaactacaacaacttgtgctagcaaaccttgctgcctactctcagcaacagcagtttcttccattcaaccaactagctgcattgaa

SEQ ID NO: 21045 - DNA, 407 bp, Zea mays
  Clone ID: LIB3152-003-P1-K1-H2
ttcagaaacacaccaagcgaagcgcactagcaacaacctaacaacaatggctaccaagatattagccctccttgcgcttcttgcccttttagtgagcgcaacaaatgcgttcattattccacagtgctcacttgctcctagtgccattattccacagttcctcccaccagttacttcaatgggcttcgaacatccagccgtgcaagcctacaggctacaactagcgcttgcggcgagcgtcttacaacaaccaattgcccaattgcaacaacaatccttggcacatctaaacctacaaaccatcgcaacgcaacagcaacaacagtttctgccatcactgagccacctagccgtggtgaaccctgtcgcctacttgcaacagcagctacttgcattcaacccacttg

SEQ ID NO: 21046 - DNA, 402 bp, Zea mays
  Clone ID: LIB3152-003-P1-K1-H3
gccgatcatcttctcgatggcgcgtctcgaccgcgtgaagaacatgacaggcctggtggagatgtacggcaagaacgcgcgcctgagggagctggcgaacctcgtgatcgtcgccggtgaccacggcaaggagtccaaggacagggaggagcaggcggagttcaagaagatgtacagcctcatcgacgagtacaagttgaagggccatatccggtggatctcggcgcagatgaaccgtgtccgcaacggggagctgtaccgctacatttgtgataccaagggcgcattcgtgcagcctgcgttctacgaagcgttcggcctgactgtgatcgagtccatgacgtgcggtctgccaacgatcgcgacctgccatggtggccctgctgagatcatcgtggacgg

SEQ ID NO: 21047 - DNA, 370 bp, Zea mays
  Clone ID: LIB3152-003-P1-K1-H4
caaaatttttggcccaataagcgtccttggtttttctgcaagggctgctaccgcaagcattttcccgcaatgctcacaagctcctatagcttcccttcttcccccatacctttcaccagcgatgtcttcagtatgtgaaaatccaattcttctaccctacaggatccaacaggcaatcgcagcaggcatcttacctttatcacccttgttcctccaacaatcatcagccctattacagcagttacctttggtgcatttattggcacaaaacatcagggcacaacaactacaacaactcgtgctagcaaaccttgctgcctactctcagcaacagcagttacctttggtgcatttgttggcacaaaacatc

SEQ ID NO: 21048 - DNA, 423 bp, Zea mays
  unsure at all n locations
  Clone ID: LIB3152-003-P1-K1-H5
cgaaaggcggcagtgcgtagaggaggatcgtcttatacagaaccagcatgaagatggtcatgcgttctcgtcgtgtggcctggctctgtcagctttgccagcgcctctgcaatgcagatgnccctgcccctgcgcggggnctgcagnggcttgtacccggcgctggcgccggccctgacgacccgatgatgggcgccggcgggctgtacccctacgcggagtacctgaggcagccgcagtgcagcccgctggcggcggcgccctactacgccgggtgtgggcagacgagcgccatgtaccagccgctccggcaacagtgctgccagcagcagatgaggatgatggacgtgcagtccgtcgcgcagcagctgcagatgatgatgcagcttgagcgtgccgctgccgccagcagcagcctgtacg

SEQ ID NO: 21049 - DNA, 389 bp, Zea mays
  Clone ID: LIB3152-003-P1-K1-H6
gcgatcagctttatcggatgaatttcattttacttgtgcagaaacatgtcgaggacgatgctgatatcactatatcatgtgctcctgttgatgagagccgagcttctaaaaatgggctagtgaagattgatcatactggacgtgtacttcaattctttgaaaaaccaaagggtgctgatttgaattctatgagagttgagaccaacttcctgagctatgctatagatgatgcacagaaatatccataccttgcatcaatgggcatttatgtcttcaagaaagatgcacttttagaccttctcaagtcaaaatatattcaattacatgactttggatctgaaatcctcccaagagctgtactagatcatagtgtgcatgcatgcattttt

SEQ ID NO: 21050 - DNA, 403 bp, Zea mays
  Clone ID: LIB3152-003-P1-K1-H7
gcacaatagtgtaccaacaatggcatccaaaatattttgcctccttatgctccttggtctttctgcaagtgctgctacggcgaccattttcccacaatgctcacaagctcctatagcttcccttcttcccccgtacctctcaccagcggtgtcttcggtatgtgaaaacccaattcttcaaccctataggatccaacaggcaatcgcagctggcatcttacctttatcacccttgttcctccaacaatcatcagccctattacagcagttacctttggtgcatttattggcacaaaacatcagggcacaacaactacaacaacttgtgctagcaaaccttgctgcctactctcagcaacaacagtttcttccattcaaccaactagctgcattgaactctgct

SEQ ID NO: 21051 - DNA, 400 bp, Zea mays
  Clone ID: LIB3152-003-P1-K1-H8
caacaagcaacatagaaagtggaattcagtagcaacaatagagcaacaatggcgaccaagatattttccctccttatgctccttgctctttctgcatgtgttgctaacgcgacaattttccctcaatgctcacaagctcctatagcttcccttcttcccccataccttccatcaatgatagcttcagtatgtgaaaacccagctcttcaaccctataggctccaacaagcaatcgcagcaagcaacatacctttatcacccttgtttcaacaatcgccagccctatctttggtgcagtcattggtacaaaccatcagggcacagcagctgcagcaactcgtgctacctgtgatcaaccaagtagctctggcaaacctttctccctactctcagcaacaac

SEQ ID NO: 21052 - DNA, 389 bp, Zea mays
  Clone ID: LIB3152-005-P1-K1-A1
ctcgttcaaggaggccatgaagatgggagttgaggtgtaccacaacctgaagagcataatcaagaagaagtacggtcaggatgcgacaaatgttggggatgaaggtggttttgcacctaacattcaggaaaacaaagaaggccttgaactattgaaggcagccatagaaaaggctggctacactggaaaggtggtcattggaatggatgttgctgcttctgagttcttcggtgagaaagacaagacttatgatcttaatttcaaggaggagaacaacgatggctcaaacaaaatttcaggcgacagcctgaaagacctgtacaagtcctttgtttctgagtaccctatcgagtcgatcgaagatccatttgatcaggatgactggagca

SEQ ID NO: 21053 - DNA, 271 bp, Zea mays
  Clone ID: LIB3152-005-P1-K1-A10
cagaccattagctttatctttttttgtgcgcagaagaacccgatcgacaccaggagggtgttgctcgttgccctcgctctcctggctctcgctgctagcgccacctcctcgcatacaagcggcggctgcggttgtcagccaccgtcgccggatcatctaccgtcgtcggtgctattgccacctccggttcacctgccaccttcggtgcatttaccaccgccggaccacctgccgacgtcggtccatctgtcaccgtctggtcatgtgccgt

SEQ ID NO: 21054 - DNA, 386 bp, Zea mays
  Clone ID: LIB3152-005-P1-K1-A11
aatattttgcctccttatgctcctttttatttctgcaagtgctgctacggcgaccattttcccgcaatgctcacaagctcctatagcttcccttcttcccccgtacctctcaccagcggtgtcttcggtatgtgaaaacccaattcttcaaccctacaggatccaacaggcaatcgcagctggcatcttacctttatcacccttgttcctccaacaatcatcagccctattacagcagttacctttggtgcatttattggcacaaaacatcagggcacaacaactacaacaacttgtgctagcaaaccttgctgcctactctcagcaacagcagtttcttccattcaaccaactagctgcattgaactctgcttcttatttgcaac

SEQ ID NO: 21055 - DNA, 381 bp, Zea mays
  Clone ID: LIB3152-005-P1-K1-A12
ggcgaccgaagcgccacttgcttgagtagcgaagcgcgagagcaatggcgtcgctgtcgtgcgcctccacgctgccctggacccccgcctcctacccgcggccctcggcggggcgctgcctcacggcctctcgccgggctccgtcgctggtcatcgtcgcccaggggaaggtcaagaagtaccgccaggtcatattgacagacgacatagaagaggtgggggagaaaggggatacactgaaggtgcgagctggattctaccgcaacttcctccttcccaagggcaaggctacacttctgaccccagaagtcctcaaggaaatgcagctggagcaggagagaatagaagctgagaaaaagcgggtaaaagaagacgctcaac

SEQ ID NO: 21056 - DNA, 324 bp, Zea mays
  Clone ID: LIB3152-005-P1-K1-A2
ctcattcgaattcccaggcaggcatgtcgttgaggagggcaggaagaccgaagaccgagccgtgcgggggctcgggacgggaacgggacaggaccccaaaatatgagattctttctgtccgaccgaccgtgcccgtcgacgcgttgttcttgccgggcgagccctacctacggcctgttttactgcagggggatcggatacgccacatgctgcgcgatggtgctttgggtttttggctaccgcttccttatatggaaccccggctttggcttctacgacaaaatcctaggttttatcaagggctacaagcgcacctttaatctc

SEQ ID NO: 21057 - DNA, 499 bp, Zea mays
  unsure at all n locations
  Clone ID: LIB3152-005-P1-K1-A3
taccggaatcggccgggtccgagcccacgcccgtccgtcccacgcccgtccgtattgggagaccaacttatgcatcttatagaaagggcacaatnnagtgtacccagaccaatgtgcatgtccccaaaatnaattttggcccttcccttatngncctccttgnnngtctttcnntgcaagtgcctgctttacggcngnnaccaattttcnnccgcaatggctttcgcaaggctctctattagctnnntcccttctnnntcccccgtacccttctcactcanngcggtgtcttttcggtatttgtgaataacctnncaattcttcaaaccctacatggtatctcaacaggcaattcgcagcttggcatttcttacctttatcancccttgttctctccaactnaatcatcagccctattacaacagttactctatggtgcatttattggcacaaaacatcagggcacaacaactacaacaacttgtgctagcaaaccttg

SEQ ID NO: 21058 - DNA, 371 bp, Zea mays
  Clone ID: LIB3152-005-P1-K1-A4
attgaactctgcttcttatttgcatcaactacaactaccattcagccagctacctgctgcctacccccagcaatttcttccattcaaccaactggcagcattgaactctcctgcttatttacagcagcaacaactactaccattcagccagctagctggtgtgagccctgctaccttcttgatacaaccacagttgttgccgttctaccagcacgctgcgcctaacgctggcaccctcttacaactgcaacaattgctgccattcaaccaacttgctttgacaaacccagcagcgttctaccaacaacccatcattggtggtgccctcttttagatttcttatgagttatagttcaataataaagtttttt

SEQ ID NO: 21059 - DNA, 389 bp, Zea mays
  Clone ID: LIB3152-005-P1-K1-A5
ctcgtcgcccgcgagcagctacgactgcttcttcaaggtcctgcttatcggggattcggccgtcggcaagagcagcctcctcgtcagcttcgtctccgccgctcacatcgacgacgacatcgcgccaaccataggggtggattttaaaatcaaatttctcagtgtgggtgggaagaaactaaaactgacaatatgggacactgccggtcaagagaggttcaggacaattaccagctcttactacaggggtgctcatgggattattttagtttatgacgttacaaagagggagagtttcacaaatttggctgatgtgtggaccaaggaaatagagttacactcaacaaataaggaatgcatcaaaatgcttgttggaaataagtggacaa

SEQ ID NO: 21060 - DNA, 392 bp, Zea mays
  Clone ID: LIB3152-005-P1-K1-A6
atttagaccaactagcaacatagattgctctatagtgtaccaacaatggcagccaaaatattttgcctccttatgctccttggtatttctgcaagtgctgctacggcgaccattttcccgcaatgctcacaagctcctatagcttcccttcttcccccgtacctctcaccagcggtgtcttcggtatgtgaaaacccaattcttcaaccctacaggatccaacaggcaatcgcagctggcatcttacctttatcacccttgttcctccaacaatcatcagccctattacagcagttacctttggtgcatttattggcacataacatcagggcacaacaactacaacaacttgtgctagcaaaccttgctgcctacttttagcaacagcaatt

SEQ ID NO: 21061 - DNA, 354 bp, Zea mays
  Clone ID: LIB3152-005-P1-K1-A7
cgcctacgcttactccaggacacggagggcatccttaccttgaccgagcacgcctcatcttcgcgggcaagcatctggaggatggccgcaccctggcggactacaacatccagaaggagagcaccctccacctggtgctccgcctcaggggtggcatgcatatttttgtgaagacattgactggcaagaccatcaccttggaggtggagagctctgacaccattgacaatgtgaaggccaagatccaggacaaggagggcattcccccagaccagcagcgtctgatctttgctgtcaagcagctggtggatggtcgcaccctcacggactacaacagtccagatggagagtacc

SEQ ID NO: 21062 - DNA, 384 bp, Zea mays
  Clone ID: LIB3152-005-P1-K1-A8
cagaaacacaccaagcgaatcgcactagcaacaacctaacaacaatggctaccaagatattatccctccttgcgcttcttgcgctttttgcgagcgcaacaaatgcgtccattattccacaatgctcacttgctcctagttccattattccacagttcctcccaccagttacttcaatggccttcgaacacccagctgtgcaagcctataggctacaacaagcgattgcggcgagcgtcttacaacaaccaattgcccaattgcaacaacaatccttggcacatctaacaatacaaaccatcgcaacgcaacagcaacaacagttcctaccagcactgagccacctagccatggtgaaccctgtcgcctacttgcaacagcagc

SEQ ID NO: 21063 - DNA, 384 bp, Zea mays
  Clone ID: LIB3152-005-P1-K1-A9
gcaacatagaaagtggaattcagtttcaacaatagagcaacaatggagaccaagatattttccctccttatgctccttgctctttctacatgtgttgctaacgcgacaattttccctcaatgctcacaagctcctatagcttccctttttcccccataccttccatcaattatagcttcagtatgtgaaaacccagctcttcaaccatataggcttcaacaagcaatcgcagcaagcaacatacctttatcgcccttgttgtgtcaacaatcgccagccctatctttggtgcagtcattggtacaaaccatcagggcacaacagctgcagcaactcgtgctacctgtgatcaaccaagtagctttggcaaacctttcttcctac

SEQ ID NO: 21064 - DNA, 389 bp, Zea mays
  Clone ID: LIB3152-005-P1-K1-B1
ggcgcatagaaagcacaaggatgttccaacattggcagccaaaaaatgtcgcttccttatgctccttggtctttctgcaagtgtggctaccgcaaccattgtaccacaatgctcacaagctgctatatgcttgccttgttccgccatacctctcaccagcggtgccttcaatgtgtgaaaacccaattgttcaaccctacaggatccaacaggcaatcgcaacaggcatcttaccattatcacccttgttcctccaacaaccgtcagccctattacagcagttacctttggtccatttggtggcacaaaacatcagggcacaacaactacaacaacttgtgctagcaaaccttgctgcatactctcagcaacatcagtttctttcattc

SEQ ID NO: 21065 - DNA, 386 bp, Zea mays
  Clone ID: LIB3152-005-P1-K1-B10
ctcgtccccgatctcctcccacccgtatccaagggtttccttctcgaccgtgcggaacgagccagagaacaggtatggcggcggcgcggcacctcagatccggcctccccctcctccgcgcccacctcgcatcctccgaatccgcggccgtcgctcaggtttcgaggggcttcgcgtcgcaggccgctaagcccaccgggaaggagatcaaggttccaaaggctctgtttggcggcacaggcaactatgccagtgcactgttcctcacagcagctaaatctaatgcattggacaaagttgaatctgagattaaagctattgtagaggctttcaagaagagcccggtgttttctcaattcataaaggacttgtcagtttcaaaagcg

SEQ ID NO: 21066 - DNA, 387 bp, Zea mays
  Clone ID: LIB3152-005-P1-K1-B11
attgataccaactagcaacatacatagtgaagtacagtagcaacatcttagcaccaatggcagccaagatttttgccctccttgccctccttgctctttcagcaagtgttgctaccgcgactattattccacaatgctcacaacaatacctctctccggtgacagccgcgagatttgaatacccaactatacaatcctacaggctacaagaggccatcacagcaagcatcttacggtcgttagcattgactgtccaacaaccatatgccctattgcaacaaccatccttagtgaatctatatctccaaagaatcgcagcacaacaactacaacagcagttgcttccaacaatcaatcaagtagttgcagcgaaccttgctgcttacc

SEQ ID NO: 21067 - DNA, 271 bp, Zea mays
  Clone ID: LIB3152-005-P1-K1-B12
ctctcctgcttatttacagcagcatcaactactaccattcagccagctagctggtgtgagccctgctaccttcttgacacaaccacagttgttgccgttctaccagcacgttgcgcctaacgctggcaccctcttacaactgcaacaattgctgccattcaaccaacttgctttgacaaacccagcagtgttctaccaacaacccatcattggtggtgccctcttttagatttcttatgagttatagttcaataataaagttttttatctg

SEQ ID NO: 21068 - DNA, 391 bp, Zea mays
  Clone ID: LIB3152-005-P1-K1-B2
tagcaacatagaaagcacaatagtgtaccaacaatggcagccaaaatattttgcttccttatgctccttggtctttctgcaagtgttgctaccgcaaccattttcccacaatgctcacaagctcctatagcttcccttcttcccccatacctctcaccagcggtgtcttcaatgtgtgaaaacccaattgttcaaccctacaggatccaacaggcaatcgcaacaggcatcttaccattatcacccttgttcctccaacaaccgtcagccctattacagcagttacctttggtccatttggtggcacaaaacatcagggcacaacaactacaacaacttgtgctagcaaaccttgctgcatactctcagcaacatcagtttcttccattca

SEQ ID NO: 21069 - DNA, 394 bp, Zea mays
  Clone ID: LIB3152-005-P1-K1-B3
aagcaacatagaaagtggaatccagtagctacaatagagcaacaatggcgaccaagatattttccctccttatgctccttgctctttctgcatgtgttgctaacgcgacaattttccctcaatgctcacaagctcctatagcttcccttcttcccccataccttccatcaatgatagcttcagtatgtgaaaacccagctcttcaaccctataggctccaacaagcaatcgcagcaagcaacatacctttatcacccttgtttcaacaatcgccagccctatctttggtgcagtcattggtacaaaccatcagggcacagcagctgcagcaacaacaatttcttccattcaaccaactgtctacattgaaccgtgctgcttatttgcagcaaca

SEQ ID NO: 21070 - DNA, 386 bp, Zea mays
  Clone ID: LIB3152-005-P1-K1-B5
cggacgcgtgggtagcaacatagaatgcacaatagtgtaccaacaatggcagccaaaatattttgcttccttatgctccttggtctttctgcaagtgttgctaccgcaaccattttcccacaatgctcacaagctcctatagcttcccttcttcccccatacctctcaccagcggtgtcttcaatgtgtgaaaacccaattgttcaaccctacaggatccaacaggcaatcgcaacaggcatcttaccattatcacccttgttccttcaacaaccgtcagccctattacagcagttacctttggtccatttggtggcacaaaacattagggcacaacaactacaacaacttgtgctagcaaaccttgctgcatactctcagcaaca

SEQ ID NO: 21071 - DNA, 390 bp, Zea mays
  Clone ID: LIB3152-005-P1-K1-B6
aaagtggaatacagtagcaacaatagagcaacaatggcggccaagatattttccatccttatgctccttgctctttctgcatgtgttgctaacgcgaccatttttcctcaatactcacaagctcctatagctgcccttcttcccccataccttccatcaatgaccgcttcagtatgtgaaaacccagcccttcaaccctacaggctccaacaagcaatcgcaacaagcaacttacctttatcacccctgttctttcaacaatcgccagccctatctttggtgcagtcattggtacaaaccatcagggcacaacagctgcagcaactcgtgctaccagtgatcagccaagtagctctggcaaacctttctgcctacttacaacagcttctt

SEQ ID NO: 21072 - DNA, 390 bp, Zea mays
  Clone ID: LIB3152-005-P1-K1-B7
cccacgcgtccggctgcttatttgttgcaacaactattaccattcagccagctagctactgcctactctcagcaacaacaacttcttccatttaaccaattggccgcactgaaccccgctgcttatttgcagcagcaaatactactaccatttagccagctagctgcagcaagccgtgcttccttcttgacacagcaacagttgctgcctttctaccagcagtttgcggctaaccccgcaaccctcttacaactacaacaattgttgccctttgtccaacttgctttgacaaacccagcagcctcctaccaacaacacatcattggtggtgccctcttttagattgcttattagttgtaattcaataataaagttttttggatgatgtat

SEQ ID NO: 21073 - DNA, 391 bp, Zea mays
  Clone ID: LIB3152-005-P1-K1-B8
tagcgcttgcggcgagcgtcttacaacaaccaattgcccaattgcaacaacaatccttggcacatctaaacctacaaaccatcgcaacgcaacagcaacaacagtttctgccatcactgagccacctagccgtggtgaaccctgtcgcctacttgcaacagcagctacttgcatccaacccacttgctctggcgaacgtagctgcataccagcaacaacaacgtctgcaacagtttatgccagcgctcagtcaactagccatggtgaaccctgtcgcctacctacaacagcaacaattgctttcatctagcccgctcgctgtgggcaatgcacctacgtacctacaacaacagttgctgcaacagattgtaccagctctgactcagctagc

SEQ ID NO: 21074 - DNA, 391 bp, Zea mays
  Clone ID: LIB3152-005-P1-K1-B9
caacaagcaacatagaaagtttaattcagtagcaacaatagagcaacaatggcggccaagatattttccatccttatgctccttgctctttctgcatgtgttgctaacgcgaccatttttcctcaatactcacaagctcctatagctgcccttcttcccccataccttccatcaatgaccgcttcagtatgtgaaaacccagcccttcaaccctacaggctccaacaagcaatcgcaacaagcaacttacctttatcacccctgttctttcaacaatcgccagccctatctttggtgcagtcattggtacaaaccatcagggcacaacagctgcagcaactcgtgctaccagtgatcagccaagtagctctggcaaacctttcttcctact

SEQ ID NO: 21075 - DNA, 346 bp, Zea mays
  unsure at all n locations
  Clone ID: LIB3152-005-P1-K1-C10
agactggagaactcgacaccggggggggtgctttatcgggcccgggctctcctggcgctcgctgcgagcgccgtcttcagtacaagcggcggctgtggctgccagacaccaccgnttcatctaccgccttcgttctatatgccgcctccgttctatctgccgccgcagcagcagccgcagccatggcaataccccactcaaccaccgcagctaagcccgtgccagcagttcggatcctgcggcgtcggcagcgtcggcagcccgttcctgggccagtgcgtcgagttcctgaggcaccagtgcagcccggcggcgacgccctacgggtcgccacagagccaggcgc

SEQ ID NO: 21076 - DNA, 390 bp, Zea mays
  Clone ID: LIB3152-005-P1-K1-C12
cggacgcgtgggggtcttcagaccattagctttatctactccagagcgcagaagaacccgatcgacaccatgagggtgttgctcgttgccctcgctctcctggctctcgctgcgagcgccacctccacgcatacaagcggcggctgcggctgccagccaccgccgccggttcatctaccgccgccggtgcatctgccacctccggttcacctgccacctccggtgcatctcccaccgccggtccacctgccgccgccggtccacctgccaccgccggtccatgtgccgccgccggttcatctgccgccgccaccatgccactaccctactcaaccgccccggcctcagcctcatccccagccacacccatgcccgtgccaacagccgcat

SEQ ID NO: 21077 - DNA, 331 bp, Zea mays
  Clone ID: LIB3152-005-P1-K1-C2
atgctacatatacagaggcacacagttttttagcactggaaccatcgtaaccacgatgttttccatgattatgctccttgttgtgcttgtaggcgttgctgagagcgcaacatatgctcaaagtttacaagagcgcatagttgctcttagtgccatattcctacaattaatgatagctgttgcttgaaggggctcagctcatccagcctatcgggtctaccaggtacaactagcgcgtgacatacgtgtattacaacagccaaaacaataatcggcactacatttggtggcacatttgaacctacacatcatggcaccgcaactgcaacaa

SEQ ID NO: 21078 - DNA, 390 bp, Zea mays
  Clone ID: LIB3152-005-P1-K1-C3
cccacgcgtccgtagcaacatagaatgcacaatagtgtaccaacaatggcagccaaaatattttgcctccttatgctccttggtatttctgcaagtgctgctacggcgaccattttcccgcaatgctcacaagctcctatagcttcccttcttcccccgtacctctcaccagcggtgtcttcggtatgtgaaaacccaattcttcaaccctacaggatccaacaggcaatcgcagctggcatcttacctttatcacccttgttcctccaacaatcatcagccctattacagcagttacctttggtgcatttattggcacaaaacatcagggcacaacaactacaacaacttgtgctagcaaaccttgctgtctactctcagcaacagcag

SEQ ID NO: 21079 - DNA, 393 bp, Zea mays
  Clone ID: LIB3152-005-P1-K1-C4
ggccgaccaacgcgtccggcaacataaaaggcacaatagtgttccatcaatggcagccaaaatatttggctggcttatgctccttggtctttctgcaagtgttgctaccgcaaccattttcccacaatgctcacaagctcctatagcttcccttcttcccccatacctctcaccagcggtgtcttcaatgtgtgaaaacccaattgttcaaccctacaggatccaacaggcaatcgcaacaggcatcttaccattatcacccttgttcctccaacaaccgtcagccctattacagcagttacctttggtccatttggtggcacaaaacatcagggcacaacaactacaacaacttgtgctagcaaaccttgctgcatactctcagcaacatca

SEQ ID NO: 21080 - DNA, 403 bp, Zea mays
  unsure at all n locations
  Clone ID: LIB3152-005-P1-K1-C5
accaacgcgtccgccggcacgaggttcgggtgggcgctggttaaggaccgcgaagtggccaggaatatggtctactttgtcgaccgcagcaccaccggcgtatgcaaggagtcgcagatgcgcgccaccaagatcctcggggtcgtcttcgacgcctacgaggtcgtcccgccggccagggccagggccagcggcgcggtgccccgcctcttcgacttcgcgctgcggcgcctggaggagcgctggcgcatcctgcgcgccaccgtggctgccaccggcgccttcagcctgccggaggagaccttcggctactgcaacttcgccaagcaaaccgtgacagcttgccctgcgttcgcgtggctgcngtgtgagaaggagggcgtctaggactgccccgagttgc

SEQ ID NO: 21081 - DNA, 408 bp, Zea mays
  unsure at all n locations
  Clone ID: LIB3152-005-P1-K1-C6
aaggaangggccgaccaacgcgtgcgtacgaggaaacatagaaggtggaattcttttgcaccaatagagcaccaatggagaccaagattttttccctccttatgctccttgctctttctacatgtgttgctaacgcgacaatttttcctcaatgctcacaagctcctatagcttccctttttcccccataccttccatcaattatagcttcagtatgtgaaaacccagctcttcaaccatataggcttcaacaagcaatcgcagcaagcaacatacctttatcgcccttgttgtgtcaacaatcgccagccctatctttggtgcagtcattggtacaaaccatcagggcacaacagctgcagcaactcgtgctacctgtgatcaaccaagtagctctggcaaaccttg

SEQ ID NO: 21082 - DNA, 192 bp, Zea mays
  Clone ID: LIB3152-005-P1-K1-C7
gaattccgtgcccacctcgtgtgctaccactttttcataaccaactgcaatgcttcgttatacagacacactctaccatagcgtgtggggccctgtcctttgccaaccacagggcgtacccctgcctactgccttacaacgacatgtgcttaacatgttgcaaacacagttaccaacccatattgggggcct

SEQ ID NO: 21083 - DNA, 388 bp, Zea mays
  Clone ID: LIB3152-005-P1-K1-C8
atccaatccagatcagcaaatcggtagtgcgtagagaggatcgtcgaacagaacagcatgaagatggtcatcgttctcgtcgtgtgcctggctctgtcagctgccagcgcctctgcaatgcagatgccctgcccctgcgcggggctgcagggcttgtacggcgctggcgccggcctgacgacgatgatgggcgccggcgggctgtacccctacgcggagtacctgaggcagccgcagtgcagcccgctggcggcggcgccctactacgccgggtgtgggcagacgagcgccatgtaccagccgctccggcaacagtgctgccagcagcagatgaggatgatggacgtgcagtccgtcgcgcagcagctgcagatgatgatgcagcttg

SEQ ID NO: 21084 - DNA, 390 bp, Zea mays
  Clone ID: LIB3152-005-P1-K1-D1
caccagcaccagcaccaccaccagtgatccggccaaggtccgtaccgaccaaagacggccggggaggagatggccgcctccgggaccgggaacaacaggttcgcccatacatgcgctcgcgtgcggcagttcatgatggagcagaacaggcaggtgcggatggatgacctcatcggctcctcctcgtccccgaggccactgcaactgacgccagtccctgtagcgacggggccgccgccggcggctgcctgggagaccgacgccggcgctaggactttgccgctgttccccgtccgcaatagcagtagcacggagatcatcaggccagagcaggaggccaaggccaccctaaccatcttctaccagggccaggtggcaacgttccacaac

SEQ ID NO: 21085 - DNA, 391 bp, Zea mays
  unsure at all n locations
  Clone ID: LIB3152-005-P1-K1-D10
gaattcctaaggcatcagtgtcttatctttggnaatgccttttctccaatcacgggtgattcaaccaagtagctgccaggtattgcagcaacaatgttgtcatgatcttaggcagattgagccacaatacattcaccaagcaatctacaacatggttcaatccataatccaggaggagcaacaacaacaaccatgtgagttatgtggatctcaacaagctacttaaagtgcggtggcaatcttgacagcagcacaatacctaccatcaatgtgcggtttgtaccacttatactaccaaaataatccatgcattagcaatgacattagtggtgtttgcaattgaagaattgtgtctacctagcctgtttactcctataacggtgttaagcaa

SEQ ID NO: 21086 - DNA, 308 bp, Zea mays
  Clone ID: LIB3152-005-P1-K1-D11
taattgcccaatttcaacattttttttaggcacaactaaacctacaaacggtgggatcgtatcagcaacaacaggtcttgccatcactgagccacctagccgtggtgaaccctgtctcctacttgcaacagcagcttacttgcatccaacccacttgctctggcgaacgtagctgcataccatcaacatcaacttttgcaacagtttatgccagcgctcattcaactagccatggtgatccctgtcgcctacctacatcagcaacaattgctttcatctagcccgctcgcttgtgggcattgcaccta

SEQ ID NO: 21087 - DNA, 392 bp, Zea mays
  Clone ID: LIB3152-005-P1-K1-D12
acaaaccaactagcaacatagaatgcactatagcgtaccaacaatggcagccaaaatattttgcttccttatgctccttggtctttctgcaagtgttgctaccgcaaccattttcccacaatgctcacaagctcctatagcttcccttcttcccccatacctctcaccagcggtgtcttcaatgtgtgaaaacccaattgttcaaccctacaggatccaacaggcaatcgcaacaggcatcttaccattatcacccttgttcctccaacaaccgtcagccctattacagcagttacctttggtccatttggtggcacaaaacatcagggcacaacaactacaacaacttgtgctagcaaaccttgctgcatactctcagcaacatcagtttc

SEQ ID NO: 21088 - DNA, 403 bp, Zea mays
  Clone ID: LIB3152-005-P1-K1-D2
ccgggcgaccacgcgtccgctccccatctcgcccgccgttttcgtccttatcgatctcctcgcacctcgtggcgggcctctccccttcgatccaccaagggtttaggatcggcggcgatggcggcgaggctggcacagctgcgcgctcaggcggtgcaggcggcggagttcgcctcgaagcacggcggctcctactacaaggagctcatggagaagaacaagcagtacgtcgtgcagccccccaccatcgagaaatgccaggagctctccaagcagctcttctacacccgcctcgcaagcctaccaggtcggtatgagtcattctggaaggagcttgatggtgtcaagcaggtatggaagaacaggaaggacctcaaggttgaggaccttgtgattgcgactt

SEQ ID NO: 21089 - DNA, 393 bp, Zea mays
  Clone ID: LIB3152-005-P1-K1-D3
ggcaataccccactcaaccaccgcagctattcccgtgccagcagttcggatcctgcggcgtcggtagcgtcggcagcccgttcctgggccagtgcgtcgagttcctgaggcaccagtgcagcccggcggcgacgccctacggctcgccacagtgccaggcgctgcagcagcagtgctgccaccagatcaggcaggtggagccgctgcaccggtaccaggcgacatacggtgtggtcctgcagtccttcctgcagcagcagccgcagggcgagctcgcggcgctgatggcggcccaggtagcgcagcagctgacggcgatgtgcggcctgcagctgcagcagccaggtccctgcccttgcaacgcaacttgcggcggtgtctactactgaggaa

SEQ ID NO: 21090 - DNA, 355 bp, Zea mays
  Clone ID: LIB3152-005-P1-K1-D4
gacacacataaagcacaacactgttcccatattggcagccaagatagccaggcttcttgtgctccttggccttcctgcatgtgctgctaccgctaccatcttgcctaaaagctcacaaggttctatagattacctttttcccgcgaccgtctcaccagttgagtatccagcttttcaaaactccatggttcaagcgtacatgcaccaacgcgtattaacagcttgcgtattaactctataacaaccgtatgctctacagtcacaagccttattacagcatttgcctctgcagcgtatattggcacaacaactacagggcacagcagctaccaacactagagctagcagaccttgc

SEQ ID NO: 21091 - DNA, 281 bp, Zea mays
  Clone ID: LIB3152-005-P1-K1-D5
tcccagaaaaaaaactttattgttgaactataactcataagaaatctaaaagagggcaccaccaatgttgggttgttggtagaacactgctgggtttgtcaaagcaagttggttgaatggcagcaattgttgcagtttgaagagggtgccagcgttaggcgcaacgtgctggtagaacggcaacaactgtggttgggttaagaaggtattttacttgctcccggaggctccctctttattctacaccttttatggcatttcacaaagtctgactatgtgtt

SEQ ID NO: 21092 - DNA, 390 bp, Zea mays
  Clone ID: LIB3152-005-P1-K1-D6
cctatacagtttgagaaggatgatgatactaatttccatatggacttgattgctgggtttgctaacatgcgggccaggaactacagcatccctgaagttgacaagttgaaggcgaagttcatagcgggaagaatcatcccggccatcgccacctcaactgcgatggccaccggccttgtctgcctggagctttacaaggtccttgctggtgggcacaaggttgaagactaccggaacacatttgcgaacctcgcaatccccctcttctccatggcggagcctgtgccgcccaagaccatgaagcaccaagacatgtcctggaccgtgtgggaccggtggaccgtaactggcaacatgacgctgagggagctcctggagtggctgaaggag

SEQ ID NO: 21093 - DNA, 440 bp, Zea mays
  unsure at all n locations
  Clone ID: LIB3152-005-P1-K1-D7
tcggagataccctctcgagcatcctagtgtactcccatggnctccggccatgntcggcgcgaggtcacaatgaatcanccttcagcaancctgtttgtcccgtcgggctggcccaggctagcacggagctgaccgtggagggataggccattccgaccacgctgggcagtgagaaancctctactgaccagccctcgtattttgaccgtgccgtgggccctgaccgccagctcttcgtggctttcgcgtaccagggaggtctgctactccagatgtgtgcgtacgttgcgccagttgtacactctgtcgtgtttccagggagagggccgctcaaggggctccaacgctcgtcactcgaagggcgcgatgaccggaagggtcaagacgaagtggggcgatctacgtgcggaacctggagttgttcgcgatgtgcgagaggc

SEQ ID NO: 21094 - DNA, 324 bp, Zea mays
  Clone ID: LIB3152-005-P1-K1-D8
atgtaatggagcccggcggttacgtcctacggctcgccacagtgccaggcgctggagcagtagtgctgccaccagatcaggcaggtggagccgctgcaccggtaccaggcgacatacggtgtggtcctgcagtcctttctgcagcagcagccgtagggcgagctcgcggcgctgatggcggtccaggtagcgcagcagctgacggcgatgtgcggcctgcagctgtatgagccaggtccctgtccttgcaacgcatattgtcggcggtgtctacttctgtggaaactatgtactgtagtaataatgtattggagccgctgtcta

SEQ ID NO: 21095 - DNA, 301 bp, Zea mays
  Clone ID: LIB3152-005-P1-K1-D9
taaacttttctagtgaagcgcacaagcatcaaccgatcagctttgtttaccaagatattagccctccttacgctacttgctctattagtgagcgcaacaaatgcgttcataattccacagagcttacttgctcctagtgccattattccacagctcctcccaccagttacttcaatgggctttgaacattcagccgtgcaagcctacaggttacaacttagcgcttgcggtcagcgttttacaacaaccaattgcccaattgcaacaacaatccttggcacatctaaacctacaaaccatt

SEQ ID NO: 21096 - DNA, 391 bp, Zea mays
  Clone ID: LIB3152-005-P1-K1-E1
caacaagcaacatagaaagtggaatacagtatcaacaatagagcaacaatggcggccaagatattttccatccttatgctccttgctctttctgcatgtgttgctaacgcgaccatttttcctcaatactcacaagctcctatagctgcccttcttcccccataccttccatcaatgaccgcttcagtatgtgaaaacccagcccttcaaccctacaggctccaacaagcaatcgcaacaagcaacttacctttatcacccctgttctttcaacaatcgccagccctatctttggtgcagtcattggtacaaaccatcagggcacaacagctgcagcaactcgtgctaccagtgatcagccaagtagctctggcaaacctttctccctact

SEQ ID NO: 21097 - DNA, 301 bp, Zea mays
  Clone ID: LIB3152-005-P1-K1-E10
ctcgacaagacaggattcatcaaatagaaccggttgtatggcagcaattgttgctgctgtaggaaggcagcgaccaatgggttagccactgccaatggattaagtaactgttgtcgctgttgtaggtacgcaacagagttcgacatagttagttggttgaatggaagcagctgttgcaagtaggcaacagggtttgccacagctagctgagttagagctggtacaatctgttgcaacaattcttgttgcaggtatgtatgtgcattggccacagctagcgtgcttgatgaaagcagttgtt

SEQ ID NO: 21098 - DNA, 392 bp, Zea mays
  Clone ID: LIB3152-005-P1-K1-E11
cagaaacacaccaagcgaagcgcactagcaacgacctaacaacaatggctaccaagatattagccctccttgcgcttcttgccctttttgtgagcgcaacaaatgcgttcattattccacaatgctcacttgctcctagtgccattattccacagttcctcccaccagttacttcaatgggcttcgaacacctagctgtgcaagccaacatgcaacaacaagcgcttgcggcgagcgtcttacaacaaccaattgcccaattgcaacaacaatccttgccacatctaacaatacaagccatcacaacgcaacagcaacaacagttcctaccagcactgagccacctagccatggtgaaccctgccgcctacttgcaagagcagctgcttgca

SEQ ID NO: 21099 - DNA, 389 bp, Zea mays
  Clone ID: LIB3152-005-P1-K1-E12
cttttattccacaatgctcacaacaatacctctctccggcgacagccgtgggatttcaatacccaactatacaatcctacatggtacaagaggccatccaagcaagcatcttacggtcattagcattaaccctccaacaaccatatgctctattgcaacagccatccttagtgcatctgtatctccaaagaatcgcggcacaacaactacaacaacagttgctaccaacaatcaatcaagtagttgcagcgaaccttgctgcttacctccagcaacaacagtttcttccattcaatcaactagatggggtgaaccctgctatctacttgcaggcacaacagctactaccatttaaccaacttgtcgggagcccttatgccttcttactg

SEQ ID NO: 21100 - DNA, 393 bp, Zea mays
  Clone ID: LIB3152-005-P1-K1-E2
cccgtccgttgatcttaggcagattgagccacattacattcaccaagcaatctacaacatggttcaatccataatccaggaggagcaacaacaacaaccatgtgagttatgtggatctcaacaagctactcaaagtgcggtggcaatcttgacagcagcacaatacctaccatcaatgtgcggcttgtaccactcatactaccaaaataatccatgcagcagcaatgacattagtggtgtttgcaattgaagaattgtgtctacctagccgttatactcctataacggtgttaagcaataaagtaccatacatttaaaaaaaaaaaaaattaatttttataattatatatattttatattttttttatatttattttttatattattttttaa

SEQ ID NO: 21101 - DNA, 390 bp, Zea mays
  Clone ID: LIB3152-005-P1-K1-E3
attgagaccaactagcaacatagaaagcacaatagtgtaccaacaatggcagccaaaatattttgcctccttatgctccttggtctttctgcaagtgctgctacggcgaccattttcccgaaatgctcgcaagctcctatagcttcccttcttcccccgtacctctcaccagcggtgtcttcggtatgtgaaaacccaattcttcaaccctacaggatccaacaggcaatcacagctggcatcttacctttatcacccttgttcctccaacaatcatcagccctattacatcagttacctttggtgcatttattggcacaaaacatcagggcacaacaactacaacaacttgtgctagcaaaccttgctgcctactctcagcaacagcag

SEQ ID NO: 21102 - DNA, 412 bp, Zea mays
  Clone ID: LIB3152-005-P1-K1-E4
gaaaggccggggcggaccaacccttccgtggaaaccaactaggcgaagcgaattttcaacaccctaccaccaatggctaccaagatattagccctcctgggccttctggcccttttggggggcgcaacaaatgccgtcattattccacaatgctcacttgctcctagtgccataattccacaggttcctccaccagttacttcaatgggcttcgaacacctagctgtgcaagccaacatgcaacaacaagcgcttgcggcgagcgtcttacaacaaccaattgcccaattgcaacaacaatccttgccacatctaacaatacaagccatcacaacgcaacagcaacaacagttcctaccagcactgagccacctagccatggtgaaccctgccgcctacttgcaagagcagc

SEQ ID NO: 21103 - DNA, 409 bp, Zea mays
  Clone ID: LIB3152-005-P1-K1-E5
acccacccgtccgagcattcaaaaacacaccaagcgaagcactttagcaccaacctaacaccaatggctaccaagatattatccctccttgcgcttcttgcgctttttgcgagcgcaacaaatgcgttcattattccacaatgctcacttgctccaagttccattattacacagttcctcccaccagttacttcaatgggcttcgaacacccagctgtgcaagcctataggctacaacaagcaattgcggcgagcgtcttacaacaaccaatttcccagttgcaacaacaatccttggcacatctaacaatacaaaccatcgcaacgcaacagcaacaacaattcctaccagcactgagccacctagccatggtgaacccttgccgctacttgcaacagcagttgcttg

SEQ ID NO: 21104 - DNA, 245 bp, Zea mays
  Clone ID: LIB3152-005-P1-K1-E6
cggacgcgtgggcggcaacaacagttgttgccgttctacctgcacgctgcgcctaacgctggcaccctcttacaactgcaacaattgctgccattcaaccaacttgctttgacaaacccaacagcgttctaccaacaacccatcattggtggtgccctcttttagattgcttatgagttatagttcaataatgaagttttttggatgatgtttgtggcttcccagaaataagaaagtacatttct

SEQ ID NO: 21105 - DNA, 388 bp, Zea mays
  Clone ID: LIB3152-005-P1-K1-E7
tagtgaagtacactagcaacatcttagcaccaatgggagccaagatttttgccctccttgccctccttgctctttcagcaagcgctgctacctcgacttttattccacaatgctcacaacaatacctctctccggcgacagccgtgggatttcaatacccaactatacaatcctacatggtacaagaggccatccaagcaagcatcttacggtcattagcattaaccctccaacaaccatatgctctattgcaacagccatccttagtgcatctgtatctccaaagaatcgcggcacaacaactacaacaacagttgctaccaacaatcaatcaagtagttgcagcgaaccttgctgcttaccttcagcaacaacagtttcttccatt

SEQ ID NO: 21106 - DNA, 374 bp, Zea mays
  Clone ID: LIB3152-005-P1-K1-E8
attttgagcattcagaaacacacctagcgaagcacattagcaacaacctaacaacaatggctaccaagatattatccctccttgcgcttcttgcgctttttgcgagcgcaacaaatgcgttcattattccacaatgctcacttgctccaagttccattattacacagttcctcccaccagttacttcaatgggcttcgaacacccagctgtgcaagcctataggctacaacaagcaattgcggcgagcgtcttacaacaaccaatttcccagttgcaacaacaatccttggcacatctaacaatacaaaccatcgcaacgcaacagcaacaacaattcctaccagcactgagccacctagccatggtgaaccct

SEQ ID NO: 21107 - DNA, 389 bp, Zea mays
  Clone ID: LIB3152-005-P1-K1-E9
tcggagcattcataaacacacctttcgtattgcactagcaacaacctaacaacaaggggtactatgatattatccctgcttgcgcttcttgcgcattttgctagcgcaacaaatgcttccattattccacaatgctcacttgctcctagttccattattccacagttccttccaccagttactttaatggccttcgaacacccagctgtgcaagcctataggctacaacaagcgattgctgtgagcgtcttacaacaaccaattgtccatttgtaacaacatttcttggcacatttaacaattcaaaccatcgctacgtaacagtaacaacagttcctaccatcactgatccacctatccatggtgaaccctgttccctactttgcaac

SEQ ID NO: 21108 - DNA, 383 bp, Zea mays
  Clone ID: LIB3152-005-P1-K1-F1
gcgcttctcgacatgtccacggacgaccttgtccagcttttccccgcgcgcgccaggagaaggttccagaggggtctgaagaggaagcccatggcgctcatcaagaagctgcgcaaggcgaaaaaggatgctcctgctggtgagaagcccgagccagtcaagacacatctccgtaacatgatcattgtccctgagatgattggaagcattgttggggtctacaacggcaagaccttcaaccaggttgagatcaagcctgagatgatcggccactaccttgctgagttttccatcttctacaagccggtcaagcacggcaggcccggtatcggtgccacccactcctctcgttttattccctctgaatgagctgttacccggct

SEQ ID NO: 21109 - DNA, 392 bp, Zea mays
  Clone ID: LIB3152-005-P1-K1-F10
atttgcactcatgcatcacaaaacatccttctatcagtaccatcaatcatcattcatcttagtagtataggcaccaaatcaaatctgcaacatcaattatctaactccaaaaaccatgaagctggtgcttgtggttcttgctttcattgctttagtatcaagtgtttcttgtacacagacaggcggctgcagctgtggtcaacaacaaagccatgagcagcaacatcatccacatcaacatcatccacaaaaacaacaacatcaaccaccaccacaacatcaccagcagcagcaacaccaacaacaacaagttcacatgcaaccacaaaaacatcagcaacaacaagaagtcatgttcaacaacaacaacaacaaccgcagcaccaacaaca

SEQ ID NO: 21110 - DNA, 391 bp, Zea mays
  Clone ID: LIB3152-005-P1-K1-F11
ggcagtgcgtagagaggatcgtcgaacagaacagcatgaagatggtcatcgttctcgtcgtgtgcctggctctgtcagctgccagcgcctctgcaatgcagatgccctgcccctgcgcggggctgcagggcttgtacggcgctggcgccggcctgacgacgatgatgggcgccggcgggctgtacccctacgcggagtacctgaggcagccgcagtgcagcccgctggcggcggcgccctactacgccgggtgtgggcagacgagcgccatgtaccagccgctccggcaacagtgctgccagcagcagatgaggatgatggacgtgcagtccgtcgcgcagcagctgcagatgatgatgcagcttgagcgtgccgctgccgccagcagcag

SEQ ID NO: 21111 - DNA, 392 bp, Zea mays
  unsure at all n locations
  Clone ID: LIB3152-005-P1-K1-F12
ctgtcagtccggtggtgcaaacatctatagtaactacaatacgacgtcttcctctccgcagaggccaccaatacatcatctattcatcttgctctctcctctgtccaaaaaggaggcgccgcgctcctcttcttctacgccgttcactctctctagtctctcccttcccttctccacgcctccgcccccactcgtgagactctacctagccctagcgccagcaccacccgcccaacctcccggagagagagagagagaggaggaggccttcgccgccgccgttgccgtcggccgagacgccaggatgttcgggtaccagaagggcctcgatgtcgaggcggtgacatcgggcgccgccgncacgggcggcgcgcgccagctctacccgggga

SEQ ID NO: 21112 - DNA, 395 bp, Zea mays
  Clone ID: LIB3152-005-P1-K1-F2
gggcggacccacccgtccgaagcggaagtccgtagagaggatcgtcgttcagaacagcatgaagatggtcatcgttctcgtcgtgtgcctggctctgtcagctgccagcgcctctgcaatgcagatgccctgcccctgcgcggggctgcagggcttgtacggggctggcgccggcctgacgacgatgatgggcgccggcgggctgtacccctacgcggagtacctgaggcagccgcagtgcagcccgctggcggcggcgccctactacgccgggtgtgggcagacgagcgccatgtaccagccgctccggcaacagtgctgccagcagcagatgaggatgatggacgtgcagtccgtcgcgcactagctgtagatgatgatgcagcttgagcgtg

SEQ ID NO: 21113 - DNA, 359 bp, Zea mays
  unsure at all n locations
  Clone ID: LIB3152-005-P1-K1-F3
tgaagatgnngtcatcgtnntcttcgtcgtggtggcctnggggctctgtacagctttgccanngcgcctnnctgcaatgggcagatgccctnngcccctgcgcggnnggctgcaggtgcttgtaccggctngctggcgccggccctgaccgaccgatgatgggctngccggcgggctgtaccccctacgcgtgagtaccctgagggcagccgcagtgcagtcccgctggtcggcgggcgctcctactacgccggggtgtgggcagaccgagcgccatgtacctagccgctccggcaacagtgctgccagcagcagatgaggatgatggacgtgcagtccgtcgcgcagcagctgcagat

SEQ ID NO: 21114 - DNA, 389 bp, Zea mays
  Clone ID: LIB3152-005-P1-K1-F4
gtcagcctagcaattagctcatcgactccagattggagaactcgacaccatgaaggtgctgatcgttgcccttgctctcctggcgctcgctgcgagcgccgcctccagtacaagcggcggctgtggctgccagacaccaccgtttcatctaccgcctccgttctatatgccgcctccgttctatctgccgccgcagcagcagccgcagccatggcaataccccactcaaccaccgcagctaagcccgtgccagcagttcggatcctgcggcgtcggcagcgtcggcagcccgttcctgggccagtgcgtcgagttcctgaggcaccagtgcagcccggcggcgacgccctacggctcgccacagtgccaggcgctgcagcagcagtgct

SEQ ID NO: 21115 - DNA, 398 bp, Zea mays
  Clone ID: LIB3152-005-P1-K1-F5
acgcgttagcaacatagaaagcacaatattttcttacaatggcagctaaaatattttgcctccttatgctccttggtctttctgcaagtgctgctacggcgaccattttcccacaatgctcacatgctcctatagctttccttctttccccgtacctttcaccaacggtgtcttcggtattgtgaaaacccaattcttcaaccctacaggatccaacaggcaatcgcagctggcatcttacctttatcacccttgttcctccaacaattaattagtcctattacagcagttacctttaggtgcattaatttggcacaaatcatttaggcacaacaacttcaaccaacttgtgctagcaataccttgctgcctacttttcatgtaacatcaatgttttt

SEQ ID NO: 21116 - DNA, 377 bp, Zea mays
  Clone ID: LIB3152-005-P1-K1-F6
gtcagcctagcaattagctcatcttcttttgattggagaactcgacaccatgaaggtgctgatcgttgcccttgctctcctggcgctcgctgcgagcgccgcctccagtacaagcggcggctgtggctgccagacaccaccgtttcatctaccgcctccgttctatatgccgcctccgttctatctgccgccgcagcagcagccgcagccatggcaataccccactcaaccaccgcagctaagcccgtgccagcagttcggatcctgcggcgtcggcagcgtctgcagcccgttcctgggccagtgcgtcgagttcctgaggcaccagtgcaacccggcgggtacgccctacggctcgtcacagtgccaggcgctgc

SEQ ID NO: 21117 - DNA, 203 bp, Zea mays
  Clone ID: LIB3152-005-P1-K1-F7
tcgcccataccttccatcaatgatatagttatgttgcttgctgcgattgcttgttggagcctatagggttgaagagctgggttttcacatactgaagctatcattgatggaaggtatgggggaagaagggaagctatatgagcttgtgagcattgatggtaatatgttttgtttgcaacactttgctaaatcatcattccttt

SEQ ID NO: 21118 - DNA, 384 bp, Zea mays
  Clone ID: LIB3152-005-P1-K1-F8
tgagaccaacaagcaacatagaaagtggaatccagtagcaacaatagagcaacaatggcgaccaagatattttccctccttatgctccttgctctttctgcatgtgttgctaacgcgacaattttccctcaatgctcacaagctcctatagcttcccttcttcccccataccttccatcaatgatagcttcagtatgtgaaaacccagctcttcaaccctataggctccaacaagcaatcgcagcaagcaacatacctttatcacccttgtttcaacaatcgccagccctatctttggtgcagtcattggtacaaaccatcagggcacagcagctgcagcaactcgtgctacctgtgatcaaccaagtagctctggcaaacctt

SEQ ID NO: 21119 - DNA, 274 bp, Zea mays
  Clone ID: LIB3152-005-P1-K1-F9
caactggctgtgtcgaactctgctgtgtacctacaacagcgacaacagttacttaatccactagcagtggctaacccattggtcgctaacttcctgcagcagcaacaattgctgccatacaaccagttctctttgatgaaccctgccttgcagcaacccatcgttggaggtgccatcttttagattacatatgagatgtactcaacaatggtgccctcataccggcatgtgtttcctagaaataatcaatatattgattgagatttatcttgat

SEQ ID NO: 21120 - DNA, 376 bp, Zea mays
  Clone ID: LIB3152-005-P1-K1-G1
cgcaaattgcaccaagaaatccatcgagaggccgtcgacaggggaattaatggcgtcgtcgtctagcagcagccaccgccgcctcatcctcgcagccgccgtcctgctctccgtgctcgcggctgccagcgccagcgccgggacctcctgcgtgccggggtgggccatcccgcacaacccgctcccgagctgccgctggtacgtgaccagccggacctgcggcatcgggccgcgcctcccgtggccggagctgaagaggagatgctgccgggagctggcggacatcccggcgtactgccggtgcacggcgctgagcatcctcatggacggcgcgatcccgccgggcccggacgcgcagctggagggccgtctagag

SEQ ID NO: 21121 - DNA, 387 bp, Zea mays
  Clone ID: LIB3152-005-P1-K1-G10
gctccaacaagcaatcgcagcaagcaacatacctttatcacccttgtttcaacaatcgccagccctatctttggtgcagtcattggtacaaaccatcagggcacagcagctgcagcaactcgtgctacctgtgatcaaccaagtagctctggcaaacctttctccctactctcagcaacaacaatttcttccattcaaccaactgtctacattgaaccgtgctgcttatttgcagcaacaactattaccattcagccagctagctactgcctactctcagcaacaacaacttcttccatttaaccaattggccgcactgaaccccgctgcttatttgcagcagcaaatactactaccatttagccagctagctgcagcaagccgtgc

SEQ ID NO: 21122 - DNA, 350 bp, Zea mays
  Clone ID: LIB3152-005-P1-K1-G11
gctaaatccaccgtacacctttgttatcctatccctgtctcgtctgggggaaccagcctttgaagtcaacgcagacccagcgatccttgtcgcgcgttcttcactcctcccccacggagggaaggatggcggagcccaaagcggcggcggcgaggaagactcgtgtgggcccgtacgaggtcggcaagaccatcggcgagggcagcttctccaaggtcaagcacgcgcgcgacttccgcaccggcgccgtccgcgccatcaaggtgctcgactcgcaaccacgttcttcgccacatgatggttgagcagatcaagcgggagatttcgactattaagctgattcaaacatc

SEQ ID NO: 21123 - DNA, 396 bp, Zea mays
  Clone ID: LIB3152-005-P1-K1-G12
caatagtgtaccaacaatggtagctaaaatattttgcctccttatgctccttggtatttctgcaagtgctgctacggcgaccattttcccgcaatgctcacaagctcctatagcttcccttcttcccccgtacctctcaccagcggtgtcttcggtatgtgaaaacccaattcttcaaccctacaggatccaacaggcaatcgcagctggcatcttacctttatcacccttgttcctccaacaatcatcagccctattacagcagttacctttggtgcatttattggcacaaaacatcagggcacaacaactacaacaacttgtgctagcaaaccttgctgcctactctcagcaacagcagtttcttccattcaaccaactagctgcattgaactc

SEQ ID NO: 21124 - DNA, 262 bp, Zea mays
  Clone ID: LIB3152-005-P1-K1-G2
ttgcaagagctgctaccgcgaccatttttccgcaatgcgtcacaagcgcctatagatttccttttttccccgtacctcttaccagcggtgtgtttggtatgtgaaaacccaattctttaaccctacacgatccaacacgcaatcgcagctggcatcttacctttatcacccttgttgctccaacaatcatcagccctattacagcagttacctttggtgcatttattggcgcaaaacattaaggcacaacaactacaacaac

SEQ ID NO: 21125 - DNA, 387 bp, Zea mays
  Clone ID: LIB3152-005-P1-K1-G3
cagaaacacaccaagcgaagctacctagcttcgacttaacaacaatggctaccaagatattagccctccttgcgcttcttgccctttttgtgagcgcaacaaatgcgttcattattccacaatgctcacttgctcctagtgccattataccacagttcctccgaccagttacttcaatgggcttcgaacacctagctgtgcaagcctacaggctacaacaagcgcttgcggcgagcgtcttacaacaaccaattaaccaattgcaacaacaatccttggcacatctaaccatacaaaccatcgcaacacaacagcaacaacagttcctaccagcactgagccaactagatgtggtgaaccctgtcgcctacttgcaacagcaggtgc

SEQ ID NO: 21126 - DNA, 394 bp, Zea mays
  Clone ID: LIB3152-005-P1-K1-G4
cttcaacaagcatccccacaatttatgaacttgcttggaagttcttacccaacacctggagggtcactatctcagaatcaagtacagtcaggaagtggttctttgggatcttctggaatgctatatgaaggaagctcgggtgacaatgctccatttgatattaatgactttcctcagttaactggacgacctaattctgctggaggtggtcaaggacaatatggatcattgagaaagcatggagtaagcgtcaatgccattgtacaacaaaaccaggaattcagcattcagaatgaagattttccagctttaccaggaaataaagggagttcctcagattatcctatggatattcatcacatggaccacctttatgagaatttaatttttttgc

SEQ ID NO: 21127 - DNA, 399 bp, Zea mays
  Clone ID: LIB3152-005-P1-K1-G5
gcaacatacatagtgaagtacagtatcatcatcttagcaccaatggcagccaagatttttgccctccttgccctccttgctctttcagcaagtgttgctaccgcgactattattccacaatgctcacaacaatacctctctccggtgacagccgcgagatttgaatacccaactatacaatcctacaggctacaagaggccatcacagcaagcatcttacggtcgttagcattgactgtccaacaaccatatgccctattgcaacaaccatccttagtgaatctatatctccaaagaatcgcagcacaacaactacaacagcagttgcttccaacaatcaatcaagtagttgcagcgaaccttgctgcttacctccagcaacaacaatttcttccattc

SEQ ID NO: 21128 - DNA, 400 bp, Zea mays
  Clone ID: LIB3152-005-P1-K1-G6
cggacgcgtgggattgagaccaactagcatcatagaaagcacaatagtgtaccaacaatggcagccaaaatattttgcttccttatgctccttggtctttctgcaagtgttgctaccgcaaccattttcccacaatgctcacaagctcctatagcttcccttcttcccccatacctctcaccagcggtgtcttcaatgtgtgaaaacccaattgttcaaccctacaggatccaacaggcaatcgcaacaggcatcttaccattatcacccttgttcctccaacaaccgtcagccctattacagcagttacctttggtccatttggtggcacaaaacattagggcacaacaactacaacaacttgtgctagcaaaccttgctgcatactcttagcaacatt

SEQ ID NO: 21129 - DNA, 354 bp, Zea mays
  Clone ID: LIB3152-005-P1-K1-G7
gcttcaccggatttcgagattttttcgactggacattatctccgagggaagcgcgcgctccaggttcattaacaaaatggactgcatggaggggaactgtaaaatgtgttctgtgctgaagcttgccttgatcgacaattactccaccccagatgaccagatccatctgatgacggttgggcaggtcctactgaatcatcggatcagatggacaccatccaaacaatctgctttgaaatgctctgcttatatcctacaccagacacaacggcgactcaatgcactagctgtggttatacccattggacgaagcctgtctacagcagccacaattggttgtcatacaaccagatg

SEQ ID NO: 21130 - DNA, 380 bp, Zea mays
  Clone ID: LIB3152-005-P1-K1-G8
aacaacagtttcttccattcaatcatctagatggggtgaaccctgctatctacttgcaggcacaacagctactaccatttaaccaacttgtcgggagcccttatgccttcttactgcaacaacagcttctaccattccatctgcaagctgtggcaaacattgctgctttcttgagacaacaacatttgttgccattttacccacaggttgtgggaaacattaatgccttcttgcaacagcaacaattgctaccattctacccacagaatgtggcaaacattgttgccttcttacaacaacaacaattgttgccatttagccaacatgctttgacgaatcctaccaccttattgcaaccgcccaccattggtggtgccatc

SEQ ID NO: 21131 - DNA, 381 bp, Zea mays
  Clone ID: LIB3152-005-P1-K1-G9
cggacgcgtgggggaatccagttgctacaatagagcaacaatggcgaccaagatattttccctccttatgctccttgctctttctgcatgtgttgctaacgcgacaattttccctcaatgctcacaagctcctatagcttcccttcttcccccataccttccatcaatgatagcttcagtatgtgaaaacccagctcttcaaccctataggctccaacaagcaatcgcagcaagcaacatacctttatcacccttgtttcaacaatcgccagccctatctttggtgcagtcattggtacaaaccatcagggcacagcagctgcagcaactcgtgctacctgtgatcaaccaagtagctctggcaaacctttctccctactc

SEQ ID NO: 21132 - DNA, 381 bp, Zea mays
  Clone ID: LIB3152-005-P1-K1-H1
caactagcaacatagaaagcacaatagtgtaccaacaatggcagccaaaatattttgcttccttatgctccttggtctttctgcaagtgctgctaccgcaaccattttcccacaatgctcacaagctcctatagcttcctttcttcccccatacctctcaccagcggtgtcttcagtatgtgaaaacccaattcttcaaccctacaggatccaacaggcaatcgcagcaggcatcttacctttatcacccttgttcctccaacaaccgtcagccctattacagcagttacctttggtgcatttgttggcacaaaacatcaaggcacaacaactacaacaacttgtgctaggaaaccttgctgcctactctcagcaacagca

SEQ ID NO: 21133 - DNA, 394 bp, Zea mays
  Clone ID: LIB3152-005-P1-K1-H10
caccaagcgaagctacctagcaacgacttaacaacaatggctaccaagatattagccctccttgcgcttcttgccctttttgtgagcgcaacaaatgcgttcattattccacaatgctcacttgctcctagtgccattataccacagttcctccgaccagttacttcaatgggcttcgaacacctagctgtgcaagcctacaggctacaacaagcgcttgcggcgagcgtcttacaacaaccaattaaccaattgcaacaacaatccttggcacatctaaccatacaaaccatcgcaacacaacagcaacaacagttcctaccagcactgagccaactagatgtggtgaaccctgtcgcctacttgcaacagcaggtgcttgcatccaacccac

SEQ ID NO: 21134 - DNA, 394 bp, Zea mays
  Clone ID: LIB3152-005-P1-K1-H12
attagctcatcgactccagattggtgaactcgacaccatgaaggtgctgatcgttgcccttgctctcctggcgctcgctgcgagcgccgcctccagtacaagcggcggctgtggctgccagacaccaccgtttcatctaccgcctccgttctatatgccgcctccgttctatctgccgccgcagcagcagccgcagccatggcaataccccactcaaccaccgcagctaagcccgtgccagcagttcggatcctgcggcgtcggcagcgtcggcagcccgttcctgggccagtgcgtcgagttcctgaggcaccagtgcagcccggcggcgacgccctacggctcgccacagtgccaggcgctgcagcagcagtgctgccaccagatcaggcag

SEQ ID NO: 21135 - DNA, 353 bp, Zea mays
  Clone ID: LIB3152-005-P1-K1-H2
tagcaacaaccctaacaacaatgggctaccaagatattattccctccttgcgcttcttgcgctttttgcgagcgcaacaaatgcgttcattattccacaatgctcacttgctccaagttccattattacacagttcctcccaccagttacttcaatgggcttcgaacacccagctgtgcaagcctataggctacaacaagcaattgcggcgagcgtcttacaacaaccaatttcccagttgcaacaacaatccttggcacatctaacaatacaaaccatcgcaacgcaacagcaacaacaattcctaccagcactgagccacctagccatggtgaaccctgccgcctacttgc

SEQ ID NO: 21136 - DNA, 379 bp, Zea mays
  Clone ID: LIB3152-005-P1-K1-H3
gcggcggctacggcggtggcaaccgtggttgcggctacggcaactccgacgggaactggaggaactgagcggtggggcccgcgcggccaagttatcctgttcgctaccgtgttgtttaccctagtccagagtgtttatcttcgttcgtctcgtgtttgttgttgcccatctgtgtttttgattgaaggtcgctctgagtcagttgttagtgctgtgttcattcttggcttcagcagacccatgcatcaaccagcatggactgtggatcgatgggtgctgctacccccgtcaggctttattctaagttaaaatcctaggaaaaaaatggtgctacttggtgctggaaataaaatttattttcttcttattttttttaata

SEQ ID NO: 21137 - DNA, 372 bp, Zea mays
  Clone ID: LIB3152-005-P1-K1-H5
cagccagctagttgctgcctacccccagcaatttcttccattcaaccaactagcagcattgaactctgctgcttatttacagcagcaacaactactaccattcagccagctagctgatgtgagccctgctgccttcttgacacaacaacagttgttgccgttctacctgcacgctatgcctaacgctggcaccctcttacaactgcaacaattgctgccattcaaccaacttgctttgacaaactcaacagtgttctaccaacaacccatcattggtggtgccctcttttagattgcttatgagttatagttcaataatgaagttttttggatgatgtttgtggcgtcccagaaataagaaagtacatttct

SEQ ID NO: 21138 - DNA, 295 bp, Zea mays
  Clone ID: LIB3152-005-P1-K1-H6
tcggtcgggctgtcgtgccgtcagtttttaggaaaggaagttgcaattcaagaagaagtggttcctcaagaggagtctgttccagtgctgtagatccagtggttggtttcatctgactggttattatgatagaaggactttgaatcttctccggtaacaaggagaagttttatttccttatcctttgggttgttacttcatgtggaggacttgaagcttagaatgcctatatatatctcttatggaaaggctttacccttacaattattgtcatcagttattcacttcgcgtatt

SEQ ID NO: 21139 - DNA, 382 bp, Zea mays
  Clone ID: LIB3152-005-P1-K1-H7
cagaaacacaccaagcgaagcacattagcaacaacctaacaacaatggctaccaagatattatccctccttgcgcttcttgcgctttttgcgagcgcaacaaatgcgttcattattccacaatgctcacttgctccaagttccattattacacagttcctcccaccagttacttcaatgggcttcgaacacccagctgtgcaagcctataggctacaacaagcaattgcggcgagcgtcttacaacaaccaatttcccagttgcaacaacaatccttggcacatctaacaatacaaaccatcgcaacgcaacagcaacaacaattcctaccagcactgagccacctagccatggtgaaccctgccgtctacttgcaacagca

SEQ ID NO: 21140 - DNA, 389 bp, Zea mays
  Clone ID: LIB3152-005-P1-K1-H8
ggcagccgcagtgcagcccgctggttgcggcgccctactacgccgggtgtgggcagacgagcgccatgtaccaaccgcttccgcaacaatgcttgcagcagcaaatgaagatgatggacgtgcagtccgtcgcgcagcagctgcagatgatgatgcagcttgagcgtgccgctgccgccagcagcagcctgtacgagccagctctgatgcagcagcagcagcagctgctggcagcccagggtctcaaccccatggccatgatgatggcgcagaacatgccggccatgggtggactctaccagtaccagtaccagctgtccagctaccgcaccaacccctgtggcgtcttcgctgccattccgccctactactgattcatgatatttggg

SEQ ID NO: 21141 - DNA, 376 bp, Zea mays
  Clone ID: LIB3152-005-P1-K1-H9
ctaccattcagccagctagctggtgtgagccctgctaccttcttgatacaaccacagttgttgccgttctaccagcacgctgcgcctaacgctggcaccctcttacaactgcaacaattgctgccattcaaccaacttgctttgacaaacccagcagcgttctaccaacaacccatcattggtggtgccctcttttagatttcttatgagttatagttcaataataaagtttttttgtctgatgtttgtggcttcccagaaataagaaagtacatttctagattcttaaaaaaaaaaaaaaaaaaaaaaaaaaaaaaaaaaaaaaaaaaaaaaaaaaaaaaaaaaaaaaaataaaaaaaaaaaaaaattaaattaa

SEQ ID NO: 21142 - DNA, 78 bp, Zea mays
  unsure at all n locations
  Clone ID: LIB3152-006-P1-K1-A11
tagcagatcaaacaagtagttttcttattgtcaaaganntgtgagagcgaggccggggctttatatgagatggcttaa

SEQ ID NO: 21143 - DNA, 387 bp, Zea mays
  Clone ID: LIB3152-006-P1-K1-A2
caggctacaacaagcgcttgcggcgagcgtcttacaacaaccaattaaccaattgcaacaacaatccttggcacatctaaccatacaaaccatcgcaacacaacagcaacaacagttcctaccagcactgagccaactagatgtggtgaaccctgtcgcctacttgcaacagcaggtgcttgcatccaacccacttgctctggcaaacgtagctgcataccaacaacaacaacaattgcaacagtttctgccagcgctcagtcaactagccatggtgaaccctgccgcctacctacaacagcaacaactgctttcatctagccctctcgttgtgggtaatgcacctacatacctgcaacaacaattgctgcaacagatggtaccagc

SEQ ID NO: 21144 - DNA, 371 bp, Zea mays
  Clone ID: LIB3152-006-P1-K1-A3
gttcctccaacaaccgtcagccctattattgcagttacctttggtccatttggtggcgcaaaacatcagggcacaacaactacaacaacttgtgctagcaaaccttgctgcatactctcagcaacatcagtttcttccattcaaccaactggctgcattgaactctgctgcttatttgcaacaacaattaccattcagccagctagttgctgcctacccccagcaatttctttcattcaaccaactagcagcattgaactctgctgcttatttacagcagcaacaactactaccattcagccagctagctgatgtgagccctgctgccttcttgacacaacaacagttggtgccgttctaccctgacgcta

SEQ ID NO: 21145 - DNA, 385 bp, Zea mays
  Clone ID: LIB3152-006-P1-K1-A4
attgagaccaactagcaacatagattgctcaatagtgtaccaacaatggcagccaaaatattttgcctccttatgctccttggtctttctgcaagtgctgctacggcgaccattttcccacaatgctcacaagctcctatagcttcccttcttcccccgtacctctcaccagcggtgtcttcggtatgtgaaaacccaattcttcaaccctataggatccaacaggcaatcgcagctggcatcttacctttatcacccttgttcctccaacaatcatcagccctattacagcagttacctttggtgcatttattggcacaaaacatcagggcacaacaactacaacaacttgtgctagcaaaccttgctgcctactctcagcaac

SEQ ID NO: 21146 - DNA, 315 bp, Zea mays
  Clone ID: LIB3152-006-P1-K1-A5
aagcaacatagaaagtggaatccattttttacaatagagcaacaatggagaccgagagattttcccttcttatgctccttgctctttctacatgtgttgctaacgcgacaattttccctcaatgctcacaagctcctatagcttccctttttcccccataccttccatcaattatagcttcagtatgtgaaaacccagctcttcaaccatataggcttcaacaagcaatcgcagcaagcaacatacctttatcgcccttgttgtgtcaacaatcgccagccctattttttgtgcagtcattggtacaaaccatta

SEQ ID NO: 21147 - DNA, 357 bp, Zea mays
  Clone ID: LIB3152-006-P1-K1-A6
cccagccgccgccagcccgcacacttcttcctcgcgcgctcagggtttcggaatggaagccgaggcggcggccaagaggacgcgggagagcggggaggacgccgccgcggcggggatctccgccgtcatcccgggatggttctccgagatcagccccatgtggcccggtgaggcgcactctttgaaggtggagaaggtgctgttccaagggaagtcagactaccaaaacgttatggtctttcagtcctctacgtacgggaaggtgctcgtccttgatggagttattcaggttacggagagggatgagtgtgcgtaccaagagatgatctctcacctgccctttgctccattatagat

SEQ ID NO: 21148 - DNA, 157 bp, Zea mays
  Clone ID: LIB3152-006-P1-K1-A9
taatattgtaccaacaatgtttttctataatattaccgcccttcttatgctcgcggcgcgctttcatgtcaagtgctgtctacctccacctatttttccacaatgcatcacaatgtctctctattgcatttcctttttatctctcgtaccttctcac

SEQ ID NO: 21149 - DNA, 305 bp, Zea mays
  Clone ID: LIB3152-006-P1-K1-B10
gtcatgacaagcagcaacaatcattacagcctcagcaatatcagcagggccaggaaaaatcacaacagcaacaatgtcattgccaggagcagcaacagactacaaggtgcagctataactactatagcagtagctcaaatctaaaaaattgtcatgaattcctaaggcagcagtgcagccctttggtaatgccttttctccaatcacgtttgatacaaccaagtagctgccaggtattgcagcaacaatgttgtcatgatcttaggctgattgagccacaatacatttaccaagcaatttacaac

SEQ ID NO: 21150 - DNA, 263 bp, Zea mays
  unsure at all n locations
  Clone ID: LIB3152-006-P1-K1-B11
ggcgacccacgcgttcttccaactagcaacatagatttattattgtgnaccaacatggcagcgggagatttttcttctatgctcctgttctaatcagtgctgctacttataccatttatctcattgcatgaagctcctatagcttactatcatcctctacttttactacttttttttttttttatatcccattactttaaccttcatattatcatttattttattttattttactttatcatcttattttctctatatttttc

SEQ ID NO: 21151 - DNA, 386 bp, Zea mays
  Clone ID: LIB3152-006-P1-K1-B3
attgagaccaactagcaacatagaaagctcaatagtgtaccaacaatggcagccaaaatattttgcttccttatgctccttggtctttctgcaagtgttgctaccgcaaccattttcccacaatgctcacaagctcctatagcttcccttcttcccccatacctctcaccagcggtgtcttcaatgtgtgaaaacccaattgttcaaccctacaggatccaacaggcaatcgcaacaggcatcttaccattatcacccttgttcctccaacaaccgtcagccctattacagcagttacctttggtccatttggtggcacaaaacatcatggcacaacaactacaacaaactgtgctagcaaaccttgctgcatactctcagcaaca

SEQ ID NO: 21152 - DNA, 357 bp, Zea mays
  Clone ID: LIB3152-006-P1-K1-B5
ggaggagcagcagcagcaggcggcttccttgagcggcatcccactcagtgcttgcaaccatggctaggggattgaagaagcacttgaagaggctcaaggcgcccaagcattggatgctcgacaagcttggcggagcttttgctcccaagccatcttctggacctcacaagtccagggagtgccttcctctgatcctcatcatcaggaacaggctcaagtatgctctgaactaccgtgaggtcatttctatcctgatgcaacgccatgtacttgttgatggcaaggtcaggactgacaagacctaccctgctgggttcatggatgtcattttcatccctaagacaatggagaactaca

SEQ ID NO: 21153 - DNA, 387 bp, Zea mays
  unsure at all n locations
  Clone ID: LIB3152-006-P1-K1-B6
ctcgctgtgggcaatgcacctacttacttacaacaacagttgctgcaacagattgtaccagctctgactcagctagctgtggcaaaccctactgcctacttgcaacagttgcttccattcaaccaactggctgtgtcgaactctgctgtgtacctacaacagcgacaacagttacttaatccactagcagtggctaacccattggtcgctaacttcctgcagcagcaacaattgctgccatacaaccagttctctttgatgaaccctgccttgcagcaacccatcgttggaggtgccatcttttagattacatatgagatgtactcaacaatggtgccctcatacccgcatgtgtntcctagaaataatcaatatattgattgagat

SEQ ID NO: 21154 - DNA, 264 bp, Zea mays
  Clone ID: LIB3152-006-P1-K1-B7
agtgaaggtcttactgaatccatttatgttgcccacaaagatgagtacacagagggggagctggcatcactcaggcagctatttcagtcaaagatggctgtactgagagctgaggctaagcaacaatttgagtctactggctcaattggacttgcaaaaggagcatcatttaccacatcaccacatcaacagatatctgctactgttgtaactgaatttgttctttggaatgtgtaagccataacctgttgcactcttactttt

SEQ ID NO: 21155 - DNA, 379 bp, Zea mays
  Clone ID: LIB3152-006-P1-K1-B8
attttgagcattcagaaacacactttgcgaagctacctagcaacgacttaacaacaatggctaccaagatattagccctccttgcgcttcttgccctttttgtgagcgcaacaaatgcgttcattattccacaatgctcacttgcattcaacccacttgctctggcaaacgtagctgcataccaacaacaacaacaattgcaacagtttctgccagcgctcagtcaactagccatggtgaaccctgccgcctacctacaacagcaacaactgctttcatctagccctctcgttgtgggtaatgcacctacatacctgcaacaacaattgctgcaacagattgtaccagctctgactcagctagctgtggcaaaccctgc

SEQ ID NO: 21156 - DNA, 374 bp, Zea mays
  Clone ID: LIB3152-006-P1-K1-B9
ggcaatcgcagctggcatcttactctatatcaccctcgttcctccaacagggatgagccctattacagcagttacctttggtgcatttattggcacaaaacatcatggcacaacaactacaacaacttgtgctagcaaaccttgctgtctactcttagcaacagcagtatcttccattcaaccaattagctgcattgaactctgctttttatttgtaacaacaactacttccattcagccagctattttctggctacctccagcaatctcttttcattcaactaactgtcagcattgaactcttctgcttatttacagcatcaacaactactaccattctattctgttagctgttgtgagccctgcttctcttt

SEQ ID NO: 21157 - DNA, 386 bp, Zea mays
  Clone ID: LIB3152-006-P1-K1-C1
caaatgcgttcattattccacaatgctcacttgctccaagttccattattacacagttcctcccaccagttacttcaatgggcttcgaacacccagctgtgcaagcctataggctacaacaagcaattgcggcgagcgtcttacaacaaccaatttcccagttgcaacaacaatccttggcacatctaacaatacaaaccatcgcaacgcaacagcaacaacaattcctaccagcactgagccacctagccatggtgaaccctgccgcctacttgcaacagcagttgcttgcatcaaacccacttgctctggcaaacgtagttgcaaaccagccacaacaacagctgcaacagtttctgccagcgctcagtcaactagccatggtg

SEQ ID NO: 21158 - DNA, 112 bp, Zea mays
  unsure at all n locations
  Clone ID: LIB3152-006-P1-K1-C10
gaaagatgctgctgcagcttttgatgntgaaggggccgatctaggtagggttgctgatgatacacattgtatccacctacttaccttaaagccctgtacctggtgtatagac

SEQ ID NO: 21159 - DNA, 385 bp, Zea mays
  Clone ID: LIB3152-006-P1-K1-C2
acagcagtttcttccattcaaccaactagctgcattgaactctgcttcttatttgcaacaacaacaactaccattcagccagctatctgctgcctacccccagcaatttcttccattcaaccaactgacagcattgaactctcctgcttatttacagcagcaacaactactaccattcagccagctagctggtgtgagccctgctaccttcttgacacaaccacagttgttgccgttctaccagcacgctgcgcctaacgctggcaccctcttacaactgcaacaattgctgccattcaaccaacttgctttgacaaacccagcagcattctaccaacaacccatcattggtggtgccctcttttagatttcttatgagttatag

SEQ ID NO: 21160 - DNA, 292 bp, Zea mays
  Clone ID: LIB3152-006-P1-K1-C3
tcaatatctttcattatttcaaccttttttcttgatccaactctcattattacgggcgggatcaacaaataccattcaaccagctacctgcacccaaccccgaacaattataggcatcaaaccgacagacaggattgcactttactgcatctatacagcaagaacaactaactaccattttgtacatttactagtgagagccccgttacctaacagacacaaccacattttactatcattctaccactaagctatgcttaacgctggctcctacttacaactgcaattgttg

SEQ ID NO: 21161 - DNA, 293 bp, Zea mays
  Clone ID: LIB3152-006-P1-K1-C4
aacagcaacagctaccaccattcagccagctagctgatgtgagccctgttgccttcttgacacaacaacagttgttgccgttctacctgcacgctgcgcctaacgctggcaccctcttacaactgcaacaattgctgccattcaaccaacttgctttgacaaacccaacagcgttctaccaacaacccatcattggtggtgccctcttttagattgcttatgagttatagttcaataatgaagttttttggatgatgtttgtggcttcccagaaataagaaagtacatttctt

SEQ ID NO: 21162 - DNA, 390 bp, Zea mays
  unsure at all n locations
  Clone ID: LIB3152-006-P1-K1-C5
attgagaccaactagcaacatagaaagcacaatagtgtaccaacaatggcagccaaaatattttgcctccttatgctccttggtctttctgcaagtgctgctacggcgaccattttcccgcaatgctcgcaagctcctatagcttcccttcttcccccgtacctctcaccagcggtgtcttcggtatgtgaaaacccaattcttcaaccctacaggatccaacaggcaatcgcagctggcatcttacctttatcacccttgttcctccaacaatcatcagccctattacaacagttacctntggtgcatntattggcacaaaacatcaaggcacaacaactacaacaacttgtgctagcaaaccttgctgcctactctcagcaacagcag

SEQ ID NO: 21163 - DNA, 392 bp, Zea mays
  Clone ID: LIB3152-006-P1-K1-C6
tgagaccaactagcaacaataaaaggtcctttagggtaccaccaatggcagccaaaatattttgcctccttatgctccttggtctttctgcaagtgctgctacggcgaccattttcccgcaatgctcgcaagctcctatagcttcccttcttcccccgtacctctcaccagcggtgtcttcggtatgtgaaaacccaattcttcaaccctacaggatccaacaggcaatcgcagctggcatcttacctttatcacccttgttcctccaacaatcatcagccctattacaacagttacctttggtgcatttattggcacaaaacatcagggcacaacaactacaacaacttgtgctagcaaaccttgctgtctactctcagcaacagcagttt

SEQ ID NO: 21164 - DNA, 176 bp, Zea mays
  Clone ID: LIB3152-006-P1-K1-D12
caacaacaacaactaccattcagccagctatctgctgcctacccccagcaatttcttccattcaaccaactgacagctttgaactctcctgcttatttacagcagcaacaactactaccaatcagccagctagctggtgtgagccctgctaccttcttgacacaaccacaattgtt

SEQ ID NO: 21165 - DNA, 387 bp, Zea mays
  Clone ID: LIB3152-006-P1-K1-D2
cttcgaacacctagctgtgcaagccaacatgcaacaacaagcgcttgcggcgagcgtcttacaacaaccaattgcccaattgcaacaacaatccttgccacatctaacaatacaagccatcacaacgcaacagcaacaacagttcctaccagcactgagccacctagccatggtgaaccctgccgcctacttgcaagagcagctgcttgcatccaacccacttgctctggcgaacgtagttgcaaaccagcaacaacaacagctacaacagtttctgccaacgctcagtcaactagccatggtgaaccctgccgcctacgtacaacaacaacaactgctttcatctagcccgctcgctgtgggcaatgcacctacatacctgcaaca

SEQ ID NO: 21166 - DNA, 379 bp, Zea mays
  Clone ID: LIB3152-006-P1-K1-D3
ggagaagatggcggagcgggagcgcgagatggagctcgacgcgatcaaggagcagtacctcggctccaagaagcctaagaagcgtgttatcaagccctctgagaagttccgcttctcgtttgactgggaaaacaccgaggacaccagccgcgacatgaacgcgctctaccagtcgccgcacgaggcccgactgctctttggccggggcttccttgctggcatcgaccgacgtgagcagaagaaggcggcagctgcgcatgagaaggagacccgtgcagagctgcggcgcaaggctggtgtggaggaccgtccagaggatgacgctgtagataagaagaaggccgccgctgctgaaatgtatgacgcttttgatatgcgt

SEQ ID NO: 21167 - DNA, 364 bp, Zea mays
  Clone ID: LIB3152-006-P1-K1-D5
cccacgcgtccgattttgagcatttagattcacaccaagcgaagcacattagcaacaacctaacaacaatggctaccaagatattatccctccttgcgcttcttgcgctttttgcgagcgcaacaaatgcgttcattattccacaatgctcacttgctccaagttccattattacacagttcctcccaccagttacttcaatgggcttcgaacacccagctgtgcaagcctataggctacaacaagcaattgcggcgagcgtcttacaacaaccaatttcccaagtgcaacaacaatccttggcacatctaacaatacaaaccatcgcaacgcaacagcaacaacaatttctaccagcactgag

SEQ ID NO: 21168 - DNA, 396 bp, Zea mays
  Clone ID: LIB3152-006-P1-K1-D7
attgtactgcttgctccctttttatctttgggtatcctgaaccatcgagcgcgggctgtcaagctgactcgccttcacagtctacgcgaacgccttggtgccaccttcttctcccatctcaatgaactgatagcactctctttcaggtatgttcaccatggcaagggaatgcttcagcgccattagctgcttgcggagtttgatgccctgtttgattgtgatcaaggataataatgtaccttttgaagacattttttttgctgctcattattttaattctctccctctcatgggttttactttgctattcttgtcatggtcttggtatattgtttattacattttttatagtttatttctttctttttatctttttctatgtatctttattgtttt

SEQ ID NO: 21169 - DNA, 366 bp, Zea mays
  Clone ID: LIB3152-006-P1-K1-D8
cagaccattagctttatctactccttagcgcagaagaacccgatcgacaccatgagggtgttgctcgttgccctcgctctcctggctctcgctgcgagcgccacctccacgcatacaagcggcggctgcggctgccagccaccgccgccggttcatctaccgccgccggtgcatctgccacctccggttcacctgccacctccggtgcatctcccaccgccggtccacctgccgccgccggtccacctgccaccgccggtccatgtgccgccgtcggttcatctgccgccgccaccatgccactaccctactcaaccgccccggttctagtcttatccccagccacacccatgcccgtgccaacag

SEQ ID NO: 21170 - DNA, 385 bp, Zea mays
  Clone ID: LIB3152-006-P1-K1-E1
gcaacatagaaagtggaatccagtttcatcaatagagcaacaatggcgaccaagatgttttccctccttatgctccttgctctttctgcatgtgttgctaacgcgacaattttccctcaatgctcacaagctcctatagcttcccttcttcccccataccttccatcaatgatagcttcagtatgtgaaaacccagctcttcaaccctataggctccaacaagcaatcgcagcaagcaacatacctttatcacccttgtttcaacaatcgccagccctatctttggtgcagtcattggtacaaaccatcagggcacagcagctgcagcaactcgtgctacctgtgatcaaccaagtagctctggcaaacctttctccctactctc

SEQ ID NO: 21171 - DNA, 331 bp, Zea mays
  Clone ID: LIB3152-006-P1-K1-E12
atcagcaaagcggcagtgcgtagttaggatcgtcgaacagaacagcatgaagatggtcatcgttctcgtcgtgtgcctggctctgtcagctgccagcgcctctgcaatgcagatgccctgcccctgcgcggggctgcagggcttgtacggcgctggcgccggcctgacgacgatgatgggcgccggcgggctgtacccctacgcggagtacctgaggcagccgcagtgcagcccgctggcggcggcgccctactacgccgggtgtgggcagacgagcgccatgtaccagccgctccggcaacagtgctgccagcagcagatgaggatgatt

SEQ ID NO: 21172 - DNA, 355 bp, Zea mays
  Clone ID: LIB3152-006-P1-K1-E3
gggccgccacgcgtccggtgctttggtggtagagttgctgtttcttcacaatgtattcttacctcagatgcttggcctgaaactcttcattctcaaacacagtcctctaggaaaaattatgctgatgcaaaccgtgtatctgctatcattttgggcggaggcactggatctcagctctttcctctgacaagcacaagagctacgcctgctgtacctgttggaggatgttacaggcttattgatatccctatgagtaactgcttcaacagtggtataaataagatatttgtgatgagtcaggtcaattctactttccttaaccgccatattaatcgtacataccctgaaggcggga

SEQ ID NO: 21173 - DNA, 373 bp, Zea mays
  unsure at all n locations
  Clone ID: LIB3152-006-P1-K1-E4
ggaactttggtagcgtaagggcagctagatagagttcgactcggancncatctcgggcctcgtttccttctgcgagctcccgcctccctccgacgccaccagctatctcgagaattttattgggaaagaagctgctcaggacatcattcaagaatacttgcggaggaggggtcacattggttcctcaaatggaactgagagctttcagtcatctaaccttcagccttatgttaagccttcagctgatgcagcaactacacaaacaaagaaacaaacacgcacgcaaaaagattcagcatcttcttctagtcagaagtctaagagtcaatcagaaattgcagaatcacaagttcctttcaagagaggttcaaaa

SEQ ID NO: 21174 - DNA, 222 bp, Zea mays
  unsure at all n locations
  Clone ID: LIB3152-006-P1-K1-E7
attgagaccaactagcaacatatttttcacaatagtgnaccaacaatggcgggggaaatattttgcctccttatgctccttggtctttctgcaagtgctgctacggcgaccattttcccgaaatgctcgcaagctcctatagcttccctttttcccccgtacctctcaccagcggtgtttttgtgttgtgaaaacccaattcttcaaccttactggatccaa

SEQ ID NO: 21175 - DNA, 363 bp, Zea mays
  Clone ID: LIB3152-006-P1-K1-E8
cagaaacacaccaagcgaagttctctagcaacaacctaacaacaatggctaccgaggatattagccctccttgcgcttcttgcccttttagtgagcgcaacaaatgcgttcattattccacagtgctcacttgctcctagtgccattattccacagatcctcccaccagttactttaatgggcttcgaacattcagtcgtgcaagcctacaggctacaactagcgcttgctgcgagcgttttacaacaacccaatttcccaattgcaacaaccaaatcttggcacatttaaacctacaaaccattgtaacgcaacagcaacaacagtttttgccatcactgtgccacctagccgtggtgaacc

SEQ ID NO: 21176 - DNA, 322 bp, Zea mays
  Clone ID: LIB3152-006-P1-K1-E9
cttctgtatgtgaaaacccatttctttaaccctacaggatccaacaggcagtcgcagctggcatcttacctttatcacccttgttcctccaacaatcatcagccctattacatcagttacctttggtgcatttattggcacaaaacatcatggcacaacaactacaacaacttgtgctagcaaaccttgctgcctactctcatcaacagcagtttcttccattcaacctacttagctgcattgaactctgcttcttatttgcaacaacaacaactaccattcattcagtttcctgttgtctacccccagcaatttctttcat

SEQ ID NO: 21177 - DNA, 381 bp, Zea mays
  Clone ID: LIB3152-006-P1-K1-F1
caacaagcaacatagaaagtggaattcattagcaacaatagagcaacaatggagaccaagatattttccctccttatgctccttgctctttctacatgtgttgctaacgcgacaattttccctcaatgctcacaagctcctatagcttccctttttcccccataccttccatcaattatagcttcagtatgtgaaaacccagctcttcaaccatataggcttcaacaagcaatcgcagcaagcaacatacctttatcgcccttgttgtgtcaacaatcgccagccctatctttggtgcagtcattggtacaaaccatcagggcacaacagctgcagcaactcgtgctacctgtgatcaaccaagtagctctggcaaacctt

SEQ ID NO: 21178 - DNA, 324 bp, Zea mays
  Clone ID: LIB3152-006-P1-K1-F11
cagaaacacaccaagcgaagttctttatcaacaacctaacaacaatggctacgaagatattatccctccttgcgcttcttgcgctttttgcgagcgcaacaaatgcgttcattattccacaatgctcacttgctcctagttccattattccacagttcctcccaccagttacttcaatggccttcgaacacccagctgtgcaagcctataggctacaacaagcgattgcggcgagcgttttacaacaaccaattgcccaattgcaacaacaattcttggcacatctaacaatacaaaccattgtaacgcaacagcaacaacagt

SEQ ID NO: 21179 - DNA, 364 bp, Zea mays
  Clone ID: LIB3152-006-P1-K1-F12
tcgttcataaacacaccaagcgttttttcttagcaacgacttaacaacaatggctgccaagatattagccctccttgcgcttcttgccctttttgtgagcgcaacaaatgcgttcattattccacaatgctcacttgctcctagtgccattataccacagttccttcgaccagttactttaatgggcttcgaacacctagctgtgcaagcctacaggcttcaacaagcgcttgcggcgagcgtcttacaacaaccaattaaccaattgcaacaacaattcttggcactttaaccatacaaaccattgcaacacaacaactacaacagtttctaccactactgagcctactagatgtggtgaacc

SEQ ID NO: 21180 - DNA, 352 bp, Zea mays
  Clone ID: LIB3152-006-P1-K1-F2
gtttatggagaacccatttctgtgaaggaattggctgatcgtgtggcaagttatgttcatctttgcacgctgtactggtggctcaggccttttggttgcggtgttattcttggaggttatgatagggatgggccacagctctacatgatagaaccctcaggagtttcctacaaatacttcggtgctgcattggggaagggaagacaggctgcaaagactgagatagaaaagttgaaactttcggagcttacctgccgggaaggcattgttgaagttgcaaagataatttatggagtgcatgacgaagcgaaagacaaagcttttgagttggagttgagctggatctgtgatg

SEQ ID NO: 21181 - DNA, 353 bp, Zea mays
  Clone ID: LIB3152-006-P1-K1-F3
cagcattcagaaacacaccaagcgatttttactagcaacaacctaacaacaatggctgccaagatattagccctccttgcgcttcttgcccttttagtgagcgcaacaaatgcgttcattattccacagtgctcacttgctcctagtgccattattccacagttcctcccaccagttacttcaatgggcttcgaacattcagccgtgcaagcctacaggctacaactagcgcttgcggcgagcgtcttacaacaaccaattgcccaattgcaacaacaattcttggcacatctaaacctacaaaccatcgcaacgcaacagcaacaacagtttttgccatcactgagccacct

SEQ ID NO: 21182 - DNA, 375 bp, Zea mays
  Clone ID: LIB3152-006-P1-K1-F4
gcaacatagaaagcacaatagtgtaccaacaatggcagccaaaatattttgcttccttatgctccttggtctttctgcaagtgttgctaccgcaaccattttcccacaatgctcacaagctcctatagcttcccttcttcccccatacctctcaccagcggtgtcttcaatgtgtgaaaacccaattgttcaaccctacaggatccaacaggcaatcgcaacaggcatcttaccattatcacccttgttcctccaacaaccgtcagccctattacagcagttacctttggtccatttggtggcacaaaacatcagggcacaacaactacaacaacttgtgctagcaaacccttgctgcatactcttagcaacatc

SEQ ID NO: 21183 - DNA, 359 bp, Zea mays
  Clone ID: LIB3152-006-P1-K1-F6
tcgcagaaacacaccaagcgaagctacttattatcgacttaacaacaatggctaccaagagattagccctccttgcgcttcttgccctttttgtgagcgcaacaaatgcgttcattattccacaatgctcacttgctcctagtgccattataccacagttcctccgaccagttacttcaatgggcttcgaacacctagctgtgcaagcctacaggctacaacaagcgcttgcggcgagcgtcttacaacaaccaattaaccaattgcaacaacaattcttggcacatctaaccatacaaaccattgcaacacaacagcaacaacagttcctaccagcactgagcccactagatgtggtg

SEQ ID NO: 21184 - DNA, 382 bp, Zea mays
  Clone ID: LIB3152-006-P1-K1-F7
caacatagaaagtggaatacattatcaacaatagagcaacaatggcggccaagatattttccatccttatgctccttgctctttctgcatgtgttgctaacgcgaccatttttcctcaatactcacaagctcctatagctgcccttcttcccccataccttccatcaatgaccgcttcagtatgtgaaaacccagcccttcaaccctacaggctccaacaagcaatcgcaacaagcaacttacctttatcacccctgttctttcaacaatcgccagccctatctttggtgcagtcattggtacaaaccatcagggcacaacagctgcagcaactcgtgctaccagtgatcagccaagtagctctggcaaacctttcttccta

SEQ ID NO: 21185 - DNA, 135 bp, Zea mays
  Clone ID: LIB3152-006-P1-K1-F8
ctcattgactccagattgtataactcttcaccatgaaggcgctgatcggggcggctgctttcctggcgctcgcttctagcgccgccttcagtacaagcaagcggtatgaggctgccagaacaccaccgatttatt

SEQ ID NO: 21186 - DNA, 381 bp, Zea mays
  Clone ID: LIB3152-006-P1-K1-G1
gaccaacaagcaacatagaaagtggtattcagtagcaacaatagagcaacaatggagaccaagatattttccctccttatgctccttgctctttctacatgtgttgctaacgcgacaattttccctcaatgctcacaagctcctatagcttccctttttcccccataccttccatcaattatagcttcagtatgtgaaaacccagctcttcaaccatataggcttcaacaagcaatcgcagcaagcaacatacctttatcgcccttgttgtgtcaacaatcgccagccctatctttggtgcagtcattggtacaaaccatcagggcacaacagctgcagcaactcgtgctacctgtgatcaaccaagtagctctggcaaac

SEQ ID NO: 21187 - DNA, 391 bp, Zea mays
  Clone ID: LIB3152-006-P1-K1-G10
gcgcgcgaacagcgccaaccgcggtaaccagtgggacctcatggagcactacgtcaagattctggagctggaggagtcgatcgcgcggatgaaagtgattcacgtcgcggggaccaaggggaagggttccacatgcacattcaccgagtcaatcctgcgatcgtgtggcttccatactgggctgttcacctcaccacatttgatggatgttagagagcgatttcagctagatggggttaatatttctgaagagaaatttttgaagtacttctggtggtgctggaacaagttgaaggagaagactgatgatgatattcccatgccagcctatttcaggttcctcgcgttgctcgcattcaagatattttctgctgagcaggtagatgttgct

SEQ ID NO: 21188 - DNA, 297 bp, Zea mays
  Clone ID: LIB3152-006-P1-K1-G11
gcgcgcgaacagctccaacttttgtaaccagagggacctcatggagcaggacgtgaagattctggatctggatgagtctatcgctcgtatgaaagtgatttactgttcttggaccaatgggaaggtgtccacatgctcatttaccgagttaatcttgcaatctgttggttttcatactggtctgtttactttaccacatttgattgttgttagagagctattccatcttatttgacttaattttttttatttgtttttttttgaagtactctatctcttgtgttggatcttattctt

SEQ ID NO: 21189 - DNA, 383 bp, Zea mays
  Clone ID: LIB3152-006-P1-K1-G2
aactagcaacatagaaagcacaatattgtaccaacaatggcagccaaaatattttgcttccttatgctccttggtctttctgcaagtgttgctaccgcaaccattttcccacaatgctcacaagctcctatagcttcccttcttcccccatacctctcaccagcggtgtcttcaatgtgtgaaaacccaattgttcaaccctacaggatccaacaggcaatcgcaacaggcatcttaccattatcacccttgttccttcaacaaccgtcagccctattacagcagttacctttggtccatttggtggcacaaaacatcagggcacaacaactacaacaacttgtgctagcaaaccttgctgcatactctcagcaacatcagtt

SEQ ID NO: 21190 - DNA, 356 bp, Zea mays
  Clone ID: LIB3152-006-P1-K1-G3
gagaccaactagcaacatagaaagtacattagtgtaccaacaatggcagctaaaatatgttgcctccttatgctccttggtctttctgcaagtgctgctacggcgaccattttcccacaatgctcacaagctcctatagcttcccttcttcccccgtacctctcaccaacggtgtcttcggtatgtgaaaacccaattcttcaaccctacaggatccaacaggcaatcgcagctggcatcttaccttgatcacccttgttcctccaacaatcatcagccctattacagcagttacctttggtgcatttattggcacaaaacatcagggcacaacaactacaacaacttgtgctagc

SEQ ID NO: 21191 - DNA, 337 bp, Zea mays
  Clone ID: LIB3152-006-P1-K1-G4
agcacaatagtgtaccaacaatggcagctaaaatattttgcctccttatgctccttggtctttctgcaagtgctgctacggcgaccattttcccacaatgctcacaagctcctatagcttcccttcttcccccgtacctctcaccaacggtgtcttcggtatgtgaaaacccaattcttcaaccctacaggctccaacaggcaatcgtagctggcatctgacctatctcaccctagcatctacaacagatattagccctattacagcagctacctttggagcatttattgggacaaaacattagggcacaacaactacaacaacttgtgctagcaaa

SEQ ID NO: 21192 - DNA, 359 bp, Zea mays
  Clone ID: LIB3152-006-P1-K1-G5
attttcatcattcacaaacacacctagtttagcgcactagcaacaacctaacaggcagtggctaccaagatattagccctccttgcgcttcttgcccttttagtgagcgcaacaaatgcgttcattattccacagtgctcactagctcctagtgccattatttcacagaatcctcccaccagttaccttacatgggctttgaacattcagccgtgcaagcctacaggctacaactagtgcttgctgcgagcgttttacaacaaccaattgcccaattgtaacaacattccttggcacatctaaacctacaaaccaatgctattgcaacatggacatcagtttctgtcatcactgatcca

SEQ ID NO: 21193 - DNA, 471 bp, Zea mays
  unsure at all n locations
  Clone ID: LIB3152-006-P1-K1-G6
cggcnaattagctcatcnnngactccagattgtgatgtaactcgnnacaccatgaagnngtgctgagtcggtggcccttggcttctcctgggcgcnntcgctgcgaggcnngccgcctctcagtacaagggcggcggctgggtggctgcctagactaccnnaccgtttcaatctaccccgcctccnnngttctatannngccgcctnnccgttctaattctgcnncgccgcangnncagcagcccccgcagcccatgggctaatactctccacttctaacccactcgcagctttaagcctcgttgcccagcangnnttcggatctcctgcgnnngcgttcggcagctngtcgtgcagctcccgttcccttgggccaagtgggcgtcgaggttccctgagggcaccaagtgcaagccccggcgggcgacgctcctacggcttcgccacaagtgcccaggcgctgcagcagca

SEQ ID NO: 21194 - DNA, 251 bp, Zea mays
  Clone ID: LIB3152-006-P1-K1-G7
gcaattagctcatcgactctcattattgtagaactcgacaccatgaaggtgcggagcgttgcccttgctctcctggcgctcgctgcgagcgccgcctccagtacaagcggctgctgtggctgtcagacaccaccgtttcatctaccgtctccgttctatatgccgactccgttctatctgtcgccttatcatgtatccgcagccttggtaataccctacttaaccaccgcatttaagcccgtgccagcagt

SEQ ID NO: 21195 - DNA, 272 bp, Zea mays
  Clone ID: LIB3152-006-P1-K1-G8
attgagaccaactagcaacattattgttcactagcgttccaacaatggcgggcggtgatatttagtcttcttaggctccttggcaattgcgcaagtgctgacactgttaccatattgctgcaatgctcgtatgcttccattgcttccctcctacctctgtacctcttaccattcgtgttttcatgtcgtgatatcttaattcttataaccttttatatatccaacactctattcatccttccttataatttttattatccttgtttctcata

SEQ ID NO: 21196 - DNA, 369 bp, Zea mays
  Clone ID: LIB3152-006-P1-K1-G9
ctccagagcgcagaagaacccgatcgacaccatgagggtgttgctcgttgccctcgctctcctggctctcgctgcgagcgccacctccacgcatacaagcggcggctgcggctgccagccaccgccgccggttcatctaccgccgccggtgcatctgccacctccggttcacctgccacctccggtgcatctcccaccgccggtccacctgccgccgccggtccacctgccaccgccggtccatgtgccgccgccggttcatctgccgccgccaccatgccactaccctactcaaccgccccggcctcagcctcatccccagccacacccatgcccgtgccaacagccgcattcaagcccgtgccagct

SEQ ID NO: 21197 - DNA, 353 bp, Zea mays
  Clone ID: LIB3152-006-P1-K1-H1
gattgtaccagctctaactcagctagctgtggcaaaccctgttgcctacttgcaacagctgcttccattcaaccaactaactatgtcgaactctgttgcgtacctacaacagcgacaacagttacttaatccattggcagtggctaacccattggtcgctgccttcctacagcagcaacaattgctgccatacaaccggttctctttgatgaatcctgtcttgtcgaggcagcaacccatcgttggaggtgccatcttttagattacatatgagatgtactcgataatggtgccctcataccggcatgtgtttcctagaaataatcaatatattggttgagatttatctcgat

SEQ ID NO: 21198 - DNA, 384 bp, Zea mays
  Clone ID: LIB3152-006-P1-K1-H10
cagaaacacaccaagcgaagcgcactagcaacaacctaacaacaatggctaccaagatattatccctccttgcgcttcttgcgctttttgcgagcgcaacaaatgcgtccattattccacaatgctcacttgctcctagttccattattccacagttcctcccaccagttacttcaatggccttcgaacacccagctgtgcaagcctataggctacaacaagcgattgcggcgagcgtcttacaacaaccaattgcccaattgcaacaacaatccttggcacatctaacaatacaaaccatcgcaacgcaacagcaacaacagttcctaccagcactgagccacctagccatggtgaaccctgtcgcctacttgcaacagcagc

SEQ ID NO: 21199 - DNA, 284 bp, Zea mays
  Clone ID: LIB3152-006-P1-K1-H11
gggggcccacgcttctataaacacaccaagcattttttttcaacaacctaacaacaatgggtcggagatattatccctccttgcgcttcttgcgctttttgcgagcgcaacaaatgcgttcattatttcacaatgctcacttgctcctagttccattatttcacagttcctcccaccagttacttcaatggccttcgaacacccagctgtgcaagcctattggttacaacaagcgattgctgctagtcgtttacaacaactcaattcccaattgcaacatcaat

SEQ ID NO: 21200 - DNA, 350 bp, Zea mays
  unsure at all n locations
  Clone ID: LIB3152-006-P1-K1-H12
cgaccctataaatcaccattcctaacatcattttttttttatgtacataacaaaaatgggggccggtggttttttcttttagatgactcattctttacatgactttggatctgaaatcctcccaagagctgtactagatcatagtgtgcaggcatgcatttttacgggctattgngagtgtgataacactaactaatacattcttttgatgcaaacttggccctcactgatcagcctttcaagtttgttttttatgatccaaaaacacctttcttcactgcaccccgatgcttgccttattnttacattttacttgtcttttacttatacaatttatttttttttttata

SEQ ID NO: 21201 - DNA, 381 bp, Zea mays
  Clone ID: LIB3152-006-P1-K1-H2
aaagcggcagtgcgtagagaggatcgtcgaacagaacagcatgaagatggtcatcgttctcgtcgtgtgcctggctctgtcagctgccagcgcctctgcaatgcagatgccctgcccctgcgcggggctgcagggcttgtacggcgctggcgccggcctgacgacgatgatgggcgccggcgggctgtacccctacgcggagtacctgaggcagccgcagtgcagcccgctggcggcggcgccctactacgccgggtgtgggcagacgagcgccatgtaccagccgctccggcaacagtgctgccagcagcagatgaggatgatggacgtgcagtccgtcgcgcagcagctgcagatgatgatgcagcttgagcgtgccgc

SEQ ID NO: 21202 - DNA, 389 bp, Zea mays
  Clone ID: LIB3152-006-P1-K1-H3
agaccaactagcaacatagaaagcacatttgtgtaccaacaatggcagccaaaatattttgcttccttatgctccttggtctttctgcaagtgttgctaccgcaaccattttcccacaatgctcacaagctcctatagcttcccttcttcccccatacctctcaccagcggtgtcttcaatgtgtgaaaacccaattgttcaaccctacaggatccaacaggcaatcgcaacaggcatcttaccattatcacccttgttcctccaacaaccgtcagccctattacagcagttacctttggtccatttggtggcacaaaacatcagggcacaacaactacaacaacttgtgctagcaaaccttgctgcatactctcagcaacatcagttt

SEQ ID NO: 21203 - DNA, 283 bp, Zea mays
  unsure at all n locations
  Clone ID: LIB3152-006-P1-K1-H4
tcgctggacgttncagcctagcaattagtctcatcttgactccacgatnntggagaaccctcgaccagccatgannaggtgctganntcgttgcccttgctttctcctggcnngctcgctgcgaggcnngccgcctcctagtacaagggcggcggcttgtgggctgcctagacactcnnaccgtttcaatctacccgccnnntccgttctatttatgccgccnnntccgttctaatttctgccgccnnngcagcagcaagccccgcagccccatgttgcaata

SEQ ID NO: 21204 - DNA, 249 bp, Zea mays
  Clone ID: LIB3152-006-P1-K1-H5
actagttctagatcgcgagcggccttcttttctttagattggagaactcgacggcatgatggtgctgatctgtgccctagctctactggcgctcgctgcgagcgcattcttcagtacaagctgaggctgtggatgtcagacactacctttttatttaccgactccgttctatatgccgacttcggtctatctgcctccgtatcatcatccgtagccatggtaataccccattcaaccactctagctaat

SEQ ID NO: 21205 - DNA, 395 bp, Zea mays
  Clone ID: LIB3152-006-P1-K1-H6
cagaaatatccataccttgcatcaatggtcatttatgtcttcaagaaagatgcacttttagaccttctcaagtcaaaatatattcaattacatgactttggatctgaaatcctcccaagagctgtactagatcatagtgtgcaggcatgcatttttacgggctattgggaggatgttggaacaatcaaatcattctttgatgcaaacttggccctcactgagcagccttccaagtttgatttttatgatccaaaaacacctttcttcactgcaccccgatgcttgcctccgacgcaattggacaagtgcaagatgaaagatgcatttatctcagatggttgcttactgagagaatgcaacatcgagcattctgtgattggagtctgctcacgtgt

SEQ ID NO: 21206 - DNA, 271 bp, Zea mays
  Clone ID: LIB3152-006-P1-K1-H7
cattagctttatctactccagagcttagaagaacccgatcgacaccatgagggggttgcttactttcctaactctcctggctctcgctgctagcgccacctacacgcatacaagctaagatttctgctttaatatcaccgtctatccatgaattactaccgcctttacatatgatttcttcacattttcatctatcctttgttgtaaatttaaccatttattgcttcatctttcatattttattattattttttattaataattacattta

SEQ ID NO: 21207 - DNA, 372 bp, Zea mays
  unsure at all n locations
  Clone ID: LIB3152-006-P1-K1-H8
tcgaagtggnaatactagtagcaacaatattatcaacaatnggcggccaagatattttccaggcttatgctccttgctctttctgcatgtgttgctaacgcgaccatttttcctcaatactcacaagctcctatagctgcccttcttcccccataccttccatcaatgaccgcttcagtatgtgaaaacccagcccttcaaccctacaggctccaacaagcaatcgcaacaagcaacttacctttatcacccctgttctttcaacaatcgccagccctatctttggtgcagtcattggtacaaaccatcagggcacaacagctgcagcaactcgtgctaccagtgatcagccaagtagcttctggaaacctt

SEQ ID NO: 21208 - DNA, 383 bp, Zea mays; identical to SEQ ID NO: 19482
  Clone ID: LIB3152-006-P1-K1-H9

SEQ ID NO: 21209 - DNA, 345 bp, Zea mays
  Clone ID: LIB3152-007-P1-K1-A1
catcaaggcacaacaactacaacaacttgtgctaggaaaccttgctgcctactctcagcaacagcagtttcttccattcaaccaactggctgcattgaactctgctgcttatttgcaacaacaactaccattcagtcagctagctgctgcctacccccagcaatttcttccattcaaccaactggcagcattgaactctgctgcttatttacaacagcaacagctaccaccattcagccagctagctgatgtgagccctgttgccttcttgacacaacaacagttgttgccgttctacctgcacgctgcgcctaacgctggcaccctcttacaactgcaacaatt

SEQ ID NO: 21210 - DNA, 384 bp, Zea mays
  Clone ID: LIB3152-007-P1-K1-A11
ttcagaaacacaccaagcgaatctttctagcaacgacttaacaacaatggctaccaagatattagccctccttgcgcttcttgccctttttgtgagcgcaacaaatgcgttcattattccacaatgctcacttgctcctagtgccattataccacagttcctccgaccagttacttcaatgggcttcgaacacctagctgtgcaagcctacaggctacaacaagcgcttgcggcgagcgtcttacaacaaccaattaaccaattgcaacaacaatccttggcacatctaaccatacaaaccatcgtaacacaacagcaacaacagttcctaccagcactgagccaactagatgtggtgaaccctgtcgcctacttgcaacagca

SEQ ID NO: 21211 - DNA, 338 bp, Zea mays
  Clone ID: LIB3152-007-P1-K1-A12
cccaggcaggcaggtcggcgaggagttcaggaagaccgaagaccgagccgtgcgggggctcgggacgggaacgggacaggaccccaaaatctcagatccttcctgcccgcccgcccgtgcccgtcgacgcgtcgttcttgccggccgcgccccacctccgccctctcctcctccagggggatcggatacgccacaggctgcgcgatggtgctgtgggtcttcggctacggctccctcatctggaaccccggcttcgacttcgacgacaaaatcctcggcttcatcaagggctacaagcgcacctttaatctcgcttgcattgaccacagaggcacacc

SEQ ID NO: 21212 - DNA, 377 bp, Zea mays
  Clone ID: LIB3152-007-P1-K1-A2
cctcccaccagttacttcaatggccttcgaacacccagctgtgcaagcctataggctacaacaagcgattgcggcgagcgtcttacaacaaccaattgcccaattgcaacaacaatccttggcacatctaacaatacaaaccatcgcaacgcaacagcaacaacagttcctaccagcactgagccacctagccatggtgaaccctgtcgcctacttgcaacagcagctgcttgcatccaacccacttgctctagcaaacgtagttgcaaaccagcaacaacaacaactgcaacagtttctgccagcgcttagtcaactagccatggtgaaccctgccgcctacctacaacagcaacaactgctttcatctagcccgc

SEQ ID NO: 21213 - DNA, 420 bp, Zea mays
  unsure at all n locations
  Clone ID: LIB3152-007-P1-K1-A3
gacccacgcgatccgagacccatatagctttatctacctccagtagcgcagaangaaccccgatcgacaccatgagggngtgttgctcgttgnccctcgcttctcctggactctcgctgcgaggccgccacctccacgacatacannagcggcggctgcggctgccagcccaccgccgccggttcatctacacgccgccggtgcatctgccacctccggttcacctgccacctccggtgcatctcccaccgccggtccacctgccgccgccggtccacctgccaccgccggtccatgtgccgccgccggttcatctgccgccgccaccatgccactaccctactcaaccgccccggcctcagcctcatccccagccacacccatgcccgtgccaacagccgtattcagcccgtgccagct

SEQ ID NO: 21214 - DNA, 390 bp, Zea mays
  Clone ID: LIB3152-007-P1-K1-A4
agaaagtggaatccagtagcaacaatagagcaacaatggagaccaagatattttccctgcttatgctccttgctctttctacatgtgttgctaacgcgacaattttccctcaatgctcacaagctcctatagcttccctttttcccccataccttccatcaattatagcttcagtatgtgaaaacccagctcttcaaccatataggcttcaacaagcaatcgcagcaagcaacatacctttatcgcccttgttgtgtcaacaatcgccagccctatctttggtgcagtcattggtacaaaccatcagggcacaacagctgcagcaactcgtgctacctgtgatcaaccaagtagctctggcaaacctttctccctactctccgcaacaac

SEQ ID NO: 21215 - DNA, 389 bp, Zea mays
  Clone ID: LIB3152-007-P1-K1-A5
catagaaagcacaatagtgtaccaacaatggcagccaaaatattttgcctccttatgctccttggtctttctgcaagtgctgctacggcgaccattttcccgaaatgctcgcaagctcctatagcttcccttcttcccccgtacctctcaccagcggtgtcttcggtatgtgaaaacccaattcttcaaccctacaggatccaacaggcaatcacagctggcatcttacctttatcacccttgttcctccaacaatcatcagccctattacatcagttacctttggtgcatttattggcacaaaacatcagggcacaacaactacaacaacttgtgctagcaaaccttgctgcctactctcagcaacagcagtttcttccattcaacca

SEQ ID NO: 21216 - DNA, 322 bp, Zea mays
  Clone ID: LIB3152-007-P1-K1-A6
aaacaagtagcgacagctcgacaaatatttgtgagagtgatccggcgctgagaagagagggctaagatcgccgcagccgccgcggcggcggcggcgctgtgcttcgcggccctggtggccgtggccgtctgccaaggcgaggtcgagcggcagaggctcagggacctgcagtgctggcaggaggtccaggagagcccgctcgacgcgtgccgccaggtcctcgaccggcagctaaccggcggcggcgtcggcggcccgttccggtggggcaccgggctccggatgcggtgctgccagcagcttcaggacgtgagccgctgag

SEQ ID NO: 21217 - DNA, 332 bp, Zea mays
  Clone ID: LIB3152-007-P1-K1-A7
acccacacgtccgttttctggtagtaccttcccccagttttcattttttaagagctaaattaatggtactccttaggatgtttggttgatggtgtgacttggcctccatccctaccaccgggatagacggtcgagtgggttactgcttccgcaggagaggaccagtacgagtagagtggctaggcttcgccatgttactcggttttctccgttagttatttccgctgcattaaaatttatggttattatttctgaaacttcgattatgtaatcactaatgatacttacaaaatcagtggttttatgttttccagcacacttcatttaacttt

SEQ ID NO: 21218 - DNA, 369 bp, Zea mays
  Clone ID: LIB3152-007-P1-K1-A8
aatggcagctaaaatattttgccttcttatgctccttggtctttctgcaagtgctgctacggcgaccattttcccacaatgctcacaagctcctatagcttcccttcttcccccgtacctctcaccaacggtgtcttcggtatgtgaaaacccaattcttcaaccctacaggatccaacaggcaatcgcagctggcatcttacctttatcacccttgttcctccaacaatcatcagccctattacagcagttacctttggtgcatttattggcacaaaacatcagggcacaacaactacaacaacttgtgctagcaaaccttgctgcctactctcagcaacagcagtttctttcattcaaccaactagc

SEQ ID NO: 21219 - DNA, 359 bp, Zea mays
  Clone ID: LIB3152-007-P1-K1-A9
ggcaagccttttgttgatgttctcaaggagggaggcgtcctccctggcatgaaggttgacaagggcaccattgaggttgttggcactgataaggagaccaccacccaaggccatgacgaccttggcaagcgctgcgccaagtactacgaggccggtgcccgctttgccaagtggcgcgctgttctcaagattggtcccaatgagccatcacagcttgccatcgacctgaacgctcagggtctggctcgctatgccatcatctgccaggagaatggactggtgccaattgttgagcctgagatccttgttgatggccctcatgacattgatctgtgcgcttacgacactgagaccgttct

SEQ ID NO: 21220 - DNA, 248 bp, Zea mays
  Clone ID: LIB3152-007-P1-K1-B1
gttagacattaaacctctgagagcgccctaccgacacacagggtgcagatgactcttgcctttgctgagggcctcaactcaatgagtgaggtgctcaccaggcctattaccacgcttgcatctgcactctaaggtatctgaacacttaggtgcgtatgccaacatgcaacaacatgccctcgccgggagagctttaaaacaaccaatatgtgaattgcaacaacaatctttggcacatatcataatac

SEQ ID NO: 21221 - DNA, 244 bp, Zea mays
  Clone ID: LIB3152-007-P1-K1-B10
gcggcagtgcgtatagaggattttttttacagaacagcatgaagatggtcatgcggggtcgtcttgtgcctggctctgtcagctgccagcgcctctgcaatgcagatgccctgcccctgcgcggggctgcagggcttgtacggtgctggcgccggcctgacttctatgatgggcgccggctggctgtacccctactcgtagtacctgtggcagcctcagtgcactccgctggcggcggcgccct

SEQ ID NO: 21222 - DNA, 385 bp, Zea mays
  unsure at all n locations
  Clone ID: LIB3152-007-P1-K1-B11
caccgcggcgccacaccgcgtgcgttggctgcttgctgccccgtgttccttggctcccgccgacaccgagcgccgccactctcaccggccaccgccgtcatggctgccccgccccgcgccaccgcggtcctcgcgtggggttccggggaggacgggcagcttggcatgggcgggaacgaggagaaggactgggcacactgcgtggaggcactcggttcctacgccgtcaccgtcgtcgtagccggtagccgcaactccctcgacaaaaaanaagacggccgcctcttcacttgggggtggaaccagcgcggtacgctcgggcacccgtcgaagacctagactgagagcttcctctgccccgtccacgctcttgtggggttgaaga

SEQ ID NO: 21223 - DNA, 388 bp, Zea mays
  Clone ID: LIB3152-007-P1-K1-B2
caagccataccccaagtccaggtactgccgtggtgtccctgaccccaagatcaggatctacgatgttggcatgaagagaaagggtgttgatgagttcccctactgtgtgcaccttgtctcttgggagaaggagaatgtctccagtgaggctcttgaggctgcccgtattgcctgcaacaagtacatgaccaagtctgcaggaaaggatgccttccaccttcgggtccgggttcaccccttccatgtccttcgtatcaacaagatgctttcgtgtgctggggctgataggctccagactggaatgaggggtgcctctggcaagcctcagggcacctgtgctagggtggacattggtcaagtcctcctttctgttcgatgcaaggacaac

SEQ ID NO: 21224 - DNA, 378 bp, Zea mays
  Clone ID: LIB3152-007-P1-K1-B3
cacgcccgcgcccccaccgacccgttttccaagggtgctgatttatttttccgggcagtaatctcgaacatggaaaaggtttatttgagcaggaatcctacagccaaaaccattctggagcttgtgcgatcttatgatggtgatcatatttgctatgatcactttgctttccggacatttggggtcaatggttatggtataaactcactttctgattttttcactgattttggttatttacctcgtgaagaactcagatttccagctaaaaagcttagggcactatggttttccccgcccaccaatgacggctactctggaactggtacatatggacctttgccaaggatattcattttagaacttcttgtggatgag

SEQ ID NO: 21225 - DNA, 313 bp, Zea mays
  Clone ID: LIB3152-007-P1-K1-B4
gtccgaactacgagcgagcggctgcgatttccagcgtccgagcgccccggcgccggtgtcctacgcggggaaggaccggcctcggactgctacggcgccggatgagcgagcaagtctgtttcttgggcaagctattggtcgatgtggcagcggagtaaagtactggacgggcgcgaccacatgaggttcggctcctgaagggtggaagtccagatcgttcttacccggcatatgaccttgatatttcatgggtaaaagactattgtcccccttctctaaagacttataagcttcttttgcctataattattag

SEQ ID NO: 21226 - DNA, 388 bp, Zea mays
  Clone ID: LIB3152-007-P1-K1-B5
caactagcaacatagaaagcacaatagtgtaccaacaatggcagccaaaatattttgcctccttatgctccttggtatttctgcaagtgctgctacggcgaccattttcccgcaatgctcacaagctcctatagcttcccttcttcccccgtacctctcaccagcggtgtcttcggtatgtgaaaacccaattcttcaaccctacaggatccaacaggcaatcgcagctggcatcttacctttatcacccttgttcctccaacaatcatcagccctattacagcagttacctttggtgcatttattggcacaaaacatcagggcacaacaactacaacaacttgtgctagcaaaccttgctgcctactctcagcaacagcagtttctt

SEQ ID NO: 21227 - DNA, 389 bp, Zea mays
  Clone ID: LIB3152-007-P1-K1-B6
caacaagcaacatagaaagtggaatccagtagcaacaatagagcaacaatggcgaccaagatattttccctccttatgctccttgctctttctgcatgtgttgctaacgcgacaattttccctcaatgctcacaagctcctatagcttcccttcttcccccataccttccatcaatgatagcttcagtatgtgaaaacccagctcttcaaccctataggctccaacaagcaatcgcagcaagcaacatacctttatcacccttgtttcaacaatcgccagccctatctttggtgcagtcattggtacaaaccatcagggcacagcagctgcagcaactcgtgctacctgtgatcaaccaagtagctctggcaaacctttctccctactc

SEQ ID NO: 21228 - DNA, 381 bp, Zea mays
  Clone ID: LIB3152-007-P1-K1-B7
cagaaacacaccaagcgaagcgcactagcaacaacctaacaacaatggctaccaagatattatccctccttgcgcttcttgcgctttttgcgagcgcaacaaatgcgtccattattccacaatgctcacttgctcctagttccattattccacagttcctcccaccagttacttcaatggccttcgaacacccagctgtgcaagcctataggctacaacaagcgattgcggcgagcgtcttacaacaaccaattgcccaattgcaacaacaatccttggcacatctaacaatacaaaccatcgcaacgcaacagcaacaacagtttctaccagcactgagccacctagccatggtgaaccctgtcggctacttgcaacagc

SEQ ID NO: 21229 - DNA, 386 bp, Zea mays
  Clone ID: LIB3152-007-P1-K1-B8
ccaactagcaacatagaaagcacaatagtgtaccaacaatggcagctaaaatattttgcctccttatgctccttggtctttctgcaagtgctgctacggcgaccattttcccacaatgctcacaagctcctatagcttcccttcttcccccgtacctctcaccaacggtgtcttcggtatgtgaaaacccaattcttcaaccctacaggatccaacaggcaatcgcagctggcatcttacctttatcacccttgttcctccaacaatcatcagccctattacagcagttacctttggtgcatttattggcacaaaacatcagggcacaacaactacaacaacttgtgctagcaaaccttgctgcctactcttaagaacagcagttt

SEQ ID NO: 21230 - DNA, 384 bp, Zea mays
  Clone ID: LIB3152-007-P1-K1-B9
cgcaaattgcaccaagaaattctatctagaggccgtcgacaggggaattaatggcgtcgtcgtctagcagcagccaccgccgcctcatcctcgcagccgccgtcctgctctccgtgctcgcggctgccagcgccagcgccgggacctcctgcgtgccggggtgggccatcccgcacaacccgctcccgagctgccgctggttcgtgaccagccggacctgcggcatcgggccgcgcctcccgtggccggagctgaagaggagatgctgccgggagctggcggacatcccggcgtactgccggtgcacggcgcttagcatcctcatggaccgcgcgatcccgccgggcccggacgctcagctggagggcctccttgaggacctgc

SEQ ID NO: 21231 - DNA, 388 bp, Zea mays
  Clone ID: LIB3152-007-P1-K1-C1
gcaacatagaaagcacaatagtgtaccaacaatggcagctaaaatattttgcctccttatgctccttggtctttctgcaagtgctgctacggcgaccattttcccacaatgctcacaagctcctatagcttcccttcttcccccgtacctctcaccaacggtgtcttcggtatgtgaaaacccaattcttcaaccctacaggatccaacaggcaatcgcagctggcatcttacctttatcacccttgttcctccaacaatcatcagccctattacagcagttacctttggtgcatttattggcacaaaacatcagggcacaacaactacaacaacttgtgctagcaaaccttgctgcctactctcagcaacagcagtttcttccattc

SEQ ID NO: 21232 - DNA, 288 bp, Zea mays
  Clone ID: LIB3152-007-P1-K1-C10
caacaagcaacatagaaagtgtatttcagtagcaacaatagagcaacaatggagaccaagatattttccctccttatgctccttgctctttctacatgtgttgctaacgcgacaattttccctcaatgctcacaagctcctatagctttcctttttcccccataccttccatcaattatagcttcagtatgtgaaaacccagctctttaaccatataggcttcaacaagcaatctctgcaagcaacatacctttatcgcctcttgtgtgtcaacaatcgccagcccta

SEQ ID NO: 21233 - DNA, 368 bp, Zea mays
  Clone ID: LIB3152-007-P1-K1-C11
tcgcccacgcgtccgtccacgcgttcttttggcttataatatagtcgaccattcggacccaagtggagtgggacacttggcttaatttttcagcatgctggtgctcgtgatgataaagggattccggtcatcagggatttctataacagccaattgactgccagttgacatgattatgattatacactgttagctaagtttgaaagtattcacacagtttctggagaccatagctttacaatgattgtttttaactattagctaggtctttctgttcttctggagtggctaatgtttaacctgacttacagtactcttgtggtattgtcttttatatttgttctgctttgcttctattatgagccttt

SEQ ID NO: 21234 - DNA, 300 bp, Zea mays
  unsure at all n locations
  Clone ID: LIB3152-007-P1-K1-C2
cccacgcgtgcgattttgnncattcagaaacacaccaagcgaagcacattagcaacaacctaacaacaatggctaccaagatattattcctccttgcgcttgttgcgctttttgcgagcgcaacaaatgccttcattattccacaatgctcacttgctctaagtttcattgttacacaggtccttccaccagttacttgaatgggctttgaacacccagttgtgcgagcttataggcttcaacaagcggttgtaacaagcatcttacaacaaccaatttcccagttgcnccaacaattct

SEQ ID NO: 21235 - DNA, 337 bp, Zea mays
  Clone ID: LIB3152-007-P1-K1-C4
agcaaagcggcagtgcgtagagaggatcgtcgaacagaacagcatgaagatggtgagggttctcgtcgtgtgcctggctctgtcagctgccagcgcctctgcaatgcagatgccctgcccctgcgcggggctgcagggcttgtacggcgctggcgccggcctgacgacgatgatgggcgccggcgggctgtacccctacgcggagtacctgaggcagccgcagtgcagcccgctggcggcggcgccctactacgccgggtgtgggcagactagcgccatgtaccagccgctccggtaacagtgctgccagcagcagatgaggatgatggacgtgcat

SEQ ID NO: 21236 - DNA, 295 bp, Zea mays
  Clone ID: LIB3152-007-P1-K1-C5
tgggtcttcagaccattagctttatctactccagagcgcagaagaacccgatcgacaccatgagggtgttgctcgttgccctcgctctcctggctctcgctgcgagcgccaccttcacgcatacaagcggcggctgcggctgccagccaccgccgccggttcatctaccgtcgtcggtgcatttgccaccttcggttcacctgccaccttcggtgcatcttccaccgccggttcacctgccttcgtcggttcatctgtcaccgtctgtccatgtgccttcgtctgttcatttgtc

SEQ ID NO: 21237 - DNA, 381 bp, Zea mays
  Clone ID: LIB3152-007-P1-K1-C7
ggaggttgagagctcggacatcatttacaatgtgaaggcgaagatccaggacaaggagggcatccccccggaccagcagcgtctgatcttcgccggcaaacagctggaggatggccgcaccttagcagactacaacatccaaaaggagagcaccctccaccttgtgctccgtctccgtggtggtcagtaagtcatgggtcgtttaagctgccgatgtgcctgcgtcgactggtgccctctccatatggaggttgtcaaagtatctgctgttcgtgtcatgagtcgtgtcagtgttggtttaataatggaccggttgtgttgtgtgtgcgtactacccagaactatgaccaatcaagtattaatttggtgtttgaaaataaa

SEQ ID NO: 21238 - DNA, 382 bp, Zea mays
  Clone ID: LIB3152-007-P1-K1-C8
tccagatcagcaaagcggcagtgcgtagagaggatcgtcgaacagaacagcatgaagatggtcatcgttctcgtcgtgtgcctggctctgtcagctgccagcgcctctgcaatgcagatgccctgcccctgcgcggggctgcagggcttgtacggcgctggcgccggcctgacgacgatgatgggcgccggcgggctgtacccctacgcggagtacctgaggcagccgcagtgcagcccgctggcggcggcgccctactacgccgggtgtgggcagacgagcgccatgtaccagccgctccggcaacagtgctgtcagcagcagatgaggatgatggacgtgcagtccgtctcgcatcagctgcagatgatgatgcatcttg

SEQ ID NO: 21239 - DNA, 110 bp, Zea mays
  Clone ID: LIB3152-007-P1-K1-C9
tagacttcataaacacaccatttttttttctgaggaccgactaccttaccacagtggttaccatgatattatatccgccttgggcttcgatgtgctagttgtgagcgcac

SEQ ID NO: 21240 - DNA, 389 bp, Zea mays
  Clone ID: LIB3152-007-P1-K1-D1
cagccctattacagcagttacctttggtgcatttattggcacaaaacatcagggcacaacaactacaacaacttgtgctagcaaaccttgctgcctactctcagcaacaacagtttcttccattcaaccaactagctgcattgaactctgcttcttatttgcaacaacaacaactaccattcagccagctatctgctgcctacccccagcaatttcttccattcaaccaactgacagctttgaactctcctgcttatttacagcagcaacaactactaccattcagccagctagctggtgtgagccctgctaccttcttgacacaaccacaattgttgccgttctaccagcacgctgcgcctaacgctggcaccctcttacaactgcaa

SEQ ID NO: 21241 - DNA, 377 bp, Zea mays
  Clone ID: LIB3152-007-P1-K1-D11
cagtgcgccacccgcacccactaacttggcaacgaaacccagtcggaagctagaccggcgacaagtgcagcgctcgccgcgatggattctgactacggcgtgccgcgcgagctgtcggaggtgcagaagaagcgcgcgctctaccagcccgaggtgcccccctgcctccaggggactactgtcagggtggagtatggtgacgccgcaattgcagctgaccaggcaggcgctcatgtgatcagccatgcgtttccttacacctatgggcagtcctttgcacatttcctcaggaagactgctgttgtccttgatgcttaggatatatctgaacaccctgtggtcaaggttggtattggcttctgtggtaggcaatttcc

SEQ ID NO: 21242 - DNA, 257 bp, Zea mays
  Clone ID: LIB3152-007-P1-K1-D12
aactgttactgccatcactgttctttttagccgtggtgaaccttgtcgtcggggtgtaacagcagctacttgcatccaacccactagctatggctaactgttgctgcattaccagtatcaacaactgtttgcaacattttatgccagcgctcagtcaactagccatggagaaccctgtctcctacctacaacagctacaattgcttttatttagcccgatctcctgtgtgcattgcactaacgtacctactataaca

SEQ ID NO: 21243 - DNA, 388 bp, Zea mays
  Clone ID: LIB3152-007-P1-K1-D3
agaaagtggaatccagtagcaacaatagttcaacaatggagaccaagatattttccctccttatgctccttgctctttctacatgtgttgctaacgcgacaattttccctcaatgctcacaagctcctatagcttccctttttcccccataccttccatcaattatagcttcagtatgtgaaaacccagctcttcaaccatataggcttcaacaagcaatcgcagcaagcaacatacctttatcgcccttgttgtgtcaacaatcgccagccctatctttggtgcagtcattggtacaaaccatcagggcacaacagctgcagcaactcgtgctacctgtgatcaaccaagtagctctggcaaacctttctccctactctccgcaaca

SEQ ID NO: 21244 - DNA, 373 bp, Zea mays
  Clone ID: LIB3152-007-P1-K1-D4
attttgagcattcagaaacacaccattctaagcacattagcaacaacctaacaacaatggctaccaagatattatccctccttgcgcttcttgcgctttttgcgagcgcaacaaatgcgttcattattccacaatgctcacttgctccaagctccattattacacagttcctaccaccagatacttcaatgggcttagaacacccagctgtgcaagcctataggctacaacacgcaattgtggcgagcgttttacaacaaccaatttcccagttgctacaacaatcctttgtacatctaaccatacaaaccattccaacgcaacagcatcatcaattcctaccagtactgagccacctaaccatggtgaaccc

SEQ ID NO: 21245 - DNA, 378 bp, Zea mays
  Clone ID: LIB3152-007-P1-K1-D6
cgaagccgcactgtgagagagggactcggcctgttgtcccggcttttagacgcaacttccatcgctgcgaagctatccattcgtgttcgtcatggccgccagcgtcaccgtggaaaacctcaaccccaaggtcttaaaatgtgagtatgcagtccgtggggagattgtcatccatgctcagcgcctgcagcaacaactacaaacacaaccagggtctcttccttttgatgagatcctctattgcaatattgggaatccccaatctcttggtcagcaacctgtgacattcttcagggaggttcttgctctttgtgatcatccgtgcctcttggaaaaagaggaaaccaaatcattgttcagtgctgatgcaatttctcg

SEQ ID NO: 21246 - DNA, 346 bp, Zea mays
  Clone ID: LIB3152-007-P1-K1-D7
catcagcagcttctgcttgctctgtggggaaggagagagagagagagcgagagagagatctagtagagaggctagtaggtggtcctcgaacgaagatgttggcggtgttcagcgggcaggtggtggaggtgccggcggagctggtggcggcgggcagccggacgccgtcgcccaagacgaaggcgtcgcagctggtggggcgcttcctggccgcgtccgagccggccgtgtccgtgcagctcggcgaccacggtcaccttgcctactcccacaccaaccaggcgctctttcgccccaggtcgttcgcggccaaggacgaggtgttctgcctgttcgagggggtgct

SEQ ID NO: 21247 - DNA, 381 bp, Zea mays
  Clone ID: LIB3152-007-P1-K1-D8
agcctagcaattagctcatcgactctagattggagaactcgacaccatgaaggtgctgatcgttgcccttgctctcctggcgctcgctgcgagcgccgcctccagtacaagcggcggctgtggctgccagacaccaccgtttcatctaccgcctccgttctatatgccgcctccgttctatctgccgccgcagcagcagccgcagccatggcaataccccactcaaccaccgcagctaagcccgtgccagcagttcggatcctgcggcgtcggcagcgtcggcagcccgttcctgggccagtgcgtcgagttcctgaggcaccagtgcagcccggcggcgacgccctacggctcgccacagtgccaggcgctgcagcagca

SEQ ID NO: 21248 - DNA, 94 bp, Zea mays
  Clone ID: LIB3152-007-P1-K1-D9
agcagagaaatttcaacattattgttatatttgtgaacttggcaccatggaggagatgatagaggacatagctcgactgtcacacgataaaagc

SEQ ID NO: 21249 - DNA, 388 bp, Zea mays
  Clone ID: LIB3152-007-P1-K1-E1
agcattcagaaacacaccaagcgttgttcactagcaacaacctaacaacaatggctaccaagatattagccctccttgcgcttcttgcccttttagtgagcgcaacaaatgcgttcattattccacagtgctcacttgctcctagtgccattattccacagttcctcccaccagttacttcaatgggcttcgaacatccagccgtgcaagcctacaggctacaactagcgcttgcggcgagcgtcttacaacaaccaattgcccaattgcaacaacaatccttggcacatctaaacctacaaaccatcgcaacgcaacagcaacaacagtttctgccatcactgagccacctagccgtggtgaaccctgtcgcctacttgcaacagca

SEQ ID NO: 21250 - DNA, 389 bp, Zea mays
  Clone ID: LIB3152-007-P1-K1-E10
tagcaacatagaaagcacaatagtgttccaacaatggcagccaaaatattttggtgtccttatgctccttggtctttctgcaagtgctgctaccgcaaccattttcccacaatgctcacaagctcctatagcttcctttcttcccccatacctctcaccagcggtgtcttcagtatgtgaaaacccaattcttcaaccctacaggatccaacaggcaatcgcagcaggcatcttacctttatcacccttgttcctccaacaaccgtcagccctattacagcagttacctttggtgcatttgttggcacaaaacatcaaggcacaacaactacaacaacttgtgctaggaaaccttgctgcctactctcagcaacagcagttttcttcca

SEQ ID NO: 21251 - DNA, 369 bp, Zea mays
  Clone ID: LIB3152-007-P1-K1-E11
gtacccctacgcggagtacctgagtgcagccgcagtgcagcccgctggcggcggcgccctactacgccgggtgtgggcagacgagcgccatgtaccagccgctccggcaacagtgctgccagcagcagatgaggatgatggacgtgcagtccgtcgcgcagcagctgcagatgatgatgcagcttgagcgtgccgctgccgccagcagcagcctgtacgagccagctctgatgcagcagcagcagcagctgctggcagcccagggtctcaaccccatggccatgatgatggcgcagaacatgccggccatgggtggactctaccagtaccagtaccagctgcccagctaccgcaccaacccctgtggcg

SEQ ID NO: 21252 - DNA, 359 bp, Zea mays
  Clone ID: LIB3152-007-P1-K1-E12
attttgagcattcagaaacacaccttgcgaagcgcactagcaacgacctaacaacaatggctaccaagatattagccctccttgcgcttcttgccctttttgtgagcgcaacaaatgcgttcattattccacaatgctcacttgctcctagtgccattattccacagttcctcccaccagttacttcaatgggcttcgaacacctagctgtgcaagccaacatgcaacaacaagcgcttgcggcgagcgtcttacaacaaccaattgcccaattgcaacaacaatcctttgccacatttaacaatacaagccattacatcgcaacagcaacaacagttcctaccagcacttgatccacc

SEQ ID NO: 21253 - DNA, 390 bp, Zea mays
  Clone ID: LIB3152-007-P1-K1-E2
caacaagcaacatagaaagtggaattcagtagcaacaatagagcaacaatggagaccaagatattttccctccttatgctccttgctctttctacatgtgttgctaacgcgacaattttccctcaatgctcacaagctcctatagcttccctttttcccccataccttccatcaattatagcttcagtatgtgaaaacccagctcttcaaccatataggcttcaacaagcaatcgcagcaagcaacatacctttatcgcccttgttgtgtcaacaatcgccagccctatctttggtgcagtcattggtacaaaccatcagggcacaacagctgcagcaactcgtgctacctgtgatcaaccaagtagctctggcaaacctttctccctac

SEQ ID NO: 21254 - DNA, 385 bp, Zea mays
  Clone ID: LIB3152-007-P1-K1-E3
agaccaacaagcaacatagaaagtggaattcagtagcaacaatagagcaacaatggcgaccaagatattttccctccttatgctccttgctctttctgcatgtgttgctaacgcgacaattttccctcaatgctcacaagctcctatagcttcccttcttcccccataccttccatcaatgatagcttcagtatgtgaaaacccagctcttcaaccctataggctccaacaagcaatcgcagcaagcaacatacctttatcacccttgtttcaacaatcgccagccctatctttggtgcagtcattggtacaaaccatcagggcacagcagctgcagcaactcgtgctacctgtgatcaaccaagtagctctggcaaacctttct

SEQ ID NO: 21255 - DNA, 393 bp, Zea mays
  Clone ID: LIB3152-007-P1-K1-E4
cagaaacacaccaagcgaagcgcactatcaacaacctaacaacaatggctaccaagatattagccctccttgcgcttcttgcccttttagtgagcgcaacaaatgcgttcattattccacagtgctcacttgctcctagtgccattattccacagttcctcccaccagttacttcaatgggcttcgaacatccagccgtgcaagcctacaggctacaactagcgcttgcggcgagcgtcttacaacaaccaattgcccaattgcaacaacaatccttggcacatctaaacctacaaaccatcgcaacgcaacagcaacaacagtttctgccatcactgagccacctagccgtggtgaaccctgtcgcctacttgcaacagcagctacttgcat

SEQ ID NO: 21256 - DNA, 346 bp, Zea mays
  Clone ID: LIB3152-007-P1-K1-E5
tccagatcagcaaagcggcagtgcgtagtgaggatcgtcgaacagaacagcatgaagagggtcatcgttctcgtcgtgtgcctggctctgtcagctgccagcgcctctgcaatgcagatgccctgcccctgcgcggggctgcagggcttgtacggtgctggcgccggcctgacgacgatgatgggcgccggcgggctgtacccctacgcggagtacctgaggcagtcgcagtgcagcccgctggcggaggtgccctactacgccgggtgtgggcagacgagcgccatgtaccagccgcttcggcaacagtgctgtcagcagcagatgaggatgatggacgtgcagt

SEQ ID NO: 21257 - DNA, 385 bp, Zea mays
  Clone ID: LIB3152-007-P1-K1-E6
tcagaaacacaccaagcgaagcgcactatcaacgacctaacaacaatggctaccaagatattagccctccttgcgcttcttgccctttttgtgagcgcaacaaatgcgttcattattccacaatgctcacttgctcctagtgccattattccacagttcctcccaccagttacttcaatgggcttcgaacacctagctgtgcaagccaacatgcaacaacaagcgcttgcggcgagcgtcttacaacaaccaattgcccaattgcaacaacaatccttgccacatctaacaatacaagccatcacaacgcaacagcaacaacagttcctaccagcactgagccacctagccatggtgaaccctgccgcctacttgcaagagcagc

SEQ ID NO: 21258 - DNA, 387 bp, Zea mays
  Clone ID: LIB3152-007-P1-K1-E7
agaccaactagcaacatagaaagcacaatagtgtaccaacaatggcagccaaaatattttgcctccttatgctccttggtctttctgcaagtgctgctacggcgaccattttcccgcaatgctcgcaagctcctatagcttcccttcttcccccgtacctctcaccagcggtgtcttcggtatgtgaaaacccaattcttcaaccctacaggatccaacaggcaatcgcagctggcatcttacctttatcacccttgttcctccaacaatcatcagccctattacaacagttacctttggtgcatttattggcacaaaacatcagggcacaacaactacaacaacttgtgctagcaaaccttgctgcctactctcagcaacagcagt

SEQ ID NO: 21259 - DNA, 386 bp, Zea mays
  Clone ID: LIB3152-007-P1-K1-E8
tccagatcagcaaagcggcagtgcgtagagaggatcgtcgaacagaacagcatgaagatggtcatcgttctcgtcgtgtgcctggctctgtcagctgccagcgcctctgcaatgcagatgccctgcccctgcgcggggctgcagggcttgtacggcgctggcgccggcctgacgacgatgatgggcgccggcgggctgtacccctacgcggagtacctgaggcagccgcagtgcagcccgctggcggcggcgccctactacgccgggtgtgggcagacgagcgccatgtaccagccgctccggcaacagtgctgccagcagcagatgaggatgatggacgtgcagtccgtcgcgcagcagctgcagatgatgatgcagcttgagcg

SEQ ID NO: 21260 - DNA, 362 bp, Zea mays
  Clone ID: LIB3152-007-P1-K1-E9
attttcagcattcagaaacacaccaagcgaagcgcactagcaacaacctaacaacaatggctaccaagatattagccctccttgcgcttcttgcccttttagtgagcgcaacaaatgcgttcattattccacagtgctcacttgctcctagtgccattattccacagttcctcccaccagttacttcaatgggcttcgaacatccagccgtgcaagcctacaggctacaactagcgcttgcggcgagcgtcttacaacaaccaattgcccaattgcaacaacaatccttggcacatctaaacctacaaaccatcgcaacgcaacagcaacaacagtttctgccatcactgagccacctagcc

SEQ ID NO: 21261 - DNA, 403 bp, Zea mays
  unsure at all n locations
  Clone ID: LIB3152-007-P1-K1-F1
cggcatttatntggcanncaaaaggtaacttgctgtaanntagggctganntgattgttggagggaacgagagggtgtataaaggtatagatgctcagctagttactctcttggtgcatttttattggcaccaaaacatctagggctacatacaaccttacacacaacttgttgctatgcaaaccgttgcttgcctacatctcatgcaacacgcacgtgttctttcctattcagaccaactatgctgcatatgaagctctgctttcttatgttgcaacaaacaactaattacctattgcagtctagctaccatgttgctctactccccagcnaattttcttccatttcaactcaacttggcagtcatttgtaacctctctctgctttaatttacccagcagca

SEQ ID NO: 21262 - DNA, 387 bp, Zea mays
  Clone ID: LIB3152-007-P1-K1-F10
ccaacaagcaacatagaaagtggaatccagtagcaacaatagagcaacaatggcgaccaagatattttccctccttatgctccttgctctttctgcatgtgttgctaacgcgacaattttccctcaatgctcacaagctcctatagcttcccttcttcccccataccttccatcaatgatagcttcagtatgtgaaaacccagctcttcaaccctataggctccaacaagcaatcgcagcaagcaacatacctttatcacccttgtttcaacaatcgccagccctatctttggtgcaggcattggtacaaaccaatagggcacagcagctgcagcaactcgtgctacctgtgatcaaccaagtagctctggcaaacctttcttccta

SEQ ID NO: 21263 - DNA, 266 bp, Zea mays
  Clone ID: LIB3152-007-P1-K1-F11
gctttcttgagacaacaacatttgttgccattttacccacaggttgtgggaaacattaatgccttcttgcaacagcaacaattgctaccattctacccacagaatgtggcaaacattgttgccttcttacaacaacaacaattgttgccatttagccaacatgctttgacgaatcctaccaccttattgcaaccgcccaccattggtggtgccatcttctagattttttatgatttatactgtaataataaagttctcatactgat

SEQ ID NO: 21264 - DNA, 383 bp, Zea mays
  Clone ID: LIB3152-007-P1-K1-F12
gcaggcacaacagctactaccatttaaccaacttgtcgggagcccttatgccttcttactgcaacaacagcttctaccattccatctgcaagctgtggcaaacattgctgctttcttgagacaacaacatttgttgccattttacccacaggttgtgggaaacattaatgccttcttgcaacagcaacaattgctaccattctacccacagaatgtggcaaacattgttgccttcttacaacaacaacaattgttgccatttagccaacatgctttgacgaatcctaccaccttattgcaaccgcccaccattggtggtgccatcttctagattttttattattacagtataaatcataaagttctcatgctgatatgtgcga

SEQ ID NO: 21265 - DNA, 386 bp, Zea mays
  Clone ID: LIB3152-007-P1-K1-F2
gaaaatgtggacaagattgttggatacgcagtgagttatcaccttaagcacaataaaattgaaacctccaactcgaaggataataaacttgtactcacaagtgaaagccttaagcatgggctcaacatgctgcaaagcatgcaaagtgataacaagagctcgaaaaaatcactgaaggatgttgtcacagagaatgaatttgagaaaaggcttttggtggatgttataccacctaatgacattggagttacctttgatgatattggagccttggagaatgtaaaggacacattaaaggagctggtgatgctccctttacaaagacctgaattgttctgcaaagggcagctaacaaagccttgcaagggaatattgcttttcggacc

SEQ ID NO: 21266 - DNA, 384 bp, Zea mays
  Clone ID: LIB3152-007-P1-K1-F3
cggacgcgtgggtttgagcattcagaaacacaccaagcgaagcgcactagcaacgacctaacaacaatggctaccaagatattagccctccttgcgcttcttgccctttttgtgagcgcaacaaatgcgttcattattccacaatgctcacttgctcctagtgccattattccacagttcctcccaccagttacttcaatgggcttcgaacacctagctgtgcaagccaacatgcaacaacaagcgcttgcggcgagcgtcttacaacaaccaattgcccaattgcaacaacaatccttgccacatctaacaatacaagccatcacaacgcaacagcaacaacagttcctaccagcactgagccacctagccatggtgaaccct

SEQ ID NO: 21267 - DNA, 384 bp, Zea mays
  unsure at all n locations
  Clone ID: LIB3152-007-P1-K1-F4
tcaggatctatctttggtagattatcccccttctcttcagagaaccaaataaatccagtatatcttagccctttacaggaacaaaggttggatactttaagacacagattgcaaatctcttttgatggctcccgtattgaacatcaagatgccttgaggcaactctggcgtttagcttatcccgctcgtgagattccaccactcaaatctgaattatggaaggagatgggttggcaaggcaacgatccatctactgatttcaggggtggtggactcatatcgttggagaacctcatcttttttgctaggaactaccctaattcatttcagatgcttctgaacaaagtacaagggcagagatcagattgggagtaccnctttgca

SEQ ID NO: 21268 - DNA, 395 bp, Zea mays
  Clone ID: LIB3152-007-P1-K1-F5
attttgagcattcagaaacacaccatgcgaagcacattagcaacaacctaacagcaatggctaccaagatattatccctccttgcgcttcttgcgctttttgcgagcgcaacaaatgcgttcattattccacaatgctcacttgctccaagttccattattacacagttcctcccaccagttacttcaatgggcttcgaacacccagctgtgcaagcctataggctacaacaagcaattgcggcgagcgtcttacaacaaccaatttcccagttgcaacaacaatccttggcacatctaacaatacaaaccatcgcaacgcaacagcaacaacaattcctaccagcactgagccacctagccatggtgaaccctgccgcctacttgcaacagcag

SEQ ID NO: 21269 - DNA, 381 bp, Zea mays
  Clone ID: LIB3152-007-P1-K1-F7
agcattcagaaacacaccaagctattcgcactagcaacaacctaacaacaatggctaccaagatattagccctccttgcgcttcttgcccttttagtgagcgcaacaaatgcgttcattattccacagtgctcacttgctcctagtgccattattccacagttcctcccaccagttacttcaatgggctttgaacatccagccgtgcaagcctacaggctacaactagcgcttgcggcgagcgtcttacaacaaccaattgcccaattgcaacaacaatccttggcacatctaaacctacaaaccatcgcaacgcaacagcaacaacagtttctgccatcactgagccacctagccgtggtgaaccctgtctcctacttgc

SEQ ID NO: 21270 - DNA, 308 bp, Zea mays
  Clone ID: LIB3152-007-P1-K1-F8
gcaacatagaaagtggaatccatttttatacaatagagcaacaatggcgaccaaggtattttccctccttatgctccttgctctttctgcatgtgttgctaacgcgacaattttccctcaatgcttacaagctcctatagcttcccttcttcccccataccttccatcaatgatagcttcagtatgtgaaaacccagctctttaaccctataggctccaacaagcaatcgcagcaagcaacatacctttatcacccttgtttcaacaatcgccagccctatctttggtgcagttattggtacaaacca

SEQ ID NO: 21271 - DNA, 357 bp, Zea mays
  Clone ID: LIB3152-007-P1-K1-F9
cattggtacaaaccatcagggttcatcagctgcagcaactcgtgctaccagtgatcagccaagtagctctggcaaacctttctccctactctcagcaacaacaatttcttccattcaaccaactgtctacactgaaccctgctgcttatttgcagcaacaacaactactaccattcagccagctagctactgcctactctcagcagcaacaatttcttccatttaaccaattcgccgcactgaacccctctgcttatttccagcagcaaatactactaccatttggccagctagctacaacaagccccgttttctttttgtcacaacaacaattgctttcgttcttccagcagtttg

SEQ ID NO: 21272 - DNA, 283 bp, Zea mays
  Clone ID: LIB3152-007-P1-K1-G1
caagatggtcctaaccacagagggctactggccgaccaagagcccgatccacactccgctggctgacggagctcgagccggatgcaggtgaagcttgcgcacctaccctatggcgctgatcacgagcagggataccatcgagaaggacgtattccacaacatcaggcacgcgttcgaggagagcctacgcgacgagggcccgctacagctgccccgagggctgacacccaggctgatcggcgtggtgacgcacgcggcctgaacctcctacagctacaagaca

SEQ ID NO: 21273 - DNA, 371 bp, Zea mays
  Clone ID: LIB3152-007-P1-K1-G10
tattattgagaccaactagcaacatataaagcacaatagtgtaccaacaatggcagccaaaatattttgcctccttatgctccttggtctttctgcaagtgctgctacggcgaccattttcccgcaatgctcgcaagctcctatagcttcccttcttcccccgtacctctcaccagcggtgtcttcggtatgtgaaaacccaattcttcaaccctacaggatccaacaggcaatcgcagctggcatcttacctttatcacccttgttcctccaacaatcatcagccctattacaacagttacctttggtgcatttattggcacaaaacatcagggcacaacaactacaacaacttgtgctagcaaaccttg

SEQ ID NO: 21274 - DNA, 109 bp, Zea mays
  Clone ID: LIB3152-007-P1-K1-G11
tattttagcgaccaaaaacattatctttgctagccccacaatcaacaaccaatgggcgccggctattttggtcttagtcttctttgcgctttttgtcctagtactgagc

SEQ ID NO: 21275 - DNA, 390 bp, Zea mays
  Clone ID: LIB3152-007-P1-K1-G12
caacaagcaacatagaaagtggaatccagtagcaacaatagagcaacaatggagaccaagatattttccctccttatgctccttgctctttctacatgtgttgctaacgcgacaattttccctcaatgctcacaagctcctatagcttccctttttcccccataccttccatcaattatagcttcagtatgtgaaaacccagctcttcaaccatataggcttcaacaagcaatcgcagcaagcaacatacctttatcgcccttgttgtgtcaacaatcgccagccctatctttggtgcagtcattggtacaaaccatcagggcacaacagctgcagcaactcgtgctacctgtgatcaaccaaagagctctggcaaacctttcttcctac

SEQ ID NO: 21276 - DNA, 390 bp, Zea mays
  Clone ID: LIB3152-007-P1-K1-G2
gcaacatacatagtgaagtacagttgcatcatcttagcaccaatggcagccaagatttttgccctccttgccctccttgctctttcagcaagtgttgctaccgcgactattattccacaatgctcacaacaatacctctctccggtgacagccgcgagatttgaatacccaactatacaatcctacaggctacaagaggccatcacagcaagcatcttacggtcgttagcattgactgtccaacaaccatatgccctattgcaacaaccatccttagtgaatctatatctccaaagaatcgcagcacaacaactacaacagcagttgcttccaacaatcaatcaagtagttgcagcgaaccttgctgcttacctccagcaacaacaattt

SEQ ID NO: 21277 - DNA, 360 bp, Zea mays
  Clone ID: LIB3152-007-P1-K1-G3
aacaattgttgccctttgtccaacttgttttgacaaacccagcagcctcctaccaacgacacatcattggtggtgccctcttttagattgcttattagttgtaattcaataataaagtttttttggatgatgtatgtggccaaccagaaataagaagttacatttccagattctaaaaaaaaaaaaaaaaaaaaaaaaaaaaaaaaaaaaaaaaaaaaaaaaaaaaaaaaaaaaaaataaaaaaaaaaaaaataaaataataaaaaataaaataaataaataaaaaaaaataaaattagggggcggccgttttaaaggatcacaacttacttccccgtgtttgcaacttattattttttt

SEQ ID NO: 21278 - DNA, 391 bp, Zea mays
  Clone ID: LIB3152-007-P1-K1-G4
ccaacaagcaacatagaaagtggaatccattagcaacaatagagcaacaatggagaccaagatattttccctccttatgctccttgctctttctacatgtgttgctaacgcgacaattttccctcaatgctcacaagctcctatagcttccctttttcccccataccttccatcaattatagcttcagtatgtgaaaacccagctcttcaaccatataggcttcaacaagcaatcgcagcaagcaacatacctttatcgcccttgttgtgtcaacaatcgccagccctatctttggtgcagtcattggtacaaaccatcagggcacaacagctgcagcaactcgtgctacctgtgatcaaccaagtagctctggcaaacctttcttcctac

SEQ ID NO: 21279 - DNA, 366 bp, Zea mays
  Clone ID: LIB3152-007-P1-K1-G5
attgagaccaactagcaacatagaatgcacaatagtgtaccaacaatggcagctaaaatattttgcctccttatgctccttggtctttctgcaagtgctgctacggcgaccattttcccacaatgctcacaagctcctatagcttcccttcttcccccgtacctctcaccaacggtgtcttcggtatgtgaaaacccaattcttcaaccctacaggatccaacaggcaatcgcagctggcatcttacctttatcacccttgttcctccaacaatcatcagccctattacagcagttacctttggtgcatttattggcacaaaacatcagggcacaacaactacaacaacttgtgctagcaaacctt

SEQ ID NO: 21280 - DNA, 305 bp, Zea mays
  Clone ID: LIB3152-007-P1-K1-G6
tggacgcgtgggcggacgcgtggtttagttttctgaaacacaccaagcgaagcgcactagcaacgacctaacaacaatggctaccaagatattagccctccttgcgcttcttgccctttttgtgagcgcaacaaatgcgttcataattccacaatgctcacttgctcctagtgccattatttcacagttccttccactagtaacttcaatgggcttttaacacctatctgtgcaagccaacatgcaacaacatgcgcttgctgtgtgcgtctaacaacaaccaaattcccaattgcaacaacaaa

SEQ ID NO: 21281 - DNA, 388 bp, Zea mays
  Clone ID: LIB3152-007-P1-K1-G7
tagaaagcacaatagtgtaccaacattggcagccaaaatattttgcttccttatgctccttggtctttctgcaagtgttgctaccgcaaccattttcccacaatgctcacaagctcctatagcttcccttcttcccccatacctctcaccagcggtgtcttcaatgtgtgaaaacccaattgttcaaccctacaggatccaacaggcaatcgcaacaggcatcttaccattatcacccttgttcctccaacaaccgtcagccctattacagcagttacctttggtccatttggtggcacaaaacatcagggcacaacaactacaacaacttgtgctagcaaaccttgctgcatactctcagcaacatcagtttctttcattcaaccaa

SEQ ID NO: 21282 - DNA, 357 bp, Zea mays
  Clone ID: LIB3152-007-P1-K1-G8
gaagtacactagcaccatcttattaccaatgggagccaggattttggccctcctggccctcctggttttttaagaagcgccggtaccttgacttttatttcacaatgcgtcacaacaatacctctcttcggcgacagcggtgggatttcaatacccaactctacactcctacatggtgcacgaggccattcaagcaagcattttacggtcattagcattaaccctccaacaaccatatgctctattgcaacagccatccttagtgcatctgtatcttcaaagaatagcggttcaacaactacaacaacagttgctaccaacaatcaatcaagtaggtggtgcggaccttgctggtta

SEQ ID NO: 21283 - DNA, 379 bp, Zea mays
  Clone ID: LIB3152-007-P1-K1-G9
gcaattagctcatcgactccagattggagaactcgacaccatgaaggtgctgatcgttgcccttgctctcctggcgctcgctgcgagcgccgcctccagtacaagcggcggctgtggctgccagacaccaccgtttcatctaccgcctccgttctatatgccgcctccgttctatctgccgccgcagcagcagccgcagccatggcaataccccactcaaccaccgcagctaagcccgtgccagcagttcggatcctgcggcgtcggcagcgtcggcagcccgttcctgggccagtgcgtcgagttcctgaggcaccagtgcagcccggcggcgacgccctacggctcgccacagtgccaggcgctgcagcaacagtgc

SEQ ID NO: 21284 - DNA, 388 bp, Zea mays
  Clone ID: LIB3152-007-P1-K1-H10
gaaagcacaatagtgtaccaacaatggcagccaaaatattttgcttccttatgctccttggtctttctgcaagtgttgctaccgcaaccattttcccacaatgctcacaagctcctatagcttcccttcttcccccatacctctcaccagcggtgtcttcaatgtgtgaaaacccaattgttcaaccctacaggatccaacaggcaatcgcaacaggcatcttaccattatcacccttgttcctccaacaaccgtcagccctattacagcagttacctttggtccatttggtggcacaaaacatcagggcacaacaactacaacaacttgtgctagcaaaccttgctgcatactctcagcaacatcagtttctttcattcaaccaact

SEQ ID NO: 21285 - DNA, 378 bp, Zea mays
  unsure at all n locations
  Clone ID: LIB3152-007-P1-K1-H11
gggggagcgacgcgnncggaaagcacaatattttacctttaattgcagccaaaatattttgcttcctggttcgtccttttctttcttcaagtgtttctaccacaaccattttcccacaatgctcacaagctcctatagcttccctttttcccccatacctctcaccatcagtgtcttcaatgtgtgaaaacccaattgttcaaccctacaggatccaacatgcaattctcaacaggcatcttaccattatcacccttgttcctccaacaaccgtcatccctatttacatcaattacctttggtccattttgttgtcacaaaacaatttgtcacaacaacttcaacaacttttgctttcaaacctttctttatactctt

SEQ ID NO: 21286 - DNA, 273 bp, Zea mays
  Clone ID: LIB3152-007-P1-K1-H2
caacaagcaacatagaaagtggaatccagtagcaacaatagagcaacaatggcgaccaagatattttccctccttatgctccttgctctttctgcatgtgttgctaacgcgacaattttccctcaatgctcacaagctcctatagcttcccttcttcccccataccttccatcaatgatagcttcagtatgtgaaaacccagctcttcaaccctataggctccaacaaagcaatcgcagcaaagccaacataccttttatcaccccttggttt

SEQ ID NO: 21287 - DNA, 355 bp, Zea mays
  Clone ID: LIB3152-007-P1-K1-H3
caacaagcaacatagaaagtggaattcattagcaacaatagagcaacaatggcgaccgagatattttccctccttatgctccttgctctttctgcatgtgttgctaacgcgacaattttccctcaatgctcacaagctcctatagcttcccttcttcccccataccttccatcaatgatagcttcagtatgtgaaaacccagctcttcaaccctataggctccaacaagcaatcgcagcaagcaacatacctttatcacccttgtttcaacaatcgccagccctatctttggtgcagtcattggtacaaaccatcagggcacagcaactgcagcaactcgtgctacctgtgatca

SEQ ID NO: 21288 - DNA, 379 bp, Zea mays
  Clone ID: LIB3152-007-P1-K1-H4
gccaacatgcaacaacaagcgcttgcggctagcgtcttacaacaaccaattgcccaattgcaacaacaatccttgccacatctaacaatacaagccatcacaacgcaacagcaacaacagttcctaccagcactgagccacctagccatggtgaaccctgccgcctacttgcaagagcagctgcttgcatccaacccacttgctctggcgaacgtagttgcaaaccagcaacaacaacagctacaacagtttctgccaacgctcagtcaactagccatggtgaaccctgccgcctacgtacaacaacaacaactgctttcatctagcccgctcgctgtgggcaatgcacctacatacctgcaacaacaattgttgcaac

SEQ ID NO: 21289 - DNA, 353 bp, Zea mays
  unsure at all n locations
  Clone ID: LIB3152-007-P1-K1-H5
cggacgcgtgggcgagcagtccnatttaaattttttaacagatgattgaangcttgccaggaataattaagtacatttctaaaaaaaaaaataaaaaataatttcttaatatattaatattttatttattattataattataatataattattaataatatttaaaaatttgttgctatatttaaattttacaattttaattatttcttttttctaatttattttttttttatatttatcactaaattaaacattttttcataatttttaaaaaaaatattctttttaaaatcttttttttttacttaatataatttacaattaatataaatttatttttttttcaatttttt

SEQ ID NO: 21290 - DNA, 333 bp, Zea mays
  Clone ID: LIB3152-007-P1-K1-H7
attccctcccctagccgccgccgtttctcgtctccctgagaggtgccgggaccgaggatttggccgagttctaggtagagaatcggttttacttgtctcagcccggggtctgctgcgtctggtggtggtgaaggggagaaattcgtgagatctgttccggatcaggcgtgcgagctcgggaatcaggggtttcacacatagcttcgtcgatttgaatttgatgtactaatggagtctaagggtggcaaaaagtctagcagtagtcgatctatgatgtatgaagcttcccttggctacagcattgaagacgttcgaccttgcggaggcgtgaag

SEQ ID NO: 21291 - DNA, 278 bp, Zea mays
  Clone ID: LIB3152-007-P1-K1-H8
gccgccggccgagcccacgggtgtatccggcatcgacgccgccgcccgtgcccggcgccggcctgggggacctcggtctcgaacctgaagggattgctgaaggttccatcgataacacagtagttgtggcaagtgagcaagattctgagattgtggttggaaaggagcaagctcgagctaaagtaacacaaagcattgtctttgtaaccggcgaagcttttccttatgcaaagtctgggggtctaggagatgtttgtggttcattgccagttgctttt

SEQ ID NO: 21292 - DNA, 90 bp, Zea mays
  Clone ID: LIB3152-008-P1-K1-A1
tttctagattcttatgtaaaaatgtactttcttatttctgggaagccacaaacatcagacaaaagaaagtacatttctagattcttatgt

SEQ ID NO: 21293 - DNA, 374 bp, Zea mays
  Clone ID: LIB3152-008-P1-K1-A10
attttgagcattcagaaacacaccatgcgaagcgcactagcaacgacctaacaacaatggctaccaagatattagccctccttgcgcttcttgccctttttgtgagcgcaacaaatgcgttcattattccacaatgctcacttgctcctagtgccattattccacagttcctcccaccagttacttcaatgggcttcgaacacctagctgtgcaagccaacatgcaacaacaagcgcttgcggcgagcgtcttacaacaaccaattgcccaattgcaacaacaattcttggcacattttacaatacaagccatcacaacgcaacagcaacaacagttcctaccagcactgagccacctagccatggtgaaccct

SEQ ID NO: 21294 - DNA, 349 bp, Zea mays
  unsure at all n locations
  Clone ID: LIB3152-008-P1-K1-A2
gaaagcgcaatatagaacgaacaatggaattcaaactattgagcctcattatgcaccaagatatttttgcaagtgatgctactgggaccatttacatggaaatgctaacacngctactatagcttcaatgcttacaagcgtaccatatgaccagctgtgtcttccatatgtgaaaacaaaatagtctaaccctacaggaaacaacacgctataaccatataggttttacctttatcacccttgttgctacaacaatcatcagccctattacatcagttacctttggtgcatttattggcacaaaacatcagggcacaacaactacaacaacttgtgctagcaaaccttg

SEQ ID NO: 21295 - DNA, 146 bp, Zea mays
  Clone ID: LIB3152-008-P1-K1-A5
caacttgctttgacaaacccaacagcgttctaccaacaacccatcattggtggtgccctcttttagattgcttatgagttatagttcaataatgaagttttttggatgatgtttgtggcttcccagaaataagaaagtacatttct

SEQ ID NO: 21296 - DNA, 370 bp, Zea mays
  Clone ID: LIB3152-008-P1-K1-A6
ggtccacctgccaccgccggtccatgtgccgccgccggttcatctgccgccggcgccatgccactaccctactcaaccgccccggcctcagcctcatccccagccacacccatgcccgtgccaacagccgcatccaagcccgtgccagctgcagggaacctgcggcgttggcagcaccccgatcctgggccagtgcgtcgagttcctgaggcatcagtgcagcccgacggcgacgccctactgctcgcctcagtgccagtcgttgcggcagcagtgttgccagcagctcaggcaggtggagccgcagcaccggtaccaggcgatcttcggcttggtcctccagtccatcctgcagcagcagccgcaaagc

SEQ ID NO: 21297 - DNA, 365 bp, Zea mays
  Clone ID: LIB3152-008-P1-K1-A7
ggggaacaaaaaggaagggttaggtgacagggagccgagcgcaagagctgaggcttcgccgcgaaaccccagacctcgcgccgccccttcccctccgcggcgtcgtcctcgcacgctctccgatccaagatgtataagctggggagaggaaaccgcgacaaggtgcagcagttcatgaccattaccggcgccagtgagaaggttgcccttcaggcactgaaagctagtgattggcacttggaaggagcttttgactttttctatagccaacctcaggtttctgtggtcaatactcggcattttgaagatattttcaacagatataaagaacctgatgctgatatgattatggtggaaggaatatc

SEQ ID NO: 21298 - DNA, 380 bp, Zea mays
  Clone ID: LIB3152-008-P1-K1-A8
cagaaacacaccaagcgaagttttttatcaacaacctaacaacaatggctaccaagatattagccctccttgcgcttcttgcccttttagtgagcgcaacaaatgcgttcattattccacagtgctcacttgctcctagtgccattattccacagttcctcccaccagttacttcaatgggcttcgaacatccagccgtgcaagcctacaggctacaactagcgcttgcggcgagcgtcttacaacaaccaattgcccaattgcaacaacaatccttggcacatctaaacctacaaaccatcgcaacgcaacagcaacaacagtttctgccatcactgagccacctagccgtggtgaaccctgtcgcctacttgcaacag

SEQ ID NO: 21299 - DNA, 348 bp, Zea mays
  Clone ID: LIB3152-008-P1-K1-A9
ccaacactctggacgaaatttaagtttacgacgcatcatccggccggcgggcggggcacggtcaccaccatggcggcgcaggagggcggcatgaggctggtgtcgcacccgatcgcggcgcacgacgggcggctgccgcggcagtacacggcggaggggcagggcgccaagaaggacatgtcgccgccgctggagtggtacggcgtgcccgagggcgcgcggtcgttggcgctgctggtgcatgacatagacgccgaccccgtcgtgccgtggacgcactgggtggtggccaacattccgtccggcaccaggggccttcccgaggggttctccggcgccgtgggggct

SEQ ID NO: 21300 - DNA, 406 bp, Zea mays
  unsure at all n locations
  Clone ID: LIB3152-008-P1-K1-B1
cgggnccgacccacgcgtnnccgagctcctatagncttcccttcttccttcgttcctctcaccagcggtgtcttcggtatgtgaaaacccaattcttcaaccctataggatccaacaggcaatcgcagctggcatcttacctttatcacccttgttcctccaacaatcatcagccctattacagcagttacctttggtgcatttattggcacaaaacatcagggcacaacaactacaacaacttgtgctagcaaaccttgctgcctactctcagcaacaacagtttcttccattcaaccaactagctgcattgaactctgcttcttatttgcaacaacaacaactaccattcagccagctatctgctgcctacccccagcaatttcttccattcaaccaactgaca

SEQ ID NO: 21301 - DNA, 358 bp, Zea mays
  Clone ID: LIB3152-008-P1-K1-B10
ggaagctataggagctagccttcttctcccgaacctcccaccagcgggggcgggggtatgtgaaaacccaatgttctaaccctacatgatccaacaggcaatcacagctggcatcttacctgtatcacccttgttcttgcaacaattatcagccctattacatcatctaccttaggtgcatttattggcacaaaacatcatggcacatcaactacaacacttgttgccctttgtccaacttgctttgacaaacccaggatttctctaccaacaacacattattggtggtgcccttttttacatagcttatgagatgtaattgattaactaagttttttgcatgatgtttgttgccaac

SEQ ID NO: 21302 - DNA, 376 bp, Zea mays
  Clone ID: LIB3152-008-P1-K1-B11
caagtagatagcagggttcatttcttttagtcgcaggcacaacagctactaccatttaaccaacttgtcgggagcccttatgccttcttactgcaacaacagcttctaccattccatctgcaagctgtggcaaacattgctgctttcttgagacaacaacatttgttgccattttacccacaggttgtgggaaacattaatgccttcttgcaacagcaacaattgctaccattctacccacagaatgtggcaaacattgttgccttcttacaacaacaacaattgttgccatttagccaacatgctttgacgaatcctaccaccttattgcaaccgcccaccattggtggtgccatcttctagattttttatgatt

SEQ ID NO: 21303 - DNA, 375 bp, Zea mays
  Clone ID: LIB3152-008-P1-K1-B12
tagcaacatacatagtgaagtacagtagcaacatcttagcaccaatggcagccaagatttttgccctccttgccctccttgctctttcagcaagtgttgctaccgcgactattattccacaatgctcacaacaatacctctctccggtgacagccgcgagatttgaatacccaactatacaatcctacaggctacaagaggccatcacagcaagcatcttacggtcgttagcattgactgtccaacaaccatatgccctattgcaacaaccatccttagtgaatctatatctccaaagaatcgcagcacaacaactacaacagcagttgcttccaacaatcaatcaagtagttgcagcgaaccttgctgcttacc

SEQ ID NO: 21304 - DNA, 381 bp, Zea mays
  Clone ID: LIB3152-008-P1-K1-B2
gatcagcaaagcggcagtgcgtatagaggatcgtcgaacagaacagcatgaagatggtcatcgttctcgtcgtgtgcctggctctgtcagctgccagcgcctctgcaatgcagatgccctgcccctgcgcggggctgcagggcttgtacggcgctggcgccggcctgacgacgatgatgggcgccggcgggctgtacccctacgcggagtacctgaggcagccgcagtgcagcccgctggcggcggcgccctactacgccgggtgtgggcagacgagcgccatgtaccagccgctccggcaacagtgctgccagcagcagatgaggatgatggacgtgcagtccgtcgcgcagcagctgcagatgatgatgcagcttgagc

SEQ ID NO: 21305 - DNA, 384 bp, Zea mays
  Clone ID: LIB3152-008-P1-K1-B3
ggaagcaggggctagacgcggatcggcgtgcatgaggggcggcggcggcggcgggatgatggacgatgaagagagggtgggccatgcggagatcccgaccagtttcggtcccgagctgcgcgcctgcctccgatgccgcctcgtcaagacctacgaccagttcagggagaacggctgcgaaaactgcccgtttctagagatggacagagagcacgacaacgtcgtcaactgcaccacccccaacttcactggaattatctctctgatggaccccagtaggagctgggcagcccgttggttgagaattggcaggttcattcctgggtgctatacacttgctgtctcggaggagcttccagaagagtatcaagggatttgtcaaga

SEQ ID NO: 21306 - DNA, 354 bp, Zea mays
  Clone ID: LIB3152-008-P1-K1-B4
caacaagcaacatagaaagtggaattcagtagcaacaatagagcaacaatggcgaccaagatattttccctccttatgctccttgctctttctgcatgtgttgctaacgcgacaattttccctcaatgctcacaagctcctatagcttcccttcttcccccataccttccatcaatgatagcttcagtatgtgaaaacccagctcttcaaccctataggctccaacaagcaatcgcagcaagcaacatacctttatcacccttgtttcaacaatcgccagccctatctttggtgcagtcattggtacaaaccatcagggcacagcagctgcagcaactcgtgctacctgtgatc

SEQ ID NO: 21307 - DNA, 379 bp, Zea mays
  Clone ID: LIB3152-008-P1-K1-B5
aaagcacaatagtgtaccaacaatggcagccaaaatattttgcctccttatgctccttggtctttctgcaagtgctgctacggcgaccattttcccgaaatgctcgcaagctcctatagcttcccttcttcccccgtacctctcaccagcggtgtcttcggtatgtgaaaacccaattcttcaaccctacaggatccaacaggcaatcacagctggcatcttacctttatcacccttgttcctccaacaatcatcagccctattacatcagttacctttggtgcatttattggcacaaaacatcagggcacaacaactacaacaacttgtgctagcaaaccttgctgcctactctcagcaacagcagtttcttccattc

SEQ ID NO: 21308 - DNA, 381 bp, Zea mays
  Clone ID: LIB3152-008-P1-K1-B6
gtcgtcggagcattactacgccaccacgctcgacgaccaggaaaccgacgacgtcggcgatggtgcaaaagggacgactgcgaaccacggctcggcggtcgtgccgccgcacgttcttgtcgcgcggcggaggaggctggtgcgcggccggacggcggcctactccatgtgcgctggcaagggaaggacgctcaaagggcgggacctccgcgacgtccggaacctcgtcctcaagatgacaggcttcatcgaggagtgaatgaatgcgtgccgtcgcatcgcatggatccagagaggaggattcttttcagcaagccaatggaagaagcacccgtagcagtctagcagaaggatgtacaactatacaagaagatgacgact

SEQ ID NO: 21309 - DNA, 377 bp, Zea mays
  Clone ID: LIB3152-008-P1-K1-B7
gcacaatagtgtaccaacaatggcttccaaaatattttgcctccttatgctccttggtatttctgcaagtgctgctacggcgaccattttcccgcaatgctcacaagctcctatagcttcccttcttcccccgtacctctcaccagcggtgtcttcggtatgtgaaaacccaattcttcaaccctacaggatccaacaggcaatcgcagctggcatcttacctttatcacccttgttcctccaacaatcatcagccctattacagcagttacctttggtgcatttattggcacaaaacatcagggcacaacaactacaacaacttgtgctagcaaaccttgctgcctactctcagcaacagcagtttcttccattca

SEQ ID NO: 21310 - DNA, 380 bp, Zea mays
  Clone ID: LIB3152-008-P1-K1-B8
tttcagcattcagaaacacattattcgaagcgcactagcaacaacctaacaacagtggctaccaagatattagccctccttgcgcttcttgcccttttagtgagcgcaacaaatgcgttcattattccacagtgctcacttgctcctagtgccattattccacagttcctcccaccagttacttcaatgggcttcgaacatccagccgtgcaagcctacaggctacaactagcgcttgcggcgagcgtcttacaacaaccaattgcccaattgcaacaacaatccttggcacatctaaacctacaaaccatcgcaacgcaacagcaacaacagtttctgccatcactgagccacctagccgtggtgaaccctgtcgccta

SEQ ID NO: 21311 - DNA, 378 bp, Zea mays
  Clone ID: LIB3152-008-P1-K1-B9
gcaacatagaaagtggaatccagtttcaacaatagagcaacaatggcgaccaagatattttccctccttatgctccttgctctttctgcatgtgttgctaacgcgacaattttccctcaatgctcacaagctcctatagcttcccttcttcccccataccttccatcaatgatagcttcagtatgtgaaaacccagctcttcaaccctataggctccaacaagcaatcgcagcaagcaacatacctttatcacccttgtttcaacaatcgccagccctatctttggtgcagtcattggtacaaaccatcagggcacagcaagccgtgcttccttcttgacacagcaacagttgctgcctttctaccagcagtttgcgg

SEQ ID NO: 21312 - DNA, 383 bp, Zea mays
  Clone ID: LIB3152-008-P1-K1-C1
caagtagcgacagctcgacaaagatttgtgagagtgatccggcgctgagaagagatggctaagatcgccgcagccgccgcggcggcggcggcgctgtgcttcgcggccctggtggccgtggccgtctgccaaggcgaggtcgagcggcagaggctcagggacctgcagtgctggcaggaggtccaggagagcccgctcgacgcgtgccgccaggtcctcgaccggcagctaaccggcggcggcgtcggcggcccgttccggtggggcaccgggctccggatgcggtgctgccagcagctccaggacgtgagccgcgagtgccgctgcgccgccatccggagcatggtcaggggctacgaggaggccatgccgcctctggagaa

SEQ ID NO: 21313 - DNA, 379 bp, Zea mays
  Clone ID: LIB3152-008-P1-K1-C11
aaacacaccaagcgaagctacctatcaacgacttaacaacaatggctaccaagatattagccctccttgcgcttcttgccctttttgtgagcgcaacaaatgcgttcattattccacaatgctcacttgctcctagtgccattataccacagttcctccgaccagttacttcaatgggcttcgaacacctagctgtgcaagcctacaggctacaacaagcgcttgcggcgagcgtcttacaacaaccaattaaccaattgcaacaacaatccttggcacatctaaccatacaaaccatcgcaacacaacagcaacaacagttcctaccagcactgagccaactagatgtggtgaaccctgtcgcctacttgcaacagca

SEQ ID NO: 21314 - DNA, 365 bp, Zea mays
  Clone ID: LIB3152-008-P1-K1-C12
ggcgcgggagcggaagaaggtttatttgacggagctggaggccaaggccaagggcctggagctccgcaatgcggagctggagcagcgggtgtccacgctccagaacgagaacaacacgctccgccagattctgaagaacacgacggcgcacgcgagcaagaggtccggcggcggcggcggcggcggcaagggcggagacggcggcaagaagcaccaccttgccaagagctagtgagaaatgagagagggagctggttcgtgccctgctcgcgctcgcctgatctgaccattgctggcgtgatgctgttcctgacgacgccttctctgtttcttcttttctcctactgataccccggggtttcgtc

SEQ ID NO: 21315 - DNA, 387 bp, Zea mays
  Clone ID: LIB3152-008-P1-K1-C2
accaaatcaaatctgcaacatcaattatctaactccaaaaaccatgaagctggtgcttgtggttcttgctttcattgctttagtatcaagtgtttcttgtacacagacaggcggctgcagctgtggtcaacaacaaagccatgagcagcaacatcatccacaacaacatcatccacaaaaacaacaacatcaaccaccaccacaacatcaccagcagcagcaacaccaacaacaacaagttcacatgcaaccacaaaaacatcagcaacaacaagaagttcatgttcaacaacaacaacaacaaccgcagcaccaacaacaacaacaacaacagcaccaacaacaacatcaatgtgaaggccaacaacaacatcaccaacaatcaca

SEQ ID NO: 21316 - DNA, 382 bp, Zea mays
  Clone ID: LIB3152-008-P1-K1-C3
cggacgcgtgggttagctttatctactccagagcgcagaagaacccgatcgacaccatgagggtgttgctcgttgccctcgctctcctggctctcgctgcgagcgccacctccacgcatacaagcggcggctgcggctgccagccaccgccgccggttcatctaccgccgccggtgcatctgccacctccggttcacctgccacctccggtgcatctcccaccgccggtccacctgccgccgccggtccacctgccaccgtcggtccatgtgccgccgccggttcatctgccgccgccaccatgccactaccctactcaaccgccccggcctcagcctcatccccagccacacccatgcccgtgccaacagccgcattcaag

SEQ ID NO: 21317 - DNA, 274 bp, Zea mays
  Clone ID: LIB3152-008-P1-K1-C4
tctcgtttcaaatccatccatcctcgtttcctccgtcccgcagcatctcaaccccatggccaagatcaagatcgggatcaatgggttcggcaggatcggaaggctggtggccagggtggccctgcagagtgacgatgtcgagctcgtcgccgtgaacgaccccttcatcagcaccgactacatgacctacatgttcaagtacgacactgtgcacggacagtggaagcaccatgaagtcaaggtgaaggacttcaaaacccttctttttggtgag

SEQ ID NO: 21318 - DNA, 382 bp, Zea mays
  Clone ID: LIB3152-008-P1-K1-C5
cagaaacacaccaagcgaagcgcactagcaacaacctaacaacaatggctaccaagatattatccctccttgcgcttcttgcgctttttgcgagcgcaacaaatgcgtccattattccacaatgctcacttgctcctagttccattattccacagttcctcccaccagttacttcaatggccttcgaacacccagctgtgcaagcctataggctacaacaagcgattgcggcgagcgtcttacaacaaccaattgcccaattgcaacaacaatccttggcacatctaacaatacaaaccatcgcaacgcaacagcaacaacagttcctaccagcactgagccacctagccatggtgaaccctgtcgcctacttgcaacagca

SEQ ID NO: 21319 - DNA, 383 bp, Zea mays
  Clone ID: LIB3152-008-P1-K1-C6
cagacacagagctcgaccccccctttctttccttcgctcgtccagccctgaccacccgcatccccgtcagtcatggcagcggcagcaggcggaggcgcggtgcgtgcgctgtcccagaaggagcaggacatacagatgatgctcgccgccgacgtccaccttggcaccaagaactgcgatttccagatggagcgctatgcctttaagcgccgcaccgacggcatctacatcatcaaccttggcaagacatgggagaaactgcagcttgcagcgagggttatcgttgccatcgagaacccgcaggacatcatcgtccagtccgcccgcccctatggccagcgtgctgtcctcaagttcgctcagtacactggcgctcatgccat

SEQ ID NO: 21320 - DNA, 380 bp, Zea mays
  Clone ID: LIB3152-008-P1-K1-C8
gaccaactagcaacatagaatgcattatagtgtaccaacaatggcagccaaaagattttgcttccttatgctccttggtctttctgcaagtgctgctaccgcaaccattttcccacaatgctcacaagctcctatagcttcctttcttcccccatacctctcaccagcggtgtcttcagtatgtgaaaacccaattcttcaaccctacaggatccaacaggcaatcgcagcaggcatcttacctttatcacccttgttcctccaacaaccgtcagccctattacagcagttacctttggtgcatttgttggcacaaaacatcaaggcacaacaactacaacaacttgtgctaggaaaccttgctgcctactctcagcaac

SEQ ID NO: 21321 - DNA, 379 bp, Zea mays
  unsure at all n locations
  Clone ID: LIB3152-008-P1-K1-D1
cgggncgtctcaaggcagaagtactaacttgcttgcgtcacgtggcaagagcgggcgggatccagacttgcccagccagcacgaacagagcgtctatgagattggcaagaaggtttggggaggaagtgctaacggtggaggaagtaccggtggtgatgggtacgagattggtggtgacagcgaagaggagcatgagtttcgagagagtgacgaggatgtggagaatggccgagatgaacgtgcccgcaagaacaggagggttatgccaatcgccatggcaaacgggaacggggctgggttgggggctgtgaatgccaatagcagagggaagtttgaaactgagaagggaaaggatgcttacccctacctttgggagact

SEQ ID NO: 21322 - DNA, 252 bp, Zea mays
  unsure at all n locations
  Clone ID: LIB3152-008-P1-K1-D10
gcnggctccctgttgaccatttgttattctgaaccatcgagccatggcgggcaagctgacttgtctccacagtcttcgcgaacgccttggtgccaccttcttcttccatcctaatgaactgatagcactcttttccaggtatgttcaccagggcaagggaatgcttcatcgctcatcagctgcttgtggtgtttgatgccctgtttgattgtgacaagtataagtatgcaccctttgttgacattttttttg

SEQ ID NO: 21323 - DNA, 159 bp, Zea mays
  unsure at all n locations
  Clone ID: LIB3152-008-P1-K1-D11
cncagatcctcaaccagcgtttgatcgtctaccgagaagcccgagcaggcgagcagcggtttcgatcaggtgagcagcgtctcggctgctgcctgcccacgcctgcctccgcggcttcgtcggccgtcgaccgagcagccgagcagcggcgcggcggct

SEQ ID NO: 21324 - DNA, 373 bp, Zea mays
  Clone ID: LIB3152-008-P1-K1-D12
gcaacatacatagtgaagtatacttgcaacatcttagcaccaatgggagccaagatttttgccctccttgccctccttgctctttcagcaagcgctgctacctcgacttttattccacaatgctcacaacaatacctctctccggcgacagccgtgggatttcaatacccaactatacaatcctacatggtacaagaggccatccaagcaagcatcttacggtcattagcattaaccctccaacaaccatatgctctattgcaacagccatccttagtgcatctgtatctccaaagaatcgcggcacaacaactacaacaacagttgctaccaacaatcaatcaagtagttgcagcgaaccttgctgcttacc

SEQ ID NO: 21325 - DNA, 145 bp, Zea mays
  Clone ID: LIB3152-008-P1-K1-D2
ctgtcttgtcgaggcagcaacccatcgttggaggtgccatcttttagattacatatgagatgtactcgataatggtgccctcattccggcatgtgtttcctagaaataatcaatatattgattgagatttatctcaatatatttc
